United States Patent Application Publication US 2005/0244851 A1 - sequence listing, part 33

SEQ ID NO: 1272954 - DNA, 25 bp, Homo sapien
aattgctttagtttccttgatgcgc

SEQ ID NO: 1272955 - DNA, 25 bp, Homo sapien
attgctttagtttccttgatgcgca

SEQ ID NO: 1272956 - DNA, 25 bp, Homo sapien
cccttgatgaccaacgctcttgttc

SEQ ID NO: 1272957 - DNA, 25 bp, Homo sapien
tcttgttcctctcgcccttgcgggc

SEQ ID NO: 1272958 - DNA, 25 bp, Homo sapien
atgaccaacgctcttgttcctctcg

SEQ ID NO: 1272959 - DNA, 25 bp, Homo sapien
ttcccttgatgaccaacgctcttgt

SEQ ID NO: 1272960 - DNA, 25 bp, Homo sapien
agaaagcgccttgaccccatcgtct

SEQ ID NO: 1272961 - DNA, 25 bp, Homo sapien
gcgccttgaccccatcgtctagtgt

SEQ ID NO: 1272962 - DNA, 25 bp, Homo sapien
gaccccatcgtctagtgtctccttg

SEQ ID NO: 1272963 - DNA, 25 bp, Homo sapien
agatggcagaaagcgccttgacccc

SEQ ID NO: 1272964 - DNA, 25 bp, Homo sapien
ctgaaggccctggtgaagtgttcct

SEQ ID NO: 1272965 - DNA, 25 bp, Homo sapien
cctggggcgctttcaccccaaggag

SEQ ID NO: 1272966 - DNA, 25 bp, Homo sapien
aaggccctggtgaagtgttcctggg

SEQ ID NO: 1272967 - DNA, 25 bp, Homo sapien
caaggagctctgagcagccggagaa

SEQ ID NO: 1272968 - DNA, 25 bp, Homo sapien
tgtgccctgatcgggaaacaatgaa

SEQ ID NO: 1272969 - DNA, 25 bp, Homo sapien
agtctgtaatttccagcggaattgc

SEQ ID NO: 1272970 - DNA, 25 bp, Homo sapien
tcgggagtcgctgttgaaagtctgt

SEQ ID NO: 1272971 - DNA, 25 bp, Homo sapien
gcggaattgctgtttagtcatcata

SEQ ID NO: 1272972 - DNA, 25 bp, Homo sapien
gcccgtaggcccctggtatatttca

SEQ ID NO: 1272973 - DNA, 25 bp, Homo sapien
catctttagtaatacgtacatcagg

SEQ ID NO: 1272974 - DNA, 25 bp, Homo sapien
tcaggaacttctgctcgtgagtaac

SEQ ID NO: 1272975 - DNA, 25 bp, Homo sapien
taacagccgggtggaattcttcctc

SEQ ID NO: 1272976 - DNA, 25 bp, Homo sapien
tatcacttgctataagccttccctc

SEQ ID NO: 1272977 - DNA, 25 bp, Homo sapien
cacttgctataagccttccctcagg

SEQ ID NO: 1272978 - DNA, 25 bp, Homo sapien
caggaaaacttccagccctgtttat

SEQ ID NO: 1272979 - DNA, 25 bp, Homo sapien
acttccagccctgtttatggaactg

SEQ ID NO: 1272980 - DNA, 25 bp, Homo sapien
atgaaagagcgcctttctgcttcat

SEQ ID NO: 1272981 - DNA, 25 bp, Homo sapien
tgcacttcgtaattcaacagcttgt

SEQ ID NO: 1272982 - DNA, 25 bp, Homo sapien
caacagcttgtaactcgcgcaaaac

SEQ ID NO: 1272983 - DNA, 25 bp, Homo sapien
aataaccttccacgtcctccttgca

SEQ ID NO: 1272984 - DNA, 25 bp, Homo sapien
aggtgcagaaccgatcacacttgcc

SEQ ID NO: 1272985 - DNA, 25 bp, Homo sapien
gcgtgtgttgacattggcagagagg

SEQ ID NO: 1272986 - DNA, 25 bp, Homo sapien
tgactgagcagatgcgtgtgttgac

SEQ ID NO: 1272987 - DNA, 25 bp, Homo sapien
gtctgatgaagggtggttgcttcct

SEQ ID NO: 1272988 - DNA, 25 bp, Homo sapien
ggctctgactcataatgagaaacag

SEQ ID NO: 1272989 - DNA, 25 bp, Homo sapien
gtttgcttggagacttgaaaggcac

SEQ ID NO: 1272990 - DNA, 25 bp, Homo sapien
gattcttccactggtcctgcgtcag

SEQ ID NO: 1272991 - DNA, 25 bp, Homo sapien
caggatacggctcagtgacaagggt

SEQ ID NO: 1272992 - DNA, 25 bp, Homo sapien
ccagggtgtgccacgtgcttttaga

SEQ ID NO: 1272993 - DNA, 25 bp, Homo sapien
tcatgaacgttcagggtcgtcaccc

SEQ ID NO: 1272994 - DNA, 25 bp, Homo sapien
acagagatcttccatgacaggtgca

SEQ ID NO: 1272995 - DNA, 25 bp, Homo sapien
tgtggccgtggcatccaatctcttc

SEQ ID NO: 1272996 - DNA, 25 bp, Homo sapien
catttggtcgtttgtcagtgaagac

SEQ ID NO: 1272997 - DNA, 25 bp, Homo sapien
tgagccgatttatagagtacatggg

SEQ ID NO: 1272998 - DNA, 25 bp, Homo sapien
tctggcactcggtgtgagcaaagcc

SEQ ID NO: 1272999 - DNA, 25 bp, Homo sapien
acagaagagtcacaatgagccgatt

SEQ ID NO: 1273000 - DNA, 25 bp, Homo sapien
tctggaacgggctgcaggctttctc

SEQ ID NO: 1273001 - DNA, 25 bp, Homo sapien
taaacttccaggactcgttctggct

SEQ ID NO: 1273002 - DNA, 25 bp, Homo sapien
tagcccacttctcgagggcagcctg

SEQ ID NO: 1273003 - DNA, 25 bp, Homo sapien
tccagcacacggaattgatgagttg

SEQ ID NO: 1273004 - DNA, 25 bp, Homo sapien
tttatccacatttgattgccacact

SEQ ID NO: 1273005 - DNA, 25 bp, Homo sapien
ttctctgttatatactaaattctga

SEQ ID NO: 1273006 - DNA, 25 bp, Homo sapien
catgaaggaagtccacctttattcc

SEQ ID NO: 1273007 - DNA, 25 bp, Homo sapien
tgattgccacactcttaattattgt

SEQ ID NO: 1273008 - DNA, 25 bp, Homo sapien
gctgaagaaaattgtctggatataa

SEQ ID NO: 1273009 - DNA, 25 bp, Homo sapien
cttttctatgcaaaggatttgagac

SEQ ID NO: 1273010 - DNA, 25 bp, Homo sapien
gatataaaggataggccttggcctg

SEQ ID NO: 1273011 - DNA, 25 bp, Homo sapien
ccttggcctgactctatttgtcggg

SEQ ID NO: 1273012 - DNA, 25 bp, Homo sapien
tagcctgtgttccttacacgtggcc

SEQ ID NO: 1273013 - DNA, 25 bp, Homo sapien
tgccaggatccttttaactcccgta

SEQ ID NO: 1273014 - DNA, 25 bp, Homo sapien
gctgctgtttaaagatcaaatctgc

SEQ ID NO: 1273015 - DNA, 25 bp, Homo sapien
ggcttcccggtagggcacttctctg

SEQ ID NO: 1273016 - DNA, 25 bp, Homo sapien
actggcgccagccttgtgcgttgac

SEQ ID NO: 1273017 - DNA, 25 bp, Homo sapien
gcaggaacccgccagcttggttgct

SEQ ID NO: 1273018 - DNA, 25 bp, Homo sapien
tgcagagggcactggcgccagcctt

SEQ ID NO: 1273019 - DNA, 25 bp, Homo sapien
ttgacaggagactgcaggaacccgc

SEQ ID NO: 1273020 - DNA, 25 bp, Homo sapien
caaattctatagagaggtgacctcc

SEQ ID NO: 1273021 - DNA, 25 bp, Homo sapien
cctcttttgactggcaaggtgacat

SEQ ID NO: 1273022 - DNA, 25 bp, Homo sapien
gagtgtcatatcagcattcatggcc

SEQ ID NO: 1273023 - DNA, 25 bp, Homo sapien
ctttcagagcgaaaggtccaatttg

SEQ ID NO: 1273024 - DNA, 25 bp, Homo sapien
tgttaaatgattggatgagcctgac

SEQ ID NO: 1273025 - DNA, 25 bp, Homo sapien
caccgtggtacctggctcgctgtgg

SEQ ID NO: 1273026 - DNA, 25 bp, Homo sapien
tgacatgttgcccaagactagaggg

SEQ ID NO: 1273027 - DNA, 25 bp, Homo sapien
tgggagttcagtcaaagctgacatg

SEQ ID NO: 1273028 - DNA, 25 bp, Homo sapien
cctggttttgaaacataactcacag

SEQ ID NO: 1273029 - DNA, 25 bp, Homo sapien
catctttgatagagcctggttttga

SEQ ID NO: 1273030 - DNA, 25 bp, Homo sapien
tggagagcaatattagtctttttgc

SEQ ID NO: 1273031 - DNA, 25 bp, Homo sapien
gtacaaataccccatcaatagtgca

SEQ ID NO: 1273032 - DNA, 25 bp, Homo sapien
ttttttattgtggtctggagcaaaa

SEQ ID NO: 1273033 - DNA, 25 bp, Homo sapien
gcagagattcatttccttcgggaag

SEQ ID NO: 1273034 - DNA, 25 bp, Homo sapien
gaatccattgtgagggatcgttatc

SEQ ID NO: 1273035 - DNA, 25 bp, Homo sapien
tggtctggagcaaaatatgtgatgg

SEQ ID NO: 1273036 - DNA, 25 bp, Homo sapien
cgtctcgtatttcaaaccgctggca

SEQ ID NO: 1273037 - DNA, 25 bp, Homo sapien
gggcttgtctgagcttcttaaccag

SEQ ID NO: 1273038 - DNA, 25 bp, Homo sapien
tgtcttcctgttgcgtcctcatcgg

SEQ ID NO: 1273039 - DNA, 25 bp, Homo sapien
tgtcagtgcccaggaaaccgtaaaa

SEQ ID NO: 1273040 - DNA, 25 bp, Homo sapien
agggcagtggccgtctgaactggca

SEQ ID NO: 1273041 - DNA, 25 bp, Homo sapien
ggccgtctgaactggcaggcagcat

SEQ ID NO: 1273042 - DNA, 25 bp, Homo sapien
cagtggccgtctgaactggcaggca

SEQ ID NO: 1273043 - DNA, 25 bp, Homo sapien
gcaagggcagtggccgtctgaactg

SEQ ID NO: 1273044 - DNA, 25 bp, Homo sapien
tgccacatttgaattccgtaataag

SEQ ID NO: 1273045 - DNA, 25 bp, Homo sapien
tccaatgtgaaatgcggcgctcttt

SEQ ID NO: 1273046 - DNA, 25 bp, Homo sapien
ccgtaataagccagtgtgattggtg

SEQ ID NO: 1273047 - DNA, 25 bp, Homo sapien
gccagcctctagtactagctatggg

SEQ ID NO: 1273048 - DNA, 25 bp, Homo sapien
ttccagtccaactttccggggcagc

SEQ ID NO: 1273049 - DNA, 25 bp, Homo sapien
gaggtttgaaagtggccgcagcttc

SEQ ID NO: 1273050 - DNA, 25 bp, Homo sapien
ttgaaagtggccgcagcttcacggt

SEQ ID NO: 1273051 - DNA, 25 bp, Homo sapien
tccagtccaactttccggggcagct

SEQ ID NO: 1273052 - DNA, 25 bp, Homo sapien
gccggtcaaaccactgcagcaatat

SEQ ID NO: 1273053 - DNA, 25 bp, Homo sapien
gctgtttgaatagcgtctctgcagg

SEQ ID NO: 1273054 - DNA, 25 bp, Homo sapien
caaatgtgcaagtactgggctcgcg

SEQ ID NO: 1273055 - DNA, 25 bp, Homo sapien
ttaacaggacacttgattttgccgg

SEQ ID NO: 1273056 - DNA, 25 bp, Homo sapien
gagagccccggggggaagagtgctg

SEQ ID NO: 1273057 - DNA, 25 bp, Homo sapien
agagccccggggggaagagtgctgc

SEQ ID NO: 1273058 - DNA, 25 bp, Homo sapien
tgttctgagaagtccctgttgccaa

SEQ ID NO: 1273059 - DNA, 25 bp, Homo sapien
tgagcttcgttccacatgcaggagc

SEQ ID NO: 1273060 - DNA, 25 bp, Homo sapien
cattgaacaggcttggaccctaccc

SEQ ID NO: 1273061 - DNA, 25 bp, Homo sapien
catggttcgtagtcagcttcgcagg

SEQ ID NO: 1273062 - DNA, 25 bp, Homo sapien
tgtgcctgcctggtatgaacagaaa

SEQ ID NO: 1273063 - DNA, 25 bp, Homo sapien
ggctttaatggatggtgctgcacct

SEQ ID NO: 1273064 - DNA, 25 bp, Homo sapien
tgaccgtgagccttccgatgtgcct

SEQ ID NO: 1273065 - DNA, 25 bp, Homo sapien
gctgcacctgttgtcatggccactg

SEQ ID NO: 1273066 - DNA, 25 bp, Homo sapien
tcggatgggacgtagttaatagccc

SEQ ID NO: 1273067 - DNA, 25 bp, Homo sapien
gcagggccctaacgctctgttgtta

SEQ ID NO: 1273068 - DNA, 25 bp, Homo sapien
tgagacgaccctggagagatcctcc

SEQ ID NO: 1273069 - DNA, 25 bp, Homo sapien
ctttggccctggtgaacgtcctggc

SEQ ID NO: 1273070 - DNA, 25 bp, Homo sapien
tgtcacacacgtcagcgtgttccct

SEQ ID NO: 1273071 - DNA, 25 bp, Homo sapien
gtgtgaacacgaccctgtcccctgg

SEQ ID NO: 1273072 - DNA, 25 bp, Homo sapien
gcgtgttcccttagcactgtgtgaa

SEQ ID NO: 1273073 - DNA, 25 bp, Homo sapien
ttagcactgtgtgaacacgaccctg

SEQ ID NO: 1273074 - DNA, 25 bp, Homo sapien
aaagaatggagtggctccctggcag

SEQ ID NO: 1273075 - DNA, 25 bp, Homo sapien
ctgggagatggcaaaaaagaatgga

SEQ ID NO: 1273076 - DNA, 25 bp, Homo sapien
gatggcaaaaaagaatggagtggct

SEQ ID NO: 1273077 - DNA, 25 bp, Homo sapien
gcaaaaaagaatggagtggctccct

SEQ ID NO: 1273078 - DNA, 25 bp, Homo sapien
gcttctctaggaggtgactaaaggc

SEQ ID NO: 1273079 - DNA, 25 bp, Homo sapien
tctctaggaggtgactaaaggcctt

SEQ ID NO: 1273080 - DNA, 25 bp, Homo sapien
ttctctaggaggtgactaaaggcct

SEQ ID NO: 1273081 - DNA, 25 bp, Homo sapien
cttctctaggaggtgactaaaggcc

SEQ ID NO: 1273082 - DNA, 25 bp, Homo sapien
agagccgcctacgggaaaggaagag

SEQ ID NO: 1273083 - DNA, 25 bp, Homo sapien
cagagccgcctacgggaaaggaaga

SEQ ID NO: 1273084 - DNA, 25 bp, Homo sapien
gagccgcctacgggaaaggaagagc

SEQ ID NO: 1273085 - DNA, 25 bp, Homo sapien
tccagattgctttggctccagagga

SEQ ID NO: 1273086 - DNA, 25 bp, Homo sapien
actctggacagaggttaaatggtga

SEQ ID NO: 1273087 - DNA, 25 bp, Homo sapien
taagtaaatcttgtccagtctccag

SEQ ID NO: 1273088 - DNA, 25 bp, Homo sapien
agggctatgccaagtgggcaatgtc

SEQ ID NO: 1273089 - DNA, 25 bp, Homo sapien
gtgctgcttggttttagaagggagc

SEQ ID NO: 1273090 - DNA, 25 bp, Homo sapien
tgccaggcatgttcacgaggtgctg

SEQ ID NO: 1273091 - DNA, 25 bp, Homo sapien
atgtaggtgaccaaggccatcgcag

SEQ ID NO: 1273092 - DNA, 25 bp, Homo sapien
gatgcccgtgccagcctgcaggtct

SEQ ID NO: 1273093 - DNA, 25 bp, Homo sapien
gccaccccttggtgcctgtctgctc

SEQ ID NO: 1273094 - DNA, 25 bp, Homo sapien
tctgctcagcgccagccaggtgttc

SEQ ID NO: 1273095 - DNA, 25 bp, Homo sapien
cctttgccaccccttggtgcctgtc

SEQ ID NO: 1273096 - DNA, 25 bp, Homo sapien
cctgtctgctcagcgccagccaggt

SEQ ID NO: 1273097 - DNA, 25 bp, Homo sapien
ggaccacttgatgacgtccccacag

SEQ ID NO: 1273098 - DNA, 25 bp, Homo sapien
gcttgcaggcgctttaatgccttca

SEQ ID NO: 1273099 - DNA, 25 bp, Homo sapien
cctgaagcttgcaggcgctttaatg

SEQ ID NO: 1273100 - DNA, 25 bp, Homo sapien
ttgagtgtggaccacttgatgacgt

SEQ ID NO: 1273101 - DNA, 25 bp, Homo sapien
tcctctggataaggagccagctgct

SEQ ID NO: 1273102 - DNA, 25 bp, Homo sapien
tcagtcatttcgaagcctccctggg

SEQ ID NO: 1273103 - DNA, 25 bp, Homo sapien
cctggttttctaagctattatcttg

SEQ ID NO: 1273104 - DNA, 25 bp, Homo sapien
ttcagaacaggtcctcacactcttt

SEQ ID NO: 1273105 - DNA, 25 bp, Homo sapien
tgccacctcattggtggtaccaggt

SEQ ID NO: 1273106 - DNA, 25 bp, Homo sapien
caggaggccgttctcctggggttgg

SEQ ID NO: 1273107 - DNA, 25 bp, Homo sapien
tgttgccacctcattggtggtacca

SEQ ID NO: 1273108 - DNA, 25 bp, Homo sapien
ggtaccaggtgggtccgtgatggag

SEQ ID NO: 1273109 - DNA, 25 bp, Homo sapien
tctaaccttgtgatgacagttaaga

SEQ ID NO: 1273110 - DNA, 25 bp, Homo sapien
accttgtgatgacagttaagaaatc

SEQ ID NO: 1273111 - DNA, 25 bp, Homo sapien
tgatgacagttaagaaatcttcagg

SEQ ID NO: 1273112 - DNA, 25 bp, Homo sapien
aattcttctaaccttgtgatgacag

SEQ ID NO: 1273113 - DNA, 25 bp, Homo sapien
gtgaaggtgtggtccccggatccca

SEQ ID NO: 1273114 - DNA, 25 bp, Homo sapien
tggaagctgcggtctggtcctgcct

SEQ ID NO: 1273115 - DNA, 25 bp, Homo sapien
aagctgcggtctggtcctgcctgct

SEQ ID NO: 1273116 - DNA, 25 bp, Homo sapien
aaggtgtggtccccggatcccagca

SEQ ID NO: 1273117 - DNA, 25 bp, Homo sapien
ttccttgtggagttttctacttctg

SEQ ID NO: 1273118 - DNA, 25 bp, Homo sapien
ttgtggagttttctacttctgttgt

SEQ ID NO: 1273119 - DNA, 25 bp, Homo sapien
ccttgtggagttttctacttctgtt

SEQ ID NO: 1273120 - DNA, 25 bp, Homo sapien
tccttgtggagttttctacttctgt

SEQ ID NO: 1273121 - DNA, 25 bp, Homo sapien
cattaagtgtctgctgtacgcaccg

SEQ ID NO: 1273122 - DNA, 25 bp, Homo sapien
gactgtctgtatctcattggcctga

SEQ ID NO: 1273123 - DNA, 25 bp, Homo sapien
aagtgaaaatgcagagccgaggcca

SEQ ID NO: 1273124 - DNA, 25 bp, Homo sapien
tatcagaaagatactcagacagagc

SEQ ID NO: 1273125 - DNA, 25 bp, Homo sapien
gattaatcaaatttcctgtgatgag

SEQ ID NO: 1273126 - DNA, 25 bp, Homo sapien
ttatgctcagcgctcagcaaggctg

SEQ ID NO: 1273127 - DNA, 25 bp, Homo sapien
tcatctgcatcaaagtgagatccct

SEQ ID NO: 1273128 - DNA, 25 bp, Homo sapien
agcaaggctgtggtgattaagcact

SEQ ID NO: 1273129 - DNA, 25 bp, Homo sapien
tccctcctctccttccctgggcaaa

SEQ ID NO: 1273130 - DNA, 25 bp, Homo sapien
ccctcctctccttccctgggcaaat

SEQ ID NO: 1273131 - DNA, 25 bp, Homo sapien
cctcctctccttccctgggcaaatt

SEQ ID NO: 1273132 - DNA, 25 bp, Homo sapien
ctccctcctctccttccctgggcaa

SEQ ID NO: 1273133 - DNA, 25 bp, Homo sapien
gcccagcagggatgcggcccccttg

SEQ ID NO: 1273134 - DNA, 25 bp, Homo sapien
ggactgcaggcaccaacttggaggc

SEQ ID NO: 1273135 - DNA, 25 bp, Homo sapien
actgcaggcaccaacttggaggcca

SEQ ID NO: 1273136 - DNA, 25 bp, Homo sapien
caggcaccaacttggaggccaccat

SEQ ID NO: 1273137 - DNA, 25 bp, Homo sapien
tcgttaaagtggcacgcatccagcc

SEQ ID NO: 1273138 - DNA, 25 bp, Homo sapien
ccatgacctagacgagggtgggaca

SEQ ID NO: 1273139 - DNA, 25 bp, Homo sapien
ctttcagcggttacgggagggcact

SEQ ID NO: 1273140 - DNA, 25 bp, Homo sapien
tgcatctcgttctccaggtgtcgga

SEQ ID NO: 1273141 - DNA, 25 bp, Homo sapien
ttttcctgagagattagtgtacttg

SEQ ID NO: 1273142 - DNA, 25 bp, Homo sapien
gtgtacttgcctgccaagatgttag

SEQ ID NO: 1273143 - DNA, 25 bp, Homo sapien
gagattagtgtacttgcctgccaag

SEQ ID NO: 1273144 - DNA, 25 bp, Homo sapien
tgagagattagtgtacttgcctgcc

SEQ ID NO: 1273145 - DNA, 25 bp, Homo sapien
tttgtagaggaaacacctaatacac

SEQ ID NO: 1273146 - DNA, 25 bp, Homo sapien
tcttgctgccagatctcaaaaggct

SEQ ID NO: 1273147 - DNA, 25 bp, Homo sapien
tggagctggcggctttcctggtccc

SEQ ID NO: 1273148 - DNA, 25 bp, Homo sapien
gaatctggccaggtgtttcccgtgg

SEQ ID NO: 1273149 - DNA, 25 bp, Homo sapien
cctgctcttgtggccttggaagggt

SEQ ID NO: 1273150 - DNA, 25 bp, Homo sapien
cggcagagcttatctggccctggca

SEQ ID NO: 1273151 - DNA, 25 bp, Homo sapien
cagagcttatctggccctggcagct

SEQ ID NO: 1273152 - DNA, 25 bp, Homo sapien
tgctcttgtggccttggaagggttc

SEQ ID NO: 1273153 - DNA, 25 bp, Homo sapien
gaacagcatcactgaataaacagtc

SEQ ID NO: 1273154 - DNA, 25 bp, Homo sapien
acagagcggctgagacttcagagga

SEQ ID NO: 1273155 - DNA, 25 bp, Homo sapien
tggtccacagagcggctgagacttc

SEQ ID NO: 1273156 - DNA, 25 bp, Homo sapien
cactgaataaacagtccttccatgc

SEQ ID NO: 1273157 - DNA, 25 bp, Homo sapien
acgttcgggccgaggggagctgagg

SEQ ID NO: 1273158 - DNA, 25 bp, Homo sapien
ctttgtctggcatgtcctcggcggc

SEQ ID NO: 1273159 - DNA, 25 bp, Homo sapien
ctgaggccacggcggggactcctca

SEQ ID NO: 1273160 - DNA, 25 bp, Homo sapien
agggtcacagcagtggacgttcggg

SEQ ID NO: 1273161 - DNA, 25 bp, Homo sapien
ctcatccttattcccccgattggtg

SEQ ID NO: 1273162 - DNA, 25 bp, Homo sapien
gcaggaagctgaccgtatttgacct

SEQ ID NO: 1273163 - DNA, 25 bp, Homo sapien
ttggtgcccacagaacctgtgcttg

SEQ ID NO: 1273164 - DNA, 25 bp, Homo sapien
ctcattttcttccgggttgaccttg

SEQ ID NO: 1273165 - DNA, 25 bp, Homo sapien
tcattccccggagaagcacccagag

SEQ ID NO: 1273166 - DNA, 25 bp, Homo sapien
cccggagaagcacccagagagatgt

SEQ ID NO: 1273167 - DNA, 25 bp, Homo sapien
ctccacttgccagccgatcactggg

SEQ ID NO: 1273168 - DNA, 25 bp, Homo sapien
cacccagagagatgtagctgccata

SEQ ID NO: 1273169 - DNA, 25 bp, Homo sapien
aggactgctcacagggaccctgaag

SEQ ID NO: 1273170 - DNA, 25 bp, Homo sapien
ctcgacatgcaattgcagacataca

SEQ ID NO: 1273171 - DNA, 25 bp, Homo sapien
aaccacaggcgaagtgtggtgatga

SEQ ID NO: 1273172 - DNA, 25 bp, Homo sapien
gagagcctccacactcgacatgcaa

SEQ ID NO: 1273173 - DNA, 25 bp, Homo sapien
ctgcagcctccatcctagctgccat

SEQ ID NO: 1273174 - DNA, 25 bp, Homo sapien
cacccaggtgcagacagtgtgtcct

SEQ ID NO: 1273175 - DNA, 25 bp, Homo sapien
cctgcagcctccatcctagctgcca

SEQ ID NO: 1273176 - DNA, 25 bp, Homo sapien
agtgtgtcctggatcccagcccctg

SEQ ID NO: 1273177 - DNA, 25 bp, Homo sapien
taaatcctgcaaggtttgctccacg

SEQ ID NO: 1273178 - DNA, 25 bp, Homo sapien
tggttgtctccgctggctccagata

SEQ ID NO: 1273179 - DNA, 25 bp, Homo sapien
catggtgtccgtcattctgtgcagg

SEQ ID NO: 1273180 - DNA, 25 bp, Homo sapien
cttgacggcttgacgcatggtgtcc

SEQ ID NO: 1273181 - DNA, 25 bp, Homo sapien
ttgtgatagcctcaaaccccggctg

SEQ ID NO: 1273182 - DNA, 25 bp, Homo sapien
aatgctgccaagataaactgttgtg

SEQ ID NO: 1273183 - DNA, 25 bp, Homo sapien
ctcccgaggcccctccatcaatgct

SEQ ID NO: 1273184 - DNA, 25 bp, Homo sapien
tcttgtttgatcagcctccctcttg

SEQ ID NO: 1273185 - DNA, 25 bp, Homo sapien
cctgcggcacattcggtaggctggg

SEQ ID NO: 1273186 - DNA, 25 bp, Homo sapien
cctggcaccttgcagtagtgttgcc

SEQ ID NO: 1273187 - DNA, 25 bp, Homo sapien
accttgcagtagtgttgcccgcttc

SEQ ID NO: 1273188 - DNA, 25 bp, Homo sapien
agtgcgcctcccctgcggcacattc

SEQ ID NO: 1273189 - DNA, 25 bp, Homo sapien
ttcctctgtggttgaattggccatc

SEQ ID NO: 1273190 - DNA, 25 bp, Homo sapien
tcagatgaacgatgggtgccaggct

SEQ ID NO: 1273191 - DNA, 25 bp, Homo sapien
tggggacagccaaatccgtcaagcc

SEQ ID NO: 1273192 - DNA, 25 bp, Homo sapien
cacttgcttttattggttctcctag

SEQ ID NO: 1273193 - DNA, 25 bp, Homo sapien
cttgacccctgaaagccctggctcc

SEQ ID NO: 1273194 - DNA, 25 bp, Homo sapien
tgacccctgaaagccctggctccat

SEQ ID NO: 1273195 - DNA, 25 bp, Homo sapien
ccctgaaagccctggctccatctgc

SEQ ID NO: 1273196 - DNA, 25 bp, Homo sapien
tccatctgcatccacttaacctcca

SEQ ID NO: 1273197 - DNA, 25 bp, Homo sapien
ccctggagttgcataagaggaagca

SEQ ID NO: 1273198 - DNA, 25 bp, Homo sapien
catggtggagccttgccagacactt

SEQ ID NO: 1273199 - DNA, 25 bp, Homo sapien
agcatgcactaagtactgggtgtac

SEQ ID NO: 1273200 - DNA, 25 bp, Homo sapien
tagtgtagccacactcccagaggaa

SEQ ID NO: 1273201 - DNA, 25 bp, Homo sapien
tactcttttcccagcggttggccgc

SEQ ID NO: 1273202 - DNA, 25 bp, Homo sapien
catcttgtacgagggctaggtcagc

SEQ ID NO: 1273203 - DNA, 25 bp, Homo sapien
tcatattagtggaagcgctgctgcc

SEQ ID NO: 1273204 - DNA, 25 bp, Homo sapien
ctaggtcagcattggagtgggccct

SEQ ID NO: 1273205 - DNA, 25 bp, Homo sapien
ctttcgaggagccagcatcctgctt

SEQ ID NO: 1273206 - DNA, 25 bp, Homo sapien
agtggccagtgtgaccatcctgcct

SEQ ID NO: 1273207 - DNA, 25 bp, Homo sapien
tcccagtggccagtgtgaccatcct

SEQ ID NO: 1273208 - DNA, 25 bp, Homo sapien
cttcccagtggccagtgtgaccatc

SEQ ID NO: 1273209 - DNA, 25 bp, Homo sapien
tcacctggtcaacatggactcggca

SEQ ID NO: 1273210 - DNA, 25 bp, Homo sapien
tcaattgtgcacgtcctaaccagtc

SEQ ID NO: 1273211 - DNA, 25 bp, Homo sapien
gacaggacaaatggccgttctttct

SEQ ID NO: 1273212 - DNA, 25 bp, Homo sapien
catctaacggcctacagggcagctt

SEQ ID NO: 1273213 - DNA, 25 bp, Homo sapien
cagaaaatattgtgcagagctccag

SEQ ID NO: 1273214 - DNA, 25 bp, Homo sapien
tcactggaaggacgcagaactcatc

SEQ ID NO: 1273215 - DNA, 25 bp, Homo sapien
tacccatggagtactgccaaccagg

SEQ ID NO: 1273216 - DNA, 25 bp, Homo sapien
tcggtcaagtgtcctcccaatggct

SEQ ID NO: 1273217 - DNA, 25 bp, Homo sapien
gatttccgggttctatcccctgagc

SEQ ID NO: 1273218 - DNA, 25 bp, Homo sapien
caggccctgggctatctatttaagt

SEQ ID NO: 1273219 - DNA, 25 bp, Homo sapien
cccattctattgacgaggagcctga

SEQ ID NO: 1273220 - DNA, 25 bp, Homo sapien
tgaatcttagaggagtcaagtgact

SEQ ID NO: 1273221 - DNA, 25 bp, Homo sapien
tgaatgctgttctcgccaggatccc

SEQ ID NO: 1273222 - DNA, 25 bp, Homo sapien
gactttacagactcacccctggctt

SEQ ID NO: 1273223 - DNA, 25 bp, Homo sapien
aaggagcttgccatacaggtagttc

SEQ ID NO: 1273224 - DNA, 25 bp, Homo sapien
gccaaccattgtgatctgcaaggaa

SEQ ID NO: 1273225 - DNA, 25 bp, Homo sapien
caactacaattgctagggagggccc

SEQ ID NO: 1273226 - DNA, 25 bp, Homo sapien
ccccagggatagcaaccagagatat

SEQ ID NO: 1273227 - DNA, 25 bp, Homo sapien
aagcttgcacaattgccagggccgg

SEQ ID NO: 1273228 - DNA, 25 bp, Homo sapien
taacttcaaagggtacaggccagtg

SEQ ID NO: 1273229 - DNA, 25 bp, Homo sapien
caagtaccccgttttggcaaagctg

SEQ ID NO: 1273230 - DNA, 25 bp, Homo sapien
tcccgagcctatgtgtccctgatga

SEQ ID NO: 1273231 - DNA, 25 bp, Homo sapien
cagtgcccaggtcgagattaaaaca

SEQ ID NO: 1273232 - DNA, 25 bp, Homo sapien
taactcccgcaccatagatatgaag

SEQ ID NO: 1273233 - DNA, 25 bp, Homo sapien
tccgggtgacgtcgcatcctccgat

SEQ ID NO: 1273234 - DNA, 25 bp, Homo sapien
ctccgattggaccacgcggcctggg

SEQ ID NO: 1273235 - DNA, 25 bp, Homo sapien
gacgtcgcatcctccgattggacca

SEQ ID NO: 1273236 - DNA, 25 bp, Homo sapien
ggtctggtccggtgagctcaccgcc

SEQ ID NO: 1273237 - DNA, 25 bp, Homo sapien
tgcagactggcgaccagagagcact

SEQ ID NO: 1273238 - DNA, 25 bp, Homo sapien
cgtgcacagggcagtcctgaaagtg

SEQ ID NO: 1273239 - DNA, 25 bp, Homo sapien
cccttttgcattttcggagctctgg

SEQ ID NO: 1273240 - DNA, 25 bp, Homo sapien
taggtattgcgcctctttagaggtg

SEQ ID NO: 1273241 - DNA, 25 bp, Homo sapien
tcaaagagcccctgaacagaaagcg

SEQ ID NO: 1273242 - DNA, 25 bp, Homo sapien
acagaaagcgcaagaattgttgtta

SEQ ID NO: 1273243 - DNA, 25 bp, Homo sapien
catatcagcataggggatattgccc

SEQ ID NO: 1273244 - DNA, 25 bp, Homo sapien
gatattgcccggtgagcaccgcagc

SEQ ID NO: 1273245 - DNA, 25 bp, Homo sapien
tacgttcagccccatttgggactca

SEQ ID NO: 1273246 - DNA, 25 bp, Homo sapien
tgtttgctacgttcagccccatttg

SEQ ID NO: 1273247 - DNA, 25 bp, Homo sapien
ttgctttgtttgctacgttcagccc

SEQ ID NO: 1273248 - DNA, 25 bp, Homo sapien
ttgctacgttcagccccatttggga

SEQ ID NO: 1273249 - DNA, 25 bp, Homo sapien
tgtgcttcatgccaattagctgcag

SEQ ID NO: 1273250 - DNA, 25 bp, Homo sapien
ctctttaaaggtgggtgcagaatct

SEQ ID NO: 1273251 - DNA, 25 bp, Homo sapien
gcagaatctgtatgggagttccaaa

SEQ ID NO: 1273252 - DNA, 25 bp, Homo sapien
tcactgtgcactgaaactgttgagg

SEQ ID NO: 1273253 - DNA, 25 bp, Homo sapien
agaaaattgaggtgcaaagtgggaa

SEQ ID NO: 1273254 - DNA, 25 bp, Homo sapien
gaaaattgaggtgcaaagtgggaat

SEQ ID NO: 1273255 - DNA, 25 bp, Homo sapien
aaaaagatcgcatgtattagtttat

SEQ ID NO: 1273256 - DNA, 25 bp, Homo sapien
gagaaaattgaggtgcaaagtggga

SEQ ID NO: 1273257 - DNA, 25 bp, Homo sapien
tctcccgatggagtagttcagctgc

SEQ ID NO: 1273258 - DNA, 25 bp, Homo sapien
tgtgttactagaaacaggcctctgt

SEQ ID NO: 1273259 - DNA, 25 bp, Homo sapien
ccggtgcgacggatatagcctaata

SEQ ID NO: 1273260 - DNA, 25 bp, Homo sapien
aaccgccaggcaggaagtggagcta

SEQ ID NO: 1273261 - DNA, 25 bp, Homo sapien
tatccgagaacttcgggctgctgaa

SEQ ID NO: 1273262 - DNA, 25 bp, Homo sapien
gatgtccatcctggaacgactggag

SEQ ID NO: 1273263 - DNA, 25 bp, Homo sapien
gatctcatgtcagggtttccgttgg

SEQ ID NO: 1273264 - DNA, 25 bp, Homo sapien
tggcgaggccacgtgttgactgctt

SEQ ID NO: 1273265 - DNA, 25 bp, Homo sapien
caagggcccatccatggttaggcca

SEQ ID NO: 1273266 - DNA, 25 bp, Homo sapien
ttttccggcacagaacaatgctgat

SEQ ID NO: 1273267 - DNA, 25 bp, Homo sapien
caaagttcctaaagcaccttcatag

SEQ ID NO: 1273268 - DNA, 25 bp, Homo sapien
tcatagaagagtttcagaagcgtag

SEQ ID NO: 1273269 - DNA, 25 bp, Homo sapien
tcagttcagagggagtggtaatacc

SEQ ID NO: 1273270 - DNA, 25 bp, Homo sapien
tcacaggagtttcttttgccgtcaa

SEQ ID NO: 1273271 - DNA, 25 bp, Homo sapien
tagagcgctcgatgtagagcaaagc

SEQ ID NO: 1273272 - DNA, 25 bp, Homo sapien
tcactatagagttatcgcctgctgt

SEQ ID NO: 1273273 - DNA, 25 bp, Homo sapien
taagaattggtaacgcatgtagcct

SEQ ID NO: 1273274 - DNA, 25 bp, Homo sapien
tcagtgtggtgctgcgttctggcca

SEQ ID NO: 1273275 - DNA, 25 bp, Homo sapien
ggacatttgccacctaaacgatcag

SEQ ID NO: 1273276 - DNA, 25 bp, Homo sapien
caccttccaagaacctgcgagggta

SEQ ID NO: 1273277 - DNA, 25 bp, Homo sapien
tgaatcagtatgtagcttaacacca

SEQ ID NO: 1273278 - DNA, 25 bp, Homo sapien
tgtgaatgctaatactgcttaagaa

SEQ ID NO: 1273279 - DNA, 25 bp, Homo sapien
gacggcatggtatattactatttcc

SEQ ID NO: 1273280 - DNA, 25 bp, Homo sapien
actccaacaaagaacacttagaatg

SEQ ID NO: 1273281 - DNA, 25 bp, Homo sapien
aaaatgacagatggtagagacttcc

SEQ ID NO: 1273282 - DNA, 25 bp, Homo sapien
tataagatgataggtaagcgcagct

SEQ ID NO: 1273283 - DNA, 25 bp, Homo sapien
caactgtgaatcctaggcaaggcaa

SEQ ID NO: 1273284 - DNA, 25 bp, Homo sapien
tgaattcccaagtgccaggagtagg

SEQ ID NO: 1273285 - DNA, 25 bp, Homo sapien
ggcagctcgcgctgggaccgccata

SEQ ID NO: 1273286 - DNA, 25 bp, Homo sapien
tgggaccgccatactgcccagttgc

SEQ ID NO: 1273287 - DNA, 25 bp, Homo sapien
aatgtgagtgacgctacgcgacgcg

SEQ ID NO: 1273288 - DNA, 25 bp, Homo sapien
ttgggtcgcgggctgcagacgggcc

SEQ ID NO: 1273289 - DNA, 25 bp, Homo sapien
attcttgagctagaggacctccatc

SEQ ID NO: 1273290 - DNA, 25 bp, Homo sapien
taaaagccgtcactgtccgacaaat

SEQ ID NO: 1273291 - DNA, 25 bp, Homo sapien
taattgtccagcctgagcaagcctc

SEQ ID NO: 1273292 - DNA, 25 bp, Homo sapien
tagattgctcaagccaagaccagtt

SEQ ID NO: 1273293 - DNA, 25 bp, Homo sapien
tgtagcctcaagtaagaccacctgt

SEQ ID NO: 1273294 - DNA, 25 bp, Homo sapien
tatgcactccaaattagaaggccgg

SEQ ID NO: 1273295 - DNA, 25 bp, Homo sapien
tcaggatccacagcttaaagatggg

SEQ ID NO: 1273296 - DNA, 25 bp, Homo sapien
tgtgcacttagctgggaacttaccc

SEQ ID NO: 1273297 - DNA, 25 bp, Homo sapien
tctctggcagtactaaagagcccct

SEQ ID NO: 1273298 - DNA, 25 bp, Homo sapien
gagcccctcaggattggtagtcaca

SEQ ID NO: 1273299 - DNA, 25 bp, Homo sapien
cacacctttacgtgctggcgagaga

SEQ ID NO: 1273300 - DNA, 25 bp, Homo sapien
gatggagcacctgacctcatgcaag

SEQ ID NO: 1273301 - DNA, 25 bp, Homo sapien
gaccaaatcatcattcaagccagtg

SEQ ID NO: 1273302 - DNA, 25 bp, Homo sapien
gacacgcacagaaccgaatggtggt

SEQ ID NO: 1273303 - DNA, 25 bp, Homo sapien
gcaggtctatgccagtgtgaacaaa

SEQ ID NO: 1273304 - DNA, 25 bp, Homo sapien
gggtcagcagctctacattgagtca

SEQ ID NO: 1273305 - DNA, 25 bp, Homo sapien
tgtgcttctcagagaacatcacttc

SEQ ID NO: 1273306 - DNA, 25 bp, Homo sapien
ccttgaaggggacaaacgctgtgtc

SEQ ID NO: 1273307 - DNA, 25 bp, Homo sapien
cttccttgaaggggacaaacgctgt

SEQ ID NO: 1273308 - DNA, 25 bp, Homo sapien
caggttcagtgtctagcgagggcca

SEQ ID NO: 1273309 - DNA, 25 bp, Homo sapien
cacaagcggaagaagctgccggagc

SEQ ID NO: 1273310 - DNA, 25 bp, Homo sapien
agcagctcgaacaccggctctggtc

SEQ ID NO: 1273311 - DNA, 25 bp, Homo sapien
ttctacttccaagcagacgcggtcg

SEQ ID NO: 1273312 - DNA, 25 bp, Homo sapien
tatccttccaggagattctacttcc

SEQ ID NO: 1273313 - DNA, 25 bp, Homo sapien
aagagattggatggcctctaaagag

SEQ ID NO: 1273314 - DNA, 25 bp, Homo sapien
aagacagctgttgagtgactgtgag

SEQ ID NO: 1273315 - DNA, 25 bp, Homo sapien
ccagttaggctctttttgtagttga

SEQ ID NO: 1273316 - DNA, 25 bp, Homo sapien
gacgtgttacacagacagacctttt

SEQ ID NO: 1273317 - DNA, 25 bp, Homo sapien
aaatcgatccgcttaccatgggcct

SEQ ID NO: 1273318 - DNA, 25 bp, Homo sapien
catactgtccattagcatatctggg

SEQ ID NO: 1273319 - DNA, 25 bp, Homo sapien
caatttatacaaaagaggtcgctcc

SEQ ID NO: 1273320 - DNA, 25 bp, Homo sapien
tgaaagagcttcttacccagtgctg

SEQ ID NO: 1273321 - DNA, 25 bp, Homo sapien
aaaattcgtaagccaggctctttct

SEQ ID NO: 1273322 - DNA, 25 bp, Homo sapien
aaattcgtaagccaggctctttctt

SEQ ID NO: 1273323 - DNA, 25 bp, Homo sapien
aattcgtaagccaggctctttcttc

SEQ ID NO: 1273324 - DNA, 25 bp, Homo sapien
attttccaggtaacaatgaacaggg

SEQ ID NO: 1273325 - DNA, 25 bp, Homo sapien
gtagtttgcctagtttttctccaca

SEQ ID NO: 1273326 - DNA, 25 bp, Homo sapien
ctaagatgggtgtttctgagctgac

SEQ ID NO: 1273327 - DNA, 25 bp, Homo sapien
gctgactaacagatgcttatttcac

SEQ ID NO: 1273328 - DNA, 25 bp, Homo sapien
gacacagtatttccagaagcaatca

SEQ ID NO: 1273329 - DNA, 25 bp, Homo sapien
tttccagaagcaatcaggagtctca

SEQ ID NO: 1273330 - DNA, 25 bp, Homo sapien
tcagacacagtatttccagaagcaa

SEQ ID NO: 1273331 - DNA, 25 bp, Homo sapien
atttccagaagcaatcaggagtctc

SEQ ID NO: 1273332 - DNA, 25 bp, Homo sapien
gatgactcagtaaaatgttaggatc

SEQ ID NO: 1273333 - DNA, 25 bp, Homo sapien
aatgttaggatcttgtccagagaaa

SEQ ID NO: 1273334 - DNA, 25 bp, Homo sapien
gtaaaatgttaggatcttgtccaga

SEQ ID NO: 1273335 - DNA, 25 bp, Homo sapien
ggccaaaagatgactcagtaaaatg

SEQ ID NO: 1273336 - DNA, 25 bp, Homo sapien
gaagggaagctctttctagctcctc

SEQ ID NO: 1273337 - DNA, 25 bp, Homo sapien
gaatatcccctctttctgcacccag

SEQ ID NO: 1273338 - DNA, 25 bp, Homo sapien
tagctcctccggagttaagcgcgcg

SEQ ID NO: 1273339 - DNA, 25 bp, Homo sapien
gttaagcgcgcgtcttcatgaggtg

SEQ ID NO: 1273340 - DNA, 25 bp, Homo sapien
gataagagaggatttaagaatccta

SEQ ID NO: 1273341 - DNA, 25 bp, Homo sapien
agataagagaggatttaagaatcct

SEQ ID NO: 1273342 - DNA, 25 bp, Homo sapien
ataagagaggatttaagaatcctat

SEQ ID NO: 1273343 - DNA, 25 bp, Homo sapien
tatatcatcctatgacctgacatca

SEQ ID NO: 1273344 - DNA, 25 bp, Homo sapien
gttgtagagaactttcaactgtctc

SEQ ID NO: 1273345 - DNA, 25 bp, Homo sapien
cattctgcctgctcactgattatat

SEQ ID NO: 1273346 - DNA, 25 bp, Homo sapien
gatcgccacaagatagacggcttcc

SEQ ID NO: 1273347 - DNA, 25 bp, Homo sapien
caaagagacgtggatttatgagtcc

SEQ ID NO: 1273348 - DNA, 25 bp, Homo sapien
tatgagttgaagtggccaaagcaaa

SEQ ID NO: 1273349 - DNA, 25 bp, Homo sapien
ttatgagtccgagcagaagtgacgc

SEQ ID NO: 1273350 - DNA, 25 bp, Homo sapien
gaagtgacgcagagcataagatgaa

SEQ ID NO: 1273351 - DNA, 25 bp, Homo sapien
agtgagtagatgagttgccatgctg

SEQ ID NO: 1273352 - DNA, 25 bp, Homo sapien
gagtagatgagttgccatgctgtgt

SEQ ID NO: 1273353 - DNA, 25 bp, Homo sapien
catgagtgagtagatgagttgccat

SEQ ID NO: 1273354 - DNA, 25 bp, Homo sapien
ttcatgagtgagtagatgagttgcc

SEQ ID NO: 1273355 - DNA, 25 bp, Homo sapien
ccaaccaactatgggctcttagcca

SEQ ID NO: 1273356 - DNA, 25 bp, Homo sapien
ttcgtcagaccacacgacaagtgtg

SEQ ID NO: 1273357 - DNA, 25 bp, Homo sapien
aattctgtgctcctacttcgtcaga

SEQ ID NO: 1273358 - DNA, 25 bp, Homo sapien
gacacaatgtctaagacgaaggagg

SEQ ID NO: 1273359 - DNA, 25 bp, Homo sapien
agcaggcccccaccactacatccag

SEQ ID NO: 1273360 - DNA, 25 bp, Homo sapien
gtagcaggcccccaccactacatcc

SEQ ID NO: 1273361 - DNA, 25 bp, Homo sapien
aagtagcaggcccccaccactacat

SEQ ID NO: 1273362 - DNA, 25 bp, Homo sapien
tcccaagtagcaggcccccaccact

SEQ ID NO: 1273363 - DNA, 25 bp, Homo sapien
tagggtttgttgaggttgggctgac

SEQ ID NO: 1273364 - DNA, 25 bp, Homo sapien
tcagcaggaatgtagggtttgttga

SEQ ID NO: 1273365 - DNA, 25 bp, Homo sapien
tgtagggtttgttgaggttgggctg

SEQ ID NO: 1273366 - DNA, 25 bp, Homo sapien
aaggtcagcaggaatgtagggtttg

SEQ ID NO: 1273367 - DNA, 25 bp, Homo sapien
gcatgcatgcctgctacggaactcc

SEQ ID NO: 1273368 - DNA, 25 bp, Homo sapien
tagtcgatttacaaaccaaagcatg

SEQ ID NO: 1273369 - DNA, 25 bp, Homo sapien
cgtgagagatatgggactctgtcct

SEQ ID NO: 1273370 - DNA, 25 bp, Homo sapien
cctcccaccaagagacgtgagagat

SEQ ID NO: 1273371 - DNA, 25 bp, Homo sapien
actagatctagcctgcagaccacgc

SEQ ID NO: 1273372 - DNA, 25 bp, Homo sapien
gccgcccagtagataaagcactaga

SEQ ID NO: 1273373 - DNA, 25 bp, Homo sapien
gtctctagctcagccgcccagtaga

SEQ ID NO: 1273374 - DNA, 25 bp, Homo sapien
gcccatgaaggcaccggcagtctct

SEQ ID NO: 1273375 - DNA, 25 bp, Homo sapien
cgccaccgtgagcaccaggagggca

SEQ ID NO: 1273376 - DNA, 25 bp, Homo sapien
ggcagctgctctcactccccttttg

SEQ ID NO: 1273377 - DNA, 25 bp, Homo sapien
ctctcactccccttttgccgtccat

SEQ ID NO: 1273378 - DNA, 25 bp, Homo sapien
gctgctctcactccccttttgccgt

SEQ ID NO: 1273379 - DNA, 25 bp, Homo sapien
acatcaaaactttccgtcagagtga

SEQ ID NO: 1273380 - DNA, 25 bp, Homo sapien
aaaacgttgataaagatcactctcc

SEQ ID NO: 1273381 - DNA, 25 bp, Homo sapien
cagagtgatatcttccactaaagaa

SEQ ID NO: 1273382 - DNA, 25 bp, Homo sapien
taacctgccctagctgcggtgggca

SEQ ID NO: 1273383 - DNA, 25 bp, Homo sapien
gagagcctcgctccattatcttgga

SEQ ID NO: 1273384 - DNA, 25 bp, Homo sapien
tttgcacatgataccagaataggct

SEQ ID NO: 1273385 - DNA, 25 bp, Homo sapien
taacctaggacacatgagagcctcg

SEQ ID NO: 1273386 - DNA, 25 bp, Homo sapien
ttatcttggataccccaaccctgtg

SEQ ID NO: 1273387 - DNA, 25 bp, Homo sapien
ctttgttcctgaaatggcaccagta

SEQ ID NO: 1273388 - DNA, 25 bp, Homo sapien
ggcaccagtatacttcctaagcttt

SEQ ID NO: 1273389 - DNA, 25 bp, Homo sapien
caactctccctaaattgacctgtag

SEQ ID NO: 1273390 - DNA, 25 bp, Homo sapien
cactttagaacttacagcatcatga

SEQ ID NO: 1273391 - DNA, 25 bp, Homo sapien
gacgggagtacattagaacagccac

SEQ ID NO: 1273392 - DNA, 25 bp, Homo sapien
gcttggcaaaattaagggcacctga

SEQ ID NO: 1273393 - DNA, 25 bp, Homo sapien
tattgaatacatggcgcagggacca

SEQ ID NO: 1273394 - DNA, 25 bp, Homo sapien
gacccgcaggagaaagacgacgtat

SEQ ID NO: 1273395 - DNA, 25 bp, Homo sapien
aagtggtgcattattttggccgggc

SEQ ID NO: 1273396 - DNA, 25 bp, Homo sapien
tcgggtacttactgcacctcgtggc

SEQ ID NO: 1273397 - DNA, 25 bp, Homo sapien
tttcaagaaagtcccaacagcccta

SEQ ID NO: 1273398 - DNA, 25 bp, Homo sapien
tacatgacagaacccacggaaactt

SEQ ID NO: 1273399 - DNA, 25 bp, Homo sapien
ctggaaatcggcagctacagccatc

SEQ ID NO: 1273400 - DNA, 25 bp, Homo sapien
cttgagtagtttgtactggtctcat

SEQ ID NO: 1273401 - DNA, 25 bp, Homo sapien
gagtagtttgtactggtctcataaa

SEQ ID NO: 1273402 - DNA, 25 bp, Homo sapien
gtagtttgtactggtctcataaatg

SEQ ID NO: 1273403 - DNA, 25 bp, Homo sapien
tgagtagtttgtactggtctcataa

SEQ ID NO: 1273404 - DNA, 25 bp, Homo sapien
tgagggttactgagattcgagatcc

SEQ ID NO: 1273405 - DNA, 25 bp, Homo sapien
cagcagcacttattttcgtcttgag

SEQ ID NO: 1273406 - DNA, 25 bp, Homo sapien
gattgtgaaggtatccccactgctt

SEQ ID NO: 1273407 - DNA, 25 bp, Homo sapien
gccatatcccaatcatagctctagt

SEQ ID NO: 1273408 - DNA, 25 bp, Homo sapien
ccgggtcgtgatggcgagcgcggaa

SEQ ID NO: 1273409 - DNA, 25 bp, Homo sapien
ggcgagcgcggaatcctaaccacta

SEQ ID NO: 1273410 - DNA, 25 bp, Homo sapien
tcgtgatggcgagcgcggaatccta

SEQ ID NO: 1273411 - DNA, 25 bp, Homo sapien
atcgaacccgggtcgtgatggcgag

SEQ ID NO: 1273412 - DNA, 25 bp, Homo sapien
gcaggaagagcaacgcagtcgacgt

SEQ ID NO: 1273413 - DNA, 25 bp, Homo sapien
tttctgccccgtttaacaacagaga

SEQ ID NO: 1273414 - DNA, 25 bp, Homo sapien
acaacagagaaacggagcgtgagga

SEQ ID NO: 1273415 - DNA, 25 bp, Homo sapien
tgaatatatacaggagtttctttct

SEQ ID NO: 1273416 - DNA, 25 bp, Homo sapien
ggatgctcccggagagaggtcggct

SEQ ID NO: 1273417 - DNA, 25 bp, Homo sapien
gaggtcggctggagatggtccacag

SEQ ID NO: 1273418 - DNA, 25 bp, Homo sapien
ctggctctctcgcaggggcaggcgg

SEQ ID NO: 1273419 - DNA, 25 bp, Homo sapien
cagaggatgctcccggagagaggtc

SEQ ID NO: 1273420 - DNA, 25 bp, Homo sapien
tccctctccttcgtcccattcacaa

SEQ ID NO: 1273421 - DNA, 25 bp, Homo sapien
cctctccttcgtcccattcacaagc

SEQ ID NO: 1273422 - DNA, 25 bp, Homo sapien
ctccttcgtcccattcacaagcaca

SEQ ID NO: 1273423 - DNA, 25 bp, Homo sapien
cacgtccctctccttcgtcccattc

SEQ ID NO: 1273424 - DNA, 25 bp, Homo sapien
taagtccgagaaaatagtcaatact

SEQ ID NO: 1273425 - DNA, 25 bp, Homo sapien
aagacagaattcagctaagtccgag

SEQ ID NO: 1273426 - DNA, 25 bp, Homo sapien
tttcttgtgaatcatgattccattc

SEQ ID NO: 1273427 - DNA, 25 bp, Homo sapien
caatacttttcttgtgaatcatgat

SEQ ID NO: 1273428 - DNA, 25 bp, Homo sapien
tgccacgtttctgatcgttaaatgt

SEQ ID NO: 1273429 - DNA, 25 bp, Homo sapien
ccagggtcgacagatgccacgtttc

SEQ ID NO: 1273430 - DNA, 25 bp, Homo sapien
gtcccaaagcaacagtctttacaac

SEQ ID NO: 1273431 - DNA, 25 bp, Homo sapien
tttgtccagggtcgacagatgccac

SEQ ID NO: 1273432 - DNA, 25 bp, Homo sapien
ttgaccttgtttacaatcctgttca

SEQ ID NO: 1273433 - DNA, 25 bp, Homo sapien
gaccttgtttacaatcctgttcaca

SEQ ID NO: 1273434 - DNA, 25 bp, Homo sapien
gcagtcacactctgcattgctggtg

SEQ ID NO: 1273435 - DNA, 25 bp, Homo sapien
ggagtgcagtcacactctgcattgc

SEQ ID NO: 1273436 - DNA, 25 bp, Homo sapien
ctgcatatgtcacaggtcctttgtc

SEQ ID NO: 1273437 - DNA, 25 bp, Homo sapien
acctgcgctggagaaactatttgga

SEQ ID NO: 1273438 - DNA, 25 bp, Homo sapien
gcctgcatatgtcacaggtcctttg

SEQ ID NO: 1273439 - DNA, 25 bp, Homo sapien
ccacctgcgctggagaaactatttg

SEQ ID NO: 1273440 - DNA, 25 bp, Homo sapien
tggctactatgttgtaacagctgtt

SEQ ID NO: 1273441 - DNA, 25 bp, Homo sapien
gaggaccagcaacagagtggctact

SEQ ID NO: 1273442 - DNA, 25 bp, Homo sapien
acagagtggctactatgttgtaaca

SEQ ID NO: 1273443 - DNA, 25 bp, Homo sapien
ccagcaacagagtggctactatgtt

SEQ ID NO: 1273444 - DNA, 25 bp, Homo sapien
aattagctggtctcacaaatgtcac

SEQ ID NO: 1273445 - DNA, 25 bp, Homo sapien
cacaggtatgatactagcaaagctg

SEQ ID NO: 1273446 - DNA, 25 bp, Homo sapien
tatgatactagcaaagctgattcca

SEQ ID NO: 1273447 - DNA, 25 bp, Homo sapien
ctagcaaagctgattccaagagaat

SEQ ID NO: 1273448 - DNA, 25 bp, Homo sapien
ctgccggagaactttccactccttg

SEQ ID NO: 1273449 - DNA, 25 bp, Homo sapien
ggctgccggagaactttccactcct

SEQ ID NO: 1273450 - DNA, 25 bp, Homo sapien
gctgccggagaactttccactcctt

SEQ ID NO: 1273451 - DNA, 25 bp, Homo sapien
tgccggagaactttccactccttgg

SEQ ID NO: 1273452 - DNA, 25 bp, Homo sapien
cttgccccactttggcagaaattgg

SEQ ID NO: 1273453 - DNA, 25 bp, Homo sapien
gtgacatctgtgggatccctccttg

SEQ ID NO: 1273454 - DNA, 25 bp, Homo sapien
tgaatgtgagagtgtcacaccataa

SEQ ID NO: 1273455 - DNA, 25 bp, Homo sapien
cataaaaatcggactgctgatcccc

SEQ ID NO: 1273456 - DNA, 25 bp, Homo sapien
ctgactcggccaatcccgggtggcg

SEQ ID NO: 1273457 - DNA, 25 bp, Homo sapien
taggggctgttactctcagaccagg

SEQ ID NO: 1273458 - DNA, 25 bp, Homo sapien
agcacccggcgcatttacgtcggat

SEQ ID NO: 1273459 - DNA, 25 bp, Homo sapien
ctagcggctgggaacacgcgacggt

SEQ ID NO: 1273460 - DNA, 25 bp, Homo sapien
tgatcgttcacaggcagttacacct

SEQ ID NO: 1273461 - DNA, 25 bp, Homo sapien
ggcagttacaccttgttctactctt

SEQ ID NO: 1273462 - DNA, 25 bp, Homo sapien
tcgttcacaggcagttacaccttgt

SEQ ID NO: 1273463 - DNA, 25 bp, Homo sapien
attgatcgttcacaggcagttacac

SEQ ID NO: 1273464 - DNA, 25 bp, Homo sapien
ctcactactgtgcttgactaatcta

SEQ ID NO: 1273465 - DNA, 25 bp, Homo sapien
cacaggcagttacaccttgttctac

SEQ ID NO: 1273466 - DNA, 25 bp, Homo sapien
caaggtgtaactgcctgtgaacgat

SEQ ID NO: 1273467 - DNA, 25 bp, Homo sapien
aagagtagaacaaggtgtaactgcc

SEQ ID NO: 1273468 - DNA, 25 bp, Homo sapien
gagtagaacaaggtgtaactgcctg

SEQ ID NO: 1273469 - DNA, 25 bp, Homo sapien
tagaacaaggtgtaactgcctgtga

SEQ ID NO: 1273470 - DNA, 25 bp, Homo sapien
tagattagtcaagcacagtagtgag

SEQ ID NO: 1273471 - DNA, 25 bp, Homo sapien
gtgtaactgcctgtgaacgatcaat

SEQ ID NO: 1273472 - DNA, 25 bp, Homo sapien
taaggacagcgacttctgaacacat

SEQ ID NO: 1273473 - DNA, 25 bp, Homo sapien
ctagtctttaagaacaagtggagcc

SEQ ID NO: 1273474 - DNA, 25 bp, Homo sapien
gaatcaggccgtctttttccacacg

SEQ ID NO: 1273475 - DNA, 25 bp, Homo sapien
ttgcaagcgcaaactcgaagctggt

SEQ ID NO: 1273476 - DNA, 25 bp, Homo sapien
tgagaatggattcctaacggcctgt

SEQ ID NO: 1273477 - DNA, 25 bp, Homo sapien
tctctaagtgatcgtcgcagttcgc

SEQ ID NO: 1273478 - DNA, 25 bp, Homo sapien
cctgggaccagcttcgagtttgcgc

SEQ ID NO: 1273479 - DNA, 25 bp, Homo sapien
gaactgcgacgatcacttagagaaa

SEQ ID NO: 1273480 - DNA, 25 bp, Homo sapien
gagaaacaggccgttaggaatccat

SEQ ID NO: 1273481 - DNA, 25 bp, Homo sapien
gaatcgtgtggaaaaagacggcctg

SEQ ID NO: 1273482 - DNA, 25 bp, Homo sapien
ttaaagactagagcagcgaactgcg

SEQ ID NO: 1273483 - DNA, 25 bp, Homo sapien
gacggcctgattcttacaagccggg

SEQ ID NO: 1273484 - DNA, 25 bp, Homo sapien
gcttatcctttcatccctttataga

SEQ ID NO: 1273485 - DNA, 25 bp, Homo sapien
agctcttccggaccctgctttcgat

SEQ ID NO: 1273486 - DNA, 25 bp, Homo sapien
gctgaatcatatggtcattctcatt

SEQ ID NO: 1273487 - DNA, 25 bp, Homo sapien
gccactgcccctagcccataatttc

SEQ ID NO: 1273488 - DNA, 25 bp, Homo sapien
gatccggtgctcattagaagtcatc

SEQ ID NO: 1273489 - DNA, 25 bp, Homo sapien
tcctaactatatcgggagtatccct

SEQ ID NO: 1273490 - DNA, 25 bp, Homo sapien
tgctgtccagctccgtaatactttc

SEQ ID NO: 1273491 - DNA, 25 bp, Homo sapien
tcatccctcagagtagatccggtgc

SEQ ID NO: 1273492 - DNA, 25 bp, Homo sapien
ttttatgtgcaactgagggtgtggc

SEQ ID NO: 1273493 - DNA, 25 bp, Homo sapien
cacgccgggtggatggtaacacctc

SEQ ID NO: 1273494 - DNA, 25 bp, Homo sapien
gacagaattataatgcacgccgggt

SEQ ID NO: 1273495 - DNA, 25 bp, Homo sapien
ggaaacctttcagacctagaatcag

SEQ ID NO: 1273496 - DNA, 25 bp, Homo sapien
aaaacacaccaccattcaggcccat

SEQ ID NO: 1273497 - DNA, 25 bp, Homo sapien
gcttccatcacgtgagacaccttgg

SEQ ID NO: 1273498 - DNA, 25 bp, Homo sapien
catcacgtgagacaccttggaggac

SEQ ID NO: 1273499 - DNA, 25 bp, Homo sapien
catcgtcatcctgctttctcctata

SEQ ID NO: 1273500 - DNA, 25 bp, Homo sapien
gccagaaagacacgattcactctga

SEQ ID NO: 1273501 - DNA, 25 bp, Homo sapien
atgttgcaccccaggcggctctgag

SEQ ID NO: 1273502 - DNA, 25 bp, Homo sapien
ttcctgcatgttgcaccccaggcgg

SEQ ID NO: 1273503 - DNA, 25 bp, Homo sapien
gggctcgggccagaaagacacgatt

SEQ ID NO: 1273504 - DNA, 25 bp, Homo sapien
ccctcagtgagacagcgtttttagc

SEQ ID NO: 1273505 - DNA, 25 bp, Homo sapien
taaactgatagcctgagatcacagc

SEQ ID NO: 1273506 - DNA, 25 bp, Homo sapien
tgtccaaggaatgaaggcgttgcct

SEQ ID NO: 1273507 - DNA, 25 bp, Homo sapien
gggagcttgctacaggtttacttgc

SEQ ID NO: 1273508 - DNA, 25 bp, Homo sapien
gctaggtgacatgggactaagcccc

SEQ ID NO: 1273509 - DNA, 25 bp, Homo sapien
gggatgtgttttcgcaggatccagc

SEQ ID NO: 1273510 - DNA, 25 bp, Homo sapien
atgaaggtcgtggagggctcccacc

SEQ ID NO: 1273511 - DNA, 25 bp, Homo sapien
gggccctcactatgtaccagataat

SEQ ID NO: 1273512 - DNA, 25 bp, Homo sapien
tggtaaagaatggataccctgccct

SEQ ID NO: 1273513 - DNA, 25 bp, Homo sapien
catgaaacctggaagtatgaggcct

SEQ ID NO: 1273514 - DNA, 25 bp, Homo sapien
taaaactgacatcctaacactggca

SEQ ID NO: 1273515 - DNA, 25 bp, Homo sapien
gaataggaaccagcaacacaaggcc

SEQ ID NO: 1273516 - DNA, 25 bp, Homo sapien
tcaattttcagtctatcaggactca

SEQ ID NO: 1273517 - DNA, 25 bp, Homo sapien
actaattggttaacctgcagctatg

SEQ ID NO: 1273518 - DNA, 25 bp, Homo sapien
caaagtcagggtttctcagcataac

SEQ ID NO: 1273519 - DNA, 25 bp, Homo sapien
aactgctctaaaccttccacatgaa

SEQ ID NO: 1273520 - DNA, 25 bp, Homo sapien
tgtaacctctgctgaaccatgaccc

SEQ ID NO: 1273521 - DNA, 25 bp, Homo sapien
tttgcaatctaagggatttttctct

SEQ ID NO: 1273522 - DNA, 25 bp, Homo sapien
ttctctgcacttcaatcaaactgga

SEQ ID NO: 1273523 - DNA, 25 bp, Homo sapien
catttgctcctatgtaacctctgct

SEQ ID NO: 1273524 - DNA, 25 bp, Homo sapien
tgatttgtccacacccacggaagct

SEQ ID NO: 1273525 - DNA, 25 bp, Homo sapien
tactcggtgacaaaggttctcttgg

SEQ ID NO: 1273526 - DNA, 25 bp, Homo sapien
taaatgtttacgcttcacgtggcca

SEQ ID NO: 1273527 - DNA, 25 bp, Homo sapien
cccattgaggtaagacggaaggctt

SEQ ID NO: 1273528 - DNA, 25 bp, Homo sapien
cccgttcacaaagaggggcacaggg

SEQ ID NO: 1273529 - DNA, 25 bp, Homo sapien
tggaggggtggaagcacaaacccca

SEQ ID NO: 1273530 - DNA, 25 bp, Homo sapien
accccgttcacaaagaggggcacag

SEQ ID NO: 1273531 - DNA, 25 bp, Homo sapien
ccgttcacaaagaggggcacagggg

SEQ ID NO: 1273532 - DNA, 25 bp, Homo sapien
aagcagtggccattcatcggagcag

SEQ ID NO: 1273533 - DNA, 25 bp, Homo sapien
cattttctgcaaagcagtggccatt

SEQ ID NO: 1273534 - DNA, 25 bp, Homo sapien
ttaaaaccacatacaacttgatcct

SEQ ID NO: 1273535 - DNA, 25 bp, Homo sapien
catcggagcagatttggaagcatgc

SEQ ID NO: 1273536 - DNA, 25 bp, Homo sapien
tagaagatcccacgtccatgaacag

SEQ ID NO: 1273537 - DNA, 25 bp, Homo sapien
caccacaggtgtaattagagagcag

SEQ ID NO: 1273538 - DNA, 25 bp, Homo sapien
cagaagattcttaacgcacatggtg

SEQ ID NO: 1273539 - DNA, 25 bp, Homo sapien
aagacatgcgaccatactaggcacg

SEQ ID NO: 1273540 - DNA, 25 bp, Homo sapien
caagtggtattaggcgctcctgagc

SEQ ID NO: 1273541 - DNA, 25 bp, Homo sapien
catggttatcgggtcaatatttaaa

SEQ ID NO: 1273542 - DNA, 25 bp, Homo sapien
gtattaggcgctcctgagcagaaga

SEQ ID NO: 1273543 - DNA, 25 bp, Homo sapien
cagaagagttcagactgtaggccat

SEQ ID NO: 1273544 - DNA, 25 bp, Homo sapien
tcttcctcatattccccatggctcg

SEQ ID NO: 1273545 - DNA, 25 bp, Homo sapien
gagcagcaactcctgctattgacat

SEQ ID NO: 1273546 - DNA, 25 bp, Homo sapien
ccatggctcggccattatgtagaaa

SEQ ID NO: 1273547 - DNA, 25 bp, Homo sapien
tttttaaactcactgcgactgctcc

SEQ ID NO: 1273548 - DNA, 25 bp, Homo sapien
tgggacatctccaaacctgtgaggc

SEQ ID NO: 1273549 - DNA, 25 bp, Homo sapien
gggacatctccaaacctgtgaggcc

SEQ ID NO: 1273550 - DNA, 25 bp, Homo sapien
gacatctccaaacctgtgaggccca

SEQ ID NO: 1273551 - DNA, 25 bp, Homo sapien
ctgggacatctccaaacctgtgagg

SEQ ID NO: 1273552 - DNA, 25 bp, Homo sapien
gaagatcgctcatccagattacagg

SEQ ID NO: 1273553 - DNA, 25 bp, Homo sapien
cagtcagctgttctaccaggcagag

SEQ ID NO: 1273554 - DNA, 25 bp, Homo sapien
gattgtgtaactatcgcctctgcag

SEQ ID NO: 1273555 - DNA, 25 bp, Homo sapien
tcctacttgctagcatgggagacga

SEQ ID NO: 1273556 - DNA, 25 bp, Homo sapien
gaaagcgaatgtgaatccagacagc

SEQ ID NO: 1273557 - DNA, 25 bp, Homo sapien
gggacccaaataaccttcagcataa

SEQ ID NO: 1273558 - DNA, 25 bp, Homo sapien
tctagtattcagcacaaatggaagc

SEQ ID NO: 1273559 - DNA, 25 bp, Homo sapien
tgtaaactgagggtatgaaaccacc

SEQ ID NO: 1273560 - DNA, 25 bp, Homo sapien
tattcagggtgataaatggtctttt

SEQ ID NO: 1273561 - DNA, 25 bp, Homo sapien
ctttcaatctggttctagaacctga

SEQ ID NO: 1273562 - DNA, 25 bp, Homo sapien
atctggttctagaacctgatttctg

SEQ ID NO: 1273563 - DNA, 25 bp, Homo sapien
tccttatttaagagtgtgatgtaat

SEQ ID NO: 1273564 - DNA, 25 bp, Homo sapien
taaactggcgaagtaggatccgact

SEQ ID NO: 1273565 - DNA, 25 bp, Homo sapien
tctacaatgccataaggtgggctac

SEQ ID NO: 1273566 - DNA, 25 bp, Homo sapien
cacaatggtctaatgatgggacgca

SEQ ID NO: 1273567 - DNA, 25 bp, Homo sapien
tcagtctttaacgatccacggatgc

SEQ ID NO: 1273568 - DNA, 25 bp, Homo sapien
gcaggcgcctcttgctggctcgcgc

SEQ ID NO: 1273569 - DNA, 25 bp, Homo sapien
gccgcgggctcaggggcccggacat

SEQ ID NO: 1273570 - DNA, 25 bp, Homo sapien
tcccgcgcatgtccgtcccggctgg

SEQ ID NO: 1273571 - DNA, 25 bp, Homo sapien
gcgctcccgctagcactctgcctcg

SEQ ID NO: 1273572 - DNA, 25 bp, Homo sapien
tgagctggccccgacgtcttttggc

SEQ ID NO: 1273573 - DNA, 25 bp, Homo sapien
ttctcggggcgccagtgatgcaact

SEQ ID NO: 1273574 - DNA, 25 bp, Homo sapien
cttttggctttggagaggccacgga

SEQ ID NO: 1273575 - DNA, 25 bp, Homo sapien
tgcaacttaggcttatagtttaacc

SEQ ID NO: 1273576 - DNA, 25 bp, Homo sapien
tagggctgctttaagaatgtaccac

SEQ ID NO: 1273577 - DNA, 25 bp, Homo sapien
gacatttcttgtattgatttcttag

SEQ ID NO: 1273578 - DNA, 25 bp, Homo sapien
tcttgtattgatttcttagggctgc

SEQ ID NO: 1273579 - DNA, 25 bp, Homo sapien
agggctgctttaagaatgtaccaca

SEQ ID NO: 1273580 - DNA, 25 bp, Homo sapien
tcttccgagttaacccatgcgaagg

SEQ ID NO: 1273581 - DNA, 25 bp, Homo sapien
ctttttgagattggtaatgcgggcc

SEQ ID NO: 1273582 - DNA, 25 bp, Homo sapien
ggccatagacttggaagccaggaca

SEQ ID NO: 1273583 - DNA, 25 bp, Homo sapien
ttaacccatgcgaaggcaacagtgg

SEQ ID NO: 1273584 - DNA, 25 bp, Homo sapien
atgtcgtgtgcagtgatcaccagct

SEQ ID NO: 1273585 - DNA, 25 bp, Homo sapien
tccaccaaggtggtgacgttgttaa

SEQ ID NO: 1273586 - DNA, 25 bp, Homo sapien
ctccaccaaggtggtgacgttgtta

SEQ ID NO: 1273587 - DNA, 25 bp, Homo sapien
gacatcccctttgctggcagctgtc

SEQ ID NO: 1273588 - DNA, 25 bp, Homo sapien
agctgtcttctcagcccagagccaa

SEQ ID NO: 1273589 - DNA, 25 bp, Homo sapien
ctgtcttctcagcccagagccaaca

SEQ ID NO: 1273590 - DNA, 25 bp, Homo sapien
ggcagctgtcttctcagcccagagc

SEQ ID NO: 1273591 - DNA, 25 bp, Homo sapien
tgagtagctgtatggcggtccaggg

SEQ ID NO: 1273592 - DNA, 25 bp, Homo sapien
gctgagtagctgtatggcggtccag

SEQ ID NO: 1273593 - DNA, 25 bp, Homo sapien
cagctgagtagctgtatggcggtcc

SEQ ID NO: 1273594 - DNA, 25 bp, Homo sapien
agctgagtagctgtatggcggtcca

SEQ ID NO: 1273595 - DNA, 25 bp, Homo sapien
ccactgcagcctgatacagtggggc

SEQ ID NO: 1273596 - DNA, 25 bp, Homo sapien
ctgccactgcagcctgatacagtgg

SEQ ID NO: 1273597 - DNA, 25 bp, Homo sapien
actgcagcctgatacagtggggcca

SEQ ID NO: 1273598 - DNA, 25 bp, Homo sapien
tgccactgcagcctgatacagtggg

SEQ ID NO: 1273599 - DNA, 25 bp, Homo sapien
ttcttgacagcaggggcgggagccg

SEQ ID NO: 1273600 - DNA, 25 bp, Homo sapien
ccttgggcttctttctttttggcat

SEQ ID NO: 1273601 - DNA, 25 bp, Homo sapien
ggctttctgcttcttcttgacagca

SEQ ID NO: 1273602 - DNA, 25 bp, Homo sapien
ttggctttctgcttcttcttgacag

SEQ ID NO: 1273603 - DNA, 25 bp, Homo sapien
cagatgtgacttgtacaaaatgaat

SEQ ID NO: 1273604 - DNA, 25 bp, Homo sapien
gacttttctcgcatcaagaaagtga

SEQ ID NO: 1273605 - DNA, 25 bp, Homo sapien
ctttagatctggctgcgctctcaga

SEQ ID NO: 1273606 - DNA, 25 bp, Homo sapien
aaatctggtatttcaggttggactg

SEQ ID NO: 1273607 - DNA, 25 bp, Homo sapien
atcctgaggacaccgtcagcttctt

SEQ ID NO: 1273608 - DNA, 25 bp, Homo sapien
tggccccagaatctggtgtgaccgc

SEQ ID NO: 1273609 - DNA, 25 bp, Homo sapien
aggttgacctctgatacgtctgcca

SEQ ID NO: 1273610 - DNA, 25 bp, Homo sapien
ttcaagaggctagcgaggttgacct

SEQ ID NO: 1273611 - DNA, 25 bp, Homo sapien
tgtgaccgcacgtgccgtctttcca

SEQ ID NO: 1273612 - DNA, 25 bp, Homo sapien
tctccaggcagctcgtggtctgagc

SEQ ID NO: 1273613 - DNA, 25 bp, Homo sapien
gctaaggtagcgctcacaggactgt

SEQ ID NO: 1273614 - DNA, 25 bp, Homo sapien
tctagagtaaacaaacgcctggact

SEQ ID NO: 1273615 - DNA, 25 bp, Homo sapien
tcaggaatgacggatgagcagctgc

SEQ ID NO: 1273616 - DNA, 25 bp, Homo sapien
gcctgcaacagccaagcagactgcc

SEQ ID NO: 1273617 - DNA, 25 bp, Homo sapien
caagacactctacatgagacctggc

SEQ ID NO: 1273618 - DNA, 25 bp, Homo sapien
actctacatgagacctggcctgcaa

SEQ ID NO: 1273619 - DNA, 25 bp, Homo sapien
gacactctacatgagacctggcctg

SEQ ID NO: 1273620 - DNA, 25 bp, Homo sapien
gggacaggtcaatcttaccagagga

SEQ ID NO: 1273621 - DNA, 25 bp, Homo sapien
tggattctcggacatcatcacaggg

SEQ ID NO: 1273622 - DNA, 25 bp, Homo sapien
aagagcgtaacctttgacaactgga

SEQ ID NO: 1273623 - DNA, 25 bp, Homo sapien
aaaaagcctcagatttggtcagcga

SEQ ID NO: 1273624 - DNA, 25 bp, Homo sapien
tgaatggttctacgtgaccaacaca

SEQ ID NO: 1273625 - DNA, 25 bp, Homo sapien
tgcctcttaaagtggatgtccccaa

SEQ ID NO: 1273626 - DNA, 25 bp, Homo sapien
aggtgtcccctttagccctctacag

SEQ ID NO: 1273627 - DNA, 25 bp, Homo sapien
gaccaacacactgattgctttcaga

SEQ ID NO: 1273628 - DNA, 25 bp, Homo sapien
cggtccacacttttactctattttg

SEQ ID NO: 1273629 - DNA, 25 bp, Homo sapien
caggaggccactgcaggaattccag

SEQ ID NO: 1273630 - DNA, 25 bp, Homo sapien
cacgaatctaaggaccgtggatggg

SEQ ID NO: 1273631 - DNA, 25 bp, Homo sapien
caggagagcagcgtgtcacaggaaa

SEQ ID NO: 1273632 - DNA, 25 bp, Homo sapien
aaatcagactggctgtaaatgtcca

SEQ ID NO: 1273633 - DNA, 25 bp, Homo sapien
cctgagctcagcctgttggcattca

SEQ ID NO: 1273634 - DNA, 25 bp, Homo sapien
tgaaggtcccttcctgagctcagcc

SEQ ID NO: 1273635 - DNA, 25 bp, Homo sapien
tgaacctgggcgagccaggtgcctc

SEQ ID NO: 1273636 - DNA, 25 bp, Homo sapien
ctttgccacagactgaaggtccctt

SEQ ID NO: 1273637 - DNA, 25 bp, Homo sapien
agtgcagggcatgagcctcgccctg

SEQ ID NO: 1273638 - DNA, 25 bp, Homo sapien
tggccggggtcagcatatccagagt

SEQ ID NO: 1273639 - DNA, 25 bp, Homo sapien
gagtgcagggcatgagcctcgccct

SEQ ID NO: 1273640 - DNA, 25 bp, Homo sapien
gagaaatggccggggtcagcatatc

SEQ ID NO: 1273641 - DNA, 25 bp, Homo sapien
aactgcccacttcctttcgagtcat

SEQ ID NO: 1273642 - DNA, 25 bp, Homo sapien
agcaaggcaactgcccacttccttt

SEQ ID NO: 1273643 - DNA, 25 bp, Homo sapien
ctcgcggcagcaaggcaactgccca

SEQ ID NO: 1273644 - DNA, 25 bp, Homo sapien
ggcaactgcccacttcctttcgagt

SEQ ID NO: 1273645 - DNA, 25 bp, Homo sapien
tatgactcggacaccagttgccttg

SEQ ID NO: 1273646 - DNA, 25 bp, Homo sapien
caggagttgataaataccaggcgcc

SEQ ID NO: 1273647 - DNA, 25 bp, Homo sapien
tcggcttgcctctgggactggaccg

SEQ ID NO: 1273648 - DNA, 25 bp, Homo sapien
tccatgatggagaggcttttgctta

SEQ ID NO: 1273649 - DNA, 25 bp, Homo sapien
agcaaacccgtctgtgggtggaagt

SEQ ID NO: 1273650 - DNA, 25 bp, Homo sapien
ctctttccagcaaacccgtctgtgg

SEQ ID NO: 1273651 - DNA, 25 bp, Homo sapien
tccagcaaacccgtctgtgggtgga

SEQ ID NO: 1273652 - DNA, 25 bp, Homo sapien
tctttccagcaaacccgtctgtggg

SEQ ID NO: 1273653 - DNA, 25 bp, Homo sapien
ttctgcagcattgggtgactcgccg

SEQ ID NO: 1273654 - DNA, 25 bp, Homo sapien
ggggccctgcgaccacacaagcaag

SEQ ID NO: 1273655 - DNA, 25 bp, Homo sapien
cctgcgaccacacaagcaagcagga

SEQ ID NO: 1273656 - DNA, 25 bp, Homo sapien
attctgcagcattgggtgactcgcc

SEQ ID NO: 1273657 - DNA, 25 bp, Homo sapien
tcctcgtcatcaccgtgatacctgc

SEQ ID NO: 1273658 - DNA, 25 bp, Homo sapien
ctcctcctcgtcatcaccgtgatac

SEQ ID NO: 1273659 - DNA, 25 bp, Homo sapien
tcgtcatcaccgtgatacctgcttg

SEQ ID NO: 1273660 - DNA, 25 bp, Homo sapien
gtcatcaccgtgatacctgcttgtg

SEQ ID NO: 1273661 - DNA, 25 bp, Homo sapien
gcttgggttgctgtggaggacagcc

SEQ ID NO: 1273662 - DNA, 25 bp, Homo sapien
tggaggacagccgtacagcgtagaa

SEQ ID NO: 1273663 - DNA, 25 bp, Homo sapien
ttgctgtggaggacagccgtacagc

SEQ ID NO: 1273664 - DNA, 25 bp, Homo sapien
ggacagccgtacagcgtagaaagtc

SEQ ID NO: 1273665 - DNA, 25 bp, Homo sapien
gaagatgggaagggcctggtgattc

SEQ ID NO: 1273666 - DNA, 25 bp, Homo sapien
agaagatgggaagggcctggtgatt

SEQ ID NO: 1273667 - DNA, 25 bp, Homo sapien
tagaagatgggaagggcctggtgat

SEQ ID NO: 1273668 - DNA, 25 bp, Homo sapien
ctagaagatgggaagggcctggtga

SEQ ID NO: 1273669 - DNA, 25 bp, Homo sapien
gaggtttcagaggttgtggaatgag

SEQ ID NO: 1273670 - DNA, 25 bp, Homo sapien
gaatgagactaagaatgaagtaggt

SEQ ID NO: 1273671 - DNA, 25 bp, Homo sapien
ggaatgagactaagaatgaagtagg

SEQ ID NO: 1273672 - DNA, 25 bp, Homo sapien
gtggaatgagactaagaatgaagta

SEQ ID NO: 1273673 - DNA, 25 bp, Homo sapien
ggcaagtgggacaaagagggactta

SEQ ID NO: 1273674 - DNA, 25 bp, Homo sapien
aaggcaagtgggacaaagagggact

SEQ ID NO: 1273675 - DNA, 25 bp, Homo sapien
ctaaggcaagtgggacaaagaggga

SEQ ID NO: 1273676 - DNA, 25 bp, Homo sapien
gcaagtgggacaaagagggacttac

SEQ ID NO: 1273677 - DNA, 25 bp, Homo sapien
acagaagttctgctgttatcagagc

SEQ ID NO: 1273678 - DNA, 25 bp, Homo sapien
gaccacgagagaaggacagaagttc

SEQ ID NO: 1273679 - DNA, 25 bp, Homo sapien
gaagttctgctgttatcagagcaga

SEQ ID NO: 1273680 - DNA, 25 bp, Homo sapien
agtgaccacgagagaaggacagaag

SEQ ID NO: 1273681 - DNA, 25 bp, Homo sapien
cagaagtctaaggagactgcactct

SEQ ID NO: 1273682 - DNA, 25 bp, Homo sapien
gaacagaagtctaaggagactgcac

SEQ ID NO: 1273683 - DNA, 25 bp, Homo sapien
tcctgaacagaagtctaaggagact

SEQ ID NO: 1273684 - DNA, 25 bp, Homo sapien
gaagtctaaggagactgcactctcc

SEQ ID NO: 1273685 - DNA, 25 bp, Homo sapien
gatcgatgcgcttgactgcacaggt

SEQ ID NO: 1273686 - DNA, 25 bp, Homo sapien
tgcagggactgttgaggattttgcc

SEQ ID NO: 1273687 - DNA, 25 bp, Homo sapien
cagggactgttgaggattttgccca

SEQ ID NO: 1273688 - DNA, 25 bp, Homo sapien
tgagacctggtggatcgatgcgctt

SEQ ID NO: 1273689 - DNA, 25 bp, Homo sapien
agaagtataaatggcgcctttggcc

SEQ ID NO: 1273690 - DNA, 25 bp, Homo sapien
agtataaatggcgcctttggcccct

SEQ ID NO: 1273691 - DNA, 25 bp, Homo sapien
gaagtataaatggcgcctttggccc

SEQ ID NO: 1273692 - DNA, 25 bp, Homo sapien
cagggtaaccatctctgtttcgttc

SEQ ID NO: 1273693 - DNA, 25 bp, Homo sapien
tgaacccgctggtcatccttgcaca

SEQ ID NO: 1273694 - DNA, 25 bp, Homo sapien
catgaaacgtttcatgaacccgctg

SEQ ID NO: 1273695 - DNA, 25 bp, Homo sapien
ccagggtaaccatctctgtttcgtt

SEQ ID NO: 1273696 - DNA, 25 bp, Homo sapien
tctaagccgaggtcatcagggattc

SEQ ID NO: 1273697 - DNA, 25 bp, Homo sapien
gagttcgcctcatcctttggcacgg

SEQ ID NO: 1273698 - DNA, 25 bp, Homo sapien
ttggcacggccaacatagacagcgt

SEQ ID NO: 1273699 - DNA, 25 bp, Homo sapien
aagtacggcagcttcatcagcaggg

SEQ ID NO: 1273700 - DNA, 25 bp, Homo sapien
tagacataagagttgctggcctgca

SEQ ID NO: 1273701 - DNA, 25 bp, Homo sapien
cgtgggccgtgtctcctgaatgaag

SEQ ID NO: 1273702 - DNA, 25 bp, Homo sapien
gagatctagccgaggagacacttca

SEQ ID NO: 1273703 - DNA, 25 bp, Homo sapien
catccctcgagggagtcagctggaa

SEQ ID NO: 1273704 - DNA, 25 bp, Homo sapien
agcaggccgaccagtgaggaccaaa

SEQ ID NO: 1273705 - DNA, 25 bp, Homo sapien
tcctgctgaacgtctgacatcgcgg

SEQ ID NO: 1273706 - DNA, 25 bp, Homo sapien
tgaaattcctcccagcgacgctgca

SEQ ID NO: 1273707 - DNA, 25 bp, Homo sapien
ggactggctgcctactggaatgtaa

SEQ ID NO: 1273708 - DNA, 25 bp, Homo sapien
gaacacagaagtcacgatttctggg

SEQ ID NO: 1273709 - DNA, 25 bp, Homo sapien
tcatggcaaactactcatatataca

SEQ ID NO: 1273710 - DNA, 25 bp, Homo sapien
ctgtgttatctcatggcaaactact

SEQ ID NO: 1273711 - DNA, 25 bp, Homo sapien
gaagtcacgatttctgggtgtctac

SEQ ID NO: 1273712 - DNA, 25 bp, Homo sapien
tggagtgaagctcaacctcgaggac

SEQ ID NO: 1273713 - DNA, 25 bp, Homo sapien
gaagtcccacgacaaaaggttcatg

SEQ ID NO: 1273714 - DNA, 25 bp, Homo sapien
tagcaaatccgagtgtgcacgctgc

SEQ ID NO: 1273715 - DNA, 25 bp, Homo sapien
taacaagaatgccttcggacggctt

SEQ ID NO: 1273716 - DNA, 25 bp, Homo sapien
gagtctgtaacatcgtccctgcaaa

SEQ ID NO: 1273717 - DNA, 25 bp, Homo sapien
tgacaatgcgcatgagaaggcagcc

SEQ ID NO: 1273718 - DNA, 25 bp, Homo sapien
aaaccctggatgctcgctgctgtga

SEQ ID NO: 1273719 - DNA, 25 bp, Homo sapien
gaaagtgcgttacggctgcagcctg

SEQ ID NO: 1273720 - DNA, 25 bp, Homo sapien
cagtccaggactcactaagtttctg

SEQ ID NO: 1273721 - DNA, 25 bp, Homo sapien
tcgacaaacgaacactactatgtgg

SEQ ID NO: 1273722 - DNA, 25 bp, Homo sapien
caaaccccaagattgcagggaagct

SEQ ID NO: 1273723 - DNA, 25 bp, Homo sapien
tctagcacctactgagaaatcaagg

SEQ ID NO: 1273724 - DNA, 25 bp, Homo sapien
acagccagcgttaacaaataaataa

SEQ ID NO: 1273725 - DNA, 25 bp, Homo sapien
cacagccagcgttaacaaataaata

SEQ ID NO: 1273726 - DNA, 25 bp, Homo sapien
tgcttttgcagctcctattttatgt

SEQ ID NO: 1273727 - DNA, 25 bp, Homo sapien
ctttttgcttttgcagctcctattt

SEQ ID NO: 1273728 - DNA, 25 bp, Homo sapien
tataactgcttgtcaccttctttct

SEQ ID NO: 1273729 - DNA, 25 bp, Homo sapien
cttgtcaccttctttcttcagtcga

SEQ ID NO: 1273730 - DNA, 25 bp, Homo sapien
ctgcttgtcaccttctttcttcagt

SEQ ID NO: 1273731 - DNA, 25 bp, Homo sapien
ttataactgcttgtcaccttctttc

SEQ ID NO: 1273732 - DNA, 25 bp, Homo sapien
catgtgggggtgtccatgcagccac

SEQ ID NO: 1273733 - DNA, 25 bp, Homo sapien
aataatcttcctgacttggtaggtg

SEQ ID NO: 1273734 - DNA, 25 bp, Homo sapien
cttcctgacttggtaggtggccacc

SEQ ID NO: 1273735 - DNA, 25 bp, Homo sapien
cagctcggccgactgggcatgcatg

SEQ ID NO: 1273736 - DNA, 25 bp, Homo sapien
gtgggatggccccaggcaggtcacg

SEQ ID NO: 1273737 - DNA, 25 bp, Homo sapien
ctgacatggggggtgggatggcccc

SEQ ID NO: 1273738 - DNA, 25 bp, Homo sapien
ctgctgacatggggggtgggatggc

SEQ ID NO: 1273739 - DNA, 25 bp, Homo sapien
tggccccaggcaggtcacgggggta

SEQ ID NO: 1273740 - DNA, 25 bp, Homo sapien
aactgggtggcgaagcatctcgtgc

SEQ ID NO: 1273741 - DNA, 25 bp, Homo sapien
aaaactgggtggcgaagcatctcgt

SEQ ID NO: 1273742 - DNA, 25 bp, Homo sapien
actgggtggcgaagcatctcgtgct

SEQ ID NO: 1273743 - DNA, 25 bp, Homo sapien
cgaaaactgggtggcgaagcatctc

SEQ ID NO: 1273744 - DNA, 25 bp, Homo sapien
ggttggggagagtgccaggcgggta

SEQ ID NO: 1273745 - DNA, 25 bp, Homo sapien
ggcagtcagggggtcgaccagcggg

SEQ ID NO: 1273746 - DNA, 25 bp, Homo sapien
cgggtaggggaagcgagccaggtgg

SEQ ID NO: 1273747 - DNA, 25 bp, Homo sapien
gaccagcgggtgaacggggcctgct

SEQ ID NO: 1273748 - DNA, 25 bp, Homo sapien
gacaaaacgccagatggaggcggtg

SEQ ID NO: 1273749 - DNA, 25 bp, Homo sapien
acaaaacgccagatggaggcggtgt

SEQ ID NO: 1273750 - DNA, 25 bp, Homo sapien
taaggaaaggacaaaacgccagatg

SEQ ID NO: 1273751 - DNA, 25 bp, Homo sapien
gaaaggacaaaacgccagatggagg

SEQ ID NO: 1273752 - DNA, 25 bp, Homo sapien
gacggcaatggtgagtgctctccca

SEQ ID NO: 1273753 - DNA, 25 bp, Homo sapien
cctggtgcctccaagcaaggtggct

SEQ ID NO: 1273754 - DNA, 25 bp, Homo sapien
tctacaccaggtgccaacagagctt

SEQ ID NO: 1273755 - DNA, 25 bp, Homo sapien
gagcttcagatatgaggacggcaat

SEQ ID NO: 1273756 - DNA, 25 bp, Homo sapien
tcccatggagcaggtgaacctgcct

SEQ ID NO: 1273757 - DNA, 25 bp, Homo sapien
tgcctcctcgtaagcacagtagcca

SEQ ID NO: 1273758 - DNA, 25 bp, Homo sapien
tggagcaggtgaacctgcctcctcg

SEQ ID NO: 1273759 - DNA, 25 bp, Homo sapien
aggtgaacctgcctcctcgtaagca

SEQ ID NO: 1273760 - DNA, 25 bp, Homo sapien
tctccacagctggtcaatgagtggc

SEQ ID NO: 1273761 - DNA, 25 bp, Homo sapien
tggtcaatgagtggccttaaggagc

SEQ ID NO: 1273762 - DNA, 25 bp, Homo sapien
taaggagctcctacttccagggtgg

SEQ ID NO: 1273763 - DNA, 25 bp, Homo sapien
ccaggtgggtcagctcggaaaactc

SEQ ID NO: 1273764 - DNA, 25 bp, Homo sapien
tacagcaaaaccatgacggtagtgg

SEQ ID NO: 1273765 - DNA, 25 bp, Homo sapien
gccgaggagagactgcgatacagca

SEQ ID NO: 1273766 - DNA, 25 bp, Homo sapien
tgacggtagtggatgctgagctctt

SEQ ID NO: 1273767 - DNA, 25 bp, Homo sapien
gagactgcgatacagcaaaaccatg

SEQ ID NO: 1273768 - DNA, 25 bp, Homo sapien
tgaatgtgagagtgctggtgatggt

SEQ ID NO: 1273769 - DNA, 25 bp, Homo sapien
tgtgggtcactgaggcgaccttcat

SEQ ID NO: 1273770 - DNA, 25 bp, Homo sapien
ctcgctcagagtccgaagggcaggt

SEQ ID NO: 1273771 - DNA, 25 bp, Homo sapien
gccaggcatgtggtaggccagcagg

SEQ ID NO: 1273772 - DNA, 25 bp, Homo sapien
cttcatgcgctgagctggacgcctt

SEQ ID NO: 1273773 - DNA, 25 bp, Homo sapien
tgtgagggttgtgtctgggagtgac

SEQ ID NO: 1273774 - DNA, 25 bp, Homo sapien
gtgtgagggttgtgtctgggagtga

SEQ ID NO: 1273775 - DNA, 25 bp, Homo sapien
gtgagggttgtgtctgggagtgaca

SEQ ID NO: 1273776 - DNA, 25 bp, Homo sapien
tgagggttgtgtctgggagtgacag

SEQ ID NO: 1273777 - DNA, 25 bp, Homo sapien
ccgctctcgctcctctcgggctttc

SEQ ID NO: 1273778 - DNA, 25 bp, Homo sapien
tctgctcagcctcgcgcttggcctt

SEQ ID NO: 1273779 - DNA, 25 bp, Homo sapien
ggctttctgctcagcctcgcgcttg

SEQ ID NO: 1273780 - DNA, 25 bp, Homo sapien
tcccgctctcgctcctctcgggctt

SEQ ID NO: 1273781 - DNA, 25 bp, Homo sapien
tagccccggtccaggtgtttgtaga

SEQ ID NO: 1273782 - DNA, 25 bp, Homo sapien
cagaggcatgaagtacaggtctgtc

SEQ ID NO: 1273783 - DNA, 25 bp, Homo sapien
ggtctgtccgggcacacgagttgta

SEQ ID NO: 1273784 - DNA, 25 bp, Homo sapien
gggcacacgagttgtagccccggtc

SEQ ID NO: 1273785 - DNA, 25 bp, Homo sapien
ggctgggccgaggtgccaggtcccg

SEQ ID NO: 1273786 - DNA, 25 bp, Homo sapien
tcaggctcctcagcgtcgtccagag

SEQ ID NO: 1273787 - DNA, 25 bp, Homo sapien
tgaagccgccgcaccagagcagggt

SEQ ID NO: 1273788 - DNA, 25 bp, Homo sapien
tcctccttgatctggacggtgggga

SEQ ID NO: 1273789 - DNA, 25 bp, Homo sapien
ggcgaggagggcaatggctggctct

SEQ ID NO: 1273790 - DNA, 25 bp, Homo sapien
tggctctgaggcatgagttgcaggg

SEQ ID NO: 1273791 - DNA, 25 bp, Homo sapien
tgggcgggcgaggagggcaatggct

SEQ ID NO: 1273792 - DNA, 25 bp, Homo sapien
caatggctggctctgaggcatgagt

SEQ ID NO: 1273793 - DNA, 25 bp, Homo sapien
ctgttgggactgcagcgctgactga

SEQ ID NO: 1273794 - DNA, 25 bp, Homo sapien
cgacggggggtgatgtgtggacagg

SEQ ID NO: 1273795 - DNA, 25 bp, Homo sapien
gctgcagggaggtgtgagggtacgc

SEQ ID NO: 1273796 - DNA, 25 bp, Homo sapien
cttgatgtggggcatggccaagggc

SEQ ID NO: 1273797 - DNA, 25 bp, Homo sapien
gggccgggtgggccctgaccgtgca

SEQ ID NO: 1273798 - DNA, 25 bp, Homo sapien
caggctgtgagggccgggtgggccc

SEQ ID NO: 1273799 - DNA, 25 bp, Homo sapien
tgtgagggccgggtgggccctgacc

SEQ ID NO: 1273800 - DNA, 25 bp, Homo sapien
cgggtgggccctgaccgtgcagtgg

SEQ ID NO: 1273801 - DNA, 25 bp, Homo sapien
gggatgcggtgagggcggccgctgg

SEQ ID NO: 1273802 - DNA, 25 bp, Homo sapien
gctggcccgccgacccagtcagagg

SEQ ID NO: 1273803 - DNA, 25 bp, Homo sapien
aggccggtgcctgttggatgtgggt

SEQ ID NO: 1273804 - DNA, 25 bp, Homo sapien
ctgggggtgcaaggccggtgcctgt

SEQ ID NO: 1273805 - DNA, 25 bp, Homo sapien
tccgagtcactctcattgtcctggg

SEQ ID NO: 1273806 - DNA, 25 bp, Homo sapien
actgctaccctcatcgttgacgctg

SEQ ID NO: 1273807 - DNA, 25 bp, Homo sapien
gattgtcctggtcgatgtctttggg

SEQ ID NO: 1273808 - DNA, 25 bp, Homo sapien
tgctgggctgacgagtccgagtcac

SEQ ID NO: 1273809 - DNA, 25 bp, Homo sapien
tcagatggcgagttgggcctgctga

SEQ ID NO: 1273810 - DNA, 25 bp, Homo sapien
cttcagatggcgagttgggcctgct

SEQ ID NO: 1273811 - DNA, 25 bp, Homo sapien
cagatggcgagttgggcctgctgat

SEQ ID NO: 1273812 - DNA, 25 bp, Homo sapien
agatggcgagttgggcctgctgatc

SEQ ID NO: 1273813 - DNA, 25 bp, Homo sapien
gaggggaagaggcttcctccttcac

SEQ ID NO: 1273814 - DNA, 25 bp, Homo sapien
tgtcagcctcctccgtatcagaggc

SEQ ID NO: 1273815 - DNA, 25 bp, Homo sapien
gtcctgtcagcctcctccgtatcag

SEQ ID NO: 1273816 - DNA, 25 bp, Homo sapien
aggccaccttctcccgctggcgttt

SEQ ID NO: 1273817 - DNA, 25 bp, Homo sapien
agctgatcacgaataccagcaaacc

SEQ ID NO: 1273818 - DNA, 25 bp, Homo sapien
gggagctgatcacgaataccagcaa

SEQ ID NO: 1273819 - DNA, 25 bp, Homo sapien
ccagttttaatgtgagggagggaca

SEQ ID NO: 1273820 - DNA, 25 bp, Homo sapien
tgagggagctgatcacgaataccag

SEQ ID NO: 1273821 - DNA, 25 bp, Homo sapien
tccgaccactgcgtagtgtcgacat

SEQ ID NO: 1273822 - DNA, 25 bp, Homo sapien
agcggatgtcttcattgatgggtga

SEQ ID NO: 1273823 - DNA, 25 bp, Homo sapien
tccggccgctggagcggatgtcttc

SEQ ID NO: 1273824 - DNA, 25 bp, Homo sapien
cattgatgggtgaggtgcgaccatc

SEQ ID NO: 1273825 - DNA, 25 bp, Homo sapien
tccaggactttgtctggtaaacaag

SEQ ID NO: 1273826 - DNA, 25 bp, Homo sapien
gagagcctgcactgagccagaagct

SEQ ID NO: 1273827 - DNA, 25 bp, Homo sapien
tacaaaacccagagcaggatgccac

SEQ ID NO: 1273828 - DNA, 25 bp, Homo sapien
tgacaccacaagcagcagccttgga

SEQ ID NO: 1273829 - DNA, 25 bp, Homo sapien
agccccgactccgccgtgtcctcat

SEQ ID NO: 1273830 - DNA, 25 bp, Homo sapien
atcatcctcttccttgacgggtttg

SEQ ID NO: 1273831 - DNA, 25 bp, Homo sapien
tcatcctcttccttgacgggtttga

SEQ ID NO: 1273832 - DNA, 25 bp, Homo sapien
tcctcttccttgacgggtttgaaca

SEQ ID NO: 1273833 - DNA, 25 bp, Homo sapien
catcctcttccttgacgggtttgaa

SEQ ID NO: 1273834 - DNA, 25 bp, Homo sapien
ggcctccgtggtgccaatctttgga

SEQ ID NO: 1273835 - DNA, 25 bp, Homo sapien
cacgggcttctcaatgggcgggagc

SEQ ID NO: 1273836 - DNA, 25 bp, Homo sapien
tgcgacagtcggtgcaaagcaggat

SEQ ID NO: 1273837 - DNA, 25 bp, Homo sapien
gggcgggagctcaccgtatttcttg

SEQ ID NO: 1273838 - DNA, 25 bp, Homo sapien
gtggcggcaggcgtaccccttcagc

SEQ ID NO: 1273839 - DNA, 25 bp, Homo sapien
cactgtcgaagtcatcttcactggc

SEQ ID NO: 1273840 - DNA, 25 bp, Homo sapien
actgtcctcactgtcgaagtcatct

SEQ ID NO: 1273841 - DNA, 25 bp, Homo sapien
gtcgaagtcatcttcactggctgaa

SEQ ID NO: 1273842 - DNA, 25 bp, Homo sapien
ggtgggggagacaccatcatgctca

SEQ ID NO: 1273843 - DNA, 25 bp, Homo sapien
ctgggcgtggcaggcacatagtggg

SEQ ID NO: 1273844 - DNA, 25 bp, Homo sapien
ggggtgggggagacaccatcatgct

SEQ ID NO: 1273845 - DNA, 25 bp, Homo sapien
tgggggtgggggagacaccatcatg

SEQ ID NO: 1273846 - DNA, 25 bp, Homo sapien
tgcggtgcctacgatgggctcggga

SEQ ID NO: 1273847 - DNA, 25 bp, Homo sapien
gtcttaatcctcctgaacacggcct

SEQ ID NO: 1273848 - DNA, 25 bp, Homo sapien
aatagtaatagaaggtgatcagctc

SEQ ID NO: 1273849 - DNA, 25 bp, Homo sapien
tgtggacgcggtgcgagtcttaatc

SEQ ID NO: 1273850 - DNA, 25 bp, Homo sapien
cttctacttcctcagtccaagtcat

SEQ ID NO: 1273851 - DNA, 25 bp, Homo sapien
agtggttccttctacttcctcagtc

SEQ ID NO: 1273852 - DNA, 25 bp, Homo sapien
ttccttctacttcctcagtccaagt

SEQ ID NO: 1273853 - DNA, 25 bp, Homo sapien
ggttccttctacttcctcagtccaa

SEQ ID NO: 1273854 - DNA, 25 bp, Homo sapien
ccagggttaggctgcaagtctatca

SEQ ID NO: 1273855 - DNA, 25 bp, Homo sapien
gctgcttggcaccaggcaatctggg

SEQ ID NO: 1273856 - DNA, 25 bp, Homo sapien
tcccagcagaggtgtctttccaggc

SEQ ID NO: 1273857 - DNA, 25 bp, Homo sapien
gcaaaaagcctttggcaatgacagg

SEQ ID NO: 1273858 - DNA, 25 bp, Homo sapien
ggcaaccggttgtcttccagtaaca

SEQ ID NO: 1273859 - DNA, 25 bp, Homo sapien
tgaagagctgccctaactggagtgc

SEQ ID NO: 1273860 - DNA, 25 bp, Homo sapien
aacatctgaggtgagaagccgggca

SEQ ID NO: 1273861 - DNA, 25 bp, Homo sapien
cagcagcgatattcaggagcagcca

SEQ ID NO: 1273862 - DNA, 25 bp, Homo sapien
catcaaagtgacatccgtcagggtc

SEQ ID NO: 1273863 - DNA, 25 bp, Homo sapien
tatatctgtgcatttcccgaggtga

SEQ ID NO: 1273864 - DNA, 25 bp, Homo sapien
ggaaatgggaacagctactctaaca

SEQ ID NO: 1273865 - DNA, 25 bp, Homo sapien
tgccgcaggacgtttgaaagggatc

SEQ ID NO: 1273866 - DNA, 25 bp, Homo sapien
tgtttctgaccacttaattctggtc

SEQ ID NO: 1273867 - DNA, 25 bp, Homo sapien
catggatctccgaatctgtgactgt

SEQ ID NO: 1273868 - DNA, 25 bp, Homo sapien
ggtcatgcagcccatacttcacaga

SEQ ID NO: 1273869 - DNA, 25 bp, Homo sapien
ggtcagtttccacaggcaagagccc

SEQ ID NO: 1273870 - DNA, 25 bp, Homo sapien
accaagcctggcccatcaagagctt

SEQ ID NO: 1273871 - DNA, 25 bp, Homo sapien
agcctggcccatcaagagctttttt

SEQ ID NO: 1273872 - DNA, 25 bp, Homo sapien
ccaagcctggcccatcaagagcttt

SEQ ID NO: 1273873 - DNA, 25 bp, Homo sapien
caagcctggcccatcaagagctttt

SEQ ID NO: 1273874 - DNA, 25 bp, Homo sapien
taaggtgacttcagacttgagccca

SEQ ID NO: 1273875 - DNA, 25 bp, Homo sapien
taccacgttcggcttcttgagtcct

SEQ ID NO: 1273876 - DNA, 25 bp, Homo sapien
tgctgtaacgtctgccagggcttgg

SEQ ID NO: 1273877 - DNA, 25 bp, Homo sapien
tgatgaaggaaccaaagtcagggca

SEQ ID NO: 1273878 - DNA, 25 bp, Homo sapien
gatgcacaggcaagacgttactacg

SEQ ID NO: 1273879 - DNA, 25 bp, Homo sapien
gaactccgagtgagaacagctgcca

SEQ ID NO: 1273880 - DNA, 25 bp, Homo sapien
tacgttacacacaatggatgcccgg

SEQ ID NO: 1273881 - DNA, 25 bp, Homo sapien
tatgcctgcaagctagccatgctgc

SEQ ID NO: 1273882 - DNA, 25 bp, Homo sapien
tctggatgccatgaggtactaaaac

SEQ ID NO: 1273883 - DNA, 25 bp, Homo sapien
gaacatgtaagctgggatgcacgga

SEQ ID NO: 1273884 - DNA, 25 bp, Homo sapien
tgagcggttgtatgctaactccaga

SEQ ID NO: 1273885 - DNA, 25 bp, Homo sapien
tgtgctgacgtgctcagaaaaggaa

SEQ ID NO: 1273886 - DNA, 25 bp, Homo sapien
gacgctctattcatacaaggctgtg

SEQ ID NO: 1273887 - DNA, 25 bp, Homo sapien
ttgcaccggagaggaaacagtctgt

SEQ ID NO: 1273888 - DNA, 25 bp, Homo sapien
gatgctcaatatgactggaaaccag

SEQ ID NO: 1273889 - DNA, 25 bp, Homo sapien
ggagactgcctaaatgaccaagaga

SEQ ID NO: 1273890 - DNA, 25 bp, Homo sapien
aatgtgcgcggccactaggagtaca

SEQ ID NO: 1273891 - DNA, 25 bp, Homo sapien
gaagatcaccagaaaatacgcagcc

SEQ ID NO: 1273892 - DNA, 25 bp, Homo sapien
acaaacaggtgcatcaatgtgcgcg

SEQ ID NO: 1273893 - DNA, 25 bp, Homo sapien
cacagggccttgctatacatcgaaa

SEQ ID NO: 1273894 - DNA, 25 bp, Homo sapien
ggataactcctacttgctcaccatg

SEQ ID NO: 1273895 - DNA, 25 bp, Homo sapien
cagctggaacacaagactagagtct

SEQ ID NO: 1273896 - DNA, 25 bp, Homo sapien
tatggtatgtcatgcaacggtggac

SEQ ID NO: 1273897 - DNA, 25 bp, Homo sapien
gctgggttcagttcggtaatattcc

SEQ ID NO: 1273898 - DNA, 25 bp, Homo sapien
cccagcctatattgctattttcaca

SEQ ID NO: 1273899 - DNA, 25 bp, Homo sapien
acagcccccagcctatattgctatt

SEQ ID NO: 1273900 - DNA, 25 bp, Homo sapien
tctgctattacctttatgtttcctt

SEQ ID NO: 1273901 - DNA, 25 bp, Homo sapien
taatatctgctattacctttatgtt

SEQ ID NO: 1273902 - DNA, 25 bp, Homo sapien
ttagccacctgagtagctgggatta

SEQ ID NO: 1273903 - DNA, 25 bp, Homo sapien
ttctcctgccttagccacctgagta

SEQ ID NO: 1273904 - DNA, 25 bp, Homo sapien
ttacaggcacgcgtcaccacgtcca

SEQ ID NO: 1273905 - DNA, 25 bp, Homo sapien
caacctccatctcgcgggtttaagt

SEQ ID NO: 1273906 - DNA, 25 bp, Homo sapien
agactggtgccaaccgtgtcagggc

SEQ ID NO: 1273907 - DNA, 25 bp, Homo sapien
gataaaccaactgactatatgtcgg

SEQ ID NO: 1273908 - DNA, 25 bp, Homo sapien
gatgcaaggcactggctaccaaagg

SEQ ID NO: 1273909 - DNA, 25 bp, Homo sapien
gagaatgacaattagccctagacag

SEQ ID NO: 1273910 - DNA, 25 bp, Homo sapien
gatgttaatatttggagaatctggg

SEQ ID NO: 1273911 - DNA, 25 bp, Homo sapien
gaatatatgggaatgctttatactc

SEQ ID NO: 1273912 - DNA, 25 bp, Homo sapien
gattataggcatgatgctgtcccca

SEQ ID NO: 1273913 - DNA, 25 bp, Homo sapien
gcaacaggtccgcaacttactctca

SEQ ID NO: 1273914 - DNA, 25 bp, Homo sapien
tacaaagggccgaatgataaaggtc

SEQ ID NO: 1273915 - DNA, 25 bp, Homo sapien
ccagaacggctgttgcaggaagcag

SEQ ID NO: 1273916 - DNA, 25 bp, Homo sapien
gatgcacacccaggaggcactaagt

SEQ ID NO: 1273917 - DNA, 25 bp, Homo sapien
tccaagggacgagatcagaacaatg

SEQ ID NO: 1273918 - DNA, 25 bp, Homo sapien
catctcccgtaaggtggcagacaca

SEQ ID NO: 1273919 - DNA, 25 bp, Homo sapien
tgctcgggctgaactaaagatatcc

SEQ ID NO: 1273920 - DNA, 25 bp, Homo sapien
gttttgatgggcaaatccaccccag

SEQ ID NO: 1273921 - DNA, 25 bp, Homo sapien
gaaacaaatggccagctgagtccca

SEQ ID NO: 1273922 - DNA, 25 bp, Homo sapien
acaaagcgacaatggcagcagctgc

SEQ ID NO: 1273923 - DNA, 25 bp, Homo sapien
gcatcactgaagaaagtctccagct

SEQ ID NO: 1273924 - DNA, 25 bp, Homo sapien
gatgatgactcactaacagactaaa

SEQ ID NO: 1273925 - DNA, 25 bp, Homo sapien
cactcatacagcaaagacacgggat

SEQ ID NO: 1273926 - DNA, 25 bp, Homo sapien
tgttcatgtgcacaccctttaggga

SEQ ID NO: 1273927 - DNA, 25 bp, Homo sapien
tgtggcagagtgaaccccaagtcct

SEQ ID NO: 1273928 - DNA, 25 bp, Homo sapien
ttgactggctcaataaacctgctga

SEQ ID NO: 1273929 - DNA, 25 bp, Homo sapien
ccgctgcgcaaacaggagagttgat

SEQ ID NO: 1273930 - DNA, 25 bp, Homo sapien
cacatgtgtgcagagtaaaaatgca

SEQ ID NO: 1273931 - DNA, 25 bp, Homo sapien
tgcatggaaaagaggaatcagagtc

SEQ ID NO: 1273932 - DNA, 25 bp, Homo sapien
gctgttacaggactctaagggtgcc

SEQ ID NO: 1273933 - DNA, 25 bp, Homo sapien
gtattaaaatgaggtccctgcccag

SEQ ID NO: 1273934 - DNA, 25 bp, Homo sapien
tagcaaatgtcaggcataataaatc

SEQ ID NO: 1273935 - DNA, 25 bp, Homo sapien
ctctcattagttccaatgatggtga

SEQ ID NO: 1273936 - DNA, 25 bp, Homo sapien
aacaactctctcattagttccaatg

SEQ ID NO: 1273937 - DNA, 25 bp, Homo sapien
aatcctccattgctgcaaacaactc

SEQ ID NO: 1273938 - DNA, 25 bp, Homo sapien
ctagctcaaaaggttggtgtactga

SEQ ID NO: 1273939 - DNA, 25 bp, Homo sapien
gctcaaaaggttggtgtactgagaa

SEQ ID NO: 1273940 - DNA, 25 bp, Homo sapien
agctcaaaaggttggtgtactgaga

SEQ ID NO: 1273941 - DNA, 25 bp, Homo sapien
tagctcaaaaggttggtgtactgag

SEQ ID NO: 1273942 - DNA, 25 bp, Homo sapien
gttacataaagtccaattgtactca

SEQ ID NO: 1273943 - DNA, 25 bp, Homo sapien
caagttacataaagtccaattgtac

SEQ ID NO: 1273944 - DNA, 25 bp, Homo sapien
tcaagttacataaagtccaattgta

SEQ ID NO: 1273945 - DNA, 25 bp, Homo sapien
agttacataaagtccaattgtactc

SEQ ID NO: 1273946 - DNA, 25 bp, Homo sapien
tgcctgagtcccttaacgaagcgtt

SEQ ID NO: 1273947 - DNA, 25 bp, Homo sapien
agcagctcctttctaattctgaaga

SEQ ID NO: 1273948 - DNA, 25 bp, Homo sapien
ccgtactgcctgagtcccttaacga

SEQ ID NO: 1273949 - DNA, 25 bp, Homo sapien
gaagaagttcttcccgtactgcctg

SEQ ID NO: 1273950 - DNA, 25 bp, Homo sapien
aacccggtgactcttctccagaagg

SEQ ID NO: 1273951 - DNA, 25 bp, Homo sapien
tcccagaagtgtcgagcagaaaggg

SEQ ID NO: 1273952 - DNA, 25 bp, Homo sapien
ctgagaaccaagcttcccagaagtg

SEQ ID NO: 1273953 - DNA, 25 bp, Homo sapien
cagaaccaaacccggtgactcttct

SEQ ID NO: 1273954 - DNA, 25 bp, Homo sapien
ccggaaggcaccagtatcacagaag

SEQ ID NO: 1273955 - DNA, 25 bp, Homo sapien
cgctttccttaatccaaagaatttg

SEQ ID NO: 1273956 - DNA, 25 bp, Homo sapien
gtccgtcattaaaagccactccgag

SEQ ID NO: 1273957 - DNA, 25 bp, Homo sapien
cgggaacacgaaagccagcgggcct

SEQ ID NO: 1273958 - DNA, 25 bp, Homo sapien
gggcggcaagaggccgtcgcctgtc

SEQ ID NO: 1273959 - DNA, 25 bp, Homo sapien
ccagcagccacaggtaagcgcccgg

SEQ ID NO: 1273960 - DNA, 25 bp, Homo sapien
cagcagccacaggtaagcgcccggg

SEQ ID NO: 1273961 - DNA, 25 bp, Homo sapien
gtccggggcggcaagaggccgtcgc

SEQ ID NO: 1273962 - DNA, 25 bp, Homo sapien
cacgttccggatggacgaagtcggc

SEQ ID NO: 1273963 - DNA, 25 bp, Homo sapien
tcacaactaaatcaccgcggaagct

SEQ ID NO: 1273964 - DNA, 25 bp, Homo sapien
ttccggacaggagaacatcaaggcg

SEQ ID NO: 1273965 - DNA, 25 bp, Homo sapien
ggcggtaaagcacagaaacttcctc

SEQ ID NO: 1273966 - DNA, 25 bp, Homo sapien
tgcttgctgatgtcttagaggaagt

SEQ ID NO: 1273967 - DNA, 25 bp, Homo sapien
tctgcttgctgatgtcttagaggaa

SEQ ID NO: 1273968 - DNA, 25 bp, Homo sapien
ttgctgatgtcttagaggaagtgac

SEQ ID NO: 1273969 - DNA, 25 bp, Homo sapien
cttgctgatgtcttagaggaagtga

SEQ ID NO: 1273970 - DNA, 25 bp, Homo sapien
caaggatccggttgcagagagccct

SEQ ID NO: 1273971 - DNA, 25 bp, Homo sapien
gatgaggacctcaactactggcaca

SEQ ID NO: 1273972 - DNA, 25 bp, Homo sapien
tagggacagaccagttaaagaggct

SEQ ID NO: 1273973 - DNA, 25 bp, Homo sapien
tcaggccgcacggaagagttcctaa

SEQ ID NO: 1273974 - DNA, 25 bp, Homo sapien
tgccaactggcccacactgggggac

SEQ ID NO: 1273975 - DNA, 25 bp, Homo sapien
cagccagatgtccagtaatgccaac

SEQ ID NO: 1273976 - DNA, 25 bp, Homo sapien
gggacctctgtctcaactccagaat

SEQ ID NO: 1273977 - DNA, 25 bp, Homo sapien
caactccagaatctgggtaaggcat

SEQ ID NO: 1273978 - DNA, 25 bp, Homo sapien
ggaacagtcgtaaagcagggtagcc

SEQ ID NO: 1273979 - DNA, 25 bp, Homo sapien
taacaatggaacagtcgtaaagcag

SEQ ID NO: 1273980 - DNA, 25 bp, Homo sapien
cctggttctcttaacaatggaacag

SEQ ID NO: 1273981 - DNA, 25 bp, Homo sapien
tctcttaacaatggaacagtcgtaa

SEQ ID NO: 1273982 - DNA, 25 bp, Homo sapien
tagagaactacgctggttgaaaccc

SEQ ID NO: 1273983 - DNA, 25 bp, Homo sapien
cctgcgctatcggtggaatcagaga

SEQ ID NO: 1273984 - DNA, 25 bp, Homo sapien
aaagggtgactgaagcgccaggtct

SEQ ID NO: 1273985 - DNA, 25 bp, Homo sapien
tatcatgataatggacagctcctgg

SEQ ID NO: 1273986 - DNA, 25 bp, Homo sapien
agggagggtcccaagatcaggggct

SEQ ID NO: 1273987 - DNA, 25 bp, Homo sapien
tggtaatacgggagcatgaacacag

SEQ ID NO: 1273988 - DNA, 25 bp, Homo sapien
gcttttgtttggaacaatagcgctc

SEQ ID NO: 1273989 - DNA, 25 bp, Homo sapien
cacaaggctacgctgctggcttttg

SEQ ID NO: 1273990 - DNA, 25 bp, Homo sapien
aatagcgctcccatgatacctcact

SEQ ID NO: 1273991 - DNA, 25 bp, Homo sapien
taacgtggagcttccgggctcaaat

SEQ ID NO: 1273992 - DNA, 25 bp, Homo sapien
ttcactgtaacgtggagcttccggg

SEQ ID NO: 1273993 - DNA, 25 bp, Homo sapien
cactgtaacgtggagcttccgggct

SEQ ID NO: 1273994 - DNA, 25 bp, Homo sapien
acagttcactgtaacgtggagcttc

SEQ ID NO: 1273995 - DNA, 25 bp, Homo sapien
accgctgacagatagccaagtggct

SEQ ID NO: 1273996 - DNA, 25 bp, Homo sapien
cagtaaatcgtctcccagtctgggc

SEQ ID NO: 1273997 - DNA, 25 bp, Homo sapien
gttccaccagtaaatcgtctcccag

SEQ ID NO: 1273998 - DNA, 25 bp, Homo sapien
ggttgccaggcaacccacacaaggg

SEQ ID NO: 1273999 - DNA, 25 bp, Homo sapien
acacatgtagatgggccagccccaa

SEQ ID NO: 1274000 - DNA, 25 bp, Homo sapien
atcagcaaccacctgcggcaggaac

SEQ ID NO: 1274001 - DNA, 25 bp, Homo sapien
tcagccatcatctacacatgtagat

SEQ ID NO: 1274002 - DNA, 25 bp, Homo sapien
catcatctacacatgtagatgggcc

SEQ ID NO: 1274003 - DNA, 25 bp, Homo sapien
cagctctcaacgtctctcactaggg

SEQ ID NO: 1274004 - DNA, 25 bp, Homo sapien
gactccagcgtgctaatagtgtgaa

SEQ ID NO: 1274005 - DNA, 25 bp, Homo sapien
tgaagttcctcatgtgactccagcg

SEQ ID NO: 1274006 - DNA, 25 bp, Homo sapien
tcctaacatcctgggacactggaaa

SEQ ID NO: 1274007 - DNA, 25 bp, Homo sapien
tcacacagtcaacaatcacaggaag

SEQ ID NO: 1274008 - DNA, 25 bp, Homo sapien
aacaatcacaggaagagccaaaccg

SEQ ID NO: 1274009 - DNA, 25 bp, Homo sapien
caggaagagccaaaccgacaccaaa

SEQ ID NO: 1274010 - DNA, 25 bp, Homo sapien
cagtcaacaatcacaggaagagcca

SEQ ID NO: 1274011 - DNA, 25 bp, Homo sapien
tcaattagcatccccagtatttcca

SEQ ID NO: 1274012 - DNA, 25 bp, Homo sapien
taagaccgcaaggaatgaagagctg

SEQ ID NO: 1274013 - DNA, 25 bp, Homo sapien
agtttacaaactcggaggacaatca

SEQ ID NO: 1274014 - DNA, 25 bp, Homo sapien
actcggaggacaatcaactcagaaa

SEQ ID NO: 1274015 - DNA, 25 bp, Homo sapien
gatcagaagtcagcacgaggaggca

SEQ ID NO: 1274016 - DNA, 25 bp, Homo sapien
cgagtgacgcgcagaggggagacag

SEQ ID NO: 1274017 - DNA, 25 bp, Homo sapien
gcgagtgacgcgcagaggggagaca

SEQ ID NO: 1274018 - DNA, 25 bp, Homo sapien
gactggagaacgagtagggtctgca

SEQ ID NO: 1274019 - DNA, 25 bp, Homo sapien
tggccgcgggatgggccaggaaccg

SEQ ID NO: 1274020 - DNA, 25 bp, Homo sapien
gcgggatgggccaggaaccgagctg

SEQ ID NO: 1274021 - DNA, 25 bp, Homo sapien
gctgagactggagaacgagtagggt

SEQ ID NO: 1274022 - DNA, 25 bp, Homo sapien
tgaaaggcaaatgtcaagcggtaac

SEQ ID NO: 1274023 - DNA, 25 bp, Homo sapien
tcaataggtgtattagtgccagcct

SEQ ID NO: 1274024 - DNA, 25 bp, Homo sapien
tagggaggtatcacaagctagcttg

SEQ ID NO: 1274025 - DNA, 25 bp, Homo sapien
caagccaagcatggtagagcatgcc

SEQ ID NO: 1274026 - DNA, 25 bp, Homo sapien
tcaagtctttctgtacaattaaggg

SEQ ID NO: 1274027 - DNA, 25 bp, Homo sapien
cattctgcatgactgaagcttctgc

SEQ ID NO: 1274028 - DNA, 25 bp, Homo sapien
ggcgctgccacggacagccattctg

SEQ ID NO: 1274029 - DNA, 25 bp, Homo sapien
gttggacaatctttcccgacatcta

SEQ ID NO: 1274030 - DNA, 25 bp, Homo sapien
cagggaggtcacacactgagacgcc

SEQ ID NO: 1274031 - DNA, 25 bp, Homo sapien
actgagacgccggtggcccgatgcc

SEQ ID NO: 1274032 - DNA, 25 bp, Homo sapien
aggtcacacactgagacgccggtgg

SEQ ID NO: 1274033 - DNA, 25 bp, Homo sapien
ggtggcccgatgccccagagcacaa

SEQ ID NO: 1274034 - DNA, 25 bp, Homo sapien
cagggctttgccagcatcgtaaccg

SEQ ID NO: 1274035 - DNA, 25 bp, Homo sapien
tgccagcatcgtaaccgctttcatg

SEQ ID NO: 1274036 - DNA, 25 bp, Homo sapien
acttctcgatgagcttgggcacagg

SEQ ID NO: 1274037 - DNA, 25 bp, Homo sapien
cagcacttctcgatgagcttgggca

SEQ ID NO: 1274038 - DNA, 25 bp, Homo sapien
aaaaaatcggcctcaagtgtgatca

SEQ ID NO: 1274039 - DNA, 25 bp, Homo sapien
aaaatcggcctcaagtgtgatcagc

SEQ ID NO: 1274040 - DNA, 25 bp, Homo sapien
taataacatcaacctcttagcgaca

SEQ ID NO: 1274041 - DNA, 25 bp, Homo sapien
cctcttagcgacatgtgaggataat

SEQ ID NO: 1274042 - DNA, 25 bp, Homo sapien
taaaatcttatgtgcctgctaccag

SEQ ID NO: 1274043 - DNA, 25 bp, Homo sapien
gcattccggccttttggtgaaccaa

SEQ ID NO: 1274044 - DNA, 25 bp, Homo sapien
tccgtttgttagagagcatggctgc

SEQ ID NO: 1274045 - DNA, 25 bp, Homo sapien
tcattaatccctgtggcattccggc

SEQ ID NO: 1274046 - DNA, 25 bp, Homo sapien
cttgacctcatgatccccccctgcc

SEQ ID NO: 1274047 - DNA, 25 bp, Homo sapien
tcttgacctcatgatccccccctgc

SEQ ID NO: 1274048 - DNA, 25 bp, Homo sapien
ctcttgacctcatgatccccccctg

SEQ ID NO: 1274049 - DNA, 25 bp, Homo sapien
ttgacctcatgatccccccctgcct

SEQ ID NO: 1274050 - DNA, 25 bp, Homo sapien
aatggcacaatcagcccacttccgc

SEQ ID NO: 1274051 - DNA, 25 bp, Homo sapien
cagcttcataatagggaaacttacc

SEQ ID NO: 1274052 - DNA, 25 bp, Homo sapien
tgctgggatatatcaaatagccctt

SEQ ID NO: 1274053 - DNA, 25 bp, Homo sapien
gaagttgttatggactacaacagct

SEQ ID NO: 1274054 - DNA, 25 bp, Homo sapien
aaatctttccgcctcttttccacat

SEQ ID NO: 1274055 - DNA, 25 bp, Homo sapien
tcttttccacatcactaaactgcat

SEQ ID NO: 1274056 - DNA, 25 bp, Homo sapien
cctcttttccacatcactaaactgc

SEQ ID NO: 1274057 - DNA, 25 bp, Homo sapien
tgtaaatctttccgcctcttttcca

SEQ ID NO: 1274058 - DNA, 25 bp, Homo sapien
agtccttggtgtccttgaacccagt

SEQ ID NO: 1274059 - DNA, 25 bp, Homo sapien
aagtccttggtgtccttgaacccag

SEQ ID NO: 1274060 - DNA, 25 bp, Homo sapien
gaagtccttggtgtccttgaaccca

SEQ ID NO: 1274061 - DNA, 25 bp, Homo sapien
tccttggtgtccttgaacccagtag

SEQ ID NO: 1274062 - DNA, 25 bp, Homo sapien
tggatctcaggcagtcttattagca

SEQ ID NO: 1274063 - DNA, 25 bp, Homo sapien
cattttctgtctgcgtgatgttgca

SEQ ID NO: 1274064 - DNA, 25 bp, Homo sapien
gtcattaaacatctctggatctcag

SEQ ID NO: 1274065 - DNA, 25 bp, Homo sapien
tgcgtattaccacaaggtttcaagt

SEQ ID NO: 1274066 - DNA, 25 bp, Homo sapien
tataatgaacccatgaattacatct

SEQ ID NO: 1274067 - DNA, 25 bp, Homo sapien
taatgaacccatgaattacatctcc

SEQ ID NO: 1274068 - DNA, 25 bp, Homo sapien
aatgaacccatgaattacatctccc

SEQ ID NO: 1274069 - DNA, 25 bp, Homo sapien
tgaacccatgaattacatctccctg

SEQ ID NO: 1274070 - DNA, 25 bp, Homo sapien
cagtttctactatgccaaagcatac

SEQ ID NO: 1274071 - DNA, 25 bp, Homo sapien
tgtttatacatcacaagaaactgtc

SEQ ID NO: 1274072 - DNA, 25 bp, Homo sapien
tacttaagttagactgcattcaggc

SEQ ID NO: 1274073 - DNA, 25 bp, Homo sapien
taattccagtccatgaagaacaata

SEQ ID NO: 1274074 - DNA, 25 bp, Homo sapien
cattcttttgttaacggacaccagt

SEQ ID NO: 1274075 - DNA, 25 bp, Homo sapien
tcagaggcatcgagtaaaggtggac

SEQ ID NO: 1274076 - DNA, 25 bp, Homo sapien
agtactccaaagtgctgcagtggct

SEQ ID NO: 1274077 - DNA, 25 bp, Homo sapien
tgggaaaatatacaagcgactgtac

SEQ ID NO: 1274078 - DNA, 25 bp, Homo sapien
tgcagtgcactgatgtcatctcggc

SEQ ID NO: 1274079 - DNA, 25 bp, Homo sapien
cagtgcactgatgtcatctcggctc

SEQ ID NO: 1274080 - DNA, 25 bp, Homo sapien
ggctgcagtgcactgatgtcatctc

SEQ ID NO: 1274081 - DNA, 25 bp, Homo sapien
gctgcagtgcactgatgtcatctcg

SEQ ID NO: 1274082 - DNA, 25 bp, Homo sapien
gtttctatgctatcgaagaccattt

SEQ ID NO: 1274083 - DNA, 25 bp, Homo sapien
gaggttcaaggaagtgcaataaagc

SEQ ID NO: 1274084 - DNA, 25 bp, Homo sapien
cacatagatcataaaggaagaggta

SEQ ID NO: 1274085 - DNA, 25 bp, Homo sapien
cacacgacatgtttagcaggaccaa

SEQ ID NO: 1274086 - DNA, 25 bp, Homo sapien
gaaatggaaattacctcaaatagcc

SEQ ID NO: 1274087 - DNA, 25 bp, Homo sapien
gccctaataacgatcaatgagacag

SEQ ID NO: 1274088 - DNA, 25 bp, Homo sapien
aacacagaggccctaataacgatca

SEQ ID NO: 1274089 - DNA, 25 bp, Homo sapien
gaggccctaataacgatcaatgaga

SEQ ID NO: 1274090 - DNA, 25 bp, Homo sapien
agacaggtgtagtagcctgtagtcc

SEQ ID NO: 1274091 - DNA, 25 bp, Homo sapien
aaattagacaggtgtagtagcctgt

SEQ ID NO: 1274092 - DNA, 25 bp, Homo sapien
gaggccctgtcactagaagaaacaa

SEQ ID NO: 1274093 - DNA, 25 bp, Homo sapien
gctcatgtcttaatcccggcatttt

SEQ ID NO: 1274094 - DNA, 25 bp, Homo sapien
ttcctgtaacattccgcgaaatgca

SEQ ID NO: 1274095 - DNA, 25 bp, Homo sapien
ggccaaaagcttataaacaaccaga

SEQ ID NO: 1274096 - DNA, 25 bp, Homo sapien
aaatgattataagaggccatgaggc

SEQ ID NO: 1274097 - DNA, 25 bp, Homo sapien
tcaatggctatctgaggctggaagc

SEQ ID NO: 1274098 - DNA, 25 bp, Homo sapien
cagagtggtgtcatcccgagaggct

SEQ ID NO: 1274099 - DNA, 25 bp, Homo sapien
attcagagtggtgtcatcccgagag

SEQ ID NO: 1274100 - DNA, 25 bp, Homo sapien
tcacacattcctgcaaatgccgcca

SEQ ID NO: 1274101 - DNA, 25 bp, Homo sapien
gaggctgcgacacagccgtcctctg

SEQ ID NO: 1274102 - DNA, 25 bp, Homo sapien
gaggtcacagtcgttaactccaggc

SEQ ID NO: 1274103 - DNA, 25 bp, Homo sapien
catgttgggtcactgtatcaccatc

SEQ ID NO: 1274104 - DNA, 25 bp, Homo sapien
tccagaccagttcctcatgttgggt

SEQ ID NO: 1274105 - DNA, 25 bp, Homo sapien
gaaggaaatggttgcagatctggaa

SEQ ID NO: 1274106 - DNA, 25 bp, Homo sapien
caggtgccatgaccaccataaccag

SEQ ID NO: 1274107 - DNA, 25 bp, Homo sapien
gcaggtgccatgaccaccataacca

SEQ ID NO: 1274108 - DNA, 25 bp, Homo sapien
aggtgccatgaccaccataaccagc

SEQ ID NO: 1274109 - DNA, 25 bp, Homo sapien
gtgaaaagtcagatatttgcaagat

SEQ ID NO: 1274110 - DNA, 25 bp, Homo sapien
ctcagtgctgcttcaaccgcctagg

SEQ ID NO: 1274111 - DNA, 25 bp, Homo sapien
tgtgatcgtggctcagtgctgcttc

SEQ ID NO: 1274112 - DNA, 25 bp, Homo sapien
taaaaaggtaaatgttgccaattca

SEQ ID NO: 1274113 - DNA, 25 bp, Homo sapien
cagtaaatttgctccttttccaaga

SEQ ID NO: 1274114 - DNA, 25 bp, Homo sapien
gatgacggtgatggctatacaacaa

SEQ ID NO: 1274115 - DNA, 25 bp, Homo sapien
tattaacacggatgaaccatgagga

SEQ ID NO: 1274116 - DNA, 25 bp, Homo sapien
gaggtacttttatgaggcagaacag

SEQ ID NO: 1274117 - DNA, 25 bp, Homo sapien
cagtgatacgtacatacaatgggtc

SEQ ID NO: 1274118 - DNA, 25 bp, Homo sapien
aggaccgacacgaatctccccctgg

SEQ ID NO: 1274119 - DNA, 25 bp, Homo sapien
tgactaggaccgacacgaatctccc

SEQ ID NO: 1274120 - DNA, 25 bp, Homo sapien
ctgatgactaggaccgacacgaatc

SEQ ID NO: 1274121 - DNA, 25 bp, Homo sapien
tgatgactaggaccgacacgaatct

SEQ ID NO: 1274122 - DNA, 25 bp, Homo sapien
taggagcccctctcaaagttcaggg

SEQ ID NO: 1274123 - DNA, 25 bp, Homo sapien
tctcccaagccgtggacaaaacaga

SEQ ID NO: 1274124 - DNA, 25 bp, Homo sapien
gataatacagcctaacacagtgatg

SEQ ID NO: 1274125 - DNA, 25 bp, Homo sapien
aacaagatcggcgactaccagacca

SEQ ID NO: 1274126 - DNA, 25 bp, Homo sapien
ccacccatatcacagtcaggatttt

SEQ ID NO: 1274127 - DNA, 25 bp, Homo sapien
tccttccacccatatcacagtcagg

SEQ ID NO: 1274128 - DNA, 25 bp, Homo sapien
cttccacccatatcacagtcaggat

SEQ ID NO: 1274129 - DNA, 25 bp, Homo sapien
tctccttccacccatatcacagtca

SEQ ID NO: 1274130 - DNA, 25 bp, Homo sapien
tgcaggggctgaatggatcatccat

SEQ ID NO: 1274131 - DNA, 25 bp, Homo sapien
ctgcaggggctgaatggatcatcca

SEQ ID NO: 1274132 - DNA, 25 bp, Homo sapien
ctagctggattcctgaacctttact

SEQ ID NO: 1274133 - DNA, 25 bp, Homo sapien
gctctggtgagtctagctggattcc

SEQ ID NO: 1274134 - DNA, 25 bp, Homo sapien
acacgggctctggtgagtctagctg

SEQ ID NO: 1274135 - DNA, 25 bp, Homo sapien
gactaacacgggctctggtgagtct

SEQ ID NO: 1274136 - DNA, 25 bp, Homo sapien
gcagtctcagagacctcatagagct

SEQ ID NO: 1274137 - DNA, 25 bp, Homo sapien
gacctcatagagctttcactgagct

SEQ ID NO: 1274138 - DNA, 25 bp, Homo sapien
ggcacatgcagtctcagagacctca

SEQ ID NO: 1274139 - DNA, 25 bp, Homo sapien
tcaaaatggaggcacatgcagtctc

SEQ ID NO: 1274140 - DNA, 25 bp, Homo sapien
cttcacgcagaacgcagaaacttcc

SEQ ID NO: 1274141 - DNA, 25 bp, Homo sapien
taagccttcacgcagaacgcagaaa

SEQ ID NO: 1274142 - DNA, 25 bp, Homo sapien
gccttcacgcagaacgcagaaactt

SEQ ID NO: 1274143 - DNA, 25 bp, Homo sapien
ctaagccttcacgcagaacgcagaa

SEQ ID NO: 1274144 - DNA, 25 bp, Homo sapien
gacgcaatcaatctcaaccctgctg

SEQ ID NO: 1274145 - DNA, 25 bp, Homo sapien
tcatccacacactgtctctccacga

SEQ ID NO: 1274146 - DNA, 25 bp, Homo sapien
ataaagcccagccaacagactctgc

SEQ ID NO: 1274147 - DNA, 25 bp, Homo sapien
tgctgtttccgtaaataaagcccag

SEQ ID NO: 1274148 - DNA, 25 bp, Homo sapien
caggaaggttcaagattcaacatcg

SEQ ID NO: 1274149 - DNA, 25 bp, Homo sapien
tactagcccaatcaagtctagcttg

SEQ ID NO: 1274150 - DNA, 25 bp, Homo sapien
taaagttatggagtgcttggccttg

SEQ ID NO: 1274151 - DNA, 25 bp, Homo sapien
gctacttaagagaagcaacttcaca

SEQ ID NO: 1274152 - DNA, 25 bp, Homo sapien
tgagacaacatattcccaaaactgc

SEQ ID NO: 1274153 - DNA, 25 bp, Homo sapien
tatgagcagcaaagaatttcctccc

SEQ ID NO: 1274154 - DNA, 25 bp, Homo sapien
cagtgtcctcaagattcctacagtg

SEQ ID NO: 1274155 - DNA, 25 bp, Homo sapien
tcccttattggtatgtgagacaaca

SEQ ID NO: 1274156 - DNA, 25 bp, Homo sapien
tacataacctagatctaatcgtggg

SEQ ID NO: 1274157 - DNA, 25 bp, Homo sapien
gggaactgcacctctcttattagat

SEQ ID NO: 1274158 - DNA, 25 bp, Homo sapien
tatcactcatatagtatggctggcc

SEQ ID NO: 1274159 - DNA, 25 bp, Homo sapien
gaatcctctcactgtacctctctgg

SEQ ID NO: 1274160 - DNA, 25 bp, Homo sapien
acaaatataatgagaggccgaagtg

SEQ ID NO: 1274161 - DNA, 25 bp, Homo sapien
gcccgggggctcacaaatataatga

SEQ ID NO: 1274162 - DNA, 25 bp, Homo sapien
catccaggaagcttgctgatttacc

SEQ ID NO: 1274163 - DNA, 25 bp, Homo sapien
gctgatttacctattagctttaaca

SEQ ID NO: 1274164 - DNA, 25 bp, Homo sapien
cgtgacccacctacacctggccaag

SEQ ID NO: 1274165 - DNA, 25 bp, Homo sapien
gtgacccacctacacctggccaagc

SEQ ID NO: 1274166 - DNA, 25 bp, Homo sapien
tgacccacctacacctggccaagca

SEQ ID NO: 1274167 - DNA, 25 bp, Homo sapien
gagaaaaggtactctttgatgagca

SEQ ID NO: 1274168 - DNA, 25 bp, Homo sapien
aaaggtactctttgatgagcattat

SEQ ID NO: 1274169 - DNA, 25 bp, Homo sapien
aaggagaaaaggtactctttgatga

SEQ ID NO: 1274170 - DNA, 25 bp, Homo sapien
gaaaaggtactctttgatgagcatt

SEQ ID NO: 1274171 - DNA, 25 bp, Homo sapien
gaaaaatgaatccactcgggcttta

SEQ ID NO: 1274172 - DNA, 25 bp, Homo sapien
aactctctagcagcaaatatgtcag

SEQ ID NO: 1274173 - DNA, 25 bp, Homo sapien
aatccactcgggctttaaactctct

SEQ ID NO: 1274174 - DNA, 25 bp, Homo sapien
cagggttatatcctaatatgtagaa

SEQ ID NO: 1274175 - DNA, 25 bp, Homo sapien
tcccaggctcacgtgattcttccag

SEQ ID NO: 1274176 - DNA, 25 bp, Homo sapien
tcacttgggctgaagtgcagcggtt

SEQ ID NO: 1274177 - DNA, 25 bp, Homo sapien
ttccagctcagccttcccggtagct

SEQ ID NO: 1274178 - DNA, 25 bp, Homo sapien
attcttccagctcagccttcccggt

SEQ ID NO: 1274179 - DNA, 25 bp, Homo sapien
ggtcaagaattcaaaactaacagca

SEQ ID NO: 1274180 - DNA, 25 bp, Homo sapien
gcaatgcagtaatgctgaacttcaa

SEQ ID NO: 1274181 - DNA, 25 bp, Homo sapien
gataagggatagctaaggtcaagaa

SEQ ID NO: 1274182 - DNA, 25 bp, Homo sapien
atttctacaactgcgaagggctcag

SEQ ID NO: 1274183 - DNA, 25 bp, Homo sapien
ggccagctcgtccacacacatgtgt

SEQ ID NO: 1274184 - DNA, 25 bp, Homo sapien
agcgaggccggatcactaagtgaca

SEQ ID NO: 1274185 - DNA, 25 bp, Homo sapien
ggaagtgcgtccacacacacgtgtg

SEQ ID NO: 1274186 - DNA, 25 bp, Homo sapien
taagctaatctaccttcgtgaagag

SEQ ID NO: 1274187 - DNA, 25 bp, Homo sapien
catgtgaaacatcagctgacccgaa

SEQ ID NO: 1274188 - DNA, 25 bp, Homo sapien
tccatcaagttttactgcagcccag

SEQ ID NO: 1274189 - DNA, 25 bp, Homo sapien
caaagcctgccctaaagttgctact

SEQ ID NO: 1274190 - DNA, 25 bp, Homo sapien
ggttttcctgaataccatctgagca

SEQ ID NO: 1274191 - DNA, 25 bp, Homo sapien
gcatggtaagtgtcaacgtaatcag

SEQ ID NO: 1274192 - DNA, 25 bp, Homo sapien
cagaaatgaagagctctcggttctt

SEQ ID NO: 1274193 - DNA, 25 bp, Homo sapien
tcggttcttgataactgggtctgta

SEQ ID NO: 1274194 - DNA, 25 bp, Homo sapien
taagtgtcaacgtaatcagaaatga

SEQ ID NO: 1274195 - DNA, 25 bp, Homo sapien
gaacctcagattgacggtagtacca

SEQ ID NO: 1274196 - DNA, 25 bp, Homo sapien
cacagaatctggaacctcagattga

SEQ ID NO: 1274197 - DNA, 25 bp, Homo sapien
tatgtcgatcctgaaccaaatgctg

SEQ ID NO: 1274198 - DNA, 25 bp, Homo sapien
catttgacgttcatgaggagatggt

SEQ ID NO: 1274199 - DNA, 25 bp, Homo sapien
atatcatacccatgaccaaaagccc

SEQ ID NO: 1274200 - DNA, 25 bp, Homo sapien
aggaacaggatttcaggtggccaca

SEQ ID NO: 1274201 - DNA, 25 bp, Homo sapien
cacaagtgcatatcatacccatgac

SEQ ID NO: 1274202 - DNA, 25 bp, Homo sapien
aaaatctaacagcattaggaacagg

SEQ ID NO: 1274203 - DNA, 25 bp, Homo sapien
tgtagcgctggaactgaacagacct

SEQ ID NO: 1274204 - DNA, 25 bp, Homo sapien
actgaacagacctaaaaatccacag

SEQ ID NO: 1274205 - DNA, 25 bp, Homo sapien
cttggtgtattttagtgtagcgctg

SEQ ID NO: 1274206 - DNA, 25 bp, Homo sapien
aaatccacagggtcgtcttctgcat

SEQ ID NO: 1274207 - DNA, 25 bp, Homo sapien
gaacctgcctacagcccagaggtaa

SEQ ID NO: 1274208 - DNA, 25 bp, Homo sapien
tcgaacctaaagaagctgcctgtgg

SEQ ID NO: 1274209 - DNA, 25 bp, Homo sapien
tactctgaatgtttggtatcacagc

SEQ ID NO: 1274210 - DNA, 25 bp, Homo sapien
tgcttgcttgctatcctgagcgtgt

SEQ ID NO: 1274211 - DNA, 25 bp, Homo sapien
ggaacctgcatcagccatatactgt

SEQ ID NO: 1274212 - DNA, 25 bp, Homo sapien
ccagtggatagatggtgtctgacca

SEQ ID NO: 1274213 - DNA, 25 bp, Homo sapien
tcatgccaacagtctggtgaccaat

SEQ ID NO: 1274214 - DNA, 25 bp, Homo sapien
tatgtagctagccttccagtggata

SEQ ID NO: 1274215 - DNA, 25 bp, Homo sapien
cattgtgagatataccgctgaggct

SEQ ID NO: 1274216 - DNA, 25 bp, Homo sapien
cccatactcatcatgctgacacaga

SEQ ID NO: 1274217 - DNA, 25 bp, Homo sapien
gaagaaaatcacatactccttggcc

SEQ ID NO: 1274218 - DNA, 25 bp, Homo sapien
taagatattccactcaatgctacct

SEQ ID NO: 1274219 - DNA, 25 bp, Homo sapien
taaacctaaaggcaggcaacactga

SEQ ID NO: 1274220 - DNA, 25 bp, Homo sapien
taagggtattacaaacgcattgaac

SEQ ID NO: 1274221 - DNA, 25 bp, Homo sapien
cccagcagtagagcagtggaaggca

SEQ ID NO: 1274222 - DNA, 25 bp, Homo sapien
gaaatcaagtgtcatccactgtgcc

SEQ ID NO: 1274223 - DNA, 25 bp, Homo sapien
tgacaaccttgctaacattcagggt

SEQ ID NO: 1274224 - DNA, 25 bp, Homo sapien
tcctcccacttgagttgtgtgccac

SEQ ID NO: 1274225 - DNA, 25 bp, Homo sapien
tgagaacttgcattcctgacaacct

SEQ ID NO: 1274226 - DNA, 25 bp, Homo sapien
ccatcacagattaatcatagggcag

SEQ ID NO: 1274227 - DNA, 25 bp, Homo sapien
aatctctaacactgataccgggcag

SEQ ID NO: 1274228 - DNA, 25 bp, Homo sapien
tgaaatctctaacactgataccggg

SEQ ID NO: 1274229 - DNA, 25 bp, Homo sapien
tagtggtcacggtatagagaacagc

SEQ ID NO: 1274230 - DNA, 25 bp, Homo sapien
ttcacaggccaattagggtactgat

SEQ ID NO: 1274231 - DNA, 25 bp, Homo sapien
tcagccataagatctctggatatga

SEQ ID NO: 1274232 - DNA, 25 bp, Homo sapien
ccataagatctctggatatgagcat

SEQ ID NO: 1274233 - DNA, 25 bp, Homo sapien
cagccataagatctctggatatgag

SEQ ID NO: 1274234 - DNA, 25 bp, Homo sapien
gccataagatctctggatatgagca

SEQ ID NO: 1274235 - DNA, 25 bp, Homo sapien
tgatcacatactcatctgctaaaac

SEQ ID NO: 1274236 - DNA, 25 bp, Homo sapien
ctctctttaccaaaccaagctggac

SEQ ID NO: 1274237 - DNA, 25 bp, Homo sapien
cagtagcttcccaatttgctctatc

SEQ ID NO: 1274238 - DNA, 25 bp, Homo sapien
agttcatgtgaactgtctcagtagc

SEQ ID NO: 1274239 - DNA, 25 bp, Homo sapien
agggtcgtcgcctcgtccagtctct

SEQ ID NO: 1274240 - DNA, 25 bp, Homo sapien
cctcatcgaagggtcgtcgcctcgt

SEQ ID NO: 1274241 - DNA, 25 bp, Homo sapien
tcgaagggtcgtcgcctcgtccagt

SEQ ID NO: 1274242 - DNA, 25 bp, Homo sapien
acccctcatcgaagggtcgtcgcct

SEQ ID NO: 1274243 - DNA, 25 bp, Homo sapien
gaatatctaactaagtgctaggtcc

SEQ ID NO: 1274244 - DNA, 25 bp, Homo sapien
cagctgcaagttttgccttgaaggc

SEQ ID NO: 1274245 - DNA, 25 bp, Homo sapien
gaaatactgcaagaccaaatgtggc

SEQ ID NO: 1274246 - DNA, 25 bp, Homo sapien
aactcacagaaactggttccgacca

SEQ ID NO: 1274247 - DNA, 25 bp, Homo sapien
tatgaaactgcagagacttcagctg

SEQ ID NO: 1274248 - DNA, 25 bp, Homo sapien
caacagtactatggaccacagagaa

SEQ ID NO: 1274249 - DNA, 25 bp, Homo sapien
tcaagaggcttaaattccatttggg

SEQ ID NO: 1274250 - DNA, 25 bp, Homo sapien
gagtccacaatccacactcaacagt

SEQ ID NO: 1274251 - DNA, 25 bp, Homo sapien
tgaggttccttgacttcttcccact

SEQ ID NO: 1274252 - DNA, 25 bp, Homo sapien
tgtgaggttccttgacttcttccca

SEQ ID NO: 1274253 - DNA, 25 bp, Homo sapien
gtgaggttccttgacttcttcccac

SEQ ID NO: 1274254 - DNA, 25 bp, Homo sapien
ctgtgaggttccttgacttcttccc

SEQ ID NO: 1274255 - DNA, 25 bp, Homo sapien
tgtgttgcctcttgtcaaaccaggt

SEQ ID NO: 1274256 - DNA, 25 bp, Homo sapien
gaaatgataacccacacaataagcc

SEQ ID NO: 1274257 - DNA, 25 bp, Homo sapien
tccataattaaaacacgcagataga

SEQ ID NO: 1274258 - DNA, 25 bp, Homo sapien
gaatttatctgacaacgtgctaaga

SEQ ID NO: 1274259 - DNA, 25 bp, Homo sapien
aaattttaactactccaggcagctg

SEQ ID NO: 1274260 - DNA, 25 bp, Homo sapien
gaccaacagttgtccaggtctcagt

SEQ ID NO: 1274261 - DNA, 25 bp, Homo sapien
gaattataaagcgtacagcaagcca

SEQ ID NO: 1274262 - DNA, 25 bp, Homo sapien
taaacatctctttcccgcctcatgg

SEQ ID NO: 1274263 - DNA, 25 bp, Homo sapien
aatagtttagcccatcaaggagtga

SEQ ID NO: 1274264 - DNA, 25 bp, Homo sapien
caaatcaccagctgaggcaaatccc

SEQ ID NO: 1274265 - DNA, 25 bp, Homo sapien
cactgtaaaacggaagagaattatc

SEQ ID NO: 1274266 - DNA, 25 bp, Homo sapien
tatctaaagggattcaccggctact

SEQ ID NO: 1274267 - DNA, 25 bp, Homo sapien
taccctactatccattatcactgtt

SEQ ID NO: 1274268 - DNA, 25 bp, Homo sapien
caatccagttacactaccctactat

SEQ ID NO: 1274269 - DNA, 25 bp, Homo sapien
tgttgctgtgaataattagtacccc

SEQ ID NO: 1274270 - DNA, 25 bp, Homo sapien
actgagaggaatgttccccaatcca

SEQ ID NO: 1274271 - DNA, 25 bp, Homo sapien
tgtgttaaccactcaaaagaggtca

SEQ ID NO: 1274272 - DNA, 25 bp, Homo sapien
tacaatactgtcctactatgtgtgt

SEQ ID NO: 1274273 - DNA, 25 bp, Homo sapien
agttcaaaccacccctacaatactg

SEQ ID NO: 1274274 - DNA, 25 bp, Homo sapien
aaatgctaactaactaatatcctca

SEQ ID NO: 1274275 - DNA, 25 bp, Homo sapien
agagccacacccttgacaatggaga

SEQ ID NO: 1274276 - DNA, 25 bp, Homo sapien
gccacacccttgacaatggagataa

SEQ ID NO: 1274277 - DNA, 25 bp, Homo sapien
acacccttgacaatggagataaatg

SEQ ID NO: 1274278 - DNA, 25 bp, Homo sapien
atgggtgcagccaacatgagtcctc

SEQ ID NO: 1274279 - DNA, 25 bp, Homo sapien
agtgtagaaacacagatcacatata

SEQ ID NO: 1274280 - DNA, 25 bp, Homo sapien
gtgtagaaacacagatcacatatac

SEQ ID NO: 1274281 - DNA, 25 bp, Homo sapien
ttccatcattagtgtagaaacacag

SEQ ID NO: 1274282 - DNA, 25 bp, Homo sapien
ttattccatcattagtgtagaaaca

SEQ ID NO: 1274283 - DNA, 25 bp, Homo sapien
ctctgctggtgccaaaatacccttc

SEQ ID NO: 1274284 - DNA, 25 bp, Homo sapien
caaaccccgctaacttctggaactg

SEQ ID NO: 1274285 - DNA, 25 bp, Homo sapien
taaggcaagtcccgtattttgcttc

SEQ ID NO: 1274286 - DNA, 25 bp, Homo sapien
tcctctgtgcatgtacttgttactc

SEQ ID NO: 1274287 - DNA, 25 bp, Homo sapien
ggcaagtcccgtattttgcttcctc

SEQ ID NO: 1274288 - DNA, 25 bp, Homo sapien
caagtcccgtattttgcttcctctg

SEQ ID NO: 1274289 - DNA, 25 bp, Homo sapien
tgggatataaaatactgatagcttt

SEQ ID NO: 1274290 - DNA, 25 bp, Homo sapien
ggatataaaatactgatagctttta

SEQ ID NO: 1274291 - DNA, 25 bp, Homo sapien
tatgggatataaaatactgatagct

SEQ ID NO: 1274292 - DNA, 25 bp, Homo sapien
cctatgggatataaaatactgatag

SEQ ID NO: 1274293 - DNA, 25 bp, Homo sapien
ttggagatctgcaacaggcctggga

SEQ ID NO: 1274294 - DNA, 25 bp, Homo sapien
gccctctcccggcttcagaaagatg

SEQ ID NO: 1274295 - DNA, 25 bp, Homo sapien
tgatgccaccggcagagagcatgct

SEQ ID NO: 1274296 - DNA, 25 bp, Homo sapien
ttcagaaagatgctgtggtggctgt

SEQ ID NO: 1274297 - DNA, 25 bp, Homo sapien
ccattactccataattgtggcggga

SEQ ID NO: 1274298 - DNA, 25 bp, Homo sapien
tggcagccacgagtgaagacaaatt

SEQ ID NO: 1274299 - DNA, 25 bp, Homo sapien
gactcagtacaccaaactcagggct

SEQ ID NO: 1274300 - DNA, 25 bp, Homo sapien
tattcttgcacagtagatggctgca

SEQ ID NO: 1274301 - DNA, 25 bp, Homo sapien
tcatcatagcgtaaggcatttttca

SEQ ID NO: 1274302 - DNA, 25 bp, Homo sapien
acaggaacaaatcatcatagcgtaa

SEQ ID NO: 1274303 - DNA, 25 bp, Homo sapien
catagcgtaaggcatttttcataac

SEQ ID NO: 1274304 - DNA, 25 bp, Homo sapien
gaacaaatcatcatagcgtaaggca

SEQ ID NO: 1274305 - DNA, 25 bp, Homo sapien
ccttgttagcattctcggactccat

SEQ ID NO: 1274306 - DNA, 25 bp, Homo sapien
caaggaactcctcagtgctatactg

SEQ ID NO: 1274307 - DNA, 25 bp, Homo sapien
ctcctcagtgctatactgaatgaaa

SEQ ID NO: 1274308 - DNA, 25 bp, Homo sapien
aaaattagtgtctccatgaccttgt

SEQ ID NO: 1274309 - DNA, 25 bp, Homo sapien
gcctaagagcacagacagtggttca

SEQ ID NO: 1274310 - DNA, 25 bp, Homo sapien
taaggaattacgaattctctaggcc

SEQ ID NO: 1274311 - DNA, 25 bp, Homo sapien
aaatattgtcaaattacaaagggtg

SEQ ID NO: 1274312 - DNA, 25 bp, Homo sapien
aattctctaggcctaagagcacaga

SEQ ID NO: 1274313 - DNA, 25 bp, Homo sapien
tgaagtcttgaatgctacagatgaa

SEQ ID NO: 1274314 - DNA, 25 bp, Homo sapien
gggaaaagtgcacctccataaatga

SEQ ID NO: 1274315 - DNA, 25 bp, Homo sapien
gaagctcaggtgacagcatcactgg

SEQ ID NO: 1274316 - DNA, 25 bp, Homo sapien
gaaataactcgattgccaggtaacc

SEQ ID NO: 1274317 - DNA, 25 bp, Homo sapien
tgttatcaaaatcagctgcatcatc

SEQ ID NO: 1274318 - DNA, 25 bp, Homo sapien
aatcctgacctaaatgccaactgca

SEQ ID NO: 1274319 - DNA, 25 bp, Homo sapien
aaactgatggtctctacaacagcca

SEQ ID NO: 1274320 - DNA, 25 bp, Homo sapien
tttaaaaagcttgcgctccatgatg

SEQ ID NO: 1274321 - DNA, 25 bp, Homo sapien
gatgccacagcacttagaatcctga

SEQ ID NO: 1274322 - DNA, 25 bp, Homo sapien
caatcaatttggtaactgcacagta

SEQ ID NO: 1274323 - DNA, 25 bp, Homo sapien
gagtgctaacagagtaattaccaga

SEQ ID NO: 1274324 - DNA, 25 bp, Homo sapien
aatgatagcctgctttagagccaag

SEQ ID NO: 1274325 - DNA, 25 bp, Homo sapien
aaaatacagcataccaggtgagacc

SEQ ID NO: 1274326 - DNA, 25 bp, Homo sapien
gtatcaacatctgtccaacacaaag

SEQ ID NO: 1274327 - DNA, 25 bp, Homo sapien
gtgagacactaacactccatctgtc

SEQ ID NO: 1274328 - DNA, 25 bp, Homo sapien
gcctgcagccttcaaagggatataa

SEQ ID NO: 1274329 - DNA, 25 bp, Homo sapien
ggtataactataatcaaagctcccc

SEQ ID NO: 1274330 - DNA, 25 bp, Homo sapien
ttaagcattcacttaaaagaatgaa

SEQ ID NO: 1274331 - DNA, 25 bp, Homo sapien
gaaggctgtcagcttgcttttacaa

SEQ ID NO: 1274332 - DNA, 25 bp, Homo sapien
caactgtgaggcagtaacatctctg

SEQ ID NO: 1274333 - DNA, 25 bp, Homo sapien
gcactgtgattggaactctgtcaca

SEQ ID NO: 1274334 - DNA, 25 bp, Homo sapien
taccctagtttatcatggcgacacc

SEQ ID NO: 1274335 - DNA, 25 bp, Homo sapien
cataaaacgtaacatggccagaacc

SEQ ID NO: 1274336 - DNA, 25 bp, Homo sapien
gacctcagtgaagacgcagtagcta

SEQ ID NO: 1274337 - DNA, 25 bp, Homo sapien
tacagaagctttcgatgattcagag

SEQ ID NO: 1274338 - DNA, 25 bp, Homo sapien
gaacaagtccatgtaaccagtacca

SEQ ID NO: 1274339 - DNA, 25 bp, Homo sapien
ttctgattcttcagtttaagtaacc

SEQ ID NO: 1274340 - DNA, 25 bp, Homo sapien
ttggagaaggcagctaactcagctt

SEQ ID NO: 1274341 - DNA, 25 bp, Homo sapien
tccttaccaaatagacatccactgg

SEQ ID NO: 1274342 - DNA, 25 bp, Homo sapien
gagaaggcagctaactcagcttcaa

SEQ ID NO: 1274343 - DNA, 25 bp, Homo sapien
aaccactgagaaggtcaaagacagt

SEQ ID NO: 1274344 - DNA, 25 bp, Homo sapien
atgatgtgaacggggcttactgcag

SEQ ID NO: 1274345 - DNA, 25 bp, Homo sapien
gatgtgaacggggcttactgcagcc

SEQ ID NO: 1274346 - DNA, 25 bp, Homo sapien
gtgctatgatgtgaacggggcttac

SEQ ID NO: 1274347 - DNA, 25 bp, Homo sapien
ctatgatgtgaacggggcttactgc

SEQ ID NO: 1274348 - DNA, 25 bp, Homo sapien
caacaggttttgactcacttgtttc

SEQ ID NO: 1274349 - DNA, 25 bp, Homo sapien
ttgagcaatgctataagccacaata

SEQ ID NO: 1274350 - DNA, 25 bp, Homo sapien
aaggctttgctagtgttcaacaggt

SEQ ID NO: 1274351 - DNA, 25 bp, Homo sapien
cacttgtttccctgatctcatctaa

SEQ ID NO: 1274352 - DNA, 25 bp, Homo sapien
ccggtatctgtcctttcataacgag

SEQ ID NO: 1274353 - DNA, 25 bp, Homo sapien
cattgtcctcgtcttcactgtgatc

SEQ ID NO: 1274354 - DNA, 25 bp, Homo sapien
ggtatctgtcctttcataacgagac

SEQ ID NO: 1274355 - DNA, 25 bp, Homo sapien
cttcagtgatgtaggatgttatctc

SEQ ID NO: 1274356 - DNA, 25 bp, Homo sapien
caaggtacagctccggcgtggcctt

SEQ ID NO: 1274357 - DNA, 25 bp, Homo sapien
gtacagctccggcgtggccttgaat

SEQ ID NO: 1274358 - DNA, 25 bp, Homo sapien
aggtacagctccggcgtggccttga

SEQ ID NO: 1274359 - DNA, 25 bp, Homo sapien
aaggtacagctccggcgtggccttg

SEQ ID NO: 1274360 - DNA, 25 bp, Homo sapien
ctccgtgaaaggtagacagtaagcc

SEQ ID NO: 1274361 - DNA, 25 bp, Homo sapien
tcttctgtcctctcacggctaggcc

SEQ ID NO: 1274362 - DNA, 25 bp, Homo sapien
tgaaaggtagacagtaagcctgggc

SEQ ID NO: 1274363 - DNA, 25 bp, Homo sapien
tagacagtaagcctgggcttcagtc

SEQ ID NO: 1274364 - DNA, 25 bp, Homo sapien
tccagggaaaatccaaccactccaa

SEQ ID NO: 1274365 - DNA, 25 bp, Homo sapien
tttcaaatccatattctctgagagc

SEQ ID NO: 1274366 - DNA, 25 bp, Homo sapien
tgcagccctccggaagcctggtttc

SEQ ID NO: 1274367 - DNA, 25 bp, Homo sapien
tcatatccctccaaagggcctgcag

SEQ ID NO: 1274368 - DNA, 25 bp, Homo sapien
gggcctgcagccctccggaagcctg

SEQ ID NO: 1274369 - DNA, 25 bp, Homo sapien
tcaagaagcctgccttgactcctca

SEQ ID NO: 1274370 - DNA, 25 bp, Homo sapien
gtctcctggttgctgttcagatcca

SEQ ID NO: 1274371 - DNA, 25 bp, Homo sapien
gaacaggaactgtgccacatttacc

SEQ ID NO: 1274372 - DNA, 25 bp, Homo sapien
ccacgagaacaggaactgtgccaca

SEQ ID NO: 1274373 - DNA, 25 bp, Homo sapien
tggttgctgttcagatccacgagaa

SEQ ID NO: 1274374 - DNA, 25 bp, Homo sapien
tctccctatgagaagccttcctgtc

SEQ ID NO: 1274375 - DNA, 25 bp, Homo sapien
ctctccctatgagaagccttcctgt

SEQ ID NO: 1274376 - DNA, 25 bp, Homo sapien
tccctatgagaagccttcctgtcac

SEQ ID NO: 1274377 - DNA, 25 bp, Homo sapien
ctccctatgagaagccttcctgtca

SEQ ID NO: 1274378 - DNA, 25 bp, Homo sapien
tatgctttccgcttacaagacagag

SEQ ID NO: 1274379 - DNA, 25 bp, Homo sapien
gccaagaatacaaagggcttagtgt

SEQ ID NO: 1274380 - DNA, 25 bp, Homo sapien
tcctgctccatgacaaatagtagag

SEQ ID NO: 1274381 - DNA, 25 bp, Homo sapien
gattaaatccgtggacacagaagcc

SEQ ID NO: 1274382 - DNA, 25 bp, Homo sapien
gggcccggggagtgaagtgcacttg

SEQ ID NO: 1274383 - DNA, 25 bp, Homo sapien
gctggcggcgagagctgagcccgcg

SEQ ID NO: 1274384 - DNA, 25 bp, Homo sapien
ggcgcagggccccgccaactccgga

SEQ ID NO: 1274385 - DNA, 25 bp, Homo sapien
cggcgagagctgagcccgcgggcct

SEQ ID NO: 1274386 - DNA, 25 bp, Homo sapien
tcctcctaaatacaagtagtccctg

SEQ ID NO: 1274387 - DNA, 25 bp, Homo sapien
taaatacaagtagtccctgtcaagc

SEQ ID NO: 1274388 - DNA, 25 bp, Homo sapien
atgactcctcctaaatacaagtagt

SEQ ID NO: 1274389 - DNA, 25 bp, Homo sapien
caagtagtccctgtcaagcctcctt

SEQ ID NO: 1274390 - DNA, 25 bp, Homo sapien
tcaagaccagcgaccccgtcgctac

SEQ ID NO: 1274391 - DNA, 25 bp, Homo sapien
aagaccagcgaccccgtcgctacta

SEQ ID NO: 1274392 - DNA, 25 bp, Homo sapien
caagaccagcgaccccgtcgctact

SEQ ID NO: 1274393 - DNA, 25 bp, Homo sapien
ttgaccacatgcacacgaacctcag

SEQ ID NO: 1274394 - DNA, 25 bp, Homo sapien
caagacctgcggtagctgcaaagca

SEQ ID NO: 1274395 - DNA, 25 bp, Homo sapien
tgcaccactggtagtatagcttgcc

SEQ ID NO: 1274396 - DNA, 25 bp, Homo sapien
tcttaaaggtcagcagtacttcccc

SEQ ID NO: 1274397 - DNA, 25 bp, Homo sapien
ccaggcttcattttcagttcagaag

SEQ ID NO: 1274398 - DNA, 25 bp, Homo sapien
tcccctttgtactttatctgtgaac

SEQ ID NO: 1274399 - DNA, 25 bp, Homo sapien
ctgaaggactaacgctgcatgagtg

SEQ ID NO: 1274400 - DNA, 25 bp, Homo sapien
gtactttatctgtgaactgaaggac

SEQ ID NO: 1274401 - DNA, 25 bp, Homo sapien
gcctgcagtactgtgagctaactaa

SEQ ID NO: 1274402 - DNA, 25 bp, Homo sapien
ctgctgcagagaattccaccatatt

SEQ ID NO: 1274403 - DNA, 25 bp, Homo sapien
cgtgtcagtccatacaaagtgcctc

SEQ ID NO: 1274404 - DNA, 25 bp, Homo sapien
ccctcggtgcgaagttcccatgaga

SEQ ID NO: 1274405 - DNA, 25 bp, Homo sapien
caaagagttataggtgtctgttacc

SEQ ID NO: 1274406 - DNA, 25 bp, Homo sapien
aacactcttttaggcaaacacttgg

SEQ ID NO: 1274407 - DNA, 25 bp, Homo sapien
cagaggaggcaattatcagaagagt

SEQ ID NO: 1274408 - DNA, 25 bp, Homo sapien
ggcttatatcatagaagaacagagg

SEQ ID NO: 1274409 - DNA, 25 bp, Homo sapien
catgttggaccaatggaaggtctcc

SEQ ID NO: 1274410 - DNA, 25 bp, Homo sapien
cacgaatacattgtgcagctctaca

SEQ ID NO: 1274411 - DNA, 25 bp, Homo sapien
tctccagggtcaataacatacatgg

SEQ ID NO: 1274412 - DNA, 25 bp, Homo sapien
tatgtaagtagaggacgtacactct

SEQ ID NO: 1274413 - DNA, 25 bp, Homo sapien
gacatgcatagtctgatcaagaaaa

SEQ ID NO: 1274414 - DNA, 25 bp, Homo sapien
tcagtccctcacttatttgctaaaa

SEQ ID NO: 1274415 - DNA, 25 bp, Homo sapien
tcccctgtgcctgcttgacttttct

SEQ ID NO: 1274416 - DNA, 25 bp, Homo sapien
tttacttctacagggctcagtccct

SEQ ID NO: 1274417 - DNA, 25 bp, Homo sapien
gctgctaaataagacccaaagtatg

SEQ ID NO: 1274418 - DNA, 25 bp, Homo sapien
cacacatttgaaagacccagcatta

SEQ ID NO: 1274419 - DNA, 25 bp, Homo sapien
tgaaaatggctgtttcaatgcagca

SEQ ID NO: 1274420 - DNA, 25 bp, Homo sapien
gcagcatctggctcattataacact

SEQ ID NO: 1274421 - DNA, 25 bp, Homo sapien
tgtgaaactgtacacccactacgct

SEQ ID NO: 1274422 - DNA, 25 bp, Homo sapien
tctccccaagtaaatagacctaggc

SEQ ID NO: 1274423 - DNA, 25 bp, Homo sapien
taaattctccaaagtagacgcttcc

SEQ ID NO: 1274424 - DNA, 25 bp, Homo sapien
caaatgtgagggacaattttcctgc

SEQ ID NO: 1274425 - DNA, 25 bp, Homo sapien
caaagggccagtaagcacaagacag

SEQ ID NO: 1274426 - DNA, 25 bp, Homo sapien
tactcagggacgtaattcacccaga

SEQ ID NO: 1274427 - DNA, 25 bp, Homo sapien
cacaacaacagagtgggctgaatgc

SEQ ID NO: 1274428 - DNA, 25 bp, Homo sapien
ttaggctttggaagtcaccccaaga

SEQ ID NO: 1274429 - DNA, 25 bp, Homo sapien
gctgcttatcaaaaaggatgggatt

SEQ ID NO: 1274430 - DNA, 25 bp, Homo sapien
tatcaaaaaggatgggatttctaaa

SEQ ID NO: 1274431 - DNA, 25 bp, Homo sapien
aatgctgcttatcaaaaaggatggg

SEQ ID NO: 1274432 - DNA, 25 bp, Homo sapien
aaaaatgctgcttatcaaaaaggat

SEQ ID NO: 1274433 - DNA, 25 bp, Homo sapien
aaatacacatggtggttatttcatg

SEQ ID NO: 1274434 - DNA, 25 bp, Homo sapien
taacggtattttctagcacctaata

SEQ ID NO: 1274435 - DNA, 25 bp, Homo sapien
caacacagtaagatcttgcctttaa

SEQ ID NO: 1274436 - DNA, 25 bp, Homo sapien
ttctaggaaacaagtaactaacata

SEQ ID NO: 1274437 - DNA, 25 bp, Homo sapien
tcctccctgttgccagcatctccac

SEQ ID NO: 1274438 - DNA, 25 bp, Homo sapien
tggatctggtcctccctgttgccag

SEQ ID NO: 1274439 - DNA, 25 bp, Homo sapien
cttctaagaagcctgtggatctggt

SEQ ID NO: 1274440 - DNA, 25 bp, Homo sapien
cattcttctaagaagcctgtggatc

SEQ ID NO: 1274441 - DNA, 25 bp, Homo sapien
ttcttcattctatcttgtggagaaa

SEQ ID NO: 1274442 - DNA, 25 bp, Homo sapien
ggtttttcttcattctatcttgtgg

SEQ ID NO: 1274443 - DNA, 25 bp, Homo sapien
cttcattctatcttgtggagaaaat

SEQ ID NO: 1274444 - DNA, 25 bp, Homo sapien
ttttcttcattctatcttgtggaga

SEQ ID NO: 1274445 - DNA, 25 bp, Homo sapien
tttgtttattcatcttgccataacc

SEQ ID NO: 1274446 - DNA, 25 bp, Homo sapien
tttattcatcttgccataaccacgc

SEQ ID NO: 1274447 - DNA, 25 bp, Homo sapien
tgtttattcatcttgccataaccac

SEQ ID NO: 1274448 - DNA, 25 bp, Homo sapien
cagatttgggttcccccatgtaata

SEQ ID NO: 1274449 - DNA, 25 bp, Homo sapien
ctgaagatttgataaaggcgaagaa

SEQ ID NO: 1274450 - DNA, 25 bp, Homo sapien
tgaagatttgataaaggcgaagaag

SEQ ID NO: 1274451 - DNA, 25 bp, Homo sapien
ccattggcacctctggtcctgatga

SEQ ID NO: 1274452 - DNA, 25 bp, Homo sapien
cattggcacctctggtcctgatgac

SEQ ID NO: 1274453 - DNA, 25 bp, Homo sapien
accattggcacctctggtcctgatg

SEQ ID NO: 1274454 - DNA, 25 bp, Homo sapien
tttcttgccatccttgccattcgaa

SEQ ID NO: 1274455 - DNA, 25 bp, Homo sapien
gccatccttgccattcgaatttcag

SEQ ID NO: 1274456 - DNA, 25 bp, Homo sapien
tgccatccttgccattcgaatttca

SEQ ID NO: 1274457 - DNA, 25 bp, Homo sapien
tcttgccatccttgccattcgaatt

SEQ ID NO: 1274458 - DNA, 25 bp, Homo sapien
cttgtgatagcactatgctttttca

SEQ ID NO: 1274459 - DNA, 25 bp, Homo sapien
ttgtgatagcactatgctttttcat

SEQ ID NO: 1274460 - DNA, 25 bp, Homo sapien
tcttcttctcttcaacaccctccat

SEQ ID NO: 1274461 - DNA, 25 bp, Homo sapien
gcacaacaggaaccttcttcttctc

SEQ ID NO: 1274462 - DNA, 25 bp, Homo sapien
ctggcacaacaggaaccttcttctt

SEQ ID NO: 1274463 - DNA, 25 bp, Homo sapien
tcagctctgtgaaattcctttgctt

SEQ ID NO: 1274464 - DNA, 25 bp, Homo sapien
tacagtgaggcataagagatggctc

SEQ ID NO: 1274465 - DNA, 25 bp, Homo sapien
gaaatgatcccaaaactcagacctg

SEQ ID NO: 1274466 - DNA, 25 bp, Homo sapien
tcagagcacacagggtagcaaagcc

SEQ ID NO: 1274467 - DNA, 25 bp, Homo sapien
tagcatctatgtgcctgaccagccc

SEQ ID NO: 1274468 - DNA, 25 bp, Homo sapien
tatctgaccaaacacgagcagtggc

SEQ ID NO: 1274469 - DNA, 25 bp, Homo sapien
gaagcaattttaacacgtcacacag

SEQ ID NO: 1274470 - DNA, 25 bp, Homo sapien
tatgagagatactaaatgaaagcca

SEQ ID NO: 1274471 - DNA, 25 bp, Homo sapien
tctcaaagcttatctgtcctgtggc

SEQ ID NO: 1274472 - DNA, 25 bp, Homo sapien
tagacttatgtgctcctttgggaca

SEQ ID NO: 1274473 - DNA, 25 bp, Homo sapien
tgtgttcctaatgtgggcaaacccc

SEQ ID NO: 1274474 - DNA, 25 bp, Homo sapien
ggcatatgtactgaaacgcgagata

SEQ ID NO: 1274475 - DNA, 25 bp, Homo sapien
tgttggctagctgacagatcctgga

SEQ ID NO: 1274476 - DNA, 25 bp, Homo sapien
tctctgtaagtggatcccacggtgg

SEQ ID NO: 1274477 - DNA, 25 bp, Homo sapien
aaatggccacaattcctttctcagt

SEQ ID NO: 1274478 - DNA, 25 bp, Homo sapien
tgtaatacaaataagaggtcttcca

SEQ ID NO: 1274479 - DNA, 25 bp, Homo sapien
tgtgacccggtgctgagcgcacata

SEQ ID NO: 1274480 - DNA, 25 bp, Homo sapien
tgtaaccatcaattaagattaaatc

SEQ ID NO: 1274481 - DNA, 25 bp, Homo sapien
aaaagtcagggtttgtgtcacctct

SEQ ID NO: 1274482 - DNA, 25 bp, Homo sapien
gagaagcctctaactggaaaagtaa

SEQ ID NO: 1274483 - DNA, 25 bp, Homo sapien
gtcacctcttgcagttggaaatcag

SEQ ID NO: 1274484 - DNA, 25 bp, Homo sapien
gaatccaagtacctgactgcagtct

SEQ ID NO: 1274485 - DNA, 25 bp, Homo sapien
tacacatggcagattatgctaccaa

SEQ ID NO: 1274486 - DNA, 25 bp, Homo sapien
gccaactaaagtttctgtagcgtca

SEQ ID NO: 1274487 - DNA, 25 bp, Homo sapien
cactaagctatgcaaacaaaggtgc

SEQ ID NO: 1274488 - DNA, 25 bp, Homo sapien
tcagaatgttcaaatcagaaggcag

SEQ ID NO: 1274489 - DNA, 25 bp, Homo sapien
tctacactatatttgaggtataaaa

SEQ ID NO: 1274490 - DNA, 25 bp, Homo sapien
attcaaataactaagctctaaaatg

SEQ ID NO: 1274491 - DNA, 25 bp, Homo sapien
ttgattattcaaataactaagctct

SEQ ID NO: 1274492 - DNA, 25 bp, Homo sapien
ttttttctacactatatttgaggta

SEQ ID NO: 1274493 - DNA, 25 bp, Homo sapien
aattagcatcagcatcttaccaaaa

SEQ ID NO: 1274494 - DNA, 25 bp, Homo sapien
caagatatctttccctaactgtacc

SEQ ID NO: 1274495 - DNA, 25 bp, Homo sapien
taccaaaatgccatagcagttatca

SEQ ID NO: 1274496 - DNA, 25 bp, Homo sapien
tcctgttaccaaaattagcatcagc

SEQ ID NO: 1274497 - DNA, 25 bp, Homo sapien
agagagcccttgactagtcctggag

SEQ ID NO: 1274498 - DNA, 25 bp, Homo sapien
gaagctaagccatgatattctgatc

SEQ ID NO: 1274499 - DNA, 25 bp, Homo sapien
gaccctcaagatcgaggctgcaatg

SEQ ID NO: 1274500 - DNA, 25 bp, Homo sapien
tgggtcatacctgtagtaacagcac

SEQ ID NO: 1274501 - DNA, 25 bp, Homo sapien
accgcactaggccttactgtcctat

SEQ ID NO: 1274502 - DNA, 25 bp, Homo sapien
ccttgtgacaaaacactgatggaga

SEQ ID NO: 1274503 - DNA, 25 bp, Homo sapien
ctgaccagtaaatcaaagttgaaaa

SEQ ID NO: 1274504 - DNA, 25 bp, Homo sapien
taaaagctttttcgactgaccagta

SEQ ID NO: 1274505 - DNA, 25 bp, Homo sapien
tacattagaacaactgagatgggcc

SEQ ID NO: 1274506 - DNA, 25 bp, Homo sapien
caagcctttgggcaacaatttgacc

SEQ ID NO: 1274507 - DNA, 25 bp, Homo sapien
tccatacaataagtcaccctatcag

SEQ ID NO: 1274508 - DNA, 25 bp, Homo sapien
gaaactgcaccttagtttacaagcc

SEQ ID NO: 1274509 - DNA, 25 bp, Homo sapien
tttgcagaaaggcacaacaactgcg

SEQ ID NO: 1274510 - DNA, 25 bp, Homo sapien
aaggacatctgtattagcagctcgg

SEQ ID NO: 1274511 - DNA, 25 bp, Homo sapien
caaattaatgtcgaagcacaaccag

SEQ ID NO: 1274512 - DNA, 25 bp, Homo sapien
taataatgcctcaatgcaaccgtgc

SEQ ID NO: 1274513 - DNA, 25 bp, Homo sapien
agtagaaggtgctattctgcaaccc

SEQ ID NO: 1274514 - DNA, 25 bp, Homo sapien
tgcaacccacatgtattcacaccaa

SEQ ID NO: 1274515 - DNA, 25 bp, Homo sapien
tattctgcaacccacatgtattcac

SEQ ID NO: 1274516 - DNA, 25 bp, Homo sapien
ggtgctattctgcaacccacatgta

SEQ ID NO: 1274517 - DNA, 25 bp, Homo sapien
taaagcgctacaccatcaatagtga

SEQ ID NO: 1274518 - DNA, 25 bp, Homo sapien
tcaatagtgaggtgttcgcggccca

SEQ ID NO: 1274519 - DNA, 25 bp, Homo sapien
gacctttcctgcgacttgaacctag

SEQ ID NO: 1274520 - DNA, 25 bp, Homo sapien
tcggtcgggcagatctttcagaagc

SEQ ID NO: 1274521 - DNA, 25 bp, Homo sapien
aagacatagaggcacagcagaaggg

SEQ ID NO: 1274522 - DNA, 25 bp, Homo sapien
gaagggtgaatccatagttatcaag

SEQ ID NO: 1274523 - DNA, 25 bp, Homo sapien
catagaggcacagcagaagggtgaa

SEQ ID NO: 1274524 - DNA, 25 bp, Homo sapien
tatcaagctggtcttggtagaccag

SEQ ID NO: 1274525 - DNA, 25 bp, Homo sapien
ctttccctgttgagttgtgagaaaa

SEQ ID NO: 1274526 - DNA, 25 bp, Homo sapien
gctgcttccctaggctttccctgtt

SEQ ID NO: 1274527 - DNA, 25 bp, Homo sapien
gagaaaagcagatattgcttcttga

SEQ ID NO: 1274528 - DNA, 25 bp, Homo sapien
gcttcttgacccttacattctatta

SEQ ID NO: 1274529 - DNA, 25 bp, Homo sapien
caggaagtattgttcccggccctgg

SEQ ID NO: 1274530 - DNA, 25 bp, Homo sapien
ccaggaagtattgttcccggccctg

SEQ ID NO: 1274531 - DNA, 25 bp, Homo sapien
tgcacctgctctgcggctttgcttc

SEQ ID NO: 1274532 - DNA, 25 bp, Homo sapien
aggcggaggcaggtactaggtctca

SEQ ID NO: 1274533 - DNA, 25 bp, Homo sapien
gctctgcggctttgcttcccagtga

SEQ ID NO: 1274534 - DNA, 25 bp, Homo sapien
ttgcttcccagtgaggcggaggcag

SEQ ID NO: 1274535 - DNA, 25 bp, Homo sapien
ttgcaacagtaaacctgcgccagcc

SEQ ID NO: 1274536 - DNA, 25 bp, Homo sapien
gagccacagggtacagtccacttgc

SEQ ID NO: 1274537 - DNA, 25 bp, Homo sapien
cagggtacagtccacttgcaacagt

SEQ ID NO: 1274538 - DNA, 25 bp, Homo sapien
gtccacttgcaacagtaaacctgcg

SEQ ID NO: 1274539 - DNA, 25 bp, Homo sapien
gctctcatggcagggaaagctgagc

SEQ ID NO: 1274540 - DNA, 25 bp, Homo sapien
ccctagcaggcggatgcaggggcgc

SEQ ID NO: 1274541 - DNA, 25 bp, Homo sapien
tagcaggcggatgcaggggcgccct

SEQ ID NO: 1274542 - DNA, 25 bp, Homo sapien
gggcgccctgctctcatggcaggga

SEQ ID NO: 1274543 - DNA, 25 bp, Homo sapien
cattcatttaaatcgggtcctgagg

SEQ ID NO: 1274544 - DNA, 25 bp, Homo sapien
tacaaatggcagctaccggacacat

SEQ ID NO: 1274545 - DNA, 25 bp, Homo sapien
tctgaatatggctgtgtaacctagt

SEQ ID NO: 1274546 - DNA, 25 bp, Homo sapien
cttgagaaaccgaggagtggaattc

SEQ ID NO: 1274547 - DNA, 25 bp, Homo sapien
atgacttgggccaattacacgactg

SEQ ID NO: 1274548 - DNA, 25 bp, Homo sapien
tgtgtagccaacaggtgaccgaagg

SEQ ID NO: 1274549 - DNA, 25 bp, Homo sapien
ctccacggcggtggggcgctaacta

SEQ ID NO: 1274550 - DNA, 25 bp, Homo sapien
ggcgctaactagcagggacccctgc

SEQ ID NO: 1274551 - DNA, 25 bp, Homo sapien
gcaagtgttggtcgggggcctcgag

SEQ ID NO: 1274552 - DNA, 25 bp, Homo sapien
tctgaagttcctgccggcaaactta

SEQ ID NO: 1274553 - DNA, 25 bp, Homo sapien
tgccggcaaacttagccttgctgcc

SEQ ID NO: 1274554 - DNA, 25 bp, Homo sapien
agttcctgccggcaaacttagcctt

SEQ ID NO: 1274555 - DNA, 25 bp, Homo sapien
tttctgaagttcctgccggcaaact

SEQ ID NO: 1274556 - DNA, 25 bp, Homo sapien
cctcatcccaactcaccatgctagg

SEQ ID NO: 1274557 - DNA, 25 bp, Homo sapien
tcctctccccgtcagtgttgcagag

SEQ ID NO: 1274558 - DNA, 25 bp, Homo sapien
tgtacttggccaagcgctcagatcg

SEQ ID NO: 1274559 - DNA, 25 bp, Homo sapien
gctcagatcggcaaggggcaccagt

SEQ ID NO: 1274560 - DNA, 25 bp, Homo sapien
tggccaagcgctcagatcggcaagg

SEQ ID NO: 1274561 - DNA, 25 bp, Homo sapien
tgaggagctggttgtacttggccaa

SEQ ID NO: 1274562 - DNA, 25 bp, Homo sapien
cagtctcccccgaacgatgagacac

SEQ ID NO: 1274563 - DNA, 25 bp, Homo sapien
gagacaccatgacgccccaaccatt

SEQ ID NO: 1274564 - DNA, 25 bp, Homo sapien
caaccaggtcagcgatgaaggtatc

SEQ ID NO: 1274565 - DNA, 25 bp, Homo sapien
aaccaggtcagcgatgaaggtatct

SEQ ID NO: 1274566 - DNA, 25 bp, Homo sapien
gccttggcgatcctctttgggttgg

SEQ ID NO: 1274567 - DNA, 25 bp, Homo sapien
gttgcaggacttctcgttcacggcc

SEQ ID NO: 1274568 - DNA, 25 bp, Homo sapien
ggagccaatctggttgactttgagc

SEQ ID NO: 1274569 - DNA, 25 bp, Homo sapien
gactcggtcacggagccaatctggt

SEQ ID NO: 1274570 - DNA, 25 bp, Homo sapien
tacctgctggggtcatcgggagact

SEQ ID NO: 1274571 - DNA, 25 bp, Homo sapien
gaggccgctacgtccatgccgatga

SEQ ID NO: 1274572 - DNA, 25 bp, Homo sapien
gccagctggtcaggcgagatgtacc

SEQ ID NO: 1274573 - DNA, 25 bp, Homo sapien
catgccgatgaccaccttatcagtg

SEQ ID NO: 1274574 - DNA, 25 bp, Homo sapien
gaagtttgctgcaccgactgggagg

SEQ ID NO: 1274575 - DNA, 25 bp, Homo sapien
aagtttgctgcaccgactgggagga

SEQ ID NO: 1274576 - DNA, 25 bp, Homo sapien
ccagcatgagaaccgccattgatga

SEQ ID NO: 1274577 - DNA, 25 bp, Homo sapien
aaccgccattgatgacattgaacgc

SEQ ID NO: 1274578 - DNA, 25 bp, Homo sapien
gttgccagcatgagaaccgccattg

SEQ ID NO: 1274579 - DNA, 25 bp, Homo sapien
cttgttgccagcatgagaaccgcca

SEQ ID NO: 1274580 - DNA, 25 bp, Homo sapien
tggggagagcagagcagagaagcat

SEQ ID NO: 1274581 - DNA, 25 bp, Homo sapien
gagagcagagcagagaagcatggca

SEQ ID NO: 1274582 - DNA, 25 bp, Homo sapien
ctggggagagcagagcagagaagca

SEQ ID NO: 1274583 - DNA, 25 bp, Homo sapien
gggagagcagagcagagaagcatgg

SEQ ID NO: 1274584 - DNA, 25 bp, Homo sapien
aggaggtctcgggtccccaacagca

SEQ ID NO: 1274585 - DNA, 25 bp, Homo sapien
tgggaagttccaataaaccactcac

SEQ ID NO: 1274586 - DNA, 25 bp, Homo sapien
tcaaggcataggaggtctcgggtcc

SEQ ID NO: 1274587 - DNA, 25 bp, Homo sapien
ggatatcaaggcataggaggtctcg

SEQ ID NO: 1274588 - DNA, 25 bp, Homo sapien
acggcaccagctttgcagacggcaa

SEQ ID NO: 1274589 - DNA, 25 bp, Homo sapien
caggatgacttcagagttgccagcc

SEQ ID NO: 1274590 - DNA, 25 bp, Homo sapien
agccaagtcagcgatgtggcggtac

SEQ ID NO: 1274591 - DNA, 25 bp, Homo sapien
cagaatggcgttcgcaccaaactta

SEQ ID NO: 1274592 - DNA, 25 bp, Homo sapien
ttcttaagagtaaagcaaagaaatg

SEQ ID NO: 1274593 - DNA, 25 bp, Homo sapien
tgatcttccccagtaaagacgccac

SEQ ID NO: 1274594 - DNA, 25 bp, Homo sapien
tcatcactaagatcatgggcctctt

SEQ ID NO: 1274595 - DNA, 25 bp, Homo sapien
acaggctcatgtagctcatcactaa

SEQ ID NO: 1274596 - DNA, 25 bp, Homo sapien
tctcttgttctgtgacgttcagttt

SEQ ID NO: 1274597 - DNA, 25 bp, Homo sapien
gcatagcctttgctcccctaccatg

SEQ ID NO: 1274598 - DNA, 25 bp, Homo sapien
ttggggccactcttatctgcatagc

SEQ ID NO: 1274599 - DNA, 25 bp, Homo sapien
ggagaatgaggggttggggccactc

SEQ ID NO: 1274600 - DNA, 25 bp, Homo sapien
atagcctttgctcccctaccatgga

SEQ ID NO: 1274601 - DNA, 25 bp, Homo sapien
gacaaaaatcagtggggagacaaaa

SEQ ID NO: 1274602 - DNA, 25 bp, Homo sapien
cagtggggagacaaaaaactgcctt

SEQ ID NO: 1274603 - DNA, 25 bp, Homo sapien
ggacaaaaatcagtggggagacaaa

SEQ ID NO: 1274604 - DNA, 25 bp, Homo sapien
aatcagtggggagacaaaaaactgc

SEQ ID NO: 1274605 - DNA, 25 bp, Homo sapien
gcaggtagtccgaaatcatttagca

SEQ ID NO: 1274606 - DNA, 25 bp, Homo sapien
aaactgacgtactgagaactggctc

SEQ ID NO: 1274607 - DNA, 25 bp, Homo sapien
gcaaagcgtctaatgatggatcaaa

SEQ ID NO: 1274608 - DNA, 25 bp, Homo sapien
gttaatagtctacccagggagccca

SEQ ID NO: 1274609 - DNA, 25 bp, Homo sapien
ttctcgtgcgtgacagggaatccaa

SEQ ID NO: 1274610 - DNA, 25 bp, Homo sapien
aaacctcagggctcgaagtgtctca

SEQ ID NO: 1274611 - DNA, 25 bp, Homo sapien
ttcttcaaaggtccagagagttgca

SEQ ID NO: 1274612 - DNA, 25 bp, Homo sapien
tcttccataaacaggaaagcccctg

SEQ ID NO: 1274613 - DNA, 25 bp, Homo sapien
cacattagttatcaggaggcaggtc

SEQ ID NO: 1274614 - DNA, 25 bp, Homo sapien
ttagacacattagttatcaggaggc

SEQ ID NO: 1274615 - DNA, 25 bp, Homo sapien
ttagttatcaggaggcaggtcctac

SEQ ID NO: 1274616 - DNA, 25 bp, Homo sapien
ctggtggcattagacacattagtta

SEQ ID NO: 1274617 - DNA, 25 bp, Homo sapien
tgctaaccagggcaggcgcaatagt

SEQ ID NO: 1274618 - DNA, 25 bp, Homo sapien
ctaaccagggcaggcgcaatagttt

SEQ ID NO: 1274619 - DNA, 25 bp, Homo sapien
tagttttattgatgtgctcaacagc

SEQ ID NO: 1274620 - DNA, 25 bp, Homo sapien
cagggcaggcgcaatagttttattg

SEQ ID NO: 1274621 - DNA, 25 bp, Homo sapien
gagggttagagccacacaaaacagc

SEQ ID NO: 1274622 - DNA, 25 bp, Homo sapien
taactttaaaacaggcttgagcagc

SEQ ID NO: 1274623 - DNA, 25 bp, Homo sapien
gagcagcattgttagagagaaccac

SEQ ID NO: 1274624 - DNA, 25 bp, Homo sapien
ggaaacgccaactgcagactaaagg

SEQ ID NO: 1274625 - DNA, 25 bp, Homo sapien
atatacttaatgggtctggagacgc

SEQ ID NO: 1274626 - DNA, 25 bp, Homo sapien
aatatacttaatgggtctggagacg

SEQ ID NO: 1274627 - DNA, 25 bp, Homo sapien
caagcattggaactctcgacccaga

SEQ ID NO: 1274628 - DNA, 25 bp, Homo sapien
gcattaaagcgggactgaacaccca

SEQ ID NO: 1274629 - DNA, 25 bp, Homo sapien
cattcagggcaggtcattggttaga

SEQ ID NO: 1274630 - DNA, 25 bp, Homo sapien
gctgatgatctctggagggcccaca

SEQ ID NO: 1274631 - DNA, 25 bp, Homo sapien
gataccagttgaagcaccactgggc

SEQ ID NO: 1274632 - DNA, 25 bp, Homo sapien
tcatagataccagttgaagcaccac

SEQ ID NO: 1274633 - DNA, 25 bp, Homo sapien
tagataccagttgaagcaccactgg

SEQ ID NO: 1274634 - DNA, 25 bp, Homo sapien
cctcatagataccagttgaagcacc

SEQ ID NO: 1274635 - DNA, 25 bp, Homo sapien
ggttctatgcccaactggaaactgg

SEQ ID NO: 1274636 - DNA, 25 bp, Homo sapien
tggctcaggaggagtatctagctca

SEQ ID NO: 1274637 - DNA, 25 bp, Homo sapien
tttcagtttggacaatgctaaatgc

SEQ ID NO: 1274638 - DNA, 25 bp, Homo sapien
taaaatgcgcagtttaataaatgta

SEQ ID NO: 1274639 - DNA, 25 bp, Homo sapien
tggcatggatcttgagaatagacat

SEQ ID NO: 1274640 - DNA, 25 bp, Homo sapien
ctccctggcatggatcttgagaata

SEQ ID NO: 1274641 - DNA, 25 bp, Homo sapien
gagatcaacctcaacagtgggattc

SEQ ID NO: 1274642 - DNA, 25 bp, Homo sapien
cctggcatggatcttgagaatagac

SEQ ID NO: 1274643 - DNA, 25 bp, Homo sapien
tcctcaagaggtgccttctcggagt

SEQ ID NO: 1274644 - DNA, 25 bp, Homo sapien
tgatctaacggctctgctgtaggtt

SEQ ID NO: 1274645 - DNA, 25 bp, Homo sapien
tgagtcaccgcttactaggcagaag

SEQ ID NO: 1274646 - DNA, 25 bp, Homo sapien
cagatcaggcccgatttttggtggc

SEQ ID NO: 1274647 - DNA, 25 bp, Homo sapien
gaccccgttggcgtcgagtcgttga

SEQ ID NO: 1274648 - DNA, 25 bp, Homo sapien
gccctcgaccttgctgacaactttg

SEQ ID NO: 1274649 - DNA, 25 bp, Homo sapien
cagataggaccggtgagccgaactg

SEQ ID NO: 1274650 - DNA, 25 bp, Homo sapien
ggtgaacgtaaagccggcgagatct

SEQ ID NO: 1274651 - DNA, 25 bp, Homo sapien
taagataccagatgagtgcagaagg

SEQ ID NO: 1274652 - DNA, 25 bp, Homo sapien
gattactgattctccctgtgatacg

SEQ ID NO: 1274653 - DNA, 25 bp, Homo sapien
gatgtagctggatggtccctcctca

SEQ ID NO: 1274654 - DNA, 25 bp, Homo sapien
gagagtgaatctgctacgacctgta

SEQ ID NO: 1274655 - DNA, 25 bp, Homo sapien
acagatttgcatgacgtcctcgcgc

SEQ ID NO: 1274656 - DNA, 25 bp, Homo sapien
gatttgcatgacgtcctcgcgcggg

SEQ ID NO: 1274657 - DNA, 25 bp, Homo sapien
agatttgcatgacgtcctcgcgcgg

SEQ ID NO: 1274658 - DNA, 25 bp, Homo sapien
tcacagatttgcatgacgtcctcgc

SEQ ID NO: 1274659 - DNA, 25 bp, Homo sapien
tgtgagattctgaagacgtggaccc

SEQ ID NO: 1274660 - DNA, 25 bp, Homo sapien
gattctgaagacgtggacccagcct

SEQ ID NO: 1274661 - DNA, 25 bp, Homo sapien
tgaagacgtggacccagccttcaca

SEQ ID NO: 1274662 - DNA, 25 bp, Homo sapien
gacgtggacccagccttcacaggca

SEQ ID NO: 1274663 - DNA, 25 bp, Homo sapien
gcatgctttctctgatgcagaacca

SEQ ID NO: 1274664 - DNA, 25 bp, Homo sapien
gagcatgctttctctgatgcagaac

SEQ ID NO: 1274665 - DNA, 25 bp, Homo sapien
taaaaatgagcatgctttctctgat

SEQ ID NO: 1274666 - DNA, 25 bp, Homo sapien
aatgagcatgctttctctgatgcag

SEQ ID NO: 1274667 - DNA, 25 bp, Homo sapien
tgggttcttcgatgcctaaaaaggc

SEQ ID NO: 1274668 - DNA, 25 bp, Homo sapien
catgggttcttcgatgcctaaaaag

SEQ ID NO: 1274669 - DNA, 25 bp, Homo sapien
gtactccaaacaaagctttgcccat

SEQ ID NO: 1274670 - DNA, 25 bp, Homo sapien
aaggcttgtactccaaacaaagctt

SEQ ID NO: 1274671 - DNA, 25 bp, Homo sapien
tgagactgctagactcttctgtcaa

SEQ ID NO: 1274672 - DNA, 25 bp, Homo sapien
gagactgctagactcttctgtcaat

SEQ ID NO: 1274673 - DNA, 25 bp, Homo sapien
gactgctagactcttctgtcaatgg

SEQ ID NO: 1274674 - DNA, 25 bp, Homo sapien
tctgagactgctagactcttctgtc

SEQ ID NO: 1274675 - DNA, 25 bp, Homo sapien
gatggtgccttcttgcccacctggg

SEQ ID NO: 1274676 - DNA, 25 bp, Homo sapien
ctgggctgatggtgccttcttgccc

SEQ ID NO: 1274677 - DNA, 25 bp, Homo sapien
cttcttgcccacctgggctggccat

SEQ ID NO: 1274678 - DNA, 25 bp, Homo sapien
tggtgccttcttgcccacctgggct

SEQ ID NO: 1274679 - DNA, 25 bp, Homo sapien
gacagatcaccactttgtgacaggg

SEQ ID NO: 1274680 - DNA, 25 bp, Homo sapien
ttattcactcagcaactattgacag

SEQ ID NO: 1274681 - DNA, 25 bp, Homo sapien
tcacaggactcaggttggcaggact

SEQ ID NO: 1274682 - DNA, 25 bp, Homo sapien
tgtggcaagccctcctttgtttcag

SEQ ID NO: 1274683 - DNA, 25 bp, Homo sapien
ccaaatggaaagtctagagttgaaa

SEQ ID NO: 1274684 - DNA, 25 bp, Homo sapien
tagaaactgacctgagtggacccag

SEQ ID NO: 1274685 - DNA, 25 bp, Homo sapien
aaacaactatcaatgctgtggctgg

SEQ ID NO: 1274686 - DNA, 25 bp, Homo sapien
gaatcactagatgggcccaaagcag

SEQ ID NO: 1274687 - DNA, 25 bp, Homo sapien
accatggctcactcaccacgcctcc

SEQ ID NO: 1274688 - DNA, 25 bp, Homo sapien
ctaccatggctcactcaccacgcct

SEQ ID NO: 1274689 - DNA, 25 bp, Homo sapien
taccatggctcactcaccacgcctc

SEQ ID NO: 1274690 - DNA, 25 bp, Homo sapien
catgatcccattaccgatcagcaca

SEQ ID NO: 1274691 - DNA, 25 bp, Homo sapien
acctgattggcacagtgcactgcag

SEQ ID NO: 1274692 - DNA, 25 bp, Homo sapien
catactgatgtcagacttagtgtgg

SEQ ID NO: 1274693 - DNA, 25 bp, Homo sapien
acacctgattggcacagtgcactgc

SEQ ID NO: 1274694 - DNA, 25 bp, Homo sapien
gcaaaaatgcggtttatctccacaa

SEQ ID NO: 1274695 - DNA, 25 bp, Homo sapien
tatctccacaaatgttttgcccttg

SEQ ID NO: 1274696 - DNA, 25 bp, Homo sapien
ggcccagcatcaatggtttcttctt

SEQ ID NO: 1274697 - DNA, 25 bp, Homo sapien
ctcttggcaaaaatgcggtttatct

SEQ ID NO: 1274698 - DNA, 25 bp, Homo sapien
cagattccggcaaagatgatgaaac

SEQ ID NO: 1274699 - DNA, 25 bp, Homo sapien
aggaggcagattccggcaaagatga

SEQ ID NO: 1274700 - DNA, 25 bp, Homo sapien
cacgtagatgtaaatcgcagtgagg

SEQ ID NO: 1274701 - DNA, 25 bp, Homo sapien
atgtaaatcgcagtgaggaggcaga

SEQ ID NO: 1274702 - DNA, 25 bp, Homo sapien
gactgcaggaagatctcggtcctca

SEQ ID NO: 1274703 - DNA, 25 bp, Homo sapien
gatgaagttggtgagccagtgcact

SEQ ID NO: 1274704 - DNA, 25 bp, Homo sapien
tgccccgtccaccatgaaagctgcc

SEQ ID NO: 1274705 - DNA, 25 bp, Homo sapien
tggatgggaacaggaagcctatgat

SEQ ID NO: 1274706 - DNA, 25 bp, Homo sapien
caggatgggtggggcggagaaggac

SEQ ID NO: 1274707 - DNA, 25 bp, Homo sapien
cagatgatgccgaggtaggacagct

SEQ ID NO: 1274708 - DNA, 25 bp, Homo sapien
aagacacagatgatgccgaggtagg

SEQ ID NO: 1274709 - DNA, 25 bp, Homo sapien
ccgcgatgtaggcaaagacacagat

SEQ ID NO: 1274710 - DNA, 25 bp, Homo sapien
tgggcccaatggaatgtcccgcgat

SEQ ID NO: 1274711 - DNA, 25 bp, Homo sapien
caggcaggcagagccgcagatgccg

SEQ ID NO: 1274712 - DNA, 25 bp, Homo sapien
agagccgcagatgccgtagccggcc

SEQ ID NO: 1274713 - DNA, 25 bp, Homo sapien
aggcagagccgcagatgccgtagcc

SEQ ID NO: 1274714 - DNA, 25 bp, Homo sapien
ggcaggcagagccgcagatgccgta

SEQ ID NO: 1274715 - DNA, 25 bp, Homo sapien
taaagtccatgtcccttaaatgacc

SEQ ID NO: 1274716 - DNA, 25 bp, Homo sapien
gcaggtagttagtatgtgtgcatcc

SEQ ID NO: 1274717 - DNA, 25 bp, Homo sapien
actcagttcactctgtggggctcct

SEQ ID NO: 1274718 - DNA, 25 bp, Homo sapien
cccggccggctctgaaggaattttg

SEQ ID NO: 1274719 - DNA, 25 bp, Homo sapien
tcactatgttgacgacgccagagcc

SEQ ID NO: 1274720 - DNA, 25 bp, Homo sapien
acgcccgcagatgtgtagatggtgt

SEQ ID NO: 1274721 - DNA, 25 bp, Homo sapien
caccgttacatattgggagtgagcg

SEQ ID NO: 1274722 - DNA, 25 bp, Homo sapien
agatggtgtccgcatagtagttgat

SEQ ID NO: 1274723 - DNA, 25 bp, Homo sapien
aggacgctggcttaactttctcaac

SEQ ID NO: 1274724 - DNA, 25 bp, Homo sapien
gcctgacctggagtcgggacaccag

SEQ ID NO: 1274725 - DNA, 25 bp, Homo sapien
caggacaggccggaagacccaggac

SEQ ID NO: 1274726 - DNA, 25 bp, Homo sapien
tttctcaactcaagccacacacagt

SEQ ID NO: 1274727 - DNA, 25 bp, Homo sapien
cccgggcctccgcacgcatgtcctc

SEQ ID NO: 1274728 - DNA, 25 bp, Homo sapien
agctcggcctccatgtccgtgtggc

SEQ ID NO: 1274729 - DNA, 25 bp, Homo sapien
gcctccgcacgcatgtcctccagct

SEQ ID NO: 1274730 - DNA, 25 bp, Homo sapien
ccggccatgagcacgatgatggaga

SEQ ID NO: 1274731 - DNA, 25 bp, Homo sapien
cctttctgaatcagggagtagcggg

SEQ ID NO: 1274732 - DNA, 25 bp, Homo sapien
catctcctttctgaatcagggagta

SEQ ID NO: 1274733 - DNA, 25 bp, Homo sapien
gcgggcacccctgtgagcgccagaa

SEQ ID NO: 1274734 - DNA, 25 bp, Homo sapien
tgtgagcgccagaagcaccggccag

SEQ ID NO: 1274735 - DNA, 25 bp, Homo sapien
gccagttctcccaggtacatgggaa

SEQ ID NO: 1274736 - DNA, 25 bp, Homo sapien
tccaacgatgacgaaaacctcggtc

SEQ ID NO: 1274737 - DNA, 25 bp, Homo sapien
gctgaagatctgtgctaggaagact

SEQ ID NO: 1274738 - DNA, 25 bp, Homo sapien
aacctcggtcattgttcccaccatg

SEQ ID NO: 1274739 - DNA, 25 bp, Homo sapien
gactcccagcaccactcgggaaaag

SEQ ID NO: 1274740 - DNA, 25 bp, Homo sapien
aaaagccttggccactttgctgact

SEQ ID NO: 1274741 - DNA, 25 bp, Homo sapien
gggaaaagacgatcagctcaaaagc

SEQ ID NO: 1274742 - DNA, 25 bp, Homo sapien
tgctgactcccatcaggatggcggg

SEQ ID NO: 1274743 - DNA, 25 bp, Homo sapien
gcccacgagcaatgaccccaacagg

SEQ ID NO: 1274744 - DNA, 25 bp, Homo sapien
aggcccacgagcaatgaccccaaca

SEQ ID NO: 1274745 - DNA, 25 bp, Homo sapien
ccacgagcaatgaccccaacaggcc

SEQ ID NO: 1274746 - DNA, 25 bp, Homo sapien
gcaggcccacgagcaatgaccccaa

SEQ ID NO: 1274747 - DNA, 25 bp, Homo sapien
tccatgaatgttgcgtgtcgctcaa

SEQ ID NO: 1274748 - DNA, 25 bp, Homo sapien
tgcaagaccatagaagcagcatgag

SEQ ID NO: 1274749 - DNA, 25 bp, Homo sapien
ggagacggtgcaagaccatagaagc

SEQ ID NO: 1274750 - DNA, 25 bp, Homo sapien
tcgctcaaagtaggtttcgttgtaa

SEQ ID NO: 1274751 - DNA, 25 bp, Homo sapien
ctggaaaacattgccccatccacag

SEQ ID NO: 1274752 - DNA, 25 bp, Homo sapien
ggctgagccaaaggccgcgctcagt

SEQ ID NO: 1274753 - DNA, 25 bp, Homo sapien
cttgtgcggcgtgttgaccacagag

SEQ ID NO: 1274754 - DNA, 25 bp, Homo sapien
gtgtcgccagcaacagcgtcggctg

SEQ ID NO: 1274755 - DNA, 25 bp, Homo sapien
cagagaggttgtagccgtactggaa

SEQ ID NO: 1274756 - DNA, 25 bp, Homo sapien
ccctggatggaatgggtggaggggt

SEQ ID NO: 1274757 - DNA, 25 bp, Homo sapien
ctccctggatggaatgggtggaggg

SEQ ID NO: 1274758 - DNA, 25 bp, Homo sapien
cctggatggaatgggtggaggggtt

SEQ ID NO: 1274759 - DNA, 25 bp, Homo sapien
tggatggaatgggtggaggggttcc

SEQ ID NO: 1274760 - DNA, 25 bp, Homo sapien
gggagcagacatccagaaccatgaa

SEQ ID NO: 1274761 - DNA, 25 bp, Homo sapien
cacaactaatgtggcaggaccaagg

SEQ ID NO: 1274762 - DNA, 25 bp, Homo sapien
tgtttacttcctctgggcccgcttg

SEQ ID NO: 1274763 - DNA, 25 bp, Homo sapien
cagatccttgctgcagaaggccaag

SEQ ID NO: 1274764 - DNA, 25 bp, Homo sapien
tctaagaaaaacctccagctctcta

SEQ ID NO: 1274765 - DNA, 25 bp, Homo sapien
ctctaagaaaaacctccagctctct

SEQ ID NO: 1274766 - DNA, 25 bp, Homo sapien
gacatttggaagcttcctcaatctt

SEQ ID NO: 1274767 - DNA, 25 bp, Homo sapien
gatttcattacatatgtgaggacat

SEQ ID NO: 1274768 - DNA, 25 bp, Homo sapien
ttcattacatatgtgaggacatttg

SEQ ID NO: 1274769 - DNA, 25 bp, Homo sapien
aggacatttggaagcttcctcaatc

SEQ ID NO: 1274770 - DNA, 25 bp, Homo sapien
tcaaactgcctgaagtggccgggcg

SEQ ID NO: 1274771 - DNA, 25 bp, Homo sapien
cagaggccctcttcgagatgctggg

SEQ ID NO: 1274772 - DNA, 25 bp, Homo sapien
ctcaaggaactgacactcgtgcagt

SEQ ID NO: 1274773 - DNA, 25 bp, Homo sapien
tccagaggccctcttcgagatgctg

SEQ ID NO: 1274774 - DNA, 25 bp, Homo sapien
cttgctcaaagaacagcagcacgtc

SEQ ID NO: 1274775 - DNA, 25 bp, Homo sapien
ttctacttgctcaaagaacagcagc

SEQ ID NO: 1274776 - DNA, 25 bp, Homo sapien
ctgccttctacttgctcaaagaaca

SEQ ID NO: 1274777 - DNA, 25 bp, Homo sapien
tctacttgctcaaagaacagcagca

SEQ ID NO: 1274778 - DNA, 25 bp, Homo sapien
ccaggagccacacaaaggttgaccc

SEQ ID NO: 1274779 - DNA, 25 bp, Homo sapien
aaggtggagccacgttaccaggagc

SEQ ID NO: 1274780 - DNA, 25 bp, Homo sapien
ggatgaagaattctgactcagtgtc

SEQ ID NO: 1274781 - DNA, 25 bp, Homo sapien
tttggctctaaacaaatgcccatgg

SEQ ID NO: 1274782 - DNA, 25 bp, Homo sapien
ggaggaccagctgtttaattgactc

SEQ ID NO: 1274783 - DNA, 25 bp, Homo sapien
aattgactcgggtctggtgacaggc

SEQ ID NO: 1274784 - DNA, 25 bp, Homo sapien
gcaaggcagccctttgcacagttcc

SEQ ID NO: 1274785 - DNA, 25 bp, Homo sapien
cctggcagaccagctccactggctt

SEQ ID NO: 1274786 - DNA, 25 bp, Homo sapien
tgttccgaagtgacaggtggaagct

SEQ ID NO: 1274787 - DNA, 25 bp, Homo sapien
gaagtgacaggtggaagctctttca

SEQ ID NO: 1274788 - DNA, 25 bp, Homo sapien
aggtggaagctctttcagttcctcc

SEQ ID NO: 1274789 - DNA, 25 bp, Homo sapien
ccgaagtgacaggtggaagctcttt

SEQ ID NO: 1274790 - DNA, 25 bp, Homo sapien
gatctctatgaacgtcttggccttg

SEQ ID NO: 1274791 - DNA, 25 bp, Homo sapien
acaatgaagctgtacgggccgaggc

SEQ ID NO: 1274792 - DNA, 25 bp, Homo sapien
ggaggcagatcacggcgaagacaat

SEQ ID NO: 1274793 - DNA, 25 bp, Homo sapien
ttggtctccgggacaatcaagaaga

SEQ ID NO: 1274794 - DNA, 25 bp, Homo sapien
gaagatcaagcccacggtgaagttg

SEQ ID NO: 1274795 - DNA, 25 bp, Homo sapien
cgggaagatcaagcccacggtgaag

SEQ ID NO: 1274796 - DNA, 25 bp, Homo sapien
ctggatgaacgggaagatcaagccc

SEQ ID NO: 1274797 - DNA, 25 bp, Homo sapien
tgaacgggaagatcaagcccacggt

SEQ ID NO: 1274798 - DNA, 25 bp, Homo sapien
cctgaaggcagagcgggcccgagca

SEQ ID NO: 1274799 - DNA, 25 bp, Homo sapien
ctccctgaaggcagagcgggcccga

SEQ ID NO: 1274800 - DNA, 25 bp, Homo sapien
ctgtagggggaggagagcagcctcc

SEQ ID NO: 1274801 - DNA, 25 bp, Homo sapien
agcctccctgaaggcagagcgggcc

SEQ ID NO: 1274802 - DNA, 25 bp, Homo sapien
tgggcccgagggcatgtcctatgac

SEQ ID NO: 1274803 - DNA, 25 bp, Homo sapien
ctatgacgtaggagatgacacagac

SEQ ID NO: 1274804 - DNA, 25 bp, Homo sapien
gcccgagggcatgtcctatgacgta

SEQ ID NO: 1274805 - DNA, 25 bp, Homo sapien
gatgctgatgtatggcatccaggac

SEQ ID NO: 1274806 - DNA, 25 bp, Homo sapien
agttggttcacctggagcagacaag

SEQ ID NO: 1274807 - DNA, 25 bp, Homo sapien
ttcacctggagcagacaagctagga

SEQ ID NO: 1274808 - DNA, 25 bp, Homo sapien
cagacaagctaggacgggaccccag

SEQ ID NO: 1274809 - DNA, 25 bp, Homo sapien
ggttcacctggagcagacaagctag

SEQ ID NO: 1274810 - DNA, 25 bp, Homo sapien
gtgccacctcgatgagccactggga

SEQ ID NO: 1274811 - DNA, 25 bp, Homo sapien
tgggtggaggatggcacctggctcc

SEQ ID NO: 1274812 - DNA, 25 bp, Homo sapien
gaaatcagctgaacgtgggctatga

SEQ ID NO: 1274813 - DNA, 25 bp, Homo sapien
gccactgggaaatcagctgaacgtg

SEQ ID NO: 1274814 - DNA, 25 bp, Homo sapien
cagtgagcacgcagcaggctatgag

SEQ ID NO: 1274815 - DNA, 25 bp, Homo sapien
agcctccgacccaggagctccacca

SEQ ID NO: 1274816 - DNA, 25 bp, Homo sapien
gaaggtcatgaccacgttcacggcc

SEQ ID NO: 1274817 - DNA, 25 bp, Homo sapien
ggcacgccggcgctcaggtagatct

SEQ ID NO: 1274818 - DNA, 25 bp, Homo sapien
tgccggccgtcacgtactgcacgtg

SEQ ID NO: 1274819 - DNA, 25 bp, Homo sapien
ggtagatctggtccgcgtagtagta

SEQ ID NO: 1274820 - DNA, 25 bp, Homo sapien
tgcaaggcaagcgcggggctgggcg

SEQ ID NO: 1274821 - DNA, 25 bp, Homo sapien
ctgcaaggcaagcgcggggctgggc

SEQ ID NO: 1274822 - DNA, 25 bp, Homo sapien
gcaaggcaagcgcggggctgggcgg

SEQ ID NO: 1274823 - DNA, 25 bp, Homo sapien
cgcccggcgccccaggacctgcgcc

SEQ ID NO: 1274824 - DNA, 25 bp, Homo sapien
cctcggcgccaggacccacgcccgg

SEQ ID NO: 1274825 - DNA, 25 bp, Homo sapien
gcgccccaggacctgcgccccgcgc

SEQ ID NO: 1274826 - DNA, 25 bp, Homo sapien
tcccgagccgcagcccggcccatac

SEQ ID NO: 1274827 - DNA, 25 bp, Homo sapien
tgccagcgcagcgagcgcatccgga

SEQ ID NO: 1274828 - DNA, 25 bp, Homo sapien
cagcgagcgcatccggaacagcttc

SEQ ID NO: 1274829 - DNA, 25 bp, Homo sapien
agatgaagcccgcggccttctctgc

SEQ ID NO: 1274830 - DNA, 25 bp, Homo sapien
acggagatgaagcccgcggccttct

SEQ ID NO: 1274831 - DNA, 25 bp, Homo sapien
gggagaagcggcaccgtcggaccag

SEQ ID NO: 1274832 - DNA, 25 bp, Homo sapien
ctggggagaagcggcaccgtcggac

SEQ ID NO: 1274833 - DNA, 25 bp, Homo sapien
ggggagaagcggcaccgtcggacca

SEQ ID NO: 1274834 - DNA, 25 bp, Homo sapien
gagaagcggcaccgtcggaccaggg

SEQ ID NO: 1274835 - DNA, 25 bp, Homo sapien
ggcggccgcttcgtctttcttctga

SEQ ID NO: 1274836 - DNA, 25 bp, Homo sapien
ctttcttggcggccgcttcgtcttt

SEQ ID NO: 1274837 - DNA, 25 bp, Homo sapien
tcttggcggccgcttcgtctttctt

SEQ ID NO: 1274838 - DNA, 25 bp, Homo sapien
ttggcggccgcttcgtctttcttct

SEQ ID NO: 1274839 - DNA, 25 bp, Homo sapien
aaccctggcgggaactggcttatgt

SEQ ID NO: 1274840 - DNA, 25 bp, Homo sapien
ctagatagtaaacgctggccagtcc

SEQ ID NO: 1274841 - DNA, 25 bp, Homo sapien
tggcacttggctcacggtaagcact

SEQ ID NO: 1274842 - DNA, 25 bp, Homo sapien
taaacagggacctaggtctgtgccg

SEQ ID NO: 1274843 - DNA, 25 bp, Homo sapien
ggtgctcccgagatgtcctgaactc

SEQ ID NO: 1274844 - DNA, 25 bp, Homo sapien
gctttggaacacaaggagggggcca

SEQ ID NO: 1274845 - DNA, 25 bp, Homo sapien
atgttggctcgggacaggatgggcc

SEQ ID NO: 1274846 - DNA, 25 bp, Homo sapien
tccagcctgttagaagagaccagtc

SEQ ID NO: 1274847 - DNA, 25 bp, Homo sapien
tctacgtttgcaaggagattccgaa

SEQ ID NO: 1274848 - DNA, 25 bp, Homo sapien
cgtttgcaaggagattccgaagacc

SEQ ID NO: 1274849 - DNA, 25 bp, Homo sapien
tacgtttgcaaggagattccgaaga

SEQ ID NO: 1274850 - DNA, 25 bp, Homo sapien
catctacgtttgcaaggagattccg

SEQ ID NO: 1274851 - DNA, 25 bp, Homo sapien
gggccagctcccctaagtacatggg

SEQ ID NO: 1274852 - DNA, 25 bp, Homo sapien
ggggccagctcccctaagtacatgg

SEQ ID NO: 1274853 - DNA, 25 bp, Homo sapien
agtacatggggaccacgttggaaga

SEQ ID NO: 1274854 - DNA, 25 bp, Homo sapien
ccctaagtacatggggaccacgttg

SEQ ID NO: 1274855 - DNA, 25 bp, Homo sapien
tggtggcaacttttaggaatgtatt

SEQ ID NO: 1274856 - DNA, 25 bp, Homo sapien
tctgctgcatcccattaagatcgca

SEQ ID NO: 1274857 - DNA, 25 bp, Homo sapien
taagatcgcaggcacgatagaaaat

SEQ ID NO: 1274858 - DNA, 25 bp, Homo sapien
tagaaaatatgttgttgaacagcaa

SEQ ID NO: 1274859 - DNA, 25 bp, Homo sapien
aaatgatgtggcgactctgctgcat

SEQ ID NO: 1274860 - DNA, 25 bp, Homo sapien
catggacacggttacagaccacagc

SEQ ID NO: 1274861 - DNA, 25 bp, Homo sapien
ggtcctaccatagtaagtctcattg

SEQ ID NO: 1274862 - DNA, 25 bp, Homo sapien
ggccgaccaggagggatccgataaa

SEQ ID NO: 1274863 - DNA, 25 bp, Homo sapien
ttccatgaattcaccggtcctacca

SEQ ID NO: 1274864 - DNA, 25 bp, Homo sapien
gagttgacagcagccacgttgtacc

SEQ ID NO: 1274865 - DNA, 25 bp, Homo sapien
gggagttgacagcagccacgttgta

SEQ ID NO: 1274866 - DNA, 25 bp, Homo sapien
tgacagcagccacgttgtacccata

SEQ ID NO: 1274867 - DNA, 25 bp, Homo sapien
tggggagttgacagcagccacgttg

SEQ ID NO: 1274868 - DNA, 25 bp, Homo sapien
caaaggcagctatcagggttgccag

SEQ ID NO: 1274869 - DNA, 25 bp, Homo sapien
aaaggcagctatcagggttgccagg

SEQ ID NO: 1274870 - DNA, 25 bp, Homo sapien
tttgcagctaacatgtttggttcaa

SEQ ID NO: 1274871 - DNA, 25 bp, Homo sapien
ttttgcagctaacatgtttggttca

SEQ ID NO: 1274872 - DNA, 25 bp, Homo sapien
ttgcagctaacatgtttggttcaag

SEQ ID NO: 1274873 - DNA, 25 bp, Homo sapien
cccttccttcatgctctgatcctgt

SEQ ID NO: 1274874 - DNA, 25 bp, Homo sapien
ttccttcatgctctgatcctgttgc

SEQ ID NO: 1274875 - DNA, 25 bp, Homo sapien
cttccttcatgctctgatcctgttg

SEQ ID NO: 1274876 - DNA, 25 bp, Homo sapien
tccttcatgctctgatcctgttgct

SEQ ID NO: 1274877 - DNA, 25 bp, Homo sapien
tccttttagccaaagtaacgcgtgc

SEQ ID NO: 1274878 - DNA, 25 bp, Homo sapien
tggaagggcagagtgccgctcacct

SEQ ID NO: 1274879 - DNA, 25 bp, Homo sapien
agagtgccgctcacctccttttagc

SEQ ID NO: 1274880 - DNA, 25 bp, Homo sapien
gctcacctccttttagccaaagtaa

SEQ ID NO: 1274881 - DNA, 25 bp, Homo sapien
gagaagacattctgggtgcactttg

SEQ ID NO: 1274882 - DNA, 25 bp, Homo sapien
aataacagccaatagcatttttata

SEQ ID NO: 1274883 - DNA, 25 bp, Homo sapien
atttttatagccagattaagtcaga

SEQ ID NO: 1274884 - DNA, 25 bp, Homo sapien
caaataacagccaatagcattttta

SEQ ID NO: 1274885 - DNA, 25 bp, Homo sapien
tctgcttttaaatgaaacgtctggg

SEQ ID NO: 1274886 - DNA, 25 bp, Homo sapien
cctgatggaacagtctacggtattt

SEQ ID NO: 1274887 - DNA, 25 bp, Homo sapien
aggcccagcattgtcctgatggaac

SEQ ID NO: 1274888 - DNA, 25 bp, Homo sapien
agtctacggtatttccccattgcta

SEQ ID NO: 1274889 - DNA, 25 bp, Homo sapien
aggcagggcagggaaaatgagtcac

SEQ ID NO: 1274890 - DNA, 25 bp, Homo sapien
cgaacccctttccaggcagggcagg

SEQ ID NO: 1274891 - DNA, 25 bp, Homo sapien
ctcgaacccctttccaggcagggca

SEQ ID NO: 1274892 - DNA, 25 bp, Homo sapien
gcagggcagggaaaatgagtcacac

SEQ ID NO: 1274893 - DNA, 25 bp, Homo sapien
tgtcagccccccatgtttggcactc

SEQ ID NO: 1274894 - DNA, 25 bp, Homo sapien
accagcgcaagtggccaaaatccaa

SEQ ID NO: 1274895 - DNA, 25 bp, Homo sapien
acagggcacaccagcgcaagtggcc

SEQ ID NO: 1274896 - DNA, 25 bp, Homo sapien
aaagtctcacaagtcccacaggttt

SEQ ID NO: 1274897 - DNA, 25 bp, Homo sapien
actttagtgattgattctgaatctc

SEQ ID NO: 1274898 - DNA, 25 bp, Homo sapien
cattagcagcaaatccccagggttg

SEQ ID NO: 1274899 - DNA, 25 bp, Homo sapien
gcactgttccttgcattagcagcaa

SEQ ID NO: 1274900 - DNA, 25 bp, Homo sapien
tccagttactttagtgattgattct

SEQ ID NO: 1274901 - DNA, 25 bp, Homo sapien
tttttcttctgcgtatcactgtcct

SEQ ID NO: 1274902 - DNA, 25 bp, Homo sapien
tctgcgtatcactgtcctagcacac

SEQ ID NO: 1274903 - DNA, 25 bp, Homo sapien
tcttctgcgtatcactgtcctagca

SEQ ID NO: 1274904 - DNA, 25 bp, Homo sapien
gcgtatcactgtcctagcacactga

SEQ ID NO: 1274905 - DNA, 25 bp, Homo sapien
gggagaggaaatcaacgatggggga

SEQ ID NO: 1274906 - DNA, 25 bp, Homo sapien
gtggggagaggaaatcaacgatggg

SEQ ID NO: 1274907 - DNA, 25 bp, Homo sapien
gaggaaatcaacgatgggggagtga

SEQ ID NO: 1274908 - DNA, 25 bp, Homo sapien
gaaatcaacgatgggggagtgagga

SEQ ID NO: 1274909 - DNA, 25 bp, Homo sapien
ctgggggggacgcggacactcccag

SEQ ID NO: 1274910 - DNA, 25 bp, Homo sapien
ggggatcatcccgggagctgcgggc

SEQ ID NO: 1274911 - DNA, 25 bp, Homo sapien
cccagtccccgccttgacggcccag

SEQ ID NO: 1274912 - DNA, 25 bp, Homo sapien
cagtccccgccttgacggcccagcc

SEQ ID NO: 1274913 - DNA, 25 bp, Homo sapien
tcctgccagtgacagggcgtcgcaa

SEQ ID NO: 1274914 - DNA, 25 bp, Homo sapien
gtcgcaagcacagccatggcgtcac

SEQ ID NO: 1274915 - DNA, 25 bp, Homo sapien
acagggcgtcgcaagcacagccatg

SEQ ID NO: 1274916 - DNA, 25 bp, Homo sapien
atggcgtcaccaacgctcgacccgt

SEQ ID NO: 1274917 - DNA, 25 bp, Homo sapien
gtgggagactgtgagaagcctagtg

SEQ ID NO: 1274918 - DNA, 25 bp, Homo sapien
tgcctcaggccgccatgaggccgag

SEQ ID NO: 1274919 - DNA, 25 bp, Homo sapien
tcaggccgccatgaggccgaggcct

SEQ ID NO: 1274920 - DNA, 25 bp, Homo sapien
gagaagcctagtggctcaaagatgg

SEQ ID NO: 1274921 - DNA, 25 bp, Homo sapien
gcccaggaattcgatcatgccactg

SEQ ID NO: 1274922 - DNA, 25 bp, Homo sapien
agcccaggaattcgatcatgccact

SEQ ID NO: 1274923 - DNA, 25 bp, Homo sapien
cccaggaattcgatcatgccactgc

SEQ ID NO: 1274924 - DNA, 25 bp, Homo sapien
cacaaagcaagctggcacatctccg

SEQ ID NO: 1274925 - DNA, 25 bp, Homo sapien
caaagcaagctggcacatctccggg

SEQ ID NO: 1274926 - DNA, 25 bp, Homo sapien
acaaagcaagctggcacatctccgg

SEQ ID NO: 1274927 - DNA, 25 bp, Homo sapien
tcgcctatcagagagtgcacgtgca

SEQ ID NO: 1274928 - DNA, 25 bp, Homo sapien
cctatcagagagtgcacgtgcacag

SEQ ID NO: 1274929 - DNA, 25 bp, Homo sapien
gcctatcagagagtgcacgtgcaca

SEQ ID NO: 1274930 - DNA, 25 bp, Homo sapien
ctcgcctatcagagagtgcacgtgc

SEQ ID NO: 1274931 - DNA, 25 bp, Homo sapien
acccgcaggactctccttggtgttg

SEQ ID NO: 1274932 - DNA, 25 bp, Homo sapien
gactgccacagcactctatgcctgc

SEQ ID NO: 1274933 - DNA, 25 bp, Homo sapien
ctgactctgtcacgcgtctgctttt

SEQ ID NO: 1274934 - DNA, 25 bp, Homo sapien
ggccttgcacagcacccgcaggact

SEQ ID NO: 1274935 - DNA, 25 bp, Homo sapien
taatgtggtgctggtgttgatgaaa

SEQ ID NO: 1274936 - DNA, 25 bp, Homo sapien
ctgggataatgtggtgctggtgttg

SEQ ID NO: 1274937 - DNA, 25 bp, Homo sapien
gtggtgctggtgttgatgaaaagag

SEQ ID NO: 1274938 - DNA, 25 bp, Homo sapien
ataatgtggtgctggtgttgatgaa

SEQ ID NO: 1274939 - DNA, 25 bp, Homo sapien
ctggtggtggttcggcatctggcca

SEQ ID NO: 1274940 - DNA, 25 bp, Homo sapien
aactactccagccccttgggtggct

SEQ ID NO: 1274941 - DNA, 25 bp, Homo sapien
tactccagccccttgggtggctgca

SEQ ID NO: 1274942 - DNA, 25 bp, Homo sapien
ccctggtggtggttcggcatctggc

SEQ ID NO: 1274943 - DNA, 25 bp, Homo sapien
tctgtcagcacaaaagcaacgtgtt

SEQ ID NO: 1274944 - DNA, 25 bp, Homo sapien
tcataactccgaatatccaggatat

SEQ ID NO: 1274945 - DNA, 25 bp, Homo sapien
ctaggattaatcataactccgaata

SEQ ID NO: 1274946 - DNA, 25 bp, Homo sapien
gcaacgtgttcaacaaatcccattt

SEQ ID NO: 1274947 - DNA, 25 bp, Homo sapien
ggaggagtgcacataagccgcttat

SEQ ID NO: 1274948 - DNA, 25 bp, Homo sapien
gaggagtgcacataagccgcttatg

SEQ ID NO: 1274949 - DNA, 25 bp, Homo sapien
aggaggaggagtgcacataagccgc

SEQ ID NO: 1274950 - DNA, 25 bp, Homo sapien
gaggaggagtgcacataagccgctt

SEQ ID NO: 1274951 - DNA, 25 bp, Homo sapien
ggcaagagggaacggtgtggagtgg

SEQ ID NO: 1274952 - DNA, 25 bp, Homo sapien
aaggcgaagagaactccggagaaga

SEQ ID NO: 1274953 - DNA, 25 bp, Homo sapien
gattctgaatgcatgctgcatttgc

SEQ ID NO: 1274954 - DNA, 25 bp, Homo sapien
cagtgtggaacacggagcctggatt

SEQ ID NO: 1274955 - DNA, 25 bp, Homo sapien
ggctgtgcaaagtgtccaaggagca

SEQ ID NO: 1274956 - DNA, 25 bp, Homo sapien
cctcgcttgagatctgactgggcaa

SEQ ID NO: 1274957 - DNA, 25 bp, Homo sapien
cagaaagcggctggtaaacctggtt

SEQ ID NO: 1274958 - DNA, 25 bp, Homo sapien
tacacttgggtgactcagggatgca

SEQ ID NO: 1274959 - DNA, 25 bp, Homo sapien
gctagactgacttggtaactggatc

SEQ ID NO: 1274960 - DNA, 25 bp, Homo sapien
taactggatctaagaaggaggcgat

SEQ ID NO: 1274961 - DNA, 25 bp, Homo sapien
cagtgatcactcatctgtggcaaga

SEQ ID NO: 1274962 - DNA, 25 bp, Homo sapien
cacccggagcaggtattttctgagc

SEQ ID NO: 1274963 - DNA, 25 bp, Homo sapien
agtcaaacagggatcggcagcacag

SEQ ID NO: 1274964 - DNA, 25 bp, Homo sapien
gctttgtcgagttctgatggattcc

SEQ ID NO: 1274965 - DNA, 25 bp, Homo sapien
ggaaatcacctatcaggtaaagctg

SEQ ID NO: 1274966 - DNA, 25 bp, Homo sapien
cagcacagcgtgacttcggttttga

SEQ ID NO: 1274967 - DNA, 25 bp, Homo sapien
cattctttgccgatggctcctgtga

SEQ ID NO: 1274968 - DNA, 25 bp, Homo sapien
cttccattctttgccgatggctcct

SEQ ID NO: 1274969 - DNA, 25 bp, Homo sapien
attctttgccgatggctcctgtgac

SEQ ID NO: 1274970 - DNA, 25 bp, Homo sapien
tccattctttgccgatggctcctgt

SEQ ID NO: 1274971 - DNA, 25 bp, Homo sapien
gccacttacctcagctgaatacaaa

SEQ ID NO: 1274972 - DNA, 25 bp, Homo sapien
cacctttaggaagaaatcgtatttg

SEQ ID NO: 1274973 - DNA, 25 bp, Homo sapien
atcccagttcaatgaagcctcaaat

SEQ ID NO: 1274974 - DNA, 25 bp, Homo sapien
tccgggcgacagaatgaggctcctt

SEQ ID NO: 1274975 - DNA, 25 bp, Homo sapien
tggtggtcaccatgcaacctcaggg

SEQ ID NO: 1274976 - DNA, 25 bp, Homo sapien
tacggcaagggttagcagcccatgg

SEQ ID NO: 1274977 - DNA, 25 bp, Homo sapien
tacccttatgcagatgaacgcccac

SEQ ID NO: 1274978 - DNA, 25 bp, Homo sapien
taccggtggaacttgctgcctgagg

SEQ ID NO: 1274979 - DNA, 25 bp, Homo sapien
cctatgcacagaactagaaaggaca

SEQ ID NO: 1274980 - DNA, 25 bp, Homo sapien
tctcccaatggagccgagagcatca

SEQ ID NO: 1274981 - DNA, 25 bp, Homo sapien
aaggcagcacctatgcacagaacta

SEQ ID NO: 1274982 - DNA, 25 bp, Homo sapien
ggtgcagcagacatgcacttctgcc

SEQ ID NO: 1274983 - DNA, 25 bp, Homo sapien
tcaggtgcttggaagttcccctggg

SEQ ID NO: 1274984 - DNA, 25 bp, Homo sapien
gggtcccttgggattcctgagattc

SEQ ID NO: 1274985 - DNA, 25 bp, Homo sapien
cagagagagaagagccgagttcgga

SEQ ID NO: 1274986 - DNA, 25 bp, Homo sapien
agattctcctggcttggaaggcgcg

SEQ ID NO: 1274987 - DNA, 25 bp, Homo sapien
cgcgggtgcagaggacgaacatgat

SEQ ID NO: 1274988 - DNA, 25 bp, Homo sapien
aggacgaacatgatgcagttggcac

SEQ ID NO: 1274989 - DNA, 25 bp, Homo sapien
cagaggacgaacatgatgcagttgg

SEQ ID NO: 1274990 - DNA, 25 bp, Homo sapien
gtgcagaggacgaacatgatgcagt

SEQ ID NO: 1274991 - DNA, 25 bp, Homo sapien
tgggaaggacccaagatcagtcaac

SEQ ID NO: 1274992 - DNA, 25 bp, Homo sapien
gatcagtcaactctcctagggctac

SEQ ID NO: 1274993 - DNA, 25 bp, Homo sapien
ggtcttcttggctgggaaggaccca

SEQ ID NO: 1274994 - DNA, 25 bp, Homo sapien
cctagggctactcctaggtcactgg

SEQ ID NO: 1274995 - DNA, 25 bp, Homo sapien
accccggaccacactgatcccactc

SEQ ID NO: 1274996 - DNA, 25 bp, Homo sapien
caccccggaccacactgatcccact

SEQ ID NO: 1274997 - DNA, 25 bp, Homo sapien
agcacagtggggccgagctcctccc

SEQ ID NO: 1274998 - DNA, 25 bp, Homo sapien
tgcagctgtgccttggccgacactg

SEQ ID NO: 1274999 - DNA, 25 bp, Homo sapien
ccttggccgacactggggtgcagcc

SEQ ID NO: 1275000 - DNA, 25 bp, Homo sapien
cacagtggggccgagctcctccctg

SEQ ID NO: 1275001 - DNA, 25 bp, Homo sapien
agggtcagcacgaaccgcacggtgc

SEQ ID NO: 1275002 - DNA, 25 bp, Homo sapien
ttcttgtccgccatggaggagtggc

SEQ ID NO: 1275003 - DNA, 25 bp, Homo sapien
gaggatgggccggtactcagagagt

SEQ ID NO: 1275004 - DNA, 25 bp, Homo sapien
ccgatgaagatgagcgggatgagca

SEQ ID NO: 1275005 - DNA, 25 bp, Homo sapien
aagaggacccattgtcacccgtaag

SEQ ID NO: 1275006 - DNA, 25 bp, Homo sapien
gacccattgtcacccgtaagggtca

SEQ ID NO: 1275007 - DNA, 25 bp, Homo sapien
tgtcacccgtaagggtcagcctcag

SEQ ID NO: 1275008 - DNA, 25 bp, Homo sapien
tttggaaaagaggacccattgtcac

SEQ ID NO: 1275009 - DNA, 25 bp, Homo sapien
agcggccatgcagagggccctgagc

SEQ ID NO: 1275010 - DNA, 25 bp, Homo sapien
cagcggccatgcagagggccctgag

SEQ ID NO: 1275011 - DNA, 25 bp, Homo sapien
gccctgagctctaagggcagcgcct

SEQ ID NO: 1275012 - DNA, 25 bp, Homo sapien
cctgagctctaagggcagcgcctac

SEQ ID NO: 1275013 - DNA, 25 bp, Homo sapien
cacgtccgaggcgtcatagccaatc

SEQ ID NO: 1275014 - DNA, 25 bp, Homo sapien
ggctgccacagtgatgaccaacggg

SEQ ID NO: 1275015 - DNA, 25 bp, Homo sapien
tagccaatcttcttcagggcgacgg

SEQ ID NO: 1275016 - DNA, 25 bp, Homo sapien
tgttgatgtgcttccggaccaggag

SEQ ID NO: 1275017 - DNA, 25 bp, Homo sapien
gattgtctaccgctgctttcaggca

SEQ ID NO: 1275018 - DNA, 25 bp, Homo sapien
aatttccagccaccaacacatgtgg

SEQ ID NO: 1275019 - DNA, 25 bp, Homo sapien
tgggaacagatgcacatagcacacc

SEQ ID NO: 1275020 - DNA, 25 bp, Homo sapien
gttgagcagttacaactgagactgc

SEQ ID NO: 1275021 - DNA, 25 bp, Homo sapien
tttgcctagaaatgaaagccagact

SEQ ID NO: 1275022 - DNA, 25 bp, Homo sapien
caacctctgtggtcataacttaaga

SEQ ID NO: 1275023 - DNA, 25 bp, Homo sapien
ctcagaggccgttaagggttcaatt

SEQ ID NO: 1275024 - DNA, 25 bp, Homo sapien
cctcgtgtgtaactctgattggcag

SEQ ID NO: 1275025 - DNA, 25 bp, Homo sapien
ggccacgcaggtgctctcctgggaa

SEQ ID NO: 1275026 - DNA, 25 bp, Homo sapien
tgagctaatgaatggaacagcactc

SEQ ID NO: 1275027 - DNA, 25 bp, Homo sapien
gtagaaaaatgccagtgaaactcgc

SEQ ID NO: 1275028 - DNA, 25 bp, Homo sapien
tgtgcacgtgcaggattctctctaa

SEQ ID NO: 1275029 - DNA, 25 bp, Homo sapien
tcttgcaaagagaggtacagcctcg

SEQ ID NO: 1275030 - DNA, 25 bp, Homo sapien
ggcctgaggctagaaacgaccaaag

SEQ ID NO: 1275031 - DNA, 25 bp, Homo sapien
tcagcgaggcttacttgaaagacgc

SEQ ID NO: 1275032 - DNA, 25 bp, Homo sapien
tgcacaactgaaggtcaagcgactc

SEQ ID NO: 1275033 - DNA, 25 bp, Homo sapien
cctggaaaagcagcgccaccgccac

SEQ ID NO: 1275034 - DNA, 25 bp, Homo sapien
tcctggaaaagcagcgccaccgcca

SEQ ID NO: 1275035 - DNA, 25 bp, Homo sapien
ttctgcagcactccgtagaagtagg

SEQ ID NO: 1275036 - DNA, 25 bp, Homo sapien
ggtacaagtagagcgcaatggccac

SEQ ID NO: 1275037 - DNA, 25 bp, Homo sapien
ccaaagcaggcgatctgtgcgaggc

SEQ ID NO: 1275038 - DNA, 25 bp, Homo sapien
cgcggacgatgctgaggtacaagta

SEQ ID NO: 1275039 - DNA, 25 bp, Homo sapien
cgcgtgcggccacgccgccgccgtc

SEQ ID NO: 1275040 - DNA, 25 bp, Homo sapien
ccggagcgccgcgaggacagaagcc

SEQ ID NO: 1275041 - DNA, 25 bp, Homo sapien
tctgggcaccgaggcgccctaggct

SEQ ID NO: 1275042 - DNA, 25 bp, Homo sapien
ccgcccctatatcccgggccctgag

SEQ ID NO: 1275043 - DNA, 25 bp, Homo sapien
cacaacctcgcttcaccccagtttc

SEQ ID NO: 1275044 - DNA, 25 bp, Homo sapien
tcatcacaacctcgcttcaccccag

SEQ ID NO: 1275045 - DNA, 25 bp, Homo sapien
atcacaacctcgcttcaccccagtt

SEQ ID NO: 1275046 - DNA, 25 bp, Homo sapien
catcatcacaacctcgcttcacccc

SEQ ID NO: 1275047 - DNA, 25 bp, Homo sapien
ccggtgtggccactgccccgtggtt

SEQ ID NO: 1275048 - DNA, 25 bp, Homo sapien
ggtgtggccactgccccgtggttcc

SEQ ID NO: 1275049 - DNA, 25 bp, Homo sapien
gtggccactgccccgtggttcccag

SEQ ID NO: 1275050 - DNA, 25 bp, Homo sapien
tcccggtgtggccactgccccgtgg

SEQ ID NO: 1275051 - DNA, 25 bp, Homo sapien
gcacgttggctaaactaggctgaaa

SEQ ID NO: 1275052 - DNA, 25 bp, Homo sapien
taaaagcggactgaatgcacgttgg

SEQ ID NO: 1275053 - DNA, 25 bp, Homo sapien
acttaaatgttgagctaggccaggc

SEQ ID NO: 1275054 - DNA, 25 bp, Homo sapien
gaagatagcaggaacgagtgtctcc

SEQ ID NO: 1275055 - DNA, 25 bp, Homo sapien
tcccacacacatgagcgtcttgccc

SEQ ID NO: 1275056 - DNA, 25 bp, Homo sapien
ttcccacacacatgagcgtcttgcc

SEQ ID NO: 1275057 - DNA, 25 bp, Homo sapien
attcccacacacatgagcgtcttgc

SEQ ID NO: 1275058 - DNA, 25 bp, Homo sapien
ccacacacatgagcgtcttgcccat

SEQ ID NO: 1275059 - DNA, 25 bp, Homo sapien
gagttccctcaaattcttcgcccag

SEQ ID NO: 1275060 - DNA, 25 bp, Homo sapien
ttcttcgcccagtttcctctaacat

SEQ ID NO: 1275061 - DNA, 25 bp, Homo sapien
aatccaacccaggatatcacactgc

SEQ ID NO: 1275062 - DNA, 25 bp, Homo sapien
tttgcatcttacacagccatggcac

SEQ ID NO: 1275063 - DNA, 25 bp, Homo sapien
gaactccctaaattaatggcctctg

SEQ ID NO: 1275064 - DNA, 25 bp, Homo sapien
gacaagtgaatatatcctagctagg

SEQ ID NO: 1275065 - DNA, 25 bp, Homo sapien
tatgtgtaagcagcccctctctgtc

SEQ ID NO: 1275066 - DNA, 25 bp, Homo sapien
actctaaggaatgcagaagtaggcc

SEQ ID NO: 1275067 - DNA, 25 bp, Homo sapien
tgctgtccctggcctgtgtgaaagg

SEQ ID NO: 1275068 - DNA, 25 bp, Homo sapien
ctgtccctggcctgtgtgaaaggta

SEQ ID NO: 1275069 - DNA, 25 bp, Homo sapien
gctgtccctggcctgtgtgaaaggt

SEQ ID NO: 1275070 - DNA, 25 bp, Homo sapien
cctcttaggcttggatgaatttcag

SEQ ID NO: 1275071 - DNA, 25 bp, Homo sapien
ccgaggtgtaagacacttacgtttg

SEQ ID NO: 1275072 - DNA, 25 bp, Homo sapien
gaaggccccatccttggtgccacat

SEQ ID NO: 1275073 - DNA, 25 bp, Homo sapien
ggtgccacatggaccccagaggctt

SEQ ID NO: 1275074 - DNA, 25 bp, Homo sapien
gagcacaacgacaccaatgggagga

SEQ ID NO: 1275075 - DNA, 25 bp, Homo sapien
ggaacttttctcatcagccactgga

SEQ ID NO: 1275076 - DNA, 25 bp, Homo sapien
tcatctctaagaacaggagccggtg

SEQ ID NO: 1275077 - DNA, 25 bp, Homo sapien
cagttcactggcctcaaagttggca

SEQ ID NO: 1275078 - DNA, 25 bp, Homo sapien
cttccgaagtcctggcgtctcccac

SEQ ID NO: 1275079 - DNA, 25 bp, Homo sapien
gcttccgaagtcctggcgtctccca

SEQ ID NO: 1275080 - DNA, 25 bp, Homo sapien
ggcgcagaagagcttccgaagtcct

SEQ ID NO: 1275081 - DNA, 25 bp, Homo sapien
cgtggcgcagaagagcttccgaagt

SEQ ID NO: 1275082 - DNA, 25 bp, Homo sapien
cccacaacgtgcagcacttctaggg

SEQ ID NO: 1275083 - DNA, 25 bp, Homo sapien
ccttactattgctcacaacaaccag

SEQ ID NO: 1275084 - DNA, 25 bp, Homo sapien
gcagtatacttgctgattgcttcct

SEQ ID NO: 1275085 - DNA, 25 bp, Homo sapien
attgcttccttactattgctcacaa

SEQ ID NO: 1275086 - DNA, 25 bp, Homo sapien
ctaagacactgccaaagaaacactc

SEQ ID NO: 1275087 - DNA, 25 bp, Homo sapien
aagacactgccaaagaaacactcac

SEQ ID NO: 1275088 - DNA, 25 bp, Homo sapien
taagacactgccaaagaaacactca

SEQ ID NO: 1275089 - DNA, 25 bp, Homo sapien
ggtccacggcatccggaggggactc

SEQ ID NO: 1275090 - DNA, 25 bp, Homo sapien
ccacggcatccggaggggactcggg

SEQ ID NO: 1275091 - DNA, 25 bp, Homo sapien
tccacggcatccggaggggactcgg

SEQ ID NO: 1275092 - DNA, 25 bp, Homo sapien
cacggcatccggaggggactcgggg

SEQ ID NO: 1275093 - DNA, 25 bp, Homo sapien
tgtcccaatgatctttatgtgttgg

SEQ ID NO: 1275094 - DNA, 25 bp, Homo sapien
caacagcacctaatgcacagcggac

SEQ ID NO: 1275095 - DNA, 25 bp, Homo sapien
gggcagacccttcacacgtgactat

SEQ ID NO: 1275096 - DNA, 25 bp, Homo sapien
caaacatcaggttgcgggtgtgtgg

SEQ ID NO: 1275097 - DNA, 25 bp, Homo sapien
tgggaaaggcttcctcactcatgag

SEQ ID NO: 1275098 - DNA, 25 bp, Homo sapien
cagagatacggagggaaccaaagtc

SEQ ID NO: 1275099 - DNA, 25 bp, Homo sapien
aaagtccttgacattactgagcgcc

SEQ ID NO: 1275100 - DNA, 25 bp, Homo sapien
tcatgaagtcctcgaggtcatccct

SEQ ID NO: 1275101 - DNA, 25 bp, Homo sapien
ccttggattgatcggatgtcagctc

SEQ ID NO: 1275102 - DNA, 25 bp, Homo sapien
aaagaaggaccttggattgatcgga

SEQ ID NO: 1275103 - DNA, 25 bp, Homo sapien
tgatcggatgtcagctctggtcctg

SEQ ID NO: 1275104 - DNA, 25 bp, Homo sapien
ctgtgggccaaagaaggaccttgga

SEQ ID NO: 1275105 - DNA, 25 bp, Homo sapien
ggcccctccataggtgtgcattcac

SEQ ID NO: 1275106 - DNA, 25 bp, Homo sapien
gggcctggcacagccgcagggagcg

SEQ ID NO: 1275107 - DNA, 25 bp, Homo sapien
ccaggcccctccataggtgtgcatt

SEQ ID NO: 1275108 - DNA, 25 bp, Homo sapien
cccaggcccctccataggtgtgcat

SEQ ID NO: 1275109 - DNA, 25 bp, Homo sapien
agaggtgcaggcgcacaagtgccct

SEQ ID NO: 1275110 - DNA, 25 bp, Homo sapien
ggtgcaggcgcacaagtgccctccc

SEQ ID NO: 1275111 - DNA, 25 bp, Homo sapien
caagaggtgcaggcgcacaagtgcc

SEQ ID NO: 1275112 - DNA, 25 bp, Homo sapien
gaggtgcaggcgcacaagtgccctc

SEQ ID NO: 1275113 - DNA, 25 bp, Homo sapien
gccccccagccggacaggcactgga

SEQ ID NO: 1275114 - DNA, 25 bp, Homo sapien
cccagccggacaggcactggagcat

SEQ ID NO: 1275115 - DNA, 25 bp, Homo sapien
cctcggtgtcactggaatttcaaac

SEQ ID NO: 1275116 - DNA, 25 bp, Homo sapien
ctcggtgtcactggaatttcaaacc

SEQ ID NO: 1275117 - DNA, 25 bp, Homo sapien
tgccagaccagtggaacatgcagag

SEQ ID NO: 1275118 - DNA, 25 bp, Homo sapien
ccatcttaccccctcagctcctcta

SEQ ID NO: 1275119 - DNA, 25 bp, Homo sapien
catccatcttaccccctcagctcct

SEQ ID NO: 1275120 - DNA, 25 bp, Homo sapien
ccatccatcttaccccctcagctcc

SEQ ID NO: 1275121 - DNA, 25 bp, Homo sapien
ttgtcctgaccagactgtaaagacc

SEQ ID NO: 1275122 - DNA, 25 bp, Homo sapien
gttgtcctgaccagactgtaaagac

SEQ ID NO: 1275123 - DNA, 25 bp, Homo sapien
tgtcaaagttgaggcattctggaga

SEQ ID NO: 1275124 - DNA, 25 bp, Homo sapien
attctggagagttaccaggccccac

SEQ ID NO: 1275125 - DNA, 25 bp, Homo sapien
atttgaagggataggacagtccttg

SEQ ID NO: 1275126 - DNA, 25 bp, Homo sapien
caggccccacagtgtaggctcagag

SEQ ID NO: 1275127 - DNA, 25 bp, Homo sapien
gaccgacgggacagcggcatctcct

SEQ ID NO: 1275128 - DNA, 25 bp, Homo sapien
ccggctcggaacaagcccaggcaag

SEQ ID NO: 1275129 - DNA, 25 bp, Homo sapien
ggactcccgcaaaatctccaaatgc

SEQ ID NO: 1275130 - DNA, 25 bp, Homo sapien
cgatctgcgtggtcaccgagaagca

SEQ ID NO: 1275131 - DNA, 25 bp, Homo sapien
ctacccagagccgaggtcccggact

SEQ ID NO: 1275132 - DNA, 25 bp, Homo sapien
agagcgcgtagtttgcgcagcgccc

SEQ ID NO: 1275133 - DNA, 25 bp, Homo sapien
tccccagcgagagcgcgtagtttgc

SEQ ID NO: 1275134 - DNA, 25 bp, Homo sapien
gcctgggctggcgtttccccagcga

SEQ ID NO: 1275135 - DNA, 25 bp, Homo sapien
ggtgacttggctcggcgtgcctcgg

SEQ ID NO: 1275136 - DNA, 25 bp, Homo sapien
tgcgcccccaagttccggcgccgcg

SEQ ID NO: 1275137 - DNA, 25 bp, Homo sapien
cgccgcgggctgcaggggtgacttg

SEQ ID NO: 1275138 - DNA, 25 bp, Homo sapien
gctcggccccgcacggctctcgggt

SEQ ID NO: 1275139 - DNA, 25 bp, Homo sapien
tcagccatcctagggctgcagcggg

SEQ ID NO: 1275140 - DNA, 25 bp, Homo sapien
catttcagtagggagtacacaagat

SEQ ID NO: 1275141 - DNA, 25 bp, Homo sapien
cggcacatcatcaagaggcctgggc

SEQ ID NO: 1275142 - DNA, 25 bp, Homo sapien
tggccacggcggcacatcatcaaga

SEQ ID NO: 1275143 - DNA, 25 bp, Homo sapien
caaggctgccagtcaatgtccaata

SEQ ID NO: 1275144 - DNA, 25 bp, Homo sapien
gaagctccacttctaaggactgtgg

SEQ ID NO: 1275145 - DNA, 25 bp, Homo sapien
acctaaagaaccctgggagcaccag

SEQ ID NO: 1275146 - DNA, 25 bp, Homo sapien
aatgaccaaactgacctgaagctcc

SEQ ID NO: 1275147 - DNA, 25 bp, Homo sapien
tgcgaagaaggcaactcttcccctc

SEQ ID NO: 1275148 - DNA, 25 bp, Homo sapien
ttgttcctacgtacaaggagttgcg

SEQ ID NO: 1275149 - DNA, 25 bp, Homo sapien
cgtacaaggagttgcgaagaaggca

SEQ ID NO: 1275150 - DNA, 25 bp, Homo sapien
tttggcttcttgttcctacgtacaa

SEQ ID NO: 1275151 - DNA, 25 bp, Homo sapien
ttctcatgcagataaccacataagt

SEQ ID NO: 1275152 - DNA, 25 bp, Homo sapien
tgtacatgtttgcagccatcactcc

SEQ ID NO: 1275153 - DNA, 25 bp, Homo sapien
taagctgtgcactcagcatcaccca

SEQ ID NO: 1275154 - DNA, 25 bp, Homo sapien
ggcactaagccctcgatccttctga

SEQ ID NO: 1275155 - DNA, 25 bp, Homo sapien
ccttctgacagacatggccacattt

SEQ ID NO: 1275156 - DNA, 25 bp, Homo sapien
tttgcaaatgttgaagggagaagac

SEQ ID NO: 1275157 - DNA, 25 bp, Homo sapien
ggccaccaggctgagtgaaggtgct

SEQ ID NO: 1275158 - DNA, 25 bp, Homo sapien
ccaggctgagtgaaggtgctataca

SEQ ID NO: 1275159 - DNA, 25 bp, Homo sapien
ggcccctttgagcctatgagggatc

SEQ ID NO: 1275160 - DNA, 25 bp, Homo sapien
agtgaaggtgctatacagaggcttc

SEQ ID NO: 1275161 - DNA, 25 bp, Homo sapien
tggacacaaaagtgcactgagactg

SEQ ID NO: 1275162 - DNA, 25 bp, Homo sapien
agcaagtcccgaacaaggacacaga

SEQ ID NO: 1275163 - DNA, 25 bp, Homo sapien
actgtgaacagcaagtcccgaacaa

SEQ ID NO: 1275164 - DNA, 25 bp, Homo sapien
cacagagatagatcccaaagggaaa

SEQ ID NO: 1275165 - DNA, 25 bp, Homo sapien
tgatgatctcatccgtgtcccacat

SEQ ID NO: 1275166 - DNA, 25 bp, Homo sapien
cctgatgggttgagcgctgatgatc

SEQ ID NO: 1275167 - DNA, 25 bp, Homo sapien
catctgagtcaggatgcctgatggg

SEQ ID NO: 1275168 - DNA, 25 bp, Homo sapien
cttgtcctactgcatctgagtcagg

SEQ ID NO: 1275169 - DNA, 25 bp, Homo sapien
gaagccagttggtacgagcacctag

SEQ ID NO: 1275170 - DNA, 25 bp, Homo sapien
caaactaccgactgcattgggtgaa

SEQ ID NO: 1275171 - DNA, 25 bp, Homo sapien
tcgaacaaccccagaagagcgggct

SEQ ID NO: 1275172 - DNA, 25 bp, Homo sapien
tccacggagtttcccaaaagcgcgc

SEQ ID NO: 1275173 - DNA, 25 bp, Homo sapien
tggccgtcgggacgcgagcgccgcc

SEQ ID NO: 1275174 - DNA, 25 bp, Homo sapien
gccgtcgggacgcgagcgccgcccg

SEQ ID NO: 1275175 - DNA, 25 bp, Homo sapien
cgtgcgtccgtctggatctcggcgc

SEQ ID NO: 1275176 - DNA, 25 bp, Homo sapien
gtcgggacgcgagcgccgcccggag

SEQ ID NO: 1275177 - DNA, 25 bp, Homo sapien
ccggctgctgctgcagccccgcagc

SEQ ID NO: 1275178 - DNA, 25 bp, Homo sapien
gccggctgctgctgcagccccgcag

SEQ ID NO: 1275179 - DNA, 25 bp, Homo sapien
cgccggctgctgctgcagccccgca

SEQ ID NO: 1275180 - DNA, 25 bp, Homo sapien
gccagcggctgtttggtgaggtcct

SEQ ID NO: 1275181 - DNA, 25 bp, Homo sapien
ggaagccagcggctgtttggtgagg

SEQ ID NO: 1275182 - DNA, 25 bp, Homo sapien
caggctcatccatcgcctggatgtc

SEQ ID NO: 1275183 - DNA, 25 bp, Homo sapien
tgtccccaggctgcgtctctacttg

SEQ ID NO: 1275184 - DNA, 25 bp, Homo sapien
cttggagcataccacggaacagcct

SEQ ID NO: 1275185 - DNA, 25 bp, Homo sapien
tgcacgtctatgcaagccacagctc

SEQ ID NO: 1275186 - DNA, 25 bp, Homo sapien
catgttgcacgtctatgcaagccac

SEQ ID NO: 1275187 - DNA, 25 bp, Homo sapien
agctcttggagcataccacggaaca

SEQ ID NO: 1275188 - DNA, 25 bp, Homo sapien
ggatattgaagacgggaaagaccga

SEQ ID NO: 1275189 - DNA, 25 bp, Homo sapien
atattgaagacgggaaagaccgagc

SEQ ID NO: 1275190 - DNA, 25 bp, Homo sapien
gatattgaagacgggaaagaccgag

SEQ ID NO: 1275191 - DNA, 25 bp, Homo sapien
cacatagcgtttcccgtacccggat

SEQ ID NO: 1275192 - DNA, 25 bp, Homo sapien
tgcttaatctttggcattgattggc

SEQ ID NO: 1275193 - DNA, 25 bp, Homo sapien
catagcgtttcccgtacccggatct

SEQ ID NO: 1275194 - DNA, 25 bp, Homo sapien
tcacatagcgtttcccgtacccgga

SEQ ID NO: 1275195 - DNA, 25 bp, Homo sapien
tgaagaaatgtggatgctaaggctc

SEQ ID NO: 1275196 - DNA, 25 bp, Homo sapien
cccttatggaaaggtggagggcatc

SEQ ID NO: 1275197 - DNA, 25 bp, Homo sapien
taatcacctacccacccttatggaa

SEQ ID NO: 1275198 - DNA, 25 bp, Homo sapien
ggatgctaaggctctaatcacctac

SEQ ID NO: 1275199 - DNA, 25 bp, Homo sapien
gatgccctcctttgatgagaactgc

SEQ ID NO: 1275200 - DNA, 25 bp, Homo sapien
ggtgctcgctgctcagtattccgga

SEQ ID NO: 1275201 - DNA, 25 bp, Homo sapien
ggatgggcgcatgaaaccatttgag

SEQ ID NO: 1275202 - DNA, 25 bp, Homo sapien
ggaccgcgtgtttgttctgatgccc

SEQ ID NO: 1275203 - DNA, 25 bp, Homo sapien
aggccaggtggccatccgtcacagc

SEQ ID NO: 1275204 - DNA, 25 bp, Homo sapien
agttcaggccaggtggccatccgtc

SEQ ID NO: 1275205 - DNA, 25 bp, Homo sapien
ccaggtggccatccgtcacagctgt

SEQ ID NO: 1275206 - DNA, 25 bp, Homo sapien
ggactctggaggcttagctcctccc

SEQ ID NO: 1275207 - DNA, 25 bp, Homo sapien
cagcagctctgaagcgcagcctgcc

SEQ ID NO: 1275208 - DNA, 25 bp, Homo sapien
ctaccaggatccgatcagcagctct

SEQ ID NO: 1275209 - DNA, 25 bp, Homo sapien
gctctgaagcgcagcctgccagctg

SEQ ID NO: 1275210 - DNA, 25 bp, Homo sapien
gggcttcagatttcttgctgcctct

SEQ ID NO: 1275211 - DNA, 25 bp, Homo sapien
tctctccagacgagcgattgccggt

SEQ ID NO: 1275212 - DNA, 25 bp, Homo sapien
tccagacgagcgattgccggttgag

SEQ ID NO: 1275213 - DNA, 25 bp, Homo sapien
tccttctctccagacgagcgattgc

SEQ ID NO: 1275214 - DNA, 25 bp, Homo sapien
gagcgattgccggttgaggaaaaaa

SEQ ID NO: 1275215 - DNA, 25 bp, Homo sapien
cactaggaccctcttggagatggat

SEQ ID NO: 1275216 - DNA, 25 bp, Homo sapien
ctcactaggaccctcttggagatgg

SEQ ID NO: 1275217 - DNA, 25 bp, Homo sapien
tccctcactaggaccctcttggaga

SEQ ID NO: 1275218 - DNA, 25 bp, Homo sapien
ttggtccctcactaggaccctcttg

SEQ ID NO: 1275219 - DNA, 25 bp, Homo sapien
gccattcagttccttcgtcactgct

SEQ ID NO: 1275220 - DNA, 25 bp, Homo sapien
ttcagttccttcgtcactgctccca

SEQ ID NO: 1275221 - DNA, 25 bp, Homo sapien
tcagccattcagttccttcgtcact

SEQ ID NO: 1275222 - DNA, 25 bp, Homo sapien
tcagttccttcgtcactgctcccac

SEQ ID NO: 1275223 - DNA, 25 bp, Homo sapien
ttctgactagttcccatgggcatgc

SEQ ID NO: 1275224 - DNA, 25 bp, Homo sapien
ccaccgtggatttctgactagttcc

SEQ ID NO: 1275225 - DNA, 25 bp, Homo sapien
ggcatgccggccgtgatgactttcc

SEQ ID NO: 1275226 - DNA, 25 bp, Homo sapien
tggccttggttggaagctagagagc

SEQ ID NO: 1275227 - DNA, 25 bp, Homo sapien
tgttggtcctcaccttgggttggtc

SEQ ID NO: 1275228 - DNA, 25 bp, Homo sapien
agacactgttgttggtcctcacctt

SEQ ID NO: 1275229 - DNA, 25 bp, Homo sapien
ggtcctcaccttgggttggtcactc

SEQ ID NO: 1275230 - DNA, 25 bp, Homo sapien
tgggagaggttgtagccactggccc

SEQ ID NO: 1275231 - DNA, 25 bp, Homo sapien
ggtcacagttttagcttccatggag

SEQ ID NO: 1275232 - DNA, 25 bp, Homo sapien
agtaccgccaactgaagacggccga

SEQ ID NO: 1275233 - DNA, 25 bp, Homo sapien
tgaacaaggacatcgaggcacagct

SEQ ID NO: 1275234 - DNA, 25 bp, Homo sapien
agggtcaagagctcatggccaaggc

SEQ ID NO: 1275235 - DNA, 25 bp, Homo sapien
tctctctctcgggtagttctaagga

SEQ ID NO: 1275236 - DNA, 25 bp, Homo sapien
tggtcccggttctgaaggctgtgac

SEQ ID NO: 1275237 - DNA, 25 bp, Homo sapien
tatacaatgctgatagccccggcac

SEQ ID NO: 1275238 - DNA, 25 bp, Homo sapien
tcagataatgcacacggaaatacgt

SEQ ID NO: 1275239 - DNA, 25 bp, Homo sapien
acagtcccagtcactgcattaaact

SEQ ID NO: 1275240 - DNA, 25 bp, Homo sapien
cacagtcccagtcactgcattaaac

SEQ ID NO: 1275241 - DNA, 25 bp, Homo sapien
ccacagtcccagtcactgcattaaa

SEQ ID NO: 1275242 - DNA, 25 bp, Homo sapien
gccacagtcccagtcactgcattaa

SEQ ID NO: 1275243 - DNA, 25 bp, Homo sapien
ctgttcatcttggaggtcgcagaca

SEQ ID NO: 1275244 - DNA, 25 bp, Homo sapien
actgatttcactaccaccagtccca

SEQ ID NO: 1275245 - DNA, 25 bp, Homo sapien
tttgttacttcctttgatggcagca

SEQ ID NO: 1275246 - DNA, 25 bp, Homo sapien
tgaagtacctctttcgtgcttctgc

SEQ ID NO: 1275247 - DNA, 25 bp, Homo sapien
tacattctcccgaaaaggagaattg

SEQ ID NO: 1275248 - DNA, 25 bp, Homo sapien
tgcacctgaggtacttaactgtacc

SEQ ID NO: 1275249 - DNA, 25 bp, Homo sapien
tactccatccttttcgcttttgctg

SEQ ID NO: 1275250 - DNA, 25 bp, Homo sapien
ccccggtaggcattggaatctctga

SEQ ID NO: 1275251 - DNA, 25 bp, Homo sapien
caccaccaacctggtcagggcaggt

SEQ ID NO: 1275252 - DNA, 25 bp, Homo sapien
gccatgacctggacatgcttgctgt

SEQ ID NO: 1275253 - DNA, 25 bp, Homo sapien
tgcttgctgtctggttggcccgaga

SEQ ID NO: 1275254 - DNA, 25 bp, Homo sapien
tgctgctgtcgggaatggcatatcg

SEQ ID NO: 1275255 - DNA, 25 bp, Homo sapien
tccgtgacaatgtgtggatcttcat

SEQ ID NO: 1275256 - DNA, 25 bp, Homo sapien
cgtcttggaggtttatccgtgacaa

SEQ ID NO: 1275257 - DNA, 25 bp, Homo sapien
cacattacgtcttggaggtttatcc

SEQ ID NO: 1275258 - DNA, 25 bp, Homo sapien
gaggtttatccgtgacaatgtgtgg

SEQ ID NO: 1275259 - DNA, 25 bp, Homo sapien
taagcgggtatcttctcagtgagca

SEQ ID NO: 1275260 - DNA, 25 bp, Homo sapien
gactgtttacacttcaaggcggtgg

SEQ ID NO: 1275261 - DNA, 25 bp, Homo sapien
tttctagcgcattttgagagagggc

SEQ ID NO: 1275262 - DNA, 25 bp, Homo sapien
tggcaaagtcggtttctctctggac

SEQ ID NO: 1275263 - DNA, 25 bp, Homo sapien
agcatctgagcttctacacgtgatg

SEQ ID NO: 1275264 - DNA, 25 bp, Homo sapien
gtggaagttccacagctggccgcgt

SEQ ID NO: 1275265 - DNA, 25 bp, Homo sapien
ttctacacgtgatgggcgggctcag

SEQ ID NO: 1275266 - DNA, 25 bp, Homo sapien
agagcgcccctcgttaggacagaac

SEQ ID NO: 1275267 - DNA, 25 bp, Homo sapien
acatgcccaagtacccctgcaggat

SEQ ID NO: 1275268 - DNA, 25 bp, Homo sapien
catttctgaataatagtcactgccg

SEQ ID NO: 1275269 - DNA, 25 bp, Homo sapien
gcaggccggcccttgatgtgccatt

SEQ ID NO: 1275270 - DNA, 25 bp, Homo sapien
tgccgccgagtctaggatgtcctgt

SEQ ID NO: 1275271 - DNA, 25 bp, Homo sapien
gcatggaagcccacgtgtgcactta

SEQ ID NO: 1275272 - DNA, 25 bp, Homo sapien
gggaccaatgattccatccgcatgg

SEQ ID NO: 1275273 - DNA, 25 bp, Homo sapien
gcactattgctctctagcctggaaa

SEQ ID NO: 1275274 - DNA, 25 bp, Homo sapien
aaaaggaaagagtgatgacaacagc

SEQ ID NO: 1275275 - DNA, 25 bp, Homo sapien
cccaggtggaactcacgacagggag

SEQ ID NO: 1275276 - DNA, 25 bp, Homo sapien
ttttgtcctgtaagatatatgcagc

SEQ ID NO: 1275277 - DNA, 25 bp, Homo sapien
aggctcccaattccgggcctgtctg

SEQ ID NO: 1275278 - DNA, 25 bp, Homo sapien
tgcctccactttaccagctacgttt

SEQ ID NO: 1275279 - DNA, 25 bp, Homo sapien
ggaagcggcactgtttgcattgtac

SEQ ID NO: 1275280 - DNA, 25 bp, Homo sapien
cacccgtgtgggtagcactggaagc

SEQ ID NO: 1275281 - DNA, 25 bp, Homo sapien
tctcccgtgaggctgcacccgtgtg

SEQ ID NO: 1275282 - DNA, 25 bp, Homo sapien
tggctgaactgaacgcattccctct

SEQ ID NO: 1275283 - DNA, 25 bp, Homo sapien
cgtccactgaccagcaagtgtgagt

SEQ ID NO: 1275284 - DNA, 25 bp, Homo sapien
tctcgtccactgaccagcaagtgtg

SEQ ID NO: 1275285 - DNA, 25 bp, Homo sapien
cagcaagtgtgagtcccggtgtcag

SEQ ID NO: 1275286 - DNA, 25 bp, Homo sapien
gagtcccggtgtcagtcggcacagt

SEQ ID NO: 1275287 - DNA, 25 bp, Homo sapien
gagttgggcactccctgttgttggt

SEQ ID NO: 1275288 - DNA, 25 bp, Homo sapien
ggtgagttgggcactccctgttgtt

SEQ ID NO: 1275289 - DNA, 25 bp, Homo sapien
tgggcactccctgttgttggttttc

SEQ ID NO: 1275290 - DNA, 25 bp, Homo sapien
catgcagagggggtgagttgggcac

SEQ ID NO: 1275291 - DNA, 25 bp, Homo sapien
tggatcctgggagctcatctttacc

SEQ ID NO: 1275292 - DNA, 25 bp, Homo sapien
tagttctgtccaccgggaagagccg

SEQ ID NO: 1275293 - DNA, 25 bp, Homo sapien
catctttacctgtgccggagtggga

SEQ ID NO: 1275294 - DNA, 25 bp, Homo sapien
tctagaggcgtctgttataaagcgt

SEQ ID NO: 1275295 - DNA, 25 bp, Homo sapien
tggccagaacaaatgcctttttaaa

SEQ ID NO: 1275296 - DNA, 25 bp, Homo sapien
gcagcgcacacattcgaaataggtg

SEQ ID NO: 1275297 - DNA, 25 bp, Homo sapien
gtcaaataggatttcaggaccactt

SEQ ID NO: 1275298 - DNA, 25 bp, Homo sapien
gcttggtgacatcacaaggtggcaa

SEQ ID NO: 1275299 - DNA, 25 bp, Homo sapien
agttagagatttgcaggttgtcacc

SEQ ID NO: 1275300 - DNA, 25 bp, Homo sapien
tacaggcagttggctccaacgccca

SEQ ID NO: 1275301 - DNA, 25 bp, Homo sapien
acaggcagttggctccaacgcccac

SEQ ID NO: 1275302 - DNA, 25 bp, Homo sapien
ttacaggcagttggctccaacgccc

SEQ ID NO: 1275303 - DNA, 25 bp, Homo sapien
ctctgtctgagagtagaggcccctg

SEQ ID NO: 1275304 - DNA, 25 bp, Homo sapien
cctgcttgataatgaggcacagcca

SEQ ID NO: 1275305 - DNA, 25 bp, Homo sapien
cccacttgggcctgtctgaaaagca

SEQ ID NO: 1275306 - DNA, 25 bp, Homo sapien
gaactagggagagaccctgatgcgc

SEQ ID NO: 1275307 - DNA, 25 bp, Homo sapien
tacacatcttatgctaaggatgcat

SEQ ID NO: 1275308 - DNA, 25 bp, Homo sapien
tacttctgttttgcatcatgagata

SEQ ID NO: 1275309 - DNA, 25 bp, Homo sapien
gatcttgctacaattctgtgttgtg

SEQ ID NO: 1275310 - DNA, 25 bp, Homo sapien
tctggtggatcttgctacaattctg

SEQ ID NO: 1275311 - DNA, 25 bp, Homo sapien
accgaaacgcgagcggccgaaacag

SEQ ID NO: 1275312 - DNA, 25 bp, Homo sapien
cctcagggtctcgaggtccgaggcc

SEQ ID NO: 1275313 - DNA, 25 bp, Homo sapien
ggacccgagcttcgggccggcaaca

SEQ ID NO: 1275314 - DNA, 25 bp, Homo sapien
tgggcacttcagaggaggccggcga

SEQ ID NO: 1275315 - DNA, 25 bp, Homo sapien
cgtgtactgggctcggtggcgtcca

SEQ ID NO: 1275316 - DNA, 25 bp, Homo sapien
gcgggaggaaccgcggatgggtcac

SEQ ID NO: 1275317 - DNA, 25 bp, Homo sapien
aatcagaaaaacaagggcggcctgg

SEQ ID NO: 1275318 - DNA, 25 bp, Homo sapien
ccccgggcgtgtactgggctcggtg

SEQ ID NO: 1275319 - DNA, 25 bp, Homo sapien
atgggccaggcacttcgtgtctccc

SEQ ID NO: 1275320 - DNA, 25 bp, Homo sapien
agccagggctgtggaccaagactcc

SEQ ID NO: 1275321 - DNA, 25 bp, Homo sapien
tcatgggccaggcacttcgtgtctc

SEQ ID NO: 1275322 - DNA, 25 bp, Homo sapien
aaactgttgctcttggttactgtcc

SEQ ID NO: 1275323 - DNA, 25 bp, Homo sapien
ccttggaatcatcacagatgttgaa

SEQ ID NO: 1275324 - DNA, 25 bp, Homo sapien
tcatcacagatgttgaatttcttca

SEQ ID NO: 1275325 - DNA, 25 bp, Homo sapien
ggaatcatcacagatgttgaatttc

SEQ ID NO: 1275326 - DNA, 25 bp, Homo sapien
tcacagatgttgaatttcttcacca

SEQ ID NO: 1275327 - DNA, 25 bp, Homo sapien
catcctttcgggtgtgccgagggat

SEQ ID NO: 1275328 - DNA, 25 bp, Homo sapien
cgtcctgcagcagtcggcttttctg

SEQ ID NO: 1275329 - DNA, 25 bp, Homo sapien
tttccaccacggagagcatttggag

SEQ ID NO: 1275330 - DNA, 25 bp, Homo sapien
tgccttcatcctttcgggtgtgccg

SEQ ID NO: 1275331 - DNA, 25 bp, Homo sapien
cccatccttggtggggtcatggata

SEQ ID NO: 1275332 - DNA, 25 bp, Homo sapien
gtcatggatacccaggtcctgcata

SEQ ID NO: 1275333 - DNA, 25 bp, Homo sapien
ggccatttgccctgggcccatcctt

SEQ ID NO: 1275334 - DNA, 25 bp, Homo sapien
ctagcaagggggccatttgccctgg

SEQ ID NO: 1275335 - DNA, 25 bp, Homo sapien
tgccctgactgtgggtcgggggaca

SEQ ID NO: 1275336 - DNA, 25 bp, Homo sapien
ccctgactgtgggtcgggggacagt

SEQ ID NO: 1275337 - DNA, 25 bp, Homo sapien
ggtgccctgactgtgggtcggggga

SEQ ID NO: 1275338 - DNA, 25 bp, Homo sapien
acggtgccctgactgtgggtcgggg

SEQ ID NO: 1275339 - DNA, 25 bp, Homo sapien
caggaaggaggcacaaatgagggag

SEQ ID NO: 1275340 - DNA, 25 bp, Homo sapien
aggactgcggcaaaggagaacagca

SEQ ID NO: 1275341 - DNA, 25 bp, Homo sapien
gaaggaggcacaaatgagggaggca

SEQ ID NO: 1275342 - DNA, 25 bp, Homo sapien
agaggactgcggcaaaggagaacag

SEQ ID NO: 1275343 - DNA, 25 bp, Homo sapien
tagggcatcacgtgcagcaaagaac

SEQ ID NO: 1275344 - DNA, 25 bp, Homo sapien
tctgaggcccacagtgacatgtgca

SEQ ID NO: 1275345 - DNA, 25 bp, Homo sapien
tggtttcgaccctctactagggcat

SEQ ID NO: 1275346 - DNA, 25 bp, Homo sapien
gctgcagcttctaaccatcgagtga

SEQ ID NO: 1275347 - DNA, 25 bp, Homo sapien
agggcaccacggtggtcctgtgttc

SEQ ID NO: 1275348 - DNA, 25 bp, Homo sapien
ggaggtggtgggtccgcagcggcac

SEQ ID NO: 1275349 - DNA, 25 bp, Homo sapien
tccgcagcggcacagtggtctccgg

SEQ ID NO: 1275350 - DNA, 25 bp, Homo sapien
agtggtctccgggtcctgctgaggg

SEQ ID NO: 1275351 - DNA, 25 bp, Homo sapien
ccccggaagcggcattgggtctggg

SEQ ID NO: 1275352 - DNA, 25 bp, Homo sapien
tgactcccggattcctgtggcgcgg

SEQ ID NO: 1275353 - DNA, 25 bp, Homo sapien
gcgcaggtggtcagccgtgactccc

SEQ ID NO: 1275354 - DNA, 25 bp, Homo sapien
ttcgtcaggaccacggctgcttctc

SEQ ID NO: 1275355 - DNA, 25 bp, Homo sapien
gaatgcgctacttgaacggactcga

SEQ ID NO: 1275356 - DNA, 25 bp, Homo sapien
ccactgtgagatccgaatgcgctac

SEQ ID NO: 1275357 - DNA, 25 bp, Homo sapien
gatccgaatgcgctacttgaacgga

SEQ ID NO: 1275358 - DNA, 25 bp, Homo sapien
tgtgagatccgaatgcgctacttga

SEQ ID NO: 1275359 - DNA, 25 bp, Homo sapien
gtgacgttcgccatcataccgccag

SEQ ID NO: 1275360 - DNA, 25 bp, Homo sapien
tttgtgccgtcgctcggtgcgcctg

SEQ ID NO: 1275361 - DNA, 25 bp, Homo sapien
tgccgctcatggatttgtgccgtcg

SEQ ID NO: 1275362 - DNA, 25 bp, Homo sapien
aaggcctacctcctctaccagtgac

SEQ ID NO: 1275363 - DNA, 25 bp, Homo sapien
tgtacagatcccagcttatggcctt

SEQ ID NO: 1275364 - DNA, 25 bp, Homo sapien
agtgggtctccattccccgagaagc

SEQ ID NO: 1275365 - DNA, 25 bp, Homo sapien
tgccaagactgggtgagaaatgtac

SEQ ID NO: 1275366 - DNA, 25 bp, Homo sapien
agccgtcctcacagatgccgggtga

SEQ ID NO: 1275367 - DNA, 25 bp, Homo sapien
tcgtgagcgcatcaggttggtttgt

SEQ ID NO: 1275368 - DNA, 25 bp, Homo sapien
ctaacagacagtgattctgtgcctt

SEQ ID NO: 1275369 - DNA, 25 bp, Homo sapien
cattgtgggcgtcctcagagtccag

SEQ ID NO: 1275370 - DNA, 25 bp, Homo sapien
tgtagaacttgagttgaccgtgggc

SEQ ID NO: 1275371 - DNA, 25 bp, Homo sapien
ccagacacccaaacatggttggatt

SEQ ID NO: 1275372 - DNA, 25 bp, Homo sapien
tggccagccgctctgacttcctggg

SEQ ID NO: 1275373 - DNA, 25 bp, Homo sapien
tgttgagggtgacaaaggcagcgtt

SEQ ID NO: 1275374 - DNA, 25 bp, Homo sapien
gcacatcagccactcaaacaagcat

SEQ ID NO: 1275375 - DNA, 25 bp, Homo sapien
aaagccctcccagctcgcacatcag

SEQ ID NO: 1275376 - DNA, 25 bp, Homo sapien
tgtggctcttctgttcctactgcat

SEQ ID NO: 1275377 - DNA, 25 bp, Homo sapien
ccagatgtctacaggaggtctgtgg

SEQ ID NO: 1275378 - DNA, 25 bp, Homo sapien
ctggctacctggctgtcatgctgct

SEQ ID NO: 1275379 - DNA, 25 bp, Homo sapien
gagaacgtgggcaccttggtctatt

SEQ ID NO: 1275380 - DNA, 25 bp, Homo sapien
tgcgtggcgtacaaatccgggccgt

SEQ ID NO: 1275381 - DNA, 25 bp, Homo sapien
accctgtgcgtggcgtacaaatccg

SEQ ID NO: 1275382 - DNA, 25 bp, Homo sapien
cctgtgcgtggcgtacaaatccggg

SEQ ID NO: 1275383 - DNA, 25 bp, Homo sapien
tgtgcgtggcgtacaaatccgggcc

SEQ ID NO: 1275384 - DNA, 25 bp, Homo sapien
ctggctggagtctttgatggcccag

SEQ ID NO: 1275385 - DNA, 25 bp, Homo sapien
gagcagaaactgaaccacaagtgtg

SEQ ID NO: 1275386 - DNA, 25 bp, Homo sapien
cacaagttacttaagtcgggtagcg

SEQ ID NO: 1275387 - DNA, 25 bp, Homo sapien
gtcagtacaagtcagctccaccgtg

SEQ ID NO: 1275388 - DNA, 25 bp, Homo sapien
tacagctctataggaaaggtcttac

SEQ ID NO: 1275389 - DNA, 25 bp, Homo sapien
cattttattggcaggtggcagaaac

SEQ ID NO: 1275390 - DNA, 25 bp, Homo sapien
tctgttcccgagtccaaggtcagtg

SEQ ID NO: 1275391 - DNA, 25 bp, Homo sapien
gattggcttccttgaatgggtgacc

SEQ ID NO: 1275392 - DNA, 25 bp, Homo sapien
gagcagtctcctctgatggccctga

SEQ ID NO: 1275393 - DNA, 25 bp, Homo sapien
tattcccaagctgtgcgctccagaa

SEQ ID NO: 1275394 - DNA, 25 bp, Homo sapien
ctgctgggaaatggcgcctctccat

SEQ ID NO: 1275395 - DNA, 25 bp, Homo sapien
gctgtcccaaattgccgggtgccaa

SEQ ID NO: 1275396 - DNA, 25 bp, Homo sapien
gagttttcagccgtgctctgcacag

SEQ ID NO: 1275397 - DNA, 25 bp, Homo sapien
tgtgcctgaaattatcccaaaagac

SEQ ID NO: 1275398 - DNA, 25 bp, Homo sapien
tttgagaatccttgccccacattgc

SEQ ID NO: 1275399 - DNA, 25 bp, Homo sapien
tcctgccagctttctacagtgggag

SEQ ID NO: 1275400 - DNA, 25 bp, Homo sapien
tacaaacagtcctagatcactcggg

SEQ ID NO: 1275401 - DNA, 25 bp, Homo sapien
tgtcgaggaaatccacatgcggtgt

SEQ ID NO: 1275402 - DNA, 25 bp, Homo sapien
tccaaatgcagaccgaacagtagcc

SEQ ID NO: 1275403 - DNA, 25 bp, Homo sapien
tgacccttgtgccagtagccatgct

SEQ ID NO: 1275404 - DNA, 25 bp, Homo sapien
tgttgcaacgagaaaagggagccca

SEQ ID NO: 1275405 - DNA, 25 bp, Homo sapien
tatttgtagaggtttccatcgcccc

SEQ ID NO: 1275406 - DNA, 25 bp, Homo sapien
tctgtaagtcctgatcatcagccca

SEQ ID NO: 1275407 - DNA, 25 bp, Homo sapien
cagggctggcggtctttctaaatgg

SEQ ID NO: 1275408 - DNA, 25 bp, Homo sapien
gagtagagaccatagcaacctggcc

SEQ ID NO: 1275409 - DNA, 25 bp, Homo sapien
agaacttggcctcagcgtacagacc

SEQ ID NO: 1275410 - DNA, 25 bp, Homo sapien
gaatgctgaggccatgtgccggtca

SEQ ID NO: 1275411 - DNA, 25 bp, Homo sapien
tgggagggctctgcttacatagaac

SEQ ID NO: 1275412 - DNA, 25 bp, Homo sapien
gtgcccagtagccatgcaaagtgct

SEQ ID NO: 1275413 - DNA, 25 bp, Homo sapien
tctgcccgcaaggtggctccgagaa

SEQ ID NO: 1275414 - DNA, 25 bp, Homo sapien
gaaagccagcgggaaactgcagcat

SEQ ID NO: 1275415 - DNA, 25 bp, Homo sapien
gactgggatgcaacgaagaactcgc

SEQ ID NO: 1275416 - DNA, 25 bp, Homo sapien
tgaactctgattctcggatatctgc

SEQ ID NO: 1275417 - DNA, 25 bp, Homo sapien
caagatctggcacgttcagggtgca

SEQ ID NO: 1275418 - DNA, 25 bp, Homo sapien
aagatctggcacgttcagggtgcaa

SEQ ID NO: 1275419 - DNA, 25 bp, Homo sapien
ccaagatgagacaagatctggcacg

SEQ ID NO: 1275420 - DNA, 25 bp, Homo sapien
atctggcacgttcagggtgcaatgg

SEQ ID NO: 1275421 - DNA, 25 bp, Homo sapien
gcaattggcttctgattaagttggc

SEQ ID NO: 1275422 - DNA, 25 bp, Homo sapien
ggtaatgaactcattccgattgaca

SEQ ID NO: 1275423 - DNA, 25 bp, Homo sapien
tttcaaccgcaacaaggcaattggc

SEQ ID NO: 1275424 - DNA, 25 bp, Homo sapien
tggagattctcttgccaaatccaat

SEQ ID NO: 1275425 - DNA, 25 bp, Homo sapien
caagatcaaggcgccagcatctggc

SEQ ID NO: 1275426 - DNA, 25 bp, Homo sapien
tcaaggcgccagcatctggcgaggg

SEQ ID NO: 1275427 - DNA, 25 bp, Homo sapien
gatcaaggcgccagcatctggcgag

SEQ ID NO: 1275428 - DNA, 25 bp, Homo sapien
agatcaaggcgccagcatctggcga

SEQ ID NO: 1275429 - DNA, 25 bp, Homo sapien
tgaggggacggtgtatactgctgac

SEQ ID NO: 1275430 - DNA, 25 bp, Homo sapien
gtctgaggggacggtgtatactgct

SEQ ID NO: 1275431 - DNA, 25 bp, Homo sapien
tgtgtctgaggggacggtgtatact

SEQ ID NO: 1275432 - DNA, 25 bp, Homo sapien
ccttgtgtctgaggggacggtgtat

SEQ ID NO: 1275433 - DNA, 25 bp, Homo sapien
ctggcaatgttctctgcctgcagga

SEQ ID NO: 1275434 - DNA, 25 bp, Homo sapien
tgcaggatgagcacaggcaggcccc

SEQ ID NO: 1275435 - DNA, 25 bp, Homo sapien
atgagcacaggcaggccccgcgcct

SEQ ID NO: 1275436 - DNA, 25 bp, Homo sapien
aggatgagcacaggcaggccccgcg

SEQ ID NO: 1275437 - DNA, 25 bp, Homo sapien
ctcctgaggcggaaaacaaaccagt

SEQ ID NO: 1275438 - DNA, 25 bp, Homo sapien
cagtaggtgccaacaactccaatgt

SEQ ID NO: 1275439 - DNA, 25 bp, Homo sapien
caattctggcaaaactcctgaggcg

SEQ ID NO: 1275440 - DNA, 25 bp, Homo sapien
ccaatgttctgaagtgaggtactga

SEQ ID NO: 1275441 - DNA, 25 bp, Homo sapien
gaggcttccgggaacctgtgaccgc

SEQ ID NO: 1275442 - DNA, 25 bp, Homo sapien
gcaaggtcaagagaggttagaatga

SEQ ID NO: 1275443 - DNA, 25 bp, Homo sapien
tggcaaggtcaagagaggttagaat

SEQ ID NO: 1275444 - DNA, 25 bp, Homo sapien
gaaggtggcaaggtcaagagaggtt

SEQ ID NO: 1275445 - DNA, 25 bp, Homo sapien
ggtggcaaggtcaagagaggttaga

SEQ ID NO: 1275446 - DNA, 25 bp, Homo sapien
gagagatttcatcttaggactgggg

SEQ ID NO: 1275447 - DNA, 25 bp, Homo sapien
gtgagagatttcatcttaggactgg

SEQ ID NO: 1275448 - DNA, 25 bp, Homo sapien
tgtgagagatttcatcttaggactg

SEQ ID NO: 1275449 - DNA, 25 bp, Homo sapien
tgagagatttcatcttaggactggg

SEQ ID NO: 1275450 - DNA, 25 bp, Homo sapien
cgtatcggctggtgagagatgaact

SEQ ID NO: 1275451 - DNA, 25 bp, Homo sapien
tgggtctttgcaccagacaatcttg

SEQ ID NO: 1275452 - DNA, 25 bp, Homo sapien
gactgagttccaaactacgtatcgg

SEQ ID NO: 1275453 - DNA, 25 bp, Homo sapien
tgttgaaaatcaccagaccaaaagt

SEQ ID NO: 1275454 - DNA, 25 bp, Homo sapien
ctcttatgatggtgcaggaaaacca

SEQ ID NO: 1275455 - DNA, 25 bp, Homo sapien
aaaccacttgtgatgacccactcca

SEQ ID NO: 1275456 - DNA, 25 bp, Homo sapien
catgggagcccagtaacagccgcat

SEQ ID NO: 1275457 - DNA, 25 bp, Homo sapien
caggaaaaccacttgtgatgaccca

SEQ ID NO: 1275458 - DNA, 25 bp, Homo sapien
ctcgtctcgtgcagcgtggaagagg

SEQ ID NO: 1275459 - DNA, 25 bp, Homo sapien
tggaagaggcgcgtagcccagtgct

SEQ ID NO: 1275460 - DNA, 25 bp, Homo sapien
tgcagcgtggaagaggcgcgtagcc

SEQ ID NO: 1275461 - DNA, 25 bp, Homo sapien
aagaggcgcgtagcccagtgcttgg

SEQ ID NO: 1275462 - DNA, 25 bp, Homo sapien
cgtctccttcacggtgatgaacagc

SEQ ID NO: 1275463 - DNA, 25 bp, Homo sapien
gtctccttcacggtgatgaacagct

SEQ ID NO: 1275464 - DNA, 25 bp, Homo sapien
tctccttcacggtgatgaacagcta

SEQ ID NO: 1275465 - DNA, 25 bp, Homo sapien
agggtggccactgcggacgcgaggg

SEQ ID NO: 1275466 - DNA, 25 bp, Homo sapien
gggcagccccgcctcaagtagcgcc

SEQ ID NO: 1275467 - DNA, 25 bp, Homo sapien
ggaagcgcgggaaagcggccgcgat

SEQ ID NO: 1275468 - DNA, 25 bp, Homo sapien
atggcctcggaagaggatgcgcccc

SEQ ID NO: 1275469 - DNA, 25 bp, Homo sapien
tgcctcacgtgctgggcgatactga

SEQ ID NO: 1275470 - DNA, 25 bp, Homo sapien
gctttttccgatgaaccaagtgcga

SEQ ID NO: 1275471 - DNA, 25 bp, Homo sapien
gaagagcgtgggttcagatgcaact

SEQ ID NO: 1275472 - DNA, 25 bp, Homo sapien
tcaagaggcatcaggcagagaggtt

SEQ ID NO: 1275473 - DNA, 25 bp, Homo sapien
ggtgaccaagtattgatccagtgat

SEQ ID NO: 1275474 - DNA, 25 bp, Homo sapien
gccagtctgatccaggcacactgga

SEQ ID NO: 1275475 - DNA, 25 bp, Homo sapien
gcttataaataaccacgctggccag

SEQ ID NO: 1275476 - DNA, 25 bp, Homo sapien
gattccgtccatgctcagacgtaga

SEQ ID NO: 1275477 - DNA, 25 bp, Homo sapien
tgtccgtgaggctgtaagtcctgca

SEQ ID NO: 1275478 - DNA, 25 bp, Homo sapien
actgagagcttgtccgtgaggctgt

SEQ ID NO: 1275479 - DNA, 25 bp, Homo sapien
tccgtgaggctgtaagtcctgcagg

SEQ ID NO: 1275480 - DNA, 25 bp, Homo sapien
gagcttgtccgtgaggctgtaagtc

SEQ ID NO: 1275481 - DNA, 25 bp, Homo sapien
ggctggaaatgcgatccatgatcat

SEQ ID NO: 1275482 - DNA, 25 bp, Homo sapien
gaaatgcgatccatgatcatcaggg

SEQ ID NO: 1275483 - DNA, 25 bp, Homo sapien
gcttctaatgttctggggctggaaa

SEQ ID NO: 1275484 - DNA, 25 bp, Homo sapien
tggaaatgcgatccatgatcatcag

SEQ ID NO: 1275485 - DNA, 25 bp, Homo sapien
ctccacgaggacactcccccgccat

SEQ ID NO: 1275486 - DNA, 25 bp, Homo sapien
gtcctccacgaggacactcccccgc

SEQ ID NO: 1275487 - DNA, 25 bp, Homo sapien
gcttccccgtcctccacgaggacac

SEQ ID NO: 1275488 - DNA, 25 bp, Homo sapien
tccccgtcctccacgaggacactcc

SEQ ID NO: 1275489 - DNA, 25 bp, Homo sapien
acacctggccacttctatcttttta

SEQ ID NO: 1275490 - DNA, 25 bp, Homo sapien
cttggagcaaattacacaaaccagt

SEQ ID NO: 1275491 - DNA, 25 bp, Homo sapien
ttctttagatatattctagtgcttg

SEQ ID NO: 1275492 - DNA, 25 bp, Homo sapien
taagctaggcccacaacttgattaa

SEQ ID NO: 1275493 - DNA, 25 bp, Homo sapien
tgtatacacttacgaagaaaactcc

SEQ ID NO: 1275494 - DNA, 25 bp, Homo sapien
cacaaccttagcagatgagtactca

SEQ ID NO: 1275495 - DNA, 25 bp, Homo sapien
ggttaagggctaagtgacatgccca

SEQ ID NO: 1275496 - DNA, 25 bp, Homo sapien
tactcaggcgtgacgttacctctat

SEQ ID NO: 1275497 - DNA, 25 bp, Homo sapien
tgtacaattggcactcctgtcccca

SEQ ID NO: 1275498 - DNA, 25 bp, Homo sapien
tcctgtccccaactatgggttatgc

SEQ ID NO: 1275499 - DNA, 25 bp, Homo sapien
cccacacaccctgtgtacaattggc

SEQ ID NO: 1275500 - DNA, 25 bp, Homo sapien
ctatgggttatgcaatgagggtgta

SEQ ID NO: 1275501 - DNA, 25 bp, Homo sapien
caagctaatggaacccggtgtaaag

SEQ ID NO: 1275502 - DNA, 25 bp, Homo sapien
cattctattaagaacccctgtaggc

SEQ ID NO: 1275503 - DNA, 25 bp, Homo sapien
ttttctccccagtccaagtgaagga

SEQ ID NO: 1275504 - DNA, 25 bp, Homo sapien
taagatatggcagtagtccagtaac

SEQ ID NO: 1275505 - DNA, 25 bp, Homo sapien
cgtactcagtaacaggccggaaaat

SEQ ID NO: 1275506 - DNA, 25 bp, Homo sapien
taagaggattcagggttaagcacca

SEQ ID NO: 1275507 - DNA, 25 bp, Homo sapien
taattgtgtacctgttagaagaccg

SEQ ID NO: 1275508 - DNA, 25 bp, Homo sapien
gccggaaaattgtgctctagaagaa

SEQ ID NO: 1275509 - DNA, 25 bp, Homo sapien
gattggctgcgcgacgggagcgcgc

SEQ ID NO: 1275510 - DNA, 25 bp, Homo sapien
ctcacccctcgtcccgattggctgc

SEQ ID NO: 1275511 - DNA, 25 bp, Homo sapien
ctcgtcccgattggctgcgcgacgg

SEQ ID NO: 1275512 - DNA, 25 bp, Homo sapien
tgcgcgacgggagcgcgccgagtca

SEQ ID NO: 1275513 - DNA, 25 bp, Homo sapien
ctctgacactgttgggtgagggtcc

SEQ ID NO: 1275514 - DNA, 25 bp, Homo sapien
acgccgtttgctggctctgacactg

SEQ ID NO: 1275515 - DNA, 25 bp, Homo sapien
tcaccacgccgtttgctggctctga

SEQ ID NO: 1275516 - DNA, 25 bp, Homo sapien
tggctctgacactgttgggtgaggg

SEQ ID NO: 1275517 - DNA, 25 bp, Homo sapien
gaatctgagcttttccaagggtaag

SEQ ID NO: 1275518 - DNA, 25 bp, Homo sapien
ggtatgcaggccttcagtgacatca

SEQ ID NO: 1275519 - DNA, 25 bp, Homo sapien
gatcacaggtgcatgagggttacac

SEQ ID NO: 1275520 - DNA, 25 bp, Homo sapien
tgagcacgagttcaccttccagatg

SEQ ID NO: 1275521 - DNA, 25 bp, Homo sapien
gggatggccatcagaccttctaggg

SEQ ID NO: 1275522 - DNA, 25 bp, Homo sapien
cataagcgaggtagattcagccatc

SEQ ID NO: 1275523 - DNA, 25 bp, Homo sapien
catcctaggtatgggtgaccgtccc

SEQ ID NO: 1275524 - DNA, 25 bp, Homo sapien
tgaccgtccctgagacataagcgag

SEQ ID NO: 1275525 - DNA, 25 bp, Homo sapien
tcaggacttttgagtccagctgcca

SEQ ID NO: 1275526 - DNA, 25 bp, Homo sapien
aatggttccaactcggaggcagcgc

SEQ ID NO: 1275527 - DNA, 25 bp, Homo sapien
tcttggtccccatttctgtatagca

SEQ ID NO: 1275528 - DNA, 25 bp, Homo sapien
catttctgtatagcaggcgtgtgtg

SEQ ID NO: 1275529 - DNA, 25 bp, Homo sapien
tggtctaagcaacgccagagccttc

SEQ ID NO: 1275530 - DNA, 25 bp, Homo sapien
tatttccaacagcaattctaaaagt

SEQ ID NO: 1275531 - DNA, 25 bp, Homo sapien
tctaaaagttgagcaccggcctccg

SEQ ID NO: 1275532 - DNA, 25 bp, Homo sapien
gcgcccctgccgtggagggaggatg

SEQ ID NO: 1275533 - DNA, 25 bp, Homo sapien
tctttgccttcctcacacggaggtg

SEQ ID NO: 1275534 - DNA, 25 bp, Homo sapien
cttcctcacacggaggtggcccaga

SEQ ID NO: 1275535 - DNA, 25 bp, Homo sapien
gtttgagggctctgtggaatgttgg

SEQ ID NO: 1275536 - DNA, 25 bp, Homo sapien
tttgagggctctgtggaatgttggg

SEQ ID NO: 1275537 - DNA, 25 bp, Homo sapien
tggttggaggtgtgttgagtttgag

SEQ ID NO: 1275538 - DNA, 25 bp, Homo sapien
tctgtggaatgttggggggatttcc

SEQ ID NO: 1275539 - DNA, 25 bp, Homo sapien
cttctcctcttctccgagaaagagg

SEQ ID NO: 1275540 - DNA, 25 bp, Homo sapien
cctcttctccgagaaagaggccggg

SEQ ID NO: 1275541 - DNA, 25 bp, Homo sapien
ggttggtgccctccctctgcggttg

SEQ ID NO: 1275542 - DNA, 25 bp, Homo sapien
cctctgcggttgtcactggggtgcc

SEQ ID NO: 1275543 - DNA, 25 bp, Homo sapien
ccccgtcaaatgaggtgatccaagc

SEQ ID NO: 1275544 - DNA, 25 bp, Homo sapien
tctcccccgtcaaatgaggtgatcc

SEQ ID NO: 1275545 - DNA, 25 bp, Homo sapien
tacctctcccccgtcaaatgaggtg

SEQ ID NO: 1275546 - DNA, 25 bp, Homo sapien
cgtcaaatgaggtgatccaagccat

SEQ ID NO: 1275547 - DNA, 25 bp, Homo sapien
aactgttgcatccagggctctattc

SEQ ID NO: 1275548 - DNA, 25 bp, Homo sapien
actgttgcatccagggctctattct

SEQ ID NO: 1275549 - DNA, 25 bp, Homo sapien
cctgcaaccacacccggctaatttt

SEQ ID NO: 1275550 - DNA, 25 bp, Homo sapien
caagctccgtctccagggttcaggc

SEQ ID NO: 1275551 - DNA, 25 bp, Homo sapien
ctgcaaccacacccggctaattttt

SEQ ID NO: 1275552 - DNA, 25 bp, Homo sapien
agctccgtctccagggttcaggcca

SEQ ID NO: 1275553 - DNA, 25 bp, Homo sapien
tgccatagcactgtgctcttgccat

SEQ ID NO: 1275554 - DNA, 25 bp, Homo sapien
tgctggtgtagccatgtggatgcgt

SEQ ID NO: 1275555 - DNA, 25 bp, Homo sapien
gcatccattgccatagcactgtgct

SEQ ID NO: 1275556 - DNA, 25 bp, Homo sapien
ctcctagagccggagctgggcatcc

SEQ ID NO: 1275557 - DNA, 25 bp, Homo sapien
cgaggatactggaagcgctcagcgc

SEQ ID NO: 1275558 - DNA, 25 bp, Homo sapien
agctgcgctcacagcggcggtgcgg

SEQ ID NO: 1275559 - DNA, 25 bp, Homo sapien
gctgaggcgcgaggatactggaagc

SEQ ID NO: 1275560 - DNA, 25 bp, Homo sapien
ccggtgcgccggctgaggcgcgagg

SEQ ID NO: 1275561 - DNA, 25 bp, Homo sapien
agagagcgcgctggtgatgtcgccc

SEQ ID NO: 1275562 - DNA, 25 bp, Homo sapien
agagcgcgctggtgatgtcgcccga

SEQ ID NO: 1275563 - DNA, 25 bp, Homo sapien
agcgcgctggtgatgtcgcccgagt

SEQ ID NO: 1275564 - DNA, 25 bp, Homo sapien
gcgctggtgatgtcgcccgagtgcc

SEQ ID NO: 1275565 - DNA, 25 bp, Homo sapien
tcctgtttttatttaggcttcctca

SEQ ID NO: 1275566 - DNA, 25 bp, Homo sapien
tttatttaggcttcctcatttgcac

SEQ ID NO: 1275567 - DNA, 25 bp, Homo sapien
ctgtttttatttaggcttcctcatt

SEQ ID NO: 1275568 - DNA, 25 bp, Homo sapien
tttttatttaggcttcctcatttgc

SEQ ID NO: 1275569 - DNA, 25 bp, Homo sapien
tgggacgacctttcgtgggcaccag

SEQ ID NO: 1275570 - DNA, 25 bp, Homo sapien
gaactgggacgacctttcgtgggca

SEQ ID NO: 1275571 - DNA, 25 bp, Homo sapien
ctgggacgacctttcgtgggcacca

SEQ ID NO: 1275572 - DNA, 25 bp, Homo sapien
tagagcagaaatgccaaccccttag

SEQ ID NO: 1275573 - DNA, 25 bp, Homo sapien
gatctgcccagtttgcggatggagc

SEQ ID NO: 1275574 - DNA, 25 bp, Homo sapien
gatgaggctgcgaccaaacgcaagg

SEQ ID NO: 1275575 - DNA, 25 bp, Homo sapien
tcgggcaggtctcacttgtgcaggt

SEQ ID NO: 1275576 - DNA, 25 bp, Homo sapien
gtaagctattacagtgccactgcgc

SEQ ID NO: 1275577 - DNA, 25 bp, Homo sapien
gagtgctcttaaaacccagttgtgg

SEQ ID NO: 1275578 - DNA, 25 bp, Homo sapien
tgatattaggattccagccatcttg

SEQ ID NO: 1275579 - DNA, 25 bp, Homo sapien
ttgtggctgagagcggtagctcata

SEQ ID NO: 1275580 - DNA, 25 bp, Homo sapien
gaggtactcccgaccacgcagatgt

SEQ ID NO: 1275581 - DNA, 25 bp, Homo sapien
tggaattagggcacgtgccccagag

SEQ ID NO: 1275582 - DNA, 25 bp, Homo sapien
tctggcaggaaaagcgcgtttctgc

SEQ ID NO: 1275583 - DNA, 25 bp, Homo sapien
tttgcactaagctgtgggctccgtt

SEQ ID NO: 1275584 - DNA, 25 bp, Homo sapien
caagtgtttcctgagatcacacggg

SEQ ID NO: 1275585 - DNA, 25 bp, Homo sapien
tgtttcctgagatcacacggggtgc

SEQ ID NO: 1275586 - DNA, 25 bp, Homo sapien
cctgagatcacacggggtgccaggg

SEQ ID NO: 1275587 - DNA, 25 bp, Homo sapien
tttcctgagatcacacggggtgcca

SEQ ID NO: 1275588 - DNA, 25 bp, Homo sapien
aacagggcaggcagactgggagggc

SEQ ID NO: 1275589 - DNA, 25 bp, Homo sapien
cagggcaggcagactgggagggcat

SEQ ID NO: 1275590 - DNA, 25 bp, Homo sapien
ctaagaacagggcaggcagactggg

SEQ ID NO: 1275591 - DNA, 25 bp, Homo sapien
agaacagggcaggcagactgggagg

SEQ ID NO: 1275592 - DNA, 25 bp, Homo sapien
gatggtgagagtcggttcctgcttc

SEQ ID NO: 1275593 - DNA, 25 bp, Homo sapien
accaatggttgtgcgaaagccagcc

SEQ ID NO: 1275594 - DNA, 25 bp, Homo sapien
aggacagacagtccaccaatggttg

SEQ ID NO: 1275595 - DNA, 25 bp, Homo sapien
cgctttcgcacaactgtccgatgga

SEQ ID NO: 1275596 - DNA, 25 bp, Homo sapien
cgttcagtgtagatgacgtatttct

SEQ ID NO: 1275597 - DNA, 25 bp, Homo sapien
tgggatgaatgccagcgtggacagt

SEQ ID NO: 1275598 - DNA, 25 bp, Homo sapien
cagtcgtgccattagacttttcccc

SEQ ID NO: 1275599 - DNA, 25 bp, Homo sapien
cccctgcactcgttcagtgtagatg

SEQ ID NO: 1275600 - DNA, 25 bp, Homo sapien
cagggttttactatgttggccaggc

SEQ ID NO: 1275601 - DNA, 25 bp, Homo sapien
ttacaggcacccaccaggctaattt

SEQ ID NO: 1275602 - DNA, 25 bp, Homo sapien
tacaggcacccaccaggctaatttt

SEQ ID NO: 1275603 - DNA, 25 bp, Homo sapien
agggttttactatgttggccaggct

SEQ ID NO: 1275604 - DNA, 25 bp, Homo sapien
ataggctcagaggtaattatttaaa

SEQ ID NO: 1275605 - DNA, 25 bp, Homo sapien
tgctaataggctcagaggtaattat

SEQ ID NO: 1275606 - DNA, 25 bp, Homo sapien
taataggctcagaggtaattattta

SEQ ID NO: 1275607 - DNA, 25 bp, Homo sapien
ttgctaataggctcagaggtaatta

SEQ ID NO: 1275608 - DNA, 25 bp, Homo sapien
agcccttgtgctgcgggttcccagg

SEQ ID NO: 1275609 - DNA, 25 bp, Homo sapien
tggcagtaaccttgaccctgatggg

SEQ ID NO: 1275610 - DNA, 25 bp, Homo sapien
gagcccttgtgctgcgggttcccag

SEQ ID NO: 1275611 - DNA, 25 bp, Homo sapien
cgggcagctggcagtaaccttgacc

SEQ ID NO: 1275612 - DNA, 25 bp, Homo sapien
cctgagtagctcccaagtgcacact

SEQ ID NO: 1275613 - DNA, 25 bp, Homo sapien
tgagtagctcccaagtgcacactgc

SEQ ID NO: 1275614 - DNA, 25 bp, Homo sapien
agtagctcccaagtgcacactgcca

SEQ ID NO: 1275615 - DNA, 25 bp, Homo sapien
tagctcccaagtgcacactgccatg

SEQ ID NO: 1275616 - DNA, 25 bp, Homo sapien
ccattttcattaacgtagcttgccg

SEQ ID NO: 1275617 - DNA, 25 bp, Homo sapien
tacttaggagctttgccgtttgcca

SEQ ID NO: 1275618 - DNA, 25 bp, Homo sapien
tcagtagcatttgtacttaggagct

SEQ ID NO: 1275619 - DNA, 25 bp, Homo sapien
ttgccgtttgccagctgaaagttgc

SEQ ID NO: 1275620 - DNA, 25 bp, Homo sapien
ggcagttgataccatctggctccag

SEQ ID NO: 1275621 - DNA, 25 bp, Homo sapien
gctggcagttgataccatctggctc

SEQ ID NO: 1275622 - DNA, 25 bp, Homo sapien
gagctggcagttgataccatctggc

SEQ ID NO: 1275623 - DNA, 25 bp, Homo sapien
tggcagttgataccatctggctcca

SEQ ID NO: 1275624 - DNA, 25 bp, Homo sapien
agatttcacaccattagcagttact

SEQ ID NO: 1275625 - DNA, 25 bp, Homo sapien
catcataaattttaagctgtgcatg

SEQ ID NO: 1275626 - DNA, 25 bp, Homo sapien
tcagtcaccaaaccccgcctcagtg

SEQ ID NO: 1275627 - DNA, 25 bp, Homo sapien
tcataaattttaagctgtgcatggt

SEQ ID NO: 1275628 - DNA, 25 bp, Homo sapien
acagaggagctgttgtttgtactga

SEQ ID NO: 1275629 - DNA, 25 bp, Homo sapien
ttacagaggagctgttgtttgtact

SEQ ID NO: 1275630 - DNA, 25 bp, Homo sapien
cagaggagctgttgtttgtactgac

SEQ ID NO: 1275631 - DNA, 25 bp, Homo sapien
cattacagaggagctgttgtttgta

SEQ ID NO: 1275632 - DNA, 25 bp, Homo sapien
caggtattgatggagcctctaagca

SEQ ID NO: 1275633 - DNA, 25 bp, Homo sapien
agcctctaagcatggaatagtgctg

SEQ ID NO: 1275634 - DNA, 25 bp, Homo sapien
ccatcacaggtattgatggagcctc

SEQ ID NO: 1275635 - DNA, 25 bp, Homo sapien
catttagtccatcacaggtattgat

SEQ ID NO: 1275636 - DNA, 25 bp, Homo sapien
ccacagcgtggttggcaggctcagt

SEQ ID NO: 1275637 - DNA, 25 bp, Homo sapien
tgtccttatagcatggccactggct

SEQ ID NO: 1275638 - DNA, 25 bp, Homo sapien
ccaacacttggcagactgaacagca

SEQ ID NO: 1275639 - DNA, 25 bp, Homo sapien
ttccggtccagggtctcatgaggct

SEQ ID NO: 1275640 - DNA, 25 bp, Homo sapien
gataaacggaagtcttcgcgcaggg

SEQ ID NO: 1275641 - DNA, 25 bp, Homo sapien
gaaaatctcgttggtgtcctagccc

SEQ ID NO: 1275642 - DNA, 25 bp, Homo sapien
tggaggaaccgctgaagctcgtctg

SEQ ID NO: 1275643 - DNA, 25 bp, Homo sapien
tccatccatgctggagataaacgga

SEQ ID NO: 1275644 - DNA, 25 bp, Homo sapien
ccaaggtccggcgtgacttccggtg

SEQ ID NO: 1275645 - DNA, 25 bp, Homo sapien
ctctgtctgcccgtccaaggtccgg

SEQ ID NO: 1275646 - DNA, 25 bp, Homo sapien
tgcccgtccaaggtccggcgtgact

SEQ ID NO: 1275647 - DNA, 25 bp, Homo sapien
ttctcatcttggggaaatccccgcc

SEQ ID NO: 1275648 - DNA, 25 bp, Homo sapien
tgactcacccgtcggctgagtcagg

SEQ ID NO: 1275649 - DNA, 25 bp, Homo sapien
tgcagggagcctgactcacccgtcg

SEQ ID NO: 1275650 - DNA, 25 bp, Homo sapien
gagcctgactcacccgtcggctgag

SEQ ID NO: 1275651 - DNA, 25 bp, Homo sapien
cctcggatgtctgctgcaccgctcc

SEQ ID NO: 1275652 - DNA, 25 bp, Homo sapien
ctcctctgcgttcccctgtggcaaa

SEQ ID NO: 1275653 - DNA, 25 bp, Homo sapien
gacacgccagggctgattctggtgc

SEQ ID NO: 1275654 - DNA, 25 bp, Homo sapien
caccaaggagtgttcttcaaaccac

SEQ ID NO: 1275655 - DNA, 25 bp, Homo sapien
tcttgggctgtggacccgaaagaat

SEQ ID NO: 1275656 - DNA, 25 bp, Homo sapien
gggaagggagcatccgagcccgcat

SEQ ID NO: 1275657 - DNA, 25 bp, Homo sapien
ccttgcgaagtgcttgccactgtcc

SEQ ID NO: 1275658 - DNA, 25 bp, Homo sapien
gcagtgccttgcgaagtgcttgcca

SEQ ID NO: 1275659 - DNA, 25 bp, Homo sapien
tggtggcagtgccttgcgaagtgct

SEQ ID NO: 1275660 - DNA, 25 bp, Homo sapien
tcccgcagcagggtccccggagcat

SEQ ID NO: 1275661 - DNA, 25 bp, Homo sapien
ggctcccgcagcagggtccccggag

SEQ ID NO: 1275662 - DNA, 25 bp, Homo sapien
gcctgggctcccgcagcagggtccc

SEQ ID NO: 1275663 - DNA, 25 bp, Homo sapien
cctgggctcccgcagcagggtcccc

SEQ ID NO: 1275664 - DNA, 25 bp, Homo sapien
ctggacgttacctatgtggttcccg

SEQ ID NO: 1275665 - DNA, 25 bp, Homo sapien
aacactcagcactctccgatgagca

SEQ ID NO: 1275666 - DNA, 25 bp, Homo sapien
gcacaaggggatggattcaagaaca

SEQ ID NO: 1275667 - DNA, 25 bp, Homo sapien
taaagtggcttctggtaacctggac

SEQ ID NO: 1275668 - DNA, 25 bp, Homo sapien
caggcaagctcaacgtggcaggata

SEQ ID NO: 1275669 - DNA, 25 bp, Homo sapien
tgagcccatgcgtggcctgcggcat

SEQ ID NO: 1275670 - DNA, 25 bp, Homo sapien
tctggtcaacgttaagtttgagggc

SEQ ID NO: 1275671 - DNA, 25 bp, Homo sapien
catcagatggtgtttgccaggtgtc

SEQ ID NO: 1275672 - DNA, 25 bp, Homo sapien
gaccgtctgcctgtttcgaaatggg

SEQ ID NO: 1275673 - DNA, 25 bp, Homo sapien
catatcaggccatggactcaggacc

SEQ ID NO: 1275674 - DNA, 25 bp, Homo sapien
gaccagcactctgtgaaaccttgaa

SEQ ID NO: 1275675 - DNA, 25 bp, Homo sapien
tcactgatgtgggttgagaccagca

SEQ ID NO: 1275676 - DNA, 25 bp, Homo sapien
ctcggctcaaaaagaaacaagggag

SEQ ID NO: 1275677 - DNA, 25 bp, Homo sapien
gagagaagacaaaccccgctccggc

SEQ ID NO: 1275678 - DNA, 25 bp, Homo sapien
tctcggctcaaaaagaaacaaggga

SEQ ID NO: 1275679 - DNA, 25 bp, Homo sapien
aacaggagagaagacaaaccccgct

SEQ ID NO: 1275680 - DNA, 25 bp, Homo sapien
tttattgtagcggatacactttctg

SEQ ID NO: 1275681 - DNA, 25 bp, Homo sapien
tgtagcggatacactttctgaccta

SEQ ID NO: 1275682 - DNA, 25 bp, Homo sapien
gaactttattgtagcggatacactt

SEQ ID NO: 1275683 - DNA, 25 bp, Homo sapien
gaaccagaactttattgtagcggat

SEQ ID NO: 1275684 - DNA, 25 bp, Homo sapien
catctgcgaagggaaaccgcgcggc

SEQ ID NO: 1275685 - DNA, 25 bp, Homo sapien
tacacatctgcgaagggaaaccgcg

SEQ ID NO: 1275686 - DNA, 25 bp, Homo sapien
atacacatctgcgaagggaaaccgc

SEQ ID NO: 1275687 - DNA, 25 bp, Homo sapien
cacatctgcgaagggaaaccgcgcg

SEQ ID NO: 1275688 - DNA, 25 bp, Homo sapien
gaggatggccacacatagcacagcc

SEQ ID NO: 1275689 - DNA, 25 bp, Homo sapien
catgtaactaagagcaaagtgctat

SEQ ID NO: 1275690 - DNA, 25 bp, Homo sapien
tgtccgctgtctaaacagagcagct

SEQ ID NO: 1275691 - DNA, 25 bp, Homo sapien
tcagaactagcagtcagggtcacag

SEQ ID NO: 1275692 - DNA, 25 bp, Homo sapien
tcctggacgttctgagtacggatcg

SEQ ID NO: 1275693 - DNA, 25 bp, Homo sapien
tccagcactttgacttcgggccatg

SEQ ID NO: 1275694 - DNA, 25 bp, Homo sapien
tcctgccgtctccaaaaggagtggt

SEQ ID NO: 1275695 - DNA, 25 bp, Homo sapien
taaaccacaaggctgcacacggtga

SEQ ID NO: 1275696 - DNA, 25 bp, Homo sapien
gactcccagccatactcagacctga

SEQ ID NO: 1275697 - DNA, 25 bp, Homo sapien
cttcactttacattccagtcccggg

SEQ ID NO: 1275698 - DNA, 25 bp, Homo sapien
ttccagtcccgggttacactagcac

SEQ ID NO: 1275699 - DNA, 25 bp, Homo sapien
gtgctcagagctccgaacttcactt

SEQ ID NO: 1275700 - DNA, 25 bp, Homo sapien
cagttaatcatctacacagtacccc

SEQ ID NO: 1275701 - DNA, 25 bp, Homo sapien
ctttgtcaacgagcccagctggcat

SEQ ID NO: 1275702 - DNA, 25 bp, Homo sapien
ctggcatggcttttctggagtgcga

SEQ ID NO: 1275703 - DNA, 25 bp, Homo sapien
tatttatacatgcactagtttggaa

SEQ ID NO: 1275704 - DNA, 25 bp, Homo sapien
tcgaaagcagaaaccgaggtggccg

SEQ ID NO: 1275705 - DNA, 25 bp, Homo sapien
tcctcgtgggactgaagagcgcgac

SEQ ID NO: 1275706 - DNA, 25 bp, Homo sapien
ggtctgcacacctactggccgaaat

SEQ ID NO: 1275707 - DNA, 25 bp, Homo sapien
gactttgtacatcgtggacccttgg

SEQ ID NO: 1275708 - DNA, 25 bp, Homo sapien
gactcggcgctggtgatgtcatcct

SEQ ID NO: 1275709 - DNA, 25 bp, Homo sapien
gctgctctccgactcggcgctggtg

SEQ ID NO: 1275710 - DNA, 25 bp, Homo sapien
cagtagctgagggtggagtcatccc

SEQ ID NO: 1275711 - DNA, 25 bp, Homo sapien
tgctgctgccgggttgcgttctggg

SEQ ID NO: 1275712 - DNA, 25 bp, Homo sapien
tcctcactgctgtgctggtcctcat

SEQ ID NO: 1275713 - DNA, 25 bp, Homo sapien
cctcctcactgctgtgctggtcctc

SEQ ID NO: 1275714 - DNA, 25 bp, Homo sapien
cactgctgtgctggtcctcataggt

SEQ ID NO: 1275715 - DNA, 25 bp, Homo sapien
ctcactgctgtgctggtcctcatag

SEQ ID NO: 1275716 - DNA, 25 bp, Homo sapien
gcgccgtaccggcttctcggaggcc

SEQ ID NO: 1275717 - DNA, 25 bp, Homo sapien
ctgtgctgcctctcagtcctggagg

SEQ ID NO: 1275718 - DNA, 25 bp, Homo sapien
ggcctgtgctgcctctcagtcctgg

SEQ ID NO: 1275719 - DNA, 25 bp, Homo sapien
tgaaggagccgcgccgtaccggctt

SEQ ID NO: 1275720 - DNA, 25 bp, Homo sapien
atgtgcggcccggatccgaaatacc

SEQ ID NO: 1275721 - DNA, 25 bp, Homo sapien
tgacgcacaccacgatcacaactgt

SEQ ID NO: 1275722 - DNA, 25 bp, Homo sapien
cccaggataatcatgaacaccagga

SEQ ID NO: 1275723 - DNA, 25 bp, Homo sapien
atggtcagggcagagtcgtcccagt

SEQ ID NO: 1275724 - DNA, 25 bp, Homo sapien
ccaggttgtggcctgacaggtcaac

SEQ ID NO: 1275725 - DNA, 25 bp, Homo sapien
ggttggccgtgtggattacattcac

SEQ ID NO: 1275726 - DNA, 25 bp, Homo sapien
agccatgtggttggcgtgttccatg

SEQ ID NO: 1275727 - DNA, 25 bp, Homo sapien
tgttccgggtgcacgaactgtggct

SEQ ID NO: 1275728 - DNA, 25 bp, Homo sapien
gatgtagcggccattcagctctgag

SEQ ID NO: 1275729 - DNA, 25 bp, Homo sapien
tgagcagatgagcttaaacttccgg

SEQ ID NO: 1275730 - DNA, 25 bp, Homo sapien
tccgatagcgcagcaggtgcaaaac

SEQ ID NO: 1275731 - DNA, 25 bp, Homo sapien
acttccggtcaagcaaggacctggc

SEQ ID NO: 1275732 - DNA, 25 bp, Homo sapien
tctcctcggacaccagtgattcttg

SEQ ID NO: 1275733 - DNA, 25 bp, Homo sapien
acaggtatccaggtcgtgcacgatc

SEQ ID NO: 1275734 - DNA, 25 bp, Homo sapien
tgtgaaggtcatgcccagttcagag

SEQ ID NO: 1275735 - DNA, 25 bp, Homo sapien
caccgtgacctcacaggtatccagg

SEQ ID NO: 1275736 - DNA, 25 bp, Homo sapien
aatgcaggtggcctcgttaaaacac

SEQ ID NO: 1275737 - DNA, 25 bp, Homo sapien
ggctcctcgggctgtaaaaccatca

SEQ ID NO: 1275738 - DNA, 25 bp, Homo sapien
tcagaagctgctcgggcaaaatggt

SEQ ID NO: 1275739 - DNA, 25 bp, Homo sapien
caaaatggtggacgccactcaggct

SEQ ID NO: 1275740 - DNA, 25 bp, Homo sapien
taaatatacaagtgtcattgggcaa

SEQ ID NO: 1275741 - DNA, 25 bp, Homo sapien
tatacaagtgtcattgggcaaaaca

SEQ ID NO: 1275742 - DNA, 25 bp, Homo sapien
attgggcaaaacaggccggctgtta

SEQ ID NO: 1275743 - DNA, 25 bp, Homo sapien
aaacctaaatatacaagtgtcattg

SEQ ID NO: 1275744 - DNA, 25 bp, Homo sapien
tggccttatccaattccccgaggtc

SEQ ID NO: 1275745 - DNA, 25 bp, Homo sapien
caggtacgagatgtgctgcatggcc

SEQ ID NO: 1275746 - DNA, 25 bp, Homo sapien
aactgccgggagttcaggtacgaga

SEQ ID NO: 1275747 - DNA, 25 bp, Homo sapien
tttgagtctgcgaattccgggcgtg

SEQ ID NO: 1275748 - DNA, 25 bp, Homo sapien
tgtgcagtcgagcgctcggtgttac

SEQ ID NO: 1275749 - DNA, 25 bp, Homo sapien
agtggtgtgcagtcgagcgctcggt

SEQ ID NO: 1275750 - DNA, 25 bp, Homo sapien
atgagtggtgtgcagtcgagcgctc

SEQ ID NO: 1275751 - DNA, 25 bp, Homo sapien
gctgtagtctaaggggcccatgagt

SEQ ID NO: 1275752 - DNA, 25 bp, Homo sapien
cactgtcttcgaggacctgcaggtc

SEQ ID NO: 1275753 - DNA, 25 bp, Homo sapien
cttgcaggtatacagacagtcgatc

SEQ ID NO: 1275754 - DNA, 25 bp, Homo sapien
tcccggaacggagagttaagccagc

SEQ ID NO: 1275755 - DNA, 25 bp, Homo sapien
agtcgatcaccttcttatccgcgag

SEQ ID NO: 1275756 - DNA, 25 bp, Homo sapien
tagccttgcaatctacatggaagcg

SEQ ID NO: 1275757 - DNA, 25 bp, Homo sapien
gacatgcgggttagttcataccaag

SEQ ID NO: 1275758 - DNA, 25 bp, Homo sapien
caaggatgctatggtgttaagtccc

SEQ ID NO: 1275759 - DNA, 25 bp, Homo sapien
tatgatcatgcacatggcctggaga

SEQ ID NO: 1275760 - DNA, 25 bp, Homo sapien
cagtcacaggctcagtttcattgtc

SEQ ID NO: 1275761 - DNA, 25 bp, Homo sapien
gtcacaggctcagtttcattgtcat

SEQ ID NO: 1275762 - DNA, 25 bp, Homo sapien
tcacaggctcagtttcattgtcatt

SEQ ID NO: 1275763 - DNA, 25 bp, Homo sapien
aagcatagcctacggtggacctggg

SEQ ID NO: 1275764 - DNA, 25 bp, Homo sapien
ctagctcctggatccagtgtacaga

SEQ ID NO: 1275765 - DNA, 25 bp, Homo sapien
gctcctggatccagtgtacagagta

SEQ ID NO: 1275766 - DNA, 25 bp, Homo sapien
ctagggaagcatagcctacggtgga

SEQ ID NO: 1275767 - DNA, 25 bp, Homo sapien
cacacacagcggctaagcacagaac

SEQ ID NO: 1275768 - DNA, 25 bp, Homo sapien
ggctaagcacagaaccaacactctc

SEQ ID NO: 1275769 - DNA, 25 bp, Homo sapien
gcggctaagcacagaaccaacactc

SEQ ID NO: 1275770 - DNA, 25 bp, Homo sapien
acacagcggctaagcacagaaccaa

SEQ ID NO: 1275771 - DNA, 25 bp, Homo sapien
tctaaccttactcaaggtacaatgt

SEQ ID NO: 1275772 - DNA, 25 bp, Homo sapien
ctaaccttactcaaggtacaatgtt

SEQ ID NO: 1275773 - DNA, 25 bp, Homo sapien
ccttactcaaggtacaatgtttcca

SEQ ID NO: 1275774 - DNA, 25 bp, Homo sapien
ttctaaccttactcaaggtacaatg

SEQ ID NO: 1275775 - DNA, 25 bp, Homo sapien
tgagtgtgggcccagaatacacagg

SEQ ID NO: 1275776 - DNA, 25 bp, Homo sapien
ctgagtgtgggcccagaatacacag

SEQ ID NO: 1275777 - DNA, 25 bp, Homo sapien
acaataataaaaaccttgatctggt

SEQ ID NO: 1275778 - DNA, 25 bp, Homo sapien
caataataaaaaccttgatctggtg

SEQ ID NO: 1275779 - DNA, 25 bp, Homo sapien
ggtccaaggcgcacttctacttctg

SEQ ID NO: 1275780 - DNA, 25 bp, Homo sapien
ctgggtgacacctggcttgctgctt

SEQ ID NO: 1275781 - DNA, 25 bp, Homo sapien
cacttggtaagtacaggtaagaagc

SEQ ID NO: 1275782 - DNA, 25 bp, Homo sapien
tgtataaaggagttggcacacagcc

SEQ ID NO: 1275783 - DNA, 25 bp, Homo sapien
tgtccccaaaaaggctgtacacagg

SEQ ID NO: 1275784 - DNA, 25 bp, Homo sapien
gtaaggctgtaggataccgatcaca

SEQ ID NO: 1275785 - DNA, 25 bp, Homo sapien
gtaggataccgatcacagcctgctg

SEQ ID NO: 1275786 - DNA, 25 bp, Homo sapien
gaaaagatccaggacacgagggtaa

SEQ ID NO: 1275787 - DNA, 25 bp, Homo sapien
tacaacttaattctcgagtcgaggg

SEQ ID NO: 1275788 - DNA, 25 bp, Homo sapien
acttaattctcgagtcgagggcggg

SEQ ID NO: 1275789 - DNA, 25 bp, Homo sapien
agaggtacaacttaattctcgagtc

SEQ ID NO: 1275790 - DNA, 25 bp, Homo sapien
ggtacaacttaattctcgagtcgag

SEQ ID NO: 1275791 - DNA, 25 bp, Homo sapien
cattgaggacgtagtggtgccattc

SEQ ID NO: 1275792 - DNA, 25 bp, Homo sapien
gagcgggtaatcctcagtcacagag

SEQ ID NO: 1275793 - DNA, 25 bp, Homo sapien
tgggacgtgccatccacatagagag

SEQ ID NO: 1275794 - DNA, 25 bp, Homo sapien
catagagagtcacactcgggaattc

SEQ ID NO: 1275795 - DNA, 25 bp, Homo sapien
gatacatcatgacatacaggcgggc

SEQ ID NO: 1275796 - DNA, 25 bp, Homo sapien
ttgaaggcataagggcacacagggc

SEQ ID NO: 1275797 - DNA, 25 bp, Homo sapien
caatgggcccttatctgggtcgtaa

SEQ ID NO: 1275798 - DNA, 25 bp, Homo sapien
tgtgtgaacacgcatcagccagctg

SEQ ID NO: 1275799 - DNA, 25 bp, Homo sapien
cacccgtggacatagagggagtagt

SEQ ID NO: 1275800 - DNA, 25 bp, Homo sapien
aagaggaagatcagccggcacccgt

SEQ ID NO: 1275801 - DNA, 25 bp, Homo sapien
agggagtagtggtgccgattcatat

SEQ ID NO: 1275802 - DNA, 25 bp, Homo sapien
cagaaggatcctgacggaagaggaa

SEQ ID NO: 1275803 - DNA, 25 bp, Homo sapien
catccacaccgagatggtgaacggc

SEQ ID NO: 1275804 - DNA, 25 bp, Homo sapien
gcccatggtccagttgagggatcca

SEQ ID NO: 1275805 - DNA, 25 bp, Homo sapien
aacacctggtcgctgtcgtggccat

SEQ ID NO: 1275806 - DNA, 25 bp, Homo sapien
gtgccgttgaactcaaacacctggt

SEQ ID NO: 1275807 - DNA, 25 bp, Homo sapien
tcaccaaagccagccggatgcaaga

SEQ ID NO: 1275808 - DNA, 25 bp, Homo sapien
cggatgcaagaacgcctggtctcct

SEQ ID NO: 1275809 - DNA, 25 bp, Homo sapien
cacaagtatttccagttgtaaaggt

SEQ ID NO: 1275810 - DNA, 25 bp, Homo sapien
cacacaagtatttccagttgtaaag

SEQ ID NO: 1275811 - DNA, 25 bp, Homo sapien
gaggcgactggctcgtcacatgtct

SEQ ID NO: 1275812 - DNA, 25 bp, Homo sapien
tcggtcgcagcctttccctatgtgg

SEQ ID NO: 1275813 - DNA, 25 bp, Homo sapien
tatttggaaagacggccaacgcgcc

SEQ ID NO: 1275814 - DNA, 25 bp, Homo sapien
tctctgagtaggtgtctcggtcgca

SEQ ID NO: 1275815 - DNA, 25 bp, Homo sapien
gctgccgcatacatcagttttaaga

SEQ ID NO: 1275816 - DNA, 25 bp, Homo sapien
ctctaggttgctgccgcatacatca

SEQ ID NO: 1275817 - DNA, 25 bp, Homo sapien
cacacactctaggttgctgccgcat

SEQ ID NO: 1275818 - DNA, 25 bp, Homo sapien
ctgtgttggtccacaagtcagcagg

SEQ ID NO: 1275819 - DNA, 25 bp, Homo sapien
gggcttaatgctgatcttcaccaaa

SEQ ID NO: 1275820 - DNA, 25 bp, Homo sapien
cttcccacagtcataggcagtgacg

SEQ ID NO: 1275821 - DNA, 25 bp, Homo sapien
gcttatattgatgttctttcccgta

SEQ ID NO: 1275822 - DNA, 25 bp, Homo sapien
tgcaggtgggcttaatgctgatctt

SEQ ID NO: 1275823 - DNA, 25 bp, Homo sapien
ttcaacagaagagacggagctacac

SEQ ID NO: 1275824 - DNA, 25 bp, Homo sapien
gacaaaatgcataggctttaagccc

SEQ ID NO: 1275825 - DNA, 25 bp, Homo sapien
taagccctgtaaatactcagccaga

SEQ ID NO: 1275826 - DNA, 25 bp, Homo sapien
cacgcactaaatccatcctgaagag

SEQ ID NO: 1275827 - DNA, 25 bp, Homo sapien
tttgtcaacagtaaagggcacgtct

SEQ ID NO: 1275828 - DNA, 25 bp, Homo sapien
gatttcgtagctgcaaatctggctg

SEQ ID NO: 1275829 - DNA, 25 bp, Homo sapien
gatgaccgtggctttgtaggacttc

SEQ ID NO: 1275830 - DNA, 25 bp, Homo sapien
tgtcgtactgcttcccctcgatgac

SEQ ID NO: 1275831 - DNA, 25 bp, Homo sapien
tagggtgtcatcagacctggctaca

SEQ ID NO: 1275832 - DNA, 25 bp, Homo sapien
cagggcatgcttctgaatcagtcaa

SEQ ID NO: 1275833 - DNA, 25 bp, Homo sapien
tacttctagggaataggctggagtc

SEQ ID NO: 1275834 - DNA, 25 bp, Homo sapien
tcaagggctaatggtcagggcatgc

SEQ ID NO: 1275835 - DNA, 25 bp, Homo sapien
tatgagactttttcacgttggtgcc

SEQ ID NO: 1275836 - DNA, 25 bp, Homo sapien
gactccctcaccagtggatttatcc

SEQ ID NO: 1275837 - DNA, 25 bp, Homo sapien
tttctctttggagcgaatgactccc

SEQ ID NO: 1275838 - DNA, 25 bp, Homo sapien
cctggatggtgaatgaatagtcttt

SEQ ID NO: 1275839 - DNA, 25 bp, Homo sapien
taagaattcctaccacatagatctt

SEQ ID NO: 1275840 - DNA, 25 bp, Homo sapien
caggtaagaattcctaccacataga

SEQ ID NO: 1275841 - DNA, 25 bp, Homo sapien
ggtaagaattcctaccacatagatc

SEQ ID NO: 1275842 - DNA, 25 bp, Homo sapien
agaattcctaccacatagatcttct

SEQ ID NO: 1275843 - DNA, 25 bp, Homo sapien
ttggtgactgtcacctcaaaactct

SEQ ID NO: 1275844 - DNA, 25 bp, Homo sapien
cttctttggtgactgtcacctcaaa

SEQ ID NO: 1275845 - DNA, 25 bp, Homo sapien
tttggtgactgtcacctcaaaactc

SEQ ID NO: 1275846 - DNA, 25 bp, Homo sapien
tctttggtgactgtcacctcaaaac

SEQ ID NO: 1275847 - DNA, 25 bp, Homo sapien
ctaaagggagaaaagataagcccat

SEQ ID NO: 1275848 - DNA, 25 bp, Homo sapien
taggctctcctaggaatgggccaaa

SEQ ID NO: 1275849 - DNA, 25 bp, Homo sapien
tcatccgttgcagggaaggacctct

SEQ ID NO: 1275850 - DNA, 25 bp, Homo sapien
tagtcaaatgcatgctacggcacca

SEQ ID NO: 1275851 - DNA, 25 bp, Homo sapien
catcacatacgaaggtgcagctcca

SEQ ID NO: 1275852 - DNA, 25 bp, Homo sapien
ggtgcccgcactcaacggctctgct

SEQ ID NO: 1275853 - DNA, 25 bp, Homo sapien
ggctttcttgcttactggtccaggc

SEQ ID NO: 1275854 - DNA, 25 bp, Homo sapien
caagcagcgactatccacttctctc

SEQ ID NO: 1275855 - DNA, 25 bp, Homo sapien
ccaagcagcgactatccacttctcc

SEQ ID NO: 1275856 - DNA, 25 bp, Homo sapien
gcagcccattctctaccagttaagg

SEQ ID NO: 1275857 - DNA, 25 bp, Homo sapien
ttaaggacccaacgtgaagccagaa

SEQ ID NO: 1275858 - DNA, 25 bp, Homo sapien
cagaaaaaaggtggcgcagcccatt

SEQ ID NO: 1275859 - DNA, 25 bp, Homo sapien
tgcccagccgtgcaggagaagatct

SEQ ID NO: 1275860 - DNA, 25 bp, Homo sapien
agagtcaatgaaagccccgttccta

SEQ ID NO: 1275861 - DNA, 25 bp, Homo sapien
gagtcaatgaaagccccgttcctac

SEQ ID NO: 1275862 - DNA, 25 bp, Homo sapien
caagagtcaatgaaagccccgttcc

SEQ ID NO: 1275863 - DNA, 25 bp, Homo sapien
aagagtcaatgaaagccccgttcct

SEQ ID NO: 1275864 - DNA, 25 bp, Homo sapien
catctttatccagcgcgatcagtgg

SEQ ID NO: 1275865 - DNA, 25 bp, Homo sapien
tgcaaatcgcagaggcgcatcttta

SEQ ID NO: 1275866 - DNA, 25 bp, Homo sapien
tcgaggagcacggtgttgtcgttct

SEQ ID NO: 1275867 - DNA, 25 bp, Homo sapien
cgttctctgtgactatgccgtggta

SEQ ID NO: 1275868 - DNA, 25 bp, Homo sapien
aatccacttttgagttaggcttggg

SEQ ID NO: 1275869 - DNA, 25 bp, Homo sapien
gcctccctctattatgagctgtgtg

SEQ ID NO: 1275870 - DNA, 25 bp, Homo sapien
gacagtgttactgaacttcatgcag

SEQ ID NO: 1275871 - DNA, 25 bp, Homo sapien
taagtacattaacttactgccggaa

SEQ ID NO: 1275872 - DNA, 25 bp, Homo sapien
aggctcagagtaggcgtgtgaaggc

SEQ ID NO: 1275873 - DNA, 25 bp, Homo sapien
ctcagagtaggcgtgtgaaggcttg

SEQ ID NO: 1275874 - DNA, 25 bp, Homo sapien
taaggctcagagtaggcgtgtgaag

SEQ ID NO: 1275875 - DNA, 25 bp, Homo sapien
cagagtaggcgtgtgaaggcttgca

SEQ ID NO: 1275876 - DNA, 25 bp, Homo sapien
actgaacgcttcaaaatggtagaca

SEQ ID NO: 1275877 - DNA, 25 bp, Homo sapien
tataaaatttcggttttgtgagatg

SEQ ID NO: 1275878 - DNA, 25 bp, Homo sapien
tacttgatgctactgaactgaacgc

SEQ ID NO: 1275879 - DNA, 25 bp, Homo sapien
ctacatccaagccaagagcaaatcc

SEQ ID NO: 1275880 - DNA, 25 bp, Homo sapien
ccggcacttactcggcagccagagg

SEQ ID NO: 1275881 - DNA, 25 bp, Homo sapien
ttaaatggattggtcagtcagttga

SEQ ID NO: 1275882 - DNA, 25 bp, Homo sapien
tactgagggacccaaatagcttttg

SEQ ID NO: 1275883 - DNA, 25 bp, Homo sapien
acaacaatgggtcttcaactttggg

SEQ ID NO: 1275884 - DNA, 25 bp, Homo sapien
ctcgctctgtccctctgttccaaca

SEQ ID NO: 1275885 - DNA, 25 bp, Homo sapien
tcgctctgtccctctgttccaacac

SEQ ID NO: 1275886 - DNA, 25 bp, Homo sapien
tttaaagggctgattgaaacaccaa

SEQ ID NO: 1275887 - DNA, 25 bp, Homo sapien
tctgggccagacaatgtttagctgt

SEQ ID NO: 1275888 - DNA, 25 bp, Homo sapien
gcctcaaaaccactggatgtccgcg

SEQ ID NO: 1275889 - DNA, 25 bp, Homo sapien
tatgcacaggtttaaggatttcttc

SEQ ID NO: 1275890 - DNA, 25 bp, Homo sapien
ctgtctcagaggtgtgggacacccc

SEQ ID NO: 1275891 - DNA, 25 bp, Homo sapien
caccccacccagcttgaagttaatt

SEQ ID NO: 1275892 - DNA, 25 bp, Homo sapien
tgtctcagaggtgtgggacacccca

SEQ ID NO: 1275893 - DNA, 25 bp, Homo sapien
agggcctgagagctacatcgggctc

SEQ ID NO: 1275894 - DNA, 25 bp, Homo sapien
gctacatcgggctcctcgtgttggg

SEQ ID NO: 1275895 - DNA, 25 bp, Homo sapien
tgagagctacatcgggctcctcgtg

SEQ ID NO: 1275896 - DNA, 25 bp, Homo sapien
ggcctgagagctacatcgggctcct

SEQ ID NO: 1275897 - DNA, 25 bp, Homo sapien
acatgagcctcagggtaggatgcca

SEQ ID NO: 1275898 - DNA, 25 bp, Homo sapien
ggctgtccccaactagaactgagag

SEQ ID NO: 1275899 - DNA, 25 bp, Homo sapien
agtctaggtatctcccgcacacgga

SEQ ID NO: 1275900 - DNA, 25 bp, Homo sapien
cgtctttctcgaggcccaggtagtc

SEQ ID NO: 1275901 - DNA, 25 bp, Homo sapien
cagactccagccacgggtgtcgggt

SEQ ID NO: 1275902 - DNA, 25 bp, Homo sapien
ggtgtcgggtgtcgggaaccatgcc

SEQ ID NO: 1275903 - DNA, 25 bp, Homo sapien
gtgtcgggaaccatgcccttggcta

SEQ ID NO: 1275904 - DNA, 25 bp, Homo sapien
gggtattaattaccagggacacaga

SEQ ID NO: 1275905 - DNA, 25 bp, Homo sapien
tccccaacagagaacaatggcctca

SEQ ID NO: 1275906 - DNA, 25 bp, Homo sapien
ctggcgctgacaggtttgctgtgga

SEQ ID NO: 1275907 - DNA, 25 bp, Homo sapien
tgaatggaggccattcgaaagcttt

SEQ ID NO: 1275908 - DNA, 25 bp, Homo sapien
gtggaacaatttgatgcactcccca

SEQ ID NO: 1275909 - DNA, 25 bp, Homo sapien
gctgtcccaaatcctcatctggtct

SEQ ID NO: 1275910 - DNA, 25 bp, Homo sapien
tgagccaaggctgctgtcccaaatc

SEQ ID NO: 1275911 - DNA, 25 bp, Homo sapien
gataagagtacagccgggactgctc

SEQ ID NO: 1275912 - DNA, 25 bp, Homo sapien
tctgtacttgggtttccaaacgata

SEQ ID NO: 1275913 - DNA, 25 bp, Homo sapien
tcctgtgcacaccactctgcaccgt

SEQ ID NO: 1275914 - DNA, 25 bp, Homo sapien
tgtgcacaccactctgcaccgtgca

SEQ ID NO: 1275915 - DNA, 25 bp, Homo sapien
cctgaataattcactccttcaatct

SEQ ID NO: 1275916 - DNA, 25 bp, Homo sapien
tcttcctgggtcagcacccaatcct

SEQ ID NO: 1275917 - DNA, 25 bp, Homo sapien
gaaatactacttcccaccgagccat

SEQ ID NO: 1275918 - DNA, 25 bp, Homo sapien
cagaggcatgcaaggtttaaaaggt

SEQ ID NO: 1275919 - DNA, 25 bp, Homo sapien
cgtaagcttttcgttggcaagacca

SEQ ID NO: 1275920 - DNA, 25 bp, Homo sapien
gatccactcagaagcaaatactgta

SEQ ID NO: 1275921 - DNA, 25 bp, Homo sapien
cagcgcgggagcggggcggcgcagc

SEQ ID NO: 1275922 - DNA, 25 bp, Homo sapien
agaccccgccgccgcacagcagccc

SEQ ID NO: 1275923 - DNA, 25 bp, Homo sapien
ccggggccagcgcgggagcggggcg

SEQ ID NO: 1275924 - DNA, 25 bp, Homo sapien
ggcggccggggccagcgcgggagcg

SEQ ID NO: 1275925 - DNA, 25 bp, Homo sapien
gggacgccgagcggagctctcggag

SEQ ID NO: 1275926 - DNA, 25 bp, Homo sapien
gacgccgagcggagctctcggagct

SEQ ID NO: 1275927 - DNA, 25 bp, Homo sapien
acgccgagcggagctctcggagctc

SEQ ID NO: 1275928 - DNA, 25 bp, Homo sapien
gcgggacgccgagcggagctctcgg

SEQ ID NO: 1275929 - DNA, 25 bp, Homo sapien
tccccgcctcagagcagcgtcttgc

SEQ ID NO: 1275930 - DNA, 25 bp, Homo sapien
gccgccgtgacgctgggccgcgcgc

SEQ ID NO: 1275931 - DNA, 25 bp, Homo sapien
ccgcgcgctcaggacgcggcgccct

SEQ ID NO: 1275932 - DNA, 25 bp, Homo sapien
tcagagcagcgtcttgctgaaggca

SEQ ID NO: 1275933 - DNA, 25 bp, Homo sapien
tctctctcgggtccggcgagggtac

SEQ ID NO: 1275934 - DNA, 25 bp, Homo sapien
ccaggacccttgtcacttcgggcag

SEQ ID NO: 1275935 - DNA, 25 bp, Homo sapien
tctccccagtagaggtgttgagagg

SEQ ID NO: 1275936 - DNA, 25 bp, Homo sapien
tggccgcagatggagagcctcaact

SEQ ID NO: 1275937 - DNA, 25 bp, Homo sapien
gtgctttttccttgaccttgaagct

SEQ ID NO: 1275938 - DNA, 25 bp, Homo sapien
gcttctctggctttttggtgctttt

SEQ ID NO: 1275939 - DNA, 25 bp, Homo sapien
cagatgaggcttctctggctttttg

SEQ ID NO: 1275940 - DNA, 25 bp, Homo sapien
ggtgctttttccttgaccttgaagc

SEQ ID NO: 1275941 - DNA, 25 bp, Homo sapien
tggggcccagaacgtcccagcaagc

SEQ ID NO: 1275942 - DNA, 25 bp, Homo sapien
ggcccagaacgtcccagcaagcctt

SEQ ID NO: 1275943 - DNA, 25 bp, Homo sapien
caagccttgttgacaagggcctgcc

SEQ ID NO: 1275944 - DNA, 25 bp, Homo sapien
ctgtggacctgacccacgcccccag

SEQ ID NO: 1275945 - DNA, 25 bp, Homo sapien
aagtcacgatgagagatcggctgcc

SEQ ID NO: 1275946 - DNA, 25 bp, Homo sapien
tgtctgccaggtgggacacggaagc

SEQ ID NO: 1275947 - DNA, 25 bp, Homo sapien
tggggccccgcgttgctgtctgtct

SEQ ID NO: 1275948 - DNA, 25 bp, Homo sapien
tgccatagtaactgctcttcggcat

SEQ ID NO: 1275949 - DNA, 25 bp, Homo sapien
catgacttccgtgctggcaggactg

SEQ ID NO: 1275950 - DNA, 25 bp, Homo sapien
ctcatgacttccgtgctggcaggac

SEQ ID NO: 1275951 - DNA, 25 bp, Homo sapien
cgtggctcgtccctgcatcaagaac

SEQ ID NO: 1275952 - DNA, 25 bp, Homo sapien
tcgtccctgcatcaagaacgctcat

SEQ ID NO: 1275953 - DNA, 25 bp, Homo sapien
tgactgtcagctaaccagggctagg

SEQ ID NO: 1275954 - DNA, 25 bp, Homo sapien
taaagcaaatgtactctccaggtgg

SEQ ID NO: 1275955 - DNA, 25 bp, Homo sapien
tctgaactgcaattctgggcctgag

SEQ ID NO: 1275956 - DNA, 25 bp, Homo sapien
catccagggtgttccaagggctttg

SEQ ID NO: 1275957 - DNA, 25 bp, Homo sapien
ctgcctccggtcttccgtctccgac

SEQ ID NO: 1275958 - DNA, 25 bp, Homo sapien
tactgcctccggtcttccgtctccg

SEQ ID NO: 1275959 - DNA, 25 bp, Homo sapien
actgcctccggtcttccgtctccga

SEQ ID NO: 1275960 - DNA, 25 bp, Homo sapien
ctactgcctccggtcttccgtctcc

SEQ ID NO: 1275961 - DNA, 25 bp, Homo sapien
ctggaaaacgccatcaccacgtcct

SEQ ID NO: 1275962 - DNA, 25 bp, Homo sapien
ggcacttgtgaaatcacgtcctttg

SEQ ID NO: 1275963 - DNA, 25 bp, Homo sapien
aagctcgaaatgctgacctgccacc

SEQ ID NO: 1275964 - DNA, 25 bp, Homo sapien
ggctctgatgagtggccaggacagg

SEQ ID NO: 1275965 - DNA, 25 bp, Homo sapien
acccacaactgcctggggagttagg

SEQ ID NO: 1275966 - DNA, 25 bp, Homo sapien
tccctgaccctgtcctgctgctctc

SEQ ID NO: 1275967 - DNA, 25 bp, Homo sapien
actccctgaccctgtcctgctgctc

SEQ ID NO: 1275968 - DNA, 25 bp, Homo sapien
cctgaccctgtcctgctgctctcac

SEQ ID NO: 1275969 - DNA, 25 bp, Homo sapien
cttgactccctgaccctgtcctgct

SEQ ID NO: 1275970 - DNA, 25 bp, Homo sapien
tggctgcccatggtctttctgacat

SEQ ID NO: 1275971 - DNA, 25 bp, Homo sapien
ccagatcttcactttgccccgaaaa

SEQ ID NO: 1275972 - DNA, 25 bp, Homo sapien
gtctgtgctactgcaggtattctct

SEQ ID NO: 1275973 - DNA, 25 bp, Homo sapien
cccgaaaagtaccagtctggctgcc

SEQ ID NO: 1275974 - DNA, 25 bp, Homo sapien
acgcacccagctgtcgggagggcca

SEQ ID NO: 1275975 - DNA, 25 bp, Homo sapien
gacacaccttccacttggcactaga

SEQ ID NO: 1275976 - DNA, 25 bp, Homo sapien
ggagggcccaactacaaggatgcaa

SEQ ID NO: 1275977 - DNA, 25 bp, Homo sapien
ctctaccaagagagggaggacgcac

SEQ ID NO: 1275978 - DNA, 25 bp, Homo sapien
ttctggctttaccagcacaacctcc

SEQ ID NO: 1275979 - DNA, 25 bp, Homo sapien
tctggctttaccagcacaacctcca

SEQ ID NO: 1275980 - DNA, 25 bp, Homo sapien
ctggctttaccagcacaacctccat

SEQ ID NO: 1275981 - DNA, 25 bp, Homo sapien
gaagccctatgaatccttcccgtct

SEQ ID NO: 1275982 - DNA, 25 bp, Homo sapien
gggcaccctcgcttgggaagcccta

SEQ ID NO: 1275983 - DNA, 25 bp, Homo sapien
cctgagccctaggaccacgcaatat

SEQ ID NO: 1275984 - DNA, 25 bp, Homo sapien
aataagcatctagaaagggacacga

SEQ ID NO: 1275985 - DNA, 25 bp, Homo sapien
tctctgaggccattcgggcatctgt

SEQ ID NO: 1275986 - DNA, 25 bp, Homo sapien
tgtagagtcccacaaggacttctct

SEQ ID NO: 1275987 - DNA, 25 bp, Homo sapien
agagtcccacaaggacttctctgag

SEQ ID NO: 1275988 - DNA, 25 bp, Homo sapien
taaacaacagaacccatgacgcggg

SEQ ID NO: 1275989 - DNA, 25 bp, Homo sapien
agggatcctgccatttgtcttgtag

SEQ ID NO: 1275990 - DNA, 25 bp, Homo sapien
gtcttgtagagtctttggctcccac

SEQ ID NO: 1275991 - DNA, 25 bp, Homo sapien
tttgtcttgtagagtctttggctcc

SEQ ID NO: 1275992 - DNA, 25 bp, Homo sapien
gggatcctgccatttgtcttgtaga

SEQ ID NO: 1275993 - DNA, 25 bp, Homo sapien
cctggtcgatggagtgcggaggcag

SEQ ID NO: 1275994 - DNA, 25 bp, Homo sapien
cacccctgcataggtgcgcaggaac

SEQ ID NO: 1275995 - DNA, 25 bp, Homo sapien
cgatggagtgcggaggcagctggct

SEQ ID NO: 1275996 - DNA, 25 bp, Homo sapien
ggctgttgaccacccctgcataggt

SEQ ID NO: 1275997 - DNA, 25 bp, Homo sapien
gcatgagcagcactcggaccttctg

SEQ ID NO: 1275998 - DNA, 25 bp, Homo sapien
ttgatcccatcttccgcagcatgag

SEQ ID NO: 1275999 - DNA, 25 bp, Homo sapien
tgaatgtacatctcctccggactct

SEQ ID NO: 1276000 - DNA, 25 bp, Homo sapien
ttcccgggagctccctcgcggttca

SEQ ID NO: 1276001 - DNA, 25 bp, Homo sapien
ctgaactgagcagctctgttctcca

SEQ ID NO: 1276002 - DNA, 25 bp, Homo sapien
gctgaactgagcagctctgttctcc

SEQ ID NO: 1276003 - DNA, 25 bp, Homo sapien
ggctgaactgagcagctctgttctc

SEQ ID NO: 1276004 - DNA, 25 bp, Homo sapien
aggctgaactgagcagctctgttct

SEQ ID NO: 1276005 - DNA, 25 bp, Homo sapien
tgtccacatgcagcagggacctaac

SEQ ID NO: 1276006 - DNA, 25 bp, Homo sapien
aaggccagcagcgtgtccacatgca

SEQ ID NO: 1276007 - DNA, 25 bp, Homo sapien
cagcgtgtccacatgcagcagggac

SEQ ID NO: 1276008 - DNA, 25 bp, Homo sapien
gccagcagcgtgtccacatgcagca

SEQ ID NO: 1276009 - DNA, 25 bp, Homo sapien
ctgtagaaagtccccaggagagaag

SEQ ID NO: 1276010 - DNA, 25 bp, Homo sapien
ggagagaagtccagagccccctccc

SEQ ID NO: 1276011 - DNA, 25 bp, Homo sapien
aagtccccaggagagaagtccagag

SEQ ID NO: 1276012 - DNA, 25 bp, Homo sapien
gtccccaggagagaagtccagagcc

SEQ ID NO: 1276013 - DNA, 25 bp, Homo sapien
tcactagatgtggagcactgccaat

SEQ ID NO: 1276014 - DNA, 25 bp, Homo sapien
cactgccaatctggagctggactcc

SEQ ID NO: 1276015 - DNA, 25 bp, Homo sapien
gatgatgatgcggtctccacctctt

SEQ ID NO: 1276016 - DNA, 25 bp, Homo sapien
cccgaacctgggtgtggatgatgat

SEQ ID NO: 1276017 - DNA, 25 bp, Homo sapien
acttcaggcaaacaggtgctcaact

SEQ ID NO: 1276018 - DNA, 25 bp, Homo sapien
tcaggcaaacaggtgctcaactgtg

SEQ ID NO: 1276019 - DNA, 25 bp, Homo sapien
ttcaggcaaacaggtgctcaactgt

SEQ ID NO: 1276020 - DNA, 25 bp, Homo sapien
tgggcagaagtaggaaggtgccgcc

SEQ ID NO: 1276021 - DNA, 25 bp, Homo sapien
tgtgcaccgtgaggccagtgattgc

SEQ ID NO: 1276022 - DNA, 25 bp, Homo sapien
ctactaccaacagcgtgaaagcgtt

SEQ ID NO: 1276023 - DNA, 25 bp, Homo sapien
ccatgtaagacagtaagcacgctcc

SEQ ID NO: 1276024 - DNA, 25 bp, Homo sapien
ggtcaatgttcccagtttacagagg

SEQ ID NO: 1276025 - DNA, 25 bp, Homo sapien
tcaaactgccaagggttccacaacc

SEQ ID NO: 1276026 - DNA, 25 bp, Homo sapien
aatggactcaagaaggatttactga

SEQ ID NO: 1276027 - DNA, 25 bp, Homo sapien
cttaagtagacactaaatggactca

SEQ ID NO: 1276028 - DNA, 25 bp, Homo sapien
tgactgagtggctgaggaaaccaca

SEQ ID NO: 1276029 - DNA, 25 bp, Homo sapien
ttgggatcaagtcagcactacggtg

SEQ ID NO: 1276030 - DNA, 25 bp, Homo sapien
tccaacctgccaagcggagggcatt

SEQ ID NO: 1276031 - DNA, 25 bp, Homo sapien
aacacggtgacaagctagttccggg

SEQ ID NO: 1276032 - DNA, 25 bp, Homo sapien
tccagggccagaatcgaaacacggt

SEQ ID NO: 1276033 - DNA, 25 bp, Homo sapien
agtgctgtcaccgttgtcaagtctg

SEQ ID NO: 1276034 - DNA, 25 bp, Homo sapien
gctgtcaccgttgtcaagtctgtcg

SEQ ID NO: 1276035 - DNA, 25 bp, Homo sapien
tcaccgttgtcaagtctgtcggtcc

SEQ ID NO: 1276036 - DNA, 25 bp, Homo sapien
ccagtgctgtcaccgttgtcaagtc

SEQ ID NO: 1276037 - DNA, 25 bp, Homo sapien
cagttaactggatgccctttcctgg

SEQ ID NO: 1276038 - DNA, 25 bp, Homo sapien
gaccagctaagctcagttaactgga

SEQ ID NO: 1276039 - DNA, 25 bp, Homo sapien
taagctcagttaactggatgccctt

SEQ ID NO: 1276040 - DNA, 25 bp, Homo sapien
cagctaagctcagttaactggatgc

SEQ ID NO: 1276041 - DNA, 25 bp, Homo sapien
agcagggagggagagatcagccagc

SEQ ID NO: 1276042 - DNA, 25 bp, Homo sapien
acagcagggagggagagatcagcca

SEQ ID NO: 1276043 - DNA, 25 bp, Homo sapien
gggagggagagatcagccagcagcc

SEQ ID NO: 1276044 - DNA, 25 bp, Homo sapien
agggagggagagatcagccagcagc

SEQ ID NO: 1276045 - DNA, 25 bp, Homo sapien
gaagagagcaccattgtagacccca

SEQ ID NO: 1276046 - DNA, 25 bp, Homo sapien
tctgaaaggaagactcaggctgccc

SEQ ID NO: 1276047 - DNA, 25 bp, Homo sapien
tgcgtatgtacatcctagagagagg

SEQ ID NO: 1276048 - DNA, 25 bp, Homo sapien
ttcagagtcagctgcccaaggaacc

SEQ ID NO: 1276049 - DNA, 25 bp, Homo sapien
aggtctcaaccgctctgccctgttg

SEQ ID NO: 1276050 - DNA, 25 bp, Homo sapien
tgttcaaggtctcaaccgctctgcc

SEQ ID NO: 1276051 - DNA, 25 bp, Homo sapien
tccacatcggagcaggatggaaccc

SEQ ID NO: 1276052 - DNA, 25 bp, Homo sapien
tgtcatggcccagctagtccacatc

SEQ ID NO: 1276053 - DNA, 25 bp, Homo sapien
tggcaggcctgctctgacagcctct

SEQ ID NO: 1276054 - DNA, 25 bp, Homo sapien
gctctgacagcctcttgaaattcag

SEQ ID NO: 1276055 - DNA, 25 bp, Homo sapien
cctgctctgacagcctcttgaaatt

SEQ ID NO: 1276056 - DNA, 25 bp, Homo sapien
ctggcaggcctgctctgacagcctc

SEQ ID NO: 1276057 - DNA, 25 bp, Homo sapien
caatgcaaacaggaaggcatgtgga

SEQ ID NO: 1276058 - DNA, 25 bp, Homo sapien
gctgccccagaacactgaagatcct

SEQ ID NO: 1276059 - DNA, 25 bp, Homo sapien
tgttctaaccaaggggacgtgctgg

SEQ ID NO: 1276060 - DNA, 25 bp, Homo sapien
gctatgtcttcaggctctactgttc

SEQ ID NO: 1276061 - DNA, 25 bp, Homo sapien
tctccacaaggtacataaggtccct

SEQ ID NO: 1276062 - DNA, 25 bp, Homo sapien
gtttctccacaaggtacataaggtc

SEQ ID NO: 1276063 - DNA, 25 bp, Homo sapien
ttctccacaaggtacataaggtccc

SEQ ID NO: 1276064 - DNA, 25 bp, Homo sapien
ccacaaggtacataaggtcccttca

SEQ ID NO: 1276065 - DNA, 25 bp, Homo sapien
gacaaaaactcctgatgggtcacaa

SEQ ID NO: 1276066 - DNA, 25 bp, Homo sapien
tgtccagtctgaaggcaaggacagt

SEQ ID NO: 1276067 - DNA, 25 bp, Homo sapien
gatgggtcacaaggccttgtccagt

SEQ ID NO: 1276068 - DNA, 25 bp, Homo sapien
cggtatcgggacaaaaactcctgat

SEQ ID NO: 1276069 - DNA, 25 bp, Homo sapien
cagcacctgatacaataggaatcca

SEQ ID NO: 1276070 - DNA, 25 bp, Homo sapien
tgttcaaggttaaagccaccacaga

SEQ ID NO: 1276071 - DNA, 25 bp, Homo sapien
agaaaagacgcacttgctccagaag

SEQ ID NO: 1276072 - DNA, 25 bp, Homo sapien
aggaatccacccacaaaccctggag

SEQ ID NO: 1276073 - DNA, 25 bp, Homo sapien
ctgcttctagaaaagtcactgaagt

SEQ ID NO: 1276074 - DNA, 25 bp, Homo sapien
tgtgggtatatgtcaaggtacacgc

SEQ ID NO: 1276075 - DNA, 25 bp, Homo sapien
caaggtacacgcacactgctgcttt

SEQ ID NO: 1276076 - DNA, 25 bp, Homo sapien
tggagtcccactgttcacattttgc

SEQ ID NO: 1276077 - DNA, 25 bp, Homo sapien
gctctgtgctgtgggtatatgtcaa

SEQ ID NO: 1276078 - DNA, 25 bp, Homo sapien
actgctctgtgcaggaaagcagaac

SEQ ID NO: 1276079 - DNA, 25 bp, Homo sapien
atcccaccacaaactctggaagact

SEQ ID NO: 1276080 - DNA, 25 bp, Homo sapien
gaactgggggccagcttgcttgcct

SEQ ID NO: 1276081 - DNA, 25 bp, Homo sapien
ggccagcttgcttgcctgtaagccc

SEQ ID NO: 1276082 - DNA, 25 bp, Homo sapien
tcaatgagtcattagaaggaaggag

SEQ ID NO: 1276083 - DNA, 25 bp, Homo sapien
gccacgatattcctagtacctatga

SEQ ID NO: 1276084 - DNA, 25 bp, Homo sapien
tgatggtgtccagattgtaataaag

SEQ ID NO: 1276085 - DNA, 25 bp, Homo sapien
tttgtcctgcttgccacgatattcc

SEQ ID NO: 1276086 - DNA, 25 bp, Homo sapien
gacaaggagagcctattccagccgc

SEQ ID NO: 1276087 - DNA, 25 bp, Homo sapien
ccttctcagagctaaagttatgacc

SEQ ID NO: 1276088 - DNA, 25 bp, Homo sapien
aatttggcccctgctgattcatcac

SEQ ID NO: 1276089 - DNA, 25 bp, Homo sapien
ccaggaaaagttcccatgcagtgac

SEQ ID NO: 1276090 - DNA, 25 bp, Homo sapien
gaccgtgttcttggctacgtccata

SEQ ID NO: 1276091 - DNA, 25 bp, Homo sapien
cataggtgctcaatcagtcattcaa

SEQ ID NO: 1276092 - DNA, 25 bp, Homo sapien
tacgtccatagcatccgcaacagtg

SEQ ID NO: 1276093 - DNA, 25 bp, Homo sapien
gataaacttcataagagcatgcctc

SEQ ID NO: 1276094 - DNA, 25 bp, Homo sapien
agcgcgcggcggcctgttccggggc

SEQ ID NO: 1276095 - DNA, 25 bp, Homo sapien
aggggcagcgggtccggcgcgcagc

SEQ ID NO: 1276096 - DNA, 25 bp, Homo sapien
caggggcagcgggtccggcgcgcag

SEQ ID NO: 1276097 - DNA, 25 bp, Homo sapien
cgcggcggcctgttccggggcgtgc

SEQ ID NO: 1276098 - DNA, 25 bp, Homo sapien
ccgctccgagagtcaccgcggtggg

SEQ ID NO: 1276099 - DNA, 25 bp, Homo sapien
tcccgctccgagagtcaccgcggtg

SEQ ID NO: 1276100 - DNA, 25 bp, Homo sapien
ctcccgctccgagagtcaccgcggt

SEQ ID NO: 1276101 - DNA, 25 bp, Homo sapien
gcctcccgctccgagagtcaccgcg

SEQ ID NO: 1276102 - DNA, 25 bp, Homo sapien
tgcatttcccaaaagcgcttacatc

SEQ ID NO: 1276103 - DNA, 25 bp, Homo sapien
tgtgctgggctttaacttgggttca

SEQ ID NO: 1276104 - DNA, 25 bp, Homo sapien
ttaacaggaagctaatcttgctggg

SEQ ID NO: 1276105 - DNA, 25 bp, Homo sapien
gagtctagcaggtagttcatgtaac

SEQ ID NO: 1276106 - DNA, 25 bp, Homo sapien
attatccatcattcactgtaataag

SEQ ID NO: 1276107 - DNA, 25 bp, Homo sapien
catcattcactgtaataagatacca

SEQ ID NO: 1276108 - DNA, 25 bp, Homo sapien
ctatagtaatttcagattatccatc

SEQ ID NO: 1276109 - DNA, 25 bp, Homo sapien
tctatagtaatttcagattatccat

SEQ ID NO: 1276110 - DNA, 25 bp, Homo sapien
ttcattcaatggtccgattggacac

SEQ ID NO: 1276111 - DNA, 25 bp, Homo sapien
gattggacacttgctcattggaact

SEQ ID NO: 1276112 - DNA, 25 bp, Homo sapien
caaagatatctgaacacctagaaga

SEQ ID NO: 1276113 - DNA, 25 bp, Homo sapien
caagaatgttgaaaggttagctgcc

SEQ ID NO: 1276114 - DNA, 25 bp, Homo sapien
tgggcactgcaaactaggccacttt

SEQ ID NO: 1276115 - DNA, 25 bp, Homo sapien
gattccagattcaggtaactctctt

SEQ ID NO: 1276116 - DNA, 25 bp, Homo sapien
tctggtctactattgcagggtaagg

SEQ ID NO: 1276117 - DNA, 25 bp, Homo sapien
cactttgtcagccagtacagtggcg

SEQ ID NO: 1276118 - DNA, 25 bp, Homo sapien
tgctataatgttggttaaacttgaa

SEQ ID NO: 1276119 - DNA, 25 bp, Homo sapien
ttgaaaatatgatgatgtcccggtg

SEQ ID NO: 1276120 - DNA, 25 bp, Homo sapien
aatatgatgatgtcccggtgtggta

SEQ ID NO: 1276121 - DNA, 25 bp, Homo sapien
caaatcatcaacagataccggataa

SEQ ID NO: 1276122 - DNA, 25 bp, Homo sapien
tgttctgccaacgaatggtacactt

SEQ ID NO: 1276123 - DNA, 25 bp, Homo sapien
ggcatcagtgtagcggaggtcctct

SEQ ID NO: 1276124 - DNA, 25 bp, Homo sapien
ttaagttccaaataaggcatcagtg

SEQ ID NO: 1276125 - DNA, 25 bp, Homo sapien
gctattgttagcagtcggaggagaa

SEQ ID NO: 1276126 - DNA, 25 bp, Homo sapien
cagagacatgtaaatactcaggaga

SEQ ID NO: 1276127 - DNA, 25 bp, Homo sapien
taagctaatatacacgcatagggac

SEQ ID NO: 1276128 - DNA, 25 bp, Homo sapien
gcatatttgagcatacagagacatg

SEQ ID NO: 1276129 - DNA, 25 bp, Homo sapien
cgcatagggacacatctgcatattt

SEQ ID NO: 1276130 - DNA, 25 bp, Homo sapien
attgttccaacctcaaaattccgag

SEQ ID NO: 1276131 - DNA, 25 bp, Homo sapien
aattccgagatacaacgggccccat

SEQ ID NO: 1276132 - DNA, 25 bp, Homo sapien
caacgcaggcggctaagtcacttta

SEQ ID NO: 1276133 - DNA, 25 bp, Homo sapien
tttaggaaacgctcaacagggctcc

SEQ ID NO: 1276134 - DNA, 25 bp, Homo sapien
gagtccctctgtcgcaacaagttca

SEQ ID NO: 1276135 - DNA, 25 bp, Homo sapien
tcaggatcactcaagcaggtaaccg

SEQ ID NO: 1276136 - DNA, 25 bp, Homo sapien
taaccgcacacaacgcacaatgatg

SEQ ID NO: 1276137 - DNA, 25 bp, Homo sapien
gaagtctattgagcttgcgtcactg

SEQ ID NO: 1276138 - DNA, 25 bp, Homo sapien
caatgttacaagcttctgcaccatg

SEQ ID NO: 1276139 - DNA, 25 bp, Homo sapien
tcaatgttacaagcttctgcaccat

SEQ ID NO: 1276140 - DNA, 25 bp, Homo sapien
atcaatgttacaagcttctgcacca

SEQ ID NO: 1276141 - DNA, 25 bp, Homo sapien
gatcaatgttacaagcttctgcacc

SEQ ID NO: 1276142 - DNA, 25 bp, Homo sapien
acctcaaaacttgccagagcaagaa

SEQ ID NO: 1276143 - DNA, 25 bp, Homo sapien
aacctcaaaacttgccagagcaaga

SEQ ID NO: 1276144 - DNA, 25 bp, Homo sapien
ggtctgtagagactttctcaaactg

SEQ ID NO: 1276145 - DNA, 25 bp, Homo sapien
gcacctgcatttgctgacaagaagg

SEQ ID NO: 1276146 - DNA, 25 bp, Homo sapien
caaggtctgtagagactttctcaaa

SEQ ID NO: 1276147 - DNA, 25 bp, Homo sapien
caaactggctgagtatagcacctgc

SEQ ID NO: 1276148 - DNA, 25 bp, Homo sapien
gtaaatgttacaggtggttctagaa

SEQ ID NO: 1276149 - DNA, 25 bp, Homo sapien
agttgagtgggtaaatgttacaggt

SEQ ID NO: 1276150 - DNA, 25 bp, Homo sapien
tggttctagaaaccaggtaagaatg

SEQ ID NO: 1276151 - DNA, 25 bp, Homo sapien
agaatgtcttaggaggctgggcacc

SEQ ID NO: 1276152 - DNA, 25 bp, Homo sapien
cagctttcctaccatcagatctcta

SEQ ID NO: 1276153 - DNA, 25 bp, Homo sapien
cctaagagctgttagtatctccact

SEQ ID NO: 1276154 - DNA, 25 bp, Homo sapien
tgttgagtgtacaggtctctttcca

SEQ ID NO: 1276155 - DNA, 25 bp, Homo sapien
ttctctccaagtttcctaagagctg

SEQ ID NO: 1276156 - DNA, 25 bp, Homo sapien
ctctgctaaccttgtccgaagctga

SEQ ID NO: 1276157 - DNA, 25 bp, Homo sapien
gcctggctgatagctgcctgaatag

SEQ ID NO: 1276158 - DNA, 25 bp, Homo sapien
ccttgtccgaagctgacctggttgt

SEQ ID NO: 1276159 - DNA, 25 bp, Homo sapien
ttaaaggcctggctgatagctgcct

SEQ ID NO: 1276160 - DNA, 25 bp, Homo sapien
ttctttagtgaatcattaaattcac

SEQ ID NO: 1276161 - DNA, 25 bp, Homo sapien
cacttagttgctccagagtttcctt

SEQ ID NO: 1276162 - DNA, 25 bp, Homo sapien
attcacttagttgctccagagtttc

SEQ ID NO: 1276163 - DNA, 25 bp, Homo sapien
taaattcacttagttgctccagagt

SEQ ID NO: 1276164 - DNA, 25 bp, Homo sapien
tcctccagatcttgtaattgttgca

SEQ ID NO: 1276165 - DNA, 25 bp, Homo sapien
ttcctccagatcttgtaattgttgc

SEQ ID NO: 1276166 - DNA, 25 bp, Homo sapien
ccagttcttgacgttccgagtgtca

SEQ ID NO: 1276167 - DNA, 25 bp, Homo sapien
tctgatctctgcacagtgccgaccg

SEQ ID NO: 1276168 - DNA, 25 bp, Homo sapien
aacctccagttcttgacgttccgag

SEQ ID NO: 1276169 - DNA, 25 bp, Homo sapien
gccgaccggtctcaaattgcacaaa

SEQ ID NO: 1276170 - DNA, 25 bp, Homo sapien
aggctcaaagttcaaaccacctcgg

SEQ ID NO: 1276171 - DNA, 25 bp, Homo sapien
gagtttcttcctagcgaggccgaga

SEQ ID NO: 1276172 - DNA, 25 bp, Homo sapien
ggatggcgtcaaacccagaggcttg

SEQ ID NO: 1276173 - DNA, 25 bp, Homo sapien
agataacttccacttgagcagcctg

SEQ ID NO: 1276174 - DNA, 25 bp, Homo sapien
cagaggtagccgtaaacccatggtc

SEQ ID NO: 1276175 - DNA, 25 bp, Homo sapien
tgaccgcccgccagtcccagagttt

SEQ ID NO: 1276176 - DNA, 25 bp, Homo sapien
gccagtcccagagtttagggccagg

SEQ ID NO: 1276177 - DNA, 25 bp, Homo sapien
cctgtgccgcctgaccgcccgccag

SEQ ID NO: 1276178 - DNA, 25 bp, Homo sapien
ctgacaaaaactgggacaacctcct

SEQ ID NO: 1276179 - DNA, 25 bp, Homo sapien
agatgttccactcgctggcgtccgg

SEQ ID NO: 1276180 - DNA, 25 bp, Homo sapien
cctgagaaactggtcgctttttgtc

SEQ ID NO: 1276181 - DNA, 25 bp, Homo sapien
aatgagagtgcgaccgagatgttcc

SEQ ID NO: 1276182 - DNA, 25 bp, Homo sapien
tggtgatctccggtagcactcgggc

SEQ ID NO: 1276183 - DNA, 25 bp, Homo sapien
tggagtctttagagtcgaatatgac

SEQ ID NO: 1276184 - DNA, 25 bp, Homo sapien
tagagtcgaatatgacccgaggcaa

SEQ ID NO: 1276185 - DNA, 25 bp, Homo sapien
tctttagagtcgaatatgacccgag

SEQ ID NO: 1276186 - DNA, 25 bp, Homo sapien
cgaatatgacccgaggcaagctcat

SEQ ID NO: 1276187 - DNA, 25 bp, Homo sapien
gaagttaagctgctcaccgacagga

SEQ ID NO: 1276188 - DNA, 25 bp, Homo sapien
ctgtagaagttaagctgctcaccga

SEQ ID NO: 1276189 - DNA, 25 bp, Homo sapien
gttaagctgctcaccgacaggagca

SEQ ID NO: 1276190 - DNA, 25 bp, Homo sapien
gctcaccgacaggagcacagacaag

SEQ ID NO: 1276191 - DNA, 25 bp, Homo sapien
tgcagaagacatccacttcagtgcc

SEQ ID NO: 1276192 - DNA, 25 bp, Homo sapien
caaatgcagaagacatccacttcag

SEQ ID NO: 1276193 - DNA, 25 bp, Homo sapien
aatggctccatctgaacaaactgca

SEQ ID NO: 1276194 - DNA, 25 bp, Homo sapien
ttcagtgcccgtggcaatggctcca

SEQ ID NO: 1276195 - DNA, 25 bp, Homo sapien
ggctgcaatattgggaagatctggg

SEQ ID NO: 1276196 - DNA, 25 bp, Homo sapien
aaagatggtattactaaccaggttg

SEQ ID NO: 1276197 - DNA, 25 bp, Homo sapien
gtattactaaccaggttgtacagga

SEQ ID NO: 1276198 - DNA, 25 bp, Homo sapien
caggttgtacaggagagattggctg

SEQ ID NO: 1276199 - DNA, 25 bp, Homo sapien
ccagcagtgcaagcgataggccgtg

SEQ ID NO: 1276200 - DNA, 25 bp, Homo sapien
agtgcaagcgataggccgtgtgggc

SEQ ID NO: 1276201 - DNA, 25 bp, Homo sapien
aagcgataggccgtgtgggccaaac

SEQ ID NO: 1276202 - DNA, 25 bp, Homo sapien
agccagcagtgcaagcgataggccg

SEQ ID NO: 1276203 - DNA, 25 bp, Homo sapien
cagacaaacgttgctgtatggagct

SEQ ID NO: 1276204 - DNA, 25 bp, Homo sapien
gcattttctcacacggcacttgtag

SEQ ID NO: 1276205 - DNA, 25 bp, Homo sapien
caagtagccccaagctcttgtaggg

SEQ ID NO: 1276206 - DNA, 25 bp, Homo sapien
tacagttgactagctgcatccctga

SEQ ID NO: 1276207 - DNA, 25 bp, Homo sapien
gattataggtgtataggtgcgtgcc

SEQ ID NO: 1276208 - DNA, 25 bp, Homo sapien
accgcccgcctgtctcgctttgtca

SEQ ID NO: 1276209 - DNA, 25 bp, Homo sapien
ccaagtgaattagggcagtggtccc

SEQ ID NO: 1276210 - DNA, 25 bp, Homo sapien
agctcactgtaactccaccgcttgg

SEQ ID NO: 1276211 - DNA, 25 bp, Homo sapien
tggcctttagagcgcttaatgtgct

SEQ ID NO: 1276212 - DNA, 25 bp, Homo sapien
ctggcctttagagcgcttaatgtgc

SEQ ID NO: 1276213 - DNA, 25 bp, Homo sapien
gatgctggcctttagagcgcttaat

SEQ ID NO: 1276214 - DNA, 25 bp, Homo sapien
tgctggcctttagagcgcttaatgt

SEQ ID NO: 1276215 - DNA, 25 bp, Homo sapien
ttggcaagactgttgccattgttca

SEQ ID NO: 1276216 - DNA, 25 bp, Homo sapien
tggcaagactgttgccattgttcat

SEQ ID NO: 1276217 - DNA, 25 bp, Homo sapien
cttggcaagactgttgccattgttc

SEQ ID NO: 1276218 - DNA, 25 bp, Homo sapien
tgatgacttggtgcacctcctggag

SEQ ID NO: 1276219 - DNA, 25 bp, Homo sapien
tggagtggcactataagggtctgac

SEQ ID NO: 1276220 - DNA, 25 bp, Homo sapien
tgactggcctcaacaaagcagaagc

SEQ ID NO: 1276221 - DNA, 25 bp, Homo sapien
tgtgtcacctcagggcggaagacag

SEQ ID NO: 1276222 - DNA, 25 bp, Homo sapien
attgctggtgggcagactacactgt

SEQ ID NO: 1276223 - DNA, 25 bp, Homo sapien
tgctggtgggcagactacactgtag

SEQ ID NO: 1276224 - DNA, 25 bp, Homo sapien
ttgctggtgggcagactacactgta

SEQ ID NO: 1276225 - DNA, 25 bp, Homo sapien
tcttctgtaagagtctgaaggacac

SEQ ID NO: 1276226 - DNA, 25 bp, Homo sapien
gaggctctcccggaaggggccatca

SEQ ID NO: 1276227 - DNA, 25 bp, Homo sapien
ttctggcacagtcgagccttgggag

SEQ ID NO: 1276228 - DNA, 25 bp, Homo sapien
gggccatcatggagctgagcctgcc

SEQ ID NO: 1276229 - DNA, 25 bp, Homo sapien
tgtaggcatccgaagttgttgagcg

SEQ ID NO: 1276230 - DNA, 25 bp, Homo sapien
ccgaagttgttgagcgtatctggag

SEQ ID NO: 1276231 - DNA, 25 bp, Homo sapien
ctccacgtgtcacagtgaccacagc

SEQ ID NO: 1276232 - DNA, 25 bp, Homo sapien
acagctgtaggcatccgaagttgtt

SEQ ID NO: 1276233 - DNA, 25 bp, Homo sapien
gcgcctggttcttgttatgcacaaa

SEQ ID NO: 1276234 - DNA, 25 bp, Homo sapien
tgcctacctgtatgtgcgcctggtt

SEQ ID NO: 1276235 - DNA, 25 bp, Homo sapien
caggcagaacctaggcagggaacct

SEQ ID NO: 1276236 - DNA, 25 bp, Homo sapien
agatgatccgtctgcttcagtctct

SEQ ID NO: 1276237 - DNA, 25 bp, Homo sapien
gctactgagttcaggaggctcctag

SEQ ID NO: 1276238 - DNA, 25 bp, Homo sapien
ttcgagggtggttaagcagctggct

SEQ ID NO: 1276239 - DNA, 25 bp, Homo sapien
gtgtgtcctatgctggcatgggtac

SEQ ID NO: 1276240 - DNA, 25 bp, Homo sapien
ttaattatgagttggaacaggtgtg

SEQ ID NO: 1276241 - DNA, 25 bp, Homo sapien
tgtaccgcagcccaggtatcactga

SEQ ID NO: 1276242 - DNA, 25 bp, Homo sapien
caggctgccttgaactatcatcttg

SEQ ID NO: 1276243 - DNA, 25 bp, Homo sapien
gccttgaactatcatcttgccactg

SEQ ID NO: 1276244 - DNA, 25 bp, Homo sapien
gcccaggtatcactgagaacatgtc

SEQ ID NO: 1276245 - DNA, 25 bp, Homo sapien
ggactgaagcgatctactccacctt

SEQ ID NO: 1276246 - DNA, 25 bp, Homo sapien
tttgctctgtttctaacaggcgagg

SEQ ID NO: 1276247 - DNA, 25 bp, Homo sapien
actctttgctctgtttctaacaggc

SEQ ID NO: 1276248 - DNA, 25 bp, Homo sapien
tggactgaagcgatctactccacct

SEQ ID NO: 1276249 - DNA, 25 bp, Homo sapien
cagtaaggaacatcaccaaagattg

SEQ ID NO: 1276250 - DNA, 25 bp, Homo sapien
caaagattgttgatgggctgggaat

SEQ ID NO: 1276251 - DNA, 25 bp, Homo sapien
taaggaacatcaccaaagattgttg

SEQ ID NO: 1276252 - DNA, 25 bp, Homo sapien
acatcaccaaagattgttgatgggc

SEQ ID NO: 1276253 - DNA, 25 bp, Homo sapien
atgctgaggctttatgattcagcct

SEQ ID NO: 1276254 - DNA, 25 bp, Homo sapien
gtctccgtccatgtgtaccaatgtt

SEQ ID NO: 1276255 - DNA, 25 bp, Homo sapien
ccgtctccgtccatgtgtaccaatg

SEQ ID NO: 1276256 - DNA, 25 bp, Homo sapien
gctttatgattcagcctgtcaccca

SEQ ID NO: 1276257 - DNA, 25 bp, Homo sapien
agctctttgggaggttgaagtggat

SEQ ID NO: 1276258 - DNA, 25 bp, Homo sapien
tctttgggaggttgaagtggatgga

SEQ ID NO: 1276259 - DNA, 25 bp, Homo sapien
catggcgaaaccccaatctttacca

SEQ ID NO: 1276260 - DNA, 25 bp, Homo sapien
ggaggttgaagtggatggatcacct

SEQ ID NO: 1276261 - DNA, 25 bp, Homo sapien
taatgctacgtgacagtttgaaacc

SEQ ID NO: 1276262 - DNA, 25 bp, Homo sapien
gataagcctctcttcggcatctgag

SEQ ID NO: 1276263 - DNA, 25 bp, Homo sapien
gagcaaacgctgagacctgaaagga

SEQ ID NO: 1276264 - DNA, 25 bp, Homo sapien
gggagtatgtctgccggtttcaaca

SEQ ID NO: 1276265 - DNA, 25 bp, Homo sapien
ttataccgccatatgcacttgtcgt

SEQ ID NO: 1276266 - DNA, 25 bp, Homo sapien
cgccatatgcacttgtcgttttgaa

SEQ ID NO: 1276267 - DNA, 25 bp, Homo sapien
taccgccatatgcacttgtcgtttt

SEQ ID NO: 1276268 - DNA, 25 bp, Homo sapien
tataccgccatatgcacttgtcgtt

SEQ ID NO: 1276269 - DNA, 25 bp, Homo sapien
ttatgggcatggatggtcctgtaga

SEQ ID NO: 1276270 - DNA, 25 bp, Homo sapien
cagaaatgaaattgggctcttccca

SEQ ID NO: 1276271 - DNA, 25 bp, Homo sapien
gccagaaatgaaattgggctcttcc

SEQ ID NO: 1276272 - DNA, 25 bp, Homo sapien
tctctttatgggcatggatggtcct

SEQ ID NO: 1276273 - DNA, 25 bp, Homo sapien
aagtgatccgcccaacttgacttcc

SEQ ID NO: 1276274 - DNA, 25 bp, Homo sapien
tggtgggatctcaggttcattgcag

SEQ ID NO: 1276275 - DNA, 25 bp, Homo sapien
cctagtagcggggatcacaggcgca

SEQ ID NO: 1276276 - DNA, 25 bp, Homo sapien
tagtagcggggatcacaggcgcata

SEQ ID NO: 1276277 - DNA, 25 bp, Homo sapien
gagactacagttgttcgctgccaca

SEQ ID NO: 1276278 - DNA, 25 bp, Homo sapien
gtaatgacatgatcgtggcccactg

SEQ ID NO: 1276279 - DNA, 25 bp, Homo sapien
cttaggtgtctaaaatgactcaaac

SEQ ID NO: 1276280 - DNA, 25 bp, Homo sapien
cacatatatcttaagttggtgagga

SEQ ID NO: 1276281 - DNA, 25 bp, Homo sapien
gaaacctaatcagacagagacactt

SEQ ID NO: 1276282 - DNA, 25 bp, Homo sapien
tctgatttcatcttagagcatggtc

SEQ ID NO: 1276283 - DNA, 25 bp, Homo sapien
aaggtaggaaacaatgctgtgaaac

SEQ ID NO: 1276284 - DNA, 25 bp, Homo sapien
cattcgggaagatggaggaacccta

SEQ ID NO: 1276285 - DNA, 25 bp, Homo sapien
tggatcctgggacctcacttagaat

SEQ ID NO: 1276286 - DNA, 25 bp, Homo sapien
tagaataactaagcacggtgctcgc

SEQ ID NO: 1276287 - DNA, 25 bp, Homo sapien
tctgtgtatctgaaagcaagccagg

SEQ ID NO: 1276288 - DNA, 25 bp, Homo sapien
ggtgctatccataaccaagagttgg

SEQ ID NO: 1276289 - DNA, 25 bp, Homo sapien
gagaagtcaagatcacatccaagtt

SEQ ID NO: 1276290 - DNA, 25 bp, Homo sapien
gattccaaaagacgatgaagcaagg

SEQ ID NO: 1276291 - DNA, 25 bp, Homo sapien
aatggccagccgaaaagtacgcgct

SEQ ID NO: 1276292 - DNA, 25 bp, Homo sapien
tcaactacgttggagaagcaattct

SEQ ID NO: 1276293 - DNA, 25 bp, Homo sapien
attttatttggttgtggtctcagtt

SEQ ID NO: 1276294 - DNA, 25 bp, Homo sapien
gcattagtaatgcttgtagacactc

SEQ ID NO: 1276295 - DNA, 25 bp, Homo sapien
aactattctttggttagcattagta

SEQ ID NO: 1276296 - DNA, 25 bp, Homo sapien
caaggaaggcgaagtcctgatgatg

SEQ ID NO: 1276297 - DNA, 25 bp, Homo sapien
tgaatgtacttgataggctgcttca

SEQ ID NO: 1276298 - DNA, 25 bp, Homo sapien
tgctttcatagctagaacagttgaa

SEQ ID NO: 1276299 - DNA, 25 bp, Homo sapien
cccttaaaaagagaagctttgagag

SEQ ID NO: 1276300 - DNA, 25 bp, Homo sapien
tcaatgcattttgtgtaaacccagt

SEQ ID NO: 1276301 - DNA, 25 bp, Homo sapien
catttgtcctgtactgttagagcca

SEQ ID NO: 1276302 - DNA, 25 bp, Homo sapien
ggtataatttcacaaagcggaatgg

SEQ ID NO: 1276303 - DNA, 25 bp, Homo sapien
cctgtgtcctggtgaaccttaatga

SEQ ID NO: 1276304 - DNA, 25 bp, Homo sapien
tcacacctatgtctgcattaaaggc

SEQ ID NO: 1276305 - DNA, 25 bp, Homo sapien
taagaagaggtacaagtcactggct

SEQ ID NO: 1276306 - DNA, 25 bp, Homo sapien
tgaagctttttgcatcgccatgatg

SEQ ID NO: 1276307 - DNA, 25 bp, Homo sapien
agtggtgaggtcatccacagcggcc

SEQ ID NO: 1276308 - DNA, 25 bp, Homo sapien
acggagcccctcaaaaacaatggca

SEQ ID NO: 1276309 - DNA, 25 bp, Homo sapien
taatgttggaaaactccaacttgga

SEQ ID NO: 1276310 - DNA, 25 bp, Homo sapien
ttagaaagcgatggtaatgaccagc

SEQ ID NO: 1276311 - DNA, 25 bp, Homo sapien
cagttctgtttacgttaatgttgga

SEQ ID NO: 1276312 - DNA, 25 bp, Homo sapien
tgatttctacactgcaaatagtcat

SEQ ID NO: 1276313 - DNA, 25 bp, Homo sapien
tatatccttcaaagcagtcaccttg

SEQ ID NO: 1276314 - DNA, 25 bp, Homo sapien
aaccacctctcaagaattgccagtg

SEQ ID NO: 1276315 - DNA, 25 bp, Homo sapien
caccaccttaggaggcatacaggaa

SEQ ID NO: 1276316 - DNA, 25 bp, Homo sapien
tactagcactttcctactaaggtag

SEQ ID NO: 1276317 - DNA, 25 bp, Homo sapien
tttggaacttaatgaaggcagcagc

SEQ ID NO: 1276318 - DNA, 25 bp, Homo sapien
gcatggatgtatccagcctctgaaa

SEQ ID NO: 1276319 - DNA, 25 bp, Homo sapien
taaatgccgtcactctaagaagagg

SEQ ID NO: 1276320 - DNA, 25 bp, Homo sapien
tgaaatgggacaaataagccccgcc

SEQ ID NO: 1276321 - DNA, 25 bp, Homo sapien
ggctctagtgttaacaatttattct

SEQ ID NO: 1276322 - DNA, 25 bp, Homo sapien
tgaaacatcagttaagaataacctt

SEQ ID NO: 1276323 - DNA, 25 bp, Homo sapien
gtatttgtctggctctagtgttaac

SEQ ID NO: 1276324 - DNA, 25 bp, Homo sapien
actgaaacatcagttaagaataacc

SEQ ID NO: 1276325 - DNA, 25 bp, Homo sapien
tagtgagcatagaactgcaacagtt

SEQ ID NO: 1276326 - DNA, 25 bp, Homo sapien
gacatctggcctttttagaacctga

SEQ ID NO: 1276327 - DNA, 25 bp, Homo sapien
gcggtgggatgcttgtagctcctca

SEQ ID NO: 1276328 - DNA, 25 bp, Homo sapien
aaatgttccacaaggcgggagtgtt

SEQ ID NO: 1276329 - DNA, 25 bp, Homo sapien
attaagataatgccgggcaggccgg

SEQ ID NO: 1276330 - DNA, 25 bp, Homo sapien
ttaagataatgccgggcaggccggg

SEQ ID NO: 1276331 - DNA, 25 bp, Homo sapien
cacttggtgagtcctcggccttgag

SEQ ID NO: 1276332 - DNA, 25 bp, Homo sapien
tctggcttccgagatcatcagagaa

SEQ ID NO: 1276333 - DNA, 25 bp, Homo sapien
tagggagacttgtgtcatcatccac

SEQ ID NO: 1276334 - DNA, 25 bp, Homo sapien
gactctcaggcgttaggcagctgga

SEQ ID NO: 1276335 - DNA, 25 bp, Homo sapien
agagggagcagagtggtcgtgtcct

SEQ ID NO: 1276336 - DNA, 25 bp, Homo sapien
cagggtgggtgctcccttgcccgac

SEQ ID NO: 1276337 - DNA, 25 bp, Homo sapien
tggtcgtgtcctgcgtgctcttcac

SEQ ID NO: 1276338 - DNA, 25 bp, Homo sapien
gtgggtgctcccttgcccgacagaa

SEQ ID NO: 1276339 - DNA, 25 bp, Homo sapien
ccttcttgtatttaaggcatcgtct

SEQ ID NO: 1276340 - DNA, 25 bp, Homo sapien
ttgtatttaaggcatcgtcttagac

SEQ ID NO: 1276341 - DNA, 25 bp, Homo sapien
ctcagccttcttgtatttaaggcat

SEQ ID NO: 1276342 - DNA, 25 bp, Homo sapien
tcttgtatttaaggcatcgtcttag

SEQ ID NO: 1276343 - DNA, 25 bp, Homo sapien
ctgttgagatttcaagtctcttgtc

SEQ ID NO: 1276344 - DNA, 25 bp, Homo sapien
gtctgttgagatttcaagtctcttg

SEQ ID NO: 1276345 - DNA, 25 bp, Homo sapien
gttgagatttcaagtctcttgtcac

SEQ ID NO: 1276346 - DNA, 25 bp, Homo sapien
ctgtctgttgagatttcaagtctct

SEQ ID NO: 1276347 - DNA, 25 bp, Homo sapien
ccccgtgaaggagttgagcacatta

SEQ ID NO: 1276348 - DNA, 25 bp, Homo sapien
tgtggtaaccttgcgtcacggagct

SEQ ID NO: 1276349 - DNA, 25 bp, Homo sapien
cactatctaactgtgtgtggtaacc

SEQ ID NO: 1276350 - DNA, 25 bp, Homo sapien
tagccttagatgtgcaatgcagaca

SEQ ID NO: 1276351 - DNA, 25 bp, Homo sapien
gaagtgtacttttttatcagctaaa

SEQ ID NO: 1276352 - DNA, 25 bp, Homo sapien
gaaagaaacccacagcttactagcc

SEQ ID NO: 1276353 - DNA, 25 bp, Homo sapien
tgagaaagccgtttcttgagaaaga

SEQ ID NO: 1276354 - DNA, 25 bp, Homo sapien
gtagcagactagctagaaatctagg

SEQ ID NO: 1276355 - DNA, 25 bp, Homo sapien
cagagagagatctcgtcttgtctct

SEQ ID NO: 1276356 - DNA, 25 bp, Homo sapien
acagagagagatctcgtcttgtctc

SEQ ID NO: 1276357 - DNA, 25 bp, Homo sapien
caacagagagagatctcgtcttgtc

SEQ ID NO: 1276358 - DNA, 25 bp, Homo sapien
gggtgagagcagagactgactacaa

SEQ ID NO: 1276359 - DNA, 25 bp, Homo sapien
tgactacaaataggcccaagggaac

SEQ ID NO: 1276360 - DNA, 25 bp, Homo sapien
catgcaaagtagatcagaggttggc

SEQ ID NO: 1276361 - DNA, 25 bp, Homo sapien
gcctcagaaacgtgatgctaagtga

SEQ ID NO: 1276362 - DNA, 25 bp, Homo sapien
tgggtctcttcaaccgcagtgagcg

SEQ ID NO: 1276363 - DNA, 25 bp, Homo sapien
gagtgcgcacaggactgaacgagca

SEQ ID NO: 1276364 - DNA, 25 bp, Homo sapien
taaagcgcggtcctgcgtgagttgc

SEQ ID NO: 1276365 - DNA, 25 bp, Homo sapien
cgtccgagtgcctggtaaactgtaa

SEQ ID NO: 1276366 - DNA, 25 bp, Homo sapien
ggattatgcttcactcagaggaggc

SEQ ID NO: 1276367 - DNA, 25 bp, Homo sapien
ggaacctctgtatcatgcggctgaa

SEQ ID NO: 1276368 - DNA, 25 bp, Homo sapien
tgcgcactctgatcaactggaacct

SEQ ID NO: 1276369 - DNA, 25 bp, Homo sapien
gagtgggaaccatctccttgcggca

SEQ ID NO: 1276370 - DNA, 25 bp, Homo sapien
tgtcatttccagatgccacccactg

SEQ ID NO: 1276371 - DNA, 25 bp, Homo sapien
caggtagactgggatgcccacagag

SEQ ID NO: 1276372 - DNA, 25 bp, Homo sapien
gaatccgtcagaggcttgccctgct

SEQ ID NO: 1276373 - DNA, 25 bp, Homo sapien
gaggcgagaagtgcctgtcatttcc

SEQ ID NO: 1276374 - DNA, 25 bp, Homo sapien
gcagcgattctcttaccaacaggta

SEQ ID NO: 1276375 - DNA, 25 bp, Homo sapien
cgattttgcaagatacacctgaggt

SEQ ID NO: 1276376 - DNA, 25 bp, Homo sapien
gactggaacacgctttgcacctatg

SEQ ID NO: 1276377 - DNA, 25 bp, Homo sapien
tctgtaaatcgtgggctacgcatcc

SEQ ID NO: 1276378 - DNA, 25 bp, Homo sapien
tagcatatgcccttactgagttgga

SEQ ID NO: 1276379 - DNA, 25 bp, Homo sapien
gaagtaatgtttccacaagtcgcac

SEQ ID NO: 1276380 - DNA, 25 bp, Homo sapien
tccccagaggctaaaggcagcagtt

SEQ ID NO: 1276381 - DNA, 25 bp, Homo sapien
ccattatggaaagcgccagagggat

SEQ ID NO: 1276382 - DNA, 25 bp, Homo sapien
agtagctaagttactggcacctgcc

SEQ ID NO: 1276383 - DNA, 25 bp, Homo sapien
cacaggtatgtgcctccacgtccag

SEQ ID NO: 1276384 - DNA, 25 bp, Homo sapien
caagtagtcaggactgcaggtgtgc

SEQ ID NO: 1276385 - DNA, 25 bp, Homo sapien
gactgcaggtgtgcattgccatgcc

SEQ ID NO: 1276386 - DNA, 25 bp, Homo sapien
gagaccacaggtatgtgcctccacg

SEQ ID NO: 1276387 - DNA, 25 bp, Homo sapien
aacactggaccatcaagagttcgag

SEQ ID NO: 1276388 - DNA, 25 bp, Homo sapien
ttgcagtgagttgagcgcgccattg

SEQ ID NO: 1276389 - DNA, 25 bp, Homo sapien
tggaaatgcagctctcaactcctcc

SEQ ID NO: 1276390 - DNA, 25 bp, Homo sapien
gtgcctgggtgcttgttggaaatgc

SEQ ID NO: 1276391 - DNA, 25 bp, Homo sapien
gggatgccgcattcagaccactgat

SEQ ID NO: 1276392 - DNA, 25 bp, Homo sapien
gacagcgaggtgagtacagtcccga

SEQ ID NO: 1276393 - DNA, 25 bp, Homo sapien
ccagagcgcttttgtgggcactgat

SEQ ID NO: 1276394 - DNA, 25 bp, Homo sapien
tggacaggacacacggctcaacttt

SEQ ID NO: 1276395 - DNA, 25 bp, Homo sapien
tgtgaaactgatactcgaacttgct

SEQ ID NO: 1276396 - DNA, 25 bp, Homo sapien
cctcgcttggtggtttgagtggacc

SEQ ID NO: 1276397 - DNA, 25 bp, Homo sapien
caataatgcccaatactgacgtgtc

SEQ ID NO: 1276398 - DNA, 25 bp, Homo sapien
tgctcacgcaagtgtaatgacagac

SEQ ID NO: 1276399 - DNA, 25 bp, Homo sapien
cagctcactgtggcttccgcctccg

SEQ ID NO: 1276400 - DNA, 25 bp, Homo sapien
tcactgtggcttccgcctccgaggt

SEQ ID NO: 1276401 - DNA, 25 bp, Homo sapien
ggtctcagctcactgtggcttccgc

SEQ ID NO: 1276402 - DNA, 25 bp, Homo sapien
gaggttcaagtgactctcctgcctc

SEQ ID NO: 1276403 - DNA, 25 bp, Homo sapien
aaagatacattaataattcttgtaa

SEQ ID NO: 1276404 - DNA, 25 bp, Homo sapien
cattaataattcttgtaattgatgc

SEQ ID NO: 1276405 - DNA, 25 bp, Homo sapien
ataattcttgtaattgatgcaggtt

SEQ ID NO: 1276406 - DNA, 25 bp, Homo sapien
tcttgtaattgatgcaggttttctt

SEQ ID NO: 1276407 - DNA, 25 bp, Homo sapien
gaatattaacactaacgcccagacg

SEQ ID NO: 1276408 - DNA, 25 bp, Homo sapien
tttccaagggcaacgctgctgacgg

SEQ ID NO: 1276409 - DNA, 25 bp, Homo sapien
tatgttccccaggtcggtctgtcgg

SEQ ID NO: 1276410 - DNA, 25 bp, Homo sapien
tcaaagccagttgcctcatgaggac

SEQ ID NO: 1276411 - DNA, 25 bp, Homo sapien
tatgttgagacctggaatagcttct

SEQ ID NO: 1276412 - DNA, 25 bp, Homo sapien
gaggctgagggtgtctaccaataac

SEQ ID NO: 1276413 - DNA, 25 bp, Homo sapien
catatgtaattagaggaggcgggat

SEQ ID NO: 1276414 - DNA, 25 bp, Homo sapien
ggctaaatgttaggcagtgcgccca

SEQ ID NO: 1276415 - DNA, 25 bp, Homo sapien
tcgcttaggattctgcaggtcacca

SEQ ID NO: 1276416 - DNA, 25 bp, Homo sapien
tgcaagctctgcgtctgctgcaggc

SEQ ID NO: 1276417 - DNA, 25 bp, Homo sapien
gatgctccggagagaatgcaagctc

SEQ ID NO: 1276418 - DNA, 25 bp, Homo sapien
ctatgtgggatcctgtctggctcgc

SEQ ID NO: 1276419 - DNA, 25 bp, Homo sapien
tgacattgacagacctcaggacgga

SEQ ID NO: 1276420 - DNA, 25 bp, Homo sapien
tagggaggtacttatgacagggaca

SEQ ID NO: 1276421 - DNA, 25 bp, Homo sapien
caatgaatcagaagtagcacccacc

SEQ ID NO: 1276422 - DNA, 25 bp, Homo sapien
tggtcttagccagcaggcgacgatc

SEQ ID NO: 1276423 - DNA, 25 bp, Homo sapien
atactactacatcccagggcatgtc

SEQ ID NO: 1276424 - DNA, 25 bp, Homo sapien
tactactacatcccagggcatgtcc

SEQ ID NO: 1276425 - DNA, 25 bp, Homo sapien
actactacatcccagggcatgtcct

SEQ ID NO: 1276426 - DNA, 25 bp, Homo sapien
tactacatcccagggcatgtcctcc

SEQ ID NO: 1276427 - DNA, 25 bp, Homo sapien
gcgcaacgtccgaggaggtctctct

SEQ ID NO: 1276428 - DNA, 25 bp, Homo sapien
aatcctgactagataagctcagctc

SEQ ID NO: 1276429 - DNA, 25 bp, Homo sapien
tccctcagtgcagtaaggatgtggc

SEQ ID NO: 1276430 - DNA, 25 bp, Homo sapien
tgatacccgtgtctactgcatccac

SEQ ID NO: 1276431 - DNA, 25 bp, Homo sapien
tcctctctttggtcaagcacctgtt

SEQ ID NO: 1276432 - DNA, 25 bp, Homo sapien
acaactctgacgtagttcctgagcc

SEQ ID NO: 1276433 - DNA, 25 bp, Homo sapien
gtctgagcagggagcgtcaacaagc

SEQ ID NO: 1276434 - DNA, 25 bp, Homo sapien
caggagctgcttggactgacgcact

SEQ ID NO: 1276435 - DNA, 25 bp, Homo sapien
agatcttctttcagctgcctggcca

SEQ ID NO: 1276436 - DNA, 25 bp, Homo sapien
catcaaaggactcttgggaaatcca

SEQ ID NO: 1276437 - DNA, 25 bp, Homo sapien
tgccccgctgtctgtttcatctaca

SEQ ID NO: 1276438 - DNA, 25 bp, Homo sapien
ctctgataggaggatgatgctggac

SEQ ID NO: 1276439 - DNA, 25 bp, Homo sapien
ggtgtcagggacttatcaatggcca

SEQ ID NO: 1276440 - DNA, 25 bp, Homo sapien
cacagaaagtaatcgtcatcatcca

SEQ ID NO: 1276441 - DNA, 25 bp, Homo sapien
tcatccactatggtgccatcctctg

SEQ ID NO: 1276442 - DNA, 25 bp, Homo sapien
caatgccacaaacttagtattggaa

SEQ ID NO: 1276443 - DNA, 25 bp, Homo sapien
agttgcggcgcagcagacacggctt

SEQ ID NO: 1276444 - DNA, 25 bp, Homo sapien
tcgccagattctggtaccccggcgt

SEQ ID NO: 1276445 - DNA, 25 bp, Homo sapien
ccacgccgtgctgttcgcggctgta

SEQ ID NO: 1276446 - DNA, 25 bp, Homo sapien
ctttagagtccggatctcgccagat

SEQ ID NO: 1276447 - DNA, 25 bp, Homo sapien
gccggagcggcggtccttctactcg

SEQ ID NO: 1276448 - DNA, 25 bp, Homo sapien
caccttcgagaagtcgcgggaggcc

SEQ ID NO: 1276449 - DNA, 25 bp, Homo sapien
ggagcggcggtccttctactcgacc

SEQ ID NO: 1276450 - DNA, 25 bp, Homo sapien
gtgggacctgcccaccttcgagaag

SEQ ID NO: 1276451 - DNA, 25 bp, Homo sapien
gtgagaccagggcacgccgggaaat

SEQ ID NO: 1276452 - DNA, 25 bp, Homo sapien
accagggcacgccgggaaatgtagt

SEQ ID NO: 1276453 - DNA, 25 bp, Homo sapien
agaccagggcacgccgggaaatgta

SEQ ID NO: 1276454 - DNA, 25 bp, Homo sapien
ccagggcacgccgggaaatgtagtt

SEQ ID NO: 1276455 - DNA, 25 bp, Homo sapien
aagaaaacacatagcggcaatttat

SEQ ID NO: 1276456 - DNA, 25 bp, Homo sapien
ttaaactcccacagtctctcagtca

SEQ ID NO: 1276457 - DNA, 25 bp, Homo sapien
tttgggctgatcctatgagttgggt

SEQ ID NO: 1276458 - DNA, 25 bp, Homo sapien
catgcccttattgcttttggccaag

SEQ ID NO: 1276459 - DNA, 25 bp, Homo sapien
acagccggttgcctgtctgccaaag

SEQ ID NO: 1276460 - DNA, 25 bp, Homo sapien
aacatgtattcctggcacagtctcc

SEQ ID NO: 1276461 - DNA, 25 bp, Homo sapien
aagaatagctacagccggttgcctg

SEQ ID NO: 1276462 - DNA, 25 bp, Homo sapien
gtctgccaaagacctctaacatgta

SEQ ID NO: 1276463 - DNA, 25 bp, Homo sapien
agtgactctcttgccttagtctcct

SEQ ID NO: 1276464 - DNA, 25 bp, Homo sapien
ttttgaagcggtgtctcgctgtgtc

SEQ ID NO: 1276465 - DNA, 25 bp, Homo sapien
gtgactctcttgccttagtctcctg

SEQ ID NO: 1276466 - DNA, 25 bp, Homo sapien
catttctttttttgaagcggtgtct

SEQ ID NO: 1276467 - DNA, 25 bp, Homo sapien
ggagtcactggaatccgcataagta

SEQ ID NO: 1276468 - DNA, 25 bp, Homo sapien
cagctcttaaagtggtgcctgcagg

SEQ ID NO: 1276469 - DNA, 25 bp, Homo sapien
tagcaaggtgctatgcccctggtag

SEQ ID NO: 1276470 - DNA, 25 bp, Homo sapien
cattgtcagagttaaggcagcaaag

SEQ ID NO: 1276471 - DNA, 25 bp, Homo sapien
gacttctgtggattcatccaaagga

SEQ ID NO: 1276472 - DNA, 25 bp, Homo sapien
ggtgttgaaacacctggccagggaa

SEQ ID NO: 1276473 - DNA, 25 bp, Homo sapien
gatccctgatgttcgcctgctttga

SEQ ID NO: 1276474 - DNA, 25 bp, Homo sapien
cactggcgtcggtggttatattcca

SEQ ID NO: 1276475 - DNA, 25 bp, Homo sapien
tgatttccccttgagacaccctgga

SEQ ID NO: 1276476 - DNA, 25 bp, Homo sapien
accctggaaagagagtgcctggccg

SEQ ID NO: 1276477 - DNA, 25 bp, Homo sapien
tagaactcgtgtgtcccaggatcga

SEQ ID NO: 1276478 - DNA, 25 bp, Homo sapien
aaagcgcaagcaggaatttgaggcc

SEQ ID NO: 1276479 - DNA, 25 bp, Homo sapien
ctgatatagcccgtatgcagacttc

SEQ ID NO: 1276480 - DNA, 25 bp, Homo sapien
gatcgggtcggttcaccctctgata

SEQ ID NO: 1276481 - DNA, 25 bp, Homo sapien
ggttcaccctctgatatagcccgta

SEQ ID NO: 1276482 - DNA, 25 bp, Homo sapien
tgatcagataggcactgatcgggtc

SEQ ID NO: 1276483 - DNA, 25 bp, Homo sapien
tggcaggaattcgaaacgggtctaa

SEQ ID NO: 1276484 - DNA, 25 bp, Homo sapien
acgggtctaacccaatttctgcatg

SEQ ID NO: 1276485 - DNA, 25 bp, Homo sapien
gggtctaacccaatttctgcatgtt

SEQ ID NO: 1276486 - DNA, 25 bp, Homo sapien
attgtttggcaggaattcgaaacgg

SEQ ID NO: 1276487 - DNA, 25 bp, Homo sapien
cacactggccccagtgatcgtagtg

SEQ ID NO: 1276488 - DNA, 25 bp, Homo sapien
cgtagtgttgtaggaagcgctgcca

SEQ ID NO: 1276489 - DNA, 25 bp, Homo sapien
gtaagtgggcccacgtcacacactg

SEQ ID NO: 1276490 - DNA, 25 bp, Homo sapien
acagcttccagtaagtgggcccacg

SEQ ID NO: 1276491 - DNA, 25 bp, Homo sapien
cgtgagtaaagcttcgcagcgtata

SEQ ID NO: 1276492 - DNA, 25 bp, Homo sapien
caggtatcagcgactgcctcatgga

SEQ ID NO: 1276493 - DNA, 25 bp, Homo sapien
gtaatatcttttttggctgccctga

SEQ ID NO: 1276494 - DNA, 25 bp, Homo sapien
tttggataccagataactaagcttg

SEQ ID NO: 1276495 - DNA, 25 bp, Homo sapien
cactgctaccgtgatccgtgtataa

SEQ ID NO: 1276496 - DNA, 25 bp, Homo sapien
ctgaggtcactgctaccgtgatccg

SEQ ID NO: 1276497 - DNA, 25 bp, Homo sapien
aacttgcagccagctcgtttgcctt

SEQ ID NO: 1276498 - DNA, 25 bp, Homo sapien
tccgtgtataatggcattttcctcc

SEQ ID NO: 1276499 - DNA, 25 bp, Homo sapien
gagtgctagcatcagcgttctacga

SEQ ID NO: 1276500 - DNA, 25 bp, Homo sapien
ttgcaactatttccctgtgccgccg

SEQ ID NO: 1276501 - DNA, 25 bp, Homo sapien
tctctgattaacagctgctttgcaa

SEQ ID NO: 1276502 - DNA, 25 bp, Homo sapien
tgtgccgccgatgaccatatttgtc

SEQ ID NO: 1276503 - DNA, 25 bp, Homo sapien
tagcattatgggtaaagagttttgc

SEQ ID NO: 1276504 - DNA, 25 bp, Homo sapien
taaaattctagattggacaggtcct

SEQ ID NO: 1276505 - DNA, 25 bp, Homo sapien
tctcccatcgatgtatgaatcatgg

SEQ ID NO: 1276506 - DNA, 25 bp, Homo sapien
aatcttctcccatcgatgtatgaat

SEQ ID NO: 1276507 - DNA, 25 bp, Homo sapien
ttatgctgttctttgctatatcccc

SEQ ID NO: 1276508 - DNA, 25 bp, Homo sapien
gatgtttaaattggattcgctcgtt

SEQ ID NO: 1276509 - DNA, 25 bp, Homo sapien
tatcccccacgttcttcttaaatga

SEQ ID NO: 1276510 - DNA, 25 bp, Homo sapien
tggattcgctcgtttatgctgttct

SEQ ID NO: 1276511 - DNA, 25 bp, Homo sapien
agtgaagtttctacagaattcccgg

SEQ ID NO: 1276512 - DNA, 25 bp, Homo sapien
ttctacagaattcccgggtccgcca

SEQ ID NO: 1276513 - DNA, 25 bp, Homo sapien
gccacggcagtgaagtttctacaga

SEQ ID NO: 1276514 - DNA, 25 bp, Homo sapien
gattgccacggcagtgaagtttcta

SEQ ID NO: 1276515 - DNA, 25 bp, Homo sapien
tgcactaacagggtttgggcagaag

SEQ ID NO: 1276516 - DNA, 25 bp, Homo sapien
gatgcagcatgaaccattggtccct

SEQ ID NO: 1276517 - DNA, 25 bp, Homo sapien
tcccttcatgcgatcatgtcccggg

SEQ ID NO: 1276518 - DNA, 25 bp, Homo sapien
gctctgtgatgtcccgctgaaggga

SEQ ID NO: 1276519 - DNA, 25 bp, Homo sapien
ggctttgctgagcagttttagtatc

SEQ ID NO: 1276520 - DNA, 25 bp, Homo sapien
gctttgctgagcagttttagtatca

SEQ ID NO: 1276521 - DNA, 25 bp, Homo sapien
tttcttcctagagcttgggtccagc

SEQ ID NO: 1276522 - DNA, 25 bp, Homo sapien
taatagctccgtcattactgagaag

SEQ ID NO: 1276523 - DNA, 25 bp, Homo sapien
tacaaaccttgttctgatggccagg

SEQ ID NO: 1276524 - DNA, 25 bp, Homo sapien
caggttatcgactggacagctccca

SEQ ID NO: 1276525 - DNA, 25 bp, Homo sapien
aaagcctttctcaggagtgagagct

SEQ ID NO: 1276526 - DNA, 25 bp, Homo sapien
agcctttctcaggagtgagagctac

SEQ ID NO: 1276527 - DNA, 25 bp, Homo sapien
tgagagctaccaggggagacaaaac

SEQ ID NO: 1276528 - DNA, 25 bp, Homo sapien
ctttctcaggagtgagagctaccag

SEQ ID NO: 1276529 - DNA, 25 bp, Homo sapien
cagggaccaagaagttgctgctgcc

SEQ ID NO: 1276530 - DNA, 25 bp, Homo sapien
ccccactgcaagtgttgtgtgacac

SEQ ID NO: 1276531 - DNA, 25 bp, Homo sapien
tcaagtgcatgtccttgcagctgtg

SEQ ID NO: 1276532 - DNA, 25 bp, Homo sapien
gatccagggaccaagaagttgctgc

SEQ ID NO: 1276533 - DNA, 25 bp, Homo sapien
caatcaaaggctctcctttaggcag

SEQ ID NO: 1276534 - DNA, 25 bp, Homo sapien
ccaatcaaaggctctcctttaggca

SEQ ID NO: 1276535 - DNA, 25 bp, Homo sapien
gaagccgagctcatctccattagcg

SEQ ID NO: 1276536 - DNA, 25 bp, Homo sapien
gagtcgaacctccatgaagccgagc

SEQ ID NO: 1276537 - DNA, 25 bp, Homo sapien
taggcagctttatcccagcagcacg

SEQ ID NO: 1276538 - DNA, 25 bp, Homo sapien
cagcagcacggattcggcttggaga

SEQ ID NO: 1276539 - DNA, 25 bp, Homo sapien
gtgactccagggcagtaaatgtatt

SEQ ID NO: 1276540 - DNA, 25 bp, Homo sapien
ctccagggcagtaaatgtatttcac

SEQ ID NO: 1276541 - DNA, 25 bp, Homo sapien
cagggcagtaaatgtatttcacgca

SEQ ID NO: 1276542 - DNA, 25 bp, Homo sapien
agtaaatgtatttcacgcatactgc

SEQ ID NO: 1276543 - DNA, 25 bp, Homo sapien
ctctgttatatctgcatgtgtttcc

SEQ ID NO: 1276544 - DNA, 25 bp, Homo sapien
tctggcctcggcaattttcagggct

SEQ ID NO: 1276545 - DNA, 25 bp, Homo sapien
gtcaacctgtttgctgatctggcct

SEQ ID NO: 1276546 - DNA, 25 bp, Homo sapien
gatctgcttgtgacagtcaacctgt

SEQ ID NO: 1276547 - DNA, 25 bp, Homo sapien
cgttgcatcataacagcagaacttg

SEQ ID NO: 1276548 - DNA, 25 bp, Homo sapien
ccgggcgttgcatcataacagcaga

SEQ ID NO: 1276549 - DNA, 25 bp, Homo sapien
tggccgggcgttgcatcataacagc

SEQ ID NO: 1276550 - DNA, 25 bp, Homo sapien
ctgtggccgggcgttgcatcataac

SEQ ID NO: 1276551 - DNA, 25 bp, Homo sapien
gaaagccgaatgatcctggagcatg

SEQ ID NO: 1276552 - DNA, 25 bp, Homo sapien
gctcagcgctgttagcagggctcct

SEQ ID NO: 1276553 - DNA, 25 bp, Homo sapien
attccaccgagcacgaggcgaaagg

SEQ ID NO: 1276554 - DNA, 25 bp, Homo sapien
tgcggagccagcgtggacattccac

SEQ ID NO: 1276555 - DNA, 25 bp, Homo sapien
tggagctggtgatactgtgaacatg

SEQ ID NO: 1276556 - DNA, 25 bp, Homo sapien
gataatcgtccccttggagggccag

SEQ ID NO: 1276557 - DNA, 25 bp, Homo sapien
cggtctctgtgcagggtttctatta

SEQ ID NO: 1276558 - DNA, 25 bp, Homo sapien
aggcagtcggtgtgcgctgacctca

SEQ ID NO: 1276559 - DNA, 25 bp, Homo sapien
ggacgctggcgacagtgtgataatc

SEQ ID NO: 1276560 - DNA, 25 bp, Homo sapien
tctacggcttcattgttaccagcca

SEQ ID NO: 1276561 - DNA, 25 bp, Homo sapien
tttcttctacggcttcattgttacc

SEQ ID NO: 1276562 - DNA, 25 bp, Homo sapien
gctgtttcttctacggcttcattgt

SEQ ID NO: 1276563 - DNA, 25 bp, Homo sapien
gcactgcgcctgatgtggagggtta

SEQ ID NO: 1276564 - DNA, 25 bp, Homo sapien
gaagccgttggcttaaatttgcagt

SEQ ID NO: 1276565 - DNA, 25 bp, Homo sapien
gagacaatagaagccgttggcttaa

SEQ ID NO: 1276566 - DNA, 25 bp, Homo sapien
atatcaaggtgctgccgtcgtaatt

SEQ ID NO: 1276567 - DNA, 25 bp, Homo sapien
caaggtgctgccgtcgtaatttcat

SEQ ID NO: 1276568 - DNA, 25 bp, Homo sapien
taaaattccgtagtgtaccagtgac

SEQ ID NO: 1276569 - DNA, 25 bp, Homo sapien
tcatatgccagtatggtgcagggcg

SEQ ID NO: 1276570 - DNA, 25 bp, Homo sapien
gtacgtgatgcgctgtgaaccctgg

SEQ ID NO: 1276571 - DNA, 25 bp, Homo sapien
tttagtcggagcgatcggcagtcac

SEQ ID NO: 1276572 - DNA, 25 bp, Homo sapien
gctgccctggtggtcggtcggtgat

SEQ ID NO: 1276573 - DNA, 25 bp, Homo sapien
tgccctggtggtcggtcggtgatac

SEQ ID NO: 1276574 - DNA, 25 bp, Homo sapien
ctggtggtcggtcggtgatacggtc

SEQ ID NO: 1276575 - DNA, 25 bp, Homo sapien
tggtcggtcggtgatacggtctgtg

SEQ ID NO: 1276576 - DNA, 25 bp, Homo sapien
agggaagaccatcccacgtcacctt

SEQ ID NO: 1276577 - DNA, 25 bp, Homo sapien
gagggaagccctccattgcttggag

SEQ ID NO: 1276578 - DNA, 25 bp, Homo sapien
gagctgctgttcatcgtagagggaa

SEQ ID NO: 1276579 - DNA, 25 bp, Homo sapien
gaaagacagggaagaccatcccacg

SEQ ID NO: 1276580 - DNA, 25 bp, Homo sapien
ccatatagtatgtagacttctgtgt

SEQ ID NO: 1276581 - DNA, 25 bp, Homo sapien
tgtctggtttctttaccgtaacata

SEQ ID NO: 1276582 - DNA, 25 bp, Homo sapien
tgggtgaccgaacgaagctccatct

SEQ ID NO: 1276583 - DNA, 25 bp, Homo sapien
tggaaccatatagtatgtagacttc

SEQ ID NO: 1276584 - DNA, 25 bp, Homo sapien
gccacacagcgggtaggagtcatct

SEQ ID NO: 1276585 - DNA, 25 bp, Homo sapien
ggagtcatctctatccgagtttttc

SEQ ID NO: 1276586 - DNA, 25 bp, Homo sapien
cagcgggtaggagtcatctctatcc

SEQ ID NO: 1276587 - DNA, 25 bp, Homo sapien
ctctgagagccacacagcgggtagg

SEQ ID NO: 1276588 - DNA, 25 bp, Homo sapien
catcctgaagtgtaaggctaccttt

SEQ ID NO: 1276589 - DNA, 25 bp, Homo sapien
gctcagttgtgggtaatagctcaca

SEQ ID NO: 1276590 - DNA, 25 bp, Homo sapien
cacagtctaactctgttacccgggc

SEQ ID NO: 1276591 - DNA, 25 bp, Homo sapien
gaaaatgcgtctatacatgtgctgc

SEQ ID NO: 1276592 - DNA, 25 bp, Homo sapien
tgacattggtggcaacaaggtcctg

SEQ ID NO: 1276593 - DNA, 25 bp, Homo sapien
tgtgaagctcacagaaaccctctga

SEQ ID NO: 1276594 - DNA, 25 bp, Homo sapien
gctgccgtttgctcctgcgaggctg

SEQ ID NO: 1276595 - DNA, 25 bp, Homo sapien
tccctctggagcacgtttgtgaagc

SEQ ID NO: 1276596 - DNA, 25 bp, Homo sapien
tacgtcatcagatgtccaaacagag

SEQ ID NO: 1276597 - DNA, 25 bp, Homo sapien
cctggagtcccagaatatcaacgaa

SEQ ID NO: 1276598 - DNA, 25 bp, Homo sapien
ccaaacagagctgtgggaatgttta

SEQ ID NO: 1276599 - DNA, 25 bp, Homo sapien
gaccctgttctggtcgggcctggaa

SEQ ID NO: 1276600 - DNA, 25 bp, Homo sapien
tctgggcgactcaggcactgagtct

SEQ ID NO: 1276601 - DNA, 25 bp, Homo sapien
cagaggtgacggtctgtggcacaca

SEQ ID NO: 1276602 - DNA, 25 bp, Homo sapien
aaaaagcagggcccttggagcagag

SEQ ID NO: 1276603 - DNA, 25 bp, Homo sapien
ttttgaaatacagttcccaggcctg

SEQ ID NO: 1276604 - DNA, 25 bp, Homo sapien
ggttccacaactgaagacgtgggca

SEQ ID NO: 1276605 - DNA, 25 bp, Homo sapien
accaatgcagcctcagaggtagggt

SEQ ID NO: 1276606 - DNA, 25 bp, Homo sapien
tagcgacagcacattgtcaccaatg

SEQ ID NO: 1276607 - DNA, 25 bp, Homo sapien
tgttgtccctctgtagcgacagcac

SEQ ID NO: 1276608 - DNA, 25 bp, Homo sapien
gcaggtgggcttttcactagggtcc

SEQ ID NO: 1276609 - DNA, 25 bp, Homo sapien
gggtcttgcggctccagccagaaga

SEQ ID NO: 1276610 - DNA, 25 bp, Homo sapien
actctgtcctgggagccgcaactgt

SEQ ID NO: 1276611 - DNA, 25 bp, Homo sapien
cctgggctgatgccctagtgggcct

SEQ ID NO: 1276612 - DNA, 25 bp, Homo sapien
taaccgagaccagtgccttggaggc

SEQ ID NO: 1276613 - DNA, 25 bp, Homo sapien
tgtctctgagccgttgccaagtgga

SEQ ID NO: 1276614 - DNA, 25 bp, Homo sapien
gagagttgtgtctaaggcccctgct

SEQ ID NO: 1276615 - DNA, 25 bp, Homo sapien
gagagctgcctcttctgcgttgaaa

SEQ ID NO: 1276616 - DNA, 25 bp, Homo sapien
gatcatgtatagacctcagaacgga

SEQ ID NO: 1276617 - DNA, 25 bp, Homo sapien
tggttcagctaatcccatggcgaga

SEQ ID NO: 1276618 - DNA, 25 bp, Homo sapien
gaagcagaggccttgttcaggtcca

SEQ ID NO: 1276619 - DNA, 25 bp, Homo sapien
cgacactttgctgaccgcaggagga

SEQ ID NO: 1276620 - DNA, 25 bp, Homo sapien
taataaccaggtgccgaggagacca

SEQ ID NO: 1276621 - DNA, 25 bp, Homo sapien
tgttgaatcaggtacgctccgtgcg

SEQ ID NO: 1276622 - DNA, 25 bp, Homo sapien
gtttacaaaaggctagactccgcac

SEQ ID NO: 1276623 - DNA, 25 bp, Homo sapien
taaaaagagcattggtggatcaagc

SEQ ID NO: 1276624 - DNA, 25 bp, Homo sapien
ggcccgggcttcgatggcatcatca

SEQ ID NO: 1276625 - DNA, 25 bp, Homo sapien
aacccaatctgggtagactgcacca

SEQ ID NO: 1276626 - DNA, 25 bp, Homo sapien
tcctaggcctgttctctcccggtgg

SEQ ID NO: 1276627 - DNA, 25 bp, Homo sapien
gcgaagaagcatcccaaacaaagta

SEQ ID NO: 1276628 - DNA, 25 bp, Homo sapien
ttcctgtttgcaccaccagggtggc

SEQ ID NO: 1276629 - DNA, 25 bp, Homo sapien
tcccagtcctgagcaatggtcgcgg

SEQ ID NO: 1276630 - DNA, 25 bp, Homo sapien
gctactctgggttttggacgcagcc

SEQ ID NO: 1276631 - DNA, 25 bp, Homo sapien
caggataaacgggactgagcctcca

SEQ ID NO: 1276632 - DNA, 25 bp, Homo sapien
ctccgagtcggtgcgcaggtcctcg

SEQ ID NO: 1276633 - DNA, 25 bp, Homo sapien
gcagcgactcctccgagtcggtgcg

SEQ ID NO: 1276634 - DNA, 25 bp, Homo sapien
gactcctccgagtcggtgcgcaggt

SEQ ID NO: 1276635 - DNA, 25 bp, Homo sapien
tcctccgagtcggtgcgcaggtcct

SEQ ID NO: 1276636 - DNA, 25 bp, Homo sapien
cggcggcgccctcgcgcggcccggg

SEQ ID NO: 1276637 - DNA, 25 bp, Homo sapien
ggtcgcccgcgtcgcccagcgccag

SEQ ID NO: 1276638 - DNA, 25 bp, Homo sapien
gccggggtcgcccgcgtcgcccagc

SEQ ID NO: 1276639 - DNA, 25 bp, Homo sapien
cggggtcgcccgcgtcgcccagcgc

SEQ ID NO: 1276640 - DNA, 25 bp, Homo sapien
tgtgcgagtccatctgcgacatgcc

SEQ ID NO: 1276641 - DNA, 25 bp, Homo sapien
cagggagccgtccagactgatggga

SEQ ID NO: 1276642 - DNA, 25 bp, Homo sapien
tcggcgcccagcgacagggagccgt

SEQ ID NO: 1276643 - DNA, 25 bp, Homo sapien
tcgtgcttgcgcttgtgcgagtcca

SEQ ID NO: 1276644 - DNA, 25 bp, Homo sapien
ccgggaaggtgcagtggaagtgcga

SEQ ID NO: 1276645 - DNA, 25 bp, Homo sapien
agcccgggaaggtgcagtggaagtg

SEQ ID NO: 1276646 - DNA, 25 bp, Homo sapien
accgtgtggcggcagcccgggaagg

SEQ ID NO: 1276647 - DNA, 25 bp, Homo sapien
gaaggtgcagtggaagtgcgagcac

SEQ ID NO: 1276648 - DNA, 25 bp, Homo sapien
tgcagtcctcgtaaaggtcgaagcg

SEQ ID NO: 1276649 - DNA, 25 bp, Homo sapien
aacttgtagccgcagttctcgcgcg

SEQ ID NO: 1276650 - DNA, 25 bp, Homo sapien
tgccgaagggcgacatgtcctcgat

SEQ ID NO: 1276651 - DNA, 25 bp, Homo sapien
tgtcctcgatgatccagaagcgctt

SEQ ID NO: 1276652 - DNA, 25 bp, Homo sapien
ggcatttagggagccctcggcttcc

SEQ ID NO: 1276653 - DNA, 25 bp, Homo sapien
caacagggttacacccacatgggac

SEQ ID NO: 1276654 - DNA, 25 bp, Homo sapien
tgggcaccatcaacagggttacacc

SEQ ID NO: 1276655 - DNA, 25 bp, Homo sapien
cacatgggacccctgatctggcatg

SEQ ID NO: 1276656 - DNA, 25 bp, Homo sapien
catcctgaactagggggacgtcact

SEQ ID NO: 1276657 - DNA, 25 bp, Homo sapien
tgcagcatcctgaactagggggacg

SEQ ID NO: 1276658 - DNA, 25 bp, Homo sapien
cagcatcctgaactagggggacgtc

SEQ ID NO: 1276659 - DNA, 25 bp, Homo sapien
gcatcctgaactagggggacgtcac

SEQ ID NO: 1276660 - DNA, 25 bp, Homo sapien
gagtggcagtgacgggcgggaagct

SEQ ID NO: 1276661 - DNA, 25 bp, Homo sapien
ccggctccgagagtggcactgagca

SEQ ID NO: 1276662 - DNA, 25 bp, Homo sapien
cactgagcagagagtatgagagaca

SEQ ID NO: 1276663 - DNA, 25 bp, Homo sapien
cgtggccggcgagaaggatggagtc

SEQ ID NO: 1276664 - DNA, 25 bp, Homo sapien
tgagaaacccgatggcagaagcagg

SEQ ID NO: 1276665 - DNA, 25 bp, Homo sapien
tctcccggaaactgacgcaaagggc

SEQ ID NO: 1276666 - DNA, 25 bp, Homo sapien
gtcacgtgggcaggtgtgccgggca

SEQ ID NO: 1276667 - DNA, 25 bp, Homo sapien
catgaaaatgtgtgcacggatgagc

SEQ ID NO: 1276668 - DNA, 25 bp, Homo sapien
tgccgcggtgctctcgttacccacg

SEQ ID NO: 1276669 - DNA, 25 bp, Homo sapien
actcagaggacatggcgcctgggct

SEQ ID NO: 1276670 - DNA, 25 bp, Homo sapien
actcatctgtctcagcatccatcag

SEQ ID NO: 1276671 - DNA, 25 bp, Homo sapien
gtccatggtggatgactcagaggac

SEQ ID NO: 1276672 - DNA, 25 bp, Homo sapien
tgggaggtcatctggtgcttgagga

SEQ ID NO: 1276673 - DNA, 25 bp, Homo sapien
ggaagtggctgttcacctggttgta

SEQ ID NO: 1276674 - DNA, 25 bp, Homo sapien
agcatcctccgcatgtgcttccgcg

SEQ ID NO: 1276675 - DNA, 25 bp, Homo sapien
gctgttcacctggttgtacttgcaa

SEQ ID NO: 1276676 - DNA, 25 bp, Homo sapien
tgttgacgcttattggcatggctac

SEQ ID NO: 1276677 - DNA, 25 bp, Homo sapien
ccgcaagtgttgacgcttattggca

SEQ ID NO: 1276678 - DNA, 25 bp, Homo sapien
caggccgcaagtgttgacgcttatt

SEQ ID NO: 1276679 - DNA, 25 bp, Homo sapien
cagcacaggccgcaagtgttgacgc

SEQ ID NO: 1276680 - DNA, 25 bp, Homo sapien
ctccctggccgagaactcctttttg

SEQ ID NO: 1276681 - DNA, 25 bp, Homo sapien
gaattcatacttgaaggcaaggttt

SEQ ID NO: 1276682 - DNA, 25 bp, Homo sapien
ttcatacttgaaggcaaggtttgtt

SEQ ID NO: 1276683 - DNA, 25 bp, Homo sapien
ggccgagaactcctttttgaattca

SEQ ID NO: 1276684 - DNA, 25 bp, Homo sapien
tgcctgctgcaagtccctgcccgca

SEQ ID NO: 1276685 - DNA, 25 bp, Homo sapien
tgatgcctgctgcaagtccctgccc

SEQ ID NO: 1276686 - DNA, 25 bp, Homo sapien
tgctgcaagtccctgcccgcagccc

SEQ ID NO: 1276687 - DNA, 25 bp, Homo sapien
cctgctgcaagtccctgcccgcagc

SEQ ID NO: 1276688 - DNA, 25 bp, Homo sapien
ctcgcgcttggtgaagtatttgaag

SEQ ID NO: 1276689 - DNA, 25 bp, Homo sapien
tagcctgccacactcctcgcgcttg

SEQ ID NO: 1276690 - DNA, 25 bp, Homo sapien
ggaggcagtggtagtgcccacgcat

SEQ ID NO: 1276691 - DNA, 25 bp, Homo sapien
ggtgatgttggtcacaaaatagcag

SEQ ID NO: 1276692 - DNA, 25 bp, Homo sapien
cgtacttgcagtccgtggcgaggca

SEQ ID NO: 1276693 - DNA, 25 bp, Homo sapien
gtagtatgcaaactggtctcgcacg

SEQ ID NO: 1276694 - DNA, 25 bp, Homo sapien
tgggattcggccttgccagacgttt

SEQ ID NO: 1276695 - DNA, 25 bp, Homo sapien
gtctcgcacgttcaccaggttgttg

SEQ ID NO: 1276696 - DNA, 25 bp, Homo sapien
caccatccagtgaggagggtccctt

SEQ ID NO: 1276697 - DNA, 25 bp, Homo sapien
caggaagccgcacacatgacaatac

SEQ ID NO: 1276698 - DNA, 25 bp, Homo sapien
cacagaggaggccaatacggaggct

SEQ ID NO: 1276699 - DNA, 25 bp, Homo sapien
catccgcagtgaggaacagggcctc

SEQ ID NO: 1276700 - DNA, 25 bp, Homo sapien
tctagagaagtcgttgccaagggcg

SEQ ID NO: 1276701 - DNA, 25 bp, Homo sapien
gcactgacgctgggatctgaggcat

SEQ ID NO: 1276702 - DNA, 25 bp, Homo sapien
catgggaggtttggtctcggcggcc

SEQ ID NO: 1276703 - DNA, 25 bp, Homo sapien
agaggacaccgtggccgtggtgaca

SEQ ID NO: 1276704 - DNA, 25 bp, Homo sapien
aggcagcctctgtgtttccttttgc

SEQ ID NO: 1276705 - DNA, 25 bp, Homo sapien
gctcctccctctgtccggaagtgga

SEQ ID NO: 1276706 - DNA, 25 bp, Homo sapien
ctgctcctccctctgtccggaagtg

SEQ ID NO: 1276707 - DNA, 25 bp, Homo sapien
tcctccctctgtccggaagtggaag

SEQ ID NO: 1276708 - DNA, 25 bp, Homo sapien
agtgggccttgtggaggaagtcaca

SEQ ID NO: 1276709 - DNA, 25 bp, Homo sapien
ccaccacgcagtggaagtgggcctt

SEQ ID NO: 1276710 - DNA, 25 bp, Homo sapien
cactggccgtcacagaagtcctttg

SEQ ID NO: 1276711 - DNA, 25 bp, Homo sapien
tttgcgtgcttgatggccccgtcca

SEQ ID NO: 1276712 - DNA, 25 bp, Homo sapien
ctgaaccagcgccttcacggccttg

SEQ ID NO: 1276713 - DNA, 25 bp, Homo sapien
ctccgcttccgccttgatgttcagc

SEQ ID NO: 1276714 - DNA, 25 bp, Homo sapien
tccgcagcggggctcccctccgctt

SEQ ID NO: 1276715 - DNA, 25 bp, Homo sapien
tgcctaggaagggcgagggctccgc

SEQ ID NO: 1276716 - DNA, 25 bp, Homo sapien
attatatccgatgaaaaatggcctc

SEQ ID NO: 1276717 - DNA, 25 bp, Homo sapien
accccccagcacagctttaatttct

SEQ ID NO: 1276718 - DNA, 25 bp, Homo sapien
aacgggaggcgtgtgatggatggct

SEQ ID NO: 1276719 - DNA, 25 bp, Homo sapien
ggctctgaaattatatccgatgaaa

SEQ ID NO: 1276720 - DNA, 25 bp, Homo sapien
gactgcgtggccatttgattcgttg

SEQ ID NO: 1276721 - DNA, 25 bp, Homo sapien
tattcataagcgaggataaaagaga

SEQ ID NO: 1276722 - DNA, 25 bp, Homo sapien
taagcgaggataaaagagatgaatt

SEQ ID NO: 1276723 - DNA, 25 bp, Homo sapien
agatgaatttgccgggactgcgtgg

SEQ ID NO: 1276724 - DNA, 25 bp, Homo sapien
tcaggtctagactgcggtcctggga

SEQ ID NO: 1276725 - DNA, 25 bp, Homo sapien
agtcaggtctagactgcggtcctgg

SEQ ID NO: 1276726 - DNA, 25 bp, Homo sapien
cttcacagtcaggtctagactgcgg

SEQ ID NO: 1276727 - DNA, 25 bp, Homo sapien
gcgccggtgctctcaccgggttccg

SEQ ID NO: 1276728 - DNA, 25 bp, Homo sapien
gacagtctggccaccgagcccacgt

SEQ ID NO: 1276729 - DNA, 25 bp, Homo sapien
agtctggccaccgagcccacgtggc

SEQ ID NO: 1276730 - DNA, 25 bp, Homo sapien
ctaatgaaaacaaagtacttgacag

SEQ ID NO: 1276731 - DNA, 25 bp, Homo sapien
acagtctggccaccgagcccacgtg

SEQ ID NO: 1276732 - DNA, 25 bp, Homo sapien
caccgggcatgagcgtcctattggg

SEQ ID NO: 1276733 - DNA, 25 bp, Homo sapien
gcggccaccgggcatgagcgtccta

SEQ ID NO: 1276734 - DNA, 25 bp, Homo sapien
cttgggacttcacattccagcagct

SEQ ID NO: 1276735 - DNA, 25 bp, Homo sapien
attgggcctgtgagagttttcagac

SEQ ID NO: 1276736 - DNA, 25 bp, Homo sapien
tcccagatgtgaacggaactctcct

SEQ ID NO: 1276737 - DNA, 25 bp, Homo sapien
caaataggaactacccagagcaggg

SEQ ID NO: 1276738 - DNA, 25 bp, Homo sapien
gtgaaatgagccacatcccagatgt

SEQ ID NO: 1276739 - DNA, 25 bp, Homo sapien
gcccctcagtgaaccagcgtgaaga

SEQ ID NO: 1276740 - DNA, 25 bp, Homo sapien
gcggagaagtcaacaaggtcgtcgt

SEQ ID NO: 1276741 - DNA, 25 bp, Homo sapien
tcttgaagccgtccttggcgtaggc

SEQ ID NO: 1276742 - DNA, 25 bp, Homo sapien
agcagccccgagatcttgctgttgg

SEQ ID NO: 1276743 - DNA, 25 bp, Homo sapien
tgcagagatcctctccatgatggag

SEQ ID NO: 1276744 - DNA, 25 bp, Homo sapien
cacagtcttcggtggctcggaagcg

SEQ ID NO: 1276745 - DNA, 25 bp, Homo sapien
tcgtgggtcatcacgtcagacgtgc

SEQ ID NO: 1276746 - DNA, 25 bp, Homo sapien
tctgtccgtagaactggcagtcggc

SEQ ID NO: 1276747 - DNA, 25 bp, Homo sapien
cgctggaagccgtcgttaatgagct

SEQ ID NO: 1276748 - DNA, 25 bp, Homo sapien
tgaaacgcatgaagccgtgctgcag

SEQ ID NO: 1276749 - DNA, 25 bp, Homo sapien
tgtagtggcggatcacgtcctgctt

SEQ ID NO: 1276750 - DNA, 25 bp, Homo sapien
catgcagtgatagtgggtgctcttc

SEQ ID NO: 1276751 - DNA, 25 bp, Homo sapien
tcttcccattgaggtggcagccgtg

SEQ ID NO: 1276752 - DNA, 25 bp, Homo sapien
gtagttacactcagggtcaaggcag

SEQ ID NO: 1276753 - DNA, 25 bp, Homo sapien
tcaaggcagtggtagtgctcgcggt

SEQ ID NO: 1276754 - DNA, 25 bp, Homo sapien
ctggtagttacactcagggtcaagg

SEQ ID NO: 1276755 - DNA, 25 bp, Homo sapien
tgctcgcggtactggtaggcacagt

SEQ ID NO: 1276756 - DNA, 25 bp, Homo sapien
cacagcctcggtgacggccggccgt

SEQ ID NO: 1276757 - DNA, 25 bp, Homo sapien
cagggccgctgggacgtggctccca

SEQ ID NO: 1276758 - DNA, 25 bp, Homo sapien
gggccgctgggacgtggctcccaca

SEQ ID NO: 1276759 - DNA, 25 bp, Homo sapien
cagcctcggtgacggccggccgtgg

SEQ ID NO: 1276760 - DNA, 25 bp, Homo sapien
tatcaaacgaatggcctcagagtgc

SEQ ID NO: 1276761 - DNA, 25 bp, Homo sapien
gaatgtgtggcctggactacacaga

SEQ ID NO: 1276762 - DNA, 25 bp, Homo sapien
cctgacagtttcacggtggcctgca

SEQ ID NO: 1276763 - DNA, 25 bp, Homo sapien
gccctagaggtcagatatcaaacga

SEQ ID NO: 1276764 - DNA, 25 bp, Homo sapien
tggtttatctgtgggcagtccgttc

SEQ ID NO: 1276765 - DNA, 25 bp, Homo sapien
catcttcagtgacggctggtttatc

SEQ ID NO: 1276766 - DNA, 25 bp, Homo sapien
tgtttacatcttcagtgacggctgg

SEQ ID NO: 1276767 - DNA, 25 bp, Homo sapien
tggcaatatatttctggtaaatgtt

SEQ ID NO: 1276768 - DNA, 25 bp, Homo sapien
tcatagccaaacatgccgaggaact

SEQ ID NO: 1276769 - DNA, 25 bp, Homo sapien
tgaagaagtcgtacttggaggcccg

SEQ ID NO: 1276770 - DNA, 25 bp, Homo sapien
gatgccccggacgtcgtacttggaa

SEQ ID NO: 1276771 - DNA, 25 bp, Homo sapien
catctggacactgctgtgcgacggc

SEQ ID NO: 1276772 - DNA, 25 bp, Homo sapien
ctgcagaggaggatgggggcgcatc

SEQ ID NO: 1276773 - DNA, 25 bp, Homo sapien
tgcagaggaggatgggggcgcatca

SEQ ID NO: 1276774 - DNA, 25 bp, Homo sapien
gcagaggaggatgggggcgcatcac

SEQ ID NO: 1276775 - DNA, 25 bp, Homo sapien
agaggaggatgggggcgcatcacct

SEQ ID NO: 1276776 - DNA, 25 bp, Homo sapien
cctgggcagatgaagggtccactac

SEQ ID NO: 1276777 - DNA, 25 bp, Homo sapien
cacgatctatggacgtttggctcac

SEQ ID NO: 1276778 - DNA, 25 bp, Homo sapien
tgcagtcacacaaggttgggccacc

SEQ ID NO: 1276779 - DNA, 25 bp, Homo sapien
tggcctgtgacataggacctggaca

SEQ ID NO: 1276780 - DNA, 25 bp, Homo sapien
ggcgggatgtggaaggagaggctgt

SEQ ID NO: 1276781 - DNA, 25 bp, Homo sapien
gagaggctgtgggctccggggaggg

SEQ ID NO: 1276782 - DNA, 25 bp, Homo sapien
gaggctgtgggctccggggagggcc

SEQ ID NO: 1276783 - DNA, 25 bp, Homo sapien
ctggcgggatgtggaaggagaggct

SEQ ID NO: 1276784 - DNA, 25 bp, Homo sapien
cctcattgatctcgcaatgtttgtt

SEQ ID NO: 1276785 - DNA, 25 bp, Homo sapien
tgttaattactctgtcactgatgtg

SEQ ID NO: 1276786 - DNA, 25 bp, Homo sapien
catgcataattatgtggctgcgcag

SEQ ID NO: 1276787 - DNA, 25 bp, Homo sapien
cactgatgtggcgaaggataattaa

SEQ ID NO: 1276788 - DNA, 25 bp, Homo sapien
cagggctgctctcgatccccaggac

SEQ ID NO: 1276789 - DNA, 25 bp, Homo sapien
ctcgatccccaggacatggacatgg

SEQ ID NO: 1276790 - DNA, 25 bp, Homo sapien
ggctgctctcgatccccaggacatg

SEQ ID NO: 1276791 - DNA, 25 bp, Homo sapien
gctctcgatccccaggacatggaca

SEQ ID NO: 1276792 - DNA, 25 bp, Homo sapien
atgtggccctgagacgtcctgctgg

SEQ ID NO: 1276793 - DNA, 25 bp, Homo sapien
atccatgtggccctgagacgtcctg

SEQ ID NO: 1276794 - DNA, 25 bp, Homo sapien
gccagggacagcggtgtagggaagg

SEQ ID NO: 1276795 - DNA, 25 bp, Homo sapien
ggccagggacagcggtgtagggaag

SEQ ID NO: 1276796 - DNA, 25 bp, Homo sapien
cttcctcatcgctgcacccctgggg

SEQ ID NO: 1276797 - DNA, 25 bp, Homo sapien
tgccccgtccgaatccttctcctcc

SEQ ID NO: 1276798 - DNA, 25 bp, Homo sapien
tggagggctcctccgcgtggtcttc

SEQ ID NO: 1276799 - DNA, 25 bp, Homo sapien
tccttggaggctgccccgtccgaat

SEQ ID NO: 1276800 - DNA, 25 bp, Homo sapien
acccttgcgtttgggcgccatggcg

SEQ ID NO: 1276801 - DNA, 25 bp, Homo sapien
cctggcggctcagcttggcgcagat

SEQ ID NO: 1276802 - DNA, 25 bp, Homo sapien
gcagatggcgttcagcttcaggcca

SEQ ID NO: 1276803 - DNA, 25 bp, Homo sapien
atccgccccaacacgggtgtgggtg

SEQ ID NO: 1276804 - DNA, 25 bp, Homo sapien
acagcacctaatccccgaatgtgac

SEQ ID NO: 1276805 - DNA, 25 bp, Homo sapien
aggcgacttgagagccagcgacctc

SEQ ID NO: 1276806 - DNA, 25 bp, Homo sapien
cgacacacacagccggaaggaagcc

SEQ ID NO: 1276807 - DNA, 25 bp, Homo sapien
gaagccctcatgaggcgacttgaga

SEQ ID NO: 1276808 - DNA, 25 bp, Homo sapien
cagggccaggccccctcccgcaggc

SEQ ID NO: 1276809 - DNA, 25 bp, Homo sapien
gggccaggccccctcccgcaggcat

SEQ ID NO: 1276810 - DNA, 25 bp, Homo sapien
ctggtcagggccaggccccctcccg

SEQ ID NO: 1276811 - DNA, 25 bp, Homo sapien
ggtcagggccaggccccctcccgca

SEQ ID NO: 1276812 - DNA, 25 bp, Homo sapien
tgcgagagacacactcatcagctcc

SEQ ID NO: 1276813 - DNA, 25 bp, Homo sapien
atcagctccaacttcggcgacggtg

SEQ ID NO: 1276814 - DNA, 25 bp, Homo sapien
ggtgacattccacgcctgcgagaga

SEQ ID NO: 1276815 - DNA, 25 bp, Homo sapien
cgtccgcctcctttggccttaatat

SEQ ID NO: 1276816 - DNA, 25 bp, Homo sapien
taagccgaggactgggtcttgggga

SEQ ID NO: 1276817 - DNA, 25 bp, Homo sapien
agttctaagccgaggactgggtctt

SEQ ID NO: 1276818 - DNA, 25 bp, Homo sapien
tctaagccgaggactgggtcttggg

SEQ ID NO: 1276819 - DNA, 25 bp, Homo sapien
ttctaagccgaggactgggtcttgg

SEQ ID NO: 1276820 - DNA, 25 bp, Homo sapien
cgccttattgcttctccccttaatg

SEQ ID NO: 1276821 - DNA, 25 bp, Homo sapien
ggaataaacggccaccagaaaatga

SEQ ID NO: 1276822 - DNA, 25 bp, Homo sapien
gccttattgcttctccccttaatgg

SEQ ID NO: 1276823 - DNA, 25 bp, Homo sapien
aggaataaacggccaccagaaaatg

SEQ ID NO: 1276824 - DNA, 25 bp, Homo sapien
gtggggacgctaggctgcccctccc

SEQ ID NO: 1276825 - DNA, 25 bp, Homo sapien
tggggacgctaggctgcccctcccc

SEQ ID NO: 1276826 - DNA, 25 bp, Homo sapien
aacaaactcagccaaggaacctctg

SEQ ID NO: 1276827 - DNA, 25 bp, Homo sapien
gtgaatgggttctcctcgctggtcc

SEQ ID NO: 1276828 - DNA, 25 bp, Homo sapien
gagtgaatgggttctcctcgctggt

SEQ ID NO: 1276829 - DNA, 25 bp, Homo sapien
agtgaatgggttctcctcgctggtc

SEQ ID NO: 1276830 - DNA, 25 bp, Homo sapien
cgaaggtgtaaccagagctagtgag

SEQ ID NO: 1276831 - DNA, 25 bp, Homo sapien
tgcctggcaggtcgaaggtgtaacc

SEQ ID NO: 1276832 - DNA, 25 bp, Homo sapien
gctagtgaggttcctagaagcctcc

SEQ ID NO: 1276833 - DNA, 25 bp, Homo sapien
tcagtccccggtgcctggcaggtcg

SEQ ID NO: 1276834 - DNA, 25 bp, Homo sapien
gaaggtggttgacactcagggcagg

SEQ ID NO: 1276835 - DNA, 25 bp, Homo sapien
ctgaaggtggttgacactcagggca

SEQ ID NO: 1276836 - DNA, 25 bp, Homo sapien
ccaaactctcctaatcttccgtaca

SEQ ID NO: 1276837 - DNA, 25 bp, Homo sapien
aactctcctaatcttccgtacacaa

SEQ ID NO: 1276838 - DNA, 25 bp, Homo sapien
tcccaaactctcctaatcttccgta

SEQ ID NO: 1276839 - DNA, 25 bp, Homo sapien
ttattcccaaactctcctaatcttc

SEQ ID NO: 1276840 - DNA, 25 bp, Homo sapien
taaaaactggctgctagtttaatta

SEQ ID NO: 1276841 - DNA, 25 bp, Homo sapien
ggcctggtgaattaggacgacatcg

SEQ ID NO: 1276842 - DNA, 25 bp, Homo sapien
tgctaaagacgtccagattgatcca

SEQ ID NO: 1276843 - DNA, 25 bp, Homo sapien
aatttgctgtcatctcggggcctgg

SEQ ID NO: 1276844 - DNA, 25 bp, Homo sapien
tgaaggccttcaggacctagatgtg

SEQ ID NO: 1276845 - DNA, 25 bp, Homo sapien
taacctacgatcagggaggcatggt

SEQ ID NO: 1276846 - DNA, 25 bp, Homo sapien
tcctgagaaggcttggctctcccac

SEQ ID NO: 1276847 - DNA, 25 bp, Homo sapien
gggatgttaacctacgatcagggag

SEQ ID NO: 1276848 - DNA, 25 bp, Homo sapien
ccggccagagacgaggcccatggcc

SEQ ID NO: 1276849 - DNA, 25 bp, Homo sapien
gctgtatgccgtgtgcactatgaag

SEQ ID NO: 1276850 - DNA, 25 bp, Homo sapien
ctatgaagttgagggagctgttccc

SEQ ID NO: 1276851 - DNA, 25 bp, Homo sapien
ccccagctgtatgccgtgtgcacta

SEQ ID NO: 1276852 - DNA, 25 bp, Homo sapien
tcagatatcagctcatgggtcccaa

SEQ ID NO: 1276853 - DNA, 25 bp, Homo sapien
tcccaagggccgatgctgtgaactt

SEQ ID NO: 1276854 - DNA, 25 bp, Homo sapien
attataaacaacaacgctaacagcc

SEQ ID NO: 1276855 - DNA, 25 bp, Homo sapien
acaacgctaacagccaccagtatca

SEQ ID NO: 1276856 - DNA, 25 bp, Homo sapien
atcccacagattctcaggtgaaaaa

SEQ ID NO: 1276857 - DNA, 25 bp, Homo sapien
tgataacagccacctcatcccacag

SEQ ID NO: 1276858 - DNA, 25 bp, Homo sapien
tttgaactgataacagccacctcat

SEQ ID NO: 1276859 - DNA, 25 bp, Homo sapien
catcccacagattctcaggtgaaaa

SEQ ID NO: 1276860 - DNA, 25 bp, Homo sapien
cttgagacagtcgccccgaaaccag

SEQ ID NO: 1276861 - DNA, 25 bp, Homo sapien
tcccaacaggacgctgctttcaaaa

SEQ ID NO: 1276862 - DNA, 25 bp, Homo sapien
cccaacaggacgctgctttcaaaaa

SEQ ID NO: 1276863 - DNA, 25 bp, Homo sapien
gacagtcgccccgaaaccagactaa

SEQ ID NO: 1276864 - DNA, 25 bp, Homo sapien
atccattctcttctccttggtccca

SEQ ID NO: 1276865 - DNA, 25 bp, Homo sapien
attctcttctccttggtcccaaact

SEQ ID NO: 1276866 - DNA, 25 bp, Homo sapien
cattctcttctccttggtcccaaac

SEQ ID NO: 1276867 - DNA, 25 bp, Homo sapien
ctgttccaagatccattctcttctc

SEQ ID NO: 1276868 - DNA, 25 bp, Homo sapien
catagtcggagagtcgaaagccgaa

SEQ ID NO: 1276869 - DNA, 25 bp, Homo sapien
gaaagccgaattcacttaaataatc

SEQ ID NO: 1276870 - DNA, 25 bp, Homo sapien
gagtcgaaagccgaattcacttaaa

SEQ ID NO: 1276871 - DNA, 25 bp, Homo sapien
tcggagagtcgaaagccgaattcac

SEQ ID NO: 1276872 - DNA, 25 bp, Homo sapien
cacataaacttgaacaaagctcctt

SEQ ID NO: 1276873 - DNA, 25 bp, Homo sapien
ctttcacataaacttgaacaaagct

SEQ ID NO: 1276874 - DNA, 25 bp, Homo sapien
caaagctccttttgttattgcaccc

SEQ ID NO: 1276875 - DNA, 25 bp, Homo sapien
tgtaactttcacataaacttgaaca

SEQ ID NO: 1276876 - DNA, 25 bp, Homo sapien
tgtgtttgcgtgtgagcccgctccg

SEQ ID NO: 1276877 - DNA, 25 bp, Homo sapien
aaactggttccatctgaggcgactg

SEQ ID NO: 1276878 - DNA, 25 bp, Homo sapien
gaacaagcatgttcgcacctgcgag

SEQ ID NO: 1276879 - DNA, 25 bp, Homo sapien
gccttggccaaaggactgcgtgtgc

SEQ ID NO: 1276880 - DNA, 25 bp, Homo sapien
ggctacttcagttaccctgttgctg

SEQ ID NO: 1276881 - DNA, 25 bp, Homo sapien
gctacttcagttaccctgttgctgc

SEQ ID NO: 1276882 - DNA, 25 bp, Homo sapien
tggctacttcagttaccctgttgct

SEQ ID NO: 1276883 - DNA, 25 bp, Homo sapien
aaatatctacttgggcccctgatgc

SEQ ID NO: 1276884 - DNA, 25 bp, Homo sapien
catattctccatgtgcagcagaccg

SEQ ID NO: 1276885 - DNA, 25 bp, Homo sapien
caccttcatactagttacagggtta

SEQ ID NO: 1276886 - DNA, 25 bp, Homo sapien
acaaactttaattcgctgcctggct

SEQ ID NO: 1276887 - DNA, 25 bp, Homo sapien
agggttatttagcttctcctgatgc

SEQ ID NO: 1276888 - DNA, 25 bp, Homo sapien
taccctgtcaggacctcatgggcgg

SEQ ID NO: 1276889 - DNA, 25 bp, Homo sapien
gcaaggttctcgtgatcagagggta

SEQ ID NO: 1276890 - DNA, 25 bp, Homo sapien
ggcacggcgtgggaagccaatatcc

SEQ ID NO: 1276891 - DNA, 25 bp, Homo sapien
ttcaggacacggaatggctggcttc

SEQ ID NO: 1276892 - DNA, 25 bp, Homo sapien
tccgaaagggatgccgcggtgggag

SEQ ID NO: 1276893 - DNA, 25 bp, Homo sapien
tgcccgccagcgcagacaatgctgg

SEQ ID NO: 1276894 - DNA, 25 bp, Homo sapien
tctgatcacgttttcagggccactg

SEQ ID NO: 1276895 - DNA, 25 bp, Homo sapien
gagcctttgaagtccgaaagggatg

SEQ ID NO: 1276896 - DNA, 25 bp, Homo sapien
aacaaacaggtttggagccaggcgc

SEQ ID NO: 1276897 - DNA, 25 bp, Homo sapien
gcccgaaacgcgagagacaaaggga

SEQ ID NO: 1276898 - DNA, 25 bp, Homo sapien
gggcaggccccgctatttacataac

SEQ ID NO: 1276899 - DNA, 25 bp, Homo sapien
ccaggcgcacggtgccgtgtctgtc

SEQ ID NO: 1276900 - DNA, 25 bp, Homo sapien
ctcgcgccaccaccccggggactga

SEQ ID NO: 1276901 - DNA, 25 bp, Homo sapien
gcagccccgtatgcttggacttcag

SEQ ID NO: 1276902 - DNA, 25 bp, Homo sapien
ggtggccccgcggtttctcgcgcca

SEQ ID NO: 1276903 - DNA, 25 bp, Homo sapien
tgacacagcccgtgaaggctgggcc

SEQ ID NO: 1276904 - DNA, 25 bp, Homo sapien
gtagcaggtcctagaacctcctcgg

SEQ ID NO: 1276905 - DNA, 25 bp, Homo sapien
ctcgtagcaggtcctagaacctcct

SEQ ID NO: 1276906 - DNA, 25 bp, Homo sapien
aacctcctcggatgtagctgggggt

SEQ ID NO: 1276907 - DNA, 25 bp, Homo sapien
tagcaggtcctagaacctcctcgga

SEQ ID NO: 1276908 - DNA, 25 bp, Homo sapien
cttggggagggctgtctgttacgtt

SEQ ID NO: 1276909 - DNA, 25 bp, Homo sapien
cctcagaaccctatccaggcttggg

SEQ ID NO: 1276910 - DNA, 25 bp, Homo sapien
ggcctcagaaccctatccaggcttg

SEQ ID NO: 1276911 - DNA, 25 bp, Homo sapien
ctgcaggcctcagaaccctatccag

SEQ ID NO: 1276912 - DNA, 25 bp, Homo sapien
taacgacttgcagcgcggtgttgcc

SEQ ID NO: 1276913 - DNA, 25 bp, Homo sapien
aatgataacgacttgcagcgcggtg

SEQ ID NO: 1276914 - DNA, 25 bp, Homo sapien
ttgcagcgcggtgttgccgtcccca

SEQ ID NO: 1276915 - DNA, 25 bp, Homo sapien
cggaatgataacgacttgcagcgcg

SEQ ID NO: 1276916 - DNA, 25 bp, Homo sapien
ctgacgtagttaaggaaggattctc

SEQ ID NO: 1276917 - DNA, 25 bp, Homo sapien
cactgtctgctttgtgagtggccca

SEQ ID NO: 1276918 - DNA, 25 bp, Homo sapien
cagcacatctgggacctggtagctg

SEQ ID NO: 1276919 - DNA, 25 bp, Homo sapien
ttgtgagtggcccatatgagtgagt

SEQ ID NO: 1276920 - DNA, 25 bp, Homo sapien
tgcagttccctcttgctggagccgc

SEQ ID NO: 1276921 - DNA, 25 bp, Homo sapien
ctgcagttccctcttgctggagccg

SEQ ID NO: 1276922 - DNA, 25 bp, Homo sapien
gcagttccctcttgctggagccgct

SEQ ID NO: 1276923 - DNA, 25 bp, Homo sapien
agttccctcttgctggagccgctgc

SEQ ID NO: 1276924 - DNA, 25 bp, Homo sapien
cccgcactccactgcgtctccttcc

SEQ ID NO: 1276925 - DNA, 25 bp, Homo sapien
cctggccagccctttcacaggggct

SEQ ID NO: 1276926 - DNA, 25 bp, Homo sapien
ggcagcgtcatggaaacgggcactt

SEQ ID NO: 1276927 - DNA, 25 bp, Homo sapien
ggcatagacaacaggggcagcgtca

SEQ ID NO: 1276928 - DNA, 25 bp, Homo sapien
cactttcccggagaaatattctgtt

SEQ ID NO: 1276929 - DNA, 25 bp, Homo sapien
catggaaacgggcactttcccggag

SEQ ID NO: 1276930 - DNA, 25 bp, Homo sapien
tgccatgcaattgggtacgcaggct

SEQ ID NO: 1276931 - DNA, 25 bp, Homo sapien
tgctgttgaggactcgcggaaataa

SEQ ID NO: 1276932 - DNA, 25 bp, Homo sapien
ggcaaaccaaagactcaaccctcag

SEQ ID NO: 1276933 - DNA, 25 bp, Homo sapien
catgagtacctagctcaaaggaagt

SEQ ID NO: 1276934 - DNA, 25 bp, Homo sapien
atcaaattccttatcgcactgacac

SEQ ID NO: 1276935 - DNA, 25 bp, Homo sapien
ggtatttctgataaagccatcaaat

SEQ ID NO: 1276936 - DNA, 25 bp, Homo sapien
cactgacacaaagtgcatttaaaga

SEQ ID NO: 1276937 - DNA, 25 bp, Homo sapien
cacaaagtgcatttaaagagacaga

SEQ ID NO: 1276938 - DNA, 25 bp, Homo sapien
agctgctcagacactttgggatcag

SEQ ID NO: 1276939 - DNA, 25 bp, Homo sapien
tgggatcagacaccaaatacggctc

SEQ ID NO: 1276940 - DNA, 25 bp, Homo sapien
ctttgggatcagacaccaaatacgg

SEQ ID NO: 1276941 - DNA, 25 bp, Homo sapien
cagctgctcagacactttgggatca

SEQ ID NO: 1276942 - DNA, 25 bp, Homo sapien
ccaactgatgtcagagctgccggca

SEQ ID NO: 1276943 - DNA, 25 bp, Homo sapien
aattcccccccaactgatgtcagag

SEQ ID NO: 1276944 - DNA, 25 bp, Homo sapien
ccctgaactcggtcccagggcgtgg

SEQ ID NO: 1276945 - DNA, 25 bp, Homo sapien
gatgtcagagctgccggcaccctga

SEQ ID NO: 1276946 - DNA, 25 bp, Homo sapien
aatagagacgtcctgcaccggagga

SEQ ID NO: 1276947 - DNA, 25 bp, Homo sapien
gagctatgaatagagacgtcctgca

SEQ ID NO: 1276948 - DNA, 25 bp, Homo sapien
gaggacgtcctcataaacagaacaa

SEQ ID NO: 1276949 - DNA, 25 bp, Homo sapien
ccaactctggaagccgaagggagct

SEQ ID NO: 1276950 - DNA, 25 bp, Homo sapien
ctgtggtaggacaacagccatcagt

SEQ ID NO: 1276951 - DNA, 25 bp, Homo sapien
ggaagagtccgggcaggctggtggg

SEQ ID NO: 1276952 - DNA, 25 bp, Homo sapien
gaggaagagtccgggcaggctggtg

SEQ ID NO: 1276953 - DNA, 25 bp, Homo sapien
aggaagagtccgggcaggctggtgg

SEQ ID NO: 1276954 - DNA, 25 bp, Homo sapien
tatgactgggcacttaacctgcagg

SEQ ID NO: 1276955 - DNA, 25 bp, Homo sapien
cacagcctgttggttgaggaatcaa

SEQ ID NO: 1276956 - DNA, 25 bp, Homo sapien
aacgtctccactggcatccgtagga

SEQ ID NO: 1276957 - DNA, 25 bp, Homo sapien
ttaacagatatagctgccgcaggac

SEQ ID NO: 1276958 - DNA, 25 bp, Homo sapien
ctggagcacgaggagaggctggcca

SEQ ID NO: 1276959 - DNA, 25 bp, Homo sapien
gggacactcaggtccacctggagca

SEQ ID NO: 1276960 - DNA, 25 bp, Homo sapien
ctaagggacactcaggtccacctgg

SEQ ID NO: 1276961 - DNA, 25 bp, Homo sapien
tcaggtccacctggagcacgaggag

SEQ ID NO: 1276962 - DNA, 25 bp, Homo sapien
gggaagttcaccctgctcagggcca

SEQ ID NO: 1276963 - DNA, 25 bp, Homo sapien
cagggaagttcaccctgctcagggc

SEQ ID NO: 1276964 - DNA, 25 bp, Homo sapien
agggaagttcaccctgctcagggcc

SEQ ID NO: 1276965 - DNA, 25 bp, Homo sapien
tgacgtctccgatccaattaatatg

SEQ ID NO: 1276966 - DNA, 25 bp, Homo sapien
tgcttgacgtctccgatccaattaa

SEQ ID NO: 1276967 - DNA, 25 bp, Homo sapien
acgtctccgatccaattaatatgca

SEQ ID NO: 1276968 - DNA, 25 bp, Homo sapien
aaagatgcttgacgtctccgatcca

SEQ ID NO: 1276969 - DNA, 25 bp, Homo sapien
cagcgtggcccccttgccatcagag

SEQ ID NO: 1276970 - DNA, 25 bp, Homo sapien
ccttgccatcagagcccacgggggg

SEQ ID NO: 1276971 - DNA, 25 bp, Homo sapien
tggcccccttgccatcagagcccac

SEQ ID NO: 1276972 - DNA, 25 bp, Homo sapien
tgccagcgtggcccccttgccatca

SEQ ID NO: 1276973 - DNA, 25 bp, Homo sapien
tgcacctcaccactgacctgcaagt

SEQ ID NO: 1276974 - DNA, 25 bp, Homo sapien
tggagggtacgccagtgacctcccc

SEQ ID NO: 1276975 - DNA, 25 bp, Homo sapien
ctggacgagggtggagggtacgcca

SEQ ID NO: 1276976 - DNA, 25 bp, Homo sapien
gagggtggagggtacgccagtgacc

SEQ ID NO: 1276977 - DNA, 25 bp, Homo sapien
cttcgagggcagatctctttccatt

SEQ ID NO: 1276978 - DNA, 25 bp, Homo sapien
tccattcaagctcgaacattctggg

SEQ ID NO: 1276979 - DNA, 25 bp, Homo sapien
aacattctgggtgctcggagaaggc

SEQ ID NO: 1276980 - DNA, 25 bp, Homo sapien
gctcggagaaggcttcttctatctt

SEQ ID NO: 1276981 - DNA, 25 bp, Homo sapien
cacggcagctgagcaccaatggggt

SEQ ID NO: 1276982 - DNA, 25 bp, Homo sapien
ccacggcagctgagcaccaatgggg

SEQ ID NO: 1276983 - DNA, 25 bp, Homo sapien
ggtgcagacgggaggtgcgcatcat

SEQ ID NO: 1276984 - DNA, 25 bp, Homo sapien
ggtgtgcgtgggtgcagacgggagg

SEQ ID NO: 1276985 - DNA, 25 bp, Homo sapien
tcgattgaagagacacactttcctc

SEQ ID NO: 1276986 - DNA, 25 bp, Homo sapien
tccttgtcgattgaagagacacact

SEQ ID NO: 1276987 - DNA, 25 bp, Homo sapien
gctctgttggctcaatttcttattg

SEQ ID NO: 1276988 - DNA, 25 bp, Homo sapien
atatttttccttgtcgattgaagag

SEQ ID NO: 1276989 - DNA, 25 bp, Homo sapien
taatagactcaacaataaatggtaa

SEQ ID NO: 1276990 - DNA, 25 bp, Homo sapien
atagactcaacaataaatggtaaag

SEQ ID NO: 1276991 - DNA, 25 bp, Homo sapien
aatagactcaacaataaatggtaaa

SEQ ID NO: 1276992 - DNA, 25 bp, Homo sapien
tagactcaacaataaatggtaaagc

SEQ ID NO: 1276993 - DNA, 25 bp, Homo sapien
aggttgagccgccacgggccccaag

SEQ ID NO: 1276994 - DNA, 25 bp, Homo sapien
gctgacgagagaggcgcctgcaaac

SEQ ID NO: 1276995 - DNA, 25 bp, Homo sapien
gcctgcaaacgcaggcgaggcccgg

SEQ ID NO: 1276996 - DNA, 25 bp, Homo sapien
gctgcattctgagctgacgagagag

SEQ ID NO: 1276997 - DNA, 25 bp, Homo sapien
gcccaggtgggaggaatttcctgaa

SEQ ID NO: 1276998 - DNA, 25 bp, Homo sapien
caggtgggaggaatttcctgaaagg

SEQ ID NO: 1276999 - DNA, 25 bp, Homo sapien
ctggcccaggtgggaggaatttcct

SEQ ID NO: 1277000 - DNA, 25 bp, Homo sapien
ccaggtgggaggaatttcctgaaag

SEQ ID NO: 1277001 - DNA, 25 bp, Homo sapien
tatagtttggcccaaatgtcccggc

SEQ ID NO: 1277002 - DNA, 25 bp, Homo sapien
caaggtctcattccagtggcccggt

SEQ ID NO: 1277003 - DNA, 25 bp, Homo sapien
aaatttcagggcacaatcgctcatg

SEQ ID NO: 1277004 - DNA, 25 bp, Homo sapien
tctgcaaccccataggatacgagtt

SEQ ID NO: 1277005 - DNA, 25 bp, Homo sapien
tggggggcattagcagaagagagac

SEQ ID NO: 1277006 - DNA, 25 bp, Homo sapien
ggcattagcagaagagagacacggc

SEQ ID NO: 1277007 - DNA, 25 bp, Homo sapien
gggtggggggcattagcagaagaga

SEQ ID NO: 1277008 - DNA, 25 bp, Homo sapien
ggggggcattagcagaagagagaca

SEQ ID NO: 1277009 - DNA, 25 bp, Homo sapien
ccacgagcaggcatgtcctgggcac

SEQ ID NO: 1277010 - DNA, 25 bp, Homo sapien
acgagcaggcatgtcctgggcacca

SEQ ID NO: 1277011 - DNA, 25 bp, Homo sapien
accacgagcaggcatgtcctgggca

SEQ ID NO: 1277012 - DNA, 25 bp, Homo sapien
gcaccacgagcaggcatgtcctggg

SEQ ID NO: 1277013 - DNA, 25 bp, Homo sapien
cacagtcccagatgggcgggcaagg

SEQ ID NO: 1277014 - DNA, 25 bp, Homo sapien
agatgggcgggcaaggactgtatgt

SEQ ID NO: 1277015 - DNA, 25 bp, Homo sapien
agtcccagatgggcgggcaaggact

SEQ ID NO: 1277016 - DNA, 25 bp, Homo sapien
acaggggaacacagtcccagatggg

SEQ ID NO: 1277017 - DNA, 25 bp, Homo sapien
tgtaggtgacagtcataaactccac

SEQ ID NO: 1277018 - DNA, 25 bp, Homo sapien
tcataaactccacagtgtctccaat

SEQ ID NO: 1277019 - DNA, 25 bp, Homo sapien
tgccatgatggccaaggcccacgtg

SEQ ID NO: 1277020 - DNA, 25 bp, Homo sapien
catgatggccaaggcccacgtggcc

SEQ ID NO: 1277021 - DNA, 25 bp, Homo sapien
ctccatgtccccaaggagcacaggg

SEQ ID NO: 1277022 - DNA, 25 bp, Homo sapien
tccatgtccccaaggagcacagggc

SEQ ID NO: 1277023 - DNA, 25 bp, Homo sapien
catgtccccaaggagcacagggctc

SEQ ID NO: 1277024 - DNA, 25 bp, Homo sapien
ccatgtccccaaggagcacagggct

SEQ ID NO: 1277025 - DNA, 25 bp, Homo sapien
tgcaccactatacacggctaatttt

SEQ ID NO: 1277026 - DNA, 25 bp, Homo sapien
catgcaccactatacacggctaatt

SEQ ID NO: 1277027 - DNA, 25 bp, Homo sapien
agtgatctgtctgcctcagcctccc

SEQ ID NO: 1277028 - DNA, 25 bp, Homo sapien
aagtgatctgtctgcctcagcctcc

SEQ ID NO: 1277029 - DNA, 25 bp, Homo sapien
gtcgcagccacacagttgccccacc

SEQ ID NO: 1277030 - DNA, 25 bp, Homo sapien
agttgccccaccacagcgaccaaag

SEQ ID NO: 1277031 - DNA, 25 bp, Homo sapien
accacagcgaccaaaggccacattt

SEQ ID NO: 1277032 - DNA, 25 bp, Homo sapien
ccaaaggccacatttgcatctgatt

SEQ ID NO: 1277033 - DNA, 25 bp, Homo sapien
aaggaggggtcgatggccgtggcag

SEQ ID NO: 1277034 - DNA, 25 bp, Homo sapien
ccagggtccgaagtccattccaaca

SEQ ID NO: 1277035 - DNA, 25 bp, Homo sapien
tgtaaaggaggggtcgatggccgtg

SEQ ID NO: 1277036 - DNA, 25 bp, Homo sapien
gtccattccaacacgtgctgctggg

SEQ ID NO: 1277037 - DNA, 25 bp, Homo sapien
ccttcagtcagcaaggtctgtttgc

SEQ ID NO: 1277038 - DNA, 25 bp, Homo sapien
gtctttgccttcagtcagcaaggtc

SEQ ID NO: 1277039 - DNA, 25 bp, Homo sapien
ccggtcagaaagtgcagagcgcaga

SEQ ID NO: 1277040 - DNA, 25 bp, Homo sapien
ccatggatcccggtcagaaagtgca

SEQ ID NO: 1277041 - DNA, 25 bp, Homo sapien
gggccatggatcccggtcagaaagt

SEQ ID NO: 1277042 - DNA, 25 bp, Homo sapien
tggatcccggtcagaaagtgcagag

SEQ ID NO: 1277043 - DNA, 25 bp, Homo sapien
tagagcccgtaatgaaaatctgagc

SEQ ID NO: 1277044 - DNA, 25 bp, Homo sapien
ctataattcatccatcgcagaagat

SEQ ID NO: 1277045 - DNA, 25 bp, Homo sapien
ttcatccatcgcagaagataatcga

SEQ ID NO: 1277046 - DNA, 25 bp, Homo sapien
cagaagataatcgatagagcccgta

SEQ ID NO: 1277047 - DNA, 25 bp, Homo sapien
gtctggtaaacaccctgaaccatcc

SEQ ID NO: 1277048 - DNA, 25 bp, Homo sapien
ccatccccacactccgttaggcagc

SEQ ID NO: 1277049 - DNA, 25 bp, Homo sapien
cactccgttaggcagcctcggatct

SEQ ID NO: 1277050 - DNA, 25 bp, Homo sapien
tgtctggtaaacaccctgaaccatc

SEQ ID NO: 1277051 - DNA, 25 bp, Homo sapien
ccggagcaaacctccttaactctga

SEQ ID NO: 1277052 - DNA, 25 bp, Homo sapien
cctgtggtggtccggagcaaacctc

SEQ ID NO: 1277053 - DNA, 25 bp, Homo sapien
gagagttcagagcagacgagtagac

SEQ ID NO: 1277054 - DNA, 25 bp, Homo sapien
gacgagtagacaaagaagtgtctga

SEQ ID NO: 1277055 - DNA, 25 bp, Homo sapien
catggacactacaatgtctgggacc

SEQ ID NO: 1277056 - DNA, 25 bp, Homo sapien
cagagcagttggtctacctgccctc

SEQ ID NO: 1277057 - DNA, 25 bp, Homo sapien
gtcccggccaagtttctccaggatg

SEQ ID NO: 1277058 - DNA, 25 bp, Homo sapien
gaccattcggctcaatgtgaaggca

SEQ ID NO: 1277059 - DNA, 25 bp, Homo sapien
tccagacggtggcaagaagctccag

SEQ ID NO: 1277060 - DNA, 25 bp, Homo sapien
ctgcaaaggctctccctggtaccag

SEQ ID NO: 1277061 - DNA, 25 bp, Homo sapien
ctgcggactccagacggtggcaaga

SEQ ID NO: 1277062 - DNA, 25 bp, Homo sapien
tgtgggagagggttggctgcatggc

SEQ ID NO: 1277063 - DNA, 25 bp, Homo sapien
cctgaggacaggacaaggaccgcag

SEQ ID NO: 1277064 - DNA, 25 bp, Homo sapien
ccgagcctcggaagctcagctggga

SEQ ID NO: 1277065 - DNA, 25 bp, Homo sapien
acaggacaaggaccgcagggttggg

SEQ ID NO: 1277066 - DNA, 25 bp, Homo sapien
cagctgggaatctgttcctgaggac

SEQ ID NO: 1277067 - DNA, 25 bp, Homo sapien
tattccgtcgtgatattcctgggca

SEQ ID NO: 1277068 - DNA, 25 bp, Homo sapien
cctgggcagaccctatgaagtgaga

SEQ ID NO: 1277069 - DNA, 25 bp, Homo sapien
catgtttcgaaaccatcctcgggat

SEQ ID NO: 1277070 - DNA, 25 bp, Homo sapien
cacactggcctagggttttgggcaa

SEQ ID NO: 1277071 - DNA, 25 bp, Homo sapien
aatgggaatcgaaccactgcttgcc

SEQ ID NO: 1277072 - DNA, 25 bp, Homo sapien
ttccggtgcatagggaaaagcgtgc

SEQ ID NO: 1277073 - DNA, 25 bp, Homo sapien
gatcaaccagcgttggaaccctagc

SEQ ID NO: 1277074 - DNA, 25 bp, Homo sapien
caaagagtcacagcgcagcatctga

SEQ ID NO: 1277075 - DNA, 25 bp, Homo sapien
ctccccaaggatcagatttccccga

SEQ ID NO: 1277076 - DNA, 25 bp, Homo sapien
ggtctccccaaggatcagatttccc

SEQ ID NO: 1277077 - DNA, 25 bp, Homo sapien
caaggatcagatttccccgaaattc

SEQ ID NO: 1277078 - DNA, 25 bp, Homo sapien
cccaaggatcagatttccccgaaat

SEQ ID NO: 1277079 - DNA, 25 bp, Homo sapien
gccagcagaggcatcgcacagagga

SEQ ID NO: 1277080 - DNA, 25 bp, Homo sapien
aagaggattctcaaagggggcacat

SEQ ID NO: 1277081 - DNA, 25 bp, Homo sapien
ttggcagcaagtgtccctgaccgct

SEQ ID NO: 1277082 - DNA, 25 bp, Homo sapien
aaggatggaacaggcggagaccaca

SEQ ID NO: 1277083 - DNA, 25 bp, Homo sapien
tgttgattcccgagaagaagaaacc

SEQ ID NO: 1277084 - DNA, 25 bp, Homo sapien
gagctgttgattcccgagaagaaga

SEQ ID NO: 1277085 - DNA, 25 bp, Homo sapien
gttgattcccgagaagaagaaacca

SEQ ID NO: 1277086 - DNA, 25 bp, Homo sapien
gctgttgattcccgagaagaagaaa

SEQ ID NO: 1277087 - DNA, 25 bp, Homo sapien
cacaaagcgtaaggctcccgggctg

SEQ ID NO: 1277088 - DNA, 25 bp, Homo sapien
gctgtacttgccacaaagcgtaagg

SEQ ID NO: 1277089 - DNA, 25 bp, Homo sapien
aatgcgccgagactcagagcaagac

SEQ ID NO: 1277090 - DNA, 25 bp, Homo sapien
ggctcctctccttcgtaagaaggaa

SEQ ID NO: 1277091 - DNA, 25 bp, Homo sapien
ggagctccatactcaggagaggcgc

SEQ ID NO: 1277092 - DNA, 25 bp, Homo sapien
cgcaccgtagccagcgtggctggaa

SEQ ID NO: 1277093 - DNA, 25 bp, Homo sapien
tactgccgcttttccggtgggcacg

SEQ ID NO: 1277094 - DNA, 25 bp, Homo sapien
ccgtggcccagtgatccaggtttgg

SEQ ID NO: 1277095 - DNA, 25 bp, Homo sapien
tggcgcacacaacagccggcaacaa

SEQ ID NO: 1277096 - DNA, 25 bp, Homo sapien
ggctccagccgacagccgggcagct

SEQ ID NO: 1277097 - DNA, 25 bp, Homo sapien
agccggcaacaactcgcccgaactt

SEQ ID NO: 1277098 - DNA, 25 bp, Homo sapien
cgggcgcaacttctcttctggcgca

SEQ ID NO: 1277099 - DNA, 25 bp, Homo sapien
ggcgcgcatgcgctgcccaaagttg

SEQ ID NO: 1277100 - DNA, 25 bp, Homo sapien
gcggctttgggtgactttccaagtc

SEQ ID NO: 1277101 - DNA, 25 bp, Homo sapien
tgtgtttgggatggagcgccgcggg

SEQ ID NO: 1277102 - DNA, 25 bp, Homo sapien
cacttggggcggctttgggtgactt

SEQ ID NO: 1277103 - DNA, 25 bp, Homo sapien
tcagcgtgtgcgcgcggcgagtcgc

SEQ ID NO: 1277104 - DNA, 25 bp, Homo sapien
ggcctgcggaggagcatctgagcgc

SEQ ID NO: 1277105 - DNA, 25 bp, Homo sapien
agcgctcggcccccttttgcaggtc

SEQ ID NO: 1277106 - DNA, 25 bp, Homo sapien
cgcccgggctgagctcagcgtgtgc

SEQ ID NO: 1277107 - DNA, 25 bp, Homo sapien
acctcatctcgggtagggaaggctg

SEQ ID NO: 1277108 - DNA, 25 bp, Homo sapien
ctaaaggaacctcatctcgggtagg

SEQ ID NO: 1277109 - DNA, 25 bp, Homo sapien
aggaacctcatctcgggtagggaag

SEQ ID NO: 1277110 - DNA, 25 bp, Homo sapien
tctcgggtagggaaggctggaaaca

SEQ ID NO: 1277111 - DNA, 25 bp, Homo sapien
ccctcccacgcctgccagggtgggg

SEQ ID NO: 1277112 - DNA, 25 bp, Homo sapien
gaagatcctgggccaacaccttaac

SEQ ID NO: 1277113 - DNA, 25 bp, Homo sapien
acccctcccacgcctgccagggtgg

SEQ ID NO: 1277114 - DNA, 25 bp, Homo sapien
cccctcccacgcctgccagggtggg

SEQ ID NO: 1277115 - DNA, 25 bp, Homo sapien
ccttggctggcgtcacatggagggc

SEQ ID NO: 1277116 - DNA, 25 bp, Homo sapien
ctgccacccttggctggcgtcacat

SEQ ID NO: 1277117 - DNA, 25 bp, Homo sapien
tggctggcgtcacatggagggcggg

SEQ ID NO: 1277118 - DNA, 25 bp, Homo sapien
ccacccttggctggcgtcacatgga

SEQ ID NO: 1277119 - DNA, 25 bp, Homo sapien
gcagcaaccatggaaaccgcccagt

SEQ ID NO: 1277120 - DNA, 25 bp, Homo sapien
acactactgactccagcaatgctgc

SEQ ID NO: 1277121 - DNA, 25 bp, Homo sapien
ggcaaggcagccacactactgactc

SEQ ID NO: 1277122 - DNA, 25 bp, Homo sapien
gtggcagcaaccatggaaaccgccc

SEQ ID NO: 1277123 - DNA, 25 bp, Homo sapien
ggagccctcccgagcagtccctgtg

SEQ ID NO: 1277124 - DNA, 25 bp, Homo sapien
cccatgtcctcgagtcccaacactg

SEQ ID NO: 1277125 - DNA, 25 bp, Homo sapien
catgtcctcgagtcccaacactgag

SEQ ID NO: 1277126 - DNA, 25 bp, Homo sapien
gggagccctcccgagcagtccctgt

SEQ ID NO: 1277127 - DNA, 25 bp, Homo sapien
accctgcgggccgatgaaggacgtt

SEQ ID NO: 1277128 - DNA, 25 bp, Homo sapien
aatgatttctgctaatgattctccg

SEQ ID NO: 1277129 - DNA, 25 bp, Homo sapien
cgctccgtggggtgacatgtaccct

SEQ ID NO: 1277130 - DNA, 25 bp, Homo sapien
tctccgaagtgtacagtggcacggg

SEQ ID NO: 1277131 - DNA, 25 bp, Homo sapien
gcacagcaggcatgcatcggggagg

SEQ ID NO: 1277132 - DNA, 25 bp, Homo sapien
aggctgtggctcggccccacgggca

SEQ ID NO: 1277133 - DNA, 25 bp, Homo sapien
gcaggcatgcatcggggaggcccat

SEQ ID NO: 1277134 - DNA, 25 bp, Homo sapien
ggtcccacaggctgtggctcggccc

SEQ ID NO: 1277135 - DNA, 25 bp, Homo sapien
cacagcagggacgtttttcaacagg

SEQ ID NO: 1277136 - DNA, 25 bp, Homo sapien
acgtcaaacgggacaagggctggat

SEQ ID NO: 1277137 - DNA, 25 bp, Homo sapien
cagggacttcttatatttcagcgac

SEQ ID NO: 1277138 - DNA, 25 bp, Homo sapien
gaaggaatgccagctaatccaccca

SEQ ID NO: 1277139 - DNA, 25 bp, Homo sapien
aggtcacgccctttgcctgggcggc

SEQ ID NO: 1277140 - DNA, 25 bp, Homo sapien
ctttcaccatagggaagtggacagt

SEQ ID NO: 1277141 - DNA, 25 bp, Homo sapien
gcacttttgcaggagtccagttctg

SEQ ID NO: 1277142 - DNA, 25 bp, Homo sapien
ctgggcaggtcacgccctttgcctg

SEQ ID NO: 1277143 - DNA, 25 bp, Homo sapien
tgtatatccagcttatggaaaatat

SEQ ID NO: 1277144 - DNA, 25 bp, Homo sapien
atctgtccctggataatgtatatcc

SEQ ID NO: 1277145 - DNA, 25 bp, Homo sapien
aatattcataatgctccttacacca

SEQ ID NO: 1277146 - DNA, 25 bp, Homo sapien
aactggcccccttccatagtgcgtg

SEQ ID NO: 1277147 - DNA, 25 bp, Homo sapien
tcgggggggtgtctgccatcatcca

SEQ ID NO: 1277148 - DNA, 25 bp, Homo sapien
ttttgtgcaggcccacgagagtcgg

SEQ ID NO: 1277149 - DNA, 25 bp, Homo sapien
cttttgtgcaggcccacgagagtcg

SEQ ID NO: 1277150 - DNA, 25 bp, Homo sapien
gggtgtctgccatcatccatccaac

SEQ ID NO: 1277151 - DNA, 25 bp, Homo sapien
attggcaaggactttgacgatgcgg

SEQ ID NO: 1277152 - DNA, 25 bp, Homo sapien
gactttgacgatgcggaagaccttc

SEQ ID NO: 1277153 - DNA, 25 bp, Homo sapien
tttgacgatgcggaagaccttccct

SEQ ID NO: 1277154 - DNA, 25 bp, Homo sapien
caaggactttgacgatgcggaagac

SEQ ID NO: 1277155 - DNA, 25 bp, Homo sapien
gcactgggaacagggctcagagctc

SEQ ID NO: 1277156 - DNA, 25 bp, Homo sapien
ctcagagctctggaggacacaggcc

SEQ ID NO: 1277157 - DNA, 25 bp, Homo sapien
cagggagggatcagaggctgcacct

SEQ ID NO: 1277158 - DNA, 25 bp, Homo sapien
acaggccagggagggatcagaggct

SEQ ID NO: 1277159 - DNA, 25 bp, Homo sapien
ccgggcatgctagagcacgcctgtg

SEQ ID NO: 1277160 - DNA, 25 bp, Homo sapien
aagtgcaaggatcagctgagtctag

SEQ ID NO: 1277161 - DNA, 25 bp, Homo sapien
gggcatgctagagcacgcctgtggt

SEQ ID NO: 1277162 - DNA, 25 bp, Homo sapien
ctgaagtgcaaggatcagctgagtc

SEQ ID NO: 1277163 - DNA, 25 bp, Homo sapien
acttggcgccacctagtgacgggcg

SEQ ID NO: 1277164 - DNA, 25 bp, Homo sapien
tcagggcacttggcgccacctagtg

SEQ ID NO: 1277165 - DNA, 25 bp, Homo sapien
agggcacttggcgccacctagtgac

SEQ ID NO: 1277166 - DNA, 25 bp, Homo sapien
gcacttggcgccacctagtgacggg

SEQ ID NO: 1277167 - DNA, 25 bp, Homo sapien
gccagctcgggagtccccagcaagc

SEQ ID NO: 1277168 - DNA, 25 bp, Homo sapien
ggccagctcgggagtccccagcaag

SEQ ID NO: 1277169 - DNA, 25 bp, Homo sapien
ccagctcgggagtccccagcaagcc

SEQ ID NO: 1277170 - DNA, 25 bp, Homo sapien
aatgtgatggatcatctcgctgccc

SEQ ID NO: 1277171 - DNA, 25 bp, Homo sapien
tgggttccaagtgtccccctgcagt

SEQ ID NO: 1277172 - DNA, 25 bp, Homo sapien
ggtcctgggctcaccatgaatgtga

SEQ ID NO: 1277173 - DNA, 25 bp, Homo sapien
gacagcgcagctctagattgaaagg

SEQ ID NO: 1277174 - DNA, 25 bp, Homo sapien
aagccacttccagaggccccagggc

SEQ ID NO: 1277175 - DNA, 25 bp, Homo sapien
aggcgtttctcttcaaagccacttc

SEQ ID NO: 1277176 - DNA, 25 bp, Homo sapien
ctggaaggcgtttctcttcaaagcc

SEQ ID NO: 1277177 - DNA, 25 bp, Homo sapien
ggaaggcgtttctcttcaaagccac

SEQ ID NO: 1277178 - DNA, 25 bp, Homo sapien
ggggatggccctcccacagacccac

SEQ ID NO: 1277179 - DNA, 25 bp, Homo sapien
cagccctgggggatggccctcccac

SEQ ID NO: 1277180 - DNA, 25 bp, Homo sapien
tcagccctgggggatggccctccca

SEQ ID NO: 1277181 - DNA, 25 bp, Homo sapien
cctgggggatggccctcccacagac

SEQ ID NO: 1277182 - DNA, 25 bp, Homo sapien
caaacctctcctccgccaacacccg

SEQ ID NO: 1277183 - DNA, 25 bp, Homo sapien
cggatgcccaccctagcggccagcc

SEQ ID NO: 1277184 - DNA, 25 bp, Homo sapien
gcagaacctgcggccccaaacctct

SEQ ID NO: 1277185 - DNA, 25 bp, Homo sapien
gccaacacccggatgcccaccctag

SEQ ID NO: 1277186 - DNA, 25 bp, Homo sapien
aaggtctcttaactgccgccaggct

SEQ ID NO: 1277187 - DNA, 25 bp, Homo sapien
tcatcgtcatcactactgcattctt

SEQ ID NO: 1277188 - DNA, 25 bp, Homo sapien
ttcaaggtctcttaactgccgccag

SEQ ID NO: 1277189 - DNA, 25 bp, Homo sapien
ttcttcaaggtctcttaactgccgc

SEQ ID NO: 1277190 - DNA, 25 bp, Homo sapien
gatgttgatcttggccttgggaccc

SEQ ID NO: 1277191 - DNA, 25 bp, Homo sapien
ttgatgttgatcttggccttgggac

SEQ ID NO: 1277192 - DNA, 25 bp, Homo sapien
ctggggaaaagggttgatgttgatc

SEQ ID NO: 1277193 - DNA, 25 bp, Homo sapien
gaaaagggttgatgttgatcttggc

SEQ ID NO: 1277194 - DNA, 25 bp, Homo sapien
ccatggtcatctggatccgggcaga

SEQ ID NO: 1277195 - DNA, 25 bp, Homo sapien
ggtcatctggatccgggcagaggct

SEQ ID NO: 1277196 - DNA, 25 bp, Homo sapien
atctggatccgggcagaggctgcca

SEQ ID NO: 1277197 - DNA, 25 bp, Homo sapien
caccagggtaaggttgacaaactct

SEQ ID NO: 1277198 - DNA, 25 bp, Homo sapien
cagcccccagccccagacaccagac

SEQ ID NO: 1277199 - DNA, 25 bp, Homo sapien
ggcagcccccagccccagacaccag

SEQ ID NO: 1277200 - DNA, 25 bp, Homo sapien
ctggcttggcttaatgtctctggca

SEQ ID NO: 1277201 - DNA, 25 bp, Homo sapien
ctggcagcccccagccccagacacc

SEQ ID NO: 1277202 - DNA, 25 bp, Homo sapien
cccacttccagtgatgggtctgcct

SEQ ID NO: 1277203 - DNA, 25 bp, Homo sapien
gttgccgacggtctcctcttcttgg

SEQ ID NO: 1277204 - DNA, 25 bp, Homo sapien
tcttgttccgggcgggcgttgccga

SEQ ID NO: 1277205 - DNA, 25 bp, Homo sapien
caaatcccacttccagtgatgggtc

SEQ ID NO: 1277206 - DNA, 25 bp, Homo sapien
tcactggggctgtccaagccagcgg

SEQ ID NO: 1277207 - DNA, 25 bp, Homo sapien
gtgagtgctcttccggcccagaaca

SEQ ID NO: 1277208 - DNA, 25 bp, Homo sapien
gctgggcatctaagccagggagcct

SEQ ID NO: 1277209 - DNA, 25 bp, Homo sapien
cactgagtgagtgctcttccggccc

SEQ ID NO: 1277210 - DNA, 25 bp, Homo sapien
cagcgtgagggcctctcagaaagcc

SEQ ID NO: 1277211 - DNA, 25 bp, Homo sapien
tcagcgtgagggcctctcagaaagc

SEQ ID NO: 1277212 - DNA, 25 bp, Homo sapien
tctccgggagaacggtgagaaacca

SEQ ID NO: 1277213 - DNA, 25 bp, Homo sapien
tgtcagaagagctgctgggcgaaca

SEQ ID NO: 1277214 - DNA, 25 bp, Homo sapien
cagaggttccataggaagaactgcc

SEQ ID NO: 1277215 - DNA, 25 bp, Homo sapien
cctcgctggcaggatggagagtccc

SEQ ID NO: 1277216 - DNA, 25 bp, Homo sapien
ttggcaagactggacgtggccgcca

SEQ ID NO: 1277217 - DNA, 25 bp, Homo sapien
ggacaccctctacaggctccgaggg

SEQ ID NO: 1277218 - DNA, 25 bp, Homo sapien
tgtctggcctcttctcgccggtttg

SEQ ID NO: 1277219 - DNA, 25 bp, Homo sapien
tgattcaggtcgttcaggcctcggg

SEQ ID NO: 1277220 - DNA, 25 bp, Homo sapien
tgagaatctcaacccaaagatgggt

SEQ ID NO: 1277221 - DNA, 25 bp, Homo sapien
tgccgtgatccaggccgacagatga

SEQ ID NO: 1277222 - DNA, 25 bp, Homo sapien
tcctttggctgtgtctcaaggccct

SEQ ID NO: 1277223 - DNA, 25 bp, Homo sapien
tccagtcctctggtgtgcctcagtt

SEQ ID NO: 1277224 - DNA, 25 bp, Homo sapien
tttggccagtgcgtcggaaggccgg

SEQ ID NO: 1277225 - DNA, 25 bp, Homo sapien
tcccgagaaagccattcctgggcag

SEQ ID NO: 1277226 - DNA, 25 bp, Homo sapien
gaggcaggcgactctgttcctgaac

SEQ ID NO: 1277227 - DNA, 25 bp, Homo sapien
gcaggaggtcccgagaaagccattc

SEQ ID NO: 1277228 - DNA, 25 bp, Homo sapien
gagacaggagcatgcaccataacta

SEQ ID NO: 1277229 - DNA, 25 bp, Homo sapien
tcaagaataagaagccgaacaggac

SEQ ID NO: 1277230 - DNA, 25 bp, Homo sapien
tgtatcttcctatcaaggacctgcc

SEQ ID NO: 1277231 - DNA, 25 bp, Homo sapien
tagaaagacctcgaagctgcaggga

SEQ ID NO: 1277232 - DNA, 25 bp, Homo sapien
tcgcgtctgtcttcgattgaggaca

SEQ ID NO: 1277233 - DNA, 25 bp, Homo sapien
tacacttttgtgcaacaccgaaaca

SEQ ID NO: 1277234 - DNA, 25 bp, Homo sapien
gaaacatcatatcctcgtgacaggg

SEQ ID NO: 1277235 - DNA, 25 bp, Homo sapien
ggcaaacttgcactattaacatctg

SEQ ID NO: 1277236 - DNA, 25 bp, Homo sapien
gggttcctccgacttcttggcatcg

SEQ ID NO: 1277237 - DNA, 25 bp, Homo sapien
caggctcaggtctaccctatagaaa

SEQ ID NO: 1277238 - DNA, 25 bp, Homo sapien
tctaccctatagaaagcttgtgttc

SEQ ID NO: 1277239 - DNA, 25 bp, Homo sapien
cagccatctcggcaaattccaggct

SEQ ID NO: 1277240 - DNA, 25 bp, Homo sapien
taaagatgttggactggtggactcg

SEQ ID NO: 1277241 - DNA, 25 bp, Homo sapien
tcttttgactagacccagtctctgc

SEQ ID NO: 1277242 - DNA, 25 bp, Homo sapien
tgtgaactaagacctccgactctgg

SEQ ID NO: 1277243 - DNA, 25 bp, Homo sapien
tcctcaatgtaggaacctcttttga

SEQ ID NO: 1277244 - DNA, 25 bp, Homo sapien
taactttgcacaccgagttctttga

SEQ ID NO: 1277245 - DNA, 25 bp, Homo sapien
agacccagggcaacggtgtcactcc

SEQ ID NO: 1277246 - DNA, 25 bp, Homo sapien
gattccggacctctttatatgacat

SEQ ID NO: 1277247 - DNA, 25 bp, Homo sapien
attccctggaggtaggaagtggtct

SEQ ID NO: 1277248 - DNA, 25 bp, Homo sapien
gcaaacttctctttgtcccgagcat

SEQ ID NO: 1277249 - DNA, 25 bp, Homo sapien
tttctgaaacgcatagccaaggttg

SEQ ID NO: 1277250 - DNA, 25 bp, Homo sapien
tcccgagcatttctgaaacgcatag

SEQ ID NO: 1277251 - DNA, 25 bp, Homo sapien
tttgtcccgagcatttctgaaacgc

SEQ ID NO: 1277252 - DNA, 25 bp, Homo sapien
aataggcatggtgaccgctcaccag

SEQ ID NO: 1277253 - DNA, 25 bp, Homo sapien
caccagccatagtggcaggagctca

SEQ ID NO: 1277254 - DNA, 25 bp, Homo sapien
ccggtgggcaagcagcttctaaaga

SEQ ID NO: 1277255 - DNA, 25 bp, Homo sapien
cttctaaagaataggcatggtgacc

SEQ ID NO: 1277256 - DNA, 25 bp, Homo sapien
gcagagcctgctgcccaccactgac

SEQ ID NO: 1277257 - DNA, 25 bp, Homo sapien
ctcctggcagagcctgctgcccacc

SEQ ID NO: 1277258 - DNA, 25 bp, Homo sapien
ctggcagagcctgctgcccaccact

SEQ ID NO: 1277259 - DNA, 25 bp, Homo sapien
ggcagagcctgctgcccaccactga

SEQ ID NO: 1277260 - DNA, 25 bp, Homo sapien
tggcattcatgtccacatacagtcc

SEQ ID NO: 1277261 - DNA, 25 bp, Homo sapien
tctcgggctttggacggtgacagtg

SEQ ID NO: 1277262 - DNA, 25 bp, Homo sapien
accagctcccctcgaagggacagca

SEQ ID NO: 1277263 - DNA, 25 bp, Homo sapien
catcaggctggcgtcttcaagagaa

SEQ ID NO: 1277264 - DNA, 25 bp, Homo sapien
tgtccctccacaggggcaggggccg

SEQ ID NO: 1277265 - DNA, 25 bp, Homo sapien
ctgtctattgtccctccacaggggc

SEQ ID NO: 1277266 - DNA, 25 bp, Homo sapien
tgtctattgtccctccacaggggca

SEQ ID NO: 1277267 - DNA, 25 bp, Homo sapien
tccacaggggcaggggccgggagac

SEQ ID NO: 1277268 - DNA, 25 bp, Homo sapien
gcagagacaaagaggaagcaatgtc

SEQ ID NO: 1277269 - DNA, 25 bp, Homo sapien
ctgcagagacaaagaggaagcaatg

SEQ ID NO: 1277270 - DNA, 25 bp, Homo sapien
agagacaaagaggaagcaatgtctc

SEQ ID NO: 1277271 - DNA, 25 bp, Homo sapien
tgcagagacaaagaggaagcaatgt

SEQ ID NO: 1277272 - DNA, 25 bp, Homo sapien
tcccacacctcggtcagtgaaggat

SEQ ID NO: 1277273 - DNA, 25 bp, Homo sapien
cacacctcggtcagtgaaggatgcc

SEQ ID NO: 1277274 - DNA, 25 bp, Homo sapien
acctcggtcagtgaaggatgccagg

SEQ ID NO: 1277275 - DNA, 25 bp, Homo sapien
cacctcggtcagtgaaggatgccag

SEQ ID NO: 1277276 - DNA, 25 bp, Homo sapien
tggatgaacatgggcccacagtgga

SEQ ID NO: 1277277 - DNA, 25 bp, Homo sapien
ttgaccttagcatcggacacttcat

SEQ ID NO: 1277278 - DNA, 25 bp, Homo sapien
gggcccacagtggacgctttcctgg

SEQ ID NO: 1277279 - DNA, 25 bp, Homo sapien
ccagccttgaccttagcatcggaca

SEQ ID NO: 1277280 - DNA, 25 bp, Homo sapien
atgtagcgatcactccgctccaacc

SEQ ID NO: 1277281 - DNA, 25 bp, Homo sapien
tgtagcgatcactccgctccaaccc

SEQ ID NO: 1277282 - DNA, 25 bp, Homo sapien
tatgtagcgatcactccgctccaac

SEQ ID NO: 1277283 - DNA, 25 bp, Homo sapien
gtagcgatcactccgctccaacccc

SEQ ID NO: 1277284 - DNA, 25 bp, Homo sapien
tcattcagccacataagaagaaccc

SEQ ID NO: 1277285 - DNA, 25 bp, Homo sapien
gccacataagaagaacccaagtcta

SEQ ID NO: 1277286 - DNA, 25 bp, Homo sapien
aagaagaacccaagtctaagctttg

SEQ ID NO: 1277287 - DNA, 25 bp, Homo sapien
aacccaagtctaagctttgcggtgg

SEQ ID NO: 1277288 - DNA, 25 bp, Homo sapien
cgagtattgaactcgaaaaaggaag

SEQ ID NO: 1277289 - DNA, 25 bp, Homo sapien
ctgcacaaagcaggccgagtattga

SEQ ID NO: 1277290 - DNA, 25 bp, Homo sapien
aaaaggaagtcaccgtctgaagcca

SEQ ID NO: 1277291 - DNA, 25 bp, Homo sapien
gccagatgcaggaagtagccacatt

SEQ ID NO: 1277292 - DNA, 25 bp, Homo sapien
ccgcctcagcccctccacgtggctc

SEQ ID NO: 1277293 - DNA, 25 bp, Homo sapien
tggctccttgggatccacagggtca

SEQ ID NO: 1277294 - DNA, 25 bp, Homo sapien
cacgtggctccttgggatccacagg

SEQ ID NO: 1277295 - DNA, 25 bp, Homo sapien
tggcaagtgcaaggtcctggccagc

SEQ ID NO: 1277296 - DNA, 25 bp, Homo sapien
tagtctgagaagcactcaactgtgt

SEQ ID NO: 1277297 - DNA, 25 bp, Homo sapien
gtagtctgagaagcactcaactgtg

SEQ ID NO: 1277298 - DNA, 25 bp, Homo sapien
cagtctgctcattggggaaatatcc

SEQ ID NO: 1277299 - DNA, 25 bp, Homo sapien
gatgccaaccataaaagtgtgattg

SEQ ID NO: 1277300 - DNA, 25 bp, Homo sapien
gggaaatatccaaagcctgatgcca

SEQ ID NO: 1277301 - DNA, 25 bp, Homo sapien
ccagcaggttggttctcagtctgct

SEQ ID NO: 1277302 - DNA, 25 bp, Homo sapien
aacaccgtgggctgaacacaggcaa

SEQ ID NO: 1277303 - DNA, 25 bp, Homo sapien
tgggaacaccgtgggctgaacacag

SEQ ID NO: 1277304 - DNA, 25 bp, Homo sapien
ggaacaccgtgggctgaacacaggc

SEQ ID NO: 1277305 - DNA, 25 bp, Homo sapien
tgaaggagaggctccatgggaacac

SEQ ID NO: 1277306 - DNA, 25 bp, Homo sapien
gagaaagtcagcccttcccaaggca

SEQ ID NO: 1277307 - DNA, 25 bp, Homo sapien
ctgagaaagtcagcccttcccaagg

SEQ ID NO: 1277308 - DNA, 25 bp, Homo sapien
gaaagtcagcccttcccaaggcatc

SEQ ID NO: 1277309 - DNA, 25 bp, Homo sapien
gtcagcccttcccaaggcatccatg

SEQ ID NO: 1277310 - DNA, 25 bp, Homo sapien
caggcaagtgctggggacccccaca

SEQ ID NO: 1277311 - DNA, 25 bp, Homo sapien
aggcaagtgctggggacccccacat

SEQ ID NO: 1277312 - DNA, 25 bp, Homo sapien
actcacaaggcgtgccctccaggga

SEQ ID NO: 1277313 - DNA, 25 bp, Homo sapien
taggggactcacaaggcgtgccctc

SEQ ID NO: 1277314 - DNA, 25 bp, Homo sapien
gctcccagcttctcgcccggtctgc

SEQ ID NO: 1277315 - DNA, 25 bp, Homo sapien
ctgtaggggactcacaaggcgtgcc

SEQ ID NO: 1277316 - DNA, 25 bp, Homo sapien
ccataggttgcgtcacctcagagga

SEQ ID NO: 1277317 - DNA, 25 bp, Homo sapien
ttgtcaacggtccagcccatgtcat

SEQ ID NO: 1277318 - DNA, 25 bp, Homo sapien
tctccttggacccataggttgcgtc

SEQ ID NO: 1277319 - DNA, 25 bp, Homo sapien
gggttgtcaacggtccagcccatgt

SEQ ID NO: 1277320 - DNA, 25 bp, Homo sapien
acctcctctggcgtcgaagatttgc

SEQ ID NO: 1277321 - DNA, 25 bp, Homo sapien
gaagatttgcccactgtcatgtcag

SEQ ID NO: 1277322 - DNA, 25 bp, Homo sapien
tctggcgtcgaagatttgcccactg

SEQ ID NO: 1277323 - DNA, 25 bp, Homo sapien
ttgcccactgtcatgtcagtgaaca

SEQ ID NO: 1277324 - DNA, 25 bp, Homo sapien
taaagggtttccacagagcctgagt

SEQ ID NO: 1277325 - DNA, 25 bp, Homo sapien
tcaaaggctaatagagacacatcca

SEQ ID NO: 1277326 - DNA, 25 bp, Homo sapien
gacaagcccggtacatcttggtggt

SEQ ID NO: 1277327 - DNA, 25 bp, Homo sapien
gaaaccagagattggcagggcacga

SEQ ID NO: 1277328 - DNA, 25 bp, Homo sapien
gaaaccatctgctacgttacgtggg

SEQ ID NO: 1277329 - DNA, 25 bp, Homo sapien
ggccgaaaccatctgctacgttacg

SEQ ID NO: 1277330 - DNA, 25 bp, Homo sapien
cgaccgagacctgggccggcggttg

SEQ ID NO: 1277331 - DNA, 25 bp, Homo sapien
ggttggtcggccgaaaccatctgct

SEQ ID NO: 1277332 - DNA, 25 bp, Homo sapien
cacctctggacaggcaaccggtggg

SEQ ID NO: 1277333 - DNA, 25 bp, Homo sapien
cagagcttctctgtaggcttgaatt

SEQ ID NO: 1277334 - DNA, 25 bp, Homo sapien
ggtcatcgtggctctcgtcggtgcc

SEQ ID NO: 1277335 - DNA, 25 bp, Homo sapien
ctatacagccacacttttttcaatc

SEQ ID NO: 1277336 - DNA, 25 bp, Homo sapien
gacttagaatccatgcttgagccaa

SEQ ID NO: 1277337 - DNA, 25 bp, Homo sapien
tctgctggctggctaacatgcccat

SEQ ID NO: 1277338 - DNA, 25 bp, Homo sapien
tattgctattgtgcttaggttcggc

SEQ ID NO: 1277339 - DNA, 25 bp, Homo sapien
ggttattacccgatgggcctgactg

SEQ ID NO: 1277340 - DNA, 25 bp, Homo sapien
taccccaactgctctgtagtgctgc

SEQ ID NO: 1277341 - DNA, 25 bp, Homo sapien
gctggattaatgctgaacgcaccaa

SEQ ID NO: 1277342 - DNA, 25 bp, Homo sapien
cagtcaggcccatcgggtaataacc

SEQ ID NO: 1277343 - DNA, 25 bp, Homo sapien
ttggctcaagcatggattctaagtc

SEQ ID NO: 1277344 - DNA, 25 bp, Homo sapien
aaccaaggcaacatgcagagggagc

SEQ ID NO: 1277345 - DNA, 25 bp, Homo sapien
tcagcattaatccagccatgatggc

SEQ ID NO: 1277346 - DNA, 25 bp, Homo sapien
tatgatgggcatgttagccagccag

SEQ ID NO: 1277347 - DNA, 25 bp, Homo sapien
cagcatccaatgcagggtcgggcag

SEQ ID NO: 1277348 - DNA, 25 bp, Homo sapien
caggattgagagacacatctcgcca

SEQ ID NO: 1277349 - DNA, 25 bp, Homo sapien
caaagacgcggcctgtgatgcgtga

SEQ ID NO: 1277350 - DNA, 25 bp, Homo sapien
tgtagacagtattcctatggcagaa

SEQ ID NO: 1277351 - DNA, 25 bp, Homo sapien
cattcttatgggtagctaacagaca

SEQ ID NO: 1277352 - DNA, 25 bp, Homo sapien
tagcggataaaaatgggacacccac

SEQ ID NO: 1277353 - DNA, 25 bp, Homo sapien
tgtgacaccatgatctcctaaaagg

SEQ ID NO: 1277354 - DNA, 25 bp, Homo sapien
agccttgcgttcatagcgttgatac

SEQ ID NO: 1277355 - DNA, 25 bp, Homo sapien
tatccattatgcaccaccaagtctc

SEQ ID NO: 1277356 - DNA, 25 bp, Homo sapien
ggttccatatcacagccttgcgttc

SEQ ID NO: 1277357 - DNA, 25 bp, Homo sapien
acagccttctggttccatatcacag

SEQ ID NO: 1277358 - DNA, 25 bp, Homo sapien
cagccttgcgttcatagcgttgata

SEQ ID NO: 1277359 - DNA, 25 bp, Homo sapien
tctggttccatatcacagccttgcg

SEQ ID NO: 1277360 - DNA, 25 bp, Homo sapien
gtatcaacgctatgaacgcaaggct

SEQ ID NO: 1277361 - DNA, 25 bp, Homo sapien
cgcaaggctgtgatatggaaccaga

SEQ ID NO: 1277362 - DNA, 25 bp, Homo sapien
tatcaacgctatgaacgcaaggctg

SEQ ID NO: 1277363 - DNA, 25 bp, Homo sapien
ctgtgatatggaaccagaaggctgt

SEQ ID NO: 1277364 - DNA, 25 bp, Homo sapien
gagacttggtggtgcataatggata

SEQ ID NO: 1277365 - DNA, 25 bp, Homo sapien
gaacgcaaggctgtgatatggaacc

SEQ ID NO: 1277366 - DNA, 25 bp, Homo sapien
tgttagctacccataagaatgctgt

SEQ ID NO: 1277367 - DNA, 25 bp, Homo sapien
tgggtgtcccatttttatccgctac

SEQ ID NO: 1277368 - DNA, 25 bp, Homo sapien
tcacaggccgcgtctttgacggtgg

SEQ ID NO: 1277369 - DNA, 25 bp, Homo sapien
taacttggcgagatgtgtctctcaa

SEQ ID NO: 1277370 - DNA, 25 bp, Homo sapien
ccttttaggagatcatggtgtcaca

SEQ ID NO: 1277371 - DNA, 25 bp, Homo sapien
cttgaagcagagttcaccagtgagc

SEQ ID NO: 1277372 - DNA, 25 bp, Homo sapien
ctcagcagcagtaacatggtaacac

SEQ ID NO: 1277373 - DNA, 25 bp, Homo sapien
cagttactggtcatagaaggctttc

SEQ ID NO: 1277374 - DNA, 25 bp, Homo sapien
gtaagttaacttgtcaacggcatgg

SEQ ID NO: 1277375 - DNA, 25 bp, Homo sapien
aaactgacaagccttcaaggagccc

SEQ ID NO: 1277376 - DNA, 25 bp, Homo sapien
gttgttgttgagtatgagcaaagta

SEQ ID NO: 1277377 - DNA, 25 bp, Homo sapien
gttaactactccgtaatccaagaga

SEQ ID NO: 1277378 - DNA, 25 bp, Homo sapien
cacttaagttgtgtccttagtagga

SEQ ID NO: 1277379 - DNA, 25 bp, Homo sapien
ccaagagataatgtgtaacagtaag

SEQ ID NO: 1277380 - DNA, 25 bp, Homo sapien
tgatgtgtgcttttgttaggcatca

SEQ ID NO: 1277381 - DNA, 25 bp, Homo sapien
cagtgacattacactgggtgggcaa

SEQ ID NO: 1277382 - DNA, 25 bp, Homo sapien
ggtttatgtccccttgagtcaatgg

SEQ ID NO: 1277383 - DNA, 25 bp, Homo sapien
tggaaattttagtcaatacctgggc

SEQ ID NO: 1277384 - DNA, 25 bp, Homo sapien
gccaacagccagtatgaaaagagac

SEQ ID NO: 1277385 - DNA, 25 bp, Homo sapien
tgaatgcttctcgagccacgtcgct

SEQ ID NO: 1277386 - DNA, 25 bp, Homo sapien
atgtccacagtaatgatgaatgctt

SEQ ID NO: 1277387 - DNA, 25 bp, Homo sapien
ttttttgggtggagcaacaactgcc

SEQ ID NO: 1277388 - DNA, 25 bp, Homo sapien
gagccacgtcgctgccaaggtcttc

SEQ ID NO: 1277389 - DNA, 25 bp, Homo sapien
cactaattatgttctcgatccaggg

SEQ ID NO: 1277390 - DNA, 25 bp, Homo sapien
aattatgttctcgatccagggaata

SEQ ID NO: 1277391 - DNA, 25 bp, Homo sapien
atcactaattatgttctcgatccag

SEQ ID NO: 1277392 - DNA, 25 bp, Homo sapien
tgttctcgatccagggaatatagtt

SEQ ID NO: 1277393 - DNA, 25 bp, Homo sapien
ccaggacactattcctcccacaaac

SEQ ID NO: 1277394 - DNA, 25 bp, Homo sapien
catggaaccccaggacactattcct

SEQ ID NO: 1277395 - DNA, 25 bp, Homo sapien
ggacactattcctcccacaaaccac

SEQ ID NO: 1277396 - DNA, 25 bp, Homo sapien
tccccacaattcatggaaccccagg

SEQ ID NO: 1277397 - DNA, 25 bp, Homo sapien
ttcttggcagacaaataggcgtgat

SEQ ID NO: 1277398 - DNA, 25 bp, Homo sapien
tcagggtgcccattcgaatgtccag

SEQ ID NO: 1277399 - DNA, 25 bp, Homo sapien
tgttagcagttacacttccccttgg

SEQ ID NO: 1277400 - DNA, 25 bp, Homo sapien
gggttaatccccatccagatgcagt

SEQ ID NO: 1277401 - DNA, 25 bp, Homo sapien
aaattaacagggcaagcaggcattg

SEQ ID NO: 1277402 - DNA, 25 bp, Homo sapien
ataatttggtctataagattgggaa

SEQ ID NO: 1277403 - DNA, 25 bp, Homo sapien
ctataagattgggaaaattggccgg

SEQ ID NO: 1277404 - DNA, 25 bp, Homo sapien
gaaaattaacagggcaagcaggcat

SEQ ID NO: 1277405 - DNA, 25 bp, Homo sapien
gaatcaaatgactgatgcagtcagc

SEQ ID NO: 1277406 - DNA, 25 bp, Homo sapien
tgcagtcagcacctaacaacctctg

SEQ ID NO: 1277407 - DNA, 25 bp, Homo sapien
taataacagcctaagagccaagtgc

SEQ ID NO: 1277408 - DNA, 25 bp, Homo sapien
tttctgcctaccacagctaaagctc

SEQ ID NO: 1277409 - DNA, 25 bp, Homo sapien
cagtctcttgtataaatgtatccat

SEQ ID NO: 1277410 - DNA, 25 bp, Homo sapien
tcctttggagctcgtccagaatcca

SEQ ID NO: 1277411 - DNA, 25 bp, Homo sapien
ggagctcgtccagaatccatcagcc

SEQ ID NO: 1277412 - DNA, 25 bp, Homo sapien
ttggagctcgtccagaatccatcag

SEQ ID NO: 1277413 - DNA, 25 bp, Homo sapien
ttttctcctttggagctcgtccaga

SEQ ID NO: 1277414 - DNA, 25 bp, Homo sapien
caaatcattggaaaagcaaaaatgt

SEQ ID NO: 1277415 - DNA, 25 bp, Homo sapien
tcattggaaaagcaaaaatgtttaa

SEQ ID NO: 1277416 - DNA, 25 bp, Homo sapien
ctgcaaatcattggaaaagcaaaaa

SEQ ID NO: 1277417 - DNA, 25 bp, Homo sapien
aatcattggaaaagcaaaaatgttt

SEQ ID NO: 1277418 - DNA, 25 bp, Homo sapien
ctgcatgtataagatggttgtcatt

SEQ ID NO: 1277419 - DNA, 25 bp, Homo sapien
agtgggacatagaggtgtctgaaga

SEQ ID NO: 1277420 - DNA, 25 bp, Homo sapien
ggtgtctgaagaaccattttacatg

SEQ ID NO: 1277421 - DNA, 25 bp, Homo sapien
tggttgtcatttgcttgaatacccc

SEQ ID NO: 1277422 - DNA, 25 bp, Homo sapien
gaatcacagctttgtaggtggtcac

SEQ ID NO: 1277423 - DNA, 25 bp, Homo sapien
aggacctgtgatgtactccactcgg

SEQ ID NO: 1277424 - DNA, 25 bp, Homo sapien
tcattgtgtagaaggtctcttcaca

SEQ ID NO: 1277425 - DNA, 25 bp, Homo sapien
ggtagatcatcaggagggccacagt

SEQ ID NO: 1277426 - DNA, 25 bp, Homo sapien
tgcacgcgggcattggccggtccca

SEQ ID NO: 1277427 - DNA, 25 bp, Homo sapien
gacaaactgcagtaaaggatttcag

SEQ ID NO: 1277428 - DNA, 25 bp, Homo sapien
ttggccggtcccaagatccatcttt

SEQ ID NO: 1277429 - DNA, 25 bp, Homo sapien
acaaactgcagtaaaggatttcagg

SEQ ID NO: 1277430 - DNA, 25 bp, Homo sapien
ttgcagaagctcatagccagtctcg

SEQ ID NO: 1277431 - DNA, 25 bp, Homo sapien
cgccatcggataagggcaaggctgc

SEQ ID NO: 1277432 - DNA, 25 bp, Homo sapien
tcaggatgtatttggcttgcacagg

SEQ ID NO: 1277433 - DNA, 25 bp, Homo sapien
cacaggtgaaacgtggccattaggt

SEQ ID NO: 1277434 - DNA, 25 bp, Homo sapien
ctgcgcagaggaaaccaggcttgtt

SEQ ID NO: 1277435 - DNA, 25 bp, Homo sapien
gaaaccaggcttgttggttttcatg

SEQ ID NO: 1277436 - DNA, 25 bp, Homo sapien
cgcagaggaaaccaggcttgttggt

SEQ ID NO: 1277437 - DNA, 25 bp, Homo sapien
cagaggaaaccaggcttgttggttt

SEQ ID NO: 1277438 - DNA, 25 bp, Homo sapien
tgtgctcgtgtagtggatcttccag

SEQ ID NO: 1277439 - DNA, 25 bp, Homo sapien
gcctgtgtggtctcctgattcatct

SEQ ID NO: 1277440 - DNA, 25 bp, Homo sapien
ctgtgctcgtgtagtggatcttcca

SEQ ID NO: 1277441 - DNA, 25 bp, Homo sapien
ctgagaaagaagctcatgaaagctg

SEQ ID NO: 1277442 - DNA, 25 bp, Homo sapien
cctcctcagcatttcagggacagcc

SEQ ID NO: 1277443 - DNA, 25 bp, Homo sapien
caccgagggtgacgggaacgtggtg

SEQ ID NO: 1277444 - DNA, 25 bp, Homo sapien
tccacaaagtccagaatgacactga

SEQ ID NO: 1277445 - DNA, 25 bp, Homo sapien
taagtgcaactggagagtttgggat

SEQ ID NO: 1277446 - DNA, 25 bp, Homo sapien
cttgagaaagtcgtagggacacagg

SEQ ID NO: 1277447 - DNA, 25 bp, Homo sapien
tccaggctgatgctgtaagtgcaac

SEQ ID NO: 1277448 - DNA, 25 bp, Homo sapien
tgggaattcgggaaaagagaggagc

SEQ ID NO: 1277449 - DNA, 25 bp, Homo sapien
aggagcatctcctcgagcctaaggg

SEQ ID NO: 1277450 - DNA, 25 bp, Homo sapien
ccaagtttattcatcaggggtctcc

SEQ ID NO: 1277451 - DNA, 25 bp, Homo sapien
gagctcccctaaattcccttacagc

SEQ ID NO: 1277452 - DNA, 25 bp, Homo sapien
tgacctgctgggcaggccggagctc

SEQ ID NO: 1277453 - DNA, 25 bp, Homo sapien
atctcagcccaacccggagctgagg

SEQ ID NO: 1277454 - DNA, 25 bp, Homo sapien
ggccaggtttattattgggtccatg

SEQ ID NO: 1277455 - DNA, 25 bp, Homo sapien
attgggtccatggtgggtgaatggg

SEQ ID NO: 1277456 - DNA, 25 bp, Homo sapien
ccgactctcccgtggctacatgagg

SEQ ID NO: 1277457 - DNA, 25 bp, Homo sapien
aatggccctgaggagccccgggtat

SEQ ID NO: 1277458 - DNA, 25 bp, Homo sapien
aattagtctcagtcgctagggcagg

SEQ ID NO: 1277459 - DNA, 25 bp, Homo sapien
caggtacacagtgggatgttagaat

SEQ ID NO: 1277460 - DNA, 25 bp, Homo sapien
cggcaggagcagtagaaaccgccca

SEQ ID NO: 1277461 - DNA, 25 bp, Homo sapien
aaaccgcccaggtggttgtggcagt

SEQ ID NO: 1277462 - DNA, 25 bp, Homo sapien
gagcaggtgcgcttgttacggtgca

SEQ ID NO: 1277463 - DNA, 25 bp, Homo sapien
caggacgtagcctgcgcggcaggag

SEQ ID NO: 1277464 - DNA, 25 bp, Homo sapien
cagtgggagtttcagtgtccggccc

SEQ ID NO: 1277465 - DNA, 25 bp, Homo sapien
agggccccactttgtcagctgtaaa

SEQ ID NO: 1277466 - DNA, 25 bp, Homo sapien
gactgagatgttgcaggacccctct

SEQ ID NO: 1277467 - DNA, 25 bp, Homo sapien
accttacaggcctagggtcgctgca

SEQ ID NO: 1277468 - DNA, 25 bp, Homo sapien
cctcggctgcatagaaggcctcgaa

SEQ ID NO: 1277469 - DNA, 25 bp, Homo sapien
ccgtgaacggcttctcgttggagta

SEQ ID NO: 1277470 - DNA, 25 bp, Homo sapien
tagtcggagcggaaggtaatgtcca

SEQ ID NO: 1277471 - DNA, 25 bp, Homo sapien
cgagtagaaagtgtccttgccaggg

SEQ ID NO: 1277472 - DNA, 25 bp, Homo sapien
caggcgcccgaacacaggttcaggc

SEQ ID NO: 1277473 - DNA, 25 bp, Homo sapien
ggtcattggcatactcccctggaaa

SEQ ID NO: 1277474 - DNA, 25 bp, Homo sapien
gtccagcgccgctcctggtcattgg

SEQ ID NO: 1277475 - DNA, 25 bp, Homo sapien
aggttcaggccacttcgggcccaag

SEQ ID NO: 1277476 - DNA, 25 bp, Homo sapien
gcagggcaggggcggtgagggccca

SEQ ID NO: 1277477 - DNA, 25 bp, Homo sapien
agggaggctgtgggcgcccacctac

SEQ ID NO: 1277478 - DNA, 25 bp, Homo sapien
gcaggggcggtgagggcccaggcct

SEQ ID NO: 1277479 - DNA, 25 bp, Homo sapien
cctgcagggaggctgtgggcgccca

SEQ ID NO: 1277480 - DNA, 25 bp, Homo sapien
ggtgtgcccgtccagctggcctggc

SEQ ID NO: 1277481 - DNA, 25 bp, Homo sapien
caggcagtcggagtcagagctgttt

SEQ ID NO: 1277482 - DNA, 25 bp, Homo sapien
gaaatcacaggcagtcggagtcaga

SEQ ID NO: 1277483 - DNA, 25 bp, Homo sapien
aatcacaggcagtcggagtcagagc

SEQ ID NO: 1277484 - DNA, 25 bp, Homo sapien
gcagtcggagtcagagctgttttct

SEQ ID NO: 1277485 - DNA, 25 bp, Homo sapien
ttccaaaggtgttagcggctccgtg

SEQ ID NO: 1277486 - DNA, 25 bp, Homo sapien
taatgaacgacaagacacgcctacc

SEQ ID NO: 1277487 - DNA, 25 bp, Homo sapien
taaactcgggagttctctaacagag

SEQ ID NO: 1277488 - DNA, 25 bp, Homo sapien
cacgcctaccgatcaggaatttcca

SEQ ID NO: 1277489 - DNA, 25 bp, Homo sapien
caaagcttcctaacagggacggtgt

SEQ ID NO: 1277490 - DNA, 25 bp, Homo sapien
ccctctgacatcggggtaaccggca

SEQ ID NO: 1277491 - DNA, 25 bp, Homo sapien
ggtaaccggcagagggcctgcgtgg

SEQ ID NO: 1277492 - DNA, 25 bp, Homo sapien
tcctaacagggacggtgtgctcccc

SEQ ID NO: 1277493 - DNA, 25 bp, Homo sapien
gttgagattgagatctggaccgatt

SEQ ID NO: 1277494 - DNA, 25 bp, Homo sapien
cagagttgagattgagatctggacc

SEQ ID NO: 1277495 - DNA, 25 bp, Homo sapien
gattgagatctggaccgattccaga

SEQ ID NO: 1277496 - DNA, 25 bp, Homo sapien
gagattgagatctggaccgattcca

SEQ ID NO: 1277497 - DNA, 25 bp, Homo sapien
tctaagggggcagcattccctgcct

SEQ ID NO: 1277498 - DNA, 25 bp, Homo sapien
catgccgggacctccagagtgcctg

SEQ ID NO: 1277499 - DNA, 25 bp, Homo sapien
cagagagaccatccatgccgggacc

SEQ ID NO: 1277500 - DNA, 25 bp, Homo sapien
catccatgccgggacctccagagtg

SEQ ID NO: 1277501 - DNA, 25 bp, Homo sapien
tgtgtccttaggcacatcgccttgc

SEQ ID NO: 1277502 - DNA, 25 bp, Homo sapien
ttgcctctgtgcagcaggaacaatg

SEQ ID NO: 1277503 - DNA, 25 bp, Homo sapien
ctctgtgcagcaggaacaatgcctg

SEQ ID NO: 1277504 - DNA, 25 bp, Homo sapien
tggcgtcggacggtggctgctgatt

SEQ ID NO: 1277505 - DNA, 25 bp, Homo sapien
tctcgggccttccctgagactatga

SEQ ID NO: 1277506 - DNA, 25 bp, Homo sapien
tcgggccttccctgagactatgaag

SEQ ID NO: 1277507 - DNA, 25 bp, Homo sapien
ctcgggccttccctgagactatgaa

SEQ ID NO: 1277508 - DNA, 25 bp, Homo sapien
gagggctatgactggcctgaagcca

SEQ ID NO: 1277509 - DNA, 25 bp, Homo sapien
cctggtcctcgcagtccctggtggg

SEQ ID NO: 1277510 - DNA, 25 bp, Homo sapien
ccaagtctgaatgccgggtggagtc

SEQ ID NO: 1277511 - DNA, 25 bp, Homo sapien
gagttgatggcgaaactgaatcccc

SEQ ID NO: 1277512 - DNA, 25 bp, Homo sapien
acctgtgagtgtccccaatttttct

SEQ ID NO: 1277513 - DNA, 25 bp, Homo sapien
gtgtccccaatttttctgagaatgc

SEQ ID NO: 1277514 - DNA, 25 bp, Homo sapien
ctgtgagtgtccccaatttttctga

SEQ ID NO: 1277515 - DNA, 25 bp, Homo sapien
ccccaccctgatctcacccacccca

SEQ ID NO: 1277516 - DNA, 25 bp, Homo sapien
taaatacacgtgtttggtgagtgag

SEQ ID NO: 1277517 - DNA, 25 bp, Homo sapien
tataggcttggaggtggaacgccag

SEQ ID NO: 1277518 - DNA, 25 bp, Homo sapien
gctgtacacagctggtataggcttg

SEQ ID NO: 1277519 - DNA, 25 bp, Homo sapien
cttgtaacacttggttggtgggcga

SEQ ID NO: 1277520 - DNA, 25 bp, Homo sapien
agtcaggagggcgctctgggtccct

SEQ ID NO: 1277521 - DNA, 25 bp, Homo sapien
cagtcaggagggcgctctgggtccc

SEQ ID NO: 1277522 - DNA, 25 bp, Homo sapien
ccagtcaggagggcgctctgggtcc

SEQ ID NO: 1277523 - DNA, 25 bp, Homo sapien
cggtgcacgtcggagttgtagtact

SEQ ID NO: 1277524 - DNA, 25 bp, Homo sapien
ctgcaccggctcctggaagttcgtg

SEQ ID NO: 1277525 - DNA, 25 bp, Homo sapien
gggcagcacaaaggcggcgcggtgc

SEQ ID NO: 1277526 - DNA, 25 bp, Homo sapien
ttgcgggcaaactcgggcagcacaa

SEQ ID NO: 1277527 - DNA, 25 bp, Homo sapien
ggatctctatttatgcccaccttcc

SEQ ID NO: 1277528 - DNA, 25 bp, Homo sapien
gcctcagcctcaggtacgcgccacc

SEQ ID NO: 1277529 - DNA, 25 bp, Homo sapien
gagtcggaatcttcctctgttaccc

SEQ ID NO: 1277530 - DNA, 25 bp, Homo sapien
ccggcaggggcagggatctctattt

SEQ ID NO: 1277531 - DNA, 25 bp, Homo sapien
cttgctgcacagcatgaagccgatc

SEQ ID NO: 1277532 - DNA, 25 bp, Homo sapien
gatggtgcagtaggcataggccacc

SEQ ID NO: 1277533 - DNA, 25 bp, Homo sapien
tgcacagcatgaagccgatctggcc

SEQ ID NO: 1277534 - DNA, 25 bp, Homo sapien
agcatgaagccgatctggccgctgg

SEQ ID NO: 1277535 - DNA, 25 bp, Homo sapien
gagctggtaataggactccttgaag

SEQ ID NO: 1277536 - DNA, 25 bp, Homo sapien
agaggacaccatcttccttgagggc

SEQ ID NO: 1277537 - DNA, 25 bp, Homo sapien
tccttgagggctgtcttcatgagct

SEQ ID NO: 1277538 - DNA, 25 bp, Homo sapien
gctgtcttcatgagctggtaatagg

SEQ ID NO: 1277539 - DNA, 25 bp, Homo sapien
gatgatcacgtcgaaggcatcctga

SEQ ID NO: 1277540 - DNA, 25 bp, Homo sapien
ccacatgtagggtcagcttcgagct

SEQ ID NO: 1277541 - DNA, 25 bp, Homo sapien
tagagtagccaatggccatgcctgg

SEQ ID NO: 1277542 - DNA, 25 bp, Homo sapien
ggagtcagtgatgatcacgtcgaag

SEQ ID NO: 1277543 - DNA, 25 bp, Homo sapien
gccttcatcagaccatcctttgatg

SEQ ID NO: 1277544 - DNA, 25 bp, Homo sapien
caccagcgcttggcctgtttcctat

SEQ ID NO: 1277545 - DNA, 25 bp, Homo sapien
ttgccttcatcagaccatcctttga

SEQ ID NO: 1277546 - DNA, 25 bp, Homo sapien
gcgcttggcctgtttcctattttag

SEQ ID NO: 1277547 - DNA, 25 bp, Homo sapien
aaacctggctctacgccggcactca

SEQ ID NO: 1277548 - DNA, 25 bp, Homo sapien
tgctcgggggtgtgcagccatttca

SEQ ID NO: 1277549 - DNA, 25 bp, Homo sapien
ccttgctcgggggtgtgcagccatt

SEQ ID NO: 1277550 - DNA, 25 bp, Homo sapien
ctggccgctgggagaaccaggactc

SEQ ID NO: 1277551 - DNA, 25 bp, Homo sapien
ctcccgcaggacacctccatctccg

SEQ ID NO: 1277552 - DNA, 25 bp, Homo sapien
tcgatctcacactggaccacggact

SEQ ID NO: 1277553 - DNA, 25 bp, Homo sapien
tccacggaggggtgcttcaccacct

SEQ ID NO: 1277554 - DNA, 25 bp, Homo sapien
actggaccacggactccacggaggg

SEQ ID NO: 1277555 - DNA, 25 bp, Homo sapien
tcgtctctctccgtgcactggatga

SEQ ID NO: 1277556 - DNA, 25 bp, Homo sapien
aggcaggttggcgatcatctcctgg

SEQ ID NO: 1277557 - DNA, 25 bp, Homo sapien
tggatgacaccgtccaacaccagca

SEQ ID NO: 1277558 - DNA, 25 bp, Homo sapien
agagaggcaggttggcgatcatctc

SEQ ID NO: 1277559 - DNA, 25 bp, Homo sapien
cagggatgaggagcgatggtgacac

SEQ ID NO: 1277560 - DNA, 25 bp, Homo sapien
cctgagggctgacacgtggagcggg

SEQ ID NO: 1277561 - DNA, 25 bp, Homo sapien
tctcctcgggctctgacgtgtcctg

SEQ ID NO: 1277562 - DNA, 25 bp, Homo sapien
atggtgacacgtggcgaggaacggc

SEQ ID NO: 1277563 - DNA, 25 bp, Homo sapien
tcctggtagcgcgagcgccggtggt

SEQ ID NO: 1277564 - DNA, 25 bp, Homo sapien
ctggtagcgcgagcgccggtggtgg

SEQ ID NO: 1277565 - DNA, 25 bp, Homo sapien
gatgtcctggtagcgcgagcgccgg

SEQ ID NO: 1277566 - DNA, 25 bp, Homo sapien
aggatgtcctggtagcgcgagcgcc

SEQ ID NO: 1277567 - DNA, 25 bp, Homo sapien
cacaggctgcaggtctcgcggaacc

SEQ ID NO: 1277568 - DNA, 25 bp, Homo sapien
ggccacaggctgcaggtctcgcgga

SEQ ID NO: 1277569 - DNA, 25 bp, Homo sapien
caggctgcaggtctcgcggaaccag

SEQ ID NO: 1277570 - DNA, 25 bp, Homo sapien
gccacaggctgcaggtctcgcggaa

SEQ ID NO: 1277571 - DNA, 25 bp, Homo sapien
ctcgcggatggcggcggggccggag

SEQ ID NO: 1277572 - DNA, 25 bp, Homo sapien
tcgcggatggcggcggggccggagg

SEQ ID NO: 1277573 - DNA, 25 bp, Homo sapien
cgcggatggcggcggggccggaggc

SEQ ID NO: 1277574 - DNA, 25 bp, Homo sapien
gccgcagcacaacgggaccagctcc

SEQ ID NO: 1277575 - DNA, 25 bp, Homo sapien
gcgccgcagcacaacgggaccagct

SEQ ID NO: 1277576 - DNA, 25 bp, Homo sapien
acaacgggaccagctccgcccgccg

SEQ ID NO: 1277577 - DNA, 25 bp, Homo sapien
agcacaacgggaccagctccgcccg

SEQ ID NO: 1277578 - DNA, 25 bp, Homo sapien
gccgtagatgacaggcctggatgca

SEQ ID NO: 1277579 - DNA, 25 bp, Homo sapien
gaccatagacagtggccctggcatt

SEQ ID NO: 1277580 - DNA, 25 bp, Homo sapien
gccagatcataagctctgaagctga

SEQ ID NO: 1277581 - DNA, 25 bp, Homo sapien
aggatggtggccgtagatgacaggc

SEQ ID NO: 1277582 - DNA, 25 bp, Homo sapien
ctgaagatggttgcctgaacaggat

SEQ ID NO: 1277583 - DNA, 25 bp, Homo sapien
tgaagatggttgcctgaacaggatg

SEQ ID NO: 1277584 - DNA, 25 bp, Homo sapien
aaatatgtatgtacaaaagcagcac

SEQ ID NO: 1277585 - DNA, 25 bp, Homo sapien
aaaaatatgtatgtacaaaagcagc

SEQ ID NO: 1277586 - DNA, 25 bp, Homo sapien
ttaaaaatatgtatgtacaaaagca

SEQ ID NO: 1277587 - DNA, 25 bp, Homo sapien
tggtttaaaaatatgtatgtacaaa

SEQ ID NO: 1277588 - DNA, 25 bp, Homo sapien
cagcatttggtgcttccggtccaca

SEQ ID NO: 1277589 - DNA, 25 bp, Homo sapien
gtccacaggcgccacgtgtcttcca

SEQ ID NO: 1277590 - DNA, 25 bp, Homo sapien
cttccggtccacaggcgccacgtgt

SEQ ID NO: 1277591 - DNA, 25 bp, Homo sapien
ccacaggcgccacgtgtcttccagg

SEQ ID NO: 1277592 - DNA, 25 bp, Homo sapien
ctgtggccagttgtacctgaagcct

SEQ ID NO: 1277593 - DNA, 25 bp, Homo sapien
tatctctgtggccagttgtacctga

SEQ ID NO: 1277594 - DNA, 25 bp, Homo sapien
tctgtggccagttgtacctgaagcc

SEQ ID NO: 1277595 - DNA, 25 bp, Homo sapien
tctctgtggccagttgtacctgaag

SEQ ID NO: 1277596 - DNA, 25 bp, Homo sapien
gcagcatcttgagaaggcagacctg

SEQ ID NO: 1277597 - DNA, 25 bp, Homo sapien
gcggcccaccagagttggctgagct

SEQ ID NO: 1277598 - DNA, 25 bp, Homo sapien
tcttccgggctggttggatgttctc

SEQ ID NO: 1277599 - DNA, 25 bp, Homo sapien
cagatggtttacaaaatggtgcaaa

SEQ ID NO: 1277600 - DNA, 25 bp, Homo sapien
tgaggtgaccccaggacacacggta

SEQ ID NO: 1277601 - DNA, 25 bp, Homo sapien
gaggtgaccccaggacacacggtaa

SEQ ID NO: 1277602 - DNA, 25 bp, Homo sapien
tccaggaaaatttcacaactattta

SEQ ID NO: 1277603 - DNA, 25 bp, Homo sapien
cctcattcctaataggctggtccag

SEQ ID NO: 1277604 - DNA, 25 bp, Homo sapien
tctgactttccagttggaaaggaca

SEQ ID NO: 1277605 - DNA, 25 bp, Homo sapien
tgactttccagttggaaaggacatg

SEQ ID NO: 1277606 - DNA, 25 bp, Homo sapien
actttccagttggaaaggacatgct

SEQ ID NO: 1277607 - DNA, 25 bp, Homo sapien
gtctgactttccagttggaaaggac

SEQ ID NO: 1277608 - DNA, 25 bp, Homo sapien
gtttaatttttttggctgcaatgca

SEQ ID NO: 1277609 - DNA, 25 bp, Homo sapien
tttaatttttttggctgcaatgcat

SEQ ID NO: 1277610 - DNA, 25 bp, Homo sapien
taatttttttggctgcaatgcattt

SEQ ID NO: 1277611 - DNA, 25 bp, Homo sapien
ctgtttaatttttttggctgcaatg

SEQ ID NO: 1277612 - DNA, 25 bp, Homo sapien
tttatttggatcaaactgagaagaa

SEQ ID NO: 1277613 - DNA, 25 bp, Homo sapien
cttgccagacggggtctgtttattt

SEQ ID NO: 1277614 - DNA, 25 bp, Homo sapien
ccagacggggtctgtttatttggat

SEQ ID NO: 1277615 - DNA, 25 bp, Homo sapien
tgccagacggggtctgtttatttgg

SEQ ID NO: 1277616 - DNA, 25 bp, Homo sapien
gaatacatagcgatcctggtccctg

SEQ ID NO: 1277617 - DNA, 25 bp, Homo sapien
gtgagagcacccctgtcacgatgag

SEQ ID NO: 1277618 - DNA, 25 bp, Homo sapien
ggctcatggctcacataaatgaata

SEQ ID NO: 1277619 - DNA, 25 bp, Homo sapien
ggaccatgacactcagggaagcctt

SEQ ID NO: 1277620 - DNA, 25 bp, Homo sapien
ttcctcccctctgacgcgcacagat

SEQ ID NO: 1277621 - DNA, 25 bp, Homo sapien
atattgtggtctctttatggcttcc

SEQ ID NO: 1277622 - DNA, 25 bp, Homo sapien
gacgcgcacagatgtccctgtatgg

SEQ ID NO: 1277623 - DNA, 25 bp, Homo sapien
ttggcccctatattgtggtctcttt

SEQ ID NO: 1277624 - DNA, 25 bp, Homo sapien
ccttgggtcgcttgttgctcgctct

SEQ ID NO: 1277625 - DNA, 25 bp, Homo sapien
tggaaattttgagtcgtttcttctc

SEQ ID NO: 1277626 - DNA, 25 bp, Homo sapien
aaaagccttgaagtctgactggctg

SEQ ID NO: 1277627 - DNA, 25 bp, Homo sapien
gctgtagtcgtaaggcgtaaactct

SEQ ID NO: 1277628 - DNA, 25 bp, Homo sapien
atttaagaaaggcaagcaggccagg

SEQ ID NO: 1277629 - DNA, 25 bp, Homo sapien
tgtggctggaacttcgggaccaaca

SEQ ID NO: 1277630 - DNA, 25 bp, Homo sapien
ctcactggacaatgacatgaggtca

SEQ ID NO: 1277631 - DNA, 25 bp, Homo sapien
tggaacttcgggaccaacactcagg

SEQ ID NO: 1277632 - DNA, 25 bp, Homo sapien
cacgacctgctgtcggacggagatg

SEQ ID NO: 1277633 - DNA, 25 bp, Homo sapien
gctgtcggacggagatggcctgttc

SEQ ID NO: 1277634 - DNA, 25 bp, Homo sapien
cacgcctcctttgcctgttcccggg

SEQ ID NO: 1277635 - DNA, 25 bp, Homo sapien
tttgcacgcctcctttgcctgttcc

SEQ ID NO: 1277636 - DNA, 25 bp, Homo sapien
tctgtgaacctaaatgctcagtggc

SEQ ID NO: 1277637 - DNA, 25 bp, Homo sapien
cagagtaaaaggcagcgtcatcccg

SEQ ID NO: 1277638 - DNA, 25 bp, Homo sapien
aaacagcgggtgtgcaacagccatt

SEQ ID NO: 1277639 - DNA, 25 bp, Homo sapien
tatctggcacttggctgaaacagcg

SEQ ID NO: 1277640 - DNA, 25 bp, Homo sapien
gggccagcttccagcggttgctgat

SEQ ID NO: 1277641 - DNA, 25 bp, Homo sapien
ctgggccagcttccagcggttgctg

SEQ ID NO: 1277642 - DNA, 25 bp, Homo sapien
tgggccagcttccagcggttgctga

SEQ ID NO: 1277643 - DNA, 25 bp, Homo sapien
tttatgacaccccacggacctatgg

SEQ ID NO: 1277644 - DNA, 25 bp, Homo sapien
tagcaagctaactcagggacaggaa

SEQ ID NO: 1277645 - DNA, 25 bp, Homo sapien
gatgagcaaacagactccgggagag

SEQ ID NO: 1277646 - DNA, 25 bp, Homo sapien
caacacatggaggtgacactgggca

SEQ ID NO: 1277647 - DNA, 25 bp, Homo sapien
gattttggttgatggatcgaacttc

SEQ ID NO: 1277648 - DNA, 25 bp, Homo sapien
tggttgatggatcgaacttcgctgc

SEQ ID NO: 1277649 - DNA, 25 bp, Homo sapien
ttttggttgatggatcgaacttcgc

SEQ ID NO: 1277650 - DNA, 25 bp, Homo sapien
tcatagattttggttgatggatcga

SEQ ID NO: 1277651 - DNA, 25 bp, Homo sapien
ctgagagacgggagcacggtgtccc

SEQ ID NO: 1277652 - DNA, 25 bp, Homo sapien
gcacggtgtcccagtgagggcagaa

SEQ ID NO: 1277653 - DNA, 25 bp, Homo sapien
ggcttttttctgtgcaactgtcaat

SEQ ID NO: 1277654 - DNA, 25 bp, Homo sapien
tggattttcaaaggactccatgatg

SEQ ID NO: 1277655 - DNA, 25 bp, Homo sapien
ttttcaaaggactccatgatgttct

SEQ ID NO: 1277656 - DNA, 25 bp, Homo sapien
aactgtcaatggaccctttttactg

SEQ ID NO: 1277657 - DNA, 25 bp, Homo sapien
tcagggaagaggctcgcctgcttct

SEQ ID NO: 1277658 - DNA, 25 bp, Homo sapien
aagaggctcgcctgcttctgaactg

SEQ ID NO: 1277659 - DNA, 25 bp, Homo sapien
ttaaataacgtgatgacagctgtgg

SEQ ID NO: 1277660 - DNA, 25 bp, Homo sapien
gctgtggcaatcaggcatgtggtac

SEQ ID NO: 1277661 - DNA, 25 bp, Homo sapien
ttttagtgtagtcccctaggctgga

SEQ ID NO: 1277662 - DNA, 25 bp, Homo sapien
ttttagacaaggtagctgtgtccca

SEQ ID NO: 1277663 - DNA, 25 bp, Homo sapien
gcagaagatagtaaggtcaaagcct

SEQ ID NO: 1277664 - DNA, 25 bp, Homo sapien
gcccggccaagcctacagaatttta

SEQ ID NO: 1277665 - DNA, 25 bp, Homo sapien
cagtcaggagggctctcgactttac

SEQ ID NO: 1277666 - DNA, 25 bp, Homo sapien
attggatagccatccggaggggcat

SEQ ID NO: 1277667 - DNA, 25 bp, Homo sapien
gagcagtcgtgaggtccaaagagaa

SEQ ID NO: 1277668 - DNA, 25 bp, Homo sapien
cagtcgtgaggtccaaagagaacat

SEQ ID NO: 1277669 - DNA, 25 bp, Homo sapien
ggcatgggagcagtcgtgaggtcca

SEQ ID NO: 1277670 - DNA, 25 bp, Homo sapien
cactggctgtgacttgacgttttcc

SEQ ID NO: 1277671 - DNA, 25 bp, Homo sapien
taaaacgtgcaagccggcagtagct

SEQ ID NO: 1277672 - DNA, 25 bp, Homo sapien
cagcaggctggcatgtaaaacgtgc

SEQ ID NO: 1277673 - DNA, 25 bp, Homo sapien
tcagaggtgtacttgcactggctgt

SEQ ID NO: 1277674 - DNA, 25 bp, Homo sapien
gggggagaaaacagatccgacactc

SEQ ID NO: 1277675 - DNA, 25 bp, Homo sapien
cagcactgggcagcggtccgctctt

SEQ ID NO: 1277676 - DNA, 25 bp, Homo sapien
ctgggcagcggtccgctcttcttca

SEQ ID NO: 1277677 - DNA, 25 bp, Homo sapien
cactgggcagcggtccgctcttctt

SEQ ID NO: 1277678 - DNA, 25 bp, Homo sapien
ctcagcactgggcagcggtccgctc

SEQ ID NO: 1277679 - DNA, 25 bp, Homo sapien
aaaactagctccctctgctgaggtc

SEQ ID NO: 1277680 - DNA, 25 bp, Homo sapien
cactccaccacattaactgccttag

SEQ ID NO: 1277681 - DNA, 25 bp, Homo sapien
tgccattgtcagcatttgctacgaa

SEQ ID NO: 1277682 - DNA, 25 bp, Homo sapien
gctacgaagtctcatcaatcttttc

SEQ ID NO: 1277683 - DNA, 25 bp, Homo sapien
tcgttgatctgctgccgcacaaggg

SEQ ID NO: 1277684 - DNA, 25 bp, Homo sapien
gcagcaagctatgatgccctgaggt

SEQ ID NO: 1277685 - DNA, 25 bp, Homo sapien
tctcgggcctgctggattaaaaggt

SEQ ID NO: 1277686 - DNA, 25 bp, Homo sapien
ttaaaaggtgcatttcgttgatctg

SEQ ID NO: 1277687 - DNA, 25 bp, Homo sapien
agcatcatgtggtttggcagtacat

SEQ ID NO: 1277688 - DNA, 25 bp, Homo sapien
catcatgtggtttggcagtacatat

SEQ ID NO: 1277689 - DNA, 25 bp, Homo sapien
cagcatcatgtggtttggcagtaca

SEQ ID NO: 1277690 - DNA, 25 bp, Homo sapien
gcatcatgtggtttggcagtacata

SEQ ID NO: 1277691 - DNA, 25 bp, Homo sapien
cattcagccagtaagttccattaga

SEQ ID NO: 1277692 - DNA, 25 bp, Homo sapien
cggtggggacacattacattcagcc

SEQ ID NO: 1277693 - DNA, 25 bp, Homo sapien
ctcctcagtctggaaacaagtatta

SEQ ID NO: 1277694 - DNA, 25 bp, Homo sapien
tttacttgttattagatctcctcag

SEQ ID NO: 1277695 - DNA, 25 bp, Homo sapien
tagagttcaaggtaggactcatccg

SEQ ID NO: 1277696 - DNA, 25 bp, Homo sapien
cttcttctgcttcctatagagttca

SEQ ID NO: 1277697 - DNA, 25 bp, Homo sapien
gactcatccgtgaagataggtttga

SEQ ID NO: 1277698 - DNA, 25 bp, Homo sapien
tcttccctgcgagctgttttatccc

SEQ ID NO: 1277699 - DNA, 25 bp, Homo sapien
agatgtccctgctccgttgccacac

SEQ ID NO: 1277700 - DNA, 25 bp, Homo sapien
ggcagatgtccctgctccgttgcca

SEQ ID NO: 1277701 - DNA, 25 bp, Homo sapien
cagatgtccctgctccgttgccaca

SEQ ID NO: 1277702 - DNA, 25 bp, Homo sapien
gcagatgtccctgctccgttgccac

SEQ ID NO: 1277703 - DNA, 25 bp, Homo sapien
tatatagcaggtaatgggtgtcatc

SEQ ID NO: 1277704 - DNA, 25 bp, Homo sapien
aatgggtgtcatcccgggcgtagct

SEQ ID NO: 1277705 - DNA, 25 bp, Homo sapien
cgttgccgcgctcccacatctccag

SEQ ID NO: 1277706 - DNA, 25 bp, Homo sapien
ttttgtcatagatatatagcaggta

SEQ ID NO: 1277707 - DNA, 25 bp, Homo sapien
catgggcaaatactggtgcggcacc

SEQ ID NO: 1277708 - DNA, 25 bp, Homo sapien
tgcatcagcccatcataaagtccac

SEQ ID NO: 1277709 - DNA, 25 bp, Homo sapien
agaattctttcccacctatggaagg

SEQ ID NO: 1277710 - DNA, 25 bp, Homo sapien
tggaacacagtgtaactgcatcagc

SEQ ID NO: 1277711 - DNA, 25 bp, Homo sapien
caggtctctctggacgacaggttaa

SEQ ID NO: 1277712 - DNA, 25 bp, Homo sapien
gatgcctggcgaaaagcctgatgcc

SEQ ID NO: 1277713 - DNA, 25 bp, Homo sapien
ttttacgctgctgaagatgcctggc

SEQ ID NO: 1277714 - DNA, 25 bp, Homo sapien
tcatctcaatgagcgtggtagggct

SEQ ID NO: 1277715 - DNA, 25 bp, Homo sapien
agatgatcgagtgagtgcctgccca

SEQ ID NO: 1277716 - DNA, 25 bp, Homo sapien
cctgcccaggttaagaaggcgtgct

SEQ ID NO: 1277717 - DNA, 25 bp, Homo sapien
gcttgtttgagtccacgttgcagta

SEQ ID NO: 1277718 - DNA, 25 bp, Homo sapien
ggcgtgctgcctgatgagtatcaaa

SEQ ID NO: 1277719 - DNA, 25 bp, Homo sapien
tcatgctcagaaattaactctgcct

SEQ ID NO: 1277720 - DNA, 25 bp, Homo sapien
agtacactggtagcaggccactcat

SEQ ID NO: 1277721 - DNA, 25 bp, Homo sapien
aaacagaaccaaagtcatgcagtac

SEQ ID NO: 1277722 - DNA, 25 bp, Homo sapien
caaagtcatgcagtacactggtagc

SEQ ID NO: 1277723 - DNA, 25 bp, Homo sapien
atatatggcgttatttctgagggct

SEQ ID NO: 1277724 - DNA, 25 bp, Homo sapien
gatatatggcgttatttctgagggc

SEQ ID NO: 1277725 - DNA, 25 bp, Homo sapien
gttctgtttatacgctgcattacat

SEQ ID NO: 1277726 - DNA, 25 bp, Homo sapien
ggttctgtttatacgctgcattaca

SEQ ID NO: 1277727 - DNA, 25 bp, Homo sapien
tgaggctctcattgagaatgtacat

SEQ ID NO: 1277728 - DNA, 25 bp, Homo sapien
gtgaggctctcattgagaatgtaca

SEQ ID NO: 1277729 - DNA, 25 bp, Homo sapien
gaggctctcattgagaatgtacatg

SEQ ID NO: 1277730 - DNA, 25 bp, Homo sapien
tgaagtcttccgtccgagtagaaat

SEQ ID NO: 1277731 - DNA, 25 bp, Homo sapien
tccgtccgagtagaaatttgcatca

SEQ ID NO: 1277732 - DNA, 25 bp, Homo sapien
agtagaaatttgcatcaggcaggtc

SEQ ID NO: 1277733 - DNA, 25 bp, Homo sapien
ctcgagggtgtcaatgatgaagtct

SEQ ID NO: 1277734 - DNA, 25 bp, Homo sapien
caattcaagagcttttcgttgagtt

SEQ ID NO: 1277735 - DNA, 25 bp, Homo sapien
cttttcgttgagttccacgagttca

SEQ ID NO: 1277736 - DNA, 25 bp, Homo sapien
actgcaaattcctgacaattcaaga

SEQ ID NO: 1277737 - DNA, 25 bp, Homo sapien
gttgagttccacgagttcatccagg

SEQ ID NO: 1277738 - DNA, 25 bp, Homo sapien
tctgctggggtaaagtgatttagtt

SEQ ID NO: 1277739 - DNA, 25 bp, Homo sapien
gtgatttagttcatattgataagga

SEQ ID NO: 1277740 - DNA, 25 bp, Homo sapien
gcatctgctggggtaaagtgattta

SEQ ID NO: 1277741 - DNA, 25 bp, Homo sapien
gggtaaagtgatttagttcatattg

SEQ ID NO: 1277742 - DNA, 25 bp, Homo sapien
tcaggacgatcctgtgggcgttccc

SEQ ID NO: 1277743 - DNA, 25 bp, Homo sapien
gggacgtccaagtcctcaggacgat

SEQ ID NO: 1277744 - DNA, 25 bp, Homo sapien
caagtcctcaggacgatcctgtggg

SEQ ID NO: 1277745 - DNA, 25 bp, Homo sapien
gatcctgtgggcgttcccgcctttc

SEQ ID NO: 1277746 - DNA, 25 bp, Homo sapien
ttgcatgaagcagccggaaagtttc

SEQ ID NO: 1277747 - DNA, 25 bp, Homo sapien
tctctcgaaacttgagctgaggtcg

SEQ ID NO: 1277748 - DNA, 25 bp, Homo sapien
ctgaggtcggatgatattttttgca

SEQ ID NO: 1277749 - DNA, 25 bp, Homo sapien
ggaattgtcaatcttctctcgaaac

SEQ ID NO: 1277750 - DNA, 25 bp, Homo sapien
cttacggttccagctggacactacc

SEQ ID NO: 1277751 - DNA, 25 bp, Homo sapien
gttccagctggacactaccgttttg

SEQ ID NO: 1277752 - DNA, 25 bp, Homo sapien
tccagctggacactaccgttttggg

SEQ ID NO: 1277753 - DNA, 25 bp, Homo sapien
tacggttccagctggacactaccgt

SEQ ID NO: 1277754 - DNA, 25 bp, Homo sapien
ggctgttgattcttgtttacacctg

SEQ ID NO: 1277755 - DNA, 25 bp, Homo sapien
tgcaagccggcagggaggacaggct

SEQ ID NO: 1277756 - DNA, 25 bp, Homo sapien
ggaggacaggctgttgattcttgtt

SEQ ID NO: 1277757 - DNA, 25 bp, Homo sapien
ggacaggctgttgattcttgtttac

SEQ ID NO: 1277758 - DNA, 25 bp, Homo sapien
atcacaaggtcaggagatcgagacc

SEQ ID NO: 1277759 - DNA, 25 bp, Homo sapien
cataagagtaagggaaggccgggtg

SEQ ID NO: 1277760 - DNA, 25 bp, Homo sapien
cattctgggaggctgaggcgggcgg

SEQ ID NO: 1277761 - DNA, 25 bp, Homo sapien
tggtggctcacgcctgtaatcccag

SEQ ID NO: 1277762 - DNA, 25 bp, Homo sapien
tgctgcgacacccatggtactgcat

SEQ ID NO: 1277763 - DNA, 25 bp, Homo sapien
tacatcattggcatcaactagtaaa

SEQ ID NO: 1277764 - DNA, 25 bp, Homo sapien
tcaaacttgtcttccagctcagtca

SEQ ID NO: 1277765 - DNA, 25 bp, Homo sapien
actttacttcgatccttaatgttgc

SEQ ID NO: 1277766 - DNA, 25 bp, Homo sapien
aaaacttgcaccctagctgggcgca

SEQ ID NO: 1277767 - DNA, 25 bp, Homo sapien
tggcccctgatactttttgatgaaa

SEQ ID NO: 1277768 - DNA, 25 bp, Homo sapien
gctgtgacttgggagtggtgcacca

SEQ ID NO: 1277769 - DNA, 25 bp, Homo sapien
cacttcaggagtggtcacgacttcg

SEQ ID NO: 1277770 - DNA, 25 bp, Homo sapien
ccagatgccttggtgactgccacca

SEQ ID NO: 1277771 - DNA, 25 bp, Homo sapien
tgtctccctgtgtttcgcaaaatgc

SEQ ID NO: 1277772 - DNA, 25 bp, Homo sapien
ttcggtaaaaatcatactcatcgcc

SEQ ID NO: 1277773 - DNA, 25 bp, Homo sapien
tcatcgccaaactgtggtaggcccc

SEQ ID NO: 1277774 - DNA, 25 bp, Homo sapien
aaagctgtcggcgtccgggaagcct

SEQ ID NO: 1277775 - DNA, 25 bp, Homo sapien
cttcacaaagctgtcggcgtccggg

SEQ ID NO: 1277776 - DNA, 25 bp, Homo sapien
tggcagcaccatctctccgtcggat

SEQ ID NO: 1277777 - DNA, 25 bp, Homo sapien
gatttggttgcgctggtcgccgaca

SEQ ID NO: 1277778 - DNA, 25 bp, Homo sapien
ttgtcggccgaggagacgggacgcg

SEQ ID NO: 1277779 - DNA, 25 bp, Homo sapien
gacgggacgcgtgcgcaccacgcat

SEQ ID NO: 1277780 - DNA, 25 bp, Homo sapien
tttttcagcctgcacggctcgtctc

SEQ ID NO: 1277781 - DNA, 25 bp, Homo sapien
tcgtctcgcgagagcttgtcggccg

SEQ ID NO: 1277782 - DNA, 25 bp, Homo sapien
gaagcctgcgattagggtggcactt

SEQ ID NO: 1277783 - DNA, 25 bp, Homo sapien
cactttcgagcgctctggtgtgaat

SEQ ID NO: 1277784 - DNA, 25 bp, Homo sapien
tcacgttcttttacctcatattgta

SEQ ID NO: 1277785 - DNA, 25 bp, Homo sapien
accctgtgatctagggtgcggcctg

SEQ ID NO: 1277786 - DNA, 25 bp, Homo sapien
gagccaggaaagttatggtgaccat

SEQ ID NO: 1277787 - DNA, 25 bp, Homo sapien
gcctggctggactaaactgtattta

SEQ ID NO: 1277788 - DNA, 25 bp, Homo sapien
tatcggattcaccaaagaccttaat

SEQ ID NO: 1277789 - DNA, 25 bp, Homo sapien
gtatttaaaggcctccactagctcc

SEQ ID NO: 1277790 - DNA, 25 bp, Homo sapien
caacatggtgtctagacatggctac

SEQ ID NO: 1277791 - DNA, 25 bp, Homo sapien
gaattgaagcgtgtgagtcgcagca

SEQ ID NO: 1277792 - DNA, 25 bp, Homo sapien
tctgaataaacctccctactagcgg

SEQ ID NO: 1277793 - DNA, 25 bp, Homo sapien
tgtgttcagcacctccatgacagta

SEQ ID NO: 1277794 - DNA, 25 bp, Homo sapien
cattttggcctatcttgcaaacatt

SEQ ID NO: 1277795 - DNA, 25 bp, Homo sapien
actcattttggcctatcttgcaaac

SEQ ID NO: 1277796 - DNA, 25 bp, Homo sapien
tgtactcattttggcctatcttgca

SEQ ID NO: 1277797 - DNA, 25 bp, Homo sapien
tttgtactcattttggcctatcttg

SEQ ID NO: 1277798 - DNA, 25 bp, Homo sapien
ttctgtgtctttacagtctaggatc

SEQ ID NO: 1277799 - DNA, 25 bp, Homo sapien
gggtgaggtcagcatcttctgtgtc

SEQ ID NO: 1277800 - DNA, 25 bp, Homo sapien
tcttctgtgtctttacagtctagga

SEQ ID NO: 1277801 - DNA, 25 bp, Homo sapien
gcaggggtgaggtcagcatcttctg

SEQ ID NO: 1277802 - DNA, 25 bp, Homo sapien
catgttctccacgacctgaggcttc

SEQ ID NO: 1277803 - DNA, 25 bp, Homo sapien
ctaatccatgttctccacgacctga

SEQ ID NO: 1277804 - DNA, 25 bp, Homo sapien
tgttctccacgacctgaggcttctt

SEQ ID NO: 1277805 - DNA, 25 bp, Homo sapien
atccatgttctccacgacctgaggc

SEQ ID NO: 1277806 - DNA, 25 bp, Homo sapien
cagcagctagaaagttggttcaaac

SEQ ID NO: 1277807 - DNA, 25 bp, Homo sapien
tattactatgtttcactgtcctggg

SEQ ID NO: 1277808 - DNA, 25 bp, Homo sapien
tgtacccatgttgagaggagcaact

SEQ ID NO: 1277809 - DNA, 25 bp, Homo sapien
tcagaaaaaacgtgatgggcacatc

SEQ ID NO: 1277810 - DNA, 25 bp, Homo sapien
tcaacttgcgttggaacatccaaag

SEQ ID NO: 1277811 - DNA, 25 bp, Homo sapien
catgggatgtcgcttgtttgatgag

SEQ ID NO: 1277812 - DNA, 25 bp, Homo sapien
gcagaggttttcatgggatgtcgct

SEQ ID NO: 1277813 - DNA, 25 bp, Homo sapien
tgtttgatgagcagctcaacttgcg

SEQ ID NO: 1277814 - DNA, 25 bp, Homo sapien
gaaccctgttaataatctggatagc

SEQ ID NO: 1277815 - DNA, 25 bp, Homo sapien
tagctttcttatttagggcctctgg

SEQ ID NO: 1277816 - DNA, 25 bp, Homo sapien
tctggatagctttcttatttagggc

SEQ ID NO: 1277817 - DNA, 25 bp, Homo sapien
cagtgagcttatctcgaaccctgtt

SEQ ID NO: 1277818 - DNA, 25 bp, Homo sapien
cactgtggtccccgttttcttatgg

SEQ ID NO: 1277819 - DNA, 25 bp, Homo sapien
ccccgttttcttatgggctggctct

SEQ ID NO: 1277820 - DNA, 25 bp, Homo sapien
ctccaagttccacaccgtccaaaat

SEQ ID NO: 1277821 - DNA, 25 bp, Homo sapien
tccccgttttcttatgggctggctc

SEQ ID NO: 1277822 - DNA, 25 bp, Homo sapien
cacgcaggttatggtcaattctgta

SEQ ID NO: 1277823 - DNA, 25 bp, Homo sapien
gttagatgccaccaacccaagtgct

SEQ ID NO: 1277824 - DNA, 25 bp, Homo sapien
tgtgcttcttcaggcgaccactgta

SEQ ID NO: 1277825 - DNA, 25 bp, Homo sapien
tcgcagctacggttcacagtgaagt

SEQ ID NO: 1277826 - DNA, 25 bp, Homo sapien
agcagagtaggaatccgtcctcgtt

SEQ ID NO: 1277827 - DNA, 25 bp, Homo sapien
cgggatcgcttgttgcctttggtat

SEQ ID NO: 1277828 - DNA, 25 bp, Homo sapien
taggaatccgtcctcgttcgggatc

SEQ ID NO: 1277829 - DNA, 25 bp, Homo sapien
tcctcgttcgggatcgcttgttgcc

SEQ ID NO: 1277830 - DNA, 25 bp, Homo sapien
agacaaaggcttccagcacggccat

SEQ ID NO: 1277831 - DNA, 25 bp, Homo sapien
tgtagttgccatccaggcctgtaac

SEQ ID NO: 1277832 - DNA, 25 bp, Homo sapien
tcagcaaggggtcatagacaaaggc

SEQ ID NO: 1277833 - DNA, 25 bp, Homo sapien
gcacggccatgacactgtccttgtg

SEQ ID NO: 1277834 - DNA, 25 bp, Homo sapien
atgtcttaggagaaggaatcagggc

SEQ ID NO: 1277835 - DNA, 25 bp, Homo sapien
caaagcaagccgagggggtctgtta

SEQ ID NO: 1277836 - DNA, 25 bp, Homo sapien
ttactaactctccacccaaagcaag

SEQ ID NO: 1277837 - DNA, 25 bp, Homo sapien
acacaggccatgttgacgtatcagg

SEQ ID NO: 1277838 - DNA, 25 bp, Homo sapien
ctccatagcattggtcaacattctt

SEQ ID NO: 1277839 - DNA, 25 bp, Homo sapien
cttgttagtctaaatggaatcttct

SEQ ID NO: 1277840 - DNA, 25 bp, Homo sapien
gcattggtcaacattcttgttagtc

SEQ ID NO: 1277841 - DNA, 25 bp, Homo sapien
tggaaacttctctcgggtcatagca

SEQ ID NO: 1277842 - DNA, 25 bp, Homo sapien
aggttggggttctagaacatgtgtt

SEQ ID NO: 1277843 - DNA, 25 bp, Homo sapien
atgaggttggggttctagaacatgt

SEQ ID NO: 1277844 - DNA, 25 bp, Homo sapien
ttggggttctagaacatgtgttcac

SEQ ID NO: 1277845 - DNA, 25 bp, Homo sapien
aagatgaggttggggttctagaaca

SEQ ID NO: 1277846 - DNA, 25 bp, Homo sapien
ggatcttcccactcagacggtccag

SEQ ID NO: 1277847 - DNA, 25 bp, Homo sapien
cagtccccaaagtcaatgtgcagga

SEQ ID NO: 1277848 - DNA, 25 bp, Homo sapien
tcaatgtgcaggatcttcccactca

SEQ ID NO: 1277849 - DNA, 25 bp, Homo sapien
tgtgcaggatcttcccactcagacg

SEQ ID NO: 1277850 - DNA, 25 bp, Homo sapien
cagagataacggatgaaaaaatcaa

SEQ ID NO: 1277851 - DNA, 25 bp, Homo sapien
gatactgtaagctaggagttggcaa

SEQ ID NO: 1277852 - DNA, 25 bp, Homo sapien
aaaaatcaataagtacgtgatactg

SEQ ID NO: 1277853 - DNA, 25 bp, Homo sapien
atcagggagggatcaacagagataa

SEQ ID NO: 1277854 - DNA, 25 bp, Homo sapien
ctttgaccttctggacttaagtgat

SEQ ID NO: 1277855 - DNA, 25 bp, Homo sapien
gctttgaccttctggacttaagtga

SEQ ID NO: 1277856 - DNA, 25 bp, Homo sapien
cagctttgaccttctggacttaagt

SEQ ID NO: 1277857 - DNA, 25 bp, Homo sapien
ctacagctttgaccttctggactta

SEQ ID NO: 1277858 - DNA, 25 bp, Homo sapien
catgaccgctaaagaacgggtataa

SEQ ID NO: 1277859 - DNA, 25 bp, Homo sapien
taattggttcttcggtcaaaccaca

SEQ ID NO: 1277860 - DNA, 25 bp, Homo sapien
tataattggttcttcggtcaaacca

SEQ ID NO: 1277861 - DNA, 25 bp, Homo sapien
taaaatatacccaaccattgacatg

SEQ ID NO: 1277862 - DNA, 25 bp, Homo sapien
tattgacggcatgctcaaacacctc

SEQ ID NO: 1277863 - DNA, 25 bp, Homo sapien
cagagtcaagtggtcatagtccgga

SEQ ID NO: 1277864 - DNA, 25 bp, Homo sapien
gtcgtccccagctgtattattgacg

SEQ ID NO: 1277865 - DNA, 25 bp, Homo sapien
tcaagtggtcatagtccggagccat

SEQ ID NO: 1277866 - DNA, 25 bp, Homo sapien
ccgcaacatgatgcgatgctcgatg

SEQ ID NO: 1277867 - DNA, 25 bp, Homo sapien
tctccctgtagtcccggatgagggc

SEQ ID NO: 1277868 - DNA, 25 bp, Homo sapien
ccgagttggtcgataaagggatgac

SEQ ID NO: 1277869 - DNA, 25 bp, Homo sapien
tgagggcgtgcagtgtgtcacagtg

SEQ ID NO: 1277870 - DNA, 25 bp, Homo sapien
gtgcagtgaaagcaacacaggtctc

SEQ ID NO: 1277871 - DNA, 25 bp, Homo sapien
cagaaagacagtgcactgatggtgc

SEQ ID NO: 1277872 - DNA, 25 bp, Homo sapien
ccggcggccctgactatttttaatg

SEQ ID NO: 1277873 - DNA, 25 bp, Homo sapien
gaagaataaggcatcacagaaagac

SEQ ID NO: 1277874 - DNA, 25 bp, Homo sapien
ttaagatataatacatgactacacg

SEQ ID NO: 1277875 - DNA, 25 bp, Homo sapien
gatataatacatgactacacgagac

SEQ ID NO: 1277876 - DNA, 25 bp, Homo sapien
catgactacacgagacaaatgtagg

SEQ ID NO: 1277877 - DNA, 25 bp, Homo sapien
taatacatgactacacgagacaaat

SEQ ID NO: 1277878 - DNA, 25 bp, Homo sapien
cagaagggtgttaaccaggccgaag

SEQ ID NO: 1277879 - DNA, 25 bp, Homo sapien
aggccgaagagctgcatcacacgct

SEQ ID NO: 1277880 - DNA, 25 bp, Homo sapien
tcctggcgcagatcttcatggcctt

SEQ ID NO: 1277881 - DNA, 25 bp, Homo sapien
tgaggtttttccgaagagatgttgg

SEQ ID NO: 1277882 - DNA, 25 bp, Homo sapien
tgtgatgacttgcaaagacggtgct

SEQ ID NO: 1277883 - DNA, 25 bp, Homo sapien
caaggtcccggcacatcagaagttt

SEQ ID NO: 1277884 - DNA, 25 bp, Homo sapien
tgttcctggcacagccaattcaagg

SEQ ID NO: 1277885 - DNA, 25 bp, Homo sapien
tatggactgaatgcgaatgattggc

SEQ ID NO: 1277886 - DNA, 25 bp, Homo sapien
cacatgataatagaggtcccaggct

SEQ ID NO: 1277887 - DNA, 25 bp, Homo sapien
ccttgacattccctgatttcatgta

SEQ ID NO: 1277888 - DNA, 25 bp, Homo sapien
gcagctgctttgagattcgtcggaa

SEQ ID NO: 1277889 - DNA, 25 bp, Homo sapien
tcttgggcctccattaaatctcgac

SEQ ID NO: 1277890 - DNA, 25 bp, Homo sapien
gcacctcaaacatgcctttcacgtt

SEQ ID NO: 1277891 - DNA, 25 bp, Homo sapien
tttccccaaagtacaaacgagatgc

SEQ ID NO: 1277892 - DNA, 25 bp, Homo sapien
tccatcatagcatgcaagggctcca

SEQ ID NO: 1277893 - DNA, 25 bp, Homo sapien
cagaggatggccactcggatcagct

SEQ ID NO: 1277894 - DNA, 25 bp, Homo sapien
caccagctaagggaccagggtctat

SEQ ID NO: 1277895 - DNA, 25 bp, Homo sapien
cagtcagaggaagtgcacagcacca

SEQ ID NO: 1277896 - DNA, 25 bp, Homo sapien
caagaatcagctaacctcagaaagg

SEQ ID NO: 1277897 - DNA, 25 bp, Homo sapien
ggaggtactatttccagcagtcaga

SEQ ID NO: 1277898 - DNA, 25 bp, Homo sapien
ctcacacatgttcttcagaatcttg

SEQ ID NO: 1277899 - DNA, 25 bp, Homo sapien
ccgggctgtcgtggtagacttagaa

SEQ ID NO: 1277900 - DNA, 25 bp, Homo sapien
gaagccactgtcagtgggtagatga

SEQ ID NO: 1277901 - DNA, 25 bp, Homo sapien
tcttgttggctgcattgtgccgggc

SEQ ID NO: 1277902 - DNA, 25 bp, Homo sapien
tggaaaggctgaccaccaaaccagt

SEQ ID NO: 1277903 - DNA, 25 bp, Homo sapien
taacatctgcttgagactaccagga

SEQ ID NO: 1277904 - DNA, 25 bp, Homo sapien
agtggttagatgagaaactgcccag

SEQ ID NO: 1277905 - DNA, 25 bp, Homo sapien
tcctgggccaggatggaacacatgg

SEQ ID NO: 1277906 - DNA, 25 bp, Homo sapien
gggtggtaccgaccaatgtctgtga

SEQ ID NO: 1277907 - DNA, 25 bp, Homo sapien
agacgtcccaccaagggtctgggcg

SEQ ID NO: 1277908 - DNA, 25 bp, Homo sapien
cgtatcaattcttgcaatgagctga

SEQ ID NO: 1277909 - DNA, 25 bp, Homo sapien
agaagctggtgaatgagacgtccca

SEQ ID NO: 1277910 - DNA, 25 bp, Homo sapien
gatgctctgaaatggttcattccct

SEQ ID NO: 1277911 - DNA, 25 bp, Homo sapien
gcatatgagacttgaaacaactagt

SEQ ID NO: 1277912 - DNA, 25 bp, Homo sapien
caactagttattcttctaggcaaag

SEQ ID NO: 1277913 - DNA, 25 bp, Homo sapien
taacttgtttcggttgatgctctga

SEQ ID NO: 1277914 - DNA, 25 bp, Homo sapien
tccactaaggcctcattgacatctg

SEQ ID NO: 1277915 - DNA, 25 bp, Homo sapien
gaccataatcaaaccataaggtgag

SEQ ID NO: 1277916 - DNA, 25 bp, Homo sapien
tatcaatctggatggctttcacccc

SEQ ID NO: 1277917 - DNA, 25 bp, Homo sapien
gccagtgaccataatcaaaccataa

SEQ ID NO: 1277918 - DNA, 25 bp, Homo sapien
caggcaccgtgtacatcaggagggt

SEQ ID NO: 1277919 - DNA, 25 bp, Homo sapien
cctggaggttgttgcctcgtgacaa

SEQ ID NO: 1277920 - DNA, 25 bp, Homo sapien
caaggagatggaacggaagaagccc

SEQ ID NO: 1277921 - DNA, 25 bp, Homo sapien
acatcaggagggttttggacagatc

SEQ ID NO: 1277922 - DNA, 25 bp, Homo sapien
cagtgaccttcttctgcagcggcga

SEQ ID NO: 1277923 - DNA, 25 bp, Homo sapien
agtgaccttcttctgcagcggcgat

SEQ ID NO: 1277924 - DNA, 25 bp, Homo sapien
ctcagtgaccttcttctgcagcggc

SEQ ID NO: 1277925 - DNA, 25 bp, Homo sapien
tcagtgaccttcttctgcagcggcg

SEQ ID NO: 1277926 - DNA, 25 bp, Homo sapien
cagcttcgaagttcatcactgccca

SEQ ID NO: 1277927 - DNA, 25 bp, Homo sapien
tggccccgctggcatgacgcagttt

SEQ ID NO: 1277928 - DNA, 25 bp, Homo sapien
tctcatcgcgggcttggttctgatg

SEQ ID NO: 1277929 - DNA, 25 bp, Homo sapien
ggttctgatgtttgtagtgtagcac

SEQ ID NO: 1277930 - DNA, 25 bp, Homo sapien
tgaccaacagcagggctcagaggag

SEQ ID NO: 1277931 - DNA, 25 bp, Homo sapien
cacaatgggagtagcaaggacaggc

SEQ ID NO: 1277932 - DNA, 25 bp, Homo sapien
tataacgtactatgagtgcactgcg

SEQ ID NO: 1277933 - DNA, 25 bp, Homo sapien
ggagctcacgcacaaacctgaagac

SEQ ID NO: 1277934 - DNA, 25 bp, Homo sapien
ggtgaacaagacaaacagtcctggc

SEQ ID NO: 1277935 - DNA, 25 bp, Homo sapien
tgtcactccagagattaaccatgtg

SEQ ID NO: 1277936 - DNA, 25 bp, Homo sapien
catacagggccatgacgttgatggt

SEQ ID NO: 1277937 - DNA, 25 bp, Homo sapien
taaccatgtgtccagatgctcccag

SEQ ID NO: 1277938 - DNA, 25 bp, Homo sapien
ctcttatagataggctccagggact

SEQ ID NO: 1277939 - DNA, 25 bp, Homo sapien
acagcatcagcctagctccgcagaa

SEQ ID NO: 1277940 - DNA, 25 bp, Homo sapien
gcctagctccgcagaagctcagctg

SEQ ID NO: 1277941 - DNA, 25 bp, Homo sapien
acgagcacacaggaggacacgagcc

SEQ ID NO: 1277942 - DNA, 25 bp, Homo sapien
gattgtgctctcattgatgccctgt

SEQ ID NO: 1277943 - DNA, 25 bp, Homo sapien
taccagctgcggtcgtgctctgtgg

SEQ ID NO: 1277944 - DNA, 25 bp, Homo sapien
gcggcgctgtagtactgcagcactt

SEQ ID NO: 1277945 - DNA, 25 bp, Homo sapien
tctgtggcggcgctgtagtactgca

SEQ ID NO: 1277946 - DNA, 25 bp, Homo sapien
ctgttgctgcatggtctggacaaaa

SEQ ID NO: 1277947 - DNA, 25 bp, Homo sapien
gctgctggtcctcagtagcgatggc

SEQ ID NO: 1277948 - DNA, 25 bp, Homo sapien
gcatggtctggacaaaatgctgcat

SEQ ID NO: 1277949 - DNA, 25 bp, Homo sapien
ctcagtagcgatggcatgctgggcc

SEQ ID NO: 1277950 - DNA, 25 bp, Homo sapien
taacaggacaaaggcacagagagcc

SEQ ID NO: 1277951 - DNA, 25 bp, Homo sapien
ctgtaacaggacaaaggcacagaga

SEQ ID NO: 1277952 - DNA, 25 bp, Homo sapien
aacaggacaaaggcacagagagcca

SEQ ID NO: 1277953 - DNA, 25 bp, Homo sapien
gtaacaggacaaaggcacagagagc

SEQ ID NO: 1277954 - DNA, 25 bp, Homo sapien
cagagcgaagcagattaggcgagca

SEQ ID NO: 1277955 - DNA, 25 bp, Homo sapien
tcaggccaaatagctttgtaacagg

SEQ ID NO: 1277956 - DNA, 25 bp, Homo sapien
cattctggagaaggtggtctgttct

SEQ ID NO: 1277957 - DNA, 25 bp, Homo sapien
ggaagagactccctgacattgtgag

SEQ ID NO: 1277958 - DNA, 25 bp, Homo sapien
tcatgtaggcataggtcacctgagg

SEQ ID NO: 1277959 - DNA, 25 bp, Homo sapien
cagaggatggtcaagttgccgagac

SEQ ID NO: 1277960 - DNA, 25 bp, Homo sapien
gttgccgagacggatcaactcccag

SEQ ID NO: 1277961 - DNA, 25 bp, Homo sapien
ctcccaggagcaacactaaagtttt

SEQ ID NO: 1277962 - DNA, 25 bp, Homo sapien
agtcctctacgatacgctggcagcc

SEQ ID NO: 1277963 - DNA, 25 bp, Homo sapien
tgccgcacaggcttgcatacttgag

SEQ ID NO: 1277964 - DNA, 25 bp, Homo sapien
tcttcatgagggctgaccacaaggg

SEQ ID NO: 1277965 - DNA, 25 bp, Homo sapien
caagggaccgcaccataaggatttt

SEQ ID NO: 1277966 - DNA, 25 bp, Homo sapien
tccagctcggacagcatgtggcaag

SEQ ID NO: 1277967 - DNA, 25 bp, Homo sapien
tggcggatgatctctcgtcgctcgg

SEQ ID NO: 1277968 - DNA, 25 bp, Homo sapien
gacaagtttgtactggataacctcc

SEQ ID NO: 1277969 - DNA, 25 bp, Homo sapien
tctcccaccagatctggcggatgat

SEQ ID NO: 1277970 - DNA, 25 bp, Homo sapien
ggaagcaaatcgcattccaaactaa

SEQ ID NO: 1277971 - DNA, 25 bp, Homo sapien
tactgcacgaacaatccaaaagaca

SEQ ID NO: 1277972 - DNA, 25 bp, Homo sapien
tatctgccgatcagagaaaacaggc

SEQ ID NO: 1277973 - DNA, 25 bp, Homo sapien
atggaaataagcctcaaaaatgaca

SEQ ID NO: 1277974 - DNA, 25 bp, Homo sapien
tctctcctgccatcgcagttaattc

SEQ ID NO: 1277975 - DNA, 25 bp, Homo sapien
tatgcccgactgtaactctctcctg

SEQ ID NO: 1277976 - DNA, 25 bp, Homo sapien
cccatatgcccgactgtaactctct

SEQ ID NO: 1277977 - DNA, 25 bp, Homo sapien
catcgcagttaattcagcatccagc

SEQ ID NO: 1277978 - DNA, 25 bp, Homo sapien
gagatctgggtgcatgtaggttttt

SEQ ID NO: 1277979 - DNA, 25 bp, Homo sapien
gatctgggtgcatgtaggtttttac

SEQ ID NO: 1277980 - DNA, 25 bp, Homo sapien
agagatctgggtgcatgtaggtttt

SEQ ID NO: 1277981 - DNA, 25 bp, Homo sapien
tgagagatctgggtgcatgtaggtt

SEQ ID NO: 1277982 - DNA, 25 bp, Homo sapien
ccagcacagctctataaaatgcccc

SEQ ID NO: 1277983 - DNA, 25 bp, Homo sapien
gatcatacaggtgtattcttccatg

SEQ ID NO: 1277984 - DNA, 25 bp, Homo sapien
atgggtgtcccgagggatcatacag

SEQ ID NO: 1277985 - DNA, 25 bp, Homo sapien
aaatgccccatcatgggtgtcccga

SEQ ID NO: 1277986 - DNA, 25 bp, Homo sapien
tgcagcagccatccgggccatcttg

SEQ ID NO: 1277987 - DNA, 25 bp, Homo sapien
tctcatcattaaccagggtccactt

SEQ ID NO: 1277988 - DNA, 25 bp, Homo sapien
ccgggccatcttggcttgggtctca

SEQ ID NO: 1277989 - DNA, 25 bp, Homo sapien
ggcttgggtctcatcattaaccagg

SEQ ID NO: 1277990 - DNA, 25 bp, Homo sapien
cagtttctcataccaggtagcctgg

SEQ ID NO: 1277991 - DNA, 25 bp, Homo sapien
ccaaggcctcgaggcagcgcatgcg

SEQ ID NO: 1277992 - DNA, 25 bp, Homo sapien
tcctcccactcgtgcagtttctcat

SEQ ID NO: 1277993 - DNA, 25 bp, Homo sapien
catcagctctgggtcgtccttgttg

SEQ ID NO: 1277994 - DNA, 25 bp, Homo sapien
tggcatattctaacactccggccgc

SEQ ID NO: 1277995 - DNA, 25 bp, Homo sapien
tcatggcatattctaacactccggc

SEQ ID NO: 1277996 - DNA, 25 bp, Homo sapien
gcatattctaacactccggccgctg

SEQ ID NO: 1277997 - DNA, 25 bp, Homo sapien
cgctgcctccggctgctgtagctta

SEQ ID NO: 1277998 - DNA, 25 bp, Homo sapien
aagccgtcctttgaattatgtccct

SEQ ID NO: 1277999 - DNA, 25 bp, Homo sapien
tacaaagccgtcctttgaattatgt

SEQ ID NO: 1278000 - DNA, 25 bp, Homo sapien
ctgggtgatacaaagccgtcctttg

SEQ ID NO: 1278001 - DNA, 25 bp, Homo sapien
attatgtcccttttctaatgagatg

SEQ ID NO: 1278002 - DNA, 25 bp, Homo sapien
caacagaagaggagtacgtaacacc

SEQ ID NO: 1278003 - DNA, 25 bp, Homo sapien
caacgtgcctataacagtgtgcaga

SEQ ID NO: 1278004 - DNA, 25 bp, Homo sapien
tatccgcataatagaatccagagcc

SEQ ID NO: 1278005 - DNA, 25 bp, Homo sapien
ttaggaagacaacgaagacaggcgg

SEQ ID NO: 1278006 - DNA, 25 bp, Homo sapien
gtggttcagctgtgcagacacttcc

SEQ ID NO: 1278007 - DNA, 25 bp, Homo sapien
catgcgagctgagcagcgggtggtt

SEQ ID NO: 1278008 - DNA, 25 bp, Homo sapien
ccaaggcagggcaagcatgcgagct

SEQ ID NO: 1278009 - DNA, 25 bp, Homo sapien
tgaacatcttatccccactatccag

SEQ ID NO: 1278010 - DNA, 25 bp, Homo sapien
ggcatttggtgtacttggagctctt

SEQ ID NO: 1278011 - DNA, 25 bp, Homo sapien
ggggcatttggtgtacttggagctc

SEQ ID NO: 1278012 - DNA, 25 bp, Homo sapien
ctggggcatttggtgtacttggagc

SEQ ID NO: 1278013 - DNA, 25 bp, Homo sapien
agctggggcatttggtgtacttgga

SEQ ID NO: 1278014 - DNA, 25 bp, Homo sapien
tccaggcatctcctggttggatata

SEQ ID NO: 1278015 - DNA, 25 bp, Homo sapien
ctggttggatatagggcccaggtac

SEQ ID NO: 1278016 - DNA, 25 bp, Homo sapien
gcatctcctggttggatatagggcc

SEQ ID NO: 1278017 - DNA, 25 bp, Homo sapien
tctcctggttggatatagggcccag

SEQ ID NO: 1278018 - DNA, 25 bp, Homo sapien
agagagaggtgcacaaccccagaat

SEQ ID NO: 1278019 - DNA, 25 bp, Homo sapien
gagaggtgcacaaccccagaatgtc

SEQ ID NO: 1278020 - DNA, 25 bp, Homo sapien
agcacacgacttttgctggccaggt

SEQ ID NO: 1278021 - DNA, 25 bp, Homo sapien
acgacttttgctggccaggtttgca

SEQ ID NO: 1278022 - DNA, 25 bp, Homo sapien
cacctctccagctttagcttctgct

SEQ ID NO: 1278023 - DNA, 25 bp, Homo sapien
ggcacggcccccctccacctctcca

SEQ ID NO: 1278024 - DNA, 25 bp, Homo sapien
ctccagctttagcttctgctgccat

SEQ ID NO: 1278025 - DNA, 25 bp, Homo sapien
cccctccacctctccagctttagct

SEQ ID NO: 1278026 - DNA, 25 bp, Homo sapien
ggcactgcatctggcgatcagactc

SEQ ID NO: 1278027 - DNA, 25 bp, Homo sapien
ctgctcgccttggtcatgtacagca

SEQ ID NO: 1278028 - DNA, 25 bp, Homo sapien
gcatctggcgatcagactctgagca

SEQ ID NO: 1278029 - DNA, 25 bp, Homo sapien
aaattgttcggctggaactgaccca

SEQ ID NO: 1278030 - DNA, 25 bp, Homo sapien
tttggcatatgctcggcacttggca

SEQ ID NO: 1278031 - DNA, 25 bp, Homo sapien
tctggaactccagttctttgtagtg

SEQ ID NO: 1278032 - DNA, 25 bp, Homo sapien
gtgctttggcatatgctcggcactt

SEQ ID NO: 1278033 - DNA, 25 bp, Homo sapien
tctttgtagtgtagtgctttggcat

SEQ ID NO: 1278034 - DNA, 25 bp, Homo sapien
ggtgagggccaactcgatgcttctg

SEQ ID NO: 1278035 - DNA, 25 bp, Homo sapien
catcctgttgatcttcattcagttc

SEQ ID NO: 1278036 - DNA, 25 bp, Homo sapien
acttcagcgatgtcttgtgaggtga

SEQ ID NO: 1278037 - DNA, 25 bp, Homo sapien
catgaattcagccaagtttaagagg

SEQ ID NO: 1278038 - DNA, 25 bp, Homo sapien
agccagtcatctttggagaccctcc

SEQ ID NO: 1278039 - DNA, 25 bp, Homo sapien
cagtcatctttggagaccctcctgg

SEQ ID NO: 1278040 - DNA, 25 bp, Homo sapien
gccagtcatctttggagaccctcct

SEQ ID NO: 1278041 - DNA, 25 bp, Homo sapien
ccagtcatctttggagaccctcctg

SEQ ID NO: 1278042 - DNA, 25 bp, Homo sapien
tcagagtagcagttacaaaatcccc

SEQ ID NO: 1278043 - DNA, 25 bp, Homo sapien
ggtggcctcaatgattacctgggaa

SEQ ID NO: 1278044 - DNA, 25 bp, Homo sapien
cctggaagcaaactagattactgag

SEQ ID NO: 1278045 - DNA, 25 bp, Homo sapien
gaacttgatctactttctcaggtga

SEQ ID NO: 1278046 - DNA, 25 bp, Homo sapien
ctgggctggttttcggttgcccagt

SEQ ID NO: 1278047 - DNA, 25 bp, Homo sapien
tcatgggtcctgtttccactggtcc

SEQ ID NO: 1278048 - DNA, 25 bp, Homo sapien
ttggccactcctaagcatccgatgc

SEQ ID NO: 1278049 - DNA, 25 bp, Homo sapien
tagccaatgcatccccttggccact

SEQ ID NO: 1278050 - DNA, 25 bp, Homo sapien
gatgctggtaaatcaaaggatcctc

SEQ ID NO: 1278051 - DNA, 25 bp, Homo sapien
tcatagcgctgatgattgattcggt

SEQ ID NO: 1278052 - DNA, 25 bp, Homo sapien
tgatgattgattcggtgtcgcacca

SEQ ID NO: 1278053 - DNA, 25 bp, Homo sapien
tgtcgcaccagaactttattcacca

SEQ ID NO: 1278054 - DNA, 25 bp, Homo sapien
ctgcagatgagcacatcatagcgct

SEQ ID NO: 1278055 - DNA, 25 bp, Homo sapien
aaaaacaagtgaagacagcgtgtcc

SEQ ID NO: 1278056 - DNA, 25 bp, Homo sapien
tccgggaggcatagtcagtgaaatc

SEQ ID NO: 1278057 - DNA, 25 bp, Homo sapien
gctctggtccagtgttcgaacaata

SEQ ID NO: 1278058 - DNA, 25 bp, Homo sapien
aacaatagggtgaatgatccgggag

SEQ ID NO: 1278059 - DNA, 25 bp, Homo sapien
gcttcaggggcatcaaacaacttaa

SEQ ID NO: 1278060 - DNA, 25 bp, Homo sapien
aataggaggcagcagtaaatgcagg

SEQ ID NO: 1278061 - DNA, 25 bp, Homo sapien
tttcgagatggcagtggagcttcag

SEQ ID NO: 1278062 - DNA, 25 bp, Homo sapien
tgcaggtagtcatccaggttggcgc

SEQ ID NO: 1278063 - DNA, 25 bp, Homo sapien
gaatgatcgtgctctgaattgaggt

SEQ ID NO: 1278064 - DNA, 25 bp, Homo sapien
catgaagacacgcagcatgtgtggg

SEQ ID NO: 1278065 - DNA, 25 bp, Homo sapien
gaattgaggtgttcatgacccagaa

SEQ ID NO: 1278066 - DNA, 25 bp, Homo sapien
tgatagagacaatgcggcctgggct

SEQ ID NO: 1278067 - DNA, 25 bp, Homo sapien
aactgtagtgagcatggtctgcgcc

SEQ ID NO: 1278068 - DNA, 25 bp, Homo sapien
agatgcaccaggctacctcagtcct

SEQ ID NO: 1278069 - DNA, 25 bp, Homo sapien
tatgttgcagctacactggacaaac

SEQ ID NO: 1278070 - DNA, 25 bp, Homo sapien
gcccttcttgtgtcctatgttgcag

SEQ ID NO: 1278071 - DNA, 25 bp, Homo sapien
tatttcatccatataaggtctgatg

SEQ ID NO: 1278072 - DNA, 25 bp, Homo sapien
tataaggtctgatgtggctcttcac

SEQ ID NO: 1278073 - DNA, 25 bp, Homo sapien
aaggacaccaacattcccagctgct

SEQ ID NO: 1278074 - DNA, 25 bp, Homo sapien
tctcatgagggtgactatttcatcc

SEQ ID NO: 1278075 - DNA, 25 bp, Homo sapien
cagactcgaatgacgttaaggaacg

SEQ ID NO: 1278076 - DNA, 25 bp, Homo sapien
gagtgactggtctcggaagatccgc

SEQ ID NO: 1278077 - DNA, 25 bp, Homo sapien
ggaactgcacacatttgagtcccag

SEQ ID NO: 1278078 - DNA, 25 bp, Homo sapien
tgggtagaactcatccagaggcaag

SEQ ID NO: 1278079 - DNA, 25 bp, Homo sapien
cctaaaagccctaacacacggatgg

SEQ ID NO: 1278080 - DNA, 25 bp, Homo sapien
acagcagaggcatcccgggactggt

SEQ ID NO: 1278081 - DNA, 25 bp, Homo sapien
tcactttgtgcttgtaaggatccaa

SEQ ID NO: 1278082 - DNA, 25 bp, Homo sapien
acttggattctgacaggctgacagc

SEQ ID NO: 1278083 - DNA, 25 bp, Homo sapien
ctctactacatagccagtgctggcc

SEQ ID NO: 1278084 - DNA, 25 bp, Homo sapien
tcctgtagggctctactacatagcc

SEQ ID NO: 1278085 - DNA, 25 bp, Homo sapien
gaaaattcagtagcacctcaagcaa

SEQ ID NO: 1278086 - DNA, 25 bp, Homo sapien
tcaagcaaagtagggtacttcctgt

SEQ ID NO: 1278087 - DNA, 25 bp, Homo sapien
gagcatgtccatgatgataataaaa

SEQ ID NO: 1278088 - DNA, 25 bp, Homo sapien
ctggagcatgtccatgatgataata

SEQ ID NO: 1278089 - DNA, 25 bp, Homo sapien
tggagcatgtccatgatgataataa

SEQ ID NO: 1278090 - DNA, 25 bp, Homo sapien
ggagcatgtccatgatgataataaa

SEQ ID NO: 1278091 - DNA, 25 bp, Homo sapien
ctgtgccaattctcctattgttgcc

SEQ ID NO: 1278092 - DNA, 25 bp, Homo sapien
gtgccaattctcctattgttgccag

SEQ ID NO: 1278093 - DNA, 25 bp, Homo sapien
caattctcctattgttgccaggaca

SEQ ID NO: 1278094 - DNA, 25 bp, Homo sapien
gccaattctcctattgttgccagga

SEQ ID NO: 1278095 - DNA, 25 bp, Homo sapien
attggagaccaggtgccccagcatg

SEQ ID NO: 1278096 - DNA, 25 bp, Homo sapien
ccagcatgcgggcactctgctcttt

SEQ ID NO: 1278097 - DNA, 25 bp, Homo sapien
cttcagaataggctccatgtagggg

SEQ ID NO: 1278098 - DNA, 25 bp, Homo sapien
catgcgggcactctgctctttgatt

SEQ ID NO: 1278099 - DNA, 25 bp, Homo sapien
ggttcatgctactgagtcggcccac

SEQ ID NO: 1278100 - DNA, 25 bp, Homo sapien
gccaggtgtgcatcaaagcgctcgt

SEQ ID NO: 1278101 - DNA, 25 bp, Homo sapien
gatgagcatcttgcgcaggaaaggc

SEQ ID NO: 1278102 - DNA, 25 bp, Homo sapien
cagggacgccaagacacagtagcga

SEQ ID NO: 1278103 - DNA, 25 bp, Homo sapien
gcacagtggcgaacaaattgggtca

SEQ ID NO: 1278104 - DNA, 25 bp, Homo sapien
tctggctaaccacatgagcatggcc

SEQ ID NO: 1278105 - DNA, 25 bp, Homo sapien
tgttatcccaactacgagcagtttg

SEQ ID NO: 1278106 - DNA, 25 bp, Homo sapien
ggcagcctccatgcggatctccttg

SEQ ID NO: 1278107 - DNA, 25 bp, Homo sapien
ggacagcattttcagtagcccatct

SEQ ID NO: 1278108 - DNA, 25 bp, Homo sapien
caaagctgccaagcgttcggagggc

SEQ ID NO: 1278109 - DNA, 25 bp, Homo sapien
tagctgtggaatctgacggctcagg

SEQ ID NO: 1278110 - DNA, 25 bp, Homo sapien
caagagtgatgctgcccacatcgct

SEQ ID NO: 1278111 - DNA, 25 bp, Homo sapien
tgaagactgtggcatccacctgcat

SEQ ID NO: 1278112 - DNA, 25 bp, Homo sapien
gcagctccttgatatcctgctggat

SEQ ID NO: 1278113 - DNA, 25 bp, Homo sapien
cccattgctcgagccagcatgctga

SEQ ID NO: 1278114 - DNA, 25 bp, Homo sapien
tggatgcctggccccattgctcgag

SEQ ID NO: 1278115 - DNA, 25 bp, Homo sapien
tccagcacgcgaggcaaatagacct

SEQ ID NO: 1278116 - DNA, 25 bp, Homo sapien
gccacagaaagtagccccagggctt

SEQ ID NO: 1278117 - DNA, 25 bp, Homo sapien
tagaccttaaactcagacctcacag

SEQ ID NO: 1278118 - DNA, 25 bp, Homo sapien
agggccgctcggatgatgtccagca

SEQ ID NO: 1278119 - DNA, 25 bp, Homo sapien
ctgagatgggtaatgatgtcttcca

SEQ ID NO: 1278120 - DNA, 25 bp, Homo sapien
gagatgggtaatgatgtcttccatg

SEQ ID NO: 1278121 - DNA, 25 bp, Homo sapien
tgagatgggtaatgatgtcttccat

SEQ ID NO: 1278122 - DNA, 25 bp, Homo sapien
ggatcagcgagttcttgctattcct

SEQ ID NO: 1278123 - DNA, 25 bp, Homo sapien
gaatgcagccaagcggggcaacaaa

SEQ ID NO: 1278124 - DNA, 25 bp, Homo sapien
caacaaattaaggattgtcatttgg

SEQ ID NO: 1278125 - DNA, 25 bp, Homo sapien
gaaggcagaaggtcggaatgcagcc

SEQ ID NO: 1278126 - DNA, 25 bp, Homo sapien
acttgtcgtgtaccagctgctgctg

SEQ ID NO: 1278127 - DNA, 25 bp, Homo sapien
caaatcccatgaggccttggtgaga

SEQ ID NO: 1278128 - DNA, 25 bp, Homo sapien
tccaccagggtggacttagctggac

SEQ ID NO: 1278129 - DNA, 25 bp, Homo sapien
tgacgaggttttgttccgaagccca

SEQ ID NO: 1278130 - DNA, 25 bp, Homo sapien
tgacccactgcgataccaaaatctg

SEQ ID NO: 1278131 - DNA, 25 bp, Homo sapien
tcaagtccctccgataaagtagcat

SEQ ID NO: 1278132 - DNA, 25 bp, Homo sapien
ctctatgagctaggtgatactgtcc

SEQ ID NO: 1278133 - DNA, 25 bp, Homo sapien
gaaatctgacaaccactctatgagc

SEQ ID NO: 1278134 - DNA, 25 bp, Homo sapien
tggatccgatcatcccgattcatgc

SEQ ID NO: 1278135 - DNA, 25 bp, Homo sapien
gctcgttaaggatcaacaaggctcc

SEQ ID NO: 1278136 - DNA, 25 bp, Homo sapien
tttggccaaggtctcatcaaatccc

SEQ ID NO: 1278137 - DNA, 25 bp, Homo sapien
cctccatgctgctgattcggaccag

SEQ ID NO: 1278138 - DNA, 25 bp, Homo sapien
aatgtatagaataatggtatggcta

SEQ ID NO: 1278139 - DNA, 25 bp, Homo sapien
agaataatggtatggctatcaatag

SEQ ID NO: 1278140 - DNA, 25 bp, Homo sapien
gtaactattgattcatactgagcat

SEQ ID NO: 1278141 - DNA, 25 bp, Homo sapien
ggcatatttgcattcttagtcatac

SEQ ID NO: 1278142 - DNA, 25 bp, Homo sapien
ttgagagcaaaccaaaacgtgattc

SEQ ID NO: 1278143 - DNA, 25 bp, Homo sapien
tgctccatggcaagggcttgtggct

SEQ ID NO: 1278144 - DNA, 25 bp, Homo sapien
ggctgccctttaggccaggtgattc

SEQ ID NO: 1278145 - DNA, 25 bp, Homo sapien
caggtgattctctacgcagatgtgc

SEQ ID NO: 1278146 - DNA, 25 bp, Homo sapien
tctccttcggctcacgctgggttgt

SEQ ID NO: 1278147 - DNA, 25 bp, Homo sapien
caaagaagggttgcacttgctggaa

SEQ ID NO: 1278148 - DNA, 25 bp, Homo sapien
tgagaatcagacaggcacgaagggc

SEQ ID NO: 1278149 - DNA, 25 bp, Homo sapien
gtcccacacggccacaaaaatgttg

SEQ ID NO: 1278150 - DNA, 25 bp, Homo sapien
gcggtaaaagtgtcccctgccatgg

SEQ ID NO: 1278151 - DNA, 25 bp, Homo sapien
tgtctccggccctcattgcggtcag

SEQ ID NO: 1278152 - DNA, 25 bp, Homo sapien
tcaaattccacgtactcagcggtaa

SEQ ID NO: 1278153 - DNA, 25 bp, Homo sapien
ggaggttccgaagatagttggcaaa

SEQ ID NO: 1278154 - DNA, 25 bp, Homo sapien
ggccaggaaagtacgcagacttcaa

SEQ ID NO: 1278155 - DNA, 25 bp, Homo sapien
aagagaggaaggcaaaaggtgatga

SEQ ID NO: 1278156 - DNA, 25 bp, Homo sapien
cgtatgctggccaggaaagtacgca

SEQ ID NO: 1278157 - DNA, 25 bp, Homo sapien
gtacgcagacttcaactaaaagctg

SEQ ID NO: 1278158 - DNA, 25 bp, Homo sapien
agatatttaatacttgtgccagaaa

SEQ ID NO: 1278159 - DNA, 25 bp, Homo sapien
gatgaccagtccttagaagttaaaa

SEQ ID NO: 1278160 - DNA, 25 bp, Homo sapien
tactttgagtacatttctagatggc

SEQ ID NO: 1278161 - DNA, 25 bp, Homo sapien
gaaaacaactgggactggataataa

SEQ ID NO: 1278162 - DNA, 25 bp, Homo sapien
actagtatccagtaagtggcagaca

SEQ ID NO: 1278163 - DNA, 25 bp, Homo sapien
gaaaagtcactcgatggttccgaga

SEQ ID NO: 1278164 - DNA, 25 bp, Homo sapien
cagctctggtaaactgtctgaaaag

SEQ ID NO: 1278165 - DNA, 25 bp, Homo sapien
tatgcgaaaccctgctctactgagg

SEQ ID NO: 1278166 - DNA, 25 bp, Homo sapien
tttcctctcattggcatctgagctg

SEQ ID NO: 1278167 - DNA, 25 bp, Homo sapien
agcgagtagactcctcttgactcat

SEQ ID NO: 1278168 - DNA, 25 bp, Homo sapien
tgtgatggttcagttggtcatagaa

SEQ ID NO: 1278169 - DNA, 25 bp, Homo sapien
gttggtcatagaagcgagtagactc

SEQ ID NO: 1278170 - DNA, 25 bp, Homo sapien
cactgtagagtacctgaacttgcaa

SEQ ID NO: 1278171 - DNA, 25 bp, Homo sapien
gaaacagctaagtctattctggccc

SEQ ID NO: 1278172 - DNA, 25 bp, Homo sapien
aaaccagtgatggtacatttagccc

SEQ ID NO: 1278173 - DNA, 25 bp, Homo sapien
ggcaggaggtatagttcaaaccaaa

SEQ ID NO: 1278174 - DNA, 25 bp, Homo sapien
tctttaggccactggcaaactgctg

SEQ ID NO: 1278175 - DNA, 25 bp, Homo sapien
tgctgcaggacgctcacattgctag

SEQ ID NO: 1278176 - DNA, 25 bp, Homo sapien
gctccttggcggctttggccctggt

SEQ ID NO: 1278177 - DNA, 25 bp, Homo sapien
ccatggtgacatagtgctggagctc

SEQ ID NO: 1278178 - DNA, 25 bp, Homo sapien
taaacttaggatatctgaagtcaaa

SEQ ID NO: 1278179 - DNA, 25 bp, Homo sapien
tatcctaatggtgttgatagggctt

SEQ ID NO: 1278180 - DNA, 25 bp, Homo sapien
agaaccagtgtatctttatatgatc

SEQ ID NO: 1278181 - DNA, 25 bp, Homo sapien
catctgctccagactgaattcaatt

SEQ ID NO: 1278182 - DNA, 25 bp, Homo sapien
cgccgccagcaccggtaccgccgct

SEQ ID NO: 1278183 - DNA, 25 bp, Homo sapien
ccgccagcaccggtaccgccgcttc

SEQ ID NO: 1278184 - DNA, 25 bp, Homo sapien
ccagcaccggtaccgccgcttcagg

SEQ ID NO: 1278185 - DNA, 25 bp, Homo sapien
gccagcaccggtaccgccgcttcag

SEQ ID NO: 1278186 - DNA, 25 bp, Homo sapien
cacttgtggaccgaatcttggagcc

SEQ ID NO: 1278187 - DNA, 25 bp, Homo sapien
tcggagtcttcctctacacgttggg

SEQ ID NO: 1278188 - DNA, 25 bp, Homo sapien
aacgactgtcccgagcaagataggc

SEQ ID NO: 1278189 - DNA, 25 bp, Homo sapien
tcctgtcgggagagactgtcaaagc

SEQ ID NO: 1278190 - DNA, 25 bp, Homo sapien
ctttgaagtagatgagcaggacaga

SEQ ID NO: 1278191 - DNA, 25 bp, Homo sapien
cattataactctcctgtcctcgctg

SEQ ID NO: 1278192 - DNA, 25 bp, Homo sapien
caggcataagatgaccatgaggtag

SEQ ID NO: 1278193 - DNA, 25 bp, Homo sapien
gatgttgcagtatcccaggcataag

SEQ ID NO: 1278194 - DNA, 25 bp, Homo sapien
gacagtttcgaagccaggccttcaa

SEQ ID NO: 1278195 - DNA, 25 bp, Homo sapien
tttggcatcattctggcaccagcag

SEQ ID NO: 1278196 - DNA, 25 bp, Homo sapien
gatgttcgcctacgccatccaggtg

SEQ ID NO: 1278197 - DNA, 25 bp, Homo sapien
tcaagtacgtggctctgggagacct

SEQ ID NO: 1278198 - DNA, 25 bp, Homo sapien
tctcaggtcactttgcagtgaagtg

SEQ ID NO: 1278199 - DNA, 25 bp, Homo sapien
atttccactagagggtgttctcagg

SEQ ID NO: 1278200 - DNA, 25 bp, Homo sapien
cagactttgtaaaggagctgcccag

SEQ ID NO: 1278201 - DNA, 25 bp, Homo sapien
ttgcagtgaagtggacttagttcct

SEQ ID NO: 1278202 - DNA, 25 bp, Homo sapien
cttcgtctcgtaggatgtgctatga

SEQ ID NO: 1278203 - DNA, 25 bp, Homo sapien
ggctacctgtctcttattctcagca

SEQ ID NO: 1278204 - DNA, 25 bp, Homo sapien
ttggtgccaggcctcactaacacag

SEQ ID NO: 1278205 - DNA, 25 bp, Homo sapien
gagtgttgtcctgctttcttcgtct

SEQ ID NO: 1278206 - DNA, 25 bp, Homo sapien
ttaccctgcagcaagacaagccaag

SEQ ID NO: 1278207 - DNA, 25 bp, Homo sapien
gaaaagtgtcagattaccctgcagc

SEQ ID NO: 1278208 - DNA, 25 bp, Homo sapien
gagacagagagagtccctcattaac

SEQ ID NO: 1278209 - DNA, 25 bp, Homo sapien
tttgcctaaattgtgattcagatgc

SEQ ID NO: 1278210 - DNA, 25 bp, Homo sapien
ggacccagggaatgaatagccagtg

SEQ ID NO: 1278211 - DNA, 25 bp, Homo sapien
cctgaaacggtagaggcactgccat

SEQ ID NO: 1278212 - DNA, 25 bp, Homo sapien
tagcttagcagcgagtcagggacag

SEQ ID NO: 1278213 - DNA, 25 bp, Homo sapien
ctttcagtaactatcaggagccctg

SEQ ID NO: 1278214 - DNA, 25 bp, Homo sapien
cagcatttatcctggctgcgtttca

SEQ ID NO: 1278215 - DNA, 25 bp, Homo sapien
ttagtgagatcacactcagagtggg

SEQ ID NO: 1278216 - DNA, 25 bp, Homo sapien
gctcagttgcatttgatccaggact

SEQ ID NO: 1278217 - DNA, 25 bp, Homo sapien
tctagtaggcgtttaaggtcatggc

SEQ ID NO: 1278218 - DNA, 25 bp, Homo sapien
ccttgagttcgaattgattggttta

SEQ ID NO: 1278219 - DNA, 25 bp, Homo sapien
aaccttgagttcgaattgattggtt

SEQ ID NO: 1278220 - DNA, 25 bp, Homo sapien
attgcaaaagttccgccgggcgcgg

SEQ ID NO: 1278221 - DNA, 25 bp, Homo sapien
tgagttcgaattgattggtttactt

SEQ ID NO: 1278222 - DNA, 25 bp, Homo sapien
tctccttggagtaggccattctcat

SEQ ID NO: 1278223 - DNA, 25 bp, Homo sapien
caaaggtggtttgtctagcagagag

SEQ ID NO: 1278224 - DNA, 25 bp, Homo sapien
tcacaccaggcttgtggcattttgg

SEQ ID NO: 1278225 - DNA, 25 bp, Homo sapien
gaatcttctaatagtgggcagagcc

SEQ ID NO: 1278226 - DNA, 25 bp, Homo sapien
tccacggaccacgtatgccttggtg

SEQ ID NO: 1278227 - DNA, 25 bp, Homo sapien
tgcgtccacggaccacgtatgcctt

SEQ ID NO: 1278228 - DNA, 25 bp, Homo sapien
cgtatgccttggtggtcactcccat

SEQ ID NO: 1278229 - DNA, 25 bp, Homo sapien
gaggaccaagggctccctgcgtcca

SEQ ID NO: 1278230 - DNA, 25 bp, Homo sapien
tgccctggtgcggattttaatgcat

SEQ ID NO: 1278231 - DNA, 25 bp, Homo sapien
tgttgccaggttttatacgcaggtc

SEQ ID NO: 1278232 - DNA, 25 bp, Homo sapien
gctatcagttctgcactgtgccctg

SEQ ID NO: 1278233 - DNA, 25 bp, Homo sapien
tatgttccctgagtcaatgaaggtt

SEQ ID NO: 1278234 - DNA, 25 bp, Homo sapien
caaggtgacttctcattcgaatgct

SEQ ID NO: 1278235 - DNA, 25 bp, Homo sapien
tcaaggtgacttctcattcgaatgc

SEQ ID NO: 1278236 - DNA, 25 bp, Homo sapien
acagttgagaatgcgctgaagaagt

SEQ ID NO: 1278237 - DNA, 25 bp, Homo sapien
gacagttgagaatgcgctgaagaag

SEQ ID NO: 1278238 - DNA, 25 bp, Homo sapien
cagttgagaatgcgctgaagaagtc

SEQ ID NO: 1278239 - DNA, 25 bp, Homo sapien
caggtggtcttacatgtggctgtga

SEQ ID NO: 1278240 - DNA, 25 bp, Homo sapien
gtggctgtgagtggcctgtccttca

SEQ ID NO: 1278241 - DNA, 25 bp, Homo sapien
tggagagacaggtggtcttacatgt

SEQ ID NO: 1278242 - DNA, 25 bp, Homo sapien
gtccttcagagaggctttaggaatc

SEQ ID NO: 1278243 - DNA, 25 bp, Homo sapien
gggccccagtgctgatgcacgctcc

SEQ ID NO: 1278244 - DNA, 25 bp, Homo sapien
ggggggtgatctccctgataaatga

SEQ ID NO: 1278245 - DNA, 25 bp, Homo sapien
ccagcttgttggaaaaacagatgtt

SEQ ID NO: 1278246 - DNA, 25 bp, Homo sapien
cagatccgcattgtcaccagcttgt

SEQ ID NO: 1278247 - DNA, 25 bp, Homo sapien
tttcaaaagcagagagtgccccggc

SEQ ID NO: 1278248 - DNA, 25 bp, Homo sapien
gggaggtgctaccaggcagagatgc

SEQ ID NO: 1278249 - DNA, 25 bp, Homo sapien
tattagggagctaattacctgggag

SEQ ID NO: 1278250 - DNA, 25 bp, Homo sapien
taacctcttactgcttaacattcag

SEQ ID NO: 1278251 - DNA, 25 bp, Homo sapien
tgctcggatctggtgtggcaataga

SEQ ID NO: 1278252 - DNA, 25 bp, Homo sapien
gcaatagaggtgtgctctggaccaa

SEQ ID NO: 1278253 - DNA, 25 bp, Homo sapien
ggcaatagaggtgtgctctggacca

SEQ ID NO: 1278254 - DNA, 25 bp, Homo sapien
ctatgctcggatctggtgtggcaat

SEQ ID NO: 1278255 - DNA, 25 bp, Homo sapien
ctctgggacttgggccatgggcttt

SEQ ID NO: 1278256 - DNA, 25 bp, Homo sapien
tgggacttgggccatgggcttttaa

SEQ ID NO: 1278257 - DNA, 25 bp, Homo sapien
tgggccatgggcttttaaaggcctg

SEQ ID NO: 1278258 - DNA, 25 bp, Homo sapien
gccatgggcttttaaaggcctgttc

SEQ ID NO: 1278259 - DNA, 25 bp, Homo sapien
agagactccgtagtttcctgctcgg

SEQ ID NO: 1278260 - DNA, 25 bp, Homo sapien
ttcctgctcggctgaattctcctct

SEQ ID NO: 1278261 - DNA, 25 bp, Homo sapien
catctctggttgtggggctttatct

SEQ ID NO: 1278262 - DNA, 25 bp, Homo sapien
gaaactctgcagtgcgtgtgaaaac

SEQ ID NO: 1278263 - DNA, 25 bp, Homo sapien
tctccttgttgccccgcttatagcc

SEQ ID NO: 1278264 - DNA, 25 bp, Homo sapien
ccaaagaagatgctctcagcagtga

SEQ ID NO: 1278265 - DNA, 25 bp, Homo sapien
cttgttgccccgcttatagccacat

SEQ ID NO: 1278266 - DNA, 25 bp, Homo sapien
gttgccccgcttatagccacatctt

SEQ ID NO: 1278267 - DNA, 25 bp, Homo sapien
caggctccctgacacatcagagact

SEQ ID NO: 1278268 - DNA, 25 bp, Homo sapien
cctgccagcaagtgagcgagtgagc

SEQ ID NO: 1278269 - DNA, 25 bp, Homo sapien
ctgacacatcagagacttttccatt

SEQ ID NO: 1278270 - DNA, 25 bp, Homo sapien
tgccagcaagtgagcgagtgagcca

SEQ ID NO: 1278271 - DNA, 25 bp, Homo sapien
ggagactgaaccagagccagacact

SEQ ID NO: 1278272 - DNA, 25 bp, Homo sapien
tcatcagtgatgtggcaagcaccag

SEQ ID NO: 1278273 - DNA, 25 bp, Homo sapien
agacactggcgccaacaactgggaa

SEQ ID NO: 1278274 - DNA, 25 bp, Homo sapien
caagcaccagatttggtagcaggaa

SEQ ID NO: 1278275 - DNA, 25 bp, Homo sapien
agccaggaaaatggcatcgtatttt

SEQ ID NO: 1278276 - DNA, 25 bp, Homo sapien
aagccaggaaaatggcatcgtattt

SEQ ID NO: 1278277 - DNA, 25 bp, Homo sapien
tttgcccttgtcctggggcaggcag

SEQ ID NO: 1278278 - DNA, 25 bp, Homo sapien
ggcaggcagggggcattgaggagct

SEQ ID NO: 1278279 - DNA, 25 bp, Homo sapien
tggctttgcccttgtcctggggcag

SEQ ID NO: 1278280 - DNA, 25 bp, Homo sapien
agggggcattgaggagctggcagaa

SEQ ID NO: 1278281 - DNA, 25 bp, Homo sapien
agaaggagagcggagccgctttctc

SEQ ID NO: 1278282 - DNA, 25 bp, Homo sapien
tctctcccagcgagaaaagagccca

SEQ ID NO: 1278283 - DNA, 25 bp, Homo sapien
ttctctcccagcgagaaaagagccc

SEQ ID NO: 1278284 - DNA, 25 bp, Homo sapien
acagaaggagagcggagccgctttc

SEQ ID NO: 1278285 - DNA, 25 bp, Homo sapien
tctccagtgtggcccctaagaactc

SEQ ID NO: 1278286 - DNA, 25 bp, Homo sapien
gggcttggcattagcctggaggcct

SEQ ID NO: 1278287 - DNA, 25 bp, Homo sapien
tcagggtcgggcttggcattagcct

SEQ ID NO: 1278288 - DNA, 25 bp, Homo sapien
tgtggcccctaagaactcagggtcg

SEQ ID NO: 1278289 - DNA, 25 bp, Homo sapien
gatgggctttcgtggccttgtattc

SEQ ID NO: 1278290 - DNA, 25 bp, Homo sapien
tgagaagagatcttcacccctagtc

SEQ ID NO: 1278291 - DNA, 25 bp, Homo sapien
tggcctctctcctagggcgcgctgg

SEQ ID NO: 1278292 - DNA, 25 bp, Homo sapien
cacctgaagagcctgggtcgaaagc

SEQ ID NO: 1278293 - DNA, 25 bp, Homo sapien
tctgacccggcgtgctggggtctcc

SEQ ID NO: 1278294 - DNA, 25 bp, Homo sapien
ctctgacccggcgtgctggggtctc

SEQ ID NO: 1278295 - DNA, 25 bp, Homo sapien
ggctgtctcccgttctgctccttct

SEQ ID NO: 1278296 - DNA, 25 bp, Homo sapien
gctccagcggctctcaggctgtctc

SEQ ID NO: 1278297 - DNA, 25 bp, Homo sapien
cttgggttttcgttggccaccagtg

SEQ ID NO: 1278298 - DNA, 25 bp, Homo sapien
tgggttttcgttggccaccagtgcc

SEQ ID NO: 1278299 - DNA, 25 bp, Homo sapien
ttgggttttcgttggccaccagtgc

SEQ ID NO: 1278300 - DNA, 25 bp, Homo sapien
tgtcttgggttttcgttggccacca

SEQ ID NO: 1278301 - DNA, 25 bp, Homo sapien
tcactccgaatggattctgtgcttg

SEQ ID NO: 1278302 - DNA, 25 bp, Homo sapien
tgcttgaggaatccaccaaaggcct

SEQ ID NO: 1278303 - DNA, 25 bp, Homo sapien
ggattctgtgcttgaggaatccacc

SEQ ID NO: 1278304 - DNA, 25 bp, Homo sapien
attctgtgcttgaggaatccaccaa

SEQ ID NO: 1278305 - DNA, 25 bp, Homo sapien
cctgcgctgagatttatcgtcgtgt

SEQ ID NO: 1278306 - DNA, 25 bp, Homo sapien
gaagcctgcgctgagatttatcgtc

SEQ ID NO: 1278307 - DNA, 25 bp, Homo sapien
tggtggaagcctgcgctgagattta

SEQ ID NO: 1278308 - DNA, 25 bp, Homo sapien
agatttatcgtcgtgttcctgctgc

SEQ ID NO: 1278309 - DNA, 25 bp, Homo sapien
gaaagacatactccctgccaaaaag

SEQ ID NO: 1278310 - DNA, 25 bp, Homo sapien
aaaagcagctcaatgaagaggacat

SEQ ID NO: 1278311 - DNA, 25 bp, Homo sapien
cagctcaatgaagaggacatggtga

SEQ ID NO: 1278312 - DNA, 25 bp, Homo sapien
gggcagccccattaatattccttcc

SEQ ID NO: 1278313 - DNA, 25 bp, Homo sapien
ggagggtggcagtaggtggaggttc

SEQ ID NO: 1278314 - DNA, 25 bp, Homo sapien
gggagggacatgggcatggataggg

SEQ ID NO: 1278315 - DNA, 25 bp, Homo sapien
gagggtggcagtaggtggaggttcc

SEQ ID NO: 1278316 - DNA, 25 bp, Homo sapien
agagggagggacatgggcatggata

SEQ ID NO: 1278317 - DNA, 25 bp, Homo sapien
tttctccaaaccacagacgacagcc

SEQ ID NO: 1278318 - DNA, 25 bp, Homo sapien
tctgagatgtctgccgccaacagcg

SEQ ID NO: 1278319 - DNA, 25 bp, Homo sapien
agctccaagagaaactgcctcgctt

SEQ ID NO: 1278320 - DNA, 25 bp, Homo sapien
tccaagagaaactgcctcgcttttc

SEQ ID NO: 1278321 - DNA, 25 bp, Homo sapien
tgttgcagacaacacttagctttct

SEQ ID NO: 1278322 - DNA, 25 bp, Homo sapien
tttctctcgaaggtggcaagttgcc

SEQ ID NO: 1278323 - DNA, 25 bp, Homo sapien
agacaacacttagctttctctcgaa

SEQ ID NO: 1278324 - DNA, 25 bp, Homo sapien
gcacagccttgttgcagacaacact

SEQ ID NO: 1278325 - DNA, 25 bp, Homo sapien
ggttgttttatggaaggtgtcagct

SEQ ID NO: 1278326 - DNA, 25 bp, Homo sapien
ccccacggcccgatctccacggttg

SEQ ID NO: 1278327 - DNA, 25 bp, Homo sapien
gcccgatctccacggttgttttatg

SEQ ID NO: 1278328 - DNA, 25 bp, Homo sapien
gttgttttatggaaggtgtcagctc

SEQ ID NO: 1278329 - DNA, 25 bp, Homo sapien
cagcagctcatagaggctgctcgga

SEQ ID NO: 1278330 - DNA, 25 bp, Homo sapien
agaggctgctcggagcctgttccag

SEQ ID NO: 1278331 - DNA, 25 bp, Homo sapien
cccagctccccaggggctgtcttca

SEQ ID NO: 1278332 - DNA, 25 bp, Homo sapien
ctgtcttcagcagctcatagaggct

SEQ ID NO: 1278333 - DNA, 25 bp, Homo sapien
cacgaagagtgacacaggcccattc

SEQ ID NO: 1278334 - DNA, 25 bp, Homo sapien
gtgcccacgaagagtgacacaggcc

SEQ ID NO: 1278335 - DNA, 25 bp, Homo sapien
cccacgaagagtgacacaggcccat

SEQ ID NO: 1278336 - DNA, 25 bp, Homo sapien
tcagtgcccacgaagagtgacacag

SEQ ID NO: 1278337 - DNA, 25 bp, Homo sapien
gggaccagagatctagagccaggcc

SEQ ID NO: 1278338 - DNA, 25 bp, Homo sapien
tgggaccagagatctagagccaggc

SEQ ID NO: 1278339 - DNA, 25 bp, Homo sapien
gcatctggcttcttagcagcaggta

SEQ ID NO: 1278340 - DNA, 25 bp, Homo sapien
cttccccgccactgtctcccatcgt

SEQ ID NO: 1278341 - DNA, 25 bp, Homo sapien
agaaagctgacatccgcatctggct

SEQ ID NO: 1278342 - DNA, 25 bp, Homo sapien
ccgccactgtctcccatcgtctgtc

SEQ ID NO: 1278343 - DNA, 25 bp, Homo sapien
ttgaaggcataaagcatcggagccg

SEQ ID NO: 1278344 - DNA, 25 bp, Homo sapien
tcggagccgccgataagaagctgtt

SEQ ID NO: 1278345 - DNA, 25 bp, Homo sapien
gcttgtcaaaggcagtaattgtcgg

SEQ ID NO: 1278346 - DNA, 25 bp, Homo sapien
agtaattgtcgggagaaatttgcca

SEQ ID NO: 1278347 - DNA, 25 bp, Homo sapien
gctgctcctgcccaccgcctaacac

SEQ ID NO: 1278348 - DNA, 25 bp, Homo sapien
gcccaccgcctaacacgatgatgag

SEQ ID NO: 1278349 - DNA, 25 bp, Homo sapien
cctgcccaccgcctaacacgatgat

SEQ ID NO: 1278350 - DNA, 25 bp, Homo sapien
tgctcctgcccaccgcctaacacga

SEQ ID NO: 1278351 - DNA, 25 bp, Homo sapien
gggctcggtagtcacctggccagcc

SEQ ID NO: 1278352 - DNA, 25 bp, Homo sapien
ggggctcggtagtcacctggccagc

SEQ ID NO: 1278353 - DNA, 25 bp, Homo sapien
cccagtgggtcaagcagacatccgt

SEQ ID NO: 1278354 - DNA, 25 bp, Homo sapien
agagagcgtgagagcatcccatgaa

SEQ ID NO: 1278355 - DNA, 25 bp, Homo sapien
gagcagccatgtcccagaatcaaag

SEQ ID NO: 1278356 - DNA, 25 bp, Homo sapien
gacatccgtggaaagagtggcccag

SEQ ID NO: 1278357 - DNA, 25 bp, Homo sapien
gaggcacgtagctgatgatgcccca

SEQ ID NO: 1278358 - DNA, 25 bp, Homo sapien
aaggtcggtgactggagagaagctt

SEQ ID NO: 1278359 - DNA, 25 bp, Homo sapien
tctgcagccactcaggccaaggaag

SEQ ID NO: 1278360 - DNA, 25 bp, Homo sapien
catctaaatccaggttgtattaatt

SEQ ID NO: 1278361 - DNA, 25 bp, Homo sapien
tgcagccactcaggccaaggaaggt

SEQ ID NO: 1278362 - DNA, 25 bp, Homo sapien
aggagggaagaatcaccctgatcct

SEQ ID NO: 1278363 - DNA, 25 bp, Homo sapien
tgcaggagggaagaatcaccctgat

SEQ ID NO: 1278364 - DNA, 25 bp, Homo sapien
caggagggaagaatcaccctgatcc

SEQ ID NO: 1278365 - DNA, 25 bp, Homo sapien
ttgtgcaggagggaagaatcaccct

SEQ ID NO: 1278366 - DNA, 25 bp, Homo sapien
gagagctacggtgtctctggtcttc

SEQ ID NO: 1278367 - DNA, 25 bp, Homo sapien
gggtgagctacctctgcatttcagg

SEQ ID NO: 1278368 - DNA, 25 bp, Homo sapien
catggcgctgctgtttccgggtctc

SEQ ID NO: 1278369 - DNA, 25 bp, Homo sapien
aaagggcatagttacatcacggaga

SEQ ID NO: 1278370 - DNA, 25 bp, Homo sapien
ccctcccttgtagggtgtggactgg

SEQ ID NO: 1278371 - DNA, 25 bp, Homo sapien
ctccccactgttgagggtgtaacaa

SEQ ID NO: 1278372 - DNA, 25 bp, Homo sapien
actcagtgcccaacggagctgcatg

SEQ ID NO: 1278373 - DNA, 25 bp, Homo sapien
ggctgagcagtgatggagcctcccc

SEQ ID NO: 1278374 - DNA, 25 bp, Homo sapien
gaaataaagtccacagctgccttgc

SEQ ID NO: 1278375 - DNA, 25 bp, Homo sapien
tggaaattggccagcgagaggaggg

SEQ ID NO: 1278376 - DNA, 25 bp, Homo sapien
ggaggggcatagagtcttgggcaaa

SEQ ID NO: 1278377 - DNA, 25 bp, Homo sapien
aataaagtccacagctgccttgcag

SEQ ID NO: 1278378 - DNA, 25 bp, Homo sapien
ggctggtgtcatggatgggccagaa

SEQ ID NO: 1278379 - DNA, 25 bp, Homo sapien
ggcctggcaaatctctgaagcaccc

SEQ ID NO: 1278380 - DNA, 25 bp, Homo sapien
tggctggtgtcatggatgggccaga

SEQ ID NO: 1278381 - DNA, 25 bp, Homo sapien
tggcaaatctctgaagcacccagaa

SEQ ID NO: 1278382 - DNA, 25 bp, Homo sapien
cagcacgtgtacagttcatacagac

SEQ ID NO: 1278383 - DNA, 25 bp, Homo sapien
gactgcgtctttcctggatgcccca

SEQ ID NO: 1278384 - DNA, 25 bp, Homo sapien
tggctgaatgcacagcacgtgtaca

SEQ ID NO: 1278385 - DNA, 25 bp, Homo sapien
tcatacagactgaacgggccctcct

SEQ ID NO: 1278386 - DNA, 25 bp, Homo sapien
ggtgagcacagcgaatgaagaccat

SEQ ID NO: 1278387 - DNA, 25 bp, Homo sapien
gtgaacacagtcacagtcccggcgc

SEQ ID NO: 1278388 - DNA, 25 bp, Homo sapien
gaactggacccgatgtgtgaacaca

SEQ ID NO: 1278389 - DNA, 25 bp, Homo sapien
tgaagaccatgtaggcacgcggaga

SEQ ID NO: 1278390 - DNA, 25 bp, Homo sapien
acagtctctgcaagtagtggctgca

SEQ ID NO: 1278391 - DNA, 25 bp, Homo sapien
cagtctctgcaagtagtggctgcag

SEQ ID NO: 1278392 - DNA, 25 bp, Homo sapien
gtcagcatggctagtttcagatggg

SEQ ID NO: 1278393 - DNA, 25 bp, Homo sapien
actggggggctttgtctagtggctt

SEQ ID NO: 1278394 - DNA, 25 bp, Homo sapien
gctgggattctgtgctgagtcacga

SEQ ID NO: 1278395 - DNA, 25 bp, Homo sapien
cgaagagcccgtacacaggtaggtg

SEQ ID NO: 1278396 - DNA, 25 bp, Homo sapien
tgggcaacttgtgccgggaaaccaa

SEQ ID NO: 1278397 - DNA, 25 bp, Homo sapien
tacacaggtaggtgcaccaggaacc

SEQ ID NO: 1278398 - DNA, 25 bp, Homo sapien
tactgcctccgagtactcaactcgg

SEQ ID NO: 1278399 - DNA, 25 bp, Homo sapien
catcatactgcctccgagtactcaa

SEQ ID NO: 1278400 - DNA, 25 bp, Homo sapien
cgagtactcaactcggtggctgagt

SEQ ID NO: 1278401 - DNA, 25 bp, Homo sapien
cctgaacatcatactgcctccgagt

SEQ ID NO: 1278402 - DNA, 25 bp, Homo sapien
cagctgccagcagccactgtccatg

SEQ ID NO: 1278403 - DNA, 25 bp, Homo sapien
ccttcgccctcatctccaccccagc

SEQ ID NO: 1278404 - DNA, 25 bp, Homo sapien
ctgccagcagccactgtccatggtt

SEQ ID NO: 1278405 - DNA, 25 bp, Homo sapien
cccttcgccctcatctccaccccag

SEQ ID NO: 1278406 - DNA, 25 bp, Homo sapien
gaggcttcagggaagtaccctgtgg

SEQ ID NO: 1278407 - DNA, 25 bp, Homo sapien
ccaggcccctgtagtaaacacgctt

SEQ ID NO: 1278408 - DNA, 25 bp, Homo sapien
ggcttcagggaagtaccctgtggct

SEQ ID NO: 1278409 - DNA, 25 bp, Homo sapien
caggcccctgtagtaaacacgcttc

SEQ ID NO: 1278410 - DNA, 25 bp, Homo sapien
tgcaagcaggcgcgggcaggggaag

SEQ ID NO: 1278411 - DNA, 25 bp, Homo sapien
tgaaccccaggaggaggattctcat

SEQ ID NO: 1278412 - DNA, 25 bp, Homo sapien
gatgaaccccaggaggaggattctc

SEQ ID NO: 1278413 - DNA, 25 bp, Homo sapien
gggatgaaccccaggaggaggattc

SEQ ID NO: 1278414 - DNA, 25 bp, Homo sapien
cctgggcaacaccaatgccaatgct

SEQ ID NO: 1278415 - DNA, 25 bp, Homo sapien
tcactctccctgggcaacaccaatg

SEQ ID NO: 1278416 - DNA, 25 bp, Homo sapien
ctccctgggcaacaccaatgccaat

SEQ ID NO: 1278417 - DNA, 25 bp, Homo sapien
caacaccaatgccaatgctctctga

SEQ ID NO: 1278418 - DNA, 25 bp, Homo sapien
tcaggggtggacagaacccaagctt

SEQ ID NO: 1278419 - DNA, 25 bp, Homo sapien
aacggcaaggcttccgacctctggc

SEQ ID NO: 1278420 - DNA, 25 bp, Homo sapien
gactgcagcattcttggtcggccaa

SEQ ID NO: 1278421 - DNA, 25 bp, Homo sapien
tgcttggcgccgcgcgcgaagttct

SEQ ID NO: 1278422 - DNA, 25 bp, Homo sapien
aagccgcccttggatcgggctctcg

SEQ ID NO: 1278423 - DNA, 25 bp, Homo sapien
tgagcgtcagtctgaagccgccctt

SEQ ID NO: 1278424 - DNA, 25 bp, Homo sapien
tccataaaagttgagcgtcagtctg

SEQ ID NO: 1278425 - DNA, 25 bp, Homo sapien
tctgaagccgcccttggatcgggct

SEQ ID NO: 1278426 - DNA, 25 bp, Homo sapien
gcgtactcgtgctctcggagggaca

SEQ ID NO: 1278427 - DNA, 25 bp, Homo sapien
ctagcgtactcgtgctctcggaggg

SEQ ID NO: 1278428 - DNA, 25 bp, Homo sapien
tcgtgctctcggagggacatttccc

SEQ ID NO: 1278429 - DNA, 25 bp, Homo sapien
tctcggagggacatttccccgatta

SEQ ID NO: 1278430 - DNA, 25 bp, Homo sapien
gcgggccgggccagcgatggatccg

SEQ ID NO: 1278431 - DNA, 25 bp, Homo sapien
ccagcgatggatccgcgcgcgcgag

SEQ ID NO: 1278432 - DNA, 25 bp, Homo sapien
ggccgggccagcgatggatccgcgc

SEQ ID NO: 1278433 - DNA, 25 bp, Homo sapien
gatggatccgcgcgcgcgagggtcc

SEQ ID NO: 1278434 - DNA, 25 bp, Homo sapien
caagcatggtgtcttgccaaaggag

SEQ ID NO: 1278435 - DNA, 25 bp, Homo sapien
tagattccaaagcatcgaagcccag

SEQ ID NO: 1278436 - DNA, 25 bp, Homo sapien
catttcacgggcagacagtgcggct

SEQ ID NO: 1278437 - DNA, 25 bp, Homo sapien
tgtcaaagtctgtcaaaacaccctt

SEQ ID NO: 1278438 - DNA, 25 bp, Homo sapien
ctcggggcatccagcacatacactg

SEQ ID NO: 1278439 - DNA, 25 bp, Homo sapien
cccagccatctgctcggggcatcca

SEQ ID NO: 1278440 - DNA, 25 bp, Homo sapien
gctcggggcatccagcacatacact

SEQ ID NO: 1278441 - DNA, 25 bp, Homo sapien
tggaagccactcctgtcgtgaagga

SEQ ID NO: 1278442 - DNA, 25 bp, Homo sapien
gtcctttgccaagccttgttaatag

SEQ ID NO: 1278443 - DNA, 25 bp, Homo sapien
tgttaatagaggagacgtgactgcc

SEQ ID NO: 1278444 - DNA, 25 bp, Homo sapien
agctggaagccactcctgtcgtgaa

SEQ ID NO: 1278445 - DNA, 25 bp, Homo sapien
cttatgagtccttcagtaatctggg

SEQ ID NO: 1278446 - DNA, 25 bp, Homo sapien
ctgatggatagggtgatgtgggctg

SEQ ID NO: 1278447 - DNA, 25 bp, Homo sapien
ccttcagtaatctgggtaattgtgc

SEQ ID NO: 1278448 - DNA, 25 bp, Homo sapien
taattgtgcatagggactcgggctc

SEQ ID NO: 1278449 - DNA, 25 bp, Homo sapien
catttgcttctcgactgctaagcca

SEQ ID NO: 1278450 - DNA, 25 bp, Homo sapien
agtggcaggacgttgctggctttca

SEQ ID NO: 1278451 - DNA, 25 bp, Homo sapien
gccaccgaacagatcactttttgaa

SEQ ID NO: 1278452 - DNA, 25 bp, Homo sapien
actttttgaatgtccagatgtgggc

SEQ ID NO: 1278453 - DNA, 25 bp, Homo sapien
gtagacacagctgagacttgcaccc

SEQ ID NO: 1278454 - DNA, 25 bp, Homo sapien
agacacagctgagacttgcacccct

SEQ ID NO: 1278455 - DNA, 25 bp, Homo sapien
tagacacagctgagacttgcacccc

SEQ ID NO: 1278456 - DNA, 25 bp, Homo sapien
tcttgggagttaatgaacatgcgaa

SEQ ID NO: 1278457 - DNA, 25 bp, Homo sapien
gccaactggcgttcttgggagttaa

SEQ ID NO: 1278458 - DNA, 25 bp, Homo sapien
cagggacatgtcagccaactggcgt

SEQ ID NO: 1278459 - DNA, 25 bp, Homo sapien
agccaggaatctgcaatgaacaggg

SEQ ID NO: 1278460 - DNA, 25 bp, Homo sapien
cccaggaggccagtcatccttcatc

SEQ ID NO: 1278461 - DNA, 25 bp, Homo sapien
ccaggaggccagtcatccttcatcc

SEQ ID NO: 1278462 - DNA, 25 bp, Homo sapien
tagcatctaactggataatgagtct

SEQ ID NO: 1278463 - DNA, 25 bp, Homo sapien
catctaactggataatgagtctctc

SEQ ID NO: 1278464 - DNA, 25 bp, Homo sapien
cgcctagcatctaactggataatga

SEQ ID NO: 1278465 - DNA, 25 bp, Homo sapien
ctaactggataatgagtctctctct

SEQ ID NO: 1278466 - DNA, 25 bp, Homo sapien
aagaccaatgccacatttgagagag

SEQ ID NO: 1278467 - DNA, 25 bp, Homo sapien
agtcacgtggtttaagtggagaagc

SEQ ID NO: 1278468 - DNA, 25 bp, Homo sapien
gattgtcactggaagctagtcacgt

SEQ ID NO: 1278469 - DNA, 25 bp, Homo sapien
ctgcaggaactaagtctggcccagt

SEQ ID NO: 1278470 - DNA, 25 bp, Homo sapien
cctggtaattggctctgtccccgca

SEQ ID NO: 1278471 - DNA, 25 bp, Homo sapien
gtgcccaagtctgggttcgtcgtcc

SEQ ID NO: 1278472 - DNA, 25 bp, Homo sapien
tatgaacacacagcgctgtacttcc

SEQ ID NO: 1278473 - DNA, 25 bp, Homo sapien
gccctgtgttgttcatgacctggta

SEQ ID NO: 1278474 - DNA, 25 bp, Homo sapien
tcatatctgaagctgcccagtccac

SEQ ID NO: 1278475 - DNA, 25 bp, Homo sapien
tggtatcgagagtccctgcatgccg

SEQ ID NO: 1278476 - DNA, 25 bp, Homo sapien
cagtgccgcctcatatctgaagctg

SEQ ID NO: 1278477 - DNA, 25 bp, Homo sapien
tgcatgccgcaagggccgacccagt

SEQ ID NO: 1278478 - DNA, 25 bp, Homo sapien
gtttattccataattgaagccgtaa

SEQ ID NO: 1278479 - DNA, 25 bp, Homo sapien
gaagccgtaattgaacctgaggtca

SEQ ID NO: 1278480 - DNA, 25 bp, Homo sapien
cagtgtttttaataagaggtaggtg

SEQ ID NO: 1278481 - DNA, 25 bp, Homo sapien
agcccccagtgcagtgtttttaata

SEQ ID NO: 1278482 - DNA, 25 bp, Homo sapien
cctctacaagggctacgagaacctt

SEQ ID NO: 1278483 - DNA, 25 bp, Homo sapien
gggctacgagaacctttagctccat

SEQ ID NO: 1278484 - DNA, 25 bp, Homo sapien
ctgctgcctctacaagggctacgag

SEQ ID NO: 1278485 - DNA, 25 bp, Homo sapien
tacaagggctacgagaacctttagc

SEQ ID NO: 1278486 - DNA, 25 bp, Homo sapien
caaaggacccacacttcaaggaatg

SEQ ID NO: 1278487 - DNA, 25 bp, Homo sapien
ccagcacatgggtagaagaacagaa

SEQ ID NO: 1278488 - DNA, 25 bp, Homo sapien
ttccaatccaggtgcttcccaaagg

SEQ ID NO: 1278489 - DNA, 25 bp, Homo sapien
tctcatagttagagttgtcagccca

SEQ ID NO: 1278490 - DNA, 25 bp, Homo sapien
tgggcgtcacgatagcaacagcaca

SEQ ID NO: 1278491 - DNA, 25 bp, Homo sapien
ttctgggcgtcacgatagcaacagc

SEQ ID NO: 1278492 - DNA, 25 bp, Homo sapien
agcacactgacacggcacactggtg

SEQ ID NO: 1278493 - DNA, 25 bp, Homo sapien
gcagattgtgcagacatttctagaa

SEQ ID NO: 1278494 - DNA, 25 bp, Homo sapien
gtgccttggggatctgcaccagata

SEQ ID NO: 1278495 - DNA, 25 bp, Homo sapien
tgccttggggatctgcaccagatat

SEQ ID NO: 1278496 - DNA, 25 bp, Homo sapien
aggtgccttggggatctgcaccaga

SEQ ID NO: 1278497 - DNA, 25 bp, Homo sapien
ccttggggatctgcaccagatatga

SEQ ID NO: 1278498 - DNA, 25 bp, Homo sapien
tcattcgaggataccaggcaacggc

SEQ ID NO: 1278499 - DNA, 25 bp, Homo sapien
tcacatggcttagcgtcagggctcc

SEQ ID NO: 1278500 - DNA, 25 bp, Homo sapien
tcagtggccctagcacctgtacttt

SEQ ID NO: 1278501 - DNA, 25 bp, Homo sapien
cagtccggaagtctgtcagtggccc

SEQ ID NO: 1278502 - DNA, 25 bp, Homo sapien
aataatatttacaaggatggatttt

SEQ ID NO: 1278503 - DNA, 25 bp, Homo sapien
ttgatgcagaccagaatgtgttttc

SEQ ID NO: 1278504 - DNA, 25 bp, Homo sapien
aggatggattttttgatgcagacca

SEQ ID NO: 1278505 - DNA, 25 bp, Homo sapien
ggattttttgatgcagaccagaatg

SEQ ID NO: 1278506 - DNA, 25 bp, Homo sapien
gacaaggacactcggtggccttcat

SEQ ID NO: 1278507 - DNA, 25 bp, Homo sapien
ttttgtcctgtcagaccctcatcag

SEQ ID NO: 1278508 - DNA, 25 bp, Homo sapien
gcatcagcatctccactttgacatt

SEQ ID NO: 1278509 - DNA, 25 bp, Homo sapien
cactttgacatttacatcgcccaac

SEQ ID NO: 1278510 - DNA, 25 bp, Homo sapien
agatctccttccctgctacgtacat

SEQ ID NO: 1278511 - DNA, 25 bp, Homo sapien
tcctttcccgaacgagagatctcct

SEQ ID NO: 1278512 - DNA, 25 bp, Homo sapien
tgtctggctcagatccatgggaggc

SEQ ID NO: 1278513 - DNA, 25 bp, Homo sapien
catgggaggctccaacaaggtagta

SEQ ID NO: 1278514 - DNA, 25 bp, Homo sapien
ggataagtacactttgtgtttaggc

SEQ ID NO: 1278515 - DNA, 25 bp, Homo sapien
taggcacccggtgacccggaacaca

SEQ ID NO: 1278516 - DNA, 25 bp, Homo sapien
tggtaacggcctgcgtgccggaaca

SEQ ID NO: 1278517 - DNA, 25 bp, Homo sapien
cgtgccggaacacggccgatggata

SEQ ID NO: 1278518 - DNA, 25 bp, Homo sapien
agccacgcagcgagcatcagcggaa

SEQ ID NO: 1278519 - DNA, 25 bp, Homo sapien
cagcgagcatcagcggaaccaggga

SEQ ID NO: 1278520 - DNA, 25 bp, Homo sapien
aggtggctcagccacgcagcgagca

SEQ ID NO: 1278521 - DNA, 25 bp, Homo sapien
agtgtggcttagcaggtggctcagc

SEQ ID NO: 1278522 - DNA, 25 bp, Homo sapien
tcctgcatgctccgccctcgtgctg

SEQ ID NO: 1278523 - DNA, 25 bp, Homo sapien
tccgccctcgtgctgggaaaaggct

SEQ ID NO: 1278524 - DNA, 25 bp, Homo sapien
cgccctcgtgctgggaaaaggctcc

SEQ ID NO: 1278525 - DNA, 25 bp, Homo sapien
gcatgctccgccctcgtgctgggaa

SEQ ID NO: 1278526 - DNA, 25 bp, Homo sapien
cacagctgactcgagctggcccata

SEQ ID NO: 1278527 - DNA, 25 bp, Homo sapien
gaccgtgggtttcagtggcagctac

SEQ ID NO: 1278528 - DNA, 25 bp, Homo sapien
atagtgccgttgcagccccttgact

SEQ ID NO: 1278529 - DNA, 25 bp, Homo sapien
agccccttgactgcagtggaccgtg

SEQ ID NO: 1278530 - DNA, 25 bp, Homo sapien
ctccagcgagttcctcaaactcact

SEQ ID NO: 1278531 - DNA, 25 bp, Homo sapien
tgctccagcgagttcctcaaactca

SEQ ID NO: 1278532 - DNA, 25 bp, Homo sapien
gctccagcgagttcctcaaactcac

SEQ ID NO: 1278533 - DNA, 25 bp, Homo sapien
agcagtgccgagtgaagcaggaaga

SEQ ID NO: 1278534 - DNA, 25 bp, Homo sapien
tgtaaagacatagccgagaatgggt

SEQ ID NO: 1278535 - DNA, 25 bp, Homo sapien
agggcagcgggaaggagcagtgccg

SEQ ID NO: 1278536 - DNA, 25 bp, Homo sapien
agaatgggaagcgaggcaccctctt

SEQ ID NO: 1278537 - DNA, 25 bp, Homo sapien
tttgctggtgtaaatggtggcagct

SEQ ID NO: 1278538 - DNA, 25 bp, Homo sapien
ttttgctggtgtaaatggtggcagc

SEQ ID NO: 1278539 - DNA, 25 bp, Homo sapien
cttcttagctccactagtggctcca

SEQ ID NO: 1278540 - DNA, 25 bp, Homo sapien
cagcacccatggcttaggggacaca

SEQ ID NO: 1278541 - DNA, 25 bp, Homo sapien
gctccagcacccatggcttagggga

SEQ ID NO: 1278542 - DNA, 25 bp, Homo sapien
ttagctccactagtggctccagcac

SEQ ID NO: 1278543 - DNA, 25 bp, Homo sapien
atttctcattttgccacaggcggcg

SEQ ID NO: 1278544 - DNA, 25 bp, Homo sapien
cagatggacgcattgggcattggtc

SEQ ID NO: 1278545 - DNA, 25 bp, Homo sapien
attggtcactgtgccgttggcggct

SEQ ID NO: 1278546 - DNA, 25 bp, Homo sapien
acaggcggcggccagatggacgcat

SEQ ID NO: 1278547 - DNA, 25 bp, Homo sapien
ctgctggctgcaaatacctccaatt

SEQ ID NO: 1278548 - DNA, 25 bp, Homo sapien
gctggctgcaaatacctccaattca

SEQ ID NO: 1278549 - DNA, 25 bp, Homo sapien
caaatacctccaattcactccccat

SEQ ID NO: 1278550 - DNA, 25 bp, Homo sapien
ggctgcaaatacctccaattcactc

SEQ ID NO: 1278551 - DNA, 25 bp, Homo sapien
aggaagcaagggcaccccctgacat

SEQ ID NO: 1278552 - DNA, 25 bp, Homo sapien
ttccaggaagcaagggcaccccctg

SEQ ID NO: 1278553 - DNA, 25 bp, Homo sapien
caggaagcaagggcaccccctgaca

SEQ ID NO: 1278554 - DNA, 25 bp, Homo sapien
tccaggaagcaagggcaccccctga

SEQ ID NO: 1278555 - DNA, 25 bp, Homo sapien
cagcttctgcttcacgtttgttaga

SEQ ID NO: 1278556 - DNA, 25 bp, Homo sapien
agcagactaggcttgggccggaaca

SEQ ID NO: 1278557 - DNA, 25 bp, Homo sapien
tcattagggcggttctcctccaggc

SEQ ID NO: 1278558 - DNA, 25 bp, Homo sapien
cgtttgttagattccacgtgttggg

SEQ ID NO: 1278559 - DNA, 25 bp, Homo sapien
tgacgggcaccactgtgaggggcat

SEQ ID NO: 1278560 - DNA, 25 bp, Homo sapien
ggtgacgggcaccactgtgaggggc

SEQ ID NO: 1278561 - DNA, 25 bp, Homo sapien
ggggtgacgggcaccactgtgaggg

SEQ ID NO: 1278562 - DNA, 25 bp, Homo sapien
ctggggtgacgggcaccactgtgag

SEQ ID NO: 1278563 - DNA, 25 bp, Homo sapien
aaccttgagtgagacctcaattagc

SEQ ID NO: 1278564 - DNA, 25 bp, Homo sapien
aataaaagcacctattaaccttgag

SEQ ID NO: 1278565 - DNA, 25 bp, Homo sapien
taaaagcacctattaaccttgagtg

SEQ ID NO: 1278566 - DNA, 25 bp, Homo sapien
gacctcaattagcaacaaggcctta

SEQ ID NO: 1278567 - DNA, 25 bp, Homo sapien
tattcagggcccgtggtgacagcta

SEQ ID NO: 1278568 - DNA, 25 bp, Homo sapien
cagtgccctggagattgctccctgg

SEQ ID NO: 1278569 - DNA, 25 bp, Homo sapien
agggcccgtggtgacagctaacaag

SEQ ID NO: 1278570 - DNA, 25 bp, Homo sapien
agctaacaagtaaatcagtgccctg

SEQ ID NO: 1278571 - DNA, 25 bp, Homo sapien
ctccaggacagtagaaagtctttct

SEQ ID NO: 1278572 - DNA, 25 bp, Homo sapien
cagcaggccccatacgacagccctc

SEQ ID NO: 1278573 - DNA, 25 bp, Homo sapien
gcaggccccatacgacagccctcat

SEQ ID NO: 1278574 - DNA, 25 bp, Homo sapien
gaaagtctttctgcatccccagcag

SEQ ID NO: 1278575 - DNA, 25 bp, Homo sapien
tgttctcacagtagggactatagag

SEQ ID NO: 1278576 - DNA, 25 bp, Homo sapien
cagaaggagtcactgtcagcagagc

SEQ ID NO: 1278577 - DNA, 25 bp, Homo sapien
gtaacacagagtgagcagtgcatct

SEQ ID NO: 1278578 - DNA, 25 bp, Homo sapien
tggccccagctcattagccctgaaa

SEQ ID NO: 1278579 - DNA, 25 bp, Homo sapien
ggcgagaatgcacgtctctgggcct

SEQ ID NO: 1278580 - DNA, 25 bp, Homo sapien
tgaacacacctatcacatggtgagt

SEQ ID NO: 1278581 - DNA, 25 bp, Homo sapien
acaggtgatgttttgaacacaccta

SEQ ID NO: 1278582 - DNA, 25 bp, Homo sapien
ggactagaatccctccgcaagaatc

SEQ ID NO: 1278583 - DNA, 25 bp, Homo sapien
acagcagtcaggccactccattcag

SEQ ID NO: 1278584 - DNA, 25 bp, Homo sapien
cccacagcagtcaggccactccatt

SEQ ID NO: 1278585 - DNA, 25 bp, Homo sapien
cttctggcaacggcccacagcagtc

SEQ ID NO: 1278586 - DNA, 25 bp, Homo sapien
gcagtcaggccactccattcagctt

SEQ ID NO: 1278587 - DNA, 25 bp, Homo sapien
ggaatcagcagtgggtccagtccaa

SEQ ID NO: 1278588 - DNA, 25 bp, Homo sapien
tgagagcccactttgtggcaagcac

SEQ ID NO: 1278589 - DNA, 25 bp, Homo sapien
taagttaaggcctatctaccctcga

SEQ ID NO: 1278590 - DNA, 25 bp, Homo sapien
tagaagccggctacctaagcaaacc

SEQ ID NO: 1278591 - DNA, 25 bp, Homo sapien
acgctgctgttggtcacccgggccc

SEQ ID NO: 1278592 - DNA, 25 bp, Homo sapien
tgctgttggtcacccgggccccgaa

SEQ ID NO: 1278593 - DNA, 25 bp, Homo sapien
ctcgaagcggacgaagcggacgccc

SEQ ID NO: 1278594 - DNA, 25 bp, Homo sapien
gtcctgccccccgtgctcgaagcgg

SEQ ID NO: 1278595 - DNA, 25 bp, Homo sapien
aaccagcgtcgctgcggcccgagta

SEQ ID NO: 1278596 - DNA, 25 bp, Homo sapien
tgctcggacagtagcttaacggtga

SEQ ID NO: 1278597 - DNA, 25 bp, Homo sapien
cagccagcacgttctcgtgctcgga

SEQ ID NO: 1278598 - DNA, 25 bp, Homo sapien
ttaacggtgagctcgtagaggcaac

SEQ ID NO: 1278599 - DNA, 25 bp, Homo sapien
cacggaagttgtcaacctttgcaga

SEQ ID NO: 1278600 - DNA, 25 bp, Homo sapien
aggttctcctgcaaacacggaagtt

SEQ ID NO: 1278601 - DNA, 25 bp, Homo sapien
aacctttgcagacccgtggcccacg

SEQ ID NO: 1278602 - DNA, 25 bp, Homo sapien
tgcaaacacggaagttgtcaacctt

SEQ ID NO: 1278603 - DNA, 25 bp, Homo sapien
ccttcaccacgatggccggctgagt

SEQ ID NO: 1278604 - DNA, 25 bp, Homo sapien
ccggctgagtcgtgtccagcagctc

SEQ ID NO: 1278605 - DNA, 25 bp, Homo sapien
aatgacctgtgctttgcgacaccac

SEQ ID NO: 1278606 - DNA, 25 bp, Homo sapien
ctcagcctgcaggtcaatgacctgt

SEQ ID NO: 1278607 - DNA, 25 bp, Homo sapien
ttcttgacgctctcatcgtgggtga

SEQ ID NO: 1278608 - DNA, 25 bp, Homo sapien
ttgacgctctcatcgtgggtgaact

SEQ ID NO: 1278609 - DNA, 25 bp, Homo sapien
atgctccacgtcacaccagccttcc

SEQ ID NO: 1278610 - DNA, 25 bp, Homo sapien
cgctctcatcgtgggtgaactccac

SEQ ID NO: 1278611 - DNA, 25 bp, Homo sapien
ttccagcgcaggcacaccaggcggc

SEQ ID NO: 1278612 - DNA, 25 bp, Homo sapien
tacgcagaaggttgcggcgccgctt

SEQ ID NO: 1278613 - DNA, 25 bp, Homo sapien
actgctgccagtggtcgcgctcctc

SEQ ID NO: 1278614 - DNA, 25 bp, Homo sapien
cccacacgggttacgcagaaggttg

SEQ ID NO: 1278615 - DNA, 25 bp, Homo sapien
tgctcctccgggcttgcctcctcgg

SEQ ID NO: 1278616 - DNA, 25 bp, Homo sapien
ctcagcactcgcctcctctggctgc

SEQ ID NO: 1278617 - DNA, 25 bp, Homo sapien
tcgtccaggtacgcggcggcggccg

SEQ ID NO: 1278618 - DNA, 25 bp, Homo sapien
ctcctgctggtcctccggccgctcc

SEQ ID NO: 1278619 - DNA, 25 bp, Homo sapien
gctggggccggagattctgtgactc

SEQ ID NO: 1278620 - DNA, 25 bp, Homo sapien
ctggggccggagattctgtgactcc

SEQ ID NO: 1278621 - DNA, 25 bp, Homo sapien
agctggggccggagattctgtgact

SEQ ID NO: 1278622 - DNA, 25 bp, Homo sapien
cagctggggccggagattctgtgac

SEQ ID NO: 1278623 - DNA, 25 bp, Homo sapien
aggccacagaccaaccccggatcag

SEQ ID NO: 1278624 - DNA, 25 bp, Homo sapien
ggccacagaccaaccccggatcagc

SEQ ID NO: 1278625 - DNA, 25 bp, Homo sapien
ccacagaccaaccccggatcagccc

SEQ ID NO: 1278626 - DNA, 25 bp, Homo sapien
aaggccacagaccaaccccggatca

SEQ ID NO: 1278627 - DNA, 25 bp, Homo sapien
tcccagtcggcttcagctgggccat

SEQ ID NO: 1278628 - DNA, 25 bp, Homo sapien
agtaagtggacaccgagtgcccaag

SEQ ID NO: 1278629 - DNA, 25 bp, Homo sapien
gccttgagtaagtggacaccgagtg

SEQ ID NO: 1278630 - DNA, 25 bp, Homo sapien
ggcagccggactgtctcttgcatcc

SEQ ID NO: 1278631 - DNA, 25 bp, Homo sapien
ccagggtatagctgatccctgggaa

SEQ ID NO: 1278632 - DNA, 25 bp, Homo sapien
gtatagctgatccctgggaaaaagc

SEQ ID NO: 1278633 - DNA, 25 bp, Homo sapien
cagggtatagctgatccctgggaaa

SEQ ID NO: 1278634 - DNA, 25 bp, Homo sapien
gggtatagctgatccctgggaaaaa

SEQ ID NO: 1278635 - DNA, 25 bp, Homo sapien
agcaagggctgcgagagctggaatt

SEQ ID NO: 1278636 - DNA, 25 bp, Homo sapien
ggccagaaggccgtggattgggagc

SEQ ID NO: 1278637 - DNA, 25 bp, Homo sapien
cagaaggccgtggattgggagcaag

SEQ ID NO: 1278638 - DNA, 25 bp, Homo sapien
agggctgcgagagctggaattttca

SEQ ID NO: 1278639 - DNA, 25 bp, Homo sapien
cgctagtcgggtccccactgggcat

SEQ ID NO: 1278640 - DNA, 25 bp, Homo sapien
aaggcctcccgccagaccaagatag

SEQ ID NO: 1278641 - DNA, 25 bp, Homo sapien
cttgccagtcgcctctcaaggcctc

SEQ ID NO: 1278642 - DNA, 25 bp, Homo sapien
ccagaccaagatagcagagagacgt

SEQ ID NO: 1278643 - DNA, 25 bp, Homo sapien
caagatagcagagagacgtgctctt

SEQ ID NO: 1278644 - DNA, 25 bp, Homo sapien
caggtaattttcctacgacgcggtg

SEQ ID NO: 1278645 - DNA, 25 bp, Homo sapien
cggagtcggagtataggaggtgcct

SEQ ID NO: 1278646 - DNA, 25 bp, Homo sapien
gatttggggcatctcgcagctcgct

SEQ ID NO: 1278647 - DNA, 25 bp, Homo sapien
tccgcgtctgtgtcggtcccggcga

SEQ ID NO: 1278648 - DNA, 25 bp, Homo sapien
tgcgaacgggggctggggtcgccat

SEQ ID NO: 1278649 - DNA, 25 bp, Homo sapien
tacaggggtccgagcccagactttg

SEQ ID NO: 1278650 - DNA, 25 bp, Homo sapien
catcgatgtacaggggtccgagccc

SEQ ID NO: 1278651 - DNA, 25 bp, Homo sapien
ggtcgccatcgatgtacaggggtcc

SEQ ID NO: 1278652 - DNA, 25 bp, Homo sapien
gcaccatgctctcccgagataaatg

SEQ ID NO: 1278653 - DNA, 25 bp, Homo sapien
cttggaccgccccagtgacccctgg

SEQ ID NO: 1278654 - DNA, 25 bp, Homo sapien
tgggagaggcaccatgctctcccga

SEQ ID NO: 1278655 - DNA, 25 bp, Homo sapien
tgtgtcccaagctccttggaccgcc

SEQ ID NO: 1278656 - DNA, 25 bp, Homo sapien
cctacaatattttcgcactttgcca

SEQ ID NO: 1278657 - DNA, 25 bp, Homo sapien
cacacagctgagtactggtagagct

SEQ ID NO: 1278658 - DNA, 25 bp, Homo sapien
tagtttatggcccacaattcctaca

SEQ ID NO: 1278659 - DNA, 25 bp, Homo sapien
tggcccacatcagagctttgtccat

SEQ ID NO: 1278660 - DNA, 25 bp, Homo sapien
ccagcttgtggtaacttactgtcac

SEQ ID NO: 1278661 - DNA, 25 bp, Homo sapien
gcagtgaggtccctgtaccagcgac

SEQ ID NO: 1278662 - DNA, 25 bp, Homo sapien
cggttcaaccctaccagcttgtggt

SEQ ID NO: 1278663 - DNA, 25 bp, Homo sapien
ctgtcacatagctctgacgttttgt

SEQ ID NO: 1278664 - DNA, 25 bp, Homo sapien
aggcatcctccaagcagacctgagc

SEQ ID NO: 1278665 - DNA, 25 bp, Homo sapien
gagaagtcgaggttgcggcatccct

SEQ ID NO: 1278666 - DNA, 25 bp, Homo sapien
caaagtctgacagtttgggcatcag

SEQ ID NO: 1278667 - DNA, 25 bp, Homo sapien
ggcgatccacacacagaggcgataa

SEQ ID NO: 1278668 - DNA, 25 bp, Homo sapien
ctgcctttatgagcgcgctcttcca

SEQ ID NO: 1278669 - DNA, 25 bp, Homo sapien
tttatgagcgcgctcttccacgtaa

SEQ ID NO: 1278670 - DNA, 25 bp, Homo sapien
tatgagcgcgctcttccacgtaaag

SEQ ID NO: 1278671 - DNA, 25 bp, Homo sapien
tcagctgcctttatgagcgcgctct

SEQ ID NO: 1278672 - DNA, 25 bp, Homo sapien
ttttagtggtatcagccgggggtca

SEQ ID NO: 1278673 - DNA, 25 bp, Homo sapien
gtcatgcatgtggacatcctgctca

SEQ ID NO: 1278674 - DNA, 25 bp, Homo sapien
aaatgtccgacgtcatggtttttag

SEQ ID NO: 1278675 - DNA, 25 bp, Homo sapien
tgctcatccgccaggatccagggga

SEQ ID NO: 1278676 - DNA, 25 bp, Homo sapien
ccatgttgcgagtggcggcttctct

SEQ ID NO: 1278677 - DNA, 25 bp, Homo sapien
catgttgcgagtggcggcttctctc

SEQ ID NO: 1278678 - DNA, 25 bp, Homo sapien
tcttctccatgttgcgagtggcggc

SEQ ID NO: 1278679 - DNA, 25 bp, Homo sapien
cgagtggcggcttctctcgtgtgca

SEQ ID NO: 1278680 - DNA, 25 bp, Homo sapien
tcttcaggatgaaggcccggagcag

SEQ ID NO: 1278681 - DNA, 25 bp, Homo sapien
ggacggcatcgcacacgctgatctt

SEQ ID NO: 1278682 - DNA, 25 bp, Homo sapien
tgctccacatgagacaacagcgagt

SEQ ID NO: 1278683 - DNA, 25 bp, Homo sapien
ggtccaggacggcatcgcacacgct

SEQ ID NO: 1278684 - DNA, 25 bp, Homo sapien
ggaggtcttcccatcacactggcgc

SEQ ID NO: 1278685 - DNA, 25 bp, Homo sapien
acaggcatcaagcctggatgcagac

SEQ ID NO: 1278686 - DNA, 25 bp, Homo sapien
ggagtgagaggaggtcttcccatca

SEQ ID NO: 1278687 - DNA, 25 bp, Homo sapien
ccacaggcatcaagcctggatgcag

SEQ ID NO: 1278688 - DNA, 25 bp, Homo sapien
tgatgccagctagtgggcgaggggc

SEQ ID NO: 1278689 - DNA, 25 bp, Homo sapien
ctgatgccagctagtgggcgagggg

SEQ ID NO: 1278690 - DNA, 25 bp, Homo sapien
cactgggcggtgctctttatccaaa

SEQ ID NO: 1278691 - DNA, 25 bp, Homo sapien
ctccactgggcggtgctctttatcc

SEQ ID NO: 1278692 - DNA, 25 bp, Homo sapien
tctcaaagacgaatttctccactgg

SEQ ID NO: 1278693 - DNA, 25 bp, Homo sapien
gaggctgggtgatctcaaagacgaa

SEQ ID NO: 1278694 - DNA, 25 bp, Homo sapien
ccccaagaggccagatagcgagttt

SEQ ID NO: 1278695 - DNA, 25 bp, Homo sapien
gacagaacgtttagcgtggagaaca

SEQ ID NO: 1278696 - DNA, 25 bp, Homo sapien
cccagagttggactgtgagcacaca

SEQ ID NO: 1278697 - DNA, 25 bp, Homo sapien
gatggtctccagagtgcagggaaca

SEQ ID NO: 1278698 - DNA, 25 bp, Homo sapien
gtcctggatatactgattcagctcc

SEQ ID NO: 1278699 - DNA, 25 bp, Homo sapien
ctccaggagtggcttgacgcagtgc

SEQ ID NO: 1278700 - DNA, 25 bp, Homo sapien
tggcttgacgcagtgcagcgtgtcc

SEQ ID NO: 1278701 - DNA, 25 bp, Homo sapien
gatatactgattcagctccgggtgg

SEQ ID NO: 1278702 - DNA, 25 bp, Homo sapien
acctccaggaactcgcagagcacat

SEQ ID NO: 1278703 - DNA, 25 bp, Homo sapien
acctcgcgcacgtagaggatgagat

SEQ ID NO: 1278704 - DNA, 25 bp, Homo sapien
cacgttgtacttcttgcgtttctgg

SEQ ID NO: 1278705 - DNA, 25 bp, Homo sapien
tagaggatgagatgcacagccacct

SEQ ID NO: 1278706 - DNA, 25 bp, Homo sapien
tggcgcgctcgaggaagcccgccgg

SEQ ID NO: 1278707 - DNA, 25 bp, Homo sapien
tgcaggggggcacaagccggtggcg

SEQ ID NO: 1278708 - DNA, 25 bp, Homo sapien
gcacaagccggtggcgcgctcgagg

SEQ ID NO: 1278709 - DNA, 25 bp, Homo sapien
ccggtggcgcgctcgaggaagcccg

SEQ ID NO: 1278710 - DNA, 25 bp, Homo sapien
cttggccaaagttgaggtcttgtcg

SEQ ID NO: 1278711 - DNA, 25 bp, Homo sapien
aggtcttgtcgtgtgagcgtggtca

SEQ ID NO: 1278712 - DNA, 25 bp, Homo sapien
ccaaagttgaggtcttgtcgtgtga

SEQ ID NO: 1278713 - DNA, 25 bp, Homo sapien
aaagttgaggtcttgtcgtgtgagc

SEQ ID NO: 1278714 - DNA, 25 bp, Homo sapien
cccacagtctgtgggaactggggaa

SEQ ID NO: 1278715 - DNA, 25 bp, Homo sapien
aacccgctcgcttccaccgtctctt

SEQ ID NO: 1278716 - DNA, 25 bp, Homo sapien
ggcagagggtagttccagagaccca

SEQ ID NO: 1278717 - DNA, 25 bp, Homo sapien
gggaaggacctcccgcttcgcacag

SEQ ID NO: 1278718 - DNA, 25 bp, Homo sapien
tgtctcgcggggtggaaagaccaca

SEQ ID NO: 1278719 - DNA, 25 bp, Homo sapien
acgcagagggaaacagcgggatgcc

SEQ ID NO: 1278720 - DNA, 25 bp, Homo sapien
ttggaataagactccgccccctgct

SEQ ID NO: 1278721 - DNA, 25 bp, Homo sapien
caaagcgggacatgcggaaagcgaa

SEQ ID NO: 1278722 - DNA, 25 bp, Homo sapien
tgatctccacgttccattggatcgc

SEQ ID NO: 1278723 - DNA, 25 bp, Homo sapien
tgggcgcgaagaaaacacaacgttg

SEQ ID NO: 1278724 - DNA, 25 bp, Homo sapien
tcccttcaacttcgggtgggcgcga

SEQ ID NO: 1278725 - DNA, 25 bp, Homo sapien
tctctcgctttagcaggcgccggaa

SEQ ID NO: 1278726 - DNA, 25 bp, Homo sapien
tatacagataagtcaagcgaggtgc

SEQ ID NO: 1278727 - DNA, 25 bp, Homo sapien
ccgtggattatctcagtcctgggag

SEQ ID NO: 1278728 - DNA, 25 bp, Homo sapien
gggtgaataacctgcccgagtctcc

SEQ ID NO: 1278729 - DNA, 25 bp, Homo sapien
tcggtctggaagtcctgtaagggcc

SEQ ID NO: 1278730 - DNA, 25 bp, Homo sapien
cggcggcgcctaggcctctggggag

SEQ ID NO: 1278731 - DNA, 25 bp, Homo sapien
cctcctttgtctgccccgcgccctc

SEQ ID NO: 1278732 - DNA, 25 bp, Homo sapien
aggagtgggcctgcctcgcccggtg

SEQ ID NO: 1278733 - DNA, 25 bp, Homo sapien
ggctgcgcccgcctttgtctgcctc

SEQ ID NO: 1278734 - DNA, 25 bp, Homo sapien
ggctgggggcagtcgagcccgccac

SEQ ID NO: 1278735 - DNA, 25 bp, Homo sapien
ctcggctgggggcagtcgagcccgc

SEQ ID NO: 1278736 - DNA, 25 bp, Homo sapien
agggcgcgctggccgggtgcgcgcc

SEQ ID NO: 1278737 - DNA, 25 bp, Homo sapien
gcgctggccgggtgcgcgccgggcc

SEQ ID NO: 1278738 - DNA, 25 bp, Homo sapien
catacggcgatgctgacagctctcc

SEQ ID NO: 1278739 - DNA, 25 bp, Homo sapien
tcatcgccttcgtttgcatacggcg

SEQ ID NO: 1278740 - DNA, 25 bp, Homo sapien
tttgcatacggcgatgctgacagct

SEQ ID NO: 1278741 - DNA, 25 bp, Homo sapien
gccttcgtttgcatacggcgatgct

SEQ ID NO: 1278742 - DNA, 25 bp, Homo sapien
gagcggctgcgtgagggaggcaggt

SEQ ID NO: 1278743 - DNA, 25 bp, Homo sapien
cacgggcaatggggacaagaaccat

SEQ ID NO: 1278744 - DNA, 25 bp, Homo sapien
ccacgggcaatggggacaagaacca

SEQ ID NO: 1278745 - DNA, 25 bp, Homo sapien
tgagcggctgcgtgagggaggcagg

SEQ ID NO: 1278746 - DNA, 25 bp, Homo sapien
cgatggttaaaaagcccacctggtg

SEQ ID NO: 1278747 - DNA, 25 bp, Homo sapien
gactgagcatttgccctgagctaag

SEQ ID NO: 1278748 - DNA, 25 bp, Homo sapien
gtgccacgcccttgtagtttcatga

SEQ ID NO: 1278749 - DNA, 25 bp, Homo sapien
ggtattccacctatgacttctcaac

SEQ ID NO: 1278750 - DNA, 25 bp, Homo sapien
taaccggcagtaattttcataggac

SEQ ID NO: 1278751 - DNA, 25 bp, Homo sapien
ggcactattgccacatgtctgggaa

SEQ ID NO: 1278752 - DNA, 25 bp, Homo sapien
tacaatcaccaaaggttccataggg

SEQ ID NO: 1278753 - DNA, 25 bp, Homo sapien
gatgggttctctgagcacaagggtc

SEQ ID NO: 1278754 - DNA, 25 bp, Homo sapien
tcctttgaggataccgacagtttca

SEQ ID NO: 1278755 - DNA, 25 bp, Homo sapien
accccaagccttgtggaatgccacg

SEQ ID NO: 1278756 - DNA, 25 bp, Homo sapien
caagaataggtcgtggcaggaactc

SEQ ID NO: 1278757 - DNA, 25 bp, Homo sapien
gggtctattatgtccttccatagcc

SEQ ID NO: 1278758 - DNA, 25 bp, Homo sapien
cgagtcctgcctgagtgttgcaagc

SEQ ID NO: 1278759 - DNA, 25 bp, Homo sapien
tcagcccgaggagcagtctggcatg

SEQ ID NO: 1278760 - DNA, 25 bp, Homo sapien
gacctaagatggaatgtgtccccag

SEQ ID NO: 1278761 - DNA, 25 bp, Homo sapien
cagggattgcctgaaccaagaggcc

SEQ ID NO: 1278762 - DNA, 25 bp, Homo sapien
ggagcactagctcggttagccagac

SEQ ID NO: 1278763 - DNA, 25 bp, Homo sapien
tggtcactgatggaattcggagccc

SEQ ID NO: 1278764 - DNA, 25 bp, Homo sapien
cagcttgctgtaaatcccagtggga

SEQ ID NO: 1278765 - DNA, 25 bp, Homo sapien
tctggcctttggacttcagggcaca

SEQ ID NO: 1278766 - DNA, 25 bp, Homo sapien
gcagcgcagcctgagatggtggcac

SEQ ID NO: 1278767 - DNA, 25 bp, Homo sapien
cagcggatgctgcagcgcagcctga

SEQ ID NO: 1278768 - DNA, 25 bp, Homo sapien
tgggcccagatgccacatcaagctg

SEQ ID NO: 1278769 - DNA, 25 bp, Homo sapien
ggcccagatgccacatcaagctgca

SEQ ID NO: 1278770 - DNA, 25 bp, Homo sapien
tcctgccccgtcctactgagagggt

SEQ ID NO: 1278771 - DNA, 25 bp, Homo sapien
aatgcataagagttggtctccctgg

SEQ ID NO: 1278772 - DNA, 25 bp, Homo sapien
tatggctagtggttgagcacaggac

SEQ ID NO: 1278773 - DNA, 25 bp, Homo sapien
tacattccccaatgccgtgtgtggc

SEQ ID NO: 1278774 - DNA, 25 bp, Homo sapien
tactggcaggtgaggtagtgtccct

SEQ ID NO: 1278775 - DNA, 25 bp, Homo sapien
agaaactaaacgctgggaatggcac

SEQ ID NO: 1278776 - DNA, 25 bp, Homo sapien
tacccaaaggcatcggtcagtccct

SEQ ID NO: 1278777 - DNA, 25 bp, Homo sapien
gacacagccccaaagatactggcag

SEQ ID NO: 1278778 - DNA, 25 bp, Homo sapien
gaagggtcacgatgctcttggccat

SEQ ID NO: 1278779 - DNA, 25 bp, Homo sapien
tgtactcaactcctaggcgggcact

SEQ ID NO: 1278780 - DNA, 25 bp, Homo sapien
ctagagcagcgaagaaatcccagcg

SEQ ID NO: 1278781 - DNA, 25 bp, Homo sapien
acccggtccatcagtttgcgaagaa

SEQ ID NO: 1278782 - DNA, 25 bp, Homo sapien
gccagaggcagttgtccagtgggaa

SEQ ID NO: 1278783 - DNA, 25 bp, Homo sapien
aagtcattgtccaccaggttgacca

SEQ ID NO: 1278784 - DNA, 25 bp, Homo sapien
tagttgtcgtggatgtactggatga

SEQ ID NO: 1278785 - DNA, 25 bp, Homo sapien
tctctcgcattctgggtgggcctgt

SEQ ID NO: 1278786 - DNA, 25 bp, Homo sapien
gatccactacggtgggctggatgat

SEQ ID NO: 1278787 - DNA, 25 bp, Homo sapien
caagtgacagcattcggctgcagtt

SEQ ID NO: 1278788 - DNA, 25 bp, Homo sapien
gacagcattcggctgcagttcaggg

SEQ ID NO: 1278789 - DNA, 25 bp, Homo sapien
gaacatgaagctgacgggatccact

SEQ ID NO: 1278790 - DNA, 25 bp, Homo sapien
ttgcagaagtgcttccgctgtctcg

SEQ ID NO: 1278791 - DNA, 25 bp, Homo sapien
tgtctcgcgggaagtgaaaaactct

SEQ ID NO: 1278792 - DNA, 25 bp, Homo sapien
tgcagaagtgcttccgctgtctcgc

SEQ ID NO: 1278793 - DNA, 25 bp, Homo sapien
tccgctgtctcgcgggaagtgaaaa

SEQ ID NO: 1278794 - DNA, 25 bp, Homo sapien
cacaaatatggcttactggaggctc

SEQ ID NO: 1278795 - DNA, 25 bp, Homo sapien
ggaggctcaacctctcggactcaag

SEQ ID NO: 1278796 - DNA, 25 bp, Homo sapien
ctggaggctcaacctctcggactca

SEQ ID NO: 1278797 - DNA, 25 bp, Homo sapien
aatatggcttactggaggctcaacc

SEQ ID NO: 1278798 - DNA, 25 bp, Homo sapien
gtgaggatgccctggcggttcaccc

SEQ ID NO: 1278799 - DNA, 25 bp, Homo sapien
ttctggaagacatagcccccgctgg

SEQ ID NO: 1278800 - DNA, 25 bp, Homo sapien
ccaggggctcatcgttccagggcag

SEQ ID NO: 1278801 - DNA, 25 bp, Homo sapien
tcggaggacggcttcccgttgatgt

SEQ ID NO: 1278802 - DNA, 25 bp, Homo sapien
tctcccgagaggtaaagaacgaaga

SEQ ID NO: 1278803 - DNA, 25 bp, Homo sapien
cattccggtttggttctcccgagag

SEQ ID NO: 1278804 - DNA, 25 bp, Homo sapien
ttgtgaccattccggtttggttctc

SEQ ID NO: 1278805 - DNA, 25 bp, Homo sapien
gagaggtaaagaacgaagacttcaa

SEQ ID NO: 1278806 - DNA, 25 bp, Homo sapien
agaggtagtagtccttcagctcccc

SEQ ID NO: 1278807 - DNA, 25 bp, Homo sapien
cttcaggtagaagaggtagtagtcc

SEQ ID NO: 1278808 - DNA, 25 bp, Homo sapien
aagaggtagtagtccttcagctccc

SEQ ID NO: 1278809 - DNA, 25 bp, Homo sapien
ggtagaagaggtagtagtccttcag

SEQ ID NO: 1278810 - DNA, 25 bp, Homo sapien
gtacatcttcctctcggcgcttggg

SEQ ID NO: 1278811 - DNA, 25 bp, Homo sapien
ctcctgggtacggtagatgtaactc

SEQ ID NO: 1278812 - DNA, 25 bp, Homo sapien
ggcccagaagatgggacgtacatct

SEQ ID NO: 1278813 - DNA, 25 bp, Homo sapien
cctgggtacggtagatgtaactctt

SEQ ID NO: 1278814 - DNA, 25 bp, Homo sapien
ccagctcgatgccatagttgcggat

SEQ ID NO: 1278815 - DNA, 25 bp, Homo sapien
tctgtggtagccatctcgcggttga

SEQ ID NO: 1278816 - DNA, 25 bp, Homo sapien
ttgatctcctgtggcacctccagct

SEQ ID NO: 1278817 - DNA, 25 bp, Homo sapien
gcttcacaagctgccgaagggagtg

SEQ ID NO: 1278818 - DNA, 25 bp, Homo sapien
gcaagtgatgcccatgtcggtgcat

SEQ ID NO: 1278819 - DNA, 25 bp, Homo sapien
cctcaaagaaaagctgcgtgatgat

SEQ ID NO: 1278820 - DNA, 25 bp, Homo sapien
cacaaagcggaagaatgtgtcagcc

SEQ ID NO: 1278821 - DNA, 25 bp, Homo sapien
gtcggtgcatgccttcacaaagcgg

SEQ ID NO: 1278822 - DNA, 25 bp, Homo sapien
gacgctgagggctcaatgccagcct

SEQ ID NO: 1278823 - DNA, 25 bp, Homo sapien
ccttcagcttcaagggtgggagaga

SEQ ID NO: 1278824 - DNA, 25 bp, Homo sapien
cagaaaatgtgccaatcccgggact

SEQ ID NO: 1278825 - DNA, 25 bp, Homo sapien
tgccatacctgagcgctgtctgaga

SEQ ID NO: 1278826 - DNA, 25 bp, Homo sapien
gcagttcacctctgcatgtccttca

SEQ ID NO: 1278827 - DNA, 25 bp, Homo sapien
ccatgagtgcccctgatcactgtgt

SEQ ID NO: 1278828 - DNA, 25 bp, Homo sapien
ttcatccagcatggacccatgagtg

SEQ ID NO: 1278829 - DNA, 25 bp, Homo sapien
gaataaggccaagcaggctaagggc

SEQ ID NO: 1278830 - DNA, 25 bp, Homo sapien
cacttcggatgtgcttcaccaggtc

SEQ ID NO: 1278831 - DNA, 25 bp, Homo sapien
gtagtcaccaaactcacttcggatg

SEQ ID NO: 1278832 - DNA, 25 bp, Homo sapien
acagatgtcaaagtagtcaccaaac

SEQ ID NO: 1278833 - DNA, 25 bp, Homo sapien
tcaccaaactcacttcggatgtgct

SEQ ID NO: 1278834 - DNA, 25 bp, Homo sapien
gcagggttggtggaggtcatagtca

SEQ ID NO: 1278835 - DNA, 25 bp, Homo sapien
tgcagggttggtggaggtcatagtc

SEQ ID NO: 1278836 - DNA, 25 bp, Homo sapien
ctgcagggttggtggaggtcatagt

SEQ ID NO: 1278837 - DNA, 25 bp, Homo sapien
tgttccctctacctagccccgacac

SEQ ID NO: 1278838 - DNA, 25 bp, Homo sapien
tccctctacctagccccgacaccca

SEQ ID NO: 1278839 - DNA, 25 bp, Homo sapien
aacccagagtgtaggggagtgctgg

SEQ ID NO: 1278840 - DNA, 25 bp, Homo sapien
ctccgggaaagccagaacccagagt

SEQ ID NO: 1278841 - DNA, 25 bp, Homo sapien
tgggatcctgcggatcctcagcgtg

SEQ ID NO: 1278842 - DNA, 25 bp, Homo sapien
gaaccaagttcaggctaccaagtgg

SEQ ID NO: 1278843 - DNA, 25 bp, Homo sapien
gccacagtagttcacggcggtgctg

SEQ ID NO: 1278844 - DNA, 25 bp, Homo sapien
tgcttagctttgtgcagatggcccg

SEQ ID NO: 1278845 - DNA, 25 bp, Homo sapien
ggtctccttgtctgagccagggtca

SEQ ID NO: 1278846 - DNA, 25 bp, Homo sapien
tggcgatcatcatggaggaggtctc

SEQ ID NO: 1278847 - DNA, 25 bp, Homo sapien
ggtggaacatctcgaactatctttg

SEQ ID NO: 1278848 - DNA, 25 bp, Homo sapien
tatctttggagctctcactgccact

SEQ ID NO: 1278849 - DNA, 25 bp, Homo sapien
gctgtttcctctggcttcgttcacc

SEQ ID NO: 1278850 - DNA, 25 bp, Homo sapien
gcagttcgaggagggaagaattcca

SEQ ID NO: 1278851 - DNA, 25 bp, Homo sapien
gtggcaggttcaagccggaggcgct

SEQ ID NO: 1278852 - DNA, 25 bp, Homo sapien
catcaagacacctgagtggcaggtt

SEQ ID NO: 1278853 - DNA, 25 bp, Homo sapien
gcgctgtatttccacacaggaagaa

SEQ ID NO: 1278854 - DNA, 25 bp, Homo sapien
tcagctatggctgtccgggccgcct

SEQ ID NO: 1278855 - DNA, 25 bp, Homo sapien
cggcactgcaacatgctcctcggtg

SEQ ID NO: 1278856 - DNA, 25 bp, Homo sapien
ccacccggcactgcaacatgctcct

SEQ ID NO: 1278857 - DNA, 25 bp, Homo sapien
caaagccttgccctccgctgctgcc

SEQ ID NO: 1278858 - DNA, 25 bp, Homo sapien
cactgcaacatgctcctcggtgaca

SEQ ID NO: 1278859 - DNA, 25 bp, Homo sapien
ggtggcacagaggacctcacgctgc

SEQ ID NO: 1278860 - DNA, 25 bp, Homo sapien
ggcacagaggacctcacgctgccga

SEQ ID NO: 1278861 - DNA, 25 bp, Homo sapien
acagaggacctcacgctgccgacct

SEQ ID NO: 1278862 - DNA, 25 bp, Homo sapien
cagaggacctcacgctgccgacctg

SEQ ID NO: 1278863 - DNA, 25 bp, Homo sapien
attcctagcgaggggcagtagtgcc

SEQ ID NO: 1278864 - DNA, 25 bp, Homo sapien
ggaccctggcttttcgatggtccat

SEQ ID NO: 1278865 - DNA, 25 bp, Homo sapien
tcagggataccagatcaccctccag

SEQ ID NO: 1278866 - DNA, 25 bp, Homo sapien
ttccccagcgggtgtgttcaactgg

SEQ ID NO: 1278867 - DNA, 25 bp, Homo sapien
tggagatgaggccaacaggcgttca

SEQ ID NO: 1278868 - DNA, 25 bp, Homo sapien
ttcaactgggcggagctgcgacaaa

SEQ ID NO: 1278869 - DNA, 25 bp, Homo sapien
tcatgctactccaaaaagaccgtgt

SEQ ID NO: 1278870 - DNA, 25 bp, Homo sapien
tcatcacagtgacccagctactggg

SEQ ID NO: 1278871 - DNA, 25 bp, Homo sapien
tgagggcttgactatgcagccagat

SEQ ID NO: 1278872 - DNA, 25 bp, Homo sapien
tcagtaagggcacgaatttctcaga

SEQ ID NO: 1278873 - DNA, 25 bp, Homo sapien
cgcatgtgccatatttgtaagccaa

SEQ ID NO: 1278874 - DNA, 25 bp, Homo sapien
tgcttgctggaacagaacctagagt

SEQ ID NO: 1278875 - DNA, 25 bp, Homo sapien
ggtatccccagagtttggcacacgg

SEQ ID NO: 1278876 - DNA, 25 bp, Homo sapien
gctgaaccacctgtaaaccctctga

SEQ ID NO: 1278877 - DNA, 25 bp, Homo sapien
tgaacaactagtctgcgccaagcac

SEQ ID NO: 1278878 - DNA, 25 bp, Homo sapien
gaacaactagtctgcgccaagcact

SEQ ID NO: 1278879 - DNA, 25 bp, Homo sapien
taagcctacgactcccagaaaggtc

SEQ ID NO: 1278880 - DNA, 25 bp, Homo sapien
tcaccaggtcactgagtcaccgatg

SEQ ID NO: 1278881 - DNA, 25 bp, Homo sapien
gaagtggtagccattgggagttaca

SEQ ID NO: 1278882 - DNA, 25 bp, Homo sapien
caggtggccgagaatccagtcacca

SEQ ID NO: 1278883 - DNA, 25 bp, Homo sapien
gaaaacttgagttgtgttcccagag

SEQ ID NO: 1278884 - DNA, 25 bp, Homo sapien
tcagctggcgttggacatctttgag

SEQ ID NO: 1278885 - DNA, 25 bp, Homo sapien
gaggccgtgcctttatcgtcatgtg

SEQ ID NO: 1278886 - DNA, 25 bp, Homo sapien
tgcccacaggtctcgttggaggccg

SEQ ID NO: 1278887 - DNA, 25 bp, Homo sapien
acagattgccccgatgtccaaccag

SEQ ID NO: 1278888 - DNA, 25 bp, Homo sapien
gttgccccacacacagattgccccg

SEQ ID NO: 1278889 - DNA, 25 bp, Homo sapien
cccgatgtccaaccagaagaagtga

SEQ ID NO: 1278890 - DNA, 25 bp, Homo sapien
ctagcagccgcgtcctggaggagca

SEQ ID NO: 1278891 - DNA, 25 bp, Homo sapien
aagctgcagcttagatgggatgatc

SEQ ID NO: 1278892 - DNA, 25 bp, Homo sapien
tagatgggatgatcacaactccatg

SEQ ID NO: 1278893 - DNA, 25 bp, Homo sapien
gagcctcttgcagtctgtccctagg

SEQ ID NO: 1278894 - DNA, 25 bp, Homo sapien
aaaatttaatgcatggggtgggaga

SEQ ID NO: 1278895 - DNA, 25 bp, Homo sapien
taaatttcacttaagcccttcagga

SEQ ID NO: 1278896 - DNA, 25 bp, Homo sapien
tgaacttgattactgaccacctgct

SEQ ID NO: 1278897 - DNA, 25 bp, Homo sapien
tcagccatgcaaagataacttggct

SEQ ID NO: 1278898 - DNA, 25 bp, Homo sapien
gaatatgaactgctaatcagccatg

SEQ ID NO: 1278899 - DNA, 25 bp, Homo sapien
ggtgtctcccagtagtgtccatccc

SEQ ID NO: 1278900 - DNA, 25 bp, Homo sapien
gaaggtgtctcccagtagtgtccat

SEQ ID NO: 1278901 - DNA, 25 bp, Homo sapien
gacaatagatggcatgtcctgacac

SEQ ID NO: 1278902 - DNA, 25 bp, Homo sapien
gatggcatgtcctgacacccatggg

SEQ ID NO: 1278903 - DNA, 25 bp, Homo sapien
gctgttacagcccagtccgctctgg

SEQ ID NO: 1278904 - DNA, 25 bp, Homo sapien
cattcggctcactgagcacttgtgg

SEQ ID NO: 1278905 - DNA, 25 bp, Homo sapien
ggcagatcgatcagaggagtcccag

SEQ ID NO: 1278906 - DNA, 25 bp, Homo sapien
ggcacgacctcatcttctaaaggca

SEQ ID NO: 1278907 - DNA, 25 bp, Homo sapien
tacatgggattagctctggtctgac

SEQ ID NO: 1278908 - DNA, 25 bp, Homo sapien
cgttggacacggcattgtacatggg

SEQ ID NO: 1278909 - DNA, 25 bp, Homo sapien
aggtctgcgttggacacggcattgt

SEQ ID NO: 1278910 - DNA, 25 bp, Homo sapien
cacggcattgtacatgggattagct

SEQ ID NO: 1278911 - DNA, 25 bp, Homo sapien
tccacatctaggttgataaaattac

SEQ ID NO: 1278912 - DNA, 25 bp, Homo sapien
gtaattttatcaacctagatgtgga

SEQ ID NO: 1278913 - DNA, 25 bp, Homo sapien
ggaatgccagtaaaaggaggaagct

SEQ ID NO: 1278914 - DNA, 25 bp, Homo sapien
agctggaatgccagtaaaaggagga

SEQ ID NO: 1278915 - DNA, 25 bp, Homo sapien
tgccagtaaaaggaggaagctcacg

SEQ ID NO: 1278916 - DNA, 25 bp, Homo sapien
ggaagctcacggtggtggtggagaa

SEQ ID NO: 1278917 - DNA, 25 bp, Homo sapien
gctggcgtcgtcaaggagcaatcca

SEQ ID NO: 1278918 - DNA, 25 bp, Homo sapien
tcgtcaaggagcaatccactgcttg

SEQ ID NO: 1278919 - DNA, 25 bp, Homo sapien
aaggagcaatccactgcttgctgct

SEQ ID NO: 1278920 - DNA, 25 bp, Homo sapien
gcgtcgtcaaggagcaatccactgc

SEQ ID NO: 1278921 - DNA, 25 bp, Homo sapien
gatccagatgctcaagctggcctca

SEQ ID NO: 1278922 - DNA, 25 bp, Homo sapien
gctcccctggtttgtttgtggctca

SEQ ID NO: 1278923 - DNA, 25 bp, Homo sapien
gcagcccgagacaaatggatccaga

SEQ ID NO: 1278924 - DNA, 25 bp, Homo sapien
ggattctttctcctcgacgctggta

SEQ ID NO: 1278925 - DNA, 25 bp, Homo sapien
tggtttaatatggaggtcactaagg

SEQ ID NO: 1278926 - DNA, 25 bp, Homo sapien
taatatggaggtcactaagggctga

SEQ ID NO: 1278927 - DNA, 25 bp, Homo sapien
ttctttggtttaatatggaggtcac

SEQ ID NO: 1278928 - DNA, 25 bp, Homo sapien
tggaggtcactaagggctgaagact

SEQ ID NO: 1278929 - DNA, 25 bp, Homo sapien
taccgctacccagctccaactgtca

SEQ ID NO: 1278930 - DNA, 25 bp, Homo sapien
tgggtacagcaggcggcccgctacc

SEQ ID NO: 1278931 - DNA, 25 bp, Homo sapien
tggctccttcgcaggtcactttggg

SEQ ID NO: 1278932 - DNA, 25 bp, Homo sapien
atttggctccttcgcaggtcacttt

SEQ ID NO: 1278933 - DNA, 25 bp, Homo sapien
aaagcgaatgacatgaggcccttcc

SEQ ID NO: 1278934 - DNA, 25 bp, Homo sapien
agcgaatgacatgaggcccttccca

SEQ ID NO: 1278935 - DNA, 25 bp, Homo sapien
gcattgtgagaaagcgaatgacatg

SEQ ID NO: 1278936 - DNA, 25 bp, Homo sapien
gtgagaaagcgaatgacatgaggcc

SEQ ID NO: 1278937 - DNA, 25 bp, Homo sapien
aaatgagtcacttcaaaggcggcca

SEQ ID NO: 1278938 - DNA, 25 bp, Homo sapien
tgttgactttatttcaccgtggaaa

SEQ ID NO: 1278939 - DNA, 25 bp, Homo sapien
aagccccttgtggaatcagaagcag

SEQ ID NO: 1278940 - DNA, 25 bp, Homo sapien
gaaattttgtgctcaaaggtaagaa

SEQ ID NO: 1278941 - DNA, 25 bp, Homo sapien
tggccctgaaggctgttaacaagag

SEQ ID NO: 1278942 - DNA, 25 bp, Homo sapien
catcagacgtttgaggcttaatgca

SEQ ID NO: 1278943 - DNA, 25 bp, Homo sapien
tatagacagtttagaggaaaccagg

SEQ ID NO: 1278944 - DNA, 25 bp, Homo sapien
ttaacaagaggaagcgatgtccagg

SEQ ID NO: 1278945 - DNA, 25 bp, Homo sapien
tggaggagctgatccggtccatctt

SEQ ID NO: 1278946 - DNA, 25 bp, Homo sapien
gaggagctgatccggtccatcttcc

SEQ ID NO: 1278947 - DNA, 25 bp, Homo sapien
ggagctgatccggtccatcttcctc

SEQ ID NO: 1278948 - DNA, 25 bp, Homo sapien
agctgatccggtccatcttcctccc

SEQ ID NO: 1278949 - DNA, 25 bp, Homo sapien
cgcagggtgtagaggaccattttgc

SEQ ID NO: 1278950 - DNA, 25 bp, Homo sapien
gaccattttgcggtgcccacggatg

SEQ ID NO: 1278951 - DNA, 25 bp, Homo sapien
tcccgggacttccagacacctgtgg

SEQ ID NO: 1278952 - DNA, 25 bp, Homo sapien
cagctccgacagtttgccctgcaaa

SEQ ID NO: 1278953 - DNA, 25 bp, Homo sapien
gcaatgaatgggggcgtccaagcct

SEQ ID NO: 1278954 - DNA, 25 bp, Homo sapien
caatgaatgggggcgtccaagcctc

SEQ ID NO: 1278955 - DNA, 25 bp, Homo sapien
atgaatgggggcgtccaagcctcag

SEQ ID NO: 1278956 - DNA, 25 bp, Homo sapien
aatgaatgggggcgtccaagcctca

SEQ ID NO: 1278957 - DNA, 25 bp, Homo sapien
cgggaaggtgctgtctggggatcca

SEQ ID NO: 1278958 - DNA, 25 bp, Homo sapien
ggacgtttccaagtccgaggctgaa

SEQ ID NO: 1278959 - DNA, 25 bp, Homo sapien
gaaagccagatgcaagaagagcagg

SEQ ID NO: 1278960 - DNA, 25 bp, Homo sapien
ggaacgacctcccaggaaagccaga

SEQ ID NO: 1278961 - DNA, 25 bp, Homo sapien
gctgcgatgcgtccgggtttgcttc

SEQ ID NO: 1278962 - DNA, 25 bp, Homo sapien
tgcgtccgggtttgcttcccacctg

SEQ ID NO: 1278963 - DNA, 25 bp, Homo sapien
cgatgcgtccgggtttgcttcccac

SEQ ID NO: 1278964 - DNA, 25 bp, Homo sapien
ctgctgctgcgatgcgtccgggttt

SEQ ID NO: 1278965 - DNA, 25 bp, Homo sapien
agcccctcttcaaggcctcggttgg

SEQ ID NO: 1278966 - DNA, 25 bp, Homo sapien
tcacattccgtgctgaagagcccct

SEQ ID NO: 1278967 - DNA, 25 bp, Homo sapien
tcttcaaggcctcggttggcgccaa

SEQ ID NO: 1278968 - DNA, 25 bp, Homo sapien
ttcctggggtcacattccgtgctga

SEQ ID NO: 1278969 - DNA, 25 bp, Homo sapien
gtcatgtcttctgccaagggccaga

SEQ ID NO: 1278970 - DNA, 25 bp, Homo sapien
ggctagctagtttctgtgcatggaa

SEQ ID NO: 1278971 - DNA, 25 bp, Homo sapien
ggctggatgaaagcatggataaagt

SEQ ID NO: 1278972 - DNA, 25 bp, Homo sapien
agaccaggagaaaggctagctagtt

SEQ ID NO: 1278973 - DNA, 25 bp, Homo sapien
gatgagccagatgcggttgcaggcg

SEQ ID NO: 1278974 - DNA, 25 bp, Homo sapien
tcgtgggctgacacggtgagttgca

SEQ ID NO: 1278975 - DNA, 25 bp, Homo sapien
ggaagcccctgggatgtcgtgggct

SEQ ID NO: 1278976 - DNA, 25 bp, Homo sapien
cagatgcggttgcaggcgggctggg

SEQ ID NO: 1278977 - DNA, 25 bp, Homo sapien
gccttgctaaaaaatgcaagacctc

SEQ ID NO: 1278978 - DNA, 25 bp, Homo sapien
tgctaaaaaatgcaagacctctaaa

SEQ ID NO: 1278979 - DNA, 25 bp, Homo sapien
ccttgctaaaaaatgcaagacctct

SEQ ID NO: 1278980 - DNA, 25 bp, Homo sapien
taagccttgctaaaaaatgcaagac

SEQ ID NO: 1278981 - DNA, 25 bp, Homo sapien
ctcaagcggccctgatgcaggtgtg

SEQ ID NO: 1278982 - DNA, 25 bp, Homo sapien
caccaaaacacgaagaccggtagtg

SEQ ID NO: 1278983 - DNA, 25 bp, Homo sapien
cggagactccctttcacggtttgct

SEQ ID NO: 1278984 - DNA, 25 bp, Homo sapien
tctgtgcacttatcagaaattcgat

SEQ ID NO: 1278985 - DNA, 25 bp, Homo sapien
taacaatataccgtagaccgggcag

SEQ ID NO: 1278986 - DNA, 25 bp, Homo sapien
tattggtgtgttccggctgctctaa

SEQ ID NO: 1278987 - DNA, 25 bp, Homo sapien
tctccgctggaaggatatgcccgta

SEQ ID NO: 1278988 - DNA, 25 bp, Homo sapien
gaagttcgaaatcacagtgccagca

SEQ ID NO: 1278989 - DNA, 25 bp, Homo sapien
acaggctcctaaaaaagggcgtgca

SEQ ID NO: 1278990 - DNA, 25 bp, Homo sapien
ggacacaacttttcctagacaagag

SEQ ID NO: 1278991 - DNA, 25 bp, Homo sapien
agggcgtgcaaacccgaggatgaca

SEQ ID NO: 1278992 - DNA, 25 bp, Homo sapien
cctccgaacgccgagatggacatca

SEQ ID NO: 1278993 - DNA, 25 bp, Homo sapien
aacaaggcacaaagggcgggtgctt

SEQ ID NO: 1278994 - DNA, 25 bp, Homo sapien
gctgaaagcaggactgttagttcac

SEQ ID NO: 1278995 - DNA, 25 bp, Homo sapien
gcgggtgcttccaaaggatcccttg

SEQ ID NO: 1278996 - DNA, 25 bp, Homo sapien
tccaatgcaaactctggtgtatcca

SEQ ID NO: 1278997 - DNA, 25 bp, Homo sapien
gctacggagacaaccctagtggcac

SEQ ID NO: 1278998 - DNA, 25 bp, Homo sapien
aaccccagtggccagctatagaaat

SEQ ID NO: 1278999 - DNA, 25 bp, Homo sapien
gattactgttcactgccaaccccag

SEQ ID NO: 1279000 - DNA, 25 bp, Homo sapien
ctggctctgacccagccttgcagaa

SEQ ID NO: 1279001 - DNA, 25 bp, Homo sapien
actggctccactctggcatggccca

SEQ ID NO: 1279002 - DNA, 25 bp, Homo sapien
gttcactggctccactctggcatgg

SEQ ID NO: 1279003 - DNA, 25 bp, Homo sapien
gagctgagtgttcactggctccact

SEQ ID NO: 1279004 - DNA, 25 bp, Homo sapien
cagtaccccatgaaggtagtttggc

SEQ ID NO: 1279005 - DNA, 25 bp, Homo sapien
catttgcccaactgtgggaggaacc

SEQ ID NO: 1279006 - DNA, 25 bp, Homo sapien
tcaaggagagatcggtcagtacccc

SEQ ID NO: 1279007 - DNA, 25 bp, Homo sapien
ccagaaactagaagccgcaggcatc

SEQ ID NO: 1279008 - DNA, 25 bp, Homo sapien
tgctgatgctaagatgctgccccga

SEQ ID NO: 1279009 - DNA, 25 bp, Homo sapien
gatggccaaaatcaccgcttccagg

SEQ ID NO: 1279010 - DNA, 25 bp, Homo sapien
ccgatgacagtcttgcagcaatgat

SEQ ID NO: 1279011 - DNA, 25 bp, Homo sapien
tcaccccgcgacagcaatgctgatg

SEQ ID NO: 1279012 - DNA, 25 bp, Homo sapien
gggatcccgccagcagttcagacag

SEQ ID NO: 1279013 - DNA, 25 bp, Homo sapien
aacgagatggccactctggtccgag

SEQ ID NO: 1279014 - DNA, 25 bp, Homo sapien
tgcatgccatgaacaggcacatggg

SEQ ID NO: 1279015 - DNA, 25 bp, Homo sapien
gaggcttcaagtcaatctaggggct

SEQ ID NO: 1279016 - DNA, 25 bp, Homo sapien
accatcaattcacacctggatttcc

SEQ ID NO: 1279017 - DNA, 25 bp, Homo sapien
aatgctgagatttatgatgcgggag

SEQ ID NO: 1279018 - DNA, 25 bp, Homo sapien
agctttcccttcctcgtcgtctcct

SEQ ID NO: 1279019 - DNA, 25 bp, Homo sapien
tcaaaacacttgtgcgcgctctctg

SEQ ID NO: 1279020 - DNA, 25 bp, Homo sapien
aggctagccccttccgagacacagg

SEQ ID NO: 1279021 - DNA, 25 bp, Homo sapien
ccaaggcctcgggtttcgaccagat

SEQ ID NO: 1279022 - DNA, 25 bp, Homo sapien
ccccttccgagacacagggctgaga

SEQ ID NO: 1279023 - DNA, 25 bp, Homo sapien
ggtttcgaccagatggcggcttcct

SEQ ID NO: 1279024 - DNA, 25 bp, Homo sapien
tccaggcccacagtactcgttgtag

SEQ ID NO: 1279025 - DNA, 25 bp, Homo sapien
catgtgctcatcatgggccaggatg

SEQ ID NO: 1279026 - DNA, 25 bp, Homo sapien
ttgcaggcatagatcttgacaggct

SEQ ID NO: 1279027 - DNA, 25 bp, Homo sapien
gtcgttcttgtagcggatgccatgc

SEQ ID NO: 1279028 - DNA, 25 bp, Homo sapien
ctggaggtggttctctgtgaactgc

SEQ ID NO: 1279029 - DNA, 25 bp, Homo sapien
ccaaagctgagcaccatcccctgca

SEQ ID NO: 1279030 - DNA, 25 bp, Homo sapien
gcaccatcccctgcaggatgcctgg

SEQ ID NO: 1279031 - DNA, 25 bp, Homo sapien
tgtgaactgcagccccccaaagctg

SEQ ID NO: 1279032 - DNA, 25 bp, Homo sapien
tgcaggatctgctggacggaggaca

SEQ ID NO: 1279033 - DNA, 25 bp, Homo sapien
gccacaggttctcggcgtgcatggt

SEQ ID NO: 1279034 - DNA, 25 bp, Homo sapien
tcttcatagttgagcgtcgactcca

SEQ ID NO: 1279035 - DNA, 25 bp, Homo sapien
taatagagcgtcaggttcacggtga

SEQ ID NO: 1279036 - DNA, 25 bp, Homo sapien
ggagccacttggaggcggttcacca

SEQ ID NO: 1279037 - DNA, 25 bp, Homo sapien
tgcaccaacccagtgggcgtaggcg

SEQ ID NO: 1279038 - DNA, 25 bp, Homo sapien
tcatccagctgcgtcttgggagcca

SEQ ID NO: 1279039 - DNA, 25 bp, Homo sapien
tggtctccgaccttctccagggtac

SEQ ID NO: 1279040 - DNA, 25 bp, Homo sapien
ctgcaggtagacgtggggtcggccc

SEQ ID NO: 1279041 - DNA, 25 bp, Homo sapien
ttgcagcagcacgcagtcgcggccg

SEQ ID NO: 1279042 - DNA, 25 bp, Homo sapien
cggaccccgcggcaaggccagagac

SEQ ID NO: 1279043 - DNA, 25 bp, Homo sapien
aggccagagacggaggcgggcccgg

SEQ ID NO: 1279044 - DNA, 25 bp, Homo sapien
cagtcgcggccggaccccgcggcaa

SEQ ID NO: 1279045 - DNA, 25 bp, Homo sapien
acagccgattggcagccacgtccag

SEQ ID NO: 1279046 - DNA, 25 bp, Homo sapien
aagggcacaaagtccggcgccacgg

SEQ ID NO: 1279047 - DNA, 25 bp, Homo sapien
ccgggagtcacccacagccgattgg

SEQ ID NO: 1279048 - DNA, 25 bp, Homo sapien
cagcttcagccagcgcgctcagcgg

SEQ ID NO: 1279049 - DNA, 25 bp, Homo sapien
gcgggcccagctgctcgacagcagt

SEQ ID NO: 1279050 - DNA, 25 bp, Homo sapien
ggcggcgggcccagctgctcgacag

SEQ ID NO: 1279051 - DNA, 25 bp, Homo sapien
agctgctcgacagcagtcccggcag

SEQ ID NO: 1279052 - DNA, 25 bp, Homo sapien
cagctgctcgacagcagtcccggca

SEQ ID NO: 1279053 - DNA, 25 bp, Homo sapien
gccaggcgcgggcaagggtgcgagg

SEQ ID NO: 1279054 - DNA, 25 bp, Homo sapien
gcgcgggcaagggtgcgagggcggc

SEQ ID NO: 1279055 - DNA, 25 bp, Homo sapien
ggcaagggtgcgagggcggccgccg

SEQ ID NO: 1279056 - DNA, 25 bp, Homo sapien
gcaagggtgcgagggcggccgccgg

SEQ ID NO: 1279057 - DNA, 25 bp, Homo sapien
tcggtggcctccagccgtcaaacga

SEQ ID NO: 1279058 - DNA, 25 bp, Homo sapien
tgtagtgactcgtgctctccaacct

SEQ ID NO: 1279059 - DNA, 25 bp, Homo sapien
cctggatcagactccaagggctgcc

SEQ ID NO: 1279060 - DNA, 25 bp, Homo sapien
ggccagaggcggaacacacctttat

SEQ ID NO: 1279061 - DNA, 25 bp, Homo sapien
ttggagccaccaatcaaagagattc

SEQ ID NO: 1279062 - DNA, 25 bp, Homo sapien
tgtctaagctagaccggaggccaag

SEQ ID NO: 1279063 - DNA, 25 bp, Homo sapien
tgtgtgaaaatatgaggcctcccct

SEQ ID NO: 1279064 - DNA, 25 bp, Homo sapien
gaggtatatctctgctcccagggaa

SEQ ID NO: 1279065 - DNA, 25 bp, Homo sapien
tgatccaaaggtctgctcacgtagc

SEQ ID NO: 1279066 - DNA, 25 bp, Homo sapien
gaactgaagcttgtattatagccat

SEQ ID NO: 1279067 - DNA, 25 bp, Homo sapien
gtatatttgcaaccagtctcaagag

SEQ ID NO: 1279068 - DNA, 25 bp, Homo sapien
tgcagaactgaagcttgtattatag

SEQ ID NO: 1279069 - DNA, 25 bp, Homo sapien
taagcatacaattcactagtaggta

SEQ ID NO: 1279070 - DNA, 25 bp, Homo sapien
ttaatacacgtgttcttaacaattg

SEQ ID NO: 1279071 - DNA, 25 bp, Homo sapien
ttgttcatgaaaatttcgtaagaca

SEQ ID NO: 1279072 - DNA, 25 bp, Homo sapien
tacagtgcatgcatgttaggcaagc

SEQ ID NO: 1279073 - DNA, 25 bp, Homo sapien
aacaattgtgcttgtattgttcatg

SEQ ID NO: 1279074 - DNA, 25 bp, Homo sapien
taaaatccgttaatgagggccaggc

SEQ ID NO: 1279075 - DNA, 25 bp, Homo sapien
gatgatttggtttacccctgtcacc

SEQ ID NO: 1279076 - DNA, 25 bp, Homo sapien
ccaggcaatctggaaggataggaaa

SEQ ID NO: 1279077 - DNA, 25 bp, Homo sapien
ggtattgatgtcaccacagagctgg

SEQ ID NO: 1279078 - DNA, 25 bp, Homo sapien
ccctgctgcattagtgcatcttcag

SEQ ID NO: 1279079 - DNA, 25 bp, Homo sapien
agtgccggtgctcagtttggtttct

SEQ ID NO: 1279080 - DNA, 25 bp, Homo sapien
gagaataactggttcttactggtga

SEQ ID NO: 1279081 - DNA, 25 bp, Homo sapien
aggaattaatacagaacaggctcag

SEQ ID NO: 1279082 - DNA, 25 bp, Homo sapien
tcttggctcaagactataagctgcg

SEQ ID NO: 1279083 - DNA, 25 bp, Homo sapien
cattctgggaagatttggactccga

SEQ ID NO: 1279084 - DNA, 25 bp, Homo sapien
gcggcaagaccgactgaaatttatt

SEQ ID NO: 1279085 - DNA, 25 bp, Homo sapien
gatcatgtgggcgtttgatcagcca

SEQ ID NO: 1279086 - DNA, 25 bp, Homo sapien
caccaaggtgttgactgtgtgagaa

SEQ ID NO: 1279087 - DNA, 25 bp, Homo sapien
aaatgagttggtagcctctgtgcac

SEQ ID NO: 1279088 - DNA, 25 bp, Homo sapien
tgtcctgttcacatacctgcttgta

SEQ ID NO: 1279089 - DNA, 25 bp, Homo sapien
cctgtgtggcacaagttggatcgct

SEQ ID NO: 1279090 - DNA, 25 bp, Homo sapien
gggccacttcacagcatgtcaggga

SEQ ID NO: 1279091 - DNA, 25 bp, Homo sapien
gagcttcttcaatacgtaaaattaa

SEQ ID NO: 1279092 - DNA, 25 bp, Homo sapien
actgtcacacaattccaatggattt

SEQ ID NO: 1279093 - DNA, 25 bp, Homo sapien
ttcccggcgtgtgccgggcctgaat

SEQ ID NO: 1279094 - DNA, 25 bp, Homo sapien
tatgttcatttgctggagcgcaaga

SEQ ID NO: 1279095 - DNA, 25 bp, Homo sapien
tgaaagaagtatggccaaaagcact

SEQ ID NO: 1279096 - DNA, 25 bp, Homo sapien
gacgtgctgacacagtgagttttct

SEQ ID NO: 1279097 - DNA, 25 bp, Homo sapien
gcactttaatgctgctgacattgtt

SEQ ID NO: 1279098 - DNA, 25 bp, Homo sapien
gttattcccagtcaaggccagcctc

SEQ ID NO: 1279099 - DNA, 25 bp, Homo sapien
cccgggtgatgagccatagtttgaa

SEQ ID NO: 1279100 - DNA, 25 bp, Homo sapien
tgtccactggcgaatctgagaggct

SEQ ID NO: 1279101 - DNA, 25 bp, Homo sapien
attgttcacgacagcatcatcccgg

SEQ ID NO: 1279102 - DNA, 25 bp, Homo sapien
gcctgagacgtcgtgcccggcctca

SEQ ID NO: 1279103 - DNA, 25 bp, Homo sapien
cataatccatgcattcctgccaagg

SEQ ID NO: 1279104 - DNA, 25 bp, Homo sapien
ccatgcattcctgccaaggatcagc

SEQ ID NO: 1279105 - DNA, 25 bp, Homo sapien
tgcataatccatgcattcctgccaa

SEQ ID NO: 1279106 - DNA, 25 bp, Homo sapien
tgcattcctgccaaggatcagccat

SEQ ID NO: 1279107 - DNA, 25 bp, Homo sapien
tcggtgcctggtgttatcaccctcg

SEQ ID NO: 1279108 - DNA, 25 bp, Homo sapien
tcggagggcttcctgctagctcggt

SEQ ID NO: 1279109 - DNA, 25 bp, Homo sapien
cctggtgttatcaccctcggctctt

SEQ ID NO: 1279110 - DNA, 25 bp, Homo sapien
gcttcctgctagctcggtgcctggt

SEQ ID NO: 1279111 - DNA, 25 bp, Homo sapien
ctgtgagtatacaattgcgataact

SEQ ID NO: 1279112 - DNA, 25 bp, Homo sapien
actgtgagtatacaattgcgataac

SEQ ID NO: 1279113 - DNA, 25 bp, Homo sapien
tgtgagtatacaattgcgataactc

SEQ ID NO: 1279114 - DNA, 25 bp, Homo sapien
gactgtgagtatacaattgcgataa

SEQ ID NO: 1279115 - DNA, 25 bp, Homo sapien
cctggtttcaaggaggtcaccatat

SEQ ID NO: 1279116 - DNA, 25 bp, Homo sapien
aggtgagacaactggcgagcaccac

SEQ ID NO: 1279117 - DNA, 25 bp, Homo sapien
atagggcaccaaagccccgaactgg

SEQ ID NO: 1279118 - DNA, 25 bp, Homo sapien
ggcaacctggtttcaaggaggtcac

SEQ ID NO: 1279119 - DNA, 25 bp, Homo sapien
caggtctgcttgacagaccacacag

SEQ ID NO: 1279120 - DNA, 25 bp, Homo sapien
caagcgttcttgctcctataggcac

SEQ ID NO: 1279121 - DNA, 25 bp, Homo sapien
taggcacattagacactgcagcaag

SEQ ID NO: 1279122 - DNA, 25 bp, Homo sapien
gcagggatgtgttcctttcgtccaa

SEQ ID NO: 1279123 - DNA, 25 bp, Homo sapien
tcttggaacacccctagaccagccc

SEQ ID NO: 1279124 - DNA, 25 bp, Homo sapien
agaaggtgagtctgacgtccgccat

SEQ ID NO: 1279125 - DNA, 25 bp, Homo sapien
cagaaggtgagtctgacgtccgcca

SEQ ID NO: 1279126 - DNA, 25 bp, Homo sapien
tgttcttggaacacccctagaccag

SEQ ID NO: 1279127 - DNA, 25 bp, Homo sapien
gtatatgtgctatcgaagcgaacac

SEQ ID NO: 1279128 - DNA, 25 bp, Homo sapien
gaccgtttcatgaatttccgtatca

SEQ ID NO: 1279129 - DNA, 25 bp, Homo sapien
tgaatttccgtatcatccttatgca

SEQ ID NO: 1279130 - DNA, 25 bp, Homo sapien
atggaccgtttcatgaatttccgta

SEQ ID NO: 1279131 - DNA, 25 bp, Homo sapien
agaccctcgggtggtcactgtcaag

SEQ ID NO: 1279132 - DNA, 25 bp, Homo sapien
tccagatggcgggaaggtgaggaag

SEQ ID NO: 1279133 - DNA, 25 bp, Homo sapien
gtagacgagaggagaccctcgggtg

SEQ ID NO: 1279134 - DNA, 25 bp, Homo sapien
actgtcaagtccagatggcgggaag

SEQ ID NO: 1279135 - DNA, 25 bp, Homo sapien
gggattttgcatttgatctaactcc

SEQ ID NO: 1279136 - DNA, 25 bp, Homo sapien
cacaggtatggtccggctgagacca

SEQ ID NO: 1279137 - DNA, 25 bp, Homo sapien
aacttctagactcgtctcccacagg

SEQ ID NO: 1279138 - DNA, 25 bp, Homo sapien
gctcaccccacaacttctagactcg

SEQ ID NO: 1279139 - DNA, 25 bp, Homo sapien
cagggccagacttctccgggcagcg

SEQ ID NO: 1279140 - DNA, 25 bp, Homo sapien
ggccagacttctccgggcagcggca

SEQ ID NO: 1279141 - DNA, 25 bp, Homo sapien
tcacagggccagacttctccgggca

SEQ ID NO: 1279142 - DNA, 25 bp, Homo sapien
ggcagcggcagacgccccggccctt

SEQ ID NO: 1279143 - DNA, 25 bp, Homo sapien
ctccatccggccgaatcagggtgct

SEQ ID NO: 1279144 - DNA, 25 bp, Homo sapien
ctctccatccggccgaatcagggtg

SEQ ID NO: 1279145 - DNA, 25 bp, Homo sapien
catccggccgaatcagggtgctgac

SEQ ID NO: 1279146 - DNA, 25 bp, Homo sapien
tccatccggccgaatcagggtgctg

SEQ ID NO: 1279147 - DNA, 25 bp, Homo sapien
catgccatagagctttgtcacagcc

SEQ ID NO: 1279148 - DNA, 25 bp, Homo sapien
ccatgccatagagctttgtcacagc

SEQ ID NO: 1279149 - DNA, 25 bp, Homo sapien
ttgatagcagagtggtcgagcttgt

SEQ ID NO: 1279150 - DNA, 25 bp, Homo sapien
gaacttgatagcagagtggtcgagc

SEQ ID NO: 1279151 - DNA, 25 bp, Homo sapien
gggaacttgatagcagagtggtcga

SEQ ID NO: 1279152 - DNA, 25 bp, Homo sapien
acttgatagcagagtggtcgagctt

SEQ ID NO: 1279153 - DNA, 25 bp, Homo sapien
ccctccattgacccaggtgtgatgg

SEQ ID NO: 1279154 - DNA, 25 bp, Homo sapien
agggaagcataagcagccagagccc

SEQ ID NO: 1279155 - DNA, 25 bp, Homo sapien
gccagagccccccaggtgtgcccca

SEQ ID NO: 1279156 - DNA, 25 bp, Homo sapien
tggcaggagggaagcataagcagcc

SEQ ID NO: 1279157 - DNA, 25 bp, Homo sapien
agaagagtcaggcagccctttaggc

SEQ ID NO: 1279158 - DNA, 25 bp, Homo sapien
agaaagccccacatcgcaccagggg

SEQ ID NO: 1279159 - DNA, 25 bp, Homo sapien
gaacatgccggaagcttcactgctc

SEQ ID NO: 1279160 - DNA, 25 bp, Homo sapien
ctgctgcttcctgaacatgccggaa

SEQ ID NO: 1279161 - DNA, 25 bp, Homo sapien
ctgctgcaattctggaaccccttcc

SEQ ID NO: 1279162 - DNA, 25 bp, Homo sapien
gctgcaattctggaaccccttcctc

SEQ ID NO: 1279163 - DNA, 25 bp, Homo sapien
gcaattctggaaccccttcctccat

SEQ ID NO: 1279164 - DNA, 25 bp, Homo sapien
tgcaattctggaaccccttcctcca

SEQ ID NO: 1279165 - DNA, 25 bp, Homo sapien
ctctggaggaagtgatagtttctga

SEQ ID NO: 1279166 - DNA, 25 bp, Homo sapien
ttgcgagaggtggttacaccagaac

SEQ ID NO: 1279167 - DNA, 25 bp, Homo sapien
ttactcatcgggcagccacgtgctc

SEQ ID NO: 1279168 - DNA, 25 bp, Homo sapien
agccgtggccttgcgagaggtggtt

SEQ ID NO: 1279169 - DNA, 25 bp, Homo sapien
gcacacgcctgccaggcagggcagt

SEQ ID NO: 1279170 - DNA, 25 bp, Homo sapien
ctggaaggcacacgcctgccaggca

SEQ ID NO: 1279171 - DNA, 25 bp, Homo sapien
tgtaaggcacgctggaaggcacacg

SEQ ID NO: 1279172 - DNA, 25 bp, Homo sapien
ccaggcagggcagtctggcgcccat

SEQ ID NO: 1279173 - DNA, 25 bp, Homo sapien
tagtgcctacatgccaatgtctgcc

SEQ ID NO: 1279174 - DNA, 25 bp, Homo sapien
taaacctctcctgagacccgactgt

SEQ ID NO: 1279175 - DNA, 25 bp, Homo sapien
accaaatacagagggcatatcctca

SEQ ID NO: 1279176 - DNA, 25 bp, Homo sapien
tgtttccgctcagtcaccaaataca

SEQ ID NO: 1279177 - DNA, 25 bp, Homo sapien
agaatgtagcgattcagggtgtgca

SEQ ID NO: 1279178 - DNA, 25 bp, Homo sapien
tatgatcatgagtctgtggtagaca

SEQ ID NO: 1279179 - DNA, 25 bp, Homo sapien
gtgagtagttatgatcatgagtctg

SEQ ID NO: 1279180 - DNA, 25 bp, Homo sapien
ctgtggtagacatcgccccatcctt

SEQ ID NO: 1279181 - DNA, 25 bp, Homo sapien
ccttggggcacatgtctaggagcag

SEQ ID NO: 1279182 - DNA, 25 bp, Homo sapien
gtctaggagcaggatctcgatctgg

SEQ ID NO: 1279183 - DNA, 25 bp, Homo sapien
agctgctccgtctggcatacagtag

SEQ ID NO: 1279184 - DNA, 25 bp, Homo sapien
cacatgtctaggagcaggatctcga

SEQ ID NO: 1279185 - DNA, 25 bp, Homo sapien
caattactaagagaggcgagggccg

SEQ ID NO: 1279186 - DNA, 25 bp, Homo sapien
tatgctaatagtctgtagacgtacc

SEQ ID NO: 1279187 - DNA, 25 bp, Homo sapien
gcgagggccgtgtaagcaactaata

SEQ ID NO: 1279188 - DNA, 25 bp, Homo sapien
ctaataccggagtaagtgttatgct

SEQ ID NO: 1279189 - DNA, 25 bp, Homo sapien
ccaagcaggaggggatacgagggag

SEQ ID NO: 1279190 - DNA, 25 bp, Homo sapien
caagcaggaggggatacgagggagc

SEQ ID NO: 1279191 - DNA, 25 bp, Homo sapien
gcaggaggggatacgagggagccat

SEQ ID NO: 1279192 - DNA, 25 bp, Homo sapien
cttgggccaagcaggaggggatacg

SEQ ID NO: 1279193 - DNA, 25 bp, Homo sapien
gcatctagcctgtctttcctgtggg

SEQ ID NO: 1279194 - DNA, 25 bp, Homo sapien
gcctagggctttgggccttgatcac

SEQ ID NO: 1279195 - DNA, 25 bp, Homo sapien
ccactgtggcgtgtagtgatgtcac

SEQ ID NO: 1279196 - DNA, 25 bp, Homo sapien
ttcctgtgggctgtgacaagccact

SEQ ID NO: 1279197 - DNA, 25 bp, Homo sapien
ctaagtcagcgccccttctacaagg

SEQ ID NO: 1279198 - DNA, 25 bp, Homo sapien
agcgccccttctacaaggccggtgt

SEQ ID NO: 1279199 - DNA, 25 bp, Homo sapien
tcagcgccccttctacaaggccggt

SEQ ID NO: 1279200 - DNA, 25 bp, Homo sapien
ccttctacaaggccggtgtccagca

SEQ ID NO: 1279201 - DNA, 25 bp, Homo sapien
agaagtcgcctgctcgagctgccct

SEQ ID NO: 1279202 - DNA, 25 bp, Homo sapien
cagaagtcgcctgctcgagctgccc

SEQ ID NO: 1279203 - DNA, 25 bp, Homo sapien
tcagaagtcgcctgctcgagctgcc

SEQ ID NO: 1279204 - DNA, 25 bp, Homo sapien
aagtcgcctgctcgagctgccctcc

SEQ ID NO: 1279205 - DNA, 25 bp, Homo sapien
cgtccattgcggctcttgagagccc

SEQ ID NO: 1279206 - DNA, 25 bp, Homo sapien
tggccaggagccctcgtccattgcg

SEQ ID NO: 1279207 - DNA, 25 bp, Homo sapien
ttgagagcccaaacttggccacggc

SEQ ID NO: 1279208 - DNA, 25 bp, Homo sapien
cagctgcctgccgttagtggccagg

SEQ ID NO: 1279209 - DNA, 25 bp, Homo sapien
ggaggccggatgatcagagtgtgtt

SEQ ID NO: 1279210 - DNA, 25 bp, Homo sapien
cttgctcaatccaggaggccggatg

SEQ ID NO: 1279211 - DNA, 25 bp, Homo sapien
ctcaatccaggaggccggatgatca

SEQ ID NO: 1279212 - DNA, 25 bp, Homo sapien
tgctcaatccaggaggccggatgat

SEQ ID NO: 1279213 - DNA, 25 bp, Homo sapien
gccctgcttgtcactcgctataggt

SEQ ID NO: 1279214 - DNA, 25 bp, Homo sapien
aaactctgggcagtcctgactccca

SEQ ID NO: 1279215 - DNA, 25 bp, Homo sapien
aaacgctcagcaggcccaaactctg

SEQ ID NO: 1279216 - DNA, 25 bp, Homo sapien
tataggtgcagccaaacgctcagca

SEQ ID NO: 1279217 - DNA, 25 bp, Homo sapien
cagctgaagtccaggataggtccat

SEQ ID NO: 1279218 - DNA, 25 bp, Homo sapien
ggtgctgggtgtcgtgactggtgtc

SEQ ID NO: 1279219 - DNA, 25 bp, Homo sapien
cttgctgacagctgaagtccaggat

SEQ ID NO: 1279220 - DNA, 25 bp, Homo sapien
tgctctgactggcttgctgacagct

SEQ ID NO: 1279221 - DNA, 25 bp, Homo sapien
ggatcctgtgttttgaatgaggctc

SEQ ID NO: 1279222 - DNA, 25 bp, Homo sapien
gctcctcagtactcggctctactgg

SEQ ID NO: 1279223 - DNA, 25 bp, Homo sapien
cagcccaaggaataggactcagcct

SEQ ID NO: 1279224 - DNA, 25 bp, Homo sapien
gacctcgtgattcggtgaccacctc

SEQ ID NO: 1279225 - DNA, 25 bp, Homo sapien
gaacggggtccttcaagttagctca

SEQ ID NO: 1279226 - DNA, 25 bp, Homo sapien
gacaggacagtgcttcagcctgagg

SEQ ID NO: 1279227 - DNA, 25 bp, Homo sapien
caagttagctcaggaggcttggaaa

SEQ ID NO: 1279228 - DNA, 25 bp, Homo sapien
ccccagcatccttttctgcagaggg

SEQ ID NO: 1279229 - DNA, 25 bp, Homo sapien
ccagtgtagccttgcccggattctg

SEQ ID NO: 1279230 - DNA, 25 bp, Homo sapien
ggaaaccagtgtagccttgcccgga

SEQ ID NO: 1279231 - DNA, 25 bp, Homo sapien
ctcctggaaaggctcagtctcagga

SEQ ID NO: 1279232 - DNA, 25 bp, Homo sapien
gtcggtaagttgaatggcctgcctt

SEQ ID NO: 1279233 - DNA, 25 bp, Homo sapien
tcatgagtacaaggcttgccacttc

SEQ ID NO: 1279234 - DNA, 25 bp, Homo sapien
ctgagctgtttctcagccaccacat

SEQ ID NO: 1279235 - DNA, 25 bp, Homo sapien
atgagtacaaggcttgccacttctc

SEQ ID NO: 1279236 - DNA, 25 bp, Homo sapien
gagtacaaggcttgccacttctcca

SEQ ID NO: 1279237 - DNA, 25 bp, Homo sapien
gtgaccctatgtagggccccaatca

SEQ ID NO: 1279238 - DNA, 25 bp, Homo sapien
cagggaacttaaacgtgaccctatg

SEQ ID NO: 1279239 - DNA, 25 bp, Homo sapien
tgaccctatgtagggccccaatcac

SEQ ID NO: 1279240 - DNA, 25 bp, Homo sapien
acgtgaccctatgtagggccccaat

SEQ ID NO: 1279241 - DNA, 25 bp, Homo sapien
caaaggcaacttgcatgcctgtctg

SEQ ID NO: 1279242 - DNA, 25 bp, Homo sapien
ccaaaggcaacttgcatgcctgtct

SEQ ID NO: 1279243 - DNA, 25 bp, Homo sapien
tcctcgataactcggcgctcggctg

SEQ ID NO: 1279244 - DNA, 25 bp, Homo sapien
ggggcgcctcctcgataactcggcg

SEQ ID NO: 1279245 - DNA, 25 bp, Homo sapien
taactcggcgctcggctggccaggc

SEQ ID NO: 1279246 - DNA, 25 bp, Homo sapien
cagggggcgcctcctcgataactcg

SEQ ID NO: 1279247 - DNA, 25 bp, Homo sapien
gtcgggtcggggccggcctgagcgc

SEQ ID NO: 1279248 - DNA, 25 bp, Homo sapien
gcgtcggccgctcgattggtcgggt

SEQ ID NO: 1279249 - DNA, 25 bp, Homo sapien
tcggccgctcgattggtcgggtcgg

SEQ ID NO: 1279250 - DNA, 25 bp, Homo sapien
gcgcgtcggccgctcgattggtcgg

SEQ ID NO: 1279251 - DNA, 25 bp, Homo sapien
cagagataatatacctccagagggt

SEQ ID NO: 1279252 - DNA, 25 bp, Homo sapien
tacaggcctagacttggtaaatgca

SEQ ID NO: 1279253 - DNA, 25 bp, Homo sapien
catttaaagcccctagcctgctggc

SEQ ID NO: 1279254 - DNA, 25 bp, Homo sapien
tttggcatgggaattcgaaaactgc

SEQ ID NO: 1279255 - DNA, 25 bp, Homo sapien
tattctctagacgagaggtctgaag

SEQ ID NO: 1279256 - DNA, 25 bp, Homo sapien
gctctgagggagaaaccgtcccatg

SEQ ID NO: 1279257 - DNA, 25 bp, Homo sapien
ggatttgataaccagggcagcccta

SEQ ID NO: 1279258 - DNA, 25 bp, Homo sapien
tctagtggctgctgacggtcattga

SEQ ID NO: 1279259 - DNA, 25 bp, Homo sapien
cgcacacatccagtgttccagttgt

SEQ ID NO: 1279260 - DNA, 25 bp, Homo sapien
gatatcaggccttttgtacggtcac

SEQ ID NO: 1279261 - DNA, 25 bp, Homo sapien
ccatatcctcaggttccatatccat

SEQ ID NO: 1279262 - DNA, 25 bp, Homo sapien
tggattccaccaacagaggatcgga

SEQ ID NO: 1279263 - DNA, 25 bp, Homo sapien
gggatgtcgattgcactttactggg

SEQ ID NO: 1279264 - DNA, 25 bp, Homo sapien
gatttgcctcagatggagttacagg

SEQ ID NO: 1279265 - DNA, 25 bp, Homo sapien
gagatttgttgcaagacagcatgga

SEQ ID NO: 1279266 - DNA, 25 bp, Homo sapien
tacaggtacgatttcggcagggaga

SEQ ID NO: 1279267 - DNA, 25 bp, Homo sapien
cccttggatgattttcttaaaggca

SEQ ID NO: 1279268 - DNA, 25 bp, Homo sapien
aggcacacacaaagacatagaagaa

SEQ ID NO: 1279269 - DNA, 25 bp, Homo sapien
tcctgagtagctgcacgtcaccatg

SEQ ID NO: 1279270 - DNA, 25 bp, Homo sapien
cccagcccttggatgattttcttaa

SEQ ID NO: 1279271 - DNA, 25 bp, Homo sapien
ctgctgcaatggagaaagtttggtc

SEQ ID NO: 1279272 - DNA, 25 bp, Homo sapien
ctaagatccttgctatgctaaatga

SEQ ID NO: 1279273 - DNA, 25 bp, Homo sapien
aaagtgctacttcagcgaacacatg

SEQ ID NO: 1279274 - DNA, 25 bp, Homo sapien
gcaaagcagccttactgctgcaatg

SEQ ID NO: 1279275 - DNA, 25 bp, Homo sapien
gctgacagcttaacagaaagtcttc

SEQ ID NO: 1279276 - DNA, 25 bp, Homo sapien
tagattaccgtttgaggcatggaaa

SEQ ID NO: 1279277 - DNA, 25 bp, Homo sapien
ctaaaatgccataccgtgttatcgg

SEQ ID NO: 1279278 - DNA, 25 bp, Homo sapien
tatcggtagaatcgtgctgacagct

SEQ ID NO: 1279279 - DNA, 25 bp, Homo sapien
ttattttgattgctaggcagccttg

SEQ ID NO: 1279280 - DNA, 25 bp, Homo sapien
tgctggttattttgattgctaggca

SEQ ID NO: 1279281 - DNA, 25 bp, Homo sapien
tggttattttgattgctaggcagcc

SEQ ID NO: 1279282 - DNA, 25 bp, Homo sapien
ttttgattgctaggcagccttgtcc

SEQ ID NO: 1279283 - DNA, 25 bp, Homo sapien
tttttgaaaactacatgttcagaga

SEQ ID NO: 1279284 - DNA, 25 bp, Homo sapien
ttttttgaaaactacatgttcagag

SEQ ID NO: 1279285 - DNA, 25 bp, Homo sapien
tagatgatttcttggtacaaacagc

SEQ ID NO: 1279286 - DNA, 25 bp, Homo sapien
gttaagctctattctgccaatcagg

SEQ ID NO: 1279287 - DNA, 25 bp, Homo sapien
ggatctgaatccaagtccagctaat

SEQ ID NO: 1279288 - DNA, 25 bp, Homo sapien
taggaacagggttgaaacactgcac

SEQ ID NO: 1279289 - DNA, 25 bp, Homo sapien
ttctcgtgttaggttggttgtggct

SEQ ID NO: 1279290 - DNA, 25 bp, Homo sapien
cattctcgtgttaggttggttgtgg

SEQ ID NO: 1279291 - DNA, 25 bp, Homo sapien
tcattctcgtgttaggttggttgtg

SEQ ID NO: 1279292 - DNA, 25 bp, Homo sapien
cgtcattctcgtgttaggttggttg

SEQ ID NO: 1279293 - DNA, 25 bp, Homo sapien
taggagcatggttggttttgcctgc

SEQ ID NO: 1279294 - DNA, 25 bp, Homo sapien
ccatatccccctatatttgtatctc

SEQ ID NO: 1279295 - DNA, 25 bp, Homo sapien
cctaggagcatggttggttttgcct

SEQ ID NO: 1279296 - DNA, 25 bp, Homo sapien
ttccatatccccctatatttgtatc

SEQ ID NO: 1279297 - DNA, 25 bp, Homo sapien
tataacttcgacagtggaaggtgtg

SEQ ID NO: 1279298 - DNA, 25 bp, Homo sapien
cttgttggcactgtaaccaagccag

SEQ ID NO: 1279299 - DNA, 25 bp, Homo sapien
agcggtttcatatctggccttggaa

SEQ ID NO: 1279300 - DNA, 25 bp, Homo sapien
caggcgccctggattttgcatcaga

SEQ ID NO: 1279301 - DNA, 25 bp, Homo sapien
tctgctcccatctgactggttgttg

SEQ ID NO: 1279302 - DNA, 25 bp, Homo sapien
caggccttcagagctacttgctgcc

SEQ ID NO: 1279303 - DNA, 25 bp, Homo sapien
cactaaaaagccaattgggagctct

SEQ ID NO: 1279304 - DNA, 25 bp, Homo sapien
aaggcttacatttcagcgccacgtg

SEQ ID NO: 1279305 - DNA, 25 bp, Homo sapien
catctgttgtctgccgagactagga

SEQ ID NO: 1279306 - DNA, 25 bp, Homo sapien
tctgggttcgagcagagttcagcca

SEQ ID NO: 1279307 - DNA, 25 bp, Homo sapien
tgaagagcaggtgaccccaaactat

SEQ ID NO: 1279308 - DNA, 25 bp, Homo sapien
ctaggacaaccgagaatgatggagt

SEQ ID NO: 1279309 - DNA, 25 bp, Homo sapien
ggcgtgtaatacagctcgagtcttg

SEQ ID NO: 1279310 - DNA, 25 bp, Homo sapien
tttaaccagcacgacgaaaaggaga

SEQ ID NO: 1279311 - DNA, 25 bp, Homo sapien
ggcccaagcctgaccgacagttgaa

SEQ ID NO: 1279312 - DNA, 25 bp, Homo sapien
gaatgcggcttcagggttctgctcc

SEQ ID NO: 1279313 - DNA, 25 bp, Homo sapien
catgtaatagaaccagctgccattc

SEQ ID NO: 1279314 - DNA, 25 bp, Homo sapien
gctgccattcagaacttgcccatct

SEQ ID NO: 1279315 - DNA, 25 bp, Homo sapien
tcagaacttgcccatctgaggtcat

SEQ ID NO: 1279316 - DNA, 25 bp, Homo sapien
tctcacactgcatgtaatagaacca

SEQ ID NO: 1279317 - DNA, 25 bp, Homo sapien
catttttgccgcagaatgctagcaa

SEQ ID NO: 1279318 - DNA, 25 bp, Homo sapien
gcatgaaagtgctctataacctgaa

SEQ ID NO: 1279319 - DNA, 25 bp, Homo sapien
gatattattcctagttgacacggta

SEQ ID NO: 1279320 - DNA, 25 bp, Homo sapien
ttctcaactgtgtgccatagcctgg

SEQ ID NO: 1279321 - DNA, 25 bp, Homo sapien
tgactcagtggatcagtggatgcgt

SEQ ID NO: 1279322 - DNA, 25 bp, Homo sapien
tctacaaccttgtcacatgtagctg

SEQ ID NO: 1279323 - DNA, 25 bp, Homo sapien
ggtgtttataactcatgacccaaat

SEQ ID NO: 1279324 - DNA, 25 bp, Homo sapien
gaaggaagggagctttagcacaagt

SEQ ID NO: 1279325 - DNA, 25 bp, Homo sapien
cactgggtgagttttagtttgtgtg

SEQ ID NO: 1279326 - DNA, 25 bp, Homo sapien
gcttggttgcctttgctgaactcca

SEQ ID NO: 1279327 - DNA, 25 bp, Homo sapien
tagtggattgcagaatggaaacttg

SEQ ID NO: 1279328 - DNA, 25 bp, Homo sapien
gaaacttggcttttgcggcactggg

SEQ ID NO: 1279329 - DNA, 25 bp, Homo sapien
gtgggtgctcatcgcaatgttctga

SEQ ID NO: 1279330 - DNA, 25 bp, Homo sapien
gagtaaattgggtaaggagatatcc

SEQ ID NO: 1279331 - DNA, 25 bp, Homo sapien
caaatcccaagagtgtcttgctgct

SEQ ID NO: 1279332 - DNA, 25 bp, Homo sapien
gggcctcaaaataccatagtagctg

SEQ ID NO: 1279333 - DNA, 25 bp, Homo sapien
tttatcttgcgtgtccccagcagcg

SEQ ID NO: 1279334 - DNA, 25 bp, Homo sapien
gatgggtacgaagtgatagttcatt

SEQ ID NO: 1279335 - DNA, 25 bp, Homo sapien
cattgttactttatcttgcgtgtcc

SEQ ID NO: 1279336 - DNA, 25 bp, Homo sapien
tgtgatgggtacgaagtgatagttc

SEQ ID NO: 1279337 - DNA, 25 bp, Homo sapien
taactggttgggatcggtgagttgt

SEQ ID NO: 1279338 - DNA, 25 bp, Homo sapien
tctgttaactggttgggatcggtga

SEQ ID NO: 1279339 - DNA, 25 bp, Homo sapien
ggttgggatcggtgagttgtaagca

SEQ ID NO: 1279340 - DNA, 25 bp, Homo sapien
tgttaactggttgggatcggtgagt

SEQ ID NO: 1279341 - DNA, 25 bp, Homo sapien
catagtcttatctcccgcctgaatt

SEQ ID NO: 1279342 - DNA, 25 bp, Homo sapien
tccaaatgttggagagccgcagcat

SEQ ID NO: 1279343 - DNA, 25 bp, Homo sapien
tgttggcccgaccttggaaagctac

SEQ ID NO: 1279344 - DNA, 25 bp, Homo sapien
tatcatctgtatatgggcaggtctc

SEQ ID NO: 1279345 - DNA, 25 bp, Homo sapien
aagccctcttcacaggcatagacct

SEQ ID NO: 1279346 - DNA, 25 bp, Homo sapien
gggtgcccatatatagaagccctct

SEQ ID NO: 1279347 - DNA, 25 bp, Homo sapien
ggttcttatcacagacctgcttccc

SEQ ID NO: 1279348 - DNA, 25 bp, Homo sapien
tagacctctgggttcttatcacaga

SEQ ID NO: 1279349 - DNA, 25 bp, Homo sapien
agtgaggacctaaataagtttagcg

SEQ ID NO: 1279350 - DNA, 25 bp, Homo sapien
ctgtcctcaacctatattttaattt

SEQ ID NO: 1279351 - DNA, 25 bp, Homo sapien
gagatgaacactgacagttgcctct

SEQ ID NO: 1279352 - DNA, 25 bp, Homo sapien
tctttagggctctgcttagcacctc

SEQ ID NO: 1279353 - DNA, 25 bp, Homo sapien
gagacaaagcggcttcaacccatgg

SEQ ID NO: 1279354 - DNA, 25 bp, Homo sapien
cctaggtagacagtgggtgctccat

SEQ ID NO: 1279355 - DNA, 25 bp, Homo sapien
catctctactaggtcattttggccg

SEQ ID NO: 1279356 - DNA, 25 bp, Homo sapien
tcaaatgggactcggtctgtagcac

SEQ ID NO: 1279357 - DNA, 25 bp, Homo sapien
gggaccttgaactgaccagttctct

SEQ ID NO: 1279358 - DNA, 25 bp, Homo sapien
ctgcccacggaagatttgaacaaag

SEQ ID NO: 1279359 - DNA, 25 bp, Homo sapien
caactgcccacggaagatttgaaca

SEQ ID NO: 1279360 - DNA, 25 bp, Homo sapien
atggagttttatggttgggactggc

SEQ ID NO: 1279361 - DNA, 25 bp, Homo sapien
gttcaaccagtttgtgcaagctgag

SEQ ID NO: 1279362 - DNA, 25 bp, Homo sapien
cagttatacccatcagtcctgtgca

SEQ ID NO: 1279363 - DNA, 25 bp, Homo sapien
actgctgaggctggttagacttgag

SEQ ID NO: 1279364 - DNA, 25 bp, Homo sapien
gcaattgacaataaactctacagaa

SEQ ID NO: 1279365 - DNA, 25 bp, Homo sapien
aggtgtaggttcctgagaatttgtg

SEQ ID NO: 1279366 - DNA, 25 bp, Homo sapien
tcctgagaatttgtggatctcctcg

SEQ ID NO: 1279367 - DNA, 25 bp, Homo sapien
tatgtccgccctttgaaagtgttca

SEQ ID NO: 1279368 - DNA, 25 bp, Homo sapien
gatctcctcgagtgcagcctgtgga

SEQ ID NO: 1279369 - DNA, 25 bp, Homo sapien
aagaaaagaagatagcgatggttag

SEQ ID NO: 1279370 - DNA, 25 bp, Homo sapien
gaaaagaagatagcgatggttagtg

SEQ ID NO: 1279371 - DNA, 25 bp, Homo sapien
aaagaagatagcgatggttagtggg

SEQ ID NO: 1279372 - DNA, 25 bp, Homo sapien
agaagatagcgatggttagtggggc

SEQ ID NO: 1279373 - DNA, 25 bp, Homo sapien
ggaagagctttcaagtaagtggata

SEQ ID NO: 1279374 - DNA, 25 bp, Homo sapien
ggggaagagctttcaagtaagtgga

SEQ ID NO: 1279375 - DNA, 25 bp, Homo sapien
ggtggccatgtgagacggggcagca

SEQ ID NO: 1279376 - DNA, 25 bp, Homo sapien
tggtggccatgtgagacggggcagc

SEQ ID NO: 1279377 - DNA, 25 bp, Homo sapien
caaagacttgttcttattcggtcta

SEQ ID NO: 1279378 - DNA, 25 bp, Homo sapien
caatggcttaatctgtctgtgctcc

SEQ ID NO: 1279379 - DNA, 25 bp, Homo sapien
tcccttcatacaacacactttcaaa

SEQ ID NO: 1279380 - DNA, 25 bp, Homo sapien
caaatgatggttaggtgccactaag

SEQ ID NO: 1279381 - DNA, 25 bp, Homo sapien
cagctcagagatccatcgatcccaa

SEQ ID NO: 1279382 - DNA, 25 bp, Homo sapien
aggaatcaggttcgatttgggtgtc

SEQ ID NO: 1279383 - DNA, 25 bp, Homo sapien
atgacggtgtggatctgaggaatca

SEQ ID NO: 1279384 - DNA, 25 bp, Homo sapien
cccctgattccacaaagatgacggt

SEQ ID NO: 1279385 - DNA, 25 bp, Homo sapien
ctcgtacaaccggagttccgacgct

SEQ ID NO: 1279386 - DNA, 25 bp, Homo sapien
agcaagccctggtgtagtccccacc

SEQ ID NO: 1279387 - DNA, 25 bp, Homo sapien
ttcaggcttctcctcgtacaaccgg

SEQ ID NO: 1279388 - DNA, 25 bp, Homo sapien
cccgtttacttgtcaagcctgtggg

SEQ ID NO: 1279389 - DNA, 25 bp, Homo sapien
aggccctcacatgggcccggcacag

SEQ ID NO: 1279390 - DNA, 25 bp, Homo sapien
ccctcaggctgtttggtgactcaaa

SEQ ID NO: 1279391 - DNA, 25 bp, Homo sapien
gtatttcatctctgatccccaggcc

SEQ ID NO: 1279392 - DNA, 25 bp, Homo sapien
gtgactcaaactgaagggtcctggc

SEQ ID NO: 1279393 - DNA, 25 bp, Homo sapien
gggccaccgtctccggcttcagtgg

SEQ ID NO: 1279394 - DNA, 25 bp, Homo sapien
cttttcaagataacgagggcatgca

SEQ ID NO: 1279395 - DNA, 25 bp, Homo sapien
cttccactgtcctccgggccaccgt

SEQ ID NO: 1279396 - DNA, 25 bp, Homo sapien
acgagggcatgcattgtccatggga

SEQ ID NO: 1279397 - DNA, 25 bp, Homo sapien
tcgaggcctgcttggaatactccct

SEQ ID NO: 1279398 - DNA, 25 bp, Homo sapien
aggctgacatgtctgggtcaccctt

SEQ ID NO: 1279399 - DNA, 25 bp, Homo sapien
tcctgtctgagagattcgaggcctg

SEQ ID NO: 1279400 - DNA, 25 bp, Homo sapien
gcttatctggaagtctttatgaggc

SEQ ID NO: 1279401 - DNA, 25 bp, Homo sapien
gggtgatgaatcacccaggtttgat

SEQ ID NO: 1279402 - DNA, 25 bp, Homo sapien
gcctcagagggtacatgaatcttac

SEQ ID NO: 1279403 - DNA, 25 bp, Homo sapien
ttgtgatccgctctggcaccaggaa

SEQ ID NO: 1279404 - DNA, 25 bp, Homo sapien
tcctttgtcatcacgatgatgattc

SEQ ID NO: 1279405 - DNA, 25 bp, Homo sapien
tcagagctctttctgcagttggctg

SEQ ID NO: 1279406 - DNA, 25 bp, Homo sapien
ctctttctgcagttggctgactgaa

SEQ ID NO: 1279407 - DNA, 25 bp, Homo sapien
tttctgcagttggctgactgaatgg

SEQ ID NO: 1279408 - DNA, 25 bp, Homo sapien
gagctctttctgcagttggctgact

SEQ ID NO: 1279409 - DNA, 25 bp, Homo sapien
ggcacacgatgtggccattctgcag

SEQ ID NO: 1279410 - DNA, 25 bp, Homo sapien
tgcagctccagcatacgtggcagga

SEQ ID NO: 1279411 - DNA, 25 bp, Homo sapien
ggctctccatgaaggcgaaggctga

SEQ ID NO: 1279412 - DNA, 25 bp, Homo sapien
cgaaggctgacgctttggatgtgca

SEQ ID NO: 1279413 - DNA, 25 bp, Homo sapien
tgggacttgaggagggcatcatcat

SEQ ID NO: 1279414 - DNA, 25 bp, Homo sapien
tcatcactgtccattaggctcttcc

SEQ ID NO: 1279415 - DNA, 25 bp, Homo sapien
tcccatggaccacggcggcattgtt

SEQ ID NO: 1279416 - DNA, 25 bp, Homo sapien
gatgtgttgggacttgaggagggca

SEQ ID NO: 1279417 - DNA, 25 bp, Homo sapien
ggcgagagggagccacggggccatg

SEQ ID NO: 1279418 - DNA, 25 bp, Homo sapien
gcgagagggagccacggggccatga

SEQ ID NO: 1279419 - DNA, 25 bp, Homo sapien
cgagagggagccacggggccatgag

SEQ ID NO: 1279420 - DNA, 25 bp, Homo sapien
gaagagaactgcgtctctgagcgcc

SEQ ID NO: 1279421 - DNA, 25 bp, Homo sapien
tctctgagcgccagtcttgatttgt

SEQ ID NO: 1279422 - DNA, 25 bp, Homo sapien
gggctaatgccgcaccaggactgtt

SEQ ID NO: 1279423 - DNA, 25 bp, Homo sapien
acctggccgtaccaccagcagccac

SEQ ID NO: 1279424 - DNA, 25 bp, Homo sapien
tatttagcccaaacagatgactgga

SEQ ID NO: 1279425 - DNA, 25 bp, Homo sapien
cacacggtctacatttccaagggaa

SEQ ID NO: 1279426 - DNA, 25 bp, Homo sapien
tccaagggaacaacagatgattacg

SEQ ID NO: 1279427 - DNA, 25 bp, Homo sapien
attaccacgtgccagacagtcaggg

SEQ ID NO: 1279428 - DNA, 25 bp, Homo sapien
gaatgttctctttgcccggaattag

SEQ ID NO: 1279429 - DNA, 25 bp, Homo sapien
cccggaattagcctgtggtcagctg

SEQ ID NO: 1279430 - DNA, 25 bp, Homo sapien
ggccagcttcatgggagagtcccca

SEQ ID NO: 1279431 - DNA, 25 bp, Homo sapien
caaaggtgccccgggcaaagccatt

SEQ ID NO: 1279432 - DNA, 25 bp, Homo sapien
ctcccggacggccttggccgtctgg

SEQ ID NO: 1279433 - DNA, 25 bp, Homo sapien
ggacggccttggccgtctggtacac

SEQ ID NO: 1279434 - DNA, 25 bp, Homo sapien
cggacggccttggccgtctggtaca

SEQ ID NO: 1279435 - DNA, 25 bp, Homo sapien
tctcccggacggccttggccgtctg

SEQ ID NO: 1279436 - DNA, 25 bp, Homo sapien
cagatgaagtaatggcactcagtgc

SEQ ID NO: 1279437 - DNA, 25 bp, Homo sapien
gatctcctccgtcgtctccttcagg

SEQ ID NO: 1279438 - DNA, 25 bp, Homo sapien
cagtgcccatctgccggatctcctc

SEQ ID NO: 1279439 - DNA, 25 bp, Homo sapien
aggcatttctcagtccggccccaga

SEQ ID NO: 1279440 - DNA, 25 bp, Homo sapien
gatgacagggggaccaagagcccta

SEQ ID NO: 1279441 - DNA, 25 bp, Homo sapien
accaagagccctaactaagaaccag

SEQ ID NO: 1279442 - DNA, 25 bp, Homo sapien
tgtcactggggtcagtgaggcctct

SEQ ID NO: 1279443 - DNA, 25 bp, Homo sapien
taagagggcctggagtcggatgaca

SEQ ID NO: 1279444 - DNA, 25 bp, Homo sapien
tacagatggcggctccgatgacatc

SEQ ID NO: 1279445 - DNA, 25 bp, Homo sapien
gttacacggtatagagaaaagtcac

SEQ ID NO: 1279446 - DNA, 25 bp, Homo sapien
gatgacatcagacccagatccaact

SEQ ID NO: 1279447 - DNA, 25 bp, Homo sapien
tggtaaccgtttatccgctgctcac

SEQ ID NO: 1279448 - DNA, 25 bp, Homo sapien
cttctggggaatctgcgtcactgac

SEQ ID NO: 1279449 - DNA, 25 bp, Homo sapien
ccttctggggaatctgcgtcactga

SEQ ID NO: 1279450 - DNA, 25 bp, Homo sapien
ggtaactggcagataccgctctgca

SEQ ID NO: 1279451 - DNA, 25 bp, Homo sapien
aactggcagataccgctctgcaggc

SEQ ID NO: 1279452 - DNA, 25 bp, Homo sapien
caggtaactggcagataccgctctg

SEQ ID NO: 1279453 - DNA, 25 bp, Homo sapien
taactggcagataccgctctgcagg

SEQ ID NO: 1279454 - DNA, 25 bp, Homo sapien
gggtcccacccaaggccatcatgag

SEQ ID NO: 1279455 - DNA, 25 bp, Homo sapien
acaagggtcccacccaaggccatca

SEQ ID NO: 1279456 - DNA, 25 bp, Homo sapien
aagggtcccacccaaggccatcatg

SEQ ID NO: 1279457 - DNA, 25 bp, Homo sapien
agggtcccacccaaggccatcatga

SEQ ID NO: 1279458 - DNA, 25 bp, Homo sapien
atcacagctgactgtcgtttgcttc

SEQ ID NO: 1279459 - DNA, 25 bp, Homo sapien
tcaacaggctacacagagatgggtg

SEQ ID NO: 1279460 - DNA, 25 bp, Homo sapien
cagctgactgtcgtttgcttcttta

SEQ ID NO: 1279461 - DNA, 25 bp, Homo sapien
ccaggtcactggaagtcaacaggct

SEQ ID NO: 1279462 - DNA, 25 bp, Homo sapien
gttgcccggaagaccccatctggtc

SEQ ID NO: 1279463 - DNA, 25 bp, Homo sapien
ttctacgtccccaagcctgagaagg

SEQ ID NO: 1279464 - DNA, 25 bp, Homo sapien
ggagcaagcagatatcattccaggc

SEQ ID NO: 1279465 - DNA, 25 bp, Homo sapien
taccctaggcacagccttgactggg

SEQ ID NO: 1279466 - DNA, 25 bp, Homo sapien
gcagggcctacgagccacacgcgct

SEQ ID NO: 1279467 - DNA, 25 bp, Homo sapien
gaacccggagctgtaaatgagatgc

SEQ ID NO: 1279468 - DNA, 25 bp, Homo sapien
ctgtggctgaacccggagctgtaaa

SEQ ID NO: 1279469 - DNA, 25 bp, Homo sapien
gctgaacccggagctgtaaatgaga

SEQ ID NO: 1279470 - DNA, 25 bp, Homo sapien
gtctgctggccgctgcgtgaaccgt

SEQ ID NO: 1279471 - DNA, 25 bp, Homo sapien
ggatgctgcaaacgccaccagacat

SEQ ID NO: 1279472 - DNA, 25 bp, Homo sapien
gcaaacgccaccagacattgcaaca

SEQ ID NO: 1279473 - DNA, 25 bp, Homo sapien
gacattgcaacacgcagccagtctg

SEQ ID NO: 1279474 - DNA, 25 bp, Homo sapien
gacacacgcgtttagagcaagccct

SEQ ID NO: 1279475 - DNA, 25 bp, Homo sapien
tcactgtgattacgggtggctgccc

SEQ ID NO: 1279476 - DNA, 25 bp, Homo sapien
tcagacctatgagacacagctagcc

SEQ ID NO: 1279477 - DNA, 25 bp, Homo sapien
ttttagagacaaggcactgagaccc

SEQ ID NO: 1279478 - DNA, 25 bp, Homo sapien
ggcaaaagcccaagcgaactagagg

SEQ ID NO: 1279479 - DNA, 25 bp, Homo sapien
cacagcaccttggagtaaagagcca

SEQ ID NO: 1279480 - DNA, 25 bp, Homo sapien
ccaaaggtggaggtgtcattaaaga

SEQ ID NO: 1279481 - DNA, 25 bp, Homo sapien
tccaagaagggtccatcgaggagag

SEQ ID NO: 1279482 - DNA, 25 bp, Homo sapien
cttgaacctcagctggcgctgaggt

SEQ ID NO: 1279483 - DNA, 25 bp, Homo sapien
ctcagctggcgctgaggtccgcatg

SEQ ID NO: 1279484 - DNA, 25 bp, Homo sapien
cttcttggggcctctagggtgctcc

SEQ ID NO: 1279485 - DNA, 25 bp, Homo sapien
tagggtgctccggaacccagtttga

SEQ ID NO: 1279486 - DNA, 25 bp, Homo sapien
tgtcacaggataccagggcgttccc

SEQ ID NO: 1279487 - DNA, 25 bp, Homo sapien
tagtccaagccttcttaacccagag

SEQ ID NO: 1279488 - DNA, 25 bp, Homo sapien
caggagaccgtgttccctaggaggc

SEQ ID NO: 1279489 - DNA, 25 bp, Homo sapien
gctgtttcagtgtggacaagatcat

SEQ ID NO: 1279490 - DNA, 25 bp, Homo sapien
gactcattcactgcttatcaccgct

SEQ ID NO: 1279491 - DNA, 25 bp, Homo sapien
tccatgaccctgaatgaggcaggcc

SEQ ID NO: 1279492 - DNA, 25 bp, Homo sapien
ggttcagaatctgccctcagcgacg

SEQ ID NO: 1279493 - DNA, 25 bp, Homo sapien
tgcccgcatcctgttgactcattca

SEQ ID NO: 1279494 - DNA, 25 bp, Homo sapien
gtgcccagctgctttcaacaaaaat

SEQ ID NO: 1279495 - DNA, 25 bp, Homo sapien
cagctgctttcaacaaaaattttaa

SEQ ID NO: 1279496 - DNA, 25 bp, Homo sapien
cccagctgctttcaacaaaaatttt

SEQ ID NO: 1279497 - DNA, 25 bp, Homo sapien
caagtgggatcaagatcttgaagca

SEQ ID NO: 1279498 - DNA, 25 bp, Homo sapien
tgaagacaacggtgagcacagcctt

SEQ ID NO: 1279499 - DNA, 25 bp, Homo sapien
cacatttgggcatgctagtgtctaa

SEQ ID NO: 1279500 - DNA, 25 bp, Homo sapien
taacccggcactttcttgttgagaa

SEQ ID NO: 1279501 - DNA, 25 bp, Homo sapien
aaaatgccagctctcactacatggg

SEQ ID NO: 1279502 - DNA, 25 bp, Homo sapien
gacggcctcggcaaataccaagatg

SEQ ID NO: 1279503 - DNA, 25 bp, Homo sapien
gcttggaagggatctgtgcagccat

SEQ ID NO: 1279504 - DNA, 25 bp, Homo sapien
cgaaatgagaattagcagaagggct

SEQ ID NO: 1279505 - DNA, 25 bp, Homo sapien
aaacaagtgcgcttcatctgaaaag

SEQ ID NO: 1279506 - DNA, 25 bp, Homo sapien
tcagagtctgaggtgtaaactccct

SEQ ID NO: 1279507 - DNA, 25 bp, Homo sapien
ccagccaggtagagcttttgatcag

SEQ ID NO: 1279508 - DNA, 25 bp, Homo sapien
tagtgtgtgccctgaatccaataac

SEQ ID NO: 1279509 - DNA, 25 bp, Homo sapien
tcttcaaggctcagtcgaatgctcc

SEQ ID NO: 1279510 - DNA, 25 bp, Homo sapien
caaagtcctctcattggtgttaggc

SEQ ID NO: 1279511 - DNA, 25 bp, Homo sapien
tctggtctagtactcttgggccacc

SEQ ID NO: 1279512 - DNA, 25 bp, Homo sapien
tgtctagtatcactgcaggctgcgg

SEQ ID NO: 1279513 - DNA, 25 bp, Homo sapien
tgtcatctgtggttccacacagccg

SEQ ID NO: 1279514 - DNA, 25 bp, Homo sapien
ctcattataaagtagctccagaagc

SEQ ID NO: 1279515 - DNA, 25 bp, Homo sapien
agacacatttctaattggccctggc

SEQ ID NO: 1279516 - DNA, 25 bp, Homo sapien
gaatggcactcgaagtttcacaggc

SEQ ID NO: 1279517 - DNA, 25 bp, Homo sapien
taaagtagctccagtaattggtcag

SEQ ID NO: 1279518 - DNA, 25 bp, Homo sapien
tgactgaaccgagcatgaatggcac

SEQ ID NO: 1279519 - DNA, 25 bp, Homo sapien
ccagcccggctagggaagagttaat

SEQ ID NO: 1279520 - DNA, 25 bp, Homo sapien
aatgcaaggtcaagcggctgtccaa

SEQ ID NO: 1279521 - DNA, 25 bp, Homo sapien
tgcggctccatgtcagatcagctgg

SEQ ID NO: 1279522 - DNA, 25 bp, Homo sapien
ttaatccccaaggtatgcggctcca

SEQ ID NO: 1279523 - DNA, 25 bp, Homo sapien
agggctctttatcagtagctgctta

SEQ ID NO: 1279524 - DNA, 25 bp, Homo sapien
gggctctttatcagtagctgcttac

SEQ ID NO: 1279525 - DNA, 25 bp, Homo sapien
tgccaaaaaagacagtccggtgccc

SEQ ID NO: 1279526 - DNA, 25 bp, Homo sapien
cactcaccagggtggcggcaagaaa

SEQ ID NO: 1279527 - DNA, 25 bp, Homo sapien
caaggtgaaaccgactagctcagca

SEQ ID NO: 1279528 - DNA, 25 bp, Homo sapien
ccaaggaaaatacgaggcgccagct

SEQ ID NO: 1279529 - DNA, 25 bp, Homo sapien
aactcgcgggcgagctgacgcccga

SEQ ID NO: 1279530 - DNA, 25 bp, Homo sapien
atgaggacgttctcccgcgacaggt

SEQ ID NO: 1279531 - DNA, 25 bp, Homo sapien
agcaccagtccgacggctgctttca

SEQ ID NO: 1279532 - DNA, 25 bp, Homo sapien
gacaggtcccgcagcttggcgggca

SEQ ID NO: 1279533 - DNA, 25 bp, Homo sapien
tagagggaacatcaccagcgcgccc

SEQ ID NO: 1279534 - DNA, 25 bp, Homo sapien
ctgtagagggaacatcaccagcgcg

SEQ ID NO: 1279535 - DNA, 25 bp, Homo sapien
gcgcgcccagccgtttccacaccat

SEQ ID NO: 1279536 - DNA, 25 bp, Homo sapien
gagggaacatcaccagcgcgcccag

SEQ ID NO: 1279537 - DNA, 25 bp, Homo sapien
tcggtcccgcggtttcaaagtgcaa

SEQ ID NO: 1279538 - DNA, 25 bp, Homo sapien
taaaccgaataaggaggagagaggc

SEQ ID NO: 1279539 - DNA, 25 bp, Homo sapien
ccccgggccgagcaatacaggaatt

SEQ ID NO: 1279540 - DNA, 25 bp, Homo sapien
ccaaatgcaaagcaccgggtgagaa

SEQ ID NO: 1279541 - DNA, 25 bp, Homo sapien
atttcagcccgcgaaagtctcccga

SEQ ID NO: 1279542 - DNA, 25 bp, Homo sapien
aagtgcttggagctcccaatttcag

SEQ ID NO: 1279543 - DNA, 25 bp, Homo sapien
gctcccaatttcagcccgcgaaagt

SEQ ID NO: 1279544 - DNA, 25 bp, Homo sapien
gtctcccgactcattgctattcttg

SEQ ID NO: 1279545 - DNA, 25 bp, Homo sapien
tgatcaccccgagtgtggagcaggc

SEQ ID NO: 1279546 - DNA, 25 bp, Homo sapien
ttgcgtatgccttgatccaaccagg

SEQ ID NO: 1279547 - DNA, 25 bp, Homo sapien
tgtaactcgaacacgctggaaccga

SEQ ID NO: 1279548 - DNA, 25 bp, Homo sapien
gtcatttggtcatcctcggcctcca

SEQ ID NO: 1279549 - DNA, 25 bp, Homo sapien
tcacgatgcttagggggaagccgct

SEQ ID NO: 1279550 - DNA, 25 bp, Homo sapien
ctttgctcggacctcttctgtgttc

SEQ ID NO: 1279551 - DNA, 25 bp, Homo sapien
tgttcacgtagagtggacttttaaa

SEQ ID NO: 1279552 - DNA, 25 bp, Homo sapien
agcctgacccaagtgcctcacgatg

SEQ ID NO: 1279553 - DNA, 25 bp, Homo sapien
ggtaaaggaacctctgctccgagtg

SEQ ID NO: 1279554 - DNA, 25 bp, Homo sapien
gctccgagtgccaataaaatcccca

SEQ ID NO: 1279555 - DNA, 25 bp, Homo sapien
aaggtaaaggaacctctgctccgag

SEQ ID NO: 1279556 - DNA, 25 bp, Homo sapien
ctgctccgagtgccaataaaatccc

SEQ ID NO: 1279557 - DNA, 25 bp, Homo sapien
tgagctagaattaccttgactgaca

SEQ ID NO: 1279558 - DNA, 25 bp, Homo sapien
taaacaaaacgtcctattcgtgcgc

SEQ ID NO: 1279559 - DNA, 25 bp, Homo sapien
gaccggaatgtctcccctgctggag

SEQ ID NO: 1279560 - DNA, 25 bp, Homo sapien
ggtgagtcactaaaaagcagcccca

SEQ ID NO: 1279561 - DNA, 25 bp, Homo sapien
tgcaaagacctagttctggggagag

SEQ ID NO: 1279562 - DNA, 25 bp, Homo sapien
ctgcaaagacctagttctggggaga

SEQ ID NO: 1279563 - DNA, 25 bp, Homo sapien
gaggatcttccttctgggtgaaaag

SEQ ID NO: 1279564 - DNA, 25 bp, Homo sapien
gatcttccttctgggtgaaaagcca

SEQ ID NO: 1279565 - DNA, 25 bp, Homo sapien
gccaggcctgcgaagaagcctggaa

SEQ ID NO: 1279566 - DNA, 25 bp, Homo sapien
ctggtgtccgccaggcctgcgaaga

SEQ ID NO: 1279567 - DNA, 25 bp, Homo sapien
ggcctgcgaagaagcctggaaagat

SEQ ID NO: 1279568 - DNA, 25 bp, Homo sapien
tgtccgccaggcctgcgaagaagcc

SEQ ID NO: 1279569 - DNA, 25 bp, Homo sapien
ctacatggaggcaaatgcagggagc

SEQ ID NO: 1279570 - DNA, 25 bp, Homo sapien
catggaggcaaatgcagggagcatt

SEQ ID NO: 1279571 - DNA, 25 bp, Homo sapien
caaatgcagggagcattggcaaagg

SEQ ID NO: 1279572 - DNA, 25 bp, Homo sapien
aatgcagggagcattggcaaaggca

SEQ ID NO: 1279573 - DNA, 25 bp, Homo sapien
atctttatcagctctaaggctggac

SEQ ID NO: 1279574 - DNA, 25 bp, Homo sapien
tggcagagagtagaagttgagcccc

SEQ ID NO: 1279575 - DNA, 25 bp, Homo sapien
gcctctctattatcaggaaaaggag

SEQ ID NO: 1279576 - DNA, 25 bp, Homo sapien
gatggcacccgagacatacggattg

SEQ ID NO: 1279577 - DNA, 25 bp, Homo sapien
cttattatgaatgaatccagtccag

SEQ ID NO: 1279578 - DNA, 25 bp, Homo sapien
gaggctctaggctaacatccctgac

SEQ ID NO: 1279579 - DNA, 25 bp, Homo sapien
gctctaggctaacatccctgacagc

SEQ ID NO: 1279580 - DNA, 25 bp, Homo sapien
ggctctaggctaacatccctgacag

SEQ ID NO: 1279581 - DNA, 25 bp, Homo sapien
ctgaggctctaggctaacatccctg

SEQ ID NO: 1279582 - DNA, 25 bp, Homo sapien
tgacatacccatccaaataggcagg

SEQ ID NO: 1279583 - DNA, 25 bp, Homo sapien
ccagaagaaagcgtttgacataccc

SEQ ID NO: 1279584 - DNA, 25 bp, Homo sapien
caaagtcccatcgaatccatggcaa

SEQ ID NO: 1279585 - DNA, 25 bp, Homo sapien
gattcccattttcgactctacagga

SEQ ID NO: 1279586 - DNA, 25 bp, Homo sapien
tgtcgccatggtcagggcagttgtc

SEQ ID NO: 1279587 - DNA, 25 bp, Homo sapien
tgacctgtcgccatggtcagggcag

SEQ ID NO: 1279588 - DNA, 25 bp, Homo sapien
atcagcaccataactttcctgcggg

SEQ ID NO: 1279589 - DNA, 25 bp, Homo sapien
cataaaatgacctgtcgccatggtc

SEQ ID NO: 1279590 - DNA, 25 bp, Homo sapien
ctggggagagagagcaagaagttaa

SEQ ID NO: 1279591 - DNA, 25 bp, Homo sapien
ggggagagagagcaagaagttaatt

SEQ ID NO: 1279592 - DNA, 25 bp, Homo sapien
tggggagagagagcaagaagttaat

SEQ ID NO: 1279593 - DNA, 25 bp, Homo sapien
gaaacgtagcgagagacatccatgt

SEQ ID NO: 1279594 - DNA, 25 bp, Homo sapien
tccatgtgggagagaacgagcttct

SEQ ID NO: 1279595 - DNA, 25 bp, Homo sapien
tctgatattgcggaagggcattccc

SEQ ID NO: 1279596 - DNA, 25 bp, Homo sapien
ttggcattgaggaagcacccatggg

SEQ ID NO: 1279597 - DNA, 25 bp, Homo sapien
accccttgggtaagcagtgcatcaa

SEQ ID NO: 1279598 - DNA, 25 bp, Homo sapien
gcatctttatcagaggcctcagagg

SEQ ID NO: 1279599 - DNA, 25 bp, Homo sapien
gcatcaagcccatcgagcacagctt

SEQ ID NO: 1279600 - DNA, 25 bp, Homo sapien
agcccatcgagcacagcttggaagg

SEQ ID NO: 1279601 - DNA, 25 bp, Homo sapien
tctggatgtagtctagaaggtgctc

SEQ ID NO: 1279602 - DNA, 25 bp, Homo sapien
ctggatgtagtctagaaggtgctca

SEQ ID NO: 1279603 - DNA, 25 bp, Homo sapien
gatctggatgtagtctagaaggtgc

SEQ ID NO: 1279604 - DNA, 25 bp, Homo sapien
cagatctggatgtagtctagaaggt

SEQ ID NO: 1279605 - DNA, 25 bp, Homo sapien
caaaaagtatgaacccaggtttgtg

SEQ ID NO: 1279606 - DNA, 25 bp, Homo sapien
tcttaaacatcaataggaggagtca

SEQ ID NO: 1279607 - DNA, 25 bp, Homo sapien
tcctgcttggcattttttgcctaca

SEQ ID NO: 1279608 - DNA, 25 bp, Homo sapien
gagtcaatagttctgatgccacaca

SEQ ID NO: 1279609 - DNA, 25 bp, Homo sapien
tcaggaaactctagggttttctctc

SEQ ID NO: 1279610 - DNA, 25 bp, Homo sapien
tccaaagaaagctttacgcatcacc

SEQ ID NO: 1279611 - DNA, 25 bp, Homo sapien
cagctcaggttaaggaaggtcagga

SEQ ID NO: 1279612 - DNA, 25 bp, Homo sapien
gaaccagttagtgcctggcctaaac

SEQ ID NO: 1279613 - DNA, 25 bp, Homo sapien
agaggggcaggatccatgtccaggc

SEQ ID NO: 1279614 - DNA, 25 bp, Homo sapien
gggcaggatccatgtccaggcctaa

SEQ ID NO: 1279615 - DNA, 25 bp, Homo sapien
ccagaggggcaggatccatgtccag

SEQ ID NO: 1279616 - DNA, 25 bp, Homo sapien
aggatccatgtccaggcctaacttg

SEQ ID NO: 1279617 - DNA, 25 bp, Homo sapien
gtggtccacattaggatatgaatca

SEQ ID NO: 1279618 - DNA, 25 bp, Homo sapien
ctttagctgactgaggcttgggtac

SEQ ID NO: 1279619 - DNA, 25 bp, Homo sapien
ggtggtccacattaggatatgaatc

SEQ ID NO: 1279620 - DNA, 25 bp, Homo sapien
gctctttgatattactgacctttct

SEQ ID NO: 1279621 - DNA, 25 bp, Homo sapien
tgctccaggtgctctttgatattac

SEQ ID NO: 1279622 - DNA, 25 bp, Homo sapien
caggtgctctttgatattactgacc

SEQ ID NO: 1279623 - DNA, 25 bp, Homo sapien
gatattactgacctttcttatataa

SEQ ID NO: 1279624 - DNA, 25 bp, Homo sapien
tataattcaggctcataaccgaagg

SEQ ID NO: 1279625 - DNA, 25 bp, Homo sapien
caggcacaggaatggccaatccaag

SEQ ID NO: 1279626 - DNA, 25 bp, Homo sapien
tgccattggccgctcacgtataatt

SEQ ID NO: 1279627 - DNA, 25 bp, Homo sapien
tagtacaggcacaggaatggccaat

SEQ ID NO: 1279628 - DNA, 25 bp, Homo sapien
ccttcagcacagcttgcaaggtctc

SEQ ID NO: 1279629 - DNA, 25 bp, Homo sapien
cccttcagcacagcttgcaaggtct

SEQ ID NO: 1279630 - DNA, 25 bp, Homo sapien
tagtcaagaactggttcctcagcag

SEQ ID NO: 1279631 - DNA, 25 bp, Homo sapien
gggagacctccctgggcagctcatc

SEQ ID NO: 1279632 - DNA, 25 bp, Homo sapien
gctgaaggcctccatgaacagaggg

SEQ ID NO: 1279633 - DNA, 25 bp, Homo sapien
catccagggtgaagatagtcaagaa

SEQ ID NO: 1279634 - DNA, 25 bp, Homo sapien
aaatttgttgttagacaagctccta

SEQ ID NO: 1279635 - DNA, 25 bp, Homo sapien
caactactaggggtgtcaagggaag

SEQ ID NO: 1279636 - DNA, 25 bp, Homo sapien
cttaggacaactactaggggtgtca

SEQ ID NO: 1279637 - DNA, 25 bp, Homo sapien
ttgttagacaagctcctaggtaaag

SEQ ID NO: 1279638 - DNA, 25 bp, Homo sapien
ggaaaagatcgcctccacatccgat

SEQ ID NO: 1279639 - DNA, 25 bp, Homo sapien
cacgtgctgggaaactgtacattcc

SEQ ID NO: 1279640 - DNA, 25 bp, Homo sapien
tgaggatccatcttgttggtaacgt

SEQ ID NO: 1279641 - DNA, 25 bp, Homo sapien
tctccttatcatattgaacgaaggc

SEQ ID NO: 1279642 - DNA, 25 bp, Homo sapien
aatgcagccaaaccagctcagtctt

SEQ ID NO: 1279643 - DNA, 25 bp, Homo sapien
tctacggggagaaactgactgcggc

SEQ ID NO: 1279644 - DNA, 25 bp, Homo sapien
actgactgcggctcgaggccagaaa

SEQ ID NO: 1279645 - DNA, 25 bp, Homo sapien
cagaaatgcagccaaaccagctcag

SEQ ID NO: 1279646 - DNA, 25 bp, Homo sapien
tgtagtttagacctctggttgtagt

SEQ ID NO: 1279647 - DNA, 25 bp, Homo sapien
tctggttgtagtttagacctctggt

SEQ ID NO: 1279648 - DNA, 25 bp, Homo sapien
tggttgtagtttagacctctggttg

SEQ ID NO: 1279649 - DNA, 25 bp, Homo sapien
agatctggttgtagtttagacctct

SEQ ID NO: 1279650 - DNA, 25 bp, Homo sapien
tgacatacccatccaaataggcagg

SEQ ID NO: 1279651 - DNA, 25 bp, Homo sapien
ccagaagaaagcgtttgacataccc

SEQ ID NO: 1279652 - DNA, 25 bp, Homo sapien
gattcccattttcgactctacagga

SEQ ID NO: 1279653 - DNA, 25 bp, Homo sapien
caaagtcccatcgaatccatggcaa

SEQ ID NO: 1279654 - DNA, 25 bp, Homo sapien
gtggtgaactgggtaacaatctcct

SEQ ID NO: 1279655 - DNA, 25 bp, Homo sapien
tctgatattgcggaagggcattccc

SEQ ID NO: 1279656 - DNA, 25 bp, Homo sapien
ttggcattgaggaagcacccatggg

SEQ ID NO: 1279657 - DNA, 25 bp, Homo sapien
gaaacgtagcgagagacatccatgt

SEQ ID NO: 1279658 - DNA, 25 bp, Homo sapien
ggcatctttatcagaggcctcagag

SEQ ID NO: 1279659 - DNA, 25 bp, Homo sapien
gcatctttatcagaggcctcagagg

SEQ ID NO: 1279660 - DNA, 25 bp, Homo sapien
aggcatctttatcagaggcctcaga

SEQ ID NO: 1279661 - DNA, 25 bp, Homo sapien
agcccatcgagcacagcttggaagg

SEQ ID NO: 1279662 - DNA, 25 bp, Homo sapien
caggagtctgggtggagtccagatg

SEQ ID NO: 1279663 - DNA, 25 bp, Homo sapien
ccttagcaggctccgccctgcaagc

SEQ ID NO: 1279664 - DNA, 25 bp, Homo sapien
gagtctgggtggagtccagatgctc

SEQ ID NO: 1279665 - DNA, 25 bp, Homo sapien
ggccaaagcttggtcccttagcagg

SEQ ID NO: 1279666 - DNA, 25 bp, Homo sapien
gatctggatgtagtctagaaggtgc

SEQ ID NO: 1279667 - DNA, 25 bp, Homo sapien
tctggatgtagtctagaaggtgctc

SEQ ID NO: 1279668 - DNA, 25 bp, Homo sapien
cagatctggatgtagtctagaaggt

SEQ ID NO: 1279669 - DNA, 25 bp, Homo sapien
ctggatgtagtctagaaggtgctca

SEQ ID NO: 1279670 - DNA, 25 bp, Homo sapien
ttgacatgacccttgtagtcaagac

SEQ ID NO: 1279671 - DNA, 25 bp, Homo sapien
gacatgacccttgtagtcaagactc

SEQ ID NO: 1279672 - DNA, 25 bp, Homo sapien
tctcccaattgacatgacccttgta

SEQ ID NO: 1279673 - DNA, 25 bp, Homo sapien
ccaattgacatgacccttgtagtca

SEQ ID NO: 1279674 - DNA, 25 bp, Homo sapien
tccaagtcaggaatgcacggccact

SEQ ID NO: 1279675 - DNA, 25 bp, Homo sapien
ggccactggacgctcacgtacaact

SEQ ID NO: 1279676 - DNA, 25 bp, Homo sapien
tgcacggccactggacgctcacgta

SEQ ID NO: 1279677 - DNA, 25 bp, Homo sapien
tggacgctcacgtacaactcacgct

SEQ ID NO: 1279678 - DNA, 25 bp, Homo sapien
aaccttctgggccaccagtgtatca

SEQ ID NO: 1279679 - DNA, 25 bp, Homo sapien
tctgacaaatctccgaggaaaaact

SEQ ID NO: 1279680 - DNA, 25 bp, Homo sapien
cagtgtatcaagtcccctcaggaca

SEQ ID NO: 1279681 - DNA, 25 bp, Homo sapien
tcattctgacaaatctccgaggaaa

SEQ ID NO: 1279682 - DNA, 25 bp, Homo sapien
cagtttggagggtgctcagacctca

SEQ ID NO: 1279683 - DNA, 25 bp, Homo sapien
actcagtttggagggtgctcagacc

SEQ ID NO: 1279684 - DNA, 25 bp, Homo sapien
cagatctggactcagtttggagggt

SEQ ID NO: 1279685 - DNA, 25 bp, Homo sapien
gactcagtttggagggtgctcagac

SEQ ID NO: 1279686 - DNA, 25 bp, Homo sapien
ctctgagtttgacagcagatgagca

SEQ ID NO: 1279687 - DNA, 25 bp, Homo sapien
gggctctgaaggatgctctgagttt

SEQ ID NO: 1279688 - DNA, 25 bp, Homo sapien
gctctgagtttgacagcagatgagc

SEQ ID NO: 1279689 - DNA, 25 bp, Homo sapien
tctgaaggatgctctgagtttgaca

SEQ ID NO: 1279690 - DNA, 25 bp, Homo sapien
ctcgattgcacacatagcagggcat

SEQ ID NO: 1279691 - DNA, 25 bp, Homo sapien
cactgagcacgtttcagtttaactc

SEQ ID NO: 1279692 - DNA, 25 bp, Homo sapien
ttaactcgattgcacacatagcagg

SEQ ID NO: 1279693 - DNA, 25 bp, Homo sapien
ggtgaagtagaagccgcactgagca

SEQ ID NO: 1279694 - DNA, 25 bp, Homo sapien
gttgactgatactcgggcactggga

SEQ ID NO: 1279695 - DNA, 25 bp, Homo sapien
gacttgggagtctatgatgccacag

SEQ ID NO: 1279696 - DNA, 25 bp, Homo sapien
taaatccaggtactcaagggtggct

SEQ ID NO: 1279697 - DNA, 25 bp, Homo sapien
tcaagtctgattccaaaagcacaca

SEQ ID NO: 1279698 - DNA, 25 bp, Homo sapien
gtggtgaactgggtaacaatctcct

SEQ ID NO: 1279699 - DNA, 25 bp, Homo sapien
gaaacgtagcgagagacatccatgt

SEQ ID NO: 1279700 - DNA, 25 bp, Homo sapien
tctgatattgcggaagggcattccc

SEQ ID NO: 1279701 - DNA, 25 bp, Homo sapien
tccatgtgggagagaacgagcttct

SEQ ID NO: 1279702 - DNA, 25 bp, Homo sapien
agcccatcgagcacagcttggaagg

SEQ ID NO: 1279703 - DNA, 25 bp, Homo sapien
gcatctttatcagaggcctcagagg

SEQ ID NO: 1279704 - DNA, 25 bp, Homo sapien
gaaccccttgggtaagcagtgcatc

SEQ ID NO: 1279705 - DNA, 25 bp, Homo sapien
aggcatctttatcagaggcctcaga

SEQ ID NO: 1279706 - DNA, 25 bp, Homo sapien
agtggccattaagccagcattctgc

SEQ ID NO: 1279707 - DNA, 25 bp, Homo sapien
ctcagtggccattaagccagcattc

SEQ ID NO: 1279708 - DNA, 25 bp, Homo sapien
cagtggccattaagccagcattctg

SEQ ID NO: 1279709 - DNA, 25 bp, Homo sapien
tcagtggccattaagccagcattct

SEQ ID NO: 1279710 - DNA, 25 bp, Homo sapien
tggatctgtccattaggagtgagca

SEQ ID NO: 1279711 - DNA, 25 bp, Homo sapien
tggccaaagatcaggaacggattcc

SEQ ID NO: 1279712 - DNA, 25 bp, Homo sapien
aacggattcctctggatctgtccat

SEQ ID NO: 1279713 - DNA, 25 bp, Homo sapien
gaagccatttcctggcatggccaaa

SEQ ID NO: 1279714 - DNA, 25 bp, Homo sapien
ctaagagcaaagatggaggtccact

SEQ ID NO: 1279715 - DNA, 25 bp, Homo sapien
tccagacgggaaggatacaactcca

SEQ ID NO: 1279716 - DNA, 25 bp, Homo sapien
tgttgtcaagactctccagacggga

SEQ ID NO: 1279717 - DNA, 25 bp, Homo sapien
ggaggtccactttctcagatggcca

SEQ ID NO: 1279718 - DNA, 25 bp, Homo sapien
ggatctgacagtcctttaacgtgag

SEQ ID NO: 1279719 - DNA, 25 bp, Homo sapien
gatctgacagtcctttaacgtgagg

SEQ ID NO: 1279720 - DNA, 25 bp, Homo sapien
aagcatgacagaatataaaggcccc

SEQ ID NO: 1279721 - DNA, 25 bp, Homo sapien
gacagaatataaaggcccccaagag

SEQ ID NO: 1279722 - DNA, 25 bp, Homo sapien
aggtaagcatgacagaatataaagg

SEQ ID NO: 1279723 - DNA, 25 bp, Homo sapien
ctaggtaagcatgacagaatataaa

SEQ ID NO: 1279724 - DNA, 25 bp, Homo sapien
tccaggtctttgatattattgacct

SEQ ID NO: 1279725 - DNA, 25 bp, Homo sapien
gtgctccaggtctttgatattattg

SEQ ID NO: 1279726 - DNA, 25 bp, Homo sapien
ccaggtctttgatattattgacctt

SEQ ID NO: 1279727 - DNA, 25 bp, Homo sapien
caggtgctccaggtctttgatatta

SEQ ID NO: 1279728 - DNA, 25 bp, Homo sapien
aaaggtagctcaggcattcatccag

SEQ ID NO: 1279729 - DNA, 25 bp, Homo sapien
aacatcccgcaaatccagcacttga

SEQ ID NO: 1279730 - DNA, 25 bp, Homo sapien
caacatcccgcaaatccagcacttg

SEQ ID NO: 1279731 - DNA, 25 bp, Homo sapien
tcaacatcccgcaaatccagcactt

SEQ ID NO: 1279732 - DNA, 25 bp, Homo sapien
atcaacatcccgcaaatccagcact

SEQ ID NO: 1279733 - DNA, 25 bp, Homo sapien
ttctgggccagcagtgtatcaagtc

SEQ ID NO: 1279734 - DNA, 25 bp, Homo sapien
tctgggccagcagtgtatcaagtcc

SEQ ID NO: 1279735 - DNA, 25 bp, Homo sapien
ctgggccagcagtgtatcaagtccc

SEQ ID NO: 1279736 - DNA, 25 bp, Homo sapien
taaacagccgtattgctcacgcaaa

SEQ ID NO: 1279737 - DNA, 25 bp, Homo sapien
ctgcagccagcgcaagagtgacgct

SEQ ID NO: 1279738 - DNA, 25 bp, Homo sapien
aaagaagcttatcaagccctgaagc

SEQ ID NO: 1279739 - DNA, 25 bp, Homo sapien
gacgcgcatgaaagtgccattgccc

SEQ ID NO: 1279740 - DNA, 25 bp, Homo sapien
ccatctggccctgaaagtgttcaca

SEQ ID NO: 1279741 - DNA, 25 bp, Homo sapien
ctttggtagccaactcggagatttc

SEQ ID NO: 1279742 - DNA, 25 bp, Homo sapien
agtgagatcactgcctcccagaggt

SEQ ID NO: 1279743 - DNA, 25 bp, Homo sapien
taggaacattgccaacaggaggaac

SEQ ID NO: 1279744 - DNA, 25 bp, Homo sapien
gcggcgtgtagaagctgagccccat

SEQ ID NO: 1279745 - DNA, 25 bp, Homo sapien
aattgtggcggcgtgtagaagctga

SEQ ID NO: 1279746 - DNA, 25 bp, Homo sapien
tgatgaaattgtggcggcgtgtaga

SEQ ID NO: 1279747 - DNA, 25 bp, Homo sapien
cgtgtagaagctgagccccattgca

SEQ ID NO: 1279748 - DNA, 25 bp, Homo sapien
gctcgggtacttggacagatgcttc

SEQ ID NO: 1279749 - DNA, 25 bp, Homo sapien
caagttgggcaaatctgctccggca

SEQ ID NO: 1279750 - DNA, 25 bp, Homo sapien
cactgagggcagtagtcggtacaga

SEQ ID NO: 1279751 - DNA, 25 bp, Homo sapien
ctttagttgaccaatgctcgggtac

SEQ ID NO: 1279752 - DNA, 25 bp, Homo sapien
ctggggagagagagcaggaagttag

SEQ ID NO: 1279753 - DNA, 25 bp, Homo sapien
tggggagagagagcaggaagttagt

SEQ ID NO: 1279754 - DNA, 25 bp, Homo sapien
ggggagagagagcaggaagttagtt

SEQ ID NO: 1279755 - DNA, 25 bp, Homo sapien
gcatttggtaagcacctacgggcca

SEQ ID NO: 1279756 - DNA, 25 bp, Homo sapien
gatattgtggaagagcattcccaac

SEQ ID NO: 1279757 - DNA, 25 bp, Homo sapien
gacgggcagtgtccaattgcaattc

SEQ ID NO: 1279758 - DNA, 25 bp, Homo sapien
tctatgtcagagagaacgagcttcc

SEQ ID NO: 1279759 - DNA, 25 bp, Homo sapien
gtctctgggcaaggccttttcatca

SEQ ID NO: 1279760 - DNA, 25 bp, Homo sapien
ctgggcaaggccttttcatcagaga

SEQ ID NO: 1279761 - DNA, 25 bp, Homo sapien
tctctgggcaaggccttttcatcag

SEQ ID NO: 1279762 - DNA, 25 bp, Homo sapien
tctgggcaaggccttttcatcagag

SEQ ID NO: 1279763 - DNA, 25 bp, Homo sapien
cagggcctcacagtgtctcctgctg

SEQ ID NO: 1279764 - DNA, 25 bp, Homo sapien
ctcacagtgtctcctgctgaaggcc

SEQ ID NO: 1279765 - DNA, 25 bp, Homo sapien
gcttcagggcctcacagtgtctcct

SEQ ID NO: 1279766 - DNA, 25 bp, Homo sapien
gggcctcacagtgtctcctgctgaa

SEQ ID NO: 1279767 - DNA, 25 bp, Homo sapien
caggagtctgggtggagtccggatg

SEQ ID NO: 1279768 - DNA, 25 bp, Homo sapien
gatggccaaggcctcgtccctcagc

SEQ ID NO: 1279769 - DNA, 25 bp, Homo sapien
gaaaaagttccgtgggcagctcctc

SEQ ID NO: 1279770 - DNA, 25 bp, Homo sapien
gtctgggtggagtccggatgctcat

SEQ ID NO: 1279771 - DNA, 25 bp, Homo sapien
catgcaactcggaaagtcttggtca

SEQ ID NO: 1279772 - DNA, 25 bp, Homo sapien
tcatgcaactcggaaagtcttggtc

SEQ ID NO: 1279773 - DNA, 25 bp, Homo sapien
taagtttgggttccaatatgatcaa

SEQ ID NO: 1279774 - DNA, 25 bp, Homo sapien
aacacttgagtacttcacgaaggtc

SEQ ID NO: 1279775 - DNA, 25 bp, Homo sapien
tcacgaaggtcaaggttggtataag

SEQ ID NO: 1279776 - DNA, 25 bp, Homo sapien
tcacataaggaagaagagccaaaac

SEQ ID NO: 1279777 - DNA, 25 bp, Homo sapien
ctaagagcaaagatggaagtccact

SEQ ID NO: 1279778 - DNA, 25 bp, Homo sapien
ggaagtccactttctcagatggcca

SEQ ID NO: 1279779 - DNA, 25 bp, Homo sapien
gcaggggatgggaccaaaaaagatc

SEQ ID NO: 1279780 - DNA, 25 bp, Homo sapien
aaagatggaagtccactttctcaga

SEQ ID NO: 1279781 - DNA, 25 bp, Homo sapien
ggggcaggatacaactccagaccta

SEQ ID NO: 1279782 - DNA, 25 bp, Homo sapien
tcatttccgcgaaagtagaaggtgg

SEQ ID NO: 1279783 - DNA, 25 bp, Homo sapien
cattcgtggaggtctcatttccgcg

SEQ ID NO: 1279784 - DNA, 25 bp, Homo sapien
caggtctttcagagcattcgtggag

SEQ ID NO: 1279785 - DNA, 25 bp, Homo sapien
ggaggtctcatttccgcgaaagtag

SEQ ID NO: 1279786 - DNA, 25 bp, Homo sapien
ggatctgacagtcctttaacgtgag

SEQ ID NO: 1279787 - DNA, 25 bp, Homo sapien
gatctgacagtcctttaacgtgagg

SEQ ID NO: 1279788 - DNA, 25 bp, Homo sapien
tacatataactcatcgtcataaccg

SEQ ID NO: 1279789 - DNA, 25 bp, Homo sapien
taactcatcgtcataaccgaaggct

SEQ ID NO: 1279790 - DNA, 25 bp, Homo sapien
ctgttggccgcttacatataactca

SEQ ID NO: 1279791 - DNA, 25 bp, Homo sapien
tgctgttggccgcttacatataact

SEQ ID NO: 1279792 - DNA, 25 bp, Homo sapien
ttctgggccagcagtgtatcaagtc

SEQ ID NO: 1279793 - DNA, 25 bp, Homo sapien
tctgggccagcagtgtatcaagtcc

SEQ ID NO: 1279794 - DNA, 25 bp, Homo sapien
ctgggccagcagtgtatcaagtccc

SEQ ID NO: 1279795 - DNA, 25 bp, Homo sapien
gcagctcgtccaggatgaagatggt

SEQ ID NO: 1279796 - DNA, 25 bp, Homo sapien
gggactggaggctcattctgacaaa

SEQ ID NO: 1279797 - DNA, 25 bp, Homo sapien
aaatgtctcatgctggaggcctcca

SEQ ID NO: 1279798 - DNA, 25 bp, Homo sapien
gaggcctccatgaacatcagaggga

SEQ ID NO: 1279799 - DNA, 25 bp, Homo sapien
tgggatgcataaagtgacgccggcc

SEQ ID NO: 1279800 - DNA, 25 bp, Homo sapien
tcctgagatgggtttcgaaggttgc

SEQ ID NO: 1279801 - DNA, 25 bp, Homo sapien
cattgtggccatgttccgaagtcca

SEQ ID NO: 1279802 - DNA, 25 bp, Homo sapien
gagagcctaagcaagggcctcatag

SEQ ID NO: 1279803 - DNA, 25 bp, Homo sapien
cagtgtccggtggttctgggattca

SEQ ID NO: 1279804 - DNA, 25 bp, Homo sapien
cattctcattgctttagggtggtaa

SEQ ID NO: 1279805 - DNA, 25 bp, Homo sapien
aatggcatcgattttagggagtccc

SEQ ID NO: 1279806 - DNA, 25 bp, Homo sapien
cagcacgtttatggtgtgaactgag

SEQ ID NO: 1279807 - DNA, 25 bp, Homo sapien
tacaagtgacctgggctccatggtt

SEQ ID NO: 1279808 - DNA, 25 bp, Homo sapien
gaacattaggaagaccagtggcaga

SEQ ID NO: 1279809 - DNA, 25 bp, Homo sapien
actgctgtcttgaaccctctggact

SEQ ID NO: 1279810 - DNA, 25 bp, Homo sapien
tgttgcggactgatcagcactggtc

SEQ ID NO: 1279811 - DNA, 25 bp, Homo sapien
gacttgggagtctatgatgccacag

SEQ ID NO: 1279812 - DNA, 25 bp, Homo sapien
gttgactgatactcgggcactggga

SEQ ID NO: 1279813 - DNA, 25 bp, Homo sapien
tcaagtctgattccaaaagcacaca

SEQ ID NO: 1279814 - DNA, 25 bp, Homo sapien
taaatccaggtactcaagggtggct

SEQ ID NO: 1279815 - DNA, 25 bp, Homo sapien
gaaacgtagcgagagacatccatgt

SEQ ID NO: 1279816 - DNA, 25 bp, Homo sapien
tccatgtgggagagaacgagcttct

SEQ ID NO: 1279817 - DNA, 25 bp, Homo sapien
tctgatattgcggaagggcattccc

SEQ ID NO: 1279818 - DNA, 25 bp, Homo sapien
ttggcattgaggaagcacccatggg

SEQ ID NO: 1279819 - DNA, 25 bp, Homo sapien
agcccatcgagcacagcttggaagg

SEQ ID NO: 1279820 - DNA, 25 bp, Homo sapien
gcatctttatcagaggcctcagagg

SEQ ID NO: 1279821 - DNA, 25 bp, Homo sapien
gaaccccttgggtaagcagtgcatc

SEQ ID NO: 1279822 - DNA, 25 bp, Homo sapien
aggcatctttatcagaggcctcaga

SEQ ID NO: 1279823 - DNA, 25 bp, Homo sapien
tcagtggccattaagccagcattct

SEQ ID NO: 1279824 - DNA, 25 bp, Homo sapien
agtggccattaagccagcattctgc

SEQ ID NO: 1279825 - DNA, 25 bp, Homo sapien
ctcagtggccattaagccagcattc

SEQ ID NO: 1279826 - DNA, 25 bp, Homo sapien
cagtggccattaagccagcattctg

SEQ ID NO: 1279827 - DNA, 25 bp, Homo sapien
ctggatgtagtctagaaggtgctca

SEQ ID NO: 1279828 - DNA, 25 bp, Homo sapien
tctggatgtagtctagaaggtgctc

SEQ ID NO: 1279829 - DNA, 25 bp, Homo sapien
gatctggatgtagtctagaaggtgc

SEQ ID NO: 1279830 - DNA, 25 bp, Homo sapien
cagatctggatgtagtctagaaggt

SEQ ID NO: 1279831 - DNA, 25 bp, Homo sapien
ccaattgacatgacccttgtagtca

SEQ ID NO: 1279832 - DNA, 25 bp, Homo sapien
tctcccaattgacatgacccttgta

SEQ ID NO: 1279833 - DNA, 25 bp, Homo sapien
ttgacatgacccttgtagtcaagac

SEQ ID NO: 1279834 - DNA, 25 bp, Homo sapien
gacatgacccttgtagtcaagactc

SEQ ID NO: 1279835 - DNA, 25 bp, Homo sapien
ggtggtccacattaggatatgaatc

SEQ ID NO: 1279836 - DNA, 25 bp, Homo sapien
ctttagctgactgaggcttgggtac

SEQ ID NO: 1279837 - DNA, 25 bp, Homo sapien
gtggtccacattaggatatgaatca

SEQ ID NO: 1279838 - DNA, 25 bp, Homo sapien
tgctccaggtgctctttgatattac

SEQ ID NO: 1279839 - DNA, 25 bp, Homo sapien
gctccaggtgctctttgatattact

SEQ ID NO: 1279840 - DNA, 25 bp, Homo sapien
attactgatcttttttatataaagc

SEQ ID NO: 1279841 - DNA, 25 bp, Homo sapien
ccaggtgctctttgatattactgat

SEQ ID NO: 1279842 - DNA, 25 bp, Homo sapien
aaaggtagctcaggcattcatccag

SEQ ID NO: 1279843 - DNA, 25 bp, Homo sapien
caacacaggtgcactaggcctcttc

SEQ ID NO: 1279844 - DNA, 25 bp, Homo sapien
actttcccgttttattgagagagca

SEQ ID NO: 1279845 - DNA, 25 bp, Homo sapien
gtacaactcacgctcataaccgaag

SEQ ID NO: 1279846 - DNA, 25 bp, Homo sapien
aaccttctgggccaccagtgtatca

SEQ ID NO: 1279847 - DNA, 25 bp, Homo sapien
tcattctgacaaatctccgaggaaa

SEQ ID NO: 1279848 - DNA, 25 bp, Homo sapien
tctgacaaatctccgaggaaaaact

SEQ ID NO: 1279849 - DNA, 25 bp, Homo sapien
cagtgtatcaagtcccctcaggaca

SEQ ID NO: 1279850 - DNA, 25 bp, Homo sapien
ggtatggtcccatccaatgctgctc

SEQ ID NO: 1279851 - DNA, 25 bp, Homo sapien
gtatggtcccatccaatgctgctca

SEQ ID NO: 1279852 - DNA, 25 bp, Homo sapien
tatggtcccatccaatgctgctcat

SEQ ID NO: 1279853 - DNA, 25 bp, Homo sapien
ctggtatggtcccatccaatgctgc

SEQ ID NO: 1279854 - DNA, 25 bp, Homo sapien
ctctgagtttgacagcagatgagca

SEQ ID NO: 1279855 - DNA, 25 bp, Homo sapien
gggctctgaaggatgctctgagttt

SEQ ID NO: 1279856 - DNA, 25 bp, Homo sapien
tctgaaggatgctctgagtttgaca

SEQ ID NO: 1279857 - DNA, 25 bp, Homo sapien
gctctgagtttgacagcagatgagc

SEQ ID NO: 1279858 - DNA, 25 bp, Homo sapien
ggtgaagtagaagccgcactgagca

SEQ ID NO: 1279859 - DNA, 25 bp, Homo sapien
cactgagcacgtttcagtttaactc

SEQ ID NO: 1279860 - DNA, 25 bp, Homo sapien
ctcgattgcacacatagcagggcat

SEQ ID NO: 1279861 - DNA, 25 bp, Homo sapien
ttaactcgattgcacacatagcagg

SEQ ID NO: 1279862 - DNA, 25 bp, Homo sapien
cagaaacgtggagaaagaacattta

SEQ ID NO: 1279863 - DNA, 25 bp, Homo sapien
tgatagtgaggtcagaaacgtggag

SEQ ID NO: 1279864 - DNA, 25 bp, Homo sapien
gatagtgaggtcagaaacgtggaga

SEQ ID NO: 1279865 - DNA, 25 bp, Homo sapien
cctgttgaggactaaagaagtccag

SEQ ID NO: 1279866 - DNA, 25 bp, Homo sapien
aagacggtcacaaatgcgacctgga

SEQ ID NO: 1279867 - DNA, 25 bp, Homo sapien
gacctggaatgagatcctgttgagg

SEQ ID NO: 1279868 - DNA, 25 bp, Homo sapien
gatcttggaaaagacggtcacaaat

SEQ ID NO: 1279869 - DNA, 25 bp, Homo sapien
tcatcactgtagaactttagcttct

SEQ ID NO: 1279870 - DNA, 25 bp, Homo sapien
atattccttggtaaccatccttgca

SEQ ID NO: 1279871 - DNA, 25 bp, Homo sapien
tctcatcactgtagaactttagctt

SEQ ID NO: 1279872 - DNA, 25 bp, Homo sapien
ttcctttaagttgcatgtggcctgg

SEQ ID NO: 1279873 - DNA, 25 bp, Homo sapien
acctacatagtagattttagtgtcc

SEQ ID NO: 1279874 - DNA, 25 bp, Homo sapien
aaaaatagtttgcacctacatagta

SEQ ID NO: 1279875 - DNA, 25 bp, Homo sapien
gaaaaatagtttgcacctacatagt

SEQ ID NO: 1279876 - DNA, 25 bp, Homo sapien
agaaaaatagtttgcacctacatag

SEQ ID NO: 1279877 - DNA, 25 bp, Homo sapien
tagtggatctgacagccctccaaga

SEQ ID NO: 1279878 - DNA, 25 bp, Homo sapien
tagcagcaaagatggagctccagtt

SEQ ID NO: 1279879 - DNA, 25 bp, Homo sapien
tcctcagacggtgatgagccacagg

SEQ ID NO: 1279880 - DNA, 25 bp, Homo sapien
ttcaagactgatgcggaacagcagc

SEQ ID NO: 1279881 - DNA, 25 bp, Homo sapien
cattcgtgatcactaagccggtgag

SEQ ID NO: 1279882 - DNA, 25 bp, Homo sapien
aatggacaggtttgatgcgctttcc

SEQ ID NO: 1279883 - DNA, 25 bp, Homo sapien
gagacaggatcattcgtgatcacta

SEQ ID NO: 1279884 - DNA, 25 bp, Homo sapien
agccggtgaggacagacgttctatt

SEQ ID NO: 1279885 - DNA, 25 bp, Homo sapien
tcagctgttccaggtgcccactgaa

SEQ ID NO: 1279886 - DNA, 25 bp, Homo sapien
cccactgaagaaggtgatcaatttt

SEQ ID NO: 1279887 - DNA, 25 bp, Homo sapien
ctgatcagctgttccaggtgcccac

SEQ ID NO: 1279888 - DNA, 25 bp, Homo sapien
gttccaggtgcccactgaagaaggt

SEQ ID NO: 1279889 - DNA, 25 bp, Homo sapien
attttaagcaactggaggtgttcca

SEQ ID NO: 1279890 - DNA, 25 bp, Homo sapien
gcaactggaggtgttccagcctgag

SEQ ID NO: 1279891 - DNA, 25 bp, Homo sapien
tttaagcaactggaggtgttccagc

SEQ ID NO: 1279892 - DNA, 25 bp, Homo sapien
taagcaactggaggtgttccagcct

SEQ ID NO: 1279893 - DNA, 25 bp, Homo sapien
gctttcttatcagacgtggccagga

SEQ ID NO: 1279894 - DNA, 25 bp, Homo sapien
gaaaacgagtttgcgaagattcttc

SEQ ID NO: 1279895 - DNA, 25 bp, Homo sapien
tgaccagcttactacagcacaggtg

SEQ ID NO: 1279896 - DNA, 25 bp, Homo sapien
taatcggcgttagataattgaccag

SEQ ID NO: 1279897 - DNA, 25 bp, Homo sapien
tccaaatgaagcgtcttcatcagtg

SEQ ID NO: 1279898 - DNA, 25 bp, Homo sapien
tgtgtaagcagcatatgaagccctt

SEQ ID NO: 1279899 - DNA, 25 bp, Homo sapien
ctggggcgatccttctgtgtaagca

SEQ ID NO: 1279900 - DNA, 25 bp, Homo sapien
cagcaatgcttttaaggtctccaaa

SEQ ID NO: 1279901 - DNA, 25 bp, Homo sapien
caccgtcagagtctggaagtgtctc

SEQ ID NO: 1279902 - DNA, 25 bp, Homo sapien
accgtcagagtctggaagtgtctcc

SEQ ID NO: 1279903 - DNA, 25 bp, Homo sapien
cctgatagatctgcaagaaaaatct

SEQ ID NO: 1279904 - DNA, 25 bp, Homo sapien
tatcactctcatggcaaacacaatc

SEQ ID NO: 1279905 - DNA, 25 bp, Homo sapien
gcttctactggtaccaggaagaatg

SEQ ID NO: 1279906 - DNA, 25 bp, Homo sapien
ctcatggcaaacacaatcatctgct

SEQ ID NO: 1279907 - DNA, 25 bp, Homo sapien
tagaagacaaatccagggaaaatgt

SEQ ID NO: 1279908 - DNA, 25 bp, Homo sapien
tccccgcaagcaaaaattgaactcc

SEQ ID NO: 1279909 - DNA, 25 bp, Homo sapien
agcaaaaattgaactccagttgctc

SEQ ID NO: 1279910 - DNA, 25 bp, Homo sapien
tgggtgacatgccacagcaagggca

SEQ ID NO: 1279911 - DNA, 25 bp, Homo sapien
taggcaggccttccccgcaagcaaa

SEQ ID NO: 1279912 - DNA, 25 bp, Homo sapien
gttaatgccaatgtctccaacgggc

SEQ ID NO: 1279913 - DNA, 25 bp, Homo sapien
tccgaaatgacacgacccctgttgt

SEQ ID NO: 1279914 - DNA, 25 bp, Homo sapien
caagacggatgaagcgcagtgtacc

SEQ ID NO: 1279915 - DNA, 25 bp, Homo sapien
ccatggacgtgtcattgccgtgaaa

SEQ ID NO: 1279916 - DNA, 25 bp, Homo sapien
ctggtccaggtagccttcgaagaag

SEQ ID NO: 1279917 - DNA, 25 bp, Homo sapien
taaccacagccatcggagatgaaga

SEQ ID NO: 1279918 - DNA, 25 bp, Homo sapien
tacacggccagcacatgttccaaat

SEQ ID NO: 1279919 - DNA, 25 bp, Homo sapien
tcaaagcttggcaggtaaccacagc

SEQ ID NO: 1279920 - DNA, 25 bp, Homo sapien
gaatgttcattgaataatttaccac

SEQ ID NO: 1279921 - DNA, 25 bp, Homo sapien
gtactgaacgtcttctgtgctgcac

SEQ ID NO: 1279922 - DNA, 25 bp, Homo sapien
tgtactgaacgtcttctgtgctgca

SEQ ID NO: 1279923 - DNA, 25 bp, Homo sapien
taccaccttagtacagcacaggtgt

SEQ ID NO: 1279924 - DNA, 25 bp, Homo sapien
gaagaagctcagatcttcatccacg

SEQ ID NO: 1279925 - DNA, 25 bp, Homo sapien
gctcagatcttcatccacggatttt

SEQ ID NO: 1279926 - DNA, 25 bp, Homo sapien
tcatccacggatttttccttgaggc

SEQ ID NO: 1279927 - DNA, 25 bp, Homo sapien
ttttccttgaggcaaacatccatga

SEQ ID NO: 1279928 - DNA, 25 bp, Homo sapien
agcgtctgctagtgaaggcctccac

SEQ ID NO: 1279929 - DNA, 25 bp, Homo sapien
gcaagcaggcaatcaatcccatcca

SEQ ID NO: 1279930 - DNA, 25 bp, Homo sapien
tgtaagatctccagatcaggcgtct

SEQ ID NO: 1279931 - DNA, 25 bp, Homo sapien
tcatccaggacggagatggccaagg

SEQ ID NO: 1279932 - DNA, 25 bp, Homo sapien
aatgtgacggtcatggttattcttc

SEQ ID NO: 1279933 - DNA, 25 bp, Homo sapien
tgtgacggtcatggttattcttcat

SEQ ID NO: 1279934 - DNA, 25 bp, Homo sapien
gtgacggtcatggttattcttcatc

SEQ ID NO: 1279935 - DNA, 25 bp, Homo sapien
atgtgacggtcatggttattcttca

SEQ ID NO: 1279936 - DNA, 25 bp, Homo sapien
gacacacatgtattaggacctggga

SEQ ID NO: 1279937 - DNA, 25 bp, Homo sapien
taccaacggtgtaccaaggtcctca

SEQ ID NO: 1279938 - DNA, 25 bp, Homo sapien
caaggaagctatgactctgggttac

SEQ ID NO: 1279939 - DNA, 25 bp, Homo sapien
ctagggatgacccaaaagatgcagc

SEQ ID NO: 1279940 - DNA, 25 bp, Homo sapien
agcaggagctcaccaggtaattatt

SEQ ID NO: 1279941 - DNA, 25 bp, Homo sapien
gcaggagctcaccaggtaattatta

SEQ ID NO: 1279942 - DNA, 25 bp, Homo sapien
gatgtggttgtcacggagatgcccc

SEQ ID NO: 1279943 - DNA, 25 bp, Homo sapien
agagaagatgcgcaatgcctgtttg

SEQ ID NO: 1279944 - DNA, 25 bp, Homo sapien
gctgtagcagagaagatgcgcaatg

SEQ ID NO: 1279945 - DNA, 25 bp, Homo sapien
gctcagtgccagctgtagcagagaa

SEQ ID NO: 1279946 - DNA, 25 bp, Homo sapien
cagctcctaagggtgtgtggagtcc

SEQ ID NO: 1279947 - DNA, 25 bp, Homo sapien
cagcagctcctaagggtgtgtggag

SEQ ID NO: 1279948 - DNA, 25 bp, Homo sapien
agcagcaagaaccccgcagcttccc

SEQ ID NO: 1279949 - DNA, 25 bp, Homo sapien
cccgcagcttccctggtgatcagga

SEQ ID NO: 1279950 - DNA, 25 bp, Homo sapien
taaattacttaacactcaaggccgc

SEQ ID NO: 1279951 - DNA, 25 bp, Homo sapien
tcaaggccgctagaggccactaaaa

SEQ ID NO: 1279952 - DNA, 25 bp, Homo sapien
ccatacaggtgtttcaatagaccac

SEQ ID NO: 1279953 - DNA, 25 bp, Homo sapien
tgagcggtggcaggatattaatgag

SEQ ID NO: 1279954 - DNA, 25 bp, Homo sapien
gctaccgcttaggataaagatcagg

SEQ ID NO: 1279955 - DNA, 25 bp, Homo sapien
gggtccatttcgaccactataacag

SEQ ID NO: 1279956 - DNA, 25 bp, Homo sapien
gatgctgagcagagagaccatcaca

SEQ ID NO: 1279957 - DNA, 25 bp, Homo sapien
gacaccctctgaccagttgttagct

SEQ ID NO: 1279958 - DNA, 25 bp, Homo sapien
gatctgagaggcaggttatgctcca

SEQ ID NO: 1279959 - DNA, 25 bp, Homo sapien
gcttctcggttcatgggcagctgat

SEQ ID NO: 1279960 - DNA, 25 bp, Homo sapien
catgatctcccagtacaggtcagaa

SEQ ID NO: 1279961 - DNA, 25 bp, Homo sapien
gcacacgagtttattagttcccagt

SEQ ID NO: 1279962 - DNA, 25 bp, Homo sapien
tgaacctacactcgctgaagctggc

SEQ ID NO: 1279963 - DNA, 25 bp, Homo sapien
tctgtgagtgacaggctgaacctac

SEQ ID NO: 1279964 - DNA, 25 bp, Homo sapien
tccgacagctcacgcagggatatcc

SEQ ID NO: 1279965 - DNA, 25 bp, Homo sapien
tccgcatctttgttgggtgcgcacc

SEQ ID NO: 1279966 - DNA, 25 bp, Homo sapien
accacttcccaagtcagttctgatt

SEQ ID NO: 1279967 - DNA, 25 bp, Homo sapien
caccacttcccaagtcagttctgat

SEQ ID NO: 1279968 - DNA, 25 bp, Homo sapien
ccacttcccaagtcagttctgattt

SEQ ID NO: 1279969 - DNA, 25 bp, Homo sapien
agttctgatttccacaatgttcttt

SEQ ID NO: 1279970 - DNA, 25 bp, Homo sapien
cggggactttagaacggcagtgctt

SEQ ID NO: 1279971 - DNA, 25 bp, Homo sapien
gatccactgacttgatgagctttca

SEQ ID NO: 1279972 - DNA, 25 bp, Homo sapien
gggctttcatgataagatccactga

SEQ ID NO: 1279973 - DNA, 25 bp, Homo sapien
ctttagaacggcagtgcttagtggg

SEQ ID NO: 1279974 - DNA, 25 bp, Homo sapien
tgttcttcgtaaggaggcagccgag

SEQ ID NO: 1279975 - DNA, 25 bp, Homo sapien
tcaagccgcagagaaatgttcttcg

SEQ ID NO: 1279976 - DNA, 25 bp, Homo sapien
agagaaatgttcttcgtaaggaggc

SEQ ID NO: 1279977 - DNA, 25 bp, Homo sapien
cttcaagccgcagagaaatgttctt

SEQ ID NO: 1279978 - DNA, 25 bp, Homo sapien
gcttgtcctggctccacagagtgtg

SEQ ID NO: 1279979 - DNA, 25 bp, Homo sapien
cctggcttgtcctggctccacagag

SEQ ID NO: 1279980 - DNA, 25 bp, Homo sapien
ttgtcctggctccacagagtgtgtc

SEQ ID NO: 1279981 - DNA, 25 bp, Homo sapien
ggcttgtcctggctccacagagtgt

SEQ ID NO: 1279982 - DNA, 25 bp, Homo sapien
tgactatgggtgatttggttagaga

SEQ ID NO: 1279983 - DNA, 25 bp, Homo sapien
gaaccttctggttaggcagtgtgag

SEQ ID NO: 1279984 - DNA, 25 bp, Homo sapien
gagagaaccttctggttaggcagtg

SEQ ID NO: 1279985 - DNA, 25 bp, Homo sapien
cttctggttaggcagtgtgaggaaa

SEQ ID NO: 1279986 - DNA, 25 bp, Homo sapien
tctggatggtcaggcacccactgtg

SEQ ID NO: 1279987 - DNA, 25 bp, Homo sapien
gtgctcagagctccacacggcctct

SEQ ID NO: 1279988 - DNA, 25 bp, Homo sapien
ggtgctcagagctccacacggcctc

SEQ ID NO: 1279989 - DNA, 25 bp, Homo sapien
cctctggatggtcaggcacccactg

SEQ ID NO: 1279990 - DNA, 25 bp, Homo sapien
tcaaggttgtagagcgagagaatca

SEQ ID NO: 1279991 - DNA, 25 bp, Homo sapien
tagagcgagagaatcagctcgaatc

SEQ ID NO: 1279992 - DNA, 25 bp, Homo sapien
tttcctagtgctgtaagctgtgacc

SEQ ID NO: 1279993 - DNA, 25 bp, Homo sapien
agctcgaatctctttcctagtgctg

SEQ ID NO: 1279994 - DNA, 25 bp, Homo sapien
taccagggacgcataagtaatccac

SEQ ID NO: 1279995 - DNA, 25 bp, Homo sapien
catagagtaggctgcattccgctta

SEQ ID NO: 1279996 - DNA, 25 bp, Homo sapien
gagaatacggccgtttcccatagag

SEQ ID NO: 1279997 - DNA, 25 bp, Homo sapien
aactggctgactccccgtgcacggt

SEQ ID NO: 1279998 - DNA, 25 bp, Homo sapien
tcgtgcacgcccaccaggttgttgt

SEQ ID NO: 1279999 - DNA, 25 bp, Homo sapien
aggttgttgtcgttgagctccagca

SEQ ID NO: 1280000 - DNA, 25 bp, Homo sapien
ccaggtcgccgtagaagatgaagaa

SEQ ID NO: 1280001 - DNA, 25 bp, Homo sapien
cgcccagctgggtcaagttgttgta

SEQ ID NO: 1280002 - DNA, 25 bp, Homo sapien
cgcaggctggggctcgggggcgcat

SEQ ID NO: 1280003 - DNA, 25 bp, Homo sapien
gcccgagcgccgcggcggcgcaggc

SEQ ID NO: 1280004 - DNA, 25 bp, Homo sapien
cgagcgccgcggcggcgcaggctgg

SEQ ID NO: 1280005 - DNA, 25 bp, Homo sapien
ctgcagagcccgagcgccgcggcgg

SEQ ID NO: 1280006 - DNA, 25 bp, Homo sapien
ccgagtggccgtcgccaaaacgcgg

SEQ ID NO: 1280007 - DNA, 25 bp, Homo sapien
ccctggcagctgatttccgagatct

SEQ ID NO: 1280008 - DNA, 25 bp, Homo sapien
tccgagatctggcagtaagacgccg

SEQ ID NO: 1280009 - DNA, 25 bp, Homo sapien
gcgggctgcactcgacgtctaagtt

SEQ ID NO: 1280010 - DNA, 25 bp, Homo sapien
tgctccacagacacaattgcgactt

SEQ ID NO: 1280011 - DNA, 25 bp, Homo sapien
gcctcgatggaacaggctccctgct

SEQ ID NO: 1280012 - DNA, 25 bp, Homo sapien
tcaccagcccgttaactggctgcaa

SEQ ID NO: 1280013 - DNA, 25 bp, Homo sapien
agcgtgaggacatctcatgggcccc

SEQ ID NO: 1280014 - DNA, 25 bp, Homo sapien
acccttacgatgttcacttgcactg

SEQ ID NO: 1280015 - DNA, 25 bp, Homo sapien
tacgatgttcacttgcactgtcagg

SEQ ID NO: 1280016 - DNA, 25 bp, Homo sapien
tctccttgcacccttacgatgttca

SEQ ID NO: 1280017 - DNA, 25 bp, Homo sapien
tgttcacttgcactgtcaggtccat

SEQ ID NO: 1280018 - DNA, 25 bp, Homo sapien
agacgcacgtgacatttggtgccga

SEQ ID NO: 1280019 - DNA, 25 bp, Homo sapien
ccaccccaccctaacgatacaatag

SEQ ID NO: 1280020 - DNA, 25 bp, Homo sapien
caccctaacgatacaataggttctt

SEQ ID NO: 1280021 - DNA, 25 bp, Homo sapien
ccacaaactaagtgaaaatagcttt

SEQ ID NO: 1280022 - DNA, 25 bp, Homo sapien
ccaccctaacgatacaataggttct

SEQ ID NO: 1280023 - DNA, 25 bp, Homo sapien
ttgtacacctatcccaaacctataa

SEQ ID NO: 1280024 - DNA, 25 bp, Homo sapien
ctttgtacacctatcccaaacctat

SEQ ID NO: 1280025 - DNA, 25 bp, Homo sapien
tgtacacctatcccaaacctataag

SEQ ID NO: 1280026 - DNA, 25 bp, Homo sapien
tttgtacacctatcccaaacctata

SEQ ID NO: 1280027 - DNA, 25 bp, Homo sapien
gcaggtgccgtgctatcttcagcta

SEQ ID NO: 1280028 - DNA, 25 bp, Homo sapien
ctatgccgtctctttcattacaggg

SEQ ID NO: 1280029 - DNA, 25 bp, Homo sapien
tcacacgaaattgaacggcagggca

SEQ ID NO: 1280030 - DNA, 25 bp, Homo sapien
aaattgaacggcagggcagccaagt

SEQ ID NO: 1280031 - DNA, 25 bp, Homo sapien
ctgaaagtttagattcgtccagatt

SEQ ID NO: 1280032 - DNA, 25 bp, Homo sapien
tgaaagtttagattcgtccagattt

SEQ ID NO: 1280033 - DNA, 25 bp, Homo sapien
aaacagcttctggagactctgcaga

SEQ ID NO: 1280034 - DNA, 25 bp, Homo sapien
acagcttctggagactctgcagaca

SEQ ID NO: 1280035 - DNA, 25 bp, Homo sapien
aagagagcacggatttagaaacagc

SEQ ID NO: 1280036 - DNA, 25 bp, Homo sapien
gaaacagcttctggagactctgcag

SEQ ID NO: 1280037 - DNA, 25 bp, Homo sapien
tagccatcggcttcattggtgcaat

SEQ ID NO: 1280038 - DNA, 25 bp, Homo sapien
gatggtttgtcaacagtgaccctgg

SEQ ID NO: 1280039 - DNA, 25 bp, Homo sapien
aaatagcttacacccatgtgatagg

SEQ ID NO: 1280040 - DNA, 25 bp, Homo sapien
caatcatcgttgtggttatgcgaaa

SEQ ID NO: 1280041 - DNA, 25 bp, Homo sapien
tgtgaaacgtagtctgcaactctgc

SEQ ID NO: 1280042 - DNA, 25 bp, Homo sapien
ccgtatcggcgaggatgatctctat

SEQ ID NO: 1280043 - DNA, 25 bp, Homo sapien
tgcctcccggcaattatacatgtgt

SEQ ID NO: 1280044 - DNA, 25 bp, Homo sapien
tatttgaacaccagctgattgagag

SEQ ID NO: 1280045 - DNA, 25 bp, Homo sapien
cttgggaatcaatccgtggttcatg

SEQ ID NO: 1280046 - DNA, 25 bp, Homo sapien
ccacggtgggcaacaagatgaagag

SEQ ID NO: 1280047 - DNA, 25 bp, Homo sapien
ttccacggtgggcaacaagatgaag

SEQ ID NO: 1280048 - DNA, 25 bp, Homo sapien
atccgtggttcatgaaggacttcca

SEQ ID NO: 1280049 - DNA, 25 bp, Homo sapien
atgaaaatatgaccatttcttcaac

SEQ ID NO: 1280050 - DNA, 25 bp, Homo sapien
atttcttcaactgaactgttgctct

SEQ ID NO: 1280051 - DNA, 25 bp, Homo sapien
gcagtattttcattgacctctgtaa

SEQ ID NO: 1280052 - DNA, 25 bp, Homo sapien
aatgctccaaagctatagcagtatt

SEQ ID NO: 1280053 - DNA, 25 bp, Homo sapien
ttttcattgacctctgtaaagtggc

SEQ ID NO: 1280054 - DNA, 25 bp, Homo sapien
tgctccaaagctatagcagtatttt

SEQ ID NO: 1280055 - DNA, 25 bp, Homo sapien
cattaggtttcactatggcatagaa

SEQ ID NO: 1280056 - DNA, 25 bp, Homo sapien
agttcgatttagactcctctgctgc

SEQ ID NO: 1280057 - DNA, 25 bp, Homo sapien
gcttagaactgaaatcttgcaattc

SEQ ID NO: 1280058 - DNA, 25 bp, Homo sapien
tacatgtgccatgcttagaactgaa

SEQ ID NO: 1280059 - DNA, 25 bp, Homo sapien
gtaagcggaaatgaagctctggttt

SEQ ID NO: 1280060 - DNA, 25 bp, Homo sapien
aagcggaaatgaagctctggttttc

SEQ ID NO: 1280061 - DNA, 25 bp, Homo sapien
cagtaagcggaaatgaagctctggt

SEQ ID NO: 1280062 - DNA, 25 bp, Homo sapien
ccgcagtaagcggaaatgaagctct

SEQ ID NO: 1280063 - DNA, 25 bp, Homo sapien
cacatacagcaattagaccccgagg

SEQ ID NO: 1280064 - DNA, 25 bp, Homo sapien
aaagaatgaatgtgggctccactcc

SEQ ID NO: 1280065 - DNA, 25 bp, Homo sapien
caacacagtgtatggacaattgctg

SEQ ID NO: 1280066 - DNA, 25 bp, Homo sapien
tgtactgggttgaacactgtcctcc

SEQ ID NO: 1280067 - DNA, 25 bp, Homo sapien
tgccttgcagagctagtcctagtct

SEQ ID NO: 1280068 - DNA, 25 bp, Homo sapien
cctagtcttatgacagccttcctaa

SEQ ID NO: 1280069 - DNA, 25 bp, Homo sapien
gtgtcctgccaaactaccctatcag

SEQ ID NO: 1280070 - DNA, 25 bp, Homo sapien
cagccttcctaagctgagagggaaa

SEQ ID NO: 1280071 - DNA, 25 bp, Homo sapien
gagacacccagtgtggtaggctaaa

SEQ ID NO: 1280072 - DNA, 25 bp, Homo sapien
gatagagatttgaagatactggcct

SEQ ID NO: 1280073 - DNA, 25 bp, Homo sapien
catccctaacgtccagaatctgcaa

SEQ ID NO: 1280074 - DNA, 25 bp, Homo sapien
ctcagaaacgctgaggagacaccca

SEQ ID NO: 1280075 - DNA, 25 bp, Homo sapien
gtcacttccgactggagtcaagatg

SEQ ID NO: 1280076 - DNA, 25 bp, Homo sapien
cacttccgactggagtcaagatggc

SEQ ID NO: 1280077 - DNA, 25 bp, Homo sapien
acttccgactggagtcaagatggcg

SEQ ID NO: 1280078 - DNA, 25 bp, Homo sapien
ttccgactggagtcaagatggcggc

SEQ ID NO: 1280079 - DNA, 25 bp, Homo sapien
gttgggaatgttttcgtggaggagc

SEQ ID NO: 1280080 - DNA, 25 bp, Homo sapien
tcgttgcgagttgttgggaatgttt

SEQ ID NO: 1280081 - DNA, 25 bp, Homo sapien
tcagaaaagccagcggtcgttgcga

SEQ ID NO: 1280082 - DNA, 25 bp, Homo sapien
aagccagcggtcgttgcgagttgtt

SEQ ID NO: 1280083 - DNA, 25 bp, Homo sapien
ccagcacatggacacttgctgctaa

SEQ ID NO: 1280084 - DNA, 25 bp, Homo sapien
cctgaataacttcaggttggaagat

SEQ ID NO: 1280085 - DNA, 25 bp, Homo sapien
ttctcttggttgctgcgttccccag

SEQ ID NO: 1280086 - DNA, 25 bp, Homo sapien
ggatgattggagattcctgaataac

SEQ ID NO: 1280087 - DNA, 25 bp, Homo sapien
ctttgataagggcattctgagggct

SEQ ID NO: 1280088 - DNA, 25 bp, Homo sapien
tggggctgtactgctcttacagcca

SEQ ID NO: 1280089 - DNA, 25 bp, Homo sapien
ttgttttcggctgttctctcctctg

SEQ ID NO: 1280090 - DNA, 25 bp, Homo sapien
tgctttccatcgaggattctcatcc

SEQ ID NO: 1280091 - DNA, 25 bp, Homo sapien
gggtgccttgcggagcttgcgatct

SEQ ID NO: 1280092 - DNA, 25 bp, Homo sapien
agggcgtactgggagacgccagcag

SEQ ID NO: 1280093 - DNA, 25 bp, Homo sapien
cttgcggagcttgcgatctgctctc

SEQ ID NO: 1280094 - DNA, 25 bp, Homo sapien
caaggacagggcgtactgggagacg

SEQ ID NO: 1280095 - DNA, 25 bp, Homo sapien
ctagaaatgttctaggcagtttgca

SEQ ID NO: 1280096 - DNA, 25 bp, Homo sapien
atagccacggccatggagagtccag

SEQ ID NO: 1280097 - DNA, 25 bp, Homo sapien
agaaatgttctaggcagtttgcagc

SEQ ID NO: 1280098 - DNA, 25 bp, Homo sapien
gcagtttgcagccatagccacggcc

SEQ ID NO: 1280099 - DNA, 25 bp, Homo sapien
tcacggagcaagtcaggcagtaaag

SEQ ID NO: 1280100 - DNA, 25 bp, Homo sapien
aacatgtgctgcgaggacttccgga

SEQ ID NO: 1280101 - DNA, 25 bp, Homo sapien
caagacccggattggtgagtgctcc

SEQ ID NO: 1280102 - DNA, 25 bp, Homo sapien
tcccttctgctgttgacaagacccg

SEQ ID NO: 1280103 - DNA, 25 bp, Homo sapien
tgttttctgtgcatcgtatcaggag

SEQ ID NO: 1280104 - DNA, 25 bp, Homo sapien
tagattcgacgtatgcattttgggc

SEQ ID NO: 1280105 - DNA, 25 bp, Homo sapien
gaatgtcccagagtttgagcttctc

SEQ ID NO: 1280106 - DNA, 25 bp, Homo sapien
actcaggttctgtcaattgttccaa

SEQ ID NO: 1280107 - DNA, 25 bp, Homo sapien
aaaccgcggcgcatttgtaagtgct

SEQ ID NO: 1280108 - DNA, 25 bp, Homo sapien
gatggtggccctcactacttccagt

SEQ ID NO: 1280109 - DNA, 25 bp, Homo sapien
cgttggcggctctgggatagaaacc

SEQ ID NO: 1280110 - DNA, 25 bp, Homo sapien
tcttggtctggaacgcgcgctagtc

SEQ ID NO: 1280111 - DNA, 25 bp, Homo sapien
catagagccgacaggtagattgaca

SEQ ID NO: 1280112 - DNA, 25 bp, Homo sapien
taacttagtattgctgaaagccgca

SEQ ID NO: 1280113 - DNA, 25 bp, Homo sapien
cataaggcgtgtttgggtagagcaa

SEQ ID NO: 1280114 - DNA, 25 bp, Homo sapien
tatatacaaagtagtggccccttct

SEQ ID NO: 1280115 - DNA, 25 bp, Homo sapien
aaactacagcgataaacaatctttt

SEQ ID NO: 1280116 - DNA, 25 bp, Homo sapien
aaaactacagcgataaacaatcttt

SEQ ID NO: 1280117 - DNA, 25 bp, Homo sapien
cttggggcagtcttttgtagatttc

SEQ ID NO: 1280118 - DNA, 25 bp, Homo sapien
cttgtatttataaacctacctcttg

SEQ ID NO: 1280119 - DNA, 25 bp, Homo sapien
gaaatgagagttcctactgtccacc

SEQ ID NO: 1280120 - DNA, 25 bp, Homo sapien
catgtttgggattatcagagcctgc

SEQ ID NO: 1280121 - DNA, 25 bp, Homo sapien
taagcagaatgtctaagggcctgtg

SEQ ID NO: 1280122 - DNA, 25 bp, Homo sapien
taaagagattactggccataagcag

SEQ ID NO: 1280123 - DNA, 25 bp, Homo sapien
aatgagcctggagtgtgcgtgtatg

SEQ ID NO: 1280124 - DNA, 25 bp, Homo sapien
ggaatatactgcttgggcttcagtg

SEQ ID NO: 1280125 - DNA, 25 bp, Homo sapien
gaaaatggatagcttgtttaaaatg

SEQ ID NO: 1280126 - DNA, 25 bp, Homo sapien
cagtgttgcttttgcattagatgca

SEQ ID NO: 1280127 - DNA, 25 bp, Homo sapien
atcccattgtaatggtgggcaccag

SEQ ID NO: 1280128 - DNA, 25 bp, Homo sapien
taactgccgttctctggccggttgg

SEQ ID NO: 1280129 - DNA, 25 bp, Homo sapien
tctgtggtaactgccgttctctggc

SEQ ID NO: 1280130 - DNA, 25 bp, Homo sapien
ggttcatcccattgtaatggtgggc

SEQ ID NO: 1280131 - DNA, 25 bp, Homo sapien
atgtgtcggtccgtgagtgctcata

SEQ ID NO: 1280132 - DNA, 25 bp, Homo sapien
gtgtcggtccgtgagtgctcataga

SEQ ID NO: 1280133 - DNA, 25 bp, Homo sapien
atgatgtgtcggtccgtgagtgctc

SEQ ID NO: 1280134 - DNA, 25 bp, Homo sapien
atgtggatgatgtgtcggtccgtga

SEQ ID NO: 1280135 - DNA, 25 bp, Homo sapien
cagccctgttgggaagcccgtgtcc

SEQ ID NO: 1280136 - DNA, 25 bp, Homo sapien
cttggtgagttggtatcagccctgt

SEQ ID NO: 1280137 - DNA, 25 bp, Homo sapien
ttggtgagttggtatcagccctgtt

SEQ ID NO: 1280138 - DNA, 25 bp, Homo sapien
ggaagcccgtgtcctcgatgaccat

SEQ ID NO: 1280139 - DNA, 25 bp, Homo sapien
cagggtcatggcttttaaagaggac

SEQ ID NO: 1280140 - DNA, 25 bp, Homo sapien
ctggagatgtacctactgcaaatgg

SEQ ID NO: 1280141 - DNA, 25 bp, Homo sapien
tctcctcacagtggattgggtttcc

SEQ ID NO: 1280142 - DNA, 25 bp, Homo sapien
cctctgataagatactggagatgta

SEQ ID NO: 1280143 - DNA, 25 bp, Homo sapien
tatggtatcacttggaatgcagtca

SEQ ID NO: 1280144 - DNA, 25 bp, Homo sapien
cttgtaaacgtatggtatcacttgg

SEQ ID NO: 1280145 - DNA, 25 bp, Homo sapien
aacgtatggtatcacttggaatgca

SEQ ID NO: 1280146 - DNA, 25 bp, Homo sapien
tatcacttggaatgcagtcagtgtt

SEQ ID NO: 1280147 - DNA, 25 bp, Homo sapien
tcactcaagagtaaaagccagcagc

SEQ ID NO: 1280148 - DNA, 25 bp, Homo sapien
ctcctggaggatgcattgggcccca

SEQ ID NO: 1280149 - DNA, 25 bp, Homo sapien
tattgcagttgcgtggaatctcctc

SEQ ID NO: 1280150 - DNA, 25 bp, Homo sapien
gtcagcaggcatgttgtcaacttca

SEQ ID NO: 1280151 - DNA, 25 bp, Homo sapien
ctgcttccatgtgctttctaggtcc

SEQ ID NO: 1280152 - DNA, 25 bp, Homo sapien
tcctaaagaagacgaagagaagcct

SEQ ID NO: 1280153 - DNA, 25 bp, Homo sapien
tggccagtcaggaggtgcctccaga

SEQ ID NO: 1280154 - DNA, 25 bp, Homo sapien
tcaccaagtagctggtttcccatgc

SEQ ID NO: 1280155 - DNA, 25 bp, Homo sapien
catgaagcagggttaaagcggaaac

SEQ ID NO: 1280156 - DNA, 25 bp, Homo sapien
agcggaaacccagccaaacactaca

SEQ ID NO: 1280157 - DNA, 25 bp, Homo sapien
cacacagattaaccggcggcgacat

SEQ ID NO: 1280158 - DNA, 25 bp, Homo sapien
cagccgtcagaggatctggctgatg

SEQ ID NO: 1280159 - DNA, 25 bp, Homo sapien
gaccacacaggtccctgtaacagaa

SEQ ID NO: 1280160 - DNA, 25 bp, Homo sapien
gaagatcttcctaaagagcctttgg

SEQ ID NO: 1280161 - DNA, 25 bp, Homo sapien
tgcccaaaattaaggccgaaacaga

SEQ ID NO: 1280162 - DNA, 25 bp, Homo sapien
tttgggcagcacaaatagtgaggcc

SEQ ID NO: 1280163 - DNA, 25 bp, Homo sapien
tgaggccccagaactttacagatcc

SEQ ID NO: 1280164 - DNA, 25 bp, Homo sapien
catgtagagcatatgcagagcttgc

SEQ ID NO: 1280165 - DNA, 25 bp, Homo sapien
taaaacggacttgtcagaacatcgc

SEQ ID NO: 1280166 - DNA, 25 bp, Homo sapien
cacatcacgagtttgaaagcgggac

SEQ ID NO: 1280167 - DNA, 25 bp, Homo sapien
tagcaatatatcagtgcacaggcgc

SEQ ID NO: 1280168 - DNA, 25 bp, Homo sapien
tttaaccaatgtagcactgagagag

SEQ ID NO: 1280169 - DNA, 25 bp, Homo sapien
tcccctcccagcattgaaatcattg

SEQ ID NO: 1280170 - DNA, 25 bp, Homo sapien
tggcgttgttaacccggagagtgct

SEQ ID NO: 1280171 - DNA, 25 bp, Homo sapien
caaagtgggcactattgttttcccg

SEQ ID NO: 1280172 - DNA, 25 bp, Homo sapien
tgcaaagtgggcactattgttttcc

SEQ ID NO: 1280173 - DNA, 25 bp, Homo sapien
tctgaagccaatcctgagccgtgtc

SEQ ID NO: 1280174 - DNA, 25 bp, Homo sapien
atcagggttattctgaagccaatcc

SEQ ID NO: 1280175 - DNA, 25 bp, Homo sapien
tcactaagtccggcatgttcaccat

SEQ ID NO: 1280176 - DNA, 25 bp, Homo sapien
ctaagtccggcatgttcaccattgc

SEQ ID NO: 1280177 - DNA, 25 bp, Homo sapien
tcgtcactaagtccggcatgttcac

SEQ ID NO: 1280178 - DNA, 25 bp, Homo sapien
ttcgtcactaagtccggcatgttca

SEQ ID NO: 1280179 - DNA, 25 bp, Homo sapien
gctggtcgtgtcacgggcagtgacg

SEQ ID NO: 1280180 - DNA, 25 bp, Homo sapien
gtcacgggcagtgacggtgtttcca

SEQ ID NO: 1280181 - DNA, 25 bp, Homo sapien
ccgggctggtcgtgtcacgggcagt

SEQ ID NO: 1280182 - DNA, 25 bp, Homo sapien
tcgtgtcacgggcagtgacggtgtt

SEQ ID NO: 1280183 - DNA, 25 bp, Homo sapien
tgtcccaggagatccctcctgaaga

SEQ ID NO: 1280184 - DNA, 25 bp, Homo sapien
gagcttggaagagcaccgtggccac

SEQ ID NO: 1280185 - DNA, 25 bp, Homo sapien
agaaaaaggtgcaaggagggaccag

SEQ ID NO: 1280186 - DNA, 25 bp, Homo sapien
caggatgcccatggcggtctggcag

SEQ ID NO: 1280187 - DNA, 25 bp, Homo sapien
ggccccgtacatcaccaggcagtat

SEQ ID NO: 1280188 - DNA, 25 bp, Homo sapien
gcaggatggaacagcttctggcact

SEQ ID NO: 1280189 - DNA, 25 bp, Homo sapien
gctccctgacaggtacgaggcagga

SEQ ID NO: 1280190 - DNA, 25 bp, Homo sapien
tataggaaggtcaaagctccagctg

SEQ ID NO: 1280191 - DNA, 25 bp, Homo sapien
cagcagtttcgtgtaacttgctcct

SEQ ID NO: 1280192 - DNA, 25 bp, Homo sapien
ctccaaactcagcagtttcgtgtaa

SEQ ID NO: 1280193 - DNA, 25 bp, Homo sapien
ccaaactcagcagtttcgtgtaact

SEQ ID NO: 1280194 - DNA, 25 bp, Homo sapien
aactcagcagtttcgtgtaacttgc

SEQ ID NO: 1280195 - DNA, 25 bp, Homo sapien
agatgggcctgtaaagtgagtcagt

SEQ ID NO: 1280196 - DNA, 25 bp, Homo sapien
ggagatgggcctgtaaagtgagtca

SEQ ID NO: 1280197 - DNA, 25 bp, Homo sapien
caaagtcaccagcacttggagatgg

SEQ ID NO: 1280198 - DNA, 25 bp, Homo sapien
agcacttggagatgggcctgtaaag

SEQ ID NO: 1280199 - DNA, 25 bp, Homo sapien
caagcttgagtacttttctctgagg

SEQ ID NO: 1280200 - DNA, 25 bp, Homo sapien
tgagtacttttctctgaggagctca

SEQ ID NO: 1280201 - DNA, 25 bp, Homo sapien
gtacttttctctgaggagctcatta

SEQ ID NO: 1280202 - DNA, 25 bp, Homo sapien
tcaagcttgagtacttttctctgag

SEQ ID NO: 1280203 - DNA, 25 bp, Homo sapien
tgcgtgctcctgaccacgtacagtt

SEQ ID NO: 1280204 - DNA, 25 bp, Homo sapien
gtgctcctgaccacgtacagtttcc

SEQ ID NO: 1280205 - DNA, 25 bp, Homo sapien
gcgtgctcctgaccacgtacagttt

SEQ ID NO: 1280206 - DNA, 25 bp, Homo sapien
gctcctgaccacgtacagtttcctt

SEQ ID NO: 1280207 - DNA, 25 bp, Homo sapien
caacatcaggttgcctcagcatgag

SEQ ID NO: 1280208 - DNA, 25 bp, Homo sapien
tttctcaacttcatcaacatcaggt

SEQ ID NO: 1280209 - DNA, 25 bp, Homo sapien
ttgacctcagttctgtgtccacttc

SEQ ID NO: 1280210 - DNA, 25 bp, Homo sapien
ctcagcatgagaatctggcttgacc

SEQ ID NO: 1280211 - DNA, 25 bp, Homo sapien
tgacagtgtgccaaggctgttgcag

SEQ ID NO: 1280212 - DNA, 25 bp, Homo sapien
ggacatgaggttctgttgttggaaa

SEQ ID NO: 1280213 - DNA, 25 bp, Homo sapien
aagattcatgattgacagtgtgcca

SEQ ID NO: 1280214 - DNA, 25 bp, Homo sapien
tcatgattgacagtgtgccaaggct

SEQ ID NO: 1280215 - DNA, 25 bp, Homo sapien
tggcgggggcagcacacaaagggtg

SEQ ID NO: 1280216 - DNA, 25 bp, Homo sapien
gggcagcacacaaagggtggagggt

SEQ ID NO: 1280217 - DNA, 25 bp, Homo sapien
cgggggcagcacacaaagggtggag

SEQ ID NO: 1280218 - DNA, 25 bp, Homo sapien
ggcagcacacaaagggtggagggta

SEQ ID NO: 1280219 - DNA, 25 bp, Homo sapien
gatgatgccgtggagccatggcatt

SEQ ID NO: 1280220 - DNA, 25 bp, Homo sapien
tgatgccgtggagccatggcattaa

SEQ ID NO: 1280221 - DNA, 25 bp, Homo sapien
tgccgtggagccatggcattaacca

SEQ ID NO: 1280222 - DNA, 25 bp, Homo sapien
cagatgatgccgtggagccatggca

SEQ ID NO: 1280223 - DNA, 25 bp, Homo sapien
ctggggtactctgcaccttttggga

SEQ ID NO: 1280224 - DNA, 25 bp, Homo sapien
gatgtactgagcctgagttgatgtg

SEQ ID NO: 1280225 - DNA, 25 bp, Homo sapien
taggtgataacagctgatgtactga

SEQ ID NO: 1280226 - DNA, 25 bp, Homo sapien
tgagcctgagttgatgtgtgcacgc

SEQ ID NO: 1280227 - DNA, 25 bp, Homo sapien
tcatggccgtaattcccaatgtgct

SEQ ID NO: 1280228 - DNA, 25 bp, Homo sapien
ttcccaatgtgctttcgtgtctttc

SEQ ID NO: 1280229 - DNA, 25 bp, Homo sapien
caagacctttcatggccgtaattcc

SEQ ID NO: 1280230 - DNA, 25 bp, Homo sapien
tattagaatgacaagacctttcatg

SEQ ID NO: 1280231 - DNA, 25 bp, Homo sapien
cttctaggcctgtggtggagctaga

SEQ ID NO: 1280232 - DNA, 25 bp, Homo sapien
tggagctagagatggtcagcggctg

SEQ ID NO: 1280233 - DNA, 25 bp, Homo sapien
tctgccaacatgaaagggcttggct

SEQ ID NO: 1280234 - DNA, 25 bp, Homo sapien
agctgcctctgccaacatgaaaggg

SEQ ID NO: 1280235 - DNA, 25 bp, Homo sapien
actaaagacgcgctgaaggaatttc

SEQ ID NO: 1280236 - DNA, 25 bp, Homo sapien
ttcaagctcatagggatggagaacc

SEQ ID NO: 1280237 - DNA, 25 bp, Homo sapien
tgattaccaatctggtggcacctgg

SEQ ID NO: 1280238 - DNA, 25 bp, Homo sapien
ctagggatgctatgtgagcctggca

SEQ ID NO: 1280239 - DNA, 25 bp, Homo sapien
gagagcgaggttgactcccactgtg

SEQ ID NO: 1280240 - DNA, 25 bp, Homo sapien
cattcattggagagcgaggttgact

SEQ ID NO: 1280241 - DNA, 25 bp, Homo sapien
gaggttgactcccactgtgcgctct

SEQ ID NO: 1280242 - DNA, 25 bp, Homo sapien
cttatacattcattggagagcgagg

SEQ ID NO: 1280243 - DNA, 25 bp, Homo sapien
tgttactgaatcattcccaagaaca

SEQ ID NO: 1280244 - DNA, 25 bp, Homo sapien
attcccaagaacatcccatgagctc

SEQ ID NO: 1280245 - DNA, 25 bp, Homo sapien
caaagtggcgttttgttactgaatc

SEQ ID NO: 1280246 - DNA, 25 bp, Homo sapien
tgctggcacaaagtggcgttttgtt

SEQ ID NO: 1280247 - DNA, 25 bp, Homo sapien
tccaagtcttgcaatcctttgcagc

SEQ ID NO: 1280248 - DNA, 25 bp, Homo sapien
aagtcttgcaatcctttgcagccaa

SEQ ID NO: 1280249 - DNA, 25 bp, Homo sapien
catccaagtcttgcaatcctttgca

SEQ ID NO: 1280250 - DNA, 25 bp, Homo sapien
tcttgcaatcctttgcagccaaaag

SEQ ID NO: 1280251 - DNA, 25 bp, Homo sapien
tgtctggaatcctttgcccactgct

SEQ ID NO: 1280252 - DNA, 25 bp, Homo sapien
catccctgtagctgatgctaatgcc

SEQ ID NO: 1280253 - DNA, 25 bp, Homo sapien
catgctcaaagcaccgcttggttct

SEQ ID NO: 1280254 - DNA, 25 bp, Homo sapien
atgcgatgcgctggcttcccttgga

SEQ ID NO: 1280255 - DNA, 25 bp, Homo sapien
gtgatgaggaagtttgacagccagc

SEQ ID NO: 1280256 - DNA, 25 bp, Homo sapien
gaggaagtttgacagccagcatgac

SEQ ID NO: 1280257 - DNA, 25 bp, Homo sapien
cagtaaatttggcttggtggcagcc

SEQ ID NO: 1280258 - DNA, 25 bp, Homo sapien
cctttgatttagaagtatctgttcc

SEQ ID NO: 1280259 - DNA, 25 bp, Homo sapien
caggcagcagctatcgtgtggcttg

SEQ ID NO: 1280260 - DNA, 25 bp, Homo sapien
gctgtcagcatgtcacagtaaattt

SEQ ID NO: 1280261 - DNA, 25 bp, Homo sapien
ggaagaggttatgatcagggtccag

SEQ ID NO: 1280262 - DNA, 25 bp, Homo sapien
aggaagaggttatgatcagggtcca

SEQ ID NO: 1280263 - DNA, 25 bp, Homo sapien
gaagaggttatgatcagggtccagg

SEQ ID NO: 1280264 - DNA, 25 bp, Homo sapien
aagaggttatgatcagggtccaggg

SEQ ID NO: 1280265 - DNA, 25 bp, Homo sapien
aacaggaagcgtggtgcaccctgga

SEQ ID NO: 1280266 - DNA, 25 bp, Homo sapien
caggaagcgtggtgcaccctggaga

SEQ ID NO: 1280267 - DNA, 25 bp, Homo sapien
acaggaagcgtggtgcaccctggag

SEQ ID NO: 1280268 - DNA, 25 bp, Homo sapien
aggaagcgtggtgcaccctggagag

SEQ ID NO: 1280269 - DNA, 25 bp, Homo sapien
gttactcaaaagatctttcttcagc

SEQ ID NO: 1280270 - DNA, 25 bp, Homo sapien
gtccctcagccccttgatcgcagca

SEQ ID NO: 1280271 - DNA, 25 bp, Homo sapien
cagcagcagcagttaaactgtccat

SEQ ID NO: 1280272 - DNA, 25 bp, Homo sapien
agcattgtttcctggccgtctctgt

SEQ ID NO: 1280273 - DNA, 25 bp, Homo sapien
gcagtacattatctgtgatatgacc

SEQ ID NO: 1280274 - DNA, 25 bp, Homo sapien
tgaagatggccgtgaactgcagtac

SEQ ID NO: 1280275 - DNA, 25 bp, Homo sapien
acttggggccccgttgttgaagatg

SEQ ID NO: 1280276 - DNA, 25 bp, Homo sapien
tgtgatatgaccactcggtaccacc

SEQ ID NO: 1280277 - DNA, 25 bp, Homo sapien
ctgacaaaacccgaacctgcttaag

SEQ ID NO: 1280278 - DNA, 25 bp, Homo sapien
gaggcatgatcgacaatgataggtt

SEQ ID NO: 1280279 - DNA, 25 bp, Homo sapien
ctgctgacaaaacccgaacctgctt

SEQ ID NO: 1280280 - DNA, 25 bp, Homo sapien
gtttcttggaggcatgatcgacaat

SEQ ID NO: 1280281 - DNA, 25 bp, Homo sapien
tgccctcacgccctttggtttgtaa

SEQ ID NO: 1280282 - DNA, 25 bp, Homo sapien
ctgccctcacgccctttggtttgta

SEQ ID NO: 1280283 - DNA, 25 bp, Homo sapien
ccaagcagctgccatcgtgtgtttt

SEQ ID NO: 1280284 - DNA, 25 bp, Homo sapien
tgtgacccctcctggttgcatctga

SEQ ID NO: 1280285 - DNA, 25 bp, Homo sapien
cctggttgcatctgatagaaagaac

SEQ ID NO: 1280286 - DNA, 25 bp, Homo sapien
aaaaatgggtgatcctagttcctgc

SEQ ID NO: 1280287 - DNA, 25 bp, Homo sapien
acatgggacgcttcacgaattggtg

SEQ ID NO: 1280288 - DNA, 25 bp, Homo sapien
gtaacattcttacacgggggctgtg

SEQ ID NO: 1280289 - DNA, 25 bp, Homo sapien
cacgaattggtgtaacattcttaca

SEQ ID NO: 1280290 - DNA, 25 bp, Homo sapien
aaacatgggacgcttcacgaattgg

SEQ ID NO: 1280291 - DNA, 25 bp, Homo sapien
caagcagtgatttgttgtggaggtc

SEQ ID NO: 1280292 - DNA, 25 bp, Homo sapien
caataattggcattcttgttactgg

SEQ ID NO: 1280293 - DNA, 25 bp, Homo sapien
tactggctcccaagcagtgatttgt

SEQ ID NO: 1280294 - DNA, 25 bp, Homo sapien
tcttgttactggctcccaagcagtg

SEQ ID NO: 1280295 - DNA, 25 bp, Homo sapien
tgtccaggtgatgggagatcggctg

SEQ ID NO: 1280296 - DNA, 25 bp, Homo sapien
tgtctaaaccttggcaggcggcaga

SEQ ID NO: 1280297 - DNA, 25 bp, Homo sapien
gctcacagaccgatgccttctgcat

SEQ ID NO: 1280298 - DNA, 25 bp, Homo sapien
cggcagaggagagatgatgctcaca

SEQ ID NO: 1280299 - DNA, 25 bp, Homo sapien
cttgagcctgaaagcgctgtagcct

SEQ ID NO: 1280300 - DNA, 25 bp, Homo sapien
gtacattcctcgtatccctgccaag

SEQ ID NO: 1280301 - DNA, 25 bp, Homo sapien
aatgtgccagatttgtacattcctc

SEQ ID NO: 1280302 - DNA, 25 bp, Homo sapien
aagcgctgtagccttcagcattggc

SEQ ID NO: 1280303 - DNA, 25 bp, Homo sapien
ggccagcataggttccaagacagct

SEQ ID NO: 1280304 - DNA, 25 bp, Homo sapien
gccagcataggttccaagacagctc

SEQ ID NO: 1280305 - DNA, 25 bp, Homo sapien
ccaacttgggcaggatgacttcaaa

SEQ ID NO: 1280306 - DNA, 25 bp, Homo sapien
gatgacttcaaatgggctggtgatg

SEQ ID NO: 1280307 - DNA, 25 bp, Homo sapien
aggcctctacatccaacttgggcag

SEQ ID NO: 1280308 - DNA, 25 bp, Homo sapien
ttcaaatgggctggtgatgaactgg

SEQ ID NO: 1280309 - DNA, 25 bp, Homo sapien
gacaagttgagtctcccaggatcca

SEQ ID NO: 1280310 - DNA, 25 bp, Homo sapien
ttgtggacagagtcatgctgctacc

SEQ ID NO: 1280311 - DNA, 25 bp, Homo sapien
gctaccccaggggacaagttgagtc

SEQ ID NO: 1280312 - DNA, 25 bp, Homo sapien
tggacagagtcatgctgctacccca

SEQ ID NO: 1280313 - DNA, 25 bp, Homo sapien
tgtgagcttgtccagagtgggccac

SEQ ID NO: 1280314 - DNA, 25 bp, Homo sapien
tcttcattctgcgttgctgatagct

SEQ ID NO: 1280315 - DNA, 25 bp, Homo sapien
gaagcccagagagaatatggtagag

SEQ ID NO: 1280316 - DNA, 25 bp, Homo sapien
tgtttattaggattgagtcccagaa

SEQ ID NO: 1280317 - DNA, 25 bp, Homo sapien
tgattggcgcatggcctctcctggt

SEQ ID NO: 1280318 - DNA, 25 bp, Homo sapien
tttcctttgattggcgcatggcctc

SEQ ID NO: 1280319 - DNA, 25 bp, Homo sapien
gcttctttcctttgattggcgcatg

SEQ ID NO: 1280320 - DNA, 25 bp, Homo sapien
ctttgattggcgcatggcctctcct

SEQ ID NO: 1280321 - DNA, 25 bp, Homo sapien
tccaaattgccagaagtccttgtca

SEQ ID NO: 1280322 - DNA, 25 bp, Homo sapien
gatgaaggtcatgaataagaaaaca

SEQ ID NO: 1280323 - DNA, 25 bp, Homo sapien
ccttaggaagtttataagctggttg

SEQ ID NO: 1280324 - DNA, 25 bp, Homo sapien
cagcttgtgattcgtgatgtttggg

SEQ ID NO: 1280325 - DNA, 25 bp, Homo sapien
tggtcacggccatgcccgtggggaa

SEQ ID NO: 1280326 - DNA, 25 bp, Homo sapien
taaccgtccagctggtcacggccat

SEQ ID NO: 1280327 - DNA, 25 bp, Homo sapien
agctggtcacggccatgcccgtggg

SEQ ID NO: 1280328 - DNA, 25 bp, Homo sapien
ttaaccgtccagctggtcacggcca

SEQ ID NO: 1280329 - DNA, 25 bp, Homo sapien
gaaggtgcatccctcttcaaaagtt

SEQ ID NO: 1280330 - DNA, 25 bp, Homo sapien
aaggtgcatccctcttcaaaagttg

SEQ ID NO: 1280331 - DNA, 25 bp, Homo sapien
aacctacaggttgggtactacgctg

SEQ ID NO: 1280332 - DNA, 25 bp, Homo sapien
tactacgctgataacctaggtgaca

SEQ ID NO: 1280333 - DNA, 25 bp, Homo sapien
aagtgagtgctaaacatcgtgtacg

SEQ ID NO: 1280334 - DNA, 25 bp, Homo sapien
gaaagtgtgaggaatgtaaacctac

SEQ ID NO: 1280335 - DNA, 25 bp, Homo sapien
catggtaaatggtcaacacacgttt

SEQ ID NO: 1280336 - DNA, 25 bp, Homo sapien
caggtgactacaacctcgcaggaat

SEQ ID NO: 1280337 - DNA, 25 bp, Homo sapien
tctagaatctataccagggagaacc

SEQ ID NO: 1280338 - DNA, 25 bp, Homo sapien
cattggcgagttaagctgctttgct

SEQ ID NO: 1280339 - DNA, 25 bp, Homo sapien
tattgacatgtccaacgagctgcgg

SEQ ID NO: 1280340 - DNA, 25 bp, Homo sapien
caaaggtctgtcaggttattgacat

SEQ ID NO: 1280341 - DNA, 25 bp, Homo sapien
caaaggcacactttcaactcggagt

SEQ ID NO: 1280342 - DNA, 25 bp, Homo sapien
ttgaagtcacaaaggccgatggttt

SEQ ID NO: 1280343 - DNA, 25 bp, Homo sapien
tccccaatggagctgacggaggctt

SEQ ID NO: 1280344 - DNA, 25 bp, Homo sapien
tatgctgggagcacgtgtgcaactc

SEQ ID NO: 1280345 - DNA, 25 bp, Homo sapien
gagacaagcacgtgatgtacccagg

SEQ ID NO: 1280346 - DNA, 25 bp, Homo sapien
atgtgcacagctgcgagcctctgag

SEQ ID NO: 1280347 - DNA, 25 bp, Homo sapien
ccttccagaaggatgtgaggaggcg

SEQ ID NO: 1280348 - DNA, 25 bp, Homo sapien
tgctcattctccaccgacgaggcac

SEQ ID NO: 1280349 - DNA, 25 bp, Homo sapien
cgacgaggcacttaacccttccaga

SEQ ID NO: 1280350 - DNA, 25 bp, Homo sapien
tgaggaggcggaaaaatcgtttgta

SEQ ID NO: 1280351 - DNA, 25 bp, Homo sapien
tcttttctgcctgttccaggagctc

SEQ ID NO: 1280352 - DNA, 25 bp, Homo sapien
tcctgccaggtttcttttctgcctg

SEQ ID NO: 1280353 - DNA, 25 bp, Homo sapien
gccacctccaaatcttcctgccagg

SEQ ID NO: 1280354 - DNA, 25 bp, Homo sapien
caggccagcttgcagccacctccaa

SEQ ID NO: 1280355 - DNA, 25 bp, Homo sapien
gccaggaagataatagatgctaatg

SEQ ID NO: 1280356 - DNA, 25 bp, Homo sapien
cactggcaaccacctagggatgccg

SEQ ID NO: 1280357 - DNA, 25 bp, Homo sapien
ggtgaggttgccttgacactggcaa

SEQ ID NO: 1280358 - DNA, 25 bp, Homo sapien
ctagggatgccgagcgccctttagg

SEQ ID NO: 1280359 - DNA, 25 bp, Homo sapien
tcatctgcgtgttggtgcatggaag

SEQ ID NO: 1280360 - DNA, 25 bp, Homo sapien
catctgcgtgttggtgcatggaaga

SEQ ID NO: 1280361 - DNA, 25 bp, Homo sapien
tttcatctgcgtgttggtgcatgga

SEQ ID NO: 1280362 - DNA, 25 bp, Homo sapien
tttttcatctgcgtgttggtgcatg

SEQ ID NO: 1280363 - DNA, 25 bp, Homo sapien
catcagctacggttttgtaacctgg

SEQ ID NO: 1280364 - DNA, 25 bp, Homo sapien
gcattcctagctagaaaatagtcag

SEQ ID NO: 1280365 - DNA, 25 bp, Homo sapien
gaaaagactgccatcgtctctccca

SEQ ID NO: 1280366 - DNA, 25 bp, Homo sapien
tcagttaaacccatgtcgaaagcag

SEQ ID NO: 1280367 - DNA, 25 bp, Homo sapien
catttagagtatgctacagggaagc

SEQ ID NO: 1280368 - DNA, 25 bp, Homo sapien
cagatgaggcatgaccatgtggcta

SEQ ID NO: 1280369 - DNA, 25 bp, Homo sapien
taaacttatgatgcttgcagcaggg

SEQ ID NO: 1280370 - DNA, 25 bp, Homo sapien
tcaattggatgccttctgctggaga

SEQ ID NO: 1280371 - DNA, 25 bp, Homo sapien
tgaattctgagacctccagcatcct

SEQ ID NO: 1280372 - DNA, 25 bp, Homo sapien
cagtatctaccctgtgaattctgag

SEQ ID NO: 1280373 - DNA, 25 bp, Homo sapien
taccctgtgaattctgagacctcca

SEQ ID NO: 1280374 - DNA, 25 bp, Homo sapien
aatttcagtatctaccctgtgaatt

SEQ ID NO: 1280375 - DNA, 25 bp, Homo sapien
gggacacccacctaattgggcacat

SEQ ID NO: 1280376 - DNA, 25 bp, Homo sapien
ttgctgaatcaatccttgggaccaa

SEQ ID NO: 1280377 - DNA, 25 bp, Homo sapien
atgtcacagttcgattgcccagaga

SEQ ID NO: 1280378 - DNA, 25 bp, Homo sapien
tccttgggaccaatgtgatgaagat

SEQ ID NO: 1280379 - DNA, 25 bp, Homo sapien
aaatggctgttcacagttgcctggg

SEQ ID NO: 1280380 - DNA, 25 bp, Homo sapien
catgtggtggattctccaaatggct

SEQ ID NO: 1280381 - DNA, 25 bp, Homo sapien
ttgcctggggatttgcacgttggca

SEQ ID NO: 1280382 - DNA, 25 bp, Homo sapien
ggattctccaaatggctgttcacag

SEQ ID NO: 1280383 - DNA, 25 bp, Homo sapien
aatggtccaggagggatacatggct

SEQ ID NO: 1280384 - DNA, 25 bp, Homo sapien
tccaacagtacacaggatcaaaggc

SEQ ID NO: 1280385 - DNA, 25 bp, Homo sapien
tcttcgaagagagattaaggcaggg

SEQ ID NO: 1280386 - DNA, 25 bp, Homo sapien
tcaaaggccaacgtatgtggtacaa

SEQ ID NO: 1280387 - DNA, 25 bp, Homo sapien
caagccttggaagaacccccagtct

SEQ ID NO: 1280388 - DNA, 25 bp, Homo sapien
tccaggatgaggtttctgtcaccct

SEQ ID NO: 1280389 - DNA, 25 bp, Homo sapien
cctgagtccactttggagtcaaaca

SEQ ID NO: 1280390 - DNA, 25 bp, Homo sapien
tctggatctatctgacccctgagtc

SEQ ID NO: 1280391 - DNA, 25 bp, Homo sapien
gaaacatgcctttcaggcaggggtg

SEQ ID NO: 1280392 - DNA, 25 bp, Homo sapien
cgaggttagcgagttctcatgaaca

SEQ ID NO: 1280393 - DNA, 25 bp, Homo sapien
ccagctttgggtggtctggtgtgat

SEQ ID NO: 1280394 - DNA, 25 bp, Homo sapien
tggcaggcgtctgttgcacattgaa

SEQ ID NO: 1280395 - DNA, 25 bp, Homo sapien
gggtttgccaaccaggtctactgtg

SEQ ID NO: 1280396 - DNA, 25 bp, Homo sapien
tgaagatctgcctgatggatttttc

SEQ ID NO: 1280397 - DNA, 25 bp, Homo sapien
tacttgcgaacgtggggtttgccaa

SEQ ID NO: 1280398 - DNA, 25 bp, Homo sapien
caaccaggtctactgtgaagatctg

SEQ ID NO: 1280399 - DNA, 25 bp, Homo sapien
gccaagatttgtgaagcggcttctc

SEQ ID NO: 1280400 - DNA, 25 bp, Homo sapien
aagatttgtgaagcggcttctccat

SEQ ID NO: 1280401 - DNA, 25 bp, Homo sapien
ccaagatttgtgaagcggcttctcc

SEQ ID NO: 1280402 - DNA, 25 bp, Homo sapien
ctagccaagatttgtgaagcggctt

SEQ ID NO: 1280403 - DNA, 25 bp, Homo sapien
gcacatatttagttcttcgtggtag

SEQ ID NO: 1280404 - DNA, 25 bp, Homo sapien
tcttcgtggtagttactgacgttca

SEQ ID NO: 1280405 - DNA, 25 bp, Homo sapien
ttagttcttcgtggtagttactgac

SEQ ID NO: 1280406 - DNA, 25 bp, Homo sapien
catatttagttcttcgtggtagtta

SEQ ID NO: 1280407 - DNA, 25 bp, Homo sapien
gtccaagcttaaggccttgatatct

SEQ ID NO: 1280408 - DNA, 25 bp, Homo sapien
gaagtccaagcttaaggccttgata

SEQ ID NO: 1280409 - DNA, 25 bp, Homo sapien
gggaagtccaagcttaaggccttga

SEQ ID NO: 1280410 - DNA, 25 bp, Homo sapien
tgggaagtccaagcttaaggccttg

SEQ ID NO: 1280411 - DNA, 25 bp, Homo sapien
tgcacacttcactcttctggctact

SEQ ID NO: 1280412 - DNA, 25 bp, Homo sapien
tccttctctcacgaccacttctgat

SEQ ID NO: 1280413 - DNA, 25 bp, Homo sapien
ttctctcacgaccacttctgatctg

SEQ ID NO: 1280414 - DNA, 25 bp, Homo sapien
tcactcttctggctacttgctcctt

SEQ ID NO: 1280415 - DNA, 25 bp, Homo sapien
ctacttctccttcagtgatgtccat

SEQ ID NO: 1280416 - DNA, 25 bp, Homo sapien
cattctgtcacatcattgtaaagat

SEQ ID NO: 1280417 - DNA, 25 bp, Homo sapien
ttgtaaagatgagtgtggaagaaga

SEQ ID NO: 1280418 - DNA, 25 bp, Homo sapien
gagcaaatgttcaccatcctgctgg

SEQ ID NO: 1280419 - DNA, 25 bp, Homo sapien
gaagaagagcaaatgttcaccatcc

SEQ ID NO: 1280420 - DNA, 25 bp, Homo sapien
ttcatggtggatgatggagctggct

SEQ ID NO: 1280421 - DNA, 25 bp, Homo sapien
tcatggtggatgatggagctggctg

SEQ ID NO: 1280422 - DNA, 25 bp, Homo sapien
cttcatggtggatgatggagctggc

SEQ ID NO: 1280423 - DNA, 25 bp, Homo sapien
ctgggcaatgtccatcctctgcttc

SEQ ID NO: 1280424 - DNA, 25 bp, Homo sapien
tgggcaatgtccatcctctgcttca

SEQ ID NO: 1280425 - DNA, 25 bp, Homo sapien
gggcaatgtccatcctctgcttcat

SEQ ID NO: 1280426 - DNA, 25 bp, Homo sapien
ggtgccaggcaatgtcggacagctt

SEQ ID NO: 1280427 - DNA, 25 bp, Homo sapien
tcagagtggcttagggacatggtaa

SEQ ID NO: 1280428 - DNA, 25 bp, Homo sapien
ggacatggtaatgcttcccaaaggc

SEQ ID NO: 1280429 - DNA, 25 bp, Homo sapien
tcggacagcttgaggagcatgcagc

SEQ ID NO: 1280430 - DNA, 25 bp, Homo sapien
cagctacagtggtgagttctttcct

SEQ ID NO: 1280431 - DNA, 25 bp, Homo sapien
cacttagttgaaagctcttggtcca

SEQ ID NO: 1280432 - DNA, 25 bp, Homo sapien
cctggcacgttaggacactggacta

SEQ ID NO: 1280433 - DNA, 25 bp, Homo sapien
caacaccagcatgagtgctcaggcc

SEQ ID NO: 1280434 - DNA, 25 bp, Homo sapien
aagggcagttctttggaacaggatg

SEQ ID NO: 1280435 - DNA, 25 bp, Homo sapien
aaagggcagttctttggaacaggat

SEQ ID NO: 1280436 - DNA, 25 bp, Homo sapien
ctgcttaaataccaggtccacacag

SEQ ID NO: 1280437 - DNA, 25 bp, Homo sapien
agggcagttctttggaacaggatgc

SEQ ID NO: 1280438 - DNA, 25 bp, Homo sapien
cgatggtacatgaagctaatggcca

SEQ ID NO: 1280439 - DNA, 25 bp, Homo sapien
gaagaagcatggtctggttgatccg

SEQ ID NO: 1280440 - DNA, 25 bp, Homo sapien
tcctcttcagtgttcccacgcaggt

SEQ ID NO: 1280441 - DNA, 25 bp, Homo sapien
gtgttcccacgcaggtgacagcagg

SEQ ID NO: 1280442 - DNA, 25 bp, Homo sapien
cccacaaatcggacttcagggcaga

SEQ ID NO: 1280443 - DNA, 25 bp, Homo sapien
agaggcctgttgaggcgattgtcag

SEQ ID NO: 1280444 - DNA, 25 bp, Homo sapien
gccttgacagcccacaaatcggact

SEQ ID NO: 1280445 - DNA, 25 bp, Homo sapien
gttgaggcgattgtcagcctctctg

SEQ ID NO: 1280446 - DNA, 25 bp, Homo sapien
agtgaagcatctgagaggatgtttg

SEQ ID NO: 1280447 - DNA, 25 bp, Homo sapien
tttggtatatattgtccaacatttc

SEQ ID NO: 1280448 - DNA, 25 bp, Homo sapien
cttttttgcaagttcagtgaagcat

SEQ ID NO: 1280449 - DNA, 25 bp, Homo sapien
tttgcaagttcagtgaagcatctga

SEQ ID NO: 1280450 - DNA, 25 bp, Homo sapien
tcccctcgtatgataaaactttgca

SEQ ID NO: 1280451 - DNA, 25 bp, Homo sapien
tagggctcccctcgtatgataaaac

SEQ ID NO: 1280452 - DNA, 25 bp, Homo sapien
cagttactgatgtagggctcccctc

SEQ ID NO: 1280453 - DNA, 25 bp, Homo sapien
tgatgtagggctcccctcgtatgat

SEQ ID NO: 1280454 - DNA, 25 bp, Homo sapien
caaacttcaagattggctccgaaag

SEQ ID NO: 1280455 - DNA, 25 bp, Homo sapien
aacttcaagattggctccgaaagac

SEQ ID NO: 1280456 - DNA, 25 bp, Homo sapien
ttagcaaacttcaagattggctccg

SEQ ID NO: 1280457 - DNA, 25 bp, Homo sapien
gcaaacttcaagattggctccgaaa

SEQ ID NO: 1280458 - DNA, 25 bp, Homo sapien
ctttgaccaggcagagcatgtaggg

SEQ ID NO: 1280459 - DNA, 25 bp, Homo sapien
ttccagtacagtttgccggctggct

SEQ ID NO: 1280460 - DNA, 25 bp, Homo sapien
gtcgcattgagcctattcctgaagc

SEQ ID NO: 1280461 - DNA, 25 bp, Homo sapien
ttcttgtgcacttggccgagcggct

SEQ ID NO: 1280462 - DNA, 25 bp, Homo sapien
catccccgagggaagatgggcttct

SEQ ID NO: 1280463 - DNA, 25 bp, Homo sapien
aattacagcagagtcagctgaaccc

SEQ ID NO: 1280464 - DNA, 25 bp, Homo sapien
aacaccttcccagaactgcacacgc

SEQ ID NO: 1280465 - DNA, 25 bp, Homo sapien
cgcaccgatgtcagctaaagtgtca

SEQ ID NO: 1280466 - DNA, 25 bp, Homo sapien
tcacaactattacagccacggtctt

SEQ ID NO: 1280467 - DNA, 25 bp, Homo sapien
caactattacagccacggtcttcat

SEQ ID NO: 1280468 - DNA, 25 bp, Homo sapien
catcacaactattacagccacggtc

SEQ ID NO: 1280469 - DNA, 25 bp, Homo sapien
cacaactattacagccacggtcttc

SEQ ID NO: 1280470 - DNA, 25 bp, Homo sapien
acttgaaaactgacatactcgcgga

SEQ ID NO: 1280471 - DNA, 25 bp, Homo sapien
tcaacgcagtaatgatgtccacatg

SEQ ID NO: 1280472 - DNA, 25 bp, Homo sapien
tactcgcggatggttaaattgttgt

SEQ ID NO: 1280473 - DNA, 25 bp, Homo sapien
ggcaggctaaggcagtcaacgcagt

SEQ ID NO: 1280474 - DNA, 25 bp, Homo sapien
aaatctgggctttcggcacttcgga

SEQ ID NO: 1280475 - DNA, 25 bp, Homo sapien
gcacttcggaggatattctttcgga

SEQ ID NO: 1280476 - DNA, 25 bp, Homo sapien
taatgagaatgctggcgtacagtgc

SEQ ID NO: 1280477 - DNA, 25 bp, Homo sapien
cgtccgtgcagggtgacacatttca

SEQ ID NO: 1280478 - DNA, 25 bp, Homo sapien
aagacgctggggattctgggaccat

SEQ ID NO: 1280479 - DNA, 25 bp, Homo sapien
gccacaagacgctggggattctggg

SEQ ID NO: 1280480 - DNA, 25 bp, Homo sapien
ccacaagacgctggggattctggga

SEQ ID NO: 1280481 - DNA, 25 bp, Homo sapien
acaagacgctggggattctgggacc

SEQ ID NO: 1280482 - DNA, 25 bp, Homo sapien
atgtagcagtaaatgagaactggtt

SEQ ID NO: 1280483 - DNA, 25 bp, Homo sapien
aatgtagcagtaaatgagaactggt

SEQ ID NO: 1280484 - DNA, 25 bp, Homo sapien
tgtagcagtaaatgagaactggttt

SEQ ID NO: 1280485 - DNA, 25 bp, Homo sapien
ttaaagtaagctcacccgttgtatc

SEQ ID NO: 1280486 - DNA, 25 bp, Homo sapien
gacttctggtcagcggcaacaaatg

SEQ ID NO: 1280487 - DNA, 25 bp, Homo sapien
agctcacccgttgtatcatcttcgc

SEQ ID NO: 1280488 - DNA, 25 bp, Homo sapien
ctcagacttctggtcagcggcaaca

SEQ ID NO: 1280489 - DNA, 25 bp, Homo sapien
accattgaacatggcgtatttgctt

SEQ ID NO: 1280490 - DNA, 25 bp, Homo sapien
attgaacatggcgtatttgctttaa

SEQ ID NO: 1280491 - DNA, 25 bp, Homo sapien
cattgaacatggcgtatttgcttta

SEQ ID NO: 1280492 - DNA, 25 bp, Homo sapien
tgaacatggcgtatttgctttaatt

SEQ ID NO: 1280493 - DNA, 25 bp, Homo sapien
cattagcagcggtacccagggtgat

SEQ ID NO: 1280494 - DNA, 25 bp, Homo sapien
ccgacaccgcgtagtcatcatggaa

SEQ ID NO: 1280495 - DNA, 25 bp, Homo sapien
tcatcatggaagacattagcagcgg

SEQ ID NO: 1280496 - DNA, 25 bp, Homo sapien
tgagcgatattctattaggcattct

SEQ ID NO: 1280497 - DNA, 25 bp, Homo sapien
gctgcggaattctggccccagccaa

SEQ ID NO: 1280498 - DNA, 25 bp, Homo sapien
ctttagttgaaagagctggcacagc

SEQ ID NO: 1280499 - DNA, 25 bp, Homo sapien
gacctacgggattctgagggatatt

SEQ ID NO: 1280500 - DNA, 25 bp, Homo sapien
ccttccttcgttctcatacctggtg

SEQ ID NO: 1280501 - DNA, 25 bp, Homo sapien
cacaccaaaatcctcgaagcctttt

SEQ ID NO: 1280502 - DNA, 25 bp, Homo sapien
cttttccagacttctcaaggttgtt

SEQ ID NO: 1280503 - DNA, 25 bp, Homo sapien
agccacaccaaaatcctcgaagcct

SEQ ID NO: 1280504 - DNA, 25 bp, Homo sapien
ttttccagacttctcaaggttgttc

SEQ ID NO: 1280505 - DNA, 25 bp, Homo sapien
aactggttgaaatggtcagggatgc

SEQ ID NO: 1280506 - DNA, 25 bp, Homo sapien
aaactggttgaaatggtcagggatg

SEQ ID NO: 1280507 - DNA, 25 bp, Homo sapien
taaactggttgaaatggtcagggat

SEQ ID NO: 1280508 - DNA, 25 bp, Homo sapien
ttaaactggttgaaatggtcaggga

SEQ ID NO: 1280509 - DNA, 25 bp, Homo sapien
aactcgggtgaggtggccacgccct

SEQ ID NO: 1280510 - DNA, 25 bp, Homo sapien
tccactaggtaggagctcactctgt

SEQ ID NO: 1280511 - DNA, 25 bp, Homo sapien
ggctccagggctcgttgcttccttg

SEQ ID NO: 1280512 - DNA, 25 bp, Homo sapien
tccggtttcctctgtccatagcagt

SEQ ID NO: 1280513 - DNA, 25 bp, Homo sapien
tggaaagaattaccctgctgtcaac

SEQ ID NO: 1280514 - DNA, 25 bp, Homo sapien
gcataacatccctttcatggttggt

SEQ ID NO: 1280515 - DNA, 25 bp, Homo sapien
gaacattaaacaagtgcccagcagg

SEQ ID NO: 1280516 - DNA, 25 bp, Homo sapien
caatgggaatccttttgtatagaga

SEQ ID NO: 1280517 - DNA, 25 bp, Homo sapien
gagggtctcaatagcagggtccaac

SEQ ID NO: 1280518 - DNA, 25 bp, Homo sapien
gggtctcaatagcagggtccaacaa

SEQ ID NO: 1280519 - DNA, 25 bp, Homo sapien
tttgagggtctcaatagcagggtcc

SEQ ID NO: 1280520 - DNA, 25 bp, Homo sapien
tgagggtctcaatagcagggtccaa

SEQ ID NO: 1280521 - DNA, 25 bp, Homo sapien
gggaaattcgacctgaagttcagac

SEQ ID NO: 1280522 - DNA, 25 bp, Homo sapien
gaggggaaattcgacctgaagttca

SEQ ID NO: 1280523 - DNA, 25 bp, Homo sapien
aaattcgacctgaagttcagacatg

SEQ ID NO: 1280524 - DNA, 25 bp, Homo sapien
taaaagctataatttccaaggagac

SEQ ID NO: 1280525 - DNA, 25 bp, Homo sapien
catagacctgtttgaggcagtataa

SEQ ID NO: 1280526 - DNA, 25 bp, Homo sapien
gggaccatggccatagacctgtttg

SEQ ID NO: 1280527 - DNA, 25 bp, Homo sapien
cctgtggtgctgaatgtctggaaat

SEQ ID NO: 1280528 - DNA, 25 bp, Homo sapien
ctggaaattgtccccatagggcaca

SEQ ID NO: 1280529 - DNA, 25 bp, Homo sapien
gatcaatcctcgtggctactgaaca

SEQ ID NO: 1280530 - DNA, 25 bp, Homo sapien
taggatagacttgtagatggactgc

SEQ ID NO: 1280531 - DNA, 25 bp, Homo sapien
tcgtctccatcgagcagctgtgaac

SEQ ID NO: 1280532 - DNA, 25 bp, Homo sapien
ttttagccatccagggcatggaagg

SEQ ID NO: 1280533 - DNA, 25 bp, Homo sapien
cttgtagcgacctgtgtgcagtagg

SEQ ID NO: 1280534 - DNA, 25 bp, Homo sapien
acctggagtcttgtagcgacctgtg

SEQ ID NO: 1280535 - DNA, 25 bp, Homo sapien
ccttaggcaaagcaattgcacctgg

SEQ ID NO: 1280536 - DNA, 25 bp, Homo sapien
gtccttaggcaaagcaattgcacct

SEQ ID NO: 1280537 - DNA, 25 bp, Homo sapien
taatgggcccgttcaccagcaggct

SEQ ID NO: 1280538 - DNA, 25 bp, Homo sapien
agcactgtactttcaccggagacat

SEQ ID NO: 1280539 - DNA, 25 bp, Homo sapien
ctaatgggcccgttcaccagcaggc

SEQ ID NO: 1280540 - DNA, 25 bp, Homo sapien
aatgggcccgttcaccagcaggctg

SEQ ID NO: 1280541 - DNA, 25 bp, Homo sapien
ccttgtcttcgggactaaacaggag

SEQ ID NO: 1280542 - DNA, 25 bp, Homo sapien
atcccttgtcttcgggactaaacag

SEQ ID NO: 1280543 - DNA, 25 bp, Homo sapien
tccatcccttgtcttcgggactaaa

SEQ ID NO: 1280544 - DNA, 25 bp, Homo sapien
cttgtcttcgggactaaacaggagg

SEQ ID NO: 1280545 - DNA, 25 bp, Homo sapien
ctcatcttgtgtcacaccaccagca

SEQ ID NO: 1280546 - DNA, 25 bp, Homo sapien
tcatcttgtgtcacaccaccagcat

SEQ ID NO: 1280547 - DNA, 25 bp, Homo sapien
tcttgtgtcacaccaccagcatcca

SEQ ID NO: 1280548 - DNA, 25 bp, Homo sapien
catcttgtgtcacaccaccagcatc

SEQ ID NO: 1280549 - DNA, 25 bp, Homo sapien
aagcaacagccgtgggcttgtgata

SEQ ID NO: 1280550 - DNA, 25 bp, Homo sapien
cagccgtgggcttgtgataatttga

SEQ ID NO: 1280551 - DNA, 25 bp, Homo sapien
caacagccgtgggcttgtgataatt

SEQ ID NO: 1280552 - DNA, 25 bp, Homo sapien
acagccgtgggcttgtgataatttg

SEQ ID NO: 1280553 - DNA, 25 bp, Homo sapien
tttttaaggcagagtaatatcccat

SEQ ID NO: 1280554 - DNA, 25 bp, Homo sapien
atcccattgtatatagagaccacat

SEQ ID NO: 1280555 - DNA, 25 bp, Homo sapien
ggcataatcatgacacattgcagcc

SEQ ID NO: 1280556 - DNA, 25 bp, Homo sapien
aatatcccattgtatatagagacca

SEQ ID NO: 1280557 - DNA, 25 bp, Homo sapien
cgaatctagtactaaatgtgcttct

SEQ ID NO: 1280558 - DNA, 25 bp, Homo sapien
caccgaatctagtactaaatgtgct

SEQ ID NO: 1280559 - DNA, 25 bp, Homo sapien
tagcttcaccgaatctagtactaaa

SEQ ID NO: 1280560 - DNA, 25 bp, Homo sapien
aggcttctagcttcaccgaatctag

SEQ ID NO: 1280561 - DNA, 25 bp, Homo sapien
tttagcgttttgaagtccttggctg

SEQ ID NO: 1280562 - DNA, 25 bp, Homo sapien
tagcgttttgaagtccttggctgcc

SEQ ID NO: 1280563 - DNA, 25 bp, Homo sapien
tgctacagaggagcccggggatttc

SEQ ID NO: 1280564 - DNA, 25 bp, Homo sapien
tgtaatgctacagaggagcccgggg

SEQ ID NO: 1280565 - DNA, 25 bp, Homo sapien
tcagtggcatacagaggcccacagc

SEQ ID NO: 1280566 - DNA, 25 bp, Homo sapien
tcagtcagtggcatacagaggccca

SEQ ID NO: 1280567 - DNA, 25 bp, Homo sapien
gtggcatgaacagccccggcttcag

SEQ ID NO: 1280568 - DNA, 25 bp, Homo sapien
ctgcttacacatggtggcatgaaca

SEQ ID NO: 1280569 - DNA, 25 bp, Homo sapien
caatgagggcagataccacggtttt

SEQ ID NO: 1280570 - DNA, 25 bp, Homo sapien
aaagacaatgagggcagataccacg

SEQ ID NO: 1280571 - DNA, 25 bp, Homo sapien
tgagggcagataccacggttttcat

SEQ ID NO: 1280572 - DNA, 25 bp, Homo sapien
gacaatgagggcagataccacggtt

SEQ ID NO: 1280573 - DNA, 25 bp, Homo sapien
tactttaactcaatggctcccagtg

SEQ ID NO: 1280574 - DNA, 25 bp, Homo sapien
cactgtcatttacggagctggcact

SEQ ID NO: 1280575 - DNA, 25 bp, Homo sapien
agcaagtcatgtggccacgtccagg

SEQ ID NO: 1280576 - DNA, 25 bp, Homo sapien
ggccttttgcaatgctcctggtaga

SEQ ID NO: 1280577 - DNA, 25 bp, Homo sapien
gcagcatacctgctctgtgctcttc

SEQ ID NO: 1280578 - DNA, 25 bp, Homo sapien
ttaaggaagctgctggacataagaa

SEQ ID NO: 1280579 - DNA, 25 bp, Homo sapien
gctggacataagaacagctgctgat

SEQ ID NO: 1280580 - DNA, 25 bp, Homo sapien
acagctgctgatcccaggcacaggc

SEQ ID NO: 1280581 - DNA, 25 bp, Homo sapien
ctgctggtcaccagcggcagggcaa

SEQ ID NO: 1280582 - DNA, 25 bp, Homo sapien
agggagtctgattcctgtccagtcg

SEQ ID NO: 1280583 - DNA, 25 bp, Homo sapien
aagaccgccggcattggctgctggt

SEQ ID NO: 1280584 - DNA, 25 bp, Homo sapien
gcattttcgatgtgcttcatgctct

SEQ ID NO: 1280585 - DNA, 25 bp, Homo sapien
tcttggttgtcaaatgccaccgtga

SEQ ID NO: 1280586 - DNA, 25 bp, Homo sapien
gtccctaatgcgtctttcttggttg

SEQ ID NO: 1280587 - DNA, 25 bp, Homo sapien
tcttgccccaaaaggttcttgtctc

SEQ ID NO: 1280588 - DNA, 25 bp, Homo sapien
caccgtgagtctgattcctttctgt

SEQ ID NO: 1280589 - DNA, 25 bp, Homo sapien
tcatggttcccagcatatagcagac

SEQ ID NO: 1280590 - DNA, 25 bp, Homo sapien
gctttccccaatacagtcaacctga

SEQ ID NO: 1280591 - DNA, 25 bp, Homo sapien
cccagtgaggttgagtcgggactca

SEQ ID NO: 1280592 - DNA, 25 bp, Homo sapien
gtgttgcccacgttcattgcccagt

SEQ ID NO: 1280593 - DNA, 25 bp, Homo sapien
aatctctgtgtaggttgtaaaattc

SEQ ID NO: 1280594 - DNA, 25 bp, Homo sapien
ccaatctctgtgtaggttgtaaaat

SEQ ID NO: 1280595 - DNA, 25 bp, Homo sapien
agtcccgttgggctttccaatctct

SEQ ID NO: 1280596 - DNA, 25 bp, Homo sapien
catgcctccccatagtcccgttggg

SEQ ID NO: 1280597 - DNA, 25 bp, Homo sapien
cattactctcccgacctgttccaga

SEQ ID NO: 1280598 - DNA, 25 bp, Homo sapien
agtttccattactctcccgacctgt

SEQ ID NO: 1280599 - DNA, 25 bp, Homo sapien
cggccagtttccattactctcccga

SEQ ID NO: 1280600 - DNA, 25 bp, Homo sapien
tactctcccgacctgttccagattt

SEQ ID NO: 1280601 - DNA, 25 bp, Homo sapien
caaaggagaaatgtccacgatagtc

SEQ ID NO: 1280602 - DNA, 25 bp, Homo sapien
gccactcttgcacggcaaaggagaa

SEQ ID NO: 1280603 - DNA, 25 bp, Homo sapien
atagtccaagaagcgccgtccctgg

SEQ ID NO: 1280604 - DNA, 25 bp, Homo sapien
gggtaatagccactcttgcacggca

SEQ ID NO: 1280605 - DNA, 25 bp, Homo sapien
ttatgggacatctggtggaaatgca

SEQ ID NO: 1280606 - DNA, 25 bp, Homo sapien
aataagtgttatgggacatctggtg

SEQ ID NO: 1280607 - DNA, 25 bp, Homo sapien
ctccaacaaataagtgttatgggac

SEQ ID NO: 1280608 - DNA, 25 bp, Homo sapien
caacaaataagtgttatgggacatc

SEQ ID NO: 1280609 - DNA, 25 bp, Homo sapien
taaatgcgtgcatgaataaatggac

SEQ ID NO: 1280610 - DNA, 25 bp, Homo sapien
catggaggtcctgtgtgctgaccaa

SEQ ID NO: 1280611 - DNA, 25 bp, Homo sapien
tccgaggcctgaatatgattggtgc

SEQ ID NO: 1280612 - DNA, 25 bp, Homo sapien
ccaagttgctggagcgggtcgttta

SEQ ID NO: 1280613 - DNA, 25 bp, Homo sapien
tgggccagagtggtgcgtcgcaggc

SEQ ID NO: 1280614 - DNA, 25 bp, Homo sapien
gctttggtggatttgaaatatggga

SEQ ID NO: 1280615 - DNA, 25 bp, Homo sapien
gacccataagatgtgccgcctttga

SEQ ID NO: 1280616 - DNA, 25 bp, Homo sapien
tggtgcgtcgcaggcatgaagaggc

SEQ ID NO: 1280617 - DNA, 25 bp, Homo sapien
ttcagcatctgagcggacatcctgc

SEQ ID NO: 1280618 - DNA, 25 bp, Homo sapien
aagcctgtctgttcatcctccatct

SEQ ID NO: 1280619 - DNA, 25 bp, Homo sapien
gctcttcctcatcaattaagcctgt

SEQ ID NO: 1280620 - DNA, 25 bp, Homo sapien
acaccagagccatggtcttcagcat

SEQ ID NO: 1280621 - DNA, 25 bp, Homo sapien
gacaaagtgtcaaaccaggatcttg

SEQ ID NO: 1280622 - DNA, 25 bp, Homo sapien
taaaattcagtagtgggtgcaccgt

SEQ ID NO: 1280623 - DNA, 25 bp, Homo sapien
tgcaccgtggaaatagagcctgttt

SEQ ID NO: 1280624 - DNA, 25 bp, Homo sapien
gcatttgtctgataccgggtgtccc

SEQ ID NO: 1280625 - DNA, 25 bp, Homo sapien
ctgtgttcttgaccggccagggccc

SEQ ID NO: 1280626 - DNA, 25 bp, Homo sapien
tgaggataaagcgagcacctaaatc

SEQ ID NO: 1280627 - DNA, 25 bp, Homo sapien
gataaagcgagcacctaaatcaata

SEQ ID NO: 1280628 - DNA, 25 bp, Homo sapien
ggataaagcgagcacctaaatcaat

SEQ ID NO: 1280629 - DNA, 25 bp, Homo sapien
cctaaatcaatacccccaataacat

SEQ ID NO: 1280630 - DNA, 25 bp, Homo sapien
cttcttgcgagtcaaatacatcaca

SEQ ID NO: 1280631 - DNA, 25 bp, Homo sapien
tctcatttacaatttggtaggtggg

SEQ ID NO: 1280632 - DNA, 25 bp, Homo sapien
cgagtcaaatacatcacagtcccca

SEQ ID NO: 1280633 - DNA, 25 bp, Homo sapien
catttacaatttggtaggtgggcct

SEQ ID NO: 1280634 - DNA, 25 bp, Homo sapien
gcaaaaaacagagctcggtgcctgg

SEQ ID NO: 1280635 - DNA, 25 bp, Homo sapien
gtttgcaaaaaacagagctcggtgc

SEQ ID NO: 1280636 - DNA, 25 bp, Homo sapien
tgcaaaaaacagagctcggtgcctg

SEQ ID NO: 1280637 - DNA, 25 bp, Homo sapien
ccagggaagagatgccggctggcac

SEQ ID NO: 1280638 - DNA, 25 bp, Homo sapien
ggagtgtaactcagctcagagatca

SEQ ID NO: 1280639 - DNA, 25 bp, Homo sapien
ggtcttaccaacagagggctcttga

SEQ ID NO: 1280640 - DNA, 25 bp, Homo sapien
tgtgctgccaatgagattccagtga

SEQ ID NO: 1280641 - DNA, 25 bp, Homo sapien
tttgggaccgggctataggatccta

SEQ ID NO: 1280642 - DNA, 25 bp, Homo sapien
tgctgccaaccaaggcgcccttgtg

SEQ ID NO: 1280643 - DNA, 25 bp, Homo sapien
cgcccttgtgggctgttcacctgag

SEQ ID NO: 1280644 - DNA, 25 bp, Homo sapien
gcccatggctgctgccaaccaaggc

SEQ ID NO: 1280645 - DNA, 25 bp, Homo sapien
ggctgttcacctgagctgccgccat

SEQ ID NO: 1280646 - DNA, 25 bp, Homo sapien
taccaaggacgtaggtctcatttcc

SEQ ID NO: 1280647 - DNA, 25 bp, Homo sapien
gaggcaataccaaggacgtaggtct

SEQ ID NO: 1280648 - DNA, 25 bp, Homo sapien
tgtttgctgataaccctcttctctg

SEQ ID NO: 1280649 - DNA, 25 bp, Homo sapien
ggtaaccccagcagatagaggcaat

SEQ ID NO: 1280650 - DNA, 25 bp, Homo sapien
cagcaggggctccttttgcagactg

SEQ ID NO: 1280651 - DNA, 25 bp, Homo sapien
caggggctccttttgcagactgagc

SEQ ID NO: 1280652 - DNA, 25 bp, Homo sapien
ggggctccttttgcagactgagcca

SEQ ID NO: 1280653 - DNA, 25 bp, Homo sapien
gcaggggctccttttgcagactgag

SEQ ID NO: 1280654 - DNA, 25 bp, Homo sapien
gttctggatgactggcgccccctgc

SEQ ID NO: 1280655 - DNA, 25 bp, Homo sapien
ccctgcagttgtgcacaacagccct

SEQ ID NO: 1280656 - DNA, 25 bp, Homo sapien
gagttctggatgactggcgccccct

SEQ ID NO: 1280657 - DNA, 25 bp, Homo sapien
cgccccctgcagttgtgcacaacag

SEQ ID NO: 1280658 - DNA, 25 bp, Homo sapien
gcctgcaagctcattcgctcatcaa

SEQ ID NO: 1280659 - DNA, 25 bp, Homo sapien
cccaaacgcatcagccagggatagg

SEQ ID NO: 1280660 - DNA, 25 bp, Homo sapien
catcagccagggataggcgagtact

SEQ ID NO: 1280661 - DNA, 25 bp, Homo sapien
ataggcgagtactggctctcgggcc

SEQ ID NO: 1280662 - DNA, 25 bp, Homo sapien
catgagaacaagtgagtagataatc

SEQ ID NO: 1280663 - DNA, 25 bp, Homo sapien
gtgagtagataatctggctcttttc

SEQ ID NO: 1280664 - DNA, 25 bp, Homo sapien
gaacaagtgagtagataatctggct

SEQ ID NO: 1280665 - DNA, 25 bp, Homo sapien
gccttcatgagaacaagtgagtaga

SEQ ID NO: 1280666 - DNA, 25 bp, Homo sapien
aagcatttccatctatcgggacacc

SEQ ID NO: 1280667 - DNA, 25 bp, Homo sapien
ccagtcgggacccttccaggttcat

SEQ ID NO: 1280668 - DNA, 25 bp, Homo sapien
atttccatctatcgggacacccacc

SEQ ID NO: 1280669 - DNA, 25 bp, Homo sapien
gcatttccatctatcgggacaccca

SEQ ID NO: 1280670 - DNA, 25 bp, Homo sapien
caccggttcttctagggtgccctct

SEQ ID NO: 1280671 - DNA, 25 bp, Homo sapien
ctgggcccactctccaccggttctt

SEQ ID NO: 1280672 - DNA, 25 bp, Homo sapien
ggttcttctagggtgccctcttgta

SEQ ID NO: 1280673 - DNA, 25 bp, Homo sapien
ctagggtgccctcttgtaagtgtag

SEQ ID NO: 1280674 - DNA, 25 bp, Homo sapien
tacttgtaggtaggtactatgtact

SEQ ID NO: 1280675 - DNA, 25 bp, Homo sapien
tcgatatggatggtagcatggtact

SEQ ID NO: 1280676 - DNA, 25 bp, Homo sapien
tctttgatggattcacagatttgct

SEQ ID NO: 1280677 - DNA, 25 bp, Homo sapien
tactgtggagatggatttaagaggc

SEQ ID NO: 1280678 - DNA, 25 bp, Homo sapien
tgtccctggtgcatgagttggccct

SEQ ID NO: 1280679 - DNA, 25 bp, Homo sapien
catgagttggccctgatgaaagttc

SEQ ID NO: 1280680 - DNA, 25 bp, Homo sapien
gtgatcagtgccagacccgactgtc

SEQ ID NO: 1280681 - DNA, 25 bp, Homo sapien
cactgctgtctccacgattggtgag

SEQ ID NO: 1280682 - DNA, 25 bp, Homo sapien
ccccaggtactcagacacctctgtt

SEQ ID NO: 1280683 - DNA, 25 bp, Homo sapien
agctcctcaagggtgtggccaatct

SEQ ID NO: 1280684 - DNA, 25 bp, Homo sapien
agcatctgatgccagctcgttaatg

SEQ ID NO: 1280685 - DNA, 25 bp, Homo sapien
tcctcaagggtgtggccaatctccc

SEQ ID NO: 1280686 - DNA, 25 bp, Homo sapien
gaagcggtcatcagtgctgtgtgat

SEQ ID NO: 1280687 - DNA, 25 bp, Homo sapien
caagtgggtgttgggccgggaagcg

SEQ ID NO: 1280688 - DNA, 25 bp, Homo sapien
gggaagcggtcatcagtgctgtgtg

SEQ ID NO: 1280689 - DNA, 25 bp, Homo sapien
ggaagcggtcatcagtgctgtgtga

SEQ ID NO: 1280690 - DNA, 25 bp, Homo sapien
acccagggccactgaattgccttgc

SEQ ID NO: 1280691 - DNA, 25 bp, Homo sapien
atatccacatcaggcagtgataagg

SEQ ID NO: 1280692 - DNA, 25 bp, Homo sapien
tccacatcaggcagtgataaggcag

SEQ ID NO: 1280693 - DNA, 25 bp, Homo sapien
ggccactgaattgccttgcagaggc

SEQ ID NO: 1280694 - DNA, 25 bp, Homo sapien
cttaattgctgctgggcaaactgtt

SEQ ID NO: 1280695 - DNA, 25 bp, Homo sapien
tgctgctgggcaaactgtttgagcg

SEQ ID NO: 1280696 - DNA, 25 bp, Homo sapien
tgctgggcaaactgtttgagcgaca

SEQ ID NO: 1280697 - DNA, 25 bp, Homo sapien
gctgggcaaactgtttgagcgacat

SEQ ID NO: 1280698 - DNA, 25 bp, Homo sapien
catcatctgggtatcatgagagccc

SEQ ID NO: 1280699 - DNA, 25 bp, Homo sapien
cagaacaaactgcatggaatgtcac

SEQ ID NO: 1280700 - DNA, 25 bp, Homo sapien
caagtcattgcctctgttcccggag

SEQ ID NO: 1280701 - DNA, 25 bp, Homo sapien
ctgcctgaacgaagctggagcgtgc

SEQ ID NO: 1280702 - DNA, 25 bp, Homo sapien
gcatctggtctatcccgtctttcct

SEQ ID NO: 1280703 - DNA, 25 bp, Homo sapien
tcctgacgtaggatgccccagtggc

SEQ ID NO: 1280704 - DNA, 25 bp, Homo sapien
ttctctggaggctccgtcgtgttcc

SEQ ID NO: 1280705 - DNA, 25 bp, Homo sapien
catcacagcgggtcctgacgtagga

SEQ ID NO: 1280706 - DNA, 25 bp, Homo sapien
ggctctgaatccggattcctaattc

SEQ ID NO: 1280707 - DNA, 25 bp, Homo sapien
ccgtcgcctcggccacacatgggca

SEQ ID NO: 1280708 - DNA, 25 bp, Homo sapien
gcccgtcgcctcggccacacatggg

SEQ ID NO: 1280709 - DNA, 25 bp, Homo sapien
atgggcaggctctgaatccggattc

SEQ ID NO: 1280710 - DNA, 25 bp, Homo sapien
cttgcgtgtcattgactccccagga

SEQ ID NO: 1280711 - DNA, 25 bp, Homo sapien
ctccccaggactggactttctgtcc

SEQ ID NO: 1280712 - DNA, 25 bp, Homo sapien
ccccaggactggactttctgtccat

SEQ ID NO: 1280713 - DNA, 25 bp, Homo sapien
tgcgtgtcattgactccccaggact

SEQ ID NO: 1280714 - DNA, 25 bp, Homo sapien
gagacatctgtgtagcgtagcgtgt

SEQ ID NO: 1280715 - DNA, 25 bp, Homo sapien
tatacatcatctcgccaggctggca

SEQ ID NO: 1280716 - DNA, 25 bp, Homo sapien
tccccgtgagtgattaaaacgtcgc

SEQ ID NO: 1280717 - DNA, 25 bp, Homo sapien
caggctggcacttcatcaagggcca

SEQ ID NO: 1280718 - DNA, 25 bp, Homo sapien
cggtatttctatgctcccagaaagg

SEQ ID NO: 1280719 - DNA, 25 bp, Homo sapien
gatcccagagggcattcgcttctga

SEQ ID NO: 1280720 - DNA, 25 bp, Homo sapien
taaaaatcgaatccagactgctgcc

SEQ ID NO: 1280721 - DNA, 25 bp, Homo sapien
tactggcgcagctgaattggtacct

SEQ ID NO: 1280722 - DNA, 25 bp, Homo sapien
ccatgcggcgatcagacggtgccag

SEQ ID NO: 1280723 - DNA, 25 bp, Homo sapien
catttgagagttgggctttcctggg

SEQ ID NO: 1280724 - DNA, 25 bp, Homo sapien
gggctgtctaactggacccggcact

SEQ ID NO: 1280725 - DNA, 25 bp, Homo sapien
cggcactggacagctccaggtgttt

SEQ ID NO: 1280726 - DNA, 25 bp, Homo sapien
tattggtgctagtacagaagttctc

SEQ ID NO: 1280727 - DNA, 25 bp, Homo sapien
ctgtggtcacttggcccatattggt

SEQ ID NO: 1280728 - DNA, 25 bp, Homo sapien
tcacttggcccatattggtgctagt

SEQ ID NO: 1280729 - DNA, 25 bp, Homo sapien
tggtgctagtacagaagttctccat

SEQ ID NO: 1280730 - DNA, 25 bp, Homo sapien
ccaatcaattgagctcctgttccaa

SEQ ID NO: 1280731 - DNA, 25 bp, Homo sapien
aattgagctcctgttccaatcacac

SEQ ID NO: 1280732 - DNA, 25 bp, Homo sapien
ctccaatcaattgagctcctgttcc

SEQ ID NO: 1280733 - DNA, 25 bp, Homo sapien
aatcaattgagctcctgttccaatc

SEQ ID NO: 1280734 - DNA, 25 bp, Homo sapien
ttggattgatttttgccagtggtga

SEQ ID NO: 1280735 - DNA, 25 bp, Homo sapien
ctggtagggatttaattgctttgga

SEQ ID NO: 1280736 - DNA, 25 bp, Homo sapien
ggattgatttttgccagtggtgact

SEQ ID NO: 1280737 - DNA, 25 bp, Homo sapien
tggattgatttttgccagtggtgac

SEQ ID NO: 1280738 - DNA, 25 bp, Homo sapien
agacagctttgagcagaagtggaga

SEQ ID NO: 1280739 - DNA, 25 bp, Homo sapien
ctggaatgtttcaaagacagctttg

SEQ ID NO: 1280740 - DNA, 25 bp, Homo sapien
ggcccagccaatggggtccctcctc

SEQ ID NO: 1280741 - DNA, 25 bp, Homo sapien
agagggcccagccaatggggtccct

SEQ ID NO: 1280742 - DNA, 25 bp, Homo sapien
gtggaggcctctcggagtcctttgc

SEQ ID NO: 1280743 - DNA, 25 bp, Homo sapien
tcaatggagcgtggaggcctctcgg

SEQ ID NO: 1280744 - DNA, 25 bp, Homo sapien
gaggcctctcggagtcctttgctcc

SEQ ID NO: 1280745 - DNA, 25 bp, Homo sapien
agcgtggaggcctctcggagtcctt

SEQ ID NO: 1280746 - DNA, 25 bp, Homo sapien
ctgagatcaatctgaagtgtgacct

SEQ ID NO: 1280747 - DNA, 25 bp, Homo sapien
caatctgaagtgtgacctcgggaat

SEQ ID NO: 1280748 - DNA, 25 bp, Homo sapien
gaagtgtgacctcgggaatttcctg

SEQ ID NO: 1280749 - DNA, 25 bp, Homo sapien
gatcaatctgaagtgtgacctcggg

SEQ ID NO: 1280750 - DNA, 25 bp, Homo sapien
ttggctttaggatgaggttctgtcg

SEQ ID NO: 1280751 - DNA, 25 bp, Homo sapien
caggagatgaaggtctgatttggct

SEQ ID NO: 1280752 - DNA, 25 bp, Homo sapien
gttctgtcgtatgcatgaaggatgc

SEQ ID NO: 1280753 - DNA, 25 bp, Homo sapien
tagaccacatcatcggcacaggaga

SEQ ID NO: 1280754 - DNA, 25 bp, Homo sapien
ctgacttgtcccatccccgttgtag

SEQ ID NO: 1280755 - DNA, 25 bp, Homo sapien
caggtaagacccatgtactttctga

SEQ ID NO: 1280756 - DNA, 25 bp, Homo sapien
ccatccccgttgtaggtatcatgtc

SEQ ID NO: 1280757 - DNA, 25 bp, Homo sapien
cgtgtaagcaagtcccaggtaagac

SEQ ID NO: 1280758 - DNA, 25 bp, Homo sapien
agggagcaaagcccttgctgatgct

SEQ ID NO: 1280759 - DNA, 25 bp, Homo sapien
gtgagaggaagagcgctcgctgaga

SEQ ID NO: 1280760 - DNA, 25 bp, Homo sapien
agagaagtaggtcacgggggcttct

SEQ ID NO: 1280761 - DNA, 25 bp, Homo sapien
gagtgagaggaagagcgctcgctga

SEQ ID NO: 1280762 - DNA, 25 bp, Homo sapien
caggatctgggcaactctgccagcc

SEQ ID NO: 1280763 - DNA, 25 bp, Homo sapien
agcataagcaacgtgctttccttgg

SEQ ID NO: 1280764 - DNA, 25 bp, Homo sapien
tctgccagccaggaaacgcagaccg

SEQ ID NO: 1280765 - DNA, 25 bp, Homo sapien
aggaaacgcagaccgcccttgatta

SEQ ID NO: 1280766 - DNA, 25 bp, Homo sapien
aatgaggtcattaggcgccggaagc

SEQ ID NO: 1280767 - DNA, 25 bp, Homo sapien
gctgcttcaggtatggaacccacac

SEQ ID NO: 1280768 - DNA, 25 bp, Homo sapien
ggtgcagctctggaacggttcccta

SEQ ID NO: 1280769 - DNA, 25 bp, Homo sapien
tccggcatcctgcatttccgagtgg

SEQ ID NO: 1280770 - DNA, 25 bp, Homo sapien
ccgactcgggctcgtgggagcgcgt

SEQ ID NO: 1280771 - DNA, 25 bp, Homo sapien
gcgcgtccgccagctcgcggcgcag

SEQ ID NO: 1280772 - DNA, 25 bp, Homo sapien
ggcgcagggcgagccggcgccttcc

SEQ ID NO: 1280773 - DNA, 25 bp, Homo sapien
gggctcgtgggagcgcgtccgccag

SEQ ID NO: 1280774 - DNA, 25 bp, Homo sapien
gtctctctcgccttcgaataggcag

SEQ ID NO: 1280775 - DNA, 25 bp, Homo sapien
agaagccatgcctgccacggcccct

SEQ ID NO: 1280776 - DNA, 25 bp, Homo sapien
tcagaagccatgcctgccacggccc

SEQ ID NO: 1280777 - DNA, 25 bp, Homo sapien
ctctctcgccttcgaataggcaggg

SEQ ID NO: 1280778 - DNA, 25 bp, Homo sapien
acacgaatgaactgccccagagagg

SEQ ID NO: 1280779 - DNA, 25 bp, Homo sapien
tcctgcagtgccaatcctcaggtga

SEQ ID NO: 1280780 - DNA, 25 bp, Homo sapien
tagcctctgccatgaaggtgttacc

SEQ ID NO: 1280781 - DNA, 25 bp, Homo sapien
ggctggaggtctgcgattccttgac

SEQ ID NO: 1280782 - DNA, 25 bp, Homo sapien
accccagggggctgcgtcctgcagt

SEQ ID NO: 1280783 - DNA, 25 bp, Homo sapien
ggtgtgtttacaggccagcggcttc

SEQ ID NO: 1280784 - DNA, 25 bp, Homo sapien
gcctctgcacggaagacggtttcaa

SEQ ID NO: 1280785 - DNA, 25 bp, Homo sapien
tggtagaagaggatccgcttggcac

SEQ ID NO: 1280786 - DNA, 25 bp, Homo sapien
tccaggacagcgacatggttgctgc

SEQ ID NO: 1280787 - DNA, 25 bp, Homo sapien
tgagtccctgcaccctccacaccca

SEQ ID NO: 1280788 - DNA, 25 bp, Homo sapien
ctgagtccctgcaccctccacaccc

SEQ ID NO: 1280789 - DNA, 25 bp, Homo sapien
gagtccctgcaccctccacacccac

SEQ ID NO: 1280790 - DNA, 25 bp, Homo sapien
tagtaagaattaccaagcggctctc

SEQ ID NO: 1280791 - DNA, 25 bp, Homo sapien
taagaattaccaagcggctctccgg

SEQ ID NO: 1280792 - DNA, 25 bp, Homo sapien
ccgggctggggagcgccgtggaaga

SEQ ID NO: 1280793 - DNA, 25 bp, Homo sapien
ccgtagtaagaattaccaagcggct

SEQ ID NO: 1280794 - DNA, 25 bp, Homo sapien
cgagtgtcaggatcatatgacacag

SEQ ID NO: 1280795 - DNA, 25 bp, Homo sapien
tgtcaggatcatatgacacaggccc

SEQ ID NO: 1280796 - DNA, 25 bp, Homo sapien
caccaagccaggctcctgttcttgc

SEQ ID NO: 1280797 - DNA, 25 bp, Homo sapien
agtgtcaggatcatatgacacaggc

SEQ ID NO: 1280798 - DNA, 25 bp, Homo sapien
cagtgcatggcagggcggccgcaga

SEQ ID NO: 1280799 - DNA, 25 bp, Homo sapien
agggcggccgcagagcccagcagac

SEQ ID NO: 1280800 - DNA, 25 bp, Homo sapien
tgagcctcaggcggggaccaccgca

SEQ ID NO: 1280801 - DNA, 25 bp, Homo sapien
gatcccgtgccctgccaatgtctgt

SEQ ID NO: 1280802 - DNA, 25 bp, Homo sapien
tagggtccatctggaatgccgccaa

SEQ ID NO: 1280803 - DNA, 25 bp, Homo sapien
aacttctcaagggtgtccgagtgct

SEQ ID NO: 1280804 - DNA, 25 bp, Homo sapien
gatgtgggcccttccgtgttctgtt

SEQ ID NO: 1280805 - DNA, 25 bp, Homo sapien
ttcgtgtgtgcgtctatttgctgga

SEQ ID NO: 1280806 - DNA, 25 bp, Homo sapien
ctagagccgtgcatggtatgaggca

SEQ ID NO: 1280807 - DNA, 25 bp, Homo sapien
tgcctagagccgtgcatggtatgag

SEQ ID NO: 1280808 - DNA, 25 bp, Homo sapien
ccccgtgcctagagccgtgcatggt

SEQ ID NO: 1280809 - DNA, 25 bp, Homo sapien
tccaggagcactagcctgagagtgg

SEQ ID NO: 1280810 - DNA, 25 bp, Homo sapien
acctggaggagtcgcagggcggcaa

SEQ ID NO: 1280811 - DNA, 25 bp, Homo sapien
tctcggccaccgagctcagggtcca

SEQ ID NO: 1280812 - DNA, 25 bp, Homo sapien
ccggcagatgaaggagatgttggcg

SEQ ID NO: 1280813 - DNA, 25 bp, Homo sapien
ggcggcaagtcctctgaggtcctct

SEQ ID NO: 1280814 - DNA, 25 bp, Homo sapien
gctacgctgatttctctgctggagg

SEQ ID NO: 1280815 - DNA, 25 bp, Homo sapien
cactcagggcatagtgtggctacgc

SEQ ID NO: 1280816 - DNA, 25 bp, Homo sapien
ccttcttcgagtggaattctgcatc

SEQ ID NO: 1280817 - DNA, 25 bp, Homo sapien
tatggctggatgtgaggtgtctcct

SEQ ID NO: 1280818 - DNA, 25 bp, Homo sapien
gattctcacccctatgtgctcttct

SEQ ID NO: 1280819 - DNA, 25 bp, Homo sapien
gagacgccaacctccacgtctttga

SEQ ID NO: 1280820 - DNA, 25 bp, Homo sapien
ccacgtctttgaccaggtacaggat

SEQ ID NO: 1280821 - DNA, 25 bp, Homo sapien
ccaggtacaggattctcacccctat

SEQ ID NO: 1280822 - DNA, 25 bp, Homo sapien
tggggctggaagactaaagctccca

SEQ ID NO: 1280823 - DNA, 25 bp, Homo sapien
tgcagagactgtcttaagtccagcg

SEQ ID NO: 1280824 - DNA, 25 bp, Homo sapien
ggctggaagactaaagctcccagca

SEQ ID NO: 1280825 - DNA, 25 bp, Homo sapien
cagagactgtcttaagtccagcggg

SEQ ID NO: 1280826 - DNA, 25 bp, Homo sapien
tccatcactgtgcaggtcttcatgc

SEQ ID NO: 1280827 - DNA, 25 bp, Homo sapien
catcactgtgcaggtcttcatgcct

SEQ ID NO: 1280828 - DNA, 25 bp, Homo sapien
gcctccatcactgtgcaggtcttca

SEQ ID NO: 1280829 - DNA, 25 bp, Homo sapien
tcactgtgcaggtcttcatgcctac

SEQ ID NO: 1280830 - DNA, 25 bp, Homo sapien
aactaatcccagttgactgaacatt

SEQ ID NO: 1280831 - DNA, 25 bp, Homo sapien
ctaatcccagttgactgaacatttg

SEQ ID NO: 1280832 - DNA, 25 bp, Homo sapien
aaactaatcccagttgactgaacat

SEQ ID NO: 1280833 - DNA, 25 bp, Homo sapien
ccactggccggggtcatacaatcta

SEQ ID NO: 1280834 - DNA, 25 bp, Homo sapien
tgcgacgaggcccaaccagatgggc

SEQ ID NO: 1280835 - DNA, 25 bp, Homo sapien
tgggcattggccgtcctgggacatg

SEQ ID NO: 1280836 - DNA, 25 bp, Homo sapien
cattggccgtcctgggacatggact

SEQ ID NO: 1280837 - DNA, 25 bp, Homo sapien
gacgaggcccaaccagatgggcatt

SEQ ID NO: 1280838 - DNA, 25 bp, Homo sapien
ggcagtcttcttctttgttcgtttc

SEQ ID NO: 1280839 - DNA, 25 bp, Homo sapien
gggatcttgcagaccgacctgggaa

SEQ ID NO: 1280840 - DNA, 25 bp, Homo sapien
atcttgcagaccgacctgggaagcc

SEQ ID NO: 1280841 - DNA, 25 bp, Homo sapien
cttaatctgatagaggttcttcttc

SEQ ID NO: 1280842 - DNA, 25 bp, Homo sapien
ggctcatctgcatagtccaagaccg

SEQ ID NO: 1280843 - DNA, 25 bp, Homo sapien
acaggaataggaacatctgtccatc

SEQ ID NO: 1280844 - DNA, 25 bp, Homo sapien
gaccgtctgcctgttcagcatcgtg

SEQ ID NO: 1280845 - DNA, 25 bp, Homo sapien
cagcatcgtgatttgcgaggacaca

SEQ ID NO: 1280846 - DNA, 25 bp, Homo sapien
agatatcttcctgtggcccgagagc

SEQ ID NO: 1280847 - DNA, 25 bp, Homo sapien
gaatttccagatatcttcctgtggc

SEQ ID NO: 1280848 - DNA, 25 bp, Homo sapien
gccggtgaccggtgttgtcagggaa

SEQ ID NO: 1280849 - DNA, 25 bp, Homo sapien
gaggcctagtgctggatcttcccac

SEQ ID NO: 1280850 - DNA, 25 bp, Homo sapien
gacgccctgcagcttgtccttgatc

SEQ ID NO: 1280851 - DNA, 25 bp, Homo sapien
ctccttggagcaatgttgagggttg

SEQ ID NO: 1280852 - DNA, 25 bp, Homo sapien
ctcctccttggagcaatgttgaggg

SEQ ID NO: 1280853 - DNA, 25 bp, Homo sapien
gagcaatgttgagggttgagggagc

SEQ ID NO: 1280854 - DNA, 25 bp, Homo sapien
cagggatactcagcttagcaccttc

SEQ ID NO: 1280855 - DNA, 25 bp, Homo sapien
acttgacgctagagccggagccttg

SEQ ID NO: 1280856 - DNA, 25 bp, Homo sapien
accccggcagggatactcagcttag

SEQ ID NO: 1280857 - DNA, 25 bp, Homo sapien
caccttcaggatgggccccggactt

SEQ ID NO: 1280858 - DNA, 25 bp, Homo sapien
cttgtgcatttcacgctgggaaggt

SEQ ID NO: 1280859 - DNA, 25 bp, Homo sapien
ctctgccatgcctcagacacagcat

SEQ ID NO: 1280860 - DNA, 25 bp, Homo sapien
tagtgcttagcagcggggcagttct

SEQ ID NO: 1280861 - DNA, 25 bp, Homo sapien
cagcatggagtaggccgtgggccac

SEQ ID NO: 1280862 - DNA, 25 bp, Homo sapien
taggtaaggatgttgctctcagaag

SEQ ID NO: 1280863 - DNA, 25 bp, Homo sapien
aatataggtaaggatgttgctctca

SEQ ID NO: 1280864 - DNA, 25 bp, Homo sapien
ggtaaggatgttgctctcagaagac

SEQ ID NO: 1280865 - DNA, 25 bp, Homo sapien
tcaaatataggtaaggatgttgctc

SEQ ID NO: 1280866 - DNA, 25 bp, Homo sapien
cacttgcagatcagaatctccgggc

SEQ ID NO: 1280867 - DNA, 25 bp, Homo sapien
aatggctttggctgctacctcggag

SEQ ID NO: 1280868 - DNA, 25 bp, Homo sapien
gctttatttcacaagaaccccggca

SEQ ID NO: 1280869 - DNA, 25 bp, Homo sapien
ccttgagttccatgaggccttcgga

SEQ ID NO: 1280870 - DNA, 25 bp, Homo sapien
taattctgctcttcgaggaatgcgc

SEQ ID NO: 1280871 - DNA, 25 bp, Homo sapien
gtaattctgctcttcgaggaatgcg

SEQ ID NO: 1280872 - DNA, 25 bp, Homo sapien
agtaattctgctcttcgaggaatgc

SEQ ID NO: 1280873 - DNA, 25 bp, Homo sapien
ggctttaaaggacatttcctctgat

SEQ ID NO: 1280874 - DNA, 25 bp, Homo sapien
tctgttcttggcaccgtggaaggtg

SEQ ID NO: 1280875 - DNA, 25 bp, Homo sapien
tccaggctttaaaggacatttcctc

SEQ ID NO: 1280876 - DNA, 25 bp, Homo sapien
gcataaaaccggtcctcctttgcac

SEQ ID NO: 1280877 - DNA, 25 bp, Homo sapien
aggcagctcttaggatggctggaaa

SEQ ID NO: 1280878 - DNA, 25 bp, Homo sapien
cagctcttaggatggctggaaactt

SEQ ID NO: 1280879 - DNA, 25 bp, Homo sapien
tcagaactcagctggatctgagcct

SEQ ID NO: 1280880 - DNA, 25 bp, Homo sapien
agctggatctgagccttgaaccctg

SEQ ID NO: 1280881 - DNA, 25 bp, Homo sapien
aagtgggtatctccacagcggagga

SEQ ID NO: 1280882 - DNA, 25 bp, Homo sapien
agactgggaacagcgcactcctcat

SEQ ID NO: 1280883 - DNA, 25 bp, Homo sapien
aacagatgattagcaggcccggcaa

SEQ ID NO: 1280884 - DNA, 25 bp, Homo sapien
tgcccgcctccataacagatgatta

SEQ ID NO: 1280885 - DNA, 25 bp, Homo sapien
cactgactccccaggtggcatcctg

SEQ ID NO: 1280886 - DNA, 25 bp, Homo sapien
ccaagggcaccaggaaattcgggca

SEQ ID NO: 1280887 - DNA, 25 bp, Homo sapien
caccaggaaattcgggcagcctact

SEQ ID NO: 1280888 - DNA, 25 bp, Homo sapien
gggcagcctactgcccgggcactga

SEQ ID NO: 1280889 - DNA, 25 bp, Homo sapien
ggccagttgcccgatgctctgtgcg

SEQ ID NO: 1280890 - DNA, 25 bp, Homo sapien
tctctcgggtgaagagtggtcctga

SEQ ID NO: 1280891 - DNA, 25 bp, Homo sapien
tctgtgcggctggagctgtctctcg

SEQ ID NO: 1280892 - DNA, 25 bp, Homo sapien
tggcagctggcacggttgagctgca

SEQ ID NO: 1280893 - DNA, 25 bp, Homo sapien
ccctccaattaacgggatggcatca

SEQ ID NO: 1280894 - DNA, 25 bp, Homo sapien
acgcctctgtctgcagccgtcatgg

SEQ ID NO: 1280895 - DNA, 25 bp, Homo sapien
ggtctctcactttctggttgcagga

SEQ ID NO: 1280896 - DNA, 25 bp, Homo sapien
tccaattaacgggatggcatcaggt

SEQ ID NO: 1280897 - DNA, 25 bp, Homo sapien
ctggactggcacaggcgggcagcca

SEQ ID NO: 1280898 - DNA, 25 bp, Homo sapien
cccagcagctgccctcccctcccat

SEQ ID NO: 1280899 - DNA, 25 bp, Homo sapien
tggactggcacaggcgggcagccac

SEQ ID NO: 1280900 - DNA, 25 bp, Homo sapien
gggcagccacagccccccagcagct

SEQ ID NO: 1280901 - DNA, 25 bp, Homo sapien
cttgcagggtgggaccaccaggctc

SEQ ID NO: 1280902 - DNA, 25 bp, Homo sapien
actgcacccccattccatgcccagg

SEQ ID NO: 1280903 - DNA, 25 bp, Homo sapien
gtggcctccagggtgatgaaaggcc

SEQ ID NO: 1280904 - DNA, 25 bp, Homo sapien
tccacaccttccagggacaactggg

SEQ ID NO: 1280905 - DNA, 25 bp, Homo sapien
gagccagcgttgatccttggttgtt

SEQ ID NO: 1280906 - DNA, 25 bp, Homo sapien
ccagagccagcgttgatccttggtt

SEQ ID NO: 1280907 - DNA, 25 bp, Homo sapien
cagcgttgatccttggttgttggtc

SEQ ID NO: 1280908 - DNA, 25 bp, Homo sapien
agtcgttggtcctgggttgttggtg

SEQ ID NO: 1280909 - DNA, 25 bp, Homo sapien
gggctggcttgtacaatcctgtgct

SEQ ID NO: 1280910 - DNA, 25 bp, Homo sapien
tccttcccgtgctccctccaagggc

SEQ ID NO: 1280911 - DNA, 25 bp, Homo sapien
ctggcttgtacaatcctgtgcttcc

SEQ ID NO: 1280912 - DNA, 25 bp, Homo sapien
aggggctggcttgtacaatcctgtg

SEQ ID NO: 1280913 - DNA, 25 bp, Homo sapien
tgggccatcaacacaacaaaggctc

SEQ ID NO: 1280914 - DNA, 25 bp, Homo sapien
aaggctctgtgaagcagcgacctgc

SEQ ID NO: 1280915 - DNA, 25 bp, Homo sapien
tgcagtaggacaacagagctgttcc

SEQ ID NO: 1280916 - DNA, 25 bp, Homo sapien
tacccaggttggatgttgtgcccac

SEQ ID NO: 1280917 - DNA, 25 bp, Homo sapien
gaaagagaagatgggattcggctcc

SEQ ID NO: 1280918 - DNA, 25 bp, Homo sapien
agggaagcagcggaagtccctcgac

SEQ ID NO: 1280919 - DNA, 25 bp, Homo sapien
gaggatcttgaagaccaaaaacgga

SEQ ID NO: 1280920 - DNA, 25 bp, Homo sapien
tctcccgcgtcttcgccagagggaa

SEQ ID NO: 1280921 - DNA, 25 bp, Homo sapien
tcctggagcccgtctggcagaggat

SEQ ID NO: 1280922 - DNA, 25 bp, Homo sapien
caaaactattgtgcactctgtgctt

SEQ ID NO: 1280923 - DNA, 25 bp, Homo sapien
gtgtgaacgtgtgggaccagaccct

SEQ ID NO: 1280924 - DNA, 25 bp, Homo sapien
gtgcttgtaaatgtccctcgtccaa

SEQ ID NO: 1280925 - DNA, 25 bp, Homo sapien
ttaacaactaacagctcaacccaca

SEQ ID NO: 1280926 - DNA, 25 bp, Homo sapien
ttctgctaacggtgacattttcagc

SEQ ID NO: 1280927 - DNA, 25 bp, Homo sapien
tgcttctgctcgtccttaacaacta

SEQ ID NO: 1280928 - DNA, 25 bp, Homo sapien
gacaacagtagtcgtgctttctgct

SEQ ID NO: 1280929 - DNA, 25 bp, Homo sapien
cagggggcacatcatctccaagctc

SEQ ID NO: 1280930 - DNA, 25 bp, Homo sapien
tattcggcttgttgaaataggtgtg

SEQ ID NO: 1280931 - DNA, 25 bp, Homo sapien
aataggtgtgaatgacgggtctgca

SEQ ID NO: 1280932 - DNA, 25 bp, Homo sapien
ctaaactccagtgtattcggcttgt

SEQ ID NO: 1280933 - DNA, 25 bp, Homo sapien
tttactctcattcggtggatcaccg

SEQ ID NO: 1280934 - DNA, 25 bp, Homo sapien
cagatgacttcttcgggcccttcag

SEQ ID NO: 1280935 - DNA, 25 bp, Homo sapien
tcaccgactggaaactattgggaca

SEQ ID NO: 1280936 - DNA, 25 bp, Homo sapien
cagtggttctgtggcgatctctaag

SEQ ID NO: 1280937 - DNA, 25 bp, Homo sapien
tcagggctgcccactggcagagaag

SEQ ID NO: 1280938 - DNA, 25 bp, Homo sapien
cagggctgcccactggcagagaagc

SEQ ID NO: 1280939 - DNA, 25 bp, Homo sapien
gaaggatgcacagcctctcgttcca

SEQ ID NO: 1280940 - DNA, 25 bp, Homo sapien
ttctggaaggatcccgagtgactgc

SEQ ID NO: 1280941 - DNA, 25 bp, Homo sapien
agcctctcgttccaaagtccacagt

SEQ ID NO: 1280942 - DNA, 25 bp, Homo sapien
ttttagtggtagcttctcagactcc

SEQ ID NO: 1280943 - DNA, 25 bp, Homo sapien
tgaattgctgcagtcctgaagaagg

SEQ ID NO: 1280944 - DNA, 25 bp, Homo sapien
tctggaagtatagctgtggcaagcc

SEQ ID NO: 1280945 - DNA, 25 bp, Homo sapien
gagatgacgttactgggcagtgttc

SEQ ID NO: 1280946 - DNA, 25 bp, Homo sapien
cataaatggattagtctctggaagt

SEQ ID NO: 1280947 - DNA, 25 bp, Homo sapien
ggaccacccctatgtcccactggaa

SEQ ID NO: 1280948 - DNA, 25 bp, Homo sapien
ggtggtgatggccatgcctatgtac

SEQ ID NO: 1280949 - DNA, 25 bp, Homo sapien
tcagcctgtcggaaggcgaggagca

SEQ ID NO: 1280950 - DNA, 25 bp, Homo sapien
tcaaggcctgcacggagaacgtgaa

SEQ ID NO: 1280951 - DNA, 25 bp, Homo sapien
gggtgtgcagctccctgcaccggcg

SEQ ID NO: 1280952 - DNA, 25 bp, Homo sapien
cctggccatcgaggactaccgtgat

SEQ ID NO: 1280953 - DNA, 25 bp, Homo sapien
gcctgagtgacgaggacctgcagct

SEQ ID NO: 1280954 - DNA, 25 bp, Homo sapien
ggaggagagaaaaagtcatcctgag

SEQ ID NO: 1280955 - DNA, 25 bp, Homo sapien
agattgctgattatggatgggcccc

SEQ ID NO: 1280956 - DNA, 25 bp, Homo sapien
taaatagctcaaaccaacagctggg

SEQ ID NO: 1280957 - DNA, 25 bp, Homo sapien
gatgggcccctctcgagtaggttaa

SEQ ID NO: 1280958 - DNA, 25 bp, Homo sapien
gaaccgtcctgtaacaaggctgagg

SEQ ID NO: 1280959 - DNA, 25 bp, Homo sapien
tgccgagctggaccatcactgggtg

SEQ ID NO: 1280960 - DNA, 25 bp, Homo sapien
aattccctgatgaagcgagacctgg

SEQ ID NO: 1280961 - DNA, 25 bp, Homo sapien
gaagcacctgaacgtgtccaagaag

SEQ ID NO: 1280962 - DNA, 25 bp, Homo sapien
caaggcctggctgaatgacattggc

SEQ ID NO: 1280963 - DNA, 25 bp, Homo sapien
tccccagtctgccaaggaggcacgt

SEQ ID NO: 1280964 - DNA, 25 bp, Homo sapien
gttacatgtaaaaagaggtgcaggg

SEQ ID NO: 1280965 - DNA, 25 bp, Homo sapien
cacgtgtgggagatcacagcagtta

SEQ ID NO: 1280966 - DNA, 25 bp, Homo sapien
ccacgccgaggacagggagtgacaa

SEQ ID NO: 1280967 - DNA, 25 bp, Homo sapien
gctcaagtgggttcgagacatcgac

SEQ ID NO: 1280968 - DNA, 25 bp, Homo sapien
caaccagcgggtgctcaagtgggtt

SEQ ID NO: 1280969 - DNA, 25 bp, Homo sapien
gcgagacgcagaacattgaccccgt

SEQ ID NO: 1280970 - DNA, 25 bp, Homo sapien
aacattgaccccgtggtgtggacca

SEQ ID NO: 1280971 - DNA, 25 bp, Homo sapien
tgggaagcacatcctccggagacac

SEQ ID NO: 1280972 - DNA, 25 bp, Homo sapien
gcagaggagatgagcgccgtcttcc

SEQ ID NO: 1280973 - DNA, 25 bp, Homo sapien
ttccacccagccaagtgagcacggg

SEQ ID NO: 1280974 - DNA, 25 bp, Homo sapien
tggagcccacattcaatgccgaggc

SEQ ID NO: 1280975 - DNA, 25 bp, Homo sapien
taccgaccttgtagctttgttccaa

SEQ ID NO: 1280976 - DNA, 25 bp, Homo sapien
atgtggtttcgagccccagcatcac

SEQ ID NO: 1280977 - DNA, 25 bp, Homo sapien
agggcaatggctgcaatgtggtttc

SEQ ID NO: 1280978 - DNA, 25 bp, Homo sapien
tcagtgaggcaaattgtatgcagcc

SEQ ID NO: 1280979 - DNA, 25 bp, Homo sapien
ggccagatagtgaatatgttacgat

SEQ ID NO: 1280980 - DNA, 25 bp, Homo sapien
tctgggagccatatgatctctgtca

SEQ ID NO: 1280981 - DNA, 25 bp, Homo sapien
ccacagcattgatatgcagactttt

SEQ ID NO: 1280982 - DNA, 25 bp, Homo sapien
tgtcaaaagtctacaactctgtcct

SEQ ID NO: 1280983 - DNA, 25 bp, Homo sapien
tcaagactttggagtgtcagaagcc

SEQ ID NO: 1280984 - DNA, 25 bp, Homo sapien
tttataaaatcagtcggccagctgg

SEQ ID NO: 1280985 - DNA, 25 bp, Homo sapien
tgttgcagtaaggttcacagtacac

SEQ ID NO: 1280986 - DNA, 25 bp, Homo sapien
gctaacagctgtgtcgtcttgggca

SEQ ID NO: 1280987 - DNA, 25 bp, Homo sapien
cggtctcaagtacaaggctggccgg

SEQ ID NO: 1280988 - DNA, 25 bp, Homo sapien
gagcgttttggaacgccccctggca

SEQ ID NO: 1280989 - DNA, 25 bp, Homo sapien
aaaggaggagaacagcagcggtctc

SEQ ID NO: 1280990 - DNA, 25 bp, Homo sapien
cctccagcgtcacgcgggcaggaaa

SEQ ID NO: 1280991 - DNA, 25 bp, Homo sapien
ggcttcgagtagcacctggatctca

SEQ ID NO: 1280992 - DNA, 25 bp, Homo sapien
cagatgccctggatgtaccttcaag

SEQ ID NO: 1280993 - DNA, 25 bp, Homo sapien
aaccttcacgatgctttgggtacag

SEQ ID NO: 1280994 - DNA, 25 bp, Homo sapien
tgtgagtcctgcagacccgggaaag

SEQ ID NO: 1280995 - DNA, 25 bp, Homo sapien
tacggaagcagaggcgtagtatgtc

SEQ ID NO: 1280996 - DNA, 25 bp, Homo sapien
taatgtgactactttaacacagaga

SEQ ID NO: 1280997 - DNA, 25 bp, Homo sapien
gtggcattacaatttcacagcaggg

SEQ ID NO: 1280998 - DNA, 25 bp, Homo sapien
cagagatgtgtgcagtaagagagaa

SEQ ID NO: 1280999 - DNA, 25 bp, Homo sapien
ttcttcctgtcctttgatcatattc

SEQ ID NO: 1281000 - DNA, 25 bp, Homo sapien
cttcctgtcctttgatcatattctt

SEQ ID NO: 1281001 - DNA, 25 bp, Homo sapien
cagaccttcattcttaattcttgtt

SEQ ID NO: 1281002 - DNA, 25 bp, Homo sapien
cctgtcctttgatcatattcttctc

SEQ ID NO: 1281003 - DNA, 25 bp, Homo sapien
aacagcctggaggtcaccaacgtgt

SEQ ID NO: 1281004 - DNA, 25 bp, Homo sapien
gaacagtgccgtctggaaggctaca

SEQ ID NO: 1281005 - DNA, 25 bp, Homo sapien
acgaagattgcggagacgatgaccc

SEQ ID NO: 1281006 - DNA, 25 bp, Homo sapien
caacgtgtaaggaactggtggctcc

SEQ ID NO: 1281007 - DNA, 25 bp, Homo sapien
tgctcctgggcaaaatcccgatgga

SEQ ID NO: 1281008 - DNA, 25 bp, Homo sapien
agtgctgcctcttgccgagacgtcg

SEQ ID NO: 1281009 - DNA, 25 bp, Homo sapien
gggaactctcggctacagcatctta

SEQ ID NO: 1281010 - DNA, 25 bp, Homo sapien
cttaaacggagctgccaaggtggga

SEQ ID NO: 1281011 - DNA, 25 bp, Homo sapien
cctctcaggagacaatgggaagtta

SEQ ID NO: 1281012 - DNA, 25 bp, Homo sapien
aaagctattgggacaacaggatcgg

SEQ ID NO: 1281013 - DNA, 25 bp, Homo sapien
catatggtgaatctctggcctgtgg

SEQ ID NO: 1281014 - DNA, 25 bp, Homo sapien
cccagggacatcgtgaggattaaca

SEQ ID NO: 1281015 - DNA, 25 bp, Homo sapien
aaagcgtgtgttcttcaacctggca

SEQ ID NO: 1281016 - DNA, 25 bp, Homo sapien
tctcatgccgaagaccgtggtgttc

SEQ ID NO: 1281017 - DNA, 25 bp, Homo sapien
taagggcacacttctgatcctgggc

SEQ ID NO: 1281018 - DNA, 25 bp, Homo sapien
tataaatcccatgagcacagccttg

SEQ ID NO: 1281019 - DNA, 25 bp, Homo sapien
tggatttctagtggtgggacgcccc

SEQ ID NO: 1281020 - DNA, 25 bp, Homo sapien
ggtccagggatctcacatcgagttc

SEQ ID NO: 1281021 - DNA, 25 bp, Homo sapien
cacagatgggccttcctagcaaagc

SEQ ID NO: 1281022 - DNA, 25 bp, Homo sapien
catcgagttccaaggtcatggcgca

SEQ ID NO: 1281023 - DNA, 25 bp, Homo sapien
ggctttgcacaagtatctcttttaa

SEQ ID NO: 1281024 - DNA, 25 bp, Homo sapien
tttcctgatgagagtcggtgagtga

SEQ ID NO: 1281025 - DNA, 25 bp, Homo sapien
tgagtgaaggagctctcccaagtgt

SEQ ID NO: 1281026 - DNA, 25 bp, Homo sapien
gggttcatgctatcactattttcct

SEQ ID NO: 1281027 - DNA, 25 bp, Homo sapien
taatttgtgggaggtctatagggac

SEQ ID NO: 1281028 - DNA, 25 bp, Homo sapien
ctttgcattacggtaatttgtggga

SEQ ID NO: 1281029 - DNA, 25 bp, Homo sapien
tacggtaatttgtgggaggtctata

SEQ ID NO: 1281030 - DNA, 25 bp, Homo sapien
cattacggtaatttgtgggaggtct

SEQ ID NO: 1281031 - DNA, 25 bp, Homo sapien
gtcggagcggatgttctctgaggtc

SEQ ID NO: 1281032 - DNA, 25 bp, Homo sapien
gtctgagcctcggtagagtcggagc

SEQ ID NO: 1281033 - DNA, 25 bp, Homo sapien
tcggtagagtcggagcggatgttct

SEQ ID NO: 1281034 - DNA, 25 bp, Homo sapien
ttcccggctctgaagtggtaggttg

SEQ ID NO: 1281035 - DNA, 25 bp, Homo sapien
attggttcttgaaactcaaaagcat

SEQ ID NO: 1281036 - DNA, 25 bp, Homo sapien
tattggttcttgaaactcaaaagca

SEQ ID NO: 1281037 - DNA, 25 bp, Homo sapien
agtattggttcttgaaactcaaaag

SEQ ID NO: 1281038 - DNA, 25 bp, Homo sapien
ggctcttgtaatgccaaagtattgg

SEQ ID NO: 1281039 - DNA, 25 bp, Homo sapien
tcttctgacagccattggcattgtt

SEQ ID NO: 1281040 - DNA, 25 bp, Homo sapien
ctgacagccattggcattgtttctg

SEQ ID NO: 1281041 - DNA, 25 bp, Homo sapien
gggtcttctgacagccattggcatt

SEQ ID NO: 1281042 - DNA, 25 bp, Homo sapien
attgtttctgttgtcaaagcctcca

SEQ ID NO: 1281043 - DNA, 25 bp, Homo sapien
ccccaaatcataaggcagacccaaa

SEQ ID NO: 1281044 - DNA, 25 bp, Homo sapien
cccaaatcataaggcagacccaaac

SEQ ID NO: 1281045 - DNA, 25 bp, Homo sapien
caaatcataaggcagacccaaactt

SEQ ID NO: 1281046 - DNA, 25 bp, Homo sapien
aatcataaggcagacccaaacttgc

SEQ ID NO: 1281047 - DNA, 25 bp, Homo sapien
tgcaggtgtacacacgtggacacca

SEQ ID NO: 1281048 - DNA, 25 bp, Homo sapien
gaaatgcccgcatgttacaactctg

SEQ ID NO: 1281049 - DNA, 25 bp, Homo sapien
ttttgtggacgccaaggttctgtcg

SEQ ID NO: 1281050 - DNA, 25 bp, Homo sapien
gttctgtcgagctgttagggtgcaa

SEQ ID NO: 1281051 - DNA, 25 bp, Homo sapien
attccgcctttggaagtgaacttga

SEQ ID NO: 1281052 - DNA, 25 bp, Homo sapien
cgcctttggaagtgaacttgattgc

SEQ ID NO: 1281053 - DNA, 25 bp, Homo sapien
atgtacccatgaattccgcctttgg

SEQ ID NO: 1281054 - DNA, 25 bp, Homo sapien
catgaattccgcctttggaagtgaa

SEQ ID NO: 1281055 - DNA, 25 bp, Homo sapien
ttagcatccacgttttttggcggtc

SEQ ID NO: 1281056 - DNA, 25 bp, Homo sapien
gcatccacgttttttggcggtctgg

SEQ ID NO: 1281057 - DNA, 25 bp, Homo sapien
catccacgttttttggcggtctggc

SEQ ID NO: 1281058 - DNA, 25 bp, Homo sapien
tccacgttttttggcggtctggctg

SEQ ID NO: 1281059 - DNA, 25 bp, Homo sapien
ccgggaaagttctcggcaaagctgg

SEQ ID NO: 1281060 - DNA, 25 bp, Homo sapien
caacgcagttccgagggcagatctc

SEQ ID NO: 1281061 - DNA, 25 bp, Homo sapien
ccgtggatccgagcagagactggct

SEQ ID NO: 1281062 - DNA, 25 bp, Homo sapien
ctgccactcgcaggctgggaaaacg

SEQ ID NO: 1281063 - DNA, 25 bp, Homo sapien
gatgtcttctcgtgactggactggg

SEQ ID NO: 1281064 - DNA, 25 bp, Homo sapien
ccctgaatttcggtttgcctgatgt

SEQ ID NO: 1281065 - DNA, 25 bp, Homo sapien
ccttagtatcttctgaactgtgaca

SEQ ID NO: 1281066 - DNA, 25 bp, Homo sapien
attttgatttcgctggatttcccac

SEQ ID NO: 1281067 - DNA, 25 bp, Homo sapien
tggtagcttagaacacgcgtactgt

SEQ ID NO: 1281068 - DNA, 25 bp, Homo sapien
tcttgggctaagaggaactgtgcct

SEQ ID NO: 1281069 - DNA, 25 bp, Homo sapien
tatgattggaagctggtagaaccac

SEQ ID NO: 1281070 - DNA, 25 bp, Homo sapien
gactgggaacgtctcacagaaagga

SEQ ID NO: 1281071 - DNA, 25 bp, Homo sapien
ggccacgcctggaagatcgctgttt

SEQ ID NO: 1281072 - DNA, 25 bp, Homo sapien
cgctgtttgagatcaaaaggtttgc

SEQ ID NO: 1281073 - DNA, 25 bp, Homo sapien
caaaaggtttgcaggtcagagtgga

SEQ ID NO: 1281074 - DNA, 25 bp, Homo sapien
ggatgacggcatccttccaggtcaa

SEQ ID NO: 1281075 - DNA, 25 bp, Homo sapien
aggtggtagggtcacctgaccctgg

SEQ ID NO: 1281076 - DNA, 25 bp, Homo sapien
ggctgaggtggtagggtcacctgac

SEQ ID NO: 1281077 - DNA, 25 bp, Homo sapien
tgaggtggtagggtcacctgaccct

SEQ ID NO: 1281078 - DNA, 25 bp, Homo sapien
ctgaggtggtagggtcacctgaccc

SEQ ID NO: 1281079 - DNA, 25 bp, Homo sapien
gaagtcttctaacccatacgcgctg

SEQ ID NO: 1281080 - DNA, 25 bp, Homo sapien
ttatcaaacccttttcatggcccag

SEQ ID NO: 1281081 - DNA, 25 bp, Homo sapien
ttagggagacacgacttatcaaacc

SEQ ID NO: 1281082 - DNA, 25 bp, Homo sapien
tacgcgctgatgaatcctggcaact

SEQ ID NO: 1281083 - DNA, 25 bp, Homo sapien
cctggccatgtgccgggcatcacag

SEQ ID NO: 1281084 - DNA, 25 bp, Homo sapien
agatcctggccatgtgccgggcatc

SEQ ID NO: 1281085 - DNA, 25 bp, Homo sapien
atcctggccatgtgccgggcatcac

SEQ ID NO: 1281086 - DNA, 25 bp, Homo sapien
cagatcctggccatgtgccgggcat

SEQ ID NO: 1281087 - DNA, 25 bp, Homo sapien
acctgggtgactgctacatcactgc

SEQ ID NO: 1281088 - DNA, 25 bp, Homo sapien
tgggatgattccattacaaagatga

SEQ ID NO: 1281089 - DNA, 25 bp, Homo sapien
cagccaggaagtgttgggatgattc

SEQ ID NO: 1281090 - DNA, 25 bp, Homo sapien
gggacctggcactgggtcatttccc

SEQ ID NO: 1281091 - DNA, 25 bp, Homo sapien
tgttactctagtggccaaaccagtg

SEQ ID NO: 1281092 - DNA, 25 bp, Homo sapien
caaaccagtgccagctattaaacag

SEQ ID NO: 1281093 - DNA, 25 bp, Homo sapien
gagagctgatgttactctagtggcc

SEQ ID NO: 1281094 - DNA, 25 bp, Homo sapien
ggccaaaccagtgccagctattaaa

SEQ ID NO: 1281095 - DNA, 25 bp, Homo sapien
tctacaacagtcaggtcatccgatg

SEQ ID NO: 1281096 - DNA, 25 bp, Homo sapien
gtttgattatgtgtcgtcttagtga

SEQ ID NO: 1281097 - DNA, 25 bp, Homo sapien
tcttttagcacgttgtttgttctcc

SEQ ID NO: 1281098 - DNA, 25 bp, Homo sapien
ttccagaagttgtaggcgtctattt

SEQ ID NO: 1281099 - DNA, 25 bp, Homo sapien
cttcagttgttgcgtctgtatttga

SEQ ID NO: 1281100 - DNA, 25 bp, Homo sapien
tcagttgttgcgtctgtatttgaaa

SEQ ID NO: 1281101 - DNA, 25 bp, Homo sapien
ttcagttgttgcgtctgtatttgaa

SEQ ID NO: 1281102 - DNA, 25 bp, Homo sapien
cagttgttgcgtctgtatttgaaat

SEQ ID NO: 1281103 - DNA, 25 bp, Homo sapien
gaccagctgtccgttttgatgaaca

SEQ ID NO: 1281104 - DNA, 25 bp, Homo sapien
ttagtctgccggctgcaaagatttc

SEQ ID NO: 1281105 - DNA, 25 bp, Homo sapien
ttttcattcatagaccgtgccctct

SEQ ID NO: 1281106 - DNA, 25 bp, Homo sapien
ccctctttagtctgccggctgcaaa

SEQ ID NO: 1281107 - DNA, 25 bp, Homo sapien
atccagaaaatctggtggtctttca

SEQ ID NO: 1281108 - DNA, 25 bp, Homo sapien
ctaaatccagaaaatctggtggtct

SEQ ID NO: 1281109 - DNA, 25 bp, Homo sapien
taaatccagaaaatctggtggtctt

SEQ ID NO: 1281110 - DNA, 25 bp, Homo sapien
aatccagaaaatctggtggtctttc

SEQ ID NO: 1281111 - DNA, 25 bp, Homo sapien
ggtcaggatctactggtcttgaaag

SEQ ID NO: 1281112 - DNA, 25 bp, Homo sapien
gatctactggtcttgaaagtggaat

SEQ ID NO: 1281113 - DNA, 25 bp, Homo sapien
tgcacactagtatcaggaactcctt

SEQ ID NO: 1281114 - DNA, 25 bp, Homo sapien
tctccagaacctgcacactagtatc

SEQ ID NO: 1281115 - DNA, 25 bp, Homo sapien
acaggagggtcccagtgagggctgc

SEQ ID NO: 1281116 - DNA, 25 bp, Homo sapien
cacagaacagcctgcgctgtcatct

SEQ ID NO: 1281117 - DNA, 25 bp, Homo sapien
tatgcttcatagtaaatcctttgac

SEQ ID NO: 1281118 - DNA, 25 bp, Homo sapien
aaatgtgtacttgctatttggcacg

SEQ ID NO: 1281119 - DNA, 25 bp, Homo sapien
tgagctcgtcacttataaacccagt

SEQ ID NO: 1281120 - DNA, 25 bp, Homo sapien
tgctaccataccacagactctaatg

SEQ ID NO: 1281121 - DNA, 25 bp, Homo sapien
tatgtcctcagtgcttagatcagga

SEQ ID NO: 1281122 - DNA, 25 bp, Homo sapien
ttactttgtacagatgacagagctg

SEQ ID NO: 1281123 - DNA, 25 bp, Homo sapien
agcctgtgcttagccttgtttgcca

SEQ ID NO: 1281124 - DNA, 25 bp, Homo sapien
gtccccagagacaccgatggccaga

SEQ ID NO: 1281125 - DNA, 25 bp, Homo sapien
agagacaccgatggccagaacctgg

SEQ ID NO: 1281126 - DNA, 25 bp, Homo sapien
agaaggttcgaggtgtcagactcac

SEQ ID NO: 1281127 - DNA, 25 bp, Homo sapien
gattagcaaggaccctggtgatgtc

SEQ ID NO: 1281128 - DNA, 25 bp, Homo sapien
ggttttatacaatgcaccgacagct

SEQ ID NO: 1281129 - DNA, 25 bp, Homo sapien
tctgcaagccatgacatattctgga

SEQ ID NO: 1281130 - DNA, 25 bp, Homo sapien
caccgacagcttgtgtttggagtcg

SEQ ID NO: 1281131 - DNA, 25 bp, Homo sapien
cataatttccttaagtgcgtgaacc

SEQ ID NO: 1281132 - DNA, 25 bp, Homo sapien
gcttctcaccactataaagctgtga

SEQ ID NO: 1281133 - DNA, 25 bp, Homo sapien
tagctgctttgagaccataatttcc

SEQ ID NO: 1281134 - DNA, 25 bp, Homo sapien
taatcccgacattttaatctctgcc

SEQ ID NO: 1281135 - DNA, 25 bp, Homo sapien
gtctttctctcgtgcagcataaggc

SEQ ID NO: 1281136 - DNA, 25 bp, Homo sapien
gcctgtctttctctcgtgcagcata

SEQ ID NO: 1281137 - DNA, 25 bp, Homo sapien
ctttctctcgtgcagcataaggcaa

SEQ ID NO: 1281138 - DNA, 25 bp, Homo sapien
tggagcctgtctttctctcgtgcag

SEQ ID NO: 1281139 - DNA, 25 bp, Homo sapien
acgtacaaggcctgcctgtcaggca

SEQ ID NO: 1281140 - DNA, 25 bp, Homo sapien
cacttagcatgtgctcagaacgtgg

SEQ ID NO: 1281141 - DNA, 25 bp, Homo sapien
tagtctgctaaccacactctcagcg

SEQ ID NO: 1281142 - DNA, 25 bp, Homo sapien
gggttaaagcggctcaaatcactag

SEQ ID NO: 1281143 - DNA, 25 bp, Homo sapien
gtagaaccggtgcattcctaaggct

SEQ ID NO: 1281144 - DNA, 25 bp, Homo sapien
ccatttggtagaaccggtgcattcc

SEQ ID NO: 1281145 - DNA, 25 bp, Homo sapien
cttgtcccagatccatttggtagaa

SEQ ID NO: 1281146 - DNA, 25 bp, Homo sapien
cagatccatttggtagaaccggtgc

SEQ ID NO: 1281147 - DNA, 25 bp, Homo sapien
ctaaactaaagccttgagtgactgc

SEQ ID NO: 1281148 - DNA, 25 bp, Homo sapien
tctggctcgctctcaaccaacaaat

SEQ ID NO: 1281149 - DNA, 25 bp, Homo sapien
tggctgctccctttagcgcagggtc

SEQ ID NO: 1281150 - DNA, 25 bp, Homo sapien
ctcaaccaacaaatgctgtggaatc

SEQ ID NO: 1281151 - DNA, 25 bp, Homo sapien
caggctgagacatgcagtaggagag

SEQ ID NO: 1281152 - DNA, 25 bp, Homo sapien
ggcatctgagctatgggtgaccaga

SEQ ID NO: 1281153 - DNA, 25 bp, Homo sapien
aggctaaggccaccatgagcagcat

SEQ ID NO: 1281154 - DNA, 25 bp, Homo sapien
tatgggtgaccagagaaatgttctg

SEQ ID NO: 1281155 - DNA, 25 bp, Homo sapien
tgatcatggccatgtggaacctggt

SEQ ID NO: 1281156 - DNA, 25 bp, Homo sapien
tctctgtggcctacgtgctggtcgg

SEQ ID NO: 1281157 - DNA, 25 bp, Homo sapien
tgggtggcggcatcctcaagagcaa

SEQ ID NO: 1281158 - DNA, 25 bp, Homo sapien
aatggctcgcactatgcgctgaccg

SEQ ID NO: 1281159 - DNA, 25 bp, Homo sapien
cacatgagccacagttgagaagcgg

SEQ ID NO: 1281160 - DNA, 25 bp, Homo sapien
tccaccgcagtatgatgaagtccag

SEQ ID NO: 1281161 - DNA, 25 bp, Homo sapien
ccaaacgactgaaaccgctgaaagt

SEQ ID NO: 1281162 - DNA, 25 bp, Homo sapien
cgctgaaagttcgaaggattaaatc

SEQ ID NO: 1281163 - DNA, 25 bp, Homo sapien
ctgggttataaatcttctcagaaaa

SEQ ID NO: 1281164 - DNA, 25 bp, Homo sapien
tctgggttataaatcttctcagaaa

SEQ ID NO: 1281165 - DNA, 25 bp, Homo sapien
ttctgggttataaatcttctcagaa

SEQ ID NO: 1281166 - DNA, 25 bp, Homo sapien
ctttgtaaaatttaggagttgtgca

SEQ ID NO: 1281167 - DNA, 25 bp, Homo sapien
ccttgtgatactatctagtcaagaa

SEQ ID NO: 1281168 - DNA, 25 bp, Homo sapien
gaatgtatccttgtgatactatcta

SEQ ID NO: 1281169 - DNA, 25 bp, Homo sapien
gttgtgcaggaactttaagaagaag

SEQ ID NO: 1281170 - DNA, 25 bp, Homo sapien
aggcaccagctgtggaaacatcggg

SEQ ID NO: 1281171 - DNA, 25 bp, Homo sapien
ctaccgcaaggcaccagctgtggaa

SEQ ID NO: 1281172 - DNA, 25 bp, Homo sapien
ccagctgtggaaacatcggggggaa

SEQ ID NO: 1281173 - DNA, 25 bp, Homo sapien
cgcaaggcaccagctgtggaaacat

SEQ ID NO: 1281174 - DNA, 25 bp, Homo sapien
tccttggtgtgctaccaatagccag

SEQ ID NO: 1281175 - DNA, 25 bp, Homo sapien
gtaccccatttccctggcataagga

SEQ ID NO: 1281176 - DNA, 25 bp, Homo sapien
caatagccagttgccaagggtaccc

SEQ ID NO: 1281177 - DNA, 25 bp, Homo sapien
gagtgctgtacagagcatgatgcgc

SEQ ID NO: 1281178 - DNA, 25 bp, Homo sapien
tcaaccactaggcaccagggagaaa

SEQ ID NO: 1281179 - DNA, 25 bp, Homo sapien
tagagggacccacagtatggacaga

SEQ ID NO: 1281180 - DNA, 25 bp, Homo sapien
taacaggaataaggagaaccctcac

SEQ ID NO: 1281181 - DNA, 25 bp, Homo sapien
gaatttagctcttacctggaaagca

SEQ ID NO: 1281182 - DNA, 25 bp, Homo sapien
tgagagtagctcactttcccaccat

SEQ ID NO: 1281183 - DNA, 25 bp, Homo sapien
gagggtccgcctcaagtcttcagca

SEQ ID NO: 1281184 - DNA, 25 bp, Homo sapien
agtggtcagcccgacttgaggagat

SEQ ID NO: 1281185 - DNA, 25 bp, Homo sapien
tcaggtgtgatgagcacgtgcatgt

SEQ ID NO: 1281186 - DNA, 25 bp, Homo sapien
tcgaggatccccttctggaatgact

SEQ ID NO: 1281187 - DNA, 25 bp, Homo sapien
atgtcatctaaagcccgactagggc

SEQ ID NO: 1281188 - DNA, 25 bp, Homo sapien
tcaggaacttgggagtgacttagtc

SEQ ID NO: 1281189 - DNA, 25 bp, Homo sapien
tctcacgaggttgcaggagctactg

SEQ ID NO: 1281190 - DNA, 25 bp, Homo sapien
ctgataaacccgtcaatttcgtgag

SEQ ID NO: 1281191 - DNA, 25 bp, Homo sapien
gataaacccgtcaatttcgtgagac

SEQ ID NO: 1281192 - DNA, 25 bp, Homo sapien
tgataaacccgtcaatttcgtgaga

SEQ ID NO: 1281193 - DNA, 25 bp, Homo sapien
gaagtcaagtcatcaaggccaccta

SEQ ID NO: 1281194 - DNA, 25 bp, Homo sapien
caattactgactttgagcggcccgc

SEQ ID NO: 1281195 - DNA, 25 bp, Homo sapien
cacaggcatcgttcgggttaggcag

SEQ ID NO: 1281196 - DNA, 25 bp, Homo sapien
tcagcagaaaaagtggaccctccag

SEQ ID NO: 1281197 - DNA, 25 bp, Homo sapien
tctctgattaccttctccttttaac

SEQ ID NO: 1281198 - DNA, 25 bp, Homo sapien
atcttcaaaatcttcgcagaactct

SEQ ID NO: 1281199 - DNA, 25 bp, Homo sapien
tctccttttaacatcggcatcccaa

SEQ ID NO: 1281200 - DNA, 25 bp, Homo sapien
aaaatcttcgcagaactctccaccg

SEQ ID NO: 1281201 - DNA, 25 bp, Homo sapien
tcccgaagagccacgtagtgagtgc

SEQ ID NO: 1281202 - DNA, 25 bp, Homo sapien
tttccaaccagtcccctcttgatgg

SEQ ID NO: 1281203 - DNA, 25 bp, Homo sapien
tggtagctgttccatgcacctgccc

SEQ ID NO: 1281204 - DNA, 25 bp, Homo sapien
tgaaaacagccttcattgggccgcc

SEQ ID NO: 1281205 - DNA, 25 bp, Homo sapien
aaagatgggcagaccatgatctcag

SEQ ID NO: 1281206 - DNA, 25 bp, Homo sapien
atgatctcagagtcaagtgcaggcc

SEQ ID NO: 1281207 - DNA, 25 bp, Homo sapien
gggactgaccagtttgccaggacta

SEQ ID NO: 1281208 - DNA, 25 bp, Homo sapien
tagtcagagcagtggaccccagact

SEQ ID NO: 1281209 - DNA, 25 bp, Homo sapien
gaaaatactactggatgcaaaaccg

SEQ ID NO: 1281210 - DNA, 25 bp, Homo sapien
tgcccacagtatggttccgcatggt

SEQ ID NO: 1281211 - DNA, 25 bp, Homo sapien
ggctgctgtctatactcactagctg

SEQ ID NO: 1281212 - DNA, 25 bp, Homo sapien
gaatagagatcctagcggtaaccaa

SEQ ID NO: 1281213 - DNA, 25 bp, Homo sapien
tcaaccagcttcgacaaagggacct

SEQ ID NO: 1281214 - DNA, 25 bp, Homo sapien
caagaatatgtcaggccacgtgtcc

SEQ ID NO: 1281215 - DNA, 25 bp, Homo sapien
gttgaacagctcaggtacctcggca

SEQ ID NO: 1281216 - DNA, 25 bp, Homo sapien
tagtacctggatatgagcaaaaccc

SEQ ID NO: 1281217 - DNA, 25 bp, Homo sapien
tgagctaccgcggccagcctacttt

SEQ ID NO: 1281218 - DNA, 25 bp, Homo sapien
gagctaccgcggccagcctactttt

SEQ ID NO: 1281219 - DNA, 25 bp, Homo sapien
agctaccgcggccagcctacttttt

SEQ ID NO: 1281220 - DNA, 25 bp, Homo sapien
catgagctaccgcggccagcctact

SEQ ID NO: 1281221 - DNA, 25 bp, Homo sapien
taccgtgttagttagacctcatggc

SEQ ID NO: 1281222 - DNA, 25 bp, Homo sapien
tatgggccaggctctgatgctaccg

SEQ ID NO: 1281223 - DNA, 25 bp, Homo sapien
tatcttctggctaactgtggtctta

SEQ ID NO: 1281224 - DNA, 25 bp, Homo sapien
actgggtatgttgcataggagcact

SEQ ID NO: 1281225 - DNA, 25 bp, Homo sapien
tgctgctgggcgttctttaaagaca

SEQ ID NO: 1281226 - DNA, 25 bp, Homo sapien
gacactatgcaaagcgtggtccaga

SEQ ID NO: 1281227 - DNA, 25 bp, Homo sapien
tcttgttggctacgtatgggattgc

SEQ ID NO: 1281228 - DNA, 25 bp, Homo sapien
tatagagtacttcctagccatgaga

SEQ ID NO: 1281229 - DNA, 25 bp, Homo sapien
taagggagccctgcatttcatgagc

SEQ ID NO: 1281230 - DNA, 25 bp, Homo sapien
taataagtctgtccggattgcctgg

SEQ ID NO: 1281231 - DNA, 25 bp, Homo sapien
taacagttgtaaggctccggcgttc

SEQ ID NO: 1281232 - DNA, 25 bp, Homo sapien
tctgcaaaccccgaaaacctgtgag

SEQ ID NO: 1281233 - DNA, 25 bp, Homo sapien
gagcagtttcagtagacaggtcctg

SEQ ID NO: 1281234 - DNA, 25 bp, Homo sapien
gctttacattctcgagggctccctg

SEQ ID NO: 1281235 - DNA, 25 bp, Homo sapien
caactgagtgtctgttctgtgcaaa

SEQ ID NO: 1281236 - DNA, 25 bp, Homo sapien
aatttcagtgagcagaactcccctg

SEQ ID NO: 1281237 - DNA, 25 bp, Homo sapien
gagccgttggggaggacatctctcc

SEQ ID NO: 1281238 - DNA, 25 bp, Homo sapien
ccccatcaaaatggcgacatcatga

SEQ ID NO: 1281239 - DNA, 25 bp, Homo sapien
gacatcatgatctccctgtcagttt

SEQ ID NO: 1281240 - DNA, 25 bp, Homo sapien
aaatggcgacatcatgatctccctg

SEQ ID NO: 1281241 - DNA, 25 bp, Homo sapien
aagaggccatcggcgcccgccacgg

SEQ ID NO: 1281242 - DNA, 25 bp, Homo sapien
tccctcgcagctgctagtctgtcct

SEQ ID NO: 1281243 - DNA, 25 bp, Homo sapien
atcggcgcccgccacggttcaccct

SEQ ID NO: 1281244 - DNA, 25 bp, Homo sapien
ctcgcagctgctagtctgtcctctt

SEQ ID NO: 1281245 - DNA, 25 bp, Homo sapien
tcctggaagctacgcggacttgcag

SEQ ID NO: 1281246 - DNA, 25 bp, Homo sapien
tccaaacaagtgagtggccctcgag

SEQ ID NO: 1281247 - DNA, 25 bp, Homo sapien
tgcagaaattaggaggcaccgagcc

SEQ ID NO: 1281248 - DNA, 25 bp, Homo sapien
tcctagggaaggagacgagcgcttc

SEQ ID NO: 1281249 - DNA, 25 bp, Homo sapien
actgatccactagtgtgccattgga

SEQ ID NO: 1281250 - DNA, 25 bp, Homo sapien
taatttgtgttaggctccgcccaag

SEQ ID NO: 1281251 - DNA, 25 bp, Homo sapien
cattggatgcctaatagccgttgcg

SEQ ID NO: 1281252 - DNA, 25 bp, Homo sapien
gttgcgtggctagcatatattgagc

SEQ ID NO: 1281253 - DNA, 25 bp, Homo sapien
atgaaatgacagaggctagtgaatg

SEQ ID NO: 1281254 - DNA, 25 bp, Homo sapien
ctgtctccttactggggagccaatg

SEQ ID NO: 1281255 - DNA, 25 bp, Homo sapien
tgccctgtctccttactggggagcc

SEQ ID NO: 1281256 - DNA, 25 bp, Homo sapien
aatgacagaggctagtgaatggggc

SEQ ID NO: 1281257 - DNA, 25 bp, Homo sapien
accctcttgcacaaaagtattcttg

SEQ ID NO: 1281258 - DNA, 25 bp, Homo sapien
tgttaatccatgaagagtccctatg

SEQ ID NO: 1281259 - DNA, 25 bp, Homo sapien
taacaccgggcgcatttgtgctaag

SEQ ID NO: 1281260 - DNA, 25 bp, Homo sapien
tcttgccttgagaaccagtgaatgt

SEQ ID NO: 1281261 - DNA, 25 bp, Homo sapien
gccaggcatcaggaacaagctagaa

SEQ ID NO: 1281262 - DNA, 25 bp, Homo sapien
agtatagacaaacgtggctgttcgc

SEQ ID NO: 1281263 - DNA, 25 bp, Homo sapien
tccagctgcaacgtgagtaccaaaa

SEQ ID NO: 1281264 - DNA, 25 bp, Homo sapien
actgctgaaccaatcaaccgtgagg

SEQ ID NO: 1281265 - DNA, 25 bp, Homo sapien
ttcctctatgctggaagggaaccaa

SEQ ID NO: 1281266 - DNA, 25 bp, Homo sapien
gtagctgccacggaaaccttcctgg

SEQ ID NO: 1281267 - DNA, 25 bp, Homo sapien
tgggtctcatcaaggtctctcgtga

SEQ ID NO: 1281268 - DNA, 25 bp, Homo sapien
agggcctttctacgatgacttctgg

SEQ ID NO: 1281269 - DNA, 25 bp, Homo sapien
taaaagaatacaggagagtatcaag

SEQ ID NO: 1281270 - DNA, 25 bp, Homo sapien
tccactctccagaggtaatcattgt

SEQ ID NO: 1281271 - DNA, 25 bp, Homo sapien
cagaaggtaatacatactctttgta

SEQ ID NO: 1281272 - DNA, 25 bp, Homo sapien
caggagagtatcaagtaaaaaagta

SEQ ID NO: 1281273 - DNA, 25 bp, Homo sapien
cgccctgccaatcattgttaaaagc

SEQ ID NO: 1281274 - DNA, 25 bp, Homo sapien
tcgccctgccaatcattgttaaaag

SEQ ID NO: 1281275 - DNA, 25 bp, Homo sapien
cctgccaatcattgttaaaagcttg

SEQ ID NO: 1281276 - DNA, 25 bp, Homo sapien
gccctgccaatcattgttaaaagct

SEQ ID NO: 1281277 - DNA, 25 bp, Homo sapien
aaaatatgccatccgcacatttggc

SEQ ID NO: 1281278 - DNA, 25 bp, Homo sapien
actcacttgagtagcttagcccagg

SEQ ID NO: 1281279 - DNA, 25 bp, Homo sapien
gcacagctctgtggttacgtgaacc

SEQ ID NO: 1281280 - DNA, 25 bp, Homo sapien
gaaacagttatagccccaaccacag

SEQ ID NO: 1281281 - DNA, 25 bp, Homo sapien
taagaaccagaaataggtcaggcgc

SEQ ID NO: 1281282 - DNA, 25 bp, Homo sapien
catcctaacatccagggccctaaga

SEQ ID NO: 1281283 - DNA, 25 bp, Homo sapien
accagaaataggtcaggcgcaatgg

SEQ ID NO: 1281284 - DNA, 25 bp, Homo sapien
tccagggccctaagaaccagaaata

SEQ ID NO: 1281285 - DNA, 25 bp, Homo sapien
tggacaagagacctaacctccctga

SEQ ID NO: 1281286 - DNA, 25 bp, Homo sapien
caagaaataggctggcataaggaca

SEQ ID NO: 1281287 - DNA, 25 bp, Homo sapien
ctggataatcgttttcccttggaca

SEQ ID NO: 1281288 - DNA, 25 bp, Homo sapien
acagcacgttcacactgcagtccgg

SEQ ID NO: 1281289 - DNA, 25 bp, Homo sapien
aagaaagagttggagcaaaatgagg

SEQ ID NO: 1281290 - DNA, 25 bp, Homo sapien
aaatgagggaagaaataggcaaaag

SEQ ID NO: 1281291 - DNA, 25 bp, Homo sapien
aagaagaaagagttggagcaaaatg

SEQ ID NO: 1281292 - DNA, 25 bp, Homo sapien
gcaaaagtctcttttgtaaggaaga

SEQ ID NO: 1281293 - DNA, 25 bp, Homo sapien
cagactctagtaggccccggtttgc

SEQ ID NO: 1281294 - DNA, 25 bp, Homo sapien
tacagctgttcagactctagtaggc

SEQ ID NO: 1281295 - DNA, 25 bp, Homo sapien
tcacttagaattcatagattacagc

SEQ ID NO: 1281296 - DNA, 25 bp, Homo sapien
gaattcatagattacagctgttcag

SEQ ID NO: 1281297 - DNA, 25 bp, Homo sapien
gcaccactcaggaagacgcgttact

SEQ ID NO: 1281298 - DNA, 25 bp, Homo sapien
tgctcaagaggccacgtgcaatcca

SEQ ID NO: 1281299 - DNA, 25 bp, Homo sapien
aaaaatccctacagaccagtggttg

SEQ ID NO: 1281300 - DNA, 25 bp, Homo sapien
cgttactggcattgaggcaagggac

SEQ ID NO: 1281301 - DNA, 25 bp, Homo sapien
tataaatccctttcaccgaaacagc

SEQ ID NO: 1281302 - DNA, 25 bp, Homo sapien
cggaggaaattaaagcaaccaggca

SEQ ID NO: 1281303 - DNA, 25 bp, Homo sapien
aaccaggcatctgtttataaatccc

SEQ ID NO: 1281304 - DNA, 25 bp, Homo sapien
ctttcaccgaaacagcattagcgac

SEQ ID NO: 1281305 - DNA, 25 bp, Homo sapien
tgtaagacatgaccatggagagctc

SEQ ID NO: 1281306 - DNA, 25 bp, Homo sapien
taagacatgaccatggagagctctg

SEQ ID NO: 1281307 - DNA, 25 bp, Homo sapien
aagacatgaccatggagagctctgt

SEQ ID NO: 1281308 - DNA, 25 bp, Homo sapien
ctgtaagacatgaccatggagagct

SEQ ID NO: 1281309 - DNA, 25 bp, Homo sapien
aggtcttcagagtgagcccactgct

SEQ ID NO: 1281310 - DNA, 25 bp, Homo sapien
gtctcaacgtaccaggagccactct

SEQ ID NO: 1281311 - DNA, 25 bp, Homo sapien
atgtcgtccagggtctcaacgtacc

SEQ ID NO: 1281312 - DNA, 25 bp, Homo sapien
tccagggtctcaacgtaccaggagc

SEQ ID NO: 1281313 - DNA, 25 bp, Homo sapien
gctctgccctaatcatgatcttatt

SEQ ID NO: 1281314 - DNA, 25 bp, Homo sapien
gtcaagtgactcatccaagacataa

SEQ ID NO: 1281315 - DNA, 25 bp, Homo sapien
tgaccatcccctgattccggctata

SEQ ID NO: 1281316 - DNA, 25 bp, Homo sapien
gattccggctataattcctgttttc

SEQ ID NO: 1281317 - DNA, 25 bp, Homo sapien
tgtgggcaaactagatatggcgtcc

SEQ ID NO: 1281318 - DNA, 25 bp, Homo sapien
gggaaagtagagtaggacacaaaga

SEQ ID NO: 1281319 - DNA, 25 bp, Homo sapien
caaagatgtcactgggtgtgggcaa

SEQ ID NO: 1281320 - DNA, 25 bp, Homo sapien
gcgtccagctggtcgaaggtcctca

SEQ ID NO: 1281321 - DNA, 25 bp, Homo sapien
tggtgagctccaagatagttgtctg

SEQ ID NO: 1281322 - DNA, 25 bp, Homo sapien
gcttatctttacagaggcatcaccc

SEQ ID NO: 1281323 - DNA, 25 bp, Homo sapien
tctgataaaattcaccacggcaatg

SEQ ID NO: 1281324 - DNA, 25 bp, Homo sapien
ttacgtaaaaatgcaggttccctgc

SEQ ID NO: 1281325 - DNA, 25 bp, Homo sapien
catacagcaaaactacaaagaatcc

SEQ ID NO: 1281326 - DNA, 25 bp, Homo sapien
taaaattagagcatacagcaaaact

SEQ ID NO: 1281327 - DNA, 25 bp, Homo sapien
ttagagcatacagcaaaactacaaa

SEQ ID NO: 1281328 - DNA, 25 bp, Homo sapien
gagcatacagcaaaactacaaagaa

SEQ ID NO: 1281329 - DNA, 25 bp, Homo sapien
caggagaatggtgacaagaaaaata

SEQ ID NO: 1281330 - DNA, 25 bp, Homo sapien
aaagttacttgagcccatgatgcca

SEQ ID NO: 1281331 - DNA, 25 bp, Homo sapien
caagtctttggaattgaagctgcca

SEQ ID NO: 1281332 - DNA, 25 bp, Homo sapien
gaagactctgacctctacaaagcag

SEQ ID NO: 1281333 - DNA, 25 bp, Homo sapien
agagggaggctgaggagctgcttac

SEQ ID NO: 1281334 - DNA, 25 bp, Homo sapien
cagagggaggctgaggagctgctta

SEQ ID NO: 1281335 - DNA, 25 bp, Homo sapien
gtgccgtagacagcccctgggaact

SEQ ID NO: 1281336 - DNA, 25 bp, Homo sapien
atcttctcgaccgacacagggcatc

SEQ ID NO: 1281337 - DNA, 25 bp, Homo sapien
acagggcatccatctgtgccgtaga

SEQ ID NO: 1281338 - DNA, 25 bp, Homo sapien
ctggtcccattgaagatgttcacaa

SEQ ID NO: 1281339 - DNA, 25 bp, Homo sapien
cagagcaggttggttctggaaagac

SEQ ID NO: 1281340 - DNA, 25 bp, Homo sapien
accaagaagttggagtaggaatcca

SEQ ID NO: 1281341 - DNA, 25 bp, Homo sapien
cacgaggctgattgagacagagcag

SEQ ID NO: 1281342 - DNA, 25 bp, Homo sapien
cagcctgttcagaggttttgtggga

SEQ ID NO: 1281343 - DNA, 25 bp, Homo sapien
ctgacagccgtgagagagaatgacc

SEQ ID NO: 1281344 - DNA, 25 bp, Homo sapien
gacgccgcaacttctcacagtcgat

SEQ ID NO: 1281345 - DNA, 25 bp, Homo sapien
agcccggactcacggcagaagttca

SEQ ID NO: 1281346 - DNA, 25 bp, Homo sapien
ccatgaaatgcagcgaggagaagcg

SEQ ID NO: 1281347 - DNA, 25 bp, Homo sapien
aagttcacattgttgataatgaggc

SEQ ID NO: 1281348 - DNA, 25 bp, Homo sapien
ctccccacgctccctagaggacagt

SEQ ID NO: 1281349 - DNA, 25 bp, Homo sapien
ggtctgccctctcgcacaaggagta

SEQ ID NO: 1281350 - DNA, 25 bp, Homo sapien
gaaaacggggtctgccctctcgcac

SEQ ID NO: 1281351 - DNA, 25 bp, Homo sapien
tcgcacaaggagtagcagggtctcc

SEQ ID NO: 1281352 - DNA, 25 bp, Homo sapien
ggaagactagcactagaaggtgacc

SEQ ID NO: 1281353 - DNA, 25 bp, Homo sapien
tctgcatttcccctcaaactctcaa

SEQ ID NO: 1281354 - DNA, 25 bp, Homo sapien
tgcatttcccctcaaactctcaaga

SEQ ID NO: 1281355 - DNA, 25 bp, Homo sapien
caaatctgcatttcccctcaaactc

SEQ ID NO: 1281356 - DNA, 25 bp, Homo sapien
tttcccctcaaactctcaagagcac

SEQ ID NO: 1281357 - DNA, 25 bp, Homo sapien
gaaccaatgtccactggtctgggtg

SEQ ID NO: 1281358 - DNA, 25 bp, Homo sapien
ggtttgcgaatctctggtctgagca

SEQ ID NO: 1281359 - DNA, 25 bp, Homo sapien
gagaacctctggtttgcgaatctct

SEQ ID NO: 1281360 - DNA, 25 bp, Homo sapien
tgggtgtttccggtctgagaacctc

SEQ ID NO: 1281361 - DNA, 25 bp, Homo sapien
ccctcgagtctccagatctatgatc

SEQ ID NO: 1281362 - DNA, 25 bp, Homo sapien
cctgttagttcgcagaaacgaagcc

SEQ ID NO: 1281363 - DNA, 25 bp, Homo sapien
tggcctgatcccgccgagatccaga

SEQ ID NO: 1281364 - DNA, 25 bp, Homo sapien
ccagatctatgatcagctgcctggc

SEQ ID NO: 1281365 - DNA, 25 bp, Homo sapien
gaggctgaggctcccaagaggatgg

SEQ ID NO: 1281366 - DNA, 25 bp, Homo sapien
tgaggctcccaagaggatggctcga

SEQ ID NO: 1281367 - DNA, 25 bp, Homo sapien
tggctcgagcccaggagataaggct

SEQ ID NO: 1281368 - DNA, 25 bp, Homo sapien
gatggctcgagcccaggagataagg

SEQ ID NO: 1281369 - DNA, 25 bp, Homo sapien
ggggcctgaacagctcgcggctcag

SEQ ID NO: 1281370 - DNA, 25 bp, Homo sapien
ggagccgccgatccgcttcgtccat

SEQ ID NO: 1281371 - DNA, 25 bp, Homo sapien
tggatgtcctcgatcatatggggcc

SEQ ID NO: 1281372 - DNA, 25 bp, Homo sapien
ccgcaggagccgccgatccgcttcg

SEQ ID NO: 1281373 - DNA, 25 bp, Homo sapien
gccccgggtcagtcttcgctcccca

SEQ ID NO: 1281374 - DNA, 25 bp, Homo sapien
cccaggagtcgctcttgcgtcaccg

SEQ ID NO: 1281375 - DNA, 25 bp, Homo sapien
aactaagactccaggccgcctcagt

SEQ ID NO: 1281376 - DNA, 25 bp, Homo sapien
gcctccggacgcatctccaaggcct

SEQ ID NO: 1281377 - DNA, 25 bp, Homo sapien
tcggtctccctatcaatattgcagg

SEQ ID NO: 1281378 - DNA, 25 bp, Homo sapien
cacagactggtacattcttgggtgg

SEQ ID NO: 1281379 - DNA, 25 bp, Homo sapien
taaaaggaatgctggattctaggcc

SEQ ID NO: 1281380 - DNA, 25 bp, Homo sapien
caatctgacgctctaaggttctacg

SEQ ID NO: 1281381 - DNA, 25 bp, Homo sapien
gataacgcagcattggaacatagag

SEQ ID NO: 1281382 - DNA, 25 bp, Homo sapien
taatgatgagcgagagtcaagccct

SEQ ID NO: 1281383 - DNA, 25 bp, Homo sapien
gcactgtcatcgttcaggctttcag

SEQ ID NO: 1281384 - DNA, 25 bp, Homo sapien
tccacccgccaagaaaagctctgtt

SEQ ID NO: 1281385 - DNA, 25 bp, Homo sapien
tgtggtcctcatcctgtcgaattct

SEQ ID NO: 1281386 - DNA, 25 bp, Homo sapien
gaattctaccaagaccagcctacta

SEQ ID NO: 1281387 - DNA, 25 bp, Homo sapien
gctttggaggtctacacatttactg

SEQ ID NO: 1281388 - DNA, 25 bp, Homo sapien
cagtaacttggtacgtctgaggcca

SEQ ID NO: 1281389 - DNA, 25 bp, Homo sapien
acactggttatgtactggctctgaa

SEQ ID NO: 1281390 - DNA, 25 bp, Homo sapien
tcaagccccaaaagacagtcgaaga

SEQ ID NO: 1281391 - DNA, 25 bp, Homo sapien
taagcatttcatggagcgtgactac

SEQ ID NO: 1281392 - DNA, 25 bp, Homo sapien
cctgggtgaatctcgagggaaacct

SEQ ID NO: 1281393 - DNA, 25 bp, Homo sapien
tacagaccggtttagagctggtgcc

SEQ ID NO: 1281394 - DNA, 25 bp, Homo sapien
taaacaacatttcagtgggtgaggc

SEQ ID NO: 1281395 - DNA, 25 bp, Homo sapien
gattggaagcacatactcagacctg

SEQ ID NO: 1281396 - DNA, 25 bp, Homo sapien
atgtgccaccatgtaattagcccgg

SEQ ID NO: 1281397 - DNA, 25 bp, Homo sapien
tacagaggaactgtagttcacatcc

SEQ ID NO: 1281398 - DNA, 25 bp, Homo sapien
acatccacctgtctgacattgtccc

SEQ ID NO: 1281399 - DNA, 25 bp, Homo sapien
acagaggaactgtagttcacatcca

SEQ ID NO: 1281400 - DNA, 25 bp, Homo sapien
ttacagaggaactgtagttcacatc

SEQ ID NO: 1281401 - DNA, 25 bp, Homo sapien
cactgaagctgatgttattttaaga

SEQ ID NO: 1281402 - DNA, 25 bp, Homo sapien
aggataattatgcttgggagagatc

SEQ ID NO: 1281403 - DNA, 25 bp, Homo sapien
tgcacttttgatactcttaggaaca

SEQ ID NO: 1281404 - DNA, 25 bp, Homo sapien
gatactcttaggaacaaataactta

SEQ ID NO: 1281405 - DNA, 25 bp, Homo sapien
caagacacgcttaagatcaccacag

SEQ ID NO: 1281406 - DNA, 25 bp, Homo sapien
cacagcataactgcagatttcagga

SEQ ID NO: 1281407 - DNA, 25 bp, Homo sapien
aatttgcatggaactcaagacacgc

SEQ ID NO: 1281408 - DNA, 25 bp, Homo sapien
tacagtcatagagggtacatcaact

SEQ ID NO: 1281409 - DNA, 25 bp, Homo sapien
tgacgcatgactgtaattctagcta

SEQ ID NO: 1281410 - DNA, 25 bp, Homo sapien
tggtgacgcatgactgtaattctag

SEQ ID NO: 1281411 - DNA, 25 bp, Homo sapien
cgtggtgacgcatgactgtaattct

SEQ ID NO: 1281412 - DNA, 25 bp, Homo sapien
ggtgacgcatgactgtaattctagc

SEQ ID NO: 1281413 - DNA, 25 bp, Homo sapien
cacctccgccccccaaagtgctggg

SEQ ID NO: 1281414 - DNA, 25 bp, Homo sapien
ccacctccgccccccaaagtgctgg

SEQ ID NO: 1281415 - DNA, 25 bp, Homo sapien
gagccactgggtccggcctgctttt

SEQ ID NO: 1281416 - DNA, 25 bp, Homo sapien
cgtgagccactgggtccggcctgct

SEQ ID NO: 1281417 - DNA, 25 bp, Homo sapien
tcactgcagcgtccgaggaggagct

SEQ ID NO: 1281418 - DNA, 25 bp, Homo sapien
gatgcagccctaagcacctcatagg

SEQ ID NO: 1281419 - DNA, 25 bp, Homo sapien
gatactcaatactctaggaagcaga

SEQ ID NO: 1281420 - DNA, 25 bp, Homo sapien
ttgtgtacccttctaggcctctgag

SEQ ID NO: 1281421 - DNA, 25 bp, Homo sapien
agttctcagactgcttactcataag

SEQ ID NO: 1281422 - DNA, 25 bp, Homo sapien
ttcttgagaacttgtcagcgacgca

SEQ ID NO: 1281423 - DNA, 25 bp, Homo sapien
tggcataaactctttagttctcaga

SEQ ID NO: 1281424 - DNA, 25 bp, Homo sapien
ggtgagaattctactgattatcccg

SEQ ID NO: 1281425 - DNA, 25 bp, Homo sapien
tctcaaacagcaggttagccgccag

SEQ ID NO: 1281426 - DNA, 25 bp, Homo sapien
catctcaaacagcaggttagccgcc

SEQ ID NO: 1281427 - DNA, 25 bp, Homo sapien
aacagcaggttagccgccagcaggg

SEQ ID NO: 1281428 - DNA, 25 bp, Homo sapien
tcaaacagcaggttagccgccagca

SEQ ID NO: 1281429 - DNA, 25 bp, Homo sapien
gcccatcacgttcaggccttgacaa

SEQ ID NO: 1281430 - DNA, 25 bp, Homo sapien
aagatcacagcccatcacgttcagg

SEQ ID NO: 1281431 - DNA, 25 bp, Homo sapien
cagaaagatcatacggtggtgaaac

SEQ ID NO: 1281432 - DNA, 25 bp, Homo sapien
tgaaacttcgacaagatcacagccc

SEQ ID NO: 1281433 - DNA, 25 bp, Homo sapien
taggagtgagaccagcaatttcagg

SEQ ID NO: 1281434 - DNA, 25 bp, Homo sapien
cataggcaggatccagagcgtcaat

SEQ ID NO: 1281435 - DNA, 25 bp, Homo sapien
gaggaaccagcgacttcatccagca

SEQ ID NO: 1281436 - DNA, 25 bp, Homo sapien
gctgatataaatgggtttgcctccc

SEQ ID NO: 1281437 - DNA, 25 bp, Homo sapien
ggatccaaggtcgtggaagagcccc

SEQ ID NO: 1281438 - DNA, 25 bp, Homo sapien
gatgccaatctgcaccacacgctta

SEQ ID NO: 1281439 - DNA, 25 bp, Homo sapien
tcctagggccttgtcggtcgtgtcc

SEQ ID NO: 1281440 - DNA, 25 bp, Homo sapien
tcgtgtccgtgtgcgcatccacgtg

SEQ ID NO: 1281441 - DNA, 25 bp, Homo sapien
tttttgccatcgcttgcaatatggg

SEQ ID NO: 1281442 - DNA, 25 bp, Homo sapien
ttttgccatcgcttgcaatatggga

SEQ ID NO: 1281443 - DNA, 25 bp, Homo sapien
ccaaggtcagaggaatacagccagc

SEQ ID NO: 1281444 - DNA, 25 bp, Homo sapien
tcataggcctcttgaattcgccggc

SEQ ID NO: 1281445 - DNA, 25 bp, Homo sapien
cagccagctgctacaattttctcat

SEQ ID NO: 1281446 - DNA, 25 bp, Homo sapien
catcgcctaggtctgcaaccatgag

SEQ ID NO: 1281447 - DNA, 25 bp, Homo sapien
ttcttcccggatgcggcgaggtccg

SEQ ID NO: 1281448 - DNA, 25 bp, Homo sapien
ccccgtgctaggattgactgtccca

SEQ ID NO: 1281449 - DNA, 25 bp, Homo sapien
caagcatcactgattcttcccggat

SEQ ID NO: 1281450 - DNA, 25 bp, Homo sapien
cgtgctaggattgactgtcccaagc

SEQ ID NO: 1281451 - DNA, 25 bp, Homo sapien
caggccggttggaggtcccagtatc

SEQ ID NO: 1281452 - DNA, 25 bp, Homo sapien
gaggtcccagtatccaggggcaccc

SEQ ID NO: 1281453 - DNA, 25 bp, Homo sapien
ccaggccggttggaggtcccagtat

SEQ ID NO: 1281454 - DNA, 25 bp, Homo sapien
ttggaggtcccagtatccaggggca

SEQ ID NO: 1281455 - DNA, 25 bp, Homo sapien
ggtctgcaccggcaggcgcatcatg

SEQ ID NO: 1281456 - DNA, 25 bp, Homo sapien
accggcaggcgcatcatggagcaga

SEQ ID NO: 1281457 - DNA, 25 bp, Homo sapien
gcatcatggagcagacgcccaccgg

SEQ ID NO: 1281458 - DNA, 25 bp, Homo sapien
gcaggcgcatcatggagcagacgcc

SEQ ID NO: 1281459 - DNA, 25 bp, Homo sapien
ctctggcggcgccccggatgaaaga

SEQ ID NO: 1281460 - DNA, 25 bp, Homo sapien
ttccggggcgcgtcggaagcctggc

SEQ ID NO: 1281461 - DNA, 25 bp, Homo sapien
tggcggctctggcggcgccccggat

SEQ ID NO: 1281462 - DNA, 25 bp, Homo sapien
ggcgcgtcggaagcctggcggctct

SEQ ID NO: 1281463 - DNA, 25 bp, Homo sapien
ccgggcgcacccggacgccagcagc

SEQ ID NO: 1281464 - DNA, 25 bp, Homo sapien
gccccgggcgcacccggacgccagc

SEQ ID NO: 1281465 - DNA, 25 bp, Homo sapien
aggcgagtgtgcacgcgccagagcc

SEQ ID NO: 1281466 - DNA, 25 bp, Homo sapien
aacccgagccggctcaaaggtcagg

SEQ ID NO: 1281467 - DNA, 25 bp, Homo sapien
cgatctggctggtcccgaacggcga

SEQ ID NO: 1281468 - DNA, 25 bp, Homo sapien
gaacggcgaggcgagtgtgcacgcg

SEQ ID NO: 1281469 - DNA, 25 bp, Homo sapien
caggcgttccaatgaggtgtcccca

SEQ ID NO: 1281470 - DNA, 25 bp, Homo sapien
caaaggttgcacattaggccaggcg

SEQ ID NO: 1281471 - DNA, 25 bp, Homo sapien
aatattgagtgtccgctatgtgcca

SEQ ID NO: 1281472 - DNA, 25 bp, Homo sapien
ttgaaacgttcctcaggcggcctct

SEQ ID NO: 1281473 - DNA, 25 bp, Homo sapien
caccatacatatgcctgcccggtaa

SEQ ID NO: 1281474 - DNA, 25 bp, Homo sapien
agctccacgggcttgttcctccagc

SEQ ID NO: 1281475 - DNA, 25 bp, Homo sapien
cctgcccggtaatgcttcctggagc

SEQ ID NO: 1281476 - DNA, 25 bp, Homo sapien
tatgcctgcccggtaatgcttcctg

SEQ ID NO: 1281477 - DNA, 25 bp, Homo sapien
ccttctgctaggttcgtggtctacg

SEQ ID NO: 1281478 - DNA, 25 bp, Homo sapien
ggagcgaagctgcaaaacttcacgg

SEQ ID NO: 1281479 - DNA, 25 bp, Homo sapien
tgtccaatgttcagtagaagcccac

SEQ ID NO: 1281480 - DNA, 25 bp, Homo sapien
cagttcgtaaaagtggcgcgtccag

SEQ ID NO: 1281481 - DNA, 25 bp, Homo sapien
tatttgaggcgtgcatcacaccagc

SEQ ID NO: 1281482 - DNA, 25 bp, Homo sapien
taagtacactctatgggcaggactc

SEQ ID NO: 1281483 - DNA, 25 bp, Homo sapien
gcagaatcatatacacctgggagct

SEQ ID NO: 1281484 - DNA, 25 bp, Homo sapien
taaccgtgtcacttagggctactgc

SEQ ID NO: 1281485 - DNA, 25 bp, Homo sapien
accatttcgggtaagcagactccta

SEQ ID NO: 1281486 - DNA, 25 bp, Homo sapien
accagaatcgggttggcgtcgccta

SEQ ID NO: 1281487 - DNA, 25 bp, Homo sapien
tgctgtagggatccaagcgcttgag

SEQ ID NO: 1281488 - DNA, 25 bp, Homo sapien
catcggtggtcaaagcaacaaaacg

SEQ ID NO: 1281489 - DNA, 25 bp, Homo sapien
tgtgtgtgagcagccctaacttcac

SEQ ID NO: 1281490 - DNA, 25 bp, Homo sapien
ctaacttcaccgaagacagaagaac

SEQ ID NO: 1281491 - DNA, 25 bp, Homo sapien
tcattgctactgtgtgtgagcagcc

SEQ ID NO: 1281492 - DNA, 25 bp, Homo sapien
gaaaagtatcattgctactgtgtgt

SEQ ID NO: 1281493 - DNA, 25 bp, Homo sapien
ggacttaggctagtgaaactgacct

SEQ ID NO: 1281494 - DNA, 25 bp, Homo sapien
aaaattcattgagggtgtgttcacc

SEQ ID NO: 1281495 - DNA, 25 bp, Homo sapien
tacatggatatttcactacagtgca

SEQ ID NO: 1281496 - DNA, 25 bp, Homo sapien
tctcagctacaagaggactatatgc

SEQ ID NO: 1281497 - DNA, 25 bp, Homo sapien
cctatgagtcttgctcgctctgtct

SEQ ID NO: 1281498 - DNA, 25 bp, Homo sapien
cagatgggtttaaccatcccgcccg

SEQ ID NO: 1281499 - DNA, 25 bp, Homo sapien
cctgatgttggtaatcctatgagtc

SEQ ID NO: 1281500 - DNA, 25 bp, Homo sapien
tcattaccaacttcagatgggttta

SEQ ID NO: 1281501 - DNA, 25 bp, Homo sapien
gctccagacagccaatagccttcat

SEQ ID NO: 1281502 - DNA, 25 bp, Homo sapien
ttccactcatacctgttcagggctc

SEQ ID NO: 1281503 - DNA, 25 bp, Homo sapien
atttccactcatacctgttcagggc

SEQ ID NO: 1281504 - DNA, 25 bp, Homo sapien
ttatttccactcatacctgttcagg

SEQ ID NO: 1281505 - DNA, 25 bp, Homo sapien
tggtgacttagtgtagtctgtggct

SEQ ID NO: 1281506 - DNA, 25 bp, Homo sapien
tgacttagtgtagtctgtggctgac

SEQ ID NO: 1281507 - DNA, 25 bp, Homo sapien
ttggagttggtgacttagtgtagtc

SEQ ID NO: 1281508 - DNA, 25 bp, Homo sapien
gagttggtgacttagtgtagtctgt

SEQ ID NO: 1281509 - DNA, 25 bp, Homo sapien
gattggtaatctagaccctctggag

SEQ ID NO: 1281510 - DNA, 25 bp, Homo sapien
acaggacagcttcatcaaagggaca

SEQ ID NO: 1281511 - DNA, 25 bp, Homo sapien
tatttgaggctctaccaggcctgtc

SEQ ID NO: 1281512 - DNA, 25 bp, Homo sapien
tgagattacctgatgctgaccagac

SEQ ID NO: 1281513 - DNA, 25 bp, Homo sapien
ggctaatggactttgcactcaagaa

SEQ ID NO: 1281514 - DNA, 25 bp, Homo sapien
taaaagaagaactaggctgactggc

SEQ ID NO: 1281515 - DNA, 25 bp, Homo sapien
gcaaaaagtcttgccagtggccctg

SEQ ID NO: 1281516 - DNA, 25 bp, Homo sapien
aaatctcttcatggcaagttgggct

SEQ ID NO: 1281517 - DNA, 25 bp, Homo sapien
gaaccccagaagaagtgggcctctc

SEQ ID NO: 1281518 - DNA, 25 bp, Homo sapien
tctcaaagccattaacttccagatt

SEQ ID NO: 1281519 - DNA, 25 bp, Homo sapien
tccagattagtactgcgggaggaca

SEQ ID NO: 1281520 - DNA, 25 bp, Homo sapien
ttagtactgcgggaggacagctccc

SEQ ID NO: 1281521 - DNA, 25 bp, Homo sapien
agaagatggcctgctattcaacagc

SEQ ID NO: 1281522 - DNA, 25 bp, Homo sapien
tgtttgacacgcagaacggattcca

SEQ ID NO: 1281523 - DNA, 25 bp, Homo sapien
gaaggaagtgcgcaattctgactcc

SEQ ID NO: 1281524 - DNA, 25 bp, Homo sapien
tgtatgcaccctagccaggatggag

SEQ ID NO: 1281525 - DNA, 25 bp, Homo sapien
agagagttgttacggtgggtttcag

SEQ ID NO: 1281526 - DNA, 25 bp, Homo sapien
ctttatgagatggtggatttgagga

SEQ ID NO: 1281527 - DNA, 25 bp, Homo sapien
actgacacctctaagtgcaggggct

SEQ ID NO: 1281528 - DNA, 25 bp, Homo sapien
gagttgaggcccttgggatacgtgg

SEQ ID NO: 1281529 - DNA, 25 bp, Homo sapien
aatctgtgggctgacgaggcctggg

SEQ ID NO: 1281530 - DNA, 25 bp, Homo sapien
ggagtctccagagtccttggggcct

SEQ ID NO: 1281531 - DNA, 25 bp, Homo sapien
gggtcgaggtctctggcgtccctgg

SEQ ID NO: 1281532 - DNA, 25 bp, Homo sapien
gtctgtgggtgtctcgagtctctga

SEQ ID NO: 1281533 - DNA, 25 bp, Homo sapien
tcttcaagttctcaagtttctctcc

SEQ ID NO: 1281534 - DNA, 25 bp, Homo sapien
ggcacctcttggactgggctcaaaa

SEQ ID NO: 1281535 - DNA, 25 bp, Homo sapien
tggcccacatagagccaaagaggct

SEQ ID NO: 1281536 - DNA, 25 bp, Homo sapien
cagctgccccgtcctaatcaaatga

SEQ ID NO: 1281537 - DNA, 25 bp, Homo sapien
gagtcactaagtggctgcatttcgg

SEQ ID NO: 1281538 - DNA, 25 bp, Homo sapien
gctcagtggcctttcggagtcacta

SEQ ID NO: 1281539 - DNA, 25 bp, Homo sapien
gaaaactcaacctctagccataggc

SEQ ID NO: 1281540 - DNA, 25 bp, Homo sapien
tggaattctgcagtgggaaaactca

SEQ ID NO: 1281541 - DNA, 25 bp, Homo sapien
gtgatccaccccacctcatcctctc

SEQ ID NO: 1281542 - DNA, 25 bp, Homo sapien
cacctcatcctctcaaagtgtggga

SEQ ID NO: 1281543 - DNA, 25 bp, Homo sapien
atccaccccacctcatcctctcaaa

SEQ ID NO: 1281544 - DNA, 25 bp, Homo sapien
acctcatcctctcaaagtgtgggat

SEQ ID NO: 1281545 - DNA, 25 bp, Homo sapien
ctccctgcggcctgagaactaacag

SEQ ID NO: 1281546 - DNA, 25 bp, Homo sapien
gaactaacagcccagttgcactgct

SEQ ID NO: 1281547 - DNA, 25 bp, Homo sapien
tacagcctttcagagctccctgcgg

SEQ ID NO: 1281548 - DNA, 25 bp, Homo sapien
tcttcttgcagcacacatgctggat

SEQ ID NO: 1281549 - DNA, 25 bp, Homo sapien
caactgcgtgtgctgaggagaatca

SEQ ID NO: 1281550 - DNA, 25 bp, Homo sapien
ctcctcttgggtgcaactgcgtgtg

SEQ ID NO: 1281551 - DNA, 25 bp, Homo sapien
ggagccggagcaagaacacatgggc

SEQ ID NO: 1281552 - DNA, 25 bp, Homo sapien
tcttgggtgcaactgcgtgtgctga

SEQ ID NO: 1281553 - DNA, 25 bp, Homo sapien
cggatgaccgcctctttacgtgcca

SEQ ID NO: 1281554 - DNA, 25 bp, Homo sapien
agccgggcaaggagtactgcgtctt

SEQ ID NO: 1281555 - DNA, 25 bp, Homo sapien
cacagccaagctgggcgacatcagc

SEQ ID NO: 1281556 - DNA, 25 bp, Homo sapien
tcttccgctctttgggcacagccaa

SEQ ID NO: 1281557 - DNA, 25 bp, Homo sapien
ctgcacatggtggtccctcgatgtg

SEQ ID NO: 1281558 - DNA, 25 bp, Homo sapien
atggtggtccctcgatgtgcgtctg

SEQ ID NO: 1281559 - DNA, 25 bp, Homo sapien
acatggtggtccctcgatgtgcgtc

SEQ ID NO: 1281560 - DNA, 25 bp, Homo sapien
gtccctcgatgtgcgtctgggtcct

SEQ ID NO: 1281561 - DNA, 25 bp, Homo sapien
gaaatggctcagttaggtgggcaca

SEQ ID NO: 1281562 - DNA, 25 bp, Homo sapien
gctctacgctcagcacacctgggat

SEQ ID NO: 1281563 - DNA, 25 bp, Homo sapien
cagggccgggtggtttcagctcatt

SEQ ID NO: 1281564 - DNA, 25 bp, Homo sapien
tcaaggatccttctcgctctacgct

SEQ ID NO: 1281565 - DNA, 25 bp, Homo sapien
gccaggctagagagtctggacttca

SEQ ID NO: 1281566 - DNA, 25 bp, Homo sapien
agagaaggaaaggactatggtgcca

SEQ ID NO: 1281567 - DNA, 25 bp, Homo sapien
gggttatggttaatgattaggtcag

SEQ ID NO: 1281568 - DNA, 25 bp, Homo sapien
tcacatgtggcttggtgatcagaag

SEQ ID NO: 1281569 - DNA, 25 bp, Homo sapien
gtgaacttacagttacacaaataag

SEQ ID NO: 1281570 - DNA, 25 bp, Homo sapien
tgcgaattacatagaagctaccagc

SEQ ID NO: 1281571 - DNA, 25 bp, Homo sapien
gaacttacagttacacaaataagaa

SEQ ID NO: 1281572 - DNA, 25 bp, Homo sapien
catagaagctaccagcctaagccaa

SEQ ID NO: 1281573 - DNA, 25 bp, Homo sapien
gagtttgtgggccacgcaatggtcc

SEQ ID NO: 1281574 - DNA, 25 bp, Homo sapien
tcctcctcaggatctccggattcgg

SEQ ID NO: 1281575 - DNA, 25 bp, Homo sapien
tgttaggggatccactaattcctcc

SEQ ID NO: 1281576 - DNA, 25 bp, Homo sapien
caggatctccggattcggtaagcat

SEQ ID NO: 1281577 - DNA, 25 bp, Homo sapien
ttgttaggggatccactaattcctc

SEQ ID NO: 1281578 - DNA, 25 bp, Homo sapien
catgtgtgtggtgcctcaagtttcc

SEQ ID NO: 1281579 - DNA, 25 bp, Homo sapien
ccccagtcagcaaagtcatgtgtgt

SEQ ID NO: 1281580 - DNA, 25 bp, Homo sapien
gttaaaatgatgtcacctggaggct

SEQ ID NO: 1281581 - DNA, 25 bp, Homo sapien
tagaccagtcctagtccacaggtaa

SEQ ID NO: 1281582 - DNA, 25 bp, Homo sapien
ggacttgctcaaccacatttgcttg

SEQ ID NO: 1281583 - DNA, 25 bp, Homo sapien
gcccagccagcatagataattatct

SEQ ID NO: 1281584 - DNA, 25 bp, Homo sapien
agccagttcctttgcttatgcagcc

SEQ ID NO: 1281585 - DNA, 25 bp, Homo sapien
tactagctgaactatcgaaagccag

SEQ ID NO: 1281586 - DNA, 25 bp, Homo sapien
tttccaacatcacagtctctggcat

SEQ ID NO: 1281587 - DNA, 25 bp, Homo sapien
tttctgtttaactgttttgcaaatg

SEQ ID NO: 1281588 - DNA, 25 bp, Homo sapien
agtcttaaggtcgatatgaggatgg

SEQ ID NO: 1281589 - DNA, 25 bp, Homo sapien
cgccattggtcataagggagatgtt

SEQ ID NO: 1281590 - DNA, 25 bp, Homo sapien
ggaaaaagtcttaaggtcgatatga

SEQ ID NO: 1281591 - DNA, 25 bp, Homo sapien
ccaaaaggaaggataggccaggcgc

SEQ ID NO: 1281592 - DNA, 25 bp, Homo sapien
tgtaagctctcaccgccaaaaggaa

SEQ ID NO: 1281593 - DNA, 25 bp, Homo sapien
tctgttcaagtgctgggcaatcatt

SEQ ID NO: 1281594 - DNA, 25 bp, Homo sapien
cattcttcgaatctaaactgcccag

SEQ ID NO: 1281595 - DNA, 25 bp, Homo sapien
cacgcgcacgggtttgctactggca

SEQ ID NO: 1281596 - DNA, 25 bp, Homo sapien
tctttgaaatgacgctggaacgcac

SEQ ID NO: 1281597 - DNA, 25 bp, Homo sapien
tactggcaccagcacaaggctttag

SEQ ID NO: 1281598 - DNA, 25 bp, Homo sapien
tggaaaacagttgcgcagtgcgtgc

SEQ ID NO: 1281599 - DNA, 25 bp, Homo sapien
gcaaaagtccagtgagcgctctagg

SEQ ID NO: 1281600 - DNA, 25 bp, Homo sapien
tgagtcctaacgtactgagcccact

SEQ ID NO: 1281601 - DNA, 25 bp, Homo sapien
tcaggccaccaaagtgaagatgggt

SEQ ID NO: 1281602 - DNA, 25 bp, Homo sapien
cacagagcccgatagaagagaaaac

SEQ ID NO: 1281603 - DNA, 25 bp, Homo sapien
gaaaacagtcctggccgaaggcttg

SEQ ID NO: 1281604 - DNA, 25 bp, Homo sapien
tgtgaagtgcgtctgaacagctcgc

SEQ ID NO: 1281605 - DNA, 25 bp, Homo sapien
tggaacggctgttgactggatcccg

SEQ ID NO: 1281606 - DNA, 25 bp, Homo sapien
attctgtaccccgagtttcctggag

SEQ ID NO: 1281607 - DNA, 25 bp, Homo sapien
tgttgaagtaccagcaagcaataga

SEQ ID NO: 1281608 - DNA, 25 bp, Homo sapien
tttttcgagaagaaagcacatcggg

SEQ ID NO: 1281609 - DNA, 25 bp, Homo sapien
taacaaagggcgagctcattgcccg

SEQ ID NO: 1281610 - DNA, 25 bp, Homo sapien
ccctatggctctcggaaggtgctga

SEQ ID NO: 1281611 - DNA, 25 bp, Homo sapien
tataaagtattagcttgcttaaaga

SEQ ID NO: 1281612 - DNA, 25 bp, Homo sapien
gcttaaagaatggatctgcgctggg

SEQ ID NO: 1281613 - DNA, 25 bp, Homo sapien
ccgtgcctggctctgttataaagta

SEQ ID NO: 1281614 - DNA, 25 bp, Homo sapien
aaagtattagcttgcttaaagaatg

SEQ ID NO: 1281615 - DNA, 25 bp, Homo sapien
gaagagaagatcatcgagcatttca

SEQ ID NO: 1281616 - DNA, 25 bp, Homo sapien
ttactacgtcgtgcctgagaaacca

SEQ ID NO: 1281617 - DNA, 25 bp, Homo sapien
caatgtctgacttcgggagggttcc

SEQ ID NO: 1281618 - DNA, 25 bp, Homo sapien
tgtaccgtaacagataggcctccgc

SEQ ID NO: 1281619 - DNA, 25 bp, Homo sapien
tgtgaaataagttggtgcgcccgtt

SEQ ID NO: 1281620 - DNA, 25 bp, Homo sapien
ccggccagatgttagaatctttaat

SEQ ID NO: 1281621 - DNA, 25 bp, Homo sapien
gccagatgttagaatctttaatgaa

SEQ ID NO: 1281622 - DNA, 25 bp, Homo sapien
tttaatgaagacctcatcgatcaga

SEQ ID NO: 1281623 - DNA, 25 bp, Homo sapien
atctttaatgaagacctcatcgatc

SEQ ID NO: 1281624 - DNA, 25 bp, Homo sapien
ctgaaaagagtgattaaaggaggaa

SEQ ID NO: 1281625 - DNA, 25 bp, Homo sapien
tggctttagggattctccgtatctt

SEQ ID NO: 1281626 - DNA, 25 bp, Homo sapien
tagggattctccgtatcttttgcca

SEQ ID NO: 1281627 - DNA, 25 bp, Homo sapien
atttgttactgaaaagagtgattaa

SEQ ID NO: 1281628 - DNA, 25 bp, Homo sapien
catgcacgagaaggacgttatgagc

SEQ ID NO: 1281629 - DNA, 25 bp, Homo sapien
tcccaatggctggtatcttatggaa

SEQ ID NO: 1281630 - DNA, 25 bp, Homo sapien
tccaaggtttctgtaggcaggtatt

SEQ ID NO: 1281631 - DNA, 25 bp, Homo sapien
gaagcttcatttttggagttacctg

SEQ ID NO: 1281632 - DNA, 25 bp, Homo sapien
ctgccatgttaagatatggaaagtc

SEQ ID NO: 1281633 - DNA, 25 bp, Homo sapien
tgaaaccctttgtggtgtttgctta

SEQ ID NO: 1281634 - DNA, 25 bp, Homo sapien
cttctgccatgttaagatatggaaa

SEQ ID NO: 1281635 - DNA, 25 bp, Homo sapien
tctgccatgttaagatatggaaagt

SEQ ID NO: 1281636 - DNA, 25 bp, Homo sapien
acctcccgggtggagcaactctcac

SEQ ID NO: 1281637 - DNA, 25 bp, Homo sapien
ctcccgggtggagcaactctcacgc

SEQ ID NO: 1281638 - DNA, 25 bp, Homo sapien
cgggtggagcaactctcacgcctca

SEQ ID NO: 1281639 - DNA, 25 bp, Homo sapien
tggctaattttttggctaaatggat

SEQ ID NO: 1281640 - DNA, 25 bp, Homo sapien
cctcagtcttcggaatagctggatt

SEQ ID NO: 1281641 - DNA, 25 bp, Homo sapien
agacatgcgccaccatgcccagcta

SEQ ID NO: 1281642 - DNA, 25 bp, Homo sapien
tcagtcttcggaatagctggattac

SEQ ID NO: 1281643 - DNA, 25 bp, Homo sapien
tgcctcagtcttcggaatagctgga

SEQ ID NO: 1281644 - DNA, 25 bp, Homo sapien
tggcttcaaagggtagtcttgctgt

SEQ ID NO: 1281645 - DNA, 25 bp, Homo sapien
tctttatacaagcacccctctatca

SEQ ID NO: 1281646 - DNA, 25 bp, Homo sapien
ttcaaagggtagtcttgctgtccat

SEQ ID NO: 1281647 - DNA, 25 bp, Homo sapien
cacccctctatcaatctgtgtctta

SEQ ID NO: 1281648 - DNA, 25 bp, Homo sapien
ggctgaagagcaatggcgccatctt

SEQ ID NO: 1281649 - DNA, 25 bp, Homo sapien
ctgaagagcaatggcgccatcttgg

SEQ ID NO: 1281650 - DNA, 25 bp, Homo sapien
tcactacaatctccatctcccgggt

SEQ ID NO: 1281651 - DNA, 25 bp, Homo sapien
tcaagtgattcttctgcctcagttt

SEQ ID NO: 1281652 - DNA, 25 bp, Homo sapien
agtggcgtagtctcggctaaccgca

SEQ ID NO: 1281653 - DNA, 25 bp, Homo sapien
ttctcctgcttgtaatcctgagtag

SEQ ID NO: 1281654 - DNA, 25 bp, Homo sapien
gcgattctcctgcttgtaatcctga

SEQ ID NO: 1281655 - DNA, 25 bp, Homo sapien
tgcagtggcgtagtctcggctaacc

SEQ ID NO: 1281656 - DNA, 25 bp, Homo sapien
gattctctagcctcagcctcttgaa

SEQ ID NO: 1281657 - DNA, 25 bp, Homo sapien
attctctagcctcagcctcttgaat

SEQ ID NO: 1281658 - DNA, 25 bp, Homo sapien
ccaccacgcctggctagttttgtat

SEQ ID NO: 1281659 - DNA, 25 bp, Homo sapien
ccacgcctggctagttttgtatttt

SEQ ID NO: 1281660 - DNA, 25 bp, Homo sapien
cactgaatgctcctagaacttgaaa

SEQ ID NO: 1281661 - DNA, 25 bp, Homo sapien
taattcctatgggtttggagcaacc

SEQ ID NO: 1281662 - DNA, 25 bp, Homo sapien
catggagaaatctggtcaagacatc

SEQ ID NO: 1281663 - DNA, 25 bp, Homo sapien
tatgaaatgttagccgaaagaaggt

SEQ ID NO: 1281664 - DNA, 25 bp, Homo sapien
gaacaagattccaagcgattgcagc

SEQ ID NO: 1281665 - DNA, 25 bp, Homo sapien
cgtgagcgagatgaaagactctcta

SEQ ID NO: 1281666 - DNA, 25 bp, Homo sapien
tccatcctggtacatgaaaaagaag

SEQ ID NO: 1281667 - DNA, 25 bp, Homo sapien
tcttttcttgattgggactcccgat

SEQ ID NO: 1281668 - DNA, 25 bp, Homo sapien
tctgagatacaagcctcggaggtgc

SEQ ID NO: 1281669 - DNA, 25 bp, Homo sapien
cactgaaaagtttggtgagcacccc

SEQ ID NO: 1281670 - DNA, 25 bp, Homo sapien
gttattagccggatgcctgtcagca

SEQ ID NO: 1281671 - DNA, 25 bp, Homo sapien
tggtcccggtgaatgccctgaaagg

SEQ ID NO: 1281672 - DNA, 25 bp, Homo sapien
tcctgcaggctatgcgaacgtggcc

SEQ ID NO: 1281673 - DNA, 25 bp, Homo sapien
gtgtaacggccacaacaggcacggt

SEQ ID NO: 1281674 - DNA, 25 bp, Homo sapien
ttactcagggcagaagaccgaaggc

SEQ ID NO: 1281675 - DNA, 25 bp, Homo sapien
agcagtcagtgtccaagtcccaggt

SEQ ID NO: 1281676 - DNA, 25 bp, Homo sapien
ggtttttgtggacctgatactgtgg

SEQ ID NO: 1281677 - DNA, 25 bp, Homo sapien
tgctgtttgactaggaggcccctgc

SEQ ID NO: 1281678 - DNA, 25 bp, Homo sapien
caggtggagacagattactgtctgc

SEQ ID NO: 1281679 - DNA, 25 bp, Homo sapien
cctgtggccgtgaccaagaggatgt

SEQ ID NO: 1281680 - DNA, 25 bp, Homo sapien
gagccactgagtggttatcacctca

SEQ ID NO: 1281681 - DNA, 25 bp, Homo sapien
catgattgtcattgcctccgtgtga

SEQ ID NO: 1281682 - DNA, 25 bp, Homo sapien
agttctctgagagtcacctgtcccg

SEQ ID NO: 1281683 - DNA, 25 bp, Homo sapien
tgaagacagacggtcccactttgct

SEQ ID NO: 1281684 - DNA, 25 bp, Homo sapien
ggaagtgtcacacggcacctgtaca

SEQ ID NO: 1281685 - DNA, 25 bp, Homo sapien
tataagtgcgcttcggtacagcacg

SEQ ID NO: 1281686 - DNA, 25 bp, Homo sapien
ggacttttgcccagtgaagacaggc

SEQ ID NO: 1281687 - DNA, 25 bp, Homo sapien
tgcagactcttaacgcaggaaggac

SEQ ID NO: 1281688 - DNA, 25 bp, Homo sapien
tcctggtgtgagaagatagcatccc

SEQ ID NO: 1281689 - DNA, 25 bp, Homo sapien
aaaagatgatggcaccggcttggcc

SEQ ID NO: 1281690 - DNA, 25 bp, Homo sapien
tcacttgggtgggaggacgaaccat

SEQ ID NO: 1281691 - DNA, 25 bp, Homo sapien
tgagaagcctccaaacaagatggga

SEQ ID NO: 1281692 - DNA, 25 bp, Homo sapien
tttattctctctagggaacaggcca

SEQ ID NO: 1281693 - DNA, 25 bp, Homo sapien
catccatccttaaataaacagtcag

SEQ ID NO: 1281694 - DNA, 25 bp, Homo sapien
ccatccatccttaaataaacagtca

SEQ ID NO: 1281695 - DNA, 25 bp, Homo sapien
tctctctagggaacaggccaccctt

SEQ ID NO: 1281696 - DNA, 25 bp, Homo sapien
tccgcgtctgtctggaacatgacca

SEQ ID NO: 1281697 - DNA, 25 bp, Homo sapien
catactgctgatagaagtccgcgtc

SEQ ID NO: 1281698 - DNA, 25 bp, Homo sapien
gtctctgccagtgcgggctggccct

SEQ ID NO: 1281699 - DNA, 25 bp, Homo sapien
tgccacctggcccatactgctgata

SEQ ID NO: 1281700 - DNA, 25 bp, Homo sapien
cacaggagtcacaggcgtagaggat

SEQ ID NO: 1281701 - DNA, 25 bp, Homo sapien
caggcgtagaggatgtgagtgttgg

SEQ ID NO: 1281702 - DNA, 25 bp, Homo sapien
gtgtggattcgcacatgctgagcca

SEQ ID NO: 1281703 - DNA, 25 bp, Homo sapien
tccccacaggagtcacaggcgtaga

SEQ ID NO: 1281704 - DNA, 25 bp, Homo sapien
ccccgggctctgcccacattcacac

SEQ ID NO: 1281705 - DNA, 25 bp, Homo sapien
gaccccgggctctgcccacattcac

SEQ ID NO: 1281706 - DNA, 25 bp, Homo sapien
gcccacattcacacccgggtggccc

SEQ ID NO: 1281707 - DNA, 25 bp, Homo sapien
accccgggctctgcccacattcaca

SEQ ID NO: 1281708 - DNA, 25 bp, Homo sapien
ttcacagctttgctgatctcggcct

SEQ ID NO: 1281709 - DNA, 25 bp, Homo sapien
gacttccgtctcatcggctgtcact

SEQ ID NO: 1281710 - DNA, 25 bp, Homo sapien
gctttgctgatctcggccttcagga

SEQ ID NO: 1281711 - DNA, 25 bp, Homo sapien
tgatctcggccttcaggacttccgt

SEQ ID NO: 1281712 - DNA, 25 bp, Homo sapien
gcagcaagctgcctgtgacttccct

SEQ ID NO: 1281713 - DNA, 25 bp, Homo sapien
aggtgaaggcacgggcactgcccca

SEQ ID NO: 1281714 - DNA, 25 bp, Homo sapien
gaaggcacgggcactgccccatcat

SEQ ID NO: 1281715 - DNA, 25 bp, Homo sapien
agcaagctgcctgtgacttccctct

SEQ ID NO: 1281716 - DNA, 25 bp, Homo sapien
gagcgcaggttgtctacccggttga

SEQ ID NO: 1281717 - DNA, 25 bp, Homo sapien
tcggtagccagcgtgaccatgtcat

SEQ ID NO: 1281718 - DNA, 25 bp, Homo sapien
ggctgtcgctgccagtgcctcggta

SEQ ID NO: 1281719 - DNA, 25 bp, Homo sapien
cttgccctggtgcacggtcttcacg

SEQ ID NO: 1281720 - DNA, 25 bp, Homo sapien
ggtgggaggccctcaatgactcgtt

SEQ ID NO: 1281721 - DNA, 25 bp, Homo sapien
tgcacgggtgcctctggtgacactg

SEQ ID NO: 1281722 - DNA, 25 bp, Homo sapien
tcaatgactcgtttgcccagcaacc

SEQ ID NO: 1281723 - DNA, 25 bp, Homo sapien
tgcccagcaaccctgtcttttacag

SEQ ID NO: 1281724 - DNA, 25 bp, Homo sapien
tgtgcttggacaggtcccccacgtt

SEQ ID NO: 1281725 - DNA, 25 bp, Homo sapien
cacacgctgcacttgtgtgggcgga

SEQ ID NO: 1281726 - DNA, 25 bp, Homo sapien
tgttgtcgtggtggcgaatatgatt

SEQ ID NO: 1281727 - DNA, 25 bp, Homo sapien
aatatgattggccaactggctggac

SEQ ID NO: 1281728 - DNA, 25 bp, Homo sapien
tcgcatggaactgccccaacctggg

SEQ ID NO: 1281729 - DNA, 25 bp, Homo sapien
agccaagcccccagtttgtcttctg

SEQ ID NO: 1281730 - DNA, 25 bp, Homo sapien
tgaaaaggacccctaggaccagagc

SEQ ID NO: 1281731 - DNA, 25 bp, Homo sapien
ccacaggaagggactcgcatggaac

SEQ ID NO: 1281732 - DNA, 25 bp, Homo sapien
ggggtgtctggccagtgggtgtggg

SEQ ID NO: 1281733 - DNA, 25 bp, Homo sapien
ggtgtctggccagtgggtgtggggg

SEQ ID NO: 1281734 - DNA, 25 bp, Homo sapien
tggggtgtctggccagtgggtgtgg

SEQ ID NO: 1281735 - DNA, 25 bp, Homo sapien
tgtggggtgtctggccagtgggtgt

SEQ ID NO: 1281736 - DNA, 25 bp, Homo sapien
cgcacgtgggcgatgagggagctgg

SEQ ID NO: 1281737 - DNA, 25 bp, Homo sapien
tggcgcacgtgggcgatgagggagc

SEQ ID NO: 1281738 - DNA, 25 bp, Homo sapien
ccgcagcgctcgcagacgtagggct

SEQ ID NO: 1281739 - DNA, 25 bp, Homo sapien
gcgatgagggagctggcctgggtga

SEQ ID NO: 1281740 - DNA, 25 bp, Homo sapien
taccgcacatcacacactggcatgg

SEQ ID NO: 1281741 - DNA, 25 bp, Homo sapien
cgcacatcacacactggcatggctt

SEQ ID NO: 1281742 - DNA, 25 bp, Homo sapien
ttaccgcacatcacacactggcatg

SEQ ID NO: 1281743 - DNA, 25 bp, Homo sapien
catcacacactggcatggcttctca

SEQ ID NO: 1281744 - DNA, 25 bp, Homo sapien
gaaggtgttggtgcctgctcctctc

SEQ ID NO: 1281745 - DNA, 25 bp, Homo sapien
cctgggcatggccgctcaccaccca

SEQ ID NO: 1281746 - DNA, 25 bp, Homo sapien
cagaaggtgttggtgcctgctcctc

SEQ ID NO: 1281747 - DNA, 25 bp, Homo sapien
ggcagaaggtgttggtgcctgctcc

SEQ ID NO: 1281748 - DNA, 25 bp, Homo sapien
tgaatgcggacgtgccgctgcagag

SEQ ID NO: 1281749 - DNA, 25 bp, Homo sapien
tgtgtgaatgcggacgtgccgctgc

SEQ ID NO: 1281750 - DNA, 25 bp, Homo sapien
gcaaactgtcgctggcagtggatgc

SEQ ID NO: 1281751 - DNA, 25 bp, Homo sapien
gggtctgcaaactgtcgctggcagt

SEQ ID NO: 1281752 - DNA, 25 bp, Homo sapien
tgtggcgagaccgagggcgaacctg

SEQ ID NO: 1281753 - DNA, 25 bp, Homo sapien
agaccgagggcgaacctggcgtggg

SEQ ID NO: 1281754 - DNA, 25 bp, Homo sapien
ggcaccaccggtggccgaggagcag

SEQ ID NO: 1281755 - DNA, 25 bp, Homo sapien
gcgtggggcaccaccggtggccgag

SEQ ID NO: 1281756 - DNA, 25 bp, Homo sapien
gcccgtcagcgatgtggatcttcag

SEQ ID NO: 1281757 - DNA, 25 bp, Homo sapien
gggcccgtcagcgatgtggatcttc

SEQ ID NO: 1281758 - DNA, 25 bp, Homo sapien
ttcccacactctcggcacttgaggg

SEQ ID NO: 1281759 - DNA, 25 bp, Homo sapien
cgtcagcgatgtggatcttcaggtg

SEQ ID NO: 1281760 - DNA, 25 bp, Homo sapien
tcctgggtgaacaagctgatgagct

SEQ ID NO: 1281761 - DNA, 25 bp, Homo sapien
aacaattgactctcaggcttgccag

SEQ ID NO: 1281762 - DNA, 25 bp, Homo sapien
tcccagcggtgagaggtaagccgcc

SEQ ID NO: 1281763 - DNA, 25 bp, Homo sapien
aagggctctatctctcctgggtcag

SEQ ID NO: 1281764 - DNA, 25 bp, Homo sapien
cgtggcatgcatgcggctgcggcca

SEQ ID NO: 1281765 - DNA, 25 bp, Homo sapien
tggcatgcatgcggctgcggccacc

SEQ ID NO: 1281766 - DNA, 25 bp, Homo sapien
acgtggcatgcatgcggctgcggcc

SEQ ID NO: 1281767 - DNA, 25 bp, Homo sapien
cacgtggcatgcatgcggctgcggc

SEQ ID NO: 1281768 - DNA, 25 bp, Homo sapien
agcggccgcagtagtcgcactggta

SEQ ID NO: 1281769 - DNA, 25 bp, Homo sapien
tccttgtccgtgtcgtgggtctcca

SEQ ID NO: 1281770 - DNA, 25 bp, Homo sapien
gcccgagtgccgcttcttgtgcagg

SEQ ID NO: 1281771 - DNA, 25 bp, Homo sapien
ctccaggtggcgcatcttggaagtg

SEQ ID NO: 1281772 - DNA, 25 bp, Homo sapien
gcagggccagaaggcgacaggaggc

SEQ ID NO: 1281773 - DNA, 25 bp, Homo sapien
caggaggcagggctcgctggggcgt

SEQ ID NO: 1281774 - DNA, 25 bp, Homo sapien
tggggcgtgaaaggccgggcctggc

SEQ ID NO: 1281775 - DNA, 25 bp, Homo sapien
gtaggaggccggcttggggcagtac

SEQ ID NO: 1281776 - DNA, 25 bp, Homo sapien
gaagttccccgtgtgcgtgaactcc

SEQ ID NO: 1281777 - DNA, 25 bp, Homo sapien
ggatgtgccgcttgaagttccccgt

SEQ ID NO: 1281778 - DNA, 25 bp, Homo sapien
ttctcatgggccttgcacgcggccg

SEQ ID NO: 1281779 - DNA, 25 bp, Homo sapien
tgcgtcttctcatgggccttgcacg

SEQ ID NO: 1281780 - DNA, 25 bp, Homo sapien
gagggctggccatagtctccctcac

SEQ ID NO: 1281781 - DNA, 25 bp, Homo sapien
tgcagcggggaagcggggtgtgagg

SEQ ID NO: 1281782 - DNA, 25 bp, Homo sapien
gggagggctggccatagtctccctc

SEQ ID NO: 1281783 - DNA, 25 bp, Homo sapien
ggaagcggggtgtgaggagcagccg

SEQ ID NO: 1281784 - DNA, 25 bp, Homo sapien
ccgttctccagctgggaaccctcct

SEQ ID NO: 1281785 - DNA, 25 bp, Homo sapien
ccttggactccgtgcggtcgccgta

SEQ ID NO: 1281786 - DNA, 25 bp, Homo sapien
tcattctcgttctcctcgggggcct

SEQ ID NO: 1281787 - DNA, 25 bp, Homo sapien
cgcacttgtggatgacggagccgta

SEQ ID NO: 1281788 - DNA, 25 bp, Homo sapien
ctttccgggcgggctccacctccat

SEQ ID NO: 1281789 - DNA, 25 bp, Homo sapien
cctcttgctccttttgctcctcttc

SEQ ID NO: 1281790 - DNA, 25 bp, Homo sapien
gctcctcttgctccttttgctcctc

SEQ ID NO: 1281791 - DNA, 25 bp, Homo sapien
cttgctcctcttgctccttttgctc

SEQ ID NO: 1281792 - DNA, 25 bp, Homo sapien
agcagccatgccactcgtggggtct

SEQ ID NO: 1281793 - DNA, 25 bp, Homo sapien
tctggcttgagctccacaggcggcg

SEQ ID NO: 1281794 - DNA, 25 bp, Homo sapien
ggctcccggggcgcatcggctttct

SEQ ID NO: 1281795 - DNA, 25 bp, Homo sapien
tgctccgagctctcggacaaagcgg

SEQ ID NO: 1281796 - DNA, 25 bp, Homo sapien
agcacacccctagccaaggctgttg

SEQ ID NO: 1281797 - DNA, 25 bp, Homo sapien
caggggtcggatacctctcctggac

SEQ ID NO: 1281798 - DNA, 25 bp, Homo sapien
gtggtggctgcgtgtgacccaggag

SEQ ID NO: 1281799 - DNA, 25 bp, Homo sapien
gctggattgctaccctctgcccagg

SEQ ID NO: 1281800 - DNA, 25 bp, Homo sapien
aacacacaataggtcattctgggta

SEQ ID NO: 1281801 - DNA, 25 bp, Homo sapien
aggtgcccgtgctacctgccccaag

SEQ ID NO: 1281802 - DNA, 25 bp, Homo sapien
tggaacacacaataggtcattctgg

SEQ ID NO: 1281803 - DNA, 25 bp, Homo sapien
acacaataggtcattctgggtaaca

SEQ ID NO: 1281804 - DNA, 25 bp, Homo sapien
tgctggggcctatgggtgtgctgcg

SEQ ID NO: 1281805 - DNA, 25 bp, Homo sapien
gggcctatgggtgtgctgcgtcctg

SEQ ID NO: 1281806 - DNA, 25 bp, Homo sapien
gcctatgggtgtgctgcgtcctgcc

SEQ ID NO: 1281807 - DNA, 25 bp, Homo sapien
tatgggtgtgctgcgtcctgcctgc

SEQ ID NO: 1281808 - DNA, 25 bp, Homo sapien
ggctcagcaagtgacttgagggcat

SEQ ID NO: 1281809 - DNA, 25 bp, Homo sapien
tagccggctcagcaagtgacttgag

SEQ ID NO: 1281810 - DNA, 25 bp, Homo sapien
ccggctcagcaagtgacttgagggc

SEQ ID NO: 1281811 - DNA, 25 bp, Homo sapien
ggtagccggctcagcaagtgacttg

SEQ ID NO: 1281812 - DNA, 25 bp, Homo sapien
gcttggccgtgtacataaactccag

SEQ ID NO: 1281813 - DNA, 25 bp, Homo sapien
gccacggccagcacatcatccacgt

SEQ ID NO: 1281814 - DNA, 25 bp, Homo sapien
ctcagcttggccgtgtacataaact

SEQ ID NO: 1281815 - DNA, 25 bp, Homo sapien
gccgtgtacataaactccagcacct

SEQ ID NO: 1281816 - DNA, 25 bp, Homo sapien
cagcaggacgcagggatttaggaac

SEQ ID NO: 1281817 - DNA, 25 bp, Homo sapien
acgcagggatttaggaacagctgag

SEQ ID NO: 1281818 - DNA, 25 bp, Homo sapien
ctcaagatccggcaccggcagcctg

SEQ ID NO: 1281819 - DNA, 25 bp, Homo sapien
tgagtggcaagcctgcatcgcccca

SEQ ID NO: 1281820 - DNA, 25 bp, Homo sapien
caggccgccagcactgctttatgag

SEQ ID NO: 1281821 - DNA, 25 bp, Homo sapien
agagcatcttgaagtactcgctgca

SEQ ID NO: 1281822 - DNA, 25 bp, Homo sapien
ctgatgtccaggtgcaccacgtcct

SEQ ID NO: 1281823 - DNA, 25 bp, Homo sapien
tccaggtgcaccacgtccttctggt

SEQ ID NO: 1281824 - DNA, 25 bp, Homo sapien
acaccgtccaccacaaaggtgcagt

SEQ ID NO: 1281825 - DNA, 25 bp, Homo sapien
aaagtgaacaccgtccaccacaaag

SEQ ID NO: 1281826 - DNA, 25 bp, Homo sapien
gaacaccgtccaccacaaaggtgca

SEQ ID NO: 1281827 - DNA, 25 bp, Homo sapien
cttaaagtgaacaccgtccaccaca

SEQ ID NO: 1281828 - DNA, 25 bp, Homo sapien
ggaagcagcaggttcctatctgtga

SEQ ID NO: 1281829 - DNA, 25 bp, Homo sapien
gaagcagcaggttcctatctgtgac

SEQ ID NO: 1281830 - DNA, 25 bp, Homo sapien
tggaagcagcaggttcctatctgtg

SEQ ID NO: 1281831 - DNA, 25 bp, Homo sapien
gaggcaccaatgtccagcttgtgga

SEQ ID NO: 1281832 - DNA, 25 bp, Homo sapien
gaacgcaagggagaatcgtggctgc

SEQ ID NO: 1281833 - DNA, 25 bp, Homo sapien
caccaatgtccagcttgtggatcaa

SEQ ID NO: 1281834 - DNA, 25 bp, Homo sapien
tgcgctgctcctatgcactggacat

SEQ ID NO: 1281835 - DNA, 25 bp, Homo sapien
ggttttggggtgctgtgctgtgcag

SEQ ID NO: 1281836 - DNA, 25 bp, Homo sapien
gggttttggggtgctgtgctgtgca

SEQ ID NO: 1281837 - DNA, 25 bp, Homo sapien
cagcgagggtcagaggagctaagag

SEQ ID NO: 1281838 - DNA, 25 bp, Homo sapien
gctggccccagaaagcacaacccat

SEQ ID NO: 1281839 - DNA, 25 bp, Homo sapien
aggctcctgcgggtgggatttggaa

SEQ ID NO: 1281840 - DNA, 25 bp, Homo sapien
gtggcagcgagggtcagaggagcta

SEQ ID NO: 1281841 - DNA, 25 bp, Homo sapien
gtttgggccgtgaaatccactctgg

SEQ ID NO: 1281842 - DNA, 25 bp, Homo sapien
tttgggccgtgaaatccactctggt

SEQ ID NO: 1281843 - DNA, 25 bp, Homo sapien
tgtttgggccgtgaaatccactctg

SEQ ID NO: 1281844 - DNA, 25 bp, Homo sapien
aagcaccacagactgctgagtaagc

SEQ ID NO: 1281845 - DNA, 25 bp, Homo sapien
gctggagtgcatgcccagagtgcta

SEQ ID NO: 1281846 - DNA, 25 bp, Homo sapien
gccaggaggcactttatattgaaca

SEQ ID NO: 1281847 - DNA, 25 bp, Homo sapien
tccagagcacaattagcatgaagac

SEQ ID NO: 1281848 - DNA, 25 bp, Homo sapien
tctgttaaaccccaagagtgctccc

SEQ ID NO: 1281849 - DNA, 25 bp, Homo sapien
ccgaggcaggactgtgggaggtctg

SEQ ID NO: 1281850 - DNA, 25 bp, Homo sapien
aggacagattaagccaggaggtcga

SEQ ID NO: 1281851 - DNA, 25 bp, Homo sapien
ctgtgggaggtctgagacaagccta

SEQ ID NO: 1281852 - DNA, 25 bp, Homo sapien
gagacaggaggacagattaagccag

SEQ ID NO: 1281853 - DNA, 25 bp, Homo sapien
gcataaatgcttaatacttgatggt

SEQ ID NO: 1281854 - DNA, 25 bp, Homo sapien
aatgcttaatacttgatggtaaccg

SEQ ID NO: 1281855 - DNA, 25 bp, Homo sapien
tacttgatggtaaccgccaccttct

SEQ ID NO: 1281856 - DNA, 25 bp, Homo sapien
taatacttgatggtaaccgccacct

SEQ ID NO: 1281857 - DNA, 25 bp, Homo sapien
aatgcgcggtttgcaacatcttcac

SEQ ID NO: 1281858 - DNA, 25 bp, Homo sapien
gccactcaacgggagggcagattca

SEQ ID NO: 1281859 - DNA, 25 bp, Homo sapien
tacagtgatcagtccaaaatgcgcg

SEQ ID NO: 1281860 - DNA, 25 bp, Homo sapien
tgaggatacacatggctgggagcac

SEQ ID NO: 1281861 - DNA, 25 bp, Homo sapien
ttgcctgtgtaaactccagcttggc

SEQ ID NO: 1281862 - DNA, 25 bp, Homo sapien
gtttgcctgtgtaaactccagcttg

SEQ ID NO: 1281863 - DNA, 25 bp, Homo sapien
tttgcctgtgtaaactccagcttgg

SEQ ID NO: 1281864 - DNA, 25 bp, Homo sapien
gcctgtgtaaactccagcttggctc

SEQ ID NO: 1281865 - DNA, 25 bp, Homo sapien
gcatgcgcagcgtcctcgctaggag

SEQ ID NO: 1281866 - DNA, 25 bp, Homo sapien
ccatgttagagtcgggcggaaccga

SEQ ID NO: 1281867 - DNA, 25 bp, Homo sapien
ccaccgcagagggaggtgcatcacg

SEQ ID NO: 1281868 - DNA, 25 bp, Homo sapien
ggagagcgcccatagacagacgcat

SEQ ID NO: 1281869 - DNA, 25 bp, Homo sapien
tcccaggtgatgtctttccaccata

SEQ ID NO: 1281870 - DNA, 25 bp, Homo sapien
tctcaggaggtagactactgcaggg

SEQ ID NO: 1281871 - DNA, 25 bp, Homo sapien
gatgtctttccaccataactctggc

SEQ ID NO: 1281872 - DNA, 25 bp, Homo sapien
aactctggctctctcaggaggtaga

SEQ ID NO: 1281873 - DNA, 25 bp, Homo sapien
cagatgctggctggtgagaggcact

SEQ ID NO: 1281874 - DNA, 25 bp, Homo sapien
tctgcctgaggaggacatattctgg

SEQ ID NO: 1281875 - DNA, 25 bp, Homo sapien
gaggacatattctgggcactggccc

SEQ ID NO: 1281876 - DNA, 25 bp, Homo sapien
gatgctggctggtgagaggcactcc

SEQ ID NO: 1281877 - DNA, 25 bp, Homo sapien
ggggttctccatggatttggagttg

SEQ ID NO: 1281878 - DNA, 25 bp, Homo sapien
ccatggatttggagttgggtttcct

SEQ ID NO: 1281879 - DNA, 25 bp, Homo sapien
gttctccatggatttggagttgggt

SEQ ID NO: 1281880 - DNA, 25 bp, Homo sapien
ggacgtggggttctccatggatttg

SEQ ID NO: 1281881 - DNA, 25 bp, Homo sapien
gcagttctcagacacccttgggcct

SEQ ID NO: 1281882 - DNA, 25 bp, Homo sapien
atgcagttctcagacacccttgggc

SEQ ID NO: 1281883 - DNA, 25 bp, Homo sapien
tgcagttctcagacacccttgggcc

SEQ ID NO: 1281884 - DNA, 25 bp, Homo sapien
tgggtggcccgtttggtcagcttcc

SEQ ID NO: 1281885 - DNA, 25 bp, Homo sapien
ctggcccaacaactcggttccagtg

SEQ ID NO: 1281886 - DNA, 25 bp, Homo sapien
aacaactcggttccagtggcccatt

SEQ ID NO: 1281887 - DNA, 25 bp, Homo sapien
catgggtggcccgtttggtcagctt

SEQ ID NO: 1281888 - DNA, 25 bp, Homo sapien
agaactccaggcaggcggcctccag

SEQ ID NO: 1281889 - DNA, 25 bp, Homo sapien
tgagaactccaggcaggcggcctcc

SEQ ID NO: 1281890 - DNA, 25 bp, Homo sapien
aactccaggcaggcggcctccagaa

SEQ ID NO: 1281891 - DNA, 25 bp, Homo sapien
agtttgagaactccaggcaggcggc

SEQ ID NO: 1281892 - DNA, 25 bp, Homo sapien
gagttgagagcagcagttgacaccc

SEQ ID NO: 1281893 - DNA, 25 bp, Homo sapien
tgtatacaggttccagcgtcagggc

SEQ ID NO: 1281894 - DNA, 25 bp, Homo sapien
actctggattaagtgacggaggcca

SEQ ID NO: 1281895 - DNA, 25 bp, Homo sapien
aaatctgggcatcatgtgtcaggcc

SEQ ID NO: 1281896 - DNA, 25 bp, Homo sapien
tcagattttgatctccgtccggaag

SEQ ID NO: 1281897 - DNA, 25 bp, Homo sapien
tgttcatgacagtgccgtcagccgc

SEQ ID NO: 1281898 - DNA, 25 bp, Homo sapien
tgcccggatagtgaggctgccgtcc

SEQ ID NO: 1281899 - DNA, 25 bp, Homo sapien
ttctgtatgcgggtgacgccgtgcc

SEQ ID NO: 1281900 - DNA, 25 bp, Homo sapien
tgagaagtctctcacgtccaccgca

SEQ ID NO: 1281901 - DNA, 25 bp, Homo sapien
tcataggcgtctcctagggtcttga

SEQ ID NO: 1281902 - DNA, 25 bp, Homo sapien
gcgtctcctagggtcttgatgttgc

SEQ ID NO: 1281903 - DNA, 25 bp, Homo sapien
caatgatgtcttcaggtgagaagtc

SEQ ID NO: 1281904 - DNA, 25 bp, Homo sapien
atgcagatccgggggttctggctcc

SEQ ID NO: 1281905 - DNA, 25 bp, Homo sapien
tctcttggggcaaggggcggctccc

SEQ ID NO: 1281906 - DNA, 25 bp, Homo sapien
gcatggagcaggccttgcatgcaga

SEQ ID NO: 1281907 - DNA, 25 bp, Homo sapien
tgtttctccctaagctcctcctcat

SEQ ID NO: 1281908 - DNA, 25 bp, Homo sapien
cagggccacaactgttccttagagg

SEQ ID NO: 1281909 - DNA, 25 bp, Homo sapien
tgaggctaggtctgtaacaacccca

SEQ ID NO: 1281910 - DNA, 25 bp, Homo sapien
gggtggccatggaaccatgtccaac

SEQ ID NO: 1281911 - DNA, 25 bp, Homo sapien
ctgtggttacagagcatgggtggcc

SEQ ID NO: 1281912 - DNA, 25 bp, Homo sapien
ctgttccaggccgaccggcagccac

SEQ ID NO: 1281913 - DNA, 25 bp, Homo sapien
gttccaggccgaccggcagccacag

SEQ ID NO: 1281914 - DNA, 25 bp, Homo sapien
cagccacagcgccttcggtggcgcc

SEQ ID NO: 1281915 - DNA, 25 bp, Homo sapien
ttcatggccacatctgtccctgtgg

SEQ ID NO: 1281916 - DNA, 25 bp, Homo sapien
gagcagacgtcccctccctgtgcac

SEQ ID NO: 1281917 - DNA, 25 bp, Homo sapien
tgccaaagtcatcggaaaacatgct

SEQ ID NO: 1281918 - DNA, 25 bp, Homo sapien
ggctccgagtggggccgcatgaagc

SEQ ID NO: 1281919 - DNA, 25 bp, Homo sapien
gctgccaaagtcatcggaaaacatg

SEQ ID NO: 1281920 - DNA, 25 bp, Homo sapien
caaagtcatcggaaaacatgctcag

SEQ ID NO: 1281921 - DNA, 25 bp, Homo sapien
aacttctctccgctcggaaggtgga

SEQ ID NO: 1281922 - DNA, 25 bp, Homo sapien
tctctccgctcggaaggtggaagag

SEQ ID NO: 1281923 - DNA, 25 bp, Homo sapien
gctcggaaggtggaagaggttctgt

SEQ ID NO: 1281924 - DNA, 25 bp, Homo sapien
tggaaacttctctccgctcggaagg

SEQ ID NO: 1281925 - DNA, 25 bp, Homo sapien
tctctaaggaaaggttgagccctgc

SEQ ID NO: 1281926 - DNA, 25 bp, Homo sapien
tttataaggccgactgtccctgggc

SEQ ID NO: 1281927 - DNA, 25 bp, Homo sapien
gaacctagatgtgttggacccaaag

SEQ ID NO: 1281928 - DNA, 25 bp, Homo sapien
ttgaacatgtgcctatggagacagg

SEQ ID NO: 1281929 - DNA, 25 bp, Homo sapien
ttgccctgggccagggtggaggcca

SEQ ID NO: 1281930 - DNA, 25 bp, Homo sapien
cttgccctgggccagggtggaggcc

SEQ ID NO: 1281931 - DNA, 25 bp, Homo sapien
tgccctgggccagggtggaggccat

SEQ ID NO: 1281932 - DNA, 25 bp, Homo sapien
ttcttccctatccaactggcagttc

SEQ ID NO: 1281933 - DNA, 25 bp, Homo sapien
cagcacctggcagtgtgacatagtc

SEQ ID NO: 1281934 - DNA, 25 bp, Homo sapien
ggttcttgaagacgggcagtttctc

SEQ ID NO: 1281935 - DNA, 25 bp, Homo sapien
tgtctccccattagattgaaggttc

SEQ ID NO: 1281936 - DNA, 25 bp, Homo sapien
gctgccctggtgtctctgagagtcc

SEQ ID NO: 1281937 - DNA, 25 bp, Homo sapien
aggctgtcatcctgtgaggggccgc

SEQ ID NO: 1281938 - DNA, 25 bp, Homo sapien
gctcctcaggtgagggacagctgtc

SEQ ID NO: 1281939 - DNA, 25 bp, Homo sapien
gctgcgggatgccagcggtgctggg

SEQ ID NO: 1281940 - DNA, 25 bp, Homo sapien
tgtcatcctgtgaggggccgctggg

SEQ ID NO: 1281941 - DNA, 25 bp, Homo sapien
tgcagctcctcttcgtccagcgagg

SEQ ID NO: 1281942 - DNA, 25 bp, Homo sapien
cagcgaggaccaagcgctcagtgtg

SEQ ID NO: 1281943 - DNA, 25 bp, Homo sapien
gaccaagcgctcagtgtggcctctg

SEQ ID NO: 1281944 - DNA, 25 bp, Homo sapien
cttcgtccagcgaggaccaagcgct

SEQ ID NO: 1281945 - DNA, 25 bp, Homo sapien
tgggccccccaaggacccagcttca

SEQ ID NO: 1281946 - DNA, 25 bp, Homo sapien
ctggccagtccccctcctcgctgac

SEQ ID NO: 1281947 - DNA, 25 bp, Homo sapien
gccctggccagtccccctcctcgct

SEQ ID NO: 1281948 - DNA, 25 bp, Homo sapien
cctggccagtccccctcctcgctga

SEQ ID NO: 1281949 - DNA, 25 bp, Homo sapien
ccctggccagtccccctcctcgctg

SEQ ID NO: 1281950 - DNA, 25 bp, Homo sapien
gagcttatccggaggcagcagtaat

SEQ ID NO: 1281951 - DNA, 25 bp, Homo sapien
tgagcttatccggaggcagcagtaa

SEQ ID NO: 1281952 - DNA, 25 bp, Homo sapien
tcactgagcttatccggaggcagca

SEQ ID NO: 1281953 - DNA, 25 bp, Homo sapien
gggcctcactgagcttatccggagg

SEQ ID NO: 1281954 - DNA, 25 bp, Homo sapien
gctgccacgttgtagttgccggggc

SEQ ID NO: 1281955 - DNA, 25 bp, Homo sapien
ggtgggccaggcttccggccgacat

SEQ ID NO: 1281956 - DNA, 25 bp, Homo sapien
gggtgggccaggcttccggccgaca

SEQ ID NO: 1281957 - DNA, 25 bp, Homo sapien
tggaggaagtggcaggaggattgag

SEQ ID NO: 1281958 - DNA, 25 bp, Homo sapien
aggaagtggcaggaggattgagcag

SEQ ID NO: 1281959 - DNA, 25 bp, Homo sapien
caaggatcccaacagaaatccatct

SEQ ID NO: 1281960 - DNA, 25 bp, Homo sapien
ctgccaaggatcccaacagaaatcc

SEQ ID NO: 1281961 - DNA, 25 bp, Homo sapien
gccaaggatcccaacagaaatccat

SEQ ID NO: 1281962 - DNA, 25 bp, Homo sapien
aaggatcccaacagaaatccatctg

SEQ ID NO: 1281963 - DNA, 25 bp, Homo sapien
tttcctgctgcacttaagaccttct

SEQ ID NO: 1281964 - DNA, 25 bp, Homo sapien
acttaagaccttctcgcccgtccat

SEQ ID NO: 1281965 - DNA, 25 bp, Homo sapien
gcttttcctgctgcacttaagacct

SEQ ID NO: 1281966 - DNA, 25 bp, Homo sapien
tcctgctgcacttaagaccttctcg

SEQ ID NO: 1281967 - DNA, 25 bp, Homo sapien
ccccggggggccttgctctctctgc

SEQ ID NO: 1281968 - DNA, 25 bp, Homo sapien
cccggactggctcccatccctgccc

SEQ ID NO: 1281969 - DNA, 25 bp, Homo sapien
cccccggggggccttgctctctctg

SEQ ID NO: 1281970 - DNA, 25 bp, Homo sapien
tggctcccatccctgccctcccccg

SEQ ID NO: 1281971 - DNA, 25 bp, Homo sapien
ctggcagtgggggtgtaaccattgg

SEQ ID NO: 1281972 - DNA, 25 bp, Homo sapien
tggcagtgggggtgtaaccattgga

SEQ ID NO: 1281973 - DNA, 25 bp, Homo sapien
ggcagtgggggtgtaaccattggaa

SEQ ID NO: 1281974 - DNA, 25 bp, Homo sapien
gccagagtgaagttgccaaggcccc

SEQ ID NO: 1281975 - DNA, 25 bp, Homo sapien
cacacagacttcatcgtgctggcgt

SEQ ID NO: 1281976 - DNA, 25 bp, Homo sapien
caatagtcacaatagccccatagga

SEQ ID NO: 1281977 - DNA, 25 bp, Homo sapien
gacaatgccattgatgccccagggc

SEQ ID NO: 1281978 - DNA, 25 bp, Homo sapien
gcatagtgcgaagggcccagctggt

SEQ ID NO: 1281979 - DNA, 25 bp, Homo sapien
atcctggtgggcatagtgcgaaggg

SEQ ID NO: 1281980 - DNA, 25 bp, Homo sapien
tgggcatagtgcgaagggcccagct

SEQ ID NO: 1281981 - DNA, 25 bp, Homo sapien
tggtgggcatagtgcgaagggccca

SEQ ID NO: 1281982 - DNA, 25 bp, Homo sapien
cagggtgaatccaccactttaatgt

SEQ ID NO: 1281983 - DNA, 25 bp, Homo sapien
tgggagggactgaaccccaggtaca

SEQ ID NO: 1281984 - DNA, 25 bp, Homo sapien
cctcagagaaccttgagtgagatgg

SEQ ID NO: 1281985 - DNA, 25 bp, Homo sapien
tagctaccagaagtggtcaccccac

SEQ ID NO: 1281986 - DNA, 25 bp, Homo sapien
gctgccctggtgtctctgagagtcc

SEQ ID NO: 1281987 - DNA, 25 bp, Homo sapien
aggccaccatgagcactggccccat

SEQ ID NO: 1281988 - DNA, 25 bp, Homo sapien
tggaccccggggtccagatatgcct

SEQ ID NO: 1281989 - DNA, 25 bp, Homo sapien
catccctgccgcacctaccctgtgc

SEQ ID NO: 1281990 - DNA, 25 bp, Homo sapien
ccaggcgaggtcatggtgagagcag

SEQ ID NO: 1281991 - DNA, 25 bp, Homo sapien
cctcctcccagagggagccgctgtc

SEQ ID NO: 1281992 - DNA, 25 bp, Homo sapien
tgtccatggaggggagggagcccgg

SEQ ID NO: 1281993 - DNA, 25 bp, Homo sapien
tcgtcctcctcccagagggagccgc

SEQ ID NO: 1281994 - DNA, 25 bp, Homo sapien
ctcccagagggagccgctgtccatg

SEQ ID NO: 1281995 - DNA, 25 bp, Homo sapien
gggctcctcaggtgagggacagctg

SEQ ID NO: 1281996 - DNA, 25 bp, Homo sapien
gctgcgggatgccagcggtgctggg

SEQ ID NO: 1281997 - DNA, 25 bp, Homo sapien
gctcctcaggtgagggacagctgtc

SEQ ID NO: 1281998 - DNA, 25 bp, Homo sapien
aaggctgtcctgaaggtagatgctc

SEQ ID NO: 1281999 - DNA, 25 bp, Homo sapien
gctgtcctgaaggtagatgctctcc

SEQ ID NO: 1282000 - DNA, 25 bp, Homo sapien
ctgggaaggctgtcctgaaggtaga

SEQ ID NO: 1282001 - DNA, 25 bp, Homo sapien
ccgctgggaaggctgtcctgaaggt

SEQ ID NO: 1282002 - DNA, 25 bp, Homo sapien
cagcgaggaccaagcgctcagtgtg

SEQ ID NO: 1282003 - DNA, 25 bp, Homo sapien
tgcagctcctcttcgtccagcgagg

SEQ ID NO: 1282004 - DNA, 25 bp, Homo sapien
cttcgtccagcgaggaccaagcgct

SEQ ID NO: 1282005 - DNA, 25 bp, Homo sapien
gaccaagcgctcagtgtggcctctg

SEQ ID NO: 1282006 - DNA, 25 bp, Homo sapien
cttccactcgatgaggtgggccacg

SEQ ID NO: 1282007 - DNA, 25 bp, Homo sapien
cagcagtaatgctcgtcctcagctg

SEQ ID NO: 1282008 - DNA, 25 bp, Homo sapien
tccactcgatgaggtgggccacgcg

SEQ ID NO: 1282009 - DNA, 25 bp, Homo sapien
gcagtaatgctcgtcctcagctggg

SEQ ID NO: 1282010 - DNA, 25 bp, Homo sapien
tagccgttggtggtctggaagcacc

SEQ ID NO: 1282011 - DNA, 25 bp, Homo sapien
gccagggctgccacgttgtagttgc

SEQ ID NO: 1282012 - DNA, 25 bp, Homo sapien
cacaagggacgaggtggccagggct

SEQ ID NO: 1282013 - DNA, 25 bp, Homo sapien
atctggagtcggacaggtagccgtt

SEQ ID NO: 1282014 - DNA, 25 bp, Homo sapien
aaggatcccaacagaaatccatctg

SEQ ID NO: 1282015 - DNA, 25 bp, Homo sapien
ctgccaaggatcccaacagaaatcc

SEQ ID NO: 1282016 - DNA, 25 bp, Homo sapien
caaggatcccaacagaaatccatct

SEQ ID NO: 1282017 - DNA, 25 bp, Homo sapien
gccaaggatcccaacagaaatccat

SEQ ID NO: 1282018 - DNA, 25 bp, Homo sapien
ctgggttcaaggggtccgcaccctg

SEQ ID NO: 1282019 - DNA, 25 bp, Homo sapien
gagtgcggcccgagggcagatctgg

SEQ ID NO: 1282020 - DNA, 25 bp, Homo sapien
tggagccacggtgggagtgcggccc

SEQ ID NO: 1282021 - DNA, 25 bp, Homo sapien
acacagtctggagccacggtgggag

SEQ ID NO: 1282022 - DNA, 25 bp, Homo sapien
cagttcttgtgggcacttgtgaaca

SEQ ID NO: 1282023 - DNA, 25 bp, Homo sapien
ggcagttcttgtgggcacttgtgaa

SEQ ID NO: 1282024 - DNA, 25 bp, Homo sapien
ttcttgtgggcacttgtgaacaggt

SEQ ID NO: 1282025 - DNA, 25 bp, Homo sapien
gggcagttcttgtgggcacttgtga

SEQ ID NO: 1282026 - DNA, 25 bp, Homo sapien
taggctgaccctaggaacttgagag

SEQ ID NO: 1282027 - DNA, 25 bp, Homo sapien
gccagggcccgccaaggtgcagaca

SEQ ID NO: 1282028 - DNA, 25 bp, Homo sapien
ggtatttctaggacccctggccatc

SEQ ID NO: 1282029 - DNA, 25 bp, Homo sapien
tattattcctatgggtccagtcaaa

SEQ ID NO: 1282030 - DNA, 25 bp, Homo sapien
gggagccgggcacagaggaggctgg

SEQ ID NO: 1282031 - DNA, 25 bp, Homo sapien
gagccgggcacagaggaggctggtg

SEQ ID NO: 1282032 - DNA, 25 bp, Homo sapien
tggtggtgatgccaaagcctggcag

SEQ ID NO: 1282033 - DNA, 25 bp, Homo sapien
ggcagaggcatgacttgaacaaggt

SEQ ID NO: 1282034 - DNA, 25 bp, Homo sapien
ctgagcgctgcggagccagaggacg

SEQ ID NO: 1282035 - DNA, 25 bp, Homo sapien
gctgcggagccagaggacgggcggg

SEQ ID NO: 1282036 - DNA, 25 bp, Homo sapien
gggctgagcgctgcggagccagagg

SEQ ID NO: 1282037 - DNA, 25 bp, Homo sapien
gggccgcggggcgttcatgtctccg

SEQ ID NO: 1282038 - DNA, 25 bp, Homo sapien
tggccgcagcgcgcgggagggccat

SEQ ID NO: 1282039 - DNA, 25 bp, Homo sapien
tgtggccgcagcgcgcgggagggcc

SEQ ID NO: 1282040 - DNA, 25 bp, Homo sapien
ctgtggccgcagcgcgcgggagggc

SEQ ID NO: 1282041 - DNA, 25 bp, Homo sapien
gtggccgcagcgcgcgggagggcca

SEQ ID NO: 1282042 - DNA, 25 bp, Homo sapien
tgaagtagacgatgtccagacagct

SEQ ID NO: 1282043 - DNA, 25 bp, Homo sapien
ctgaagtagacgatgtccagacagc

SEQ ID NO: 1282044 - DNA, 25 bp, Homo sapien
gctgaagtagacgatgtccagacag

SEQ ID NO: 1282045 - DNA, 25 bp, Homo sapien
taagtgctcattggtgccctgggtg

SEQ ID NO: 1282046 - DNA, 25 bp, Homo sapien
tgtgccctgaggttgcttcccccag

SEQ ID NO: 1282047 - DNA, 25 bp, Homo sapien
cctagatttgacagtggcgcgggca

SEQ ID NO: 1282048 - DNA, 25 bp, Homo sapien
tctggaatgcacaacctcttgccgt

SEQ ID NO: 1282049 - DNA, 25 bp, Homo sapien
cagctgtgtgcgtctcgcagggaaa

SEQ ID NO: 1282050 - DNA, 25 bp, Homo sapien
tcagttcaggccagggtgtcatccg

SEQ ID NO: 1282051 - DNA, 25 bp, Homo sapien
gaatatcccatatgtctgtccgaag

SEQ ID NO: 1282052 - DNA, 25 bp, Homo sapien
gagtccccagctcacgaatgtttga

SEQ ID NO: 1282053 - DNA, 25 bp, Homo sapien
gatccccacagtgttcacctggtcc

SEQ ID NO: 1282054 - DNA, 25 bp, Homo sapien
agccgcaccccaatcctcttgatgt

SEQ ID NO: 1282055 - DNA, 25 bp, Homo sapien
cagcaggctgtaggcgatgcgcttc

SEQ ID NO: 1282056 - DNA, 25 bp, Homo sapien
cctggtccttgagtcccagcaggct

SEQ ID NO: 1282057 - DNA, 25 bp, Homo sapien
tccaggaggacaagtgctgagacct

SEQ ID NO: 1282058 - DNA, 25 bp, Homo sapien
tgtggtccctggaaaagcgctcaga

SEQ ID NO: 1282059 - DNA, 25 bp, Homo sapien
gattcactcgatttgcagttccgca

SEQ ID NO: 1282060 - DNA, 25 bp, Homo sapien
gggagaacttcctacgctacctgca

SEQ ID NO: 1282061 - DNA, 25 bp, Homo sapien
cagccactcggacaccgtgcggaag

SEQ ID NO: 1282062 - DNA, 25 bp, Homo sapien
actcggacaccgtgcggaagggcac

SEQ ID NO: 1282063 - DNA, 25 bp, Homo sapien
gtagccggccgccatgaagtgctcc

SEQ ID NO: 1282064 - DNA, 25 bp, Homo sapien
tgctccgtatactgctgcatcttga

SEQ ID NO: 1282065 - DNA, 25 bp, Homo sapien
tcaggggcacgaatgagcttgtcca

SEQ ID NO: 1282066 - DNA, 25 bp, Homo sapien
tgctgacgatgtcagcgaacttggg

SEQ ID NO: 1282067 - DNA, 25 bp, Homo sapien
tcagccagggtcttgagggagtcag

SEQ ID NO: 1282068 - DNA, 25 bp, Homo sapien
gagccggaagccatcattgatggct

SEQ ID NO: 1282069 - DNA, 25 bp, Homo sapien
tggcggggcacgaaggtcaggggcg

SEQ ID NO: 1282070 - DNA, 25 bp, Homo sapien
agaaagccactgaaaccctctgcag

SEQ ID NO: 1282071 - DNA, 25 bp, Homo sapien
gggcgctgttgcagaaagccactga

SEQ ID NO: 1282072 - DNA, 25 bp, Homo sapien
gcacgaaggtcaggggcgctgttgc

SEQ ID NO: 1282073 - DNA, 25 bp, Homo sapien
caggcctggggagggcaagggcacc

SEQ ID NO: 1282074 - DNA, 25 bp, Homo sapien
tcaggtccggacaggcctggggagg

SEQ ID NO: 1282075 - DNA, 25 bp, Homo sapien
gcctggggagggcaagggcacccac

SEQ ID NO: 1282076 - DNA, 25 bp, Homo sapien
gacaggcctggggagggcaagggca

SEQ ID NO: 1282077 - DNA, 25 bp, Homo sapien
tggttggacaactcccagtagggcc

SEQ ID NO: 1282078 - DNA, 25 bp, Homo sapien
cgtggttggacaactcccagtaggg

SEQ ID NO: 1282079 - DNA, 25 bp, Homo sapien
gaaatggcctccggggcggtccagc

SEQ ID NO: 1282080 - DNA, 25 bp, Homo sapien
ctcgtggttggacaactcccagtag

SEQ ID NO: 1282081 - DNA, 25 bp, Homo sapien
gaaggccgcttctcccttgaggtcc

SEQ ID NO: 1282082 - DNA, 25 bp, Homo sapien
gaccattgcagccaagccccacgac

SEQ ID NO: 1282083 - DNA, 25 bp, Homo sapien
tcctacaggtgttctgcctcctgaa

SEQ ID NO: 1282084 - DNA, 25 bp, Homo sapien
cctggactcctacaggtgttctgcc

SEQ ID NO: 1282085 - DNA, 25 bp, Homo sapien
ctgcagcacgctgaactcgccatcc

SEQ ID NO: 1282086 - DNA, 25 bp, Homo sapien
ctccagcacgcgggacaggccaaag

SEQ ID NO: 1282087 - DNA, 25 bp, Homo sapien
tgcagcacgctgaactcgccatcct

SEQ ID NO: 1282088 - DNA, 25 bp, Homo sapien
cagcacgcgggacaggccaaagtca

SEQ ID NO: 1282089 - DNA, 25 bp, Homo sapien
gtactcagtgatgatcatcatgggc

SEQ ID NO: 1282090 - DNA, 25 bp, Homo sapien
tactcagtgatgatcatcatgggct

SEQ ID NO: 1282091 - DNA, 25 bp, Homo sapien
gaagtgggcacagttgtagaggagg

SEQ ID NO: 1282092 - DNA, 25 bp, Homo sapien
ggcacaggtataggggaggtgggca

SEQ ID NO: 1282093 - DNA, 25 bp, Homo sapien
gacagagcccctgctaagtggcccc

SEQ ID NO: 1282094 - DNA, 25 bp, Homo sapien
agagcccctgctaagtggcccctct

SEQ ID NO: 1282095 - DNA, 25 bp, Homo sapien
gagatgacgccctctaggcggatga

SEQ ID NO: 1282096 - DNA, 25 bp, Homo sapien
tgtagccggctttcagcgtcttgat

SEQ ID NO: 1282097 - DNA, 25 bp, Homo sapien
cgctgcttctctgtgtagccggctt

SEQ ID NO: 1282098 - DNA, 25 bp, Homo sapien
tgatgccggcctcgccgaggaagtc

SEQ ID NO: 1282099 - DNA, 25 bp, Homo sapien
gatggatggatctcggtagtgaact

SEQ ID NO: 1282100 - DNA, 25 bp, Homo sapien
tgtgggggtccacgtatgtcttcag

SEQ ID NO: 1282101 - DNA, 25 bp, Homo sapien
ggtcctcatatgtgtgggggtccac

SEQ ID NO: 1282102 - DNA, 25 bp, Homo sapien
tgctccgatcaccttctgccgagtg

SEQ ID NO: 1282103 - DNA, 25 bp, Homo sapien
ctggcgggcacgctggttcttcctc

SEQ ID NO: 1282104 - DNA, 25 bp, Homo sapien
ctgacttggagaagtaaacgtcctc

SEQ ID NO: 1282105 - DNA, 25 bp, Homo sapien
cgtcctccggggactggcgggcacg

SEQ ID NO: 1282106 - DNA, 25 bp, Homo sapien
tgacttggagaagtaaacgtcctcc

SEQ ID NO: 1282107 - DNA, 25 bp, Homo sapien
cacgccgccaatcaccgccaagttg

SEQ ID NO: 1282108 - DNA, 25 bp, Homo sapien
ggataaagaagccaactcctgccag

SEQ ID NO: 1282109 - DNA, 25 bp, Homo sapien
gccaagttgccagatccctccgggg

SEQ ID NO: 1282110 - DNA, 25 bp, Homo sapien
agaagcaggaccacaccgacagcca

SEQ ID NO: 1282111 - DNA, 25 bp, Homo sapien
ggaattcgtgcaccttgctgccggc

SEQ ID NO: 1282112 - DNA, 25 bp, Homo sapien
gaaaccctcggtgcggcgcacattg

SEQ ID NO: 1282113 - DNA, 25 bp, Homo sapien
tgcacctggaccaggtaggtggtgt

SEQ ID NO: 1282114 - DNA, 25 bp, Homo sapien
gcacattgtagctgttggagtctcc

SEQ ID NO: 1282115 - DNA, 25 bp, Homo sapien
cttcttgcggtaagtgacctcgtac

SEQ ID NO: 1282116 - DNA, 25 bp, Homo sapien
agtgacctcgtacttccacactcgg

SEQ ID NO: 1282117 - DNA, 25 bp, Homo sapien
ctcgtacttccacactcggctctgc

SEQ ID NO: 1282118 - DNA, 25 bp, Homo sapien
cttgcggtaagtgacctcgtacttc

SEQ ID NO: 1282119 - DNA, 25 bp, Homo sapien
tgaatccgggatgcagaggttgcgg

SEQ ID NO: 1282120 - DNA, 25 bp, Homo sapien
gagccaagattgtgccattgcactc

SEQ ID NO: 1282121 - DNA, 25 bp, Homo sapien
gaatccgggatgcagaggttgcggt

SEQ ID NO: 1282122 - DNA, 25 bp, Homo sapien
caagattgtgccattgcactccagc

SEQ ID NO: 1282123 - DNA, 25 bp, Homo sapien
tgacactggcagtacggaagctgcg

SEQ ID NO: 1282124 - DNA, 25 bp, Homo sapien
tggttaccaggcctgagacgccatt

SEQ ID NO: 1282125 - DNA, 25 bp, Homo sapien
gcaggtgacgctgtagacaatgtcc

SEQ ID NO: 1282126 - DNA, 25 bp, Homo sapien
tgtcacactggtgcgggtcagtccg

SEQ ID NO: 1282127 - DNA, 25 bp, Homo sapien
actcgcaggaggtggcaccctcagg

SEQ ID NO: 1282128 - DNA, 25 bp, Homo sapien
tgtgcaaggcatcgacgctgggtcc

SEQ ID NO: 1282129 - DNA, 25 bp, Homo sapien
cttcctcacactcgcaggaggtggc

SEQ ID NO: 1282130 - DNA, 25 bp, Homo sapien
tccaagcaggggctctcagatgcct

SEQ ID NO: 1282131 - DNA, 25 bp, Homo sapien
acatcacagaaataaggcctggtgg

SEQ ID NO: 1282132 - DNA, 25 bp, Homo sapien
aataaggcctggtgggacttcccag

SEQ ID NO: 1282133 - DNA, 25 bp, Homo sapien
agcaggggacaaagcctgcgagcca

SEQ ID NO: 1282134 - DNA, 25 bp, Homo sapien
gggacaaagcctgcgagccacagcc

SEQ ID NO: 1282135 - DNA, 25 bp, Homo sapien
ctgaccagcggtccccagggctgag

SEQ ID NO: 1282136 - DNA, 25 bp, Homo sapien
gggacagcggtcagcccgagcgact

SEQ ID NO: 1282137 - DNA, 25 bp, Homo sapien
ggacagcggtcagcccgagcgactc

SEQ ID NO: 1282138 - DNA, 25 bp, Homo sapien
cgggggacagcggtcagcccgagcg

SEQ ID NO: 1282139 - DNA, 25 bp, Homo sapien
gagacaaagcagcccccgggggaca

SEQ ID NO: 1282140 - DNA, 25 bp, Homo sapien
tctacggtagcgactgtcatcactt

SEQ ID NO: 1282141 - DNA, 25 bp, Homo sapien
gtctacggtagcgactgtcatcact

SEQ ID NO: 1282142 - DNA, 25 bp, Homo sapien
tacggtagcgactgtcatcacttcc

SEQ ID NO: 1282143 - DNA, 25 bp, Homo sapien
ccgtctacggtagcgactgtcatca

SEQ ID NO: 1282144 - DNA, 25 bp, Homo sapien
tgagttagtccagccttaataagga

SEQ ID NO: 1282145 - DNA, 25 bp, Homo sapien
gagcttaccaagattccatgattcc

SEQ ID NO: 1282146 - DNA, 25 bp, Homo sapien
tccactaacagaactaatgtgtgtc

SEQ ID NO: 1282147 - DNA, 25 bp, Homo sapien
accagaacctgggaatgcagaaccc

SEQ ID NO: 1282148 - DNA, 25 bp, Homo sapien
tcaatcttggtgaacaggcgcttct

SEQ ID NO: 1282149 - DNA, 25 bp, Homo sapien
cacacggagtacatgtagatcggca

SEQ ID NO: 1282150 - DNA, 25 bp, Homo sapien
tacacccagttggtgcggagccagt

SEQ ID NO: 1282151 - DNA, 25 bp, Homo sapien
tctcatcgggcgcaatggtgtcaat

SEQ ID NO: 1282152 - DNA, 25 bp, Homo sapien
gctgcagcaaagtccagcagtacca

SEQ ID NO: 1282153 - DNA, 25 bp, Homo sapien
ccatacgggtgtgtgagccagccga

SEQ ID NO: 1282154 - DNA, 25 bp, Homo sapien
ccctttgccatacgggtgtgtgagc

SEQ ID NO: 1282155 - DNA, 25 bp, Homo sapien
ccagctgcagcaaagtccagcagta

SEQ ID NO: 1282156 - DNA, 25 bp, Homo sapien
tgccgcatttcctcgttctgagtca

SEQ ID NO: 1282157 - DNA, 25 bp, Homo sapien
agggattggcccgaacctatctcca

SEQ ID NO: 1282158 - DNA, 25 bp, Homo sapien
tgggacttcctgtccgcactcgcgg

SEQ ID NO: 1282159 - DNA, 25 bp, Homo sapien
tcacccttgctcagaacgcttgact

SEQ ID NO: 1282160 - DNA, 25 bp, Homo sapien
agggcgaagcaggcgcgggctgcct

SEQ ID NO: 1282161 - DNA, 25 bp, Homo sapien
cagggcgaagcaggcgcgggctgcc

SEQ ID NO: 1282162 - DNA, 25 bp, Homo sapien
agccccacagcagggcgaagcaggc

SEQ ID NO: 1282163 - DNA, 25 bp, Homo sapien
cagccccacagcagggcgaagcagg

SEQ ID NO: 1282164 - DNA, 25 bp, Homo sapien
ctcgctctcggtccgatccccccga

SEQ ID NO: 1282165 - DNA, 25 bp, Homo sapien
gctctcggtccgatccccccgagcc

SEQ ID NO: 1282166 - DNA, 25 bp, Homo sapien
cgctctcggtccgatccccccgagc

SEQ ID NO: 1282167 - DNA, 25 bp, Homo sapien
ttctcgctctcggtccgatcccccc

SEQ ID NO: 1282168 - DNA, 25 bp, Homo sapien
gcctcggtgtccgctcccgcccgcc

SEQ ID NO: 1282169 - DNA, 25 bp, Homo sapien
cggcctgcgcgcaacttctgcccct

SEQ ID NO: 1282170 - DNA, 25 bp, Homo sapien
ccggcctgcgcgcaacttctgcccc

SEQ ID NO: 1282171 - DNA, 25 bp, Homo sapien
cgccggcctgcgcgcaacttctgcc

SEQ ID NO: 1282172 - DNA, 25 bp, Homo sapien
aggtacgtgggtcttctctgccgga

SEQ ID NO: 1282173 - DNA, 25 bp, Homo sapien
gacatcttggcctctcgccttggtg

SEQ ID NO: 1282174 - DNA, 25 bp, Homo sapien
cgggacctgctacccaggtacgtgg

SEQ ID NO: 1282175 - DNA, 25 bp, Homo sapien
tcctcgctttgatgcccgggacctg

SEQ ID NO: 1282176 - DNA, 25 bp, Homo sapien
tgtgttcatgtcagtagatatgtct

SEQ ID NO: 1282177 - DNA, 25 bp, Homo sapien
ttcatgtcagtagatatgtctgtgg

SEQ ID NO: 1282178 - DNA, 25 bp, Homo sapien
gggcgtgtgttcatgtcagtagata

SEQ ID NO: 1282179 - DNA, 25 bp, Homo sapien
tcccccagccagcgcagtgtaggtg

SEQ ID NO: 1282180 - DNA, 25 bp, Homo sapien
tgggagcgggtccggaggaagctag

SEQ ID NO: 1282181 - DNA, 25 bp, Homo sapien
gtgggagcgggtccggaggaagcta

SEQ ID NO: 1282182 - DNA, 25 bp, Homo sapien
cgtgggagcgggtccggaggaagct

SEQ ID NO: 1282183 - DNA, 25 bp, Homo sapien
ctgtgtagaagcgagcgcaagaggc

SEQ ID NO: 1282184 - DNA, 25 bp, Homo sapien
tagaagcgagcgcaagaggcgagag

SEQ ID NO: 1282185 - DNA, 25 bp, Homo sapien
gcgagcgcaagaggcgagaggaagc

SEQ ID NO: 1282186 - DNA, 25 bp, Homo sapien
gtgtagaagcgagcgcaagaggcga

SEQ ID NO: 1282187 - DNA, 25 bp, Homo sapien
ctgtgtccttcttttgcggaagaac

SEQ ID NO: 1282188 - DNA, 25 bp, Homo sapien
tttctgagcgtcacaggcctgtctg

SEQ ID NO: 1282189 - DNA, 25 bp, Homo sapien
ttcccactggggcatacagcgcctt

SEQ ID NO: 1282190 - DNA, 25 bp, Homo sapien
cggaagaactaaccacacctcaggt

SEQ ID NO: 1282191 - DNA, 25 bp, Homo sapien
gttctgaataggaagctgagggctc

SEQ ID NO: 1282192 - DNA, 25 bp, Homo sapien
ccagcctttgatactcctgtgggtg

SEQ ID NO: 1282193 - DNA, 25 bp, Homo sapien
ctttgatactcctgtgggtggccga

SEQ ID NO: 1282194 - DNA, 25 bp, Homo sapien
tctgaataggaagctgagggctcat

SEQ ID NO: 1282195 - DNA, 25 bp, Homo sapien
tttccactccgctggtgggatggga

SEQ ID NO: 1282196 - DNA, 25 bp, Homo sapien
caggctctgtccagatacgggagca

SEQ ID NO: 1282197 - DNA, 25 bp, Homo sapien
gagtttccactccgctggtgggatg

SEQ ID NO: 1282198 - DNA, 25 bp, Homo sapien
tctgtccagatacgggagcatcctg

SEQ ID NO: 1282199 - DNA, 25 bp, Homo sapien
tcgatctgctgactcaacgagtgca

SEQ ID NO: 1282200 - DNA, 25 bp, Homo sapien
gactcaacgagtgcatcggcctttt

SEQ ID NO: 1282201 - DNA, 25 bp, Homo sapien
tctgctgactcaacgagtgcatcgg

SEQ ID NO: 1282202 - DNA, 25 bp, Homo sapien
ctgtggagctgccagggtgacagca

SEQ ID NO: 1282203 - DNA, 25 bp, Homo sapien
gacgcagtgtgggtgtcggagggag

SEQ ID NO: 1282204 - DNA, 25 bp, Homo sapien
tagacgcagtgtgggtgtcggaggg

SEQ ID NO: 1282205 - DNA, 25 bp, Homo sapien
ctggaaaacagtagacgcagtgtgg

SEQ ID NO: 1282206 - DNA, 25 bp, Homo sapien
aaacagtagacgcagtgtgggtgtc

SEQ ID NO: 1282207 - DNA, 25 bp, Homo sapien
ggatccaggagtccgagccagctgt

SEQ ID NO: 1282208 - DNA, 25 bp, Homo sapien
ccggatccaggagtccgagccagct

SEQ ID NO: 1282209 - DNA, 25 bp, Homo sapien
gccaccggatccaggagtccgagcc

SEQ ID NO: 1282210 - DNA, 25 bp, Homo sapien
caccggatccaggagtccgagccag

SEQ ID NO: 1282211 - DNA, 25 bp, Homo sapien
agctcagagatgaactctagagaaa

SEQ ID NO: 1282212 - DNA, 25 bp, Homo sapien
tctttaatgtttaagcctatttgta

SEQ ID NO: 1282213 - DNA, 25 bp, Homo sapien
cagttgggagccagccggagactct

SEQ ID NO: 1282214 - DNA, 25 bp, Homo sapien
cagcctagctgatacacaatcgtcc

SEQ ID NO: 1282215 - DNA, 25 bp, Homo sapien
tatttacagacaagacacagcaacc

SEQ ID NO: 1282216 - DNA, 25 bp, Homo sapien
tgccaaggccacagaagcgaagtgc

SEQ ID NO: 1282217 - DNA, 25 bp, Homo sapien
cagtgatcacctgttatggtcccca

SEQ ID NO: 1282218 - DNA, 25 bp, Homo sapien
aggacatagaaaggagagggcccca

SEQ ID NO: 1282219 - DNA, 25 bp, Homo sapien
cccagtttgctggtggcacttgtga

SEQ ID NO: 1282220 - DNA, 25 bp, Homo sapien
ccccagtttgctggtggcacttgtg

SEQ ID NO: 1282221 - DNA, 25 bp, Homo sapien
ggtggcacttgtgactcgcttattc

SEQ ID NO: 1282222 - DNA, 25 bp, Homo sapien
acttgtgactcgcttattctcccgg

SEQ ID NO: 1282223 - DNA, 25 bp, Homo sapien
ctgaggctgctgatctcttccacat

SEQ ID NO: 1282224 - DNA, 25 bp, Homo sapien
aggtttcggaggcgggcgctgaggc

SEQ ID NO: 1282225 - DNA, 25 bp, Homo sapien
ggcgctgaggctgctgatctcttcc

SEQ ID NO: 1282226 - DNA, 25 bp, Homo sapien
gctgatctcttccacataggcctgg

SEQ ID NO: 1282227 - DNA, 25 bp, Homo sapien
ctgccaggcggaccccttccagcca

SEQ ID NO: 1282228 - DNA, 25 bp, Homo sapien
catctgccaggcggaccccttccag

SEQ ID NO: 1282229 - DNA, 25 bp, Homo sapien
gccaggcggaccccttccagccagc

SEQ ID NO: 1282230 - DNA, 25 bp, Homo sapien
atctgccaggcggaccccttccagc

SEQ ID NO: 1282231 - DNA, 25 bp, Homo sapien
catctaacctgattcccacatgctg

SEQ ID NO: 1282232 - DNA, 25 bp, Homo sapien
ggacacataggccaagaacaacagc

SEQ ID NO: 1282233 - DNA, 25 bp, Homo sapien
tgatatcttagtcatctagccacct

SEQ ID NO: 1282234 - DNA, 25 bp, Homo sapien
tggcagatcaacacttgcagaacct

SEQ ID NO: 1282235 - DNA, 25 bp, Homo sapien
ttgtatgtcctaacacactgaacct

SEQ ID NO: 1282236 - DNA, 25 bp, Homo sapien
cagctcatctgggtgcagtgccttg

SEQ ID NO: 1282237 - DNA, 25 bp, Homo sapien
gtcttctccaaggtcagctcatctg

SEQ ID NO: 1282238 - DNA, 25 bp, Homo sapien
tcctcactgacaggatgtcagtctt

SEQ ID NO: 1282239 - DNA, 25 bp, Homo sapien
cacagaaaacagtaacggccctgca

SEQ ID NO: 1282240 - DNA, 25 bp, Homo sapien
aaacacaagtgcaggattaatccag

SEQ ID NO: 1282241 - DNA, 25 bp, Homo sapien
cagtttctgcctctataccaagggc

SEQ ID NO: 1282242 - DNA, 25 bp, Homo sapien
gattcaagctgcatcgctcccgttt

SEQ ID NO: 1282243 - DNA, 25 bp, Homo sapien
ctgagatccatcgctgcttctcact

SEQ ID NO: 1282244 - DNA, 25 bp, Homo sapien
aggctgagatccatcgctgcttctc

SEQ ID NO: 1282245 - DNA, 25 bp, Homo sapien
aaggctgagatccatcgctgcttct

SEQ ID NO: 1282246 - DNA, 25 bp, Homo sapien
ggctgagatccatcgctgcttctca

SEQ ID NO: 1282247 - DNA, 25 bp, Homo sapien
gctggaggaggaacacgtggccggg

SEQ ID NO: 1282248 - DNA, 25 bp, Homo sapien
ctggtgcttcatgtgctgcccgtgg

SEQ ID NO: 1282249 - DNA, 25 bp, Homo sapien
gcttcaggctcaggtcccgcacctg

SEQ ID NO: 1282250 - DNA, 25 bp, Homo sapien
gtccgggcccgcagcaggaactggt

SEQ ID NO: 1282251 - DNA, 25 bp, Homo sapien
gcatggacgaaaacggcaaacttcc

SEQ ID NO: 1282252 - DNA, 25 bp, Homo sapien
tggcatggacgaaaacggcaaactt

SEQ ID NO: 1282253 - DNA, 25 bp, Homo sapien
cttggcatggacgaaaacggcaaac

SEQ ID NO: 1282254 - DNA, 25 bp, Homo sapien
ttggcatggacgaaaacggcaaact

SEQ ID NO: 1282255 - DNA, 25 bp, Homo sapien
cagtggtgccagctctaccaactct

SEQ ID NO: 1282256 - DNA, 25 bp, Homo sapien
ggtagactgccttgctggacagctt

SEQ ID NO: 1282257 - DNA, 25 bp, Homo sapien
cttccgccgagagagcagcaagcag

SEQ ID NO: 1282258 - DNA, 25 bp, Homo sapien
cagcgggcctgagagatcagcggga

SEQ ID NO: 1282259 - DNA, 25 bp, Homo sapien
actgtacactagcattgcactcctg

SEQ ID NO: 1282260 - DNA, 25 bp, Homo sapien
tcttcatggactgtacactagcatt

SEQ ID NO: 1282261 - DNA, 25 bp, Homo sapien
ttgctcaggtggatgagttcctctg

SEQ ID NO: 1282262 - DNA, 25 bp, Homo sapien
tgctcaggtggatgagttcctctgt

SEQ ID NO: 1282263 - DNA, 25 bp, Homo sapien
ggccttggtggccatgtcttcgtct

SEQ ID NO: 1282264 - DNA, 25 bp, Homo sapien
ttggtggccatgtcttcgtcttcag

SEQ ID NO: 1282265 - DNA, 25 bp, Homo sapien
gtggccatgtcttcgtcttcagagc

SEQ ID NO: 1282266 - DNA, 25 bp, Homo sapien
ctccttgagcgcattgaaggccttg

SEQ ID NO: 1282267 - DNA, 25 bp, Homo sapien
cagacgctggcacacaggagactcc

SEQ ID NO: 1282268 - DNA, 25 bp, Homo sapien
ctccaccaacatcttgaggcgggtg

SEQ ID NO: 1282269 - DNA, 25 bp, Homo sapien
ggagactcctccaggcgagccagga

SEQ ID NO: 1282270 - DNA, 25 bp, Homo sapien
tcttgaggcgggtgatcctctggaa

SEQ ID NO: 1282271 - DNA, 25 bp, Homo sapien
gaggactctggaatcacaggtaggc

SEQ ID NO: 1282272 - DNA, 25 bp, Homo sapien
tcaccttatcctggtcacagagacc

SEQ ID NO: 1282273 - DNA, 25 bp, Homo sapien
tcagtgcctacacctgcctgagact

SEQ ID NO: 1282274 - DNA, 25 bp, Homo sapien
gggcttctcagcacatccttactgc

SEQ ID NO: 1282275 - DNA, 25 bp, Homo sapien
tgaagcgcagcacatctgcctccag

SEQ ID NO: 1282276 - DNA, 25 bp, Homo sapien
gtagactctgcggaaggccgggcag

SEQ ID NO: 1282277 - DNA, 25 bp, Homo sapien
tggtaggtgcgctcctggtaggcct

SEQ ID NO: 1282278 - DNA, 25 bp, Homo sapien
gtgacatagggcaggtagactctgc

SEQ ID NO: 1282279 - DNA, 25 bp, Homo sapien
gaggcctcggaggtgatcagctcaa

SEQ ID NO: 1282280 - DNA, 25 bp, Homo sapien
actcgctcagctcggcagagcctaa

SEQ ID NO: 1282281 - DNA, 25 bp, Homo sapien
tgctcttgacctcgggcagtttgga

SEQ ID NO: 1282282 - DNA, 25 bp, Homo sapien
gcagagcctaagaagtggcccacag

SEQ ID NO: 1282283 - DNA, 25 bp, Homo sapien
ctctagccccactcctaatctggcg

SEQ ID NO: 1282284 - DNA, 25 bp, Homo sapien
cactcctaatctggcgccgggcggg

SEQ ID NO: 1282285 - DNA, 25 bp, Homo sapien
aagggcaggaccagttcacctcgga

SEQ ID NO: 1282286 - DNA, 25 bp, Homo sapien
ccgccgcgggaaattgtgcaagcct

SEQ ID NO: 1282287 - DNA, 25 bp, Homo sapien
gccgctgccgcgtacgtcggggata

SEQ ID NO: 1282288 - DNA, 25 bp, Homo sapien
tcccgcaggctcagcgtggccagga

SEQ ID NO: 1282289 - DNA, 25 bp, Homo sapien
aggacgccgctgccgcgtacgtcgg

SEQ ID NO: 1282290 - DNA, 25 bp, Homo sapien
cgctgccgcgtacgtcggggatatc

SEQ ID NO: 1282291 - DNA, 25 bp, Homo sapien
ctgccacagcgagaaggtggagcct

SEQ ID NO: 1282292 - DNA, 25 bp, Homo sapien
agaaggtggagcctcgcgccgagcg

SEQ ID NO: 1282293 - DNA, 25 bp, Homo sapien
cacgtcgctgtattcctgatagagg

SEQ ID NO: 1282294 - DNA, 25 bp, Homo sapien
gggcgctggccacgtcgctgtattc

SEQ ID NO: 1282295 - DNA, 25 bp, Homo sapien
tcgctgtattcctgatagaggacgg

SEQ ID NO: 1282296 - DNA, 25 bp, Homo sapien
tggccacgtcgctgtattcctgata

SEQ ID NO: 1282297 - DNA, 25 bp, Homo sapien
gcgccgctcgttggtgctcctggac

SEQ ID NO: 1282298 - DNA, 25 bp, Homo sapien
ccccaaaggcggctcttcctgtgtg

SEQ ID NO: 1282299 - DNA, 25 bp, Homo sapien
ttaaggaggaatcgagactggcgcc

SEQ ID NO: 1282300 - DNA, 25 bp, Homo sapien
cccaaaggcggctcttcctgtgtgt

SEQ ID NO: 1282301 - DNA, 25 bp, Homo sapien
acttcgagcctccattccagatgct

SEQ ID NO: 1282302 - DNA, 25 bp, Homo sapien
atcgccctctcgtgagtcaccaggg

SEQ ID NO: 1282303 - DNA, 25 bp, Homo sapien
tgggctcggaccaatcgccctctcg

SEQ ID NO: 1282304 - DNA, 25 bp, Homo sapien
gctcatctctacacttcgagcctcc

SEQ ID NO: 1282305 - DNA, 25 bp, Homo sapien
cttcccgggctgctccggtgcctga

SEQ ID NO: 1282306 - DNA, 25 bp, Homo sapien
ttcccgggctgctccggtgcctgac

SEQ ID NO: 1282307 - DNA, 25 bp, Homo sapien
agagaagagtgcagccgggtcatca

SEQ ID NO: 1282308 - DNA, 25 bp, Homo sapien
ccttcgaggctcactcgggtggacc

SEQ ID NO: 1282309 - DNA, 25 bp, Homo sapien
tcatcagctccgatgccgagaagcg

SEQ ID NO: 1282310 - DNA, 25 bp, Homo sapien
tggccaggctctaggaagacagcgt

SEQ ID NO: 1282311 - DNA, 25 bp, Homo sapien
cttcttctccgagccgtggctggcc

SEQ ID NO: 1282312 - DNA, 25 bp, Homo sapien
aggcagacttcttctccgagccgtg

SEQ ID NO: 1282313 - DNA, 25 bp, Homo sapien
cagacttcttctccgagccgtggct

SEQ ID NO: 1282314 - DNA, 25 bp, Homo sapien
ttctccgagccgtggctggcccggc

SEQ ID NO: 1282315 - DNA, 25 bp, Homo sapien
ccccccgctggtgatctctgtatct

SEQ ID NO: 1282316 - DNA, 25 bp, Homo sapien
cccgctggtgatctctgtatctgag

SEQ ID NO: 1282317 - DNA, 25 bp, Homo sapien
cccccgctggtgatctctgtatctg

SEQ ID NO: 1282318 - DNA, 25 bp, Homo sapien
ccccgctggtgatctctgtatctga

SEQ ID NO: 1282319 - DNA, 25 bp, Homo sapien
gctctgcaaaggacagactctcctg

SEQ ID NO: 1282320 - DNA, 25 bp, Homo sapien
catagcaacccttggagaggggcag

SEQ ID NO: 1282321 - DNA, 25 bp, Homo sapien
gccaggagcccgaagctcctctggg

SEQ ID NO: 1282322 - DNA, 25 bp, Homo sapien
agacacactgggctcgggggcttca

SEQ ID NO: 1282323 - DNA, 25 bp, Homo sapien
gcagtgccaggtggcccagtcaggt

SEQ ID NO: 1282324 - DNA, 25 bp, Homo sapien
ccaggtggcccagtcaggtggggct

SEQ ID NO: 1282325 - DNA, 25 bp, Homo sapien
agggtagcaggtggcccacagtcca

SEQ ID NO: 1282326 - DNA, 25 bp, Homo sapien
gctggagggtagcaggtggcccaca

SEQ ID NO: 1282327 - DNA, 25 bp, Homo sapien
cttttgctctgccacccacctggcc

SEQ ID NO: 1282328 - DNA, 25 bp, Homo sapien
tcctcttttgctctgccacccacct

SEQ ID NO: 1282329 - DNA, 25 bp, Homo sapien
ctcttttgctctgccacccacctgg

SEQ ID NO: 1282330 - DNA, 25 bp, Homo sapien
cctcttttgctctgccacccacctg

SEQ ID NO: 1282331 - DNA, 25 bp, Homo sapien
ccaggcccgctgctgatgctgtttg

SEQ ID NO: 1282332 - DNA, 25 bp, Homo sapien
atgctgtttggctgttccggcaggg

SEQ ID NO: 1282333 - DNA, 25 bp, Homo sapien
cagacaaagagtttgattcatcaaa

SEQ ID NO: 1282334 - DNA, 25 bp, Homo sapien
ggcccaggcccgctgctgatgctgt

SEQ ID NO: 1282335 - DNA, 25 bp, Homo sapien
cggtccagggctccgggacaccctg

SEQ ID NO: 1282336 - DNA, 25 bp, Homo sapien
gtccagctgccagcacggtccaggg

SEQ ID NO: 1282337 - DNA, 25 bp, Homo sapien
ctcagccagggagctccgtccagct

SEQ ID NO: 1282338 - DNA, 25 bp, Homo sapien
gctccgtccagctgccagcacggtc

SEQ ID NO: 1282339 - DNA, 25 bp, Homo sapien
gtcagcatgtcagcatggccccaga

SEQ ID NO: 1282340 - DNA, 25 bp, Homo sapien
cagcatgtcagcatggccccagagc

SEQ ID NO: 1282341 - DNA, 25 bp, Homo sapien
ctcagggggcgatgtcagcatgtca

SEQ ID NO: 1282342 - DNA, 25 bp, Homo sapien
ggcgatgtcagcatgtcagcatggc

SEQ ID NO: 1282343 - DNA, 25 bp, Homo sapien
tctcatccaactcccggaccggcct

SEQ ID NO: 1282344 - DNA, 25 bp, Homo sapien
aggccaggaggcaagaacacggaag

SEQ ID NO: 1282345 - DNA, 25 bp, Homo sapien
ggcaagaacacggaagggtagcagt

SEQ ID NO: 1282346 - DNA, 25 bp, Homo sapien
agggaactccaatcctctcatccaa

SEQ ID NO: 1282347 - DNA, 25 bp, Homo sapien
accccaataggaggagcatcctggg

SEQ ID NO: 1282348 - DNA, 25 bp, Homo sapien
cctgcgtcccttgtgcggacataga

SEQ ID NO: 1282349 - DNA, 25 bp, Homo sapien
cagaggaccccaataggaggagcat

SEQ ID NO: 1282350 - DNA, 25 bp, Homo sapien
catagagcacagcttggtcaggctg

SEQ ID NO: 1282351 - DNA, 25 bp, Homo sapien
agcgtctcccggttgtctgccaccg

SEQ ID NO: 1282352 - DNA, 25 bp, Homo sapien
gccaggtagcgctcgcgcagttatc

SEQ ID NO: 1282353 - DNA, 25 bp, Homo sapien
gctcgcgcagttatcttggtagcca

SEQ ID NO: 1282354 - DNA, 25 bp, Homo sapien
cacatcgggcacgagccggtcgttg

SEQ ID NO: 1282355 - DNA, 25 bp, Homo sapien
ccccacgtcgcgagaggccttgtat

SEQ ID NO: 1282356 - DNA, 25 bp, Homo sapien
ctcgaaggcgataatgaaacccaga

SEQ ID NO: 1282357 - DNA, 25 bp, Homo sapien
gataatgaaacccagatgcacatgc

SEQ ID NO: 1282358 - DNA, 25 bp, Homo sapien
gaggttcacccccacgtcgcgagag

SEQ ID NO: 1282359 - DNA, 25 bp, Homo sapien
gagaggctctcggatctcgactccg

SEQ ID NO: 1282360 - DNA, 25 bp, Homo sapien
ctcgactccgaaccccgcatttcct

SEQ ID NO: 1282361 - DNA, 25 bp, Homo sapien
gttcagccagtaccctagccggctc

SEQ ID NO: 1282362 - DNA, 25 bp, Homo sapien
tccgcgcatttgtccggggcagaat

SEQ ID NO: 1282363 - DNA, 25 bp, Homo sapien
agcaggagcagtcagatccagatgt

SEQ ID NO: 1282364 - DNA, 25 bp, Homo sapien
cagcaggagcagtcagatccagatg

SEQ ID NO: 1282365 - DNA, 25 bp, Homo sapien
ttgcacaggaacttgtgggcgtcca

SEQ ID NO: 1282366 - DNA, 25 bp, Homo sapien
cagtccaatctctacccggttgttg

SEQ ID NO: 1282367 - DNA, 25 bp, Homo sapien
gaacttgtgggcgtccagtccaatc

SEQ ID NO: 1282368 - DNA, 25 bp, Homo sapien
tacccggttgttgagcagagtgaac

SEQ ID NO: 1282369 - DNA, 25 bp, Homo sapien
gcaggcagggagtgtcaggcccggg

SEQ ID NO: 1282370 - DNA, 25 bp, Homo sapien
ggcagggagtgtcaggcccggggcc

SEQ ID NO: 1282371 - DNA, 25 bp, Homo sapien
cagggagtgtcaggcccggggccac

SEQ ID NO: 1282372 - DNA, 25 bp, Homo sapien
ctggcaggcagggagtgtcaggccc

SEQ ID NO: 1282373 - DNA, 25 bp, Homo sapien
cagagcaccttactcagggctttgg

SEQ ID NO: 1282374 - DNA, 25 bp, Homo sapien
gctgggtgacctgaatgtggcagcc

SEQ ID NO: 1282375 - DNA, 25 bp, Homo sapien
ccatgtggttgagcagctgtttgcc

SEQ ID NO: 1282376 - DNA, 25 bp, Homo sapien
caccaggaccgcactgttgttggca

SEQ ID NO: 1282377 - DNA, 25 bp, Homo sapien
tttgaagaatgccatgtagaaggga

SEQ ID NO: 1282378 - DNA, 25 bp, Homo sapien
agaatgccatgtagaagggagaaga

SEQ ID NO: 1282379 - DNA, 25 bp, Homo sapien
gcctttgaagaatgccatgtagaag

SEQ ID NO: 1282380 - DNA, 25 bp, Homo sapien
gaagaatgccatgtagaagggagaa

SEQ ID NO: 1282381 - DNA, 25 bp, Homo sapien
ggacattcgcttgggtcatgagcac

SEQ ID NO: 1282382 - DNA, 25 bp, Homo sapien
tcatgagcacagagttgccagtgtg

SEQ ID NO: 1282383 - DNA, 25 bp, Homo sapien
tgatgatgccatggtaaattatgac

SEQ ID NO: 1282384 - DNA, 25 bp, Homo sapien
gccagtgtggaacattgcaatgctg

SEQ ID NO: 1282385 - DNA, 25 bp, Homo sapien
gctccttcaagcctgtcactgggtt

SEQ ID NO: 1282386 - DNA, 25 bp, Homo sapien
agctgtgcggttggaagtagggctc

SEQ ID NO: 1282387 - DNA, 25 bp, Homo sapien
cagctgtgcggttggaagtagggct

SEQ ID NO: 1282388 - DNA, 25 bp, Homo sapien
tgacaaggagtaggccacataagat

SEQ ID NO: 1282389 - DNA, 25 bp, Homo sapien
tcagggaagacctctctaggaagga

SEQ ID NO: 1282390 - DNA, 25 bp, Homo sapien
gcacctctctggattagtgatcagg

SEQ ID NO: 1282391 - DNA, 25 bp, Homo sapien
gagctcacacgccagtgggagaaga

SEQ ID NO: 1282392 - DNA, 25 bp, Homo sapien
ccaaggcccggcttattatataaat

SEQ ID NO: 1282393 - DNA, 25 bp, Homo sapien
agtgtttcacctcgccaagcctgta

SEQ ID NO: 1282394 - DNA, 25 bp, Homo sapien
caagcctgtatcatcctgatgtcag

SEQ ID NO: 1282395 - DNA, 25 bp, Homo sapien
tctgttcttgggagggtctctttcc

SEQ ID NO: 1282396 - DNA, 25 bp, Homo sapien
tgctgaagaacacggttcctgggtg

SEQ ID NO: 1282397 - DNA, 25 bp, Homo sapien
agggctgaactgggcatcacctcct

SEQ ID NO: 1282398 - DNA, 25 bp, Homo sapien
agatgctgaagaacacggttcctgg

SEQ ID NO: 1282399 - DNA, 25 bp, Homo sapien
gaagaacacggttcctgggtggtca

SEQ ID NO: 1282400 - DNA, 25 bp, Homo sapien
ttccacgtggcacaggtatcacaga

SEQ ID NO: 1282401 - DNA, 25 bp, Homo sapien
gatcccagaaatattccacgtggca

SEQ ID NO: 1282402 - DNA, 25 bp, Homo sapien
cagaaatattccacgtggcacaggt

SEQ ID NO: 1282403 - DNA, 25 bp, Homo sapien
gtatcacagagtggcacccccactg

SEQ ID NO: 1282404 - DNA, 25 bp, Homo sapien
tgtgttggtccccacggtgacaagg

SEQ ID NO: 1282405 - DNA, 25 bp, Homo sapien
tggtccccacggtgacaaggctaga

SEQ ID NO: 1282406 - DNA, 25 bp, Homo sapien
tagagataaagagcagggtgcccac

SEQ ID NO: 1282407 - DNA, 25 bp, Homo sapien
agccacccacactagtgtgttggtc

SEQ ID NO: 1282408 - DNA, 25 bp, Homo sapien
tgtccaaaggctggtccaggggctg

SEQ ID NO: 1282409 - DNA, 25 bp, Homo sapien
tttgtccaaaggctggtccaggggc

SEQ ID NO: 1282410 - DNA, 25 bp, Homo sapien
tccaaaggctggtccaggggctggt

SEQ ID NO: 1282411 - DNA, 25 bp, Homo sapien
caaaggctggtccaggggctggtac

SEQ ID NO: 1282412 - DNA, 25 bp, Homo sapien
ttgagatctgaaccgggtacctggt

SEQ ID NO: 1282413 - DNA, 25 bp, Homo sapien
gcaattggcaagagttgagatctga

SEQ ID NO: 1282414 - DNA, 25 bp, Homo sapien
tggtacccaggcagttcaaagaggc

SEQ ID NO: 1282415 - DNA, 25 bp, Homo sapien
agcaagcccagtatgggtacagcaa

SEQ ID NO: 1282416 - DNA, 25 bp, Homo sapien
gaagtaggagccatgggaatctctg

SEQ ID NO: 1282417 - DNA, 25 bp, Homo sapien
agccatgggaatctctgcccaggaa

SEQ ID NO: 1282418 - DNA, 25 bp, Homo sapien
agtaggagccatgggaatctctgcc

SEQ ID NO: 1282419 - DNA, 25 bp, Homo sapien
caagcagccatctcaccactcagtg

SEQ ID NO: 1282420 - DNA, 25 bp, Homo sapien
aggcgcaggcgtcgccgtggctccg

SEQ ID NO: 1282421 - DNA, 25 bp, Homo sapien
agccctcagagtcggggttgggccg

SEQ ID NO: 1282422 - DNA, 25 bp, Homo sapien
tgctgcagagggttgcgcaggcgca

SEQ ID NO: 1282423 - DNA, 25 bp, Homo sapien
cgagccctcagagtcggggttgggc

SEQ ID NO: 1282424 - DNA, 25 bp, Homo sapien
tcctcccaggcgagcacgaagtcta

SEQ ID NO: 1282425 - DNA, 25 bp, Homo sapien
agcacgaagtctaacccatcgcggg

SEQ ID NO: 1282426 - DNA, 25 bp, Homo sapien
gctgaaaattctcgcgccagcgccg

SEQ ID NO: 1282427 - DNA, 25 bp, Homo sapien
ggacagttaggagcggtctgacccc

SEQ ID NO: 1282428 - DNA, 25 bp, Homo sapien
gagtccggcacataaatgccgccgc

SEQ ID NO: 1282429 - DNA, 25 bp, Homo sapien
cagggcgcgagacacagtcgtcgtc

SEQ ID NO: 1282430 - DNA, 25 bp, Homo sapien
gaaaatgtacccctagagtccggca

SEQ ID NO: 1282431 - DNA, 25 bp, Homo sapien
gcaggttttcccgtctcagaaaatg

SEQ ID NO: 1282432 - DNA, 25 bp, Homo sapien
ggtgcccggcacacgctaaacattt

SEQ ID NO: 1282433 - DNA, 25 bp, Homo sapien
tacagatgtgtcagctaagcataag

SEQ ID NO: 1282434 - DNA, 25 bp, Homo sapien
caaagaagtgggtgctgctatctcc

SEQ ID NO: 1282435 - DNA, 25 bp, Homo sapien
ttgtagaatatagctgaacaccagc

SEQ ID NO: 1282436 - DNA, 25 bp, Homo sapien
cattggaggggatcgtataaaggtc

SEQ ID NO: 1282437 - DNA, 25 bp, Homo sapien
tgctttgagccagacgcacgccagg

SEQ ID NO: 1282438 - DNA, 25 bp, Homo sapien
agacacaaggctgggcctactcact

SEQ ID NO: 1282439 - DNA, 25 bp, Homo sapien
tccttagcctacttccaccagtctc

SEQ ID NO: 1282440 - DNA, 25 bp, Homo sapien
ggtgtcacctcaaccaatacaggtt

SEQ ID NO: 1282441 - DNA, 25 bp, Homo sapien
tccagccctatgtcgagacctgagg

SEQ ID NO: 1282442 - DNA, 25 bp, Homo sapien
aaaggccacgggagatgttcgagct

SEQ ID NO: 1282443 - DNA, 25 bp, Homo sapien
ttctgcaaggaaagcgctgctcgcg

SEQ ID NO: 1282444 - DNA, 25 bp, Homo sapien
ttcaggagcactctctggggggttg

SEQ ID NO: 1282445 - DNA, 25 bp, Homo sapien
ggcacactcttcacccgtagcaggg

SEQ ID NO: 1282446 - DNA, 25 bp, Homo sapien
atgtgggcaacgtcggccagcccag

SEQ ID NO: 1282447 - DNA, 25 bp, Homo sapien
gctcgggcacgtccgtgtgcatgta

SEQ ID NO: 1282448 - DNA, 25 bp, Homo sapien
aaggccattgagtatgtgggcaacg

SEQ ID NO: 1282449 - DNA, 25 bp, Homo sapien
cctttaagtaaaagcccaggtgctg

SEQ ID NO: 1282450 - DNA, 25 bp, Homo sapien
taagtaaaagcccaggtgctgaatt

SEQ ID NO: 1282451 - DNA, 25 bp, Homo sapien
agctggggtagccatgctgtaccct

SEQ ID NO: 1282452 - DNA, 25 bp, Homo sapien
catgctgtaccctttaagtaaaagc

SEQ ID NO: 1282453 - DNA, 25 bp, Homo sapien
aaaggaggcacggtcagtgaaggag

SEQ ID NO: 1282454 - DNA, 25 bp, Homo sapien
gggcctcacctgctatgcgggccag

SEQ ID NO: 1282455 - DNA, 25 bp, Homo sapien
gatgaccatcctgacgacaccaggg

SEQ ID NO: 1282456 - DNA, 25 bp, Homo sapien
ttggagccgatgaccatcctgacga

SEQ ID NO: 1282457 - DNA, 25 bp, Homo sapien
gaactttttgagtgcagactctcca

SEQ ID NO: 1282458 - DNA, 25 bp, Homo sapien
cagcagcatatgatcgaactttttg

SEQ ID NO: 1282459 - DNA, 25 bp, Homo sapien
tggccaaaataccacggtggtctgg

SEQ ID NO: 1282460 - DNA, 25 bp, Homo sapien
aaacatgacgacacggctgctggcc

SEQ ID NO: 1282461 - DNA, 25 bp, Homo sapien
gtctcgtggtgcaccacaggcacct

SEQ ID NO: 1282462 - DNA, 25 bp, Homo sapien
cactcttcccggacacaaagatctt

SEQ ID NO: 1282463 - DNA, 25 bp, Homo sapien
gtggtctcgtggtgcaccacaggca

SEQ ID NO: 1282464 - DNA, 25 bp, Homo sapien
cacaaagatcttgtagctggcagtg

SEQ ID NO: 1282465 - DNA, 25 bp, Homo sapien
aaccgggcacgggaggtctggccat

SEQ ID NO: 1282466 - DNA, 25 bp, Homo sapien
ttgccctcggcactctcgtgccagt

SEQ ID NO: 1282467 - DNA, 25 bp, Homo sapien
tcggcactctcgtgccagtttggga

SEQ ID NO: 1282468 - DNA, 25 bp, Homo sapien
acccgccggcggttcttgcgcagaa

SEQ ID NO: 1282469 - DNA, 25 bp, Homo sapien
cgacggggtagggaggtgacagaat

SEQ ID NO: 1282470 - DNA, 25 bp, Homo sapien
gcaccgcgacggggtagggaggtga

SEQ ID NO: 1282471 - DNA, 25 bp, Homo sapien
ctgggcaccgcgacggggtagggag

SEQ ID NO: 1282472 - DNA, 25 bp, Homo sapien
ccgcgacggggtagggaggtgacag

SEQ ID NO: 1282473 - DNA, 25 bp, Homo sapien
ttctagatcccgactcccagggcta

SEQ ID NO: 1282474 - DNA, 25 bp, Homo sapien
tctctccttcgcaatgctccctggg

SEQ ID NO: 1282475 - DNA, 25 bp, Homo sapien
agtgacagtaccaagccgggcctgt

SEQ ID NO: 1282476 - DNA, 25 bp, Homo sapien
actgcccatggagggtattcacaca

SEQ ID NO: 1282477 - DNA, 25 bp, Homo sapien
tggcagctccggcgcaggtgcgcgc

SEQ ID NO: 1282478 - DNA, 25 bp, Homo sapien
gctggcagctccggcgcaggtgcgc

SEQ ID NO: 1282479 - DNA, 25 bp, Homo sapien
gtccgccttctgcgcgtgctggcag

SEQ ID NO: 1282480 - DNA, 25 bp, Homo sapien
ggcagctccggcgcaggtgcgcgcg

SEQ ID NO: 1282481 - DNA, 25 bp, Homo sapien
gtggatcctcttctctatgactccg

SEQ ID NO: 1282482 - DNA, 25 bp, Homo sapien
atggagacgccggaggttgggttgg

SEQ ID NO: 1282483 - DNA, 25 bp, Homo sapien
gttcgtccctcctacaacgtccgca

SEQ ID NO: 1282484 - DNA, 25 bp, Homo sapien
cgcggtggctctggactaggccttt

SEQ ID NO: 1282485 - DNA, 25 bp, Homo sapien
acaggcgcaggaaccatcaggcgag

SEQ ID NO: 1282486 - DNA, 25 bp, Homo sapien
cgcaggaaccatcaggcgagcagga

SEQ ID NO: 1282487 - DNA, 25 bp, Homo sapien
aggcgcaggaaccatcaggcgagca

SEQ ID NO: 1282488 - DNA, 25 bp, Homo sapien
gcacaggcgcaggaaccatcaggcg

SEQ ID NO: 1282489 - DNA, 25 bp, Homo sapien
cacaaggcagggacacagtcaccaa

SEQ ID NO: 1282490 - DNA, 25 bp, Homo sapien
cacaagaccttgagaggactccaca

SEQ ID NO: 1282491 - DNA, 25 bp, Homo sapien
acctcttggacaaggtccccacaag

SEQ ID NO: 1282492 - DNA, 25 bp, Homo sapien
tagagccctgtgattaatccactca

SEQ ID NO: 1282493 - DNA, 25 bp, Homo sapien
tgaagctggacattactgacggcgg

SEQ ID NO: 1282494 - DNA, 25 bp, Homo sapien
tagacagatgagaggtccggatgct

SEQ ID NO: 1282495 - DNA, 25 bp, Homo sapien
caagcctgaagcaatgggtgtagac

SEQ ID NO: 1282496 - DNA, 25 bp, Homo sapien
aatgtaaagcgcaggtgagcggcct

SEQ ID NO: 1282497 - DNA, 25 bp, Homo sapien
aatggagccaacacctaaagtttgc

SEQ ID NO: 1282498 - DNA, 25 bp, Homo sapien
caaaatgactatctcagggtaagcc

SEQ ID NO: 1282499 - DNA, 25 bp, Homo sapien
ttgtatgggaaacatcactcacagc

SEQ ID NO: 1282500 - DNA, 25 bp, Homo sapien
caatgaacacggtgagagggagcca

SEQ ID NO: 1282501 - DNA, 25 bp, Homo sapien
taaggaccccacatgatcgaacagt

SEQ ID NO: 1282502 - DNA, 25 bp, Homo sapien
gagagtaagcccagtatgccctaaa

SEQ ID NO: 1282503 - DNA, 25 bp, Homo sapien
tgggagctctcaaaaggcacacttg

SEQ ID NO: 1282504 - DNA, 25 bp, Homo sapien
tcaaatcaatccacagacagctggg

SEQ ID NO: 1282505 - DNA, 25 bp, Homo sapien
tttcttaatggagatttgatcccag

SEQ ID NO: 1282506 - DNA, 25 bp, Homo sapien
ttttcttaatggagatttgatccca

SEQ ID NO: 1282507 - DNA, 25 bp, Homo sapien
ccagcctggagtgacttcggttggg

SEQ ID NO: 1282508 - DNA, 25 bp, Homo sapien
ctggagtgacttcggttgggaatta

SEQ ID NO: 1282509 - DNA, 25 bp, Homo sapien
gagcggtactctcgggtttcaggaa

SEQ ID NO: 1282510 - DNA, 25 bp, Homo sapien
gcggccgttaacacaaggagcttca

SEQ ID NO: 1282511 - DNA, 25 bp, Homo sapien
catgggattactactggaagcgggt

SEQ ID NO: 1282512 - DNA, 25 bp, Homo sapien
tcttactggagactgagagcggtac

SEQ ID NO: 1282513 - DNA, 25 bp, Homo sapien
gcaacaaccaagcatccttgaatag

SEQ ID NO: 1282514 - DNA, 25 bp, Homo sapien
ccctccgaggattaagatagttgca

SEQ ID NO: 1282515 - DNA, 25 bp, Homo sapien
gccacaccctccgaggattaagata

SEQ ID NO: 1282516 - DNA, 25 bp, Homo sapien
attgggaccgccacaccctccgagg

SEQ ID NO: 1282517 - DNA, 25 bp, Homo sapien
ccgaggattaagatagttgcatcat

SEQ ID NO: 1282518 - DNA, 25 bp, Homo sapien
ctgaggaggggaagacattgaaaat

SEQ ID NO: 1282519 - DNA, 25 bp, Homo sapien
tgaggaggggaagacattgaaaata

SEQ ID NO: 1282520 - DNA, 25 bp, Homo sapien
tagcctacctagctcccaaatggga

SEQ ID NO: 1282521 - DNA, 25 bp, Homo sapien
cctctccattctcctaaaaacatat

SEQ ID NO: 1282522 - DNA, 25 bp, Homo sapien
aattactgataattcacctgaaagg

SEQ ID NO: 1282523 - DNA, 25 bp, Homo sapien
ggaatattctagttaccataacctc

SEQ ID NO: 1282524 - DNA, 25 bp, Homo sapien
cactgctcaaggtcaaggacccaga

SEQ ID NO: 1282525 - DNA, 25 bp, Homo sapien
ggccagagatgttcggcttggacca

SEQ ID NO: 1282526 - DNA, 25 bp, Homo sapien
tgagattggccacctcgaggatgag

SEQ ID NO: 1282527 - DNA, 25 bp, Homo sapien
ggtcaaggacccagacatcattgct

SEQ ID NO: 1282528 - DNA, 25 bp, Homo sapien
gaagggacctttataaagatgcgca

SEQ ID NO: 1282529 - DNA, 25 bp, Homo sapien
gatgcgcagcaaagtgttatgctcc

SEQ ID NO: 1282530 - DNA, 25 bp, Homo sapien
cattgtccaggagttaaaagcttta

SEQ ID NO: 1282531 - DNA, 25 bp, Homo sapien
tgcggccagacactagtgcctaatg

SEQ ID NO: 1282532 - DNA, 25 bp, Homo sapien
aggcaaggtggaggttccatcagaa

SEQ ID NO: 1282533 - DNA, 25 bp, Homo sapien
tacatgtggctcaaccaacctatca

SEQ ID NO: 1282534 - DNA, 25 bp, Homo sapien
caacctatcacatttggagggccca

SEQ ID NO: 1282535 - DNA, 25 bp, Homo sapien
tctgttctcgaaagttggccttctg

SEQ ID NO: 1282536 - DNA, 25 bp, Homo sapien
catgggttgtcacaatgcagttcca

SEQ ID NO: 1282537 - DNA, 25 bp, Homo sapien
atttgccgggatcctaaagagccac

SEQ ID NO: 1282538 - DNA, 25 bp, Homo sapien
ggcccatgggttgtcacaatgcagt

SEQ ID NO: 1282539 - DNA, 25 bp, Homo sapien
ttgccgggatcctaaagagccacca

SEQ ID NO: 1282540 - DNA, 25 bp, Homo sapien
tgtgtatttcatcaaagaatctctc

SEQ ID NO: 1282541 - DNA, 25 bp, Homo sapien
gggataagggcttggccgcgtccag

SEQ ID NO: 1282542 - DNA, 25 bp, Homo sapien
ttgtacacgaccagagttgctccag

SEQ ID NO: 1282543 - DNA, 25 bp, Homo sapien
caaacagcactagcaagtccttgta

SEQ ID NO: 1282544 - DNA, 25 bp, Homo sapien
gggaacaatacgatttactgagaag

SEQ ID NO: 1282545 - DNA, 25 bp, Homo sapien
caatacgatttactgagaaggcatc

SEQ ID NO: 1282546 - DNA, 25 bp, Homo sapien
tactgagaaggcatcagtcctgaag

SEQ ID NO: 1282547 - DNA, 25 bp, Homo sapien
catcagtcctgaagagtacagggtg

SEQ ID NO: 1282548 - DNA, 25 bp, Homo sapien
cagctgtttcccaaggttcctatga

SEQ ID NO: 1282549 - DNA, 25 bp, Homo sapien
ctaaaactgctaataggttcagctg

SEQ ID NO: 1282550 - DNA, 25 bp, Homo sapien
gatagacaccctatacaacagaact

SEQ ID NO: 1282551 - DNA, 25 bp, Homo sapien
cagctgtggcaaactgaataatcag

SEQ ID NO: 1282552 - DNA, 25 bp, Homo sapien
acatgatatcatacccgcctaattt

SEQ ID NO: 1282553 - DNA, 25 bp, Homo sapien
ggcactatctcagttcaagccattc

SEQ ID NO: 1282554 - DNA, 25 bp, Homo sapien
ttaagagagtatcactctgttcccc

SEQ ID NO: 1282555 - DNA, 25 bp, Homo sapien
acaggcacatgatatcatacccgcc

SEQ ID NO: 1282556 - DNA, 25 bp, Homo sapien
ttaaaaattccatatccaggctggg

SEQ ID NO: 1282557 - DNA, 25 bp, Homo sapien
taaaaattccatatccaggctgggc

SEQ ID NO: 1282558 - DNA, 25 bp, Homo sapien
ctccctgcccccactactaatatat

SEQ ID NO: 1282559 - DNA, 25 bp, Homo sapien
tgcccccactactaatatattattt

SEQ ID NO: 1282560 - DNA, 25 bp, Homo sapien
agcttttccactagacacatgacag

SEQ ID NO: 1282561 - DNA, 25 bp, Homo sapien
taagcttcattaacgggactgacag

SEQ ID NO: 1282562 - DNA, 25 bp, Homo sapien
gctgctttagttatacctggtacca

SEQ ID NO: 1282563 - DNA, 25 bp, Homo sapien
ggtaccaggtatcagtcccagactc

SEQ ID NO: 1282564 - DNA, 25 bp, Homo sapien
ttcccaaaagccataactccagtct

SEQ ID NO: 1282565 - DNA, 25 bp, Homo sapien
ggcattatatctccacggtcttctt

SEQ ID NO: 1282566 - DNA, 25 bp, Homo sapien
caccagccaacaatatgtactcttg

SEQ ID NO: 1282567 - DNA, 25 bp, Homo sapien
cagtctaaccataagataaacatcc

SEQ ID NO: 1282568 - DNA, 25 bp, Homo sapien
taattgtcacagtgtgctatactaa

SEQ ID NO: 1282569 - DNA, 25 bp, Homo sapien
gctatactaatacaagatgctaaca

SEQ ID NO: 1282570 - DNA, 25 bp, Homo sapien
aatgtaatgtatcaaggatgggatc

SEQ ID NO: 1282571 - DNA, 25 bp, Homo sapien
agttaactcttagaaactgtcacag

SEQ ID NO: 1282572 - DNA, 25 bp, Homo sapien
ggatgtagtgcagtgacagaacatg

SEQ ID NO: 1282573 - DNA, 25 bp, Homo sapien
tgttgcttcctaatgatagctgagg

SEQ ID NO: 1282574 - DNA, 25 bp, Homo sapien
cctggccaaaggtagctatttctac

SEQ ID NO: 1282575 - DNA, 25 bp, Homo sapien
caagtgatccaccaagtgaagtcac

SEQ ID NO: 1282576 - DNA, 25 bp, Homo sapien
tgagagcacagagtggctatgttgc

SEQ ID NO: 1282577 - DNA, 25 bp, Homo sapien
tgcctggcctttataccatcctctg

SEQ ID NO: 1282578 - DNA, 25 bp, Homo sapien
taaatccatctggattagtctattc

SEQ ID NO: 1282579 - DNA, 25 bp, Homo sapien
tgccagacaattatataaccatcaa

SEQ ID NO: 1282580 - DNA, 25 bp, Homo sapien
tcagtcccttggtaatctcatgcag

SEQ ID NO: 1282581 - DNA, 25 bp, Homo sapien
tatatcaagcacactcccaactctg

SEQ ID NO: 1282582 - DNA, 25 bp, Homo sapien
tcaagtccttgttctaatgtcgcct

SEQ ID NO: 1282583 - DNA, 25 bp, Homo sapien
tggctcacttcttgtacccatcaag

SEQ ID NO: 1282584 - DNA, 25 bp, Homo sapien
tctcagatacccacatggctcactt

SEQ ID NO: 1282585 - DNA, 25 bp, Homo sapien
ttttttatgaatggcacaaacggcc

SEQ ID NO: 1282586 - DNA, 25 bp, Homo sapien
aaagtacaaaattctcagggccctg

SEQ ID NO: 1282587 - DNA, 25 bp, Homo sapien
gatattcagagaccttagccctagg

SEQ ID NO: 1282588 - DNA, 25 bp, Homo sapien
tcaggtagagtttccatgccaaggg

SEQ ID NO: 1282589 - DNA, 25 bp, Homo sapien
taggtcaagtctccagaggtcattg

SEQ ID NO: 1282590 - DNA, 25 bp, Homo sapien
tgaagccaaaggtcggatccactct

SEQ ID NO: 1282591 - DNA, 25 bp, Homo sapien
gaggtcattgaaagcagcattgcag

SEQ ID NO: 1282592 - DNA, 25 bp, Homo sapien
agctgctctgggtacagcctccaaa

SEQ ID NO: 1282593 - DNA, 25 bp, Homo sapien
ccttcatgaaaccatgataacactg

SEQ ID NO: 1282594 - DNA, 25 bp, Homo sapien
gttccaggataaggataggtacggc

SEQ ID NO: 1282595 - DNA, 25 bp, Homo sapien
ccatgataacactgatgggctacac

SEQ ID NO: 1282596 - DNA, 25 bp, Homo sapien
tcccactgaatgtttccttcctgga

SEQ ID NO: 1282597 - DNA, 25 bp, Homo sapien
tggaggttgaccatgttctcaggct

SEQ ID NO: 1282598 - DNA, 25 bp, Homo sapien
agatggaggttgaccatgttctcag

SEQ ID NO: 1282599 - DNA, 25 bp, Homo sapien
cgatccccgttcaccacaatctctg

SEQ ID NO: 1282600 - DNA, 25 bp, Homo sapien
ttcatagagatggaggttgaccatg

SEQ ID NO: 1282601 - DNA, 25 bp, Homo sapien
atgagctgagactgcgccactgaac

SEQ ID NO: 1282602 - DNA, 25 bp, Homo sapien
ggaggtggaagcaggagaattcctt

SEQ ID NO: 1282603 - DNA, 25 bp, Homo sapien
gcctgggtgatggagtgaggttcca

SEQ ID NO: 1282604 - DNA, 25 bp, Homo sapien
tgggaggtggaagcaggagaattcc

SEQ ID NO: 1282605 - DNA, 25 bp, Homo sapien
tgtttgcagacaagggccgcagttt

SEQ ID NO: 1282606 - DNA, 25 bp, Homo sapien
gataagtcgataccactgtttgcag

SEQ ID NO: 1282607 - DNA, 25 bp, Homo sapien
gacaagggccgcagttttgtgttcc

SEQ ID NO: 1282608 - DNA, 25 bp, Homo sapien
cctgatacggtgagagaaaggacag

SEQ ID NO: 1282609 - DNA, 25 bp, Homo sapien
cctcttctggcagctccgacatgga

SEQ ID NO: 1282610 - DNA, 25 bp, Homo sapien
tcctggtccacagccatgaaactgt

SEQ ID NO: 1282611 - DNA, 25 bp, Homo sapien
actgtcatcttcactgtccgaggag

SEQ ID NO: 1282612 - DNA, 25 bp, Homo sapien
tattatgtctagtctcctcagcctc

SEQ ID NO: 1282613 - DNA, 25 bp, Homo sapien
taggtaaaacataaatatcagtatt

SEQ ID NO: 1282614 - DNA, 25 bp, Homo sapien
ctgtaataggtaaaacataaatatc

SEQ ID NO: 1282615 - DNA, 25 bp, Homo sapien
aataggtaaaacataaatatcagta

SEQ ID NO: 1282616 - DNA, 25 bp, Homo sapien
gtaaaacataaatatcagtattcca

SEQ ID NO: 1282617 - DNA, 25 bp, Homo sapien
aaagcagctcaaaaacaattcaggc

SEQ ID NO: 1282618 - DNA, 25 bp, Homo sapien
agcagctcaaaaacaattcaggcat

SEQ ID NO: 1282619 - DNA, 25 bp, Homo sapien
gaaagcagctcaaaaacaattcagg

SEQ ID NO: 1282620 - DNA, 25 bp, Homo sapien
ctgaaagcagctcaaaaacaattca

SEQ ID NO: 1282621 - DNA, 25 bp, Homo sapien
atatagtagttcttggttgggtgca

SEQ ID NO: 1282622 - DNA, 25 bp, Homo sapien
tatagtagttcttggttgggtgcag

SEQ ID NO: 1282623 - DNA, 25 bp, Homo sapien
aatatagtagttcttggttgggtgc

SEQ ID NO: 1282624 - DNA, 25 bp, Homo sapien
aaatatagtagttcttggttgggtg

SEQ ID NO: 1282625 - DNA, 25 bp, Homo sapien
tttaatcgtggtaagtcccagaaga

SEQ ID NO: 1282626 - DNA, 25 bp, Homo sapien
tcagagttaaagatagagcctaaac

SEQ ID NO: 1282627 - DNA, 25 bp, Homo sapien
taaatgtgcaatactgtcagaagcc

SEQ ID NO: 1282628 - DNA, 25 bp, Homo sapien
tcctaagagtagagcttgatgaatt

SEQ ID NO: 1282629 - DNA, 25 bp, Homo sapien
caaaaattagcccagcctggtggtg

SEQ ID NO: 1282630 - DNA, 25 bp, Homo sapien
aaattagcccagcctggtggtgggc

SEQ ID NO: 1282631 - DNA, 25 bp, Homo sapien
attagcccagcctggtggtgggcac

SEQ ID NO: 1282632 - DNA, 25 bp, Homo sapien
aaaaattagcccagcctggtggtgg

SEQ ID NO: 1282633 - DNA, 25 bp, Homo sapien
gccaggtggtctcaaattcccaacc

SEQ ID NO: 1282634 - DNA, 25 bp, Homo sapien
gtgcacatcatcacccccggctaat

SEQ ID NO: 1282635 - DNA, 25 bp, Homo sapien
acaggtgcacatcatcacccccggc

SEQ ID NO: 1282636 - DNA, 25 bp, Homo sapien
caggtggtctcaaattcccaacctc

SEQ ID NO: 1282637 - DNA, 25 bp, Homo sapien
tccagaagtccatctataccattac

SEQ ID NO: 1282638 - DNA, 25 bp, Homo sapien
tccacattaatcatttccagaagtc

SEQ ID NO: 1282639 - DNA, 25 bp, Homo sapien
tctagtggtggtcagggcaaaggaa

SEQ ID NO: 1282640 - DNA, 25 bp, Homo sapien
tatcgacacaatgtcacactatttc

SEQ ID NO: 1282641 - DNA, 25 bp, Homo sapien
tctactgagggttagggttttgcca

SEQ ID NO: 1282642 - DNA, 25 bp, Homo sapien
taaggtcatacagccaatgagtagc

SEQ ID NO: 1282643 - DNA, 25 bp, Homo sapien
tgccatgccaaggttaagttacttc

SEQ ID NO: 1282644 - DNA, 25 bp, Homo sapien
gatattatagaacaactgaaccctt

SEQ ID NO: 1282645 - DNA, 25 bp, Homo sapien
tattaaagacccctctagaaatcag

SEQ ID NO: 1282646 - DNA, 25 bp, Homo sapien
taggtaggactcaccctgctctgaa

SEQ ID NO: 1282647 - DNA, 25 bp, Homo sapien
actcagacgttttgttagcattttc

SEQ ID NO: 1282648 - DNA, 25 bp, Homo sapien
tgaatcttactcagggtttaaacca

SEQ ID NO: 1282649 - DNA, 25 bp, Homo sapien
aggaacaacatagtttcaacgtcgg

SEQ ID NO: 1282650 - DNA, 25 bp, Homo sapien
gtctcccaattagcatttaaacagc

SEQ ID NO: 1282651 - DNA, 25 bp, Homo sapien
aactggtaatgtgtcagaatcttca

SEQ ID NO: 1282652 - DNA, 25 bp, Homo sapien
tgacagaaacacaatcgaagtctcc

SEQ ID NO: 1282653 - DNA, 25 bp, Homo sapien
tgtctcaagcaaggagatccgcagt

SEQ ID NO: 1282654 - DNA, 25 bp, Homo sapien
gaaggtttcaaacgaactcagcgct

SEQ ID NO: 1282655 - DNA, 25 bp, Homo sapien
taagggaacactcaacaagctaggg

SEQ ID NO: 1282656 - DNA, 25 bp, Homo sapien
aatcgggagatttaacagacaaagc

SEQ ID NO: 1282657 - DNA, 25 bp, Homo sapien
tcaggccgcgacagccgtgctcggg

SEQ ID NO: 1282658 - DNA, 25 bp, Homo sapien
cgacggtaatgagggagccagggac

SEQ ID NO: 1282659 - DNA, 25 bp, Homo sapien
ccagcccgctccacgctctcgggtt

SEQ ID NO: 1282660 - DNA, 25 bp, Homo sapien
ggttcgctccgctggcgacggtaat

SEQ ID NO: 1282661 - DNA, 25 bp, Homo sapien
actacgcctgccctgacataaataa

SEQ ID NO: 1282662 - DNA, 25 bp, Homo sapien
ccactacgcctgccctgacataaat

SEQ ID NO: 1282663 - DNA, 25 bp, Homo sapien
cactacgcctgccctgacataaata

SEQ ID NO: 1282664 - DNA, 25 bp, Homo sapien
ggagcaaccaatcacgtaaattatt

SEQ ID NO: 1282665 - DNA, 25 bp, Homo sapien
tgctgttagtaactaggagcaacca

SEQ ID NO: 1282666 - DNA, 25 bp, Homo sapien
ctatctttgctgttagtaactagga

SEQ ID NO: 1282667 - DNA, 25 bp, Homo sapien
tagtaactaggagcaaccaatcacg

SEQ ID NO: 1282668 - DNA, 25 bp, Homo sapien
ttactcctttcaatggtcgccatcc

SEQ ID NO: 1282669 - DNA, 25 bp, Homo sapien
ttgctcttactcctttcaatggtcg

SEQ ID NO: 1282670 - DNA, 25 bp, Homo sapien
caatggtcgccatccctccaccaag

SEQ ID NO: 1282671 - DNA, 25 bp, Homo sapien
gctcttactcctttcaatggtcgcc

SEQ ID NO: 1282672 - DNA, 25 bp, Homo sapien
tcaccacaggctttttcacagaagc

SEQ ID NO: 1282673 - DNA, 25 bp, Homo sapien
ccccttcaccacaggctttttcaca

SEQ ID NO: 1282674 - DNA, 25 bp, Homo sapien
ccttcaccacaggctttttcacaga

SEQ ID NO: 1282675 - DNA, 25 bp, Homo sapien
ccacaggctttttcacagaagccat

SEQ ID NO: 1282676 - DNA, 25 bp, Homo sapien
tgattcaggatgagaccagaggacc

SEQ ID NO: 1282677 - DNA, 25 bp, Homo sapien
agatctccccgggtccacttgtaga

SEQ ID NO: 1282678 - DNA, 25 bp, Homo sapien
tagacttgtgcaccctgattcagga

SEQ ID NO: 1282679 - DNA, 25 bp, Homo sapien
ccgggtccacttgtagacttgtgca

SEQ ID NO: 1282680 - DNA, 25 bp, Homo sapien
ctcccataaaggaccagccctgtcg

SEQ ID NO: 1282681 - DNA, 25 bp, Homo sapien
gaccagccctgtcgagaaccacctt

SEQ ID NO: 1282682 - DNA, 25 bp, Homo sapien
agccctgtcgagaaccaccttcctc

SEQ ID NO: 1282683 - DNA, 25 bp, Homo sapien
cagccctgtcgagaaccaccttcct

SEQ ID NO: 1282684 - DNA, 25 bp, Homo sapien
tcttctgcgctagatctggccctgt

SEQ ID NO: 1282685 - DNA, 25 bp, Homo sapien
tctcgcagcgatatgaaagtgaaag

SEQ ID NO: 1282686 - DNA, 25 bp, Homo sapien
gcctacgatgtcctcttgaagcgct

SEQ ID NO: 1282687 - DNA, 25 bp, Homo sapien
ggacagaggcgcatttactcagaca

SEQ ID NO: 1282688 - DNA, 25 bp, Homo sapien
ccagtgacttggtggtctagggtat

SEQ ID NO: 1282689 - DNA, 25 bp, Homo sapien
cctgttggttttccataggtacaag

SEQ ID NO: 1282690 - DNA, 25 bp, Homo sapien
acaggaaggaggatagggcccctct

SEQ ID NO: 1282691 - DNA, 25 bp, Homo sapien
tgttttccacctagacgacagagga

SEQ ID NO: 1282692 - DNA, 25 bp, Homo sapien
aagtccctagcacagcgagaggccg

SEQ ID NO: 1282693 - DNA, 25 bp, Homo sapien
agaggccgagtacgccgaggcccgg

SEQ ID NO: 1282694 - DNA, 25 bp, Homo sapien
ccctagcacagcgagaggccgagta

SEQ ID NO: 1282695 - DNA, 25 bp, Homo sapien
tagcacagcgagaggccgagtacgc

SEQ ID NO: 1282696 - DNA, 25 bp, Homo sapien
cagcccaataatgtgatcagacagc

SEQ ID NO: 1282697 - DNA, 25 bp, Homo sapien
cagcaataacagtttatcatgctca

SEQ ID NO: 1282698 - DNA, 25 bp, Homo sapien
ggacccagcaaggactcagagagtc

SEQ ID NO: 1282699 - DNA, 25 bp, Homo sapien
ctcagagagtcagacagtgccactt

SEQ ID NO: 1282700 - DNA, 25 bp, Homo sapien
cacttggggtaaagccagtgccagc

SEQ ID NO: 1282701 - DNA, 25 bp, Homo sapien
catccctgggcttagaagtgacgga

SEQ ID NO: 1282702 - DNA, 25 bp, Homo sapien
ggtggttccctaccagccaggctta

SEQ ID NO: 1282703 - DNA, 25 bp, Homo sapien
tccagcatggcttgaactcttaggg

SEQ ID NO: 1282704 - DNA, 25 bp, Homo sapien
gtggccccagctcagtaactatacc

SEQ ID NO: 1282705 - DNA, 25 bp, Homo sapien
ctgtgtgcaatcagtaccttgaagg

SEQ ID NO: 1282706 - DNA, 25 bp, Homo sapien
gtgtgcaatcagtaccttgaaggca

SEQ ID NO: 1282707 - DNA, 25 bp, Homo sapien
tgtgtgcaatcagtaccttgaaggc

SEQ ID NO: 1282708 - DNA, 25 bp, Homo sapien
cagcagatacgtttcggagtggttg

SEQ ID NO: 1282709 - DNA, 25 bp, Homo sapien
ttcctgatcccttccgttgcactgc

SEQ ID NO: 1282710 - DNA, 25 bp, Homo sapien
gttgcactgcgccttatccctcagc

SEQ ID NO: 1282711 - DNA, 25 bp, Homo sapien
gcaagctgagtctcacaggctcact

SEQ ID NO: 1282712 - DNA, 25 bp, Homo sapien
ccagagcttcagtcagtaagaggga

SEQ ID NO: 1282713 - DNA, 25 bp, Homo sapien
cactaccctctagtgggaggccaaa

SEQ ID NO: 1282714 - DNA, 25 bp, Homo sapien
tatgtaatagtggtttcccgcccaa

SEQ ID NO: 1282715 - DNA, 25 bp, Homo sapien
gaagtgctgattgcccagccattgg

SEQ ID NO: 1282716 - DNA, 25 bp, Homo sapien
ggcaggaggcaacaccctatctgct

SEQ ID NO: 1282717 - DNA, 25 bp, Homo sapien
tctgatgtcagcctataaccaaagg

SEQ ID NO: 1282718 - DNA, 25 bp, Homo sapien
aggctgctgcccctttatctgcctt

SEQ ID NO: 1282719 - DNA, 25 bp, Homo sapien
ttatctgccttcacggtactgtccc

SEQ ID NO: 1282720 - DNA, 25 bp, Homo sapien
cccctgcagtcttactctgctggtg

SEQ ID NO: 1282721 - DNA, 25 bp, Homo sapien
tccctggtaagcagagactcaagaa

SEQ ID NO: 1282722 - DNA, 25 bp, Homo sapien
tgtctgaacagaagggcatgggagg

SEQ ID NO: 1282723 - DNA, 25 bp, Homo sapien
tggtgtagcgggcagctgcccactc

SEQ ID NO: 1282724 - DNA, 25 bp, Homo sapien
tattagctcaccaggccacaaaagc

SEQ ID NO: 1282725 - DNA, 25 bp, Homo sapien
tcagtgggttcgagctggcacagag

SEQ ID NO: 1282726 - DNA, 25 bp, Homo sapien
ctttctgctgtcagagttgtgttcc

SEQ ID NO: 1282727 - DNA, 25 bp, Homo sapien
tgggttcgagctggcacagagctga

SEQ ID NO: 1282728 - DNA, 25 bp, Homo sapien
cagagctgagccactttctgctgtc

SEQ ID NO: 1282729 - DNA, 25 bp, Homo sapien
agtgcatagtggttgctcggctgcc

SEQ ID NO: 1282730 - DNA, 25 bp, Homo sapien
ttccttgagatcctgactggaagaa

SEQ ID NO: 1282731 - DNA, 25 bp, Homo sapien
tgtttccttgagatcctgactggaa

SEQ ID NO: 1282732 - DNA, 25 bp, Homo sapien
ggtgtgcactggtctagtgcatagt

SEQ ID NO: 1282733 - DNA, 25 bp, Homo sapien
gcataggggctctgcaggttgggag

SEQ ID NO: 1282734 - DNA, 25 bp, Homo sapien
ttcttgtccagctgtgggcagagca

SEQ ID NO: 1282735 - DNA, 25 bp, Homo sapien
ctgggcataggggctctgcaggttg

SEQ ID NO: 1282736 - DNA, 25 bp, Homo sapien
caggatgcagggcacctgggcatag

SEQ ID NO: 1282737 - DNA, 25 bp, Homo sapien
aggagtccaacgcaggaggccattg

SEQ ID NO: 1282738 - DNA, 25 bp, Homo sapien
tccaacgcaggaggccattgtcata

SEQ ID NO: 1282739 - DNA, 25 bp, Homo sapien
atagtgattatcagcctgttttctg

SEQ ID NO: 1282740 - DNA, 25 bp, Homo sapien
gtacacagttaagcccgaagtggga

SEQ ID NO: 1282741 - DNA, 25 bp, Homo sapien
tcagccggctcaggatactgaggac

SEQ ID NO: 1282742 - DNA, 25 bp, Homo sapien
tactgaggacctttcgttctggaac

SEQ ID NO: 1282743 - DNA, 25 bp, Homo sapien
tgtagggaagcttctgcaaccgcag

SEQ ID NO: 1282744 - DNA, 25 bp, Homo sapien
gcttcagccggctcaggatactgag

SEQ ID NO: 1282745 - DNA, 25 bp, Homo sapien
tggtaaggccagcatctctaccagc

SEQ ID NO: 1282746 - DNA, 25 bp, Homo sapien
gccatgtccgacagggcgttctgtt

SEQ ID NO: 1282747 - DNA, 25 bp, Homo sapien
aggccagcatctctaccagcaggga

SEQ ID NO: 1282748 - DNA, 25 bp, Homo sapien
caggatctcaaagagtagagtgtgg

SEQ ID NO: 1282749 - DNA, 25 bp, Homo sapien
ccacagagcagaagaagcgcctggt

SEQ ID NO: 1282750 - DNA, 25 bp, Homo sapien
agagcagaagaagcgcctggtgtct

SEQ ID NO: 1282751 - DNA, 25 bp, Homo sapien
agaagaagcgcctggtgtctgtcat

SEQ ID NO: 1282752 - DNA, 25 bp, Homo sapien
cagaagaagcgcctggtgtctgtca

SEQ ID NO: 1282753 - DNA, 25 bp, Homo sapien
cattgaagatctcaaagtagctgcg

SEQ ID NO: 1282754 - DNA, 25 bp, Homo sapien
cacagagaagcccattaggagcagg

SEQ ID NO: 1282755 - DNA, 25 bp, Homo sapien
gagaagcccattaggagcaggatat

SEQ ID NO: 1282756 - DNA, 25 bp, Homo sapien
cctcaccaggaccattgaagatctc

SEQ ID NO: 1282757 - DNA, 25 bp, Homo sapien
cactgtgcagggcatctgtcattct

SEQ ID NO: 1282758 - DNA, 25 bp, Homo sapien
gtcagaagacctagcacgaggctgg

SEQ ID NO: 1282759 - DNA, 25 bp, Homo sapien
ctggcacagggagagcgctggactt

SEQ ID NO: 1282760 - DNA, 25 bp, Homo sapien
ggcacagggagagcgctggacttcg

SEQ ID NO: 1282761 - DNA, 25 bp, Homo sapien
ggtcagttgctcctcggacttctcc

SEQ ID NO: 1282762 - DNA, 25 bp, Homo sapien
agttgctcctcggacttctcccggt

SEQ ID NO: 1282763 - DNA, 25 bp, Homo sapien
cagggtcagttgctcctcggacttc

SEQ ID NO: 1282764 - DNA, 25 bp, Homo sapien
tcagttgctcctcggacttctcccg

SEQ ID NO: 1282765 - DNA, 25 bp, Homo sapien
gccttggcgtagctcagggttctct

SEQ ID NO: 1282766 - DNA, 25 bp, Homo sapien
gtcctgggcgacttctgggctgtct

SEQ ID NO: 1282767 - DNA, 25 bp, Homo sapien
agggttctctcgctgctctggtgca

SEQ ID NO: 1282768 - DNA, 25 bp, Homo sapien
cttcgaggctctccgatgggaggcc

SEQ ID NO: 1282769 - DNA, 25 bp, Homo sapien
gatgacaagcgtgttccaccgcgcc

SEQ ID NO: 1282770 - DNA, 25 bp, Homo sapien
gggatgacaagcgtgttccaccgcg

SEQ ID NO: 1282771 - DNA, 25 bp, Homo sapien
cacttggctttgttcatgcctgttg

SEQ ID NO: 1282772 - DNA, 25 bp, Homo sapien
tttgttcatgcctgttgtctgccct

SEQ ID NO: 1282773 - DNA, 25 bp, Homo sapien
gccccggtgctgggtgggtctccac

SEQ ID NO: 1282774 - DNA, 25 bp, Homo sapien
cttttttaggtccaggcgtggatgg

SEQ ID NO: 1282775 - DNA, 25 bp, Homo sapien
tggatggcaggaaggggttgactgt

SEQ ID NO: 1282776 - DNA, 25 bp, Homo sapien
ttgcttttttaggtccaggcgtgga

SEQ ID NO: 1282777 - DNA, 25 bp, Homo sapien
gcaggaaggggttgactgtcttttc

SEQ ID NO: 1282778 - DNA, 25 bp, Homo sapien
cacgacggacattgggggcattgct

SEQ ID NO: 1282779 - DNA, 25 bp, Homo sapien
catggctggccaagcggcagcaagg

SEQ ID NO: 1282780 - DNA, 25 bp, Homo sapien
gactgggggtggattgatatccgga

SEQ ID NO: 1282781 - DNA, 25 bp, Homo sapien
ctggccaagcggcagcaaggctctg

SEQ ID NO: 1282782 - DNA, 25 bp, Homo sapien
gagttttgctctcattgccctggtt

SEQ ID NO: 1282783 - DNA, 25 bp, Homo sapien
gatctgcctccttcggcctccagaa

SEQ ID NO: 1282784 - DNA, 25 bp, Homo sapien
tgcctccttcggcctccagaagtgc

SEQ ID NO: 1282785 - DNA, 25 bp, Homo sapien
gttttgctctcattgccctggttgg

SEQ ID NO: 1282786 - DNA, 25 bp, Homo sapien
ctggcccttgatctcctttccggag

SEQ ID NO: 1282787 - DNA, 25 bp, Homo sapien
gctcactctgatcctggcctgcttg

SEQ ID NO: 1282788 - DNA, 25 bp, Homo sapien
ggaggctgatcctccccgattcccc

SEQ ID NO: 1282789 - DNA, 25 bp, Homo sapien
ttcaggtacttcaggaacccaggaa

SEQ ID NO: 1282790 - DNA, 25 bp, Homo sapien
aggccccttctcaaatgcatctctg

SEQ ID NO: 1282791 - DNA, 25 bp, Homo sapien
atgcatctctgagtctgggcccctt

SEQ ID NO: 1282792 - DNA, 25 bp, Homo sapien
cttccgaagcatccggaaacatgac

SEQ ID NO: 1282793 - DNA, 25 bp, Homo sapien
cacttccgaagcatccggaaacatg

SEQ ID NO: 1282794 - DNA, 25 bp, Homo sapien
tggtatgatgggctcaacaccagcc

SEQ ID NO: 1282795 - DNA, 25 bp, Homo sapien
tctttatggtgatcctcaggccagg

SEQ ID NO: 1282796 - DNA, 25 bp, Homo sapien
tgcgtccctggagccttggttctac

SEQ ID NO: 1282797 - DNA, 25 bp, Homo sapien
tcaggccaggacttggctgcgtccc

SEQ ID NO: 1282798 - DNA, 25 bp, Homo sapien
ccgtgtacatctgggtgtttctatt

SEQ ID NO: 1282799 - DNA, 25 bp, Homo sapien
cctccgtgtacatctgggtgtttct

SEQ ID NO: 1282800 - DNA, 25 bp, Homo sapien
acatctgggtgtttctattgtccat

SEQ ID NO: 1282801 - DNA, 25 bp, Homo sapien
gtacatctgggtgtttctattgtcc

SEQ ID NO: 1282802 - DNA, 25 bp, Homo sapien
ggtgccaagtgaggggcatcaccta

SEQ ID NO: 1282803 - DNA, 25 bp, Homo sapien
gatgccagcgccaacacgggtgcca

SEQ ID NO: 1282804 - DNA, 25 bp, Homo sapien
ccagcgccaacacgggtgccaagtg

SEQ ID NO: 1282805 - DNA, 25 bp, Homo sapien
aagtgaggggcatcacctagtgtgc

SEQ ID NO: 1282806 - DNA, 25 bp, Homo sapien
tttaaatcatggcaggcccgccagc

SEQ ID NO: 1282807 - DNA, 25 bp, Homo sapien
cagcatccacggaggaaccttccat

SEQ ID NO: 1282808 - DNA, 25 bp, Homo sapien
taaacagtattctcctaacagccct

SEQ ID NO: 1282809 - DNA, 25 bp, Homo sapien
tgctggaaacctttgtaaacagtat

SEQ ID NO: 1282810 - DNA, 25 bp, Homo sapien
tctcattagggttcccctagccatt

SEQ ID NO: 1282811 - DNA, 25 bp, Homo sapien
ctgtggccaagtccttctctcttgc

SEQ ID NO: 1282812 - DNA, 25 bp, Homo sapien
tcacgaaggaccaggctgtcacctg

SEQ ID NO: 1282813 - DNA, 25 bp, Homo sapien
tcacctggagcggaaaagtcagggc

SEQ ID NO: 1282814 - DNA, 25 bp, Homo sapien
gaaatcagctggatgagtcacagtg

SEQ ID NO: 1282815 - DNA, 25 bp, Homo sapien
gaggtttaggaatgcatttcaggaa

SEQ ID NO: 1282816 - DNA, 25 bp, Homo sapien
taaactgggaatagatggcaggtcc

SEQ ID NO: 1282817 - DNA, 25 bp, Homo sapien
ttggatttgtttggtatacagggca

SEQ ID NO: 1282818 - DNA, 25 bp, Homo sapien
gctcttgaaggcgatggttgtccaa

SEQ ID NO: 1282819 - DNA, 25 bp, Homo sapien
tcatacagacaacctggcctatggc

SEQ ID NO: 1282820 - DNA, 25 bp, Homo sapien
gaaatacaggattggtctgcacccc

SEQ ID NO: 1282821 - DNA, 25 bp, Homo sapien
gagtatctctgcaaaggaacacagg

SEQ ID NO: 1282822 - DNA, 25 bp, Homo sapien
gaaaagatgcgttagtgaacattac

SEQ ID NO: 1282823 - DNA, 25 bp, Homo sapien
ttctgtcatcaaactgtggttggac

SEQ ID NO: 1282824 - DNA, 25 bp, Homo sapien
gaccatcaaaccattgatggtcgtc

SEQ ID NO: 1282825 - DNA, 25 bp, Homo sapien
ttgatggtcgtctagccccatctcc

SEQ ID NO: 1282826 - DNA, 25 bp, Homo sapien
caggcagttagcatgtcaacaaaca

SEQ ID NO: 1282827 - DNA, 25 bp, Homo sapien
ggtacgtatagcatccagtttcagc

SEQ ID NO: 1282828 - DNA, 25 bp, Homo sapien
taattttaatatggtgcacttgctg

SEQ ID NO: 1282829 - DNA, 25 bp, Homo sapien
caggtagagttctaggcactggtac

SEQ ID NO: 1282830 - DNA, 25 bp, Homo sapien
caactcagggtgtttggttgcccaa

SEQ ID NO: 1282831 - DNA, 25 bp, Homo sapien
gttttctccagagcgcacaagggct

SEQ ID NO: 1282832 - DNA, 25 bp, Homo sapien
ggtcggactcgggaacatcaatagg

SEQ ID NO: 1282833 - DNA, 25 bp, Homo sapien
gggccgttgctctacaaacctggta

SEQ ID NO: 1282834 - DNA, 25 bp, Homo sapien
tctgaagggattcctcactgtgggc

SEQ ID NO: 1282835 - DNA, 25 bp, Homo sapien
tgaagggattcctcactgtgggcag

SEQ ID NO: 1282836 - DNA, 25 bp, Homo sapien
ttgcaaaaggaactgctccctcggc

SEQ ID NO: 1282837 - DNA, 25 bp, Homo sapien
aaaaggaactgctccctcggcgtgc

SEQ ID NO: 1282838 - DNA, 25 bp, Homo sapien
cattaaaggatcttcgggagcagta

SEQ ID NO: 1282839 - DNA, 25 bp, Homo sapien
ttattagaagtgtgtaccatggctg

SEQ ID NO: 1282840 - DNA, 25 bp, Homo sapien
tctcttgcccattgaattaagggta

SEQ ID NO: 1282841 - DNA, 25 bp, Homo sapien
tcacatagcattacttcacatcgag

SEQ ID NO: 1282842 - DNA, 25 bp, Homo sapien
caattacacccctgactggagttta

SEQ ID NO: 1282843 - DNA, 25 bp, Homo sapien
ggaaaaaactcattacaggaccaga

SEQ ID NO: 1282844 - DNA, 25 bp, Homo sapien
tggcagatagactcccaggtggtca

SEQ ID NO: 1282845 - DNA, 25 bp, Homo sapien
gatggcctagacctgtgactgctaa

SEQ ID NO: 1282846 - DNA, 25 bp, Homo sapien
tttagtcaagatggtgttttgcctt

SEQ ID NO: 1282847 - DNA, 25 bp, Homo sapien
agtcaagatggtgttttgccttatt

SEQ ID NO: 1282848 - DNA, 25 bp, Homo sapien
caagatggtgttttgccttattggc

SEQ ID NO: 1282849 - DNA, 25 bp, Homo sapien
ttttagtcaagatggtgttttgcct

SEQ ID NO: 1282850 - DNA, 25 bp, Homo sapien
caaagtcacatggttggtaagtggc

SEQ ID NO: 1282851 - DNA, 25 bp, Homo sapien
tatagcagtactcatccctgtttcg

SEQ ID NO: 1282852 - DNA, 25 bp, Homo sapien
gcttatgacataattaccttccaaa

SEQ ID NO: 1282853 - DNA, 25 bp, Homo sapien
tgtttgtgagggctctacgcttatg

SEQ ID NO: 1282854 - DNA, 25 bp, Homo sapien
cacgtaggcctctgcatagttcaca

SEQ ID NO: 1282855 - DNA, 25 bp, Homo sapien
taaaaaggccgagtatggaggtcac

SEQ ID NO: 1282856 - DNA, 25 bp, Homo sapien
cctggaaggagtcacgggaacagca

SEQ ID NO: 1282857 - DNA, 25 bp, Homo sapien
aagctcgctcacgtggttttgggca

SEQ ID NO: 1282858 - DNA, 25 bp, Homo sapien
catggagttatataccaggacagcc

SEQ ID NO: 1282859 - DNA, 25 bp, Homo sapien
caggtaggcttaactcgatgagaaa

SEQ ID NO: 1282860 - DNA, 25 bp, Homo sapien
tatcactggagccaacagaaccctg

SEQ ID NO: 1282861 - DNA, 25 bp, Homo sapien
tcttccatgggaacggtaacagatc

SEQ ID NO: 1282862 - DNA, 25 bp, Homo sapien
ggctggttctgttcgcatttgtgca

SEQ ID NO: 1282863 - DNA, 25 bp, Homo sapien
ggttctgttcgcatttgtgcagagg

SEQ ID NO: 1282864 - DNA, 25 bp, Homo sapien
agtaactactgaccgtagaggaagg

SEQ ID NO: 1282865 - DNA, 25 bp, Homo sapien
tcagtaactactgaccgtagaggaa

SEQ ID NO: 1282866 - DNA, 25 bp, Homo sapien
gactaaagtaagttcccctggcagc

SEQ ID NO: 1282867 - DNA, 25 bp, Homo sapien
gagtgggccccacaataggtatcca

SEQ ID NO: 1282868 - DNA, 25 bp, Homo sapien
gcattgtcatgggagcctagggtca

SEQ ID NO: 1282869 - DNA, 25 bp, Homo sapien
tactataagggaacggaagccaatg

SEQ ID NO: 1282870 - DNA, 25 bp, Homo sapien
gaactatattcgactctcctaggta

SEQ ID NO: 1282871 - DNA, 25 bp, Homo sapien
tactcagagtagaacttgggcttct

SEQ ID NO: 1282872 - DNA, 25 bp, Homo sapien
cccatggacggcttgaataagatga

SEQ ID NO: 1282873 - DNA, 25 bp, Homo sapien
tgctccactgtctttgagctgggac

SEQ ID NO: 1282874 - DNA, 25 bp, Homo sapien
tatgaccccttctattcagtgctgc

SEQ ID NO: 1282875 - DNA, 25 bp, Homo sapien
catttccgtcaacaccgggattcat

SEQ ID NO: 1282876 - DNA, 25 bp, Homo sapien
gccacagtaccaggagattgacatt

SEQ ID NO: 1282877 - DNA, 25 bp, Homo sapien
gagaggtcccttgtacgccttactc

SEQ ID NO: 1282878 - DNA, 25 bp, Homo sapien
aaattgccaatttaagtcccgctgg

SEQ ID NO: 1282879 - DNA, 25 bp, Homo sapien
gacatggtagggcttaaatctgcca

SEQ ID NO: 1282880 - DNA, 25 bp, Homo sapien
gtcttgcaactggtatacttaggcc

SEQ ID NO: 1282881 - DNA, 25 bp, Homo sapien
gatagacgagttacctcccttgtag

SEQ ID NO: 1282882 - DNA, 25 bp, Homo sapien
gtgtcttgccatagacctctttggg

SEQ ID NO: 1282883 - DNA, 25 bp, Homo sapien
tcacaggtgcctgaggttctattca

SEQ ID NO: 1282884 - DNA, 25 bp, Homo sapien
cttccagacatagatgacaacatga

SEQ ID NO: 1282885 - DNA, 25 bp, Homo sapien
gagaccttttgaggtagtttcacag

SEQ ID NO: 1282886 - DNA, 25 bp, Homo sapien
gcgcgtagttgtggaaccggatacc

SEQ ID NO: 1282887 - DNA, 25 bp, Homo sapien
tgttgacaccctgagtggagggcct

SEQ ID NO: 1282888 - DNA, 25 bp, Homo sapien
gatcaggcccctcgacttgagtgaa

SEQ ID NO: 1282889 - DNA, 25 bp, Homo sapien
gggtggatcgcctgtcaaagccaag

SEQ ID NO: 1282890 - DNA, 25 bp, Homo sapien
gcagccggctgcactcatgatgcag

SEQ ID NO: 1282891 - DNA, 25 bp, Homo sapien
cggctgcactcatgatgcagcgtgg

SEQ ID NO: 1282892 - DNA, 25 bp, Homo sapien
tcctgcagccggctgcactcatgat

SEQ ID NO: 1282893 - DNA, 25 bp, Homo sapien
gccggctgcactcatgatgcagcgt

SEQ ID NO: 1282894 - DNA, 25 bp, Homo sapien
gctccgccgctcatagggagccctc

SEQ ID NO: 1282895 - DNA, 25 bp, Homo sapien
ctgctccgccgctcatagggagccc

SEQ ID NO: 1282896 - DNA, 25 bp, Homo sapien
tccgccgctcatagggagccctcca

SEQ ID NO: 1282897 - DNA, 25 bp, Homo sapien
ccgccgctcatagggagccctccag

SEQ ID NO: 1282898 - DNA, 25 bp, Homo sapien
gcagggcgcacttttcttcctccag

SEQ ID NO: 1282899 - DNA, 25 bp, Homo sapien
ctcctgttccaaccgcagcgcctcc

SEQ ID NO: 1282900 - DNA, 25 bp, Homo sapien
tgctcttcccgtgccactgtggcct

SEQ ID NO: 1282901 - DNA, 25 bp, Homo sapien
gtggcctcctgcttcgcctgccgct

SEQ ID NO: 1282902 - DNA, 25 bp, Homo sapien
caggcaatgagggacagggcccttg

SEQ ID NO: 1282903 - DNA, 25 bp, Homo sapien
caatgagggacagggcccttgggtg

SEQ ID NO: 1282904 - DNA, 25 bp, Homo sapien
gcaatgagggacagggcccttgggt

SEQ ID NO: 1282905 - DNA, 25 bp, Homo sapien
tgagggacagggcccttgggtgtgt

SEQ ID NO: 1282906 - DNA, 25 bp, Homo sapien
ctgggtgacaaggcggttcagatcc

SEQ ID NO: 1282907 - DNA, 25 bp, Homo sapien
cagatccaacttgtcctgagcaagg

SEQ ID NO: 1282908 - DNA, 25 bp, Homo sapien
tgacaaggcggttcagatccaactt

SEQ ID NO: 1282909 - DNA, 25 bp, Homo sapien
gatccaacttgtcctgagcaaggct

SEQ ID NO: 1282910 - DNA, 25 bp, Homo sapien
acagggagtcctgcagggaggcctc

SEQ ID NO: 1282911 - DNA, 25 bp, Homo sapien
agggagtcctgcagggaggcctcct

SEQ ID NO: 1282912 - DNA, 25 bp, Homo sapien
tggacagggagtcctgcagggaggc

SEQ ID NO: 1282913 - DNA, 25 bp, Homo sapien
cttggacagggagtcctgcagggag

SEQ ID NO: 1282914 - DNA, 25 bp, Homo sapien
tccagaggtctgtggtctgtgacaa

SEQ ID NO: 1282915 - DNA, 25 bp, Homo sapien
aaagagaggtcagtccacttatggc

SEQ ID NO: 1282916 - DNA, 25 bp, Homo sapien
tccagaacagcagggatacggccat

SEQ ID NO: 1282917 - DNA, 25 bp, Homo sapien
tctgtggtctgtgacaaagatcagc

SEQ ID NO: 1282918 - DNA, 25 bp, Homo sapien
tcccgttgcagtgtggcgcggctca

SEQ ID NO: 1282919 - DNA, 25 bp, Homo sapien
gcctgcagcatgtcccgttgcagtg

SEQ ID NO: 1282920 - DNA, 25 bp, Homo sapien
agcatgtcccgttgcagtgtggcgc

SEQ ID NO: 1282921 - DNA, 25 bp, Homo sapien
gcagcatgtcccgttgcagtgtggc

SEQ ID NO: 1282922 - DNA, 25 bp, Homo sapien
cttcccccagccagtaccgctggcg

SEQ ID NO: 1282923 - DNA, 25 bp, Homo sapien
cccagccagtaccgctggcgccgca

SEQ ID NO: 1282924 - DNA, 25 bp, Homo sapien
ccccagccagtaccgctggcgccgc

SEQ ID NO: 1282925 - DNA, 25 bp, Homo sapien
tcccccagccagtaccgctggcgcc

SEQ ID NO: 1282926 - DNA, 25 bp, Homo sapien
gctaaaagggcacacccagccctaa

SEQ ID NO: 1282927 - DNA, 25 bp, Homo sapien
tgcatggtgctgtcggtcttgtccc

SEQ ID NO: 1282928 - DNA, 25 bp, Homo sapien
cgcaggcgctgcagctgttcctcta

SEQ ID NO: 1282929 - DNA, 25 bp, Homo sapien
gggcgtcctcgtgggcctgcatggt

SEQ ID NO: 1282930 - DNA, 25 bp, Homo sapien
tctcaggagctctttggcgctccgc

SEQ ID NO: 1282931 - DNA, 25 bp, Homo sapien
ccgaaggagtcatccgcggtgcgct

SEQ ID NO: 1282932 - DNA, 25 bp, Homo sapien
ctgccgaaggagtcatccgcggtgc

SEQ ID NO: 1282933 - DNA, 25 bp, Homo sapien
ccgcaggctgccgaaggagtcatcc

SEQ ID NO: 1282934 - DNA, 25 bp, Homo sapien
gcagctcgtgcttgtgtaaggtgga

SEQ ID NO: 1282935 - DNA, 25 bp, Homo sapien
ggctctgctgtagcccctctccgtc

SEQ ID NO: 1282936 - DNA, 25 bp, Homo sapien
ttaggctctgctgtagcccctctcc

SEQ ID NO: 1282937 - DNA, 25 bp, Homo sapien
cacctgctcctgtagccgcagggat

SEQ ID NO: 1282938 - DNA, 25 bp, Homo sapien
cctgctcctgtagccgcagggattc

SEQ ID NO: 1282939 - DNA, 25 bp, Homo sapien
ttctcagtgaggtccgtgttgacct

SEQ ID NO: 1282940 - DNA, 25 bp, Homo sapien
cgtgttgacctgatccttctccgga

SEQ ID NO: 1282941 - DNA, 25 bp, Homo sapien
tccttctccggattctgcttctgaa

SEQ ID NO: 1282942 - DNA, 25 bp, Homo sapien
agtgaggtccgtgttgacctgatcc

SEQ ID NO: 1282943 - DNA, 25 bp, Homo sapien
gagcaacagaggtgaatacgggacc

SEQ ID NO: 1282944 - DNA, 25 bp, Homo sapien
cagaggtgaatacgggaccacccca

SEQ ID NO: 1282945 - DNA, 25 bp, Homo sapien
gcctctcaaatccactagctctgtg

SEQ ID NO: 1282946 - DNA, 25 bp, Homo sapien
agcctctcaaatccactagctctgt

SEQ ID NO: 1282947 - DNA, 25 bp, Homo sapien
actgaggtcagccttgtccaggtca

SEQ ID NO: 1282948 - DNA, 25 bp, Homo sapien
ctggcactgaggtcagccttgtcca

SEQ ID NO: 1282949 - DNA, 25 bp, Homo sapien
cttgtccaggtcactttgcatctgc

SEQ ID NO: 1282950 - DNA, 25 bp, Homo sapien
ccaggtcactttgcatctgctgctg

SEQ ID NO: 1282951 - DNA, 25 bp, Homo sapien
agctcgtgatgtccgggccagctcc

SEQ ID NO: 1282952 - DNA, 25 bp, Homo sapien
cgcctcctggacagctcgtgatgtc

SEQ ID NO: 1282953 - DNA, 25 bp, Homo sapien
tggacagctcgtgatgtccgggcca

SEQ ID NO: 1282954 - DNA, 25 bp, Homo sapien
tcctggacagctcgtgatgtccggg

SEQ ID NO: 1282955 - DNA, 25 bp, Homo sapien
ctgcctccatagcaggagcaggtga

SEQ ID NO: 1282956 - DNA, 25 bp, Homo sapien
tcttgctgaagtaggcattgaaaga

SEQ ID NO: 1282957 - DNA, 25 bp, Homo sapien
cctccatagcaggagcaggtgattg

SEQ ID NO: 1282958 - DNA, 25 bp, Homo sapien
caggtgattgtgcttcttgctgaag

SEQ ID NO: 1282959 - DNA, 25 bp, Homo sapien
ccttgcggctgcgtgtccagtcatt

SEQ ID NO: 1282960 - DNA, 25 bp, Homo sapien
ggccgagcctgcctggtccagatgt

SEQ ID NO: 1282961 - DNA, 25 bp, Homo sapien
tcctcactcagagcctggttggccg

SEQ ID NO: 1282962 - DNA, 25 bp, Homo sapien
gatgttctcggagcatggctttcac

SEQ ID NO: 1282963 - DNA, 25 bp, Homo sapien
gaatagggcaaaggggatcagtagg

SEQ ID NO: 1282964 - DNA, 25 bp, Homo sapien
caaaggggatcagtaggcgcttgcc

SEQ ID NO: 1282965 - DNA, 25 bp, Homo sapien
ctggccctccctgttgtgcccccac

SEQ ID NO: 1282966 - DNA, 25 bp, Homo sapien
aggggatcagtaggcgcttgcccag

SEQ ID NO: 1282967 - DNA, 25 bp, Homo sapien
ccagccggatgagggcactctgcag

SEQ ID NO: 1282968 - DNA, 25 bp, Homo sapien
cggatgagggcactctgcaggtctt

SEQ ID NO: 1282969 - DNA, 25 bp, Homo sapien
tccagccggatgagggcactctgca

SEQ ID NO: 1282970 - DNA, 25 bp, Homo sapien
tcctccagccggatgagggcactct

SEQ ID NO: 1282971 - DNA, 25 bp, Homo sapien
ctctccggatctctccagcagctgc

SEQ ID NO: 1282972 - DNA, 25 bp, Homo sapien
ccagctccgagtacctcttcttgta

SEQ ID NO: 1282973 - DNA, 25 bp, Homo sapien
tccagctccgagtacctcttcttgt

SEQ ID NO: 1282974 - DNA, 25 bp, Homo sapien
tgctccagctccgagtacctcttct

SEQ ID NO: 1282975 - DNA, 25 bp, Homo sapien
tgtagctgcctctgcaactccaggc

SEQ ID NO: 1282976 - DNA, 25 bp, Homo sapien
cttgcgctggtaggaggcctgctcc

SEQ ID NO: 1282977 - DNA, 25 bp, Homo sapien
cctgtagctgcctctgcaactccag

SEQ ID NO: 1282978 - DNA, 25 bp, Homo sapien
tccaggtaggcctgcagcttgcgct

SEQ ID NO: 1282979 - DNA, 25 bp, Homo sapien
gagcctcgaactacaaatgccctag

SEQ ID NO: 1282980 - DNA, 25 bp, Homo sapien
cctagacagagtggtagagcctcga

SEQ ID NO: 1282981 - DNA, 25 bp, Homo sapien
cacttagttgggcatgagcggtcca

SEQ ID NO: 1282982 - DNA, 25 bp, Homo sapien
gagactcagtgtcctcttacgtaag

SEQ ID NO: 1282983 - DNA, 25 bp, Homo sapien
aaggcacagtccctatatcccaggg

SEQ ID NO: 1282984 - DNA, 25 bp, Homo sapien
tctaaaaggagactagaccaggcca

SEQ ID NO: 1282985 - DNA, 25 bp, Homo sapien
taaccagcacatgacacggtgccgg

SEQ ID NO: 1282986 - DNA, 25 bp, Homo sapien
gaatatcgtgtgtgcataaccagca

SEQ ID NO: 1282987 - DNA, 25 bp, Homo sapien
gaagccacaaatacccctggaccag

SEQ ID NO: 1282988 - DNA, 25 bp, Homo sapien
gccacaaatacccctggaccagcat

SEQ ID NO: 1282989 - DNA, 25 bp, Homo sapien
ggaagccacaaatacccctggacca

SEQ ID NO: 1282990 - DNA, 25 bp, Homo sapien
aagccacaaatacccctggaccagc

SEQ ID NO: 1282991 - DNA, 25 bp, Homo sapien
aaaagtatcaccttctgagggacct

SEQ ID NO: 1282992 - DNA, 25 bp, Homo sapien
tcaaaagtatcaccttctgagggac

SEQ ID NO: 1282993 - DNA, 25 bp, Homo sapien
caaaagtatcaccttctgagggacc

SEQ ID NO: 1282994 - DNA, 25 bp, Homo sapien
aaagtatcaccttctgagggaccta

SEQ ID NO: 1282995 - DNA, 25 bp, Homo sapien
tgtgagcccagcgaaagaaaacaga

SEQ ID NO: 1282996 - DNA, 25 bp, Homo sapien
ggttgactcctggagtcgtgcctga

SEQ ID NO: 1282997 - DNA, 25 bp, Homo sapien
gactcctggagtcgtgcctgaacct

SEQ ID NO: 1282998 - DNA, 25 bp, Homo sapien
tttctggcgtaaacagacagatggc

SEQ ID NO: 1282999 - DNA, 25 bp, Homo sapien
gtgaaaatcaggagggagctcgttc

SEQ ID NO: 1283000 - DNA, 25 bp, Homo sapien
aaaatgcccactccagagacgctgc

SEQ ID NO: 1283001 - DNA, 25 bp, Homo sapien
caggagggagctcgttcaaaatgcc

SEQ ID NO: 1283002 - DNA, 25 bp, Homo sapien
caggcttaagtctgtgtgaaaatca

SEQ ID NO: 1283003 - DNA, 25 bp, Homo sapien
aatggagatgcttccgactcggcag

SEQ ID NO: 1283004 - DNA, 25 bp, Homo sapien
tgcaatgaagacgaaaccgcgtccc

SEQ ID NO: 1283005 - DNA, 25 bp, Homo sapien
cgtcccacactaggagggcagtgca

SEQ ID NO: 1283006 - DNA, 25 bp, Homo sapien
tcagtttacccatccgcacaatgga

SEQ ID NO: 1283007 - DNA, 25 bp, Homo sapien
ttggcttccggtgccgggcagcggc

SEQ ID NO: 1283008 - DNA, 25 bp, Homo sapien
tgcggagcccgtcgggaacgccctc

SEQ ID NO: 1283009 - DNA, 25 bp, Homo sapien
gggcatctgcggagcccgtcgggaa

SEQ ID NO: 1283010 - DNA, 25 bp, Homo sapien
ggaacgccctcttggcttccggtgc

SEQ ID NO: 1283011 - DNA, 25 bp, Homo sapien
tcgctcgccttctccgcagccgctg

SEQ ID NO: 1283012 - DNA, 25 bp, Homo sapien
cttcgctcgccttctccgcagccgc

SEQ ID NO: 1283013 - DNA, 25 bp, Homo sapien
ttcgctcgccttctccgcagccgct

SEQ ID NO: 1283014 - DNA, 25 bp, Homo sapien
gtttgtgcttgtgagacattctcaa

SEQ ID NO: 1283015 - DNA, 25 bp, Homo sapien
acatgtagtttgtgcttgtgagaca

SEQ ID NO: 1283016 - DNA, 25 bp, Homo sapien
ctgctgacatgtagtttgtgcttgt

SEQ ID NO: 1283017 - DNA, 25 bp, Homo sapien
tagtttgtgcttgtgagacattctc

SEQ ID NO: 1283018 - DNA, 25 bp, Homo sapien
agtcatgctaggcctcattttcatt

SEQ ID NO: 1283019 - DNA, 25 bp, Homo sapien
tcagtcatgctaggcctcattttca

SEQ ID NO: 1283020 - DNA, 25 bp, Homo sapien
catgctaggcctcattttcattgcc

SEQ ID NO: 1283021 - DNA, 25 bp, Homo sapien
gtcagtcatgctaggcctcattttc

SEQ ID NO: 1283022 - DNA, 25 bp, Homo sapien
tccatgaaggtgataagcgagggcc

SEQ ID NO: 1283023 - DNA, 25 bp, Homo sapien
cagctgatcaaaagtaggtgaggtc

SEQ ID NO: 1283024 - DNA, 25 bp, Homo sapien
tatctataaagttggctggcagtgg

SEQ ID NO: 1283025 - DNA, 25 bp, Homo sapien
gacgcgtgtcaggtgtaaacctcag

SEQ ID NO: 1283026 - DNA, 25 bp, Homo sapien
tcaggggaaagcgcgaacgcagtcc

SEQ ID NO: 1283027 - DNA, 25 bp, Homo sapien
catccggagtgcaatggataagcct

SEQ ID NO: 1283028 - DNA, 25 bp, Homo sapien
agtgcaatggataagcctcgccctg

SEQ ID NO: 1283029 - DNA, 25 bp, Homo sapien
cggagtgcaatggataagcctcgcc

SEQ ID NO: 1283030 - DNA, 25 bp, Homo sapien
ctcaagcgtggtgctggactttgtc

SEQ ID NO: 1283031 - DNA, 25 bp, Homo sapien
tttgtcatctcttgcacagccatct

SEQ ID NO: 1283032 - DNA, 25 bp, Homo sapien
tgctggactttgtcatctcttgcac

SEQ ID NO: 1283033 - DNA, 25 bp, Homo sapien
ggtgctggactttgtcatctcttgc

SEQ ID NO: 1283034 - DNA, 25 bp, Homo sapien
tactacagggtggtcacaggataac

SEQ ID NO: 1283035 - DNA, 25 bp, Homo sapien
gatggaggttttacctaggccctca

SEQ ID NO: 1283036 - DNA, 25 bp, Homo sapien
gctgtgggctgttaagacgctgaaa

SEQ ID NO: 1283037 - DNA, 25 bp, Homo sapien
caagctggctaaggctgagtggacc

SEQ ID NO: 1283038 - DNA, 25 bp, Homo sapien
gcgtccctgggtgggctcgaaccac

SEQ ID NO: 1283039 - DNA, 25 bp, Homo sapien
caacctttcagttaacagccgaacg

SEQ ID NO: 1283040 - DNA, 25 bp, Homo sapien
gtgggctcgaaccaccaacctttca

SEQ ID NO: 1283041 - DNA, 25 bp, Homo sapien
gaacgcgctaaccgattgcgccaca

SEQ ID NO: 1283042 - DNA, 25 bp, Homo sapien
cggtcacgttggacgcctgcgtgtt

SEQ ID NO: 1283043 - DNA, 25 bp, Homo sapien
cgccggtcacgttggacgcctgcgt

SEQ ID NO: 1283044 - DNA, 25 bp, Homo sapien
accagagagattagagcggtgagtc

SEQ ID NO: 1283045 - DNA, 25 bp, Homo sapien
cgggcaggaccactgagcaaggcct

SEQ ID NO: 1283046 - DNA, 25 bp, Homo sapien
tgaattcatcgtcgcctttagcttt

SEQ ID NO: 1283047 - DNA, 25 bp, Homo sapien
ctttccgggccgctgaggagcttcc

SEQ ID NO: 1283048 - DNA, 25 bp, Homo sapien
cttgtggaatgaattcatcgtcgcc

SEQ ID NO: 1283049 - DNA, 25 bp, Homo sapien
ccagtcgctttccgggccgctgagg

SEQ ID NO: 1283050 - DNA, 25 bp, Homo sapien
gagggcaactggcagggtctctggc

SEQ ID NO: 1283051 - DNA, 25 bp, Homo sapien
cggccgtggggtggtaggtcaagag

SEQ ID NO: 1283052 - DNA, 25 bp, Homo sapien
agggagggcaactggcagggtctct

SEQ ID NO: 1283053 - DNA, 25 bp, Homo sapien
agggtctctggcgcaccttctgcgc

SEQ ID NO: 1283054 - DNA, 25 bp, Homo sapien
tggcccagaggagacggagtttccc

SEQ ID NO: 1283055 - DNA, 25 bp, Homo sapien
aggacgtggcccagaggagacggag

SEQ ID NO: 1283056 - DNA, 25 bp, Homo sapien
cagcaacgtgaggacgtggcccaga

SEQ ID NO: 1283057 - DNA, 25 bp, Homo sapien
cgtggcccagaggagacggagtttc

SEQ ID NO: 1283058 - DNA, 25 bp, Homo sapien
ccgctgcagacagtgagaggacaaa

SEQ ID NO: 1283059 - DNA, 25 bp, Homo sapien
gtgggaaccacagagtcaccgtgca

SEQ ID NO: 1283060 - DNA, 25 bp, Homo sapien
cgcccgtgggctcctagcaaattga

SEQ ID NO: 1283061 - DNA, 25 bp, Homo sapien
gaaccacagagtcaccgtgcacctg

SEQ ID NO: 1283062 - DNA, 25 bp, Homo sapien
cttatggttaacagccgaacgcgct

SEQ ID NO: 1283063 - DNA, 25 bp, Homo sapien
tctgtaaccaccaaccttatggtta

SEQ ID NO: 1283064 - DNA, 25 bp, Homo sapien
ttatggttaacagccgaacgcgcta

SEQ ID NO: 1283065 - DNA, 25 bp, Homo sapien
gtccctgggtggtctgtaaccacca

SEQ ID NO: 1283066 - DNA, 25 bp, Homo sapien
tcagtcttgaaccccgttatgtcag

SEQ ID NO: 1283067 - DNA, 25 bp, Homo sapien
tcttgaaccccgttatgtcaggtaa

SEQ ID NO: 1283068 - DNA, 25 bp, Homo sapien
gagagagacactctcgagtgtggaa

SEQ ID NO: 1283069 - DNA, 25 bp, Homo sapien
gacactctcgagtgtggaagaaaaa

SEQ ID NO: 1283070 - DNA, 25 bp, Homo sapien
gatgaagaagcttcactctgggaga

SEQ ID NO: 1283071 - DNA, 25 bp, Homo sapien
gttgggtcagcgaacatcgcctccc

SEQ ID NO: 1283072 - DNA, 25 bp, Homo sapien
agggcaccggcagcagttttccgtc

SEQ ID NO: 1283073 - DNA, 25 bp, Homo sapien
tctaccgctcaatcagcaaacggga

SEQ ID NO: 1283074 - DNA, 25 bp, Homo sapien
gcggatgacggacacggagacaaat

SEQ ID NO: 1283075 - DNA, 25 bp, Homo sapien
gtgaaagcgccgaatcctagccact

SEQ ID NO: 1283076 - DNA, 25 bp, Homo sapien
ccgggccgcggcggtgaaagcgccg

SEQ ID NO: 1283077 - DNA, 25 bp, Homo sapien
cggcggtgaaagcgccgaatcctag

SEQ ID NO: 1283078 - DNA, 25 bp, Homo sapien
gccgcggcggtgaaagcgccgaatc

SEQ ID NO: 1283079 - DNA, 25 bp, Homo sapien
acaccgagggctccgcgagggacac

SEQ ID NO: 1283080 - DNA, 25 bp, Homo sapien
tcttctgtcagaagcgacagcttcc

SEQ ID NO: 1283081 - DNA, 25 bp, Homo sapien
aagagcctgcaagcgacacaccgag

SEQ ID NO: 1283082 - DNA, 25 bp, Homo sapien
gagttgcagcgacccggccgcagct

SEQ ID NO: 1283083 - DNA, 25 bp, Homo sapien
aactggtcatcaattcgtaatttcc

SEQ ID NO: 1283084 - DNA, 25 bp, Homo sapien
gggccctcagctggtctccgacctt

SEQ ID NO: 1283085 - DNA, 25 bp, Homo sapien
cccatcggctaagtgcgtgggcatt

SEQ ID NO: 1283086 - DNA, 25 bp, Homo sapien
tcagatccaagagccaactggtcat

SEQ ID NO: 1283087 - DNA, 25 bp, Homo sapien
gcgtgggaggcgagaattctaccac

SEQ ID NO: 1283088 - DNA, 25 bp, Homo sapien
gaattctaccactgaaccaccaatg

SEQ ID NO: 1283089 - DNA, 25 bp, Homo sapien
ttgcattggccgggaattgaacccg

SEQ ID NO: 1283090 - DNA, 25 bp, Homo sapien
ccgggtctcccgcgtgggaggcgag

SEQ ID NO: 1283091 - DNA, 25 bp, Homo sapien
tgttcccacgcagtctcgaaccaga

SEQ ID NO: 1283092 - DNA, 25 bp, Homo sapien
gttcccacgcagtctcgaaccagag

SEQ ID NO: 1283093 - DNA, 25 bp, Homo sapien
ttcccacgcagtctcgaaccagaga

SEQ ID NO: 1283094 - DNA, 25 bp, Homo sapien
ctggtgagcctctctgtcagctggc

SEQ ID NO: 1283095 - DNA, 25 bp, Homo sapien
ccaggccacgaggctgatctcagct

SEQ ID NO: 1283096 - DNA, 25 bp, Homo sapien
tctcagctcctcagccagcttccct

SEQ ID NO: 1283097 - DNA, 25 bp, Homo sapien
ggccacgaggctgatctcagctcct

SEQ ID NO: 1283098 - DNA, 25 bp, Homo sapien
ctcagctcctcagccagcttccctt

SEQ ID NO: 1283099 - DNA, 25 bp, Homo sapien
tcaattttttgggagctgggcctcc

SEQ ID NO: 1283100 - DNA, 25 bp, Homo sapien
ggagctgggcctccagctgggatac

SEQ ID NO: 1283101 - DNA, 25 bp, Homo sapien
caattttttgggagctgggcctcca

SEQ ID NO: 1283102 - DNA, 25 bp, Homo sapien
ttgggagctgggcctccagctggga

SEQ ID NO: 1283103 - DNA, 25 bp, Homo sapien
acactatgaggtgaagacccctcca

SEQ ID NO: 1283104 - DNA, 25 bp, Homo sapien
gacactatgaggtgaagacccctcc

SEQ ID NO: 1283105 - DNA, 25 bp, Homo sapien
agccccagtgccatcagacagccac

SEQ ID NO: 1283106 - DNA, 25 bp, Homo sapien
cctggagagtagaaagccccagtgc

SEQ ID NO: 1283107 - DNA, 25 bp, Homo sapien
ccccggcgcccctgctcagagcaca

SEQ ID NO: 1283108 - DNA, 25 bp, Homo sapien
cccggcgcccctgctcagagcacag

SEQ ID NO: 1283109 - DNA, 25 bp, Homo sapien
agccccggcgcccctgctcagagca

SEQ ID NO: 1283110 - DNA, 25 bp, Homo sapien
tcagccccggcgcccctgctcagag

SEQ ID NO: 1283111 - DNA, 25 bp, Homo sapien
ttgcggctgctgtgctcctcatgct

SEQ ID NO: 1283112 - DNA, 25 bp, Homo sapien
tccttgcggctgctgtgctcctcat

SEQ ID NO: 1283113 - DNA, 25 bp, Homo sapien
catttccttgcggctgctgtgctcc

SEQ ID NO: 1283114 - DNA, 25 bp, Homo sapien
atttccttgcggctgctgtgctcct

SEQ ID NO: 1283115 - DNA, 25 bp, Homo sapien
aataaaagttggatgtgctgttgtg

SEQ ID NO: 1283116 - DNA, 25 bp, Homo sapien
aaagttggatgtgctgttgtggcca

SEQ ID NO: 1283117 - DNA, 25 bp, Homo sapien
agttggatgtgctgttgtggccact

SEQ ID NO: 1283118 - DNA, 25 bp, Homo sapien
taaaagttggatgtgctgttgtggc

SEQ ID NO: 1283119 - DNA, 25 bp, Homo sapien
cgggactggtggattcctcctgttc

SEQ ID NO: 1283120 - DNA, 25 bp, Homo sapien
ttcagcctcattcttgctttgacca

SEQ ID NO: 1283121 - DNA, 25 bp, Homo sapien
agcctcattcttgctttgaccacaa

SEQ ID NO: 1283122 - DNA, 25 bp, Homo sapien
cttgctttgaccacaagtctcatag

SEQ ID NO: 1283123 - DNA, 25 bp, Homo sapien
ttccagggtgcacagggcaggtact

SEQ ID NO: 1283124 - DNA, 25 bp, Homo sapien
cacagggcaggtactctgggggtct

SEQ ID NO: 1283125 - DNA, 25 bp, Homo sapien
gggtgcacagggcaggtactctggg

SEQ ID NO: 1283126 - DNA, 25 bp, Homo sapien
ccagggtgcacagggcaggtactct

SEQ ID NO: 1283127 - DNA, 25 bp, Homo sapien
gggaccagggaggttatgcagaaga

SEQ ID NO: 1283128 - DNA, 25 bp, Homo sapien
gaccagggaggttatgcagaagact

SEQ ID NO: 1283129 - DNA, 25 bp, Homo sapien
cagggaggttatgcagaagacttct

SEQ ID NO: 1283130 - DNA, 25 bp, Homo sapien
agaagacttctgcacagcaaggcag

SEQ ID NO: 1283131 - DNA, 25 bp, Homo sapien
tgtcttcttggtactacacatgaag

SEQ ID NO: 1283132 - DNA, 25 bp, Homo sapien
tggacagtgtcttcttggtactaca

SEQ ID NO: 1283133 - DNA, 25 bp, Homo sapien
cttggtactacacatgaagatgtcc

SEQ ID NO: 1283134 - DNA, 25 bp, Homo sapien
tgtccctctttggacagtgtcttct

SEQ ID NO: 1283135 - DNA, 25 bp, Homo sapien
tgatggatttgattaaggtgttcct

SEQ ID NO: 1283136 - DNA, 25 bp, Homo sapien
ttgatggatttgattaaggtgttcc

SEQ ID NO: 1283137 - DNA, 25 bp, Homo sapien
gatggatttgattaaggtgttcctt

SEQ ID NO: 1283138 - DNA, 25 bp, Homo sapien
atcagtacccaccaaaaccaatcag

SEQ ID NO: 1283139 - DNA, 25 bp, Homo sapien
catcagtacccaccaaaaccaatca

SEQ ID NO: 1283140 - DNA, 25 bp, Homo sapien
cagtcctgatatcatgataatgctg

SEQ ID NO: 1283141 - DNA, 25 bp, Homo sapien
tgagtcaggtagttcaaagtacatt

SEQ ID NO: 1283142 - DNA, 25 bp, Homo sapien
gagtcaggtagttcaaagtacattg

SEQ ID NO: 1283143 - DNA, 25 bp, Homo sapien
aatgagtcaggtagttcaaagtaca

SEQ ID NO: 1283144 - DNA, 25 bp, Homo sapien
agtcaggtagttcaaagtacattga

SEQ ID NO: 1283145 - DNA, 25 bp, Homo sapien
cttctccttcttttcttcgttgatc

SEQ ID NO: 1283146 - DNA, 25 bp, Homo sapien
gggcatggtgggttttgatcttctt

SEQ ID NO: 1283147 - DNA, 25 bp, Homo sapien
ccttctccttcttttcttcgttgat

SEQ ID NO: 1283148 - DNA, 25 bp, Homo sapien
ctccttcttttcttcgttgatcttc

SEQ ID NO: 1283149 - DNA, 25 bp, Homo sapien
aataacatctatccagtgagtcctg

SEQ ID NO: 1283150 - DNA, 25 bp, Homo sapien
ataacatctatccagtgagtcctgc

SEQ ID NO: 1283151 - DNA, 25 bp, Homo sapien
taacatctatccagtgagtcctgca

SEQ ID NO: 1283152 - DNA, 25 bp, Homo sapien
atttcatggctaacataaggaactg

SEQ ID NO: 1283153 - DNA, 25 bp, Homo sapien
tcatggctaacataaggaactgttt

SEQ ID NO: 1283154 - DNA, 25 bp, Homo sapien
tttcatggctaacataaggaactgt

SEQ ID NO: 1283155 - DNA, 25 bp, Homo sapien
tggctaacataaggaactgtttaaa

SEQ ID NO: 1283156 - DNA, 25 bp, Homo sapien
catgatgggtcttggtcttcttcca

SEQ ID NO: 1283157 - DNA, 25 bp, Homo sapien
tgatgggtcttggtcttcttccact

SEQ ID NO: 1283158 - DNA, 25 bp, Homo sapien
gggcatgatgggtcttggtcttctt

SEQ ID NO: 1283159 - DNA, 25 bp, Homo sapien
gcatgatgggtcttggtcttcttcc

SEQ ID NO: 1283160 - DNA, 25 bp, Homo sapien
taacatctatccagtgagtcctgca

SEQ ID NO: 1283161 - DNA, 25 bp, Homo sapien
aataacatctatccagtgagtcctg

SEQ ID NO: 1283162 - DNA, 25 bp, Homo sapien
ataacatctatccagtgagtcctgc

SEQ ID NO: 1283163 - DNA, 25 bp, Homo sapien
tttttcacttgatcccaccgatgtc

SEQ ID NO: 1283164 - DNA, 25 bp, Homo sapien
acctgttgcctcttggtcctccttt

SEQ ID NO: 1283165 - DNA, 25 bp, Homo sapien
ctgggacctgttgcctcttggtcct

SEQ ID NO: 1283166 - DNA, 25 bp, Homo sapien
gttgcctcttggtcctcctttttca

SEQ ID NO: 1283167 - DNA, 25 bp, Homo sapien
tgccttgagttcaatgtcgtgacag

SEQ ID NO: 1283168 - DNA, 25 bp, Homo sapien
gtgacagtcagtccaggttggcacg

SEQ ID NO: 1283169 - DNA, 25 bp, Homo sapien
gttcaatgtcgtgacagtcagtcca

SEQ ID NO: 1283170 - DNA, 25 bp, Homo sapien
caatgtcgtgacagtcagtccaggt

SEQ ID NO: 1283171 - DNA, 25 bp, Homo sapien
ctgggccatgaactggagctttatc

SEQ ID NO: 1283172 - DNA, 25 bp, Homo sapien
actggagctttatcaccttcacaat

SEQ ID NO: 1283173 - DNA, 25 bp, Homo sapien
gaactggagctttatcaccttcaca

SEQ ID NO: 1283174 - DNA, 25 bp, Homo sapien
ggagctttatcaccttcacaatgga

SEQ ID NO: 1283175 - DNA, 25 bp, Homo sapien
tgtgccgctgtaagacttgtacgag

SEQ ID NO: 1283176 - DNA, 25 bp, Homo sapien
cgcctatgtcaacagccatgcagac

SEQ ID NO: 1283177 - DNA, 25 bp, Homo sapien
tgagtgaaatgtgccgctgtaagac

SEQ ID NO: 1283178 - DNA, 25 bp, Homo sapien
cgctgtaagacttgtacgaggccaa

SEQ ID NO: 1283179 - DNA, 25 bp, Homo sapien
ttcctcttcctcatcatcactttca

SEQ ID NO: 1283180 - DNA, 25 bp, Homo sapien
ctgggagacactggccctttttctt

SEQ ID NO: 1283181 - DNA, 25 bp, Homo sapien
ctcttcctcatcatcactttcattt

SEQ ID NO: 1283182 - DNA, 25 bp, Homo sapien
tcttcctcatcatcactttcatttt

SEQ ID NO: 1283183 - DNA, 25 bp, Homo sapien
tggctggttggagtcataagggcca

SEQ ID NO: 1283184 - DNA, 25 bp, Homo sapien
ctgggggcagacgatttctgcactt

SEQ ID NO: 1283185 - DNA, 25 bp, Homo sapien
gggcagacgatttctgcactttctc

SEQ ID NO: 1283186 - DNA, 25 bp, Homo sapien
atcttcatcgtcatcgttgtcattt

SEQ ID NO: 1283187 - DNA, 25 bp, Homo sapien
agccacctcaacttgaacatcttca

SEQ ID NO: 1283188 - DNA, 25 bp, Homo sapien
cccaatgtgcaacagagacatgaac

SEQ ID NO: 1283189 - DNA, 25 bp, Homo sapien
catgaacatctaggcatgggtcacc

SEQ ID NO: 1283190 - DNA, 25 bp, Homo sapien
gacatgaacatctaggcatgggtca

SEQ ID NO: 1283191 - DNA, 25 bp, Homo sapien
gagacatgaacatctaggcatgggt

SEQ ID NO: 1283192 - DNA, 25 bp, Homo sapien
ctgcccctgggacttgtctggctca

SEQ ID NO: 1283193 - DNA, 25 bp, Homo sapien
ggagatgctgattcaatgagcagga

SEQ ID NO: 1283194 - DNA, 25 bp, Homo sapien
ttggacaaggtgctgtgccagtcta

SEQ ID NO: 1283195 - DNA, 25 bp, Homo sapien
gatgctgattcaatgagcaggaggc

SEQ ID NO: 1283196 - DNA, 25 bp, Homo sapien
tgaactgtcgctcattcctcagcat

SEQ ID NO: 1283197 - DNA, 25 bp, Homo sapien
ttatgaggtctttgcactcttcatt

SEQ ID NO: 1283198 - DNA, 25 bp, Homo sapien
attttatgaggtctttgcactcttc

SEQ ID NO: 1283199 - DNA, 25 bp, Homo sapien
agattttatgaggtctttgcactct

SEQ ID NO: 1283200 - DNA, 25 bp, Homo sapien
atgaggtctttgcactcttcatttt

SEQ ID NO: 1283201 - DNA, 25 bp, Homo sapien
ggaagcaggccagttgagttacaaa

SEQ ID NO: 1283202 - DNA, 25 bp, Homo sapien
cagttgagttacaaaacatttctct

SEQ ID NO: 1283203 - DNA, 25 bp, Homo sapien
gccagctggggatgcaatttctcgt

SEQ ID NO: 1283204 - DNA, 25 bp, Homo sapien
agctggggatgcaatttctcgttga

SEQ ID NO: 1283205 - DNA, 25 bp, Homo sapien
gattacaagcgccaagtaacatgcc

SEQ ID NO: 1283206 - DNA, 25 bp, Homo sapien
tacaagcgccaagtaacatgccagc

SEQ ID NO: 1283207 - DNA, 25 bp, Homo sapien
agcgccaagtaacatgccagctaat

SEQ ID NO: 1283208 - DNA, 25 bp, Homo sapien
gggattacaagcgccaagtaacatg

SEQ ID NO: 1283209 - DNA, 25 bp, Homo sapien
aaaacaatatgtgcgtatacagcct

SEQ ID NO: 1283210 - DNA, 25 bp, Homo sapien
ctaaaacaatatgtgcgtatacagc

SEQ ID NO: 1283211 - DNA, 25 bp, Homo sapien
aaacaatatgtgcgtatacagcctg

SEQ ID NO: 1283212 - DNA, 25 bp, Homo sapien
taaaacaatatgtgcgtatacagcc

SEQ ID NO: 1283213 - DNA, 25 bp, Homo sapien
gaggattctctgtctacaaccagag

SEQ ID NO: 1283214 - DNA, 25 bp, Homo sapien
atgagaggattctctgtctacaacc

SEQ ID NO: 1283215 - DNA, 25 bp, Homo sapien
gatgattccagtactttctcagcct

SEQ ID NO: 1283216 - DNA, 25 bp, Homo sapien
tcagcctcctcaacttgaacatctt

SEQ ID NO: 1283217 - DNA, 25 bp, Homo sapien
agcctcctcaacttgaacatcttca

SEQ ID NO: 1283218 - DNA, 25 bp, Homo sapien
ctgggggcagatgattccagtactt

SEQ ID NO: 1283219 - DNA, 25 bp, Homo sapien
tgggctgagcttctggaaaagttgc

SEQ ID NO: 1283220 - DNA, 25 bp, Homo sapien
gctcctgcaagatcctcgatgatgt

SEQ ID NO: 1283221 - DNA, 25 bp, Homo sapien
tcctgcaagatcctcgatgatgttc

SEQ ID NO: 1283222 - DNA, 25 bp, Homo sapien
gcaagatcctcgatgatgttccatt

SEQ ID NO: 1283223 - DNA, 25 bp, Homo sapien
agggctcctgcaagatcctcgatga

SEQ ID NO: 1283224 - DNA, 25 bp, Homo sapien
tgaactgtcgctcattcctcagcat

SEQ ID NO: 1283225 - DNA, 25 bp, Homo sapien
cagttgagttacaaaacatttctct

SEQ ID NO: 1283226 - DNA, 25 bp, Homo sapien
gccagctggggatgcaatttctcgt

SEQ ID NO: 1283227 - DNA, 25 bp, Homo sapien
agctggggatgcaatttctcgttga

SEQ ID NO: 1283228 - DNA, 25 bp, Homo sapien
ggaagcaggccagttgagttacaaa

SEQ ID NO: 1283229 - DNA, 25 bp, Homo sapien
agagagtctagcctgagaggagtga

SEQ ID NO: 1283230 - DNA, 25 bp, Homo sapien
tagctaagacaagccaatgaaaagg

SEQ ID NO: 1283231 - DNA, 25 bp, Homo sapien
cttattaatagctaagacaagccaa

SEQ ID NO: 1283232 - DNA, 25 bp, Homo sapien
gtgggaggatcgtctcagccgatcc

SEQ ID NO: 1283233 - DNA, 25 bp, Homo sapien
gaggattctctgtctacaaccagag

SEQ ID NO: 1283234 - DNA, 25 bp, Homo sapien
atgagaggattctctgtctacaacc

SEQ ID NO: 1283235 - DNA, 25 bp, Homo sapien
gatgattccagtactttctcagcct

SEQ ID NO: 1283236 - DNA, 25 bp, Homo sapien
tcagcctcctcaacttgaacatctt

SEQ ID NO: 1283237 - DNA, 25 bp, Homo sapien
ctgggggcagatgattccagtactt

SEQ ID NO: 1283238 - DNA, 25 bp, Homo sapien
agcctcctcaacttgaacatcttca

SEQ ID NO: 1283239 - DNA, 25 bp, Homo sapien
tgggctgagcttctggaaaagttgc

SEQ ID NO: 1283240 - DNA, 25 bp, Homo sapien
tgaactgtcgctcattcctcagcat

SEQ ID NO: 1283241 - DNA, 25 bp, Homo sapien
ttattagtatgacaggcagcatcaa

SEQ ID NO: 1283242 - DNA, 25 bp, Homo sapien
tttattagtatgacaggcagcatca

SEQ ID NO: 1283243 - DNA, 25 bp, Homo sapien
tcctagaagtacaggaaggatgaaa

SEQ ID NO: 1283244 - DNA, 25 bp, Homo sapien
ctagaagtacaggaaggatgaaatt

SEQ ID NO: 1283245 - DNA, 25 bp, Homo sapien
tttcctagaagtacaggaaggatga

SEQ ID NO: 1283246 - DNA, 25 bp, Homo sapien
gaagtacaggaaggatgaaattatt

SEQ ID NO: 1283247 - DNA, 25 bp, Homo sapien
gcgcaatttctcgttgatttctaaa

SEQ ID NO: 1283248 - DNA, 25 bp, Homo sapien
tatttcttctgtcggttggccagga

SEQ ID NO: 1283249 - DNA, 25 bp, Homo sapien
cttctcgctggaccaagggccagct

SEQ ID NO: 1283250 - DNA, 25 bp, Homo sapien
cgttgatttctaaaatgttcgtctc

SEQ ID NO: 1283251 - DNA, 25 bp, Homo sapien
cagactctgataagagtgaggtaga

SEQ ID NO: 1283252 - DNA, 25 bp, Homo sapien
tgtggccagcgtgccaggtaaccgt

SEQ ID NO: 1283253 - DNA, 25 bp, Homo sapien
cgtatcaacggctttaagtaaatgt

SEQ ID NO: 1283254 - DNA, 25 bp, Homo sapien
taagacgtatcaacggctttaagta

SEQ ID NO: 1283255 - DNA, 25 bp, Homo sapien
gtcctccaatgacactgtaaggaaa

SEQ ID NO: 1283256 - DNA, 25 bp, Homo sapien
tgacactgtaaggaaaccgctttaa

SEQ ID NO: 1283257 - DNA, 25 bp, Homo sapien
ggttcacagagttacatggcttact

SEQ ID NO: 1283258 - DNA, 25 bp, Homo sapien
acagagttacatggcttacttgagg

SEQ ID NO: 1283259 - DNA, 25 bp, Homo sapien
catggcttacttgaggtcacacggg

SEQ ID NO: 1283260 - DNA, 25 bp, Homo sapien
aactgcaggttcacagagttacatg

SEQ ID NO: 1283261 - DNA, 25 bp, Homo sapien
gtctgtctctgtcagcgccactcgt

SEQ ID NO: 1283262 - DNA, 25 bp, Homo sapien
aatcctgtggtaatgctgttatccg

SEQ ID NO: 1283263 - DNA, 25 bp, Homo sapien
tatttactagttgttcattgaccaa

SEQ ID NO: 1283264 - DNA, 25 bp, Homo sapien
cataggatccatataattcagtaaa

SEQ ID NO: 1283265 - DNA, 25 bp, Homo sapien
cttgtcctgctgaaccatctccatg

SEQ ID NO: 1283266 - DNA, 25 bp, Homo sapien
ccatcagtgattcgggctccttcca

SEQ ID NO: 1283267 - DNA, 25 bp, Homo sapien
aattccatcagtgattcgggctcct

SEQ ID NO: 1283268 - DNA, 25 bp, Homo sapien
cagtgattcgggctccttccaaggc

SEQ ID NO: 1283269 - DNA, 25 bp, Homo sapien
gatctagtcaacacaactgtcctga

SEQ ID NO: 1283270 - DNA, 25 bp, Homo sapien
actgtcctgaatgtgaaagaacttg

SEQ ID NO: 1283271 - DNA, 25 bp, Homo sapien
aatagatttataagacttccttact

SEQ ID NO: 1283272 - DNA, 25 bp, Homo sapien
cttgttaggtggctaaaatagattt

SEQ ID NO: 1283273 - DNA, 25 bp, Homo sapien
tgaattcttagcagtacgattcgtt

SEQ ID NO: 1283274 - DNA, 25 bp, Homo sapien
tacgattcgttttcttgtaaggtga

SEQ ID NO: 1283275 - DNA, 25 bp, Homo sapien
cgattcgttttcttgtaaggtgagc

SEQ ID NO: 1283276 - DNA, 25 bp, Homo sapien
gcagtacgattcgttttcttgtaag

SEQ ID NO: 1283277 - DNA, 25 bp, Homo sapien
ccgaagttggagtgtcactgcgaca

SEQ ID NO: 1283278 - DNA, 25 bp, Homo sapien
gacaggcatgtgtcccgaagggctc

SEQ ID NO: 1283279 - DNA, 25 bp, Homo sapien
ggctcgtgtctctgctatactcaaa

SEQ ID NO: 1283280 - DNA, 25 bp, Homo sapien
caaagtttaaatggagcccagcaag

SEQ ID NO: 1283281 - DNA, 25 bp, Homo sapien
ctggtgattatagatcacggcaatc

SEQ ID NO: 1283282 - DNA, 25 bp, Homo sapien
gattatagatcacggcaatcttgaa

SEQ ID NO: 1283283 - DNA, 25 bp, Homo sapien
tatagatcacggcaatcttgaactt

SEQ ID NO: 1283284 - DNA, 25 bp, Homo sapien
agtgcactggtgattatagatcacg

SEQ ID NO: 1283285 - DNA, 25 bp, Homo sapien
gctgtgaacagctttgtacaggttt

SEQ ID NO: 1283286 - DNA, 25 bp, Homo sapien
ccagataatattccactatatggtt

SEQ ID NO: 1283287 - DNA, 25 bp, Homo sapien
caactcatggtggtttaagatgttt

SEQ ID NO: 1283288 - DNA, 25 bp, Homo sapien
caggtttttgagtgaacatctgttt

SEQ ID NO: 1283289 - DNA, 25 bp, Homo sapien
tagttctcccattatgtggattatc

SEQ ID NO: 1283290 - DNA, 25 bp, Homo sapien
aatgtggttgtcgtttattgctcag

SEQ ID NO: 1283291 - DNA, 25 bp, Homo sapien
gacctgtgtcaaacatacaatttgg

SEQ ID NO: 1283292 - DNA, 25 bp, Homo sapien
tacactctaggtactagacctgtgt

SEQ ID NO: 1283293 - DNA, 25 bp, Homo sapien
caggccctttagagttgaagtcgag

SEQ ID NO: 1283294 - DNA, 25 bp, Homo sapien
tctaaggctggagcaaacttcctcc

SEQ ID NO: 1283295 - DNA, 25 bp, Homo sapien
gagttgaagtcgagacctctctgag

SEQ ID NO: 1283296 - DNA, 25 bp, Homo sapien
taaggctggagcaaacttcctccat

SEQ ID NO: 1283297 - DNA, 25 bp, Homo sapien
taattacggctcatgtccaccgcca

SEQ ID NO: 1283298 - DNA, 25 bp, Homo sapien
tacttaggtattatcctgttcctga

SEQ ID NO: 1283299 - DNA, 25 bp, Homo sapien
caccgccatgcgatcatatttaaat

SEQ ID NO: 1283300 - DNA, 25 bp, Homo sapien
gataaaggagagttcagtgtcaata

SEQ ID NO: 1283301 - DNA, 25 bp, Homo sapien
caatatttaaacttagcagccacca

SEQ ID NO: 1283302 - DNA, 25 bp, Homo sapien
tattgattgatgttcctgatggcta

SEQ ID NO: 1283303 - DNA, 25 bp, Homo sapien
tcccaggcaccagatatgtactggt

SEQ ID NO: 1283304 - DNA, 25 bp, Homo sapien
tgtacaggacatgtactggtatctc

SEQ ID NO: 1283305 - DNA, 25 bp, Homo sapien
taggattattaacatacacagtcat

SEQ ID NO: 1283306 - DNA, 25 bp, Homo sapien
tctaggattattaacatacacagtc

SEQ ID NO: 1283307 - DNA, 25 bp, Homo sapien
caaaagactacttctattgagctta

SEQ ID NO: 1283308 - DNA, 25 bp, Homo sapien
atacaaaagactacttctattgagc

SEQ ID NO: 1283309 - DNA, 25 bp, Homo sapien
caaagctactgaggagatgtcactc

SEQ ID NO: 1283310 - DNA, 25 bp, Homo sapien
ccacatagactttgagagctgcacc

SEQ ID NO: 1283311 - DNA, 25 bp, Homo sapien
gactgcctgttgtacactgctgaaa

SEQ ID NO: 1283312 - DNA, 25 bp, Homo sapien
tgataagtatgcacatggaacccca

SEQ ID NO: 1283313 - DNA, 25 bp, Homo sapien
cttgcagtaatttagtatgcagcaa

SEQ ID NO: 1283314 - DNA, 25 bp, Homo sapien
tacgccgctaatgcttgcagtaatt

SEQ ID NO: 1283315 - DNA, 25 bp, Homo sapien
taatgcttgcagtaatttagtatgc

SEQ ID NO: 1283316 - DNA, 25 bp, Homo sapien
tattttacgccgctaatgcttgcag

SEQ ID NO: 1283317 - DNA, 25 bp, Homo sapien
tctattaaggtgcatagctacacac

SEQ ID NO: 1283318 - DNA, 25 bp, Homo sapien
tcaggtccctctaggaaggcttaga

SEQ ID NO: 1283319 - DNA, 25 bp, Homo sapien
cctgtatggttgaattgggtctacc

SEQ ID NO: 1283320 - DNA, 25 bp, Homo sapien
tcataagtcatgttatcaggtccct

SEQ ID NO: 1283321 - DNA, 25 bp, Homo sapien
tcagtttagcattcttcagagccag

SEQ ID NO: 1283322 - DNA, 25 bp, Homo sapien
cagtcacccacataaatggcttcag

SEQ ID NO: 1283323 - DNA, 25 bp, Homo sapien
gatttacagcatacacttgtggcag

SEQ ID NO: 1283324 - DNA, 25 bp, Homo sapien
tgggcgccacaggacttttaaacgc

SEQ ID NO: 1283325 - DNA, 25 bp, Homo sapien
ttgatccataggctcacatttgatc

SEQ ID NO: 1283326 - DNA, 25 bp, Homo sapien
tccataggctcacatttgatcccaa

SEQ ID NO: 1283327 - DNA, 25 bp, Homo sapien
cataggctcacatttgatcccaact

SEQ ID NO: 1283328 - DNA, 25 bp, Homo sapien
aggctcacatttgatcccaactggc

SEQ ID NO: 1283329 - DNA, 25 bp, Homo sapien
ggaacaaactggtgacacacagaac

SEQ ID NO: 1283330 - DNA, 25 bp, Homo sapien
aaaaacatttggagtgcgatagaag

SEQ ID NO: 1283331 - DNA, 25 bp, Homo sapien
gggccggtcccaggctgtcgatcct

SEQ ID NO: 1283332 - DNA, 25 bp, Homo sapien
gagtgcgatagaagccatacccaaa

SEQ ID NO: 1283333 - DNA, 25 bp, Homo sapien
gtgcccaagatgtctttcaccaagc

SEQ ID NO: 1283334 - DNA, 25 bp, Homo sapien
tacaacatactagtagggaaaattg

SEQ ID NO: 1283335 - DNA, 25 bp, Homo sapien
tgtctttcaccaagcgaaagaataa

SEQ ID NO: 1283336 - DNA, 25 bp, Homo sapien
aggaggacgcgtgaaatggtgaagc

SEQ ID NO: 1283337 - DNA, 25 bp, Homo sapien
ttcaaggcctgtgccatttacctct

SEQ ID NO: 1283338 - DNA, 25 bp, Homo sapien
agatttcaaggcctgtgccatttac

SEQ ID NO: 1283339 - DNA, 25 bp, Homo sapien
agttggagatttcaaggcctgtgcc

SEQ ID NO: 1283340 - DNA, 25 bp, Homo sapien
aggcctgtgccatttacctctaacc

SEQ ID NO: 1283341 - DNA, 25 bp, Homo sapien
gcagatcggttaaggagaagcagcc

SEQ ID NO: 1283342 - DNA, 25 bp, Homo sapien
tctggtgcccacaagaatgagatga

SEQ ID NO: 1283343 - DNA, 25 bp, Homo sapien
caggtaaaaaccatctgggtgggca

SEQ ID NO: 1283344 - DNA, 25 bp, Homo sapien
ccattaacaggaacacgctaagtag

SEQ ID NO: 1283345 - DNA, 25 bp, Homo sapien
tccactgtggcccataaattctaag

SEQ ID NO: 1283346 - DNA, 25 bp, Homo sapien
gctcagtgaaagaagacgtccacca

SEQ ID NO: 1283347 - DNA, 25 bp, Homo sapien
ctgtggcccataaattctaagtcta

SEQ ID NO: 1283348 - DNA, 25 bp, Homo sapien
ccataaattctaagtctacaggatt

SEQ ID NO: 1283349 - DNA, 25 bp, Homo sapien
cctgcaatgtttagggaccttgaca

SEQ ID NO: 1283350 - DNA, 25 bp, Homo sapien
ggccctgcaatgtttagggaccttg

SEQ ID NO: 1283351 - DNA, 25 bp, Homo sapien
gccctgcaatgtttagggaccttga

SEQ ID NO: 1283352 - DNA, 25 bp, Homo sapien
tgcaatgtttagggaccttgacatc

SEQ ID NO: 1283353 - DNA, 25 bp, Homo sapien
ctgttggatctggcagctcttgatg

SEQ ID NO: 1283354 - DNA, 25 bp, Homo sapien
ttggatctggcagctcttgatgtca

SEQ ID NO: 1283355 - DNA, 25 bp, Homo sapien
gatctggcagctcttgatgtcagcc

SEQ ID NO: 1283356 - DNA, 25 bp, Homo sapien
atctggcagctcttgatgtcagccc

SEQ ID NO: 1283357 - DNA, 25 bp, Homo sapien
agagcacacagtgcttaagctccag

SEQ ID NO: 1283358 - DNA, 25 bp, Homo sapien
gagtcagcggcatccccagtgtgga

SEQ ID NO: 1283359 - DNA, 25 bp, Homo sapien
agtgcttaagctccaggcaccctca

SEQ ID NO: 1283360 - DNA, 25 bp, Homo sapien
caattggctggtgagagcccgggtc

SEQ ID NO: 1283361 - DNA, 25 bp, Homo sapien
catttgaggcttgccccgctagtca

SEQ ID NO: 1283362 - DNA, 25 bp, Homo sapien
ggtcagtgtcctctacaggatatag

SEQ ID NO: 1283363 - DNA, 25 bp, Homo sapien
tctcaggtccgcagagggaacggat

SEQ ID NO: 1283364 - DNA, 25 bp, Homo sapien
cgaaatcctgcggttcatttgaggc

SEQ ID NO: 1283365 - DNA, 25 bp, Homo sapien
cttcgcgtaacttcccattcacagg

SEQ ID NO: 1283366 - DNA, 25 bp, Homo sapien
gcgctcgctcagaagctcgggcagc

SEQ ID NO: 1283367 - DNA, 25 bp, Homo sapien
gcaccgcgctcgctcagaagctcgg

SEQ ID NO: 1283368 - DNA, 25 bp, Homo sapien
acttcgcgtaacttcccattcacag

SEQ ID NO: 1283369 - DNA, 25 bp, Homo sapien
ggccatactatgttggaaccaccaa

SEQ ID NO: 1283370 - DNA, 25 bp, Homo sapien
ttttcaacattctttgtaaacagga

SEQ ID NO: 1283371 - DNA, 25 bp, Homo sapien
tcaacattctttgtaaacaggaatc

SEQ ID NO: 1283372 - DNA, 25 bp, Homo sapien
ttgagtataaaacaatggccatact

SEQ ID NO: 1283373 - DNA, 25 bp, Homo sapien
tacattcataggttggccataggat

SEQ ID NO: 1283374 - DNA, 25 bp, Homo sapien
taaaagaagagcctctggcctacat

SEQ ID NO: 1283375 - DNA, 25 bp, Homo sapien
tgttatgccaattatccagagtcct

SEQ ID NO: 1283376 - DNA, 25 bp, Homo sapien
tagtaaagagctagggacattttcc

SEQ ID NO: 1283377 - DNA, 25 bp, Homo sapien
agtccgccagatgggatgctggaaa

SEQ ID NO: 1283378 - DNA, 25 bp, Homo sapien
caccaggatagaagacccagagtag

SEQ ID NO: 1283379 - DNA, 25 bp, Homo sapien
ggcattcttacaggcattaccttat

SEQ ID NO: 1283380 - DNA, 25 bp, Homo sapien
aaagagtaacttgtggcaggcgtga

SEQ ID NO: 1283381 - DNA, 25 bp, Homo sapien
gcatctggtttctgccgctccatct

SEQ ID NO: 1283382 - DNA, 25 bp, Homo sapien
tctgggcatctggtttctgccgctc

SEQ ID NO: 1283383 - DNA, 25 bp, Homo sapien
tcaacttctctgacagcgccatctt

SEQ ID NO: 1283384 - DNA, 25 bp, Homo sapien
gctgtgccgtgtacccatcaacttc

SEQ ID NO: 1283385 - DNA, 25 bp, Homo sapien
aacagctttcctggtgtcacgactg

SEQ ID NO: 1283386 - DNA, 25 bp, Homo sapien
catgggagaatatggaacagctttc

SEQ ID NO: 1283387 - DNA, 25 bp, Homo sapien
caagaatcccggacgtggataccac

SEQ ID NO: 1283388 - DNA, 25 bp, Homo sapien
gggcacaacggcagtcacaagaatc

SEQ ID NO: 1283389 - DNA, 25 bp, Homo sapien
ggaggccctcgtcatgctcctgctg

SEQ ID NO: 1283390 - DNA, 25 bp, Homo sapien
ccttctcagccttccgccgggccag

SEQ ID NO: 1283391 - DNA, 25 bp, Homo sapien
tgctgcttctcgctctcggccagga

SEQ ID NO: 1283392 - DNA, 25 bp, Homo sapien
gggcagcaatctcctcactcagctg

SEQ ID NO: 1283393 - DNA, 25 bp, Homo sapien
cacgccagggccgtgaaagtgccaa

SEQ ID NO: 1283394 - DNA, 25 bp, Homo sapien
acgccagggccgtgaaagtgccaag

SEQ ID NO: 1283395 - DNA, 25 bp, Homo sapien
gtgaccaggtaaatacaagggactg

SEQ ID NO: 1283396 - DNA, 25 bp, Homo sapien
aggtaaatacaagggactgataagg

SEQ ID NO: 1283397 - DNA, 25 bp, Homo sapien
gccatggggattctaaggacagtga

SEQ ID NO: 1283398 - DNA, 25 bp, Homo sapien
aaaggactacaggatgcagggtgca

SEQ ID NO: 1283399 - DNA, 25 bp, Homo sapien
acagggcacggtgagtcacagggcc

SEQ ID NO: 1283400 - DNA, 25 bp, Homo sapien
tgcggagagacaagtaactgtcagc

SEQ ID NO: 1283401 - DNA, 25 bp, Homo sapien
ggtgcctgcctcagcagttgtccct

SEQ ID NO: 1283402 - DNA, 25 bp, Homo sapien
gcagagcccacaggcaaatagcagc

SEQ ID NO: 1283403 - DNA, 25 bp, Homo sapien
gggacattaatgaggccaagccagg

SEQ ID NO: 1283404 - DNA, 25 bp, Homo sapien
caagggggaggtcacagttcagatc

SEQ ID NO: 1283405 - DNA, 25 bp, Homo sapien
caagccaccccttctttaagagctt

SEQ ID NO: 1283406 - DNA, 25 bp, Homo sapien
gccaagccaccccttctttaagagc

SEQ ID NO: 1283407 - DNA, 25 bp, Homo sapien
tctgcatcaggattaccagggctgg

SEQ ID NO: 1283408 - DNA, 25 bp, Homo sapien
cccctgatggagaagcgtgataacc

SEQ ID NO: 1283409 - DNA, 25 bp, Homo sapien
tagcatcaccagtaagcgaccaaga

SEQ ID NO: 1283410 - DNA, 25 bp, Homo sapien
taagccctctatgcagatggtctca

SEQ ID NO: 1283411 - DNA, 25 bp, Homo sapien
cctgcgtagctattatttgctgccg

SEQ ID NO: 1283412 - DNA, 25 bp, Homo sapien
tctagactggctttctcctgcgtag

SEQ ID NO: 1283413 - DNA, 25 bp, Homo sapien
catcagctccttgtctagactggct

SEQ ID NO: 1283414 - DNA, 25 bp, Homo sapien
gctattatttgctgccgcaggcccg

SEQ ID NO: 1283415 - DNA, 25 bp, Homo sapien
taatggaaacgactacagggaatgg

SEQ ID NO: 1283416 - DNA, 25 bp, Homo sapien
taacaggcctgatgaccgatgaaca

SEQ ID NO: 1283417 - DNA, 25 bp, Homo sapien
taatttccatgacccaagtaggtgc

SEQ ID NO: 1283418 - DNA, 25 bp, Homo sapien
aaacatataacaaccctaggccagg

SEQ ID NO: 1283419 - DNA, 25 bp, Homo sapien
ctgctcccggcgggcctcaagctgg

SEQ ID NO: 1283420 - DNA, 25 bp, Homo sapien
agctgctcccggcgggcctcaagct

SEQ ID NO: 1283421 - DNA, 25 bp, Homo sapien
cagctgctcccggcgggcctcaagc

SEQ ID NO: 1283422 - DNA, 25 bp, Homo sapien
gctgctcccggcgggcctcaagctg

SEQ ID NO: 1283423 - DNA, 25 bp, Homo sapien
ccaggaaactgtggatctcagggag

SEQ ID NO: 1283424 - DNA, 25 bp, Homo sapien
tgaggctgttcatggcgtggcccca

SEQ ID NO: 1283425 - DNA, 25 bp, Homo sapien
cccaaggccttactgcaggtgtgtg

SEQ ID NO: 1283426 - DNA, 25 bp, Homo sapien
cacagctaggacgagttggcaagcc

SEQ ID NO: 1283427 - DNA, 25 bp, Homo sapien
ccagctcctgctcccgcctgctcag

SEQ ID NO: 1283428 - DNA, 25 bp, Homo sapien
tccagctcctgctcccgcctgctca

SEQ ID NO: 1283429 - DNA, 25 bp, Homo sapien
ccacccagagactgagtagcactcc

SEQ ID NO: 1283430 - DNA, 25 bp, Homo sapien
gactgagtagcactcccagcatccc

SEQ ID NO: 1283431 - DNA, 25 bp, Homo sapien
acccagagactgagtagcactccca

SEQ ID NO: 1283432 - DNA, 25 bp, Homo sapien
cccagagactgagtagcactcccag

SEQ ID NO: 1283433 - DNA, 25 bp, Homo sapien
tgggcaagtcatgaccttctctaga

SEQ ID NO: 1283434 - DNA, 25 bp, Homo sapien
tgaccttctctagatctgcaatgca

SEQ ID NO: 1283435 - DNA, 25 bp, Homo sapien
gggtctgccctgatgtgctatatgt

SEQ ID NO: 1283436 - DNA, 25 bp, Homo sapien
gcacgtgtgtacaaaaaccagggcc

SEQ ID NO: 1283437 - DNA, 25 bp, Homo sapien
gacttaacccaggactggatgcagg

SEQ ID NO: 1283438 - DNA, 25 bp, Homo sapien
cagtgcctgtgacttaacccaggac

SEQ ID NO: 1283439 - DNA, 25 bp, Homo sapien
cccggctagccccatgttataaatg

SEQ ID NO: 1283440 - DNA, 25 bp, Homo sapien
ggatttaacccagaagcaggctcca

SEQ ID NO: 1283441 - DNA, 25 bp, Homo sapien
gggagctgttgctccagcgcctcct

SEQ ID NO: 1283442 - DNA, 25 bp, Homo sapien
tgctcctgcagccaactgagctcat

SEQ ID NO: 1283443 - DNA, 25 bp, Homo sapien
ccaactgagctcatggtgcagtgtg

SEQ ID NO: 1283444 - DNA, 25 bp, Homo sapien
gtgcagtgtggggagctgttgctcc

SEQ ID NO: 1283445 - DNA, 25 bp, Homo sapien
agccctccaggccctgccgtgccac

SEQ ID NO: 1283446 - DNA, 25 bp, Homo sapien
tcatagggagccctccaggccctgc

SEQ ID NO: 1283447 - DNA, 25 bp, Homo sapien
gggagccctccaggccctgccgtgc

SEQ ID NO: 1283448 - DNA, 25 bp, Homo sapien
agggagccctccaggccctgccgtg

SEQ ID NO: 1283449 - DNA, 25 bp, Homo sapien
cggccctgcagcatggccttttctt

SEQ ID NO: 1283450 - DNA, 25 bp, Homo sapien
ctctgccggcgccactgtggcctcc

SEQ ID NO: 1283451 - DNA, 25 bp, Homo sapien
tgccgctgccggccctgcagcatgg

SEQ ID NO: 1283452 - DNA, 25 bp, Homo sapien
ccagccactcctgctctgccggcgc

SEQ ID NO: 1283453 - DNA, 25 bp, Homo sapien
tctgccctcagcttggtcacggaga

SEQ ID NO: 1283454 - DNA, 25 bp, Homo sapien
cacggagagctcgagctccatgcgg

SEQ ID NO: 1283455 - DNA, 25 bp, Homo sapien
gcttggtcacggagagctcgagctc

SEQ ID NO: 1283456 - DNA, 25 bp, Homo sapien
gagagctcgagctccatgcggccag

SEQ ID NO: 1283457 - DNA, 25 bp, Homo sapien
gaaagcctgctgcttatggagccat

SEQ ID NO: 1283458 - DNA, 25 bp, Homo sapien
cagagttcagaggatcccctgagta

SEQ ID NO: 1283459 - DNA, 25 bp, Homo sapien
taaggtctagggatagcactgctca

SEQ ID NO: 1283460 - DNA, 25 bp, Homo sapien
taaaagccatgcaccgcaaagctgt

SEQ ID NO: 1283461 - DNA, 25 bp, Homo sapien
cttggtcagcgcctcggccacctcg

SEQ ID NO: 1283462 - DNA, 25 bp, Homo sapien
gcgtggcgcggctcagcgcctccct

SEQ ID NO: 1283463 - DNA, 25 bp, Homo sapien
gctccttggccaggactgagcgctt

SEQ ID NO: 1283464 - DNA, 25 bp, Homo sapien
tcccgttgcagcgtggcgcggctca

SEQ ID NO: 1283465 - DNA, 25 bp, Homo sapien
ttccagctgctctagttgtctatgg

SEQ ID NO: 1283466 - DNA, 25 bp, Homo sapien
tcccggcgaacccgtgcgccattct

SEQ ID NO: 1283467 - DNA, 25 bp, Homo sapien
cggcgaacccgtgcgccattctgca

SEQ ID NO: 1283468 - DNA, 25 bp, Homo sapien
gctcccggcgaacccgtgcgccatt

SEQ ID NO: 1283469 - DNA, 25 bp, Homo sapien
ccggcgaacccgtgcgccattctgc

SEQ ID NO: 1283470 - DNA, 25 bp, Homo sapien
gaggtgctggcgtgatctctaagca

SEQ ID NO: 1283471 - DNA, 25 bp, Homo sapien
ccagcccgcccacttagagtggatg

SEQ ID NO: 1283472 - DNA, 25 bp, Homo sapien
cccacttagagtggatggaggtgct

SEQ ID NO: 1283473 - DNA, 25 bp, Homo sapien
ggtgctggcgtgatctctaagcact

SEQ ID NO: 1283474 - DNA, 25 bp, Homo sapien
cgagtagccggaactacaggcactc

SEQ ID NO: 1283475 - DNA, 25 bp, Homo sapien
cggaactacaggcactcgccacgat

SEQ ID NO: 1283476 - DNA, 25 bp, Homo sapien
gagtagccggaactacaggcactcg

SEQ ID NO: 1283477 - DNA, 25 bp, Homo sapien
tagccggaactacaggcactcgcca

SEQ ID NO: 1283478 - DNA, 25 bp, Homo sapien
tggccagtgcctgcgggacaagacc

SEQ ID NO: 1283479 - DNA, 25 bp, Homo sapien
ctgcgggacaagaccgacggcgcca

SEQ ID NO: 1283480 - DNA, 25 bp, Homo sapien
ggacaagaccgacggcgccacgcag

SEQ ID NO: 1283481 - DNA, 25 bp, Homo sapien
cggcgccacgcaggtgttcctctag

SEQ ID NO: 1283482 - DNA, 25 bp, Homo sapien
acctactctcttctggttccaggga

SEQ ID NO: 1283483 - DNA, 25 bp, Homo sapien
atcacagagtctagcgggggtcctt

SEQ ID NO: 1283484 - DNA, 25 bp, Homo sapien
ggttccagggatacacactagccta

SEQ ID NO: 1283485 - DNA, 25 bp, Homo sapien
gatcacagagtctagcgggggtcct

SEQ ID NO: 1283486 - DNA, 25 bp, Homo sapien
gctaggcggggtccagggcctggac

SEQ ID NO: 1283487 - DNA, 25 bp, Homo sapien
ggctctgtatgaccagggacctgtc

SEQ ID NO: 1283488 - DNA, 25 bp, Homo sapien
acactatttctcagggctctggctg

SEQ ID NO: 1283489 - DNA, 25 bp, Homo sapien
taggctgtgatttcccttgctagac

SEQ ID NO: 1283490 - DNA, 25 bp, Homo sapien
gggatgccagacaaactcccaggca

SEQ ID NO: 1283491 - DNA, 25 bp, Homo sapien
ggcaaaagtgcagggcggagagaat

SEQ ID NO: 1283492 - DNA, 25 bp, Homo sapien
caagcgagcgtggagtcttctgagc

SEQ ID NO: 1283493 - DNA, 25 bp, Homo sapien
gagaatcagggcaagcgagcgtgga

SEQ ID NO: 1283494 - DNA, 25 bp, Homo sapien
gctggcaaaagtgcagggcggagag

SEQ ID NO: 1283495 - DNA, 25 bp, Homo sapien
gttggacgcaggctgccgctctcag

SEQ ID NO: 1283496 - DNA, 25 bp, Homo sapien
ctgccgctctcagcgtcagacagga

SEQ ID NO: 1283497 - DNA, 25 bp, Homo sapien
ccgcaggctgcggtcggacgctgtt

SEQ ID NO: 1283498 - DNA, 25 bp, Homo sapien
ggtcggacgctgttggacgcaggct

SEQ ID NO: 1283499 - DNA, 25 bp, Homo sapien
ccgcctgctcctgtagccgcaggga

SEQ ID NO: 1283500 - DNA, 25 bp, Homo sapien
gcctgctcctgtagccgcagggatt

SEQ ID NO: 1283501 - DNA, 25 bp, Homo sapien
aggtcccttaggctccgctgtagcc

SEQ ID NO: 1283502 - DNA, 25 bp, Homo sapien
aggctccgctgtagcccctctccat

SEQ ID NO: 1283503 - DNA, 25 bp, Homo sapien
cagggcctcaagcttctcggtgagg

SEQ ID NO: 1283504 - DNA, 25 bp, Homo sapien
ttgtcgacctgatccttctccagat

SEQ ID NO: 1283505 - DNA, 25 bp, Homo sapien
ggtgaggtccttgtcgacctgatcc

SEQ ID NO: 1283506 - DNA, 25 bp, Homo sapien
aagcttctcggtgaggtccttgtcg

SEQ ID NO: 1283507 - DNA, 25 bp, Homo sapien
cttctgcagtgacgcctgcctcatg

SEQ ID NO: 1283508 - DNA, 25 bp, Homo sapien
ctgcagtgacgcctgcctcatgcag

SEQ ID NO: 1283509 - DNA, 25 bp, Homo sapien
cagtgacgcctgcctcatgcagcac

SEQ ID NO: 1283510 - DNA, 25 bp, Homo sapien
tgcagtgacgcctgcctcatgcagc

SEQ ID NO: 1283511 - DNA, 25 bp, Homo sapien
agggctggctcgacccggctctctg

SEQ ID NO: 1283512 - DNA, 25 bp, Homo sapien
ccagggctggctcgacccggctctc

SEQ ID NO: 1283513 - DNA, 25 bp, Homo sapien
tgctgggacaggtccttctcgtgga

SEQ ID NO: 1283514 - DNA, 25 bp, Homo sapien
gggacaggtccttctcgtggagcac

SEQ ID NO: 1283515 - DNA, 25 bp, Homo sapien
agtgcactggtttgacctcggctca

SEQ ID NO: 1283516 - DNA, 25 bp, Homo sapien
acgtccgcctctccggttcaagcga

SEQ ID NO: 1283517 - DNA, 25 bp, Homo sapien
ctggagtgcactggtttgacctcgg

SEQ ID NO: 1283518 - DNA, 25 bp, Homo sapien
ctgcaacgtccgcctctccggttca

SEQ ID NO: 1283519 - DNA, 25 bp, Homo sapien
ctactcatccacacagacagaaagc

SEQ ID NO: 1283520 - DNA, 25 bp, Homo sapien
tactcatccacacagacagaaagct

SEQ ID NO: 1283521 - DNA, 25 bp, Homo sapien
ccctctaagtttctgctaaaatgta

SEQ ID NO: 1283522 - DNA, 25 bp, Homo sapien
tggcatgcagaggccagctcactgc

SEQ ID NO: 1283523 - DNA, 25 bp, Homo sapien
gaggagtttgttctttacaaggtca

SEQ ID NO: 1283524 - DNA, 25 bp, Homo sapien
caaggtcagtcagaagctacaaggg

SEQ ID NO: 1283525 - DNA, 25 bp, Homo sapien
tgcggttcaggtagtcattcagcag

SEQ ID NO: 1283526 - DNA, 25 bp, Homo sapien
aaagatgcggttcaggtagtcattc

SEQ ID NO: 1283527 - DNA, 25 bp, Homo sapien
cggttcaggtagtcattcagcagct

SEQ ID NO: 1283528 - DNA, 25 bp, Homo sapien
gatgcggttcaggtagtcattcagc

SEQ ID NO: 1283529 - DNA, 25 bp, Homo sapien
gaggtcagcctacagctcttgcggg

SEQ ID NO: 1283530 - DNA, 25 bp, Homo sapien
agcatctgaggtcagcctacagctc

SEQ ID NO: 1283531 - DNA, 25 bp, Homo sapien
cctacagctcttgcgggagaaagac

SEQ ID NO: 1283532 - DNA, 25 bp, Homo sapien
tgcgggagaaagacacgccggcccc

SEQ ID NO: 1283533 - DNA, 25 bp, Homo sapien
gtctctcatgggcagccagtggtcc

SEQ ID NO: 1283534 - DNA, 25 bp, Homo sapien
tcgtctctcatgggcagccagtggt

SEQ ID NO: 1283535 - DNA, 25 bp, Homo sapien
ttcgtctctcatgggcagccagtgg

SEQ ID NO: 1283536 - DNA, 25 bp, Homo sapien
ccttcgtctctcatgggcagccagt

SEQ ID NO: 1283537 - DNA, 25 bp, Homo sapien
cactgatgtgtagctgtgctgtcca

SEQ ID NO: 1283538 - DNA, 25 bp, Homo sapien
acagcagccgtcatccacgtgaggt

SEQ ID NO: 1283539 - DNA, 25 bp, Homo sapien
ggttgtaagccatactgagtccagc

SEQ ID NO: 1283540 - DNA, 25 bp, Homo sapien
ccaaaatgtccaaagtgaggtgtcc

SEQ ID NO: 1283541 - DNA, 25 bp, Homo sapien
ggagcccaaggatggctcccccaag

SEQ ID NO: 1283542 - DNA, 25 bp, Homo sapien
gagcccaaggatggctcccccaagt

SEQ ID NO: 1283543 - DNA, 25 bp, Homo sapien
agtggactaaactggaccgcgaagg

SEQ ID NO: 1283544 - DNA, 25 bp, Homo sapien
tcgcagtggactaaactggaccgcg

SEQ ID NO: 1283545 - DNA, 25 bp, Homo sapien
tggactaaactggaccgcgaaggga

SEQ ID NO: 1283546 - DNA, 25 bp, Homo sapien
gtgccctcgcagtggactaaactgg

SEQ ID NO: 1283547 - DNA, 25 bp, Homo sapien
gccgcgacccggttcacaacatccg

SEQ ID NO: 1283548 - DNA, 25 bp, Homo sapien
ggttcacaacatccgcccaacctct

SEQ ID NO: 1283549 - DNA, 25 bp, Homo sapien
aacatccgcccaacctctcggctac

SEQ ID NO: 1283550 - DNA, 25 bp, Homo sapien
tcggccgccgcgacccggttcacaa

SEQ ID NO: 1283551 - DNA, 25 bp, Homo sapien
gactaggctgcagaggggtttcacc

SEQ ID NO: 1283552 - DNA, 25 bp, Homo sapien
ttcctaacacctgaccactaagtag

SEQ ID NO: 1283553 - DNA, 25 bp, Homo sapien
cactaagtagggaggcctctcaggg

SEQ ID NO: 1283554 - DNA, 25 bp, Homo sapien
cctctcagggggctagctgtgctag

SEQ ID NO: 1283555 - DNA, 25 bp, Homo sapien
tgtgggacctgaggcctggcccctc

SEQ ID NO: 1283556 - DNA, 25 bp, Homo sapien
ctgtgggacctgaggcctggcccct

SEQ ID NO: 1283557 - DNA, 25 bp, Homo sapien
tggtcatagtagcagtaagatccgt

SEQ ID NO: 1283558 - DNA, 25 bp, Homo sapien
taagatccgtagtaatagtagcagc

SEQ ID NO: 1283559 - DNA, 25 bp, Homo sapien
cctggcaaagttaaaggctctttca

SEQ ID NO: 1283560 - DNA, 25 bp, Homo sapien
aattagtaactgaggcctggcaaag

SEQ ID NO: 1283561 - DNA, 25 bp, Homo sapien
gagagtctcactagcataattgtgc

SEQ ID NO: 1283562 - DNA, 25 bp, Homo sapien
taaccgttcaagtgctcctatttcc

SEQ ID NO: 1283563 - DNA, 25 bp, Homo sapien
tgagaagtgcaaacattattggaaa

SEQ ID NO: 1283564 - DNA, 25 bp, Homo sapien
tatcttcctcttatatcgccggcct

SEQ ID NO: 1283565 - DNA, 25 bp, Homo sapien
gagtccagtcactggtcacctttcg

SEQ ID NO: 1283566 - DNA, 25 bp, Homo sapien
gtcactggtcacctttcgtatctcc

SEQ ID NO: 1283567 - DNA, 25 bp, Homo sapien
ccttgcagctgcgagtccagtcact

SEQ ID NO: 1283568 - DNA, 25 bp, Homo sapien
cagctgcgagtccagtcactggtca

SEQ ID NO: 1283569 - DNA, 25 bp, Homo sapien
ctggttggccaaacctgcctggtcc

SEQ ID NO: 1283570 - DNA, 25 bp, Homo sapien
ggttggccaaacctgcctggtccag

SEQ ID NO: 1283571 - DNA, 25 bp, Homo sapien
tcagagcctggttggccaaacctgc

SEQ ID NO: 1283572 - DNA, 25 bp, Homo sapien
tcactcagagcctggttggccaaac

SEQ ID NO: 1283573 - DNA, 25 bp, Homo sapien
tcacctgggccaggctggcactcct

SEQ ID NO: 1283574 - DNA, 25 bp, Homo sapien
ctgttctcagagcatggcattcacc

SEQ ID NO: 1283575 - DNA, 25 bp, Homo sapien
ggcattcacctgggccaggctggca

SEQ ID NO: 1283576 - DNA, 25 bp, Homo sapien
attcacctgggccaggctggcactc

SEQ ID NO: 1283577 - DNA, 25 bp, Homo sapien
acaggggatcagtaggcgctcgccc

SEQ ID NO: 1283578 - DNA, 25 bp, Homo sapien
aggggatcagtaggcgctcgcccag

SEQ ID NO: 1283579 - DNA, 25 bp, Homo sapien
tggggcacaggggatcagtaggcgc

SEQ ID NO: 1283580 - DNA, 25 bp, Homo sapien
ggcacaggggatcagtaggcgctcg

SEQ ID NO: 1283581 - DNA, 25 bp, Homo sapien
tccagccagatgagggcactctcca

SEQ ID NO: 1283582 - DNA, 25 bp, Homo sapien
ccagatgagggcactctccaggtct

SEQ ID NO: 1283583 - DNA, 25 bp, Homo sapien
gatgagggcactctccaggtcttgg

SEQ ID NO: 1283584 - DNA, 25 bp, Homo sapien
tcctccagccagatgagggcactct

SEQ ID NO: 1283585 - DNA, 25 bp, Homo sapien
ctccggatctctccaacagctgctc

SEQ ID NO: 1283586 - DNA, 25 bp, Homo sapien
gagaacctcttcttgtactggagaa

SEQ ID NO: 1283587 - DNA, 25 bp, Homo sapien
ctctccggatctctccaacagctgc

SEQ ID NO: 1283588 - DNA, 25 bp, Homo sapien
gctgctccagctccgagaacctctt

SEQ ID NO: 1283589 - DNA, 25 bp, Homo sapien
tgccgctgctggccctccaggtagg

SEQ ID NO: 1283590 - DNA, 25 bp, Homo sapien
ccctgcagccgctgcacaagctggg

SEQ ID NO: 1283591 - DNA, 25 bp, Homo sapien
caagctgggcctgccgctgctggcc

SEQ ID NO: 1283592 - DNA, 25 bp, Homo sapien
gctggccctccaggtaggcctgcag

SEQ ID NO: 1283593 - DNA, 25 bp, Homo sapien
cttgcgccactaggaggcctgctcc

SEQ ID NO: 1283594 - DNA, 25 bp, Homo sapien
gcctccgcaactccacgctctggag

SEQ ID NO: 1283595 - DNA, 25 bp, Homo sapien
tgcctccgcaactccacgctctgga

SEQ ID NO: 1283596 - DNA, 25 bp, Homo sapien
tccgcaactccacgctctggagtac

SEQ ID NO: 1283597 - DNA, 25 bp, Homo sapien
cagctcaccagattgcagccacaga

SEQ ID NO: 1283598 - DNA, 25 bp, Homo sapien
ctcaccagattgcagccacagagcc

SEQ ID NO: 1283599 - DNA, 25 bp, Homo sapien
ctccagctcaccagattgcagccac

SEQ ID NO: 1283600 - DNA, 25 bp, Homo sapien
agctcaccagattgcagccacagag

SEQ ID NO: 1283601 - DNA, 25 bp, Homo sapien
ggaagggccctgggtgagagtcctg

SEQ ID NO: 1283602 - DNA, 25 bp, Homo sapien
cagggaagggccctgggtgagagtc

SEQ ID NO: 1283603 - DNA, 25 bp, Homo sapien
gcagggaagggccctgggtgagagt

SEQ ID NO: 1283604 - DNA, 25 bp, Homo sapien
agggccctgggtgagagtcctgggc

SEQ ID NO: 1283605 - DNA, 25 bp, Homo sapien
aatgccttgtaggctgatagcctgg

SEQ ID NO: 1283606 - DNA, 25 bp, Homo sapien
tatttgtctcatgggctgagcgagg

SEQ ID NO: 1283607 - DNA, 25 bp, Homo sapien
ggagggacagctgcgccctgcaggc

SEQ ID NO: 1283608 - DNA, 25 bp, Homo sapien
ctgcaggccgctgcgtccgggcaga

SEQ ID NO: 1283609 - DNA, 25 bp, Homo sapien
gctgcgccctgcaggccgctgcgtc

SEQ ID NO: 1283610 - DNA, 25 bp, Homo sapien
tggagggacagctgcgccctgcagg

SEQ ID NO: 1283611 - DNA, 25 bp, Homo sapien
tgggcagcaggacgcggcggggcat

SEQ ID NO: 1283612 - DNA, 25 bp, Homo sapien
cggcccgcgacaacccgggcaggat

SEQ ID NO: 1283613 - DNA, 25 bp, Homo sapien
gacaacccgggcaggatgggcagca

SEQ ID NO: 1283614 - DNA, 25 bp, Homo sapien
gcctcttgtcgtgcccccggcccgc

SEQ ID NO: 1283615 - DNA, 25 bp, Homo sapien
taaagatcagaatatttgggctcaa

SEQ ID NO: 1283616 - DNA, 25 bp, Homo sapien
ttttgcaaccagttagtggccttcc

SEQ ID NO: 1283617 - DNA, 25 bp, Homo sapien
caccagcatgtgagttaattgataa

SEQ ID NO: 1283618 - DNA, 25 bp, Homo sapien
aattttctgccaaagcctacaggat

SEQ ID NO: 1283619 - DNA, 25 bp, Homo sapien
tttccggctccttgtacattaggga

SEQ ID NO: 1283620 - DNA, 25 bp, Homo sapien
acagccaataagtcgagagttgagg

SEQ ID NO: 1283621 - DNA, 25 bp, Homo sapien
ggcttactgcactcaccacttgctg

SEQ ID NO: 1283622 - DNA, 25 bp, Homo sapien
ttccagagagccaccaaactgaaca

SEQ ID NO: 1283623 - DNA, 25 bp, Homo sapien
cttcctgtactaagatgtcttttag

SEQ ID NO: 1283624 - DNA, 25 bp, Homo sapien
ttcttcctgtactaagatgtctttt

SEQ ID NO: 1283625 - DNA, 25 bp, Homo sapien
gtactaagatgtcttttagatacag

SEQ ID NO: 1283626 - DNA, 25 bp, Homo sapien
cctgtactaagatgtcttttagata

SEQ ID NO: 1283627 - DNA, 25 bp, Homo sapien
tagccatactcagtgggtaaaagcc

SEQ ID NO: 1283628 - DNA, 25 bp, Homo sapien
tcatgtatcaccaaacagggactgg

SEQ ID NO: 1283629 - DNA, 25 bp, Homo sapien
taatagaacatagggaacatgagcc

SEQ ID NO: 1283630 - DNA, 25 bp, Homo sapien
ggactggatccttgttaacacgacc

SEQ ID NO: 1283631 - DNA, 25 bp, Homo sapien
agtgcaatggataagcctcgccctg

SEQ ID NO: 1283632 - DNA, 25 bp, Homo sapien
tcaggggaaagcgcgaacgcagtcc

SEQ ID NO: 1283633 - DNA, 25 bp, Homo sapien
catccggagtgcaatggataagcct

SEQ ID NO: 1283634 - DNA, 25 bp, Homo sapien
cggagtgcaatggataagcctcgcc

SEQ ID NO: 1283635 - DNA, 25 bp, Homo sapien
acacacagctgggattctcacttcc

SEQ ID NO: 1283636 - DNA, 25 bp, Homo sapien
atccgcggtcctgaacccgctccca

SEQ ID NO: 1283637 - DNA, 25 bp, Homo sapien
ccgctcccagggcacgggaactcct

SEQ ID NO: 1283638 - DNA, 25 bp, Homo sapien
gggattctcacttccgatccgcggt

SEQ ID NO: 1283639 - DNA, 25 bp, Homo sapien
gctgtgggctgttaagacgctgaaa

SEQ ID NO: 1283640 - DNA, 25 bp, Homo sapien
gatggaggttttacctaggccctca

SEQ ID NO: 1283641 - DNA, 25 bp, Homo sapien
tactacagggtggtcacaggataac

SEQ ID NO: 1283642 - DNA, 25 bp, Homo sapien
caagctggctaaggctgagtggacc

SEQ ID NO: 1283643 - DNA, 25 bp, Homo sapien
tgaaggatgagcctttagaaacctc

SEQ ID NO: 1283644 - DNA, 25 bp, Homo sapien
gaacaattgaaagtccgaatctgca

SEQ ID NO: 1283645 - DNA, 25 bp, Homo sapien
tgagaaccgaattttacagccactc

SEQ ID NO: 1283646 - DNA, 25 bp, Homo sapien
gaatctgcaagttcatctctgagaa

SEQ ID NO: 1283647 - DNA, 25 bp, Homo sapien
tgtaacaggcatgtttactcagcat

SEQ ID NO: 1283648 - DNA, 25 bp, Homo sapien
taacttccccttgataagagagcac

SEQ ID NO: 1283649 - DNA, 25 bp, Homo sapien
catgcatgcagcaggatcccttcat

SEQ ID NO: 1283650 - DNA, 25 bp, Homo sapien
ccccttttgaagcatagggcctaat

SEQ ID NO: 1283651 - DNA, 25 bp, Homo sapien
aattgaacccgggtctcccgcatgg

SEQ ID NO: 1283652 - DNA, 25 bp, Homo sapien
tgaacccgggtctcccgcatgggag

SEQ ID NO: 1283653 - DNA, 25 bp, Homo sapien
gagaattctaccactaaaccaccaa

SEQ ID NO: 1283654 - DNA, 25 bp, Homo sapien
gtgcagtggccgggaattgaacccg

SEQ ID NO: 1283655 - DNA, 25 bp, Homo sapien
aaactgctgccttagaggttctgag

SEQ ID NO: 1283656 - DNA, 25 bp, Homo sapien
gatgaagaacgcttgccgtcaatgt

SEQ ID NO: 1283657 - DNA, 25 bp, Homo sapien
ggcaaaagagtaatgatcggtctcg

SEQ ID NO: 1283658 - DNA, 25 bp, Homo sapien
tgagaagccaagctaggtccaggct

SEQ ID NO: 1283659 - DNA, 25 bp, Homo sapien
tgcatctgagtcacagatgctaaaa

SEQ ID NO: 1283660 - DNA, 25 bp, Homo sapien
gagtcacagatgctaaaacttaacc

SEQ ID NO: 1283661 - DNA, 25 bp, Homo sapien
tcaacttctaaatctaccaaggcct

SEQ ID NO: 1283662 - DNA, 25 bp, Homo sapien
taccaaggcctcatatgcatctgag

SEQ ID NO: 1283663 - DNA, 25 bp, Homo sapien
ccacccagtctcgaatcagggactt

SEQ ID NO: 1283664 - DNA, 25 bp, Homo sapien
cccagtctcgaatcagggacttttc

SEQ ID NO: 1283665 - DNA, 25 bp, Homo sapien
tctcgaatcagggacttttctcgtg

SEQ ID NO: 1283666 - DNA, 25 bp, Homo sapien
tcagggacttttctcgtgtgaggcg

SEQ ID NO: 1283667 - DNA, 25 bp, Homo sapien
aataggcccaggcttagcgttccgc

SEQ ID NO: 1283668 - DNA, 25 bp, Homo sapien
caagaagactatggctcccaatagg

SEQ ID NO: 1283669 - DNA, 25 bp, Homo sapien
tcgaaattcgactgaaaaaagccca

SEQ ID NO: 1283670 - DNA, 25 bp, Homo sapien
aactaagcgccgtgtgcgggatcct

SEQ ID NO: 1283671 - DNA, 25 bp, Homo sapien
ctggtgagcctctctgtcagctggc

SEQ ID NO: 1283672 - DNA, 25 bp, Homo sapien
caagagggactggacccggttcttg

SEQ ID NO: 1283673 - DNA, 25 bp, Homo sapien
ttgcggctgctgtgctcctcatgct

SEQ ID NO: 1283674 - DNA, 25 bp, Homo sapien
catttccttgcggctgctgtgctcc

SEQ ID NO: 1283675 - DNA, 25 bp, Homo sapien
tccttgcggctgctgtgctcctcat

SEQ ID NO: 1283676 - DNA, 25 bp, Homo sapien
atttccttgcggctgctgtgctcct

SEQ ID NO: 1283677 - DNA, 25 bp, Homo sapien
tcaacaaacaatgaaatcttggctt

SEQ ID NO: 1283678 - DNA, 25 bp, Homo sapien
taactgcaagtggaataaacattgc

SEQ ID NO: 1283679 - DNA, 25 bp, Homo sapien
tttccatcatgcatagtttacaggc

SEQ ID NO: 1283680 - DNA, 25 bp, Homo sapien
aataactattactccctcttagcag

SEQ ID NO: 1283681 - DNA, 25 bp, Homo sapien
taggatttaacagcccaagattggg

SEQ ID NO: 1283682 - DNA, 25 bp, Homo sapien
taagataactgagtgccacctagtg

SEQ ID NO: 1283683 - DNA, 25 bp, Homo sapien
cagacaaaccacgtgttagaggagg

SEQ ID NO: 1283684 - DNA, 25 bp, Homo sapien
taatcagattccgtgaggacaaggc

SEQ ID NO: 1283685 - DNA, 25 bp, Homo sapien
ttgattttagcatgctctggaagct

SEQ ID NO: 1283686 - DNA, 25 bp, Homo sapien
tcgccgtatgcctgcagacttctag

SEQ ID NO: 1283687 - DNA, 25 bp, Homo sapien
tatgcctgcagacttctagcttcgt

SEQ ID NO: 1283688 - DNA, 25 bp, Homo sapien
gctctggaagctcgccgtatgcctg

SEQ ID NO: 1283689 - DNA, 25 bp, Homo sapien
acattgcttctagccgtccatttcc

SEQ ID NO: 1283690 - DNA, 25 bp, Homo sapien
aaacacattgcttctagccgtccat

SEQ ID NO: 1283691 - DNA, 25 bp, Homo sapien
aaataatgtccgaggtatttatcca

SEQ ID NO: 1283692 - DNA, 25 bp, Homo sapien
caattttcctctgatgtgacataac

SEQ ID NO: 1283693 - DNA, 25 bp, Homo sapien
acctcgcggcgtctctgacttcttt

SEQ ID NO: 1283694 - DNA, 25 bp, Homo sapien
ggcgacctcgcggcgtctctgactt

SEQ ID NO: 1283695 - DNA, 25 bp, Homo sapien
tctgacttctttccgggtagcggcg

SEQ ID NO: 1283696 - DNA, 25 bp, Homo sapien
ctccgaggggcgacacgagggagcg

SEQ ID NO: 1283697 - DNA, 25 bp, Homo sapien
cgcctgcgtccacgctcggcggcag

SEQ ID NO: 1283698 - DNA, 25 bp, Homo sapien
gcgggagaggctggcgacccagctc

SEQ ID NO: 1283699 - DNA, 25 bp, Homo sapien
tggaggccaggcaacgtgcgcggga

SEQ ID NO: 1283700 - DNA, 25 bp, Homo sapien
tgcgtccacgctcggcggcagcaaa

SEQ ID NO: 1283701 - DNA, 25 bp, Homo sapien
ctggacctgtttactgtcctgcttc

SEQ ID NO: 1283702 - DNA, 25 bp, Homo sapien
gaggtccacctggacctgtttactg

SEQ ID NO: 1283703 - DNA, 25 bp, Homo sapien
tgttcagcctcattcttgctttggc

SEQ ID NO: 1283704 - DNA, 25 bp, Homo sapien
ctgttcagcctcattcttgctttgg

SEQ ID NO: 1283705 - DNA, 25 bp, Homo sapien
taatctccccttcagataacctagg

SEQ ID NO: 1283706 - DNA, 25 bp, Homo sapien
aatctccccttcagataacctaggc

SEQ ID NO: 1283707 - DNA, 25 bp, Homo sapien
tgataatctccccttcagataacct

SEQ ID NO: 1283708 - DNA, 25 bp, Homo sapien
ctgcatttgccattgataatctccc

SEQ ID NO: 1283709 - DNA, 25 bp, Homo sapien
ttctcctggagatcttgatagcgtt

SEQ ID NO: 1283710 - DNA, 25 bp, Homo sapien
ggagatcttgatagcgttgtttgca

SEQ ID NO: 1283711 - DNA, 25 bp, Homo sapien
cttgatagcgttgtttgcattgtga

SEQ ID NO: 1283712 - DNA, 25 bp, Homo sapien
aagacagtggcttctgatagcagca

SEQ ID NO: 1283713 - DNA, 25 bp, Homo sapien
cgcaggtgctgggtggaccctggtg

SEQ ID NO: 1283714 - DNA, 25 bp, Homo sapien
ctgggagcgcaggtgctgggtggac

SEQ ID NO: 1283715 - DNA, 25 bp, Homo sapien
ggagcgcaggtgctgggtggaccct

SEQ ID NO: 1283716 - DNA, 25 bp, Homo sapien
gcaggtgctgggtggaccctggtgg

SEQ ID NO: 1283717 - DNA, 25 bp, Homo sapien
aaacgctgattgggcccagtgtcac

SEQ ID NO: 1283718 - DNA, 25 bp, Homo sapien
ctaaacgctgattgggcccagtgtc

SEQ ID NO: 1283719 - DNA, 25 bp, Homo sapien
taaacgctgattgggcccagtgtca

SEQ ID NO: 1283720 - DNA, 25 bp, Homo sapien
ctcttgattcacatgggagaacgtt

SEQ ID NO: 1283721 - DNA, 25 bp, Homo sapien
tcacatgggagaacgttttaaagta

SEQ ID NO: 1283722 - DNA, 25 bp, Homo sapien
aacactgtcatctcgagcccttctc

SEQ ID NO: 1283723 - DNA, 25 bp, Homo sapien
tcatctcgagcccttctccagtggt

SEQ ID NO: 1283724 - DNA, 25 bp, Homo sapien
ggcctcacagtcacattcccctcct

SEQ ID NO: 1283725 - DNA, 25 bp, Homo sapien
cccctcctcttggtgttggtgcttc

SEQ ID NO: 1283726 - DNA, 25 bp, Homo sapien
actgtgaaggtagccccaaggtcaa

SEQ ID NO: 1283727 - DNA, 25 bp, Homo sapien
catccactgtgaaggtagccccaag

SEQ ID NO: 1283728 - DNA, 25 bp, Homo sapien
aaccacagtctcaaccaccaccttg

SEQ ID NO: 1283729 - DNA, 25 bp, Homo sapien
tcttcctcaatctcccatccctcag

SEQ ID NO: 1283730 - DNA, 25 bp, Homo sapien
tctttggcaaccacagtctcaacca

SEQ ID NO: 1283731 - DNA, 25 bp, Homo sapien
tcagaccctctttggcaaccacagt

SEQ ID NO: 1283732 - DNA, 25 bp, Homo sapien
aggaggtcccacctccaggcgggca

SEQ ID NO: 1283733 - DNA, 25 bp, Homo sapien
cagcttcttccgcaggaggtcccac

SEQ ID NO: 1283734 - DNA, 25 bp, Homo sapien
gtcccacctccaggcgggcatgctg

SEQ ID NO: 1283735 - DNA, 25 bp, Homo sapien
gcttcttccgcaggaggtcccacct

SEQ ID NO: 1283736 - DNA, 25 bp, Homo sapien
ctcagccaaggaggtagctgtgaac

SEQ ID NO: 1283737 - DNA, 25 bp, Homo sapien
cttcacacagaacactgcacacgtg

SEQ ID NO: 1283738 - DNA, 25 bp, Homo sapien
caaggaggtagctgtgaactccagt

SEQ ID NO: 1283739 - DNA, 25 bp, Homo sapien
tcacacagaacactgcacacgtggc

SEQ ID NO: 1283740 - DNA, 25 bp, Homo sapien
gaagctgcggtcgatgtagcggcag

SEQ ID NO: 1283741 - DNA, 25 bp, Homo sapien
agaagctgcggtcgatgtagcggca

SEQ ID NO: 1283742 - DNA, 25 bp, Homo sapien
cggaacccggagagtctgagatccg

SEQ ID NO: 1283743 - DNA, 25 bp, Homo sapien
ttcggaacccggagagtctgagatc

SEQ ID NO: 1283744 - DNA, 25 bp, Homo sapien
gggcttcggaacccggagagtctga

SEQ ID NO: 1283745 - DNA, 25 bp, Homo sapien
gcttcggaacccggagagtctgaga

SEQ ID NO: 1283746 - DNA, 25 bp, Homo sapien
tcttcggtccgctcctgttctttcc

SEQ ID NO: 1283747 - DNA, 25 bp, Homo sapien
cctcttcggtccgctcctgttcttt

SEQ ID NO: 1283748 - DNA, 25 bp, Homo sapien
ctcttcggtccgctcctgttctttc

SEQ ID NO: 1283749 - DNA, 25 bp, Homo sapien
ctgtgcctgaggtcctcgaagccgt

SEQ ID NO: 1283750 - DNA, 25 bp, Homo sapien
tgtgcctgaggtcctcgaagccgtc

SEQ ID NO: 1283751 - DNA, 25 bp, Homo sapien
gcctgaggtcctcgaagccgtcgct

SEQ ID NO: 1283752 - DNA, 25 bp, Homo sapien
gtgcctgaggtcctcgaagccgtcg

SEQ ID NO: 1283753 - DNA, 25 bp, Homo sapien
tccagccggtggaacatctcgtagc

SEQ ID NO: 1283754 - DNA, 25 bp, Homo sapien
tggctgtccagccggtggaacatct

SEQ ID NO: 1283755 - DNA, 25 bp, Homo sapien
tgtccagccggtggaacatctcgta

SEQ ID NO: 1283756 - DNA, 25 bp, Homo sapien
gctgtccagccggtggaacatctcg

SEQ ID NO: 1283757 - DNA, 25 bp, Homo sapien
ctggggccagtacacgccgtgcgcc

SEQ ID NO: 1283758 - DNA, 25 bp, Homo sapien
tggggccagtacacgccgtgcgcca

SEQ ID NO: 1283759 - DNA, 25 bp, Homo sapien
agtacacgccgtgcgccaggcccgg

SEQ ID NO: 1283760 - DNA, 25 bp, Homo sapien
ggccagtacacgccgtgcgccaggc

SEQ ID NO: 1283761 - DNA, 25 bp, Homo sapien
cgcaggctccgccagtggtgcagca

SEQ ID NO: 1283762 - DNA, 25 bp, Homo sapien
agtggtgcagcagcttgcccactgc

SEQ ID NO: 1283763 - DNA, 25 bp, Homo sapien
tccgccagtggtgcagcagcttgcc

SEQ ID NO: 1283764 - DNA, 25 bp, Homo sapien
tgccgccgcaggctccgccagtggt

SEQ ID NO: 1283765 - DNA, 25 bp, Homo sapien
cgcccttgctcaccggcagccgggg

SEQ ID NO: 1283766 - DNA, 25 bp, Homo sapien
gcccttgctcaccggcagccggggg

SEQ ID NO: 1283767 - DNA, 25 bp, Homo sapien
tcgcccttgctcaccggcagccggg

SEQ ID NO: 1283768 - DNA, 25 bp, Homo sapien
cccttgctcaccggcagccgggggg

SEQ ID NO: 1283769 - DNA, 25 bp, Homo sapien
gtcacgccagggagcagtctgccta

SEQ ID NO: 1283770 - DNA, 25 bp, Homo sapien
gcacgggcggccgtcacgccaggga

SEQ ID NO: 1283771 - DNA, 25 bp, Homo sapien
agcagtctgcctaggcgcgcctggt

SEQ ID NO: 1283772 - DNA, 25 bp, Homo sapien
ctaggcgcgcctggtccgcggaagg

SEQ ID NO: 1283773 - DNA, 25 bp, Homo sapien
gatgcgctccttgcgcaggtcgagg

SEQ ID NO: 1283774 - DNA, 25 bp, Homo sapien
gctccttgcgcaggtcgaggtagtc

SEQ ID NO: 1283775 - DNA, 25 bp, Homo sapien
tgcgctccttgcgcaggtcgaggta

SEQ ID NO: 1283776 - DNA, 25 bp, Homo sapien
cgctccttgcgcaggtcgaggtagt

SEQ ID NO: 1283777 - DNA, 25 bp, Homo sapien
tcaagtagcgccgcctggcaatcct

SEQ ID NO: 1283778 - DNA, 25 bp, Homo sapien
aagtagcgccgcctggcaatcctgt

SEQ ID NO: 1283779 - DNA, 25 bp, Homo sapien
gggctcaagtagcgccgcctggcaa

SEQ ID NO: 1283780 - DNA, 25 bp, Homo sapien
gtagcgccgcctggcaatcctgtgc

SEQ ID NO: 1283781 - DNA, 25 bp, Homo sapien
tgcgcgcagctcgtaggtggcgcgg

SEQ ID NO: 1283782 - DNA, 25 bp, Homo sapien
gtgcgcgcagctcgtaggtggcgcg

SEQ ID NO: 1283783 - DNA, 25 bp, Homo sapien
agacgccgcactcgaggatctcgcg

SEQ ID NO: 1283784 - DNA, 25 bp, Homo sapien
ctgcacggagacgccgcactcgagg

SEQ ID NO: 1283785 - DNA, 25 bp, Homo sapien
actcgaggatctcgcgcgccacagc

SEQ ID NO: 1283786 - DNA, 25 bp, Homo sapien
acggagacgccgcactcgaggatct

SEQ ID NO: 1283787 - DNA, 25 bp, Homo sapien
ccggcagtcagggcgcctcaggcag

SEQ ID NO: 1283788 - DNA, 25 bp, Homo sapien
cgagcggcccaggcaaagcggcccc

SEQ ID NO: 1283789 - DNA, 25 bp, Homo sapien
caccagttgagccagtgcgagcggc

SEQ ID NO: 1283790 - DNA, 25 bp, Homo sapien
cagttgagccagtgcgagcggccca

SEQ ID NO: 1283791 - DNA, 25 bp, Homo sapien
gctggcggcgcggccatgcattcgg

SEQ ID NO: 1283792 - DNA, 25 bp, Homo sapien
cggcgcggccatgcattcggcgcgg

SEQ ID NO: 1283793 - DNA, 25 bp, Homo sapien
gcggcgcggccatgcattcggcgcg

SEQ ID NO: 1283794 - DNA, 25 bp, Homo sapien
tggcggcgcggccatgcattcggcg

SEQ ID NO: 1283795 - DNA, 25 bp, Homo sapien
ttgctgctcgatgcggaggatgtcg

SEQ ID NO: 1283796 - DNA, 25 bp, Homo sapien
gaggatggcgttgtgctcgcgggag

SEQ ID NO: 1283797 - DNA, 25 bp, Homo sapien
tagcagcacgagctggcggccgtca

SEQ ID NO: 1283798 - DNA, 25 bp, Homo sapien
ttgtgctcgcgggagtacctccagc

SEQ ID NO: 1283799 - DNA, 25 bp, Homo sapien
catgtcctgggtggtgtaatggctc

SEQ ID NO: 1283800 - DNA, 25 bp, Homo sapien
ctgggtggtgtaatggctccgcggg

SEQ ID NO: 1283801 - DNA, 25 bp, Homo sapien
atgtcctgggtggtgtaatggctcc

SEQ ID NO: 1283802 - DNA, 25 bp, Homo sapien
tcctgggtggtgtaatggctccgcg

SEQ ID NO: 1283803 - DNA, 25 bp, Homo sapien
cgctggcggggggcacggccggttg

SEQ ID NO: 1283804 - DNA, 25 bp, Homo sapien
gggggcacggccggttgctgctcgc

SEQ ID NO: 1283805 - DNA, 25 bp, Homo sapien
tggcggggggcacggccggttgctg

SEQ ID NO: 1283806 - DNA, 25 bp, Homo sapien
cagtgtccactttggtcgctggcgg

SEQ ID NO: 1283807 - DNA, 25 bp, Homo sapien
ttgagcagcggctgaaaccccgcag

SEQ ID NO: 1283808 - DNA, 25 bp, Homo sapien
cccggcgcaggagtagtgggcggca

SEQ ID NO: 1283809 - DNA, 25 bp, Homo sapien
ccggcgcaggagtagtgggcggcac

SEQ ID NO: 1283810 - DNA, 25 bp, Homo sapien
agcagcggctgaaaccccgcagctg

SEQ ID NO: 1283811 - DNA, 25 bp, Homo sapien
gtcgcccatcgggaacatcacgttg

SEQ ID NO: 1283812 - DNA, 25 bp, Homo sapien
catcgggaacatcacgttgaaagac

SEQ ID NO: 1283813 - DNA, 25 bp, Homo sapien
agttgtcgcccatcgggaacatcac

SEQ ID NO: 1283814 - DNA, 25 bp, Homo sapien
gcccatcgggaacatcacgttgaaa

SEQ ID NO: 1283815 - DNA, 25 bp, Homo sapien
ctatgcagaggcaggagatgaggca

SEQ ID NO: 1283816 - DNA, 25 bp, Homo sapien
gtaggtatgaggtgcaaggccccac

SEQ ID NO: 1283817 - DNA, 25 bp, Homo sapien
ctcaggactctcacttctagggacc

SEQ ID NO: 1283818 - DNA, 25 bp, Homo sapien
cacttctagggaccaagaggagaga

SEQ ID NO: 1283819 - DNA, 25 bp, Homo sapien
gaagtgacagcggagttaggaggga

SEQ ID NO: 1283820 - DNA, 25 bp, Homo sapien
ccatgagggtggtccatcgagttcc

SEQ ID NO: 1283821 - DNA, 25 bp, Homo sapien
catgagggtggtccatcgagttcct

SEQ ID NO: 1283822 - DNA, 25 bp, Homo sapien
atgagggtggtccatcgagttcctg

SEQ ID NO: 1283823 - DNA, 25 bp, Homo sapien
ccccatgagggtggtccatcgagtt

SEQ ID NO: 1283824 - DNA, 25 bp, Homo sapien
tctgcccttagcttcagccctgctg

SEQ ID NO: 1283825 - DNA, 25 bp, Homo sapien
aaggaggctcggcaggtgctggaca

SEQ ID NO: 1283826 - DNA, 25 bp, Homo sapien
gcttccatgggctctggtctgcagg

SEQ ID NO: 1283827 - DNA, 25 bp, Homo sapien
gggaagcccagagtatatttttctc

SEQ ID NO: 1283828 - DNA, 25 bp, Homo sapien
gggaaacatggtgggtcacagcttt

SEQ ID NO: 1283829 - DNA, 25 bp, Homo sapien
gaactggctaggaagagttcctggc

SEQ ID NO: 1283830 - DNA, 25 bp, Homo sapien
tgggtcacagctttgcccccatagc

SEQ ID NO: 1283831 - DNA, 25 bp, Homo sapien
ttcctggcatatctaagaaggcttc

SEQ ID NO: 1283832 - DNA, 25 bp, Homo sapien
ggaggagcggcgctgcccgcagcca

SEQ ID NO: 1283833 - DNA, 25 bp, Homo sapien
gaggaggagcggcgctgcccgcagc

SEQ ID NO: 1283834 - DNA, 25 bp, Homo sapien
aggagcggcgctgcccgcagccagg

SEQ ID NO: 1283835 - DNA, 25 bp, Homo sapien
cgaggaggagcggcgctgcccgcag

SEQ ID NO: 1283836 - DNA, 25 bp, Homo sapien
cagaggcgggaccggcggcggcgaa

SEQ ID NO: 1283837 - DNA, 25 bp, Homo sapien
tcgaggggcagaggcgggaccggcg

SEQ ID NO: 1283838 - DNA, 25 bp, Homo sapien
ctcgaggggcagaggcgggaccggc

SEQ ID NO: 1283839 - DNA, 25 bp, Homo sapien
ggaccggcggcggcgaactcgcggc

SEQ ID NO: 1283840 - DNA, 25 bp, Homo sapien
gggtccgcggcgcagccgttaggca

SEQ ID NO: 1283841 - DNA, 25 bp, Homo sapien
gcacgtggttcccagggagttccgc

SEQ ID NO: 1283842 - DNA, 25 bp, Homo sapien
gcgcagccgttaggcacgtggttcc

SEQ ID NO: 1283843 - DNA, 25 bp, Homo sapien
cgttaggcacgtggttcccagggag

SEQ ID NO: 1283844 - DNA, 25 bp, Homo sapien
agcggcccagctgccggtagtagtc

SEQ ID NO: 1283845 - DNA, 25 bp, Homo sapien
gtagcccgtcgtggccgtcgcagga

SEQ ID NO: 1283846 - DNA, 25 bp, Homo sapien
cccgtcgtggccgtcgcaggagctc

SEQ ID NO: 1283847 - DNA, 25 bp, Homo sapien
ctccgtagcccgtcgtggccgtcgc

SEQ ID NO: 1283848 - DNA, 25 bp, Homo sapien
cgtcgtggccgtcgcaggagctcgg

SEQ ID NO: 1283849 - DNA, 25 bp, Homo sapien
tctgggcaccggccaaggggcacag

SEQ ID NO: 1283850 - DNA, 25 bp, Homo sapien
ctgggcaccggccaaggggcacagg

SEQ ID NO: 1283851 - DNA, 25 bp, Homo sapien
ttctgggcaccggccaaggggcaca

SEQ ID NO: 1283852 - DNA, 25 bp, Homo sapien
cttcatccccgcccgagaggagaga

SEQ ID NO: 1283853 - DNA, 25 bp, Homo sapien
gagggggcctctcatatttggctgc

SEQ ID NO: 1283854 - DNA, 25 bp, Homo sapien
agagggggcctctcatatttggctg

SEQ ID NO: 1283855 - DNA, 25 bp, Homo sapien
cagagggggcctctcatatttggct

SEQ ID NO: 1283856 - DNA, 25 bp, Homo sapien
agcgacaccgacacccgcgctcaag

SEQ ID NO: 1283857 - DNA, 25 bp, Homo sapien
atcgccatccacgaaagcgacaccg

SEQ ID NO: 1283858 - DNA, 25 bp, Homo sapien
cgcgctcaagcctcggatttcaggg

SEQ ID NO: 1283859 - DNA, 25 bp, Homo sapien
gggtcgggtgacagcgcggcttccc

SEQ ID NO: 1283860 - DNA, 25 bp, Homo sapien
ccttgggtgacactctccgactgag

SEQ ID NO: 1283861 - DNA, 25 bp, Homo sapien
cttgggtgacactctccgactgagc

SEQ ID NO: 1283862 - DNA, 25 bp, Homo sapien
ttgggtgacactctccgactgagcc

SEQ ID NO: 1283863 - DNA, 25 bp, Homo sapien
tccttcttgagggcctctgtctcca

SEQ ID NO: 1283864 - DNA, 25 bp, Homo sapien
ccttcttgagggcctctgtctccac

SEQ ID NO: 1283865 - DNA, 25 bp, Homo sapien
ctccttcttgagggcctctgtctcc

SEQ ID NO: 1283866 - DNA, 25 bp, Homo sapien
gagtttgttcttggtctgcatgtag

SEQ ID NO: 1283867 - DNA, 25 bp, Homo sapien
tggcggagtttgttcttggtctgca

SEQ ID NO: 1283868 - DNA, 25 bp, Homo sapien
gcggagtttgttcttggtctgcatg

SEQ ID NO: 1283869 - DNA, 25 bp, Homo sapien
tgttcttggtctgcatgtagatgtc

SEQ ID NO: 1283870 - DNA, 25 bp, Homo sapien
tgtggtcccacaggaggcttgggag

SEQ ID NO: 1283871 - DNA, 25 bp, Homo sapien
cacaggaggcttgggagatgggtag

SEQ ID NO: 1283872 - DNA, 25 bp, Homo sapien
ggtcccacaggaggcttgggagatg

SEQ ID NO: 1283873 - DNA, 25 bp, Homo sapien
ccacaggaggcttgggagatgggta

SEQ ID NO: 1283874 - DNA, 25 bp, Homo sapien
ggggtatgggcttcccaatcgtgcc

SEQ ID NO: 1283875 - DNA, 25 bp, Homo sapien
gtatgggcttcccaatcgtgcccca

SEQ ID NO: 1283876 - DNA, 25 bp, Homo sapien
ccagctctgggttcagcatgtccat

SEQ ID NO: 1283877 - DNA, 25 bp, Homo sapien
tgggcttcccaatcgtgccccaagg

SEQ ID NO: 1283878 - DNA, 25 bp, Homo sapien
tatgtctgcagctctagtgctggaa

SEQ ID NO: 1283879 - DNA, 25 bp, Homo sapien
gtctgcagctctagtgctggaaagc

SEQ ID NO: 1283880 - DNA, 25 bp, Homo sapien
tctgcagctctagtgctggaaagcc

SEQ ID NO: 1283881 - DNA, 25 bp, Homo sapien
ctgtatgtctgcagctctagtgctg

SEQ ID NO: 1283882 - DNA, 25 bp, Homo sapien
ggcaccacttggtacacctgttgtg

SEQ ID NO: 1283883 - DNA, 25 bp, Homo sapien
tgttgtggcccctggcgttgctggg

SEQ ID NO: 1283884 - DNA, 25 bp, Homo sapien
ctggaaacaacttgccgagggccaa

SEQ ID NO: 1283885 - DNA, 25 bp, Homo sapien
gccaaggtgggctccgggcaccact

SEQ ID NO: 1283886 - DNA, 25 bp, Homo sapien
cccgggagagcacgcagtgctccat

SEQ ID NO: 1283887 - DNA, 25 bp, Homo sapien
ccgggagagcacgcagtgctccatg

SEQ ID NO: 1283888 - DNA, 25 bp, Homo sapien
cgggagagcacgcagtgctccatgc

SEQ ID NO: 1283889 - DNA, 25 bp, Homo sapien
gggagagcacgcagtgctccatgct

SEQ ID NO: 1283890 - DNA, 25 bp, Homo sapien
gccctgttacctaccgcaggagtca

SEQ ID NO: 1283891 - DNA, 25 bp, Homo sapien
ccctgttacctaccgcaggagtcag

SEQ ID NO: 1283892 - DNA, 25 bp, Homo sapien
cctgttacctaccgcaggagtcagg

SEQ ID NO: 1283893 - DNA, 25 bp, Homo sapien
ggccctgttacctaccgcaggagtc

SEQ ID NO: 1283894 - DNA, 25 bp, Homo sapien
cagtgggtgctgagggcaccaagcc

SEQ ID NO: 1283895 - DNA, 25 bp, Homo sapien
gtgctgagggcaccaagccctgacc

SEQ ID NO: 1283896 - DNA, 25 bp, Homo sapien
gggcaacagcagtgggtgctgaggg

SEQ ID NO: 1283897 - DNA, 25 bp, Homo sapien
caacagcagtgggtgctgagggcac

SEQ ID NO: 1283898 - DNA, 25 bp, Homo sapien
tctgcagtctgggactgtggcttca

SEQ ID NO: 1283899 - DNA, 25 bp, Homo sapien
gactgtggcttcaaactttccctcc

SEQ ID NO: 1283900 - DNA, 25 bp, Homo sapien
tgtaggcagcagataagaggctggg

SEQ ID NO: 1283901 - DNA, 25 bp, Homo sapien
gtctgggactgtggcttcaaacttt

SEQ ID NO: 1283902 - DNA, 25 bp, Homo sapien
tagttggaattaaaggcacccgcca

SEQ ID NO: 1283903 - DNA, 25 bp, Homo sapien
tcagcttctcaaagtgcaggcatga

SEQ ID NO: 1283904 - DNA, 25 bp, Homo sapien
caccacacccggcctgtcaactttt

SEQ ID NO: 1283905 - DNA, 25 bp, Homo sapien
cacccgccaccacacccagctaatt

SEQ ID NO: 1283906 - DNA, 25 bp, Homo sapien
ggcctctgggccttgctgtgttctg

SEQ ID NO: 1283907 - DNA, 25 bp, Homo sapien
ggaagttcaccctcaggcccacctg

SEQ ID NO: 1283908 - DNA, 25 bp, Homo sapien
cagagactctttctcggggggaagt

SEQ ID NO: 1283909 - DNA, 25 bp, Homo sapien
tgctgggccattcattctcttccag

SEQ ID NO: 1283910 - DNA, 25 bp, Homo sapien
ccgttcactaccaggatctggcagc

SEQ ID NO: 1283911 - DNA, 25 bp, Homo sapien
tggctgtggccgttgaagtccgaca

SEQ ID NO: 1283912 - DNA, 25 bp, Homo sapien
tgtggccgttgaagtccgacaggtc

SEQ ID NO: 1283913 - DNA, 25 bp, Homo sapien
gctccgcgccgttcactaccaggat

SEQ ID NO: 1283914 - DNA, 25 bp, Homo sapien
ggtcccgccccacaggtcagccgag

SEQ ID NO: 1283915 - DNA, 25 bp, Homo sapien
gtcagccgagatctccccgccgtgc

SEQ ID NO: 1283916 - DNA, 25 bp, Homo sapien
acaggctcacgtcggtgcagctcac

SEQ ID NO: 1283917 - DNA, 25 bp, Homo sapien
agctccccgttctcggcggcgtcgt

SEQ ID NO: 1283918 - DNA, 25 bp, Homo sapien
cgtggcaccgttcttggtttgggca

SEQ ID NO: 1283919 - DNA, 25 bp, Homo sapien
tggcccatctgcgccgcggcgtgca

SEQ ID NO: 1283920 - DNA, 25 bp, Homo sapien
acgccaggtacaggggcgtggcacc

SEQ ID NO: 1283921 - DNA, 25 bp, Homo sapien
gcaccgttcttggtttgggcattca

SEQ ID NO: 1283922 - DNA, 25 bp, Homo sapien
catagtcccacaacagaggcacaga

SEQ ID NO: 1283923 - DNA, 25 bp, Homo sapien
cctagggcctagttttcggctgtca

SEQ ID NO: 1283924 - DNA, 25 bp, Homo sapien
caaaggacactaggtggagccacaa

SEQ ID NO: 1283925 - DNA, 25 bp, Homo sapien
ttacaccggtaaggcacctagcagg

SEQ ID NO: 1283926 - DNA, 25 bp, Homo sapien
tccccaccgccatgatgcaagagcc

SEQ ID NO: 1283927 - DNA, 25 bp, Homo sapien
accgccatgatgcaagagccagttc

SEQ ID NO: 1283928 - DNA, 25 bp, Homo sapien
tggataggcagggcgcccatgtctg

SEQ ID NO: 1283929 - DNA, 25 bp, Homo sapien
taggcagggcgcccatgtctgtggc

SEQ ID NO: 1283930 - DNA, 25 bp, Homo sapien
tgactcccaggggctcagggaatgc

SEQ ID NO: 1283931 - DNA, 25 bp, Homo sapien
tggttgtcatggcaggagactggct

SEQ ID NO: 1283932 - DNA, 25 bp, Homo sapien
gggccacagccctgactcccagggg

SEQ ID NO: 1283933 - DNA, 25 bp, Homo sapien
ttgtcatggcaggagactggctcca

SEQ ID NO: 1283934 - DNA, 25 bp, Homo sapien
cacagggttactgggctgagcaggg

SEQ ID NO: 1283935 - DNA, 25 bp, Homo sapien
tgacacagggttactgggctgagca

SEQ ID NO: 1283936 - DNA, 25 bp, Homo sapien
agtcgcctccgccgactgcattgaa

SEQ ID NO: 1283937 - DNA, 25 bp, Homo sapien
ccgccgactgcattgaaagccaaaa

SEQ ID NO: 1283938 - DNA, 25 bp, Homo sapien
ctccgccgactgcattgaaagccaa

SEQ ID NO: 1283939 - DNA, 25 bp, Homo sapien
tcgcctccgccgactgcattgaaag

SEQ ID NO: 1283940 - DNA, 25 bp, Homo sapien
gcggtctgcatattccccagggtgg

SEQ ID NO: 1283941 - DNA, 25 bp, Homo sapien
agcggtctgcatattccccagggtg

SEQ ID NO: 1283942 - DNA, 25 bp, Homo sapien
gaggacgcgaagagccaagagctct

SEQ ID NO: 1283943 - DNA, 25 bp, Homo sapien
tctgacagctggcgccggggaaaag

SEQ ID NO: 1283944 - DNA, 25 bp, Homo sapien
gctctgacagctggcgccggggaaa

SEQ ID NO: 1283945 - DNA, 25 bp, Homo sapien
ctctgacagctggcgccggggaaaa

SEQ ID NO: 1283946 - DNA, 25 bp, Homo sapien
gcccggggctcggaagctcaaagcc

SEQ ID NO: 1283947 - DNA, 25 bp, Homo sapien
aggatcccgcacacggcgcttagtt

SEQ ID NO: 1283948 - DNA, 25 bp, Homo sapien
gccaagagtgtcagccggaaggatc

SEQ ID NO: 1283949 - DNA, 25 bp, Homo sapien
taagcctgggcctactgggagccat

SEQ ID NO: 1283950 - DNA, 25 bp, Homo sapien
gggactggtccttgcgcagaggtgg

SEQ ID NO: 1283951 - DNA, 25 bp, Homo sapien
cggggactggtccttgcgcagaggt

SEQ ID NO: 1283952 - DNA, 25 bp, Homo sapien
agcggcggggactggtccttgcgca

SEQ ID NO: 1283953 - DNA, 25 bp, Homo sapien
ggcggggactggtccttgcgcagag

SEQ ID NO: 1283954 - DNA, 25 bp, Homo sapien
tgtaccccagacaccgtgaaccgaa

SEQ ID NO: 1283955 - DNA, 25 bp, Homo sapien
ccccagacaccgtgaaccgaatttg

SEQ ID NO: 1283956 - DNA, 25 bp, Homo sapien
agacaccgtgaaccgaatttgctca

SEQ ID NO: 1283957 - DNA, 25 bp, Homo sapien
agggctgtaccccagacaccgtgaa

SEQ ID NO: 1283958 - DNA, 25 bp, Homo sapien
gctttgtgggcccatcggtgttctg

SEQ ID NO: 1283959 - DNA, 25 bp, Homo sapien
catcggtgttctgcgagggattccg

SEQ ID NO: 1283960 - DNA, 25 bp, Homo sapien
gcccatcggtgttctgcgagggatt

SEQ ID NO: 1283961 - DNA, 25 bp, Homo sapien
cgcggcctccgcgtgctttgtgggc

SEQ ID NO: 1283962 - DNA, 25 bp, Homo sapien
ttgtctgtagcttccactggtgaaa

SEQ ID NO: 1283963 - DNA, 25 bp, Homo sapien
tgtctgtagcttccactggtgaaat

SEQ ID NO: 1283964 - DNA, 25 bp, Homo sapien
tttgtctgtagcttccactggtgaa

SEQ ID NO: 1283965 - DNA, 25 bp, Homo sapien
ggtctgcacaggcttgcctccattc

SEQ ID NO: 1283966 - DNA, 25 bp, Homo sapien
gtctgcacaggcttgcctccattcc

SEQ ID NO: 1283967 - DNA, 25 bp, Homo sapien
ctgcacaggcttgcctccattcccc

SEQ ID NO: 1283968 - DNA, 25 bp, Homo sapien
gcacaggcttgcctccattccccat

SEQ ID NO: 1283969 - DNA, 25 bp, Homo sapien
acacttctgaggaaggtggtcaggg

SEQ ID NO: 1283970 - DNA, 25 bp, Homo sapien
cctgggaaatcaggccggcgccctg

SEQ ID NO: 1283971 - DNA, 25 bp, Homo sapien
tgcctgggaaatcaggccggcgccc

SEQ ID NO: 1283972 - DNA, 25 bp, Homo sapien
cctgcctgggaaatcaggccggcgc

SEQ ID NO: 1283973 - DNA, 25 bp, Homo sapien
gccctgcctgggaaatcaggccggc

SEQ ID NO: 1283974 - DNA, 25 bp, Homo sapien
ggaaaagcattcagaggtgtgggct

SEQ ID NO: 1283975 - DNA, 25 bp, Homo sapien
gaaaagcattcagaggtgtgggctg

SEQ ID NO: 1283976 - DNA, 25 bp, Homo sapien
tggtcaatgtggagtctttcccact

SEQ ID NO: 1283977 - DNA, 25 bp, Homo sapien
ggtcaatgtggagtctttcccactg

SEQ ID NO: 1283978 - DNA, 25 bp, Homo sapien
aggttggtcaatgtggagtctttcc

SEQ ID NO: 1283979 - DNA, 25 bp, Homo sapien
gttggtcaatgtggagtctttccca

SEQ ID NO: 1283980 - DNA, 25 bp, Homo sapien
tcttgatgccttgtgtctaatagct

SEQ ID NO: 1283981 - DNA, 25 bp, Homo sapien
tccacacattgcaataaattttgaa

SEQ ID NO: 1283982 - DNA, 25 bp, Homo sapien
tatagctgtggatcaatttcaggtt

SEQ ID NO: 1283983 - DNA, 25 bp, Homo sapien
taactcaggctgtttatccgtttgt

SEQ ID NO: 1283984 - DNA, 25 bp, Homo sapien
ggctgtaaaattcggttctcagaga

SEQ ID NO: 1283985 - DNA, 25 bp, Homo sapien
tctcagagatgaacttgcagattcg

SEQ ID NO: 1283986 - DNA, 25 bp, Homo sapien
tatctacgaatgtaggcatcacttt

SEQ ID NO: 1283987 - DNA, 25 bp, Homo sapien
gaacttgcagattcggactttcaat

SEQ ID NO: 1283988 - DNA, 25 bp, Homo sapien
tggtcagatacccagaaaacatttc

SEQ ID NO: 1283989 - DNA, 25 bp, Homo sapien
gtgggatctcgaccccagccgtggt

SEQ ID NO: 1283990 - DNA, 25 bp, Homo sapien
gaatagaatctgatactggtgggct

SEQ ID NO: 1283991 - DNA, 25 bp, Homo sapien
gaactctccactcgatgttttgtga

SEQ ID NO: 1283992 - DNA, 25 bp, Homo sapien
ttgggcatacccaagagagaataat

SEQ ID NO: 1283993 - DNA, 25 bp, Homo sapien
agcttgggcatacccaagagagaat

SEQ ID NO: 1283994 - DNA, 25 bp, Homo sapien
ggggagcttgggcatacccaagaga

SEQ ID NO: 1283995 - DNA, 25 bp, Homo sapien
cttgggcatacccaagagagaataa

SEQ ID NO: 1283996 - DNA, 25 bp, Homo sapien
ttctttgggagagaacagacgcagg

SEQ ID NO: 1283997 - DNA, 25 bp, Homo sapien
ctctggcagcagattggtcggttga

SEQ ID NO: 1283998 - DNA, 25 bp, Homo sapien
gattggtcggttgagtggcagaaag

SEQ ID NO: 1283999 - DNA, 25 bp, Homo sapien
cagattggtcggttgagtggcagaa

SEQ ID NO: 1284000 - DNA, 25 bp, Homo sapien
gcagcagattggtcggttgagtggc

SEQ ID NO: 1284001 - DNA, 25 bp, Homo sapien
tgtaaagagtgaggcgtatgaggct

SEQ ID NO: 1284002 - DNA, 25 bp, Homo sapien
ggctggaaagggctcgggagtgcgc

SEQ ID NO: 1284003 - DNA, 25 bp, Homo sapien
gatcggaagtgagaatcccagctgt

SEQ ID NO: 1284004 - DNA, 25 bp, Homo sapien
gggcagagcccgaagatctcatact

SEQ ID NO: 1284005 - DNA, 25 bp, Homo sapien
cgggcgcagtggtgtgtgtctgtaa

SEQ ID NO: 1284006 - DNA, 25 bp, Homo sapien
tggaggttactgtgagccgagatcg

SEQ ID NO: 1284007 - DNA, 25 bp, Homo sapien
cccaactactcgggaggctgaggca

SEQ ID NO: 1284008 - DNA, 25 bp, Homo sapien
aggagaatcgcttgaacccgggagg

SEQ ID NO: 1284009 - DNA, 25 bp, Homo sapien
tatcttggttgaatcgatcctccca

SEQ ID NO: 1284010 - DNA, 25 bp, Homo sapien
gcttccgtgctttgtagattgctca

SEQ ID NO: 1284011 - DNA, 25 bp, Homo sapien
tcaatggtccccaaggcctagtggc

SEQ ID NO: 1284012 - DNA, 25 bp, Homo sapien
tagtcacttgtttcctcgggaggca

SEQ ID NO: 1284013 - DNA, 25 bp, Homo sapien
gagcgtggagttgcggaggcagctg

SEQ ID NO: 1284014 - DNA, 25 bp, Homo sapien
caatctggtgagctggagacgcaag

SEQ ID NO: 1284015 - DNA, 25 bp, Homo sapien
ctggtactccagagcgtggagttgc

SEQ ID NO: 1284016 - DNA, 25 bp, Homo sapien
ctgcaatctggtgagctggagacgc

SEQ ID NO: 1284017 - DNA, 25 bp, Homo sapien
ctagtggcgcaagctgcaggcctac

SEQ ID NO: 1284018 - DNA, 25 bp, Homo sapien
tagtggcgcaagctgcaggcctacc

SEQ ID NO: 1284019 - DNA, 25 bp, Homo sapien
gaagaggttctcggagctggagcag

SEQ ID NO: 1284020 - DNA, 25 bp, Homo sapien
aagaggttctcggagctggagcagc

SEQ ID NO: 1284021 - DNA, 25 bp, Homo sapien
agaggttctcggagctggagcagct

SEQ ID NO: 1284022 - DNA, 25 bp, Homo sapien
tgtggatttcttgaactcaaaccag

SEQ ID NO: 1284023 - DNA, 25 bp, Homo sapien
gagatgtacaagtgacacctcctca

SEQ ID NO: 1284024 - DNA, 25 bp, Homo sapien
tattttgggctcagccaagcatggg

SEQ ID NO: 1284025 - DNA, 25 bp, Homo sapien
ggtgagtgtatctttgcctaaaaca

SEQ ID NO: 1284026 - DNA, 25 bp, Homo sapien
tcaggactcacagtaggatagccgt

SEQ ID NO: 1284027 - DNA, 25 bp, Homo sapien
tgtagcccacactgagtttctctgc

SEQ ID NO: 1284028 - DNA, 25 bp, Homo sapien
gaagccctctcacttagaacccgat

SEQ ID NO: 1284029 - DNA, 25 bp, Homo sapien
aataggtgtgctctttcatccaaac

SEQ ID NO: 1284030 - DNA, 25 bp, Homo sapien
tgctggcctggaactataaaacgaa

SEQ ID NO: 1284031 - DNA, 25 bp, Homo sapien
tattaagaacctatcagccggagag

SEQ ID NO: 1284032 - DNA, 25 bp, Homo sapien
gatgtgtctggaaactgaaccggga

SEQ ID NO: 1284033 - DNA, 25 bp, Homo sapien
ggtaggcccgttcactgattttcaa

SEQ ID NO: 1284034 - DNA, 25 bp, Homo sapien
tacaagtcttgtccttgactgtact

SEQ ID NO: 1284035 - DNA, 25 bp, Homo sapien
tgagtacaagtcttgtccttgactg

SEQ ID NO: 1284036 - DNA, 25 bp, Homo sapien
ttgagtacaagtcttgtccttgact

SEQ ID NO: 1284037 - DNA, 25 bp, Homo sapien
agtacaagtcttgtccttgactgta

SEQ ID NO: 1284038 - DNA, 25 bp, Homo sapien
tgggtaaagcaggcaagtgggcccc

SEQ ID NO: 1284039 - DNA, 25 bp, Homo sapien
aaagcaggcaagtgggcccccgtag

SEQ ID NO: 1284040 - DNA, 25 bp, Homo sapien
taaagcaggcaagtgggcccccgta

SEQ ID NO: 1284041 - DNA, 25 bp, Homo sapien
aagcaggcaagtgggcccccgtagt

SEQ ID NO: 1284042 - DNA, 25 bp, Homo sapien
actagcctgcttcatgataaaatag

SEQ ID NO: 1284043 - DNA, 25 bp, Homo sapien
gactagcctgcttcatgataaaata

SEQ ID NO: 1284044 - DNA, 25 bp, Homo sapien
tagcctgcttcatgataaaatagtt

SEQ ID NO: 1284045 - DNA, 25 bp, Homo sapien
atgactagcctgcttcatgataaaa

SEQ ID NO: 1284046 - DNA, 25 bp, Homo sapien
agggctggcccagggccctgccacc

SEQ ID NO: 1284047 - DNA, 25 bp, Homo sapien
ccagggctggcccagggccctgcca

SEQ ID NO: 1284048 - DNA, 25 bp, Homo sapien
ccttccagggctggcccagggccct

SEQ ID NO: 1284049 - DNA, 25 bp, Homo sapien
gctggcccagggccctgccaccaac

SEQ ID NO: 1284050 - DNA, 25 bp, Homo sapien
acatttaggactgtgtcattacccg

SEQ ID NO: 1284051 - DNA, 25 bp, Homo sapien
tcggtgcttgatgttacactcctgg

SEQ ID NO: 1284052 - DNA, 25 bp, Homo sapien
cacaggggccaacagtccctcagtg

SEQ ID NO: 1284053 - DNA, 25 bp, Homo sapien
tgttacactcctggttggagatgac

SEQ ID NO: 1284054 - DNA, 25 bp, Homo sapien
tgcaatctcacacttggtccctgga

SEQ ID NO: 1284055 - DNA, 25 bp, Homo sapien
cagcctgcaatctcacacttggtcc

SEQ ID NO: 1284056 - DNA, 25 bp, Homo sapien
cccagcctgcaatctcacacttggt

SEQ ID NO: 1284057 - DNA, 25 bp, Homo sapien
ttggtctcaccccagcctgcaatct

SEQ ID NO: 1284058 - DNA, 25 bp, Homo sapien
agggccacacgctggttcagggtca

SEQ ID NO: 1284059 - DNA, 25 bp, Homo sapien
atcttggctactgggacccgctgta

SEQ ID NO: 1284060 - DNA, 25 bp, Homo sapien
catcttggctactgggacccgctgt

SEQ ID NO: 1284061 - DNA, 25 bp, Homo sapien
ttggctactgggacccgctgtaggc

SEQ ID NO: 1284062 - DNA, 25 bp, Homo sapien
cttggctactgggacccgctgtagg

SEQ ID NO: 1284063 - DNA, 25 bp, Homo sapien
ctggaacagggtgcccaaccatacc

SEQ ID NO: 1284064 - DNA, 25 bp, Homo sapien
aacagggtgcccaaccatacctcat

SEQ ID NO: 1284065 - DNA, 25 bp, Homo sapien
tggaacagggtgcccaaccatacct

SEQ ID NO: 1284066 - DNA, 25 bp, Homo sapien
gaacagggtgcccaaccatacctca

SEQ ID NO: 1284067 - DNA, 25 bp, Homo sapien
agaagctctgctaggtcatttgtga

SEQ ID NO: 1284068 - DNA, 25 bp, Homo sapien
tgggagagaagctctgctaggtcat

SEQ ID NO: 1284069 - DNA, 25 bp, Homo sapien
ggagagaagctctgctaggtcattt

SEQ ID NO: 1284070 - DNA, 25 bp, Homo sapien
gagagaagctctgctaggtcatttg

SEQ ID NO: 1284071 - DNA, 25 bp, Homo sapien
actgccgggcagtcagtatccactg

SEQ ID NO: 1284072 - DNA, 25 bp, Homo sapien
ggaggagaagcactgccgggcagtc

SEQ ID NO: 1284073 - DNA, 25 bp, Homo sapien
gagaagcactgccgggcagtcagta

SEQ ID NO: 1284074 - DNA, 25 bp, Homo sapien
agcactgccgggcagtcagtatcca

SEQ ID NO: 1284075 - DNA, 25 bp, Homo sapien
aaccacagaggacacaacctcagct

SEQ ID NO: 1284076 - DNA, 25 bp, Homo sapien
ccatcttctggctaggacctctggg

SEQ ID NO: 1284077 - DNA, 25 bp, Homo sapien
tgggagacaggcagttgtgcctcac

SEQ ID NO: 1284078 - DNA, 25 bp, Homo sapien
ataaccacagaggacacaacctcag

SEQ ID NO: 1284079 - DNA, 25 bp, Homo sapien
gctgactgtccagggtgagttgccc

SEQ ID NO: 1284080 - DNA, 25 bp, Homo sapien
aagctgactgtccagggtgagttgc

SEQ ID NO: 1284081 - DNA, 25 bp, Homo sapien
tgatccagccgatccaccctcttgc

SEQ ID NO: 1284082 - DNA, 25 bp, Homo sapien
gctgatccagccgatccaccctctt

SEQ ID NO: 1284083 - DNA, 25 bp, Homo sapien
tgaaacccagactgtgtggatgtcg

SEQ ID NO: 1284084 - DNA, 25 bp, Homo sapien
aacccagactgtgtggatgtcgtgg

SEQ ID NO: 1284085 - DNA, 25 bp, Homo sapien
tgtgtggatgtcgtgggctaaaggg

SEQ ID NO: 1284086 - DNA, 25 bp, Homo sapien
ctgtgtggatgtcgtgggctaaagg

SEQ ID NO: 1284087 - DNA, 25 bp, Homo sapien
ggggggtccaggattgatggcggct

SEQ ID NO: 1284088 - DNA, 25 bp, Homo sapien
gtccaggattgatggcggctggtca

SEQ ID NO: 1284089 - DNA, 25 bp, Homo sapien
gggtccaggattgatggcggctggt

SEQ ID NO: 1284090 - DNA, 25 bp, Homo sapien
tccaggattgatggcggctggtcat

SEQ ID NO: 1284091 - DNA, 25 bp, Homo sapien
gggtccttgggtccatcgtgtagca

SEQ ID NO: 1284092 - DNA, 25 bp, Homo sapien
ggcccatggctatccccatctgggt

SEQ ID NO: 1284093 - DNA, 25 bp, Homo sapien
gaagttctcctccagttgtgcatgc

SEQ ID NO: 1284094 - DNA, 25 bp, Homo sapien
gcgtcgcagggcacagtagtcgaat

SEQ ID NO: 1284095 - DNA, 25 bp, Homo sapien
gggtagtctcaaccatttccaggct

SEQ ID NO: 1284096 - DNA, 25 bp, Homo sapien
gagcgggagcaaaatcgtggcaggg

SEQ ID NO: 1284097 - DNA, 25 bp, Homo sapien
gcgggagcgggagcaaaatcgtggc

SEQ ID NO: 1284098 - DNA, 25 bp, Homo sapien
gcaaaatcgtggcagggtagtctca

SEQ ID NO: 1284099 - DNA, 25 bp, Homo sapien
ggtcccagacatcaaagcatgccgc

SEQ ID NO: 1284100 - DNA, 25 bp, Homo sapien
acatcaaagcatgccgccccagggt

SEQ ID NO: 1284101 - DNA, 25 bp, Homo sapien
agacatcaaagcatgccgccccagg

SEQ ID NO: 1284102 - DNA, 25 bp, Homo sapien
ctggtcccagacatcaaagcatgcc

SEQ ID NO: 1284103 - DNA, 25 bp, Homo sapien
ctggcggggccgggagcaccaggga

SEQ ID NO: 1284104 - DNA, 25 bp, Homo sapien
tggcggggccgggagcaccagggac

SEQ ID NO: 1284105 - DNA, 25 bp, Homo sapien
gcggggccgggagcaccagggactc

SEQ ID NO: 1284106 - DNA, 25 bp, Homo sapien
ggggccgggagcaccagggactcac

SEQ ID NO: 1284107 - DNA, 25 bp, Homo sapien
actggacacccttgcgggtcttgct

SEQ ID NO: 1284108 - DNA, 25 bp, Homo sapien
cccttgcgggtcttgctgaccgtgc

SEQ ID NO: 1284109 - DNA, 25 bp, Homo sapien
gcgctggcactggacacccttgcgg

SEQ ID NO: 1284110 - DNA, 25 bp, Homo sapien
cttgctgaccgtgccgcggtactgc

SEQ ID NO: 1284111 - DNA, 25 bp, Homo sapien
ggctctgtagcccccaagcttgggc

SEQ ID NO: 1284112 - DNA, 25 bp, Homo sapien
cggctctgtagcccccaagcttggg

SEQ ID NO: 1284113 - DNA, 25 bp, Homo sapien
cccggctctgtagcccccaagcttg

SEQ ID NO: 1284114 - DNA, 25 bp, Homo sapien
ctctgtagcccccaagcttgggcct

SEQ ID NO: 1284115 - DNA, 25 bp, Homo sapien
gtacaacgccggatctggtagcaaa

SEQ ID NO: 1284116 - DNA, 25 bp, Homo sapien
tgtacaacgccggatctggtagcaa

SEQ ID NO: 1284117 - DNA, 25 bp, Homo sapien
cgcacgtcgtctgtacaacgccgga

SEQ ID NO: 1284118 - DNA, 25 bp, Homo sapien
tcgtctgtacaacgccggatctggt

SEQ ID NO: 1284119 - DNA, 25 bp, Homo sapien
ctgagccgtcgaggttccagcagaa

SEQ ID NO: 1284120 - DNA, 25 bp, Homo sapien
agccgtcgaggttccagcagaagtt

SEQ ID NO: 1284121 - DNA, 25 bp, Homo sapien
gttccagcagaagttctcccgaagg

SEQ ID NO: 1284122 - DNA, 25 bp, Homo sapien
ttccagcagaagttctcccgaaggt

SEQ ID NO: 1284123 - DNA, 25 bp, Homo sapien
ccagcctccagccctaagcccgtga

SEQ ID NO: 1284124 - DNA, 25 bp, Homo sapien
ctaagcaggcgctccactcagccct

SEQ ID NO: 1284125 - DNA, 25 bp, Homo sapien
actcagccctagcccgccagcctcc

SEQ ID NO: 1284126 - DNA, 25 bp, Homo sapien
cgccagcctccagccctaagcccgt

SEQ ID NO: 1284127 - DNA, 25 bp, Homo sapien
agcagcacgtcccaacgcccgcccc

SEQ ID NO: 1284128 - DNA, 25 bp, Homo sapien
cgcagcagcacgtcccaacgcccgc

SEQ ID NO: 1284129 - DNA, 25 bp, Homo sapien
gcagcagcacgtcccaacgcccgcc

SEQ ID NO: 1284130 - DNA, 25 bp, Homo sapien
tttttctggcgtaaatcggtgctga

SEQ ID NO: 1284131 - DNA, 25 bp, Homo sapien
tatttttctggcgtaaatcggtgct

SEQ ID NO: 1284132 - DNA, 25 bp, Homo sapien
ttttctggcgtaaatcggtgctgat

SEQ ID NO: 1284133 - DNA, 25 bp, Homo sapien
tttctggcgtaaatcggtgctgatg

SEQ ID NO: 1284134 - DNA, 25 bp, Homo sapien
tcacccttcccgcggaagcagctga

SEQ ID NO: 1284135 - DNA, 25 bp, Homo sapien
ctcacccttcccgcggaagcagctg

SEQ ID NO: 1284136 - DNA, 25 bp, Homo sapien
acccttcccgcggaagcagctgaca

SEQ ID NO: 1284137 - DNA, 25 bp, Homo sapien
cacccttcccgcggaagcagctgac

SEQ ID NO: 1284138 - DNA, 25 bp, Homo sapien
atggaccgagataggtcgggccccg

SEQ ID NO: 1284139 - DNA, 25 bp, Homo sapien
accgagataggtcgggccccgagcg

SEQ ID NO: 1284140 - DNA, 25 bp, Homo sapien
tagatggaccgagataggtcgggcc

SEQ ID NO: 1284141 - DNA, 25 bp, Homo sapien
cttagatggaccgagataggtcggg

SEQ ID NO: 1284142 - DNA, 25 bp, Homo sapien
tagttgtcgtccagaccttggtcga

SEQ ID NO: 1284143 - DNA, 25 bp, Homo sapien
tctcgctcgatctgcggatccgtag

SEQ ID NO: 1284144 - DNA, 25 bp, Homo sapien
ggatccgtagtgtagcaccatggcc

SEQ ID NO: 1284145 - DNA, 25 bp, Homo sapien
tcggagccgtcaggattccggcaat

SEQ ID NO: 1284146 - DNA, 25 bp, Homo sapien
agcgctggcactcgcgccctgactc

SEQ ID NO: 1284147 - DNA, 25 bp, Homo sapien
gtattcctcgccattgcaccagaca

SEQ ID NO: 1284148 - DNA, 25 bp, Homo sapien
cgccgcggtattcctcgccattgca

SEQ ID NO: 1284149 - DNA, 25 bp, Homo sapien
gtgcggtctaccgcgccgcggtatt

SEQ ID NO: 1284150 - DNA, 25 bp, Homo sapien
gatgggcgtgggcttgcccctccac

SEQ ID NO: 1284151 - DNA, 25 bp, Homo sapien
gagacaaagagccagtgggttcgtg

SEQ ID NO: 1284152 - DNA, 25 bp, Homo sapien
atgggcgtgggcttgcccctccact

SEQ ID NO: 1284153 - DNA, 25 bp, Homo sapien
agtgggttcgtggatgggcgtgggc

SEQ ID NO: 1284154 - DNA, 25 bp, Homo sapien
ttgtgtggcaccaaggacctccggg

SEQ ID NO: 1284155 - DNA, 25 bp, Homo sapien
tcagggttacggcagaagttctctt

SEQ ID NO: 1284156 - DNA, 25 bp, Homo sapien
ttccaggccattccggagcgtgggc

SEQ ID NO: 1284157 - DNA, 25 bp, Homo sapien
ccacccggcaggatttgatgctgca

SEQ ID NO: 1284158 - DNA, 25 bp, Homo sapien
aggccacccacggtcgtggccatgg

SEQ ID NO: 1284159 - DNA, 25 bp, Homo sapien
ccccattgttcatgatgcaggtccg

SEQ ID NO: 1284160 - DNA, 25 bp, Homo sapien
ccattgttcatgatgcaggtccgta

SEQ ID NO: 1284161 - DNA, 25 bp, Homo sapien
gtcgtggccatggtgccccggtacc

SEQ ID NO: 1284162 - DNA, 25 bp, Homo sapien
cagaagatcaacttgggctgaggtc

SEQ ID NO: 1284163 - DNA, 25 bp, Homo sapien
agagacagaagatcaacttgggctg

SEQ ID NO: 1284164 - DNA, 25 bp, Homo sapien
gaagatcaacttgggctgaggtccc

SEQ ID NO: 1284165 - DNA, 25 bp, Homo sapien
aagagacagaagatcaacttgggct

SEQ ID NO: 1284166 - DNA, 25 bp, Homo sapien
tcgcctttctcctggaagaggtcac

SEQ ID NO: 1284167 - DNA, 25 bp, Homo sapien
aatgccacagccttgagtggggcga

SEQ ID NO: 1284168 - DNA, 25 bp, Homo sapien
ccagaatgccacagccttgagtggg

SEQ ID NO: 1284169 - DNA, 25 bp, Homo sapien
gcccagaatgccacagccttgagtg

SEQ ID NO: 1284170 - DNA, 25 bp, Homo sapien
agcgcccagaatgccacagccttga

SEQ ID NO: 1284171 - DNA, 25 bp, Homo sapien
catggctgctcacattgtagtggaa

SEQ ID NO: 1284172 - DNA, 25 bp, Homo sapien
ggctgctcacattgtagtggaacgc

SEQ ID NO: 1284173 - DNA, 25 bp, Homo sapien
gctgctcacattgtagtggaacgcc

SEQ ID NO: 1284174 - DNA, 25 bp, Homo sapien
tggctgctcacattgtagtggaacg

SEQ ID NO: 1284175 - DNA, 25 bp, Homo sapien
gggcaccaccgcatgtagcaggtgc

SEQ ID NO: 1284176 - DNA, 25 bp, Homo sapien
cgggcaccaccgcatgtagcaggtg

SEQ ID NO: 1284177 - DNA, 25 bp, Homo sapien
ccactggtgccagctcatagctcat

SEQ ID NO: 1284178 - DNA, 25 bp, Homo sapien
cttcatcagagattcccactggtgc

SEQ ID NO: 1284179 - DNA, 25 bp, Homo sapien
tcatcagagattcccactggtgcca

SEQ ID NO: 1284180 - DNA, 25 bp, Homo sapien
gagattcccactggtgccagctcat

SEQ ID NO: 1284181 - DNA, 25 bp, Homo sapien
agacattgaggatgctgccccaggg

SEQ ID NO: 1284182 - DNA, 25 bp, Homo sapien
agcagggtgactggggcaggcgcca

SEQ ID NO: 1284183 - DNA, 25 bp, Homo sapien
cacacatgtggcgtcatcctgagct

SEQ ID NO: 1284184 - DNA, 25 bp, Homo sapien
tttccgaagttcagtggatggcccc

SEQ ID NO: 1284185 - DNA, 25 bp, Homo sapien
ggaaactcaagtggctgtacaggct

SEQ ID NO: 1284186 - DNA, 25 bp, Homo sapien
tctggatgcagcaatccaagtcccc

SEQ ID NO: 1284187 - DNA, 25 bp, Homo sapien
agccaatgcccccggtacgtgcaga

SEQ ID NO: 1284188 - DNA, 25 bp, Homo sapien
tcaacagccaatgcccccggtacgt

SEQ ID NO: 1284189 - DNA, 25 bp, Homo sapien
ccaatgcccccggtacgtgcagaaa

SEQ ID NO: 1284190 - DNA, 25 bp, Homo sapien
atgcccccggtacgtgcagaaaagc

SEQ ID NO: 1284191 - DNA, 25 bp, Homo sapien
gagctgcttcgaggaaagtcttgca

SEQ ID NO: 1284192 - DNA, 25 bp, Homo sapien
gccagtctgtaggagctgcttcgag

SEQ ID NO: 1284193 - DNA, 25 bp, Homo sapien
taaggtgaaagagccagtctgtagg

SEQ ID NO: 1284194 - DNA, 25 bp, Homo sapien
tgtatccaaaactatggcgtttaag

SEQ ID NO: 1284195 - DNA, 25 bp, Homo sapien
ctgggtcagaaacaggttcctcagg

SEQ ID NO: 1284196 - DNA, 25 bp, Homo sapien
ctgcatactctgcttctacgctgga

SEQ ID NO: 1284197 - DNA, 25 bp, Homo sapien
catactctgcttctacgctggacaa

SEQ ID NO: 1284198 - DNA, 25 bp, Homo sapien
gcttctacgctggacaactgtgcat

SEQ ID NO: 1284199 - DNA, 25 bp, Homo sapien
aactgtgcattttgagaagctggag

SEQ ID NO: 1284200 - DNA, 25 bp, Homo sapien
tgctcactggcaagtcaaacccaaa

SEQ ID NO: 1284201 - DNA, 25 bp, Homo sapien
tggcaagtcaaacccaaaaactgtc

SEQ ID NO: 1284202 - DNA, 25 bp, Homo sapien
ccagccaaacgtgctcactggcaag

SEQ ID NO: 1284203 - DNA, 25 bp, Homo sapien
ctggcagcccggatccaacaatact

SEQ ID NO: 1284204 - DNA, 25 bp, Homo sapien
aaaggaatgtgaagccctcttgctc

SEQ ID NO: 1284205 - DNA, 25 bp, Homo sapien
caaatgcggagtagaaaaggaatgt

SEQ ID NO: 1284206 - DNA, 25 bp, Homo sapien
gagttgccatgttggagtacaggcc

SEQ ID NO: 1284207 - DNA, 25 bp, Homo sapien
gaaccaggatttaggcacaggtctg

SEQ ID NO: 1284208 - DNA, 25 bp, Homo sapien
ttctaacggttgttcacagggcatc

SEQ ID NO: 1284209 - DNA, 25 bp, Homo sapien
tttctaacggttgttcacagggcat

SEQ ID NO: 1284210 - DNA, 25 bp, Homo sapien
gaacgctgatcaccgtactcagagt

SEQ ID NO: 1284211 - DNA, 25 bp, Homo sapien
ttgaacgctgatcaccgtactcaga

SEQ ID NO: 1284212 - DNA, 25 bp, Homo sapien
gagacttgaacgctgatcaccgtac

SEQ ID NO: 1284213 - DNA, 25 bp, Homo sapien
gacttgaacgctgatcaccgtactc

SEQ ID NO: 1284214 - DNA, 25 bp, Homo sapien
cattctcacagaccttacgatttat

SEQ ID NO: 1284215 - DNA, 25 bp, Homo sapien
gaaacgcagaactatcttcattctc

SEQ ID NO: 1284216 - DNA, 25 bp, Homo sapien
gatgctggtgctgtaagggatgtga

SEQ ID NO: 1284217 - DNA, 25 bp, Homo sapien
tgctgtaagggatgtgaaacgcaga

SEQ ID NO: 1284218 - DNA, 25 bp, Homo sapien
gagcccgaagcccgggtatgtgtcc

SEQ ID NO: 1284219 - DNA, 25 bp, Homo sapien
cgggagcccgaagcccgggtatgtg

SEQ ID NO: 1284220 - DNA, 25 bp, Homo sapien
ggagcccgaagcccgggtatgtgtc

SEQ ID NO: 1284221 - DNA, 25 bp, Homo sapien
gatccctgcaaacccgaagaaccat

SEQ ID NO: 1284222 - DNA, 25 bp, Homo sapien
tcactggaaggatccctgcaaaccc

SEQ ID NO: 1284223 - DNA, 25 bp, Homo sapien
gaaggatccctgcaaacccgaagaa

SEQ ID NO: 1284224 - DNA, 25 bp, Homo sapien
ctggaaggatccctgcaaacccgaa

SEQ ID NO: 1284225 - DNA, 25 bp, Homo sapien
cggcctggccgataggaaaacttgg

SEQ ID NO: 1284226 - DNA, 25 bp, Homo sapien
gcggcctggccgataggaaaacttg

SEQ ID NO: 1284227 - DNA, 25 bp, Homo sapien
ggcctggccgataggaaaacttgga

SEQ ID NO: 1284228 - DNA, 25 bp, Homo sapien
tgtctgtagcttccactgatgaaat

SEQ ID NO: 1284229 - DNA, 25 bp, Homo sapien
ttgtctgtagcttccactgatgaaa

SEQ ID NO: 1284230 - DNA, 25 bp, Homo sapien
gtctgtagcttccactgatgaaata

SEQ ID NO: 1284231 - DNA, 25 bp, Homo sapien
tttgtctgtagcttccactgatgaa

SEQ ID NO: 1284232 - DNA, 25 bp, Homo sapien
caggagtacactgtggtcttctgtc

SEQ ID NO: 1284233 - DNA, 25 bp, Homo sapien
ggaatctggattcctattacacttc

SEQ ID NO: 1284234 - DNA, 25 bp, Homo sapien
ggaaggtgatcagggggcgtggagg

SEQ ID NO: 1284235 - DNA, 25 bp, Homo sapien
cctattacacttctgaggaaggtga

SEQ ID NO: 1284236 - DNA, 25 bp, Homo sapien
ctcattggcccaggtgctgctcttc

SEQ ID NO: 1284237 - DNA, 25 bp, Homo sapien
tcttcctccggttgtctgctttcag

SEQ ID NO: 1284238 - DNA, 25 bp, Homo sapien
tctgctttcagccctgtgtagggaa

SEQ ID NO: 1284239 - DNA, 25 bp, Homo sapien
tccggttgtctgctttcagccctgt

SEQ ID NO: 1284240 - DNA, 25 bp, Homo sapien
tcttcctgactctcattttctgagg

SEQ ID NO: 1284241 - DNA, 25 bp, Homo sapien
tcaggtctgcgccctcatcttcctg

SEQ ID NO: 1284242 - DNA, 25 bp, Homo sapien
catcttcctgactctcattttctga

SEQ ID NO: 1284243 - DNA, 25 bp, Homo sapien
aggtctgcgccctcatcttcctgac

SEQ ID NO: 1284244 - DNA, 25 bp, Homo sapien
cttgtcccacacattgtgtccaaag

SEQ ID NO: 1284245 - DNA, 25 bp, Homo sapien
tcccacacattgtgtccaaaggtgc

SEQ ID NO: 1284246 - DNA, 25 bp, Homo sapien
cgtcgctcttgtcccacacattgtg

SEQ ID NO: 1284247 - DNA, 25 bp, Homo sapien
cacacattgtgtccaaaggtgccct

SEQ ID NO: 1284248 - DNA, 25 bp, Homo sapien
tcaggctgggatgccgcccagtaca

SEQ ID NO: 1284249 - DNA, 25 bp, Homo sapien
aggacagcaagatccccagcccttg

SEQ ID NO: 1284250 - DNA, 25 bp, Homo sapien
agcccttggaaaagcccatctccag

SEQ ID NO: 1284251 - DNA, 25 bp, Homo sapien
ctccaccacccaagctcctccttga

SEQ ID NO: 1284252 - DNA, 25 bp, Homo sapien
ccccttgctcagctgttctcaggac

SEQ ID NO: 1284253 - DNA, 25 bp, Homo sapien
ttcatccctttctgacatggtttgg

SEQ ID NO: 1284254 - DNA, 25 bp, Homo sapien
tcaggatatgctgtcacttcatccc

SEQ ID NO: 1284255 - DNA, 25 bp, Homo sapien
tcacacacatcaggatatgctgtca

SEQ ID NO: 1284256 - DNA, 25 bp, Homo sapien
cccatttattgaccgtatagctgtg

SEQ ID NO: 1284257 - DNA, 25 bp, Homo sapien
gctgacttgtgacggaagattctct

SEQ ID NO: 1284258 - DNA, 25 bp, Homo sapien
gacttgtgacggaagattctctatt

SEQ ID NO: 1284259 - DNA, 25 bp, Homo sapien
gattctctattgtaccctctgggga

SEQ ID NO: 1284260 - DNA, 25 bp, Homo sapien
ttgctgacttgtgacggaagattct

SEQ ID NO: 1284261 - DNA, 25 bp, Homo sapien
cgagacctgactcccggccagtggg

SEQ ID NO: 1284262 - DNA, 25 bp, Homo sapien
ggtcgagaaccgcagtcaaaccctc

SEQ ID NO: 1284263 - DNA, 25 bp, Homo sapien
gccgggggtcgagaaccgcagtcaa

SEQ ID NO: 1284264 - DNA, 25 bp, Homo sapien
tcgagaaccgcagtcaaaccctctt

SEQ ID NO: 1284265 - DNA, 25 bp, Homo sapien
tggtcgccgggggtcgagaaccgca

SEQ ID NO: 1284266 - DNA, 25 bp, Homo sapien
cggggatgccgaaggaagtggccca

SEQ ID NO: 1284267 - DNA, 25 bp, Homo sapien
ctgcccccggggatgccgaaggaag

SEQ ID NO: 1284268 - DNA, 25 bp, Homo sapien
gatgccgaaggaagtggcccataaa

SEQ ID NO: 1284269 - DNA, 25 bp, Homo sapien
gggatgccgaaggaagtggcccata

SEQ ID NO: 1284270 - DNA, 25 bp, Homo sapien
ccgagaggagcctcgttgagcgaac

SEQ ID NO: 1284271 - DNA, 25 bp, Homo sapien
tggccctggtcaacaggctcggaag

SEQ ID NO: 1284272 - DNA, 25 bp, Homo sapien
ctcgttgagcgaacccagccctctg

SEQ ID NO: 1284273 - DNA, 25 bp, Homo sapien
ccaggagggccgagaggagcctcgt

SEQ ID NO: 1284274 - DNA, 25 bp, Homo sapien
aagcctccaatcctaaggtctgact

SEQ ID NO: 1284275 - DNA, 25 bp, Homo sapien
caatcctaaggtctgactgtgcggg

SEQ ID NO: 1284276 - DNA, 25 bp, Homo sapien
gatgtagagatgttaaaagcctcca

SEQ ID NO: 1284277 - DNA, 25 bp, Homo sapien
tagagatgttaaaagcctccaatcc

SEQ ID NO: 1284278 - DNA, 25 bp, Homo sapien
tcctcctggcaacctggtgcgcggc

SEQ ID NO: 1284279 - DNA, 25 bp, Homo sapien
cctcctggcaacctggtgcgcggct

SEQ ID NO: 1284280 - DNA, 25 bp, Homo sapien
tggcaacctggtgcgcggctccgga

SEQ ID NO: 1284281 - DNA, 25 bp, Homo sapien
tcctggcaacctggtgcgcggctcc

SEQ ID NO: 1284282 - DNA, 25 bp, Homo sapien
gccctcggtgtgtcgcttgcaggct

SEQ ID NO: 1284283 - DNA, 25 bp, Homo sapien
ggactcgtggcctcggtgtccctcg

SEQ ID NO: 1284284 - DNA, 25 bp, Homo sapien
acttgctgccacctcgcaaaggcgc

SEQ ID NO: 1284285 - DNA, 25 bp, Homo sapien
agctgcggccgggtcgctgcaactc

SEQ ID NO: 1284286 - DNA, 25 bp, Homo sapien
cgtggagctgcacccaataagccca

SEQ ID NO: 1284287 - DNA, 25 bp, Homo sapien
cgtcatccgcgggagcagctttaga

SEQ ID NO: 1284288 - DNA, 25 bp, Homo sapien
atccgcgggagcagctttagagagc

SEQ ID NO: 1284289 - DNA, 25 bp, Homo sapien
tcatccgcgggagcagctttagaga

SEQ ID NO: 1284290 - DNA, 25 bp, Homo sapien
cgcccatcgggctgagctgcgaata

SEQ ID NO: 1284291 - DNA, 25 bp, Homo sapien
accccggagacgcccatcgggctga

SEQ ID NO: 1284292 - DNA, 25 bp, Homo sapien
gtcgccaccccggagacgcccatcg

SEQ ID NO: 1284293 - DNA, 25 bp, Homo sapien
ccggagacgcccatcgggctgagct

SEQ ID NO: 1284294 - DNA, 25 bp, Homo sapien
ccaagtcgtggcgtttgtggcagcc

SEQ ID NO: 1284295 - DNA, 25 bp, Homo sapien
aagtcgtggcgtttgtggcagcccc

SEQ ID NO: 1284296 - DNA, 25 bp, Homo sapien
caagccaagtcgtggcgtttgtggc

SEQ ID NO: 1284297 - DNA, 25 bp, Homo sapien
tggcgtttgtggcagccccggacac

SEQ ID NO: 1284298 - DNA, 25 bp, Homo sapien
cagccagtcagcggagcctcctcac

SEQ ID NO: 1284299 - DNA, 25 bp, Homo sapien
cgttgccagcgaaggcgctcgttag

SEQ ID NO: 1284300 - DNA, 25 bp, Homo sapien
ggcgatgcccgcgaatttgttaggg

SEQ ID NO: 1284301 - DNA, 25 bp, Homo sapien
cagcgaaggcgctcgttaggccttg

SEQ ID NO: 1284302 - DNA, 25 bp, Homo sapien
tccgttgccagcgaaggcgctcgtt

SEQ ID NO: 1284303 - DNA, 25 bp, Homo sapien
gctggggtcgcagatccaggcattt

SEQ ID NO: 1284304 - DNA, 25 bp, Homo sapien
ggctggggtcgcagatccaggcatt

SEQ ID NO: 1284305 - DNA, 25 bp, Homo sapien
aggctggggtcgcagatccaggcat

SEQ ID NO: 1284306 - DNA, 25 bp, Homo sapien
tcaggctggggtcgcagatccaggc

SEQ ID NO: 1284307 - DNA, 25 bp, Homo sapien
cacactttaagtgtactgttggaac

SEQ ID NO: 1284308 - DNA, 25 bp, Homo sapien
aggaaaatcactaggctctcacaaa

SEQ ID NO: 1284309 - DNA, 25 bp, Homo sapien
gctgcaagaaatcttaagagtcctc

SEQ ID NO: 1284310 - DNA, 25 bp, Homo sapien
ccatgtcagcaagtagatttgaccc

SEQ ID NO: 1284311 - DNA, 25 bp, Homo sapien
ggaacaagcaaacaatgggagcaag

SEQ ID NO: 1284312 - DNA, 25 bp, Homo sapien
ggatttcagagttcccagacgccta

SEQ ID NO: 1284313 - DNA, 25 bp, Homo sapien
gacaatggaacaagcaaacaatggg

SEQ ID NO: 1284314 - DNA, 25 bp, Homo sapien
agacagacaatggaacaagcaaaca

SEQ ID NO: 1284315 - DNA, 25 bp, Homo sapien
gcctctgcatgcgcctttcaggagg

SEQ ID NO: 1284316 - DNA, 25 bp, Homo sapien
ctgtgcctctgcatgcgcctttcag

SEQ ID NO: 1284317 - DNA, 25 bp, Homo sapien
ctctgcatgcgcctttcaggaggtc

SEQ ID NO: 1284318 - DNA, 25 bp, Homo sapien
gtgcctctgcatgcgcctttcagga

SEQ ID NO: 1284319 - DNA, 25 bp, Homo sapien
agaaggtgcgccggaggccctgcca

SEQ ID NO: 1284320 - DNA, 25 bp, Homo sapien
accacggcccagctgagccccgcgg

SEQ ID NO: 1284321 - DNA, 25 bp, Homo sapien
gccctgccagtttcccgccctgcag

SEQ ID NO: 1284322 - DNA, 25 bp, Homo sapien
tgctctcgccctacggccccagggc

SEQ ID NO: 1284323 - DNA, 25 bp, Homo sapien
gttgatttccgctctcagggctctt

SEQ ID NO: 1284324 - DNA, 25 bp, Homo sapien
ttgatttccgctctcagggctcttc

SEQ ID NO: 1284325 - DNA, 25 bp, Homo sapien
tgagaaatcaacgatttgtaaaaag

SEQ ID NO: 1284326 - DNA, 25 bp, Homo sapien
ctgagaaatcaacgatttgtaaaaa

SEQ ID NO: 1284327 - DNA, 25 bp, Homo sapien
tcctccgcggccccgagagcgactg

SEQ ID NO: 1284328 - DNA, 25 bp, Homo sapien
ctccgcggccccgagagcgactggg

SEQ ID NO: 1284329 - DNA, 25 bp, Homo sapien
tccgcggccccgagagcgactgggc

SEQ ID NO: 1284330 - DNA, 25 bp, Homo sapien
cctccgcggccccgagagcgactgg

SEQ ID NO: 1284331 - DNA, 25 bp, Homo sapien
cggcgcaaagaacgggaagaaccat

SEQ ID NO: 1284332 - DNA, 25 bp, Homo sapien
aggagcccacagggcgttcagcttc

SEQ ID NO: 1284333 - DNA, 25 bp, Homo sapien
ggaagaaccatcccaggagcccaca

SEQ ID NO: 1284334 - DNA, 25 bp, Homo sapien
ggcggctcgggctgggtcgccgacc

SEQ ID NO: 1284335 - DNA, 25 bp, Homo sapien
gcgggcgaaggcaattccgctgttc

SEQ ID NO: 1284336 - DNA, 25 bp, Homo sapien
aggcaattccgctgttctggctcca

SEQ ID NO: 1284337 - DNA, 25 bp, Homo sapien
agggcgggcgaaggcaattccgctg

SEQ ID NO: 1284338 - DNA, 25 bp, Homo sapien
gcgaaggcaattccgctgttctggc

SEQ ID NO: 1284339 - DNA, 25 bp, Homo sapien
ttttccaaggccttgctcggtggtc

SEQ ID NO: 1284340 - DNA, 25 bp, Homo sapien
tccaaggccttgctcggtggtcctg

SEQ ID NO: 1284341 - DNA, 25 bp, Homo sapien
aggccttgctcggtggtcctgccgg

SEQ ID NO: 1284342 - DNA, 25 bp, Homo sapien
cttgctcggtggtcctgccgggcgg

SEQ ID NO: 1284343 - DNA, 25 bp, Homo sapien
ctgggagtagagggaagggagttag

SEQ ID NO: 1284344 - DNA, 25 bp, Homo sapien
tcatcatgatagtgatcctctccat

SEQ ID NO: 1284345 - DNA, 25 bp, Homo sapien
gaatctttcatcatgatagtgatcc

SEQ ID NO: 1284346 - DNA, 25 bp, Homo sapien
tggaatctttcatcatgatagtgat

SEQ ID NO: 1284347 - DNA, 25 bp, Homo sapien
tctttcatcatgatagtgatcctct

SEQ ID NO: 1284348 - DNA, 25 bp, Homo sapien
tgtttcctgcgtaatatataagaaa

SEQ ID NO: 1284349 - DNA, 25 bp, Homo sapien
ctttcacttgggcattccaactttg

SEQ ID NO: 1284350 - DNA, 25 bp, Homo sapien
agtattcctgtctgaaatctacttg

SEQ ID NO: 1284351 - DNA, 25 bp, Homo sapien
gtttcctgcgtaatatataagaaaa

SEQ ID NO: 1284352 - DNA, 25 bp, Homo sapien
tgagccttcctgtcctgccttgctt

SEQ ID NO: 1284353 - DNA, 25 bp, Homo sapien
ctggccacttccccaaaacttctgt

SEQ ID NO: 1284354 - DNA, 25 bp, Homo sapien
cagggctctggccacttccccaaaa

SEQ ID NO: 1284355 - DNA, 25 bp, Homo sapien
gctctggccacttccccaaaacttc

SEQ ID NO: 1284356 - DNA, 25 bp, Homo sapien
ttatttttgtctggaggagatcacc

SEQ ID NO: 1284357 - DNA, 25 bp, Homo sapien
tgttctgcaccagcatttatttttg

SEQ ID NO: 1284358 - DNA, 25 bp, Homo sapien
catttatttttgtctggaggagatc

SEQ ID NO: 1284359 - DNA, 25 bp, Homo sapien
ctgttctgcaccagcatttattttt

SEQ ID NO: 1284360 - DNA, 25 bp, Homo sapien
taatccgaaacgttccagtctgcta

SEQ ID NO: 1284361 - DNA, 25 bp, Homo sapien
ttctcaggcccagcgaggcattaca

SEQ ID NO: 1284362 - DNA, 25 bp, Homo sapien
cattatttgaagacgggtgcacagg

SEQ ID NO: 1284363 - DNA, 25 bp, Homo sapien
cattgagacagcaaccacattctgc

SEQ ID NO: 1284364 - DNA, 25 bp, Homo sapien
tcaccgatagggcgtttctatgtag

SEQ ID NO: 1284365 - DNA, 25 bp, Homo sapien
tgtaggagcaagtccgggaccgctg

SEQ ID NO: 1284366 - DNA, 25 bp, Homo sapien
ctgtaggagcaagtccgggaccgct

SEQ ID NO: 1284367 - DNA, 25 bp, Homo sapien
tatataacaagtacaggaagcccac

SEQ ID NO: 1284368 - DNA, 25 bp, Homo sapien
gaaatggagactactgcaaatcggt

SEQ ID NO: 1284369 - DNA, 25 bp, Homo sapien
caaagtggcaacatcctaaagtact

SEQ ID NO: 1284370 - DNA, 25 bp, Homo sapien
tcagcaacccacactacaagaaatg

SEQ ID NO: 1284371 - DNA, 25 bp, Homo sapien
gagttgcagatttagagccctctgc

SEQ ID NO: 1284372 - DNA, 25 bp, Homo sapien
tgcagatttagagccctctgcagtg

SEQ ID NO: 1284373 - DNA, 25 bp, Homo sapien
tgagcaggtgagcacctggcatgat

SEQ ID NO: 1284374 - DNA, 25 bp, Homo sapien
ctgagttgcagatttagagccctct

SEQ ID NO: 1284375 - DNA, 25 bp, Homo sapien
aggacagggtgaccggtgggtggca

SEQ ID NO: 1284376 - DNA, 25 bp, Homo sapien
tgacaggacagggtgaccggtgggt

SEQ ID NO: 1284377 - DNA, 25 bp, Homo sapien
acagggtgaccggtgggtggcagca

SEQ ID NO: 1284378 - DNA, 25 bp, Homo sapien
caggacagggtgaccggtgggtggc

SEQ ID NO: 1284379 - DNA, 25 bp, Homo sapien
tgtgtgttccgcgactgccgcggcc

SEQ ID NO: 1284380 - DNA, 25 bp, Homo sapien
ggcccggcaccggaggccaggagag

SEQ ID NO: 1284381 - DNA, 25 bp, Homo sapien
gcgctgtgtgttccgcgactgccgc

SEQ ID NO: 1284382 - DNA, 25 bp, Homo sapien
ccaggagagcgttcccaacaggctc

SEQ ID NO: 1284383 - DNA, 25 bp, Homo sapien
tttgagcccaagtctcgctctattg

SEQ ID NO: 1284384 - DNA, 25 bp, Homo sapien
gggactataagcgtgggccaccatg

SEQ ID NO: 1284385 - DNA, 25 bp, Homo sapien
gactataagcgtgggccaccatgct

SEQ ID NO: 1284386 - DNA, 25 bp, Homo sapien
gcctcagcctccagacctcagcctc

SEQ ID NO: 1284387 - DNA, 25 bp, Homo sapien
ggcttctgcatcactgagcaagtct

SEQ ID NO: 1284388 - DNA, 25 bp, Homo sapien
cagcaccttagaatgcagccctggg

SEQ ID NO: 1284389 - DNA, 25 bp, Homo sapien
ttcctgcaagagctgcggagtgccc

SEQ ID NO: 1284390 - DNA, 25 bp, Homo sapien
ggctacaggacgaacttcggaccca

SEQ ID NO: 1284391 - DNA, 25 bp, Homo sapien
gcatgcgcgcgtacactgtcatgac

SEQ ID NO: 1284392 - DNA, 25 bp, Homo sapien
agccttccatctcccgtgcaattcc

SEQ ID NO: 1284393 - DNA, 25 bp, Homo sapien
gtgcaattcccacaacacgcatgcg

SEQ ID NO: 1284394 - DNA, 25 bp, Homo sapien
catgcgcgcgtacactgtcatgacg

SEQ ID NO: 1284395 - DNA, 25 bp, Homo sapien
ctggagccggcgggtaaggcggtgg

SEQ ID NO: 1284396 - DNA, 25 bp, Homo sapien
acagggcacctgagcagatcgttca

SEQ ID NO: 1284397 - DNA, 25 bp, Homo sapien
acctgagcagatcgttcactccaag

SEQ ID NO: 1284398 - DNA, 25 bp, Homo sapien
gctctccaccgaaaaagtgacttga

SEQ ID NO: 1284399 - DNA, 25 bp, Homo sapien
gacagtccgcgttgggggcacttgg

SEQ ID NO: 1284400 - DNA, 25 bp, Homo sapien
tcgggggactgtctgtcctcaaaac

SEQ ID NO: 1284401 - DNA, 25 bp, Homo sapien
ccacgggggctgtaggaaatccaag

SEQ ID NO: 1284402 - DNA, 25 bp, Homo sapien
taggaaatccaagcagaccagctgg

SEQ ID NO: 1284403 - DNA, 25 bp, Homo sapien
ataaaggtggtccatgcccacgggg

SEQ ID NO: 1284404 - DNA, 25 bp, Homo sapien
ggagcccccattgtgccccagaggt

SEQ ID NO: 1284405 - DNA, 25 bp, Homo sapien
acagagaggcctgggatactccccc

SEQ ID NO: 1284406 - DNA, 25 bp, Homo sapien
gtggggagcccccattgtgccccag

SEQ ID NO: 1284407 - DNA, 25 bp, Homo sapien
tgagaaggcccgtcaggggcccagg

SEQ ID NO: 1284408 - DNA, 25 bp, Homo sapien
aggccgccacggattggcacaggcc

SEQ ID NO: 1284409 - DNA, 25 bp, Homo sapien
cacggattggcacaggccgctgctg

SEQ ID NO: 1284410 - DNA, 25 bp, Homo sapien
ggccatcacgccacatttggagaac

SEQ ID NO: 1284411 - DNA, 25 bp, Homo sapien
tggagaacttgtcccgacagaggtc

SEQ ID NO: 1284412 - DNA, 25 bp, Homo sapien
cacactgtacgaacacagatctcct

SEQ ID NO: 1284413 - DNA, 25 bp, Homo sapien
tctccttgttaatgacgtacacacg

SEQ ID NO: 1284414 - DNA, 25 bp, Homo sapien
gttaatgacgtacacacggcggagg

SEQ ID NO: 1284415 - DNA, 25 bp, Homo sapien
ctcatgggcacacactgtacgaaca

SEQ ID NO: 1284416 - DNA, 25 bp, Homo sapien
ttgcaaggcctgtgtatggagtaga

SEQ ID NO: 1284417 - DNA, 25 bp, Homo sapien
gcgggtgcacgggtactgttcctca

SEQ ID NO: 1284418 - DNA, 25 bp, Homo sapien
tagaagcagacctcgttgagacact

SEQ ID NO: 1284419 - DNA, 25 bp, Homo sapien
gtgcacgggtactgttcctcacggc

SEQ ID NO: 1284420 - DNA, 25 bp, Homo sapien
gagcacacggattctcctgcacaca

SEQ ID NO: 1284421 - DNA, 25 bp, Homo sapien
agcagacgtgcccacgctcacagaa

SEQ ID NO: 1284422 - DNA, 25 bp, Homo sapien
tcacaccaacccacacgagagtgag

SEQ ID NO: 1284423 - DNA, 25 bp, Homo sapien
cacgctcacagaagcccacatagga

SEQ ID NO: 1284424 - DNA, 25 bp, Homo sapien
tttccagctgtcaagaaagccctta

SEQ ID NO: 1284425 - DNA, 25 bp, Homo sapien
caacttcagggcgtgcctccatttt

SEQ ID NO: 1284426 - DNA, 25 bp, Homo sapien
tgccaagagcccacatgggcaaggg

SEQ ID NO: 1284427 - DNA, 25 bp, Homo sapien
cctggtgatgccagcctacggcagt

SEQ ID NO: 1284428 - DNA, 25 bp, Homo sapien
ggcccaggctctgtgggctccagct

SEQ ID NO: 1284429 - DNA, 25 bp, Homo sapien
ggctccagctctgcatttcctggtt

SEQ ID NO: 1284430 - DNA, 25 bp, Homo sapien
caagaggcccaggctctgtgggctc

SEQ ID NO: 1284431 - DNA, 25 bp, Homo sapien
tgtgggctccagctctgcatttcct

SEQ ID NO: 1284432 - DNA, 25 bp, Homo sapien
ctggaactgttcctcggagggccga

SEQ ID NO: 1284433 - DNA, 25 bp, Homo sapien
tggaactggaactgttcctcggagg

SEQ ID NO: 1284434 - DNA, 25 bp, Homo sapien
gaactggaactgttcctcggagggc

SEQ ID NO: 1284435 - DNA, 25 bp, Homo sapien
actggaactggaactgttcctcgga

SEQ ID NO: 1284436 - DNA, 25 bp, Homo sapien
gctgccggcccgtcctatcctaccc

SEQ ID NO: 1284437 - DNA, 25 bp, Homo sapien
cagctgccggcccgtcctatcctac

SEQ ID NO: 1284438 - DNA, 25 bp, Homo sapien
agctgccggcccgtcctatcctacc

SEQ ID NO: 1284439 - DNA, 25 bp, Homo sapien
tgataatcatagtagtctgggttgt

SEQ ID NO: 1284440 - DNA, 25 bp, Homo sapien
ttgataatcatagtagtctgggttg

SEQ ID NO: 1284441 - DNA, 25 bp, Homo sapien
tggggcaaacaagttccctcctgag

SEQ ID NO: 1284442 - DNA, 25 bp, Homo sapien
gaattggtgggagtaaggctaatcc

SEQ ID NO: 1284443 - DNA, 25 bp, Homo sapien
gatgaaagtggaattggtgggagta

SEQ ID NO: 1284444 - DNA, 25 bp, Homo sapien
tcagcgtgtccagtgcggtccctgg

SEQ ID NO: 1284445 - DNA, 25 bp, Homo sapien
tggacgtggtcagggaacggcggca

SEQ ID NO: 1284446 - DNA, 25 bp, Homo sapien
cgatctggtcgctatagtgggtgta

SEQ ID NO: 1284447 - DNA, 25 bp, Homo sapien
tcgctatagtgggtgtactggacgt

SEQ ID NO: 1284448 - DNA, 25 bp, Homo sapien
gcggcagcgggtccaggtcatactg

SEQ ID NO: 1284449 - DNA, 25 bp, Homo sapien
gaagggccctgaatggatctagaac

SEQ ID NO: 1284450 - DNA, 25 bp, Homo sapien
ggtagggactcaacacatcgctgct

SEQ ID NO: 1284451 - DNA, 25 bp, Homo sapien
tcttcatttggccagtagggacccc

SEQ ID NO: 1284452 - DNA, 25 bp, Homo sapien
ggcaaagcatgtagggtaccccatc

SEQ ID NO: 1284453 - DNA, 25 bp, Homo sapien
tagcaggaagaggtaggcagctctc

SEQ ID NO: 1284454 - DNA, 25 bp, Homo sapien
aggcaggaatagcaggaagaggtag

SEQ ID NO: 1284455 - DNA, 25 bp, Homo sapien
gaatagcaggaagaggtaggcagct

SEQ ID NO: 1284456 - DNA, 25 bp, Homo sapien
caggcaggaatagcaggaagaggta

SEQ ID NO: 1284457 - DNA, 25 bp, Homo sapien
aggcaggccggggtggtgtcagaga

SEQ ID NO: 1284458 - DNA, 25 bp, Homo sapien
gcaggccggggtggtgtcagagagg

SEQ ID NO: 1284459 - DNA, 25 bp, Homo sapien
ggcaggccggggtggtgtcagagag

SEQ ID NO: 1284460 - DNA, 25 bp, Homo sapien
gcccatccttgggaccccagccctg

SEQ ID NO: 1284461 - DNA, 25 bp, Homo sapien
tccaaggcactgactgcgtgaatca

SEQ ID NO: 1284462 - DNA, 25 bp, Homo sapien
ctgactgcgtgaatcactgaaccca

SEQ ID NO: 1284463 - DNA, 25 bp, Homo sapien
ggtgtccaaggcactgactgcgtga

SEQ ID NO: 1284464 - DNA, 25 bp, Homo sapien
cagctgcggcctcccccacccccga

SEQ ID NO: 1284465 - DNA, 25 bp, Homo sapien
ggcctcttccacagctgcggcctcc

SEQ ID NO: 1284466 - DNA, 25 bp, Homo sapien
tctggcctcttccacagctgcggcc

SEQ ID NO: 1284467 - DNA, 25 bp, Homo sapien
ctctggcctcttccacagctgcggc

SEQ ID NO: 1284468 - DNA, 25 bp, Homo sapien
ccgctccgagtccgcccgccggagc

SEQ ID NO: 1284469 - DNA, 25 bp, Homo sapien
gagctgcccgcatgggccgccacgc

SEQ ID NO: 1284470 - DNA, 25 bp, Homo sapien
gcgagctgcccgcatgggccgccac

SEQ ID NO: 1284471 - DNA, 25 bp, Homo sapien
catgggccgccacgccgtgccctcg

SEQ ID NO: 1284472 - DNA, 25 bp, Homo sapien
cgcatgggccgccacgccgtgccct

SEQ ID NO: 1284473 - DNA, 25 bp, Homo sapien
tcctacactgctgagctctgggcca

SEQ ID NO: 1284474 - DNA, 25 bp, Homo sapien
gggcaagggtaggtgtgttgcccat

SEQ ID NO: 1284475 - DNA, 25 bp, Homo sapien
ctcagccagaaagtaagcctcgatc

SEQ ID NO: 1284476 - DNA, 25 bp, Homo sapien
ctgctcctcactcgacgtcgacggg

SEQ ID NO: 1284477 - DNA, 25 bp, Homo sapien
tcttttgtgactccgttcactgctc

SEQ ID NO: 1284478 - DNA, 25 bp, Homo sapien
ttttgtgactccgttcactgctccc

SEQ ID NO: 1284479 - DNA, 25 bp, Homo sapien
ttcttttgtgactccgttcactgct

SEQ ID NO: 1284480 - DNA, 25 bp, Homo sapien
tttcttttgtgactccgttcactgc

SEQ ID NO: 1284481 - DNA, 25 bp, Homo sapien
ctgtccaacagattcatgaataatc

SEQ ID NO: 1284482 - DNA, 25 bp, Homo sapien
tgtccaacagattcatgaataatca

SEQ ID NO: 1284483 - DNA, 25 bp, Homo sapien
gtccaacagattcatgaataatcag

SEQ ID NO: 1284484 - DNA, 25 bp, Homo sapien
gattcaacgttttctcagcccctac

SEQ ID NO: 1284485 - DNA, 25 bp, Homo sapien
ccagcatgattcaacgttttctcag

SEQ ID NO: 1284486 - DNA, 25 bp, Homo sapien
ttttctcagcccctactctggcagg

SEQ ID NO: 1284487 - DNA, 25 bp, Homo sapien
ttctccccagcatgattcaacgttt

SEQ ID NO: 1284488 - DNA, 25 bp, Homo sapien
caggaaaatatcatgactttatttg

SEQ ID NO: 1284489 - DNA, 25 bp, Homo sapien
ggctgccacccctacgcgggatggt

SEQ ID NO: 1284490 - DNA, 25 bp, Homo sapien
ccacccctacgcgggatggtccaag

SEQ ID NO: 1284491 - DNA, 25 bp, Homo sapien
ggggctgccacccctacgcgggatg

SEQ ID NO: 1284492 - DNA, 25 bp, Homo sapien
ccctacgcgggatggtccaaggtag

SEQ ID NO: 1284493 - DNA, 25 bp, Homo sapien
cagtagtcaacgcttccccagggtg

SEQ ID NO: 1284494 - DNA, 25 bp, Homo sapien
agtagtcaacgcttccccagggtgg

SEQ ID NO: 1284495 - DNA, 25 bp, Homo sapien
agacagtcgccaacctcagggatgt

SEQ ID NO: 1284496 - DNA, 25 bp, Homo sapien
ggaggagtgtagacagtcgccaacc

SEQ ID NO: 1284497 - DNA, 25 bp, Homo sapien
tgcttgaagcgcttcttggaggccc

SEQ ID NO: 1284498 - DNA, 25 bp, Homo sapien
ctgcttgaagcgcttcttggaggcc

SEQ ID NO: 1284499 - DNA, 25 bp, Homo sapien
agcttgaagccggtgtcagtgatgt

SEQ ID NO: 1284500 - DNA, 25 bp, Homo sapien
tgtcagtgatgttcctcagcgccag

SEQ ID NO: 1284501 - DNA, 25 bp, Homo sapien
ccccacgaagttgagggtgaccaga

SEQ ID NO: 1284502 - DNA, 25 bp, Homo sapien
ggacaaggcccaccaggacggagct

SEQ ID NO: 1284503 - DNA, 25 bp, Homo sapien
cggcacccacagacacacgtgtgca

SEQ ID NO: 1284504 - DNA, 25 bp, Homo sapien
tgggagcaggagagtctctcaggca

SEQ ID NO: 1284505 - DNA, 25 bp, Homo sapien
gagtctctcaggcaggagccacgcc

SEQ ID NO: 1284506 - DNA, 25 bp, Homo sapien
cagtcttccactcggccggcacctc

SEQ ID NO: 1284507 - DNA, 25 bp, Homo sapien
tctggtgcggccactgtcctgttca

SEQ ID NO: 1284508 - DNA, 25 bp, Homo sapien
gttctcgtagttgggcaggttgtct

SEQ ID NO: 1284509 - DNA, 25 bp, Homo sapien
ccacggtgttctcgtagttgggcag

SEQ ID NO: 1284510 - DNA, 25 bp, Homo sapien
agaccacggtgttctcgtagttggg

SEQ ID NO: 1284511 - DNA, 25 bp, Homo sapien
cagggaacgaacgtggggtggacag

SEQ ID NO: 1284512 - DNA, 25 bp, Homo sapien
ggtggtcagtcagctccctactcac

SEQ ID NO: 1284513 - DNA, 25 bp, Homo sapien
tcagggaacgaacgtggggtggaca

SEQ ID NO: 1284514 - DNA, 25 bp, Homo sapien
gggggtggtcagtcagctccctact

SEQ ID NO: 1284515 - DNA, 25 bp, Homo sapien
tgaccaggtcgatggccaggaactg

SEQ ID NO: 1284516 - DNA, 25 bp, Homo sapien
cccgtgcggctcatgagcactgcca

SEQ ID NO: 1284517 - DNA, 25 bp, Homo sapien
gtcaggaagtagccccctagctgca

SEQ ID NO: 1284518 - DNA, 25 bp, Homo sapien
actgccactgtggtggtgatgacca

SEQ ID NO: 1284519 - DNA, 25 bp, Homo sapien
tgtagaggatcaggacggagatgaa

SEQ ID NO: 1284520 - DNA, 25 bp, Homo sapien
tagaggatcaggacggagatgaact

SEQ ID NO: 1284521 - DNA, 25 bp, Homo sapien
aggatcaggacggagatgaactggg

SEQ ID NO: 1284522 - DNA, 25 bp, Homo sapien
gatcaggacggagatgaactgggtc

SEQ ID NO: 1284523 - DNA, 25 bp, Homo sapien
tgaacgaagtgtcaagggaacagcg

SEQ ID NO: 1284524 - DNA, 25 bp, Homo sapien
aacgaagtgtcaagggaacagcgcc

SEQ ID NO: 1284525 - DNA, 25 bp, Homo sapien
acgaagtgtcaagggaacagcgccc

SEQ ID NO: 1284526 - DNA, 25 bp, Homo sapien
ctgaacgaagtgtcaagggaacagc

SEQ ID NO: 1284527 - DNA, 25 bp, Homo sapien
gcctgggacagcgagatgccgacat

SEQ ID NO: 1284528 - DNA, 25 bp, Homo sapien
caatactggccatgctcgaggtgaa

SEQ ID NO: 1284529 - DNA, 25 bp, Homo sapien
ccatgggcacgcactcaatactggc

SEQ ID NO: 1284530 - DNA, 25 bp, Homo sapien
gtcattggcgccgtctccgcacatg

SEQ ID NO: 1284531 - DNA, 25 bp, Homo sapien
gctcaggggccatgcgggcaaagac

SEQ ID NO: 1284532 - DNA, 25 bp, Homo sapien
tctgtagctcgcacaccagctctgt

SEQ ID NO: 1284533 - DNA, 25 bp, Homo sapien
aagcttctgtagctcgcacaccagc

SEQ ID NO: 1284534 - DNA, 25 bp, Homo sapien
ctcaggggccatgcgggcaaagaca

SEQ ID NO: 1284535 - DNA, 25 bp, Homo sapien
caatgataccaaaggtgggcccgct

SEQ ID NO: 1284536 - DNA, 25 bp, Homo sapien
aagtgcttcacaatgataccaaagg

SEQ ID NO: 1284537 - DNA, 25 bp, Homo sapien
ttcacaatgataccaaaggtgggcc

SEQ ID NO: 1284538 - DNA, 25 bp, Homo sapien
atgataccaaaggtgggcccgctga

SEQ ID NO: 1284539 - DNA, 25 bp, Homo sapien
ggtacagctggaactctgggttagc

SEQ ID NO: 1284540 - DNA, 25 bp, Homo sapien
agctggaactctgggttagcctcac

SEQ ID NO: 1284541 - DNA, 25 bp, Homo sapien
tgaggtacagctggaactctgggtt

SEQ ID NO: 1284542 - DNA, 25 bp, Homo sapien
tacagctggaactctgggttagcct

SEQ ID NO: 1284543 - DNA, 25 bp, Homo sapien
tgggggactccatcggcaggaactc

SEQ ID NO: 1284544 - DNA, 25 bp, Homo sapien
tggacgatgatcagatgctcctggg

SEQ ID NO: 1284545 - DNA, 25 bp, Homo sapien
ggcgtggacgatgatcagatgctcc

SEQ ID NO: 1284546 - DNA, 25 bp, Homo sapien
catcggcaggaactcgagagaggca

SEQ ID NO: 1284547 - DNA, 25 bp, Homo sapien
agtaggttcctcatgaccagcagcc

SEQ ID NO: 1284548 - DNA, 25 bp, Homo sapien
ggtccttcgcagagcctggataact

SEQ ID NO: 1284549 - DNA, 25 bp, Homo sapien
ctgtcaccatgacggcgcggatgcg

SEQ ID NO: 1284550 - DNA, 25 bp, Homo sapien
tggataactggcgttgtctgcggct

SEQ ID NO: 1284551 - DNA, 25 bp, Homo sapien
cagcatctgggcgaagtcggtgggc

SEQ ID NO: 1284552 - DNA, 25 bp, Homo sapien
cacgacacggtagccagcagctgta

SEQ ID NO: 1284553 - DNA, 25 bp, Homo sapien
cacggtagccagcagctgtatagct

SEQ ID NO: 1284554 - DNA, 25 bp, Homo sapien
tggccagggccacgacacggtagcc

SEQ ID NO: 1284555 - DNA, 25 bp, Homo sapien
tgacgtaggcctcgggctgagtggc

SEQ ID NO: 1284556 - DNA, 25 bp, Homo sapien
gcctttgacgtaggcctcgggctga

SEQ ID NO: 1284557 - DNA, 25 bp, Homo sapien
tgccaccagctccggggagcctttg

SEQ ID NO: 1284558 - DNA, 25 bp, Homo sapien
cagctccggggagcctttgacgtag

SEQ ID NO: 1284559 - DNA, 25 bp, Homo sapien
agaaggggaagcggtggaggacgct

SEQ ID NO: 1284560 - DNA, 25 bp, Homo sapien
tgcacccaacaggcccccctcagct

SEQ ID NO: 1284561 - DNA, 25 bp, Homo sapien
gcacccaacaggcccccctcagctc

SEQ ID NO: 1284562 - DNA, 25 bp, Homo sapien
gctgagtctgcagccggctcttcct

SEQ ID NO: 1284563 - DNA, 25 bp, Homo sapien
ggctcccaaagtgggggtctcatca

SEQ ID NO: 1284564 - DNA, 25 bp, Homo sapien
ctgggtcccaaatgctgagtctgca

SEQ ID NO: 1284565 - DNA, 25 bp, Homo sapien
tctcatcactgccaagacctgggtc

SEQ ID NO: 1284566 - DNA, 25 bp, Homo sapien
taagccgtcctcagtgagggtgccc

SEQ ID NO: 1284567 - DNA, 25 bp, Homo sapien
gactccaccatcttcaagtccatgg

SEQ ID NO: 1284568 - DNA, 25 bp, Homo sapien
cgtctaagccgtcctcagtgagggt

SEQ ID NO: 1284569 - DNA, 25 bp, Homo sapien
catcacgtctaagccgtcctcagtg

SEQ ID NO: 1284570 - DNA, 25 bp, Homo sapien
cccagtttaaaagcgctctgtggcc

SEQ ID NO: 1284571 - DNA, 25 bp, Homo sapien
gaatgtcacctagcctctgtcaacc

SEQ ID NO: 1284572 - DNA, 25 bp, Homo sapien
gtggcccccgacagcctctgaatgt

SEQ ID NO: 1284573 - DNA, 25 bp, Homo sapien
tcaggtacgcagcacatctgtgcca

SEQ ID NO: 1284574 - DNA, 25 bp, Homo sapien
caggacctggcatcctgtgggtgct

SEQ ID NO: 1284575 - DNA, 25 bp, Homo sapien
ctgccagaccgtgagcccagtgagg

SEQ ID NO: 1284576 - DNA, 25 bp, Homo sapien
catttcatctgccagaccgtgagcc

SEQ ID NO: 1284577 - DNA, 25 bp, Homo sapien
agaataacgcgggtgtggaggcctc

SEQ ID NO: 1284578 - DNA, 25 bp, Homo sapien
tctgggcgtagagcgtgcacacagt

SEQ ID NO: 1284579 - DNA, 25 bp, Homo sapien
cgtgcacacagtcatggcagcaggc

SEQ ID NO: 1284580 - DNA, 25 bp, Homo sapien
cgagagcccggattacaatctcatt

SEQ ID NO: 1284581 - DNA, 25 bp, Homo sapien
aaaatgccctgtctccgcagtcggc

SEQ ID NO: 1284582 - DNA, 25 bp, Homo sapien
ttcggtagaggatgaagatgctgta

SEQ ID NO: 1284583 - DNA, 25 bp, Homo sapien
tgaagatgctgtagatggtgccgag

SEQ ID NO: 1284584 - DNA, 25 bp, Homo sapien
gatgctgtagatggtgccgaggaga

SEQ ID NO: 1284585 - DNA, 25 bp, Homo sapien
ccggtttcggtagaggatgaagatg

SEQ ID NO: 1284586 - DNA, 25 bp, Homo sapien
gggacagcgaaggactgagtgggat

SEQ ID NO: 1284587 - DNA, 25 bp, Homo sapien
cagcgaaggactgagtgggatttgg

SEQ ID NO: 1284588 - DNA, 25 bp, Homo sapien
tgtggggacagcgaaggactgagtg

SEQ ID NO: 1284589 - DNA, 25 bp, Homo sapien
ggactgagtgggatttgggacccag

SEQ ID NO: 1284590 - DNA, 25 bp, Homo sapien
gagagggcagccacaaacttcatgc

SEQ ID NO: 1284591 - DNA, 25 bp, Homo sapien
atggagctcaccaggcccccttttg

SEQ ID NO: 1284592 - DNA, 25 bp, Homo sapien
aacttcatgctgtgtttatagaact

SEQ ID NO: 1284593 - DNA, 25 bp, Homo sapien
tatagaacttgaagttgatgggccg

SEQ ID NO: 1284594 - DNA, 25 bp, Homo sapien
actgccaggacgtgcggtcccacat

SEQ ID NO: 1284595 - DNA, 25 bp, Homo sapien
tgtgtctctgcacagtagggcccca

SEQ ID NO: 1284596 - DNA, 25 bp, Homo sapien
tgtgtgccgccggtgtgtctctgca

SEQ ID NO: 1284597 - DNA, 25 bp, Homo sapien
tgcaagatgagggtcccgcagaaga

SEQ ID NO: 1284598 - DNA, 25 bp, Homo sapien
tgtgtagaattgtcccacaagctct

SEQ ID NO: 1284599 - DNA, 25 bp, Homo sapien
gaattgtcccacaagctctaagtct

SEQ ID NO: 1284600 - DNA, 25 bp, Homo sapien
tggggaacgtggtgtgaggaccact

SEQ ID NO: 1284601 - DNA, 25 bp, Homo sapien
gtagaattgtcccacaagctctaag

SEQ ID NO: 1284602 - DNA, 25 bp, Homo sapien
ctccgggcactagctcactggagtc

SEQ ID NO: 1284603 - DNA, 25 bp, Homo sapien
gggcactagctcactggagtccacc

SEQ ID NO: 1284604 - DNA, 25 bp, Homo sapien
accaggcagtctccgggcactagct

SEQ ID NO: 1284605 - DNA, 25 bp, Homo sapien
tctcattcaccatgcactcgccggc

SEQ ID NO: 1284606 - DNA, 25 bp, Homo sapien
tgcaggcaggcaggagaggagctca

SEQ ID NO: 1284607 - DNA, 25 bp, Homo sapien
gcaggcaggcaggagaggagctcag

SEQ ID NO: 1284608 - DNA, 25 bp, Homo sapien
ctgcaggcaggcaggagaggagctc

SEQ ID NO: 1284609 - DNA, 25 bp, Homo sapien
acgcacacccgcatggacaacttga

SEQ ID NO: 1284610 - DNA, 25 bp, Homo sapien
cacgcacacccgcatggacaacttg

SEQ ID NO: 1284611 - DNA, 25 bp, Homo sapien
acacccgcatggacaacttgaccat

SEQ ID NO: 1284612 - DNA, 25 bp, Homo sapien
gcacacccgcatggacaacttgacc

SEQ ID NO: 1284613 - DNA, 25 bp, Homo sapien
gatgcacagggcgtaccagtagtag

SEQ ID NO: 1284614 - DNA, 25 bp, Homo sapien
cttgtacagcgacaggcagatggag

SEQ ID NO: 1284615 - DNA, 25 bp, Homo sapien
ccagtagtagtggtcagccagccac

SEQ ID NO: 1284616 - DNA, 25 bp, Homo sapien
tcagccagccacagcgcgatgctga

SEQ ID NO: 1284617 - DNA, 25 bp, Homo sapien
ggaacccatagtaggggttcagtgc

SEQ ID NO: 1284618 - DNA, 25 bp, Homo sapien
gctgatcacgttggggccgtaaatg

SEQ ID NO: 1284619 - DNA, 25 bp, Homo sapien
ggtaggacttgaccggtatgctgat

SEQ ID NO: 1284620 - DNA, 25 bp, Homo sapien
gacttgaccggtatgctgatcacgt

SEQ ID NO: 1284621 - DNA, 25 bp, Homo sapien
tgaccggtatgctgatcacgttggg

SEQ ID NO: 1284622 - DNA, 25 bp, Homo sapien
gtcgtcacaagagcggccatggtcc

SEQ ID NO: 1284623 - DNA, 25 bp, Homo sapien
gagcggtggacgtcgtcacaagagc

SEQ ID NO: 1284624 - DNA, 25 bp, Homo sapien
gtggacgtcgtcacaagagcggcca

SEQ ID NO: 1284625 - DNA, 25 bp, Homo sapien
atggcgggagcggtggacgtcgtca

SEQ ID NO: 1284626 - DNA, 25 bp, Homo sapien
ttctggctgcatgtgaatcccctgc

SEQ ID NO: 1284627 - DNA, 25 bp, Homo sapien
ccttctggctgcatgtgaatcccct

SEQ ID NO: 1284628 - DNA, 25 bp, Homo sapien
cttctggctgcatgtgaatcccctg

SEQ ID NO: 1284629 - DNA, 25 bp, Homo sapien
gccttctggctgcatgtgaatcccc

SEQ ID NO: 1284630 - DNA, 25 bp, Homo sapien
aggccatgccatgccaccgtctgtg

SEQ ID NO: 1284631 - DNA, 25 bp, Homo sapien
gccaccgtctgtgcccaaaccagtg

SEQ ID NO: 1284632 - DNA, 25 bp, Homo sapien
gtctgtgcccaaaccagtgccactc

SEQ ID NO: 1284633 - DNA, 25 bp, Homo sapien
caggccatgccatgccaccgtctgt

SEQ ID NO: 1284634 - DNA, 25 bp, Homo sapien
gggtctcgatccagatatagcgctg

SEQ ID NO: 1284635 - DNA, 25 bp, Homo sapien
ctgacctggtagaaggcttgctggg

SEQ ID NO: 1284636 - DNA, 25 bp, Homo sapien
gatccagatatagcgctggccctgg

SEQ ID NO: 1284637 - DNA, 25 bp, Homo sapien
ggaagaggtaataccgcagcacccg

SEQ ID NO: 1284638 - DNA, 25 bp, Homo sapien
ccggccatcctctgcctgggactgt

SEQ ID NO: 1284639 - DNA, 25 bp, Homo sapien
tggtaccgccccaactgccgcctgg

SEQ ID NO: 1284640 - DNA, 25 bp, Homo sapien
ttccaggcaccctctggtaccgccc

SEQ ID NO: 1284641 - DNA, 25 bp, Homo sapien
gagctgggccgtatccttccaggca

SEQ ID NO: 1284642 - DNA, 25 bp, Homo sapien
cctaggatgggaggcgccagagtca

SEQ ID NO: 1284643 - DNA, 25 bp, Homo sapien
cctccctaggatgggaggcgccaga

SEQ ID NO: 1284644 - DNA, 25 bp, Homo sapien
cagagtcagcctttatgggggggcc

SEQ ID NO: 1284645 - DNA, 25 bp, Homo sapien
gcgccagagtcagcctttatggggg

SEQ ID NO: 1284646 - DNA, 25 bp, Homo sapien
tgcacctggacagtgaagagctgcc

SEQ ID NO: 1284647 - DNA, 25 bp, Homo sapien
ctgccctcgccgatggcctcagtct

SEQ ID NO: 1284648 - DNA, 25 bp, Homo sapien
tcagtctgcacctggacagtgaaga

SEQ ID NO: 1284649 - DNA, 25 bp, Homo sapien
gccctcgccgatggcctcagtctgc

SEQ ID NO: 1284650 - DNA, 25 bp, Homo sapien
tgcccaatgctcagatgggaaagct

SEQ ID NO: 1284651 - DNA, 25 bp, Homo sapien
tcccatggaaagtcagtggccgggt

SEQ ID NO: 1284652 - DNA, 25 bp, Homo sapien
acagaggtatggactcagtctcaga

SEQ ID NO: 1284653 - DNA, 25 bp, Homo sapien
gtccagagaagagcgggacctgcct

SEQ ID NO: 1284654 - DNA, 25 bp, Homo sapien
tcatccagaccacgacgtgatagcc

SEQ ID NO: 1284655 - DNA, 25 bp, Homo sapien
ataacgagtgtttcggcgtgggcca

SEQ ID NO: 1284656 - DNA, 25 bp, Homo sapien
tagccgatgaccctccatggactgc

SEQ ID NO: 1284657 - DNA, 25 bp, Homo sapien
catggactgccacagtagccgctga

SEQ ID NO: 1284658 - DNA, 25 bp, Homo sapien
cgaacgcagcgagagagggcccagg

SEQ ID NO: 1284659 - DNA, 25 bp, Homo sapien
tatcgtcagggtcccataaccggtg

SEQ ID NO: 1284660 - DNA, 25 bp, Homo sapien
gggcgtgctgcccacgagagggctg

SEQ ID NO: 1284661 - DNA, 25 bp, Homo sapien
gggatctattgatgtccctatcgtc

SEQ ID NO: 1284662 - DNA, 25 bp, Homo sapien
aaactgaggagctgaggggatctat

SEQ ID NO: 1284663 - DNA, 25 bp, Homo sapien
tgtctgtctcttggacacaacagag

SEQ ID NO: 1284664 - DNA, 25 bp, Homo sapien
aatgtctgtctcttggacacaacag

SEQ ID NO: 1284665 - DNA, 25 bp, Homo sapien
gaatgtctgtctcttggacacaaca

SEQ ID NO: 1284666 - DNA, 25 bp, Homo sapien
tgaatgtctgtctcttggacacaac

SEQ ID NO: 1284667 - DNA, 25 bp, Homo sapien
aagcgcccggcttccaatcccgcgg

SEQ ID NO: 1284668 - DNA, 25 bp, Homo sapien
gacatccgtcactcggggtgggatc

SEQ ID NO: 1284669 - DNA, 25 bp, Homo sapien
aggaccctcttgcacaagcgcccgg

SEQ ID NO: 1284670 - DNA, 25 bp, Homo sapien
tgggatccgattaagtgggcgtggg

SEQ ID NO: 1284671 - DNA, 25 bp, Homo sapien
ggagggaccggctgcgagcggcggc

SEQ ID NO: 1284672 - DNA, 25 bp, Homo sapien
ggctgacgcgggcggggcacctggg

SEQ ID NO: 1284673 - DNA, 25 bp, Homo sapien
tgggccccggcgtgcgcaaggccct

SEQ ID NO: 1284674 - DNA, 25 bp, Homo sapien
ctctgagctggttataaatcatgtt

SEQ ID NO: 1284675 - DNA, 25 bp, Homo sapien
gctctgagctggttataaatcatgt

SEQ ID NO: 1284676 - DNA, 25 bp, Homo sapien
tgatctctgcaatagctttccctgg

SEQ ID NO: 1284677 - DNA, 25 bp, Homo sapien
atctctgcaatagctttccctggat

SEQ ID NO: 1284678 - DNA, 25 bp, Homo sapien
ttgatctctgcaatagctttccctg

SEQ ID NO: 1284679 - DNA, 25 bp, Homo sapien
tctctgcaatagctttccctggatt

SEQ ID NO: 1284680 - DNA, 25 bp, Homo sapien
ccttcctcagctggttcagtgtcca

SEQ ID NO: 1284681 - DNA, 25 bp, Homo sapien
caatcttgggtgaaactccttcctc

SEQ ID NO: 1284682 - DNA, 25 bp, Homo sapien
ggtgaatgcaaatcaagtccctcaa

SEQ ID NO: 1284683 - DNA, 25 bp, Homo sapien
tcagtgtccaagcaaggtgaatgca

SEQ ID NO: 1284684 - DNA, 25 bp, Homo sapien
gccacgttgaattccttcttgtgtg

SEQ ID NO: 1284685 - DNA, 25 bp, Homo sapien
agctctgccacgttgaattccttct

SEQ ID NO: 1284686 - DNA, 25 bp, Homo sapien
acgttgaattccttcttgtgtggct

SEQ ID NO: 1284687 - DNA, 25 bp, Homo sapien
cctctggcaagagctctgccacgtt

SEQ ID NO: 1284688 - DNA, 25 bp, Homo sapien
cattggtattagctgcagtttgccc

SEQ ID NO: 1284689 - DNA, 25 bp, Homo sapien
tcagggtagtgtctcttctaggact

SEQ ID NO: 1284690 - DNA, 25 bp, Homo sapien
tatgtggaagaaactaccctctcta

SEQ ID NO: 1284691 - DNA, 25 bp, Homo sapien
gactgctcaaagacactcagggtag

SEQ ID NO: 1284692 - DNA, 25 bp, Homo sapien
tgtgatagtaccacaaaacagactg

SEQ ID NO: 1284693 - DNA, 25 bp, Homo sapien
gggtaatacagcacgaaggttcttg

SEQ ID NO: 1284694 - DNA, 25 bp, Homo sapien
gagctgtgcgtcaaataaacttctt

SEQ ID NO: 1284695 - DNA, 25 bp, Homo sapien
ttcttgttagatgctggcgccagcc

SEQ ID NO: 1284696 - DNA, 25 bp, Homo sapien
gggcagccggtctgtagccagctgt

SEQ ID NO: 1284697 - DNA, 25 bp, Homo sapien
caaagggcagccggtctgtagccag

SEQ ID NO: 1284698 - DNA, 25 bp, Homo sapien
gccaaagggcagccggtctgtagcc

SEQ ID NO: 1284699 - DNA, 25 bp, Homo sapien
gcagccggtctgtagccagctgtgg

SEQ ID NO: 1284700 - DNA, 25 bp, Homo sapien
gaggcaggcgggtggctgaagctgg

SEQ ID NO: 1284701 - DNA, 25 bp, Homo sapien
gaaactgtgctgagaagtgctggga

SEQ ID NO: 1284702 - DNA, 25 bp, Homo sapien
ggccaatgcgacaccctctcaggaa

SEQ ID NO: 1284703 - DNA, 25 bp, Homo sapien
ggtgagctgggccaatgcgacaccc

SEQ ID NO: 1284704 - DNA, 25 bp, Homo sapien
gtgtggcagcggtatagagagaatg

SEQ ID NO: 1284705 - DNA, 25 bp, Homo sapien
aggacaggtccttgtgcagttcatg

SEQ ID NO: 1284706 - DNA, 25 bp, Homo sapien
tggtgtggcagcggtatagagagaa

SEQ ID NO: 1284707 - DNA, 25 bp, Homo sapien
taggacaggtccttgtgcagttcat

SEQ ID NO: 1284708 - DNA, 25 bp, Homo sapien
caactcaaagctctgggagtgcaga

SEQ ID NO: 1284709 - DNA, 25 bp, Homo sapien
ccagggatgattagctgagctgcca

SEQ ID NO: 1284710 - DNA, 25 bp, Homo sapien
tgatccatactgcacctggtacccg

SEQ ID NO: 1284711 - DNA, 25 bp, Homo sapien
gctgccaatcaacaggccagagcgg

SEQ ID NO: 1284712 - DNA, 25 bp, Homo sapien
tcagcaggctgaaacgagttaatca

SEQ ID NO: 1284713 - DNA, 25 bp, Homo sapien
tcacatgaccataggcctgctctag

SEQ ID NO: 1284714 - DNA, 25 bp, Homo sapien
tgaacttacacagcgctctcagcag

SEQ ID NO: 1284715 - DNA, 25 bp, Homo sapien
catggctgggaatcaatattgctca

SEQ ID NO: 1284716 - DNA, 25 bp, Homo sapien
cacagagaatgcactcgtagagccc

SEQ ID NO: 1284717 - DNA, 25 bp, Homo sapien
ttgtctccgttccaccagtagctgg

SEQ ID NO: 1284718 - DNA, 25 bp, Homo sapien
caggccccagatatttgtctccgtt

SEQ ID NO: 1284719 - DNA, 25 bp, Homo sapien
gggcagctggtgctacagcaggcac

SEQ ID NO: 1284720 - DNA, 25 bp, Homo sapien
tggtctagaaggcataaggtcacag

SEQ ID NO: 1284721 - DNA, 25 bp, Homo sapien
cagtaatcctgtgaggtgactccag

SEQ ID NO: 1284722 - DNA, 25 bp, Homo sapien
cttcctggaatgaggtcaagacggg

SEQ ID NO: 1284723 - DNA, 25 bp, Homo sapien
ggtcaatctgcccaacaagtcccaa

SEQ ID NO: 1284724 - DNA, 25 bp, Homo sapien
atttctattacaggttgggcatccc

SEQ ID NO: 1284725 - DNA, 25 bp, Homo sapien
ggtgctcaactagtaagtgtaaggc

SEQ ID NO: 1284726 - DNA, 25 bp, Homo sapien
gttccccaggctgaaaattatagct

SEQ ID NO: 1284727 - DNA, 25 bp, Homo sapien
gagcaccaatatgctgctcaaagga

SEQ ID NO: 1284728 - DNA, 25 bp, Homo sapien
gactgggcacacttactaggactcc

SEQ ID NO: 1284729 - DNA, 25 bp, Homo sapien
tgtgctgaccctcactatcttgatg

SEQ ID NO: 1284730 - DNA, 25 bp, Homo sapien
atgcaaaggactcgctgggccagag

SEQ ID NO: 1284731 - DNA, 25 bp, Homo sapien
ctctgggatgcacaagactctggga

SEQ ID NO: 1284732 - DNA, 25 bp, Homo sapien
tcattcatacaactgatacttttca

SEQ ID NO: 1284733 - DNA, 25 bp, Homo sapien
tcttaacgttttatgggcaacagga

SEQ ID NO: 1284734 - DNA, 25 bp, Homo sapien
tttagagacaaaacctgggctatgt

SEQ ID NO: 1284735 - DNA, 25 bp, Homo sapien
ggcaacaggagaggatgctaaatat

SEQ ID NO: 1284736 - DNA, 25 bp, Homo sapien
gccacactcctggcaatcatctttg

SEQ ID NO: 1284737 - DNA, 25 bp, Homo sapien
ttcttcttcaaataaggctcaatgg

SEQ ID NO: 1284738 - DNA, 25 bp, Homo sapien
gctcaatggatttgtactgtgcata

SEQ ID NO: 1284739 - DNA, 25 bp, Homo sapien
tgtactgtgcatagaagttgctcaa

SEQ ID NO: 1284740 - DNA, 25 bp, Homo sapien
cagtttctcacgctcttctatggac

SEQ ID NO: 1284741 - DNA, 25 bp, Homo sapien
tcgggtgcaagctagagtgttgcct

SEQ ID NO: 1284742 - DNA, 25 bp, Homo sapien
gttcattgcacaagagccacagatg

SEQ ID NO: 1284743 - DNA, 25 bp, Homo sapien
gttggtgtcaatccttcgggtgcaa

SEQ ID NO: 1284744 - DNA, 25 bp, Homo sapien
tcacatacatgtgtggaagagggta

SEQ ID NO: 1284745 - DNA, 25 bp, Homo sapien
ttctggatcctccttgctgtgccat

SEQ ID NO: 1284746 - DNA, 25 bp, Homo sapien
tatacctggcatccaactagagcag

SEQ ID NO: 1284747 - DNA, 25 bp, Homo sapien
cagcaggactcagccgaactatcat

SEQ ID NO: 1284748 - DNA, 25 bp, Homo sapien
ttttttagtccagatgggtcacacc

SEQ ID NO: 1284749 - DNA, 25 bp, Homo sapien
cctagagttccccaagagactggat

SEQ ID NO: 1284750 - DNA, 25 bp, Homo sapien
gccagatgcagtaaccacaggatag

SEQ ID NO: 1284751 - DNA, 25 bp, Homo sapien
tggaagaccacaagtatctggagcc

SEQ ID NO: 1284752 - DNA, 25 bp, Homo sapien
caaatgggctcatgtggcaccagca

SEQ ID NO: 1284753 - DNA, 25 bp, Homo sapien
gcacaagtaaccacatgctgaggga

SEQ ID NO: 1284754 - DNA, 25 bp, Homo sapien
cttaatcttgattaaagcatccaat

SEQ ID NO: 1284755 - DNA, 25 bp, Homo sapien
ctgcatgatcttcggaaggtcaaag

SEQ ID NO: 1284756 - DNA, 25 bp, Homo sapien
ttctctgcatgatcttcggaaggtc

SEQ ID NO: 1284757 - DNA, 25 bp, Homo sapien
cattcttaatcttgattaaagcatc

SEQ ID NO: 1284758 - DNA, 25 bp, Homo sapien
ttaaggtcaacttcataagtctgca

SEQ ID NO: 1284759 - DNA, 25 bp, Homo sapien
caacttcataagtctgcatatgagg

SEQ ID NO: 1284760 - DNA, 25 bp, Homo sapien
tagatggcaaatttcttgatacggg

SEQ ID NO: 1284761 - DNA, 25 bp, Homo sapien
tgtctgggtcccatcgatagatggc

SEQ ID NO: 1284762 - DNA, 25 bp, Homo sapien
cattcacgatgaatataaagagcga

SEQ ID NO: 1284763 - DNA, 25 bp, Homo sapien
cgatgaatataaagagcgatactgt

SEQ ID NO: 1284764 - DNA, 25 bp, Homo sapien
taaacattcacgatgaatataaaga

SEQ ID NO: 1284765 - DNA, 25 bp, Homo sapien
tagtgaacaagagttaaattaaaca

SEQ ID NO: 1284766 - DNA, 25 bp, Homo sapien
aaaggaaagccatttctacaaatgt

SEQ ID NO: 1284767 - DNA, 25 bp, Homo sapien
accaagctggctaaaatcatcaaca

SEQ ID NO: 1284768 - DNA, 25 bp, Homo sapien
catttctacaaatgtttttcaccgg

SEQ ID NO: 1284769 - DNA, 25 bp, Homo sapien
cttatcaccaagctggctaaaatca

SEQ ID NO: 1284770 - DNA, 25 bp, Homo sapien
tgtggttcagtggtcagactataag

SEQ ID NO: 1284771 - DNA, 25 bp, Homo sapien
cccacaggtaacacaccaagctcat

SEQ ID NO: 1284772 - DNA, 25 bp, Homo sapien
aaaaagaattcagaacctgaacctg

SEQ ID NO: 1284773 - DNA, 25 bp, Homo sapien
aggcagaattgtggttcagtggtca

SEQ ID NO: 1284774 - DNA, 25 bp, Homo sapien
gggcttggaactctctcgttagtgg

SEQ ID NO: 1284775 - DNA, 25 bp, Homo sapien
gtggggctctcacaatttaattgtt

SEQ ID NO: 1284776 - DNA, 25 bp, Homo sapien
cgttagtggggctctcacaatttaa

SEQ ID NO: 1284777 - DNA, 25 bp, Homo sapien
ggcttggaactctctcgttagtggg

SEQ ID NO: 1284778 - DNA, 25 bp, Homo sapien
gcgcctcaaggagagggcgaccacc

SEQ ID NO: 1284779 - DNA, 25 bp, Homo sapien
gcctcaaggagagggcgaccaccgc

SEQ ID NO: 1284780 - DNA, 25 bp, Homo sapien
gcaggctccgccaagggttgtggcc

SEQ ID NO: 1284781 - DNA, 25 bp, Homo sapien
ttgtggccggcaaccggcgcctcaa

SEQ ID NO: 1284782 - DNA, 25 bp, Homo sapien
ccgcgtacgagcaaccaagtgggag

SEQ ID NO: 1284783 - DNA, 25 bp, Homo sapien
ggtgtcccgtcgaacatcgcggcgc

SEQ ID NO: 1284784 - DNA, 25 bp, Homo sapien
gcccagcctacatccactgaggacc

SEQ ID NO: 1284785 - DNA, 25 bp, Homo sapien
actgaggacccactagccgcgtacg

SEQ ID NO: 1284786 - DNA, 25 bp, Homo sapien
cctggcgcttagtggcatacaacaa

SEQ ID NO: 1284787 - DNA, 25 bp, Homo sapien
ggtatatccacaccgagggttgtca

SEQ ID NO: 1284788 - DNA, 25 bp, Homo sapien
ttctaaagagcgcatcactgaaggg

SEQ ID NO: 1284789 - DNA, 25 bp, Homo sapien
ttccatgccagtagggaccaggtcc

SEQ ID NO: 1284790 - DNA, 25 bp, Homo sapien
tctggagaactaagcgaaggaggca

SEQ ID NO: 1284791 - DNA, 25 bp, Homo sapien
tattatgcccctgggaaggcctgaa

SEQ ID NO: 1284792 - DNA, 25 bp, Homo sapien
cagttcaagatacgtctagggtccc

SEQ ID NO: 1284793 - DNA, 25 bp, Homo sapien
gccacctggaaaccctgagggagat

SEQ ID NO: 1284794 - DNA, 25 bp, Homo sapien
aggaggccacgcacgtgcatctcca

SEQ ID NO: 1284795 - DNA, 25 bp, Homo sapien
tggtgccacagtggacttcccccag

SEQ ID NO: 1284796 - DNA, 25 bp, Homo sapien
ggtaggcagaaatgtcgtcgatgaa

SEQ ID NO: 1284797 - DNA, 25 bp, Homo sapien
gtcgatgaaggtgcattcgaggccc

SEQ ID NO: 1284798 - DNA, 25 bp, Homo sapien
agaaggctctggcacggtggtcctc

SEQ ID NO: 1284799 - DNA, 25 bp, Homo sapien
tgtcacggttccagtctaggcagcg

SEQ ID NO: 1284800 - DNA, 25 bp, Homo sapien
cagagcgggcaggtcaatgatgtcc

SEQ ID NO: 1284801 - DNA, 25 bp, Homo sapien
ggtggtcctcgtccatcttgaacag

SEQ ID NO: 1284802 - DNA, 25 bp, Homo sapien
ttgatggtgattcgcttgctgctca

SEQ ID NO: 1284803 - DNA, 25 bp, Homo sapien
ggtgattcgcttgctgctcatccca

SEQ ID NO: 1284804 - DNA, 25 bp, Homo sapien
aggttctcctgcacaaggctctcgt

SEQ ID NO: 1284805 - DNA, 25 bp, Homo sapien
gcacaaggctctcgttggacagaat

SEQ ID NO: 1284806 - DNA, 25 bp, Homo sapien
tatacgctagggcttgaagatgcgc

SEQ ID NO: 1284807 - DNA, 25 bp, Homo sapien
agcctccaaaggtgttggaattgta

SEQ ID NO: 1284808 - DNA, 25 bp, Homo sapien
catttaaccctccactgggtctggt

SEQ ID NO: 1284809 - DNA, 25 bp, Homo sapien
tctggtgccatttaaagtatacgct

SEQ ID NO: 1284810 - DNA, 25 bp, Homo sapien
gcttctctcggaagagcttgtagca

SEQ ID NO: 1284811 - DNA, 25 bp, Homo sapien
tgtagcaggccgaggtgctggccat

SEQ ID NO: 1284812 - DNA, 25 bp, Homo sapien
tgatggcctctccatggccgtcctt

SEQ ID NO: 1284813 - DNA, 25 bp, Homo sapien
tgctggccatgagtagcaggaattt

SEQ ID NO: 1284814 - DNA, 25 bp, Homo sapien
gtcaccagatcaaggctcagagtca

SEQ ID NO: 1284815 - DNA, 25 bp, Homo sapien
gaacctctttccagtgccacaggtg

SEQ ID NO: 1284816 - DNA, 25 bp, Homo sapien
ctgcaagagacagtccagagggaca

SEQ ID NO: 1284817 - DNA, 25 bp, Homo sapien
caggacatctccaagttgccaagca

SEQ ID NO: 1284818 - DNA, 25 bp, Homo sapien
gggccttcaggaagtcacgcaccac

SEQ ID NO: 1284819 - DNA, 25 bp, Homo sapien
ggaagtcacgcaccaccttggtcat

SEQ ID NO: 1284820 - DNA, 25 bp, Homo sapien
caccttggtcatcctccgaccacca

SEQ ID NO: 1284821 - DNA, 25 bp, Homo sapien
cttcaggaagtcacgcaccaccttg

SEQ ID NO: 1284822 - DNA, 25 bp, Homo sapien
acaggagggctccaaaatctgccct

SEQ ID NO: 1284823 - DNA, 25 bp, Homo sapien
ctggacggggctagggcacaggagg

SEQ ID NO: 1284824 - DNA, 25 bp, Homo sapien
ctggcctgctggacggggctagggc

SEQ ID NO: 1284825 - DNA, 25 bp, Homo sapien
gcacaggagggctccaaaatctgcc

SEQ ID NO: 1284826 - DNA, 25 bp, Homo sapien
tttctttccaagagtgtcggcctct

SEQ ID NO: 1284827 - DNA, 25 bp, Homo sapien
gatataaaggctagcttgattttct

SEQ ID NO: 1284828 - DNA, 25 bp, Homo sapien
tattagatcctaaatcacacaaaga

SEQ ID NO: 1284829 - DNA, 25 bp, Homo sapien
taacaggaagtcgtgggagggaata

SEQ ID NO: 1284830 - DNA, 25 bp, Homo sapien
aggctggtgacagactcaaagaggg

SEQ ID NO: 1284831 - DNA, 25 bp, Homo sapien
ctcccgatgaggatgcggccaagcg

SEQ ID NO: 1284832 - DNA, 25 bp, Homo sapien
ggccaagcgggtatgtcttgccgtt

SEQ ID NO: 1284833 - DNA, 25 bp, Homo sapien
tgtcttgccgttcacggtcactggg

SEQ ID NO: 1284834 - DNA, 25 bp, Homo sapien
gatgaacttggaagttggaaccatg

SEQ ID NO: 1284835 - DNA, 25 bp, Homo sapien
tgaacttggaagttggaaccatgac

SEQ ID NO: 1284836 - DNA, 25 bp, Homo sapien
gctgatgaacttggaagttggaacc

SEQ ID NO: 1284837 - DNA, 25 bp, Homo sapien
gttggaaccatgacttttgacaatt

SEQ ID NO: 1284838 - DNA, 25 bp, Homo sapien
gtttccatctcggggagagtccagc

SEQ ID NO: 1284839 - DNA, 25 bp, Homo sapien
ttccatctcggggagagtccagcac

SEQ ID NO: 1284840 - DNA, 25 bp, Homo sapien
gaagcctttatggggggcctcgatg

SEQ ID NO: 1284841 - DNA, 25 bp, Homo sapien
agcctttatggggggcctcgatgta

SEQ ID NO: 1284842 - DNA, 25 bp, Homo sapien
ggtttcttaccgatatcagccccat

SEQ ID NO: 1284843 - DNA, 25 bp, Homo sapien
actgatgatggcagcacaggtgtcc

SEQ ID NO: 1284844 - DNA, 25 bp, Homo sapien
gagcacaaaggaagaagaacgtctg

SEQ ID NO: 1284845 - DNA, 25 bp, Homo sapien
caatttgtgcacatgggcagaaaac

SEQ ID NO: 1284846 - DNA, 25 bp, Homo sapien
cacacaaatagcaagcagcatcctg

SEQ ID NO: 1284847 - DNA, 25 bp, Homo sapien
tccgttgagtaacaacttaacttga

SEQ ID NO: 1284848 - DNA, 25 bp, Homo sapien
aacacacaaatagcaagcagcatcc

SEQ ID NO: 1284849 - DNA, 25 bp, Homo sapien
tcctgaatatgttttccgttgagta

SEQ ID NO: 1284850 - DNA, 25 bp, Homo sapien
gtttaggtactggaagcagaccttc

SEQ ID NO: 1284851 - DNA, 25 bp, Homo sapien
tcagctcacagttggttttctccac

SEQ ID NO: 1284852 - DNA, 25 bp, Homo sapien
ctggatccagcgatcgcctcggttt

SEQ ID NO: 1284853 - DNA, 25 bp, Homo sapien
cttcagctcacagttggttttctcc

SEQ ID NO: 1284854 - DNA, 25 bp, Homo sapien
gcaatccggaatatcacggtgtccg

SEQ ID NO: 1284855 - DNA, 25 bp, Homo sapien
acggtgtccgtgaagatgggagtca

SEQ ID NO: 1284856 - DNA, 25 bp, Homo sapien
gggtcatgatccacggagcaatccg

SEQ ID NO: 1284857 - DNA, 25 bp, Homo sapien
agcacacaaacaccgacacgggagg

SEQ ID NO: 1284858 - DNA, 25 bp, Homo sapien
tcttgtgtttgcgagagcagccagg

SEQ ID NO: 1284859 - DNA, 25 bp, Homo sapien
gtgtttgcgagagcagccaggtcct

SEQ ID NO: 1284860 - DNA, 25 bp, Homo sapien
cctggggataaaaatgaggggctct

SEQ ID NO: 1284861 - DNA, 25 bp, Homo sapien
ggctcttgtgtttgcgagagcagcc

SEQ ID NO: 1284862 - DNA, 25 bp, Homo sapien
ggtagggcacaacctgaaactggga

SEQ ID NO: 1284863 - DNA, 25 bp, Homo sapien
ccaaagcaagagcaaggctggctga

SEQ ID NO: 1284864 - DNA, 25 bp, Homo sapien
tgcagtcagagttggtataacccac

SEQ ID NO: 1284865 - DNA, 25 bp, Homo sapien
tcgcgctaatcagcaggactctggg

SEQ ID NO: 1284866 - DNA, 25 bp, Homo sapien
gcggagccacccgtgtacttgacca

SEQ ID NO: 1284867 - DNA, 25 bp, Homo sapien
ccagcaggctgacatggatggagac

SEQ ID NO: 1284868 - DNA, 25 bp, Homo sapien
ttccacgaagaacagcagctccgcg

SEQ ID NO: 1284869 - DNA, 25 bp, Homo sapien
cccaggatgtggatatagcgttggc

SEQ ID NO: 1284870 - DNA, 25 bp, Homo sapien
tcaaagcccttgtggtagtagttcc

SEQ ID NO: 1284871 - DNA, 25 bp, Homo sapien
tgagattatggaaccagaccagtcc

SEQ ID NO: 1284872 - DNA, 25 bp, Homo sapien
ccagtgacccagtgtcagcattatt

SEQ ID NO: 1284873 - DNA, 25 bp, Homo sapien
ccaaataagaggctccaagggacgt

SEQ ID NO: 1284874 - DNA, 25 bp, Homo sapien
tccacgtagaacacgcccactttgt

SEQ ID NO: 1284875 - DNA, 25 bp, Homo sapien
tcggggcctttggtccgcaggatca

SEQ ID NO: 1284876 - DNA, 25 bp, Homo sapien
aatgtacagaactatctcgtatccg

SEQ ID NO: 1284877 - DNA, 25 bp, Homo sapien
acagaactatctcgtatccggcggg

SEQ ID NO: 1284878 - DNA, 25 bp, Homo sapien
ccttgctgtagaccttctcatcacg

SEQ ID NO: 1284879 - DNA, 25 bp, Homo sapien
tctcatcacggcagtcctccttggg

SEQ ID NO: 1284880 - DNA, 25 bp, Homo sapien
gggtgtctctcggtcacagttcacc

SEQ ID NO: 1284881 - DNA, 25 bp, Homo sapien
cttgggcaaccagggtgtctctcgg

SEQ ID NO: 1284882 - DNA, 25 bp, Homo sapien
cacaccatcccggtctgcgtccaca

SEQ ID NO: 1284883 - DNA, 25 bp, Homo sapien
caccatcccggtctgcgtccacatc

SEQ ID NO: 1284884 - DNA, 25 bp, Homo sapien
accacaccatcccggtctgcgtcca

SEQ ID NO: 1284885 - DNA, 25 bp, Homo sapien
acaccatcccggtctgcgtccacat

SEQ ID NO: 1284886 - DNA, 25 bp, Homo sapien
aagagacatgggtgagttgctgagc

SEQ ID NO: 1284887 - DNA, 25 bp, Homo sapien
gaagagacatgggtgagttgctgag

SEQ ID NO: 1284888 - DNA, 25 bp, Homo sapien
agaagagacatgggtgagttgctga

SEQ ID NO: 1284889 - DNA, 25 bp, Homo sapien
cctcgtagcttacggctgcaagagc

SEQ ID NO: 1284890 - DNA, 25 bp, Homo sapien
gacaccgtgtggacctcgtagctta

SEQ ID NO: 1284891 - DNA, 25 bp, Homo sapien
tgtggacctcgtagcttacggctgc

SEQ ID NO: 1284892 - DNA, 25 bp, Homo sapien
cgtcagcagacaccgtgtggacctc

SEQ ID NO: 1284893 - DNA, 25 bp, Homo sapien
aggcccccacttatcccttctcttg

SEQ ID NO: 1284894 - DNA, 25 bp, Homo sapien
ccctcagcatccctaggcctgccat

SEQ ID NO: 1284895 - DNA, 25 bp, Homo sapien
agtctagatggaggatccagggcca

SEQ ID NO: 1284896 - DNA, 25 bp, Homo sapien
ttctcttggtgaagggaccctcagc

SEQ ID NO: 1284897 - DNA, 25 bp, Homo sapien
gcttgcctctgaggcgctgcccctg

SEQ ID NO: 1284898 - DNA, 25 bp, Homo sapien
gggggcttgcctctgaggcgctgcc

SEQ ID NO: 1284899 - DNA, 25 bp, Homo sapien
gcgctgcccctgagtgattgattac

SEQ ID NO: 1284900 - DNA, 25 bp, Homo sapien
ctgaggcgctgcccctgagtgattg

SEQ ID NO: 1284901 - DNA, 25 bp, Homo sapien
gggcagatgctcgagaaaagagaaa

SEQ ID NO: 1284902 - DNA, 25 bp, Homo sapien
ctggggcagatgctcgagaaaagag

SEQ ID NO: 1284903 - DNA, 25 bp, Homo sapien
tcaggatgacgggctcaagggctcc

SEQ ID NO: 1284904 - DNA, 25 bp, Homo sapien
tggggcagatgctcgagaaaagaga

SEQ ID NO: 1284905 - DNA, 25 bp, Homo sapien
ttctttttgcaattgaatgactgtc

SEQ ID NO: 1284906 - DNA, 25 bp, Homo sapien
tcaccagggtctctgttggaacagg

SEQ ID NO: 1284907 - DNA, 25 bp, Homo sapien
acagaagttcaatggtgttagtttc

SEQ ID NO: 1284908 - DNA, 25 bp, Homo sapien
ttttattctgagattatgccttgcc

SEQ ID NO: 1284909 - DNA, 25 bp, Homo sapien
cttgtggcagttaaataaataatta

SEQ ID NO: 1284910 - DNA, 25 bp, Homo sapien
gaacttgtggcagttaaataaataa

SEQ ID NO: 1284911 - DNA, 25 bp, Homo sapien
ggaacttgtggcagttaaataaata

SEQ ID NO: 1284912 - DNA, 25 bp, Homo sapien
acttgtggcagttaaataaataatt

SEQ ID NO: 1284913 - DNA, 25 bp, Homo sapien
ttttgggactcagccatgccgccaa

SEQ ID NO: 1284914 - DNA, 25 bp, Homo sapien
gggcacatgtggcatcttttgggac

SEQ ID NO: 1284915 - DNA, 25 bp, Homo sapien
tctgagcgggcttcctctaagcaca

SEQ ID NO: 1284916 - DNA, 25 bp, Homo sapien
catgccgccaactctgagcgggctt

SEQ ID NO: 1284917 - DNA, 25 bp, Homo sapien
aaggttcacacacgtgccagggctc

SEQ ID NO: 1284918 - DNA, 25 bp, Homo sapien
ggactgtcatctgagactgcctgga

SEQ ID NO: 1284919 - DNA, 25 bp, Homo sapien
cagggctcagtacaacccaggagtc

SEQ ID NO: 1284920 - DNA, 25 bp, Homo sapien
gattaggtttcctcagggactgtca

SEQ ID NO: 1284921 - DNA, 25 bp, Homo sapien
tccctaccccagggctgggcacctc

SEQ ID NO: 1284922 - DNA, 25 bp, Homo sapien
cccctgagaatgtgggataactgga

SEQ ID NO: 1284923 - DNA, 25 bp, Homo sapien
aagcccatttgggaattagccaaga

SEQ ID NO: 1284924 - DNA, 25 bp, Homo sapien
gccctgctgctaagcctgtttaagc

SEQ ID NO: 1284925 - DNA, 25 bp, Homo sapien
tctggagatgtagctgcaggcaagt

SEQ ID NO: 1284926 - DNA, 25 bp, Homo sapien
cctcgtcatagtagttgacggtgac

SEQ ID NO: 1284927 - DNA, 25 bp, Homo sapien
gctcccttcctcgtcatagtagttg

SEQ ID NO: 1284928 - DNA, 25 bp, Homo sapien
cctggtcgatgggaatgctcccttc

SEQ ID NO: 1284929 - DNA, 25 bp, Homo sapien
ggaatgctcccttcctcgtcatagt

SEQ ID NO: 1284930 - DNA, 25 bp, Homo sapien
gtgttccgagtgcttcaggctgaag

SEQ ID NO: 1284931 - DNA, 25 bp, Homo sapien
acccacacgtgttccgagtgcttca

SEQ ID NO: 1284932 - DNA, 25 bp, Homo sapien
tgctgggcgagagaagccagcgctg

SEQ ID NO: 1284933 - DNA, 25 bp, Homo sapien
cgagagaagccagcgctgcttgcca

SEQ ID NO: 1284934 - DNA, 25 bp, Homo sapien
gggtcaggatgccactccgtaatta

SEQ ID NO: 1284935 - DNA, 25 bp, Homo sapien
cctcatagggcagcatagtggtcaa

SEQ ID NO: 1284936 - DNA, 25 bp, Homo sapien
gaggccgtttcgctcacctttgcga

SEQ ID NO: 1284937 - DNA, 25 bp, Homo sapien
tcacacagcccgtggatggaagctg

SEQ ID NO: 1284938 - DNA, 25 bp, Homo sapien
ctagtcctggggcttgttggtatca

SEQ ID NO: 1284939 - DNA, 25 bp, Homo sapien
tagtcctggggcttgttggtatcag

SEQ ID NO: 1284940 - DNA, 25 bp, Homo sapien
gtggcaggagactggttgggcaggt

SEQ ID NO: 1284941 - DNA, 25 bp, Homo sapien
ggcaggagactggttgggcaggtgg

SEQ ID NO: 1284942 - DNA, 25 bp, Homo sapien
tggcaggagactggttgggcaggtg

SEQ ID NO: 1284943 - DNA, 25 bp, Homo sapien
gtactgcagccgcacggtccgctcg

SEQ ID NO: 1284944 - DNA, 25 bp, Homo sapien
gcctccacgcggctcccgtactgca

SEQ ID NO: 1284945 - DNA, 25 bp, Homo sapien
ctgtagacatcggtccagaggtagg

SEQ ID NO: 1284946 - DNA, 25 bp, Homo sapien
aggtaggtgcccagcacgtacaccg

SEQ ID NO: 1284947 - DNA, 25 bp, Homo sapien
cgcagtgcccgcgctcgctggtccg

SEQ ID NO: 1284948 - DNA, 25 bp, Homo sapien
gccgcagtgcccgcgctcgctggtc

SEQ ID NO: 1284949 - DNA, 25 bp, Homo sapien
agtgcccgcgctcgctggtccgggg

SEQ ID NO: 1284950 - DNA, 25 bp, Homo sapien
cagtgcccgcgctcgctggtccggg

SEQ ID NO: 1284951 - DNA, 25 bp, Homo sapien
cattgtcacgtgcctctcaggtggc

SEQ ID NO: 1284952 - DNA, 25 bp, Homo sapien
gggtcagggccctgaagcaagggat

SEQ ID NO: 1284953 - DNA, 25 bp, Homo sapien
cctctcaggtggctgtgggtcaggg

SEQ ID NO: 1284954 - DNA, 25 bp, Homo sapien
tgtgggtcagggccctgaagcaagg

SEQ ID NO: 1284955 - DNA, 25 bp, Homo sapien
aactccggagcccattggctccgtg

SEQ ID NO: 1284956 - DNA, 25 bp, Homo sapien
ttagtcactaaactgcgcgttcgca

SEQ ID NO: 1284957 - DNA, 25 bp, Homo sapien
taaactgcgcgttcgcatcccgagc

SEQ ID NO: 1284958 - DNA, 25 bp, Homo sapien
cgagctccaatcacaagccaggtct

SEQ ID NO: 1284959 - DNA, 25 bp, Homo sapien
cagctgccctcgaacagccacttct

SEQ ID NO: 1284960 - DNA, 25 bp, Homo sapien
tggaaggatgttgttcctactacac

SEQ ID NO: 1284961 - DNA, 25 bp, Homo sapien
gttgttcctactacacagctgccct

SEQ ID NO: 1284962 - DNA, 25 bp, Homo sapien
gggactcgttttccaggactggcca

SEQ ID NO: 1284963 - DNA, 25 bp, Homo sapien
aggccactcctccttcgcaggcctg

SEQ ID NO: 1284964 - DNA, 25 bp, Homo sapien
ggccactcctccttcgcaggcctgt

SEQ ID NO: 1284965 - DNA, 25 bp, Homo sapien
cctctgctcgagaagcccttcctgc

SEQ ID NO: 1284966 - DNA, 25 bp, Homo sapien
gtgatcctctgctcgagaagccctt

SEQ ID NO: 1284967 - DNA, 25 bp, Homo sapien
gatcctctgctcgagaagcccttcc

SEQ ID NO: 1284968 - DNA, 25 bp, Homo sapien
ggtgatcctctgctcgagaagccct

SEQ ID NO: 1284969 - DNA, 25 bp, Homo sapien
ttctggcactcggtgatgatacggc

SEQ ID NO: 1284970 - DNA, 25 bp, Homo sapien
gggttctggcactcggtgatgatac

SEQ ID NO: 1284971 - DNA, 25 bp, Homo sapien
tctggcactcggtgatgatacggcc

SEQ ID NO: 1284972 - DNA, 25 bp, Homo sapien
ggcactcggtgatgatacggcccat

SEQ ID NO: 1284973 - DNA, 25 bp, Homo sapien
catcctagccttgtgcacttgagca

SEQ ID NO: 1284974 - DNA, 25 bp, Homo sapien
cagaaatgcattgactggaaccgta

SEQ ID NO: 1284975 - DNA, 25 bp, Homo sapien
aaccgtaatgtgctgaagcgggagc

SEQ ID NO: 1284976 - DNA, 25 bp, Homo sapien
cagagagtgacatcgtggacattcc

SEQ ID NO: 1284977 - DNA, 25 bp, Homo sapien
cggtggcctcgctgactctcattaa

SEQ ID NO: 1284978 - DNA, 25 bp, Homo sapien
gatttcactaaacatcctacagagc

SEQ ID NO: 1284979 - DNA, 25 bp, Homo sapien
ggatgccccgccacaaagcactttt

SEQ ID NO: 1284980 - DNA, 25 bp, Homo sapien
ttgccgcagtgaggtgcatgcccct

SEQ ID NO: 1284981 - DNA, 25 bp, Homo sapien
cagggaccctgcacatagcttaggt

SEQ ID NO: 1284982 - DNA, 25 bp, Homo sapien
ttaatagcccggagtgaggtcactg

SEQ ID NO: 1284983 - DNA, 25 bp, Homo sapien
tgaataaaccgctgtgcaggcccat

SEQ ID NO: 1284984 - DNA, 25 bp, Homo sapien
tgctgagaagccaacgtgaggcctg

SEQ ID NO: 1284985 - DNA, 25 bp, Homo sapien
tgggaatccgcattttcaccagctt

SEQ ID NO: 1284986 - DNA, 25 bp, Homo sapien
aggctgcacccctaacctgctggat

SEQ ID NO: 1284987 - DNA, 25 bp, Homo sapien
tgcacccctaacctgctggatcaga

SEQ ID NO: 1284988 - DNA, 25 bp, Homo sapien
caacagacctgggaatccgcatttt

SEQ ID NO: 1284989 - DNA, 25 bp, Homo sapien
actgacaggacaaagaggaggtctg

SEQ ID NO: 1284990 - DNA, 25 bp, Homo sapien
gattgcagaggactgagcaacccac

SEQ ID NO: 1284991 - DNA, 25 bp, Homo sapien
ggcagattgcagaggactgagcaac

SEQ ID NO: 1284992 - DNA, 25 bp, Homo sapien
gtgggcagattgcagaggactgagc

SEQ ID NO: 1284993 - DNA, 25 bp, Homo sapien
gaagtcttgcccatttcccagggag

SEQ ID NO: 1284994 - DNA, 25 bp, Homo sapien
gaagagcaggttgttgcacagtggg

SEQ ID NO: 1284995 - DNA, 25 bp, Homo sapien
gtcaatgaagtcttgcccatttccc

SEQ ID NO: 1284996 - DNA, 25 bp, Homo sapien
atgccatcactgagccgcctctctc

SEQ ID NO: 1284997 - DNA, 25 bp, Homo sapien
cctgtttgacataggtgagattgga

SEQ ID NO: 1284998 - DNA, 25 bp, Homo sapien
tcctctctgatatgcctgtttgaca

SEQ ID NO: 1284999 - DNA, 25 bp, Homo sapien
ttggatagatcaaggtgttcagggc

SEQ ID NO: 1285000 - DNA, 25 bp, Homo sapien
cataggtgagattggatagatcaag

SEQ ID NO: 1285001 - DNA, 25 bp, Homo sapien
tctggtggacatcacagttgtggcc

SEQ ID NO: 1285002 - DNA, 25 bp, Homo sapien
tgctgtccgaactgtagccagactt

SEQ ID NO: 1285003 - DNA, 25 bp, Homo sapien
agggatgtcttgaacctgtgtctcc

SEQ ID NO: 1285004 - DNA, 25 bp, Homo sapien
cattgtggtggttgggaattccttc

SEQ ID NO: 1285005 - DNA, 25 bp, Homo sapien
ttcagaaatctccttgtgcgcagac

SEQ ID NO: 1285006 - DNA, 25 bp, Homo sapien
cagaaatctccttgtgcgcagacat

SEQ ID NO: 1285007 - DNA, 25 bp, Homo sapien
ttgatgggatttcagaaatctcctt

SEQ ID NO: 1285008 - DNA, 25 bp, Homo sapien
ggatttcagaaatctccttgtgcgc

SEQ ID NO: 1285009 - DNA, 25 bp, Homo sapien
ctacgtactgatagcgatggatttt

SEQ ID NO: 1285010 - DNA, 25 bp, Homo sapien
tagcgatggatttttgtggaatgaa

SEQ ID NO: 1285011 - DNA, 25 bp, Homo sapien
ggcttcgacataaagactcagattc

SEQ ID NO: 1285012 - DNA, 25 bp, Homo sapien
tgaagtaattcatctcctcggtgtt

SEQ ID NO: 1285013 - DNA, 25 bp, Homo sapien
ttcctttccgcagctctaagccttg

SEQ ID NO: 1285014 - DNA, 25 bp, Homo sapien
catcaagccctcataggaaagggtg

SEQ ID NO: 1285015 - DNA, 25 bp, Homo sapien
ttgcacctgcatcaagccctcatag

SEQ ID NO: 1285016 - DNA, 25 bp, Homo sapien
agctctaagccttgcacctgcatca

SEQ ID NO: 1285017 - DNA, 25 bp, Homo sapien
aaaataataagacaattacagcact

SEQ ID NO: 1285018 - DNA, 25 bp, Homo sapien
taagacaattacagcactaaaccag

SEQ ID NO: 1285019 - DNA, 25 bp, Homo sapien
taaaatgtttactccaagaaatata

SEQ ID NO: 1285020 - DNA, 25 bp, Homo sapien
taataagacaattacagcactaaac

SEQ ID NO: 1285021 - DNA, 25 bp, Homo sapien
aagcacattcccaaccgggcaactg

SEQ ID NO: 1285022 - DNA, 25 bp, Homo sapien
cattcccaaccgggcaactgtgtac

SEQ ID NO: 1285023 - DNA, 25 bp, Homo sapien
caagcacattcccaaccgggcaact

SEQ ID NO: 1285024 - DNA, 25 bp, Homo sapien
gcacattcccaaccgggcaactgtg

SEQ ID NO: 1285025 - DNA, 25 bp, Homo sapien
tgctccagtccctgggctagggttc

SEQ ID NO: 1285026 - DNA, 25 bp, Homo sapien
tccctgggctagggttctagaagag

SEQ ID NO: 1285027 - DNA, 25 bp, Homo sapien
ttcactttgaaggtccctttcctgc

SEQ ID NO: 1285028 - DNA, 25 bp, Homo sapien
gctgcgggacaaggcagtcttcact

SEQ ID NO: 1285029 - DNA, 25 bp, Homo sapien
gtcctcaaccctctcggtgaccacg

SEQ ID NO: 1285030 - DNA, 25 bp, Homo sapien
ggacctcgggtgctgcgtcctcaac

SEQ ID NO: 1285031 - DNA, 25 bp, Homo sapien
ctgggacctcgggtgctgcgtcctc

SEQ ID NO: 1285032 - DNA, 25 bp, Homo sapien
ccctctcggtgaccacggctcaaag

SEQ ID NO: 1285033 - DNA, 25 bp, Homo sapien
cacaggtgcctgggctgcattccag

SEQ ID NO: 1285034 - DNA, 25 bp, Homo sapien
gagagacctcaagggtgccaggagc

SEQ ID NO: 1285035 - DNA, 25 bp, Homo sapien
caggagcacaggtgcctgggctgca

SEQ ID NO: 1285036 - DNA, 25 bp, Homo sapien
gagcacaggtgcctgggctgcattc

SEQ ID NO: 1285037 - DNA, 25 bp, Homo sapien
ggacacggccgattctataatgtcg

SEQ ID NO: 1285038 - DNA, 25 bp, Homo sapien
agctcgggcacttgacgaggacgca

SEQ ID NO: 1285039 - DNA, 25 bp, Homo sapien
cagggaaacggatcaggctgtcgca

SEQ ID NO: 1285040 - DNA, 25 bp, Homo sapien
ggctgtcgcatggaagcttacgtca

SEQ ID NO: 1285041 - DNA, 25 bp, Homo sapien
atgtgtaaaacggaacctcagggag

SEQ ID NO: 1285042 - DNA, 25 bp, Homo sapien
gatgcttccgaagcacgcgagcgtg

SEQ ID NO: 1285043 - DNA, 25 bp, Homo sapien
gctgccggttcctgtaagggacatt

SEQ ID NO: 1285044 - DNA, 25 bp, Homo sapien
ggtgactgcctagctgctgccggtt

SEQ ID NO: 1285045 - DNA, 25 bp, Homo sapien
cctcgtttgacttcccgtcccagtg

SEQ ID NO: 1285046 - DNA, 25 bp, Homo sapien
ttgacttcccgtcccagtgcacatg

SEQ ID NO: 1285047 - DNA, 25 bp, Homo sapien
tcgtttgacttcccgtcccagtgca

SEQ ID NO: 1285048 - DNA, 25 bp, Homo sapien
gtttgacttcccgtcccagtgcaca

SEQ ID NO: 1285049 - DNA, 25 bp, Homo sapien
ttgctatcaccaaggagtgtgagta

SEQ ID NO: 1285050 - DNA, 25 bp, Homo sapien
tcgggggttgtattctggcagtttc

SEQ ID NO: 1285051 - DNA, 25 bp, Homo sapien
catctcttgctatcaccaaggagtg

SEQ ID NO: 1285052 - DNA, 25 bp, Homo sapien
ctcagtctcactttcatctcttgct

SEQ ID NO: 1285053 - DNA, 25 bp, Homo sapien
cacaatcctgcctgggtgaggtgca

SEQ ID NO: 1285054 - DNA, 25 bp, Homo sapien
tgaggcgcctggactaatcaatgcg

SEQ ID NO: 1285055 - DNA, 25 bp, Homo sapien
gaaactgggctgctaaagcgggtca

SEQ ID NO: 1285056 - DNA, 25 bp, Homo sapien
caaatcagcgttgggtgtgcctgag

SEQ ID NO: 1285057 - DNA, 25 bp, Homo sapien
cactgggtacggacacgtccccgag

SEQ ID NO: 1285058 - DNA, 25 bp, Homo sapien
tgggtacggacacgtccccgagctg

SEQ ID NO: 1285059 - DNA, 25 bp, Homo sapien
ctgggtacggacacgtccccgagct

SEQ ID NO: 1285060 - DNA, 25 bp, Homo sapien
aaatgccatccagagtctttacctc

SEQ ID NO: 1285061 - DNA, 25 bp, Homo sapien
ctgctctgagaaaatgccatccaga

SEQ ID NO: 1285062 - DNA, 25 bp, Homo sapien
tgccatccagagtctttacctcctg

SEQ ID NO: 1285063 - DNA, 25 bp, Homo sapien
tgctctgagaaaatgccatccagag

SEQ ID NO: 1285064 - DNA, 25 bp, Homo sapien
ccagctgatggtgctctcatcggcg

SEQ ID NO: 1285065 - DNA, 25 bp, Homo sapien
aaaggtcggtgacggaccccagctg

SEQ ID NO: 1285066 - DNA, 25 bp, Homo sapien
ctctcatcggcggccacaatgatgc

SEQ ID NO: 1285067 - DNA, 25 bp, Homo sapien
caaaggtcggtgacggaccccagct

SEQ ID NO: 1285068 - DNA, 25 bp, Homo sapien
tccggattctccagccgcagaggtc

SEQ ID NO: 1285069 - DNA, 25 bp, Homo sapien
aggctccggattctccagccgcaga

SEQ ID NO: 1285070 - DNA, 25 bp, Homo sapien
cgcagaggtcctgcactgcttttgg

SEQ ID NO: 1285071 - DNA, 25 bp, Homo sapien
gccgcagaggtcctgcactgctttt

SEQ ID NO: 1285072 - DNA, 25 bp, Homo sapien
ggtagattcacgggaggtgttggtg

SEQ ID NO: 1285073 - DNA, 25 bp, Homo sapien
tagattcacgggaggtgttggtggc

SEQ ID NO: 1285074 - DNA, 25 bp, Homo sapien
agattcacgggaggtgttggtggcc

SEQ ID NO: 1285075 - DNA, 25 bp, Homo sapien
gattcacgggaggtgttggtggccc

SEQ ID NO: 1285076 - DNA, 25 bp, Homo sapien
cactgataagccagggggcagaaat

SEQ ID NO: 1285077 - DNA, 25 bp, Homo sapien
acaggacaatggctacacggttccg

SEQ ID NO: 1285078 - DNA, 25 bp, Homo sapien
atggctacacggttccgcaccagag

SEQ ID NO: 1285079 - DNA, 25 bp, Homo sapien
taagccagggggcagaaatcactaa

SEQ ID NO: 1285080 - DNA, 25 bp, Homo sapien
cccaggagaagactcgcttctggga

SEQ ID NO: 1285081 - DNA, 25 bp, Homo sapien
ccccaggagaagactcgcttctggg

SEQ ID NO: 1285082 - DNA, 25 bp, Homo sapien
tgtgcagacaacctggtgcaaatgc

SEQ ID NO: 1285083 - DNA, 25 bp, Homo sapien
agcaacattcaagatcccctaccag

SEQ ID NO: 1285084 - DNA, 25 bp, Homo sapien
gtgcaaatgctaagggcaaaggaac

SEQ ID NO: 1285085 - DNA, 25 bp, Homo sapien
aaacagacttccaacaggcaacaag

SEQ ID NO: 1285086 - DNA, 25 bp, Homo sapien
tgggatcagttcctagccaaagcca

SEQ ID NO: 1285087 - DNA, 25 bp, Homo sapien
gaagcaagcagatgtctacctggga

SEQ ID NO: 1285088 - DNA, 25 bp, Homo sapien
tttggccaaggtgcaaagccctctt

SEQ ID NO: 1285089 - DNA, 25 bp, Homo sapien
caggaaacttgagcataaacacccc

SEQ ID NO: 1285090 - DNA, 25 bp, Homo sapien
cggggaactagttcacagtcgtact

SEQ ID NO: 1285091 - DNA, 25 bp, Homo sapien
tcgccggggaactagttcacagtcg

SEQ ID NO: 1285092 - DNA, 25 bp, Homo sapien
gccggggaactagttcacagtcgta

SEQ ID NO: 1285093 - DNA, 25 bp, Homo sapien
cactcgccggggaactagttcacag

SEQ ID NO: 1285094 - DNA, 25 bp, Homo sapien
gtaagatctctaccccactggaggg

SEQ ID NO: 1285095 - DNA, 25 bp, Homo sapien
tacgggtggctaaagcctgcaattc

SEQ ID NO: 1285096 - DNA, 25 bp, Homo sapien
gaaaagctccatacacaatcccagg

SEQ ID NO: 1285097 - DNA, 25 bp, Homo sapien
ccagggactggttcgcaaagaccca

SEQ ID NO: 1285098 - DNA, 25 bp, Homo sapien
ccttctaggctacgatgaatgtaag

SEQ ID NO: 1285099 - DNA, 25 bp, Homo sapien
tccggacaaggtttcagcaaggcag

SEQ ID NO: 1285100 - DNA, 25 bp, Homo sapien
tatttgctatcgacacagtggatac

SEQ ID NO: 1285101 - DNA, 25 bp, Homo sapien
aatgcatttccggatatgtcgctac

SEQ ID NO: 1285102 - DNA, 25 bp, Homo sapien
gtggcaacccgaaataatcgcccag

SEQ ID NO: 1285103 - DNA, 25 bp, Homo sapien
cagaacaacgttcattttccgtaat

SEQ ID NO: 1285104 - DNA, 25 bp, Homo sapien
aacccgaaataatcgcccaggccag

SEQ ID NO: 1285105 - DNA, 25 bp, Homo sapien
tccagaacaacgttcattttccgta

SEQ ID NO: 1285106 - DNA, 25 bp, Homo sapien
tatcatactgaattcagccccacag

SEQ ID NO: 1285107 - DNA, 25 bp, Homo sapien
gtaattggctggccgttgtacatta

SEQ ID NO: 1285108 - DNA, 25 bp, Homo sapien
gaatagaggtttcctttgcagtcca

SEQ ID NO: 1285109 - DNA, 25 bp, Homo sapien
attttggtaattggctggccgttgt

SEQ ID NO: 1285110 - DNA, 25 bp, Homo sapien
gaacagcgtctgtctggttgccaag

SEQ ID NO: 1285111 - DNA, 25 bp, Homo sapien
ctgcgcggggctgggaacagcgtct

SEQ ID NO: 1285112 - DNA, 25 bp, Homo sapien
acagcgtctgtctggttgccaaggc

SEQ ID NO: 1285113 - DNA, 25 bp, Homo sapien
ctgggaacagcgtctgtctggttgc

SEQ ID NO: 1285114 - DNA, 25 bp, Homo sapien
tcttgccaaactgagaggagacacc

SEQ ID NO: 1285115 - DNA, 25 bp, Homo sapien
tgccaaactgagaggagacaccagc

SEQ ID NO: 1285116 - DNA, 25 bp, Homo sapien
gccaaactgagaggagacaccagca

SEQ ID NO: 1285117 - DNA, 25 bp, Homo sapien
ggcctcttgccaaactgagaggaga

SEQ ID NO: 1285118 - DNA, 25 bp, Homo sapien
gcagacacaatcacttcgtggctaa

SEQ ID NO: 1285119 - DNA, 25 bp, Homo sapien
tgtggttccgcccacatgctgcaga

SEQ ID NO: 1285120 - DNA, 25 bp, Homo sapien
gtggctaagaccctcgatgagtcta

SEQ ID NO: 1285121 - DNA, 25 bp, Homo sapien
gctaagaccctcgatgagtctaggg

SEQ ID NO: 1285122 - DNA, 25 bp, Homo sapien
tgcagctccccggacctccttccct

SEQ ID NO: 1285123 - DNA, 25 bp, Homo sapien
agatccagagcaaagaacgccccgg

SEQ ID NO: 1285124 - DNA, 25 bp, Homo sapien
ggcagcagcgggaccacccgtgcac

SEQ ID NO: 1285125 - DNA, 25 bp, Homo sapien
gaccacccgtgcacacctcccacgt

SEQ ID NO: 1285126 - DNA, 25 bp, Homo sapien
caggactgctgcaggtgcgaccaag

SEQ ID NO: 1285127 - DNA, 25 bp, Homo sapien
gactgctgcaggtgcgaccaaggcc

SEQ ID NO: 1285128 - DNA, 25 bp, Homo sapien
actgctgcaggtgcgaccaaggccc

SEQ ID NO: 1285129 - DNA, 25 bp, Homo sapien
tgcaggtgcgaccaaggccctgtat

SEQ ID NO: 1285130 - DNA, 25 bp, Homo sapien
gcaacaagtgcaagtctcagtggac

SEQ ID NO: 1285131 - DNA, 25 bp, Homo sapien
ctctaattaaagaacggcgggctga

SEQ ID NO: 1285132 - DNA, 25 bp, Homo sapien
tctgactacagaaggaattgcgacg

SEQ ID NO: 1285133 - DNA, 25 bp, Homo sapien
tggagaccccacatgagcaatgcgt

SEQ ID NO: 1285134 - DNA, 25 bp, Homo sapien
aactgagggcgctttcagagccacc

SEQ ID NO: 1285135 - DNA, 25 bp, Homo sapien
gtttggaacactgacataaaaggct

SEQ ID NO: 1285136 - DNA, 25 bp, Homo sapien
gaagctcagcgagagatcagaactg

SEQ ID NO: 1285137 - DNA, 25 bp, Homo sapien
cacacgtcttgatggcgggacatac

SEQ ID NO: 1285138 - DNA, 25 bp, Homo sapien
agaggacacgggcaggaatgggccg

SEQ ID NO: 1285139 - DNA, 25 bp, Homo sapien
ctggaagaggacacgggcaggaatg

SEQ ID NO: 1285140 - DNA, 25 bp, Homo sapien
cccacaaattctgaccgagattgcg

SEQ ID NO: 1285141 - DNA, 25 bp, Homo sapien
ctgtgtgcagcacacgagcccgaga

SEQ ID NO: 1285142 - DNA, 25 bp, Homo sapien
gccaggcacccatatctgtggggcc

SEQ ID NO: 1285143 - DNA, 25 bp, Homo sapien
ttctgaccgagattgcggtaagcag

SEQ ID NO: 1285144 - DNA, 25 bp, Homo sapien
gaaacgtggactcttctgcaatgcc

SEQ ID NO: 1285145 - DNA, 25 bp, Homo sapien
cattttccaaacaacgcgctgctgc

SEQ ID NO: 1285146 - DNA, 25 bp, Homo sapien
tacgttactgtagaccaggaggtgc

SEQ ID NO: 1285147 - DNA, 25 bp, Homo sapien
ttttaaggtgccaagacgagccagc

SEQ ID NO: 1285148 - DNA, 25 bp, Homo sapien
ttgctgtttaggcacttcttttcga

SEQ ID NO: 1285149 - DNA, 25 bp, Homo sapien
ctggctgcctccagcaacttggtca

SEQ ID NO: 1285150 - DNA, 25 bp, Homo sapien
ctgcctccagcaacttggtcacata

SEQ ID NO: 1285151 - DNA, 25 bp, Homo sapien
ggctgcctccagcaacttggtcaca

SEQ ID NO: 1285152 - DNA, 25 bp, Homo sapien
gcctccagcaacttggtcacataac

SEQ ID NO: 1285153 - DNA, 25 bp, Homo sapien
ctttggggtcactgaaggcaatatg

SEQ ID NO: 1285154 - DNA, 25 bp, Homo sapien
agctttggggtcactgaaggcaata

SEQ ID NO: 1285155 - DNA, 25 bp, Homo sapien
ggggtcactgaaggcaatatggttt

SEQ ID NO: 1285156 - DNA, 25 bp, Homo sapien
ttggggtcactgaaggcaatatggt

SEQ ID NO: 1285157 - DNA, 25 bp, Homo sapien
ggggaggggcgcagagggagctgtg

SEQ ID NO: 1285158 - DNA, 25 bp, Homo sapien
ggaggggcgcagagggagctgtggg

SEQ ID NO: 1285159 - DNA, 25 bp, Homo sapien
gagggagctgtgggggcggggccat

SEQ ID NO: 1285160 - DNA, 25 bp, Homo sapien
ggggggaggggcgcagagggagctg

SEQ ID NO: 1285161 - DNA, 25 bp, Homo sapien
tgtgctcgggttcggtgatgaccac

SEQ ID NO: 1285162 - DNA, 25 bp, Homo sapien
gtgctcgggttcggtgatgaccacg

SEQ ID NO: 1285163 - DNA, 25 bp, Homo sapien
tggagggagacacggggcagcggcg

SEQ ID NO: 1285164 - DNA, 25 bp, Homo sapien
ctggagggagacacggggcagcggc

SEQ ID NO: 1285165 - DNA, 25 bp, Homo sapien
agggagacacggggcagcggcgcac

SEQ ID NO: 1285166 - DNA, 25 bp, Homo sapien
gagggagacacggggcagcggcgca

SEQ ID NO: 1285167 - DNA, 25 bp, Homo sapien
gggtgccgacctcgggctctagtta

SEQ ID NO: 1285168 - DNA, 25 bp, Homo sapien
tatccgtaagttaggtttgcccaca

SEQ ID NO: 1285169 - DNA, 25 bp, Homo sapien
ttgggagaggaaatcgcgcccctcc

SEQ ID NO: 1285170 - DNA, 25 bp, Homo sapien
taaagaaggcttcgggacacttcca

SEQ ID NO: 1285171 - DNA, 25 bp, Homo sapien
aaatgtaaatacgagcttccagaac

SEQ ID NO: 1285172 - DNA, 25 bp, Homo sapien
gagtgatgagaaaccggagagaaaa

SEQ ID NO: 1285173 - DNA, 25 bp, Homo sapien
gaagcaactaaaagacggatcggag

SEQ ID NO: 1285174 - DNA, 25 bp, Homo sapien
ttttccggcccagacgagggctcca

SEQ ID NO: 1285175 - DNA, 25 bp, Homo sapien
tcacgcagcagccaacaagggacgt

SEQ ID NO: 1285176 - DNA, 25 bp, Homo sapien
aaatagttacttcgctcacgcagca

SEQ ID NO: 1285177 - DNA, 25 bp, Homo sapien
tgaggacactcgctggaaaatagtt

SEQ ID NO: 1285178 - DNA, 25 bp, Homo sapien
cgctggaaaatagttacttcgctca

SEQ ID NO: 1285179 - DNA, 25 bp, Homo sapien
tccacatttcgagatcttgagagac

SEQ ID NO: 1285180 - DNA, 25 bp, Homo sapien
caggtggaaagttatgctgaacaac

SEQ ID NO: 1285181 - DNA, 25 bp, Homo sapien
gagtgaacgggacgctccacatttc

SEQ ID NO: 1285182 - DNA, 25 bp, Homo sapien
caacttaaaggatgaataagacccg

SEQ ID NO: 1285183 - DNA, 25 bp, Homo sapien
aaggctcctttccaaaccatttcat

SEQ ID NO: 1285184 - DNA, 25 bp, Homo sapien
gccatgcgcatcgaagaaccctctg

SEQ ID NO: 1285185 - DNA, 25 bp, Homo sapien
atgcgcatcgaagaaccctctgtgg

SEQ ID NO: 1285186 - DNA, 25 bp, Homo sapien
gggcgccatgcgcatcgaagaaccc

SEQ ID NO: 1285187 - DNA, 25 bp, Homo sapien
ggcgccatgcgcatcgaagaaccct

SEQ ID NO: 1285188 - DNA, 25 bp, Homo sapien
attcagtgttgaaagcctgggaact

SEQ ID NO: 1285189 - DNA, 25 bp, Homo sapien
gctgcattcagtgttgaaagcctgg

SEQ ID NO: 1285190 - DNA, 25 bp, Homo sapien
gtgttgaaagcctgggaactcactg

SEQ ID NO: 1285191 - DNA, 25 bp, Homo sapien
aaacaggaagtctttgaggaagctg

SEQ ID NO: 1285192 - DNA, 25 bp, Homo sapien
gggagaggggaaagtgaggcctctc

SEQ ID NO: 1285193 - DNA, 25 bp, Homo sapien
aagtgaggcctctcctgaggcttgt

SEQ ID NO: 1285194 - DNA, 25 bp, Homo sapien
gggaaagtgaggcctctcctgaggc

SEQ ID NO: 1285195 - DNA, 25 bp, Homo sapien
gaaagtgaggcctctcctgaggctt

SEQ ID NO: 1285196 - DNA, 25 bp, Homo sapien
gaagggaccgattttcagtgaatca

SEQ ID NO: 1285197 - DNA, 25 bp, Homo sapien
caggtgcctgatgtcagggcggagc

SEQ ID NO: 1285198 - DNA, 25 bp, Homo sapien
gaatcagcctttacgtttcccagga

SEQ ID NO: 1285199 - DNA, 25 bp, Homo sapien
agccttgcctttggtgcagtccagg

SEQ ID NO: 1285200 - DNA, 25 bp, Homo sapien
ctcttgtccttccggccccttgagg

SEQ ID NO: 1285201 - DNA, 25 bp, Homo sapien
gccccttgagggagcgacttgttcc

SEQ ID NO: 1285202 - DNA, 25 bp, Homo sapien
ttgatctcaccccagaaccgggtgg

SEQ ID NO: 1285203 - DNA, 25 bp, Homo sapien
gaataatctccctaaagctctagcc

SEQ ID NO: 1285204 - DNA, 25 bp, Homo sapien
tcggaggatttgtaggtcagcatga

SEQ ID NO: 1285205 - DNA, 25 bp, Homo sapien
ggctgacgccgctgatcagaattca

SEQ ID NO: 1285206 - DNA, 25 bp, Homo sapien
agaacctcttgtcctggcccgcagt

SEQ ID NO: 1285207 - DNA, 25 bp, Homo sapien
tccagccaggtctgcttggcaaggc

SEQ ID NO: 1285208 - DNA, 25 bp, Homo sapien
aaggctggaggctcgctgtgtcccc

SEQ ID NO: 1285209 - DNA, 25 bp, Homo sapien
tcactgaagtctttctctaggccca

SEQ ID NO: 1285210 - DNA, 25 bp, Homo sapien
tctgaggacagaccgtggacaaatt

SEQ ID NO: 1285211 - DNA, 25 bp, Homo sapien
gacatgggtggctagagctgacata

SEQ ID NO: 1285212 - DNA, 25 bp, Homo sapien
gctgacataggcaacagtgggcatg

SEQ ID NO: 1285213 - DNA, 25 bp, Homo sapien
agtgggcatgacctgtccatatgga

SEQ ID NO: 1285214 - DNA, 25 bp, Homo sapien
cccactggcctgttggttgagagga

SEQ ID NO: 1285215 - DNA, 25 bp, Homo sapien
tcataattgcagagtggcaggcacc

SEQ ID NO: 1285216 - DNA, 25 bp, Homo sapien
caaccaagagttagaagcaccacat

SEQ ID NO: 1285217 - DNA, 25 bp, Homo sapien
tagaattctggtacccacacgggct

SEQ ID NO: 1285218 - DNA, 25 bp, Homo sapien
ttggggtccaccaaggcttgcccca

SEQ ID NO: 1285219 - DNA, 25 bp, Homo sapien
tggccacaccctggtttgctgggtt

SEQ ID NO: 1285220 - DNA, 25 bp, Homo sapien
ttgctgggtttcttggggtccacca

SEQ ID NO: 1285221 - DNA, 25 bp, Homo sapien
cttttggccacaccctggtttgctg

SEQ ID NO: 1285222 - DNA, 25 bp, Homo sapien
gccagcgtctgctatagatccccag

SEQ ID NO: 1285223 - DNA, 25 bp, Homo sapien
taaaggatgtttagcggcttccctg

SEQ ID NO: 1285224 - DNA, 25 bp, Homo sapien
tttgtctgccatggaaaccagtggc

SEQ ID NO: 1285225 - DNA, 25 bp, Homo sapien
cacaagtaggtcgtggtctctgccc

SEQ ID NO: 1285226 - DNA, 25 bp, Homo sapien
gtctggttcctcgtaagtcgcacca

SEQ ID NO: 1285227 - DNA, 25 bp, Homo sapien
tcgcaccacagggttggtcagcagc

SEQ ID NO: 1285228 - DNA, 25 bp, Homo sapien
ctgtgggcggcatccgcattgtctg

SEQ ID NO: 1285229 - DNA, 25 bp, Homo sapien
ggcatccgcattgtctggttcctcg

SEQ ID NO: 1285230 - DNA, 25 bp, Homo sapien
atttctggcatcagctcagaggcca

SEQ ID NO: 1285231 - DNA, 25 bp, Homo sapien
cagaggccagtttgggggggctcct

SEQ ID NO: 1285232 - DNA, 25 bp, Homo sapien
ttgtccaatgtcatcttatttacac

SEQ ID NO: 1285233 - DNA, 25 bp, Homo sapien
cagtgttgtccaatgtcatcttatt

SEQ ID NO: 1285234 - DNA, 25 bp, Homo sapien
tgttgtccaatgtcatcttatttac

SEQ ID NO: 1285235 - DNA, 25 bp, Homo sapien
gtgttgtccaatgtcatcttattta

SEQ ID NO: 1285236 - DNA, 25 bp, Homo sapien
tgctgccctgcgtgggggagccgtg

SEQ ID NO: 1285237 - DNA, 25 bp, Homo sapien
ccctttgcgctgagaagagctgtgg

SEQ ID NO: 1285238 - DNA, 25 bp, Homo sapien
caccaggtggccctttgcgctgaga

SEQ ID NO: 1285239 - DNA, 25 bp, Homo sapien
ttctcttctgcctgcgcccctcctg

SEQ ID NO: 1285240 - DNA, 25 bp, Homo sapien
acaccaggagggcttgtacctcacc

SEQ ID NO: 1285241 - DNA, 25 bp, Homo sapien
ccaggagggcttgtacctcaccttc

SEQ ID NO: 1285242 - DNA, 25 bp, Homo sapien
ggacaccaggagggcttgtacctca

SEQ ID NO: 1285243 - DNA, 25 bp, Homo sapien
ggagggcttgtacctcaccttccat

SEQ ID NO: 1285244 - DNA, 25 bp, Homo sapien
gttcctggtctgtgccctttggttc

SEQ ID NO: 1285245 - DNA, 25 bp, Homo sapien
ttcctggtctgtgccctttggttcc

SEQ ID NO: 1285246 - DNA, 25 bp, Homo sapien
cctggtctgtgccctttggttccat

SEQ ID NO: 1285247 - DNA, 25 bp, Homo sapien
tcctggtctgtgccctttggttcca

SEQ ID NO: 1285248 - DNA, 25 bp, Homo sapien
ggggctgagcatgatcctggactct

SEQ ID NO: 1285249 - DNA, 25 bp, Homo sapien
atgaggacggacacccagcaggtcc

SEQ ID NO: 1285250 - DNA, 25 bp, Homo sapien
gaagaaggatttgggctgcacagct

SEQ ID NO: 1285251 - DNA, 25 bp, Homo sapien
caggtgtgatctgattcctggaagg

SEQ ID NO: 1285252 - DNA, 25 bp, Homo sapien
ggagtgcttatcatcgtgggtgtca

SEQ ID NO: 1285253 - DNA, 25 bp, Homo sapien
agcaggacagacagcgtgtgccatg

SEQ ID NO: 1285254 - DNA, 25 bp, Homo sapien
acccctgggagagccaaatgatgca

SEQ ID NO: 1285255 - DNA, 25 bp, Homo sapien
gtgcttatcatcgtgggtgtcagca

SEQ ID NO: 1285256 - DNA, 25 bp, Homo sapien
ccaattcatgactgggatttgggtc

SEQ ID NO: 1285257 - DNA, 25 bp, Homo sapien
actgggatttgggtcccagcatgcc

SEQ ID NO: 1285258 - DNA, 25 bp, Homo sapien
ctcccaattcatgactgggatttgg

SEQ ID NO: 1285259 - DNA, 25 bp, Homo sapien
tcatgactgggatttgggtcccagc

SEQ ID NO: 1285260 - DNA, 25 bp, Homo sapien
aaccctagaacctgaacatgactgt

SEQ ID NO: 1285261 - DNA, 25 bp, Homo sapien
tgtggtgacctcattggcctcctga

SEQ ID NO: 1285262 - DNA, 25 bp, Homo sapien
tcctataggatctggtgtggctttt

SEQ ID NO: 1285263 - DNA, 25 bp, Homo sapien
cagcctcagtgaggctccaggactt

SEQ ID NO: 1285264 - DNA, 25 bp, Homo sapien
acattttcaataggttttaacacat

SEQ ID NO: 1285265 - DNA, 25 bp, Homo sapien
cgggagttcgagtttgcggcgagcc

SEQ ID NO: 1285266 - DNA, 25 bp, Homo sapien
gaatccgggagttcgagtttgcggc

SEQ ID NO: 1285267 - DNA, 25 bp, Homo sapien
gagttcgagtttgcggcgagccaag

SEQ ID NO: 1285268 - DNA, 25 bp, Homo sapien
aaaatcaagctgctcccggggtcgg

SEQ ID NO: 1285269 - DNA, 25 bp, Homo sapien
gctgtatatgtcgtttatttggaaa

SEQ ID NO: 1285270 - DNA, 25 bp, Homo sapien
tgtggggcatcgagcccacactgca

SEQ ID NO: 1285271 - DNA, 25 bp, Homo sapien
atcctctcgcctcactggaagacag

SEQ ID NO: 1285272 - DNA, 25 bp, Homo sapien
gagctcagctctggcgtgaccatcc

SEQ ID NO: 1285273 - DNA, 25 bp, Homo sapien
tcagctctggcgtgaccatccctgg

SEQ ID NO: 1285274 - DNA, 25 bp, Homo sapien
ccttgccagccgtagtgcagtcaac

SEQ ID NO: 1285275 - DNA, 25 bp, Homo sapien
agccgtagtgcagtcaactcccagc

SEQ ID NO: 1285276 - DNA, 25 bp, Homo sapien
tttgcacacctcgggggcatcagga

SEQ ID NO: 1285277 - DNA, 25 bp, Homo sapien
ctttgcacacctcgggggcatcagg

SEQ ID NO: 1285278 - DNA, 25 bp, Homo sapien
ctgctttgcacacctcgggggcatc

SEQ ID NO: 1285279 - DNA, 25 bp, Homo sapien
tgctttgcacacctcgggggcatca

SEQ ID NO: 1285280 - DNA, 25 bp, Homo sapien
ccttgttaaccagtgagtcccaggg

SEQ ID NO: 1285281 - DNA, 25 bp, Homo sapien
tgccttgttaaccagtgagtcccag

SEQ ID NO: 1285282 - DNA, 25 bp, Homo sapien
ttgttaaccagtgagtcccagggcc

SEQ ID NO: 1285283 - DNA, 25 bp, Homo sapien
tcactgccttgttaaccagtgagtc

SEQ ID NO: 1285284 - DNA, 25 bp, Homo sapien
cagttaggggtgagtgtgccggcac

SEQ ID NO: 1285285 - DNA, 25 bp, Homo sapien
ccagttaggggtgagtgtgccggca

SEQ ID NO: 1285286 - DNA, 25 bp, Homo sapien
tcagccagttaggggtgagtgtgcc

SEQ ID NO: 1285287 - DNA, 25 bp, Homo sapien
agccagttaggggtgagtgtgccgg

SEQ ID NO: 1285288 - DNA, 25 bp, Homo sapien
ctccgccacggcggagccgcctgtg

SEQ ID NO: 1285289 - DNA, 25 bp, Homo sapien
agccgcctgtgcagggcggtcgcag

SEQ ID NO: 1285290 - DNA, 25 bp, Homo sapien
gcggtcgcagggccctcgcaggact

SEQ ID NO: 1285291 - DNA, 25 bp, Homo sapien
cggagccgcctgtgcagggcggtcg

SEQ ID NO: 1285292 - DNA, 25 bp, Homo sapien
tgcaggaaggtgagattcggggggt

SEQ ID NO: 1285293 - DNA, 25 bp, Homo sapien
tgagattcggggggttaggcattct

SEQ ID NO: 1285294 - DNA, 25 bp, Homo sapien
aggtgagattcggggggttaggcat

SEQ ID NO: 1285295 - DNA, 25 bp, Homo sapien
gtgagattcggggggttaggcattc

SEQ ID NO: 1285296 - DNA, 25 bp, Homo sapien
aagcgcgtgcggtcagcaatctgct

SEQ ID NO: 1285297 - DNA, 25 bp, Homo sapien
tctgcatctgatgcctcctgccggt

SEQ ID NO: 1285298 - DNA, 25 bp, Homo sapien
ggttttaaccggcttcggagcatga

SEQ ID NO: 1285299 - DNA, 25 bp, Homo sapien
tgaaggtgcttcctgaagcgcgtgc

SEQ ID NO: 1285300 - DNA, 25 bp, Homo sapien
tgtttacatgactagtgggccctga

SEQ ID NO: 1285301 - DNA, 25 bp, Homo sapien
ccctgggacccttggtccatggtgt

SEQ ID NO: 1285302 - DNA, 25 bp, Homo sapien
ggtgaagaccgggatcttggctcct

SEQ ID NO: 1285303 - DNA, 25 bp, Homo sapien
gctgaccacaggtgaagaccgggat

SEQ ID NO: 1285304 - DNA, 25 bp, Homo sapien
acaggagaggatgcgggtcagccgc

SEQ ID NO: 1285305 - DNA, 25 bp, Homo sapien
agaggatgcgggtcagccgcataca

SEQ ID NO: 1285306 - DNA, 25 bp, Homo sapien
ggatgcgggtcagccgcatacacgt

SEQ ID NO: 1285307 - DNA, 25 bp, Homo sapien
ccacaggagaggatgcgggtcagcc

SEQ ID NO: 1285308 - DNA, 25 bp, Homo sapien
tgtggctcccctatgcagagctcag

SEQ ID NO: 1285309 - DNA, 25 bp, Homo sapien
caatatcatgcaggcgaggcctgca

SEQ ID NO: 1285310 - DNA, 25 bp, Homo sapien
ggctcccctatgcagagctcagagc

SEQ ID NO: 1285311 - DNA, 25 bp, Homo sapien
tcaatatcatgcaggcgaggcctgc

SEQ ID NO: 1285312 - DNA, 25 bp, Homo sapien
ggcccggcaggcatggacgctccat

SEQ ID NO: 1285313 - DNA, 25 bp, Homo sapien
caggcatggacgctccatgaggttt

SEQ ID NO: 1285314 - DNA, 25 bp, Homo sapien
tgcatcgggccgtaaacaggactct

SEQ ID NO: 1285315 - DNA, 25 bp, Homo sapien
atcgcactctctgcatcgggccgta

SEQ ID NO: 1285316 - DNA, 25 bp, Homo sapien
agctggcaggacgtccatcgctcca

SEQ ID NO: 1285317 - DNA, 25 bp, Homo sapien
tcttggagctggcaggacgtccatc

SEQ ID NO: 1285318 - DNA, 25 bp, Homo sapien
cagtcttggagctggcaggacgtcc

SEQ ID NO: 1285319 - DNA, 25 bp, Homo sapien
tccatcgctccatcccttgcaggct

SEQ ID NO: 1285320 - DNA, 25 bp, Homo sapien
tgaccagggtgtcatcgtcctgctg

SEQ ID NO: 1285321 - DNA, 25 bp, Homo sapien
gtcctgctgcccgtgcctcggctgg

SEQ ID NO: 1285322 - DNA, 25 bp, Homo sapien
ctcctgatctgccagggtctgctct

SEQ ID NO: 1285323 - DNA, 25 bp, Homo sapien
gtgggcactgaccagggtgtcatcg

SEQ ID NO: 1285324 - DNA, 25 bp, Homo sapien
gaggacacatctggaggaaatggcc

SEQ ID NO: 1285325 - DNA, 25 bp, Homo sapien
ttgtttgggccctagcgggactcca

SEQ ID NO: 1285326 - DNA, 25 bp, Homo sapien
cctggcaagcccagtatcacttgtt

SEQ ID NO: 1285327 - DNA, 25 bp, Homo sapien
acaaaacctcacaactgcctggcaa

SEQ ID NO: 1285328 - DNA, 25 bp, Homo sapien
tctggagtagcatgggggcagaagg

SEQ ID NO: 1285329 - DNA, 25 bp, Homo sapien
caagccagaagcgaggggaagatga

SEQ ID NO: 1285330 - DNA, 25 bp, Homo sapien
ttggtgtctaacagtgcaagccaga

SEQ ID NO: 1285331 - DNA, 25 bp, Homo sapien
accccaggtctggagtagcatgggg

SEQ ID NO: 1285332 - DNA, 25 bp, Homo sapien
ctacagatcgctcagctaaaaggga

SEQ ID NO: 1285333 - DNA, 25 bp, Homo sapien
cctagacctacagatcgctcagcta

SEQ ID NO: 1285334 - DNA, 25 bp, Homo sapien
tgggatctccgtgggcctgttagat

SEQ ID NO: 1285335 - DNA, 25 bp, Homo sapien
gcatctgggatctccgtgggcctgt

SEQ ID NO: 1285336 - DNA, 25 bp, Homo sapien
tggtatgatgggactgagcctgggg

SEQ ID NO: 1285337 - DNA, 25 bp, Homo sapien
gctggtatgatgggactgagcctgg

SEQ ID NO: 1285338 - DNA, 25 bp, Homo sapien
ggaccatcctctgcgaggaccccat

SEQ ID NO: 1285339 - DNA, 25 bp, Homo sapien
ggggaccatcctctgcgaggacccc

SEQ ID NO: 1285340 - DNA, 25 bp, Homo sapien
ttgtttatgcagctcgaggcccatg

SEQ ID NO: 1285341 - DNA, 25 bp, Homo sapien
tgtgatgtcagcgtggctgcccatg

SEQ ID NO: 1285342 - DNA, 25 bp, Homo sapien
gtttatgcagctcgaggcccatgca

SEQ ID NO: 1285343 - DNA, 25 bp, Homo sapien
gtcagcgtggctgcccatgggatcc

SEQ ID NO: 1285344 - DNA, 25 bp, Homo sapien
gaggcggctggaacggggaggccac

SEQ ID NO: 1285345 - DNA, 25 bp, Homo sapien
caagggagggggctgcgcatgctta

SEQ ID NO: 1285346 - DNA, 25 bp, Homo sapien
tcctcttaggattcctcccttggct

SEQ ID NO: 1285347 - DNA, 25 bp, Homo sapien
tgcgcatgcttagggtgaggcggct

SEQ ID NO: 1285348 - DNA, 25 bp, Homo sapien
cacgccaacaataaccataatgaag

SEQ ID NO: 1285349 - DNA, 25 bp, Homo sapien
caaccagaactgaggtctaactgta

SEQ ID NO: 1285350 - DNA, 25 bp, Homo sapien
tcgatgtttgctcctgaacccttag

SEQ ID NO: 1285351 - DNA, 25 bp, Homo sapien
ctttgtcacttctcccattgggtga

SEQ ID NO: 1285352 - DNA, 25 bp, Homo sapien
ggattggcagcatagactccctctg

SEQ ID NO: 1285353 - DNA, 25 bp, Homo sapien
catgctgtgctgacgcagggacttt

SEQ ID NO: 1285354 - DNA, 25 bp, Homo sapien
ccttagctggcttgtggtaataacc

SEQ ID NO: 1285355 - DNA, 25 bp, Homo sapien
tccccacgctttcatggaggtctgg

SEQ ID NO: 1285356 - DNA, 25 bp, Homo sapien
tcctgcgaagagcttcaaggtgaag

SEQ ID NO: 1285357 - DNA, 25 bp, Homo sapien
gctgcagtagttctgatcctgcgaa

SEQ ID NO: 1285358 - DNA, 25 bp, Homo sapien
cttcaaggtgaagccggattcagga

SEQ ID NO: 1285359 - DNA, 25 bp, Homo sapien
agccggattcaggatttcccaggga

SEQ ID NO: 1285360 - DNA, 25 bp, Homo sapien
tagaggtggccccacaggtgttaac

SEQ ID NO: 1285361 - DNA, 25 bp, Homo sapien
tgaggtgacccttgcaagatgttgc

SEQ ID NO: 1285362 - DNA, 25 bp, Homo sapien
tcagagaaggagttccaagcactgt

SEQ ID NO: 1285363 - DNA, 25 bp, Homo sapien
tgtagaattggtccctgcagcagtg

SEQ ID NO: 1285364 - DNA, 25 bp, Homo sapien
gatcacactcaggtctgaccctcgg

SEQ ID NO: 1285365 - DNA, 25 bp, Homo sapien
ggatcacactcaggtctgaccctcg

SEQ ID NO: 1285366 - DNA, 25 bp, Homo sapien
cctcactcatttctggcacttggcg

SEQ ID NO: 1285367 - DNA, 25 bp, Homo sapien
ttggcgttctaggatcacaggatca

SEQ ID NO: 1285368 - DNA, 25 bp, Homo sapien
tcttagcttgtaggaagtgctcaaa

SEQ ID NO: 1285369 - DNA, 25 bp, Homo sapien
caaaatgcaaggtaagttcttagct

SEQ ID NO: 1285370 - DNA, 25 bp, Homo sapien
tcaaagtacacactacttatcatca

SEQ ID NO: 1285371 - DNA, 25 bp, Homo sapien
atcttctttatcatcgttactgcca

SEQ ID NO: 1285372 - DNA, 25 bp, Homo sapien
gcaccacaggctttgccagaaatgg

SEQ ID NO: 1285373 - DNA, 25 bp, Homo sapien
ccagaaatggaacaacagtgtcaga

SEQ ID NO: 1285374 - DNA, 25 bp, Homo sapien
atccttattgattgtggtgggcacc

SEQ ID NO: 1285375 - DNA, 25 bp, Homo sapien
gaagaggaagtgatggtgccagtca

SEQ ID NO: 1285376 - DNA, 25 bp, Homo sapien
tcagctggcatcttgcctgtccaag

SEQ ID NO: 1285377 - DNA, 25 bp, Homo sapien
cccagcaagtcaagcggccatgatt

SEQ ID NO: 1285378 - DNA, 25 bp, Homo sapien
catctgttgaagaatttacgagagt

SEQ ID NO: 1285379 - DNA, 25 bp, Homo sapien
caagcggccatgattagtcaaataa

SEQ ID NO: 1285380 - DNA, 25 bp, Homo sapien
ttgtgcactgtgtctggagcccctg

SEQ ID NO: 1285381 - DNA, 25 bp, Homo sapien
cagcttgagtgtgactgtttggcag

SEQ ID NO: 1285382 - DNA, 25 bp, Homo sapien
tggttgtgcactgtgtctggagccc

SEQ ID NO: 1285383 - DNA, 25 bp, Homo sapien
tgggtccctttctctcggccaggca

SEQ ID NO: 1285384 - DNA, 25 bp, Homo sapien
tagcctaggtctctgggaattttca

SEQ ID NO: 1285385 - DNA, 25 bp, Homo sapien
cttgccgtggcaagttgatgtctct

SEQ ID NO: 1285386 - DNA, 25 bp, Homo sapien
tggactgagacctttgggccagagt

SEQ ID NO: 1285387 - DNA, 25 bp, Homo sapien
atgtctcttggactgagacctttgg

SEQ ID NO: 1285388 - DNA, 25 bp, Homo sapien
tctgtctgggtttcacgttgtttaa

SEQ ID NO: 1285389 - DNA, 25 bp, Homo sapien
ttggatggcttctatcgtgctgagg

SEQ ID NO: 1285390 - DNA, 25 bp, Homo sapien
ggcttctatcgtgctgagggattca

SEQ ID NO: 1285391 - DNA, 25 bp, Homo sapien
gtgctgagggattcattctgtctgg

SEQ ID NO: 1285392 - DNA, 25 bp, Homo sapien
tgttggaatccacccaggtaaagcc

SEQ ID NO: 1285393 - DNA, 25 bp, Homo sapien
tcccaggtgccaactgtgcagcggt

SEQ ID NO: 1285394 - DNA, 25 bp, Homo sapien
ggtaaagccaccatgatgcacaagt

SEQ ID NO: 1285395 - DNA, 25 bp, Homo sapien
gggctgtatagacaccagatgttgg

SEQ ID NO: 1285396 - DNA, 25 bp, Homo sapien
ctgcctgcctggtttgatgagctgt

SEQ ID NO: 1285397 - DNA, 25 bp, Homo sapien
tgcaggggcgaaggcctggaggctg

SEQ ID NO: 1285398 - DNA, 25 bp, Homo sapien
tttctctcctcgtagattcagagag

SEQ ID NO: 1285399 - DNA, 25 bp, Homo sapien
gagattttcataactcagacagcag

SEQ ID NO: 1285400 - DNA, 25 bp, Homo sapien
ggtggccttgagattttcataactc

SEQ ID NO: 1285401 - DNA, 25 bp, Homo sapien
agacagcagttccagggacctctac

SEQ ID NO: 1285402 - DNA, 25 bp, Homo sapien
ggacaaatggacactgaggtgctgg

SEQ ID NO: 1285403 - DNA, 25 bp, Homo sapien
gtgctggggtcaccaccgtttcttg

SEQ ID NO: 1285404 - DNA, 25 bp, Homo sapien
aggtgctggggtcaccaccgtttct

SEQ ID NO: 1285405 - DNA, 25 bp, Homo sapien
atgccaggctcccctttcatctctc

SEQ ID NO: 1285406 - DNA, 25 bp, Homo sapien
catgccaggctcccctttcatctct

SEQ ID NO: 1285407 - DNA, 25 bp, Homo sapien
tgccaggctcccctttcatctctcc

SEQ ID NO: 1285408 - DNA, 25 bp, Homo sapien
caggctcccctttcatctctccagt

SEQ ID NO: 1285409 - DNA, 25 bp, Homo sapien
cctgttttggccctcccgctgtgcc

SEQ ID NO: 1285410 - DNA, 25 bp, Homo sapien
gatcctgtgtacagccactccaggg

SEQ ID NO: 1285411 - DNA, 25 bp, Homo sapien
gatcatgggttcaaaccagatcctg

SEQ ID NO: 1285412 - DNA, 25 bp, Homo sapien
ggtcaatgagtttggttgctcggtg

SEQ ID NO: 1285413 - DNA, 25 bp, Homo sapien
ggtatacagctctggtacacgagcc

SEQ ID NO: 1285414 - DNA, 25 bp, Homo sapien
tatacagctctggtacacgagcccc

SEQ ID NO: 1285415 - DNA, 25 bp, Homo sapien
ctttggtatacagctctggtacacg

SEQ ID NO: 1285416 - DNA, 25 bp, Homo sapien
ttggtatacagctctggtacacgag

SEQ ID NO: 1285417 - DNA, 25 bp, Homo sapien
ccaagtttgcatgcttcaaggatga

SEQ ID NO: 1285418 - DNA, 25 bp, Homo sapien
ggaggagggtggtatgagagaattc

SEQ ID NO: 1285419 - DNA, 25 bp, Homo sapien
caccctgggccataggaagaggtgg

SEQ ID NO: 1285420 - DNA, 25 bp, Homo sapien
ccaccctgggccataggaagaggtg

SEQ ID NO: 1285421 - DNA, 25 bp, Homo sapien
aggaggctggctagatcaagccgcc

SEQ ID NO: 1285422 - DNA, 25 bp, Homo sapien
gtgcagagtgaatgtgggttcccct

SEQ ID NO: 1285423 - DNA, 25 bp, Homo sapien
ccctgaggggccatcagcatggtga

SEQ ID NO: 1285424 - DNA, 25 bp, Homo sapien
tctgaggtctgcatcgggcacatcg

SEQ ID NO: 1285425 - DNA, 25 bp, Homo sapien
aggccccgaagccagcctgatttgc

SEQ ID NO: 1285426 - DNA, 25 bp, Homo sapien
caccaggccccgaagccagcctgat

SEQ ID NO: 1285427 - DNA, 25 bp, Homo sapien
ccaggccccgaagccagcctgattt

SEQ ID NO: 1285428 - DNA, 25 bp, Homo sapien
gggcaccaggccccgaagccagcct

SEQ ID NO: 1285429 - DNA, 25 bp, Homo sapien
gaagtcagcaatggggcagcaggtc

SEQ ID NO: 1285430 - DNA, 25 bp, Homo sapien
tgccgatgttgtgcccaagccctgt

SEQ ID NO: 1285431 - DNA, 25 bp, Homo sapien
cagttcgcggtgatgccgatgttgt

SEQ ID NO: 1285432 - DNA, 25 bp, Homo sapien
atgccgatgttgtgcccaagccctg

SEQ ID NO: 1285433 - DNA, 25 bp, Homo sapien
ctactgtggcagttcgcggtgatgc

SEQ ID NO: 1285434 - DNA, 25 bp, Homo sapien
tctgccctgcagccggtgacagcag

SEQ ID NO: 1285435 - DNA, 25 bp, Homo sapien
cactctggatgattgagtgtgagga

SEQ ID NO: 1285436 - DNA, 25 bp, Homo sapien
agtgtgaggaatctatcactcagcc

SEQ ID NO: 1285437 - DNA, 25 bp, Homo sapien
ggtctatgtcagagccgattaaagg

SEQ ID NO: 1285438 - DNA, 25 bp, Homo sapien
cctttctggccagggaggcattgct

SEQ ID NO: 1285439 - DNA, 25 bp, Homo sapien
ttcattggcatttcccctggtttgt

SEQ ID NO: 1285440 - DNA, 25 bp, Homo sapien
tgggatgcccttgccacccgtggtt

SEQ ID NO: 1285441 - DNA, 25 bp, Homo sapien
gacatttctggtcctacaggccctt

SEQ ID NO: 1285442 - DNA, 25 bp, Homo sapien
ctggcggggtggtacgtggtgccca

SEQ ID NO: 1285443 - DNA, 25 bp, Homo sapien
agagctcgaggaggctcatcctctg

SEQ ID NO: 1285444 - DNA, 25 bp, Homo sapien
gtacgtggtgcccagaagatgcctg

SEQ ID NO: 1285445 - DNA, 25 bp, Homo sapien
cggaactgctggcacgcctggcctg

SEQ ID NO: 1285446 - DNA, 25 bp, Homo sapien
tccagggagaggacattgctttcac

SEQ ID NO: 1285447 - DNA, 25 bp, Homo sapien
ctccctccagggagaggacattgct

SEQ ID NO: 1285448 - DNA, 25 bp, Homo sapien
cctccagggagaggacattgctttc

SEQ ID NO: 1285449 - DNA, 25 bp, Homo sapien
tccctccagggagaggacattgctt

SEQ ID NO: 1285450 - DNA, 25 bp, Homo sapien
tggtggtagccggttggtggttgta

SEQ ID NO: 1285451 - DNA, 25 bp, Homo sapien
caggcttggcttggtggtagccggt

SEQ ID NO: 1285452 - DNA, 25 bp, Homo sapien
gggcacagctcttaaaagggcagtc

SEQ ID NO: 1285453 - DNA, 25 bp, Homo sapien
cagctcttaaaagggcagtctcagc

SEQ ID NO: 1285454 - DNA, 25 bp, Homo sapien
gcagtgtttcttgagggtcctgctc

SEQ ID NO: 1285455 - DNA, 25 bp, Homo sapien
cagtgtttcttgagggtcctgctct

SEQ ID NO: 1285456 - DNA, 25 bp, Homo sapien
gggatcctcgatcactcccgtgccc

SEQ ID NO: 1285457 - DNA, 25 bp, Homo sapien
tcctcgatcactcccgtgcccttct

SEQ ID NO: 1285458 - DNA, 25 bp, Homo sapien
ttcctggggatcctcgatcactccc

SEQ ID NO: 1285459 - DNA, 25 bp, Homo sapien
ctggggatcctcgatcactcccgtg

SEQ ID NO: 1285460 - DNA, 25 bp, Homo sapien
ccagggatggtcaatcttggggtca

SEQ ID NO: 1285461 - DNA, 25 bp, Homo sapien
agggatggtcaatcttggggtcaca

SEQ ID NO: 1285462 - DNA, 25 bp, Homo sapien
cccagggatggtcaatcttggggtc

SEQ ID NO: 1285463 - DNA, 25 bp, Homo sapien
ggatggtcaatcttggggtcacatc

SEQ ID NO: 1285464 - DNA, 25 bp, Homo sapien
gtgtggaaattaggacgatgctggg

SEQ ID NO: 1285465 - DNA, 25 bp, Homo sapien
ctgtgtggaaattaggacgatgctg

SEQ ID NO: 1285466 - DNA, 25 bp, Homo sapien
tctgtgtggaaattaggacgatgct

SEQ ID NO: 1285467 - DNA, 25 bp, Homo sapien
ttctgtgtggaaattaggacgatgc

SEQ ID NO: 1285468 - DNA, 25 bp, Homo sapien
gaggtggtgcttgtagactgctggg

SEQ ID NO: 1285469 - DNA, 25 bp, Homo sapien
gtgcttgtagactgctgggacaggc

SEQ ID NO: 1285470 - DNA, 25 bp, Homo sapien
cttggggctttgaggaggcttcctg

SEQ ID NO: 1285471 - DNA, 25 bp, Homo sapien
cctggaggtggtgcttgtagactgc

SEQ ID NO: 1285472 - DNA, 25 bp, Homo sapien
gggtgcaaacatgtcattctcttcc

SEQ ID NO: 1285473 - DNA, 25 bp, Homo sapien
gtccccttgcaagggtgcaaacatg

SEQ ID NO: 1285474 - DNA, 25 bp, Homo sapien
cactcttgtccccttgcaagggtgc

SEQ ID NO: 1285475 - DNA, 25 bp, Homo sapien
gctctgtagacccacccactcttgt

SEQ ID NO: 1285476 - DNA, 25 bp, Homo sapien
tgccagtgtctcttcccagaggtaa

SEQ ID NO: 1285477 - DNA, 25 bp, Homo sapien
tgttctgccagtgtctcttcccaga

SEQ ID NO: 1285478 - DNA, 25 bp, Homo sapien
tgtctcttcccagaggtaaacaatc

SEQ ID NO: 1285479 - DNA, 25 bp, Homo sapien
tttctgttctgccagtgtctcttcc

SEQ ID NO: 1285480 - DNA, 25 bp, Homo sapien
ggctctgcaccgccatggagggaga

SEQ ID NO: 1285481 - DNA, 25 bp, Homo sapien
tgtgggctctgcaccgccatggagg

SEQ ID NO: 1285482 - DNA, 25 bp, Homo sapien
tctgcaccgccatggagggagagaa

SEQ ID NO: 1285483 - DNA, 25 bp, Homo sapien
gtgggctctgcaccgccatggaggg

SEQ ID NO: 1285484 - DNA, 25 bp, Homo sapien
gatctcaagtttccaacaactggcc

SEQ ID NO: 1285485 - DNA, 25 bp, Homo sapien
tccccagtagctgatttctatgccc

SEQ ID NO: 1285486 - DNA, 25 bp, Homo sapien
tcaggtccgagttctctatttggga

SEQ ID NO: 1285487 - DNA, 25 bp, Homo sapien
ttctatgcccttggcaaggcactca

SEQ ID NO: 1285488 - DNA, 25 bp, Homo sapien
ttgccctttgaggatggctctgtgc

SEQ ID NO: 1285489 - DNA, 25 bp, Homo sapien
tgtctgtttgagattccagttgccc

SEQ ID NO: 1285490 - DNA, 25 bp, Homo sapien
agatccaaatgtgccttcttcccgt

SEQ ID NO: 1285491 - DNA, 25 bp, Homo sapien
tggcaggacctggtgacagatccaa

SEQ ID NO: 1285492 - DNA, 25 bp, Homo sapien
tggaatctcctcatctccctctcca

SEQ ID NO: 1285493 - DNA, 25 bp, Homo sapien
gaatctcctcatctccctctccagc

SEQ ID NO: 1285494 - DNA, 25 bp, Homo sapien
ggaatctcctcatctccctctccag

SEQ ID NO: 1285495 - DNA, 25 bp, Homo sapien
ctggaatctcctcatctccctctcc

SEQ ID NO: 1285496 - DNA, 25 bp, Homo sapien
agaggaagcctgggcaggaccccac

SEQ ID NO: 1285497 - DNA, 25 bp, Homo sapien
cagaggaagcctgggcaggacccca

SEQ ID NO: 1285498 - DNA, 25 bp, Homo sapien
tcagaggaagcctgggcaggacccc

SEQ ID NO: 1285499 - DNA, 25 bp, Homo sapien
caggaacagggccatgaagaaggtg

SEQ ID NO: 1285500 - DNA, 25 bp, Homo sapien
cgtgggcagggatatcccctgggct

SEQ ID NO: 1285501 - DNA, 25 bp, Homo sapien
gctggcactggagcccatgtcagta

SEQ ID NO: 1285502 - DNA, 25 bp, Homo sapien
tgaagaaggtgtggccagcgtggct

SEQ ID NO: 1285503 - DNA, 25 bp, Homo sapien
ccacacaaagctgactgaagcctga

SEQ ID NO: 1285504 - DNA, 25 bp, Homo sapien
tagaactgtcatcatagtagcggct

SEQ ID NO: 1285505 - DNA, 25 bp, Homo sapien
cacacaaagctgactgaagcctgag

SEQ ID NO: 1285506 - DNA, 25 bp, Homo sapien
gtcatcatagtagcggctggagcaa

SEQ ID NO: 1285507 - DNA, 25 bp, Homo sapien
tgaggaggtgtcgagcattgtcact

SEQ ID NO: 1285508 - DNA, 25 bp, Homo sapien
aaaagttggtgaggaggtgtcgagc

SEQ ID NO: 1285509 - DNA, 25 bp, Homo sapien
gaggtgtcgagcattgtcactgagc

SEQ ID NO: 1285510 - DNA, 25 bp, Homo sapien
tggtgaggaggtgtcgagcattgtc

SEQ ID NO: 1285511 - DNA, 25 bp, Homo sapien
gatcagttggcatattaggtgcaag

SEQ ID NO: 1285512 - DNA, 25 bp, Homo sapien
cagattcaactcataatgatcagtt

SEQ ID NO: 1285513 - DNA, 25 bp, Homo sapien
taggttgatcgtgcctcactcagat

SEQ ID NO: 1285514 - DNA, 25 bp, Homo sapien
ttaggttgatcgtgcctcactcaga

SEQ ID NO: 1285515 - DNA, 25 bp, Homo sapien
tccatcagtgcctgcttgtgatggg

SEQ ID NO: 1285516 - DNA, 25 bp, Homo sapien
tgcctgcttgtgatggggctctgat

SEQ ID NO: 1285517 - DNA, 25 bp, Homo sapien
cctgcttgtgatggggctctgatcc

SEQ ID NO: 1285518 - DNA, 25 bp, Homo sapien
catccatcagtgcctgcttgtgatg

SEQ ID NO: 1285519 - DNA, 25 bp, Homo sapien
ggggcaggtaagatgatgtgggagg

SEQ ID NO: 1285520 - DNA, 25 bp, Homo sapien
tggggcaggtaagatgatgtgggag

SEQ ID NO: 1285521 - DNA, 25 bp, Homo sapien
gggcaggtaagatgatgtgggaggt

SEQ ID NO: 1285522 - DNA, 25 bp, Homo sapien
agagagggcgagagcttcccattca

SEQ ID NO: 1285523 - DNA, 25 bp, Homo sapien
tggtggtgatgttgggtagggaaga

SEQ ID NO: 1285524 - DNA, 25 bp, Homo sapien
tagaggttgttgtgtctgatttctg

SEQ ID NO: 1285525 - DNA, 25 bp, Homo sapien
gaggttgttgtgtctgatttctgaa

SEQ ID NO: 1285526 - DNA, 25 bp, Homo sapien
ctgtgtagaggttgttgtgtctgat

SEQ ID NO: 1285527 - DNA, 25 bp, Homo sapien
tgtagaggttgttgtgtctgatttc

SEQ ID NO: 1285528 - DNA, 25 bp, Homo sapien
ggcaccagaaggtctagagcaccac

SEQ ID NO: 1285529 - DNA, 25 bp, Homo sapien
cagccatgtcttgccgtgcagcctt

SEQ ID NO: 1285530 - DNA, 25 bp, Homo sapien
tcagggacagcatgttgcccatcag

SEQ ID NO: 1285531 - DNA, 25 bp, Homo sapien
agccaccgcttccacaggcaatgtg

SEQ ID NO: 1285532 - DNA, 25 bp, Homo sapien
gccagcatgggacttcccatttcct

SEQ ID NO: 1285533 - DNA, 25 bp, Homo sapien
ccagctcagggaggcaagcagccag

SEQ ID NO: 1285534 - DNA, 25 bp, Homo sapien
agccagcatgggacttcccatttcc

SEQ ID NO: 1285535 - DNA, 25 bp, Homo sapien
cagggaggcaagcagccagcatggg

SEQ ID NO: 1285536 - DNA, 25 bp, Homo sapien
gcttctctgacaggctgcccactgt

SEQ ID NO: 1285537 - DNA, 25 bp, Homo sapien
tagaggagcatctgtccagcttctc

SEQ ID NO: 1285538 - DNA, 25 bp, Homo sapien
agactggtacccgaggatggttgac

SEQ ID NO: 1285539 - DNA, 25 bp, Homo sapien
tcttggctcaggagccagggagact

SEQ ID NO: 1285540 - DNA, 25 bp, Homo sapien
ttcatattcctgtgtagatcctctg

SEQ ID NO: 1285541 - DNA, 25 bp, Homo sapien
agtgtgaaaagctctttcagactca

SEQ ID NO: 1285542 - DNA, 25 bp, Homo sapien
tattcctgtgtagatcctctggctt

SEQ ID NO: 1285543 - DNA, 25 bp, Homo sapien
aagtgtgaaaagctctttcagactc

SEQ ID NO: 1285544 - DNA, 25 bp, Homo sapien
cttcacactggatcagaaatctctg

SEQ ID NO: 1285545 - DNA, 25 bp, Homo sapien
ggcttccattgactgttgaacaaga

SEQ ID NO: 1285546 - DNA, 25 bp, Homo sapien
gaataagtgacattatcggcaacac

SEQ ID NO: 1285547 - DNA, 25 bp, Homo sapien
gagactccttggtgtggcaattcaa

SEQ ID NO: 1285548 - DNA, 25 bp, Homo sapien
aaatctgaaggccaggaacaaccag

SEQ ID NO: 1285549 - DNA, 25 bp, Homo sapien
gattctatgtgagcatccaatattt

SEQ ID NO: 1285550 - DNA, 25 bp, Homo sapien
ccagttgaggcctttctgatggaag

SEQ ID NO: 1285551 - DNA, 25 bp, Homo sapien
aaagaaggattctatgtgagcatcc

SEQ ID NO: 1285552 - DNA, 25 bp, Homo sapien
ttcaggtaagaagtcgtataggtgg

SEQ ID NO: 1285553 - DNA, 25 bp, Homo sapien
taagaagtcgtataggtggagtgat

SEQ ID NO: 1285554 - DNA, 25 bp, Homo sapien
taggtggagtgatggccctgggctc

SEQ ID NO: 1285555 - DNA, 25 bp, Homo sapien
tcgtataggtggagtgatggccctg

SEQ ID NO: 1285556 - DNA, 25 bp, Homo sapien
cagctgccaggggatttgattctct

SEQ ID NO: 1285557 - DNA, 25 bp, Homo sapien
ttctctctgcgatgcaacgaggccc

SEQ ID NO: 1285558 - DNA, 25 bp, Homo sapien
gggatttgattctctctgcgatgca

SEQ ID NO: 1285559 - DNA, 25 bp, Homo sapien
gagctggaagcaggtactctggagc

SEQ ID NO: 1285560 - DNA, 25 bp, Homo sapien
ctaagcctcaggtgtttggatgtgg

SEQ ID NO: 1285561 - DNA, 25 bp, Homo sapien
tcaggtgtttggatgtgggtcttgc

SEQ ID NO: 1285562 - DNA, 25 bp, Homo sapien
cctcaggtgtttggatgtgggtctt

SEQ ID NO: 1285563 - DNA, 25 bp, Homo sapien
agcctcaggtgtttggatgtgggtc

SEQ ID NO: 1285564 - DNA, 25 bp, Homo sapien
gagtcacgcgcagccttttcaggca

SEQ ID NO: 1285565 - DNA, 25 bp, Homo sapien
tggagatgccccttgaaccagcctg

SEQ ID NO: 1285566 - DNA, 25 bp, Homo sapien
tctttcaagtgactcaggggacatc

SEQ ID NO: 1285567 - DNA, 25 bp, Homo sapien
gaaccagcctgcaactggcagtcag

SEQ ID NO: 1285568 - DNA, 25 bp, Homo sapien
gccgtgggggcaaggtcactgagct

SEQ ID NO: 1285569 - DNA, 25 bp, Homo sapien
cctggtgaccgagatgcaggtggca

SEQ ID NO: 1285570 - DNA, 25 bp, Homo sapien
gcagccgtgggggcaaggtcactga

SEQ ID NO: 1285571 - DNA, 25 bp, Homo sapien
cagccgtgggggcaaggtcactgag

SEQ ID NO: 1285572 - DNA, 25 bp, Homo sapien
tccaaaataaatgtaaccgggatga

SEQ ID NO: 1285573 - DNA, 25 bp, Homo sapien
tcaacttcttgttgcaagactcata

SEQ ID NO: 1285574 - DNA, 25 bp, Homo sapien
gagaagccacgataaatgcaatccc

SEQ ID NO: 1285575 - DNA, 25 bp, Homo sapien
gactcataagtgaataaatccaaaa

SEQ ID NO: 1285576 - DNA, 25 bp, Homo sapien
atgtttgacttgagctcaagaatat

SEQ ID NO: 1285577 - DNA, 25 bp, Homo sapien
taaatgtttgacttgagctcaagaa

SEQ ID NO: 1285578 - DNA, 25 bp, Homo sapien
tttgacttgagctcaagaatatctt

SEQ ID NO: 1285579 - DNA, 25 bp, Homo sapien
tctcaaacaatttcttagtagaatt

SEQ ID NO: 1285580 - DNA, 25 bp, Homo sapien
ctgggaaccagcgtgacagccttcg

SEQ ID NO: 1285581 - DNA, 25 bp, Homo sapien
tgacagccttcgagcctgcaggagt

SEQ ID NO: 1285582 - DNA, 25 bp, Homo sapien
ggggctcggtcaccctcttggctct

SEQ ID NO: 1285583 - DNA, 25 bp, Homo sapien
gcaggggctcggtcaccctcttggc

SEQ ID NO: 1285584 - DNA, 25 bp, Homo sapien
ggcaggaacccatcatactcgtaaa

SEQ ID NO: 1285585 - DNA, 25 bp, Homo sapien
tactcgtaaagttctctgcgtccat

SEQ ID NO: 1285586 - DNA, 25 bp, Homo sapien
ttgcttccagcatatggcaggaacc

SEQ ID NO: 1285587 - DNA, 25 bp, Homo sapien
ctccttctggatcttgcttccagca

SEQ ID NO: 1285588 - DNA, 25 bp, Homo sapien
cttggaaaaggtacacagaagagaa

SEQ ID NO: 1285589 - DNA, 25 bp, Homo sapien
gagtccggggcctgtgagccatctt

SEQ ID NO: 1285590 - DNA, 25 bp, Homo sapien
ccatcttggaaaaggtacacagaag

SEQ ID NO: 1285591 - DNA, 25 bp, Homo sapien
cagatggggggggtcagcgagtccg

SEQ ID NO: 1285592 - DNA, 25 bp, Homo sapien
tcctgttttaacatcccaggtcaac

SEQ ID NO: 1285593 - DNA, 25 bp, Homo sapien
gttttaacatcccaggtcaacagcc

SEQ ID NO: 1285594 - DNA, 25 bp, Homo sapien
taacatcccaggtcaacagccattc

SEQ ID NO: 1285595 - DNA, 25 bp, Homo sapien
tttcctgttttaacatcccaggtca

SEQ ID NO: 1285596 - DNA, 25 bp, Homo sapien
caagcctagctcctcctaggtccat

SEQ ID NO: 1285597 - DNA, 25 bp, Homo sapien
tgccaagcctagctcctcctaggtc

SEQ ID NO: 1285598 - DNA, 25 bp, Homo sapien
cttgccaagcctagctcctcctagg

SEQ ID NO: 1285599 - DNA, 25 bp, Homo sapien
ccaagcctagctcctcctaggtcca

SEQ ID NO: 1285600 - DNA, 25 bp, Homo sapien
taaaatctctttgtagcaggctagc

SEQ ID NO: 1285601 - DNA, 25 bp, Homo sapien
caggctagctaacaacagagctttt

SEQ ID NO: 1285602 - DNA, 25 bp, Homo sapien
tagagacatagacattgcctggcca

SEQ ID NO: 1285603 - DNA, 25 bp, Homo sapien
cactggtctttagctagtgcctgac

SEQ ID NO: 1285604 - DNA, 25 bp, Homo sapien
tctcctgccgcaggaaaggtgagcc

SEQ ID NO: 1285605 - DNA, 25 bp, Homo sapien
tcctcactcctctgtatgcgagggt

SEQ ID NO: 1285606 - DNA, 25 bp, Homo sapien
aatgccttggtaagtgtcagtgaag

SEQ ID NO: 1285607 - DNA, 25 bp, Homo sapien
tgtgctttagcttctgcgaaagctc

SEQ ID NO: 1285608 - DNA, 25 bp, Homo sapien
tgctttcctcatggttgacctgaag

SEQ ID NO: 1285609 - DNA, 25 bp, Homo sapien
cattttgctttcctcatggttgacc

SEQ ID NO: 1285610 - DNA, 25 bp, Homo sapien
ttcctcatggttgacctgaagccca

SEQ ID NO: 1285611 - DNA, 25 bp, Homo sapien
tcatggttgacctgaagcccaggcc

SEQ ID NO: 1285612 - DNA, 25 bp, Homo sapien
gctagtttatcttgcacggccaaag

SEQ ID NO: 1285613 - DNA, 25 bp, Homo sapien
ggagcattttctcgtgggtaaccat

SEQ ID NO: 1285614 - DNA, 25 bp, Homo sapien
gagattggtttggaacttgaacata

SEQ ID NO: 1285615 - DNA, 25 bp, Homo sapien
taattggctgttcagggatgtcttc

SEQ ID NO: 1285616 - DNA, 25 bp, Homo sapien
tcctgctgtcttttgcacagaatca

SEQ ID NO: 1285617 - DNA, 25 bp, Homo sapien
ttttgcacagaatcaaacctcacac

SEQ ID NO: 1285618 - DNA, 25 bp, Homo sapien
cccacaaaaaggtaagtatcagctg

SEQ ID NO: 1285619 - DNA, 25 bp, Homo sapien
aaaaggtaagtatcagctggccatg

SEQ ID NO: 1285620 - DNA, 25 bp, Homo sapien
ggtttgaacaactccacactggaat

SEQ ID NO: 1285621 - DNA, 25 bp, Homo sapien
tgctgcctttggaggtttgaacaac

SEQ ID NO: 1285622 - DNA, 25 bp, Homo sapien
tggtttttgtcgtgctctttcagca

SEQ ID NO: 1285623 - DNA, 25 bp, Homo sapien
tggagccctgcttggtttttgtcgt

SEQ ID NO: 1285624 - DNA, 25 bp, Homo sapien
cagcagacgcccagctctttgtaaa

SEQ ID NO: 1285625 - DNA, 25 bp, Homo sapien
tttgtgagctcatcacttgtcgagg

SEQ ID NO: 1285626 - DNA, 25 bp, Homo sapien
gagctcatcacttgtcgagggctgg

SEQ ID NO: 1285627 - DNA, 25 bp, Homo sapien
tacatggcttccagcaatggaaccc

SEQ ID NO: 1285628 - DNA, 25 bp, Homo sapien
gcaatggaacccctgtttgtgagct

SEQ ID NO: 1285629 - DNA, 25 bp, Homo sapien
gaggtagaggcagcgatttgcatat

SEQ ID NO: 1285630 - DNA, 25 bp, Homo sapien
tattaaatatctcttagcaggatcc

SEQ ID NO: 1285631 - DNA, 25 bp, Homo sapien
gcattgctacatcccgctcccagag

SEQ ID NO: 1285632 - DNA, 25 bp, Homo sapien
gcaggatccacaagccgcattgcta

SEQ ID NO: 1285633 - DNA, 25 bp, Homo sapien
gctgccaaggcggtcaattttgtca

SEQ ID NO: 1285634 - DNA, 25 bp, Homo sapien
aggcggtcaattttgtcaggcacag

SEQ ID NO: 1285635 - DNA, 25 bp, Homo sapien
ggcagctgccaaggcggtcaatttt

SEQ ID NO: 1285636 - DNA, 25 bp, Homo sapien
ttgtcaggcacagccggttcttcct

SEQ ID NO: 1285637 - DNA, 25 bp, Homo sapien
tggccttttctctccgcatgggctc

SEQ ID NO: 1285638 - DNA, 25 bp, Homo sapien
ccctgaccgcctttgcagcccatcc

SEQ ID NO: 1285639 - DNA, 25 bp, Homo sapien
agagctccctgaccgcctttgcagc

SEQ ID NO: 1285640 - DNA, 25 bp, Homo sapien
cagagctccctgaccgcctttgcag

SEQ ID NO: 1285641 - DNA, 25 bp, Homo sapien
gaaaattgccgagtctcctttggtg

SEQ ID NO: 1285642 - DNA, 25 bp, Homo sapien
tttgggtgagaaaattgccgagtct

SEQ ID NO: 1285643 - DNA, 25 bp, Homo sapien
tgggtggaagggtagctccataccc

SEQ ID NO: 1285644 - DNA, 25 bp, Homo sapien
tgacttctttcctggtgggtggaag

SEQ ID NO: 1285645 - DNA, 25 bp, Homo sapien
tccagaatcacatcgtcaatgtgcc

SEQ ID NO: 1285646 - DNA, 25 bp, Homo sapien
atcacatcgtcaatgtgccctccct

SEQ ID NO: 1285647 - DNA, 25 bp, Homo sapien
gaatcacatcgtcaatgtgccctcc

SEQ ID NO: 1285648 - DNA, 25 bp, Homo sapien
cagaatcacatcgtcaatgtgccct

SEQ ID NO: 1285649 - DNA, 25 bp, Homo sapien
ctgcatcagcgtcttcggtcccagc

SEQ ID NO: 1285650 - DNA, 25 bp, Homo sapien
tcagcgtcttcggtcccagccagcc

SEQ ID NO: 1285651 - DNA, 25 bp, Homo sapien
tttccctgcatcagcgtcttcggtc

SEQ ID NO: 1285652 - DNA, 25 bp, Homo sapien
ctttccctgcatcagcgtcttcggt

SEQ ID NO: 1285653 - DNA, 25 bp, Homo sapien
cctggccccagtcctctacctccag

SEQ ID NO: 1285654 - DNA, 25 bp, Homo sapien
tcagatcagtctttctcgtgctcca

SEQ ID NO: 1285655 - DNA, 25 bp, Homo sapien
gatcagtctttctcgtgctccagct

SEQ ID NO: 1285656 - DNA, 25 bp, Homo sapien
tggccccagtcctctacctccaggt

SEQ ID NO: 1285657 - DNA, 25 bp, Homo sapien
gataggccttttccagttgtatatt

SEQ ID NO: 1285658 - DNA, 25 bp, Homo sapien
tattactgttctcagagtaatatac

SEQ ID NO: 1285659 - DNA, 25 bp, Homo sapien
tacaaattcttcgtcatatttcttc

SEQ ID NO: 1285660 - DNA, 25 bp, Homo sapien
ggccttttccagttgtatattactg

SEQ ID NO: 1285661 - DNA, 25 bp, Homo sapien
ccaggagaggcaccttcgtacccag

SEQ ID NO: 1285662 - DNA, 25 bp, Homo sapien
agaggcaccttcgtacccagcagag

SEQ ID NO: 1285663 - DNA, 25 bp, Homo sapien
tctcaggagtgtatcagggtagaca

SEQ ID NO: 1285664 - DNA, 25 bp, Homo sapien
caggagtgtatcagggtagacatca

SEQ ID NO: 1285665 - DNA, 25 bp, Homo sapien
tctccattccatggaccacagtggc

SEQ ID NO: 1285666 - DNA, 25 bp, Homo sapien
ctccattccatggaccacagtggca

SEQ ID NO: 1285667 - DNA, 25 bp, Homo sapien
ggtgctttgctgaaattgccgtgac

SEQ ID NO: 1285668 - DNA, 25 bp, Homo sapien
tgccctcgccgacatgccatctgtc

SEQ ID NO: 1285669 - DNA, 25 bp, Homo sapien
tctctaaagtactctgggcaagaca

SEQ ID NO: 1285670 - DNA, 25 bp, Homo sapien
gacaaataccagtggcaatttcttc

SEQ ID NO: 1285671 - DNA, 25 bp, Homo sapien
tgctggtgcaggagcgctcttccct

SEQ ID NO: 1285672 - DNA, 25 bp, Homo sapien
gctcttccctcttgggtgcagagtc

SEQ ID NO: 1285673 - DNA, 25 bp, Homo sapien
cttccctcttgggtgcagagtccat

SEQ ID NO: 1285674 - DNA, 25 bp, Homo sapien
ggtgcaggagcgctcttccctcttg

SEQ ID NO: 1285675 - DNA, 25 bp, Homo sapien
cagagaaagttaagggaagattcca

SEQ ID NO: 1285676 - DNA, 25 bp, Homo sapien
gattccaaacaagttgagctgccac

SEQ ID NO: 1285677 - DNA, 25 bp, Homo sapien
aagattccaaacaagttgagctgcc

SEQ ID NO: 1285678 - DNA, 25 bp, Homo sapien
ggaagattccaaacaagttgagctg

SEQ ID NO: 1285679 - DNA, 25 bp, Homo sapien
tgcaggtgaccgggcagggtgcagg

SEQ ID NO: 1285680 - DNA, 25 bp, Homo sapien
gaccgggcagggtgcaggtgtgagg

SEQ ID NO: 1285681 - DNA, 25 bp, Homo sapien
caggtgaccgggcagggtgcaggtg

SEQ ID NO: 1285682 - DNA, 25 bp, Homo sapien
ggtgaccgggcagggtgcaggtgtg

SEQ ID NO: 1285683 - DNA, 25 bp, Homo sapien
ctgccctgtcattccatcccccgcc

SEQ ID NO: 1285684 - DNA, 25 bp, Homo sapien
tgccctgtcattccatcccccgcct

SEQ ID NO: 1285685 - DNA, 25 bp, Homo sapien
acatcctgcacaggactcaccctca

SEQ ID NO: 1285686 - DNA, 25 bp, Homo sapien
tcaccctcagccggagcagaagctg

SEQ ID NO: 1285687 - DNA, 25 bp, Homo sapien
accctcagccggagcagaagctgcc

SEQ ID NO: 1285688 - DNA, 25 bp, Homo sapien
cactaaaccacagtgcaccctcggc

SEQ ID NO: 1285689 - DNA, 25 bp, Homo sapien
gcagcgtggagactctgttgtggaa

SEQ ID NO: 1285690 - DNA, 25 bp, Homo sapien
tactcgagagtttctggtttgaaag

SEQ ID NO: 1285691 - DNA, 25 bp, Homo sapien
gtctactcgagagtttctggtttga

SEQ ID NO: 1285692 - DNA, 25 bp, Homo sapien
gaggcagcgtggagactctgttgtg

SEQ ID NO: 1285693 - DNA, 25 bp, Homo sapien
tgctggcacggatcgcagagggctt

SEQ ID NO: 1285694 - DNA, 25 bp, Homo sapien
gaaacaggcagaacacacaagtgtt

SEQ ID NO: 1285695 - DNA, 25 bp, Homo sapien
tcacgctacacatcgctggctgagc

SEQ ID NO: 1285696 - DNA, 25 bp, Homo sapien
cacaagtgtttgatggagtttgact

SEQ ID NO: 1285697 - DNA, 25 bp, Homo sapien
cactctcaggttcccggcgccctgg

SEQ ID NO: 1285698 - DNA, 25 bp, Homo sapien
gtgccactccgaagtgtctggctcc

SEQ ID NO: 1285699 - DNA, 25 bp, Homo sapien
tgggtgccactccgaagtgtctggc

SEQ ID NO: 1285700 - DNA, 25 bp, Homo sapien
gtgcagttgtgtggccagggcactc

SEQ ID NO: 1285701 - DNA, 25 bp, Homo sapien
tggtccacagtgtggtacttggccc

SEQ ID NO: 1285702 - DNA, 25 bp, Homo sapien
ggtccacagtgtggtacttggccca

SEQ ID NO: 1285703 - DNA, 25 bp, Homo sapien
atatgagccgcttgtttggtaggga

SEQ ID NO: 1285704 - DNA, 25 bp, Homo sapien
tgctgaatatgagccgcttgtttgg

SEQ ID NO: 1285705 - DNA, 25 bp, Homo sapien
cagggtaggttgcaccttcaggaag

SEQ ID NO: 1285706 - DNA, 25 bp, Homo sapien
acagtggtcagggtaggttgcacct

SEQ ID NO: 1285707 - DNA, 25 bp, Homo sapien
aagacagtggtcagggtaggttgca

SEQ ID NO: 1285708 - DNA, 25 bp, Homo sapien
tggtcagggtaggttgcaccttcag

SEQ ID NO: 1285709 - DNA, 25 bp, Homo sapien
agcaggtgtcctggagatgccactg

SEQ ID NO: 1285710 - DNA, 25 bp, Homo sapien
tgccactgtgcagggctcagagaag

SEQ ID NO: 1285711 - DNA, 25 bp, Homo sapien
aatagatggaggcagcaggtgtcct

SEQ ID NO: 1285712 - DNA, 25 bp, Homo sapien
tcctggagatgccactgtgcagggc

SEQ ID NO: 1285713 - DNA, 25 bp, Homo sapien
ccttcccaggctgcggtcttagagg

SEQ ID NO: 1285714 - DNA, 25 bp, Homo sapien
tggcagaggcaacatccaagcagct

SEQ ID NO: 1285715 - DNA, 25 bp, Homo sapien
caacaggtgctcgtttgagctccaa

SEQ ID NO: 1285716 - DNA, 25 bp, Homo sapien
ctcgttcctgtccaagccgagaggg

SEQ ID NO: 1285717 - DNA, 25 bp, Homo sapien
gaggtattggccttcttccaccatt

SEQ ID NO: 1285718 - DNA, 25 bp, Homo sapien
tgaggaggtattggccttcttccac

SEQ ID NO: 1285719 - DNA, 25 bp, Homo sapien
cttcagtgaggaggtattggccttc

SEQ ID NO: 1285720 - DNA, 25 bp, Homo sapien
agccttcagtgaggaggtattggcc

SEQ ID NO: 1285721 - DNA, 25 bp, Homo sapien
gctgggcctaatcaccgggtgatct

SEQ ID NO: 1285722 - DNA, 25 bp, Homo sapien
ccactggccagctgttatcggggat

SEQ ID NO: 1285723 - DNA, 25 bp, Homo sapien
cacagtgctttctcggctgggccta

SEQ ID NO: 1285724 - DNA, 25 bp, Homo sapien
taaaacatggccagctatcacgcca

SEQ ID NO: 1285725 - DNA, 25 bp, Homo sapien
gggctgacacatcgctggaatggac

SEQ ID NO: 1285726 - DNA, 25 bp, Homo sapien
atggcagattccatgccccactctt

SEQ ID NO: 1285727 - DNA, 25 bp, Homo sapien
cacatcgctggaatggaccatggca

SEQ ID NO: 1285728 - DNA, 25 bp, Homo sapien
aatggaccatggcagattccatgcc

SEQ ID NO: 1285729 - DNA, 25 bp, Homo sapien
agcaggagattatgtgaggctttgc

SEQ ID NO: 1285730 - DNA, 25 bp, Homo sapien
ggagattatgtgaggctttgctgaa

SEQ ID NO: 1285731 - DNA, 25 bp, Homo sapien
gactcccggagcaggagattatgtg

SEQ ID NO: 1285732 - DNA, 25 bp, Homo sapien
gaccagagaaggactcccggagcag

SEQ ID NO: 1285733 - DNA, 25 bp, Homo sapien
aacccctccattcaatgagacgtct

SEQ ID NO: 1285734 - DNA, 25 bp, Homo sapien
tcaatgagacgtctacagtctgcac

SEQ ID NO: 1285735 - DNA, 25 bp, Homo sapien
ccctccattcaatgagacgtctaca

SEQ ID NO: 1285736 - DNA, 25 bp, Homo sapien
tccattcaatgagacgtctacagtc

SEQ ID NO: 1285737 - DNA, 25 bp, Homo sapien
ctgggccttcagcaggacgaagtta

SEQ ID NO: 1285738 - DNA, 25 bp, Homo sapien
tgtgtgaatcaggtacaaatagcct

SEQ ID NO: 1285739 - DNA, 25 bp, Homo sapien
ggtacaaatagccttcgggtgacat

SEQ ID NO: 1285740 - DNA, 25 bp, Homo sapien
gacgaagttagatggtgtgtgaatc

SEQ ID NO: 1285741 - DNA, 25 bp, Homo sapien
ttcctctgttggatgcagttctgat

SEQ ID NO: 1285742 - DNA, 25 bp, Homo sapien
tttcctctgttggatgcagttctga

SEQ ID NO: 1285743 - DNA, 25 bp, Homo sapien
actccttcatccgcctgggacctgc

SEQ ID NO: 1285744 - DNA, 25 bp, Homo sapien
cttctggaggcaagactgggtgcct

SEQ ID NO: 1285745 - DNA, 25 bp, Homo sapien
agcctcatccaccacgtgtctttgt

SEQ ID NO: 1285746 - DNA, 25 bp, Homo sapien
tcatccaccacgtgtctttgttgcc

SEQ ID NO: 1285747 - DNA, 25 bp, Homo sapien
cttccctttgtgtgtcttcagcctc

SEQ ID NO: 1285748 - DNA, 25 bp, Homo sapien
aggggaggcattggcaggatctgac

SEQ ID NO: 1285749 - DNA, 25 bp, Homo sapien
tttgtgtgtcttcagcctcatttcc

SEQ ID NO: 1285750 - DNA, 25 bp, Homo sapien
gcaggatctgactctgctgccggct

SEQ ID NO: 1285751 - DNA, 25 bp, Homo sapien
tctgcatctggtgaagcagcctcca

SEQ ID NO: 1285752 - DNA, 25 bp, Homo sapien
cttctgcatctggtgaagcagcctc

SEQ ID NO: 1285753 - DNA, 25 bp, Homo sapien
ctgcatctggtgaagcagcctccat

SEQ ID NO: 1285754 - DNA, 25 bp, Homo sapien
ttctgcatctggtgaagcagcctcc

SEQ ID NO: 1285755 - DNA, 25 bp, Homo sapien
gatggtttttgtcaagcccaatatt

SEQ ID NO: 1285756 - DNA, 25 bp, Homo sapien
tggtttttgtcaagcccaatattgc

SEQ ID NO: 1285757 - DNA, 25 bp, Homo sapien
ggtttttgtcaagcccaatattgcc

SEQ ID NO: 1285758 - DNA, 25 bp, Homo sapien
ttttgtcaagcccaatattgcccat

SEQ ID NO: 1285759 - DNA, 25 bp, Homo sapien
tcatggctggagaagcacgcagagg

SEQ ID NO: 1285760 - DNA, 25 bp, Homo sapien
cactgaggatggtccgaggagagtg

SEQ ID NO: 1285761 - DNA, 25 bp, Homo sapien
cagaggatgagcgaagatgtggaga

SEQ ID NO: 1285762 - DNA, 25 bp, Homo sapien
ggacactgaggatggtccgaggaga

SEQ ID NO: 1285763 - DNA, 25 bp, Homo sapien
tgcaactgcacactgaatgccgtgg

SEQ ID NO: 1285764 - DNA, 25 bp, Homo sapien
catccagaggcaagctttactagag

SEQ ID NO: 1285765 - DNA, 25 bp, Homo sapien
tttactagagacctggcctcaaggg

SEQ ID NO: 1285766 - DNA, 25 bp, Homo sapien
gaatggaatgcattggccgcttccc

SEQ ID NO: 1285767 - DNA, 25 bp, Homo sapien
ctacgtgacacaggggccttcacag

SEQ ID NO: 1285768 - DNA, 25 bp, Homo sapien
cacagccacagtgtgcacctatgtc

SEQ ID NO: 1285769 - DNA, 25 bp, Homo sapien
gccttcacagccacagtgtgcacct

SEQ ID NO: 1285770 - DNA, 25 bp, Homo sapien
cttcacagccacagtgtgcacctat

SEQ ID NO: 1285771 - DNA, 25 bp, Homo sapien
cccagctgctgtaagtgcttttggg

SEQ ID NO: 1285772 - DNA, 25 bp, Homo sapien
tcccagctgctgtaagtgcttttgg

SEQ ID NO: 1285773 - DNA, 25 bp, Homo sapien
ttcccagctgctgtaagtgcttttg

SEQ ID NO: 1285774 - DNA, 25 bp, Homo sapien
attcccagctgctgtaagtgctttt

SEQ ID NO: 1285775 - DNA, 25 bp, Homo sapien
agttgaaacacatataggacaggcc

SEQ ID NO: 1285776 - DNA, 25 bp, Homo sapien
ctacaagttgaaacacatataggac

SEQ ID NO: 1285777 - DNA, 25 bp, Homo sapien
gttgaaacacatataggacaggccc

SEQ ID NO: 1285778 - DNA, 25 bp, Homo sapien
caagttgaaacacatataggacagg

SEQ ID NO: 1285779 - DNA, 25 bp, Homo sapien
tcttgatgatagctcccaggtatgt

SEQ ID NO: 1285780 - DNA, 25 bp, Homo sapien
tcttggacaagtgtgatgccctgag

SEQ ID NO: 1285781 - DNA, 25 bp, Homo sapien
gctttgcaaacagagggtcactggg

SEQ ID NO: 1285782 - DNA, 25 bp, Homo sapien
gagctgtaaacaaccgcatcacatg

SEQ ID NO: 1285783 - DNA, 25 bp, Homo sapien
ttgcaaatagctgctagcccgctgg

SEQ ID NO: 1285784 - DNA, 25 bp, Homo sapien
gtaataaaaccctcagtctcggcga

SEQ ID NO: 1285785 - DNA, 25 bp, Homo sapien
gccagacgcttgtcaggaacctagt

SEQ ID NO: 1285786 - DNA, 25 bp, Homo sapien
taagggctgccgcattttaggagga

SEQ ID NO: 1285787 - DNA, 25 bp, Homo sapien
tgctacataaactacagagcggagg

SEQ ID NO: 1285788 - DNA, 25 bp, Homo sapien
aactacagagcggaggcagttgcag

SEQ ID NO: 1285789 - DNA, 25 bp, Homo sapien
cataaactacagagcggaggcagtt

SEQ ID NO: 1285790 - DNA, 25 bp, Homo sapien
tctctattgctacataaactacaga

SEQ ID NO: 1285791 - DNA, 25 bp, Homo sapien
ccagagcctccagttggggctgtta

SEQ ID NO: 1285792 - DNA, 25 bp, Homo sapien
cagttggggctgttaattttatctt

SEQ ID NO: 1285793 - DNA, 25 bp, Homo sapien
ttccctgtctgcagcacccccagag

SEQ ID NO: 1285794 - DNA, 25 bp, Homo sapien
ctagaaggctgccttccctgtctgc

SEQ ID NO: 1285795 - DNA, 25 bp, Homo sapien
cccttccaacttgggcagggattgg

SEQ ID NO: 1285796 - DNA, 25 bp, Homo sapien
aatacgtattgagcaaatcctggtg

SEQ ID NO: 1285797 - DNA, 25 bp, Homo sapien
tcattcacttggaaaatacgtattg

SEQ ID NO: 1285798 - DNA, 25 bp, Homo sapien
ggtgggatctgtctcttcgggtctc

SEQ ID NO: 1285799 - DNA, 25 bp, Homo sapien
tattgcatggctggtcgacactagc

SEQ ID NO: 1285800 - DNA, 25 bp, Homo sapien
ggtggagttaattagcagaaggccc

SEQ ID NO: 1285801 - DNA, 25 bp, Homo sapien
ggagacagacgttgacccagaacag

SEQ ID NO: 1285802 - DNA, 25 bp, Homo sapien
ttccagggaacacgcactctagtgg

SEQ ID NO: 1285803 - DNA, 25 bp, Homo sapien
gactctattagagccagcaccctgg

SEQ ID NO: 1285804 - DNA, 25 bp, Homo sapien
ggcagggtatgtcttattgaactca

SEQ ID NO: 1285805 - DNA, 25 bp, Homo sapien
gagcggacctcatggaagagtattt

SEQ ID NO: 1285806 - DNA, 25 bp, Homo sapien
gctgctgcattgtctccgaagtgag

SEQ ID NO: 1285807 - DNA, 25 bp, Homo sapien
tgcgacacggcaataaaatattcag

SEQ ID NO: 1285808 - DNA, 25 bp, Homo sapien
aagcaggacatgaccccagattttc

SEQ ID NO: 1285809 - DNA, 25 bp, Homo sapien
ccaacgcaggctatcatgtgcagaa

SEQ ID NO: 1285810 - DNA, 25 bp, Homo sapien
ggtccagtctccctaaaatcaggaa

SEQ ID NO: 1285811 - DNA, 25 bp, Homo sapien
cagtgggacggattagatgacctca

SEQ ID NO: 1285812 - DNA, 25 bp, Homo sapien
tgccatgagccaaagagtcgtgagt

SEQ ID NO: 1285813 - DNA, 25 bp, Homo sapien
aacctgcagtgaacctgtgaggccg

SEQ ID NO: 1285814 - DNA, 25 bp, Homo sapien
gattttgaagatcaggccaacgagg

SEQ ID NO: 1285815 - DNA, 25 bp, Homo sapien
tggtcgccgtcttctccacagcatt

SEQ ID NO: 1285816 - DNA, 25 bp, Homo sapien
tggaagtcacatgctcctctggccc

SEQ ID NO: 1285817 - DNA, 25 bp, Homo sapien
gtccctgacaggtaactgtgaccca

SEQ ID NO: 1285818 - DNA, 25 bp, Homo sapien
gactggagacctttatccctcttgc

SEQ ID NO: 1285819 - DNA, 25 bp, Homo sapien
gatatttctaggcacttagcccaag

SEQ ID NO: 1285820 - DNA, 25 bp, Homo sapien
gacctatgtggtctgcctaaaaccc

SEQ ID NO: 1285821 - DNA, 25 bp, Homo sapien
tgaggttcccccaacgacctatgtg

SEQ ID NO: 1285822 - DNA, 25 bp, Homo sapien
gagagagagattattgcctccattt

SEQ ID NO: 1285823 - DNA, 25 bp, Homo sapien
agtgtccttgtcccgctccatcagg

SEQ ID NO: 1285824 - DNA, 25 bp, Homo sapien
atcaggcagtccctaatcaccctgg

SEQ ID NO: 1285825 - DNA, 25 bp, Homo sapien
cacctttccacttggttcctcctca

SEQ ID NO: 1285826 - DNA, 25 bp, Homo sapien
cccagccctgaagctattaatgcag

SEQ ID NO: 1285827 - DNA, 25 bp, Homo sapien
gctgtggcatttcccgacctttgtg

SEQ ID NO: 1285828 - DNA, 25 bp, Homo sapien
cagaactgctttttgcacagcggga

SEQ ID NO: 1285829 - DNA, 25 bp, Homo sapien
tgcagctcttgttcctatcagcaat

SEQ ID NO: 1285830 - DNA, 25 bp, Homo sapien
tccgagccgtcggtttagcctgcag

SEQ ID NO: 1285831 - DNA, 25 bp, Homo sapien
tggacagggacgagaccctgatggc

SEQ ID NO: 1285832 - DNA, 25 bp, Homo sapien
acgcccggatgattcacaggcccag

SEQ ID NO: 1285833 - DNA, 25 bp, Homo sapien
cacgcccggatgattcacaggccca

SEQ ID NO: 1285834 - DNA, 25 bp, Homo sapien
cccaggtggacagggacgagaccct

SEQ ID NO: 1285835 - DNA, 25 bp, Homo sapien
gaagagcaggttccacgtcctcctc

SEQ ID NO: 1285836 - DNA, 25 bp, Homo sapien
tggaagagcaggttccacgtcctcc

SEQ ID NO: 1285837 - DNA, 25 bp, Homo sapien
cctcctcgtccagacttggaacagt

SEQ ID NO: 1285838 - DNA, 25 bp, Homo sapien
tcctcctcgtccagacttggaacag

SEQ ID NO: 1285839 - DNA, 25 bp, Homo sapien
cagagaataaaatacgcagccttca

SEQ ID NO: 1285840 - DNA, 25 bp, Homo sapien
tgtcacgtggcgagagacagagcaa

SEQ ID NO: 1285841 - DNA, 25 bp, Homo sapien
caggacatccaagcatatcagcgat

SEQ ID NO: 1285842 - DNA, 25 bp, Homo sapien
cacagcacctccgaagacagagaat

SEQ ID NO: 1285843 - DNA, 25 bp, Homo sapien
caaagccctagttctttcctccctg

SEQ ID NO: 1285844 - DNA, 25 bp, Homo sapien
gcccttgtacccagtggactctgct

SEQ ID NO: 1285845 - DNA, 25 bp, Homo sapien
ctacgtgtagacctgtgcattgtgg

SEQ ID NO: 1285846 - DNA, 25 bp, Homo sapien
gccaagtccctcaactcagctctaa

SEQ ID NO: 1285847 - DNA, 25 bp, Homo sapien
cagtcggagctgtggagcttcagaa

SEQ ID NO: 1285848 - DNA, 25 bp, Homo sapien
ggttgagaattaagctgcagcggcc

SEQ ID NO: 1285849 - DNA, 25 bp, Homo sapien
tgcagcggccgattcttgtctcaga

SEQ ID NO: 1285850 - DNA, 25 bp, Homo sapien
gctgccctaagccagttcagaggag

SEQ ID NO: 1285851 - DNA, 25 bp, Homo sapien
tgaggactgctggtcaagtgttttg

SEQ ID NO: 1285852 - DNA, 25 bp, Homo sapien
tatgggtttcttgactgggcttacg

SEQ ID NO: 1285853 - DNA, 25 bp, Homo sapien
catatgatattaagagtgcatgcta

SEQ ID NO: 1285854 - DNA, 25 bp, Homo sapien
gagtgcatgctactaacacaactta

SEQ ID NO: 1285855 - DNA, 25 bp, Homo sapien
tcagtgctcaggagatattgtagcc

SEQ ID NO: 1285856 - DNA, 25 bp, Homo sapien
ttcctaggaataccagctgtccagt

SEQ ID NO: 1285857 - DNA, 25 bp, Homo sapien
caagggactagcatcctgcaggagt

SEQ ID NO: 1285858 - DNA, 25 bp, Homo sapien
gggatacaacggacctcttggcaca

SEQ ID NO: 1285859 - DNA, 25 bp, Homo sapien
gacttctagctatggtcagcgtgtt

SEQ ID NO: 1285860 - DNA, 25 bp, Homo sapien
tcagcgtgttgcttctccatgagct

SEQ ID NO: 1285861 - DNA, 25 bp, Homo sapien
acaggagcaggccacaacgttgccc

SEQ ID NO: 1285862 - DNA, 25 bp, Homo sapien
ctggcatcgatgccccatgcagagc

SEQ ID NO: 1285863 - DNA, 25 bp, Homo sapien
agctcttggcagtatttcttcttca

SEQ ID NO: 1285864 - DNA, 25 bp, Homo sapien
attgtcgttgaagtcctgaattccc

SEQ ID NO: 1285865 - DNA, 25 bp, Homo sapien
cagctcttggcagtatttcttcttc

SEQ ID NO: 1285866 - DNA, 25 bp, Homo sapien
ctcagctcttggcagtatttcttct

SEQ ID NO: 1285867 - DNA, 25 bp, Homo sapien
accttctgcatcttgagggcaagca

SEQ ID NO: 1285868 - DNA, 25 bp, Homo sapien
taggtgaggtctccctgtgccctga

SEQ ID NO: 1285869 - DNA, 25 bp, Homo sapien
gcatcttgagggcaagcagaaggcc

SEQ ID NO: 1285870 - DNA, 25 bp, Homo sapien
ctaggtgaggtctccctgtgccctg

SEQ ID NO: 1285871 - DNA, 25 bp, Homo sapien
ctgagagcaaagctggacgaattct

SEQ ID NO: 1285872 - DNA, 25 bp, Homo sapien
agctcctataatgtgccagtctcta

SEQ ID NO: 1285873 - DNA, 25 bp, Homo sapien
gcaaagctggacgaattctcatgag

SEQ ID NO: 1285874 - DNA, 25 bp, Homo sapien
gagctcctataatgtgccagtctct

SEQ ID NO: 1285875 - DNA, 25 bp, Homo sapien
gatgtatataggatgtcacgtggta

SEQ ID NO: 1285876 - DNA, 25 bp, Homo sapien
agggtccgtgcttctatgggaatct

SEQ ID NO: 1285877 - DNA, 25 bp, Homo sapien
aacctatatccctcactgacgcagt

SEQ ID NO: 1285878 - DNA, 25 bp, Homo sapien
gggctcaggccgtaatgctcgcccc

SEQ ID NO: 1285879 - DNA, 25 bp, Homo sapien
ttctcagtgcgagaaacagtgtcag

SEQ ID NO: 1285880 - DNA, 25 bp, Homo sapien
tctcagtgcgagaaacagtgtcagt

SEQ ID NO: 1285881 - DNA, 25 bp, Homo sapien
ctcagtgcgagaaacagtgtcagta

SEQ ID NO: 1285882 - DNA, 25 bp, Homo sapien
tgttctcagtgcgagaaacagtgtc

SEQ ID NO: 1285883 - DNA, 25 bp, Homo sapien
tgaactggagccaggtggaaggcac

SEQ ID NO: 1285884 - DNA, 25 bp, Homo sapien
gcttcctggtctgtgaactggagcc

SEQ ID NO: 1285885 - DNA, 25 bp, Homo sapien
actggagccaggtggaaggcaccat

SEQ ID NO: 1285886 - DNA, 25 bp, Homo sapien
tgccccgcttcctggtctgtgaact

SEQ ID NO: 1285887 - DNA, 25 bp, Homo sapien
gcggaatgtagattatagcctagga

SEQ ID NO: 1285888 - DNA, 25 bp, Homo sapien
gggataactcaagccccctggtgat

SEQ ID NO: 1285889 - DNA, 25 bp, Homo sapien
ccctgataatttttggcggaatgta

SEQ ID NO: 1285890 - DNA, 25 bp, Homo sapien
gtgataacagttgatgccagccaac

SEQ ID NO: 1285891 - DNA, 25 bp, Homo sapien
tgctggaaggaggattcaatgcagc

SEQ ID NO: 1285892 - DNA, 25 bp, Homo sapien
catcctgggatggtgctggaaggag

SEQ ID NO: 1285893 - DNA, 25 bp, Homo sapien
gtgctggaaggaggattcaatgcag

SEQ ID NO: 1285894 - DNA, 25 bp, Homo sapien
gccatcctgggatggtgctggaagg

SEQ ID NO: 1285895 - DNA, 25 bp, Homo sapien
tgtgactttgtcagttccaccatgt

SEQ ID NO: 1285896 - DNA, 25 bp, Homo sapien
atgtgactttgtcagttccaccatg

SEQ ID NO: 1285897 - DNA, 25 bp, Homo sapien
ctaacttgagaacttctctgagaca

SEQ ID NO: 1285898 - DNA, 25 bp, Homo sapien
taacttgagaacttctctgagacac

SEQ ID NO: 1285899 - DNA, 25 bp, Homo sapien
cgtccacgtttgtgggtagaattgg

SEQ ID NO: 1285900 - DNA, 25 bp, Homo sapien
tatcaacgctcccaaattggagcct

SEQ ID NO: 1285901 - DNA, 25 bp, Homo sapien
tccttatcaacgctcccaaattgga

SEQ ID NO: 1285902 - DNA, 25 bp, Homo sapien
gatgtaggaggtcggaattcgtcca

SEQ ID NO: 1285903 - DNA, 25 bp, Homo sapien
aaaattcagactgcttggtggtggg

SEQ ID NO: 1285904 - DNA, 25 bp, Homo sapien
aaattcagactgcttggtggtgggg

SEQ ID NO: 1285905 - DNA, 25 bp, Homo sapien
aaaaattcagactgcttggtggtgg

SEQ ID NO: 1285906 - DNA, 25 bp, Homo sapien
aattcagactgcttggtggtggggg

SEQ ID NO: 1285907 - DNA, 25 bp, Homo sapien
tgaatgattcctgggattggcacca

SEQ ID NO: 1285908 - DNA, 25 bp, Homo sapien
cctgaatgattcctgggattggcac

SEQ ID NO: 1285909 - DNA, 25 bp, Homo sapien
ctggtaccagatactttgcatgcat

SEQ ID NO: 1285910 - DNA, 25 bp, Homo sapien
ctgaatgattcctgggattggcacc

SEQ ID NO: 1285911 - DNA, 25 bp, Homo sapien
caatttcaggaaacacgaggtgcag

SEQ ID NO: 1285912 - DNA, 25 bp, Homo sapien
tttcaggaaacacgaggtgcagcat

SEQ ID NO: 1285913 - DNA, 25 bp, Homo sapien
atttcaggaaacacgaggtgcagca

SEQ ID NO: 1285914 - DNA, 25 bp, Homo sapien
aatttcaggaaacacgaggtgcagc

SEQ ID NO: 1285915 - DNA, 25 bp, Homo sapien
catacctgtgttcgaccccgatgtg

SEQ ID NO: 1285916 - DNA, 25 bp, Homo sapien
tgagtgaattcatatcttgaaggca

SEQ ID NO: 1285917 - DNA, 25 bp, Homo sapien
tgcagagactcttagccaggaagcc

SEQ ID NO: 1285918 - DNA, 25 bp, Homo sapien
gctctcataactagctcagaacggg

SEQ ID NO: 1285919 - DNA, 25 bp, Homo sapien
gctttatttatacattcgtcctcaa

SEQ ID NO: 1285920 - DNA, 25 bp, Homo sapien
ggccataaaatttctcgttttctgc

SEQ ID NO: 1285921 - DNA, 25 bp, Homo sapien
tagagtacgctccttatggccataa

SEQ ID NO: 1285922 - DNA, 25 bp, Homo sapien
tgccatcttcgccttgctttattta

SEQ ID NO: 1285923 - DNA, 25 bp, Homo sapien
caggtggagatcttgtttctaaggg

SEQ ID NO: 1285924 - DNA, 25 bp, Homo sapien
catctttcggagagtgggtctcttt

SEQ ID NO: 1285925 - DNA, 25 bp, Homo sapien
tatgtttccagtgatcctgcttgac

SEQ ID NO: 1285926 - DNA, 25 bp, Homo sapien
ttctcatcagcactccaggaccggc

SEQ ID NO: 1285927 - DNA, 25 bp, Homo sapien
gctaatgattagtctccagcaggag

SEQ ID NO: 1285928 - DNA, 25 bp, Homo sapien
ccacagggattcaagcagagttctc

SEQ ID NO: 1285929 - DNA, 25 bp, Homo sapien
gggagatggactttccacacatatc

SEQ ID NO: 1285930 - DNA, 25 bp, Homo sapien
caggagttgataccaagggctgaga

SEQ ID NO: 1285931 - DNA, 25 bp, Homo sapien
caagaacgaggctcaggacttaaac

SEQ ID NO: 1285932 - DNA, 25 bp, Homo sapien
ggcagattccgaactcaaacccagg

SEQ ID NO: 1285933 - DNA, 25 bp, Homo sapien
tttagaaataacaagaacgaggctc

SEQ ID NO: 1285934 - DNA, 25 bp, Homo sapien
aacatacccaggagttatggctggt

SEQ ID NO: 1285935 - DNA, 25 bp, Homo sapien
tgggtctgccacgagaatacagggc

SEQ ID NO: 1285936 - DNA, 25 bp, Homo sapien
taaggacagtaccatgctgctagca

SEQ ID NO: 1285937 - DNA, 25 bp, Homo sapien
gcttggcgcagaagaaagagctctg

SEQ ID NO: 1285938 - DNA, 25 bp, Homo sapien
ggacaccagcatgttaaagagacca

SEQ ID NO: 1285939 - DNA, 25 bp, Homo sapien
tacaccgtgcgctggttacagctga

SEQ ID NO: 1285940 - DNA, 25 bp, Homo sapien
cttgtgtgcaatctgactcccgcag

SEQ ID NO: 1285941 - DNA, 25 bp, Homo sapien
ttacagctgagcagttccctcggag

SEQ ID NO: 1285942 - DNA, 25 bp, Homo sapien
cagctgagctgtaaatgacttttcc

SEQ ID NO: 1285943 - DNA, 25 bp, Homo sapien
tgtaaggggttctgctgacctaagt

SEQ ID NO: 1285944 - DNA, 25 bp, Homo sapien
ctatccagggcaatgtaaggggttc

SEQ ID NO: 1285945 - DNA, 25 bp, Homo sapien
tatccagggcaatgtaaggggttct

SEQ ID NO: 1285946 - DNA, 25 bp, Homo sapien
atgtaaggggttctgctgacctaag

SEQ ID NO: 1285947 - DNA, 25 bp, Homo sapien
gtgtctggcaggtaacggaccacca

SEQ ID NO: 1285948 - DNA, 25 bp, Homo sapien
ggcagcatggcagtacttggcacac

SEQ ID NO: 1285949 - DNA, 25 bp, Homo sapien
ggtcttcagtaggaccacaggcagc

SEQ ID NO: 1285950 - DNA, 25 bp, Homo sapien
actgttgtcagggaccatggtcttc

SEQ ID NO: 1285951 - DNA, 25 bp, Homo sapien
cggccggagcggggatcgggtctgg

SEQ ID NO: 1285952 - DNA, 25 bp, Homo sapien
gcggccggagcggggatcgggtctg

SEQ ID NO: 1285953 - DNA, 25 bp, Homo sapien
actttggcctcgcagcaaaggtctt

SEQ ID NO: 1285954 - DNA, 25 bp, Homo sapien
ggcctcgcagcaaaggtcttgcttt

SEQ ID NO: 1285955 - DNA, 25 bp, Homo sapien
ggctccttctgcatggatccctcag

SEQ ID NO: 1285956 - DNA, 25 bp, Homo sapien
agctccctgcgtatctgtgtcctgg

SEQ ID NO: 1285957 - DNA, 25 bp, Homo sapien
agggagctgggcacaaaatgcatta

SEQ ID NO: 1285958 - DNA, 25 bp, Homo sapien
tggaggtagacagccagcttgtcac

SEQ ID NO: 1285959 - DNA, 25 bp, Homo sapien
cagccccctggaggtagacagccag

SEQ ID NO: 1285960 - DNA, 25 bp, Homo sapien
ctgcttctcatcaccagccccctgg

SEQ ID NO: 1285961 - DNA, 25 bp, Homo sapien
ccctggaggtagacagccagcttgt

SEQ ID NO: 1285962 - DNA, 25 bp, Homo sapien
catcttcagacttggcgatatcaag

SEQ ID NO: 1285963 - DNA, 25 bp, Homo sapien
tctcatcttcagacttggcgatatc

SEQ ID NO: 1285964 - DNA, 25 bp, Homo sapien
ttcagacttggcgatatcaagcctg

SEQ ID NO: 1285965 - DNA, 25 bp, Homo sapien
gacttggcgatatcaagcctgttct

SEQ ID NO: 1285966 - DNA, 25 bp, Homo sapien
gaaggatcttcatcaacgtgggtga

SEQ ID NO: 1285967 - DNA, 25 bp, Homo sapien
catgggacgctgaaggtagactgga

SEQ ID NO: 1285968 - DNA, 25 bp, Homo sapien
gtgcaggaagcagaaggatcttcat

SEQ ID NO: 1285969 - DNA, 25 bp, Homo sapien
tagactggaaatcagggaaatgaaa

SEQ ID NO: 1285970 - DNA, 25 bp, Homo sapien
ggctgcaagttcatcagactctgtc

SEQ ID NO: 1285971 - DNA, 25 bp, Homo sapien
cagaccccttgcagatgtgacctga

SEQ ID NO: 1285972 - DNA, 25 bp, Homo sapien
catttgtgatgttggcccctgagga

SEQ ID NO: 1285973 - DNA, 25 bp, Homo sapien
tctggcaaggtccattcacatggtg

SEQ ID NO: 1285974 - DNA, 25 bp, Homo sapien
tgaaataattcaaccagcccagaca

SEQ ID NO: 1285975 - DNA, 25 bp, Homo sapien
aacgctctatgccaactcctgagag

SEQ ID NO: 1285976 - DNA, 25 bp, Homo sapien
cctggagggcttccaacgctctatg

SEQ ID NO: 1285977 - DNA, 25 bp, Homo sapien
cctgagagtccgagaacactgaaat

SEQ ID NO: 1285978 - DNA, 25 bp, Homo sapien
gccttttcacagctggtgccgaggg

SEQ ID NO: 1285979 - DNA, 25 bp, Homo sapien
ctgtctgctcaaccaccaggaattc

SEQ ID NO: 1285980 - DNA, 25 bp, Homo sapien
tggagggcttgcacgaactcagagt

SEQ ID NO: 1285981 - DNA, 25 bp, Homo sapien
gcacgaactcagagtccttcatggg

SEQ ID NO: 1285982 - DNA, 25 bp, Homo sapien
gcagttgatctggttctttccggaa

SEQ ID NO: 1285983 - DNA, 25 bp, Homo sapien
cagcacgccctttttgagttgggta

SEQ ID NO: 1285984 - DNA, 25 bp, Homo sapien
tgtcttatgaagtgtcctctccaag

SEQ ID NO: 1285985 - DNA, 25 bp, Homo sapien
tccatcttcagcagagtagcagttg

SEQ ID NO: 1285986 - DNA, 25 bp, Homo sapien
gcagctggatgtgcttctggtccca

SEQ ID NO: 1285987 - DNA, 25 bp, Homo sapien
tcaggtggggatttctggcagcagc

SEQ ID NO: 1285988 - DNA, 25 bp, Homo sapien
agctggatgtgcttctggtcccaac

SEQ ID NO: 1285989 - DNA, 25 bp, Homo sapien
gtggggatttctggcagcagctgga

SEQ ID NO: 1285990 - DNA, 25 bp, Homo sapien
cagccatttacacgcagcatagggc

SEQ ID NO: 1285991 - DNA, 25 bp, Homo sapien
acaggccagccatttacacgcagca

SEQ ID NO: 1285992 - DNA, 25 bp, Homo sapien
cagcatagggcattcacagtcatac

SEQ ID NO: 1285993 - DNA, 25 bp, Homo sapien
tacacgcagcatagggcattcacag

SEQ ID NO: 1285994 - DNA, 25 bp, Homo sapien
cctgcacattagctgaaaattggaa

SEQ ID NO: 1285995 - DNA, 25 bp, Homo sapien
tctgccattatgtccgaccagggcc

SEQ ID NO: 1285996 - DNA, 25 bp, Homo sapien
gagcctctgtcacgacctgcacatt

SEQ ID NO: 1285997 - DNA, 25 bp, Homo sapien
ctcggaaaccgagaggcacaaggga

SEQ ID NO: 1285998 - DNA, 25 bp, Homo sapien
tgaatccaggaaggtggttgatggg

SEQ ID NO: 1285999 - DNA, 25 bp, Homo sapien
gggagtggcgggacctggagctgat

SEQ ID NO: 1286000 - DNA, 25 bp, Homo sapien
tggagctgatatttctctcccagca

SEQ ID NO: 1286001 - DNA, 25 bp, Homo sapien
tgggctgcacttgaatccaggaagg

SEQ ID NO: 1286002 - DNA, 25 bp, Homo sapien
tggcggcagccttgtacatccagac

SEQ ID NO: 1286003 - DNA, 25 bp, Homo sapien
catccagacgggcagtggttccttg

SEQ ID NO: 1286004 - DNA, 25 bp, Homo sapien
ccttgtacatccagacgggcagtgg

SEQ ID NO: 1286005 - DNA, 25 bp, Homo sapien
gtggttccttgggaacctcgcagaa

SEQ ID NO: 1286006 - DNA, 25 bp, Homo sapien
gcttcctgaaaataccctgacctca

SEQ ID NO: 1286007 - DNA, 25 bp, Homo sapien
ctgaccgcctcttgtaattggggcc

SEQ ID NO: 1286008 - DNA, 25 bp, Homo sapien
gaagccgcttcctgaaaataccctg

SEQ ID NO: 1286009 - DNA, 25 bp, Homo sapien
tgaccgcctcttgtaattggggccc

SEQ ID NO: 1286010 - DNA, 25 bp, Homo sapien
cagtgtgtgagttcccagagacagg

SEQ ID NO: 1286011 - DNA, 25 bp, Homo sapien
gagttcccagagacaggggtggcat

SEQ ID NO: 1286012 - DNA, 25 bp, Homo sapien
gtgagttcccagagacaggggtggc

SEQ ID NO: 1286013 - DNA, 25 bp, Homo sapien
tgtgtgagttcccagagacaggggt

SEQ ID NO: 1286014 - DNA, 25 bp, Homo sapien
cacacactgggtgagttaacagtcg

SEQ ID NO: 1286015 - DNA, 25 bp, Homo sapien
acacagccaaatagtcgcccagagg

SEQ ID NO: 1286016 - DNA, 25 bp, Homo sapien
cactctggatagacgggaacagcct

SEQ ID NO: 1286017 - DNA, 25 bp, Homo sapien
agaccccgtgccgtagaggtgacac

SEQ ID NO: 1286018 - DNA, 25 bp, Homo sapien
gaagctgaaacccaccactgagagc

SEQ ID NO: 1286019 - DNA, 25 bp, Homo sapien
cagctctttgcccatgtaggcgaag

SEQ ID NO: 1286020 - DNA, 25 bp, Homo sapien
caccccgctgtaggcagacatgaag

SEQ ID NO: 1286021 - DNA, 25 bp, Homo sapien
tagtccctcctcatggtgtagccct

SEQ ID NO: 1286022 - DNA, 25 bp, Homo sapien
acagcaggctgttgcggtagttggg

SEQ ID NO: 1286023 - DNA, 25 bp, Homo sapien
tggggttacaggagacaattgtgat

SEQ ID NO: 1286024 - DNA, 25 bp, Homo sapien
agttggggttacaggagacaattgt

SEQ ID NO: 1286025 - DNA, 25 bp, Homo sapien
tgttgaacagcaggctgttgcggta

SEQ ID NO: 1286026 - DNA, 25 bp, Homo sapien
tcatcggggtcagtacgggtggtgg

SEQ ID NO: 1286027 - DNA, 25 bp, Homo sapien
ggtcagtacgggtggtgggactgag

SEQ ID NO: 1286028 - DNA, 25 bp, Homo sapien
tgaggcccgtggccagcatgccaat

SEQ ID NO: 1286029 - DNA, 25 bp, Homo sapien
gtggtgggactgaggcccgtggcca

SEQ ID NO: 1286030 - DNA, 25 bp, Homo sapien
ttttgagtaccgtgataaatgccat

SEQ ID NO: 1286031 - DNA, 25 bp, Homo sapien
tgaccattttgagtaccgtgataaa

SEQ ID NO: 1286032 - DNA, 25 bp, Homo sapien
gtaccgtgataaatgccatagagac

SEQ ID NO: 1286033 - DNA, 25 bp, Homo sapien
acaatgaccattttgagtaccgtga

SEQ ID NO: 1286034 - DNA, 25 bp, Homo sapien
cctggtagcggacccagtagctgta

SEQ ID NO: 1286035 - DNA, 25 bp, Homo sapien
cccagtagctgtaggcgcgtgggaa

SEQ ID NO: 1286036 - DNA, 25 bp, Homo sapien
ccagtagctgtaggcgcgtgggaag

SEQ ID NO: 1286037 - DNA, 25 bp, Homo sapien
ccctggtagcggacccagtagctgt

SEQ ID NO: 1286038 - DNA, 25 bp, Homo sapien
cttgaaggcgcagacgatctggaaa

SEQ ID NO: 1286039 - DNA, 25 bp, Homo sapien
cacggcgatacaggagatgcagatt

SEQ ID NO: 1286040 - DNA, 25 bp, Homo sapien
ggaaagaacgcacggcgatacagga

SEQ ID NO: 1286041 - DNA, 25 bp, Homo sapien
gcagacgatctggaaagaacgcacg

SEQ ID NO: 1286042 - DNA, 25 bp, Homo sapien
ggaggtctcactctggtaggaccac

SEQ ID NO: 1286043 - DNA, 25 bp, Homo sapien
accactcgttattcgggcaggcctg

SEQ ID NO: 1286044 - DNA, 25 bp, Homo sapien
actatgggtgtctggaagtgcctcc

SEQ ID NO: 1286045 - DNA, 25 bp, Homo sapien
gcctccagaatatcaccaggatggc

SEQ ID NO: 1286046 - DNA, 25 bp, Homo sapien
agcgactcccattagccaagcccat

SEQ ID NO: 1286047 - DNA, 25 bp, Homo sapien
cacagcgactcccattagccaagcc

SEQ ID NO: 1286048 - DNA, 25 bp, Homo sapien
gcgactcccattagccaagcccatc

SEQ ID NO: 1286049 - DNA, 25 bp, Homo sapien
aaaagccacagcgactcccattagc

SEQ ID NO: 1286050 - DNA, 25 bp, Homo sapien
aggcagtcgatgcactcgaagcagc

SEQ ID NO: 1286051 - DNA, 25 bp, Homo sapien
tcgaagcagcagacgtggatgccca

SEQ ID NO: 1286052 - DNA, 25 bp, Homo sapien
tgccgggaaggcagtcgatgcactc

SEQ ID NO: 1286053 - DNA, 25 bp, Homo sapien
cgggaaggcagtcgatgcactcgaa

SEQ ID NO: 1286054 - DNA, 25 bp, Homo sapien
ttgatggtgtgccaggagatgtctt

SEQ ID NO: 1286055 - DNA, 25 bp, Homo sapien
gccacgtccccttgcgggtcgaaga

SEQ ID NO: 1286056 - DNA, 25 bp, Homo sapien
tggctccggtcccattgccactgga

SEQ ID NO: 1286057 - DNA, 25 bp, Homo sapien
atgttcttcagctgtcgctgcaggg

SEQ ID NO: 1286058 - DNA, 25 bp, Homo sapien
cgccacctgccttacaatgtacgaa

SEQ ID NO: 1286059 - DNA, 25 bp, Homo sapien
tgccttacaatgtacgaacaggtgg

SEQ ID NO: 1286060 - DNA, 25 bp, Homo sapien
tgggccatatccgagatgcccgagg

SEQ ID NO: 1286061 - DNA, 25 bp, Homo sapien
tgtacgaacaggtgggccatatccg

SEQ ID NO: 1286062 - DNA, 25 bp, Homo sapien
catagaccgcagagtacacgctgta

SEQ ID NO: 1286063 - DNA, 25 bp, Homo sapien
caggtgcttttgtcacagccgagga

SEQ ID NO: 1286064 - DNA, 25 bp, Homo sapien
gaagttctggcgcagcacctcattg

SEQ ID NO: 1286065 - DNA, 25 bp, Homo sapien
gacgtcatgttctggttgggctgca

SEQ ID NO: 1286066 - DNA, 25 bp, Homo sapien
catcaccacacaggatagtggttct

SEQ ID NO: 1286067 - DNA, 25 bp, Homo sapien
gatagtggttcttacaacgaaaatg

SEQ ID NO: 1286068 - DNA, 25 bp, Homo sapien
attaaccatcaccacacaggatagt

SEQ ID NO: 1286069 - DNA, 25 bp, Homo sapien
aaaattaaccatcaccacacaggat

SEQ ID NO: 1286070 - DNA, 25 bp, Homo sapien
catgtggaagtgttaactcattcaa

SEQ ID NO: 1286071 - DNA, 25 bp, Homo sapien
tgaatcatcatgtgtctggcactat

SEQ ID NO: 1286072 - DNA, 25 bp, Homo sapien
ggcggttaccccatcttatggatga

SEQ ID NO: 1286073 - DNA, 25 bp, Homo sapien
tttgtggcaatcatctggctggcgg

SEQ ID NO: 1286074 - DNA, 25 bp, Homo sapien
ccagacttaaaagatgttggctgcc

SEQ ID NO: 1286075 - DNA, 25 bp, Homo sapien
tggcaatgacaccagacttaaaaga

SEQ ID NO: 1286076 - DNA, 25 bp, Homo sapien
acacattggcaatgacaccagactt

SEQ ID NO: 1286077 - DNA, 25 bp, Homo sapien
agacttaaaagatgttggctgcccc

SEQ ID NO: 1286078 - DNA, 25 bp, Homo sapien
attttattgggtggcatctgagcaa

SEQ ID NO: 1286079 - DNA, 25 bp, Homo sapien
gcattttattgggtggcatctgagc

SEQ ID NO: 1286080 - DNA, 25 bp, Homo sapien
cattttattgggtggcatctgagca

SEQ ID NO: 1286081 - DNA, 25 bp, Homo sapien
aggcattttattgggtggcatctga

SEQ ID NO: 1286082 - DNA, 25 bp, Homo sapien
gaaagtcatgctttacagatctctg

SEQ ID NO: 1286083 - DNA, 25 bp, Homo sapien
cagtcccctaagaaccatccttgaa

SEQ ID NO: 1286084 - DNA, 25 bp, Homo sapien
tgacacatatcctggaaggacacag

SEQ ID NO: 1286085 - DNA, 25 bp, Homo sapien
ggaggaagacccaacactttcacag

SEQ ID NO: 1286086 - DNA, 25 bp, Homo sapien
cctgaggatcaaagggaaggctgac

SEQ ID NO: 1286087 - DNA, 25 bp, Homo sapien
tgacataggacgaaggcccatccaa

SEQ ID NO: 1286088 - DNA, 25 bp, Homo sapien
cagaccctgagactggctctaggag

SEQ ID NO: 1286089 - DNA, 25 bp, Homo sapien
ggattctacaggcaacgtcctcggc

SEQ ID NO: 1286090 - DNA, 25 bp, Homo sapien
ctctgtgagtggtgaggtttgccaa

SEQ ID NO: 1286091 - DNA, 25 bp, Homo sapien
ttccccaaaggatcccaagagctgc

SEQ ID NO: 1286092 - DNA, 25 bp, Homo sapien
ggccaggagcctctgtgagtggtga

SEQ ID NO: 1286093 - DNA, 25 bp, Homo sapien
tgaggtttgccaaggggcccagaat

SEQ ID NO: 1286094 - DNA, 25 bp, Homo sapien
gataaggggtagtggccatgttcct

SEQ ID NO: 1286095 - DNA, 25 bp, Homo sapien
gtagtggccatgttcctccccagca

SEQ ID NO: 1286096 - DNA, 25 bp, Homo sapien
tcccacatggccgatgggataaggg

SEQ ID NO: 1286097 - DNA, 25 bp, Homo sapien
tccccagcacgatctcaaaccagag

SEQ ID NO: 1286098 - DNA, 25 bp, Homo sapien
gagtcaagcccggattatagaaagg

SEQ ID NO: 1286099 - DNA, 25 bp, Homo sapien
cagtggtaagaagggagtcaagccc

SEQ ID NO: 1286100 - DNA, 25 bp, Homo sapien
taagaagggagtcaagcccggatta

SEQ ID NO: 1286101 - DNA, 25 bp, Homo sapien
atacagtggtaagaagggagtcaag

SEQ ID NO: 1286102 - DNA, 25 bp, Homo sapien
agctggacggtggagcccgagaggg

SEQ ID NO: 1286103 - DNA, 25 bp, Homo sapien
tgcatgtacgcgtagctccagtccc

SEQ ID NO: 1286104 - DNA, 25 bp, Homo sapien
atgacctgcggcgacgtccagcgca

SEQ ID NO: 1286105 - DNA, 25 bp, Homo sapien
ctccttgatgacctgcggcgacgtc

SEQ ID NO: 1286106 - DNA, 25 bp, Homo sapien
cagcgcaggatgtagtgtgggcccc

SEQ ID NO: 1286107 - DNA, 25 bp, Homo sapien
cgacgtccagcgcaggatgtagtgt

SEQ ID NO: 1286108 - DNA, 25 bp, Homo sapien
tgcggaaaagacacttctgtttttc

SEQ ID NO: 1286109 - DNA, 25 bp, Homo sapien
ctgcggaaaagacacttctgttttt

SEQ ID NO: 1286110 - DNA, 25 bp, Homo sapien
acctttgtggcctcctgcacgacgt

SEQ ID NO: 1286111 - DNA, 25 bp, Homo sapien
cagtggacttgtcgttgatgtagaa

SEQ ID NO: 1286112 - DNA, 25 bp, Homo sapien
gcagcattcctcagcacctttgtgg

SEQ ID NO: 1286113 - DNA, 25 bp, Homo sapien
tgatgtagaagttgccggcagcatt

SEQ ID NO: 1286114 - DNA, 25 bp, Homo sapien
tacagggctactgcgaagttgaagg

SEQ ID NO: 1286115 - DNA, 25 bp, Homo sapien
gcaaccagtgccacggaggaaagaa

SEQ ID NO: 1286116 - DNA, 25 bp, Homo sapien
tcaggagcagcggaaactccagctc

SEQ ID NO: 1286117 - DNA, 25 bp, Homo sapien
tgctttgtagcatgggacaatcacc

SEQ ID NO: 1286118 - DNA, 25 bp, Homo sapien
gtcgaagacaccaattcctagccct

SEQ ID NO: 1286119 - DNA, 25 bp, Homo sapien
agatcccgcagagccagtcgaagac

SEQ ID NO: 1286120 - DNA, 25 bp, Homo sapien
gaggttcagatccactggtccccag

SEQ ID NO: 1286121 - DNA, 25 bp, Homo sapien
caccagtaccggcaacaaagagcct

SEQ ID NO: 1286122 - DNA, 25 bp, Homo sapien
tactgggaaccacgtccaggaggtg

SEQ ID NO: 1286123 - DNA, 25 bp, Homo sapien
ggcagcattattactgggaaccacg

SEQ ID NO: 1286124 - DNA, 25 bp, Homo sapien
tattactgggaaccacgtccaggag

SEQ ID NO: 1286125 - DNA, 25 bp, Homo sapien
cattattactgggaaccacgtccag

SEQ ID NO: 1286126 - DNA, 25 bp, Homo sapien
tgaggccatagctggtggtgctgtc

SEQ ID NO: 1286127 - DNA, 25 bp, Homo sapien
tcatccgggtagacgtacacagaca

SEQ ID NO: 1286128 - DNA, 25 bp, Homo sapien
agcgtctccttgtacttgtcatccg

SEQ ID NO: 1286129 - DNA, 25 bp, Homo sapien
cacagacagtacaggcccgaagatc

SEQ ID NO: 1286130 - DNA, 25 bp, Homo sapien
gggtgaggagcgtgcgtgctccagc

SEQ ID NO: 1286131 - DNA, 25 bp, Homo sapien
agcgtgcgtgctccagccacttctt

SEQ ID NO: 1286132 - DNA, 25 bp, Homo sapien
acggagtcatcacacttgcccccgg

SEQ ID NO: 1286133 - DNA, 25 bp, Homo sapien
tctccacgatgcagggctccacaaa

SEQ ID NO: 1286134 - DNA, 25 bp, Homo sapien
cttggcatcaatcactgcagagaag

SEQ ID NO: 1286135 - DNA, 25 bp, Homo sapien
gaagaaggtcccaaaatcctctgca

SEQ ID NO: 1286136 - DNA, 25 bp, Homo sapien
agaaggtcccaaaatcctctgcagg

SEQ ID NO: 1286137 - DNA, 25 bp, Homo sapien
ttggcatcaatcactgcagagaaga

SEQ ID NO: 1286138 - DNA, 25 bp, Homo sapien
gcggcgggggtgacggtgccactca

SEQ ID NO: 1286139 - DNA, 25 bp, Homo sapien
cgcggcgggggtgacggtgccactc

SEQ ID NO: 1286140 - DNA, 25 bp, Homo sapien
ccgcggcgggggtgacggtgccact

SEQ ID NO: 1286141 - DNA, 25 bp, Homo sapien
cggcgggggtgacggtgccactcac

SEQ ID NO: 1286142 - DNA, 25 bp, Homo sapien
acgtagagacgcgagcacgcggaac

SEQ ID NO: 1286143 - DNA, 25 bp, Homo sapien
tggccaccgtactcgaaggctgagc

SEQ ID NO: 1286144 - DNA, 25 bp, Homo sapien
actttgatccgactgtgctcctcca

SEQ ID NO: 1286145 - DNA, 25 bp, Homo sapien
gaagtggaagttctttccgccgcac

SEQ ID NO: 1286146 - DNA, 25 bp, Homo sapien
aaaacaccacctacgccatccatgg

SEQ ID NO: 1286147 - DNA, 25 bp, Homo sapien
ggggtggggaaatgaccagaggagc

SEQ ID NO: 1286148 - DNA, 25 bp, Homo sapien
aacacgagcacggagcagcccagag

SEQ ID NO: 1286149 - DNA, 25 bp, Homo sapien
atccatggcccgggaccaacacgag

SEQ ID NO: 1286150 - DNA, 25 bp, Homo sapien
cattggagcctaccctatgtcggct

SEQ ID NO: 1286151 - DNA, 25 bp, Homo sapien
cattcccagaagtgggcacagcttt

SEQ ID NO: 1286152 - DNA, 25 bp, Homo sapien
cctcgtccacgagggacattggagc

SEQ ID NO: 1286153 - DNA, 25 bp, Homo sapien
gcagaggacagatgagaacccaagg

SEQ ID NO: 1286154 - DNA, 25 bp, Homo sapien
gtctcagcccgtcttctcctaccag

SEQ ID NO: 1286155 - DNA, 25 bp, Homo sapien
gggagcttcagacaggtcacttcac

SEQ ID NO: 1286156 - DNA, 25 bp, Homo sapien
aaggtccagccctgcctacgtctca

SEQ ID NO: 1286157 - DNA, 25 bp, Homo sapien
ggagcttcagacaggtcacttcact

SEQ ID NO: 1286158 - DNA, 25 bp, Homo sapien
ctccgcttacagctgcaatgcccga

SEQ ID NO: 1286159 - DNA, 25 bp, Homo sapien
gccacgactggctactaagatttaa

SEQ ID NO: 1286160 - DNA, 25 bp, Homo sapien
tacagctgcaatgcccgacacggca

SEQ ID NO: 1286161 - DNA, 25 bp, Homo sapien
agtcgcacaggccacccttcaaggg

SEQ ID NO: 1286162 - DNA, 25 bp, Homo sapien
gctggtgcctgaaatggttcatcca

SEQ ID NO: 1286163 - DNA, 25 bp, Homo sapien
ctctttcataatggccaggggaggg

SEQ ID NO: 1286164 - DNA, 25 bp, Homo sapien
gaggaggaggtgaggcaggccttac

SEQ ID NO: 1286165 - DNA, 25 bp, Homo sapien
ctggggccacacgggaggaggaggt

SEQ ID NO: 1286166 - DNA, 25 bp, Homo sapien
ggggccacacgggaggaggaggtga

SEQ ID NO: 1286167 - DNA, 25 bp, Homo sapien
gggaggaggaggtgaggcaggcctt

SEQ ID NO: 1286168 - DNA, 25 bp, Homo sapien
aggtgtggaaccggtccaggttctg

SEQ ID NO: 1286169 - DNA, 25 bp, Homo sapien
gccaggcgtgggaaggtgtggaacc

SEQ ID NO: 1286170 - DNA, 25 bp, Homo sapien
ccaggcgtgggaaggtgtggaaccg

SEQ ID NO: 1286171 - DNA, 25 bp, Homo sapien
caggcgtgggaaggtgtggaaccgg

SEQ ID NO: 1286172 - DNA, 25 bp, Homo sapien
cagcctcccgaaggatgcggtagac

SEQ ID NO: 1286173 - DNA, 25 bp, Homo sapien
tgaagttgatgccacagaggtgctc

SEQ ID NO: 1286174 - DNA, 25 bp, Homo sapien
gtagacagcatagctggccagcatg

SEQ ID NO: 1286175 - DNA, 25 bp, Homo sapien
gacagtgtccccaaataggggccca

SEQ ID NO: 1286176 - DNA, 25 bp, Homo sapien
ggcagagtcacaactccctctcgaa

SEQ ID NO: 1286177 - DNA, 25 bp, Homo sapien
tcatttatttactagtcactcagtc

SEQ ID NO: 1286178 - DNA, 25 bp, Homo sapien
ggcaaagaggcagagtcacaactcc

SEQ ID NO: 1286179 - DNA, 25 bp, Homo sapien
cagtcttgccaagtaagtcacggct

SEQ ID NO: 1286180 - DNA, 25 bp, Homo sapien
gccaggttgccgccgattgcagtga

SEQ ID NO: 1286181 - DNA, 25 bp, Homo sapien
gaagttaaagggcgagatggccgcc

SEQ ID NO: 1286182 - DNA, 25 bp, Homo sapien
gttgccgccgattgcagtgaagtta

SEQ ID NO: 1286183 - DNA, 25 bp, Homo sapien
ccccgccaggttgccgccgattgca

SEQ ID NO: 1286184 - DNA, 25 bp, Homo sapien
gctgcagcgtcaatctccgcttgga

SEQ ID NO: 1286185 - DNA, 25 bp, Homo sapien
cagctccaccgcatacttggcattg

SEQ ID NO: 1286186 - DNA, 25 bp, Homo sapien
gaagtcgatgagttccgctgcagcg

SEQ ID NO: 1286187 - DNA, 25 bp, Homo sapien
cttggcattgaaccggaagaagtcg

SEQ ID NO: 1286188 - DNA, 25 bp, Homo sapien
tgtgcccaaagcgagcactgagccg

SEQ ID NO: 1286189 - DNA, 25 bp, Homo sapien
catctgacgctgtgcccaaagcgag

SEQ ID NO: 1286190 - DNA, 25 bp, Homo sapien
tgacgctgtgcccaaagcgagcact

SEQ ID NO: 1286191 - DNA, 25 bp, Homo sapien
acatttggagggctcaccaggtccc

SEQ ID NO: 1286192 - DNA, 25 bp, Homo sapien
agagctgacgcccaccccagagggc

SEQ ID NO: 1286193 - DNA, 25 bp, Homo sapien
gcagggagacagtgcaggccaccac

SEQ ID NO: 1286194 - DNA, 25 bp, Homo sapien
caagctaggaggcagggagacagtg

SEQ ID NO: 1286195 - DNA, 25 bp, Homo sapien
ggaggcagggagacagtgcaggcca

SEQ ID NO: 1286196 - DNA, 25 bp, Homo sapien
aggcagggagacagtgcaggccacc

SEQ ID NO: 1286197 - DNA, 25 bp, Homo sapien
agtccaggcaaagcatgacaaaggc

SEQ ID NO: 1286198 - DNA, 25 bp, Homo sapien
cagtccaggcaaagcatgacaaagg

SEQ ID NO: 1286199 - DNA, 25 bp, Homo sapien
ctgtcccaccatggtcttggcgagg

SEQ ID NO: 1286200 - DNA, 25 bp, Homo sapien
tcccaccatggtcttggcgaggatc

SEQ ID NO: 1286201 - DNA, 25 bp, Homo sapien
tgtcccaccatggtcttggcgagga

SEQ ID NO: 1286202 - DNA, 25 bp, Homo sapien
ccaccatggtcttggcgaggatctc

SEQ ID NO: 1286203 - DNA, 25 bp, Homo sapien
ggtcccactctttccgggcagccag

SEQ ID NO: 1286204 - DNA, 25 bp, Homo sapien
ctgcaataggcttcaggtcccactc

SEQ ID NO: 1286205 - DNA, 25 bp, Homo sapien
aagatctgggcccggtctgcaatag

SEQ ID NO: 1286206 - DNA, 25 bp, Homo sapien
tctgggcccggtctgcaataggctt

SEQ ID NO: 1286207 - DNA, 25 bp, Homo sapien
tgcataacagaacttggccacctta

SEQ ID NO: 1286208 - DNA, 25 bp, Homo sapien
gccaccttatgtccatggttaaaag

SEQ ID NO: 1286209 - DNA, 25 bp, Homo sapien
cttgtctgcataacagaacttggcc

SEQ ID NO: 1286210 - DNA, 25 bp, Homo sapien
gaacttggccaccttatgtccatgg

SEQ ID NO: 1286211 - DNA, 25 bp, Homo sapien
cgacacttggtactgcacgtccgac

SEQ ID NO: 1286212 - DNA, 25 bp, Homo sapien
ggatggcttccatccggcccttcag

SEQ ID NO: 1286213 - DNA, 25 bp, Homo sapien
tggtactgcacgtccgacgtccaca

SEQ ID NO: 1286214 - DNA, 25 bp, Homo sapien
atgggatggcttccatccggccctt

SEQ ID NO: 1286215 - DNA, 25 bp, Homo sapien
cctgcgtgaaggctaagacgggctc

SEQ ID NO: 1286216 - DNA, 25 bp, Homo sapien
ggctgccctgcgtgaaggctaagac

SEQ ID NO: 1286217 - DNA, 25 bp, Homo sapien
gacgggctcgttggccaccttcagg

SEQ ID NO: 1286218 - DNA, 25 bp, Homo sapien
tttgcagggcatctcgctcagggct

SEQ ID NO: 1286219 - DNA, 25 bp, Homo sapien
ctgggatctgatccacgaaggccat

SEQ ID NO: 1286220 - DNA, 25 bp, Homo sapien
ctgatccacgaaggccatgtaccgt

SEQ ID NO: 1286221 - DNA, 25 bp, Homo sapien
gggatctgatccacgaaggccatgt

SEQ ID NO: 1286222 - DNA, 25 bp, Homo sapien
gatctgatccacgaaggccatgtac

SEQ ID NO: 1286223 - DNA, 25 bp, Homo sapien
cagaaatctatagagggaaaaactg

SEQ ID NO: 1286224 - DNA, 25 bp, Homo sapien
cacaccgcaaccaaagttaacatga

SEQ ID NO: 1286225 - DNA, 25 bp, Homo sapien
cagtgagaaactactcagtggcttc

SEQ ID NO: 1286226 - DNA, 25 bp, Homo sapien
ctcgtccgaggtactagtcacttca

SEQ ID NO: 1286227 - DNA, 25 bp, Homo sapien
gacactcgaccgtagaatgatctgt

SEQ ID NO: 1286228 - DNA, 25 bp, Homo sapien
tagaatgatctgtttacggatgagg

SEQ ID NO: 1286229 - DNA, 25 bp, Homo sapien
tgtttacggatgaggttcagagtta

SEQ ID NO: 1286230 - DNA, 25 bp, Homo sapien
atgagggacactcgaccgtagaatg

SEQ ID NO: 1286231 - DNA, 25 bp, Homo sapien
gtcactgaaaatgccctgcgactgt

SEQ ID NO: 1286232 - DNA, 25 bp, Homo sapien
gaacttgtgtttcctgtcagggcca

SEQ ID NO: 1286233 - DNA, 25 bp, Homo sapien
aagcagcggtttttctcaggactag

SEQ ID NO: 1286234 - DNA, 25 bp, Homo sapien
gttttacacgtaggacactgaggga

SEQ ID NO: 1286235 - DNA, 25 bp, Homo sapien
tccaggggcgggacagcagggcgcg

SEQ ID NO: 1286236 - DNA, 25 bp, Homo sapien
gccccggtccaggggcgggacagca

SEQ ID NO: 1286237 - DNA, 25 bp, Homo sapien
ggagcgcgggcgccggcagcagcat

SEQ ID NO: 1286238 - DNA, 25 bp, Homo sapien
ggcgggacagcagggcgcggcggag

SEQ ID NO: 1286239 - DNA, 25 bp, Homo sapien
ggctgttcgctggatcgtccgcccg

SEQ ID NO: 1286240 - DNA, 25 bp, Homo sapien
aaaatatttctagtgccataacggg

SEQ ID NO: 1286241 - DNA, 25 bp, Homo sapien
gagctcgggatcagccaaagtccca

SEQ ID NO: 1286242 - DNA, 25 bp, Homo sapien
aaagtcccactatatttagcttcgg

SEQ ID NO: 1286243 - DNA, 25 bp, Homo sapien
ttaaaattggcaacagacccactgc

SEQ ID NO: 1286244 - DNA, 25 bp, Homo sapien
gatggaccaattcgtcccagctagg

SEQ ID NO: 1286245 - DNA, 25 bp, Homo sapien
gaaaaaactcatgacgaaggccacc

SEQ ID NO: 1286246 - DNA, 25 bp, Homo sapien
gcagggcccactgacattaactgaa

SEQ ID NO: 1286247 - DNA, 25 bp, Homo sapien
gagaggtcctgccttccacaatgat

SEQ ID NO: 1286248 - DNA, 25 bp, Homo sapien
taagcctctattgttggctggcgag

SEQ ID NO: 1286249 - DNA, 25 bp, Homo sapien
tgaacccagaggtccggaaggaagc

SEQ ID NO: 1286250 - DNA, 25 bp, Homo sapien
caggcctagaaagctcacagaggca

SEQ ID NO: 1286251 - DNA, 25 bp, Homo sapien
gctaggaataattctttggagctca

SEQ ID NO: 1286252 - DNA, 25 bp, Homo sapien
ctgctaggaataattctttggagct

SEQ ID NO: 1286253 - DNA, 25 bp, Homo sapien
tgctaggaataattctttggagctc

SEQ ID NO: 1286254 - DNA, 25 bp, Homo sapien
gaaggcacagttaacactgcaaagt

SEQ ID NO: 1286255 - DNA, 25 bp, Homo sapien
taacactgcaaagtccgcacagaag

SEQ ID NO: 1286256 - DNA, 25 bp, Homo sapien
tgcaaagtccgcacagaagtctgca

SEQ ID NO: 1286257 - DNA, 25 bp, Homo sapien
cagttaacactgcaaagtccgcaca

SEQ ID NO: 1286258 - DNA, 25 bp, Homo sapien
tctgtacttcctgagtcgctgctgg

SEQ ID NO: 1286259 - DNA, 25 bp, Homo sapien
tgtacttcctgagtcgctgctggcc

SEQ ID NO: 1286260 - DNA, 25 bp, Homo sapien
tccacatccgcctcgcgctcgaact

SEQ ID NO: 1286261 - DNA, 25 bp, Homo sapien
cctcgcgctcgaactcatcctggat

SEQ ID NO: 1286262 - DNA, 25 bp, Homo sapien
tctgcggagcctttgatgagccggc

SEQ ID NO: 1286263 - DNA, 25 bp, Homo sapien
tgtctgcggagcctttgatgagccg

SEQ ID NO: 1286264 - DNA, 25 bp, Homo sapien
tgcaggtgtcggttcatgtcacttt

SEQ ID NO: 1286265 - DNA, 25 bp, Homo sapien
tcgtgcaggtgtcggttcatgtcac

SEQ ID NO: 1286266 - DNA, 25 bp, Homo sapien
cttgaagaaggattcggtctcatgg

SEQ ID NO: 1286267 - DNA, 25 bp, Homo sapien
ctcgatctgacctatcgtttcctgg

SEQ ID NO: 1286268 - DNA, 25 bp, Homo sapien
gatctgacctatcgtttcctggtac

SEQ ID NO: 1286269 - DNA, 25 bp, Homo sapien
catggatcaagttgcccaagttttc

SEQ ID NO: 1286270 - DNA, 25 bp, Homo sapien
ctcgccctgcaggtcgatggtcgga

SEQ ID NO: 1286271 - DNA, 25 bp, Homo sapien
gtcacagtcgtcgtcaaagtcaaag

SEQ ID NO: 1286272 - DNA, 25 bp, Homo sapien
ctgtcacagtcgtcgtcaaagtcaa

SEQ ID NO: 1286273 - DNA, 25 bp, Homo sapien
cggattgcagttggtgaaatcctcc

SEQ ID NO: 1286274 - DNA, 25 bp, Homo sapien
aacatgcgcttcatctcatcggtga

SEQ ID NO: 1286275 - DNA, 25 bp, Homo sapien
cgacctcatcgtccgagaaccggtt

SEQ ID NO: 1286276 - DNA, 25 bp, Homo sapien
gatgttcatggagccgacctcatcg

SEQ ID NO: 1286277 - DNA, 25 bp, Homo sapien
cagagatgtcatcatcggaagccac

SEQ ID NO: 1286278 - DNA, 25 bp, Homo sapien
agttccgctgctgtgcgacatcgca

SEQ ID NO: 1286279 - DNA, 25 bp, Homo sapien
cgacatcgcacagcttggccgtgat

SEQ ID NO: 1286280 - DNA, 25 bp, Homo sapien
tggacacgtcttctgagttccgctg

SEQ ID NO: 1286281 - DNA, 25 bp, Homo sapien
cgtgatatcgattcggcggcagatg

SEQ ID NO: 1286282 - DNA, 25 bp, Homo sapien
gtcactcataagccccttaaacacc

SEQ ID NO: 1286283 - DNA, 25 bp, Homo sapien
gctcggccttgagccgctcgatctt

SEQ ID NO: 1286284 - DNA, 25 bp, Homo sapien
ctcataagccccttaaacaccacca

SEQ ID NO: 1286285 - DNA, 25 bp, Homo sapien
cactcataagccccttaaacaccac

SEQ ID NO: 1286286 - DNA, 25 bp, Homo sapien
caccatggtctgaaggttcatgcgc

SEQ ID NO: 1286287 - DNA, 25 bp, Homo sapien
tccaccatggtctgaaggttcatgc

SEQ ID NO: 1286288 - DNA, 25 bp, Homo sapien
aaggttcatgcgcttggcgagctcc

SEQ ID NO: 1286289 - DNA, 25 bp, Homo sapien
tggtctgaaggttcatgcgcttggc

SEQ ID NO: 1286290 - DNA, 25 bp, Homo sapien
ggcagtctggaacccttttaggatg

SEQ ID NO: 1286291 - DNA, 25 bp, Homo sapien
cagggcagtctggaacccttttagg

SEQ ID NO: 1286292 - DNA, 25 bp, Homo sapien
ccctccctacatggcctcggagcag

SEQ ID NO: 1286293 - DNA, 25 bp, Homo sapien
ctgctaccctccctacatggcctcg

SEQ ID NO: 1286294 - DNA, 25 bp, Homo sapien
gaaaacattggttcccttcagcagc

SEQ ID NO: 1286295 - DNA, 25 bp, Homo sapien
aaggaaaccaagcatccaccatcac

SEQ ID NO: 1286296 - DNA, 25 bp, Homo sapien
caagttgccactgcccatttgtacc

SEQ ID NO: 1286297 - DNA, 25 bp, Homo sapien
tgtacccaggggcacgagaaaggaa

SEQ ID NO: 1286298 - DNA, 25 bp, Homo sapien
aatctaggccaatgcagccctgtcg

SEQ ID NO: 1286299 - DNA, 25 bp, Homo sapien
tctctgcaccttgaagcctgggcct

SEQ ID NO: 1286300 - DNA, 25 bp, Homo sapien
cataggaggccccataaatattcac

SEQ ID NO: 1286301 - DNA, 25 bp, Homo sapien
aaggcccagtaagtgtcatctccag

SEQ ID NO: 1286302 - DNA, 25 bp, Homo sapien
cagatgatgggaaagttggtgtcca

SEQ ID NO: 1286303 - DNA, 25 bp, Homo sapien
ggaaagttggtgtccacggctctcc

SEQ ID NO: 1286304 - DNA, 25 bp, Homo sapien
atgggaaagttggtgtccacggctc

SEQ ID NO: 1286305 - DNA, 25 bp, Homo sapien
aagttggtgtccacggctctccatc

SEQ ID NO: 1286306 - DNA, 25 bp, Homo sapien
ccctggaggtaaatgtagggcacct

SEQ ID NO: 1286307 - DNA, 25 bp, Homo sapien
cagcaggtctttgggcactcaggtc

SEQ ID NO: 1286308 - DNA, 25 bp, Homo sapien
ccaggcccagggttatgtttacagc

SEQ ID NO: 1286309 - DNA, 25 bp, Homo sapien
cctgggttgaaagcaaggctctgcg

SEQ ID NO: 1286310 - DNA, 25 bp, Homo sapien
atagtacctacacctccctggatgg

SEQ ID NO: 1286311 - DNA, 25 bp, Homo sapien
tccaggccagcatggcgagaagaag

SEQ ID NO: 1286312 - DNA, 25 bp, Homo sapien
aaaacactttgacgtcaggcagagc

SEQ ID NO: 1286313 - DNA, 25 bp, Homo sapien
cagctggtgatctgctaaagcgact

SEQ ID NO: 1286314 - DNA, 25 bp, Homo sapien
gaaccaccaggcaattgatatccaa

SEQ ID NO: 1286315 - DNA, 25 bp, Homo sapien
ggaatgtgcttcctaggcagtaaga

SEQ ID NO: 1286316 - DNA, 25 bp, Homo sapien
taatggtgctgccttgagaaccacc

SEQ ID NO: 1286317 - DNA, 25 bp, Homo sapien
gcagtagggatcatggttagacacc

SEQ ID NO: 1286318 - DNA, 25 bp, Homo sapien
tgatccgtggatgagaacctcgggc

SEQ ID NO: 1286319 - DNA, 25 bp, Homo sapien
taaaggttggatctggagcctgact

SEQ ID NO: 1286320 - DNA, 25 bp, Homo sapien
tgcagtgccaccaccgggtttaaat

SEQ ID NO: 1286321 - DNA, 25 bp, Homo sapien
caaaagctagggatactccagccca

SEQ ID NO: 1286322 - DNA, 25 bp, Homo sapien
tgaaaactaccctctcttgtaccag

SEQ ID NO: 1286323 - DNA, 25 bp, Homo sapien
acggaccctccagagaaccaggcat

SEQ ID NO: 1286324 - DNA, 25 bp, Homo sapien
ctgttgggtgaaaactaccctctct

SEQ ID NO: 1286325 - DNA, 25 bp, Homo sapien
gaaccaggcattgccatttgccagg

SEQ ID NO: 1286326 - DNA, 25 bp, Homo sapien
gcctgccccaatgacattgaccatg

SEQ ID NO: 1286327 - DNA, 25 bp, Homo sapien
tgaccatgaggggcggcgaggtggc

SEQ ID NO: 1286328 - DNA, 25 bp, Homo sapien
ctagcctgccccaatgacattgacc

SEQ ID NO: 1286329 - DNA, 25 bp, Homo sapien
tgccccaatgacattgaccatgagg

SEQ ID NO: 1286330 - DNA, 25 bp, Homo sapien
gccaagcagacagtattgtcggcca

SEQ ID NO: 1286331 - DNA, 25 bp, Homo sapien
aagccaagcagacagtattgtcggc

SEQ ID NO: 1286332 - DNA, 25 bp, Homo sapien
caagcagacagtattgtcggccaga

SEQ ID NO: 1286333 - DNA, 25 bp, Homo sapien
ggaaagccaagcagacagtattgtc

SEQ ID NO: 1286334 - DNA, 25 bp, Homo sapien
actcgtcgcgctcgcgcttcacctt

SEQ ID NO: 1286335 - DNA, 25 bp, Homo sapien
gcttatactcgtcgcgctcgcgctt

SEQ ID NO: 1286336 - DNA, 25 bp, Homo sapien
tccgcttatactcgtcgcgctcgcg

SEQ ID NO: 1286337 - DNA, 25 bp, Homo sapien
ctccgcttatactcgtcgcgctcgc

SEQ ID NO: 1286338 - DNA, 25 bp, Homo sapien
tgcgtgtagctccagatggtcccgg

SEQ ID NO: 1286339 - DNA, 25 bp, Homo sapien
gccgcacctgcgtgtagctccagat

SEQ ID NO: 1286340 - DNA, 25 bp, Homo sapien
tagctccagatggtcccgggcaggc

SEQ ID NO: 1286341 - DNA, 25 bp, Homo sapien
gcacctgcgtgtagctccagatggt

SEQ ID NO: 1286342 - DNA, 25 bp, Homo sapien
cacggcattggcgttggcgccggcc

SEQ ID NO: 1286343 - DNA, 25 bp, Homo sapien
ggccacggcattggcgttggcgccg

SEQ ID NO: 1286344 - DNA, 25 bp, Homo sapien
ggcattggcgttggcgccggccgcc

SEQ ID NO: 1286345 - DNA, 25 bp, Homo sapien
ccagggccacggcattggcgttggc

SEQ ID NO: 1286346 - DNA, 25 bp, Homo sapien
gggagaaggtcttgtagcgcagccg

SEQ ID NO: 1286347 - DNA, 25 bp, Homo sapien
gcacggcctgctcgcgggagaaggt

SEQ ID NO: 1286348 - DNA, 25 bp, Homo sapien
tcgggcccggtctgcacggcctgct

SEQ ID NO: 1286349 - DNA, 25 bp, Homo sapien
tccagcagccggttgcgccgctcca

SEQ ID NO: 1286350 - DNA, 25 bp, Homo sapien
cttagccaggaagcagcggaagcgc

SEQ ID NO: 1286351 - DNA, 25 bp, Homo sapien
gaagcagcggaagcgcacgttgagc

SEQ ID NO: 1286352 - DNA, 25 bp, Homo sapien
aggaagcagcggaagcgcacgttga

SEQ ID NO: 1286353 - DNA, 25 bp, Homo sapien
agcagcggaagcgcacgttgagccc

SEQ ID NO: 1286354 - DNA, 25 bp, Homo sapien
gcgccgccgtcaccggcgacggacc

SEQ ID NO: 1286355 - DNA, 25 bp, Homo sapien
cttcaagaggtggatgttggagccc

SEQ ID NO: 1286356 - DNA, 25 bp, Homo sapien
ttcaagaggtggatgttggagccca

SEQ ID NO: 1286357 - DNA, 25 bp, Homo sapien
agcgccgccgtcaccggcgacggac

SEQ ID NO: 1286358 - DNA, 25 bp, Homo sapien
gcagccgcacgcagaggactctcgg

SEQ ID NO: 1286359 - DNA, 25 bp, Homo sapien
gaggactctcggccggcactgcccc

SEQ ID NO: 1286360 - DNA, 25 bp, Homo sapien
agaggactctcggccggcactgccc

SEQ ID NO: 1286361 - DNA, 25 bp, Homo sapien
ggcagccgcacgcagaggactctcg

SEQ ID NO: 1286362 - DNA, 25 bp, Homo sapien
cgcccactgaggagccgagcagcat

SEQ ID NO: 1286363 - DNA, 25 bp, Homo sapien
ggtgggctcctcgaatgctagctgc

SEQ ID NO: 1286364 - DNA, 25 bp, Homo sapien
gggcacagctaagcccgctggttcc

SEQ ID NO: 1286365 - DNA, 25 bp, Homo sapien
tagctgcgggccttgtcctctcgag

SEQ ID NO: 1286366 - DNA, 25 bp, Homo sapien
ctcttccagaacgagggaccaggtc

SEQ ID NO: 1286367 - DNA, 25 bp, Homo sapien
tcttccagaacgagggaccaggtca

SEQ ID NO: 1286368 - DNA, 25 bp, Homo sapien
cctcttccagaacgagggaccaggt

SEQ ID NO: 1286369 - DNA, 25 bp, Homo sapien
cttccagaacgagggaccaggtcac

SEQ ID NO: 1286370 - DNA, 25 bp, Homo sapien
caacgctgaccacatgacttagtaa

SEQ ID NO: 1286371 - DNA, 25 bp, Homo sapien
tgacttcccctgattcgctggtggc

SEQ ID NO: 1286372 - DNA, 25 bp, Homo sapien
gagtccatgctatccatcgttatgc

SEQ ID NO: 1286373 - DNA, 25 bp, Homo sapien
gcactttccaaatgccagacactga

SEQ ID NO: 1286374 - DNA, 25 bp, Homo sapien
tcatccccgtatccccaggacccac

SEQ ID NO: 1286375 - DNA, 25 bp, Homo sapien
aggacccacaccaggatctggccca

SEQ ID NO: 1286376 - DNA, 25 bp, Homo sapien
accaggatctggcccagcatcagct

SEQ ID NO: 1286377 - DNA, 25 bp, Homo sapien
ccacaccaggatctggcccagcatc

SEQ ID NO: 1286378 - DNA, 25 bp, Homo sapien
tccaggttctgcggggacttccgga

SEQ ID NO: 1286379 - DNA, 25 bp, Homo sapien
tctgcggggacttccggaggtcaca

SEQ ID NO: 1286380 - DNA, 25 bp, Homo sapien
gagctccaggttctgcggggacttc

SEQ ID NO: 1286381 - DNA, 25 bp, Homo sapien
gttctgcggggacttccggaggtca

SEQ ID NO: 1286382 - DNA, 25 bp, Homo sapien
tggcagtgcctgaattagttcccgt

SEQ ID NO: 1286383 - DNA, 25 bp, Homo sapien
tagttcccgtgaatctcaagcaatc

SEQ ID NO: 1286384 - DNA, 25 bp, Homo sapien
attcaaagagctcagtccgaccagg

SEQ ID NO: 1286385 - DNA, 25 bp, Homo sapien
gggcagcttgctggcagtgcctgaa

SEQ ID NO: 1286386 - DNA, 25 bp, Homo sapien
caggtagggataagcccaggaccag

SEQ ID NO: 1286387 - DNA, 25 bp, Homo sapien
tgggaaggtattgtgaacaggtagg

SEQ ID NO: 1286388 - DNA, 25 bp, Homo sapien
acatgacagtcatgtggtccccgcc

SEQ ID NO: 1286389 - DNA, 25 bp, Homo sapien
tagtcgggcactggggcatcttcag

SEQ ID NO: 1286390 - DNA, 25 bp, Homo sapien
ggtgatggggcagcgtgtcacagcc

SEQ ID NO: 1286391 - DNA, 25 bp, Homo sapien
ggcagcgtgtcacagccgcggggca

SEQ ID NO: 1286392 - DNA, 25 bp, Homo sapien
cagagaccagctctgccgaggtgat

SEQ ID NO: 1286393 - DNA, 25 bp, Homo sapien
agagaccagctctgccgaggtgatg

SEQ ID NO: 1286394 - DNA, 25 bp, Homo sapien
aggctccagacaaactcagctggct

SEQ ID NO: 1286395 - DNA, 25 bp, Homo sapien
ccaggctccagacaaactcagctgg

SEQ ID NO: 1286396 - DNA, 25 bp, Homo sapien
tcagctggctcaggactgggacaac

SEQ ID NO: 1286397 - DNA, 25 bp, Homo sapien
gctggctcaggactgggacaaccat

SEQ ID NO: 1286398 - DNA, 25 bp, Homo sapien
gcttgtggcagtggccggagatcgg

SEQ ID NO: 1286399 - DNA, 25 bp, Homo sapien
gatcggcaccgactcagagccagga

SEQ ID NO: 1286400 - DNA, 25 bp, Homo sapien
gtgagctggcgggatacttgtcttc

SEQ ID NO: 1286401 - DNA, 25 bp, Homo sapien
gtcttcatactccatcgtcactttg

SEQ ID NO: 1286402 - DNA, 25 bp, Homo sapien
ctctcagccgcatcctcaggtacag

SEQ ID NO: 1286403 - DNA, 25 bp, Homo sapien
cgcatcctcaggtacagggccctga

SEQ ID NO: 1286404 - DNA, 25 bp, Homo sapien
ccctgaggctgcctccgctggccat

SEQ ID NO: 1286405 - DNA, 25 bp, Homo sapien
ggccctgaggctgcctccgctggcc

SEQ ID NO: 1286406 - DNA, 25 bp, Homo sapien
tatcattaggcatagccagtccaga

SEQ ID NO: 1286407 - DNA, 25 bp, Homo sapien
ccaatgggcccagataatggtgcag

SEQ ID NO: 1286408 - DNA, 25 bp, Homo sapien
gacagggacccaagaaccaatgggc

SEQ ID NO: 1286409 - DNA, 25 bp, Homo sapien
gatgctcctttcgtgagacctgggc

SEQ ID NO: 1286410 - DNA, 25 bp, Homo sapien
aacaacagagtgagtgcctggccgc

SEQ ID NO: 1286411 - DNA, 25 bp, Homo sapien
caaagtatgctcgtgcaagccagca

SEQ ID NO: 1286412 - DNA, 25 bp, Homo sapien
gcagattagctcgtggaaacctcag

SEQ ID NO: 1286413 - DNA, 25 bp, Homo sapien
tgaggcattcccagtataaggcaga

SEQ ID NO: 1286414 - DNA, 25 bp, Homo sapien
gtgcattcaagggaaaccatttggc

SEQ ID NO: 1286415 - DNA, 25 bp, Homo sapien
ggctgtgcattcaagggaaaccatt

SEQ ID NO: 1286416 - DNA, 25 bp, Homo sapien
ctgtgcattcaagggaaaccatttg

SEQ ID NO: 1286417 - DNA, 25 bp, Homo sapien
gctgtgcattcaagggaaaccattt

SEQ ID NO: 1286418 - DNA, 25 bp, Homo sapien
gacaacctcatagctggtgcaccac

SEQ ID NO: 1286419 - DNA, 25 bp, Homo sapien
tcatggctcctaggtatgtacaggc

SEQ ID NO: 1286420 - DNA, 25 bp, Homo sapien
ggtaacaatgcagcatcccgcggag

SEQ ID NO: 1286421 - DNA, 25 bp, Homo sapien
cccgcggagggaacttaatgcacaa

SEQ ID NO: 1286422 - DNA, 25 bp, Homo sapien
agctctctggatcggtgatttctga

SEQ ID NO: 1286423 - DNA, 25 bp, Homo sapien
tctggatcggtgatttctgataaaa

SEQ ID NO: 1286424 - DNA, 25 bp, Homo sapien
tctctggatcggtgatttctgataa

SEQ ID NO: 1286425 - DNA, 25 bp, Homo sapien
ggaagctctctggatcggtgatttc

SEQ ID NO: 1286426 - DNA, 25 bp, Homo sapien
ctgcaaagcacaacgggcagaggtg

SEQ ID NO: 1286427 - DNA, 25 bp, Homo sapien
gtgtcaggagcaggcatacagcccc

SEQ ID NO: 1286428 - DNA, 25 bp, Homo sapien
tgagtcacagctgccgcatctagca

SEQ ID NO: 1286429 - DNA, 25 bp, Homo sapien
gctgccgcatctagcagagaacaca

SEQ ID NO: 1286430 - DNA, 25 bp, Homo sapien
gtccgacaagctctggcccggctgc

SEQ ID NO: 1286431 - DNA, 25 bp, Homo sapien
tgcggtccgacaagctctggcccgg

SEQ ID NO: 1286432 - DNA, 25 bp, Homo sapien
ccgacaagctctggcccggctgctc

SEQ ID NO: 1286433 - DNA, 25 bp, Homo sapien
cggtccgacaagctctggcccggct

SEQ ID NO: 1286434 - DNA, 25 bp, Homo sapien
accggggaggtagtcattgagcaaa

SEQ ID NO: 1286435 - DNA, 25 bp, Homo sapien
catttgaatagggtgtgtctgatgt

SEQ ID NO: 1286436 - DNA, 25 bp, Homo sapien
gaggtagtcattgagcaaaaccctg

SEQ ID NO: 1286437 - DNA, 25 bp, Homo sapien
caaaaccctgttccgcaggaggagt

SEQ ID NO: 1286438 - DNA, 25 bp, Homo sapien
aggttttcagggctttgtcggcagc

SEQ ID NO: 1286439 - DNA, 25 bp, Homo sapien
cggccacatcgaggaactctgagaa

SEQ ID NO: 1286440 - DNA, 25 bp, Homo sapien
cagcttcgtagatgggcatgtcgtt

SEQ ID NO: 1286441 - DNA, 25 bp, Homo sapien
gatgtactcagcgagagagcaggac

SEQ ID NO: 1286442 - DNA, 25 bp, Homo sapien
tataagctggctgcggtaagtcaga

SEQ ID NO: 1286443 - DNA, 25 bp, Homo sapien
tctcagctacaaatgtgggccaggc

SEQ ID NO: 1286444 - DNA, 25 bp, Homo sapien
tacaggctccaacaagtggctgcat

SEQ ID NO: 1286445 - DNA, 25 bp, Homo sapien
tatcccaatagcacggcaagagcag

SEQ ID NO: 1286446 - DNA, 25 bp, Homo sapien
aggctgccagtgtcaatccctccca

SEQ ID NO: 1286447 - DNA, 25 bp, Homo sapien
cagacattttacactcttgccaaaa

SEQ ID NO: 1286448 - DNA, 25 bp, Homo sapien
ccagcggaggagcagccatgtgggt

SEQ ID NO: 1286449 - DNA, 25 bp, Homo sapien
ggacaggagtgcagacattttacac

SEQ ID NO: 1286450 - DNA, 25 bp, Homo sapien
tgagatcgacgagggcccaaaagag

SEQ ID NO: 1286451 - DNA, 25 bp, Homo sapien
gaacggtaagcggaatagtccttca

SEQ ID NO: 1286452 - DNA, 25 bp, Homo sapien
acatgttgtaaatgagatcgacgag

SEQ ID NO: 1286453 - DNA, 25 bp, Homo sapien
ggaatagtccttcactgccttatct

SEQ ID NO: 1286454 - DNA, 25 bp, Homo sapien
gacagacgcctgagaatgtcccagg

SEQ ID NO: 1286455 - DNA, 25 bp, Homo sapien
taaaggtgacgaaactgctacagag

SEQ ID NO: 1286456 - DNA, 25 bp, Homo sapien
taaaagccagcagacctaaaccagt

SEQ ID NO: 1286457 - DNA, 25 bp, Homo sapien
tggtacaggccagattcaacaggac

SEQ ID NO: 1286458 - DNA, 25 bp, Homo sapien
cagcagcttccggaagcaggtactg

SEQ ID NO: 1286459 - DNA, 25 bp, Homo sapien
ccagaaagccttggaggttcttctc

SEQ ID NO: 1286460 - DNA, 25 bp, Homo sapien
tctcttctcgggaagttgctcgggt

SEQ ID NO: 1286461 - DNA, 25 bp, Homo sapien
tgtgaaatagtagggcccgtccact

SEQ ID NO: 1286462 - DNA, 25 bp, Homo sapien
agcctccgcaagatttccacacgtg

SEQ ID NO: 1286463 - DNA, 25 bp, Homo sapien
gcaccatatatcagggacgttcaca

SEQ ID NO: 1286464 - DNA, 25 bp, Homo sapien
caagcaactactggttcctgagcac

SEQ ID NO: 1286465 - DNA, 25 bp, Homo sapien
aactgtgctagtaactccagaggcc

SEQ ID NO: 1286466 - DNA, 25 bp, Homo sapien
gacatttgctgaacgcttggatgac

SEQ ID NO: 1286467 - DNA, 25 bp, Homo sapien
caatgtcaattggatagctgtcgac

SEQ ID NO: 1286468 - DNA, 25 bp, Homo sapien
tgtgaccaagctcccaccaatgtca

SEQ ID NO: 1286469 - DNA, 25 bp, Homo sapien
tagctgtcgactgggaagcagtctg

SEQ ID NO: 1286470 - DNA, 25 bp, Homo sapien
tgacatacttgcctccataaacaaa

SEQ ID NO: 1286471 - DNA, 25 bp, Homo sapien
acagccaattccctttccaatgaag

SEQ ID NO: 1286472 - DNA, 25 bp, Homo sapien
agacagccaattccctttccaatga

SEQ ID NO: 1286473 - DNA, 25 bp, Homo sapien
tgtgagacagccaattccctttcca

SEQ ID NO: 1286474 - DNA, 25 bp, Homo sapien
tgagacagccaattccctttccaat

SEQ ID NO: 1286475 - DNA, 25 bp, Homo sapien
ctggcctaagtgcttctttaaaatt

SEQ ID NO: 1286476 - DNA, 25 bp, Homo sapien
atggataaaactaccaatctctttt

SEQ ID NO: 1286477 - DNA, 25 bp, Homo sapien
ccttgtcggttgactttcccagata

SEQ ID NO: 1286478 - DNA, 25 bp, Homo sapien
tcccttcacacttgccagaagcatt

SEQ ID NO: 1286479 - DNA, 25 bp, Homo sapien
ggttgactttcccagataatcttga

SEQ ID NO: 1286480 - DNA, 25 bp, Homo sapien
aaaccatcacctgtaacaatctata

SEQ ID NO: 1286481 - DNA, 25 bp, Homo sapien
tcagctctgctgcatccccttgatg

SEQ ID NO: 1286482 - DNA, 25 bp, Homo sapien
tatatgcccttgactaatgatgtgg

SEQ ID NO: 1286483 - DNA, 25 bp, Homo sapien
ctaatgatgtgggcacagctccgac

SEQ ID NO: 1286484 - DNA, 25 bp, Homo sapien
ccctgtgagctgaacgtcagtccaa

SEQ ID NO: 1286485 - DNA, 25 bp, Homo sapien
aacagtctggaaagtagaagtagcc

SEQ ID NO: 1286486 - DNA, 25 bp, Homo sapien
gaacgtcagtccaaggatgcggtct

SEQ ID NO: 1286487 - DNA, 25 bp, Homo sapien
gccgctgcatcgaagtagaggcttc

SEQ ID NO: 1286488 - DNA, 25 bp, Homo sapien
catggccctaaaagaatgcagatga

SEQ ID NO: 1286489 - DNA, 25 bp, Homo sapien
ttctgcatggccctaaaagaatgca

SEQ ID NO: 1286490 - DNA, 25 bp, Homo sapien
ggccctaaaagaatgcagatgagca

SEQ ID NO: 1286491 - DNA, 25 bp, Homo sapien
cctaaaagaatgcagatgagcatcc

SEQ ID NO: 1286492 - DNA, 25 bp, Homo sapien
gtgttcaggacgtaaagcacagtgt

SEQ ID NO: 1286493 - DNA, 25 bp, Homo sapien
tcaggacgtaaagcacagtgtgaat

SEQ ID NO: 1286494 - DNA, 25 bp, Homo sapien
gttcaggacgtaaagcacagtgtga

SEQ ID NO: 1286495 - DNA, 25 bp, Homo sapien
caggacgtaaagcacagtgtgaatg

SEQ ID NO: 1286496 - DNA, 25 bp, Homo sapien
tgcgctgaacgactgctccatggcg

SEQ ID NO: 1286497 - DNA, 25 bp, Homo sapien
gctggcctgtacattcctggaggta

SEQ ID NO: 1286498 - DNA, 25 bp, Homo sapien
tgttgagctgatacgtgggctcccg

SEQ ID NO: 1286499 - DNA, 25 bp, Homo sapien
tcaggtggatgttgctctcccggcc

SEQ ID NO: 1286500 - DNA, 25 bp, Homo sapien
aaagctgattcagggacatgaggtc

SEQ ID NO: 1286501 - DNA, 25 bp, Homo sapien
caaaagctgattcagggacatgagg

SEQ ID NO: 1286502 - DNA, 25 bp, Homo sapien
ttgccaagcaagtggcaaaagctga

SEQ ID NO: 1286503 - DNA, 25 bp, Homo sapien
agaccggaaggagcccgttgcactt

SEQ ID NO: 1286504 - DNA, 25 bp, Homo sapien
tctcccactcttcccggcctcgagc

SEQ ID NO: 1286505 - DNA, 25 bp, Homo sapien
ccactcttcccggcctcgagccaac

SEQ ID NO: 1286506 - DNA, 25 bp, Homo sapien
tctgcagggcggcactctcccactc

SEQ ID NO: 1286507 - DNA, 25 bp, Homo sapien
tgcagggcggcactctcccactctt

SEQ ID NO: 1286508 - DNA, 25 bp, Homo sapien
atagggaggagagcagggacaagcg

SEQ ID NO: 1286509 - DNA, 25 bp, Homo sapien
ggaggagagcagggacaagcgactg

SEQ ID NO: 1286510 - DNA, 25 bp, Homo sapien
ctggatagggaggagagcagggaca

SEQ ID NO: 1286511 - DNA, 25 bp, Homo sapien
agggaggagagcagggacaagcgac

SEQ ID NO: 1286512 - DNA, 25 bp, Homo sapien
caatgttgaagtgggacacggtgct

SEQ ID NO: 1286513 - DNA, 25 bp, Homo sapien
caaggctacccgcttcgtgaaggta

SEQ ID NO: 1286514 - DNA, 25 bp, Homo sapien
ggcagtcgtagtgcacaatgttgaa

SEQ ID NO: 1286515 - DNA, 25 bp, Homo sapien
ggtgctgtagccctgctgtttccgg

SEQ ID NO: 1286516 - DNA, 25 bp, Homo sapien
tggaacttgtatccctccctgcaga

SEQ ID NO: 1286517 - DNA, 25 bp, Homo sapien
cttggtcacgacctggcccttttca

SEQ ID NO: 1286518 - DNA, 25 bp, Homo sapien
cgtgaggccaggctcctcgatcagc

SEQ ID NO: 1286519 - DNA, 25 bp, Homo sapien
gcttcaggagtgctgtcttggtcac

SEQ ID NO: 1286520 - DNA, 25 bp, Homo sapien
tgctccagcttatgcaggttcggga

SEQ ID NO: 1286521 - DNA, 25 bp, Homo sapien
tccctgcgggctgcgtcaatcttct

SEQ ID NO: 1286522 - DNA, 25 bp, Homo sapien
ttacgtcagggtgttcccgcagggc

SEQ ID NO: 1286523 - DNA, 25 bp, Homo sapien
gcaggttcgggatggaatcagttcc

SEQ ID NO: 1286524 - DNA, 25 bp, Homo sapien
cattctggctgtttactgtgtgtgc

SEQ ID NO: 1286525 - DNA, 25 bp, Homo sapien
gagcccatatttcaactcctactga

SEQ ID NO: 1286526 - DNA, 25 bp, Homo sapien
ctgtgtctcagcgaaattacctatt

SEQ ID NO: 1286527 - DNA, 25 bp, Homo sapien
acaggtaccccaaactcaacattct

SEQ ID NO: 1286528 - DNA, 25 bp, Homo sapien
tcacactacctgtcctggctaccca

SEQ ID NO: 1286529 - DNA, 25 bp, Homo sapien
tacttgtacccctgtaccctcacac

SEQ ID NO: 1286530 - DNA, 25 bp, Homo sapien
cctcacactacctgtcctggctacc

SEQ ID NO: 1286531 - DNA, 25 bp, Homo sapien
tacccctgtaccctcacactacctg

SEQ ID NO: 1286532 - DNA, 25 bp, Homo sapien
ccccgaagcagccttaggataaatg

SEQ ID NO: 1286533 - DNA, 25 bp, Homo sapien
caaggctgggcgagacaaaaacttt

SEQ ID NO: 1286534 - DNA, 25 bp, Homo sapien
actttttccagatgtcggcatccaa

SEQ ID NO: 1286535 - DNA, 25 bp, Homo sapien
taggataaatggcaaggctgggcga

SEQ ID NO: 1286536 - DNA, 25 bp, Homo sapien
gcattctgggtgatccccttctgga

SEQ ID NO: 1286537 - DNA, 25 bp, Homo sapien
tctggagaatcagatccttcagctg

SEQ ID NO: 1286538 - DNA, 25 bp, Homo sapien
ttcatgtagtcaagtgcattctggg

SEQ ID NO: 1286539 - DNA, 25 bp, Homo sapien
ttcttggcgctagggatgtgctttt

SEQ ID NO: 1286540 - DNA, 25 bp, Homo sapien
gaatcgctccaccaagatctgcatt

SEQ ID NO: 1286541 - DNA, 25 bp, Homo sapien
gttgcagtatggtttgaatcgctcc

SEQ ID NO: 1286542 - DNA, 25 bp, Homo sapien
gatccttgtcacctgtcaggaggag

SEQ ID NO: 1286543 - DNA, 25 bp, Homo sapien
ctccaaaggaaaggtacgggatgat

SEQ ID NO: 1286544 - DNA, 25 bp, Homo sapien
cagcattggactcatctagaatgat

SEQ ID NO: 1286545 - DNA, 25 bp, Homo sapien
tagaatgatctccatgatgctaagc

SEQ ID NO: 1286546 - DNA, 25 bp, Homo sapien
aatgatctccatgatgctaagcacc

SEQ ID NO: 1286547 - DNA, 25 bp, Homo sapien
ggactcatctagaatgatctccatg

SEQ ID NO: 1286548 - DNA, 25 bp, Homo sapien
gactttcaccttcacgcagtaactg

SEQ ID NO: 1286549 - DNA, 25 bp, Homo sapien
cagttgctgccggttgactttcacc

SEQ ID NO: 1286550 - DNA, 25 bp, Homo sapien
tcacgcagtaactgaacaatttcag

SEQ ID NO: 1286551 - DNA, 25 bp, Homo sapien
gggtccccagcatgacgttcaaggt

SEQ ID NO: 1286552 - DNA, 25 bp, Homo sapien
tggctgggctctcacattaggctgg

SEQ ID NO: 1286553 - DNA, 25 bp, Homo sapien
gctggtagctccaatggcgggatat

SEQ ID NO: 1286554 - DNA, 25 bp, Homo sapien
tgtctaagcagggtctacaccatca

SEQ ID NO: 1286555 - DNA, 25 bp, Homo sapien
tctctaatacaacggcaatgacagc

SEQ ID NO: 1286556 - DNA, 25 bp, Homo sapien
gggaaagacagtcagatgctggctc

SEQ ID NO: 1286557 - DNA, 25 bp, Homo sapien
cgggaaaaggtgtgcctaagaatgt

SEQ ID NO: 1286558 - DNA, 25 bp, Homo sapien
tgataatagttaacacaagtgcagc

SEQ ID NO: 1286559 - DNA, 25 bp, Homo sapien
taagaatgtagtcctaactgccagg

SEQ ID NO: 1286560 - DNA, 25 bp, Homo sapien
tagaaggtggcgtccctgcttgaaa

SEQ ID NO: 1286561 - DNA, 25 bp, Homo sapien
tgcttgaaatctctgatccctgcga

SEQ ID NO: 1286562 - DNA, 25 bp, Homo sapien
ggtggcgtccctgcttgaaatctct

SEQ ID NO: 1286563 - DNA, 25 bp, Homo sapien
tgatccctgcgagtctgttaagcat

SEQ ID NO: 1286564 - DNA, 25 bp, Homo sapien
gcagcccccgcatacgataaacaat

SEQ ID NO: 1286565 - DNA, 25 bp, Homo sapien
cccgcatacgataaacaatcctcat

SEQ ID NO: 1286566 - DNA, 25 bp, Homo sapien
catacgataaacaatcctcatgggc

SEQ ID NO: 1286567 - DNA, 25 bp, Homo sapien
ctcctctgtggcatcgcccagcagc

SEQ ID NO: 1286568 - DNA, 25 bp, Homo sapien
cagccacaggaaggtccaaactaat

SEQ ID NO: 1286569 - DNA, 25 bp, Homo sapien
accagactttcttgtaaacttcagc

SEQ ID NO: 1286570 - DNA, 25 bp, Homo sapien
caggaaggtccaaactaatgatttt

SEQ ID NO: 1286571 - DNA, 25 bp, Homo sapien
caccagactttcttgtaaacttcag

SEQ ID NO: 1286572 - DNA, 25 bp, Homo sapien
gacaagtaaaatccaagagcaaagg

SEQ ID NO: 1286573 - DNA, 25 bp, Homo sapien
aagcaggtgaagctgttgttccaaa

SEQ ID NO: 1286574 - DNA, 25 bp, Homo sapien
acaagtaaaatccaagagcaaaggg

SEQ ID NO: 1286575 - DNA, 25 bp, Homo sapien
ggcaatggttgataattcacaattt

SEQ ID NO: 1286576 - DNA, 25 bp, Homo sapien
tgtcatggacctatcaactctccca

SEQ ID NO: 1286577 - DNA, 25 bp, Homo sapien
actcttaaaaaatccgcacgtatga

SEQ ID NO: 1286578 - DNA, 25 bp, Homo sapien
atccgcacgtatgaaaaacacacag

SEQ ID NO: 1286579 - DNA, 25 bp, Homo sapien
cctcaacggtctgccagaaagtaac

SEQ ID NO: 1286580 - DNA, 25 bp, Homo sapien
gaccctcaacggtctgccagaaagt

SEQ ID NO: 1286581 - DNA, 25 bp, Homo sapien
aaatgtcagaccctcaacggtctgc

SEQ ID NO: 1286582 - DNA, 25 bp, Homo sapien
tcagaccctcaacggtctgccagaa

SEQ ID NO: 1286583 - DNA, 25 bp, Homo sapien
gaagtctctgccagaggcaataacg

SEQ ID NO: 1286584 - DNA, 25 bp, Homo sapien
agaagtctctgccagaggcaataac

SEQ ID NO: 1286585 - DNA, 25 bp, Homo sapien
aagtctctgccagaggcaataacga

SEQ ID NO: 1286586 - DNA, 25 bp, Homo sapien
cgagaagtctctgccagaggcaata

SEQ ID NO: 1286587 - DNA, 25 bp, Homo sapien
cagtcctggcaaatcttgttcttta

SEQ ID NO: 1286588 - DNA, 25 bp, Homo sapien
gctatacgggttcccaggcatcctg

SEQ ID NO: 1286589 - DNA, 25 bp, Homo sapien
tgttctttatatccctcatcagcgg

SEQ ID NO: 1286590 - DNA, 25 bp, Homo sapien
caggagggccactaagtcacagtcc

SEQ ID NO: 1286591 - DNA, 25 bp, Homo sapien
ccggggtccggtagtcatccagatt

SEQ ID NO: 1286592 - DNA, 25 bp, Homo sapien
gctgcagagcctctcgaagatgaac

SEQ ID NO: 1286593 - DNA, 25 bp, Homo sapien
agattgtagcgcttggctgtctcaa

SEQ ID NO: 1286594 - DNA, 25 bp, Homo sapien
gagcctctcgaagatgaacaccggg

SEQ ID NO: 1286595 - DNA, 25 bp, Homo sapien
gcgtctcatcgatcagcttggtcct

SEQ ID NO: 1286596 - DNA, 25 bp, Homo sapien
gcacagtacccaccaagcgactttt

SEQ ID NO: 1286597 - DNA, 25 bp, Homo sapien
aatgtcttttgatggattccacctc

SEQ ID NO: 1286598 - DNA, 25 bp, Homo sapien
gcacaggtatccattcagcacagta

SEQ ID NO: 1286599 - DNA, 25 bp, Homo sapien
gacttttaagggcataaccctgctg

SEQ ID NO: 1286600 - DNA, 25 bp, Homo sapien
aaccctgctgcagatcggtactcag

SEQ ID NO: 1286601 - DNA, 25 bp, Homo sapien
ccagggccagcagacgagctatttc

SEQ ID NO: 1286602 - DNA, 25 bp, Homo sapien
gatcggtactcagggtagcctcctc

SEQ ID NO: 1286603 - DNA, 25 bp, Homo sapien
gctcccaagagtttgctacagctac

SEQ ID NO: 1286604 - DNA, 25 bp, Homo sapien
taatcgaacccttgcagaactcctt

SEQ ID NO: 1286605 - DNA, 25 bp, Homo sapien
tcacagcgctggtaagggattgctt

SEQ ID NO: 1286606 - DNA, 25 bp, Homo sapien
tgtaaacagtccaaatgctcccaag

SEQ ID NO: 1286607 - DNA, 25 bp, Homo sapien
ggtagagagccaggtactcagctgc

SEQ ID NO: 1286608 - DNA, 25 bp, Homo sapien
tgaggttgcccacatagggtaggac

SEQ ID NO: 1286609 - DNA, 25 bp, Homo sapien
ccagtgcgcagaagtgatgagcttc

SEQ ID NO: 1286610 - DNA, 25 bp, Homo sapien
ccgagctgccaagtagactttccag

SEQ ID NO: 1286611 - DNA, 25 bp, Homo sapien
tgctgcttgcggctgggaatggtgg

SEQ ID NO: 1286612 - DNA, 25 bp, Homo sapien
cacaatggtacaggctgcctgccgt

SEQ ID NO: 1286613 - DNA, 25 bp, Homo sapien
tgcggcctgcgttgctggagtgaaa

SEQ ID NO: 1286614 - DNA, 25 bp, Homo sapien
tgggaatggtggctagagcttccac

SEQ ID NO: 1286615 - DNA, 25 bp, Homo sapien
ttgtcgcagccagttgttatgcccc

SEQ ID NO: 1286616 - DNA, 25 bp, Homo sapien
tcaaatagagatggcggagctctga

SEQ ID NO: 1286617 - DNA, 25 bp, Homo sapien
ccacacatacttctcagtcaaatag

SEQ ID NO: 1286618 - DNA, 25 bp, Homo sapien
ttgttatgccccagtttgagatcca

SEQ ID NO: 1286619 - DNA, 25 bp, Homo sapien
tcttccaggcatcataggatgcctt

SEQ ID NO: 1286620 - DNA, 25 bp, Homo sapien
tcattgcagtatggcttcaccgtgg

SEQ ID NO: 1286621 - DNA, 25 bp, Homo sapien
tccaggcatcataggatgccttggg

SEQ ID NO: 1286622 - DNA, 25 bp, Homo sapien
ggcatggatctcattgcagtatggc

SEQ ID NO: 1286623 - DNA, 25 bp, Homo sapien
tttcattgagactataccaaaactc

SEQ ID NO: 1286624 - DNA, 25 bp, Homo sapien
aatgactgctttataagacatctgg

SEQ ID NO: 1286625 - DNA, 25 bp, Homo sapien
gattagctgtagtatggactctgaa

SEQ ID NO: 1286626 - DNA, 25 bp, Homo sapien
ggattctcatatcggtttctatagt

SEQ ID NO: 1286627 - DNA, 25 bp, Homo sapien
ttgttcttcttgctagtgggagcag

SEQ ID NO: 1286628 - DNA, 25 bp, Homo sapien
ttctgcaagatcctcaggcacatga

SEQ ID NO: 1286629 - DNA, 25 bp, Homo sapien
aatgttttcaaccaccacaggagtc

SEQ ID NO: 1286630 - DNA, 25 bp, Homo sapien
ggagtcttaatgttcacagccatga

SEQ ID NO: 1286631 - DNA, 25 bp, Homo sapien
tggagatagaatccgtcagcagcag

SEQ ID NO: 1286632 - DNA, 25 bp, Homo sapien
tccttggagatagaatccgtcagca

SEQ ID NO: 1286633 - DNA, 25 bp, Homo sapien
tcctccttggagatagaatccgtca

SEQ ID NO: 1286634 - DNA, 25 bp, Homo sapien
tgtcctccttggagatagaatccgt

SEQ ID NO: 1286635 - DNA, 25 bp, Homo sapien
aaaggacagacggagacccttgtgc

SEQ ID NO: 1286636 - DNA, 25 bp, Homo sapien
tcctaggtggctccaacagagacaa

SEQ ID NO: 1286637 - DNA, 25 bp, Homo sapien
ggtccagcgactcttaactattaat

SEQ ID NO: 1286638 - DNA, 25 bp, Homo sapien
caatttctggtcctaggtggctcca

SEQ ID NO: 1286639 - DNA, 25 bp, Homo sapien
ttggcccagtggcccttcagggctg

SEQ ID NO: 1286640 - DNA, 25 bp, Homo sapien
tcggggttggcccagtggcccttca

SEQ ID NO: 1286641 - DNA, 25 bp, Homo sapien
agggctgtggagaccttgccaataa

SEQ ID NO: 1286642 - DNA, 25 bp, Homo sapien
ataatcaggtcattcatctgttggg

SEQ ID NO: 1286643 - DNA, 25 bp, Homo sapien
cctgctgtctggtgtgacacagtct

SEQ ID NO: 1286644 - DNA, 25 bp, Homo sapien
tctcagtcttggtcacaactctttc

SEQ ID NO: 1286645 - DNA, 25 bp, Homo sapien
cagtttacgtctctttgtaacaatg

SEQ ID NO: 1286646 - DNA, 25 bp, Homo sapien
cctcatattccagtttacgtctctt

SEQ ID NO: 1286647 - DNA, 25 bp, Homo sapien
gaaacctgggtttcaatgctcccca

SEQ ID NO: 1286648 - DNA, 25 bp, Homo sapien
cacaaggcctcagggagagtttcct

SEQ ID NO: 1286649 - DNA, 25 bp, Homo sapien
tgtcagtaggaaccactaggcccat

SEQ ID NO: 1286650 - DNA, 25 bp, Homo sapien
tccaaggcgtatagtacaaggtatc

SEQ ID NO: 1286651 - DNA, 25 bp, Homo sapien
taatcaaagagctcccggataaggc

SEQ ID NO: 1286652 - DNA, 25 bp, Homo sapien
gcccctcggcgaagattataatcaa

SEQ ID NO: 1286653 - DNA, 25 bp, Homo sapien
caatgttctgtgacagccgaggcgc

SEQ ID NO: 1286654 - DNA, 25 bp, Homo sapien
ccagggcccgaagtagtgtgataca

SEQ ID NO: 1286655 - DNA, 25 bp, Homo sapien
tgaggtacctctgtctatggccagc

SEQ ID NO: 1286656 - DNA, 25 bp, Homo sapien
caagacctggactgctagatgagag

SEQ ID NO: 1286657 - DNA, 25 bp, Homo sapien
tgaccagcgccataaatcacggtgg

SEQ ID NO: 1286658 - DNA, 25 bp, Homo sapien
tacacgtgtagcaaagatggcactc

SEQ ID NO: 1286659 - DNA, 25 bp, Homo sapien
tgtaacgattcacactggcagaagt

SEQ ID NO: 1286660 - DNA, 25 bp, Homo sapien
tgagccaactgcaggatgtaacgat

SEQ ID NO: 1286661 - DNA, 25 bp, Homo sapien
tcaaaagagttcttgcagtctccac

SEQ ID NO: 1286662 - DNA, 25 bp, Homo sapien
agtctccacaatactcctgagccaa

SEQ ID NO: 1286663 - DNA, 25 bp, Homo sapien
ttctgatcaagacccaagcccttat

SEQ ID NO: 1286664 - DNA, 25 bp, Homo sapien
ggtgatctcacctaggaggcagtct

SEQ ID NO: 1286665 - DNA, 25 bp, Homo sapien
ccaaatgccctttgcagcgtgggac

SEQ ID NO: 1286666 - DNA, 25 bp, Homo sapien
cccaagaggtaagctgtcaggctcc

SEQ ID NO: 1286667 - DNA, 25 bp, Homo sapien
catcagctgatgatacactcgatca

SEQ ID NO: 1286668 - DNA, 25 bp, Homo sapien
aaagtgtattgatgttggatacagc

SEQ ID NO: 1286669 - DNA, 25 bp, Homo sapien
gcctcattcactttgcagagcaggt

SEQ ID NO: 1286670 - DNA, 25 bp, Homo sapien
tcagctttgtccaaaagtgtattga

SEQ ID NO: 1286671 - DNA, 25 bp, Homo sapien
tcgaagcgggcatatttacagaagc

SEQ ID NO: 1286672 - DNA, 25 bp, Homo sapien
tgcagaggaagggatccttttcatc

SEQ ID NO: 1286673 - DNA, 25 bp, Homo sapien
gaagggatccttttcatcgtagttg

SEQ ID NO: 1286674 - DNA, 25 bp, Homo sapien
tcaatgggatccactgcacagcaag

SEQ ID NO: 1286675 - DNA, 25 bp, Homo sapien
cagattggaggccacaatgggcaac

SEQ ID NO: 1286676 - DNA, 25 bp, Homo sapien
tttgtgacactggtacacattctct

SEQ ID NO: 1286677 - DNA, 25 bp, Homo sapien
tgggcaacggcaggtcaatcttcac

SEQ ID NO: 1286678 - DNA, 25 bp, Homo sapien
acagcgagggcactgcagggtctct

SEQ ID NO: 1286679 - DNA, 25 bp, Homo sapien
tgagcttcagccttacaacctgctg

SEQ ID NO: 1286680 - DNA, 25 bp, Homo sapien
tccattccaggaaccgaaggcagca

SEQ ID NO: 1286681 - DNA, 25 bp, Homo sapien
ggaaccgaaggcagcaactgagctt

SEQ ID NO: 1286682 - DNA, 25 bp, Homo sapien
gcttcagccttacaacctgctgccc

SEQ ID NO: 1286683 - DNA, 25 bp, Homo sapien
tgtaccgcgtgtccactttaatgga

SEQ ID NO: 1286684 - DNA, 25 bp, Homo sapien
ccacgatggcctgcacggttcggtt

SEQ ID NO: 1286685 - DNA, 25 bp, Homo sapien
gagcttcacaacctgctgggtggtg

SEQ ID NO: 1286686 - DNA, 25 bp, Homo sapien
tggtgtgactgccaatgagcttcac

SEQ ID NO: 1286687 - DNA, 25 bp, Homo sapien
tcaagactcgtactgcctttttaaa

SEQ ID NO: 1286688 - DNA, 25 bp, Homo sapien
gtgtaacccactcttcatccacaag

SEQ ID NO: 1286689 - DNA, 25 bp, Homo sapien
catggtattagttcaagactcgtac

SEQ ID NO: 1286690 - DNA, 25 bp, Homo sapien
ccacaagatgaagtttctatttaat

SEQ ID NO: 1286691 - DNA, 25 bp, Homo sapien
aggcagggatcgctctccaggtaat

SEQ ID NO: 1286692 - DNA, 25 bp, Homo sapien
taatagccatcaaactccactaagc

SEQ ID NO: 1286693 - DNA, 25 bp, Homo sapien
gggatcgctctccaggtaatagcca

SEQ ID NO: 1286694 - DNA, 25 bp, Homo sapien
ggtaatagccatcaaactccactaa

SEQ ID NO: 1286695 - DNA, 25 bp, Homo sapien
cttaggaagcactgagtttcacaaa

SEQ ID NO: 1286696 - DNA, 25 bp, Homo sapien
aaaatcatgacaaagccatggctca

SEQ ID NO: 1286697 - DNA, 25 bp, Homo sapien
aggaagaaaccagtcttagcatgaa

SEQ ID NO: 1286698 - DNA, 25 bp, Homo sapien
tgaacacattttcatcttaggaagc

SEQ ID NO: 1286699 - DNA, 25 bp, Homo sapien
tgcccaggctatacagacctttcta

SEQ ID NO: 1286700 - DNA, 25 bp, Homo sapien
ggctatacagacctttctacattac

SEQ ID NO: 1286701 - DNA, 25 bp, Homo sapien
cacagttcattgcaccctcgaactt

SEQ ID NO: 1286702 - DNA, 25 bp, Homo sapien
cagacctttctacattactactcac

SEQ ID NO: 1286703 - DNA, 25 bp, Homo sapien
gtaccttctatttgcaagaccctgg

SEQ ID NO: 1286704 - DNA, 25 bp, Homo sapien
taccttctatttgcaagaccctggc

SEQ ID NO: 1286705 - DNA, 25 bp, Homo sapien
tgacattttgagtaccttctatttg

SEQ ID NO: 1286706 - DNA, 25 bp, Homo sapien
tatgtaagagcctatcaccatgcaa

SEQ ID NO: 1286707 - DNA, 25 bp, Homo sapien
ggcgcttgtcaattcctatgtaaga

SEQ ID NO: 1286708 - DNA, 25 bp, Homo sapien
gggattggaatctcaactaggcaga

SEQ ID NO: 1286709 - DNA, 25 bp, Homo sapien
taggcagattcgctcttctctcagg

SEQ ID NO: 1286710 - DNA, 25 bp, Homo sapien
acagccttctgtgaatactccttca

SEQ ID NO: 1286711 - DNA, 25 bp, Homo sapien
aatatggttttgagtccgcagaatc

SEQ ID NO: 1286712 - DNA, 25 bp, Homo sapien
atggttttgagtccgcagaatctcc

SEQ ID NO: 1286713 - DNA, 25 bp, Homo sapien
agaatatggttttgagtccgcagaa

SEQ ID NO: 1286714 - DNA, 25 bp, Homo sapien
ggcccctctgaccataaagcaactg

SEQ ID NO: 1286715 - DNA, 25 bp, Homo sapien
gacatattacgagtgcttaccaaga

SEQ ID NO: 1286716 - DNA, 25 bp, Homo sapien
tgagctttagtgataggtagtaccc

SEQ ID NO: 1286717 - DNA, 25 bp, Homo sapien
tctgacctgatggaggaagatcatt

SEQ ID NO: 1286718 - DNA, 25 bp, Homo sapien
aactgggcagccttacgaccatagg

SEQ ID NO: 1286719 - DNA, 25 bp, Homo sapien
cagggagaaatatcctagtaggtcc

SEQ ID NO: 1286720 - DNA, 25 bp, Homo sapien
gatggaccacatcagatctagcagg

SEQ ID NO: 1286721 - DNA, 25 bp, Homo sapien
tctctgtttgtggagttttcaggga

SEQ ID NO: 1286722 - DNA, 25 bp, Homo sapien
cacccaacatatcccagagcagaag

SEQ ID NO: 1286723 - DNA, 25 bp, Homo sapien
caagcagcagaaaaccctgaggcac

SEQ ID NO: 1286724 - DNA, 25 bp, Homo sapien
tatgacagctcatgttaccaagcag

SEQ ID NO: 1286725 - DNA, 25 bp, Homo sapien
tcaatcctaccagatgcagcatagt

SEQ ID NO: 1286726 - DNA, 25 bp, Homo sapien
taacaggaaacaacgcaggaactgg

SEQ ID NO: 1286727 - DNA, 25 bp, Homo sapien
ccttatcggcaaatttgttcagctg

SEQ ID NO: 1286728 - DNA, 25 bp, Homo sapien
tgccagcgcaccgaggaagaattgg

SEQ ID NO: 1286729 - DNA, 25 bp, Homo sapien
ggaactggatcagggtttccttatc

SEQ ID NO: 1286730 - DNA, 25 bp, Homo sapien
cagtgcagcgagcaccttgctgccg

SEQ ID NO: 1286731 - DNA, 25 bp, Homo sapien
tgtgttgtggcttgtccagaactgg

SEQ ID NO: 1286732 - DNA, 25 bp, Homo sapien
gaagaagcactggaggatcccgaag

SEQ ID NO: 1286733 - DNA, 25 bp, Homo sapien
tctttttagtggaagacttggactg

SEQ ID NO: 1286734 - DNA, 25 bp, Homo sapien
tattttaactacacaccgaccagag

SEQ ID NO: 1286735 - DNA, 25 bp, Homo sapien
tactgccactacctggaggtcagag

SEQ ID NO: 1286736 - DNA, 25 bp, Homo sapien
tgagacgacctcaaccagactcagg

SEQ ID NO: 1286737 - DNA, 25 bp, Homo sapien
gaggtcagagactcctactttgtgc

SEQ ID NO: 1286738 - DNA, 25 bp, Homo sapien
tgggcggcaatctctgcacaggctt

SEQ ID NO: 1286739 - DNA, 25 bp, Homo sapien
tgatggttcgctgggcggcaatctc

SEQ ID NO: 1286740 - DNA, 25 bp, Homo sapien
ccagttgatggttcgctgggcggca

SEQ ID NO: 1286741 - DNA, 25 bp, Homo sapien
aatctctgcacaggctttcaggtgc

SEQ ID NO: 1286742 - DNA, 25 bp, Homo sapien
ggcaacagcaaaaggtagaccatga

SEQ ID NO: 1286743 - DNA, 25 bp, Homo sapien
cacgcaaggcgctgttttcaggaac

SEQ ID NO: 1286744 - DNA, 25 bp, Homo sapien
tcagactactcaataaggcaacagc

SEQ ID NO: 1286745 - DNA, 25 bp, Homo sapien
gctgagatgtctggtcaacctggga

SEQ ID NO: 1286746 - DNA, 25 bp, Homo sapien
gactaggatgtaagcaaatggcact

SEQ ID NO: 1286747 - DNA, 25 bp, Homo sapien
ctggtaagaagctcgggccactcac

SEQ ID NO: 1286748 - DNA, 25 bp, Homo sapien
ggtgcacaaagagatcagtcctgac

SEQ ID NO: 1286749 - DNA, 25 bp, Homo sapien
aaatggcactggtaagaagctcggg

SEQ ID NO: 1286750 - DNA, 25 bp, Homo sapien
ggaactgctgccaggtgggatgaga

SEQ ID NO: 1286751 - DNA, 25 bp, Homo sapien
gaggaactgctgccaggtgggatga

SEQ ID NO: 1286752 - DNA, 25 bp, Homo sapien
ctcacagtggaggaactgctgccag

SEQ ID NO: 1286753 - DNA, 25 bp, Homo sapien
cagtggaggaactgctgccaggtgg

SEQ ID NO: 1286754 - DNA, 25 bp, Homo sapien
ggctgtaaccacacttgcccggagg

SEQ ID NO: 1286755 - DNA, 25 bp, Homo sapien
tgcaaatcccggagctggcggtact

SEQ ID NO: 1286756 - DNA, 25 bp, Homo sapien
gcttcttgatcccacgcacgtgaga

SEQ ID NO: 1286757 - DNA, 25 bp, Homo sapien
tgtgtcatattgcaaggcggagcct

SEQ ID NO: 1286758 - DNA, 25 bp, Homo sapien
cacacagaatcagaaggtaaagtat

SEQ ID NO: 1286759 - DNA, 25 bp, Homo sapien
cacacagtatgttccagaagggcaa

SEQ ID NO: 1286760 - DNA, 25 bp, Homo sapien
ttgcccattatcagcacgtgaggcg

SEQ ID NO: 1286761 - DNA, 25 bp, Homo sapien
ggcttgtttgatacacatctcccac

SEQ ID NO: 1286762 - DNA, 25 bp, Homo sapien
ccacgagtggtcaaagacaggaggt

SEQ ID NO: 1286763 - DNA, 25 bp, Homo sapien
taaggaagcctcagtaccatttctg

SEQ ID NO: 1286764 - DNA, 25 bp, Homo sapien
tcgagaattggtgtcagtaatcttt

SEQ ID NO: 1286765 - DNA, 25 bp, Homo sapien
tagaagctgagtataggcctcaaac

SEQ ID NO: 1286766 - DNA, 25 bp, Homo sapien
ggagtaaggatctctgacttctatg

SEQ ID NO: 1286767 - DNA, 25 bp, Homo sapien
aagaaaaagggagtaaggatctctg

SEQ ID NO: 1286768 - DNA, 25 bp, Homo sapien
acttctatgagatgtattctatccc

SEQ ID NO: 1286769 - DNA, 25 bp, Homo sapien
cattgggttgattgtactctgccta

SEQ ID NO: 1286770 - DNA, 25 bp, Homo sapien
tgttataggtgacaaagctagagtc

SEQ ID NO: 1286771 - DNA, 25 bp, Homo sapien
taggtgacaaagctagagtcaagca

SEQ ID NO: 1286772 - DNA, 25 bp, Homo sapien
cgtgtagggtgttataggtgacaaa

SEQ ID NO: 1286773 - DNA, 25 bp, Homo sapien
gcagggctgcgtgtagggtgttata

SEQ ID NO: 1286774 - DNA, 25 bp, Homo sapien
tccagcagtgatttgagcacgtgca

SEQ ID NO: 1286775 - DNA, 25 bp, Homo sapien
caggctcctcgtcattctgttggct

SEQ ID NO: 1286776 - DNA, 25 bp, Homo sapien
agcacgtgcaggcagtagtccacag

SEQ ID NO: 1286777 - DNA, 25 bp, Homo sapien
catactggcggagaaagaatgggct

SEQ ID NO: 1286778 - DNA, 25 bp, Homo sapien
tcccctcagggaacaatggctttat

SEQ ID NO: 1286779 - DNA, 25 bp, Homo sapien
gattgttaccaaagaccagagcttg

SEQ ID NO: 1286780 - DNA, 25 bp, Homo sapien
gagagccctgctcttcaataatgga

SEQ ID NO: 1286781 - DNA, 25 bp, Homo sapien
tgtgctggccctagcactacccaga

SEQ ID NO: 1286782 - DNA, 25 bp, Homo sapien
tccccaaacccatgaacccaaagca

SEQ ID NO: 1286783 - DNA, 25 bp, Homo sapien
tttggtgcgggacatgaagacactc

SEQ ID NO: 1286784 - DNA, 25 bp, Homo sapien
gatggacttcattcagggcgctgcg

SEQ ID NO: 1286785 - DNA, 25 bp, Homo sapien
ctcacatatggaagacttggatcca

SEQ ID NO: 1286786 - DNA, 25 bp, Homo sapien
ggagtctcattactaccagatggac

SEQ ID NO: 1286787 - DNA, 25 bp, Homo sapien
agcaggttgtctagggcccccttgt

SEQ ID NO: 1286788 - DNA, 25 bp, Homo sapien
aactcagcaataagctgggagagca

SEQ ID NO: 1286789 - DNA, 25 bp, Homo sapien
gagagcaggttgtctagggccccct

SEQ ID NO: 1286790 - DNA, 25 bp, Homo sapien
ctttttatccatacccaactcagca

SEQ ID NO: 1286791 - DNA, 25 bp, Homo sapien
gccaacgtttcgtaattgaggcagg

SEQ ID NO: 1286792 - DNA, 25 bp, Homo sapien
caccgccaacgtttcgtaattgagg

SEQ ID NO: 1286793 - DNA, 25 bp, Homo sapien
ccgccaacgtttcgtaattgaggca

SEQ ID NO: 1286794 - DNA, 25 bp, Homo sapien
gacaccgccaacgtttcgtaattga

SEQ ID NO: 1286795 - DNA, 25 bp, Homo sapien
atgccacactgtcctactggaccca

SEQ ID NO: 1286796 - DNA, 25 bp, Homo sapien
tgccacactgtcctactggacccat

SEQ ID NO: 1286797 - DNA, 25 bp, Homo sapien
ttcctaatataatgttctgtttcaa

SEQ ID NO: 1286798 - DNA, 25 bp, Homo sapien
atcttcctaatataatgttctgttt

SEQ ID NO: 1286799 - DNA, 25 bp, Homo sapien
tagcctaggagcctataaggaaaac

SEQ ID NO: 1286800 - DNA, 25 bp, Homo sapien
tcagatgatcaggtatgtgagaagc

SEQ ID NO: 1286801 - DNA, 25 bp, Homo sapien
gaatagctgctgagaatatagtcca

SEQ ID NO: 1286802 - DNA, 25 bp, Homo sapien
tctatgtgcgtttccagctgaccca

SEQ ID NO: 1286803 - DNA, 25 bp, Homo sapien
tttttacactaatgtaacaactgct

SEQ ID NO: 1286804 - DNA, 25 bp, Homo sapien
atttttacactaatgtaacaactgc

SEQ ID NO: 1286805 - DNA, 25 bp, Homo sapien
gaacaaggagcgcttctaggacacc

SEQ ID NO: 1286806 - DNA, 25 bp, Homo sapien
ccactggtatttctagccatatgca

SEQ ID NO: 1286807 - DNA, 25 bp, Homo sapien
tggattaggattttatagaccactt

SEQ ID NO: 1286808 - DNA, 25 bp, Homo sapien
aatttcaaaatgctccaccactggt

SEQ ID NO: 1286809 - DNA, 25 bp, Homo sapien
aatgttgagcctccagcggtgccat

SEQ ID NO: 1286810 - DNA, 25 bp, Homo sapien
taaagaggatgccatatattgagtg

SEQ ID NO: 1286811 - DNA, 25 bp, Homo sapien
gcctccagcggtgccatttgtaaag

SEQ ID NO: 1286812 - DNA, 25 bp, Homo sapien
tattgagtgtacagatattgatgaa

SEQ ID NO: 1286813 - DNA, 25 bp, Homo sapien
gatatttagaggagccttaagagaa

SEQ ID NO: 1286814 - DNA, 25 bp, Homo sapien
ctgtttcagaagtttacacctttat

SEQ ID NO: 1286815 - DNA, 25 bp, Homo sapien
aaagatttgagtaaggaagacatgt

SEQ ID NO: 1286816 - DNA, 25 bp, Homo sapien
taatataattcgaagacaaagacag

SEQ ID NO: 1286817 - DNA, 25 bp, Homo sapien
cctcctggtgcccagtggtggtgct

SEQ ID NO: 1286818 - DNA, 25 bp, Homo sapien
tgctgatggctccagtgcttgagct

SEQ ID NO: 1286819 - DNA, 25 bp, Homo sapien
ttctccctcggagccatctccctcc

SEQ ID NO: 1286820 - DNA, 25 bp, Homo sapien
tgctagtgtggacatctccttcagt

SEQ ID NO: 1286821 - DNA, 25 bp, Homo sapien
ctcagctgtagcatcgccataagca

SEQ ID NO: 1286822 - DNA, 25 bp, Homo sapien
atgcccctcagctgtagcatcgcca

SEQ ID NO: 1286823 - DNA, 25 bp, Homo sapien
gcccctcagctgtagcatcgccata

SEQ ID NO: 1286824 - DNA, 25 bp, Homo sapien
ccctcagctgtagcatcgccataag

SEQ ID NO: 1286825 - DNA, 25 bp, Homo sapien
agacaggacccccgccatggcacat

SEQ ID NO: 1286826 - DNA, 25 bp, Homo sapien
caggacccccgccatggcacattac

SEQ ID NO: 1286827 - DNA, 25 bp, Homo sapien
caaggagacaggacccccgccatgg

SEQ ID NO: 1286828 - DNA, 25 bp, Homo sapien
cctctgcccaaggagacaggacccc

SEQ ID NO: 1286829 - DNA, 25 bp, Homo sapien
actgtgctcgccagccactgagtcc

SEQ ID NO: 1286830 - DNA, 25 bp, Homo sapien
aaccatctgtcgctgctgtactgcc

SEQ ID NO: 1286831 - DNA, 25 bp, Homo sapien
gagaggtccgaagggtagaaccatc

SEQ ID NO: 1286832 - DNA, 25 bp, Homo sapien
tgctgtactgccctcgtcgtctgag

SEQ ID NO: 1286833 - DNA, 25 bp, Homo sapien
tgtcagagagggttcctgcgtccag

SEQ ID NO: 1286834 - DNA, 25 bp, Homo sapien
tggtgtcagagagggttcctgcgtc

SEQ ID NO: 1286835 - DNA, 25 bp, Homo sapien
cagagagggttcctgcgtccagaga

SEQ ID NO: 1286836 - DNA, 25 bp, Homo sapien
tcagagagggttcctgcgtccagag

SEQ ID NO: 1286837 - DNA, 25 bp, Homo sapien
ggatatcagtaactgccaaaccctc

SEQ ID NO: 1286838 - DNA, 25 bp, Homo sapien
ccatatctggggacaaactaagtca

SEQ ID NO: 1286839 - DNA, 25 bp, Homo sapien
actaagtcagctggatatcagtaac

SEQ ID NO: 1286840 - DNA, 25 bp, Homo sapien
gaacagctctcacccagatcaacct

SEQ ID NO: 1286841 - DNA, 25 bp, Homo sapien
gagaggggttgccattgttgacatt

SEQ ID NO: 1286842 - DNA, 25 bp, Homo sapien
tcagggcaatggctagttcaaccat

SEQ ID NO: 1286843 - DNA, 25 bp, Homo sapien
ggctagttcaaccatggtctcgtca

SEQ ID NO: 1286844 - DNA, 25 bp, Homo sapien
ccatggtctcgtcatctgcatcagg

SEQ ID NO: 1286845 - DNA, 25 bp, Homo sapien
cctggctttcctgacggatgtgacc

SEQ ID NO: 1286846 - DNA, 25 bp, Homo sapien
caaaatctccatggtccacctcact

SEQ ID NO: 1286847 - DNA, 25 bp, Homo sapien
accaccattcgggatccctgatgac

SEQ ID NO: 1286848 - DNA, 25 bp, Homo sapien
atccctgatgactgcattttctcat

SEQ ID NO: 1286849 - DNA, 25 bp, Homo sapien
tcaaagaaaccccagtcacctgaag

SEQ ID NO: 1286850 - DNA, 25 bp, Homo sapien
gtcaaagaaaccccagtcacctgaa

SEQ ID NO: 1286851 - DNA, 25 bp, Homo sapien
gagcctaaacccagacctcatatta

SEQ ID NO: 1286852 - DNA, 25 bp, Homo sapien
tcccaaatacaggcttgagcctaaa

SEQ ID NO: 1286853 - DNA, 25 bp, Homo sapien
agcctaaacccagacctcatattac

SEQ ID NO: 1286854 - DNA, 25 bp, Homo sapien
ctcccaaatacaggcttgagcctaa

SEQ ID NO: 1286855 - DNA, 25 bp, Homo sapien
gaagagggtaaagtcacatgtctcc

SEQ ID NO: 1286856 - DNA, 25 bp, Homo sapien
tgggccttaggactcgaattagagc

SEQ ID NO: 1286857 - DNA, 25 bp, Homo sapien
acatgtctccgtttgttcctgggcc

SEQ ID NO: 1286858 - DNA, 25 bp, Homo sapien
ttgtttacaagagaagctcacagca

SEQ ID NO: 1286859 - DNA, 25 bp, Homo sapien
cagtagccatggatgatgtccacca

SEQ ID NO: 1286860 - DNA, 25 bp, Homo sapien
tccagctcacaggtacagtagccat

SEQ ID NO: 1286861 - DNA, 25 bp, Homo sapien
gtccaccagagcattgacagtagct

SEQ ID NO: 1286862 - DNA, 25 bp, Homo sapien
ggatgctgtgttaatacaatccagc

SEQ ID NO: 1286863 - DNA, 25 bp, Homo sapien
ctgggtgatgaaactacagcaatct

SEQ ID NO: 1286864 - DNA, 25 bp, Homo sapien
gtttccagaagtggttcacaagctg

SEQ ID NO: 1286865 - DNA, 25 bp, Homo sapien
cttgggtttggatgcatggagtttc

SEQ ID NO: 1286866 - DNA, 25 bp, Homo sapien
gcaggtgccaagaaggcattcttgg

SEQ ID NO: 1286867 - DNA, 25 bp, Homo sapien
gagaaagaaaattatcaacgatggt

SEQ ID NO: 1286868 - DNA, 25 bp, Homo sapien
ggtaaatctgagatggaatttaatt

SEQ ID NO: 1286869 - DNA, 25 bp, Homo sapien
aattatcaacgatggtaaatctgag

SEQ ID NO: 1286870 - DNA, 25 bp, Homo sapien
gaaaattatcaacgatggtaaatct

SEQ ID NO: 1286871 - DNA, 25 bp, Homo sapien
caatcaatatgccaactatccctag

SEQ ID NO: 1286872 - DNA, 25 bp, Homo sapien
agtggggccccaatcaatatgccaa

SEQ ID NO: 1286873 - DNA, 25 bp, Homo sapien
tatgccaactatccctagactccag

SEQ ID NO: 1286874 - DNA, 25 bp, Homo sapien
gactccagcaggcacatctaggaaa

SEQ ID NO: 1286875 - DNA, 25 bp, Homo sapien
gagctgtgatcactagcctctggaa

SEQ ID NO: 1286876 - DNA, 25 bp, Homo sapien
ctttgactccgtaaagtggacaagg

SEQ ID NO: 1286877 - DNA, 25 bp, Homo sapien
cttgccctctttgctagatgtgttg

SEQ ID NO: 1286878 - DNA, 25 bp, Homo sapien
gcctctggaacacctcagggtccaa

SEQ ID NO: 1286879 - DNA, 25 bp, Homo sapien
aaagtggccagctcctgagcagcat

SEQ ID NO: 1286880 - DNA, 25 bp, Homo sapien
gaaggctcttggactgctgctggac

SEQ ID NO: 1286881 - DNA, 25 bp, Homo sapien
tgctggcagggacaacagcaaagtg

SEQ ID NO: 1286882 - DNA, 25 bp, Homo sapien
taggccgagcggctggtgtgcaggc

SEQ ID NO: 1286883 - DNA, 25 bp, Homo sapien
cctgcctcttcagaaagcttccatg

SEQ ID NO: 1286884 - DNA, 25 bp, Homo sapien
ttcctgcctcttcagaaagcttcca

SEQ ID NO: 1286885 - DNA, 25 bp, Homo sapien
tgcctcttcagaaagcttccatgtg

SEQ ID NO: 1286886 - DNA, 25 bp, Homo sapien
cctcttcagaaagcttccatgtgct

SEQ ID NO: 1286887 - DNA, 25 bp, Homo sapien
tccagggcttctaaagaactcacaa

SEQ ID NO: 1286888 - DNA, 25 bp, Homo sapien
cttctcgatgattgggccaacggca

SEQ ID NO: 1286889 - DNA, 25 bp, Homo sapien
tgattgggccaacggcaaagcagct

SEQ ID NO: 1286890 - DNA, 25 bp, Homo sapien
tttccagggcttctaaagaactcac

SEQ ID NO: 1286891 - DNA, 25 bp, Homo sapien
tccagcttggttagggactcagttt

SEQ ID NO: 1286892 - DNA, 25 bp, Homo sapien
gtccagcttggttagggactcagtt

SEQ ID NO: 1286893 - DNA, 25 bp, Homo sapien
ggtccagcttggttagggactcagt

SEQ ID NO: 1286894 - DNA, 25 bp, Homo sapien
cggtccagcttggttagggactcag

SEQ ID NO: 1286895 - DNA, 25 bp, Homo sapien
tccaggacagttccactggtcgtag

SEQ ID NO: 1286896 - DNA, 25 bp, Homo sapien
cttagtcttgccataaatttttaca

SEQ ID NO: 1286897 - DNA, 25 bp, Homo sapien
gggcagctgagtcgctatctccagt

SEQ ID NO: 1286898 - DNA, 25 bp, Homo sapien
ctccagtgccgttgctctggttcag

SEQ ID NO: 1286899 - DNA, 25 bp, Homo sapien
ccatggaccaaaagccgattacgtc

SEQ ID NO: 1286900 - DNA, 25 bp, Homo sapien
gcagcactttaatcgtgtatatatg

SEQ ID NO: 1286901 - DNA, 25 bp, Homo sapien
gctgaatacatgtggtaaaagttcc

SEQ ID NO: 1286902 - DNA, 25 bp, Homo sapien
aagccgattacgtctcctactcaga

SEQ ID NO: 1286903 - DNA, 25 bp, Homo sapien
gagtccctaaccatcactgcaaggg

SEQ ID NO: 1286904 - DNA, 25 bp, Homo sapien
agtccctaaccatcactgcaagggt

SEQ ID NO: 1286905 - DNA, 25 bp, Homo sapien
agagtccctaaccatcactgcaagg

SEQ ID NO: 1286906 - DNA, 25 bp, Homo sapien
agagtattgtatcccctacccctca

SEQ ID NO: 1286907 - DNA, 25 bp, Homo sapien
gagtattgtatcccctacccctcac

SEQ ID NO: 1286908 - DNA, 25 bp, Homo sapien
tcattcacactaacagcaactatat

SEQ ID NO: 1286909 - DNA, 25 bp, Homo sapien
caaagtacagatcatgatcattcac

SEQ ID NO: 1286910 - DNA, 25 bp, Homo sapien
cagatcatgatcattcacactaaca

SEQ ID NO: 1286911 - DNA, 25 bp, Homo sapien
tgatcattcacactaacagcaacta

SEQ ID NO: 1286912 - DNA, 25 bp, Homo sapien
caatttcgcagtcacaatgaggaca

SEQ ID NO: 1286913 - DNA, 25 bp, Homo sapien
cagaagtagccccattagtgaggtg

SEQ ID NO: 1286914 - DNA, 25 bp, Homo sapien
tatctttactgctaccatgctccgg

SEQ ID NO: 1286915 - DNA, 25 bp, Homo sapien
tcccagaatgttggacagccacagg

SEQ ID NO: 1286916 - DNA, 25 bp, Homo sapien
tgagtcccaatctggatccgcatgc

SEQ ID NO: 1286917 - DNA, 25 bp, Homo sapien
gggaagtcaaaccagcgtgagcgac

SEQ ID NO: 1286918 - DNA, 25 bp, Homo sapien
taatctcaatggtgaagcctccggg

SEQ ID NO: 1286919 - DNA, 25 bp, Homo sapien
gcccgttctattgcttgagtcccaa

SEQ ID NO: 1286920 - DNA, 25 bp, Homo sapien
ttatctgttgtgcattatagacctg

SEQ ID NO: 1286921 - DNA, 25 bp, Homo sapien
gacctgtaggaggtcgttaccacca

SEQ ID NO: 1286922 - DNA, 25 bp, Homo sapien
catgccagtggaattcagccggtgt

SEQ ID NO: 1286923 - DNA, 25 bp, Homo sapien
aaagtcacctggctagacgtgcggg

SEQ ID NO: 1286924 - DNA, 25 bp, Homo sapien
tccacgttggccatgtaaatgcgca

SEQ ID NO: 1286925 - DNA, 25 bp, Homo sapien
ggccgtgtgcctaatagcaaccatg

SEQ ID NO: 1286926 - DNA, 25 bp, Homo sapien
gaatcattgttgtccgctgctgctc

SEQ ID NO: 1286927 - DNA, 25 bp, Homo sapien
ctttcgaacaggcttcatgatgctg

SEQ ID NO: 1286928 - DNA, 25 bp, Homo sapien
ggtttcaccataactaccagcggca

SEQ ID NO: 1286929 - DNA, 25 bp, Homo sapien
agcggcacccctgtagtttgctgga

SEQ ID NO: 1286930 - DNA, 25 bp, Homo sapien
accaagccagggtggttcatcacct

SEQ ID NO: 1286931 - DNA, 25 bp, Homo sapien
tttagcaggaagagtcttaatctcc

SEQ ID NO: 1286932 - DNA, 25 bp, Homo sapien
caggagaagtcttactgccaccatt

SEQ ID NO: 1286933 - DNA, 25 bp, Homo sapien
aaagagcaggagaagtcttactgcc

SEQ ID NO: 1286934 - DNA, 25 bp, Homo sapien
gagcaggagaagtcttactgccacc

SEQ ID NO: 1286935 - DNA, 25 bp, Homo sapien
agaagtcttactgccaccattggaa

SEQ ID NO: 1286936 - DNA, 25 bp, Homo sapien
gccttgacaatagctgaagaacaac

SEQ ID NO: 1286937 - DNA, 25 bp, Homo sapien
gcaacacctccagggttgtcctgct

SEQ ID NO: 1286938 - DNA, 25 bp, Homo sapien
ctgatggtggctgcgaatgatttgc

SEQ ID NO: 1286939 - DNA, 25 bp, Homo sapien
ggctgcgaatgatttgccttgacaa

SEQ ID NO: 1286940 - DNA, 25 bp, Homo sapien
cacgtgggagtagtacacggacaca

SEQ ID NO: 1286941 - DNA, 25 bp, Homo sapien
caccgcccgccacctggctgttact

SEQ ID NO: 1286942 - DNA, 25 bp, Homo sapien
tgggagtagtacacggacacaccac

SEQ ID NO: 1286943 - DNA, 25 bp, Homo sapien
tgcaacacgtgggagtagtacacgg

SEQ ID NO: 1286944 - DNA, 25 bp, Homo sapien
tttgagcttggcaggagaaaataga

SEQ ID NO: 1286945 - DNA, 25 bp, Homo sapien
tcaggtcctcatgattgatttccaa

SEQ ID NO: 1286946 - DNA, 25 bp, Homo sapien
cattagtgacatagaagggtccctg

SEQ ID NO: 1286947 - DNA, 25 bp, Homo sapien
tgagtatagatgtacccagccgaag

SEQ ID NO: 1286948 - DNA, 25 bp, Homo sapien
taaccacacggctttgatgatgaag

SEQ ID NO: 1286949 - DNA, 25 bp, Homo sapien
cggtgacaattgctaactcggtctg

SEQ ID NO: 1286950 - DNA, 25 bp, Homo sapien
cttaacaaagtctgcggtgacaatt

SEQ ID NO: 1286951 - DNA, 25 bp, Homo sapien
tgtgaaccaggtaaccacacggctt

SEQ ID NO: 1286952 - DNA, 25 bp, Homo sapien
caagtgatccgaaacagagcctgag

SEQ ID NO: 1286953 - DNA, 25 bp, Homo sapien
ctgagggtgcaaaaccaagtgatcc

SEQ ID NO: 1286954 - DNA, 25 bp, Homo sapien
tactaaaggtgagcacatgacagtc

SEQ ID NO: 1286955 - DNA, 25 bp, Homo sapien
cagagcctgagctactaaaggtgag

SEQ ID NO: 1286956 - DNA, 25 bp, Homo sapien
ctttagcccacaaaccgccaagtag

SEQ ID NO: 1286957 - DNA, 25 bp, Homo sapien
tgtgaggctcaacacagtaaaagga

SEQ ID NO: 1286958 - DNA, 25 bp, Homo sapien
caaaccgccaagtagtcttccttgc

SEQ ID NO: 1286959 - DNA, 25 bp, Homo sapien
gaagccaagcgggtcagagttaact

SEQ ID NO: 1286960 - DNA, 25 bp, Homo sapien
ctgccggatggtctggccctggtct

SEQ ID NO: 1286961 - DNA, 25 bp, Homo sapien
aattcatccgcacattctcaaaggc

SEQ ID NO: 1286962 - DNA, 25 bp, Homo sapien
agcactgatcagctgccggatggtc

SEQ ID NO: 1286963 - DNA, 25 bp, Homo sapien
gctgacagccaaatgttggcggcgc

SEQ ID NO: 1286964 - DNA, 25 bp, Homo sapien
tttgaagccaaacctcgtatgctga

SEQ ID NO: 1286965 - DNA, 25 bp, Homo sapien
tctgggcatgtcatgatgtcttaga

SEQ ID NO: 1286966 - DNA, 25 bp, Homo sapien
tataggtgcatccttggccaattct

SEQ ID NO: 1286967 - DNA, 25 bp, Homo sapien
tggatggccaagcatcaactgctct

SEQ ID NO: 1286968 - DNA, 25 bp, Homo sapien
taagcatgtctaacacgagaggagc

SEQ ID NO: 1286969 - DNA, 25 bp, Homo sapien
catcagctggtctgtcatctccact

SEQ ID NO: 1286970 - DNA, 25 bp, Homo sapien
gaagttggtctgaatggcatccata

SEQ ID NO: 1286971 - DNA, 25 bp, Homo sapien
tcccgacggctgaagcttgctggaa

SEQ ID NO: 1286972 - DNA, 25 bp, Homo sapien
catgccactgctaggagttctcttc

SEQ ID NO: 1286973 - DNA, 25 bp, Homo sapien
ggcatgacgcactagactctctgaa

SEQ ID NO: 1286974 - DNA, 25 bp, Homo sapien
tggttctgtaattcctcccggcagc

SEQ ID NO: 1286975 - DNA, 25 bp, Homo sapien
gaaatgccgactccttcatggtaga

SEQ ID NO: 1286976 - DNA, 25 bp, Homo sapien
gtttggcttcagtaatcccgtgtca

SEQ ID NO: 1286977 - DNA, 25 bp, Homo sapien
gaaatactgcctgagatctccgagg

SEQ ID NO: 1286978 - DNA, 25 bp, Homo sapien
taggccacaactgtgcagatcatcg

SEQ ID NO: 1286979 - DNA, 25 bp, Homo sapien
gacagaaaatgtcagagtccctaag

SEQ ID NO: 1286980 - DNA, 25 bp, Homo sapien
caccttagcacacactgtgcagaca

SEQ ID NO: 1286981 - DNA, 25 bp, Homo sapien
cttggcataggaaatctcatgatcc

SEQ ID NO: 1286982 - DNA, 25 bp, Homo sapien
gaaggatccatacttggcataggaa

SEQ ID NO: 1286983 - DNA, 25 bp, Homo sapien
agtcacagaagaaggatccatactt

SEQ ID NO: 1286984 - DNA, 25 bp, Homo sapien
tgtgtgatcgtaaaagtgcagagtt

SEQ ID NO: 1286985 - DNA, 25 bp, Homo sapien
ctgtgtgatcgtaaaagtgcagagt

SEQ ID NO: 1286986 - DNA, 25 bp, Homo sapien
taagacatgatatggcatgtgcact

SEQ ID NO: 1286987 - DNA, 25 bp, Homo sapien
tgagtctacttcaatggcccgctct

SEQ ID NO: 1286988 - DNA, 25 bp, Homo sapien
gatgacttgggccttgaccattact

SEQ ID NO: 1286989 - DNA, 25 bp, Homo sapien
gcattcgtgacatcagccaagtaag

SEQ ID NO: 1286990 - DNA, 25 bp, Homo sapien
actacattcttctgtgacaggtatt

SEQ ID NO: 1286991 - DNA, 25 bp, Homo sapien
tcaactacattcttctgtgacaggt

SEQ ID NO: 1286992 - DNA, 25 bp, Homo sapien
gggagtcagggtgcccagaagaaca

SEQ ID NO: 1286993 - DNA, 25 bp, Homo sapien
gtggccatcacaaccataagttcag

SEQ ID NO: 1286994 - DNA, 25 bp, Homo sapien
tctgctcagccaatccacagcagca

SEQ ID NO: 1286995 - DNA, 25 bp, Homo sapien
tgaccagcaccttgacctgcactgg

SEQ ID NO: 1286996 - DNA, 25 bp, Homo sapien
tatgtggtcagtaactgcagcagct

SEQ ID NO: 1286997 - DNA, 25 bp, Homo sapien
ccacacaggccagttgtgccaggga

SEQ ID NO: 1286998 - DNA, 25 bp, Homo sapien
caggctcgggttagggctcttctca

SEQ ID NO: 1286999 - DNA, 25 bp, Homo sapien
gctgccggttctcctgaattacatc

SEQ ID NO: 1287000 - DNA, 25 bp, Homo sapien
aaactcggttacagaatttagcaga

SEQ ID NO: 1287001 - DNA, 25 bp, Homo sapien
tcaaaactcggttacagaatttagc

SEQ ID NO: 1287002 - DNA, 25 bp, Homo sapien
tagcagagaggttctcattggctgt

SEQ ID NO: 1287003 - DNA, 25 bp, Homo sapien
catcatgatctgtacaagttctcca

SEQ ID NO: 1287004 - DNA, 25 bp, Homo sapien
tgtcagagaaaaactcctccatagc

SEQ ID NO: 1287005 - DNA, 25 bp, Homo sapien
tgcttttccaagtactggagacatt

SEQ ID NO: 1287006 - DNA, 25 bp, Homo sapien
caagtactggagacattcctccagg

SEQ ID NO: 1287007 - DNA, 25 bp, Homo sapien
ttacgagcctggctactttccagct

SEQ ID NO: 1287008 - DNA, 25 bp, Homo sapien
cagggcccaagatgcgttccaggga

SEQ ID NO: 1287009 - DNA, 25 bp, Homo sapien
gccaagaactcatcagactcagcag

SEQ ID NO: 1287010 - DNA, 25 bp, Homo sapien
cagggagttgctactgatctcggca

SEQ ID NO: 1287011 - DNA, 25 bp, Homo sapien
gattggccagaatgttgtaacaacc

SEQ ID NO: 1287012 - DNA, 25 bp, Homo sapien
aagaagaggtagcagtgtccgaatt

SEQ ID NO: 1287013 - DNA, 25 bp, Homo sapien
agaagaggtagcagtgtccgaatta

SEQ ID NO: 1287014 - DNA, 25 bp, Homo sapien
gaagaggtagcagtgtccgaattac

SEQ ID NO: 1287015 - DNA, 25 bp, Homo sapien
gtggtgggttcatctcatctgacca

SEQ ID NO: 1287016 - DNA, 25 bp, Homo sapien
acaataagatctccagtcaacctga

SEQ ID NO: 1287017 - DNA, 25 bp, Homo sapien
caataagatctccagtcaacctgac

SEQ ID NO: 1287018 - DNA, 25 bp, Homo sapien
gaggagggtatgcttcagggaagca

SEQ ID NO: 1287019 - DNA, 25 bp, Homo sapien
ctgcactaatataactctctgaagg

SEQ ID NO: 1287020 - DNA, 25 bp, Homo sapien
gcagcctgcactgcactaatataac

SEQ ID NO: 1287021 - DNA, 25 bp, Homo sapien
agtgagaggagggtatgcttcaggg

SEQ ID NO: 1287022 - DNA, 25 bp, Homo sapien
tctgcactgacgatggcaaattctg

SEQ ID NO: 1287023 - DNA, 25 bp, Homo sapien
gactcacacacagtctgcactgacg

SEQ ID NO: 1287024 - DNA, 25 bp, Homo sapien
tgttgttccaggactcacacacagt

SEQ ID NO: 1287025 - DNA, 25 bp, Homo sapien
cattggtattgatgttgttccagga

SEQ ID NO: 1287026 - DNA, 25 bp, Homo sapien
tgccttgcacctgctagagccaata

SEQ ID NO: 1287027 - DNA, 25 bp, Homo sapien
tccctcttcattaaagttttgcagc

SEQ ID NO: 1287028 - DNA, 25 bp, Homo sapien
cattaaagttttgcagcaaataggc

SEQ ID NO: 1287029 - DNA, 25 bp, Homo sapien
gagccaatagccaaaacagcagcaa

SEQ ID NO: 1287030 - DNA, 25 bp, Homo sapien
agatcgcggcatcaagggtgtagat

SEQ ID NO: 1287031 - DNA, 25 bp, Homo sapien
taggttcttggtaatctcagacgac

SEQ ID NO: 1287032 - DNA, 25 bp, Homo sapien
gagacctggacctttgagatcgcgg

SEQ ID NO: 1287033 - DNA, 25 bp, Homo sapien
tatgaggatcagtctcagcagccat

SEQ ID NO: 1287034 - DNA, 25 bp, Homo sapien
ctgcaagatggtggtacagtcgata

SEQ ID NO: 1287035 - DNA, 25 bp, Homo sapien
caagatggtggtacagtcgatacta

SEQ ID NO: 1287036 - DNA, 25 bp, Homo sapien
ggtggtacagtcgatactacagaag

SEQ ID NO: 1287037 - DNA, 25 bp, Homo sapien
cagtcgatactacagaaggatgaga

SEQ ID NO: 1287038 - DNA, 25 bp, Homo sapien
tggtggatgccagttctagaagcga

SEQ ID NO: 1287039 - DNA, 25 bp, Homo sapien
tgtcgagcgaagtattcctctacta

SEQ ID NO: 1287040 - DNA, 25 bp, Homo sapien
tcactgagctacacttagtggtgga

SEQ ID NO: 1287041 - DNA, 25 bp, Homo sapien
tagaagcgagctagcatgctcagcc

SEQ ID NO: 1287042 - DNA, 25 bp, Homo sapien
gatggtggtaaaattcctaggatcc

SEQ ID NO: 1287043 - DNA, 25 bp, Homo sapien
cgagaagaccatcgcagagtgtgca

SEQ ID NO: 1287044 - DNA, 25 bp, Homo sapien
gtcacattcgctcatctcaggtgag

SEQ ID NO: 1287045 - DNA, 25 bp, Homo sapien
tccagttgacataggagctgatccg

SEQ ID NO: 1287046 - DNA, 25 bp, Homo sapien
agcataaagctcatcatacttgaca

SEQ ID NO: 1287047 - DNA, 25 bp, Homo sapien
taactgtatcaagctgggacccagc

SEQ ID NO: 1287048 - DNA, 25 bp, Homo sapien
ttcctttctcctaactgtatcaagc

SEQ ID NO: 1287049 - DNA, 25 bp, Homo sapien
taaagctcatcatacttgacaagct

SEQ ID NO: 1287050 - DNA, 25 bp, Homo sapien
gaatcaagtcggttcaaatcatcct

SEQ ID NO: 1287051 - DNA, 25 bp, Homo sapien
tagaatctggggtgtgggacagcat

SEQ ID NO: 1287052 - DNA, 25 bp, Homo sapien
gtagaatctggggtgtgggacagca

SEQ ID NO: 1287053 - DNA, 25 bp, Homo sapien
cacagaatcaagtcggttcaaatca

SEQ ID NO: 1287054 - DNA, 25 bp, Homo sapien
tcaaatgatctgcccgcctctgcct

SEQ ID NO: 1287055 - DNA, 25 bp, Homo sapien
caagcctggctaaatgttgtttgta

SEQ ID NO: 1287056 - DNA, 25 bp, Homo sapien
accaagcctggctaaatgttgtttg

SEQ ID NO: 1287057 - DNA, 25 bp, Homo sapien
ttttttcagtagagatggggtttca

SEQ ID NO: 1287058 - DNA, 25 bp, Homo sapien
ttctttgaatccatgatagagagga

SEQ ID NO: 1287059 - DNA, 25 bp, Homo sapien
atccatgatagagaggagtggttgc

SEQ ID NO: 1287060 - DNA, 25 bp, Homo sapien
aatgcttagaccagttttcttctac

SEQ ID NO: 1287061 - DNA, 25 bp, Homo sapien
gagtggttgcccggcggctgttgct

SEQ ID NO: 1287062 - DNA, 25 bp, Homo sapien
gataagcggcacgaagcgcatctga

SEQ ID NO: 1287063 - DNA, 25 bp, Homo sapien
cgccggcctgtctcggtgaaattgt

SEQ ID NO: 1287064 - DNA, 25 bp, Homo sapien
aaaaagcgacaatatggcccgccgg

SEQ ID NO: 1287065 - DNA, 25 bp, Homo sapien
tgttgacgctcaactcctggatgat

SEQ ID NO: 1287066 - DNA, 25 bp, Homo sapien
tacaagggccaagggccctcagaaa

SEQ ID NO: 1287067 - DNA, 25 bp, Homo sapien
ctttgagggtgaatgtacaagggcc

SEQ ID NO: 1287068 - DNA, 25 bp, Homo sapien
actttaaggcattctgggacgtcag

SEQ ID NO: 1287069 - DNA, 25 bp, Homo sapien
cactcctagctgctgcaacagtgtg

SEQ ID NO: 1287070 - DNA, 25 bp, Homo sapien
tagagatccgcagtattcgcagaga

SEQ ID NO: 1287071 - DNA, 25 bp, Homo sapien
cctccaggtggagcatgtctttcaa

SEQ ID NO: 1287072 - DNA, 25 bp, Homo sapien
aatgtttcgcaaaatgtcgctggcc

SEQ ID NO: 1287073 - DNA, 25 bp, Homo sapien
tcaagagcagtttccgtggactaca

SEQ ID NO: 1287074 - DNA, 25 bp, Homo sapien
caaatgaaccaagagactgcaataa

SEQ ID NO: 1287075 - DNA, 25 bp, Homo sapien
tcagaagtggaaccatacaaggttg

SEQ ID NO: 1287076 - DNA, 25 bp, Homo sapien
tagaaggtactagtactaggtacca

SEQ ID NO: 1287077 - DNA, 25 bp, Homo sapien
gactacctaagtacctcagaagtgg

SEQ ID NO: 1287078 - DNA, 25 bp, Homo sapien
tgaaggtcagaggttaccagtgagt

SEQ ID NO: 1287079 - DNA, 25 bp, Homo sapien
agtggttgaagtgatagagagctgc

SEQ ID NO: 1287080 - DNA, 25 bp, Homo sapien
tcagaggttaccagtgagtggttga

SEQ ID NO: 1287081 - DNA, 25 bp, Homo sapien
tgcaggttaggtgactgaaggtcag

SEQ ID NO: 1287082 - DNA, 25 bp, Homo sapien
cttgatgatactggctagggtggcc

SEQ ID NO: 1287083 - DNA, 25 bp, Homo sapien
gataaaattgttccgagagttcagc

SEQ ID NO: 1287084 - DNA, 25 bp, Homo sapien
tagggtggccatatggtgttctgaa

SEQ ID NO: 1287085 - DNA, 25 bp, Homo sapien
gatacactcagatagtttcggataa

SEQ ID NO: 1287086 - DNA, 25 bp, Homo sapien
aactcaggatctttgcgactcgcca

SEQ ID NO: 1287087 - DNA, 25 bp, Homo sapien
gaaatagtctcctcaaaccattgcc

SEQ ID NO: 1287088 - DNA, 25 bp, Homo sapien
gctttctctttactgggagaaatag

SEQ ID NO: 1287089 - DNA, 25 bp, Homo sapien
cccaaaataggctcactgtcatcgt

SEQ ID NO: 1287090 - DNA, 25 bp, Homo sapien
gaaaagtaacccaggcttggctgaa

SEQ ID NO: 1287091 - DNA, 25 bp, Homo sapien
gaagaaatatggaacaattgagatg

SEQ ID NO: 1287092 - DNA, 25 bp, Homo sapien
caacttgctcttaaataacatgtca

SEQ ID NO: 1287093 - DNA, 25 bp, Homo sapien
tctttgaatgcacataaaaccaagg

SEQ ID NO: 1287094 - DNA, 25 bp, Homo sapien
tggaggcgctggcatcgctgctcat

SEQ ID NO: 1287095 - DNA, 25 bp, Homo sapien
catagtaagtattggagtcggtgga

SEQ ID NO: 1287096 - DNA, 25 bp, Homo sapien
tcctccgtgctactgaaatcgtcct

SEQ ID NO: 1287097 - DNA, 25 bp, Homo sapien
gaaatcgtcctcatagtaagtattg

SEQ ID NO: 1287098 - DNA, 25 bp, Homo sapien
ctgggccataatgctcaaggctgca

SEQ ID NO: 1287099 - DNA, 25 bp, Homo sapien
gaaagtaacgtcaagagcaggttca

SEQ ID NO: 1287100 - DNA, 25 bp, Homo sapien
atcctctgtatggaggtgctctggg

SEQ ID NO: 1287101 - DNA, 25 bp, Homo sapien
ggacagagtcaatcagccgttgaat

SEQ ID NO: 1287102 - DNA, 25 bp, Homo sapien
acttgtaggtcttgaaagagagacg

SEQ ID NO: 1287103 - DNA, 25 bp, Homo sapien
tgagagtaccccaaatccctgatgc

SEQ ID NO: 1287104 - DNA, 25 bp, Homo sapien
agtttgatggcatggtttgccaata

SEQ ID NO: 1287105 - DNA, 25 bp, Homo sapien
tcttgaaagagagacgttagcagtt

SEQ ID NO: 1287106 - DNA, 25 bp, Homo sapien
aaaggatgtctctgactcggagggc

SEQ ID NO: 1287107 - DNA, 25 bp, Homo sapien
tctttagtacgagaaaggatgtctc

SEQ ID NO: 1287108 - DNA, 25 bp, Homo sapien
gcccactccctctttagtacgagaa

SEQ ID NO: 1287109 - DNA, 25 bp, Homo sapien
aaggatgtctctgactcggagggca

SEQ ID NO: 1287110 - DNA, 25 bp, Homo sapien
agcaccaagcacccagcaattggaa

SEQ ID NO: 1287111 - DNA, 25 bp, Homo sapien
aaaggctgtttaacaagcaccaagc

SEQ ID NO: 1287112 - DNA, 25 bp, Homo sapien
aggactgaggttcagtatgaggaaa

SEQ ID NO: 1287113 - DNA, 25 bp, Homo sapien
gcaccaagcacccagcaattggaaa

SEQ ID NO: 1287114 - DNA, 25 bp, Homo sapien
gaactgctgattgcttgtccaatca

SEQ ID NO: 1287115 - DNA, 25 bp, Homo sapien
gattgcttgtccaatcatgtcatag

SEQ ID NO: 1287116 - DNA, 25 bp, Homo sapien
gtccaatcatgtcatagatttcgag

SEQ ID NO: 1287117 - DNA, 25 bp, Homo sapien
gcgagaactgctgattgcttgtcca

SEQ ID NO: 1287118 - DNA, 25 bp, Homo sapien
agctgacagatttcatcataaatgc

SEQ ID NO: 1287119 - DNA, 25 bp, Homo sapien
ctgtacaatatcaaacagacacaaa

SEQ ID NO: 1287120 - DNA, 25 bp, Homo sapien
acagacacaaaaatctgaacaagct

SEQ ID NO: 1287121 - DNA, 25 bp, Homo sapien
tctgaacaagctgacagatttcatc

SEQ ID NO: 1287122 - DNA, 25 bp, Homo sapien
taacttgaagagttcaatatcctct

SEQ ID NO: 1287123 - DNA, 25 bp, Homo sapien
ccagctccacatcagatcacttttt

SEQ ID NO: 1287124 - DNA, 25 bp, Homo sapien
ttgaccttcacatggagctgactcc

SEQ ID NO: 1287125 - DNA, 25 bp, Homo sapien
gatacattccatcgtactttccttg

SEQ ID NO: 1287126 - DNA, 25 bp, Homo sapien
catcttctttggagctcgtggaccc

SEQ ID NO: 1287127 - DNA, 25 bp, Homo sapien
acatttctggacaattgtagctgcg

SEQ ID NO: 1287128 - DNA, 25 bp, Homo sapien
tgggcactacccacatggaggatgg

SEQ ID NO: 1287129 - DNA, 25 bp, Homo sapien
gaggatggccatgcacgttgccaca

SEQ ID NO: 1287130 - DNA, 25 bp, Homo sapien
caacttaggctgaggactgtcacat

SEQ ID NO: 1287131 - DNA, 25 bp, Homo sapien
cgagaaggattgagaggttccaaca

SEQ ID NO: 1287132 - DNA, 25 bp, Homo sapien
tgtcacatcttgtagacgagaagga

SEQ ID NO: 1287133 - DNA, 25 bp, Homo sapien
gaaagggtatccaatgccatagtta

SEQ ID NO: 1287134 - DNA, 25 bp, Homo sapien
gaaccgattgatatagcgtaggaaa

SEQ ID NO: 1287135 - DNA, 25 bp, Homo sapien
ctgctactgttgcaggcattatgaa

SEQ ID NO: 1287136 - DNA, 25 bp, Homo sapien
taggaaatatggcaggttcaaacat

SEQ ID NO: 1287137 - DNA, 25 bp, Homo sapien
catacacgcagtagcttctccgagc

SEQ ID NO: 1287138 - DNA, 25 bp, Homo sapien
tgatagctgaggcttgatctgtaga

SEQ ID NO: 1287139 - DNA, 25 bp, Homo sapien
gctgaggcttgatctgtagatgact

SEQ ID NO: 1287140 - DNA, 25 bp, Homo sapien
ggcttgatctgtagatgactgctca

SEQ ID NO: 1287141 - DNA, 25 bp, Homo sapien
gcttgatctgtagatgactgctcat

SEQ ID NO: 1287142 - DNA, 25 bp, Homo sapien
ctgaggtcagctggttcaaaaaatt

SEQ ID NO: 1287143 - DNA, 25 bp, Homo sapien
gagtctgtgtactgataggttgtga

SEQ ID NO: 1287144 - DNA, 25 bp, Homo sapien
tgataggttgtgatgctacagttct

SEQ ID NO: 1287145 - DNA, 25 bp, Homo sapien
tctagggttaaaaactgaggtcagc

SEQ ID NO: 1287146 - DNA, 25 bp, Homo sapien
ccttttgcctcaactcagggcttac

SEQ ID NO: 1287147 - DNA, 25 bp, Homo sapien
ctccttttgcctcaactcagggctt

SEQ ID NO: 1287148 - DNA, 25 bp, Homo sapien
tccttttgcctcaactcagggctta

SEQ ID NO: 1287149 - DNA, 25 bp, Homo sapien
tgaggccagctctttctgatcttcc

SEQ ID NO: 1287150 - DNA, 25 bp, Homo sapien
gtgaggccagctctttctgatcttc

SEQ ID NO: 1287151 - DNA, 25 bp, Homo sapien
gaggccagctctttctgatcttcca

SEQ ID NO: 1287152 - DNA, 25 bp, Homo sapien
tggtgaggccagctctttctgatct

SEQ ID NO: 1287153 - DNA, 25 bp, Homo sapien
gtctgaaagtgtcttcactgtttgg

SEQ ID NO: 1287154 - DNA, 25 bp, Homo sapien
tttggggcagcttggcggatttcat

SEQ ID NO: 1287155 - DNA, 25 bp, Homo sapien
cgtctgaaagtgtcttcactgtttg

SEQ ID NO: 1287156 - DNA, 25 bp, Homo sapien
tcttcactgtttggggcagcttggc

SEQ ID NO: 1287157 - DNA, 25 bp, Homo sapien
tatctagtcggctacagccagtgca

SEQ ID NO: 1287158 - DNA, 25 bp, Homo sapien
gctgtaaatgtgataatttcagttc

SEQ ID NO: 1287159 - DNA, 25 bp, Homo sapien
tcagttctatctagtcggctacagc

SEQ ID NO: 1287160 - DNA, 25 bp, Homo sapien
gataatttcagttctatctagtcgg

SEQ ID NO: 1287161 - DNA, 25 bp, Homo sapien
gccactgactgaagttggttccggg

SEQ ID NO: 1287162 - DNA, 25 bp, Homo sapien
cactgactgaagttggttccgggga

SEQ ID NO: 1287163 - DNA, 25 bp, Homo sapien
ccactgactgaagttggttccgggg

SEQ ID NO: 1287164 - DNA, 25 bp, Homo sapien
caaactgttgtaatatagtgtgtgg

SEQ ID NO: 1287165 - DNA, 25 bp, Homo sapien
gcttctcatggtgcaggatttctga

SEQ ID NO: 1287166 - DNA, 25 bp, Homo sapien
agatgagtagaatggctcgtactgc

SEQ ID NO: 1287167 - DNA, 25 bp, Homo sapien
gagactgcaaactgttgtaatatag

SEQ ID NO: 1287168 - DNA, 25 bp, Homo sapien
gaatgataaccatgctcaccagcgt

SEQ ID NO: 1287169 - DNA, 25 bp, Homo sapien
tatactaactaatcccatggacggt

SEQ ID NO: 1287170 - DNA, 25 bp, Homo sapien
tctggaaacagaaacctcgaacagg

SEQ ID NO: 1287171 - DNA, 25 bp, Homo sapien
taacagagaaggctacattcagcaa

SEQ ID NO: 1287172 - DNA, 25 bp, Homo sapien
caaagacccatcagtttggacttat

SEQ ID NO: 1287173 - DNA, 25 bp, Homo sapien
cacatacatggcaaaattcaaacct

SEQ ID NO: 1287174 - DNA, 25 bp, Homo sapien
atgtatttggttggagggtgttcct

SEQ ID NO: 1287175 - DNA, 25 bp, Homo sapien
gtgttccttaagtattacagcttta

SEQ ID NO: 1287176 - DNA, 25 bp, Homo sapien
ccttaagagggcgaatgcatctcac

SEQ ID NO: 1287177 - DNA, 25 bp, Homo sapien
taaattataccgtacggctccgctc

SEQ ID NO: 1287178 - DNA, 25 bp, Homo sapien
tgcgggcgagaaatgcaaactcatc

SEQ ID NO: 1287179 - DNA, 25 bp, Homo sapien
tcagtcacagaaatagcacgtgccc

SEQ ID NO: 1287180 - DNA, 25 bp, Homo sapien
ggtccagacgatccggctcgaaatc

SEQ ID NO: 1287181 - DNA, 25 bp, Homo sapien
ttacatgcgttggcggagggaaacc

SEQ ID NO: 1287182 - DNA, 25 bp, Homo sapien
ccggaaagcgggtccagacgatccg

SEQ ID NO: 1287183 - DNA, 25 bp, Homo sapien
tgcgttggcggagggaaacccaggc

SEQ ID NO: 1287184 - DNA, 25 bp, Homo sapien
gccaccagctgcggcaactccttca

SEQ ID NO: 1287185 - DNA, 25 bp, Homo sapien
ctctcgatgactgaggccaccagct

SEQ ID NO: 1287186 - DNA, 25 bp, Homo sapien
ccaccagctgcggcaactccttcat

SEQ ID NO: 1287187 - DNA, 25 bp, Homo sapien
cctcttcgccgccgctcgtcgccat

SEQ ID NO: 1287188 - DNA, 25 bp, Homo sapien
ggcggagtaggacgcggacagcagg

SEQ ID NO: 1287189 - DNA, 25 bp, Homo sapien
aaggcggagtaggacgcggacagca

SEQ ID NO: 1287190 - DNA, 25 bp, Homo sapien
ctcgaaggcggagtaggacgcggac

SEQ ID NO: 1287191 - DNA, 25 bp, Homo sapien
cgtcgtactactgcggctccctccg

SEQ ID NO: 1287192 - DNA, 25 bp, Homo sapien
cttccgtcgtactactgcggctccc

SEQ ID NO: 1287193 - DNA, 25 bp, Homo sapien
ctccgggggcttgccaccggcccag

SEQ ID NO: 1287194 - DNA, 25 bp, Homo sapien
tactactgcggctccctccgggggc

SEQ ID NO: 1287195 - DNA, 25 bp, Homo sapien
cgggagagcgttaacttctgagcct

SEQ ID NO: 1287196 - DNA, 25 bp, Homo sapien
ctcaagcaggtggtagcgacttggc

SEQ ID NO: 1287197 - DNA, 25 bp, Homo sapien
cctgcgcggtgggagttgctcaagc

SEQ ID NO: 1287198 - DNA, 25 bp, Homo sapien
agacgctgcgcctgctcagaaggta

SEQ ID NO: 1287199 - DNA, 25 bp, Homo sapien
tcacctggcatgaacttaaaagaag

SEQ ID NO: 1287200 - DNA, 25 bp, Homo sapien
tttgacctatcagattgagagccag

SEQ ID NO: 1287201 - DNA, 25 bp, Homo sapien
acaattttgctagctgtggagggac

SEQ ID NO: 1287202 - DNA, 25 bp, Homo sapien
tggagccaaatgattacactgtgtg

SEQ ID NO: 1287203 - DNA, 25 bp, Homo sapien
caaaagtcaccttcttggatcagaa

SEQ ID NO: 1287204 - DNA, 25 bp, Homo sapien
caggcttcttcgttggaggtcagtc

SEQ ID NO: 1287205 - DNA, 25 bp, Homo sapien
gggtgcttcaatataaacctttggc

SEQ ID NO: 1287206 - DNA, 25 bp, Homo sapien
taaaagccttagtgctggtggaaaa

SEQ ID NO: 1287207 - DNA, 25 bp, Homo sapien
tcttactggaaaggtgacctaaata

SEQ ID NO: 1287208 - DNA, 25 bp, Homo sapien
tagactttcccgaaagagtattgag

SEQ ID NO: 1287209 - DNA, 25 bp, Homo sapien
cccgaaagagtattgagtctcataa

SEQ ID NO: 1287210 - DNA, 25 bp, Homo sapien
tgacctaaatattagactttcccga

SEQ ID NO: 1287211 - DNA, 25 bp, Homo sapien
tccatggcttgccagagaggcagat

SEQ ID NO: 1287212 - DNA, 25 bp, Homo sapien
gagagtttgtcagacctggtgtcca

SEQ ID NO: 1287213 - DNA, 25 bp, Homo sapien
gtgagcatttgtcttaaggagtaag

SEQ ID NO: 1287214 - DNA, 25 bp, Homo sapien
tccaaagcaataccaaagagatact

SEQ ID NO: 1287215 - DNA, 25 bp, Homo sapien
gcctttgcctcctgggttcgattct

SEQ ID NO: 1287216 - DNA, 25 bp, Homo sapien
cagcctttgcctcctgggttcgatt

SEQ ID NO: 1287217 - DNA, 25 bp, Homo sapien
agcctttgcctcctgggttcgattc

SEQ ID NO: 1287218 - DNA, 25 bp, Homo sapien
gagatggggtttcaggtttcaccat

SEQ ID NO: 1287219 - DNA, 25 bp, Homo sapien
agagatggggtttcaggtttcacca

SEQ ID NO: 1287220 - DNA, 25 bp, Homo sapien
aaagtatgacaatttatgggccagg

SEQ ID NO: 1287221 - DNA, 25 bp, Homo sapien
tagactaccagtgctcatatacgta

SEQ ID NO: 1287222 - DNA, 25 bp, Homo sapien
tattcaagatacattagctgagcct

SEQ ID NO: 1287223 - DNA, 25 bp, Homo sapien
caaattgaaagatgccttacggagc

SEQ ID NO: 1287224 - DNA, 25 bp, Homo sapien
tagtggagactgagtgtagctgctc

SEQ ID NO: 1287225 - DNA, 25 bp, Homo sapien
tttaaattggactgtggcattagca

SEQ ID NO: 1287226 - DNA, 25 bp, Homo sapien
aagcacttggccaagctcggtggct

SEQ ID NO: 1287227 - DNA, 25 bp, Homo sapien
gagaggaaacatagtctcagcagcc

SEQ ID NO: 1287228 - DNA, 25 bp, Homo sapien
caggctaaccttgcacatatgtatg

SEQ ID NO: 1287229 - DNA, 25 bp, Homo sapien
ccttgggtcaggatgatagatgcct

SEQ ID NO: 1287230 - DNA, 25 bp, Homo sapien
aaaactagaatcttgcaggctaacc

SEQ ID NO: 1287231 - DNA, 25 bp, Homo sapien
gataacctaaccaacccatatatga

SEQ ID NO: 1287232 - DNA, 25 bp, Homo sapien
taaatgacagcacgaaactagaggt

SEQ ID NO: 1287233 - DNA, 25 bp, Homo sapien
tcaagcctcagctaaggatggatcc

SEQ ID NO: 1287234 - DNA, 25 bp, Homo sapien
cgagtgtacctctttcaccacaggg

SEQ ID NO: 1287235 - DNA, 25 bp, Homo sapien
ggtggcccagcctaataaatgacag

SEQ ID NO: 1287236 - DNA, 25 bp, Homo sapien
tacagttcttagctgagcactgaca

SEQ ID NO: 1287237 - DNA, 25 bp, Homo sapien
gagttctgcgtgaaggtcatccatc

SEQ ID NO: 1287238 - DNA, 25 bp, Homo sapien
catgtatatcccaaaaggagttctg

SEQ ID NO: 1287239 - DNA, 25 bp, Homo sapien
gcagacgcctttggacttcaagaga

SEQ ID NO: 1287240 - DNA, 25 bp, Homo sapien
ttatcgccaggcccgattcaggagc

SEQ ID NO: 1287241 - DNA, 25 bp, Homo sapien
tcgccaggcccgattcaggagcttc

SEQ ID NO: 1287242 - DNA, 25 bp, Homo sapien
atcgccaggcccgattcaggagctt

SEQ ID NO: 1287243 - DNA, 25 bp, Homo sapien
gccaggcccgattcaggagcttcac

SEQ ID NO: 1287244 - DNA, 25 bp, Homo sapien
ctgtgccagtctcttagtgatcatg

SEQ ID NO: 1287245 - DNA, 25 bp, Homo sapien
ctcttagtgatcatggtggcaaaaa

SEQ ID NO: 1287246 - DNA, 25 bp, Homo sapien
gccagtctcttagtgatcatggtgg

SEQ ID NO: 1287247 - DNA, 25 bp, Homo sapien
cagtctcttagtgatcatggtggca

SEQ ID NO: 1287248 - DNA, 25 bp, Homo sapien
tgctgattaacacgtagtcatagtc

SEQ ID NO: 1287249 - DNA, 25 bp, Homo sapien
aaactgcttggatgggtagactcga

SEQ ID NO: 1287250 - DNA, 25 bp, Homo sapien
gtagactcgagtttggtaaatgtcc

SEQ ID NO: 1287251 - DNA, 25 bp, Homo sapien
tccttcagaacgtcaaactgcttgg

SEQ ID NO: 1287252 - DNA, 25 bp, Homo sapien
caccaagggtgaaatagggcagctg

SEQ ID NO: 1287253 - DNA, 25 bp, Homo sapien
gaaggcagatggaataagaattagg

SEQ ID NO: 1287254 - DNA, 25 bp, Homo sapien
ctggaaggcagatggaataagaatt

SEQ ID NO: 1287255 - DNA, 25 bp, Homo sapien
accaatgatccaccaagggtgaaat

SEQ ID NO: 1287256 - DNA, 25 bp, Homo sapien
cgcattcgagaaactgtctggttat

SEQ ID NO: 1287257 - DNA, 25 bp, Homo sapien
gaatcgctctgcgtgtatctgtaca

SEQ ID NO: 1287258 - DNA, 25 bp, Homo sapien
gacccgagggagctgtgtagatacc

SEQ ID NO: 1287259 - DNA, 25 bp, Homo sapien
aaacaagtggactccagacccgagg

SEQ ID NO: 1287260 - DNA, 25 bp, Homo sapien
tggagaatacgggattaagttctcc

SEQ ID NO: 1287261 - DNA, 25 bp, Homo sapien
gagaatacgggattaagttctcctc

SEQ ID NO: 1287262 - DNA, 25 bp, Homo sapien
agaatacgggattaagttctcctct

SEQ ID NO: 1287263 - DNA, 25 bp, Homo sapien
ctggagaatacgggattaagttctc

SEQ ID NO: 1287264 - DNA, 25 bp, Homo sapien
tgagcactgctgtaaagggatctct

SEQ ID NO: 1287265 - DNA, 25 bp, Homo sapien
gcactgctgtaaagggatctcttgg

SEQ ID NO: 1287266 - DNA, 25 bp, Homo sapien
ctgcaaaacaccagccgggacaggc

SEQ ID NO: 1287267 - DNA, 25 bp, Homo sapien
ctgagcactgctgtaaagggatctc

SEQ ID NO: 1287268 - DNA, 25 bp, Homo sapien
tagcacagcatgaaggcacacagag

SEQ ID NO: 1287269 - DNA, 25 bp, Homo sapien
tattggcttgcccacatggtctggc

SEQ ID NO: 1287270 - DNA, 25 bp, Homo sapien
ggcacttcacaccacaagaggaaag

SEQ ID NO: 1287271 - DNA, 25 bp, Homo sapien
tggtctggcccgaattacctcagtg

SEQ ID NO: 1287272 - DNA, 25 bp, Homo sapien
agaattgctccagaaggtagtccaa

SEQ ID NO: 1287273 - DNA, 25 bp, Homo sapien
gaaagaattgctccagaaggtagtc

SEQ ID NO: 1287274 - DNA, 25 bp, Homo sapien
gctttgttctgttgggatctcgggg

SEQ ID NO: 1287275 - DNA, 25 bp, Homo sapien
tgctttgttctgttgggatctcggg

SEQ ID NO: 1287276 - DNA, 25 bp, Homo sapien
cagtgtccagcaagggccagttaca

SEQ ID NO: 1287277 - DNA, 25 bp, Homo sapien
taatccaatgatacgcatgggtctg

SEQ ID NO: 1287278 - DNA, 25 bp, Homo sapien
taagaattcaataggccagtcgcgg

SEQ ID NO: 1287279 - DNA, 25 bp, Homo sapien
taaagctgataaactgccaacaggg

SEQ ID NO: 1287280 - DNA, 25 bp, Homo sapien
cagcacaggctagctatgttaacaa

SEQ ID NO: 1287281 - DNA, 25 bp, Homo sapien
caggaactgactttttgagctaggt

SEQ ID NO: 1287282 - DNA, 25 bp, Homo sapien
tgttaacaatgctatcaggaactga

SEQ ID NO: 1287283 - DNA, 25 bp, Homo sapien
aatagaccctgccagtttctgcaag

SEQ ID NO: 1287284 - DNA, 25 bp, Homo sapien
gccctcatagagctccagtacggta

SEQ ID NO: 1287285 - DNA, 25 bp, Homo sapien
cagtacggtaaactcgttgcgccga

SEQ ID NO: 1287286 - DNA, 25 bp, Homo sapien
gcgttgtattgctcagtgccctcat

SEQ ID NO: 1287287 - DNA, 25 bp, Homo sapien
cactgatggaggacgggaagatata

SEQ ID NO: 1287288 - DNA, 25 bp, Homo sapien
ttgggtccctggtagtgaccgctta

SEQ ID NO: 1287289 - DNA, 25 bp, Homo sapien
tgggtccctggtagtgaccgcttac

SEQ ID NO: 1287290 - DNA, 25 bp, Homo sapien
cttgggtccctggtagtgaccgctt

SEQ ID NO: 1287291 - DNA, 25 bp, Homo sapien
cagaggagtgaatgatacgcccagt

SEQ ID NO: 1287292 - DNA, 25 bp, Homo sapien
gatgccaataaaggtgcgctcatgg

SEQ ID NO: 1287293 - DNA, 25 bp, Homo sapien
ccatcaatgaggaagatgccaataa

SEQ ID NO: 1287294 - DNA, 25 bp, Homo sapien
tgcgctcatggtgcgcgtctgtgct

SEQ ID NO: 1287295 - DNA, 25 bp, Homo sapien
tttccccttcaccttgacgatccgc

SEQ ID NO: 1287296 - DNA, 25 bp, Homo sapien
caccttgacgatccgctgtacttct

SEQ ID NO: 1287297 - DNA, 25 bp, Homo sapien
gccctgggaatgaacgtgctcactg

SEQ ID NO: 1287298 - DNA, 25 bp, Homo sapien
gggaatgaacgtgctcactgctgcg

SEQ ID NO: 1287299 - DNA, 25 bp, Homo sapien
caagacattccgagtggctggaaaa

SEQ ID NO: 1287300 - DNA, 25 bp, Homo sapien
tttcgaagccgatatccacacagcc

SEQ ID NO: 1287301 - DNA, 25 bp, Homo sapien
gcatccaccaaatagaagaagatgg

SEQ ID NO: 1287302 - DNA, 25 bp, Homo sapien
gggcaagctcatgtagctgtcgcaa

SEQ ID NO: 1287303 - DNA, 25 bp, Homo sapien
gcgtagtcttgatccatgactggga

SEQ ID NO: 1287304 - DNA, 25 bp, Homo sapien
tgatccatgactgggagaagcaagg

SEQ ID NO: 1287305 - DNA, 25 bp, Homo sapien
aacaccttggcgtagtcttgatcca

SEQ ID NO: 1287306 - DNA, 25 bp, Homo sapien
caacagcaacaccttggcgtagtct

SEQ ID NO: 1287307 - DNA, 25 bp, Homo sapien
caagatggggcgcttcagcactggg

SEQ ID NO: 1287308 - DNA, 25 bp, Homo sapien
catacagagaactcattcccgactc

SEQ ID NO: 1287309 - DNA, 25 bp, Homo sapien
aagacatacagagaactcattcccg

SEQ ID NO: 1287310 - DNA, 25 bp, Homo sapien
gacatacagagaactcattcccgac

SEQ ID NO: 1287311 - DNA, 25 bp, Homo sapien
gaggagtctggcttgacattgggta

SEQ ID NO: 1287312 - DNA, 25 bp, Homo sapien
atgagcagtagttctctggaccatc

SEQ ID NO: 1287313 - DNA, 25 bp, Homo sapien
aaatgagcagtagttctctggacca

SEQ ID NO: 1287314 - DNA, 25 bp, Homo sapien
gacattgggtagatactgtttccac

SEQ ID NO: 1287315 - DNA, 25 bp, Homo sapien
ggccagggtgtcaatgttgatctca

SEQ ID NO: 1287316 - DNA, 25 bp, Homo sapien
gttgatctcattcttaatctgactc

SEQ ID NO: 1287317 - DNA, 25 bp, Homo sapien
gacgagaggcgtttcaggaacatcc

SEQ ID NO: 1287318 - DNA, 25 bp, Homo sapien
gaagtccatgcttgcagcaggataa

SEQ ID NO: 1287319 - DNA, 25 bp, Homo sapien
taaagtccacactctaggccacaag

SEQ ID NO: 1287320 - DNA, 25 bp, Homo sapien
caaagggcagtcctgtatctgatgc

SEQ ID NO: 1287321 - DNA, 25 bp, Homo sapien
cagctggaatcttggaataggagac

SEQ ID NO: 1287322 - DNA, 25 bp, Homo sapien
taagaggtcagggatcaggcatgca

SEQ ID NO: 1287323 - DNA, 25 bp, Homo sapien
ggtccaccatctctaggcacaccac

SEQ ID NO: 1287324 - DNA, 25 bp, Homo sapien
agctcggcctgtgccccagtcaggg

SEQ ID NO: 1287325 - DNA, 25 bp, Homo sapien
acttctgccagggactcctcacggc

SEQ ID NO: 1287326 - DNA, 25 bp, Homo sapien
ttgccaaattctccttccagctcgg

SEQ ID NO: 1287327 - DNA, 25 bp, Homo sapien
ggtagcccactgagtcatccttctt

SEQ ID NO: 1287328 - DNA, 25 bp, Homo sapien
caggaaaagtagcagatgatcctct

SEQ ID NO: 1287329 - DNA, 25 bp, Homo sapien
accaaagcccggtagcccactgagt

SEQ ID NO: 1287330 - DNA, 25 bp, Homo sapien
aagtagcagatgatcctctgtctgc

SEQ ID NO: 1287331 - DNA, 25 bp, Homo sapien
ccgagtgccgctctgttccaggcta

SEQ ID NO: 1287332 - DNA, 25 bp, Homo sapien
aaatgttatcgtggtgtccagcagc

SEQ ID NO: 1287333 - DNA, 25 bp, Homo sapien
tgtaggtctgattgaagcaagccag

SEQ ID NO: 1287334 - DNA, 25 bp, Homo sapien
cgccgacctgtctccacgaggtata

SEQ ID NO: 1287335 - DNA, 25 bp, Homo sapien
aagctgggaactctaggacctgctc

SEQ ID NO: 1287336 - DNA, 25 bp, Homo sapien
gtctggcatactgcccagtgccaca

SEQ ID NO: 1287337 - DNA, 25 bp, Homo sapien
gtggcctcctgcgtctctaggtctg

SEQ ID NO: 1287338 - DNA, 25 bp, Homo sapien
ggacctgctcctaaccaaagctctt

SEQ ID NO: 1287339 - DNA, 25 bp, Homo sapien
ctagacttctccgaaaagctcccca

SEQ ID NO: 1287340 - DNA, 25 bp, Homo sapien
gaactagacttctccgaaaagctcc

SEQ ID NO: 1287341 - DNA, 25 bp, Homo sapien
agctccccattgacccatcttcaga

SEQ ID NO: 1287342 - DNA, 25 bp, Homo sapien
agacttctccgaaaagctccccatt

SEQ ID NO: 1287343 - DNA, 25 bp, Homo sapien
tgcagaaagctctatagttgaggca

SEQ ID NO: 1287344 - DNA, 25 bp, Homo sapien
aggacaggagaaaattcagccaaag

SEQ ID NO: 1287345 - DNA, 25 bp, Homo sapien
taatagccccatatgaaagtaaggt

SEQ ID NO: 1287346 - DNA, 25 bp, Homo sapien
atcacattagggtctcgttcctggg

SEQ ID NO: 1287347 - DNA, 25 bp, Homo sapien
cagggttcctagtggagaccaggaa

SEQ ID NO: 1287348 - DNA, 25 bp, Homo sapien
ttttcagggttcctagtggagacca

SEQ ID NO: 1287349 - DNA, 25 bp, Homo sapien
caggtcaatgtgcccagacttctga

SEQ ID NO: 1287350 - DNA, 25 bp, Homo sapien
ttcagggttcctagtggagaccagg

SEQ ID NO: 1287351 - DNA, 25 bp, Homo sapien
cacttcattccgacaggccatgact

SEQ ID NO: 1287352 - DNA, 25 bp, Homo sapien
ccagtggtggcaaagctcactaggg

SEQ ID NO: 1287353 - DNA, 25 bp, Homo sapien
agtggtggcaaagctcactagggca

SEQ ID NO: 1287354 - DNA, 25 bp, Homo sapien
aggccatgactgcagccaccgtctt

SEQ ID NO: 1287355 - DNA, 25 bp, Homo sapien
cctaaatgggaccagtactagccag

SEQ ID NO: 1287356 - DNA, 25 bp, Homo sapien
aatgggaccagtactagccagctgc

SEQ ID NO: 1287357 - DNA, 25 bp, Homo sapien
ggcatcagctcctaaatgggaccag

SEQ ID NO: 1287358 - DNA, 25 bp, Homo sapien
tcagctcctaaatgggaccagtact

SEQ ID NO: 1287359 - DNA, 25 bp, Homo sapien
acttacgggaaggtgtcatcaatct

SEQ ID NO: 1287360 - DNA, 25 bp, Homo sapien
cgtttccagattcaaaagcactgcc

SEQ ID NO: 1287361 - DNA, 25 bp, Homo sapien
gggcctaagagcaaacgtttccaga

SEQ ID NO: 1287362 - DNA, 25 bp, Homo sapien
gaatcctagcaaaccatgttgcctg

SEQ ID NO: 1287363 - DNA, 25 bp, Homo sapien
cgggaagcgtccactgggttgggct

SEQ ID NO: 1287364 - DNA, 25 bp, Homo sapien
tccataatggtactgcagcagagca

SEQ ID NO: 1287365 - DNA, 25 bp, Homo sapien
gtttttaagcaaactcagcgttcca

SEQ ID NO: 1287366 - DNA, 25 bp, Homo sapien
actgcagcagagcatagtggcttgg

SEQ ID NO: 1287367 - DNA, 25 bp, Homo sapien
gagctcgggtcaggacacaccagga

SEQ ID NO: 1287368 - DNA, 25 bp, Homo sapien
ccaaagtttggagggaacgtgagct

SEQ ID NO: 1287369 - DNA, 25 bp, Homo sapien
tcaactcccattccgtctccagagc

SEQ ID NO: 1287370 - DNA, 25 bp, Homo sapien
tgcagccacggagttgaaaccctaa

SEQ ID NO: 1287371 - DNA, 25 bp, Homo sapien
ccctctcagcccaacagcaatattg

SEQ ID NO: 1287372 - DNA, 25 bp, Homo sapien
catcgttaacaggaagctcgtgaaa

SEQ ID NO: 1287373 - DNA, 25 bp, Homo sapien
ttaacaggaagctcgtgaaagattt

SEQ ID NO: 1287374 - DNA, 25 bp, Homo sapien
gaaaagtcatcgttaacaggaagct

SEQ ID NO: 1287375 - DNA, 25 bp, Homo sapien
acaccaccccagagccgtaagaata

SEQ ID NO: 1287376 - DNA, 25 bp, Homo sapien
tccatcttccacattaaacttgaca

SEQ ID NO: 1287377 - DNA, 25 bp, Homo sapien
catggctgaagggaacaactccgag

SEQ ID NO: 1287378 - DNA, 25 bp, Homo sapien
gagccgtaagaatacaccatctggt

SEQ ID NO: 1287379 - DNA, 25 bp, Homo sapien
gatgtaccttacagactcctgcagg

SEQ ID NO: 1287380 - DNA, 25 bp, Homo sapien
cacccacttgaggtgcccactggag

SEQ ID NO: 1287381 - DNA, 25 bp, Homo sapien
cttcaggactgcgatgtaccttaca

SEQ ID NO: 1287382 - DNA, 25 bp, Homo sapien
cccactggagaggtgatggagggca

SEQ ID NO: 1287383 - DNA, 25 bp, Homo sapien
tcccaggaacgcatgattcggcctc

SEQ ID NO: 1287384 - DNA, 25 bp, Homo sapien
atgattcggcctccattggacacag

SEQ ID NO: 1287385 - DNA, 25 bp, Homo sapien
gcctccattggacacagtgatcaca

SEQ ID NO: 1287386 - DNA, 25 bp, Homo sapien
gttcaggcccccgatgttagtctcc

SEQ ID NO: 1287387 - DNA, 25 bp, Homo sapien
ttctgccgtgcccttgtcaacatgg

SEQ ID NO: 1287388 - DNA, 25 bp, Homo sapien
cccttctgccgtgcccttgtcaaca

SEQ ID NO: 1287389 - DNA, 25 bp, Homo sapien
tgccgtgcccttgtcaacatggcgc

SEQ ID NO: 1287390 - DNA, 25 bp, Homo sapien
gtgcccttgtcaacatggcgccaca

SEQ ID NO: 1287391 - DNA, 25 bp, Homo sapien
cagagttggcaatggtaagtctttc

SEQ ID NO: 1287392 - DNA, 25 bp, Homo sapien
aacatgttccttattcaggaatcag

SEQ ID NO: 1287393 - DNA, 25 bp, Homo sapien
catgttccttattcaggaatcagcc

SEQ ID NO: 1287394 - DNA, 25 bp, Homo sapien
gcagagttggcaatggtaagtcttt

SEQ ID NO: 1287395 - DNA, 25 bp, Homo sapien
atctccccagttcgggaatttaatg

SEQ ID NO: 1287396 - DNA, 25 bp, Homo sapien
tacaaccaacttcttggatccaggg

SEQ ID NO: 1287397 - DNA, 25 bp, Homo sapien
agttcgggaatttaatgctgcaatc

SEQ ID NO: 1287398 - DNA, 25 bp, Homo sapien
tctgtggctacaaccaacttcttgg

SEQ ID NO: 1287399 - DNA, 25 bp, Homo sapien
caggaatcagcagcgtagcccaaag

SEQ ID NO: 1287400 - DNA, 25 bp, Homo sapien
agccagaaacgagaagcccactcag

SEQ ID NO: 1287401 - DNA, 25 bp, Homo sapien
atcaaacttgcccacttggtcttcg

SEQ ID NO: 1287402 - DNA, 25 bp, Homo sapien
ttggtcttcgtagaccgcggccgca

SEQ ID NO: 1287403 - DNA, 25 bp, Homo sapien
gatgcgagcgcatgcaccacccacc

SEQ ID NO: 1287404 - DNA, 25 bp, Homo sapien
atgcgagcgcatgcaccacccaccg

SEQ ID NO: 1287405 - DNA, 25 bp, Homo sapien
acccaccgccgtcccggcatgcacc

SEQ ID NO: 1287406 - DNA, 25 bp, Homo sapien
accacccaccgccgtcccggcatgc

SEQ ID NO: 1287407 - DNA, 25 bp, Homo sapien
tataggactgttggccagggatagg

SEQ ID NO: 1287408 - DNA, 25 bp, Homo sapien
aaccaaaactgccaagaaaggcttg

SEQ ID NO: 1287409 - DNA, 25 bp, Homo sapien
ggcttggaattgaaacaaaacctga

SEQ ID NO: 1287410 - DNA, 25 bp, Homo sapien
tgttcttttctagagcttgcaattg

SEQ ID NO: 1287411 - DNA, 25 bp, Homo sapien
ggacatccggaacgcctggaagcac

SEQ ID NO: 1287412 - DNA, 25 bp, Homo sapien
catcttctctgtggccaacatgagg

SEQ ID NO: 1287413 - DNA, 25 bp, Homo sapien
gcaagctgaaggacatccggaacgc

SEQ ID NO: 1287414 - DNA, 25 bp, Homo sapien
acatgaggaacagcaagctgaagga

SEQ ID NO: 1287415 - DNA, 25 bp, Homo sapien
tgatggtggccttgggtcggagccc

SEQ ID NO: 1287416 - DNA, 25 bp, Homo sapien
ttggcaaaaacaaggtgatgatggt

SEQ ID NO: 1287417 - DNA, 25 bp, Homo sapien
tggcaaaaacaaggtgatgatggtg

SEQ ID NO: 1287418 - DNA, 25 bp, Homo sapien
gatggtggccttgggtcggagccca

SEQ ID NO: 1287419 - DNA, 25 bp, Homo sapien
tgttcaccaaccgcacaaaggagga

SEQ ID NO: 1287420 - DNA, 25 bp, Homo sapien
tcctgttcaccaaccgcacaaagga

SEQ ID NO: 1287421 - DNA, 25 bp, Homo sapien
ttcaccaaccgcacaaaggaggagg

SEQ ID NO: 1287422 - DNA, 25 bp, Homo sapien
cctgttcaccaaccgcacaaaggag

SEQ ID NO: 1287423 - DNA, 25 bp, Homo sapien
acagaaatggactacgcccgagctg

SEQ ID NO: 1287424 - DNA, 25 bp, Homo sapien
tggagcagttcccccactccatgga

SEQ ID NO: 1287425 - DNA, 25 bp, Homo sapien
gagctggtaacaaagcagctttcac

SEQ ID NO: 1287426 - DNA, 25 bp, Homo sapien
ggactacgcccgagctggtaacaaa

SEQ ID NO: 1287427 - DNA, 25 bp, Homo sapien
gtggtgactctgctgtctgactacg

SEQ ID NO: 1287428 - DNA, 25 bp, Homo sapien
tgaccccagagcaggctcgcgtcct

SEQ ID NO: 1287429 - DNA, 25 bp, Homo sapien
tgtctgactacgaggtgtgcaagga

SEQ ID NO: 1287430 - DNA, 25 bp, Homo sapien
aggtgtgcaaggagggcgatgtgct

SEQ ID NO: 1287431 - DNA, 25 bp, Homo sapien
tgatgactgaaagggactcgggact

SEQ ID NO: 1287432 - DNA, 25 bp, Homo sapien
tccagcagatgggagacgacttgcc

SEQ ID NO: 1287433 - DNA, 25 bp, Homo sapien
tgggattcacagtcgggaaggttcc

SEQ ID NO: 1287434 - DNA, 25 bp, Homo sapien
gggcactgacctcctgtaaagaata

SEQ ID NO: 1287435 - DNA, 25 bp, Homo sapien
taaagtgtccacggcatcctgggag

SEQ ID NO: 1287436 - DNA, 25 bp, Homo sapien
tgtccacggcatcctgggaggtttt

SEQ ID NO: 1287437 - DNA, 25 bp, Homo sapien
aagtgtccacggcatcctgggaggt

SEQ ID NO: 1287438 - DNA, 25 bp, Homo sapien
agtgtccacggcatcctgggaggtt

SEQ ID NO: 1287439 - DNA, 25 bp, Homo sapien
accgcatccagcccacattgttcta

SEQ ID NO: 1287440 - DNA, 25 bp, Homo sapien
gcatccagcccacattgttctattt

SEQ ID NO: 1287441 - DNA, 25 bp, Homo sapien
cgcatccagcccacattgttctatt

SEQ ID NO: 1287442 - DNA, 25 bp, Homo sapien
catccagcccacattgttctatttg

SEQ ID NO: 1287443 - DNA, 25 bp, Homo sapien
aggcccggccctctcgccttgtgag

SEQ ID NO: 1287444 - DNA, 25 bp, Homo sapien
cctctcgccttgtgaggatgactgg

SEQ ID NO: 1287445 - DNA, 25 bp, Homo sapien
cggccctctcgccttgtgaggatga

SEQ ID NO: 1287446 - DNA, 25 bp, Homo sapien
gaagtgctgaaggagagctcaggcc

SEQ ID NO: 1287447 - DNA, 25 bp, Homo sapien
gaaagcagcctacaaccatttaagg

SEQ ID NO: 1287448 - DNA, 25 bp, Homo sapien
agaggggaaagcagcctacaaccat

SEQ ID NO: 1287449 - DNA, 25 bp, Homo sapien
gaggatctgcaaaccgggctgagag

SEQ ID NO: 1287450 - DNA, 25 bp, Homo sapien
accatttaaggccaaaactggccag

SEQ ID NO: 1287451 - DNA, 25 bp, Homo sapien
tcaggtgccaggcttggtcggcggc

SEQ ID NO: 1287452 - DNA, 25 bp, Homo sapien
gagccaggtctagccagacctggag

SEQ ID NO: 1287453 - DNA, 25 bp, Homo sapien
ggcctctgtgacagccgagtccagg

SEQ ID NO: 1287454 - DNA, 25 bp, Homo sapien
gaggtagtgggatggtcaggtgcca

SEQ ID NO: 1287455 - DNA, 25 bp, Homo sapien
ttggtcaaagtgaccaaatgactgc

SEQ ID NO: 1287456 - DNA, 25 bp, Homo sapien
ccatggagagccttcataggaagaa

SEQ ID NO: 1287457 - DNA, 25 bp, Homo sapien
aaatgactgcatagccctcgcagct

SEQ ID NO: 1287458 - DNA, 25 bp, Homo sapien
cagctgagcatctagagacagctgg

SEQ ID NO: 1287459 - DNA, 25 bp, Homo sapien
gtggtccatcgcaggacagtcaagg

SEQ ID NO: 1287460 - DNA, 25 bp, Homo sapien
tgcagcttgcgagtggtccatcgca

SEQ ID NO: 1287461 - DNA, 25 bp, Homo sapien
ctgcagcttgcgagtggtccatcgc

SEQ ID NO: 1287462 - DNA, 25 bp, Homo sapien
tatatacacaatctgcaggacctgc

SEQ ID NO: 1287463 - DNA, 25 bp, Homo sapien
ggtgctatatacacaatctgcagga

SEQ ID NO: 1287464 - DNA, 25 bp, Homo sapien
gggcactggtgctatatacacaatc

SEQ ID NO: 1287465 - DNA, 25 bp, Homo sapien
ccaggggcactggtgctatatacac

SEQ ID NO: 1287466 - DNA, 25 bp, Homo sapien
gggtcagtactaggggtcatctcag

SEQ ID NO: 1287467 - DNA, 25 bp, Homo sapien
tcatctcagggcggttgcctgcacc

SEQ ID NO: 1287468 - DNA, 25 bp, Homo sapien
cactgaggggctaatggcttctaag

SEQ ID NO: 1287469 - DNA, 25 bp, Homo sapien
agtagacatcttacatttttgagca

SEQ ID NO: 1287470 - DNA, 25 bp, Homo sapien
tgtgccctgggggacacaaggaccc

SEQ ID NO: 1287471 - DNA, 25 bp, Homo sapien
tgtgtgccctgggggacacaaggac

SEQ ID NO: 1287472 - DNA, 25 bp, Homo sapien
ctgtgtgccctgggggacacaagga

SEQ ID NO: 1287473 - DNA, 25 bp, Homo sapien
tgccctgggggacacaaggacccat

SEQ ID NO: 1287474 - DNA, 25 bp, Homo sapien
ccccatgtgctaaatgccaagtata

SEQ ID NO: 1287475 - DNA, 25 bp, Homo sapien
atgccaagtataaaggtagtaaggg

SEQ ID NO: 1287476 - DNA, 25 bp, Homo sapien
tgaggaagggaaatgccccatgcca

SEQ ID NO: 1287477 - DNA, 25 bp, Homo sapien
aggaagggaaatgccccatgccagc

SEQ ID NO: 1287478 - DNA, 25 bp, Homo sapien
gatgggatgaaacccagcaggtctc

SEQ ID NO: 1287479 - DNA, 25 bp, Homo sapien
agcaggtctcgatgctccagggctg

SEQ ID NO: 1287480 - DNA, 25 bp, Homo sapien
cagcaggtctcgatgctccagggct

SEQ ID NO: 1287481 - DNA, 25 bp, Homo sapien
tcagaatggcccaatttgagacact

SEQ ID NO: 1287482 - DNA, 25 bp, Homo sapien
tggcccaatttgagacactggtgat

SEQ ID NO: 1287483 - DNA, 25 bp, Homo sapien
gaaatgaagcaagtagggcagccca

SEQ ID NO: 1287484 - DNA, 25 bp, Homo sapien
aacccagtcactgggaacaagcagg

SEQ ID NO: 1287485 - DNA, 25 bp, Homo sapien
cgaaatcatacaacgtgaaaccttt

SEQ ID NO: 1287486 - DNA, 25 bp, Homo sapien
tttcagagcatcttcataagcgccc

SEQ ID NO: 1287487 - DNA, 25 bp, Homo sapien
ttaatggccgaataatagtctgttg

SEQ ID NO: 1287488 - DNA, 25 bp, Homo sapien
taacttaacacgtcttcaagatgca

SEQ ID NO: 1287489 - DNA, 25 bp, Homo sapien
tcttccttaggtggtgactctactg

SEQ ID NO: 1287490 - DNA, 25 bp, Homo sapien
tctaaattagacaaagcgggagaga

SEQ ID NO: 1287491 - DNA, 25 bp, Homo sapien
tagacaaagcgggagagagcaaaag

SEQ ID NO: 1287492 - DNA, 25 bp, Homo sapien
cttaggtggtgactctactgttagg

SEQ ID NO: 1287493 - DNA, 25 bp, Homo sapien
ttgattaaaggcgtccacgacagcc

SEQ ID NO: 1287494 - DNA, 25 bp, Homo sapien
gcttgattaaaggcgtccacgacag

SEQ ID NO: 1287495 - DNA, 25 bp, Homo sapien
ttaaaggcgtccacgacagccggct

SEQ ID NO: 1287496 - DNA, 25 bp, Homo sapien
gattaaaggcgtccacgacagccgg

SEQ ID NO: 1287497 - DNA, 25 bp, Homo sapien
cgctggcgccatacgcggcctgcag

SEQ ID NO: 1287498 - DNA, 25 bp, Homo sapien
gcgctggcgccatacgcggcctgca

SEQ ID NO: 1287499 - DNA, 25 bp, Homo sapien
gctggcgccatacgcggcctgcagg

SEQ ID NO: 1287500 - DNA, 25 bp, Homo sapien
caggggtcagtaccatcagggtcac

SEQ ID NO: 1287501 - DNA, 25 bp, Homo sapien
cacaggggtcagtaccatcagggtc

SEQ ID NO: 1287502 - DNA, 25 bp, Homo sapien
aggggtcagtaccatcagggtcaca

SEQ ID NO: 1287503 - DNA, 25 bp, Homo sapien
gcacaggggtcagtaccatcagggt

SEQ ID NO: 1287504 - DNA, 25 bp, Homo sapien
tgtttcccgtccttgtcctcatact

SEQ ID NO: 1287505 - DNA, 25 bp, Homo sapien
atacttgtacttgccggtcagcagg

SEQ ID NO: 1287506 - DNA, 25 bp, Homo sapien
tgattcctgtagatctctgcccact

SEQ ID NO: 1287507 - DNA, 25 bp, Homo sapien
gcccactgagtcccaaagaagcggc

SEQ ID NO: 1287508 - DNA, 25 bp, Homo sapien
ctgcgggaaggcagcaatcagcccc

SEQ ID NO: 1287509 - DNA, 25 bp, Homo sapien
cagagtgccccagaagctgccacat

SEQ ID NO: 1287510 - DNA, 25 bp, Homo sapien
gtttccacctgccgggtggtggcgc

SEQ ID NO: 1287511 - DNA, 25 bp, Homo sapien
gggaagagctccgtttccacctgcc

SEQ ID NO: 1287512 - DNA, 25 bp, Homo sapien
ccacctgccgggtggtggcgctgta

SEQ ID NO: 1287513 - DNA, 25 bp, Homo sapien
gttgtaggcatagaacctcagtcca

SEQ ID NO: 1287514 - DNA, 25 bp, Homo sapien
ggccacttcccaggcggcatagttg

SEQ ID NO: 1287515 - DNA, 25 bp, Homo sapien
ctggtacacagtgggcaggatccag

SEQ ID NO: 1287516 - DNA, 25 bp, Homo sapien
tcttgcagagggtacagatctcggc

SEQ ID NO: 1287517 - DNA, 25 bp, Homo sapien
ggatccagccgttgctcttgcagag

SEQ ID NO: 1287518 - DNA, 25 bp, Homo sapien
acgcagtgtctcttccaccggggcg

SEQ ID NO: 1287519 - DNA, 25 bp, Homo sapien
gtggcaggcacgcagtgtctcttcc

SEQ ID NO: 1287520 - DNA, 25 bp, Homo sapien
ggcaggcacgcagtgtctcttccac

SEQ ID NO: 1287521 - DNA, 25 bp, Homo sapien
gctggtggcaggcacgcagtgtctc

SEQ ID NO: 1287522 - DNA, 25 bp, Homo sapien
gtagatagaagaggtccactcaggg

SEQ ID NO: 1287523 - DNA, 25 bp, Homo sapien
gatagaagaggtccactcagggaca

SEQ ID NO: 1287524 - DNA, 25 bp, Homo sapien
atagaagaggtccactcagggacac

SEQ ID NO: 1287525 - DNA, 25 bp, Homo sapien
tagatagaagaggtccactcaggga

SEQ ID NO: 1287526 - DNA, 25 bp, Homo sapien
aatccatggattggccttggtagca

SEQ ID NO: 1287527 - DNA, 25 bp, Homo sapien
gatcggacactgtcaggcttcaggg

SEQ ID NO: 1287528 - DNA, 25 bp, Homo sapien
gtctccagctgggatcggacactgt

SEQ ID NO: 1287529 - DNA, 25 bp, Homo sapien
caggcttcagggagttcccaatcca

SEQ ID NO: 1287530 - DNA, 25 bp, Homo sapien
agagcaaagtccagggacccgagca

SEQ ID NO: 1287531 - DNA, 25 bp, Homo sapien
tgccaggcgataagaacagaatttc

SEQ ID NO: 1287532 - DNA, 25 bp, Homo sapien
cccgagcagtctggcatgagcgtag

SEQ ID NO: 1287533 - DNA, 25 bp, Homo sapien
cagatagtgtgctgggtccaaactc

SEQ ID NO: 1287534 - DNA, 25 bp, Homo sapien
agctagatgtgcctgaggaactggc

SEQ ID NO: 1287535 - DNA, 25 bp, Homo sapien
ggcggttcccagagttgcggtgtgg

SEQ ID NO: 1287536 - DNA, 25 bp, Homo sapien
catccagttgtccagagctagatgt

SEQ ID NO: 1287537 - DNA, 25 bp, Homo sapien
ccagagttgcggtgtggacagggat

SEQ ID NO: 1287538 - DNA, 25 bp, Homo sapien
tgcagtcgctgctgcccattcggag

SEQ ID NO: 1287539 - DNA, 25 bp, Homo sapien
gtgtctatctcggtgtggccgcgct

SEQ ID NO: 1287540 - DNA, 25 bp, Homo sapien
cggactggccgtcgctgtacaggaa

SEQ ID NO: 1287541 - DNA, 25 bp, Homo sapien
ggaaggcgcgcgtgactgcggcgct

SEQ ID NO: 1287542 - DNA, 25 bp, Homo sapien
cgggcccgcgacagctgccgggaca

SEQ ID NO: 1287543 - DNA, 25 bp, Homo sapien
gccgggcccgcgacagctgccggga

SEQ ID NO: 1287544 - DNA, 25 bp, Homo sapien
ccgggcccgcgacagctgccgggac

SEQ ID NO: 1287545 - DNA, 25 bp, Homo sapien
cgcagcggtcggaagcaccaggctc

SEQ ID NO: 1287546 - DNA, 25 bp, Homo sapien
gtcggaagcaccaggctcggagcgg

SEQ ID NO: 1287547 - DNA, 25 bp, Homo sapien
aggagccgcgcgcagcggtcggaag

SEQ ID NO: 1287548 - DNA, 25 bp, Homo sapien
ggaagcaccaggctcggagcgggcg

SEQ ID NO: 1287549 - DNA, 25 bp, Homo sapien
gaggcttaccaaaggctcaaaacag

SEQ ID NO: 1287550 - DNA, 25 bp, Homo sapien
gattttaacactcctcaagtccgca

SEQ ID NO: 1287551 - DNA, 25 bp, Homo sapien
tccccgtggagtgacatggttaaag

SEQ ID NO: 1287552 - DNA, 25 bp, Homo sapien
tccaagggtggcgaagatcccaaag

SEQ ID NO: 1287553 - DNA, 25 bp, Homo sapien
taattttacaagtcttcaaggtgca

SEQ ID NO: 1287554 - DNA, 25 bp, Homo sapien
tgtttcatgtattcagaggtgtaca

SEQ ID NO: 1287555 - DNA, 25 bp, Homo sapien
gcatcctcataagtgcacccaaaag

SEQ ID NO: 1287556 - DNA, 25 bp, Homo sapien
accttttgcaattggcgtctttaat

SEQ ID NO: 1287557 - DNA, 25 bp, Homo sapien
catctgtatatctttgctagagaaa

SEQ ID NO: 1287558 - DNA, 25 bp, Homo sapien
taatgatgttgagcgctttctcatc

SEQ ID NO: 1287559 - DNA, 25 bp, Homo sapien
agaaagttctatttggatcctttgt

SEQ ID NO: 1287560 - DNA, 25 bp, Homo sapien
tctttatataattcaagcttgtcca

SEQ ID NO: 1287561 - DNA, 25 bp, Homo sapien
gtaatgagtgagttccagctctatg

SEQ ID NO: 1287562 - DNA, 25 bp, Homo sapien
agtgagttccagctctatgagttca

SEQ ID NO: 1287563 - DNA, 25 bp, Homo sapien
ttccagctctatgagttcacacagg

SEQ ID NO: 1287564 - DNA, 25 bp, Homo sapien
cacccccttgtacagactgcagagt

SEQ ID NO: 1287565 - DNA, 25 bp, Homo sapien
ccatccctaagaatttactgaggca

SEQ ID NO: 1287566 - DNA, 25 bp, Homo sapien
agtagttgggacattcgtgagtaac

SEQ ID NO: 1287567 - DNA, 25 bp, Homo sapien
ggaagtagttgggacattcgtgagt

SEQ ID NO: 1287568 - DNA, 25 bp, Homo sapien
ctagcggaagtagttgggacattcg

SEQ ID NO: 1287569 - DNA, 25 bp, Homo sapien
tagcggaagtagttgggacattcgt

SEQ ID NO: 1287570 - DNA, 25 bp, Homo sapien
ttgattaaaggcgtccacgacagcc

SEQ ID NO: 1287571 - DNA, 25 bp, Homo sapien
gattaaaggcgtccacgacagccgg

SEQ ID NO: 1287572 - DNA, 25 bp, Homo sapien
gcttgattaaaggcgtccacgacag

SEQ ID NO: 1287573 - DNA, 25 bp, Homo sapien
ttaaaggcgtccacgacagccggct

SEQ ID NO: 1287574 - DNA, 25 bp, Homo sapien
gcgctggcgccatacgcggcctgca

SEQ ID NO: 1287575 - DNA, 25 bp, Homo sapien
cgctggcgccatacgcggcctgcag

SEQ ID NO: 1287576 - DNA, 25 bp, Homo sapien
gctggcgccatacgcggcctgcagg

SEQ ID NO: 1287577 - DNA, 25 bp, Homo sapien
gtacatctctgcccaggtattccca

SEQ ID NO: 1287578 - DNA, 25 bp, Homo sapien
tgtacatctctgcccaggtattccc

SEQ ID NO: 1287579 - DNA, 25 bp, Homo sapien
ctgtacatctctgcccaggtattcc

SEQ ID NO: 1287580 - DNA, 25 bp, Homo sapien
aagcagcaatcagccccggggccta

SEQ ID NO: 1287581 - DNA, 25 bp, Homo sapien
tagagtgccccagaagctgccacat

SEQ ID NO: 1287582 - DNA, 25 bp, Homo sapien
gggcctagagtgccccagaagctgc

SEQ ID NO: 1287583 - DNA, 25 bp, Homo sapien
tgagggaaagcagcaatcagccccg

SEQ ID NO: 1287584 - DNA, 25 bp, Homo sapien
gctccgtttccacctgccgggtgat

SEQ ID NO: 1287585 - DNA, 25 bp, Homo sapien
ccgtttccacctgccgggtgatggc

SEQ ID NO: 1287586 - DNA, 25 bp, Homo sapien
gttgaaggcatagaacctcagtcca

SEQ ID NO: 1287587 - DNA, 25 bp, Homo sapien
agctccgtttccacctgccgggtga

SEQ ID NO: 1287588 - DNA, 25 bp, Homo sapien
ggatccagccgttgctcttgcagag

SEQ ID NO: 1287589 - DNA, 25 bp, Homo sapien
tcttgcagagggtacagatctcggc

SEQ ID NO: 1287590 - DNA, 25 bp, Homo sapien
gggcaggatccagccgttgctcttg

SEQ ID NO: 1287591 - DNA, 25 bp, Homo sapien
ttcccaggctgcatagttggagagg

SEQ ID NO: 1287592 - DNA, 25 bp, Homo sapien
tcagaacatagtgcagcccagacca

SEQ ID NO: 1287593 - DNA, 25 bp, Homo sapien
cagtcagaacatagtgcagcccaga

SEQ ID NO: 1287594 - DNA, 25 bp, Homo sapien
ccagtcagaacatagtgcagcccag

SEQ ID NO: 1287595 - DNA, 25 bp, Homo sapien
ctgctcaggtgaggctccagtcaga

SEQ ID NO: 1287596 - DNA, 25 bp, Homo sapien
tgtggtctggcatatgcaggtagaa

SEQ ID NO: 1287597 - DNA, 25 bp, Homo sapien
atggtctcggactggccctcgctgt

SEQ ID NO: 1287598 - DNA, 25 bp, Homo sapien
tcgctgccgcccagccggagcccca

SEQ ID NO: 1287599 - DNA, 25 bp, Homo sapien
aggatggtctcggactggccctcgc

SEQ ID NO: 1287600 - DNA, 25 bp, Homo sapien
gtcgctgccgcccagccggagcccc

SEQ ID NO: 1287601 - DNA, 25 bp, Homo sapien
cgggcccgcgacagctgccgggaca

SEQ ID NO: 1287602 - DNA, 25 bp, Homo sapien
ccgggcccgcgacagctgccgggac

SEQ ID NO: 1287603 - DNA, 25 bp, Homo sapien
gccgggcccgcgacagctgccggga

SEQ ID NO: 1287604 - DNA, 25 bp, Homo sapien
cacgctcggctactaggaccttctg

SEQ ID NO: 1287605 - DNA, 25 bp, Homo sapien
cctcgtggctttagagacgggctcg

SEQ ID NO: 1287606 - DNA, 25 bp, Homo sapien
caagggtggcgactatcccaaaagg

SEQ ID NO: 1287607 - DNA, 25 bp, Homo sapien
actcctcaacgtccccaagggtgag

SEQ ID NO: 1287608 - DNA, 25 bp, Homo sapien
accatgaccaagttagtttcatccc

SEQ ID NO: 1287609 - DNA, 25 bp, Homo sapien
atacaaacaataatgcaccatgacc

SEQ ID NO: 1287610 - DNA, 25 bp, Homo sapien
gcaccatgaccaagttagtttcatc

SEQ ID NO: 1287611 - DNA, 25 bp, Homo sapien
aggaatacaaggttggcttaatatt

SEQ ID NO: 1287612 - DNA, 25 bp, Homo sapien
catgcctcccatggttgcaggtgtg

SEQ ID NO: 1287613 - DNA, 25 bp, Homo sapien
taaagggcatccataggccaggagc

SEQ ID NO: 1287614 - DNA, 25 bp, Homo sapien
gggcctgtctgatatgactgctgaa

SEQ ID NO: 1287615 - DNA, 25 bp, Homo sapien
tctgggttctgttccccgagctcaa

SEQ ID NO: 1287616 - DNA, 25 bp, Homo sapien
gttatggcagcccaggaaatgagct

SEQ ID NO: 1287617 - DNA, 25 bp, Homo sapien
tcttagatcacagggagtgtccagt

SEQ ID NO: 1287618 - DNA, 25 bp, Homo sapien
ttggaacacgaacagtgaaggctga

SEQ ID NO: 1287619 - DNA, 25 bp, Homo sapien
tacaggctgcacttcgttaggaaag

SEQ ID NO: 1287620 - DNA, 25 bp, Homo sapien
ttttgggactcaggctgatccacca

SEQ ID NO: 1287621 - DNA, 25 bp, Homo sapien
cttgcggccggcctatcatgggact

SEQ ID NO: 1287622 - DNA, 25 bp, Homo sapien
gctcctcaacttgcggccggcctat

SEQ ID NO: 1287623 - DNA, 25 bp, Homo sapien
caccattggtttgtcgggggctctc

SEQ ID NO: 1287624 - DNA, 25 bp, Homo sapien
tatcagtcccaaaatttagaaagca

SEQ ID NO: 1287625 - DNA, 25 bp, Homo sapien
gaaagcacaggcatggaagggtaca

SEQ ID NO: 1287626 - DNA, 25 bp, Homo sapien
gcctctgtggatctgtatcagtccc

SEQ ID NO: 1287627 - DNA, 25 bp, Homo sapien
cagcaattgcacagttatatacaca

SEQ ID NO: 1287628 - DNA, 25 bp, Homo sapien
tgaatgtcttcaggcaaccctagcc

SEQ ID NO: 1287629 - DNA, 25 bp, Homo sapien
caggactgttgctccaagtgttaca

SEQ ID NO: 1287630 - DNA, 25 bp, Homo sapien
tctgaggctgggacataaaaggcca

SEQ ID NO: 1287631 - DNA, 25 bp, Homo sapien
acatgcagaggtcacgtgtgtgccg

SEQ ID NO: 1287632 - DNA, 25 bp, Homo sapien
catttcttctaggtatacctaggga

SEQ ID NO: 1287633 - DNA, 25 bp, Homo sapien
gtatacctagggagtgaaatttctg

SEQ ID NO: 1287634 - DNA, 25 bp, Homo sapien
cttctaggtatacctagggagtgaa

SEQ ID NO: 1287635 - DNA, 25 bp, Homo sapien
gcctcatttcttctaggtataccta

SEQ ID NO: 1287636 - DNA, 25 bp, Homo sapien
ggttcactcaagacctaggctacag

SEQ ID NO: 1287637 - DNA, 25 bp, Homo sapien
tattcaacaggaagcgctcaagtgg

SEQ ID NO: 1287638 - DNA, 25 bp, Homo sapien
tatgtctgtccccatgccgaacagg

SEQ ID NO: 1287639 - DNA, 25 bp, Homo sapien
tcagcttaaggccaagactggtcag

SEQ ID NO: 1287640 - DNA, 25 bp, Homo sapien
gattaaaggcatccacgacagccgg

SEQ ID NO: 1287641 - DNA, 25 bp, Homo sapien
tgccaggcttgattaaaggcatcca

SEQ ID NO: 1287642 - DNA, 25 bp, Homo sapien
gaagtagttgggacattcgtgagca

SEQ ID NO: 1287643 - DNA, 25 bp, Homo sapien
ttcgtgagcaaccaaatgccaggct

SEQ ID NO: 1287644 - DNA, 25 bp, Homo sapien
tgggaggtagtgcggtgtggtggtg

SEQ ID NO: 1287645 - DNA, 25 bp, Homo sapien
agtatatgtgctgtcgatgcaggca

SEQ ID NO: 1287646 - DNA, 25 bp, Homo sapien
tagtatatgtgctgtcgatgcaggc

SEQ ID NO: 1287647 - DNA, 25 bp, Homo sapien
ttagtatatgtgctgtcgatgcagg

SEQ ID NO: 1287648 - DNA, 25 bp, Homo sapien
cagacactatgcaacatggaaggct

SEQ ID NO: 1287649 - DNA, 25 bp, Homo sapien
aaacttatgtaaaacacagctccca

SEQ ID NO: 1287650 - DNA, 25 bp, Homo sapien
gaacatctaccggatatatgccaga

SEQ ID NO: 1287651 - DNA, 25 bp, Homo sapien
ctgaagctggagataagtttgttgc

SEQ ID NO: 1287652 - DNA, 25 bp, Homo sapien
aacgcaatggcctcgaagtggtgct

SEQ ID NO: 1287653 - DNA, 25 bp, Homo sapien
caccaacgcaatggcctcgaagtgg

SEQ ID NO: 1287654 - DNA, 25 bp, Homo sapien
agggccttctccaccaacgcaatgg

SEQ ID NO: 1287655 - DNA, 25 bp, Homo sapien
tccaccaacgcaatggcctcgaagt

SEQ ID NO: 1287656 - DNA, 25 bp, Homo sapien
tattcccaaagaagcggcccacagg

SEQ ID NO: 1287657 - DNA, 25 bp, Homo sapien
aagcggcccacaggctgtttcccgt

SEQ ID NO: 1287658 - DNA, 25 bp, Homo sapien
cctcatacttgtacttgccagtcag

SEQ ID NO: 1287659 - DNA, 25 bp, Homo sapien
aggtctcagcccagctattcccaaa

SEQ ID NO: 1287660 - DNA, 25 bp, Homo sapien
ctgcgggaaggcagcaatcagcccc

SEQ ID NO: 1287661 - DNA, 25 bp, Homo sapien
cagagtgccccagaagctgccacat

SEQ ID NO: 1287662 - DNA, 25 bp, Homo sapien
cctgccgggtggtggcgttgtacat

SEQ ID NO: 1287663 - DNA, 25 bp, Homo sapien
gggaagagctccgtttccacctgcc

SEQ ID NO: 1287664 - DNA, 25 bp, Homo sapien
cctcagtccaaagtgcctgaggcag

SEQ ID NO: 1287665 - DNA, 25 bp, Homo sapien
gttgtaggcatagaacctcagtcca

SEQ ID NO: 1287666 - DNA, 25 bp, Homo sapien
gtacacagtgggcaggatccagcca

SEQ ID NO: 1287667 - DNA, 25 bp, Homo sapien
gatccagccattgctcttgcagagg

SEQ ID NO: 1287668 - DNA, 25 bp, Homo sapien
ttcccagctagcatagttggagagg

SEQ ID NO: 1287669 - DNA, 25 bp, Homo sapien
tctcggccacttcccagctagcata

SEQ ID NO: 1287670 - DNA, 25 bp, Homo sapien
tggtgcagccgctggcaggcatgca

SEQ ID NO: 1287671 - DNA, 25 bp, Homo sapien
gcgtgtaggtagaagaggtccactt

SEQ ID NO: 1287672 - DNA, 25 bp, Homo sapien
gggtgccgtggtcaggtgcgtgtag

SEQ ID NO: 1287673 - DNA, 25 bp, Homo sapien
ccgctggcaggcatgcagcgtctct

SEQ ID NO: 1287674 - DNA, 25 bp, Homo sapien
cactgtcaggctttagtgattttcc

SEQ ID NO: 1287675 - DNA, 25 bp, Homo sapien
gtactgccagctgcacaggtcaaat

SEQ ID NO: 1287676 - DNA, 25 bp, Homo sapien
gaggcagaggtactgccagctgcac

SEQ ID NO: 1287677 - DNA, 25 bp, Homo sapien
ggcatcgccacagttctccctgaga

SEQ ID NO: 1287678 - DNA, 25 bp, Homo sapien
ggcagaggtactgccagctgcacag

SEQ ID NO: 1287679 - DNA, 25 bp, Homo sapien
agcaccgaggcgacccgcggtggcg

SEQ ID NO: 1287680 - DNA, 25 bp, Homo sapien
gttcggtgtggccgcgctccagaaa

SEQ ID NO: 1287681 - DNA, 25 bp, Homo sapien
ccgtgtccagttcggtgtggccgcg

SEQ ID NO: 1287682 - DNA, 25 bp, Homo sapien
gcgctccagaaaggcgcgcacggcc

SEQ ID NO: 1287683 - DNA, 25 bp, Homo sapien
gaagcgcgcagtggacggcggcgcg

SEQ ID NO: 1287684 - DNA, 25 bp, Homo sapien
agactacgcgagacgcggcactcag

SEQ ID NO: 1287685 - DNA, 25 bp, Homo sapien
gcggcggagagcgaagcgcgcagtg

SEQ ID NO: 1287686 - DNA, 25 bp, Homo sapien
acggcggcgcgggagactacgcgag

SEQ ID NO: 1287687 - DNA, 25 bp, Homo sapien
gcgcctgcgcgttgggagccggggg

SEQ ID NO: 1287688 - DNA, 25 bp, Homo sapien
cgcctgcgcgttgggagccgggggc

SEQ ID NO: 1287689 - DNA, 25 bp, Homo sapien
gctgggaagatgcaacatgagtgca

SEQ ID NO: 1287690 - DNA, 25 bp, Homo sapien
agtggtccccacttcatagttgctg

SEQ ID NO: 1287691 - DNA, 25 bp, Homo sapien
gcatgcaggatgcttggctcaccgg

SEQ ID NO: 1287692 - DNA, 25 bp, Homo sapien
caccggtccgagctgtggtgatgat

SEQ ID NO: 1287693 - DNA, 25 bp, Homo sapien
ttttcatggagacagcgttgcccag

SEQ ID NO: 1287694 - DNA, 25 bp, Homo sapien
tggctctctatagcctgtacctcct

SEQ ID NO: 1287695 - DNA, 25 bp, Homo sapien
gtatggaggctcaagtataagatgt

SEQ ID NO: 1287696 - DNA, 25 bp, Homo sapien
aacacacacggaataagatttccag

SEQ ID NO: 1287697 - DNA, 25 bp, Homo sapien
aattgacagaaaagcacctggccgg

SEQ ID NO: 1287698 - DNA, 25 bp, Homo sapien
ttttgcattccatagaaattgacag

SEQ ID NO: 1287699 - DNA, 25 bp, Homo sapien
cagacagtggattttatgcctataa

SEQ ID NO: 1287700 - DNA, 25 bp, Homo sapien
caccaatgtaccaaaaaggtgggag

SEQ ID NO: 1287701 - DNA, 25 bp, Homo sapien
cagtggattttatgcctataaatgg

SEQ ID NO: 1287702 - DNA, 25 bp, Homo sapien
gctggcagacagtggattttatgcc

SEQ ID NO: 1287703 - DNA, 25 bp, Homo sapien
ctgagagcgaggtgtggcagaagca

SEQ ID NO: 1287704 - DNA, 25 bp, Homo sapien
gaactgagagcgaggtgtggcagaa

SEQ ID NO: 1287705 - DNA, 25 bp, Homo sapien
agagaactgagagcgaggtgtggca

SEQ ID NO: 1287706 - DNA, 25 bp, Homo sapien
ggagagaactgagagcgaggtgtgg

SEQ ID NO: 1287707 - DNA, 25 bp, Homo sapien
gagatggcgctgtgcggtcaatgat

SEQ ID NO: 1287708 - DNA, 25 bp, Homo sapien
cggtcaatgatgcagctgttatgtg

SEQ ID NO: 1287709 - DNA, 25 bp, Homo sapien
tttattctcagggagagatggcgct

SEQ ID NO: 1287710 - DNA, 25 bp, Homo sapien
ggtggctatcggctttattctcagg

SEQ ID NO: 1287711 - DNA, 25 bp, Homo sapien
ggagcagaaaacgagttttctaaga

SEQ ID NO: 1287712 - DNA, 25 bp, Homo sapien
gcacggcgtgtctggttagcatgaa

SEQ ID NO: 1287713 - DNA, 25 bp, Homo sapien
gaatctaacgagtgcacggcgtgtc

SEQ ID NO: 1287714 - DNA, 25 bp, Homo sapien
aagaaaggaatctaacgagtgcacg

SEQ ID NO: 1287715 - DNA, 25 bp, Homo sapien
cttcagagcttcttgttttgatttg

SEQ ID NO: 1287716 - DNA, 25 bp, Homo sapien
ttgatttgtctgcaaaagtctgcac

SEQ ID NO: 1287717 - DNA, 25 bp, Homo sapien
tgctgctttctcttcaaagcctcca

SEQ ID NO: 1287718 - DNA, 25 bp, Homo sapien
gcctccaccaggtcattcttcagag

SEQ ID NO: 1287719 - DNA, 25 bp, Homo sapien
gcaaaggggtacatggccgagacct

SEQ ID NO: 1287720 - DNA, 25 bp, Homo sapien
atggccgagacctgcaccctctgca

SEQ ID NO: 1287721 - DNA, 25 bp, Homo sapien
ctgggcatctgcccctctcagaaag

SEQ ID NO: 1287722 - DNA, 25 bp, Homo sapien
tgggcatctgcccctctcagaaagg

SEQ ID NO: 1287723 - DNA, 25 bp, Homo sapien
atggacaggtgctcatctctgcccc

SEQ ID NO: 1287724 - DNA, 25 bp, Homo sapien
tgcccctggccaccggtgacccggc

SEQ ID NO: 1287725 - DNA, 25 bp, Homo sapien
ctctgcccctggccaccggtgaccc

SEQ ID NO: 1287726 - DNA, 25 bp, Homo sapien
ccctggccaccggtgacccggccat

SEQ ID NO: 1287727 - DNA, 25 bp, Homo sapien
gctgtgaggcaccatccgctgttaa

SEQ ID NO: 1287728 - DNA, 25 bp, Homo sapien
gggccatgcgggttcctctataaaa

SEQ ID NO: 1287729 - DNA, 25 bp, Homo sapien
catttaattttcacgggcatcctgg

SEQ ID NO: 1287730 - DNA, 25 bp, Homo sapien
cagggcgaccgcattcacgtatgtg

SEQ ID NO: 1287731 - DNA, 25 bp, Homo sapien
ggagggtctcgcggctctcaggcag

SEQ ID NO: 1287732 - DNA, 25 bp, Homo sapien
ggtctcgcggctctcaggcagggta

SEQ ID NO: 1287733 - DNA, 25 bp, Homo sapien
gtctcgcggctctcaggcagggtac

SEQ ID NO: 1287734 - DNA, 25 bp, Homo sapien
agggtctcgcggctctcaggcaggg

SEQ ID NO: 1287735 - DNA, 25 bp, Homo sapien
ggtcagcacttgagagagctccctc

SEQ ID NO: 1287736 - DNA, 25 bp, Homo sapien
tggttgtcagggatagcatcaatag

SEQ ID NO: 1287737 - DNA, 25 bp, Homo sapien
aattatcaggctggatgtagatctg

SEQ ID NO: 1287738 - DNA, 25 bp, Homo sapien
tctgcaactgcttaaacttttggtt

SEQ ID NO: 1287739 - DNA, 25 bp, Homo sapien
aattcagggagacccacgaggcgga

SEQ ID NO: 1287740 - DNA, 25 bp, Homo sapien
tgggagggaagagaacgacgagaag

SEQ ID NO: 1287741 - DNA, 25 bp, Homo sapien
gaacgacgagaagccaggaacgcag

SEQ ID NO: 1287742 - DNA, 25 bp, Homo sapien
tacagagagtgttcaagatgagtgg

SEQ ID NO: 1287743 - DNA, 25 bp, Homo sapien
tggtcgtggtattcaggggctcgcc

SEQ ID NO: 1287744 - DNA, 25 bp, Homo sapien
ttggctgggcgggaaagtgtgtttg

SEQ ID NO: 1287745 - DNA, 25 bp, Homo sapien
aggtccacgctggcggtggtcgtgg

SEQ ID NO: 1287746 - DNA, 25 bp, Homo sapien
gtgtgtttggtgtatcgggcagtgg

SEQ ID NO: 1287747 - DNA, 25 bp, Homo sapien
ggaccactgggctctaaccctgtca

SEQ ID NO: 1287748 - DNA, 25 bp, Homo sapien
ctgtcacaggtcacgaagaccaagc

SEQ ID NO: 1287749 - DNA, 25 bp, Homo sapien
tgggctctaaccctgtcacaggtca

SEQ ID NO: 1287750 - DNA, 25 bp, Homo sapien
taaccctgtcacaggtcacgaagac

SEQ ID NO: 1287751 - DNA, 25 bp, Homo sapien
cagaagacaagggtccaaagaggac

SEQ ID NO: 1287752 - DNA, 25 bp, Homo sapien
gaagacaagggtccaaagaggactc

SEQ ID NO: 1287753 - DNA, 25 bp, Homo sapien
caggggatcagaagacaagggtcca

SEQ ID NO: 1287754 - DNA, 25 bp, Homo sapien
gacaagggtccaaagaggactcctc

SEQ ID NO: 1287755 - DNA, 25 bp, Homo sapien
aaaactgtaaagcaggtgactgaaa

SEQ ID NO: 1287756 - DNA, 25 bp, Homo sapien
tgttttaaaactgtaaagcaggtga

SEQ ID NO: 1287757 - DNA, 25 bp, Homo sapien
tttaaaactgtaaagcaggtgactg

SEQ ID NO: 1287758 - DNA, 25 bp, Homo sapien
ctgttttaaaactgtaaagcaggtg

SEQ ID NO: 1287759 - DNA, 25 bp, Homo sapien
tcgcccaccccagtccacgagctgg

SEQ ID NO: 1287760 - DNA, 25 bp, Homo sapien
ctgtcgcccaccccagtccacgagc

SEQ ID NO: 1287761 - DNA, 25 bp, Homo sapien
cgcccaccccagtccacgagctggg

SEQ ID NO: 1287762 - DNA, 25 bp, Homo sapien
accccagtccacgagctggggcagc

SEQ ID NO: 1287763 - DNA, 25 bp, Homo sapien
ttttccaaagtagatctcgttcagc

SEQ ID NO: 1287764 - DNA, 25 bp, Homo sapien
gtagatctcgttcagcgtacttctg

SEQ ID NO: 1287765 - DNA, 25 bp, Homo sapien
ctcgttcagcgtacttctgatttta

SEQ ID NO: 1287766 - DNA, 25 bp, Homo sapien
caaagtagatctcgttcagcgtact

SEQ ID NO: 1287767 - DNA, 25 bp, Homo sapien
gcctgagcagtcttctgggagccca

SEQ ID NO: 1287768 - DNA, 25 bp, Homo sapien
ccagcgcctgagcagtcttctggga

SEQ ID NO: 1287769 - DNA, 25 bp, Homo sapien
gggagacaagacctagtgcgcccca

SEQ ID NO: 1287770 - DNA, 25 bp, Homo sapien
cctgttcacacccaggcgatcaggg

SEQ ID NO: 1287771 - DNA, 25 bp, Homo sapien
aggccagggcaaaatccaagaagcg

SEQ ID NO: 1287772 - DNA, 25 bp, Homo sapien
caagaagcgctctgccggctgcggt

SEQ ID NO: 1287773 - DNA, 25 bp, Homo sapien
tgaggccagggcaaaatccaagaag

SEQ ID NO: 1287774 - DNA, 25 bp, Homo sapien
cagaggctccaaaaatatgaggcca

SEQ ID NO: 1287775 - DNA, 25 bp, Homo sapien
ggagccagccagagcccaggtcact

SEQ ID NO: 1287776 - DNA, 25 bp, Homo sapien
caggagccagccagagcccaggtca

SEQ ID NO: 1287777 - DNA, 25 bp, Homo sapien
gccagccagagcccaggtcactcac

SEQ ID NO: 1287778 - DNA, 25 bp, Homo sapien
tgcaggagccagccagagcccaggt

SEQ ID NO: 1287779 - DNA, 25 bp, Homo sapien
gcgcccgatgttggctatgtgtggg

SEQ ID NO: 1287780 - DNA, 25 bp, Homo sapien
caggcgcccgatgttggctatgtgt

SEQ ID NO: 1287781 - DNA, 25 bp, Homo sapien
agcagtcactcacagtttcatcctt

SEQ ID NO: 1287782 - DNA, 25 bp, Homo sapien
cagtcactcacagtttcatccttct

SEQ ID NO: 1287783 - DNA, 25 bp, Homo sapien
agccagagatttctgagaacggcag

SEQ ID NO: 1287784 - DNA, 25 bp, Homo sapien
gccagagatttctgagaacggcaga

SEQ ID NO: 1287785 - DNA, 25 bp, Homo sapien
aagccagagatttctgagaacggca

SEQ ID NO: 1287786 - DNA, 25 bp, Homo sapien
ccagagatttctgagaacggcagac

SEQ ID NO: 1287787 - DNA, 25 bp, Homo sapien
cctactgttcccaccgtggagccag

SEQ ID NO: 1287788 - DNA, 25 bp, Homo sapien
ctccacggtctgcaaagagcctact

SEQ ID NO: 1287789 - DNA, 25 bp, Homo sapien
cacggtctgcaaagagcctactgtt

SEQ ID NO: 1287790 - DNA, 25 bp, Homo sapien
cggtctgcaaagagcctactgttcc

SEQ ID NO: 1287791 - DNA, 25 bp, Homo sapien
tgcacctggccgacccaacttttgt

SEQ ID NO: 1287792 - DNA, 25 bp, Homo sapien
gcctctgcaaggaaacgctagctcg

SEQ ID NO: 1287793 - DNA, 25 bp, Homo sapien
gatccagacaacaatttttgatggg

SEQ ID NO: 1287794 - DNA, 25 bp, Homo sapien
tgatgggatcgttaaaatcatctgc

SEQ ID NO: 1287795 - DNA, 25 bp, Homo sapien
ggcaagttcccatctaccatcctgc

SEQ ID NO: 1287796 - DNA, 25 bp, Homo sapien
actacttaaatagggtcgcatcctt

SEQ ID NO: 1287797 - DNA, 25 bp, Homo sapien
tgcacgagagcacttcttttcctgt

SEQ ID NO: 1287798 - DNA, 25 bp, Homo sapien
catctaccatcctgcacctgtggct

SEQ ID NO: 1287799 - DNA, 25 bp, Homo sapien
gacacaagagattctggcagggctc

SEQ ID NO: 1287800 - DNA, 25 bp, Homo sapien
caacctatgtcgctgtagatggcag

SEQ ID NO: 1287801 - DNA, 25 bp, Homo sapien
cagggctggattcagtttagggcac

SEQ ID NO: 1287802 - DNA, 25 bp, Homo sapien
cactgtaccctgctaaggcactggg

SEQ ID NO: 1287803 - DNA, 25 bp, Homo sapien
gggctggactcggtctgttctgata

SEQ ID NO: 1287804 - DNA, 25 bp, Homo sapien
gctggactcggtctgttctgataga

SEQ ID NO: 1287805 - DNA, 25 bp, Homo sapien
actcggtctgttctgatagagctgt

SEQ ID NO: 1287806 - DNA, 25 bp, Homo sapien
tggactcggtctgttctgatagagc

SEQ ID NO: 1287807 - DNA, 25 bp, Homo sapien
catgctctggcaagtcatcctgagg

SEQ ID NO: 1287808 - DNA, 25 bp, Homo sapien
gagaaaacgggtggcatctgacaag

SEQ ID NO: 1287809 - DNA, 25 bp, Homo sapien
tgagggcaacagtccagaacctgct

SEQ ID NO: 1287810 - DNA, 25 bp, Homo sapien
gagaaatgctagaaagaccggcttc

SEQ ID NO: 1287811 - DNA, 25 bp, Homo sapien
ctgggcttgtctaggcctccatgtc

SEQ ID NO: 1287812 - DNA, 25 bp, Homo sapien
gcttgtctaggcctccatgtctttg

SEQ ID NO: 1287813 - DNA, 25 bp, Homo sapien
cctgtgctgcagcccgagaggaaag

SEQ ID NO: 1287814 - DNA, 25 bp, Homo sapien
ttgtctaggcctccatgtctttgcc

SEQ ID NO: 1287815 - DNA, 25 bp, Homo sapien
cacgtggcagtgtaccagagggtac

SEQ ID NO: 1287816 - DNA, 25 bp, Homo sapien
tcactgctgcgggaatttgccagaa

SEQ ID NO: 1287817 - DNA, 25 bp, Homo sapien
ctgccaaacgcaagtcaaagaggat

SEQ ID NO: 1287818 - DNA, 25 bp, Homo sapien
gacaaaaatatactgcctggcctaa

SEQ ID NO: 1287819 - DNA, 25 bp, Homo sapien
agttgacgtccctgagaaacatctt

SEQ ID NO: 1287820 - DNA, 25 bp, Homo sapien
gttgacgtccctgagaaacatcttt

SEQ ID NO: 1287821 - DNA, 25 bp, Homo sapien
tgggagaagtaaaagccgaaaatga

SEQ ID NO: 1287822 - DNA, 25 bp, Homo sapien
agaagtaaaagccgaaaatgatgga

SEQ ID NO: 1287823 - DNA, 25 bp, Homo sapien
aggagagtggcgctctgccccggcc

SEQ ID NO: 1287824 - DNA, 25 bp, Homo sapien
cggccactggcctaccaccagccgc

SEQ ID NO: 1287825 - DNA, 25 bp, Homo sapien
tgcccaggagagtggcgctctgccc

SEQ ID NO: 1287826 - DNA, 25 bp, Homo sapien
ccacgtgcccaggagagtggcgctc

SEQ ID NO: 1287827 - DNA, 25 bp, Homo sapien
tatttagcagtcaccgaatggcagg

SEQ ID NO: 1287828 - DNA, 25 bp, Homo sapien
caggcacagaggacgaattaagacc

SEQ ID NO: 1287829 - DNA, 25 bp, Homo sapien
tctagtagtgaacacaccccagtgg

SEQ ID NO: 1287830 - DNA, 25 bp, Homo sapien
ggcatagcctgatgtgcccacggaa

SEQ ID NO: 1287831 - DNA, 25 bp, Homo sapien
gtccaagtccaagtttgccttagac

SEQ ID NO: 1287832 - DNA, 25 bp, Homo sapien
caagtccaagtttgccttagacaga

SEQ ID NO: 1287833 - DNA, 25 bp, Homo sapien
aagtccaagtttgccttagacagaa

SEQ ID NO: 1287834 - DNA, 25 bp, Homo sapien
ccaagtccaagtttgccttagacag

SEQ ID NO: 1287835 - DNA, 25 bp, Homo sapien
tcaacttgtaatgggcggtgcgacc

SEQ ID NO: 1287836 - DNA, 25 bp, Homo sapien
ggttcatggtgccagagccagattt

SEQ ID NO: 1287837 - DNA, 25 bp, Homo sapien
tctggtaaggctgcctccgaggttc

SEQ ID NO: 1287838 - DNA, 25 bp, Homo sapien
cacagcatcaccgtggaggtcaact

SEQ ID NO: 1287839 - DNA, 25 bp, Homo sapien
cacttctaccacgtggatggaatcc

SEQ ID NO: 1287840 - DNA, 25 bp, Homo sapien
ctgcacttctaccacgtggatggaa

SEQ ID NO: 1287841 - DNA, 25 bp, Homo sapien
tctaccacgtggatggaatcccagc

SEQ ID NO: 1287842 - DNA, 25 bp, Homo sapien
taccacgtggatggaatcccagcag

SEQ ID NO: 1287843 - DNA, 25 bp, Homo sapien
tcttctttgatccatctccagcctt

SEQ ID NO: 1287844 - DNA, 25 bp, Homo sapien
tctccagccttctttatgaggatca

SEQ ID NO: 1287845 - DNA, 25 bp, Homo sapien
catctccagccttctttatgaggat

SEQ ID NO: 1287846 - DNA, 25 bp, Homo sapien
ttgatcttctttgatccatctccag

SEQ ID NO: 1287847 - DNA, 25 bp, Homo sapien
cagatgagacgccaccttcaaaata

SEQ ID NO: 1287848 - DNA, 25 bp, Homo sapien
ggtagacagatgagacgccaccttc

SEQ ID NO: 1287849 - DNA, 25 bp, Homo sapien
agacagatgagacgccaccttcaaa

SEQ ID NO: 1287850 - DNA, 25 bp, Homo sapien
catgatccagatcccagaggtagac

SEQ ID NO: 1287851 - DNA, 25 bp, Homo sapien
catggtgtgtccacgggtgagtcta

SEQ ID NO: 1287852 - DNA, 25 bp, Homo sapien
cgatactcaggtgggctacccttgg

SEQ ID NO: 1287853 - DNA, 25 bp, Homo sapien
gggctgtctggctaaccaagtgtca

SEQ ID NO: 1287854 - DNA, 25 bp, Homo sapien
tgagcccatcgctggtcaaactgcg

SEQ ID NO: 1287855 - DNA, 25 bp, Homo sapien
cagagctcactgctggcagaggtga

SEQ ID NO: 1287856 - DNA, 25 bp, Homo sapien
gcactcagagatcccactccagaag

SEQ ID NO: 1287857 - DNA, 25 bp, Homo sapien
tttattccggtctgctccaaagtcc

SEQ ID NO: 1287858 - DNA, 25 bp, Homo sapien
gtgatgtccaggaaaccggccaaca

SEQ ID NO: 1287859 - DNA, 25 bp, Homo sapien
tcagtcggcttacagggagagcagc

SEQ ID NO: 1287860 - DNA, 25 bp, Homo sapien
gctaatacccttcctgttggcaaca

SEQ ID NO: 1287861 - DNA, 25 bp, Homo sapien
tagcagggctcagatgactggcagc

SEQ ID NO: 1287862 - DNA, 25 bp, Homo sapien
caacagatggcttggttctagcaca

SEQ ID NO: 1287863 - DNA, 25 bp, Homo sapien
gtgaccaggtctaaagtttcaaatg

SEQ ID NO: 1287864 - DNA, 25 bp, Homo sapien
ggcctggctcccactacgggcagct

SEQ ID NO: 1287865 - DNA, 25 bp, Homo sapien
cacggtgaccaggtctaaagtttca

SEQ ID NO: 1287866 - DNA, 25 bp, Homo sapien
gctcccactacgggcagcttctcct

SEQ ID NO: 1287867 - DNA, 25 bp, Homo sapien
tcaaatgtggccaagcgctgagagc

SEQ ID NO: 1287868 - DNA, 25 bp, Homo sapien
gctgcagaggaattaatccgccctg

SEQ ID NO: 1287869 - DNA, 25 bp, Homo sapien
gaggcggcgtggtcaatctctcact

SEQ ID NO: 1287870 - DNA, 25 bp, Homo sapien
cagaggactgcatggttagaaaggc

SEQ ID NO: 1287871 - DNA, 25 bp, Homo sapien
gagctgtaactatgaatgacccaat

SEQ ID NO: 1287872 - DNA, 25 bp, Homo sapien
cctaaacgtggatcagctaaaagcc

SEQ ID NO: 1287873 - DNA, 25 bp, Homo sapien
ggtctcaagccgtttatcagcacag

SEQ ID NO: 1287874 - DNA, 25 bp, Homo sapien
gctaaaagcctaatgtgtcagtaat

SEQ ID NO: 1287875 - DNA, 25 bp, Homo sapien
gacacgggacaggtattcagcggaa

SEQ ID NO: 1287876 - DNA, 25 bp, Homo sapien
taacccagagagataaggaacgtgc

SEQ ID NO: 1287877 - DNA, 25 bp, Homo sapien
tgtccgtcagaaacacaaagtgccg

SEQ ID NO: 1287878 - DNA, 25 bp, Homo sapien
tcaccatggtttagggaacacggcc

SEQ ID NO: 1287879 - DNA, 25 bp, Homo sapien
taggagcagtggtcacgaaagagct

SEQ ID NO: 1287880 - DNA, 25 bp, Homo sapien
gaaagagctgaaacgcactgcgaga

SEQ ID NO: 1287881 - DNA, 25 bp, Homo sapien
gctgtacccctccaaagctgtgagg

SEQ ID NO: 1287882 - DNA, 25 bp, Homo sapien
gtgcaacggcccaaaccaaagagtg

SEQ ID NO: 1287883 - DNA, 25 bp, Homo sapien
tgcccacgaccactgggaatccctt

SEQ ID NO: 1287884 - DNA, 25 bp, Homo sapien
cactgggaatcccttcagggcgtgg

SEQ ID NO: 1287885 - DNA, 25 bp, Homo sapien
ggaatcccttcagggcgtggcccag

SEQ ID NO: 1287886 - DNA, 25 bp, Homo sapien
cacgaccactgggaatcccttcagg

SEQ ID NO: 1287887 - DNA, 25 bp, Homo sapien
tgctgcacaattagaagagccctgt

SEQ ID NO: 1287888 - DNA, 25 bp, Homo sapien
ccacagcatgggtaaggaaacggag

SEQ ID NO: 1287889 - DNA, 25 bp, Homo sapien
gaggttaactcactcgcccagtcag

SEQ ID NO: 1287890 - DNA, 25 bp, Homo sapien
tgtaagatgcacgtacagatacctg

SEQ ID NO: 1287891 - DNA, 25 bp, Homo sapien
ctgggactgccatgaggacgccagc

SEQ ID NO: 1287892 - DNA, 25 bp, Homo sapien
ggactgccatgaggacgccagcctt

SEQ ID NO: 1287893 - DNA, 25 bp, Homo sapien
actgccatgaggacgccagccttgt

SEQ ID NO: 1287894 - DNA, 25 bp, Homo sapien
ctgccatgaggacgccagccttgtt

SEQ ID NO: 1287895 - DNA, 25 bp, Homo sapien
tacgtcagccgacaacaaacatgcc

SEQ ID NO: 1287896 - DNA, 25 bp, Homo sapien
caagcagggcctcaaggagtaagga

SEQ ID NO: 1287897 - DNA, 25 bp, Homo sapien
gcaccactaatcttttcaagcaggg

SEQ ID NO: 1287898 - DNA, 25 bp, Homo sapien
cagtgcctgtgggtgctacgtcagc

SEQ ID NO: 1287899 - DNA, 25 bp, Homo sapien
gattctgagctccaacgtggcagga

SEQ ID NO: 1287900 - DNA, 25 bp, Homo sapien
tcttgggtcaaatctctgtgtgagc

SEQ ID NO: 1287901 - DNA, 25 bp, Homo sapien
ggccataaaacaagcggctccctgg

SEQ ID NO: 1287902 - DNA, 25 bp, Homo sapien
gagctcaagccaaacatagtcctga

SEQ ID NO: 1287903 - DNA, 25 bp, Homo sapien
ctttggtggtctgcggtccctgtca

SEQ ID NO: 1287904 - DNA, 25 bp, Homo sapien
ggtggtctgcggtccctgtcaccca

SEQ ID NO: 1287905 - DNA, 25 bp, Homo sapien
tgcctctggtatcccggatggcagc

SEQ ID NO: 1287906 - DNA, 25 bp, Homo sapien
tgctgtccctttggtggtctgcggt

SEQ ID NO: 1287907 - DNA, 25 bp, Homo sapien
actggtcaaaggcattgttggcttc

SEQ ID NO: 1287908 - DNA, 25 bp, Homo sapien
ggtcaaaggcattgttggcttccac

SEQ ID NO: 1287909 - DNA, 25 bp, Homo sapien
gatactggtcaaaggcattgttggc

SEQ ID NO: 1287910 - DNA, 25 bp, Homo sapien
atactggtcaaaggcattgttggct

SEQ ID NO: 1287911 - DNA, 25 bp, Homo sapien
ttctcagccgagctgacggcatggc

SEQ ID NO: 1287912 - DNA, 25 bp, Homo sapien
gtcatacttgttactccatggtgac

SEQ ID NO: 1287913 - DNA, 25 bp, Homo sapien
ctccaagggagggtcatacttgtta

SEQ ID NO: 1287914 - DNA, 25 bp, Homo sapien
gctttctcagccgagctgacggcat

SEQ ID NO: 1287915 - DNA, 25 bp, Homo sapien
caccttatagttcaacagatgcccc

SEQ ID NO: 1287916 - DNA, 25 bp, Homo sapien
catagtaagcgttaagaagagagct

SEQ ID NO: 1287917 - DNA, 25 bp, Homo sapien
tgctggaggctctacataaacttta

SEQ ID NO: 1287918 - DNA, 25 bp, Homo sapien
catgtgttcaccaccttatagttca

SEQ ID NO: 1287919 - DNA, 25 bp, Homo sapien
acactgggccatcgcacaccatggg

SEQ ID NO: 1287920 - DNA, 25 bp, Homo sapien
actttgcaagaatggggtgagacac

SEQ ID NO: 1287921 - DNA, 25 bp, Homo sapien
ccatgggaagcaaactgtcaacaag

SEQ ID NO: 1287922 - DNA, 25 bp, Homo sapien
gctttcatggtcacactgggccatc

SEQ ID NO: 1287923 - DNA, 25 bp, Homo sapien
gcccacaatcgatgcctcagttctc

SEQ ID NO: 1287924 - DNA, 25 bp, Homo sapien
gtgccgcccacaatcgatgcctcag

SEQ ID NO: 1287925 - DNA, 25 bp, Homo sapien
aggcgtgccgcccacaatcgatgcc

SEQ ID NO: 1287926 - DNA, 25 bp, Homo sapien
gccgcccacaatcgatgcctcagtt

SEQ ID NO: 1287927 - DNA, 25 bp, Homo sapien
gcaagaggtctttgacagcagagag

SEQ ID NO: 1287928 - DNA, 25 bp, Homo sapien
cctcgactgcaagaggtctttgaca

SEQ ID NO: 1287929 - DNA, 25 bp, Homo sapien
tgctggtggaccgaagcctcacagc

SEQ ID NO: 1287930 - DNA, 25 bp, Homo sapien
cctgagttagtgccaagcagatgct

SEQ ID NO: 1287931 - DNA, 25 bp, Homo sapien
acaggagatcctcacatagactggg

SEQ ID NO: 1287932 - DNA, 25 bp, Homo sapien
gcaattttcagtggctggtcaacag

SEQ ID NO: 1287933 - DNA, 25 bp, Homo sapien
gaagacaggagatcctcacatagac

SEQ ID NO: 1287934 - DNA, 25 bp, Homo sapien
tcaacagaagacaggagatcctcac

SEQ ID NO: 1287935 - DNA, 25 bp, Homo sapien
gagacaaaattatgggcctgttctt

SEQ ID NO: 1287936 - DNA, 25 bp, Homo sapien
cactgagacaaaattatgggcctgt

SEQ ID NO: 1287937 - DNA, 25 bp, Homo sapien
ctgagacaaaattatgggcctgttc

SEQ ID NO: 1287938 - DNA, 25 bp, Homo sapien
ggcactgagacaaaattatgggcct

SEQ ID NO: 1287939 - DNA, 25 bp, Homo sapien
actgaggcaagtgcaagaacagaga

SEQ ID NO: 1287940 - DNA, 25 bp, Homo sapien
gtcactccaagtgtgagggcaggcc

SEQ ID NO: 1287941 - DNA, 25 bp, Homo sapien
tgtgaataatgaccaaggagccggc

SEQ ID NO: 1287942 - DNA, 25 bp, Homo sapien
ggccctggcacactgcttttcttaa

SEQ ID NO: 1287943 - DNA, 25 bp, Homo sapien
agggcccacacacggaggtgagcca

SEQ ID NO: 1287944 - DNA, 25 bp, Homo sapien
tccagggcccacacacggaggtgag

SEQ ID NO: 1287945 - DNA, 25 bp, Homo sapien
cagggcccacacacggaggtgagcc

SEQ ID NO: 1287946 - DNA, 25 bp, Homo sapien
ggcccacacacggaggtgagccaca

SEQ ID NO: 1287947 - DNA, 25 bp, Homo sapien
tactaagcaaggtactctgaggctc

SEQ ID NO: 1287948 - DNA, 25 bp, Homo sapien
ggttctgccatgaaacggtgctaca

SEQ ID NO: 1287949 - DNA, 25 bp, Homo sapien
caactcttgcgtgtgctaaaaacca

SEQ ID NO: 1287950 - DNA, 25 bp, Homo sapien
gaatacgagtacgtcatgtgaccca

SEQ ID NO: 1287951 - DNA, 25 bp, Homo sapien
ttgtagcactgttgcacattgaaca

SEQ ID NO: 1287952 - DNA, 25 bp, Homo sapien
tttgcaaagcccagggagcatcagc

SEQ ID NO: 1287953 - DNA, 25 bp, Homo sapien
gctatgcacacagccgggaggactt

SEQ ID NO: 1287954 - DNA, 25 bp, Homo sapien
aattttgcctgacactcttgctggg

SEQ ID NO: 1287955 - DNA, 25 bp, Homo sapien
caatgagactgaaatggcctacaca

SEQ ID NO: 1287956 - DNA, 25 bp, Homo sapien
tccaaggtctcaaagctggaaggtg

SEQ ID NO: 1287957 - DNA, 25 bp, Homo sapien
tgaattcggctttcggaaactgtgg

SEQ ID NO: 1287958 - DNA, 25 bp, Homo sapien
cacccagggacaaagactgtgggct

SEQ ID NO: 1287959 - DNA, 25 bp, Homo sapien
gctggagtatctgctggaggcccct

SEQ ID NO: 1287960 - DNA, 25 bp, Homo sapien
agggaaaacccgcacgggcagcaag

SEQ ID NO: 1287961 - DNA, 25 bp, Homo sapien
gttgaccaggttttcataaaagcag

SEQ ID NO: 1287962 - DNA, 25 bp, Homo sapien
gagccagttgaccaggttttcataa

SEQ ID NO: 1287963 - DNA, 25 bp, Homo sapien
agcaagggagccagttgaccaggtt

SEQ ID NO: 1287964 - DNA, 25 bp, Homo sapien
gatgtgacgggccctttaacaagcc

SEQ ID NO: 1287965 - DNA, 25 bp, Homo sapien
tgtgacgggccctttaacaagccaa

SEQ ID NO: 1287966 - DNA, 25 bp, Homo sapien
tagatgtgacgggccctttaacaag

SEQ ID NO: 1287967 - DNA, 25 bp, Homo sapien
atgtgacgggccctttaacaagcca

SEQ ID NO: 1287968 - DNA, 25 bp, Homo sapien
gcttgtactgtgttggctggagaaa

SEQ ID NO: 1287969 - DNA, 25 bp, Homo sapien
cgtgcactgctgaatgcctgcggga

SEQ ID NO: 1287970 - DNA, 25 bp, Homo sapien
tggagaaactcacaccatagcagag

SEQ ID NO: 1287971 - DNA, 25 bp, Homo sapien
gagactgacagcgtctggcctgcgt

SEQ ID NO: 1287972 - DNA, 25 bp, Homo sapien
tagaactcctaacttgggcttcaac

SEQ ID NO: 1287973 - DNA, 25 bp, Homo sapien
gagcagactgtcattaactttagaa

SEQ ID NO: 1287974 - DNA, 25 bp, Homo sapien
tagccgcagtctcaaatggaaccat

SEQ ID NO: 1287975 - DNA, 25 bp, Homo sapien
tgcctggaggaatctcatagtccag

SEQ ID NO: 1287976 - DNA, 25 bp, Homo sapien
tcattaggtccaaggcacagtccag

SEQ ID NO: 1287977 - DNA, 25 bp, Homo sapien
caggtcgatcaggtcgctgaggttt

SEQ ID NO: 1287978 - DNA, 25 bp, Homo sapien
ctgaggtttttctcgatttgctggg

SEQ ID NO: 1287979 - DNA, 25 bp, Homo sapien
gaggcaggcgcctcattaggtccaa

SEQ ID NO: 1287980 - DNA, 25 bp, Homo sapien
ggagaaatacaagtgcgtcagtcat

SEQ ID NO: 1287981 - DNA, 25 bp, Homo sapien
tccagtagcggattacttttgccct

SEQ ID NO: 1287982 - DNA, 25 bp, Homo sapien
ccatggtgaacacactccagtagcg

SEQ ID NO: 1287983 - DNA, 25 bp, Homo sapien
cctggtggctgcagatgtcgtgccc

SEQ ID NO: 1287984 - DNA, 25 bp, Homo sapien
tgtcgtgccccccagttggttccat

SEQ ID NO: 1287985 - DNA, 25 bp, Homo sapien
catactctcctcacagtacatatgc

SEQ ID NO: 1287986 - DNA, 25 bp, Homo sapien
accatactctcctcacagtacatat

SEQ ID NO: 1287987 - DNA, 25 bp, Homo sapien
actctcctcacagtacatatgctgc

SEQ ID NO: 1287988 - DNA, 25 bp, Homo sapien
gtgcttcaccatactctcctcacag

SEQ ID NO: 1287989 - DNA, 25 bp, Homo sapien
taaactcctatctcatctgaggaat

SEQ ID NO: 1287990 - DNA, 25 bp, Homo sapien
ctactctgaccatagagacaaacac

SEQ ID NO: 1287991 - DNA, 25 bp, Homo sapien
aaagtaaccattctagtcctactct

SEQ ID NO: 1287992 - DNA, 25 bp, Homo sapien
cctgggagatggcagggcaacatga

SEQ ID NO: 1287993 - DNA, 25 bp, Homo sapien
tttcctgcactctagtaactccctc

SEQ ID NO: 1287994 - DNA, 25 bp, Homo sapien
cctgcactctagtaactccctcatg

SEQ ID NO: 1287995 - DNA, 25 bp, Homo sapien
ctttgttttcctgcactctagtaac

SEQ ID NO: 1287996 - DNA, 25 bp, Homo sapien
gcactctagtaactccctcatgcag

SEQ ID NO: 1287997 - DNA, 25 bp, Homo sapien
cctcacttagaggatcgtgggaatg

SEQ ID NO: 1287998 - DNA, 25 bp, Homo sapien
catggttccgaggtcatgctcctca

SEQ ID NO: 1287999 - DNA, 25 bp, Homo sapien
gaatcgctgcttaagaagaggctgg

SEQ ID NO: 1288000 - DNA, 25 bp, Homo sapien
tacggaaacacttgtcacggcgctg

SEQ ID NO: 1288001 - DNA, 25 bp, Homo sapien
agcacaggagaggtatccacagccc

SEQ ID NO: 1288002 - DNA, 25 bp, Homo sapien
tcgggtacactattagaatctggct

SEQ ID NO: 1288003 - DNA, 25 bp, Homo sapien
tccaaatgctgaaagatgaagggct

SEQ ID NO: 1288004 - DNA, 25 bp, Homo sapien
gctttcagaatggagagacccagac

SEQ ID NO: 1288005 - DNA, 25 bp, Homo sapien
aaaacaaccactagaggcagggagt

SEQ ID NO: 1288006 - DNA, 25 bp, Homo sapien
taaatcagatctcaataaagcagct

SEQ ID NO: 1288007 - DNA, 25 bp, Homo sapien
cataggctctctgtaggaaattcaa

SEQ ID NO: 1288008 - DNA, 25 bp, Homo sapien
ctagagactccccaaaggtaactgc

SEQ ID NO: 1288009 - DNA, 25 bp, Homo sapien
tttaccaagttcaggatgcactgcg

SEQ ID NO: 1288010 - DNA, 25 bp, Homo sapien
tgcactgcgtgcaggaaaactgaga

SEQ ID NO: 1288011 - DNA, 25 bp, Homo sapien
gccatcggcaaaagttaaagtgagt

SEQ ID NO: 1288012 - DNA, 25 bp, Homo sapien
caattacggtgaaaagccatcggca

SEQ ID NO: 1288013 - DNA, 25 bp, Homo sapien
tactcgagggaactgtgaaacacac

SEQ ID NO: 1288014 - DNA, 25 bp, Homo sapien
tgcatgcagcaatccagcgaaatgg

SEQ ID NO: 1288015 - DNA, 25 bp, Homo sapien
cacagtctataggatgggaagccaa

SEQ ID NO: 1288016 - DNA, 25 bp, Homo sapien
tatctccaagcaagaagggtggtgc

SEQ ID NO: 1288017 - DNA, 25 bp, Homo sapien
tctgggtcacatcttctgggctggc

SEQ ID NO: 1288018 - DNA, 25 bp, Homo sapien
gaaacatgacgtgactagggacgct

SEQ ID NO: 1288019 - DNA, 25 bp, Homo sapien
tgaaaattccgatgacagccagaag

SEQ ID NO: 1288020 - DNA, 25 bp, Homo sapien
gaaaggtcatgcttcccaaagccgg

SEQ ID NO: 1288021 - DNA, 25 bp, Homo sapien
cacacttgtgcagggtcagttgatg

SEQ ID NO: 1288022 - DNA, 25 bp, Homo sapien
caggcatgatgttgcgcacccgtag

SEQ ID NO: 1288023 - DNA, 25 bp, Homo sapien
cagtacgaaacagctaaacccaggt

SEQ ID NO: 1288024 - DNA, 25 bp, Homo sapien
aaggtgaggaaagaaccagcaggtc

SEQ ID NO: 1288025 - DNA, 25 bp, Homo sapien
tgaacaattactgagcccttgctgg

SEQ ID NO: 1288026 - DNA, 25 bp, Homo sapien
tgtgactgttagacttacaacctgg

SEQ ID NO: 1288027 - DNA, 25 bp, Homo sapien
tatgtctcaacctgggaagccttgt

SEQ ID NO: 1288028 - DNA, 25 bp, Homo sapien
tacaacctggcatacaggcccggtg

SEQ ID NO: 1288029 - DNA, 25 bp, Homo sapien
tgtgatccaccgcatgcttgaggag

SEQ ID NO: 1288030 - DNA, 25 bp, Homo sapien
tcgcttccgggcttgatcgcactaa

SEQ ID NO: 1288031 - DNA, 25 bp, Homo sapien
gatgacacagacatcaccagtgggc

SEQ ID NO: 1288032 - DNA, 25 bp, Homo sapien
gagactacagacaaggtccgcagtg

SEQ ID NO: 1288033 - DNA, 25 bp, Homo sapien
ttggcacacattccccacggatagg

SEQ ID NO: 1288034 - DNA, 25 bp, Homo sapien
gaactgcattgttagccttcaggaa

SEQ ID NO: 1288035 - DNA, 25 bp, Homo sapien
gagccaccaagttctgatcaacggt

SEQ ID NO: 1288036 - DNA, 25 bp, Homo sapien
gctggccaggtacctagatcattta

SEQ ID NO: 1288037 - DNA, 25 bp, Homo sapien
caactgaacgttgtaggaccaggct

SEQ ID NO: 1288038 - DNA, 25 bp, Homo sapien
caggcccttcgtgaatatgcatgag

SEQ ID NO: 1288039 - DNA, 25 bp, Homo sapien
gcaaactggcaaccctcagcatagg

SEQ ID NO: 1288040 - DNA, 25 bp, Homo sapien
tcagcataggtcacacagagggaca

SEQ ID NO: 1288041 - DNA, 25 bp, Homo sapien
gggtggagtcgtgaaaaggaagtca

SEQ ID NO: 1288042 - DNA, 25 bp, Homo sapien
tggaacataggaggcgctcagggaa

SEQ ID NO: 1288043 - DNA, 25 bp, Homo sapien
aatgatactatcaggttacaaaggg

SEQ ID NO: 1288044 - DNA, 25 bp, Homo sapien
cctgtgggcctttcactagctcggg

SEQ ID NO: 1288045 - DNA, 25 bp, Homo sapien
ggaaaaccagttctgtggcaggcaa

SEQ ID NO: 1288046 - DNA, 25 bp, Homo sapien
gagaccctactcatctcgaaggcag

SEQ ID NO: 1288047 - DNA, 25 bp, Homo sapien
tctctgggtggctcaaacccttggg

SEQ ID NO: 1288048 - DNA, 25 bp, Homo sapien
tgtttaagaaaatgcgaggcctgtt

SEQ ID NO: 1288049 - DNA, 25 bp, Homo sapien
actacaaggttaagcacagaggcca

SEQ ID NO: 1288050 - DNA, 25 bp, Homo sapien
gcaagcaccctagagcctgaaagtc

SEQ ID NO: 1288051 - DNA, 25 bp, Homo sapien
gataaaccccataagcagaagtgca

SEQ ID NO: 1288052 - DNA, 25 bp, Homo sapien
cctgatcagcttaaaggagtggccc

SEQ ID NO: 1288053 - DNA, 25 bp, Homo sapien
tgcgaggcccagaactgacaaggac

SEQ ID NO: 1288054 - DNA, 25 bp, Homo sapien
gactgcctgggatcacatagaaact

SEQ ID NO: 1288055 - DNA, 25 bp, Homo sapien
taccaaatgtaactggcatgcctgg

SEQ ID NO: 1288056 - DNA, 25 bp, Homo sapien
tgacgaggagcatctaaaggcacca

SEQ ID NO: 1288057 - DNA, 25 bp, Homo sapien
ggtggacctggacctccatggcaac

SEQ ID NO: 1288058 - DNA, 25 bp, Homo sapien
gaaacagacctcacagggttggtgt

SEQ ID NO: 1288059 - DNA, 25 bp, Homo sapien
cactctgtgagtgaacactcaatac

SEQ ID NO: 1288060 - DNA, 25 bp, Homo sapien
cagacaatgactgtgggcatccggt

SEQ ID NO: 1288061 - DNA, 25 bp, Homo sapien
cagcagcaacatcccttgactaaac

SEQ ID NO: 1288062 - DNA, 25 bp, Homo sapien
ttgactaaacaaggaaccatggtcc

SEQ ID NO: 1288063 - DNA, 25 bp, Homo sapien
tccaacctaagtgctgggcctgtcc

SEQ ID NO: 1288064 - DNA, 25 bp, Homo sapien
tccaaaaatcccttgatcctgtcag

SEQ ID NO: 1288065 - DNA, 25 bp, Homo sapien
ccttgcaagctgacagttcagaggg

SEQ ID NO: 1288066 - DNA, 25 bp, Homo sapien
tgcaagctgacagttcagagggaag

SEQ ID NO: 1288067 - DNA, 25 bp, Homo sapien
ctgatccgagggacttccataatca

SEQ ID NO: 1288068 - DNA, 25 bp, Homo sapien
aatcagcagttccaacccttgcaag

SEQ ID NO: 1288069 - DNA, 25 bp, Homo sapien
caggagtgaacatccgggtcagcac

SEQ ID NO: 1288070 - DNA, 25 bp, Homo sapien
gcgcttccacttccccgggtgccca

SEQ ID NO: 1288071 - DNA, 25 bp, Homo sapien
cccggtcccggcgtcagtggctctc

SEQ ID NO: 1288072 - DNA, 25 bp, Homo sapien
cacttccccgggtgcccaggagtga

SEQ ID NO: 1288073 - DNA, 25 bp, Homo sapien
agcttcctgtgatgcttcctccaag

SEQ ID NO: 1288074 - DNA, 25 bp, Homo sapien
tcctgtgatgcttcctccaagttcc

SEQ ID NO: 1288075 - DNA, 25 bp, Homo sapien
gcttcctgtgatgcttcctccaagt

SEQ ID NO: 1288076 - DNA, 25 bp, Homo sapien
ctgcagcttcctgtgatgcttcctc

SEQ ID NO: 1288077 - DNA, 25 bp, Homo sapien
tagacgggtaatgtgacaatgttgt

SEQ ID NO: 1288078 - DNA, 25 bp, Homo sapien
tgatgtgggaggaatagccccagga

SEQ ID NO: 1288079 - DNA, 25 bp, Homo sapien
ttgatgtgggaggaatagccccagg

SEQ ID NO: 1288080 - DNA, 25 bp, Homo sapien
tttgatgtgggaggaatagccccag

SEQ ID NO: 1288081 - DNA, 25 bp, Homo sapien
catataggtgtggtgttctctcccc

SEQ ID NO: 1288082 - DNA, 25 bp, Homo sapien
tatcaagcctcctagagaggatgcc

SEQ ID NO: 1288083 - DNA, 25 bp, Homo sapien
ggagccactagcctctcaagacttg

SEQ ID NO: 1288084 - DNA, 25 bp, Homo sapien
aaaccctcaacaaagactagtgtgc

SEQ ID NO: 1288085 - DNA, 25 bp, Homo sapien
aagagatcaaagcagccctggaaaa

SEQ ID NO: 1288086 - DNA, 25 bp, Homo sapien
aatggtctccattcgtaatccagaa

SEQ ID NO: 1288087 - DNA, 25 bp, Homo sapien
ccgtttgggaagacagctgctagag

SEQ ID NO: 1288088 - DNA, 25 bp, Homo sapien
ctgcgaagtccggttttccttggag

SEQ ID NO: 1288089 - DNA, 25 bp, Homo sapien
tccttccccggggagacatcagctt

SEQ ID NO: 1288090 - DNA, 25 bp, Homo sapien
ccttccccggggagacatcagcttc

SEQ ID NO: 1288091 - DNA, 25 bp, Homo sapien
gtggtgtagaacattctaatctgcg

SEQ ID NO: 1288092 - DNA, 25 bp, Homo sapien
aaaagacctttatttatgcaggtgc

SEQ ID NO: 1288093 - DNA, 25 bp, Homo sapien
acattctaatctgcgacgttaagga

SEQ ID NO: 1288094 - DNA, 25 bp, Homo sapien
cgacgttaaggaagctgaatttaca

SEQ ID NO: 1288095 - DNA, 25 bp, Homo sapien
ggtaggtaatctttcccagagcagt

SEQ ID NO: 1288096 - DNA, 25 bp, Homo sapien
cggtacagaggtcagaaaagagtcc

SEQ ID NO: 1288097 - DNA, 25 bp, Homo sapien
aacagtccttaaacagctggcagag

SEQ ID NO: 1288098 - DNA, 25 bp, Homo sapien
taatcagaggcataacgtggtcaga

SEQ ID NO: 1288099 - DNA, 25 bp, Homo sapien
gggtgacgcctaggaaactgtcagc

SEQ ID NO: 1288100 - DNA, 25 bp, Homo sapien
gatttccagggccaatgtcgcactt

SEQ ID NO: 1288101 - DNA, 25 bp, Homo sapien
cgcctaggaaactgtcagcctcgca

SEQ ID NO: 1288102 - DNA, 25 bp, Homo sapien
ggccaatgtcgcactttggtgagga

SEQ ID NO: 1288103 - DNA, 25 bp, Homo sapien
cggatgcggtcgtgaagataggtaa

SEQ ID NO: 1288104 - DNA, 25 bp, Homo sapien
tgggaccggtgtctggcggatgcgg

SEQ ID NO: 1288105 - DNA, 25 bp, Homo sapien
gaacatgtctgagtcggagctcggc

SEQ ID NO: 1288106 - DNA, 25 bp, Homo sapien
gagctcggcaggaagtgggaccggt

SEQ ID NO: 1288107 - DNA, 25 bp, Homo sapien
aaatgagcctcgcttaaaagggtcg

SEQ ID NO: 1288108 - DNA, 25 bp, Homo sapien
tggagacgacgtgcagaaatggcac

SEQ ID NO: 1288109 - DNA, 25 bp, Homo sapien
ccatgctaaaacgactaggtttcca

SEQ ID NO: 1288110 - DNA, 25 bp, Homo sapien
aaacctataagagctttcccgtgtg

SEQ ID NO: 1288111 - DNA, 25 bp, Homo sapien
ttgcctgctcgggtatgaagatcgg

SEQ ID NO: 1288112 - DNA, 25 bp, Homo sapien
gctatgttgaccacccaggatgtgg

SEQ ID NO: 1288113 - DNA, 25 bp, Homo sapien
caaggagctgggtatcattgcccta

SEQ ID NO: 1288114 - DNA, 25 bp, Homo sapien
ccgtggtcgccgtctgtgaacaaga

SEQ ID NO: 1288115 - DNA, 25 bp, Homo sapien
gatatccatcagttggttaatggaa

SEQ ID NO: 1288116 - DNA, 25 bp, Homo sapien
gagatatccatcagttggttaatgg

SEQ ID NO: 1288117 - DNA, 25 bp, Homo sapien
actgagatatccatcagttggttaa

SEQ ID NO: 1288118 - DNA, 25 bp, Homo sapien
caactgagatatccatcagttggtt

SEQ ID NO: 1288119 - DNA, 25 bp, Homo sapien
tacttgtcgtggttcgatctgattg

SEQ ID NO: 1288120 - DNA, 25 bp, Homo sapien
atctgattgtattgtcgaaggacta

SEQ ID NO: 1288121 - DNA, 25 bp, Homo sapien
tgtaaccaacccataattgcatttt

SEQ ID NO: 1288122 - DNA, 25 bp, Homo sapien
gactatttttgaacctgtccaaata

SEQ ID NO: 1288123 - DNA, 25 bp, Homo sapien
aattagccttctgcaatgttgtcca

SEQ ID NO: 1288124 - DNA, 25 bp, Homo sapien
ttaggttccacaattagccttctgc

SEQ ID NO: 1288125 - DNA, 25 bp, Homo sapien
acaagctcattaggttccacaatta

SEQ ID NO: 1288126 - DNA, 25 bp, Homo sapien
ccacaattagccttctgcaatgttg

SEQ ID NO: 1288127 - DNA, 25 bp, Homo sapien
gccgcgtccggagcccgtccccaga

SEQ ID NO: 1288128 - DNA, 25 bp, Homo sapien
tccgtttctggatcggagtttccgc

SEQ ID NO: 1288129 - DNA, 25 bp, Homo sapien
gtttctggatcggagtttccgcggc

SEQ ID NO: 1288130 - DNA, 25 bp, Homo sapien
ttctggatcggagtttccgcggccg

SEQ ID NO: 1288131 - DNA, 25 bp, Homo sapien
atagcctcaggacctgccgaggatc

SEQ ID NO: 1288132 - DNA, 25 bp, Homo sapien
actgaaatagcctcaggacctgccg

SEQ ID NO: 1288133 - DNA, 25 bp, Homo sapien
gaaatagcctcaggacctgccgagg

SEQ ID NO: 1288134 - DNA, 25 bp, Homo sapien
tcagactgaaatagcctcaggacct

SEQ ID NO: 1288135 - DNA, 25 bp, Homo sapien
tgcgtgctcgttgtgcatgcggact

SEQ ID NO: 1288136 - DNA, 25 bp, Homo sapien
cagccacaaacgctgcgtgctcgtt

SEQ ID NO: 1288137 - DNA, 25 bp, Homo sapien
catgcggactgtggtgtcacctgaa

SEQ ID NO: 1288138 - DNA, 25 bp, Homo sapien
gagcccacaggtagaatcgtccgtc

SEQ ID NO: 1288139 - DNA, 25 bp, Homo sapien
ccacaagacggttggctagggagtc

SEQ ID NO: 1288140 - DNA, 25 bp, Homo sapien
catggccacaagacggttggctagg

SEQ ID NO: 1288141 - DNA, 25 bp, Homo sapien
cacaagacggttggctagggagtca

SEQ ID NO: 1288142 - DNA, 25 bp, Homo sapien
gtcagccatggccacaagacggttg

SEQ ID NO: 1288143 - DNA, 25 bp, Homo sapien
cctaaatgggatgcccagtcccaag

SEQ ID NO: 1288144 - DNA, 25 bp, Homo sapien
catggtaggattgtcctaaatggga

SEQ ID NO: 1288145 - DNA, 25 bp, Homo sapien
gattgtcctaaatgggatgcccagt

SEQ ID NO: 1288146 - DNA, 25 bp, Homo sapien
ggcccatggtaggattgtcctaaat

SEQ ID NO: 1288147 - DNA, 25 bp, Homo sapien
catgaatcgggctaaggtccctggg

SEQ ID NO: 1288148 - DNA, 25 bp, Homo sapien
gttagaaatgttagtgccccgcact

SEQ ID NO: 1288149 - DNA, 25 bp, Homo sapien
tggacagtcagggttcacttgggct

SEQ ID NO: 1288150 - DNA, 25 bp, Homo sapien
cattggacagtctccctgatggacc

SEQ ID NO: 1288151 - DNA, 25 bp, Homo sapien
caaatagcagcttagagttggcggg

SEQ ID NO: 1288152 - DNA, 25 bp, Homo sapien
gacaggcctcctctatctgcttaaa

SEQ ID NO: 1288153 - DNA, 25 bp, Homo sapien
gcatggcagaaatcgtcacagtggt

SEQ ID NO: 1288154 - DNA, 25 bp, Homo sapien
atgtgtttctgactctctgcccagg

SEQ ID NO: 1288155 - DNA, 25 bp, Homo sapien
gtgtcgctcttcacgtctgacctga

SEQ ID NO: 1288156 - DNA, 25 bp, Homo sapien
gccatatgcttcacctactgcagga

SEQ ID NO: 1288157 - DNA, 25 bp, Homo sapien
cttttgtccttgtggcgtcgggcct

SEQ ID NO: 1288158 - DNA, 25 bp, Homo sapien
tggaccgccttcgacgtgatgtgct

SEQ ID NO: 1288159 - DNA, 25 bp, Homo sapien
tagcgtgctagaaggtattacaaac

SEQ ID NO: 1288160 - DNA, 25 bp, Homo sapien
gtgatgagcctagggcctgctttct

SEQ ID NO: 1288161 - DNA, 25 bp, Homo sapien
gaagaagctccagccctatcactga

SEQ ID NO: 1288162 - DNA, 25 bp, Homo sapien
tttgccataaatagaaggtgatcac

SEQ ID NO: 1288163 - DNA, 25 bp, Homo sapien
gcctacatggctgtacagggcagat

SEQ ID NO: 1288164 - DNA, 25 bp, Homo sapien
tggagttatgcagcgcacagcctac

SEQ ID NO: 1288165 - DNA, 25 bp, Homo sapien
ccatgctctgttagtggtgtccaga

SEQ ID NO: 1288166 - DNA, 25 bp, Homo sapien
tctgattggatctcctaagagcagg

SEQ ID NO: 1288167 - DNA, 25 bp, Homo sapien
tcctgggactctaacctgtgcttgg

SEQ ID NO: 1288168 - DNA, 25 bp, Homo sapien
agcccacagttggtttccggtcctg

SEQ ID NO: 1288169 - DNA, 25 bp, Homo sapien
cccgagggtataagagagagctgca

SEQ ID NO: 1288170 - DNA, 25 bp, Homo sapien
cagagctcctgggaggaacccgagg

SEQ ID NO: 1288171 - DNA, 25 bp, Homo sapien
gatggggggcctttcagggctggca

SEQ ID NO: 1288172 - DNA, 25 bp, Homo sapien
tcttgcaggcacaatcggggcagcc

SEQ ID NO: 1288173 - DNA, 25 bp, Homo sapien
gaggtgtctccggatatgggaccct

SEQ ID NO: 1288174 - DNA, 25 bp, Homo sapien
ctccggatatgggaccctgggtttg

SEQ ID NO: 1288175 - DNA, 25 bp, Homo sapien
tctgcttggcatagtccaggtggcc

SEQ ID NO: 1288176 - DNA, 25 bp, Homo sapien
cttctcgtcccagcctggcttggtg

SEQ ID NO: 1288177 - DNA, 25 bp, Homo sapien
gcttggtgcggatgcccacggcctt

SEQ ID NO: 1288178 - DNA, 25 bp, Homo sapien
tcaggatggcatccatctgcttggc

SEQ ID NO: 1288179 - DNA, 25 bp, Homo sapien
gatgcctgcagctctaggctactcc

SEQ ID NO: 1288180 - DNA, 25 bp, Homo sapien
gtgacaccttggtcaagcccctcta

SEQ ID NO: 1288181 - DNA, 25 bp, Homo sapien
ggctctcaacttcctccgctgtaaa

SEQ ID NO: 1288182 - DNA, 25 bp, Homo sapien
taggctactccagaagggctctgct

SEQ ID NO: 1288183 - DNA, 25 bp, Homo sapien
acatagagtgagtgtccacatggga

SEQ ID NO: 1288184 - DNA, 25 bp, Homo sapien
ttccctaggatagcatgtggcaggt

SEQ ID NO: 1288185 - DNA, 25 bp, Homo sapien
ggaagctattaattccctaggatag

SEQ ID NO: 1288186 - DNA, 25 bp, Homo sapien
gtgaacgaggttctttcaagtctaa

SEQ ID NO: 1288187 - DNA, 25 bp, Homo sapien
tgatctttctcctgtggcgtggacc

SEQ ID NO: 1288188 - DNA, 25 bp, Homo sapien
gatctttctcctgtggcgtggacca

SEQ ID NO: 1288189 - DNA, 25 bp, Homo sapien
tatgatctttctcctgtggcgtgga

SEQ ID NO: 1288190 - DNA, 25 bp, Homo sapien
atctttctcctgtggcgtggaccag

SEQ ID NO: 1288191 - DNA, 25 bp, Homo sapien
tgcggtacacgaaactcagcagcca

SEQ ID NO: 1288192 - DNA, 25 bp, Homo sapien
taggccggcgacacggagctgcacc

SEQ ID NO: 1288193 - DNA, 25 bp, Homo sapien
gcaccgaggatgtgcggtacacgaa

SEQ ID NO: 1288194 - DNA, 25 bp, Homo sapien
agcagcacgggctgtaggccggcga

SEQ ID NO: 1288195 - DNA, 25 bp, Homo sapien
gtcctccatccgaaatgattaatca

SEQ ID NO: 1288196 - DNA, 25 bp, Homo sapien
tcctccatccgaaatgattaatcat

SEQ ID NO: 1288197 - DNA, 25 bp, Homo sapien
ttttatgatgtttgccacacatctc

SEQ ID NO: 1288198 - DNA, 25 bp, Homo sapien
tgtttgccacacatctcctgtgttt

SEQ ID NO: 1288199 - DNA, 25 bp, Homo sapien
tatgatgtttgccacacatctcctg

SEQ ID NO: 1288200 - DNA, 25 bp, Homo sapien
ccttgtgtgcctggtacttcttcct

SEQ ID NO: 1288201 - DNA, 25 bp, Homo sapien
aatgctgatgtgcaagccccaggct

SEQ ID NO: 1288202 - DNA, 25 bp, Homo sapien
ctgaacaactgccacctgctgaagg

SEQ ID NO: 1288203 - DNA, 25 bp, Homo sapien
tgtgccttagtcatccctgtatcct

SEQ ID NO: 1288204 - DNA, 25 bp, Homo sapien
tatcctgagctgaaccgggaactcg

SEQ ID NO: 1288205 - DNA, 25 bp, Homo sapien
cacccagcaggatgacgtcctcgat

SEQ ID NO: 1288206 - DNA, 25 bp, Homo sapien
cttccggaaaggctcccaatgcttg

SEQ ID NO: 1288207 - DNA, 25 bp, Homo sapien
gacgtcctcgatgattccttggcaa

SEQ ID NO: 1288208 - DNA, 25 bp, Homo sapien
tgcagtagccgttgatgatcctccc

SEQ ID NO: 1288209 - DNA, 25 bp, Homo sapien
agaccccagaaaaggccgtcagtgt

SEQ ID NO: 1288210 - DNA, 25 bp, Homo sapien
gaaaaggccgtcagtgtccctggcc

SEQ ID NO: 1288211 - DNA, 25 bp, Homo sapien
gaccccagaaaaggccgtcagtgtc

SEQ ID NO: 1288212 - DNA, 25 bp, Homo sapien
ccagaaaaggccgtcagtgtccctg

SEQ ID NO: 1288213 - DNA, 25 bp, Homo sapien
cacgcaaacatgcatggataggcat

SEQ ID NO: 1288214 - DNA, 25 bp, Homo sapien
catgcacacacgtgaacgtggacaa

SEQ ID NO: 1288215 - DNA, 25 bp, Homo sapien
tctacctactgagttccagaacctg

SEQ ID NO: 1288216 - DNA, 25 bp, Homo sapien
cgtggacaatcatgtgcaaatgtgc

SEQ ID NO: 1288217 - DNA, 25 bp, Homo sapien
aacgggccccgcatcatcttgcatg

SEQ ID NO: 1288218 - DNA, 25 bp, Homo sapien
accagccgtggactatggatggatg

SEQ ID NO: 1288219 - DNA, 25 bp, Homo sapien
tgtcttcctttagaagagactaacg

SEQ ID NO: 1288220 - DNA, 25 bp, Homo sapien
tggactatggatggatgtcttcctt

SEQ ID NO: 1288221 - DNA, 25 bp, Homo sapien
gaggttaaaagactccatagcacag

SEQ ID NO: 1288222 - DNA, 25 bp, Homo sapien
ggtctgagttccctcacacaccagg

SEQ ID NO: 1288223 - DNA, 25 bp, Homo sapien
ttttgctgagcgacacaggacagac

SEQ ID NO: 1288224 - DNA, 25 bp, Homo sapien
gcaaggctgttgctgagaaggccct

SEQ ID NO: 1288225 - DNA, 25 bp, Homo sapien
ttttcgagccttggtgcggctgcct

SEQ ID NO: 1288226 - DNA, 25 bp, Homo sapien
aagagctgggactgcttttcgagcc

SEQ ID NO: 1288227 - DNA, 25 bp, Homo sapien
caaatggttgtggacccagggataa

SEQ ID NO: 1288228 - DNA, 25 bp, Homo sapien
gccagcggtggtaatagcagcattc

SEQ ID NO: 1288229 - DNA, 25 bp, Homo sapien
tgaactgctgcagcccttaaagtct

SEQ ID NO: 1288230 - DNA, 25 bp, Homo sapien
cctttgaactgctgcagcccttaaa

SEQ ID NO: 1288231 - DNA, 25 bp, Homo sapien
actgctgcagcccttaaagtctagg

SEQ ID NO: 1288232 - DNA, 25 bp, Homo sapien
tgctgcagcccttaaagtctaggcc

SEQ ID NO: 1288233 - DNA, 25 bp, Homo sapien
gagatcattagctccaatctgggtt

SEQ ID NO: 1288234 - DNA, 25 bp, Homo sapien
tccaacttgagactcgccacctagt

SEQ ID NO: 1288235 - DNA, 25 bp, Homo sapien
gccacctagttgtaacttccaagta

SEQ ID NO: 1288236 - DNA, 25 bp, Homo sapien
agtaccccggtactcatcaaagctg

SEQ ID NO: 1288237 - DNA, 25 bp, Homo sapien
cccataagttgttgctttagtggct

SEQ ID NO: 1288238 - DNA, 25 bp, Homo sapien
tggatcttcccaatggacttagagc

SEQ ID NO: 1288239 - DNA, 25 bp, Homo sapien
gacttagagctcctgttcctatttg

SEQ ID NO: 1288240 - DNA, 25 bp, Homo sapien
tactagacccatttctcaggcgaga

SEQ ID NO: 1288241 - DNA, 25 bp, Homo sapien
tgctggcctcattagtcaagcgtga

SEQ ID NO: 1288242 - DNA, 25 bp, Homo sapien
cctcctattgctcctatgggaagag

SEQ ID NO: 1288243 - DNA, 25 bp, Homo sapien
cacatgtactagtgggcaggttgct

SEQ ID NO: 1288244 - DNA, 25 bp, Homo sapien
tgctgtacatcaggaagccggactg

SEQ ID NO: 1288245 - DNA, 25 bp, Homo sapien
tcactgcgtttcagggtgcagaccc

SEQ ID NO: 1288246 - DNA, 25 bp, Homo sapien
tgggtgccccagtcatcatgtagct

SEQ ID NO: 1288247 - DNA, 25 bp, Homo sapien
caaatgcattttagccggtggcaac

SEQ ID NO: 1288248 - DNA, 25 bp, Homo sapien
taacagagacaacccacattcaagg

SEQ ID NO: 1288249 - DNA, 25 bp, Homo sapien
gaagccaggattgactaatggaccc

SEQ ID NO: 1288250 - DNA, 25 bp, Homo sapien
gaaaagtgatcaaattgagcccgct

SEQ ID NO: 1288251 - DNA, 25 bp, Homo sapien
taatggaccctagggcccagagtga

SEQ ID NO: 1288252 - DNA, 25 bp, Homo sapien
ccacaggtcacaggcaatatgcaat

SEQ ID NO: 1288253 - DNA, 25 bp, Homo sapien
tgctgggacttggactgttgctaga

SEQ ID NO: 1288254 - DNA, 25 bp, Homo sapien
cctatgctgggacttggactgttgc

SEQ ID NO: 1288255 - DNA, 25 bp, Homo sapien
attcatgccctatgctgggacttgg

SEQ ID NO: 1288256 - DNA, 25 bp, Homo sapien
actgttgctagagggggattgttca

SEQ ID NO: 1288257 - DNA, 25 bp, Homo sapien
gatcaagcccgatggacagtctgga

SEQ ID NO: 1288258 - DNA, 25 bp, Homo sapien
tttgagtgggcagagtcgttaccca

SEQ ID NO: 1288259 - DNA, 25 bp, Homo sapien
gcaatagatcaaccagctggcccag

SEQ ID NO: 1288260 - DNA, 25 bp, Homo sapien
ctgaggagtccactttgccaaggca

SEQ ID NO: 1288261 - DNA, 25 bp, Homo sapien
cccattggtaatacaagggcaagga

SEQ ID NO: 1288262 - DNA, 25 bp, Homo sapien
tcattgacgatctcgaccatctgga

SEQ ID NO: 1288263 - DNA, 25 bp, Homo sapien
gtaatacaagggcaaggacttggga

SEQ ID NO: 1288264 - DNA, 25 bp, Homo sapien
tctggaggtgtgaagatgccccatt

SEQ ID NO: 1288265 - DNA, 25 bp, Homo sapien
tatgaaccatcaggaattcccttac

SEQ ID NO: 1288266 - DNA, 25 bp, Homo sapien
gaaccatcaggaattcccttacact

SEQ ID NO: 1288267 - DNA, 25 bp, Homo sapien
ctatgaaccatcaggaattccctta

SEQ ID NO: 1288268 - DNA, 25 bp, Homo sapien
tgaaccatcaggaattcccttacac

SEQ ID NO: 1288269 - DNA, 25 bp, Homo sapien
caatcaaggtgacaggtcgtcgccc

SEQ ID NO: 1288270 - DNA, 25 bp, Homo sapien
ccaggctgaagccaatcaaggtgac

SEQ ID NO: 1288271 - DNA, 25 bp, Homo sapien
gccaatcaaggtgacaggtcgtcgc

SEQ ID NO: 1288272 - DNA, 25 bp, Homo sapien
tgaagccaatcaaggtgacaggtcg

SEQ ID NO: 1288273 - DNA, 25 bp, Homo sapien
ggagctttgtgccaaccctgctggc

SEQ ID NO: 1288274 - DNA, 25 bp, Homo sapien
ccagccaaagacgaagtttccctga

SEQ ID NO: 1288275 - DNA, 25 bp, Homo sapien
tcctgagtttgactgggcacacggc

SEQ ID NO: 1288276 - DNA, 25 bp, Homo sapien
ttaaacagtattcgaatcctgcagg

SEQ ID NO: 1288277 - DNA, 25 bp, Homo sapien
ttgctcaatgccacgcccacacagc

SEQ ID NO: 1288278 - DNA, 25 bp, Homo sapien
aatgccacgcccacacagccattcc

SEQ ID NO: 1288279 - DNA, 25 bp, Homo sapien
ccctcttgctcaatgccacgcccac

SEQ ID NO: 1288280 - DNA, 25 bp, Homo sapien
caatgccacgcccacacagccattc

SEQ ID NO: 1288281 - DNA, 25 bp, Homo sapien
tctgctgatcgatggagacacaccc

SEQ ID NO: 1288282 - DNA, 25 bp, Homo sapien
tgacattggcgacactgaggagtga

SEQ ID NO: 1288283 - DNA, 25 bp, Homo sapien
tgggccaggtgcttgccaacctctg

SEQ ID NO: 1288284 - DNA, 25 bp, Homo sapien
gggttgtcgatgacattggcgacac

SEQ ID NO: 1288285 - DNA, 25 bp, Homo sapien
ccatgttggcgagaccactgaggat

SEQ ID NO: 1288286 - DNA, 25 bp, Homo sapien
acactgtgtactttagggcctcctg

SEQ ID NO: 1288287 - DNA, 25 bp, Homo sapien
cagacaacactgtgtactttagggc

SEQ ID NO: 1288288 - DNA, 25 bp, Homo sapien
caggcagtactgctcacggctgtgg

SEQ ID NO: 1288289 - DNA, 25 bp, Homo sapien
taccacttgcccttgagattccagt

SEQ ID NO: 1288290 - DNA, 25 bp, Homo sapien
tgcgcccggcgaaagtgactttttc

SEQ ID NO: 1288291 - DNA, 25 bp, Homo sapien
catgagctcccagatcgtacatcag

SEQ ID NO: 1288292 - DNA, 25 bp, Homo sapien
cgtacatcagttcccctagatcact

SEQ ID NO: 1288293 - DNA, 25 bp, Homo sapien
tttgctttccatgccggccagactt

SEQ ID NO: 1288294 - DNA, 25 bp, Homo sapien
ctctcgaggaggtaggaatatgtga

SEQ ID NO: 1288295 - DNA, 25 bp, Homo sapien
gagtgtcccacactagacagctgga

SEQ ID NO: 1288296 - DNA, 25 bp, Homo sapien
tggtccaaagaaagtccggtcattc

SEQ ID NO: 1288297 - DNA, 25 bp, Homo sapien
tgcttcatgccaacgagaaaccacg

SEQ ID NO: 1288298 - DNA, 25 bp, Homo sapien
tgaacgaggcgctcactgaacgcta

SEQ ID NO: 1288299 - DNA, 25 bp, Homo sapien
ttccaacagatcagggtcagaacag

SEQ ID NO: 1288300 - DNA, 25 bp, Homo sapien
tgaacgctagtgacctctgtgcatg

SEQ ID NO: 1288301 - DNA, 25 bp, Homo sapien
aggtagacaggtagaagagtagatg

SEQ ID NO: 1288302 - DNA, 25 bp, Homo sapien
atggatagatagaagggtggttaag

SEQ ID NO: 1288303 - DNA, 25 bp, Homo sapien
ggatagatagaagggtggttaagtg

SEQ ID NO: 1288304 - DNA, 25 bp, Homo sapien
tagacaggtagaagagtagatggat

SEQ ID NO: 1288305 - DNA, 25 bp, Homo sapien
gcctgccctccgtcagaggcagaaa

SEQ ID NO: 1288306 - DNA, 25 bp, Homo sapien
cgagccaccccgtgacggcgatggt

SEQ ID NO: 1288307 - DNA, 25 bp, Homo sapien
gcagaaacgtgaactcttcaatggc

SEQ ID NO: 1288308 - DNA, 25 bp, Homo sapien
ggtatttgccagaagcgagccaccc

SEQ ID NO: 1288309 - DNA, 25 bp, Homo sapien
ggtcatgatggctatgccggctgct

SEQ ID NO: 1288310 - DNA, 25 bp, Homo sapien
ccggcgctgccaataatcgtcgctg

SEQ ID NO: 1288311 - DNA, 25 bp, Homo sapien
gctgcaccaaacagcgaggtcatga

SEQ ID NO: 1288312 - DNA, 25 bp, Homo sapien
gtcgctgctccagcggcaacaaggg

SEQ ID NO: 1288313 - DNA, 25 bp, Homo sapien
ttcttctttcgggatgcctcggcca

SEQ ID NO: 1288314 - DNA, 25 bp, Homo sapien
tccgacagtcgccaggcctatcagg

SEQ ID NO: 1288315 - DNA, 25 bp, Homo sapien
ggagataacgcttccatttcctccg

SEQ ID NO: 1288316 - DNA, 25 bp, Homo sapien
tcttctttcgggatgcctcggccat

SEQ ID NO: 1288317 - DNA, 25 bp, Homo sapien
taactcttaagtcagttccaagtgg

SEQ ID NO: 1288318 - DNA, 25 bp, Homo sapien
gaactgccttgacccttaattgata

SEQ ID NO: 1288319 - DNA, 25 bp, Homo sapien
ggctgaagattactgactttgggca

SEQ ID NO: 1288320 - DNA, 25 bp, Homo sapien
agttcaaggccgaagaaaacattca

SEQ ID NO: 1288321 - DNA, 25 bp, Homo sapien
aactagacaagcgatgtggcgctga

SEQ ID NO: 1288322 - DNA, 25 bp, Homo sapien
gacgggaacgtgcaactagacaagc

SEQ ID NO: 1288323 - DNA, 25 bp, Homo sapien
ggaacgtgcaactagacaagcgatg

SEQ ID NO: 1288324 - DNA, 25 bp, Homo sapien
gatatacgacgggaacgtgcaacta

SEQ ID NO: 1288325 - DNA, 25 bp, Homo sapien
tcaacaaacacggcctggaaatagt

SEQ ID NO: 1288326 - DNA, 25 bp, Homo sapien
attcaacaaacacggcctggaaata

SEQ ID NO: 1288327 - DNA, 25 bp, Homo sapien
cttgattcaacaaacacggcctgga

SEQ ID NO: 1288328 - DNA, 25 bp, Homo sapien
tgattcaacaaacacggcctggaaa

SEQ ID NO: 1288329 - DNA, 25 bp, Homo sapien
aaccagagaggtacaggatggacat

SEQ ID NO: 1288330 - DNA, 25 bp, Homo sapien
gaaaaccagagaggtacaggatgga

SEQ ID NO: 1288331 - DNA, 25 bp, Homo sapien
tgtccacatctctgaaaaccagaga

SEQ ID NO: 1288332 - DNA, 25 bp, Homo sapien
tctctgaaaaccagagaggtacagg

SEQ ID NO: 1288333 - DNA, 25 bp, Homo sapien
ccacaccgtcgtagtcacggtcatg

SEQ ID NO: 1288334 - DNA, 25 bp, Homo sapien
ctaaatccgaatgacagccttgttg

SEQ ID NO: 1288335 - DNA, 25 bp, Homo sapien
tgttgtcatcactgactgcctgctg

SEQ ID NO: 1288336 - DNA, 25 bp, Homo sapien
atatgacagcaacccacaccgtcgt

SEQ ID NO: 1288337 - DNA, 25 bp, Homo sapien
gcattgcccatctcatagatccata

SEQ ID NO: 1288338 - DNA, 25 bp, Homo sapien
cataaatcggtcttactctctgtca

SEQ ID NO: 1288339 - DNA, 25 bp, Homo sapien
cccataagagggtgttttctgtcct

SEQ ID NO: 1288340 - DNA, 25 bp, Homo sapien
gtcatcttatctcccataagagggt

SEQ ID NO: 1288341 - DNA, 25 bp, Homo sapien
ttcagaattaaggagaaaccctgcc

SEQ ID NO: 1288342 - DNA, 25 bp, Homo sapien
tctcaatgctgatggcgatactacc

SEQ ID NO: 1288343 - DNA, 25 bp, Homo sapien
tatgtgagcagtatcaaccccagca

SEQ ID NO: 1288344 - DNA, 25 bp, Homo sapien
tgagagccattcagactggacatcg

SEQ ID NO: 1288345 - DNA, 25 bp, Homo sapien
tgttaaagtcacagattcaaggccc

SEQ ID NO: 1288346 - DNA, 25 bp, Homo sapien
tcctaatgatcctgggagggcacta

SEQ ID NO: 1288347 - DNA, 25 bp, Homo sapien
tacaactgatgggtccgggacacgt

SEQ ID NO: 1288348 - DNA, 25 bp, Homo sapien
caattgtgcccgtgaaccaggtgtc

SEQ ID NO: 1288349 - DNA, 25 bp, Homo sapien
tgtggcaaacgaggactctggcccg

SEQ ID NO: 1288350 - DNA, 25 bp, Homo sapien
actctggcccgggcgtcatagtgcc

SEQ ID NO: 1288351 - DNA, 25 bp, Homo sapien
cttggagcagggaggtcatgtggca

SEQ ID NO: 1288352 - DNA, 25 bp, Homo sapien
gaggtcatgtggcaaacgaggactc

SEQ ID NO: 1288353 - DNA, 25 bp, Homo sapien
tcctagtctcttaccatgagttatt

SEQ ID NO: 1288354 - DNA, 25 bp, Homo sapien
tgtgcttccatgctctgataatata

SEQ ID NO: 1288355 - DNA, 25 bp, Homo sapien
ggcacatgccacaaatatcagaggc

SEQ ID NO: 1288356 - DNA, 25 bp, Homo sapien
gaggcttgactatgcctggaacact

SEQ ID NO: 1288357 - DNA, 25 bp, Homo sapien
gaatggtaccgggggcagcccctca

SEQ ID NO: 1288358 - DNA, 25 bp, Homo sapien
tgctctccttgctgaagccggccat

SEQ ID NO: 1288359 - DNA, 25 bp, Homo sapien
ttctgcagcatgaagaatggtaccg

SEQ ID NO: 1288360 - DNA, 25 bp, Homo sapien
tccttgctgaagccggccatctgca

SEQ ID NO: 1288361 - DNA, 25 bp, Homo sapien
catccttgagtgagaagctcagaag

SEQ ID NO: 1288362 - DNA, 25 bp, Homo sapien
ccttgagtgagaagctcagaaggtc

SEQ ID NO: 1288363 - DNA, 25 bp, Homo sapien
atccttgagtgagaagctcagaagg

SEQ ID NO: 1288364 - DNA, 25 bp, Homo sapien
tccttgagtgagaagctcagaaggt

SEQ ID NO: 1288365 - DNA, 25 bp, Homo sapien
tcgggtcgtccttcaagatggggtc

SEQ ID NO: 1288366 - DNA, 25 bp, Homo sapien
caaaagcagtcatggttggcaagac

SEQ ID NO: 1288367 - DNA, 25 bp, Homo sapien
caggccgctcgcaaaagcagtcatg

SEQ ID NO: 1288368 - DNA, 25 bp, Homo sapien
ttggcaagacagcttcagacaactc

SEQ ID NO: 1288369 - DNA, 25 bp, Homo sapien
acagaggtggagatcagttcagtgc

SEQ ID NO: 1288370 - DNA, 25 bp, Homo sapien
cagaggtggagatcagttcagtgca

SEQ ID NO: 1288371 - DNA, 25 bp, Homo sapien
gaggtggagatcagttcagtgcagc

SEQ ID NO: 1288372 - DNA, 25 bp, Homo sapien
gacagaggtggagatcagttcagtg

SEQ ID NO: 1288373 - DNA, 25 bp, Homo sapien
ccatagtgggcatctgagtgcagtc

SEQ ID NO: 1288374 - DNA, 25 bp, Homo sapien
gatgctgccaaggacgtgctttctg

SEQ ID NO: 1288375 - DNA, 25 bp, Homo sapien
gagtgcagtcctacaggagtcccca

SEQ ID NO: 1288376 - DNA, 25 bp, Homo sapien
tgaagggaagagtgccctccacgtg

SEQ ID NO: 1288377 - DNA, 25 bp, Homo sapien
tgaatcaaccctggaaccttgggat

SEQ ID NO: 1288378 - DNA, 25 bp, Homo sapien
ctctcttagtactgtgttctattac

SEQ ID NO: 1288379 - DNA, 25 bp, Homo sapien
attacttgtagcctgactgctgggc

SEQ ID NO: 1288380 - DNA, 25 bp, Homo sapien
tcagtgtgtaccactcacgtctggc

SEQ ID NO: 1288381 - DNA, 25 bp, Homo sapien
ctgtgttcgggttcaggaaataact

SEQ ID NO: 1288382 - DNA, 25 bp, Homo sapien
tgtgttcgggttcaggaaataactg

SEQ ID NO: 1288383 - DNA, 25 bp, Homo sapien
agagggcagcataggcgaagcggtt

SEQ ID NO: 1288384 - DNA, 25 bp, Homo sapien
gggcagcataggcgaagcggttggc

SEQ ID NO: 1288385 - DNA, 25 bp, Homo sapien
gcagtgggctcagctaccagaggct

SEQ ID NO: 1288386 - DNA, 25 bp, Homo sapien
gtgggctcagctaccagaggctgct

SEQ ID NO: 1288387 - DNA, 25 bp, Homo sapien
agtgggctcagctaccagaggctgc

SEQ ID NO: 1288388 - DNA, 25 bp, Homo sapien
ctgcagtgggctcagctaccagagg

SEQ ID NO: 1288389 - DNA, 25 bp, Homo sapien
ctggatcactgtaggcattcaggaa

SEQ ID NO: 1288390 - DNA, 25 bp, Homo sapien
ttttttcactgccacaccccgagct

SEQ ID NO: 1288391 - DNA, 25 bp, Homo sapien
ctgtgtgtacgaggcagttccctgg

SEQ ID NO: 1288392 - DNA, 25 bp, Homo sapien
acaccccgagctttctggacaggac

SEQ ID NO: 1288393 - DNA, 25 bp, Homo sapien
tctgaagacaggctgctcaggttct

SEQ ID NO: 1288394 - DNA, 25 bp, Homo sapien
tgtctgaagacaggctgctcaggtt

SEQ ID NO: 1288395 - DNA, 25 bp, Homo sapien
tttcaagaaacagccgtgggcctct

SEQ ID NO: 1288396 - DNA, 25 bp, Homo sapien
cagccgtgggcctctctctgtctga

SEQ ID NO: 1288397 - DNA, 25 bp, Homo sapien
aaccagcctgtgggtccacggagtg

SEQ ID NO: 1288398 - DNA, 25 bp, Homo sapien
cctgtgggtccacggagtgtgagat

SEQ ID NO: 1288399 - DNA, 25 bp, Homo sapien
cagcctgtgggtccacggagtgtga

SEQ ID NO: 1288400 - DNA, 25 bp, Homo sapien
accagcctgtgggtccacggagtgt

SEQ ID NO: 1288401 - DNA, 25 bp, Homo sapien
agttgagatcctgccactggactcc

SEQ ID NO: 1288402 - DNA, 25 bp, Homo sapien
gctgcagtgagttgagatcctgcca

SEQ ID NO: 1288403 - DNA, 25 bp, Homo sapien
aatcacttgagtcttgggggtcgag

SEQ ID NO: 1288404 - DNA, 25 bp, Homo sapien
gaatcacttgagtcttgggggtcga

SEQ ID NO: 1288405 - DNA, 25 bp, Homo sapien
agtgctggattcctgcgacgagaaa

SEQ ID NO: 1288406 - DNA, 25 bp, Homo sapien
cactgattccaagagagtgctggat

SEQ ID NO: 1288407 - DNA, 25 bp, Homo sapien
gaaaaagccccttctgtcaggacca

SEQ ID NO: 1288408 - DNA, 25 bp, Homo sapien
taaaactggatctcaagtgtgtctg

SEQ ID NO: 1288409 - DNA, 25 bp, Homo sapien
catattggaagcgagaggtcagtga

SEQ ID NO: 1288410 - DNA, 25 bp, Homo sapien
tctctatctgaagtcatattggaag

SEQ ID NO: 1288411 - DNA, 25 bp, Homo sapien
cttgagatgctcctagaagggcaga

SEQ ID NO: 1288412 - DNA, 25 bp, Homo sapien
catttagaagagacacccattgatt

SEQ ID NO: 1288413 - DNA, 25 bp, Homo sapien
caggaggtctccatgacaacagttc

SEQ ID NO: 1288414 - DNA, 25 bp, Homo sapien
tcaggaggtctccatgacaacagtt

SEQ ID NO: 1288415 - DNA, 25 bp, Homo sapien
gctggcaagtcctaggatgctcctt

SEQ ID NO: 1288416 - DNA, 25 bp, Homo sapien
cagctggcaagtcctaggatgctcc

SEQ ID NO: 1288417 - DNA, 25 bp, Homo sapien
agctggcaagtcctaggatgctcct

SEQ ID NO: 1288418 - DNA, 25 bp, Homo sapien
ctggcaagtcctaggatgctccttc

SEQ ID NO: 1288419 - DNA, 25 bp, Homo sapien
tgtccagcgaatgtggggcctgcca

SEQ ID NO: 1288420 - DNA, 25 bp, Homo sapien
gaagctccaaagacttcgtctgggc

SEQ ID NO: 1288421 - DNA, 25 bp, Homo sapien
cacctctccttggacataatggccg

SEQ ID NO: 1288422 - DNA, 25 bp, Homo sapien
cttggacataatggccggttgctaa

SEQ ID NO: 1288423 - DNA, 25 bp, Homo sapien
ctttatcaaatttaccaccacctga

SEQ ID NO: 1288424 - DNA, 25 bp, Homo sapien
tatcaaatttaccaccacctgacaa

SEQ ID NO: 1288425 - DNA, 25 bp, Homo sapien
ggtctatctccctcactagaggaag

SEQ ID NO: 1288426 - DNA, 25 bp, Homo sapien
tttatttatggtctatctccctcac

SEQ ID NO: 1288427 - DNA, 25 bp, Homo sapien
tggcctgggcatttggagtacaagt

SEQ ID NO: 1288428 - DNA, 25 bp, Homo sapien
tctggctagggctaaaatgtgaaga

SEQ ID NO: 1288429 - DNA, 25 bp, Homo sapien
tacaagtctggctagggctaaaatg

SEQ ID NO: 1288430 - DNA, 25 bp, Homo sapien
tttggagtacaagtctggctagggc

SEQ ID NO: 1288431 - DNA, 25 bp, Homo sapien
aaagtggattggatttcactctcac

SEQ ID NO: 1288432 - DNA, 25 bp, Homo sapien
tggaaagtggattggatttcactct

SEQ ID NO: 1288433 - DNA, 25 bp, Homo sapien
gctaaatggaaagtggattggattt

SEQ ID NO: 1288434 - DNA, 25 bp, Homo sapien
ttgaagcggaggtcggctaaatgga

SEQ ID NO: 1288435 - DNA, 25 bp, Homo sapien
cagccccggtttataatgtacaaca

SEQ ID NO: 1288436 - DNA, 25 bp, Homo sapien
tcagcagccccggtttataatgtac

SEQ ID NO: 1288437 - DNA, 25 bp, Homo sapien
tgtcacacgttccagagagccagtt

SEQ ID NO: 1288438 - DNA, 25 bp, Homo sapien
tgctgtcacacgttccagagagcca

SEQ ID NO: 1288439 - DNA, 25 bp, Homo sapien
agaagacatggcctccttgtaacat

SEQ ID NO: 1288440 - DNA, 25 bp, Homo sapien
gacatggcctccttgtaacatgagg

SEQ ID NO: 1288441 - DNA, 25 bp, Homo sapien
tacccagctgtaaaatccactcaaa

SEQ ID NO: 1288442 - DNA, 25 bp, Homo sapien
tcctgtaacttcaggcatgggcacc

SEQ ID NO: 1288443 - DNA, 25 bp, Homo sapien
gcggcaaaaccggcgagcggctcct

SEQ ID NO: 1288444 - DNA, 25 bp, Homo sapien
caaaaccggcgagcggctcctcccg

SEQ ID NO: 1288445 - DNA, 25 bp, Homo sapien
cggaggcggcaaaaccggcgagcgg

SEQ ID NO: 1288446 - DNA, 25 bp, Homo sapien
gaggcggcaaaaccggcgagcggct

SEQ ID NO: 1288447 - DNA, 25 bp, Homo sapien
tccaccacccatcgcgacaggggtg

SEQ ID NO: 1288448 - DNA, 25 bp, Homo sapien
gcaggtgaccggcaagcccgcggcg

SEQ ID NO: 1288449 - DNA, 25 bp, Homo sapien
gcctctgcaggtgaccggcaagccc

SEQ ID NO: 1288450 - DNA, 25 bp, Homo sapien
tctgcaggtgaccggcaagcccgcg

SEQ ID NO: 1288451 - DNA, 25 bp, Homo sapien
caggaagcagcgagacagcgcggcg

SEQ ID NO: 1288452 - DNA, 25 bp, Homo sapien
ccgcgaaggactcggccccgagagt

SEQ ID NO: 1288453 - DNA, 25 bp, Homo sapien
caaagccacattttgaagacaaagt

SEQ ID NO: 1288454 - DNA, 25 bp, Homo sapien
ggttggactttgcagaaactgcccg

SEQ ID NO: 1288455 - DNA, 25 bp, Homo sapien
ttgtggcttgcaagtcccgctggca

SEQ ID NO: 1288456 - DNA, 25 bp, Homo sapien
tatcccaagggcaagtgcaagcctg

SEQ ID NO: 1288457 - DNA, 25 bp, Homo sapien
gcaagcctgtcatccaagcgtgtaa

SEQ ID NO: 1288458 - DNA, 25 bp, Homo sapien
gcgtgtaattcttgacccaggctgg

SEQ ID NO: 1288459 - DNA, 25 bp, Homo sapien
cgggctgccacgtggtttgcactta

SEQ ID NO: 1288460 - DNA, 25 bp, Homo sapien
taagacacccgggtagatgaagggc

SEQ ID NO: 1288461 - DNA, 25 bp, Homo sapien
gaccaggtgttgtcctgcacgcaca

SEQ ID NO: 1288462 - DNA, 25 bp, Homo sapien
gagcgatacctctgtgcatggctgg

SEQ ID NO: 1288463 - DNA, 25 bp, Homo sapien
actgttgcagggtcttggtgcaggc

SEQ ID NO: 1288464 - DNA, 25 bp, Homo sapien
ggactgttgcagggtcttggtgcag

SEQ ID NO: 1288465 - DNA, 25 bp, Homo sapien
ctgttgcagggtcttggtgcaggcc

SEQ ID NO: 1288466 - DNA, 25 bp, Homo sapien
tgttgcagggtcttggtgcaggcca

SEQ ID NO: 1288467 - DNA, 25 bp, Homo sapien
cactgtcgctcagcacctgggcatt

SEQ ID NO: 1288468 - DNA, 25 bp, Homo sapien
ctgggcacagggaccggtgggacac

SEQ ID NO: 1288469 - DNA, 25 bp, Homo sapien
cattggcagagagtgtcagctggcg

SEQ ID NO: 1288470 - DNA, 25 bp, Homo sapien
cgccgctgggacttggatggaatct

SEQ ID NO: 1288471 - DNA, 25 bp, Homo sapien
caacagctgtctgacactcctctct

SEQ ID NO: 1288472 - DNA, 25 bp, Homo sapien
acaacagctgtctgacactcctctc

SEQ ID NO: 1288473 - DNA, 25 bp, Homo sapien
aacagctgtctgacactcctctctc

SEQ ID NO: 1288474 - DNA, 25 bp, Homo sapien
tataatcgaagccaagccaatgaga

SEQ ID NO: 1288475 - DNA, 25 bp, Homo sapien
tcaggacaggccagttagcatgctc

SEQ ID NO: 1288476 - DNA, 25 bp, Homo sapien
gaagcaggacacctagcattggatt

SEQ ID NO: 1288477 - DNA, 25 bp, Homo sapien
cattctgtgctcacggagagggtga

SEQ ID NO: 1288478 - DNA, 25 bp, Homo sapien
ggtgtgagacgttcttgtctttacc

SEQ ID NO: 1288479 - DNA, 25 bp, Homo sapien
tgtgagacgttcttgtctttaccct

SEQ ID NO: 1288480 - DNA, 25 bp, Homo sapien
tggtgtgagacgttcttgtctttac

SEQ ID NO: 1288481 - DNA, 25 bp, Homo sapien
gtgtgagacgttcttgtctttaccc

SEQ ID NO: 1288482 - DNA, 25 bp, Homo sapien
ctatagagatattcacctgggaagt

SEQ ID NO: 1288483 - DNA, 25 bp, Homo sapien
tatttgaatagatctactgcaaggg

SEQ ID NO: 1288484 - DNA, 25 bp, Homo sapien
gggtcattttgaccgcaattctttc

SEQ ID NO: 1288485 - DNA, 25 bp, Homo sapien
tatttgagagatcctctctctagga

SEQ ID NO: 1288486 - DNA, 25 bp, Homo sapien
tctagcatatcagcaccttgtgggc

SEQ ID NO: 1288487 - DNA, 25 bp, Homo sapien
gacttcacccagtactgctcaaagg

SEQ ID NO: 1288488 - DNA, 25 bp, Homo sapien
tggactctgaagacgacctgagaga

SEQ ID NO: 1288489 - DNA, 25 bp, Homo sapien
gatcaagacaaagggaatggactct

SEQ ID NO: 1288490 - DNA, 25 bp, Homo sapien
ctaattctggtaataggcttcagca

SEQ ID NO: 1288491 - DNA, 25 bp, Homo sapien
aattctggtaataggcttcagcatt

SEQ ID NO: 1288492 - DNA, 25 bp, Homo sapien
taattctggtaataggcttcagcat

SEQ ID NO: 1288493 - DNA, 25 bp, Homo sapien
attctggtaataggcttcagcattt

SEQ ID NO: 1288494 - DNA, 25 bp, Homo sapien
gctctgtctagccatgttaaatctt

SEQ ID NO: 1288495 - DNA, 25 bp, Homo sapien
cagctttcagaacaagtgttgctaa

SEQ ID NO: 1288496 - DNA, 25 bp, Homo sapien
gttaaatctttagactcagtctgat

SEQ ID NO: 1288497 - DNA, 25 bp, Homo sapien
gactcagtctgatgccgtttttctg

SEQ ID NO: 1288498 - DNA, 25 bp, Homo sapien
cacttaggatgcagagcttaccgca

SEQ ID NO: 1288499 - DNA, 25 bp, Homo sapien
taacgtggagagaacacggagcacc

SEQ ID NO: 1288500 - DNA, 25 bp, Homo sapien
gacctccggaaagagcggtgccttg

SEQ ID NO: 1288501 - DNA, 25 bp, Homo sapien
taagcaggtcatagccgtgatccag

SEQ ID NO: 1288502 - DNA, 25 bp, Homo sapien
ctggcggcgattgccggacagactc

SEQ ID NO: 1288503 - DNA, 25 bp, Homo sapien
ccagtccttgcggctggcggcgatt

SEQ ID NO: 1288504 - DNA, 25 bp, Homo sapien
ttgccggacagactctctgtggcct

SEQ ID NO: 1288505 - DNA, 25 bp, Homo sapien
cggcgattgccggacagactctctg

SEQ ID NO: 1288506 - DNA, 25 bp, Homo sapien
tgagatcccagaagctagtgacagt

SEQ ID NO: 1288507 - DNA, 25 bp, Homo sapien
cacttattcagaagagggagctgag

SEQ ID NO: 1288508 - DNA, 25 bp, Homo sapien
catatctctgagctctcaaggaggg

SEQ ID NO: 1288509 - DNA, 25 bp, Homo sapien
gaggctagtgatggtccaggacata

SEQ ID NO: 1288510 - DNA, 25 bp, Homo sapien
tcttgtcacactcgcaggtcagccg

SEQ ID NO: 1288511 - DNA, 25 bp, Homo sapien
gcatatttgcggttgtaggtgccca

SEQ ID NO: 1288512 - DNA, 25 bp, Homo sapien
caggttgcggcgaaagcagagggca

SEQ ID NO: 1288513 - DNA, 25 bp, Homo sapien
ccggtgcacagcttgttgggataat

SEQ ID NO: 1288514 - DNA, 25 bp, Homo sapien
tccagacgcccgtagcagcagtcgt

SEQ ID NO: 1288515 - DNA, 25 bp, Homo sapien
cagcttctccagacgcccgtagcag

SEQ ID NO: 1288516 - DNA, 25 bp, Homo sapien
cgcagaaaatgccacgttcgctgac

SEQ ID NO: 1288517 - DNA, 25 bp, Homo sapien
tgccacgttcgctgacagagaaaag

SEQ ID NO: 1288518 - DNA, 25 bp, Homo sapien
ctgtaagggtcatggttgacctgga

SEQ ID NO: 1288519 - DNA, 25 bp, Homo sapien
taagggtcatggttgacctggaggg

SEQ ID NO: 1288520 - DNA, 25 bp, Homo sapien
agggtcatggttgacctggagggac

SEQ ID NO: 1288521 - DNA, 25 bp, Homo sapien
tgtaagggtcatggttgacctggag

SEQ ID NO: 1288522 - DNA, 25 bp, Homo sapien
gccagtgggagccaccgatgccgca

SEQ ID NO: 1288523 - DNA, 25 bp, Homo sapien
caccgatgccgcagtaacagccata

SEQ ID NO: 1288524 - DNA, 25 bp, Homo sapien
cagccatagtcgttgtactgcaggg

SEQ ID NO: 1288525 - DNA, 25 bp, Homo sapien
tcagtctggtccaccggccagtggg

SEQ ID NO: 1288526 - DNA, 25 bp, Homo sapien
actgaaccaggttcccggtgaccag

SEQ ID NO: 1288527 - DNA, 25 bp, Homo sapien
gaaccaggttcccggtgaccagagc

SEQ ID NO: 1288528 - DNA, 25 bp, Homo sapien
accaggttcccggtgaccagagcca

SEQ ID NO: 1288529 - DNA, 25 bp, Homo sapien
ctgaaccaggttcccggtgaccaga

SEQ ID NO: 1288530 - DNA, 25 bp, Homo sapien
ggaacaccagcacgtggggagattt

SEQ ID NO: 1288531 - DNA, 25 bp, Homo sapien
acaccagcacgtggggagatttcat

SEQ ID NO: 1288532 - DNA, 25 bp, Homo sapien
aacaccagcacgtggggagatttca

SEQ ID NO: 1288533 - DNA, 25 bp, Homo sapien
aaggaacaccagcacgtggggagat

SEQ ID NO: 1288534 - DNA, 25 bp, Homo sapien
aagggaggtgcacaaggagcataaa

SEQ ID NO: 1288535 - DNA, 25 bp, Homo sapien
agggaggtgcacaaggagcataaaa

SEQ ID NO: 1288536 - DNA, 25 bp, Homo sapien
gtgcacaaggagcataaaaggcagc

SEQ ID NO: 1288537 - DNA, 25 bp, Homo sapien
gaggtgcacaaggagcataaaaggc

SEQ ID NO: 1288538 - DNA, 25 bp, Homo sapien
caccctgtttcagagaagacttgcg

SEQ ID NO: 1288539 - DNA, 25 bp, Homo sapien
gtgagtcatggtctcctgaaaagag

SEQ ID NO: 1288540 - DNA, 25 bp, Homo sapien
agagaggtgagtccacctgcccagg

SEQ ID NO: 1288541 - DNA, 25 bp, Homo sapien
tgcccaggatcacctagcagctgtg

SEQ ID NO: 1288542 - DNA, 25 bp, Homo sapien
ttagaaggtcaccagcatctttgtt

SEQ ID NO: 1288543 - DNA, 25 bp, Homo sapien
catctttgttaagtggcacagctgg

SEQ ID NO: 1288544 - DNA, 25 bp, Homo sapien
cagggaacaatggagcgccagtgag

SEQ ID NO: 1288545 - DNA, 25 bp, Homo sapien
agtgaggggaccactccttcagaat

SEQ ID NO: 1288546 - DNA, 25 bp, Homo sapien
tgtactctggagactcttgggtagg

SEQ ID NO: 1288547 - DNA, 25 bp, Homo sapien
tctggagactcttgggtaggagcat

SEQ ID NO: 1288548 - DNA, 25 bp, Homo sapien
ctacttgtactctggagactcttgg

SEQ ID NO: 1288549 - DNA, 25 bp, Homo sapien
tactctggagactcttgggtaggag

SEQ ID NO: 1288550 - DNA, 25 bp, Homo sapien
ggatctgattcttgattaccttgat

SEQ ID NO: 1288551 - DNA, 25 bp, Homo sapien
ctgtttgcttccctggatctgattc

SEQ ID NO: 1288552 - DNA, 25 bp, Homo sapien
ccttggacctctcaaggatttgagc

SEQ ID NO: 1288553 - DNA, 25 bp, Homo sapien
tgaggttcttgtggaccttggacct

SEQ ID NO: 1288554 - DNA, 25 bp, Homo sapien
tttctcccagcaggccagtaggagc

SEQ ID NO: 1288555 - DNA, 25 bp, Homo sapien
agcaggccagtaggagctgctattg

SEQ ID NO: 1288556 - DNA, 25 bp, Homo sapien
gcaggccagtaggagctgctattgc

SEQ ID NO: 1288557 - DNA, 25 bp, Homo sapien
cttcctgctttctcccagcaggcca

SEQ ID NO: 1288558 - DNA, 25 bp, Homo sapien
ccggagtacagcttctttggttaag

SEQ ID NO: 1288559 - DNA, 25 bp, Homo sapien
tattcagaagagaccccccggagta

SEQ ID NO: 1288560 - DNA, 25 bp, Homo sapien
tctttggttaagcacggagttgagg

SEQ ID NO: 1288561 - DNA, 25 bp, Homo sapien
tctgctggatgtctcattctgggtg

SEQ ID NO: 1288562 - DNA, 25 bp, Homo sapien
agcaacgaggggtgctccctctgca

SEQ ID NO: 1288563 - DNA, 25 bp, Homo sapien
cagcaacgaggggtgctccctctgc

SEQ ID NO: 1288564 - DNA, 25 bp, Homo sapien
tcagcaacgaggggtgctccctctg

SEQ ID NO: 1288565 - DNA, 25 bp, Homo sapien
gtgtttattggaatagtactggtac

SEQ ID NO: 1288566 - DNA, 25 bp, Homo sapien
tgtttctagcaaaacaggtggcagc

SEQ ID NO: 1288567 - DNA, 25 bp, Homo sapien
agcagccttatcacactcacacagt

SEQ ID NO: 1288568 - DNA, 25 bp, Homo sapien
gcagccttatcacactcacacagtt

SEQ ID NO: 1288569 - DNA, 25 bp, Homo sapien
tattgtaggtcgtcttgtttctagc

SEQ ID NO: 1288570 - DNA, 25 bp, Homo sapien
cacaagatgggagtttattaatatt

SEQ ID NO: 1288571 - DNA, 25 bp, Homo sapien
acctgcgctccagatatttctgacc

SEQ ID NO: 1288572 - DNA, 25 bp, Homo sapien
ctgcgctccagatatttctgaccaa

SEQ ID NO: 1288573 - DNA, 25 bp, Homo sapien
aacacaagatgggagtttattaata

SEQ ID NO: 1288574 - DNA, 25 bp, Homo sapien
tatcacagttgtgccatccatgcag

SEQ ID NO: 1288575 - DNA, 25 bp, Homo sapien
ggcccttttcatggaggactccctg

SEQ ID NO: 1288576 - DNA, 25 bp, Homo sapien
gaggcccctaaactcaacatgctgg

SEQ ID NO: 1288577 - DNA, 25 bp, Homo sapien
taacgcctgctgaagatacatgcct

SEQ ID NO: 1288578 - DNA, 25 bp, Homo sapien
ggtgccacatccacgtttctccaga

SEQ ID NO: 1288579 - DNA, 25 bp, Homo sapien
aacttgtagctcagaaatttggtgc

SEQ ID NO: 1288580 - DNA, 25 bp, Homo sapien
ggtgattctgctccccgagttgcta

SEQ ID NO: 1288581 - DNA, 25 bp, Homo sapien
tctccagacgtttgtagcaacagtc

SEQ ID NO: 1288582 - DNA, 25 bp, Homo sapien
caggaaccggcactgtctttgcagc

SEQ ID NO: 1288583 - DNA, 25 bp, Homo sapien
tgcaacagtctagagcagaagttcc

SEQ ID NO: 1288584 - DNA, 25 bp, Homo sapien
gaagttccaacatgccggctgcttt

SEQ ID NO: 1288585 - DNA, 25 bp, Homo sapien
gtgcctgtggtctcacccccttgga

SEQ ID NO: 1288586 - DNA, 25 bp, Homo sapien
tcctttcctgtcgtcaacttgatca

SEQ ID NO: 1288587 - DNA, 25 bp, Homo sapien
acagtggcagccgtagaagccataa

SEQ ID NO: 1288588 - DNA, 25 bp, Homo sapien
gcttcctttcctgtcgtcaacttga

SEQ ID NO: 1288589 - DNA, 25 bp, Homo sapien
ccataactgagtgcggcttcctttc

SEQ ID NO: 1288590 - DNA, 25 bp, Homo sapien
ctgtggaaattcaccaaattcccat

SEQ ID NO: 1288591 - DNA, 25 bp, Homo sapien
tggaaattcaccaaattcccatggg

SEQ ID NO: 1288592 - DNA, 25 bp, Homo sapien
ccaaattcccatgggcctgcagtag

SEQ ID NO: 1288593 - DNA, 25 bp, Homo sapien
aattcaccaaattcccatgggcctg

SEQ ID NO: 1288594 - DNA, 25 bp, Homo sapien
tccccctgagagaggatcactgcaa

SEQ ID NO: 1288595 - DNA, 25 bp, Homo sapien
tttttccccctgagagaggatcact

SEQ ID NO: 1288596 - DNA, 25 bp, Homo sapien
ccatgctcagaggtcagggtcagct

SEQ ID NO: 1288597 - DNA, 25 bp, Homo sapien
tgtccccccatgctcagaggtcagg

SEQ ID NO: 1288598 - DNA, 25 bp, Homo sapien
tgatcactgccaacagtaggagggt

SEQ ID NO: 1288599 - DNA, 25 bp, Homo sapien
caaagatcatgatcactgccaacag

SEQ ID NO: 1288600 - DNA, 25 bp, Homo sapien
cactgccaacagtaggagggtcttc

SEQ ID NO: 1288601 - DNA, 25 bp, Homo sapien
gatcatgatcactgccaacagtagg

SEQ ID NO: 1288602 - DNA, 25 bp, Homo sapien
cctctgctgggtggtctcaacttct

SEQ ID NO: 1288603 - DNA, 25 bp, Homo sapien
tcctctgctgggtggtctcaacttc

SEQ ID NO: 1288604 - DNA, 25 bp, Homo sapien
gggtgacaaatgcagatggactggc

SEQ ID NO: 1288605 - DNA, 25 bp, Homo sapien
ggtgacaaatgcagatggactggcc

SEQ ID NO: 1288606 - DNA, 25 bp, Homo sapien
acacagacatgctctcccatccaac

SEQ ID NO: 1288607 - DNA, 25 bp, Homo sapien
gacacacagacatgctctcccatcc

SEQ ID NO: 1288608 - DNA, 25 bp, Homo sapien
tgagacacacagacatgctctccca

SEQ ID NO: 1288609 - DNA, 25 bp, Homo sapien
ctgagacacacagacatgctctccc

SEQ ID NO: 1288610 - DNA, 25 bp, Homo sapien
cagctctgcagaatggtttcacaca

SEQ ID NO: 1288611 - DNA, 25 bp, Homo sapien
cccagctctgcagaatggtttcaca

SEQ ID NO: 1288612 - DNA, 25 bp, Homo sapien
tcccagctctgcagaatggtttcac

SEQ ID NO: 1288613 - DNA, 25 bp, Homo sapien
tccagagttgtatccccaggccgtc

SEQ ID NO: 1288614 - DNA, 25 bp, Homo sapien
tatccccaggccgtcttgtttgttc

SEQ ID NO: 1288615 - DNA, 25 bp, Homo sapien
agttgtatccccaggccgtcttgtt

SEQ ID NO: 1288616 - DNA, 25 bp, Homo sapien
agagttgtatccccaggccgtcttg

SEQ ID NO: 1288617 - DNA, 25 bp, Homo sapien
ggaggttgggggtaggtgaggcaca

SEQ ID NO: 1288618 - DNA, 25 bp, Homo sapien
tgggaggttgggggtaggtgaggca

SEQ ID NO: 1288619 - DNA, 25 bp, Homo sapien
aggttgggggtaggtgaggcacaag

SEQ ID NO: 1288620 - DNA, 25 bp, Homo sapien
gaggttgggggtaggtgaggcacaa

SEQ ID NO: 1288621 - DNA, 25 bp, Homo sapien
tacgtgtcagtagctgatgccaaaa

SEQ ID NO: 1288622 - DNA, 25 bp, Homo sapien
tggactcaggattggtcgcccatac

SEQ ID NO: 1288623 - DNA, 25 bp, Homo sapien
tgaggattgggaaaccttacgtgtc

SEQ ID NO: 1288624 - DNA, 25 bp, Homo sapien
tgatgccaaaacacatttcaggcag

SEQ ID NO: 1288625 - DNA, 25 bp, Homo sapien
ccttctgctcaatgtggcatttggg

SEQ ID NO: 1288626 - DNA, 25 bp, Homo sapien
caattgctgagcaaggattgctccc

SEQ ID NO: 1288627 - DNA, 25 bp, Homo sapien
aagggactaccaattgctgagcaag

SEQ ID NO: 1288628 - DNA, 25 bp, Homo sapien
agggcttttagtggtactcattcat

SEQ ID NO: 1288629 - DNA, 25 bp, Homo sapien
agggcaggtgaatgctccctggatc

SEQ ID NO: 1288630 - DNA, 25 bp, Homo sapien
ggtgaatgctccctggatctgttgc

SEQ ID NO: 1288631 - DNA, 25 bp, Homo sapien
tttccttcagccttcgggctgacac

SEQ ID NO: 1288632 - DNA, 25 bp, Homo sapien
tccttcagccttcgggctgacactg

SEQ ID NO: 1288633 - DNA, 25 bp, Homo sapien
acatgggtctcatactaatataaga

SEQ ID NO: 1288634 - DNA, 25 bp, Homo sapien
attaattctaacatgggtctcatac

SEQ ID NO: 1288635 - DNA, 25 bp, Homo sapien
gatctcaattattctgtaaaccaag

SEQ ID NO: 1288636 - DNA, 25 bp, Homo sapien
tgctacacctaacatacagtcatcc

SEQ ID NO: 1288637 - DNA, 25 bp, Homo sapien
aacccctggattccagctgagggcc

SEQ ID NO: 1288638 - DNA, 25 bp, Homo sapien
gctgcaactgcctctttggattctg

SEQ ID NO: 1288639 - DNA, 25 bp, Homo sapien
gaacccctggattccagctgagggc

SEQ ID NO: 1288640 - DNA, 25 bp, Homo sapien
acccctggattccagctgagggcca

SEQ ID NO: 1288641 - DNA, 25 bp, Homo sapien
tagcagcaatcatgcgggagacagc

SEQ ID NO: 1288642 - DNA, 25 bp, Homo sapien
aagagggagtagcagcaatcatgcg

SEQ ID NO: 1288643 - DNA, 25 bp, Homo sapien
tacattggatgtggcaaccggtgat

SEQ ID NO: 1288644 - DNA, 25 bp, Homo sapien
ggaattgcatcggtgccacttaggg

SEQ ID NO: 1288645 - DNA, 25 bp, Homo sapien
acagccctgcagctggtcccaaagt

SEQ ID NO: 1288646 - DNA, 25 bp, Homo sapien
ctgtggggagatccaggctgggtcc

SEQ ID NO: 1288647 - DNA, 25 bp, Homo sapien
caggctgggtccagggcacacagcc

SEQ ID NO: 1288648 - DNA, 25 bp, Homo sapien
tgcagctggtcccaaagtggcgcat

SEQ ID NO: 1288649 - DNA, 25 bp, Homo sapien
tgctccatccctgggttggcaatgg

SEQ ID NO: 1288650 - DNA, 25 bp, Homo sapien
ctccatccctgggttggcaatggag

SEQ ID NO: 1288651 - DNA, 25 bp, Homo sapien
gctccatccctgggttggcaatgga

SEQ ID NO: 1288652 - DNA, 25 bp, Homo sapien
cgcagagccagtgacagctgctgca

SEQ ID NO: 1288653 - DNA, 25 bp, Homo sapien
gcagagccagtgacagctgctgcat

SEQ ID NO: 1288654 - DNA, 25 bp, Homo sapien
tctggagaaacctgtgagggaacca

SEQ ID NO: 1288655 - DNA, 25 bp, Homo sapien
tgagtttaagacaggcatggcctcc

SEQ ID NO: 1288656 - DNA, 25 bp, Homo sapien
caactgggaggattcggaaagcttc

SEQ ID NO: 1288657 - DNA, 25 bp, Homo sapien
gtaatagccattcagtagccccttg

SEQ ID NO: 1288658 - DNA, 25 bp, Homo sapien
ctagcacccaggggtctgcccccgg

SEQ ID NO: 1288659 - DNA, 25 bp, Homo sapien
cacccaggggtctgcccccggcagt

SEQ ID NO: 1288660 - DNA, 25 bp, Homo sapien
agcacccaggggtctgcccccggca

SEQ ID NO: 1288661 - DNA, 25 bp, Homo sapien
acccaggggtctgcccccggcagtg

SEQ ID NO: 1288662 - DNA, 25 bp, Homo sapien
aacgcagtcgcttctggtaggtgtc

SEQ ID NO: 1288663 - DNA, 25 bp, Homo sapien
tctggtaggtgtccaggttgcgctt

SEQ ID NO: 1288664 - DNA, 25 bp, Homo sapien
ctggtaggtgtccaggttgcgcttc

SEQ ID NO: 1288665 - DNA, 25 bp, Homo sapien
tggtaggtgtccaggttgcgcttca

SEQ ID NO: 1288666 - DNA, 25 bp, Homo sapien
agcagtggatgttcccctgggaaaa

SEQ ID NO: 1288667 - DNA, 25 bp, Homo sapien
tgtatctgtaatagtccttgtagat

SEQ ID NO: 1288668 - DNA, 25 bp, Homo sapien
taatagtccttgtagatgctgcacc

SEQ ID NO: 1288669 - DNA, 25 bp, Homo sapien
tctgtaatagtccttgtagatgctg

SEQ ID NO: 1288670 - DNA, 25 bp, Homo sapien
tgggttggcctctgccacctagtcc

SEQ ID NO: 1288671 - DNA, 25 bp, Homo sapien
gccgtagggccagtaggagaggatg

SEQ ID NO: 1288672 - DNA, 25 bp, Homo sapien
gagaggatgggcattttcccagtca

SEQ ID NO: 1288673 - DNA, 25 bp, Homo sapien
ctagtccgcagtgacagccgtaggg

SEQ ID NO: 1288674 - DNA, 25 bp, Homo sapien
agccatcaccaccagcccacacagc

SEQ ID NO: 1288675 - DNA, 25 bp, Homo sapien
cagccatcaccaccagcccacacag

SEQ ID NO: 1288676 - DNA, 25 bp, Homo sapien
gcccacacagcagtgcaagttccat

SEQ ID NO: 1288677 - DNA, 25 bp, Homo sapien
accagcccacacagcagtgcaagtt

SEQ ID NO: 1288678 - DNA, 25 bp, Homo sapien
cacagagcagtggaggcagatgctg

SEQ ID NO: 1288679 - DNA, 25 bp, Homo sapien
gcagatgctggcagtccctttccat

SEQ ID NO: 1288680 - DNA, 25 bp, Homo sapien
ggcagatgctggcagtccctttcca

SEQ ID NO: 1288681 - DNA, 25 bp, Homo sapien
atcccagcacagagcagtggaggca

SEQ ID NO: 1288682 - DNA, 25 bp, Homo sapien
aagctcgcctggcagtgcccctgga

SEQ ID NO: 1288683 - DNA, 25 bp, Homo sapien
cagtgcccctggagcaccattgtcg

SEQ ID NO: 1288684 - DNA, 25 bp, Homo sapien
agccgccagcaagctcgcctggcag

SEQ ID NO: 1288685 - DNA, 25 bp, Homo sapien
ggcagtgcccctggagcaccattgt

SEQ ID NO: 1288686 - DNA, 25 bp, Homo sapien
tagttgtggcttcctgacaagcagc

SEQ ID NO: 1288687 - DNA, 25 bp, Homo sapien
ctagttgtggcttcctgacaagcag

SEQ ID NO: 1288688 - DNA, 25 bp, Homo sapien
acccactgtgacaacaaggaaagtt

SEQ ID NO: 1288689 - DNA, 25 bp, Homo sapien
gaacagcagcctttatttagctcac

SEQ ID NO: 1288690 - DNA, 25 bp, Homo sapien
gctacaagctgagtctcgctgagct

SEQ ID NO: 1288691 - DNA, 25 bp, Homo sapien
tcacgtgtctgaaatcagctgagac

SEQ ID NO: 1288692 - DNA, 25 bp, Homo sapien
catgttggcagtttagcctgggctc

SEQ ID NO: 1288693 - DNA, 25 bp, Homo sapien
gagagagtagacatgccctagacct

SEQ ID NO: 1288694 - DNA, 25 bp, Homo sapien
aacagattctgcctcttgataagaa

SEQ ID NO: 1288695 - DNA, 25 bp, Homo sapien
caagaccagttcagattcatgggat

SEQ ID NO: 1288696 - DNA, 25 bp, Homo sapien
gacatcataaaaactgaggacgcag

SEQ ID NO: 1288697 - DNA, 25 bp, Homo sapien
agcaccagggcttatgtctgccaca

SEQ ID NO: 1288698 - DNA, 25 bp, Homo sapien
gcaccagggcttatgtctgccacac

SEQ ID NO: 1288699 - DNA, 25 bp, Homo sapien
ctagcaccagggcttatgtctgcca

SEQ ID NO: 1288700 - DNA, 25 bp, Homo sapien
tagcaccagggcttatgtctgccac

SEQ ID NO: 1288701 - DNA, 25 bp, Homo sapien
gcacggattgcttgtcacactcaca

SEQ ID NO: 1288702 - DNA, 25 bp, Homo sapien
aagcagtgcacggattgcttgtcac

SEQ ID NO: 1288703 - DNA, 25 bp, Homo sapien
tctctttgaagcagtgcacggattg

SEQ ID NO: 1288704 - DNA, 25 bp, Homo sapien
cggattgcttgtcacactcacaggc

SEQ ID NO: 1288705 - DNA, 25 bp, Homo sapien
ctggcaccaggaccaagggtgcatc

SEQ ID NO: 1288706 - DNA, 25 bp, Homo sapien
gcaccaggaccaagggtgcatccac

SEQ ID NO: 1288707 - DNA, 25 bp, Homo sapien
tggcaccaggaccaagggtgcatcc

SEQ ID NO: 1288708 - DNA, 25 bp, Homo sapien
ggcaccaggaccaagggtgcatcca

SEQ ID NO: 1288709 - DNA, 25 bp, Homo sapien
tccggatgtgcctggcacgcagaag

SEQ ID NO: 1288710 - DNA, 25 bp, Homo sapien
acaagtggtccggatgtgcctggca

SEQ ID NO: 1288711 - DNA, 25 bp, Homo sapien
gctccacgtggagaaaaagcagcgc

SEQ ID NO: 1288712 - DNA, 25 bp, Homo sapien
cagaaggtgccctgtgggcgcttgc

SEQ ID NO: 1288713 - DNA, 25 bp, Homo sapien
ggtgctgatgccctggtactgatgc

SEQ ID NO: 1288714 - DNA, 25 bp, Homo sapien
caaggcttcaggagcaactggctgc

SEQ ID NO: 1288715 - DNA, 25 bp, Homo sapien
gactcaggagccctggtcaaggctt

SEQ ID NO: 1288716 - DNA, 25 bp, Homo sapien
cgctagtgccctgagcaaggctctg

SEQ ID NO: 1288717 - DNA, 25 bp, Homo sapien
cattgacgatgtggaactggtagct

SEQ ID NO: 1288718 - DNA, 25 bp, Homo sapien
aaaccactgcgccattgacgatgtg

SEQ ID NO: 1288719 - DNA, 25 bp, Homo sapien
tggaactggtagctgttcaacacag

SEQ ID NO: 1288720 - DNA, 25 bp, Homo sapien
tagctgttcaacacaggctggcagc

SEQ ID NO: 1288721 - DNA, 25 bp, Homo sapien
cttctcgtagggagagggagatgag

SEQ ID NO: 1288722 - DNA, 25 bp, Homo sapien
cttcagcttctcgtagggagaggga

SEQ ID NO: 1288723 - DNA, 25 bp, Homo sapien
ctcgtagggagagggagatgagggg

SEQ ID NO: 1288724 - DNA, 25 bp, Homo sapien
ttcagcttctcgtagggagagggag

SEQ ID NO: 1288725 - DNA, 25 bp, Homo sapien
gcagccatatccgtaatatgagaag

SEQ ID NO: 1288726 - DNA, 25 bp, Homo sapien
gccccgtgatgtgtttgaccctcct

SEQ ID NO: 1288727 - DNA, 25 bp, Homo sapien
tgagaagaaggcacttcgccccgtg

SEQ ID NO: 1288728 - DNA, 25 bp, Homo sapien
tgtcagtgtcatccacggggatccc

SEQ ID NO: 1288729 - DNA, 25 bp, Homo sapien
gctgccaccaccgatgagaaaaaaa

SEQ ID NO: 1288730 - DNA, 25 bp, Homo sapien
ggggctgccaccaccgatgagaaaa

SEQ ID NO: 1288731 - DNA, 25 bp, Homo sapien
tgccaccaccgatgagaaaaaaagg

SEQ ID NO: 1288732 - DNA, 25 bp, Homo sapien
gggctgccaccaccgatgagaaaaa

SEQ ID NO: 1288733 - DNA, 25 bp, Homo sapien
tagagtgctgagcattcgaaatatc

SEQ ID NO: 1288734 - DNA, 25 bp, Homo sapien
gagcattcgaaatatcaccagatcc

SEQ ID NO: 1288735 - DNA, 25 bp, Homo sapien
ccagatccccaaagcgaagtgcaag

SEQ ID NO: 1288736 - DNA, 25 bp, Homo sapien
cagatccccaaagcgaagtgcaagg

SEQ ID NO: 1288737 - DNA, 25 bp, Homo sapien
ggagggtgaggatggcaatgacctt

SEQ ID NO: 1288738 - DNA, 25 bp, Homo sapien
gagggtgaggatggcaatgaccttc

SEQ ID NO: 1288739 - DNA, 25 bp, Homo sapien
gaggagggtgaggatggcaatgacc

SEQ ID NO: 1288740 - DNA, 25 bp, Homo sapien
gggtgaggatggcaatgaccttcat

SEQ ID NO: 1288741 - DNA, 25 bp, Homo sapien
tttacacattccgagggccacagag

SEQ ID NO: 1288742 - DNA, 25 bp, Homo sapien
gatcttctttcacgacccatggagg

SEQ ID NO: 1288743 - DNA, 25 bp, Homo sapien
gctgaagagcatcgctaagacactt

SEQ ID NO: 1288744 - DNA, 25 bp, Homo sapien
gaaataagccgtcagcactcagttg

SEQ ID NO: 1288745 - DNA, 25 bp, Homo sapien
aatcagaagacattagaactggagg

SEQ ID NO: 1288746 - DNA, 25 bp, Homo sapien
gaggaaagcaaggaagtgtaggcag

SEQ ID NO: 1288747 - DNA, 25 bp, Homo sapien
gaatcagaagacattagaactggag

SEQ ID NO: 1288748 - DNA, 25 bp, Homo sapien
aggaaagcaaggaagtgtaggcagg

SEQ ID NO: 1288749 - DNA, 25 bp, Homo sapien
tcccgggctctgcagaaaccgaggg

SEQ ID NO: 1288750 - DNA, 25 bp, Homo sapien
cagaaaccgagggacctatgcaacc

SEQ ID NO: 1288751 - DNA, 25 bp, Homo sapien
ggacctatgcaaccgctgggccatg

SEQ ID NO: 1288752 - DNA, 25 bp, Homo sapien
caaaatagggtgactcccgggctct

SEQ ID NO: 1288753 - DNA, 25 bp, Homo sapien
tgggtgttggaagccaagcctgtga

SEQ ID NO: 1288754 - DNA, 25 bp, Homo sapien
cttcctgaggcatgtgtgggtgttg

SEQ ID NO: 1288755 - DNA, 25 bp, Homo sapien
gcctgtgataattctgtagaagctg

SEQ ID NO: 1288756 - DNA, 25 bp, Homo sapien
actcactgacagttaaaccttcctg

SEQ ID NO: 1288757 - DNA, 25 bp, Homo sapien
actgcaactgagcagtatccgggct

SEQ ID NO: 1288758 - DNA, 25 bp, Homo sapien
ccagggagcttctgatgagatccct

SEQ ID NO: 1288759 - DNA, 25 bp, Homo sapien
tcctcttctctcaataagtatccag

SEQ ID NO: 1288760 - DNA, 25 bp, Homo sapien
gaggctgtggaaaccgttgccaaaa

SEQ ID NO: 1288761 - DNA, 25 bp, Homo sapien
catttaaccgatggccattgagggc

SEQ ID NO: 1288762 - DNA, 25 bp, Homo sapien
caagcatgggtgtcctgaaaagaaa

SEQ ID NO: 1288763 - DNA, 25 bp, Homo sapien
tttatctgcaaaggaccccaaagtg

SEQ ID NO: 1288764 - DNA, 25 bp, Homo sapien
gaggatcccacattgttactgctgg

SEQ ID NO: 1288765 - DNA, 25 bp, Homo sapien
taataaccttaaagactagagccag

SEQ ID NO: 1288766 - DNA, 25 bp, Homo sapien
cagatggcaggtggttataacacaa

SEQ ID NO: 1288767 - DNA, 25 bp, Homo sapien
ttcacagagaaactaagagcagcct

SEQ ID NO: 1288768 - DNA, 25 bp, Homo sapien
caaaagcaggcattcgaggaactaa

SEQ ID NO: 1288769 - DNA, 25 bp, Homo sapien
taccagcgtgtcatttccccattct

SEQ ID NO: 1288770 - DNA, 25 bp, Homo sapien
ttccccaatcccaatataaggttca

SEQ ID NO: 1288771 - DNA, 25 bp, Homo sapien
tggctggtaagcacatattgaataa

SEQ ID NO: 1288772 - DNA, 25 bp, Homo sapien
tataaggttcatgaaagcaggggcc

SEQ ID NO: 1288773 - DNA, 25 bp, Homo sapien
agtgcccagagaacttcctatgtgg

SEQ ID NO: 1288774 - DNA, 25 bp, Homo sapien
gtgaaagtgcccagagaacttccta

SEQ ID NO: 1288775 - DNA, 25 bp, Homo sapien
ggcctcattctttctgtgccgaagc

SEQ ID NO: 1288776 - DNA, 25 bp, Homo sapien
tgcactgtccagacagtgaaagtgc

SEQ ID NO: 1288777 - DNA, 25 bp, Homo sapien
cacttaggaagataactcagctggc

SEQ ID NO: 1288778 - DNA, 25 bp, Homo sapien
ggttagaaatgcgtcaaagcaggat

SEQ ID NO: 1288779 - DNA, 25 bp, Homo sapien
gaccagaagggttctagacaattgc

SEQ ID NO: 1288780 - DNA, 25 bp, Homo sapien
cttaaaatgactagctgtcagcagg

SEQ ID NO: 1288781 - DNA, 25 bp, Homo sapien
tgagggccttgccagtgtcaaggac

SEQ ID NO: 1288782 - DNA, 25 bp, Homo sapien
ctgataaatgatcgcagagcttccg

SEQ ID NO: 1288783 - DNA, 25 bp, Homo sapien
tcttctgataaatgatcgcagagct

SEQ ID NO: 1288784 - DNA, 25 bp, Homo sapien
cgggatacgttagcttttagactat

SEQ ID NO: 1288785 - DNA, 25 bp, Homo sapien
cagcaaccttcggtttaaggcaaga

SEQ ID NO: 1288786 - DNA, 25 bp, Homo sapien
ctgccagcaaccttcggtttaaggc

SEQ ID NO: 1288787 - DNA, 25 bp, Homo sapien
ccttcggtttaaggcaagatgggct

SEQ ID NO: 1288788 - DNA, 25 bp, Homo sapien
caaccttcggtttaaggcaagatgg

SEQ ID NO: 1288789 - DNA, 25 bp, Homo sapien
aggccatcagtagacgttcttgtat

SEQ ID NO: 1288790 - DNA, 25 bp, Homo sapien
gatcaattgaatccaaaacacaggc

SEQ ID NO: 1288791 - DNA, 25 bp, Homo sapien
gacgttcttgtatatcattttcaca

SEQ ID NO: 1288792 - DNA, 25 bp, Homo sapien
ttagtttgtagatcaattgaatcca

SEQ ID NO: 1288793 - DNA, 25 bp, Homo sapien
cttgtccagagtctctttaccctgt

SEQ ID NO: 1288794 - DNA, 25 bp, Homo sapien
cctgtttcttgtcatagaacttcaa

SEQ ID NO: 1288795 - DNA, 25 bp, Homo sapien
cttgtcatagaacttcaaagagcag

SEQ ID NO: 1288796 - DNA, 25 bp, Homo sapien
gacttgtccagagtctctttaccct

SEQ ID NO: 1288797 - DNA, 25 bp, Homo sapien
cactggaagacatgacgccaatcac

SEQ ID NO: 1288798 - DNA, 25 bp, Homo sapien
gacatgacgccaatcacaagtaaaa

SEQ ID NO: 1288799 - DNA, 25 bp, Homo sapien
ttcactggaagacatgacgccaatc

SEQ ID NO: 1288800 - DNA, 25 bp, Homo sapien
tggaagacatgacgccaatcacaag

SEQ ID NO: 1288801 - DNA, 25 bp, Homo sapien
gattttaccatccctctcaatctgc

SEQ ID NO: 1288802 - DNA, 25 bp, Homo sapien
tttaccatccctctcaatctgctga

SEQ ID NO: 1288803 - DNA, 25 bp, Homo sapien
ttaccatccctctcaatctgctgac

SEQ ID NO: 1288804 - DNA, 25 bp, Homo sapien
ttttaccatccctctcaatctgctg

SEQ ID NO: 1288805 - DNA, 25 bp, Homo sapien
acagctggccgaggatgagtcacca

SEQ ID NO: 1288806 - DNA, 25 bp, Homo sapien
aaacagctggccgaggatgagtcac

SEQ ID NO: 1288807 - DNA, 25 bp, Homo sapien
cagctggccgaggatgagtcaccac

SEQ ID NO: 1288808 - DNA, 25 bp, Homo sapien
ctaaacagctggccgaggatgagtc

SEQ ID NO: 1288809 - DNA, 25 bp, Homo sapien
gtcaattttcccatcactatgcctg

SEQ ID NO: 1288810 - DNA, 25 bp, Homo sapien
tcctgatcttagactcatttccttc

SEQ ID NO: 1288811 - DNA, 25 bp, Homo sapien
gcccagctctgggtcaattttccca

SEQ ID NO: 1288812 - DNA, 25 bp, Homo sapien
tctgggtcaattttcccatcactat

SEQ ID NO: 1288813 - DNA, 25 bp, Homo sapien
gggcattggacaggatacctcgatt

SEQ ID NO: 1288814 - DNA, 25 bp, Homo sapien
tgacagccccaccaatcccgttcat

SEQ ID NO: 1288815 - DNA, 25 bp, Homo sapien
tggacaggatacctcgattgacagc

SEQ ID NO: 1288816 - DNA, 25 bp, Homo sapien
acaggatacctcgattgacagcccc

SEQ ID NO: 1288817 - DNA, 25 bp, Homo sapien
tatggactatccatggataacttgg

SEQ ID NO: 1288818 - DNA, 25 bp, Homo sapien
ctggcccatgtgtctacgtcaggac

SEQ ID NO: 1288819 - DNA, 25 bp, Homo sapien
tggccctgggcattggcacccaaaa

SEQ ID NO: 1288820 - DNA, 25 bp, Homo sapien
ctttctcagtagagcccagacctgg

SEQ ID NO: 1288821 - DNA, 25 bp, Homo sapien
caggttctgtgaggctaaggaaaat

SEQ ID NO: 1288822 - DNA, 25 bp, Homo sapien
caatcctgatgcatacaaatggtcc

SEQ ID NO: 1288823 - DNA, 25 bp, Homo sapien
tagcctattaatttggaccacccac

SEQ ID NO: 1288824 - DNA, 25 bp, Homo sapien
aatggtccctgattgcaaattggcc

SEQ ID NO: 1288825 - DNA, 25 bp, Homo sapien
tgctgcccttcggatgccccgcagc

SEQ ID NO: 1288826 - DNA, 25 bp, Homo sapien
ggatgccccgcagcttgtgaccatc

SEQ ID NO: 1288827 - DNA, 25 bp, Homo sapien
cgcagcttgtgaccatccccagagc

SEQ ID NO: 1288828 - DNA, 25 bp, Homo sapien
cttcggatgccccgcagcttgtgac

SEQ ID NO: 1288829 - DNA, 25 bp, Homo sapien
tcagaaggtgctctagacactggcg

SEQ ID NO: 1288830 - DNA, 25 bp, Homo sapien
ggtgctctagacactggcgattagg

SEQ ID NO: 1288831 - DNA, 25 bp, Homo sapien
agctctcagaaggtgctctagacac

SEQ ID NO: 1288832 - DNA, 25 bp, Homo sapien
gaaggtgctctagacactggcgatt

SEQ ID NO: 1288833 - DNA, 25 bp, Homo sapien
tctgtctcactcattgcggctttgc

SEQ ID NO: 1288834 - DNA, 25 bp, Homo sapien
cactcattgcggctttgctccaggc

SEQ ID NO: 1288835 - DNA, 25 bp, Homo sapien
gtctcactcattgcggctttgctcc

SEQ ID NO: 1288836 - DNA, 25 bp, Homo sapien
ttcctctgtctcactcattgcggct

SEQ ID NO: 1288837 - DNA, 25 bp, Homo sapien
tgcgaatgctggttatggctctgtg

SEQ ID NO: 1288838 - DNA, 25 bp, Homo sapien
cactgacctcttgttaccaatgatg

SEQ ID NO: 1288839 - DNA, 25 bp, Homo sapien
caatgatgcgaatgctggttatggc

SEQ ID NO: 1288840 - DNA, 25 bp, Homo sapien
tgttaccaatgatgcgaatgctggt

SEQ ID NO: 1288841 - DNA, 25 bp, Homo sapien
ggctatacagacacaggtttctcgt

SEQ ID NO: 1288842 - DNA, 25 bp, Homo sapien
ggtctcacaggcgtccttactccag

SEQ ID NO: 1288843 - DNA, 25 bp, Homo sapien
gatggttccctctacaacacaacct

SEQ ID NO: 1288844 - DNA, 25 bp, Homo sapien
tccagtgaccaatgaccaggctata

SEQ ID NO: 1288845 - DNA, 25 bp, Homo sapien
tgtcttcggcgtctggtcacttgcc

SEQ ID NO: 1288846 - DNA, 25 bp, Homo sapien
tattgagtcaactgcttatgcatcg

SEQ ID NO: 1288847 - DNA, 25 bp, Homo sapien
gtcacttgcctctctatagtcctgg

SEQ ID NO: 1288848 - DNA, 25 bp, Homo sapien
tggccccaaggatgagcctgcaaaa

SEQ ID NO: 1288849 - DNA, 25 bp, Homo sapien
caatcttaggcaatgcaggaccccg

SEQ ID NO: 1288850 - DNA, 25 bp, Homo sapien
acttcttggtcattgcggtagccca

SEQ ID NO: 1288851 - DNA, 25 bp, Homo sapien
gacacacggcacatggatgatgaga

SEQ ID NO: 1288852 - DNA, 25 bp, Homo sapien
cacagtgccagaagagatagcggta

SEQ ID NO: 1288853 - DNA, 25 bp, Homo sapien
catatcacacagtcggatggtgaca

SEQ ID NO: 1288854 - DNA, 25 bp, Homo sapien
cacacagtcggatggtgacagagct

SEQ ID NO: 1288855 - DNA, 25 bp, Homo sapien
atcacacagtcggatggtgacagag

SEQ ID NO: 1288856 - DNA, 25 bp, Homo sapien
ccccatatcacacagtcggatggtg

SEQ ID NO: 1288857 - DNA, 25 bp, Homo sapien
actctgtaggagacgaagtcagccc

SEQ ID NO: 1288858 - DNA, 25 bp, Homo sapien
taggatgtcctagtccctcacgggt

SEQ ID NO: 1288859 - DNA, 25 bp, Homo sapien
ggcggcacacgtcctctatgataag

SEQ ID NO: 1288860 - DNA, 25 bp, Homo sapien
tctgataccgttcagcagagggcgc

SEQ ID NO: 1288861 - DNA, 25 bp, Homo sapien
tgtggaaagaggagtggcagggatg

SEQ ID NO: 1288862 - DNA, 25 bp, Homo sapien
ctgtggaaagaggagtggcagggat

SEQ ID NO: 1288863 - DNA, 25 bp, Homo sapien
gaaagaggagtggcagggatgaagg

SEQ ID NO: 1288864 - DNA, 25 bp, Homo sapien
tggaaagaggagtggcagggatgaa

SEQ ID NO: 1288865 - DNA, 25 bp, Homo sapien
attgggagctccaatcatgcttgga

SEQ ID NO: 1288866 - DNA, 25 bp, Homo sapien
cctgtctcccccatcggattgggag

SEQ ID NO: 1288867 - DNA, 25 bp, Homo sapien
tgctgttaggtgaaaggcacttaga

SEQ ID NO: 1288868 - DNA, 25 bp, Homo sapien
gggacactcttattacacgtatgtg

SEQ ID NO: 1288869 - DNA, 25 bp, Homo sapien
cagcctcagcttcagtactctcggg

SEQ ID NO: 1288870 - DNA, 25 bp, Homo sapien
gagggaagtgaagaccgccccagcc

SEQ ID NO: 1288871 - DNA, 25 bp, Homo sapien
tcagatcagtgtaactggaatgcat

SEQ ID NO: 1288872 - DNA, 25 bp, Homo sapien
gtgtcccctgtcagggcagtggctc

SEQ ID NO: 1288873 - DNA, 25 bp, Homo sapien
taacacggtttctctgcagcggttc

SEQ ID NO: 1288874 - DNA, 25 bp, Homo sapien
gtctgctccggactcagctgtgcct

SEQ ID NO: 1288875 - DNA, 25 bp, Homo sapien
aaaggcttaacacggtttctctgca

SEQ ID NO: 1288876 - DNA, 25 bp, Homo sapien
gcagcggttcctcccctcttaggtg

SEQ ID NO: 1288877 - DNA, 25 bp, Homo sapien
gtatcaagtatctatatgtgccagg

SEQ ID NO: 1288878 - DNA, 25 bp, Homo sapien
caagcaggtatcaagtatctatatg

SEQ ID NO: 1288879 - DNA, 25 bp, Homo sapien
ggtagcggtgggacaccccagatac

SEQ ID NO: 1288880 - DNA, 25 bp, Homo sapien
ccccagataccagaagcaacaaggt

SEQ ID NO: 1288881 - DNA, 25 bp, Homo sapien
aagaggtgatagcaaggagccagtc

SEQ ID NO: 1288882 - DNA, 25 bp, Homo sapien
agccagtcaggcaaagaccacggga

SEQ ID NO: 1288883 - DNA, 25 bp, Homo sapien
cttggcgtacatgagcctggtgagg

SEQ ID NO: 1288884 - DNA, 25 bp, Homo sapien
caaagaccacgggaggacattctgc

SEQ ID NO: 1288885 - DNA, 25 bp, Homo sapien
ctgcaatgagctatgttggcaccac

SEQ ID NO: 1288886 - DNA, 25 bp, Homo sapien
aatgagctatgttggcaccaccaca

SEQ ID NO: 1288887 - DNA, 25 bp, Homo sapien
cctgggcagcatattgagactccat

SEQ ID NO: 1288888 - DNA, 25 bp, Homo sapien
gcaatgagctatgttggcaccacca

SEQ ID NO: 1288889 - DNA, 25 bp, Homo sapien
ttgagaggcctcacaatcaccgtgg

SEQ ID NO: 1288890 - DNA, 25 bp, Homo sapien
ctcacaatcaccgtggaaggcaaaa

SEQ ID NO: 1288891 - DNA, 25 bp, Homo sapien
acaatcaccgtggaaggcaaaaggc

SEQ ID NO: 1288892 - DNA, 25 bp, Homo sapien
ggcttgagaggcctcacaatcaccg

SEQ ID NO: 1288893 - DNA, 25 bp, Homo sapien
gcagacacccacactcaataagagg

SEQ ID NO: 1288894 - DNA, 25 bp, Homo sapien
gaaccctgacaaggccttctggcct

SEQ ID NO: 1288895 - DNA, 25 bp, Homo sapien
agttggccacgcagacacttggaac

SEQ ID NO: 1288896 - DNA, 25 bp, Homo sapien
tcagtactgctgttgaggcggaagc

SEQ ID NO: 1288897 - DNA, 25 bp, Homo sapien
atggcaacccggctggtaccagact

SEQ ID NO: 1288898 - DNA, 25 bp, Homo sapien
ggcagcttcctaagccgctcagtgg

SEQ ID NO: 1288899 - DNA, 25 bp, Homo sapien
ctatggcagcttcctaagccgctca

SEQ ID NO: 1288900 - DNA, 25 bp, Homo sapien
ctggtaccagactggcagcgggcca

SEQ ID NO: 1288901 - DNA, 25 bp, Homo sapien
gaggccgcggcagcactgagtgact

SEQ ID NO: 1288902 - DNA, 25 bp, Homo sapien
aggccgcggcagcactgagtgactg

SEQ ID NO: 1288903 - DNA, 25 bp, Homo sapien
cgccgaagcagtggaggccgcggca

SEQ ID NO: 1288904 - DNA, 25 bp, Homo sapien
ggaggccgcggcagcactgagtgac

SEQ ID NO: 1288905 - DNA, 25 bp, Homo sapien
agctgttgacagctttctgcaagca

SEQ ID NO: 1288906 - DNA, 25 bp, Homo sapien
ccaagagctgttgacagctttctgc

SEQ ID NO: 1288907 - DNA, 25 bp, Homo sapien
gcacagccggcccaagagctgttga

SEQ ID NO: 1288908 - DNA, 25 bp, Homo sapien
gacagctttctgcaagcactcacca

SEQ ID NO: 1288909 - DNA, 25 bp, Homo sapien
gtgtgggcagacatgatttgcattg

SEQ ID NO: 1288910 - DNA, 25 bp, Homo sapien
atgatttgcattgccaaatggcctt

SEQ ID NO: 1288911 - DNA, 25 bp, Homo sapien
gatccatagcgggtgtgggcagaca

SEQ ID NO: 1288912 - DNA, 25 bp, Homo sapien
tgggcagacatgatttgcattgcca

SEQ ID NO: 1288913 - DNA, 25 bp, Homo sapien
ggagagaacatagcccagtttctgg

SEQ ID NO: 1288914 - DNA, 25 bp, Homo sapien
gaatgaaatggcacaatgaaaggag

SEQ ID NO: 1288915 - DNA, 25 bp, Homo sapien
ggtgagaatgaaatggcacaatgaa

SEQ ID NO: 1288916 - DNA, 25 bp, Homo sapien
atggctggtacctcagacatgcaga

SEQ ID NO: 1288917 - DNA, 25 bp, Homo sapien
cattagttcaatctcagtgagtggg

SEQ ID NO: 1288918 - DNA, 25 bp, Homo sapien
tcacccagggagaattttgcagatc

SEQ ID NO: 1288919 - DNA, 25 bp, Homo sapien
tggagtggctcacatagttccttgc

SEQ ID NO: 1288920 - DNA, 25 bp, Homo sapien
gacactcaggtagtcacaggtgaga

SEQ ID NO: 1288921 - DNA, 25 bp, Homo sapien
gtaaccttggacatgccacggaccc

SEQ ID NO: 1288922 - DNA, 25 bp, Homo sapien
ttggacatgccacggaccctctctg

SEQ ID NO: 1288923 - DNA, 25 bp, Homo sapien
cagagtaaccttggacatgccacgg

SEQ ID NO: 1288924 - DNA, 25 bp, Homo sapien
gagtaaccttggacatgccacggac

SEQ ID NO: 1288925 - DNA, 25 bp, Homo sapien
gactttgggcaggtcacttgccctc

SEQ ID NO: 1288926 - DNA, 25 bp, Homo sapien
gggcaggtcacttgccctctctgag

SEQ ID NO: 1288927 - DNA, 25 bp, Homo sapien
tgggcaggtcacttgccctctctga

SEQ ID NO: 1288928 - DNA, 25 bp, Homo sapien
tttgggcaggtcacttgccctctct

SEQ ID NO: 1288929 - DNA, 25 bp, Homo sapien
tgcagtccccgcacaaaaatacttt

SEQ ID NO: 1288930 - DNA, 25 bp, Homo sapien
agtgcggccgggcttagtccttgca

SEQ ID NO: 1288931 - DNA, 25 bp, Homo sapien
agtgtggactgtggcgctgactgcc

SEQ ID NO: 1288932 - DNA, 25 bp, Homo sapien
tccaggtgagtgtaacggttacgag

SEQ ID NO: 1288933 - DNA, 25 bp, Homo sapien
gtttttctccttgaaccactgtgat

SEQ ID NO: 1288934 - DNA, 25 bp, Homo sapien
ctgggtttaatttatgttgagatga

SEQ ID NO: 1288935 - DNA, 25 bp, Homo sapien
tttaatttatgttgagatgaggaag

SEQ ID NO: 1288936 - DNA, 25 bp, Homo sapien
gaaccactgtgatgtaaagaaatct

SEQ ID NO: 1288937 - DNA, 25 bp, Homo sapien
gtgagcatggttacccaaaaggtag

SEQ ID NO: 1288938 - DNA, 25 bp, Homo sapien
aggtagtttctcaatccagtggttt

SEQ ID NO: 1288939 - DNA, 25 bp, Homo sapien
aaaaggtagtttctcaatccagtgg

SEQ ID NO: 1288940 - DNA, 25 bp, Homo sapien
agtgagcatggttacccaaaaggta

SEQ ID NO: 1288941 - DNA, 25 bp, Homo sapien
ttgatctgtcttagacgggccattc

SEQ ID NO: 1288942 - DNA, 25 bp, Homo sapien
tgatctgtcttagacgggccattca

SEQ ID NO: 1288943 - DNA, 25 bp, Homo sapien
cttgatctgtcttagacgggccatt

SEQ ID NO: 1288944 - DNA, 25 bp, Homo sapien
gatctgtcttagacgggccattcat

SEQ ID NO: 1288945 - DNA, 25 bp, Homo sapien
tccaatgtgtccaaggattgtccaa

SEQ ID NO: 1288946 - DNA, 25 bp, Homo sapien
gaaaaacgaagatccaatgtgtcca

SEQ ID NO: 1288947 - DNA, 25 bp, Homo sapien
gattgtccaaggtccaactaagagc

SEQ ID NO: 1288948 - DNA, 25 bp, Homo sapien
gtccaactaagagctggtggcgagc

SEQ ID NO: 1288949 - DNA, 25 bp, Homo sapien
tctgacccaggaatcaaagacccag

SEQ ID NO: 1288950 - DNA, 25 bp, Homo sapien
tcacaccatgacacggggcctcctg

SEQ ID NO: 1288951 - DNA, 25 bp, Homo sapien
gcctctctctgatgcagccgccctg

SEQ ID NO: 1288952 - DNA, 25 bp, Homo sapien
cagccatcttgaggcatctgaccca

SEQ ID NO: 1288953 - DNA, 25 bp, Homo sapien
caaagacacggcaaggatgaaggga

SEQ ID NO: 1288954 - DNA, 25 bp, Homo sapien
ggagtcctttacacagtacccagag

SEQ ID NO: 1288955 - DNA, 25 bp, Homo sapien
cagagcagagtgaaccccagaaatg

SEQ ID NO: 1288956 - DNA, 25 bp, Homo sapien
tcatgcacgaatcttgtctctccac

SEQ ID NO: 1288957 - DNA, 25 bp, Homo sapien
gagccctgtgttgtgatggcactgc

SEQ ID NO: 1288958 - DNA, 25 bp, Homo sapien
tcctgtccacattcgagccctgtgt

SEQ ID NO: 1288959 - DNA, 25 bp, Homo sapien
tcgagccctgtgttgtgatggcact

SEQ ID NO: 1288960 - DNA, 25 bp, Homo sapien
cacattcgagccctgtgttgtgatg

SEQ ID NO: 1288961 - DNA, 25 bp, Homo sapien
tgttggggaagaagaagagacccac

SEQ ID NO: 1288962 - DNA, 25 bp, Homo sapien
ctgttggggaagaagaagagaccca

SEQ ID NO: 1288963 - DNA, 25 bp, Homo sapien
ctggggaacagggagccgctggaag

SEQ ID NO: 1288964 - DNA, 25 bp, Homo sapien
ggagccgctggaagaggccgaatgt

SEQ ID NO: 1288965 - DNA, 25 bp, Homo sapien
agccgctggaagaggccgaatgtgc

SEQ ID NO: 1288966 - DNA, 25 bp, Homo sapien
agggagccgctggaagaggccgaat

SEQ ID NO: 1288967 - DNA, 25 bp, Homo sapien
tcctgcaggcctcccttctttctcc

SEQ ID NO: 1288968 - DNA, 25 bp, Homo sapien
ttcctgcaggcctcccttctttctc

SEQ ID NO: 1288969 - DNA, 25 bp, Homo sapien
cttcctgcaggcctcccttctttct

SEQ ID NO: 1288970 - DNA, 25 bp, Homo sapien
ctgcaggcctcccttctttctccat

SEQ ID NO: 1288971 - DNA, 25 bp, Homo sapien
ctgaaccagcccaaagcctgcggct

SEQ ID NO: 1288972 - DNA, 25 bp, Homo sapien
cagggaggctcctgaaccagcccaa

SEQ ID NO: 1288973 - DNA, 25 bp, Homo sapien
aaccagcccaaagcctgcggctcca

SEQ ID NO: 1288974 - DNA, 25 bp, Homo sapien
ccagggaggctcctgaaccagccca

SEQ ID NO: 1288975 - DNA, 25 bp, Homo sapien
tcgtcactgcccactcacagtagag

SEQ ID NO: 1288976 - DNA, 25 bp, Homo sapien
gaaccacactccttattaggaggga

SEQ ID NO: 1288977 - DNA, 25 bp, Homo sapien
ccccagaggttgagatcgggaacca

SEQ ID NO: 1288978 - DNA, 25 bp, Homo sapien
cagacctggccttcatggaaagctc

SEQ ID NO: 1288979 - DNA, 25 bp, Homo sapien
ctgttacggagtcacgaaaagtttg

SEQ ID NO: 1288980 - DNA, 25 bp, Homo sapien
caacactgagagtctctgttacgga

SEQ ID NO: 1288981 - DNA, 25 bp, Homo sapien
aagcttttacccattgaagccctag

SEQ ID NO: 1288982 - DNA, 25 bp, Homo sapien
tttcaaccatgactatgtccacctc

SEQ ID NO: 1288983 - DNA, 25 bp, Homo sapien
ctggcaggtgcccaaaagcagggga

SEQ ID NO: 1288984 - DNA, 25 bp, Homo sapien
tggcaggtgcccaaaagcaggggac

SEQ ID NO: 1288985 - DNA, 25 bp, Homo sapien
gaggtggactcacgccagggacaag

SEQ ID NO: 1288986 - DNA, 25 bp, Homo sapien
tgctgggaggtggactcacgccagg

SEQ ID NO: 1288987 - DNA, 25 bp, Homo sapien
taggtacatggcaatgatggtgctg

SEQ ID NO: 1288988 - DNA, 25 bp, Homo sapien
tgggaggtggactcacgccagggac

SEQ ID NO: 1288989 - DNA, 25 bp, Homo sapien
caatgtcaggtgttaacaataggag

SEQ ID NO: 1288990 - DNA, 25 bp, Homo sapien
gaaaatgtaccgcagcaatgtcagg

SEQ ID NO: 1288991 - DNA, 25 bp, Homo sapien
taaacagtgagtcatctgtctgggc

SEQ ID NO: 1288992 - DNA, 25 bp, Homo sapien
gggtatatggcaattctgtactatc

SEQ ID NO: 1288993 - DNA, 25 bp, Homo sapien
caagcattcctgtacgtggactcag

SEQ ID NO: 1288994 - DNA, 25 bp, Homo sapien
gccaaatcagcgaagaatgccaaca

SEQ ID NO: 1288995 - DNA, 25 bp, Homo sapien
gctgctcacacaacagactgcaagg

SEQ ID NO: 1288996 - DNA, 25 bp, Homo sapien
ggtaaaagatttcctcacgcaagag

SEQ ID NO: 1288997 - DNA, 25 bp, Homo sapien
gatacaggttgttgatttcatcgtg

SEQ ID NO: 1288998 - DNA, 25 bp, Homo sapien
tttcatcgtgggtagcaagctagta

SEQ ID NO: 1288999 - DNA, 25 bp, Homo sapien
gggtagcaagctagtaataaatttc

SEQ ID NO: 1289000 - DNA, 25 bp, Homo sapien
tgtctcccggcctgataccagatac

SEQ ID NO: 1289001 - DNA, 25 bp, Homo sapien
gctttttgccaataactgttaccgc

SEQ ID NO: 1289002 - DNA, 25 bp, Homo sapien
tgttaccgccgttcttattctctcc

SEQ ID NO: 1289003 - DNA, 25 bp, Homo sapien
caataactgttaccgccgttcttat

SEQ ID NO: 1289004 - DNA, 25 bp, Homo sapien
ttgccaataactgttaccgccgttc

SEQ ID NO: 1289005 - DNA, 25 bp, Homo sapien
cacgtcatcaatcctatcatcttca

SEQ ID NO: 1289006 - DNA, 25 bp, Homo sapien
tatttttcagcacgtcatcaatcct

SEQ ID NO: 1289007 - DNA, 25 bp, Homo sapien
caggaggtgccttgtcggtcatatt

SEQ ID NO: 1289008 - DNA, 25 bp, Homo sapien
tcaatcctatcatcttcaataacaa

SEQ ID NO: 1289009 - DNA, 25 bp, Homo sapien
ggtaagtcccgagcgcagctccggt

SEQ ID NO: 1289010 - DNA, 25 bp, Homo sapien
tcactgcgcggtgaaacagctccat

SEQ ID NO: 1289011 - DNA, 25 bp, Homo sapien
gacatttcccgttatgcccagagtg

SEQ ID NO: 1289012 - DNA, 25 bp, Homo sapien
gcaccaggcgcactaatttagacag

SEQ ID NO: 1289013 - DNA, 25 bp, Homo sapien
tctcgggagctttgtctcggtctct

SEQ ID NO: 1289014 - DNA, 25 bp, Homo sapien
ttgtttcggcggcttctgcgtcctc

SEQ ID NO: 1289015 - DNA, 25 bp, Homo sapien
ccctgtctaaggtgtcggtcgccct

SEQ ID NO: 1289016 - DNA, 25 bp, Homo sapien
cggcagccgatcgaggtctctgtct

SEQ ID NO: 1289017 - DNA, 25 bp, Homo sapien
cttgggcggccgcttgttctgcccg

SEQ ID NO: 1289018 - DNA, 25 bp, Homo sapien
ccgcttgctccggccgatctggccc

SEQ ID NO: 1289019 - DNA, 25 bp, Homo sapien
ttctcgtcgccgtagggcagcacct

SEQ ID NO: 1289020 - DNA, 25 bp, Homo sapien
ctgcccggcgccgaagaagttgttg

SEQ ID NO: 1289021 - DNA, 25 bp, Homo sapien
tccccgcccgcggcggacagggtca

SEQ ID NO: 1289022 - DNA, 25 bp, Homo sapien
cgcccgcggcggacagggtcagcgg

SEQ ID NO: 1289023 - DNA, 25 bp, Homo sapien
ccccgcccgcggcggacagggtcag

SEQ ID NO: 1289024 - DNA, 25 bp, Homo sapien
ccgcccgcggcggacagggtcagcg

SEQ ID NO: 1289025 - DNA, 25 bp, Homo sapien
gacgagctagaacggagagacaggg

SEQ ID NO: 1289026 - DNA, 25 bp, Homo sapien
gctccgcgcgcgagtggctgctgct

SEQ ID NO: 1289027 - DNA, 25 bp, Homo sapien
aggactcacatcctcggcgcgctgg

SEQ ID NO: 1289028 - DNA, 25 bp, Homo sapien
ccgctagggcaagagcgcggcactc

SEQ ID NO: 1289029 - DNA, 25 bp, Homo sapien
gccctcctcgaccatagagacatag

SEQ ID NO: 1289030 - DNA, 25 bp, Homo sapien
ctcgaccatagagacatagcgccac

SEQ ID NO: 1289031 - DNA, 25 bp, Homo sapien
tctgacttccaaggcctgttcccca

SEQ ID NO: 1289032 - DNA, 25 bp, Homo sapien
gcctttggaagcacaacctgtttgt

SEQ ID NO: 1289033 - DNA, 25 bp, Homo sapien
taccaactttgagcattccagaggc

SEQ ID NO: 1289034 - DNA, 25 bp, Homo sapien
gtgattggttcttcccgaggtgctg

SEQ ID NO: 1289035 - DNA, 25 bp, Homo sapien
taaatgcccatccatgataccaact

SEQ ID NO: 1289036 - DNA, 25 bp, Homo sapien
ctatgatcacggctgcagagggtgt

SEQ ID NO: 1289037 - DNA, 25 bp, Homo sapien
tgacagctgaagtagaatatgggac

SEQ ID NO: 1289038 - DNA, 25 bp, Homo sapien
taaaataggtgggaacggccagtga

SEQ ID NO: 1289039 - DNA, 25 bp, Homo sapien
tatgggacagtctcagtccccggca

SEQ ID NO: 1289040 - DNA, 25 bp, Homo sapien
tgggctagggaaagcagcctacctg

SEQ ID NO: 1289041 - DNA, 25 bp, Homo sapien
caagatgtcaaagctgcgacgggct

SEQ ID NO: 1289042 - DNA, 25 bp, Homo sapien
gagttcaaatcagggccagtggcga

SEQ ID NO: 1289043 - DNA, 25 bp, Homo sapien
gcatcatactagtgtcggcccctga

SEQ ID NO: 1289044 - DNA, 25 bp, Homo sapien
caaggagaagcgacatgagtacacc

SEQ ID NO: 1289045 - DNA, 25 bp, Homo sapien
tagcactcggtgcaggaacaaacgt

SEQ ID NO: 1289046 - DNA, 25 bp, Homo sapien
accgctgatgtagtggccgatgaca

SEQ ID NO: 1289047 - DNA, 25 bp, Homo sapien
tgatcgcctgtctgcagatagggca

SEQ ID NO: 1289048 - DNA, 25 bp, Homo sapien
tcttggatgcctttgggccgctcac

SEQ ID NO: 1289049 - DNA, 25 bp, Homo sapien
ggtgggtggttcgattccacaccat

SEQ ID NO: 1289050 - DNA, 25 bp, Homo sapien
caccatcttgtgctcctgaagtgtc

SEQ ID NO: 1289051 - DNA, 25 bp, Homo sapien
taagcgtttctttaacagaccgcac

SEQ ID NO: 1289052 - DNA, 25 bp, Homo sapien
ttttccacaaactggctgttaagcg

SEQ ID NO: 1289053 - DNA, 25 bp, Homo sapien
taagtggacacaaattctattattt

SEQ ID NO: 1289054 - DNA, 25 bp, Homo sapien
aagtggacacaaattctattatttc

SEQ ID NO: 1289055 - DNA, 25 bp, Homo sapien
ctaagtggacacaaattctattatt

SEQ ID NO: 1289056 - DNA, 25 bp, Homo sapien
cttctataacagcataaggcacgca

SEQ ID NO: 1289057 - DNA, 25 bp, Homo sapien
tataacagcataaggcacgcatttt

SEQ ID NO: 1289058 - DNA, 25 bp, Homo sapien
acagcataaggcacgcattttcctg

SEQ ID NO: 1289059 - DNA, 25 bp, Homo sapien
tctttaaatcttcacccaaatgaac

SEQ ID NO: 1289060 - DNA, 25 bp, Homo sapien
acacggagtacagggcggcggtgac

SEQ ID NO: 1289061 - DNA, 25 bp, Homo sapien
ggccttctgccggtacacggagtac

SEQ ID NO: 1289062 - DNA, 25 bp, Homo sapien
tgagctcttgggagacccgggcctt

SEQ ID NO: 1289063 - DNA, 25 bp, Homo sapien
ttgagctcttgggagacccgggcct

SEQ ID NO: 1289064 - DNA, 25 bp, Homo sapien
cgactgtggcgccaaggataggcct

SEQ ID NO: 1289065 - DNA, 25 bp, Homo sapien
ggcgagccccggtggccgactgtgg

SEQ ID NO: 1289066 - DNA, 25 bp, Homo sapien
gaaactcgaaatcagtcgcccagcg

SEQ ID NO: 1289067 - DNA, 25 bp, Homo sapien
taacctgaccggaaactcgaaatca

SEQ ID NO: 1289068 - DNA, 25 bp, Homo sapien
tgagtaccgtgttgaaattcagacc

SEQ ID NO: 1289069 - DNA, 25 bp, Homo sapien
ctttcggagtccagcagtgagcagc

SEQ ID NO: 1289070 - DNA, 25 bp, Homo sapien
catggtgtggaggtaccccttggta

SEQ ID NO: 1289071 - DNA, 25 bp, Homo sapien
tttgctaagcttagaggcattctcc

SEQ ID NO: 1289072 - DNA, 25 bp, Homo sapien
ttcagtacaacttcacccagggtgg

SEQ ID NO: 1289073 - DNA, 25 bp, Homo sapien
gagagcccttcccaatacaatgagg

SEQ ID NO: 1289074 - DNA, 25 bp, Homo sapien
cacagccgttcatggtgggccctag

SEQ ID NO: 1289075 - DNA, 25 bp, Homo sapien
ccatccattcaaggccgcagtggga

SEQ ID NO: 1289076 - DNA, 25 bp, Homo sapien
tggttccactgtccacatgctgttc

SEQ ID NO: 1289077 - DNA, 25 bp, Homo sapien
tgaacttgtaggaacgtggttccac

SEQ ID NO: 1289078 - DNA, 25 bp, Homo sapien
tggccccagtgaagtatcgtggctt

SEQ ID NO: 1289079 - DNA, 25 bp, Homo sapien
gctgttctttcctcgcatctcctgt

SEQ ID NO: 1289080 - DNA, 25 bp, Homo sapien
gcagatttcttcactcacactccca

SEQ ID NO: 1289081 - DNA, 25 bp, Homo sapien
tggcagatttcttcactcacactcc

SEQ ID NO: 1289082 - DNA, 25 bp, Homo sapien
gatttcttcactcacactcccaaaa

SEQ ID NO: 1289083 - DNA, 25 bp, Homo sapien
ctggcagatttcttcactcacactc

SEQ ID NO: 1289084 - DNA, 25 bp, Homo sapien
tgtactcacctattctcaaactgta

SEQ ID NO: 1289085 - DNA, 25 bp, Homo sapien
acagacggatggacaaatggattga

SEQ ID NO: 1289086 - DNA, 25 bp, Homo sapien
tgcaactcagccaaggacttacagt

SEQ ID NO: 1289087 - DNA, 25 bp, Homo sapien
caggcagtctgataccagggtttct

SEQ ID NO: 1289088 - DNA, 25 bp, Homo sapien
tctggttcaacagggcatcgcgcac

SEQ ID NO: 1289089 - DNA, 25 bp, Homo sapien
atctggttcaacagggcatcgcgca

SEQ ID NO: 1289090 - DNA, 25 bp, Homo sapien
tcaacagggcatcgcgcacagagac

SEQ ID NO: 1289091 - DNA, 25 bp, Homo sapien
ggttcaacagggcatcgcgcacaga

SEQ ID NO: 1289092 - DNA, 25 bp, Homo sapien
cacaagaggttagcaatctctccct

SEQ ID NO: 1289093 - DNA, 25 bp, Homo sapien
tatttagctccgcacacaagaggtt

SEQ ID NO: 1289094 - DNA, 25 bp, Homo sapien
cagtgctgcaagttttcctaggtaa

SEQ ID NO: 1289095 - DNA, 25 bp, Homo sapien
taggtaaataaagaggcccggcaca

SEQ ID NO: 1289096 - DNA, 25 bp, Homo sapien
aagctctagctcctttggtcttggg

SEQ ID NO: 1289097 - DNA, 25 bp, Homo sapien
gggacagctccaattactagaacat

SEQ ID NO: 1289098 - DNA, 25 bp, Homo sapien
cacacccggcaataactgattctta

SEQ ID NO: 1289099 - DNA, 25 bp, Homo sapien
ggagatcatttgaaccaagctctag

SEQ ID NO: 1289100 - DNA, 25 bp, Homo sapien
gactcgatgccttgtgataacccaa

SEQ ID NO: 1289101 - DNA, 25 bp, Homo sapien
gaggcatttccgtgttcgcacagca

SEQ ID NO: 1289102 - DNA, 25 bp, Homo sapien
tccactgaatgcaggagactcgatg

SEQ ID NO: 1289103 - DNA, 25 bp, Homo sapien
tccttgggacagagttcagattagc

SEQ ID NO: 1289104 - DNA, 25 bp, Homo sapien
tgttctcgttccagagtgaaggtca

SEQ ID NO: 1289105 - DNA, 25 bp, Homo sapien
caatcccttctacggccagggcaag

SEQ ID NO: 1289106 - DNA, 25 bp, Homo sapien
tcagtgcctccagacgtgagacagt

SEQ ID NO: 1289107 - DNA, 25 bp, Homo sapien
ttgaaagccgcagctaccaagaggc

SEQ ID NO: 1289108 - DNA, 25 bp, Homo sapien
ggagtaggagcactagccaccacag

SEQ ID NO: 1289109 - DNA, 25 bp, Homo sapien
gtaggagtaggagcactagccacca

SEQ ID NO: 1289110 - DNA, 25 bp, Homo sapien
tgtaggtaggagtaggagcactagc

SEQ ID NO: 1289111 - DNA, 25 bp, Homo sapien
gtaggagcactagccaccacagcat

SEQ ID NO: 1289112 - DNA, 25 bp, Homo sapien
tacgtggcctgctatcttggtgcgc

SEQ ID NO: 1289113 - DNA, 25 bp, Homo sapien
tgggaaattacatgaggcctgggcc

SEQ ID NO: 1289114 - DNA, 25 bp, Homo sapien
taacctggagtgtgaaacgctctgc

SEQ ID NO: 1289115 - DNA, 25 bp, Homo sapien
gggaagaccctcactaacaaagcag

SEQ ID NO: 1289116 - DNA, 25 bp, Homo sapien
gccacgtccctattttagaaatgag

SEQ ID NO: 1289117 - DNA, 25 bp, Homo sapien
tgcctggccacgtccctattttaga

SEQ ID NO: 1289118 - DNA, 25 bp, Homo sapien
gactgcacataggaaaaatgccact

SEQ ID NO: 1289119 - DNA, 25 bp, Homo sapien
gaaatgagaggagtgactgcacata

SEQ ID NO: 1289120 - DNA, 25 bp, Homo sapien
tctccacgctgtgcggagagggctc

SEQ ID NO: 1289121 - DNA, 25 bp, Homo sapien
gctctcagtgttgcatctcccacag

SEQ ID NO: 1289122 - DNA, 25 bp, Homo sapien
tgccattttcccacggctttaaaca

SEQ ID NO: 1289123 - DNA, 25 bp, Homo sapien
tcccacagaggtaaagttgtgccat

SEQ ID NO: 1289124 - DNA, 25 bp, Homo sapien
gatgaagcgctcatactgcgtgtgc

SEQ ID NO: 1289125 - DNA, 25 bp, Homo sapien
tggagaaggcgctggcgtagtaggg

SEQ ID NO: 1289126 - DNA, 25 bp, Homo sapien
gccccagcatcatggagaaggcgct

SEQ ID NO: 1289127 - DNA, 25 bp, Homo sapien
tgcgtgtgctggagtggccgcacgg

SEQ ID NO: 1289128 - DNA, 25 bp, Homo sapien
gtagcctagccggttgtaatccact

SEQ ID NO: 1289129 - DNA, 25 bp, Homo sapien
gtgtgtgtagcctagccggttgtaa

SEQ ID NO: 1289130 - DNA, 25 bp, Homo sapien
taaactggaatacaccatacacgtc

SEQ ID NO: 1289131 - DNA, 25 bp, Homo sapien
cacgtcgggcaacttgaactgaaca

SEQ ID NO: 1289132 - DNA, 25 bp, Homo sapien
tcttcaggaaggtcctcacaaaagg

SEQ ID NO: 1289133 - DNA, 25 bp, Homo sapien
gctgaatgtcatcgccatcaaaggg

SEQ ID NO: 1289134 - DNA, 25 bp, Homo sapien
gctgctggatcacgatgctatactc

SEQ ID NO: 1289135 - DNA, 25 bp, Homo sapien
ggatcaatgcggacaaactccagct

SEQ ID NO: 1289136 - DNA, 25 bp, Homo sapien
ggctggccatgactggaggccttcc

SEQ ID NO: 1289137 - DNA, 25 bp, Homo sapien
taaaaggccaggttagccagggctg

SEQ ID NO: 1289138 - DNA, 25 bp, Homo sapien
atgactggaggccttccaccacctg

SEQ ID NO: 1289139 - DNA, 25 bp, Homo sapien
aggcagagctgcacttaattcccac

SEQ ID NO: 1289140 - DNA, 25 bp, Homo sapien
ctttatttatgccctttaggccagc

SEQ ID NO: 1289141 - DNA, 25 bp, Homo sapien
atctttatttatgccctttaggcca

SEQ ID NO: 1289142 - DNA, 25 bp, Homo sapien
ttatttatgccctttaggccagcaa

SEQ ID NO: 1289143 - DNA, 25 bp, Homo sapien
tttatttatgccctttaggccagca

SEQ ID NO: 1289144 - DNA, 25 bp, Homo sapien
ctgtctcgcccacccgatgatggga

SEQ ID NO: 1289145 - DNA, 25 bp, Homo sapien
cttgaacacccagcgggagagggcc

SEQ ID NO: 1289146 - DNA, 25 bp, Homo sapien
gagggccacagctagttcatagttg

SEQ ID NO: 1289147 - DNA, 25 bp, Homo sapien
atgatgggacacaggccccacacgg

SEQ ID NO: 1289148 - DNA, 25 bp, Homo sapien
ggagcagcttgggcaccagagccac

SEQ ID NO: 1289149 - DNA, 25 bp, Homo sapien
caggagggaaacaggagcagcttgg

SEQ ID NO: 1289150 - DNA, 25 bp, Homo sapien
agggaaacaggagcagcttgggcac

SEQ ID NO: 1289151 - DNA, 25 bp, Homo sapien
ctgcaggagggaaacaggagcagct

SEQ ID NO: 1289152 - DNA, 25 bp, Homo sapien
aaggagtcgctgaagaagtcgaggg

SEQ ID NO: 1289153 - DNA, 25 bp, Homo sapien
agatgacgcgggcattgttcctggc

SEQ ID NO: 1289154 - DNA, 25 bp, Homo sapien
agccgctgaagatgacgcgggcatt

SEQ ID NO: 1289155 - DNA, 25 bp, Homo sapien
tgaagaagtcgagggagccgctgaa

SEQ ID NO: 1289156 - DNA, 25 bp, Homo sapien
ggagcccagcaatgaggagggtgtt

SEQ ID NO: 1289157 - DNA, 25 bp, Homo sapien
aagagcccgtcaggatgtccagcac

SEQ ID NO: 1289158 - DNA, 25 bp, Homo sapien
agggttatcaggatcggccaccatc

SEQ ID NO: 1289159 - DNA, 25 bp, Homo sapien
agtaagaggtggaagagcccgtcag

SEQ ID NO: 1289160 - DNA, 25 bp, Homo sapien
tccagcaccaaagggttatcaggat

SEQ ID NO: 1289161 - DNA, 25 bp, Homo sapien
caaattaatcccatctacgtaccct

SEQ ID NO: 1289162 - DNA, 25 bp, Homo sapien
tatactcggccttgatataacaaat

SEQ ID NO: 1289163 - DNA, 25 bp, Homo sapien
actatactcggccttgatataacaa

SEQ ID NO: 1289164 - DNA, 25 bp, Homo sapien
gatataacaaattaatcccatctac

SEQ ID NO: 1289165 - DNA, 25 bp, Homo sapien
ccaacacctcgaaagaggatgggat

SEQ ID NO: 1289166 - DNA, 25 bp, Homo sapien
gagatgatttcccaacgatggttgg

SEQ ID NO: 1289167 - DNA, 25 bp, Homo sapien
gatgatttcccaacgatggttgggg

SEQ ID NO: 1289168 - DNA, 25 bp, Homo sapien
tgatttcccaacgatggttggggcc

SEQ ID NO: 1289169 - DNA, 25 bp, Homo sapien
ctgcaaagagtagatggaaaggtgg

SEQ ID NO: 1289170 - DNA, 25 bp, Homo sapien
ccagggagaacctcctcacaccctc

SEQ ID NO: 1289171 - DNA, 25 bp, Homo sapien
catatgcccctgaaacctggaaggt

SEQ ID NO: 1289172 - DNA, 25 bp, Homo sapien
gcttttggctaagcagagctttgcc

SEQ ID NO: 1289173 - DNA, 25 bp, Homo sapien
ccaaggtctgagatgtcatagttgt

SEQ ID NO: 1289174 - DNA, 25 bp, Homo sapien
tcatagttgtgatggtcaatgacag

SEQ ID NO: 1289175 - DNA, 25 bp, Homo sapien
gtcaaactcaatcccgcactcactg

SEQ ID NO: 1289176 - DNA, 25 bp, Homo sapien
gacagccgttttctcctcgtcaaac

SEQ ID NO: 1289177 - DNA, 25 bp, Homo sapien
ggtctccacgttgatgttgcctcca

SEQ ID NO: 1289178 - DNA, 25 bp, Homo sapien
agcacactgcctccgccgtcaataa

SEQ ID NO: 1289179 - DNA, 25 bp, Homo sapien
atggtctccacgttgatgttgcctc

SEQ ID NO: 1289180 - DNA, 25 bp, Homo sapien
ctccgccgtcaataaaggcactgat

SEQ ID NO: 1289181 - DNA, 25 bp, Homo sapien
agtagtcatgggacgagggcagggc

SEQ ID NO: 1289182 - DNA, 25 bp, Homo sapien
gggtgacagtgacagtagtcatggg

SEQ ID NO: 1289183 - DNA, 25 bp, Homo sapien
acagtgacagtagtcatgggacgag

SEQ ID NO: 1289184 - DNA, 25 bp, Homo sapien
tgacagtgacagtagtcatgggacg

SEQ ID NO: 1289185 - DNA, 25 bp, Homo sapien
cttgaccaccgagggtcagcaatcc

SEQ ID NO: 1289186 - DNA, 25 bp, Homo sapien
gccttgaccaccgagggtcagcaat

SEQ ID NO: 1289187 - DNA, 25 bp, Homo sapien
cagccttgaccaccgagggtcagca

SEQ ID NO: 1289188 - DNA, 25 bp, Homo sapien
gcagccttgaccaccgagggtcagc

SEQ ID NO: 1289189 - DNA, 25 bp, Homo sapien
tctgacctatacaagctgacagtgc

SEQ ID NO: 1289190 - DNA, 25 bp, Homo sapien
tcctgacacagggtttggtaactca

SEQ ID NO: 1289191 - DNA, 25 bp, Homo sapien
ttagcacaggagatacgtaacatgg

SEQ ID NO: 1289192 - DNA, 25 bp, Homo sapien
taaaaaccatgaaggacgtgtgcaa

SEQ ID NO: 1289193 - DNA, 25 bp, Homo sapien
taaggctcttttttcagcccgagac

SEQ ID NO: 1289194 - DNA, 25 bp, Homo sapien
tatctccgtggtagcaccatccagg

SEQ ID NO: 1289195 - DNA, 25 bp, Homo sapien
tagaaagatgtaccctcctagggtc

SEQ ID NO: 1289196 - DNA, 25 bp, Homo sapien
aagcaatccatcaagtcccgggtct

SEQ ID NO: 1289197 - DNA, 25 bp, Homo sapien
catcagcggtcttgaatgtgagctc

SEQ ID NO: 1289198 - DNA, 25 bp, Homo sapien
gggtcatcagcggtcttgaatgtga

SEQ ID NO: 1289199 - DNA, 25 bp, Homo sapien
ttccccatactttatgagagacagg

SEQ ID NO: 1289200 - DNA, 25 bp, Homo sapien
aaatgatgagattgtcatagaggaa

SEQ ID NO: 1289201 - DNA, 25 bp, Homo sapien
acgcgaagggaaacccctgctgcag

SEQ ID NO: 1289202 - DNA, 25 bp, Homo sapien
ctgctgcagacatcgcggacccgca

SEQ ID NO: 1289203 - DNA, 25 bp, Homo sapien
caggtagttgaggaagacgggacgc

SEQ ID NO: 1289204 - DNA, 25 bp, Homo sapien
gaaggagagtggtcaatgccctcga

SEQ ID NO: 1289205 - DNA, 25 bp, Homo sapien
gcagcaaccaaaagagggcccaagc

SEQ ID NO: 1289206 - DNA, 25 bp, Homo sapien
aaaagcgaatgagtctcccgcacgt

SEQ ID NO: 1289207 - DNA, 25 bp, Homo sapien
cgcaaaccgcgccaagcaagggcag

SEQ ID NO: 1289208 - DNA, 25 bp, Homo sapien
tctcccgcacgttgaggttgtccag

SEQ ID NO: 1289209 - DNA, 25 bp, Homo sapien
ctcctcctgccgaaggacccagcac

SEQ ID NO: 1289210 - DNA, 25 bp, Homo sapien
ctcctgccgaaggacccagcacgtg

SEQ ID NO: 1289211 - DNA, 25 bp, Homo sapien
tgccgaaggacccagcacgtgcaca

SEQ ID NO: 1289212 - DNA, 25 bp, Homo sapien
cacgtgcacaccggaagtaccccat

SEQ ID NO: 1289213 - DNA, 25 bp, Homo sapien
ccgtggagcactacccggaagtgat

SEQ ID NO: 1289214 - DNA, 25 bp, Homo sapien
tacccggaagtgatcgggatacgcc

SEQ ID NO: 1289215 - DNA, 25 bp, Homo sapien
tacggtagcccaatcgcggctcgtg

SEQ ID NO: 1289216 - DNA, 25 bp, Homo sapien
cgtccagagccgcagctttggcgat

SEQ ID NO: 1289217 - DNA, 25 bp, Homo sapien
gacctgctgtgggacccctgtgcca

SEQ ID NO: 1289218 - DNA, 25 bp, Homo sapien
ggcagcttaatgtggagtggccttc

SEQ ID NO: 1289219 - DNA, 25 bp, Homo sapien
tcagacagaggcacagttccttccc

SEQ ID NO: 1289220 - DNA, 25 bp, Homo sapien
tccttcccagctgatattgagcttc

SEQ ID NO: 1289221 - DNA, 25 bp, Homo sapien
gccgtgaagcaggtctcaggctttg

SEQ ID NO: 1289222 - DNA, 25 bp, Homo sapien
ctccatcagggctggtgaaggccgt

SEQ ID NO: 1289223 - DNA, 25 bp, Homo sapien
aaggccgtgaagcaggtctcaggct

SEQ ID NO: 1289224 - DNA, 25 bp, Homo sapien
tggtgaaggccgtgaagcaggtctc

SEQ ID NO: 1289225 - DNA, 25 bp, Homo sapien
caggtgagcagacggaaacactgat

SEQ ID NO: 1289226 - DNA, 25 bp, Homo sapien
tggcaggtgagcagacggaaacact

SEQ ID NO: 1289227 - DNA, 25 bp, Homo sapien
actgatgtggtatgaacagctggag

SEQ ID NO: 1289228 - DNA, 25 bp, Homo sapien
gtgagcagacggaaacactgatgtg

SEQ ID NO: 1289229 - DNA, 25 bp, Homo sapien
gccccggagcgctgtgtggcaggtg

SEQ ID NO: 1289230 - DNA, 25 bp, Homo sapien
cctcaggccccggagcgctgtgtgg

SEQ ID NO: 1289231 - DNA, 25 bp, Homo sapien
gcctggcagtctctacatgcctata

SEQ ID NO: 1289232 - DNA, 25 bp, Homo sapien
gcagtctctacatgcctataaggca

SEQ ID NO: 1289233 - DNA, 25 bp, Homo sapien
gccaaagttgcttttgcttttctta

SEQ ID NO: 1289234 - DNA, 25 bp, Homo sapien
tgccaaagttgcttttgcttttctt

SEQ ID NO: 1289235 - DNA, 25 bp, Homo sapien
tcgagggactcgaggcggaagggcc

SEQ ID NO: 1289236 - DNA, 25 bp, Homo sapien
cagctgaggcctggtggcgagttgt

SEQ ID NO: 1289237 - DNA, 25 bp, Homo sapien
gagttgttgctgagtgggcagctga

SEQ ID NO: 1289238 - DNA, 25 bp, Homo sapien
cttggtgaaagggatgtcgagggac

SEQ ID NO: 1289239 - DNA, 25 bp, Homo sapien
gaggatctggctggcccgcttagat

SEQ ID NO: 1289240 - DNA, 25 bp, Homo sapien
cttagatcggaagtagttgctggca

SEQ ID NO: 1289241 - DNA, 25 bp, Homo sapien
tgttttcactgttgctccgactgag

SEQ ID NO: 1289242 - DNA, 25 bp, Homo sapien
tcctggcgtctgtgctgaggatctg

SEQ ID NO: 1289243 - DNA, 25 bp, Homo sapien
ctgcagaggttttgcgggctggttt

SEQ ID NO: 1289244 - DNA, 25 bp, Homo sapien
ggctcgccattgtctgctgcagagg

SEQ ID NO: 1289245 - DNA, 25 bp, Homo sapien
tgcagaggttttgcgggctggtttg

SEQ ID NO: 1289246 - DNA, 25 bp, Homo sapien
tgttcggctcgccattgtctgctgc

SEQ ID NO: 1289247 - DNA, 25 bp, Homo sapien
agctgaagtcactgctgcctggtgc

SEQ ID NO: 1289248 - DNA, 25 bp, Homo sapien
aagtcactgctgcctggtgcaaggc

SEQ ID NO: 1289249 - DNA, 25 bp, Homo sapien
tgaagtcactgctgcctggtgcaag

SEQ ID NO: 1289250 - DNA, 25 bp, Homo sapien
aaacaaaagctgaagtcactgctgc

SEQ ID NO: 1289251 - DNA, 25 bp, Homo sapien
tggtttttgtgatgacgggatgtgg

SEQ ID NO: 1289252 - DNA, 25 bp, Homo sapien
ttatcttcgtcccagcaggactcac

SEQ ID NO: 1289253 - DNA, 25 bp, Homo sapien
agccgttatcttcgtcccagcagga

SEQ ID NO: 1289254 - DNA, 25 bp, Homo sapien
cttccagaagccgttatcttcgtcc

SEQ ID NO: 1289255 - DNA, 25 bp, Homo sapien
tctccagctgaaactcggactgcag

SEQ ID NO: 1289256 - DNA, 25 bp, Homo sapien
agtcacgctcctgccggcggatggt

SEQ ID NO: 1289257 - DNA, 25 bp, Homo sapien
gcggatggtggccaagtaatcgatc

SEQ ID NO: 1289258 - DNA, 25 bp, Homo sapien
gaaactcggactgcagatctttgat

SEQ ID NO: 1289259 - DNA, 25 bp, Homo sapien
tctgatcaagggttccagattcttt

SEQ ID NO: 1289260 - DNA, 25 bp, Homo sapien
ctgctcaagtctgccagaccggtcc

SEQ ID NO: 1289261 - DNA, 25 bp, Homo sapien
cttgatctgatcaagggttccagat

SEQ ID NO: 1289262 - DNA, 25 bp, Homo sapien
caagggttccagattcttttggtct

SEQ ID NO: 1289263 - DNA, 25 bp, Homo sapien
tacagtctgattagtaaagaaggat

SEQ ID NO: 1289264 - DNA, 25 bp, Homo sapien
ggtacagtctgattagtaaagaagg

SEQ ID NO: 1289265 - DNA, 25 bp, Homo sapien
aggtacagtctgattagtaaagaag

SEQ ID NO: 1289266 - DNA, 25 bp, Homo sapien
acagtctgattagtaaagaaggatg

SEQ ID NO: 1289267 - DNA, 25 bp, Homo sapien
taagcacgtggtgttagtgggtata

SEQ ID NO: 1289268 - DNA, 25 bp, Homo sapien
cgtggtgttagtgggtataataatc

SEQ ID NO: 1289269 - DNA, 25 bp, Homo sapien
actgggtagtaagcacgtggtgtta

SEQ ID NO: 1289270 - DNA, 25 bp, Homo sapien
catttcttagactgggtagtaagca

SEQ ID NO: 1289271 - DNA, 25 bp, Homo sapien
tgcttcctgcgctcgtctgcgtagc

SEQ ID NO: 1289272 - DNA, 25 bp, Homo sapien
ctgtcctcatccgagttctgcaggg

SEQ ID NO: 1289273 - DNA, 25 bp, Homo sapien
tcgtagacgttaagcagcacccagt

SEQ ID NO: 1289274 - DNA, 25 bp, Homo sapien
tgcgtagcgcttgcgccgcttgtgc

SEQ ID NO: 1289275 - DNA, 25 bp, Homo sapien
tcttcacaccagctgtggccggcag

SEQ ID NO: 1289276 - DNA, 25 bp, Homo sapien
ggcagcgggtcatcagtcagcactg

SEQ ID NO: 1289277 - DNA, 25 bp, Homo sapien
gctggtccacaacgggcagcgggtc

SEQ ID NO: 1289278 - DNA, 25 bp, Homo sapien
ccacaacgggcagcgggtcatcagt

SEQ ID NO: 1289279 - DNA, 25 bp, Homo sapien
ctaaggccacttccgaggccagatc

SEQ ID NO: 1289280 - DNA, 25 bp, Homo sapien
gctgtccgcaccacctctaaggcca

SEQ ID NO: 1289281 - DNA, 25 bp, Homo sapien
gtccgcaccacctctaaggccactt

SEQ ID NO: 1289282 - DNA, 25 bp, Homo sapien
ctctaaggccacttccgaggccaga

SEQ ID NO: 1289283 - DNA, 25 bp, Homo sapien
cagctcagggacaccagtgacacaa

SEQ ID NO: 1289284 - DNA, 25 bp, Homo sapien
tgcagccccgacagatcacctccag

SEQ ID NO: 1289285 - DNA, 25 bp, Homo sapien
tgacacaaaaacacgccctgttgag

SEQ ID NO: 1289286 - DNA, 25 bp, Homo sapien
cccaggtggctcaatcccagacggg

SEQ ID NO: 1289287 - DNA, 25 bp, Homo sapien
tgggcgggaagtcatcagccgcctc

SEQ ID NO: 1289288 - DNA, 25 bp, Homo sapien
aggcctgggcgggaagtcatcagcc

SEQ ID NO: 1289289 - DNA, 25 bp, Homo sapien
cctgggcgggaagtcatcagccgcc

SEQ ID NO: 1289290 - DNA, 25 bp, Homo sapien
gggaagtcatcagccgcctcggctt

SEQ ID NO: 1289291 - DNA, 25 bp, Homo sapien
agggaccttggggacgtctgcctgg

SEQ ID NO: 1289292 - DNA, 25 bp, Homo sapien
cagggaccttggggacgtctgcctg

SEQ ID NO: 1289293 - DNA, 25 bp, Homo sapien
catctgtcctggccacggtggagga

SEQ ID NO: 1289294 - DNA, 25 bp, Homo sapien
tctgtcctggccacggtggaggaga

SEQ ID NO: 1289295 - DNA, 25 bp, Homo sapien
cacagaggtttcttcgagcgaggat

SEQ ID NO: 1289296 - DNA, 25 bp, Homo sapien
tgtctcatactgaaaagcaggcggg

SEQ ID NO: 1289297 - DNA, 25 bp, Homo sapien
tgggcagctccgcaaacctggagga

SEQ ID NO: 1289298 - DNA, 25 bp, Homo sapien
cagagtgtcagtcgtggagaagacc

SEQ ID NO: 1289299 - DNA, 25 bp, Homo sapien
tggctaagccatcccagtgcagtgc

SEQ ID NO: 1289300 - DNA, 25 bp, Homo sapien
gaaagggtggcacttcacagctcac

SEQ ID NO: 1289301 - DNA, 25 bp, Homo sapien
ctgatcctcgggtgtagaaaatgct

SEQ ID NO: 1289302 - DNA, 25 bp, Homo sapien
tttgctttgctaacagagaggctca

SEQ ID NO: 1289303 - DNA, 25 bp, Homo sapien
tgagttgcgcatggcagtgatgtct

SEQ ID NO: 1289304 - DNA, 25 bp, Homo sapien
agcgtggacagcctgacgtcatatg

SEQ ID NO: 1289305 - DNA, 25 bp, Homo sapien
agcctggcccgagactcctgctcgg

SEQ ID NO: 1289306 - DNA, 25 bp, Homo sapien
gacgtcatatgagttgcgcatggca

SEQ ID NO: 1289307 - DNA, 25 bp, Homo sapien
gctttcagccgggccaggcgctctt

SEQ ID NO: 1289308 - DNA, 25 bp, Homo sapien
ttatagtcggctttcagccgggcca

SEQ ID NO: 1289309 - DNA, 25 bp, Homo sapien
tcagccgggccaggcgctcttcata

SEQ ID NO: 1289310 - DNA, 25 bp, Homo sapien
cttatagtcggctttcagccgggcc

SEQ ID NO: 1289311 - DNA, 25 bp, Homo sapien
caaatagaaactggcatggacagca

SEQ ID NO: 1289312 - DNA, 25 bp, Homo sapien
ttggcaaatagaaactggcatggac

SEQ ID NO: 1289313 - DNA, 25 bp, Homo sapien
gcaaatagaaactggcatggacagc

SEQ ID NO: 1289314 - DNA, 25 bp, Homo sapien
atagaaactggcatggacagcactg

SEQ ID NO: 1289315 - DNA, 25 bp, Homo sapien
gctgcttctcggcctccacgtcatg

SEQ ID NO: 1289316 - DNA, 25 bp, Homo sapien
ctcccggatcagctgcttctcggcc

SEQ ID NO: 1289317 - DNA, 25 bp, Homo sapien
cagctgcttctcggcctccacgtca

SEQ ID NO: 1289318 - DNA, 25 bp, Homo sapien
cccggatcagctgcttctcggcctc

SEQ ID NO: 1289319 - DNA, 25 bp, Homo sapien
tggatcacaggttggggcaacagct

SEQ ID NO: 1289320 - DNA, 25 bp, Homo sapien
ctggatcacaggttggggcaacagc

SEQ ID NO: 1289321 - DNA, 25 bp, Homo sapien
ggatcacaggttggggcaacagctt

SEQ ID NO: 1289322 - DNA, 25 bp, Homo sapien
gaattattcagatcagctggtccca

SEQ ID NO: 1289323 - DNA, 25 bp, Homo sapien
ggcgagcgaattcctagaaaccgta

SEQ ID NO: 1289324 - DNA, 25 bp, Homo sapien
gaaaccgtaaaccacgagtcagtga

SEQ ID NO: 1289325 - DNA, 25 bp, Homo sapien
cagggttagactgcccttcagggcg

SEQ ID NO: 1289326 - DNA, 25 bp, Homo sapien
tgccgagagcgacaggttgatcttg

SEQ ID NO: 1289327 - DNA, 25 bp, Homo sapien
gccgcgtcagcttcgagtcacggta

SEQ ID NO: 1289328 - DNA, 25 bp, Homo sapien
gagcgtcttggtgttgccgcccagt

SEQ ID NO: 1289329 - DNA, 25 bp, Homo sapien
gtactcgcgaagcagcgcatccttg

SEQ ID NO: 1289330 - DNA, 25 bp, Homo sapien
gaatccttgttcatcagcgtgtagc

SEQ ID NO: 1289331 - DNA, 25 bp, Homo sapien
agcgtgtagccgaccgaacggttct

SEQ ID NO: 1289332 - DNA, 25 bp, Homo sapien
gggccacgctgtgcaccgtgtgcat

SEQ ID NO: 1289333 - DNA, 25 bp, Homo sapien
ccatgatgtgctcacactgggccac

SEQ ID NO: 1289334 - DNA, 25 bp, Homo sapien
tgcggagaggccagagccgggtcac

SEQ ID NO: 1289335 - DNA, 25 bp, Homo sapien
ccttggtaactgctcatctctgctg

SEQ ID NO: 1289336 - DNA, 25 bp, Homo sapien
ggagaggccagagccgggtcaccat

SEQ ID NO: 1289337 - DNA, 25 bp, Homo sapien
ctgcggagaggccagagccgggtca

SEQ ID NO: 1289338 - DNA, 25 bp, Homo sapien
accaggaacttagtgttctctgcac

SEQ ID NO: 1289339 - DNA, 25 bp, Homo sapien
cagccccaaggaggtcccggacatc

SEQ ID NO: 1289340 - DNA, 25 bp, Homo sapien
aggaggtcccggacatcttcattgt

SEQ ID NO: 1289341 - DNA, 25 bp, Homo sapien
ccaggaacttagtgttctctgcaca

SEQ ID NO: 1289342 - DNA, 25 bp, Homo sapien
tgcctctctgggagggcggatccgg

SEQ ID NO: 1289343 - DNA, 25 bp, Homo sapien
tctggccgtaggcaaagatggtgcc

SEQ ID NO: 1289344 - DNA, 25 bp, Homo sapien
tggacgctctcgaacacgtgctcga

SEQ ID NO: 1289345 - DNA, 25 bp, Homo sapien
gccctgcatggtgaaggacttcccg

SEQ ID NO: 1289346 - DNA, 25 bp, Homo sapien
agggcttctttcgtgcatgggcaca

SEQ ID NO: 1289347 - DNA, 25 bp, Homo sapien
tacagggcttctttcgtgcatgggc

SEQ ID NO: 1289348 - DNA, 25 bp, Homo sapien
acagggcttctttcgtgcatgggca

SEQ ID NO: 1289349 - DNA, 25 bp, Homo sapien
gcttctttcgtgcatgggcacagga

SEQ ID NO: 1289350 - DNA, 25 bp, Homo sapien
cctgcgcccctcgagggcctttcct

SEQ ID NO: 1289351 - DNA, 25 bp, Homo sapien
gcctgcgcccctcgagggcctttcc

SEQ ID NO: 1289352 - DNA, 25 bp, Homo sapien
cgcctgcgcccctcgagggcctttc

SEQ ID NO: 1289353 - DNA, 25 bp, Homo sapien
ctgttcccgtccgcctgcgcccctc

SEQ ID NO: 1289354 - DNA, 25 bp, Homo sapien
ccaccagcggataggcgatctcgtt

SEQ ID NO: 1289355 - DNA, 25 bp, Homo sapien
cgcccgggttctggatgcagcactg

SEQ ID NO: 1289356 - DNA, 25 bp, Homo sapien
tctgctcggtgacgtggtccacgtg

SEQ ID NO: 1289357 - DNA, 25 bp, Homo sapien
gtcaccacgggctggcagcgcagct

SEQ ID NO: 1289358 - DNA, 25 bp, Homo sapien
gacgtgggggatccgcgctgcaggc

SEQ ID NO: 1289359 - DNA, 25 bp, Homo sapien
gggagctgggcgtcgcaggacccga

SEQ ID NO: 1289360 - DNA, 25 bp, Homo sapien
caggaccaacgggaccagagctgac

SEQ ID NO: 1289361 - DNA, 25 bp, Homo sapien
ggctcgcccgtttctgaggcccggc

SEQ ID NO: 1289362 - DNA, 25 bp, Homo sapien
ttgtttcaagtccacacagcaagga

SEQ ID NO: 1289363 - DNA, 25 bp, Homo sapien
tttattttgtttcaagtccacacag

SEQ ID NO: 1289364 - DNA, 25 bp, Homo sapien
tttgtttcaagtccacacagcaagg

SEQ ID NO: 1289365 - DNA, 25 bp, Homo sapien
attttgtttcaagtccacacagcaa

SEQ ID NO: 1289366 - DNA, 25 bp, Homo sapien
tttctgcacacaggagtccaccgtg

SEQ ID NO: 1289367 - DNA, 25 bp, Homo sapien
ccttctgagaaagcgggagtcacag

SEQ ID NO: 1289368 - DNA, 25 bp, Homo sapien
caaagagggtttgtcagtcactggc

SEQ ID NO: 1289369 - DNA, 25 bp, Homo sapien
tctttctgctctggtgggactgccc

SEQ ID NO: 1289370 - DNA, 25 bp, Homo sapien
gacagaagaggctacgttcagtaac

SEQ ID NO: 1289371 - DNA, 25 bp, Homo sapien
tcagtaaccgcgtggttctccacca

SEQ ID NO: 1289372 - DNA, 25 bp, Homo sapien
cccacagtcctgctcctcgtaggtg

SEQ ID NO: 1289373 - DNA, 25 bp, Homo sapien
tgcctcggacttggcatggctgagg

SEQ ID NO: 1289374 - DNA, 25 bp, Homo sapien
ccagcacgtctctccgcaacagggc

SEQ ID NO: 1289375 - DNA, 25 bp, Homo sapien
caggtggttccggaagacctggtgg

SEQ ID NO: 1289376 - DNA, 25 bp, Homo sapien
gtgcgcacggacagacaccactggc

SEQ ID NO: 1289377 - DNA, 25 bp, Homo sapien
actggccgctagcacccagctcagg

SEQ ID NO: 1289378 - DNA, 25 bp, Homo sapien
accaggcacgagtggccaccaggac

SEQ ID NO: 1289379 - DNA, 25 bp, Homo sapien
cagcgaaggcccagatgttctccgt

SEQ ID NO: 1289380 - DNA, 25 bp, Homo sapien
ggcccagatgttctccgtcaggctg

SEQ ID NO: 1289381 - DNA, 25 bp, Homo sapien
gggccatgcctcccatgcggcagga

SEQ ID NO: 1289382 - DNA, 25 bp, Homo sapien
ctttgcacagacacggatgcaggca

SEQ ID NO: 1289383 - DNA, 25 bp, Homo sapien
agacatatctgcacacgggccttcc

SEQ ID NO: 1289384 - DNA, 25 bp, Homo sapien
gacagttctggtccatacacggctg

SEQ ID NO: 1289385 - DNA, 25 bp, Homo sapien
cacaggcatcacttggaggtgcggc

SEQ ID NO: 1289386 - DNA, 25 bp, Homo sapien
tctcataggtgcagccgcggtaggc

SEQ ID NO: 1289387 - DNA, 25 bp, Homo sapien
gcgcaccagcgtgggcgagcagtag

SEQ ID NO: 1289388 - DNA, 25 bp, Homo sapien
gcgaatggccttcttgcgcaccagc

SEQ ID NO: 1289389 - DNA, 25 bp, Homo sapien
gcggatcaccttgctgcgaatggcc

SEQ ID NO: 1289390 - DNA, 25 bp, Homo sapien
ttcccttgtccactgcccactcctt

SEQ ID NO: 1289391 - DNA, 25 bp, Homo sapien
cccttgtccactgcccactccttgg

SEQ ID NO: 1289392 - DNA, 25 bp, Homo sapien
gttcccttgtccactgcccactcct

SEQ ID NO: 1289393 - DNA, 25 bp, Homo sapien
agttcccttgtccactgcccactcc

SEQ ID NO: 1289394 - DNA, 25 bp, Homo sapien
ttctgagagagctgatcacggccga

SEQ ID NO: 1289395 - DNA, 25 bp, Homo sapien
agaccagggcatggacgttctgaga

SEQ ID NO: 1289396 - DNA, 25 bp, Homo sapien
agccgccgaaaggagaccagggcat

SEQ ID NO: 1289397 - DNA, 25 bp, Homo sapien
catggacgttctgagagagctgatc

SEQ ID NO: 1289398 - DNA, 25 bp, Homo sapien
tgctgcaagaggtaagccagctgga

SEQ ID NO: 1289399 - DNA, 25 bp, Homo sapien
agctggaaagagcggcacagcagca

SEQ ID NO: 1289400 - DNA, 25 bp, Homo sapien
tgcaagaggtaagccagctggaaag

SEQ ID NO: 1289401 - DNA, 25 bp, Homo sapien
gctggaaagagcggcacagcagcag

SEQ ID NO: 1289402 - DNA, 25 bp, Homo sapien
tagagtatgcgcctcagggcatgag

SEQ ID NO: 1289403 - DNA, 25 bp, Homo sapien
gggtttcgagccatgaaggcaaact

SEQ ID NO: 1289404 - DNA, 25 bp, Homo sapien
ggctccgtgggtttcgagccatgaa

SEQ ID NO: 1289405 - DNA, 25 bp, Homo sapien
caccaggtggagtagagtatgcgcc

SEQ ID NO: 1289406 - DNA, 25 bp, Homo sapien
agggcagctgcgagagcctcagtgg

SEQ ID NO: 1289407 - DNA, 25 bp, Homo sapien
tgggtgaagctgcccacggcccacc

SEQ ID NO: 1289408 - DNA, 25 bp, Homo sapien
cagtgggctggatgttcctgatgct

SEQ ID NO: 1289409 - DNA, 25 bp, Homo sapien
gccccagagggattctggaggccca

SEQ ID NO: 1289410 - DNA, 25 bp, Homo sapien
ggctgaatttcaggatgacggcccg

SEQ ID NO: 1289411 - DNA, 25 bp, Homo sapien
aatttcaggatgacggcccggcgtc

SEQ ID NO: 1289412 - DNA, 25 bp, Homo sapien
gatcttgagaccctgaaggctgaat

SEQ ID NO: 1289413 - DNA, 25 bp, Homo sapien
cccgctgtagatcttgagaccctga

SEQ ID NO: 1289414 - DNA, 25 bp, Homo sapien
caggtcatccacagggaaggagccc

SEQ ID NO: 1289415 - DNA, 25 bp, Homo sapien
tgggtgtccaggtcatccacaggga

SEQ ID NO: 1289416 - DNA, 25 bp, Homo sapien
accagccacacgctctcctgggtgt

SEQ ID NO: 1289417 - DNA, 25 bp, Homo sapien
tgcaccagccacacgctctcctggg

SEQ ID NO: 1289418 - DNA, 25 bp, Homo sapien
tgaagggagtaaggcggggagtcag

SEQ ID NO: 1289419 - DNA, 25 bp, Homo sapien
taaggcggggagtcaggcccgtggc

SEQ ID NO: 1289420 - DNA, 25 bp, Homo sapien
agtaaggcggggagtcaggcccgtg

SEQ ID NO: 1289421 - DNA, 25 bp, Homo sapien
ggcggggagtcaggcccgtggctcc

SEQ ID NO: 1289422 - DNA, 25 bp, Homo sapien
caaacttggtgatgcacctgggccg

SEQ ID NO: 1289423 - DNA, 25 bp, Homo sapien
cccgccttctgcatggcccccaggg

SEQ ID NO: 1289424 - DNA, 25 bp, Homo sapien
ggcaaacttggtgatgcacctgggc

SEQ ID NO: 1289425 - DNA, 25 bp, Homo sapien
ctgggcaaacttggtgatgcacctg

SEQ ID NO: 1289426 - DNA, 25 bp, Homo sapien
ctgagagggcgccatcaaagagaag

SEQ ID NO: 1289427 - DNA, 25 bp, Homo sapien
caaagagaagggcagtgacagcggc

SEQ ID NO: 1289428 - DNA, 25 bp, Homo sapien
gcagtgacagcggcagaaacagaga

SEQ ID NO: 1289429 - DNA, 25 bp, Homo sapien
aagggcagtgacagcggcagaaaca

SEQ ID NO: 1289430 - DNA, 25 bp, Homo sapien
gtccccggacccaggagcgtgctgg

SEQ ID NO: 1289431 - DNA, 25 bp, Homo sapien
ggcgctgcggggaacggccaggggc

SEQ ID NO: 1289432 - DNA, 25 bp, Homo sapien
agtccccggacccaggagcgtgctg

SEQ ID NO: 1289433 - DNA, 25 bp, Homo sapien
cctctcgagtccggtcccggccgct

SEQ ID NO: 1289434 - DNA, 25 bp, Homo sapien
cgcctctcgagtccggtcccggccg

SEQ ID NO: 1289435 - DNA, 25 bp, Homo sapien
ctcgagtccggtcccggccgctccg

SEQ ID NO: 1289436 - DNA, 25 bp, Homo sapien
ctctcgagtccggtcccggccgctc

SEQ ID NO: 1289437 - DNA, 25 bp, Homo sapien
accacccaatcagcggccgcgaggg

SEQ ID NO: 1289438 - DNA, 25 bp, Homo sapien
gctcggccgcaccacccaatcagcg

SEQ ID NO: 1289439 - DNA, 25 bp, Homo sapien
gccgcaccacccaatcagcggccgc

SEQ ID NO: 1289440 - DNA, 25 bp, Homo sapien
tcggccgcaccacccaatcagcggc

SEQ ID NO: 1289441 - DNA, 25 bp, Homo sapien
ggctgggggcgctgaatcccccgcg

SEQ ID NO: 1289442 - DNA, 25 bp, Homo sapien
cccgcgcctcactcacgggtccctc

SEQ ID NO: 1289443 - DNA, 25 bp, Homo sapien
ggctcgcccggagctcagaaggcac

SEQ ID NO: 1289444 - DNA, 25 bp, Homo sapien
tggctcctccgcgtcatccgagccg

SEQ ID NO: 1289445 - DNA, 25 bp, Homo sapien
gagcccttgtgactccgttgctcgc

SEQ ID NO: 1289446 - DNA, 25 bp, Homo sapien
cagagcccttgtgactccgttgctc

SEQ ID NO: 1289447 - DNA, 25 bp, Homo sapien
tgtgactccgttgctcgcctgtcat

SEQ ID NO: 1289448 - DNA, 25 bp, Homo sapien
ccttgtgactccgttgctcgcctgt

SEQ ID NO: 1289449 - DNA, 25 bp, Homo sapien
cagtgtgaaggatcgagcctggctc

SEQ ID NO: 1289450 - DNA, 25 bp, Homo sapien
tcgggcccggcccttgtgagtggag

SEQ ID NO: 1289451 - DNA, 25 bp, Homo sapien
gagtgtctccgttcccagtgtgaag

SEQ ID NO: 1289452 - DNA, 25 bp, Homo sapien
aggacaagtgacactggaccggagt

SEQ ID NO: 1289453 - DNA, 25 bp, Homo sapien
gttctcagccgggaactgacagatc

SEQ ID NO: 1289454 - DNA, 25 bp, Homo sapien
tgccgggacgttctcagccgggaac

SEQ ID NO: 1289455 - DNA, 25 bp, Homo sapien
cgttctcagccgggaactgacagat

SEQ ID NO: 1289456 - DNA, 25 bp, Homo sapien
gggacgttctcagccgggaactgac

SEQ ID NO: 1289457 - DNA, 25 bp, Homo sapien
ctttaggtggggaatcgggctagca

SEQ ID NO: 1289458 - DNA, 25 bp, Homo sapien
ggtggggaatcgggctagcagctcc

SEQ ID NO: 1289459 - DNA, 25 bp, Homo sapien
tggggaatcgggctagcagctccag

SEQ ID NO: 1289460 - DNA, 25 bp, Homo sapien
tttaggtggggaatcgggctagcag

SEQ ID NO: 1289461 - DNA, 25 bp, Homo sapien
ctcaaggctgtatatgcttcctttg

SEQ ID NO: 1289462 - DNA, 25 bp, Homo sapien
aactcaaggctgtatatgcttcctt

SEQ ID NO: 1289463 - DNA, 25 bp, Homo sapien
caaggctgtatatgcttcctttgtt

SEQ ID NO: 1289464 - DNA, 25 bp, Homo sapien
gaaactcaaggctgtatatgcttcc

SEQ ID NO: 1289465 - DNA, 25 bp, Homo sapien
aaaacccaaagtgtagccaagatag

SEQ ID NO: 1289466 - DNA, 25 bp, Homo sapien
gaatgaccaaatacctggagtgtcc

SEQ ID NO: 1289467 - DNA, 25 bp, Homo sapien
gagtgtcccacaactaggatatgag

SEQ ID NO: 1289468 - DNA, 25 bp, Homo sapien
ctctcacgagtatcagcatcctgca

SEQ ID NO: 1289469 - DNA, 25 bp, Homo sapien
tgaggcctcctttgacataccagtg

SEQ ID NO: 1289470 - DNA, 25 bp, Homo sapien
gctctgcagaagtgagtgaccatct

SEQ ID NO: 1289471 - DNA, 25 bp, Homo sapien
cataccagtggttgacaagacagaa

SEQ ID NO: 1289472 - DNA, 25 bp, Homo sapien
tagggccaggtatggcgactcacgc

SEQ ID NO: 1289473 - DNA, 25 bp, Homo sapien
aattataaatgtgttctgctccttt

SEQ ID NO: 1289474 - DNA, 25 bp, Homo sapien
aaattataaatgtgttctgctcctt

SEQ ID NO: 1289475 - DNA, 25 bp, Homo sapien
tctgaacatggaagtaaaaattata

SEQ ID NO: 1289476 - DNA, 25 bp, Homo sapien
gttcccctttctgaacatggaagta

SEQ ID NO: 1289477 - DNA, 25 bp, Homo sapien
caatgaattcatgatgggatcacac

SEQ ID NO: 1289478 - DNA, 25 bp, Homo sapien
cagccatactttaggctacagaagg

SEQ ID NO: 1289479 - DNA, 25 bp, Homo sapien
aacaggaaagattgccttacatgca

SEQ ID NO: 1289480 - DNA, 25 bp, Homo sapien
ttttgcctctggcagtactcaaggg

SEQ ID NO: 1289481 - DNA, 25 bp, Homo sapien
attagcaatgatgtaactctccaac

SEQ ID NO: 1289482 - DNA, 25 bp, Homo sapien
tgggccgtgagtggtagctcacatc

SEQ ID NO: 1289483 - DNA, 25 bp, Homo sapien
catatgatcaagaagatttgggccg

SEQ ID NO: 1289484 - DNA, 25 bp, Homo sapien
caagaagtgacaactcatgctccaa

SEQ ID NO: 1289485 - DNA, 25 bp, Homo sapien
caaaaaccaagtgggataggccagg

SEQ ID NO: 1289486 - DNA, 25 bp, Homo sapien
ttggtaacacaggtgacaccagaaa

SEQ ID NO: 1289487 - DNA, 25 bp, Homo sapien
aatcaatatatttctacacttcccc

SEQ ID NO: 1289488 - DNA, 25 bp, Homo sapien
tgcgcctgtaggacccaactcagga

SEQ ID NO: 1289489 - DNA, 25 bp, Homo sapien
cagtcagtgctatattgtgcctcca

SEQ ID NO: 1289490 - DNA, 25 bp, Homo sapien
ggaggctttacaactcagtcagtgc

SEQ ID NO: 1289491 - DNA, 25 bp, Homo sapien
gacctgactggcataccgttcttga

SEQ ID NO: 1289492 - DNA, 25 bp, Homo sapien
gctataactgaagtctccaggcagg

SEQ ID NO: 1289493 - DNA, 25 bp, Homo sapien
ccctccccacaatgttcatagggga

SEQ ID NO: 1289494 - DNA, 25 bp, Homo sapien
tccccacaatgttcataggggagga

SEQ ID NO: 1289495 - DNA, 25 bp, Homo sapien
cacaatgttcataggggaggaaaat

SEQ ID NO: 1289496 - DNA, 25 bp, Homo sapien
cccacaatgttcataggggaggaaa

SEQ ID NO: 1289497 - DNA, 25 bp, Homo sapien
gaatttcatcatgataccctttttt

SEQ ID NO: 1289498 - DNA, 25 bp, Homo sapien
taggtgcaggtttggaccctctctg

SEQ ID NO: 1289499 - DNA, 25 bp, Homo sapien
gaggagccaccactaggtttcttga

SEQ ID NO: 1289500 - DNA, 25 bp, Homo sapien
tcatggtggatttgcccttgcccgg

SEQ ID NO: 1289501 - DNA, 25 bp, Homo sapien
tcttgatgactgtggatgagggtct

SEQ ID NO: 1289502 - DNA, 25 bp, Homo sapien
ctttcttcggaaacagaactcctgg

SEQ ID NO: 1289503 - DNA, 25 bp, Homo sapien
ctctttcttcggaaacagaactcct

SEQ ID NO: 1289504 - DNA, 25 bp, Homo sapien
cttctcttaggtggcggctcttcat

SEQ ID NO: 1289505 - DNA, 25 bp, Homo sapien
taggtggcggctcttcatcctcaga

SEQ ID NO: 1289506 - DNA, 25 bp, Homo sapien
aggtgccactgaaccctttcccaga

SEQ ID NO: 1289507 - DNA, 25 bp, Homo sapien
ggtgccactgaaccctttcccagag

SEQ ID NO: 1289508 - DNA, 25 bp, Homo sapien
gaaggtgccactgaaccctttccca

SEQ ID NO: 1289509 - DNA, 25 bp, Homo sapien
tgccactgaaccctttcccagagat

SEQ ID NO: 1289510 - DNA, 25 bp, Homo sapien
ctgcagggtttttttcagcaaatgc

SEQ ID NO: 1289511 - DNA, 25 bp, Homo sapien
tgcagggtttttttcagcaaatgca

SEQ ID NO: 1289512 - DNA, 25 bp, Homo sapien
tgggtgattctctaggacatacttc

SEQ ID NO: 1289513 - DNA, 25 bp, Homo sapien
aatggcagacaagattgcatattcc

SEQ ID NO: 1289514 - DNA, 25 bp, Homo sapien
tattccatcaggcttccaccaagca

SEQ ID NO: 1289515 - DNA, 25 bp, Homo sapien
tggtagagcaggtcttcggctcatt

SEQ ID NO: 1289516 - DNA, 25 bp, Homo sapien
aggaggaagagaaaagcatcaagac

SEQ ID NO: 1289517 - DNA, 25 bp, Homo sapien
gaagagaaaagcatcaagacaacac

SEQ ID NO: 1289518 - DNA, 25 bp, Homo sapien
aggaagagaaaagcatcaagacaac

SEQ ID NO: 1289519 - DNA, 25 bp, Homo sapien
ttttccaaggaggaagagaaaagca

SEQ ID NO: 1289520 - DNA, 25 bp, Homo sapien
ggtcaagacaagactcctctgcacc

SEQ ID NO: 1289521 - DNA, 25 bp, Homo sapien
caagactcctctgcaccaggtgggt

SEQ ID NO: 1289522 - DNA, 25 bp, Homo sapien
ctctgcaccaggtgggtcggagttc

SEQ ID NO: 1289523 - DNA, 25 bp, Homo sapien
ctcccaaagcaggtcaagacaagac

SEQ ID NO: 1289524 - DNA, 25 bp, Homo sapien
aactagctatgaatggcggcatgcc

SEQ ID NO: 1289525 - DNA, 25 bp, Homo sapien
tgtagcctacctacatgaaagggtg

SEQ ID NO: 1289526 - DNA, 25 bp, Homo sapien
tatttagggtatcagggagcacggt

SEQ ID NO: 1289527 - DNA, 25 bp, Homo sapien
taaaactaagatatgccagacgcag

SEQ ID NO: 1289528 - DNA, 25 bp, Homo sapien
caaagaaactactacaactggtgag

SEQ ID NO: 1289529 - DNA, 25 bp, Homo sapien
tgcagataacagatcctgtatgtag

SEQ ID NO: 1289530 - DNA, 25 bp, Homo sapien
agcaatggacaaatcgattgtattt

SEQ ID NO: 1289531 - DNA, 25 bp, Homo sapien
tgagttcagcaagggcgaaggatac

SEQ ID NO: 1289532 - DNA, 25 bp, Homo sapien
tatggaactgtacaggacccggcat

SEQ ID NO: 1289533 - DNA, 25 bp, Homo sapien
tatggagaaactcgagccctggtca

SEQ ID NO: 1289534 - DNA, 25 bp, Homo sapien
tgacagtgagtctccccaaattgat

SEQ ID NO: 1289535 - DNA, 25 bp, Homo sapien
tctgtgtcatggattggaaaactca

SEQ ID NO: 1289536 - DNA, 25 bp, Homo sapien
ccagctattagggaggctaagatgg

SEQ ID NO: 1289537 - DNA, 25 bp, Homo sapien
gaggattgcttgagccagggaggtg

SEQ ID NO: 1289538 - DNA, 25 bp, Homo sapien
attaatcaggcatggtggtggtgca

SEQ ID NO: 1289539 - DNA, 25 bp, Homo sapien
cgcctataatcccagctattaggga

SEQ ID NO: 1289540 - DNA, 25 bp, Homo sapien
gacttgagcccttataaacactgcc

SEQ ID NO: 1289541 - DNA, 25 bp, Homo sapien
ggaagacggattataggctcacacc

SEQ ID NO: 1289542 - DNA, 25 bp, Homo sapien
catgctgcaacgtggataaaattca

SEQ ID NO: 1289543 - DNA, 25 bp, Homo sapien
gagtgactgcaaatggctacaaggg

SEQ ID NO: 1289544 - DNA, 25 bp, Homo sapien
cgaagcacctttgccagttatctgt

SEQ ID NO: 1289545 - DNA, 25 bp, Homo sapien
gtccccgaagcacctttgccagtta

SEQ ID NO: 1289546 - DNA, 25 bp, Homo sapien
ctgcagagcgttcttcaacagctga

SEQ ID NO: 1289547 - DNA, 25 bp, Homo sapien
gcacctttgccagttatctgttcta

SEQ ID NO: 1289548 - DNA, 25 bp, Homo sapien
gcaacccttccgctgcttcagcctc

SEQ ID NO: 1289549 - DNA, 25 bp, Homo sapien
aggaaggtctccaactcttgacctt

SEQ ID NO: 1289550 - DNA, 25 bp, Homo sapien
tgagccaccacacccagccctacag

SEQ ID NO: 1289551 - DNA, 25 bp, Homo sapien
cgtgagccaccacacccagccctac

SEQ ID NO: 1289552 - DNA, 25 bp, Homo sapien
gacgtgagccaccacacccagccct

SEQ ID NO: 1289553 - DNA, 25 bp, Homo sapien
tcacaaaggcgagtaaaggccagtg

SEQ ID NO: 1289554 - DNA, 25 bp, Homo sapien
tgggaggacatcctccaattttact

SEQ ID NO: 1289555 - DNA, 25 bp, Homo sapien
taagcttaggataatactgagacac

SEQ ID NO: 1289556 - DNA, 25 bp, Homo sapien
tgagactgtaggaagcttctttagg

SEQ ID NO: 1289557 - DNA, 25 bp, Homo sapien
tgatttctgaaccacaacaaaactt

SEQ ID NO: 1289558 - DNA, 25 bp, Homo sapien
gatttctgaaccacaacaaaacttc

SEQ ID NO: 1289559 - DNA, 25 bp, Homo sapien
ccagagaaggatacttatggatgat

SEQ ID NO: 1289560 - DNA, 25 bp, Homo sapien
tgtattttcgaatagcaaccactga

SEQ ID NO: 1289561 - DNA, 25 bp, Homo sapien
tcttttcagtgcttgtttaaggaga

SEQ ID NO: 1289562 - DNA, 25 bp, Homo sapien
tgatgactcctctatttaattctct

SEQ ID NO: 1289563 - DNA, 25 bp, Homo sapien
gcctaagagaccatactgaacacga

SEQ ID NO: 1289564 - DNA, 25 bp, Homo sapien
tatgtataatgaagaacctctttcc

SEQ ID NO: 1289565 - DNA, 25 bp, Homo sapien
gacttcagttcataatgactacaga

SEQ ID NO: 1289566 - DNA, 25 bp, Homo sapien
gatagatgacaaaaacggtagggaa

SEQ ID NO: 1289567 - DNA, 25 bp, Homo sapien
ggcacgagcttaaggaatgagcatg

SEQ ID NO: 1289568 - DNA, 25 bp, Homo sapien
cgagcttaaggaatgagcatgccag

SEQ ID NO: 1289569 - DNA, 25 bp, Homo sapien
tttaaggcacgagcttaaggaatga

SEQ ID NO: 1289570 - DNA, 25 bp, Homo sapien
gcttaaggaatgagcatgccaggac

SEQ ID NO: 1289571 - DNA, 25 bp, Homo sapien
tttctgggccctggctagctggctg

SEQ ID NO: 1289572 - DNA, 25 bp, Homo sapien
gattgcatccatcttgggacgtggg

SEQ ID NO: 1289573 - DNA, 25 bp, Homo sapien
tgtttctgggccctggctagctggc

SEQ ID NO: 1289574 - DNA, 25 bp, Homo sapien
cttaatggcctcagttaagattgca

SEQ ID NO: 1289575 - DNA, 25 bp, Homo sapien
ctccttttctttagactgatctttc

SEQ ID NO: 1289576 - DNA, 25 bp, Homo sapien
ttcttctccttttctttagactgat

SEQ ID NO: 1289577 - DNA, 25 bp, Homo sapien
ccttttctttagactgatctttctc

SEQ ID NO: 1289578 - DNA, 25 bp, Homo sapien
cttctccttttctttagactgatct

SEQ ID NO: 1289579 - DNA, 25 bp, Homo sapien
tacctggttaacatgatagctgtgg

SEQ ID NO: 1289580 - DNA, 25 bp, Homo sapien
tagcactggtataagggctcagtac

SEQ ID NO: 1289581 - DNA, 25 bp, Homo sapien
tgtggtaatatcacagcgcagcacg

SEQ ID NO: 1289582 - DNA, 25 bp, Homo sapien
catttaacaacagacgataggctgg

SEQ ID NO: 1289583 - DNA, 25 bp, Homo sapien
ggtaggtgtcctacacaggtatacc

SEQ ID NO: 1289584 - DNA, 25 bp, Homo sapien
cagactatcccataaagcctaggta

SEQ ID NO: 1289585 - DNA, 25 bp, Homo sapien
gacaggtccatgtgtgttgctgccc

SEQ ID NO: 1289586 - DNA, 25 bp, Homo sapien
tttaaaagttgcacacagtagtcct

SEQ ID NO: 1289587 - DNA, 25 bp, Homo sapien
tgaccaattatgaaaagagtggaat

SEQ ID NO: 1289588 - DNA, 25 bp, Homo sapien
gaccaattatgaaaagagtggaatg

SEQ ID NO: 1289589 - DNA, 25 bp, Homo sapien
agtggaatgaatactatcagctctc

SEQ ID NO: 1289590 - DNA, 25 bp, Homo sapien
aaagagtggaatgaatactatcagc

SEQ ID NO: 1289591 - DNA, 25 bp, Homo sapien
catattctaacaggtcaaacaacta

SEQ ID NO: 1289592 - DNA, 25 bp, Homo sapien
tttaggtcacactaccaatggcttg

SEQ ID NO: 1289593 - DNA, 25 bp, Homo sapien
caaaccattgtgttctgctaactac

SEQ ID NO: 1289594 - DNA, 25 bp, Homo sapien
gcaaatacctagcataaaccaatgt

SEQ ID NO: 1289595 - DNA, 25 bp, Homo sapien
tcactcgaagtagcaggtggagttt

SEQ ID NO: 1289596 - DNA, 25 bp, Homo sapien
gattcctctgaacttatgtctggtt

SEQ ID NO: 1289597 - DNA, 25 bp, Homo sapien
tggagacagattcctctgaacttat

SEQ ID NO: 1289598 - DNA, 25 bp, Homo sapien
ctcactcgaagtagcaggtggagtt

SEQ ID NO: 1289599 - DNA, 25 bp, Homo sapien
tactaagcgagtgatttccatcctc

SEQ ID NO: 1289600 - DNA, 25 bp, Homo sapien
aatcacataagtacaattctaacac

SEQ ID NO: 1289601 - DNA, 25 bp, Homo sapien
tcccatatgcttaggatgacaaagt

SEQ ID NO: 1289602 - DNA, 25 bp, Homo sapien
ccgcgcccagctataaagagaattt

SEQ ID NO: 1289603 - DNA, 25 bp, Homo sapien
accatgcccagataatgtttataat

SEQ ID NO: 1289604 - DNA, 25 bp, Homo sapien
caccatgcccagataatgtttataa

SEQ ID NO: 1289605 - DNA, 25 bp, Homo sapien
ccatgcccagataatgtttataatt

SEQ ID NO: 1289606 - DNA, 25 bp, Homo sapien
ccaccatgcccagataatgtttata

SEQ ID NO: 1289607 - DNA, 25 bp, Homo sapien
tagaattcacagttcgacgaatcgg

SEQ ID NO: 1289608 - DNA, 25 bp, Homo sapien
agaattcacagttcgacgaatcggc

SEQ ID NO: 1289609 - DNA, 25 bp, Homo sapien
aattcacagttcgacgaatcggcat

SEQ ID NO: 1289610 - DNA, 25 bp, Homo sapien
gaattcacagttcgacgaatcggca

SEQ ID NO: 1289611 - DNA, 25 bp, Homo sapien
acatgtaccaagaaggacccagcag

SEQ ID NO: 1289612 - DNA, 25 bp, Homo sapien
ggaacatgtaccaagaaggacccag

SEQ ID NO: 1289613 - DNA, 25 bp, Homo sapien
gatgaaaagaatctgattttgtttc

SEQ ID NO: 1289614 - DNA, 25 bp, Homo sapien
agcttgaatttcaaatggaaacaca

SEQ ID NO: 1289615 - DNA, 25 bp, Homo sapien
ggatggacgagttcaccttgagacg

SEQ ID NO: 1289616 - DNA, 25 bp, Homo sapien
gagtgccttaggatggacgagttca

SEQ ID NO: 1289617 - DNA, 25 bp, Homo sapien
caccttgagacgtatcagtcgccat

SEQ ID NO: 1289618 - DNA, 25 bp, Homo sapien
tactataagtgggagtgccttagga

SEQ ID NO: 1289619 - DNA, 25 bp, Homo sapien
tgaagcctctgctgttaaccacaag

SEQ ID NO: 1289620 - DNA, 25 bp, Homo sapien
tacaggttacactctgaagcctctg

SEQ ID NO: 1289621 - DNA, 25 bp, Homo sapien
tttctaggcccgagtacaggttaca

SEQ ID NO: 1289622 - DNA, 25 bp, Homo sapien
gcctctgctgttaaccacaaggatt

SEQ ID NO: 1289623 - DNA, 25 bp, Homo sapien
aatatagactacataaagcagcaac

SEQ ID NO: 1289624 - DNA, 25 bp, Homo sapien
cctggtgtgaagattaacagaaaca

SEQ ID NO: 1289625 - DNA, 25 bp, Homo sapien
tgacagatgatttggttactcagaa

SEQ ID NO: 1289626 - DNA, 25 bp, Homo sapien
gcagcaactaagacgaatgcataag

SEQ ID NO: 1289627 - DNA, 25 bp, Homo sapien
tttctgacgacctaccgaggcaccg

SEQ ID NO: 1289628 - DNA, 25 bp, Homo sapien
gcgactgtaactttctgacgaccta

SEQ ID NO: 1289629 - DNA, 25 bp, Homo sapien
catctcttacaaacgctcagatggg

SEQ ID NO: 1289630 - DNA, 25 bp, Homo sapien
caaacgctcagatgggcgactgtaa

SEQ ID NO: 1289631 - DNA, 25 bp, Homo sapien
agcgagactcaaggccgccgtcgcg

SEQ ID NO: 1289632 - DNA, 25 bp, Homo sapien
acaaagcagcgaggcgaggtagcta

SEQ ID NO: 1289633 - DNA, 25 bp, Homo sapien
taaggtggcgagtaaccagttctac

SEQ ID NO: 1289634 - DNA, 25 bp, Homo sapien
gccgtcgcggagcagcaaagcgaca

SEQ ID NO: 1289635 - DNA, 25 bp, Homo sapien
gcagcggcggaacgcgagcctcggc

SEQ ID NO: 1289636 - DNA, 25 bp, Homo sapien
gggctcggcgcggtgacagttcggg

SEQ ID NO: 1289637 - DNA, 25 bp, Homo sapien
acagttcggggctcacgctcggcag

SEQ ID NO: 1289638 - DNA, 25 bp, Homo sapien
cgcggacaccgacggatgaggctgg

SEQ ID NO: 1289639 - DNA, 25 bp, Homo sapien
cactgggagctccgtaatggcggcg

SEQ ID NO: 1289640 - DNA, 25 bp, Homo sapien
ctgggagctccgtaatggcggcggc

SEQ ID NO: 1289641 - DNA, 25 bp, Homo sapien
tcgaaccggctccgaaaaccgctga

SEQ ID NO: 1289642 - DNA, 25 bp, Homo sapien
cggctccgaaaaccgctgagggagt

SEQ ID NO: 1289643 - DNA, 25 bp, Homo sapien
cgcgggcggacgccggaccgcggcg

SEQ ID NO: 1289644 - DNA, 25 bp, Homo sapien
gcgcgggcggacgccggaccgcggc

SEQ ID NO: 1289645 - DNA, 25 bp, Homo sapien
ctggcgcccgcgtcccgcacggcct

SEQ ID NO: 1289646 - DNA, 25 bp, Homo sapien
gctcccgccgccgctagtcgcctcc

SEQ ID NO: 1289647 - DNA, 25 bp, Homo sapien
cgcacggcctctcggcgccgctccc

SEQ ID NO: 1289648 - DNA, 25 bp, Homo sapien
ctctgcgttcggccggtcctggcgc

SEQ ID NO: 1289649 - DNA, 25 bp, Homo sapien
aaatgctataccttaaaacaaacat

SEQ ID NO: 1289650 - DNA, 25 bp, Homo sapien
agaaatagtactgagtcaatttctt

SEQ ID NO: 1289651 - DNA, 25 bp, Homo sapien
cttctgtttcaatgttatgtatgtt

SEQ ID NO: 1289652 - DNA, 25 bp, Homo sapien
gagaattggccttgctgcactgtga

SEQ ID NO: 1289653 - DNA, 25 bp, Homo sapien
agtgctcccgccctaaggtttgaag

SEQ ID NO: 1289654 - DNA, 25 bp, Homo sapien
tgcactgtgattggcgaagacgtga

SEQ ID NO: 1289655 - DNA, 25 bp, Homo sapien
tacactggcatttgcagtccttaaa

SEQ ID NO: 1289656 - DNA, 25 bp, Homo sapien
ttcccgcagccacgtgaagaatgcc

SEQ ID NO: 1289657 - DNA, 25 bp, Homo sapien
aagaatgccgtgacagatttcagag

SEQ ID NO: 1289658 - DNA, 25 bp, Homo sapien
tagaaggcatcctcggagatcacct

SEQ ID NO: 1289659 - DNA, 25 bp, Homo sapien
cacctcctcgtcatatagacaatca

SEQ ID NO: 1289660 - DNA, 25 bp, Homo sapien
accgtgctcagccatttctgtattt

SEQ ID NO: 1289661 - DNA, 25 bp, Homo sapien
atgctcttggatcactgtaacctcc

SEQ ID NO: 1289662 - DNA, 25 bp, Homo sapien
ccaccgtgctcagccatttctgtat

SEQ ID NO: 1289663 - DNA, 25 bp, Homo sapien
ttagtagggatagggtttcaccatg

SEQ ID NO: 1289664 - DNA, 25 bp, Homo sapien
gatcggcactctctgcttgataaca

SEQ ID NO: 1289665 - DNA, 25 bp, Homo sapien
tagtgcataaagtgcttgcagttcc

SEQ ID NO: 1289666 - DNA, 25 bp, Homo sapien
tccactctgaaggtagaagagtcgg

SEQ ID NO: 1289667 - DNA, 25 bp, Homo sapien
tctaggtacttgagtaagatcggca

SEQ ID NO: 1289668 - DNA, 25 bp, Homo sapien
tccctcaggagtagcgtacccaatt

SEQ ID NO: 1289669 - DNA, 25 bp, Homo sapien
cagtgactgtggttttatgacaaac

SEQ ID NO: 1289670 - DNA, 25 bp, Homo sapien
ggacccatatggctctacaagagaa

SEQ ID NO: 1289671 - DNA, 25 bp, Homo sapien
caattttctgagtacaaaggaccca

SEQ ID NO: 1289672 - DNA, 25 bp, Homo sapien
tcatctggatttcgtctagattagc

SEQ ID NO: 1289673 - DNA, 25 bp, Homo sapien
ggaatgtaggtgaactcatctggat

SEQ ID NO: 1289674 - DNA, 25 bp, Homo sapien
cagcagtcattaaagctctaaggaa

SEQ ID NO: 1289675 - DNA, 25 bp, Homo sapien
ttacaaacagcagtcattaaagctc

SEQ ID NO: 1289676 - DNA, 25 bp, Homo sapien
gagtttctcgagtcgcttatacagc

SEQ ID NO: 1289677 - DNA, 25 bp, Homo sapien
tgtcagactctatgaagtccaactt

SEQ ID NO: 1289678 - DNA, 25 bp, Homo sapien
cagctcttcggcagacagttctttc

SEQ ID NO: 1289679 - DNA, 25 bp, Homo sapien
tctacccagtcaaagatctgttcat

SEQ ID NO: 1289680 - DNA, 25 bp, Homo sapien
tggtaaaaagtccttccagctgagg

SEQ ID NO: 1289681 - DNA, 25 bp, Homo sapien
cataaggctcccactttcttatggc

SEQ ID NO: 1289682 - DNA, 25 bp, Homo sapien
cttctggtaaaaagtccttccagct

SEQ ID NO: 1289683 - DNA, 25 bp, Homo sapien
ccataaggctcccactttcttatgg

SEQ ID NO: 1289684 - DNA, 25 bp, Homo sapien
taagaatgtgagtttttagttatta

SEQ ID NO: 1289685 - DNA, 25 bp, Homo sapien
tctctgtagctcaggttgaaatgca

SEQ ID NO: 1289686 - DNA, 25 bp, Homo sapien
caaagttaataagaatgtgagtttt

SEQ ID NO: 1289687 - DNA, 25 bp, Homo sapien
tctctctctgtagctcaggttgaaa

SEQ ID NO: 1289688 - DNA, 25 bp, Homo sapien
aataatactgttgagtctgacactc

SEQ ID NO: 1289689 - DNA, 25 bp, Homo sapien
ttgcaccctgagacctaagctattc

SEQ ID NO: 1289690 - DNA, 25 bp, Homo sapien
taacccaagatcaagatcactgccc

SEQ ID NO: 1289691 - DNA, 25 bp, Homo sapien
cagataacccaagatcaagatcact

SEQ ID NO: 1289692 - DNA, 25 bp, Homo sapien
tagtaggtgcaatatttcagatagc

SEQ ID NO: 1289693 - DNA, 25 bp, Homo sapien
gtttgcatagtaggtgcaatatttc

SEQ ID NO: 1289694 - DNA, 25 bp, Homo sapien
ggtgcaatatttcagatagcaagac

SEQ ID NO: 1289695 - DNA, 25 bp, Homo sapien
aagaccccagctcttccaacaggaa

SEQ ID NO: 1289696 - DNA, 25 bp, Homo sapien
gttcagcaaggtacaaccaaatatg

SEQ ID NO: 1289697 - DNA, 25 bp, Homo sapien
atggagattccaccttcttttaaca

SEQ ID NO: 1289698 - DNA, 25 bp, Homo sapien
acatgggggtcaccagttcagcaag

SEQ ID NO: 1289699 - DNA, 25 bp, Homo sapien
accaaatatggggaatatcaatggc

SEQ ID NO: 1289700 - DNA, 25 bp, Homo sapien
cccgtgttagtgttagcaatagaat

SEQ ID NO: 1289701 - DNA, 25 bp, Homo sapien
ccagaaagatctcccgtgttagtgt

SEQ ID NO: 1289702 - DNA, 25 bp, Homo sapien
cctgggcaatgtgggatggaggtag

SEQ ID NO: 1289703 - DNA, 25 bp, Homo sapien
ttcctgtagtaccttagaaggcagg

SEQ ID NO: 1289704 - DNA, 25 bp, Homo sapien
agtagctgtaattattggcacgtgc

SEQ ID NO: 1289705 - DNA, 25 bp, Homo sapien
gcctacatagggtcttttaccaatg

SEQ ID NO: 1289706 - DNA, 25 bp, Homo sapien
caatgtagaattgccgtaagcagta

SEQ ID NO: 1289707 - DNA, 25 bp, Homo sapien
caagatcagtatggcaatcctccta

SEQ ID NO: 1289708 - DNA, 25 bp, Homo sapien
ctgatagagtaattggcccatgtga

SEQ ID NO: 1289709 - DNA, 25 bp, Homo sapien
aagtcctgtttgctgagtttttctg

SEQ ID NO: 1289710 - DNA, 25 bp, Homo sapien
aaaaacatgtagtaggccctgggca

SEQ ID NO: 1289711 - DNA, 25 bp, Homo sapien
tttctgactgtaccagctgatagag

SEQ ID NO: 1289712 - DNA, 25 bp, Homo sapien
caacagcaaagaaaggtttactcca

SEQ ID NO: 1289713 - DNA, 25 bp, Homo sapien
tgttccaacagcaaagaaaggttta

SEQ ID NO: 1289714 - DNA, 25 bp, Homo sapien
ctgttccaacagcaaagaaaggttt

SEQ ID NO: 1289715 - DNA, 25 bp, Homo sapien
tccaacagcaaagaaaggtttactc

SEQ ID NO: 1289716 - DNA, 25 bp, Homo sapien
ttagaagattgaactatagataacc

SEQ ID NO: 1289717 - DNA, 25 bp, Homo sapien
gaaggctttagaagattgaactata

SEQ ID NO: 1289718 - DNA, 25 bp, Homo sapien
gcttgaaggctttagaagattgaac

SEQ ID NO: 1289719 - DNA, 25 bp, Homo sapien
tcagaggcttgaaggctttagaaga

SEQ ID NO: 1289720 - DNA, 25 bp, Homo sapien
tcattaatgtgtagaaattcatcaa

SEQ ID NO: 1289721 - DNA, 25 bp, Homo sapien
tctgataatgcagccttgtcatgag

SEQ ID NO: 1289722 - DNA, 25 bp, Homo sapien
tcaatgatagatttcgacttcctct

SEQ ID NO: 1289723 - DNA, 25 bp, Homo sapien
tagatttcgacttcctctccagttc

SEQ ID NO: 1289724 - DNA, 25 bp, Homo sapien
gacattgctgaaatttctggttttg

SEQ ID NO: 1289725 - DNA, 25 bp, Homo sapien
tgacattgctgaaatttctggtttt

SEQ ID NO: 1289726 - DNA, 25 bp, Homo sapien
ctgacattgctgaaatttctggttt

SEQ ID NO: 1289727 - DNA, 25 bp, Homo sapien
gattatggttgacaatattatgtgc

SEQ ID NO: 1289728 - DNA, 25 bp, Homo sapien
taatagctacaagacatttaataga

SEQ ID NO: 1289729 - DNA, 25 bp, Homo sapien
tgttttagaatagattcgcactaag

SEQ ID NO: 1289730 - DNA, 25 bp, Homo sapien
tagattcgcactaagtaactttata

SEQ ID NO: 1289731 - DNA, 25 bp, Homo sapien
cctcctgtgagctgcttcacggtct

SEQ ID NO: 1289732 - DNA, 25 bp, Homo sapien
tgccacccctcatgaaagtatttgg

SEQ ID NO: 1289733 - DNA, 25 bp, Homo sapien
tgagactgattgtctagcaggtctt

SEQ ID NO: 1289734 - DNA, 25 bp, Homo sapien
cttgttttatttcgctcagcctcag

SEQ ID NO: 1289735 - DNA, 25 bp, Homo sapien
ctgttgcagatggaaggggcttgtc

SEQ ID NO: 1289736 - DNA, 25 bp, Homo sapien
agatggaaggggcttgtcattcttc

SEQ ID NO: 1289737 - DNA, 25 bp, Homo sapien
cttctccctgcccatacttccacga

SEQ ID NO: 1289738 - DNA, 25 bp, Homo sapien
aaggggcttgtcattcttctccctg

SEQ ID NO: 1289739 - DNA, 25 bp, Homo sapien
ctacaggcgtggatggcgtggaccc

SEQ ID NO: 1289740 - DNA, 25 bp, Homo sapien
ctggaagcacttgaccgtaaggcat

SEQ ID NO: 1289741 - DNA, 25 bp, Homo sapien
tttaaactggaagcacttgaccgta

SEQ ID NO: 1289742 - DNA, 25 bp, Homo sapien
tggatggcgtggaccctgagggtgc

SEQ ID NO: 1289743 - DNA, 25 bp, Homo sapien
tagctgtgctttaggtaccagctga

SEQ ID NO: 1289744 - DNA, 25 bp, Homo sapien
tgtgctttaggtaccagctgaattt

SEQ ID NO: 1289745 - DNA, 25 bp, Homo sapien
tgctttaggtaccagctgaattttt

SEQ ID NO: 1289746 - DNA, 25 bp, Homo sapien
gctgtgctttaggtaccagctgaat

SEQ ID NO: 1289747 - DNA, 25 bp, Homo sapien
cacccaccttcgtccactctctgga

SEQ ID NO: 1289748 - DNA, 25 bp, Homo sapien
ccgactgttcttggccccttgtaca

SEQ ID NO: 1289749 - DNA, 25 bp, Homo sapien
ttggccccttgtacagtgttccacc

SEQ ID NO: 1289750 - DNA, 25 bp, Homo sapien
tgaggggtccagtacccgactgttc

SEQ ID NO: 1289751 - DNA, 25 bp, Homo sapien
tctgctcttcgagatacccaattgc

SEQ ID NO: 1289752 - DNA, 25 bp, Homo sapien
ttagcctctttgtgaatctgttcga

SEQ ID NO: 1289753 - DNA, 25 bp, Homo sapien
tagttttaggcccttgatctgctct

SEQ ID NO: 1289754 - DNA, 25 bp, Homo sapien
ctctttggtcatgagttgctggacc

SEQ ID NO: 1289755 - DNA, 25 bp, Homo sapien
gcatgaaccgaatcctagatgaggt

SEQ ID NO: 1289756 - DNA, 25 bp, Homo sapien
tcttgaagcatgaaccgaatcctag

SEQ ID NO: 1289757 - DNA, 25 bp, Homo sapien
tttctccatctgattaaagtactgg

SEQ ID NO: 1289758 - DNA, 25 bp, Homo sapien
gattaaagtactggtccatacgtgg

SEQ ID NO: 1289759 - DNA, 25 bp, Homo sapien
ctattctgttgacagtctaagttct

SEQ ID NO: 1289760 - DNA, 25 bp, Homo sapien
caaggagcctttgcgaaggtttctg

SEQ ID NO: 1289761 - DNA, 25 bp, Homo sapien
tttgcgaaggtttctgagcttttgg

SEQ ID NO: 1289762 - DNA, 25 bp, Homo sapien
taagttcttttgcaactgacaagga

SEQ ID NO: 1289763 - DNA, 25 bp, Homo sapien
tccaataaacttgatgttgccaatg

SEQ ID NO: 1289764 - DNA, 25 bp, Homo sapien
tgagtttaaagagttctccaataaa

SEQ ID NO: 1289765 - DNA, 25 bp, Homo sapien
cgacacaggcactccagggattctt

SEQ ID NO: 1289766 - DNA, 25 bp, Homo sapien
tgatggcttcagtcagcattttgag

SEQ ID NO: 1289767 - DNA, 25 bp, Homo sapien
tagcatcttgatgatgaaagttgta

SEQ ID NO: 1289768 - DNA, 25 bp, Homo sapien
taaggaggaataatagcatcttgat

SEQ ID NO: 1289769 - DNA, 25 bp, Homo sapien
tgtaaggaggaataatagcatcttg

SEQ ID NO: 1289770 - DNA, 25 bp, Homo sapien
aggaggaataatagcatcttgatga

SEQ ID NO: 1289771 - DNA, 25 bp, Homo sapien
gctcaaagtgtacaagcactgtctt

SEQ ID NO: 1289772 - DNA, 25 bp, Homo sapien
tgctcaaagtgtacaagcactgtct

SEQ ID NO: 1289773 - DNA, 25 bp, Homo sapien
agtgctcaaagtgtacaagcactgt

SEQ ID NO: 1289774 - DNA, 25 bp, Homo sapien
ctcaaagtgtacaagcactgtcttt

SEQ ID NO: 1289775 - DNA, 25 bp, Homo sapien
cagcttccggaaattcactgtgtta

SEQ ID NO: 1289776 - DNA, 25 bp, Homo sapien
tccttctggcaacggttcagtagca

SEQ ID NO: 1289777 - DNA, 25 bp, Homo sapien
acggttcagtagcagcttccggaaa

SEQ ID NO: 1289778 - DNA, 25 bp, Homo sapien
tcaaactccttctggcaacggttca

SEQ ID NO: 1289779 - DNA, 25 bp, Homo sapien
tccatgatcagcactaaaatgtgtg

SEQ ID NO: 1289780 - DNA, 25 bp, Homo sapien
tcttcctggctcgtaaatggctgac

SEQ ID NO: 1289781 - DNA, 25 bp, Homo sapien
taagagtcagggcttcaaactatga

SEQ ID NO: 1289782 - DNA, 25 bp, Homo sapien
tctgctggacactgggtggtcaaga

SEQ ID NO: 1289783 - DNA, 25 bp, Homo sapien
gatcatgtgacctcagaaggttgag

SEQ ID NO: 1289784 - DNA, 25 bp, Homo sapien
taaaagtcaggtgcaatggctaacg

SEQ ID NO: 1289785 - DNA, 25 bp, Homo sapien
cgtctatggtgccaacactttggaa

SEQ ID NO: 1289786 - DNA, 25 bp, Homo sapien
ttaaagattaactggacatggtggt

SEQ ID NO: 1289787 - DNA, 25 bp, Homo sapien
gccacagagaaactgggttcatcaa

SEQ ID NO: 1289788 - DNA, 25 bp, Homo sapien
cgacacatgtttgcgtaagccacag

SEQ ID NO: 1289789 - DNA, 25 bp, Homo sapien
gacacttgcttcatcagttgattga

SEQ ID NO: 1289790 - DNA, 25 bp, Homo sapien
gccgctcctctgtgtcaacagtaag

SEQ ID NO: 1289791 - DNA, 25 bp, Homo sapien
ctcagcaatgtgatgaaggatgtcc

SEQ ID NO: 1289792 - DNA, 25 bp, Homo sapien
aaccgccaagtacagtttgacagca

SEQ ID NO: 1289793 - DNA, 25 bp, Homo sapien
taggaaccctgtggcaaatgtttgg

SEQ ID NO: 1289794 - DNA, 25 bp, Homo sapien
acagcatggctagttgttggattgc

SEQ ID NO: 1289795 - DNA, 25 bp, Homo sapien
actgtgatgatctttctgggttctc

SEQ ID NO: 1289796 - DNA, 25 bp, Homo sapien
gctgtctcgtttttggcttggcttc

SEQ ID NO: 1289797 - DNA, 25 bp, Homo sapien
caggttgagatcttcgtgacccaac

SEQ ID NO: 1289798 - DNA, 25 bp, Homo sapien
gggatcatcggcttggctgtctcgt

SEQ ID NO: 1289799 - DNA, 25 bp, Homo sapien
gagtatctcacatacacaggtctct

SEQ ID NO: 1289800 - DNA, 25 bp, Homo sapien
tttagtatttcctgaaaatagataa

SEQ ID NO: 1289801 - DNA, 25 bp, Homo sapien
tgaggtaactcaagatttagaaaaa

SEQ ID NO: 1289802 - DNA, 25 bp, Homo sapien
aagactttctggtgaggtaactcaa

SEQ ID NO: 1289803 - DNA, 25 bp, Homo sapien
catcaccagtggagggcaagttggg

SEQ ID NO: 1289804 - DNA, 25 bp, Homo sapien
cctagaggcaggctcttcatgggtg

SEQ ID NO: 1289805 - DNA, 25 bp, Homo sapien
tcatgggtgggtgtgacatcaccag

SEQ ID NO: 1289806 - DNA, 25 bp, Homo sapien
gctttgctctgttccagaattggca

SEQ ID NO: 1289807 - DNA, 25 bp, Homo sapien
gaatcaacgaataaaagctgctgtc

SEQ ID NO: 1289808 - DNA, 25 bp, Homo sapien
gaccaaattaatgcagactagcttc

SEQ ID NO: 1289809 - DNA, 25 bp, Homo sapien
gccttgaccccacaaagtgctagca

SEQ ID NO: 1289810 - DNA, 25 bp, Homo sapien
gagtctgtgccagtgtctaactaag

SEQ ID NO: 1289811 - DNA, 25 bp, Homo sapien
caaaggctggtgtaaagtctggtcc

SEQ ID NO: 1289812 - DNA, 25 bp, Homo sapien
tgtaaagtctggtcctcgaggcaaa

SEQ ID NO: 1289813 - DNA, 25 bp, Homo sapien
cagagttcgcattggcaatttgggt

SEQ ID NO: 1289814 - DNA, 25 bp, Homo sapien
ggcaaaattcgaggatccagagttc

SEQ ID NO: 1289815 - DNA, 25 bp, Homo sapien
tgaaaagttacatcagctgaaacgg

SEQ ID NO: 1289816 - DNA, 25 bp, Homo sapien
ggaacccgcagaagtccaatctcat

SEQ ID NO: 1289817 - DNA, 25 bp, Homo sapien
gctgaaacggtaagcaccagctttg

SEQ ID NO: 1289818 - DNA, 25 bp, Homo sapien
tacatgttccagagcattccctgcc

SEQ ID NO: 1289819 - DNA, 25 bp, Homo sapien
gaaagacctccgtatcaatttagcc

SEQ ID NO: 1289820 - DNA, 25 bp, Homo sapien
gaggaaggatgcctatttgcacaag

SEQ ID NO: 1289821 - DNA, 25 bp, Homo sapien
gtgtgcaccataaagatcagatgca

SEQ ID NO: 1289822 - DNA, 25 bp, Homo sapien
tgacctgtcttcaatgccaatagaa

SEQ ID NO: 1289823 - DNA, 25 bp, Homo sapien
ctggtttttgtatacaggcaggcat

SEQ ID NO: 1289824 - DNA, 25 bp, Homo sapien
ccagcagaaactccctgtcatactg

SEQ ID NO: 1289825 - DNA, 25 bp, Homo sapien
tgtcatactgcttcttaccttcagt

SEQ ID NO: 1289826 - DNA, 25 bp, Homo sapien
tgtcaagaaccacatcactgatagg

SEQ ID NO: 1289827 - DNA, 25 bp, Homo sapien
tagtctagatttggcagactaagga

SEQ ID NO: 1289828 - DNA, 25 bp, Homo sapien
attgatctagattacctttgaggtc

SEQ ID NO: 1289829 - DNA, 25 bp, Homo sapien
cacctcctgcaaaacttagtctaga

SEQ ID NO: 1289830 - DNA, 25 bp, Homo sapien
cttacttacatgtaatagactgaca

SEQ ID NO: 1289831 - DNA, 25 bp, Homo sapien
gaaacactctcagcaccattacgta

SEQ ID NO: 1289832 - DNA, 25 bp, Homo sapien
caccagaactatctgtggagcctga

SEQ ID NO: 1289833 - DNA, 25 bp, Homo sapien
tggagcctgaattagcatctattcc

SEQ ID NO: 1289834 - DNA, 25 bp, Homo sapien
accattacgtactggctcagcttct

SEQ ID NO: 1289835 - DNA, 25 bp, Homo sapien
tgggatgcagttaacagatgacaga

SEQ ID NO: 1289836 - DNA, 25 bp, Homo sapien
atgtaacagcaatgaaggcacaggg

SEQ ID NO: 1289837 - DNA, 25 bp, Homo sapien
ttttaagacagacaaccatatgaag

SEQ ID NO: 1289838 - DNA, 25 bp, Homo sapien
tctgaagcaaaatctcgcatggctt

SEQ ID NO: 1289839 - DNA, 25 bp, Homo sapien
cagtggttcgggtccgatcttttgg

SEQ ID NO: 1289840 - DNA, 25 bp, Homo sapien
tccatgtctttggtacagttatagc

SEQ ID NO: 1289841 - DNA, 25 bp, Homo sapien
tctgcctctaacatctcttcagtgg

SEQ ID NO: 1289842 - DNA, 25 bp, Homo sapien
ctttggtacagttatagctatttga

SEQ ID NO: 1289843 - DNA, 25 bp, Homo sapien
cctgtggttaattgcaaacacttcc

SEQ ID NO: 1289844 - DNA, 25 bp, Homo sapien
tataaatatagatagctagactctg

SEQ ID NO: 1289845 - DNA, 25 bp, Homo sapien
ttcctctaccccttatataaatata

SEQ ID NO: 1289846 - DNA, 25 bp, Homo sapien
gccaccatgaggtcaagattggagc

SEQ ID NO: 1289847 - DNA, 25 bp, Homo sapien
tgagaatcacgaagcaatactattt

SEQ ID NO: 1289848 - DNA, 25 bp, Homo sapien
tcctttctgccaagacaaaacccaa

SEQ ID NO: 1289849 - DNA, 25 bp, Homo sapien
ggagacacagcgtctacaaagccta

SEQ ID NO: 1289850 - DNA, 25 bp, Homo sapien
tttactctagctatgaattttgaga

SEQ ID NO: 1289851 - DNA, 25 bp, Homo sapien
ggagcctggatcttgtacccttgaa

SEQ ID NO: 1289852 - DNA, 25 bp, Homo sapien
cagctaactgaattgagcaggttcc

SEQ ID NO: 1289853 - DNA, 25 bp, Homo sapien
tagtttcaaggctaatctgggagcc

SEQ ID NO: 1289854 - DNA, 25 bp, Homo sapien
ttaacactcatcaaacaggtgtggg

SEQ ID NO: 1289855 - DNA, 25 bp, Homo sapien
ggtggtacattcaataccaagctga

SEQ ID NO: 1289856 - DNA, 25 bp, Homo sapien
tgagaacaccctctcaaactgaggt

SEQ ID NO: 1289857 - DNA, 25 bp, Homo sapien
tcatatctgtgacatcgagcaatgc

SEQ ID NO: 1289858 - DNA, 25 bp, Homo sapien
tttatacaacaatagcatgtgtcaa

SEQ ID NO: 1289859 - DNA, 25 bp, Homo sapien
tcagggcaaagatcatgatatccaa

SEQ ID NO: 1289860 - DNA, 25 bp, Homo sapien
tattagcagagttcaaagggaacat

SEQ ID NO: 1289861 - DNA, 25 bp, Homo sapien
caccatctcatgtcccagattttat

SEQ ID NO: 1289862 - DNA, 25 bp, Homo sapien
catgcaaacggcctatcctaaggga

SEQ ID NO: 1289863 - DNA, 25 bp, Homo sapien
gaagactattaagatgtacaaggaa

SEQ ID NO: 1289864 - DNA, 25 bp, Homo sapien
cttgaagttcatttactgttggatt

SEQ ID NO: 1289865 - DNA, 25 bp, Homo sapien
gactattaagatgtacaaggaaatt

SEQ ID NO: 1289866 - DNA, 25 bp, Homo sapien
gagttgcaggggttcttgaagttca

SEQ ID NO: 1289867 - DNA, 25 bp, Homo sapien
gaattagggactatagaccatcctg

SEQ ID NO: 1289868 - DNA, 25 bp, Homo sapien
catgtcaaggatcaactgctggagg

SEQ ID NO: 1289869 - DNA, 25 bp, Homo sapien
gaacgttaagcttacctgcaagtga

SEQ ID NO: 1289870 - DNA, 25 bp, Homo sapien
cgcattacttaatctgacaggcaca

SEQ ID NO: 1289871 - DNA, 25 bp, Homo sapien
tcttttgcaggttgtactaaaacac

SEQ ID NO: 1289872 - DNA, 25 bp, Homo sapien
tgcatttttagacaatggagtaact

SEQ ID NO: 1289873 - DNA, 25 bp, Homo sapien
ctcttttgcaggttgtactaaaaca

SEQ ID NO: 1289874 - DNA, 25 bp, Homo sapien
catttttagacaatggagtaactct

SEQ ID NO: 1289875 - DNA, 25 bp, Homo sapien
ttaagttttgagaatccaaaatctc

SEQ ID NO: 1289876 - DNA, 25 bp, Homo sapien
ttgaatttaagttttgagaatccaa

SEQ ID NO: 1289877 - DNA, 25 bp, Homo sapien
gcaagttcttatgctctcgtcctcc

SEQ ID NO: 1289878 - DNA, 25 bp, Homo sapien
cactaaggcaagttcttatgctctc

SEQ ID NO: 1289879 - DNA, 25 bp, Homo sapien
ggagaactaacagtagtggcagcag

SEQ ID NO: 1289880 - DNA, 25 bp, Homo sapien
cactcggagaactaacagtagtggc

SEQ ID NO: 1289881 - DNA, 25 bp, Homo sapien
ctgtgatggcagcactcggagaact

SEQ ID NO: 1289882 - DNA, 25 bp, Homo sapien
ggcagcactcggagaactaacagta

SEQ ID NO: 1289883 - DNA, 25 bp, Homo sapien
attcaagagtcaatggcaatacttc

SEQ ID NO: 1289884 - DNA, 25 bp, Homo sapien
ttctgggggattttcgagaatctcc

SEQ ID NO: 1289885 - DNA, 25 bp, Homo sapien
gaatctccaattcaagagtcaatgg

SEQ ID NO: 1289886 - DNA, 25 bp, Homo sapien
gggattttcgagaatctccaattca

SEQ ID NO: 1289887 - DNA, 25 bp, Homo sapien
ggctgataatttttcgctaactcca

SEQ ID NO: 1289888 - DNA, 25 bp, Homo sapien
ggtgctacactacagggtttcttgc

SEQ ID NO: 1289889 - DNA, 25 bp, Homo sapien
ccacaatgctctccgtggctgataa

SEQ ID NO: 1289890 - DNA, 25 bp, Homo sapien
cagtggaatatcattaggtgctaca

SEQ ID NO: 1289891 - DNA, 25 bp, Homo sapien
gggctgcaattgtacttcgagcaac

SEQ ID NO: 1289892 - DNA, 25 bp, Homo sapien
atctgtcatctatagcagtggtgaa

SEQ ID NO: 1289893 - DNA, 25 bp, Homo sapien
ttcgagcaacagaagaaacagtggt

SEQ ID NO: 1289894 - DNA, 25 bp, Homo sapien
gaggaagctctgctatggatactat

SEQ ID NO: 1289895 - DNA, 25 bp, Homo sapien
gaataattcttggatcagagactac

SEQ ID NO: 1289896 - DNA, 25 bp, Homo sapien
ttcaatgtcttaccctaaattacag

SEQ ID NO: 1289897 - DNA, 25 bp, Homo sapien
tctggtatgccaaaaacattgtctc

SEQ ID NO: 1289898 - DNA, 25 bp, Homo sapien
cagagactacatattgccttgggcc

SEQ ID NO: 1289899 - DNA, 25 bp, Homo sapien
aaactgaggctaaaccattcttggt

SEQ ID NO: 1289900 - DNA, 25 bp, Homo sapien
tgtataaaaactcaagataaagcat

SEQ ID NO: 1289901 - DNA, 25 bp, Homo sapien
taatttacccttcaattctcaatgg

SEQ ID NO: 1289902 - DNA, 25 bp, Homo sapien
ttgagctacgaatgcatcactgcac

SEQ ID NO: 1289903 - DNA, 25 bp, Homo sapien
ggtgggtgtctaaataatccttgga

SEQ ID NO: 1289904 - DNA, 25 bp, Homo sapien
tatatgctaggatttctccctccac

SEQ ID NO: 1289905 - DNA, 25 bp, Homo sapien
gcaagatacctagggacatgctgaa

SEQ ID NO: 1289906 - DNA, 25 bp, Homo sapien
aatccttggatgctgtactcttact

SEQ ID NO: 1289907 - DNA, 25 bp, Homo sapien
ggctgtgctcggggacctggctggg

SEQ ID NO: 1289908 - DNA, 25 bp, Homo sapien
ccacagtcccataaaccacagggct

SEQ ID NO: 1289909 - DNA, 25 bp, Homo sapien
cagcaagatgagcgctctccacagt

SEQ ID NO: 1289910 - DNA, 25 bp, Homo sapien
tggcagcaagatgagcgctctccac

SEQ ID NO: 1289911 - DNA, 25 bp, Homo sapien
gtacaaaaaagggtgataatgagcg

SEQ ID NO: 1289912 - DNA, 25 bp, Homo sapien
caaaaaagggtgataatgagcgtgc

SEQ ID NO: 1289913 - DNA, 25 bp, Homo sapien
gataatgagcgtgcgaacataaaaa

SEQ ID NO: 1289914 - DNA, 25 bp, Homo sapien
aaagggtgataatgagcgtgcgaac

SEQ ID NO: 1289915 - DNA, 25 bp, Homo sapien
gaaagtacttctcaggtctcacagc

SEQ ID NO: 1289916 - DNA, 25 bp, Homo sapien
caagtagggaagacagtagagcaca

SEQ ID NO: 1289917 - DNA, 25 bp, Homo sapien
taagcttaggcccacatactggagg

SEQ ID NO: 1289918 - DNA, 25 bp, Homo sapien
tgctatcagagtagagctccctgca

SEQ ID NO: 1289919 - DNA, 25 bp, Homo sapien
cactcacttgggctgttgtgtacag

SEQ ID NO: 1289920 - DNA, 25 bp, Homo sapien
gacttgctgatgtaatgactgtgga

SEQ ID NO: 1289921 - DNA, 25 bp, Homo sapien
aagataattctgaccactgcatgga

SEQ ID NO: 1289922 - DNA, 25 bp, Homo sapien
taggcatcaaccacatagatcagtt

SEQ ID NO: 1289923 - DNA, 25 bp, Homo sapien
tgtctgtactactaaaatgaagtca

SEQ ID NO: 1289924 - DNA, 25 bp, Homo sapien
cagccagctgtttgtgattttgata

SEQ ID NO: 1289925 - DNA, 25 bp, Homo sapien
caatagtctatcattctgaaatgct

SEQ ID NO: 1289926 - DNA, 25 bp, Homo sapien
ttaagtctttctcaaatccacagat

SEQ ID NO: 1289927 - DNA, 25 bp, Homo sapien
cctggtttggatcccgaattcttat

SEQ ID NO: 1289928 - DNA, 25 bp, Homo sapien
cttcctatgggtggagtaggatttc

SEQ ID NO: 1289929 - DNA, 25 bp, Homo sapien
ccagacataatctcctctgttatgt

SEQ ID NO: 1289930 - DNA, 25 bp, Homo sapien
tctgttatgtctttacctccctggt

SEQ ID NO: 1289931 - DNA, 25 bp, Homo sapien
tctgttgcgtaaggaattgcaagcc

SEQ ID NO: 1289932 - DNA, 25 bp, Homo sapien
tgctataaatcaccccacctatctt

SEQ ID NO: 1289933 - DNA, 25 bp, Homo sapien
tcgtgtgaatgtgggagtctctctt

SEQ ID NO: 1289934 - DNA, 25 bp, Homo sapien
aaaagatcacccattttgtctgttc

SEQ ID NO: 1289935 - DNA, 25 bp, Homo sapien
ctgttgctgcgtaggcactatgata

SEQ ID NO: 1289936 - DNA, 25 bp, Homo sapien
cactatgataggtgctgactgatac

SEQ ID NO: 1289937 - DNA, 25 bp, Homo sapien
tgatacaccggctgacttgggtaaa

SEQ ID NO: 1289938 - DNA, 25 bp, Homo sapien
gcggctgttgctgcgtaggcactat

SEQ ID NO: 1289939 - DNA, 25 bp, Homo sapien
tgtaagccactctctaaaaagtaac

SEQ ID NO: 1289940 - DNA, 25 bp, Homo sapien
gatgtcagaactctgaaacatgatt

SEQ ID NO: 1289941 - DNA, 25 bp, Homo sapien
taaggtatattcatgccactggcaa

SEQ ID NO: 1289942 - DNA, 25 bp, Homo sapien
gattgtgaaaggaggataaggtata

SEQ ID NO: 1289943 - DNA, 25 bp, Homo sapien
cataaggagggccactatgacggta

SEQ ID NO: 1289944 - DNA, 25 bp, Homo sapien
ccccggtggttgaactggatattgt

SEQ ID NO: 1289945 - DNA, 25 bp, Homo sapien
ggcccaacataaggagggccactat

SEQ ID NO: 1289946 - DNA, 25 bp, Homo sapien
cctggccccggtggttgaactggat

SEQ ID NO: 1289947 - DNA, 25 bp, Homo sapien
tggtatacagtactgaggcccctgg

SEQ ID NO: 1289948 - DNA, 25 bp, Homo sapien
gggcactgggtacggcatgggcaga

SEQ ID NO: 1289949 - DNA, 25 bp, Homo sapien
tacggcatgggcagatggttaacca

SEQ ID NO: 1289950 - DNA, 25 bp, Homo sapien
ctgtggtatacagtactgaggcccc

SEQ ID NO: 1289951 - DNA, 25 bp, Homo sapien
tgcaccaggacgaatggaaggactg

SEQ ID NO: 1289952 - DNA, 25 bp, Homo sapien
gatgtgctgattagcctggtacact

SEQ ID NO: 1289953 - DNA, 25 bp, Homo sapien
tgggtgtctgtgcaccaggacgaat

SEQ ID NO: 1289954 - DNA, 25 bp, Homo sapien
ctgattagcctggtacactgcagtg

SEQ ID NO: 1289955 - DNA, 25 bp, Homo sapien
ggtagctctaggaggctgtatttga

SEQ ID NO: 1289956 - DNA, 25 bp, Homo sapien
gatggtagctctaggaggctgtatt

SEQ ID NO: 1289957 - DNA, 25 bp, Homo sapien
ctctaggaggctgtatttgaggcct

SEQ ID NO: 1289958 - DNA, 25 bp, Homo sapien
ctgttcgggatggtagctctaggag

SEQ ID NO: 1289959 - DNA, 25 bp, Homo sapien
caaacactgaaaggatgtagcagga

SEQ ID NO: 1289960 - DNA, 25 bp, Homo sapien
gatctttatccaactatactaacgg

SEQ ID NO: 1289961 - DNA, 25 bp, Homo sapien
cacatattacctctcatgaaatgga

SEQ ID NO: 1289962 - DNA, 25 bp, Homo sapien
accgtgcccagtcaacatatatgtt

SEQ ID NO: 1289963 - DNA, 25 bp, Homo sapien
tctgtcagatcataagggagagtct

SEQ ID NO: 1289964 - DNA, 25 bp, Homo sapien
tatatagctagtagagctacagcag

SEQ ID NO: 1289965 - DNA, 25 bp, Homo sapien
caggaacaggaggtgttctgtcaga

SEQ ID NO: 1289966 - DNA, 25 bp, Homo sapien
tattacacagtgctaccctagaggt

SEQ ID NO: 1289967 - DNA, 25 bp, Homo sapien
atggggaggtcgaggccccgctgca

SEQ ID NO: 1289968 - DNA, 25 bp, Homo sapien
tggggaggtcgaggccccgctgcaa

SEQ ID NO: 1289969 - DNA, 25 bp, Homo sapien
tgatggggaggtcgaggccccgctg

SEQ ID NO: 1289970 - DNA, 25 bp, Homo sapien
atgatggggaggtcgaggccccgct

SEQ ID NO: 1289971 - DNA, 25 bp, Homo sapien
tggtgaggactgttgatataaagga

SEQ ID NO: 1289972 - DNA, 25 bp, Homo sapien
ttctgtgaacttggatccagtgtta

SEQ ID NO: 1289973 - DNA, 25 bp, Homo sapien
cccacttactcaccccttctgggca

SEQ ID NO: 1289974 - DNA, 25 bp, Homo sapien
agtgttaatgccacccacccactta

SEQ ID NO: 1289975 - DNA, 25 bp, Homo sapien
aaacaagaagcaagagtagtctggg

SEQ ID NO: 1289976 - DNA, 25 bp, Homo sapien
gacaatttcctccttaatattcaat

SEQ ID NO: 1289977 - DNA, 25 bp, Homo sapien
ggcaaaaattgtatagaggatagta

SEQ ID NO: 1289978 - DNA, 25 bp, Homo sapien
tgggtaatggtcactagcagagcag

SEQ ID NO: 1289979 - DNA, 25 bp, Homo sapien
gacctgtaaacgggagtctgttcca

SEQ ID NO: 1289980 - DNA, 25 bp, Homo sapien
cagcctcttccagccaaggacctgt

SEQ ID NO: 1289981 - DNA, 25 bp, Homo sapien
tcttccagccaaggacctgtaaacg

SEQ ID NO: 1289982 - DNA, 25 bp, Homo sapien
agcctcttccagccaaggacctgta

SEQ ID NO: 1289983 - DNA, 25 bp, Homo sapien
gaaccagggcctatctaaattgatc

SEQ ID NO: 1289984 - DNA, 25 bp, Homo sapien
taagtcaagtgtacacatccccaaa

SEQ ID NO: 1289985 - DNA, 25 bp, Homo sapien
gcaaacaggcaactaggaccaaagt

SEQ ID NO: 1289986 - DNA, 25 bp, Homo sapien
aattctttgcaataggagcttacca

SEQ ID NO: 1289987 - DNA, 25 bp, Homo sapien
gaacgggtttgaggttgtgaattca

SEQ ID NO: 1289988 - DNA, 25 bp, Homo sapien
aacgggtttgaggttgtgaattcat

SEQ ID NO: 1289989 - DNA, 25 bp, Homo sapien
tgagggtataccagcgtggttggac

SEQ ID NO: 1289990 - DNA, 25 bp, Homo sapien
tgaggggtttgagggtataccagcg

SEQ ID NO: 1289991 - DNA, 25 bp, Homo sapien
gtttgagggtataccagcgtggttg

SEQ ID NO: 1289992 - DNA, 25 bp, Homo sapien
tgtctgaggggtttgagggtatacc

SEQ ID NO: 1289993 - DNA, 25 bp, Homo sapien
tggcaagaacaatataatattttga

SEQ ID NO: 1289994 - DNA, 25 bp, Homo sapien
tttgaaaaaatatggcatggcaatt

SEQ ID NO: 1289995 - DNA, 25 bp, Homo sapien
aaaaatggcaagaacaatataatat

SEQ ID NO: 1289996 - DNA, 25 bp, Homo sapien
aaatggcaagaacaatataatattt

SEQ ID NO: 1289997 - DNA, 25 bp, Homo sapien
cttgcctcttcaaggtccatgatgc

SEQ ID NO: 1289998 - DNA, 25 bp, Homo sapien
tgatgccagctaaggttgtcagtac

SEQ ID NO: 1289999 - DNA, 25 bp, Homo sapien
atgatgccagctaaggttgtcagta

SEQ ID NO: 1290000 - DNA, 25 bp, Homo sapien
gcctcttcaaggtccatgatgccag

SEQ ID NO: 1290001 - DNA, 25 bp, Homo sapien
aaacaaaactgacaggatgagagca

SEQ ID NO: 1290002 - DNA, 25 bp, Homo sapien
gagttgcacatcatatctcaggctg

SEQ ID NO: 1290003 - DNA, 25 bp, Homo sapien
tgccaatgtaaattgccttatcatg

SEQ ID NO: 1290004 - DNA, 25 bp, Homo sapien
tgtaaattgccttatcatgcctcat

SEQ ID NO: 1290005 - DNA, 25 bp, Homo sapien
gaggctatccggcaatctttcaacg

SEQ ID NO: 1290006 - DNA, 25 bp, Homo sapien
catttaacgtttagctgggatcacc

SEQ ID NO: 1290007 - DNA, 25 bp, Homo sapien
cactatcccacgtctatgaatgagg

SEQ ID NO: 1290008 - DNA, 25 bp, Homo sapien
tctgtagctgacactaaggttcaac

SEQ ID NO: 1290009 - DNA, 25 bp, Homo sapien
tataccactagcaatatggaatgct

SEQ ID NO: 1290010 - DNA, 25 bp, Homo sapien
tcaacgatcgttcagagcatttttc

SEQ ID NO: 1290011 - DNA, 25 bp, Homo sapien
gaatgcttaacggtggcacatgaca

SEQ ID NO: 1290012 - DNA, 25 bp, Homo sapien
tatcattgctgtaagcagtgcaact

SEQ ID NO: 1290013 - DNA, 25 bp, Homo sapien
tagtcagccatcatggagctcgcat

SEQ ID NO: 1290014 - DNA, 25 bp, Homo sapien
gccatcatggagctcgcatacagtc

SEQ ID NO: 1290015 - DNA, 25 bp, Homo sapien
atggagctcgcatacagtcccagct

SEQ ID NO: 1290016 - DNA, 25 bp, Homo sapien
aaattagtcagccatcatggagctc

SEQ ID NO: 1290017 - DNA, 25 bp, Homo sapien
tcctagttaatcagcgccagtttgg

SEQ ID NO: 1290018 - DNA, 25 bp, Homo sapien
cagcaggcagataacacctattacc

SEQ ID NO: 1290019 - DNA, 25 bp, Homo sapien
aagcctggaagtctagacaatgatg

SEQ ID NO: 1290020 - DNA, 25 bp, Homo sapien
tgtgaatatagctccaaaagcctgg

SEQ ID NO: 1290021 - DNA, 25 bp, Homo sapien
cacatacacaggtgtggtgaagcac

SEQ ID NO: 1290022 - DNA, 25 bp, Homo sapien
tccccagggagatttactttgcaat

SEQ ID NO: 1290023 - DNA, 25 bp, Homo sapien
ttgcaatctgccaccaaaaggtact

SEQ ID NO: 1290024 - DNA, 25 bp, Homo sapien
tccagagaggacgaagctagaaaga

SEQ ID NO: 1290025 - DNA, 25 bp, Homo sapien
cgttgccgcaagatttggatgcccc

SEQ ID NO: 1290026 - DNA, 25 bp, Homo sapien
gagtccaggggacgatgcatgtccc

SEQ ID NO: 1290027 - DNA, 25 bp, Homo sapien
gggttcccggctgtcttgccacttg

SEQ ID NO: 1290028 - DNA, 25 bp, Homo sapien
gccccttgtttatttcatgtgctga

SEQ ID NO: 1290029 - DNA, 25 bp, Homo sapien
taaattgctcatcagcccattacgg

SEQ ID NO: 1290030 - DNA, 25 bp, Homo sapien
ctaatgcagacttaacactgatggt

SEQ ID NO: 1290031 - DNA, 25 bp, Homo sapien
actttactcagacccctagtggaag

SEQ ID NO: 1290032 - DNA, 25 bp, Homo sapien
tagtggaagtgtctaccaatcaatc

SEQ ID NO: 1290033 - DNA, 25 bp, Homo sapien
acgtgtattttaatcctcttccaca

SEQ ID NO: 1290034 - DNA, 25 bp, Homo sapien
aatactgctgcaagaaagaaaagct

SEQ ID NO: 1290035 - DNA, 25 bp, Homo sapien
gactcagtggaaacttcaggtagct

SEQ ID NO: 1290036 - DNA, 25 bp, Homo sapien
tatactgttactctgcatagaagaa

SEQ ID NO: 1290037 - DNA, 25 bp, Homo sapien
tcggcgctgtaaggcaccatgatca

SEQ ID NO: 1290038 - DNA, 25 bp, Homo sapien
gcaagaggcccaacagttcggcgct

SEQ ID NO: 1290039 - DNA, 25 bp, Homo sapien
tcatcttggccacaactaatggtgg

SEQ ID NO: 1290040 - DNA, 25 bp, Homo sapien
tggtggcttagaacacggtagtaac

SEQ ID NO: 1290041 - DNA, 25 bp, Homo sapien
aagcatagtagtgcgatcatagccc

SEQ ID NO: 1290042 - DNA, 25 bp, Homo sapien
tttttaataggacaagatttcacca

SEQ ID NO: 1290043 - DNA, 25 bp, Homo sapien
cccaagtagttaaaactacatgtgt

SEQ ID NO: 1290044 - DNA, 25 bp, Homo sapien
actacactgggctaatttgttttat

SEQ ID NO: 1290045 - DNA, 25 bp, Homo sapien
ctttcactgctaatagaatcgtgta

SEQ ID NO: 1290046 - DNA, 25 bp, Homo sapien
tatattatgattccaaggtcctttc

SEQ ID NO: 1290047 - DNA, 25 bp, Homo sapien
acagcaaaaccttgatcagttagga

SEQ ID NO: 1290048 - DNA, 25 bp, Homo sapien
agaatcgtgtagcactatattatga

SEQ ID NO: 1290049 - DNA, 25 bp, Homo sapien
tacaggccaattgctgtccttgtgg

SEQ ID NO: 1290050 - DNA, 25 bp, Homo sapien
tcagaagatgtggagtgaagacttt

SEQ ID NO: 1290051 - DNA, 25 bp, Homo sapien
ggaacacttgacaactcctcagaag

SEQ ID NO: 1290052 - DNA, 25 bp, Homo sapien
agtgatggcttttaacagacactca

SEQ ID NO: 1290053 - DNA, 25 bp, Homo sapien
gcgagtctggagattactgatatac

SEQ ID NO: 1290054 - DNA, 25 bp, Homo sapien
atagtcagagctttccaccaagaca

SEQ ID NO: 1290055 - DNA, 25 bp, Homo sapien
ccaagacaaggttgtatgcgagtct

SEQ ID NO: 1290056 - DNA, 25 bp, Homo sapien
ggagattactgatatacattcagtg

SEQ ID NO: 1290057 - DNA, 25 bp, Homo sapien
aacgtggtccatatcagttgtttta

SEQ ID NO: 1290058 - DNA, 25 bp, Homo sapien
ttttagttaaacgtggtccatatca

SEQ ID NO: 1290059 - DNA, 25 bp, Homo sapien
tcttatcacctagggtggattgcaa

SEQ ID NO: 1290060 - DNA, 25 bp, Homo sapien
acaaaataacatacccttgtatctt

SEQ ID NO: 1290061 - DNA, 25 bp, Homo sapien
gaacttgtagattcaaaacagacct

SEQ ID NO: 1290062 - DNA, 25 bp, Homo sapien
gtgtctgggacactgtagtcactca

SEQ ID NO: 1290063 - DNA, 25 bp, Homo sapien
taactttgggcaggatacgtcacct

SEQ ID NO: 1290064 - DNA, 25 bp, Homo sapien
tcaaattacatgtctccaagtccca

SEQ ID NO: 1290065 - DNA, 25 bp, Homo sapien
gactgtattgtagggaagtctatga

SEQ ID NO: 1290066 - DNA, 25 bp, Homo sapien
atggacccctctaagtctccctggg

SEQ ID NO: 1290067 - DNA, 25 bp, Homo sapien
ccaagggctcatgacagcctagttt

SEQ ID NO: 1290068 - DNA, 25 bp, Homo sapien
agtctatgatggtattgtcacatgc

SEQ ID NO: 1290069 - DNA, 25 bp, Homo sapien
gtgttgctccattaccatatcctga

SEQ ID NO: 1290070 - DNA, 25 bp, Homo sapien
tatcctgaacacctagaccactgca

SEQ ID NO: 1290071 - DNA, 25 bp, Homo sapien
cagagagactttccctgagagaatt

SEQ ID NO: 1290072 - DNA, 25 bp, Homo sapien
tcagtttcagcttaattgccacctt

SEQ ID NO: 1290073 - DNA, 25 bp, Homo sapien
ttaaccacgcctctggatcttcact

SEQ ID NO: 1290074 - DNA, 25 bp, Homo sapien
ccaaccaacctacatactctttatt

SEQ ID NO: 1290075 - DNA, 25 bp, Homo sapien
tgtcatagtgaactgtctactggcc

SEQ ID NO: 1290076 - DNA, 25 bp, Homo sapien
tctactggccattccattaaccacg

SEQ ID NO: 1290077 - DNA, 25 bp, Homo sapien
ggacatctgggaaactctgaaatta

SEQ ID NO: 1290078 - DNA, 25 bp, Homo sapien
tgtatatgtaactcttgaaagagag

SEQ ID NO: 1290079 - DNA, 25 bp, Homo sapien
tggacatctgggaaactctgaaatt

SEQ ID NO: 1290080 - DNA, 25 bp, Homo sapien
tgatggacatctgggaaactctgaa

SEQ ID NO: 1290081 - DNA, 25 bp, Homo sapien
tgaagattcgatcctcaagaggttg

SEQ ID NO: 1290082 - DNA, 25 bp, Homo sapien
gcgggagtgaagattcgatcctcaa

SEQ ID NO: 1290083 - DNA, 25 bp, Homo sapien
agacagcgggagtgaagattcgatc

SEQ ID NO: 1290084 - DNA, 25 bp, Homo sapien
ctgagacagcgggagtgaagattcg

SEQ ID NO: 1290085 - DNA, 25 bp, Homo sapien
ttttattgaggatcaatattcatca

SEQ ID NO: 1290086 - DNA, 25 bp, Homo sapien
attttattgaggatcaatattcatc

SEQ ID NO: 1290087 - DNA, 25 bp, Homo sapien
tttattgaggatcaatattcatcag

SEQ ID NO: 1290088 - DNA, 25 bp, Homo sapien
tatcttgagtagttaggcagacagc

SEQ ID NO: 1290089 - DNA, 25 bp, Homo sapien
tttaagcagaagctacatcactgag

SEQ ID NO: 1290090 - DNA, 25 bp, Homo sapien
gcagttgtccaaataaaaggtagtg

SEQ ID NO: 1290091 - DNA, 25 bp, Homo sapien
aattcttttaacaggcgacaatggg

SEQ ID NO: 1290092 - DNA, 25 bp, Homo sapien
cacgtgggctactgtactctataca

SEQ ID NO: 1290093 - DNA, 25 bp, Homo sapien
ccagagaatcaagttttacaccacg

SEQ ID NO: 1290094 - DNA, 25 bp, Homo sapien
tacctatcagccctacagaaaacca

SEQ ID NO: 1290095 - DNA, 25 bp, Homo sapien
cactgtctggcagataggaaagctc

SEQ ID NO: 1290096 - DNA, 25 bp, Homo sapien
gggaaaatgatgtgatcgctccaaa

SEQ ID NO: 1290097 - DNA, 25 bp, Homo sapien
ggaaaatgatgtgatcgctccaaac

SEQ ID NO: 1290098 - DNA, 25 bp, Homo sapien
tgggaaaatgatgtgatcgctccaa

SEQ ID NO: 1290099 - DNA, 25 bp, Homo sapien
gaaaatgatgtgatcgctccaaact

SEQ ID NO: 1290100 - DNA, 25 bp, Homo sapien
ttcctcatcaatactctgtgggatt

SEQ ID NO: 1290101 - DNA, 25 bp, Homo sapien
tcctcatcaatactctgtgggattg

SEQ ID NO: 1290102 - DNA, 25 bp, Homo sapien
tttcctcatcaatactctgtgggat

SEQ ID NO: 1290103 - DNA, 25 bp, Homo sapien
taaggcttatgatgggcttagcaca

SEQ ID NO: 1290104 - DNA, 25 bp, Homo sapien
ttcctttccgtggactatccaggtg

SEQ ID NO: 1290105 - DNA, 25 bp, Homo sapien
tccaggtgacacagcctttaagaca

SEQ ID NO: 1290106 - DNA, 25 bp, Homo sapien
taattaagagcaccaacggatctcc

SEQ ID NO: 1290107 - DNA, 25 bp, Homo sapien
aataaatgtgagtggtaaaaatcag

SEQ ID NO: 1290108 - DNA, 25 bp, Homo sapien
tccagtatcgtaagtccaaatttaa

SEQ ID NO: 1290109 - DNA, 25 bp, Homo sapien
ttcagcacaatctaatcactactta

SEQ ID NO: 1290110 - DNA, 25 bp, Homo sapien
aatgccatttctcaaagatagccaa

SEQ ID NO: 1290111 - DNA, 25 bp, Homo sapien
tgatactttccagcagaaaccatgt

SEQ ID NO: 1290112 - DNA, 25 bp, Homo sapien
tcaagggtactcactaggtttatct

SEQ ID NO: 1290113 - DNA, 25 bp, Homo sapien
ccataaataagacacagattcggat

SEQ ID NO: 1290114 - DNA, 25 bp, Homo sapien
taacatcaagggtaatcaagggtac

SEQ ID NO: 1290115 - DNA, 25 bp, Homo sapien
cagaccctgttctatgcacattaat

SEQ ID NO: 1290116 - DNA, 25 bp, Homo sapien
ggaggaatgttctattacttattcc

SEQ ID NO: 1290117 - DNA, 25 bp, Homo sapien
acagaccctgttctatgcacattaa

SEQ ID NO: 1290118 - DNA, 25 bp, Homo sapien
tacaacaaacttaggaggaatgttc

SEQ ID NO: 1290119 - DNA, 25 bp, Homo sapien
taggcagggtagcacctgcctgtag

SEQ ID NO: 1290120 - DNA, 25 bp, Homo sapien
taccacagaatcagaccctttaaaa

SEQ ID NO: 1290121 - DNA, 25 bp, Homo sapien
tctaggtcaattgatgaagtacagt

SEQ ID NO: 1290122 - DNA, 25 bp, Homo sapien
ccgagaatggcatgggaggatccct

SEQ ID NO: 1290123 - DNA, 25 bp, Homo sapien
gttcctgaccctgcttcaatcattt

SEQ ID NO: 1290124 - DNA, 25 bp, Homo sapien
tgaccctgcttcaatcatttttatg

SEQ ID NO: 1290125 - DNA, 25 bp, Homo sapien
cactggttcctgaccctgcttcaat

SEQ ID NO: 1290126 - DNA, 25 bp, Homo sapien
agccactggttcctgaccctgcttc

SEQ ID NO: 1290127 - DNA, 25 bp, Homo sapien
tttagtattttgcatggagggctca

SEQ ID NO: 1290128 - DNA, 25 bp, Homo sapien
taagagaattgccaaagatgacatg

SEQ ID NO: 1290129 - DNA, 25 bp, Homo sapien
gagtaccaaccatatctgtatcagt

SEQ ID NO: 1290130 - DNA, 25 bp, Homo sapien
catcaactctctcatatagacaagg

SEQ ID NO: 1290131 - DNA, 25 bp, Homo sapien
ctagctatgctacgtgttttatcaa

SEQ ID NO: 1290132 - DNA, 25 bp, Homo sapien
gtctcaaacacgtagcctcaaagga

SEQ ID NO: 1290133 - DNA, 25 bp, Homo sapien
aaaattacagtaaatgggctgggtg

SEQ ID NO: 1290134 - DNA, 25 bp, Homo sapien
gattactggtttgagtcaccccacc

SEQ ID NO: 1290135 - DNA, 25 bp, Homo sapien
taaatgaagggcaaacatatggcta

SEQ ID NO: 1290136 - DNA, 25 bp, Homo sapien
caggaatcgcagaccagtctgagca

SEQ ID NO: 1290137 - DNA, 25 bp, Homo sapien
aattgaggagtagaggttggaggat

SEQ ID NO: 1290138 - DNA, 25 bp, Homo sapien
tgaggtgagccatggctacaccact

SEQ ID NO: 1290139 - DNA, 25 bp, Homo sapien
agcctagcaacatggccagtctcta

SEQ ID NO: 1290140 - DNA, 25 bp, Homo sapien
tactactagtatcaatgcaataatt

SEQ ID NO: 1290141 - DNA, 25 bp, Homo sapien
gctagtaagttacctaaagatatag

SEQ ID NO: 1290142 - DNA, 25 bp, Homo sapien
aattaatagtcacaaggagcttttc

SEQ ID NO: 1290143 - DNA, 25 bp, Homo sapien
aaaaactacctattgtcagcaagcc

SEQ ID NO: 1290144 - DNA, 25 bp, Homo sapien
tgcttatccaccaaaatcagggtta

SEQ ID NO: 1290145 - DNA, 25 bp, Homo sapien
gcatatccaacggttcatctgagca

SEQ ID NO: 1290146 - DNA, 25 bp, Homo sapien
ttctgtcataagtagcctccgctcc

SEQ ID NO: 1290147 - DNA, 25 bp, Homo sapien
gctacctcattaacgtgattctgaa

SEQ ID NO: 1290148 - DNA, 25 bp, Homo sapien
gaatcaggtactgtggttagcttaa

SEQ ID NO: 1290149 - DNA, 25 bp, Homo sapien
gagcctgcagctgaatagcagttaa

SEQ ID NO: 1290150 - DNA, 25 bp, Homo sapien
aggttggtcttcctactcctaggct

SEQ ID NO: 1290151 - DNA, 25 bp, Homo sapien
tgagtaaagacactagatctgcagg

SEQ ID NO: 1290152 - DNA, 25 bp, Homo sapien
tagaattacctgagtttgagtccaa

SEQ ID NO: 1290153 - DNA, 25 bp, Homo sapien
gagtccaacggtgagtatacacacg

SEQ ID NO: 1290154 - DNA, 25 bp, Homo sapien
gataactagagtacattttgggcct

SEQ ID NO: 1290155 - DNA, 25 bp, Homo sapien
tgagaaggaatgcataacctcgccc

SEQ ID NO: 1290156 - DNA, 25 bp, Homo sapien
gaaagaccagcaagatgccaactta

SEQ ID NO: 1290157 - DNA, 25 bp, Homo sapien
tgccaacttaaccaagtagtcaagg

SEQ ID NO: 1290158 - DNA, 25 bp, Homo sapien
gacatcatgaatctcctgatatggg

SEQ ID NO: 1290159 - DNA, 25 bp, Homo sapien
cacagggagtatcagctgactacat

SEQ ID NO: 1290160 - DNA, 25 bp, Homo sapien
aagatcaacaatgtaacacagggag

SEQ ID NO: 1290161 - DNA, 25 bp, Homo sapien
tcatggtggcacctttcaaagacac

SEQ ID NO: 1290162 - DNA, 25 bp, Homo sapien
caggaagttggactactttcaaact

SEQ ID NO: 1290163 - DNA, 25 bp, Homo sapien
tctaagctaaaagccaaaggtgaaa

SEQ ID NO: 1290164 - DNA, 25 bp, Homo sapien
cttctaagctaaaagccaaaggtga

SEQ ID NO: 1290165 - DNA, 25 bp, Homo sapien
ccctttgtaatgtgcagtcataact

SEQ ID NO: 1290166 - DNA, 25 bp, Homo sapien
gtgcagtcataacttctaagctaaa

SEQ ID NO: 1290167 - DNA, 25 bp, Homo sapien
acttcagatggctttgtaaactggg

SEQ ID NO: 1290168 - DNA, 25 bp, Homo sapien
cacttcagatggctttgtaaactgg

SEQ ID NO: 1290169 - DNA, 25 bp, Homo sapien
atacaactcaggcacttcagatggc

SEQ ID NO: 1290170 - DNA, 25 bp, Homo sapien
tcaatactagactttcctccagaag

SEQ ID NO: 1290171 - DNA, 25 bp, Homo sapien
tctccgtggaatacatgaattcaac

SEQ ID NO: 1290172 - DNA, 25 bp, Homo sapien
ttctacaatcgagcaaataacatga

SEQ ID NO: 1290173 - DNA, 25 bp, Homo sapien
ttctcaggtacgcaatacctttcta

SEQ ID NO: 1290174 - DNA, 25 bp, Homo sapien
actgtgtcccgctgtagggggagcc

SEQ ID NO: 1290175 - DNA, 25 bp, Homo sapien
gagcaggagggtgtaatcctcacaa

SEQ ID NO: 1290176 - DNA, 25 bp, Homo sapien
agcaaattctgcccaataaaggggg

SEQ ID NO: 1290177 - DNA, 25 bp, Homo sapien
ggtcccaggcaccaagcaaattctg

SEQ ID NO: 1290178 - DNA, 25 bp, Homo sapien
gggccctgatgttcgggtgaggagg

SEQ ID NO: 1290179 - DNA, 25 bp, Homo sapien
tgttggggcgcctgagtctggaggg

SEQ ID NO: 1290180 - DNA, 25 bp, Homo sapien
gtctggagggccctgatgttcgggt

SEQ ID NO: 1290181 - DNA, 25 bp, Homo sapien
cgccgggtgaggaggcggtaccgct

SEQ ID NO: 1290182 - DNA, 25 bp, Homo sapien
ggattttcttcactcaacgagcaga

SEQ ID NO: 1290183 - DNA, 25 bp, Homo sapien
aagcggcgcccttctcggtagcggg

SEQ ID NO: 1290184 - DNA, 25 bp, Homo sapien
ctcaggcgatgccggtggattttct

SEQ ID NO: 1290185 - DNA, 25 bp, Homo sapien
ctttcacggcaatatcctcatgggc

SEQ ID NO: 1290186 - DNA, 25 bp, Homo sapien
tccaggaagaattccctagtggtcc

SEQ ID NO: 1290187 - DNA, 25 bp, Homo sapien
ccacatataattgactccaggaaga

SEQ ID NO: 1290188 - DNA, 25 bp, Homo sapien
ggaatctcaggcatccttatcccaa

SEQ ID NO: 1290189 - DNA, 25 bp, Homo sapien
tacactagggtgataacaggccgat

SEQ ID NO: 1290190 - DNA, 25 bp, Homo sapien
cttgcctgaacttcccagcacgctt

SEQ ID NO: 1290191 - DNA, 25 bp, Homo sapien
gcaaggagagggtacgcccttcagc

SEQ ID NO: 1290192 - DNA, 25 bp, Homo sapien
tagcaagaaacagcttgcctgaact

SEQ ID NO: 1290193 - DNA, 25 bp, Homo sapien
gccctctggtggtaaatcttgaaac

SEQ ID NO: 1290194 - DNA, 25 bp, Homo sapien
tctgcttggccactcttgtgcattt

SEQ ID NO: 1290195 - DNA, 25 bp, Homo sapien
ggtctgcttggccactcttgtgcat

SEQ ID NO: 1290196 - DNA, 25 bp, Homo sapien
gcttggccactcttgtgcatttgat

SEQ ID NO: 1290197 - DNA, 25 bp, Homo sapien
ttggccactcttgtgcatttgatct

SEQ ID NO: 1290198 - DNA, 25 bp, Homo sapien
tttccattacaatagtgccacgcca

SEQ ID NO: 1290199 - DNA, 25 bp, Homo sapien
gagaagccagccctatggctcccca

SEQ ID NO: 1290200 - DNA, 25 bp, Homo sapien
ggtctccattccctcgggctgcacc

SEQ ID NO: 1290201 - DNA, 25 bp, Homo sapien
ctacagtagctcaaaacataataca

SEQ ID NO: 1290202 - DNA, 25 bp, Homo sapien
tcagctacttctcgggttcctgtct

SEQ ID NO: 1290203 - DNA, 25 bp, Homo sapien
tggaatccactctcgataccctgca

SEQ ID NO: 1290204 - DNA, 25 bp, Homo sapien
cagagctaccaggactgctgcgtgc

SEQ ID NO: 1290205 - DNA, 25 bp, Homo sapien
ctgctgcgtgctgggaccaggacct

SEQ ID NO: 1290206 - DNA, 25 bp, Homo sapien
taaaagcatccatctagctgcaagt

SEQ ID NO: 1290207 - DNA, 25 bp, Homo sapien
tggtggcgcccatgagtctgctact

SEQ ID NO: 1290208 - DNA, 25 bp, Homo sapien
cagtcttccgatgccctgtgccatg

SEQ ID NO: 1290209 - DNA, 25 bp, Homo sapien
tcacaatgtcccctggctaaaagca

SEQ ID NO: 1290210 - DNA, 25 bp, Homo sapien
catgtggtggatgacggtgctcaga

SEQ ID NO: 1290211 - DNA, 25 bp, Homo sapien
cggctgcagcctcagataaggcact

SEQ ID NO: 1290212 - DNA, 25 bp, Homo sapien
ctcagataaggcactagaggactgg

SEQ ID NO: 1290213 - DNA, 25 bp, Homo sapien
ccaagggcatctaggagcaggggct

SEQ ID NO: 1290214 - DNA, 25 bp, Homo sapien
cgattcagggtgcttggtgttccca

SEQ ID NO: 1290215 - DNA, 25 bp, Homo sapien
tatagccatcagtcccctgctgtgg

SEQ ID NO: 1290216 - DNA, 25 bp, Homo sapien
cctgagatagacatgggacagcccg

SEQ ID NO: 1290217 - DNA, 25 bp, Homo sapien
ggatcagaacttcccagctagggct

SEQ ID NO: 1290218 - DNA, 25 bp, Homo sapien
tgatgaggccttcgtgggagctctc

SEQ ID NO: 1290219 - DNA, 25 bp, Homo sapien
attggagagggagccgatgacccgg

SEQ ID NO: 1290220 - DNA, 25 bp, Homo sapien
cagacttcgcacttgtgaggcgggt

SEQ ID NO: 1290221 - DNA, 25 bp, Homo sapien
tgttctgagaactccttggaattgg

SEQ ID NO: 1290222 - DNA, 25 bp, Homo sapien
ggctgccagactgcccccattataa

SEQ ID NO: 1290223 - DNA, 25 bp, Homo sapien
gactgcccccattataacagcaggg

SEQ ID NO: 1290224 - DNA, 25 bp, Homo sapien
ccagactgcccccattataacagca

SEQ ID NO: 1290225 - DNA, 25 bp, Homo sapien
tgccagactgcccccattataacag

SEQ ID NO: 1290226 - DNA, 25 bp, Homo sapien
gagcgagtgctcagccccgttcttc

SEQ ID NO: 1290227 - DNA, 25 bp, Homo sapien
agcgagtgctcagccccgttcttct

SEQ ID NO: 1290228 - DNA, 25 bp, Homo sapien
agtgctcagccccgttcttcttcac

SEQ ID NO: 1290229 - DNA, 25 bp, Homo sapien
gctcagccccgttcttcttcaccca

SEQ ID NO: 1290230 - DNA, 25 bp, Homo sapien
cactcggtctgacgcttgaaggcct

SEQ ID NO: 1290231 - DNA, 25 bp, Homo sapien
tgaaggcctccacggatgagttctt

SEQ ID NO: 1290232 - DNA, 25 bp, Homo sapien
tgtactgctctaccatgcactcggt

SEQ ID NO: 1290233 - DNA, 25 bp, Homo sapien
cggaggttcccgtccttgtcatact

SEQ ID NO: 1290234 - DNA, 25 bp, Homo sapien
aaagcatgagtcagctcatggccca

SEQ ID NO: 1290235 - DNA, 25 bp, Homo sapien
catcaaaagcatgagtcagctcatg

SEQ ID NO: 1290236 - DNA, 25 bp, Homo sapien
tcatggcccacgacgacacctatgc

SEQ ID NO: 1290237 - DNA, 25 bp, Homo sapien
gacgacacctatgccaccaaagttt

SEQ ID NO: 1290238 - DNA, 25 bp, Homo sapien
cacaatctcattcttggtgggcgag

SEQ ID NO: 1290239 - DNA, 25 bp, Homo sapien
gagcgtgtgtagaatggtgcctgca

SEQ ID NO: 1290240 - DNA, 25 bp, Homo sapien
gtgcctgcaggatcccggccggaaa

SEQ ID NO: 1290241 - DNA, 25 bp, Homo sapien
cgagtagtaggcgttcaccatgggc

SEQ ID NO: 1290242 - DNA, 25 bp, Homo sapien
gatcttgttgtgacacccaggttag

SEQ ID NO: 1290243 - DNA, 25 bp, Homo sapien
cctgttggtacttttaggatgactg

SEQ ID NO: 1290244 - DNA, 25 bp, Homo sapien
ctacaagcactcgtgaccatgcctg

SEQ ID NO: 1290245 - DNA, 25 bp, Homo sapien
tcagacgtggacatctggcagacat

SEQ ID NO: 1290246 - DNA, 25 bp, Homo sapien
gctttgggaagcacagctgtcaagc

SEQ ID NO: 1290247 - DNA, 25 bp, Homo sapien
gggaagcacagctgtcaagcccatc

SEQ ID NO: 1290248 - DNA, 25 bp, Homo sapien
cccggccaggaagctgtatctttga

SEQ ID NO: 1290249 - DNA, 25 bp, Homo sapien
cccagaggactctgatgtgcagtga

SEQ ID NO: 1290250 - DNA, 25 bp, Homo sapien
aatgaaggccagttcgtcccaaggc

SEQ ID NO: 1290251 - DNA, 25 bp, Homo sapien
ctcgtgatagctgatcgggtgcaca

SEQ ID NO: 1290252 - DNA, 25 bp, Homo sapien
gacaaggtgccagatcggctccgct

SEQ ID NO: 1290253 - DNA, 25 bp, Homo sapien
gataacaagggcatccactcttcag

SEQ ID NO: 1290254 - DNA, 25 bp, Homo sapien
caaagtagaggtctggaactgcagt

SEQ ID NO: 1290255 - DNA, 25 bp, Homo sapien
ttttcaaagtagaggtctggaactg

SEQ ID NO: 1290256 - DNA, 25 bp, Homo sapien
gaccctccatgagaagttgaaaaac

SEQ ID NO: 1290257 - DNA, 25 bp, Homo sapien
gagctgatcggcagtgaccctccat

SEQ ID NO: 1290258 - DNA, 25 bp, Homo sapien
caagggctgtcatggttaagagatt

SEQ ID NO: 1290259 - DNA, 25 bp, Homo sapien
cggtggtgtgcatcttccaagacag

SEQ ID NO: 1290260 - DNA, 25 bp, Homo sapien
agtggagtcaatcacagtgtgccct

SEQ ID NO: 1290261 - DNA, 25 bp, Homo sapien
gcaggctggagaccggaatgcaggg

SEQ ID NO: 1290262 - DNA, 25 bp, Homo sapien
gaaaaggcagcagaatgagtctcat

SEQ ID NO: 1290263 - DNA, 25 bp, Homo sapien
tcttgcgtcatgacactctggagca

SEQ ID NO: 1290264 - DNA, 25 bp, Homo sapien
taataagcagggatgtatcaaccac

SEQ ID NO: 1290265 - DNA, 25 bp, Homo sapien
gaagcacaatccacctaactgagtg

SEQ ID NO: 1290266 - DNA, 25 bp, Homo sapien
ccttgggatccatgatgaagttggg

SEQ ID NO: 1290267 - DNA, 25 bp, Homo sapien
gctccttgggatccatgatgaagtt

SEQ ID NO: 1290268 - DNA, 25 bp, Homo sapien
gaagttggggtatcctatcatgttg

SEQ ID NO: 1290269 - DNA, 25 bp, Homo sapien
gggtatcctatcatgttgtagatgg

SEQ ID NO: 1290270 - DNA, 25 bp, Homo sapien
cttggctgattttcgggtttcctca

SEQ ID NO: 1290271 - DNA, 25 bp, Homo sapien
tgattttcgggtttcctcatccatc

SEQ ID NO: 1290272 - DNA, 25 bp, Homo sapien
ctcaaatgccttcttaatctccagg

SEQ ID NO: 1290273 - DNA, 25 bp, Homo sapien
aatgccttcttaatctccaggatga

SEQ ID NO: 1290274 - DNA, 25 bp, Homo sapien
tcaattttccaagcgtcaggctggg

SEQ ID NO: 1290275 - DNA, 25 bp, Homo sapien
taaggtctgcgcactggtctcaggt

SEQ ID NO: 1290276 - DNA, 25 bp, Homo sapien
ggcaccccgtgcagaacaatgatgg

SEQ ID NO: 1290277 - DNA, 25 bp, Homo sapien
ggtctcaggtaaatgcaacaggcac

SEQ ID NO: 1290278 - DNA, 25 bp, Homo sapien
tatgctcttgctgtcctcggcgaag

SEQ ID NO: 1290279 - DNA, 25 bp, Homo sapien
aacgcaaagcccaggttgttttctg

SEQ ID NO: 1290280 - DNA, 25 bp, Homo sapien
cgaaggttgctttgacaaacatggg

SEQ ID NO: 1290281 - DNA, 25 bp, Homo sapien
gtgtcactcacgcaaaacttccagc

SEQ ID NO: 1290282 - DNA, 25 bp, Homo sapien
tcgctgggccccagccctttgtttc

SEQ ID NO: 1290283 - DNA, 25 bp, Homo sapien
tggaaaacacaagtcagggggctcg

SEQ ID NO: 1290284 - DNA, 25 bp, Homo sapien
caacccctttcttgctgggaggtag

SEQ ID NO: 1290285 - DNA, 25 bp, Homo sapien
aaaacacaagtcagggggctcgctg

SEQ ID NO: 1290286 - DNA, 25 bp, Homo sapien
tcaccgcgggattgcaatgccttga

SEQ ID NO: 1290287 - DNA, 25 bp, Homo sapien
tggtcttgcctacaagccccaacag

SEQ ID NO: 1290288 - DNA, 25 bp, Homo sapien
gacagtatatatgaccacgtgtggt

SEQ ID NO: 1290289 - DNA, 25 bp, Homo sapien
ctgtgcaaaccggaaataggcgtct

SEQ ID NO: 1290290 - DNA, 25 bp, Homo sapien
catgggtgacttcattggtcaaact

SEQ ID NO: 1290291 - DNA, 25 bp, Homo sapien
gggtgacttcattggtcaaactcat

SEQ ID NO: 1290292 - DNA, 25 bp, Homo sapien
tgggtgacttcattggtcaaactca

SEQ ID NO: 1290293 - DNA, 25 bp, Homo sapien
tacatgggtgacttcattggtcaaa

SEQ ID NO: 1290294 - DNA, 25 bp, Homo sapien
tccctcggctgagaagcccaaagct

SEQ ID NO: 1290295 - DNA, 25 bp, Homo sapien
gtccatttggatgccttgccctcag

SEQ ID NO: 1290296 - DNA, 25 bp, Homo sapien
gactctaatttgaagctccgtggag

SEQ ID NO: 1290297 - DNA, 25 bp, Homo sapien
cacatggtctgtgtctggccgaggc

SEQ ID NO: 1290298 - DNA, 25 bp, Homo sapien
gttcaatgagtaaccattagtcggc

SEQ ID NO: 1290299 - DNA, 25 bp, Homo sapien
cctggcacgcgatggcaggagttca

SEQ ID NO: 1290300 - DNA, 25 bp, Homo sapien
agtattcccgtactgggcttagagc

SEQ ID NO: 1290301 - DNA, 25 bp, Homo sapien
cattagtcggctgcatgagtgagag

SEQ ID NO: 1290302 - DNA, 25 bp, Homo sapien
tcagcccatattcaggcatacgcag

SEQ ID NO: 1290303 - DNA, 25 bp, Homo sapien
tgtgctcccatagacaccttggcat

SEQ ID NO: 1290304 - DNA, 25 bp, Homo sapien
cttggcataaagtaggcgctcagcc

SEQ ID NO: 1290305 - DNA, 25 bp, Homo sapien
gctggctgaggtcccttcctgtgct

SEQ ID NO: 1290306 - DNA, 25 bp, Homo sapien
tggtcccgtacatgacttccatgaa

SEQ ID NO: 1290307 - DNA, 25 bp, Homo sapien
tccagatcatgtagttgttgagcag

SEQ ID NO: 1290308 - DNA, 25 bp, Homo sapien
gcttgttttccgcaccaggttccag

SEQ ID NO: 1290309 - DNA, 25 bp, Homo sapien
tcggcgtcctgaaagcgctggtcaa

SEQ ID NO: 1290310 - DNA, 25 bp, Homo sapien
aaaaggcaaccagttgatggcgggt

SEQ ID NO: 1290311 - DNA, 25 bp, Homo sapien
tgtcatagaccacaataggctcgga

SEQ ID NO: 1290312 - DNA, 25 bp, Homo sapien
gctcggattcattgatctccacggg

SEQ ID NO: 1290313 - DNA, 25 bp, Homo sapien
tgttgatgagagtggagatctgctc

SEQ ID NO: 1290314 - DNA, 25 bp, Homo sapien
gggcacaccagtgagctccattttc

SEQ ID NO: 1290315 - DNA, 25 bp, Homo sapien
acaccagtgagctccattttccaca

SEQ ID NO: 1290316 - DNA, 25 bp, Homo sapien
gcacaccagtgagctccattttcca

SEQ ID NO: 1290317 - DNA, 25 bp, Homo sapien
ggggcacaccagtgagctccatttt

SEQ ID NO: 1290318 - DNA, 25 bp, Homo sapien
gccctgtctgaaacctggaggccat

SEQ ID NO: 1290319 - DNA, 25 bp, Homo sapien
tgtggactgggcataacaaccatcc

SEQ ID NO: 1290320 - DNA, 25 bp, Homo sapien
tgtgcccttcagcaggtaacttgac

SEQ ID NO: 1290321 - DNA, 25 bp, Homo sapien
cggccaggcgcctattttggagtca

SEQ ID NO: 1290322 - DNA, 25 bp, Homo sapien
cgtcactttgtggtagatgagctcc

SEQ ID NO: 1290323 - DNA, 25 bp, Homo sapien
gatgagctcctcatcacggcgcttc

SEQ ID NO: 1290324 - DNA, 25 bp, Homo sapien
tggccagtgccgtctcaaagtccaa

SEQ ID NO: 1290325 - DNA, 25 bp, Homo sapien
tgtagttcagatatccggtcagcac

SEQ ID NO: 1290326 - DNA, 25 bp, Homo sapien
tctctcgagggcaagcccaggccag

SEQ ID NO: 1290327 - DNA, 25 bp, Homo sapien
atagtctctcgagggcaagcccagg

SEQ ID NO: 1290328 - DNA, 25 bp, Homo sapien
taatagtctctcgagggcaagccca

SEQ ID NO: 1290329 - DNA, 25 bp, Homo sapien
ggtaatagtctctcgagggcaagcc

SEQ ID NO: 1290330 - DNA, 25 bp, Homo sapien
cccactcagggacgggatgacacat

SEQ ID NO: 1290331 - DNA, 25 bp, Homo sapien
taaacagctacttgcctcggcaaag

SEQ ID NO: 1290332 - DNA, 25 bp, Homo sapien
tgcaatgcgtgtatccactgcacgg

SEQ ID NO: 1290333 - DNA, 25 bp, Homo sapien
tccaggtggttaagagtcactcaaa

SEQ ID NO: 1290334 - DNA, 25 bp, Homo sapien
gtcctggaagttgtccttggcccag

SEQ ID NO: 1290335 - DNA, 25 bp, Homo sapien
cttggaatcggcactgacatagaca

SEQ ID NO: 1290336 - DNA, 25 bp, Homo sapien
ctgttggagttcttggaatcggcac

SEQ ID NO: 1290337 - DNA, 25 bp, Homo sapien
tgaggtgcggtagtgggcggtgacc

SEQ ID NO: 1290338 - DNA, 25 bp, Homo sapien
gctcctcgatcctggtctcgttcat

SEQ ID NO: 1290339 - DNA, 25 bp, Homo sapien
ctgagctcctcgatcctggtctcgt

SEQ ID NO: 1290340 - DNA, 25 bp, Homo sapien
ctccattagaggtttggccctgagc

SEQ ID NO: 1290341 - DNA, 25 bp, Homo sapien
tcaactccattagaggtttggccct

SEQ ID NO: 1290342 - DNA, 25 bp, Homo sapien
cacggtagtatacttgcgcctttct

SEQ ID NO: 1290343 - DNA, 25 bp, Homo sapien
ggtagtatacttgcgcctttctctc

SEQ ID NO: 1290344 - DNA, 25 bp, Homo sapien
gcacgcacggtagtatacttgcgcc

SEQ ID NO: 1290345 - DNA, 25 bp, Homo sapien
gcacggtagtatacttgcgcctttc

SEQ ID NO: 1290346 - DNA, 25 bp, Homo sapien
acagaggccggtcttggttttcaga

SEQ ID NO: 1290347 - DNA, 25 bp, Homo sapien
ggacagaggccggtcttggttttca

SEQ ID NO: 1290348 - DNA, 25 bp, Homo sapien
ttcttcccctgtggataacgtgtgg

SEQ ID NO: 1290349 - DNA, 25 bp, Homo sapien
gtggtacgaacacccctgcctggtg

SEQ ID NO: 1290350 - DNA, 25 bp, Homo sapien
gtgataaagactgaagttggatgga

SEQ ID NO: 1290351 - DNA, 25 bp, Homo sapien
gcacgttcaccaggcttacagccaa

SEQ ID NO: 1290352 - DNA, 25 bp, Homo sapien
tccttggaggggctaggcacgttca

SEQ ID NO: 1290353 - DNA, 25 bp, Homo sapien
aagactgaagttggatggaaactca

SEQ ID NO: 1290354 - DNA, 25 bp, Homo sapien
cactcgaagtttgaggcctctatga

SEQ ID NO: 1290355 - DNA, 25 bp, Homo sapien
gctactgcctaaagctcagctccag

SEQ ID NO: 1290356 - DNA, 25 bp, Homo sapien
ccttttagtccaaataggcactgga

SEQ ID NO: 1290357 - DNA, 25 bp, Homo sapien
gagtcaagtttctttggcctgagtg

SEQ ID NO: 1290358 - DNA, 25 bp, Homo sapien
gatcttttggcagcctagggccaca

SEQ ID NO: 1290359 - DNA, 25 bp, Homo sapien
gaagaagccaacacccaacagtgtg

SEQ ID NO: 1290360 - DNA, 25 bp, Homo sapien
ctctgagttcagcaagaccagggct

SEQ ID NO: 1290361 - DNA, 25 bp, Homo sapien
tatcttttttcagactagccccagg

SEQ ID NO: 1290362 - DNA, 25 bp, Homo sapien
ttaagcccaagaatgcactggccca

SEQ ID NO: 1290363 - DNA, 25 bp, Homo sapien
tggccttaagcccaagaatgcactg

SEQ ID NO: 1290364 - DNA, 25 bp, Homo sapien
tgacccctttgtcttggagacgctg

SEQ ID NO: 1290365 - DNA, 25 bp, Homo sapien
tctggctcccttccgacgcctgttg

SEQ ID NO: 1290366 - DNA, 25 bp, Homo sapien
gaggaccccaggatatgtcttccgg

SEQ ID NO: 1290367 - DNA, 25 bp, Homo sapien
tatcaaagtcccaggtatcaagccc

SEQ ID NO: 1290368 - DNA, 25 bp, Homo sapien
gggccatttccagactagttccgag

SEQ ID NO: 1290369 - DNA, 25 bp, Homo sapien
ctttataggtgatgagccgaggacc

SEQ ID NO: 1290370 - DNA, 25 bp, Homo sapien
gctgaaggcagctgctgctgctgct

SEQ ID NO: 1290371 - DNA, 25 bp, Homo sapien
tcaggaagttaggctgaaggcagct

SEQ ID NO: 1290372 - DNA, 25 bp, Homo sapien
cagtatttgtcggatctaggttctg

SEQ ID NO: 1290373 - DNA, 25 bp, Homo sapien
ttgttgatggataaattgactgact

SEQ ID NO: 1290374 - DNA, 25 bp, Homo sapien
cggatctaggttctgttgttgatgg

SEQ ID NO: 1290375 - DNA, 25 bp, Homo sapien
tgttgatggataaattgactgactt

SEQ ID NO: 1290376 - DNA, 25 bp, Homo sapien
gcccccacaggcgtagctgaagaag

SEQ ID NO: 1290377 - DNA, 25 bp, Homo sapien
gactgggttggccttgatccagccc

SEQ ID NO: 1290378 - DNA, 25 bp, Homo sapien
ctggtcactgagacacaagcttcgc

SEQ ID NO: 1290379 - DNA, 25 bp, Homo sapien
aggtgcttgatgattgcttggttgt

SEQ ID NO: 1290380 - DNA, 25 bp, Homo sapien
gctttgactggcctgatgtttgctc

SEQ ID NO: 1290381 - DNA, 25 bp, Homo sapien
cgcccggccagatttgctttgactg

SEQ ID NO: 1290382 - DNA, 25 bp, Homo sapien
ctcgagtagccggtgtgcaccatca

SEQ ID NO: 1290383 - DNA, 25 bp, Homo sapien
gtaatgaggttactgttaatatctg

SEQ ID NO: 1290384 - DNA, 25 bp, Homo sapien
gatgtggactcaagtgcgagacctt

SEQ ID NO: 1290385 - DNA, 25 bp, Homo sapien
taaagttgaagaagtcctacgaggc

SEQ ID NO: 1290386 - DNA, 25 bp, Homo sapien
tacgaggcaccagctatgggacata

SEQ ID NO: 1290387 - DNA, 25 bp, Homo sapien
tatgttatctctagtccgcagaccc

SEQ ID NO: 1290388 - DNA, 25 bp, Homo sapien
cctctggccactccgggggctgtgg

SEQ ID NO: 1290389 - DNA, 25 bp, Homo sapien
cgccagaagtaccaccaacaccacc

SEQ ID NO: 1290390 - DNA, 25 bp, Homo sapien
acctgggtccgtgcagcccagcacc

SEQ ID NO: 1290391 - DNA, 25 bp, Homo sapien
ggaggaaggggttccgctgcaggcc

SEQ ID NO: 1290392 - DNA, 25 bp, Homo sapien
cagggaaggaggcaggaggggcggg

SEQ ID NO: 1290393 - DNA, 25 bp, Homo sapien
caggaggggcggggaagacgtgagc

SEQ ID NO: 1290394 - DNA, 25 bp, Homo sapien
aggcaggaggggcggggaagacgtg

SEQ ID NO: 1290395 - DNA, 25 bp, Homo sapien
ccctaatccaggaaaggaacagcca

SEQ ID NO: 1290396 - DNA, 25 bp, Homo sapien
ttcagccctaatccaggaaaggaac

SEQ ID NO: 1290397 - DNA, 25 bp, Homo sapien
tggtctggttcccacagattcagcc

SEQ ID NO: 1290398 - DNA, 25 bp, Homo sapien
cagccctaatccaggaaaggaacag

SEQ ID NO: 1290399 - DNA, 25 bp, Homo sapien
tcccacgcaaaaacacgcgagccac

SEQ ID NO: 1290400 - DNA, 25 bp, Homo sapien
tgcagagcccccacatcagcggggt

SEQ ID NO: 1290401 - DNA, 25 bp, Homo sapien
gcggggtcagggacaagggtgacac

SEQ ID NO: 1290402 - DNA, 25 bp, Homo sapien
cagccatggctcacacttcccagaa

SEQ ID NO: 1290403 - DNA, 25 bp, Homo sapien
tctgttccaagagatgcttcctgca

SEQ ID NO: 1290404 - DNA, 25 bp, Homo sapien
cagtctagctaaacaggaagggagg

SEQ ID NO: 1290405 - DNA, 25 bp, Homo sapien
gacaccgtgtcatgtgctaacagct

SEQ ID NO: 1290406 - DNA, 25 bp, Homo sapien
gggtaacgtgttcagtgacaccgtg

SEQ ID NO: 1290407 - DNA, 25 bp, Homo sapien
caggccgttggggtatgcgtcgccc

SEQ ID NO: 1290408 - DNA, 25 bp, Homo sapien
tatgcgtcgccctcggagagcgagt

SEQ ID NO: 1290409 - DNA, 25 bp, Homo sapien
gagagcgagtccaccaggtcctcct

SEQ ID NO: 1290410 - DNA, 25 bp, Homo sapien
tcctcgtccagcgtggcccgcttgt

SEQ ID NO: 1290411 - DNA, 25 bp, Homo sapien
aaatgcagcacggactccctcagcg

SEQ ID NO: 1290412 - DNA, 25 bp, Homo sapien
gcaaggccaaatgcagcacggactc

SEQ ID NO: 1290413 - DNA, 25 bp, Homo sapien
aggccaaatgcagcacggactccct

SEQ ID NO: 1290414 - DNA, 25 bp, Homo sapien
ctgcaaggccaaatgcagcacggac

SEQ ID NO: 1290415 - DNA, 25 bp, Homo sapien
tcgcgcccgaatggggaagcggccc

SEQ ID NO: 1290416 - DNA, 25 bp, Homo sapien
ctctcgcgcccgaatggggaagcgg

SEQ ID NO: 1290417 - DNA, 25 bp, Homo sapien
ggctctcgcgcccgaatggggaagc

SEQ ID NO: 1290418 - DNA, 25 bp, Homo sapien
tctcgcgcccgaatggggaagcggc

SEQ ID NO: 1290419 - DNA, 25 bp, Homo sapien
ccccagcgccgacagcagggcggac

SEQ ID NO: 1290420 - DNA, 25 bp, Homo sapien
cccagcgccgacagcagggcggaca

SEQ ID NO: 1290421 - DNA, 25 bp, Homo sapien
tcctttacagtacttgttgcagact

SEQ ID NO: 1290422 - DNA, 25 bp, Homo sapien
aacttcagatctcagcctaccagct

SEQ ID NO: 1290423 - DNA, 25 bp, Homo sapien
ccaaattctctgttacagcatcctg

SEQ ID NO: 1290424 - DNA, 25 bp, Homo sapien
tctccagaatccacagctttactgg

SEQ ID NO: 1290425 - DNA, 25 bp, Homo sapien
gtatttgtgttacacaggtgagtgg

SEQ ID NO: 1290426 - DNA, 25 bp, Homo sapien
ctgcccagtaattgtgctcaaccag

SEQ ID NO: 1290427 - DNA, 25 bp, Homo sapien
aaccaggaagcagctcatggagtca

SEQ ID NO: 1290428 - DNA, 25 bp, Homo sapien
gagtcagttgtaattagtatttgtg

SEQ ID NO: 1290429 - DNA, 25 bp, Homo sapien
gactcacaggagaaccgctgtgtca

SEQ ID NO: 1290430 - DNA, 25 bp, Homo sapien
caagaaggactcacaggagaaccgc

SEQ ID NO: 1290431 - DNA, 25 bp, Homo sapien
ggagaaccgctgtgtcagcagtccc

SEQ ID NO: 1290432 - DNA, 25 bp, Homo sapien
caggagaaccgctgtgtcagcagtc

SEQ ID NO: 1290433 - DNA, 25 bp, Homo sapien
agccacagcttcttaaagttcccca

SEQ ID NO: 1290434 - DNA, 25 bp, Homo sapien
ctgggctatgagccacagcttctta

SEQ ID NO: 1290435 - DNA, 25 bp, Homo sapien
gccacagcttcttaaagttccccat

SEQ ID NO: 1290436 - DNA, 25 bp, Homo sapien
ggctatgagccacagcttcttaaag

SEQ ID NO: 1290437 - DNA, 25 bp, Homo sapien
gcagcaggcttagttggactgagcc

SEQ ID NO: 1290438 - DNA, 25 bp, Homo sapien
cagcaggcttagttggactgagcca

SEQ ID NO: 1290439 - DNA, 25 bp, Homo sapien
gcaggcttagttggactgagccaga

SEQ ID NO: 1290440 - DNA, 25 bp, Homo sapien
aggcttagttggactgagccagagc

SEQ ID NO: 1290441 - DNA, 25 bp, Homo sapien
ttcaacctgagcagtagtgtggcct

SEQ ID NO: 1290442 - DNA, 25 bp, Homo sapien
taaacggtaacaccaacgacatggc

SEQ ID NO: 1290443 - DNA, 25 bp, Homo sapien
ggttctggaacagacagacctcagc

SEQ ID NO: 1290444 - DNA, 25 bp, Homo sapien
taacagcaaccccacgtgaaagatg

SEQ ID NO: 1290445 - DNA, 25 bp, Homo sapien
taatcataaagtggactacgcaggg

SEQ ID NO: 1290446 - DNA, 25 bp, Homo sapien
gaggcacggctcactgttccctagt

SEQ ID NO: 1290447 - DNA, 25 bp, Homo sapien
cctcgtgtctaaatggcctggtaca

SEQ ID NO: 1290448 - DNA, 25 bp, Homo sapien
tactagggcctccataaatgccggc

SEQ ID NO: 1290449 - DNA, 25 bp, Homo sapien
ctactgccgaggtggtgccttgagg

SEQ ID NO: 1290450 - DNA, 25 bp, Homo sapien
actgccgaggtggtgccttgaggag

SEQ ID NO: 1290451 - DNA, 25 bp, Homo sapien
tactgccgaggtggtgccttgagga

SEQ ID NO: 1290452 - DNA, 25 bp, Homo sapien
cacaggttggggctgtgccaggccc

SEQ ID NO: 1290453 - DNA, 25 bp, Homo sapien
gcaggctgaggcacaggttggggct

SEQ ID NO: 1290454 - DNA, 25 bp, Homo sapien
ctggccagtgcaaggcgcaggctga

SEQ ID NO: 1290455 - DNA, 25 bp, Homo sapien
tggccagtgcaaggcgcaggctgag

SEQ ID NO: 1290456 - DNA, 25 bp, Homo sapien
cagcctcgaccatagctcatgcagc

SEQ ID NO: 1290457 - DNA, 25 bp, Homo sapien
caagctggagtgcggccttgaccat

SEQ ID NO: 1290458 - DNA, 25 bp, Homo sapien
ggagtgcggccttgaccatagccca

SEQ ID NO: 1290459 - DNA, 25 bp, Homo sapien
gcggccttgaccatagcccatgcag

SEQ ID NO: 1290460 - DNA, 25 bp, Homo sapien
caaccgagtgtgtcactgggcgtca

SEQ ID NO: 1290461 - DNA, 25 bp, Homo sapien
tgcttctgtccagggagactccaac

SEQ ID NO: 1290462 - DNA, 25 bp, Homo sapien
gggagaaaccatccatcagtgcggg

SEQ ID NO: 1290463 - DNA, 25 bp, Homo sapien
ttcaatggaggtatcagaggtcgcc

SEQ ID NO: 1290464 - DNA, 25 bp, Homo sapien
gatggctcctctgacataaactccc

SEQ ID NO: 1290465 - DNA, 25 bp, Homo sapien
agtttcatgtacctcagatcatcgg

SEQ ID NO: 1290466 - DNA, 25 bp, Homo sapien
gatcatcgggcttagttagattctc

SEQ ID NO: 1290467 - DNA, 25 bp, Homo sapien
tggagattgctgctataggtcactc

SEQ ID NO: 1290468 - DNA, 25 bp, Homo sapien
cgcagcaaccgtccccaaagcgaac

SEQ ID NO: 1290469 - DNA, 25 bp, Homo sapien
agtgtcccgggacgctcaggtccag

SEQ ID NO: 1290470 - DNA, 25 bp, Homo sapien
tgggaccagaaccaagctcggcgcg

SEQ ID NO: 1290471 - DNA, 25 bp, Homo sapien
tccacgccttccgagagccgggcgg

SEQ ID NO: 1290472 - DNA, 25 bp, Homo sapien
agctcgcgtgctccgccccggcttc

SEQ ID NO: 1290473 - DNA, 25 bp, Homo sapien
ggcttcggcgccgagtgccggaggg

SEQ ID NO: 1290474 - DNA, 25 bp, Homo sapien
agctcgcggcttcggcgccgagtgc

SEQ ID NO: 1290475 - DNA, 25 bp, Homo sapien
tccagcgggcgagctcgcggcttcg

SEQ ID NO: 1290476 - DNA, 25 bp, Homo sapien
cctggctgtctgagtagatggcgct

SEQ ID NO: 1290477 - DNA, 25 bp, Homo sapien
tagatggcgctcacaccaagtggtg

SEQ ID NO: 1290478 - DNA, 25 bp, Homo sapien
tggagatccacacaaggttacaggc

SEQ ID NO: 1290479 - DNA, 25 bp, Homo sapien
aacccagagcccattgttagacatg

SEQ ID NO: 1290480 - DNA, 25 bp, Homo sapien
taaaccctcaattagcagcgtagct

SEQ ID NO: 1290481 - DNA, 25 bp, Homo sapien
taagtgccttccataacctaagagg

SEQ ID NO: 1290482 - DNA, 25 bp, Homo sapien
taagatctactgttactggctggga

SEQ ID NO: 1290483 - DNA, 25 bp, Homo sapien
cacatggtgcttgggcccttgaaac

SEQ ID NO: 1290484 - DNA, 25 bp, Homo sapien
gcctcctgggttcaagcaattcttg

SEQ ID NO: 1290485 - DNA, 25 bp, Homo sapien
actacaggtgggcaccatcacaccc

SEQ ID NO: 1290486 - DNA, 25 bp, Homo sapien
gcaattcttgtgcatcagactcccg

SEQ ID NO: 1290487 - DNA, 25 bp, Homo sapien
gcaatttcagctcaccaccacctct

SEQ ID NO: 1290488 - DNA, 25 bp, Homo sapien
aggccacgaggctgatctcagctcc

SEQ ID NO: 1290489 - DNA, 25 bp, Homo sapien
ctaggccacgaggctgatctcagct

SEQ ID NO: 1290490 - DNA, 25 bp, Homo sapien
taggccacgaggctgatctcagctc

SEQ ID NO: 1290491 - DNA, 25 bp, Homo sapien
tagttgatttttttgggagctggac

SEQ ID NO: 1290492 - DNA, 25 bp, Homo sapien
ttgatttttttgggagctggacctc

SEQ ID NO: 1290493 - DNA, 25 bp, Homo sapien
aagagggaccagacccggatcttga

SEQ ID NO: 1290494 - DNA, 25 bp, Homo sapien
accaagagggaccagacccggatct

SEQ ID NO: 1290495 - DNA, 25 bp, Homo sapien
tagccagcgttgagccccggcaccc

SEQ ID NO: 1290496 - DNA, 25 bp, Homo sapien
caagagggaccagacccggatcttg

SEQ ID NO: 1290497 - DNA, 25 bp, Homo sapien
tgcttagagcacagcccctccatca

SEQ ID NO: 1290498 - DNA, 25 bp, Homo sapien
tccttgaggctgttgtgctcctcac

SEQ ID NO: 1290499 - DNA, 25 bp, Homo sapien
atttccttgaggctgttgtgctcct

SEQ ID NO: 1290500 - DNA, 25 bp, Homo sapien
cttgaggctgttgtgctcctcacac

SEQ ID NO: 1290501 - DNA, 25 bp, Homo sapien
agttggatgtgctgttgtggccact

SEQ ID NO: 1290502 - DNA, 25 bp, Homo sapien
aataaaagttggatgtgctgttgtg

SEQ ID NO: 1290503 - DNA, 25 bp, Homo sapien
taaaagttggatgtgctgttgtggc

SEQ ID NO: 1290504 - DNA, 25 bp, Homo sapien
aaagttggatgtgctgttgtggcca

SEQ ID NO: 1290505 - DNA, 25 bp, Homo sapien
ggtggtttcctcctgttcagcctca

SEQ ID NO: 1290506 - DNA, 25 bp, Homo sapien
ctgttcagcctcattcttgctttgg

SEQ ID NO: 1290507 - DNA, 25 bp, Homo sapien
ttcagcctcattcttgctttggcac

SEQ ID NO: 1290508 - DNA, 25 bp, Homo sapien
tcctgttcagcctcattcttgcttt

SEQ ID NO: 1290509 - DNA, 25 bp, Homo sapien
cctggacctgcttgctgtcctgctt

SEQ ID NO: 1290510 - DNA, 25 bp, Homo sapien
aagtctcatagcccaggtcctggag

SEQ ID NO: 1290511 - DNA, 25 bp, Homo sapien
gtcctggaggtccacctggacctgc

SEQ ID NO: 1290512 - DNA, 25 bp, Homo sapien
ctgtcctgcttcagcaagggttcac

SEQ ID NO: 1290513 - DNA, 25 bp, Homo sapien
agagaagcttctttgaactggtggg

SEQ ID NO: 1290514 - DNA, 25 bp, Homo sapien
agggcagctccacagtgcgagagaa

SEQ ID NO: 1290515 - DNA, 25 bp, Homo sapien
gaatttctttccacaggaggagcct

SEQ ID NO: 1290516 - DNA, 25 bp, Homo sapien
gcttctttgaactggtgggagaaga

SEQ ID NO: 1290517 - DNA, 25 bp, Homo sapien
ggctatgcagaaggcttctgcacag

SEQ ID NO: 1290518 - DNA, 25 bp, Homo sapien
ggaccagggaggctatgcagaaggc

SEQ ID NO: 1290519 - DNA, 25 bp, Homo sapien
ggaggctatgcagaaggcttctgca

SEQ ID NO: 1290520 - DNA, 25 bp, Homo sapien
cagggaggctatgcagaaggcttct

SEQ ID NO: 1290521 - DNA, 25 bp, Homo sapien
cttcgtgaagaccctttactgcagt

SEQ ID NO: 1290522 - DNA, 25 bp, Homo sapien
gtcttccacgtcctcttcgtgaaga

SEQ ID NO: 1290523 - DNA, 25 bp, Homo sapien
tcttccacgtcctcttcgtgaagac

SEQ ID NO: 1290524 - DNA, 25 bp, Homo sapien
cgtgaagaccctttactgcagtcat

SEQ ID NO: 1290525 - DNA, 25 bp, Homo sapien
cacagtatcgactctgtagtgttct

SEQ ID NO: 1290526 - DNA, 25 bp, Homo sapien
gtgttcttgatgaaacgtttaggct

SEQ ID NO: 1290527 - DNA, 25 bp, Homo sapien
tcgtggtgacgtggactgtgtgaag

SEQ ID NO: 1290528 - DNA, 25 bp, Homo sapien
ttttgttgtgtgattcgtggtgacg

SEQ ID NO: 1290529 - DNA, 25 bp, Homo sapien
acatgtgcctatacgtcctgcctgc

SEQ ID NO: 1290530 - DNA, 25 bp, Homo sapien
tgtgctacatagtcgtgtgaacgtg

SEQ ID NO: 1290531 - DNA, 25 bp, Homo sapien
aggactatggcttctctactcaaag

SEQ ID NO: 1290532 - DNA, 25 bp, Homo sapien
gctgaaggactatggcttctctact

SEQ ID NO: 1290533 - DNA, 25 bp, Homo sapien
ggaaggccaggtggtgccttatcac

SEQ ID NO: 1290534 - DNA, 25 bp, Homo sapien
gaaggccaggtggtgccttatcact

SEQ ID NO: 1290535 - DNA, 25 bp, Homo sapien
ctgcttccatcagcacctcgttgag

SEQ ID NO: 1290536 - DNA, 25 bp, Homo sapien
tgaggcatgtagttgaaagtaagtt

SEQ ID NO: 1290537 - DNA, 25 bp, Homo sapien
tactgctggaatgaggcatgtagtt

SEQ ID NO: 1290538 - DNA, 25 bp, Homo sapien
gaaagtaagttgaagtagtcgaata

SEQ ID NO: 1290539 - DNA, 25 bp, Homo sapien
ggggcatggtggcttttgatcttct

SEQ ID NO: 1290540 - DNA, 25 bp, Homo sapien
gggcatggtggcttttgatcttctt

SEQ ID NO: 1290541 - DNA, 25 bp, Homo sapien
ctggggcatggtggcttttgatctt

SEQ ID NO: 1290542 - DNA, 25 bp, Homo sapien
tgatcttcttccccttcttggtact

SEQ ID NO: 1290543 - DNA, 25 bp, Homo sapien
ggctggcatgaatcaggcagttctg

SEQ ID NO: 1290544 - DNA, 25 bp, Homo sapien
gaggatacagcttttgaagtatggt

SEQ ID NO: 1290545 - DNA, 25 bp, Homo sapien
atacagcttttgaagtatggtcgac

SEQ ID NO: 1290546 - DNA, 25 bp, Homo sapien
catgaggatacagcttttgaagtat

SEQ ID NO: 1290547 - DNA, 25 bp, Homo sapien
ggatacagcttttgaagtatggtcg

SEQ ID NO: 1290548 - DNA, 25 bp, Homo sapien
tggtcttcttcctcttcttggtcct

SEQ ID NO: 1290549 - DNA, 25 bp, Homo sapien
gtgggccttggtcttcttcctcttc

SEQ ID NO: 1290550 - DNA, 25 bp, Homo sapien
caataaggaccacttggaacaggaa

SEQ ID NO: 1290551 - DNA, 25 bp, Homo sapien
gggtcaataaggaccacttggaaca

SEQ ID NO: 1290552 - DNA, 25 bp, Homo sapien
gacatctctcgggtcaataaggacc

SEQ ID NO: 1290553 - DNA, 25 bp, Homo sapien
gaacaggaatatcacccatatctgg

SEQ ID NO: 1290554 - DNA, 25 bp, Homo sapien
actacttcccggtccgcgagctgga

SEQ ID NO: 1290555 - DNA, 25 bp, Homo sapien
tcgtgcagaacgtacgcctcgaggt

SEQ ID NO: 1290556 - DNA, 25 bp, Homo sapien
cttcgacatgaagggcgacgacgtg

SEQ ID NO: 1290557 - DNA, 25 bp, Homo sapien
gacgacgtgatcgtcttcctgcaca

SEQ ID NO: 1290558 - DNA, 25 bp, Homo sapien
aaccgccgcgagacttggctcttct

SEQ ID NO: 1290559 - DNA, 25 bp, Homo sapien
caaccgccgcgagacttggctcttc

SEQ ID NO: 1290560 - DNA, 25 bp, Homo sapien
cccaaccgccgcgagacttggctct

SEQ ID NO: 1290561 - DNA, 25 bp, Homo sapien
ggcccaaccgccgcgagacttggct

SEQ ID NO: 1290562 - DNA, 25 bp, Homo sapien
accaactgcgtgcccggcgtgctgg

SEQ ID NO: 1290563 - DNA, 25 bp, Homo sapien
ccaactgcgtgcccggcgtgctgga

SEQ ID NO: 1290564 - DNA, 25 bp, Homo sapien
caccaactgcgtgcccggcgtgctg

SEQ ID NO: 1290565 - DNA, 25 bp, Homo sapien
tatgtgtgtatgagaaggaaagggg

SEQ ID NO: 1290566 - DNA, 25 bp, Homo sapien
gcaaagctgtggggaacggttgagg

SEQ ID NO: 1290567 - DNA, 25 bp, Homo sapien
caaagctgtggggaacggttgaggg

SEQ ID NO: 1290568 - DNA, 25 bp, Homo sapien
caccgatgctcttcgtttgaagatg

SEQ ID NO: 1290569 - DNA, 25 bp, Homo sapien
tttgaagatgcacggtcagttcccc

SEQ ID NO: 1290570 - DNA, 25 bp, Homo sapien
tgttgatgaaactgccatggacagc

SEQ ID NO: 1290571 - DNA, 25 bp, Homo sapien
cagtgtcttggcaatcatggtgaca

SEQ ID NO: 1290572 - DNA, 25 bp, Homo sapien
ggcgtgatgttcacgaaggtttttc

SEQ ID NO: 1290573 - DNA, 25 bp, Homo sapien
tggcgtgatgttcacgaaggttttt

SEQ ID NO: 1290574 - DNA, 25 bp, Homo sapien
ctggcgtgatgttcacgaaggtttt

SEQ ID NO: 1290575 - DNA, 25 bp, Homo sapien
gcgtgatgttcacgaaggtttttcc

SEQ ID NO: 1290576 - DNA, 25 bp, Homo sapien
tggccgcgaacctaacaggtcccat

SEQ ID NO: 1290577 - DNA, 25 bp, Homo sapien
acgatggccgcgaacctaacaggtc

SEQ ID NO: 1290578 - DNA, 25 bp, Homo sapien
cacgatggccgcgaacctaacaggt

SEQ ID NO: 1290579 - DNA, 25 bp, Homo sapien
gatggccgcgaacctaacaggtccc

SEQ ID NO: 1290580 - DNA, 25 bp, Homo sapien
gccgttgcgcggctgcgggggctcc

SEQ ID NO: 1290581 - DNA, 25 bp, Homo sapien
ctcctctggtcgctgctgctggggc

SEQ ID NO: 1290582 - DNA, 25 bp, Homo sapien
ctggccgttgcgcggctgcgggggc

SEQ ID NO: 1290583 - DNA, 25 bp, Homo sapien
cgggggctcctctggtcgctgctgc

SEQ ID NO: 1290584 - DNA, 25 bp, Homo sapien
gcaggcactgccgtcctcaccacgg

SEQ ID NO: 1290585 - DNA, 25 bp, Homo sapien
cgtgcaggcactgccgtcctcacca

SEQ ID NO: 1290586 - DNA, 25 bp, Homo sapien
actgccgtcctcaccacggctctgc

SEQ ID NO: 1290587 - DNA, 25 bp, Homo sapien
aggcactgccgtcctcaccacggct

SEQ ID NO: 1290588 - DNA, 25 bp, Homo sapien
tcttgccatgttctgttagtggaat

SEQ ID NO: 1290589 - DNA, 25 bp, Homo sapien
aaatcaatggtgttagtccaaccca

SEQ ID NO: 1290590 - DNA, 25 bp, Homo sapien
cccaacgaaatagatatcaaaccac

SEQ ID NO: 1290591 - DNA, 25 bp, Homo sapien
aaccgtgaccataaccttgatcttg

SEQ ID NO: 1290592 - DNA, 25 bp, Homo sapien
tgaacgtatcaactgcaggctcact

SEQ ID NO: 1290593 - DNA, 25 bp, Homo sapien
ggtagattcccacgcaggcaataat

SEQ ID NO: 1290594 - DNA, 25 bp, Homo sapien
agtcagtagcctgtcccgcctcttt

SEQ ID NO: 1290595 - DNA, 25 bp, Homo sapien
cagtcccctgctggtctgttagcca

SEQ ID NO: 1290596 - DNA, 25 bp, Homo sapien
gggcttgaagcaggagaggtacggg

SEQ ID NO: 1290597 - DNA, 25 bp, Homo sapien
gtaaggattcgacgctgccccgcgc

SEQ ID NO: 1290598 - DNA, 25 bp, Homo sapien
tcccacgcgcttgtgcctggacgga

SEQ ID NO: 1290599 - DNA, 25 bp, Homo sapien
accctcgccagtgctctgcgcaggt

SEQ ID NO: 1290600 - DNA, 25 bp, Homo sapien
ggacgtggtccatccccttctgcat

SEQ ID NO: 1290601 - DNA, 25 bp, Homo sapien
gtgtcgggcacacaataggtcttct

SEQ ID NO: 1290602 - DNA, 25 bp, Homo sapien
taggtcttctgatcaccatctgtgg

SEQ ID NO: 1290603 - DNA, 25 bp, Homo sapien
gggataggcgccaatcatgatctga

SEQ ID NO: 1290604 - DNA, 25 bp, Homo sapien
ggagccccgaatctgctggaggaaa

SEQ ID NO: 1290605 - DNA, 25 bp, Homo sapien
ccaggttggccactggcagcaggcc

SEQ ID NO: 1290606 - DNA, 25 bp, Homo sapien
ctccaggttggccactggcagcagg

SEQ ID NO: 1290607 - DNA, 25 bp, Homo sapien
tgctccaggttggccactggcagca

SEQ ID NO: 1290608 - DNA, 25 bp, Homo sapien
ctctgctccaggttggccactggca

SEQ ID NO: 1290609 - DNA, 25 bp, Homo sapien
aatgcatggcccatagacttggctg

SEQ ID NO: 1290610 - DNA, 25 bp, Homo sapien
ccagactattcctgtgatggaggca

SEQ ID NO: 1290611 - DNA, 25 bp, Homo sapien
tccagccaccgagggtaaaatacag

SEQ ID NO: 1290612 - DNA, 25 bp, Homo sapien
cctcttggaggaaacggatgctttc

SEQ ID NO: 1290613 - DNA, 25 bp, Homo sapien
agtggagagccgtagaaacttctgc

SEQ ID NO: 1290614 - DNA, 25 bp, Homo sapien
gcagtggagagccgtagaaacttct

SEQ ID NO: 1290615 - DNA, 25 bp, Homo sapien
agtgcagtggagagccgtagaaact

SEQ ID NO: 1290616 - DNA, 25 bp, Homo sapien
gtggagagccgtagaaacttctgca

SEQ ID NO: 1290617 - DNA, 25 bp, Homo sapien
aagaccggccgggcagaaacactgt

SEQ ID NO: 1290618 - DNA, 25 bp, Homo sapien
agaccggccgggcagaaacactgta

SEQ ID NO: 1290619 - DNA, 25 bp, Homo sapien
aaagaccggccgggcagaaacactg

SEQ ID NO: 1290620 - DNA, 25 bp, Homo sapien
atgtgacctcttcaccatggccaag

SEQ ID NO: 1290621 - DNA, 25 bp, Homo sapien
caccatggccaagtggacctccatt

SEQ ID NO: 1290622 - DNA, 25 bp, Homo sapien
ccatggccaagtggacctccatttt

SEQ ID NO: 1290623 - DNA, 25 bp, Homo sapien
catggccaagtggacctccattttc

SEQ ID NO: 1290624 - DNA, 25 bp, Homo sapien
tgtggatcatccattctccttgctg

SEQ ID NO: 1290625 - DNA, 25 bp, Homo sapien
gcctgccgtagatggaggcagtttt

SEQ ID NO: 1290626 - DNA, 25 bp, Homo sapien
gccattataaacagggctgatgtgc

SEQ ID NO: 1290627 - DNA, 25 bp, Homo sapien
cacaatgtattatccagcctgccgt

SEQ ID NO: 1290628 - DNA, 25 bp, Homo sapien
gtgttgtataagttatctgttgctg

SEQ ID NO: 1290629 - DNA, 25 bp, Homo sapien
ggctggagacaacccctgggttgtc

SEQ ID NO: 1290630 - DNA, 25 bp, Homo sapien
tgagcatgacatgaacttgtgttgt

SEQ ID NO: 1290631 - DNA, 25 bp, Homo sapien
aacccctgggttgtcatgagcatga

SEQ ID NO: 1290632 - DNA, 25 bp, Homo sapien
cgaaaaaacttaggccaggtgcaat

SEQ ID NO: 1290633 - DNA, 25 bp, Homo sapien
tgtaatcctagcactttgggaggcc

SEQ ID NO: 1290634 - DNA, 25 bp, Homo sapien
caaggcaggttgatcacttgagccc

SEQ ID NO: 1290635 - DNA, 25 bp, Homo sapien
ggctcgcgcctgtaatcctagcact

SEQ ID NO: 1290636 - DNA, 25 bp, Homo sapien
gaatggctgcgtaaaatgcctaggc

SEQ ID NO: 1290637 - DNA, 25 bp, Homo sapien
tctggcctccgtcaggttgaatggc

SEQ ID NO: 1290638 - DNA, 25 bp, Homo sapien
tgattacacatctggactttgcagc

SEQ ID NO: 1290639 - DNA, 25 bp, Homo sapien
taggacgagtcacacctgaattcac

SEQ ID NO: 1290640 - DNA, 25 bp, Homo sapien
gcgactctcctgtttggaacggcaa

SEQ ID NO: 1290641 - DNA, 25 bp, Homo sapien
tgagcgtcctgttctgagggcccag

SEQ ID NO: 1290642 - DNA, 25 bp, Homo sapien
ctgaagcctccgtggaacattctgg

SEQ ID NO: 1290643 - DNA, 25 bp, Homo sapien
gaacgtatttctccagacccagagg

SEQ ID NO: 1290644 - DNA, 25 bp, Homo sapien
tactgaggggaattcagagggaaac

SEQ ID NO: 1290645 - DNA, 25 bp, Homo sapien
ctactgaggggaattcagagggaaa

SEQ ID NO: 1290646 - DNA, 25 bp, Homo sapien
actgaggggaattcagagggaaacg

SEQ ID NO: 1290647 - DNA, 25 bp, Homo sapien
gagtcaccacgtgccgattctctgc

SEQ ID NO: 1290648 - DNA, 25 bp, Homo sapien
attctctgctcctagggtcggggcc

SEQ ID NO: 1290649 - DNA, 25 bp, Homo sapien
tcatctgcggactccttgatcttga

SEQ ID NO: 1290650 - DNA, 25 bp, Homo sapien
gggtgagtcaccacgtgccgattct

SEQ ID NO: 1290651 - DNA, 25 bp, Homo sapien
gcctgcaggtgtgtcatcggcctcc

SEQ ID NO: 1290652 - DNA, 25 bp, Homo sapien
tggatccccaagtcagcccgggctt

SEQ ID NO: 1290653 - DNA, 25 bp, Homo sapien
aagtcagcccgggcttgaccacgct

SEQ ID NO: 1290654 - DNA, 25 bp, Homo sapien
tgcaggtgtgtcatcggcctccagc

SEQ ID NO: 1290655 - DNA, 25 bp, Homo sapien
ctgcccagaaacaaggacccctcac

SEQ ID NO: 1290656 - DNA, 25 bp, Homo sapien
tccaggggtcccctgtctcgtccaa

SEQ ID NO: 1290657 - DNA, 25 bp, Homo sapien
ctgtctcgtccaacaccccgctagg

SEQ ID NO: 1290658 - DNA, 25 bp, Homo sapien
aacaccccgctagggcacagggcac

SEQ ID NO: 1290659 - DNA, 25 bp, Homo sapien
tccaacaccccgctagggcacaggg

SEQ ID NO: 1290660 - DNA, 25 bp, Homo sapien
gaccccacctcggagcttggaggga

SEQ ID NO: 1290661 - DNA, 25 bp, Homo sapien
gatgcggtagggtgaaacccagccc

SEQ ID NO: 1290662 - DNA, 25 bp, Homo sapien
agagaaatagcaccggacactttga

SEQ ID NO: 1290663 - DNA, 25 bp, Homo sapien
tttgatcccagaggcccgatccgtt

SEQ ID NO: 1290664 - DNA, 25 bp, Homo sapien
gagggacttggactcatccccgtct

SEQ ID NO: 1290665 - DNA, 25 bp, Homo sapien
ctgtgagatcctggtagagggactt

SEQ ID NO: 1290666 - DNA, 25 bp, Homo sapien
ggcgccgccttgtggccatatcagg

SEQ ID NO: 1290667 - DNA, 25 bp, Homo sapien
cgtaagtggtcccttggcgccgcct

SEQ ID NO: 1290668 - DNA, 25 bp, Homo sapien
ttgtagcagacatgcccagagaggg

SEQ ID NO: 1290669 - DNA, 25 bp, Homo sapien
tgacgcctaaaaagtgtgaccagac

SEQ ID NO: 1290670 - DNA, 25 bp, Homo sapien
cctgcagagacagcccagatgggtg

SEQ ID NO: 1290671 - DNA, 25 bp, Homo sapien
tgatcccaggtctggacggctctgc

SEQ ID NO: 1290672 - DNA, 25 bp, Homo sapien
ccatcaaatcctccaacaatgcaag

SEQ ID NO: 1290673 - DNA, 25 bp, Homo sapien
ccaagtccctttcacactcccatca

SEQ ID NO: 1290674 - DNA, 25 bp, Homo sapien
atcctccaacaatgcaagggcagag

SEQ ID NO: 1290675 - DNA, 25 bp, Homo sapien
tggcaactgccaagtccctttcaca

SEQ ID NO: 1290676 - DNA, 25 bp, Homo sapien
gctcagtttcaccttcagagggggt

SEQ ID NO: 1290677 - DNA, 25 bp, Homo sapien
tcagtttcaccttcagagggggtgg

SEQ ID NO: 1290678 - DNA, 25 bp, Homo sapien
cagtttcaccttcagagggggtggc

SEQ ID NO: 1290679 - DNA, 25 bp, Homo sapien
ctgctcagtttcaccttcagagggg

SEQ ID NO: 1290680 - DNA, 25 bp, Homo sapien
cagctggatcttgatctcgggacac

SEQ ID NO: 1290681 - DNA, 25 bp, Homo sapien
gcatgtgctgctcagatgcttccag

SEQ ID NO: 1290682 - DNA, 25 bp, Homo sapien
ttgatctcgggacacgcagggtccc

SEQ ID NO: 1290683 - DNA, 25 bp, Homo sapien
gggcatgtgctgctcagatgcttcc

SEQ ID NO: 1290684 - DNA, 25 bp, Homo sapien
gaggggggcaggagggagccacctc

SEQ ID NO: 1290685 - DNA, 25 bp, Homo sapien
aggggggcaggagggagccacctca

SEQ ID NO: 1290686 - DNA, 25 bp, Homo sapien
tggggaggggggcaggagggagcca

SEQ ID NO: 1290687 - DNA, 25 bp, Homo sapien
cctccagccacgtgctatagatgaa

SEQ ID NO: 1290688 - DNA, 25 bp, Homo sapien
tatagatgaaggagtcccgcttgtg

SEQ ID NO: 1290689 - DNA, 25 bp, Homo sapien
cacgtgctatagatgaaggagtccc

SEQ ID NO: 1290690 - DNA, 25 bp, Homo sapien
ggagctgcccccactagtggtgctg

SEQ ID NO: 1290691 - DNA, 25 bp, Homo sapien
caggcctgtgtcctctccgtccaca

SEQ ID NO: 1290692 - DNA, 25 bp, Homo sapien
tccgtccacaccctccgtctcctcc

SEQ ID NO: 1290693 - DNA, 25 bp, Homo sapien
tccacaccctccgtctcctccacca

SEQ ID NO: 1290694 - DNA, 25 bp, Homo sapien
caccacgctggcgaagctgctggca

SEQ ID NO: 1290695 - DNA, 25 bp, Homo sapien
ggagaagtccttgagcgcctctgct

SEQ ID NO: 1290696 - DNA, 25 bp, Homo sapien
aggagcgggagaagtccttgagcgc

SEQ ID NO: 1290697 - DNA, 25 bp, Homo sapien
gcgggagaagtccttgagcgcctct

SEQ ID NO: 1290698 - DNA, 25 bp, Homo sapien
agaagtccttgagcgcctctgctct

SEQ ID NO: 1290699 - DNA, 25 bp, Homo sapien
agttctccgacttgggctcctgtga

SEQ ID NO: 1290700 - DNA, 25 bp, Homo sapien
tgttcttggtcgtgggcatctctgg

SEQ ID NO: 1290701 - DNA, 25 bp, Homo sapien
gtcttctgaccagccggagggctct

SEQ ID NO: 1290702 - DNA, 25 bp, Homo sapien
ctcctgtgagacgtgcccgctgtct

SEQ ID NO: 1290703 - DNA, 25 bp, Homo sapien
tatgttctcgatgccaatggcgctg

SEQ ID NO: 1290704 - DNA, 25 bp, Homo sapien
acctcctgtatgttctcgatgccaa

SEQ ID NO: 1290705 - DNA, 25 bp, Homo sapien
tcctgcacctcctgtatgttctcga

SEQ ID NO: 1290706 - DNA, 25 bp, Homo sapien
tctcgatgccaatggcgctgctgcg

SEQ ID NO: 1290707 - DNA, 25 bp, Homo sapien
aactcagtgccaccttacctgggag

SEQ ID NO: 1290708 - DNA, 25 bp, Homo sapien
ggggagaggccccaactcagtgcca

SEQ ID NO: 1290709 - DNA, 25 bp, Homo sapien
cacatcccctctggggatcctgctg

SEQ ID NO: 1290710 - DNA, 25 bp, Homo sapien
gaggccccaactcagtgccacctta

SEQ ID NO: 1290711 - DNA, 25 bp, Homo sapien
gagggcagtgtagcaacccaagtcc

SEQ ID NO: 1290712 - DNA, 25 bp, Homo sapien
gagacagcctcccagtttacgaaag

SEQ ID NO: 1290713 - DNA, 25 bp, Homo sapien
ctggcccaggattaggacagcatcc

SEQ ID NO: 1290714 - DNA, 25 bp, Homo sapien
gactgcacgtcaatactggcccagg

SEQ ID NO: 1290715 - DNA, 25 bp, Homo sapien
ccaggtcacttcgtggcggggagga

SEQ ID NO: 1290716 - DNA, 25 bp, Homo sapien
gaggagagggatggcgctccatgca

SEQ ID NO: 1290717 - DNA, 25 bp, Homo sapien
aggtcacttcgtggcggggaggagg

SEQ ID NO: 1290718 - DNA, 25 bp, Homo sapien
ccccaggtcacttcgtggcggggag

SEQ ID NO: 1290719 - DNA, 25 bp, Homo sapien
gggtaccggatcctggcagggactg

SEQ ID NO: 1290720 - DNA, 25 bp, Homo sapien
tttgggtaccggatcctggcaggga

SEQ ID NO: 1290721 - DNA, 25 bp, Homo sapien
cgatattgggggacgtgcggctggg

SEQ ID NO: 1290722 - DNA, 25 bp, Homo sapien
ggcctttgggtaccggatcctggca

SEQ ID NO: 1290723 - DNA, 25 bp, Homo sapien
ggagctgccgccactccatcccgca

SEQ ID NO: 1290724 - DNA, 25 bp, Homo sapien
gcaacgtccccaatatggcctccgt

SEQ ID NO: 1290725 - DNA, 25 bp, Homo sapien
caggtgctgagtgccatcggagctg

SEQ ID NO: 1290726 - DNA, 25 bp, Homo sapien
ggcagaggggcaacgtccccaatat

SEQ ID NO: 1290727 - DNA, 25 bp, Homo sapien
ctgagagcgagcagagaacagcgcg

SEQ ID NO: 1290728 - DNA, 25 bp, Homo sapien
gagcagagaacagcgcgtgcaggca

SEQ ID NO: 1290729 - DNA, 25 bp, Homo sapien
gagcgagcagagaacagcgcgtgca

SEQ ID NO: 1290730 - DNA, 25 bp, Homo sapien
tgagagcgagcagagaacagcgcgt

SEQ ID NO: 1290731 - DNA, 25 bp, Homo sapien
tatgcctatggcactgccccggcgt

SEQ ID NO: 1290732 - DNA, 25 bp, Homo sapien
tcttccacggttcctatgcctatgg

SEQ ID NO: 1290733 - DNA, 25 bp, Homo sapien
cggcgtccgaatctactcgcacttt

SEQ ID NO: 1290734 - DNA, 25 bp, Homo sapien
gaatctactcgcacttttcccagga

SEQ ID NO: 1290735 - DNA, 25 bp, Homo sapien
taggcgctcacagagttgatgccca

SEQ ID NO: 1290736 - DNA, 25 bp, Homo sapien
cagtaggcgctcacagagttgatgc

SEQ ID NO: 1290737 - DNA, 25 bp, Homo sapien
cagcccagggctgcgcacacagtag

SEQ ID NO: 1290738 - DNA, 25 bp, Homo sapien
ggcgctcacagagttgatgcccaca

SEQ ID NO: 1290739 - DNA, 25 bp, Homo sapien
ccatggactggctgcggctccggat

SEQ ID NO: 1290740 - DNA, 25 bp, Homo sapien
ttgttgggcgcgaagctcccgctgt

SEQ ID NO: 1290741 - DNA, 25 bp, Homo sapien
tggacacggtgttgggcttcttgtt

SEQ ID NO: 1290742 - DNA, 25 bp, Homo sapien
cgccttggccaggtcggggttgttg

SEQ ID NO: 1290743 - DNA, 25 bp, Homo sapien
aggtgtgaccagccggccgggaagc

SEQ ID NO: 1290744 - DNA, 25 bp, Homo sapien
gaggtgtgaccagccggccgggaag

SEQ ID NO: 1290745 - DNA, 25 bp, Homo sapien
ggtgtgaccagccggccgggaagct

SEQ ID NO: 1290746 - DNA, 25 bp, Homo sapien
tgaggtgtgaccagccggccgggaa

SEQ ID NO: 1290747 - DNA, 25 bp, Homo sapien
tgtgtagttcctcatagagcgtctc

SEQ ID NO: 1290748 - DNA, 25 bp, Homo sapien
gatgtgtagttcctcatagagcgtc

SEQ ID NO: 1290749 - DNA, 25 bp, Homo sapien
agttcctcatagagcgtctccagga

SEQ ID NO: 1290750 - DNA, 25 bp, Homo sapien
tgtagttcctcatagagcgtctcca

SEQ ID NO: 1290751 - DNA, 25 bp, Homo sapien
ctttgtcagcaaaaattcctggaac

SEQ ID NO: 1290752 - DNA, 25 bp, Homo sapien
tagcaggcatattcagcattgatca

SEQ ID NO: 1290753 - DNA, 25 bp, Homo sapien
tgtagcaggcatattcagcattgat

SEQ ID NO: 1290754 - DNA, 25 bp, Homo sapien
tcagcattgatcagctttgtcagca

SEQ ID NO: 1290755 - DNA, 25 bp, Homo sapien
tccaaagaagggcacatcatctctt

SEQ ID NO: 1290756 - DNA, 25 bp, Homo sapien
cctgaacacagcggggtccgggagg

SEQ ID NO: 1290757 - DNA, 25 bp, Homo sapien
ccaaagaagggcacatcatctcttg

SEQ ID NO: 1290758 - DNA, 25 bp, Homo sapien
ctgaacacagcggggtccgggaggg

SEQ ID NO: 1290759 - DNA, 25 bp, Homo sapien
cgggcacgaaaggagtgttctcatc

SEQ ID NO: 1290760 - DNA, 25 bp, Homo sapien
gatgtcgttcccgatgtgccgcttc

SEQ ID NO: 1290761 - DNA, 25 bp, Homo sapien
tcagcctgcaccacgacgtaggcat

SEQ ID NO: 1290762 - DNA, 25 bp, Homo sapien
tgcaggaagttggacgcgatcatgt

SEQ ID NO: 1290763 - DNA, 25 bp, Homo sapien
tgttgcggaagttgcagtacacaga

SEQ ID NO: 1290764 - DNA, 25 bp, Homo sapien
tgcagtacacagattcggtccccgt

SEQ ID NO: 1290765 - DNA, 25 bp, Homo sapien
tatggcagcttggtggacacgtgaa

SEQ ID NO: 1290766 - DNA, 25 bp, Homo sapien
tgggcgtccccttccgtgtatggca

SEQ ID NO: 1290767 - DNA, 25 bp, Homo sapien
aaagcgggactttcctcattggtgc

SEQ ID NO: 1290768 - DNA, 25 bp, Homo sapien
tcaaggaactccacgaaagcgggac

SEQ ID NO: 1290769 - DNA, 25 bp, Homo sapien
agaaattcaaggaactccacgaaag

SEQ ID NO: 1290770 - DNA, 25 bp, Homo sapien
cctcattggtgctgaagagttcttc

SEQ ID NO: 1290771 - DNA, 25 bp, Homo sapien
ctcgtcaaaggtgacgatgagccgg

SEQ ID NO: 1290772 - DNA, 25 bp, Homo sapien
aatgacgccaaacttgaagttattg

SEQ ID NO: 1290773 - DNA, 25 bp, Homo sapien
cttgaagttattgctgatgacatgc

SEQ ID NO: 1290774 - DNA, 25 bp, Homo sapien
tgctgatgacatgctcgtcaaaggt

SEQ ID NO: 1290775 - DNA, 25 bp, Homo sapien
tgctcagtcttccagttactcaccc

SEQ ID NO: 1290776 - DNA, 25 bp, Homo sapien
agagaaccttgggaaagtatctggc

SEQ ID NO: 1290777 - DNA, 25 bp, Homo sapien
gaaccttgggaaagtatctggcaca

SEQ ID NO: 1290778 - DNA, 25 bp, Homo sapien
tccagttactcacccaccctcagtg

SEQ ID NO: 1290779 - DNA, 25 bp, Homo sapien
accgatccacattgacgtcttcaca

SEQ ID NO: 1290780 - DNA, 25 bp, Homo sapien
gagcacaggatagaaccgatccaca

SEQ ID NO: 1290781 - DNA, 25 bp, Homo sapien
ggtagagcacaggatagaaccgatc

SEQ ID NO: 1290782 - DNA, 25 bp, Homo sapien
gatagaaccgatccacattgacgtc

SEQ ID NO: 1290783 - DNA, 25 bp, Homo sapien
ggatgacatcatggtatgtccggca

SEQ ID NO: 1290784 - DNA, 25 bp, Homo sapien
ctttgccatctggacaacattaggg

SEQ ID NO: 1290785 - DNA, 25 bp, Homo sapien
caacattagggaactcggtgaggca

SEQ ID NO: 1290786 - DNA, 25 bp, Homo sapien
catcatggtatgtccggcacttggt

SEQ ID NO: 1290787 - DNA, 25 bp, Homo sapien
agccgcaggtgctcttggtccccga

SEQ ID NO: 1290788 - DNA, 25 bp, Homo sapien
tgagaagacaaggtggccgagggca

SEQ ID NO: 1290789 - DNA, 25 bp, Homo sapien
ccgatgacatcgtacttgagtgaga

SEQ ID NO: 1290790 - DNA, 25 bp, Homo sapien
tccagtgagtagtaattgaaatgct

SEQ ID NO: 1290791 - DNA, 25 bp, Homo sapien
tctgccaaataggagggaaccctgt

SEQ ID NO: 1290792 - DNA, 25 bp, Homo sapien
tccttcgccgatagcaggtgtcacg

SEQ ID NO: 1290793 - DNA, 25 bp, Homo sapien
catcagacagacctgcactcaaagc

SEQ ID NO: 1290794 - DNA, 25 bp, Homo sapien
gtgtcacggctgatagcagacccca

SEQ ID NO: 1290795 - DNA, 25 bp, Homo sapien
gctgtggggttgcactcgagcttca

SEQ ID NO: 1290796 - DNA, 25 bp, Homo sapien
aaagtgcttccggtagatgcgggct

SEQ ID NO: 1290797 - DNA, 25 bp, Homo sapien
tcaccttggttgtgggcgactgcag

SEQ ID NO: 1290798 - DNA, 25 bp, Homo sapien
gttggtgccctcaatccagtagccc

SEQ ID NO: 1290799 - DNA, 25 bp, Homo sapien
gatgagggggaagggtccttctcgc

SEQ ID NO: 1290800 - DNA, 25 bp, Homo sapien
ctcgggtatggaatgtagtcctcct

SEQ ID NO: 1290801 - DNA, 25 bp, Homo sapien
tgcacgctcgggtatggaatgtagt

SEQ ID NO: 1290802 - DNA, 25 bp, Homo sapien
ctcgtgcacgctcgggtatggaatg

SEQ ID NO: 1290803 - DNA, 25 bp, Homo sapien
cacgctcgggtatggaatgtagtcc

SEQ ID NO: 1290804 - DNA, 25 bp, Homo sapien
gagcagcgttgttcatccatcctgc

SEQ ID NO: 1290805 - DNA, 25 bp, Homo sapien
cagcgttgttcatccatcctgcttc

SEQ ID NO: 1290806 - DNA, 25 bp, Homo sapien
ggagcagcgttgttcatccatcctg

SEQ ID NO: 1290807 - DNA, 25 bp, Homo sapien
gaaggagcagcgttgttcatccatc

SEQ ID NO: 1290808 - DNA, 25 bp, Homo sapien
ggccgggtggcaccgcgggccgcag

SEQ ID NO: 1290809 - DNA, 25 bp, Homo sapien
tccgggccccgcagcgctgagctcc

SEQ ID NO: 1290810 - DNA, 25 bp, Homo sapien
gccggggcggcacttcagctggccc

SEQ ID NO: 1290811 - DNA, 25 bp, Homo sapien
cccgccggggcggcacttcagctgg

SEQ ID NO: 1290812 - DNA, 25 bp, Homo sapien
agcgctgagctccgcgctcccggct

SEQ ID NO: 1290813 - DNA, 25 bp, Homo sapien
tgagaagccggttccaagaggtgaa

SEQ ID NO: 1290814 - DNA, 25 bp, Homo sapien
atgagaagccggttccaagaggtga

SEQ ID NO: 1290815 - DNA, 25 bp, Homo sapien
cagatgagaagccggttccaagagg

SEQ ID NO: 1290816 - DNA, 25 bp, Homo sapien
gatgagaagccggttccaagaggtg

SEQ ID NO: 1290817 - DNA, 25 bp, Homo sapien
cactcgtgacaggtctagtgcctga

SEQ ID NO: 1290818 - DNA, 25 bp, Homo sapien
gggaactaagttcactcgtgacagg

SEQ ID NO: 1290819 - DNA, 25 bp, Homo sapien
gagtataggagggaactaagttcac

SEQ ID NO: 1290820 - DNA, 25 bp, Homo sapien
gtctagtgcctgagggaagtgctgg

SEQ ID NO: 1290821 - DNA, 25 bp, Homo sapien
gacacttttcctgggagtcggcacc

SEQ ID NO: 1290822 - DNA, 25 bp, Homo sapien
gggtgttccgcagctctgcctggtg

SEQ ID NO: 1290823 - DNA, 25 bp, Homo sapien
cacttttcctgggagtcggcaccgg

SEQ ID NO: 1290824 - DNA, 25 bp, Homo sapien
ggagtcggcaccgggtgttccgcag

SEQ ID NO: 1290825 - DNA, 25 bp, Homo sapien
atggatttacctgttgcgtttgcac

SEQ ID NO: 1290826 - DNA, 25 bp, Homo sapien
tcttgggccttcatggatttacctg

SEQ ID NO: 1290827 - DNA, 25 bp, Homo sapien
tacctgttgcgtttgcacatttcat

SEQ ID NO: 1290828 - DNA, 25 bp, Homo sapien
cttgggccttcatggatttacctgt

SEQ ID NO: 1290829 - DNA, 25 bp, Homo sapien
tttgaaattcagtggacctggccgg

SEQ ID NO: 1290830 - DNA, 25 bp, Homo sapien
ttttccagccatacagcgcagggtg

SEQ ID NO: 1290831 - DNA, 25 bp, Homo sapien
catgaacgtgggcaaagtgctctga

SEQ ID NO: 1290832 - DNA, 25 bp, Homo sapien
ggttcataacggtcttgcctcacag

SEQ ID NO: 1290833 - DNA, 25 bp, Homo sapien
ctcagtgactgccataaggagccac

SEQ ID NO: 1290834 - DNA, 25 bp, Homo sapien
cagagccactaatgaggccagcctt

SEQ ID NO: 1290835 - DNA, 25 bp, Homo sapien
cccatcccatacactgccagctgcc

SEQ ID NO: 1290836 - DNA, 25 bp, Homo sapien
ctgcccaccagatgcataatagatg

SEQ ID NO: 1290837 - DNA, 25 bp, Homo sapien
cactccggcgagaagtgaaggactt

SEQ ID NO: 1290838 - DNA, 25 bp, Homo sapien
tccggcgagaagtgaaggacttgtc

SEQ ID NO: 1290839 - DNA, 25 bp, Homo sapien
acacactccggcgagaagtgaagga

SEQ ID NO: 1290840 - DNA, 25 bp, Homo sapien
cacactccggcgagaagtgaaggac

SEQ ID NO: 1290841 - DNA, 25 bp, Homo sapien
taggccccgaaggtgaagctgcgct

SEQ ID NO: 1290842 - DNA, 25 bp, Homo sapien
gccgtaggccccgaaggtgaagctg

SEQ ID NO: 1290843 - DNA, 25 bp, Homo sapien
ggccccgaaggtgaagctgcgcttc

SEQ ID NO: 1290844 - DNA, 25 bp, Homo sapien
aaggtgaagctgcgcttccggccgc

SEQ ID NO: 1290845 - DNA, 25 bp, Homo sapien
tagacacgaagaaattgagatcctc

SEQ ID NO: 1290846 - DNA, 25 bp, Homo sapien
gcagtttccccattttagacacgaa

SEQ ID NO: 1290847 - DNA, 25 bp, Homo sapien
ttctctgcacattctggtgggtgca

SEQ ID NO: 1290848 - DNA, 25 bp, Homo sapien
tcacaccaattacttctctcttggg

SEQ ID NO: 1290849 - DNA, 25 bp, Homo sapien
ggtggcctcggttggcagaggtatt

SEQ ID NO: 1290850 - DNA, 25 bp, Homo sapien
tggcctcggttggcagaggtattaa

SEQ ID NO: 1290851 - DNA, 25 bp, Homo sapien
tgcttcctccgaatgggggtccgag

SEQ ID NO: 1290852 - DNA, 25 bp, Homo sapien
ctgcttcctccgaatgggggtccga

SEQ ID NO: 1290853 - DNA, 25 bp, Homo sapien
gtccacatggaccactccaccacgg

SEQ ID NO: 1290854 - DNA, 25 bp, Homo sapien
atggaccactccaccacggcgttca

SEQ ID NO: 1290855 - DNA, 25 bp, Homo sapien
ggtccacatggaccactccaccacg

SEQ ID NO: 1290856 - DNA, 25 bp, Homo sapien
cacatggaccactccaccacggcgt

SEQ ID NO: 1290857 - DNA, 25 bp, Homo sapien
caggtgtgcgtacacaaggtttctt

SEQ ID NO: 1290858 - DNA, 25 bp, Homo sapien
gtgcgtacacaaggtttcttcccca

SEQ ID NO: 1290859 - DNA, 25 bp, Homo sapien
gtgcaggtgtgcgtacacaaggttt

SEQ ID NO: 1290860 - DNA, 25 bp, Homo sapien
ggtgtgcgtacacaaggtttcttcc

SEQ ID NO: 1290861 - DNA, 25 bp, Homo sapien
gcgtcctgggctcggcactctggtg

SEQ ID NO: 1290862 - DNA, 25 bp, Homo sapien
gggcgtcctgggctcggcactctgg

SEQ ID NO: 1290863 - DNA, 25 bp, Homo sapien
tgggctcggcactctggtgcccgcg

SEQ ID NO: 1290864 - DNA, 25 bp, Homo sapien
gtcctgggctcggcactctggtgcc

SEQ ID NO: 1290865 - DNA, 25 bp, Homo sapien
ctcagggagctacaacagtctagca

SEQ ID NO: 1290866 - DNA, 25 bp, Homo sapien
gagaagtcctgagaggtagtcctgt

SEQ ID NO: 1290867 - DNA, 25 bp, Homo sapien
tacttccacggagttcatgtttgac

SEQ ID NO: 1290868 - DNA, 25 bp, Homo sapien
cacagtctagcatgacttggagcct

SEQ ID NO: 1290869 - DNA, 25 bp, Homo sapien
gcctgccacccgtgttttgcttgtg

SEQ ID NO: 1290870 - DNA, 25 bp, Homo sapien
ggatgcagcccattccgcagtagga

SEQ ID NO: 1290871 - DNA, 25 bp, Homo sapien
aatccactacaagctggtgcaggtc

SEQ ID NO: 1290872 - DNA, 25 bp, Homo sapien
ggtgcaggtcccaattctaaagtca

SEQ ID NO: 1290873 - DNA, 25 bp, Homo sapien
tcggcagctcgagacatctgttcct

SEQ ID NO: 1290874 - DNA, 25 bp, Homo sapien
gaccaggaagtgacctctgagcacc

SEQ ID NO: 1290875 - DNA, 25 bp, Homo sapien
taatgaaaaacgcaattctcagacc

SEQ ID NO: 1290876 - DNA, 25 bp, Homo sapien
gcccatcacggagacataaatcttc

SEQ ID NO: 1290877 - DNA, 25 bp, Homo sapien
tgccccatgattcggtaacaggaaa

SEQ ID NO: 1290878 - DNA, 25 bp, Homo sapien
tattaacactgaatgagctgaggac

SEQ ID NO: 1290879 - DNA, 25 bp, Homo sapien
gaaaggatatgattctgccccatga

SEQ ID NO: 1290880 - DNA, 25 bp, Homo sapien
cagttcgtggtgacaatctgtacca

SEQ ID NO: 1290881 - DNA, 25 bp, Homo sapien
aaccccaacacaaagagtctctgaa

SEQ ID NO: 1290882 - DNA, 25 bp, Homo sapien
gaaccccaacacaaagagtctctga

SEQ ID NO: 1290883 - DNA, 25 bp, Homo sapien
agaaccccaacacaaagagtctctg

SEQ ID NO: 1290884 - DNA, 25 bp, Homo sapien
ccgattcagcgggtctagggcctga

SEQ ID NO: 1290885 - DNA, 25 bp, Homo sapien
gtttcaaagagtacaggagtggcct

SEQ ID NO: 1290886 - DNA, 25 bp, Homo sapien
tgcagttactttcagcagtgctggc

SEQ ID NO: 1290887 - DNA, 25 bp, Homo sapien
gcaactctgcctactatgggtggga

SEQ ID NO: 1290888 - DNA, 25 bp, Homo sapien
cttgcagcatcacctgctcactcgg

SEQ ID NO: 1290889 - DNA, 25 bp, Homo sapien
tgctcactcggtgcccaccccaccc

SEQ ID NO: 1290890 - DNA, 25 bp, Homo sapien
actcttgcagcatcacctgctcact

SEQ ID NO: 1290891 - DNA, 25 bp, Homo sapien
tcttgcagcatcacctgctcactcg

SEQ ID NO: 1290892 - DNA, 25 bp, Homo sapien
tgttatttcgtagcattgcaggagg

SEQ ID NO: 1290893 - DNA, 25 bp, Homo sapien
ttacaaaaggctgttatttcgtagc

SEQ ID NO: 1290894 - DNA, 25 bp, Homo sapien
gttatttcgtagcattgcaggagga

SEQ ID NO: 1290895 - DNA, 25 bp, Homo sapien
tgaaagatttacaaaaggctgttat

SEQ ID NO: 1290896 - DNA, 25 bp, Homo sapien
caaggttatcgggtctcaaatcaaa

SEQ ID NO: 1290897 - DNA, 25 bp, Homo sapien
ccaaatggccgtaattactctgaca

SEQ ID NO: 1290898 - DNA, 25 bp, Homo sapien
tcccttggttccactcctaggatgg

SEQ ID NO: 1290899 - DNA, 25 bp, Homo sapien
aaaagaaccttctctggccaacaag

SEQ ID NO: 1290900 - DNA, 25 bp, Homo sapien
aagtgttaacaagagagatgcctaa

SEQ ID NO: 1290901 - DNA, 25 bp, Homo sapien
taagctagcatctcagccacaaact

SEQ ID NO: 1290902 - DNA, 25 bp, Homo sapien
ttacacagacggactcaacagagaa

SEQ ID NO: 1290903 - DNA, 25 bp, Homo sapien
gccacaaacttacacagacggactc

SEQ ID NO: 1290904 - DNA, 25 bp, Homo sapien
taaacaatgatctaagagaccctct

SEQ ID NO: 1290905 - DNA, 25 bp, Homo sapien
caagaaacagtgacatggaggacag

SEQ ID NO: 1290906 - DNA, 25 bp, Homo sapien
taatcctgagttggatggacagcac

SEQ ID NO: 1290907 - DNA, 25 bp, Homo sapien
tacgtgttgctaagaatgataatcc

SEQ ID NO: 1290908 - DNA, 25 bp, Homo sapien
gcctctgaagtcaaaacatgagaca

SEQ ID NO: 1290909 - DNA, 25 bp, Homo sapien
tacccaataccaagagacagacggc

SEQ ID NO: 1290910 - DNA, 25 bp, Homo sapien
gaataacagcaaaaccggaagagga

SEQ ID NO: 1290911 - DNA, 25 bp, Homo sapien
caaacgtgccaggtacatttcccac

SEQ ID NO: 1290912 - DNA, 25 bp, Homo sapien
tacttgatacaatcctttatggacc

SEQ ID NO: 1290913 - DNA, 25 bp, Homo sapien
cgttcagagcagaatgttgtcccat

SEQ ID NO: 1290914 - DNA, 25 bp, Homo sapien
caaagacaggcattggtaagcaggt

SEQ ID NO: 1290915 - DNA, 25 bp, Homo sapien
tctggtatgaaactcgagcaaggaa

SEQ ID NO: 1290916 - DNA, 25 bp, Homo sapien
aaacatgatttactattactgctac

SEQ ID NO: 1290917 - DNA, 25 bp, Homo sapien
ctcccacgactataaatctcatatg

SEQ ID NO: 1290918 - DNA, 25 bp, Homo sapien
ccacgactataaatctcatatgtaa

SEQ ID NO: 1290919 - DNA, 25 bp, Homo sapien
tgtaaacatgatttactattactgc

SEQ ID NO: 1290920 - DNA, 25 bp, Homo sapien
tttgggacagtcacgtttgaatgga

SEQ ID NO: 1290921 - DNA, 25 bp, Homo sapien
ggcatttgggacagtcacgtttgaa

SEQ ID NO: 1290922 - DNA, 25 bp, Homo sapien
gacagtcacgtttgaatggatttct

SEQ ID NO: 1290923 - DNA, 25 bp, Homo sapien
taaggcatttgggacagtcacgttt

SEQ ID NO: 1290924 - DNA, 25 bp, Homo sapien
tgccctaacatgtcaaactcctctt

SEQ ID NO: 1290925 - DNA, 25 bp, Homo sapien
taaatccacctttgctttaatgccc

SEQ ID NO: 1290926 - DNA, 25 bp, Homo sapien
ttagcagtcagcaagtattcaaaga

SEQ ID NO: 1290927 - DNA, 25 bp, Homo sapien
tgtaatggtttaattcttaaatcca

SEQ ID NO: 1290928 - DNA, 25 bp, Homo sapien
ctttaaacccttcttctggcataca

SEQ ID NO: 1290929 - DNA, 25 bp, Homo sapien
ttaaacccttcttctggcatacaaa

SEQ ID NO: 1290930 - DNA, 25 bp, Homo sapien
tttaaacccttcttctggcatacaa

SEQ ID NO: 1290931 - DNA, 25 bp, Homo sapien
tagtgcacgactctaggagtggcct

SEQ ID NO: 1290932 - DNA, 25 bp, Homo sapien
ctgggaggaagccatgtaactgact

SEQ ID NO: 1290933 - DNA, 25 bp, Homo sapien
gacaaggtttgtaactagggcacac

SEQ ID NO: 1290934 - DNA, 25 bp, Homo sapien
gtcacttttgactcacacagcagct

SEQ ID NO: 1290935 - DNA, 25 bp, Homo sapien
gacttcaactgctccacttgcctca

SEQ ID NO: 1290936 - DNA, 25 bp, Homo sapien
aatggccgtccttgtctattccagt

SEQ ID NO: 1290937 - DNA, 25 bp, Homo sapien
gaaacacataattctgggtgcccat

SEQ ID NO: 1290938 - DNA, 25 bp, Homo sapien
tgggctgcccgaatttgagcaaagg

SEQ ID NO: 1290939 - DNA, 25 bp, Homo sapien
tttcttgactagtttccctggagag

SEQ ID NO: 1290940 - DNA, 25 bp, Homo sapien
agcagattcctaaaacaaattcatc

SEQ ID NO: 1290941 - DNA, 25 bp, Homo sapien
cagattcctaaaacaaattcatctt

SEQ ID NO: 1290942 - DNA, 25 bp, Homo sapien
tcagcagattcctaaaacaaattca

SEQ ID NO: 1290943 - DNA, 25 bp, Homo sapien
gattcctaaaacaaattcatcttta

SEQ ID NO: 1290944 - DNA, 25 bp, Homo sapien
cttgcatgacatcatccattgcagc

SEQ ID NO: 1290945 - DNA, 25 bp, Homo sapien
atgacatcatccattgcagcataat

SEQ ID NO: 1290946 - DNA, 25 bp, Homo sapien
gcatgacatcatccattgcagcata

SEQ ID NO: 1290947 - DNA, 25 bp, Homo sapien
tgcatgacatcatccattgcagcat

SEQ ID NO: 1290948 - DNA, 25 bp, Homo sapien
gttgctgatgctgtggcgtaacatc

SEQ ID NO: 1290949 - DNA, 25 bp, Homo sapien
tgctgatgctgtggcgtaacatcac

SEQ ID NO: 1290950 - DNA, 25 bp, Homo sapien
cagttgctgatgctgtggcgtaaca

SEQ ID NO: 1290951 - DNA, 25 bp, Homo sapien
agttgctgatgctgtggcgtaacat

SEQ ID NO: 1290952 - DNA, 25 bp, Homo sapien
caagggtgcctagggtggcacagtc

SEQ ID NO: 1290953 - DNA, 25 bp, Homo sapien
cagattcaggaatgacgccaagggt

SEQ ID NO: 1290954 - DNA, 25 bp, Homo sapien
cacagtcatcacttaaaatctttcc

SEQ ID NO: 1290955 - DNA, 25 bp, Homo sapien
caggaatgacgccaagggtgcctag

SEQ ID NO: 1290956 - DNA, 25 bp, Homo sapien
ttttgccgctttgttccaccattgc

SEQ ID NO: 1290957 - DNA, 25 bp, Homo sapien
aacttttctatgtcgcatacttcgg

SEQ ID NO: 1290958 - DNA, 25 bp, Homo sapien
taacgtctgattagcagaaacgaga

SEQ ID NO: 1290959 - DNA, 25 bp, Homo sapien
attttgatgggatatcttttgccgc

SEQ ID NO: 1290960 - DNA, 25 bp, Homo sapien
ccatctggtttagcttcttccttgt

SEQ ID NO: 1290961 - DNA, 25 bp, Homo sapien
ttctccatctggtttagcttcttcc

SEQ ID NO: 1290962 - DNA, 25 bp, Homo sapien
ttcagttccggagccgaatccttca

SEQ ID NO: 1290963 - DNA, 25 bp, Homo sapien
actactcacattcagttccggagcc

SEQ ID NO: 1290964 - DNA, 25 bp, Homo sapien
acaacaaagagaagtaggtcagacc

SEQ ID NO: 1290965 - DNA, 25 bp, Homo sapien
gaatgtgccaggacaacaaagagaa

SEQ ID NO: 1290966 - DNA, 25 bp, Homo sapien
aggacaacaaagagaagtaggtcag

SEQ ID NO: 1290967 - DNA, 25 bp, Homo sapien
ctgaatgtgccaggacaacaaagag

SEQ ID NO: 1290968 - DNA, 25 bp, Homo sapien
tgagtgtattcacgcaggtccctct

SEQ ID NO: 1290969 - DNA, 25 bp, Homo sapien
ttatccacaactttatggacataga

SEQ ID NO: 1290970 - DNA, 25 bp, Homo sapien
gacatagatggtggcttgagtgtat

SEQ ID NO: 1290971 - DNA, 25 bp, Homo sapien
ctttttattatccacaactttatgg

SEQ ID NO: 1290972 - DNA, 25 bp, Homo sapien
cccacttcaattctcgtgattttaa

SEQ ID NO: 1290973 - DNA, 25 bp, Homo sapien
tctgaagggtttacatctcccactt

SEQ ID NO: 1290974 - DNA, 25 bp, Homo sapien
ttacatgatccacaacaaagagctt

SEQ ID NO: 1290975 - DNA, 25 bp, Homo sapien
acatctcccacttcaattctcgtga

SEQ ID NO: 1290976 - DNA, 25 bp, Homo sapien
taatccattagtctgctaaaccaaa

SEQ ID NO: 1290977 - DNA, 25 bp, Homo sapien
cacagcagcgaaactaaatggactg

SEQ ID NO: 1290978 - DNA, 25 bp, Homo sapien
gagagaaaagatacgtatcatcaac

SEQ ID NO: 1290979 - DNA, 25 bp, Homo sapien
catacaaaggaatgttaccacagca

SEQ ID NO: 1290980 - DNA, 25 bp, Homo sapien
ttggtcatggaagcaaatgtaaaca

SEQ ID NO: 1290981 - DNA, 25 bp, Homo sapien
cttctttggtcatggaagcaaatgt

SEQ ID NO: 1290982 - DNA, 25 bp, Homo sapien
tctttggtcatggaagcaaatgtaa

SEQ ID NO: 1290983 - DNA, 25 bp, Homo sapien
tttggtcatggaagcaaatgtaaac

SEQ ID NO: 1290984 - DNA, 25 bp, Homo sapien
ccccgtggggacacaaaagagcact

SEQ ID NO: 1290985 - DNA, 25 bp, Homo sapien
tggggacacaaaagagcactgttcc

SEQ ID NO: 1290986 - DNA, 25 bp, Homo sapien
gcccccgtggggacacaaaagagca

SEQ ID NO: 1290987 - DNA, 25 bp, Homo sapien
ccgtggggacacaaaagagcactgt

SEQ ID NO: 1290988 - DNA, 25 bp, Homo sapien
gccactcttctacaaagaactgaga

SEQ ID NO: 1290989 - DNA, 25 bp, Homo sapien
tctacaaagaactgagacacgatgt

SEQ ID NO: 1290990 - DNA, 25 bp, Homo sapien
acaaatttccgccactcttctacaa

SEQ ID NO: 1290991 - DNA, 25 bp, Homo sapien
acacgatgtagaggacatccgtatc

SEQ ID NO: 1290992 - DNA, 25 bp, Homo sapien
ggccagttactgagacacggtctgt

SEQ ID NO: 1290993 - DNA, 25 bp, Homo sapien
gagagaagtcttttgctcgtttgca

SEQ ID NO: 1290994 - DNA, 25 bp, Homo sapien
gcaatcatcttatgtaaggcttcat

SEQ ID NO: 1290995 - DNA, 25 bp, Homo sapien
tcctggaacaaatttgggagagaag

SEQ ID NO: 1290996 - DNA, 25 bp, Homo sapien
aagcctctttagaaacaagccttct

SEQ ID NO: 1290997 - DNA, 25 bp, Homo sapien
agtactgctgcagtttgctccaagc

SEQ ID NO: 1290998 - DNA, 25 bp, Homo sapien
gcactctttgtaacttggaaactca

SEQ ID NO: 1290999 - DNA, 25 bp, Homo sapien
tcaggagcctttggaaagtactgct

SEQ ID NO: 1291000 - DNA, 25 bp, Homo sapien
tcaaaagcacttcaatggaacaagt

SEQ ID NO: 1291001 - DNA, 25 bp, Homo sapien
taacttggacaatgacagtcatggg

SEQ ID NO: 1291002 - DNA, 25 bp, Homo sapien
ggtaagatgtgagagatactggcat

SEQ ID NO: 1291003 - DNA, 25 bp, Homo sapien
agccaggcagtagaagctaaaagta

SEQ ID NO: 1291004 - DNA, 25 bp, Homo sapien
catgtggacacagaatatcttcatt

SEQ ID NO: 1291005 - DNA, 25 bp, Homo sapien
gtggacacagaatatcttcattaaa

SEQ ID NO: 1291006 - DNA, 25 bp, Homo sapien
tgtggacacagaatatcttcattaa

SEQ ID NO: 1291007 - DNA, 25 bp, Homo sapien
ggacacagaatatcttcattaaaat

SEQ ID NO: 1291008 - DNA, 25 bp, Homo sapien
gagtactccccgctgatcagtcagg

SEQ ID NO: 1291009 - DNA, 25 bp, Homo sapien
cagtcagggcatatgttctaagacc

SEQ ID NO: 1291010 - DNA, 25 bp, Homo sapien
tggatgcctaaaacctaccaccgaa

SEQ ID NO: 1291011 - DNA, 25 bp, Homo sapien
gaaaattagacccatgtgattccta

SEQ ID NO: 1291012 - DNA, 25 bp, Homo sapien
caaaactgatgtgacggatgtattc

SEQ ID NO: 1291013 - DNA, 25 bp, Homo sapien
tgtaagtacaggacacaaaaggacc

SEQ ID NO: 1291014 - DNA, 25 bp, Homo sapien
gaaggcactttctattatggcatcc

SEQ ID NO: 1291015 - DNA, 25 bp, Homo sapien
gacactgatatataaagaggccttt

SEQ ID NO: 1291016 - DNA, 25 bp, Homo sapien
tgggtcatggtaacctacaactcct

SEQ ID NO: 1291017 - DNA, 25 bp, Homo sapien
cgcaatcttgggtcatggtaaccta

SEQ ID NO: 1291018 - DNA, 25 bp, Homo sapien
tcttgggtcatggtaacctacaact

SEQ ID NO: 1291019 - DNA, 25 bp, Homo sapien
agtggggctggcacaaccgctgggc

SEQ ID NO: 1291020 - DNA, 25 bp, Homo sapien
ttcaagagctagctggcgccaactc

SEQ ID NO: 1291021 - DNA, 25 bp, Homo sapien
ggtgctaccgttcatctttccgttg

SEQ ID NO: 1291022 - DNA, 25 bp, Homo sapien
gcgccaactccgcaaggaggacttc

SEQ ID NO: 1291023 - DNA, 25 bp, Homo sapien
tcaccatcttgctcatccagctgtt

SEQ ID NO: 1291024 - DNA, 25 bp, Homo sapien
gacaacgttctactacacattcctt

SEQ ID NO: 1291025 - DNA, 25 bp, Homo sapien
tggttcttcagacgcaatatgcgac

SEQ ID NO: 1291026 - DNA, 25 bp, Homo sapien
tgctttcagcagattattaacagtt

SEQ ID NO: 1291027 - DNA, 25 bp, Homo sapien
taatcttcatttagttggttcttca

SEQ ID NO: 1291028 - DNA, 25 bp, Homo sapien
actatggttgggtactatgtggtca

SEQ ID NO: 1291029 - DNA, 25 bp, Homo sapien
ggaggattgtgttggcagctactca

SEQ ID NO: 1291030 - DNA, 25 bp, Homo sapien
tttaagggagaatcaagtagcttcc

SEQ ID NO: 1291031 - DNA, 25 bp, Homo sapien
tagaagtcaccatagctgggcgggt

SEQ ID NO: 1291032 - DNA, 25 bp, Homo sapien
catgggaacacaggcaagcgtgatt

SEQ ID NO: 1291033 - DNA, 25 bp, Homo sapien
tctactatagaaaatgtcagctgca

SEQ ID NO: 1291034 - DNA, 25 bp, Homo sapien
ccgggtgaagcttgtcatgggaaca

SEQ ID NO: 1291035 - DNA, 25 bp, Homo sapien
cacttttgcagccattccagagaga

SEQ ID NO: 1291036 - DNA, 25 bp, Homo sapien
gactaagtgatacattcatttttct

SEQ ID NO: 1291037 - DNA, 25 bp, Homo sapien
tgagaaagcaagcatcggaaagagc

SEQ ID NO: 1291038 - DNA, 25 bp, Homo sapien
acagttttttgactaagtgatacat

SEQ ID NO: 1291039 - DNA, 25 bp, Homo sapien
gcatcggaaagagcctatgtatttt

SEQ ID NO: 1291040 - DNA, 25 bp, Homo sapien
gaccagttttatactccccagagag

SEQ ID NO: 1291041 - DNA, 25 bp, Homo sapien
tgatgagtacgacacaaagctccag

SEQ ID NO: 1291042 - DNA, 25 bp, Homo sapien
cacagcagagctttgatcaggacac

SEQ ID NO: 1291043 - DNA, 25 bp, Homo sapien
tgcacagtgccctatgagatcggct

SEQ ID NO: 1291044 - DNA, 25 bp, Homo sapien
cagtatatgtaacacagctgcagca

SEQ ID NO: 1291045 - DNA, 25 bp, Homo sapien
taatctgccagggatagagtacact

SEQ ID NO: 1291046 - DNA, 25 bp, Homo sapien
tgacattgcaccagtgcgctctagc

SEQ ID NO: 1291047 - DNA, 25 bp, Homo sapien
aatgcctcccgactttatttgccat

SEQ ID NO: 1291048 - DNA, 25 bp, Homo sapien
gcaacaatgtggctcaaaggcaaga

SEQ ID NO: 1291049 - DNA, 25 bp, Homo sapien
tatgtacggttttatagtaagagga

SEQ ID NO: 1291050 - DNA, 25 bp, Homo sapien
tcaaagcctagggtgactgtggccc

SEQ ID NO: 1291051 - DNA, 25 bp, Homo sapien
tgtggccctgactgtccagcaacaa

SEQ ID NO: 1291052 - DNA, 25 bp, Homo sapien
ggccaaaagcacgttcctactgagg

SEQ ID NO: 1291053 - DNA, 25 bp, Homo sapien
gataccggactatatgaaacctcag

SEQ ID NO: 1291054 - DNA, 25 bp, Homo sapien
cactttagtgcgctgtgggctccat

SEQ ID NO: 1291055 - DNA, 25 bp, Homo sapien
tattatcaagctggagataccggac

SEQ ID NO: 1291056 - DNA, 25 bp, Homo sapien
taatatggaatgctacacatcaagt

SEQ ID NO: 1291057 - DNA, 25 bp, Homo sapien
cagaacaggcaagttgctttttcca

SEQ ID NO: 1291058 - DNA, 25 bp, Homo sapien
aaaacaaggcacttaatggcaacag

SEQ ID NO: 1291059 - DNA, 25 bp, Homo sapien
actgttaggtcacaaagtatgcaaa

SEQ ID NO: 1291060 - DNA, 25 bp, Homo sapien
ttatccacactttgcttacgcatct

SEQ ID NO: 1291061 - DNA, 25 bp, Homo sapien
cagctccagcaggtaacctttggta

SEQ ID NO: 1291062 - DNA, 25 bp, Homo sapien
tcaatacaccactcctcaaatttgg

SEQ ID NO: 1291063 - DNA, 25 bp, Homo sapien
ttgcttacgcatctcagccatttca

SEQ ID NO: 1291064 - DNA, 25 bp, Homo sapien
gcatttcgagagcaatgagttcctt

SEQ ID NO: 1291065 - DNA, 25 bp, Homo sapien
cacttgggtttacgtgtctgagact

SEQ ID NO: 1291066 - DNA, 25 bp, Homo sapien
ttgaacagtagtgttgggcttttct

SEQ ID NO: 1291067 - DNA, 25 bp, Homo sapien
ttcttgagtttgcagtctataaacc

SEQ ID NO: 1291068 - DNA, 25 bp, Homo sapien
ccttgaaaaggatgctggtggatat

SEQ ID NO: 1291069 - DNA, 25 bp, Homo sapien
ggtggatataaaacctctatggtat

SEQ ID NO: 1291070 - DNA, 25 bp, Homo sapien
ggatgctggtggatataaaacctct

SEQ ID NO: 1291071 - DNA, 25 bp, Homo sapien
ttatccttgaaaaggatgctggtgg

SEQ ID NO: 1291072 - DNA, 25 bp, Homo sapien
ccaagtgcaaggatcgtctaagggc

SEQ ID NO: 1291073 - DNA, 25 bp, Homo sapien
ctcgctcaacccagttaatgtgcta

SEQ ID NO: 1291074 - DNA, 25 bp, Homo sapien
taaaatgggagcgagattgctgaag

SEQ ID NO: 1291075 - DNA, 25 bp, Homo sapien
caattttgttcctagtaagaatgtc

SEQ ID NO: 1291076 - DNA, 25 bp, Homo sapien
tacttaggcccaagacaactgaggt

SEQ ID NO: 1291077 - DNA, 25 bp, Homo sapien
aagtatgtgcccttggacaattgcc

SEQ ID NO: 1291078 - DNA, 25 bp, Homo sapien
caattgcctatacctgtctgacaga

SEQ ID NO: 1291079 - DNA, 25 bp, Homo sapien
gagatggctccaactagaaaaactg

SEQ ID NO: 1291080 - DNA, 25 bp, Homo sapien
gctgagttcatacacgtaggaccca

SEQ ID NO: 1291081 - DNA, 25 bp, Homo sapien
tgtgtatgaggactgcgctgagttc

SEQ ID NO: 1291082 - DNA, 25 bp, Homo sapien
tagtggccagaataagcactcactc

SEQ ID NO: 1291083 - DNA, 25 bp, Homo sapien
tttcacgtgggcgatgtagtggcca

SEQ ID NO: 1291084 - DNA, 25 bp, Homo sapien
taatacctgggccaaaacccactga

SEQ ID NO: 1291085 - DNA, 25 bp, Homo sapien
gaacagagtccctgcattcttgaag

SEQ ID NO: 1291086 - DNA, 25 bp, Homo sapien
ttcaggcatgaaggatacagcagtt

SEQ ID NO: 1291087 - DNA, 25 bp, Homo sapien
acagcagagtatagccaatcactca

SEQ ID NO: 1291088 - DNA, 25 bp, Homo sapien
tgacgaagaaccaaatcaaactccg

SEQ ID NO: 1291089 - DNA, 25 bp, Homo sapien
caagtcactctaactgcaaggcagc

SEQ ID NO: 1291090 - DNA, 25 bp, Homo sapien
tgggcgacatgcaacatagagtaag

SEQ ID NO: 1291091 - DNA, 25 bp, Homo sapien
gaaatcacagtcaccgacagtcaaa

SEQ ID NO: 1291092 - DNA, 25 bp, Homo sapien
ctttatgttccacataaggctccat

SEQ ID NO: 1291093 - DNA, 25 bp, Homo sapien
aggctccatatccaaaatttctgag

SEQ ID NO: 1291094 - DNA, 25 bp, Homo sapien
ccaatgtaggtattcagctttttct

SEQ ID NO: 1291095 - DNA, 25 bp, Homo sapien
gaagccaatgtaggtattcagcttt

SEQ ID NO: 1291096 - DNA, 25 bp, Homo sapien
tgtcaaagacaaaacgcattagctg

SEQ ID NO: 1291097 - DNA, 25 bp, Homo sapien
ggaaggctaagaagtcgaatctttc

SEQ ID NO: 1291098 - DNA, 25 bp, Homo sapien
caagttcagagtgcaaggaaggcta

SEQ ID NO: 1291099 - DNA, 25 bp, Homo sapien
tttgacagttctcgcaaaaatagcg

SEQ ID NO: 1291100 - DNA, 25 bp, Homo sapien
actccagctcataaaattttgacaa

SEQ ID NO: 1291101 - DNA, 25 bp, Homo sapien
ctgttaactgtttgtggccttggat

SEQ ID NO: 1291102 - DNA, 25 bp, Homo sapien
aattccgagatacaatctgttaact

SEQ ID NO: 1291103 - DNA, 25 bp, Homo sapien
aaagcttagactctctgccacactg

SEQ ID NO: 1291104 - DNA, 25 bp, Homo sapien
tgcctggtgaagctaaacattcgtt

SEQ ID NO: 1291105 - DNA, 25 bp, Homo sapien
taaatgttaagaggtacaagtgcag

SEQ ID NO: 1291106 - DNA, 25 bp, Homo sapien
gaatatatcgcactgtggtgaagtc

SEQ ID NO: 1291107 - DNA, 25 bp, Homo sapien
tgaagctaaacattcgttgggaaac

SEQ ID NO: 1291108 - DNA, 25 bp, Homo sapien
caatattgcgcacatctggattctt

SEQ ID NO: 1291109 - DNA, 25 bp, Homo sapien
cagttacataggcatattctccaca

SEQ ID NO: 1291110 - DNA, 25 bp, Homo sapien
ttgtttagacaaagtatcttccaat

SEQ ID NO: 1291111 - DNA, 25 bp, Homo sapien
gtatcttccaatagagacataaaga

SEQ ID NO: 1291112 - DNA, 25 bp, Homo sapien
agtactggagatgctcacaaattgt

SEQ ID NO: 1291113 - DNA, 25 bp, Homo sapien
gcaacaaggcaaacaagtactggag

SEQ ID NO: 1291114 - DNA, 25 bp, Homo sapien
gtatcgcctattactgttttgcaac

SEQ ID NO: 1291115 - DNA, 25 bp, Homo sapien
tcctgatggatcaatgtatcgccta

SEQ ID NO: 1291116 - DNA, 25 bp, Homo sapien
tgccgaagctccaagttgagaaacc

SEQ ID NO: 1291117 - DNA, 25 bp, Homo sapien
cataagtagagtgcctgccgaagct

SEQ ID NO: 1291118 - DNA, 25 bp, Homo sapien
ttggatgccgtctcccagcatgtag

SEQ ID NO: 1291119 - DNA, 25 bp, Homo sapien
ggctccaaggttagtcaggcccaca

SEQ ID NO: 1291120 - DNA, 25 bp, Homo sapien
tcttaaagctgcacaggttacctga

SEQ ID NO: 1291121 - DNA, 25 bp, Homo sapien
gaagtgttccaattcaagtggctta

SEQ ID NO: 1291122 - DNA, 25 bp, Homo sapien
ggcttagagtcttaagttctactgc

SEQ ID NO: 1291123 - DNA, 25 bp, Homo sapien
tagcaatcgcttaaaaaatgatggt

SEQ ID NO: 1291124 - DNA, 25 bp, Homo sapien
taccaaccaagcaattcggatttcc

SEQ ID NO: 1291125 - DNA, 25 bp, Homo sapien
tctatttctcctaaccaaatatgct

SEQ ID NO: 1291126 - DNA, 25 bp, Homo sapien
ccaataccaaccaagcaattcggat

SEQ ID NO: 1291127 - DNA, 25 bp, Homo sapien
tctcacagttgggatcatcgatgtt

SEQ ID NO: 1291128 - DNA, 25 bp, Homo sapien
gctccagccagatgcggtaagcggt

SEQ ID NO: 1291129 - DNA, 25 bp, Homo sapien
cagatgcggtaagcggtctcgatgt

SEQ ID NO: 1291130 - DNA, 25 bp, Homo sapien
tgcggtaagcggtctcgatgtgctc

SEQ ID NO: 1291131 - DNA, 25 bp, Homo sapien
cagccagatgcggtaagcggtctcg

SEQ ID NO: 1291132 - DNA, 25 bp, Homo sapien
gccccaggaacgcctcccgagccag

SEQ ID NO: 1291133 - DNA, 25 bp, Homo sapien
cctcccgagccagaccgccgcagcc

SEQ ID NO: 1291134 - DNA, 25 bp, Homo sapien
cttggccccaggaacgcctcccgag

SEQ ID NO: 1291135 - DNA, 25 bp, Homo sapien
gcctcccgagccagaccgccgcagc

SEQ ID NO: 1291136 - DNA, 25 bp, Homo sapien
ctgccagcaaggaggacctggcgct

SEQ ID NO: 1291137 - DNA, 25 bp, Homo sapien
aggacctggcgctccttcaggcagc

SEQ ID NO: 1291138 - DNA, 25 bp, Homo sapien
aatgggcttcgccacctgccagcaa

SEQ ID NO: 1291139 - DNA, 25 bp, Homo sapien
gcaccgccgccccaatgggcttcgc

SEQ ID NO: 1291140 - DNA, 25 bp, Homo sapien
tcaatcacctgtgcgcgccactgcc

SEQ ID NO: 1291141 - DNA, 25 bp, Homo sapien
cactgaactgtacccctaaccatgg

SEQ ID NO: 1291142 - DNA, 25 bp, Homo sapien
gatccaaactctatcagaatatatt

SEQ ID NO: 1291143 - DNA, 25 bp, Homo sapien
ggtaaacgttatgtgctttgccaca

SEQ ID NO: 1291144 - DNA, 25 bp, Homo sapien
tggttaaatggtaaacgttatgtgc

SEQ ID NO: 1291145 - DNA, 25 bp, Homo sapien
caacatgcgtaatttttctcactag

SEQ ID NO: 1291146 - DNA, 25 bp, Homo sapien
gagatgctcaagaaatactagtcaa

SEQ ID NO: 1291147 - DNA, 25 bp, Homo sapien
gaatggaagaaggaacctctatgcc

SEQ ID NO: 1291148 - DNA, 25 bp, Homo sapien
ccccagttgctagagccatgcctgg

SEQ ID NO: 1291149 - DNA, 25 bp, Homo sapien
cccacgagacaagacgcagctttgg

SEQ ID NO: 1291150 - DNA, 25 bp, Homo sapien
gatccctctggattgcagctgagag

SEQ ID NO: 1291151 - DNA, 25 bp, Homo sapien
gccagacaggaagtacagatgccca

SEQ ID NO: 1291152 - DNA, 25 bp, Homo sapien
ggtctgcaggatccctctggattgc

SEQ ID NO: 1291153 - DNA, 25 bp, Homo sapien
gctgcagttgagtggcccagcctta

SEQ ID NO: 1291154 - DNA, 25 bp, Homo sapien
cagctgcccctctagaaaataggac

SEQ ID NO: 1291155 - DNA, 25 bp, Homo sapien
ccttataggatcagggaggccatcc

SEQ ID NO: 1291156 - DNA, 25 bp, Homo sapien
catgggaatgatactaggctctggg

SEQ ID NO: 1291157 - DNA, 25 bp, Homo sapien
tagcaccgtttattaagaaaaatca

SEQ ID NO: 1291158 - DNA, 25 bp, Homo sapien
atcaagacaaagaccacaggagggt

SEQ ID NO: 1291159 - DNA, 25 bp, Homo sapien
aaaatcaagacaaagaccacaggag

SEQ ID NO: 1291160 - DNA, 25 bp, Homo sapien
gaaaaatcaagacaaagaccacagg

SEQ ID NO: 1291161 - DNA, 25 bp, Homo sapien
tctctctctcagtcgtgagtcctgc

SEQ ID NO: 1291162 - DNA, 25 bp, Homo sapien
tctctcagtcgtgagtcctgccttc

SEQ ID NO: 1291163 - DNA, 25 bp, Homo sapien
cctctctctctcagtcgtgagtcct

SEQ ID NO: 1291164 - DNA, 25 bp, Homo sapien
tctctctcagtcgtgagtcctgcct

SEQ ID NO: 1291165 - DNA, 25 bp, Homo sapien
agcggcatccgtccgtccgttgtct

SEQ ID NO: 1291166 - DNA, 25 bp, Homo sapien
tccgtccgtccgttgtctgttggag

SEQ ID NO: 1291167 - DNA, 25 bp, Homo sapien
ccgtccgttgtctgttggaggagtc

SEQ ID NO: 1291168 - DNA, 25 bp, Homo sapien
gccttcacttccagatgggtgggga

SEQ ID NO: 1291169 - DNA, 25 bp, Homo sapien
gtgggcggggccctatcagtgctgg

SEQ ID NO: 1291170 - DNA, 25 bp, Homo sapien
tgggcggggccctatcagtgctggg

SEQ ID NO: 1291171 - DNA, 25 bp, Homo sapien
ggcggggccctatcagtgctgggct

SEQ ID NO: 1291172 - DNA, 25 bp, Homo sapien
ccggtgggcggggccctatcagtgc

SEQ ID NO: 1291173 - DNA, 25 bp, Homo sapien
gtgggccttcccttacagcccctga

SEQ ID NO: 1291174 - DNA, 25 bp, Homo sapien
gggtgctgaaaaacgagctggtggg

SEQ ID NO: 1291175 - DNA, 25 bp, Homo sapien
gccttcccttacagcccctgaggga

SEQ ID NO: 1291176 - DNA, 25 bp, Homo sapien
taggagggggagtctgccagaggag

SEQ ID NO: 1291177 - DNA, 25 bp, Homo sapien
ccaatcctgagtgggtggcagagac

SEQ ID NO: 1291178 - DNA, 25 bp, Homo sapien
ccgaggttggctctcctaggagtga

SEQ ID NO: 1291179 - DNA, 25 bp, Homo sapien
gcgatgcccgtctcaggtagctgtg

SEQ ID NO: 1291180 - DNA, 25 bp, Homo sapien
ggtgactttctgaggtgcccactcc

SEQ ID NO: 1291181 - DNA, 25 bp, Homo sapien
cagcccagggcggtagcagcaaagc

SEQ ID NO: 1291182 - DNA, 25 bp, Homo sapien
cggtagcagcaaagcgtggcatcgc

SEQ ID NO: 1291183 - DNA, 25 bp, Homo sapien
caaagcgtggcatcgcctcggtttc

SEQ ID NO: 1291184 - DNA, 25 bp, Homo sapien
gcatcgcctcggtttcttacaaaaa

SEQ ID NO: 1291185 - DNA, 25 bp, Homo sapien
tggcccgggagtccgtgtggggcag

SEQ ID NO: 1291186 - DNA, 25 bp, Homo sapien
gtggcccgggagtccgtgtggggca

SEQ ID NO: 1291187 - DNA, 25 bp, Homo sapien
gcaggggcgtgtgttggccccggcc

SEQ ID NO: 1291188 - DNA, 25 bp, Homo sapien
ggcaggggcgtgtgttggccccggc

SEQ ID NO: 1291189 - DNA, 25 bp, Homo sapien
tgaggagaatctgcccccggtcagc

SEQ ID NO: 1291190 - DNA, 25 bp, Homo sapien
tcagcgtggccacgtcaggggctcc

SEQ ID NO: 1291191 - DNA, 25 bp, Homo sapien
cccccggtcagcgtggccacgtcag

SEQ ID NO: 1291192 - DNA, 25 bp, Homo sapien
ctgaggagaatctgcccccggtcag

SEQ ID NO: 1291193 - DNA, 25 bp, Homo sapien
tcgacttggatggaacctctgcggc

SEQ ID NO: 1291194 - DNA, 25 bp, Homo sapien
tcctcaccgtcgacttggatggaac

SEQ ID NO: 1291195 - DNA, 25 bp, Homo sapien
cgttgactgccacgttgggacctgg

SEQ ID NO: 1291196 - DNA, 25 bp, Homo sapien
cgatgtagacgctgcccttggcgtt

SEQ ID NO: 1291197 - DNA, 25 bp, Homo sapien
gaactgggtcaggcccctttccaca

SEQ ID NO: 1291198 - DNA, 25 bp, Homo sapien
caggcccctttccacaaacttcctg

SEQ ID NO: 1291199 - DNA, 25 bp, Homo sapien
cagtggaactgggtcaggccccttt

SEQ ID NO: 1291200 - DNA, 25 bp, Homo sapien
ctgcagtggaactgggtcaggcccc

SEQ ID NO: 1291201 - DNA, 25 bp, Homo sapien
ttcagtccgagatggaagcccgagc

SEQ ID NO: 1291202 - DNA, 25 bp, Homo sapien
gactcagaagtctgtccctgtttcc

SEQ ID NO: 1291203 - DNA, 25 bp, Homo sapien
tctgatatcgagactccagactcag

SEQ ID NO: 1291204 - DNA, 25 bp, Homo sapien
tgaacgagagatcgggccccacaaa

SEQ ID NO: 1291205 - DNA, 25 bp, Homo sapien
gcagtgctgtcacccggtgccactc

SEQ ID NO: 1291206 - DNA, 25 bp, Homo sapien
cgccgtcattgatggggtcctcaga

SEQ ID NO: 1291207 - DNA, 25 bp, Homo sapien
acccggtgccactcgccgtcattga

SEQ ID NO: 1291208 - DNA, 25 bp, Homo sapien
tcctcagagaccaggcgggcctccc

SEQ ID NO: 1291209 - DNA, 25 bp, Homo sapien
tgcagtcatccaggcccaagaagta

SEQ ID NO: 1291210 - DNA, 25 bp, Homo sapien
gtcatccaggcccaagaagtatgag

SEQ ID NO: 1291211 - DNA, 25 bp, Homo sapien
cagtcatccaggcccaagaagtatg

SEQ ID NO: 1291212 - DNA, 25 bp, Homo sapien
ctgcagtcatccaggcccaagaagt

SEQ ID NO: 1291213 - DNA, 25 bp, Homo sapien
acaaggtgcccgtcttgaagcccga

SEQ ID NO: 1291214 - DNA, 25 bp, Homo sapien
gcccgaggctgatgaagtccttgcc

SEQ ID NO: 1291215 - DNA, 25 bp, Homo sapien
ctgaagacaaggtgcccgtcttgaa

SEQ ID NO: 1291216 - DNA, 25 bp, Homo sapien
tcttgaagcccgaggctgatgaagt

SEQ ID NO: 1291217 - DNA, 25 bp, Homo sapien
gcacagggtctctggggtccccagc

SEQ ID NO: 1291218 - DNA, 25 bp, Homo sapien
ggaagcacagggtctctggggtccc

SEQ ID NO: 1291219 - DNA, 25 bp, Homo sapien
aagcacagggtctctggggtcccca

SEQ ID NO: 1291220 - DNA, 25 bp, Homo sapien
ctgccagggaagcacagggtctctg

SEQ ID NO: 1291221 - DNA, 25 bp, Homo sapien
ccagctcgatggtctcgggcacctc

SEQ ID NO: 1291222 - DNA, 25 bp, Homo sapien
ggctgtgctggtccgaacctccagc

SEQ ID NO: 1291223 - DNA, 25 bp, Homo sapien
tcgatggtctcgggcacctcgggca

SEQ ID NO: 1291224 - DNA, 25 bp, Homo sapien
tggctgtgctggtccgaacctccag

SEQ ID NO: 1291225 - DNA, 25 bp, Homo sapien
gaaataggctccgtactgcccaggg

SEQ ID NO: 1291226 - DNA, 25 bp, Homo sapien
ccatcatcgtggaaataggctccgt

SEQ ID NO: 1291227 - DNA, 25 bp, Homo sapien
cagggaaggcgaggaagccatcatc

SEQ ID NO: 1291228 - DNA, 25 bp, Homo sapien
ggcgaggaagccatcatcgtggaaa

SEQ ID NO: 1291229 - DNA, 25 bp, Homo sapien
gagtgactggcccaggatgtccata

SEQ ID NO: 1291230 - DNA, 25 bp, Homo sapien
gatgtccatactgtgtgtggctcca

SEQ ID NO: 1291231 - DNA, 25 bp, Homo sapien
tcagtccggagctactgggaccgtt

SEQ ID NO: 1291232 - DNA, 25 bp, Homo sapien
gtgacccgccattctacttgccaaa

SEQ ID NO: 1291233 - DNA, 25 bp, Homo sapien
cagtcggactctgctatgccatgtc

SEQ ID NO: 1291234 - DNA, 25 bp, Homo sapien
cgctgccttcaagatgccagtcgga

SEQ ID NO: 1291235 - DNA, 25 bp, Homo sapien
tcaagatgccagtcggactctgcta

SEQ ID NO: 1291236 - DNA, 25 bp, Homo sapien
gatgccagtcggactctgctatgcc

SEQ ID NO: 1291237 - DNA, 25 bp, Homo sapien
ccatgcagacagggttcacggagct

SEQ ID NO: 1291238 - DNA, 25 bp, Homo sapien
ggggttctcctcgtgctcacacagg

SEQ ID NO: 1291239 - DNA, 25 bp, Homo sapien
catgcagacagggttcacggagctg

SEQ ID NO: 1291240 - DNA, 25 bp, Homo sapien
gttctcctcgtgctcacacaggtct

SEQ ID NO: 1291241 - DNA, 25 bp, Homo sapien
gcatgggctggaggtgtcgctgacc

SEQ ID NO: 1291242 - DNA, 25 bp, Homo sapien
ggcatgggctggaggtgtcgctgac

SEQ ID NO: 1291243 - DNA, 25 bp, Homo sapien
gcgggcatgcacgtggcaccatgtt

SEQ ID NO: 1291244 - DNA, 25 bp, Homo sapien
tgaatccatctcgacacaggcactg

SEQ ID NO: 1291245 - DNA, 25 bp, Homo sapien
tatcatagcattgcccgatgccctg

SEQ ID NO: 1291246 - DNA, 25 bp, Homo sapien
taggtgaggtccagccgtttgccat

SEQ ID NO: 1291247 - DNA, 25 bp, Homo sapien
gtccttgttgagacgctctgcagac

SEQ ID NO: 1291248 - DNA, 25 bp, Homo sapien
gacagtggcacggaaggctccacac

SEQ ID NO: 1291249 - DNA, 25 bp, Homo sapien
cagccgcggaagtgagcgctcatgt

SEQ ID NO: 1291250 - DNA, 25 bp, Homo sapien
ctctgcagacacacggtgccagcgg

SEQ ID NO: 1291251 - DNA, 25 bp, Homo sapien
agggacacgaagtcctccacaggcc

SEQ ID NO: 1291252 - DNA, 25 bp, Homo sapien
agtgccaggtaggagccagcacccg

SEQ ID NO: 1291253 - DNA, 25 bp, Homo sapien
tggcttgaactccacgtccaggcgt

SEQ ID NO: 1291254 - DNA, 25 bp, Homo sapien
gctgaacagcaggaccccgtcaggg

SEQ ID NO: 1291255 - DNA, 25 bp, Homo sapien
gctgggaggagctccaatatgacag

SEQ ID NO: 1291256 - DNA, 25 bp, Homo sapien
tagggcccatcatggcctcagagtg

SEQ ID NO: 1291257 - DNA, 25 bp, Homo sapien
ctctggcttgggaatcgttttatca

SEQ ID NO: 1291258 - DNA, 25 bp, Homo sapien
caggtgacttcgagatcctctggct

SEQ ID NO: 1291259 - DNA, 25 bp, Homo sapien
gttcacacaggtggcgtcgggccca

SEQ ID NO: 1291260 - DNA, 25 bp, Homo sapien
tagcctcgaccgtcaggccggttca

SEQ ID NO: 1291261 - DNA, 25 bp, Homo sapien
ttcctcacaccgcaaccccgagcgg

SEQ ID NO: 1291262 - DNA, 25 bp, Homo sapien
cagcggcaggtgtagcctcgaccgt

SEQ ID NO: 1291263 - DNA, 25 bp, Homo sapien
gaaaagacacggaggtgactctgga

SEQ ID NO: 1291264 - DNA, 25 bp, Homo sapien
gcacataggccagtgaaaagacacg

SEQ ID NO: 1291265 - DNA, 25 bp, Homo sapien
gagggaactgagcagagcaaggcgg

SEQ ID NO: 1291266 - DNA, 25 bp, Homo sapien
cagtcgagggactctgtgtgtctgc

SEQ ID NO: 1291267 - DNA, 25 bp, Homo sapien
ggcctgcgagtgctcacagcggctc

SEQ ID NO: 1291268 - DNA, 25 bp, Homo sapien
gcagggcctgcgagtgctcacagcg

SEQ ID NO: 1291269 - DNA, 25 bp, Homo sapien
cagacgcacacgtagctgctgctct

SEQ ID NO: 1291270 - DNA, 25 bp, Homo sapien
gccagctgggcagacgcacacgtag

SEQ ID NO: 1291271 - DNA, 25 bp, Homo sapien
gccgtgcgccgtgaggttgaggtca

SEQ ID NO: 1291272 - DNA, 25 bp, Homo sapien
atggaagacgatctcctcgccctgg

SEQ ID NO: 1291273 - DNA, 25 bp, Homo sapien
ggcagtgggagatgccgtgcgccgt

SEQ ID NO: 1291274 - DNA, 25 bp, Homo sapien
cctggatgcgcagctcccggacaca

SEQ ID NO: 1291275 - DNA, 25 bp, Homo sapien
ggatggcaccatagtcaggatagcc

SEQ ID NO: 1291276 - DNA, 25 bp, Homo sapien
cctcgttcagatccaggccctggaa

SEQ ID NO: 1291277 - DNA, 25 bp, Homo sapien
cacccaggtagagttcctcgttcag

SEQ ID NO: 1291278 - DNA, 25 bp, Homo sapien
catagtcaggatagccacccaggta

SEQ ID NO: 1291279 - DNA, 25 bp, Homo sapien
ccagtggtgtgggatggcggatggt

SEQ ID NO: 1291280 - DNA, 25 bp, Homo sapien
cctgggtgaggctgcgcagcagggt

SEQ ID NO: 1291281 - DNA, 25 bp, Homo sapien
ggtcacccacaatcagggagccctg

SEQ ID NO: 1291282 - DNA, 25 bp, Homo sapien
tcacggtgtggaaatggcccagggc

SEQ ID NO: 1291283 - DNA, 25 bp, Homo sapien
agagagtggatagggggtttgtaag

SEQ ID NO: 1291284 - DNA, 25 bp, Homo sapien
gagagagtggatagggggtttgtaa

SEQ ID NO: 1291285 - DNA, 25 bp, Homo sapien
gagagtggatagggggtttgtaaga

SEQ ID NO: 1291286 - DNA, 25 bp, Homo sapien
tcgggctgccggttggccaggttgg

SEQ ID NO: 1291287 - DNA, 25 bp, Homo sapien
tgggactcgcttctgcccattgtac

SEQ ID NO: 1291288 - DNA, 25 bp, Homo sapien
tccccccacgaggccgaaggagatg

SEQ ID NO: 1291289 - DNA, 25 bp, Homo sapien
ccgaaggagatgaagtcgggctgcc

SEQ ID NO: 1291290 - DNA, 25 bp, Homo sapien
gtgggcaccactgtgtaaggggccc

SEQ ID NO: 1291291 - DNA, 25 bp, Homo sapien
tgggcaccactgtgtaaggggcccc

SEQ ID NO: 1291292 - DNA, 25 bp, Homo sapien
tgatggcagttactccacgaggtcc

SEQ ID NO: 1291293 - DNA, 25 bp, Homo sapien
catgatggcagttactccacgaggt

SEQ ID NO: 1291294 - DNA, 25 bp, Homo sapien
gcagttactccacgaggtccctcaa

SEQ ID NO: 1291295 - DNA, 25 bp, Homo sapien
tgccatgatggcagttactccacga

SEQ ID NO: 1291296 - DNA, 25 bp, Homo sapien
gaaggtgatcttgatctcgaacttc

SEQ ID NO: 1291297 - DNA, 25 bp, Homo sapien
ggtctgcgtgaagtagggcaccacc

SEQ ID NO: 1291298 - DNA, 25 bp, Homo sapien
tcgaacttcctgtaggcatccttga

SEQ ID NO: 1291299 - DNA, 25 bp, Homo sapien
tggtgggcagcggtaggaaggagta

SEQ ID NO: 1291300 - DNA, 25 bp, Homo sapien
tttgaccttgccctggcggttagtg

SEQ ID NO: 1291301 - DNA, 25 bp, Homo sapien
tgaccttgccctggcggttagtggc

SEQ ID NO: 1291302 - DNA, 25 bp, Homo sapien
cagacgtaggtacctgcgtcctggg

SEQ ID NO: 1291303 - DNA, 25 bp, Homo sapien
ttagtggcggtgcagacgtaggtac

SEQ ID NO: 1291304 - DNA, 25 bp, Homo sapien
ctgcaaatgcactagcactgagggc

SEQ ID NO: 1291305 - DNA, 25 bp, Homo sapien
aaatgcactagcactgagggccctg

SEQ ID NO: 1291306 - DNA, 25 bp, Homo sapien
cttccaacattgagcgtttgctctt

SEQ ID NO: 1291307 - DNA, 25 bp, Homo sapien
gcgtttgctcttggccaagcctgtg

SEQ ID NO: 1291308 - DNA, 25 bp, Homo sapien
tcaggagtggggtagcctgaggcta

SEQ ID NO: 1291309 - DNA, 25 bp, Homo sapien
caggagtggggtagcctgaggctat

SEQ ID NO: 1291310 - DNA, 25 bp, Homo sapien
aggagtggggtagcctgaggctatg

SEQ ID NO: 1291311 - DNA, 25 bp, Homo sapien
accagcaggcacacggacttcttgg

SEQ ID NO: 1291312 - DNA, 25 bp, Homo sapien
gcacacggacttcttggggcattga

SEQ ID NO: 1291313 - DNA, 25 bp, Homo sapien
agaaccagcaggcacacggacttct

SEQ ID NO: 1291314 - DNA, 25 bp, Homo sapien
gcagaaccagcaggcacacggactt

SEQ ID NO: 1291315 - DNA, 25 bp, Homo sapien
caacaaaagtccccactggccttca

SEQ ID NO: 1291316 - DNA, 25 bp, Homo sapien
gtgccaggcattcgaactccacggc

SEQ ID NO: 1291317 - DNA, 25 bp, Homo sapien
gccagctctacgtgggcgatcctga

SEQ ID NO: 1291318 - DNA, 25 bp, Homo sapien
tgcagcgatactgtcccgcatcagc

SEQ ID NO: 1291319 - DNA, 25 bp, Homo sapien
cagaggtccggatgttgatgagcac

SEQ ID NO: 1291320 - DNA, 25 bp, Homo sapien
ggttcatctgagcactcacacactc

SEQ ID NO: 1291321 - DNA, 25 bp, Homo sapien
caagccccttttactctatgctaga

SEQ ID NO: 1291322 - DNA, 25 bp, Homo sapien
gaaatatgtatcaagccccttttac

SEQ ID NO: 1291323 - DNA, 25 bp, Homo sapien
ccatgcccggttcacactgattcaa

SEQ ID NO: 1291324 - DNA, 25 bp, Homo sapien
cttcccccaaggtccatgggcctgg

SEQ ID NO: 1291325 - DNA, 25 bp, Homo sapien
ggcctggcatatatacgtcccttgg

SEQ ID NO: 1291326 - DNA, 25 bp, Homo sapien
gcatatatacgtcccttggcagctc

SEQ ID NO: 1291327 - DNA, 25 bp, Homo sapien
catgggcctggcatatatacgtccc

SEQ ID NO: 1291328 - DNA, 25 bp, Homo sapien
tctagctgaggcgtgacctgcacgg

SEQ ID NO: 1291329 - DNA, 25 bp, Homo sapien
agcacagtggaactcaacgctggcc

SEQ ID NO: 1291330 - DNA, 25 bp, Homo sapien
cgctgtgacccggaggcagctgacc

SEQ ID NO: 1291331 - DNA, 25 bp, Homo sapien
tccttgaaccaacggagctgggtac

SEQ ID NO: 1291332 - DNA, 25 bp, Homo sapien
gtggcagggagagagccgggagggc

SEQ ID NO: 1291333 - DNA, 25 bp, Homo sapien
gaggtggcagggagagagccgggag

SEQ ID NO: 1291334 - DNA, 25 bp, Homo sapien
atggaggtggcagggagagagccgg

SEQ ID NO: 1291335 - DNA, 25 bp, Homo sapien
ggaggtggcagggagagagccggga

SEQ ID NO: 1291336 - DNA, 25 bp, Homo sapien
ggaaaaaagaccgttcagtggcaga

SEQ ID NO: 1291337 - DNA, 25 bp, Homo sapien
ccgttcagtggcagattcattcatc

SEQ ID NO: 1291338 - DNA, 25 bp, Homo sapien
cctgatagcctctctgaccagggaa

SEQ ID NO: 1291339 - DNA, 25 bp, Homo sapien
ccaccaacatggataagggcctgtg

SEQ ID NO: 1291340 - DNA, 25 bp, Homo sapien
ggctgatgcatactgtccccattta

SEQ ID NO: 1291341 - DNA, 25 bp, Homo sapien
aatccagggacttggccatggcaaa

SEQ ID NO: 1291342 - DNA, 25 bp, Homo sapien
taagtgcctactgcgagccacagtt

SEQ ID NO: 1291343 - DNA, 25 bp, Homo sapien
ggaaggacagcaaagcctattctgc

SEQ ID NO: 1291344 - DNA, 25 bp, Homo sapien
actgaggctcaaaaaggttcagtga

SEQ ID NO: 1291345 - DNA, 25 bp, Homo sapien
tcaaaaaggttcagtgacttggcca

SEQ ID NO: 1291346 - DNA, 25 bp, Homo sapien
acttggccaaggttgcacagccagc

SEQ ID NO: 1291347 - DNA, 25 bp, Homo sapien
caaatggccaagctgtgctttgaac

SEQ ID NO: 1291348 - DNA, 25 bp, Homo sapien
tgtcaagcatttacccagcccatcc

SEQ ID NO: 1291349 - DNA, 25 bp, Homo sapien
ctgcctcgggccctggagagtaggg

SEQ ID NO: 1291350 - DNA, 25 bp, Homo sapien
ttgttgccctcaattaagcccaggg

SEQ ID NO: 1291351 - DNA, 25 bp, Homo sapien
ttgccctcaattaagcccagggctg

SEQ ID NO: 1291352 - DNA, 25 bp, Homo sapien
tcggctgagcccaccttgttggtga

SEQ ID NO: 1291353 - DNA, 25 bp, Homo sapien
gcccacgcggctccactggaaggtg

SEQ ID NO: 1291354 - DNA, 25 bp, Homo sapien
agcagctcgttcctggcggtcgccc

SEQ ID NO: 1291355 - DNA, 25 bp, Homo sapien
gggctgcacgctcaaagtgcagcag

SEQ ID NO: 1291356 - DNA, 25 bp, Homo sapien
ctgggaccgtggtggcatatggtgg

SEQ ID NO: 1291357 - DNA, 25 bp, Homo sapien
gggaccgtggtggcatatggtgggc

SEQ ID NO: 1291358 - DNA, 25 bp, Homo sapien
tgggaccgtggtggcatatggtggg

SEQ ID NO: 1291359 - DNA, 25 bp, Homo sapien
ttgcagatgtactggcccgagtcct

SEQ ID NO: 1291360 - DNA, 25 bp, Homo sapien
gcttggaccagtggatggtgggcgc

SEQ ID NO: 1291361 - DNA, 25 bp, Homo sapien
agggctagtggcattgcagatgtac

SEQ ID NO: 1291362 - DNA, 25 bp, Homo sapien
ggtatgatgagtgtgtcaccttcca

SEQ ID NO: 1291363 - DNA, 25 bp, Homo sapien
gcaaggcacacataagtgcccgcat

SEQ ID NO: 1291364 - DNA, 25 bp, Homo sapien
ccgcatctgatggtttagctgatga

SEQ ID NO: 1291365 - DNA, 25 bp, Homo sapien
cgcaaggtggccgtgtgtccagcct

SEQ ID NO: 1291366 - DNA, 25 bp, Homo sapien
tgtgcctagtgcattctgagcaagg

SEQ ID NO: 1291367 - DNA, 25 bp, Homo sapien
tgtccatgagcccatatgtccgctg

SEQ ID NO: 1291368 - DNA, 25 bp, Homo sapien
tgcagcaccgcgtggctgtccatga

SEQ ID NO: 1291369 - DNA, 25 bp, Homo sapien
catatgtccgctgctccaacttggc

SEQ ID NO: 1291370 - DNA, 25 bp, Homo sapien
atccgggtccaacgagcagaggagc

SEQ ID NO: 1291371 - DNA, 25 bp, Homo sapien
tgatgatggagccattgggactgat

SEQ ID NO: 1291372 - DNA, 25 bp, Homo sapien
gtaccgtggttgctgggccgggtgc

SEQ ID NO: 1291373 - DNA, 25 bp, Homo sapien
cgtgcacactgaggttcaccacact

SEQ ID NO: 1291374 - DNA, 25 bp, Homo sapien
actctgggccacaccgtaggcattg

SEQ ID NO: 1291375 - DNA, 25 bp, Homo sapien
ggtcgatggagatgaccgggctcct

SEQ ID NO: 1291376 - DNA, 25 bp, Homo sapien
cgggtcttccactcgaggctgatgg

SEQ ID NO: 1291377 - DNA, 25 bp, Homo sapien
ctgccccgtcatggatgaggcactt

SEQ ID NO: 1291378 - DNA, 25 bp, Homo sapien
atgaggcacttgaagctggcatcct

SEQ ID NO: 1291379 - DNA, 25 bp, Homo sapien
ggcgggacggtgactgtgaaggagg

SEQ ID NO: 1291380 - DNA, 25 bp, Homo sapien
ggctgcacgacacacatactcgcct

SEQ ID NO: 1291381 - DNA, 25 bp, Homo sapien
gggcgggacggtgactgtgaaggag

SEQ ID NO: 1291382 - DNA, 25 bp, Homo sapien
ctggaatcctccccatcctggcccc

SEQ ID NO: 1291383 - DNA, 25 bp, Homo sapien
atcctccccatcctggcccctgtac

SEQ ID NO: 1291384 - DNA, 25 bp, Homo sapien
tggaatcctccccatcctggcccct

SEQ ID NO: 1291385 - DNA, 25 bp, Homo sapien
gaatcctccccatcctggcccctgt

SEQ ID NO: 1291386 - DNA, 25 bp, Homo sapien
cttcagtcacgtgtgaagaggaggc

SEQ ID NO: 1291387 - DNA, 25 bp, Homo sapien
tgcccttcagtcacgtgtgaagagg

SEQ ID NO: 1291388 - DNA, 25 bp, Homo sapien
agagtctgcccttcagtcacgtgtg

SEQ ID NO: 1291389 - DNA, 25 bp, Homo sapien
tctgcccttcagtcacgtgtgaaga

SEQ ID NO: 1291390 - DNA, 25 bp, Homo sapien
tggagggctcaattgtgaccaggac

SEQ ID NO: 1291391 - DNA, 25 bp, Homo sapien
cgagtactcgccagagtcagccggg

SEQ ID NO: 1291392 - DNA, 25 bp, Homo sapien
ggtgcctgagcttccggtcacttgg

SEQ ID NO: 1291393 - DNA, 25 bp, Homo sapien
tcagcctcagcagtgggccgtggac

SEQ ID NO: 1291394 - DNA, 25 bp, Homo sapien
cccttctgccactcgggaggaggag

SEQ ID NO: 1291395 - DNA, 25 bp, Homo sapien
ctcgatgcggatgggtggggctcca

SEQ ID NO: 1291396 - DNA, 25 bp, Homo sapien
gcagggaggtttcctccacgcttgt

SEQ ID NO: 1291397 - DNA, 25 bp, Homo sapien
gaggtttcctccacgcttgtgccac

SEQ ID NO: 1291398 - DNA, 25 bp, Homo sapien
cacgtattcacccgagtcggccggg

SEQ ID NO: 1291399 - DNA, 25 bp, Homo sapien
atcacccggcacacgtattcacccg

SEQ ID NO: 1291400 - DNA, 25 bp, Homo sapien
ggacgtggacagcacttgagccaga

SEQ ID NO: 1291401 - DNA, 25 bp, Homo sapien
gcacttgagccagaggcttcgatgg

SEQ ID NO: 1291402 - DNA, 25 bp, Homo sapien
aggctgcccccacgcttgtgccaag

SEQ ID NO: 1291403 - DNA, 25 bp, Homo sapien
ctgatggtgactggggaggctgccc

SEQ ID NO: 1291404 - DNA, 25 bp, Homo sapien
gctgcccccacgcttgtgccaagtg

SEQ ID NO: 1291405 - DNA, 25 bp, Homo sapien
tgcccccacgcttgtgccaagtgac

SEQ ID NO: 1291406 - DNA, 25 bp, Homo sapien
accacgcagttcagatccagggtct

SEQ ID NO: 1291407 - DNA, 25 bp, Homo sapien
ctgatgggcatggagctgccagggg

SEQ ID NO: 1291408 - DNA, 25 bp, Homo sapien
cgatgttgttgttggcccggcacac

SEQ ID NO: 1291409 - DNA, 25 bp, Homo sapien
ccgagtcagccacagacatttggtg

SEQ ID NO: 1291410 - DNA, 25 bp, Homo sapien
acggagatgacgatggaggcctcca

SEQ ID NO: 1291411 - DNA, 25 bp, Homo sapien
acatttggtgcaaccgcaggtggga

SEQ ID NO: 1291412 - DNA, 25 bp, Homo sapien
catggttccacccccgctgctgtgg

SEQ ID NO: 1291413 - DNA, 25 bp, Homo sapien
tgtcgggagggaaggctgcccccac

SEQ ID NO: 1291414 - DNA, 25 bp, Homo sapien
ctggtgtcgggagggaaggctgccc

SEQ ID NO: 1291415 - DNA, 25 bp, Homo sapien
gtgtcgggagggaaggctgccccca

SEQ ID NO: 1291416 - DNA, 25 bp, Homo sapien
tggtgtcgggagggaaggctgcccc

SEQ ID NO: 1291417 - DNA, 25 bp, Homo sapien
catgtgatgatagcctggggctgcc

SEQ ID NO: 1291418 - DNA, 25 bp, Homo sapien
gggaagacgactcgatcctgatcgg

SEQ ID NO: 1291419 - DNA, 25 bp, Homo sapien
gggctgcctggcgaccacgcagttc

SEQ ID NO: 1291420 - DNA, 25 bp, Homo sapien
tggcgaccacgcagttcagatccaa

SEQ ID NO: 1291421 - DNA, 25 bp, Homo sapien
accctctgcgccacttgtctgtacc

SEQ ID NO: 1291422 - DNA, 25 bp, Homo sapien
gatggcaccggggacctctctgcca

SEQ ID NO: 1291423 - DNA, 25 bp, Homo sapien
tgtggaccacgcagccagagtgaga

SEQ ID NO: 1291424 - DNA, 25 bp, Homo sapien
taacagtgatggcaccggggacctc

SEQ ID NO: 1291425 - DNA, 25 bp, Homo sapien
tcccgggagcctgcaccgttactga

SEQ ID NO: 1291426 - DNA, 25 bp, Homo sapien
cgtactcgcccgagtctgccggagt

SEQ ID NO: 1291427 - DNA, 25 bp, Homo sapien
tactgacgtgacacacgtactcgcc

SEQ ID NO: 1291428 - DNA, 25 bp, Homo sapien
atggtgacgatgagcgaggtctccc

SEQ ID NO: 1291429 - DNA, 25 bp, Homo sapien
cacgcttataccaggtgatggtgtg

SEQ ID NO: 1291430 - DNA, 25 bp, Homo sapien
cctggctggcaaccaggcagttgag

SEQ ID NO: 1291431 - DNA, 25 bp, Homo sapien
tgccggctgggtaagctgcctccac

SEQ ID NO: 1291432 - DNA, 25 bp, Homo sapien
aggtccagggtgtgtccattggcca

SEQ ID NO: 1291433 - DNA, 25 bp, Homo sapien
ctaaggcgctgctggatggtgacaa

SEQ ID NO: 1291434 - DNA, 25 bp, Homo sapien
agctgccgaccacacggcacacgta

SEQ ID NO: 1291435 - DNA, 25 bp, Homo sapien
gtcacctggagcaggcgtagcctcg

SEQ ID NO: 1291436 - DNA, 25 bp, Homo sapien
cacgtactcccctgaatcagctggg

SEQ ID NO: 1291437 - DNA, 25 bp, Homo sapien
cgactgagacttggcaccagagaaa

SEQ ID NO: 1291438 - DNA, 25 bp, Homo sapien
cagggacgactgagacttggcacca

SEQ ID NO: 1291439 - DNA, 25 bp, Homo sapien
agacttggcaccagagaaaagtggg

SEQ ID NO: 1291440 - DNA, 25 bp, Homo sapien
aagtggggaccagtgtttgttgaca

SEQ ID NO: 1291441 - DNA, 25 bp, Homo sapien
ctgggcatgggcctgaccagcaacg

SEQ ID NO: 1291442 - DNA, 25 bp, Homo sapien
atgggcctgaccagcaacgaggcag

SEQ ID NO: 1291443 - DNA, 25 bp, Homo sapien
cagcaacgaggcagttcaggtccag

SEQ ID NO: 1291444 - DNA, 25 bp, Homo sapien
acgaggcagttcaggtccagggtct

SEQ ID NO: 1291445 - DNA, 25 bp, Homo sapien
gaagacgatgactcgatccggaccg

SEQ ID NO: 1291446 - DNA, 25 bp, Homo sapien
tgcgaagacgatgactcgatccgga

SEQ ID NO: 1291447 - DNA, 25 bp, Homo sapien
ccacttgcgaagacgatgactcgat

SEQ ID NO: 1291448 - DNA, 25 bp, Homo sapien
acgatgactcgatccggaccgtggg

SEQ ID NO: 1291449 - DNA, 25 bp, Homo sapien
cactgagcccgcaggctcaatggtg

SEQ ID NO: 1291450 - DNA, 25 bp, Homo sapien
acgcttggtagagtctcagcaggga

SEQ ID NO: 1291451 - DNA, 25 bp, Homo sapien
tcggcacacgtactcgcccgagtcg

SEQ ID NO: 1291452 - DNA, 25 bp, Homo sapien
gggacgcttggtagagtctcagcag

SEQ ID NO: 1291453 - DNA, 25 bp, Homo sapien
tgtccgaggtcacaagctaagtggt

SEQ ID NO: 1291454 - DNA, 25 bp, Homo sapien
cacacccaggttagtcagtcctaga

SEQ ID NO: 1291455 - DNA, 25 bp, Homo sapien
cgtgcccggctggtacgtaccattg

SEQ ID NO: 1291456 - DNA, 25 bp, Homo sapien
taaccactgcactatacatctgtgc

SEQ ID NO: 1291457 - DNA, 25 bp, Homo sapien
cacgcttgtgccacgtgacctgggc

SEQ ID NO: 1291458 - DNA, 25 bp, Homo sapien
cacgcagttcagatccagggtctgc

SEQ ID NO: 1291459 - DNA, 25 bp, Homo sapien
caccacgcagttcagatccagggtc

SEQ ID NO: 1291460 - DNA, 25 bp, Homo sapien
gaggaggagggctcgatgcggatgg

SEQ ID NO: 1291461 - DNA, 25 bp, Homo sapien
ttactgtgaccgtgatggaggcctc

SEQ ID NO: 1291462 - DNA, 25 bp, Homo sapien
ttgctggcccggcagacgtactgtc

SEQ ID NO: 1291463 - DNA, 25 bp, Homo sapien
cgtactgtcccgcatcggcaggtga

SEQ ID NO: 1291464 - DNA, 25 bp, Homo sapien
ccctgggtcccagttactgtgaccg

SEQ ID NO: 1291465 - DNA, 25 bp, Homo sapien
ctggccctcggccactgtggaggat

SEQ ID NO: 1291466 - DNA, 25 bp, Homo sapien
tgccctgccaccacgcagctcagat

SEQ ID NO: 1291467 - DNA, 25 bp, Homo sapien
cactgtggaggatgaagactcgatc

SEQ ID NO: 1291468 - DNA, 25 bp, Homo sapien
cttgtaccatgtgacctgggcgtgg

SEQ ID NO: 1291469 - DNA, 25 bp, Homo sapien
tggggatgggagtgagagttgtaga

SEQ ID NO: 1291470 - DNA, 25 bp, Homo sapien
atgggagtgagagttgtagatgctc

SEQ ID NO: 1291471 - DNA, 25 bp, Homo sapien
gggatgggagtgagagttgtagatg

SEQ ID NO: 1291472 - DNA, 25 bp, Homo sapien
agtggggatgggagtgagagttgta

SEQ ID NO: 1291473 - DNA, 25 bp, Homo sapien
aggcttcgatggtgaccaggactga

SEQ ID NO: 1291474 - DNA, 25 bp, Homo sapien
gtgcagccgcagcagcgagccgtgg

SEQ ID NO: 1291475 - DNA, 25 bp, Homo sapien
gcagccgcagcagcgagccgtgggt

SEQ ID NO: 1291476 - DNA, 25 bp, Homo sapien
ctggtgcagccgcagcagcgagccg

SEQ ID NO: 1291477 - DNA, 25 bp, Homo sapien
tggtgcagccgcagcagcgagccgt

SEQ ID NO: 1291478 - DNA, 25 bp, Homo sapien
gaggaggagggctcgatgcggatgg

SEQ ID NO: 1291479 - DNA, 25 bp, Homo sapien
cacgcagttcagatccagggtctgc

SEQ ID NO: 1291480 - DNA, 25 bp, Homo sapien
tgggcgtgggcctgcccgggcacca

SEQ ID NO: 1291481 - DNA, 25 bp, Homo sapien
cgcttgtgccacgtgacctgggcgt

SEQ ID NO: 1291482 - DNA, 25 bp, Homo sapien
gggcccgatccattctccacacggc

SEQ ID NO: 1291483 - DNA, 25 bp, Homo sapien
tccagaatcagctggtgagacctgg

SEQ ID NO: 1291484 - DNA, 25 bp, Homo sapien
tctccacacggcacacatattctcc

SEQ ID NO: 1291485 - DNA, 25 bp, Homo sapien
ctccagaatcagctggtgagacctg

SEQ ID NO: 1291486 - DNA, 25 bp, Homo sapien
tggggaggcaggctaccccctcgcc

SEQ ID NO: 1291487 - DNA, 25 bp, Homo sapien
aggctaccccctcgcctgtaccagg

SEQ ID NO: 1291488 - DNA, 25 bp, Homo sapien
ggaggcaggctaccccctcgcctgt

SEQ ID NO: 1291489 - DNA, 25 bp, Homo sapien
gcaggctaccccctcgcctgtacca

SEQ ID NO: 1291490 - DNA, 25 bp, Homo sapien
cttctgtcacagaaggcgatgagga

SEQ ID NO: 1291491 - DNA, 25 bp, Homo sapien
gactcaatcttgaccggcggtgggc

SEQ ID NO: 1291492 - DNA, 25 bp, Homo sapien
caccacacagttgaggtcgagtgtt

SEQ ID NO: 1291493 - DNA, 25 bp, Homo sapien
agttgaggtcgagtgtttgcccttc

SEQ ID NO: 1291494 - DNA, 25 bp, Homo sapien
tgaaaggacaaccacttggatccgg

SEQ ID NO: 1291495 - DNA, 25 bp, Homo sapien
tggccacgcagaggtagaagccggc

SEQ ID NO: 1291496 - DNA, 25 bp, Homo sapien
agcagtgtcgcgatgtctgtgcgct

SEQ ID NO: 1291497 - DNA, 25 bp, Homo sapien
gccggcgtcagcagtcgtgatggct

SEQ ID NO: 1291498 - DNA, 25 bp, Homo sapien
cggcctgcgtggacctgggtcctct

SEQ ID NO: 1291499 - DNA, 25 bp, Homo sapien
ccaggtgatggtggcgctaggcacg

SEQ ID NO: 1291500 - DNA, 25 bp, Homo sapien
tgcagtacagcctgacggtgcggcc

SEQ ID NO: 1291501 - DNA, 25 bp, Homo sapien
tctctgggctcacttggactctggg

SEQ ID NO: 1291502 - DNA, 25 bp, Homo sapien
tgggctcgacagctggcaggcgcag

SEQ ID NO: 1291503 - DNA, 25 bp, Homo sapien
caggatgccgccgtggatttgtgcc

SEQ ID NO: 1291504 - DNA, 25 bp, Homo sapien
actgggcctgatccgtgggctcgac

SEQ ID NO: 1291505 - DNA, 25 bp, Homo sapien
ctgctgtgggctcggcacaagtact

SEQ ID NO: 1291506 - DNA, 25 bp, Homo sapien
gctgtggcggatggatggagaccac

SEQ ID NO: 1291507 - DNA, 25 bp, Homo sapien
cactgtgagctgtggcggatggatg

SEQ ID NO: 1291508 - DNA, 25 bp, Homo sapien
ccagttgcccgggctgcactgtgag

SEQ ID NO: 1291509 - DNA, 25 bp, Homo sapien
ctgtggcgctgcagcggaactccgc

SEQ ID NO: 1291510 - DNA, 25 bp, Homo sapien
tggcaaacatgttggagccggtgca

SEQ ID NO: 1291511 - DNA, 25 bp, Homo sapien
gcgggtccacaccagggtataggct

SEQ ID NO: 1291512 - DNA, 25 bp, Homo sapien
tcactcagctggacgttgcgaatgg

SEQ ID NO: 1291513 - DNA, 25 bp, Homo sapien
cattgaaatccatggctcgggtggg

SEQ ID NO: 1291514 - DNA, 25 bp, Homo sapien
agtcactgtgatgggcttgcttgga

SEQ ID NO: 1291515 - DNA, 25 bp, Homo sapien
gtgcagatgaaggtgacgtcagctc

SEQ ID NO: 1291516 - DNA, 25 bp, Homo sapien
cactgtgatgggcttgcttggagcc

SEQ ID NO: 1291517 - DNA, 25 bp, Homo sapien
cagatgaaggtgacgtcagctccgg

SEQ ID NO: 1291518 - DNA, 25 bp, Homo sapien
tgcaaatgtagaccccagcatccga

SEQ ID NO: 1291519 - DNA, 25 bp, Homo sapien
ctgcccggctggtattggattggtg

SEQ ID NO: 1291520 - DNA, 25 bp, Homo sapien
gagattacggcaggtgcaaatgtag

SEQ ID NO: 1291521 - DNA, 25 bp, Homo sapien
tattggattggtggagattacggca

SEQ ID NO: 1291522 - DNA, 25 bp, Homo sapien
cctcacgggaccaatagaagtagtg

SEQ ID NO: 1291523 - DNA, 25 bp, Homo sapien
actgacctgacaccgcagggagtgg

SEQ ID NO: 1291524 - DNA, 25 bp, Homo sapien
ggcactatgcttcgagcaggatgga

SEQ ID NO: 1291525 - DNA, 25 bp, Homo sapien
gtgccgctgggcacaggccgcccat

SEQ ID NO: 1291526 - DNA, 25 bp, Homo sapien
tcgaccaccagtggggcttggtttg

SEQ ID NO: 1291527 - DNA, 25 bp, Homo sapien
ctcgaccaccagtggggcttggttt

SEQ ID NO: 1291528 - DNA, 25 bp, Homo sapien
cttgcacactggggttacccacgta

SEQ ID NO: 1291529 - DNA, 25 bp, Homo sapien
tgcacactggggttacccacgtaac

SEQ ID NO: 1291530 - DNA, 25 bp, Homo sapien
ccttgcacactggggttacccacgt

SEQ ID NO: 1291531 - DNA, 25 bp, Homo sapien
ttgcacactggggttacccacgtaa

SEQ ID NO: 1291532 - DNA, 25 bp, Homo sapien
tagccgggttcgcaggccgtgcagc

SEQ ID NO: 1291533 - DNA, 25 bp, Homo sapien
gccagtgtagccgggttcgcaggcc

SEQ ID NO: 1291534 - DNA, 25 bp, Homo sapien
agtgtagccgggttcgcaggccgtg

SEQ ID NO: 1291535 - DNA, 25 bp, Homo sapien
tgtagccgggttcgcaggccgtgca

SEQ ID NO: 1291536 - DNA, 25 bp, Homo sapien
cgcagaactcccctgcggcgttgtg

SEQ ID NO: 1291537 - DNA, 25 bp, Homo sapien
aggggcacaaagctcgcagaactcc

SEQ ID NO: 1291538 - DNA, 25 bp, Homo sapien
tgtggcatctccgtagtagccaggg

SEQ ID NO: 1291539 - DNA, 25 bp, Homo sapien
gtcctcaggcgtcccggctgtggca

SEQ ID NO: 1291540 - DNA, 25 bp, Homo sapien
catagctcgcagtggccgaggtaga

SEQ ID NO: 1291541 - DNA, 25 bp, Homo sapien
agtggccgaggtagagcccactccc

SEQ ID NO: 1291542 - DNA, 25 bp, Homo sapien
attgcattcacatagctcgcagtgg

SEQ ID NO: 1291543 - DNA, 25 bp, Homo sapien
gtagagcccactcccggtgcgcgtg

SEQ ID NO: 1291544 - DNA, 25 bp, Homo sapien
tggcccggatcaggagctcatccag

SEQ ID NO: 1291545 - DNA, 25 bp, Homo sapien
catcaggaggtgctcgcgtgtggcc

SEQ ID NO: 1291546 - DNA, 25 bp, Homo sapien
acagaccgatgtagcctggcgggca

SEQ ID NO: 1291547 - DNA, 25 bp, Homo sapien
tgactgcgctgatgctggccgccag

SEQ ID NO: 1291548 - DNA, 25 bp, Homo sapien
ctctcggaacatgatctcgtagctc

SEQ ID NO: 1291549 - DNA, 25 bp, Homo sapien
gggaggccactagcatgatgttgtt

SEQ ID NO: 1291550 - DNA, 25 bp, Homo sapien
atgatctcgtagctcctcctctcag

SEQ ID NO: 1291551 - DNA, 25 bp, Homo sapien
cgctggctgggaggccactagcatg

SEQ ID NO: 1291552 - DNA, 25 bp, Homo sapien
gtgtatcgcaacttcccaccgtagg

SEQ ID NO: 1291553 - DNA, 25 bp, Homo sapien
tgtaggagagggtgtatcgcaactt

SEQ ID NO: 1291554 - DNA, 25 bp, Homo sapien
gagagggtgtatcgcaacttcccac

SEQ ID NO: 1291555 - DNA, 25 bp, Homo sapien
ctgtgggcctgctgtgtaggagagg

SEQ ID NO: 1291556 - DNA, 25 bp, Homo sapien
cggggcagctgccagtaatagaggc

SEQ ID NO: 1291557 - DNA, 25 bp, Homo sapien
aagcagagagaagccttcgtaggag

SEQ ID NO: 1291558 - DNA, 25 bp, Homo sapien
ggcagctgccagtaatagaggcttc

SEQ ID NO: 1291559 - DNA, 25 bp, Homo sapien
caggaagcagagagaagccttcgta

SEQ ID NO: 1291560 - DNA, 25 bp, Homo sapien
cggctgcccgcaactgctcctctga

SEQ ID NO: 1291561 - DNA, 25 bp, Homo sapien
ctgggggctctgggatcctcccagc

SEQ ID NO: 1291562 - DNA, 25 bp, Homo sapien
tgggggctctgggatcctcccagct

SEQ ID NO: 1291563 - DNA, 25 bp, Homo sapien
gctgtcacggctgcccgcaactgct

SEQ ID NO: 1291564 - DNA, 25 bp, Homo sapien
gcaggcgagctaagacctcccaaag

SEQ ID NO: 1291565 - DNA, 25 bp, Homo sapien
agggagcaggcgagctaagacctcc

SEQ ID NO: 1291566 - DNA, 25 bp, Homo sapien
tggagctagagccatgggcagggtc

SEQ ID NO: 1291567 - DNA, 25 bp, Homo sapien
gagctagagccatgggcagggtcct

SEQ ID NO: 1291568 - DNA, 25 bp, Homo sapien
gagcccggcgcatccgcgcaaagta

SEQ ID NO: 1291569 - DNA, 25 bp, Homo sapien
gtgagcccggcgcatccgcgcaaag

SEQ ID NO: 1291570 - DNA, 25 bp, Homo sapien
tggtgagcccggcgcatccgcgcaa

SEQ ID NO: 1291571 - DNA, 25 bp, Homo sapien
ggcgcatccgcgcaaagtacgcctc

SEQ ID NO: 1291572 - DNA, 25 bp, Homo sapien
gagcgggcacgtgaatgacactgaa

SEQ ID NO: 1291573 - DNA, 25 bp, Homo sapien
tatgggactgcaaaagccacgtgcc

SEQ ID NO: 1291574 - DNA, 25 bp, Homo sapien
taaccacgatatggccatgcaggtg

SEQ ID NO: 1291575 - DNA, 25 bp, Homo sapien
tttggcagagcatttgaagggcagc

SEQ ID NO: 1291576 - DNA, 25 bp, Homo sapien
catggccgagttgggcaaagttgcc

SEQ ID NO: 1291577 - DNA, 25 bp, Homo sapien
acagtgaattctcctgtcaggcggc

SEQ ID NO: 1291578 - DNA, 25 bp, Homo sapien
gtttcgctgtgggttcaccagggca

SEQ ID NO: 1291579 - DNA, 25 bp, Homo sapien
tatgtctccggcagctgccagtaga

SEQ ID NO: 1291580 - DNA, 25 bp, Homo sapien
tgctggcactcaggtggaagtggtg

SEQ ID NO: 1291581 - DNA, 25 bp, Homo sapien
cagagctggcgcactgctgggtgat

SEQ ID NO: 1291582 - DNA, 25 bp, Homo sapien
caggtggcgtgtgtaggcagagctg

SEQ ID NO: 1291583 - DNA, 25 bp, Homo sapien
ggtggggccggcagtggctgcaagt

SEQ ID NO: 1291584 - DNA, 25 bp, Homo sapien
gctgcctgatttccccgcagggtct

SEQ ID NO: 1291585 - DNA, 25 bp, Homo sapien
accagatgctgcctgatttccccgc

SEQ ID NO: 1291586 - DNA, 25 bp, Homo sapien
tgctgcctgatttccccgcagggtc

SEQ ID NO: 1291587 - DNA, 25 bp, Homo sapien
ctgatttccccgcagggtctgggca

SEQ ID NO: 1291588 - DNA, 25 bp, Homo sapien
cttgcactggcactgaccagcagca

SEQ ID NO: 1291589 - DNA, 25 bp, Homo sapien
agttgcagcctatgggccctggcac

SEQ ID NO: 1291590 - DNA, 25 bp, Homo sapien
cttgggggtcacagttgcagcctat

SEQ ID NO: 1291591 - DNA, 25 bp, Homo sapien
ggtcacagttgcagcctatgggccc

SEQ ID NO: 1291592 - DNA, 25 bp, Homo sapien
tggctggggttgccatagtagccag

SEQ ID NO: 1291593 - DNA, 25 bp, Homo sapien
ggctggggttgccatagtagccagg

SEQ ID NO: 1291594 - DNA, 25 bp, Homo sapien
tggcctggggagcacgcatcacagg

SEQ ID NO: 1291595 - DNA, 25 bp, Homo sapien
ctctcacagtgacgcccactgtggc

SEQ ID NO: 1291596 - DNA, 25 bp, Homo sapien
gtggcctggggagcacgcatcacag

SEQ ID NO: 1291597 - DNA, 25 bp, Homo sapien
gtccagaaaacaagtgtgggcagcc

SEQ ID NO: 1291598 - DNA, 25 bp, Homo sapien
tgtccagaaaacaagtgtgggcagc

SEQ ID NO: 1291599 - DNA, 25 bp, Homo sapien
tgtgtccagaaaacaagtgtgggca

SEQ ID NO: 1291600 - DNA, 25 bp, Homo sapien
ctgtgtccagaaaacaagtgtgggc

SEQ ID NO: 1291601 - DNA, 25 bp, Homo sapien
gcagatttctagtcaggaacgcagt

SEQ ID NO: 1291602 - DNA, 25 bp, Homo sapien
tgggggcagatttctagtcaggaac

SEQ ID NO: 1291603 - DNA, 25 bp, Homo sapien
gtcaggaacgcagtggctccttcct

SEQ ID NO: 1291604 - DNA, 25 bp, Homo sapien
caggaacgcagtggctccttcctct

SEQ ID NO: 1291605 - DNA, 25 bp, Homo sapien
gggcgtccccgtagtatcctggctg

SEQ ID NO: 1291606 - DNA, 25 bp, Homo sapien
tggctggcactgctcacaccgaggg

SEQ ID NO: 1291607 - DNA, 25 bp, Homo sapien
accgagggccctccgtgtgatgctg

SEQ ID NO: 1291608 - DNA, 25 bp, Homo sapien
cagctggcagtcctgtggtgtcccc

SEQ ID NO: 1291609 - DNA, 25 bp, Homo sapien
gaggagcaggatgtgagttgaggct

SEQ ID NO: 1291610 - DNA, 25 bp, Homo sapien
tggaggagcaggatgtgagttgagg

SEQ ID NO: 1291611 - DNA, 25 bp, Homo sapien
ggaggagcaggatgtgagttgaggc

SEQ ID NO: 1291612 - DNA, 25 bp, Homo sapien
caggtagaggccactgggcgtgcgt

SEQ ID NO: 1291613 - DNA, 25 bp, Homo sapien
ttctggctcgcaggcctctgagtgg

SEQ ID NO: 1291614 - DNA, 25 bp, Homo sapien
agctgcagcgttcacaggtacccag

SEQ ID NO: 1291615 - DNA, 25 bp, Homo sapien
cactgggcgtgcgtgtgtagcctgt

SEQ ID NO: 1291616 - DNA, 25 bp, Homo sapien
cagccacgtccatgctgatgccaga

SEQ ID NO: 1291617 - DNA, 25 bp, Homo sapien
cacgtccatgctgatgccagagacc

SEQ ID NO: 1291618 - DNA, 25 bp, Homo sapien
tgttccacttccagcgcggggtcct

SEQ ID NO: 1291619 - DNA, 25 bp, Homo sapien
gccacgtccatgctgatgccagaga

SEQ ID NO: 1291620 - DNA, 25 bp, Homo sapien
gctgcgaggaccgtggcaaacagct

SEQ ID NO: 1291621 - DNA, 25 bp, Homo sapien
tccagatctccagaggctgcgagga

SEQ ID NO: 1291622 - DNA, 25 bp, Homo sapien
caagacccagcgtgaataggagtgc

SEQ ID NO: 1291623 - DNA, 25 bp, Homo sapien
tccactggcagggtcttattagtcc

SEQ ID NO: 1291624 - DNA, 25 bp, Homo sapien
atcaggagggtgtcgatgcctgcca

SEQ ID NO: 1291625 - DNA, 25 bp, Homo sapien
ctggctgcccatcgggccgctgcca

SEQ ID NO: 1291626 - DNA, 25 bp, Homo sapien
catcagcaggtgctcccgtgtggct

SEQ ID NO: 1291627 - DNA, 25 bp, Homo sapien
gggctgctgggcgtaggatgctcgg

SEQ ID NO: 1291628 - DNA, 25 bp, Homo sapien
catggtgctctaggatgatgttgtt

SEQ ID NO: 1291629 - DNA, 25 bp, Homo sapien
ttgttaccttgcagcaccaccaacg

SEQ ID NO: 1291630 - DNA, 25 bp, Homo sapien
tgtggagcccggctgggacctctgg

SEQ ID NO: 1291631 - DNA, 25 bp, Homo sapien
gggtcactgtgaagcgcagctctcc

SEQ ID NO: 1291632 - DNA, 25 bp, Homo sapien
tagggtccagataagagtctgtgga

SEQ ID NO: 1291633 - DNA, 25 bp, Homo sapien
gtgtgggtgcttgcggcgttggtca

SEQ ID NO: 1291634 - DNA, 25 bp, Homo sapien
ggagaagatgccctcgttggtggtg

SEQ ID NO: 1291635 - DNA, 25 bp, Homo sapien
ggtcaggctgaagtgaccaggctcc

SEQ ID NO: 1291636 - DNA, 25 bp, Homo sapien
gaaagagccgtcagcacattcattg

SEQ ID NO: 1291637 - DNA, 25 bp, Homo sapien
ctggtgcagtggcgactgacaccca

SEQ ID NO: 1291638 - DNA, 25 bp, Homo sapien
cagccatcggggtttcgggtactca

SEQ ID NO: 1291639 - DNA, 25 bp, Homo sapien
ctgggcacggctccatgaagagctg

SEQ ID NO: 1291640 - DNA, 25 bp, Homo sapien
cacgctcgtcacagcgcacaatctc

SEQ ID NO: 1291641 - DNA, 25 bp, Homo sapien
tgccacgctcgtcacagcgcacaat

SEQ ID NO: 1291642 - DNA, 25 bp, Homo sapien
catgctgccacgctcgtcacagcgc

SEQ ID NO: 1291643 - DNA, 25 bp, Homo sapien
atgctgccacgctcgtcacagcgca

SEQ ID NO: 1291644 - DNA, 25 bp, Homo sapien
gatatacgtggtccgggcagataga

SEQ ID NO: 1291645 - DNA, 25 bp, Homo sapien
cacaaaacgagtgttggcagggcag

SEQ ID NO: 1291646 - DNA, 25 bp, Homo sapien
gcagatagaggaacagtggctcccc

SEQ ID NO: 1291647 - DNA, 25 bp, Homo sapien
tgtgcagcccaggttgggttgggag

SEQ ID NO: 1291648 - DNA, 25 bp, Homo sapien
ctgcacttcccgccgggctggatgg

SEQ ID NO: 1291649 - DNA, 25 bp, Homo sapien
ggttgccctcgtatccgggggcaca

SEQ ID NO: 1291650 - DNA, 25 bp, Homo sapien
gttgccctcgtatccgggggcacag

SEQ ID NO: 1291651 - DNA, 25 bp, Homo sapien
cttggccatccgtgtccaggaagca

SEQ ID NO: 1291652 - DNA, 25 bp, Homo sapien
ccatccgtgtccaggaagcaagtgt

SEQ ID NO: 1291653 - DNA, 25 bp, Homo sapien
ggcacaggcgtcacatgtggcttgg

SEQ ID NO: 1291654 - DNA, 25 bp, Homo sapien
ggccatccgtgtccaggaagcaagt

SEQ ID NO: 1291655 - DNA, 25 bp, Homo sapien
ggcatcgatgtatgggcaagggcag

SEQ ID NO: 1291656 - DNA, 25 bp, Homo sapien
tcatggcgtccccaaagaagccagc

SEQ ID NO: 1291657 - DNA, 25 bp, Homo sapien
tgcacttgttgcactgtggcccctc

SEQ ID NO: 1291658 - DNA, 25 bp, Homo sapien
aagccagccttgcacttgttgcact

SEQ ID NO: 1291659 - DNA, 25 bp, Homo sapien
ggcagtggccatacacagggtcaca

SEQ ID NO: 1291660 - DNA, 25 bp, Homo sapien
tggcatggccattgcaattgcaacc

SEQ ID NO: 1291661 - DNA, 25 bp, Homo sapien
ccaggcacccgagtgaagtgggcat

SEQ ID NO: 1291662 - DNA, 25 bp, Homo sapien
aagtgggcatcacagctctcgcagg

SEQ ID NO: 1291663 - DNA, 25 bp, Homo sapien
taagtcccacgctggccatcttggt

SEQ ID NO: 1291664 - DNA, 25 bp, Homo sapien
catcttggtgttgtacacggtctgg

SEQ ID NO: 1291665 - DNA, 25 bp, Homo sapien
tgacggtggtatccatggcgatgtc

SEQ ID NO: 1291666 - DNA, 25 bp, Homo sapien
acggtctggatgagcacggcctcca

SEQ ID NO: 1291667 - DNA, 25 bp, Homo sapien
ggcggtacccggcacccatgaggac

SEQ ID NO: 1291668 - DNA, 25 bp, Homo sapien
aactcgtagcgcacgttgtaacgca

SEQ ID NO: 1291669 - DNA, 25 bp, Homo sapien
aactggacctggcgctggttcagag

SEQ ID NO: 1291670 - DNA, 25 bp, Homo sapien
atgccacgggccaactcgtagcgca

SEQ ID NO: 1291671 - DNA, 25 bp, Homo sapien
acaacagggtggatcagcacgggca

SEQ ID NO: 1291672 - DNA, 25 bp, Homo sapien
cacaacagggtggatcagcacgggc

SEQ ID NO: 1291673 - DNA, 25 bp, Homo sapien
ctggcacaacagggtggatcagcac

SEQ ID NO: 1291674 - DNA, 25 bp, Homo sapien
ggcacaacagggtggatcagcacgg

SEQ ID NO: 1291675 - DNA, 25 bp, Homo sapien
ggctgcgcaggcattgtcacattca

SEQ ID NO: 1291676 - DNA, 25 bp, Homo sapien
tcgatctgcagctgcgtggaggaga

SEQ ID NO: 1291677 - DNA, 25 bp, Homo sapien
aggtcgactagctggaactcgtgca

SEQ ID NO: 1291678 - DNA, 25 bp, Homo sapien
aactcgtgcagggatgggtcgatct

SEQ ID NO: 1291679 - DNA, 25 bp, Homo sapien
ccttgaagtcatcgggttggtcaaa

SEQ ID NO: 1291680 - DNA, 25 bp, Homo sapien
tgctctggcacacgctggtgatgcc

SEQ ID NO: 1291681 - DNA, 25 bp, Homo sapien
tgtgctccaggtagaagtggccgtc

SEQ ID NO: 1291682 - DNA, 25 bp, Homo sapien
agcgcagcctgatctggtcccggaa

SEQ ID NO: 1291683 - DNA, 25 bp, Homo sapien
cggtgacacctgccctccggcagta

SEQ ID NO: 1291684 - DNA, 25 bp, Homo sapien
ccggtgacacctgccctccggcagt

SEQ ID NO: 1291685 - DNA, 25 bp, Homo sapien
ggtgacacctgccctccggcagtac

SEQ ID NO: 1291686 - DNA, 25 bp, Homo sapien
ggacaccgtcaggaatgccaaacac

SEQ ID NO: 1291687 - DNA, 25 bp, Homo sapien
acggatgatcagtgtgccacggcca

SEQ ID NO: 1291688 - DNA, 25 bp, Homo sapien
cgttgtgggacgagctcaaggacac

SEQ ID NO: 1291689 - DNA, 25 bp, Homo sapien
gtctgactccttcacatcacggatg

SEQ ID NO: 1291690 - DNA, 25 bp, Homo sapien
atggactcccggggaggtgtcacca

SEQ ID NO: 1291691 - DNA, 25 bp, Homo sapien
agttgagcctccaattgatgatggg

SEQ ID NO: 1291692 - DNA, 25 bp, Homo sapien
gccccgggaagcctggatggactcc

SEQ ID NO: 1291693 - DNA, 25 bp, Homo sapien
ggacgccaatggccacgcaggtgaa

SEQ ID NO: 1291694 - DNA, 25 bp, Homo sapien
ggctgtggacagaacccctagaacc

SEQ ID NO: 1291695 - DNA, 25 bp, Homo sapien
cagggcccgcatctcgaccccagct

SEQ ID NO: 1291696 - DNA, 25 bp, Homo sapien
ggctgaggctgtggacagaacccct

SEQ ID NO: 1291697 - DNA, 25 bp, Homo sapien
agggcccgcatctcgaccccagctc

SEQ ID NO: 1291698 - DNA, 25 bp, Homo sapien
cagtcgctctcctcgtcacagtgga

SEQ ID NO: 1291699 - DNA, 25 bp, Homo sapien
tcgctccggtcaggacagtcgctct

SEQ ID NO: 1291700 - DNA, 25 bp, Homo sapien
agacgcatcggaactgtgtgggccc

SEQ ID NO: 1291701 - DNA, 25 bp, Homo sapien
ctgggatgcacatgttggtagagac

SEQ ID NO: 1291702 - DNA, 25 bp, Homo sapien
cgcaggggaactcgttgggctcaca

SEQ ID NO: 1291703 - DNA, 25 bp, Homo sapien
agttggcttcatcagttcggtcctc

SEQ ID NO: 1291704 - DNA, 25 bp, Homo sapien
cagcttgagggcacaatgtccattc

SEQ ID NO: 1291705 - DNA, 25 bp, Homo sapien
ggtcctcacagtcaaagtcaccatc

SEQ ID NO: 1291706 - DNA, 25 bp, Homo sapien
gatgcagtgcccattgcggcatgcg

SEQ ID NO: 1291707 - DNA, 25 bp, Homo sapien
cctgtccgtcgcagaggtagtctct

SEQ ID NO: 1291708 - DNA, 25 bp, Homo sapien
gcagtgcccattgcggcatgcggcc

SEQ ID NO: 1291709 - DNA, 25 bp, Homo sapien
gtcctcgcagtcctcctgtccgtcg

SEQ ID NO: 1291710 - DNA, 25 bp, Homo sapien
ggtggctgtcgcatgatggttgtct

SEQ ID NO: 1291711 - DNA, 25 bp, Homo sapien
agcgtgggtgactggtggctgtcgc

SEQ ID NO: 1291712 - DNA, 25 bp, Homo sapien
ggtgactggtggctgtcgcatgatg

SEQ ID NO: 1291713 - DNA, 25 bp, Homo sapien
tgacggaaccgggaagcaggggctg

SEQ ID NO: 1291714 - DNA, 25 bp, Homo sapien
agatgtcgtctccacaaggagagag

SEQ ID NO: 1291715 - DNA, 25 bp, Homo sapien
ggggctgatacccaggactggctcc

SEQ ID NO: 1291716 - DNA, 25 bp, Homo sapien
ggtaaagatgtcgtctccacaagga

SEQ ID NO: 1291717 - DNA, 25 bp, Homo sapien
gggcggtaaagatgtcgtctccaca

SEQ ID NO: 1291718 - DNA, 25 bp, Homo sapien
tgcaccaaaccctcatagtccttga

SEQ ID NO: 1291719 - DNA, 25 bp, Homo sapien
gtccttgatgggctccaagacccag

SEQ ID NO: 1291720 - DNA, 25 bp, Homo sapien
ctcgtggccccggacatcccctcac

SEQ ID NO: 1291721 - DNA, 25 bp, Homo sapien
catagtccttgatgggctccaagac

SEQ ID NO: 1291722 - DNA, 25 bp, Homo sapien
tgtggcaggcaaactcggcctccgt

SEQ ID NO: 1291723 - DNA, 25 bp, Homo sapien
cacactcattgtagctgtggcaggc

SEQ ID NO: 1291724 - DNA, 25 bp, Homo sapien
tcgggccgccggtcacagcgatact

SEQ ID NO: 1291725 - DNA, 25 bp, Homo sapien
gtcacagcgatactccagggccaca

SEQ ID NO: 1291726 - DNA, 25 bp, Homo sapien
cgccacagcggccggcgggggtggg

SEQ ID NO: 1291727 - DNA, 25 bp, Homo sapien
ctggtgtcactgcgaccgccacagc

SEQ ID NO: 1291728 - DNA, 25 bp, Homo sapien
accgccacagcggccggcgggggtg

SEQ ID NO: 1291729 - DNA, 25 bp, Homo sapien
ggtgtcactgcgaccgccacagcgg

SEQ ID NO: 1291730 - DNA, 25 bp, Homo sapien
gaaaggaagatgtgatcagtggctg

SEQ ID NO: 1291731 - DNA, 25 bp, Homo sapien
aaggaagatgtgatcagtggctgtt

SEQ ID NO: 1291732 - DNA, 25 bp, Homo sapien
gtggctgttccacctgggagccggg

SEQ ID NO: 1291733 - DNA, 25 bp, Homo sapien
gaagatgtgatcagtggctgttcca

SEQ ID NO: 1291734 - DNA, 25 bp, Homo sapien
ctggaggaggcgatcccagacacca

SEQ ID NO: 1291735 - DNA, 25 bp, Homo sapien
gcagactcaggagtagtgagctccc

SEQ ID NO: 1291736 - DNA, 25 bp, Homo sapien
gctccctgtttctagtggtgtgcaa

SEQ ID NO: 1291737 - DNA, 25 bp, Homo sapien
tgtgcaagcccaagttgggagccta

SEQ ID NO: 1291738 - DNA, 25 bp, Homo sapien
agccgctggagatgaccctgagcag

SEQ ID NO: 1291739 - DNA, 25 bp, Homo sapien
tgtgcccaggcgtcggaactggaat

SEQ ID NO: 1291740 - DNA, 25 bp, Homo sapien
gggagaggtgacgtaggaggccaca

SEQ ID NO: 1291741 - DNA, 25 bp, Homo sapien
atctgagccccatccgcattccctt

SEQ ID NO: 1291742 - DNA, 25 bp, Homo sapien
gaacaccacactgacaacctggtct

SEQ ID NO: 1291743 - DNA, 25 bp, Homo sapien
cacactgacaacctggtctccggga

SEQ ID NO: 1291744 - DNA, 25 bp, Homo sapien
cactgacaacctggtctccgggaat

SEQ ID NO: 1291745 - DNA, 25 bp, Homo sapien
tgatgaacaccacactgacaacctg

SEQ ID NO: 1291746 - DNA, 25 bp, Homo sapien
tgaaattcaccagggctcggaaata

SEQ ID NO: 1291747 - DNA, 25 bp, Homo sapien
gtctaccacagcctcggacacctct

SEQ ID NO: 1291748 - DNA, 25 bp, Homo sapien
tcggacacctctcggaactctctgg

SEQ ID NO: 1291749 - DNA, 25 bp, Homo sapien
gctgtactcgatggagcgagtgaaa

SEQ ID NO: 1291750 - DNA, 25 bp, Homo sapien
ggctccgagaccatcatgccagcca

SEQ ID NO: 1291751 - DNA, 25 bp, Homo sapien
cgctgcccaggtccccactgcccag

SEQ ID NO: 1291752 - DNA, 25 bp, Homo sapien
cccaggtccccactgcccaggtcgt

SEQ ID NO: 1291753 - DNA, 25 bp, Homo sapien
tgcccaggtccccactgcccaggtc

SEQ ID NO: 1291754 - DNA, 25 bp, Homo sapien
ccatctggaagtccccgctgcccag

SEQ ID NO: 1291755 - DNA, 25 bp, Homo sapien
gagacaagccatcgtatgccctcag

SEQ ID NO: 1291756 - DNA, 25 bp, Homo sapien
tcatcatcagaaaggtacgaatgtg

SEQ ID NO: 1291757 - DNA, 25 bp, Homo sapien
gctgtgacggtctctatgtcctcag

SEQ ID NO: 1291758 - DNA, 25 bp, Homo sapien
tacgaatgtgtccagcgcatttggc

SEQ ID NO: 1291759 - DNA, 25 bp, Homo sapien
gggctggacctctgggctggccatg

SEQ ID NO: 1291760 - DNA, 25 bp, Homo sapien
caggaaatgaggcagggctggacct

SEQ ID NO: 1291761 - DNA, 25 bp, Homo sapien
aaatgaggcagggctggacctctgg

SEQ ID NO: 1291762 - DNA, 25 bp, Homo sapien
ggctggacctctgggctggccatga

SEQ ID NO: 1291763 - DNA, 25 bp, Homo sapien
acacctccaagtccgggccaccctg

SEQ ID NO: 1291764 - DNA, 25 bp, Homo sapien
aggcaggggactggcgagaacactt

SEQ ID NO: 1291765 - DNA, 25 bp, Homo sapien
agaacacttgaccaccagccggtgg

SEQ ID NO: 1291766 - DNA, 25 bp, Homo sapien
ggggactggcgagaacacttgacca

SEQ ID NO: 1291767 - DNA, 25 bp, Homo sapien
tcggagcccggacatggagattcca

SEQ ID NO: 1291768 - DNA, 25 bp, Homo sapien
cccactgggaatgggtagtgggaat

SEQ ID NO: 1291769 - DNA, 25 bp, Homo sapien
gaatttcggagcccggacatggaga

SEQ ID NO: 1291770 - DNA, 25 bp, Homo sapien
ctgggaatgggtagtgggaatttcg

SEQ ID NO: 1291771 - DNA, 25 bp, Homo sapien
tttcttatggctcttcccgagcctc

SEQ ID NO: 1291772 - DNA, 25 bp, Homo sapien
taaaatgggacaacaggccgtgtgc

SEQ ID NO: 1291773 - DNA, 25 bp, Homo sapien
aacttcaatgtgtacctctgtaaaa

SEQ ID NO: 1291774 - DNA, 25 bp, Homo sapien
tattggcttataagtttgaggactc

SEQ ID NO: 1291775 - DNA, 25 bp, Homo sapien
tggagctgaagacaccccagctctg

SEQ ID NO: 1291776 - DNA, 25 bp, Homo sapien
ctccctaaaaagaggcgctgggcca

SEQ ID NO: 1291777 - DNA, 25 bp, Homo sapien
agtcaccggctccttgctgggtcag

SEQ ID NO: 1291778 - DNA, 25 bp, Homo sapien
cagccacaggcgtggagctgaagac

SEQ ID NO: 1291779 - DNA, 25 bp, Homo sapien
gacgacacaatagaactgagaccca

SEQ ID NO: 1291780 - DNA, 25 bp, Homo sapien
aaggctcaacctgctatccctaggg

SEQ ID NO: 1291781 - DNA, 25 bp, Homo sapien
cataagaaaagagtgttggaggaga

SEQ ID NO: 1291782 - DNA, 25 bp, Homo sapien
cctcccaacattatgaagatcccat

SEQ ID NO: 1291783 - DNA, 25 bp, Homo sapien
tattgtccaaacaagagatcgtaag

SEQ ID NO: 1291784 - DNA, 25 bp, Homo sapien
caaagcaatcctatggaacaccggg

SEQ ID NO: 1291785 - DNA, 25 bp, Homo sapien
aaagactgtggaggcatcccggact

SEQ ID NO: 1291786 - DNA, 25 bp, Homo sapien
atctcaggtagtggcagctccatcc

SEQ ID NO: 1291787 - DNA, 25 bp, Homo sapien
agcgccagcagcagcgcgcccgccg

SEQ ID NO: 1291788 - DNA, 25 bp, Homo sapien
cgccagcagccgcccgtgcagcagc

SEQ ID NO: 1291789 - DNA, 25 bp, Homo sapien
gcgccagcagcagcgcgcccgccgc

SEQ ID NO: 1291790 - DNA, 25 bp, Homo sapien
gcagccgcccgtgcagcagcagcgc

SEQ ID NO: 1291791 - DNA, 25 bp, Homo sapien
cggcccgcgccgctctctcgctcgc

SEQ ID NO: 1291792 - DNA, 25 bp, Homo sapien
cccgcgccgctctctcgctcgctcg

SEQ ID NO: 1291793 - DNA, 25 bp, Homo sapien
gcccggcccgcgccgctctctcgct

SEQ ID NO: 1291794 - DNA, 25 bp, Homo sapien
ggcccggcccgcgccgctctctcgc

SEQ ID NO: 1291795 - DNA, 25 bp, Homo sapien
gcccgctccgcgccgcccgcagccg

SEQ ID NO: 1291796 - DNA, 25 bp, Homo sapien
ctccgcgccgcccgctccgcgccgc

SEQ ID NO: 1291797 - DNA, 25 bp, Homo sapien
gccgcccgctccgcgccgcccgcag

SEQ ID NO: 1291798 - DNA, 25 bp, Homo sapien
ccgctccgcgccgcccgcagccgcc

SEQ ID NO: 1291799 - DNA, 25 bp, Homo sapien
atgggtctctggcaagatgaggacc

SEQ ID NO: 1291800 - DNA, 25 bp, Homo sapien
cacctggggaatgggtctctggcaa

SEQ ID NO: 1291801 - DNA, 25 bp, Homo sapien
ctctggcaagatgaggacccaccag

SEQ ID NO: 1291802 - DNA, 25 bp, Homo sapien
tgaggacccaccagactaaagccaa

SEQ ID NO: 1291803 - DNA, 25 bp, Homo sapien
gcatgtgcacgtttcacagttggcg

SEQ ID NO: 1291804 - DNA, 25 bp, Homo sapien
cctgaggggcatgtgcacgtttcac

SEQ ID NO: 1291805 - DNA, 25 bp, Homo sapien
gggcatgtgcacgtttcacagttgg

SEQ ID NO: 1291806 - DNA, 25 bp, Homo sapien
atgtgcacgtttcacagttggcgtc

SEQ ID NO: 1291807 - DNA, 25 bp, Homo sapien
tccagcctgagcagattgcttccca

SEQ ID NO: 1291808 - DNA, 25 bp, Homo sapien
ggagatgggctcagggtcactccag

SEQ ID NO: 1291809 - DNA, 25 bp, Homo sapien
gggtttggagatgggctcagggtca

SEQ ID NO: 1291810 - DNA, 25 bp, Homo sapien
tcaccaccagcttgggggtttggag

SEQ ID NO: 1291811 - DNA, 25 bp, Homo sapien
ctaaggcaaagagcccattgctaag

SEQ ID NO: 1291812 - DNA, 25 bp, Homo sapien
aacctaaggcaaagagcccattgct

SEQ ID NO: 1291813 - DNA, 25 bp, Homo sapien
aggcaaagagcccattgctaagcaa

SEQ ID NO: 1291814 - DNA, 25 bp, Homo sapien
gacaacctaaggcaaagagcccatt

SEQ ID NO: 1291815 - DNA, 25 bp, Homo sapien
cctttccaggtagttggctgcaagc

SEQ ID NO: 1291816 - DNA, 25 bp, Homo sapien
ccgtggcagcgcgatagtgaagttc

SEQ ID NO: 1291817 - DNA, 25 bp, Homo sapien
caatgagacctgcacggataactcg

SEQ ID NO: 1291818 - DNA, 25 bp, Homo sapien
taactcgtgttggtggagtcatcca

SEQ ID NO: 1291819 - DNA, 25 bp, Homo sapien
ggctggaggagtccgagggacaatc

SEQ ID NO: 1291820 - DNA, 25 bp, Homo sapien
agtggggctggaggagtccgaggga

SEQ ID NO: 1291821 - DNA, 25 bp, Homo sapien
gggctggaggagtccgagggacaat

SEQ ID NO: 1291822 - DNA, 25 bp, Homo sapien
tggggctggaggagtccgagggaca

SEQ ID NO: 1291823 - DNA, 25 bp, Homo sapien
gttcaccaggtgacttgtttctacc

SEQ ID NO: 1291824 - DNA, 25 bp, Homo sapien
ggcccatgcagattctccccagtgg

SEQ ID NO: 1291825 - DNA, 25 bp, Homo sapien
ccgtgagtgttggaatggctcgcct

SEQ ID NO: 1291826 - DNA, 25 bp, Homo sapien
ggctcgcctggtatccagacatcat

SEQ ID NO: 1291827 - DNA, 25 bp, Homo sapien
cattcaggagggtgcgtttggtcca

SEQ ID NO: 1291828 - DNA, 25 bp, Homo sapien
gctttgtggctgagcggtgacagtg

SEQ ID NO: 1291829 - DNA, 25 bp, Homo sapien
ctttgtggctgagcggtgacagtgt

SEQ ID NO: 1291830 - DNA, 25 bp, Homo sapien
tgtggctgagcggtgacagtgtctg

SEQ ID NO: 1291831 - DNA, 25 bp, Homo sapien
tggctgagcggtgacagtgtctgga

SEQ ID NO: 1291832 - DNA, 25 bp, Homo sapien
agccagaagcagtgccattccccat

SEQ ID NO: 1291833 - DNA, 25 bp, Homo sapien
cagccagaagcagtgccattcccca

SEQ ID NO: 1291834 - DNA, 25 bp, Homo sapien
gcccagccagaagcagtgccattcc

SEQ ID NO: 1291835 - DNA, 25 bp, Homo sapien
tgggcccagccagaagcagtgccat

SEQ ID NO: 1291836 - DNA, 25 bp, Homo sapien
tagatgatttagacctcctcttgct

SEQ ID NO: 1291837 - DNA, 25 bp, Homo sapien
tgttttaggaggtagatgatttaga

SEQ ID NO: 1291838 - DNA, 25 bp, Homo sapien
taggaggtagatgatttagacctcc

SEQ ID NO: 1291839 - DNA, 25 bp, Homo sapien
gaggtagatgatttagacctcctct

SEQ ID NO: 1291840 - DNA, 25 bp, Homo sapien
cggaagaggagtgcgagggagctcg

SEQ ID NO: 1291841 - DNA, 25 bp, Homo sapien
cctgggttgggtagtttcagctgct

SEQ ID NO: 1291842 - DNA, 25 bp, Homo sapien
aggaggagggatcagaagggcggcc

SEQ ID NO: 1291843 - DNA, 25 bp, Homo sapien
gaagcggtgtccacagttcccttgt

SEQ ID NO: 1291844 - DNA, 25 bp, Homo sapien
tggcccctctccaccacctccagca

SEQ ID NO: 1291845 - DNA, 25 bp, Homo sapien
ctggcccctctccaccacctccagc

SEQ ID NO: 1291846 - DNA, 25 bp, Homo sapien
ggcccctctccaccacctccagcat

SEQ ID NO: 1291847 - DNA, 25 bp, Homo sapien
ctgagggctttgcaggtagagcagc

SEQ ID NO: 1291848 - DNA, 25 bp, Homo sapien
aggcagcagggctcccatcttgatg

SEQ ID NO: 1291849 - DNA, 25 bp, Homo sapien
catcttgatggggcccgggaaagtc

SEQ ID NO: 1291850 - DNA, 25 bp, Homo sapien
ctttgcaggtagagcagccaatctg

SEQ ID NO: 1291851 - DNA, 25 bp, Homo sapien
ctaggtgttcactgagtacatgcat

SEQ ID NO: 1291852 - DNA, 25 bp, Homo sapien
ctgcgcacactaggtgttcactgag

SEQ ID NO: 1291853 - DNA, 25 bp, Homo sapien
cactaggtgttcactgagtacatgc

SEQ ID NO: 1291854 - DNA, 25 bp, Homo sapien
cacactaggtgttcactgagtacat

SEQ ID NO: 1291855 - DNA, 25 bp, Homo sapien
ctgtgcccttttcctatcatcgcaa

SEQ ID NO: 1291856 - DNA, 25 bp, Homo sapien
cttttcctatcatcgcaaaactcat

SEQ ID NO: 1291857 - DNA, 25 bp, Homo sapien
tgccctatattagagccccaggttc

SEQ ID NO: 1291858 - DNA, 25 bp, Homo sapien
ctgccctatattagagccccaggtt

SEQ ID NO: 1291859 - DNA, 25 bp, Homo sapien
gcccaggctggtcttgaactactga

SEQ ID NO: 1291860 - DNA, 25 bp, Homo sapien
cccaggctggtcttgaactactgac

SEQ ID NO: 1291861 - DNA, 25 bp, Homo sapien
ctacaggtgtgtaccatcacgtctg

SEQ ID NO: 1291862 - DNA, 25 bp, Homo sapien
acaggtgtgtaccatcacgtctggc

SEQ ID NO: 1291863 - DNA, 25 bp, Homo sapien
ccagctggccgtctaggagtttaca

SEQ ID NO: 1291864 - DNA, 25 bp, Homo sapien
gagttgctctgggactcaagcggca

SEQ ID NO: 1291865 - DNA, 25 bp, Homo sapien
ggtagctcagcccattcggatatgc

SEQ ID NO: 1291866 - DNA, 25 bp, Homo sapien
tctggagcaataacccagcaatggg

SEQ ID NO: 1291867 - DNA, 25 bp, Homo sapien
taaccatcaggcgacagtgcgtagt

SEQ ID NO: 1291868 - DNA, 25 bp, Homo sapien
ttcagttcttaaccatcaggcgaca

SEQ ID NO: 1291869 - DNA, 25 bp, Homo sapien
ccgcgcacggctaaagcttcagttc

SEQ ID NO: 1291870 - DNA, 25 bp, Homo sapien
cgacagtgcgtagtctggtagcaac

SEQ ID NO: 1291871 - DNA, 25 bp, Homo sapien
gattagatataaatgaactgacctt

SEQ ID NO: 1291872 - DNA, 25 bp, Homo sapien
gaggtggaaagtcagtagattagat

SEQ ID NO: 1291873 - DNA, 25 bp, Homo sapien
gaagtacttgttaatgtttgctatt

SEQ ID NO: 1291874 - DNA, 25 bp, Homo sapien
tcatagtgcactgctcctttgaagt

SEQ ID NO: 1291875 - DNA, 25 bp, Homo sapien
gaacctgggtctggaccagatccgt

SEQ ID NO: 1291876 - DNA, 25 bp, Homo sapien
tccgtgagatcagagtggtttaaca

SEQ ID NO: 1291877 - DNA, 25 bp, Homo sapien
gaatgcacgattctctagcaaggcc

SEQ ID NO: 1291878 - DNA, 25 bp, Homo sapien
gcaaggccagtattcttcaatcagc

SEQ ID NO: 1291879 - DNA, 25 bp, Homo sapien
tatcaggtgtagatgagagctagcg

SEQ ID NO: 1291880 - DNA, 25 bp, Homo sapien
ttgtgctgggaaataggaacagtcc

SEQ ID NO: 1291881 - DNA, 25 bp, Homo sapien
tcaggttagcgcttagtagtcagca

SEQ ID NO: 1291882 - DNA, 25 bp, Homo sapien
cagcaattggagacaggtgagataa

SEQ ID NO: 1291883 - DNA, 25 bp, Homo sapien
tgactgaagattgaagcaagactgg

SEQ ID NO: 1291884 - DNA, 25 bp, Homo sapien
gactggatctgatgtctcatgcaat

SEQ ID NO: 1291885 - DNA, 25 bp, Homo sapien
cagaattaaatctcattgggtcaca

SEQ ID NO: 1291886 - DNA, 25 bp, Homo sapien
ccagcagtgccacgattacatccta

SEQ ID NO: 1291887 - DNA, 25 bp, Homo sapien
tttaggactgttcactggcacatag

SEQ ID NO: 1291888 - DNA, 25 bp, Homo sapien
ttggcacaactgtgaggacccttcc

SEQ ID NO: 1291889 - DNA, 25 bp, Homo sapien
ttccccgccatctttgagaagctgt

SEQ ID NO: 1291890 - DNA, 25 bp, Homo sapien
tagcagtagtgcttacctaacaggg

SEQ ID NO: 1291891 - DNA, 25 bp, Homo sapien
gttggccatctccactttagtggag

SEQ ID NO: 1291892 - DNA, 25 bp, Homo sapien
cactttagtggagaccgtgttggcc

SEQ ID NO: 1291893 - DNA, 25 bp, Homo sapien
ctccactttagtggagaccgtgttg

SEQ ID NO: 1291894 - DNA, 25 bp, Homo sapien
catctccactttagtggagaccgtg

SEQ ID NO: 1291895 - DNA, 25 bp, Homo sapien
tcttctttgcatgaacttcatgtac

SEQ ID NO: 1291896 - DNA, 25 bp, Homo sapien
ttctttgcatgaacttcatgtacag

SEQ ID NO: 1291897 - DNA, 25 bp, Homo sapien
tctttgcatgaacttcatgtacagc

SEQ ID NO: 1291898 - DNA, 25 bp, Homo sapien
tttgcatgaacttcatgtacagcag

SEQ ID NO: 1291899 - DNA, 25 bp, Homo sapien
gacttcccccacatctaatcagaaa

SEQ ID NO: 1291900 - DNA, 25 bp, Homo sapien
tcctgggctcggatgatcttcagcc

SEQ ID NO: 1291901 - DNA, 25 bp, Homo sapien
tgagatagcatctccctgtgttgcc

SEQ ID NO: 1291902 - DNA, 25 bp, Homo sapien
gcctctgggtaggattttctaagca

SEQ ID NO: 1291903 - DNA, 25 bp, Homo sapien
gtcttttgcttgtgaatatgtcatt

SEQ ID NO: 1291904 - DNA, 25 bp, Homo sapien
aaattatttgagctaggctaggcac

SEQ ID NO: 1291905 - DNA, 25 bp, Homo sapien
tattgaagagtccttttaccactga

SEQ ID NO: 1291906 - DNA, 25 bp, Homo sapien
tattaggtaaggtttcatctttgtc

SEQ ID NO: 1291907 - DNA, 25 bp, Homo sapien
cctaaagaatgtatttgacgaagca

SEQ ID NO: 1291908 - DNA, 25 bp, Homo sapien
gattcacatcctctcaagttaggag

SEQ ID NO: 1291909 - DNA, 25 bp, Homo sapien
gcagctcagtagtatatggtgttcc

SEQ ID NO: 1291910 - DNA, 25 bp, Homo sapien
gccaggtgaggctctctagtttaat

SEQ ID NO: 1291911 - DNA, 25 bp, Homo sapien
gatggaggcctgcttcattaagaag

SEQ ID NO: 1291912 - DNA, 25 bp, Homo sapien
gcctctccttttgtggtgcttacag

SEQ ID NO: 1291913 - DNA, 25 bp, Homo sapien
gagctgggcgtgaaacctgcattcc

SEQ ID NO: 1291914 - DNA, 25 bp, Homo sapien
gagactagctagtttaaatccctgc

SEQ ID NO: 1291915 - DNA, 25 bp, Homo sapien
aaatccctgcatcttgcacatggtg

SEQ ID NO: 1291916 - DNA, 25 bp, Homo sapien
tagcatgagagaatatgacaccttc

SEQ ID NO: 1291917 - DNA, 25 bp, Homo sapien
tcatctgtaagggtaggtttgttgg

SEQ ID NO: 1291918 - DNA, 25 bp, Homo sapien
aaggtgtagctttagaggattgtag

SEQ ID NO: 1291919 - DNA, 25 bp, Homo sapien
ggtgactttaggatcagttgtagca

SEQ ID NO: 1291920 - DNA, 25 bp, Homo sapien
taaaactgaggcgaaacaacttggc

SEQ ID NO: 1291921 - DNA, 25 bp, Homo sapien
ggctctgccactaacttgatctatg

SEQ ID NO: 1291922 - DNA, 25 bp, Homo sapien
tagtgaatacccaaggtctgaggga

SEQ ID NO: 1291923 - DNA, 25 bp, Homo sapien
caaacggtcagggatactcatgcag

SEQ ID NO: 1291924 - DNA, 25 bp, Homo sapien
gagagcaggaatcccggccgaggcc

SEQ ID NO: 1291925 - DNA, 25 bp, Homo sapien
agagcaggaatcccggccgaggcct

SEQ ID NO: 1291926 - DNA, 25 bp, Homo sapien
ggctatagaatctggtgcatttgta

SEQ ID NO: 1291927 - DNA, 25 bp, Homo sapien
caggggctatagaatctggtgcatt

SEQ ID NO: 1291928 - DNA, 25 bp, Homo sapien
ggggctatagaatctggtgcatttg

SEQ ID NO: 1291929 - DNA, 25 bp, Homo sapien
cccaggggctatagaatctggtgca

SEQ ID NO: 1291930 - DNA, 25 bp, Homo sapien
tccatggcctcggcgcgattccagg

SEQ ID NO: 1291931 - DNA, 25 bp, Homo sapien
agaatcacgcacaacagcccagcat

SEQ ID NO: 1291932 - DNA, 25 bp, Homo sapien
gtcctaggaatgtctggctgtttta

SEQ ID NO: 1291933 - DNA, 25 bp, Homo sapien
tagcaaacagaatcacgcacaacag

SEQ ID NO: 1291934 - DNA, 25 bp, Homo sapien
aacttcctctggtgattgggagccc

SEQ ID NO: 1291935 - DNA, 25 bp, Homo sapien
tgtacagggcctagaacacgtagta

SEQ ID NO: 1291936 - DNA, 25 bp, Homo sapien
tatgtaagggctgtgccagttcccc

SEQ ID NO: 1291937 - DNA, 25 bp, Homo sapien
gctgggcatgtccaaagaagctcct

SEQ ID NO: 1291938 - DNA, 25 bp, Homo sapien
tatatgcctgcctaggtgggtctgg

SEQ ID NO: 1291939 - DNA, 25 bp, Homo sapien
taaattatcggccttccctgggcca

SEQ ID NO: 1291940 - DNA, 25 bp, Homo sapien
aatgaacctggtgcccttgacctgg

SEQ ID NO: 1291941 - DNA, 25 bp, Homo sapien
gatgacacggtcagtagccatgtgg

SEQ ID NO: 1291942 - DNA, 25 bp, Homo sapien
gggctaggctccaagtacaccaggt

SEQ ID NO: 1291943 - DNA, 25 bp, Homo sapien
gacgtcttgttgcatgtgcggcccc

SEQ ID NO: 1291944 - DNA, 25 bp, Homo sapien
gcatgtcctgctcacagaagtcggg

SEQ ID NO: 1291945 - DNA, 25 bp, Homo sapien
ccagcacgtctttacctcacaggag

SEQ ID NO: 1291946 - DNA, 25 bp, Homo sapien
tcagagcatcctgaccactggaagc

SEQ ID NO: 1291947 - DNA, 25 bp, Homo sapien
tccacaaacgactgtgagaaggcca

SEQ ID NO: 1291948 - DNA, 25 bp, Homo sapien
acatccacaaacgactgtgagaagg

SEQ ID NO: 1291949 - DNA, 25 bp, Homo sapien
aggccacaccgtaggcgatgttgtc

SEQ ID NO: 1291950 - DNA, 25 bp, Homo sapien
gagatggcgtacacgaaggccgcct

SEQ ID NO: 1291951 - DNA, 25 bp, Homo sapien
tgcacgcccgcgtcactgcaaaggc

SEQ ID NO: 1291952 - DNA, 25 bp, Homo sapien
tgaccccatgcactgtcctgtcaca

SEQ ID NO: 1291953 - DNA, 25 bp, Homo sapien
tgcaaaggccacacctgccgaagag

SEQ ID NO: 1291954 - DNA, 25 bp, Homo sapien
gagtacccacgatggcttcaggcca

SEQ ID NO: 1291955 - DNA, 25 bp, Homo sapien
cagactttagtccagagcaggtacc

SEQ ID NO: 1291956 - DNA, 25 bp, Homo sapien
ccaaaggtaaggagggcttctcatg

SEQ ID NO: 1291957 - DNA, 25 bp, Homo sapien
gactggcttagtctcggcaccttga

SEQ ID NO: 1291958 - DNA, 25 bp, Homo sapien
ggtcaatgagccatgaaccttgcct

SEQ ID NO: 1291959 - DNA, 25 bp, Homo sapien
tagagaataacaaagcaaatgggtg

SEQ ID NO: 1291960 - DNA, 25 bp, Homo sapien
tcaaagggcccgagtcctagtgatg

SEQ ID NO: 1291961 - DNA, 25 bp, Homo sapien
agtcgggtgaggagatacgcatttc

SEQ ID NO: 1291962 - DNA, 25 bp, Homo sapien
tccagcgccggttccggaactggta

SEQ ID NO: 1291963 - DNA, 25 bp, Homo sapien
tggtactggcactcctcaatggcca

SEQ ID NO: 1291964 - DNA, 25 bp, Homo sapien
tgacttccaggttccgcttgcacat

SEQ ID NO: 1291965 - DNA, 25 bp, Homo sapien
ggcgcaccgagtccatgacttccag

SEQ ID NO: 1291966 - DNA, 25 bp, Homo sapien
ctggtggtgtcctgacaaggcccag

SEQ ID NO: 1291967 - DNA, 25 bp, Homo sapien
ctcagggccacaaagtagccccttg

SEQ ID NO: 1291968 - DNA, 25 bp, Homo sapien
tgtatgtattcccagcgagctggtg

SEQ ID NO: 1291969 - DNA, 25 bp, Homo sapien
tagccccttggacctgagcctggat

SEQ ID NO: 1291970 - DNA, 25 bp, Homo sapien
tgtattcccagcgagctggtggctg

SEQ ID NO: 1291971 - DNA, 25 bp, Homo sapien
gagagctcttcctttgctagaccca

SEQ ID NO: 1291972 - DNA, 25 bp, Homo sapien
ggccactgacccattgaactgtcct

SEQ ID NO: 1291973 - DNA, 25 bp, Homo sapien
tttgctagacccatccgacctgtgt

SEQ ID NO: 1291974 - DNA, 25 bp, Homo sapien
atgtcctgtggccactgacccattg

SEQ ID NO: 1291975 - DNA, 25 bp, Homo sapien
gctttctgtacactctgccactgct

SEQ ID NO: 1291976 - DNA, 25 bp, Homo sapien
cactgctcctgaagtgttaatcaaa

SEQ ID NO: 1291977 - DNA, 25 bp, Homo sapien
tcgggctgccttggagtcgtttgct

SEQ ID NO: 1291978 - DNA, 25 bp, Homo sapien
gtcgtttgctctcggaacagctggg

SEQ ID NO: 1291979 - DNA, 25 bp, Homo sapien
attggagcttggctccccactggct

SEQ ID NO: 1291980 - DNA, 25 bp, Homo sapien
tggctgcccacagcggatggtggca

SEQ ID NO: 1291981 - DNA, 25 bp, Homo sapien
taagcgcggggcatggggaactgtc

SEQ ID NO: 1291982 - DNA, 25 bp, Homo sapien
tttcagatcaatattggagcttggc

SEQ ID NO: 1291983 - DNA, 25 bp, Homo sapien
acgaggaggcgcagcgaacgcaggc

SEQ ID NO: 1291984 - DNA, 25 bp, Homo sapien
cggctgagaagacggcgaagacgag

SEQ ID NO: 1291985 - DNA, 25 bp, Homo sapien
gagaagacggcgaagacgaggaggc

SEQ ID NO: 1291986 - DNA, 25 bp, Homo sapien
ctcgcggcggctgagaagacggcga

SEQ ID NO: 1291987 - DNA, 25 bp, Homo sapien
tgccggcagcctgcccgctgctgcg

SEQ ID NO: 1291988 - DNA, 25 bp, Homo sapien
accagactgtcagcgccgccccaga

SEQ ID NO: 1291989 - DNA, 25 bp, Homo sapien
ctgcccggcgcggaccagactgtca

SEQ ID NO: 1291990 - DNA, 25 bp, Homo sapien
gcgcggaccagactgtcagcgccgc

SEQ ID NO: 1291991 - DNA, 25 bp, Homo sapien
cagtggcccgagactgtgggaatcc

SEQ ID NO: 1291992 - DNA, 25 bp, Homo sapien
tgggaatccgaaacctcgcttctgg

SEQ ID NO: 1291993 - DNA, 25 bp, Homo sapien
ctcatccgggaagtgggcttaagac

SEQ ID NO: 1291994 - DNA, 25 bp, Homo sapien
ttctggctagccacaaggtctgggc

SEQ ID NO: 1291995 - DNA, 25 bp, Homo sapien
tgacagatgtgcttgggctcctcgt

SEQ ID NO: 1291996 - DNA, 25 bp, Homo sapien
gggactttgttatccacaccactgg

SEQ ID NO: 1291997 - DNA, 25 bp, Homo sapien
tcgggctcctgtatctgtgacagat

SEQ ID NO: 1291998 - DNA, 25 bp, Homo sapien
ctagcgtggactgcgaccgctcggg

SEQ ID NO: 1291999 - DNA, 25 bp, Homo sapien
ctagcggatattcctggcttctccc

SEQ ID NO: 1292000 - DNA, 25 bp, Homo sapien
tagcggatattcctggcttctccct

SEQ ID NO: 1292001 - DNA, 25 bp, Homo sapien
ccacggtgacctttgggaagctgac

SEQ ID NO: 1292002 - DNA, 25 bp, Homo sapien
cctccacggtgacctttgggaagct

SEQ ID NO: 1292003 - DNA, 25 bp, Homo sapien
cctcggaagactgtttctgtgtctt

SEQ ID NO: 1292004 - DNA, 25 bp, Homo sapien
ccagggcggccatcctcggaagact

SEQ ID NO: 1292005 - DNA, 25 bp, Homo sapien
ctgtgtcttcctgttgcggttttga

SEQ ID NO: 1292006 - DNA, 25 bp, Homo sapien
gtgtcttcctgttgcggttttgact

SEQ ID NO: 1292007 - DNA, 25 bp, Homo sapien
ctttgcttgttcagtcagcctgtgg

SEQ ID NO: 1292008 - DNA, 25 bp, Homo sapien
agctgtgtggggtggccgctgccac

SEQ ID NO: 1292009 - DNA, 25 bp, Homo sapien
ttgcttgttcagtcagcctgtgggc

SEQ ID NO: 1292010 - DNA, 25 bp, Homo sapien
cgctgccaccagccagagatggttt

SEQ ID NO: 1292011 - DNA, 25 bp, Homo sapien
cgggcttaatccagacccacttttg

SEQ ID NO: 1292012 - DNA, 25 bp, Homo sapien
cccacttttgacaccattggatgtg

SEQ ID NO: 1292013 - DNA, 25 bp, Homo sapien
ctatcaacgtccgtacgtccgggct

SEQ ID NO: 1292014 - DNA, 25 bp, Homo sapien
cattggatgtgggtgaaatcgttat

SEQ ID NO: 1292015 - DNA, 25 bp, Homo sapien
gagcagagacctggccattacagga

SEQ ID NO: 1292016 - DNA, 25 bp, Homo sapien
tggagcagagacctggccattacag

SEQ ID NO: 1292017 - DNA, 25 bp, Homo sapien
tggcccaggagtgtgcaccctctgg

SEQ ID NO: 1292018 - DNA, 25 bp, Homo sapien
caggagtgtgcaccctctggcaggt

SEQ ID NO: 1292019 - DNA, 25 bp, Homo sapien
cactcagatcctactgactccacaa

SEQ ID NO: 1292020 - DNA, 25 bp, Homo sapien
gccctcacgggtcacggctgtgtat

SEQ ID NO: 1292021 - DNA, 25 bp, Homo sapien
ctagatatgtaaggctgctctctca

SEQ ID NO: 1292022 - DNA, 25 bp, Homo sapien
caacccaaggctttactgccctgcc

SEQ ID NO: 1292023 - DNA, 25 bp, Homo sapien
tcccgagcaaagtgaaggacgtggc

SEQ ID NO: 1292024 - DNA, 25 bp, Homo sapien
ctcccgagcaaagtgaaggacgtgg

SEQ ID NO: 1292025 - DNA, 25 bp, Homo sapien
cccgagcaaagtgaaggacgtggcc

SEQ ID NO: 1292026 - DNA, 25 bp, Homo sapien
cctctgaaaccccagttgagggctc

SEQ ID NO: 1292027 - DNA, 25 bp, Homo sapien
tctgaaaccccagttgagggctcct

SEQ ID NO: 1292028 - DNA, 25 bp, Homo sapien
ccctcttcgcctgctgtcctctgaa

SEQ ID NO: 1292029 - DNA, 25 bp, Homo sapien
gtcctctgaaaccccagttgagggc

SEQ ID NO: 1292030 - DNA, 25 bp, Homo sapien
cagatgtgcttggagtcgaactggt

SEQ ID NO: 1292031 - DNA, 25 bp, Homo sapien
gttgaattcacgtgataccatcgca

SEQ ID NO: 1292032 - DNA, 25 bp, Homo sapien
gagtcgaactggttgaattcacgtg

SEQ ID NO: 1292033 - DNA, 25 bp, Homo sapien
acgtgataccatcgcacagtcagtc

SEQ ID NO: 1292034 - DNA, 25 bp, Homo sapien
caggacgtgaagccatgcacagaag

SEQ ID NO: 1292035 - DNA, 25 bp, Homo sapien
cttgccaaagcactggcagggtggg

SEQ ID NO: 1292036 - DNA, 25 bp, Homo sapien
atccattctggtgccccggaagcct

SEQ ID NO: 1292037 - DNA, 25 bp, Homo sapien
aggaacaaacaggacaggacgtgaa

SEQ ID NO: 1292038 - DNA, 25 bp, Homo sapien
ttcttggcacccagaaagaccacct

SEQ ID NO: 1292039 - DNA, 25 bp, Homo sapien
tggacaaaggttgtcctgggctcac

SEQ ID NO: 1292040 - DNA, 25 bp, Homo sapien
gatgctaccagaaccaagttcccta

SEQ ID NO: 1292041 - DNA, 25 bp, Homo sapien
gccggtctgaggacatccagtgagt

SEQ ID NO: 1292042 - DNA, 25 bp, Homo sapien
ctggaaccgctgttctagccctgga

SEQ ID NO: 1292043 - DNA, 25 bp, Homo sapien
tggaaccgctgttctagccctggag

SEQ ID NO: 1292044 - DNA, 25 bp, Homo sapien
ggaaccgctgttctagccctggagc

SEQ ID NO: 1292045 - DNA, 25 bp, Homo sapien
tcacgggtccatggagatgcttctt

SEQ ID NO: 1292046 - DNA, 25 bp, Homo sapien
ttcttgaagttttgcgcttgatttg

SEQ ID NO: 1292047 - DNA, 25 bp, Homo sapien
gaggcgtggccttcgaagctgttct

SEQ ID NO: 1292048 - DNA, 25 bp, Homo sapien
agttttgcgcttgatttgtgttgga

SEQ ID NO: 1292049 - DNA, 25 bp, Homo sapien
ttcgtcttcgtgactcctcagcact

SEQ ID NO: 1292050 - DNA, 25 bp, Homo sapien
aaacgtcttcgtcttcgtgactcct

SEQ ID NO: 1292051 - DNA, 25 bp, Homo sapien
cgtcttcgtcttcgtgactcctcag

SEQ ID NO: 1292052 - DNA, 25 bp, Homo sapien
ggaaacgtcttcgtcttcgtgactc

SEQ ID NO: 1292053 - DNA, 25 bp, Homo sapien
ctggagctgctgctaatggcattga

SEQ ID NO: 1292054 - DNA, 25 bp, Homo sapien
tggagctgctgctaatggcattgac

SEQ ID NO: 1292055 - DNA, 25 bp, Homo sapien
ggagctgctgctaatggcattgacc

SEQ ID NO: 1292056 - DNA, 25 bp, Homo sapien
tggtcggcgtctgtggcaagcagct

SEQ ID NO: 1292057 - DNA, 25 bp, Homo sapien
ctgctgaggcggcattgggcatgga

SEQ ID NO: 1292058 - DNA, 25 bp, Homo sapien
gtgtggcttatggtccagttccagg

SEQ ID NO: 1292059 - DNA, 25 bp, Homo sapien
catggagcatccgagggtccaaggt

SEQ ID NO: 1292060 - DNA, 25 bp, Homo sapien
tggccgtaggcaagggagtgccaag

SEQ ID NO: 1292061 - DNA, 25 bp, Homo sapien
ctggccgtaggcaagggagtgccaa

SEQ ID NO: 1292062 - DNA, 25 bp, Homo sapien
cctggttgagaatcgtatccggctg

SEQ ID NO: 1292063 - DNA, 25 bp, Homo sapien
tgagaatcgtatccggctgggcctg

SEQ ID NO: 1292064 - DNA, 25 bp, Homo sapien
ttgagaatcgtatccggctgggcct

SEQ ID NO: 1292065 - DNA, 25 bp, Homo sapien
ggttgagaatcgtatccggctgggc

SEQ ID NO: 1292066 - DNA, 25 bp, Homo sapien
tctgcccaggggtgtaaggactgcc

SEQ ID NO: 1292067 - DNA, 25 bp, Homo sapien
aggggtgtaaggactgccgtggtgc

SEQ ID NO: 1292068 - DNA, 25 bp, Homo sapien
gaacctctgcccaggggtgtaagga

SEQ ID NO: 1292069 - DNA, 25 bp, Homo sapien
ccaggggtgtaaggactgccgtggt

SEQ ID NO: 1292070 - DNA, 25 bp, Homo sapien
ccagctcgaaaaagccactcgacat

SEQ ID NO: 1292071 - DNA, 25 bp, Homo sapien
cctctgtgggataattcccagctcg

SEQ ID NO: 1292072 - DNA, 25 bp, Homo sapien
tccagcacaacgctcctctgtggga

SEQ ID NO: 1292073 - DNA, 25 bp, Homo sapien
gggataattcccagctcgaaaaagc

SEQ ID NO: 1292074 - DNA, 25 bp, Homo sapien
caaggactcaccatcaatgaacaca

SEQ ID NO: 1292075 - DNA, 25 bp, Homo sapien
gtcttcgcaatggagatgaaaaacc

SEQ ID NO: 1292076 - DNA, 25 bp, Homo sapien
caaactctcagtcttcgcaatggag

SEQ ID NO: 1292077 - DNA, 25 bp, Homo sapien
cccaaggactcaccatcaatgaaca

SEQ ID NO: 1292078 - DNA, 25 bp, Homo sapien
ctgatagtacggggctcccggcggt

SEQ ID NO: 1292079 - DNA, 25 bp, Homo sapien
acggggctcccggcggtggcagtgt

SEQ ID NO: 1292080 - DNA, 25 bp, Homo sapien
tgatagtacggggctcccggcggtg

SEQ ID NO: 1292081 - DNA, 25 bp, Homo sapien
tagtacggggctcccggcggtggca

SEQ ID NO: 1292082 - DNA, 25 bp, Homo sapien
ctggtcgcttctcatctgtacccaa

SEQ ID NO: 1292083 - DNA, 25 bp, Homo sapien
tggtcgcttctcatctgtacccaac

SEQ ID NO: 1292084 - DNA, 25 bp, Homo sapien
gagcctggtcgcttctcatctgtac

SEQ ID NO: 1292085 - DNA, 25 bp, Homo sapien
gcctggtcgcttctcatctgtaccc

SEQ ID NO: 1292086 - DNA, 25 bp, Homo sapien
ccaccgaggagagaaccaaaggatt

SEQ ID NO: 1292087 - DNA, 25 bp, Homo sapien
caccgaggagagaaccaaaggattt

SEQ ID NO: 1292088 - DNA, 25 bp, Homo sapien
ctcccacggagagctgtccatgatg

SEQ ID NO: 1292089 - DNA, 25 bp, Homo sapien
tcccacggagagctgtccatgatga

SEQ ID NO: 1292090 - DNA, 25 bp, Homo sapien
cctggtgcaaagcctcggatgaagt

SEQ ID NO: 1292091 - DNA, 25 bp, Homo sapien
ctggtgcaaagcctcggatgaagta

SEQ ID NO: 1292092 - DNA, 25 bp, Homo sapien
tctgggggcaatcggctggcatgcc

SEQ ID NO: 1292093 - DNA, 25 bp, Homo sapien
ctgggggcaatcggctggcatgcca

SEQ ID NO: 1292094 - DNA, 25 bp, Homo sapien
gggggcaatcggctggcatgccagg

SEQ ID NO: 1292095 - DNA, 25 bp, Homo sapien
gggcaatcggctggcatgccaggaa

SEQ ID NO: 1292096 - DNA, 25 bp, Homo sapien
ctctcccatatgtcacatgtgagtg

SEQ ID NO: 1292097 - DNA, 25 bp, Homo sapien
tgggactctcccatatgtcacatgt

SEQ ID NO: 1292098 - DNA, 25 bp, Homo sapien
actctcccatatgtcacatgtgagt

SEQ ID NO: 1292099 - DNA, 25 bp, Homo sapien
ctttgggactctcccatatgtcaca

SEQ ID NO: 1292100 - DNA, 25 bp, Homo sapien
ggagacgcattgggagggagggggc

SEQ ID NO: 1292101 - DNA, 25 bp, Homo sapien
ccaggggagacgcattgggagggag

SEQ ID NO: 1292102 - DNA, 25 bp, Homo sapien
caggggagacgcattgggagggagg

SEQ ID NO: 1292103 - DNA, 25 bp, Homo sapien
tctcttggtctgtagagcgacatca

SEQ ID NO: 1292104 - DNA, 25 bp, Homo sapien
ggccctctcttggtctgtagagcga

SEQ ID NO: 1292105 - DNA, 25 bp, Homo sapien
cctctggccctctcttggtctgtag

SEQ ID NO: 1292106 - DNA, 25 bp, Homo sapien
tctgtagagcgacatcagtgttccc

SEQ ID NO: 1292107 - DNA, 25 bp, Homo sapien
gtgaactgtaaacgctggtctgtga

SEQ ID NO: 1292108 - DNA, 25 bp, Homo sapien
ggagcagggtctttcgtagcctctg

SEQ ID NO: 1292109 - DNA, 25 bp, Homo sapien
ctgtgaggcggccacatggcaccag

SEQ ID NO: 1292110 - DNA, 25 bp, Homo sapien
tggatggtgaactgtaaacgctggt

SEQ ID NO: 1292111 - DNA, 25 bp, Homo sapien
gttgctggaaccattcatctcagtg

SEQ ID NO: 1292112 - DNA, 25 bp, Homo sapien
ctgtctgggttgttgctggaaccat

SEQ ID NO: 1292113 - DNA, 25 bp, Homo sapien
cattcatctcagtgaaggatgacat

SEQ ID NO: 1292114 - DNA, 25 bp, Homo sapien
tctgggttgttgctggaaccattca

SEQ ID NO: 1292115 - DNA, 25 bp, Homo sapien
ttctgttgtaactctcccagcccat

SEQ ID NO: 1292116 - DNA, 25 bp, Homo sapien
tcagctccatcaacacctggtgcat

SEQ ID NO: 1292117 - DNA, 25 bp, Homo sapien
tccagcttcgctgcatcgctatggg

SEQ ID NO: 1292118 - DNA, 25 bp, Homo sapien
tcgctatgggccttgaaatgtgcca

SEQ ID NO: 1292119 - DNA, 25 bp, Homo sapien
tccaccactggtgcatcagctatgt

SEQ ID NO: 1292120 - DNA, 25 bp, Homo sapien
aacgtaaggatgttggactgtgttg

SEQ ID NO: 1292121 - DNA, 25 bp, Homo sapien
aaggatgttggactgtgttggctcc

SEQ ID NO: 1292122 - DNA, 25 bp, Homo sapien
agaaaaacgtaaggatgttggactg

SEQ ID NO: 1292123 - DNA, 25 bp, Homo sapien
taaggatgttggactgtgttggctc

SEQ ID NO: 1292124 - DNA, 25 bp, Homo sapien
tgttgacgccgtttctgctgtgatg

SEQ ID NO: 1292125 - DNA, 25 bp, Homo sapien
cagaggaggttgttgacgccgtttc

SEQ ID NO: 1292126 - DNA, 25 bp, Homo sapien
gcccagagggaagagtcgatgtcac

SEQ ID NO: 1292127 - DNA, 25 bp, Homo sapien
gggcaggcttagtatgtagtcctcc

SEQ ID NO: 1292128 - DNA, 25 bp, Homo sapien
gccttcgaggttgctttccttgtca

SEQ ID NO: 1292129 - DNA, 25 bp, Homo sapien
cccagggcaaaagatgctatctgca

SEQ ID NO: 1292130 - DNA, 25 bp, Homo sapien
tcagcgggaagcattgccttcgagg

SEQ ID NO: 1292131 - DNA, 25 bp, Homo sapien
agaacagacactctttcagcatggt

SEQ ID NO: 1292132 - DNA, 25 bp, Homo sapien
tgtcaggaagcgaaggagttcagac

SEQ ID NO: 1292133 - DNA, 25 bp, Homo sapien
cggacagggtagataaagaagagct

SEQ ID NO: 1292134 - DNA, 25 bp, Homo sapien
caggccccatcgtctgaggatcaga

SEQ ID NO: 1292135 - DNA, 25 bp, Homo sapien
gaatccacaggaaagagcggacagg

SEQ ID NO: 1292136 - DNA, 25 bp, Homo sapien
cctgtgatgtttcaggacactcact

SEQ ID NO: 1292137 - DNA, 25 bp, Homo sapien
actgctggtggcctctttccgtggc

SEQ ID NO: 1292138 - DNA, 25 bp, Homo sapien
tttccgtggcattggactatggctt

SEQ ID NO: 1292139 - DNA, 25 bp, Homo sapien
agacctgggttctcccgtccatcag

SEQ ID NO: 1292140 - DNA, 25 bp, Homo sapien
ctccaataccgctgtgtgggataca

SEQ ID NO: 1292141 - DNA, 25 bp, Homo sapien
ccaataccgctgtgtgggatacagc

SEQ ID NO: 1292142 - DNA, 25 bp, Homo sapien
aataccgctgtgtgggatacagcag

SEQ ID NO: 1292143 - DNA, 25 bp, Homo sapien
accgctgtgtgggatacagcaggat

SEQ ID NO: 1292144 - DNA, 25 bp, Homo sapien
ggtggggcacttcgatgtcacaagg

SEQ ID NO: 1292145 - DNA, 25 bp, Homo sapien
cctctgcgcagcagcgagggaagcc

SEQ ID NO: 1292146 - DNA, 25 bp, Homo sapien
ccagtggcctctgcgcagcagcgag

SEQ ID NO: 1292147 - DNA, 25 bp, Homo sapien
ctccagtggcctctgcgcagcagcg

SEQ ID NO: 1292148 - DNA, 25 bp, Homo sapien
gcctggaatgcagcactttgacttg

SEQ ID NO: 1292149 - DNA, 25 bp, Homo sapien
gagactgaatgtctccggacctcag

SEQ ID NO: 1292150 - DNA, 25 bp, Homo sapien
tggttataggagtgtacggaactgt

SEQ ID NO: 1292151 - DNA, 25 bp, Homo sapien
gggtctgtaatacttatatctagga

SEQ ID NO: 1292152 - DNA, 25 bp, Homo sapien
ttctcacactttctatcaactccgt

SEQ ID NO: 1292153 - DNA, 25 bp, Homo sapien
cacagaggtgaatccatcacagctg

SEQ ID NO: 1292154 - DNA, 25 bp, Homo sapien
tatcaactccgtcatagctgtcttg

SEQ ID NO: 1292155 - DNA, 25 bp, Homo sapien
catagctgtcttgcacagaggtgaa

SEQ ID NO: 1292156 - DNA, 25 bp, Homo sapien
cttccttgggtacactcagccttag

SEQ ID NO: 1292157 - DNA, 25 bp, Homo sapien
ttagaggcagcagctactcccaaca

SEQ ID NO: 1292158 - DNA, 25 bp, Homo sapien
tggagctgctctatctaatgtggcg

SEQ ID NO: 1292159 - DNA, 25 bp, Homo sapien
caagtgtttcatagccatacaggta

SEQ ID NO: 1292160 - DNA, 25 bp, Homo sapien
gaagcacaggttatttctccgcagc

SEQ ID NO: 1292161 - DNA, 25 bp, Homo sapien
tccttctggtgatcgggaagcacag

SEQ ID NO: 1292162 - DNA, 25 bp, Homo sapien
gatgaggcccttacaaggtctagaa

SEQ ID NO: 1292163 - DNA, 25 bp, Homo sapien
tccatatcatgaccagccagaagcc

SEQ ID NO: 1292164 - DNA, 25 bp, Homo sapien
gtgaccgcggcgcgtggggcaggtc

SEQ ID NO: 1292165 - DNA, 25 bp, Homo sapien
tgaccgcggcgcgtggggcaggtcg

SEQ ID NO: 1292166 - DNA, 25 bp, Homo sapien
gttttcttggactatctgtctgcaa

SEQ ID NO: 1292167 - DNA, 25 bp, Homo sapien
ttggagattgaggaagactgagtat

SEQ ID NO: 1292168 - DNA, 25 bp, Homo sapien
cttggactatctgtctgcaatgatg

SEQ ID NO: 1292169 - DNA, 25 bp, Homo sapien
tataacccaagtgtggcttgttttc

SEQ ID NO: 1292170 - DNA, 25 bp, Homo sapien
gggccacatgggctcccacatcctt

SEQ ID NO: 1292171 - DNA, 25 bp, Homo sapien
gctgccctgttaccaaggtgcacag

SEQ ID NO: 1292172 - DNA, 25 bp, Homo sapien
tcagctgccctgttaccaaggtgca

SEQ ID NO: 1292173 - DNA, 25 bp, Homo sapien
ccttcagctgccctgttaccaaggt

SEQ ID NO: 1292174 - DNA, 25 bp, Homo sapien
ttcaggggatctgagtaggaggcta

SEQ ID NO: 1292175 - DNA, 25 bp, Homo sapien
gatctgagtaggaggctatgggaga

SEQ ID NO: 1292176 - DNA, 25 bp, Homo sapien
cttgaaatgctgttgaatacagctt

SEQ ID NO: 1292177 - DNA, 25 bp, Homo sapien
agtaggaggctatgggagagaagta

SEQ ID NO: 1292178 - DNA, 25 bp, Homo sapien
aggcatacaggccattcgagtatcg

SEQ ID NO: 1292179 - DNA, 25 bp, Homo sapien
ttcgagtatcgctccaaatcttgga

SEQ ID NO: 1292180 - DNA, 25 bp, Homo sapien
ccaaatcttggagagtggaaccgaa

SEQ ID NO: 1292181 - DNA, 25 bp, Homo sapien
gagtggaaccgaagcacactagcat

SEQ ID NO: 1292182 - DNA, 25 bp, Homo sapien
agatctacctctggccatcccagtg

SEQ ID NO: 1292183 - DNA, 25 bp, Homo sapien
gtttttggagatctacctctggcca

SEQ ID NO: 1292184 - DNA, 25 bp, Homo sapien
gagatctacctctggccatcccagt

SEQ ID NO: 1292185 - DNA, 25 bp, Homo sapien
atgggtgtttttggagatctacctc

SEQ ID NO: 1292186 - DNA, 25 bp, Homo sapien
atttgaaaactatatgcctaggctc

SEQ ID NO: 1292187 - DNA, 25 bp, Homo sapien
attgcatcaaatattgctgcttttc

SEQ ID NO: 1292188 - DNA, 25 bp, Homo sapien
aaaactatatgcctaggctcaatgt

SEQ ID NO: 1292189 - DNA, 25 bp, Homo sapien
tcattattgcatcaaatattgctgc

SEQ ID NO: 1292190 - DNA, 25 bp, Homo sapien
cagttaaactgtgctttcttatcac

SEQ ID NO: 1292191 - DNA, 25 bp, Homo sapien
taaactgtgctttcttatcacttag

SEQ ID NO: 1292192 - DNA, 25 bp, Homo sapien
aactgtgctttcttatcacttagaa

SEQ ID NO: 1292193 - DNA, 25 bp, Homo sapien
cacttagaatttctacgttattcta

SEQ ID NO: 1292194 - DNA, 25 bp, Homo sapien
tgacgattgcacctgactgccttag

SEQ ID NO: 1292195 - DNA, 25 bp, Homo sapien
gccacttttgatgttggtgtgcgca

SEQ ID NO: 1292196 - DNA, 25 bp, Homo sapien
gattgaataacgttcgtgtcccaca

SEQ ID NO: 1292197 - DNA, 25 bp, Homo sapien
caagccgtggatgcccattctgcaa

SEQ ID NO: 1292198 - DNA, 25 bp, Homo sapien
tgtttaaacctcacgtgcctggaag

SEQ ID NO: 1292199 - DNA, 25 bp, Homo sapien
taaccatgtatagagtgggcaggcg

SEQ ID NO: 1292200 - DNA, 25 bp, Homo sapien
tataatgagtcctccccaagggtga

SEQ ID NO: 1292201 - DNA, 25 bp, Homo sapien
taaattgggcctaggcagttggacg

SEQ ID NO: 1292202 - DNA, 25 bp, Homo sapien
tggaaaggaggtacctaatgtgtcc

SEQ ID NO: 1292203 - DNA, 25 bp, Homo sapien
tctgaaacccagtgcaagggtctcc

SEQ ID NO: 1292204 - DNA, 25 bp, Homo sapien
cagggtaagaggaggcataaaccca

SEQ ID NO: 1292205 - DNA, 25 bp, Homo sapien
gggtcgcatctgagtaaaggcagaa

SEQ ID NO: 1292206 - DNA, 25 bp, Homo sapien
ggagaagggcactgcctccctcttc

SEQ ID NO: 1292207 - DNA, 25 bp, Homo sapien
agggagaagggcactgcctccctct

SEQ ID NO: 1292208 - DNA, 25 bp, Homo sapien
cgtgccccgcgtgggaggaggagat

SEQ ID NO: 1292209 - DNA, 25 bp, Homo sapien
gaaagggagaagggcactgcctccc

SEQ ID NO: 1292210 - DNA, 25 bp, Homo sapien
actggcaatagatcggctgggatcc

SEQ ID NO: 1292211 - DNA, 25 bp, Homo sapien
gagatacatctgatggacctgccac

SEQ ID NO: 1292212 - DNA, 25 bp, Homo sapien
ggcctgtcaccagcagcctaggaaa

SEQ ID NO: 1292213 - DNA, 25 bp, Homo sapien
gacatgctagactgagaagctgcct

SEQ ID NO: 1292214 - DNA, 25 bp, Homo sapien
tgctccacccactgagatttcggcc

SEQ ID NO: 1292215 - DNA, 25 bp, Homo sapien
ccgtggacttggcagaacctccctg

SEQ ID NO: 1292216 - DNA, 25 bp, Homo sapien
tagaagtcaagccagctttgacccg

SEQ ID NO: 1292217 - DNA, 25 bp, Homo sapien
actgagatttcggcctctcctcggg

SEQ ID NO: 1292218 - DNA, 25 bp, Homo sapien
acaaatgtctggagaaccgccagga

SEQ ID NO: 1292219 - DNA, 25 bp, Homo sapien
ttcaacccgagaacaaatgtctgga

SEQ ID NO: 1292220 - DNA, 25 bp, Homo sapien
ccttcaacccgagaacaaatgtctg

SEQ ID NO: 1292221 - DNA, 25 bp, Homo sapien
gaacaaatgtctggagaaccgccag

SEQ ID NO: 1292222 - DNA, 25 bp, Homo sapien
ggaaacacctgcaggccaatcaata

SEQ ID NO: 1292223 - DNA, 25 bp, Homo sapien
gctcgccatgaggattgaagggtaa

SEQ ID NO: 1292224 - DNA, 25 bp, Homo sapien
ggattaaggccagaactgtctccac

SEQ ID NO: 1292225 - DNA, 25 bp, Homo sapien
ggccctgaggatctgctgtaaagca

SEQ ID NO: 1292226 - DNA, 25 bp, Homo sapien
caggaagaaccgtaccagaaccact

SEQ ID NO: 1292227 - DNA, 25 bp, Homo sapien
gcatcccgggaattaaaggcaccaa

SEQ ID NO: 1292228 - DNA, 25 bp, Homo sapien
aggaaacatcaaggaccagccgagg

SEQ ID NO: 1292229 - DNA, 25 bp, Homo sapien
gggtcacatttaccagggctctgag

SEQ ID NO: 1292230 - DNA, 25 bp, Homo sapien
cagggagagactgatatcctagtgc

SEQ ID NO: 1292231 - DNA, 25 bp, Homo sapien
tagtgccagggatgccggcttccag

SEQ ID NO: 1292232 - DNA, 25 bp, Homo sapien
gcttgctagtcatcatgtcgtctga

SEQ ID NO: 1292233 - DNA, 25 bp, Homo sapien
tttccatctccaagcacagatgtca

SEQ ID NO: 1292234 - DNA, 25 bp, Homo sapien
aggcatcggccccagcagtcacgtc

SEQ ID NO: 1292235 - DNA, 25 bp, Homo sapien
gaggcatcggccccagcagtcacgt

SEQ ID NO: 1292236 - DNA, 25 bp, Homo sapien
tcatttacagtaaatccagtgggtt

SEQ ID NO: 1292237 - DNA, 25 bp, Homo sapien
ccgtctcatttacagtaaatccagt

SEQ ID NO: 1292238 - DNA, 25 bp, Homo sapien
aaatccagtgggttgcagaaatagg

SEQ ID NO: 1292239 - DNA, 25 bp, Homo sapien
cagaaataggacctgaaactgcctg

SEQ ID NO: 1292240 - DNA, 25 bp, Homo sapien
cctgtgcgtgaacctcatgcgtggc

SEQ ID NO: 1292241 - DNA, 25 bp, Homo sapien
cagctctcgagggaacctgtgcgtg

SEQ ID NO: 1292242 - DNA, 25 bp, Homo sapien
aagaactcactactgggcatggagg

SEQ ID NO: 1292243 - DNA, 25 bp, Homo sapien
cagtggcaagttcacctgcaaggtg

SEQ ID NO: 1292244 - DNA, 25 bp, Homo sapien
tgacacaaaggatgactgcgtccaa

SEQ ID NO: 1292245 - DNA, 25 bp, Homo sapien
gctttcgtgactgacactgctcagg

SEQ ID NO: 1292246 - DNA, 25 bp, Homo sapien
tgctgacagtgcagatggacgctgc

SEQ ID NO: 1292247 - DNA, 25 bp, Homo sapien
gtaaccctcaacatccgctttcgtg

SEQ ID NO: 1292248 - DNA, 25 bp, Homo sapien
tgttgctgtcataagcagagtcggg

SEQ ID NO: 1292249 - DNA, 25 bp, Homo sapien
cgttgttgctgtcataagcagagtc

SEQ ID NO: 1292250 - DNA, 25 bp, Homo sapien
taaagatgatcgtagtggtcatcgt

SEQ ID NO: 1292251 - DNA, 25 bp, Homo sapien
ataaagatgatcgtagtggtcatcg

SEQ ID NO: 1292252 - DNA, 25 bp, Homo sapien
ggtcactgtggataaaggcgctgcc

SEQ ID NO: 1292253 - DNA, 25 bp, Homo sapien
tgtttgcgccgctgacactctggca

SEQ ID NO: 1292254 - DNA, 25 bp, Homo sapien
tccgcagcgcggcatgtttgcgccg

SEQ ID NO: 1292255 - DNA, 25 bp, Homo sapien
gcttcagcacgaggccctttgaggg

SEQ ID NO: 1292256 - DNA, 25 bp, Homo sapien
tggacagtccacagcctcaaggaat

SEQ ID NO: 1292257 - DNA, 25 bp, Homo sapien
tgtaaagggtctgtcatggatgatc

SEQ ID NO: 1292258 - DNA, 25 bp, Homo sapien
cagcctcaaggaattcatctgtgta

SEQ ID NO: 1292259 - DNA, 25 bp, Homo sapien
tcatggatgatcagacccatcccag

SEQ ID NO: 1292260 - DNA, 25 bp, Homo sapien
cactgcgacaaccacagctgcattt

SEQ ID NO: 1292261 - DNA, 25 bp, Homo sapien
taagcatgccctcaagccttgatca

SEQ ID NO: 1292262 - DNA, 25 bp, Homo sapien
atcatcactgcgacaaccacagctg

SEQ ID NO: 1292263 - DNA, 25 bp, Homo sapien
gcatcagcattgagtaagcatgccc

SEQ ID NO: 1292264 - DNA, 25 bp, Homo sapien
tctgattctatctaagtgcttaatc

SEQ ID NO: 1292265 - DNA, 25 bp, Homo sapien
taatctttcccagcggcagccctgg

SEQ ID NO: 1292266 - DNA, 25 bp, Homo sapien
ccgttttcctatggggcactggctt

SEQ ID NO: 1292267 - DNA, 25 bp, Homo sapien
tctgattctatctaagtgcctaatc

SEQ ID NO: 1292268 - DNA, 25 bp, Homo sapien
agctggcattgccagacccccagtc

SEQ ID NO: 1292269 - DNA, 25 bp, Homo sapien
ctggcattgccagacccccagtcat

SEQ ID NO: 1292270 - DNA, 25 bp, Homo sapien
ggcattgccagacccccagtcatca

SEQ ID NO: 1292271 - DNA, 25 bp, Homo sapien
attgccagacccccagtcatcaggg

SEQ ID NO: 1292272 - DNA, 25 bp, Homo sapien
cccatcgtgctgtagagcggagccg

SEQ ID NO: 1292273 - DNA, 25 bp, Homo sapien
tgagctctagaacccatcgtgctgt

SEQ ID NO: 1292274 - DNA, 25 bp, Homo sapien
ttggtggcttgagctctagaaccca

SEQ ID NO: 1292275 - DNA, 25 bp, Homo sapien
gaacccatttgttggtggcttgagc

SEQ ID NO: 1292276 - DNA, 25 bp, Homo sapien
tgcttttggccagcatgttggtgcc

SEQ ID NO: 1292277 - DNA, 25 bp, Homo sapien
ggctttgcttttggccagcatgttg

SEQ ID NO: 1292278 - DNA, 25 bp, Homo sapien
gctttgcttttggccagcatgttgg

SEQ ID NO: 1292279 - DNA, 25 bp, Homo sapien
tttgcttttggccagcatgttggtg

SEQ ID NO: 1292280 - DNA, 25 bp, Homo sapien
cagaaaggcgggaatgatgtcagct

SEQ ID NO: 1292281 - DNA, 25 bp, Homo sapien
tctggagttgcctcgctgcagggct

SEQ ID NO: 1292282 - DNA, 25 bp, Homo sapien
gccacacagaaaggcgggaatgatg

SEQ ID NO: 1292283 - DNA, 25 bp, Homo sapien
gctccttctggagttgcctcgctgc

SEQ ID NO: 1292284 - DNA, 25 bp, Homo sapien
gatttgggcgttcactagttccgtg

SEQ ID NO: 1292285 - DNA, 25 bp, Homo sapien
gtctggagttccaccctgtgcacag

SEQ ID NO: 1292286 - DNA, 25 bp, Homo sapien
ggaaatgtctgacctacttcacagg

SEQ ID NO: 1292287 - DNA, 25 bp, Homo sapien
taaaaatcaggcttcggtctggagt

SEQ ID NO: 1292288 - DNA, 25 bp, Homo sapien
cagctggggctcgatcccccaggcc

SEQ ID NO: 1292289 - DNA, 25 bp, Homo sapien
ggcagctggggctcgatcccccagg

SEQ ID NO: 1292290 - DNA, 25 bp, Homo sapien
gggcagctggggctcgatcccccag

SEQ ID NO: 1292291 - DNA, 25 bp, Homo sapien
gcagctggggctcgatcccccaggc

SEQ ID NO: 1292292 - DNA, 25 bp, Homo sapien
aaagcaccctgccagatgtccagga

SEQ ID NO: 1292293 - DNA, 25 bp, Homo sapien
ctgagaatttgaaagcaccctgcca

SEQ ID NO: 1292294 - DNA, 25 bp, Homo sapien
ttaggtgtagggatcccaaaagctg

SEQ ID NO: 1292295 - DNA, 25 bp, Homo sapien
taggtgtagggatcccaaaagctgg

SEQ ID NO: 1292296 - DNA, 25 bp, Homo sapien
ctaggggcctgcatagccatagcca

SEQ ID NO: 1292297 - DNA, 25 bp, Homo sapien
atagccatagccaaagatgggcctt

SEQ ID NO: 1292298 - DNA, 25 bp, Homo sapien
taggggcctgcatagccatagccaa

SEQ ID NO: 1292299 - DNA, 25 bp, Homo sapien
ctgcatagccatagccaaagatggg

SEQ ID NO: 1292300 - DNA, 25 bp, Homo sapien
atgtgtcatcccacgtataacagag

SEQ ID NO: 1292301 - DNA, 25 bp, Homo sapien
ccacgtataacagagagtgaagatg

SEQ ID NO: 1292302 - DNA, 25 bp, Homo sapien
catcccacgtataacagagagtgaa

SEQ ID NO: 1292303 - DNA, 25 bp, Homo sapien
tgtcatcccacgtataacagagagt

SEQ ID NO: 1292304 - DNA, 25 bp, Homo sapien
aactgtgaacactgatagaacggtc

SEQ ID NO: 1292305 - DNA, 25 bp, Homo sapien
ggagacctttcggagagaactgtga

SEQ ID NO: 1292306 - DNA, 25 bp, Homo sapien
tgatagaacggtcaagcagccaggg

SEQ ID NO: 1292307 - DNA, 25 bp, Homo sapien
gcacggatgagcattgagttgaccc

SEQ ID NO: 1292308 - DNA, 25 bp, Homo sapien
tgtctagtgcacaaatagccacatt

SEQ ID NO: 1292309 - DNA, 25 bp, Homo sapien
tctgcttactgacttaggcaataca

SEQ ID NO: 1292310 - DNA, 25 bp, Homo sapien
gcaatacaccaagggcgagatttta

SEQ ID NO: 1292311 - DNA, 25 bp, Homo sapien
tacggttttcattgacactcttccc

SEQ ID NO: 1292312 - DNA, 25 bp, Homo sapien
tgaggacttgatccttctccaggaa

SEQ ID NO: 1292313 - DNA, 25 bp, Homo sapien
taggcccctttgaggctcctgagtg

SEQ ID NO: 1292314 - DNA, 25 bp, Homo sapien
ctaaaccaggctgcatcggaggcca

SEQ ID NO: 1292315 - DNA, 25 bp, Homo sapien
tgccctcagatggtcaaaacccagt

SEQ ID NO: 1292316 - DNA, 25 bp, Homo sapien
caatctatctagtacttcccaggca

SEQ ID NO: 1292317 - DNA, 25 bp, Homo sapien
gcttgctgctcagcggggagtggca

SEQ ID NO: 1292318 - DNA, 25 bp, Homo sapien
cttgcttgctgctcagcggggagtg

SEQ ID NO: 1292319 - DNA, 25 bp, Homo sapien
tgcttgctgctcagcggggagtggc

SEQ ID NO: 1292320 - DNA, 25 bp, Homo sapien
ctcttgcttgctgctcagcggggag

SEQ ID NO: 1292321 - DNA, 25 bp, Homo sapien
tttcagataggatgcccaaacccag

SEQ ID NO: 1292322 - DNA, 25 bp, Homo sapien
tggacctagagctacagatgcccca

SEQ ID NO: 1292323 - DNA, 25 bp, Homo sapien
tgtgcccagacagagctaagctttc

SEQ ID NO: 1292324 - DNA, 25 bp, Homo sapien
gctgccttgagaaagctgatataac

SEQ ID NO: 1292325 - DNA, 25 bp, Homo sapien
gagggttccatggactaaacagcgg

SEQ ID NO: 1292326 - DNA, 25 bp, Homo sapien
tctgttttgctaaccaagaagttcc

SEQ ID NO: 1292327 - DNA, 25 bp, Homo sapien
taaacagcgggttaagagcagtctt

SEQ ID NO: 1292328 - DNA, 25 bp, Homo sapien
catggagacattcagggagggttcc

SEQ ID NO: 1292329 - DNA, 25 bp, Homo sapien
gtaattactggactcctcctcagac

SEQ ID NO: 1292330 - DNA, 25 bp, Homo sapien
ctttgtaattactggactcctcctc

SEQ ID NO: 1292331 - DNA, 25 bp, Homo sapien
tgacctttgtaattactggactcct

SEQ ID NO: 1292332 - DNA, 25 bp, Homo sapien
caggggccttttgcagagccaccat

SEQ ID NO: 1292333 - DNA, 25 bp, Homo sapien
gctatatccatacacggaaccacta

SEQ ID NO: 1292334 - DNA, 25 bp, Homo sapien
ctatatccatacacggaaccactat

SEQ ID NO: 1292335 - DNA, 25 bp, Homo sapien
tgctatatccatacacggaaccact

SEQ ID NO: 1292336 - DNA, 25 bp, Homo sapien
tatatccatacacggaaccactatt

SEQ ID NO: 1292337 - DNA, 25 bp, Homo sapien
taccagcccaggtcatagagtggcg

SEQ ID NO: 1292338 - DNA, 25 bp, Homo sapien
cctcgtagaaggtcaggttggcgaa

SEQ ID NO: 1292339 - DNA, 25 bp, Homo sapien
ggtagaagttgaccagctgcccgtg

SEQ ID NO: 1292340 - DNA, 25 bp, Homo sapien
gcgtgaggtcaaagcccgtgtctgc

SEQ ID NO: 1292341 - DNA, 25 bp, Homo sapien
ccactaccagcacatcgtccttgag

SEQ ID NO: 1292342 - DNA, 25 bp, Homo sapien
gggtccactaccagcacatcgtcct

SEQ ID NO: 1292343 - DNA, 25 bp, Homo sapien
tggttcccgggtccactaccagcac

SEQ ID NO: 1292344 - DNA, 25 bp, Homo sapien
taccagcacatcgtccttgagcagg

SEQ ID NO: 1292345 - DNA, 25 bp, Homo sapien
ctgtgtcaatcacagcaaaacccag

SEQ ID NO: 1292346 - DNA, 25 bp, Homo sapien
tgtgtcaatcacagcaaaacccagc

SEQ ID NO: 1292347 - DNA, 25 bp, Homo sapien
atcacagcaaaacccagcacccctc

SEQ ID NO: 1292348 - DNA, 25 bp, Homo sapien
tcaatcacagcaaaacccagcaccc

SEQ ID NO: 1292349 - DNA, 25 bp, Homo sapien
agctggctggccatccttcgaaggg

SEQ ID NO: 1292350 - DNA, 25 bp, Homo sapien
tgaaggtgctggcataccgctccag

SEQ ID NO: 1292351 - DNA, 25 bp, Homo sapien
caggccctgctgttcggctgatgcc

SEQ ID NO: 1292352 - DNA, 25 bp, Homo sapien
gtcatctagggaggccacgatgccc

SEQ ID NO: 1292353 - DNA, 25 bp, Homo sapien
ctgtacatggtgtactcattggggg

SEQ ID NO: 1292354 - DNA, 25 bp, Homo sapien
gatgacaactgcagacatggcagcc

SEQ ID NO: 1292355 - DNA, 25 bp, Homo sapien
aacacggggagtgggtgagccaggg

SEQ ID NO: 1292356 - DNA, 25 bp, Homo sapien
gggtgagccaggggcacgggctcag

SEQ ID NO: 1292357 - DNA, 25 bp, Homo sapien
ggtgagccaggggcacgggctcagg

SEQ ID NO: 1292358 - DNA, 25 bp, Homo sapien
acacggggagtgggtgagccagggg

SEQ ID NO: 1292359 - DNA, 25 bp, Homo sapien
gaggtctcctctggtcccagggaac

SEQ ID NO: 1292360 - DNA, 25 bp, Homo sapien
gggcagaggtctcctctggtcccag

SEQ ID NO: 1292361 - DNA, 25 bp, Homo sapien
caggggcagaggtctcctctggtcc

SEQ ID NO: 1292362 - DNA, 25 bp, Homo sapien
cctcacaggggcagaggtctcctct

SEQ ID NO: 1292363 - DNA, 25 bp, Homo sapien
caaattgcgacctttctaggctaaa

SEQ ID NO: 1292364 - DNA, 25 bp, Homo sapien
cgtgctcagccataagaccataaat

SEQ ID NO: 1292365 - DNA, 25 bp, Homo sapien
ccaaaagaatgaggcggaacaaatt

SEQ ID NO: 1292366 - DNA, 25 bp, Homo sapien
acaggtctgggatagcggtcttgag

SEQ ID NO: 1292367 - DNA, 25 bp, Homo sapien
cagcttggggaggtgatactgccac

SEQ ID NO: 1292368 - DNA, 25 bp, Homo sapien
agcttggggaggtgatactgccaca

SEQ ID NO: 1292369 - DNA, 25 bp, Homo sapien
tcagcaagttgggccaccagccatc

SEQ ID NO: 1292370 - DNA, 25 bp, Homo sapien
ccactgagagcaggcagaagaagct

SEQ ID NO: 1292371 - DNA, 25 bp, Homo sapien
tcttcttcactttcagcaagttggg

SEQ ID NO: 1292372 - DNA, 25 bp, Homo sapien
cagatggccgggaggagccacttct

SEQ ID NO: 1292373 - DNA, 25 bp, Homo sapien
gaggattcaggtctacaccacagga

SEQ ID NO: 1292374 - DNA, 25 bp, Homo sapien
caggagatcccgtaagcaggaaact

SEQ ID NO: 1292375 - DNA, 25 bp, Homo sapien
gaagattctggctctttgaggattc

SEQ ID NO: 1292376 - DNA, 25 bp, Homo sapien
ggtctacaccacaggagatcccgta

SEQ ID NO: 1292377 - DNA, 25 bp, Homo sapien
cagttagggccccagtttggctgac

SEQ ID NO: 1292378 - DNA, 25 bp, Homo sapien
gacagtgcctctgggagtcccctgt

SEQ ID NO: 1292379 - DNA, 25 bp, Homo sapien
ctccagaaggtaccagcaagaacag

SEQ ID NO: 1292380 - DNA, 25 bp, Homo sapien
gcaagaacagggcagttagggcccc

SEQ ID NO: 1292381 - DNA, 25 bp, Homo sapien
gggatgtagaggccaggtagagtca

SEQ ID NO: 1292382 - DNA, 25 bp, Homo sapien
ggatgtagaggccaggtagagtcat

SEQ ID NO: 1292383 - DNA, 25 bp, Homo sapien
gtgggatgtagaggccaggtagagt

SEQ ID NO: 1292384 - DNA, 25 bp, Homo sapien
ctgtgggatgtagaggccaggtaga

SEQ ID NO: 1292385 - DNA, 25 bp, Homo sapien
tcggcctcattagctgggggaactc

SEQ ID NO: 1292386 - DNA, 25 bp, Homo sapien
cattagctgggggaactcgaagtac

SEQ ID NO: 1292387 - DNA, 25 bp, Homo sapien
cctcggcctcattagctgggggaac

SEQ ID NO: 1292388 - DNA, 25 bp, Homo sapien
gcctcattagctgggggaactcgaa

SEQ ID NO: 1292389 - DNA, 25 bp, Homo sapien
gggcaaattgactcatgcctcctca

SEQ ID NO: 1292390 - DNA, 25 bp, Homo sapien
gacagggtggggcaaattgactcat

SEQ ID NO: 1292391 - DNA, 25 bp, Homo sapien
ttttcatgggaaaattccgatgtct

SEQ ID NO: 1292392 - DNA, 25 bp, Homo sapien
aaattgactcatgcctcctcattct

SEQ ID NO: 1292393 - DNA, 25 bp, Homo sapien
aacaacagccgttggaggatctcgt

SEQ ID NO: 1292394 - DNA, 25 bp, Homo sapien
acaacagccgttggaggatctcgtc

SEQ ID NO: 1292395 - DNA, 25 bp, Homo sapien
gaacaacagccgttggaggatctcg

SEQ ID NO: 1292396 - DNA, 25 bp, Homo sapien
ctgaacaacagccgttggaggatct

SEQ ID NO: 1292397 - DNA, 25 bp, Homo sapien
tcttggagtcgttttcagaagtctt

SEQ ID NO: 1292398 - DNA, 25 bp, Homo sapien
gggcaaagcaggcatgcgttctatt

SEQ ID NO: 1292399 - DNA, 25 bp, Homo sapien
tgttcacggccttgctgttcttgga

SEQ ID NO: 1292400 - DNA, 25 bp, Homo sapien
gcaggcatgcgttctattgacttct

SEQ ID NO: 1292401 - DNA, 25 bp, Homo sapien
tagaccagtcttggattccccagtc

SEQ ID NO: 1292402 - DNA, 25 bp, Homo sapien
gagggaagtgatttacccagcacca

SEQ ID NO: 1292403 - DNA, 25 bp, Homo sapien
tttaacagctgaggtgaggcaactg

SEQ ID NO: 1292404 - DNA, 25 bp, Homo sapien
gcaccacctaagaggaagctgtaga

SEQ ID NO: 1292405 - DNA, 25 bp, Homo sapien
tctgggagggtgagcttgtgttcat

SEQ ID NO: 1292406 - DNA, 25 bp, Homo sapien
tgggagggtgagcttgtgttcatac

SEQ ID NO: 1292407 - DNA, 25 bp, Homo sapien
ggagggtgagcttgtgttcatactt

SEQ ID NO: 1292408 - DNA, 25 bp, Homo sapien
ctctgggagggtgagcttgtgttca

SEQ ID NO: 1292409 - DNA, 25 bp, Homo sapien
ccaaacaaggctggcttatagctca

SEQ ID NO: 1292410 - DNA, 25 bp, Homo sapien
tgcggaggcaagtatcccatggaga

SEQ ID NO: 1292411 - DNA, 25 bp, Homo sapien
cagaaggaataggaacccaaacaag

SEQ ID NO: 1292412 - DNA, 25 bp, Homo sapien
gctgccactgctcctatggtgcctg

SEQ ID NO: 1292413 - DNA, 25 bp, Homo sapien
agagaaatatcagttctgccagcat

SEQ ID NO: 1292414 - DNA, 25 bp, Homo sapien
ctaaagagaaatatcagttctgcca

SEQ ID NO: 1292415 - DNA, 25 bp, Homo sapien
aaagagaaatatcagttctgccagc

SEQ ID NO: 1292416 - DNA, 25 bp, Homo sapien
aagagaaatatcagttctgccagca

SEQ ID NO: 1292417 - DNA, 25 bp, Homo sapien
gtcaaattcatagaggcaaagagta

SEQ ID NO: 1292418 - DNA, 25 bp, Homo sapien
gagctatctacaatagtcaaattca

SEQ ID NO: 1292419 - DNA, 25 bp, Homo sapien
atgagctatctacaatagtcaaatt

SEQ ID NO: 1292420 - DNA, 25 bp, Homo sapien
agaggcaaagagtagaatggtggct

SEQ ID NO: 1292421 - DNA, 25 bp, Homo sapien
tggagacaagagcaattccgtctgg

SEQ ID NO: 1292422 - DNA, 25 bp, Homo sapien
cgtctggactcaaacctggatttcg

SEQ ID NO: 1292423 - DNA, 25 bp, Homo sapien
tttactaccatcgaaactgctgtgc

SEQ ID NO: 1292424 - DNA, 25 bp, Homo sapien
ccagtccaagcagggcaattatgaa

SEQ ID NO: 1292425 - DNA, 25 bp, Homo sapien
agcgacagagcgagcggcccctacg

SEQ ID NO: 1292426 - DNA, 25 bp, Homo sapien
cggagcgacagagcgagcggcccct

SEQ ID NO: 1292427 - DNA, 25 bp, Homo sapien
ccacggagcgacagagcgagcggcc

SEQ ID NO: 1292428 - DNA, 25 bp, Homo sapien
gagcgacagagcgagcggcccctac

SEQ ID NO: 1292429 - DNA, 25 bp, Homo sapien
ctggaaaatggctccctgacgtggg

SEQ ID NO: 1292430 - DNA, 25 bp, Homo sapien
caaaaccctgctgtgtggtaggagt

SEQ ID NO: 1292431 - DNA, 25 bp, Homo sapien
tacggttggcgttcttggagacctc

SEQ ID NO: 1292432 - DNA, 25 bp, Homo sapien
tattgatggcgtttcagctgggtgc

SEQ ID NO: 1292433 - DNA, 25 bp, Homo sapien
ttagctgataaacatgcattacctc

SEQ ID NO: 1292434 - DNA, 25 bp, Homo sapien
gcagaatgaccaaatttagctgata

SEQ ID NO: 1292435 - DNA, 25 bp, Homo sapien
tacattgcagaatgaccaaatttag

SEQ ID NO: 1292436 - DNA, 25 bp, Homo sapien
tttatcatgtacagcgtgatgtttt

SEQ ID NO: 1292437 - DNA, 25 bp, Homo sapien
gctctatggatttggcaagttacta

SEQ ID NO: 1292438 - DNA, 25 bp, Homo sapien
ggagtcatataacccaggtttgaat

SEQ ID NO: 1292439 - DNA, 25 bp, Homo sapien
ttctttttcaggagtataacgtcac

SEQ ID NO: 1292440 - DNA, 25 bp, Homo sapien
ccaggtttgaatgctagttgctccc

SEQ ID NO: 1292441 - DNA, 25 bp, Homo sapien
aagatagtcaaataacatatgtcta

SEQ ID NO: 1292442 - DNA, 25 bp, Homo sapien
agatagtcaaataacatatgtctat

SEQ ID NO: 1292443 - DNA, 25 bp, Homo sapien
gatagtcaaataacatatgtctatt

SEQ ID NO: 1292444 - DNA, 25 bp, Homo sapien
atagtcaaataacatatgtctattt

SEQ ID NO: 1292445 - DNA, 25 bp, Homo sapien
gctgtctccagtagtctgtctcaga

SEQ ID NO: 1292446 - DNA, 25 bp, Homo sapien
ggaccagccctttgagtagcactat

SEQ ID NO: 1292447 - DNA, 25 bp, Homo sapien
tttatccacatcttaccaggaccag

SEQ ID NO: 1292448 - DNA, 25 bp, Homo sapien
tgtgaactgtcaattaccagtgtgg

SEQ ID NO: 1292449 - DNA, 25 bp, Homo sapien
gatgtagagcaactcttcctgagct

SEQ ID NO: 1292450 - DNA, 25 bp, Homo sapien
tggccctggacaaccactgatttgc

SEQ ID NO: 1292451 - DNA, 25 bp, Homo sapien
gactgctaatgaacgaagctgctta

SEQ ID NO: 1292452 - DNA, 25 bp, Homo sapien
tataccactggtgccttaatgggca

SEQ ID NO: 1292453 - DNA, 25 bp, Homo sapien
gctttagcagaaggcctagacatta

SEQ ID NO: 1292454 - DNA, 25 bp, Homo sapien
caggttcgctacacggcttcaggta

SEQ ID NO: 1292455 - DNA, 25 bp, Homo sapien
gaatacagcagtgcgacaggttcgc

SEQ ID NO: 1292456 - DNA, 25 bp, Homo sapien
taaggaatggctactcgtgtgtgcc

SEQ ID NO: 1292457 - DNA, 25 bp, Homo sapien
ggtagcttgccctagacactcctgt

SEQ ID NO: 1292458 - DNA, 25 bp, Homo sapien
tcccctgggtgtgctgaagcagcag

SEQ ID NO: 1292459 - DNA, 25 bp, Homo sapien
tagtgagcagctaaccacagtcaga

SEQ ID NO: 1292460 - DNA, 25 bp, Homo sapien
tgaagtgatagctgtgaatacccgc

SEQ ID NO: 1292461 - DNA, 25 bp, Homo sapien
gaaggacgctttacaactgggtatc

SEQ ID NO: 1292462 - DNA, 25 bp, Homo sapien
tctttgcgggagaacatacgatccg

SEQ ID NO: 1292463 - DNA, 25 bp, Homo sapien
tgagctgcgaggcttaagtgtccct

SEQ ID NO: 1292464 - DNA, 25 bp, Homo sapien
tgtgcttcagggtagcgaggctccc

SEQ ID NO: 1292465 - DNA, 25 bp, Homo sapien
gcagtggacttcctggtcagtcgga

SEQ ID NO: 1292466 - DNA, 25 bp, Homo sapien
gccggtcctgtagaagcagtggact

SEQ ID NO: 1292467 - DNA, 25 bp, Homo sapien
caagatagaacacaaaagagctgaa

SEQ ID NO: 1292468 - DNA, 25 bp, Homo sapien
ggaaatgccaagtttatcctatggc

SEQ ID NO: 1292469 - DNA, 25 bp, Homo sapien
aaatatactagagctgcgccaacgc

SEQ ID NO: 1292470 - DNA, 25 bp, Homo sapien
ctaaaatgggtacacagggctgcat

SEQ ID NO: 1292471 - DNA, 25 bp, Homo sapien
tcagggcagttaatgtttccagtcc

SEQ ID NO: 1292472 - DNA, 25 bp, Homo sapien
tttgggaagcgcactacataggatc

SEQ ID NO: 1292473 - DNA, 25 bp, Homo sapien
gatctttttaggcatggcttggcgc

SEQ ID NO: 1292474 - DNA, 25 bp, Homo sapien
ccttgagtgagctagtttctggcca

SEQ ID NO: 1292475 - DNA, 25 bp, Homo sapien
cattcgcgccagaggatacatgcag

SEQ ID NO: 1292476 - DNA, 25 bp, Homo sapien
cctgagcaagtaggtgtggaccaac

SEQ ID NO: 1292477 - DNA, 25 bp, Homo sapien
gaatatacaattcttttcaacttcc

SEQ ID NO: 1292478 - DNA, 25 bp, Homo sapien
taatgttctctcattctgagggcaa

SEQ ID NO: 1292479 - DNA, 25 bp, Homo sapien
taaaggtagcctttgaaagaggatc

SEQ ID NO: 1292480 - DNA, 25 bp, Homo sapien
gaggatcccttctttgaattgacag

SEQ ID NO: 1292481 - DNA, 25 bp, Homo sapien
tgaggccctcaatgcgtatgtacgt

SEQ ID NO: 1292482 - DNA, 25 bp, Homo sapien
agtttgctgcattttgaactatata

SEQ ID NO: 1292483 - DNA, 25 bp, Homo sapien
gaggccctcaatgcgtatgtacgta

SEQ ID NO: 1292484 - DNA, 25 bp, Homo sapien
caggagggagtagtctcacagtcca

SEQ ID NO: 1292485 - DNA, 25 bp, Homo sapien
gcttggtaaagtgcgatgcctcctc

SEQ ID NO: 1292486 - DNA, 25 bp, Homo sapien
gagctattgcttgtggagtgactaa

SEQ ID NO: 1292487 - DNA, 25 bp, Homo sapien
tcctccagcgaagtcatcatgatag

SEQ ID NO: 1292488 - DNA, 25 bp, Homo sapien
gaaggcagaggatgctgggtcaggc

SEQ ID NO: 1292489 - DNA, 25 bp, Homo sapien
tagaaggcagaggatgctgggtcag

SEQ ID NO: 1292490 - DNA, 25 bp, Homo sapien
cagaggatgctgggtcaggcccagc

SEQ ID NO: 1292491 - DNA, 25 bp, Homo sapien
ggcagaggatgctgggtcaggccca

SEQ ID NO: 1292492 - DNA, 25 bp, Homo sapien
gagaaagcaggcgatgccagcagca

SEQ ID NO: 1292493 - DNA, 25 bp, Homo sapien
atgaagtcagcttgaagtctccagc

SEQ ID NO: 1292494 - DNA, 25 bp, Homo sapien
gatgcatgaggcttgcacctccagg

SEQ ID NO: 1292495 - DNA, 25 bp, Homo sapien
ggcgatgccagcagcattactggtg

SEQ ID NO: 1292496 - DNA, 25 bp, Homo sapien
gccaggagccaggtcaaacttcaac

SEQ ID NO: 1292497 - DNA, 25 bp, Homo sapien
cagaggctgccctaggatccagaaa

SEQ ID NO: 1292498 - DNA, 25 bp, Homo sapien
cattccaatgggtatccgcatgagt

SEQ ID NO: 1292499 - DNA, 25 bp, Homo sapien
ccaactacttggtggacagggacaa

SEQ ID NO: 1292500 - DNA, 25 bp, Homo sapien
cacagttttccagccaaggcttgtg

SEQ ID NO: 1292501 - DNA, 25 bp, Homo sapien
taactggccttggatccttcgtggg

SEQ ID NO: 1292502 - DNA, 25 bp, Homo sapien
cagttttccagccaaggcttgtgtc

SEQ ID NO: 1292503 - DNA, 25 bp, Homo sapien
tgtcttgcctggttaactggccttg

SEQ ID NO: 1292504 - DNA, 25 bp, Homo sapien
agggcagacaacagacacccagcgg

SEQ ID NO: 1292505 - DNA, 25 bp, Homo sapien
gagggcagacaacagacacccagcg

SEQ ID NO: 1292506 - DNA, 25 bp, Homo sapien
tagacactgagtgtacagtcttccc

SEQ ID NO: 1292507 - DNA, 25 bp, Homo sapien
gcctggttggccgtaatcgttcctc

SEQ ID NO: 1292508 - DNA, 25 bp, Homo sapien
caggcagttcagacggatccaggga

SEQ ID NO: 1292509 - DNA, 25 bp, Homo sapien
ttcagacggatccagggagttgtgc

SEQ ID NO: 1292510 - DNA, 25 bp, Homo sapien
ggccagcagtctccgagttctgcac

SEQ ID NO: 1292511 - DNA, 25 bp, Homo sapien
gaggggccagcagtctccgagttct

SEQ ID NO: 1292512 - DNA, 25 bp, Homo sapien
agcagtctccgagttctgcacatgc

SEQ ID NO: 1292513 - DNA, 25 bp, Homo sapien
atgggggcatgggactagcacccct

SEQ ID NO: 1292514 - DNA, 25 bp, Homo sapien
cccaggcagatattcaagggactga

SEQ ID NO: 1292515 - DNA, 25 bp, Homo sapien
tttaaagaagggagcactgtgtcca

SEQ ID NO: 1292516 - DNA, 25 bp, Homo sapien
tctcatcaaaaagacactcccaggg

SEQ ID NO: 1292517 - DNA, 25 bp, Homo sapien
tgaagatctgctaactgaggcggcc

SEQ ID NO: 1292518 - DNA, 25 bp, Homo sapien
tggaaagtgatgctgccaaaaacct

SEQ ID NO: 1292519 - DNA, 25 bp, Homo sapien
tctactcagttctcaagatcctggg

SEQ ID NO: 1292520 - DNA, 25 bp, Homo sapien
ctctaaggaacccagttctactcag

SEQ ID NO: 1292521 - DNA, 25 bp, Homo sapien
tgtcaccttcatatacgagagcaaa

SEQ ID NO: 1292522 - DNA, 25 bp, Homo sapien
tcacacaggccagagcagaggggaa

SEQ ID NO: 1292523 - DNA, 25 bp, Homo sapien
gccagagcagaggggaaaaaggaaa

SEQ ID NO: 1292524 - DNA, 25 bp, Homo sapien
cacaggccagagcagaggggaaaaa

SEQ ID NO: 1292525 - DNA, 25 bp, Homo sapien
caggccagagcagaggggaaaaagg

SEQ ID NO: 1292526 - DNA, 25 bp, Homo sapien
gacctgggctgttcgagttctgaga

SEQ ID NO: 1292527 - DNA, 25 bp, Homo sapien
ttcgagtgccctgctcaaaaaggca

SEQ ID NO: 1292528 - DNA, 25 bp, Homo sapien
gattataatgctgctccgagagacc

SEQ ID NO: 1292529 - DNA, 25 bp, Homo sapien
gattccgacgggtaagcacctctga

SEQ ID NO: 1292530 - DNA, 25 bp, Homo sapien
tcaaggcttcatgcggactgctgtc

SEQ ID NO: 1292531 - DNA, 25 bp, Homo sapien
ttgatgatggctctagaccgcaacg

SEQ ID NO: 1292532 - DNA, 25 bp, Homo sapien
caatgggtcactgggaacagatcca

SEQ ID NO: 1292533 - DNA, 25 bp, Homo sapien
tctcagaggaggtgtcagaagcctt

SEQ ID NO: 1292534 - DNA, 25 bp, Homo sapien
agttttctttgtctcctgagtccca

SEQ ID NO: 1292535 - DNA, 25 bp, Homo sapien
gttttctttgtctcctgagtcccac

SEQ ID NO: 1292536 - DNA, 25 bp, Homo sapien
tcctgagtcccactgtctgtactca

SEQ ID NO: 1292537 - DNA, 25 bp, Homo sapien
ttgtctcctgagtcccactgtctgt

SEQ ID NO: 1292538 - DNA, 25 bp, Homo sapien
tgaggagacagttcccgcgctgtgt

SEQ ID NO: 1292539 - DNA, 25 bp, Homo sapien
gctgccctcctgttggtgaaactgg

SEQ ID NO: 1292540 - DNA, 25 bp, Homo sapien
ttttcattgttgagagcaaactccc

SEQ ID NO: 1292541 - DNA, 25 bp, Homo sapien
gtgaaactgggagaagaaacctgcc

SEQ ID NO: 1292542 - DNA, 25 bp, Homo sapien
tcagatttcagctcccgggtgaggt

SEQ ID NO: 1292543 - DNA, 25 bp, Homo sapien
tctgtagcttaaaccgcaagtggcg

SEQ ID NO: 1292544 - DNA, 25 bp, Homo sapien
tcaaggcggcggcttagactctgta

SEQ ID NO: 1292545 - DNA, 25 bp, Homo sapien
gctggagttgctaccttctgcctga

SEQ ID NO: 1292546 - DNA, 25 bp, Homo sapien
tagaggcatccaattccactcaagg

SEQ ID NO: 1292547 - DNA, 25 bp, Homo sapien
cctagaggcatccaattccactcaa

SEQ ID NO: 1292548 - DNA, 25 bp, Homo sapien
ccagccaatgtgggctcctagaggc

SEQ ID NO: 1292549 - DNA, 25 bp, Homo sapien
cagccaatgtgggctcctagaggca

SEQ ID NO: 1292550 - DNA, 25 bp, Homo sapien
cggcggctctccctatgcttgctgt

SEQ ID NO: 1292551 - DNA, 25 bp, Homo sapien
ttcaagctttccgtcaatacttccg

SEQ ID NO: 1292552 - DNA, 25 bp, Homo sapien
ggctctccctatgcttgctgttttg

SEQ ID NO: 1292553 - DNA, 25 bp, Homo sapien
ttccgtcaatacttccggcggctct

SEQ ID NO: 1292554 - DNA, 25 bp, Homo sapien
tcataccaagactgaggtgacccag

SEQ ID NO: 1292555 - DNA, 25 bp, Homo sapien
taagctggctatgtctctctcagga

SEQ ID NO: 1292556 - DNA, 25 bp, Homo sapien
gatatggtcctagggtagaacccac

SEQ ID NO: 1292557 - DNA, 25 bp, Homo sapien
gatcctgacactaaaggaacctggc

SEQ ID NO: 1292558 - DNA, 25 bp, Homo sapien
acaggcacacaatactcaggtttat

SEQ ID NO: 1292559 - DNA, 25 bp, Homo sapien
tctcatctgataggtcgcagtcaaa

SEQ ID NO: 1292560 - DNA, 25 bp, Homo sapien
ctgatctcatctgataggtcgcagt

SEQ ID NO: 1292561 - DNA, 25 bp, Homo sapien
cacaatactcaggtttattcaatgt

SEQ ID NO: 1292562 - DNA, 25 bp, Homo sapien
accacaacaagctaagttttgtaag

SEQ ID NO: 1292563 - DNA, 25 bp, Homo sapien
cacaacaagctaagttttgtaagtt

SEQ ID NO: 1292564 - DNA, 25 bp, Homo sapien
ccacaacaagctaagttttgtaagt

SEQ ID NO: 1292565 - DNA, 25 bp, Homo sapien
tgaattctcctctgttgctttgtgg

SEQ ID NO: 1292566 - DNA, 25 bp, Homo sapien
actcatgccttaatggtgcctccca

SEQ ID NO: 1292567 - DNA, 25 bp, Homo sapien
gattactcaactagatggctccact

SEQ ID NO: 1292568 - DNA, 25 bp, Homo sapien
gagagttattcctcctccatatgcc

SEQ ID NO: 1292569 - DNA, 25 bp, Homo sapien
tagggatccctacaacggaaagata

SEQ ID NO: 1292570 - DNA, 25 bp, Homo sapien
tctcacaaagggaagtagggatccc

SEQ ID NO: 1292571 - DNA, 25 bp, Homo sapien
ttaccatcaacaatgagacagactg

SEQ ID NO: 1292572 - DNA, 25 bp, Homo sapien
tactctctcaaagtcaccgtacaga

SEQ ID NO: 1292573 - DNA, 25 bp, Homo sapien
tgggtctaatatagtggttcacacc

SEQ ID NO: 1292574 - DNA, 25 bp, Homo sapien
caacacaatgtgttaagtgcaacaa

SEQ ID NO: 1292575 - DNA, 25 bp, Homo sapien
gcagaaggaggtataggtgaccctt

SEQ ID NO: 1292576 - DNA, 25 bp, Homo sapien
taaagtacgcaaataattacaacac

SEQ ID NO: 1292577 - DNA, 25 bp, Homo sapien
tgttattggtcaacaggaggccatt

SEQ ID NO: 1292578 - DNA, 25 bp, Homo sapien
ttatgttattggtcaacaggaggcc

SEQ ID NO: 1292579 - DNA, 25 bp, Homo sapien
tattggtcaacaggaggccattaag

SEQ ID NO: 1292580 - DNA, 25 bp, Homo sapien
tatgttattggtcaacaggaggcca

SEQ ID NO: 1292581 - DNA, 25 bp, Homo sapien
caaatgttagcaagatcaggtccaa

SEQ ID NO: 1292582 - DNA, 25 bp, Homo sapien
gtccaaattcctcagtatgactgtt

SEQ ID NO: 1292583 - DNA, 25 bp, Homo sapien
taattccaagttcatcaagtcactg

SEQ ID NO: 1292584 - DNA, 25 bp, Homo sapien
acttgtaaaccttcaatgattccca

SEQ ID NO: 1292585 - DNA, 25 bp, Homo sapien
tgatttaaatctaccagggaccatt

SEQ ID NO: 1292586 - DNA, 25 bp, Homo sapien
aaaactgccctaggatctagtctca

SEQ ID NO: 1292587 - DNA, 25 bp, Homo sapien
tatactccattacagctgtggcaag

SEQ ID NO: 1292588 - DNA, 25 bp, Homo sapien
tgataagtcctcaagttcctacaga

SEQ ID NO: 1292589 - DNA, 25 bp, Homo sapien
taaaatacacagtaggtacctccta

SEQ ID NO: 1292590 - DNA, 25 bp, Homo sapien
cacaagaggaagagtaactactgag

SEQ ID NO: 1292591 - DNA, 25 bp, Homo sapien
ccctgtaatattctgatgtagtttc

SEQ ID NO: 1292592 - DNA, 25 bp, Homo sapien
gagagcttacccatcagacaaagca

SEQ ID NO: 1292593 - DNA, 25 bp, Homo sapien
gggccaaattgtgacgtcagcgttc

SEQ ID NO: 1292594 - DNA, 25 bp, Homo sapien
cagcgaagggttccgccgctcagct

SEQ ID NO: 1292595 - DNA, 25 bp, Homo sapien
attgtgacgtcagcgttctggaagg

SEQ ID NO: 1292596 - DNA, 25 bp, Homo sapien
gcgctcccgccagcgaagggttccg

SEQ ID NO: 1292597 - DNA, 25 bp, Homo sapien
ctgacccatttctgcttcatgcctt

SEQ ID NO: 1292598 - DNA, 25 bp, Homo sapien
gctgacccatttctgcttcatgcct

SEQ ID NO: 1292599 - DNA, 25 bp, Homo sapien
agctgacccatttctgcttcatgcc

SEQ ID NO: 1292600 - DNA, 25 bp, Homo sapien
tggcatctctgcaatcctctaggag

SEQ ID NO: 1292601 - DNA, 25 bp, Homo sapien
gatctgtgttaaaccgcccttggca

SEQ ID NO: 1292602 - DNA, 25 bp, Homo sapien
gaactgcaatgaggcactgggcatt

SEQ ID NO: 1292603 - DNA, 25 bp, Homo sapien
cttctttacagagacgtggatctgt

SEQ ID NO: 1292604 - DNA, 25 bp, Homo sapien
gtctccatcttctgagctcaagcca

SEQ ID NO: 1292605 - DNA, 25 bp, Homo sapien
tgggataacaggtgcctgccaacaa

SEQ ID NO: 1292606 - DNA, 25 bp, Homo sapien
ataacaggtgcctgccaacaagccc

SEQ ID NO: 1292607 - DNA, 25 bp, Homo sapien
gataacaggtgcctgccaacaagcc

SEQ ID NO: 1292608 - DNA, 25 bp, Homo sapien
gcgttcgccgtttgccgcagtgaca

SEQ ID NO: 1292609 - DNA, 25 bp, Homo sapien
cctcctgcgccagtgagccatgaat

SEQ ID NO: 1292610 - DNA, 25 bp, Homo sapien
catgaaatactcatgggccgactgc

SEQ ID NO: 1292611 - DNA, 25 bp, Homo sapien
ccggctgcggcacttcatgaaatac

SEQ ID NO: 1292612 - DNA, 25 bp, Homo sapien
ctttctctccgcgtttcctgagcag

SEQ ID NO: 1292613 - DNA, 25 bp, Homo sapien
ttcctgcagccgagggccggggagg

SEQ ID NO: 1292614 - DNA, 25 bp, Homo sapien
tctctccgcgtttcctgagcaggac

SEQ ID NO: 1292615 - DNA, 25 bp, Homo sapien
caggcagggcgttcccgccagccgg

SEQ ID NO: 1292616 - DNA, 25 bp, Homo sapien
gctggactggagttgaccatcaact

SEQ ID NO: 1292617 - DNA, 25 bp, Homo sapien
ttctctgggtggcagcaaagacttc

SEQ ID NO: 1292618 - DNA, 25 bp, Homo sapien
aaacttctctgctggactggagttg

SEQ ID NO: 1292619 - DNA, 25 bp, Homo sapien
gcagcaaagacttcctgccttcttg

SEQ ID NO: 1292620 - DNA, 25 bp, Homo sapien
gaagagggcaccagcagttccaact

SEQ ID NO: 1292621 - DNA, 25 bp, Homo sapien
aggaagagggcaccagcagttccaa

SEQ ID NO: 1292622 - DNA, 25 bp, Homo sapien
tcaggaagagggcaccagcagttcc

SEQ ID NO: 1292623 - DNA, 25 bp, Homo sapien
ctgtcaggaagagggcaccagcagt

SEQ ID NO: 1292624 - DNA, 25 bp, Homo sapien
tcccccttgcaaaggaaaattgatc

SEQ ID NO: 1292625 - DNA, 25 bp, Homo sapien
tgcaaaggaaaattgatcggaagag

SEQ ID NO: 1292626 - DNA, 25 bp, Homo sapien
cccttgcaaaggaaaattgatcgga

SEQ ID NO: 1292627 - DNA, 25 bp, Homo sapien
aaggaaaattgatcggaagaggaag

SEQ ID NO: 1292628 - DNA, 25 bp, Homo sapien
ttttcctggtgcctctgcgccacct

SEQ ID NO: 1292629 - DNA, 25 bp, Homo sapien
ttcctggtgcctctgcgccacctgg

SEQ ID NO: 1292630 - DNA, 25 bp, Homo sapien
cctggtgcctctgcgccacctggtg

SEQ ID NO: 1292631 - DNA, 25 bp, Homo sapien
tttttcctggtgcctctgcgccacc

SEQ ID NO: 1292632 - DNA, 25 bp, Homo sapien
aagccggtcaatctacctcaaaggg

SEQ ID NO: 1292633 - DNA, 25 bp, Homo sapien
tcagaatgtgaagatggcgcaggca

SEQ ID NO: 1292634 - DNA, 25 bp, Homo sapien
caatcccgatgaggttacaggacac

SEQ ID NO: 1292635 - DNA, 25 bp, Homo sapien
taagctccatatagatctcaggtag

SEQ ID NO: 1292636 - DNA, 25 bp, Homo sapien
cattcagggatctgttggaggcctc

SEQ ID NO: 1292637 - DNA, 25 bp, Homo sapien
cagaaatcctcttgcgttccagggc

SEQ ID NO: 1292638 - DNA, 25 bp, Homo sapien
tgtgatgacggaaaggaccacggca

SEQ ID NO: 1292639 - DNA, 25 bp, Homo sapien
tataggatgatgagcaacaccgagg

SEQ ID NO: 1292640 - DNA, 25 bp, Homo sapien
tcccacagacctccacacatttggc

SEQ ID NO: 1292641 - DNA, 25 bp, Homo sapien
cccacagacctccacacatttggct

SEQ ID NO: 1292642 - DNA, 25 bp, Homo sapien
ccacagacctccacacatttggctc

SEQ ID NO: 1292643 - DNA, 25 bp, Homo sapien
cccactgatcgttttagagcctgaa

SEQ ID NO: 1292644 - DNA, 25 bp, Homo sapien
gattcagagaagcagtccagtcagc

SEQ ID NO: 1292645 - DNA, 25 bp, Homo sapien
gactcgaagaatgcataagctggga

SEQ ID NO: 1292646 - DNA, 25 bp, Homo sapien
gcttcacactggtgggagccgtaca

SEQ ID NO: 1292647 - DNA, 25 bp, Homo sapien
tcttcatcactgacaatttggctac

SEQ ID NO: 1292648 - DNA, 25 bp, Homo sapien
gggaaatgatcctgcaatgaggacc

SEQ ID NO: 1292649 - DNA, 25 bp, Homo sapien
ccctggggaaatgatcctgcaatga

SEQ ID NO: 1292650 - DNA, 25 bp, Homo sapien
gcaatgaggaccacagatatgatga

SEQ ID NO: 1292651 - DNA, 25 bp, Homo sapien
tatgatgaggataacagtggggcat

SEQ ID NO: 1292652 - DNA, 25 bp, Homo sapien
ggctggctctggggtaggggtctgc

SEQ ID NO: 1292653 - DNA, 25 bp, Homo sapien
ggcaggtgggctggctctggggtag

SEQ ID NO: 1292654 - DNA, 25 bp, Homo sapien
gggcaggtgggctggctctggggta

SEQ ID NO: 1292655 - DNA, 25 bp, Homo sapien
tggctctggggtaggggtctgcagg

SEQ ID NO: 1292656 - DNA, 25 bp, Homo sapien
gacatctggcacacccaaaactcag

SEQ ID NO: 1292657 - DNA, 25 bp, Homo sapien
aagtctccttcactgggtgtaggga

SEQ ID NO: 1292658 - DNA, 25 bp, Homo sapien
tggtttattcgcagcccacacagct

SEQ ID NO: 1292659 - DNA, 25 bp, Homo sapien
tatcattacgaaatgaccctctgtc

SEQ ID NO: 1292660 - DNA, 25 bp, Homo sapien
tcacaagcccatcctgttgagtgcc

SEQ ID NO: 1292661 - DNA, 25 bp, Homo sapien
ctagttctggccctgatggggcttt

SEQ ID NO: 1292662 - DNA, 25 bp, Homo sapien
caagcccatcctgttgagtgcccag

SEQ ID NO: 1292663 - DNA, 25 bp, Homo sapien
cccatcctgttgagtgcccagcggt

SEQ ID NO: 1292664 - DNA, 25 bp, Homo sapien
catacttgcttttagactcatactt

SEQ ID NO: 1292665 - DNA, 25 bp, Homo sapien
tctcacattctgctcgcacaagatt

SEQ ID NO: 1292666 - DNA, 25 bp, Homo sapien
cattctgctcgcacaagattgcgca

SEQ ID NO: 1292667 - DNA, 25 bp, Homo sapien
aatgaatgatgtttcatacttgctt

SEQ ID NO: 1292668 - DNA, 25 bp, Homo sapien
gggaagcgctcttctgtgcgactcc

SEQ ID NO: 1292669 - DNA, 25 bp, Homo sapien
cttctgtgcgactcctcgtgcaggt

SEQ ID NO: 1292670 - DNA, 25 bp, Homo sapien
gaagcgctcttctgtgcgactcctc

SEQ ID NO: 1292671 - DNA, 25 bp, Homo sapien
ctcttctgtgcgactcctcgtgcag

SEQ ID NO: 1292672 - DNA, 25 bp, Homo sapien
gcctccttggtgcagtaagcagcat

SEQ ID NO: 1292673 - DNA, 25 bp, Homo sapien
cagggcctggcacgacatctattac

SEQ ID NO: 1292674 - DNA, 25 bp, Homo sapien
aattggccctttgtacacttcggtg

SEQ ID NO: 1292675 - DNA, 25 bp, Homo sapien
gctaggaataaagaagctgcccatc

SEQ ID NO: 1292676 - DNA, 25 bp, Homo sapien
cattaacgataaatataattactag

SEQ ID NO: 1292677 - DNA, 25 bp, Homo sapien
tctttaggggctagagcagaatatg

SEQ ID NO: 1292678 - DNA, 25 bp, Homo sapien
ccaagtacggtcaaagtattcaagc

SEQ ID NO: 1292679 - DNA, 25 bp, Homo sapien
caaaagttagcatatcaaactatct

SEQ ID NO: 1292680 - DNA, 25 bp, Homo sapien
ggcaagaggaattcatgctacctac

SEQ ID NO: 1292681 - DNA, 25 bp, Homo sapien
ccagactgaaatagcaaagggcaag

SEQ ID NO: 1292682 - DNA, 25 bp, Homo sapien
ccatgaatgaaaactggacatagca

SEQ ID NO: 1292683 - DNA, 25 bp, Homo sapien
tcaggttagattccagaagtgtaag

SEQ ID NO: 1292684 - DNA, 25 bp, Homo sapien
gctacctggatacagagcatctggt

SEQ ID NO: 1292685 - DNA, 25 bp, Homo sapien
caagagcaaaactgaacctgtaggc

SEQ ID NO: 1292686 - DNA, 25 bp, Homo sapien
gacactgctcaaagctaatccatgg

SEQ ID NO: 1292687 - DNA, 25 bp, Homo sapien
gatgccctggacacagtaagcagag

SEQ ID NO: 1292688 - DNA, 25 bp, Homo sapien
tcttccctttaggtagagatgtggc

SEQ ID NO: 1292689 - DNA, 25 bp, Homo sapien
tggccaaaggttataaatttctagc

SEQ ID NO: 1292690 - DNA, 25 bp, Homo sapien
gatacagcgctattaatcaggccct

SEQ ID NO: 1292691 - DNA, 25 bp, Homo sapien
cagtgactgaagctactgtagtttc

SEQ ID NO: 1292692 - DNA, 25 bp, Homo sapien
gctcttgttctcatagattttgcag

SEQ ID NO: 1292693 - DNA, 25 bp, Homo sapien
tcttcagtggactaatggttccatc

SEQ ID NO: 1292694 - DNA, 25 bp, Homo sapien
gattttgcagaactagtccttttca

SEQ ID NO: 1292695 - DNA, 25 bp, Homo sapien
ccatctgattgataccttgggtgaa

SEQ ID NO: 1292696 - DNA, 25 bp, Homo sapien
cataagaaggcacgtctaacagact

SEQ ID NO: 1292697 - DNA, 25 bp, Homo sapien
tctcacagtaaaacagggatactac

SEQ ID NO: 1292698 - DNA, 25 bp, Homo sapien
taacagactccgtctaaggcagttt

SEQ ID NO: 1292699 - DNA, 25 bp, Homo sapien
cctagcgtcgtgtgtctggcatata

SEQ ID NO: 1292700 - DNA, 25 bp, Homo sapien
aacttgacaccatgacatagtaggc

SEQ ID NO: 1292701 - DNA, 25 bp, Homo sapien
tgacaactgcgtaggacaaataggg

SEQ ID NO: 1292702 - DNA, 25 bp, Homo sapien
taatctagcaaccaacttttaaggc

SEQ ID NO: 1292703 - DNA, 25 bp, Homo sapien
ttttaaggcccacagcagtgcttcc

SEQ ID NO: 1292704 - DNA, 25 bp, Homo sapien
gattaacacgacacaaaaccatggt

SEQ ID NO: 1292705 - DNA, 25 bp, Homo sapien
ttcaaagacgtaatagaaagccagg

SEQ ID NO: 1292706 - DNA, 25 bp, Homo sapien
tagtgaaggcttactgacagcacac

SEQ ID NO: 1292707 - DNA, 25 bp, Homo sapien
gccagggaaggtacaaaacagtgaa

SEQ ID NO: 1292708 - DNA, 25 bp, Homo sapien
acacttggcccaagatttactttga

SEQ ID NO: 1292709 - DNA, 25 bp, Homo sapien
ggcatttttagtaacctatcaatcc

SEQ ID NO: 1292710 - DNA, 25 bp, Homo sapien
ttcctggggagacaaagttacagat

SEQ ID NO: 1292711 - DNA, 25 bp, Homo sapien
taggtacaggtgcacgcccgcctga

SEQ ID NO: 1292712 - DNA, 25 bp, Homo sapien
tgatgaattctgacctagacagctt

SEQ ID NO: 1292713 - DNA, 25 bp, Homo sapien
tactgaaagtgtagtcaggaacact

SEQ ID NO: 1292714 - DNA, 25 bp, Homo sapien
ggataatctgtaactctgctactga

SEQ ID NO: 1292715 - DNA, 25 bp, Homo sapien
aaatctcagaccaactacatccagg

SEQ ID NO: 1292716 - DNA, 25 bp, Homo sapien
tcaggtacttgaacaacagccaaat

SEQ ID NO: 1292717 - DNA, 25 bp, Homo sapien
gaacacccaagtccttctgaccaag

SEQ ID NO: 1292718 - DNA, 25 bp, Homo sapien
tctcccaagaacacgcgtacaggaa

SEQ ID NO: 1292719 - DNA, 25 bp, Homo sapien
taaaggattcctaactgaagtacag

SEQ ID NO: 1292720 - DNA, 25 bp, Homo sapien
gtacaccctcaagaaaaataagtca

SEQ ID NO: 1292721 - DNA, 25 bp, Homo sapien
gctattaatggcactgattacagag

SEQ ID NO: 1292722 - DNA, 25 bp, Homo sapien
taccttgaaacaatagggtattcac

SEQ ID NO: 1292723 - DNA, 25 bp, Homo sapien
gactggtgagaaacgaagtacaccc

SEQ ID NO: 1292724 - DNA, 25 bp, Homo sapien
gatgatgcatccaaactgtccaaca

SEQ ID NO: 1292725 - DNA, 25 bp, Homo sapien
tcacaaaaacgctattggcagcctg

SEQ ID NO: 1292726 - DNA, 25 bp, Homo sapien
tggcatgtcacatcgagggcacaag

SEQ ID NO: 1292727 - DNA, 25 bp, Homo sapien
tgtaaattggcagtatctcccgatg

SEQ ID NO: 1292728 - DNA, 25 bp, Homo sapien
gaaaagcaatgttcatgggatcctg

SEQ ID NO: 1292729 - DNA, 25 bp, Homo sapien
tatgtaatttcctcttgacccaaag

SEQ ID NO: 1292730 - DNA, 25 bp, Homo sapien
cacttataggatatgggcattctcc

SEQ ID NO: 1292731 - DNA, 25 bp, Homo sapien
ggaaaaggtcttgcaaatgtcccta

SEQ ID NO: 1292732 - DNA, 25 bp, Homo sapien
catcatgacatgtcaggtcagggca

SEQ ID NO: 1292733 - DNA, 25 bp, Homo sapien
tccgcagtgcaattgacgccacagt

SEQ ID NO: 1292734 - DNA, 25 bp, Homo sapien
ccagggtacctacaaagaatagctc

SEQ ID NO: 1292735 - DNA, 25 bp, Homo sapien
ggaaaggattttgacatggaaccca

SEQ ID NO: 1292736 - DNA, 25 bp, Homo sapien
cagaataagggaactctgcaagccc

SEQ ID NO: 1292737 - DNA, 25 bp, Homo sapien
tagatctagagccaatcgtatcttg

SEQ ID NO: 1292738 - DNA, 25 bp, Homo sapien
tgcaagcccaataatgtccaagagc

SEQ ID NO: 1292739 - DNA, 25 bp, Homo sapien
cgataaaagcattgtaatccccaga

SEQ ID NO: 1292740 - DNA, 25 bp, Homo sapien
gttaccagaatagtcaccaccttgc

SEQ ID NO: 1292741 - DNA, 25 bp, Homo sapien
ttaccagaatagtcaccaccttgct

SEQ ID NO: 1292742 - DNA, 25 bp, Homo sapien
tgctgaagcggctgctgagcgatgg

SEQ ID NO: 1292743 - DNA, 25 bp, Homo sapien
gaagcggctgctgagcgatgggttg

SEQ ID NO: 1292744 - DNA, 25 bp, Homo sapien
gtctgacgacgcttggaatcaggct

SEQ ID NO: 1292745 - DNA, 25 bp, Homo sapien
ttggaatcaggctggttgtacccat

SEQ ID NO: 1292746 - DNA, 25 bp, Homo sapien
gttggttgttggtctgacgacgctt

SEQ ID NO: 1292747 - DNA, 25 bp, Homo sapien
caggctggttgtacccatctgcctt

SEQ ID NO: 1292748 - DNA, 25 bp, Homo sapien
ccatcatcatagccgtagtagggat

SEQ ID NO: 1292749 - DNA, 25 bp, Homo sapien
gtggtggtggagcacctcgccctcc

SEQ ID NO: 1292750 - DNA, 25 bp, Homo sapien
catcatagccgtagtagggatcttc

SEQ ID NO: 1292751 - DNA, 25 bp, Homo sapien
attgcccccacgattgccccgagat

SEQ ID NO: 1292752 - DNA, 25 bp, Homo sapien
agccgtagtaatctggagggtagcc

SEQ ID NO: 1292753 - DNA, 25 bp, Homo sapien
tcttcatagccgtagtaatctggag

SEQ ID NO: 1292754 - DNA, 25 bp, Homo sapien
gtaatcttcatagccgtagtaatct

SEQ ID NO: 1292755 - DNA, 25 bp, Homo sapien
catagccgtagtaatctggagggta

SEQ ID NO: 1292756 - DNA, 25 bp, Homo sapien
agggtggtagtaataatcttcatac

SEQ ID NO: 1292757 - DNA, 25 bp, Homo sapien
tctaattggaggtggcatgcgagga

SEQ ID NO: 1292758 - DNA, 25 bp, Homo sapien
cacgaccccgacctctaattggagg

SEQ ID NO: 1292759 - DNA, 25 bp, Homo sapien
gaggagggtggtagtaataatcttc

SEQ ID NO: 1292760 - DNA, 25 bp, Homo sapien
gcagcttggcgctctttccttttct

SEQ ID NO: 1292761 - DNA, 25 bp, Homo sapien
cctgtctagcagcttggcgctcttt

SEQ ID NO: 1292762 - DNA, 25 bp, Homo sapien
tctggaggcctgtctagcagcttgg

SEQ ID NO: 1292763 - DNA, 25 bp, Homo sapien
gaggcctgtctagcagcttggcgct

SEQ ID NO: 1292764 - DNA, 25 bp, Homo sapien
aaagcctaggtttccctcacaatgc

SEQ ID NO: 1292765 - DNA, 25 bp, Homo sapien
tacgagccagacaaagattaacttc

SEQ ID NO: 1292766 - DNA, 25 bp, Homo sapien
tgttcttatacgacaatttcaagga

SEQ ID NO: 1292767 - DNA, 25 bp, Homo sapien
tagcatacaacatacaggtcttcca

SEQ ID NO: 1292768 - DNA, 25 bp, Homo sapien
tcaaatatcaagaaccaaaatttca

SEQ ID NO: 1292769 - DNA, 25 bp, Homo sapien
caaatatcaagaaccaaaatttcaa

SEQ ID NO: 1292770 - DNA, 25 bp, Homo sapien
tcttctgtcaccgtagtagccaagt

SEQ ID NO: 1292771 - DNA, 25 bp, Homo sapien
tctgtcaccgtagtagccaagtttc

SEQ ID NO: 1292772 - DNA, 25 bp, Homo sapien
tatttcttctgtcaccgtagtagcc

SEQ ID NO: 1292773 - DNA, 25 bp, Homo sapien
gtcaccgtagtagccaagtttctca

SEQ ID NO: 1292774 - DNA, 25 bp, Homo sapien
ctgaaaagtgtttcttcctgtcttc

SEQ ID NO: 1292775 - DNA, 25 bp, Homo sapien
tgaaaagtgtttcttcctgtcttca

SEQ ID NO: 1292776 - DNA, 25 bp, Homo sapien
gaaaagtgtttcttcctgtcttcat

SEQ ID NO: 1292777 - DNA, 25 bp, Homo sapien
taatcctaagtttatagagacctcc

SEQ ID NO: 1292778 - DNA, 25 bp, Homo sapien
taggaaacaataaaggagctggatg

SEQ ID NO: 1292779 - DNA, 25 bp, Homo sapien
caatttgtcatactaaggtccagcc

SEQ ID NO: 1292780 - DNA, 25 bp, Homo sapien
tgtgctatgactgcacatgtgggca

SEQ ID NO: 1292781 - DNA, 25 bp, Homo sapien
tgatgaccctatgcccattccaagc

SEQ ID NO: 1292782 - DNA, 25 bp, Homo sapien
gcccattccaagcaactgtatttac

SEQ ID NO: 1292783 - DNA, 25 bp, Homo sapien
taaatgatgaccctatgcccattcc

SEQ ID NO: 1292784 - DNA, 25 bp, Homo sapien
atgatgaccctatgcccattccaag

SEQ ID NO: 1292785 - DNA, 25 bp, Homo sapien
gggtcagcccattcaactgtaacta

SEQ ID NO: 1292786 - DNA, 25 bp, Homo sapien
ttacttttccactcatcagccggcg

SEQ ID NO: 1292787 - DNA, 25 bp, Homo sapien
tttccactcatcagccggcgtctgg

SEQ ID NO: 1292788 - DNA, 25 bp, Homo sapien
tggttcttccacagggtcagcccat

SEQ ID NO: 1292789 - DNA, 25 bp, Homo sapien
atatataagccaaaagcatccacca

SEQ ID NO: 1292790 - DNA, 25 bp, Homo sapien
ccacagagcgctaggaataatatcc

SEQ ID NO: 1292791 - DNA, 25 bp, Homo sapien
gatgtgcctacgttcttacccgatg

SEQ ID NO: 1292792 - DNA, 25 bp, Homo sapien
gaagccagaaattggttagccattc

SEQ ID NO: 1292793 - DNA, 25 bp, Homo sapien
tacatggcctacagaagccctgcct

SEQ ID NO: 1292794 - DNA, 25 bp, Homo sapien
tgaggtcaaagaactgtgccagcag

SEQ ID NO: 1292795 - DNA, 25 bp, Homo sapien
taaagccctggatggttcaccaatg

SEQ ID NO: 1292796 - DNA, 25 bp, Homo sapien
caaagtgggacgctagaaatcaaga

SEQ ID NO: 1292797 - DNA, 25 bp, Homo sapien
tgtatcccaggcacatagcacaatg

SEQ ID NO: 1292798 - DNA, 25 bp, Homo sapien
agtagtacaacatatttcgcaaaag

SEQ ID NO: 1292799 - DNA, 25 bp, Homo sapien
ttgagggctatagagcaaaagctcc

SEQ ID NO: 1292800 - DNA, 25 bp, Homo sapien
cccaaaccactataaagcagaaagg

SEQ ID NO: 1292801 - DNA, 25 bp, Homo sapien
aagccaaggttcaattaagacaaag

SEQ ID NO: 1292802 - DNA, 25 bp, Homo sapien
cacactccaaggtgtttaccagggc

SEQ ID NO: 1292803 - DNA, 25 bp, Homo sapien
tgcacactccaaggtgtttaccagg

SEQ ID NO: 1292804 - DNA, 25 bp, Homo sapien
acactccaaggtgtttaccagggcg

SEQ ID NO: 1292805 - DNA, 25 bp, Homo sapien
gcacactccaaggtgtttaccaggg

SEQ ID NO: 1292806 - DNA, 25 bp, Homo sapien
tccatatgctgccaaaaatgaaaac

SEQ ID NO: 1292807 - DNA, 25 bp, Homo sapien
taaaatcatccatatgctgccaaaa

SEQ ID NO: 1292808 - DNA, 25 bp, Homo sapien
ccattagtttactaagagatatgat

SEQ ID NO: 1292809 - DNA, 25 bp, Homo sapien
tctgggtcaagctaggagtggaact

SEQ ID NO: 1292810 - DNA, 25 bp, Homo sapien
aataaacgtcacataccaacttggt

SEQ ID NO: 1292811 - DNA, 25 bp, Homo sapien
aatagtgacttgctaagacagtgga

SEQ ID NO: 1292812 - DNA, 25 bp, Homo sapien
taaatcgtatgagtaggctgtaacc

SEQ ID NO: 1292813 - DNA, 25 bp, Homo sapien
ccaaaagacagaaatgcataagcca

SEQ ID NO: 1292814 - DNA, 25 bp, Homo sapien
tctgaccggacagtggatccatcat

SEQ ID NO: 1292815 - DNA, 25 bp, Homo sapien
gaccggacagtggatccatcataag

SEQ ID NO: 1292816 - DNA, 25 bp, Homo sapien
ccggacagtggatccatcataagac

SEQ ID NO: 1292817 - DNA, 25 bp, Homo sapien
ggacagtggatccatcataagacgt

SEQ ID NO: 1292818 - DNA, 25 bp, Homo sapien
tcacaactagggatacaagatactg

SEQ ID NO: 1292819 - DNA, 25 bp, Homo sapien
tatatgtgatttaagtgatgtccct

SEQ ID NO: 1292820 - DNA, 25 bp, Homo sapien
gcttaataccgtgaagccaaagaga

SEQ ID NO: 1292821 - DNA, 25 bp, Homo sapien
gaagtagaaacaagacatctatggc

SEQ ID NO: 1292822 - DNA, 25 bp, Homo sapien
gattaaaacccagccttgtcaactg

SEQ ID NO: 1292823 - DNA, 25 bp, Homo sapien
taacactggtgatgcaactaccacc

SEQ ID NO: 1292824 - DNA, 25 bp, Homo sapien
taattagatataccttggactcatg

SEQ ID NO: 1292825 - DNA, 25 bp, Homo sapien
gaagttgctccacgtaaatgcctag

SEQ ID NO: 1292826 - DNA, 25 bp, Homo sapien
tcaacagtaataaaggaagtaacca

SEQ ID NO: 1292827 - DNA, 25 bp, Homo sapien
tgtagtgacctccagactcaactga

SEQ ID NO: 1292828 - DNA, 25 bp, Homo sapien
gaagtaaccaagtcattcaacagtc

SEQ ID NO: 1292829 - DNA, 25 bp, Homo sapien
cagccaacagagtcttttgggtatc

SEQ ID NO: 1292830 - DNA, 25 bp, Homo sapien
ctccgttccaattccaggttgcacg

SEQ ID NO: 1292831 - DNA, 25 bp, Homo sapien
ccagagtataaccagttctctcaag

SEQ ID NO: 1292832 - DNA, 25 bp, Homo sapien
cgttccaattccaggttgcacgcca

SEQ ID NO: 1292833 - DNA, 25 bp, Homo sapien
tccagagtataaccagttctctcaa

SEQ ID NO: 1292834 - DNA, 25 bp, Homo sapien
gacaagaatcatacagtacagacta

SEQ ID NO: 1292835 - DNA, 25 bp, Homo sapien
taagctccacaagaatcaggtaatc

SEQ ID NO: 1292836 - DNA, 25 bp, Homo sapien
tggtttgtactcctgccatatcata

SEQ ID NO: 1292837 - DNA, 25 bp, Homo sapien
catacccagcctctagtgtacttaa

SEQ ID NO: 1292838 - DNA, 25 bp, Homo sapien
acaggtggcctcaccgttgttagcc

SEQ ID NO: 1292839 - DNA, 25 bp, Homo sapien
gtcagaacaataagagactttagat

SEQ ID NO: 1292840 - DNA, 25 bp, Homo sapien
tcacagggatgcatgccttcggcct

SEQ ID NO: 1292841 - DNA, 25 bp, Homo sapien
gttcagtgaacactaggatttcaca

SEQ ID NO: 1292842 - DNA, 25 bp, Homo sapien
atgcaatttcattacaactacccaa

SEQ ID NO: 1292843 - DNA, 25 bp, Homo sapien
ctcatcattaaatgcaatttcatta

SEQ ID NO: 1292844 - DNA, 25 bp, Homo sapien
taaatgcaatttcattacaactacc

SEQ ID NO: 1292845 - DNA, 25 bp, Homo sapien
tcattacaactacccaagtcaagtt

SEQ ID NO: 1292846 - DNA, 25 bp, Homo sapien
cttcatcaggtccctttgtggactc

SEQ ID NO: 1292847 - DNA, 25 bp, Homo sapien
catcaggtccctttgtggactcttg

SEQ ID NO: 1292848 - DNA, 25 bp, Homo sapien
tcatcaggtccctttgtggactctt

SEQ ID NO: 1292849 - DNA, 25 bp, Homo sapien
ttcatcaggtccctttgtggactct

SEQ ID NO: 1292850 - DNA, 25 bp, Homo sapien
ccacttgttgatatgtgactgtatc

SEQ ID NO: 1292851 - DNA, 25 bp, Homo sapien
agtcttccacttgttgatatgtgac

SEQ ID NO: 1292852 - DNA, 25 bp, Homo sapien
tcttccacttgttgatatgtgactg

SEQ ID NO: 1292853 - DNA, 25 bp, Homo sapien
acagtcttccacttgttgatatgtg

SEQ ID NO: 1292854 - DNA, 25 bp, Homo sapien
cttctgaaactctgccacaagcagt

SEQ ID NO: 1292855 - DNA, 25 bp, Homo sapien
ctgaaactctgccacaagcagtttt

SEQ ID NO: 1292856 - DNA, 25 bp, Homo sapien
aaagacatttctgagtaacgacctt

SEQ ID NO: 1292857 - DNA, 25 bp, Homo sapien
agacatttctgagtaacgaccttac

SEQ ID NO: 1292858 - DNA, 25 bp, Homo sapien
catcaagatcgacataagctaccaa

SEQ ID NO: 1292859 - DNA, 25 bp, Homo sapien
tcaagatcgacataagctaccaatc

SEQ ID NO: 1292860 - DNA, 25 bp, Homo sapien
tttcatcaagatcgacataagctac

SEQ ID NO: 1292861 - DNA, 25 bp, Homo sapien
tcatcaagatcgacataagctacca

SEQ ID NO: 1292862 - DNA, 25 bp, Homo sapien
taactgtaccgcattaccattcacc

SEQ ID NO: 1292863 - DNA, 25 bp, Homo sapien
accgcattaccattcacctgattag

SEQ ID NO: 1292864 - DNA, 25 bp, Homo sapien
tcttcttttaactgtaccgcattac

SEQ ID NO: 1292865 - DNA, 25 bp, Homo sapien
tcttttaactgtaccgcattaccat

SEQ ID NO: 1292866 - DNA, 25 bp, Homo sapien
gcctctgacagtctcagaattatcc

SEQ ID NO: 1292867 - DNA, 25 bp, Homo sapien
tggtgcgcctctgacagtctcagaa

SEQ ID NO: 1292868 - DNA, 25 bp, Homo sapien
ttccaatttggtgcgcctctgacag

SEQ ID NO: 1292869 - DNA, 25 bp, Homo sapien
aaaggatcgcctttccaatttggtg

SEQ ID NO: 1292870 - DNA, 25 bp, Homo sapien
gcgcgaggcgctttgaaaacgacta

SEQ ID NO: 1292871 - DNA, 25 bp, Homo sapien
aaaacgactagaaatggcgcgcgcg

SEQ ID NO: 1292872 - DNA, 25 bp, Homo sapien
cagccgggcccgtgagaatcagcgc

SEQ ID NO: 1292873 - DNA, 25 bp, Homo sapien
ccgtgagaatcagcgcgaggcgctt

SEQ ID NO: 1292874 - DNA, 25 bp, Homo sapien
catagccacgcgttcgggcctcttt

SEQ ID NO: 1292875 - DNA, 25 bp, Homo sapien
ccagacacgcccatagccacgcgtt

SEQ ID NO: 1292876 - DNA, 25 bp, Homo sapien
gacacgcccatagccacgcgttcgg

SEQ ID NO: 1292877 - DNA, 25 bp, Homo sapien
acgcgttcgggcctctttcggtcat

SEQ ID NO: 1292878 - DNA, 25 bp, Homo sapien
aatcatggagttaagagtagagaaa

SEQ ID NO: 1292879 - DNA, 25 bp, Homo sapien
gaaaggtttcctagagcaagtcagg

SEQ ID NO: 1292880 - DNA, 25 bp, Homo sapien
gaacacctgatccagtcttatggga

SEQ ID NO: 1292881 - DNA, 25 bp, Homo sapien
gcaggcaattacaaaacagggataa

SEQ ID NO: 1292882 - DNA, 25 bp, Homo sapien
catgacagggctttacacagaagag

SEQ ID NO: 1292883 - DNA, 25 bp, Homo sapien
cagcctcggcgaaatatggagaccc

SEQ ID NO: 1292884 - DNA, 25 bp, Homo sapien
tagggttcacccacaggcagagtgg

SEQ ID NO: 1292885 - DNA, 25 bp, Homo sapien
ttttaggaggctgactcggagcact

SEQ ID NO: 1292886 - DNA, 25 bp, Homo sapien
cagagtggcctagagtagcctaaat

SEQ ID NO: 1292887 - DNA, 25 bp, Homo sapien
cacttccatccctacctttgccaag

SEQ ID NO: 1292888 - DNA, 25 bp, Homo sapien
agccttaggcagactgtacaactgt

SEQ ID NO: 1292889 - DNA, 25 bp, Homo sapien
tggtaatacctaattacagccttag

SEQ ID NO: 1292890 - DNA, 25 bp, Homo sapien
gatatttatattctcccccaatgta

SEQ ID NO: 1292891 - DNA, 25 bp, Homo sapien
gataactgtgaccaataccataagg

SEQ ID NO: 1292892 - DNA, 25 bp, Homo sapien
tgatacccatagtggctcacagaag

SEQ ID NO: 1292893 - DNA, 25 bp, Homo sapien
gcaaacgggcaacaattggcagaaa

SEQ ID NO: 1292894 - DNA, 25 bp, Homo sapien
ggaaatgcggtcatctatggccact

SEQ ID NO: 1292895 - DNA, 25 bp, Homo sapien
cattatagtacccacccagagagac

SEQ ID NO: 1292896 - DNA, 25 bp, Homo sapien
cactactgggcttaaattgggcgaa

SEQ ID NO: 1292897 - DNA, 25 bp, Homo sapien
gatggtttaaatcgtggcccacaac

SEQ ID NO: 1292898 - DNA, 25 bp, Homo sapien
gaccttacaggagagtgcacactaa

SEQ ID NO: 1292899 - DNA, 25 bp, Homo sapien
ctcttatgtttaataagagctgagc

SEQ ID NO: 1292900 - DNA, 25 bp, Homo sapien
ctgagctcctgctgaaactcttctc

SEQ ID NO: 1292901 - DNA, 25 bp, Homo sapien
actctcttatgtttaataagagctg

SEQ ID NO: 1292902 - DNA, 25 bp, Homo sapien
tatgtttaataagagctgagctcct

SEQ ID NO: 1292903 - DNA, 25 bp, Homo sapien
cacaaggtcggagttctgactgaaa

SEQ ID NO: 1292904 - DNA, 25 bp, Homo sapien
tgggctctgcgatgacgcacaaggt

SEQ ID NO: 1292905 - DNA, 25 bp, Homo sapien
tgaagcctcggccacattcgttaca

SEQ ID NO: 1292906 - DNA, 25 bp, Homo sapien
tgagatgcggctgaaattttcccca

SEQ ID NO: 1292907 - DNA, 25 bp, Homo sapien
ctttgtggacaagtagatcagtgac

SEQ ID NO: 1292908 - DNA, 25 bp, Homo sapien
caggtctttcagatgtagtcccaaa

SEQ ID NO: 1292909 - DNA, 25 bp, Homo sapien
tggttggagaggatagcttacccac

SEQ ID NO: 1292910 - DNA, 25 bp, Homo sapien
tatgatagcggatgcctgtgtggac

SEQ ID NO: 1292911 - DNA, 25 bp, Homo sapien
tggccatatcttcaaacgtcacagg

SEQ ID NO: 1292912 - DNA, 25 bp, Homo sapien
tcccgggtgagatacatggccatat

SEQ ID NO: 1292913 - DNA, 25 bp, Homo sapien
acatcccggtaaaggtccctctgtg

SEQ ID NO: 1292914 - DNA, 25 bp, Homo sapien
taattctcctgcataacatcccggt

SEQ ID NO: 1292915 - DNA, 25 bp, Homo sapien
acttccctactattctgtatttagg

SEQ ID NO: 1292916 - DNA, 25 bp, Homo sapien
ttagaaacatgattagaaatattca

SEQ ID NO: 1292917 - DNA, 25 bp, Homo sapien
cacacgatacttccctactattctg

SEQ ID NO: 1292918 - DNA, 25 bp, Homo sapien
gatacttccctactattctgtattt

SEQ ID NO: 1292919 - DNA, 25 bp, Homo sapien
acccagccatgagcagggtggctgc

SEQ ID NO: 1292920 - DNA, 25 bp, Homo sapien
cagccatgagcagggtggctgccat

SEQ ID NO: 1292921 - DNA, 25 bp, Homo sapien
ccagccatgagcagggtggctgcca

SEQ ID NO: 1292922 - DNA, 25 bp, Homo sapien
gacccagccatgagcagggtggctg

SEQ ID NO: 1292923 - DNA, 25 bp, Homo sapien
ctcgagcacaagggttcgcctccag

SEQ ID NO: 1292924 - DNA, 25 bp, Homo sapien
gagcacaagggttcgcctccaggga

SEQ ID NO: 1292925 - DNA, 25 bp, Homo sapien
agcacaagggttcgcctccagggag

SEQ ID NO: 1292926 - DNA, 25 bp, Homo sapien
tcgagcacaagggttcgcctccagg

SEQ ID NO: 1292927 - DNA, 25 bp, Homo sapien
tagaccgctgctgtctcagggagga

SEQ ID NO: 1292928 - DNA, 25 bp, Homo sapien
gcgtgaggcacggaaaacaggccct

SEQ ID NO: 1292929 - DNA, 25 bp, Homo sapien
tgccggaatctactaggacagcccc

SEQ ID NO: 1292930 - DNA, 25 bp, Homo sapien
ggtggaggcaatgccggaatctact

SEQ ID NO: 1292931 - DNA, 25 bp, Homo sapien
gacccgcaggtagatctcgaattcg

SEQ ID NO: 1292932 - DNA, 25 bp, Homo sapien
tagacaatggaagtcgagcactggg

SEQ ID NO: 1292933 - DNA, 25 bp, Homo sapien
agattctagagagcacgggcaggtc

SEQ ID NO: 1292934 - DNA, 25 bp, Homo sapien
tagatcgtcgtctccaaaacctgag

SEQ ID NO: 1292935 - DNA, 25 bp, Homo sapien
tctaactgggcctaaggtgagctga

SEQ ID NO: 1292936 - DNA, 25 bp, Homo sapien
gcttcacgctcagggaaacttctgg

SEQ ID NO: 1292937 - DNA, 25 bp, Homo sapien
aaccccagcaagttgaggcttcacg

SEQ ID NO: 1292938 - DNA, 25 bp, Homo sapien
ggttaataaccacgctccttggagc

SEQ ID NO: 1292939 - DNA, 25 bp, Homo sapien
tgaggctcaggactttcaaagggcc

SEQ ID NO: 1292940 - DNA, 25 bp, Homo sapien
cctagagggatatgatctggagtcc

SEQ ID NO: 1292941 - DNA, 25 bp, Homo sapien
aacagttctgcacgtgtgactcgga

SEQ ID NO: 1292942 - DNA, 25 bp, Homo sapien
tgccagcccactgtcaaagatatga

SEQ ID NO: 1292943 - DNA, 25 bp, Homo sapien
taaccaattgtttctaatgaccgat

SEQ ID NO: 1292944 - DNA, 25 bp, Homo sapien
tcccagagtttgcagattacagcca

SEQ ID NO: 1292945 - DNA, 25 bp, Homo sapien
ttaatttgcaagagaattcttcctc

SEQ ID NO: 1292946 - DNA, 25 bp, Homo sapien
gaggttcatcaatacaaattctcag

SEQ ID NO: 1292947 - DNA, 25 bp, Homo sapien
tcagataattcagcgcttcctcttt

SEQ ID NO: 1292948 - DNA, 25 bp, Homo sapien
agttcagataattcagcgcttcctc

SEQ ID NO: 1292949 - DNA, 25 bp, Homo sapien
ttattgcttctccagttcagataat

SEQ ID NO: 1292950 - DNA, 25 bp, Homo sapien
attgcttctccagttcagataattc

SEQ ID NO: 1292951 - DNA, 25 bp, Homo sapien
actgggatggctactaatcacttgg

SEQ ID NO: 1292952 - DNA, 25 bp, Homo sapien
cacatggcaacggagaccaactgaa

SEQ ID NO: 1292953 - DNA, 25 bp, Homo sapien
tttgaaaggtttctcggcatcctcc

SEQ ID NO: 1292954 - DNA, 25 bp, Homo sapien
gatcctgtccctccaactagtaaga

SEQ ID NO: 1292955 - DNA, 25 bp, Homo sapien
aatttgttgactgcacaaaagagcc

SEQ ID NO: 1292956 - DNA, 25 bp, Homo sapien
tcagaggctctgttaatgctttatg

SEQ ID NO: 1292957 - DNA, 25 bp, Homo sapien
tgaggctgaaacgtagcccctgctc

SEQ ID NO: 1292958 - DNA, 25 bp, Homo sapien
tgtttgctccgtaccctggcatgag

SEQ ID NO: 1292959 - DNA, 25 bp, Homo sapien
aagtcggagcatcggctttcagtgc

SEQ ID NO: 1292960 - DNA, 25 bp, Homo sapien
caaactgtggctttatgcttattaa

SEQ ID NO: 1292961 - DNA, 25 bp, Homo sapien
attgatcaggaagtcggagcatcgg

SEQ ID NO: 1292962 - DNA, 25 bp, Homo sapien
agcatcggctttcagtgctccaaac

SEQ ID NO: 1292963 - DNA, 25 bp, Homo sapien
tagaacttttggagcacctgcagcc

SEQ ID NO: 1292964 - DNA, 25 bp, Homo sapien
ggctcccatgcgtgaaaacaaaact

SEQ ID NO: 1292965 - DNA, 25 bp, Homo sapien
cactttccaaagaggcgtggtccaa

SEQ ID NO: 1292966 - DNA, 25 bp, Homo sapien
taggttcaactcctttctgacaggg

SEQ ID NO: 1292967 - DNA, 25 bp, Homo sapien
cattcattgcataagacaaaggtag

SEQ ID NO: 1292968 - DNA, 25 bp, Homo sapien
cttccagcgattgccacattcattg

SEQ ID NO: 1292969 - DNA, 25 bp, Homo sapien
cattgcataagacaaaggtagtcat

SEQ ID NO: 1292970 - DNA, 25 bp, Homo sapien
ataagacaaaggtagtcatgggctc

SEQ ID NO: 1292971 - DNA, 25 bp, Homo sapien
tggtggtgccgccagtcttggccat

SEQ ID NO: 1292972 - DNA, 25 bp, Homo sapien
gcatttgctgcactggaagaggtca

SEQ ID NO: 1292973 - DNA, 25 bp, Homo sapien
tcctgggtcatggcattcctcaact

SEQ ID NO: 1292974 - DNA, 25 bp, Homo sapien
ctggttataggtgcagttcttcttc

SEQ ID NO: 1292975 - DNA, 25 bp, Homo sapien
tccttgaggttgcttatgcggctgc

SEQ ID NO: 1292976 - DNA, 25 bp, Homo sapien
ggtacttcatgtccgtgctcttgag

SEQ ID NO: 1292977 - DNA, 25 bp, Homo sapien
gctataagccctgcggagatggccc

SEQ ID NO: 1292978 - DNA, 25 bp, Homo sapien
cacgcggttccggtacttcatgtcc

SEQ ID NO: 1292979 - DNA, 25 bp, Homo sapien
acacagtcaagggccggccagccat

SEQ ID NO: 1292980 - DNA, 25 bp, Homo sapien
gtgacacagtcaagggccggccagc

SEQ ID NO: 1292981 - DNA, 25 bp, Homo sapien
tgtgacacagtcaagggccggccag

SEQ ID NO: 1292982 - DNA, 25 bp, Homo sapien
tgacacagtcaagggccggccagcc

SEQ ID NO: 1292983 - DNA, 25 bp, Homo sapien
tcatggaggggcacagaagggtgca

SEQ ID NO: 1292984 - DNA, 25 bp, Homo sapien
tggaggggcacagaagggtgcaggc

SEQ ID NO: 1292985 - DNA, 25 bp, Homo sapien
catggaggggcacagaagggtgcag

SEQ ID NO: 1292986 - DNA, 25 bp, Homo sapien
atggaggggcacagaagggtgcagg

SEQ ID NO: 1292987 - DNA, 25 bp, Homo sapien
accaggcaaattcccggcagagaca

SEQ ID NO: 1292988 - DNA, 25 bp, Homo sapien
tacaataaagagactgcggagaatg

SEQ ID NO: 1292989 - DNA, 25 bp, Homo sapien
caggaagacaaagctgttgctggga

SEQ ID NO: 1292990 - DNA, 25 bp, Homo sapien
gccacatgtttaaggctctacgaag

SEQ ID NO: 1292991 - DNA, 25 bp, Homo sapien
ctgctagacggtgcagacacccaca

SEQ ID NO: 1292992 - DNA, 25 bp, Homo sapien
cacagccccggcacagttcaaggat

SEQ ID NO: 1292993 - DNA, 25 bp, Homo sapien
ccacagccccggcacagttcaagga

SEQ ID NO: 1292994 - DNA, 25 bp, Homo sapien
ggatgggtgctgctagacggtgcag

SEQ ID NO: 1292995 - DNA, 25 bp, Homo sapien
tcgatttctgatgccatcttgtcac

SEQ ID NO: 1292996 - DNA, 25 bp, Homo sapien
ttcgatttctgatgccatcttgtca

SEQ ID NO: 1292997 - DNA, 25 bp, Homo sapien
cttcgatttctgatgccatcttgtc

SEQ ID NO: 1292998 - DNA, 25 bp, Homo sapien
ctccacacacttgtcccggacagag

SEQ ID NO: 1292999 - DNA, 25 bp, Homo sapien
tccacacacttgtcccggacagagt

SEQ ID NO: 1293000 - DNA, 25 bp, Homo sapien
tggggctctccgcttttgatttgct

SEQ ID NO: 1293001 - DNA, 25 bp, Homo sapien
gtgttttggggctctccgcttttga

SEQ ID NO: 1293002 - DNA, 25 bp, Homo sapien
gacacatggaagaggcaaacgtggg

SEQ ID NO: 1293003 - DNA, 25 bp, Homo sapien
gggctctccgcttttgatttgctgc

SEQ ID NO: 1293004 - DNA, 25 bp, Homo sapien
cacacccagccaacacctatgctat

SEQ ID NO: 1293005 - DNA, 25 bp, Homo sapien
tgatgtactatctaagaattatctc

SEQ ID NO: 1293006 - DNA, 25 bp, Homo sapien
gccaacacctatgctataatctatg

SEQ ID NO: 1293007 - DNA, 25 bp, Homo sapien
taatctatgatgtactatctaagaa

SEQ ID NO: 1293008 - DNA, 25 bp, Homo sapien
tttagaaggctaactatgtggctca

SEQ ID NO: 1293009 - DNA, 25 bp, Homo sapien
tagaaggctaactatgtggctcaat

SEQ ID NO: 1293010 - DNA, 25 bp, Homo sapien
cagacatttagaaggctaactatgt

SEQ ID NO: 1293011 - DNA, 25 bp, Homo sapien
gaaggctaactatgtggctcaatct

SEQ ID NO: 1293012 - DNA, 25 bp, Homo sapien
cacaggaaaactgtcaggggagcct

SEQ ID NO: 1293013 - DNA, 25 bp, Homo sapien
tgcgccacctcgagggcatttcagt

SEQ ID NO: 1293014 - DNA, 25 bp, Homo sapien
cagttactgcatcagcgagcatgct

SEQ ID NO: 1293015 - DNA, 25 bp, Homo sapien
cctcgagggcatttcagttactgca

SEQ ID NO: 1293016 - DNA, 25 bp, Homo sapien
gcttctgtgcgccacctcgagggca

SEQ ID NO: 1293017 - DNA, 25 bp, Homo sapien
tgggcttcctccataaaaacagaga

SEQ ID NO: 1293018 - DNA, 25 bp, Homo sapien
gggcttcctccataaaaacagagaa

SEQ ID NO: 1293019 - DNA, 25 bp, Homo sapien
ctttccaccgatggtctttttggag

SEQ ID NO: 1293020 - DNA, 25 bp, Homo sapien
ttccaccgatggtctttttggagag

SEQ ID NO: 1293021 - DNA, 25 bp, Homo sapien
ccaccgatggtctttttggagagga

SEQ ID NO: 1293022 - DNA, 25 bp, Homo sapien
tccaccgatggtctttttggagagg

SEQ ID NO: 1293023 - DNA, 25 bp, Homo sapien
ctcagcaccagcgacagcttcattt

SEQ ID NO: 1293024 - DNA, 25 bp, Homo sapien
cagcaccagcgacagcttcatttct

SEQ ID NO: 1293025 - DNA, 25 bp, Homo sapien
tcagcaccagcgacagcttcatttc

SEQ ID NO: 1293026 - DNA, 25 bp, Homo sapien
tgctcagcaccagcgacagcttcat

SEQ ID NO: 1293027 - DNA, 25 bp, Homo sapien
gagaagagctctagactgccgtgcg

SEQ ID NO: 1293028 - DNA, 25 bp, Homo sapien
gcgccaggtgcaatgaatcttataa

SEQ ID NO: 1293029 - DNA, 25 bp, Homo sapien
ttgtttccccgcacctaggctgttg

SEQ ID NO: 1293030 - DNA, 25 bp, Homo sapien
gatgtgaggcttatacccgctgtgg

SEQ ID NO: 1293031 - DNA, 25 bp, Homo sapien
cagtctgaacactcaagcccttttt

SEQ ID NO: 1293032 - DNA, 25 bp, Homo sapien
agtctgaacactcaagccctttttc

SEQ ID NO: 1293033 - DNA, 25 bp, Homo sapien
ccagtctgaacactcaagccctttt

SEQ ID NO: 1293034 - DNA, 25 bp, Homo sapien
tctgaacactcaagccctttttcct

SEQ ID NO: 1293035 - DNA, 25 bp, Homo sapien
agctacctcccggatccagaggcca

SEQ ID NO: 1293036 - DNA, 25 bp, Homo sapien
actagctacctcccggatccagagg

SEQ ID NO: 1293037 - DNA, 25 bp, Homo sapien
ctacctcccggatccagaggccatc

SEQ ID NO: 1293038 - DNA, 25 bp, Homo sapien
ccccactagctacctcccggatcca

SEQ ID NO: 1293039 - DNA, 25 bp, Homo sapien
acaccacctccttgtctgagcagtg

SEQ ID NO: 1293040 - DNA, 25 bp, Homo sapien
ttgcggaccccattaacagcaactc

SEQ ID NO: 1293041 - DNA, 25 bp, Homo sapien
gataaggactttggccaaggacacc

SEQ ID NO: 1293042 - DNA, 25 bp, Homo sapien
ttgataaggactttggccaaggaca

SEQ ID NO: 1293043 - DNA, 25 bp, Homo sapien
gcataatctgggaatggatacacag

SEQ ID NO: 1293044 - DNA, 25 bp, Homo sapien
gctgaggtcagaaccccactactgt

SEQ ID NO: 1293045 - DNA, 25 bp, Homo sapien
tactgtaactaaggccctgctctgc

SEQ ID NO: 1293046 - DNA, 25 bp, Homo sapien
ccagggctaagcctgacatggagga

SEQ ID NO: 1293047 - DNA, 25 bp, Homo sapien
tgcagcttcttcagaaggtccaggg

SEQ ID NO: 1293048 - DNA, 25 bp, Homo sapien
gctgggttcaaaccctctgagccag

SEQ ID NO: 1293049 - DNA, 25 bp, Homo sapien
tattgtgtggtcttggtacagagag

SEQ ID NO: 1293050 - DNA, 25 bp, Homo sapien
cgagaaacaatctgtcctaggtggt

SEQ ID NO: 1293051 - DNA, 25 bp, Homo sapien
cagacagacatgtggccgaaggaca

SEQ ID NO: 1293052 - DNA, 25 bp, Homo sapien
gaggctctggcctttatatggacac

SEQ ID NO: 1293053 - DNA, 25 bp, Homo sapien
tgttggacctggctgcgtagaagca

SEQ ID NO: 1293054 - DNA, 25 bp, Homo sapien
ggataacccgtctatttgaactgga

SEQ ID NO: 1293055 - DNA, 25 bp, Homo sapien
cacaggtctgagtcctactaagggc

SEQ ID NO: 1293056 - DNA, 25 bp, Homo sapien
ccagctttttggcgatcctcagcag

SEQ ID NO: 1293057 - DNA, 25 bp, Homo sapien
tctccagctttttggcgatcctcag

SEQ ID NO: 1293058 - DNA, 25 bp, Homo sapien
ctccagctttttggcgatcctcagc

SEQ ID NO: 1293059 - DNA, 25 bp, Homo sapien
agctttttggcgatcctcagcagct

SEQ ID NO: 1293060 - DNA, 25 bp, Homo sapien
aggggcacaggggcagcagtagggc

SEQ ID NO: 1293061 - DNA, 25 bp, Homo sapien
cgcccggcggggcgaggggcacagg

SEQ ID NO: 1293062 - DNA, 25 bp, Homo sapien
tggcccgcgacgcccggcggggcga

SEQ ID NO: 1293063 - DNA, 25 bp, Homo sapien
gaggggcacaggggcagcagtaggg

SEQ ID NO: 1293064 - DNA, 25 bp, Homo sapien
gcggagggcgcgcaacccgcgcggg

SEQ ID NO: 1293065 - DNA, 25 bp, Homo sapien
ggcgcgaaggcggagggcgcgcaac

SEQ ID NO: 1293066 - DNA, 25 bp, Homo sapien
ccgcgcgggccccaaacacacacga

SEQ ID NO: 1293067 - DNA, 25 bp, Homo sapien
gcgggccccaaacacacacgacaca

SEQ ID NO: 1293068 - DNA, 25 bp, Homo sapien
caaatgtgcaaagcttagggatggg

SEQ ID NO: 1293069 - DNA, 25 bp, Homo sapien
gaactgaaaaattggcgtggctgca

SEQ ID NO: 1293070 - DNA, 25 bp, Homo sapien
gcccttctgggttgaagagactcaa

SEQ ID NO: 1293071 - DNA, 25 bp, Homo sapien
tgccggtcacatttgggaagttaga

SEQ ID NO: 1293072 - DNA, 25 bp, Homo sapien
ttagatcacataaatgaaaccactg

SEQ ID NO: 1293073 - DNA, 25 bp, Homo sapien
agatcacataaatgaaaccactgga

SEQ ID NO: 1293074 - DNA, 25 bp, Homo sapien
tttagatcacataaatgaaaccact

SEQ ID NO: 1293075 - DNA, 25 bp, Homo sapien
tagatcacataaatgaaaccactgg

SEQ ID NO: 1293076 - DNA, 25 bp, Homo sapien
caaaagacaaccctgttcctgtggg

SEQ ID NO: 1293077 - DNA, 25 bp, Homo sapien
ggcttaggtgtatctgctttctcat

SEQ ID NO: 1293078 - DNA, 25 bp, Homo sapien
gcacccagcaactggcaagttgaga

SEQ ID NO: 1293079 - DNA, 25 bp, Homo sapien
tgtgggaaccacagaccagtcaggt

SEQ ID NO: 1293080 - DNA, 25 bp, Homo sapien
tctctgccctcccaattctattact

SEQ ID NO: 1293081 - DNA, 25 bp, Homo sapien
caatgatagaatttctagggctggg

SEQ ID NO: 1293082 - DNA, 25 bp, Homo sapien
ggaagcagaacccttaagtctctgc

SEQ ID NO: 1293083 - DNA, 25 bp, Homo sapien
tgagcaatgatagaatttctagggc

SEQ ID NO: 1293084 - DNA, 25 bp, Homo sapien
gaaagagaagagaagtgggcatcca

SEQ ID NO: 1293085 - DNA, 25 bp, Homo sapien
attccctcagactaaaaggctcctg

SEQ ID NO: 1293086 - DNA, 25 bp, Homo sapien
gggcatccatcaaccctgactattc

SEQ ID NO: 1293087 - DNA, 25 bp, Homo sapien
tcctgagttgaccaagagaaagaga

SEQ ID NO: 1293088 - DNA, 25 bp, Homo sapien
ggagaatgcctagggaaggctgtgc

SEQ ID NO: 1293089 - DNA, 25 bp, Homo sapien
gaatataggagaatgcctagggaag

SEQ ID NO: 1293090 - DNA, 25 bp, Homo sapien
atataggagaatgcctagggaaggc

SEQ ID NO: 1293091 - DNA, 25 bp, Homo sapien
taggagaatgcctagggaaggctgt

SEQ ID NO: 1293092 - DNA, 25 bp, Homo sapien
taagaccagctttccaccaaaggac

SEQ ID NO: 1293093 - DNA, 25 bp, Homo sapien
tgttgaccagccagaatggatgtga

SEQ ID NO: 1293094 - DNA, 25 bp, Homo sapien
tgcagggcccttgtcttactcgtgt

SEQ ID NO: 1293095 - DNA, 25 bp, Homo sapien
taggtataaaccagctgagtccaga

SEQ ID NO: 1293096 - DNA, 25 bp, Homo sapien
gaagtcagtgatggagggctctcct

SEQ ID NO: 1293097 - DNA, 25 bp, Homo sapien
cttggcagggtccctgatctggaag

SEQ ID NO: 1293098 - DNA, 25 bp, Homo sapien
tggaagtcagtgatggagggctctc

SEQ ID NO: 1293099 - DNA, 25 bp, Homo sapien
gtcagtgatggagggctctcctgcc

SEQ ID NO: 1293100 - DNA, 25 bp, Homo sapien
tgagagttctgcagctgaagccagc

SEQ ID NO: 1293101 - DNA, 25 bp, Homo sapien
tcccaggcccctagcgggtaatgag

SEQ ID NO: 1293102 - DNA, 25 bp, Homo sapien
gaaggccagctacagaggcacaagg

SEQ ID NO: 1293103 - DNA, 25 bp, Homo sapien
gtaatgagataggaaagaaccgcca

SEQ ID NO: 1293104 - DNA, 25 bp, Homo sapien
cttgcaaaagttgcacagaacttgc

SEQ ID NO: 1293105 - DNA, 25 bp, Homo sapien
gtcttgcaaaagttgcacagaactt

SEQ ID NO: 1293106 - DNA, 25 bp, Homo sapien
ttgcaaaagttgcacagaacttgct

SEQ ID NO: 1293107 - DNA, 25 bp, Homo sapien
ctagtcttgcaaaagttgcacagaa

SEQ ID NO: 1293108 - DNA, 25 bp, Homo sapien
gcgccccccgccgataggagcgagt

SEQ ID NO: 1293109 - DNA, 25 bp, Homo sapien
gggaccatcttcagggctccgcgcc

SEQ ID NO: 1293110 - DNA, 25 bp, Homo sapien
ccccccgccgataggagcgagtgct

SEQ ID NO: 1293111 - DNA, 25 bp, Homo sapien
ccgccgataggagcgagtgctctcg

SEQ ID NO: 1293112 - DNA, 25 bp, Homo sapien
tctgacggggaggtacatctccgaa

SEQ ID NO: 1293113 - DNA, 25 bp, Homo sapien
aatctgacggggaggtacatctccg

SEQ ID NO: 1293114 - DNA, 25 bp, Homo sapien
ctgaatctgacggggaggtacatct

SEQ ID NO: 1293115 - DNA, 25 bp, Homo sapien
ctgacggggaggtacatctccgaag

SEQ ID NO: 1293116 - DNA, 25 bp, Homo sapien
tcggaggccctcttcagagttgggt

SEQ ID NO: 1293117 - DNA, 25 bp, Homo sapien
tctcggaggccctcttcagagttgg

SEQ ID NO: 1293118 - DNA, 25 bp, Homo sapien
cctgggggctctcggaggccctctt

SEQ ID NO: 1293119 - DNA, 25 bp, Homo sapien
gctctcggaggccctcttcagagtt

SEQ ID NO: 1293120 - DNA, 25 bp, Homo sapien
tctcaggggcctctgaactcaggct

SEQ ID NO: 1293121 - DNA, 25 bp, Homo sapien
tctttatcacttgctctgtgcccaa

SEQ ID NO: 1293122 - DNA, 25 bp, Homo sapien
ggcctaggatctcttctggttctct

SEQ ID NO: 1293123 - DNA, 25 bp, Homo sapien
acctcaaagcagtctctggcctcta

SEQ ID NO: 1293124 - DNA, 25 bp, Homo sapien
atctggcctaggatctcttctggtt

SEQ ID NO: 1293125 - DNA, 25 bp, Homo sapien
gagatttgaatcctacatcagagac

SEQ ID NO: 1293126 - DNA, 25 bp, Homo sapien
tacaggtcctctgtgaatggcatgg

SEQ ID NO: 1293127 - DNA, 25 bp, Homo sapien
tattagctgtgggatcttaaacatg

SEQ ID NO: 1293128 - DNA, 25 bp, Homo sapien
ggcatggtgagcatttatctgggca

SEQ ID NO: 1293129 - DNA, 25 bp, Homo sapien
agaagagtttttgactggcaagggc

SEQ ID NO: 1293130 - DNA, 25 bp, Homo sapien
tccgagaagagtttttgactggcaa

SEQ ID NO: 1293131 - DNA, 25 bp, Homo sapien
cacccttggaccaaagtccgagaag

SEQ ID NO: 1293132 - DNA, 25 bp, Homo sapien
cactggcatgtcttgcacacccttg

SEQ ID NO: 1293133 - DNA, 25 bp, Homo sapien
tggcgacagtctcataggtcttgtt

SEQ ID NO: 1293134 - DNA, 25 bp, Homo sapien
gtctcataggtcttgttgctgatgt

SEQ ID NO: 1293135 - DNA, 25 bp, Homo sapien
caggctggcgacagtctcataggtc

SEQ ID NO: 1293136 - DNA, 25 bp, Homo sapien
tcccaggctggcgacagtctcatag

SEQ ID NO: 1293137 - DNA, 25 bp, Homo sapien
agcaaaagattgaggatgaggacag

SEQ ID NO: 1293138 - DNA, 25 bp, Homo sapien
caaaagattgaggatgaggacagcc

SEQ ID NO: 1293139 - DNA, 25 bp, Homo sapien
gaggacagcctggttcctccggtgt

SEQ ID NO: 1293140 - DNA, 25 bp, Homo sapien
tggttcctccggtgtagccctgtcc

SEQ ID NO: 1293141 - DNA, 25 bp, Homo sapien
ctttccttctgccatccagaggcct

SEQ ID NO: 1293142 - DNA, 25 bp, Homo sapien
gtccacatgtagagggaaggcaaag

SEQ ID NO: 1293143 - DNA, 25 bp, Homo sapien
aattacccaggagtagtccacatgt

SEQ ID NO: 1293144 - DNA, 25 bp, Homo sapien
agtagtccacatgtagagggaaggc

SEQ ID NO: 1293145 - DNA, 25 bp, Homo sapien
caggagtagtccacatgtagaggga

SEQ ID NO: 1293146 - DNA, 25 bp, Homo sapien
caaaggcttggtggttcagagggtt

SEQ ID NO: 1293147 - DNA, 25 bp, Homo sapien
aaggcttggtggttcagagggttgg

SEQ ID NO: 1293148 - DNA, 25 bp, Homo sapien
acaaaggcttggtggttcagagggt

SEQ ID NO: 1293149 - DNA, 25 bp, Homo sapien
aacaaaggcttggtggttcagaggg

SEQ ID NO: 1293150 - DNA, 25 bp, Homo sapien
tggctatgtccagagctgtctcgcc

SEQ ID NO: 1293151 - DNA, 25 bp, Homo sapien
gctcctcacactccttgtggtgctt

SEQ ID NO: 1293152 - DNA, 25 bp, Homo sapien
ttcttcctggctatgtccagagctg

SEQ ID NO: 1293153 - DNA, 25 bp, Homo sapien
ccagagctgtctcgcctgcttcatt

SEQ ID NO: 1293154 - DNA, 25 bp, Homo sapien
gccgtgttcccgtcagcagccttgg

SEQ ID NO: 1293155 - DNA, 25 bp, Homo sapien
tagagtgctgcgtagtgcagagccg

SEQ ID NO: 1293156 - DNA, 25 bp, Homo sapien
gaggcagtcgggctggttgtagagt

SEQ ID NO: 1293157 - DNA, 25 bp, Homo sapien
gtgccaaccaaagctctccccttca

SEQ ID NO: 1293158 - DNA, 25 bp, Homo sapien
aatgcaagacgagttcttcaggtgc

SEQ ID NO: 1293159 - DNA, 25 bp, Homo sapien
cctggttggcgactttgacagccaa

SEQ ID NO: 1293160 - DNA, 25 bp, Homo sapien
aaatgcaagacgagttcttcaggtg

SEQ ID NO: 1293161 - DNA, 25 bp, Homo sapien
gcagggaagcctggttggcgacttt

SEQ ID NO: 1293162 - DNA, 25 bp, Homo sapien
tgacttctcacttcatcaccgtggg

SEQ ID NO: 1293163 - DNA, 25 bp, Homo sapien
tgcatgcccattgtacactaagccc

SEQ ID NO: 1293164 - DNA, 25 bp, Homo sapien
gagaagtaacctgccctagatcaca

SEQ ID NO: 1293165 - DNA, 25 bp, Homo sapien
tgtcgaatcagtcagcaactcctgt

SEQ ID NO: 1293166 - DNA, 25 bp, Homo sapien
tcctggagaagaactggggaatatg

SEQ ID NO: 1293167 - DNA, 25 bp, Homo sapien
aactggggaatatgttagacaggtg

SEQ ID NO: 1293168 - DNA, 25 bp, Homo sapien
acaggtgggttataagtggcccttg

SEQ ID NO: 1293169 - DNA, 25 bp, Homo sapien
gaagaactggggaatatgttagaca

SEQ ID NO: 1293170 - DNA, 25 bp, Homo sapien
tgcaccggcgtgcaaacctatgctc

SEQ ID NO: 1293171 - DNA, 25 bp, Homo sapien
ggctgtccaaagtcctgcccattgg

SEQ ID NO: 1293172 - DNA, 25 bp, Homo sapien
tggccataatgtagtccctgcgggt

SEQ ID NO: 1293173 - DNA, 25 bp, Homo sapien
caaatggctgtccagagtcgctgag

SEQ ID NO: 1293174 - DNA, 25 bp, Homo sapien
gctcgtgtttcccatgttcaaggcc

SEQ ID NO: 1293175 - DNA, 25 bp, Homo sapien
gctgagggtttagggccgccgtgtg

SEQ ID NO: 1293176 - DNA, 25 bp, Homo sapien
ttagggccgccgtgtgagggtagct

SEQ ID NO: 1293177 - DNA, 25 bp, Homo sapien
ggcctccatgacctcattgaagctc

SEQ ID NO: 1293178 - DNA, 25 bp, Homo sapien
tgagtgactgcatgcgcgaaaagcg

SEQ ID NO: 1293179 - DNA, 25 bp, Homo sapien
ccagcaggtccaaggtgagtgactg

SEQ ID NO: 1293180 - DNA, 25 bp, Homo sapien
cccgagcactggatgcaggtgagca

SEQ ID NO: 1293181 - DNA, 25 bp, Homo sapien
agttcgcggtggacgcccgagcact

SEQ ID NO: 1293182 - DNA, 25 bp, Homo sapien
cagctttgtgaggtcgtgcggctcc

SEQ ID NO: 1293183 - DNA, 25 bp, Homo sapien
ccttgctgttctgcaacactgacac

SEQ ID NO: 1293184 - DNA, 25 bp, Homo sapien
tgctcttcacctccgcgatgagcag

SEQ ID NO: 1293185 - DNA, 25 bp, Homo sapien
agtcgcagcactggctattcccagg

SEQ ID NO: 1293186 - DNA, 25 bp, Homo sapien
cacactcgtgctcgtcctctgcctg

SEQ ID NO: 1293187 - DNA, 25 bp, Homo sapien
actcgtgctcgtcctctgcctgaaa

SEQ ID NO: 1293188 - DNA, 25 bp, Homo sapien
gcctcacactcgtgctcgtcctctg

SEQ ID NO: 1293189 - DNA, 25 bp, Homo sapien
acactcgtgctcgtcctctgcctga

SEQ ID NO: 1293190 - DNA, 25 bp, Homo sapien
gtccctgacaagtcggactctcaag

SEQ ID NO: 1293191 - DNA, 25 bp, Homo sapien
gggccacatggagatgtgtccctga

SEQ ID NO: 1293192 - DNA, 25 bp, Homo sapien
caccaaagccgctggggccacatgg

SEQ ID NO: 1293193 - DNA, 25 bp, Homo sapien
ggagatgtgtccctgacaagtcgga

SEQ ID NO: 1293194 - DNA, 25 bp, Homo sapien
cttggcacgtcagcagggtcagctt

SEQ ID NO: 1293195 - DNA, 25 bp, Homo sapien
ggtcaccaggtcgaagcactttttc

SEQ ID NO: 1293196 - DNA, 25 bp, Homo sapien
tcaccaggtcgaagcactttttctc

SEQ ID NO: 1293197 - DNA, 25 bp, Homo sapien
ggcctcacttggcacgtcagcaggg

SEQ ID NO: 1293198 - DNA, 25 bp, Homo sapien
aggcagccatacttgactccacact

SEQ ID NO: 1293199 - DNA, 25 bp, Homo sapien
cagccatacttgactccacacttcc

SEQ ID NO: 1293200 - DNA, 25 bp, Homo sapien
ggcagccatacttgactccacactt

SEQ ID NO: 1293201 - DNA, 25 bp, Homo sapien
caggcagccatacttgactccacac

SEQ ID NO: 1293202 - DNA, 25 bp, Homo sapien
tcacttttcttgtatagaaagccca

SEQ ID NO: 1293203 - DNA, 25 bp, Homo sapien
gtcacttttcttgtatagaaagccc

SEQ ID NO: 1293204 - DNA, 25 bp, Homo sapien
ccgtcacttttcttgtatagaaagc

SEQ ID NO: 1293205 - DNA, 25 bp, Homo sapien
cacttttcttgtatagaaagcccac

SEQ ID NO: 1293206 - DNA, 25 bp, Homo sapien
tccgtcccaaactgcttgttgcctt

SEQ ID NO: 1293207 - DNA, 25 bp, Homo sapien
tttctccgtcccaaactgcttgttg

SEQ ID NO: 1293208 - DNA, 25 bp, Homo sapien
ccgtcccaaactgcttgttgccttg

SEQ ID NO: 1293209 - DNA, 25 bp, Homo sapien
tctccgtcccaaactgcttgttgcc

SEQ ID NO: 1293210 - DNA, 25 bp, Homo sapien
ctgagttcttccggctcaggtgttc

SEQ ID NO: 1293211 - DNA, 25 bp, Homo sapien
cctgagttcttccggctcaggtgtt

SEQ ID NO: 1293212 - DNA, 25 bp, Homo sapien
ctatagccacatcctgagttcttcc

SEQ ID NO: 1293213 - DNA, 25 bp, Homo sapien
tatagccacatcctgagttcttccg

SEQ ID NO: 1293214 - DNA, 25 bp, Homo sapien
ctcggagggagtcccggagctgggt

SEQ ID NO: 1293215 - DNA, 25 bp, Homo sapien
tccctcggagggagtcccggagctg

SEQ ID NO: 1293216 - DNA, 25 bp, Homo sapien
agggagtcccggagctgggtcagct

SEQ ID NO: 1293217 - DNA, 25 bp, Homo sapien
ggagggagtcccggagctgggtcag

SEQ ID NO: 1293218 - DNA, 25 bp, Homo sapien
cttctcgatgaaggggaacaggctc

SEQ ID NO: 1293219 - DNA, 25 bp, Homo sapien
tcgatgaaggggaacaggctctggg

SEQ ID NO: 1293220 - DNA, 25 bp, Homo sapien
cgatgaaggggaacaggctctgggc

SEQ ID NO: 1293221 - DNA, 25 bp, Homo sapien
gcttctcgatgaaggggaacaggct

SEQ ID NO: 1293222 - DNA, 25 bp, Homo sapien
tggctctccccggctttgagcagat

SEQ ID NO: 1293223 - DNA, 25 bp, Homo sapien
aggaccttgcttcatctggctctcc

SEQ ID NO: 1293224 - DNA, 25 bp, Homo sapien
ggctctccccggctttgagcagata

SEQ ID NO: 1293225 - DNA, 25 bp, Homo sapien
aagatgcgccgctctctctgcatgt

SEQ ID NO: 1293226 - DNA, 25 bp, Homo sapien
agctggaagatgcgccgctctctct

SEQ ID NO: 1293227 - DNA, 25 bp, Homo sapien
agatgcgccgctctctctgcatgtc

SEQ ID NO: 1293228 - DNA, 25 bp, Homo sapien
gaagatgcgccgctctctctgcatg

SEQ ID NO: 1293229 - DNA, 25 bp, Homo sapien
cctggcccgatcgcgctccttctcc

SEQ ID NO: 1293230 - DNA, 25 bp, Homo sapien
ccctggcccgatcgcgctccttctc

SEQ ID NO: 1293231 - DNA, 25 bp, Homo sapien
tgtcaccctggcccgatcgcgctcc

SEQ ID NO: 1293232 - DNA, 25 bp, Homo sapien
tcaccctggcccgatcgcgctcctt

SEQ ID NO: 1293233 - DNA, 25 bp, Homo sapien
cccatggagcttcatacttaaagct

SEQ ID NO: 1293234 - DNA, 25 bp, Homo sapien
tgtctactattctgctctgtctgtc

SEQ ID NO: 1293235 - DNA, 25 bp, Homo sapien
ttttgtttcgtggatatactgtgca

SEQ ID NO: 1293236 - DNA, 25 bp, Homo sapien
tggatatactgtgcagtggtgaagc

SEQ ID NO: 1293237 - DNA, 25 bp, Homo sapien
ttttggcttcatagtccttccatgc

SEQ ID NO: 1293238 - DNA, 25 bp, Homo sapien
tcgaccgtccctcagctgccccttc

SEQ ID NO: 1293239 - DNA, 25 bp, Homo sapien
ttcatcagactgtccagggggaaag

SEQ ID NO: 1293240 - DNA, 25 bp, Homo sapien
cttcatcagactgtccagggggaaa

SEQ ID NO: 1293241 - DNA, 25 bp, Homo sapien
ctgtcgaccgtccctcagctgcccc

SEQ ID NO: 1293242 - DNA, 25 bp, Homo sapien
ggccaagtttaggaagcctgtggac

SEQ ID NO: 1293243 - DNA, 25 bp, Homo sapien
ttgaagagcgcagcaacctcgcggg

SEQ ID NO: 1293244 - DNA, 25 bp, Homo sapien
tgttgcctaaggattccacggcctc

SEQ ID NO: 1293245 - DNA, 25 bp, Homo sapien
ctcgcgggtgaacacggccaagttt

SEQ ID NO: 1293246 - DNA, 25 bp, Homo sapien
gccggagctatggattgcccgcaca

SEQ ID NO: 1293247 - DNA, 25 bp, Homo sapien
caaggccggagctatggattgcccg

SEQ ID NO: 1293248 - DNA, 25 bp, Homo sapien
gagctatggattgcccgcacagcct

SEQ ID NO: 1293249 - DNA, 25 bp, Homo sapien
cggagctatggattgcccgcacagc

SEQ ID NO: 1293250 - DNA, 25 bp, Homo sapien
taaatccaggactagccaaatccag

SEQ ID NO: 1293251 - DNA, 25 bp, Homo sapien
caaatccagggccaatgttctttcc

SEQ ID NO: 1293252 - DNA, 25 bp, Homo sapien
tctaagctgccccacaaagttaggg

SEQ ID NO: 1293253 - DNA, 25 bp, Homo sapien
gggcacagcttatttgatcttggga

SEQ ID NO: 1293254 - DNA, 25 bp, Homo sapien
gagccagctgtggttaccaaggcaa

SEQ ID NO: 1293255 - DNA, 25 bp, Homo sapien
gagacacgtctgagcttggaaagcc

SEQ ID NO: 1293256 - DNA, 25 bp, Homo sapien
agctgctagagctaaggccttggga

SEQ ID NO: 1293257 - DNA, 25 bp, Homo sapien
tcaaagctaagagtcaatggatcca

SEQ ID NO: 1293258 - DNA, 25 bp, Homo sapien
tgacacagatgcaggtttgaaaccc

SEQ ID NO: 1293259 - DNA, 25 bp, Homo sapien
tgttcagggaacagtgacacagcga

SEQ ID NO: 1293260 - DNA, 25 bp, Homo sapien
catactctctgggaatgacgccaag

SEQ ID NO: 1293261 - DNA, 25 bp, Homo sapien
ttccatcagaaatttaaggccgggc

SEQ ID NO: 1293262 - DNA, 25 bp, Homo sapien
agtaagccgagatggtgccactgaa

SEQ ID NO: 1293263 - DNA, 25 bp, Homo sapien
taagccgagatggtgccactgaact

SEQ ID NO: 1293264 - DNA, 25 bp, Homo sapien
gtagcgggcgcctgtagccccaggt

SEQ ID NO: 1293265 - DNA, 25 bp, Homo sapien
tacttgggaggctgaggcaggagaa

SEQ ID NO: 1293266 - DNA, 25 bp, Homo sapien
tgtactccatcgacaaatcttgact

SEQ ID NO: 1293267 - DNA, 25 bp, Homo sapien
tctcttccctaaataacagaatggc

SEQ ID NO: 1293268 - DNA, 25 bp, Homo sapien
tgagcactgcccacatgtactccat

SEQ ID NO: 1293269 - DNA, 25 bp, Homo sapien
tggattatgctgcttgcctgtgtac

SEQ ID NO: 1293270 - DNA, 25 bp, Homo sapien
cctcgacggtgaggacgcagctgtt

SEQ ID NO: 1293271 - DNA, 25 bp, Homo sapien
tgtcatcgaagagacctcgaggccc

SEQ ID NO: 1293272 - DNA, 25 bp, Homo sapien
tgtggagtttgtcatcgaagagacc

SEQ ID NO: 1293273 - DNA, 25 bp, Homo sapien
tgaggacgcagctgttggagatgcg

SEQ ID NO: 1293274 - DNA, 25 bp, Homo sapien
ccgcgccagcgccgcccctcggtac

SEQ ID NO: 1293275 - DNA, 25 bp, Homo sapien
cctcccgcgccagcgccgcccctcg

SEQ ID NO: 1293276 - DNA, 25 bp, Homo sapien
ctcctcccgcgccagcgccgcccct

SEQ ID NO: 1293277 - DNA, 25 bp, Homo sapien
tcccgcgccagcgccgcccctcggt

SEQ ID NO: 1293278 - DNA, 25 bp, Homo sapien
cggcgacgctgaactgctccggcat

SEQ ID NO: 1293279 - DNA, 25 bp, Homo sapien
tcctccgcggtgacggccaggaact

SEQ ID NO: 1293280 - DNA, 25 bp, Homo sapien
gggagctgaggtcctccgcggtgac

SEQ ID NO: 1293281 - DNA, 25 bp, Homo sapien
caggaactcggcgacgctgaactgc

SEQ ID NO: 1293282 - DNA, 25 bp, Homo sapien
gggggcactgagctgctccgcgctg

SEQ ID NO: 1293283 - DNA, 25 bp, Homo sapien
gcactgagctgctccgcgctgagcc

SEQ ID NO: 1293284 - DNA, 25 bp, Homo sapien
gcgcggggggcactgagctgctccg

SEQ ID NO: 1293285 - DNA, 25 bp, Homo sapien
agctgctccgcgctgagccggcctc

SEQ ID NO: 1293286 - DNA, 25 bp, Homo sapien
gcctcagtagaaactcctccgcctt

SEQ ID NO: 1293287 - DNA, 25 bp, Homo sapien
tgtcccgtttcatcccgctctgggt

SEQ ID NO: 1293288 - DNA, 25 bp, Homo sapien
ttcagggctctgtcccgtttcatcc

SEQ ID NO: 1293289 - DNA, 25 bp, Homo sapien
ctcagtagaaactcctccgccttcc

SEQ ID NO: 1293290 - DNA, 25 bp, Homo sapien
gttctctcttccaggatctgtggaa

SEQ ID NO: 1293291 - DNA, 25 bp, Homo sapien
tctctcttccaggatctgtggaagg

SEQ ID NO: 1293292 - DNA, 25 bp, Homo sapien
tctcttccaggatctgtggaaggat

SEQ ID NO: 1293293 - DNA, 25 bp, Homo sapien
ctgttctctcttccaggatctgtgg

SEQ ID NO: 1293294 - DNA, 25 bp, Homo sapien
cagttggacccactgatgtagaggg

SEQ ID NO: 1293295 - DNA, 25 bp, Homo sapien
cacccagcgtgaggcatggtcttga

SEQ ID NO: 1293296 - DNA, 25 bp, Homo sapien
gctggtctgaggactacagttggac

SEQ ID NO: 1293297 - DNA, 25 bp, Homo sapien
gtcttgaatatgcatgtctcacatt

SEQ ID NO: 1293298 - DNA, 25 bp, Homo sapien
gaaatgacccgcatgagtcccagca

SEQ ID NO: 1293299 - DNA, 25 bp, Homo sapien
tacaaggaggcttacatggtgctca

SEQ ID NO: 1293300 - DNA, 25 bp, Homo sapien
ggaccatgttctctcggttccagct

SEQ ID NO: 1293301 - DNA, 25 bp, Homo sapien
tcaccctcgaaaagtgccacaggca

SEQ ID NO: 1293302 - DNA, 25 bp, Homo sapien
gaaaggagttaggagcatgtccctg

SEQ ID NO: 1293303 - DNA, 25 bp, Homo sapien
gagccccaagctttagaagtccctg

SEQ ID NO: 1293304 - DNA, 25 bp, Homo sapien
caccatggtcactgaggatcctcgt

SEQ ID NO: 1293305 - DNA, 25 bp, Homo sapien
ggttttcacttcacatgcgctaagc

SEQ ID NO: 1293306 - DNA, 25 bp, Homo sapien
cagctactctggaggctgaggcaga

SEQ ID NO: 1293307 - DNA, 25 bp, Homo sapien
gcagtgagccgagatcaggccactg

SEQ ID NO: 1293308 - DNA, 25 bp, Homo sapien
gcgtggtggtgcatgtctatagtcc

SEQ ID NO: 1293309 - DNA, 25 bp, Homo sapien
cctgggcaacagagcgagactccat

SEQ ID NO: 1293310 - DNA, 25 bp, Homo sapien
taagacgggcgtctgataagaccct

SEQ ID NO: 1293311 - DNA, 25 bp, Homo sapien
tagggcatgagcttacattccagac

SEQ ID NO: 1293312 - DNA, 25 bp, Homo sapien
tgagcatgctggactttaagacggg

SEQ ID NO: 1293313 - DNA, 25 bp, Homo sapien
taaaaagtgctgtccagctgagcct

SEQ ID NO: 1293314 - DNA, 25 bp, Homo sapien
gaaaaaaggagtgaacaagtcacca

SEQ ID NO: 1293315 - DNA, 25 bp, Homo sapien
gggtggagtccttaatgaaccatcc

SEQ ID NO: 1293316 - DNA, 25 bp, Homo sapien
tgacccttctttacagtggggctgc

SEQ ID NO: 1293317 - DNA, 25 bp, Homo sapien
tgaaccatccccttcaataacatgg

SEQ ID NO: 1293318 - DNA, 25 bp, Homo sapien
ctggaccagcgcaaggcagaaactc

SEQ ID NO: 1293319 - DNA, 25 bp, Homo sapien
gtccttggtgcaaaatggctcctgg

SEQ ID NO: 1293320 - DNA, 25 bp, Homo sapien
tccttggtgcaaaatggctcctgga

SEQ ID NO: 1293321 - DNA, 25 bp, Homo sapien
aaatggctcctggaccagcgcaagg

SEQ ID NO: 1293322 - DNA, 25 bp, Homo sapien
caattagcattctagcagactggac

SEQ ID NO: 1293323 - DNA, 25 bp, Homo sapien
gggcccacagctgccgtttactaga

SEQ ID NO: 1293324 - DNA, 25 bp, Homo sapien
tgagggcagcacctagtgtccaatg

SEQ ID NO: 1293325 - DNA, 25 bp, Homo sapien
tgtgcttcttggtacgtcgagggtc

SEQ ID NO: 1293326 - DNA, 25 bp, Homo sapien
caggtccccaaggtcgtaggagtcg

SEQ ID NO: 1293327 - DNA, 25 bp, Homo sapien
ccccaaggtcgtaggagtcgaagag

SEQ ID NO: 1293328 - DNA, 25 bp, Homo sapien
tccccaaggtcgtaggagtcgaaga

SEQ ID NO: 1293329 - DNA, 25 bp, Homo sapien
caagccccacaggtagtcgtcctgg

SEQ ID NO: 1293330 - DNA, 25 bp, Homo sapien
caggtagtcgtcctggtccaaggat

SEQ ID NO: 1293331 - DNA, 25 bp, Homo sapien
ctgatcagaggggagctgcacgcca

SEQ ID NO: 1293332 - DNA, 25 bp, Homo sapien
gcaggctgtcagtagcctccaaggg

SEQ ID NO: 1293333 - DNA, 25 bp, Homo sapien
tcacgtccagaaatagaatcgcctt

SEQ ID NO: 1293334 - DNA, 25 bp, Homo sapien
gccttttgtaatatgtgtctctcca

SEQ ID NO: 1293335 - DNA, 25 bp, Homo sapien
gctcagtagatgctcttcacacaag

SEQ ID NO: 1293336 - DNA, 25 bp, Homo sapien
tataggtcagaccttgctgtctcct

SEQ ID NO: 1293337 - DNA, 25 bp, Homo sapien
cagaacacagcacggaacatgtgtg

SEQ ID NO: 1293338 - DNA, 25 bp, Homo sapien
cactaagaagtgagatacaggcttg

SEQ ID NO: 1293339 - DNA, 25 bp, Homo sapien
gaacacttcccctggtaatgcagaa

SEQ ID NO: 1293340 - DNA, 25 bp, Homo sapien
tgaaaccccttccattacagatgag

SEQ ID NO: 1293341 - DNA, 25 bp, Homo sapien
tatgcgcatgctgacacttgagtga

SEQ ID NO: 1293342 - DNA, 25 bp, Homo sapien
tggttccagcttcggagggctatgc

SEQ ID NO: 1293343 - DNA, 25 bp, Homo sapien
tcggagggctatgcgcatgctgaca

SEQ ID NO: 1293344 - DNA, 25 bp, Homo sapien
tgctgacacttgagtgaggaggcac

SEQ ID NO: 1293345 - DNA, 25 bp, Homo sapien
cactgggctgggagtatgtagacca

SEQ ID NO: 1293346 - DNA, 25 bp, Homo sapien
tcgatttgatctatgccttgtggag

SEQ ID NO: 1293347 - DNA, 25 bp, Homo sapien
tagaccaaggttcaagacacagctc

SEQ ID NO: 1293348 - DNA, 25 bp, Homo sapien
ccagctgggagaccttaggtaagac

SEQ ID NO: 1293349 - DNA, 25 bp, Homo sapien
ccttgggtgctcttgagatatatct

SEQ ID NO: 1293350 - DNA, 25 bp, Homo sapien
tcctcggaaggactgtccggctcct

SEQ ID NO: 1293351 - DNA, 25 bp, Homo sapien
gcacaggtagacttcgatgggccct

SEQ ID NO: 1293352 - DNA, 25 bp, Homo sapien
tccatgatgctagggtcggtgctgc

SEQ ID NO: 1293353 - DNA, 25 bp, Homo sapien
tccagtctcgtctgcggaggggcct

SEQ ID NO: 1293354 - DNA, 25 bp, Homo sapien
gctccttaaagttgccaacagcacg

SEQ ID NO: 1293355 - DNA, 25 bp, Homo sapien
gtctgctccttaaagttgccaacag

SEQ ID NO: 1293356 - DNA, 25 bp, Homo sapien
taaagttgccaacagcacggatatc

SEQ ID NO: 1293357 - DNA, 25 bp, Homo sapien
agagtcaagaaaagtgactgtctgg

SEQ ID NO: 1293358 - DNA, 25 bp, Homo sapien
caaaccccaaacctgccagggagca

SEQ ID NO: 1293359 - DNA, 25 bp, Homo sapien
aaagtgactgtctggtcaaaattca

SEQ ID NO: 1293360 - DNA, 25 bp, Homo sapien
tgtctggtcaaaattcaaaccccaa

SEQ ID NO: 1293361 - DNA, 25 bp, Homo sapien
ctttctcactccttgtacaacttag

SEQ ID NO: 1293362 - DNA, 25 bp, Homo sapien
taatctcataagctaccttagatcc

SEQ ID NO: 1293363 - DNA, 25 bp, Homo sapien
gcctctgaacattactttctcactc

SEQ ID NO: 1293364 - DNA, 25 bp, Homo sapien
tctgtaacctgttaatctcataagc

SEQ ID NO: 1293365 - DNA, 25 bp, Homo sapien
aaagcaaatgggaatataaatcata

SEQ ID NO: 1293366 - DNA, 25 bp, Homo sapien
aagcaaatgggaatataaatcataa

SEQ ID NO: 1293367 - DNA, 25 bp, Homo sapien
agcaaatgggaatataaatcataaa

SEQ ID NO: 1293368 - DNA, 25 bp, Homo sapien
cagtcaggtgcttgaagctcagaga

SEQ ID NO: 1293369 - DNA, 25 bp, Homo sapien
ccaaggcctgctccgtgttcatcag

SEQ ID NO: 1293370 - DNA, 25 bp, Homo sapien
ttggccttgtcctcagtcaggtgct

SEQ ID NO: 1293371 - DNA, 25 bp, Homo sapien
tggggtcttcaaacattcccctgcc

SEQ ID NO: 1293372 - DNA, 25 bp, Homo sapien
ctcgctcaggaggtaaatgaacttc

SEQ ID NO: 1293373 - DNA, 25 bp, Homo sapien
tcagcggcccagttcaggtccagga

SEQ ID NO: 1293374 - DNA, 25 bp, Homo sapien
ccttcttgcggatgagctggatgcc

SEQ ID NO: 1293375 - DNA, 25 bp, Homo sapien
ttcttggtgagcagccccagcgaag

SEQ ID NO: 1293376 - DNA, 25 bp, Homo sapien
aggccatccactctgatgcacttcc

SEQ ID NO: 1293377 - DNA, 25 bp, Homo sapien
tgggaactcagggacgacgggcctc

SEQ ID NO: 1293378 - DNA, 25 bp, Homo sapien
tccactctgatgcacttccccttgg

SEQ ID NO: 1293379 - DNA, 25 bp, Homo sapien
actcagggacgacgggcctcccaat

SEQ ID NO: 1293380 - DNA, 25 bp, Homo sapien
tgcctcagtttaccgccagtcctgg

SEQ ID NO: 1293381 - DNA, 25 bp, Homo sapien
gaagcactgctgtacttgataggaa

SEQ ID NO: 1293382 - DNA, 25 bp, Homo sapien
ggaaaacatcagtgacctgagaagt

SEQ ID NO: 1293383 - DNA, 25 bp, Homo sapien
caggcacttgagaccctaccaaagc

SEQ ID NO: 1293384 - DNA, 25 bp, Homo sapien
cactgggacataggtcagagaccca

SEQ ID NO: 1293385 - DNA, 25 bp, Homo sapien
tgttacacatctaaggagcctcagt

SEQ ID NO: 1293386 - DNA, 25 bp, Homo sapien
tcccgtgtcttaaggacaagcagct

SEQ ID NO: 1293387 - DNA, 25 bp, Homo sapien
ttcgcaggctcacggtacaagttgg

SEQ ID NO: 1293388 - DNA, 25 bp, Homo sapien
cctttggacagtgcccagaggaaag

SEQ ID NO: 1293389 - DNA, 25 bp, Homo sapien
tgacacctttggacagtgcccagag

SEQ ID NO: 1293390 - DNA, 25 bp, Homo sapien
ctccctgacacctttggacagtgcc

SEQ ID NO: 1293391 - DNA, 25 bp, Homo sapien
cacctttggacagtgcccagaggaa

SEQ ID NO: 1293392 - DNA, 25 bp, Homo sapien
ttgcagcccggccacaaagcaagcg

SEQ ID NO: 1293393 - DNA, 25 bp, Homo sapien
aaagcaagcggccacacccagggtt

SEQ ID NO: 1293394 - DNA, 25 bp, Homo sapien
aactgttccaggtcacgcccttgta

SEQ ID NO: 1293395 - DNA, 25 bp, Homo sapien
caagcggccacacccagggttgggt

SEQ ID NO: 1293396 - DNA, 25 bp, Homo sapien
ctgctccactcaaactggatctcag

SEQ ID NO: 1293397 - DNA, 25 bp, Homo sapien
tccactcaaactggatctcaggcac

SEQ ID NO: 1293398 - DNA, 25 bp, Homo sapien
aactggatctcaggcacccctccct

SEQ ID NO: 1293399 - DNA, 25 bp, Homo sapien
ctcaaactggatctcaggcacccct

SEQ ID NO: 1293400 - DNA, 25 bp, Homo sapien
tggaaaagcatagggggaagcggtg

SEQ ID NO: 1293401 - DNA, 25 bp, Homo sapien
ctggaaaagcatagggggaagcggt

SEQ ID NO: 1293402 - DNA, 25 bp, Homo sapien
ctgccggcaggcatcgcacaacttg

SEQ ID NO: 1293403 - DNA, 25 bp, Homo sapien
cacaacttggccctcgggtccgtgg

SEQ ID NO: 1293404 - DNA, 25 bp, Homo sapien
gagtggcgtcgaggcaggtgcctgg

SEQ ID NO: 1293405 - DNA, 25 bp, Homo sapien
tgtagtaggtagcagtagctgggca

SEQ ID NO: 1293406 - DNA, 25 bp, Homo sapien
cagcggccgaagccaaggcccgggg

SEQ ID NO: 1293407 - DNA, 25 bp, Homo sapien
cccagcggccgaagccaaggcccgg

SEQ ID NO: 1293408 - DNA, 25 bp, Homo sapien
ccagcggccgaagccaaggcccggg

SEQ ID NO: 1293409 - DNA, 25 bp, Homo sapien
ggtctcgactgcaccgacttccttg

SEQ ID NO: 1293410 - DNA, 25 bp, Homo sapien
cagagagcagcgcttagagatcgcc

SEQ ID NO: 1293411 - DNA, 25 bp, Homo sapien
acacctgcgggttccggtgctgccg

SEQ ID NO: 1293412 - DNA, 25 bp, Homo sapien
gtgccctcaagctcggcggagacgc

SEQ ID NO: 1293413 - DNA, 25 bp, Homo sapien
tggttccgggattcacagtgcagag

SEQ ID NO: 1293414 - DNA, 25 bp, Homo sapien
agcgccccgagaaatgggcccggat

SEQ ID NO: 1293415 - DNA, 25 bp, Homo sapien
cgcgctagttagcagccggcgagac

SEQ ID NO: 1293416 - DNA, 25 bp, Homo sapien
cgagacggagacagagggtggttcc

SEQ ID NO: 1293417 - DNA, 25 bp, Homo sapien
gaattttgtatggtaactaagcctc

SEQ ID NO: 1293418 - DNA, 25 bp, Homo sapien
agcagacacggagaagagaagttaa

SEQ ID NO: 1293419 - DNA, 25 bp, Homo sapien
aaccatctgtgtagggactgttagc

SEQ ID NO: 1293420 - DNA, 25 bp, Homo sapien
gaatgtaagagaacacaaccttcac

SEQ ID NO: 1293421 - DNA, 25 bp, Homo sapien
ccagttgggagcaggtactctacct

SEQ ID NO: 1293422 - DNA, 25 bp, Homo sapien
taaatgcaggtctggctgatcacga

SEQ ID NO: 1293423 - DNA, 25 bp, Homo sapien
cctacaacaaccctatgggagaggt

SEQ ID NO: 1293424 - DNA, 25 bp, Homo sapien
gataagaagtagctggctccggcca

SEQ ID NO: 1293425 - DNA, 25 bp, Homo sapien
tggcctccacgttctctggcctctg

SEQ ID NO: 1293426 - DNA, 25 bp, Homo sapien
ggtagtttcatgagtgagctggttc

SEQ ID NO: 1293427 - DNA, 25 bp, Homo sapien
tctctggcctctgggttatgttctt

SEQ ID NO: 1293428 - DNA, 25 bp, Homo sapien
ttcaagagagggtagtttcatgagt

SEQ ID NO: 1293429 - DNA, 25 bp, Homo sapien
cccaacgacggcgagaggtgaatat

SEQ ID NO: 1293430 - DNA, 25 bp, Homo sapien
tgactacccacatttatccctaaag

SEQ ID NO: 1293431 - DNA, 25 bp, Homo sapien
taatctggtttgtcaaaggcaaccc

SEQ ID NO: 1293432 - DNA, 25 bp, Homo sapien
aaggtgtctcactaccctgatcccg

SEQ ID NO: 1293433 - DNA, 25 bp, Homo sapien
acgtcgcaggcgctcgaggaatgcg

SEQ ID NO: 1293434 - DNA, 25 bp, Homo sapien
gaaggacttcgagagggcagaggct

SEQ ID NO: 1293435 - DNA, 25 bp, Homo sapien
aaggaaccgggtgcgatccagggcg

SEQ ID NO: 1293436 - DNA, 25 bp, Homo sapien
ggaatgcgagttgcctgaaagaacg

SEQ ID NO: 1293437 - DNA, 25 bp, Homo sapien
aggccaggcacctggtgaagcccac

SEQ ID NO: 1293438 - DNA, 25 bp, Homo sapien
taaacaggaatctctagtaaggcca

SEQ ID NO: 1293439 - DNA, 25 bp, Homo sapien
cataaacaggaatctctagtaaggc

SEQ ID NO: 1293440 - DNA, 25 bp, Homo sapien
ggccaggcacctggtgaagcccacc

SEQ ID NO: 1293441 - DNA, 25 bp, Homo sapien
ccaaaattcggccatgtgcgagaaa

SEQ ID NO: 1293442 - DNA, 25 bp, Homo sapien
gctactgctagatctcaagggacat

SEQ ID NO: 1293443 - DNA, 25 bp, Homo sapien
cacatcccctgctagaaaggcatag

SEQ ID NO: 1293444 - DNA, 25 bp, Homo sapien
caggtgaagcaaacttgaggctctc

SEQ ID NO: 1293445 - DNA, 25 bp, Homo sapien
tatagagttcataaatcagggcaac

SEQ ID NO: 1293446 - DNA, 25 bp, Homo sapien
tccacacctccacgctctgaagaga

SEQ ID NO: 1293447 - DNA, 25 bp, Homo sapien
taatatacatcgcattgttacagaa

SEQ ID NO: 1293448 - DNA, 25 bp, Homo sapien
tctgccgccgccttggcatagtttg

SEQ ID NO: 1293449 - DNA, 25 bp, Homo sapien
gtcccaggcagaacgggcgccagca

SEQ ID NO: 1293450 - DNA, 25 bp, Homo sapien
tgagcaccaggtttagtctccagga

SEQ ID NO: 1293451 - DNA, 25 bp, Homo sapien
ctgccgtccggcttccggcaggaga

SEQ ID NO: 1293452 - DNA, 25 bp, Homo sapien
aagttcacagtccttcgctcctgag

SEQ ID NO: 1293453 - DNA, 25 bp, Homo sapien
tccctaaaccgagtgagtggcaatt

SEQ ID NO: 1293454 - DNA, 25 bp, Homo sapien
tacttggaattgacactagctggga

SEQ ID NO: 1293455 - DNA, 25 bp, Homo sapien
cattcatttgatgcaaccatgggca

SEQ ID NO: 1293456 - DNA, 25 bp, Homo sapien
aaggagcagtcagtttccgccgagc

SEQ ID NO: 1293457 - DNA, 25 bp, Homo sapien
ctggaggtgtcaggacacggccgag

SEQ ID NO: 1293458 - DNA, 25 bp, Homo sapien
tcagtggcaaaagctccttttgtcg

SEQ ID NO: 1293459 - DNA, 25 bp, Homo sapien
caagttccggagtgagctcggctgt

SEQ ID NO: 1293460 - DNA, 25 bp, Homo sapien
ttgtcgttggagatgacaagttccg

SEQ ID NO: 1293461 - DNA, 25 bp, Homo sapien
gagatgacaagttccggagtgagct

SEQ ID NO: 1293462 - DNA, 25 bp, Homo sapien
aagagggaagagttacgcgaggcaa

SEQ ID NO: 1293463 - DNA, 25 bp, Homo sapien
caatcgggagctccgagggtcccgc

SEQ ID NO: 1293464 - DNA, 25 bp, Homo sapien
agccctgtcccgacttcgaggctta

SEQ ID NO: 1293465 - DNA, 25 bp, Homo sapien
gggtgttcagccctgtcccgacttc

SEQ ID NO: 1293466 - DNA, 25 bp, Homo sapien
gatgacgcgctgtaggatttccacc

SEQ ID NO: 1293467 - DNA, 25 bp, Homo sapien
tttccacctggctaagctgagtgcc

SEQ ID NO: 1293468 - DNA, 25 bp, Homo sapien
gttcatgtcgtccagcaagctcagc

SEQ ID NO: 1293469 - DNA, 25 bp, Homo sapien
tacctgcaggtcgagaatgtagtcg

SEQ ID NO: 1293470 - DNA, 25 bp, Homo sapien
gcggagccgcggattcaaagaatga

SEQ ID NO: 1293471 - DNA, 25 bp, Homo sapien
taaattgcaaacaggcttcctccgg

SEQ ID NO: 1293472 - DNA, 25 bp, Homo sapien
gaagtcccgctacagtgacctgcaa

SEQ ID NO: 1293473 - DNA, 25 bp, Homo sapien
tctttattcaaaatggcccgcctcg

SEQ ID NO: 1293474 - DNA, 25 bp, Homo sapien
tggcgccagggtgggacgtcatgcg

SEQ ID NO: 1293475 - DNA, 25 bp, Homo sapien
caatgagcgccggacacccgagaaa

SEQ ID NO: 1293476 - DNA, 25 bp, Homo sapien
atgagcgccggacacccgagaaagg

SEQ ID NO: 1293477 - DNA, 25 bp, Homo sapien
gtgggacgtcatgcgttcacacagg

SEQ ID NO: 1293478 - DNA, 25 bp, Homo sapien
gacacaaaaggactggttccctcat

SEQ ID NO: 1293479 - DNA, 25 bp, Homo sapien
caaagacagagatcttcaagctgct

SEQ ID NO: 1293480 - DNA, 25 bp, Homo sapien
ttcaaagagatttatccacacagct

SEQ ID NO: 1293481 - DNA, 25 bp, Homo sapien
taggctaatgagtacagagacagcc

SEQ ID NO: 1293482 - DNA, 25 bp, Homo sapien
tcttccagcgacttagtcattccag

SEQ ID NO: 1293483 - DNA, 25 bp, Homo sapien
tccaaattcttccagcgacttagtc

SEQ ID NO: 1293484 - DNA, 25 bp, Homo sapien
gcgacttagtcattccagggtttga

SEQ ID NO: 1293485 - DNA, 25 bp, Homo sapien
tgaactttctcgcaaaaaccatttg

SEQ ID NO: 1293486 - DNA, 25 bp, Homo sapien
aagagtgactcttgtccagtggttt

SEQ ID NO: 1293487 - DNA, 25 bp, Homo sapien
tgtgaagagtgactcttgtccagtg

SEQ ID NO: 1293488 - DNA, 25 bp, Homo sapien
ctgtgaagagtgactcttgtccagt

SEQ ID NO: 1293489 - DNA, 25 bp, Homo sapien
tgaagagtgactcttgtccagtggt

SEQ ID NO: 1293490 - DNA, 25 bp, Homo sapien
tagcctttggagtataggaaccttc

SEQ ID NO: 1293491 - DNA, 25 bp, Homo sapien
gagtataggaaccttccttttgcag

SEQ ID NO: 1293492 - DNA, 25 bp, Homo sapien
gtctccatgagtgatctagcctttg

SEQ ID NO: 1293493 - DNA, 25 bp, Homo sapien
gatctagcctttggagtataggaac

SEQ ID NO: 1293494 - DNA, 25 bp, Homo sapien
tgctcaggaccggtagagatcacca

SEQ ID NO: 1293495 - DNA, 25 bp, Homo sapien
gaccaatggtttgcctgaacgcaca

SEQ ID NO: 1293496 - DNA, 25 bp, Homo sapien
tattgagagtacacgagacagtcac

SEQ ID NO: 1293497 - DNA, 25 bp, Homo sapien
tgtggacaagacacccctgctttgg

SEQ ID NO: 1293498 - DNA, 25 bp, Homo sapien
ggtgatcgctacagccctttacagt

SEQ ID NO: 1293499 - DNA, 25 bp, Homo sapien
gccagtttccttccgatgccttggt

SEQ ID NO: 1293500 - DNA, 25 bp, Homo sapien
ctttcctgatctctccagtctagca

SEQ ID NO: 1293501 - DNA, 25 bp, Homo sapien
taggtggacgtgctcccatttgaca

SEQ ID NO: 1293502 - DNA, 25 bp, Homo sapien
ctggccagatgctgtcccagacacc

SEQ ID NO: 1293503 - DNA, 25 bp, Homo sapien
gctgtcatcctccacatcactggga

SEQ ID NO: 1293504 - DNA, 25 bp, Homo sapien
tggccagatgctgtcccagacacct

SEQ ID NO: 1293505 - DNA, 25 bp, Homo sapien
cacctccctccaggctgtcatcctc

SEQ ID NO: 1293506 - DNA, 25 bp, Homo sapien
atagaaagctccccaacgccctcca

SEQ ID NO: 1293507 - DNA, 25 bp, Homo sapien
ctagtagtaagggaaatagaaagct

SEQ ID NO: 1293508 - DNA, 25 bp, Homo sapien
ctccacctgcaccccaggcctgatc

SEQ ID NO: 1293509 - DNA, 25 bp, Homo sapien
aaagctccccaacgccctccacctg

SEQ ID NO: 1293510 - DNA, 25 bp, Homo sapien
tgtgagttccaaagcccctctggga

SEQ ID NO: 1293511 - DNA, 25 bp, Homo sapien
gctgactgtgagttccaaagcccct

SEQ ID NO: 1293512 - DNA, 25 bp, Homo sapien
gggctgactgtgagttccaaagccc

SEQ ID NO: 1293513 - DNA, 25 bp, Homo sapien
gactgtgagttccaaagcccctctg

SEQ ID NO: 1293514 - DNA, 25 bp, Homo sapien
ttctggtgtccacagccgctgtgct

SEQ ID NO: 1293515 - DNA, 25 bp, Homo sapien
gacatagggcttctggtatcttcct

SEQ ID NO: 1293516 - DNA, 25 bp, Homo sapien
ttttggctggaagcgagccctggac

SEQ ID NO: 1293517 - DNA, 25 bp, Homo sapien
tgtgctggaccctggtgaccttgtc

SEQ ID NO: 1293518 - DNA, 25 bp, Homo sapien
ctgcagataggagcccacctggagt

SEQ ID NO: 1293519 - DNA, 25 bp, Homo sapien
tgcagataggagcccacctggagtg

SEQ ID NO: 1293520 - DNA, 25 bp, Homo sapien
cctgtggccagaatgaccgggttgc

SEQ ID NO: 1293521 - DNA, 25 bp, Homo sapien
tgtctaaggctctggatacaatgcc

SEQ ID NO: 1293522 - DNA, 25 bp, Homo sapien
tcaaaccgtggaaagaccactgtgc

SEQ ID NO: 1293523 - DNA, 25 bp, Homo sapien
caagccctggctcaagttgtctctg

SEQ ID NO: 1293524 - DNA, 25 bp, Homo sapien
tgtcctgggactttaatgctttttc

SEQ ID NO: 1293525 - DNA, 25 bp, Homo sapien
cagctccagggcgagaaccgcactg

SEQ ID NO: 1293526 - DNA, 25 bp, Homo sapien
cccatctgtgggacaccctggcttc

SEQ ID NO: 1293527 - DNA, 25 bp, Homo sapien
tccagggcgagaaccgcactggcag

SEQ ID NO: 1293528 - DNA, 25 bp, Homo sapien
ggtcaaccattctcccactgaaggg

SEQ ID NO: 1293529 - DNA, 25 bp, Homo sapien
ggatgtaccagagtttggtcaacca

SEQ ID NO: 1293530 - DNA, 25 bp, Homo sapien
gtgtaaccagcaccacagttaagat

SEQ ID NO: 1293531 - DNA, 25 bp, Homo sapien
acctcgaaatcacagcctcatgcta

SEQ ID NO: 1293532 - DNA, 25 bp, Homo sapien
tcaacgcaaatgctgaggtgctcca

SEQ ID NO: 1293533 - DNA, 25 bp, Homo sapien
cacacatagtttaagctgccagcca

SEQ ID NO: 1293534 - DNA, 25 bp, Homo sapien
gaacttgactctgcttaaggtggca

SEQ ID NO: 1293535 - DNA, 25 bp, Homo sapien
cagcctaagatacctggagggcacc

SEQ ID NO: 1293536 - DNA, 25 bp, Homo sapien
tttccgtgaagagcctgtaactgcc

SEQ ID NO: 1293537 - DNA, 25 bp, Homo sapien
ggacgaacacccaagtagctcctga

SEQ ID NO: 1293538 - DNA, 25 bp, Homo sapien
gcaacactgccactgactacctggg

SEQ ID NO: 1293539 - DNA, 25 bp, Homo sapien
tcacttaggcaaactccagaggagg

SEQ ID NO: 1293540 - DNA, 25 bp, Homo sapien
tatcacctattaaggagcttgtttt

SEQ ID NO: 1293541 - DNA, 25 bp, Homo sapien
atcacctattaaggagcttgttttt

SEQ ID NO: 1293542 - DNA, 25 bp, Homo sapien
cacctattaaggagcttgttttttg

SEQ ID NO: 1293543 - DNA, 25 bp, Homo sapien
tcatttggaaggattgcatgaagcc

SEQ ID NO: 1293544 - DNA, 25 bp, Homo sapien
gaatttgcaggtttgacatgtttat

SEQ ID NO: 1293545 - DNA, 25 bp, Homo sapien
ttatctaaattagccggctgggtga

SEQ ID NO: 1293546 - DNA, 25 bp, Homo sapien
agaactctgttactactgaatttgc

SEQ ID NO: 1293547 - DNA, 25 bp, Homo sapien
aagagtgggacacctgtgtcttaaa

SEQ ID NO: 1293548 - DNA, 25 bp, Homo sapien
ttcatcctgggtaagagtgggacac

SEQ ID NO: 1293549 - DNA, 25 bp, Homo sapien
aattagcggggtgttggcaggtgcc

SEQ ID NO: 1293550 - DNA, 25 bp, Homo sapien
tcctgggtaagagtgggacacctgt

SEQ ID NO: 1293551 - DNA, 25 bp, Homo sapien
agctccctgggggtataccttattg

SEQ ID NO: 1293552 - DNA, 25 bp, Homo sapien
ggggtataccttattgatgctaaac

SEQ ID NO: 1293553 - DNA, 25 bp, Homo sapien
tgggggtataccttattgatgctaa

SEQ ID NO: 1293554 - DNA, 25 bp, Homo sapien
ccctgggggtataccttattgatgc

SEQ ID NO: 1293555 - DNA, 25 bp, Homo sapien
gatggcggcggagtcggcgctccaa

SEQ ID NO: 1293556 - DNA, 25 bp, Homo sapien
aggccgcgccagtgacagcgatggc

SEQ ID NO: 1293557 - DNA, 25 bp, Homo sapien
ccgaggacgcgacgcgagcccagtt

SEQ ID NO: 1293558 - DNA, 25 bp, Homo sapien
cgctccaagttgtggagaagctgca

SEQ ID NO: 1293559 - DNA, 25 bp, Homo sapien
gagactccctagatatgccacttgg

SEQ ID NO: 1293560 - DNA, 25 bp, Homo sapien
cacagtggttgaaagcagggaatct

SEQ ID NO: 1293561 - DNA, 25 bp, Homo sapien
tgtggcccttctggaaacatgatgg

SEQ ID NO: 1293562 - DNA, 25 bp, Homo sapien
cagcaagtttcgatccacctgagga

SEQ ID NO: 1293563 - DNA, 25 bp, Homo sapien
gaaatgctgagcctgatgaacagga

SEQ ID NO: 1293564 - DNA, 25 bp, Homo sapien
agaagagcaattcccgaaagcgccc

SEQ ID NO: 1293565 - DNA, 25 bp, Homo sapien
ccctcaagaagcaagatttagacct

SEQ ID NO: 1293566 - DNA, 25 bp, Homo sapien
tttgcatcttgtggttaaactcacc

SEQ ID NO: 1293567 - DNA, 25 bp, Homo sapien
gaaaacttcagccacggcacttgga

SEQ ID NO: 1293568 - DNA, 25 bp, Homo sapien
gaggattgccctgccactgttttcc

SEQ ID NO: 1293569 - DNA, 25 bp, Homo sapien
caagtcagagaagccggctggagct

SEQ ID NO: 1293570 - DNA, 25 bp, Homo sapien
ggaggatgaattcgagcagccaacc

SEQ ID NO: 1293571 - DNA, 25 bp, Homo sapien
ttagagagagtggtggtcatgcccc

SEQ ID NO: 1293572 - DNA, 25 bp, Homo sapien
cgacgataaactgaggacttgcctt

SEQ ID NO: 1293573 - DNA, 25 bp, Homo sapien
taagccgccacagatctgagacagc

SEQ ID NO: 1293574 - DNA, 25 bp, Homo sapien
ggtcctccgaaagtgtctgctctgt

SEQ ID NO: 1293575 - DNA, 25 bp, Homo sapien
tacctgctgcacgtagggcaaggaa

SEQ ID NO: 1293576 - DNA, 25 bp, Homo sapien
caaggaatgagcactagaccgcctg

SEQ ID NO: 1293577 - DNA, 25 bp, Homo sapien
tcagatgaaagcctagtgaaagcca

SEQ ID NO: 1293578 - DNA, 25 bp, Homo sapien
tgtaggtctggagcctttccctcat

SEQ ID NO: 1293579 - DNA, 25 bp, Homo sapien
gggctttttgtagccctgaaggcaa

SEQ ID NO: 1293580 - DNA, 25 bp, Homo sapien
gctcactagaggacgcagaaccttg

SEQ ID NO: 1293581 - DNA, 25 bp, Homo sapien
aaacacacacggcagggctttttgt

SEQ ID NO: 1293582 - DNA, 25 bp, Homo sapien
gacgcagaaccttgggagattgatt

SEQ ID NO: 1293583 - DNA, 25 bp, Homo sapien
aaaggctgtaatgctatgttggaaa

SEQ ID NO: 1293584 - DNA, 25 bp, Homo sapien
gaatcactatgagaagtgaatggtt

SEQ ID NO: 1293585 - DNA, 25 bp, Homo sapien
ctcttgttctctgtgaatcactatg

SEQ ID NO: 1293586 - DNA, 25 bp, Homo sapien
gaagtgaatggttttaaaggctgta

SEQ ID NO: 1293587 - DNA, 25 bp, Homo sapien
gagtgtctgagccacagcgtcagga

SEQ ID NO: 1293588 - DNA, 25 bp, Homo sapien
tggctgtcaaggaacaccgatctag

SEQ ID NO: 1293589 - DNA, 25 bp, Homo sapien
tcaaagcccaggatacagagccagt

SEQ ID NO: 1293590 - DNA, 25 bp, Homo sapien
taggccaacttcgaattccagagca

SEQ ID NO: 1293591 - DNA, 25 bp, Homo sapien
gacaggacacaaatgttactatgtt

SEQ ID NO: 1293592 - DNA, 25 bp, Homo sapien
caggacacaaatgttactatgtttt

SEQ ID NO: 1293593 - DNA, 25 bp, Homo sapien
ggacacaaatgttactatgttttaa

SEQ ID NO: 1293594 - DNA, 25 bp, Homo sapien
gacacaaatgttactatgttttaat

SEQ ID NO: 1293595 - DNA, 25 bp, Homo sapien
cttattaggagtctttaggcaggga

SEQ ID NO: 1293596 - DNA, 25 bp, Homo sapien
caaatgaacatttgggtcaggtgcc

SEQ ID NO: 1293597 - DNA, 25 bp, Homo sapien
tgttcatagcaatgtcagtatccat

SEQ ID NO: 1293598 - DNA, 25 bp, Homo sapien
tgccccacaaatctaatattaggaa

SEQ ID NO: 1293599 - DNA, 25 bp, Homo sapien
ggagcaaggtgtcatcctgctcttc

SEQ ID NO: 1293600 - DNA, 25 bp, Homo sapien
aaaggagcaaggtgtcatcctgctc

SEQ ID NO: 1293601 - DNA, 25 bp, Homo sapien
ttttttgtggtaactaccgagatga

SEQ ID NO: 1293602 - DNA, 25 bp, Homo sapien
ggtaactaccgagatgaatatttta

SEQ ID NO: 1293603 - DNA, 25 bp, Homo sapien
ggcagagatcttaatcagcatcctt

SEQ ID NO: 1293604 - DNA, 25 bp, Homo sapien
accgcaccctcctaaggcagagatc

SEQ ID NO: 1293605 - DNA, 25 bp, Homo sapien
ccgcaccctcctaaggcagagatct

SEQ ID NO: 1293606 - DNA, 25 bp, Homo sapien
tcaccgcaccctcctaaggcagaga

SEQ ID NO: 1293607 - DNA, 25 bp, Homo sapien
tttagtagtaagaggaatttcagac

SEQ ID NO: 1293608 - DNA, 25 bp, Homo sapien
cgatgccgaatttagtagtaagagg

SEQ ID NO: 1293609 - DNA, 25 bp, Homo sapien
gtaagaggaatttcagacggaaaga

SEQ ID NO: 1293610 - DNA, 25 bp, Homo sapien
ttaaacgatgccgaatttagtagta

SEQ ID NO: 1293611 - DNA, 25 bp, Homo sapien
cactgtcccttattatacttggaac

SEQ ID NO: 1293612 - DNA, 25 bp, Homo sapien
aaagggcgggaactcagcatttgtg

SEQ ID NO: 1293613 - DNA, 25 bp, Homo sapien
aggcactgtcccttattatacttgg

SEQ ID NO: 1293614 - DNA, 25 bp, Homo sapien
tgagcaaagggcgggaactcagcat

SEQ ID NO: 1293615 - DNA, 25 bp, Homo sapien
ggcttatcaacttgacagatgcccc

SEQ ID NO: 1293616 - DNA, 25 bp, Homo sapien
ctggcttatcaacttgacagatgcc

SEQ ID NO: 1293617 - DNA, 25 bp, Homo sapien
catcacagggtttctcatccacttt

SEQ ID NO: 1293618 - DNA, 25 bp, Homo sapien
gatgcccccatcacagggtttctca

SEQ ID NO: 1293619 - DNA, 25 bp, Homo sapien
actgttaagttttgtctagaagtga

SEQ ID NO: 1293620 - DNA, 25 bp, Homo sapien
attgccatcatattgcattggctgc

SEQ ID NO: 1293621 - DNA, 25 bp, Homo sapien
gaagtgacatctatcattgccatca

SEQ ID NO: 1293622 - DNA, 25 bp, Homo sapien
taagttttgtctagaagtgacatct

SEQ ID NO: 1293623 - DNA, 25 bp, Homo sapien
gtcacttaatctctcagtttctttc

SEQ ID NO: 1293624 - DNA, 25 bp, Homo sapien
ttgggaggtcaaggaaggcgggtca

SEQ ID NO: 1293625 - DNA, 25 bp, Homo sapien
aaaaatgaggaaaataggctgggcg

SEQ ID NO: 1293626 - DNA, 25 bp, Homo sapien
gccagacgtggtggcccacgcttgt

SEQ ID NO: 1293627 - DNA, 25 bp, Homo sapien
cacccaattgagataggagagaaga

SEQ ID NO: 1293628 - DNA, 25 bp, Homo sapien
aattaacagtatcatttcacccacc

SEQ ID NO: 1293629 - DNA, 25 bp, Homo sapien
ctcagttcgccacaaagaagcattc

SEQ ID NO: 1293630 - DNA, 25 bp, Homo sapien
tatgccctcagttcgccacaaagaa

SEQ ID NO: 1293631 - DNA, 25 bp, Homo sapien
cagcaatccttgagctaagaaaatg

SEQ ID NO: 1293632 - DNA, 25 bp, Homo sapien
aaattcagcaatccttgagctaaga

SEQ ID NO: 1293633 - DNA, 25 bp, Homo sapien
ttcagcaatccttgagctaagaaaa

SEQ ID NO: 1293634 - DNA, 25 bp, Homo sapien
tgtttacagccaggggtggtcgctc

SEQ ID NO: 1293635 - DNA, 25 bp, Homo sapien
tgccccagggtagtcctagaaatca

SEQ ID NO: 1293636 - DNA, 25 bp, Homo sapien
ccccagggtagtcctagaaatcagt

SEQ ID NO: 1293637 - DNA, 25 bp, Homo sapien
cccagggtagtcctagaaatcagtg

SEQ ID NO: 1293638 - DNA, 25 bp, Homo sapien
gccccagggtagtcctagaaatcag

SEQ ID NO: 1293639 - DNA, 25 bp, Homo sapien
cacttgtcgaggagaatgctgaatt

SEQ ID NO: 1293640 - DNA, 25 bp, Homo sapien
tagtgatagccgctgtgaaagcaca

SEQ ID NO: 1293641 - DNA, 25 bp, Homo sapien
cagtagatgctcgtccacttgtcga

SEQ ID NO: 1293642 - DNA, 25 bp, Homo sapien
tgctgctggcaatagtgatagccgc

SEQ ID NO: 1293643 - DNA, 25 bp, Homo sapien
cgctcctggccgaataaagtctctt

SEQ ID NO: 1293644 - DNA, 25 bp, Homo sapien
aagagcctgcacaaacttgccagcc

SEQ ID NO: 1293645 - DNA, 25 bp, Homo sapien
tgaggacactcaaacagtactattg

SEQ ID NO: 1293646 - DNA, 25 bp, Homo sapien
gagagcttggttcttgagacacaac

SEQ ID NO: 1293647 - DNA, 25 bp, Homo sapien
tgcatgtggcccagaaaatatttct

SEQ ID NO: 1293648 - DNA, 25 bp, Homo sapien
aaatatttctgaatggaacttgaaa

SEQ ID NO: 1293649 - DNA, 25 bp, Homo sapien
tttggtctatacttcaccagcccca

SEQ ID NO: 1293650 - DNA, 25 bp, Homo sapien
aaaaatggatattttggtctatact

SEQ ID NO: 1293651 - DNA, 25 bp, Homo sapien
tgagtctcagaagatcaagtcactt

SEQ ID NO: 1293652 - DNA, 25 bp, Homo sapien
ggccacaaccagctgttcgaaaaaa

SEQ ID NO: 1293653 - DNA, 25 bp, Homo sapien
taaaacctattgacaggccacaacc

SEQ ID NO: 1293654 - DNA, 25 bp, Homo sapien
gatttgaccgtaataaccatcggct

SEQ ID NO: 1293655 - DNA, 25 bp, Homo sapien
ttccacacctaggaagctggaacag

SEQ ID NO: 1293656 - DNA, 25 bp, Homo sapien
tctgaaccgggatcttacaggagaa

SEQ ID NO: 1293657 - DNA, 25 bp, Homo sapien
gatctgaatgaactcctagggtggt

SEQ ID NO: 1293658 - DNA, 25 bp, Homo sapien
ttttggcagagattcagtgcaagcc

SEQ ID NO: 1293659 - DNA, 25 bp, Homo sapien
gggagccagatcagacctttagtct

SEQ ID NO: 1293660 - DNA, 25 bp, Homo sapien
tctggcagtcatgggtaacacttgc

SEQ ID NO: 1293661 - DNA, 25 bp, Homo sapien
gaccatcgtggttctctagggcgct

SEQ ID NO: 1293662 - DNA, 25 bp, Homo sapien
tacggaagatacgacaccactggga

SEQ ID NO: 1293663 - DNA, 25 bp, Homo sapien
tttcctaagggctggccaaggctcc

SEQ ID NO: 1293664 - DNA, 25 bp, Homo sapien
cctccggattgtgttagtagtagcc

SEQ ID NO: 1293665 - DNA, 25 bp, Homo sapien
ccagcttggagttgtctgtcacgca

SEQ ID NO: 1293666 - DNA, 25 bp, Homo sapien
taactagtgttgtaagtccgatgcc

SEQ ID NO: 1293667 - DNA, 25 bp, Homo sapien
ggttatagctagaaggacaggagtc

SEQ ID NO: 1293668 - DNA, 25 bp, Homo sapien
aatcccgaggttgctgtttacatgc

SEQ ID NO: 1293669 - DNA, 25 bp, Homo sapien
tgacattgcttgtgaagggcagcgc

SEQ ID NO: 1293670 - DNA, 25 bp, Homo sapien
taagcctaccaacaaagctgtgaag

SEQ ID NO: 1293671 - DNA, 25 bp, Homo sapien
tttccacttcagcttgatggcagcg

SEQ ID NO: 1293672 - DNA, 25 bp, Homo sapien
gggtgccctgtctcgaatctacaag

SEQ ID NO: 1293673 - DNA, 25 bp, Homo sapien
tagggcatgaaagccagtggcagac

SEQ ID NO: 1293674 - DNA, 25 bp, Homo sapien
caaacaatagtgtgagggatgcctc

SEQ ID NO: 1293675 - DNA, 25 bp, Homo sapien
ggccttaagaggtgtgtcccatgag

SEQ ID NO: 1293676 - DNA, 25 bp, Homo sapien
acctgggaccccgtcacaccaagcg

SEQ ID NO: 1293677 - DNA, 25 bp, Homo sapien
gactacctgggaccccgtcacacca

SEQ ID NO: 1293678 - DNA, 25 bp, Homo sapien
tgggaccccgtcacaccaagcgctg

SEQ ID NO: 1293679 - DNA, 25 bp, Homo sapien
accccgtcacaccaagcgctgggct

SEQ ID NO: 1293680 - DNA, 25 bp, Homo sapien
gaggttttgtgccagagccttgccc

SEQ ID NO: 1293681 - DNA, 25 bp, Homo sapien
caatataaatgagtgcctgggagga

SEQ ID NO: 1293682 - DNA, 25 bp, Homo sapien
agagcaatataaatgagtgcctggg

SEQ ID NO: 1293683 - DNA, 25 bp, Homo sapien
aggttttgtgccagagccttgcccc

SEQ ID NO: 1293684 - DNA, 25 bp, Homo sapien
atgcctggtgggctaagcgggccca

SEQ ID NO: 1293685 - DNA, 25 bp, Homo sapien
ataagagttagagacctcggcctcc

SEQ ID NO: 1293686 - DNA, 25 bp, Homo sapien
aagataagagttagagacctcggcc

SEQ ID NO: 1293687 - DNA, 25 bp, Homo sapien
gtggaagataagagttagagacctc

SEQ ID NO: 1293688 - DNA, 25 bp, Homo sapien
gaaggattctgcttctgccagcgcc

SEQ ID NO: 1293689 - DNA, 25 bp, Homo sapien
ctgaaggattctgcttctgccagcg

SEQ ID NO: 1293690 - DNA, 25 bp, Homo sapien
gcctgaaggattctgcttctgccag

SEQ ID NO: 1293691 - DNA, 25 bp, Homo sapien
tcaggcttgcgtgccaaagcctgaa

SEQ ID NO: 1293692 - DNA, 25 bp, Homo sapien
agatctgatttagcccctccctggc

SEQ ID NO: 1293693 - DNA, 25 bp, Homo sapien
cctggcccctaactgcaggggtcag

SEQ ID NO: 1293694 - DNA, 25 bp, Homo sapien
gccctgggtgggcatgcccagatct

SEQ ID NO: 1293695 - DNA, 25 bp, Homo sapien
ggcccacggtggaatgcagagcctc

SEQ ID NO: 1293696 - DNA, 25 bp, Homo sapien
acatcctgtccagccctaaggctgc

SEQ ID NO: 1293697 - DNA, 25 bp, Homo sapien
tcctgtccagccctaaggctgctgt

SEQ ID NO: 1293698 - DNA, 25 bp, Homo sapien
atcctgtccagccctaaggctgctg

SEQ ID NO: 1293699 - DNA, 25 bp, Homo sapien
cctgtccagccctaaggctgctgtc

SEQ ID NO: 1293700 - DNA, 25 bp, Homo sapien
ttcccgccgtgccaccaccttgtac

SEQ ID NO: 1293701 - DNA, 25 bp, Homo sapien
tggcgtaacaggctgccacatcacc

SEQ ID NO: 1293702 - DNA, 25 bp, Homo sapien
gccgtgccaccaccttgtacgggat

SEQ ID NO: 1293703 - DNA, 25 bp, Homo sapien
gggttggcgtaacaggctgccacat

SEQ ID NO: 1293704 - DNA, 25 bp, Homo sapien
tggccaggtctttaagaagcagaag

SEQ ID NO: 1293705 - DNA, 25 bp, Homo sapien
ccaggtaccctccagagaggtgagt

SEQ ID NO: 1293706 - DNA, 25 bp, Homo sapien
tagttggagcttagctgagccggcc

SEQ ID NO: 1293707 - DNA, 25 bp, Homo sapien
caccgggtgctaggcaggctgagga

SEQ ID NO: 1293708 - DNA, 25 bp, Homo sapien
gcactgaatagcctgtgcccgtgcc

SEQ ID NO: 1293709 - DNA, 25 bp, Homo sapien
tagcctgtgcccgtgcccaggttgt

SEQ ID NO: 1293710 - DNA, 25 bp, Homo sapien
gcctgtgcccgtgcccaggttgtag

SEQ ID NO: 1293711 - DNA, 25 bp, Homo sapien
tgaatagcctgtgcccgtgcccagg

SEQ ID NO: 1293712 - DNA, 25 bp, Homo sapien
acagggtttatggagcgggctggac

SEQ ID NO: 1293713 - DNA, 25 bp, Homo sapien
gagcgggctggactgaccacgcctc

SEQ ID NO: 1293714 - DNA, 25 bp, Homo sapien
cgggctggactgaccacgcctctgg

SEQ ID NO: 1293715 - DNA, 25 bp, Homo sapien
gaacagggtttatggagcgggctgg

SEQ ID NO: 1293716 - DNA, 25 bp, Homo sapien
ggccagatccacgacatggatgtaa

SEQ ID NO: 1293717 - DNA, 25 bp, Homo sapien
taaggctgcaatgtggcccttggcc

SEQ ID NO: 1293718 - DNA, 25 bp, Homo sapien
acgacatggatgtaatcccggacac

SEQ ID NO: 1293719 - DNA, 25 bp, Homo sapien
cagcttccttaaggctgcaatgtgg

SEQ ID NO: 1293720 - DNA, 25 bp, Homo sapien
tcattgccaaagacattcagggcct

SEQ ID NO: 1293721 - DNA, 25 bp, Homo sapien
agggcctcccgtcgcccgatcgcca

SEQ ID NO: 1293722 - DNA, 25 bp, Homo sapien
ccatcctctgtgtcatagtcattgc

SEQ ID NO: 1293723 - DNA, 25 bp, Homo sapien
cctctgtgtcatagtcattgccaaa

SEQ ID NO: 1293724 - DNA, 25 bp, Homo sapien
ggatcctcaccaatgcagccagagg

SEQ ID NO: 1293725 - DNA, 25 bp, Homo sapien
tgggtatgccctggggatcctcacc

SEQ ID NO: 1293726 - DNA, 25 bp, Homo sapien
gagacataaggcatgaggttgttgg

SEQ ID NO: 1293727 - DNA, 25 bp, Homo sapien
ctgggagacataaggcatgaggttg

SEQ ID NO: 1293728 - DNA, 25 bp, Homo sapien
ggggttgaaatagcgcagcagcact

SEQ ID NO: 1293729 - DNA, 25 bp, Homo sapien
tggggttgaaatagcgcagcagcac

SEQ ID NO: 1293730 - DNA, 25 bp, Homo sapien
gggttgaaatagcgcagcagcactg

SEQ ID NO: 1293731 - DNA, 25 bp, Homo sapien
tgctgaacaccaggttcttcacccc

SEQ ID NO: 1293732 - DNA, 25 bp, Homo sapien
gatgaagaacttggacttgccgtaa

SEQ ID NO: 1293733 - DNA, 25 bp, Homo sapien
ggttcccgtacacagtggctgagct

SEQ ID NO: 1293734 - DNA, 25 bp, Homo sapien
gcacaggtcccggatcatttcctcg

SEQ ID NO: 1293735 - DNA, 25 bp, Homo sapien
ggttaactctgtaataatccagagg

SEQ ID NO: 1293736 - DNA, 25 bp, Homo sapien
tggatggtcccggtcaggttaactc

SEQ ID NO: 1293737 - DNA, 25 bp, Homo sapien
cgcaaagtggatgaccgccataaag

SEQ ID NO: 1293738 - DNA, 25 bp, Homo sapien
agaggcttctgcaccgactcgccca

SEQ ID NO: 1293739 - DNA, 25 bp, Homo sapien
gggtgacatggccagaggttgctct

SEQ ID NO: 1293740 - DNA, 25 bp, Homo sapien
ggtgacatggccagaggttgctcta

SEQ ID NO: 1293741 - DNA, 25 bp, Homo sapien
tttgaagagacgctgtagggctccc

SEQ ID NO: 1293742 - DNA, 25 bp, Homo sapien
ctttttgaagagacgctgtagggct

SEQ ID NO: 1293743 - DNA, 25 bp, Homo sapien
aagagacgctgtagggctccctggt

SEQ ID NO: 1293744 - DNA, 25 bp, Homo sapien
gggctccctggtccaaaatgtccat

SEQ ID NO: 1293745 - DNA, 25 bp, Homo sapien
tgtgttcccagggactagccagaca

SEQ ID NO: 1293746 - DNA, 25 bp, Homo sapien
acacattccccgcccggtggtggag

SEQ ID NO: 1293747 - DNA, 25 bp, Homo sapien
acatgtaggccacatcatcacgaca

SEQ ID NO: 1293748 - DNA, 25 bp, Homo sapien
gaacccagggttttgcttctgccat

SEQ ID NO: 1293749 - DNA, 25 bp, Homo sapien
tgtggctgccaatgtagccagcccc

SEQ ID NO: 1293750 - DNA, 25 bp, Homo sapien
cacggaaggcattatggaagttatc

SEQ ID NO: 1293751 - DNA, 25 bp, Homo sapien
ggaagttatcgatgaccacaggcaa

SEQ ID NO: 1293752 - DNA, 25 bp, Homo sapien
acaggcaagtagccagcctccagca

SEQ ID NO: 1293753 - DNA, 25 bp, Homo sapien
agtgaggtgatcttaagggcccgcc

SEQ ID NO: 1293754 - DNA, 25 bp, Homo sapien
ataaacttcatgaggcagcgtgagg

SEQ ID NO: 1293755 - DNA, 25 bp, Homo sapien
cctaagctcgctttggaaggaggcg

SEQ ID NO: 1293756 - DNA, 25 bp, Homo sapien
agtgtgccctaggtaccagactggc

SEQ ID NO: 1293757 - DNA, 25 bp, Homo sapien
ggaatctgaggatccacacttcttt

SEQ ID NO: 1293758 - DNA, 25 bp, Homo sapien
gaatctgaggatccacacttctttg

SEQ ID NO: 1293759 - DNA, 25 bp, Homo sapien
aatctgaggatccacacttctttgt

SEQ ID NO: 1293760 - DNA, 25 bp, Homo sapien
gaaatagatcacatggcctcaaggg

SEQ ID NO: 1293761 - DNA, 25 bp, Homo sapien
aaaatggcagcacgattgggactcc

SEQ ID NO: 1293762 - DNA, 25 bp, Homo sapien
taggtgtaaactggctcctgggcgc

SEQ ID NO: 1293763 - DNA, 25 bp, Homo sapien
gctcagagttaggaatcccgcccaa

SEQ ID NO: 1293764 - DNA, 25 bp, Homo sapien
tgaacaaactctgcgggtagtacgg

SEQ ID NO: 1293765 - DNA, 25 bp, Homo sapien
tccgtaccaggcacttttgcatgat

SEQ ID NO: 1293766 - DNA, 25 bp, Homo sapien
aggcctttcattcccagcgaccggg

SEQ ID NO: 1293767 - DNA, 25 bp, Homo sapien
ccagcatctcggtgagacaggtgtt

SEQ ID NO: 1293768 - DNA, 25 bp, Homo sapien
acagcgggctggaatctggatcgcc

SEQ ID NO: 1293769 - DNA, 25 bp, Homo sapien
ccctgggaagcacgaaagctggtct

SEQ ID NO: 1293770 - DNA, 25 bp, Homo sapien
cggaccccgaaagtggtcgcagaga

SEQ ID NO: 1293771 - DNA, 25 bp, Homo sapien
gaggtgaaacagttgcccttcggtc

SEQ ID NO: 1293772 - DNA, 25 bp, Homo sapien
gtgggcatacgagggcggctgggtc

SEQ ID NO: 1293773 - DNA, 25 bp, Homo sapien
tcgcccactcggttttcccagtctg

SEQ ID NO: 1293774 - DNA, 25 bp, Homo sapien
ttgctcagccgtcgcccactcggtt

SEQ ID NO: 1293775 - DNA, 25 bp, Homo sapien
ctaggccgtgggcatacgagggcgg

SEQ ID NO: 1293776 - DNA, 25 bp, Homo sapien
taggagtcctcaggccggcaatgaa

SEQ ID NO: 1293777 - DNA, 25 bp, Homo sapien
gccggcaatgaatgaaccccggccg

SEQ ID NO: 1293778 - DNA, 25 bp, Homo sapien
tcctcaggccggcaatgaatgaacc

SEQ ID NO: 1293779 - DNA, 25 bp, Homo sapien
ccgagctaggagtcctcaggccggc

SEQ ID NO: 1293780 - DNA, 25 bp, Homo sapien
tgctgcagaggcaccgcctcctacg

SEQ ID NO: 1293781 - DNA, 25 bp, Homo sapien
gcttgctgcagaggcaccgcctcct

SEQ ID NO: 1293782 - DNA, 25 bp, Homo sapien
gcctcctacgcccgagccgcgggcc

SEQ ID NO: 1293783 - DNA, 25 bp, Homo sapien
ccacgcttgctgcagaggcaccgcc

SEQ ID NO: 1293784 - DNA, 25 bp, Homo sapien
cactttccacaaatggcctctgcca

SEQ ID NO: 1293785 - DNA, 25 bp, Homo sapien
gggaagaacctccatgacctgtgtc

SEQ ID NO: 1293786 - DNA, 25 bp, Homo sapien
cacattcagcgtggagattttccag

SEQ ID NO: 1293787 - DNA, 25 bp, Homo sapien
atgctggagttggcagacggccacc

SEQ ID NO: 1293788 - DNA, 25 bp, Homo sapien
tgctttctgccaggagagacctctg

SEQ ID NO: 1293789 - DNA, 25 bp, Homo sapien
tcaaggatcatgctaagtagggaac

SEQ ID NO: 1293790 - DNA, 25 bp, Homo sapien
gagctggctatgaggtacctgcacc

SEQ ID NO: 1293791 - DNA, 25 bp, Homo sapien
taacaaagggagacttcagccctca

SEQ ID NO: 1293792 - DNA, 25 bp, Homo sapien
gggcttgacagataaagtttccagc

SEQ ID NO: 1293793 - DNA, 25 bp, Homo sapien
cagggcttgacagataaagtttcca

SEQ ID NO: 1293794 - DNA, 25 bp, Homo sapien
agggcttgacagataaagtttccag

SEQ ID NO: 1293795 - DNA, 25 bp, Homo sapien
ggcttgacagataaagtttccagct

SEQ ID NO: 1293796 - DNA, 25 bp, Homo sapien
ggtatgccctcaacaccagggaaaa

SEQ ID NO: 1293797 - DNA, 25 bp, Homo sapien
aagtcatggtatgccctcaacacca

SEQ ID NO: 1293798 - DNA, 25 bp, Homo sapien
aacaagttagaggatgcggtaagtc

SEQ ID NO: 1293799 - DNA, 25 bp, Homo sapien
tagaggatgcggtaagtcatggtat

SEQ ID NO: 1293800 - DNA, 25 bp, Homo sapien
cagaaaccctctgttcatacagtag

SEQ ID NO: 1293801 - DNA, 25 bp, Homo sapien
aaaactgatattcaagtgacaattg

SEQ ID NO: 1293802 - DNA, 25 bp, Homo sapien
catacagtagctcatatttgctgaa

SEQ ID NO: 1293803 - DNA, 25 bp, Homo sapien
aaacaccaactgaaagggccagaca

SEQ ID NO: 1293804 - DNA, 25 bp, Homo sapien
ggccaagtttcctgatgccccctgt

SEQ ID NO: 1293805 - DNA, 25 bp, Homo sapien
gccctctagcatgtagaccaggtct

SEQ ID NO: 1293806 - DNA, 25 bp, Homo sapien
gatgccccctgtgcgtagggacagc

SEQ ID NO: 1293807 - DNA, 25 bp, Homo sapien
tgccacagaagagtccacgacactc

SEQ ID NO: 1293808 - DNA, 25 bp, Homo sapien
tcagctcactgcaaatcactgcaac

SEQ ID NO: 1293809 - DNA, 25 bp, Homo sapien
atgcctcagcctcgcaaatagctgg

SEQ ID NO: 1293810 - DNA, 25 bp, Homo sapien
cagctcactgcaaatcactgcaacc

SEQ ID NO: 1293811 - DNA, 25 bp, Homo sapien
catgcctcagcctcgcaaatagctg

SEQ ID NO: 1293812 - DNA, 25 bp, Homo sapien
gcacactaggcaccgttaggttagg

SEQ ID NO: 1293813 - DNA, 25 bp, Homo sapien
tctaagtcagcacttaacctggcac

SEQ ID NO: 1293814 - DNA, 25 bp, Homo sapien
ggcacatcgatccatatttccgaag

SEQ ID NO: 1293815 - DNA, 25 bp, Homo sapien
aagctactgccagacgtcacacagc

SEQ ID NO: 1293816 - DNA, 25 bp, Homo sapien
cagctgtgcagaattcccctttacc

SEQ ID NO: 1293817 - DNA, 25 bp, Homo sapien
gctgtgcagaattcccctttacctg

SEQ ID NO: 1293818 - DNA, 25 bp, Homo sapien
ctgtgcagaattcccctttacctgc

SEQ ID NO: 1293819 - DNA, 25 bp, Homo sapien
ctcagctgtgcagaattccccttta

SEQ ID NO: 1293820 - DNA, 25 bp, Homo sapien
ctggctgggaaacgcatgagctgaa

SEQ ID NO: 1293821 - DNA, 25 bp, Homo sapien
tgcctggctgggaaacgcatgagct

SEQ ID NO: 1293822 - DNA, 25 bp, Homo sapien
tgtctgcctggctgggaaacgcatg

SEQ ID NO: 1293823 - DNA, 25 bp, Homo sapien
gtctgcctggctgggaaacgcatga

SEQ ID NO: 1293824 - DNA, 25 bp, Homo sapien
aggaaaccgacccagaacataacag

SEQ ID NO: 1293825 - DNA, 25 bp, Homo sapien
cttaaccttgacagccacaactctg

SEQ ID NO: 1293826 - DNA, 25 bp, Homo sapien
caactctgaggaaaccgacccagaa

SEQ ID NO: 1293827 - DNA, 25 bp, Homo sapien
tctgaggaaaccgacccagaacata

SEQ ID NO: 1293828 - DNA, 25 bp, Homo sapien
ctgcagggccatcaaggtgttggcc

SEQ ID NO: 1293829 - DNA, 25 bp, Homo sapien
cataggtgtcatggcagtggacagc

SEQ ID NO: 1293830 - DNA, 25 bp, Homo sapien
cagggagatctcgtagcagcccatt

SEQ ID NO: 1293831 - DNA, 25 bp, Homo sapien
tggccagggcttgaccataggtgtc

SEQ ID NO: 1293832 - DNA, 25 bp, Homo sapien
tgggtccaattggaataagccatac

SEQ ID NO: 1293833 - DNA, 25 bp, Homo sapien
ccactgcaaaatgggtccatattgg

SEQ ID NO: 1293834 - DNA, 25 bp, Homo sapien
tcccatacgactggtgaacttaaaa

SEQ ID NO: 1293835 - DNA, 25 bp, Homo sapien
ggaataggtccaatatgggtccaat

SEQ ID NO: 1293836 - DNA, 25 bp, Homo sapien
aggtgcagagggatgtggcagggaa

SEQ ID NO: 1293837 - DNA, 25 bp, Homo sapien
aaggtgcagagggatgtggcaggga

SEQ ID NO: 1293838 - DNA, 25 bp, Homo sapien
ggagcaggcctttgaagtcacgaga

SEQ ID NO: 1293839 - DNA, 25 bp, Homo sapien
tcacgagatgctgggttaaagtcct

SEQ ID NO: 1293840 - DNA, 25 bp, Homo sapien
taaatgaaatggtgacgtcgcttcc

SEQ ID NO: 1293841 - DNA, 25 bp, Homo sapien
tcatacggcaaggattgtggcaact

SEQ ID NO: 1293842 - DNA, 25 bp, Homo sapien
caaaccccccgccctgacacatgca

SEQ ID NO: 1293843 - DNA, 25 bp, Homo sapien
tcaccaaaccccccgccctgacaca

SEQ ID NO: 1293844 - DNA, 25 bp, Homo sapien
accaaaccccccgccctgacacatg

SEQ ID NO: 1293845 - DNA, 25 bp, Homo sapien
aaaccccccgccctgacacatgcac

SEQ ID NO: 1293846 - DNA, 25 bp, Homo sapien
actttagctggggagatcttccctt

SEQ ID NO: 1293847 - DNA, 25 bp, Homo sapien
gatcttcccttcataagggcagcca

SEQ ID NO: 1293848 - DNA, 25 bp, Homo sapien
ctttagctggggagatcttcccttc

SEQ ID NO: 1293849 - DNA, 25 bp, Homo sapien
cttcccttcataagggcagccaaga

SEQ ID NO: 1293850 - DNA, 25 bp, Homo sapien
cacatttctgatcagtgtgcaatca

SEQ ID NO: 1293851 - DNA, 25 bp, Homo sapien
agtgtcctgagctttttggctagca

SEQ ID NO: 1293852 - DNA, 25 bp, Homo sapien
ggcagggctgtttaacacacatttc

SEQ ID NO: 1293853 - DNA, 25 bp, Homo sapien
cctgagctttttggctagcagaact

SEQ ID NO: 1293854 - DNA, 25 bp, Homo sapien
tgcagctgggcggagtaagggcagg

SEQ ID NO: 1293855 - DNA, 25 bp, Homo sapien
gcagggatggtacaattcagtgcca

SEQ ID NO: 1293856 - DNA, 25 bp, Homo sapien
agtaagggcagggatggtacaattc

SEQ ID NO: 1293857 - DNA, 25 bp, Homo sapien
gatggtacaattcagtgccaggagg

SEQ ID NO: 1293858 - DNA, 25 bp, Homo sapien
gagtctagccccattccagaacggt

SEQ ID NO: 1293859 - DNA, 25 bp, Homo sapien
tgaggataacctactccctgctggg

SEQ ID NO: 1293860 - DNA, 25 bp, Homo sapien
gaaaggataccaatgtgctctgact

SEQ ID NO: 1293861 - DNA, 25 bp, Homo sapien
gaccttacagtagagtattcgccct

SEQ ID NO: 1293862 - DNA, 25 bp, Homo sapien
ccccgcacagaaatattggctgact

SEQ ID NO: 1293863 - DNA, 25 bp, Homo sapien
gctgccttcaggattgcgtcaaacc

SEQ ID NO: 1293864 - DNA, 25 bp, Homo sapien
tggtgaagagctctgaggcagctcc

SEQ ID NO: 1293865 - DNA, 25 bp, Homo sapien
aaagatgactacttccttggctcca

SEQ ID NO: 1293866 - DNA, 25 bp, Homo sapien
tcccatacgactggtgaccttaaaa

SEQ ID NO: 1293867 - DNA, 25 bp, Homo sapien
gaaacagcgtcattgcagatatcat

SEQ ID NO: 1293868 - DNA, 25 bp, Homo sapien
cactgacacagagtagcaaaaaatt

SEQ ID NO: 1293869 - DNA, 25 bp, Homo sapien
gaattgtgtcctcctaaaaatatat

SEQ ID NO: 1293870 - DNA, 25 bp, Homo sapien
caactactgttgaaactcttgtgga

SEQ ID NO: 1293871 - DNA, 25 bp, Homo sapien
tttgcctaaatacagaaccaacgcc

SEQ ID NO: 1293872 - DNA, 25 bp, Homo sapien
aagatgttcttgtctaaaattgtaa

SEQ ID NO: 1293873 - DNA, 25 bp, Homo sapien
ccaacgcctccaaagatgttcttgt

SEQ ID NO: 1293874 - DNA, 25 bp, Homo sapien
ccttttatctggctcttgctaagca

SEQ ID NO: 1293875 - DNA, 25 bp, Homo sapien
gacaagctattcagatggacatccc

SEQ ID NO: 1293876 - DNA, 25 bp, Homo sapien
tcaagatcacagagcagtgagtggc

SEQ ID NO: 1293877 - DNA, 25 bp, Homo sapien
gaaatgctcacaacttcaggtacta

SEQ ID NO: 1293878 - DNA, 25 bp, Homo sapien
tctgaatgcccttcaagacttcagt

SEQ ID NO: 1293879 - DNA, 25 bp, Homo sapien
gggtcaggactgggtagttgatgcc

SEQ ID NO: 1293880 - DNA, 25 bp, Homo sapien
tgcccttcaagacttcagtgtggtc

SEQ ID NO: 1293881 - DNA, 25 bp, Homo sapien
tgcctcgaagcctttcaaatttggg

SEQ ID NO: 1293882 - DNA, 25 bp, Homo sapien
ggaacccacttaggagacacaaagc

SEQ ID NO: 1293883 - DNA, 25 bp, Homo sapien
gagtcctgcttcagaaagcatgtct

SEQ ID NO: 1293884 - DNA, 25 bp, Homo sapien
atcagcttgattttcactggagtag

SEQ ID NO: 1293885 - DNA, 25 bp, Homo sapien
gacacaaagctggtggtttctataa

SEQ ID NO: 1293886 - DNA, 25 bp, Homo sapien
gtaaagtgcccatagatgaggtgct

SEQ ID NO: 1293887 - DNA, 25 bp, Homo sapien
tccacaattttcacccgctttggta

SEQ ID NO: 1293888 - DNA, 25 bp, Homo sapien
catctcggggaccaacttccacaat

SEQ ID NO: 1293889 - DNA, 25 bp, Homo sapien
tttcattttgtagtccatctcgggg

SEQ ID NO: 1293890 - DNA, 25 bp, Homo sapien
ccggagggacgccaagcccaccagt

SEQ ID NO: 1293891 - DNA, 25 bp, Homo sapien
cgcggaagcgccttcctcattgctg

SEQ ID NO: 1293892 - DNA, 25 bp, Homo sapien
ggagggacgccaagcccaccagtcg

SEQ ID NO: 1293893 - DNA, 25 bp, Homo sapien
cagtcgccgcggaagcgccttcctc

SEQ ID NO: 1293894 - DNA, 25 bp, Homo sapien
tggcccagaatcccccgcggcagtc

SEQ ID NO: 1293895 - DNA, 25 bp, Homo sapien
tgttccgagttcttagcacggatta

SEQ ID NO: 1293896 - DNA, 25 bp, Homo sapien
gattaactcacgcatcacgatcttc

SEQ ID NO: 1293897 - DNA, 25 bp, Homo sapien
cacgatcttcaggattcaaacacag

SEQ ID NO: 1293898 - DNA, 25 bp, Homo sapien
ttcttagcacggattaactcacgca

SEQ ID NO: 1293899 - DNA, 25 bp, Homo sapien
tggttaactaacacaagtcgcctat

SEQ ID NO: 1293900 - DNA, 25 bp, Homo sapien
tgagagcccactcgagctggttaac

SEQ ID NO: 1293901 - DNA, 25 bp, Homo sapien
tgtcctatgacaaggttgagagccc

SEQ ID NO: 1293902 - DNA, 25 bp, Homo sapien
ccaaggcaagaacccggcatataga

SEQ ID NO: 1293903 - DNA, 25 bp, Homo sapien
taagactgtgaagaaccatataagc

SEQ ID NO: 1293904 - DNA, 25 bp, Homo sapien
tcagcttgctctctaattctgggca

SEQ ID NO: 1293905 - DNA, 25 bp, Homo sapien
tctttatatctcatggcacaatcca

SEQ ID NO: 1293906 - DNA, 25 bp, Homo sapien
aaattggctgtgctaatctacttac

SEQ ID NO: 1293907 - DNA, 25 bp, Homo sapien
cctttgcagaaagactgttggtgac

SEQ ID NO: 1293908 - DNA, 25 bp, Homo sapien
ttgaccatagcagcctggtaagcct

SEQ ID NO: 1293909 - DNA, 25 bp, Homo sapien
taaatagcatgtggttgagcttgcc

SEQ ID NO: 1293910 - DNA, 25 bp, Homo sapien
cactgtaaacatagcgaattttggc

SEQ ID NO: 1293911 - DNA, 25 bp, Homo sapien
tctgctgacctgatacagatataat

SEQ ID NO: 1293912 - DNA, 25 bp, Homo sapien
ttagacatcagggtaatgtactcag

SEQ ID NO: 1293913 - DNA, 25 bp, Homo sapien
gatataatcacaatggatctcagat

SEQ ID NO: 1293914 - DNA, 25 bp, Homo sapien
gatctcagatctttggtccatttag

SEQ ID NO: 1293915 - DNA, 25 bp, Homo sapien
agttcgttgattatagtgatggtac

SEQ ID NO: 1293916 - DNA, 25 bp, Homo sapien
gtggagaagagaagttcgttgatta

SEQ ID NO: 1293917 - DNA, 25 bp, Homo sapien
agtgatggtactataagagaaaaac

SEQ ID NO: 1293918 - DNA, 25 bp, Homo sapien
gatggtactataagagaaaaactga

SEQ ID NO: 1293919 - DNA, 25 bp, Homo sapien
atgaagagacctttatctggatctg

SEQ ID NO: 1293920 - DNA, 25 bp, Homo sapien
caactggggtagagagatgaagaga

SEQ ID NO: 1293921 - DNA, 25 bp, Homo sapien
cagctttatagtccaagcaaactct

SEQ ID NO: 1293922 - DNA, 25 bp, Homo sapien
ttatagtccaagcaaactctgcggg

SEQ ID NO: 1293923 - DNA, 25 bp, Homo sapien
atggcataaacagccgatccctttg

SEQ ID NO: 1293924 - DNA, 25 bp, Homo sapien
aaaatggcataaacagccgatccct

SEQ ID NO: 1293925 - DNA, 25 bp, Homo sapien
gcataaacagccgatccctttgagg

SEQ ID NO: 1293926 - DNA, 25 bp, Homo sapien
aacagccgatccctttgaggtatac

SEQ ID NO: 1293927 - DNA, 25 bp, Homo sapien
agtcactgttttgggcctaatttct

SEQ ID NO: 1293928 - DNA, 25 bp, Homo sapien
caacacaacttgctgtgttgtgctg

SEQ ID NO: 1293929 - DNA, 25 bp, Homo sapien
gagtcactgttttgggcctaatttc

SEQ ID NO: 1293930 - DNA, 25 bp, Homo sapien
ccaaccatgtcatgatgtagcagga

SEQ ID NO: 1293931 - DNA, 25 bp, Homo sapien
gaggatgaaaatcactactatggtt

SEQ ID NO: 1293932 - DNA, 25 bp, Homo sapien
catataaggtaatcagggcagggcc

SEQ ID NO: 1293933 - DNA, 25 bp, Homo sapien
gaaagacctgagtggacatgcccac

SEQ ID NO: 1293934 - DNA, 25 bp, Homo sapien
cattgcacccgccatggtttggagg

SEQ ID NO: 1293935 - DNA, 25 bp, Homo sapien
gttgcctcccaaacttactgtctga

SEQ ID NO: 1293936 - DNA, 25 bp, Homo sapien
gctcagccatttcccaacagcaaga

SEQ ID NO: 1293937 - DNA, 25 bp, Homo sapien
cttggaagatgggaacaatcagtcc

SEQ ID NO: 1293938 - DNA, 25 bp, Homo sapien
agcacctcttcccggccgccatccc

SEQ ID NO: 1293939 - DNA, 25 bp, Homo sapien
gagcacctcttcccggccgccatcc

SEQ ID NO: 1293940 - DNA, 25 bp, Homo sapien
acccagtctggaaaatgaggagcgt

SEQ ID NO: 1293941 - DNA, 25 bp, Homo sapien
tggctacccagtctggaaaatgagg

SEQ ID NO: 1293942 - DNA, 25 bp, Homo sapien
tagccccaggaaaacttgtcaatgc

SEQ ID NO: 1293943 - DNA, 25 bp, Homo sapien
tcacagttatagtatcctccatggt

SEQ ID NO: 1293944 - DNA, 25 bp, Homo sapien
caggaacagttctgaccccatcggt

SEQ ID NO: 1293945 - DNA, 25 bp, Homo sapien
aatgccatgtcacgacgatagcccc

SEQ ID NO: 1293946 - DNA, 25 bp, Homo sapien
gttcaattcatcacggcaaaaagag

SEQ ID NO: 1293947 - DNA, 25 bp, Homo sapien
tctcctatggaagctagttaagtgc

SEQ ID NO: 1293948 - DNA, 25 bp, Homo sapien
caggtatgtaaaagccatttcagag

SEQ ID NO: 1293949 - DNA, 25 bp, Homo sapien
gggcatcatgggtcacagaattgaa

SEQ ID NO: 1293950 - DNA, 25 bp, Homo sapien
ccagtaagtatcaggacattcccac

SEQ ID NO: 1293951 - DNA, 25 bp, Homo sapien
gacagggctgtcattgtagagccat

SEQ ID NO: 1293952 - DNA, 25 bp, Homo sapien
tttgtggagttccagtaagtatcag

SEQ ID NO: 1293953 - DNA, 25 bp, Homo sapien
cccatcagaccagatcagatcaggt

SEQ ID NO: 1293954 - DNA, 25 bp, Homo sapien
aagtgattcttgcacttcagccacc

SEQ ID NO: 1293955 - DNA, 25 bp, Homo sapien
gtgattcttgcacttcagccaccca

SEQ ID NO: 1293956 - DNA, 25 bp, Homo sapien
ctcttggcagcaagtgatccacctg

SEQ ID NO: 1293957 - DNA, 25 bp, Homo sapien
tcagtacagacagtgttttgccatc

SEQ ID NO: 1293958 - DNA, 25 bp, Homo sapien
tcctgacatagggaaaacggcatgt

SEQ ID NO: 1293959 - DNA, 25 bp, Homo sapien
gcatgtaagtaacaggagccagaat

SEQ ID NO: 1293960 - DNA, 25 bp, Homo sapien
tttcaatgtagaaggcaatatggcc

SEQ ID NO: 1293961 - DNA, 25 bp, Homo sapien
ccaggcaccgtgacagatacatttc

SEQ ID NO: 1293962 - DNA, 25 bp, Homo sapien
ttttcttatcaagtagatagagtgg

SEQ ID NO: 1293963 - DNA, 25 bp, Homo sapien
gtggatggaaccactctaagagtga

SEQ ID NO: 1293964 - DNA, 25 bp, Homo sapien
gtggtatagtccatagcggatgttc

SEQ ID NO: 1293965 - DNA, 25 bp, Homo sapien
tgttaacaaggtcgtacagctctgg

SEQ ID NO: 1293966 - DNA, 25 bp, Homo sapien
gaggccccacgtctttggagttcca

SEQ ID NO: 1293967 - DNA, 25 bp, Homo sapien
aagacacaggactcggccagtttgt

SEQ ID NO: 1293968 - DNA, 25 bp, Homo sapien
tcttccggagagctgttcccaattc

SEQ ID NO: 1293969 - DNA, 25 bp, Homo sapien
aagccttcgtgatgctttgtcgtca

SEQ ID NO: 1293970 - DNA, 25 bp, Homo sapien
ggacatcaggtatggcctaactcag

SEQ ID NO: 1293971 - DNA, 25 bp, Homo sapien
gatagtgctgtcaatctgaaaggga

SEQ ID NO: 1293972 - DNA, 25 bp, Homo sapien
cacagttgaattagaaccaggctcc

SEQ ID NO: 1293973 - DNA, 25 bp, Homo sapien
acaggtgcagatacccagggcttcc

SEQ ID NO: 1293974 - DNA, 25 bp, Homo sapien
gcctggaagaggtcggcccactcct

SEQ ID NO: 1293975 - DNA, 25 bp, Homo sapien
gaactgcggtccgaagtcggcgtag

SEQ ID NO: 1293976 - DNA, 25 bp, Homo sapien
gtgaactgcggtccgaagtcggcgt

SEQ ID NO: 1293977 - DNA, 25 bp, Homo sapien
tgaactgcggtccgaagtcggcgta

SEQ ID NO: 1293978 - DNA, 25 bp, Homo sapien
agtgaactgcggtccgaagtcggcg

SEQ ID NO: 1293979 - DNA, 25 bp, Homo sapien
gggcgggtagttgtcgcgcatgaag

SEQ ID NO: 1293980 - DNA, 25 bp, Homo sapien
cgggcgggtagttgtcgcgcatgaa

SEQ ID NO: 1293981 - DNA, 25 bp, Homo sapien
ccgggcgggtagttgtcgcgcatga

SEQ ID NO: 1293982 - DNA, 25 bp, Homo sapien
ggtactgcggccgcccctcgccctg

SEQ ID NO: 1293983 - DNA, 25 bp, Homo sapien
ctgccagtgccaccagaaccactcg

SEQ ID NO: 1293984 - DNA, 25 bp, Homo sapien
ctcgccctgccagtgccaccagaac

SEQ ID NO: 1293985 - DNA, 25 bp, Homo sapien
ctggtactgcggccgcccctcgccc

SEQ ID NO: 1293986 - DNA, 25 bp, Homo sapien
aaccaggccggcagcggccgagaat

SEQ ID NO: 1293987 - DNA, 25 bp, Homo sapien
gcaccgagaacacgccccagtggat

SEQ ID NO: 1293988 - DNA, 25 bp, Homo sapien
aacttggcttcgtcgaaccaggccg

SEQ ID NO: 1293989 - DNA, 25 bp, Homo sapien
cagtggatgaacaccccgaacttgg

SEQ ID NO: 1293990 - DNA, 25 bp, Homo sapien
gcagcaacagcgcgggacccgccgg

SEQ ID NO: 1293991 - DNA, 25 bp, Homo sapien
gcaacagcgcgggacccgccggccg

SEQ ID NO: 1293992 - DNA, 25 bp, Homo sapien
cgggacccgccggccgcgacctcat

SEQ ID NO: 1293993 - DNA, 25 bp, Homo sapien
ctcggccgctccgaggaagagcagc

SEQ ID NO: 1293994 - DNA, 25 bp, Homo sapien
gcatcgctacccctcagcgacgcgg

SEQ ID NO: 1293995 - DNA, 25 bp, Homo sapien
cggagcccgcatcgctacccctcag

SEQ ID NO: 1293996 - DNA, 25 bp, Homo sapien
gggcggctccgcccactctgactaa

SEQ ID NO: 1293997 - DNA, 25 bp, Homo sapien
gcggcccactcttaacgcgcaggtg

SEQ ID NO: 1293998 - DNA, 25 bp, Homo sapien
tgtttattttctctataatttccag

SEQ ID NO: 1293999 - DNA, 25 bp, Homo sapien
tagattatgtttattttctctataa

SEQ ID NO: 1294000 - DNA, 25 bp, Homo sapien
gggagtatagattatgtttattttc

SEQ ID NO: 1294001 - DNA, 25 bp, Homo sapien
tctctataatttccagggttttcca

SEQ ID NO: 1294002 - DNA, 25 bp, Homo sapien
tgagatccatcaagtgaggccagcc

SEQ ID NO: 1294003 - DNA, 25 bp, Homo sapien
tggaggttaccagctccaagcctgg

SEQ ID NO: 1294004 - DNA, 25 bp, Homo sapien
gagaaatgcccagctcagtactgag

SEQ ID NO: 1294005 - DNA, 25 bp, Homo sapien
caagcctggtatccaaggcctcctg

SEQ ID NO: 1294006 - DNA, 25 bp, Homo sapien
tgtagactagactcagactgtgcct

SEQ ID NO: 1294007 - DNA, 25 bp, Homo sapien
gactgaggcctctttgcaagcagaa

SEQ ID NO: 1294008 - DNA, 25 bp, Homo sapien
gaccactggcggcactttccttgga

SEQ ID NO: 1294009 - DNA, 25 bp, Homo sapien
tgccagtactgttagatagccccag

SEQ ID NO: 1294010 - DNA, 25 bp, Homo sapien
cagctccttgggctcgtccccgtgc

SEQ ID NO: 1294011 - DNA, 25 bp, Homo sapien
atacttgttcttgacgaagacgccg

SEQ ID NO: 1294012 - DNA, 25 bp, Homo sapien
ggcccgtctcggagccatacttgtt

SEQ ID NO: 1294013 - DNA, 25 bp, Homo sapien
ttcttgacgaagacgccgtagcggc

SEQ ID NO: 1294014 - DNA, 25 bp, Homo sapien
gtgacctggcccgtctcggagccat

SEQ ID NO: 1294015 - DNA, 25 bp, Homo sapien
tggtgatggtgacctctgtccccct

SEQ ID NO: 1294016 - DNA, 25 bp, Homo sapien
cctcacttccatgcggtatcggtca

SEQ ID NO: 1294017 - DNA, 25 bp, Homo sapien
tccatgcggtatcggtcaaggaagg

SEQ ID NO: 1294018 - DNA, 25 bp, Homo sapien
acttccatgcggtatcggtcaagga

SEQ ID NO: 1294019 - DNA, 25 bp, Homo sapien
ctgagacgatgcaagtcaagcacag

SEQ ID NO: 1294020 - DNA, 25 bp, Homo sapien
agacgatgcaagtcaagcacagggt

SEQ ID NO: 1294021 - DNA, 25 bp, Homo sapien
tgagacgatgcaagtcaagcacagg

SEQ ID NO: 1294022 - DNA, 25 bp, Homo sapien
gagacgatgcaagtcaagcacaggg

SEQ ID NO: 1294023 - DNA, 25 bp, Homo sapien
tgtaacttgaacttagcatttgctt

SEQ ID NO: 1294024 - DNA, 25 bp, Homo sapien
ctccttgtaacttgaacttagcatt

SEQ ID NO: 1294025 - DNA, 25 bp, Homo sapien
ccttgtaacttgaacttagcatttg

SEQ ID NO: 1294026 - DNA, 25 bp, Homo sapien
taacttgaacttagcatttgctttc

SEQ ID NO: 1294027 - DNA, 25 bp, Homo sapien
tggacgctgaagtccgcaggtagaa

SEQ ID NO: 1294028 - DNA, 25 bp, Homo sapien
gtagaagtctaggatgcccagggct

SEQ ID NO: 1294029 - DNA, 25 bp, Homo sapien
gaagtccgcaggtagaagtctagga

SEQ ID NO: 1294030 - DNA, 25 bp, Homo sapien
gtagacatttcttttggacgctgaa

SEQ ID NO: 1294031 - DNA, 25 bp, Homo sapien
catgatagtggccacatccggcaga

SEQ ID NO: 1294032 - DNA, 25 bp, Homo sapien
tcttccatgatagtggccacatccg

SEQ ID NO: 1294033 - DNA, 25 bp, Homo sapien
tagtggccacatccggcagacctct

SEQ ID NO: 1294034 - DNA, 25 bp, Homo sapien
ttatcttccatgatagtggccacat

SEQ ID NO: 1294035 - DNA, 25 bp, Homo sapien
taagagaccccagcgatgaatcctt

SEQ ID NO: 1294036 - DNA, 25 bp, Homo sapien
aataagagaccccagcgatgaatcc

SEQ ID NO: 1294037 - DNA, 25 bp, Homo sapien
agagaccccagcgatgaatcctttt

SEQ ID NO: 1294038 - DNA, 25 bp, Homo sapien
gaaataagagaccccagcgatgaat

SEQ ID NO: 1294039 - DNA, 25 bp, Homo sapien
ccaccaagagggttgagcttccagg

SEQ ID NO: 1294040 - DNA, 25 bp, Homo sapien
acaacagaaatatcggccgacttac

SEQ ID NO: 1294041 - DNA, 25 bp, Homo sapien
gcccaccaagagggttgagcttcca

SEQ ID NO: 1294042 - DNA, 25 bp, Homo sapien
aaacaacagaaatatcggccgactt

SEQ ID NO: 1294043 - DNA, 25 bp, Homo sapien
actgagaaatgtagaggaaacttac

SEQ ID NO: 1294044 - DNA, 25 bp, Homo sapien
ggtgttcagccattgcatcctcaaa

SEQ ID NO: 1294045 - DNA, 25 bp, Homo sapien
gtctctggtgttcagccattgcatc

SEQ ID NO: 1294046 - DNA, 25 bp, Homo sapien
tgttcagccattgcatcctcaaaag

SEQ ID NO: 1294047 - DNA, 25 bp, Homo sapien
ctggtgttcagccattgcatcctca

SEQ ID NO: 1294048 - DNA, 25 bp, Homo sapien
cctgagagatctgttgagagctgcc

SEQ ID NO: 1294049 - DNA, 25 bp, Homo sapien
ggtggtgcccgtccttatccgatca

SEQ ID NO: 1294050 - DNA, 25 bp, Homo sapien
gagagctgccggacttccttccctg

SEQ ID NO: 1294051 - DNA, 25 bp, Homo sapien
gaagccagatctcatccagggtggt

SEQ ID NO: 1294052 - DNA, 25 bp, Homo sapien
acgttgtagtacttgaccttgctga

SEQ ID NO: 1294053 - DNA, 25 bp, Homo sapien
tactccacgttgtagtacttgacct

SEQ ID NO: 1294054 - DNA, 25 bp, Homo sapien
catgtactccacgttgtagtacttg

SEQ ID NO: 1294055 - DNA, 25 bp, Homo sapien
ttttcatgtactccacgttgtagta

SEQ ID NO: 1294056 - DNA, 25 bp, Homo sapien
tggggagacagaggagaaggatgaa

SEQ ID NO: 1294057 - DNA, 25 bp, Homo sapien
ggggagacagaggagaaggatgaat

SEQ ID NO: 1294058 - DNA, 25 bp, Homo sapien
ctggggagacagaggagaaggatga

SEQ ID NO: 1294059 - DNA, 25 bp, Homo sapien
aatcctgcccaactcggtgaagatg

SEQ ID NO: 1294060 - DNA, 25 bp, Homo sapien
tcctgcccaactcggtgaagatggc

SEQ ID NO: 1294061 - DNA, 25 bp, Homo sapien
accaatcctgcccaactcggtgaag

SEQ ID NO: 1294062 - DNA, 25 bp, Homo sapien
cccaactcggtgaagatggcatcca

SEQ ID NO: 1294063 - DNA, 25 bp, Homo sapien
atggtgtcgtcctcccctcgatcgt

SEQ ID NO: 1294064 - DNA, 25 bp, Homo sapien
cgtcacccgtgaggtccaatatggt

SEQ ID NO: 1294065 - DNA, 25 bp, Homo sapien
ccctcgatcgtcagaaaccatcgct

SEQ ID NO: 1294066 - DNA, 25 bp, Homo sapien
cgtgaggtccaatatggtgtcgtcc

SEQ ID NO: 1294067 - DNA, 25 bp, Homo sapien
ggatgagcgatggtggtgtcagcat

SEQ ID NO: 1294068 - DNA, 25 bp, Homo sapien
gaaggatgagcgatggtggtgtcag

SEQ ID NO: 1294069 - DNA, 25 bp, Homo sapien
ctggaaagaaggatgagcgatggtg

SEQ ID NO: 1294070 - DNA, 25 bp, Homo sapien
ggaaagaaggatgagcgatggtggt

SEQ ID NO: 1294071 - DNA, 25 bp, Homo sapien
caccttcgtttgcattcacaggcag

SEQ ID NO: 1294072 - DNA, 25 bp, Homo sapien
gatggataccaaatccggaggcctg

SEQ ID NO: 1294073 - DNA, 25 bp, Homo sapien
ggctgggtgagctctaaggctcctt

SEQ ID NO: 1294074 - DNA, 25 bp, Homo sapien
ggacagaaccagacaccttcgtttg

SEQ ID NO: 1294075 - DNA, 25 bp, Homo sapien
tgggggctcctggatggagggaccc

SEQ ID NO: 1294076 - DNA, 25 bp, Homo sapien
cctggcccacctttcactccctggg

SEQ ID NO: 1294077 - DNA, 25 bp, Homo sapien
tttgcagagcttgtctgggcctggc

SEQ ID NO: 1294078 - DNA, 25 bp, Homo sapien
gcagagcttgtctgggcctggccca

SEQ ID NO: 1294079 - DNA, 25 bp, Homo sapien
tccccaggaggaagcgtgttttctc

SEQ ID NO: 1294080 - DNA, 25 bp, Homo sapien
gcctcttaaattttgtgctcagggc

SEQ ID NO: 1294081 - DNA, 25 bp, Homo sapien
tcttaaattttgtgctcagggcctc

SEQ ID NO: 1294082 - DNA, 25 bp, Homo sapien
cctcttaaattttgtgctcagggcc

SEQ ID NO: 1294083 - DNA, 25 bp, Homo sapien
ctcttaaattttgtgctcagggcct

SEQ ID NO: 1294084 - DNA, 25 bp, Homo sapien
aacctagcctcggccctgccctgac

SEQ ID NO: 1294085 - DNA, 25 bp, Homo sapien
caacctagcctcggccctgccctga

SEQ ID NO: 1294086 - DNA, 25 bp, Homo sapien
tcaacctagcctcggccctgccctg

SEQ ID NO: 1294087 - DNA, 25 bp, Homo sapien
cctccctggcttgcagccaaaggag

SEQ ID NO: 1294088 - DNA, 25 bp, Homo sapien
aagtgagccctgaagctggagccac

SEQ ID NO: 1294089 - DNA, 25 bp, Homo sapien
tgcagccaaaggagaaagtgagccc

SEQ ID NO: 1294090 - DNA, 25 bp, Homo sapien
cagagctcttggccctccctggctt

SEQ ID NO: 1294091 - DNA, 25 bp, Homo sapien
aatgcagagaagtcccgttcccgtc

SEQ ID NO: 1294092 - DNA, 25 bp, Homo sapien
tgcagagaagtcccgttcccgtctc

SEQ ID NO: 1294093 - DNA, 25 bp, Homo sapien
agagaagtcccgttcccgtctctgg

SEQ ID NO: 1294094 - DNA, 25 bp, Homo sapien
cagagaagtcccgttcccgtctctg

SEQ ID NO: 1294095 - DNA, 25 bp, Homo sapien
ctggaagaaccactgaaagcgagtc

SEQ ID NO: 1294096 - DNA, 25 bp, Homo sapien
tctgccctctggaagaaccactgaa

SEQ ID NO: 1294097 - DNA, 25 bp, Homo sapien
gaaccactgaaagcgagtctccttc

SEQ ID NO: 1294098 - DNA, 25 bp, Homo sapien
cactgaaagcgagtctccttcttgg

SEQ ID NO: 1294099 - DNA, 25 bp, Homo sapien
acgttcagtaccgtgcagagtggca

SEQ ID NO: 1294100 - DNA, 25 bp, Homo sapien
tgccccatccgggtcaagcatgagg

SEQ ID NO: 1294101 - DNA, 25 bp, Homo sapien
gatagacttgttcaaacctgggctc

SEQ ID NO: 1294102 - DNA, 25 bp, Homo sapien
caatggtcctgccttgaacatgggc

SEQ ID NO: 1294103 - DNA, 25 bp, Homo sapien
aagccacaggtccccctgcactggg

SEQ ID NO: 1294104 - DNA, 25 bp, Homo sapien
gggacaagccacaggtccccctgca

SEQ ID NO: 1294105 - DNA, 25 bp, Homo sapien
acaagccacaggtccccctgcactg

SEQ ID NO: 1294106 - DNA, 25 bp, Homo sapien
gacaagccacaggtccccctgcact

SEQ ID NO: 1294107 - DNA, 25 bp, Homo sapien
tgcaacggccgctcaaaatagggac

SEQ ID NO: 1294108 - DNA, 25 bp, Homo sapien
actgcaacggccgctcaaaataggg

SEQ ID NO: 1294109 - DNA, 25 bp, Homo sapien
cgtgaccttccactgcaacggccgc

SEQ ID NO: 1294110 - DNA, 25 bp, Homo sapien
ttggcagtcctccgtgaccttccac

SEQ ID NO: 1294111 - DNA, 25 bp, Homo sapien
gggagggacagctaatggctatgga

SEQ ID NO: 1294112 - DNA, 25 bp, Homo sapien
gagggacagctaatggctatggact

SEQ ID NO: 1294113 - DNA, 25 bp, Homo sapien
gacagctaatggctatggacttctc

SEQ ID NO: 1294114 - DNA, 25 bp, Homo sapien
gggacagctaatggctatggacttc

SEQ ID NO: 1294115 - DNA, 25 bp, Homo sapien
gggattttgaacttcaccccagcag

SEQ ID NO: 1294116 - DNA, 25 bp, Homo sapien
agtccagcatctctagcacgaacca

SEQ ID NO: 1294117 - DNA, 25 bp, Homo sapien
gcacgaaccagtggccagggatttt

SEQ ID NO: 1294118 - DNA, 25 bp, Homo sapien
gggttcccattaatccgcagtccag

SEQ ID NO: 1294119 - DNA, 25 bp, Homo sapien
cttccagtcccttctcttagcatct

SEQ ID NO: 1294120 - DNA, 25 bp, Homo sapien
ccttctcttagcatctgccttcctc

SEQ ID NO: 1294121 - DNA, 25 bp, Homo sapien
tcttccagtcccttctcttagcatc

SEQ ID NO: 1294122 - DNA, 25 bp, Homo sapien
tcccttctcttagcatctgccttcc

SEQ ID NO: 1294123 - DNA, 25 bp, Homo sapien
gtgaacacagagggaggaactggca

SEQ ID NO: 1294124 - DNA, 25 bp, Homo sapien
tgaacacagagggaggaactggcat

SEQ ID NO: 1294125 - DNA, 25 bp, Homo sapien
ctgtgaacacagagggaggaactgg

SEQ ID NO: 1294126 - DNA, 25 bp, Homo sapien
tgtgaacacagagggaggaactggc

SEQ ID NO: 1294127 - DNA, 25 bp, Homo sapien
tcttggagttgagcggtgtacgacc

SEQ ID NO: 1294128 - DNA, 25 bp, Homo sapien
aggcccttctctcggtcaaaattga

SEQ ID NO: 1294129 - DNA, 25 bp, Homo sapien
caagttctggatgatcacttccacc

SEQ ID NO: 1294130 - DNA, 25 bp, Homo sapien
tgtacgaccctttgtcctcctcaga

SEQ ID NO: 1294131 - DNA, 25 bp, Homo sapien
gctcagcggctggagataacttttc

SEQ ID NO: 1294132 - DNA, 25 bp, Homo sapien
gttccagccggagatcagtttgatc

SEQ ID NO: 1294133 - DNA, 25 bp, Homo sapien
ccaggatgtcaatgttccagccgga

SEQ ID NO: 1294134 - DNA, 25 bp, Homo sapien
tgaagattagatgtagctcagcggc

SEQ ID NO: 1294135 - DNA, 25 bp, Homo sapien
ctgggaggcgcaggacgggaagggg

SEQ ID NO: 1294136 - DNA, 25 bp, Homo sapien
gggtttctgatctcatgactcagct

SEQ ID NO: 1294137 - DNA, 25 bp, Homo sapien
gatctcatgactcagcttcttcagc

SEQ ID NO: 1294138 - DNA, 25 bp, Homo sapien
gtttctgatctcatgactcagcttc

SEQ ID NO: 1294139 - DNA, 25 bp, Homo sapien
ctgggtttctgatctcatgactcag

SEQ ID NO: 1294140 - DNA, 25 bp, Homo sapien
gtcttcatcggcatcagtgactatg

SEQ ID NO: 1294141 - DNA, 25 bp, Homo sapien
tgcccaaatcctcgaggccgggttc

SEQ ID NO: 1294142 - DNA, 25 bp, Homo sapien
tgtggcttgcggagatgtcttcatc

SEQ ID NO: 1294143 - DNA, 25 bp, Homo sapien
agtgactatgactgagtaggtgccc

SEQ ID NO: 1294144 - DNA, 25 bp, Homo sapien
cagggcttgaggcataggctttatg

SEQ ID NO: 1294145 - DNA, 25 bp, Homo sapien
ccttagggtcccctctggcctgaca

SEQ ID NO: 1294146 - DNA, 25 bp, Homo sapien
gacaccttcaatggtgccattatct

SEQ ID NO: 1294147 - DNA, 25 bp, Homo sapien
ctgacaccttcaatggtgccattat

SEQ ID NO: 1294148 - DNA, 25 bp, Homo sapien
ggcccttgtagtctttggaccactg

SEQ ID NO: 1294149 - DNA, 25 bp, Homo sapien
tccacaccaacctcgatctcatggg

SEQ ID NO: 1294150 - DNA, 25 bp, Homo sapien
caaatagataaagccctcttcatcc

SEQ ID NO: 1294151 - DNA, 25 bp, Homo sapien
taactttatcctcgatcttgaccct

SEQ ID NO: 1294152 - DNA, 25 bp, Homo sapien
gtcctccaggagcacgggatcagtg

SEQ ID NO: 1294153 - DNA, 25 bp, Homo sapien
atcagtgggcatggacggttgcccc

SEQ ID NO: 1294154 - DNA, 25 bp, Homo sapien
tgtacctggaacacgtaactctttc

SEQ ID NO: 1294155 - DNA, 25 bp, Homo sapien
ccagaccagctgaattcatggcctg

SEQ ID NO: 1294156 - DNA, 25 bp, Homo sapien
cacctggcctccctagtgtttctta

SEQ ID NO: 1294157 - DNA, 25 bp, Homo sapien
cctagtgtttcttaaatgtgaccac

SEQ ID NO: 1294158 - DNA, 25 bp, Homo sapien
tagtgtttcttaaatgtgaccactt

SEQ ID NO: 1294159 - DNA, 25 bp, Homo sapien
gcctccctagtgtttcttaaatgtg

SEQ ID NO: 1294160 - DNA, 25 bp, Homo sapien
ggatgtggcccgcacctcggatgcc

SEQ ID NO: 1294161 - DNA, 25 bp, Homo sapien
gtgaccggcttccactgctcagagc

SEQ ID NO: 1294162 - DNA, 25 bp, Homo sapien
ctcctggaaactgacgtgatagcct

SEQ ID NO: 1294163 - DNA, 25 bp, Homo sapien
cctcggatgcccgtacatcgtacgg

SEQ ID NO: 1294164 - DNA, 25 bp, Homo sapien
tccactctttgcactcaaacaggct

SEQ ID NO: 1294165 - DNA, 25 bp, Homo sapien
agtggccttcatgaaggtcactgac

SEQ ID NO: 1294166 - DNA, 25 bp, Homo sapien
tgctgggtgccgacagctcgccaac

SEQ ID NO: 1294167 - DNA, 25 bp, Homo sapien
cacggaactcatagaagtggccttc

SEQ ID NO: 1294168 - DNA, 25 bp, Homo sapien
agtgccctctggtcgctgctaaaca

SEQ ID NO: 1294169 - DNA, 25 bp, Homo sapien
agttctgttcaaggtgggtctgcac

SEQ ID NO: 1294170 - DNA, 25 bp, Homo sapien
gaaaatgatctcgatggctgaggca

SEQ ID NO: 1294171 - DNA, 25 bp, Homo sapien
taaacaagtcatgacacaggctggg

SEQ ID NO: 1294172 - DNA, 25 bp, Homo sapien
catttcattcttcccgcagttcagg

SEQ ID NO: 1294173 - DNA, 25 bp, Homo sapien
tccaggaagtagcccaggatcttgc

SEQ ID NO: 1294174 - DNA, 25 bp, Homo sapien
tgattgaccgcatgccagtccagct

SEQ ID NO: 1294175 - DNA, 25 bp, Homo sapien
agctcttccgagtcatgctggtcca

SEQ ID NO: 1294176 - DNA, 25 bp, Homo sapien
gcctcaggagggcatcggagcctca

SEQ ID NO: 1294177 - DNA, 25 bp, Homo sapien
ctgagggagctgacgagcctcctct

SEQ ID NO: 1294178 - DNA, 25 bp, Homo sapien
tagttggtgcctgccctactccagg

SEQ ID NO: 1294179 - DNA, 25 bp, Homo sapien
gccagtagtatctgtgcctcaggag

SEQ ID NO: 1294180 - DNA, 25 bp, Homo sapien
tggcctcaagccatggttacttcct

SEQ ID NO: 1294181 - DNA, 25 bp, Homo sapien
ccaagatgtgatctatgagccccag

SEQ ID NO: 1294182 - DNA, 25 bp, Homo sapien
agtttccctcagagggcgtatgtgc

SEQ ID NO: 1294183 - DNA, 25 bp, Homo sapien
agagggcgtatgtgccactggccac

SEQ ID NO: 1294184 - DNA, 25 bp, Homo sapien
agcctcgctgactgacctgacacaa

SEQ ID NO: 1294185 - DNA, 25 bp, Homo sapien
actcgtactccttccccgtcctcag

SEQ ID NO: 1294186 - DNA, 25 bp, Homo sapien
gactgacctgacacaaaactcgtac

SEQ ID NO: 1294187 - DNA, 25 bp, Homo sapien
ctcggtggcggctgagctctcgcct

SEQ ID NO: 1294188 - DNA, 25 bp, Homo sapien
ggagacattcccaaacttgctagaa

SEQ ID NO: 1294189 - DNA, 25 bp, Homo sapien
taagctcctggagggatgagaccaa

SEQ ID NO: 1294190 - DNA, 25 bp, Homo sapien
gcaaacagccggttgtacgacttta

SEQ ID NO: 1294191 - DNA, 25 bp, Homo sapien
tgttaatacctgcactaatgctggg

SEQ ID NO: 1294192 - DNA, 25 bp, Homo sapien
cctttcaaggatgcctggtgcagga

SEQ ID NO: 1294193 - DNA, 25 bp, Homo sapien
aacagactgatacgggtgggcagac

SEQ ID NO: 1294194 - DNA, 25 bp, Homo sapien
aagaagcctgtataggtcgcagaac

SEQ ID NO: 1294195 - DNA, 25 bp, Homo sapien
tgaaaaatgccagaacagtacctgg

SEQ ID NO: 1294196 - DNA, 25 bp, Homo sapien
tagatgtaataacccaggagctctg

SEQ ID NO: 1294197 - DNA, 25 bp, Homo sapien
caccttccgggagtagatgtaataa

SEQ ID NO: 1294198 - DNA, 25 bp, Homo sapien
ctggtgccttggatgggtttgttgt

SEQ ID NO: 1294199 - DNA, 25 bp, Homo sapien
gggtctttcacaggatcccatgtca

SEQ ID NO: 1294200 - DNA, 25 bp, Homo sapien
tcctccccgacccccggcatcagga

SEQ ID NO: 1294201 - DNA, 25 bp, Homo sapien
ctccccgacccccggcatcaggagg

SEQ ID NO: 1294202 - DNA, 25 bp, Homo sapien
cctcctccccgacccccggcatcag

SEQ ID NO: 1294203 - DNA, 25 bp, Homo sapien
tgcctcctccccgacccccggcatc

SEQ ID NO: 1294204 - DNA, 25 bp, Homo sapien
tctccaggtccagaacggcgaatct

SEQ ID NO: 1294205 - DNA, 25 bp, Homo sapien
agggatcgctcaggccatactggtt

SEQ ID NO: 1294206 - DNA, 25 bp, Homo sapien
tctcacagggctttccgagctgatg

SEQ ID NO: 1294207 - DNA, 25 bp, Homo sapien
tactggttcattgctcgcactctga

SEQ ID NO: 1294208 - DNA, 25 bp, Homo sapien
tacgtcagtggtgctctgtcccggg

SEQ ID NO: 1294209 - DNA, 25 bp, Homo sapien
ggcctctcggatctcgctggcatgg

SEQ ID NO: 1294210 - DNA, 25 bp, Homo sapien
ggccagaaccacataggcctctcgg

SEQ ID NO: 1294211 - DNA, 25 bp, Homo sapien
ctcgctggcatggacattggttggc

SEQ ID NO: 1294212 - DNA, 25 bp, Homo sapien
cttcaaaagcgtctgtgctgatggt

SEQ ID NO: 1294213 - DNA, 25 bp, Homo sapien
ggctcctgagggctggattgtctcc

SEQ ID NO: 1294214 - DNA, 25 bp, Homo sapien
gctcctgagggctggattgtctcct

SEQ ID NO: 1294215 - DNA, 25 bp, Homo sapien
ttcctccgggctgcatcatggtcac

SEQ ID NO: 1294216 - DNA, 25 bp, Homo sapien
cttcctccgggctgcatcatggtca

SEQ ID NO: 1294217 - DNA, 25 bp, Homo sapien
gtcttcctccgggctgcatcatggt

SEQ ID NO: 1294218 - DNA, 25 bp, Homo sapien
ctgtcttcctccgggctgcatcatg

SEQ ID NO: 1294219 - DNA, 25 bp, Homo sapien
catgacaaccaactctgaggccttg

SEQ ID NO: 1294220 - DNA, 25 bp, Homo sapien
gctctgaccttcgacgaggccttgg

SEQ ID NO: 1294221 - DNA, 25 bp, Homo sapien
gaggccttggattgggcaccgacaa

SEQ ID NO: 1294222 - DNA, 25 bp, Homo sapien
tgctgatggctctcacccggaaccg

SEQ ID NO: 1294223 - DNA, 25 bp, Homo sapien
tgggcggggcccaagtcaggatgag

SEQ ID NO: 1294224 - DNA, 25 bp, Homo sapien
ttcacatccaggcatcggacgttca

SEQ ID NO: 1294225 - DNA, 25 bp, Homo sapien
atccaggcatcggacgttcagtggg

SEQ ID NO: 1294226 - DNA, 25 bp, Homo sapien
cgctcaatggtgtaggcagtgatgg

SEQ ID NO: 1294227 - DNA, 25 bp, Homo sapien
agaggatcttccgacgtctcgagga

SEQ ID NO: 1294228 - DNA, 25 bp, Homo sapien
caccttcagggatgcctggcggtct

SEQ ID NO: 1294229 - DNA, 25 bp, Homo sapien
agcacgtaggtgctctgttcccggg

SEQ ID NO: 1294230 - DNA, 25 bp, Homo sapien
ccttgtaggtgcaggacaccttcag

SEQ ID NO: 1294231 - DNA, 25 bp, Homo sapien
tcctggtctcacctgggaaccacag

SEQ ID NO: 1294232 - DNA, 25 bp, Homo sapien
cattgagtttgtggggggtcctggt

SEQ ID NO: 1294233 - DNA, 25 bp, Homo sapien
aagtggggggccattgagtttgtgg

SEQ ID NO: 1294234 - DNA, 25 bp, Homo sapien
accacagaaactggggggtctggag

SEQ ID NO: 1294235 - DNA, 25 bp, Homo sapien
tgaggctcagctcaggccttgggtg

SEQ ID NO: 1294236 - DNA, 25 bp, Homo sapien
cagagagagaggctggtgaggctca

SEQ ID NO: 1294237 - DNA, 25 bp, Homo sapien
ggctggtgaggctcagctcaggcct

SEQ ID NO: 1294238 - DNA, 25 bp, Homo sapien
aggctcagctcaggccttgggtggg

SEQ ID NO: 1294239 - DNA, 25 bp, Homo sapien
tttgccaaggcaggcagtggagaac

SEQ ID NO: 1294240 - DNA, 25 bp, Homo sapien
ccaaggcaggcagtggagaactctc

SEQ ID NO: 1294241 - DNA, 25 bp, Homo sapien
ctccagggctttgccaaggcaggca

SEQ ID NO: 1294242 - DNA, 25 bp, Homo sapien
tgccaaggcaggcagtggagaactc

SEQ ID NO: 1294243 - DNA, 25 bp, Homo sapien
tctaacacatcttccgaaaacaagc

SEQ ID NO: 1294244 - DNA, 25 bp, Homo sapien
agcaccgaggtgaattccacgctgg

SEQ ID NO: 1294245 - DNA, 25 bp, Homo sapien
gagaagggttccttctcacgagcaa

SEQ ID NO: 1294246 - DNA, 25 bp, Homo sapien
tccttctcacgagcaaagactggct

SEQ ID NO: 1294247 - DNA, 25 bp, Homo sapien
aagatctctgaatcgaagccagcat

SEQ ID NO: 1294248 - DNA, 25 bp, Homo sapien
tgaagatctctgaatcgaagccagc

SEQ ID NO: 1294249 - DNA, 25 bp, Homo sapien
gaagatctctgaatcgaagccagca

SEQ ID NO: 1294250 - DNA, 25 bp, Homo sapien
aaaccaaaggcaaacagagttggag

SEQ ID NO: 1294251 - DNA, 25 bp, Homo sapien
gcaaacagagttggagaaggttcag

SEQ ID NO: 1294252 - DNA, 25 bp, Homo sapien
agagttggagaaggttcagagccca

SEQ ID NO: 1294253 - DNA, 25 bp, Homo sapien
aaaggcaaacagagttggagaaggt

SEQ ID NO: 1294254 - DNA, 25 bp, Homo sapien
ggcttgactctgggcatggactgtg

SEQ ID NO: 1294255 - DNA, 25 bp, Homo sapien
caaatttctgcacaagagcttggcc

SEQ ID NO: 1294256 - DNA, 25 bp, Homo sapien
atttctgcacaagagcttggcctgg

SEQ ID NO: 1294257 - DNA, 25 bp, Homo sapien
cttgactctgggcatggactgtggg

SEQ ID NO: 1294258 - DNA, 25 bp, Homo sapien
gactatcgcttgctgtgaaggcccc

SEQ ID NO: 1294259 - DNA, 25 bp, Homo sapien
ggaggagactatcgcttgctgtgaa

SEQ ID NO: 1294260 - DNA, 25 bp, Homo sapien
gctgatggaggagactatcgcttgc

SEQ ID NO: 1294261 - DNA, 25 bp, Homo sapien
gagactatcgcttgctgtgaaggcc

SEQ ID NO: 1294262 - DNA, 25 bp, Homo sapien
ttgtctgcccagcttgggtttgctg

SEQ ID NO: 1294263 - DNA, 25 bp, Homo sapien
tgtggcccggagtgcctgttggggt

SEQ ID NO: 1294264 - DNA, 25 bp, Homo sapien
cttgggtttgctgtggcccggagtg

SEQ ID NO: 1294265 - DNA, 25 bp, Homo sapien
atgtccttgtctgcccagcttgggt

SEQ ID NO: 1294266 - DNA, 25 bp, Homo sapien
ctggccgtgggcgttcttcactcgc

SEQ ID NO: 1294267 - DNA, 25 bp, Homo sapien
cactcgcacagtgtaagttgctgag

SEQ ID NO: 1294268 - DNA, 25 bp, Homo sapien
tgcggacgaggactttggcgaagga

SEQ ID NO: 1294269 - DNA, 25 bp, Homo sapien
aagttgctgagtcctcaatggcgca

SEQ ID NO: 1294270 - DNA, 25 bp, Homo sapien
cagcccgtagttgttggtgattcgg

SEQ ID NO: 1294271 - DNA, 25 bp, Homo sapien
tgattcggtattttccggcacgaaa

SEQ ID NO: 1294272 - DNA, 25 bp, Homo sapien
ggcggggatcaatccgtgtgtcatt

SEQ ID NO: 1294273 - DNA, 25 bp, Homo sapien
cagggacagcagcccgtagttgttg

SEQ ID NO: 1294274 - DNA, 25 bp, Homo sapien
tgaggcctggacagtgcaggtcagc

SEQ ID NO: 1294275 - DNA, 25 bp, Homo sapien
gtggtgaggcctggacagtgcaggt

SEQ ID NO: 1294276 - DNA, 25 bp, Homo sapien
cctggacagtgcaggtcagcaggac

SEQ ID NO: 1294277 - DNA, 25 bp, Homo sapien
tggtggtgaggcctggacagtgcag

SEQ ID NO: 1294278 - DNA, 25 bp, Homo sapien
aagagggatccagaaccagggcccg

SEQ ID NO: 1294279 - DNA, 25 bp, Homo sapien
ccgcggccgtagcacagctccctca

SEQ ID NO: 1294280 - DNA, 25 bp, Homo sapien
agaaccagggcccgcggccgtagca

SEQ ID NO: 1294281 - DNA, 25 bp, Homo sapien
cggcgtgggagcgaagagggatcca

SEQ ID NO: 1294282 - DNA, 25 bp, Homo sapien
ggtctggcgtctcagctgggcttcc

SEQ ID NO: 1294283 - DNA, 25 bp, Homo sapien
agtcctctcccagtcattgccgaag

SEQ ID NO: 1294284 - DNA, 25 bp, Homo sapien
tctggcgcagcagccggtgggtctg

SEQ ID NO: 1294285 - DNA, 25 bp, Homo sapien
tgcaggaaggcgatctcagtcctct

SEQ ID NO: 1294286 - DNA, 25 bp, Homo sapien
tgctgccagggcgtagtccgcggcg

SEQ ID NO: 1294287 - DNA, 25 bp, Homo sapien
agacagctcggaggaggccgtcaga

SEQ ID NO: 1294288 - DNA, 25 bp, Homo sapien
tagtccgcggcgctgaactcatgct

SEQ ID NO: 1294289 - DNA, 25 bp, Homo sapien
acagctcggaggaggccgtcagagc

SEQ ID NO: 1294290 - DNA, 25 bp, Homo sapien
gagtaaatggctcttgcaggattgg

SEQ ID NO: 1294291 - DNA, 25 bp, Homo sapien
aaatggctcttgcaggattggctgg

SEQ ID NO: 1294292 - DNA, 25 bp, Homo sapien
tgctcccagaaggaggggagtaaat

SEQ ID NO: 1294293 - DNA, 25 bp, Homo sapien
taaatggctcttgcaggattggctg

SEQ ID NO: 1294294 - DNA, 25 bp, Homo sapien
caaacagggtttccagaggacaggg

SEQ ID NO: 1294295 - DNA, 25 bp, Homo sapien
tcagaaagcagggatgtccctcccc

SEQ ID NO: 1294296 - DNA, 25 bp, Homo sapien
tccctcctcaaacagggtttccaga

SEQ ID NO: 1294297 - DNA, 25 bp, Homo sapien
cacatgggggtctccagagagccaa

SEQ ID NO: 1294298 - DNA, 25 bp, Homo sapien
cagaggagcccatgcgcaggctgtg

SEQ ID NO: 1294299 - DNA, 25 bp, Homo sapien
agaggagcccatgcgcaggctgtgc

SEQ ID NO: 1294300 - DNA, 25 bp, Homo sapien
gaaggtccgcctccgcacagaggag

SEQ ID NO: 1294301 - DNA, 25 bp, Homo sapien
ctgctgcggaaggtccgcctccgca

SEQ ID NO: 1294302 - DNA, 25 bp, Homo sapien
ggcaccgggagaagaatgcgatccc

SEQ ID NO: 1294303 - DNA, 25 bp, Homo sapien
ttgccctcggctcagcgggcaccgg

SEQ ID NO: 1294304 - DNA, 25 bp, Homo sapien
gagtctctggggagaagattcctga

SEQ ID NO: 1294305 - DNA, 25 bp, Homo sapien
gatcccggagactgcaccgtcttaa

SEQ ID NO: 1294306 - DNA, 25 bp, Homo sapien
gtccctctagggcgctgatttgagg

SEQ ID NO: 1294307 - DNA, 25 bp, Homo sapien
aatgggggtccctctagggcgctga

SEQ ID NO: 1294308 - DNA, 25 bp, Homo sapien
tctgttgcaacagcgggtgtaatgg

SEQ ID NO: 1294309 - DNA, 25 bp, Homo sapien
gggtccctctagggcgctgatttga

SEQ ID NO: 1294310 - DNA, 25 bp, Homo sapien
cccagatgggctgaacccaaggcag

SEQ ID NO: 1294311 - DNA, 25 bp, Homo sapien
tagctaccgtttattgggcactgcc

SEQ ID NO: 1294312 - DNA, 25 bp, Homo sapien
atttgagcccagatgggctgaaccc

SEQ ID NO: 1294313 - DNA, 25 bp, Homo sapien
ttgggcactgcccatgtaccaggca

SEQ ID NO: 1294314 - DNA, 25 bp, Homo sapien
cagtgtgttattgtacccgtccagg

SEQ ID NO: 1294315 - DNA, 25 bp, Homo sapien
tgtcgagctagattgtgaaactggc

SEQ ID NO: 1294316 - DNA, 25 bp, Homo sapien
tgaaatcgtgcaacgtcaggcagtt

SEQ ID NO: 1294317 - DNA, 25 bp, Homo sapien
caaggagaggcaaattccctgagca

SEQ ID NO: 1294318 - DNA, 25 bp, Homo sapien
ttctctcaagggcacccgtctgagg

SEQ ID NO: 1294319 - DNA, 25 bp, Homo sapien
ggctcagcgagcacgcgcttgtcta

SEQ ID NO: 1294320 - DNA, 25 bp, Homo sapien
ccgctgcagtccttatcatgctgct

SEQ ID NO: 1294321 - DNA, 25 bp, Homo sapien
tttgctccggtgaggagcgcaccca

SEQ ID NO: 1294322 - DNA, 25 bp, Homo sapien
cactgtgtagcacatttgggtcaga

SEQ ID NO: 1294323 - DNA, 25 bp, Homo sapien
tctgaagctgacctttaggcctaag

SEQ ID NO: 1294324 - DNA, 25 bp, Homo sapien
gatgttctgtctgtgcaaatcccca

SEQ ID NO: 1294325 - DNA, 25 bp, Homo sapien
aatccagttctgtgggctgctccag

SEQ ID NO: 1294326 - DNA, 25 bp, Homo sapien
ggcctgtggggcgtagaatgggaat

SEQ ID NO: 1294327 - DNA, 25 bp, Homo sapien
cctgtggggcgtagaatgggaattg

SEQ ID NO: 1294328 - DNA, 25 bp, Homo sapien
gggcgtagaatgggaattgagcttc

SEQ ID NO: 1294329 - DNA, 25 bp, Homo sapien
cgtagaatgggaattgagcttcggg

SEQ ID NO: 1294330 - DNA, 25 bp, Homo sapien
cagggatcaggacgtgctcctggat

SEQ ID NO: 1294331 - DNA, 25 bp, Homo sapien
caggctatgccgctgtggagctcct

SEQ ID NO: 1294332 - DNA, 25 bp, Homo sapien
tgggtccagacaccctgatctggga

SEQ ID NO: 1294333 - DNA, 25 bp, Homo sapien
gccctaagtaggtgatctcggacag

SEQ ID NO: 1294334 - DNA, 25 bp, Homo sapien
tgtagctcaggtagcagagtactgc

SEQ ID NO: 1294335 - DNA, 25 bp, Homo sapien
tccggagaaggagtaggtccatgtc

SEQ ID NO: 1294336 - DNA, 25 bp, Homo sapien
tagcagagtactgcgacgaggaagc

SEQ ID NO: 1294337 - DNA, 25 bp, Homo sapien
gtgcaggcggcttggtgacatatct

SEQ ID NO: 1294338 - DNA, 25 bp, Homo sapien
ggcatgccccatgcaagtggccagt

SEQ ID NO: 1294339 - DNA, 25 bp, Homo sapien
ttccgaacaaacctgaggaccagag

SEQ ID NO: 1294340 - DNA, 25 bp, Homo sapien
caattggtgcactgggattcaggtg

SEQ ID NO: 1294341 - DNA, 25 bp, Homo sapien
cagtgttggctgttccgtgaggcat

SEQ ID NO: 1294342 - DNA, 25 bp, Homo sapien
tgggttaatattaaggtgagtttgc

SEQ ID NO: 1294343 - DNA, 25 bp, Homo sapien
tgctttgccaaggtacacataaggc

SEQ ID NO: 1294344 - DNA, 25 bp, Homo sapien
ctgggttaatattaaggtgagtttg

SEQ ID NO: 1294345 - DNA, 25 bp, Homo sapien
tttgctttgccaaggtacacataag

SEQ ID NO: 1294346 - DNA, 25 bp, Homo sapien
cttggcccaggtgggaacgcaaatc

SEQ ID NO: 1294347 - DNA, 25 bp, Homo sapien
caaatcatgatggtgccaaggaact

SEQ ID NO: 1294348 - DNA, 25 bp, Homo sapien
gggtcaggccgaagaactcatattc

SEQ ID NO: 1294349 - DNA, 25 bp, Homo sapien
tcttcactcggcacatgtagggggc

SEQ ID NO: 1294350 - DNA, 25 bp, Homo sapien
tgcggttgacctggagctctaagtg

SEQ ID NO: 1294351 - DNA, 25 bp, Homo sapien
atgtcttccagggttagccggtggc

SEQ ID NO: 1294352 - DNA, 25 bp, Homo sapien
catctgaatcgatctcactttggag

SEQ ID NO: 1294353 - DNA, 25 bp, Homo sapien
actttggagatacaggtcacatcag

SEQ ID NO: 1294354 - DNA, 25 bp, Homo sapien
aggttgcaggacttccgggtgatcc

SEQ ID NO: 1294355 - DNA, 25 bp, Homo sapien
cgggtgatccgctgacagcccttct

SEQ ID NO: 1294356 - DNA, 25 bp, Homo sapien
tagtagagctccgtgaggttgcccg

SEQ ID NO: 1294357 - DNA, 25 bp, Homo sapien
tcagtcatcttggtggctgaccggc

SEQ ID NO: 1294358 - DNA, 25 bp, Homo sapien
ggcccgctgtcccacgtcaggatgt

SEQ ID NO: 1294359 - DNA, 25 bp, Homo sapien
ctgtcccacgtcaggatgttttcaa

SEQ ID NO: 1294360 - DNA, 25 bp, Homo sapien
gctgtcccacgtcaggatgttttca

SEQ ID NO: 1294361 - DNA, 25 bp, Homo sapien
ccgctgtcccacgtcaggatgtttt

SEQ ID NO: 1294362 - DNA, 25 bp, Homo sapien
ctggagcagatccgaggggtcctca

SEQ ID NO: 1294363 - DNA, 25 bp, Homo sapien
aatttcacgtgctggagcagatccg

SEQ ID NO: 1294364 - DNA, 25 bp, Homo sapien
gaatttcacgtgctggagcagatcc

SEQ ID NO: 1294365 - DNA, 25 bp, Homo sapien
ctggaatttcacgtgctggagcaga

SEQ ID NO: 1294366 - DNA, 25 bp, Homo sapien
atcttcctggaacgcccagcttgat

SEQ ID NO: 1294367 - DNA, 25 bp, Homo sapien
agccctggcgggacagtggcagaga

SEQ ID NO: 1294368 - DNA, 25 bp, Homo sapien
aagctctgccttttcgtgggcctcg

SEQ ID NO: 1294369 - DNA, 25 bp, Homo sapien
gctgggaagcagactggagggggtc

SEQ ID NO: 1294370 - DNA, 25 bp, Homo sapien
cacagtcaagatggtcagcagcgtc

SEQ ID NO: 1294371 - DNA, 25 bp, Homo sapien
cagtcaagatggtcagcagcgtcct

SEQ ID NO: 1294372 - DNA, 25 bp, Homo sapien
tcaagatggtcagcagcgtcctcat

SEQ ID NO: 1294373 - DNA, 25 bp, Homo sapien
ccacagtcaagatggtcagcagcgt

SEQ ID NO: 1294374 - DNA, 25 bp, Homo sapien
gcacagagccctcccttggcctcta

SEQ ID NO: 1294375 - DNA, 25 bp, Homo sapien
tggcacagagccctcccttggcctc

SEQ ID NO: 1294376 - DNA, 25 bp, Homo sapien
acagagccctcccttggcctctact

SEQ ID NO: 1294377 - DNA, 25 bp, Homo sapien
ggggctggcacagagccctcccttg

SEQ ID NO: 1294378 - DNA, 25 bp, Homo sapien
gcttcccagatggtccactaagcac

SEQ ID NO: 1294379 - DNA, 25 bp, Homo sapien
ggcttcccagatggtccactaagca

SEQ ID NO: 1294380 - DNA, 25 bp, Homo sapien
tcagccccactttatgcacacagga

SEQ ID NO: 1294381 - DNA, 25 bp, Homo sapien
tgagctcagggaagatgcgcaggca

SEQ ID NO: 1294382 - DNA, 25 bp, Homo sapien
ctttatgcacacaggaatgagctca

SEQ ID NO: 1294383 - DNA, 25 bp, Homo sapien
gatgcgcaggcagccattgatcaaa

SEQ ID NO: 1294384 - DNA, 25 bp, Homo sapien
tagatggagaattctaccggccacc

SEQ ID NO: 1294385 - DNA, 25 bp, Homo sapien
tttgaagttacctccacgaagcagc

SEQ ID NO: 1294386 - DNA, 25 bp, Homo sapien
tcggtcctacgggtgaaaactcagc

SEQ ID NO: 1294387 - DNA, 25 bp, Homo sapien
gctggtgccagagagaacatcggta

SEQ ID NO: 1294388 - DNA, 25 bp, Homo sapien
caactggatttttatctgggcctaa

SEQ ID NO: 1294389 - DNA, 25 bp, Homo sapien
ccaactggatttttatctgggccta

SEQ ID NO: 1294390 - DNA, 25 bp, Homo sapien
gaggtatagcaggtgtgcctccagt

SEQ ID NO: 1294391 - DNA, 25 bp, Homo sapien
tgatgtccgcagtgacctgacctca

SEQ ID NO: 1294392 - DNA, 25 bp, Homo sapien
cccttggtggtgtccgcccttgatg

SEQ ID NO: 1294393 - DNA, 25 bp, Homo sapien
ggtgtgcctccagtggtctcaagtt

SEQ ID NO: 1294394 - DNA, 25 bp, Homo sapien
ctgtttcatgttgtccggggataat

SEQ ID NO: 1294395 - DNA, 25 bp, Homo sapien
tgtttcatgttgtccggggataatt

SEQ ID NO: 1294396 - DNA, 25 bp, Homo sapien
tcatgttgtccggggataatttttc

SEQ ID NO: 1294397 - DNA, 25 bp, Homo sapien
ggaagcccagtagtccttgcaaagg

SEQ ID NO: 1294398 - DNA, 25 bp, Homo sapien
gacttcccggaagtgcaatgcccct

SEQ ID NO: 1294399 - DNA, 25 bp, Homo sapien
gttgctcagcccgacaggcaaacag

SEQ ID NO: 1294400 - DNA, 25 bp, Homo sapien
gcaaacagccgctaggtggacttcc

SEQ ID NO: 1294401 - DNA, 25 bp, Homo sapien
cggcccctgtcctcggtcctctggg

SEQ ID NO: 1294402 - DNA, 25 bp, Homo sapien
caatttctgattccctcgcctcctc

SEQ ID NO: 1294403 - DNA, 25 bp, Homo sapien
agctgcccgcatcgctgtcctcaat

SEQ ID NO: 1294404 - DNA, 25 bp, Homo sapien
tgtaatgccccaatgtccggcccct

SEQ ID NO: 1294405 - DNA, 25 bp, Homo sapien
accagattcggctccggtggtaagg

SEQ ID NO: 1294406 - DNA, 25 bp, Homo sapien
gattcggctccggtggtaaggtgcc

SEQ ID NO: 1294407 - DNA, 25 bp, Homo sapien
ccagattcggctccggtggtaaggt

SEQ ID NO: 1294408 - DNA, 25 bp, Homo sapien
cagattcggctccggtggtaaggtg

SEQ ID NO: 1294409 - DNA, 25 bp, Homo sapien
ctcagccaaatagccagaggaccca

SEQ ID NO: 1294410 - DNA, 25 bp, Homo sapien
ccccttctcagccaaatagccagag

SEQ ID NO: 1294411 - DNA, 25 bp, Homo sapien
aaacccgagtccttggagaattcag

SEQ ID NO: 1294412 - DNA, 25 bp, Homo sapien
cccgagtccttggagaattcaggtg

SEQ ID NO: 1294413 - DNA, 25 bp, Homo sapien
agaatcccaagcagaggagccttcg

SEQ ID NO: 1294414 - DNA, 25 bp, Homo sapien
gaagaatcccaagcagaggagcctt

SEQ ID NO: 1294415 - DNA, 25 bp, Homo sapien
aggagccttcgcttgggaccagagg

SEQ ID NO: 1294416 - DNA, 25 bp, Homo sapien
ctgaagaatcccaagcagaggagcc

SEQ ID NO: 1294417 - DNA, 25 bp, Homo sapien
aatgtagggctggaagctgacgcca

SEQ ID NO: 1294418 - DNA, 25 bp, Homo sapien
gtggttcaatgtagggctggaagct

SEQ ID NO: 1294419 - DNA, 25 bp, Homo sapien
cagcctccgagtgccctggagcctg

SEQ ID NO: 1294420 - DNA, 25 bp, Homo sapien
gccctgactcgaggcgtcggcctga

SEQ ID NO: 1294421 - DNA, 25 bp, Homo sapien
tcattcacggactctggtctgctgg

SEQ ID NO: 1294422 - DNA, 25 bp, Homo sapien
ctgaaaggttgccacagggtgtgtg

SEQ ID NO: 1294423 - DNA, 25 bp, Homo sapien
ttcacggactctggtctgctgggct

SEQ ID NO: 1294424 - DNA, 25 bp, Homo sapien
tctgctgggctgaaaggttgccaca

SEQ ID NO: 1294425 - DNA, 25 bp, Homo sapien
atgagggtcttccagatcacacccc

SEQ ID NO: 1294426 - DNA, 25 bp, Homo sapien
ccgtggcatctttgcccgctgaaac

SEQ ID NO: 1294427 - DNA, 25 bp, Homo sapien
taacagcagtatcagaagcgatggc

SEQ ID NO: 1294428 - DNA, 25 bp, Homo sapien
atcagaagcgatggcagcaccagga

SEQ ID NO: 1294429 - DNA, 25 bp, Homo sapien
ctgaacgtgtagatggttctggcac

SEQ ID NO: 1294430 - DNA, 25 bp, Homo sapien
tgtatttcgggacactgaacgtgta

SEQ ID NO: 1294431 - DNA, 25 bp, Homo sapien
ggtgggcttagagaacttgctgtat

SEQ ID NO: 1294432 - DNA, 25 bp, Homo sapien
cactgaggcagtggtgttcgctggc

SEQ ID NO: 1294433 - DNA, 25 bp, Homo sapien
attttattagggctgactgccagaa

SEQ ID NO: 1294434 - DNA, 25 bp, Homo sapien
agattttattagggctgactgccag

SEQ ID NO: 1294435 - DNA, 25 bp, Homo sapien
ttttattagggctgactgccagaag

SEQ ID NO: 1294436 - DNA, 25 bp, Homo sapien
gattttattagggctgactgccaga

SEQ ID NO: 1294437 - DNA, 25 bp, Homo sapien
ggaggagcgggcctagcctgggggc

SEQ ID NO: 1294438 - DNA, 25 bp, Homo sapien
ggagcgggcctagcctgggggcagg

SEQ ID NO: 1294439 - DNA, 25 bp, Homo sapien
ggtggaggagcgggcctagcctggg

SEQ ID NO: 1294440 - DNA, 25 bp, Homo sapien
gcgggcctagcctgggggcaggaaa

SEQ ID NO: 1294441 - DNA, 25 bp, Homo sapien
tccagaatgccacctcatacttcag

SEQ ID NO: 1294442 - DNA, 25 bp, Homo sapien
cactcaggatctcctccgtctgggt

SEQ ID NO: 1294443 - DNA, 25 bp, Homo sapien
cacctcatacttcagatccagtggg

SEQ ID NO: 1294444 - DNA, 25 bp, Homo sapien
atctcctccgtctgggtgagcacca

SEQ ID NO: 1294445 - DNA, 25 bp, Homo sapien
agcatcaactcaaattcccaaatca

SEQ ID NO: 1294446 - DNA, 25 bp, Homo sapien
tagtccagtcagtacaactctcggg

SEQ ID NO: 1294447 - DNA, 25 bp, Homo sapien
aatgcaaaatccattcactccatcc

SEQ ID NO: 1294448 - DNA, 25 bp, Homo sapien
gtgtgggctgggattacccaaccca

SEQ ID NO: 1294449 - DNA, 25 bp, Homo sapien
caaagagccttttgagcgactgagt

SEQ ID NO: 1294450 - DNA, 25 bp, Homo sapien
gagcttctggtttcaccgtctgaga

SEQ ID NO: 1294451 - DNA, 25 bp, Homo sapien
gcttcctagaagtcccctggtttga

SEQ ID NO: 1294452 - DNA, 25 bp, Homo sapien
tattagataaaagccaggtccacag

SEQ ID NO: 1294453 - DNA, 25 bp, Homo sapien
ctgtgcccagctacaatctcttaat

SEQ ID NO: 1294454 - DNA, 25 bp, Homo sapien
actgtgcccagctacaatctcttaa

SEQ ID NO: 1294455 - DNA, 25 bp, Homo sapien
cactgtgcccagctacaatctctta

SEQ ID NO: 1294456 - DNA, 25 bp, Homo sapien
tccactgggtactgactaggtatca

SEQ ID NO: 1294457 - DNA, 25 bp, Homo sapien
taccgatagtctgttgagggccttc

SEQ ID NO: 1294458 - DNA, 25 bp, Homo sapien
ccttaccttgtgaagcagtgccttg

SEQ ID NO: 1294459 - DNA, 25 bp, Homo sapien
caggaaggatcaccctggcttggga

SEQ ID NO: 1294460 - DNA, 25 bp, Homo sapien
tccagttcacatctatgtccaccgg

SEQ ID NO: 1294461 - DNA, 25 bp, Homo sapien
cccgaggtcagaaagatccagttca

SEQ ID NO: 1294462 - DNA, 25 bp, Homo sapien
tactagcggtatcaagtttcttagc

SEQ ID NO: 1294463 - DNA, 25 bp, Homo sapien
ttactagcggtatcaagtccactgg

SEQ ID NO: 1294464 - DNA, 25 bp, Homo sapien
acttggagctgggagaaaccgtccg

SEQ ID NO: 1294465 - DNA, 25 bp, Homo sapien
gcgtcccttgaacttgttgtacagg

SEQ ID NO: 1294466 - DNA, 25 bp, Homo sapien
tcaggcacatcatagaacatagcag

SEQ ID NO: 1294467 - DNA, 25 bp, Homo sapien
ggtaatccaggtattcggactccac

SEQ ID NO: 1294468 - DNA, 25 bp, Homo sapien
ggagccatgtcaggtacacgctgaa

SEQ ID NO: 1294469 - DNA, 25 bp, Homo sapien
ccctgggagccatgtcaggtacacg

SEQ ID NO: 1294470 - DNA, 25 bp, Homo sapien
aggtacacgctgaagttctgggaga

SEQ ID NO: 1294471 - DNA, 25 bp, Homo sapien
catgtcaggtacacgctgaagttct

SEQ ID NO: 1294472 - DNA, 25 bp, Homo sapien
gcagggggccccagcgctcgggccc

SEQ ID NO: 1294473 - DNA, 25 bp, Homo sapien
cggcctcaatgccattggcgggatc

SEQ ID NO: 1294474 - DNA, 25 bp, Homo sapien
ctcaatgccattggcgggatccgag

SEQ ID NO: 1294475 - DNA, 25 bp, Homo sapien
gatccgagcgcgtttctgagccgga

SEQ ID NO: 1294476 - DNA, 25 bp, Homo sapien
ctgagccggatgctgagctccgcgc

SEQ ID NO: 1294477 - DNA, 25 bp, Homo sapien
aagctgtctttctgaccccgaaggc

SEQ ID NO: 1294478 - DNA, 25 bp, Homo sapien
cgccacgacgcgcaatattatgcgg

SEQ ID NO: 1294479 - DNA, 25 bp, Homo sapien
gccgaatggtgtgtatcgacaccga

SEQ ID NO: 1294480 - DNA, 25 bp, Homo sapien
tattatgcggccctttaggaggacg

SEQ ID NO: 1294481 - DNA, 25 bp, Homo sapien
gaaactgggatcagctttggtccca

SEQ ID NO: 1294482 - DNA, 25 bp, Homo sapien
gagcttggtgggtccaaaagttgct

SEQ ID NO: 1294483 - DNA, 25 bp, Homo sapien
gataattatttgaaactgggatcag

SEQ ID NO: 1294484 - DNA, 25 bp, Homo sapien
cagctttggtcccatcagtttttgg

SEQ ID NO: 1294485 - DNA, 25 bp, Homo sapien
agagcgcgcgagcaggcagccacca

SEQ ID NO: 1294486 - DNA, 25 bp, Homo sapien
gcttagaccggtattaaatggtgtg

SEQ ID NO: 1294487 - DNA, 25 bp, Homo sapien
aatttgagtgtaagctttgactccc

SEQ ID NO: 1294488 - DNA, 25 bp, Homo sapien
ctgttgatcggaagccttattgatt

SEQ ID NO: 1294489 - DNA, 25 bp, Homo sapien
gggagactctcggatgtacccatag

SEQ ID NO: 1294490 - DNA, 25 bp, Homo sapien
cctcttgggagactctcggatgtac

SEQ ID NO: 1294491 - DNA, 25 bp, Homo sapien
tcttgggagactctcggatgtaccc

SEQ ID NO: 1294492 - DNA, 25 bp, Homo sapien
gagactctcggatgtacccatagga

SEQ ID NO: 1294493 - DNA, 25 bp, Homo sapien
tccagccctctatagcctcaatatc

SEQ ID NO: 1294494 - DNA, 25 bp, Homo sapien
ggccaaatagaatctctttcctgat

SEQ ID NO: 1294495 - DNA, 25 bp, Homo sapien
gattctccagccctctatagcctca

SEQ ID NO: 1294496 - DNA, 25 bp, Homo sapien
ctctatagcctcaatatccctctct

SEQ ID NO: 1294497 - DNA, 25 bp, Homo sapien
ccctgctgcttagcatcaggtgaac

SEQ ID NO: 1294498 - DNA, 25 bp, Homo sapien
ctgctgcttagcatcaggtgaactt

SEQ ID NO: 1294499 - DNA, 25 bp, Homo sapien
tgcttagcatcaggtgaacttctgg

SEQ ID NO: 1294500 - DNA, 25 bp, Homo sapien
gctgcttagcatcaggtgaacttct

SEQ ID NO: 1294501 - DNA, 25 bp, Homo sapien
cttccctgagcaggaagggtctgag

SEQ ID NO: 1294502 - DNA, 25 bp, Homo sapien
tgagcaggaagggtctgagctccta

SEQ ID NO: 1294503 - DNA, 25 bp, Homo sapien
aagggtctgagctcctagcaggaag

SEQ ID NO: 1294504 - DNA, 25 bp, Homo sapien
gcaggaagggtctgagctcctagca

SEQ ID NO: 1294505 - DNA, 25 bp, Homo sapien
ggcttcagggtaggggatggtgtcc

SEQ ID NO: 1294506 - DNA, 25 bp, Homo sapien
tcactggatcgtggggaggtctgga

SEQ ID NO: 1294507 - DNA, 25 bp, Homo sapien
agtcactggatcgtggggaggtctg

SEQ ID NO: 1294508 - DNA, 25 bp, Homo sapien
aaggcttcagggtaggggatggtgt

SEQ ID NO: 1294509 - DNA, 25 bp, Homo sapien
tgtggaagcgtttcaatattttgcc

SEQ ID NO: 1294510 - DNA, 25 bp, Homo sapien
cactgggaggaagcggaatgctggt

SEQ ID NO: 1294511 - DNA, 25 bp, Homo sapien
ggcctggaccggaccaccataaaca

SEQ ID NO: 1294512 - DNA, 25 bp, Homo sapien
aactttgtggatgtactggtgctga

SEQ ID NO: 1294513 - DNA, 25 bp, Homo sapien
tgtccagcagcacattttggtttca

SEQ ID NO: 1294514 - DNA, 25 bp, Homo sapien
ctgtccagcagcacattttggtttc

SEQ ID NO: 1294515 - DNA, 25 bp, Homo sapien
gtccagcagcacattttggtttcat

SEQ ID NO: 1294516 - DNA, 25 bp, Homo sapien
tccccggcataagctgttgcctcta

SEQ ID NO: 1294517 - DNA, 25 bp, Homo sapien
ggcggcgactgaatccccggcataa

SEQ ID NO: 1294518 - DNA, 25 bp, Homo sapien
ctgaatccccggcataagctgttgc

SEQ ID NO: 1294519 - DNA, 25 bp, Homo sapien
gagaacggcggcgactgaatccccg

SEQ ID NO: 1294520 - DNA, 25 bp, Homo sapien
ggctccgaatccctcctttactatc

SEQ ID NO: 1294521 - DNA, 25 bp, Homo sapien
tcatgtggggctccgaatccctcct

SEQ ID NO: 1294522 - DNA, 25 bp, Homo sapien
tgtggggctccgaatccctccttta

SEQ ID NO: 1294523 - DNA, 25 bp, Homo sapien
tccgaatccctcctttactatcttc

SEQ ID NO: 1294524 - DNA, 25 bp, Homo sapien
gctacatctttgatctggcctttta

SEQ ID NO: 1294525 - DNA, 25 bp, Homo sapien
tattgctacatctttgatctggcct

SEQ ID NO: 1294526 - DNA, 25 bp, Homo sapien
gcttctattgctacatctttgatct

SEQ ID NO: 1294527 - DNA, 25 bp, Homo sapien
tctattgctacatctttgatctggc

SEQ ID NO: 1294528 - DNA, 25 bp, Homo sapien
ctttcctctgccggcccgtgggcat

SEQ ID NO: 1294529 - DNA, 25 bp, Homo sapien
ttgtcacggcccctttggaaatctg

SEQ ID NO: 1294530 - DNA, 25 bp, Homo sapien
aaaatcctgccaacactttcatggg

SEQ ID NO: 1294531 - DNA, 25 bp, Homo sapien
agaaagctagtggtaaccctcgcca

SEQ ID NO: 1294532 - DNA, 25 bp, Homo sapien
ttcagaaagtctccgcgttacagcc

SEQ ID NO: 1294533 - DNA, 25 bp, Homo sapien
agaatccaaattccaggaggccaag

SEQ ID NO: 1294534 - DNA, 25 bp, Homo sapien
tccagaacccctgacgaactgattt

SEQ ID NO: 1294535 - DNA, 25 bp, Homo sapien
cagaacccctgacgaactgatttta

SEQ ID NO: 1294536 - DNA, 25 bp, Homo sapien
cctccagaacccctgacgaactgat

SEQ ID NO: 1294537 - DNA, 25 bp, Homo sapien
aattttaggcaataacctagatcag

SEQ ID NO: 1294538 - DNA, 25 bp, Homo sapien
attttaggcaataacctagatcagg

SEQ ID NO: 1294539 - DNA, 25 bp, Homo sapien
ttttaggcaataacctagatcaggt

SEQ ID NO: 1294540 - DNA, 25 bp, Homo sapien
ggaattttaggcaataacctagatc

SEQ ID NO: 1294541 - DNA, 25 bp, Homo sapien
gaaggagagtgccaaccagtgatga

SEQ ID NO: 1294542 - DNA, 25 bp, Homo sapien
taggcccaaatggatgagctatgcc

SEQ ID NO: 1294543 - DNA, 25 bp, Homo sapien
gatgtgagttcccaagcgtctaggc

SEQ ID NO: 1294544 - DNA, 25 bp, Homo sapien
tatactcaattctgggagcacagag

SEQ ID NO: 1294545 - DNA, 25 bp, Homo sapien
cctaatgacaggctacagaaggcag

SEQ ID NO: 1294546 - DNA, 25 bp, Homo sapien
tcacctcagggattcgggtaagcct

SEQ ID NO: 1294547 - DNA, 25 bp, Homo sapien
ggctagaaacctttgcatgtcccta

SEQ ID NO: 1294548 - DNA, 25 bp, Homo sapien
catcagggcgagatggagtgctcac

SEQ ID NO: 1294549 - DNA, 25 bp, Homo sapien
taacactcagtgatggccacagtgg

SEQ ID NO: 1294550 - DNA, 25 bp, Homo sapien
gccacagtggcattgtcctaaaaag

SEQ ID NO: 1294551 - DNA, 25 bp, Homo sapien
tgccgggcaccgaggtactttcatc

SEQ ID NO: 1294552 - DNA, 25 bp, Homo sapien
taaccattcgttgatatgccgggca

SEQ ID NO: 1294553 - DNA, 25 bp, Homo sapien
tttccgcaaggacgcagatgctctt

SEQ ID NO: 1294554 - DNA, 25 bp, Homo sapien
tgtccagacttccaagtaaggagcg

SEQ ID NO: 1294555 - DNA, 25 bp, Homo sapien
taaggagcgggtaatttccaccatc

SEQ ID NO: 1294556 - DNA, 25 bp, Homo sapien
gttacggcagccatcaatcgagtcc

SEQ ID NO: 1294557 - DNA, 25 bp, Homo sapien
tggccagtgcctcataaacgtgcgt

SEQ ID NO: 1294558 - DNA, 25 bp, Homo sapien
caggtcaagctatgaactgcagagg

SEQ ID NO: 1294559 - DNA, 25 bp, Homo sapien
taggcacacaaattccgtcccaggg

SEQ ID NO: 1294560 - DNA, 25 bp, Homo sapien
tgcagatcaatgaccgtgaggagct

SEQ ID NO: 1294561 - DNA, 25 bp, Homo sapien
cctcagcttttaacaccagaagtgg

SEQ ID NO: 1294562 - DNA, 25 bp, Homo sapien
ctgtggaggaacaggtagtcgcacc

SEQ ID NO: 1294563 - DNA, 25 bp, Homo sapien
gaagtggtgtttctgggcctccatc

SEQ ID NO: 1294564 - DNA, 25 bp, Homo sapien
tggaggaacaggtagtcgcacccat

SEQ ID NO: 1294565 - DNA, 25 bp, Homo sapien
gatgaaatcaccgtctacacagaca

SEQ ID NO: 1294566 - DNA, 25 bp, Homo sapien
tgccacaggcgagatttgatcatac

SEQ ID NO: 1294567 - DNA, 25 bp, Homo sapien
gaaacctcttcgtactggatgtgcc

SEQ ID NO: 1294568 - DNA, 25 bp, Homo sapien
caaacatcagggcattgggaaacct

SEQ ID NO: 1294569 - DNA, 25 bp, Homo sapien
gctgagcctgaaagcactgctaggg

SEQ ID NO: 1294570 - DNA, 25 bp, Homo sapien
tatcctgaaggcaacagggagccag

SEQ ID NO: 1294571 - DNA, 25 bp, Homo sapien
gaaattaccactggaatgaagatca

SEQ ID NO: 1294572 - DNA, 25 bp, Homo sapien
gttttgaggagatatatatgtggcc

SEQ ID NO: 1294573 - DNA, 25 bp, Homo sapien
gcctcgcagttgcatggaagtagga

SEQ ID NO: 1294574 - DNA, 25 bp, Homo sapien
ctgggaccgcggaaggacatctgta

SEQ ID NO: 1294575 - DNA, 25 bp, Homo sapien
aagtgggcttgagccttgcctcgca

SEQ ID NO: 1294576 - DNA, 25 bp, Homo sapien
actggtgcaggactgaactgggacc

SEQ ID NO: 1294577 - DNA, 25 bp, Homo sapien
ggtacttatgtttgttagtaacatc

SEQ ID NO: 1294578 - DNA, 25 bp, Homo sapien
agtacaaggtacttatgtttgttag

SEQ ID NO: 1294579 - DNA, 25 bp, Homo sapien
ggcaccaggaggttagtacaaggta

SEQ ID NO: 1294580 - DNA, 25 bp, Homo sapien
caccaggaggttagtacaaggtact

SEQ ID NO: 1294581 - DNA, 25 bp, Homo sapien
tgctgaagcaacgtaatgtagcagt

SEQ ID NO: 1294582 - DNA, 25 bp, Homo sapien
gccaaacagtctgggttgagatccc

SEQ ID NO: 1294583 - DNA, 25 bp, Homo sapien
tgagatcccaccttgggtcctctgg

SEQ ID NO: 1294584 - DNA, 25 bp, Homo sapien
tggcgctgcatgacctgatcaagtt

SEQ ID NO: 1294585 - DNA, 25 bp, Homo sapien
cctgatcgtggcgtaagatatggtt

SEQ ID NO: 1294586 - DNA, 25 bp, Homo sapien
caaactgatggccttgaaaaattcc

SEQ ID NO: 1294587 - DNA, 25 bp, Homo sapien
gctggaccataaggccccaaactga

SEQ ID NO: 1294588 - DNA, 25 bp, Homo sapien
gatatggttcttaggcccctgcagg

SEQ ID NO: 1294589 - DNA, 25 bp, Homo sapien
gggccaagacagctgggttctgttc

SEQ ID NO: 1294590 - DNA, 25 bp, Homo sapien
gctgggttctgttcttcccagcagg

SEQ ID NO: 1294591 - DNA, 25 bp, Homo sapien
aagacagctgggttctgttcttccc

SEQ ID NO: 1294592 - DNA, 25 bp, Homo sapien
tggctgcctcctgttctggctggtt

SEQ ID NO: 1294593 - DNA, 25 bp, Homo sapien
taaccatctaaagtacagaatgtaa

SEQ ID NO: 1294594 - DNA, 25 bp, Homo sapien
tgagagctgcccgttccatgtcctg

SEQ ID NO: 1294595 - DNA, 25 bp, Homo sapien
tgtgataaccatctaaagtacagaa

SEQ ID NO: 1294596 - DNA, 25 bp, Homo sapien
agaactgtgataaccatctaaagta

SEQ ID NO: 1294597 - DNA, 25 bp, Homo sapien
cagtgctgatcgtcggagcttggga

SEQ ID NO: 1294598 - DNA, 25 bp, Homo sapien
ggagcaggaagatgtcgaatgaact

SEQ ID NO: 1294599 - DNA, 25 bp, Homo sapien
gaacttgagtgagtaaacatcggtg

SEQ ID NO: 1294600 - DNA, 25 bp, Homo sapien
tacctgccgctctcagagcgtggag

SEQ ID NO: 1294601 - DNA, 25 bp, Homo sapien
caggccccgggtgtaaggcggcact

SEQ ID NO: 1294602 - DNA, 25 bp, Homo sapien
acaactgtgagctcccaaatgtgga

SEQ ID NO: 1294603 - DNA, 25 bp, Homo sapien
gcggcacttcgaaggctggtctctg

SEQ ID NO: 1294604 - DNA, 25 bp, Homo sapien
tgagaagcatggaggccccggcggt

SEQ ID NO: 1294605 - DNA, 25 bp, Homo sapien
cagcgtcgggttttcctgaaggtgc

SEQ ID NO: 1294606 - DNA, 25 bp, Homo sapien
gctaccgcagggcgcaagggatcct

SEQ ID NO: 1294607 - DNA, 25 bp, Homo sapien
tgagcgccgggcctttcatgtggtc

SEQ ID NO: 1294608 - DNA, 25 bp, Homo sapien
ttcatgtggtcgcagcgctctgggt

SEQ ID NO: 1294609 - DNA, 25 bp, Homo sapien
ccaggaagggagagtttcgccgcaa

SEQ ID NO: 1294610 - DNA, 25 bp, Homo sapien
caggaagggagagtttcgccgcaaa

SEQ ID NO: 1294611 - DNA, 25 bp, Homo sapien
gagagtttcgccgcaaaggggcttg

SEQ ID NO: 1294612 - DNA, 25 bp, Homo sapien
gagtttcgccgcaaaggggcttggc

SEQ ID NO: 1294613 - DNA, 25 bp, Homo sapien
ttcgggctgtaaaactggcggactg

SEQ ID NO: 1294614 - DNA, 25 bp, Homo sapien
tattaaaagtcggagctacgctgct

SEQ ID NO: 1294615 - DNA, 25 bp, Homo sapien
agagttaatcaggaacgcctccccg

SEQ ID NO: 1294616 - DNA, 25 bp, Homo sapien
gcctggagcgctgaaagagttaatc

SEQ ID NO: 1294617 - DNA, 25 bp, Homo sapien
tgcagcctgaccaccgtcaacttgc

SEQ ID NO: 1294618 - DNA, 25 bp, Homo sapien
aaagggcacctagataatttacatg

SEQ ID NO: 1294619 - DNA, 25 bp, Homo sapien
tctaattaggaaagggcacctagat

SEQ ID NO: 1294620 - DNA, 25 bp, Homo sapien
tttcttctctaattaggaaagggca

SEQ ID NO: 1294621 - DNA, 25 bp, Homo sapien
tcctgacgatgaagctggtagtgcg

SEQ ID NO: 1294622 - DNA, 25 bp, Homo sapien
tgcgtgttcctcttaagtggaaatc

SEQ ID NO: 1294623 - DNA, 25 bp, Homo sapien
tgaagctggtagtgcgtgttcctct

SEQ ID NO: 1294624 - DNA, 25 bp, Homo sapien
ctgggtcctgacgatgaagctggta

SEQ ID NO: 1294625 - DNA, 25 bp, Homo sapien
tgagtcccatcctgccgtatgctgc

SEQ ID NO: 1294626 - DNA, 25 bp, Homo sapien
ttctgtagcttaactactgagtccc

SEQ ID NO: 1294627 - DNA, 25 bp, Homo sapien
tctggaaagttgagtgagtactttc

SEQ ID NO: 1294628 - DNA, 25 bp, Homo sapien
ttaactactgagtcccatcctgccg

SEQ ID NO: 1294629 - DNA, 25 bp, Homo sapien
taaacagcgtcagtcaaagcctgct

SEQ ID NO: 1294630 - DNA, 25 bp, Homo sapien
agtccccaggtgattacagtgtgca

SEQ ID NO: 1294631 - DNA, 25 bp, Homo sapien
cacagttgtacaggccttggaggct

SEQ ID NO: 1294632 - DNA, 25 bp, Homo sapien
gacgcacccttgatgtcagaacgag

SEQ ID NO: 1294633 - DNA, 25 bp, Homo sapien
tgaagtctgcgcttcaggagtccct

SEQ ID NO: 1294634 - DNA, 25 bp, Homo sapien
tagctttcgcccagtagacataccg

SEQ ID NO: 1294635 - DNA, 25 bp, Homo sapien
ttgagaaaattcagtcccgccagca

SEQ ID NO: 1294636 - DNA, 25 bp, Homo sapien
gacataccgtaagtgagtgaggtca

SEQ ID NO: 1294637 - DNA, 25 bp, Homo sapien
tccatttcttgtcctcgttgtagag

SEQ ID NO: 1294638 - DNA, 25 bp, Homo sapien
cttgtcctcgttgtagaggaaggac

SEQ ID NO: 1294639 - DNA, 25 bp, Homo sapien
cagaaccgggatccatttcttgtcc

SEQ ID NO: 1294640 - DNA, 25 bp, Homo sapien
ctacagaaccgggatccatttcttg

SEQ ID NO: 1294641 - DNA, 25 bp, Homo sapien
tacaatcatttaaaacaatcctctg

SEQ ID NO: 1294642 - DNA, 25 bp, Homo sapien
caatcatttaaaacaatcctctgac

SEQ ID NO: 1294643 - DNA, 25 bp, Homo sapien
tttacaatcatttaaaacaatcctc

SEQ ID NO: 1294644 - DNA, 25 bp, Homo sapien
acaatcatttaaaacaatcctctga

SEQ ID NO: 1294645 - DNA, 25 bp, Homo sapien
gggcctaagtagtccacgatctcat

SEQ ID NO: 1294646 - DNA, 25 bp, Homo sapien
ggacacgaatgatgcactagagatg

SEQ ID NO: 1294647 - DNA, 25 bp, Homo sapien
agatgaaatgcttgcgggggcctaa

SEQ ID NO: 1294648 - DNA, 25 bp, Homo sapien
gctgtccaccggctggtattggaca

SEQ ID NO: 1294649 - DNA, 25 bp, Homo sapien
gcttcgaggctgttcccagatgagg

SEQ ID NO: 1294650 - DNA, 25 bp, Homo sapien
tgaagcattgacagagagccagcga

SEQ ID NO: 1294651 - DNA, 25 bp, Homo sapien
acctaacccggcattttgctgcagg

SEQ ID NO: 1294652 - DNA, 25 bp, Homo sapien
gaagacggccccatgggttgtacat

SEQ ID NO: 1294653 - DNA, 25 bp, Homo sapien
ttgggcaaatgtcccgccaaatccg

SEQ ID NO: 1294654 - DNA, 25 bp, Homo sapien
aaatagaacaatgtcagcaccaggg

SEQ ID NO: 1294655 - DNA, 25 bp, Homo sapien
ggtatcaccaactcgaaagtcaggg

SEQ ID NO: 1294656 - DNA, 25 bp, Homo sapien
tgaaagcaaaatcctacgaggcagg

SEQ ID NO: 1294657 - DNA, 25 bp, Homo sapien
ctatggggtaagagtaacaattctt

SEQ ID NO: 1294658 - DNA, 25 bp, Homo sapien
gctcaataagtatcaggcattcaac

SEQ ID NO: 1294659 - DNA, 25 bp, Homo sapien
tactgagcatcattatgtgtgacta

SEQ ID NO: 1294660 - DNA, 25 bp, Homo sapien
actaagggcccctgaagagagtggc

SEQ ID NO: 1294661 - DNA, 25 bp, Homo sapien
tgttgacgtcagttttaatccacgg

SEQ ID NO: 1294662 - DNA, 25 bp, Homo sapien
tatttggcgactgcttcacaaggga

SEQ ID NO: 1294663 - DNA, 25 bp, Homo sapien
tcacaagggattcgttgatatcata

SEQ ID NO: 1294664 - DNA, 25 bp, Homo sapien
caggtcccgggcctgttgacgtcag

SEQ ID NO: 1294665 - DNA, 25 bp, Homo sapien
ctgtagccttgacctgctgggctca

SEQ ID NO: 1294666 - DNA, 25 bp, Homo sapien
agtggcacaatcacaatcacagctc

SEQ ID NO: 1294667 - DNA, 25 bp, Homo sapien
ccttgacctgctgggctcagtgatc

SEQ ID NO: 1294668 - DNA, 25 bp, Homo sapien
gtggcacaatcacaatcacagctca

SEQ ID NO: 1294669 - DNA, 25 bp, Homo sapien
cgtggagtgggtgctccggaaacag

SEQ ID NO: 1294670 - DNA, 25 bp, Homo sapien
gtgggtgctccggaaacagagctgc

SEQ ID NO: 1294671 - DNA, 25 bp, Homo sapien
gggtgctccggaaacagagctgcct

SEQ ID NO: 1294672 - DNA, 25 bp, Homo sapien
ggagtgggtgctccggaaacagagc

SEQ ID NO: 1294673 - DNA, 25 bp, Homo sapien
ttttgacataaacccggctcgagta

SEQ ID NO: 1294674 - DNA, 25 bp, Homo sapien
tgggggaggtcctttatcagcaaaa

SEQ ID NO: 1294675 - DNA, 25 bp, Homo sapien
gagtacagacgttgtttctctgctt

SEQ ID NO: 1294676 - DNA, 25 bp, Homo sapien
caaaagcgaaagatcctctttgggt

SEQ ID NO: 1294677 - DNA, 25 bp, Homo sapien
aatatgaaagaaattgcatctggtt

SEQ ID NO: 1294678 - DNA, 25 bp, Homo sapien
agagtcttgtacagccttaggcacc

SEQ ID NO: 1294679 - DNA, 25 bp, Homo sapien
tgggtagtcaacaaatgctaactgg

SEQ ID NO: 1294680 - DNA, 25 bp, Homo sapien
gatctgtatttagcaagcataggca

SEQ ID NO: 1294681 - DNA, 25 bp, Homo sapien
cagatgagaaaactacgtcccagaa

SEQ ID NO: 1294682 - DNA, 25 bp, Homo sapien
gtttcaaacttgagagctttcataa

SEQ ID NO: 1294683 - DNA, 25 bp, Homo sapien
tttcaaacttgagagctttcataaa

SEQ ID NO: 1294684 - DNA, 25 bp, Homo sapien
ggagtttcaaacttgagagctttca

SEQ ID NO: 1294685 - DNA, 25 bp, Homo sapien
gagtttcaaacttgagagctttcat

SEQ ID NO: 1294686 - DNA, 25 bp, Homo sapien
gctggaacacgaattactaaagtct

SEQ ID NO: 1294687 - DNA, 25 bp, Homo sapien
gatagtgtatgcattcgctgcaggg

SEQ ID NO: 1294688 - DNA, 25 bp, Homo sapien
aaatgatggtgtccaatcgggcgca

SEQ ID NO: 1294689 - DNA, 25 bp, Homo sapien
cttggaaataaaatccgatgggata

SEQ ID NO: 1294690 - DNA, 25 bp, Homo sapien
tctgtgcttggtggtgacggtcctc

SEQ ID NO: 1294691 - DNA, 25 bp, Homo sapien
taagttgttcagagcctaacctggg

SEQ ID NO: 1294692 - DNA, 25 bp, Homo sapien
gatgctcctagaagtaaggtcaccc

SEQ ID NO: 1294693 - DNA, 25 bp, Homo sapien
taatgggaagttaactccaacgctg

SEQ ID NO: 1294694 - DNA, 25 bp, Homo sapien
ttaatgctttactcaagagaagtgg

SEQ ID NO: 1294695 - DNA, 25 bp, Homo sapien
tgctttactcaagagaagtggttct

SEQ ID NO: 1294696 - DNA, 25 bp, Homo sapien
cagttaatgctttactcaagagaag

SEQ ID NO: 1294697 - DNA, 25 bp, Homo sapien
tttactcaagagaagtggttctcac

SEQ ID NO: 1294698 - DNA, 25 bp, Homo sapien
gacaatgagacactgttggacaccg

SEQ ID NO: 1294699 - DNA, 25 bp, Homo sapien
gttcctttcttggacaatgagacac

SEQ ID NO: 1294700 - DNA, 25 bp, Homo sapien
gacactgttggacaccggtgactgg

SEQ ID NO: 1294701 - DNA, 25 bp, Homo sapien
ccggtgactggtgaataacattgta

SEQ ID NO: 1294702 - DNA, 25 bp, Homo sapien
ccctcgtgttgtggatgcagatgcg

SEQ ID NO: 1294703 - DNA, 25 bp, Homo sapien
taggtgagaatgatccccggtggac

SEQ ID NO: 1294704 - DNA, 25 bp, Homo sapien
ccggtggacggaagaggaactgact

SEQ ID NO: 1294705 - DNA, 25 bp, Homo sapien
cttgccccatgggaggtgacgacag

SEQ ID NO: 1294706 - DNA, 25 bp, Homo sapien
caaatttacagctttgcgggccaca

SEQ ID NO: 1294707 - DNA, 25 bp, Homo sapien
gaggctgggctgcaaatatcctgga

SEQ ID NO: 1294708 - DNA, 25 bp, Homo sapien
tgacagagtaggacacggaaagcct

SEQ ID NO: 1294709 - DNA, 25 bp, Homo sapien
taacttgacaagtgagccggcttgc

SEQ ID NO: 1294710 - DNA, 25 bp, Homo sapien
gaaagaacccctgagacaacgtcat

SEQ ID NO: 1294711 - DNA, 25 bp, Homo sapien
agaacgtgcctgtcccgcaaggcta

SEQ ID NO: 1294712 - DNA, 25 bp, Homo sapien
tgtgatttcctctcacaaggatggg

SEQ ID NO: 1294713 - DNA, 25 bp, Homo sapien
ttacagttagtccagtcggtgcccc

SEQ ID NO: 1294714 - DNA, 25 bp, Homo sapien
tcttggcttgactattgaatccttt

SEQ ID NO: 1294715 - DNA, 25 bp, Homo sapien
aatggaggattgtgttggatatgca

SEQ ID NO: 1294716 - DNA, 25 bp, Homo sapien
atgaggaaatctcttggcttgacta

SEQ ID NO: 1294717 - DNA, 25 bp, Homo sapien
gaaatctcttggcttgactattgaa

SEQ ID NO: 1294718 - DNA, 25 bp, Homo sapien
agcaaaactattctgggagcagcct

SEQ ID NO: 1294719 - DNA, 25 bp, Homo sapien
ggacgaggcgcggtcaggacagagg

SEQ ID NO: 1294720 - DNA, 25 bp, Homo sapien
gagatgatagtaaagacattcttgc

SEQ ID NO: 1294721 - DNA, 25 bp, Homo sapien
tcaggacagaggaagcgtcctcact

SEQ ID NO: 1294722 - DNA, 25 bp, Homo sapien
taatatcacttgatggtagaccatg

SEQ ID NO: 1294723 - DNA, 25 bp, Homo sapien
ttttctaagggccagatagtacata

SEQ ID NO: 1294724 - DNA, 25 bp, Homo sapien
caataacataaaggccaggaaggga

SEQ ID NO: 1294725 - DNA, 25 bp, Homo sapien
tatgtagggatcaacgaactttttc

SEQ ID NO: 1294726 - DNA, 25 bp, Homo sapien
aatattacctgcaataaagagggtc

SEQ ID NO: 1294727 - DNA, 25 bp, Homo sapien
ggtcattatgagcagtcagctcctc

SEQ ID NO: 1294728 - DNA, 25 bp, Homo sapien
caactatatgttaccttggagaaac

SEQ ID NO: 1294729 - DNA, 25 bp, Homo sapien
cagatgggacgaatagaaagcaagt

SEQ ID NO: 1294730 - DNA, 25 bp, Homo sapien
taagcatatgtcaggagctatctcc

SEQ ID NO: 1294731 - DNA, 25 bp, Homo sapien
ggcctaaagccacctatttggtatg

SEQ ID NO: 1294732 - DNA, 25 bp, Homo sapien
ggagctatctcctccctgcaaagac

SEQ ID NO: 1294733 - DNA, 25 bp, Homo sapien
cacttgaaacagtagggcctaaagc

SEQ ID NO: 1294734 - DNA, 25 bp, Homo sapien
tacttcactggcacgtctgggatgt

SEQ ID NO: 1294735 - DNA, 25 bp, Homo sapien
ctttctgtacttcactggcacgtct

SEQ ID NO: 1294736 - DNA, 25 bp, Homo sapien
ttcactggcacgtctgggatgtttg

SEQ ID NO: 1294737 - DNA, 25 bp, Homo sapien
ctgtacttcactggcacgtctggga

SEQ ID NO: 1294738 - DNA, 25 bp, Homo sapien
aagttctactgcatgttctcctaag

SEQ ID NO: 1294739 - DNA, 25 bp, Homo sapien
tgttagcaaaattctgtgacgtgtt

SEQ ID NO: 1294740 - DNA, 25 bp, Homo sapien
gcaaaattctgtgacgtgttccatt

SEQ ID NO: 1294741 - DNA, 25 bp, Homo sapien
gttccatttgtttgatgaaaagttc

SEQ ID NO: 1294742 - DNA, 25 bp, Homo sapien
tgtataactgtccatgacaggatgg

SEQ ID NO: 1294743 - DNA, 25 bp, Homo sapien
caggtgcaggacagatgtgaacaga

SEQ ID NO: 1294744 - DNA, 25 bp, Homo sapien
gtgcctcactggtccacctgtataa

SEQ ID NO: 1294745 - DNA, 25 bp, Homo sapien
tgacaggatggcatggacctagaat

SEQ ID NO: 1294746 - DNA, 25 bp, Homo sapien
cgtgccttacctggttgggtttctg

SEQ ID NO: 1294747 - DNA, 25 bp, Homo sapien
gggtttctgaagttacaatattgca

SEQ ID NO: 1294748 - DNA, 25 bp, Homo sapien
tcacagaatgctaggtttcatcaga

SEQ ID NO: 1294749 - DNA, 25 bp, Homo sapien
tataaagcaaataagggatggctgg

SEQ ID NO: 1294750 - DNA, 25 bp, Homo sapien
tcttcacacgcttcagggcagggcg

SEQ ID NO: 1294751 - DNA, 25 bp, Homo sapien
gggcagccacttagtattccaggag

SEQ ID NO: 1294752 - DNA, 25 bp, Homo sapien
tttcaaagtccgcagagaagccggc

SEQ ID NO: 1294753 - DNA, 25 bp, Homo sapien
tgacatgggcgactatacaagggca

SEQ ID NO: 1294754 - DNA, 25 bp, Homo sapien
cgatctgagactagaactgcctctt

SEQ ID NO: 1294755 - DNA, 25 bp, Homo sapien
tctcattgttgatgtctaggcccaa

SEQ ID NO: 1294756 - DNA, 25 bp, Homo sapien
gggcttcaagtctcactcatggctg

SEQ ID NO: 1294757 - DNA, 25 bp, Homo sapien
catttcttcatacgtaaaacgggct

SEQ ID NO: 1294758 - DNA, 25 bp, Homo sapien
cgccgccggtgagtagtgattaaca

SEQ ID NO: 1294759 - DNA, 25 bp, Homo sapien
tgtttggtcccaagtctcgcgaggg

SEQ ID NO: 1294760 - DNA, 25 bp, Homo sapien
ggcagtctggcaaatcaaatcgcga

SEQ ID NO: 1294761 - DNA, 25 bp, Homo sapien
tcaagcaagctttgcagcgcagcca

SEQ ID NO: 1294762 - DNA, 25 bp, Homo sapien
aagcttggcagggaactggcgctca

SEQ ID NO: 1294763 - DNA, 25 bp, Homo sapien
tccagaagccagatcgtcgggtggt

SEQ ID NO: 1294764 - DNA, 25 bp, Homo sapien
tccagttttgcatcgaggccaagag

SEQ ID NO: 1294765 - DNA, 25 bp, Homo sapien
tactaaaggtgatgccaggctctac

SEQ ID NO: 1294766 - DNA, 25 bp, Homo sapien
tctttgcaggcgatgcttcagaggc

SEQ ID NO: 1294767 - DNA, 25 bp, Homo sapien
cctctcgggcatatgtaggtcctga

SEQ ID NO: 1294768 - DNA, 25 bp, Homo sapien
tacagcttgcaaagggttcctccag

SEQ ID NO: 1294769 - DNA, 25 bp, Homo sapien
tcaggaaaagagagtcaccaggtga

SEQ ID NO: 1294770 - DNA, 25 bp, Homo sapien
gcttcatggttgaatgcttcccggg

SEQ ID NO: 1294771 - DNA, 25 bp, Homo sapien
taacctcgtctgcaggtagtagcaa

SEQ ID NO: 1294772 - DNA, 25 bp, Homo sapien
tgttgtatcccaggactggacatgg

SEQ ID NO: 1294773 - DNA, 25 bp, Homo sapien
tacaggcagggaagtctagctatgg

SEQ ID NO: 1294774 - DNA, 25 bp, Homo sapien
catggccggttacgttttatctgaa

SEQ ID NO: 1294775 - DNA, 25 bp, Homo sapien
tacttcttgtgctcaagagctatgg

SEQ ID NO: 1294776 - DNA, 25 bp, Homo sapien
taatggactcacttgtcatggccgg

SEQ ID NO: 1294777 - DNA, 25 bp, Homo sapien
ggccagggagaaagcttttgagata

SEQ ID NO: 1294778 - DNA, 25 bp, Homo sapien
ggcatgattgtttcagcattggcat

SEQ ID NO: 1294779 - DNA, 25 bp, Homo sapien
gattgactctgacattctcagtgga

SEQ ID NO: 1294780 - DNA, 25 bp, Homo sapien
gactcattctagagcgaagattgac

SEQ ID NO: 1294781 - DNA, 25 bp, Homo sapien
gcattggcatctcgctccttggtct

SEQ ID NO: 1294782 - DNA, 25 bp, Homo sapien
cctgatgacgtatgctgtgaagcca

SEQ ID NO: 1294783 - DNA, 25 bp, Homo sapien
gctgcgtgagttacaaatccttttc

SEQ ID NO: 1294784 - DNA, 25 bp, Homo sapien
tgccactcaaaagacgaagccaggc

SEQ ID NO: 1294785 - DNA, 25 bp, Homo sapien
aaccgccgtctatcaggctgcgtga

SEQ ID NO: 1294786 - DNA, 25 bp, Homo sapien
tgctaacttccttgtttctcggctg

SEQ ID NO: 1294787 - DNA, 25 bp, Homo sapien
aatgtcaatgtgctccttcaaccca

SEQ ID NO: 1294788 - DNA, 25 bp, Homo sapien
ttaaacgtctaatctggctgctcag

SEQ ID NO: 1294789 - DNA, 25 bp, Homo sapien
tggtgtgcccctacattaaatggcc

SEQ ID NO: 1294790 - DNA, 25 bp, Homo sapien
ctcatccccatgcatatatgtctgg

SEQ ID NO: 1294791 - DNA, 25 bp, Homo sapien
tctccattacagagccacaagccaa

SEQ ID NO: 1294792 - DNA, 25 bp, Homo sapien
cttgaagtcaatagagactctctgg

SEQ ID NO: 1294793 - DNA, 25 bp, Homo sapien
ttgagttactggttaatttccttga

SEQ ID NO: 1294794 - DNA, 25 bp, Homo sapien
accagcactgattgaaaaggagggc

SEQ ID NO: 1294795 - DNA, 25 bp, Homo sapien
gctatttagatgtgtcaaacccggg

SEQ ID NO: 1294796 - DNA, 25 bp, Homo sapien
tatccaagaggacgtgggagccact

SEQ ID NO: 1294797 - DNA, 25 bp, Homo sapien
gaataagttaccttctccgagcctg

SEQ ID NO: 1294798 - DNA, 25 bp, Homo sapien
gaaaccagccagtttgacggcacgg

SEQ ID NO: 1294799 - DNA, 25 bp, Homo sapien
gccatcacagcagggttcaggttat

SEQ ID NO: 1294800 - DNA, 25 bp, Homo sapien
gactgtctgctgatggccatacgca

SEQ ID NO: 1294801 - DNA, 25 bp, Homo sapien
tcaacactggctgataggcagacaa

SEQ ID NO: 1294802 - DNA, 25 bp, Homo sapien
tgcagacttgaaggacagaagctca

SEQ ID NO: 1294803 - DNA, 25 bp, Homo sapien
tcaaaggaaggtgcagacttgaagg

SEQ ID NO: 1294804 - DNA, 25 bp, Homo sapien
cccagtttcaaaggaaggtgcagac

SEQ ID NO: 1294805 - DNA, 25 bp, Homo sapien
gggaccacgtttgcaatggtcccac

SEQ ID NO: 1294806 - DNA, 25 bp, Homo sapien
caactttactctagcgtagcagcag

SEQ ID NO: 1294807 - DNA, 25 bp, Homo sapien
ggaacaaacctattgctggagctat

SEQ ID NO: 1294808 - DNA, 25 bp, Homo sapien
gtcttgaggctacattttggacaca

SEQ ID NO: 1294809 - DNA, 25 bp, Homo sapien
ttgcacgaccagcttcacagaacct

SEQ ID NO: 1294810 - DNA, 25 bp, Homo sapien
tgaaggcagtatagatggaggaacc

SEQ ID NO: 1294811 - DNA, 25 bp, Homo sapien
tagaagtactacagggagccatgga

SEQ ID NO: 1294812 - DNA, 25 bp, Homo sapien
gattcaccatcccaacatgtggctt

SEQ ID NO: 1294813 - DNA, 25 bp, Homo sapien
gattgtgtttggctgcaacagacac

SEQ ID NO: 1294814 - DNA, 25 bp, Homo sapien
attcataacaagcattgattaccca

SEQ ID NO: 1294815 - DNA, 25 bp, Homo sapien
tcattcataacaagcattgattacc

SEQ ID NO: 1294816 - DNA, 25 bp, Homo sapien
cattcataacaagcattgattaccc

SEQ ID NO: 1294817 - DNA, 25 bp, Homo sapien
ttcataacaagcattgattacccac

SEQ ID NO: 1294818 - DNA, 25 bp, Homo sapien
gacacgatggtaaaaaggaaggatg

SEQ ID NO: 1294819 - DNA, 25 bp, Homo sapien
ggaagattctgttcttgcgctcaag

SEQ ID NO: 1294820 - DNA, 25 bp, Homo sapien
cgtgtggtcatcacctcgctagaca

SEQ ID NO: 1294821 - DNA, 25 bp, Homo sapien
gctcaagttatcgagttgcccacga

SEQ ID NO: 1294822 - DNA, 25 bp, Homo sapien
tttccaatgtcttctatttggtgaa

SEQ ID NO: 1294823 - DNA, 25 bp, Homo sapien
tcctccaaccctcgggtctcatttc

SEQ ID NO: 1294824 - DNA, 25 bp, Homo sapien
cctcctccaaccctcgggtctcatt

SEQ ID NO: 1294825 - DNA, 25 bp, Homo sapien
aatgtcttctatttggtgaattcaa

SEQ ID NO: 1294826 - DNA, 25 bp, Homo sapien
gaagcagtccatgcaggttggcctc

SEQ ID NO: 1294827 - DNA, 25 bp, Homo sapien
gatctgtggaagcagtccatgcagg

SEQ ID NO: 1294828 - DNA, 25 bp, Homo sapien
ctgtaagtcagaggacaagggatct

SEQ ID NO: 1294829 - DNA, 25 bp, Homo sapien
gacaagggatctgtggaagcagtcc

SEQ ID NO: 1294830 - DNA, 25 bp, Homo sapien
ttccaagttgggctcaggagctttg

SEQ ID NO: 1294831 - DNA, 25 bp, Homo sapien
acccgccagggcgggacccagcctg

SEQ ID NO: 1294832 - DNA, 25 bp, Homo sapien
tgtacccgccagggcgggacccagc

SEQ ID NO: 1294833 - DNA, 25 bp, Homo sapien
cttgtgctagctccagctcagctac

SEQ ID NO: 1294834 - DNA, 25 bp, Homo sapien
gtgtacatagtaaccagccctgagt

SEQ ID NO: 1294835 - DNA, 25 bp, Homo sapien
gtgaaccgaggtaaactcgccgcgc

SEQ ID NO: 1294836 - DNA, 25 bp, Homo sapien
catctgataatatccgggccgccgg

SEQ ID NO: 1294837 - DNA, 25 bp, Homo sapien
ctctcctcgggcaatgaggcgccgg

SEQ ID NO: 1294838 - DNA, 25 bp, Homo sapien
gaaaacgagaaggtcgccagaggtc

SEQ ID NO: 1294839 - DNA, 25 bp, Homo sapien
tctccgctcccggtggaaaacgaga

SEQ ID NO: 1294840 - DNA, 25 bp, Homo sapien
tcctacggggctagcaggaaaagga

SEQ ID NO: 1294841 - DNA, 25 bp, Homo sapien
ggaaaaggagatcggctctctccgc

SEQ ID NO: 1294842 - DNA, 25 bp, Homo sapien
aggcgtgcaccatgtgtttttttgt

SEQ ID NO: 1294843 - DNA, 25 bp, Homo sapien
gcgtgcaccatgtgtttttttgtag

SEQ ID NO: 1294844 - DNA, 25 bp, Homo sapien
caggcgtgcaccatgtgtttttttg

SEQ ID NO: 1294845 - DNA, 25 bp, Homo sapien
ggcgtgcaccatgtgtttttttgta

SEQ ID NO: 1294846 - DNA, 25 bp, Homo sapien
tatcctatgggttatataagaaaat

SEQ ID NO: 1294847 - DNA, 25 bp, Homo sapien
ttggaagtaaaaggggtatgctcca

SEQ ID NO: 1294848 - DNA, 25 bp, Homo sapien
ataattatcctatgggttatataag

SEQ ID NO: 1294849 - DNA, 25 bp, Homo sapien
attatcctatgggttatataagaaa

SEQ ID NO: 1294850 - DNA, 25 bp, Homo sapien
aaatgtatccagaagcaataataat

SEQ ID NO: 1294851 - DNA, 25 bp, Homo sapien
aaatggatgctaaagaaactttgaa

SEQ ID NO: 1294852 - DNA, 25 bp, Homo sapien
taaaagcgacaaagctagccacctt

SEQ ID NO: 1294853 - DNA, 25 bp, Homo sapien
tcttaactatctcacataggaattt

SEQ ID NO: 1294854 - DNA, 25 bp, Homo sapien
cagcaaacctgaagcggcagcaaga

SEQ ID NO: 1294855 - DNA, 25 bp, Homo sapien
cagcaagagcgcgaatagaactcca

SEQ ID NO: 1294856 - DNA, 25 bp, Homo sapien
cacgaaacagacttcaatgggcaga

SEQ ID NO: 1294857 - DNA, 25 bp, Homo sapien
ctttagaagagtcagaataaatttc

SEQ ID NO: 1294858 - DNA, 25 bp, Homo sapien
tgaacaagttacttagcctccattt

SEQ ID NO: 1294859 - DNA, 25 bp, Homo sapien
aagttacttagcctccattttctga

SEQ ID NO: 1294860 - DNA, 25 bp, Homo sapien
gtggcatctgcttgctctgtgatct

SEQ ID NO: 1294861 - DNA, 25 bp, Homo sapien
gggttcagattccagctgtggcatc

SEQ ID NO: 1294862 - DNA, 25 bp, Homo sapien
cctgcggccgatgcgttgctgcgaa

SEQ ID NO: 1294863 - DNA, 25 bp, Homo sapien
cccttggttgtggtgcgaggcggct

SEQ ID NO: 1294864 - DNA, 25 bp, Homo sapien
ctgcgaacagcataggtgagactct

SEQ ID NO: 1294865 - DNA, 25 bp, Homo sapien
ttgattgcgcgctgtgaggcccttg

SEQ ID NO: 1294866 - DNA, 25 bp, Homo sapien
tttgaaattgagttattacttggat

SEQ ID NO: 1294867 - DNA, 25 bp, Homo sapien
gaaattgagttattacttggattta

SEQ ID NO: 1294868 - DNA, 25 bp, Homo sapien
ttgaaattgagttattacttggatt

SEQ ID NO: 1294869 - DNA, 25 bp, Homo sapien
tgaaattgagttattacttggattt

SEQ ID NO: 1294870 - DNA, 25 bp, Homo sapien
tcaatgctatggtgcgtcaggccct

SEQ ID NO: 1294871 - DNA, 25 bp, Homo sapien
cagagctgtggaccctgtacgtacc

SEQ ID NO: 1294872 - DNA, 25 bp, Homo sapien
gaatatagtctttagccaggtgcag

SEQ ID NO: 1294873 - DNA, 25 bp, Homo sapien
caagacggaactgctatgactggcc

SEQ ID NO: 1294874 - DNA, 25 bp, Homo sapien
aaccccacgtgattgttgattgacg

SEQ ID NO: 1294875 - DNA, 25 bp, Homo sapien
gaatgttcactctcatcgtaatgga

SEQ ID NO: 1294876 - DNA, 25 bp, Homo sapien
tctgctataatgtgcgtgcccttca

SEQ ID NO: 1294877 - DNA, 25 bp, Homo sapien
tggttacccctgttaccgtgccata

SEQ ID NO: 1294878 - DNA, 25 bp, Homo sapien
gggcgccatgcttccaggttcctgg

SEQ ID NO: 1294879 - DNA, 25 bp, Homo sapien
ggagtcgctgaggacatttccactt

SEQ ID NO: 1294880 - DNA, 25 bp, Homo sapien
tattatttgctatacctaaaggtcc

SEQ ID NO: 1294881 - DNA, 25 bp, Homo sapien
ggtcctagcatgttttccacttgag

SEQ ID NO: 1294882 - DNA, 25 bp, Homo sapien
tatggactaaatggactagcctcct

SEQ ID NO: 1294883 - DNA, 25 bp, Homo sapien
gaaattgcctgagtaagccctgtga

SEQ ID NO: 1294884 - DNA, 25 bp, Homo sapien
catgtggtttgactctagattcacc

SEQ ID NO: 1294885 - DNA, 25 bp, Homo sapien
gcggcctggtgctatctttcttaaa

SEQ ID NO: 1294886 - DNA, 25 bp, Homo sapien
agagacaaggccgtccaacccgtca

SEQ ID NO: 1294887 - DNA, 25 bp, Homo sapien
agatcaggtggctcgcaaggagatt

SEQ ID NO: 1294888 - DNA, 25 bp, Homo sapien
gtggctcgcaaggagattagacccc

SEQ ID NO: 1294889 - DNA, 25 bp, Homo sapien
agacaaggccgtccaacccgtcatt

SEQ ID NO: 1294890 - DNA, 25 bp, Homo sapien
ggcgccgccactccagtgtgcggga

SEQ ID NO: 1294891 - DNA, 25 bp, Homo sapien
agtgcccgggagtgccagagccagt

SEQ ID NO: 1294892 - DNA, 25 bp, Homo sapien
cccgcggaggagtccgacctggaag

SEQ ID NO: 1294893 - DNA, 25 bp, Homo sapien
ccgggagtgccagagccagtcccaa

SEQ ID NO: 1294894 - DNA, 25 bp, Homo sapien
gaggcccctccggaagatctgcgat

SEQ ID NO: 1294895 - DNA, 25 bp, Homo sapien
gccttatccgccccatctgttaaat

SEQ ID NO: 1294896 - DNA, 25 bp, Homo sapien
tgggtctgccctatgcagaggcccc

SEQ ID NO: 1294897 - DNA, 25 bp, Homo sapien
taaatgggcgccttgatgggtctgc

SEQ ID NO: 1294898 - DNA, 25 bp, Homo sapien
tccatccacagcacgtttggagggg

SEQ ID NO: 1294899 - DNA, 25 bp, Homo sapien
ctcgggggtcgctcatccagcagcg

SEQ ID NO: 1294900 - DNA, 25 bp, Homo sapien
aggagcccagggccgtagtttccat

SEQ ID NO: 1294901 - DNA, 25 bp, Homo sapien
ccagggccgtagtttccatccacag

SEQ ID NO: 1294902 - DNA, 25 bp, Homo sapien
gaaggatgcagagacggctccagtc

SEQ ID NO: 1294903 - DNA, 25 bp, Homo sapien
ggaaggatgcagagacggctccagt

SEQ ID NO: 1294904 - DNA, 25 bp, Homo sapien
atgcagagacggctccagtcctctg

SEQ ID NO: 1294905 - DNA, 25 bp, Homo sapien
tgtcactttggtgcagatattggca

SEQ ID NO: 1294906 - DNA, 25 bp, Homo sapien
cctgtcactttggtgcagatattgg

SEQ ID NO: 1294907 - DNA, 25 bp, Homo sapien
ctgtcactttggtgcagatattggc

SEQ ID NO: 1294908 - DNA, 25 bp, Homo sapien
cggtgatgctagatccattgctgat

SEQ ID NO: 1294909 - DNA, 25 bp, Homo sapien
ggacctcggtgatgctagatccatt

SEQ ID NO: 1294910 - DNA, 25 bp, Homo sapien
gatccattgctgattttaacctcga

SEQ ID NO: 1294911 - DNA, 25 bp, Homo sapien
taacctcgattctcatgtggctggg

SEQ ID NO: 1294912 - DNA, 25 bp, Homo sapien
ttccttccctaatgtgcccattccc

SEQ ID NO: 1294913 - DNA, 25 bp, Homo sapien
ttccctaatgtgcccattcccaccc

SEQ ID NO: 1294914 - DNA, 25 bp, Homo sapien
cttccctaatgtgcccattcccacc

SEQ ID NO: 1294915 - DNA, 25 bp, Homo sapien
cacggtcaaggctaacagggatcaa

SEQ ID NO: 1294916 - DNA, 25 bp, Homo sapien
gagggtccaaatcaacacggtcaag

SEQ ID NO: 1294917 - DNA, 25 bp, Homo sapien
cactgtcatttagccacccaggagg

SEQ ID NO: 1294918 - DNA, 25 bp, Homo sapien
tcatgagccccgagacaatgtgctg

SEQ ID NO: 1294919 - DNA, 25 bp, Homo sapien
catgctaatacccttcacgtactga

SEQ ID NO: 1294920 - DNA, 25 bp, Homo sapien
gaaggtttagggaaatgcatgctaa

SEQ ID NO: 1294921 - DNA, 25 bp, Homo sapien
ccttcacgtactgaggcagggccgg

SEQ ID NO: 1294922 - DNA, 25 bp, Homo sapien
tttagggaaatgcatgctaataccc

SEQ ID NO: 1294923 - DNA, 25 bp, Homo sapien
ctacaaaaatcacatgctacttttg

SEQ ID NO: 1294924 - DNA, 25 bp, Homo sapien
ttttggcagatgatgtgctaaggac

SEQ ID NO: 1294925 - DNA, 25 bp, Homo sapien
tcccttgacctagtgaggatgtcag

SEQ ID NO: 1294926 - DNA, 25 bp, Homo sapien
aggacagggtccttcaagcgcagct

SEQ ID NO: 1294927 - DNA, 25 bp, Homo sapien
ccactccagatgtgactgtcctggg

SEQ ID NO: 1294928 - DNA, 25 bp, Homo sapien
tagaacaaacagtatgatctgtagc

SEQ ID NO: 1294929 - DNA, 25 bp, Homo sapien
gtatgatctgtagctaactgtaaac

SEQ ID NO: 1294930 - DNA, 25 bp, Homo sapien
aaatgcagcagcgagaagggtgaaa

SEQ ID NO: 1294931 - DNA, 25 bp, Homo sapien
aactgtaaacagtcaactcactacc

SEQ ID NO: 1294932 - DNA, 25 bp, Homo sapien
tattccccttgtagtgagcatgaga

SEQ ID NO: 1294933 - DNA, 25 bp, Homo sapien
tagcttagccctcagaagttacaga

SEQ ID NO: 1294934 - DNA, 25 bp, Homo sapien
gaaactgaagacacctggaatctgt

SEQ ID NO: 1294935 - DNA, 25 bp, Homo sapien
cagaccttgttgcttgaccaacgga

SEQ ID NO: 1294936 - DNA, 25 bp, Homo sapien
tcaagtgtttgacacttctggataa

SEQ ID NO: 1294937 - DNA, 25 bp, Homo sapien
aatttggaagtgtcaagtgtttgac

SEQ ID NO: 1294938 - DNA, 25 bp, Homo sapien
aggataatctgtaaattagtgtccc

SEQ ID NO: 1294939 - DNA, 25 bp, Homo sapien
gatctccagtaagacggtaagattt

SEQ ID NO: 1294940 - DNA, 25 bp, Homo sapien
actgggcccgacctgcatatcttta

SEQ ID NO: 1294941 - DNA, 25 bp, Homo sapien
ggatcttagacctatacatttggca

SEQ ID NO: 1294942 - DNA, 25 bp, Homo sapien
tcttagggccgcaaagtgacaaagt

SEQ ID NO: 1294943 - DNA, 25 bp, Homo sapien
tcataagtgagaagatagcggccct

SEQ ID NO: 1294944 - DNA, 25 bp, Homo sapien
cagatgagtaatggtgctcacttcc

SEQ ID NO: 1294945 - DNA, 25 bp, Homo sapien
gagtaatggtgctcacttcctaaca

SEQ ID NO: 1294946 - DNA, 25 bp, Homo sapien
atcagatgagtaatggtgctcactt

SEQ ID NO: 1294947 - DNA, 25 bp, Homo sapien
gatgagtaatggtgctcacttccta

SEQ ID NO: 1294948 - DNA, 25 bp, Homo sapien
gaaagcatgttgtttgccaggacac

SEQ ID NO: 1294949 - DNA, 25 bp, Homo sapien
ggcaatgagctagtcccagaaagga

SEQ ID NO: 1294950 - DNA, 25 bp, Homo sapien
taaatgccctagctattcccagagg

SEQ ID NO: 1294951 - DNA, 25 bp, Homo sapien
caggattcgagctctaggatgagac

SEQ ID NO: 1294952 - DNA, 25 bp, Homo sapien
accatattggccaggctgtctcgaa

SEQ ID NO: 1294953 - DNA, 25 bp, Homo sapien
caccgtgcctggctgctaatttttt

SEQ ID NO: 1294954 - DNA, 25 bp, Homo sapien
caccatattggccaggctgtctcga

SEQ ID NO: 1294955 - DNA, 25 bp, Homo sapien
ccaccgtgcctggctgctaattttt

SEQ ID NO: 1294956 - DNA, 25 bp, Homo sapien
gagtgactacttccgtccctggtgt

SEQ ID NO: 1294957 - DNA, 25 bp, Homo sapien
gattagggcggccaagtgtccctgc

SEQ ID NO: 1294958 - DNA, 25 bp, Homo sapien
gaaagggcaaagctctaggtcctta

SEQ ID NO: 1294959 - DNA, 25 bp, Homo sapien
taagggcatgtatgtgagcatcccc

SEQ ID NO: 1294960 - DNA, 25 bp, Homo sapien
ggcagtcgcctgtagtcccagctac

SEQ ID NO: 1294961 - DNA, 25 bp, Homo sapien
catcctgtgaatggtgaaaccctct

SEQ ID NO: 1294962 - DNA, 25 bp, Homo sapien
ctgtactaaaaatacaagaacttag

SEQ ID NO: 1294963 - DNA, 25 bp, Homo sapien
atacaagaacttagccgggcatggt

SEQ ID NO: 1294964 - DNA, 25 bp, Homo sapien
ctactagttgctatgcagcccattc

SEQ ID NO: 1294965 - DNA, 25 bp, Homo sapien
cctggaactactactagttgctatg

SEQ ID NO: 1294966 - DNA, 25 bp, Homo sapien
ggaactactactagttgctatgcag

SEQ ID NO: 1294967 - DNA, 25 bp, Homo sapien
tactactagttgctatgcagcccat

SEQ ID NO: 1294968 - DNA, 25 bp, Homo sapien
tacgcgcctgtactactctggaggc

SEQ ID NO: 1294969 - DNA, 25 bp, Homo sapien
gatgttacgcgcctgtactactctg

SEQ ID NO: 1294970 - DNA, 25 bp, Homo sapien
ggagcgatgttacgcgcctgtacta

SEQ ID NO: 1294971 - DNA, 25 bp, Homo sapien
aattagctgggagcgatgttacgcg

SEQ ID NO: 1294972 - DNA, 25 bp, Homo sapien
taaagccagaataatggtcatgagg

SEQ ID NO: 1294973 - DNA, 25 bp, Homo sapien
tgatcagtaagtttttgtttcccta

SEQ ID NO: 1294974 - DNA, 25 bp, Homo sapien
ggtaatagatagcattgggtgctta

SEQ ID NO: 1294975 - DNA, 25 bp, Homo sapien
ttgtttccctactaaagccagaata

SEQ ID NO: 1294976 - DNA, 25 bp, Homo sapien
taggattgttttccaattgagaaat

SEQ ID NO: 1294977 - DNA, 25 bp, Homo sapien
aggattgttttccaattgagaaatg

SEQ ID NO: 1294978 - DNA, 25 bp, Homo sapien
cttggcctcacatattttgatttta

SEQ ID NO: 1294979 - DNA, 25 bp, Homo sapien
ttaggattgttttccaattgagaaa

SEQ ID NO: 1294980 - DNA, 25 bp, Homo sapien
catgctaatctgttttgaattgtcc

SEQ ID NO: 1294981 - DNA, 25 bp, Homo sapien
atgctaatctgttttgaattgtccc

SEQ ID NO: 1294982 - DNA, 25 bp, Homo sapien
tagtattcatgctgtcaaagtaagt

SEQ ID NO: 1294983 - DNA, 25 bp, Homo sapien
gtattcatgctgtcaaagtaagtac

SEQ ID NO: 1294984 - DNA, 25 bp, Homo sapien
taaagactattgtacgctttatggt

SEQ ID NO: 1294985 - DNA, 25 bp, Homo sapien
aacagcaacagataacctttgaaaa

SEQ ID NO: 1294986 - DNA, 25 bp, Homo sapien
tctcggctcaccactttaagggaat

SEQ ID NO: 1294987 - DNA, 25 bp, Homo sapien
tgcgccgggccttgtaggacctaat

SEQ ID NO: 1294988 - DNA, 25 bp, Homo sapien
cagtcacttaggtaggaagtagtgg

SEQ ID NO: 1294989 - DNA, 25 bp, Homo sapien
cagttctcccaactatccaatgagg

SEQ ID NO: 1294990 - DNA, 25 bp, Homo sapien
gaaagattcatgtccatattacaaa

SEQ ID NO: 1294991 - DNA, 25 bp, Homo sapien
taaccccgtcccttgagtgttgtgc

SEQ ID NO: 1294992 - DNA, 25 bp, Homo sapien
tgggctaagcagtgtcccacctcag

SEQ ID NO: 1294993 - DNA, 25 bp, Homo sapien
tcctgggctaagcagtgtcccacct

SEQ ID NO: 1294994 - DNA, 25 bp, Homo sapien
cctgggctaagcagtgtcccacctc

SEQ ID NO: 1294995 - DNA, 25 bp, Homo sapien
ctgggctaagcagtgtcccacctca

SEQ ID NO: 1294996 - DNA, 25 bp, Homo sapien
tgtcagctcagaggtaggttccata

SEQ ID NO: 1294997 - DNA, 25 bp, Homo sapien
gatcttcctctcatgtcactgtaga

SEQ ID NO: 1294998 - DNA, 25 bp, Homo sapien
aggttccatatttgccaacttgctc

SEQ ID NO: 1294999 - DNA, 25 bp, Homo sapien
tacacatgtaagctgtcatgactgg

SEQ ID NO: 1295000 - DNA, 25 bp, Homo sapien
gtgtgagccacagtgcctgccctta

SEQ ID NO: 1295001 - DNA, 25 bp, Homo sapien
cgacctccttggcctcccaaagtgc

SEQ ID NO: 1295002 - DNA, 25 bp, Homo sapien
gttggccaggctgggacttcaagtg

SEQ ID NO: 1295003 - DNA, 25 bp, Homo sapien
ggccaggctgggacttcaagtgatc

SEQ ID NO: 1295004 - DNA, 25 bp, Homo sapien
taatgtagatgacctaaagaatgcg

SEQ ID NO: 1295005 - DNA, 25 bp, Homo sapien
tcaccccatttaccttgtatagagg

SEQ ID NO: 1295006 - DNA, 25 bp, Homo sapien
gtttttacgtaatcatagagcttgc

SEQ ID NO: 1295007 - DNA, 25 bp, Homo sapien
tatttgtacatctgttgagcaacac

SEQ ID NO: 1295008 - DNA, 25 bp, Homo sapien
gctagctagtaaaaaggacgaccca

SEQ ID NO: 1295009 - DNA, 25 bp, Homo sapien
tgtattcagcagttggaaagctctc

SEQ ID NO: 1295010 - DNA, 25 bp, Homo sapien
gagcagtgaggtttgttctttccag

SEQ ID NO: 1295011 - DNA, 25 bp, Homo sapien
ggtgattctgaaccttgcctcatag

SEQ ID NO: 1295012 - DNA, 25 bp, Homo sapien
ccttgagcaatctgtatacaattaa

SEQ ID NO: 1295013 - DNA, 25 bp, Homo sapien
ctggcctgcagttgggcacaaactc

SEQ ID NO: 1295014 - DNA, 25 bp, Homo sapien
acaggtcagtttcaactggcctcac

SEQ ID NO: 1295015 - DNA, 25 bp, Homo sapien
gaggtgtaacttatactccggagcc

SEQ ID NO: 1295016 - DNA, 25 bp, Homo sapien
cagttgggcacaaactctgaggtgt

SEQ ID NO: 1295017 - DNA, 25 bp, Homo sapien
ggctgcatttatgcgggggtgcagt

SEQ ID NO: 1295018 - DNA, 25 bp, Homo sapien
ggggggctgcatttatgcgggggtg

SEQ ID NO: 1295019 - DNA, 25 bp, Homo sapien
gccaggctgggttgtttggtgcagc

SEQ ID NO: 1295020 - DNA, 25 bp, Homo sapien
ggggctgcatttatgcgggggtgca

SEQ ID NO: 1295021 - DNA, 25 bp, Homo sapien
tgtccaaaggggatgatgtccactc

SEQ ID NO: 1295022 - DNA, 25 bp, Homo sapien
ttgagtttccccttggcaagctggg

SEQ ID NO: 1295023 - DNA, 25 bp, Homo sapien
gaccttgagtttccccttggcaagc

SEQ ID NO: 1295024 - DNA, 25 bp, Homo sapien
gctgagacttctcgggaccttgagt

SEQ ID NO: 1295025 - DNA, 25 bp, Homo sapien
tggccagggtggtctctgcggccat

SEQ ID NO: 1295026 - DNA, 25 bp, Homo sapien
tgtggccagggtggtctctgcggcc

SEQ ID NO: 1295027 - DNA, 25 bp, Homo sapien
cggctgtcctgtggccagggtggtc

SEQ ID NO: 1295028 - DNA, 25 bp, Homo sapien
cctgtggccagggtggtctctgcgg

SEQ ID NO: 1295029 - DNA, 25 bp, Homo sapien
caaggagatgaaggtgctgggtgtc

SEQ ID NO: 1295030 - DNA, 25 bp, Homo sapien
tcctgaagaagttggaagcaaggag

SEQ ID NO: 1295031 - DNA, 25 bp, Homo sapien
ctgttcctgttcctcctgggcaaca

SEQ ID NO: 1295032 - DNA, 25 bp, Homo sapien
gaaggtgctgggtgtctctgttcct

SEQ ID NO: 1295033 - DNA, 25 bp, Homo sapien
tggacagatgtcctagagccacaga

SEQ ID NO: 1295034 - DNA, 25 bp, Homo sapien
tctaagcctttctagggccagagaa

SEQ ID NO: 1295035 - DNA, 25 bp, Homo sapien
cgcaagatttggctggatcctccca

SEQ ID NO: 1295036 - DNA, 25 bp, Homo sapien
gcaagacttcacctcggaacgcagt

SEQ ID NO: 1295037 - DNA, 25 bp, Homo sapien
cgctgctggtgcaagaggccagcat

SEQ ID NO: 1295038 - DNA, 25 bp, Homo sapien
gagccagaggatgtcccgtagtaga

SEQ ID NO: 1295039 - DNA, 25 bp, Homo sapien
aggctgctgatgctcgtgcccgagg

SEQ ID NO: 1295040 - DNA, 25 bp, Homo sapien
gttcatgaggttgccggcggcgaca

SEQ ID NO: 1295041 - DNA, 25 bp, Homo sapien
gagaatgggttcagttccgaggtgc

SEQ ID NO: 1295042 - DNA, 25 bp, Homo sapien
tctccgtgagggttggcagcgtggg

SEQ ID NO: 1295043 - DNA, 25 bp, Homo sapien
gtcggagaatgggttcagttccgag

SEQ ID NO: 1295044 - DNA, 25 bp, Homo sapien
ctgggaagcggctctccgtgagggt

SEQ ID NO: 1295045 - DNA, 25 bp, Homo sapien
ccccgccaggactccgaacacagac

SEQ ID NO: 1295046 - DNA, 25 bp, Homo sapien
ggaagaggtcagttccagctcgaga

SEQ ID NO: 1295047 - DNA, 25 bp, Homo sapien
tcccccgccaggactccgaacacag

SEQ ID NO: 1295048 - DNA, 25 bp, Homo sapien
agctcgagacaaccccaggagggct

SEQ ID NO: 1295049 - DNA, 25 bp, Homo sapien
aagctggttggagcgtgccccgggc

SEQ ID NO: 1295050 - DNA, 25 bp, Homo sapien
tggttggagcgtgccccgggccaag

SEQ ID NO: 1295051 - DNA, 25 bp, Homo sapien
ggaagctggttggagcgtgccccgg

SEQ ID NO: 1295052 - DNA, 25 bp, Homo sapien
gctggttggagcgtgccccgggcca

SEQ ID NO: 1295053 - DNA, 25 bp, Homo sapien
aaaggactggttctcatcacaaggc

SEQ ID NO: 1295054 - DNA, 25 bp, Homo sapien
tgtgtaaagggctccaatgaccgtg

SEQ ID NO: 1295055 - DNA, 25 bp, Homo sapien
gctccaaggcaagggtgttccatcc

SEQ ID NO: 1295056 - DNA, 25 bp, Homo sapien
tggacctggcacacaatcctagggc

SEQ ID NO: 1295057 - DNA, 25 bp, Homo sapien
tgtcccggccccttgaggccgagag

SEQ ID NO: 1295058 - DNA, 25 bp, Homo sapien
tggccgcctgatgggaaccccattc

SEQ ID NO: 1295059 - DNA, 25 bp, Homo sapien
ccccattctcaagacgaaggaaaca

SEQ ID NO: 1295060 - DNA, 25 bp, Homo sapien
ggatacaacggcaggactgtgcccc

SEQ ID NO: 1295061 - DNA, 25 bp, Homo sapien
gaaagcccacaggaaccgtctgcag

SEQ ID NO: 1295062 - DNA, 25 bp, Homo sapien
gtttgctgagtgaacgaatgatggc

SEQ ID NO: 1295063 - DNA, 25 bp, Homo sapien
agcccacaggaaccgtctgcaggtg

SEQ ID NO: 1295064 - DNA, 25 bp, Homo sapien
aatgatggctagcacacagaaagcc

SEQ ID NO: 1295065 - DNA, 25 bp, Homo sapien
gactgatcttcggacaggcttttgg

SEQ ID NO: 1295066 - DNA, 25 bp, Homo sapien
tgcagtgactgatcttcggacaggc

SEQ ID NO: 1295067 - DNA, 25 bp, Homo sapien
cagtgactgatcttcggacaggctt

SEQ ID NO: 1295068 - DNA, 25 bp, Homo sapien
aacaagggggtgcagtgactgatct

SEQ ID NO: 1295069 - DNA, 25 bp, Homo sapien
tgggtgtgctcggtgtcacccgcat

SEQ ID NO: 1295070 - DNA, 25 bp, Homo sapien
ggaacggcttggtctggtcctccag

SEQ ID NO: 1295071 - DNA, 25 bp, Homo sapien
ctgctgaagtggcttgtggtgctga

SEQ ID NO: 1295072 - DNA, 25 bp, Homo sapien
ggtgtcacccgcatgcgcagccgtt

SEQ ID NO: 1295073 - DNA, 25 bp, Homo sapien
ttgctggggactcgaaaagtgggaa

SEQ ID NO: 1295074 - DNA, 25 bp, Homo sapien
gaacaagtgattgctggggactcga

SEQ ID NO: 1295075 - DNA, 25 bp, Homo sapien
caagtgattgctggggactcgaaaa

SEQ ID NO: 1295076 - DNA, 25 bp, Homo sapien
tgctggggactcgaaaagtgggaaa

SEQ ID NO: 1295077 - DNA, 25 bp, Homo sapien
gggtcacgcagtgtgggagctagag

SEQ ID NO: 1295078 - DNA, 25 bp, Homo sapien
gtcacgcagtgtgggagctagagga

SEQ ID NO: 1295079 - DNA, 25 bp, Homo sapien
cagggtcacgcagtgtgggagctag

SEQ ID NO: 1295080 - DNA, 25 bp, Homo sapien
tcctacccccgccaggtacctgatg

SEQ ID NO: 1295081 - DNA, 25 bp, Homo sapien
tggcaagaggccagctcagtgttca

SEQ ID NO: 1295082 - DNA, 25 bp, Homo sapien
caagaggccagctcagtgttcagcc

SEQ ID NO: 1295083 - DNA, 25 bp, Homo sapien
gaggccagctcagtgttcagcctct

SEQ ID NO: 1295084 - DNA, 25 bp, Homo sapien
ggcaagaggccagctcagtgttcag

SEQ ID NO: 1295085 - DNA, 25 bp, Homo sapien
caccttgatggctcggtggtaggtc

SEQ ID NO: 1295086 - DNA, 25 bp, Homo sapien
cacggtcaccttgatggctcggtgg

SEQ ID NO: 1295087 - DNA, 25 bp, Homo sapien
atggctcggtggtaggtcgccactt

SEQ ID NO: 1295088 - DNA, 25 bp, Homo sapien
cggtcaccttgatggctcggtggta

SEQ ID NO: 1295089 - DNA, 25 bp, Homo sapien
ttgggacatattacgggcgcggatc

SEQ ID NO: 1295090 - DNA, 25 bp, Homo sapien
tctccggagagatttagtcgtcacc

SEQ ID NO: 1295091 - DNA, 25 bp, Homo sapien
ccagggatgtgtctatcaagatgga

SEQ ID NO: 1295092 - DNA, 25 bp, Homo sapien
tccctcttggagtgagatgactctc

SEQ ID NO: 1295093 - DNA, 25 bp, Homo sapien
tgctcaaggtcggtcagacaggcag

SEQ ID NO: 1295094 - DNA, 25 bp, Homo sapien
ccacttctcgtaggcaggctggtct

SEQ ID NO: 1295095 - DNA, 25 bp, Homo sapien
aagtgatgatgggtttcaggtccca

SEQ ID NO: 1295096 - DNA, 25 bp, Homo sapien
gatgggtttcaggtcccagaagcct

SEQ ID NO: 1295097 - DNA, 25 bp, Homo sapien
gatggcagccttcgagctgtgcttt

SEQ ID NO: 1295098 - DNA, 25 bp, Homo sapien
ccgccttgactctggggcaggagat

SEQ ID NO: 1295099 - DNA, 25 bp, Homo sapien
gctgcgttagcttccgttctagacc

SEQ ID NO: 1295100 - DNA, 25 bp, Homo sapien
tgtgctttccaacattcagctgcgt

SEQ ID NO: 1295101 - DNA, 25 bp, Homo sapien
ccaggtgtgcttaaccgggaaagag

SEQ ID NO: 1295102 - DNA, 25 bp, Homo sapien
ctcaaaggcgctgggaaactgggtc

SEQ ID NO: 1295103 - DNA, 25 bp, Homo sapien
cacagatcagggacttgtcctgcaa

SEQ ID NO: 1295104 - DNA, 25 bp, Homo sapien
tgctgaaagacctataagctccctt

SEQ ID NO: 1295105 - DNA, 25 bp, Homo sapien
cattgcgcagctcagcggagtagtt

SEQ ID NO: 1295106 - DNA, 25 bp, Homo sapien
ccactgcggcccacgaagcgaaggt

SEQ ID NO: 1295107 - DNA, 25 bp, Homo sapien
gaaggtcgttgaacctggccacctg

SEQ ID NO: 1295108 - DNA, 25 bp, Homo sapien
ggagtagttctcgtcattgcctgcc

SEQ ID NO: 1295109 - DNA, 25 bp, Homo sapien
gaagaccagatttcctgtcaacatc

SEQ ID NO: 1295110 - DNA, 25 bp, Homo sapien
ggactggggatccatatggtaaaaa

SEQ ID NO: 1295111 - DNA, 25 bp, Homo sapien
ccttttaagctccaagtgacagtaa

SEQ ID NO: 1295112 - DNA, 25 bp, Homo sapien
tttgggatctgattaagaagaccag

SEQ ID NO: 1295113 - DNA, 25 bp, Homo sapien
ctcaaagagccactcttcctttttt

SEQ ID NO: 1295114 - DNA, 25 bp, Homo sapien
gtggtccgccagcacgtccaccatc

SEQ ID NO: 1295115 - DNA, 25 bp, Homo sapien
tcggtgcgcacgagctcgcctgcgt

SEQ ID NO: 1295116 - DNA, 25 bp, Homo sapien
caccatcgagcgcacctcgggccgg

SEQ ID NO: 1295117 - DNA, 25 bp, Homo sapien
tcagcgcgccgctgttctcgcccat

SEQ ID NO: 1295118 - DNA, 25 bp, Homo sapien
gaggtgtgaagcggcggctggtgct

SEQ ID NO: 1295119 - DNA, 25 bp, Homo sapien
ggagggaggtgtgaagcggcggctg

SEQ ID NO: 1295120 - DNA, 25 bp, Homo sapien
gtgaagcggcggctggtgcttgggt

SEQ ID NO: 1295121 - DNA, 25 bp, Homo sapien
ccggggagggaggtgtgaagcggcg

SEQ ID NO: 1295122 - DNA, 25 bp, Homo sapien
gctcttgctgcttcgggcctgtgac

SEQ ID NO: 1295123 - DNA, 25 bp, Homo sapien
tgccgccctctctcgggtcgtagct

SEQ ID NO: 1295124 - DNA, 25 bp, Homo sapien
ccttgccgccctctctcgggtcgta

SEQ ID NO: 1295125 - DNA, 25 bp, Homo sapien
gtagctccctgacgctggggcgcaa

SEQ ID NO: 1295126 - DNA, 25 bp, Homo sapien
gacggtggccgcaagatctcatcat

SEQ ID NO: 1295127 - DNA, 25 bp, Homo sapien
agaagcttaggatccgacggtggcc

SEQ ID NO: 1295128 - DNA, 25 bp, Homo sapien
agcgcgcgccatttcgtcgttgcca

SEQ ID NO: 1295129 - DNA, 25 bp, Homo sapien
gttgccaaacgaaatcaagccccgc

SEQ ID NO: 1295130 - DNA, 25 bp, Homo sapien
tttaagagagcctgcgcctggcagt

SEQ ID NO: 1295131 - DNA, 25 bp, Homo sapien
ctcaggccgtgtcgaaaggaaggac

SEQ ID NO: 1295132 - DNA, 25 bp, Homo sapien
tagaggaaagcgagtgatccagcct

SEQ ID NO: 1295133 - DNA, 25 bp, Homo sapien
gcagttgtcgattgcggacccaggc

SEQ ID NO: 1295134 - DNA, 25 bp, Homo sapien
cggcacggctccggctctccgtagg

SEQ ID NO: 1295135 - DNA, 25 bp, Homo sapien
acggctccggctctccgtagggcgc

SEQ ID NO: 1295136 - DNA, 25 bp, Homo sapien
gcacggctccggctctccgtagggc

SEQ ID NO: 1295137 - DNA, 25 bp, Homo sapien
ggctccggctctccgtagggcgctg

SEQ ID NO: 1295138 - DNA, 25 bp, Homo sapien
caggcacccggggaagacccacaga

SEQ ID NO: 1295139 - DNA, 25 bp, Homo sapien
tggacgccttctgtcttcgcgtttt

SEQ ID NO: 1295140 - DNA, 25 bp, Homo sapien
gacgccttctgtcttcgcgttttca

SEQ ID NO: 1295141 - DNA, 25 bp, Homo sapien
gccttctgtcttcgcgttttcaggc

SEQ ID NO: 1295142 - DNA, 25 bp, Homo sapien
tctttccctgcatgtgttgccatgg

SEQ ID NO: 1295143 - DNA, 25 bp, Homo sapien
aaaataaggcagcatgggtgcctgc

SEQ ID NO: 1295144 - DNA, 25 bp, Homo sapien
tgagctcagctttggccctgtccct

SEQ ID NO: 1295145 - DNA, 25 bp, Homo sapien
gccatgggattctggcccagctccc

SEQ ID NO: 1295146 - DNA, 25 bp, Homo sapien
cagctaggtttgatgggagtgcccc

SEQ ID NO: 1295147 - DNA, 25 bp, Homo sapien
gaagcctgaggactcaaacacccaa

SEQ ID NO: 1295148 - DNA, 25 bp, Homo sapien
catcagctacagctaggtttgatgg

SEQ ID NO: 1295149 - DNA, 25 bp, Homo sapien
ggaagaagaacaggccccgctctca

SEQ ID NO: 1295150 - DNA, 25 bp, Homo sapien
aaaatgttggcggtggtctccagga

SEQ ID NO: 1295151 - DNA, 25 bp, Homo sapien
cccagaagttgccagcagtgacctc

SEQ ID NO: 1295152 - DNA, 25 bp, Homo sapien
aggaagacccctgcatcccacagct

SEQ ID NO: 1295153 - DNA, 25 bp, Homo sapien
aagttgccagcagtgacctcctgag

SEQ ID NO: 1295154 - DNA, 25 bp, Homo sapien
gagtcgaagatgctgttcgatgcca

SEQ ID NO: 1295155 - DNA, 25 bp, Homo sapien
taggtcgggaaggagtcgaagatgc

SEQ ID NO: 1295156 - DNA, 25 bp, Homo sapien
tgaaggtcggcgagtaggtcgggaa

SEQ ID NO: 1295157 - DNA, 25 bp, Homo sapien
cgcggatgaaggtcggcgagtaggt

SEQ ID NO: 1295158 - DNA, 25 bp, Homo sapien
tgaagaaggcgagaattttcagccc

SEQ ID NO: 1295159 - DNA, 25 bp, Homo sapien
ctgaagaaggcgagaattttcagcc

SEQ ID NO: 1295160 - DNA, 25 bp, Homo sapien
gattcacttggttggctgttgtttt

SEQ ID NO: 1295161 - DNA, 25 bp, Homo sapien
ttgggttgggattcacttggttggc

SEQ ID NO: 1295162 - DNA, 25 bp, Homo sapien
ggagctccgaagctgacagagcaga

SEQ ID NO: 1295163 - DNA, 25 bp, Homo sapien
cagagtgtatcattagatggcggga

SEQ ID NO: 1295164 - DNA, 25 bp, Homo sapien
caggaatgtctagccacaaattctc

SEQ ID NO: 1295165 - DNA, 25 bp, Homo sapien
ttggattcccggtcccacaggaatg

SEQ ID NO: 1295166 - DNA, 25 bp, Homo sapien
ccctggaggcggcaagggcctggcc

SEQ ID NO: 1295167 - DNA, 25 bp, Homo sapien
tggaggcggcaagggcctggccttg

SEQ ID NO: 1295168 - DNA, 25 bp, Homo sapien
aggctctggtgggtacgagggcggc

SEQ ID NO: 1295169 - DNA, 25 bp, Homo sapien
ctctggtgggtacgagggcggccgg

SEQ ID NO: 1295170 - DNA, 25 bp, Homo sapien
cagcggccggagagctccctgccat

SEQ ID NO: 1295171 - DNA, 25 bp, Homo sapien
gcccagagcccggatccaccagcgg

SEQ ID NO: 1295172 - DNA, 25 bp, Homo sapien
cgagtgcccagagcccggatccacc

SEQ ID NO: 1295173 - DNA, 25 bp, Homo sapien
cccggatccaccagcggccggagag

SEQ ID NO: 1295174 - DNA, 25 bp, Homo sapien
tcgcccctgggctgcggctgactcc

SEQ ID NO: 1295175 - DNA, 25 bp, Homo sapien
gccacctcgcccctgggctgcggct

SEQ ID NO: 1295176 - DNA, 25 bp, Homo sapien
cctgggctgcggctgactccctgcc

SEQ ID NO: 1295177 - DNA, 25 bp, Homo sapien
tgggctgcggctgactccctgccat

SEQ ID NO: 1295178 - DNA, 25 bp, Homo sapien
cctttcgagggctagcacagagaca

SEQ ID NO: 1295179 - DNA, 25 bp, Homo sapien
gagaagtcccgcgtttaagaggcag

SEQ ID NO: 1295180 - DNA, 25 bp, Homo sapien
tctatagccatgcaaacccagctgg

SEQ ID NO: 1295181 - DNA, 25 bp, Homo sapien
tggcaccgaggacaaactaaggact

SEQ ID NO: 1295182 - DNA, 25 bp, Homo sapien
taggccttgtgttcgggcccagctg

SEQ ID NO: 1295183 - DNA, 25 bp, Homo sapien
cagcaagcacgtctctaggccttgt

SEQ ID NO: 1295184 - DNA, 25 bp, Homo sapien
tcttcaaagacctcagtggtggcgg

SEQ ID NO: 1295185 - DNA, 25 bp, Homo sapien
ctagaactggactggcttagacaga

SEQ ID NO: 1295186 - DNA, 25 bp, Homo sapien
tgtgagcaaaccacagtgtgggggg

SEQ ID NO: 1295187 - DNA, 25 bp, Homo sapien
gagcttgggggctccgagtctcccc

SEQ ID NO: 1295188 - DNA, 25 bp, Homo sapien
agcttgggggctccgagtctcccca

SEQ ID NO: 1295189 - DNA, 25 bp, Homo sapien
gagcaaaccacagtgtggggggcgg

SEQ ID NO: 1295190 - DNA, 25 bp, Homo sapien
cctgcattagggggaatatcccctc

SEQ ID NO: 1295191 - DNA, 25 bp, Homo sapien
ctgcattagggggaatatcccctcc

SEQ ID NO: 1295192 - DNA, 25 bp, Homo sapien
tcaaaatcaataatgtggcaagagg

SEQ ID NO: 1295193 - DNA, 25 bp, Homo sapien
gtcttgcatccttgagaaacatcag

SEQ ID NO: 1295194 - DNA, 25 bp, Homo sapien
cagagacccgaaggaggcctggtct

SEQ ID NO: 1295195 - DNA, 25 bp, Homo sapien
tcaataatgtggcaagaggtttgct

SEQ ID NO: 1295196 - DNA, 25 bp, Homo sapien
tttctctgttgctgacgtgaaggcc

SEQ ID NO: 1295197 - DNA, 25 bp, Homo sapien
ctgttgctgacgtgaaggcctgctg

SEQ ID NO: 1295198 - DNA, 25 bp, Homo sapien
tggtttctctgttgctgacgtgaag

SEQ ID NO: 1295199 - DNA, 25 bp, Homo sapien
tctctgttgctgacgtgaaggcctg

SEQ ID NO: 1295200 - DNA, 25 bp, Homo sapien
tccagagtcaagcacgcagcatggt

SEQ ID NO: 1295201 - DNA, 25 bp, Homo sapien
gcttgcctgcaagatggcttctaga

SEQ ID NO: 1295202 - DNA, 25 bp, Homo sapien
gtgccggaaagtccaccatgagcgt

SEQ ID NO: 1295203 - DNA, 25 bp, Homo sapien
gaatgtcttccctgcgtgccggaaa

SEQ ID NO: 1295204 - DNA, 25 bp, Homo sapien
agtgcatcgctccaatttctgcttc

SEQ ID NO: 1295205 - DNA, 25 bp, Homo sapien
gtgcatcgctccaatttctgcttct

SEQ ID NO: 1295206 - DNA, 25 bp, Homo sapien
atttccatgttatcccagaaagcag

SEQ ID NO: 1295207 - DNA, 25 bp, Homo sapien
ccatgttatcccagaaagcagtcat

SEQ ID NO: 1295208 - DNA, 25 bp, Homo sapien
gcagtcagagcacacctggatttcc

SEQ ID NO: 1295209 - DNA, 25 bp, Homo sapien
ctgggacagaaaagcagtcagagca

SEQ ID NO: 1295210 - DNA, 25 bp, Homo sapien
aggagaatcacttgaacctgggagg

SEQ ID NO: 1295211 - DNA, 25 bp, Homo sapien
agccagacatggtggtgcatgtctg

SEQ ID NO: 1295212 - DNA, 25 bp, Homo sapien
cagacatggtggtgcatgtctgtaa

SEQ ID NO: 1295213 - DNA, 25 bp, Homo sapien
tcccagctactcaggaggctgaggc

SEQ ID NO: 1295214 - DNA, 25 bp, Homo sapien
gattgtcttactgaaggccagtctg

SEQ ID NO: 1295215 - DNA, 25 bp, Homo sapien
caaagccatgattgtcttactgaag

SEQ ID NO: 1295216 - DNA, 25 bp, Homo sapien
ataagcaatttggtaaacgtggatc

SEQ ID NO: 1295217 - DNA, 25 bp, Homo sapien
tccagtcgctccagtcttcaatgaa

SEQ ID NO: 1295218 - DNA, 25 bp, Homo sapien
tgaagcaactagtcgcaagccagaa

SEQ ID NO: 1295219 - DNA, 25 bp, Homo sapien
tctctgaagcaactagtcgcaagcc

SEQ ID NO: 1295220 - DNA, 25 bp, Homo sapien
caactagtcgcaagccagaaaggcc

SEQ ID NO: 1295221 - DNA, 25 bp, Homo sapien
agcaactagtcgcaagccagaaagg

SEQ ID NO: 1295222 - DNA, 25 bp, Homo sapien
ggaaaggggcacacaatccctgaag

SEQ ID NO: 1295223 - DNA, 25 bp, Homo sapien
ggcagaaaggtagcccacagagcca

SEQ ID NO: 1295224 - DNA, 25 bp, Homo sapien
aaggggcacacaatccctgaagcat

SEQ ID NO: 1295225 - DNA, 25 bp, Homo sapien
gccccagaggcagaaaggtagccca

SEQ ID NO: 1295226 - DNA, 25 bp, Homo sapien
catacggttacatcaagctacaaga

SEQ ID NO: 1295227 - DNA, 25 bp, Homo sapien
tggtggttctgcaatgtcctcaata

SEQ ID NO: 1295228 - DNA, 25 bp, Homo sapien
tggttgcctcatgttccaaaatggt

SEQ ID NO: 1295229 - DNA, 25 bp, Homo sapien
gtcaagtgccagctgtctgaatccc

SEQ ID NO: 1295230 - DNA, 25 bp, Homo sapien
gacactcgagctcacagttggatgg

SEQ ID NO: 1295231 - DNA, 25 bp, Homo sapien
acaaaacagacactcgagctcacag

SEQ ID NO: 1295232 - DNA, 25 bp, Homo sapien
ctcgagctcacagttggatggccat

SEQ ID NO: 1295233 - DNA, 25 bp, Homo sapien
aacagacactcgagctcacagttgg

SEQ ID NO: 1295234 - DNA, 25 bp, Homo sapien
tcttccggtgggaaattggccaagc

SEQ ID NO: 1295235 - DNA, 25 bp, Homo sapien
tgggaaattggccaagcactgacca

SEQ ID NO: 1295236 - DNA, 25 bp, Homo sapien
tgacactggggcgtgggttcttccg

SEQ ID NO: 1295237 - DNA, 25 bp, Homo sapien
attggccaagcactgaccatagaga

SEQ ID NO: 1295238 - DNA, 25 bp, Homo sapien
caaaagccagtgatcctgtgggtct

SEQ ID NO: 1295239 - DNA, 25 bp, Homo sapien
gagcagctcagagacacgtttgggc

SEQ ID NO: 1295240 - DNA, 25 bp, Homo sapien
ctcagagacacgtttgggcacagcc

SEQ ID NO: 1295241 - DNA, 25 bp, Homo sapien
acagcccgattttctggtaccacca

SEQ ID NO: 1295242 - DNA, 25 bp, Homo sapien
ttcctgctcttgttcttctagcctt

SEQ ID NO: 1295243 - DNA, 25 bp, Homo sapien
cctgctcttgttcttctagccttga

SEQ ID NO: 1295244 - DNA, 25 bp, Homo sapien
gctcttgttcttctagccttgaatc

SEQ ID NO: 1295245 - DNA, 25 bp, Homo sapien
ctcttgttcttctagccttgaatca

SEQ ID NO: 1295246 - DNA, 25 bp, Homo sapien
gtgatggcaccattgtccagagagt

SEQ ID NO: 1295247 - DNA, 25 bp, Homo sapien
ggcaccattgtccagagagtccctg

SEQ ID NO: 1295248 - DNA, 25 bp, Homo sapien
gttaccaaaatggtcattggtgatg

SEQ ID NO: 1295249 - DNA, 25 bp, Homo sapien
tggttaccaaaatggtcattggtga

SEQ ID NO: 1295250 - DNA, 25 bp, Homo sapien
ttcatgctgggatgtcaatgaccaa

SEQ ID NO: 1295251 - DNA, 25 bp, Homo sapien
ccctccaacacattatcctaggaaa

SEQ ID NO: 1295252 - DNA, 25 bp, Homo sapien
ccaagggtagatctgaagagctcta

SEQ ID NO: 1295253 - DNA, 25 bp, Homo sapien
ctgattcatgctgggatgtcaatga

SEQ ID NO: 1295254 - DNA, 25 bp, Homo sapien
ataccatcgggctcagaaggaattt

SEQ ID NO: 1295255 - DNA, 25 bp, Homo sapien
tggaaatgccaaatcggcttctggg

SEQ ID NO: 1295256 - DNA, 25 bp, Homo sapien
tttccaagaagatcgaaatttgagg

SEQ ID NO: 1295257 - DNA, 25 bp, Homo sapien
caggcatcccatggtgggtagagaa

SEQ ID NO: 1295258 - DNA, 25 bp, Homo sapien
cactaagcgtgtgtctagaaggatc

SEQ ID NO: 1295259 - DNA, 25 bp, Homo sapien
tcccattctgggtgcgctgagagag

SEQ ID NO: 1295260 - DNA, 25 bp, Homo sapien
gagttcagcattcggtttcaaatcc

SEQ ID NO: 1295261 - DNA, 25 bp, Homo sapien
gatgacaatgtggaagaaggctccc

SEQ ID NO: 1295262 - DNA, 25 bp, Homo sapien
gatccaccgctctagagaacgctgg

SEQ ID NO: 1295263 - DNA, 25 bp, Homo sapien
cagatggcatttgggatccaccgct

SEQ ID NO: 1295264 - DNA, 25 bp, Homo sapien
tctagagaacgctggttgaggccct

SEQ ID NO: 1295265 - DNA, 25 bp, Homo sapien
cttgctgcctttactctgattgttc

SEQ ID NO: 1295266 - DNA, 25 bp, Homo sapien
tgaagatgagcagaatgctcatgag

SEQ ID NO: 1295267 - DNA, 25 bp, Homo sapien
ctattgatagacttgaaagatcaac

SEQ ID NO: 1295268 - DNA, 25 bp, Homo sapien
aatgctcatgaggatgcccagaacc

SEQ ID NO: 1295269 - DNA, 25 bp, Homo sapien
gaaccagggcccagacgttcaggca

SEQ ID NO: 1295270 - DNA, 25 bp, Homo sapien
catggagtaggtgactgctatgaag

SEQ ID NO: 1295271 - DNA, 25 bp, Homo sapien
aacatggttgggcacagaggtctcg

SEQ ID NO: 1295272 - DNA, 25 bp, Homo sapien
aggcacaggcctggcccccggttag

SEQ ID NO: 1295273 - DNA, 25 bp, Homo sapien
cctagacttcatggagtaggtgact

SEQ ID NO: 1295274 - DNA, 25 bp, Homo sapien
cccccagcacagccacctcatgctc

SEQ ID NO: 1295275 - DNA, 25 bp, Homo sapien
agagttgtggggtgcccccagcaca

SEQ ID NO: 1295276 - DNA, 25 bp, Homo sapien
ctcgggggagcagagttgtggggtg

SEQ ID NO: 1295277 - DNA, 25 bp, Homo sapien
tgcccccagcacagccacctcatgc

SEQ ID NO: 1295278 - DNA, 25 bp, Homo sapien
tgagcatctgatagtctagggggca

SEQ ID NO: 1295279 - DNA, 25 bp, Homo sapien
ttgagcatctgatagtctagggggc

SEQ ID NO: 1295280 - DNA, 25 bp, Homo sapien
gcatctgatagtctagggggcagcc

SEQ ID NO: 1295281 - DNA, 25 bp, Homo sapien
agggggcagccggtgttggcgggag

SEQ ID NO: 1295282 - DNA, 25 bp, Homo sapien
caagtaagctgtgagcgtttgtcta

SEQ ID NO: 1295283 - DNA, 25 bp, Homo sapien
gggttttactcgtctgtgcgctacc

SEQ ID NO: 1295284 - DNA, 25 bp, Homo sapien
cggtttaagtcgatgattagtggtt

SEQ ID NO: 1295285 - DNA, 25 bp, Homo sapien
tctgtgcgctacctagacggtttaa

SEQ ID NO: 1295286 - DNA, 25 bp, Homo sapien
tgttgcaaccttaaggaatcggtca

SEQ ID NO: 1295287 - DNA, 25 bp, Homo sapien
tccaagtatatgaggcgaggtgctg

SEQ ID NO: 1295288 - DNA, 25 bp, Homo sapien
tgatactgtggtccagcgccatttg

SEQ ID NO: 1295289 - DNA, 25 bp, Homo sapien
ccatttggcttgtggtcagggctcg

SEQ ID NO: 1295290 - DNA, 25 bp, Homo sapien
tctctggggacagcgccgtagaagg

SEQ ID NO: 1295291 - DNA, 25 bp, Homo sapien
gggacagcgccgtagaaggctgtcc

SEQ ID NO: 1295292 - DNA, 25 bp, Homo sapien
agcgccgtagaaggctgtcccacca

SEQ ID NO: 1295293 - DNA, 25 bp, Homo sapien
gacagcgccgtagaaggctgtccca

SEQ ID NO: 1295294 - DNA, 25 bp, Homo sapien
ctgattccaggtggactaaatccat

SEQ ID NO: 1295295 - DNA, 25 bp, Homo sapien
caggaggaagtgaccgccggcccga

SEQ ID NO: 1295296 - DNA, 25 bp, Homo sapien
cactgggtccaaaggtgccgtctgg

SEQ ID NO: 1295297 - DNA, 25 bp, Homo sapien
actgggtccaaaggtgccgtctggc

SEQ ID NO: 1295298 - DNA, 25 bp, Homo sapien
ctgggtccaaaggtgccgtctggcc

SEQ ID NO: 1295299 - DNA, 25 bp, Homo sapien
ttgtgtcgaaagctgactttcaata

SEQ ID NO: 1295300 - DNA, 25 bp, Homo sapien
gagctgctctgctaagtacaaaacc

SEQ ID NO: 1295301 - DNA, 25 bp, Homo sapien
gctctgctaagtacaaaaccccgac

SEQ ID NO: 1295302 - DNA, 25 bp, Homo sapien
gctgctctgctaagtacaaaacccc

SEQ ID NO: 1295303 - DNA, 25 bp, Homo sapien
attgttccccttcttccgaaggctg

SEQ ID NO: 1295304 - DNA, 25 bp, Homo sapien
tcgacatgacaagttcattgttccc

SEQ ID NO: 1295305 - DNA, 25 bp, Homo sapien
ttccccaagaggcagctctgagcgg

SEQ ID NO: 1295306 - DNA, 25 bp, Homo sapien
gctctgctggctcctcgacatgaca

SEQ ID NO: 1295307 - DNA, 25 bp, Homo sapien
cggctgaacagaatgaccaccagga

SEQ ID NO: 1295308 - DNA, 25 bp, Homo sapien
caagagccaagtcgagggacagcat

SEQ ID NO: 1295309 - DNA, 25 bp, Homo sapien
tgaacagaatgaccaccaggacaag

SEQ ID NO: 1295310 - DNA, 25 bp, Homo sapien
tgaccaccaggacaagagccaagtc

SEQ ID NO: 1295311 - DNA, 25 bp, Homo sapien
tgatcaccaagagcacctctaagag

SEQ ID NO: 1295312 - DNA, 25 bp, Homo sapien
aagagatcccccttggtcaccaaag

SEQ ID NO: 1295313 - DNA, 25 bp, Homo sapien
cagcctggactagttctgttctcag

SEQ ID NO: 1295314 - DNA, 25 bp, Homo sapien
tggatccagaacatccatcgccatc

SEQ ID NO: 1295315 - DNA, 25 bp, Homo sapien
tacatgagatccctccaaaaagtgg

SEQ ID NO: 1295316 - DNA, 25 bp, Homo sapien
tgaatgatttcatcgaccatggaag

SEQ ID NO: 1295317 - DNA, 25 bp, Homo sapien
gagagatcgaattctgtgtgccagg

SEQ ID NO: 1295318 - DNA, 25 bp, Homo sapien
aaaatgaaatgtctggtacagggcc

SEQ ID NO: 1295319 - DNA, 25 bp, Homo sapien
atttcagtcactgcctgcgtcaggt

SEQ ID NO: 1295320 - DNA, 25 bp, Homo sapien
gggtaacactgaaccctgatttgac

SEQ ID NO: 1295321 - DNA, 25 bp, Homo sapien
cactgaaccctgatttgacatttca

SEQ ID NO: 1295322 - DNA, 25 bp, Homo sapien
tttgacatttcagtcactgcctgcg

SEQ ID NO: 1295323 - DNA, 25 bp, Homo sapien
cgctgaatttacgagctctaaagtc

SEQ ID NO: 1295324 - DNA, 25 bp, Homo sapien
ggacaccccgctgaatttacgagct

SEQ ID NO: 1295325 - DNA, 25 bp, Homo sapien
tgggacaccccgctgaatttacgag

SEQ ID NO: 1295326 - DNA, 25 bp, Homo sapien
caccccgctgaatttacgagctcta

SEQ ID NO: 1295327 - DNA, 25 bp, Homo sapien
gccctcggcgggtcatttgcacgct

SEQ ID NO: 1295328 - DNA, 25 bp, Homo sapien
tcagaagccataaaccacgctggtg

SEQ ID NO: 1295329 - DNA, 25 bp, Homo sapien
agcgccatgacaggtcgagggccct

SEQ ID NO: 1295330 - DNA, 25 bp, Homo sapien
catttgcacgctggttaatggccat

SEQ ID NO: 1295331 - DNA, 25 bp, Homo sapien
gtgggccactaatgaagctttaaat

SEQ ID NO: 1295332 - DNA, 25 bp, Homo sapien
tgtgggccactaatgaagctttaaa

SEQ ID NO: 1295333 - DNA, 25 bp, Homo sapien
aggagatgggtcaaaatcagctcgt

SEQ ID NO: 1295334 - DNA, 25 bp, Homo sapien
agctcgtgtcagaccccagagtctg

SEQ ID NO: 1295335 - DNA, 25 bp, Homo sapien
acccgatccaagctgaggcagctga

SEQ ID NO: 1295336 - DNA, 25 bp, Homo sapien
gaagcaaaatctacacccgatccaa

SEQ ID NO: 1295337 - DNA, 25 bp, Homo sapien
cagggtactgggtatatgggactca

SEQ ID NO: 1295338 - DNA, 25 bp, Homo sapien
tgtttgtagaatggaagcatgtatg

SEQ ID NO: 1295339 - DNA, 25 bp, Homo sapien
gcaggactggccatgagttaatgat

SEQ ID NO: 1295340 - DNA, 25 bp, Homo sapien
tagtatatgcgtcaaaataagagtc

SEQ ID NO: 1295341 - DNA, 25 bp, Homo sapien
atcagatcatggaaggatagctcca

SEQ ID NO: 1295342 - DNA, 25 bp, Homo sapien
gatcatggaaggatagctccactcc

SEQ ID NO: 1295343 - DNA, 25 bp, Homo sapien
gggaactgtacatgatcagatcatg

SEQ ID NO: 1295344 - DNA, 25 bp, Homo sapien
ttaaaaagggaactgtacatgatca

SEQ ID NO: 1295345 - DNA, 25 bp, Homo sapien
gctgctggcaatcttaagcccaaaa

SEQ ID NO: 1295346 - DNA, 25 bp, Homo sapien
cactgtccttagctttggagtacac

SEQ ID NO: 1295347 - DNA, 25 bp, Homo sapien
caacaatgactgcatctgatgtgtg

SEQ ID NO: 1295348 - DNA, 25 bp, Homo sapien
gagtacacaactccaagtggcccga

SEQ ID NO: 1295349 - DNA, 25 bp, Homo sapien
ggactactaaattctggattactga

SEQ ID NO: 1295350 - DNA, 25 bp, Homo sapien
aaagaacttgattttgctagcagaa

SEQ ID NO: 1295351 - DNA, 25 bp, Homo sapien
agtgagaaggcatggactactaaat

SEQ ID NO: 1295352 - DNA, 25 bp, Homo sapien
gattttgctagcagaaatttttacc

SEQ ID NO: 1295353 - DNA, 25 bp, Homo sapien
tgtatttcccatagaatctttcagc

SEQ ID NO: 1295354 - DNA, 25 bp, Homo sapien
gacgtctccggctatatttgtctcg

SEQ ID NO: 1295355 - DNA, 25 bp, Homo sapien
tcagctgtgtatttcccatagaatc

SEQ ID NO: 1295356 - DNA, 25 bp, Homo sapien
tcatcattataaggacgtctccggc

SEQ ID NO: 1295357 - DNA, 25 bp, Homo sapien
tgtggaaggcacatgtgttccatga

SEQ ID NO: 1295358 - DNA, 25 bp, Homo sapien
ggatgttgggaaaaactcttctcca

SEQ ID NO: 1295359 - DNA, 25 bp, Homo sapien
ccagatctatgaccatcctgtcaat

SEQ ID NO: 1295360 - DNA, 25 bp, Homo sapien
tgaagaagactattggatgttggga

SEQ ID NO: 1295361 - DNA, 25 bp, Homo sapien
taccttagcattaaagcatgtttct

SEQ ID NO: 1295362 - DNA, 25 bp, Homo sapien
tagacaactattaataacccatacc

SEQ ID NO: 1295363 - DNA, 25 bp, Homo sapien
cagagaccatccttagacaactatt

SEQ ID NO: 1295364 - DNA, 25 bp, Homo sapien
tcacctcaggttgaaaaaggactta

SEQ ID NO: 1295365 - DNA, 25 bp, Homo sapien
gatgatactggcgtaactgggcagc

SEQ ID NO: 1295366 - DNA, 25 bp, Homo sapien
caaccgatgatactggcgtaactgg

SEQ ID NO: 1295367 - DNA, 25 bp, Homo sapien
gcttggtcaaccgatgatactggcg

SEQ ID NO: 1295368 - DNA, 25 bp, Homo sapien
tgatctgcttggtcaaccgatgata

SEQ ID NO: 1295369 - DNA, 25 bp, Homo sapien
tctgcactgatctccagcaacttca

SEQ ID NO: 1295370 - DNA, 25 bp, Homo sapien
ctcatagtcttctcctcttgccgca

SEQ ID NO: 1295371 - DNA, 25 bp, Homo sapien
catcttctgcactgatctccagcaa

SEQ ID NO: 1295372 - DNA, 25 bp, Homo sapien
tagtcttctcctcttgccgcacatt

SEQ ID NO: 1295373 - DNA, 25 bp, Homo sapien
ggtgatttaatttacgagcttcatt

SEQ ID NO: 1295374 - DNA, 25 bp, Homo sapien
ctttagttcccactccaaacgagct

SEQ ID NO: 1295375 - DNA, 25 bp, Homo sapien
cactccaaacgagcttttttggctt

SEQ ID NO: 1295376 - DNA, 25 bp, Homo sapien
ttgcaggtaattttagtcttttatc

SEQ ID NO: 1295377 - DNA, 25 bp, Homo sapien
taaagacgccaagaacatacctacg

SEQ ID NO: 1295378 - DNA, 25 bp, Homo sapien
cacaggcttggccagatgacggatc

SEQ ID NO: 1295379 - DNA, 25 bp, Homo sapien
taggtgtcacctactacatgaggca

SEQ ID NO: 1295380 - DNA, 25 bp, Homo sapien
ggttgagtaccaccgaacagagctt

SEQ ID NO: 1295381 - DNA, 25 bp, Homo sapien
agctcccggaatttgcgcagtctct

SEQ ID NO: 1295382 - DNA, 25 bp, Homo sapien
gaatttgcgcagtctctgttcgcgc

SEQ ID NO: 1295383 - DNA, 25 bp, Homo sapien
agcgagggacccctcctccgcgctg

SEQ ID NO: 1295384 - DNA, 25 bp, Homo sapien
tctgttcgcgcttctgagcggccag

SEQ ID NO: 1295385 - DNA, 25 bp, Homo sapien
gagaactggcttcaggcagagccgg

SEQ ID NO: 1295386 - DNA, 25 bp, Homo sapien
caccgccgacttgaccccacagtgt

SEQ ID NO: 1295387 - DNA, 25 bp, Homo sapien
gaagcgaaactagacttcgcctcca

SEQ ID NO: 1295388 - DNA, 25 bp, Homo sapien
tgagcctccctgaagcgaaactaga

SEQ ID NO: 1295389 - DNA, 25 bp, Homo sapien
tcccacttccggcaacaagatagag

SEQ ID NO: 1295390 - DNA, 25 bp, Homo sapien
tctcttcccacttccggcaacaaga

SEQ ID NO: 1295391 - DNA, 25 bp, Homo sapien
cacttccggcaacaagatagagcac

SEQ ID NO: 1295392 - DNA, 25 bp, Homo sapien
ttccggcaacaagatagagcacttc

SEQ ID NO: 1295393 - DNA, 25 bp, Homo sapien
ttaaaatctgcaagtctggacttaa

SEQ ID NO: 1295394 - DNA, 25 bp, Homo sapien
tattcctgccagtaaaattgggctc

SEQ ID NO: 1295395 - DNA, 25 bp, Homo sapien
gaaagatgtgtggtaaaaattgctc

SEQ ID NO: 1295396 - DNA, 25 bp, Homo sapien
ttaaaaactgggctggctacagtgg

SEQ ID NO: 1295397 - DNA, 25 bp, Homo sapien
gcacagtacctacataagatcagag

SEQ ID NO: 1295398 - DNA, 25 bp, Homo sapien
tgtctgccctgttagaactactctc

SEQ ID NO: 1295399 - DNA, 25 bp, Homo sapien
taccttcttgggtcctgccaatgca

SEQ ID NO: 1295400 - DNA, 25 bp, Homo sapien
tccctgagtgctagcctgaatgaac

SEQ ID NO: 1295401 - DNA, 25 bp, Homo sapien
gaagccaagccaccccgtctgaaga

SEQ ID NO: 1295402 - DNA, 25 bp, Homo sapien
cagaagcgcgaacggagactgcgca

SEQ ID NO: 1295403 - DNA, 25 bp, Homo sapien
tggctacgtctgtcctagaggagga

SEQ ID NO: 1295404 - DNA, 25 bp, Homo sapien
tgaagacgcttctccttacggagcc

SEQ ID NO: 1295405 - DNA, 25 bp, Homo sapien
aataattttaactatacctcagatt

SEQ ID NO: 1295406 - DNA, 25 bp, Homo sapien
acctcagattttacagcttaatgag

SEQ ID NO: 1295407 - DNA, 25 bp, Homo sapien
tagtttcttgccttgaagcccagta

SEQ ID NO: 1295408 - DNA, 25 bp, Homo sapien
gcttaatgaggcattctattcctcc

SEQ ID NO: 1295409 - DNA, 25 bp, Homo sapien
aaatatacaaaacaggaatacagtt

SEQ ID NO: 1295410 - DNA, 25 bp, Homo sapien
ttaaatatacaaaacaggaatacag

SEQ ID NO: 1295411 - DNA, 25 bp, Homo sapien
tattaaatatacaaaacaggaatac

SEQ ID NO: 1295412 - DNA, 25 bp, Homo sapien
ttattaaatatacaaaacaggaata

SEQ ID NO: 1295413 - DNA, 25 bp, Homo sapien
ttacaactatatacaaaagactccc

SEQ ID NO: 1295414 - DNA, 25 bp, Homo sapien
tatatacaaaagactcccacctgtg

SEQ ID NO: 1295415 - DNA, 25 bp, Homo sapien
taaccaagacaatatttacaactat

SEQ ID NO: 1295416 - DNA, 25 bp, Homo sapien
tcccacctgtgcataacctttggtc

SEQ ID NO: 1295417 - DNA, 25 bp, Homo sapien
ttttaaatgcacaagtacccctgaa

SEQ ID NO: 1295418 - DNA, 25 bp, Homo sapien
tgagtgttaagtatttacatctttt

SEQ ID NO: 1295419 - DNA, 25 bp, Homo sapien
gatgggataatgctagaaacactaa

SEQ ID NO: 1295420 - DNA, 25 bp, Homo sapien
agtacccctgaatggctcaaaggga

SEQ ID NO: 1295421 - DNA, 25 bp, Homo sapien
tcatgcaaacttagccatcagtttt

SEQ ID NO: 1295422 - DNA, 25 bp, Homo sapien
gctgatttttgtattggctttgcta

SEQ ID NO: 1295423 - DNA, 25 bp, Homo sapien
taggtatccacagtccatatggact

SEQ ID NO: 1295424 - DNA, 25 bp, Homo sapien
gatttttgtattggctttgctacag

SEQ ID NO: 1295425 - DNA, 25 bp, Homo sapien
ttagataggtatccacagtccatat

SEQ ID NO: 1295426 - DNA, 25 bp, Homo sapien
tagagatattatcaattgctgggcg

SEQ ID NO: 1295427 - DNA, 25 bp, Homo sapien
atattatcaattgctgggcgcggtg

SEQ ID NO: 1295428 - DNA, 25 bp, Homo sapien
taaataatcccatgtatgagcctta

SEQ ID NO: 1295429 - DNA, 25 bp, Homo sapien
ccatgtatgagccttagagatatta

SEQ ID NO: 1295430 - DNA, 25 bp, Homo sapien
tttcattgggatttcgagttccatc

SEQ ID NO: 1295431 - DNA, 25 bp, Homo sapien
ttgctgggtaggtttttcattggga

SEQ ID NO: 1295432 - DNA, 25 bp, Homo sapien
attagagctaaaagctatgcttctt

SEQ ID NO: 1295433 - DNA, 25 bp, Homo sapien
ttgggatttcgagttccatcttctg

SEQ ID NO: 1295434 - DNA, 25 bp, Homo sapien
gcacatcctgcacatttctggagaa

SEQ ID NO: 1295435 - DNA, 25 bp, Homo sapien
tatctgcaagtgaagcaggcctcct

SEQ ID NO: 1295436 - DNA, 25 bp, Homo sapien
taggcacctaatcgtctgaacaaag

SEQ ID NO: 1295437 - DNA, 25 bp, Homo sapien
tactaatactgagcaaacccacatc

SEQ ID NO: 1295438 - DNA, 25 bp, Homo sapien
taaacctctgatgctttagcccatg

SEQ ID NO: 1295439 - DNA, 25 bp, Homo sapien
tcccaaattctagcatgcacatgga

SEQ ID NO: 1295440 - DNA, 25 bp, Homo sapien
tgcacatggatctaccaacaaaaaa

SEQ ID NO: 1295441 - DNA, 25 bp, Homo sapien
acagatgccccaccgttacaacgtg

SEQ ID NO: 1295442 - DNA, 25 bp, Homo sapien
atcaatgtctgcagaccacattcat

SEQ ID NO: 1295443 - DNA, 25 bp, Homo sapien
caacagattttcttcatcaatgtct

SEQ ID NO: 1295444 - DNA, 25 bp, Homo sapien
caatgtctgcagaccacattcatga

SEQ ID NO: 1295445 - DNA, 25 bp, Homo sapien
tgtctgcagaccacattcatgattt

SEQ ID NO: 1295446 - DNA, 25 bp, Homo sapien
aaccttagcatcctaggctcaaaga

SEQ ID NO: 1295447 - DNA, 25 bp, Homo sapien
tcaccaaagtaccagctaataacgg

SEQ ID NO: 1295448 - DNA, 25 bp, Homo sapien
catgggtttgacattgcctatcttc

SEQ ID NO: 1295449 - DNA, 25 bp, Homo sapien
tgtaaacacgcggttttgccacatt

SEQ ID NO: 1295450 - DNA, 25 bp, Homo sapien
tgttccgacaaacctagaatactta

SEQ ID NO: 1295451 - DNA, 25 bp, Homo sapien
ttgacagttggctttctgaaagttt

SEQ ID NO: 1295452 - DNA, 25 bp, Homo sapien
tcagatttgacagttggctttctga

SEQ ID NO: 1295453 - DNA, 25 bp, Homo sapien
gacagttggctttctgaaagttttg

SEQ ID NO: 1295454 - DNA, 25 bp, Homo sapien
ctgagactagctggcaagtcaatgt

SEQ ID NO: 1295455 - DNA, 25 bp, Homo sapien
tgttcctagagctttcgctgcattg

SEQ ID NO: 1295456 - DNA, 25 bp, Homo sapien
tacttgatacacctattccacggct

SEQ ID NO: 1295457 - DNA, 25 bp, Homo sapien
tggctgaaggaacagttctgagact

SEQ ID NO: 1295458 - DNA, 25 bp, Homo sapien
tggtagttatttcccaagagaactc

SEQ ID NO: 1295459 - DNA, 25 bp, Homo sapien
taaaatactcattaatctggtagtt

SEQ ID NO: 1295460 - DNA, 25 bp, Homo sapien
aatctggtagttatttcccaagaga

SEQ ID NO: 1295461 - DNA, 25 bp, Homo sapien
ttaaaatactcattaatctggtagt

SEQ ID NO: 1295462 - DNA, 25 bp, Homo sapien
gcaacgttggttccctagcctactc

SEQ ID NO: 1295463 - DNA, 25 bp, Homo sapien
tattgaaactacacagcaacgttgg

SEQ ID NO: 1295464 - DNA, 25 bp, Homo sapien
tcctccaaaaagatttcgggcacta

SEQ ID NO: 1295465 - DNA, 25 bp, Homo sapien
tagcctactcatatactgccaccat

SEQ ID NO: 1295466 - DNA, 25 bp, Homo sapien
ggaacgggacctggacttgctcctc

SEQ ID NO: 1295467 - DNA, 25 bp, Homo sapien
agtatctcctggtgaacccgtagcg

SEQ ID NO: 1295468 - DNA, 25 bp, Homo sapien
tacactgtgcgaccaaagccgtagt

SEQ ID NO: 1295469 - DNA, 25 bp, Homo sapien
tagcgcctgtacttccgctggtggc

SEQ ID NO: 1295470 - DNA, 25 bp, Homo sapien
aaaaccggctcgagacgcgggaatg

SEQ ID NO: 1295471 - DNA, 25 bp, Homo sapien
tagaccgcgacgacagccggctgga

SEQ ID NO: 1295472 - DNA, 25 bp, Homo sapien
tcgagggcgaatccttctcctgcgg

SEQ ID NO: 1295473 - DNA, 25 bp, Homo sapien
cttctggaaaaagagcggctcctag

SEQ ID NO: 1295474 - DNA, 25 bp, Homo sapien
cacctgcggctttagcctgcgcttt

SEQ ID NO: 1295475 - DNA, 25 bp, Homo sapien
tcacctgcggctttagcctgcgctt

SEQ ID NO: 1295476 - DNA, 25 bp, Homo sapien
cggaaaggatcccgcaagcctcaac

SEQ ID NO: 1295477 - DNA, 25 bp, Homo sapien
aaggatcccgcaagcctcaactcag

SEQ ID NO: 1295478 - DNA, 25 bp, Homo sapien
gaaaggatcccgcaagcctcaactc

SEQ ID NO: 1295479 - DNA, 25 bp, Homo sapien
aggatcccgcaagcctcaactcagg

SEQ ID NO: 1295480 - DNA, 25 bp, Homo sapien
aacaagtcgagtcgcggaagccggc

SEQ ID NO: 1295481 - DNA, 25 bp, Homo sapien
gtcgagtcgcggaagccggcgcctg

SEQ ID NO: 1295482 - DNA, 25 bp, Homo sapien
aagtcgagtcgcggaagccggcgcc

SEQ ID NO: 1295483 - DNA, 25 bp, Homo sapien
aaaacaagtcgagtcgcggaagccg

SEQ ID NO: 1295484 - DNA, 25 bp, Homo sapien
gtcgacgcctccctcacgactgaga

SEQ ID NO: 1295485 - DNA, 25 bp, Homo sapien
ctccctcacgactgagagaaaggct

SEQ ID NO: 1295486 - DNA, 25 bp, Homo sapien
gacgcctccctcacgactgagagaa

SEQ ID NO: 1295487 - DNA, 25 bp, Homo sapien
gcctccctcacgactgagagaaagg

SEQ ID NO: 1295488 - DNA, 25 bp, Homo sapien
gactacgttagcagacgcgtcaaaa

SEQ ID NO: 1295489 - DNA, 25 bp, Homo sapien
tcctacgtccggatgcgcactgagg

SEQ ID NO: 1295490 - DNA, 25 bp, Homo sapien
ttcgaacggcgaattccacaacctc

SEQ ID NO: 1295491 - DNA, 25 bp, Homo sapien
ttagtccctgctttcgaacggcgaa

SEQ ID NO: 1295492 - DNA, 25 bp, Homo sapien
catgtccattccctaatttcctgga

SEQ ID NO: 1295493 - DNA, 25 bp, Homo sapien
tatggttggcaaaccaatcgcctcc

SEQ ID NO: 1295494 - DNA, 25 bp, Homo sapien
gtttatgtccttcattatggttggc

SEQ ID NO: 1295495 - DNA, 25 bp, Homo sapien
tattctgaagtatctgggtaggccc

SEQ ID NO: 1295496 - DNA, 25 bp, Homo sapien
tagaaggtgcattgagcaaatagca

SEQ ID NO: 1295497 - DNA, 25 bp, Homo sapien
agaggtctcgtggagcttcagcgta

SEQ ID NO: 1295498 - DNA, 25 bp, Homo sapien
ggtacaagcaaacacacagcactca

SEQ ID NO: 1295499 - DNA, 25 bp, Homo sapien
tcagcgtagtctgggaccctgacct

SEQ ID NO: 1295500 - DNA, 25 bp, Homo sapien
ggacagatttctggcacgtaaccat

SEQ ID NO: 1295501 - DNA, 25 bp, Homo sapien
tatgggctcgttctaaacaagttga

SEQ ID NO: 1295502 - DNA, 25 bp, Homo sapien
cagtatgtccatccgttcctgagca

SEQ ID NO: 1295503 - DNA, 25 bp, Homo sapien
ggattactgacatgcgcgaccacgt

SEQ ID NO: 1295504 - DNA, 25 bp, Homo sapien
cagctgattgcagtgaaaaccccag

SEQ ID NO: 1295505 - DNA, 25 bp, Homo sapien
tacaagacaaagttggagcagctga

SEQ ID NO: 1295506 - DNA, 25 bp, Homo sapien
tccacagatatcagagcagtcacag

SEQ ID NO: 1295507 - DNA, 25 bp, Homo sapien
caggagtttcctccaacggtggtgg

SEQ ID NO: 1295508 - DNA, 25 bp, Homo sapien
catcccagtcagctaaagcactgcg

SEQ ID NO: 1295509 - DNA, 25 bp, Homo sapien
tgctgggtcccattgagattttgtt

SEQ ID NO: 1295510 - DNA, 25 bp, Homo sapien
tcaggcaagatcttccatcccagtc

SEQ ID NO: 1295511 - DNA, 25 bp, Homo sapien
tgtttggtaaagtccatgtagccca

SEQ ID NO: 1295512 - DNA, 25 bp, Homo sapien
gagtgcatcaggcatctcacaatga

SEQ ID NO: 1295513 - DNA, 25 bp, Homo sapien
ggaggccctcacgtgcttgacttct

SEQ ID NO: 1295514 - DNA, 25 bp, Homo sapien
tgccccatcgagatctcacaggagg

SEQ ID NO: 1295515 - DNA, 25 bp, Homo sapien
tctggatttgaccttttgggcagcc

SEQ ID NO: 1295516 - DNA, 25 bp, Homo sapien
cctaaagtggaacagctaggtcgaa

SEQ ID NO: 1295517 - DNA, 25 bp, Homo sapien
cacgacaatgtatgggaatgccttc

SEQ ID NO: 1295518 - DNA, 25 bp, Homo sapien
ctaggtcgaaggagctgtgtcattt

SEQ ID NO: 1295519 - DNA, 25 bp, Homo sapien
tccaaaaaaggttgtcacgacaatg

SEQ ID NO: 1295520 - DNA, 25 bp, Homo sapien
tagctttacctaactggatgggagg

SEQ ID NO: 1295521 - DNA, 25 bp, Homo sapien
gaaagaaaacgcttccaggatgtgg

SEQ ID NO: 1295522 - DNA, 25 bp, Homo sapien
gctgactgaatacactgagatggca

SEQ ID NO: 1295523 - DNA, 25 bp, Homo sapien
tacctggcccacagaaatagatttg

SEQ ID NO: 1295524 - DNA, 25 bp, Homo sapien
tgaataccatttggcgttttgaaga

SEQ ID NO: 1295525 - DNA, 25 bp, Homo sapien
gaattaacagctttgtgaacgtggc

SEQ ID NO: 1295526 - DNA, 25 bp, Homo sapien
catgttggctaggatagtttcacca

SEQ ID NO: 1295527 - DNA, 25 bp, Homo sapien
caccaggatctcttggcctcatgat

SEQ ID NO: 1295528 - DNA, 25 bp, Homo sapien
tatttgcacgaaagagaaccaatct

SEQ ID NO: 1295529 - DNA, 25 bp, Homo sapien
tgttgtattagtcggcttgggctac

SEQ ID NO: 1295530 - DNA, 25 bp, Homo sapien
cttgggctaccataacagcagctta

SEQ ID NO: 1295531 - DNA, 25 bp, Homo sapien
taaggtggttccactcagtgactga

SEQ ID NO: 1295532 - DNA, 25 bp, Homo sapien
catcatgtctggctaatttttgtat

SEQ ID NO: 1295533 - DNA, 25 bp, Homo sapien
cagtggcccgatcgatctcggctca

SEQ ID NO: 1295534 - DNA, 25 bp, Homo sapien
ccatcatgtctggctaatttttgta

SEQ ID NO: 1295535 - DNA, 25 bp, Homo sapien
agtgcagtggcccgatcgatctcgg

SEQ ID NO: 1295536 - DNA, 25 bp, Homo sapien
tatttcccacattgccaattccatt

SEQ ID NO: 1295537 - DNA, 25 bp, Homo sapien
ttccatttcaattaactataatagc

SEQ ID NO: 1295538 - DNA, 25 bp, Homo sapien
ctataatagctatgtctattgagca

SEQ ID NO: 1295539 - DNA, 25 bp, Homo sapien
atgtgatttcttatttcccacattg

SEQ ID NO: 1295540 - DNA, 25 bp, Homo sapien
ccaggagctagagcatgaagatctc

SEQ ID NO: 1295541 - DNA, 25 bp, Homo sapien
tttgtttcaagccacctgcacattg

SEQ ID NO: 1295542 - DNA, 25 bp, Homo sapien
tttcaagccacctgcacattgaggg

SEQ ID NO: 1295543 - DNA, 25 bp, Homo sapien
caggagctagagcatgaagatctcg

SEQ ID NO: 1295544 - DNA, 25 bp, Homo sapien
aagacaaagacagcttgtgcagaga

SEQ ID NO: 1295545 - DNA, 25 bp, Homo sapien
tacaggcccatgagagtccaaaatc

SEQ ID NO: 1295546 - DNA, 25 bp, Homo sapien
tggatggcaggcaaagacaaagaca

SEQ ID NO: 1295547 - DNA, 25 bp, Homo sapien
ccttatagagccatcagatcctgtt

SEQ ID NO: 1295548 - DNA, 25 bp, Homo sapien
aacccaatacctataatattcctgg

SEQ ID NO: 1295549 - DNA, 25 bp, Homo sapien
tcctggctagtactcttcacatcta

SEQ ID NO: 1295550 - DNA, 25 bp, Homo sapien
ctcacctgttgcctagactagaatg

SEQ ID NO: 1295551 - DNA, 25 bp, Homo sapien
caaagaaagtatgtgaaactgacac

SEQ ID NO: 1295552 - DNA, 25 bp, Homo sapien
cagttttatctactaatcggctaat

SEQ ID NO: 1295553 - DNA, 25 bp, Homo sapien
ggatgaaagtttcatccatcaaagg

SEQ ID NO: 1295554 - DNA, 25 bp, Homo sapien
tcaatcagatgaacctgtgcgtatc

SEQ ID NO: 1295555 - DNA, 25 bp, Homo sapien
tatactgccgccgtacatgtcaatc

SEQ ID NO: 1295556 - DNA, 25 bp, Homo sapien
tacttgcatccactgggtagaggcg

SEQ ID NO: 1295557 - DNA, 25 bp, Homo sapien
tgagtagcgctgtgtggccgcaaac

SEQ ID NO: 1295558 - DNA, 25 bp, Homo sapien
agctacacaacctgcgaagcacggg

SEQ ID NO: 1295559 - DNA, 25 bp, Homo sapien
cagtggttctcaagcgaggcgatct

SEQ ID NO: 1295560 - DNA, 25 bp, Homo sapien
cactcaagacgggtacgaaggccaa

SEQ ID NO: 1295561 - DNA, 25 bp, Homo sapien
ggacgccttcctttagaacgctcag

SEQ ID NO: 1295562 - DNA, 25 bp, Homo sapien
aaatggcgtactccaaactagcact

SEQ ID NO: 1295563 - DNA, 25 bp, Homo sapien
acttctcacgcctactctcaaatgg

SEQ ID NO: 1295564 - DNA, 25 bp, Homo sapien
cagtcgtcgtgcaaagaaaaatgga

SEQ ID NO: 1295565 - DNA, 25 bp, Homo sapien
agtcgtcgtgcaaagaaaaatggat

SEQ ID NO: 1295566 - DNA, 25 bp, Homo sapien
gaacacccaatcatcgtgcctaaga

SEQ ID NO: 1295567 - DNA, 25 bp, Homo sapien
tcgtgcctaagaactacaaaagaat

SEQ ID NO: 1295568 - DNA, 25 bp, Homo sapien
cgtgtaaggtgctgatgtaagaaca

SEQ ID NO: 1295569 - DNA, 25 bp, Homo sapien
gttagacgtgtaaggtgctgatgta

SEQ ID NO: 1295570 - DNA, 25 bp, Homo sapien
ggccgcactgaagacttatggcagt

SEQ ID NO: 1295571 - DNA, 25 bp, Homo sapien
gagtgtagtctcagcttaaagttgt

SEQ ID NO: 1295572 - DNA, 25 bp, Homo sapien
ccaaaaatctattgtggtatgcact

SEQ ID NO: 1295573 - DNA, 25 bp, Homo sapien
tcatatctgaggtccaaaaccacaa

SEQ ID NO: 1295574 - DNA, 25 bp, Homo sapien
gaagatgtgactcagccatgacacg

SEQ ID NO: 1295575 - DNA, 25 bp, Homo sapien
gatgggatacactcttcaggaccac

SEQ ID NO: 1295576 - DNA, 25 bp, Homo sapien
tgtgcctctcattccaagggcagga

SEQ ID NO: 1295577 - DNA, 25 bp, Homo sapien
acacgtggttctggtgggatgcaca

SEQ ID NO: 1295578 - DNA, 25 bp, Homo sapien
ggagaaaagcatgattcccacaagg

SEQ ID NO: 1295579 - DNA, 25 bp, Homo sapien
tgtagacaagagttaactgagtagc

SEQ ID NO: 1295580 - DNA, 25 bp, Homo sapien
cccacaaggactaagtatcagtgat

SEQ ID NO: 1295581 - DNA, 25 bp, Homo sapien
aatgccagccaccttgtaaaactgc

SEQ ID NO: 1295582 - DNA, 25 bp, Homo sapien
cgtttctcacgtacaaatgcaggca

SEQ ID NO: 1295583 - DNA, 25 bp, Homo sapien
gcgtttctcacgtacaaatgcaggc

SEQ ID NO: 1295584 - DNA, 25 bp, Homo sapien
atgagcgtttctcacgtacaaatgc

SEQ ID NO: 1295585 - DNA, 25 bp, Homo sapien
gagcgtttctcacgtacaaatgcag

SEQ ID NO: 1295586 - DNA, 25 bp, Homo sapien
taaaatccaacagccaaatgaggaa

SEQ ID NO: 1295587 - DNA, 25 bp, Homo sapien
aaaatccaacagccaaatgaggaaa

SEQ ID NO: 1295588 - DNA, 25 bp, Homo sapien
ttaaaatccaacagccaaatgagga

SEQ ID NO: 1295589 - DNA, 25 bp, Homo sapien
cccaggggttcaagtaattctgcct

SEQ ID NO: 1295590 - DNA, 25 bp, Homo sapien
attctgcctcagcttcccaagtagc

SEQ ID NO: 1295591 - DNA, 25 bp, Homo sapien
gattacaggtatgcaccaccacacc

SEQ ID NO: 1295592 - DNA, 25 bp, Homo sapien
gggattacaggtatgcaccaccaca

SEQ ID NO: 1295593 - DNA, 25 bp, Homo sapien
attgcttccccactcaaacctttgg

SEQ ID NO: 1295594 - DNA, 25 bp, Homo sapien
ttggaatgccttgcacttcctgctg

SEQ ID NO: 1295595 - DNA, 25 bp, Homo sapien
ttcagccttttcacacactgccgag

SEQ ID NO: 1295596 - DNA, 25 bp, Homo sapien
gatgaaattgaagtggctctagcca

SEQ ID NO: 1295597 - DNA, 25 bp, Homo sapien
aactgtaggcttgcaatatgatagc

SEQ ID NO: 1295598 - DNA, 25 bp, Homo sapien
ggaaaagcacctagcacaaaatcag

SEQ ID NO: 1295599 - DNA, 25 bp, Homo sapien
gcacctgggcgacatacttactttt

SEQ ID NO: 1295600 - DNA, 25 bp, Homo sapien
cattcccttgtggttggctaaatcc

SEQ ID NO: 1295601 - DNA, 25 bp, Homo sapien
cttccagaaaacttggtcatcaaaa

SEQ ID NO: 1295602 - DNA, 25 bp, Homo sapien
tccagaaaacttggtcatcaaaata

SEQ ID NO: 1295603 - DNA, 25 bp, Homo sapien
ttccagaaaacttggtcatcaaaat

SEQ ID NO: 1295604 - DNA, 25 bp, Homo sapien
gccacatgaggtgctttccatattt

SEQ ID NO: 1295605 - DNA, 25 bp, Homo sapien
ttagccacatgaggtgctttccata

SEQ ID NO: 1295606 - DNA, 25 bp, Homo sapien
acatgaggtgctttccatattttga

SEQ ID NO: 1295607 - DNA, 25 bp, Homo sapien
tccatattttgagatttaggagcaa

SEQ ID NO: 1295608 - DNA, 25 bp, Homo sapien
gtagaagggccccacgaaagctgat

SEQ ID NO: 1295609 - DNA, 25 bp, Homo sapien
agttgggtgctcctataggtctgtc

SEQ ID NO: 1295610 - DNA, 25 bp, Homo sapien
gcttcccgaagctggctgaatttca

SEQ ID NO: 1295611 - DNA, 25 bp, Homo sapien
cgcccttccccagacggagtagaag

SEQ ID NO: 1295612 - DNA, 25 bp, Homo sapien
tattggcatgcagggtacaaccagc

SEQ ID NO: 1295613 - DNA, 25 bp, Homo sapien
tcagtaatgatctctggcgcctgca

SEQ ID NO: 1295614 - DNA, 25 bp, Homo sapien
gggttgttggtctaatctctcagca

SEQ ID NO: 1295615 - DNA, 25 bp, Homo sapien
gctgaggcttactcatcactgagga

SEQ ID NO: 1295616 - DNA, 25 bp, Homo sapien
gagagctatcacgatggccaagctg

SEQ ID NO: 1295617 - DNA, 25 bp, Homo sapien
agagctatcacgatggccaagctga

SEQ ID NO: 1295618 - DNA, 25 bp, Homo sapien
tgagagctatcacgatggccaagct

SEQ ID NO: 1295619 - DNA, 25 bp, Homo sapien
gagctatcacgatggccaagctgag

SEQ ID NO: 1295620 - DNA, 25 bp, Homo sapien
cggagatgtggtgaatccccagcac

SEQ ID NO: 1295621 - DNA, 25 bp, Homo sapien
tgaagatggagtgcatgacggagat

SEQ ID NO: 1295622 - DNA, 25 bp, Homo sapien
gttccagacagtatgaagcaccagc

SEQ ID NO: 1295623 - DNA, 25 bp, Homo sapien
attgccgttccagacagtatgaagc

SEQ ID NO: 1295624 - DNA, 25 bp, Homo sapien
gtgacacgaggtacccacagccacg

SEQ ID NO: 1295625 - DNA, 25 bp, Homo sapien
ccatggcaagccacggagaagggat

SEQ ID NO: 1295626 - DNA, 25 bp, Homo sapien
gccaacaccgcactgtgcacataag

SEQ ID NO: 1295627 - DNA, 25 bp, Homo sapien
ccacggagaagggatcaggtgacac

SEQ ID NO: 1295628 - DNA, 25 bp, Homo sapien
ccaaggatgaccctgagatggctgt

SEQ ID NO: 1295629 - DNA, 25 bp, Homo sapien
atgaccctgagatggctgtcaccac

SEQ ID NO: 1295630 - DNA, 25 bp, Homo sapien
ttgggggtgagccaaggatgaccct

SEQ ID NO: 1295631 - DNA, 25 bp, Homo sapien
tggccagaacatccacaagaagagg

SEQ ID NO: 1295632 - DNA, 25 bp, Homo sapien
agtgcctcaggttcatgtggtagtc

SEQ ID NO: 1295633 - DNA, 25 bp, Homo sapien
tagaagtgcctcaggttcatgtggt

SEQ ID NO: 1295634 - DNA, 25 bp, Homo sapien
gaagtgcctcaggttcatgtggtag

SEQ ID NO: 1295635 - DNA, 25 bp, Homo sapien
aagtgcctcaggttcatgtggtagt

SEQ ID NO: 1295636 - DNA, 25 bp, Homo sapien
catctctttgagctccaccaggaag

SEQ ID NO: 1295637 - DNA, 25 bp, Homo sapien
ccacaagagtgcctggtgtatagta

SEQ ID NO: 1295638 - DNA, 25 bp, Homo sapien
aaaagcgggcttgcgtttttcatct

SEQ ID NO: 1295639 - DNA, 25 bp, Homo sapien
cactgccacaagagtgcctggtgta

SEQ ID NO: 1295640 - DNA, 25 bp, Homo sapien
ctatctcatattataaatttctaaa

SEQ ID NO: 1295641 - DNA, 25 bp, Homo sapien
ttagactttcgacaggctctcccaa

SEQ ID NO: 1295642 - DNA, 25 bp, Homo sapien
ctgacacgcactgactgaaagaaga

SEQ ID NO: 1295643 - DNA, 25 bp, Homo sapien
gctggctgtacaaacttgctggacc

SEQ ID NO: 1295644 - DNA, 25 bp, Homo sapien
acaggctctcccaatgagaggacat

SEQ ID NO: 1295645 - DNA, 25 bp, Homo sapien
tgatgaccatcctcaggttgcctaa

SEQ ID NO: 1295646 - DNA, 25 bp, Homo sapien
ctgagatcagcaccgacaaagcact

SEQ ID NO: 1295647 - DNA, 25 bp, Homo sapien
atattactgatgaccatcctcaggt

SEQ ID NO: 1295648 - DNA, 25 bp, Homo sapien
catccactgagatcagcaccgacaa

SEQ ID NO: 1295649 - DNA, 25 bp, Homo sapien
cttaactcaggagcgtgtgtgccgg

SEQ ID NO: 1295650 - DNA, 25 bp, Homo sapien
gcgtgctctcaggtctaggctgcct

SEQ ID NO: 1295651 - DNA, 25 bp, Homo sapien
tgccggcggcggtatttcattcctc

SEQ ID NO: 1295652 - DNA, 25 bp, Homo sapien
tgcagtggttaggagcgtgctctca

SEQ ID NO: 1295653 - DNA, 25 bp, Homo sapien
gtgtgatgaccaccttcccagaagg

SEQ ID NO: 1295654 - DNA, 25 bp, Homo sapien
cctgctgcgagggacctggtgagct

SEQ ID NO: 1295655 - DNA, 25 bp, Homo sapien
ctgcgagggacctggtgagctggct

SEQ ID NO: 1295656 - DNA, 25 bp, Homo sapien
gcgagggacctggtgagctggctgg

SEQ ID NO: 1295657 - DNA, 25 bp, Homo sapien
tgctgcgagggacctggtgagctgg

SEQ ID NO: 1295658 - DNA, 25 bp, Homo sapien
gctgtggcaggtgagtggaagagac

SEQ ID NO: 1295659 - DNA, 25 bp, Homo sapien
tttcccggtctcagaccctgagcag

SEQ ID NO: 1295660 - DNA, 25 bp, Homo sapien
ctttcccggtctcagaccctgagca

SEQ ID NO: 1295661 - DNA, 25 bp, Homo sapien
tggcaggtgagtggaagagacgcac

SEQ ID NO: 1295662 - DNA, 25 bp, Homo sapien
ttacattgttggctgaatttcggtg

SEQ ID NO: 1295663 - DNA, 25 bp, Homo sapien
cattgttggctgaatttcggtgcaa

SEQ ID NO: 1295664 - DNA, 25 bp, Homo sapien
tacattgttggctgaatttcggtgc

SEQ ID NO: 1295665 - DNA, 25 bp, Homo sapien
attgttggctgaatttcggtgcaat

SEQ ID NO: 1295666 - DNA, 25 bp, Homo sapien
taggatgccacgagccccttttgat

SEQ ID NO: 1295667 - DNA, 25 bp, Homo sapien
cagaccgcgggtacttagagctcat

SEQ ID NO: 1295668 - DNA, 25 bp, Homo sapien
cttttgatcctctaaggaagcgtca

SEQ ID NO: 1295669 - DNA, 25 bp, Homo sapien
taaggaagcgtcatagtgggtaaaa

SEQ ID NO: 1295670 - DNA, 25 bp, Homo sapien
tctctccaacacctacttgagggct

SEQ ID NO: 1295671 - DNA, 25 bp, Homo sapien
accagcaccaggcatcacccctctc

SEQ ID NO: 1295672 - DNA, 25 bp, Homo sapien
cctctctccaacacctacttgaggg

SEQ ID NO: 1295673 - DNA, 25 bp, Homo sapien
tctccaacacctacttgagggcttg

SEQ ID NO: 1295674 - DNA, 25 bp, Homo sapien
gatgtcagcaagatgaacactaaag

SEQ ID NO: 1295675 - DNA, 25 bp, Homo sapien
aatgccaacccccggacctgatggg

SEQ ID NO: 1295676 - DNA, 25 bp, Homo sapien
ctgcccgagggcaccagatgtcagc

SEQ ID NO: 1295677 - DNA, 25 bp, Homo sapien
cagatgtcagcaagatgaacactaa

SEQ ID NO: 1295678 - DNA, 25 bp, Homo sapien
tggcaaacggcgtgggtggtggttg

SEQ ID NO: 1295679 - DNA, 25 bp, Homo sapien
ttaccagctggcaaacggcgtgggt

SEQ ID NO: 1295680 - DNA, 25 bp, Homo sapien
gtttaccagctggcaaacggcgtgg

SEQ ID NO: 1295681 - DNA, 25 bp, Homo sapien
gctggcaaacggcgtgggtggtggt

SEQ ID NO: 1295682 - DNA, 25 bp, Homo sapien
tgtcgtatcagccttcagaagagca

SEQ ID NO: 1295683 - DNA, 25 bp, Homo sapien
gcatttaaacactgccacacgctgt

SEQ ID NO: 1295684 - DNA, 25 bp, Homo sapien
tcaatggaagcctgaatcacaagca

SEQ ID NO: 1295685 - DNA, 25 bp, Homo sapien
tatgcaatcagtgcacagagagctg

SEQ ID NO: 1295686 - DNA, 25 bp, Homo sapien
ctgccacgttcacaaagctgttaat

SEQ ID NO: 1295687 - DNA, 25 bp, Homo sapien
tgccacgttcacaaagctgttaatt

SEQ ID NO: 1295688 - DNA, 25 bp, Homo sapien
tctgactccagtgcctgcgcgaaca

SEQ ID NO: 1295689 - DNA, 25 bp, Homo sapien
cagtgcctgcgcgaacattggagac

SEQ ID NO: 1295690 - DNA, 25 bp, Homo sapien
tgcgcgaacattggagactttgctg

SEQ ID NO: 1295691 - DNA, 25 bp, Homo sapien
gttgtattctacagtgcataataaa

SEQ ID NO: 1295692 - DNA, 25 bp, Homo sapien
ttaaaatccaacagccaaatgagga

SEQ ID NO: 1295693 - DNA, 25 bp, Homo sapien
taaaatccaacagccaaatgaggaa

SEQ ID NO: 1295694 - DNA, 25 bp, Homo sapien
aaaatccaacagccaaatgaggaaa

SEQ ID NO: 1295695 - DNA, 25 bp, Homo sapien
gcttgatctcttgaaacagcctaaa

SEQ ID NO: 1295696 - DNA, 25 bp, Homo sapien
aatgtctcattacaaagaccttaga

SEQ ID NO: 1295697 - DNA, 25 bp, Homo sapien
agatgaacccacatactgattttgg

SEQ ID NO: 1295698 - DNA, 25 bp, Homo sapien
gattttggcttgatctcttgaaaca

SEQ ID NO: 1295699 - DNA, 25 bp, Homo sapien
gcctacatgccggtctttcaagtgt

SEQ ID NO: 1295700 - DNA, 25 bp, Homo sapien
aattctgcctcaaccaccggagtag

SEQ ID NO: 1295701 - DNA, 25 bp, Homo sapien
catgccggtctttcaagtgttcgaa

SEQ ID NO: 1295702 - DNA, 25 bp, Homo sapien
cccggcctacatgccggtctttcaa

SEQ ID NO: 1295703 - DNA, 25 bp, Homo sapien
cccaggggttcaagtaattctgcct

SEQ ID NO: 1295704 - DNA, 25 bp, Homo sapien
attctgcctcagcttcccaagtagc

SEQ ID NO: 1295705 - DNA, 25 bp, Homo sapien
gggattacaggtatgcaccaccaca

SEQ ID NO: 1295706 - DNA, 25 bp, Homo sapien
gattacaggtatgcaccaccacacc

SEQ ID NO: 1295707 - DNA, 25 bp, Homo sapien
ttggaatgccttgcacttcctgctg

SEQ ID NO: 1295708 - DNA, 25 bp, Homo sapien
ttcagccttttcacacactgccgag

SEQ ID NO: 1295709 - DNA, 25 bp, Homo sapien
attgcttccccactcaaacctttgg

SEQ ID NO: 1295710 - DNA, 25 bp, Homo sapien
gatgaaattgaagtggctctagcca

SEQ ID NO: 1295711 - DNA, 25 bp, Homo sapien
cattcccttgtggttggctaaatcc

SEQ ID NO: 1295712 - DNA, 25 bp, Homo sapien
ggaaaagcacctagcacaaaatcag

SEQ ID NO: 1295713 - DNA, 25 bp, Homo sapien
gcacctgggcgacatacttactttt

SEQ ID NO: 1295714 - DNA, 25 bp, Homo sapien
aactgtaggcttgcaatatgatagc

SEQ ID NO: 1295715 - DNA, 25 bp, Homo sapien
ttccagaaaacttggtcatcaaaat

SEQ ID NO: 1295716 - DNA, 25 bp, Homo sapien
cttccagaaaacttggtcatcaaaa

SEQ ID NO: 1295717 - DNA, 25 bp, Homo sapien
tccagaaaacttggtcatcaaaata

SEQ ID NO: 1295718 - DNA, 25 bp, Homo sapien
tctgacgcccttccccagatggagt

SEQ ID NO: 1295719 - DNA, 25 bp, Homo sapien
aattgggtgctcctataggtctgtc

SEQ ID NO: 1295720 - DNA, 25 bp, Homo sapien
tatgggctactatggagggtgactc

SEQ ID NO: 1295721 - DNA, 25 bp, Homo sapien
cagatggagtaaaagggccccacga

SEQ ID NO: 1295722 - DNA, 25 bp, Homo sapien
tggggtcaagccattcccctacttc

SEQ ID NO: 1295723 - DNA, 25 bp, Homo sapien
gtggtgcaacctcgactcactataa

SEQ ID NO: 1295724 - DNA, 25 bp, Homo sapien
gggtcaagccattcccctacttcag

SEQ ID NO: 1295725 - DNA, 25 bp, Homo sapien
cctggggtcaagccattcccctact

SEQ ID NO: 1295726 - DNA, 25 bp, Homo sapien
tagctgggatccaacaccacgcctg

SEQ ID NO: 1295727 - DNA, 25 bp, Homo sapien
tcccctttgttgaaagatctccagt

SEQ ID NO: 1295728 - DNA, 25 bp, Homo sapien
ggctaattagcaactcccctagatt

SEQ ID NO: 1295729 - DNA, 25 bp, Homo sapien
cacctggcatataagtaaaactggc

SEQ ID NO: 1295730 - DNA, 25 bp, Homo sapien
gagctatcacgatggccaagctgag

SEQ ID NO: 1295731 - DNA, 25 bp, Homo sapien
agagctatcacgatggccaagctga

SEQ ID NO: 1295732 - DNA, 25 bp, Homo sapien
gagagctatcacgatggccaagctg

SEQ ID NO: 1295733 - DNA, 25 bp, Homo sapien
tgagagctatcacgatggccaagct

SEQ ID NO: 1295734 - DNA, 25 bp, Homo sapien
aaattagtgccatgtgtatgctgcc

SEQ ID NO: 1295735 - DNA, 25 bp, Homo sapien
ggccacctgaaccacagctgggatg

SEQ ID NO: 1295736 - DNA, 25 bp, Homo sapien
tgaggaatgctgcaccagaaatgtg

SEQ ID NO: 1295737 - DNA, 25 bp, Homo sapien
gctgccaaggtttatgacttttacc

SEQ ID NO: 1295738 - DNA, 25 bp, Homo sapien
cacagaattgggaatctaggcagcc

SEQ ID NO: 1295739 - DNA, 25 bp, Homo sapien
tacttgggagagcacatgcaaaact

SEQ ID NO: 1295740 - DNA, 25 bp, Homo sapien
tgatgggtgcaagctgaagagctcc

SEQ ID NO: 1295741 - DNA, 25 bp, Homo sapien
gagaaccaatgcttccagagaacca

SEQ ID NO: 1295742 - DNA, 25 bp, Homo sapien
ccagctagtacgcagtgggagcacg

SEQ ID NO: 1295743 - DNA, 25 bp, Homo sapien
gcaaagctctgcatcacgacctgaa

SEQ ID NO: 1295744 - DNA, 25 bp, Homo sapien
cacagtctcaattggcttgggccta

SEQ ID NO: 1295745 - DNA, 25 bp, Homo sapien
cctcagggatgggttgtgcttagca

SEQ ID NO: 1295746 - DNA, 25 bp, Homo sapien
cgacggtatcaagcaccagcagcac

SEQ ID NO: 1295747 - DNA, 25 bp, Homo sapien
atccccagcactcggttacaacacc

SEQ ID NO: 1295748 - DNA, 25 bp, Homo sapien
tgccattgccggctccgacggtatc

SEQ ID NO: 1295749 - DNA, 25 bp, Homo sapien
ccaagcagacccagcaagctgaagt

SEQ ID NO: 1295750 - DNA, 25 bp, Homo sapien
ccatggcaagccacggagaagggat

SEQ ID NO: 1295751 - DNA, 25 bp, Homo sapien
gccaacaccgcactgtgcacataag

SEQ ID NO: 1295752 - DNA, 25 bp, Homo sapien
gtgacacgaggtacccacagccacg

SEQ ID NO: 1295753 - DNA, 25 bp, Homo sapien
ccacggagaagggatcaggtgacac

SEQ ID NO: 1295754 - DNA, 25 bp, Homo sapien
cctgagatggctgtcaccacgctga

SEQ ID NO: 1295755 - DNA, 25 bp, Homo sapien
catagtaggtgttgaacacggcatt

SEQ ID NO: 1295756 - DNA, 25 bp, Homo sapien
agcatagtaggtgttgaacacggca

SEQ ID NO: 1295757 - DNA, 25 bp, Homo sapien
tgaccctgagatggctgtcaccacg

SEQ ID NO: 1295758 - DNA, 25 bp, Homo sapien
acaaactgggtatcgttgctgtctg

SEQ ID NO: 1295759 - DNA, 25 bp, Homo sapien
aactgggtatcgttgctgtctgatc

SEQ ID NO: 1295760 - DNA, 25 bp, Homo sapien
gacaaactgggtatcgttgctgtct

SEQ ID NO: 1295761 - DNA, 25 bp, Homo sapien
caaactgggtatcgttgctgtctga

SEQ ID NO: 1295762 - DNA, 25 bp, Homo sapien
aaaataggctgcgaacacgtagatg

SEQ ID NO: 1295763 - DNA, 25 bp, Homo sapien
aataggctgcgaacacgtagatgtg

SEQ ID NO: 1295764 - DNA, 25 bp, Homo sapien
ataggctgcgaacacgtagatgtgc

SEQ ID NO: 1295765 - DNA, 25 bp, Homo sapien
caaaataggctgcgaacacgtagat

SEQ ID NO: 1295766 - DNA, 25 bp, Homo sapien
tggtcagacctgctcatatctcagc

SEQ ID NO: 1295767 - DNA, 25 bp, Homo sapien
tcaggaccgacctatcccagaatgg

SEQ ID NO: 1295768 - DNA, 25 bp, Homo sapien
agcacatacacttgtcaccgagcca

SEQ ID NO: 1295769 - DNA, 25 bp, Homo sapien
tctgttgctgcgaactccagtggtc

SEQ ID NO: 1295770 - DNA, 25 bp, Homo sapien
cctcgcagaaagctgccaaggcagg

SEQ ID NO: 1295771 - DNA, 25 bp, Homo sapien
tcatggggatgcctcgcagaaagct

SEQ ID NO: 1295772 - DNA, 25 bp, Homo sapien
agttgttactgactatgttcatggg

SEQ ID NO: 1295773 - DNA, 25 bp, Homo sapien
ggccttggacaagttgttactgact

SEQ ID NO: 1295774 - DNA, 25 bp, Homo sapien
tgtcctagtctgagtctggatgatg

SEQ ID NO: 1295775 - DNA, 25 bp, Homo sapien
tgatggccatcactgccgctctggt

SEQ ID NO: 1295776 - DNA, 25 bp, Homo sapien
ctatcagcaaattctgtcaattctg

SEQ ID NO: 1295777 - DNA, 25 bp, Homo sapien
accactctcacagctattgtcctag

SEQ ID NO: 1295778 - DNA, 25 bp, Homo sapien
gctggctgtacaaacttgctggacc

SEQ ID NO: 1295779 - DNA, 25 bp, Homo sapien
acaggctctcccaatgagaggacat

SEQ ID NO: 1295780 - DNA, 25 bp, Homo sapien
ttagactttcgacaggctctcccaa

SEQ ID NO: 1295781 - DNA, 25 bp, Homo sapien
ctgacacgcactgactgaaagaaga

SEQ ID NO: 1295782 - DNA, 25 bp, Homo sapien
catgtccattccctaatttcctgga

SEQ ID NO: 1295783 - DNA, 25 bp, Homo sapien
tatggttggcaaaccaatcgcctcc

SEQ ID NO: 1295784 - DNA, 25 bp, Homo sapien
gtttatgtccttcattatggttggc

SEQ ID NO: 1295785 - DNA, 25 bp, Homo sapien
tattctgaagtatctgggtaggccc

SEQ ID NO: 1295786 - DNA, 25 bp, Homo sapien
tcagcgtagtctgggaccctgacct

SEQ ID NO: 1295787 - DNA, 25 bp, Homo sapien
agaggtctcgtggagcttcagcgta

SEQ ID NO: 1295788 - DNA, 25 bp, Homo sapien
tagaaggtgcattgagcaaatagca

SEQ ID NO: 1295789 - DNA, 25 bp, Homo sapien
ggtacaagcaaacacacagcactca

SEQ ID NO: 1295790 - DNA, 25 bp, Homo sapien
ggacagatttctggcacgtaaccat

SEQ ID NO: 1295791 - DNA, 25 bp, Homo sapien
tatgggctcgttctaaacaagttga

SEQ ID NO: 1295792 - DNA, 25 bp, Homo sapien
cagtatgtccatccgttcctgagca

SEQ ID NO: 1295793 - DNA, 25 bp, Homo sapien
gcctcgaggcagatgatgtatttat

SEQ ID NO: 1295794 - DNA, 25 bp, Homo sapien
tagaggagcgtatccaaagtgtgag

SEQ ID NO: 1295795 - DNA, 25 bp, Homo sapien
tctttcagacaggattagaggagcg

SEQ ID NO: 1295796 - DNA, 25 bp, Homo sapien
ttattcatggacatgcatatggttt

SEQ ID NO: 1295797 - DNA, 25 bp, Homo sapien
gacaggattagaggagcgtatccaa

SEQ ID NO: 1295798 - DNA, 25 bp, Homo sapien
tcaggcaagatcttccatcccagtc

SEQ ID NO: 1295799 - DNA, 25 bp, Homo sapien
tgctgggtcccattgagattttgtt

SEQ ID NO: 1295800 - DNA, 25 bp, Homo sapien
tgtttggtaaagtccatgtagccca

SEQ ID NO: 1295801 - DNA, 25 bp, Homo sapien
catcccagtcagctaaagcactgcg

SEQ ID NO: 1295802 - DNA, 25 bp, Homo sapien
cacgacaatgtatgggaatgccttc

SEQ ID NO: 1295803 - DNA, 25 bp, Homo sapien
ctaggtcgaaggagctgtgtcattt

SEQ ID NO: 1295804 - DNA, 25 bp, Homo sapien
cctaaagtggaacagctaggtcgaa

SEQ ID NO: 1295805 - DNA, 25 bp, Homo sapien
tccaaaaaaggttgtcacgacaatg

SEQ ID NO: 1295806 - DNA, 25 bp, Homo sapien
gaaagaaaacgcttccaggatgtgg

SEQ ID NO: 1295807 - DNA, 25 bp, Homo sapien
tagctttacctaactggatgggagg

SEQ ID NO: 1295808 - DNA, 25 bp, Homo sapien
gctgactgaatacactgagatggca

SEQ ID NO: 1295809 - DNA, 25 bp, Homo sapien
tacctggcccacagaaatagatttg

SEQ ID NO: 1295810 - DNA, 25 bp, Homo sapien
catgttggctaggatagtttcacca

SEQ ID NO: 1295811 - DNA, 25 bp, Homo sapien
caccaggatctcttggcctcatgat

SEQ ID NO: 1295812 - DNA, 25 bp, Homo sapien
tgaataccatttggcgttttgaaga

SEQ ID NO: 1295813 - DNA, 25 bp, Homo sapien
gaattaacagctttgtgaacgtggc

SEQ ID NO: 1295814 - DNA, 25 bp, Homo sapien
tgttgtattagtcggcttgggctac

SEQ ID NO: 1295815 - DNA, 25 bp, Homo sapien
cttgggctaccataacagcagctta

SEQ ID NO: 1295816 - DNA, 25 bp, Homo sapien
tatttgcacgaaagagaaccaatct

SEQ ID NO: 1295817 - DNA, 25 bp, Homo sapien
taaggtggttccactcagtgactga

SEQ ID NO: 1295818 - DNA, 25 bp, Homo sapien
catcatgtctggctaatttttgtat

SEQ ID NO: 1295819 - DNA, 25 bp, Homo sapien
cagtggcccgatcgatctcggctca

SEQ ID NO: 1295820 - DNA, 25 bp, Homo sapien
agtgcagtggcccgatcgatctcgg

SEQ ID NO: 1295821 - DNA, 25 bp, Homo sapien
ccatcatgtctggctaatttttgta

SEQ ID NO: 1295822 - DNA, 25 bp, Homo sapien
tacaggcccatgagagtccaaaatc

SEQ ID NO: 1295823 - DNA, 25 bp, Homo sapien
aagacaaagacagcttgtgcagaga

SEQ ID NO: 1295824 - DNA, 25 bp, Homo sapien
tggatggcaggcaaagacaaagaca

SEQ ID NO: 1295825 - DNA, 25 bp, Homo sapien
ccttatagagccatcagatcctgtt

SEQ ID NO: 1295826 - DNA, 25 bp, Homo sapien
aacccaatacctataatattcctgg

SEQ ID NO: 1295827 - DNA, 25 bp, Homo sapien
ctcacctgttgcctagactagaatg

SEQ ID NO: 1295828 - DNA, 25 bp, Homo sapien
tcctggctagtactcttcacatcta

SEQ ID NO: 1295829 - DNA, 25 bp, Homo sapien
caaagaaagtatgtgaaactgacac

SEQ ID NO: 1295830 - DNA, 25 bp, Homo sapien
aatggcgtactccaaactagcactc

SEQ ID NO: 1295831 - DNA, 25 bp, Homo sapien
tagcactcccgacgtccagctgtga

SEQ ID NO: 1295832 - DNA, 25 bp, Homo sapien
ggacgccttcctttagaacgctcag

SEQ ID NO: 1295833 - DNA, 25 bp, Homo sapien
acttctcacgcctactctcaaatgg

SEQ ID NO: 1295834 - DNA, 25 bp, Homo sapien
gggcccaggttagcagaggtcacat

SEQ ID NO: 1295835 - DNA, 25 bp, Homo sapien
ttgacaaatctgttgggagaggcca

SEQ ID NO: 1295836 - DNA, 25 bp, Homo sapien
catttctgttctgcgaggagcggga

SEQ ID NO: 1295837 - DNA, 25 bp, Homo sapien
ttacagagcttgtactgggcccagg

SEQ ID NO: 1295838 - DNA, 25 bp, Homo sapien
agcagtgtggccttcaacctcttca

SEQ ID NO: 1295839 - DNA, 25 bp, Homo sapien
cctcttcatgctggcgcttggtgtg

SEQ ID NO: 1295840 - DNA, 25 bp, Homo sapien
aacctcttcatgctggcgcttggtg

SEQ ID NO: 1295841 - DNA, 25 bp, Homo sapien
gcagtgtggccttcaacctcttcat

SEQ ID NO: 1295842 - DNA, 25 bp, Homo sapien
caaggggtttcaccaggtgggtcag

SEQ ID NO: 1295843 - DNA, 25 bp, Homo sapien
taaatttttttacaggcgcctgcta

SEQ ID NO: 1295844 - DNA, 25 bp, Homo sapien
accaggtgggtcaggttggtctgga

SEQ ID NO: 1295845 - DNA, 25 bp, Homo sapien
taccatgccctgctaatttttgtat

SEQ ID NO: 1295846 - DNA, 25 bp, Homo sapien
ctttgcccttaccgtggctccagag

SEQ ID NO: 1295847 - DNA, 25 bp, Homo sapien
ttgcccttaccgtggctccagaggc

SEQ ID NO: 1295848 - DNA, 25 bp, Homo sapien
tttgcccttaccgtggctccagagg

SEQ ID NO: 1295849 - DNA, 25 bp, Homo sapien
aagaatactccttcacatccccagg

SEQ ID NO: 1295850 - DNA, 25 bp, Homo sapien
tttccactgccacggagacggagag

SEQ ID NO: 1295851 - DNA, 25 bp, Homo sapien
caacatgggatacgtttgatcatca

SEQ ID NO: 1295852 - DNA, 25 bp, Homo sapien
tctgttgagcatccgaatgatggca

SEQ ID NO: 1295853 - DNA, 25 bp, Homo sapien
tggggaaggtcaacttggcgcagtt

SEQ ID NO: 1295854 - DNA, 25 bp, Homo sapien
gaaggtcaacttggcgcagttggtg

SEQ ID NO: 1295855 - DNA, 25 bp, Homo sapien
tcaacttggcgcagttggtggtgat

SEQ ID NO: 1295856 - DNA, 25 bp, Homo sapien
gtcaacttggcgcagttggtggtga

SEQ ID NO: 1295857 - DNA, 25 bp, Homo sapien
tttgagcactgatacctttaggccg

SEQ ID NO: 1295858 - DNA, 25 bp, Homo sapien
ggacatgtgtaagagccagcaaagg

SEQ ID NO: 1295859 - DNA, 25 bp, Homo sapien
gatgaactgcaagagtcaagccttt

SEQ ID NO: 1295860 - DNA, 25 bp, Homo sapien
tagccattggatttggccaggagac

SEQ ID NO: 1295861 - DNA, 25 bp, Homo sapien
cttgcccttaaatggaacttctgta

SEQ ID NO: 1295862 - DNA, 25 bp, Homo sapien
aacttgcccttaaatggaacttctg

SEQ ID NO: 1295863 - DNA, 25 bp, Homo sapien
gcactccaagcgtttcttcctagga

SEQ ID NO: 1295864 - DNA, 25 bp, Homo sapien
ttcagaagcactccaagcgtttctt

SEQ ID NO: 1295865 - DNA, 25 bp, Homo sapien
cagcaaatcctgatcgttccagaat

SEQ ID NO: 1295866 - DNA, 25 bp, Homo sapien
cttcttctaagtggatggatctttc

SEQ ID NO: 1295867 - DNA, 25 bp, Homo sapien
tggtccaggtcgtgtccacttctga

SEQ ID NO: 1295868 - DNA, 25 bp, Homo sapien
aaaaggagtagattttcgaaggctg

SEQ ID NO: 1295869 - DNA, 25 bp, Homo sapien
gccactggagatctttcaacaaagg

SEQ ID NO: 1295870 - DNA, 25 bp, Homo sapien
tagcttttaagcagagaccccaatg

SEQ ID NO: 1295871 - DNA, 25 bp, Homo sapien
cagcatgctttgtgtgttgagggaa

SEQ ID NO: 1295872 - DNA, 25 bp, Homo sapien
cccttataaaagatgggaagccact

SEQ ID NO: 1295873 - DNA, 25 bp, Homo sapien
cacgatgtgaagtaccagagagata

SEQ ID NO: 1295874 - DNA, 25 bp, Homo sapien
gaatttcatagaactgactgccagg

SEQ ID NO: 1295875 - DNA, 25 bp, Homo sapien
atcctccgaaggtttatgaaaatgc

SEQ ID NO: 1295876 - DNA, 25 bp, Homo sapien
tgctaattcattccactacgtgtat

SEQ ID NO: 1295877 - DNA, 25 bp, Homo sapien
gagaatctcaccatttattatgcac

SEQ ID NO: 1295878 - DNA, 25 bp, Homo sapien
tttctctgccactctttgaggagaa

SEQ ID NO: 1295879 - DNA, 25 bp, Homo sapien
caaagtctccaatgttcgcgcaggc

SEQ ID NO: 1295880 - DNA, 25 bp, Homo sapien
aatgttcgcgcaggcactggagtca

SEQ ID NO: 1295881 - DNA, 25 bp, Homo sapien
gagcactcaagcgtattctagaaac

SEQ ID NO: 1295882 - DNA, 25 bp, Homo sapien
gagtcccacactgcgaaccatatta

SEQ ID NO: 1295883 - DNA, 25 bp, Homo sapien
gttattaagtaatccgtagtctgac

SEQ ID NO: 1295884 - DNA, 25 bp, Homo sapien
gaatgaactatagtccctgttatta

SEQ ID NO: 1295885 - DNA, 25 bp, Homo sapien
gttcacaaaccccagactaggcaat

SEQ ID NO: 1295886 - DNA, 25 bp, Homo sapien
aaagaagacaacttgtaggagaggc

SEQ ID NO: 1295887 - DNA, 25 bp, Homo sapien
cgtaggattttattctgcaaggtga

SEQ ID NO: 1295888 - DNA, 25 bp, Homo sapien
aagtgtggtgtgtatcacggtcagc

SEQ ID NO: 1295889 - DNA, 25 bp, Homo sapien
ttggctcctgttactcatgcaaatt

SEQ ID NO: 1295890 - DNA, 25 bp, Homo sapien
ttttcctgatatctctggacctgtg

SEQ ID NO: 1295891 - DNA, 25 bp, Homo sapien
tctttaatctaggcgaaggtttcca

SEQ ID NO: 1295892 - DNA, 25 bp, Homo sapien
gggcttgcactccccgaagctacag

SEQ ID NO: 1295893 - DNA, 25 bp, Homo sapien
aacccaatacctataatattcctgg

SEQ ID NO: 1295894 - DNA, 25 bp, Homo sapien
tcctggctagtactcttcacatcta

SEQ ID NO: 1295895 - DNA, 25 bp, Homo sapien
ctcacctgttgcctagactagaatg

SEQ ID NO: 1295896 - DNA, 25 bp, Homo sapien
caaagaaagtatgtgaaactgacac

SEQ ID NO: 1295897 - DNA, 25 bp, Homo sapien
tgagtagcgctgtgtggccgcaaac

SEQ ID NO: 1295898 - DNA, 25 bp, Homo sapien
tacttgcatccactgggtagaggcg

SEQ ID NO: 1295899 - DNA, 25 bp, Homo sapien
agctacacaacctgcgaagcacggg

SEQ ID NO: 1295900 - DNA, 25 bp, Homo sapien
cagtggttctcaagcgaggcgatct

SEQ ID NO: 1295901 - DNA, 25 bp, Homo sapien
gaacacccaatcatcgtgcctaaga

SEQ ID NO: 1295902 - DNA, 25 bp, Homo sapien
tcgtgcctaagaactacaaaagaat

SEQ ID NO: 1295903 - DNA, 25 bp, Homo sapien
gttagacgtgtaaggtgctgatgta

SEQ ID NO: 1295904 - DNA, 25 bp, Homo sapien
cgtgtaaggtgctgatgtaagaaca

SEQ ID NO: 1295905 - DNA, 25 bp, Homo sapien
gagtgtagtctcagcttaaagttgt

SEQ ID NO: 1295906 - DNA, 25 bp, Homo sapien
ccaaaaatctattgtggtatgcact

SEQ ID NO: 1295907 - DNA, 25 bp, Homo sapien
ggccgcactgaagacttatggcagt

SEQ ID NO: 1295908 - DNA, 25 bp, Homo sapien
tcatatctgaggtccaaaaccacaa

SEQ ID NO: 1295909 - DNA, 25 bp, Homo sapien
gaagatcttagaggttgaagcccac

SEQ ID NO: 1295910 - DNA, 25 bp, Homo sapien
taaacgacttcctcacggtcacaga

SEQ ID NO: 1295911 - DNA, 25 bp, Homo sapien
ttttaatcctcaggcagtgcatccc

SEQ ID NO: 1295912 - DNA, 25 bp, Homo sapien
catgctagccatggtcatctgacag

SEQ ID NO: 1295913 - DNA, 25 bp, Homo sapien
atgagcgtttctcacgtacaaatgc

SEQ ID NO: 1295914 - DNA, 25 bp, Homo sapien
cgtttctcacgtacaaatgcaggca

SEQ ID NO: 1295915 - DNA, 25 bp, Homo sapien
gcgtttctcacgtacaaatgcaggc

SEQ ID NO: 1295916 - DNA, 25 bp, Homo sapien
gagcgtttctcacgtacaaatgcag

SEQ ID NO: 1295917 - DNA, 25 bp, Homo sapien
taaaatccaacagccaaatgaggaa

SEQ ID NO: 1295918 - DNA, 25 bp, Homo sapien
aaaatccaacagccaaatgaggaaa

SEQ ID NO: 1295919 - DNA, 25 bp, Homo sapien
ttaaaatccaacagccaaatgagga

SEQ ID NO: 1295920 - DNA, 25 bp, Homo sapien
gcctacatgccggtctttcaagtgt

SEQ ID NO: 1295921 - DNA, 25 bp, Homo sapien
catgccggtctttcaagtgttcgaa

SEQ ID NO: 1295922 - DNA, 25 bp, Homo sapien
aattctgcctcaaccaccggagtag

SEQ ID NO: 1295923 - DNA, 25 bp, Homo sapien
cccggcctacatgccggtctttcaa

SEQ ID NO: 1295924 - DNA, 25 bp, Homo sapien
ggcagtggtagaacccagatctgtc

SEQ ID NO: 1295925 - DNA, 25 bp, Homo sapien
cctgccagtgggtgaactaggacta

SEQ ID NO: 1295926 - DNA, 25 bp, Homo sapien
tttaaaccctaacaacacagtgaga

SEQ ID NO: 1295927 - DNA, 25 bp, Homo sapien
ggaaatcagggtagctaacacttgt

SEQ ID NO: 1295928 - DNA, 25 bp, Homo sapien
cccaggggttcaagtaattctgcct

SEQ ID NO: 1295929 - DNA, 25 bp, Homo sapien
gggattacaggtatgcaccaccaca

SEQ ID NO: 1295930 - DNA, 25 bp, Homo sapien
gattacaggtatgcaccaccacacc

SEQ ID NO: 1295931 - DNA, 25 bp, Homo sapien
attctgcctcagcttcccaagtagc

SEQ ID NO: 1295932 - DNA, 25 bp, Homo sapien
ttccagaaaacttggtcatcaaaat

SEQ ID NO: 1295933 - DNA, 25 bp, Homo sapien
tccagaaaacttggtcatcaaaata

SEQ ID NO: 1295934 - DNA, 25 bp, Homo sapien
cttccagaaaacttggtcatcaaaa

SEQ ID NO: 1295935 - DNA, 25 bp, Homo sapien
acatgaggtgctttccatattttga

SEQ ID NO: 1295936 - DNA, 25 bp, Homo sapien
ttagccacatgaggtgctttccata

SEQ ID NO: 1295937 - DNA, 25 bp, Homo sapien
ccatattttgagatttaggagcaaa

SEQ ID NO: 1295938 - DNA, 25 bp, Homo sapien
gccacatgaggtgctttccatattt

SEQ ID NO: 1295939 - DNA, 25 bp, Homo sapien
gcttcccgaagctggctgaatttca

SEQ ID NO: 1295940 - DNA, 25 bp, Homo sapien
agttgggtgctcctataggtctgtc

SEQ ID NO: 1295941 - DNA, 25 bp, Homo sapien
gtagaagggccccacgaaagctgat

SEQ ID NO: 1295942 - DNA, 25 bp, Homo sapien
cgcccttccccagacggagtagaag

SEQ ID NO: 1295943 - DNA, 25 bp, Homo sapien
tattggcatgcagggtacaaccagc

SEQ ID NO: 1295944 - DNA, 25 bp, Homo sapien
tcagtaatgatctctggcgcctgca

SEQ ID NO: 1295945 - DNA, 25 bp, Homo sapien
gggttgttggtctaatctctcagca

SEQ ID NO: 1295946 - DNA, 25 bp, Homo sapien
gctgaggcttactcatcactgagga

SEQ ID NO: 1295947 - DNA, 25 bp, Homo sapien
gagctatcacgatggccaagctgag

SEQ ID NO: 1295948 - DNA, 25 bp, Homo sapien
agagctatcacgatggccaagctga

SEQ ID NO: 1295949 - DNA, 25 bp, Homo sapien
gagagctatcacgatggccaagctg

SEQ ID NO: 1295950 - DNA, 25 bp, Homo sapien
tgagagctatcacgatggccaagct

SEQ ID NO: 1295951 - DNA, 25 bp, Homo sapien
cggagatgtggtgaatccccagcac

SEQ ID NO: 1295952 - DNA, 25 bp, Homo sapien
tgaagatggagtgcatgacggagat

SEQ ID NO: 1295953 - DNA, 25 bp, Homo sapien
gttccagacagtatgaagcaccagc

SEQ ID NO: 1295954 - DNA, 25 bp, Homo sapien
attgccgttccagacagtatgaagc

SEQ ID NO: 1295955 - DNA, 25 bp, Homo sapien
ccatggcaagccacggagaagggat

SEQ ID NO: 1295956 - DNA, 25 bp, Homo sapien
gtgacacgaggtacccacagccacg

SEQ ID NO: 1295957 - DNA, 25 bp, Homo sapien
gccaacaccgcactgtgcacataag

SEQ ID NO: 1295958 - DNA, 25 bp, Homo sapien
ccacggagaagggatcaggtgacac

SEQ ID NO: 1295959 - DNA, 25 bp, Homo sapien
ttgggggtgagccaaggatgaccct

SEQ ID NO: 1295960 - DNA, 25 bp, Homo sapien
atgaccctgagatggctgtcaccac

SEQ ID NO: 1295961 - DNA, 25 bp, Homo sapien
ccaaggatgaccctgagatggctgt

SEQ ID NO: 1295962 - DNA, 25 bp, Homo sapien
tggccagaacatccacaagaagagg

SEQ ID NO: 1295963 - DNA, 25 bp, Homo sapien
aagtgcctcaggttcatgtggtagt

SEQ ID NO: 1295964 - DNA, 25 bp, Homo sapien
agtgcctcaggttcatgtggtagtc

SEQ ID NO: 1295965 - DNA, 25 bp, Homo sapien
gaagtgcctcaggttcatgtggtag

SEQ ID NO: 1295966 - DNA, 25 bp, Homo sapien
tagaagtgcctcaggttcatgtggt

SEQ ID NO: 1295967 - DNA, 25 bp, Homo sapien
ggcttgtgcactcgttaccttcagg

SEQ ID NO: 1295968 - DNA, 25 bp, Homo sapien
gaacagatgttccacgagagttgta

SEQ ID NO: 1295969 - DNA, 25 bp, Homo sapien
ttccactgccacaagagtgcctggt

SEQ ID NO: 1295970 - DNA, 25 bp, Homo sapien
tgttctcaggtacccatgtggcttg

SEQ ID NO: 1295971 - DNA, 25 bp, Homo sapien
tggtcagacctgctcatatctcagc

SEQ ID NO: 1295972 - DNA, 25 bp, Homo sapien
gatgcctcgcagaaagctgccaagg

SEQ ID NO: 1295973 - DNA, 25 bp, Homo sapien
tcaggaccgacctatcccagaatgg

SEQ ID NO: 1295974 - DNA, 25 bp, Homo sapien
tctgttgctgcgaactccagtggtc

SEQ ID NO: 1295975 - DNA, 25 bp, Homo sapien
gctggctgtacaaacttgctggacc

SEQ ID NO: 1295976 - DNA, 25 bp, Homo sapien
ctgacacgcactgactgaaagaaga

SEQ ID NO: 1295977 - DNA, 25 bp, Homo sapien
ttagactttcgacaggctctcccaa

SEQ ID NO: 1295978 - DNA, 25 bp, Homo sapien
acaggctctcccaatgagaggacat

SEQ ID NO: 1295979 - DNA, 25 bp, Homo sapien
ccaccaaatggagcttttggccctt

SEQ ID NO: 1295980 - DNA, 25 bp, Homo sapien
gatattactgatgaccatcctcagg

SEQ ID NO: 1295981 - DNA, 25 bp, Homo sapien
gttgaagatattactgatgaccatc

SEQ ID NO: 1295982 - DNA, 25 bp, Homo sapien
aactgcgccaagttgaccttcccca

SEQ ID NO: 1295983 - DNA, 25 bp, Homo sapien
atcaccaccaactgcgccaagttga

SEQ ID NO: 1295984 - DNA, 25 bp, Homo sapien
ctggattgagtcaagaataaacagg

SEQ ID NO: 1295985 - DNA, 25 bp, Homo sapien
tcctggattgagtcaagaataaaca

SEQ ID NO: 1295986 - DNA, 25 bp, Homo sapien
cctggattgagtcaagaataaacag

SEQ ID NO: 1295987 - DNA, 25 bp, Homo sapien
tggattgagtcaagaataaacaggt

SEQ ID NO: 1295988 - DNA, 25 bp, Homo sapien
ctgtggacatcagatgaagggagca

SEQ ID NO: 1295989 - DNA, 25 bp, Homo sapien
gtccagcaggattgcccactgcaca

SEQ ID NO: 1295990 - DNA, 25 bp, Homo sapien
gccgtccagcaggattgcccactgc

SEQ ID NO: 1295991 - DNA, 25 bp, Homo sapien
cgtccagcaggattgcccactgcac

SEQ ID NO: 1295992 - DNA, 25 bp, Homo sapien
agcaggattgcccactgcacaccaa

SEQ ID NO: 1295993 - DNA, 25 bp, Homo sapien
cctgctgcgagggacctggtgagct

SEQ ID NO: 1295994 - DNA, 25 bp, Homo sapien
ctgcgagggacctggtgagctggct

SEQ ID NO: 1295995 - DNA, 25 bp, Homo sapien
gcgagggacctggtgagctggctgg

SEQ ID NO: 1295996 - DNA, 25 bp, Homo sapien
tgctgcgagggacctggtgagctgg

SEQ ID NO: 1295997 - DNA, 25 bp, Homo sapien
tggcaggtgagtggaagagatgcac

SEQ ID NO: 1295998 - DNA, 25 bp, Homo sapien
ctgctgtggcaggtgagtggaagag

SEQ ID NO: 1295999 - DNA, 25 bp, Homo sapien
tttcccagtctcagaccctgagcag

SEQ ID NO: 1296000 - DNA, 25 bp, Homo sapien
ctttcccagtctcagaccctgagca

SEQ ID NO: 1296001 - DNA, 25 bp, Homo sapien
tggatttatagacagcatgcagact

SEQ ID NO: 1296002 - DNA, 25 bp, Homo sapien
tctggttctggatttatagacagca

SEQ ID NO: 1296003 - DNA, 25 bp, Homo sapien
tatagacagcatgcagacttcccag

SEQ ID NO: 1296004 - DNA, 25 bp, Homo sapien
ttctggatttatagacagcatgcag

SEQ ID NO: 1296005 - DNA, 25 bp, Homo sapien
attgttgactgaatttcggtgcaat

SEQ ID NO: 1296006 - DNA, 25 bp, Homo sapien
ctgtgcccctggagaaccataggcc

SEQ ID NO: 1296007 - DNA, 25 bp, Homo sapien
tgtgcccctggagaaccataggcct

SEQ ID NO: 1296008 - DNA, 25 bp, Homo sapien
gtgcccctggagaaccataggcctc

SEQ ID NO: 1296009 - DNA, 25 bp, Homo sapien
cagaccgcgggtacttagagctcat

SEQ ID NO: 1296010 - DNA, 25 bp, Homo sapien
taggatgccacgagccccttttgat

SEQ ID NO: 1296011 - DNA, 25 bp, Homo sapien
cttttgatcctctaaggaagcgtca

SEQ ID NO: 1296012 - DNA, 25 bp, Homo sapien
taaggaagcgtcatagtgggtaaaa

SEQ ID NO: 1296013 - DNA, 25 bp, Homo sapien
cctgtgtccgtctctgtgcaggggt

SEQ ID NO: 1296014 - DNA, 25 bp, Homo sapien
tgtgcaggggttccaccagcaccag

SEQ ID NO: 1296015 - DNA, 25 bp, Homo sapien
tgtccgtctctgtgcaggggttcca

SEQ ID NO: 1296016 - DNA, 25 bp, Homo sapien
cgtctctgtgcaggggttccaccag

SEQ ID NO: 1296017 - DNA, 25 bp, Homo sapien
cttccagaaaacttggtcatcaaaa

SEQ ID NO: 1296018 - DNA, 25 bp, Homo sapien
tccagaaaacttggtcatcaaaata

SEQ ID NO: 1296019 - DNA, 25 bp, Homo sapien
ttccagaaaacttggtcatcaaaat

SEQ ID NO: 1296020 - DNA, 25 bp, Homo sapien
gagtgcttagtgagattcgtatttc

SEQ ID NO: 1296021 - DNA, 25 bp, Homo sapien
gaaatgctcctgatagatttatctg

SEQ ID NO: 1296022 - DNA, 25 bp, Homo sapien
ccctttcgtggtgctgcttttagca

SEQ ID NO: 1296023 - DNA, 25 bp, Homo sapien
tcgttaacaagaatgggtgagtgct

SEQ ID NO: 1296024 - DNA, 25 bp, Homo sapien
gagagctatcacgatggccaagctg

SEQ ID NO: 1296025 - DNA, 25 bp, Homo sapien
gagctatcacgatggccaagctgag

SEQ ID NO: 1296026 - DNA, 25 bp, Homo sapien
agagctatcacgatggccaagctga

SEQ ID NO: 1296027 - DNA, 25 bp, Homo sapien
tgagagctatcacgatggccaagct

SEQ ID NO: 1296028 - DNA, 25 bp, Homo sapien
cggagatgtggtgaatccccagcac

SEQ ID NO: 1296029 - DNA, 25 bp, Homo sapien
tgaagatggagtgcatgacggagat

SEQ ID NO: 1296030 - DNA, 25 bp, Homo sapien
gttccagacagtatgaagcaccagc

SEQ ID NO: 1296031 - DNA, 25 bp, Homo sapien
attgccgttccagacagtatgaagc

SEQ ID NO: 1296032 - DNA, 25 bp, Homo sapien
gtgacacgaggtacccacagccacg

SEQ ID NO: 1296033 - DNA, 25 bp, Homo sapien
ccatggcaagccacggagaagggat

SEQ ID NO: 1296034 - DNA, 25 bp, Homo sapien
gccaacaccgcactgtgcacataag

SEQ ID NO: 1296035 - DNA, 25 bp, Homo sapien
ccacggagaagggatcaggtgacac

SEQ ID NO: 1296036 - DNA, 25 bp, Homo sapien
tggccagaacatccacaagaagagg

SEQ ID NO: 1296037 - DNA, 25 bp, Homo sapien
atgaccctgagatggctgtcaccac

SEQ ID NO: 1296038 - DNA, 25 bp, Homo sapien
ccaaggatgaccctgagatggctgt

SEQ ID NO: 1296039 - DNA, 25 bp, Homo sapien
ttgggggtgagccaaggatgaccct

SEQ ID NO: 1296040 - DNA, 25 bp, Homo sapien
agtgcctcaggttcatgtggtagtc

SEQ ID NO: 1296041 - DNA, 25 bp, Homo sapien
tagaagtgcctcaggttcatgtggt

SEQ ID NO: 1296042 - DNA, 25 bp, Homo sapien
aagtgcctcaggttcatgtggtagt

SEQ ID NO: 1296043 - DNA, 25 bp, Homo sapien
gaagtgcctcaggttcatgtggtag

SEQ ID NO: 1296044 - DNA, 25 bp, Homo sapien
tgttctcaggtacccatgtggcttg

SEQ ID NO: 1296045 - DNA, 25 bp, Homo sapien
gaacagatgttccacgagagttgta

SEQ ID NO: 1296046 - DNA, 25 bp, Homo sapien
ggcttgtgcactcgttaccttcagg

SEQ ID NO: 1296047 - DNA, 25 bp, Homo sapien
ttccactgccacaagagtgcctggt

SEQ ID NO: 1296048 - DNA, 25 bp, Homo sapien
tggtcagacctgctcatatctcagc

SEQ ID NO: 1296049 - DNA, 25 bp, Homo sapien
gatgcctcgcagaaagctgccaagg

SEQ ID NO: 1296050 - DNA, 25 bp, Homo sapien
tctgttgctgcgaactccagtggtc

SEQ ID NO: 1296051 - DNA, 25 bp, Homo sapien
tcaggaccgacctatcccagaatgg

SEQ ID NO: 1296052 - DNA, 25 bp, Homo sapien
acaggctctcccaatgagaggacat

SEQ ID NO: 1296053 - DNA, 25 bp, Homo sapien
ctgacacgcactgactgaaagaaga

SEQ ID NO: 1296054 - DNA, 25 bp, Homo sapien
ttagactttcgacaggctctcccaa

SEQ ID NO: 1296055 - DNA, 25 bp, Homo sapien
gctggctgtacaaacttgctggacc

SEQ ID NO: 1296056 - DNA, 25 bp, Homo sapien
ccaccaaatggagcttttggccctt

SEQ ID NO: 1296057 - DNA, 25 bp, Homo sapien
atcaccaccaactgcgccaagttga

SEQ ID NO: 1296058 - DNA, 25 bp, Homo sapien
aactgcgccaagttgaccttcccca

SEQ ID NO: 1296059 - DNA, 25 bp, Homo sapien
gatattactgatgaccatcctcagg

SEQ ID NO: 1296060 - DNA, 25 bp, Homo sapien
gttgaagatattactgatgaccatc

SEQ ID NO: 1296061 - DNA, 25 bp, Homo sapien
tctctgtaaaatcgtgctagctcac

SEQ ID NO: 1296062 - DNA, 25 bp, Homo sapien
tgctgcagactatgcccgcttaagc

SEQ ID NO: 1296063 - DNA, 25 bp, Homo sapien
ccattttacagagggtcacgtagag

SEQ ID NO: 1296064 - DNA, 25 bp, Homo sapien
catgccagctgatcacaaatgtgag

SEQ ID NO: 1296065 - DNA, 25 bp, Homo sapien
ttcctggattgagtcaagaatgaac

SEQ ID NO: 1296066 - DNA, 25 bp, Homo sapien
ctggattgagtcaagaatgaacagg

SEQ ID NO: 1296067 - DNA, 25 bp, Homo sapien
tcttcctggattgagtcaagaatga

SEQ ID NO: 1296068 - DNA, 25 bp, Homo sapien
tcctggattgagtcaagaatgaaca

SEQ ID NO: 1296069 - DNA, 25 bp, Homo sapien
ctgtggacatcagatgaagggagca

SEQ ID NO: 1296070 - DNA, 25 bp, Homo sapien
agcaggattgcccactgcacaccaa

SEQ ID NO: 1296071 - DNA, 25 bp, Homo sapien
cgtccagcaggattgcccactgcac

SEQ ID NO: 1296072 - DNA, 25 bp, Homo sapien
gtccagcaggattgcccactgcaca

SEQ ID NO: 1296073 - DNA, 25 bp, Homo sapien
gccgtccagcaggattgcccactgc

SEQ ID NO: 1296074 - DNA, 25 bp, Homo sapien
cctgctgcgagggacctggtgagct

SEQ ID NO: 1296075 - DNA, 25 bp, Homo sapien
ctgcgagggacctggtgagctggct

SEQ ID NO: 1296076 - DNA, 25 bp, Homo sapien
gcgagggacctggtgagctggctgg

SEQ ID NO: 1296077 - DNA, 25 bp, Homo sapien
tgctgcgagggacctggtgagctgg

SEQ ID NO: 1296078 - DNA, 25 bp, Homo sapien
ctttcccagtctcagaccctgagca

SEQ ID NO: 1296079 - DNA, 25 bp, Homo sapien
tggcaggtgagtggaagagatgcac

SEQ ID NO: 1296080 - DNA, 25 bp, Homo sapien
tttcccagtctcagaccctgagcag

SEQ ID NO: 1296081 - DNA, 25 bp, Homo sapien
ctgctgtggcaggtgagtggaagag

SEQ ID NO: 1296082 - DNA, 25 bp, Homo sapien
tgagaagctctcattactggaactc

SEQ ID NO: 1296083 - DNA, 25 bp, Homo sapien
attgaaacgtacacacacccagggt

SEQ ID NO: 1296084 - DNA, 25 bp, Homo sapien
tactggaactctccaaagtctcaga

SEQ ID NO: 1296085 - DNA, 25 bp, Homo sapien
cctggctttgataacaatgagaagc

SEQ ID NO: 1296086 - DNA, 25 bp, Homo sapien
tggatttatagacagcatgcagact

SEQ ID NO: 1296087 - DNA, 25 bp, Homo sapien
tatagacagcatgcagacttcccag

SEQ ID NO: 1296088 - DNA, 25 bp, Homo sapien
tctggttctggatttatagacagca

SEQ ID NO: 1296089 - DNA, 25 bp, Homo sapien
ttctggatttatagacagcatgcag

SEQ ID NO: 1296090 - DNA, 25 bp, Homo sapien
attgttgactgaatttcggtgcaat

SEQ ID NO: 1296091 - DNA, 25 bp, Homo sapien
tgtgcccctggagaaccataggcct

SEQ ID NO: 1296092 - DNA, 25 bp, Homo sapien
gtgcccctggagaaccataggcctc

SEQ ID NO: 1296093 - DNA, 25 bp, Homo sapien
ctgtgcccctggagaaccataggcc

SEQ ID NO: 1296094 - DNA, 25 bp, Homo sapien
taggatgccacgagccccttttgat

SEQ ID NO: 1296095 - DNA, 25 bp, Homo sapien
cttttgatcctctaaggaagcgtca

SEQ ID NO: 1296096 - DNA, 25 bp, Homo sapien
taaggaagcgtcatagtgggtaaaa

SEQ ID NO: 1296097 - DNA, 25 bp, Homo sapien
cagaccgcgggtacttagagctcat

SEQ ID NO: 1296098 - DNA, 25 bp, Homo sapien
ctgtgcaggggttccaccagcacca

SEQ ID NO: 1296099 - DNA, 25 bp, Homo sapien
caggggttccaccagcaccaggcat

SEQ ID NO: 1296100 - DNA, 25 bp, Homo sapien
tgcaggggttccaccagcaccaggc

SEQ ID NO: 1296101 - DNA, 25 bp, Homo sapien
tgtgcaggggttccaccagcaccag

SEQ ID NO: 1296102 - DNA, 25 bp, Homo sapien
ggttcccacctgtatcttcctcagt

SEQ ID NO: 1296103 - DNA, 25 bp, Homo sapien
tttctcaatgatgggcaggccttgg

SEQ ID NO: 1296104 - DNA, 25 bp, Homo sapien
cagtgaaccaatctgccttggcagc

SEQ ID NO: 1296105 - DNA, 25 bp, Homo sapien
tttttctactgctccacacatagca

SEQ ID NO: 1296106 - DNA, 25 bp, Homo sapien
gatgcccttcgaaacagaatgggtt

SEQ ID NO: 1296107 - DNA, 25 bp, Homo sapien
gctctggatgcccttcgaaacagaa

SEQ ID NO: 1296108 - DNA, 25 bp, Homo sapien
tctggatgcccttcgaaacagaatg

SEQ ID NO: 1296109 - DNA, 25 bp, Homo sapien
tggatgcccttcgaaacagaatggg

SEQ ID NO: 1296110 - DNA, 25 bp, Homo sapien
cagcctgtggacgtggagcccgggc

SEQ ID NO: 1296111 - DNA, 25 bp, Homo sapien
caatgagtacgaagcgtgaagggtc

SEQ ID NO: 1296112 - DNA, 25 bp, Homo sapien
gcctggcataaaatcggcgctcaat

SEQ ID NO: 1296113 - DNA, 25 bp, Homo sapien
gatgcttcgcggtagtgccctcgcg

SEQ ID NO: 1296114 - DNA, 25 bp, Homo sapien
taatgacgcgactggctgaagcgca

SEQ ID NO: 1296115 - DNA, 25 bp, Homo sapien
ggtgcgcgctgacgcggtcggcctg

SEQ ID NO: 1296116 - DNA, 25 bp, Homo sapien
agcatccgcagaagggtccccggcg

SEQ ID NO: 1296117 - DNA, 25 bp, Homo sapien
ctgaagcgcacgtcagcgcagacac

SEQ ID NO: 1296118 - DNA, 25 bp, Homo sapien
catagcttccccaagtcgatttgtg

SEQ ID NO: 1296119 - DNA, 25 bp, Homo sapien
caattagcttctctagctgtgggat

SEQ ID NO: 1296120 - DNA, 25 bp, Homo sapien
gaaattgaattcagtccaccggtag

SEQ ID NO: 1296121 - DNA, 25 bp, Homo sapien
gccttgatacagatttcggtggaga

SEQ ID NO: 1296122 - DNA, 25 bp, Homo sapien
tgcctgtcacccttgctacttggga

SEQ ID NO: 1296123 - DNA, 25 bp, Homo sapien
gacactagaaaggttccctttgcag

SEQ ID NO: 1296124 - DNA, 25 bp, Homo sapien
tgtcattgcagtggctgcacatgta

SEQ ID NO: 1296125 - DNA, 25 bp, Homo sapien
gctgcacatgtacgcgcgcgtgtgt

SEQ ID NO: 1296126 - DNA, 25 bp, Homo sapien
aaaaatgattgaggctggacactgt

SEQ ID NO: 1296127 - DNA, 25 bp, Homo sapien
tttgtctctggatctctttacactc

SEQ ID NO: 1296128 - DNA, 25 bp, Homo sapien
ctctggatctctttacactcttaaa

SEQ ID NO: 1296129 - DNA, 25 bp, Homo sapien
cactcttaaaaatgattgaggctgg

SEQ ID NO: 1296130 - DNA, 25 bp, Homo sapien
agaattcaagattagtcttagagaa

SEQ ID NO: 1296131 - DNA, 25 bp, Homo sapien
gtttgttaattaggttgtctcttga

SEQ ID NO: 1296132 - DNA, 25 bp, Homo sapien
gaattcaagattagtcttagagaaa

SEQ ID NO: 1296133 - DNA, 25 bp, Homo sapien
tttgttaattaggttgtctcttgat

SEQ ID NO: 1296134 - DNA, 25 bp, Homo sapien
cttttcatcagaagcgtctatgatt

SEQ ID NO: 1296135 - DNA, 25 bp, Homo sapien
gggactggtatgtctggtaatacat

SEQ ID NO: 1296136 - DNA, 25 bp, Homo sapien
cagaagcgtctatgattccttcaga

SEQ ID NO: 1296137 - DNA, 25 bp, Homo sapien
tctatgattccttcagataccaggg

SEQ ID NO: 1296138 - DNA, 25 bp, Homo sapien
tccatctctggttgacgggctgtcc

SEQ ID NO: 1296139 - DNA, 25 bp, Homo sapien
tgtcggagcaagtttcatcagccct

SEQ ID NO: 1296140 - DNA, 25 bp, Homo sapien
gaagtctgctcattccgagggtgaa

SEQ ID NO: 1296141 - DNA, 25 bp, Homo sapien
ctatttgtcataaggcggcgtgggc

SEQ ID NO: 1296142 - DNA, 25 bp, Homo sapien
gagtagactggcggcagcgtccggc

SEQ ID NO: 1296143 - DNA, 25 bp, Homo sapien
agtagactggcggcagcgtccggcg

SEQ ID NO: 1296144 - DNA, 25 bp, Homo sapien
ggcagcactgagtgggggtgatggt

SEQ ID NO: 1296145 - DNA, 25 bp, Homo sapien
gagtgggggtgatggtcttaggttc

SEQ ID NO: 1296146 - DNA, 25 bp, Homo sapien
aggctgggtggggccgcgtgcccag

SEQ ID NO: 1296147 - DNA, 25 bp, Homo sapien
agcagcagtgaccacaggctgggtg

SEQ ID NO: 1296148 - DNA, 25 bp, Homo sapien
tgcatgaggttgtgtacgtgtccac

SEQ ID NO: 1296149 - DNA, 25 bp, Homo sapien
tacgtgtccacgtgggcgttttcca

SEQ ID NO: 1296150 - DNA, 25 bp, Homo sapien
gatctggtgcatcggctgaagcgtc

SEQ ID NO: 1296151 - DNA, 25 bp, Homo sapien
gactcatggaggctacaccagggat

SEQ ID NO: 1296152 - DNA, 25 bp, Homo sapien
cagatcacaaaagccctggcagggc

SEQ ID NO: 1296153 - DNA, 25 bp, Homo sapien
tgctgctcctgtaggtcccggtggc

SEQ ID NO: 1296154 - DNA, 25 bp, Homo sapien
ctagctgtttccagtaggaagggat

SEQ ID NO: 1296155 - DNA, 25 bp, Homo sapien
gaagggatttagtgaagagcaccag

SEQ ID NO: 1296156 - DNA, 25 bp, Homo sapien
ggaagttgggaagaggtggtttgca

SEQ ID NO: 1296157 - DNA, 25 bp, Homo sapien
tggcaagggaagttgggaagaggtg

SEQ ID NO: 1296158 - DNA, 25 bp, Homo sapien
ctggcaagggaagttgggaagaggt

SEQ ID NO: 1296159 - DNA, 25 bp, Homo sapien
agttgggaagaggtggtttgcaggc

SEQ ID NO: 1296160 - DNA, 25 bp, Homo sapien
tctaagagcagaggagcttctgccc

SEQ ID NO: 1296161 - DNA, 25 bp, Homo sapien
cagggagcctggggcggctctccat

SEQ ID NO: 1296162 - DNA, 25 bp, Homo sapien
agcagaggagcttctgcccggtgca

SEQ ID NO: 1296163 - DNA, 25 bp, Homo sapien
ctgctgtctctaagagcagaggagc

SEQ ID NO: 1296164 - DNA, 25 bp, Homo sapien
gcactgctgagtaaactaggagggc

SEQ ID NO: 1296165 - DNA, 25 bp, Homo sapien
gggcactgctgagtaaactaggagg

SEQ ID NO: 1296166 - DNA, 25 bp, Homo sapien
gcattctgtcgtgatgcttgctgta

SEQ ID NO: 1296167 - DNA, 25 bp, Homo sapien
ttctgtcgtgatgcttgctgtagcc

SEQ ID NO: 1296168 - DNA, 25 bp, Homo sapien
gaccgcatcccggtactcctgctga

SEQ ID NO: 1296169 - DNA, 25 bp, Homo sapien
ccccgtagggctcaggttcaagcat

SEQ ID NO: 1296170 - DNA, 25 bp, Homo sapien
ggccttaggaatacagcccccagag

SEQ ID NO: 1296171 - DNA, 25 bp, Homo sapien
tggggtaaagagacaaagtgtggcc

SEQ ID NO: 1296172 - DNA, 25 bp, Homo sapien
gtcctggatgtttgagtccttggcc

SEQ ID NO: 1296173 - DNA, 25 bp, Homo sapien
ccttggaagcgcctctgttgttctg

SEQ ID NO: 1296174 - DNA, 25 bp, Homo sapien
ggaagcgcctctgttgttctgtcct

SEQ ID NO: 1296175 - DNA, 25 bp, Homo sapien
aatactgccccttggaagcgcctct

SEQ ID NO: 1296176 - DNA, 25 bp, Homo sapien
ccagggccacatacctagatctctg

SEQ ID NO: 1296177 - DNA, 25 bp, Homo sapien
tctgcttcccacgtgcgtgtgcgtg

SEQ ID NO: 1296178 - DNA, 25 bp, Homo sapien
ctgcagacaccagcgtccatcaggg

SEQ ID NO: 1296179 - DNA, 25 bp, Homo sapien
tgagttaggaagtctggagcacagc

SEQ ID NO: 1296180 - DNA, 25 bp, Homo sapien
atgtcagctattccctgcagactgg

SEQ ID NO: 1296181 - DNA, 25 bp, Homo sapien
gaagctgatgtcagctattccctgc

SEQ ID NO: 1296182 - DNA, 25 bp, Homo sapien
ctatccgccgaagctgatgtcagct

SEQ ID NO: 1296183 - DNA, 25 bp, Homo sapien
tccgccgaagctgatgtcagctatt

SEQ ID NO: 1296184 - DNA, 25 bp, Homo sapien
tgactcctgctgataattcaggcag

SEQ ID NO: 1296185 - DNA, 25 bp, Homo sapien
ccttcttgactcctgctgataattc

SEQ ID NO: 1296186 - DNA, 25 bp, Homo sapien
cttgctctataaagaaccgatttcc

SEQ ID NO: 1296187 - DNA, 25 bp, Homo sapien
ctgcaaacttgctctataaagaacc

SEQ ID NO: 1296188 - DNA, 25 bp, Homo sapien
ccagcgaaggctgggcagtaaccaa

SEQ ID NO: 1296189 - DNA, 25 bp, Homo sapien
tgcagcccggcgttagcgctgagaa

SEQ ID NO: 1296190 - DNA, 25 bp, Homo sapien
taaccaatggacgactgtggcccaa

SEQ ID NO: 1296191 - DNA, 25 bp, Homo sapien
gggcgagagaggtcacccagcgacg

SEQ ID NO: 1296192 - DNA, 25 bp, Homo sapien
cgcccgctggatggggggtgcgcgc

SEQ ID NO: 1296193 - DNA, 25 bp, Homo sapien
tggcgcccgctggatggggggtgcg

SEQ ID NO: 1296194 - DNA, 25 bp, Homo sapien
gatggggggtgcgcgcgacgcctgc

SEQ ID NO: 1296195 - DNA, 25 bp, Homo sapien
atggggggtgcgcgcgacgcctgcc

SEQ ID NO: 1296196 - DNA, 25 bp, Homo sapien
tcatgaggaaagtgcccggcttcgt

SEQ ID NO: 1296197 - DNA, 25 bp, Homo sapien
ggctgccgcagaagttcctcttcct

SEQ ID NO: 1296198 - DNA, 25 bp, Homo sapien
tgcctggactccgagggcttctgga

SEQ ID NO: 1296199 - DNA, 25 bp, Homo sapien
gccacgatgctcatgaggaaagtgc

SEQ ID NO: 1296200 - DNA, 25 bp, Homo sapien
acttcaacgcattccggagccgtct

SEQ ID NO: 1296201 - DNA, 25 bp, Homo sapien
actggaccccgcgaggaggccacgg

SEQ ID NO: 1296202 - DNA, 25 bp, Homo sapien
cctttccgctttgacttcaacgcat

SEQ ID NO: 1296203 - DNA, 25 bp, Homo sapien
ggggcaatagcatcccggcctccag

SEQ ID NO: 1296204 - DNA, 25 bp, Homo sapien
cgcccggccgagagatgtagattta

SEQ ID NO: 1296205 - DNA, 25 bp, Homo sapien
tgattctgccaaacctgactgcctg

SEQ ID NO: 1296206 - DNA, 25 bp, Homo sapien
tgcataggtgcggaaagctaaccgg

SEQ ID NO: 1296207 - DNA, 25 bp, Homo sapien
tggaatcctcgacttgaacggtagc

SEQ ID NO: 1296208 - DNA, 25 bp, Homo sapien
ccgaaacgcatctgacttctgacgc

SEQ ID NO: 1296209 - DNA, 25 bp, Homo sapien
ttctgacgccacgcccgtgtgcggt

SEQ ID NO: 1296210 - DNA, 25 bp, Homo sapien
ggagatggtgccctcatcgtcctgg

SEQ ID NO: 1296211 - DNA, 25 bp, Homo sapien
caactacaccgaaacgcatctgact

SEQ ID NO: 1296212 - DNA, 25 bp, Homo sapien
cactgaggaactgcatagatggctg

SEQ ID NO: 1296213 - DNA, 25 bp, Homo sapien
agcactgaggaactgcatagatggc

SEQ ID NO: 1296214 - DNA, 25 bp, Homo sapien
gggagcactgaggaactgcatagat

SEQ ID NO: 1296215 - DNA, 25 bp, Homo sapien
ctgaggaactgcatagatggctgtg

SEQ ID NO: 1296216 - DNA, 25 bp, Homo sapien
ggaccagtggcataaggagtgagca

SEQ ID NO: 1296217 - DNA, 25 bp, Homo sapien
gaccctcagtggagggttgctggga

SEQ ID NO: 1296218 - DNA, 25 bp, Homo sapien
gagggttgctgggaccagtggcata

SEQ ID NO: 1296219 - DNA, 25 bp, Homo sapien
ccagtggcataaggagtgagcaggg

SEQ ID NO: 1296220 - DNA, 25 bp, Homo sapien
tttcagactgagcagactgcccttc

SEQ ID NO: 1296221 - DNA, 25 bp, Homo sapien
ttccccacgcctttctcagtgcctc

SEQ ID NO: 1296222 - DNA, 25 bp, Homo sapien
gagtaaaggagctttcagactgagc

SEQ ID NO: 1296223 - DNA, 25 bp, Homo sapien
ttttctaggagtaaaggagctttca

SEQ ID NO: 1296224 - DNA, 25 bp, Homo sapien
aaggcacccgcctgcctcggatgtt

SEQ ID NO: 1296225 - DNA, 25 bp, Homo sapien
cacacacacaatctgagcggggttg

SEQ ID NO: 1296226 - DNA, 25 bp, Homo sapien
gctgctcagccgattgccacttata

SEQ ID NO: 1296227 - DNA, 25 bp, Homo sapien
tgtcctgcttgcttatgttgcctgc

SEQ ID NO: 1296228 - DNA, 25 bp, Homo sapien
gttactctggaacacccacttctct

SEQ ID NO: 1296229 - DNA, 25 bp, Homo sapien
agcttctttgagaccacgtagatac

SEQ ID NO: 1296230 - DNA, 25 bp, Homo sapien
gaccacgtagatacctatgattctc

SEQ ID NO: 1296231 - DNA, 25 bp, Homo sapien
ctatgattctcgtagttactctgga

SEQ ID NO: 1296232 - DNA, 25 bp, Homo sapien
gggctggtcttcttggaatctgaga

SEQ ID NO: 1296233 - DNA, 25 bp, Homo sapien
ggtattgggctggtcttcttggaat

SEQ ID NO: 1296234 - DNA, 25 bp, Homo sapien
tctgagatttcagcaacaagtcttg

SEQ ID NO: 1296235 - DNA, 25 bp, Homo sapien
gagatttcagcaacaagtcttgttc

SEQ ID NO: 1296236 - DNA, 25 bp, Homo sapien
gggtgatttggggctcccacaccag

SEQ ID NO: 1296237 - DNA, 25 bp, Homo sapien
gcaggagcaatcagtgaagtcttcc

SEQ ID NO: 1296238 - DNA, 25 bp, Homo sapien
gtgatttggggctcccacaccagct

SEQ ID NO: 1296239 - DNA, 25 bp, Homo sapien
aggagcaatcagtgaagtcttcctt

SEQ ID NO: 1296240 - DNA, 25 bp, Homo sapien
ggcatatggtctcttgagttacttc

SEQ ID NO: 1296241 - DNA, 25 bp, Homo sapien
tttcagccgtcagtcgactctgcca

SEQ ID NO: 1296242 - DNA, 25 bp, Homo sapien
aattgcttttcagccgtcagtcgac

SEQ ID NO: 1296243 - DNA, 25 bp, Homo sapien
gtgggcgtctggcatatggtctctt

SEQ ID NO: 1296244 - DNA, 25 bp, Homo sapien
catgagaactatgcagggatcaata

SEQ ID NO: 1296245 - DNA, 25 bp, Homo sapien
gcataaacggtcagcatgagaacta

SEQ ID NO: 1296246 - DNA, 25 bp, Homo sapien
cagacagctgttctcccaagcataa

SEQ ID NO: 1296247 - DNA, 25 bp, Homo sapien
actatgcagggatcaataggaattg

SEQ ID NO: 1296248 - DNA, 25 bp, Homo sapien
ggcactggcgggatctgtctgccca

SEQ ID NO: 1296249 - DNA, 25 bp, Homo sapien
tgcccagttcctggttgcccaagcc

SEQ ID NO: 1296250 - DNA, 25 bp, Homo sapien
ctggcgggatctgtctgcccagttc

SEQ ID NO: 1296251 - DNA, 25 bp, Homo sapien
cttcttgggcactggcgggatctgt

SEQ ID NO: 1296252 - DNA, 25 bp, Homo sapien
cttcatcccggctcctgtctctcct

SEQ ID NO: 1296253 - DNA, 25 bp, Homo sapien
tcccttcatcccggctcctgtctct

SEQ ID NO: 1296254 - DNA, 25 bp, Homo sapien
tcatcccggctcctgtctctcctcg

SEQ ID NO: 1296255 - DNA, 25 bp, Homo sapien
tgtcccttcatcccggctcctgtct

SEQ ID NO: 1296256 - DNA, 25 bp, Homo sapien
tgccacttggcccatcagtgctctg

SEQ ID NO: 1296257 - DNA, 25 bp, Homo sapien
ctgccacttggcccatcagtgctct

SEQ ID NO: 1296258 - DNA, 25 bp, Homo sapien
gctgccacttggcccatcagtgctc

SEQ ID NO: 1296259 - DNA, 25 bp, Homo sapien
agctgccacttggcccatcagtgct

SEQ ID NO: 1296260 - DNA, 25 bp, Homo sapien
cagggaggaaggcaatcaatacgta

SEQ ID NO: 1296261 - DNA, 25 bp, Homo sapien
gaggaaggcaatcaatacgtaatct

SEQ ID NO: 1296262 - DNA, 25 bp, Homo sapien
gaattggtttgcctctgaagtaact

SEQ ID NO: 1296263 - DNA, 25 bp, Homo sapien
cttaacaagagaattggtttgcctc

SEQ ID NO: 1296264 - DNA, 25 bp, Homo sapien
agtaaatgccacctacaatccaagg

SEQ ID NO: 1296265 - DNA, 25 bp, Homo sapien
gcagtaaatgccacctacaatccaa

SEQ ID NO: 1296266 - DNA, 25 bp, Homo sapien
gagtcccttctccttgagcagtaaa

SEQ ID NO: 1296267 - DNA, 25 bp, Homo sapien
taaatgccacctacaatccaaggca

SEQ ID NO: 1296268 - DNA, 25 bp, Homo sapien
gggcagctgactgtcggatgatcta

SEQ ID NO: 1296269 - DNA, 25 bp, Homo sapien
gagctctgttccacgcatctctgca

SEQ ID NO: 1296270 - DNA, 25 bp, Homo sapien
ctgagctctgttccacgcatctctg

SEQ ID NO: 1296271 - DNA, 25 bp, Homo sapien
ggatgatctaagagatccttggctt

SEQ ID NO: 1296272 - DNA, 25 bp, Homo sapien
caaaggaccggaggtttgcatatcc

SEQ ID NO: 1296273 - DNA, 25 bp, Homo sapien
cacaaaatcttgaccccgttatcta

SEQ ID NO: 1296274 - DNA, 25 bp, Homo sapien
cgccccttgtatttgatttgcttcc

SEQ ID NO: 1296275 - DNA, 25 bp, Homo sapien
tggagactcagcgatgtcaggccag

SEQ ID NO: 1296276 - DNA, 25 bp, Homo sapien
tcaacacagcggaaatcacgggaga

SEQ ID NO: 1296277 - DNA, 25 bp, Homo sapien
tgtgaacttaggcaggtacctcccc

SEQ ID NO: 1296278 - DNA, 25 bp, Homo sapien
gtgacccggctttaaatccctgctg

SEQ ID NO: 1296279 - DNA, 25 bp, Homo sapien
tcacgggagaatgttgagcccttcc

SEQ ID NO: 1296280 - DNA, 25 bp, Homo sapien
tactctacctcaggctctttgaatc

SEQ ID NO: 1296281 - DNA, 25 bp, Homo sapien
tcacttgggtgcagagactgtcctg

SEQ ID NO: 1296282 - DNA, 25 bp, Homo sapien
tattcagcacctactctacctcagg

SEQ ID NO: 1296283 - DNA, 25 bp, Homo sapien
acttgggtgcagagactgtcctgca

SEQ ID NO: 1296284 - DNA, 25 bp, Homo sapien
tcttctgatcaaagcgacccctcat

SEQ ID NO: 1296285 - DNA, 25 bp, Homo sapien
tcatcctttaagtcccaaggcatgg

SEQ ID NO: 1296286 - DNA, 25 bp, Homo sapien
tgcagctggctttgaaccgaggcct

SEQ ID NO: 1296287 - DNA, 25 bp, Homo sapien
cagtgagcatagtcctgaggcagag

SEQ ID NO: 1296288 - DNA, 25 bp, Homo sapien
tgaatccgaaatcctcgatgggtcc

SEQ ID NO: 1296289 - DNA, 25 bp, Homo sapien
gccccatgatggctgaatccgaaat

SEQ ID NO: 1296290 - DNA, 25 bp, Homo sapien
gaaatcctcgatgggtccagcttga

SEQ ID NO: 1296291 - DNA, 25 bp, Homo sapien
ttttttataaccccagtgctgagga

SEQ ID NO: 1296292 - DNA, 25 bp, Homo sapien
tgtgccgagttaccccacttgcctt

SEQ ID NO: 1296293 - DNA, 25 bp, Homo sapien
cttgccttgggcgtgtccactgagc

SEQ ID NO: 1296294 - DNA, 25 bp, Homo sapien
cagtcctcagaggatccatgatccc

SEQ ID NO: 1296295 - DNA, 25 bp, Homo sapien
ttttgtatcatccagtcatcgctaa

SEQ ID NO: 1296296 - DNA, 25 bp, Homo sapien
cagggtcactcaggtagagttgaga

SEQ ID NO: 1296297 - DNA, 25 bp, Homo sapien
tcactcaggtagagttgagattcaa

SEQ ID NO: 1296298 - DNA, 25 bp, Homo sapien
gctcattgttcccatcttgatgaaa

SEQ ID NO: 1296299 - DNA, 25 bp, Homo sapien
gagattcaaacccacatgtggctcc

SEQ ID NO: 1296300 - DNA, 25 bp, Homo sapien
ggtgttttttggcatggcaccctca

SEQ ID NO: 1296301 - DNA, 25 bp, Homo sapien
aaggaaggcctttcaaaccagagtg

SEQ ID NO: 1296302 - DNA, 25 bp, Homo sapien
gggagggcgtctgatgctctctctc

SEQ ID NO: 1296303 - DNA, 25 bp, Homo sapien
aaccagagtgtctcactcccctctg

SEQ ID NO: 1296304 - DNA, 25 bp, Homo sapien
tacgatagaacaagtggtaggactt

SEQ ID NO: 1296305 - DNA, 25 bp, Homo sapien
tactatcttacctatcgaaggcttg

SEQ ID NO: 1296306 - DNA, 25 bp, Homo sapien
cgaaggcttgagtgacttgcccaaa

SEQ ID NO: 1296307 - DNA, 25 bp, Homo sapien
gctggaatgctttcaggtactatct

SEQ ID NO: 1296308 - DNA, 25 bp, Homo sapien
gagtgtacttccagaaaaaccagta

SEQ ID NO: 1296309 - DNA, 25 bp, Homo sapien
cacaatgtgccatcctgggaagagg

SEQ ID NO: 1296310 - DNA, 25 bp, Homo sapien
aggattctgagcatgcggcccgttg

SEQ ID NO: 1296311 - DNA, 25 bp, Homo sapien
cctgcctgggaaccaagaactggga

SEQ ID NO: 1296312 - DNA, 25 bp, Homo sapien
gaaagaggcccattctgcgcattct

SEQ ID NO: 1296313 - DNA, 25 bp, Homo sapien
gggctaaacgtggagagcaacaagc

SEQ ID NO: 1296314 - DNA, 25 bp, Homo sapien
ccagaagtcggatggggctaaacgt

SEQ ID NO: 1296315 - DNA, 25 bp, Homo sapien
acaagcagggagacgcgacgaatac

SEQ ID NO: 1296316 - DNA, 25 bp, Homo sapien
agagcaacaagcagggagacgcgac

SEQ ID NO: 1296317 - DNA, 25 bp, Homo sapien
tagtttcggcttcgctgcttgacgg

SEQ ID NO: 1296318 - DNA, 25 bp, Homo sapien
gtagttgctcgtcggagttccccag

SEQ ID NO: 1296319 - DNA, 25 bp, Homo sapien
tgcgcgcggcaaagtttcactgagc

SEQ ID NO: 1296320 - DNA, 25 bp, Homo sapien
ggaagatcttctagccagtgacact

SEQ ID NO: 1296321 - DNA, 25 bp, Homo sapien
tgtcctaggcagacaccgtgctgtg

SEQ ID NO: 1296322 - DNA, 25 bp, Homo sapien
gatcacagttatctagttcctctcg

SEQ ID NO: 1296323 - DNA, 25 bp, Homo sapien
agttcctctcgcgaggactccgagg

SEQ ID NO: 1296324 - DNA, 25 bp, Homo sapien
gcgttgaagcgctcactgtgtccta

SEQ ID NO: 1296325 - DNA, 25 bp, Homo sapien
tgcttaagctgagctctgaggaatg

SEQ ID NO: 1296326 - DNA, 25 bp, Homo sapien
tggctgcgaagcgtgcaggccttgg

SEQ ID NO: 1296327 - DNA, 25 bp, Homo sapien
aggaatgatgaagaatgagctcggc

SEQ ID NO: 1296328 - DNA, 25 bp, Homo sapien
atgatgaagaatgagctcggcgaag

SEQ ID NO: 1296329 - DNA, 25 bp, Homo sapien
ccttcaccttcttgtgctggacctg

SEQ ID NO: 1296330 - DNA, 25 bp, Homo sapien
ttcttgtgctggacctgtgctcttg

SEQ ID NO: 1296331 - DNA, 25 bp, Homo sapien
tagctttatcatgctctgctcctct

SEQ ID NO: 1296332 - DNA, 25 bp, Homo sapien
tgtcttcatttcctactccctcgca

SEQ ID NO: 1296333 - DNA, 25 bp, Homo sapien
cagcattgctgtaacaatgtagatc

SEQ ID NO: 1296334 - DNA, 25 bp, Homo sapien
tgtagatctcaattagctatacagg

SEQ ID NO: 1296335 - DNA, 25 bp, Homo sapien
tcaacatctctaggttgaggagcta

SEQ ID NO: 1296336 - DNA, 25 bp, Homo sapien
gcacagtggttttagacagttgcca

SEQ ID NO: 1296337 - DNA, 25 bp, Homo sapien
cagtcagcaaaggttcagatatgtc

SEQ ID NO: 1296338 - DNA, 25 bp, Homo sapien
gatatgtcaccaaccaaacgcagtc

SEQ ID NO: 1296339 - DNA, 25 bp, Homo sapien
ctcttacttgccttttggaccaaat

SEQ ID NO: 1296340 - DNA, 25 bp, Homo sapien
gaatgggaaagtaccccagtcagca

SEQ ID NO: 1296341 - DNA, 25 bp, Homo sapien
catgcatgactcagatgccctcagg

SEQ ID NO: 1296342 - DNA, 25 bp, Homo sapien
tcacagggcacggaaaatcttatgc

SEQ ID NO: 1296343 - DNA, 25 bp, Homo sapien
gacttcactgcattagaccctatag

SEQ ID NO: 1296344 - DNA, 25 bp, Homo sapien
gctgctgaaccagccaacacatggg

SEQ ID NO: 1296345 - DNA, 25 bp, Homo sapien
tgatgtgggttaagatcagccagag

SEQ ID NO: 1296346 - DNA, 25 bp, Homo sapien
aagagtaatcatcccaagcttaggc

SEQ ID NO: 1296347 - DNA, 25 bp, Homo sapien
ggaaactagcaccattctacctctc

SEQ ID NO: 1296348 - DNA, 25 bp, Homo sapien
tttaaagtgctgtacagttaccaca

SEQ ID NO: 1296349 - DNA, 25 bp, Homo sapien
aaaaacacatccataagcaaggtcc

SEQ ID NO: 1296350 - DNA, 25 bp, Homo sapien
aacacatccataagcaaggtcccag

SEQ ID NO: 1296351 - DNA, 25 bp, Homo sapien
aaaaaaacacatccataagcaaggt

SEQ ID NO: 1296352 - DNA, 25 bp, Homo sapien
aaaaaaaaacacatccataagcaag

SEQ ID NO: 1296353 - DNA, 25 bp, Homo sapien
gggaaagccatgatgccaatcccac

SEQ ID NO: 1296354 - DNA, 25 bp, Homo sapien
tcatagagataaatacccactgtgc

SEQ ID NO: 1296355 - DNA, 25 bp, Homo sapien
gagtaaaaggcactttcatagagat

SEQ ID NO: 1296356 - DNA, 25 bp, Homo sapien
gtgctgcctcagtgttcatcataga

SEQ ID NO: 1296357 - DNA, 25 bp, Homo sapien
tggtactgccctttatttacacaga

SEQ ID NO: 1296358 - DNA, 25 bp, Homo sapien
acttcatcccatgccaccttcccac

SEQ ID NO: 1296359 - DNA, 25 bp, Homo sapien
gagaagatgctcagtaatgacaact

SEQ ID NO: 1296360 - DNA, 25 bp, Homo sapien
agagaagatgctcagtaatgacaac

SEQ ID NO: 1296361 - DNA, 25 bp, Homo sapien
ttagaattggtgtctgataacttga

SEQ ID NO: 1296362 - DNA, 25 bp, Homo sapien
aattggtgtctgataacttgattac

SEQ ID NO: 1296363 - DNA, 25 bp, Homo sapien
tagaattggtgtctgataacttgat

SEQ ID NO: 1296364 - DNA, 25 bp, Homo sapien
gaattggtgtctgataacttgatta

SEQ ID NO: 1296365 - DNA, 25 bp, Homo sapien
gctctagtgttgtgggcaatgaccc

SEQ ID NO: 1296366 - DNA, 25 bp, Homo sapien
gacccgctggccttgagaatcttca

SEQ ID NO: 1296367 - DNA, 25 bp, Homo sapien
tcttcagtgaaaagttgactccagg

SEQ ID NO: 1296368 - DNA, 25 bp, Homo sapien
tgagcccaaggactgttaggaaacg

SEQ ID NO: 1296369 - DNA, 25 bp, Homo sapien
tcttggactctttgttgatctgact

SEQ ID NO: 1296370 - DNA, 25 bp, Homo sapien
gctgggtcgcatttttcttggactc

SEQ ID NO: 1296371 - DNA, 25 bp, Homo sapien
caaagatagctcagttgaaaatggg

SEQ ID NO: 1296372 - DNA, 25 bp, Homo sapien
gccatgcaatcgtgtgctaagcctg

SEQ ID NO: 1296373 - DNA, 25 bp, Homo sapien
caggaaccctgctgtttaaggccca

SEQ ID NO: 1296374 - DNA, 25 bp, Homo sapien
gaaccctgctgtttaaggcccagcc

SEQ ID NO: 1296375 - DNA, 25 bp, Homo sapien
accctgctgtttaaggcccagcctg

SEQ ID NO: 1296376 - DNA, 25 bp, Homo sapien
ccggcattagagcactcttcccaac

SEQ ID NO: 1296377 - DNA, 25 bp, Homo sapien
ctccaggaaggagtgttagcatttt

SEQ ID NO: 1296378 - DNA, 25 bp, Homo sapien
caggaaggagtgttagcattttggt

SEQ ID NO: 1296379 - DNA, 25 bp, Homo sapien
tggtgcctggtttgattaaatgtgt

SEQ ID NO: 1296380 - DNA, 25 bp, Homo sapien
gcattttggtgcctggtttgattaa

SEQ ID NO: 1296381 - DNA, 25 bp, Homo sapien
ctggttcccaacgccctctcatccc

SEQ ID NO: 1296382 - DNA, 25 bp, Homo sapien
gttcccaacgccctctcatccccca

SEQ ID NO: 1296383 - DNA, 25 bp, Homo sapien
tggttcccaacgccctctcatcccc

SEQ ID NO: 1296384 - DNA, 25 bp, Homo sapien
ccgccgcgtccagccacacgccgca

SEQ ID NO: 1296385 - DNA, 25 bp, Homo sapien
tgaggagacgaagccggcaggacgc

SEQ ID NO: 1296386 - DNA, 25 bp, Homo sapien
aagccggcaggacgccggcgcaggc

SEQ ID NO: 1296387 - DNA, 25 bp, Homo sapien
ggccgctgaggagacgaagccggca

SEQ ID NO: 1296388 - DNA, 25 bp, Homo sapien
agacgaagccggcaggacgccggcg

SEQ ID NO: 1296389 - DNA, 25 bp, Homo sapien
gatcaaatgaggttgtgaaagtact

SEQ ID NO: 1296390 - DNA, 25 bp, Homo sapien
gctttcaccgtttactgtgccttgg

SEQ ID NO: 1296391 - DNA, 25 bp, Homo sapien
tgtgaattcagaaaaccccttggaa

SEQ ID NO: 1296392 - DNA, 25 bp, Homo sapien
cgtaactacgaagccacatgggaga

SEQ ID NO: 1296393 - DNA, 25 bp, Homo sapien
aaaacctccagtaatgtgagcaggg

SEQ ID NO: 1296394 - DNA, 25 bp, Homo sapien
tggtatataaggccccaaccccatc

SEQ ID NO: 1296395 - DNA, 25 bp, Homo sapien
tagtaataaaactgccgcccactcc

SEQ ID NO: 1296396 - DNA, 25 bp, Homo sapien
agtgggattatcatattttaaacac

SEQ ID NO: 1296397 - DNA, 25 bp, Homo sapien
ttctccatctgcaaactcctattca

SEQ ID NO: 1296398 - DNA, 25 bp, Homo sapien
gtactttattgcatccaggccataa

SEQ ID NO: 1296399 - DNA, 25 bp, Homo sapien
gcacctcccttgacagttcattctg

SEQ ID NO: 1296400 - DNA, 25 bp, Homo sapien
gcagcacaggttaatccctctccag

SEQ ID NO: 1296401 - DNA, 25 bp, Homo sapien
attttactccagcctagccaacaag

SEQ ID NO: 1296402 - DNA, 25 bp, Homo sapien
caccattttactccagcctagccaa

SEQ ID NO: 1296403 - DNA, 25 bp, Homo sapien
ccattttactccagcctagccaaca

SEQ ID NO: 1296404 - DNA, 25 bp, Homo sapien
gcaccattttactccagcctagcca

SEQ ID NO: 1296405 - DNA, 25 bp, Homo sapien
tagaagtaggttgccaaggcctccc

SEQ ID NO: 1296406 - DNA, 25 bp, Homo sapien
tccgcatccagcaatgaaatctgag

SEQ ID NO: 1296407 - DNA, 25 bp, Homo sapien
ccttggcagttgagtcgtgcacaga

SEQ ID NO: 1296408 - DNA, 25 bp, Homo sapien
tgaatccgtaacaagggaaccagga

SEQ ID NO: 1296409 - DNA, 25 bp, Homo sapien
tagatgtacggcttccagaagagcg

SEQ ID NO: 1296410 - DNA, 25 bp, Homo sapien
gactaatgtccagtgcgtaggccag

SEQ ID NO: 1296411 - DNA, 25 bp, Homo sapien
tacttgttatagcaggagccaatgc

SEQ ID NO: 1296412 - DNA, 25 bp, Homo sapien
tagaagcgccaggtctgatgcagcg

SEQ ID NO: 1296413 - DNA, 25 bp, Homo sapien
ggctctgatgcccaaatcctactcc

SEQ ID NO: 1296414 - DNA, 25 bp, Homo sapien
tatccttacactcggtttaagaaca

SEQ ID NO: 1296415 - DNA, 25 bp, Homo sapien
tcctctccgacagccttatccttac

SEQ ID NO: 1296416 - DNA, 25 bp, Homo sapien
tctctgacctcatgagagcaaggat

SEQ ID NO: 1296417 - DNA, 25 bp, Homo sapien
tatccccagcctgagagatttgctt

SEQ ID NO: 1296418 - DNA, 25 bp, Homo sapien
tagcaaagaccattcagagtaactg

SEQ ID NO: 1296419 - DNA, 25 bp, Homo sapien
ttgactcctgattgcataacatgct

SEQ ID NO: 1296420 - DNA, 25 bp, Homo sapien
cagacggtataaaagtgcacagagc

SEQ ID NO: 1296421 - DNA, 25 bp, Homo sapien
gcattatttgggtacaattccactt

SEQ ID NO: 1296422 - DNA, 25 bp, Homo sapien
ggcatgcaaaatattcgttgttgcc

SEQ ID NO: 1296423 - DNA, 25 bp, Homo sapien
tcctggagcttacagctcagctaaa

SEQ ID NO: 1296424 - DNA, 25 bp, Homo sapien
tctgggccctgattgttcagcacat

SEQ ID NO: 1296425 - DNA, 25 bp, Homo sapien
gaacgagctatagtcacccagcatg

SEQ ID NO: 1296426 - DNA, 25 bp, Homo sapien
gaactgttcagactccgaggccttg

SEQ ID NO: 1296427 - DNA, 25 bp, Homo sapien
tctccgataggagctcagacttggg

SEQ ID NO: 1296428 - DNA, 25 bp, Homo sapien
aaaggacctgagctgcactgctgac

SEQ ID NO: 1296429 - DNA, 25 bp, Homo sapien
cgggcgggcgtcctctcacttagcc

SEQ ID NO: 1296430 - DNA, 25 bp, Homo sapien
ttggcagccccgtacctgagccgga

SEQ ID NO: 1296431 - DNA, 25 bp, Homo sapien
cggagctggcagataaaagagcagc

SEQ ID NO: 1296432 - DNA, 25 bp, Homo sapien
tggagagcaccctcgtctgcggcca

SEQ ID NO: 1296433 - DNA, 25 bp, Homo sapien
gggtcggccgcgcagaggtggcgtc

SEQ ID NO: 1296434 - DNA, 25 bp, Homo sapien
gccgcgcagaggtggcgtctcagga

SEQ ID NO: 1296435 - DNA, 25 bp, Homo sapien
tggcgtctcaggacttcctgtggcg

SEQ ID NO: 1296436 - DNA, 25 bp, Homo sapien
gcagaggtggcgtctcaggacttcc

SEQ ID NO: 1296437 - DNA, 25 bp, Homo sapien
ctcgcacttcgggacgacgggaagc

SEQ ID NO: 1296438 - DNA, 25 bp, Homo sapien
tcgggacgacgggaagcgcaggctc

SEQ ID NO: 1296439 - DNA, 25 bp, Homo sapien
gcgcttctcgcacttcgggacgacg

SEQ ID NO: 1296440 - DNA, 25 bp, Homo sapien
agccgcgcttctcgcacttcgggac

SEQ ID NO: 1296441 - DNA, 25 bp, Homo sapien
taccctctggtgttacacattccca

SEQ ID NO: 1296442 - DNA, 25 bp, Homo sapien
tctgctcgagatacgccccagcgtt

SEQ ID NO: 1296443 - DNA, 25 bp, Homo sapien
gctgcgtttcccagctagagctcgg

SEQ ID NO: 1296444 - DNA, 25 bp, Homo sapien
gcacccagcctggacctgtattcaa

SEQ ID NO: 1296445 - DNA, 25 bp, Homo sapien
acatagcaggccctcggtaaatact

SEQ ID NO: 1296446 - DNA, 25 bp, Homo sapien
gcccgttcctctagtatgcaaagac

SEQ ID NO: 1296447 - DNA, 25 bp, Homo sapien
atgccacagattgcccgttcctcta

SEQ ID NO: 1296448 - DNA, 25 bp, Homo sapien
taaatactggatcaacaatgccaca

SEQ ID NO: 1296449 - DNA, 25 bp, Homo sapien
agacgccgctctgcccttagggagt

SEQ ID NO: 1296450 - DNA, 25 bp, Homo sapien
ccactcccgcggctcttgggagcac

SEQ ID NO: 1296451 - DNA, 25 bp, Homo sapien
cacagtctgccggatgggaggccaa

SEQ ID NO: 1296452 - DNA, 25 bp, Homo sapien
aggagacagcctaggagaagacgcc

SEQ ID NO: 1296453 - DNA, 25 bp, Homo sapien
gctgcccagagtttgttgcaggctc

SEQ ID NO: 1296454 - DNA, 25 bp, Homo sapien
gagatcatttttccgacttcactgc

SEQ ID NO: 1296455 - DNA, 25 bp, Homo sapien
tccggcagggctcttttagaacagt

SEQ ID NO: 1296456 - DNA, 25 bp, Homo sapien
acagctagagaaacggagacccagg

SEQ ID NO: 1296457 - DNA, 25 bp, Homo sapien
ctaaaatccctttggtatctacagg

SEQ ID NO: 1296458 - DNA, 25 bp, Homo sapien
cccagagaaataaagggccttgcca

SEQ ID NO: 1296459 - DNA, 25 bp, Homo sapien
tcgtaatacaatcaccaagggagcc

SEQ ID NO: 1296460 - DNA, 25 bp, Homo sapien
tctacaggaggaggttgtgaagtct

SEQ ID NO: 1296461 - DNA, 25 bp, Homo sapien
gaagagatcagagaatctatgcgga

SEQ ID NO: 1296462 - DNA, 25 bp, Homo sapien
tcttccagtgtggttgtagttggca

SEQ ID NO: 1296463 - DNA, 25 bp, Homo sapien
gatcagagaatctatgcggagaagg

SEQ ID NO: 1296464 - DNA, 25 bp, Homo sapien
cagagaatctatgcggagaaggtct

SEQ ID NO: 1296465 - DNA, 25 bp, Homo sapien
aaggtacccaaatgttgattctgtc

SEQ ID NO: 1296466 - DNA, 25 bp, Homo sapien
attctgtctttgttgggcgcttctt

SEQ ID NO: 1296467 - DNA, 25 bp, Homo sapien
ttgggcgcttctttggcttcccagg

SEQ ID NO: 1296468 - DNA, 25 bp, Homo sapien
tgcctctgggtaccaaaggtaccca

SEQ ID NO: 1296469 - DNA, 25 bp, Homo sapien
ccccaggaagggtggtggcactctc

SEQ ID NO: 1296470 - DNA, 25 bp, Homo sapien
ctagctgatccctgtgaccccttcc

SEQ ID NO: 1296471 - DNA, 25 bp, Homo sapien
gggtggtggcactctctagctgatc

SEQ ID NO: 1296472 - DNA, 25 bp, Homo sapien
tgtgaccccttcccgtaggcttctg

SEQ ID NO: 1296473 - DNA, 25 bp, Homo sapien
caggcccgtgagtccagaagtacat

SEQ ID NO: 1296474 - DNA, 25 bp, Homo sapien
aatcaatgcagattggaggcccagg

SEQ ID NO: 1296475 - DNA, 25 bp, Homo sapien
tcaaggatcctcttggccagactgt

SEQ ID NO: 1296476 - DNA, 25 bp, Homo sapien
caagagtggtctgctctcagagcaa

SEQ ID NO: 1296477 - DNA, 25 bp, Homo sapien
caccacggctgagccgctgagccgc

SEQ ID NO: 1296478 - DNA, 25 bp, Homo sapien
atgccaccacggctgagccgctgag

SEQ ID NO: 1296479 - DNA, 25 bp, Homo sapien
cttctttaaacagggagggtagatg

SEQ ID NO: 1296480 - DNA, 25 bp, Homo sapien
gccaccacggctgagccgctgagcc

SEQ ID NO: 1296481 - DNA, 25 bp, Homo sapien
agaggctcagtccttttctgctgag

SEQ ID NO: 1296482 - DNA, 25 bp, Homo sapien
tggccatgataacctcatagggctg

SEQ ID NO: 1296483 - DNA, 25 bp, Homo sapien
gaggccacagggattggaagctcca

SEQ ID NO: 1296484 - DNA, 25 bp, Homo sapien
tacttctcgcctatggaatggccat

SEQ ID NO: 1296485 - DNA, 25 bp, Homo sapien
ggacacctcgtatcattatgccaag

SEQ ID NO: 1296486 - DNA, 25 bp, Homo sapien
catgggcgtaactccttaaaccaag

SEQ ID NO: 1296487 - DNA, 25 bp, Homo sapien
tgaggccagtttccctccctaaatg

SEQ ID NO: 1296488 - DNA, 25 bp, Homo sapien
gaggcatcctttcaggcctgttgat

SEQ ID NO: 1296489 - DNA, 25 bp, Homo sapien
atgctactttagaaataattaaggt

SEQ ID NO: 1296490 - DNA, 25 bp, Homo sapien
caaatgctactttagaaataattaa

SEQ ID NO: 1296491 - DNA, 25 bp, Homo sapien
taaggttccctttagtcatttcaca

SEQ ID NO: 1296492 - DNA, 25 bp, Homo sapien
gagtcaaatgctactttagaaataa

SEQ ID NO: 1296493 - DNA, 25 bp, Homo sapien
aggatgaggacatgccccacctgta

SEQ ID NO: 1296494 - DNA, 25 bp, Homo sapien
tgttctctagaaacacgcttgtgct

SEQ ID NO: 1296495 - DNA, 25 bp, Homo sapien
catttgtgcgttgggtatttctacc

SEQ ID NO: 1296496 - DNA, 25 bp, Homo sapien
cacctgtaacgtagagcaagcaaac

SEQ ID NO: 1296497 - DNA, 25 bp, Homo sapien
agtccagtagcatctggtaagattg

SEQ ID NO: 1296498 - DNA, 25 bp, Homo sapien
ttattaaccattcaagtccagtagc

SEQ ID NO: 1296499 - DNA, 25 bp, Homo sapien
cagtagcatctggtaagattgggac

SEQ ID NO: 1296500 - DNA, 25 bp, Homo sapien
cactgtgcagttttattaaccattc

SEQ ID NO: 1296501 - DNA, 25 bp, Homo sapien
acaacatcttacagtctggatctgg

SEQ ID NO: 1296502 - DNA, 25 bp, Homo sapien
tagctacattagaaagaccaacact

SEQ ID NO: 1296503 - DNA, 25 bp, Homo sapien
aatacagtactagccattaacccag

SEQ ID NO: 1296504 - DNA, 25 bp, Homo sapien
tggatctggatctacctatacagtc

SEQ ID NO: 1296505 - DNA, 25 bp, Homo sapien
tttgttcttccgcacttcttcaatg

SEQ ID NO: 1296506 - DNA, 25 bp, Homo sapien
tcagcttcagtctcgtcagcagggt

SEQ ID NO: 1296507 - DNA, 25 bp, Homo sapien
tcagcagggtctttggattctttgt

SEQ ID NO: 1296508 - DNA, 25 bp, Homo sapien
gttcttccgcacttcttcaatgtgc

SEQ ID NO: 1296509 - DNA, 25 bp, Homo sapien
tggtgcatcaaactccaagctcaac

SEQ ID NO: 1296510 - DNA, 25 bp, Homo sapien
caactcattggtgcatcaaactcca

SEQ ID NO: 1296511 - DNA, 25 bp, Homo sapien
cattggtgcatcaaactccaagctc

SEQ ID NO: 1296512 - DNA, 25 bp, Homo sapien
agccaactcattggtgcatcaaact

SEQ ID NO: 1296513 - DNA, 25 bp, Homo sapien
gcaaacgttccagtttggcagccat

SEQ ID NO: 1296514 - DNA, 25 bp, Homo sapien
tcgcaaacgttccagtttggcagcc

SEQ ID NO: 1296515 - DNA, 25 bp, Homo sapien
tctcgcaaacgttccagtttggcag

SEQ ID NO: 1296516 - DNA, 25 bp, Homo sapien
cttctctcgcaaacgttccagtttg

SEQ ID NO: 1296517 - DNA, 25 bp, Homo sapien
tctcggttctctttattagcttcca

SEQ ID NO: 1296518 - DNA, 25 bp, Homo sapien
ctcggttctctttattagcttccat

SEQ ID NO: 1296519 - DNA, 25 bp, Homo sapien
ctctcggttctctttattagcttcc

SEQ ID NO: 1296520 - DNA, 25 bp, Homo sapien
taacactggttgcttctcggaagcg

SEQ ID NO: 1296521 - DNA, 25 bp, Homo sapien
tattgcatagaagacgactccttag

SEQ ID NO: 1296522 - DNA, 25 bp, Homo sapien
tggtatgaccccttcaacagaacag

SEQ ID NO: 1296523 - DNA, 25 bp, Homo sapien
aaagcacaggctaatgactacaggg

SEQ ID NO: 1296524 - DNA, 25 bp, Homo sapien
aaattaatatcctgctttctgtgaa

SEQ ID NO: 1296525 - DNA, 25 bp, Homo sapien
ttaatatcctgctttctgtgaattg

SEQ ID NO: 1296526 - DNA, 25 bp, Homo sapien
ataaattaatatcctgctttctgtg

SEQ ID NO: 1296527 - DNA, 25 bp, Homo sapien
aattaatatcctgctttctgtgaat

SEQ ID NO: 1296528 - DNA, 25 bp, Homo sapien
tttgaccgagggctgagaatcagct

SEQ ID NO: 1296529 - DNA, 25 bp, Homo sapien
cagattcttttgaccgagggctgag

SEQ ID NO: 1296530 - DNA, 25 bp, Homo sapien
tggcctgaggcacgcttctccagtt

SEQ ID NO: 1296531 - DNA, 25 bp, Homo sapien
tctggaacagattcttttgaccgag

SEQ ID NO: 1296532 - DNA, 25 bp, Homo sapien
gtgtattctgcacaatcaactggga

SEQ ID NO: 1296533 - DNA, 25 bp, Homo sapien
gcacaatcaactgggataaggaaag

SEQ ID NO: 1296534 - DNA, 25 bp, Homo sapien
gaatagaagacaagcgacaggcagt

SEQ ID NO: 1296535 - DNA, 25 bp, Homo sapien
acaagcgacaggcagtgtattctgc

SEQ ID NO: 1296536 - DNA, 25 bp, Homo sapien
tattccagattcaactcaacagtgc

SEQ ID NO: 1296537 - DNA, 25 bp, Homo sapien
agatattccagattcaactcaacag

SEQ ID NO: 1296538 - DNA, 25 bp, Homo sapien
ttccagattcaactcaacagtgccc

SEQ ID NO: 1296539 - DNA, 25 bp, Homo sapien
attcaactcaacagtgcccccggag

SEQ ID NO: 1296540 - DNA, 25 bp, Homo sapien
ggtttaagcttccttgcccaacagc

SEQ ID NO: 1296541 - DNA, 25 bp, Homo sapien
tcagaggcagcgacaagatttaaga

SEQ ID NO: 1296542 - DNA, 25 bp, Homo sapien
ggtggataagaaaacgcccaagcta

SEQ ID NO: 1296543 - DNA, 25 bp, Homo sapien
cattatgacttttgtagacgccagc

SEQ ID NO: 1296544 - DNA, 25 bp, Homo sapien
ccgggtggtcccgcggtgagctcgc

SEQ ID NO: 1296545 - DNA, 25 bp, Homo sapien
ggtggtcccgcggtgagctcgccac

SEQ ID NO: 1296546 - DNA, 25 bp, Homo sapien
tcccgcggtgagctcgccaccgcct

SEQ ID NO: 1296547 - DNA, 25 bp, Homo sapien
gcctcccgccgtccccatgcccaac

SEQ ID NO: 1296548 - DNA, 25 bp, Homo sapien
cgcgcgtccggccgcgaagacagaa

SEQ ID NO: 1296549 - DNA, 25 bp, Homo sapien
cgcgtccggccgcgaagacagaaga

SEQ ID NO: 1296550 - DNA, 25 bp, Homo sapien
cgtccggccgcgaagacagaagaac

SEQ ID NO: 1296551 - DNA, 25 bp, Homo sapien
gcgtccggccgcgaagacagaagaa

SEQ ID NO: 1296552 - DNA, 25 bp, Homo sapien
ccttcagacaatggggaacccggcg

SEQ ID NO: 1296553 - DNA, 25 bp, Homo sapien
ggctgcccgcagtttggtcctaaag

SEQ ID NO: 1296554 - DNA, 25 bp, Homo sapien
ccgagccacacacaaagcggagcga

SEQ ID NO: 1296555 - DNA, 25 bp, Homo sapien
tattgtctcctcgacggcaccccgg

SEQ ID NO: 1296556 - DNA, 25 bp, Homo sapien
gggcgcgcacaaaagcgccaaacag

SEQ ID NO: 1296557 - DNA, 25 bp, Homo sapien
acagaggcacgtgacctccgcgcgg

SEQ ID NO: 1296558 - DNA, 25 bp, Homo sapien
ctgctcagtccgagccgcctgacca

SEQ ID NO: 1296559 - DNA, 25 bp, Homo sapien
cacactctgagcaccaacagacccg

SEQ ID NO: 1296560 - DNA, 25 bp, Homo sapien
gcagcactcggacagagcagtgccc

SEQ ID NO: 1296561 - DNA, 25 bp, Homo sapien
ttctagtgcgccacccacatgggtg

SEQ ID NO: 1296562 - DNA, 25 bp, Homo sapien
acatgggtgcctaagacgcccgagc

SEQ ID NO: 1296563 - DNA, 25 bp, Homo sapien
tccaccttgtagagccacatgcccg

SEQ ID NO: 1296564 - DNA, 25 bp, Homo sapien
gccactcagcttaaatgcagactcc

SEQ ID NO: 1296565 - DNA, 25 bp, Homo sapien
gggctctggaatttgatcgcctttg

SEQ ID NO: 1296566 - DNA, 25 bp, Homo sapien
agcatcctcaggttcccgagccggt

SEQ ID NO: 1296567 - DNA, 25 bp, Homo sapien
gcctttggtctaacaaagccactca

SEQ ID NO: 1296568 - DNA, 25 bp, Homo sapien
tgactaagcagaagagatatcttta

SEQ ID NO: 1296569 - DNA, 25 bp, Homo sapien
ttgagatcttgactaagcagaagag

SEQ ID NO: 1296570 - DNA, 25 bp, Homo sapien
tcttgactaagcagaagagatatct

SEQ ID NO: 1296571 - DNA, 25 bp, Homo sapien
gagatcttgactaagcagaagagat

SEQ ID NO: 1296572 - DNA, 25 bp, Homo sapien
tgacccgttatgtagatagacccca

SEQ ID NO: 1296573 - DNA, 25 bp, Homo sapien
gctgaaaagaccgaggcctgaggct

SEQ ID NO: 1296574 - DNA, 25 bp, Homo sapien
gagacagccttcctgagtacatgtg

SEQ ID NO: 1296575 - DNA, 25 bp, Homo sapien
gatatggtcccgcaagagacagcct

SEQ ID NO: 1296576 - DNA, 25 bp, Homo sapien
ccgaaatggcgtctctaacagctga

SEQ ID NO: 1296577 - DNA, 25 bp, Homo sapien
cacaagcgttgtgattggctcttcc

SEQ ID NO: 1296578 - DNA, 25 bp, Homo sapien
tgcggcttgcacagcgacacacaag

SEQ ID NO: 1296579 - DNA, 25 bp, Homo sapien
agctgatttttcagggcagcagctc

SEQ ID NO: 1296580 - DNA, 25 bp, Homo sapien
ggtgcggagcccgccagggccaatc

SEQ ID NO: 1296581 - DNA, 25 bp, Homo sapien
tgcggagcccgccagggccaatccg

SEQ ID NO: 1296582 - DNA, 25 bp, Homo sapien
ggagcccgccagggccaatccgcat

SEQ ID NO: 1296583 - DNA, 25 bp, Homo sapien
tggcggtgcggagcccgccagggcc

SEQ ID NO: 1296584 - DNA, 25 bp, Homo sapien
cgactcggagggctggcgctttttc

SEQ ID NO: 1296585 - DNA, 25 bp, Homo sapien
actcggagggctggcgctttttcct

SEQ ID NO: 1296586 - DNA, 25 bp, Homo sapien
cgctgggacgactcggagggctggc

SEQ ID NO: 1296587 - DNA, 25 bp, Homo sapien
ggacgactcggagggctggcgcttt

SEQ ID NO: 1296588 - DNA, 25 bp, Homo sapien
ttcttatcacgtgcacagaggctaa

SEQ ID NO: 1296589 - DNA, 25 bp, Homo sapien
gtggcaaggatttcttatcacgtgc

SEQ ID NO: 1296590 - DNA, 25 bp, Homo sapien
ttgatgtctgcaatagtgggtggca

SEQ ID NO: 1296591 - DNA, 25 bp, Homo sapien
gcaatagtgggtggcaaggatttct

SEQ ID NO: 1296592 - DNA, 25 bp, Homo sapien
aagcggaaattgtggtgacagcctg

SEQ ID NO: 1296593 - DNA, 25 bp, Homo sapien
gctagctcgtgggtaggagaatgcc

SEQ ID NO: 1296594 - DNA, 25 bp, Homo sapien
aataaaagcggaaattgtggtgaca

SEQ ID NO: 1296595 - DNA, 25 bp, Homo sapien
ggtggcttcggctagctcgtgggta

SEQ ID NO: 1296596 - DNA, 25 bp, Homo sapien
agacaaggaggcaagacagtggcaa

SEQ ID NO: 1296597 - DNA, 25 bp, Homo sapien
tatttatcgaagacaaggaggcaag

SEQ ID NO: 1296598 - DNA, 25 bp, Homo sapien
gggacacagacagtcaggtcaccct

SEQ ID NO: 1296599 - DNA, 25 bp, Homo sapien
gacagtcaggtcacccttgccactt

SEQ ID NO: 1296600 - DNA, 25 bp, Homo sapien
actggactgttgaccttgactccat

SEQ ID NO: 1296601 - DNA, 25 bp, Homo sapien
tcactggactgttgaccttgactcc

SEQ ID NO: 1296602 - DNA, 25 bp, Homo sapien
tggactgttgaccttgactccattc

SEQ ID NO: 1296603 - DNA, 25 bp, Homo sapien
tttcactggactgttgaccttgact

SEQ ID NO: 1296604 - DNA, 25 bp, Homo sapien
taactgttgacttgcccttcttgcc

SEQ ID NO: 1296605 - DNA, 25 bp, Homo sapien
gctgaattgaactgaccaccctgtg

SEQ ID NO: 1296606 - DNA, 25 bp, Homo sapien
gttcaattccacaagaacagggctg

SEQ ID NO: 1296607 - DNA, 25 bp, Homo sapien
agggctggccatagtgcaggaatca

SEQ ID NO: 1296608 - DNA, 25 bp, Homo sapien
tcaaactttgatgcctatgtcccag

SEQ ID NO: 1296609 - DNA, 25 bp, Homo sapien
ctctgcacctggctatgatgggata

SEQ ID NO: 1296610 - DNA, 25 bp, Homo sapien
taagtgaaatgatgcatgtcagccc

SEQ ID NO: 1296611 - DNA, 25 bp, Homo sapien
ttgctgagagcctgatgaaatcgct

SEQ ID NO: 1296612 - DNA, 25 bp, Homo sapien
tcattttagaaacgcaggagctgag

SEQ ID NO: 1296613 - DNA, 25 bp, Homo sapien
tacccagttggcagtggtggagcca

SEQ ID NO: 1296614 - DNA, 25 bp, Homo sapien
aaggtactcctaggcctctctggga

SEQ ID NO: 1296615 - DNA, 25 bp, Homo sapien
cactgacaggtggagatctaggccc

SEQ ID NO: 1296616 - DNA, 25 bp, Homo sapien
tgtttgtcaatcagcaagggatccc

SEQ ID NO: 1296617 - DNA, 25 bp, Homo sapien
aagtacccagttatccaagcagcag

SEQ ID NO: 1296618 - DNA, 25 bp, Homo sapien
tcagacttcaacaagtggccctggg

SEQ ID NO: 1296619 - DNA, 25 bp, Homo sapien
ctacttctctgttgtggcaaaggcc

SEQ ID NO: 1296620 - DNA, 25 bp, Homo sapien
tgccttcaataaggttgttccattg

SEQ ID NO: 1296621 - DNA, 25 bp, Homo sapien
ggttgttccattgattatagtcttc

SEQ ID NO: 1296622 - DNA, 25 bp, Homo sapien
cccctggggtgagcgacggtccaat

SEQ ID NO: 1296623 - DNA, 25 bp, Homo sapien
cgacggtccaatgccttcaataagg

SEQ ID NO: 1296624 - DNA, 25 bp, Homo sapien
aattctatgtaagtctctccttcac

SEQ ID NO: 1296625 - DNA, 25 bp, Homo sapien
tttctgtaattctatgtaagtctct

SEQ ID NO: 1296626 - DNA, 25 bp, Homo sapien
tcccagatcccagacatgtcagagt

SEQ ID NO: 1296627 - DNA, 25 bp, Homo sapien
catttgccataaatctccttcccag

SEQ ID NO: 1296628 - DNA, 25 bp, Homo sapien
gaatttaccaatcaagttgccagtc

SEQ ID NO: 1296629 - DNA, 25 bp, Homo sapien
gtccaggctcccacgggtttcagtg

SEQ ID NO: 1296630 - DNA, 25 bp, Homo sapien
cagtttgactccgatgaacagaacc

SEQ ID NO: 1296631 - DNA, 25 bp, Homo sapien
cttctgcaggaaggccaacatggcc

SEQ ID NO: 1296632 - DNA, 25 bp, Homo sapien
aacggttatgatcctagactgttca

SEQ ID NO: 1296633 - DNA, 25 bp, Homo sapien
tcatcaaattgacactctccattgt

SEQ ID NO: 1296634 - DNA, 25 bp, Homo sapien
gttccagaggaaacatccaagcatc

SEQ ID NO: 1296635 - DNA, 25 bp, Homo sapien
gactgttcatgctgggcacatatct

SEQ ID NO: 1296636 - DNA, 25 bp, Homo sapien
aatagctgtggcccctccaaatgaa

SEQ ID NO: 1296637 - DNA, 25 bp, Homo sapien
tgtggcccctccaaatgaatgtccc

SEQ ID NO: 1296638 - DNA, 25 bp, Homo sapien
ccacacggctcatgtcaatgttgcc

SEQ ID NO: 1296639 - DNA, 25 bp, Homo sapien
agccacacggctcatgtcaatgttg

SEQ ID NO: 1296640 - DNA, 25 bp, Homo sapien
ccagcagtgacctcttgcaggatct

SEQ ID NO: 1296641 - DNA, 25 bp, Homo sapien
aaacactcgcttacccgctgatgca

SEQ ID NO: 1296642 - DNA, 25 bp, Homo sapien
gcaggatcttcaacacccgtaaaca

SEQ ID NO: 1296643 - DNA, 25 bp, Homo sapien
gatccaagccaccaggcaagatgtt

SEQ ID NO: 1296644 - DNA, 25 bp, Homo sapien
aaataggtggttgccgctgaccggt

SEQ ID NO: 1296645 - DNA, 25 bp, Homo sapien
ctcctgcagcgattcattggtgggc

SEQ ID NO: 1296646 - DNA, 25 bp, Homo sapien
gggattccgaacatgaaattccttc

SEQ ID NO: 1296647 - DNA, 25 bp, Homo sapien
caactcgacggaaagggatccattc

SEQ ID NO: 1296648 - DNA, 25 bp, Homo sapien
tgtgctctggcacagcaaccacaaa

SEQ ID NO: 1296649 - DNA, 25 bp, Homo sapien
aaagccacgtgaggccagctccatg

SEQ ID NO: 1296650 - DNA, 25 bp, Homo sapien
cagcaaccacaaagccacgtgaggc

SEQ ID NO: 1296651 - DNA, 25 bp, Homo sapien
catgcagaaggctgaatacaaagtc

SEQ ID NO: 1296652 - DNA, 25 bp, Homo sapien
caaccttaactgtctacctctggct

SEQ ID NO: 1296653 - DNA, 25 bp, Homo sapien
cagccatcttgtggaattaccacat

SEQ ID NO: 1296654 - DNA, 25 bp, Homo sapien
caacaatgctctgctagcagccatc

SEQ ID NO: 1296655 - DNA, 25 bp, Homo sapien
ggatcaaaagaacagcccagccttc

SEQ ID NO: 1296656 - DNA, 25 bp, Homo sapien
ctttgtcttaaaggggccattccag

SEQ ID NO: 1296657 - DNA, 25 bp, Homo sapien
tcaaggggtatccagagtcctttgt

SEQ ID NO: 1296658 - DNA, 25 bp, Homo sapien
gatcaaggggtatccagagtccttt

SEQ ID NO: 1296659 - DNA, 25 bp, Homo sapien
cagctaacaggcaggcgacaagatc

SEQ ID NO: 1296660 - DNA, 25 bp, Homo sapien
gcagtactcatagcggggaatccac

SEQ ID NO: 1296661 - DNA, 25 bp, Homo sapien
ccaggccagtgcagtactcatagcg

SEQ ID NO: 1296662 - DNA, 25 bp, Homo sapien
gcaagcccccgcagcgcttattaaa

SEQ ID NO: 1296663 - DNA, 25 bp, Homo sapien
ggtagaagagtcgaaagaagctccc

SEQ ID NO: 1296664 - DNA, 25 bp, Homo sapien
acatccccacagcctacgaggtggg

SEQ ID NO: 1296665 - DNA, 25 bp, Homo sapien
gaaagcccacagactggttgacccc

SEQ ID NO: 1296666 - DNA, 25 bp, Homo sapien
tggagattctgaccctccatcacat

SEQ ID NO: 1296667 - DNA, 25 bp, Homo sapien
tggggtcctgtgacaggtggaaagc

SEQ ID NO: 1296668 - DNA, 25 bp, Homo sapien
gggtgaatcaaatgacttgccggag

SEQ ID NO: 1296669 - DNA, 25 bp, Homo sapien
atcaaatgacttgccggagctgaac

SEQ ID NO: 1296670 - DNA, 25 bp, Homo sapien
gacttgccggagctgaacttgctgg

SEQ ID NO: 1296671 - DNA, 25 bp, Homo sapien
caccgggtgaatcaaatgacttgcc

SEQ ID NO: 1296672 - DNA, 25 bp, Homo sapien
acagcagccgcttgctggtttcctc

SEQ ID NO: 1296673 - DNA, 25 bp, Homo sapien
cagaacagcagccgcttgctggttt

SEQ ID NO: 1296674 - DNA, 25 bp, Homo sapien
cacagaacagcagccgcttgctggt

SEQ ID NO: 1296675 - DNA, 25 bp, Homo sapien
gaacagcagccgcttgctggtttcc

SEQ ID NO: 1296676 - DNA, 25 bp, Homo sapien
gaagacaccaagcactcgagggatg

SEQ ID NO: 1296677 - DNA, 25 bp, Homo sapien
tcgagggatgagattgagcaacaag

SEQ ID NO: 1296678 - DNA, 25 bp, Homo sapien
gctcgtagacaatgaagacaccaag

SEQ ID NO: 1296679 - DNA, 25 bp, Homo sapien
gaggaaatatcatccagctcgtaga

SEQ ID NO: 1296680 - DNA, 25 bp, Homo sapien
cacatactagcttgttggctcctca

SEQ ID NO: 1296681 - DNA, 25 bp, Homo sapien
tagaaccgggtctgctgacttcgag

SEQ ID NO: 1296682 - DNA, 25 bp, Homo sapien
tgacttcgagtccagggtaatcgcg

SEQ ID NO: 1296683 - DNA, 25 bp, Homo sapien
tggccgttaaaagtgcgaggcgacc

SEQ ID NO: 1296684 - DNA, 25 bp, Homo sapien
tgagaaacgacccatgaacccgtgg

SEQ ID NO: 1296685 - DNA, 25 bp, Homo sapien
aagcagccccagacgtttaactcga

SEQ ID NO: 1296686 - DNA, 25 bp, Homo sapien
cagtcaagctgattcctcagaagca

SEQ ID NO: 1296687 - DNA, 25 bp, Homo sapien
ggctcaaaatggacgcttggaagca

SEQ ID NO: 1296688 - DNA, 25 bp, Homo sapien
tctgttgacacctgtgattttccat

SEQ ID NO: 1296689 - DNA, 25 bp, Homo sapien
gttgacacctgtgattttccattgt

SEQ ID NO: 1296690 - DNA, 25 bp, Homo sapien
tgttgacacctgtgattttccattg

SEQ ID NO: 1296691 - DNA, 25 bp, Homo sapien
atctgttgacacctgtgattttcca

SEQ ID NO: 1296692 - DNA, 25 bp, Homo sapien
caagccagaggtccttggtcatgag

SEQ ID NO: 1296693 - DNA, 25 bp, Homo sapien
agccagaggtccttggtcatgagag

SEQ ID NO: 1296694 - DNA, 25 bp, Homo sapien
gaggtccttggtcatgagagggaca

SEQ ID NO: 1296695 - DNA, 25 bp, Homo sapien
cagaggtccttggtcatgagaggga

SEQ ID NO: 1296696 - DNA, 25 bp, Homo sapien
taggaagctcttccttgggcacaat

SEQ ID NO: 1296697 - DNA, 25 bp, Homo sapien
tttgtcacagttaggaagctcttcc

SEQ ID NO: 1296698 - DNA, 25 bp, Homo sapien
ttccttgggcacaatcagattcttc

SEQ ID NO: 1296699 - DNA, 25 bp, Homo sapien
cctttgtcacagttaggaagctctt

SEQ ID NO: 1296700 - DNA, 25 bp, Homo sapien
cttctctgagttcccttgccagtgt

SEQ ID NO: 1296701 - DNA, 25 bp, Homo sapien
cctcatagcccctcatcccttctct

SEQ ID NO: 1296702 - DNA, 25 bp, Homo sapien
tcccttgccagtgtggtagttttca

SEQ ID NO: 1296703 - DNA, 25 bp, Homo sapien
ctgagttcccttgccagtgtggtag

SEQ ID NO: 1296704 - DNA, 25 bp, Homo sapien
taaggacttggcatacggcaaagcc

SEQ ID NO: 1296705 - DNA, 25 bp, Homo sapien
gcccctgcgagtggtagaacatttg

SEQ ID NO: 1296706 - DNA, 25 bp, Homo sapien
caaatgagagtgtgagggtcctcac

SEQ ID NO: 1296707 - DNA, 25 bp, Homo sapien
gaggcatcaaccctgtcggtgtaca

SEQ ID NO: 1296708 - DNA, 25 bp, Homo sapien
aggtcctgttcatgccccagttggt

SEQ ID NO: 1296709 - DNA, 25 bp, Homo sapien
ctgttcatgccccagttggtgcctg

SEQ ID NO: 1296710 - DNA, 25 bp, Homo sapien
ggggacctggtttacaacacagctg

SEQ ID NO: 1296711 - DNA, 25 bp, Homo sapien
ggacctggtttacaacacagctggg

SEQ ID NO: 1296712 - DNA, 25 bp, Homo sapien
gggccctggcatgcctgacagtcct

SEQ ID NO: 1296713 - DNA, 25 bp, Homo sapien
ttcatgtcctccgagtagtcctcga

SEQ ID NO: 1296714 - DNA, 25 bp, Homo sapien
ccttcatgtcctccgagtagtcctc

SEQ ID NO: 1296715 - DNA, 25 bp, Homo sapien
tgcctgacagtccttcatgtcctcc

SEQ ID NO: 1296716 - DNA, 25 bp, Homo sapien
tgtggaagtggaacttcccttggag

SEQ ID NO: 1296717 - DNA, 25 bp, Homo sapien
cacggtgtggaagtggaacttccct

SEQ ID NO: 1296718 - DNA, 25 bp, Homo sapien
agtggaacttcccttggaggcggct

SEQ ID NO: 1296719 - DNA, 25 bp, Homo sapien
gtcacggtgtggaagtggaacttcc

SEQ ID NO: 1296720 - DNA, 25 bp, Homo sapien
aacaggctgggccaccgtcagtgcc

SEQ ID NO: 1296721 - DNA, 25 bp, Homo sapien
gcagcagatcacgaacagctgtgaa

SEQ ID NO: 1296722 - DNA, 25 bp, Homo sapien
cagctgtgaagtcaacgcccttggg

SEQ ID NO: 1296723 - DNA, 25 bp, Homo sapien
caatggcgatgtggacagacagaac

SEQ ID NO: 1296724 - DNA, 25 bp, Homo sapien
atcacatctctcaggatggtcaagg

SEQ ID NO: 1296725 - DNA, 25 bp, Homo sapien
gatcacatctctcaggatggtcaag

SEQ ID NO: 1296726 - DNA, 25 bp, Homo sapien
caggatcacatctctcaggatggtc

SEQ ID NO: 1296727 - DNA, 25 bp, Homo sapien
ggatcacatctctcaggatggtcaa

SEQ ID NO: 1296728 - DNA, 25 bp, Homo sapien
tggtgccgtggctgtgcccatggcc

SEQ ID NO: 1296729 - DNA, 25 bp, Homo sapien
aatataggctgccactaggacaccc

SEQ ID NO: 1296730 - DNA, 25 bp, Homo sapien
aaagtcgccgatcacatggatgaag

SEQ ID NO: 1296731 - DNA, 25 bp, Homo sapien
cagactggtgaagggtcaaccccat

SEQ ID NO: 1296732 - DNA, 25 bp, Homo sapien
tttcatagtccccagagatcagccg

SEQ ID NO: 1296733 - DNA, 25 bp, Homo sapien
cagcccgacgtgatcagcatggtcc

SEQ ID NO: 1296734 - DNA, 25 bp, Homo sapien
cccgtcacgacccagatggacagta

SEQ ID NO: 1296735 - DNA, 25 bp, Homo sapien
catggtccccccgtcaatttcatag

SEQ ID NO: 1296736 - DNA, 25 bp, Homo sapien
tctgccagccaaagttcatggtctt

SEQ ID NO: 1296737 - DNA, 25 bp, Homo sapien
caggtgtgctgcgtcagtcatgaca

SEQ ID NO: 1296738 - DNA, 25 bp, Homo sapien
tggcaaagtcagtgagcaggtgtgc

SEQ ID NO: 1296739 - DNA, 25 bp, Homo sapien
agaagaggctgatgagcatgctggc

SEQ ID NO: 1296740 - DNA, 25 bp, Homo sapien
gcagatggcagaggctacatacagc

SEQ ID NO: 1296741 - DNA, 25 bp, Homo sapien
aggctacatacagctggcgctgggc

SEQ ID NO: 1296742 - DNA, 25 bp, Homo sapien
caacgacttctccgatcatgaacaa

SEQ ID NO: 1296743 - DNA, 25 bp, Homo sapien
agctcaatggcctgcaagtccaggc

SEQ ID NO: 1296744 - DNA, 25 bp, Homo sapien
ctgccacagagatcccgtgtatgac

SEQ ID NO: 1296745 - DNA, 25 bp, Homo sapien
cggcctggcgtccaacagatgctgc

SEQ ID NO: 1296746 - DNA, 25 bp, Homo sapien
tgccggcctggcgtccaacagatgc

SEQ ID NO: 1296747 - DNA, 25 bp, Homo sapien
gattgccggcctggcgtccaacaga

SEQ ID NO: 1296748 - DNA, 25 bp, Homo sapien
cggattgccggcctggcgtccaaca

SEQ ID NO: 1296749 - DNA, 25 bp, Homo sapien
gtcccgcgccgagtcccggcagccg

SEQ ID NO: 1296750 - DNA, 25 bp, Homo sapien
gcgcagccgccccgccgagtgcgcc

SEQ ID NO: 1296751 - DNA, 25 bp, Homo sapien
gcagtcccgcgccgagtcccggcag

SEQ ID NO: 1296752 - DNA, 25 bp, Homo sapien
ggcagccgcgcagccgccccgccga

SEQ ID NO: 1296753 - DNA, 25 bp, Homo sapien
ctgaaagttgcgcgcgggactccgg

SEQ ID NO: 1296754 - DNA, 25 bp, Homo sapien
caagcgctcccgtgtctcgggtcag

SEQ ID NO: 1296755 - DNA, 25 bp, Homo sapien
gtcggcgcgtcgtgtgcaaaagccc

SEQ ID NO: 1296756 - DNA, 25 bp, Homo sapien
ccgtgtgaagctgccgtcggcgcgt

SEQ ID NO: 1296757 - DNA, 25 bp, Homo sapien
gtcgccggctgcaaaaggcccggct

SEQ ID NO: 1296758 - DNA, 25 bp, Homo sapien
tagaaatccgctttggtggtcccga

SEQ ID NO: 1296759 - DNA, 25 bp, Homo sapien
ctgccggccgcgagaagtttgccag

SEQ ID NO: 1296760 - DNA, 25 bp, Homo sapien
cgcggcgccgggtgttgctgagtga

SEQ ID NO: 1296761 - DNA, 25 bp, Homo sapien
tggtcccgacggcaggaatgtggct

SEQ ID NO: 1296762 - DNA, 25 bp, Homo sapien
acaggaagagagcattgtgcattta

SEQ ID NO: 1296763 - DNA, 25 bp, Homo sapien
aacaggaagagagcattgtgcattt

SEQ ID NO: 1296764 - DNA, 25 bp, Homo sapien
caggaagagagcattgtgcatttat

SEQ ID NO: 1296765 - DNA, 25 bp, Homo sapien
taccaccccgtatgtctgggatagg

SEQ ID NO: 1296766 - DNA, 25 bp, Homo sapien
tgggataggcactgaaatacagcac

SEQ ID NO: 1296767 - DNA, 25 bp, Homo sapien
aagtgggcagctgtatcaacctggc

SEQ ID NO: 1296768 - DNA, 25 bp, Homo sapien
tacagcacatcgtccctgtgagtgc

SEQ ID NO: 1296769 - DNA, 25 bp, Homo sapien
cctgatcttcttcttcaatgaattc

SEQ ID NO: 1296770 - DNA, 25 bp, Homo sapien
cttcctgatcttcttcttcaatgaa

SEQ ID NO: 1296771 - DNA, 25 bp, Homo sapien
cttctgtggactcttcctcttcctg

SEQ ID NO: 1296772 - DNA, 25 bp, Homo sapien
cttcccttctgtggactcttcctct

SEQ ID NO: 1296773 - DNA, 25 bp, Homo sapien
cttgaatatcttagcttagggaagc

SEQ ID NO: 1296774 - DNA, 25 bp, Homo sapien
tggatgtccccaaggccattggtgt

SEQ ID NO: 1296775 - DNA, 25 bp, Homo sapien
tggagcagctcactacagcagtgga

SEQ ID NO: 1296776 - DNA, 25 bp, Homo sapien
ccattggtgtctctgctttgggatg

SEQ ID NO: 1296777 - DNA, 25 bp, Homo sapien
aaagaagtccatgttctcaaagccc

SEQ ID NO: 1296778 - DNA, 25 bp, Homo sapien
aaagtcaatggctctcagggcgtct

SEQ ID NO: 1296779 - DNA, 25 bp, Homo sapien
atccaaagtaaagaagtccatgttc

SEQ ID NO: 1296780 - DNA, 25 bp, Homo sapien
tcagggcgtctgctatgtgctctaa

SEQ ID NO: 1296781 - DNA, 25 bp, Homo sapien
ccccaggctcgtccagggactggat

SEQ ID NO: 1296782 - DNA, 25 bp, Homo sapien
catccaggatggcatacaacgtgtc

SEQ ID NO: 1296783 - DNA, 25 bp, Homo sapien
tgagggcctcgatgaagctaagctt

SEQ ID NO: 1296784 - DNA, 25 bp, Homo sapien
tgcgtgatccgctgcagcaactcac

SEQ ID NO: 1296785 - DNA, 25 bp, Homo sapien
gacgggaatcctccagctgagtgat

SEQ ID NO: 1296786 - DNA, 25 bp, Homo sapien
ttggtcactcgacgggaatcctcca

SEQ ID NO: 1296787 - DNA, 25 bp, Homo sapien
tgatgatggtctgcacacggtcatt

SEQ ID NO: 1296788 - DNA, 25 bp, Homo sapien
gagtgatgatggtctgcacacggtc

SEQ ID NO: 1296789 - DNA, 25 bp, Homo sapien
aggctgggggtaaaagtggctggag

SEQ ID NO: 1296790 - DNA, 25 bp, Homo sapien
ctgggggtaaaagtggctggagaca

SEQ ID NO: 1296791 - DNA, 25 bp, Homo sapien
gggtaaaagtggctggagacagtac

SEQ ID NO: 1296792 - DNA, 25 bp, Homo sapien
cccaggctgggggtaaaagtggctg

SEQ ID NO: 1296793 - DNA, 25 bp, Homo sapien
gggcacctcacacgtgagacagtag

SEQ ID NO: 1296794 - DNA, 25 bp, Homo sapien
atcttcgtgctccttgcacatgggg

SEQ ID NO: 1296795 - DNA, 25 bp, Homo sapien
catcttcgtgctccttgcacatggg

SEQ ID NO: 1296796 - DNA, 25 bp, Homo sapien
ggtgggcacctcacacgtgagacag

SEQ ID NO: 1296797 - DNA, 25 bp, Homo sapien
cacagaaagggccatagaattccag

SEQ ID NO: 1296798 - DNA, 25 bp, Homo sapien
gggaagccaatgacaccaaatctgt

SEQ ID NO: 1296799 - DNA, 25 bp, Homo sapien
aaatctgtccccacatcctaagagg

SEQ ID NO: 1296800 - DNA, 25 bp, Homo sapien
ttagcctgaggctctgccagtgcca

SEQ ID NO: 1296801 - DNA, 25 bp, Homo sapien
tcacagaggctgactagcaagcaca

SEQ ID NO: 1296802 - DNA, 25 bp, Homo sapien
tgagatctggtctgtcaccttcccc

SEQ ID NO: 1296803 - DNA, 25 bp, Homo sapien
tcccgggttactatgagaagcagat

SEQ ID NO: 1296804 - DNA, 25 bp, Homo sapien
gaaatgaagctctaaaggcttaccc

SEQ ID NO: 1296805 - DNA, 25 bp, Homo sapien
ccatgatcacctcgtggcggcaggt

SEQ ID NO: 1296806 - DNA, 25 bp, Homo sapien
gcggaaacggcctccagacatggac

SEQ ID NO: 1296807 - DNA, 25 bp, Homo sapien
cactcctgtttgtagatgtcgatga

SEQ ID NO: 1296808 - DNA, 25 bp, Homo sapien
tgcaggccgtacactccgtgacgat

SEQ ID NO: 1296809 - DNA, 25 bp, Homo sapien
gaagatgtcattggcacacttccgg

SEQ ID NO: 1296810 - DNA, 25 bp, Homo sapien
ctggaagatgtcattggcacacttc

SEQ ID NO: 1296811 - DNA, 25 bp, Homo sapien
cttccggcacaggttgtgctggcac

SEQ ID NO: 1296812 - DNA, 25 bp, Homo sapien
cacggcaagatgaccactggcttgg

SEQ ID NO: 1296813 - DNA, 25 bp, Homo sapien
tggatcaggctcgacttataatcca

SEQ ID NO: 1296814 - DNA, 25 bp, Homo sapien
ctggatcaggctcgacttataatcc

SEQ ID NO: 1296815 - DNA, 25 bp, Homo sapien
ggatcaggctcgacttataatccat

SEQ ID NO: 1296816 - DNA, 25 bp, Homo sapien
taactttgctctaagtagacctggg

SEQ ID NO: 1296817 - DNA, 25 bp, Homo sapien
tagatcttggtcacatgagccccag

SEQ ID NO: 1296818 - DNA, 25 bp, Homo sapien
caggcttagggcaagactgggtacc

SEQ ID NO: 1296819 - DNA, 25 bp, Homo sapien
gcaatcactattctgctgggacggg

SEQ ID NO: 1296820 - DNA, 25 bp, Homo sapien
gaagtgcttccctggtacatcatgg

SEQ ID NO: 1296821 - DNA, 25 bp, Homo sapien
tggtgatgctggagaggaaacaact

SEQ ID NO: 1296822 - DNA, 25 bp, Homo sapien
acatagttcaggcttgtggaagtgc

SEQ ID NO: 1296823 - DNA, 25 bp, Homo sapien
agtgctccggtgatgacacaggccc

SEQ ID NO: 1296824 - DNA, 25 bp, Homo sapien
gtcccaacctttgccagatagataa

SEQ ID NO: 1296825 - DNA, 25 bp, Homo sapien
tggtcccaacctttgccagatagat

SEQ ID NO: 1296826 - DNA, 25 bp, Homo sapien
cccaacctttgccagatagataaca

SEQ ID NO: 1296827 - DNA, 25 bp, Homo sapien
caacctttgccagatagataacatc

SEQ ID NO: 1296828 - DNA, 25 bp, Homo sapien
tcctctggtccctggttctccatcc

SEQ ID NO: 1296829 - DNA, 25 bp, Homo sapien
ctctcctctggtccctggttctcca

SEQ ID NO: 1296830 - DNA, 25 bp, Homo sapien
ctcctctcctctggtccctggttct

SEQ ID NO: 1296831 - DNA, 25 bp, Homo sapien
cctctcctctggtccctggttctcc

SEQ ID NO: 1296832 - DNA, 25 bp, Homo sapien
ggtattcaaggtagacacatcccaa

SEQ ID NO: 1296833 - DNA, 25 bp, Homo sapien
tatataaagacctaacccagtgcca

SEQ ID NO: 1296834 - DNA, 25 bp, Homo sapien
tacatcgtgccttacagagcgagcg

SEQ ID NO: 1296835 - DNA, 25 bp, Homo sapien
tgagttgatctttgagcacagcgac

SEQ ID NO: 1296836 - DNA, 25 bp, Homo sapien
taacaactggatgactgaggaatgc

SEQ ID NO: 1296837 - DNA, 25 bp, Homo sapien
tgaggaatgcggtcctaagtgaccc

SEQ ID NO: 1296838 - DNA, 25 bp, Homo sapien
ggccaacagcgtgcgggatctgact

SEQ ID NO: 1296839 - DNA, 25 bp, Homo sapien
gatctgactaacagcgtgtggcagc

SEQ ID NO: 1296840 - DNA, 25 bp, Homo sapien
gcggggaccccattgactgtccagc

SEQ ID NO: 1296841 - DNA, 25 bp, Homo sapien
gatcctggctcggaccaaggcctct

SEQ ID NO: 1296842 - DNA, 25 bp, Homo sapien
agagcggcaggagcgcggtggatcc

SEQ ID NO: 1296843 - DNA, 25 bp, Homo sapien
tgcagaccaaccctccaccaggagc

SEQ ID NO: 1296844 - DNA, 25 bp, Homo sapien
gtctccgcaactgcaccgcccgcaa

SEQ ID NO: 1296845 - DNA, 25 bp, Homo sapien
atcctcccagatgatcgcacccagc

SEQ ID NO: 1296846 - DNA, 25 bp, Homo sapien
accgcccgcaaacatggctcagtga

SEQ ID NO: 1296847 - DNA, 25 bp, Homo sapien
catcctcccagatgatcgcacccag

SEQ ID NO: 1296848 - DNA, 25 bp, Homo sapien
gggagcagcaccagtggtgcgctcc

SEQ ID NO: 1296849 - DNA, 25 bp, Homo sapien
cagcaccagtggtgcgctccggagc

SEQ ID NO: 1296850 - DNA, 25 bp, Homo sapien
tccgacgactcccggctctgcaaat

SEQ ID NO: 1296851 - DNA, 25 bp, Homo sapien
gtggcgtggcctcgcggttcccgag

SEQ ID NO: 1296852 - DNA, 25 bp, Homo sapien
ggcgtaagggggtgtgtccgcgcgc

SEQ ID NO: 1296853 - DNA, 25 bp, Homo sapien
tcggcgtaagggggtgtgtccgcgc

SEQ ID NO: 1296854 - DNA, 25 bp, Homo sapien
gcgtaagggggtgtgtccgcgcgca

SEQ ID NO: 1296855 - DNA, 25 bp, Homo sapien
cgtaagggggtgtgtccgcgcgcac

SEQ ID NO: 1296856 - DNA, 25 bp, Homo sapien
ctgcccgataatggcggcctgcaga

SEQ ID NO: 1296857 - DNA, 25 bp, Homo sapien
gcgagctgcccgataatggcggcct

SEQ ID NO: 1296858 - DNA, 25 bp, Homo sapien
cgcgagctgcccgataatggcggcc

SEQ ID NO: 1296859 - DNA, 25 bp, Homo sapien
agctgcccgataatggcggcctgca

SEQ ID NO: 1296860 - DNA, 25 bp, Homo sapien
tgccctgatatgatcacttgttgag

SEQ ID NO: 1296861 - DNA, 25 bp, Homo sapien
tgaaacagtactggtaataatatgg

SEQ ID NO: 1296862 - DNA, 25 bp, Homo sapien
tgttgagtcactggagttcctttca

SEQ ID NO: 1296863 - DNA, 25 bp, Homo sapien
actttgcctgccctgatatgatcac

SEQ ID NO: 1296864 - DNA, 25 bp, Homo sapien
ctggctggttattcccgacactgac

SEQ ID NO: 1296865 - DNA, 25 bp, Homo sapien
tggctggttattcccgacactgacc

SEQ ID NO: 1296866 - DNA, 25 bp, Homo sapien
tggttattcccgacactgaccagag

SEQ ID NO: 1296867 - DNA, 25 bp, Homo sapien
ttattcccgacactgaccagagctg

SEQ ID NO: 1296868 - DNA, 25 bp, Homo sapien
tcaccctcatctcggccagtttgtg

SEQ ID NO: 1296869 - DNA, 25 bp, Homo sapien
tagtcacccttgggcgcagccttca

SEQ ID NO: 1296870 - DNA, 25 bp, Homo sapien
gtccggctccggagtgggctcggtg

SEQ ID NO: 1296871 - DNA, 25 bp, Homo sapien
tttgtgagtgaggaagccccacttg

SEQ ID NO: 1296872 - DNA, 25 bp, Homo sapien
cgcgtcccagaagcccgggccgcgc

SEQ ID NO: 1296873 - DNA, 25 bp, Homo sapien
ctgctggcgaacgcgtcccagaagc

SEQ ID NO: 1296874 - DNA, 25 bp, Homo sapien
ctctgatggcagcagcttatcttca

SEQ ID NO: 1296875 - DNA, 25 bp, Homo sapien
tctgatggcagcagcttatcttcat

SEQ ID NO: 1296876 - DNA, 25 bp, Homo sapien
tggtcagcgcaaggctctgatggca

SEQ ID NO: 1296877 - DNA, 25 bp, Homo sapien
atcttctttgttaaacagagatgac

SEQ ID NO: 1296878 - DNA, 25 bp, Homo sapien
tgaaggtctcctcggtcggttctgc

SEQ ID NO: 1296879 - DNA, 25 bp, Homo sapien
cagctgtgacatgggattgaaggtc

SEQ ID NO: 1296880 - DNA, 25 bp, Homo sapien
tgacatgggattgaaggtctcctcg

SEQ ID NO: 1296881 - DNA, 25 bp, Homo sapien
tcagaccccactaatgctgggttct

SEQ ID NO: 1296882 - DNA, 25 bp, Homo sapien
gtacatgagcatgcccccacatggc

SEQ ID NO: 1296883 - DNA, 25 bp, Homo sapien
acatgagcatgcccccacatggcta

SEQ ID NO: 1296884 - DNA, 25 bp, Homo sapien
tgagcatgcccccacatggctacag

SEQ ID NO: 1296885 - DNA, 25 bp, Homo sapien
ctgtacatgagcatgcccccacatg

SEQ ID NO: 1296886 - DNA, 25 bp, Homo sapien
ctgtacatagacatacgtgttgtga

SEQ ID NO: 1296887 - DNA, 25 bp, Homo sapien
acatagacatacgtgttgtgaagca

SEQ ID NO: 1296888 - DNA, 25 bp, Homo sapien
tacatagacatacgtgttgtgaagc

SEQ ID NO: 1296889 - DNA, 25 bp, Homo sapien
gtacatagacatacgtgttgtgaag

SEQ ID NO: 1296890 - DNA, 25 bp, Homo sapien
tgtgccccacttcatactgctcatt

SEQ ID NO: 1296891 - DNA, 25 bp, Homo sapien
tgctccacccaccatgcatggatgg

SEQ ID NO: 1296892 - DNA, 25 bp, Homo sapien
tccaagcctatcctgtgccccactt

SEQ ID NO: 1296893 - DNA, 25 bp, Homo sapien
catgctccacccaccatgcatggat

SEQ ID NO: 1296894 - DNA, 25 bp, Homo sapien
cactttggacttgtaggttttccag

SEQ ID NO: 1296895 - DNA, 25 bp, Homo sapien
gtctgtagcactttggacttgtagg

SEQ ID NO: 1296896 - DNA, 25 bp, Homo sapien
tgtagcactttggacttgtaggttt

SEQ ID NO: 1296897 - DNA, 25 bp, Homo sapien
tagcactttggacttgtaggttttc

SEQ ID NO: 1296898 - DNA, 25 bp, Homo sapien
ttggatgagattcaccgcgagctgc

SEQ ID NO: 1296899 - DNA, 25 bp, Homo sapien
tctctagcccggcagatgaaggcga

SEQ ID NO: 1296900 - DNA, 25 bp, Homo sapien
gctgtttctggccatgggtcgctcc

SEQ ID NO: 1296901 - DNA, 25 bp, Homo sapien
gagatgtgaagttgaagccccaggc

SEQ ID NO: 1296902 - DNA, 25 bp, Homo sapien
ggaggtacttcatcgattccaccaa

SEQ ID NO: 1296903 - DNA, 25 bp, Homo sapien
tccgatccaaagaccacaagaaaag

SEQ ID NO: 1296904 - DNA, 25 bp, Homo sapien
tgcacttgggagactatcacctcct

SEQ ID NO: 1296905 - DNA, 25 bp, Homo sapien
ggtgctcagcagatagggctctcac

SEQ ID NO: 1296906 - DNA, 25 bp, Homo sapien
tggtcagctcccaactcctgttttt

SEQ ID NO: 1296907 - DNA, 25 bp, Homo sapien
ccaggctgaagcagctgagcgtcga

SEQ ID NO: 1296908 - DNA, 25 bp, Homo sapien
tcccaggctgaagcagctgagcgtc

SEQ ID NO: 1296909 - DNA, 25 bp, Homo sapien
ggctgaagcagctgagcgtcgagcc

SEQ ID NO: 1296910 - DNA, 25 bp, Homo sapien
tcttggtgccctgccccaaataaag

SEQ ID NO: 1296911 - DNA, 25 bp, Homo sapien
gatacctctacctgacatggcctga

SEQ ID NO: 1296912 - DNA, 25 bp, Homo sapien
ggaactggacaaagagaacttgcct

SEQ ID NO: 1296913 - DNA, 25 bp, Homo sapien
gaggaattgcccatggacagtgacg

SEQ ID NO: 1296914 - DNA, 25 bp, Homo sapien
tagcatctgaactggagcacccaga

SEQ ID NO: 1296915 - DNA, 25 bp, Homo sapien
tagggtgtctactccccacttggtc

SEQ ID NO: 1296916 - DNA, 25 bp, Homo sapien
tctgacagagactgatccccagaaa

SEQ ID NO: 1296917 - DNA, 25 bp, Homo sapien
cacccagatggaggcctgatgcagt

SEQ ID NO: 1296918 - DNA, 25 bp, Homo sapien
gcatccaagtgagagtctctcttct

SEQ ID NO: 1296919 - DNA, 25 bp, Homo sapien
tcttccagacggcatagcaggagcc

SEQ ID NO: 1296920 - DNA, 25 bp, Homo sapien
aggacagctagcactgtagccacaa

SEQ ID NO: 1296921 - DNA, 25 bp, Homo sapien
cttccagacggcatagcaggagcca

SEQ ID NO: 1296922 - DNA, 25 bp, Homo sapien
tgtagccacaactcctgccagcaga

SEQ ID NO: 1296923 - DNA, 25 bp, Homo sapien
caggggtcaagcgtcgaaatcgcat

SEQ ID NO: 1296924 - DNA, 25 bp, Homo sapien
ccaggggtcaagcgtcgaaatcgca

SEQ ID NO: 1296925 - DNA, 25 bp, Homo sapien
accaggggtcaagcgtcgaaatcgc

SEQ ID NO: 1296926 - DNA, 25 bp, Homo sapien
aagaccagtggtcttcatgacacca

SEQ ID NO: 1296927 - DNA, 25 bp, Homo sapien
cctggcggcctgtagggtgggagcg

SEQ ID NO: 1296928 - DNA, 25 bp, Homo sapien
caccaagaagtggaaactagggtag

SEQ ID NO: 1296929 - DNA, 25 bp, Homo sapien
acatacgcaagacccaagctctcag

SEQ ID NO: 1296930 - DNA, 25 bp, Homo sapien
ttgaaatctattggcacagagctgg

SEQ ID NO: 1296931 - DNA, 25 bp, Homo sapien
tgcactgtctagagtagccattgag

SEQ ID NO: 1296932 - DNA, 25 bp, Homo sapien
ggaatgagacatagttacctgcaca

SEQ ID NO: 1296933 - DNA, 25 bp, Homo sapien
tctctccctggtatacatctgttga

SEQ ID NO: 1296934 - DNA, 25 bp, Homo sapien
gcttgctataaccttagattcccgg

SEQ ID NO: 1296935 - DNA, 25 bp, Homo sapien
cagagcttgctataaccttagattc

SEQ ID NO: 1296936 - DNA, 25 bp, Homo sapien
ttagattcccgggcttaatcaatcc

SEQ ID NO: 1296937 - DNA, 25 bp, Homo sapien
tgctataaccttagattcccgggct

SEQ ID NO: 1296938 - DNA, 25 bp, Homo sapien
taggtcgctggagtcaaagaagtgc

SEQ ID NO: 1296939 - DNA, 25 bp, Homo sapien
gctggagtcaaagaagtgccgcatc

SEQ ID NO: 1296940 - DNA, 25 bp, Homo sapien
aaagaagtgccgcatcagagtagtg

SEQ ID NO: 1296941 - DNA, 25 bp, Homo sapien
agggtaggtcgctggagtcaaagaa

SEQ ID NO: 1296942 - DNA, 25 bp, Homo sapien
gaaaagtagtatcagcaccaatgct

SEQ ID NO: 1296943 - DNA, 25 bp, Homo sapien
caggagagaatgacagtttccatag

SEQ ID NO: 1296944 - DNA, 25 bp, Homo sapien
gacagtttccatagtaactggacca

SEQ ID NO: 1296945 - DNA, 25 bp, Homo sapien
tttccatagtaactggaccagatgg

SEQ ID NO: 1296946 - DNA, 25 bp, Homo sapien
ggagagaatgacagtttccatagta

SEQ ID NO: 1296947 - DNA, 25 bp, Homo sapien
aaagagttgcttaaggccgggcatg

SEQ ID NO: 1296948 - DNA, 25 bp, Homo sapien
gacaggtgtgaggtggcttgcccat

SEQ ID NO: 1296949 - DNA, 25 bp, Homo sapien
tactgcttggactaagtgtcttgcc

SEQ ID NO: 1296950 - DNA, 25 bp, Homo sapien
gtcctggcagaagcgatacgattcg

SEQ ID NO: 1296951 - DNA, 25 bp, Homo sapien
cattgtatagattctggcccttagg

SEQ ID NO: 1296952 - DNA, 25 bp, Homo sapien
tacgattcgctccaaaaggtgactg

SEQ ID NO: 1296953 - DNA, 25 bp, Homo sapien
catcccatgcgcctgtgttggagca

SEQ ID NO: 1296954 - DNA, 25 bp, Homo sapien
tgtcccagctgagaatgtaaaccca

SEQ ID NO: 1296955 - DNA, 25 bp, Homo sapien
cacaaatacctgtatggaccagtgg

SEQ ID NO: 1296956 - DNA, 25 bp, Homo sapien
tttgtgcggtgttgaagtgtcccca

SEQ ID NO: 1296957 - DNA, 25 bp, Homo sapien
caggcctttcctacgtgcctggcga

SEQ ID NO: 1296958 - DNA, 25 bp, Homo sapien
tggcccacccaagagcctggcggag

SEQ ID NO: 1296959 - DNA, 25 bp, Homo sapien
tgcctggcgagatggcccacccaag

SEQ ID NO: 1296960 - DNA, 25 bp, Homo sapien
ccagccggggctcgagttaccaagg

SEQ ID NO: 1296961 - DNA, 25 bp, Homo sapien
ctgggactgggtccaggacagggac

SEQ ID NO: 1296962 - DNA, 25 bp, Homo sapien
ttattgggggctgggactgggtcca

SEQ ID NO: 1296963 - DNA, 25 bp, Homo sapien
gggactgggtccaggacagggactg

SEQ ID NO: 1296964 - DNA, 25 bp, Homo sapien
ggggctgggactgggtccaggacag

SEQ ID NO: 1296965 - DNA, 25 bp, Homo sapien
accaggactgaatttcaggctggac

SEQ ID NO: 1296966 - DNA, 25 bp, Homo sapien
ggctcggcgtgcccgcagcagcagt

SEQ ID NO: 1296967 - DNA, 25 bp, Homo sapien
gctcggcgtgcccgcagcagcagtg

SEQ ID NO: 1296968 - DNA, 25 bp, Homo sapien
ggggctcggcgtgcccgcagcagca

SEQ ID NO: 1296969 - DNA, 25 bp, Homo sapien
tcggcgtgcccgcagcagcagtgct

SEQ ID NO: 1296970 - DNA, 25 bp, Homo sapien
ctgcagcctgcagcgtgagtgtatc

SEQ ID NO: 1296971 - DNA, 25 bp, Homo sapien
cagcctgcagcgtgagtgtatcgtc

SEQ ID NO: 1296972 - DNA, 25 bp, Homo sapien
gcagcctgcagcgtgagtgtatcgt

SEQ ID NO: 1296973 - DNA, 25 bp, Homo sapien
gcctgcagcctgcagcgtgagtgta

SEQ ID NO: 1296974 - DNA, 25 bp, Homo sapien
gtgggcgggaatgtgctgaagatct

SEQ ID NO: 1296975 - DNA, 25 bp, Homo sapien
agggtgggcgggaatgtgctgaaga

SEQ ID NO: 1296976 - DNA, 25 bp, Homo sapien
ggtgggcgggaatgtgctgaagatc

SEQ ID NO: 1296977 - DNA, 25 bp, Homo sapien
tgggcgggaatgtgctgaagatctc

SEQ ID NO: 1296978 - DNA, 25 bp, Homo sapien
ccattctcagacttgatgcgcagca

SEQ ID NO: 1296979 - DNA, 25 bp, Homo sapien
tcatcagtaggaaggcctgttcccc

SEQ ID NO: 1296980 - DNA, 25 bp, Homo sapien
gcctgcgctagcagagctcgcacgt

SEQ ID NO: 1296981 - DNA, 25 bp, Homo sapien
ccaatggtgttgtcaggctgcatca

SEQ ID NO: 1296982 - DNA, 25 bp, Homo sapien
ggagagcgggggtgccggcgtgttg

SEQ ID NO: 1296983 - DNA, 25 bp, Homo sapien
gtgccggcgtgttgggtgactcctg

SEQ ID NO: 1296984 - DNA, 25 bp, Homo sapien
gcgggggtgccggcgtgttgggtga

SEQ ID NO: 1296985 - DNA, 25 bp, Homo sapien
ggggtgccggcgtgttgggtgactc

SEQ ID NO: 1296986 - DNA, 25 bp, Homo sapien
cctggatccgggcaggcaatgggca

SEQ ID NO: 1296987 - DNA, 25 bp, Homo sapien
ccaaggtgggcgtctccaccacaat

SEQ ID NO: 1296988 - DNA, 25 bp, Homo sapien
ctctctcgctcagcggccaaggtgg

SEQ ID NO: 1296989 - DNA, 25 bp, Homo sapien
gatccgggcaggcaatgggcagcag

SEQ ID NO: 1296990 - DNA, 25 bp, Homo sapien
gaacatttcaacagggaaggcagcc

SEQ ID NO: 1296991 - DNA, 25 bp, Homo sapien
gagacactctgaaccctagactagg

SEQ ID NO: 1296992 - DNA, 25 bp, Homo sapien
ggctttatctcaagaaccactggaa

SEQ ID NO: 1296993 - DNA, 25 bp, Homo sapien
cgggccttgagtgccagcataagga

SEQ ID NO: 1296994 - DNA, 25 bp, Homo sapien
tctgaggcaaccacgaagggagtac

SEQ ID NO: 1296995 - DNA, 25 bp, Homo sapien
aagacactgttctggcaggctggac

SEQ ID NO: 1296996 - DNA, 25 bp, Homo sapien
tggacagaccagacaggacttagca

SEQ ID NO: 1296997 - DNA, 25 bp, Homo sapien
gactcatcaggtgcctcaagcttga

SEQ ID NO: 1296998 - DNA, 25 bp, Homo sapien
cgccttgccggatcacaaacttggg

SEQ ID NO: 1296999 - DNA, 25 bp, Homo sapien
gagcctgttcagaaatttctcagca

SEQ ID NO: 1297000 - DNA, 25 bp, Homo sapien
caaacttggggagcctgttcagaaa

SEQ ID NO: 1297001 - DNA, 25 bp, Homo sapien
gatggggccccggatgtcaatcacc

SEQ ID NO: 1297002 - DNA, 25 bp, Homo sapien
ctacaggcagagttgggaaccgggg

SEQ ID NO: 1297003 - DNA, 25 bp, Homo sapien
tacaggcagagttgggaaccggggc

SEQ ID NO: 1297004 - DNA, 25 bp, Homo sapien
tccaggtagacctgattgcgcaagt

SEQ ID NO: 1297005 - DNA, 25 bp, Homo sapien
caggtagacctgattgcgcaagtca

SEQ ID NO: 1297006 - DNA, 25 bp, Homo sapien
gtagacctgattgcgcaagtcactc

SEQ ID NO: 1297007 - DNA, 25 bp, Homo sapien
tccaccctgtccaaggccttgtgca

SEQ ID NO: 1297008 - DNA, 25 bp, Homo sapien
ttatcaaggcatagctccgaggtcc

SEQ ID NO: 1297009 - DNA, 25 bp, Homo sapien
tacccagatagcttcaggagacttg

SEQ ID NO: 1297010 - DNA, 25 bp, Homo sapien
ttctagaacacgaagcctcatgggc

SEQ ID NO: 1297011 - DNA, 25 bp, Homo sapien
cctcaggagagccacggttcgtact

SEQ ID NO: 1297012 - DNA, 25 bp, Homo sapien
gtgtatccccactcccttcaaaatc

SEQ ID NO: 1297013 - DNA, 25 bp, Homo sapien
tgtatccccactcccttcaaaatcc

SEQ ID NO: 1297014 - DNA, 25 bp, Homo sapien
cattggggtacagtcgctggagctc

SEQ ID NO: 1297015 - DNA, 25 bp, Homo sapien
agaagccatccaatatgtctcggag

SEQ ID NO: 1297016 - DNA, 25 bp, Homo sapien
gaccccattggggtacagtcgctgg

SEQ ID NO: 1297017 - DNA, 25 bp, Homo sapien
catccaatatgtctcggaggcagcg

SEQ ID NO: 1297018 - DNA, 25 bp, Homo sapien
accagctcactaagatcctgcaggc

SEQ ID NO: 1297019 - DNA, 25 bp, Homo sapien
ccattccggtagagcttcagcggga

SEQ ID NO: 1297020 - DNA, 25 bp, Homo sapien
ggaagggcccgtcgaacatcatgat

SEQ ID NO: 1297021 - DNA, 25 bp, Homo sapien
tgtcacttgggtgtcaccctctacc

SEQ ID NO: 1297022 - DNA, 25 bp, Homo sapien
ccagtggcgtgtgaccagagcagga

SEQ ID NO: 1297023 - DNA, 25 bp, Homo sapien
gccccagtggcgtgtgaccagagca

SEQ ID NO: 1297024 - DNA, 25 bp, Homo sapien
ccccagtggcgtgtgaccagagcag

SEQ ID NO: 1297025 - DNA, 25 bp, Homo sapien
cccagtggcgtgtgaccagagcagg

SEQ ID NO: 1297026 - DNA, 25 bp, Homo sapien
gtcatccagtccctctcgccatgct

SEQ ID NO: 1297027 - DNA, 25 bp, Homo sapien
ctctcgccatgctctgagactgtct

SEQ ID NO: 1297028 - DNA, 25 bp, Homo sapien
cgccatgctctgagactgtcttgct

SEQ ID NO: 1297029 - DNA, 25 bp, Homo sapien
agtccctctcgccatgctctgagac

SEQ ID NO: 1297030 - DNA, 25 bp, Homo sapien
cgctgcagctgcacacacatcgtct

SEQ ID NO: 1297031 - DNA, 25 bp, Homo sapien
agctgcacacacatcgtctccagtt

SEQ ID NO: 1297032 - DNA, 25 bp, Homo sapien
ctgcagctgcacacacatcgtctcc

SEQ ID NO: 1297033 - DNA, 25 bp, Homo sapien
gcagctgcacacacatcgtctccag

SEQ ID NO: 1297034 - DNA, 25 bp, Homo sapien
tgcaccaggtcctctagggccgcta

SEQ ID NO: 1297035 - DNA, 25 bp, Homo sapien
cctctagggccgctatcttctgatc

SEQ ID NO: 1297036 - DNA, 25 bp, Homo sapien
ggtgtggccggagggtctgcaccag

SEQ ID NO: 1297037 - DNA, 25 bp, Homo sapien
ccaggtcctctagggccgctatctt

SEQ ID NO: 1297038 - DNA, 25 bp, Homo sapien
ggacagtatctcatcagtctgggcc

SEQ ID NO: 1297039 - DNA, 25 bp, Homo sapien
cagtatctcatcagtctgggccttc

SEQ ID NO: 1297040 - DNA, 25 bp, Homo sapien
ccaggtcccacaacttcctcgtcat

SEQ ID NO: 1297041 - DNA, 25 bp, Homo sapien
cttggacagtatctcatcagtctgg

SEQ ID NO: 1297042 - DNA, 25 bp, Homo sapien
aggccatcagctccgagtcatggga

SEQ ID NO: 1297043 - DNA, 25 bp, Homo sapien
gaaggccatcagctccgagtcatgg

SEQ ID NO: 1297044 - DNA, 25 bp, Homo sapien
aaggccatcagctccgagtcatggg

SEQ ID NO: 1297045 - DNA, 25 bp, Homo sapien
aagcacacaaagtctttagagccca

SEQ ID NO: 1297046 - DNA, 25 bp, Homo sapien
agcacacaaagtctttagagcccag

SEQ ID NO: 1297047 - DNA, 25 bp, Homo sapien
ccgccatagcaggaagggactgaga

SEQ ID NO: 1297048 - DNA, 25 bp, Homo sapien
cacctatgccgccatagcaggaagg

SEQ ID NO: 1297049 - DNA, 25 bp, Homo sapien
cttgccgactcacaggggcacctat

SEQ ID NO: 1297050 - DNA, 25 bp, Homo sapien
gagccacacccatcactcaacatgt

SEQ ID NO: 1297051 - DNA, 25 bp, Homo sapien
agacagggatgcctaggtcaccgct

SEQ ID NO: 1297052 - DNA, 25 bp, Homo sapien
ctgcagacagggatgcctaggtcac

SEQ ID NO: 1297053 - DNA, 25 bp, Homo sapien
gcagacagggatgcctaggtcaccg

SEQ ID NO: 1297054 - DNA, 25 bp, Homo sapien
tgcagacagggatgcctaggtcacc

SEQ ID NO: 1297055 - DNA, 25 bp, Homo sapien
tctccatagatgcggattcctcgcc

SEQ ID NO: 1297056 - DNA, 25 bp, Homo sapien
atctccatagatgcggattcctcgc

SEQ ID NO: 1297057 - DNA, 25 bp, Homo sapien
ctccatagatgcggattcctcgcct

SEQ ID NO: 1297058 - DNA, 25 bp, Homo sapien
tccatagatgcggattcctcgcctc

SEQ ID NO: 1297059 - DNA, 25 bp, Homo sapien
caggattcataggctccgagggcag

SEQ ID NO: 1297060 - DNA, 25 bp, Homo sapien
ccaggattcataggctccgagggca

SEQ ID NO: 1297061 - DNA, 25 bp, Homo sapien
ctaagggaggccaaaggtgagctca

SEQ ID NO: 1297062 - DNA, 25 bp, Homo sapien
taagggaggccaaaggtgagctcat

SEQ ID NO: 1297063 - DNA, 25 bp, Homo sapien
ttctagaatccagctgtcaggaact

SEQ ID NO: 1297064 - DNA, 25 bp, Homo sapien
acttctagaatccagctgtcaggaa

SEQ ID NO: 1297065 - DNA, 25 bp, Homo sapien
tctagaatccagctgtcaggaactc

SEQ ID NO: 1297066 - DNA, 25 bp, Homo sapien
tacttctagaatccagctgtcagga

SEQ ID NO: 1297067 - DNA, 25 bp, Homo sapien
tccaagcccagggggtagcctgaag

SEQ ID NO: 1297068 - DNA, 25 bp, Homo sapien
agaggaatgcaggaagtcagcccct

SEQ ID NO: 1297069 - DNA, 25 bp, Homo sapien
caagcccagggggtagcctgaagtt

SEQ ID NO: 1297070 - DNA, 25 bp, Homo sapien
aggaatgcaggaagtcagcccctgg

SEQ ID NO: 1297071 - DNA, 25 bp, Homo sapien
cctctgggtatacggctttctgctc

SEQ ID NO: 1297072 - DNA, 25 bp, Homo sapien
tctgctctgaactgagagacctttg

SEQ ID NO: 1297073 - DNA, 25 bp, Homo sapien
tgagagacctttggcctggtggtgc

SEQ ID NO: 1297074 - DNA, 25 bp, Homo sapien
tgctcctctgggtatacggctttct

SEQ ID NO: 1297075 - DNA, 25 bp, Homo sapien
caccgtcggccgtcctagtgggact

SEQ ID NO: 1297076 - DNA, 25 bp, Homo sapien
tcctagtgggactctcactgcccat

SEQ ID NO: 1297077 - DNA, 25 bp, Homo sapien
ggccgtcctagtgggactctcactg

SEQ ID NO: 1297078 - DNA, 25 bp, Homo sapien
atggccaccgtcggccgtcctagtg

SEQ ID NO: 1297079 - DNA, 25 bp, Homo sapien
ctcctcggcctctccgtcatcccca

SEQ ID NO: 1297080 - DNA, 25 bp, Homo sapien
ggcctctccgtcatccccagagccc

SEQ ID NO: 1297081 - DNA, 25 bp, Homo sapien
tcggcctctccgtcatccccagagc

SEQ ID NO: 1297082 - DNA, 25 bp, Homo sapien
ctcggcctctccgtcatccccagag

SEQ ID NO: 1297083 - DNA, 25 bp, Homo sapien
gtcacgcggtttcctaggcgaccag

SEQ ID NO: 1297084 - DNA, 25 bp, Homo sapien
tttcctaggcgaccaggacccgtgc

SEQ ID NO: 1297085 - DNA, 25 bp, Homo sapien
gccatcttgttgtcacgcggtttcc

SEQ ID NO: 1297086 - DNA, 25 bp, Homo sapien
caggacccgtgcacttctcattggc

SEQ ID NO: 1297087 - DNA, 25 bp, Homo sapien
ccgacagtgccgctattttgctaaa

SEQ ID NO: 1297088 - DNA, 25 bp, Homo sapien
tgaatgtgtgatcccgacagtgccg

SEQ ID NO: 1297089 - DNA, 25 bp, Homo sapien
gagcctgggattaggttaatgaaac

SEQ ID NO: 1297090 - DNA, 25 bp, Homo sapien
ttcaggacctgaatgtgtgatcccg

SEQ ID NO: 1297091 - DNA, 25 bp, Homo sapien
ttatggtacaggtaagagcaacgcc

SEQ ID NO: 1297092 - DNA, 25 bp, Homo sapien
gctgccctgagagaaacctgtatcc

SEQ ID NO: 1297093 - DNA, 25 bp, Homo sapien
gaggcagctttggtagcatcccagg

SEQ ID NO: 1297094 - DNA, 25 bp, Homo sapien
caaaagcgactgctattccaggagg

SEQ ID NO: 1297095 - DNA, 25 bp, Homo sapien
ttccttttcttcgtggccaatgcca

SEQ ID NO: 1297096 - DNA, 25 bp, Homo sapien
tctgcttcagttgaggtgacacgtc

SEQ ID NO: 1297097 - DNA, 25 bp, Homo sapien
tccagcaacataagcggaggcattt

SEQ ID NO: 1297098 - DNA, 25 bp, Homo sapien
agctgccaccatcactcgcaagaga

SEQ ID NO: 1297099 - DNA, 25 bp, Homo sapien
ggttgtagaagttgacaggcagtgc

SEQ ID NO: 1297100 - DNA, 25 bp, Homo sapien
caggttgtagaagttgacaggcagt

SEQ ID NO: 1297101 - DNA, 25 bp, Homo sapien
ttgtagaagttgacaggcagtgcca

SEQ ID NO: 1297102 - DNA, 25 bp, Homo sapien
tgtagaagttgacaggcagtgccat

SEQ ID NO: 1297103 - DNA, 25 bp, Homo sapien
gagttggggtgagtgcagcagagcc

SEQ ID NO: 1297104 - DNA, 25 bp, Homo sapien
cctctctgagctgggttagagacct

SEQ ID NO: 1297105 - DNA, 25 bp, Homo sapien
tctgagctgggttagagacctggat

SEQ ID NO: 1297106 - DNA, 25 bp, Homo sapien
ccctctcttctatgtcctgccctct

SEQ ID NO: 1297107 - DNA, 25 bp, Homo sapien
ctataaaaacattcatcccagcaaa

SEQ ID NO: 1297108 - DNA, 25 bp, Homo sapien
tataaaaacattcatcccagcaaaa

SEQ ID NO: 1297109 - DNA, 25 bp, Homo sapien
taaaaacattcatcccagcaaaagc

SEQ ID NO: 1297110 - DNA, 25 bp, Homo sapien
ataaaaacattcatcccagcaaaag

SEQ ID NO: 1297111 - DNA, 25 bp, Homo sapien
tcctcatccggctcccatagcacca

SEQ ID NO: 1297112 - DNA, 25 bp, Homo sapien
atccggctcccatagcaccacgtgg

SEQ ID NO: 1297113 - DNA, 25 bp, Homo sapien
tagcaccacgtggtcccggtcgtag

SEQ ID NO: 1297114 - DNA, 25 bp, Homo sapien
tcccatagcaccacgtggtcccggt

SEQ ID NO: 1297115 - DNA, 25 bp, Homo sapien
tcacgtccaggatctggccttcgaa

SEQ ID NO: 1297116 - DNA, 25 bp, Homo sapien
ggccttcgaacatctggctgcagat

SEQ ID NO: 1297117 - DNA, 25 bp, Homo sapien
cagatgtggcccgattcactgatgc

SEQ ID NO: 1297118 - DNA, 25 bp, Homo sapien
tgatgctccacgtctggcgcggcag

SEQ ID NO: 1297119 - DNA, 25 bp, Homo sapien
caccttggagcctgggctagggggt

SEQ ID NO: 1297120 - DNA, 25 bp, Homo sapien
ggagcctgggctagggggtccaatc

SEQ ID NO: 1297121 - DNA, 25 bp, Homo sapien
cttggagcctgggctagggggtcca

SEQ ID NO: 1297122 - DNA, 25 bp, Homo sapien
agcctgggctagggggtccaatcac

SEQ ID NO: 1297123 - DNA, 25 bp, Homo sapien
tagtaccagatgcagctacctccag

SEQ ID NO: 1297124 - DNA, 25 bp, Homo sapien
agtgctgcattccagaggcggaaat

SEQ ID NO: 1297125 - DNA, 25 bp, Homo sapien
tcttcagcagcccatcctcgtagta

SEQ ID NO: 1297126 - DNA, 25 bp, Homo sapien
atgtcctccacatggtccggcactg

SEQ ID NO: 1297127 - DNA, 25 bp, Homo sapien
cagttctgcttgctaaaagcgtgga

SEQ ID NO: 1297128 - DNA, 25 bp, Homo sapien
cacatgatggcacagaagttcacag

SEQ ID NO: 1297129 - DNA, 25 bp, Homo sapien
gatacacctctggtacacatgatgg

SEQ ID NO: 1297130 - DNA, 25 bp, Homo sapien
tccatggtcatagaggtacccacag

SEQ ID NO: 1297131 - DNA, 25 bp, Homo sapien
cagctggagctcttagatggtagca

SEQ ID NO: 1297132 - DNA, 25 bp, Homo sapien
tggctctgccataaatcagctggag

SEQ ID NO: 1297133 - DNA, 25 bp, Homo sapien
taatcacagctaacgtttgttgaga

SEQ ID NO: 1297134 - DNA, 25 bp, Homo sapien
ttcctgacgggatggacactggact

SEQ ID NO: 1297135 - DNA, 25 bp, Homo sapien
gcagagcaaatccgtgtccacttct

SEQ ID NO: 1297136 - DNA, 25 bp, Homo sapien
agagcaaatccgtgtccacttctct

SEQ ID NO: 1297137 - DNA, 25 bp, Homo sapien
cagagcaaatccgtgtccacttctc

SEQ ID NO: 1297138 - DNA, 25 bp, Homo sapien
gagcaaatccgtgtccacttctctg

SEQ ID NO: 1297139 - DNA, 25 bp, Homo sapien
tgccgctgtaggtcagccagttggt

SEQ ID NO: 1297140 - DNA, 25 bp, Homo sapien
accctctgggtgccgctgtaggtca

SEQ ID NO: 1297141 - DNA, 25 bp, Homo sapien
cagccagttggtgatctcgcagctt

SEQ ID NO: 1297142 - DNA, 25 bp, Homo sapien
tggtgatctcgcagcttcccaccag

SEQ ID NO: 1297143 - DNA, 25 bp, Homo sapien
tgaagccctcggcttgcaggctccg

SEQ ID NO: 1297144 - DNA, 25 bp, Homo sapien
gacagcacatggttgttgaagccct

SEQ ID NO: 1297145 - DNA, 25 bp, Homo sapien
gagctcgatctccttcccctcgaag

SEQ ID NO: 1297146 - DNA, 25 bp, Homo sapien
tcgaagcactcgagtccatacagga

SEQ ID NO: 1297147 - DNA, 25 bp, Homo sapien
cactgattcttggacgctgccagcc

SEQ ID NO: 1297148 - DNA, 25 bp, Homo sapien
ctcagaggcagtaagcgctaggctg

SEQ ID NO: 1297149 - DNA, 25 bp, Homo sapien
ctgagctcagttctgcagggccact

SEQ ID NO: 1297150 - DNA, 25 bp, Homo sapien
gactcccagatctgtatgtcaggcc

SEQ ID NO: 1297151 - DNA, 25 bp, Homo sapien
cgtgagagtggggaactcgccctca

SEQ ID NO: 1297152 - DNA, 25 bp, Homo sapien
ggtcaccctcgaagttcgtctcatc

SEQ ID NO: 1297153 - DNA, 25 bp, Homo sapien
cctcgaagttcgtctcatcaaacag

SEQ ID NO: 1297154 - DNA, 25 bp, Homo sapien
aatgtgctggtcaccctcgaagttc

SEQ ID NO: 1297155 - DNA, 25 bp, Homo sapien
cgtggacccggcaggactgaggtcg

SEQ ID NO: 1297156 - DNA, 25 bp, Homo sapien
aagagaagtggtcgcccagaaagtc

SEQ ID NO: 1297157 - DNA, 25 bp, Homo sapien
ggcagagcggcctggtcatcttcga

SEQ ID NO: 1297158 - DNA, 25 bp, Homo sapien
tcatcttcgaaagagaagtggtcgc

SEQ ID NO: 1297159 - DNA, 25 bp, Homo sapien
gagacgaagtgcagatcgtgctccc

SEQ ID NO: 1297160 - DNA, 25 bp, Homo sapien
acgaagtgcagatcgtgctccccga

SEQ ID NO: 1297161 - DNA, 25 bp, Homo sapien
ttgagacgaagtgcagatcgtgctc

SEQ ID NO: 1297162 - DNA, 25 bp, Homo sapien
ctttgagacgaagtgcagatcgtgc

SEQ ID NO: 1297163 - DNA, 25 bp, Homo sapien
ctccagcccgctacctctgcgtggg

SEQ ID NO: 1297164 - DNA, 25 bp, Homo sapien
gcacccgaactccaggtcccgccac

SEQ ID NO: 1297165 - DNA, 25 bp, Homo sapien
aggtcctccagcccgctacctctgc

SEQ ID NO: 1297166 - DNA, 25 bp, Homo sapien
ggcgcacccgaactccaggtcccgc

SEQ ID NO: 1297167 - DNA, 25 bp, Homo sapien
agcacgtactgttccccggagaagc

SEQ ID NO: 1297168 - DNA, 25 bp, Homo sapien
cggctgcagcgaggcgagggtgctg

SEQ ID NO: 1297169 - DNA, 25 bp, Homo sapien
agttacgatacacgcccttctccag

SEQ ID NO: 1297170 - DNA, 25 bp, Homo sapien
gggtgctgttgccagcgccccagtc

SEQ ID NO: 1297171 - DNA, 25 bp, Homo sapien
acatccggcaatgccttgctcacct

SEQ ID NO: 1297172 - DNA, 25 bp, Homo sapien
ccacgccgtgcccctcgaagtccat

SEQ ID NO: 1297173 - DNA, 25 bp, Homo sapien
ctggggccgtgttgcaccagctcca

SEQ ID NO: 1297174 - DNA, 25 bp, Homo sapien
ccagctccacatccggcaatgcctt

SEQ ID NO: 1297175 - DNA, 25 bp, Homo sapien
ggcctcaaatagcacgacggccggg

SEQ ID NO: 1297176 - DNA, 25 bp, Homo sapien
ctcaaatagcacgacggccgggtcc

SEQ ID NO: 1297177 - DNA, 25 bp, Homo sapien
gcctcaaatagcacgacggccgggt

SEQ ID NO: 1297178 - DNA, 25 bp, Homo sapien
tcaaatagcacgacggccgggtccc

SEQ ID NO: 1297179 - DNA, 25 bp, Homo sapien
ggaggtcagcaactcgtcatagcct

SEQ ID NO: 1297180 - DNA, 25 bp, Homo sapien
cagtgtgaccagtctgggtattccc

SEQ ID NO: 1297181 - DNA, 25 bp, Homo sapien
ccggatgacccggagggaggtcagc

SEQ ID NO: 1297182 - DNA, 25 bp, Homo sapien
tccagcagatactggtggccccgga

SEQ ID NO: 1297183 - DNA, 25 bp, Homo sapien
cagcctccgagaactctcagggacc

SEQ ID NO: 1297184 - DNA, 25 bp, Homo sapien
aggttgtagatgtctcggctcactt

SEQ ID NO: 1297185 - DNA, 25 bp, Homo sapien
ttgtagatgtctcggctcacttccc

SEQ ID NO: 1297186 - DNA, 25 bp, Homo sapien
aagcctggggcctcatacaccacag

SEQ ID NO: 1297187 - DNA, 25 bp, Homo sapien
ctggcttctccacacttgggcagcc

SEQ ID NO: 1297188 - DNA, 25 bp, Homo sapien
ctcccctggcttctccacacttggg

SEQ ID NO: 1297189 - DNA, 25 bp, Homo sapien
ccctggcttctccacacttgggcag

SEQ ID NO: 1297190 - DNA, 25 bp, Homo sapien
cccctggcttctccacacttgggca

SEQ ID NO: 1297191 - DNA, 25 bp, Homo sapien
agcccacgctggggtccgatgtgcc

SEQ ID NO: 1297192 - DNA, 25 bp, Homo sapien
ggcctctgaggtggggtactctcca

SEQ ID NO: 1297193 - DNA, 25 bp, Homo sapien
aggtggggtactctccaggttccag

SEQ ID NO: 1297194 - DNA, 25 bp, Homo sapien
caggttccaggatgtagggagtgtc

SEQ ID NO: 1297195 - DNA, 25 bp, Homo sapien
gaccctgggaattcttcaaggcctc

SEQ ID NO: 1297196 - DNA, 25 bp, Homo sapien
cagaccctgggaattcttcaaggcc

SEQ ID NO: 1297197 - DNA, 25 bp, Homo sapien
cctgggaattcttcaaggcctctgt

SEQ ID NO: 1297198 - DNA, 25 bp, Homo sapien
tccagaccctgggaattcttcaagg

SEQ ID NO: 1297199 - DNA, 25 bp, Homo sapien
cctccttagggagccgatgccttgg

SEQ ID NO: 1297200 - DNA, 25 bp, Homo sapien
ggaactctggctcttcgtacagcac

SEQ ID NO: 1297201 - DNA, 25 bp, Homo sapien
gcaggaccagcttctgaccccggaa

SEQ ID NO: 1297202 - DNA, 25 bp, Homo sapien
ctgagttccatgtctccttcaggca

SEQ ID NO: 1297203 - DNA, 25 bp, Homo sapien
gaggcatcaacgatgtctccccaga

SEQ ID NO: 1297204 - DNA, 25 bp, Homo sapien
cagcctcgaactacccttatggagg

SEQ ID NO: 1297205 - DNA, 25 bp, Homo sapien
ctgaggcatcaacgatgtctcccca

SEQ ID NO: 1297206 - DNA, 25 bp, Homo sapien
cgaactacccttatggaggctacgg

SEQ ID NO: 1297207 - DNA, 25 bp, Homo sapien
ggtgttcagcttgccctgggtcttt

SEQ ID NO: 1297208 - DNA, 25 bp, Homo sapien
gcctggtgttcagcttgccctgggt

SEQ ID NO: 1297209 - DNA, 25 bp, Homo sapien
ctttccaggcctggtgttcagcttg

SEQ ID NO: 1297210 - DNA, 25 bp, Homo sapien
tgccctgggtctttaaggctgggct

SEQ ID NO: 1297211 - DNA, 25 bp, Homo sapien
cagatagttttgtgcccagcggttc

SEQ ID NO: 1297212 - DNA, 25 bp, Homo sapien
ctccaagacgggaagtgggcctgct

SEQ ID NO: 1297213 - DNA, 25 bp, Homo sapien
ggaacaggcaagcttctccgttggg

SEQ ID NO: 1297214 - DNA, 25 bp, Homo sapien
ggtaggcaccagactgccgaacaga

SEQ ID NO: 1297215 - DNA, 25 bp, Homo sapien
ggggcccttggttcctgctacatgc

SEQ ID NO: 1297216 - DNA, 25 bp, Homo sapien
ccaatcccagctctgagtgggggcc

SEQ ID NO: 1297217 - DNA, 25 bp, Homo sapien
ggcccttggttcctgctacatgctt

SEQ ID NO: 1297218 - DNA, 25 bp, Homo sapien
cccttggttcctgctacatgcttct

SEQ ID NO: 1297219 - DNA, 25 bp, Homo sapien
gcttctcatcgtcactcagataggg

SEQ ID NO: 1297220 - DNA, 25 bp, Homo sapien
tctcatcgtcactcagataggggtt

SEQ ID NO: 1297221 - DNA, 25 bp, Homo sapien
gagcttctcatcgtcactcagatag

SEQ ID NO: 1297222 - DNA, 25 bp, Homo sapien
ggagcttctcatcgtcactcagata

SEQ ID NO: 1297223 - DNA, 25 bp, Homo sapien
tccatgctccgcagcgtatccagga

SEQ ID NO: 1297224 - DNA, 25 bp, Homo sapien
tgtctctgtgcacgtcttgccctcg

SEQ ID NO: 1297225 - DNA, 25 bp, Homo sapien
gctggtcctcctcaatggcaggcag

SEQ ID NO: 1297226 - DNA, 25 bp, Homo sapien
gcagcgtggcgtacatggacaggta

SEQ ID NO: 1297227 - DNA, 25 bp, Homo sapien
accctggacagcctctttttggatg

SEQ ID NO: 1297228 - DNA, 25 bp, Homo sapien
tcacaacctctttctgggtgggcga

SEQ ID NO: 1297229 - DNA, 25 bp, Homo sapien
gagcaattgggccttgaacagtctc

SEQ ID NO: 1297230 - DNA, 25 bp, Homo sapien
tactgctgccttttgggccctggac

SEQ ID NO: 1297231 - DNA, 25 bp, Homo sapien
cctgggctggggacatccttccttc

SEQ ID NO: 1297232 - DNA, 25 bp, Homo sapien
caaacttattccttggggacgatgg

SEQ ID NO: 1297233 - DNA, 25 bp, Homo sapien
cttcacgacctccctctgggtaaag

SEQ ID NO: 1297234 - DNA, 25 bp, Homo sapien
cggggcccttcacgacctccctctg

SEQ ID NO: 1297235 - DNA, 25 bp, Homo sapien
tgggatgcctgtagaggccagggca

SEQ ID NO: 1297236 - DNA, 25 bp, Homo sapien
ctttgcagggtgagttaggccagga

SEQ ID NO: 1297237 - DNA, 25 bp, Homo sapien
catcctgattcttaggcaggtgagc

SEQ ID NO: 1297238 - DNA, 25 bp, Homo sapien
ttaagctctgctgtcccggtctcag

SEQ ID NO: 1297239 - DNA, 25 bp, Homo sapien
agcaggcacgaggttacttagcact

SEQ ID NO: 1297240 - DNA, 25 bp, Homo sapien
ttagcactttcacggcctggctgcg

SEQ ID NO: 1297241 - DNA, 25 bp, Homo sapien
accactggcggcaccatgcgggaga

SEQ ID NO: 1297242 - DNA, 25 bp, Homo sapien
actggcggcaccatgcgggagacct

SEQ ID NO: 1297243 - DNA, 25 bp, Homo sapien
ctcccaccactgtggtggtccgcac

SEQ ID NO: 1297244 - DNA, 25 bp, Homo sapien
tcttggagccagctgtatcccgagg

SEQ ID NO: 1297245 - DNA, 25 bp, Homo sapien
tcggtattcctcgaggctccgggag

SEQ ID NO: 1297246 - DNA, 25 bp, Homo sapien
gctccgggagctaccactggtgaga

SEQ ID NO: 1297247 - DNA, 25 bp, Homo sapien
tgtggcacttaccactcgggccttg

SEQ ID NO: 1297248 - DNA, 25 bp, Homo sapien
aacctgtctggaggtgtccttgtcc

SEQ ID NO: 1297249 - DNA, 25 bp, Homo sapien
acctgtctggaggtgtccttgtccc

SEQ ID NO: 1297250 - DNA, 25 bp, Homo sapien
cctggcaacctgtctggaggtgtcc

SEQ ID NO: 1297251 - DNA, 25 bp, Homo sapien
cctgtctggaggtgtccttgtccca

SEQ ID NO: 1297252 - DNA, 25 bp, Homo sapien
ttttgtactttgaggtcttgttatg

SEQ ID NO: 1297253 - DNA, 25 bp, Homo sapien
tattttgtactttgaggtcttgtta

SEQ ID NO: 1297254 - DNA, 25 bp, Homo sapien
cgtgctcccctgatgcgattgggct

SEQ ID NO: 1297255 - DNA, 25 bp, Homo sapien
tcccctgatgcgattgggctctcag

SEQ ID NO: 1297256 - DNA, 25 bp, Homo sapien
ggccgtgctcccctgatgcgattgg

SEQ ID NO: 1297257 - DNA, 25 bp, Homo sapien
cctgatgcgattgggctctcagctg

SEQ ID NO: 1297258 - DNA, 25 bp, Homo sapien
gtgtggagctggttgggccggttct

SEQ ID NO: 1297259 - DNA, 25 bp, Homo sapien
tcagggccgcagaggtgtggagctg

SEQ ID NO: 1297260 - DNA, 25 bp, Homo sapien
gtggagctggttgggccggttcttc

SEQ ID NO: 1297261 - DNA, 25 bp, Homo sapien
agggccgcagaggtgtggagctggt

SEQ ID NO: 1297262 - DNA, 25 bp, Homo sapien
cagaaatcatcatggtcccctacat

SEQ ID NO: 1297263 - DNA, 25 bp, Homo sapien
ccctacatggatgtcccattctgag

SEQ ID NO: 1297264 - DNA, 25 bp, Homo sapien
tggtacgagcagactctcctgaggc

SEQ ID NO: 1297265 - DNA, 25 bp, Homo sapien
tgtagtagcgggtcctcctggaaga

SEQ ID NO: 1297266 - DNA, 25 bp, Homo sapien
gggatataagggagccagagaagag

SEQ ID NO: 1297267 - DNA, 25 bp, Homo sapien
agagaagagggttcccctgaaatgg

SEQ ID NO: 1297268 - DNA, 25 bp, Homo sapien
tgggatataagggagccagagaaga

SEQ ID NO: 1297269 - DNA, 25 bp, Homo sapien
tgggacaacacctgacctcttctgc

SEQ ID NO: 1297270 - DNA, 25 bp, Homo sapien
accctgggctaggtcagagcagctc

SEQ ID NO: 1297271 - DNA, 25 bp, Homo sapien
gacattgcaggtggtaccctgggct

SEQ ID NO: 1297272 - DNA, 25 bp, Homo sapien
acattgcaggtggtaccctgggcta

SEQ ID NO: 1297273 - DNA, 25 bp, Homo sapien
tgggctaggtcagagcagctccggc

SEQ ID NO: 1297274 - DNA, 25 bp, Homo sapien
gggctctcggattctcaatactgcc

SEQ ID NO: 1297275 - DNA, 25 bp, Homo sapien
ggattctcaatactgccttccctgc

SEQ ID NO: 1297276 - DNA, 25 bp, Homo sapien
tgctcttcacggatgtaggaccggg

SEQ ID NO: 1297277 - DNA, 25 bp, Homo sapien
cctatgctcttcacggatgtaggac

SEQ ID NO: 1297278 - DNA, 25 bp, Homo sapien
tgtggcctccgagatctctttccct

SEQ ID NO: 1297279 - DNA, 25 bp, Homo sapien
gggatgtggcctccgagatctcttt

SEQ ID NO: 1297280 - DNA, 25 bp, Homo sapien
gatgtggcctccgagatctctttcc

SEQ ID NO: 1297281 - DNA, 25 bp, Homo sapien
cgggatgtggcctccgagatctctt

SEQ ID NO: 1297282 - DNA, 25 bp, Homo sapien
aggggagtcccggcactgctcaggc

SEQ ID NO: 1297283 - DNA, 25 bp, Homo sapien
ccaggggagtcccggcactgctcag

SEQ ID NO: 1297284 - DNA, 25 bp, Homo sapien
caccaggggagtcccggcactgctc

SEQ ID NO: 1297285 - DNA, 25 bp, Homo sapien
accaggggagtcccggcactgctca

SEQ ID NO: 1297286 - DNA, 25 bp, Homo sapien
ccctgggatgtcgaggacactttga

SEQ ID NO: 1297287 - DNA, 25 bp, Homo sapien
tttcccctgggatgtcgaggacact

SEQ ID NO: 1297288 - DNA, 25 bp, Homo sapien
cctgggatgtcgaggacactttgac

SEQ ID NO: 1297289 - DNA, 25 bp, Homo sapien
tcccctgggatgtcgaggacacttt

SEQ ID NO: 1297290 - DNA, 25 bp, Homo sapien
tgccaccgccataagatctagtgcc

SEQ ID NO: 1297291 - DNA, 25 bp, Homo sapien
agatgccaccgccataagatctagt

SEQ ID NO: 1297292 - DNA, 25 bp, Homo sapien
tttctcagatgccaccgccataaga

SEQ ID NO: 1297293 - DNA, 25 bp, Homo sapien
ccataagatctagtgccccctggtg

SEQ ID NO: 1297294 - DNA, 25 bp, Homo sapien
ggatgtgctgggtgaagcgactccg

SEQ ID NO: 1297295 - DNA, 25 bp, Homo sapien
tgcagccgatggtgcagcttcaggt

SEQ ID NO: 1297296 - DNA, 25 bp, Homo sapien
ctgggtgaagcgactccggcagaca

SEQ ID NO: 1297297 - DNA, 25 bp, Homo sapien
catgcagccgatggtgcagcttcag

SEQ ID NO: 1297298 - DNA, 25 bp, Homo sapien
tgatttcttcctggaacccacggta

SEQ ID NO: 1297299 - DNA, 25 bp, Homo sapien
gaagcttttccagtgatttcttcct

SEQ ID NO: 1297300 - DNA, 25 bp, Homo sapien
agtgatttcttcctggaacccacgg

SEQ ID NO: 1297301 - DNA, 25 bp, Homo sapien
tttccagtgatttcttcctggaacc

SEQ ID NO: 1297302 - DNA, 25 bp, Homo sapien
ggcacactggaatggacgctctcca

SEQ ID NO: 1297303 - DNA, 25 bp, Homo sapien
aagctcttctggcacaaggcacact

SEQ ID NO: 1297304 - DNA, 25 bp, Homo sapien
ctcttctggcacaaggcacactgga

SEQ ID NO: 1297305 - DNA, 25 bp, Homo sapien
tcttctggcacaaggcacactggaa

SEQ ID NO: 1297306 - DNA, 25 bp, Homo sapien
ctgagtcagatgcgggataaatgct

SEQ ID NO: 1297307 - DNA, 25 bp, Homo sapien
gagtcagatgcgggataaatgctgc

SEQ ID NO: 1297308 - DNA, 25 bp, Homo sapien
tcagatgcgggataaatgctgccaa

SEQ ID NO: 1297309 - DNA, 25 bp, Homo sapien
gtcagatgcgggataaatgctgcca

SEQ ID NO: 1297310 - DNA, 25 bp, Homo sapien
ggtcgcgcagatttgtgggatccca

SEQ ID NO: 1297311 - DNA, 25 bp, Homo sapien
cggactgtggtctagactcaccaaa

SEQ ID NO: 1297312 - DNA, 25 bp, Homo sapien
tgcggatggtgaggccaatcgcatc

SEQ ID NO: 1297313 - DNA, 25 bp, Homo sapien
cttgaaaaaggttggtcatcggact

SEQ ID NO: 1297314 - DNA, 25 bp, Homo sapien
tatgttgcactcgtacaggattttg

SEQ ID NO: 1297315 - DNA, 25 bp, Homo sapien
ctcgtacaggattttgccattcttc

SEQ ID NO: 1297316 - DNA, 25 bp, Homo sapien
ccacatatgttgcactcgtacagga

SEQ ID NO: 1297317 - DNA, 25 bp, Homo sapien
gttgcactcgtacaggattttgcca

SEQ ID NO: 1297318 - DNA, 25 bp, Homo sapien
tcttgtcatcggtggagctggcctg

SEQ ID NO: 1297319 - DNA, 25 bp, Homo sapien
gcctgtctgggaactcaatgggacc

SEQ ID NO: 1297320 - DNA, 25 bp, Homo sapien
gacattggtcagaaggtagggcccc

SEQ ID NO: 1297321 - DNA, 25 bp, Homo sapien
caatgggacccgctttgctggagat

SEQ ID NO: 1297322 - DNA, 25 bp, Homo sapien
caggtgcagcccggtgccctgggct

SEQ ID NO: 1297323 - DNA, 25 bp, Homo sapien
gtgcagcccggtgccctgggcttac

SEQ ID NO: 1297324 - DNA, 25 bp, Homo sapien
ggcgcaggtgcagcccggtgccctg

SEQ ID NO: 1297325 - DNA, 25 bp, Homo sapien
caggcgcaggtgcagcccggtgccc

SEQ ID NO: 1297326 - DNA, 25 bp, Homo sapien
catgctcaaggcgtcctcttggagg

SEQ ID NO: 1297327 - DNA, 25 bp, Homo sapien
tgctcaaggcgtcctcttggaggcc

SEQ ID NO: 1297328 - DNA, 25 bp, Homo sapien
tcaaggcgtcctcttggaggccctg

SEQ ID NO: 1297329 - DNA, 25 bp, Homo sapien
tcatgctcaaggcgtcctcttggag

SEQ ID NO: 1297330 - DNA, 25 bp, Homo sapien
tccaggtcctgtaggcaggccagca

SEQ ID NO: 1297331 - DNA, 25 bp, Homo sapien
ctgtaggcaggccagcagtgcagac

SEQ ID NO: 1297332 - DNA, 25 bp, Homo sapien
agcagtgcagacctgcccggtgcca

SEQ ID NO: 1297333 - DNA, 25 bp, Homo sapien
tcaggtccaggtcctgtaggcaggc

SEQ ID NO: 1297334 - DNA, 25 bp, Homo sapien
tggaagtggtctgcaggctgagaag

SEQ ID NO: 1297335 - DNA, 25 bp, Homo sapien
gaagtggtctgcaggctgagaagac

SEQ ID NO: 1297336 - DNA, 25 bp, Homo sapien
tctggaagtggtctgcaggctgaga

SEQ ID NO: 1297337 - DNA, 25 bp, Homo sapien
gtctggaagtggtctgcaggctgag

SEQ ID NO: 1297338 - DNA, 25 bp, Homo sapien
ctggtcacctcggaagagctggaag

SEQ ID NO: 1297339 - DNA, 25 bp, Homo sapien
gggcctatgacaacaacctaattgt

SEQ ID NO: 1297340 - DNA, 25 bp, Homo sapien
taattgtgcagctgattcttccttc

SEQ ID NO: 1297341 - DNA, 25 bp, Homo sapien
gacaacaacctaattgtgcagctga

SEQ ID NO: 1297342 - DNA, 25 bp, Homo sapien
caacctaattgtgcagctgattctt

SEQ ID NO: 1297343 - DNA, 25 bp, Homo sapien
gctgtggggctctccactcggtgct

SEQ ID NO: 1297344 - DNA, 25 bp, Homo sapien
ggacccccgaagggctgctggctgt

SEQ ID NO: 1297345 - DNA, 25 bp, Homo sapien
ctgtggggctctccactcggtgctg

SEQ ID NO: 1297346 - DNA, 25 bp, Homo sapien
aaggaaggaggtgggcagccaggcc

SEQ ID NO: 1297347 - DNA, 25 bp, Homo sapien
ctgggaaggaaggaggtgggcagcc

SEQ ID NO: 1297348 - DNA, 25 bp, Homo sapien
gaaggaggtgggcagccaggccaca

SEQ ID NO: 1297349 - DNA, 25 bp, Homo sapien
tgggaaggaaggaggtgggcagcca

SEQ ID NO: 1297350 - DNA, 25 bp, Homo sapien
gactaggtcgatcagatgtccccac

SEQ ID NO: 1297351 - DNA, 25 bp, Homo sapien
gcatacatggactaggtcgatcaga

SEQ ID NO: 1297352 - DNA, 25 bp, Homo sapien
gcacttcatgcaggcatacatggac

SEQ ID NO: 1297353 - DNA, 25 bp, Homo sapien
gtcgatcagatgtccccacccagaa

SEQ ID NO: 1297354 - DNA, 25 bp, Homo sapien
actctcagaacaccttgcacaactt

SEQ ID NO: 1297355 - DNA, 25 bp, Homo sapien
ctacttcccctctatccgcacttcc

SEQ ID NO: 1297356 - DNA, 25 bp, Homo sapien
cctctatccgcacttcccaacctac

SEQ ID NO: 1297357 - DNA, 25 bp, Homo sapien
aactctcagaacaccttgcacaact

SEQ ID NO: 1297358 - DNA, 25 bp, Homo sapien
gtctgggtcaaggcatctgctcagg

SEQ ID NO: 1297359 - DNA, 25 bp, Homo sapien
tctgggtcaaggcatctgctcaggt

SEQ ID NO: 1297360 - DNA, 25 bp, Homo sapien
ctgggtcaaggcatctgctcaggtt

SEQ ID NO: 1297361 - DNA, 25 bp, Homo sapien
gctgagatggctctgctacactcca

SEQ ID NO: 1297362 - DNA, 25 bp, Homo sapien
gagctgagatggctctgctacactc

SEQ ID NO: 1297363 - DNA, 25 bp, Homo sapien
tgagatggctctgctacactccagg

SEQ ID NO: 1297364 - DNA, 25 bp, Homo sapien
gtgagctgagatggctctgctacac

SEQ ID NO: 1297365 - DNA, 25 bp, Homo sapien
cctggcttggctaggaaatgcccca

SEQ ID NO: 1297366 - DNA, 25 bp, Homo sapien
aatgaagccattattggtgaaagca

SEQ ID NO: 1297367 - DNA, 25 bp, Homo sapien
gtgaagcagggccagcacggggagc

SEQ ID NO: 1297368 - DNA, 25 bp, Homo sapien
agcacactgaaagaagggtgggacc

SEQ ID NO: 1297369 - DNA, 25 bp, Homo sapien
cagctggggtcaggaagtctatttc

SEQ ID NO: 1297370 - DNA, 25 bp, Homo sapien
gagaagattgaattcagagcaagcg

SEQ ID NO: 1297371 - DNA, 25 bp, Homo sapien
tgaattcagagcaagcggatgcccc

SEQ ID NO: 1297372 - DNA, 25 bp, Homo sapien
ggccgtgcactgagccccgggccat

SEQ ID NO: 1297373 - DNA, 25 bp, Homo sapien
cggtggagaagattgaattcagagc

SEQ ID NO: 1297374 - DNA, 25 bp, Homo sapien
tagcctttagaatcactcaatcttc

SEQ ID NO: 1297375 - DNA, 25 bp, Homo sapien
ttcttcatataggctttttaccttg

SEQ ID NO: 1297376 - DNA, 25 bp, Homo sapien
ccaagatcgtggtatgtttttgcat

SEQ ID NO: 1297377 - DNA, 25 bp, Homo sapien
tcttccaatccaagatcgtggtatg

SEQ ID NO: 1297378 - DNA, 25 bp, Homo sapien
tccaggtctgcgcagcaggaattac

SEQ ID NO: 1297379 - DNA, 25 bp, Homo sapien
tgccaccgtggagagcaactatttg

SEQ ID NO: 1297380 - DNA, 25 bp, Homo sapien
tgccatagtgtcctcttgaaacccc

SEQ ID NO: 1297381 - DNA, 25 bp, Homo sapien
tgacttgattgccttctactggaag

SEQ ID NO: 1297382 - DNA, 25 bp, Homo sapien
tctggctttgtgacctgcagcgagt

SEQ ID NO: 1297383 - DNA, 25 bp, Homo sapien
ggagtcactcagaattcattggcac

SEQ ID NO: 1297384 - DNA, 25 bp, Homo sapien
aaaagcatgtagcacaggccctgac

SEQ ID NO: 1297385 - DNA, 25 bp, Homo sapien
gcaaggtctttagggcctgaggcta

SEQ ID NO: 1297386 - DNA, 25 bp, Homo sapien
aatgctgaatttactcctgtgccat

SEQ ID NO: 1297387 - DNA, 25 bp, Homo sapien
tcctgtgccataagtttttgtttct

SEQ ID NO: 1297388 - DNA, 25 bp, Homo sapien
taatgctgaatttactcctgtgcca

SEQ ID NO: 1297389 - DNA, 25 bp, Homo sapien
tactcctgtgccataagtttttgtt

SEQ ID NO: 1297390 - DNA, 25 bp, Homo sapien
gtttctttgggatatcattttcttc

SEQ ID NO: 1297391 - DNA, 25 bp, Homo sapien
tcagtttctttgggatatcattttc

SEQ ID NO: 1297392 - DNA, 25 bp, Homo sapien
cagtttcacgaatattcttaaagta

SEQ ID NO: 1297393 - DNA, 25 bp, Homo sapien
gatatcatgaggttctccgggttaa

SEQ ID NO: 1297394 - DNA, 25 bp, Homo sapien
tgatatcatgaggttctccgggtta

SEQ ID NO: 1297395 - DNA, 25 bp, Homo sapien
atcatgaggttctccgggttaagtg

SEQ ID NO: 1297396 - DNA, 25 bp, Homo sapien
ttggctcttagaaaaatcctggtgg

SEQ ID NO: 1297397 - DNA, 25 bp, Homo sapien
tactagtgaatgaatcagggccagc

SEQ ID NO: 1297398 - DNA, 25 bp, Homo sapien
gatgccctctaagggccaagagcca

SEQ ID NO: 1297399 - DNA, 25 bp, Homo sapien
tgcagctacagctcaggatgcctgt

SEQ ID NO: 1297400 - DNA, 25 bp, Homo sapien
catgcctggccgtcatattctaatg

SEQ ID NO: 1297401 - DNA, 25 bp, Homo sapien
gggtagggctgtttgctctaagtta

SEQ ID NO: 1297402 - DNA, 25 bp, Homo sapien
ttgtgcaactttggcttacttcagc

SEQ ID NO: 1297403 - DNA, 25 bp, Homo sapien
cattgtacaacaatatccttgaggg

SEQ ID NO: 1297404 - DNA, 25 bp, Homo sapien
tagccagagggacaagatctctacc

SEQ ID NO: 1297405 - DNA, 25 bp, Homo sapien
gagggacaagatctctacctttgtg

SEQ ID NO: 1297406 - DNA, 25 bp, Homo sapien
caggagagtcaacaggtagccagag

SEQ ID NO: 1297407 - DNA, 25 bp, Homo sapien
cactgtattaggcacaggagagtca

SEQ ID NO: 1297408 - DNA, 25 bp, Homo sapien
agtgaagacgggataaaaacaaatg

SEQ ID NO: 1297409 - DNA, 25 bp, Homo sapien
gtgaaactagctatatcaaggtgat

SEQ ID NO: 1297410 - DNA, 25 bp, Homo sapien
tcaaggtgataatataactccccag

SEQ ID NO: 1297411 - DNA, 25 bp, Homo sapien
tagtccaggtgagagaggatgcgcc

SEQ ID NO: 1297412 - DNA, 25 bp, Homo sapien
tgctattcatctttagtggaatttc

SEQ ID NO: 1297413 - DNA, 25 bp, Homo sapien
tattcatctttagtggaatttcttt

SEQ ID NO: 1297414 - DNA, 25 bp, Homo sapien
tctgctattcatctttagtggaatt

SEQ ID NO: 1297415 - DNA, 25 bp, Homo sapien
gctattcatctttagtggaatttct

SEQ ID NO: 1297416 - DNA, 25 bp, Homo sapien
gaatccagactaacagcatcctcac

SEQ ID NO: 1297417 - DNA, 25 bp, Homo sapien
caggcatccttccagtattgagttc

SEQ ID NO: 1297418 - DNA, 25 bp, Homo sapien
gaaatcatatcaccttggcagatgc

SEQ ID NO: 1297419 - DNA, 25 bp, Homo sapien
ggccaggctttctctaccccagaag

SEQ ID NO: 1297420 - DNA, 25 bp, Homo sapien
catagctatatgactgtacagttac

SEQ ID NO: 1297421 - DNA, 25 bp, Homo sapien
aaagcttgagttaatgtctcagaca

SEQ ID NO: 1297422 - DNA, 25 bp, Homo sapien
cattcatgactttgaatattggcac

SEQ ID NO: 1297423 - DNA, 25 bp, Homo sapien
tattggcactgcctacatagctata

SEQ ID NO: 1297424 - DNA, 25 bp, Homo sapien
gaaaagttgacctctaggacttctg

SEQ ID NO: 1297425 - DNA, 25 bp, Homo sapien
aggacttctgttagcttggatttcc

SEQ ID NO: 1297426 - DNA, 25 bp, Homo sapien
caaggatagtagacaaatggtcagg

SEQ ID NO: 1297427 - DNA, 25 bp, Homo sapien
tgttagcttggatttcccaagggta

SEQ ID NO: 1297428 - DNA, 25 bp, Homo sapien
tccagcaagacggagagctctacgg

SEQ ID NO: 1297429 - DNA, 25 bp, Homo sapien
cacctggattgctgggatcgtgtcc

SEQ ID NO: 1297430 - DNA, 25 bp, Homo sapien
tgttcaagcccgaagtcctcatagc

SEQ ID NO: 1297431 - DNA, 25 bp, Homo sapien
ctcattggttaaagggccagctcaa

SEQ ID NO: 1297432 - DNA, 25 bp, Homo sapien
cagacacggcgattgagaagccaat

SEQ ID NO: 1297433 - DNA, 25 bp, Homo sapien
tattgtccatgctcccagaatcaag

SEQ ID NO: 1297434 - DNA, 25 bp, Homo sapien
tttctgtcccgggatacctggcggc

SEQ ID NO: 1297435 - DNA, 25 bp, Homo sapien
tgttgacagccataattagggaggc

SEQ ID NO: 1297436 - DNA, 25 bp, Homo sapien
gaggccactggactcggtgattaac

SEQ ID NO: 1297437 - DNA, 25 bp, Homo sapien
tgttgctcctgcctgtcgcggtggt

SEQ ID NO: 1297438 - DNA, 25 bp, Homo sapien
gaacgtcgggctcactcatttatgt

SEQ ID NO: 1297439 - DNA, 25 bp, Homo sapien
tgcgggcgggcaattcaaacccgaa

SEQ ID NO: 1297440 - DNA, 25 bp, Homo sapien
ttaatagccacagagaagatccgcg

SEQ ID NO: 1297441 - DNA, 25 bp, Homo sapien
tagccacagagaagatccgcgaggt

SEQ ID NO: 1297442 - DNA, 25 bp, Homo sapien
taatagccacagagaagatccgcga

SEQ ID NO: 1297443 - DNA, 25 bp, Homo sapien
cagagaagatccgcgaggttgtctg

SEQ ID NO: 1297444 - DNA, 25 bp, Homo sapien
ttctgatgcctgtagccaaagtggg

SEQ ID NO: 1297445 - DNA, 25 bp, Homo sapien
gaatcattgcctctacttgggactc

SEQ ID NO: 1297446 - DNA, 25 bp, Homo sapien
ccaaagtgggacatttgagtgggct

SEQ ID NO: 1297447 - DNA, 25 bp, Homo sapien
tttgaattttcgtgcttgtccctga

SEQ ID NO: 1297448 - DNA, 25 bp, Homo sapien
aaagaaacctgctcctccaaagcca

SEQ ID NO: 1297449 - DNA, 25 bp, Homo sapien
gccagagcccaagcctaaaaaggcc

SEQ ID NO: 1297450 - DNA, 25 bp, Homo sapien
caagcctaaaaaggcccctgcaaag

SEQ ID NO: 1297451 - DNA, 25 bp, Homo sapien
tcctctcttcctgccaaaaaaagaa

SEQ ID NO: 1297452 - DNA, 25 bp, Homo sapien
tggattgatgtggagaaaacacctt

SEQ ID NO: 1297453 - DNA, 25 bp, Homo sapien
gcacacagaacacttcattgttgtt

SEQ ID NO: 1297454 - DNA, 25 bp, Homo sapien
catatgtcactaatagaatgtctcc

SEQ ID NO: 1297455 - DNA, 25 bp, Homo sapien
gacctgacccctagtcattggttac

SEQ ID NO: 1297456 - DNA, 25 bp, Homo sapien
ttaagatctcgggaaaagtcaccag

SEQ ID NO: 1297457 - DNA, 25 bp, Homo sapien
ggtaaggaccattcactaagacagc

SEQ ID NO: 1297458 - DNA, 25 bp, Homo sapien
catggtagcatgctcagtgccagcc

SEQ ID NO: 1297459 - DNA, 25 bp, Homo sapien
cagacatcaaaacgtggtaaggacc

SEQ ID NO: 1297460 - DNA, 25 bp, Homo sapien
gggcagttgtgaggacccaggtggg

SEQ ID NO: 1297461 - DNA, 25 bp, Homo sapien
tgtctttctgctctgccgccctcaa

SEQ ID NO: 1297462 - DNA, 25 bp, Homo sapien
cagttgtgaggacccaggtgggctt

SEQ ID NO: 1297463 - DNA, 25 bp, Homo sapien
ttgtgaggacccaggtgggcttcct

SEQ ID NO: 1297464 - DNA, 25 bp, Homo sapien
ggcctgattcattgcagcagttaac

SEQ ID NO: 1297465 - DNA, 25 bp, Homo sapien
tgccataccaatggcaagaggctgg

SEQ ID NO: 1297466 - DNA, 25 bp, Homo sapien
cagaatctgcctagaccagtcagaa

SEQ ID NO: 1297467 - DNA, 25 bp, Homo sapien
gctccagacatcgtaatttgccata

SEQ ID NO: 1297468 - DNA, 25 bp, Homo sapien
gttgcccaggctagagtgcccaggc

SEQ ID NO: 1297469 - DNA, 25 bp, Homo sapien
ggctagagtgcccaggcacaatctc

SEQ ID NO: 1297470 - DNA, 25 bp, Homo sapien
cccaggctagagtgcccaggcacaa

SEQ ID NO: 1297471 - DNA, 25 bp, Homo sapien
tgcccaggctagagtgcccaggcac

SEQ ID NO: 1297472 - DNA, 25 bp, Homo sapien
ccgctgaagtatgagaaagattttc

SEQ ID NO: 1297473 - DNA, 25 bp, Homo sapien
tgttgtgcccgctgaagtatgagaa

SEQ ID NO: 1297474 - DNA, 25 bp, Homo sapien
acttaggtgagtggattgattgagc

SEQ ID NO: 1297475 - DNA, 25 bp, Homo sapien
tgattgaggtgattgttgtgcccgc

SEQ ID NO: 1297476 - DNA, 25 bp, Homo sapien
ctggtcgtggtagcccaacaggctg

SEQ ID NO: 1297477 - DNA, 25 bp, Homo sapien
cagcagcgcctggtcgtggtagccc

SEQ ID NO: 1297478 - DNA, 25 bp, Homo sapien
cgcctggtcgtggtagcccaacagg

SEQ ID NO: 1297479 - DNA, 25 bp, Homo sapien
gtggtagcccaacaggctgaaggac

SEQ ID NO: 1297480 - DNA, 25 bp, Homo sapien
ctacttctctattgtcattaatctt

SEQ ID NO: 1297481 - DNA, 25 bp, Homo sapien
tcttattcttcttagcacagttggg

SEQ ID NO: 1297482 - DNA, 25 bp, Homo sapien
ttggggcataacatattatcttctg

SEQ ID NO: 1297483 - DNA, 25 bp, Homo sapien
attcttcttagcacagttggggcat

SEQ ID NO: 1297484 - DNA, 25 bp, Homo sapien
ggcctatggaccctcagataaactt

SEQ ID NO: 1297485 - DNA, 25 bp, Homo sapien
taagcaggcctatggaccctcagat

SEQ ID NO: 1297486 - DNA, 25 bp, Homo sapien
cagcctcaggctcaacagctcttgc

SEQ ID NO: 1297487 - DNA, 25 bp, Homo sapien
tgtttccttgaacaccgctgtaatc

SEQ ID NO: 1297488 - DNA, 25 bp, Homo sapien
cttcttgctgctatccaaatttgag

SEQ ID NO: 1297489 - DNA, 25 bp, Homo sapien
gttctgtttgttccatatttgggtc

SEQ ID NO: 1297490 - DNA, 25 bp, Homo sapien
aaatcacactttcctcatcagctac

SEQ ID NO: 1297491 - DNA, 25 bp, Homo sapien
tttgggtcatctttaactggcagca

SEQ ID NO: 1297492 - DNA, 25 bp, Homo sapien
cccctgtcttgtccattcggtgata

SEQ ID NO: 1297493 - DNA, 25 bp, Homo sapien
tcagcaacacccctgtcttgtccat

SEQ ID NO: 1297494 - DNA, 25 bp, Homo sapien
aacacccctgtcttgtccattcggt

SEQ ID NO: 1297495 - DNA, 25 bp, Homo sapien
cctgtcttgtccattcggtgataca

SEQ ID NO: 1297496 - DNA, 25 bp, Homo sapien
gactcttgctctagagcagaagatc

SEQ ID NO: 1297497 - DNA, 25 bp, Homo sapien
tatgactcttgctctagagcagaag

SEQ ID NO: 1297498 - DNA, 25 bp, Homo sapien
ctatgactcttgctctagagcagaa

SEQ ID NO: 1297499 - DNA, 25 bp, Homo sapien
tgactcttgctctagagcagaagat

SEQ ID NO: 1297500 - DNA, 25 bp, Homo sapien
tccccgggaacccagctgatggcat

SEQ ID NO: 1297501 - DNA, 25 bp, Homo sapien
ctgagtgtggaccagagacatggtc

SEQ ID NO: 1297502 - DNA, 25 bp, Homo sapien
gcatgacgagatgagcacgtccccg

SEQ ID NO: 1297503 - DNA, 25 bp, Homo sapien
acatttctctccgtagcatgacgag

SEQ ID NO: 1297504 - DNA, 25 bp, Homo sapien
acaggccatgttccctgcggaactg

SEQ ID NO: 1297505 - DNA, 25 bp, Homo sapien
gcacaggccatgttccctgcggaac

SEQ ID NO: 1297506 - DNA, 25 bp, Homo sapien
atgttccctgcggaactggcatttg

SEQ ID NO: 1297507 - DNA, 25 bp, Homo sapien
tgttccctgcggaactggcatttgg

SEQ ID NO: 1297508 - DNA, 25 bp, Homo sapien
ccttgattatggctgtctcaggata

SEQ ID NO: 1297509 - DNA, 25 bp, Homo sapien
ggaaacagatttgcccgggagcacc

SEQ ID NO: 1297510 - DNA, 25 bp, Homo sapien
tgggcacccacaacaccttgattat

SEQ ID NO: 1297511 - DNA, 25 bp, Homo sapien
gccttaagccccttggtcacacagg

SEQ ID NO: 1297512 - DNA, 25 bp, Homo sapien
gggagctgtggacccctcctcacct

SEQ ID NO: 1297513 - DNA, 25 bp, Homo sapien
ctgcctggaggcacgctgggagatg

SEQ ID NO: 1297514 - DNA, 25 bp, Homo sapien
agggagctgtggacccctcctcacc

SEQ ID NO: 1297515 - DNA, 25 bp, Homo sapien
tggaggcacgctgggagatgtgtct

SEQ ID NO: 1297516 - DNA, 25 bp, Homo sapien
ctagagaccacggatcaggcctggg

SEQ ID NO: 1297517 - DNA, 25 bp, Homo sapien
gtgggaaccctagagaccacggatc

SEQ ID NO: 1297518 - DNA, 25 bp, Homo sapien
tggtgtccgttagggccaggattgg

SEQ ID NO: 1297519 - DNA, 25 bp, Homo sapien
tagggccaggattggcaggtgggct

SEQ ID NO: 1297520 - DNA, 25 bp, Homo sapien
tcagcccgtatctggagagtctcct

SEQ ID NO: 1297521 - DNA, 25 bp, Homo sapien
tgttgccccttctggtaccctgctg

SEQ ID NO: 1297522 - DNA, 25 bp, Homo sapien
ctaggccccttggtttatctcagcc

SEQ ID NO: 1297523 - DNA, 25 bp, Homo sapien
cagccttcagcaaaggcagttctga

SEQ ID NO: 1297524 - DNA, 25 bp, Homo sapien
ctttcacaatctcccggcagccatc

SEQ ID NO: 1297525 - DNA, 25 bp, Homo sapien
caaacccctgtctgaggaagctgga

SEQ ID NO: 1297526 - DNA, 25 bp, Homo sapien
ctggagagcaatgagaggcttggct

SEQ ID NO: 1297527 - DNA, 25 bp, Homo sapien
agctttggggcttccgagagctgcc

SEQ ID NO: 1297528 - DNA, 25 bp, Homo sapien
ggcttgggactggcagccttcttcg

SEQ ID NO: 1297529 - DNA, 25 bp, Homo sapien
gctctgagaaggctgatccatccca

SEQ ID NO: 1297530 - DNA, 25 bp, Homo sapien
gctcctcaaggttctgggccaggga

SEQ ID NO: 1297531 - DNA, 25 bp, Homo sapien
agctctgtccctccatcaggatgag

SEQ ID NO: 1297532 - DNA, 25 bp, Homo sapien
tcatgagcccatagctgtgaaggca

SEQ ID NO: 1297533 - DNA, 25 bp, Homo sapien
tggacgtagcacactatggcccaga

SEQ ID NO: 1297534 - DNA, 25 bp, Homo sapien
acctgatggacgtagcacactatgg

SEQ ID NO: 1297535 - DNA, 25 bp, Homo sapien
ctgatggacgtagcacactatggcc

SEQ ID NO: 1297536 - DNA, 25 bp, Homo sapien
gatggacgtagcacactatggccca

SEQ ID NO: 1297537 - DNA, 25 bp, Homo sapien
ggttgtgatcaattagttgcaaaca

SEQ ID NO: 1297538 - DNA, 25 bp, Homo sapien
agaaggaacaaagaaatctgtaact

SEQ ID NO: 1297539 - DNA, 25 bp, Homo sapien
tagtcaagtggagcagtgggagtag

SEQ ID NO: 1297540 - DNA, 25 bp, Homo sapien
tagttgcaaacaccactgcacttgg

SEQ ID NO: 1297541 - DNA, 25 bp, Homo sapien
cggagccccgcaggggcgcagagca

SEQ ID NO: 1297542 - DNA, 25 bp, Homo sapien
ctggttcccacggccccggcggcag

SEQ ID NO: 1297543 - DNA, 25 bp, Homo sapien
tcagctctggttcccacggccccgg

SEQ ID NO: 1297544 - DNA, 25 bp, Homo sapien
acgcccctctcggagccccgcaggg

SEQ ID NO: 1297545 - DNA, 25 bp, Homo sapien
cagggggcagcagcgggaacccgtt

SEQ ID NO: 1297546 - DNA, 25 bp, Homo sapien
cggcagggggcagcagcgggaaccc

SEQ ID NO: 1297547 - DNA, 25 bp, Homo sapien
ggcggcagggggcagcagcgggaac

SEQ ID NO: 1297548 - DNA, 25 bp, Homo sapien
gcagggggcagcagcgggaacccgt

SEQ ID NO: 1297549 - DNA, 25 bp, Homo sapien
acatcaagtagtccctcagagcgac

SEQ ID NO: 1297550 - DNA, 25 bp, Homo sapien
cggagacatcaagtagtccctcaga

SEQ ID NO: 1297551 - DNA, 25 bp, Homo sapien
accgagcgcacggagacatcaagta

SEQ ID NO: 1297552 - DNA, 25 bp, Homo sapien
cgcacggagacatcaagtagtccct

SEQ ID NO: 1297553 - DNA, 25 bp, Homo sapien
cttgttagaggggaattctagttgc

SEQ ID NO: 1297554 - DNA, 25 bp, Homo sapien
tctcaggtagttaggtctgagcgcc

SEQ ID NO: 1297555 - DNA, 25 bp, Homo sapien
ggtagttaggtctgagcgcccactt

SEQ ID NO: 1297556 - DNA, 25 bp, Homo sapien
ggatctcaggtagttaggtctgagc

SEQ ID NO: 1297557 - DNA, 25 bp, Homo sapien
gttcttctatgctgacaatcgctat

SEQ ID NO: 1297558 - DNA, 25 bp, Homo sapien
agattcttgctaggcttcagattcc

SEQ ID NO: 1297559 - DNA, 25 bp, Homo sapien
tctatgctgacaatcgctatgagat

SEQ ID NO: 1297560 - DNA, 25 bp, Homo sapien
tatgagattcttgctaggcttcaga

SEQ ID NO: 1297561 - DNA, 25 bp, Homo sapien
gcccatccccatcgtcatgaatgta

SEQ ID NO: 1297562 - DNA, 25 bp, Homo sapien
tagcccatccccatcgtcatgaatg

SEQ ID NO: 1297563 - DNA, 25 bp, Homo sapien
agcccatccccatcgtcatgaatgt

SEQ ID NO: 1297564 - DNA, 25 bp, Homo sapien
ttagcccatccccatcgtcatgaat

SEQ ID NO: 1297565 - DNA, 25 bp, Homo sapien
agagggtgctgaggagcaccgtggc

SEQ ID NO: 1297566 - DNA, 25 bp, Homo sapien
atcctgcatcccaatcctgagacag

SEQ ID NO: 1297567 - DNA, 25 bp, Homo sapien
gggtgctgaggagcaccgtggccac

SEQ ID NO: 1297568 - DNA, 25 bp, Homo sapien
tcctgatcctgcatcccaatcctga

SEQ ID NO: 1297569 - DNA, 25 bp, Homo sapien
atttcacacatccatgtgaatgccc

SEQ ID NO: 1297570 - DNA, 25 bp, Homo sapien
caacatcataacaatgtttgtggat

SEQ ID NO: 1297571 - DNA, 25 bp, Homo sapien
ataacaatgtttgtggatggcacat

SEQ ID NO: 1297572 - DNA, 25 bp, Homo sapien
gcacatttcacacatccatgtgaat

SEQ ID NO: 1297573 - DNA, 25 bp, Homo sapien
gcgccctgcctttgcccggggagaa

SEQ ID NO: 1297574 - DNA, 25 bp, Homo sapien
gatgttgtcagaggtaccctggagg

SEQ ID NO: 1297575 - DNA, 25 bp, Homo sapien
cagatgctgctgatattactgatgt

SEQ ID NO: 1297576 - DNA, 25 bp, Homo sapien
ctgccttggatgagcactctgatcc

SEQ ID NO: 1297577 - DNA, 25 bp, Homo sapien
ggaacgacggtagtcaggaactcca

SEQ ID NO: 1297578 - DNA, 25 bp, Homo sapien
tctcgtaggggaacgacggtagtca

SEQ ID NO: 1297579 - DNA, 25 bp, Homo sapien
tagagtagtcagtaacgggaggaga

SEQ ID NO: 1297580 - DNA, 25 bp, Homo sapien
agtagtcagtaacgggaggagaaag

SEQ ID NO: 1297581 - DNA, 25 bp, Homo sapien
tggccacaatgggagtaagaggcat

SEQ ID NO: 1297582 - DNA, 25 bp, Homo sapien
cccctccctggtcctatgaatgtgg

SEQ ID NO: 1297583 - DNA, 25 bp, Homo sapien
ccctggtcctatgaatgtggatggc

SEQ ID NO: 1297584 - DNA, 25 bp, Homo sapien
atgtggatggccacaatgggagtaa

SEQ ID NO: 1297585 - DNA, 25 bp, Homo sapien
gccacactttcatggagtgaggaag

SEQ ID NO: 1297586 - DNA, 25 bp, Homo sapien
gctgaactgaaggaacgaactagct

SEQ ID NO: 1297587 - DNA, 25 bp, Homo sapien
gggtctacatagtcaatgcagcttt

SEQ ID NO: 1297588 - DNA, 25 bp, Homo sapien
ctttgtgtcgctgctaggtgaggca

SEQ ID NO: 1297589 - DNA, 25 bp, Homo sapien
gaccccaaattgcttaagagtttga

SEQ ID NO: 1297590 - DNA, 25 bp, Homo sapien
atgaccccaaattgcttaagagttt

SEQ ID NO: 1297591 - DNA, 25 bp, Homo sapien
accccaaattgcttaagagtttgag

SEQ ID NO: 1297592 - DNA, 25 bp, Homo sapien
ctctttttttcacagctactttggg

SEQ ID NO: 1297593 - DNA, 25 bp, Homo sapien
gaatctaagcaaaccctcgctaggg

SEQ ID NO: 1297594 - DNA, 25 bp, Homo sapien
tccagtccgcgtttgctaagtgccg

SEQ ID NO: 1297595 - DNA, 25 bp, Homo sapien
cagtcacagttttaccgcgaagagc

SEQ ID NO: 1297596 - DNA, 25 bp, Homo sapien
tcaaaacagcttgcccacgtgtagg

SEQ ID NO: 1297597 - DNA, 25 bp, Homo sapien
aatctaagataatgctcctgtggcc

SEQ ID NO: 1297598 - DNA, 25 bp, Homo sapien
tcccgggtcctgcataatctaagat

SEQ ID NO: 1297599 - DNA, 25 bp, Homo sapien
tcctgtggccatgaagtctcccttt

SEQ ID NO: 1297600 - DNA, 25 bp, Homo sapien
tcctggtgtctaggaacactggcct

SEQ ID NO: 1297601 - DNA, 25 bp, Homo sapien
gccaattttgcagccgcgggtaaag

SEQ ID NO: 1297602 - DNA, 25 bp, Homo sapien
gaggtgctaagcagcagccaacgga

SEQ ID NO: 1297603 - DNA, 25 bp, Homo sapien
caggcgagtgggaaacgaatcgtct

SEQ ID NO: 1297604 - DNA, 25 bp, Homo sapien
gatcagtcattctttcgggcttgca

SEQ ID NO: 1297605 - DNA, 25 bp, Homo sapien
gtctctccgcggacgagacagcggg

SEQ ID NO: 1297606 - DNA, 25 bp, Homo sapien
cagcggggatcatggccgcgcaggt

SEQ ID NO: 1297607 - DNA, 25 bp, Homo sapien
agctgaagaaagccgagcagcagca

SEQ ID NO: 1297608 - DNA, 25 bp, Homo sapien
ccgccgccctcggagctgaagaaag

SEQ ID NO: 1297609 - DNA, 25 bp, Homo sapien
agcccggtccatctcctgtcttagg

SEQ ID NO: 1297610 - DNA, 25 bp, Homo sapien
gacccctcaggtacacagctgagtg

SEQ ID NO: 1297611 - DNA, 25 bp, Homo sapien
tgaacgtttctttgctcacctgccg

SEQ ID NO: 1297612 - DNA, 25 bp, Homo sapien
caaagagggcccctagagctcgagg

SEQ ID NO: 1297613 - DNA, 25 bp, Homo sapien
ctgaaactcctgagctcgtgatcta

SEQ ID NO: 1297614 - DNA, 25 bp, Homo sapien
ctgagctcgtgatctacccgtctcg

SEQ ID NO: 1297615 - DNA, 25 bp, Homo sapien
cacgcccggcctaatgtttgtattt

SEQ ID NO: 1297616 - DNA, 25 bp, Homo sapien
ctcaggtgatccgccggctttgacc

SEQ ID NO: 1297617 - DNA, 25 bp, Homo sapien
tgtcactcagggtgaggtgcagtgg

SEQ ID NO: 1297618 - DNA, 25 bp, Homo sapien
tcactcagggtgaggtgcagtggtc

SEQ ID NO: 1297619 - DNA, 25 bp, Homo sapien
actcagggtgaggtgcagtggtctc

SEQ ID NO: 1297620 - DNA, 25 bp, Homo sapien
ctctgtcactcagggtgaggtgcag

SEQ ID NO: 1297621 - DNA, 25 bp, Homo sapien
atttactttattcgaccctgaagtg

SEQ ID NO: 1297622 - DNA, 25 bp, Homo sapien
gctcttaagccactgcctagaactg

SEQ ID NO: 1297623 - DNA, 25 bp, Homo sapien
ctactatctgttctgttgataagga

SEQ ID NO: 1297624 - DNA, 25 bp, Homo sapien
ccctgaagtgtggtactactatctg

SEQ ID NO: 1297625 - DNA, 25 bp, Homo sapien
gtgacctggggctgttttctgctgg

SEQ ID NO: 1297626 - DNA, 25 bp, Homo sapien
ggctgttttctgctggggtccttac

SEQ ID NO: 1297627 - DNA, 25 bp, Homo sapien
gggctgttttctgctggggtcctta

SEQ ID NO: 1297628 - DNA, 25 bp, Homo sapien
tcatgtgacctggggctgttttctg

SEQ ID NO: 1297629 - DNA, 25 bp, Homo sapien
tctctcggctctttctgggttatca

SEQ ID NO: 1297630 - DNA, 25 bp, Homo sapien
gttatcaggcgccagtccaagtcct

SEQ ID NO: 1297631 - DNA, 25 bp, Homo sapien
gctctttctgggttatcaggcgcca

SEQ ID NO: 1297632 - DNA, 25 bp, Homo sapien
catctgttctctcggctctttctgg

SEQ ID NO: 1297633 - DNA, 25 bp, Homo sapien
tcaaggcgttccacaggaaaagcct

SEQ ID NO: 1297634 - DNA, 25 bp, Homo sapien
cggtgtggcttcgagtttatgcaga

SEQ ID NO: 1297635 - DNA, 25 bp, Homo sapien
gcatgcaccagagggatcacagtac

SEQ ID NO: 1297636 - DNA, 25 bp, Homo sapien
agcttactgtactgggactcagcaa

SEQ ID NO: 1297637 - DNA, 25 bp, Homo sapien
taaaaggaatgtcaatggatttcca

SEQ ID NO: 1297638 - DNA, 25 bp, Homo sapien
tggactggccaatccgcttctccat

SEQ ID NO: 1297639 - DNA, 25 bp, Homo sapien
tatctgcccagactgctaagagcag

SEQ ID NO: 1297640 - DNA, 25 bp, Homo sapien
ctctgtcatatctgcccagactgct

SEQ ID NO: 1297641 - DNA, 25 bp, Homo sapien
agactgctaagagcagcatgtaccc

SEQ ID NO: 1297642 - DNA, 25 bp, Homo sapien
ttatttcaggaaccccggaggcatg

SEQ ID NO: 1297643 - DNA, 25 bp, Homo sapien
gtggatagacgacatggaggtttat

SEQ ID NO: 1297644 - DNA, 25 bp, Homo sapien
gagcacatgggcattagataccatc

SEQ ID NO: 1297645 - DNA, 25 bp, Homo sapien
gcatggcgggtaatgatgtccctca

SEQ ID NO: 1297646 - DNA, 25 bp, Homo sapien
tctagcaccttgaccgaggatggag

SEQ ID NO: 1297647 - DNA, 25 bp, Homo sapien
agcccctcggaagcatgtgacaaca

SEQ ID NO: 1297648 - DNA, 25 bp, Homo sapien
tatccagacccacttcgagagcaag

SEQ ID NO: 1297649 - DNA, 25 bp, Homo sapien
gaaaaacggatcacagccactatgg

SEQ ID NO: 1297650 - DNA, 25 bp, Homo sapien
tgacctgcacaaagcgagacacagc

SEQ ID NO: 1297651 - DNA, 25 bp, Homo sapien
gcccctcttggtgcgatgctgtaca

SEQ ID NO: 1297652 - DNA, 25 bp, Homo sapien
ggttttaacctttagctgcagcggc

SEQ ID NO: 1297653 - DNA, 25 bp, Homo sapien
gcctgtgcagtagagtgtagaccct

SEQ ID NO: 1297654 - DNA, 25 bp, Homo sapien
tggccccacttcctatgagagaaac

SEQ ID NO: 1297655 - DNA, 25 bp, Homo sapien
gcagcctccgctcactatttgaagg

SEQ ID NO: 1297656 - DNA, 25 bp, Homo sapien
aactcagtgaacgtcagcgggagct

SEQ ID NO: 1297657 - DNA, 25 bp, Homo sapien
tgtgctgagctgttgttgcctgaca

SEQ ID NO: 1297658 - DNA, 25 bp, Homo sapien
caccaaggtgggaaggtgctacgag

SEQ ID NO: 1297659 - DNA, 25 bp, Homo sapien
aggtgggaaggtgctacgaggcgag

SEQ ID NO: 1297660 - DNA, 25 bp, Homo sapien
aggtgtcaccaaggtgggaaggtgc

SEQ ID NO: 1297661 - DNA, 25 bp, Homo sapien
aaggtgctacgaggcgaggcgccga

SEQ ID NO: 1297662 - DNA, 25 bp, Homo sapien
gagggcatttgtcatgtgacggaat

SEQ ID NO: 1297663 - DNA, 25 bp, Homo sapien
tccactaccccctggagggcatttg

SEQ ID NO: 1297664 - DNA, 25 bp, Homo sapien
tggccagtgatcaaagtgttcctgg

SEQ ID NO: 1297665 - DNA, 25 bp, Homo sapien
tgttcctggatatcagccgacctcc

SEQ ID NO: 1297666 - DNA, 25 bp, Homo sapien
gaaagtgacataggaagtccccaga

SEQ ID NO: 1297667 - DNA, 25 bp, Homo sapien
tcactccagaggctagtggtcacag

SEQ ID NO: 1297668 - DNA, 25 bp, Homo sapien
gaagacaaggtgtttctgccaaacg

SEQ ID NO: 1297669 - DNA, 25 bp, Homo sapien
tctgaatatgggacccagtgccagg

SEQ ID NO: 1297670 - DNA, 25 bp, Homo sapien
tctcctgcgaagagcgaaacctgct

SEQ ID NO: 1297671 - DNA, 25 bp, Homo sapien
gccttcatgaaaggcgccgtggaga

SEQ ID NO: 1297672 - DNA, 25 bp, Homo sapien
gaacgctatgaggacatggcagcct

SEQ ID NO: 1297673 - DNA, 25 bp, Homo sapien
cagagcaggccgaacgctatgagga

SEQ ID NO: 1297674 - DNA, 25 bp, Homo sapien
cactttcgacgaggccatggctgat

SEQ ID NO: 1297675 - DNA, 25 bp, Homo sapien
gagagccgggtcttctacctgaaga

SEQ ID NO: 1297676 - DNA, 25 bp, Homo sapien
accggtgacgacaagaagcgcatca

SEQ ID NO: 1297677 - DNA, 25 bp, Homo sapien
aagcgcatcattgactcagcccggt

SEQ ID NO: 1297678 - DNA, 25 bp, Homo sapien
atgccatggaggtatgtgctgcaac

SEQ ID NO: 1297679 - DNA, 25 bp, Homo sapien
agaaagtttccgttatgggattctg

SEQ ID NO: 1297680 - DNA, 25 bp, Homo sapien
tgggattctgggtgactcattttcg

SEQ ID NO: 1297681 - DNA, 25 bp, Homo sapien
atgtactttccatcttgttacccag

SEQ ID NO: 1297682 - DNA, 25 bp, Homo sapien
aacagatgaccccatagaaagtttc

SEQ ID NO: 1297683 - DNA, 25 bp, Homo sapien
accgtgctcggccttctctttcatt

SEQ ID NO: 1297684 - DNA, 25 bp, Homo sapien
ccaccgtgctcggccttctctttca

SEQ ID NO: 1297685 - DNA, 25 bp, Homo sapien
cgtgctcggccttctctttcatttt

SEQ ID NO: 1297686 - DNA, 25 bp, Homo sapien
ccgtgctcggccttctctttcattt

SEQ ID NO: 1297687 - DNA, 25 bp, Homo sapien
tatcccctttacagccaggcgtggg

SEQ ID NO: 1297688 - DNA, 25 bp, Homo sapien
tgattggctgcaaaacctgtgggac

SEQ ID NO: 1297689 - DNA, 25 bp, Homo sapien
taaaggatttgtccagtagcctggg

SEQ ID NO: 1297690 - DNA, 25 bp, Homo sapien
gaacaggcctcacttggatctcgga

SEQ ID NO: 1297691 - DNA, 25 bp, Homo sapien
tgattattccaaggctaggtgacac

SEQ ID NO: 1297692 - DNA, 25 bp, Homo sapien
gctcacggacaccactgacagtatg

SEQ ID NO: 1297693 - DNA, 25 bp, Homo sapien
gcagagctgaatatccccttgccag

SEQ ID NO: 1297694 - DNA, 25 bp, Homo sapien
tttggccagaagtcctttgcagagc

SEQ ID NO: 1297695 - DNA, 25 bp, Homo sapien
ttatgcatcctgctctccagggtcc

SEQ ID NO: 1297696 - DNA, 25 bp, Homo sapien
tcctgctctccagggtccaccttgt

SEQ ID NO: 1297697 - DNA, 25 bp, Homo sapien
ctgctctccagggtccaccttgttg

SEQ ID NO: 1297698 - DNA, 25 bp, Homo sapien
catcctgctctccagggtccacctt

SEQ ID NO: 1297699 - DNA, 25 bp, Homo sapien
tggttcgagggtgccaggtacttct

SEQ ID NO: 1297700 - DNA, 25 bp, Homo sapien
ctgactggttcgagggtgccaggta

SEQ ID NO: 1297701 - DNA, 25 bp, Homo sapien
tccactgactggttcgagggtgcca

SEQ ID NO: 1297702 - DNA, 25 bp, Homo sapien
gctccactgactggttcgagggtgc

SEQ ID NO: 1297703 - DNA, 25 bp, Homo sapien
cgtcaaggctgatagcataggcaga

SEQ ID NO: 1297704 - DNA, 25 bp, Homo sapien
atctgacttccgctgatgcctacac

SEQ ID NO: 1297705 - DNA, 25 bp, Homo sapien
aagggtgcgtcaaggctgatagcat

SEQ ID NO: 1297706 - DNA, 25 bp, Homo sapien
ctgggcaggatctgacttccgctga

SEQ ID NO: 1297707 - DNA, 25 bp, Homo sapien
ggcgcctattatcccacttactcgg

SEQ ID NO: 1297708 - DNA, 25 bp, Homo sapien
ggcgggcgcctattatcccacttac

SEQ ID NO: 1297709 - DNA, 25 bp, Homo sapien
gcgggcgcctattatcccacttact

SEQ ID NO: 1297710 - DNA, 25 bp, Homo sapien
gggcgcctattatcccacttactcg

SEQ ID NO: 1297711 - DNA, 25 bp, Homo sapien
cctctctgctatggccaggaagctg

SEQ ID NO: 1297712 - DNA, 25 bp, Homo sapien
ctgctatggccaggaagctggcaag

SEQ ID NO: 1297713 - DNA, 25 bp, Homo sapien
tctctgctatggccaggaagctggc

SEQ ID NO: 1297714 - DNA, 25 bp, Homo sapien
tctgctatggccaggaagctggcaa

SEQ ID NO: 1297715 - DNA, 25 bp, Homo sapien
aatggaagtcggctcccattgcggc

SEQ ID NO: 1297716 - DNA, 25 bp, Homo sapien
tggaagtcggctcccattgcggcag

SEQ ID NO: 1297717 - DNA, 25 bp, Homo sapien
agaaatggaagtcggctcccattgc

SEQ ID NO: 1297718 - DNA, 25 bp, Homo sapien
gaagtcggctcccattgcggcagac

SEQ ID NO: 1297719 - DNA, 25 bp, Homo sapien
tctgaaacagtatccattggcttta

SEQ ID NO: 1297720 - DNA, 25 bp, Homo sapien
aaacagtatccattggctttatcca

SEQ ID NO: 1297721 - DNA, 25 bp, Homo sapien
tccaagcttcgctgctcttgggctc

SEQ ID NO: 1297722 - DNA, 25 bp, Homo sapien
gcttccaagcttcgctgctcttggg

SEQ ID NO: 1297723 - DNA, 25 bp, Homo sapien
tcttcgatgagctgcactagcttct

SEQ ID NO: 1297724 - DNA, 25 bp, Homo sapien
agaacctctgtgtagtagtccaggt

SEQ ID NO: 1297725 - DNA, 25 bp, Homo sapien
gagggataaaggagacaaggctata

SEQ ID NO: 1297726 - DNA, 25 bp, Homo sapien
ttctcattgagctggcggtagtggc

SEQ ID NO: 1297727 - DNA, 25 bp, Homo sapien
tgcactcatgcactcaaatatttct

SEQ ID NO: 1297728 - DNA, 25 bp, Homo sapien
ctaaagacctgaggacgaggttcct

SEQ ID NO: 1297729 - DNA, 25 bp, Homo sapien
agtgttcaggagcaaccagtatcag

SEQ ID NO: 1297730 - DNA, 25 bp, Homo sapien
catttggttttacctgctggctctg

SEQ ID NO: 1297731 - DNA, 25 bp, Homo sapien
gaatccacgaggtggacggcagtca

SEQ ID NO: 1297732 - DNA, 25 bp, Homo sapien
tcccataatgctcaatgaggtccat

SEQ ID NO: 1297733 - DNA, 25 bp, Homo sapien
cagtactgaaatgaacttggcaggg

SEQ ID NO: 1297734 - DNA, 25 bp, Homo sapien
tgcagtagtgagaatccacgaggtg

SEQ ID NO: 1297735 - DNA, 25 bp, Homo sapien
tacttccaaaatcgccaagttggct

SEQ ID NO: 1297736 - DNA, 25 bp, Homo sapien
caatttacaacaatctccatgccac

SEQ ID NO: 1297737 - DNA, 25 bp, Homo sapien
gacttatcaacaccacacagccagt

SEQ ID NO: 1297738 - DNA, 25 bp, Homo sapien
gagccagattctgaactcatgcctg

SEQ ID NO: 1297739 - DNA, 25 bp, Homo sapien
catttgggagaagatgctgcgcaag

SEQ ID NO: 1297740 - DNA, 25 bp, Homo sapien
tcatgcccaggcagtacgtggtctt

SEQ ID NO: 1297741 - DNA, 25 bp, Homo sapien
tactccatgcagtagagcaggccgc

SEQ ID NO: 1297742 - DNA, 25 bp, Homo sapien
gcgccgtgatgcgtgcagagctcca

SEQ ID NO: 1297743 - DNA, 25 bp, Homo sapien
ctgcccgaaggccgtggtcggagcg

SEQ ID NO: 1297744 - DNA, 25 bp, Homo sapien
tgcccgaaggccgtggtcggagcgg

SEQ ID NO: 1297745 - DNA, 25 bp, Homo sapien
gcccgaaggccgtggtcggagcggc

SEQ ID NO: 1297746 - DNA, 25 bp, Homo sapien
aaggccgtggtcggagcggcccctg

SEQ ID NO: 1297747 - DNA, 25 bp, Homo sapien
agccgcgccggagacgagactgagg

SEQ ID NO: 1297748 - DNA, 25 bp, Homo sapien
gcggcccggagcaggtcaactcaca

SEQ ID NO: 1297749 - DNA, 25 bp, Homo sapien
caggtcaactcacagggaaaacggg

SEQ ID NO: 1297750 - DNA, 25 bp, Homo sapien
gagggcgagggtcccagtacgtata

SEQ ID NO: 1297751 - DNA, 25 bp, Homo sapien
gcgtcactcgcctcaggcggaacag

SEQ ID NO: 1297752 - DNA, 25 bp, Homo sapien
ggcggccagcgtcactcgcctcagg

SEQ ID NO: 1297753 - DNA, 25 bp, Homo sapien
gccagcgtcactcgcctcaggcgga

SEQ ID NO: 1297754 - DNA, 25 bp, Homo sapien
ctcgttggcggccagcgtcactcgc

SEQ ID NO: 1297755 - DNA, 25 bp, Homo sapien
tttctctcgcgggtagtgggtcgaa

SEQ ID NO: 1297756 - DNA, 25 bp, Homo sapien
gataacaggccgatactaactagac

SEQ ID NO: 1297757 - DNA, 25 bp, Homo sapien
ccgtgtcgcgcaaaaggagataaca

SEQ ID NO: 1297758 - DNA, 25 bp, Homo sapien
gactaactcgacttccggacagcgt

SEQ ID NO: 1297759 - DNA, 25 bp, Homo sapien
tctggccttcgtggggacaccttca

SEQ ID NO: 1297760 - DNA, 25 bp, Homo sapien
cacccagtgagggtagaggcggtgg

SEQ ID NO: 1297761 - DNA, 25 bp, Homo sapien
cttccgtgacgtcgcacacccaagc

SEQ ID NO: 1297762 - DNA, 25 bp, Homo sapien
gcggactctccgctggcagtcccac

SEQ ID NO: 1297763 - DNA, 25 bp, Homo sapien
cttcagtggtagatgaggccagggc

SEQ ID NO: 1297764 - DNA, 25 bp, Homo sapien
gttagagaccaaagacaagcggtcg

SEQ ID NO: 1297765 - DNA, 25 bp, Homo sapien
aggcaggctcggaacaaaacaccct

SEQ ID NO: 1297766 - DNA, 25 bp, Homo sapien
aaaacaccctgaaccagccacgaag

SEQ ID NO: 1297767 - DNA, 25 bp, Homo sapien
gtctgaagcacaactggaacccctc

SEQ ID NO: 1297768 - DNA, 25 bp, Homo sapien
tgtctgaagcacaactggaacccct

SEQ ID NO: 1297769 - DNA, 25 bp, Homo sapien
ctgaagcacaactggaacccctcac

SEQ ID NO: 1297770 - DNA, 25 bp, Homo sapien
tctgaagcacaactggaacccctca

SEQ ID NO: 1297771 - DNA, 25 bp, Homo sapien
ggtagaggctcatcatagatggtgg

SEQ ID NO: 1297772 - DNA, 25 bp, Homo sapien
aaaggccatgtctgtccgaaacttc

SEQ ID NO: 1297773 - DNA, 25 bp, Homo sapien
cgaaacttcatgctggtgggtggct

SEQ ID NO: 1297774 - DNA, 25 bp, Homo sapien
cggcggagcagtgactccgtctggt

SEQ ID NO: 1297775 - DNA, 25 bp, Homo sapien
cttcagttgcccaaatggctgtagc

SEQ ID NO: 1297776 - DNA, 25 bp, Homo sapien
cccaaatggctgtagcttctctcca

SEQ ID NO: 1297777 - DNA, 25 bp, Homo sapien
tggctgtagcttctctccatggtac

SEQ ID NO: 1297778 - DNA, 25 bp, Homo sapien
agttgcccaaatggctgtagcttct

SEQ ID NO: 1297779 - DNA, 25 bp, Homo sapien
ttctaacagagacagtctcatatgt

SEQ ID NO: 1297780 - DNA, 25 bp, Homo sapien
atagctgaaaggcttgggcccccag

SEQ ID NO: 1297781 - DNA, 25 bp, Homo sapien
cagcagccatgccaaaaccagtggg

SEQ ID NO: 1297782 - DNA, 25 bp, Homo sapien
gttttgaatttcatcccgcacgagt

SEQ ID NO: 1297783 - DNA, 25 bp, Homo sapien
cccaatccacgcttgcatctggggt

SEQ ID NO: 1297784 - DNA, 25 bp, Homo sapien
ccaatccacgcttgcatctggggtg

SEQ ID NO: 1297785 - DNA, 25 bp, Homo sapien
gggtgttggccatcactatccaggg

SEQ ID NO: 1297786 - DNA, 25 bp, Homo sapien
atctggggtgttggccatcactatc

SEQ ID NO: 1297787 - DNA, 25 bp, Homo sapien
agagtctcgggcatccttgtctcca

SEQ ID NO: 1297788 - DNA, 25 bp, Homo sapien
cttggtgtggcgctcaaaggtgccc

SEQ ID NO: 1297789 - DNA, 25 bp, Homo sapien
tgttccagacgcatttggacagagt

SEQ ID NO: 1297790 - DNA, 25 bp, Homo sapien
aaaggtgcccacctggcgttcgatc

SEQ ID NO: 1297791 - DNA, 25 bp, Homo sapien
gaaacagagctcagtttatggaagc

SEQ ID NO: 1297792 - DNA, 25 bp, Homo sapien
cagagctcagtttatggaagcgtcc

SEQ ID NO: 1297793 - DNA, 25 bp, Homo sapien
ctgaggaaacagagctcagtttatg

SEQ ID NO: 1297794 - DNA, 25 bp, Homo sapien
gaggaaacagagctcagtttatgga

SEQ ID NO: 1297795 - DNA, 25 bp, Homo sapien
ctctcaaagaagggggaagaatcag

SEQ ID NO: 1297796 - DNA, 25 bp, Homo sapien
tctcaaagaagggggaagaatcagg

SEQ ID NO: 1297797 - DNA, 25 bp, Homo sapien
ctcaaagaagggggaagaatcaggt

SEQ ID NO: 1297798 - DNA, 25 bp, Homo sapien
ccaaaactagcacttaatgtacaca

SEQ ID NO: 1297799 - DNA, 25 bp, Homo sapien
tctcagtgggctaccccaagggaac

SEQ ID NO: 1297800 - DNA, 25 bp, Homo sapien
tttgctagctctggtaaagtgtcac

SEQ ID NO: 1297801 - DNA, 25 bp, Homo sapien
tgcaaggccagggcacctgtttcac

SEQ ID NO: 1297802 - DNA, 25 bp, Homo sapien
ctccagtattgccactccttgccca

SEQ ID NO: 1297803 - DNA, 25 bp, Homo sapien
cagtattgccactccttgcccagta

SEQ ID NO: 1297804 - DNA, 25 bp, Homo sapien
agtattgccactccttgcccagtac

SEQ ID NO: 1297805 - DNA, 25 bp, Homo sapien
tccagtattgccactccttgcccag

SEQ ID NO: 1297806 - DNA, 25 bp, Homo sapien
ctctgtcatagtacacactcatgtc

SEQ ID NO: 1297807 - DNA, 25 bp, Homo sapien
gtcatcggctgtctgttcatcaaaa

SEQ ID NO: 1297808 - DNA, 25 bp, Homo sapien
tgtcatagtacacactcatgtccac

SEQ ID NO: 1297809 - DNA, 25 bp, Homo sapien
cacatcccagtcatcggctgtctgt

SEQ ID NO: 1297810 - DNA, 25 bp, Homo sapien
agtacattaaggactctcagttcta

SEQ ID NO: 1297811 - DNA, 25 bp, Homo sapien
aacagagtacattaaggactctcag

SEQ ID NO: 1297812 - DNA, 25 bp, Homo sapien
gggacagaaaagcatccaacagagt

SEQ ID NO: 1297813 - DNA, 25 bp, Homo sapien
ctgtagggacagaaaagcatccaac

SEQ ID NO: 1297814 - DNA, 25 bp, Homo sapien
gccagaactgggcatcagtataaaa

SEQ ID NO: 1297815 - DNA, 25 bp, Homo sapien
gtcacgtcctcatgcagcgcttcat

SEQ ID NO: 1297816 - DNA, 25 bp, Homo sapien
tgcagcgcttcatgccgttcccatt

SEQ ID NO: 1297817 - DNA, 25 bp, Homo sapien
gtggtccgctcctgcccggtcacgt

SEQ ID NO: 1297818 - DNA, 25 bp, Homo sapien
gccagcaaggacagggtagcacact

SEQ ID NO: 1297819 - DNA, 25 bp, Homo sapien
caaggacagggtagcacactgtact

SEQ ID NO: 1297820 - DNA, 25 bp, Homo sapien
ggacagggtagcacactgtactcac

SEQ ID NO: 1297821 - DNA, 25 bp, Homo sapien
agcaaggacagggtagcacactgta

SEQ ID NO: 1297822 - DNA, 25 bp, Homo sapien
atatctgccaggtaggttccttggg

SEQ ID NO: 1297823 - DNA, 25 bp, Homo sapien
gtatatctgccaggtaggttccttg

SEQ ID NO: 1297824 - DNA, 25 bp, Homo sapien
ctcatctgagtgagactcttcttcc

SEQ ID NO: 1297825 - DNA, 25 bp, Homo sapien
gctggtatatctgccaggtaggttc

SEQ ID NO: 1297826 - DNA, 25 bp, Homo sapien
catcagcactggtgggttcagctcc

SEQ ID NO: 1297827 - DNA, 25 bp, Homo sapien
gttcagctccggcagttgcttcagg

SEQ ID NO: 1297828 - DNA, 25 bp, Homo sapien
gcaggcccggatcaactccaaaaag

SEQ ID NO: 1297829 - DNA, 25 bp, Homo sapien
tcaaaaggcacattgccgtagcgcc

SEQ ID NO: 1297830 - DNA, 25 bp, Homo sapien
ttgaatgtgtgaactggagggctct

SEQ ID NO: 1297831 - DNA, 25 bp, Homo sapien
ccagctagtcacactaggtctagca

SEQ ID NO: 1297832 - DNA, 25 bp, Homo sapien
tctagcaatgtaagcatttgttgaa

SEQ ID NO: 1297833 - DNA, 25 bp, Homo sapien
cactaggtctagcaatgtaagcatt

SEQ ID NO: 1297834 - DNA, 25 bp, Homo sapien
ggcggcccgagtacatgcgaataag

SEQ ID NO: 1297835 - DNA, 25 bp, Homo sapien
gaataagcctctgagcttgagccaa

SEQ ID NO: 1297836 - DNA, 25 bp, Homo sapien
tagccgaagtctgcggatgagacag

SEQ ID NO: 1297837 - DNA, 25 bp, Homo sapien
tgatgcctccgtaggtagccgaagt

SEQ ID NO: 1297838 - DNA, 25 bp, Homo sapien
gggataccgctcactaccaggtaaa

SEQ ID NO: 1297839 - DNA, 25 bp, Homo sapien
ccggacatcggtggccgaagtctga

SEQ ID NO: 1297840 - DNA, 25 bp, Homo sapien
ccgcgctcttctcggaactggctaa

SEQ ID NO: 1297841 - DNA, 25 bp, Homo sapien
taaaatagctccgtaaatgggccga

SEQ ID NO: 1297842 - DNA, 25 bp, Homo sapien
ctgattggctgtgattgggctttca

SEQ ID NO: 1297843 - DNA, 25 bp, Homo sapien
acttgtctgtttcaattcgggagtg

SEQ ID NO: 1297844 - DNA, 25 bp, Homo sapien
tctgtttcaattcgggagtgggctg

SEQ ID NO: 1297845 - DNA, 25 bp, Homo sapien
gtttcaattcgggagtgggctgctt

SEQ ID NO: 1297846 - DNA, 25 bp, Homo sapien
ctgtgtccaaaccaaggaagtccaa

SEQ ID NO: 1297847 - DNA, 25 bp, Homo sapien
cagttctgtataaagtcgataggac

SEQ ID NO: 1297848 - DNA, 25 bp, Homo sapien
gcagcctaagctttcattctcatcc

SEQ ID NO: 1297849 - DNA, 25 bp, Homo sapien
caagtgctgtctatacaggcttgcc

SEQ ID NO: 1297850 - DNA, 25 bp, Homo sapien
atgtccccaagaaggccagcgatgt

SEQ ID NO: 1297851 - DNA, 25 bp, Homo sapien
tctccaatgatagggcgaaagaaga

SEQ ID NO: 1297852 - DNA, 25 bp, Homo sapien
ccaagcaggctggtcggaatggact

SEQ ID NO: 1297853 - DNA, 25 bp, Homo sapien
tgcccaatgtgggaggcggcttgga

SEQ ID NO: 1297854 - DNA, 25 bp, Homo sapien
cacccaggagtgtctgggagctcac

SEQ ID NO: 1297855 - DNA, 25 bp, Homo sapien
ccacccaggagtgtctgggagctca

SEQ ID NO: 1297856 - DNA, 25 bp, Homo sapien
gcatcttgggccaacccaagcagga

SEQ ID NO: 1297857 - DNA, 25 bp, Homo sapien
ctccagacagcattgaagccactgc

SEQ ID NO: 1297858 - DNA, 25 bp, Homo sapien
tgcgatgaggtgcacatagctggac

SEQ ID NO: 1297859 - DNA, 25 bp, Homo sapien
tgcctacataggcagcggctacggg

SEQ ID NO: 1297860 - DNA, 25 bp, Homo sapien
ggttagggatctgctctcacttcca

SEQ ID NO: 1297861 - DNA, 25 bp, Homo sapien
ttagggatctgctctcacttccagc

SEQ ID NO: 1297862 - DNA, 25 bp, Homo sapien
ggatctgctctcacttccagctctc

SEQ ID NO: 1297863 - DNA, 25 bp, Homo sapien
agggatctgctctcacttccagctc

SEQ ID NO: 1297864 - DNA, 25 bp, Homo sapien
cagtctggtccaacatagagcatat

SEQ ID NO: 1297865 - DNA, 25 bp, Homo sapien
tctggtccaacatagagcatatctg

SEQ ID NO: 1297866 - DNA, 25 bp, Homo sapien
ccaacatagagcatatctgtacaaa

SEQ ID NO: 1297867 - DNA, 25 bp, Homo sapien
ggtccaacatagagcatatctgtac

SEQ ID NO: 1297868 - DNA, 25 bp, Homo sapien
gagtcagggttcactcccagaaggt

SEQ ID NO: 1297869 - DNA, 25 bp, Homo sapien
tactttccatgatcaggccacctga

SEQ ID NO: 1297870 - DNA, 25 bp, Homo sapien
taacataacatagagtgggccctgc

SEQ ID NO: 1297871 - DNA, 25 bp, Homo sapien
ggccacctgaagaccatgagcagga

SEQ ID NO: 1297872 - DNA, 25 bp, Homo sapien
ttagcagtacacctggagcaagggt

SEQ ID NO: 1297873 - DNA, 25 bp, Homo sapien
agggtgcccccgacgagtctgtgtc

SEQ ID NO: 1297874 - DNA, 25 bp, Homo sapien
cctggaaggatgagtcatggcttgc

SEQ ID NO: 1297875 - DNA, 25 bp, Homo sapien
acgagtctgtgtcggtgccctggaa

SEQ ID NO: 1297876 - DNA, 25 bp, Homo sapien
tctgcagtcgtctcctgggagatct

SEQ ID NO: 1297877 - DNA, 25 bp, Homo sapien
gcctcagcttccgggcgatggcatc

SEQ ID NO: 1297878 - DNA, 25 bp, Homo sapien
gcttccgggcgatggcatctgcagt

SEQ ID NO: 1297879 - DNA, 25 bp, Homo sapien
atctgcagtcgtctcctgggagatc

SEQ ID NO: 1297880 - DNA, 25 bp, Homo sapien
taatgcgaatgatgccgcgtaccag

SEQ ID NO: 1297881 - DNA, 25 bp, Homo sapien
gaaagaatagtactcctcggagcca

SEQ ID NO: 1297882 - DNA, 25 bp, Homo sapien
cgtgatgctgctgataaggtccgag

SEQ ID NO: 1297883 - DNA, 25 bp, Homo sapien
tcatcgatctggtgtacgctgaaca

SEQ ID NO: 1297884 - DNA, 25 bp, Homo sapien
cagcagagccagagatgaaggtaat

SEQ ID NO: 1297885 - DNA, 25 bp, Homo sapien
cttcagcagtcccctcagtggagtc

SEQ ID NO: 1297886 - DNA, 25 bp, Homo sapien
cattgtgctccttggcccagttggc

SEQ ID NO: 1297887 - DNA, 25 bp, Homo sapien
tccacagcgctggaggcaatcccgg

SEQ ID NO: 1297888 - DNA, 25 bp, Homo sapien
tctgttggccgctcccacggtccca

SEQ ID NO: 1297889 - DNA, 25 bp, Homo sapien
gaggtggtttatcatatgtctccag

SEQ ID NO: 1297890 - DNA, 25 bp, Homo sapien
ctgaggtggtttatcatatgtctcc

SEQ ID NO: 1297891 - DNA, 25 bp, Homo sapien
cggtcccaagcgtggaggcccagat

SEQ ID NO: 1297892 - DNA, 25 bp, Homo sapien
ttgcatggtttgtagcagccaggca

SEQ ID NO: 1297893 - DNA, 25 bp, Homo sapien
tgcatggtttgtagcagccaggcac

SEQ ID NO: 1297894 - DNA, 25 bp, Homo sapien
cattgcatggtttgtagcagccagg

SEQ ID NO: 1297895 - DNA, 25 bp, Homo sapien
attgcatggtttgtagcagccaggc

SEQ ID NO: 1297896 - DNA, 25 bp, Homo sapien
tcccgccaggtgagccgcctccggc

SEQ ID NO: 1297897 - DNA, 25 bp, Homo sapien
cccgccaggtgagccgcctccggct

SEQ ID NO: 1297898 - DNA, 25 bp, Homo sapien
ctgtcccgccaggtgagccgcctcc

SEQ ID NO: 1297899 - DNA, 25 bp, Homo sapien
gccaggtgagccgcctccggctcag

SEQ ID NO: 1297900 - DNA, 25 bp, Homo sapien
gatgcagggatcctcctattaaatc

SEQ ID NO: 1297901 - DNA, 25 bp, Homo sapien
tgcagggatcctcctattaaatcta

SEQ ID NO: 1297902 - DNA, 25 bp, Homo sapien
aggatgcagggatcctcctattaaa

SEQ ID NO: 1297903 - DNA, 25 bp, Homo sapien
gcagggatcctcctattaaatctac

SEQ ID NO: 1297904 - DNA, 25 bp, Homo sapien
gtgcaccaggagtgaagttggtgcc

SEQ ID NO: 1297905 - DNA, 25 bp, Homo sapien
ggtgcaccaggagtgaagttggtgc

SEQ ID NO: 1297906 - DNA, 25 bp, Homo sapien
aggtgcaccaggagtgaagttggtg

SEQ ID NO: 1297907 - DNA, 25 bp, Homo sapien
tgttattggcagtagggtacagaga

SEQ ID NO: 1297908 - DNA, 25 bp, Homo sapien
gtaactgacagaaacctagtgttat

SEQ ID NO: 1297909 - DNA, 25 bp, Homo sapien
tagggtacagagaagattcaagggc

SEQ ID NO: 1297910 - DNA, 25 bp, Homo sapien
agactgctcgcaatgtttcctccaa

SEQ ID NO: 1297911 - DNA, 25 bp, Homo sapien
tctagttaaagtgaagcaccataga

SEQ ID NO: 1297912 - DNA, 25 bp, Homo sapien
tagttaaagtgaagcaccatagata

SEQ ID NO: 1297913 - DNA, 25 bp, Homo sapien
gttaaagtgaagcaccatagataaa

SEQ ID NO: 1297914 - DNA, 25 bp, Homo sapien
aaagtgaagcaccatagataaagct

SEQ ID NO: 1297915 - DNA, 25 bp, Homo sapien
cactttacttgatattatagttgag

SEQ ID NO: 1297916 - DNA, 25 bp, Homo sapien
gatattatagttgagatatagagta

SEQ ID NO: 1297917 - DNA, 25 bp, Homo sapien
aacttcattgacaagaaaaaatcca

SEQ ID NO: 1297918 - DNA, 25 bp, Homo sapien
caacatcgttggtacagcaataggt

SEQ ID NO: 1297919 - DNA, 25 bp, Homo sapien
gcatacagtcatggccgacagcatg

SEQ ID NO: 1297920 - DNA, 25 bp, Homo sapien
atgattcctccggtaatgaggaaga

SEQ ID NO: 1297921 - DNA, 25 bp, Homo sapien
tactcaatagaacacagacaaatcc

SEQ ID NO: 1297922 - DNA, 25 bp, Homo sapien
ttcctccggtaatgaggaagacacc

SEQ ID NO: 1297923 - DNA, 25 bp, Homo sapien
acaggacatggtacaaaatctccat

SEQ ID NO: 1297924 - DNA, 25 bp, Homo sapien
taagaacaggacatggtacaaaatc

SEQ ID NO: 1297925 - DNA, 25 bp, Homo sapien
ctaagaacaggacatggtacaaaat

SEQ ID NO: 1297926 - DNA, 25 bp, Homo sapien
gaacaggacatggtacaaaatctcc

SEQ ID NO: 1297927 - DNA, 25 bp, Homo sapien
agccgcagaccgccggtggggggcg

SEQ ID NO: 1297928 - DNA, 25 bp, Homo sapien
cggtcttagcggctggtgcgttcga

SEQ ID NO: 1297929 - DNA, 25 bp, Homo sapien
acaagcttcgccgaggtgccgaccg

SEQ ID NO: 1297930 - DNA, 25 bp, Homo sapien
gaaggactacggatccgcaggaaga

SEQ ID NO: 1297931 - DNA, 25 bp, Homo sapien
gactgatcgcggacgccggctggaa

SEQ ID NO: 1297932 - DNA, 25 bp, Homo sapien
tgtgagagccctgtaaccaagccag

SEQ ID NO: 1297933 - DNA, 25 bp, Homo sapien
tgggaacgttgacttgactgtggca

SEQ ID NO: 1297934 - DNA, 25 bp, Homo sapien
tatcaacaaacccaggggaatacgc

SEQ ID NO: 1297935 - DNA, 25 bp, Homo sapien
gggagtatggctcccctaccccatg

SEQ ID NO: 1297936 - DNA, 25 bp, Homo sapien
tagtggcccagcctgatccaaagtg

SEQ ID NO: 1297937 - DNA, 25 bp, Homo sapien
tatgtagttcagagaaccgggctaa

SEQ ID NO: 1297938 - DNA, 25 bp, Homo sapien
caaaaagaccctcttagaccatggg

SEQ ID NO: 1297939 - DNA, 25 bp, Homo sapien
caggctggccttagtcaaaaagacc

SEQ ID NO: 1297940 - DNA, 25 bp, Homo sapien
cctcgtgctcgggaaagtctggtct

SEQ ID NO: 1297941 - DNA, 25 bp, Homo sapien
gtctggtctgttcaatcaaaggccc

SEQ ID NO: 1297942 - DNA, 25 bp, Homo sapien
tgacttccaagacaaatggcgcctg

SEQ ID NO: 1297943 - DNA, 25 bp, Homo sapien
taaccaaagggtcctcctgctgaga

SEQ ID NO: 1297944 - DNA, 25 bp, Homo sapien
aggcgtgagccaggagaggttgcac

SEQ ID NO: 1297945 - DNA, 25 bp, Homo sapien
tcagttacaaggcagccaggtggga

SEQ ID NO: 1297946 - DNA, 25 bp, Homo sapien
caaggcagccaggtgggataggcgt

SEQ ID NO: 1297947 - DNA, 25 bp, Homo sapien
taggcgtgagccaggagaggttgca

SEQ ID NO: 1297948 - DNA, 25 bp, Homo sapien
acgtagtaattgacagtggctggca

SEQ ID NO: 1297949 - DNA, 25 bp, Homo sapien
tgaattcaaactggcgtctcaccga

SEQ ID NO: 1297950 - DNA, 25 bp, Homo sapien
caggaagtctagtaggcaggccagc

SEQ ID NO: 1297951 - DNA, 25 bp, Homo sapien
tggaaggatgcctcactgcgcaggt

SEQ ID NO: 1297952 - DNA, 25 bp, Homo sapien
taatagcacacatctgcatagaatt

SEQ ID NO: 1297953 - DNA, 25 bp, Homo sapien
aaggcaaacagctggtgaatgcaga

SEQ ID NO: 1297954 - DNA, 25 bp, Homo sapien
taaacagcaggtcacttaatcctca

SEQ ID NO: 1297955 - DNA, 25 bp, Homo sapien
gctgggaataaaactccgagtccaa

SEQ ID NO: 1297956 - DNA, 25 bp, Homo sapien
actgctagtaaaacagttctgtatc

SEQ ID NO: 1297957 - DNA, 25 bp, Homo sapien
caccgcgctcggtggtttaagtctt

SEQ ID NO: 1297958 - DNA, 25 bp, Homo sapien
tgtgctaactgctcaaacgtgttgg

SEQ ID NO: 1297959 - DNA, 25 bp, Homo sapien
taaccgtgctattctacctctcaaa

SEQ ID NO: 1297960 - DNA, 25 bp, Homo sapien
agccagccagtcgctgttgtctcct

SEQ ID NO: 1297961 - DNA, 25 bp, Homo sapien
taaatcccctgcgtcagggccatgg

SEQ ID NO: 1297962 - DNA, 25 bp, Homo sapien
aaatcccctgcgtcagggccatggg

SEQ ID NO: 1297963 - DNA, 25 bp, Homo sapien
gtcagccagccagtcgctgttgtct

SEQ ID NO: 1297964 - DNA, 25 bp, Homo sapien
ccttgcaggcagagacaaattcttc

SEQ ID NO: 1297965 - DNA, 25 bp, Homo sapien
cttgcaggcagagacaaattcttcc

SEQ ID NO: 1297966 - DNA, 25 bp, Homo sapien
tccttgcaggcagagacaaattctt

SEQ ID NO: 1297967 - DNA, 25 bp, Homo sapien
ccgcgcccgtgaatgggaatcggct

SEQ ID NO: 1297968 - DNA, 25 bp, Homo sapien
tcggctcgctcagaagagcgtccag

SEQ ID NO: 1297969 - DNA, 25 bp, Homo sapien
aatgggaatcggctcgctcagaaga

SEQ ID NO: 1297970 - DNA, 25 bp, Homo sapien
tcagaagagcgtccagtcgcttcac

SEQ ID NO: 1297971 - DNA, 25 bp, Homo sapien
ggggctgccgtggccaccgccgtgg

SEQ ID NO: 1297972 - DNA, 25 bp, Homo sapien
cccacctgagcagccgcccggtccc

SEQ ID NO: 1297973 - DNA, 25 bp, Homo sapien
gtggccgcagccgtccccacctgag

SEQ ID NO: 1297974 - DNA, 25 bp, Homo sapien
gcccactcaggtgccgtccggggaa

SEQ ID NO: 1297975 - DNA, 25 bp, Homo sapien
gaacacctcagacggcgacgactaa

SEQ ID NO: 1297976 - DNA, 25 bp, Homo sapien
ggcaacgacggcgagacaaagccag

SEQ ID NO: 1297977 - DNA, 25 bp, Homo sapien
acggcgagacaaagccagggaacac

SEQ ID NO: 1297978 - DNA, 25 bp, Homo sapien
ccagggaacacctcagacggcgacg

SEQ ID NO: 1297979 - DNA, 25 bp, Homo sapien
cagcggactcttataggccgcgggc

SEQ ID NO: 1297980 - DNA, 25 bp, Homo sapien
cgcggcccagcggactcttataggc

SEQ ID NO: 1297981 - DNA, 25 bp, Homo sapien
cggactcttataggccgcgggcgac

SEQ ID NO: 1297982 - DNA, 25 bp, Homo sapien
ggcccagcggactcttataggccgc

SEQ ID NO: 1297983 - DNA, 25 bp, Homo sapien
gctgccaacagcgagagccgccccg

SEQ ID NO: 1297984 - DNA, 25 bp, Homo sapien
gccccgcctctgaacgctccggaca

SEQ ID NO: 1297985 - DNA, 25 bp, Homo sapien
gccgctgccaacagcgagagccgcc

SEQ ID NO: 1297986 - DNA, 25 bp, Homo sapien
gcctctgaacgctccggacactggt

SEQ ID NO: 1297987 - DNA, 25 bp, Homo sapien
cagaaattgagtctatctgattcat

SEQ ID NO: 1297988 - DNA, 25 bp, Homo sapien
ttaaatattgttctcctgaccaggc

SEQ ID NO: 1297989 - DNA, 25 bp, Homo sapien
gagtctatctgattcattgctgcaa

SEQ ID NO: 1297990 - DNA, 25 bp, Homo sapien
tcttaaatattgttctcctgaccag

SEQ ID NO: 1297991 - DNA, 25 bp, Homo sapien
tacccttgaggacttcctgtcctgc

SEQ ID NO: 1297992 - DNA, 25 bp, Homo sapien
ctgttccaggacagtcccgttgcct

SEQ ID NO: 1297993 - DNA, 25 bp, Homo sapien
tgccaagttagggtacccttgagga

SEQ ID NO: 1297994 - DNA, 25 bp, Homo sapien
aggacagtcccgttgccttccacgg

SEQ ID NO: 1297995 - DNA, 25 bp, Homo sapien
tcctccttcacggtggggcttctcg

SEQ ID NO: 1297996 - DNA, 25 bp, Homo sapien
tcttcctccttcacggtggggcttc

SEQ ID NO: 1297997 - DNA, 25 bp, Homo sapien
cttcctccttcacggtggggcttct

SEQ ID NO: 1297998 - DNA, 25 bp, Homo sapien
ctccttcacggtggggcttctcggg

SEQ ID NO: 1297999 - DNA, 25 bp, Homo sapien
aggacttaacggaacacttcctgtg

SEQ ID NO: 1298000 - DNA, 25 bp, Homo sapien
tgacctggttcctgttcttagcatc

SEQ ID NO: 1298001 - DNA, 25 bp, Homo sapien
atgacctggttcctgttcttagcat

SEQ ID NO: 1298002 - DNA, 25 bp, Homo sapien
tcaggtagcagccattgctgagcag

SEQ ID NO: 1298003 - DNA, 25 bp, Homo sapien
gagcaggcaggccatcttagagctt

SEQ ID NO: 1298004 - DNA, 25 bp, Homo sapien
aaggatcaggatgaatcaggtagca

SEQ ID NO: 1298005 - DNA, 25 bp, Homo sapien
cttggccgactcctggaaggatcag

SEQ ID NO: 1298006 - DNA, 25 bp, Homo sapien
tgaggatgaattctgccatctcagg

SEQ ID NO: 1298007 - DNA, 25 bp, Homo sapien
tctgccatctcagggccccatccca

SEQ ID NO: 1298008 - DNA, 25 bp, Homo sapien
ctttgaggatgaattctgccatctc

SEQ ID NO: 1298009 - DNA, 25 bp, Homo sapien
ctgccatctcagggccccatcccat

SEQ ID NO: 1298010 - DNA, 25 bp, Homo sapien
ttagaaggcggagctccacagtcag

SEQ ID NO: 1298011 - DNA, 25 bp, Homo sapien
tctgaggagaagctttgccgtggcc

SEQ ID NO: 1298012 - DNA, 25 bp, Homo sapien
ccgtggccttttgcctttggatgct

SEQ ID NO: 1298013 - DNA, 25 bp, Homo sapien
ataaaacaaggaggacgtcttcaag

SEQ ID NO: 1298014 - DNA, 25 bp, Homo sapien
tgggtgaaaggcctgtccttcccac

SEQ ID NO: 1298015 - DNA, 25 bp, Homo sapien
tctgctgtgcagaattgctggtgga

SEQ ID NO: 1298016 - DNA, 25 bp, Homo sapien
ttctctgctgtgcagaattgctggt

SEQ ID NO: 1298017 - DNA, 25 bp, Homo sapien
cacagtggaagtggcctccattctc

SEQ ID NO: 1298018 - DNA, 25 bp, Homo sapien
cagcggctcattggggatgggccat

SEQ ID NO: 1298019 - DNA, 25 bp, Homo sapien
ccgggtctgtgtggatagaagtaga

SEQ ID NO: 1298020 - DNA, 25 bp, Homo sapien
tgtgcccagcggctcattggggatg

SEQ ID NO: 1298021 - DNA, 25 bp, Homo sapien
gatggttgccgggtctgtgtggata

SEQ ID NO: 1298022 - DNA, 25 bp, Homo sapien
gatgtcacccttgcatggtgactcc

SEQ ID NO: 1298023 - DNA, 25 bp, Homo sapien
cagctgcggtggcttggtacgtggt

SEQ ID NO: 1298024 - DNA, 25 bp, Homo sapien
ggcttggtacgtggttgtcgatgtc

SEQ ID NO: 1298025 - DNA, 25 bp, Homo sapien
tcctgcccaaacagcacttgcatgg

SEQ ID NO: 1298026 - DNA, 25 bp, Homo sapien
aaagggacactctgactattgcaca

SEQ ID NO: 1298027 - DNA, 25 bp, Homo sapien
aggattctgcccaatccaccagccc

SEQ ID NO: 1298028 - DNA, 25 bp, Homo sapien
gactattgcacaatcctgggggagt

SEQ ID NO: 1298029 - DNA, 25 bp, Homo sapien
tgcaaaaagggacactctgactatt

SEQ ID NO: 1298030 - DNA, 25 bp, Homo sapien
tcaggcccaagagctaggcaggtgc

SEQ ID NO: 1298031 - DNA, 25 bp, Homo sapien
ggagcgccctctgtgcaaacaatca

SEQ ID NO: 1298032 - DNA, 25 bp, Homo sapien
taaagcagggcctactcaagggagg

SEQ ID NO: 1298033 - DNA, 25 bp, Homo sapien
ttcgagcaacagttaagagcccagc

SEQ ID NO: 1298034 - DNA, 25 bp, Homo sapien
ggcagcgctgtatcctctgggagct

SEQ ID NO: 1298035 - DNA, 25 bp, Homo sapien
aggtccacagactcgggtgactgcg

SEQ ID NO: 1298036 - DNA, 25 bp, Homo sapien
tccttcggctcataggccagtgggt

SEQ ID NO: 1298037 - DNA, 25 bp, Homo sapien
gatggtgatgacaggcaggtcctcc

SEQ ID NO: 1298038 - DNA, 25 bp, Homo sapien
cgatgcgggcccgagacatggtggg

SEQ ID NO: 1298039 - DNA, 25 bp, Homo sapien
ctggcaccgtcaggtagttgttgat

SEQ ID NO: 1298040 - DNA, 25 bp, Homo sapien
tccagcttgtgggctggcaccgtca

SEQ ID NO: 1298041 - DNA, 25 bp, Homo sapien
ctgagccgatgcgggcccgagacat

SEQ ID NO: 1298042 - DNA, 25 bp, Homo sapien
gccaccagcgtgtgtctgttgtagg

SEQ ID NO: 1298043 - DNA, 25 bp, Homo sapien
caggcttcctcgtaggggtctgcca

SEQ ID NO: 1298044 - DNA, 25 bp, Homo sapien
tctgccaccagcgtgtgtctgttgt

SEQ ID NO: 1298045 - DNA, 25 bp, Homo sapien
ggccttctgcctccggagcagcatc

SEQ ID NO: 1298046 - DNA, 25 bp, Homo sapien
ttcctcaggattttgcggatctcct

SEQ ID NO: 1298047 - DNA, 25 bp, Homo sapien
tcctcaggattttgcggatctcctc

SEQ ID NO: 1298048 - DNA, 25 bp, Homo sapien
gttcctcaggattttgcggatctcc

SEQ ID NO: 1298049 - DNA, 25 bp, Homo sapien
cctcaggattttgcggatctcctcc

SEQ ID NO: 1298050 - DNA, 25 bp, Homo sapien
tctccatcttgtggtagaaggcaat

SEQ ID NO: 1298051 - DNA, 25 bp, Homo sapien
agctcgatggcctgcttcatctcca

SEQ ID NO: 1298052 - DNA, 25 bp, Homo sapien
acggcagaggggatcttgcccatgc

SEQ ID NO: 1298053 - DNA, 25 bp, Homo sapien
gctatcagacacttcttcacatatt

SEQ ID NO: 1298054 - DNA, 25 bp, Homo sapien
tggtgaccgtagtggccacagatgt

SEQ ID NO: 1298055 - DNA, 25 bp, Homo sapien
gccacagatgtcttcgatgcctgtc

SEQ ID NO: 1298056 - DNA, 25 bp, Homo sapien
tcgatgcctgtcagaaggtggtcca

SEQ ID NO: 1298057 - DNA, 25 bp, Homo sapien
ttgtccttccagtggtggtgaccgt

SEQ ID NO: 1298058 - DNA, 25 bp, Homo sapien
aggggcccagggccaagtcaagcct

SEQ ID NO: 1298059 - DNA, 25 bp, Homo sapien
ctgaaaggggcccagggccaagtca

SEQ ID NO: 1298060 - DNA, 25 bp, Homo sapien
gggcccagggccaagtcaagcctcg

SEQ ID NO: 1298061 - DNA, 25 bp, Homo sapien
tgaaaggggcccagggccaagtcaa

SEQ ID NO: 1298062 - DNA, 25 bp, Homo sapien
gccaacaggtctaccaggggccgaa

SEQ ID NO: 1298063 - DNA, 25 bp, Homo sapien
tgtgtgtggatctcttcgttgatgg

SEQ ID NO: 1298064 - DNA, 25 bp, Homo sapien
gatggagcgcttcgtctcttgcttt

SEQ ID NO: 1298065 - DNA, 25 bp, Homo sapien
tcttcgttgatggagcgcttcgtct

SEQ ID NO: 1298066 - DNA, 25 bp, Homo sapien
caggacccaagggtgtgagaactct

SEQ ID NO: 1298067 - DNA, 25 bp, Homo sapien
ggctaggatgccctctctgctctgc

SEQ ID NO: 1298068 - DNA, 25 bp, Homo sapien
gcaggtgtcaggcactccagttctg

SEQ ID NO: 1298069 - DNA, 25 bp, Homo sapien
ccccaaggctaggatgccctctctg

SEQ ID NO: 1298070 - DNA, 25 bp, Homo sapien
tatctaaagacaggtccttaaggcc

SEQ ID NO: 1298071 - DNA, 25 bp, Homo sapien
cttatctaaagacaggtccttaagg

SEQ ID NO: 1298072 - DNA, 25 bp, Homo sapien
gcacttatctaaagacaggtcctta

SEQ ID NO: 1298073 - DNA, 25 bp, Homo sapien
ccagcacttatctaaagacaggtcc

SEQ ID NO: 1298074 - DNA, 25 bp, Homo sapien
tgaggaggaccgagtaataacagca

SEQ ID NO: 1298075 - DNA, 25 bp, Homo sapien
gacacggtcagaggtttcactgcca

SEQ ID NO: 1298076 - DNA, 25 bp, Homo sapien
tccaatatccgcaacactaagaggg

SEQ ID NO: 1298077 - DNA, 25 bp, Homo sapien
tctgcaaccccatggaagtcaggcc

SEQ ID NO: 1298078 - DNA, 25 bp, Homo sapien
tgggaatcatctcgcctggttccct

SEQ ID NO: 1298079 - DNA, 25 bp, Homo sapien
taagcctgagccgtttaaatgtaca

SEQ ID NO: 1298080 - DNA, 25 bp, Homo sapien
agcaatttgcaccatcacaggctgg

SEQ ID NO: 1298081 - DNA, 25 bp, Homo sapien
caggcaaagtcaggtaaggcagagc

SEQ ID NO: 1298082 - DNA, 25 bp, Homo sapien
cttaatgctctatgagttccaaatt

SEQ ID NO: 1298083 - DNA, 25 bp, Homo sapien
aattaagttgggcagcattctggtt

SEQ ID NO: 1298084 - DNA, 25 bp, Homo sapien
ttctcttaatgctctatgagttcca

SEQ ID NO: 1298085 - DNA, 25 bp, Homo sapien
gtcactctgcaatgactcatcacaa

SEQ ID NO: 1298086 - DNA, 25 bp, Homo sapien
gcatttcaaatcacacgctttcctc

SEQ ID NO: 1298087 - DNA, 25 bp, Homo sapien
tagaatcgcatttcaaatcacacgc

SEQ ID NO: 1298088 - DNA, 25 bp, Homo sapien
gtggagctgggactagaatcgcatt

SEQ ID NO: 1298089 - DNA, 25 bp, Homo sapien
tttcctctctttccacgggaacagc

SEQ ID NO: 1298090 - DNA, 25 bp, Homo sapien
cagtgaggaacaggtcacacatggg

SEQ ID NO: 1298091 - DNA, 25 bp, Homo sapien
agagagaaggcgatggcccctcgca

SEQ ID NO: 1298092 - DNA, 25 bp, Homo sapien
ttgatgaaccaggtcaggcccagca

SEQ ID NO: 1298093 - DNA, 25 bp, Homo sapien
gggtcagcttcacgatacggaactt

SEQ ID NO: 1298094 - DNA, 25 bp, Homo sapien
agttccagtggtgggagccggccac

SEQ ID NO: 1298095 - DNA, 25 bp, Homo sapien
agcagggtgctgatgacgaaggtcc

SEQ ID NO: 1298096 - DNA, 25 bp, Homo sapien
ggccaccgtggagacgccgaggaag

SEQ ID NO: 1298097 - DNA, 25 bp, Homo sapien
agcacgcgggcgatgaggcagaaga

SEQ ID NO: 1298098 - DNA, 25 bp, Homo sapien
aagagcggctcgatgacccggatgt

SEQ ID NO: 1298099 - DNA, 25 bp, Homo sapien
caagtaggccatgtagctgtagagg

SEQ ID NO: 1298100 - DNA, 25 bp, Homo sapien
gcccacgtgttcgtagttggcaaac

SEQ ID NO: 1298101 - DNA, 25 bp, Homo sapien
gggccaccacgaagaagctcaggaa

SEQ ID NO: 1298102 - DNA, 25 bp, Homo sapien
ggttttctgtgaactgccgcagtgg

SEQ ID NO: 1298103 - DNA, 25 bp, Homo sapien
ggaagtagcccgcatccaggatgat

SEQ ID NO: 1298104 - DNA, 25 bp, Homo sapien
ggactccccaaaaacaaggatgtgc

SEQ ID NO: 1298105 - DNA, 25 bp, Homo sapien
gacggcgtcattgagcaaggactcc

SEQ ID NO: 1298106 - DNA, 25 bp, Homo sapien
ccttctccttcagccagctccagag

SEQ ID NO: 1298107 - DNA, 25 bp, Homo sapien
tctccttcagccagctccagagtac

SEQ ID NO: 1298108 - DNA, 25 bp, Homo sapien
ttctccttcagccagctccagagta

SEQ ID NO: 1298109 - DNA, 25 bp, Homo sapien
ctccttctccttcagccagctccag

SEQ ID NO: 1298110 - DNA, 25 bp, Homo sapien
ctgaaggagctctaggccctgatgg

SEQ ID NO: 1298111 - DNA, 25 bp, Homo sapien
gaaggagctctaggccctgatgggc

SEQ ID NO: 1298112 - DNA, 25 bp, Homo sapien
aggagctctaggccctgatgggctc

SEQ ID NO: 1298113 - DNA, 25 bp, Homo sapien
gctgaaggagctctaggccctgatg

SEQ ID NO: 1298114 - DNA, 25 bp, Homo sapien
gctccaggtaccagtttgccccaca

SEQ ID NO: 1298115 - DNA, 25 bp, Homo sapien
tggtatcaggtgctccaggtaccag

SEQ ID NO: 1298116 - DNA, 25 bp, Homo sapien
agatggtatcaggtgctccaggtac

SEQ ID NO: 1298117 - DNA, 25 bp, Homo sapien
ctccaggtaccagtttgccccacac

SEQ ID NO: 1298118 - DNA, 25 bp, Homo sapien
tccaggacaattgccctgcagaaag

SEQ ID NO: 1298119 - DNA, 25 bp, Homo sapien
tccagttgaaagtcagttagcttag

SEQ ID NO: 1298120 - DNA, 25 bp, Homo sapien
ttttcagcactacaaggaatgcggg

SEQ ID NO: 1298121 - DNA, 25 bp, Homo sapien
tgcagaaagcaagtcacagtgtcct

SEQ ID NO: 1298122 - DNA, 25 bp, Homo sapien
agctggacaaagtcgggctctgtga

SEQ ID NO: 1298123 - DNA, 25 bp, Homo sapien
ggacaaagtcgggctctgtgatact

SEQ ID NO: 1298124 - DNA, 25 bp, Homo sapien
tgtccatgccagcaactgtggcatc

SEQ ID NO: 1298125 - DNA, 25 bp, Homo sapien
ggcatctgggtacagaatagcattc

SEQ ID NO: 1298126 - DNA, 25 bp, Homo sapien
tccatgccagcaactgtggcatctg

SEQ ID NO: 1298127 - DNA, 25 bp, Homo sapien
tgggtacagaatagcattcgtgcca

SEQ ID NO: 1298128 - DNA, 25 bp, Homo sapien
tgggcatggctggtgcatacctgta

SEQ ID NO: 1298129 - DNA, 25 bp, Homo sapien
attagttgggcatggctggtgcata

SEQ ID NO: 1298130 - DNA, 25 bp, Homo sapien
agatcatgccaactgcactctatcc

SEQ ID NO: 1298131 - DNA, 25 bp, Homo sapien
tagttgggcatggctggtgcatacc

SEQ ID NO: 1298132 - DNA, 25 bp, Homo sapien
tgacgtggtagctaaacacccggga

SEQ ID NO: 1298133 - DNA, 25 bp, Homo sapien
cgtggtagctaaacacccgggagag

SEQ ID NO: 1298134 - DNA, 25 bp, Homo sapien
actgtgacgtggtagctaaacaccc

SEQ ID NO: 1298135 - DNA, 25 bp, Homo sapien
tggtagctaaacacccgggagagtg

SEQ ID NO: 1298136 - DNA, 25 bp, Homo sapien
cgtaccatggaaatcttatcatgcc

SEQ ID NO: 1298137 - DNA, 25 bp, Homo sapien
ggccccgtaccatggaaatcttatc

SEQ ID NO: 1298138 - DNA, 25 bp, Homo sapien
gaaatcttatcatgccaaatgcttc

SEQ ID NO: 1298139 - DNA, 25 bp, Homo sapien
catggaaatcttatcatgccaaatg

SEQ ID NO: 1298140 - DNA, 25 bp, Homo sapien
taaagtgcctttccactgtagcagg

SEQ ID NO: 1298141 - DNA, 25 bp, Homo sapien
gccctacagttaagaagtgagtcgg

SEQ ID NO: 1298142 - DNA, 25 bp, Homo sapien
tttctaaagtgcctttccactgtag

SEQ ID NO: 1298143 - DNA, 25 bp, Homo sapien
taagaagtgagtcggtcagagctga

SEQ ID NO: 1298144 - DNA, 25 bp, Homo sapien
caagaacaggtaagatcaactgatg

SEQ ID NO: 1298145 - DNA, 25 bp, Homo sapien
aacctctggtacatgtgacagtgaa

SEQ ID NO: 1298146 - DNA, 25 bp, Homo sapien
tgtattcatacgaggcaacaccgaa

SEQ ID NO: 1298147 - DNA, 25 bp, Homo sapien
ccagacacacaagagtacctatgat

SEQ ID NO: 1298148 - DNA, 25 bp, Homo sapien
attccctggcttgatggcaaagatg

SEQ ID NO: 1298149 - DNA, 25 bp, Homo sapien
ctggccaccggggagataagatctt

SEQ ID NO: 1298150 - DNA, 25 bp, Homo sapien
ggagataagatcttattccctggct

SEQ ID NO: 1298151 - DNA, 25 bp, Homo sapien
tattccctggcttgatggcaaagat

SEQ ID NO: 1298152 - DNA, 25 bp, Homo sapien
tataaaaagcacagcacccaagttc

SEQ ID NO: 1298153 - DNA, 25 bp, Homo sapien
gcacccaagttcaacattggcttgt

SEQ ID NO: 1298154 - DNA, 25 bp, Homo sapien
aagttcaacattggcttgtgatgga

SEQ ID NO: 1298155 - DNA, 25 bp, Homo sapien
gcacagcacccaagttcaacattgg

SEQ ID NO: 1298156 - DNA, 25 bp, Homo sapien
tatcggcatctaaagagacagtttg

SEQ ID NO: 1298157 - DNA, 25 bp, Homo sapien
cacacaggcgatggatgactcagga

SEQ ID NO: 1298158 - DNA, 25 bp, Homo sapien
taatcacgggctgctttaaagtatc

SEQ ID NO: 1298159 - DNA, 25 bp, Homo sapien
tggcctaatagaccccaaaatcggc

SEQ ID NO: 1298160 - DNA, 25 bp, Homo sapien
aggcagaggggacagcagagtccca

SEQ ID NO: 1298161 - DNA, 25 bp, Homo sapien
tcaggcagaggggacagcagagtcc

SEQ ID NO: 1298162 - DNA, 25 bp, Homo sapien
agaggggacagcagagtcccaggac

SEQ ID NO: 1298163 - DNA, 25 bp, Homo sapien
gcagaggggacagcagagtcccagg

SEQ ID NO: 1298164 - DNA, 25 bp, Homo sapien
gccttccacagccagctgggggcaa

SEQ ID NO: 1298165 - DNA, 25 bp, Homo sapien
catgccttccacagccagctggggg

SEQ ID NO: 1298166 - DNA, 25 bp, Homo sapien
ctcatgccttccacagccagctggg

SEQ ID NO: 1298167 - DNA, 25 bp, Homo sapien
ccttccacagccagctgggggcaag

SEQ ID NO: 1298168 - DNA, 25 bp, Homo sapien
taactagcctggacaagcaaagctg

SEQ ID NO: 1298169 - DNA, 25 bp, Homo sapien
tcctggacagcctcaaatggtgcga

SEQ ID NO: 1298170 - DNA, 25 bp, Homo sapien
tgttgacagagcagaatgtgccact

SEQ ID NO: 1298171 - DNA, 25 bp, Homo sapien
ttgggaagcctcagatcacagatca

SEQ ID NO: 1298172 - DNA, 25 bp, Homo sapien
cgtgtgtgtagtcgatgcccaggac

SEQ ID NO: 1298173 - DNA, 25 bp, Homo sapien
tgtgtgtagtcgatgcccaggactg

SEQ ID NO: 1298174 - DNA, 25 bp, Homo sapien
ctatcttcatgaggcaggccagaag

SEQ ID NO: 1298175 - DNA, 25 bp, Homo sapien
cacgtgtgtgtagtcgatgcccagg

SEQ ID NO: 1298176 - DNA, 25 bp, Homo sapien
cagtgacggaatgattaacagggcg

SEQ ID NO: 1298177 - DNA, 25 bp, Homo sapien
tgacctccggtggagcggtggtgac

SEQ ID NO: 1298178 - DNA, 25 bp, Homo sapien
gcttcatgccatgatcagtgacgga

SEQ ID NO: 1298179 - DNA, 25 bp, Homo sapien
cttgcgcggcttcatgccatgatca

SEQ ID NO: 1298180 - DNA, 25 bp, Homo sapien
agcgttctcgtggtggctctgagct

SEQ ID NO: 1298181 - DNA, 25 bp, Homo sapien
atccccaatcgagcgttctcgtggt

SEQ ID NO: 1298182 - DNA, 25 bp, Homo sapien
aggaagggaagatccgatgtggaga

SEQ ID NO: 1298183 - DNA, 25 bp, Homo sapien
ctgagcttcgaatggtgctggcagt

SEQ ID NO: 1298184 - DNA, 25 bp, Homo sapien
gaaactgagccctagggatagagga

SEQ ID NO: 1298185 - DNA, 25 bp, Homo sapien
gggtttgcaatctggaactccaaag

SEQ ID NO: 1298186 - DNA, 25 bp, Homo sapien
gcacataggtagcaaagggtcagca

SEQ ID NO: 1298187 - DNA, 25 bp, Homo sapien
ccaaatgagagtaaaaccgggcaca

SEQ ID NO: 1298188 - DNA, 25 bp, Homo sapien
aacgatttcacgtccacatctgcag

SEQ ID NO: 1298189 - DNA, 25 bp, Homo sapien
acatctgcagtctcataagggcttt

SEQ ID NO: 1298190 - DNA, 25 bp, Homo sapien
gtctcataagggctttcgaataatc

SEQ ID NO: 1298191 - DNA, 25 bp, Homo sapien
gatttcacgtccacatctgcagtct

SEQ ID NO: 1298192 - DNA, 25 bp, Homo sapien
gctcctttctgtcatatcaatcctc

SEQ ID NO: 1298193 - DNA, 25 bp, Homo sapien
tggccaaaaacttgagtcatccttg

SEQ ID NO: 1298194 - DNA, 25 bp, Homo sapien
tccccacccagattattgtttcaac

SEQ ID NO: 1298195 - DNA, 25 bp, Homo sapien
cattgcccactctggtccaagcagt

SEQ ID NO: 1298196 - DNA, 25 bp, Homo sapien
ctccagatctatgttttgtggctct

SEQ ID NO: 1298197 - DNA, 25 bp, Homo sapien
tgcctccagatctatgttttgtggc

SEQ ID NO: 1298198 - DNA, 25 bp, Homo sapien
gctgcctccagatctatgttttgtg

SEQ ID NO: 1298199 - DNA, 25 bp, Homo sapien
cctccagatctatgttttgtggctc

SEQ ID NO: 1298200 - DNA, 25 bp, Homo sapien
gatgagactcataccgcttgaactt

SEQ ID NO: 1298201 - DNA, 25 bp, Homo sapien
ggatgagactcataccgcttgaact

SEQ ID NO: 1298202 - DNA, 25 bp, Homo sapien
ctctcccgaaggatggctctggtta

SEQ ID NO: 1298203 - DNA, 25 bp, Homo sapien
tctcccgaaggatggctctggttaa

SEQ ID NO: 1298204 - DNA, 25 bp, Homo sapien
tcttggcttgctccaatgccagctc

SEQ ID NO: 1298205 - DNA, 25 bp, Homo sapien
aggattccttcattcgatcaatcac

SEQ ID NO: 1298206 - DNA, 25 bp, Homo sapien
ttggcttgctccaatgccagctcct

SEQ ID NO: 1298207 - DNA, 25 bp, Homo sapien
agaggattccttcattcgatcaatc

SEQ ID NO: 1298208 - DNA, 25 bp, Homo sapien
attctcgtccgcctcgaaggtgacc

SEQ ID NO: 1298209 - DNA, 25 bp, Homo sapien
atgttctcattctcgtccgcctcga

SEQ ID NO: 1298210 - DNA, 25 bp, Homo sapien
tctcattctcgtccgcctcgaaggt

SEQ ID NO: 1298211 - DNA, 25 bp, Homo sapien
cctcgaaggtgacccggcgggtgct

SEQ ID NO: 1298212 - DNA, 25 bp, Homo sapien
ggaaagcggtctgcccctggaggtg

SEQ ID NO: 1298213 - DNA, 25 bp, Homo sapien
tgcccctggaggtggtagcaaggtt

SEQ ID NO: 1298214 - DNA, 25 bp, Homo sapien
ccctggaggtggtagcaaggttcca

SEQ ID NO: 1298215 - DNA, 25 bp, Homo sapien
agtatatctggaaagcggtctgccc

SEQ ID NO: 1298216 - DNA, 25 bp, Homo sapien
aagtgcagaaggttatggtacagcc

SEQ ID NO: 1298217 - DNA, 25 bp, Homo sapien
tgcagaaggttatggtacagcccat

SEQ ID NO: 1298218 - DNA, 25 bp, Homo sapien
agggccagaaagtgcagaaggttat

SEQ ID NO: 1298219 - DNA, 25 bp, Homo sapien
gaaagtgcagaaggttatggtacag

SEQ ID NO: 1298220 - DNA, 25 bp, Homo sapien
agccattctggaagcggccgggcgc

SEQ ID NO: 1298221 - DNA, 25 bp, Homo sapien
gaggcggagactgcgtggcgcaggc

SEQ ID NO: 1298222 - DNA, 25 bp, Homo sapien
ggcgcaggcgcgttgctgggcttct

SEQ ID NO: 1298223 - DNA, 25 bp, Homo sapien
gccgggcgcagtcttcgtagcgtac

SEQ ID NO: 1298224 - DNA, 25 bp, Homo sapien
ccaggcctcgccggggcggagggca

SEQ ID NO: 1298225 - DNA, 25 bp, Homo sapien
tcaaagggtaaataggaagtgagga

SEQ ID NO: 1298226 - DNA, 25 bp, Homo sapien
caaagggtaaataggaagtgaggag

SEQ ID NO: 1298227 - DNA, 25 bp, Homo sapien
aggatccacttcttggactgaaagc

SEQ ID NO: 1298228 - DNA, 25 bp, Homo sapien
tctcctctgcgggtgtactcccagg

SEQ ID NO: 1298229 - DNA, 25 bp, Homo sapien
gattggttgactttgcttggtggct

SEQ ID NO: 1298230 - DNA, 25 bp, Homo sapien
aagccgcagtgggacgcccctttgc

SEQ ID NO: 1298231 - DNA, 25 bp, Homo sapien
ccttttccgtcatagtttgtgatca

SEQ ID NO: 1298232 - DNA, 25 bp, Homo sapien
aaatgaccttttccgtcatagtttg

SEQ ID NO: 1298233 - DNA, 25 bp, Homo sapien
tatttcgttggcaggtgggaaatga

SEQ ID NO: 1298234 - DNA, 25 bp, Homo sapien
tttcttcattgtaggttgttgtatt

SEQ ID NO: 1298235 - DNA, 25 bp, Homo sapien
gtatctttaggctgccattgcagat

SEQ ID NO: 1298236 - DNA, 25 bp, Homo sapien
tgtatctttaggctgccattgcaga

SEQ ID NO: 1298237 - DNA, 25 bp, Homo sapien
taggttgtctgttaatgatacactt

SEQ ID NO: 1298238 - DNA, 25 bp, Homo sapien
tataggttgtctgttaatgatacac

SEQ ID NO: 1298239 - DNA, 25 bp, Homo sapien
gttgtctgttaatgatacactttaa

SEQ ID NO: 1298240 - DNA, 25 bp, Homo sapien
ggttgtctgttaatgatacacttta

SEQ ID NO: 1298241 - DNA, 25 bp, Homo sapien
tcagggtatattgttaactgtgctc

SEQ ID NO: 1298242 - DNA, 25 bp, Homo sapien
catgttaaaggttacttgtgcccag

SEQ ID NO: 1298243 - DNA, 25 bp, Homo sapien
gcttcaagtatgcaaatcagggtat

SEQ ID NO: 1298244 - DNA, 25 bp, Homo sapien
aatgagccattaatgttattagagc

SEQ ID NO: 1298245 - DNA, 25 bp, Homo sapien
gaattgtggtttcctgcttgtctgg

SEQ ID NO: 1298246 - DNA, 25 bp, Homo sapien
attgtggtttcctgcttgtctggtt

SEQ ID NO: 1298247 - DNA, 25 bp, Homo sapien
tgtggtttcctgcttgtctggtttc

SEQ ID NO: 1298248 - DNA, 25 bp, Homo sapien
tggtttcctgcttgtctggtttctc

SEQ ID NO: 1298249 - DNA, 25 bp, Homo sapien
ggagttcaatatgtaactgtgaata

SEQ ID NO: 1298250 - DNA, 25 bp, Homo sapien
tcaattgagataacttggtaccttt

SEQ ID NO: 1298251 - DNA, 25 bp, Homo sapien
gataacttggtacctttggaccagc

SEQ ID NO: 1298252 - DNA, 25 bp, Homo sapien
cagtagtgacaagaggggaaacagt

SEQ ID NO: 1298253 - DNA, 25 bp, Homo sapien
tacactggatgcagcgatcaaccca

SEQ ID NO: 1298254 - DNA, 25 bp, Homo sapien
atgctgagccgccacaaagaccaaa

SEQ ID NO: 1298255 - DNA, 25 bp, Homo sapien
gagccactcagatgggaaagtccct

SEQ ID NO: 1298256 - DNA, 25 bp, Homo sapien
ccccaagctttacactggatgcagc

SEQ ID NO: 1298257 - DNA, 25 bp, Homo sapien
aataatgggtgtatgttcacaagca

SEQ ID NO: 1298258 - DNA, 25 bp, Homo sapien
caagaagtgtctactgaaaaaggaa

SEQ ID NO: 1298259 - DNA, 25 bp, Homo sapien
ctctagaactttgttcttatagacc

SEQ ID NO: 1298260 - DNA, 25 bp, Homo sapien
cttacccattcccttattgtacata

SEQ ID NO: 1298261 - DNA, 25 bp, Homo sapien
ggcgctcccactactaaacagcatg

SEQ ID NO: 1298262 - DNA, 25 bp, Homo sapien
aggcgctcccactactaaacagcat

SEQ ID NO: 1298263 - DNA, 25 bp, Homo sapien
cagtcagttctaccacagattccac

SEQ ID NO: 1298264 - DNA, 25 bp, Homo sapien
cttggacttcacgtaaacagagtgc

SEQ ID NO: 1298265 - DNA, 25 bp, Homo sapien
tcacccttatgtctgtgaaagcctg

SEQ ID NO: 1298266 - DNA, 25 bp, Homo sapien
taccaaacggtgtgcgaatctcaag

SEQ ID NO: 1298267 - DNA, 25 bp, Homo sapien
caagtgccagagtaaccgtgtagac

SEQ ID NO: 1298268 - DNA, 25 bp, Homo sapien
gcctggtctttaacctccggtgatg

SEQ ID NO: 1298269 - DNA, 25 bp, Homo sapien
ccgtgtagacagagcagtgtagaca

SEQ ID NO: 1298270 - DNA, 25 bp, Homo sapien
aaggctttggcttcccgctgtagag

SEQ ID NO: 1298271 - DNA, 25 bp, Homo sapien
catggtgtacgatggctttgggcct

SEQ ID NO: 1298272 - DNA, 25 bp, Homo sapien
tgtgttcaatcacaccatggtgtac

SEQ ID NO: 1298273 - DNA, 25 bp, Homo sapien
tgacctgcgccaggcttgtgccgag

SEQ ID NO: 1298274 - DNA, 25 bp, Homo sapien
gtacaagggttgtgcgacgcagcct

SEQ ID NO: 1298275 - DNA, 25 bp, Homo sapien
gctatgccacaaagcgagatgctat

SEQ ID NO: 1298276 - DNA, 25 bp, Homo sapien
gtgagctatgccacaaagcgagatg

SEQ ID NO: 1298277 - DNA, 25 bp, Homo sapien
ctatgccacaaagcgagatgctatt

SEQ ID NO: 1298278 - DNA, 25 bp, Homo sapien
gagctatgccacaaagcgagatgct

SEQ ID NO: 1298279 - DNA, 25 bp, Homo sapien
ctttgtctggtagtgcttgggtgcc

SEQ ID NO: 1298280 - DNA, 25 bp, Homo sapien
tttaatacgctttgtctggtagtgc

SEQ ID NO: 1298281 - DNA, 25 bp, Homo sapien
tacgctttgtctggtagtgcttggg

SEQ ID NO: 1298282 - DNA, 25 bp, Homo sapien
gttctgtttaatacgctttgtctgg

SEQ ID NO: 1298283 - DNA, 25 bp, Homo sapien
ggcttcctccagtcgccccaggtcc

SEQ ID NO: 1298284 - DNA, 25 bp, Homo sapien
cgccccaggtcctggggctggtgtg

SEQ ID NO: 1298285 - DNA, 25 bp, Homo sapien
gtcgccccaggtcctggggctggtg

SEQ ID NO: 1298286 - DNA, 25 bp, Homo sapien
ctggcttcctccagtcgccccaggt

SEQ ID NO: 1298287 - DNA, 25 bp, Homo sapien
cctttgtcctctccattcatccatc

SEQ ID NO: 1298288 - DNA, 25 bp, Homo sapien
agaagctgcctttgtcctctccatt

SEQ ID NO: 1298289 - DNA, 25 bp, Homo sapien
tgcctttgtcctctccattcatcca

SEQ ID NO: 1298290 - DNA, 25 bp, Homo sapien
tcagaagctgcctttgtcctctcca

SEQ ID NO: 1298291 - DNA, 25 bp, Homo sapien
tctggcctatgatgccctcattcag

SEQ ID NO: 1298292 - DNA, 25 bp, Homo sapien
gtctggcctatgatgccctcattca

SEQ ID NO: 1298293 - DNA, 25 bp, Homo sapien
ggcctgtctggcctatgatgccctc

SEQ ID NO: 1298294 - DNA, 25 bp, Homo sapien
cttgggcctgtctggcctatgatgc

SEQ ID NO: 1298295 - DNA, 25 bp, Homo sapien
ctggtgtggatcctgctcgctgtgc

SEQ ID NO: 1298296 - DNA, 25 bp, Homo sapien
tggccctccagatgcggcataccat

SEQ ID NO: 1298297 - DNA, 25 bp, Homo sapien
gatcctgctcgctgtgccaagatgg

SEQ ID NO: 1298298 - DNA, 25 bp, Homo sapien
gctgtgccaagatggccctccagat

SEQ ID NO: 1298299 - DNA, 25 bp, Homo sapien
tggccaggatgaggccatatgcatg

SEQ ID NO: 1298300 - DNA, 25 bp, Homo sapien
gaaggaacctaggcaggcctgcagt

SEQ ID NO: 1298301 - DNA, 25 bp, Homo sapien
gggtaatggactcagtgtggctcag

SEQ ID NO: 1298302 - DNA, 25 bp, Homo sapien
gccatatgcatggttcacacttggg

SEQ ID NO: 1298303 - DNA, 25 bp, Homo sapien
tggagggtgaagctatggttcaaca

SEQ ID NO: 1298304 - DNA, 25 bp, Homo sapien
tgtagatgaggtcatctcgagtggc

SEQ ID NO: 1298305 - DNA, 25 bp, Homo sapien
tagatgaggtcatctcgagtggcat

SEQ ID NO: 1298306 - DNA, 25 bp, Homo sapien
atgaggtcatctcgagtggcatagg

SEQ ID NO: 1298307 - DNA, 25 bp, Homo sapien
accaggccctggtccgttgaaagag

SEQ ID NO: 1298308 - DNA, 25 bp, Homo sapien
caggccctggtccgttgaaagagca

SEQ ID NO: 1298309 - DNA, 25 bp, Homo sapien
ccaggccctggtccgttgaaagagc

SEQ ID NO: 1298310 - DNA, 25 bp, Homo sapien
aggccctggtccgttgaaagagcag

SEQ ID NO: 1298311 - DNA, 25 bp, Homo sapien
cttccccgccaggatttcgcgcagc

SEQ ID NO: 1298312 - DNA, 25 bp, Homo sapien
attcagccgctgtagagcccgctgc

SEQ ID NO: 1298313 - DNA, 25 bp, Homo sapien
gggcttcctcattcagccgctgtag

SEQ ID NO: 1298314 - DNA, 25 bp, Homo sapien
ggccaggacataggtccgggcttcc

SEQ ID NO: 1298315 - DNA, 25 bp, Homo sapien
gctccaccggaagcgggctctgctg

SEQ ID NO: 1298316 - DNA, 25 bp, Homo sapien
caagaggctcagctgcaccatcaga

SEQ ID NO: 1298317 - DNA, 25 bp, Homo sapien
tgggagtccccttcattactcagct

SEQ ID NO: 1298318 - DNA, 25 bp, Homo sapien
tcaagaggctcagctgcaccatcag

SEQ ID NO: 1298319 - DNA, 25 bp, Homo sapien
ctcggtgagaccgcctccttctcca

SEQ ID NO: 1298320 - DNA, 25 bp, Homo sapien
agatgtccatttagtcacgccccca

SEQ ID NO: 1298321 - DNA, 25 bp, Homo sapien
tcaggcaaggctacaacgcccgttt

SEQ ID NO: 1298322 - DNA, 25 bp, Homo sapien
ggcggtgccggtatgggagatgtcc

SEQ ID NO: 1298323 - DNA, 25 bp, Homo sapien
cccattcgatgttcaccgcgcccag

SEQ ID NO: 1298324 - DNA, 25 bp, Homo sapien
ggaggcccgtggcattcccctccta

SEQ ID NO: 1298325 - DNA, 25 bp, Homo sapien
gaggcccgtggcattcccctcctac

SEQ ID NO: 1298326 - DNA, 25 bp, Homo sapien
aggaggcccgtggcattcccctcct

SEQ ID NO: 1298327 - DNA, 25 bp, Homo sapien
agcagtgagtccagaacgaacatcc

SEQ ID NO: 1298328 - DNA, 25 bp, Homo sapien
gatctggcgcttgcggaggatctgc

SEQ ID NO: 1298329 - DNA, 25 bp, Homo sapien
agggctgcccgcacagcacggctga

SEQ ID NO: 1298330 - DNA, 25 bp, Homo sapien
cgaacatccagtgtggacggatctg

SEQ ID NO: 1298331 - DNA, 25 bp, Homo sapien
ggagggaggcgccgctgagacagct

SEQ ID NO: 1298332 - DNA, 25 bp, Homo sapien
cagggggagggaggcgccgctgaga

SEQ ID NO: 1298333 - DNA, 25 bp, Homo sapien
agggggagggaggcgccgctgagac

SEQ ID NO: 1298334 - DNA, 25 bp, Homo sapien
ggggagggaggcgccgctgagacag

SEQ ID NO: 1298335 - DNA, 25 bp, Homo sapien
taggactgggcagacggttttttgc

SEQ ID NO: 1298336 - DNA, 25 bp, Homo sapien
gggcagctctaactaccagaaggcg

SEQ ID NO: 1298337 - DNA, 25 bp, Homo sapien
gaactcactacctgttgttgggcag

SEQ ID NO: 1298338 - DNA, 25 bp, Homo sapien
gctgcaggcctgatcttcacagagg

SEQ ID NO: 1298339 - DNA, 25 bp, Homo sapien
gggaaggcaaacagcggtctgtgca

SEQ ID NO: 1298340 - DNA, 25 bp, Homo sapien
tccgggaaggcaaacagcggtctgt

SEQ ID NO: 1298341 - DNA, 25 bp, Homo sapien
cagcggtctgtgcagaagcgcaggc

SEQ ID NO: 1298342 - DNA, 25 bp, Homo sapien
agcggtctgtgcagaagcgcaggcc

SEQ ID NO: 1298343 - DNA, 25 bp, Homo sapien
agtgtggatgtgtgccccgaggcag

SEQ ID NO: 1298344 - DNA, 25 bp, Homo sapien
tcctgggcgagctgccggcggttgg

SEQ ID NO: 1298345 - DNA, 25 bp, Homo sapien
cagctcctgggcgagctgccggcgg

SEQ ID NO: 1298346 - DNA, 25 bp, Homo sapien
ccggcggttgggagtgtggatgtgt

SEQ ID NO: 1298347 - DNA, 25 bp, Homo sapien
tcctggtgcagattctccgccagcg

SEQ ID NO: 1298348 - DNA, 25 bp, Homo sapien
gaactctcctccggagacgcaggct

SEQ ID NO: 1298349 - DNA, 25 bp, Homo sapien
tgcggccagcatggcccgacgcttg

SEQ ID NO: 1298350 - DNA, 25 bp, Homo sapien
tgctccaatactgcggccagcatgg

SEQ ID NO: 1298351 - DNA, 25 bp, Homo sapien
attgaggacgggcagcaaccggcca

SEQ ID NO: 1298352 - DNA, 25 bp, Homo sapien
cacaagggcgagctgctgattgagg

SEQ ID NO: 1298353 - DNA, 25 bp, Homo sapien
ctgctgattgaggacgggcagcaac

SEQ ID NO: 1298354 - DNA, 25 bp, Homo sapien
ggacgggcagcaaccggccagtcac

SEQ ID NO: 1298355 - DNA, 25 bp, Homo sapien
ctgagggcacgggaatgtctgagac

SEQ ID NO: 1298356 - DNA, 25 bp, Homo sapien
ggtgcctgagggcacgggaatgtct

SEQ ID NO: 1298357 - DNA, 25 bp, Homo sapien
agggcacgggaatgtctgagactgg

SEQ ID NO: 1298358 - DNA, 25 bp, Homo sapien
tgcctgagggcacgggaatgtctga

SEQ ID NO: 1298359 - DNA, 25 bp, Homo sapien
ggagtgggactggcagaaggggcat

SEQ ID NO: 1298360 - DNA, 25 bp, Homo sapien
tgaaggagtgggactggcagaaggg

SEQ ID NO: 1298361 - DNA, 25 bp, Homo sapien
aaggagtgggactggcagaaggggc

SEQ ID NO: 1298362 - DNA, 25 bp, Homo sapien
ctgaaggagtgggactggcagaagg

SEQ ID NO: 1298363 - DNA, 25 bp, Homo sapien
ctgagggccgtggagcatgtcgtgg

SEQ ID NO: 1298364 - DNA, 25 bp, Homo sapien
tgggcctcggccgacagagagctgg

SEQ ID NO: 1298365 - DNA, 25 bp, Homo sapien
gagctgggcattggcggatggacct

SEQ ID NO: 1298366 - DNA, 25 bp, Homo sapien
aaaggcttgggcctcggccgacaga

SEQ ID NO: 1298367 - DNA, 25 bp, Homo sapien
agcctgtgggctcccgagctcgtgg

SEQ ID NO: 1298368 - DNA, 25 bp, Homo sapien
atctcaatgacagtgcagcccagtg

SEQ ID NO: 1298369 - DNA, 25 bp, Homo sapien
gatttctggggccatatactgcaga

SEQ ID NO: 1298370 - DNA, 25 bp, Homo sapien
tgtgggctcccgagctcgtggaagg

SEQ ID NO: 1298371 - DNA, 25 bp, Homo sapien
cagaaatcttgagcagcccactgaa

SEQ ID NO: 1298372 - DNA, 25 bp, Homo sapien
ttggaggtgccgaagtcagaaatct

SEQ ID NO: 1298373 - DNA, 25 bp, Homo sapien
tgatgcctgccagccgcttggaggt

SEQ ID NO: 1298374 - DNA, 25 bp, Homo sapien
aaggtgttgatcagcacattgtccc

SEQ ID NO: 1298375 - DNA, 25 bp, Homo sapien
gtagaaactgatggtgctctcgttg

SEQ ID NO: 1298376 - DNA, 25 bp, Homo sapien
actgatggtgctctcgttgtccttc

SEQ ID NO: 1298377 - DNA, 25 bp, Homo sapien
tgtcgtgcaagtagccaagtccctg

SEQ ID NO: 1298378 - DNA, 25 bp, Homo sapien
tccctgtgcacgatgtggttgtcgt

SEQ ID NO: 1298379 - DNA, 25 bp, Homo sapien
gatagcgcactatgttcttgtggcg

SEQ ID NO: 1298380 - DNA, 25 bp, Homo sapien
cgccctggctagctgagcccagata

SEQ ID NO: 1298381 - DNA, 25 bp, Homo sapien
tgaagagcgatctcttcatgcaggg

SEQ ID NO: 1298382 - DNA, 25 bp, Homo sapien
gaagatcttaaggtagccgccctgg

SEQ ID NO: 1298383 - DNA, 25 bp, Homo sapien
gatgcgcaccctcgtgtggcgatcg

SEQ ID NO: 1298384 - DNA, 25 bp, Homo sapien
tgtggcgatcgcggcccgcgtacac

SEQ ID NO: 1298385 - DNA, 25 bp, Homo sapien
gcccgtctccgtgtactcataatca

SEQ ID NO: 1298386 - DNA, 25 bp, Homo sapien
gggatctccttgatggcgatgcgca

SEQ ID NO: 1298387 - DNA, 25 bp, Homo sapien
cgtggaatccgggttcgtcacccag

SEQ ID NO: 1298388 - DNA, 25 bp, Homo sapien
ggcgccgtggaatccgggttcgtca

SEQ ID NO: 1298389 - DNA, 25 bp, Homo sapien
gcgccgtggaatccgggttcgtcac

SEQ ID NO: 1298390 - DNA, 25 bp, Homo sapien
tcagagtaccccgaccatgaaaggc

SEQ ID NO: 1298391 - DNA, 25 bp, Homo sapien
ctaagccggagcatccaacggacgt

SEQ ID NO: 1298392 - DNA, 25 bp, Homo sapien
gagcatccaacggacgtcgtccctt

SEQ ID NO: 1298393 - DNA, 25 bp, Homo sapien
agtaccccgaccatgaaaggctgcg

SEQ ID NO: 1298394 - DNA, 25 bp, Homo sapien
ccggggggagtgcatagaggaagca

SEQ ID NO: 1298395 - DNA, 25 bp, Homo sapien
cagctggacgtcctgagccgggggg

SEQ ID NO: 1298396 - DNA, 25 bp, Homo sapien
gaagcagcagcgctcgtcgcgcttt

SEQ ID NO: 1298397 - DNA, 25 bp, Homo sapien
cagtgccctacgctggggaagcaca

SEQ ID NO: 1298398 - DNA, 25 bp, Homo sapien
tatggaggcgactgggaaggtccag

SEQ ID NO: 1298399 - DNA, 25 bp, Homo sapien
ctccgcatatggaggcgactgggaa

SEQ ID NO: 1298400 - DNA, 25 bp, Homo sapien
catatggaggcgactgggaaggtcc

SEQ ID NO: 1298401 - DNA, 25 bp, Homo sapien
ctgactccgcatatggaggcgactg

SEQ ID NO: 1298402 - DNA, 25 bp, Homo sapien
cccgaacctcgagctttgcaggcag

SEQ ID NO: 1298403 - DNA, 25 bp, Homo sapien
tcagtaccccgaacctcgagctttg

SEQ ID NO: 1298404 - DNA, 25 bp, Homo sapien
tgggtcagtaccccgaacctcgagc

SEQ ID NO: 1298405 - DNA, 25 bp, Homo sapien
taccccgaacctcgagctttgcagg

SEQ ID NO: 1298406 - DNA, 25 bp, Homo sapien
aggtctccatcacggacaccaggta

SEQ ID NO: 1298407 - DNA, 25 bp, Homo sapien
atggttggcaggactgtagcaagaa

SEQ ID NO: 1298408 - DNA, 25 bp, Homo sapien
agaagtggagccagaagtgggcacg

SEQ ID NO: 1298409 - DNA, 25 bp, Homo sapien
ctggcgtgggcctgaagtgctggta

SEQ ID NO: 1298410 - DNA, 25 bp, Homo sapien
gggctcccaggtagaaacccacatc

SEQ ID NO: 1298411 - DNA, 25 bp, Homo sapien
ttgagcttatacagctgctctgcag

SEQ ID NO: 1298412 - DNA, 25 bp, Homo sapien
cacatcccagtaatactgcatcttc

SEQ ID NO: 1298413 - DNA, 25 bp, Homo sapien
gtcattggcgaggatctgggctccc

SEQ ID NO: 1298414 - DNA, 25 bp, Homo sapien
tgaaggctgggctctacgtcaaaag

SEQ ID NO: 1298415 - DNA, 25 bp, Homo sapien
gaatcctcaaagtgctgcccggcag

SEQ ID NO: 1298416 - DNA, 25 bp, Homo sapien
gaggagcacagctgcattgatgcct

SEQ ID NO: 1298417 - DNA, 25 bp, Homo sapien
tattagccggagctctttggaatcc

SEQ ID NO: 1298418 - DNA, 25 bp, Homo sapien
tggaaacccgagctgaagaacatgt

SEQ ID NO: 1298419 - DNA, 25 bp, Homo sapien
gagccctcaagctgtaccagcggca

SEQ ID NO: 1298420 - DNA, 25 bp, Homo sapien
acacatgcagtacagatcgggcgcc

SEQ ID NO: 1298421 - DNA, 25 bp, Homo sapien
tccttgtagatacggccacacatgc

SEQ ID NO: 1298422 - DNA, 25 bp, Homo sapien
gacattatgctgctcggccacatca

SEQ ID NO: 1298423 - DNA, 25 bp, Homo sapien
ggaagcagacattatgctgctcggc

SEQ ID NO: 1298424 - DNA, 25 bp, Homo sapien
ccagctcaatgatggccgagtagtc

SEQ ID NO: 1298425 - DNA, 25 bp, Homo sapien
tgagggcaaaagtgtagtggaagca

SEQ ID NO: 1298426 - DNA, 25 bp, Homo sapien
ctgcacatcgcggtaggagagcagc

SEQ ID NO: 1298427 - DNA, 25 bp, Homo sapien
tgcacatcgcggtaggagagcagca

SEQ ID NO: 1298428 - DNA, 25 bp, Homo sapien
acatcgcggtaggagagcagcaagt

SEQ ID NO: 1298429 - DNA, 25 bp, Homo sapien
atcgcggtaggagagcagcaagttc

SEQ ID NO: 1298430 - DNA, 25 bp, Homo sapien
gccgaatggtctcccggaaatagcc

SEQ ID NO: 1298431 - DNA, 25 bp, Homo sapien
ctgcaggcgagccagctcctgccgc

SEQ ID NO: 1298432 - DNA, 25 bp, Homo sapien
cctgccggatgtcccgccgaatggt

SEQ ID NO: 1298433 - DNA, 25 bp, Homo sapien
gctgtccagtctccgctgcaggcga

SEQ ID NO: 1298434 - DNA, 25 bp, Homo sapien
gaccagtggccgtcaccacataggg

SEQ ID NO: 1298435 - DNA, 25 bp, Homo sapien
tcagtgtgtagctgccaacgcaatc

SEQ ID NO: 1298436 - DNA, 25 bp, Homo sapien
agcagggcctcggtccccactccag

SEQ ID NO: 1298437 - DNA, 25 bp, Homo sapien
ccacataggggatcagtgtgtagct

SEQ ID NO: 1298438 - DNA, 25 bp, Homo sapien
ggtgttctgtgtaggccttacccca

SEQ ID NO: 1298439 - DNA, 25 bp, Homo sapien
tggtgttctgtgtaggccttacccc

SEQ ID NO: 1298440 - DNA, 25 bp, Homo sapien
gtgttctgtgtaggccttaccccag

SEQ ID NO: 1298441 - DNA, 25 bp, Homo sapien
gggagcagaggagcacattgttggt

SEQ ID NO: 1298442 - DNA, 25 bp, Homo sapien
gagcagaggagcacattgttggtca

SEQ ID NO: 1298443 - DNA, 25 bp, Homo sapien
ggtcagggaggtcggcctgggagca

SEQ ID NO: 1298444 - DNA, 25 bp, Homo sapien
cagggcctgcaggtcagggaggtcg

SEQ ID NO: 1298445 - DNA, 25 bp, Homo sapien
gagggctgtaccagcgagctgctca

SEQ ID NO: 1298446 - DNA, 25 bp, Homo sapien
ggctgtaccagcgagctgctcacct

SEQ ID NO: 1298447 - DNA, 25 bp, Homo sapien
gaagctctcacgcacaccaaggtgg

SEQ ID NO: 1298448 - DNA, 25 bp, Homo sapien
agctctcacgcacaccaaggtggta

SEQ ID NO: 1298449 - DNA, 25 bp, Homo sapien
agggggtggcgctgatccctgaagc

SEQ ID NO: 1298450 - DNA, 25 bp, Homo sapien
ggcacagagggggtggcgctgatcc

SEQ ID NO: 1298451 - DNA, 25 bp, Homo sapien
cagagggggtggcgctgatccctga

SEQ ID NO: 1298452 - DNA, 25 bp, Homo sapien
cacagagggggtggcgctgatccct

SEQ ID NO: 1298453 - DNA, 25 bp, Homo sapien
gtgacagcgtctgctagggcctgca

SEQ ID NO: 1298454 - DNA, 25 bp, Homo sapien
tgacagcgtctgctagggcctgcat

SEQ ID NO: 1298455 - DNA, 25 bp, Homo sapien
gtgtgacagcgtctgctagggcctg

SEQ ID NO: 1298456 - DNA, 25 bp, Homo sapien
tgtgacagcgtctgctagggcctgc

SEQ ID NO: 1298457 - DNA, 25 bp, Homo sapien
acatgtatgcgatttgtgtctgtcg

SEQ ID NO: 1298458 - DNA, 25 bp, Homo sapien
gtgtctgtcgataattgtatctttg

SEQ ID NO: 1298459 - DNA, 25 bp, Homo sapien
tgtatctttgtgtccgagtggtcgg

SEQ ID NO: 1298460 - DNA, 25 bp, Homo sapien
tgtccgagtggtcgggtcagccttc

SEQ ID NO: 1298461 - DNA, 25 bp, Homo sapien
tccagagccgcggtgtcgcctagct

SEQ ID NO: 1298462 - DNA, 25 bp, Homo sapien
acgtagaccacgctgagcggccggc

SEQ ID NO: 1298463 - DNA, 25 bp, Homo sapien
tgcggctcccgggtcagcacgtaga

SEQ ID NO: 1298464 - DNA, 25 bp, Homo sapien
ccgcgttgtagaaggcatccagagc

SEQ ID NO: 1298465 - DNA, 25 bp, Homo sapien
gcgcggggcgccgcgcactgggaac

SEQ ID NO: 1298466 - DNA, 25 bp, Homo sapien
gggggcgctcaggcgcggggcgccg

SEQ ID NO: 1298467 - DNA, 25 bp, Homo sapien
cggggcgccgcgcactgggaaccgg

SEQ ID NO: 1298468 - DNA, 25 bp, Homo sapien
gcgccgcgcactgggaaccgggggc

SEQ ID NO: 1298469 - DNA, 25 bp, Homo sapien
tagggatccggaatacggcctgacg

SEQ ID NO: 1298470 - DNA, 25 bp, Homo sapien
tgaaatccgggattgggtcccagga

SEQ ID NO: 1298471 - DNA, 25 bp, Homo sapien
gagaatctcccacgggatctaggga

SEQ ID NO: 1298472 - DNA, 25 bp, Homo sapien
gaaatcctagctcggacttgcaagg

SEQ ID NO: 1298473 - DNA, 25 bp, Homo sapien
ttgacttctaggcagaacgtggcca

SEQ ID NO: 1298474 - DNA, 25 bp, Homo sapien
tgacttctaggcagaacgtggccat

SEQ ID NO: 1298475 - DNA, 25 bp, Homo sapien
ctttgacttctaggcagaacgtggc

SEQ ID NO: 1298476 - DNA, 25 bp, Homo sapien
tttgacttctaggcagaacgtggcc

SEQ ID NO: 1298477 - DNA, 25 bp, Homo sapien
tgacgatccggaagctgtacaggag

SEQ ID NO: 1298478 - DNA, 25 bp, Homo sapien
ggagagataagggcactggctgcca

SEQ ID NO: 1298479 - DNA, 25 bp, Homo sapien
gcaaaggcaaggtggctgacgatcc

SEQ ID NO: 1298480 - DNA, 25 bp, Homo sapien
tttaaatgtggacaggcaagcagag

SEQ ID NO: 1298481 - DNA, 25 bp, Homo sapien
tatcgaagcatcatccgaaccctgc

SEQ ID NO: 1298482 - DNA, 25 bp, Homo sapien
ctatcgaagcatcatccgaaccctg

SEQ ID NO: 1298483 - DNA, 25 bp, Homo sapien
tcataggtggtaaagggcctcccac

SEQ ID NO: 1298484 - DNA, 25 bp, Homo sapien
aatgccatatttgtgggcggcagcc

SEQ ID NO: 1298485 - DNA, 25 bp, Homo sapien
taacaggatgcataccaccaggcac

SEQ ID NO: 1298486 - DNA, 25 bp, Homo sapien
cagacactgcatagcgaccattgag

SEQ ID NO: 1298487 - DNA, 25 bp, Homo sapien
caggattgccctgggtcattcatgg

SEQ ID NO: 1298488 - DNA, 25 bp, Homo sapien
cactgggaaaggatccagcctcctt

SEQ ID NO: 1298489 - DNA, 25 bp, Homo sapien
tgggaaaggatccagcctccttcct

SEQ ID NO: 1298490 - DNA, 25 bp, Homo sapien
aggagacaggattgccctgggtcat

SEQ ID NO: 1298491 - DNA, 25 bp, Homo sapien
gccagctggtagtggtctacctcac

SEQ ID NO: 1298492 - DNA, 25 bp, Homo sapien
tgccagctggtagtggtctacctca

SEQ ID NO: 1298493 - DNA, 25 bp, Homo sapien
gcatagtgggcgaaagtacggttac

SEQ ID NO: 1298494 - DNA, 25 bp, Homo sapien
cggttaccattaaagtcttccagct

SEQ ID NO: 1298495 - DNA, 25 bp, Homo sapien
cgaggaggcggaaggtcgcatagtg

SEQ ID NO: 1298496 - DNA, 25 bp, Homo sapien
accattaaagtcttccagctctacc

SEQ ID NO: 1298497 - DNA, 25 bp, Homo sapien
cagaattcagactcttggttcccaa

SEQ ID NO: 1298498 - DNA, 25 bp, Homo sapien
ctgctctgtaggaggaccaagagcg

SEQ ID NO: 1298499 - DNA, 25 bp, Homo sapien
gaccaagagcggaagaaatccacag

SEQ ID NO: 1298500 - DNA, 25 bp, Homo sapien
cagaaccatcctggcgcctctgaaa

SEQ ID NO: 1298501 - DNA, 25 bp, Homo sapien
cagatggtaccagccgctcaaggtg

SEQ ID NO: 1298502 - DNA, 25 bp, Homo sapien
tgtcacaaaagactgggagggccct

SEQ ID NO: 1298503 - DNA, 25 bp, Homo sapien
aacagctcccggcagtttctggggc

SEQ ID NO: 1298504 - DNA, 25 bp, Homo sapien
tgccctcaggtaggcacagatggta

SEQ ID NO: 1298505 - DNA, 25 bp, Homo sapien
acaccatgtgatcccaagttcctgg

SEQ ID NO: 1298506 - DNA, 25 bp, Homo sapien
cttggccacacttgggggtctgcca

SEQ ID NO: 1298507 - DNA, 25 bp, Homo sapien
ggtggtgcccaggttattccctgac

SEQ ID NO: 1298508 - DNA, 25 bp, Homo sapien
gggtctgccaacacccaacaccatg

SEQ ID NO: 1298509 - DNA, 25 bp, Homo sapien
caccggagcaggttcactggatctc

SEQ ID NO: 1298510 - DNA, 25 bp, Homo sapien
gcaccggagcaggttcactggatct

SEQ ID NO: 1298511 - DNA, 25 bp, Homo sapien
cagccttccataccctgtaggaggg

SEQ ID NO: 1298512 - DNA, 25 bp, Homo sapien
tgagccaccagtggagccggtaccc

SEQ ID NO: 1298513 - DNA, 25 bp, Homo sapien
gagtgttggctctgatgtctcagca

SEQ ID NO: 1298514 - DNA, 25 bp, Homo sapien
ctcccagccttccataccctgtagg

SEQ ID NO: 1298515 - DNA, 25 bp, Homo sapien
cttgaggacctggggctcccttctc

SEQ ID NO: 1298516 - DNA, 25 bp, Homo sapien
tgaggacctggggctcccttctccc

SEQ ID NO: 1298517 - DNA, 25 bp, Homo sapien
ttgaggacctggggctcccttctcc

SEQ ID NO: 1298518 - DNA, 25 bp, Homo sapien
ttcctggagctccgggacaactggg

SEQ ID NO: 1298519 - DNA, 25 bp, Homo sapien
ggagggcaggatccacagtagatcc

SEQ ID NO: 1298520 - DNA, 25 bp, Homo sapien
agggcaggatccacagtagatccat

SEQ ID NO: 1298521 - DNA, 25 bp, Homo sapien
gagggcaggatccacagtagatcca

SEQ ID NO: 1298522 - DNA, 25 bp, Homo sapien
agggagggcaggatccacagtagat

SEQ ID NO: 1298523 - DNA, 25 bp, Homo sapien
ccaggaatggctgcgtggagtccct

SEQ ID NO: 1298524 - DNA, 25 bp, Homo sapien
gcagagacctaacttttggaggccg

SEQ ID NO: 1298525 - DNA, 25 bp, Homo sapien
taaaactcgcagctacatgcctggc

SEQ ID NO: 1298526 - DNA, 25 bp, Homo sapien
catgggcgatgttaccgtcagggaa

SEQ ID NO: 1298527 - DNA, 25 bp, Homo sapien
attagaggcgtgtgctaccacgccc

SEQ ID NO: 1298528 - DNA, 25 bp, Homo sapien
cctttcccctcaggatggagtccag

SEQ ID NO: 1298529 - DNA, 25 bp, Homo sapien
gcttacccacaagggtgcccagagg

SEQ ID NO: 1298530 - DNA, 25 bp, Homo sapien
ggagccaaaaactggcggccagagt

SEQ ID NO: 1298531 - DNA, 25 bp, Homo sapien
ggcaggcatacaacccactgtcagg

SEQ ID NO: 1298532 - DNA, 25 bp, Homo sapien
tgggctggcacctactggttctctt

SEQ ID NO: 1298533 - DNA, 25 bp, Homo sapien
ggaaacaccccaactggaggagaca

SEQ ID NO: 1298534 - DNA, 25 bp, Homo sapien
gagcaaaacccaactagacacaagg

SEQ ID NO: 1298535 - DNA, 25 bp, Homo sapien
gtggctcacatggagcacgctgtca

SEQ ID NO: 1298536 - DNA, 25 bp, Homo sapien
aaagctggccccgtcaaatccaggg

SEQ ID NO: 1298537 - DNA, 25 bp, Homo sapien
tggccccgtcaaatccagggctgtg

SEQ ID NO: 1298538 - DNA, 25 bp, Homo sapien
agcacgacacctccgataaagctgg

SEQ ID NO: 1298539 - DNA, 25 bp, Homo sapien
agtgcagcacaaagaaagccaccgc

SEQ ID NO: 1298540 - DNA, 25 bp, Homo sapien
gttgtgactgtcttcggttcatagg

SEQ ID NO: 1298541 - DNA, 25 bp, Homo sapien
cttcggttcataggtggggtggtgg

SEQ ID NO: 1298542 - DNA, 25 bp, Homo sapien
tgttgtgactgtcttcggttcatag

SEQ ID NO: 1298543 - DNA, 25 bp, Homo sapien
tgtgactgtcttcggttcataggtg

SEQ ID NO: 1298544 - DNA, 25 bp, Homo sapien
acaggtgatccatagcaaagcagcc

SEQ ID NO: 1298545 - DNA, 25 bp, Homo sapien
tgagcaaaatccaccgcctgagaga

SEQ ID NO: 1298546 - DNA, 25 bp, Homo sapien
gggagacccatgcaacttggcttag

SEQ ID NO: 1298547 - DNA, 25 bp, Homo sapien
taaacttccgattcagatgcagccc

SEQ ID NO: 1298548 - DNA, 25 bp, Homo sapien
tgtagatggagcaaccttccttgac

SEQ ID NO: 1298549 - DNA, 25 bp, Homo sapien
ctggacatgcctctgagcggttgta

SEQ ID NO: 1298550 - DNA, 25 bp, Homo sapien
cttgaccacctcagattgggccaca

SEQ ID NO: 1298551 - DNA, 25 bp, Homo sapien
cctctgagcggttgtagatggagca

SEQ ID NO: 1298552 - DNA, 25 bp, Homo sapien
tccacgcagtgctcacagacctcca

SEQ ID NO: 1298553 - DNA, 25 bp, Homo sapien
agagattgcgcgctctgtctccctc

SEQ ID NO: 1298554 - DNA, 25 bp, Homo sapien
tggaccgccggccagatattcaggc

SEQ ID NO: 1298555 - DNA, 25 bp, Homo sapien
gatattcaggcggatcagggctccc

SEQ ID NO: 1298556 - DNA, 25 bp, Homo sapien
gcagcaacagccgccacagagcgca

SEQ ID NO: 1298557 - DNA, 25 bp, Homo sapien
cacagagcgcagtccgcaaggcgcg

SEQ ID NO: 1298558 - DNA, 25 bp, Homo sapien
agccgccacagagcgcagtccgcaa

SEQ ID NO: 1298559 - DNA, 25 bp, Homo sapien
agcaacagccgccacagagcgcagt

SEQ ID NO: 1298560 - DNA, 25 bp, Homo sapien
tggccgggatcggtggacagctgcc

SEQ ID NO: 1298561 - DNA, 25 bp, Homo sapien
ccgggcgcgtccctcccagactggg

SEQ ID NO: 1298562 - DNA, 25 bp, Homo sapien
cgtccctcccagactgggctcggct

SEQ ID NO: 1298563 - DNA, 25 bp, Homo sapien
ggcggtggccgggatcggtggacag

SEQ ID NO: 1298564 - DNA, 25 bp, Homo sapien
cagagtcaggcccaaaatccaggtg

SEQ ID NO: 1298565 - DNA, 25 bp, Homo sapien
gcttgggcccaagtgctcgagtgct

SEQ ID NO: 1298566 - DNA, 25 bp, Homo sapien
tgacccggcgaagggtaagcattcc

SEQ ID NO: 1298567 - DNA, 25 bp, Homo sapien
cagagacctagagattcaggcggaa

SEQ ID NO: 1298568 - DNA, 25 bp, Homo sapien
agtggggcacaaatgtggtatacac

SEQ ID NO: 1298569 - DNA, 25 bp, Homo sapien
ctggcagggaagcaaatgagaccag

SEQ ID NO: 1298570 - DNA, 25 bp, Homo sapien
tgcatatgcataagtggagcccaga

SEQ ID NO: 1298571 - DNA, 25 bp, Homo sapien
tgggcgccacgggaagagatttcac

SEQ ID NO: 1298572 - DNA, 25 bp, Homo sapien
catagcacatcgaaaccctaggagg

SEQ ID NO: 1298573 - DNA, 25 bp, Homo sapien
aatacaactgagaaagctctgcccg

SEQ ID NO: 1298574 - DNA, 25 bp, Homo sapien
catagagatcgcttagcaaaaggca

SEQ ID NO: 1298575 - DNA, 25 bp, Homo sapien
gaatatggctcctaagggaagcccc

SEQ ID NO: 1298576 - DNA, 25 bp, Homo sapien
tatgcaacaggcacttgaaggaaag

SEQ ID NO: 1298577 - DNA, 25 bp, Homo sapien
gagggaacatcccagctactgaacc

SEQ ID NO: 1298578 - DNA, 25 bp, Homo sapien
acaacatcccgcttctcttgttccc

SEQ ID NO: 1298579 - DNA, 25 bp, Homo sapien
taatcggaccagtcgtcctcatcaa

SEQ ID NO: 1298580 - DNA, 25 bp, Homo sapien
ttaatcggaccagtcgtcctcatca

SEQ ID NO: 1298581 - DNA, 25 bp, Homo sapien
aatcggaccagtcgtcctcatcaaa

SEQ ID NO: 1298582 - DNA, 25 bp, Homo sapien
aattagccgggcgtggtggcaggcg

SEQ ID NO: 1298583 - DNA, 25 bp, Homo sapien
cctgtagtaccagctactccggagg

SEQ ID NO: 1298584 - DNA, 25 bp, Homo sapien
catcctggctaacaaagtaaaactc

SEQ ID NO: 1298585 - DNA, 25 bp, Homo sapien
tccatctctactaaaaatacaaaaa

SEQ ID NO: 1298586 - DNA, 25 bp, Homo sapien
tcgctacgggcatcgctcacggcag

SEQ ID NO: 1298587 - DNA, 25 bp, Homo sapien
acgggcatcgctcacggcaggcaag

SEQ ID NO: 1298588 - DNA, 25 bp, Homo sapien
gcaggtcgctacgggcatcgctcac

SEQ ID NO: 1298589 - DNA, 25 bp, Homo sapien
ggtcgctacgggcatcgctcacggc

SEQ ID NO: 1298590 - DNA, 25 bp, Homo sapien
ggcgtccctggagacccaaatccta

SEQ ID NO: 1298591 - DNA, 25 bp, Homo sapien
gtgggatgcctatcattggaggcgg

SEQ ID NO: 1298592 - DNA, 25 bp, Homo sapien
gaggcgtccctggagacccaaatcc

SEQ ID NO: 1298593 - DNA, 25 bp, Homo sapien
tggtggaggtgggatgcctatcatt

SEQ ID NO: 1298594 - DNA, 25 bp, Homo sapien
tcatttatcaggcatcagaaaggac

SEQ ID NO: 1298595 - DNA, 25 bp, Homo sapien
tgacacagcagtgaaactaaccaga

SEQ ID NO: 1298596 - DNA, 25 bp, Homo sapien
ggattaatggtttctagggccaaga

SEQ ID NO: 1298597 - DNA, 25 bp, Homo sapien
tatgctaggttcctagacaactggg

SEQ ID NO: 1298598 - DNA, 25 bp, Homo sapien
tggcggatagctacttgcatccacg

SEQ ID NO: 1298599 - DNA, 25 bp, Homo sapien
aggcaagttgtcctcggagaaggaa

SEQ ID NO: 1298600 - DNA, 25 bp, Homo sapien
cacgttttcaacacagccaatgctg

SEQ ID NO: 1298601 - DNA, 25 bp, Homo sapien
cattctggtacaccaaagtgggtgg

SEQ ID NO: 1298602 - DNA, 25 bp, Homo sapien
tttctttggactccacaaattcttg

SEQ ID NO: 1298603 - DNA, 25 bp, Homo sapien
tctttggactccacaaattcttgcc

SEQ ID NO: 1298604 - DNA, 25 bp, Homo sapien
tttggactccacaaattcttgcccc

SEQ ID NO: 1298605 - DNA, 25 bp, Homo sapien
ccagaagtccccagcttttctttgg

SEQ ID NO: 1298606 - DNA, 25 bp, Homo sapien
tgggtttacattccctcgatttgga

SEQ ID NO: 1298607 - DNA, 25 bp, Homo sapien
cctcgatttggattatctttctttt

SEQ ID NO: 1298608 - DNA, 25 bp, Homo sapien
tgtcttgattttacgtgggtttaca

SEQ ID NO: 1298609 - DNA, 25 bp, Homo sapien
cgtgggtttacattccctcgatttg

SEQ ID NO: 1298610 - DNA, 25 bp, Homo sapien
ctgtgtagaatttgagtgcctcttt

SEQ ID NO: 1298611 - DNA, 25 bp, Homo sapien
tccttccaaagatcaaagaagtatg

SEQ ID NO: 1298612 - DNA, 25 bp, Homo sapien
tttgagtgcctcttttccatcgtcc

SEQ ID NO: 1298613 - DNA, 25 bp, Homo sapien
gatatccttggtgtcctgcagcatc

SEQ ID NO: 1298614 - DNA, 25 bp, Homo sapien
caagtacaggtgatagcagcaggga

SEQ ID NO: 1298615 - DNA, 25 bp, Homo sapien
tctgatgatctgcatggccacagag

SEQ ID NO: 1298616 - DNA, 25 bp, Homo sapien
tcggatttcctggtacatcagaggg

SEQ ID NO: 1298617 - DNA, 25 bp, Homo sapien
gaatggcacctctctacttatcaga

SEQ ID NO: 1298618 - DNA, 25 bp, Homo sapien
ttctaagacaggcactgggagagag

SEQ ID NO: 1298619 - DNA, 25 bp, Homo sapien
tcaaaaagcttctggtcttgaatgg

SEQ ID NO: 1298620 - DNA, 25 bp, Homo sapien
gtatcacaggtattgtatgtttcta

SEQ ID NO: 1298621 - DNA, 25 bp, Homo sapien
tctgaaggcttttcgggtgttgatt

SEQ ID NO: 1298622 - DNA, 25 bp, Homo sapien
agagaagatggaaggcgttagaaaa

SEQ ID NO: 1298623 - DNA, 25 bp, Homo sapien
agatggaaggcgttagaaaatggac

SEQ ID NO: 1298624 - DNA, 25 bp, Homo sapien
tggaaggcgttagaaaatggacgac

SEQ ID NO: 1298625 - DNA, 25 bp, Homo sapien
aaggcgttagaaaatggacgacagg

SEQ ID NO: 1298626 - DNA, 25 bp, Homo sapien
tgactttaacctgtagtcggtcgac

SEQ ID NO: 1298627 - DNA, 25 bp, Homo sapien
ctgagtgactttaacctgtagtcgg

SEQ ID NO: 1298628 - DNA, 25 bp, Homo sapien
aacctgtagtcggtcgaccctctca

SEQ ID NO: 1298629 - DNA, 25 bp, Homo sapien
ctgtagtcggtcgaccctctcagca

SEQ ID NO: 1298630 - DNA, 25 bp, Homo sapien
tctcaggaaccaagtgaaaagctga

SEQ ID NO: 1298631 - DNA, 25 bp, Homo sapien
ctttcaaagtctgctctaggttaca

SEQ ID NO: 1298632 - DNA, 25 bp, Homo sapien
catgcccggcttgtaacctataact

SEQ ID NO: 1298633 - DNA, 25 bp, Homo sapien
aatccttcaaatctacatctcagga

SEQ ID NO: 1298634 - DNA, 25 bp, Homo sapien
caccacctaatctcataggattact

SEQ ID NO: 1298635 - DNA, 25 bp, Homo sapien
taatctcataggattactgagaaga

SEQ ID NO: 1298636 - DNA, 25 bp, Homo sapien
cacctaatctcataggattactgag

SEQ ID NO: 1298637 - DNA, 25 bp, Homo sapien
ataccaccacctaatctcataggat

SEQ ID NO: 1298638 - DNA, 25 bp, Homo sapien
tgagggcaaagcacaggctctctga

SEQ ID NO: 1298639 - DNA, 25 bp, Homo sapien
cctgagggcaaagcacaggctctct

SEQ ID NO: 1298640 - DNA, 25 bp, Homo sapien
gacccctgagggcaaagcacaggct

SEQ ID NO: 1298641 - DNA, 25 bp, Homo sapien
cccctgagggcaaagcacaggctct

SEQ ID NO: 1298642 - DNA, 25 bp, Homo sapien
aggctgcccagctgtcggatgacat

SEQ ID NO: 1298643 - DNA, 25 bp, Homo sapien
cacaggtgccttggctcgatgttcc

SEQ ID NO: 1298644 - DNA, 25 bp, Homo sapien
gctcgcttctaacgctaggcaacgt

SEQ ID NO: 1298645 - DNA, 25 bp, Homo sapien
taggcaacgtctgacggcacaggtg

SEQ ID NO: 1298646 - DNA, 25 bp, Homo sapien
ggacctgcttcaggcaatgttctga

SEQ ID NO: 1298647 - DNA, 25 bp, Homo sapien
aaccacaaattccaggcacactagg

SEQ ID NO: 1298648 - DNA, 25 bp, Homo sapien
ccacaaattccaggcacactagggc

SEQ ID NO: 1298649 - DNA, 25 bp, Homo sapien
accacaaattccaggcacactaggg

SEQ ID NO: 1298650 - DNA, 25 bp, Homo sapien
caaggaggcatggttagaaaacagc

SEQ ID NO: 1298651 - DNA, 25 bp, Homo sapien
gacagatcagattctaggccaccaa

SEQ ID NO: 1298652 - DNA, 25 bp, Homo sapien
tgtatagctaaccactaggccgggc

SEQ ID NO: 1298653 - DNA, 25 bp, Homo sapien
tggacggtacagatcctatccctgg

SEQ ID NO: 1298654 - DNA, 25 bp, Homo sapien
gcccagcctatcatggaatactttt

SEQ ID NO: 1298655 - DNA, 25 bp, Homo sapien
tcacctttggtcagtataaagttaa

SEQ ID NO: 1298656 - DNA, 25 bp, Homo sapien
tatatcacctttggtcagtataaag

SEQ ID NO: 1298657 - DNA, 25 bp, Homo sapien
aggcatacagcaccatgcccactaa

SEQ ID NO: 1298658 - DNA, 25 bp, Homo sapien
gtttattactagctgttcatgacaa

SEQ ID NO: 1298659 - DNA, 25 bp, Homo sapien
gagccaaggtcactgataacacctg

SEQ ID NO: 1298660 - DNA, 25 bp, Homo sapien
gctatagcaataaccatcacaacag

SEQ ID NO: 1298661 - DNA, 25 bp, Homo sapien
aaatgcttctcaaggcagttcctct

SEQ ID NO: 1298662 - DNA, 25 bp, Homo sapien
cagggtccctgagaatcgctttaag

SEQ ID NO: 1298663 - DNA, 25 bp, Homo sapien
tcccagcctcagataacatgtgcag

SEQ ID NO: 1298664 - DNA, 25 bp, Homo sapien
gtacacaagtgccatcaaattccag

SEQ ID NO: 1298665 - DNA, 25 bp, Homo sapien
gttttcaaacagctaggcattaggg

SEQ ID NO: 1298666 - DNA, 25 bp, Homo sapien
tatatgccttcggtttcatctcctg

SEQ ID NO: 1298667 - DNA, 25 bp, Homo sapien
aaaaaaaggtcatccacaatatggc

SEQ ID NO: 1298668 - DNA, 25 bp, Homo sapien
cacaatatggccctttatatgcctt

SEQ ID NO: 1298669 - DNA, 25 bp, Homo sapien
ggccctttatatgccttcggtttca

SEQ ID NO: 1298670 - DNA, 25 bp, Homo sapien
tccaagtctgagctcaagcgaaaca

SEQ ID NO: 1298671 - DNA, 25 bp, Homo sapien
ccaccagcctataaggtcttccaag

SEQ ID NO: 1298672 - DNA, 25 bp, Homo sapien
ttttgctcaagtttgaccacccacc

SEQ ID NO: 1298673 - DNA, 25 bp, Homo sapien
gcgaaacacctcttgataggccttg

SEQ ID NO: 1298674 - DNA, 25 bp, Homo sapien
ggtctctttcagcactaaggtaaaa

SEQ ID NO: 1298675 - DNA, 25 bp, Homo sapien
tggctagagtatgtgccagcagctg

SEQ ID NO: 1298676 - DNA, 25 bp, Homo sapien
taaaactgtatgaccaaatctctgg

SEQ ID NO: 1298677 - DNA, 25 bp, Homo sapien
tccatgaaagtctggaatggctaga

SEQ ID NO: 1298678 - DNA, 25 bp, Homo sapien
tgggaatataggcgtccgtccgccg

SEQ ID NO: 1298679 - DNA, 25 bp, Homo sapien
tataggcgtccgtccgccgccacgc

SEQ ID NO: 1298680 - DNA, 25 bp, Homo sapien
gaatataggcgtccgtccgccgcca

SEQ ID NO: 1298681 - DNA, 25 bp, Homo sapien
gggaatataggcgtccgtccgccgc

SEQ ID NO: 1298682 - DNA, 25 bp, Homo sapien
gaaggacaacctctaattggacgca

SEQ ID NO: 1298683 - DNA, 25 bp, Homo sapien
tagttaactggtaggaaggctatct

SEQ ID NO: 1298684 - DNA, 25 bp, Homo sapien
aatactagccctctatcaatgaagg

SEQ ID NO: 1298685 - DNA, 25 bp, Homo sapien
taaatttcagtgtccttgcctgtcc

SEQ ID NO: 1298686 - DNA, 25 bp, Homo sapien
tattatctaatgtaaagttcgtatc

SEQ ID NO: 1298687 - DNA, 25 bp, Homo sapien
tacagttcaattatcacattaggaa

SEQ ID NO: 1298688 - DNA, 25 bp, Homo sapien
taataggttgtagacatcatgtcct

SEQ ID NO: 1298689 - DNA, 25 bp, Homo sapien
ttacccgttgtctcactaatgctct

SEQ ID NO: 1298690 - DNA, 25 bp, Homo sapien
aggaaacacattctgactggctgag

SEQ ID NO: 1298691 - DNA, 25 bp, Homo sapien
taaaattctctgaacgctacagcca

SEQ ID NO: 1298692 - DNA, 25 bp, Homo sapien
taacctggtaacactattagcctag

SEQ ID NO: 1298693 - DNA, 25 bp, Homo sapien
gctgaagtttacctctgcactctaa

SEQ ID NO: 1298694 - DNA, 25 bp, Homo sapien
tagtttgcaactattgggtaaaata

SEQ ID NO: 1298695 - DNA, 25 bp, Homo sapien
aatttggcaaacatggccgggtgtg

SEQ ID NO: 1298696 - DNA, 25 bp, Homo sapien
aatcagctttaaaatttggcaaaca

SEQ ID NO: 1298697 - DNA, 25 bp, Homo sapien
aaaatttggcaaacatggccgggtg

SEQ ID NO: 1298698 - DNA, 25 bp, Homo sapien
gctttaaaatttggcaaacatggcc

SEQ ID NO: 1298699 - DNA, 25 bp, Homo sapien
cagttagtatgaacatccagacatt

SEQ ID NO: 1298700 - DNA, 25 bp, Homo sapien
cccagttagtatgaacatccagaca

SEQ ID NO: 1298701 - DNA, 25 bp, Homo sapien
ttagtatgaacatccagacatttta

SEQ ID NO: 1298702 - DNA, 25 bp, Homo sapien
gttagtatgaacatccagacatttt

SEQ ID NO: 1298703 - DNA, 25 bp, Homo sapien
cctggggaagaacttgtccaagatc

SEQ ID NO: 1298704 - DNA, 25 bp, Homo sapien
gccgcccagtctccgcacagagtgt

SEQ ID NO: 1298705 - DNA, 25 bp, Homo sapien
gcctgtgtccgccattacgcgattc

SEQ ID NO: 1298706 - DNA, 25 bp, Homo sapien
ctcgcgggctgccaaacggccggac

SEQ ID NO: 1298707 - DNA, 25 bp, Homo sapien
cgcagtcgccgtcagcgacaggaag

SEQ ID NO: 1298708 - DNA, 25 bp, Homo sapien
agcgacagggacgggcctgaccagc

SEQ ID NO: 1298709 - DNA, 25 bp, Homo sapien
acgggcctgaccagcgtgcccagct

SEQ ID NO: 1298710 - DNA, 25 bp, Homo sapien
gggacgggcctgaccagcgtgccca

SEQ ID NO: 1298711 - DNA, 25 bp, Homo sapien
ggacgggcctgaccagcgtgcccag

SEQ ID NO: 1298712 - DNA, 25 bp, Homo sapien
tcccccagaatcttcttcaccccca

SEQ ID NO: 1298713 - DNA, 25 bp, Homo sapien
tgctgatgcggcatcagccgagacc

SEQ ID NO: 1298714 - DNA, 25 bp, Homo sapien
gagcagtcagggctgccggagccgg

SEQ ID NO: 1298715 - DNA, 25 bp, Homo sapien
agccgagaccaacccgccgagagtt

SEQ ID NO: 1298716 - DNA, 25 bp, Homo sapien
ccgccgagagtttgcccagagcagt

SEQ ID NO: 1298717 - DNA, 25 bp, Homo sapien
tcactcagcttcaccccaggtcgcc

SEQ ID NO: 1298718 - DNA, 25 bp, Homo sapien
accccaggtcgcctgctgcgaaatg

SEQ ID NO: 1298719 - DNA, 25 bp, Homo sapien
cctgctgcgaaatgtcagtggcaga

SEQ ID NO: 1298720 - DNA, 25 bp, Homo sapien
caggtcgcctgctgcgaaatgtcag

SEQ ID NO: 1298721 - DNA, 25 bp, Homo sapien
agcgcccgtggccgccccattagta

SEQ ID NO: 1298722 - DNA, 25 bp, Homo sapien
ccagccccggggtgacttggctgga

SEQ ID NO: 1298723 - DNA, 25 bp, Homo sapien
cccattagtatgcggccgcgctctg

SEQ ID NO: 1298724 - DNA, 25 bp, Homo sapien
tggccgccccattagtatgcggccg

SEQ ID NO: 1298725 - DNA, 25 bp, Homo sapien
tatctgtgtctgtacgagcccaagg

SEQ ID NO: 1298726 - DNA, 25 bp, Homo sapien
gctgtgcttttatgtcggtctccga

SEQ ID NO: 1298727 - DNA, 25 bp, Homo sapien
tgactgccagttaaccgagcgtacc

SEQ ID NO: 1298728 - DNA, 25 bp, Homo sapien
ttagccccgagtgcctgagtgactg

SEQ ID NO: 1298729 - DNA, 25 bp, Homo sapien
tggtttgaatgtactcactgagtgg

SEQ ID NO: 1298730 - DNA, 25 bp, Homo sapien
tcattacaacgaagcctcataggat

SEQ ID NO: 1298731 - DNA, 25 bp, Homo sapien
ctcataggattctggtggagaccaa

SEQ ID NO: 1298732 - DNA, 25 bp, Homo sapien
tctggtggagaccaaatgcattaat

SEQ ID NO: 1298733 - DNA, 25 bp, Homo sapien
atatcccaggttctgcataagcaga

SEQ ID NO: 1298734 - DNA, 25 bp, Homo sapien
caggttctgcataagcagatgtggg

SEQ ID NO: 1298735 - DNA, 25 bp, Homo sapien
atcccaggttctgcataagcagatg

SEQ ID NO: 1298736 - DNA, 25 bp, Homo sapien
tcatatcccaggttctgcataagca

SEQ ID NO: 1298737 - DNA, 25 bp, Homo sapien
cgtgtaggtatttcaactcctctgg

SEQ ID NO: 1298738 - DNA, 25 bp, Homo sapien
ccaggaacacgtgtaggtatttcaa

SEQ ID NO: 1298739 - DNA, 25 bp, Homo sapien
gaagggaaaactcagtggccaggaa

SEQ ID NO: 1298740 - DNA, 25 bp, Homo sapien
gagacgcagggcctggagtgaaatg

SEQ ID NO: 1298741 - DNA, 25 bp, Homo sapien
aaaagctcccgcaagaggttcttct

SEQ ID NO: 1298742 - DNA, 25 bp, Homo sapien
aagctcccgcaagaggttcttctcc

SEQ ID NO: 1298743 - DNA, 25 bp, Homo sapien
cccccccaccatgcgaatttgcaca

SEQ ID NO: 1298744 - DNA, 25 bp, Homo sapien
cctcccccccaccatgcgaatttgc

SEQ ID NO: 1298745 - DNA, 25 bp, Homo sapien
catttttgtcaaacgacctgtagat

SEQ ID NO: 1298746 - DNA, 25 bp, Homo sapien
tacagaatgcaatatacaatccacg

SEQ ID NO: 1298747 - DNA, 25 bp, Homo sapien
aatttctcagtgcatacttgcaggg

SEQ ID NO: 1298748 - DNA, 25 bp, Homo sapien
cacgggaccacagcaggtttacaga

SEQ ID NO: 1298749 - DNA, 25 bp, Homo sapien
caattgctggttttgtgcagaaagg

SEQ ID NO: 1298750 - DNA, 25 bp, Homo sapien
tacaattgctggttttgtgcagaaa

SEQ ID NO: 1298751 - DNA, 25 bp, Homo sapien
tatttacaattgctggttttgtgca

SEQ ID NO: 1298752 - DNA, 25 bp, Homo sapien
ttgctggttttgtgcagaaagggct

SEQ ID NO: 1298753 - DNA, 25 bp, Homo sapien
agaggacgatgtggacgctgggagg

SEQ ID NO: 1298754 - DNA, 25 bp, Homo sapien
gagggatcttggcgttggttttctg

SEQ ID NO: 1298755 - DNA, 25 bp, Homo sapien
agggatcttggcgttggttttctga

SEQ ID NO: 1298756 - DNA, 25 bp, Homo sapien
agcggcacgcatcgactgtgctctg

SEQ ID NO: 1298757 - DNA, 25 bp, Homo sapien
gtgagcggcacgcatcgactgtgct

SEQ ID NO: 1298758 - DNA, 25 bp, Homo sapien
caggagtgagcggcacgcatcgact

SEQ ID NO: 1298759 - DNA, 25 bp, Homo sapien
cacgcatcgactgtgctctgagatc

SEQ ID NO: 1298760 - DNA, 25 bp, Homo sapien
gacttgccaggactcccccaaggtc

SEQ ID NO: 1298761 - DNA, 25 bp, Homo sapien
atcaggcggcggcagaaagcctctc

SEQ ID NO: 1298762 - DNA, 25 bp, Homo sapien
gctcagcctcggctgctgtctgctg

SEQ ID NO: 1298763 - DNA, 25 bp, Homo sapien
acatttaaattctgctcagcctcgg

SEQ ID NO: 1298764 - DNA, 25 bp, Homo sapien
ggactcggcccaattgctaacgcaa

SEQ ID NO: 1298765 - DNA, 25 bp, Homo sapien
caaacgcagtgcactatggcagcaa

SEQ ID NO: 1298766 - DNA, 25 bp, Homo sapien
cagcatttctagctgagccgggtca

SEQ ID NO: 1298767 - DNA, 25 bp, Homo sapien
tacctgcagcactggatacaatgcc

SEQ ID NO: 1298768 - DNA, 25 bp, Homo sapien
cctcgcggtccagtcggcacttcag

SEQ ID NO: 1298769 - DNA, 25 bp, Homo sapien
caggaacaaaacctcgcggtccagt

SEQ ID NO: 1298770 - DNA, 25 bp, Homo sapien
tcgcggtccagtcggcacttcagtt

SEQ ID NO: 1298771 - DNA, 25 bp, Homo sapien
ggtccagtcggcacttcagttggca

SEQ ID NO: 1298772 - DNA, 25 bp, Homo sapien
cctgggtacctgtaggcggtgtcct

SEQ ID NO: 1298773 - DNA, 25 bp, Homo sapien
cagcggtgggaaatgcttgccatca

SEQ ID NO: 1298774 - DNA, 25 bp, Homo sapien
cctggagggtaccaataggctgtgc

SEQ ID NO: 1298775 - DNA, 25 bp, Homo sapien
caagtcactaaggagtgggcagcca

SEQ ID NO: 1298776 - DNA, 25 bp, Homo sapien
gctatagtagtccaggccgaggtca

SEQ ID NO: 1298777 - DNA, 25 bp, Homo sapien
ccagtgctccgtttggatgggtagc

SEQ ID NO: 1298778 - DNA, 25 bp, Homo sapien
gcagatgatgcctcgttccagtcca

SEQ ID NO: 1298779 - DNA, 25 bp, Homo sapien
ggcccggcttggagctactctgaaa

SEQ ID NO: 1298780 - DNA, 25 bp, Homo sapien
caccaaccggctgattgaactgggt

SEQ ID NO: 1298781 - DNA, 25 bp, Homo sapien
tgggctcgctgacgtggcagtcaaa

SEQ ID NO: 1298782 - DNA, 25 bp, Homo sapien
accttctgcggtgtgtagttggaga

SEQ ID NO: 1298783 - DNA, 25 bp, Homo sapien
gattgtagagctgactaaaggcctc

SEQ ID NO: 1298784 - DNA, 25 bp, Homo sapien
gcaaactgccgacagttctcgggcg

SEQ ID NO: 1298785 - DNA, 25 bp, Homo sapien
ccgcaaactgccgacagttctcggg

SEQ ID NO: 1298786 - DNA, 25 bp, Homo sapien
aactgccgacagttctcgggcgagg

SEQ ID NO: 1298787 - DNA, 25 bp, Homo sapien
caaactgccgacagttctcgggcga

SEQ ID NO: 1298788 - DNA, 25 bp, Homo sapien
gcagaggctgtggtgcccttgggta

SEQ ID NO: 1298789 - DNA, 25 bp, Homo sapien
cagaggctgtggtgcccttgggtac

SEQ ID NO: 1298790 - DNA, 25 bp, Homo sapien
gaggagtcatccgaatcgagcagcg

SEQ ID NO: 1298791 - DNA, 25 bp, Homo sapien
aagtcactgaaggagcatcgggctg

SEQ ID NO: 1298792 - DNA, 25 bp, Homo sapien
agcttgctgctcgtcctggtgggaa

SEQ ID NO: 1298793 - DNA, 25 bp, Homo sapien
caaagtccaagagatcggaggagtc

SEQ ID NO: 1298794 - DNA, 25 bp, Homo sapien
tgggaagaccactaccacgttccgc

SEQ ID NO: 1298795 - DNA, 25 bp, Homo sapien
gagaataatgggcatctcaccgggt

SEQ ID NO: 1298796 - DNA, 25 bp, Homo sapien
caaggaagacactttgtatgtggtc

SEQ ID NO: 1298797 - DNA, 25 bp, Homo sapien
gcggccgcgcttacgtttgagaata

SEQ ID NO: 1298798 - DNA, 25 bp, Homo sapien
tttggcctatcagtgcgccgcaagg

SEQ ID NO: 1298799 - DNA, 25 bp, Homo sapien
cttcaactctgggactgagaccggg

SEQ ID NO: 1298800 - DNA, 25 bp, Homo sapien
tttccgccggcgacacaggatcttt

SEQ ID NO: 1298801 - DNA, 25 bp, Homo sapien
tcgggtccggcgtctgccttgcgtc

SEQ ID NO: 1298802 - DNA, 25 bp, Homo sapien
ggaggccagctcactaaggatgtcg

SEQ ID NO: 1298803 - DNA, 25 bp, Homo sapien
gctacggatgctgttggccaaactg

SEQ ID NO: 1298804 - DNA, 25 bp, Homo sapien
cgacctgggacgtcaagcagcttgg

SEQ ID NO: 1298805 - DNA, 25 bp, Homo sapien
gctctagtgcctgcgggtccaggaa

SEQ ID NO: 1298806 - DNA, 25 bp, Homo sapien
gtgggcgtgggttctcggagaaggc

SEQ ID NO: 1298807 - DNA, 25 bp, Homo sapien
ctgtgagacaggacgggctgcccgt

SEQ ID NO: 1298808 - DNA, 25 bp, Homo sapien
tgtgagacaggacgggctgcccgtg

SEQ ID NO: 1298809 - DNA, 25 bp, Homo sapien
ggttctcggagaaggcgtgggtgga

SEQ ID NO: 1298810 - DNA, 25 bp, Homo sapien
tggcagggggccgggtgggaagcag

SEQ ID NO: 1298811 - DNA, 25 bp, Homo sapien
ctggcagggggccgggtgggaagca

SEQ ID NO: 1298812 - DNA, 25 bp, Homo sapien
tagtcaggagagctgcacacggcac

SEQ ID NO: 1298813 - DNA, 25 bp, Homo sapien
tgcacacggcactggaagtcaccac

SEQ ID NO: 1298814 - DNA, 25 bp, Homo sapien
tgggttcccggaggtagtcaggaga

SEQ ID NO: 1298815 - DNA, 25 bp, Homo sapien
tcccggaggtagtcaggagagctgc

SEQ ID NO: 1298816 - DNA, 25 bp, Homo sapien
agggtgcgagaagccgggaccagga

SEQ ID NO: 1298817 - DNA, 25 bp, Homo sapien
atgagggtgcgagaagccgggacca

SEQ ID NO: 1298818 - DNA, 25 bp, Homo sapien
ctgacatgagggtgcgagaagccgg

SEQ ID NO: 1298819 - DNA, 25 bp, Homo sapien
acatgagggtgcgagaagccgggac

SEQ ID NO: 1298820 - DNA, 25 bp, Homo sapien
gatcaaacttaaggagaaggccagg

SEQ ID NO: 1298821 - DNA, 25 bp, Homo sapien
gaagttctaacaagggcacggcctc

SEQ ID NO: 1298822 - DNA, 25 bp, Homo sapien
ggaatctggctatgcactcaggaag

SEQ ID NO: 1298823 - DNA, 25 bp, Homo sapien
gaacaggacccctgcctttgagagg

SEQ ID NO: 1298824 - DNA, 25 bp, Homo sapien
gcctgggctgtcacactggagatct

SEQ ID NO: 1298825 - DNA, 25 bp, Homo sapien
ctgtggagcaacttcggcctgagcc

SEQ ID NO: 1298826 - DNA, 25 bp, Homo sapien
ccaggcctcggggcgtggacagcgc

SEQ ID NO: 1298827 - DNA, 25 bp, Homo sapien
tgagcccaggcctcggggcgtggac

SEQ ID NO: 1298828 - DNA, 25 bp, Homo sapien
ggctctgccagtcgctggctgtcag

SEQ ID NO: 1298829 - DNA, 25 bp, Homo sapien
ggctggaagctgtccaggcatcgtt

SEQ ID NO: 1298830 - DNA, 25 bp, Homo sapien
gctgtccaggcatcgtttcatttaa

SEQ ID NO: 1298831 - DNA, 25 bp, Homo sapien
aattcttcataccaatcctgtgagg

SEQ ID NO: 1298832 - DNA, 25 bp, Homo sapien
agcacctactgcgcgccaggtactg

SEQ ID NO: 1298833 - DNA, 25 bp, Homo sapien
ttctgttgccaaacactgggccaag

SEQ ID NO: 1298834 - DNA, 25 bp, Homo sapien
ttttctgttgccaaacactgggcca

SEQ ID NO: 1298835 - DNA, 25 bp, Homo sapien
tgttgccaaacactgggccaagcac

SEQ ID NO: 1298836 - DNA, 25 bp, Homo sapien
tatagattatctcatcaaattcccc

SEQ ID NO: 1298837 - DNA, 25 bp, Homo sapien
ccttcatcggaaaaactctgctgct

SEQ ID NO: 1298838 - DNA, 25 bp, Homo sapien
tctccagacccaagaaggatgctga

SEQ ID NO: 1298839 - DNA, 25 bp, Homo sapien
taatcaattacttgcgtgactggct

SEQ ID NO: 1298840 - DNA, 25 bp, Homo sapien
cacaaatgaggtacgcaaagcaatc

SEQ ID NO: 1298841 - DNA, 25 bp, Homo sapien
ggttgcccacccaggtggaacatcc

SEQ ID NO: 1298842 - DNA, 25 bp, Homo sapien
caggtggaacatccctctatccact

SEQ ID NO: 1298843 - DNA, 25 bp, Homo sapien
ggtggaacatccctctatccactgt

SEQ ID NO: 1298844 - DNA, 25 bp, Homo sapien
cacccaggtggaacatccctctatc

SEQ ID NO: 1298845 - DNA, 25 bp, Homo sapien
ttactgagggtcaggctagccgagc

SEQ ID NO: 1298846 - DNA, 25 bp, Homo sapien
tggagcactgttgccctcacaggga

SEQ ID NO: 1298847 - DNA, 25 bp, Homo sapien
tgagcttgcccatagggacaccagc

SEQ ID NO: 1298848 - DNA, 25 bp, Homo sapien
tgacaccctcacaaacgagaaaagg

SEQ ID NO: 1298849 - DNA, 25 bp, Homo sapien
cctccccggctgtggctgtgaccac

SEQ ID NO: 1298850 - DNA, 25 bp, Homo sapien
tgctgtgcacagtgccgggaagcgc

SEQ ID NO: 1298851 - DNA, 25 bp, Homo sapien
ctccccggctgtggctgtgaccacc

SEQ ID NO: 1298852 - DNA, 25 bp, Homo sapien
agtgccgggaagcgccagcccacat

SEQ ID NO: 1298853 - DNA, 25 bp, Homo sapien
ctgagcaggctgcgaagataggctg

SEQ ID NO: 1298854 - DNA, 25 bp, Homo sapien
tgagcaggctgcgaagataggctgg

SEQ ID NO: 1298855 - DNA, 25 bp, Homo sapien
gagcaggctgcgaagataggctggg

SEQ ID NO: 1298856 - DNA, 25 bp, Homo sapien
cgatgggttgacaatcaggcaagct

SEQ ID NO: 1298857 - DNA, 25 bp, Homo sapien
tctgcacacgctcaactgggtgggc

SEQ ID NO: 1298858 - DNA, 25 bp, Homo sapien
agggtggtctctgcaacggcctgag

SEQ ID NO: 1298859 - DNA, 25 bp, Homo sapien
ggtccaggccgatgggttgacaatc

SEQ ID NO: 1298860 - DNA, 25 bp, Homo sapien
gaagctctcctacatggagtcccat

SEQ ID NO: 1298861 - DNA, 25 bp, Homo sapien
tgtttcttgaaaccccaggctccta

SEQ ID NO: 1298862 - DNA, 25 bp, Homo sapien
ctcatctcgttttgtggcccaggtt

SEQ ID NO: 1298863 - DNA, 25 bp, Homo sapien
ggcctttgggagtctgacagtcctt

SEQ ID NO: 1298864 - DNA, 25 bp, Homo sapien
ccctgcccgagctgcgcgcttagct

SEQ ID NO: 1298865 - DNA, 25 bp, Homo sapien
cccgagctgcgcgcttagctcgctc

SEQ ID NO: 1298866 - DNA, 25 bp, Homo sapien
cctgcccgagctgcgcgcttagctc

SEQ ID NO: 1298867 - DNA, 25 bp, Homo sapien
gagctgcgcgcttagctcgctcccc

SEQ ID NO: 1298868 - DNA, 25 bp, Homo sapien
tgtcacaaagccagcagcttcagac

SEQ ID NO: 1298869 - DNA, 25 bp, Homo sapien
gcccctgtcacaaagccagcagctt

SEQ ID NO: 1298870 - DNA, 25 bp, Homo sapien
cttgcactggtgacagcgcccctgt

SEQ ID NO: 1298871 - DNA, 25 bp, Homo sapien
tgcactggtgacagcgcccctgtca

SEQ ID NO: 1298872 - DNA, 25 bp, Homo sapien
attccgccagaccagcagaagctgg

SEQ ID NO: 1298873 - DNA, 25 bp, Homo sapien
tgattccgccagaccagcagaagct

SEQ ID NO: 1298874 - DNA, 25 bp, Homo sapien
cctgattccgccagaccagcagaag

SEQ ID NO: 1298875 - DNA, 25 bp, Homo sapien
ttccgccagaccagcagaagctggc

SEQ ID NO: 1298876 - DNA, 25 bp, Homo sapien
tgactccaaagtcgggacgctcact

SEQ ID NO: 1298877 - DNA, 25 bp, Homo sapien
tctagatggatgctcactgagcccc

SEQ ID NO: 1298878 - DNA, 25 bp, Homo sapien
gaccccttatgatctgcagtgactg

SEQ ID NO: 1298879 - DNA, 25 bp, Homo sapien
caataagattgctaacatgacccct

SEQ ID NO: 1298880 - DNA, 25 bp, Homo sapien
ccccggatatgtccatagatactaa

SEQ ID NO: 1298881 - DNA, 25 bp, Homo sapien
cccacaggcccgacaatgtggatgg

SEQ ID NO: 1298882 - DNA, 25 bp, Homo sapien
aatgtggatgggcatgctgtctggg

SEQ ID NO: 1298883 - DNA, 25 bp, Homo sapien
catagatactaagacatgctggtgt

SEQ ID NO: 1298884 - DNA, 25 bp, Homo sapien
tcaggtcaggcccctcattgccaca

SEQ ID NO: 1298885 - DNA, 25 bp, Homo sapien
aggtcaggcccctcattgccacagt

SEQ ID NO: 1298886 - DNA, 25 bp, Homo sapien
caggtcaggcccctcattgccacag

SEQ ID NO: 1298887 - DNA, 25 bp, Homo sapien
tggtcgaggcaggagcctccacaaa

SEQ ID NO: 1298888 - DNA, 25 bp, Homo sapien
gatggtcgaggcaggagcctccaca

SEQ ID NO: 1298889 - DNA, 25 bp, Homo sapien
tcgaggcaggagcctccacaaagct

SEQ ID NO: 1298890 - DNA, 25 bp, Homo sapien
tcagatggtcgaggcaggagcctcc

SEQ ID NO: 1298891 - DNA, 25 bp, Homo sapien
ggtgtgactgccactgtatgtagga

SEQ ID NO: 1298892 - DNA, 25 bp, Homo sapien
agggtgtcccatgacagggcctgtg

SEQ ID NO: 1298893 - DNA, 25 bp, Homo sapien
cttgccagccgggttagagtatggg

SEQ ID NO: 1298894 - DNA, 25 bp, Homo sapien
cactgtatgtaggagggtgtcccat

SEQ ID NO: 1298895 - DNA, 25 bp, Homo sapien
cgtcacaaagccagcagcttcagac

SEQ ID NO: 1298896 - DNA, 25 bp, Homo sapien
cagcgcccccgtcacaaagccagca

SEQ ID NO: 1298897 - DNA, 25 bp, Homo sapien
actggtgacagcgcccccgtcacaa

SEQ ID NO: 1298898 - DNA, 25 bp, Homo sapien
cttgcactggtgacagcgcccccgt

SEQ ID NO: 1298899 - DNA, 25 bp, Homo sapien
gtctgcggtagagaattcccgcccc

SEQ ID NO: 1298900 - DNA, 25 bp, Homo sapien
aggcactggtgcagaaccgagggca

SEQ ID NO: 1298901 - DNA, 25 bp, Homo sapien
ccagggtctgcggtagagaattccc

SEQ ID NO: 1298902 - DNA, 25 bp, Homo sapien
gcccccagggtctgcggtagagaat

SEQ ID NO: 1298903 - DNA, 25 bp, Homo sapien
agcccccaaactctgggttgctgtc

SEQ ID NO: 1298904 - DNA, 25 bp, Homo sapien
cccaaactctgggttgctgtccctt

SEQ ID NO: 1298905 - DNA, 25 bp, Homo sapien
caaactctgggttgctgtccctttt

SEQ ID NO: 1298906 - DNA, 25 bp, Homo sapien
ccagcccccaaactctgggttgctg

SEQ ID NO: 1298907 - DNA, 25 bp, Homo sapien
ggacgcaggccccccccgtgcgctg

SEQ ID NO: 1298908 - DNA, 25 bp, Homo sapien
cccccgtgcgctgcacaaaagagcc

SEQ ID NO: 1298909 - DNA, 25 bp, Homo sapien
aggccccccccgtgcgctgcacaaa

SEQ ID NO: 1298910 - DNA, 25 bp, Homo sapien
cagcggaccggaccgggggacgcag

SEQ ID NO: 1298911 - DNA, 25 bp, Homo sapien
ggacgtctgtcttccggcggtggca

SEQ ID NO: 1298912 - DNA, 25 bp, Homo sapien
tgccggctccgtgggtccgagccag

SEQ ID NO: 1298913 - DNA, 25 bp, Homo sapien
ctcacattctccgccgctaactccg

SEQ ID NO: 1298914 - DNA, 25 bp, Homo sapien
tggctcgcgcctcggctcacattct

SEQ ID NO: 1298915 - DNA, 25 bp, Homo sapien
tgtttccacacggaggcatgtcagc

SEQ ID NO: 1298916 - DNA, 25 bp, Homo sapien
tctgcttgactatgaactcctcctc

SEQ ID NO: 1298917 - DNA, 25 bp, Homo sapien
cattcccttagtaagtcagatggtc

SEQ ID NO: 1298918 - DNA, 25 bp, Homo sapien
gatttgccaattgctgcagtgattc

SEQ ID NO: 1298919 - DNA, 25 bp, Homo sapien
tgaaggccatatcagcaacgaaggg

SEQ ID NO: 1298920 - DNA, 25 bp, Homo sapien
ggttgtcccattgcgcctgtgatga

SEQ ID NO: 1298921 - DNA, 25 bp, Homo sapien
gagatccagtgagttagactaaccc

SEQ ID NO: 1298922 - DNA, 25 bp, Homo sapien
tgcttggtaggcattagggccctct

SEQ ID NO: 1298923 - DNA, 25 bp, Homo sapien
ctatgtctgatccccgggctggtac

SEQ ID NO: 1298924 - DNA, 25 bp, Homo sapien
tactgtggttcagcggaggtgaagt

SEQ ID NO: 1298925 - DNA, 25 bp, Homo sapien
gtactcgaaggtaggcctctcctcc

SEQ ID NO: 1298926 - DNA, 25 bp, Homo sapien
ccatggcctcgtacagggatgctgg

SEQ ID NO: 1298927 - DNA, 25 bp, Homo sapien
ctggagggcacggcatgtggtagcc

SEQ ID NO: 1298928 - DNA, 25 bp, Homo sapien
tggagggcacggcatgtggtagccc

SEQ ID NO: 1298929 - DNA, 25 bp, Homo sapien
ggagggcacggcatgtggtagccct

SEQ ID NO: 1298930 - DNA, 25 bp, Homo sapien
gacttgatggtgaatctgccaaaga

SEQ ID NO: 1298931 - DNA, 25 bp, Homo sapien
aatctgccaaagagggcagcttctg

SEQ ID NO: 1298932 - DNA, 25 bp, Homo sapien
gggattcggcccttggtgatgagct

SEQ ID NO: 1298933 - DNA, 25 bp, Homo sapien
agctcagtgagcaggatcccaaagg

SEQ ID NO: 1298934 - DNA, 25 bp, Homo sapien
gatgggggagcagggaaagttagtg

SEQ ID NO: 1298935 - DNA, 25 bp, Homo sapien
aagatgggggagcagggaaagttag

SEQ ID NO: 1298936 - DNA, 25 bp, Homo sapien
tgggggagcagggaaagttagtgag

SEQ ID NO: 1298937 - DNA, 25 bp, Homo sapien
tggagaagatgggggagcagggaaa

SEQ ID NO: 1298938 - DNA, 25 bp, Homo sapien
gaggaagggttcctgagtgcgtggg

SEQ ID NO: 1298939 - DNA, 25 bp, Homo sapien
gttcctgagtgcgtggggccccatg

SEQ ID NO: 1298940 - DNA, 25 bp, Homo sapien
gggccccatggaagtcccttgttgc

SEQ ID NO: 1298941 - DNA, 25 bp, Homo sapien
ctcttggaaggtggggtgaagcagg

SEQ ID NO: 1298942 - DNA, 25 bp, Homo sapien
gatgagacgcgccaagccaaagtct

SEQ ID NO: 1298943 - DNA, 25 bp, Homo sapien
gctgccctcaggtcgcggtgaatgt

SEQ ID NO: 1298944 - DNA, 25 bp, Homo sapien
aagtctgcgatcttgcacgccagcc

SEQ ID NO: 1298945 - DNA, 25 bp, Homo sapien
tgcgttccatgtaggccatgccctc

SEQ ID NO: 1298946 - DNA, 25 bp, Homo sapien
tcatgtggactcacaacaccgtggc

SEQ ID NO: 1298947 - DNA, 25 bp, Homo sapien
tgtggagagatgggagctcatgtgg

SEQ ID NO: 1298948 - DNA, 25 bp, Homo sapien
gggaccatagtgtggagagatggga

SEQ ID NO: 1298949 - DNA, 25 bp, Homo sapien
gctcatgtggactcacaacaccgtg

SEQ ID NO: 1298950 - DNA, 25 bp, Homo sapien
tgggttcttgagaaaatccagcaag

SEQ ID NO: 1298951 - DNA, 25 bp, Homo sapien
tgccatgtccaccaattggggcagc

SEQ ID NO: 1298952 - DNA, 25 bp, Homo sapien
gggctgccatgtccaccaattgggg

SEQ ID NO: 1298953 - DNA, 25 bp, Homo sapien
catgtccaccaattggggcagcctc

SEQ ID NO: 1298954 - DNA, 25 bp, Homo sapien
atggtgcccggcttcagcgtcttca

SEQ ID NO: 1298955 - DNA, 25 bp, Homo sapien
tgcaccagcttgtcgtgccgcagca

SEQ ID NO: 1298956 - DNA, 25 bp, Homo sapien
gaactcggtcacgatgtagatgggc

SEQ ID NO: 1298957 - DNA, 25 bp, Homo sapien
caccttagtgctgccgttccacgtg

SEQ ID NO: 1298958 - DNA, 25 bp, Homo sapien
caggaccctctcccccgagcccagg

SEQ ID NO: 1298959 - DNA, 25 bp, Homo sapien
ttgtcaggaccctctcccccgagcc

SEQ ID NO: 1298960 - DNA, 25 bp, Homo sapien
cttgtcaggaccctctcccccgagc

SEQ ID NO: 1298961 - DNA, 25 bp, Homo sapien
gtcaggaccctctcccccgagccca

SEQ ID NO: 1298962 - DNA, 25 bp, Homo sapien
cgtgatggagctgcggctgatctcc

SEQ ID NO: 1298963 - DNA, 25 bp, Homo sapien
catgatggtgcagggcgcgatgagc

SEQ ID NO: 1298964 - DNA, 25 bp, Homo sapien
agcaggttgcacagcccgtcattca

SEQ ID NO: 1298965 - DNA, 25 bp, Homo sapien
cagcgtctgcggcttcatgatggtg

SEQ ID NO: 1298966 - DNA, 25 bp, Homo sapien
acccgtgtggtgatgtagtagccgc

SEQ ID NO: 1298967 - DNA, 25 bp, Homo sapien
tagtagccgcccatgtccagtttgc

SEQ ID NO: 1298968 - DNA, 25 bp, Homo sapien
accagctcctgcaccgagttgaact

SEQ ID NO: 1298969 - DNA, 25 bp, Homo sapien
taatgcttcacatgatcgcctctgg

SEQ ID NO: 1298970 - DNA, 25 bp, Homo sapien
tgctgttctcctctgccctagtctg

SEQ ID NO: 1298971 - DNA, 25 bp, Homo sapien
tggagaggatcacttttgatctgct

SEQ ID NO: 1298972 - DNA, 25 bp, Homo sapien
gctgttctcctctgccctagtctgg

SEQ ID NO: 1298973 - DNA, 25 bp, Homo sapien
gttctcctctgccctagtctgggag

SEQ ID NO: 1298974 - DNA, 25 bp, Homo sapien
agtcgccttggggcgtggcaccacc

SEQ ID NO: 1298975 - DNA, 25 bp, Homo sapien
gccttggggcgtggcaccaccccta

SEQ ID NO: 1298976 - DNA, 25 bp, Homo sapien
ctcccagtcgccttggggcgtggca

SEQ ID NO: 1298977 - DNA, 25 bp, Homo sapien
gctgggcctcccagtcgccttgggg

SEQ ID NO: 1298978 - DNA, 25 bp, Homo sapien
gtggtctcgctttcccgaatgagaa

SEQ ID NO: 1298979 - DNA, 25 bp, Homo sapien
ccagtttttccggagctgagagacc

SEQ ID NO: 1298980 - DNA, 25 bp, Homo sapien
cagccagtttttccggagctgagag

SEQ ID NO: 1298981 - DNA, 25 bp, Homo sapien
tttttccggagctgagagaccgagc

SEQ ID NO: 1298982 - DNA, 25 bp, Homo sapien
tgcagccagtttttccggagctgag

SEQ ID NO: 1298983 - DNA, 25 bp, Homo sapien
gtgaaggtgaggtcatcctcagttc

SEQ ID NO: 1298984 - DNA, 25 bp, Homo sapien
ggtcatcctcagttcgagcctcata

SEQ ID NO: 1298985 - DNA, 25 bp, Homo sapien
tcagttcgagcctcatagtcataca

SEQ ID NO: 1298986 - DNA, 25 bp, Homo sapien
ggtgaggtcatcctcagttcgagcc

SEQ ID NO: 1298987 - DNA, 25 bp, Homo sapien
tcagcccatgtgatcttgaaagcgg

SEQ ID NO: 1298988 - DNA, 25 bp, Homo sapien
accatggaggatccccttgttgccc

SEQ ID NO: 1298989 - DNA, 25 bp, Homo sapien
tggtctccacagcttaggacacaca

SEQ ID NO: 1298990 - DNA, 25 bp, Homo sapien
ggaagtggcacctaaaagggcaaga

SEQ ID NO: 1298991 - DNA, 25 bp, Homo sapien
caaatgaggatgcaggccgggcctt

SEQ ID NO: 1298992 - DNA, 25 bp, Homo sapien
ggtgccactatcaaggaagccaggg

SEQ ID NO: 1298993 - DNA, 25 bp, Homo sapien
ggtcaggcccatagtggtctgctgc

SEQ ID NO: 1298994 - DNA, 25 bp, Homo sapien
tagtggtctgctgccccgtagcttc

SEQ ID NO: 1298995 - DNA, 25 bp, Homo sapien
ccaccggctccaatttcttgcagaa

SEQ ID NO: 1298996 - DNA, 25 bp, Homo sapien
caccggctccaatttcttgcagaac

SEQ ID NO: 1298997 - DNA, 25 bp, Homo sapien
ggccaccggctccaatttcttgcag

SEQ ID NO: 1298998 - DNA, 25 bp, Homo sapien
gccaccggctccaatttcttgcaga

SEQ ID NO: 1298999 - DNA, 25 bp, Homo sapien
gcgcatgcacatgctcatacgctca

SEQ ID NO: 1299000 - DNA, 25 bp, Homo sapien
ctcactcaaggacccctgccaggtg

SEQ ID NO: 1299001 - DNA, 25 bp, Homo sapien
cgctcatacaggcacgtggctttcc

SEQ ID NO: 1299002 - DNA, 25 bp, Homo sapien
ggctttccctcttgggcctagattg

SEQ ID NO: 1299003 - DNA, 25 bp, Homo sapien
gggtcagtggggctgcggcatgatc

SEQ ID NO: 1299004 - DNA, 25 bp, Homo sapien
tcagtggggctgcggcatgatcctt

SEQ ID NO: 1299005 - DNA, 25 bp, Homo sapien
ggggctgcggcatgatccttgggag

SEQ ID NO: 1299006 - DNA, 25 bp, Homo sapien
gtggggctgcggcatgatccttggg

SEQ ID NO: 1299007 - DNA, 25 bp, Homo sapien
cctatccccataccagagaaaggac

SEQ ID NO: 1299008 - DNA, 25 bp, Homo sapien
ccagagaaaggaccaggtcagaagc

SEQ ID NO: 1299009 - DNA, 25 bp, Homo sapien
cataccagagaaaggaccaggtcag

SEQ ID NO: 1299010 - DNA, 25 bp, Homo sapien
cccataccagagaaaggaccaggtc

SEQ ID NO: 1299011 - DNA, 25 bp, Homo sapien
tgagccaacccttttctggcagcgg

SEQ ID NO: 1299012 - DNA, 25 bp, Homo sapien
aatgagccaacccttttctggcagc

SEQ ID NO: 1299013 - DNA, 25 bp, Homo sapien
gaagccccacaatgagccaaccctt

SEQ ID NO: 1299014 - DNA, 25 bp, Homo sapien
ccacaatgagccaacccttttctgg

SEQ ID NO: 1299015 - DNA, 25 bp, Homo sapien
aacagggcaggaggtcattgagcaa

SEQ ID NO: 1299016 - DNA, 25 bp, Homo sapien
ctgagcaacagggcaggaggtcatt

SEQ ID NO: 1299017 - DNA, 25 bp, Homo sapien
caggaggtcattgagcaagggtccc

SEQ ID NO: 1299018 - DNA, 25 bp, Homo sapien
gggcaggaggtcattgagcaagggt

SEQ ID NO: 1299019 - DNA, 25 bp, Homo sapien
gttgcctggctgatggttccgtcac

SEQ ID NO: 1299020 - DNA, 25 bp, Homo sapien
tcttcctggatccaccaggtccagt

SEQ ID NO: 1299021 - DNA, 25 bp, Homo sapien
gatggttccgtcacatcagtgcttt

SEQ ID NO: 1299022 - DNA, 25 bp, Homo sapien
tggctgatggttccgtcacatcagt

SEQ ID NO: 1299023 - DNA, 25 bp, Homo sapien
tccgtctgcacatagatgtgcatgc

SEQ ID NO: 1299024 - DNA, 25 bp, Homo sapien
atccgtctgcacatagatgtgcatg

SEQ ID NO: 1299025 - DNA, 25 bp, Homo sapien
ccgtctgcacatagatgtgcatgca

SEQ ID NO: 1299026 - DNA, 25 bp, Homo sapien
catccgtctgcacatagatgtgcat

SEQ ID NO: 1299027 - DNA, 25 bp, Homo sapien
gacatacagtaagtgcccagtgaac

SEQ ID NO: 1299028 - DNA, 25 bp, Homo sapien
tgctggacataggaaccccaggtcc

SEQ ID NO: 1299029 - DNA, 25 bp, Homo sapien
gtcagttcatctccctgagcggcag

SEQ ID NO: 1299030 - DNA, 25 bp, Homo sapien
caactagcttaaggcattgggcaag

SEQ ID NO: 1299031 - DNA, 25 bp, Homo sapien
gaaggtcctccgtggcagtgacggt

SEQ ID NO: 1299032 - DNA, 25 bp, Homo sapien
ccagagggtacagaactgggcaggg

SEQ ID NO: 1299033 - DNA, 25 bp, Homo sapien
tcccttgaggaaggtcctccgtggc

SEQ ID NO: 1299034 - DNA, 25 bp, Homo sapien
tgacggtgtgggaccagagggtaca

SEQ ID NO: 1299035 - DNA, 25 bp, Homo sapien
tcatatgctcaagggttcatgctca

SEQ ID NO: 1299036 - DNA, 25 bp, Homo sapien
tcgaaactgcctcctgaagaagaca

SEQ ID NO: 1299037 - DNA, 25 bp, Homo sapien
tcaggattttcaggagatggaagcc

SEQ ID NO: 1299038 - DNA, 25 bp, Homo sapien
catgtggtcccgaggccattagcag

SEQ ID NO: 1299039 - DNA, 25 bp, Homo sapien
tcagccttgcttttcaggtcgcccg

SEQ ID NO: 1299040 - DNA, 25 bp, Homo sapien
agccttgcttttcaggtcgcccgtt

SEQ ID NO: 1299041 - DNA, 25 bp, Homo sapien
cagccttgcttttcaggtcgcccgt

SEQ ID NO: 1299042 - DNA, 25 bp, Homo sapien
gcagccgcgagtgccggcgtgcggg

SEQ ID NO: 1299043 - DNA, 25 bp, Homo sapien
cagcagccgcgagtgccggcgtgcg

SEQ ID NO: 1299044 - DNA, 25 bp, Homo sapien
tggagcccaattctgcccggccccg

SEQ ID NO: 1299045 - DNA, 25 bp, Homo sapien
ctccagcagccgcgagtgccggcgt

SEQ ID NO: 1299046 - DNA, 25 bp, Homo sapien
tcttttgccccgtatagctggaata

SEQ ID NO: 1299047 - DNA, 25 bp, Homo sapien
tacagtggctcatcatctctttagt

SEQ ID NO: 1299048 - DNA, 25 bp, Homo sapien
taaaaccagctcagaatcttgccag

SEQ ID NO: 1299049 - DNA, 25 bp, Homo sapien
aatctggcgaaaagcaagctgttcc

SEQ ID NO: 1299050 - DNA, 25 bp, Homo sapien
ggatggctcagggaagaagtgatcc

SEQ ID NO: 1299051 - DNA, 25 bp, Homo sapien
catgatgatcagggatgaggagtta

SEQ ID NO: 1299052 - DNA, 25 bp, Homo sapien
atggctcagggaagaagtgatccca

SEQ ID NO: 1299053 - DNA, 25 bp, Homo sapien
agttagccaggtaaaaggtgtgagg

SEQ ID NO: 1299054 - DNA, 25 bp, Homo sapien
ccgctcggcgcccagtctccacctc

SEQ ID NO: 1299055 - DNA, 25 bp, Homo sapien
ccagtctccacctcgccggcttcat

SEQ ID NO: 1299056 - DNA, 25 bp, Homo sapien
ggaaccgcgcgagcctcgcaaaccg

SEQ ID NO: 1299057 - DNA, 25 bp, Homo sapien
ggtccagccgcagcgcacgagccct

SEQ ID NO: 1299058 - DNA, 25 bp, Homo sapien
gaagttacatcgagccgactcctga

SEQ ID NO: 1299059 - DNA, 25 bp, Homo sapien
catgattcattctgggacggtgaga

SEQ ID NO: 1299060 - DNA, 25 bp, Homo sapien
gtaattgggtgcctcctgagtgcca

SEQ ID NO: 1299061 - DNA, 25 bp, Homo sapien
tcagggagctcataatctagggcgg

SEQ ID NO: 1299062 - DNA, 25 bp, Homo sapien
cttgtctcagctgtctgttccatgg

SEQ ID NO: 1299063 - DNA, 25 bp, Homo sapien
ttgtctcagctgtctgttccatgga

SEQ ID NO: 1299064 - DNA, 25 bp, Homo sapien
taggtctggacgagagttcaactcc

SEQ ID NO: 1299065 - DNA, 25 bp, Homo sapien
tttatttaagagcaagacgctccta

SEQ ID NO: 1299066 - DNA, 25 bp, Homo sapien
ggagaaagacattctaggtctggac

SEQ ID NO: 1299067 - DNA, 25 bp, Homo sapien
cgctcctaacttgagcactggagaa

SEQ ID NO: 1299068 - DNA, 25 bp, Homo sapien
ggctgcagtgtactatgttcgcatc

SEQ ID NO: 1299069 - DNA, 25 bp, Homo sapien
tactatgttcgcatctgtgaatagc

SEQ ID NO: 1299070 - DNA, 25 bp, Homo sapien
tggattctgggcatcgtcggcgcat

SEQ ID NO: 1299071 - DNA, 25 bp, Homo sapien
ggagagtgatagacaaagttctgga

SEQ ID NO: 1299072 - DNA, 25 bp, Homo sapien
taactggaagagttaggccaagaag

SEQ ID NO: 1299073 - DNA, 25 bp, Homo sapien
ctaactggaagagttaggccaagaa

SEQ ID NO: 1299074 - DNA, 25 bp, Homo sapien
cctaactggaagagttaggccaaga

SEQ ID NO: 1299075 - DNA, 25 bp, Homo sapien
cagggcaccaatattacctatgacg

SEQ ID NO: 1299076 - DNA, 25 bp, Homo sapien
tcctcctcactatcgagatacttgt

SEQ ID NO: 1299077 - DNA, 25 bp, Homo sapien
tattacctatgacgacgctgctgcc

SEQ ID NO: 1299078 - DNA, 25 bp, Homo sapien
ggtggcgtagcccatcagggcacca

SEQ ID NO: 1299079 - DNA, 25 bp, Homo sapien
acgccgcccccattcaggatcgcag

SEQ ID NO: 1299080 - DNA, 25 bp, Homo sapien
aggcagccaccgagttggccgcgat

SEQ ID NO: 1299081 - DNA, 25 bp, Homo sapien
cccattcaggatcgcagaccagctc

SEQ ID NO: 1299082 - DNA, 25 bp, Homo sapien
agcgcgggcagcccggcgactgcga

SEQ ID NO: 1299083 - DNA, 25 bp, Homo sapien
gccttccagaacccggagccgctgt

SEQ ID NO: 1299084 - DNA, 25 bp, Homo sapien
cgagctctccgagcactttttctta

SEQ ID NO: 1299085 - DNA, 25 bp, Homo sapien
ggagccgctgtccgagctctccgag

SEQ ID NO: 1299086 - DNA, 25 bp, Homo sapien
ccggagccgctgtccgagctctccg

SEQ ID NO: 1299087 - DNA, 25 bp, Homo sapien
tttcggtaggatggaggaatgaaca

SEQ ID NO: 1299088 - DNA, 25 bp, Homo sapien
cctggcacagaactagcatcgagta

SEQ ID NO: 1299089 - DNA, 25 bp, Homo sapien
cattggaatggacgccagggtctct

SEQ ID NO: 1299090 - DNA, 25 bp, Homo sapien
tgcaggagagcagacaaagcgtagt

SEQ ID NO: 1299091 - DNA, 25 bp, Homo sapien
tccttacctgcacccttacctgtcc

SEQ ID NO: 1299092 - DNA, 25 bp, Homo sapien
agcagcaggtagcacaagaaaagcg

SEQ ID NO: 1299093 - DNA, 25 bp, Homo sapien
tgcaagtgaagagcagcaggtagca

SEQ ID NO: 1299094 - DNA, 25 bp, Homo sapien
gcaggtagcacaagaaaagcgatac

SEQ ID NO: 1299095 - DNA, 25 bp, Homo sapien
cagcaggtagcacaagaaaagcgat

SEQ ID NO: 1299096 - DNA, 25 bp, Homo sapien
gccgcgcgcgggctccgtcactaga

SEQ ID NO: 1299097 - DNA, 25 bp, Homo sapien
ccgcgcgcgggctccgtcactagac

SEQ ID NO: 1299098 - DNA, 25 bp, Homo sapien
ctgcgaacgggcgagagggagatgg

SEQ ID NO: 1299099 - DNA, 25 bp, Homo sapien
tcatcagctccgttgttttcccttc

SEQ ID NO: 1299100 - DNA, 25 bp, Homo sapien
gagggagatggtccccggagcattt

SEQ ID NO: 1299101 - DNA, 25 bp, Homo sapien
catttttggagctcatcagctccgt

SEQ ID NO: 1299102 - DNA, 25 bp, Homo sapien
ggatccctctcaggagcctcgggaa

SEQ ID NO: 1299103 - DNA, 25 bp, Homo sapien
cgaggtgtggtgaatggaacccagg

SEQ ID NO: 1299104 - DNA, 25 bp, Homo sapien
caggagcctcgggaatccgtttcct

SEQ ID NO: 1299105 - DNA, 25 bp, Homo sapien
tgaatcagtaaaaagcagcgaggtg

SEQ ID NO: 1299106 - DNA, 25 bp, Homo sapien
tattgcacctgtaagctgggtctca

SEQ ID NO: 1299107 - DNA, 25 bp, Homo sapien
tccaagaggtgacagtgttaaggcc

SEQ ID NO: 1299108 - DNA, 25 bp, Homo sapien
taaggccacagatcgctgatattgc

SEQ ID NO: 1299109 - DNA, 25 bp, Homo sapien
cagagcactaaaagggacccaggag

SEQ ID NO: 1299110 - DNA, 25 bp, Homo sapien
tcaagctgaggacttttggagccgc

SEQ ID NO: 1299111 - DNA, 25 bp, Homo sapien
tcacactatgatgagagccacggcc

SEQ ID NO: 1299112 - DNA, 25 bp, Homo sapien
cacagcagcgagtaaacggttctcc

SEQ ID NO: 1299113 - DNA, 25 bp, Homo sapien
gccagggtctgtgcaaagtgctcta

SEQ ID NO: 1299114 - DNA, 25 bp, Homo sapien
cgcttcatgaatttgtgtatcatcc

SEQ ID NO: 1299115 - DNA, 25 bp, Homo sapien
ttgcacaggggccatgctaatcttc

SEQ ID NO: 1299116 - DNA, 25 bp, Homo sapien
atggaacgcttcatgaatttgtgta

SEQ ID NO: 1299117 - DNA, 25 bp, Homo sapien
ggaacgcttcatgaatttgtgtatc

SEQ ID NO: 1299118 - DNA, 25 bp, Homo sapien
gaggcttcgttatctatttcaaata

SEQ ID NO: 1299119 - DNA, 25 bp, Homo sapien
ttttatggaggcttcgttatctatt

SEQ ID NO: 1299120 - DNA, 25 bp, Homo sapien
atatcactgtccacctctggtcttc

SEQ ID NO: 1299121 - DNA, 25 bp, Homo sapien
tcactgtccacctctggtcttcaaa

SEQ ID NO: 1299122 - DNA, 25 bp, Homo sapien
acccaagtcacctcagaaaatggga

SEQ ID NO: 1299123 - DNA, 25 bp, Homo sapien
catttgagaacacatcagcctggac

SEQ ID NO: 1299124 - DNA, 25 bp, Homo sapien
gcacccctcaaattttgttatagtg

SEQ ID NO: 1299125 - DNA, 25 bp, Homo sapien
tttccaaactttaatgcactcctca

SEQ ID NO: 1299126 - DNA, 25 bp, Homo sapien
caatgggatctcctcccaggggctc

SEQ ID NO: 1299127 - DNA, 25 bp, Homo sapien
gatctcctcccaggggctctgaaat

SEQ ID NO: 1299128 - DNA, 25 bp, Homo sapien
gggatctcctcccaggggctctgaa

SEQ ID NO: 1299129 - DNA, 25 bp, Homo sapien
atgggatctcctcccaggggctctg

SEQ ID NO: 1299130 - DNA, 25 bp, Homo sapien
tgtgtccaggcggatgccatgtaga

SEQ ID NO: 1299131 - DNA, 25 bp, Homo sapien
gtgtccaggcggatgccatgtagag

SEQ ID NO: 1299132 - DNA, 25 bp, Homo sapien
ctgtgtccaggcggatgccatgtag

SEQ ID NO: 1299133 - DNA, 25 bp, Homo sapien
cactgtgtccaggcggatgccatgt

SEQ ID NO: 1299134 - DNA, 25 bp, Homo sapien
ccttgcagatggtgttcttggtgta

SEQ ID NO: 1299135 - DNA, 25 bp, Homo sapien
cctggttggcgtaggagtgcttttc

SEQ ID NO: 1299136 - DNA, 25 bp, Homo sapien
cttcactttggcctggttggcgtag

SEQ ID NO: 1299137 - DNA, 25 bp, Homo sapien
tcttggtgtacacacgggtgcactc

SEQ ID NO: 1299138 - DNA, 25 bp, Homo sapien
cctggccagtctgacagaagcaccc

SEQ ID NO: 1299139 - DNA, 25 bp, Homo sapien
ccctggccagtctgacagaagcacc

SEQ ID NO: 1299140 - DNA, 25 bp, Homo sapien
ccaagagcagctacaaggcaggact

SEQ ID NO: 1299141 - DNA, 25 bp, Homo sapien
tatacatgccaagctggagccaaag

SEQ ID NO: 1299142 - DNA, 25 bp, Homo sapien
acaaagtaggaagcaggtctgggcc

SEQ ID NO: 1299143 - DNA, 25 bp, Homo sapien
caccaggtggttgcttgcgagagaa

SEQ ID NO: 1299144 - DNA, 25 bp, Homo sapien
ttgtccaccccgactagaatgtgag

SEQ ID NO: 1299145 - DNA, 25 bp, Homo sapien
tctccatgggaataacagtagttac

SEQ ID NO: 1299146 - DNA, 25 bp, Homo sapien
tagtaatcaggaggtagcacaagca

SEQ ID NO: 1299147 - DNA, 25 bp, Homo sapien
ggctagctgaatgaccctggctact

SEQ ID NO: 1299148 - DNA, 25 bp, Homo sapien
aatacaggctctttagcataatgcc

SEQ ID NO: 1299149 - DNA, 25 bp, Homo sapien
tttaaaggagcaaaagcagattgtt

SEQ ID NO: 1299150 - DNA, 25 bp, Homo sapien
ccaacctcatcagccattcaaataa

SEQ ID NO: 1299151 - DNA, 25 bp, Homo sapien
gagctcaagtattccgcccttttgg

SEQ ID NO: 1299152 - DNA, 25 bp, Homo sapien
attgcatcctgccatacccatgagc

SEQ ID NO: 1299153 - DNA, 25 bp, Homo sapien
tgcataagtatggagctaagtgcct

SEQ ID NO: 1299154 - DNA, 25 bp, Homo sapien
ttttgcttcagggtatactcttcgg

SEQ ID NO: 1299155 - DNA, 25 bp, Homo sapien
gccaccctctgaactttgaaaactg

SEQ ID NO: 1299156 - DNA, 25 bp, Homo sapien
tcttgagtctgggaaaagtggtatc

SEQ ID NO: 1299157 - DNA, 25 bp, Homo sapien
catacactccctgcttttcatggat

SEQ ID NO: 1299158 - DNA, 25 bp, Homo sapien
cagaagcactttgcctcaaccagag

SEQ ID NO: 1299159 - DNA, 25 bp, Homo sapien
gagctgctctagtaaggactcttga

SEQ ID NO: 1299160 - DNA, 25 bp, Homo sapien
aagcaaattcacacgttttctaact

SEQ ID NO: 1299161 - DNA, 25 bp, Homo sapien
gaaattgagtagctaacttttggta

SEQ ID NO: 1299162 - DNA, 25 bp, Homo sapien
gttttggtttgtacagactttgaca

SEQ ID NO: 1299163 - DNA, 25 bp, Homo sapien
gggaaagaagaaacctcagtcttga

SEQ ID NO: 1299164 - DNA, 25 bp, Homo sapien
tactgatagtaatagtgatacttca

SEQ ID NO: 1299165 - DNA, 25 bp, Homo sapien
gctcaccatactgatagtaatagtg

SEQ ID NO: 1299166 - DNA, 25 bp, Homo sapien
caccatactgatagtaatagtgata

SEQ ID NO: 1299167 - DNA, 25 bp, Homo sapien
ccatactgatagtaatagtgatact

SEQ ID NO: 1299168 - DNA, 25 bp, Homo sapien
tgaatgttgctgtcaaagggctgcc

SEQ ID NO: 1299169 - DNA, 25 bp, Homo sapien
caagggcccaaatgcataagtttct

SEQ ID NO: 1299170 - DNA, 25 bp, Homo sapien
taatatactctatgggctccctctc

SEQ ID NO: 1299171 - DNA, 25 bp, Homo sapien
gaattagaggatttggctaccctga

SEQ ID NO: 1299172 - DNA, 25 bp, Homo sapien
ggtgtagctgcctttccttgaaaaa

SEQ ID NO: 1299173 - DNA, 25 bp, Homo sapien
cctagaatttgtggtagttgccaaa

SEQ ID NO: 1299174 - DNA, 25 bp, Homo sapien
tacagtcggacttggatacatcatt

SEQ ID NO: 1299175 - DNA, 25 bp, Homo sapien
gtatatcggtacgtctgagcccaag

SEQ ID NO: 1299176 - DNA, 25 bp, Homo sapien
gcctaggtaagcataaggtgccacg

SEQ ID NO: 1299177 - DNA, 25 bp, Homo sapien
tcatgccctgtattcagaagagagg

SEQ ID NO: 1299178 - DNA, 25 bp, Homo sapien
tgcctaaaaggagcatagaacctca

SEQ ID NO: 1299179 - DNA, 25 bp, Homo sapien
tccaaaggcagctagtacatcagtc

SEQ ID NO: 1299180 - DNA, 25 bp, Homo sapien
actagacaaacactacattgaggag

SEQ ID NO: 1299181 - DNA, 25 bp, Homo sapien
gaattaccatccattctccaaaaaa

SEQ ID NO: 1299182 - DNA, 25 bp, Homo sapien
agttattttcataccaacactagac

SEQ ID NO: 1299183 - DNA, 25 bp, Homo sapien
tgaggagatgaattaccatccattc

SEQ ID NO: 1299184 - DNA, 25 bp, Homo sapien
tgaaatagcccataaagacctgtct

SEQ ID NO: 1299185 - DNA, 25 bp, Homo sapien
tcccgggtagcagaagggttgccat

SEQ ID NO: 1299186 - DNA, 25 bp, Homo sapien
aaaactttccatgtgtgcggtatcg

SEQ ID NO: 1299187 - DNA, 25 bp, Homo sapien
tgtaaagtcacatatcccaggccct

SEQ ID NO: 1299188 - DNA, 25 bp, Homo sapien
accgtcgcgcctgggaactgtgagc

SEQ ID NO: 1299189 - DNA, 25 bp, Homo sapien
ccagaaaacagttacaagacaagac

SEQ ID NO: 1299190 - DNA, 25 bp, Homo sapien
aatccagaaaacagttacaagacaa

SEQ ID NO: 1299191 - DNA, 25 bp, Homo sapien
atgcccttttgccaccgtcgcgcct

SEQ ID NO: 1299192 - DNA, 25 bp, Homo sapien
cttggcagcatcacacggtagggac

SEQ ID NO: 1299193 - DNA, 25 bp, Homo sapien
gcctgggtgcctggagtatcactga

SEQ ID NO: 1299194 - DNA, 25 bp, Homo sapien
gagcaactcgaggacaacttcggga

SEQ ID NO: 1299195 - DNA, 25 bp, Homo sapien
tggatcttgctctcccagtgaggga

SEQ ID NO: 1299196 - DNA, 25 bp, Homo sapien
tgaggaacttctgttcccggtggct

SEQ ID NO: 1299197 - DNA, 25 bp, Homo sapien
ccacctgcaggttcggttcagattt

SEQ ID NO: 1299198 - DNA, 25 bp, Homo sapien
tctgcccctgtcctactgtgggaat

SEQ ID NO: 1299199 - DNA, 25 bp, Homo sapien
tgcactgtccaaaggaggtcctgag

SEQ ID NO: 1299200 - DNA, 25 bp, Homo sapien
aatgtgggaacttggcttcaagaac

SEQ ID NO: 1299201 - DNA, 25 bp, Homo sapien
caagaacacaaccttaggaccttgg

SEQ ID NO: 1299202 - DNA, 25 bp, Homo sapien
gaagacccttatggagacctgaggc

SEQ ID NO: 1299203 - DNA, 25 bp, Homo sapien
catcaggtggttaaagtcgtcaaag

SEQ ID NO: 1299204 - DNA, 25 bp, Homo sapien
cacgtcatggcaagtgtgtcaaaaa

SEQ ID NO: 1299205 - DNA, 25 bp, Homo sapien
aaagtcatgacaagcaggaaagtgc

SEQ ID NO: 1299206 - DNA, 25 bp, Homo sapien
gaggcactaccgcagaacttcatgt

SEQ ID NO: 1299207 - DNA, 25 bp, Homo sapien
tcacagaaacacacgtcatggcaag

SEQ ID NO: 1299208 - DNA, 25 bp, Homo sapien
gatgaaacctacttcctagaagccc

SEQ ID NO: 1299209 - DNA, 25 bp, Homo sapien
aacagattgtgaaactaggtccagc

SEQ ID NO: 1299210 - DNA, 25 bp, Homo sapien
ggtttctcggctagggctctgccta

SEQ ID NO: 1299211 - DNA, 25 bp, Homo sapien
gaaagtaatgccacacaaccaaagt

SEQ ID NO: 1299212 - DNA, 25 bp, Homo sapien
tggtcatcatccacagtagaataga

SEQ ID NO: 1299213 - DNA, 25 bp, Homo sapien
catcatccacagtagaatagatgtg

SEQ ID NO: 1299214 - DNA, 25 bp, Homo sapien
aatggtcatcatccacagtagaata

SEQ ID NO: 1299215 - DNA, 25 bp, Homo sapien
gtcatcatccacagtagaatagatg

SEQ ID NO: 1299216 - DNA, 25 bp, Homo sapien
cccctcattgctcagaaaatccaca

SEQ ID NO: 1299217 - DNA, 25 bp, Homo sapien
attgctcagaaaatccacagcttgc

SEQ ID NO: 1299218 - DNA, 25 bp, Homo sapien
cctcattgctcagaaaatccacagc

SEQ ID NO: 1299219 - DNA, 25 bp, Homo sapien
tcattgctcagaaaatccacagctt

SEQ ID NO: 1299220 - DNA, 25 bp, Homo sapien
ttcaggccaattcagaaggaaactg

SEQ ID NO: 1299221 - DNA, 25 bp, Homo sapien
tcatggagacaatggctattagggc

SEQ ID NO: 1299222 - DNA, 25 bp, Homo sapien
tgtgcaaaggaaagacaacagggcc

SEQ ID NO: 1299223 - DNA, 25 bp, Homo sapien
tctaccttagctaagaattcacaag

SEQ ID NO: 1299224 - DNA, 25 bp, Homo sapien
aggtcttggacaagccttaatcaaa

SEQ ID NO: 1299225 - DNA, 25 bp, Homo sapien
cttggacaagccttaatcaaattca

SEQ ID NO: 1299226 - DNA, 25 bp, Homo sapien
atcctgaaagttcaacccttcaggt

SEQ ID NO: 1299227 - DNA, 25 bp, Homo sapien
tcctgaaagttcaacccttcaggtc

SEQ ID NO: 1299228 - DNA, 25 bp, Homo sapien
ccacagtgaggccatttgctggcat

SEQ ID NO: 1299229 - DNA, 25 bp, Homo sapien
ccatttgctggcatgaagctattcc

SEQ ID NO: 1299230 - DNA, 25 bp, Homo sapien
cctggattgctgataggtgctctcc

SEQ ID NO: 1299231 - DNA, 25 bp, Homo sapien
aagctattcccaccaaagttccctg

SEQ ID NO: 1299232 - DNA, 25 bp, Homo sapien
tagttttgcatggtcctagatggac

SEQ ID NO: 1299233 - DNA, 25 bp, Homo sapien
tacagtcaactctagttttgcatgg

SEQ ID NO: 1299234 - DNA, 25 bp, Homo sapien
gagggctttctaatactacagtcaa

SEQ ID NO: 1299235 - DNA, 25 bp, Homo sapien
cccagcgtggtgtcttgaactgggc

SEQ ID NO: 1299236 - DNA, 25 bp, Homo sapien
ggctttgcttagtaccatgtgtgca

SEQ ID NO: 1299237 - DNA, 25 bp, Homo sapien
ggcatgatcttaaaggctaccaggc

SEQ ID NO: 1299238 - DNA, 25 bp, Homo sapien
ccagaatatgtgtggtgaactcatt

SEQ ID NO: 1299239 - DNA, 25 bp, Homo sapien
gtgtgcattgatcacttccagaata

SEQ ID NO: 1299240 - DNA, 25 bp, Homo sapien
tggcctgccactttcacatatgttt

SEQ ID NO: 1299241 - DNA, 25 bp, Homo sapien
gcctgccactttcacatatgtttct

SEQ ID NO: 1299242 - DNA, 25 bp, Homo sapien
gtggcctgccactttcacatatgtt

SEQ ID NO: 1299243 - DNA, 25 bp, Homo sapien
ggtggcctgccactttcacatatgt

SEQ ID NO: 1299244 - DNA, 25 bp, Homo sapien
ccatcgtgtccggcccattagctga

SEQ ID NO: 1299245 - DNA, 25 bp, Homo sapien
tttctgactacataaaatgtattac

SEQ ID NO: 1299246 - DNA, 25 bp, Homo sapien
tcgtgtccggcccattagctgattt

SEQ ID NO: 1299247 - DNA, 25 bp, Homo sapien
gtgtccggcccattagctgattttt

SEQ ID NO: 1299248 - DNA, 25 bp, Homo sapien
cccactggcgaacgtccatgggtgc

SEQ ID NO: 1299249 - DNA, 25 bp, Homo sapien
cactggcgaacgtccatgggtgcag

SEQ ID NO: 1299250 - DNA, 25 bp, Homo sapien
aacccactggcgaacgtccatgggt

SEQ ID NO: 1299251 - DNA, 25 bp, Homo sapien
ctggcgaacgtccatgggtgcagct

SEQ ID NO: 1299252 - DNA, 25 bp, Homo sapien
gaacacttcatcaaccaaagtggca

SEQ ID NO: 1299253 - DNA, 25 bp, Homo sapien
tcccaattctgaacacttcatcaac

SEQ ID NO: 1299254 - DNA, 25 bp, Homo sapien
gggcacaatgtgctgggctcgggct

SEQ ID NO: 1299255 - DNA, 25 bp, Homo sapien
gctgagatatagtacagggcacaat

SEQ ID NO: 1299256 - DNA, 25 bp, Homo sapien
gggactgcgtgtagccgccggctcc

SEQ ID NO: 1299257 - DNA, 25 bp, Homo sapien
ttttcggcttgagaaggtgcgggcg

SEQ ID NO: 1299258 - DNA, 25 bp, Homo sapien
gctcccccgtatgaggagctgccat

SEQ ID NO: 1299259 - DNA, 25 bp, Homo sapien
gccggctcccccgtatgaggagctg

SEQ ID NO: 1299260 - DNA, 25 bp, Homo sapien
aacaggattagtgcctgtgccacgt

SEQ ID NO: 1299261 - DNA, 25 bp, Homo sapien
acacgcctctcggaccctaggctcg

SEQ ID NO: 1299262 - DNA, 25 bp, Homo sapien
ggaggcttcgccccttcaaacactg

SEQ ID NO: 1299263 - DNA, 25 bp, Homo sapien
taggctcgccctcttgctaaaacct

SEQ ID NO: 1299264 - DNA, 25 bp, Homo sapien
ccttcccgcgaatggcggagccagt

SEQ ID NO: 1299265 - DNA, 25 bp, Homo sapien
gggtgctcgcttcagccaatcggtg

SEQ ID NO: 1299266 - DNA, 25 bp, Homo sapien
ttggtcacgattctccgcaaagagg

SEQ ID NO: 1299267 - DNA, 25 bp, Homo sapien
aatagcggaaaaccacagaacgcgg

SEQ ID NO: 1299268 - DNA, 25 bp, Homo sapien
tgcccatgctccagaaaacgcgtac

SEQ ID NO: 1299269 - DNA, 25 bp, Homo sapien
cctctgcccatgctccagaaaacgc

SEQ ID NO: 1299270 - DNA, 25 bp, Homo sapien
ggatgctacgcttgttcctgtctcc

SEQ ID NO: 1299271 - DNA, 25 bp, Homo sapien
tctgcccatgctccagaaaacgcgt

SEQ ID NO: 1299272 - DNA, 25 bp, Homo sapien
tgcgctcccagttggctccaaaagc

SEQ ID NO: 1299273 - DNA, 25 bp, Homo sapien
gcggccatctttacgaagggcaaaa

SEQ ID NO: 1299274 - DNA, 25 bp, Homo sapien
cctccgcggccatctttacgaaggg

SEQ ID NO: 1299275 - DNA, 25 bp, Homo sapien
tccgcggccatctttacgaagggca

SEQ ID NO: 1299276 - DNA, 25 bp, Homo sapien
tctttcagcaaacccagcacaggcg

SEQ ID NO: 1299277 - DNA, 25 bp, Homo sapien
tggtcaggcccaggaagaagcactg

SEQ ID NO: 1299278 - DNA, 25 bp, Homo sapien
caggcccaggaagaagcactgccat

SEQ ID NO: 1299279 - DNA, 25 bp, Homo sapien
agcacaggcgcctccagctggtcag

SEQ ID NO: 1299280 - DNA, 25 bp, Homo sapien
gctgtgtctgtctgggatgggggca

SEQ ID NO: 1299281 - DNA, 25 bp, Homo sapien
gcttccactctgagccctggctgtg

SEQ ID NO: 1299282 - DNA, 25 bp, Homo sapien
ggctgtgtctgtctgggatgggggc

SEQ ID NO: 1299283 - DNA, 25 bp, Homo sapien
cctgcttccactctgagccctggct

SEQ ID NO: 1299284 - DNA, 25 bp, Homo sapien
cttaagggtccggtatgcctgcctc

SEQ ID NO: 1299285 - DNA, 25 bp, Homo sapien
cagaggatccagacgccttggagga

SEQ ID NO: 1299286 - DNA, 25 bp, Homo sapien
ggcaattctgttgtttgcccctccc

SEQ ID NO: 1299287 - DNA, 25 bp, Homo sapien
ctgatgtgctgaccggcaattctgt

SEQ ID NO: 1299288 - DNA, 25 bp, Homo sapien
ggcagaatatagtgcactgtgatca

SEQ ID NO: 1299289 - DNA, 25 bp, Homo sapien
tgtatatatctccaaggccatgctg

SEQ ID NO: 1299290 - DNA, 25 bp, Homo sapien
tcaaggaaaacctgtatatatctcc

SEQ ID NO: 1299291 - DNA, 25 bp, Homo sapien
aaacctgtatatatctccaaggcca

SEQ ID NO: 1299292 - DNA, 25 bp, Homo sapien
tcggcatccccggtctgccgctcac

SEQ ID NO: 1299293 - DNA, 25 bp, Homo sapien
gtgctcggcatccccggtctgccgc

SEQ ID NO: 1299294 - DNA, 25 bp, Homo sapien
tgctcggcatccccggtctgccgct

SEQ ID NO: 1299295 - DNA, 25 bp, Homo sapien
gcatccccggtctgccgctcactcg

SEQ ID NO: 1299296 - DNA, 25 bp, Homo sapien
tgggtagaacgtggccactccccac

SEQ ID NO: 1299297 - DNA, 25 bp, Homo sapien
tggacagtagccaaggacacgctgg

SEQ ID NO: 1299298 - DNA, 25 bp, Homo sapien
ctggctgggtagaacgtggccactc

SEQ ID NO: 1299299 - DNA, 25 bp, Homo sapien
ctgtggacagtagccaaggacacgc

SEQ ID NO: 1299300 - DNA, 25 bp, Homo sapien
aagcatcatcgcgtcatagcagggc

SEQ ID NO: 1299301 - DNA, 25 bp, Homo sapien
accacaccgacagctttcggatgct

SEQ ID NO: 1299302 - DNA, 25 bp, Homo sapien
gaaggtggtccggaagcatcatcgc

SEQ ID NO: 1299303 - DNA, 25 bp, Homo sapien
catcgcgtcatagcagggcagttct

SEQ ID NO: 1299304 - DNA, 25 bp, Homo sapien
ccagccatccgggtgttcgaatatg

SEQ ID NO: 1299305 - DNA, 25 bp, Homo sapien
tcgaatatgaccgagccacactgag

SEQ ID NO: 1299306 - DNA, 25 bp, Homo sapien
ggtgttcgaatatgaccgagccaca

SEQ ID NO: 1299307 - DNA, 25 bp, Homo sapien
ccatccgggtgttcgaatatgaccg

SEQ ID NO: 1299308 - DNA, 25 bp, Homo sapien
tccaccatttcctccgcgcctgagg

SEQ ID NO: 1299309 - DNA, 25 bp, Homo sapien
catttcctccgcgcctgaggagtga

SEQ ID NO: 1299310 - DNA, 25 bp, Homo sapien
accatttcctccgcgcctgaggagt

SEQ ID NO: 1299311 - DNA, 25 bp, Homo sapien
ccaccatttcctccgcgcctgagga

SEQ ID NO: 1299312 - DNA, 25 bp, Homo sapien
tctatgcactcagcaagagcgggac

SEQ ID NO: 1299313 - DNA, 25 bp, Homo sapien
aggcgcatgacccatttagcacaga

SEQ ID NO: 1299314 - DNA, 25 bp, Homo sapien
taaggatgaggctgcttcgccagtg

SEQ ID NO: 1299315 - DNA, 25 bp, Homo sapien
tatcagctgcctcagaacaggcgca

SEQ ID NO: 1299316 - DNA, 25 bp, Homo sapien
gcccagctagggaaggactcatcat

SEQ ID NO: 1299317 - DNA, 25 bp, Homo sapien
tgtaaactgcgaacaagctgtggca

SEQ ID NO: 1299318 - DNA, 25 bp, Homo sapien
gaagcctgcttaagagggaccctaa

SEQ ID NO: 1299319 - DNA, 25 bp, Homo sapien
tctgcccagaggtcgagagatgctc

SEQ ID NO: 1299320 - DNA, 25 bp, Homo sapien
gatttgatttgaattcttgggtcta

SEQ ID NO: 1299321 - DNA, 25 bp, Homo sapien
cattggcagttttggccaaaatgta

SEQ ID NO: 1299322 - DNA, 25 bp, Homo sapien
aatacccggggactggccagagctg

SEQ ID NO: 1299323 - DNA, 25 bp, Homo sapien
tagatttgatttgaattcttgggtc

SEQ ID NO: 1299324 - DNA, 25 bp, Homo sapien
catctgatgggaaatgggtgcttct

SEQ ID NO: 1299325 - DNA, 25 bp, Homo sapien
ctaaggcttctagatgggaaatgcc

SEQ ID NO: 1299326 - DNA, 25 bp, Homo sapien
gaagaagctgcagggacgagcatct

SEQ ID NO: 1299327 - DNA, 25 bp, Homo sapien
gaagctaagcctcctgtgatacagt

SEQ ID NO: 1299328 - DNA, 25 bp, Homo sapien
gaaacctgcgtcaaagatcagaccc

SEQ ID NO: 1299329 - DNA, 25 bp, Homo sapien
tgtgttctcgccagcattccatgga

SEQ ID NO: 1299330 - DNA, 25 bp, Homo sapien
gctatagaggtgctactgccacagg

SEQ ID NO: 1299331 - DNA, 25 bp, Homo sapien
gtatcatcctagagagcagaccact

SEQ ID NO: 1299332 - DNA, 25 bp, Homo sapien
agaaaatcaagctctaaagcctggt

SEQ ID NO: 1299333 - DNA, 25 bp, Homo sapien
tcaagctctaaagcctggtgaaggg

SEQ ID NO: 1299334 - DNA, 25 bp, Homo sapien
gcctggtgaagggatactaggtctc

SEQ ID NO: 1299335 - DNA, 25 bp, Homo sapien
aagggatactaggtctccatggttt

SEQ ID NO: 1299336 - DNA, 25 bp, Homo sapien
atgaagagtatcagggcagttggtt

SEQ ID NO: 1299337 - DNA, 25 bp, Homo sapien
caatgcctccatgtctaagaaatag

SEQ ID NO: 1299338 - DNA, 25 bp, Homo sapien
ttattatagttgctaaggtttccac

SEQ ID NO: 1299339 - DNA, 25 bp, Homo sapien
gggcagttggttctagctggcaacc

SEQ ID NO: 1299340 - DNA, 25 bp, Homo sapien
tctgatgcttgagaaggcactgtct

SEQ ID NO: 1299341 - DNA, 25 bp, Homo sapien
ggatccctgtagaagggcttaaaga

SEQ ID NO: 1299342 - DNA, 25 bp, Homo sapien
tcaagtctgatgcttgagaaggcac

SEQ ID NO: 1299343 - DNA, 25 bp, Homo sapien
atgatgggatccctgtagaagggct

SEQ ID NO: 1299344 - DNA, 25 bp, Homo sapien
tccatctccaatcactacatatgtg

SEQ ID NO: 1299345 - DNA, 25 bp, Homo sapien
tacatatgtgactttctttccaaac

SEQ ID NO: 1299346 - DNA, 25 bp, Homo sapien
ttccaaaccttgacacaattctctc

SEQ ID NO: 1299347 - DNA, 25 bp, Homo sapien
ggctgcaatttcttcatctcgtcca

SEQ ID NO: 1299348 - DNA, 25 bp, Homo sapien
gaaatttcctgttagaatactcttc

SEQ ID NO: 1299349 - DNA, 25 bp, Homo sapien
agaaatttcctgttagaatactctt

SEQ ID NO: 1299350 - DNA, 25 bp, Homo sapien
aaatttcctgttagaatactcttct

SEQ ID NO: 1299351 - DNA, 25 bp, Homo sapien
aagaaatttcctgttagaatactct

SEQ ID NO: 1299352 - DNA, 25 bp, Homo sapien
tccacctgacccttatagttgctct

SEQ ID NO: 1299353 - DNA, 25 bp, Homo sapien
aaatctttatatagatattacatac

SEQ ID NO: 1299354 - DNA, 25 bp, Homo sapien
cctgacccttatagttgctctagat

SEQ ID NO: 1299355 - DNA, 25 bp, Homo sapien
gacccttatagttgctctagattaa

SEQ ID NO: 1299356 - DNA, 25 bp, Homo sapien
gatcatagggttatgtacacctcaa

SEQ ID NO: 1299357 - DNA, 25 bp, Homo sapien
gccagagggtaggatttagcccatg

SEQ ID NO: 1299358 - DNA, 25 bp, Homo sapien
gcagagttcccattacattgttaga

SEQ ID NO: 1299359 - DNA, 25 bp, Homo sapien
cagctatataaataagtgggcacgg

SEQ ID NO: 1299360 - DNA, 25 bp, Homo sapien
aagttttattgcaaggccagtgaca

SEQ ID NO: 1299361 - DNA, 25 bp, Homo sapien
tttggtagcactatagatgttctca

SEQ ID NO: 1299362 - DNA, 25 bp, Homo sapien
caattttggtagcactatagatgtt

SEQ ID NO: 1299363 - DNA, 25 bp, Homo sapien
tagtccatataggagaaccttggcc

SEQ ID NO: 1299364 - DNA, 25 bp, Homo sapien
ctgggtggtagtgatcagaacattc

SEQ ID NO: 1299365 - DNA, 25 bp, Homo sapien
tgttcagagccaatgttcagctact

SEQ ID NO: 1299366 - DNA, 25 bp, Homo sapien
ccaacctgggagcaagaattcgtat

SEQ ID NO: 1299367 - DNA, 25 bp, Homo sapien
gaattcgtatgtgccaactctttag

SEQ ID NO: 1299368 - DNA, 25 bp, Homo sapien
tattaaagggcagagattctactca

SEQ ID NO: 1299369 - DNA, 25 bp, Homo sapien
ctggatgagaagtaaggactttaat

SEQ ID NO: 1299370 - DNA, 25 bp, Homo sapien
gcagttcctaaccaggaatctgtta

SEQ ID NO: 1299371 - DNA, 25 bp, Homo sapien
taaccaggaatctgttaaaacttca

SEQ ID NO: 1299372 - DNA, 25 bp, Homo sapien
taaggactttaatgcagttcctaac

SEQ ID NO: 1299373 - DNA, 25 bp, Homo sapien
tttattgaattccattgtagacagg

SEQ ID NO: 1299374 - DNA, 25 bp, Homo sapien
tcagcagtggagtacatgggctcta

SEQ ID NO: 1299375 - DNA, 25 bp, Homo sapien
ataaactgctgtatataggggtggg

SEQ ID NO: 1299376 - DNA, 25 bp, Homo sapien
ccattgtagacaggtgaatataaac

SEQ ID NO: 1299377 - DNA, 25 bp, Homo sapien
aattgcttggaagattatcactgag

SEQ ID NO: 1299378 - DNA, 25 bp, Homo sapien
actgagctagtggtgaaaagcatga

SEQ ID NO: 1299379 - DNA, 25 bp, Homo sapien
ggtgaaaagcatgatgagtgcaatg

SEQ ID NO: 1299380 - DNA, 25 bp, Homo sapien
tactggccttggagatcctttatct

SEQ ID NO: 1299381 - DNA, 25 bp, Homo sapien
cacagggatgtcgaggaacagggta

SEQ ID NO: 1299382 - DNA, 25 bp, Homo sapien
aggaacagggtacagatgttcaagc

SEQ ID NO: 1299383 - DNA, 25 bp, Homo sapien
cccggtcacatcacccaccatcttc

SEQ ID NO: 1299384 - DNA, 25 bp, Homo sapien
cagggtacagatgttcaagcacttg

SEQ ID NO: 1299385 - DNA, 25 bp, Homo sapien
ctagacttcatgcagtacactaatg

SEQ ID NO: 1299386 - DNA, 25 bp, Homo sapien
tgtccctagacttcatgcagtacac

SEQ ID NO: 1299387 - DNA, 25 bp, Homo sapien
ccctagacttcatgcagtacactaa

SEQ ID NO: 1299388 - DNA, 25 bp, Homo sapien
gtccctagacttcatgcagtacact

SEQ ID NO: 1299389 - DNA, 25 bp, Homo sapien
tcacagaggacatcaagggagcaga

SEQ ID NO: 1299390 - DNA, 25 bp, Homo sapien
ggtgcccctagcatggcaacctcgt

SEQ ID NO: 1299391 - DNA, 25 bp, Homo sapien
tatgaagcccaggaagcactagttt

SEQ ID NO: 1299392 - DNA, 25 bp, Homo sapien
catctcctaatttgtcgggaggcca

SEQ ID NO: 1299393 - DNA, 25 bp, Homo sapien
gggatgttcaggcaaagataaattt

SEQ ID NO: 1299394 - DNA, 25 bp, Homo sapien
agagtagtgctacccagaatgccat

SEQ ID NO: 1299395 - DNA, 25 bp, Homo sapien
taatttagattctggtgcaagctcc

SEQ ID NO: 1299396 - DNA, 25 bp, Homo sapien
tctcttcttggagaaaccttagagt

SEQ ID NO: 1299397 - DNA, 25 bp, Homo sapien
ttctctcactttccggtagcggaaa

SEQ ID NO: 1299398 - DNA, 25 bp, Homo sapien
cacccacgttgcttttatgcttatc

SEQ ID NO: 1299399 - DNA, 25 bp, Homo sapien
cactgaaaccatctgttgagaaact

SEQ ID NO: 1299400 - DNA, 25 bp, Homo sapien
gaaagctagtttcctcatccagtcc

SEQ ID NO: 1299401 - DNA, 25 bp, Homo sapien
cctgggagggtgaagctacagcaag

SEQ ID NO: 1299402 - DNA, 25 bp, Homo sapien
agctacagcaagccatatatgatca

SEQ ID NO: 1299403 - DNA, 25 bp, Homo sapien
cagggacaggggttacaatgagccg

SEQ ID NO: 1299404 - DNA, 25 bp, Homo sapien
gcaagccatatatgatcacaacact

SEQ ID NO: 1299405 - DNA, 25 bp, Homo sapien
catcttccacatgtacctggtcaca

SEQ ID NO: 1299406 - DNA, 25 bp, Homo sapien
cacatcttccacatgtacctggtca

SEQ ID NO: 1299407 - DNA, 25 bp, Homo sapien
ccacatcttccacatgtacctggtc

SEQ ID NO: 1299408 - DNA, 25 bp, Homo sapien
atcttccacatgtacctggtcacac

SEQ ID NO: 1299409 - DNA, 25 bp, Homo sapien
ctggggggcaggaacacattcaggt

SEQ ID NO: 1299410 - DNA, 25 bp, Homo sapien
acagaactttcagttcctgagtgag

SEQ ID NO: 1299411 - DNA, 25 bp, Homo sapien
tcacagaactttcagttcctgagtg

SEQ ID NO: 1299412 - DNA, 25 bp, Homo sapien
acattcaggtcaaattcttcacaga

SEQ ID NO: 1299413 - DNA, 25 bp, Homo sapien
aatagatgagtatcagccacttcaa

SEQ ID NO: 1299414 - DNA, 25 bp, Homo sapien
tagatgagtatcagccacttcaaaa

SEQ ID NO: 1299415 - DNA, 25 bp, Homo sapien
ctgagccaatcactactgttgggtc

SEQ ID NO: 1299416 - DNA, 25 bp, Homo sapien
aaaatagatgagtatcagccacttc

SEQ ID NO: 1299417 - DNA, 25 bp, Homo sapien
tgggcataggatccagtaagaagtg

SEQ ID NO: 1299418 - DNA, 25 bp, Homo sapien
gggcataggatccagtaagaagtga

SEQ ID NO: 1299419 - DNA, 25 bp, Homo sapien
atttctgggcataggatccagtaag

SEQ ID NO: 1299420 - DNA, 25 bp, Homo sapien
tctgggcataggatccagtaagaag

SEQ ID NO: 1299421 - DNA, 25 bp, Homo sapien
gctcaggaattaaagggcacataac

SEQ ID NO: 1299422 - DNA, 25 bp, Homo sapien
tgcacattatctctgtgagcttcaa

SEQ ID NO: 1299423 - DNA, 25 bp, Homo sapien
cataacatagtgcacattatctctg

SEQ ID NO: 1299424 - DNA, 25 bp, Homo sapien
tgtttgataaacttaagaagtgaga

SEQ ID NO: 1299425 - DNA, 25 bp, Homo sapien
tgtagtctgggacaaagatggactt

SEQ ID NO: 1299426 - DNA, 25 bp, Homo sapien
tgtttttcctggactgatcatcagt

SEQ ID NO: 1299427 - DNA, 25 bp, Homo sapien
gccccggttcttgctagtcatgttt

SEQ ID NO: 1299428 - DNA, 25 bp, Homo sapien
tcatcagtatctttacttggtgtag

SEQ ID NO: 1299429 - DNA, 25 bp, Homo sapien
ccgactggtatgtggttgctgctaa

SEQ ID NO: 1299430 - DNA, 25 bp, Homo sapien
tagcaggcctggtactgattctgac

SEQ ID NO: 1299431 - DNA, 25 bp, Homo sapien
gcgccatgacactaggcttctccga

SEQ ID NO: 1299432 - DNA, 25 bp, Homo sapien
tgacctgtgactccaaagctggagc

SEQ ID NO: 1299433 - DNA, 25 bp, Homo sapien
aagaagtagatatcaggctggcatt

SEQ ID NO: 1299434 - DNA, 25 bp, Homo sapien
ttggcaattgtagaagaagtagata

SEQ ID NO: 1299435 - DNA, 25 bp, Homo sapien
gaagaagtagatatcaggctggcat

SEQ ID NO: 1299436 - DNA, 25 bp, Homo sapien
aaatgtactctgattgacaaggtgg

SEQ ID NO: 1299437 - DNA, 25 bp, Homo sapien
gcccggctacttctccataacttaa

SEQ ID NO: 1299438 - DNA, 25 bp, Homo sapien
ctcagtcatatctgatctctatggg

SEQ ID NO: 1299439 - DNA, 25 bp, Homo sapien
ggtgggaggtacaactcagtcatat

SEQ ID NO: 1299440 - DNA, 25 bp, Homo sapien
aatatttgtgggattcatatacatc

SEQ ID NO: 1299441 - DNA, 25 bp, Homo sapien
cactaagtgtgaagggcaaaatcat

SEQ ID NO: 1299442 - DNA, 25 bp, Homo sapien
agcatctagcaaagcacctgacata

SEQ ID NO: 1299443 - DNA, 25 bp, Homo sapien
tatacatctatcttgtgtgcactaa

SEQ ID NO: 1299444 - DNA, 25 bp, Homo sapien
gcccggcctaaaagattctcattgc

SEQ ID NO: 1299445 - DNA, 25 bp, Homo sapien
cagatacagattacgacatacagaa

SEQ ID NO: 1299446 - DNA, 25 bp, Homo sapien
ctatgtaataatggatcagagctca

SEQ ID NO: 1299447 - DNA, 25 bp, Homo sapien
ttcagatcaataagggacagggttt

SEQ ID NO: 1299448 - DNA, 25 bp, Homo sapien
aagaataatgtgctgggcttggctg

SEQ ID NO: 1299449 - DNA, 25 bp, Homo sapien
ggctggcttgtggttaaccctgtag

SEQ ID NO: 1299450 - DNA, 25 bp, Homo sapien
gtaagaacactgtgttgacttggag

SEQ ID NO: 1299451 - DNA, 25 bp, Homo sapien
ggagatggagtctgaattaaaccac

SEQ ID NO: 1299452 - DNA, 25 bp, Homo sapien
actacactcagtccagatttcttct

SEQ ID NO: 1299453 - DNA, 25 bp, Homo sapien
gccactacactcagtccagatttct

SEQ ID NO: 1299454 - DNA, 25 bp, Homo sapien
cactacactcagtccagatttcttc

SEQ ID NO: 1299455 - DNA, 25 bp, Homo sapien
ccactacactcagtccagatttctt

SEQ ID NO: 1299456 - DNA, 25 bp, Homo sapien
tctgaatagctatggttactgggtt

SEQ ID NO: 1299457 - DNA, 25 bp, Homo sapien
taaggttagccatgacttcaaactc

SEQ ID NO: 1299458 - DNA, 25 bp, Homo sapien
ttgagaatgagaacctctgcttcac

SEQ ID NO: 1299459 - DNA, 25 bp, Homo sapien
cctactctgataaactaggagtgat

SEQ ID NO: 1299460 - DNA, 25 bp, Homo sapien
gccccaaactcttaatgcataaaaa

SEQ ID NO: 1299461 - DNA, 25 bp, Homo sapien
catttaaatgtcttgtccagattag

SEQ ID NO: 1299462 - DNA, 25 bp, Homo sapien
gaattagaagcgtttgccccatcat

SEQ ID NO: 1299463 - DNA, 25 bp, Homo sapien
gactgaggaatactgacatcgctag

SEQ ID NO: 1299464 - DNA, 25 bp, Homo sapien
cagcaatggggttttaacctgctgt

SEQ ID NO: 1299465 - DNA, 25 bp, Homo sapien
agcaatggggttttaacctgctgtt

SEQ ID NO: 1299466 - DNA, 25 bp, Homo sapien
cccagaagtgaaattactgagggaa

SEQ ID NO: 1299467 - DNA, 25 bp, Homo sapien
gggtatctctaattagttccatagg

SEQ ID NO: 1299468 - DNA, 25 bp, Homo sapien
taatacactgttttctcaagaccct

SEQ ID NO: 1299469 - DNA, 25 bp, Homo sapien
cttcaatgagtatgttggtcagcac

SEQ ID NO: 1299470 - DNA, 25 bp, Homo sapien
tgtccagggtaagcagtttccgaaa

SEQ ID NO: 1299471 - DNA, 25 bp, Homo sapien
gaggtagtccatacgtttgggttgc

SEQ ID NO: 1299472 - DNA, 25 bp, Homo sapien
ctgctgtagtgtctggtattgagtc

SEQ ID NO: 1299473 - DNA, 25 bp, Homo sapien
cagcatagggttgagtctgctgtag

SEQ ID NO: 1299474 - DNA, 25 bp, Homo sapien
atttgtgaggtataatcattggatg

SEQ ID NO: 1299475 - DNA, 25 bp, Homo sapien
cattggatgagcgagggatgtaatc

SEQ ID NO: 1299476 - DNA, 25 bp, Homo sapien
tataatcattggatgagcgagggat

SEQ ID NO: 1299477 - DNA, 25 bp, Homo sapien
gggatgtaatcggtgcatgtcataa

SEQ ID NO: 1299478 - DNA, 25 bp, Homo sapien
tgactctcatgattactacttctgg

SEQ ID NO: 1299479 - DNA, 25 bp, Homo sapien
tagctgctatgaaggcttgactctc

SEQ ID NO: 1299480 - DNA, 25 bp, Homo sapien
ggaactgatgtgatactctgatgaa

SEQ ID NO: 1299481 - DNA, 25 bp, Homo sapien
ctacttctggtatgaacgctgtaaa

SEQ ID NO: 1299482 - DNA, 25 bp, Homo sapien
ttgaagcaaggcttgatgtttcagg

SEQ ID NO: 1299483 - DNA, 25 bp, Homo sapien
tgggaaggtttgaagcaaggcttga

SEQ ID NO: 1299484 - DNA, 25 bp, Homo sapien
gcttgatgtttcaggcttctgatca

SEQ ID NO: 1299485 - DNA, 25 bp, Homo sapien
gcaaggcttgatgtttcaggcttct

SEQ ID NO: 1299486 - DNA, 25 bp, Homo sapien
gacctccaaaagtggagccaccaca

SEQ ID NO: 1299487 - DNA, 25 bp, Homo sapien
cacctggacctccaaaagtggagcc

SEQ ID NO: 1299488 - DNA, 25 bp, Homo sapien
tgttggtctcttataaggaagaaac

SEQ ID NO: 1299489 - DNA, 25 bp, Homo sapien
atgttggtctcttataaggaagaaa

SEQ ID NO: 1299490 - DNA, 25 bp, Homo sapien
aatgtaacagctgatggtaagaacc

SEQ ID NO: 1299491 - DNA, 25 bp, Homo sapien
gcccatacgctaatcagcatgtgaa

SEQ ID NO: 1299492 - DNA, 25 bp, Homo sapien
acaaatcagtgcacaagtttcagga

SEQ ID NO: 1299493 - DNA, 25 bp, Homo sapien
atgagtagttcattaaaaagaaagc

SEQ ID NO: 1299494 - DNA, 25 bp, Homo sapien
ttatagtttgctctcctgattcctg

SEQ ID NO: 1299495 - DNA, 25 bp, Homo sapien
cttatagtttgctctcctgattcct

SEQ ID NO: 1299496 - DNA, 25 bp, Homo sapien
tagtttgctctcctgattcctgcat

SEQ ID NO: 1299497 - DNA, 25 bp, Homo sapien
tatagtttgctctcctgattcctgc

SEQ ID NO: 1299498 - DNA, 25 bp, Homo sapien
ccagaatttttactcaaggtagaca

SEQ ID NO: 1299499 - DNA, 25 bp, Homo sapien
caagctttgatacaaactagttggt

SEQ ID NO: 1299500 - DNA, 25 bp, Homo sapien
gggaatctaagtatcatctactcat

SEQ ID NO: 1299501 - DNA, 25 bp, Homo sapien
caacaggctattaactattacagga

SEQ ID NO: 1299502 - DNA, 25 bp, Homo sapien
tcctggttgttaagagaaatagcaa

SEQ ID NO: 1299503 - DNA, 25 bp, Homo sapien
cacagcaaagtgagcaaagattcaa

SEQ ID NO: 1299504 - DNA, 25 bp, Homo sapien
catgtactaactaggcagtagaggc

SEQ ID NO: 1299505 - DNA, 25 bp, Homo sapien
caaacaatacaagctagaaactgac

SEQ ID NO: 1299506 - DNA, 25 bp, Homo sapien
aggacagtagtaggacagtaataca

SEQ ID NO: 1299507 - DNA, 25 bp, Homo sapien
caggacagtagtaggacagtaatac

SEQ ID NO: 1299508 - DNA, 25 bp, Homo sapien
gacagtagtaggacagtaatacaag

SEQ ID NO: 1299509 - DNA, 25 bp, Homo sapien
ggacagtagtaggacagtaatacaa

SEQ ID NO: 1299510 - DNA, 25 bp, Homo sapien
tcatagggctcatgtttcaacagca

SEQ ID NO: 1299511 - DNA, 25 bp, Homo sapien
tatccaggctcaaggctaagttctg

SEQ ID NO: 1299512 - DNA, 25 bp, Homo sapien
cagtacaaggatgctggctgaataa

SEQ ID NO: 1299513 - DNA, 25 bp, Homo sapien
gaaacagcagcattaacagtacaag

SEQ ID NO: 1299514 - DNA, 25 bp, Homo sapien
ggttttgcacatcatgttacagaag

SEQ ID NO: 1299515 - DNA, 25 bp, Homo sapien
gaagtaataatcaggttttgcacat

SEQ ID NO: 1299516 - DNA, 25 bp, Homo sapien
aagtaataatcaggttttgcacatc

SEQ ID NO: 1299517 - DNA, 25 bp, Homo sapien
agtaataatcaggttttgcacatca

SEQ ID NO: 1299518 - DNA, 25 bp, Homo sapien
gaagaataatgacaaagtaatcatc

SEQ ID NO: 1299519 - DNA, 25 bp, Homo sapien
gagagggctagaagaataatgacaa

SEQ ID NO: 1299520 - DNA, 25 bp, Homo sapien
ggctagaagaataatgacaaagtaa

SEQ ID NO: 1299521 - DNA, 25 bp, Homo sapien
gagggctagaagaataatgacaaag

SEQ ID NO: 1299522 - DNA, 25 bp, Homo sapien
gctctggtaaatcttgctcttcttc

SEQ ID NO: 1299523 - DNA, 25 bp, Homo sapien
tgactggattgcaagtctctctcag

SEQ ID NO: 1299524 - DNA, 25 bp, Homo sapien
ctttattatacttatgtgactggat

SEQ ID NO: 1299525 - DNA, 25 bp, Homo sapien
tatacttatgtgactggattgcaag

SEQ ID NO: 1299526 - DNA, 25 bp, Homo sapien
tatgtgactggattgcaagtctctc

SEQ ID NO: 1299527 - DNA, 25 bp, Homo sapien
ctgtaaactatttcaatacaagctt

SEQ ID NO: 1299528 - DNA, 25 bp, Homo sapien
tgatcttgccttacctaaaaaatct

SEQ ID NO: 1299529 - DNA, 25 bp, Homo sapien
taagtttaactacactgtaactgta

SEQ ID NO: 1299530 - DNA, 25 bp, Homo sapien
caaatcacagtgatcttgccttacc

SEQ ID NO: 1299531 - DNA, 25 bp, Homo sapien
ttgtgacaacagtataggcagaaag

SEQ ID NO: 1299532 - DNA, 25 bp, Homo sapien
gacaacagtataggcagaaagattc

SEQ ID NO: 1299533 - DNA, 25 bp, Homo sapien
cctgtttgtgacaacagtataggca

SEQ ID NO: 1299534 - DNA, 25 bp, Homo sapien
tgtttgtgacaacagtataggcaga

SEQ ID NO: 1299535 - DNA, 25 bp, Homo sapien
gtttcactctattggacagacacga

SEQ ID NO: 1299536 - DNA, 25 bp, Homo sapien
gcctcatgaacctgtaagcagcaga

SEQ ID NO: 1299537 - DNA, 25 bp, Homo sapien
tttacagctctaagcaaaagcaacg

SEQ ID NO: 1299538 - DNA, 25 bp, Homo sapien
gatgctacaaaggatagagtatcac

SEQ ID NO: 1299539 - DNA, 25 bp, Homo sapien
gactcagagagctccctgacattct

SEQ ID NO: 1299540 - DNA, 25 bp, Homo sapien
gattggcactttaaggacctcctaa

SEQ ID NO: 1299541 - DNA, 25 bp, Homo sapien
tattaactccctgtacaggctagca

SEQ ID NO: 1299542 - DNA, 25 bp, Homo sapien
gagcttagttgaacaaagagctact

SEQ ID NO: 1299543 - DNA, 25 bp, Homo sapien
taaataaggtaatgtgacaactcga

SEQ ID NO: 1299544 - DNA, 25 bp, Homo sapien
agattcttcccctaccaggtatttg

SEQ ID NO: 1299545 - DNA, 25 bp, Homo sapien
ggcaattgtccctcctcagtaagtg

SEQ ID NO: 1299546 - DNA, 25 bp, Homo sapien
taatactaaagtctaacatttgggc

SEQ ID NO: 1299547 - DNA, 25 bp, Homo sapien
taagactcagtgtgtattgacagcc

SEQ ID NO: 1299548 - DNA, 25 bp, Homo sapien
gatcagctaatgactgggcagagac

SEQ ID NO: 1299549 - DNA, 25 bp, Homo sapien
tcagaactgacagcttaggaccttc

SEQ ID NO: 1299550 - DNA, 25 bp, Homo sapien
taactacatgtgttagggcatacct

SEQ ID NO: 1299551 - DNA, 25 bp, Homo sapien
aacctggtattcgagcccaggcagg

SEQ ID NO: 1299552 - DNA, 25 bp, Homo sapien
cataatggaacaatgcagacaggac

SEQ ID NO: 1299553 - DNA, 25 bp, Homo sapien
tacacatagtaagtcaccaacctgg

SEQ ID NO: 1299554 - DNA, 25 bp, Homo sapien
ggcctgtagccttgataacctttag

SEQ ID NO: 1299555 - DNA, 25 bp, Homo sapien
taagagtgccacttcttactagtga

SEQ ID NO: 1299556 - DNA, 25 bp, Homo sapien
ccttgtggagcgcagtgatgtgatc

SEQ ID NO: 1299557 - DNA, 25 bp, Homo sapien
tctgcattaattaagctggcattcc

SEQ ID NO: 1299558 - DNA, 25 bp, Homo sapien
catgccagacctaaaccctaatttc

SEQ ID NO: 1299559 - DNA, 25 bp, Homo sapien
aatcagaagggtccttctccgtggc

SEQ ID NO: 1299560 - DNA, 25 bp, Homo sapien
tggcttctaggactaacatggccaa

SEQ ID NO: 1299561 - DNA, 25 bp, Homo sapien
cttctccgtggcttctaggactaac

SEQ ID NO: 1299562 - DNA, 25 bp, Homo sapien
ctccaaagtcctttgctaaaaacag

SEQ ID NO: 1299563 - DNA, 25 bp, Homo sapien
aaaaccgctgcaatcaagtgctaga

SEQ ID NO: 1299564 - DNA, 25 bp, Homo sapien
tgggaaagggagcactaaccattat

SEQ ID NO: 1299565 - DNA, 25 bp, Homo sapien
aaggtgccctaaatctcaaaatgag

SEQ ID NO: 1299566 - DNA, 25 bp, Homo sapien
gaaactgatgacacaaaaaccgctg

SEQ ID NO: 1299567 - DNA, 25 bp, Homo sapien
agtaaagtctggctaatgaaggaag

SEQ ID NO: 1299568 - DNA, 25 bp, Homo sapien
aagtaaagtctggctaatgaaggaa

SEQ ID NO: 1299569 - DNA, 25 bp, Homo sapien
tgtcaattaacaagatcgcgccagc

SEQ ID NO: 1299570 - DNA, 25 bp, Homo sapien
ggagaagcactgtcacctactggtc

SEQ ID NO: 1299571 - DNA, 25 bp, Homo sapien
tgagagagccccaaaactgaggtaa

SEQ ID NO: 1299572 - DNA, 25 bp, Homo sapien
tgtcctgtaagaagcgtccatgccg

SEQ ID NO: 1299573 - DNA, 25 bp, Homo sapien
taggaccctagggagaggctcagtt

SEQ ID NO: 1299574 - DNA, 25 bp, Homo sapien
tgagcacaatgagaagctgggccgt

SEQ ID NO: 1299575 - DNA, 25 bp, Homo sapien
tgggccgtctcgctaggtgaaagaa

SEQ ID NO: 1299576 - DNA, 25 bp, Homo sapien
tctcgtggtgaagagtgagcacaat

SEQ ID NO: 1299577 - DNA, 25 bp, Homo sapien
cagtggctgagagaagcgctgaggc

SEQ ID NO: 1299578 - DNA, 25 bp, Homo sapien
gcagtggctgagagaagcgctgagg

SEQ ID NO: 1299579 - DNA, 25 bp, Homo sapien
aggcagtggctgagagaagcgctga

SEQ ID NO: 1299580 - DNA, 25 bp, Homo sapien
ggcagtggctgagagaagcgctgag

SEQ ID NO: 1299581 - DNA, 25 bp, Homo sapien
aaggctaagctgaggtgaataaggc

SEQ ID NO: 1299582 - DNA, 25 bp, Homo sapien
gaaaaacagcgaggcgacagaggca

SEQ ID NO: 1299583 - DNA, 25 bp, Homo sapien
tgaggtgaataaggcgaggccagcg

SEQ ID NO: 1299584 - DNA, 25 bp, Homo sapien
gacagaggcacggaagcgcgagaag

SEQ ID NO: 1299585 - DNA, 25 bp, Homo sapien
ccacaaggaccgaggcagaactcta

SEQ ID NO: 1299586 - DNA, 25 bp, Homo sapien
ttcacgctgtgctcgcccggctgcg

SEQ ID NO: 1299587 - DNA, 25 bp, Homo sapien
ggctgcgctcagaccctgttggcag

SEQ ID NO: 1299588 - DNA, 25 bp, Homo sapien
gggacaggcgaagagactcccaccc

SEQ ID NO: 1299589 - DNA, 25 bp, Homo sapien
ggacatggagatcagtccagaccca

SEQ ID NO: 1299590 - DNA, 25 bp, Homo sapien
gacatggagatcagtccagacccac

SEQ ID NO: 1299591 - DNA, 25 bp, Homo sapien
accgcggcgttagcgtgacccggat

SEQ ID NO: 1299592 - DNA, 25 bp, Homo sapien
gcgttagcgtgacccggatgcgcat

SEQ ID NO: 1299593 - DNA, 25 bp, Homo sapien
accaatcgagcggaggaaaccgcgg

SEQ ID NO: 1299594 - DNA, 25 bp, Homo sapien
agtagaaccaatcgagcggaggaaa

SEQ ID NO: 1299595 - DNA, 25 bp, Homo sapien
gagtcacctcacaatccacacctcg

SEQ ID NO: 1299596 - DNA, 25 bp, Homo sapien
gctaggaaccggaagtaagcggcca

SEQ ID NO: 1299597 - DNA, 25 bp, Homo sapien
gaaacctctgggcgcatgtgttgag

SEQ ID NO: 1299598 - DNA, 25 bp, Homo sapien
cctcgttccactagaaacctctggg

SEQ ID NO: 1299599 - DNA, 25 bp, Homo sapien
taaaatgctacatggcccaaagcta

SEQ ID NO: 1299600 - DNA, 25 bp, Homo sapien
caaatcaacagggatatactagtgg

SEQ ID NO: 1299601 - DNA, 25 bp, Homo sapien
ggagactacagctagacatcagagc

SEQ ID NO: 1299602 - DNA, 25 bp, Homo sapien
caatcagcagatcaaggagactaca

SEQ ID NO: 1299603 - DNA, 25 bp, Homo sapien
ccaaatatcatcaggatccattcct

SEQ ID NO: 1299604 - DNA, 25 bp, Homo sapien
tgccaaatatcatcaggatccattc

SEQ ID NO: 1299605 - DNA, 25 bp, Homo sapien
gccaaatatcatcaggatccattcc

SEQ ID NO: 1299606 - DNA, 25 bp, Homo sapien
agaaacaggagattgtacagatggt

SEQ ID NO: 1299607 - DNA, 25 bp, Homo sapien
atcaaagccactatggcaaagaaac

SEQ ID NO: 1299608 - DNA, 25 bp, Homo sapien
agccactatggcaaagaaacaggag

SEQ ID NO: 1299609 - DNA, 25 bp, Homo sapien
aagaaacaggagattgtacagatgg

SEQ ID NO: 1299610 - DNA, 25 bp, Homo sapien
ctacagcctccgctaccaccgcttc

SEQ ID NO: 1299611 - DNA, 25 bp, Homo sapien
acagcctccgctaccaccgcttctc

SEQ ID NO: 1299612 - DNA, 25 bp, Homo sapien
tacagcctccgctaccaccgcttct

SEQ ID NO: 1299613 - DNA, 25 bp, Homo sapien
cctcaaaatggtagttgggcaagct

SEQ ID NO: 1299614 - DNA, 25 bp, Homo sapien
caaaatggtagttgggcaagctaaa

SEQ ID NO: 1299615 - DNA, 25 bp, Homo sapien
tgggcaagctaaatgcacaactctc

SEQ ID NO: 1299616 - DNA, 25 bp, Homo sapien
tggtagttgggcaagctaaatgcac

SEQ ID NO: 1299617 - DNA, 25 bp, Homo sapien
gcaatttcttaggtttaggcaggac

SEQ ID NO: 1299618 - DNA, 25 bp, Homo sapien
ggcaatttcttaggtttaggcagga

SEQ ID NO: 1299619 - DNA, 25 bp, Homo sapien
aggcaatttcttaggtttaggcagg

SEQ ID NO: 1299620 - DNA, 25 bp, Homo sapien
ttgtttccaagcacttagccctgga

SEQ ID NO: 1299621 - DNA, 25 bp, Homo sapien
aattcctcgcaactgtggtttctta

SEQ ID NO: 1299622 - DNA, 25 bp, Homo sapien
gccctggaattcctcgcaactgtgg

SEQ ID NO: 1299623 - DNA, 25 bp, Homo sapien
ggcaaacttctctatcctcaatagc

SEQ ID NO: 1299624 - DNA, 25 bp, Homo sapien
ctgcaataccgctcccacatgcttc

SEQ ID NO: 1299625 - DNA, 25 bp, Homo sapien
ctctgcaataccgctcccacatgct

SEQ ID NO: 1299626 - DNA, 25 bp, Homo sapien
tctgcaataccgctcccacatgctt

SEQ ID NO: 1299627 - DNA, 25 bp, Homo sapien
ctgtgggtatcatatcttcactgaa

SEQ ID NO: 1299628 - DNA, 25 bp, Homo sapien
catgttgaagcccactgtgggtatc

SEQ ID NO: 1299629 - DNA, 25 bp, Homo sapien
gagcgaacggaaccagtccagcagg

SEQ ID NO: 1299630 - DNA, 25 bp, Homo sapien
aagagcgaacggaaccagtccagca

SEQ ID NO: 1299631 - DNA, 25 bp, Homo sapien
agagcgaacggaaccagtccagcag

SEQ ID NO: 1299632 - DNA, 25 bp, Homo sapien
cactcatggcctgaataatgtttaa

SEQ ID NO: 1299633 - DNA, 25 bp, Homo sapien
tgtttaattgcgtgtctataccata

SEQ ID NO: 1299634 - DNA, 25 bp, Homo sapien
tacgaatatctgcttgagtccctgt

SEQ ID NO: 1299635 - DNA, 25 bp, Homo sapien
cagtggacatttgcgtcactcccac

SEQ ID NO: 1299636 - DNA, 25 bp, Homo sapien
gttttagttatgtgctgacgaagca

SEQ ID NO: 1299637 - DNA, 25 bp, Homo sapien
ccagttttagttatgtgctgacgaa

SEQ ID NO: 1299638 - DNA, 25 bp, Homo sapien
aggggccatatctgtatctctatat

SEQ ID NO: 1299639 - DNA, 25 bp, Homo sapien
tagttatgtgctgacgaagcaagca

SEQ ID NO: 1299640 - DNA, 25 bp, Homo sapien
gaagctatgttaggaggaccctccc

SEQ ID NO: 1299641 - DNA, 25 bp, Homo sapien
gcctgttcgtatggaagcccctgga

SEQ ID NO: 1299642 - DNA, 25 bp, Homo sapien
ttttggctgcgagaaacagacaccc

SEQ ID NO: 1299643 - DNA, 25 bp, Homo sapien
cctaaaggaagagtgctgggcccct

SEQ ID NO: 1299644 - DNA, 25 bp, Homo sapien
tatcacttgagagtagttgcccaaa

SEQ ID NO: 1299645 - DNA, 25 bp, Homo sapien
tgccccaaggtagtgccatacagtg

SEQ ID NO: 1299646 - DNA, 25 bp, Homo sapien
tgccagatgagtcagagaaggttcc

SEQ ID NO: 1299647 - DNA, 25 bp, Homo sapien
tcttagctcaaaagtctgccccaag

SEQ ID NO: 1299648 - DNA, 25 bp, Homo sapien
ttactgtagtatgcgcccacaggcg

SEQ ID NO: 1299649 - DNA, 25 bp, Homo sapien
tgaggtagcctccaaatctaatggc

SEQ ID NO: 1299650 - DNA, 25 bp, Homo sapien
tcatggaggagaagacttcaggcct

SEQ ID NO: 1299651 - DNA, 25 bp, Homo sapien
aagctttagaccgatgccccatcgg

SEQ ID NO: 1299652 - DNA, 25 bp, Homo sapien
ttataagtgatgacgcccaggaagg

SEQ ID NO: 1299653 - DNA, 25 bp, Homo sapien
aatttcttgcaagggtacaggcggg

SEQ ID NO: 1299654 - DNA, 25 bp, Homo sapien
catgtccgccatggtgaggttcacc

SEQ ID NO: 1299655 - DNA, 25 bp, Homo sapien
caatgaccccgagcacaaagatgat

SEQ ID NO: 1299656 - DNA, 25 bp, Homo sapien
ctggaatgatcagctggtcctggtg

SEQ ID NO: 1299657 - DNA, 25 bp, Homo sapien
tggaatgatcagctggtcctggtgg

SEQ ID NO: 1299658 - DNA, 25 bp, Homo sapien
gaatgatcagctggtcctggtggtg

SEQ ID NO: 1299659 - DNA, 25 bp, Homo sapien
aatgatcagctggtcctggtggtgc

SEQ ID NO: 1299660 - DNA, 25 bp, Homo sapien
ctggaagaccacacaaaaattctgg

SEQ ID NO: 1299661 - DNA, 25 bp, Homo sapien
gaagaccacacaaaaattctggtta

SEQ ID NO: 1299662 - DNA, 25 bp, Homo sapien
tggaagaccacacaaaaattctggt

SEQ ID NO: 1299663 - DNA, 25 bp, Homo sapien
caagtgggcacactctcttggatcc

SEQ ID NO: 1299664 - DNA, 25 bp, Homo sapien
gggaacaccacattccaagtgggca

SEQ ID NO: 1299665 - DNA, 25 bp, Homo sapien
gatacatccaagttcatccacagct

SEQ ID NO: 1299666 - DNA, 25 bp, Homo sapien
caaggactagaagtggtgaaggcgg

SEQ ID NO: 1299667 - DNA, 25 bp, Homo sapien
ttgctgcgtgatccttggctctccc

SEQ ID NO: 1299668 - DNA, 25 bp, Homo sapien
tcttccttgctgcgtgatccttggc

SEQ ID NO: 1299669 - DNA, 25 bp, Homo sapien
tccttgctgcgtgatccttggctct

SEQ ID NO: 1299670 - DNA, 25 bp, Homo sapien
ttccttgctgcgtgatccttggctc

SEQ ID NO: 1299671 - DNA, 25 bp, Homo sapien
cagaggcttctccccgctctcatca

SEQ ID NO: 1299672 - DNA, 25 bp, Homo sapien
gaggcttctccccgctctcatcatg

SEQ ID NO: 1299673 - DNA, 25 bp, Homo sapien
agaggcttctccccgctctcatcat

SEQ ID NO: 1299674 - DNA, 25 bp, Homo sapien
gaacacagctgggtattcagtcaga

SEQ ID NO: 1299675 - DNA, 25 bp, Homo sapien
ggaacacagctgggtattcagtcag

SEQ ID NO: 1299676 - DNA, 25 bp, Homo sapien
aacacagctgggtattcagtcagag

SEQ ID NO: 1299677 - DNA, 25 bp, Homo sapien
tgagtgagtgcacagccccatgtct

SEQ ID NO: 1299678 - DNA, 25 bp, Homo sapien
gagtgagtgcacagccccatgtctg

SEQ ID NO: 1299679 - DNA, 25 bp, Homo sapien
agtgagtgcacagccccatgtctgg

SEQ ID NO: 1299680 - DNA, 25 bp, Homo sapien
gtatcactaccaagtcacccctggg

SEQ ID NO: 1299681 - DNA, 25 bp, Homo sapien
gtctggcaattgcagaagtgaagaa

SEQ ID NO: 1299682 - DNA, 25 bp, Homo sapien
ctcagcctctatgctgtctggcaat

SEQ ID NO: 1299683 - DNA, 25 bp, Homo sapien
aatgctgtggccctagggcctctca

SEQ ID NO: 1299684 - DNA, 25 bp, Homo sapien
aggcttctcaaagagcgagggatgg

SEQ ID NO: 1299685 - DNA, 25 bp, Homo sapien
ggtgtagacagcgcccgaggccagg

SEQ ID NO: 1299686 - DNA, 25 bp, Homo sapien
ggcttctcaaagagcgagggatggg

SEQ ID NO: 1299687 - DNA, 25 bp, Homo sapien
gtggggtgtagacagcgcccgaggc

SEQ ID NO: 1299688 - DNA, 25 bp, Homo sapien
caaaagacgagatgacaagacacag

SEQ ID NO: 1299689 - DNA, 25 bp, Homo sapien
tcaagagagcgaaaaagggagcatg

SEQ ID NO: 1299690 - DNA, 25 bp, Homo sapien
gacagatgtaaacaccgggagagat

SEQ ID NO: 1299691 - DNA, 25 bp, Homo sapien
caaagacaaggtaagatccaagaca

SEQ ID NO: 1299692 - DNA, 25 bp, Homo sapien
actcacgcccagtctcccctcactc

SEQ ID NO: 1299693 - DNA, 25 bp, Homo sapien
cacgcccagtctcccctcactcaca

SEQ ID NO: 1299694 - DNA, 25 bp, Homo sapien
ctgcacactcacgcccagtctcccc

SEQ ID NO: 1299695 - DNA, 25 bp, Homo sapien
cctcactcacacctgccaggctcat

SEQ ID NO: 1299696 - DNA, 25 bp, Homo sapien
gaggcaatattgtccgttggtgccc

SEQ ID NO: 1299697 - DNA, 25 bp, Homo sapien
cgttggtgcccgttcgtgtatgtgt

SEQ ID NO: 1299698 - DNA, 25 bp, Homo sapien
cccgttcgtgtatgtgtatagggag

SEQ ID NO: 1299699 - DNA, 25 bp, Homo sapien
tgtatagggagggtcatgggttgta

SEQ ID NO: 1299700 - DNA, 25 bp, Homo sapien
gctgaggcagatgggggtcccctga

SEQ ID NO: 1299701 - DNA, 25 bp, Homo sapien
cttctcggggaggtcctggatgact

SEQ ID NO: 1299702 - DNA, 25 bp, Homo sapien
cctgagagcatgtttcctggacggc

SEQ ID NO: 1299703 - DNA, 25 bp, Homo sapien
cctggatgacttctcggggagctca

SEQ ID NO: 1299704 - DNA, 25 bp, Homo sapien
tctgaagccatatccggctgagagg

SEQ ID NO: 1299705 - DNA, 25 bp, Homo sapien
tgccttcagaaatgcccagcctctg

SEQ ID NO: 1299706 - DNA, 25 bp, Homo sapien
agccatatccggctgagagggagac

SEQ ID NO: 1299707 - DNA, 25 bp, Homo sapien
tgggaaagagaagtttctgccttct

SEQ ID NO: 1299708 - DNA, 25 bp, Homo sapien
cctcttgccagcagttggctccaca

SEQ ID NO: 1299709 - DNA, 25 bp, Homo sapien
ccacagctggggagcctatctgctc

SEQ ID NO: 1299710 - DNA, 25 bp, Homo sapien
cttgccagcagttggctccacagct

SEQ ID NO: 1299711 - DNA, 25 bp, Homo sapien
cacagctggggagcctatctgctcc

SEQ ID NO: 1299712 - DNA, 25 bp, Homo sapien
taaaagcgtacagcacctctccctg

SEQ ID NO: 1299713 - DNA, 25 bp, Homo sapien
ttcttatctatcactatccagatag

SEQ ID NO: 1299714 - DNA, 25 bp, Homo sapien
ttaaaagcgtacagcacctctccct

SEQ ID NO: 1299715 - DNA, 25 bp, Homo sapien
ttatctatcactatccagatagtga

SEQ ID NO: 1299716 - DNA, 25 bp, Homo sapien
aaactaaggttcagccaggtctgtc

SEQ ID NO: 1299717 - DNA, 25 bp, Homo sapien
tagttaccttgtatatgccatggca

SEQ ID NO: 1299718 - DNA, 25 bp, Homo sapien
gatattggcaatacccaaggagcac

SEQ ID NO: 1299719 - DNA, 25 bp, Homo sapien
caggtctgtccaaccccaaagcatt

SEQ ID NO: 1299720 - DNA, 25 bp, Homo sapien
gctgctctgtgtgctcacaagtgtt

SEQ ID NO: 1299721 - DNA, 25 bp, Homo sapien
ctgctctgtgtgctcacaagtgttc

SEQ ID NO: 1299722 - DNA, 25 bp, Homo sapien
tgctgctctgtgtgctcacaagtgt

SEQ ID NO: 1299723 - DNA, 25 bp, Homo sapien
gaaagaatgagtccttcgaagcagg

SEQ ID NO: 1299724 - DNA, 25 bp, Homo sapien
gaggaaagaatgagtccttcgaagc

SEQ ID NO: 1299725 - DNA, 25 bp, Homo sapien
attcagtgaagtacaaaacactgag

SEQ ID NO: 1299726 - DNA, 25 bp, Homo sapien
aatgagtccttcgaagcaggaaggg

SEQ ID NO: 1299727 - DNA, 25 bp, Homo sapien
tactttcggtggtctcaggaaggtc

SEQ ID NO: 1299728 - DNA, 25 bp, Homo sapien
ctttcggtggtctcaggaaggtccg

SEQ ID NO: 1299729 - DNA, 25 bp, Homo sapien
tcggtggtctcaggaaggtccgatt

SEQ ID NO: 1299730 - DNA, 25 bp, Homo sapien
tttcggtggtctcaggaaggtccga

SEQ ID NO: 1299731 - DNA, 25 bp, Homo sapien
tctgccactctctttcccgtttggc

SEQ ID NO: 1299732 - DNA, 25 bp, Homo sapien
tttctgccactctctttcccgtttg

SEQ ID NO: 1299733 - DNA, 25 bp, Homo sapien
tgccactctctttcccgtttggctt

SEQ ID NO: 1299734 - DNA, 25 bp, Homo sapien
ctcaaagtttttctgccactctctt

SEQ ID NO: 1299735 - DNA, 25 bp, Homo sapien
tctctctctttccttttaatttcca

SEQ ID NO: 1299736 - DNA, 25 bp, Homo sapien
tggcttctctctctttccttttaat

SEQ ID NO: 1299737 - DNA, 25 bp, Homo sapien
ctttcatgcatctctttggcttctc

SEQ ID NO: 1299738 - DNA, 25 bp, Homo sapien
ctctctttccttttaatttccagct

SEQ ID NO: 1299739 - DNA, 25 bp, Homo sapien
ctgcaaagagtttcattgtctgttt

SEQ ID NO: 1299740 - DNA, 25 bp, Homo sapien
tctgtttatatacagcttgtttgaa

SEQ ID NO: 1299741 - DNA, 25 bp, Homo sapien
gtttcattgtctgtttatatacagc

SEQ ID NO: 1299742 - DNA, 25 bp, Homo sapien
tcattgtctgtttatatacagcttg

SEQ ID NO: 1299743 - DNA, 25 bp, Homo sapien
ctcctctacaattgtaggttttcct

SEQ ID NO: 1299744 - DNA, 25 bp, Homo sapien
ggatcatcctcctctacaattgtag

SEQ ID NO: 1299745 - DNA, 25 bp, Homo sapien
tcctcctctacaattgtaggttttc

SEQ ID NO: 1299746 - DNA, 25 bp, Homo sapien
tcatcctcctctacaattgtaggtt

SEQ ID NO: 1299747 - DNA, 25 bp, Homo sapien
ggcttgctgatacttcctgtaaaca

SEQ ID NO: 1299748 - DNA, 25 bp, Homo sapien
gctgatacttcctgtaaacacagca

SEQ ID NO: 1299749 - DNA, 25 bp, Homo sapien
gcccaaggcttgctgatacttcctg

SEQ ID NO: 1299750 - DNA, 25 bp, Homo sapien
caaggcttgctgatacttcctgtaa

SEQ ID NO: 1299751 - DNA, 25 bp, Homo sapien
attcttttcctgcctgaattacatc

SEQ ID NO: 1299752 - DNA, 25 bp, Homo sapien
gtgtgttccacgtattcttttcctg

SEQ ID NO: 1299753 - DNA, 25 bp, Homo sapien
agtgtgttccacgtattcttttcct

SEQ ID NO: 1299754 - DNA, 25 bp, Homo sapien
cttttcctgcctgaattacatccag

SEQ ID NO: 1299755 - DNA, 25 bp, Homo sapien
gctcctgatccagtagcaacttgta

SEQ ID NO: 1299756 - DNA, 25 bp, Homo sapien
tttgctcctgatccagtagcaactt

SEQ ID NO: 1299757 - DNA, 25 bp, Homo sapien
cctgatccagtagcaacttgtaagc

SEQ ID NO: 1299758 - DNA, 25 bp, Homo sapien
ccagtagcaacttgtaagctttgtc

SEQ ID NO: 1299759 - DNA, 25 bp, Homo sapien
aaaaccacagcttcttggtgaccag

SEQ ID NO: 1299760 - DNA, 25 bp, Homo sapien
aatggcaactgctctactgaaaacc

SEQ ID NO: 1299761 - DNA, 25 bp, Homo sapien
tcaaggctaaatacactacatctgg

SEQ ID NO: 1299762 - DNA, 25 bp, Homo sapien
tctaggacaaggaacagttaggccc

SEQ ID NO: 1299763 - DNA, 25 bp, Homo sapien
ttttgtgctctgtcagcatcatctt

SEQ ID NO: 1299764 - DNA, 25 bp, Homo sapien
gccttttgtgctctgtcagcatcat

SEQ ID NO: 1299765 - DNA, 25 bp, Homo sapien
ccttttgtgctctgtcagcatcatc

SEQ ID NO: 1299766 - DNA, 25 bp, Homo sapien
agccttttgtgctctgtcagcatca

SEQ ID NO: 1299767 - DNA, 25 bp, Homo sapien
cctggagaactttcaaaaagcactc

SEQ ID NO: 1299768 - DNA, 25 bp, Homo sapien
gaagctatagatctcctttcctgga

SEQ ID NO: 1299769 - DNA, 25 bp, Homo sapien
cgaatgggcaagattcagaagctat

SEQ ID NO: 1299770 - DNA, 25 bp, Homo sapien
cagttattaaacctacgaatgggca

SEQ ID NO: 1299771 - DNA, 25 bp, Homo sapien
ctgtaacttcaggatctatctgaag

SEQ ID NO: 1299772 - DNA, 25 bp, Homo sapien
catctgtaacttcaggatctatctg

SEQ ID NO: 1299773 - DNA, 25 bp, Homo sapien
taacttcaggatctatctgaagaac

SEQ ID NO: 1299774 - DNA, 25 bp, Homo sapien
cttcatctgtaacttcaggatctat

SEQ ID NO: 1299775 - DNA, 25 bp, Homo sapien
cgaagttagaaccgagtctctcttc

SEQ ID NO: 1299776 - DNA, 25 bp, Homo sapien
tttcgaagttagaaccgagtctctc

SEQ ID NO: 1299777 - DNA, 25 bp, Homo sapien
ttcgaagttagaaccgagtctctct

SEQ ID NO: 1299778 - DNA, 25 bp, Homo sapien
tcgaagttagaaccgagtctctctt

SEQ ID NO: 1299779 - DNA, 25 bp, Homo sapien
tgctagttggaatgaatctctggta

SEQ ID NO: 1299780 - DNA, 25 bp, Homo sapien
aatgctagttggaatgaatctctgg

SEQ ID NO: 1299781 - DNA, 25 bp, Homo sapien
ggaatgctagttggaatgaatctct

SEQ ID NO: 1299782 - DNA, 25 bp, Homo sapien
ttggaatgctagttggaatgaatct

SEQ ID NO: 1299783 - DNA, 25 bp, Homo sapien
tgcctgccaggtgtctagacctaaa

SEQ ID NO: 1299784 - DNA, 25 bp, Homo sapien
gatgtgatatggtccttaaccctga

SEQ ID NO: 1299785 - DNA, 25 bp, Homo sapien
ccttgtttaaccctgagaaagatgc

SEQ ID NO: 1299786 - DNA, 25 bp, Homo sapien
taaccctgaatagctcacagcctgc

SEQ ID NO: 1299787 - DNA, 25 bp, Homo sapien
aggtcataaatgcttcctcggtgct

SEQ ID NO: 1299788 - DNA, 25 bp, Homo sapien
tccgccgcctgaagtcccgctctct

SEQ ID NO: 1299789 - DNA, 25 bp, Homo sapien
ctgtagaaggtcataaatgcttcct

SEQ ID NO: 1299790 - DNA, 25 bp, Homo sapien
ctcactgtagaaggtcataaatgct

SEQ ID NO: 1299791 - DNA, 25 bp, Homo sapien
tccccggcccagccaccacgtgacc

SEQ ID NO: 1299792 - DNA, 25 bp, Homo sapien
ttccccggcccagccaccacgtgac

SEQ ID NO: 1299793 - DNA, 25 bp, Homo sapien
cataagaaggagattgagcgtctgc

SEQ ID NO: 1299794 - DNA, 25 bp, Homo sapien
gatgaccagctagactcccatggaa

SEQ ID NO: 1299795 - DNA, 25 bp, Homo sapien
gattgaaattaaaccctgagccacc

SEQ ID NO: 1299796 - DNA, 25 bp, Homo sapien
gaaagaaattgagcgccataagcag

SEQ ID NO: 1299797 - DNA, 25 bp, Homo sapien
gccttactaagagtgatgttcctga

SEQ ID NO: 1299798 - DNA, 25 bp, Homo sapien
taatcaacaattgccttactaagag

SEQ ID NO: 1299799 - DNA, 25 bp, Homo sapien
aacattattaacagtgcaacacttg

SEQ ID NO: 1299800 - DNA, 25 bp, Homo sapien
taaaggtgtaccataggctgggtgc

SEQ ID NO: 1299801 - DNA, 25 bp, Homo sapien
ggtcataggtggttcttagaatcag

SEQ ID NO: 1299802 - DNA, 25 bp, Homo sapien
aaatgcaaattctcggcagggcgcg

SEQ ID NO: 1299803 - DNA, 25 bp, Homo sapien
actttgtgaaaatggtaactcatgg

SEQ ID NO: 1299804 - DNA, 25 bp, Homo sapien
tgaaaaaacagcacaggtcataggt

SEQ ID NO: 1299805 - DNA, 25 bp, Homo sapien
cagagcacttggagctaccttctgt

SEQ ID NO: 1299806 - DNA, 25 bp, Homo sapien
tcagagcacttggagctaccttctg

SEQ ID NO: 1299807 - DNA, 25 bp, Homo sapien
aaagaaattagaagcagatggggca

SEQ ID NO: 1299808 - DNA, 25 bp, Homo sapien
ttgactgagacggagtatcactctc

SEQ ID NO: 1299809 - DNA, 25 bp, Homo sapien
aagaaagaaattagaagcagatggg

SEQ ID NO: 1299810 - DNA, 25 bp, Homo sapien
cggagtatcactctcgtcgtccagg

SEQ ID NO: 1299811 - DNA, 25 bp, Homo sapien
tgaacttctgtcctcgtgatccatc

SEQ ID NO: 1299812 - DNA, 25 bp, Homo sapien
acttctgtcctcgtgatccatccac

SEQ ID NO: 1299813 - DNA, 25 bp, Homo sapien
gaacttctgtcctcgtgatccatcc

SEQ ID NO: 1299814 - DNA, 25 bp, Homo sapien
ttgaacttctgtcctcgtgatccat

SEQ ID NO: 1299815 - DNA, 25 bp, Homo sapien
tgccatcatggtgagcctctctggg

SEQ ID NO: 1299816 - DNA, 25 bp, Homo sapien
tcctctgggcgagtagacaacctgg

SEQ ID NO: 1299817 - DNA, 25 bp, Homo sapien
tccatagacaagcagggaaagccct

SEQ ID NO: 1299818 - DNA, 25 bp, Homo sapien
tgcaaaaaggaatcaggtggcctgc

SEQ ID NO: 1299819 - DNA, 25 bp, Homo sapien
ggctgttgcccgaatcctagttcag

SEQ ID NO: 1299820 - DNA, 25 bp, Homo sapien
ccatcaatgtgaaagtcagggtcac

SEQ ID NO: 1299821 - DNA, 25 bp, Homo sapien
cacttggagatcctaagggaccaca

SEQ ID NO: 1299822 - DNA, 25 bp, Homo sapien
gctcggaattaatgtgccacaagtg

SEQ ID NO: 1299823 - DNA, 25 bp, Homo sapien
aaccaccatgcctggacaaattatt

SEQ ID NO: 1299824 - DNA, 25 bp, Homo sapien
accatgcctggacaaattatttaaa

SEQ ID NO: 1299825 - DNA, 25 bp, Homo sapien
catgcctggacaaattatttaaatt

SEQ ID NO: 1299826 - DNA, 25 bp, Homo sapien
tgaaccaccatgcctggacaaatta

SEQ ID NO: 1299827 - DNA, 25 bp, Homo sapien
tttgtacttatccataaatatatat

SEQ ID NO: 1299828 - DNA, 25 bp, Homo sapien
tattttttgtacttatccataaata

SEQ ID NO: 1299829 - DNA, 25 bp, Homo sapien
gagttctgggatgcaaaacaggatt

SEQ ID NO: 1299830 - DNA, 25 bp, Homo sapien
ttttttgtacttatccataaatata

SEQ ID NO: 1299831 - DNA, 25 bp, Homo sapien
ctagagtgtggtctttgcttcccgt

SEQ ID NO: 1299832 - DNA, 25 bp, Homo sapien
tcccgtacagcccactcttgaactt

SEQ ID NO: 1299833 - DNA, 25 bp, Homo sapien
gcttcccgtacagcccactcttgaa

SEQ ID NO: 1299834 - DNA, 25 bp, Homo sapien
gtgtggtctttgcttcccgtacagc

SEQ ID NO: 1299835 - DNA, 25 bp, Homo sapien
tcctctcctagccatgatggtggga

SEQ ID NO: 1299836 - DNA, 25 bp, Homo sapien
tgcctctttgcccttcgccatactg

SEQ ID NO: 1299837 - DNA, 25 bp, Homo sapien
gcctctttgcccttcgccatactgc

SEQ ID NO: 1299838 - DNA, 25 bp, Homo sapien
atgatggtgggagaatgcactgaaa

SEQ ID NO: 1299839 - DNA, 25 bp, Homo sapien
ctgggacttgagtcttcaactgttt

SEQ ID NO: 1299840 - DNA, 25 bp, Homo sapien
ccattataatgggagctgggacttg

SEQ ID NO: 1299841 - DNA, 25 bp, Homo sapien
tttgcatccacaaataatgccaatg

SEQ ID NO: 1299842 - DNA, 25 bp, Homo sapien
ctggtgacccgatgttactggctcg

SEQ ID NO: 1299843 - DNA, 25 bp, Homo sapien
ttgctgactgatataattctattcg

SEQ ID NO: 1299844 - DNA, 25 bp, Homo sapien
atcctctagcaggacttctagattt

SEQ ID NO: 1299845 - DNA, 25 bp, Homo sapien
tatcctctagcaggacttctagatt

SEQ ID NO: 1299846 - DNA, 25 bp, Homo sapien
gtctgccacaactgacaatcttatc

SEQ ID NO: 1299847 - DNA, 25 bp, Homo sapien
atattatcatttcagcaagtactct

SEQ ID NO: 1299848 - DNA, 25 bp, Homo sapien
cagggttcttttaaagctcacatgt

SEQ ID NO: 1299849 - DNA, 25 bp, Homo sapien
tggatctggacctactccttttcca

SEQ ID NO: 1299850 - DNA, 25 bp, Homo sapien
cacatgtattctttggtatggcact

SEQ ID NO: 1299851 - DNA, 25 bp, Homo sapien
tgtattctttggtatggcactgcag

SEQ ID NO: 1299852 - DNA, 25 bp, Homo sapien
tgacctcaggagttcccagccaaca

SEQ ID NO: 1299853 - DNA, 25 bp, Homo sapien
caggagttcccagccaacagtttct

SEQ ID NO: 1299854 - DNA, 25 bp, Homo sapien
acctcaggagttcccagccaacagt

SEQ ID NO: 1299855 - DNA, 25 bp, Homo sapien
ctcaggagttcccagccaacagttt

SEQ ID NO: 1299856 - DNA, 25 bp, Homo sapien
cacttttgaggcaatagttttatca

SEQ ID NO: 1299857 - DNA, 25 bp, Homo sapien
tttgtatccatcctactggttctgt

SEQ ID NO: 1299858 - DNA, 25 bp, Homo sapien
tatgtatgttttgtatccatcctac

SEQ ID NO: 1299859 - DNA, 25 bp, Homo sapien
tttgaggcaatagttttatcagatc

SEQ ID NO: 1299860 - DNA, 25 bp, Homo sapien
ttttccaagactggatatcactgtg

SEQ ID NO: 1299861 - DNA, 25 bp, Homo sapien
gcctgtgtatatttcatctagcaac

SEQ ID NO: 1299862 - DNA, 25 bp, Homo sapien
gtctgcctttttggcgataaagtca

SEQ ID NO: 1299863 - DNA, 25 bp, Homo sapien
gatatacaaaggtttaatgtctgcc

SEQ ID NO: 1299864 - DNA, 25 bp, Homo sapien
gagtcaaagaccaacaccagaagaa

SEQ ID NO: 1299865 - DNA, 25 bp, Homo sapien
caatatattgcaacgtgagtccagt

SEQ ID NO: 1299866 - DNA, 25 bp, Homo sapien
tccccatgaaggaacagagcttacc

SEQ ID NO: 1299867 - DNA, 25 bp, Homo sapien
gaagcgtttgctacaagggctaagg

SEQ ID NO: 1299868 - DNA, 25 bp, Homo sapien
cacactggcatatcagatgaaagca

SEQ ID NO: 1299869 - DNA, 25 bp, Homo sapien
gaaagcattgcactgtacctctcgt

SEQ ID NO: 1299870 - DNA, 25 bp, Homo sapien
tacctctcgtaacacagcaatacag

SEQ ID NO: 1299871 - DNA, 25 bp, Homo sapien
caaattggttagatgaggccaggcg

SEQ ID NO: 1299872 - DNA, 25 bp, Homo sapien
gaggtctggatataaggtagccaca

SEQ ID NO: 1299873 - DNA, 25 bp, Homo sapien
gaagagaagtgacaattccactcag

SEQ ID NO: 1299874 - DNA, 25 bp, Homo sapien
taactctaacttgacttctaaccat

SEQ ID NO: 1299875 - DNA, 25 bp, Homo sapien
taacaattgggataactgagggaag

SEQ ID NO: 1299876 - DNA, 25 bp, Homo sapien
ctaaagtacgcgttagacgggcctg

SEQ ID NO: 1299877 - DNA, 25 bp, Homo sapien
acccagcgagcctctgaaggtgcac

SEQ ID NO: 1299878 - DNA, 25 bp, Homo sapien
tatatgggtgtcttaggcggcatcg

SEQ ID NO: 1299879 - DNA, 25 bp, Homo sapien
gcgcctggccggaaatcatgtaatt

SEQ ID NO: 1299880 - DNA, 25 bp, Homo sapien
tatttggtgagtaaatctgctaatt

SEQ ID NO: 1299881 - DNA, 25 bp, Homo sapien
tttggtgagtaaatctgctaattgt

SEQ ID NO: 1299882 - DNA, 25 bp, Homo sapien
atttggtgagtaaatctgctaattg

SEQ ID NO: 1299883 - DNA, 25 bp, Homo sapien
ctctgaggcatttaatcattctcag

SEQ ID NO: 1299884 - DNA, 25 bp, Homo sapien
tgaggcatttaatcattctcagagc

SEQ ID NO: 1299885 - DNA, 25 bp, Homo sapien
cgactttgctgcatttttgtaggca

SEQ ID NO: 1299886 - DNA, 25 bp, Homo sapien
tagccaaatatcgactttgctgcat

SEQ ID NO: 1299887 - DNA, 25 bp, Homo sapien
aaaagattgaggtgcatttcatgcc

SEQ ID NO: 1299888 - DNA, 25 bp, Homo sapien
aatctttggcagacttggagcaaaa

SEQ ID NO: 1299889 - DNA, 25 bp, Homo sapien
gcatttagctaggaatgcacattct

SEQ ID NO: 1299890 - DNA, 25 bp, Homo sapien
gcttggccagaaggcacactgtgtt

SEQ ID NO: 1299891 - DNA, 25 bp, Homo sapien
ccctgcccggccacttttgtatgat

SEQ ID NO: 1299892 - DNA, 25 bp, Homo sapien
aacaaattgcctaatctgctatgtt

SEQ ID NO: 1299893 - DNA, 25 bp, Homo sapien
gcctaatctgctatgttaatgtatt

SEQ ID NO: 1299894 - DNA, 25 bp, Homo sapien
tgcccggccacttttgtatgatttc

SEQ ID NO: 1299895 - DNA, 25 bp, Homo sapien
ggcggatcacaacatctagagatcc

SEQ ID NO: 1299896 - DNA, 25 bp, Homo sapien
ctccaggagggagtgcaatggagcc

SEQ ID NO: 1299897 - DNA, 25 bp, Homo sapien
tgctgcaacctccacctcccgggtt

SEQ ID NO: 1299898 - DNA, 25 bp, Homo sapien
caatggagccatcttggcttgctgc

SEQ ID NO: 1299899 - DNA, 25 bp, Homo sapien
ccagcaattctcccacctcagcctc

SEQ ID NO: 1299900 - DNA, 25 bp, Homo sapien
caagagactgcatatgtaaactcag

SEQ ID NO: 1299901 - DNA, 25 bp, Homo sapien
tactgtgcctgccatatagcaagca

SEQ ID NO: 1299902 - DNA, 25 bp, Homo sapien
ttatgtccatctaacctacttggag

SEQ ID NO: 1299903 - DNA, 25 bp, Homo sapien
ccctttccctaaggatccacaatgg

SEQ ID NO: 1299904 - DNA, 25 bp, Homo sapien
cacctgacgtttaggagttcaagtc

SEQ ID NO: 1299905 - DNA, 25 bp, Homo sapien
cgcttagttaaatctgacaagggtg

SEQ ID NO: 1299906 - DNA, 25 bp, Homo sapien
cagcacaccgaagtctcgagaaatt

SEQ ID NO: 1299907 - DNA, 25 bp, Homo sapien
aacaacttcaaagttcacatcgtga

SEQ ID NO: 1299908 - DNA, 25 bp, Homo sapien
ccgaagtctcgagaaattcgcttag

SEQ ID NO: 1299909 - DNA, 25 bp, Homo sapien
ctgtaggacacacaaaggtgaaatc

SEQ ID NO: 1299910 - DNA, 25 bp, Homo sapien
ggacacacaaaggtgaaatccaaag

SEQ ID NO: 1299911 - DNA, 25 bp, Homo sapien
taggacacacaaaggtgaaatccaa

SEQ ID NO: 1299912 - DNA, 25 bp, Homo sapien
tgtaggacacacaaaggtgaaatcc

SEQ ID NO: 1299913 - DNA, 25 bp, Homo sapien
ctcaaagtcatcaaggcttaggtct

SEQ ID NO: 1299914 - DNA, 25 bp, Homo sapien
caaagtcatcaaggcttaggtcttt

SEQ ID NO: 1299915 - DNA, 25 bp, Homo sapien
cccctcaaagtcatcaaggcttagg

SEQ ID NO: 1299916 - DNA, 25 bp, Homo sapien
tatttcccctcaaagtcatcaaggc

SEQ ID NO: 1299917 - DNA, 25 bp, Homo sapien
ggtatgaggaactggtaccagaatt

SEQ ID NO: 1299918 - DNA, 25 bp, Homo sapien
gcatggtatgaggaactggtaccag

SEQ ID NO: 1299919 - DNA, 25 bp, Homo sapien
aactggtaccagaattttgcttgac

SEQ ID NO: 1299920 - DNA, 25 bp, Homo sapien
gcactcacatgccgggcaactgatg

SEQ ID NO: 1299921 - DNA, 25 bp, Homo sapien
catgcaatagcttgtttaatcctca

SEQ ID NO: 1299922 - DNA, 25 bp, Homo sapien
acttcgagtagggtaggcatcgtat

SEQ ID NO: 1299923 - DNA, 25 bp, Homo sapien
ctcatatgcattgggacttcgagta

SEQ ID NO: 1299924 - DNA, 25 bp, Homo sapien
ggcatcgtattgagcactttacatg

SEQ ID NO: 1299925 - DNA, 25 bp, Homo sapien
tattgatcacctctgaagttcagta

SEQ ID NO: 1299926 - DNA, 25 bp, Homo sapien
cttttattgatcacctctgaagttc

SEQ ID NO: 1299927 - DNA, 25 bp, Homo sapien
agcacactgcataattttttgcatt

SEQ ID NO: 1299928 - DNA, 25 bp, Homo sapien
cacactgcataattttttgcattag

SEQ ID NO: 1299929 - DNA, 25 bp, Homo sapien
aaatgaccggggtccttgccttctg

SEQ ID NO: 1299930 - DNA, 25 bp, Homo sapien
tgccttctgcttcccatagagattg

SEQ ID NO: 1299931 - DNA, 25 bp, Homo sapien
cttgccttctgcttcccatagagat

SEQ ID NO: 1299932 - DNA, 25 bp, Homo sapien
tccttgccttctgcttcccatagag

SEQ ID NO: 1299933 - DNA, 25 bp, Homo sapien
gaacatttgtggctaccaggccttg

SEQ ID NO: 1299934 - DNA, 25 bp, Homo sapien
tgtgtgctacatggaaccccttgtt

SEQ ID NO: 1299935 - DNA, 25 bp, Homo sapien
aatgaatagctaagggcacacgagg

SEQ ID NO: 1299936 - DNA, 25 bp, Homo sapien
gcacacgagggaggccaaatgtaaa

SEQ ID NO: 1299937 - DNA, 25 bp, Homo sapien
aactccataggtccatagtcacaaa

SEQ ID NO: 1299938 - DNA, 25 bp, Homo sapien
caactccataggtccatagtcacaa

SEQ ID NO: 1299939 - DNA, 25 bp, Homo sapien
ccaactccataggtccatagtcaca

SEQ ID NO: 1299940 - DNA, 25 bp, Homo sapien
tcccttagcctaagattatacttca

SEQ ID NO: 1299941 - DNA, 25 bp, Homo sapien
gaggcaaggaagctatgacagatcc

SEQ ID NO: 1299942 - DNA, 25 bp, Homo sapien
caaatgcagtaataggtcagctatt

SEQ ID NO: 1299943 - DNA, 25 bp, Homo sapien
gctattactataccaacctccagag

SEQ ID NO: 1299944 - DNA, 25 bp, Homo sapien
catttaggccagcttcactattact

SEQ ID NO: 1299945 - DNA, 25 bp, Homo sapien
gcccacatgccatataccagattac

SEQ ID NO: 1299946 - DNA, 25 bp, Homo sapien
ccttttacgaccaccaagaccagtg

SEQ ID NO: 1299947 - DNA, 25 bp, Homo sapien
ccagtgttcagatccgatgggaaag

SEQ ID NO: 1299948 - DNA, 25 bp, Homo sapien
taaagcacagctccagaaacaagct

SEQ ID NO: 1299949 - DNA, 25 bp, Homo sapien
cttaaagcacagctccagaaacaag

SEQ ID NO: 1299950 - DNA, 25 bp, Homo sapien
agcacagctccagaaacaagctcac

SEQ ID NO: 1299951 - DNA, 25 bp, Homo sapien
aaagcacagctccagaaacaagctc

SEQ ID NO: 1299952 - DNA, 25 bp, Homo sapien
tcctcagtatcacacactgccagga

SEQ ID NO: 1299953 - DNA, 25 bp, Homo sapien
ctcctcagtatcacacactgccagg

SEQ ID NO: 1299954 - DNA, 25 bp, Homo sapien
cttagcgtgaaaactaaactggcca

SEQ ID NO: 1299955 - DNA, 25 bp, Homo sapien
aaagcttagcgtgaaaactaaactg

SEQ ID NO: 1299956 - DNA, 25 bp, Homo sapien
agttgacacatggaaggcttccagc

SEQ ID NO: 1299957 - DNA, 25 bp, Homo sapien
aaaaaacccatctacattgaagttg

SEQ ID NO: 1299958 - DNA, 25 bp, Homo sapien
ggcagcttgcaggtattgtactgac

SEQ ID NO: 1299959 - DNA, 25 bp, Homo sapien
agctgagtggcagcttgcaggtatt

SEQ ID NO: 1299960 - DNA, 25 bp, Homo sapien
cattataggaaagctgagtggcagc

SEQ ID NO: 1299961 - DNA, 25 bp, Homo sapien
acattataggaaagctgagtggcag

SEQ ID NO: 1299962 - DNA, 25 bp, Homo sapien
tggagatcccatggctatgaccagc

SEQ ID NO: 1299963 - DNA, 25 bp, Homo sapien
atcccatggctatgaccagccacag

SEQ ID NO: 1299964 - DNA, 25 bp, Homo sapien
atggctatgaccagccacagccctt

SEQ ID NO: 1299965 - DNA, 25 bp, Homo sapien
tggctatgaccagccacagcccttg

SEQ ID NO: 1299966 - DNA, 25 bp, Homo sapien
aggcagcccccagttagtctccaaa

SEQ ID NO: 1299967 - DNA, 25 bp, Homo sapien
cagcccccagttagtctccaaaaga

SEQ ID NO: 1299968 - DNA, 25 bp, Homo sapien
gcagcccccagttagtctccaaaag

SEQ ID NO: 1299969 - DNA, 25 bp, Homo sapien
ccaggcagcccccagttagtctcca

SEQ ID NO: 1299970 - DNA, 25 bp, Homo sapien
catcactgtcattaccccggaagtc

SEQ ID NO: 1299971 - DNA, 25 bp, Homo sapien
atcaccttctgtcatcttaagagtc

SEQ ID NO: 1299972 - DNA, 25 bp, Homo sapien
ggaagtcctcgatcaccagaaaaat

SEQ ID NO: 1299973 - DNA, 25 bp, Homo sapien
cttctgtcatcttaagagtcttcat

SEQ ID NO: 1299974 - DNA, 25 bp, Homo sapien
tcagttaagctgtgtcacatcccag

SEQ ID NO: 1299975 - DNA, 25 bp, Homo sapien
tgatacaaatctgaccagcctttgg

SEQ ID NO: 1299976 - DNA, 25 bp, Homo sapien
ggtcccaatactgatgccttaagct

SEQ ID NO: 1299977 - DNA, 25 bp, Homo sapien
ggattttcccagtacgagtcttatg

SEQ ID NO: 1299978 - DNA, 25 bp, Homo sapien
tacaacaaacagaacggcgaccgtc

SEQ ID NO: 1299979 - DNA, 25 bp, Homo sapien
acaacaaacagaacggcgaccgtca

SEQ ID NO: 1299980 - DNA, 25 bp, Homo sapien
caaacagaacggcgaccgtcaagga

SEQ ID NO: 1299981 - DNA, 25 bp, Homo sapien
aacaaacagaacggcgaccgtcaag

SEQ ID NO: 1299982 - DNA, 25 bp, Homo sapien
ggggcaattcagatcccagggcggc

SEQ ID NO: 1299983 - DNA, 25 bp, Homo sapien
ggcaattcagatcccagggcggccg

SEQ ID NO: 1299984 - DNA, 25 bp, Homo sapien
gggcaattcagatcccagggcggcc

SEQ ID NO: 1299985 - DNA, 25 bp, Homo sapien
gcaattcagatcccagggcggccgc

SEQ ID NO: 1299986 - DNA, 25 bp, Homo sapien
aagtacgccgggatctctgtagact

SEQ ID NO: 1299987 - DNA, 25 bp, Homo sapien
gcttaagtacgccgggatctctgta

SEQ ID NO: 1299988 - DNA, 25 bp, Homo sapien
ttaagtacgccgggatctctgtaga

SEQ ID NO: 1299989 - DNA, 25 bp, Homo sapien
ctgcttaagtacgccgggatctctg

SEQ ID NO: 1299990 - DNA, 25 bp, Homo sapien
ccactgcccacgctgtgccaatagc

SEQ ID NO: 1299991 - DNA, 25 bp, Homo sapien
gtcttgatgggaccgttttatccgc

SEQ ID NO: 1299992 - DNA, 25 bp, Homo sapien
cactgcccacgctgtgccaatagct

SEQ ID NO: 1299993 - DNA, 25 bp, Homo sapien
tcagtcttgatgggaccgttttatc

SEQ ID NO: 1299994 - DNA, 25 bp, Homo sapien
caagctgggatgcacgcaagggtct

SEQ ID NO: 1299995 - DNA, 25 bp, Homo sapien
tgaatgcctaaaacccgtccttctg

SEQ ID NO: 1299996 - DNA, 25 bp, Homo sapien
gattcaactggaggccatcctgaca

SEQ ID NO: 1299997 - DNA, 25 bp, Homo sapien
tgaattaagacacttcaggcccagg

SEQ ID NO: 1299998 - DNA, 25 bp, Homo sapien
agtccgaagcgagagaagggcgcgg

SEQ ID NO: 1299999 - DNA, 25 bp, Homo sapien
ctgtcagcccagagcgcagcgttgc

SEQ ID NO: 1300000 - DNA, 25 bp, Homo sapien
cagcgttgcgcagtccgaagcgaga

SEQ ID NO: 1300001 - DNA, 25 bp, Homo sapien
agagcgcagcgttgcgcagtccgaa

SEQ ID NO: 1300002 - DNA, 25 bp, Homo sapien
tgccgagggggcctttcggagctcg

SEQ ID NO: 1300003 - DNA, 25 bp, Homo sapien
aggcccggctcctccgtgccacatt

SEQ ID NO: 1300004 - DNA, 25 bp, Homo sapien
ggagttgtagtttgctcgccccggc

SEQ ID NO: 1300005 - DNA, 25 bp, Homo sapien
tagtaagtcgacaccgggaatgcgg

SEQ ID NO: 1300006 - DNA, 25 bp, Homo sapien
gctgaagccgcgagcaagagcttat

SEQ ID NO: 1300007 - DNA, 25 bp, Homo sapien
aagagcttatataggccgcccctcg

SEQ ID NO: 1300008 - DNA, 25 bp, Homo sapien
taaaaaccctgtgtacgctctgtgg

SEQ ID NO: 1300009 - DNA, 25 bp, Homo sapien
gcccatggaatgaataagcctcagt

SEQ ID NO: 1300010 - DNA, 25 bp, Homo sapien
tctggaaatgaaccctgtgtgctgg

SEQ ID NO: 1300011 - DNA, 25 bp, Homo sapien
ggatcacacagctatcgcaagcgag

SEQ ID NO: 1300012 - DNA, 25 bp, Homo sapien
ccaggcaggcccaggtccggttttg

SEQ ID NO: 1300013 - DNA, 25 bp, Homo sapien
caggtccggttttgggcctggcgct

SEQ ID NO: 1300014 - DNA, 25 bp, Homo sapien
ggctgcctgtctttgtttcatttcc

SEQ ID NO: 1300015 - DNA, 25 bp, Homo sapien
cggttttgggcctggcgctgggctg

SEQ ID NO: 1300016 - DNA, 25 bp, Homo sapien
tatagtattgtacgattctttcagg

SEQ ID NO: 1300017 - DNA, 25 bp, Homo sapien
ttgtgcctaagtggcgggtctatag

SEQ ID NO: 1300018 - DNA, 25 bp, Homo sapien
aagtggcgggtctatagtattgtac

SEQ ID NO: 1300019 - DNA, 25 bp, Homo sapien
aacagcttgcaaccgtgtgattcgg

SEQ ID NO: 1300020 - DNA, 25 bp, Homo sapien
tactgaatgttattgtacgaacagg

SEQ ID NO: 1300021 - DNA, 25 bp, Homo sapien
atgttattgtacgaacaggttcctt

SEQ ID NO: 1300022 - DNA, 25 bp, Homo sapien
tgaatgttattgtacgaacaggttc

SEQ ID NO: 1300023 - DNA, 25 bp, Homo sapien
gtactgaatgttattgtacgaacag

SEQ ID NO: 1300024 - DNA, 25 bp, Homo sapien
tggagtatccgaagtgtaatggtgc

SEQ ID NO: 1300025 - DNA, 25 bp, Homo sapien
gatggagtatccgaagtgtaatggt

SEQ ID NO: 1300026 - DNA, 25 bp, Homo sapien
tgtgatggagtatccgaagtgtaat

SEQ ID NO: 1300027 - DNA, 25 bp, Homo sapien
tgtgtgtgatggagtatccgaagtg

SEQ ID NO: 1300028 - DNA, 25 bp, Homo sapien
agtgaatctgtggcagaagtcatgg

SEQ ID NO: 1300029 - DNA, 25 bp, Homo sapien
cagtgaatctgtggcagaagtcatg

SEQ ID NO: 1300030 - DNA, 25 bp, Homo sapien
gaggcagacacatgatcccagccca

SEQ ID NO: 1300031 - DNA, 25 bp, Homo sapien
cacagtgaatctgtggcagaagtca

SEQ ID NO: 1300032 - DNA, 25 bp, Homo sapien
tggtccgtcagaggcttattattat

SEQ ID NO: 1300033 - DNA, 25 bp, Homo sapien
cactgcgcccagatgcttcatcaat

SEQ ID NO: 1300034 - DNA, 25 bp, Homo sapien
actcccgaactgaggtactctgcct

SEQ ID NO: 1300035 - DNA, 25 bp, Homo sapien
accgtgcctggtccgtcagaggctt

SEQ ID NO: 1300036 - DNA, 25 bp, Homo sapien
cctgtgttatctgatctgcctgcaa

SEQ ID NO: 1300037 - DNA, 25 bp, Homo sapien
tgcaacactcaggtagacatcactt

SEQ ID NO: 1300038 - DNA, 25 bp, Homo sapien
ggtgcagctctggacttcgcatatg

SEQ ID NO: 1300039 - DNA, 25 bp, Homo sapien
gctgttttctgtgccgggaaagtcc

SEQ ID NO: 1300040 - DNA, 25 bp, Homo sapien
ccaaaatgaataacgatgctgccac

SEQ ID NO: 1300041 - DNA, 25 bp, Homo sapien
ttgcttgtcctgactccctctggga

SEQ ID NO: 1300042 - DNA, 25 bp, Homo sapien
tgactagagagctacaatccaggct

SEQ ID NO: 1300043 - DNA, 25 bp, Homo sapien
tgctgatgttatggcctcccttggg

SEQ ID NO: 1300044 - DNA, 25 bp, Homo sapien
cttacccaaaaagaccataatgctt

SEQ ID NO: 1300045 - DNA, 25 bp, Homo sapien
tggaagatacattgctcctctttga

SEQ ID NO: 1300046 - DNA, 25 bp, Homo sapien
tcttctctggaagatacattgctcc

SEQ ID NO: 1300047 - DNA, 25 bp, Homo sapien
caaatcctgctaatactgtcttacc

SEQ ID NO: 1300048 - DNA, 25 bp, Homo sapien
gtcattatagatattgctgcactgt

SEQ ID NO: 1300049 - DNA, 25 bp, Homo sapien
ggatgagatggctgagttctcagct

SEQ ID NO: 1300050 - DNA, 25 bp, Homo sapien
gagttctcagctcaagtatctccaa

SEQ ID NO: 1300051 - DNA, 25 bp, Homo sapien
tacattgctgtccattccctgacct

SEQ ID NO: 1300052 - DNA, 25 bp, Homo sapien
tcttggttgttttccggatcaatgc

SEQ ID NO: 1300053 - DNA, 25 bp, Homo sapien
ggttgttttccggatcaatgccatt

SEQ ID NO: 1300054 - DNA, 25 bp, Homo sapien
ttgttttccggatcaatgccattct

SEQ ID NO: 1300055 - DNA, 25 bp, Homo sapien
tatttcttggttgttttccggatca

SEQ ID NO: 1300056 - DNA, 25 bp, Homo sapien
caaatcctgggatccacatgttcca

SEQ ID NO: 1300057 - DNA, 25 bp, Homo sapien
gggatccacatgttccactggcgct

SEQ ID NO: 1300058 - DNA, 25 bp, Homo sapien
ctgtttgtgagcttctgtggtgcaa

SEQ ID NO: 1300059 - DNA, 25 bp, Homo sapien
tgcaagcttttttgtagggtcggat

SEQ ID NO: 1300060 - DNA, 25 bp, Homo sapien
cacctccagggtgctagacttgcga

SEQ ID NO: 1300061 - DNA, 25 bp, Homo sapien
aaaatcatcagcaatctgcagcagc

SEQ ID NO: 1300062 - DNA, 25 bp, Homo sapien
tgtcaccacactctcgataaaatca

SEQ ID NO: 1300063 - DNA, 25 bp, Homo sapien
gatgccgcgcaagctgacaggctgc

SEQ ID NO: 1300064 - DNA, 25 bp, Homo sapien
gatccacttctcttactaagtcctg

SEQ ID NO: 1300065 - DNA, 25 bp, Homo sapien
tcttcatccaactgctcattaggat

SEQ ID NO: 1300066 - DNA, 25 bp, Homo sapien
caactgctcattaggatccacttct

SEQ ID NO: 1300067 - DNA, 25 bp, Homo sapien
tgctcattaggatccacttctctta

SEQ ID NO: 1300068 - DNA, 25 bp, Homo sapien
gtatcctgtgtaccctttatcattg

SEQ ID NO: 1300069 - DNA, 25 bp, Homo sapien
tgtcatgttacatacgtatgccatt

SEQ ID NO: 1300070 - DNA, 25 bp, Homo sapien
ctcctttggcctctactgtatcctg

SEQ ID NO: 1300071 - DNA, 25 bp, Homo sapien
ctgagggcagccttcataaaggaaa

SEQ ID NO: 1300072 - DNA, 25 bp, Homo sapien
ttcagggctaagacgacctcctgcc

SEQ ID NO: 1300073 - DNA, 25 bp, Homo sapien
tgattgttttcagggctaagacgac

SEQ ID NO: 1300074 - DNA, 25 bp, Homo sapien
tgccccaggagtgcctggtatcttt

SEQ ID NO: 1300075 - DNA, 25 bp, Homo sapien
ccccaggagtgcctggtatctttac

SEQ ID NO: 1300076 - DNA, 25 bp, Homo sapien
gtactattggccatggagccttgtg

SEQ ID NO: 1300077 - DNA, 25 bp, Homo sapien
ctggttccggttttatggatgagaa

SEQ ID NO: 1300078 - DNA, 25 bp, Homo sapien
cactgcagtactattggccatggag

SEQ ID NO: 1300079 - DNA, 25 bp, Homo sapien
aattggagaggttgattagggctga

SEQ ID NO: 1300080 - DNA, 25 bp, Homo sapien
gagcttatcgagatcctgtttcttt

SEQ ID NO: 1300081 - DNA, 25 bp, Homo sapien
aatctgccgagctttggacttcagc

SEQ ID NO: 1300082 - DNA, 25 bp, Homo sapien
tagagcttatcgagatcctgtttct

SEQ ID NO: 1300083 - DNA, 25 bp, Homo sapien
tctttttggagctgtgaggaccaag

SEQ ID NO: 1300084 - DNA, 25 bp, Homo sapien
aaagcacaagaattagctctagaag

SEQ ID NO: 1300085 - DNA, 25 bp, Homo sapien
aaaagcacaagaattagctctagaa

SEQ ID NO: 1300086 - DNA, 25 bp, Homo sapien
agctatctgagtgtctagatcttta

SEQ ID NO: 1300087 - DNA, 25 bp, Homo sapien
caacagctgtgagcccggtgaaatg

SEQ ID NO: 1300088 - DNA, 25 bp, Homo sapien
agcaacagctgtgagcccggtgaaa

SEQ ID NO: 1300089 - DNA, 25 bp, Homo sapien
tctgagtgtctagatctttaattac

SEQ ID NO: 1300090 - DNA, 25 bp, Homo sapien
gcagtatctgggtttaagtaccaac

SEQ ID NO: 1300091 - DNA, 25 bp, Homo sapien
ttatcaaaaaggcagtataggccac

SEQ ID NO: 1300092 - DNA, 25 bp, Homo sapien
aagtaccaactgtgccacttttcag

SEQ ID NO: 1300093 - DNA, 25 bp, Homo sapien
cacttttcagctgtattgagcaagc

SEQ ID NO: 1300094 - DNA, 25 bp, Homo sapien
taaacattgctgatatagtgcctac

SEQ ID NO: 1300095 - DNA, 25 bp, Homo sapien
ttagggctttccataaagaatccca

SEQ ID NO: 1300096 - DNA, 25 bp, Homo sapien
cattgctgatatagtgcctacaaaa

SEQ ID NO: 1300097 - DNA, 25 bp, Homo sapien
aacacacctgtttcacagtgcagcc

SEQ ID NO: 1300098 - DNA, 25 bp, Homo sapien
tgaccctttcctcgtaggagtgcgg

SEQ ID NO: 1300099 - DNA, 25 bp, Homo sapien
ctctccggagcctgtgtcttcacgc

SEQ ID NO: 1300100 - DNA, 25 bp, Homo sapien
cctcgtaggagtgcgggtcctcata

SEQ ID NO: 1300101 - DNA, 25 bp, Homo sapien
tgcgggtcctcataatcctgctcct

SEQ ID NO: 1300102 - DNA, 25 bp, Homo sapien
cacaacctggtccttcgaacactga

SEQ ID NO: 1300103 - DNA, 25 bp, Homo sapien
tcagatgccggagaactcgcatccg

SEQ ID NO: 1300104 - DNA, 25 bp, Homo sapien
tgtaggtctgggtcctgactccctc

SEQ ID NO: 1300105 - DNA, 25 bp, Homo sapien
gaacactgacccactgtaggtctgg

SEQ ID NO: 1300106 - DNA, 25 bp, Homo sapien
agtgaagcgttcgtctcagcagccg

SEQ ID NO: 1300107 - DNA, 25 bp, Homo sapien
ctatctccccatgatatgcagagac

SEQ ID NO: 1300108 - DNA, 25 bp, Homo sapien
aggcagcagcgtctatctccccatg

SEQ ID NO: 1300109 - DNA, 25 bp, Homo sapien
cagagactgccccagtgaagcgttc

SEQ ID NO: 1300110 - DNA, 25 bp, Homo sapien
cagcttatgcgtgaccttgtgacct

SEQ ID NO: 1300111 - DNA, 25 bp, Homo sapien
tctaatactccttcgaagtgcagca

SEQ ID NO: 1300112 - DNA, 25 bp, Homo sapien
ttgtgattcttgtcttccccagtca

SEQ ID NO: 1300113 - DNA, 25 bp, Homo sapien
gccacaatatgaacacaccatgaca

SEQ ID NO: 1300114 - DNA, 25 bp, Homo sapien
ctgagagccggtattccaacgccat

SEQ ID NO: 1300115 - DNA, 25 bp, Homo sapien
cagccgctgagagccggtattccaa

SEQ ID NO: 1300116 - DNA, 25 bp, Homo sapien
cgctgagagccggtattccaacgcc

SEQ ID NO: 1300117 - DNA, 25 bp, Homo sapien
tacagccgctgagagccggtattcc

SEQ ID NO: 1300118 - DNA, 25 bp, Homo sapien
agacgccttctgtcgtgagcagttg

SEQ ID NO: 1300119 - DNA, 25 bp, Homo sapien
tctgtcgtgagcagttgacaagaaa

SEQ ID NO: 1300120 - DNA, 25 bp, Homo sapien
gtgagcagttgacaagaaagaccca

SEQ ID NO: 1300121 - DNA, 25 bp, Homo sapien
gagacgccttctgtcgtgagcagtt

SEQ ID NO: 1300122 - DNA, 25 bp, Homo sapien
gaaggagcggttcctccctcgctcg

SEQ ID NO: 1300123 - DNA, 25 bp, Homo sapien
ccagcaagccctgagtatatttgca

SEQ ID NO: 1300124 - DNA, 25 bp, Homo sapien
tgcaaccggaaggagcggttcctcc

SEQ ID NO: 1300125 - DNA, 25 bp, Homo sapien
ctcttccccgccactccctcggtgc

SEQ ID NO: 1300126 - DNA, 25 bp, Homo sapien
aaacatacctacctaggaaacacat

SEQ ID NO: 1300127 - DNA, 25 bp, Homo sapien
taaataagttagatgcttagcatca

SEQ ID NO: 1300128 - DNA, 25 bp, Homo sapien
tgtagtagagctcttgggaaagcac

SEQ ID NO: 1300129 - DNA, 25 bp, Homo sapien
gctggcaggctagtagtaatgtcta

SEQ ID NO: 1300130 - DNA, 25 bp, Homo sapien
taccaacgtgctagctcaggttccc

SEQ ID NO: 1300131 - DNA, 25 bp, Homo sapien
gaagagccctcgtgaataccaacgt

SEQ ID NO: 1300132 - DNA, 25 bp, Homo sapien
tgtaggttcccttacagccctggtc

SEQ ID NO: 1300133 - DNA, 25 bp, Homo sapien
tgagaggaccaattcaggacagaag

SEQ ID NO: 1300134 - DNA, 25 bp, Homo sapien
cattttaaggtctcgcgggcttcgg

SEQ ID NO: 1300135 - DNA, 25 bp, Homo sapien
tgttagtcgaaacctcgtggtgcga

SEQ ID NO: 1300136 - DNA, 25 bp, Homo sapien
gctaacagaggatgaccaagcccct

SEQ ID NO: 1300137 - DNA, 25 bp, Homo sapien
taagattcataggttctccggactc

SEQ ID NO: 1300138 - DNA, 25 bp, Homo sapien
tgtgtgaaaagacctcacttttgtt

SEQ ID NO: 1300139 - DNA, 25 bp, Homo sapien
tgaaaagggtatgtgtgaaaagacc

SEQ ID NO: 1300140 - DNA, 25 bp, Homo sapien
aagggtatgtgtgaaaagacctcac

SEQ ID NO: 1300141 - DNA, 25 bp, Homo sapien
tcttatatatgtggatttgggtctg

SEQ ID NO: 1300142 - DNA, 25 bp, Homo sapien
cttttcagtgtcaacggcagtggac

SEQ ID NO: 1300143 - DNA, 25 bp, Homo sapien
taatggagtaggacagtctcaggct

SEQ ID NO: 1300144 - DNA, 25 bp, Homo sapien
ttcagaaccccacccagtgttggag

SEQ ID NO: 1300145 - DNA, 25 bp, Homo sapien
gctactctgaggacgatattcaccg

SEQ ID NO: 1300146 - DNA, 25 bp, Homo sapien
gctgattgtctagacttcatagtga

SEQ ID NO: 1300147 - DNA, 25 bp, Homo sapien
catcgtggaaattgacaaatgctgt

SEQ ID NO: 1300148 - DNA, 25 bp, Homo sapien
cctggcccagctgttagttacatcg

SEQ ID NO: 1300149 - DNA, 25 bp, Homo sapien
tgtgtcacgactgtagctcttaaac

SEQ ID NO: 1300150 - DNA, 25 bp, Homo sapien
cagactgcagcaacggttgcatctg

SEQ ID NO: 1300151 - DNA, 25 bp, Homo sapien
acagactgcagcaacggttgcatct

SEQ ID NO: 1300152 - DNA, 25 bp, Homo sapien
tgcacttggagaacacttgagttgt

SEQ ID NO: 1300153 - DNA, 25 bp, Homo sapien
tataacagtgttacccaaggttgtg

SEQ ID NO: 1300154 - DNA, 25 bp, Homo sapien
agtttcttgttcagccaatgaggaa

SEQ ID NO: 1300155 - DNA, 25 bp, Homo sapien
tgatttcaaagctgagaacagtggt

SEQ ID NO: 1300156 - DNA, 25 bp, Homo sapien
ggcactcatcgttttcacttttagc

SEQ ID NO: 1300157 - DNA, 25 bp, Homo sapien
tgtttttatcagtaggaaggtgcta

SEQ ID NO: 1300158 - DNA, 25 bp, Homo sapien
gaaggtgctagatttcctactaata

SEQ ID NO: 1300159 - DNA, 25 bp, Homo sapien
cctactaatatgtatggcactcatc

SEQ ID NO: 1300160 - DNA, 25 bp, Homo sapien
cgggccgtgggttcatgtactcgaa

SEQ ID NO: 1300161 - DNA, 25 bp, Homo sapien
tgagtgtactcatctgttgtttcca

SEQ ID NO: 1300162 - DNA, 25 bp, Homo sapien
ggaaactcccaattttgctgccctc

SEQ ID NO: 1300163 - DNA, 25 bp, Homo sapien
ggttcatgtactcgaaaaagttgag

SEQ ID NO: 1300164 - DNA, 25 bp, Homo sapien
catgttcggcatcgtccggtgagtc

SEQ ID NO: 1300165 - DNA, 25 bp, Homo sapien
agggcgcacggtggagagggacgcg

SEQ ID NO: 1300166 - DNA, 25 bp, Homo sapien
gctgggcaacgtgcttgtcatgttc

SEQ ID NO: 1300167 - DNA, 25 bp, Homo sapien
atcaccgcgctctactcggccgtgt

SEQ ID NO: 1300168 - DNA, 25 bp, Homo sapien
ctgcttacaagtggagccagggttc

SEQ ID NO: 1300169 - DNA, 25 bp, Homo sapien
gcttacaagtggagccagggttcag

SEQ ID NO: 1300170 - DNA, 25 bp, Homo sapien
tcactgcttacaagtggagccaggg

SEQ ID NO: 1300171 - DNA, 25 bp, Homo sapien
agggttcagggtcagagctagagac

SEQ ID NO: 1300172 - DNA, 25 bp, Homo sapien
caacccatggttcttaatgctgcag

SEQ ID NO: 1300173 - DNA, 25 bp, Homo sapien
tctcggaatgaggagaccgcaaatg

SEQ ID NO: 1300174 - DNA, 25 bp, Homo sapien
aaggaagaaggtcccgggccatctg

SEQ ID NO: 1300175 - DNA, 25 bp, Homo sapien
agtcccttggcgtgtgccggtgcaa

SEQ ID NO: 1300176 - DNA, 25 bp, Homo sapien
cagatctagtcagagccaactccca

SEQ ID NO: 1300177 - DNA, 25 bp, Homo sapien
ggatctcagcatgcctcagggcagg

SEQ ID NO: 1300178 - DNA, 25 bp, Homo sapien
gagactcagtcaggaagacttcaca

SEQ ID NO: 1300179 - DNA, 25 bp, Homo sapien
cttcgggcctgttcatgtcaaggtg

SEQ ID NO: 1300180 - DNA, 25 bp, Homo sapien
aggtgattatcttcagataaataag

SEQ ID NO: 1300181 - DNA, 25 bp, Homo sapien
tcacattatttgcagctacatggat

SEQ ID NO: 1300182 - DNA, 25 bp, Homo sapien
tcgtacttaactgcaggatcctaaa

SEQ ID NO: 1300183 - DNA, 25 bp, Homo sapien
ccagaagaatgttcaacgggtccat

SEQ ID NO: 1300184 - DNA, 25 bp, Homo sapien
tacgaacttcgtacttaactgcagg

SEQ ID NO: 1300185 - DNA, 25 bp, Homo sapien
gtccatagctgattccagagccttt

SEQ ID NO: 1300186 - DNA, 25 bp, Homo sapien
atacacctgacccatacacatgcac

SEQ ID NO: 1300187 - DNA, 25 bp, Homo sapien
ctcacagccacatacaaataggcct

SEQ ID NO: 1300188 - DNA, 25 bp, Homo sapien
cacatacaaataggcctccatctgt

SEQ ID NO: 1300189 - DNA, 25 bp, Homo sapien
catctgtacacctgtgacccataca

SEQ ID NO: 1300190 - DNA, 25 bp, Homo sapien
acgtgcacacagtcaaacagcttgg

SEQ ID NO: 1300191 - DNA, 25 bp, Homo sapien
gtgcacacagtcaaacagcttggct

SEQ ID NO: 1300192 - DNA, 25 bp, Homo sapien
cgtgcacacagtcaaacagcttggc

SEQ ID NO: 1300193 - DNA, 25 bp, Homo sapien
tgcacacagtcaaacagcttggctt

SEQ ID NO: 1300194 - DNA, 25 bp, Homo sapien
ggaagctgtgcattggaattggttc

SEQ ID NO: 1300195 - DNA, 25 bp, Homo sapien
tggaagctgtgcattggaattggtt

SEQ ID NO: 1300196 - DNA, 25 bp, Homo sapien
ttagcatccttgcttagttcctgct

SEQ ID NO: 1300197 - DNA, 25 bp, Homo sapien
tgcattagcatccttgcttagttcc

SEQ ID NO: 1300198 - DNA, 25 bp, Homo sapien
gataattcactactttcaggccagc

SEQ ID NO: 1300199 - DNA, 25 bp, Homo sapien
tagtgaggagggaaagaatagaaca

SEQ ID NO: 1300200 - DNA, 25 bp, Homo sapien
tgatctgtaactgatggtgaataat

SEQ ID NO: 1300201 - DNA, 25 bp, Homo sapien
taactgatggtgaataatcaattga

SEQ ID NO: 1300202 - DNA, 25 bp, Homo sapien
ctgtgcacgcaaagtcacccgcctt

SEQ ID NO: 1300203 - DNA, 25 bp, Homo sapien
cacgcaaagtcacccgcctttccca

SEQ ID NO: 1300204 - DNA, 25 bp, Homo sapien
tgtgcacgcaaagtcacccgccttt

SEQ ID NO: 1300205 - DNA, 25 bp, Homo sapien
tgcacgcaaagtcacccgcctttcc

SEQ ID NO: 1300206 - DNA, 25 bp, Homo sapien
tcccaaatgcactccccacgcacaa

SEQ ID NO: 1300207 - DNA, 25 bp, Homo sapien
caaatgcactccccacgcacaaatt

SEQ ID NO: 1300208 - DNA, 25 bp, Homo sapien
aatgcactccccacgcacaaattca

SEQ ID NO: 1300209 - DNA, 25 bp, Homo sapien
cccaaatgcactccccacgcacaaa

SEQ ID NO: 1300210 - DNA, 25 bp, Homo sapien
ggtacatcaatgtgcttgggagcct

SEQ ID NO: 1300211 - DNA, 25 bp, Homo sapien
tccctagccctttgattgagtcagg

SEQ ID NO: 1300212 - DNA, 25 bp, Homo sapien
gtaacccctgggcaatactgtctgg

SEQ ID NO: 1300213 - DNA, 25 bp, Homo sapien
cctgggtgcaagagtacacgtgaga

SEQ ID NO: 1300214 - DNA, 25 bp, Homo sapien
tgatttctggtcgaaggatccaaca

SEQ ID NO: 1300215 - DNA, 25 bp, Homo sapien
tctggtcgaaggatccaacacttct

SEQ ID NO: 1300216 - DNA, 25 bp, Homo sapien
gtcgaaggatccaacacttctctag

SEQ ID NO: 1300217 - DNA, 25 bp, Homo sapien
tcctgatttctggtcgaaggatcca

SEQ ID NO: 1300218 - DNA, 25 bp, Homo sapien
tagtaaccttaggagcagtaccacg

SEQ ID NO: 1300219 - DNA, 25 bp, Homo sapien
tgagacttcggccagtgaccatgga

SEQ ID NO: 1300220 - DNA, 25 bp, Homo sapien
tcgcttttacggaacgcctactgtg

SEQ ID NO: 1300221 - DNA, 25 bp, Homo sapien
tcacgccggacgaagtggtaggaca

SEQ ID NO: 1300222 - DNA, 25 bp, Homo sapien
cgagaccagggtcgaagggtccagg

SEQ ID NO: 1300223 - DNA, 25 bp, Homo sapien
ctgaggggtccagcggtcccgaatt

SEQ ID NO: 1300224 - DNA, 25 bp, Homo sapien
gcggtcccgaattccagaatccgaa

SEQ ID NO: 1300225 - DNA, 25 bp, Homo sapien
ccgaattccagaatccgaacttggg

SEQ ID NO: 1300226 - DNA, 25 bp, Homo sapien
attcggtgtccgcgggagagtccct

SEQ ID NO: 1300227 - DNA, 25 bp, Homo sapien
agctcggatccggagctagacacgt

SEQ ID NO: 1300228 - DNA, 25 bp, Homo sapien
gggtccggccggtcctggctgtctg

SEQ ID NO: 1300229 - DNA, 25 bp, Homo sapien
agagtccctgcaggtcggcgcagcc

SEQ ID NO: 1300230 - DNA, 25 bp, Homo sapien
cggcccttacgtaactgactttgag

SEQ ID NO: 1300231 - DNA, 25 bp, Homo sapien
cgctccggcccttacgtaactgact

SEQ ID NO: 1300232 - DNA, 25 bp, Homo sapien
tgactttgagtttccggacccagga

SEQ ID NO: 1300233 - DNA, 25 bp, Homo sapien
gacccaggaaccgacccgccagctg

SEQ ID NO: 1300234 - DNA, 25 bp, Homo sapien
ggaactgtttgacccctgctggagc

SEQ ID NO: 1300235 - DNA, 25 bp, Homo sapien
tggaactgtttgacccctgctggag

SEQ ID NO: 1300236 - DNA, 25 bp, Homo sapien
ctgtggaactgtttgacccctgctg

SEQ ID NO: 1300237 - DNA, 25 bp, Homo sapien
actgtttgacccctgctggagcaaa

SEQ ID NO: 1300238 - DNA, 25 bp, Homo sapien
catgctgggtccctccaaaacccat

SEQ ID NO: 1300239 - DNA, 25 bp, Homo sapien
ccatgctgggtccctccaaaaccca

SEQ ID NO: 1300240 - DNA, 25 bp, Homo sapien
actgctccaggggctaacaggcagc

SEQ ID NO: 1300241 - DNA, 25 bp, Homo sapien
tccaggggctaacaggcagctagcg

SEQ ID NO: 1300242 - DNA, 25 bp, Homo sapien
tgctccaggggctaacaggcagcta

SEQ ID NO: 1300243 - DNA, 25 bp, Homo sapien
gctccaggggctaacaggcagctag

SEQ ID NO: 1300244 - DNA, 25 bp, Homo sapien
attggtcttctatactcatccttca

SEQ ID NO: 1300245 - DNA, 25 bp, Homo sapien
ccttcaaggtaccagattttcctgt

SEQ ID NO: 1300246 - DNA, 25 bp, Homo sapien
gatggtaaaccactggtaattggtc

SEQ ID NO: 1300247 - DNA, 25 bp, Homo sapien
ttcctgtctgattggtgaaggaagc

SEQ ID NO: 1300248 - DNA, 25 bp, Homo sapien
cagaccgggttcgacttgcgcgtgc

SEQ ID NO: 1300249 - DNA, 25 bp, Homo sapien
ccggctccagaccgggttcgacttg

SEQ ID NO: 1300250 - DNA, 25 bp, Homo sapien
gctccagaccgggttcgacttgcgc

SEQ ID NO: 1300251 - DNA, 25 bp, Homo sapien
cgggttcgacttgcgcgtgcgcaca

SEQ ID NO: 1300252 - DNA, 25 bp, Homo sapien
tgagatgtatttttgacggtcccct

SEQ ID NO: 1300253 - DNA, 25 bp, Homo sapien
cctcgggtgcgtcaatcacggtgcg

SEQ ID NO: 1300254 - DNA, 25 bp, Homo sapien
aggagcctcgtgtgcacgccgagtc

SEQ ID NO: 1300255 - DNA, 25 bp, Homo sapien
gagcctcgggaggaaaccaaatgcg

SEQ ID NO: 1300256 - DNA, 25 bp, Homo sapien
tgcagccgcggagcgatttcttcct

SEQ ID NO: 1300257 - DNA, 25 bp, Homo sapien
tcagacggtgaaggtgttgcgtgca

SEQ ID NO: 1300258 - DNA, 25 bp, Homo sapien
tgaaggtgttgcgtgcagccgcgga

SEQ ID NO: 1300259 - DNA, 25 bp, Homo sapien
ccgcggagcgatttcttcctggcga

SEQ ID NO: 1300260 - DNA, 25 bp, Homo sapien
tcgcgcatctgtcggcttggaaatc

SEQ ID NO: 1300261 - DNA, 25 bp, Homo sapien
aatctattctctcagcgtcgtgacc

SEQ ID NO: 1300262 - DNA, 25 bp, Homo sapien
ggaaatcttcctccgtgctcgctgg

SEQ ID NO: 1300263 - DNA, 25 bp, Homo sapien
gccaccgacgcctgcatcattgaaa

SEQ ID NO: 1300264 - DNA, 25 bp, Homo sapien
cgggtctgggctcgccctccgagat

SEQ ID NO: 1300265 - DNA, 25 bp, Homo sapien
tcgccctccgagattgaccagcagg

SEQ ID NO: 1300266 - DNA, 25 bp, Homo sapien
tctgggctcgccctccgagattgac

SEQ ID NO: 1300267 - DNA, 25 bp, Homo sapien
tgggctcgccctccgagattgacca

SEQ ID NO: 1300268 - DNA, 25 bp, Homo sapien
gagatttggatcttctgtcaaagcc

SEQ ID NO: 1300269 - DNA, 25 bp, Homo sapien
gcgaaaattcgcttcaaagccagta

SEQ ID NO: 1300270 - DNA, 25 bp, Homo sapien
taatcttcaccacagctctttggag

SEQ ID NO: 1300271 - DNA, 25 bp, Homo sapien
tctttggagtaggtattaaccaggc

SEQ ID NO: 1300272 - DNA, 25 bp, Homo sapien
tctggcttcagagctttatttccgg

SEQ ID NO: 1300273 - DNA, 25 bp, Homo sapien
gcaagtctggcttcagagctttatt

SEQ ID NO: 1300274 - DNA, 25 bp, Homo sapien
tttccggttgggtagaacacagtca

SEQ ID NO: 1300275 - DNA, 25 bp, Homo sapien
aacacagtcatgtggttgatgtctc

SEQ ID NO: 1300276 - DNA, 25 bp, Homo sapien
aagagttttatattatgactttgta

SEQ ID NO: 1300277 - DNA, 25 bp, Homo sapien
gattgcttgagtcatggacaacata

SEQ ID NO: 1300278 - DNA, 25 bp, Homo sapien
gcccggctcctagaatcagtcattt

SEQ ID NO: 1300279 - DNA, 25 bp, Homo sapien
tactttgtggtactacaaaatgctc

SEQ ID NO: 1300280 - DNA, 25 bp, Homo sapien
acggtgactcaaacgcctgtactcc

SEQ ID NO: 1300281 - DNA, 25 bp, Homo sapien
caatcgtctgacatgttatatgcca

SEQ ID NO: 1300282 - DNA, 25 bp, Homo sapien
tgagttatcctagtcctaagtaggg

SEQ ID NO: 1300283 - DNA, 25 bp, Homo sapien
gataagaaaacgaaagcactgacat

SEQ ID NO: 1300284 - DNA, 25 bp, Homo sapien
gggaaactgttctagactggttgca

SEQ ID NO: 1300285 - DNA, 25 bp, Homo sapien
cacgatcttacatgtgttcagcaat

SEQ ID NO: 1300286 - DNA, 25 bp, Homo sapien
cgatcttacatgtgttcagcaatcc

SEQ ID NO: 1300287 - DNA, 25 bp, Homo sapien
acgatcttacatgtgttcagcaatc

SEQ ID NO: 1300288 - DNA, 25 bp, Homo sapien
ccacgatcttacatgtgttcagcaa

SEQ ID NO: 1300289 - DNA, 25 bp, Homo sapien
tgggtatttgtacaagaactaagga

SEQ ID NO: 1300290 - DNA, 25 bp, Homo sapien
ttattgttactagcgttaccacttg

SEQ ID NO: 1300291 - DNA, 25 bp, Homo sapien
aatgcaagtacacaggccagttaca

SEQ ID NO: 1300292 - DNA, 25 bp, Homo sapien
attttccttcgtattgccctagtgg

SEQ ID NO: 1300293 - DNA, 25 bp, Homo sapien
aaaatcctttttcatgaggaatact

SEQ ID NO: 1300294 - DNA, 25 bp, Homo sapien
catactgtttgaattttctaaccat

SEQ ID NO: 1300295 - DNA, 25 bp, Homo sapien
ccatactgtttgaattttctaacca

SEQ ID NO: 1300296 - DNA, 25 bp, Homo sapien
ttggcctctcgtcgggctttgggca

SEQ ID NO: 1300297 - DNA, 25 bp, Homo sapien
tctcgtcgggctttgggcattaggt

SEQ ID NO: 1300298 - DNA, 25 bp, Homo sapien
gcctctcgtcgggctttgggcatta

SEQ ID NO: 1300299 - DNA, 25 bp, Homo sapien
cttggcctctcgtcgggctttgggc

SEQ ID NO: 1300300 - DNA, 25 bp, Homo sapien
cacaagaaaggtgtaaatcgtacat

SEQ ID NO: 1300301 - DNA, 25 bp, Homo sapien
gccttactgcatattagcttaacat

SEQ ID NO: 1300302 - DNA, 25 bp, Homo sapien
caaaaagaatccataccactgaaaa

SEQ ID NO: 1300303 - DNA, 25 bp, Homo sapien
ctgaagatcctgcttttttcctcta

SEQ ID NO: 1300304 - DNA, 25 bp, Homo sapien
acagtgtcttctcttaggtagggtt

SEQ ID NO: 1300305 - DNA, 25 bp, Homo sapien
cagtgtcttctcttaggtagggttt

SEQ ID NO: 1300306 - DNA, 25 bp, Homo sapien
tacgatcttgatttactgcatcctc

SEQ ID NO: 1300307 - DNA, 25 bp, Homo sapien
agtggtacgatcttgatttactgca

SEQ ID NO: 1300308 - DNA, 25 bp, Homo sapien
ggtacgatcttgatttactgcatcc

SEQ ID NO: 1300309 - DNA, 25 bp, Homo sapien
tggtacgatcttgatttactgcatc

SEQ ID NO: 1300310 - DNA, 25 bp, Homo sapien
catttgagcccattactgaaacgag

SEQ ID NO: 1300311 - DNA, 25 bp, Homo sapien
cattcagttccttatgtcactaaaa

SEQ ID NO: 1300312 - DNA, 25 bp, Homo sapien
gaggtaataagctacattcagttcc

SEQ ID NO: 1300313 - DNA, 25 bp, Homo sapien
gatcttctaagttagcatttgagcc

SEQ ID NO: 1300314 - DNA, 25 bp, Homo sapien
agctggtaccacaagttcacgctac

SEQ ID NO: 1300315 - DNA, 25 bp, Homo sapien
ggtaccacaagttcacgctaccgcg

SEQ ID NO: 1300316 - DNA, 25 bp, Homo sapien
agtagtgccgtcatagcttgctgta

SEQ ID NO: 1300317 - DNA, 25 bp, Homo sapien
cagtagtgccgtcatagcttgctgt

SEQ ID NO: 1300318 - DNA, 25 bp, Homo sapien
gtatgtatttatttttgaggtggag

SEQ ID NO: 1300319 - DNA, 25 bp, Homo sapien
gaatagccttggtagaggtatattg

SEQ ID NO: 1300320 - DNA, 25 bp, Homo sapien
gtaaattgacaatttatgtatgtat

SEQ ID NO: 1300321 - DNA, 25 bp, Homo sapien
tcttttttatattgtaaattgacaa

SEQ ID NO: 1300322 - DNA, 25 bp, Homo sapien
tttaaaaactagatagacctctggc

SEQ ID NO: 1300323 - DNA, 25 bp, Homo sapien
taaacctcatcttattccttgtcaa

SEQ ID NO: 1300324 - DNA, 25 bp, Homo sapien
cgtggtgggtgaaataccaagtgct

SEQ ID NO: 1300325 - DNA, 25 bp, Homo sapien
cattaaacatgtattgcgtggtggg

SEQ ID NO: 1300326 - DNA, 25 bp, Homo sapien
tactagtaaattcacacccacagcc

SEQ ID NO: 1300327 - DNA, 25 bp, Homo sapien
tcggcgcatggctggttgaaaagct

SEQ ID NO: 1300328 - DNA, 25 bp, Homo sapien
taaagctgctgttatgacttgtgct

SEQ ID NO: 1300329 - DNA, 25 bp, Homo sapien
tcatggcactaagcagataatcccc

SEQ ID NO: 1300330 - DNA, 25 bp, Homo sapien
tactgaaaccagatacaagtgcttg

SEQ ID NO: 1300331 - DNA, 25 bp, Homo sapien
aagtgcttgcataagaaaataatca

SEQ ID NO: 1300332 - DNA, 25 bp, Homo sapien
cataccagttactagcttataattc

SEQ ID NO: 1300333 - DNA, 25 bp, Homo sapien
aaaaagatcgtttgcaatcccttga

SEQ ID NO: 1300334 - DNA, 25 bp, Homo sapien
ctcccaacctccgatgatcacccgc

SEQ ID NO: 1300335 - DNA, 25 bp, Homo sapien
cccaacctccgatgatcacccgcct

SEQ ID NO: 1300336 - DNA, 25 bp, Homo sapien
aactcccaacctccgatgatcaccc

SEQ ID NO: 1300337 - DNA, 25 bp, Homo sapien
actcccaacctccgatgatcacccg

SEQ ID NO: 1300338 - DNA, 25 bp, Homo sapien
gaatcacattaagtctcagctttgc

SEQ ID NO: 1300339 - DNA, 25 bp, Homo sapien
tcactgaggatggttcagacacagc

SEQ ID NO: 1300340 - DNA, 25 bp, Homo sapien
tgcagtcttatataatccaatggcc

SEQ ID NO: 1300341 - DNA, 25 bp, Homo sapien
gattccccatcagttcaggtaagcg

SEQ ID NO: 1300342 - DNA, 25 bp, Homo sapien
caaacgaacatgtagtgcatgccca

SEQ ID NO: 1300343 - DNA, 25 bp, Homo sapien
caggagtggtgacaagaaatgcagc

SEQ ID NO: 1300344 - DNA, 25 bp, Homo sapien
ggaaagagcttgtcctatctcagga

SEQ ID NO: 1300345 - DNA, 25 bp, Homo sapien
ctaaaatagacagtgggtatcgggc

SEQ ID NO: 1300346 - DNA, 25 bp, Homo sapien
tctagaacagtgtggcagctttcac

SEQ ID NO: 1300347 - DNA, 25 bp, Homo sapien
tcggcttcgttgtctgtaaattgga

SEQ ID NO: 1300348 - DNA, 25 bp, Homo sapien
gaatattccgtgtgatctagaacag

SEQ ID NO: 1300349 - DNA, 25 bp, Homo sapien
gcctaaacgtttccctcagctctgt

SEQ ID NO: 1300350 - DNA, 25 bp, Homo sapien
aaaacagactctgtccaggtagaaa

SEQ ID NO: 1300351 - DNA, 25 bp, Homo sapien
agaaaaacagactctgtccaggtag

SEQ ID NO: 1300352 - DNA, 25 bp, Homo sapien
agactctgtccaggtagaaatggtg

SEQ ID NO: 1300353 - DNA, 25 bp, Homo sapien
aacagactctgtccaggtagaaatg

SEQ ID NO: 1300354 - DNA, 25 bp, Homo sapien
tctattagacgttgggactcctggt

SEQ ID NO: 1300355 - DNA, 25 bp, Homo sapien
agacttatttgcagaagggcccaga

SEQ ID NO: 1300356 - DNA, 25 bp, Homo sapien
gacgccttttgatgctcacgggaaa

SEQ ID NO: 1300357 - DNA, 25 bp, Homo sapien
gattctgcagcataggccacgataa

SEQ ID NO: 1300358 - DNA, 25 bp, Homo sapien
ccaagcgaggattagcgggctctga

SEQ ID NO: 1300359 - DNA, 25 bp, Homo sapien
tgttgagcaaggcaggtaaccccaa

SEQ ID NO: 1300360 - DNA, 25 bp, Homo sapien
cagacggctgcacggtgatgatcac

SEQ ID NO: 1300361 - DNA, 25 bp, Homo sapien
ggaatgttcaatgcaggagccagac

SEQ ID NO: 1300362 - DNA, 25 bp, Homo sapien
ctccgcactgacgggacgggtgaag

SEQ ID NO: 1300363 - DNA, 25 bp, Homo sapien
agatttctggctctgcgcagcctac

SEQ ID NO: 1300364 - DNA, 25 bp, Homo sapien
ccagatttctggctctgcgcagcct

SEQ ID NO: 1300365 - DNA, 25 bp, Homo sapien
gcactgacgggacgggtgaagtacc

SEQ ID NO: 1300366 - DNA, 25 bp, Homo sapien
ggccggggctgggaaggagggcgca

SEQ ID NO: 1300367 - DNA, 25 bp, Homo sapien
gccggggctgggaaggagggcgcag

SEQ ID NO: 1300368 - DNA, 25 bp, Homo sapien
ccggggctgggaaggagggcgcagt

SEQ ID NO: 1300369 - DNA, 25 bp, Homo sapien
cggggctgggaaggagggcgcagtc

SEQ ID NO: 1300370 - DNA, 25 bp, Homo sapien
tggcggagccgtcgcgtctccaagt

SEQ ID NO: 1300371 - DNA, 25 bp, Homo sapien
acgaacaggccgacgcccatgatca

SEQ ID NO: 1300372 - DNA, 25 bp, Homo sapien
ctccaagtctcggttctcatacagc

SEQ ID NO: 1300373 - DNA, 25 bp, Homo sapien
catacagcagtgtgttggcgcagat

SEQ ID NO: 1300374 - DNA, 25 bp, Homo sapien
ggcgagctggcattggcggcccggg

SEQ ID NO: 1300375 - DNA, 25 bp, Homo sapien
cgccgcgaccctcgcgtcgcagctc

SEQ ID NO: 1300376 - DNA, 25 bp, Homo sapien
ctcgtgcgggccgtgagcccggccc

SEQ ID NO: 1300377 - DNA, 25 bp, Homo sapien
tcgcgtcgcagctcgctcatctggg

SEQ ID NO: 1300378 - DNA, 25 bp, Homo sapien
tgcccatacccaccagtaccacgag

SEQ ID NO: 1300379 - DNA, 25 bp, Homo sapien
gcgaacgcccccgacggcgagcgca

SEQ ID NO: 1300380 - DNA, 25 bp, Homo sapien
atacccaccagtaccacgagcgccc

SEQ ID NO: 1300381 - DNA, 25 bp, Homo sapien
cccccgacggcgagcgcagccgcag

SEQ ID NO: 1300382 - DNA, 25 bp, Homo sapien
ggcggggagcgcgggcgccggcggc

SEQ ID NO: 1300383 - DNA, 25 bp, Homo sapien
ggcgccggcggcggcccaggcggcg

SEQ ID NO: 1300384 - DNA, 25 bp, Homo sapien
gccggcggcggcccaggcggcggcc

SEQ ID NO: 1300385 - DNA, 25 bp, Homo sapien
cggcggcggcccaggcggcggccca

SEQ ID NO: 1300386 - DNA, 25 bp, Homo sapien
gcgagagacgcggccctcggggctc

SEQ ID NO: 1300387 - DNA, 25 bp, Homo sapien
agcgagagacgcggccctcggggct

SEQ ID NO: 1300388 - DNA, 25 bp, Homo sapien
cgagagacgcggccctcggggctcc

SEQ ID NO: 1300389 - DNA, 25 bp, Homo sapien
gtcatctcgccgtcgtctgggcgct

SEQ ID NO: 1300390 - DNA, 25 bp, Homo sapien
ctcccggccgtcatctcgccgtcgt

SEQ ID NO: 1300391 - DNA, 25 bp, Homo sapien
ggccgtcatctcgccgtcgtctggg

SEQ ID NO: 1300392 - DNA, 25 bp, Homo sapien
gggctcccggccgtcatctcgccgt

SEQ ID NO: 1300393 - DNA, 25 bp, Homo sapien
ggcgcaggctgttccctggcgcatc

SEQ ID NO: 1300394 - DNA, 25 bp, Homo sapien
aaggactggaccgacgggcctctag

SEQ ID NO: 1300395 - DNA, 25 bp, Homo sapien
cgctcgggttttccgcagcggagct

SEQ ID NO: 1300396 - DNA, 25 bp, Homo sapien
gcctctagcttcagggcgccaggtt

SEQ ID NO: 1300397 - DNA, 25 bp, Homo sapien
gcgccgcagcgccgcgcgggtccgg

SEQ ID NO: 1300398 - DNA, 25 bp, Homo sapien
agcgccgcgcgggtccgggtcccag

SEQ ID NO: 1300399 - DNA, 25 bp, Homo sapien
gcagcgccgcgcgggtccgggtccc

SEQ ID NO: 1300400 - DNA, 25 bp, Homo sapien
ctggcgccgcagcgccgcgcgggtc

SEQ ID NO: 1300401 - DNA, 25 bp, Homo sapien
tcgcaaaggcccacaaaggcgaccc

SEQ ID NO: 1300402 - DNA, 25 bp, Homo sapien
atcggtcgcaaaggcccacaaaggc

SEQ ID NO: 1300403 - DNA, 25 bp, Homo sapien
ggtcgcaaaggcccacaaaggcgac

SEQ ID NO: 1300404 - DNA, 25 bp, Homo sapien
tcggtcgcaaaggcccacaaaggcg

SEQ ID NO: 1300405 - DNA, 25 bp, Homo sapien
ccactgtcctgctccggcgtccagg

SEQ ID NO: 1300406 - DNA, 25 bp, Homo sapien
cgttctccctttcccatggccactg

SEQ ID NO: 1300407 - DNA, 25 bp, Homo sapien
tcctgctccggcgtccaggctcctc

SEQ ID NO: 1300408 - DNA, 25 bp, Homo sapien
cacgttctccctttcccatggccac

SEQ ID NO: 1300409 - DNA, 25 bp, Homo sapien
cagaagccacctcgcagaaggaatg

SEQ ID NO: 1300410 - DNA, 25 bp, Homo sapien
gaaacctgattcagtgaccccgaag

SEQ ID NO: 1300411 - DNA, 25 bp, Homo sapien
tcctgcatgtccgtccctctccggg

SEQ ID NO: 1300412 - DNA, 25 bp, Homo sapien
tgaggctccgtgtcctctccagaag

SEQ ID NO: 1300413 - DNA, 25 bp, Homo sapien
tgccaacagcctggtactcgaggcc

SEQ ID NO: 1300414 - DNA, 25 bp, Homo sapien
gggatgattgccagttacagaacaa

SEQ ID NO: 1300415 - DNA, 25 bp, Homo sapien
tactcgaggccgtagtaagctcttg

SEQ ID NO: 1300416 - DNA, 25 bp, Homo sapien
catgctgccagagtagtttgagagc

SEQ ID NO: 1300417 - DNA, 25 bp, Homo sapien
aaggatgcgccctcttgcaaacagt

SEQ ID NO: 1300418 - DNA, 25 bp, Homo sapien
ctgggcctcaggattcaaggatgcg

SEQ ID NO: 1300419 - DNA, 25 bp, Homo sapien
tcaggattcaaggatgcgccctctt

SEQ ID NO: 1300420 - DNA, 25 bp, Homo sapien
gcgccctcttgcaaacagtccgtgg

SEQ ID NO: 1300421 - DNA, 25 bp, Homo sapien
ctgggcctggcgatttttctatctt

SEQ ID NO: 1300422 - DNA, 25 bp, Homo sapien
gagaactgacccctctaccattatg

SEQ ID NO: 1300423 - DNA, 25 bp, Homo sapien
ccactgggcctggcgatttttctat

SEQ ID NO: 1300424 - DNA, 25 bp, Homo sapien
ttcttagagaactgacccctctacc

SEQ ID NO: 1300425 - DNA, 25 bp, Homo sapien
tgggcccagcaatagtgaacacaag

SEQ ID NO: 1300426 - DNA, 25 bp, Homo sapien
tcatttgcaattgggcccagcaata

SEQ ID NO: 1300427 - DNA, 25 bp, Homo sapien
attgggcccagcaatagtgaacaca

SEQ ID NO: 1300428 - DNA, 25 bp, Homo sapien
gcccagcaatagtgaacacaagaag

SEQ ID NO: 1300429 - DNA, 25 bp, Homo sapien
gctttgatcaagcaggccccgtatc

SEQ ID NO: 1300430 - DNA, 25 bp, Homo sapien
gggttgcatgccctgaactattggg

SEQ ID NO: 1300431 - DNA, 25 bp, Homo sapien
aataccttcaatgttacccagtgct

SEQ ID NO: 1300432 - DNA, 25 bp, Homo sapien
gctgtcaggtctagaagcataaccc

SEQ ID NO: 1300433 - DNA, 25 bp, Homo sapien
gccctctatgacacaatccattttg

SEQ ID NO: 1300434 - DNA, 25 bp, Homo sapien
gtatcaaactccacgtttcctgggc

SEQ ID NO: 1300435 - DNA, 25 bp, Homo sapien
tatcaaactccacgtttcctgggca

SEQ ID NO: 1300436 - DNA, 25 bp, Homo sapien
cttcctggtatccatggccctctat

SEQ ID NO: 1300437 - DNA, 25 bp, Homo sapien
gatcccagatgaagttctgactctg

SEQ ID NO: 1300438 - DNA, 25 bp, Homo sapien
cccagatgaagttctgactctgttc

SEQ ID NO: 1300439 - DNA, 25 bp, Homo sapien
gatgaagttctgactctgttctctg

SEQ ID NO: 1300440 - DNA, 25 bp, Homo sapien
ctctgatcccagatgaagttctgac

SEQ ID NO: 1300441 - DNA, 25 bp, Homo sapien
cgtatttccaatgcattcgaagatt

SEQ ID NO: 1300442 - DNA, 25 bp, Homo sapien
tactttcgtatttccaatgcattcg

SEQ ID NO: 1300443 - DNA, 25 bp, Homo sapien
cactctactttcgtatttccaatgc

SEQ ID NO: 1300444 - DNA, 25 bp, Homo sapien
gagacactctactttcgtatttcca

SEQ ID NO: 1300445 - DNA, 25 bp, Homo sapien
cacttgaacctggttggtggagact

SEQ ID NO: 1300446 - DNA, 25 bp, Homo sapien
gaacctggttggtggagactgtagt

SEQ ID NO: 1300447 - DNA, 25 bp, Homo sapien
tcacttgaacctggttggtggagac

SEQ ID NO: 1300448 - DNA, 25 bp, Homo sapien
cttgaacctggttggtggagactgt

SEQ ID NO: 1300449 - DNA, 25 bp, Homo sapien
gtcactatactttgcaagacgggga

SEQ ID NO: 1300450 - DNA, 25 bp, Homo sapien
atttaatggaaacaggggtcactat

SEQ ID NO: 1300451 - DNA, 25 bp, Homo sapien
tggaaacaggggtcactatactttg

SEQ ID NO: 1300452 - DNA, 25 bp, Homo sapien
cactatactttgcaagacggggaaa

SEQ ID NO: 1300453 - DNA, 25 bp, Homo sapien
tttttcagtcgagcaggaaggcctg

SEQ ID NO: 1300454 - DNA, 25 bp, Homo sapien
taaatggcatacatcgaagggcatc

SEQ ID NO: 1300455 - DNA, 25 bp, Homo sapien
caatcacttgtgctacggctaccaa

SEQ ID NO: 1300456 - DNA, 25 bp, Homo sapien
caaaagacttctcgggtagttccag

SEQ ID NO: 1300457 - DNA, 25 bp, Homo sapien
cagacctggatctagacttggaccg

SEQ ID NO: 1300458 - DNA, 25 bp, Homo sapien
cctagatctagatcgggagggcgat

SEQ ID NO: 1300459 - DNA, 25 bp, Homo sapien
tggaattggatctcgacctggaccg

SEQ ID NO: 1300460 - DNA, 25 bp, Homo sapien
ttcagacttggcatgttcccgctcc

SEQ ID NO: 1300461 - DNA, 25 bp, Homo sapien
tcttgccagcgctatggctgcggct

SEQ ID NO: 1300462 - DNA, 25 bp, Homo sapien
gctcttgggtttcccgacattgtca

SEQ ID NO: 1300463 - DNA, 25 bp, Homo sapien
tgggtttcccgacattgtcattgtt

SEQ ID NO: 1300464 - DNA, 25 bp, Homo sapien
tcagcttggtctttgctcttgctgc

SEQ ID NO: 1300465 - DNA, 25 bp, Homo sapien
gctccggctcttgctccgggagcgg

SEQ ID NO: 1300466 - DNA, 25 bp, Homo sapien
tccggctccggctcttgctccggga

SEQ ID NO: 1300467 - DNA, 25 bp, Homo sapien
ccggctcttgctccgggagcgggag

SEQ ID NO: 1300468 - DNA, 25 bp, Homo sapien
tcttgctccgggagcgggagcccga

SEQ ID NO: 1300469 - DNA, 25 bp, Homo sapien
gggcatacatgtggagttacacccc

SEQ ID NO: 1300470 - DNA, 25 bp, Homo sapien
gttttctgaaccctcacaatgccaa

SEQ ID NO: 1300471 - DNA, 25 bp, Homo sapien
tgtgacttcatgctaatcaggagat

SEQ ID NO: 1300472 - DNA, 25 bp, Homo sapien
gacatgggatactgtttgtgtcaca

SEQ ID NO: 1300473 - DNA, 25 bp, Homo sapien
ggaatgtctgcttcgagagcgagac

SEQ ID NO: 1300474 - DNA, 25 bp, Homo sapien
tgccacttcggcttctgctcttacg

SEQ ID NO: 1300475 - DNA, 25 bp, Homo sapien
ctactcttagaatgactgcttttgc

SEQ ID NO: 1300476 - DNA, 25 bp, Homo sapien
tggaccgagatctactcttagaatg

SEQ ID NO: 1300477 - DNA, 25 bp, Homo sapien
acaggcgtgagcaaggcctctgatt

SEQ ID NO: 1300478 - DNA, 25 bp, Homo sapien
ctaagttattgaaccagatggaatc

SEQ ID NO: 1300479 - DNA, 25 bp, Homo sapien
gggacttctatttgtactcatgacc

SEQ ID NO: 1300480 - DNA, 25 bp, Homo sapien
gacctaagagttcaagagttttaca

SEQ ID NO: 1300481 - DNA, 25 bp, Homo sapien
ctccggcttctggagtaggaccggc

SEQ ID NO: 1300482 - DNA, 25 bp, Homo sapien
cttgaatgactccggcttctggagt

SEQ ID NO: 1300483 - DNA, 25 bp, Homo sapien
tgactccggcttctggagtaggacc

SEQ ID NO: 1300484 - DNA, 25 bp, Homo sapien
ttctggagtaggaccggcgtcgtct

SEQ ID NO: 1300485 - DNA, 25 bp, Homo sapien
tgagcatctgcataagtcacttctc

SEQ ID NO: 1300486 - DNA, 25 bp, Homo sapien
ccccttcatttttgcgtcccttgtg

SEQ ID NO: 1300487 - DNA, 25 bp, Homo sapien
gcgtcccttgtgagcatctgcataa

SEQ ID NO: 1300488 - DNA, 25 bp, Homo sapien
tgcataagtcacttctcctgcctga

SEQ ID NO: 1300489 - DNA, 25 bp, Homo sapien
atcaatcatgtactgaggttcttta

SEQ ID NO: 1300490 - DNA, 25 bp, Homo sapien
aatgccagcattccgcagaataaag

SEQ ID NO: 1300491 - DNA, 25 bp, Homo sapien
aaaaaagtgtgactacattaggata

SEQ ID NO: 1300492 - DNA, 25 bp, Homo sapien
tatgttttgctaaaatatctaatgc

SEQ ID NO: 1300493 - DNA, 25 bp, Homo sapien
tagtggcactacatgacgagttagc

SEQ ID NO: 1300494 - DNA, 25 bp, Homo sapien
gaagcagacattcaggacgaaacgg

SEQ ID NO: 1300495 - DNA, 25 bp, Homo sapien
ggaaggcagtgcgtcatacacgtaa

SEQ ID NO: 1300496 - DNA, 25 bp, Homo sapien
acataatggtgataaggctttcctc

SEQ ID NO: 1300497 - DNA, 25 bp, Homo sapien
ttgccagctgcaccgacttgacaaa

SEQ ID NO: 1300498 - DNA, 25 bp, Homo sapien
cagctgcaccgacttgacaaattct

SEQ ID NO: 1300499 - DNA, 25 bp, Homo sapien
ggtcttgccagctgcaccgacttga

SEQ ID NO: 1300500 - DNA, 25 bp, Homo sapien
tgcaccgacttgacaaattctccac

SEQ ID NO: 1300501 - DNA, 25 bp, Homo sapien
ggagggccatatttatctcggccac

SEQ ID NO: 1300502 - DNA, 25 bp, Homo sapien
gagtaggagggccatatttatctcg

SEQ ID NO: 1300503 - DNA, 25 bp, Homo sapien
ctgtgcgagtaggagggccatattt

SEQ ID NO: 1300504 - DNA, 25 bp, Homo sapien
ccatatttatctcggccacttcttc

SEQ ID NO: 1300505 - DNA, 25 bp, Homo sapien
tggaaggttcaaataaataagatta

SEQ ID NO: 1300506 - DNA, 25 bp, Homo sapien
ggttcaaataaataagattatttca

SEQ ID NO: 1300507 - DNA, 25 bp, Homo sapien
gttcaaataaataagattatttcag

SEQ ID NO: 1300508 - DNA, 25 bp, Homo sapien
tttaagattaacatgcataaattta

SEQ ID NO: 1300509 - DNA, 25 bp, Homo sapien
gttactcacagtgattaaacatttt

SEQ ID NO: 1300510 - DNA, 25 bp, Homo sapien
ttaagattaacatgcataaatttaa

SEQ ID NO: 1300511 - DNA, 25 bp, Homo sapien
tttaaagaagcaatcagctaaatat

SEQ ID NO: 1300512 - DNA, 25 bp, Homo sapien
catctgtgtctaacccttgggatcc

SEQ ID NO: 1300513 - DNA, 25 bp, Homo sapien
caatggttcaaagagccacgcatgg

SEQ ID NO: 1300514 - DNA, 25 bp, Homo sapien
gaaaggttgcggtcgtcacatggct

SEQ ID NO: 1300515 - DNA, 25 bp, Homo sapien
gccacgcatggaaaggtaacccaag

SEQ ID NO: 1300516 - DNA, 25 bp, Homo sapien
tgttaaacaattgcattacagagaa

SEQ ID NO: 1300517 - DNA, 25 bp, Homo sapien
aaacattgaggtctttgttaaatct

SEQ ID NO: 1300518 - DNA, 25 bp, Homo sapien
tctttgttaaatctatgttaaacaa

SEQ ID NO: 1300519 - DNA, 25 bp, Homo sapien
ttgttaaatctatgttaaacaattg

SEQ ID NO: 1300520 - DNA, 25 bp, Homo sapien
tgataaaagtatgccctttgaatgc

SEQ ID NO: 1300521 - DNA, 25 bp, Homo sapien
aaaagtatgccctttgaatgcttac

SEQ ID NO: 1300522 - DNA, 25 bp, Homo sapien
taaaagtatgccctttgaatgctta

SEQ ID NO: 1300523 - DNA, 25 bp, Homo sapien
tactgataaaagtatgccctttgaa

SEQ ID NO: 1300524 - DNA, 25 bp, Homo sapien
aaccgtaactgccatctcgccgtgg

SEQ ID NO: 1300525 - DNA, 25 bp, Homo sapien
tgcatcacgcagatcatcaaactcc

SEQ ID NO: 1300526 - DNA, 25 bp, Homo sapien
caattactcgctcaccacaaaggtc

SEQ ID NO: 1300527 - DNA, 25 bp, Homo sapien
gccgcgggcatgctcaacaattact

SEQ ID NO: 1300528 - DNA, 25 bp, Homo sapien
tttggcaccatgtgagagcctgacg

SEQ ID NO: 1300529 - DNA, 25 bp, Homo sapien
tggctcggcactgttcaatgactga

SEQ ID NO: 1300530 - DNA, 25 bp, Homo sapien
aagggttacaactactgggcagagg

SEQ ID NO: 1300531 - DNA, 25 bp, Homo sapien
gcaagtgatgcttctgtcagaccta

SEQ ID NO: 1300532 - DNA, 25 bp, Homo sapien
tcatagcacccatcagctaggtact

SEQ ID NO: 1300533 - DNA, 25 bp, Homo sapien
tctgccattgacatgctgagtgggt

SEQ ID NO: 1300534 - DNA, 25 bp, Homo sapien
gcagatcagtgtggttgtttctacc

SEQ ID NO: 1300535 - DNA, 25 bp, Homo sapien
cagggacaactggtaatgttacaga

SEQ ID NO: 1300536 - DNA, 25 bp, Homo sapien
tgtctgcaatctaatacccatggct

SEQ ID NO: 1300537 - DNA, 25 bp, Homo sapien
ggaaacaggctgatcaatggctaac

SEQ ID NO: 1300538 - DNA, 25 bp, Homo sapien
ggaaagcaagcctccatgcgtgtga

SEQ ID NO: 1300539 - DNA, 25 bp, Homo sapien
ggtgctcaataccagaaactgctag

SEQ ID NO: 1300540 - DNA, 25 bp, Homo sapien
tgtaagaaccgaacctctccatggc

SEQ ID NO: 1300541 - DNA, 25 bp, Homo sapien
tgtcctaaaactgtgccacatgctt

SEQ ID NO: 1300542 - DNA, 25 bp, Homo sapien
tcacaatgtggtgagccattcccac

SEQ ID NO: 1300543 - DNA, 25 bp, Homo sapien
tatgtggacatgacagtcctcagcc

SEQ ID NO: 1300544 - DNA, 25 bp, Homo sapien
cagtgatgtcctatgcttcagccaa

SEQ ID NO: 1300545 - DNA, 25 bp, Homo sapien
taactgccccgattccaaaggtctg

SEQ ID NO: 1300546 - DNA, 25 bp, Homo sapien
tcatctgttgaagttaacccacggg

SEQ ID NO: 1300547 - DNA, 25 bp, Homo sapien
tctagtgctcagaagaggccaactc

SEQ ID NO: 1300548 - DNA, 25 bp, Homo sapien
aacgttggccacagctcagtctgca

SEQ ID NO: 1300549 - DNA, 25 bp, Homo sapien
ttttcacgtcggcaaactggcagtt

SEQ ID NO: 1300550 - DNA, 25 bp, Homo sapien
gattcctggtctgcaaacgttggcc

SEQ ID NO: 1300551 - DNA, 25 bp, Homo sapien
agggctcaccattacccagtctggg

SEQ ID NO: 1300552 - DNA, 25 bp, Homo sapien
ggatcccttgaccatctaatttgct

SEQ ID NO: 1300553 - DNA, 25 bp, Homo sapien
tcttccggatcccttgaccatctaa

SEQ ID NO: 1300554 - DNA, 25 bp, Homo sapien
gaaaacctacctcatgatttctctc

SEQ ID NO: 1300555 - DNA, 25 bp, Homo sapien
tgaccatctaatttgctcccaacac

SEQ ID NO: 1300556 - DNA, 25 bp, Homo sapien
tcttcactaagaaaaacgaaggcta

SEQ ID NO: 1300557 - DNA, 25 bp, Homo sapien
tatgagctcttcactaagaaaaacg

SEQ ID NO: 1300558 - DNA, 25 bp, Homo sapien
ttgattatgagctcttcactaagaa

SEQ ID NO: 1300559 - DNA, 25 bp, Homo sapien
gtgcttaccttctcttttgattatg

SEQ ID NO: 1300560 - DNA, 25 bp, Homo sapien
tactctaacatcagataaagtcagg

SEQ ID NO: 1300561 - DNA, 25 bp, Homo sapien
gataaagtcaggctgtagtaaaggt

SEQ ID NO: 1300562 - DNA, 25 bp, Homo sapien
gacttaatgatactctaacatcaga

SEQ ID NO: 1300563 - DNA, 25 bp, Homo sapien
tataatggggtaaagtctctagaga

SEQ ID NO: 1300564 - DNA, 25 bp, Homo sapien
caaccaggttactttcactcgtctt

SEQ ID NO: 1300565 - DNA, 25 bp, Homo sapien
ttggttcccattagccagtgtcagc

SEQ ID NO: 1300566 - DNA, 25 bp, Homo sapien
ggtatgtgacaaccaggttactttc

SEQ ID NO: 1300567 - DNA, 25 bp, Homo sapien
ccttccgaaaacatgtgtgggttca

SEQ ID NO: 1300568 - DNA, 25 bp, Homo sapien
attattctgtgcaatccccattctg

SEQ ID NO: 1300569 - DNA, 25 bp, Homo sapien
tgggccagaaatcaaagaatactag

SEQ ID NO: 1300570 - DNA, 25 bp, Homo sapien
aagacttggatctagacgtggtgga

SEQ ID NO: 1300571 - DNA, 25 bp, Homo sapien
cattctggaggtcccatatcaaccc

SEQ ID NO: 1300572 - DNA, 25 bp, Homo sapien
catttattctctacaagtggaacca

SEQ ID NO: 1300573 - DNA, 25 bp, Homo sapien
tcaagcccatggtattgagtccaca

SEQ ID NO: 1300574 - DNA, 25 bp, Homo sapien
agtggtccataaaaccagagttgga

SEQ ID NO: 1300575 - DNA, 25 bp, Homo sapien
gatgaactaaccaaactcaagccca

SEQ ID NO: 1300576 - DNA, 25 bp, Homo sapien
caagaagttcgtgaagactcaacca

SEQ ID NO: 1300577 - DNA, 25 bp, Homo sapien
ctcgagagatgaaagtcacattacc

SEQ ID NO: 1300578 - DNA, 25 bp, Homo sapien
tcaactattgcctgatgacaagaag

SEQ ID NO: 1300579 - DNA, 25 bp, Homo sapien
actctgcagacagcactacctgatt

SEQ ID NO: 1300580 - DNA, 25 bp, Homo sapien
aggctgccaggtgttaaagcttcat

SEQ ID NO: 1300581 - DNA, 25 bp, Homo sapien
aagatgatgcctcttggatcatctt

SEQ ID NO: 1300582 - DNA, 25 bp, Homo sapien
gccaggtgttaaagcttcattaaag

SEQ ID NO: 1300583 - DNA, 25 bp, Homo sapien
gctgccaggtgttaaagcttcatta

SEQ ID NO: 1300584 - DNA, 25 bp, Homo sapien
ggttaaagatgccactccctatgct

SEQ ID NO: 1300585 - DNA, 25 bp, Homo sapien
tctttgttcatgaaggtcccctttc

SEQ ID NO: 1300586 - DNA, 25 bp, Homo sapien
gaggcaccatgtccctcataatcgc

SEQ ID NO: 1300587 - DNA, 25 bp, Homo sapien
ttcaagcgcttcttcagacattgcg

SEQ ID NO: 1300588 - DNA, 25 bp, Homo sapien
gcagtaacttgtcagcttgctggaa

SEQ ID NO: 1300589 - DNA, 25 bp, Homo sapien
gagactaaaggctgaacaagcccgg

SEQ ID NO: 1300590 - DNA, 25 bp, Homo sapien
taactcattttgtaaccttgggcca

SEQ ID NO: 1300591 - DNA, 25 bp, Homo sapien
gaagctttgaatgtcaatgcccaca

SEQ ID NO: 1300592 - DNA, 25 bp, Homo sapien
tgagatacttgaatatgttcactcc

SEQ ID NO: 1300593 - DNA, 25 bp, Homo sapien
tgctgttgaagtgcccatcacacgg

SEQ ID NO: 1300594 - DNA, 25 bp, Homo sapien
cacgggcatgctcatacactgcggg

SEQ ID NO: 1300595 - DNA, 25 bp, Homo sapien
cactgcgggtgttaagtgtaactgg

SEQ ID NO: 1300596 - DNA, 25 bp, Homo sapien
gcacgtaaaacctcacccatcttaa

SEQ ID NO: 1300597 - DNA, 25 bp, Homo sapien
aaaaaagcgtgacacaaaattgcac

SEQ ID NO: 1300598 - DNA, 25 bp, Homo sapien
tggttgggtaagtcataatattgcc

SEQ ID NO: 1300599 - DNA, 25 bp, Homo sapien
tctctaatgagtcaaaaaggctttt

SEQ ID NO: 1300600 - DNA, 25 bp, Homo sapien
tgcgtgcacatgcccatacctgtat

SEQ ID NO: 1300601 - DNA, 25 bp, Homo sapien
gagagacagagtgcgtgcgtgcaca

SEQ ID NO: 1300602 - DNA, 25 bp, Homo sapien
agaagagagacagagtgcgtgcgtg

SEQ ID NO: 1300603 - DNA, 25 bp, Homo sapien
gcacatgcccatacctgtatgtgaa

SEQ ID NO: 1300604 - DNA, 25 bp, Homo sapien
caatctacattagcgatgcctggtg

SEQ ID NO: 1300605 - DNA, 25 bp, Homo sapien
ccgtgaccggtctagacaagcattt

SEQ ID NO: 1300606 - DNA, 25 bp, Homo sapien
gccaggcccttgcagtgactcttga

SEQ ID NO: 1300607 - DNA, 25 bp, Homo sapien
taataaaacggtaggcaatgaactc

SEQ ID NO: 1300608 - DNA, 25 bp, Homo sapien
gtaatgattcctcaatgatgccagg

SEQ ID NO: 1300609 - DNA, 25 bp, Homo sapien
ctataggcgagtgtcaccacgcgtg

SEQ ID NO: 1300610 - DNA, 25 bp, Homo sapien
tctccagcgtttttgccatacaggc

SEQ ID NO: 1300611 - DNA, 25 bp, Homo sapien
ggatttgacttaggcctggctggct

SEQ ID NO: 1300612 - DNA, 25 bp, Homo sapien
taaccagacgcagatactagccagg

SEQ ID NO: 1300613 - DNA, 25 bp, Homo sapien
cgtggcacacggctaaaaagggcct

SEQ ID NO: 1300614 - DNA, 25 bp, Homo sapien
tgtgaccgtctgatccatgagaccg

SEQ ID NO: 1300615 - DNA, 25 bp, Homo sapien
gaaggctttcagcacggcaagacga

SEQ ID NO: 1300616 - DNA, 25 bp, Homo sapien
tcaggcggccgatgtacacccgcgg

SEQ ID NO: 1300617 - DNA, 25 bp, Homo sapien
taaagaagcgctccacatcgcgctc

SEQ ID NO: 1300618 - DNA, 25 bp, Homo sapien
ggcggccgatgtacacccgcggcat

SEQ ID NO: 1300619 - DNA, 25 bp, Homo sapien
tcccgtagcccttaaagaagcgctc

SEQ ID NO: 1300620 - DNA, 25 bp, Homo sapien
cggcaacggcagtgatggctggccc

SEQ ID NO: 1300621 - DNA, 25 bp, Homo sapien
gatggctggccccggccccagcccc

SEQ ID NO: 1300622 - DNA, 25 bp, Homo sapien
cccggcaacggcagtgatggctggc

SEQ ID NO: 1300623 - DNA, 25 bp, Homo sapien
gcaacggcagtgatggctggccccg

SEQ ID NO: 1300624 - DNA, 25 bp, Homo sapien
ggcggcgggcaaagcgagagcacgg

SEQ ID NO: 1300625 - DNA, 25 bp, Homo sapien
gggcaaagcgagagcacggcggcag

SEQ ID NO: 1300626 - DNA, 25 bp, Homo sapien
gcggcggcgggcaaagcgagagcac

SEQ ID NO: 1300627 - DNA, 25 bp, Homo sapien
ggcgggcaaagcgagagcacggcgg

SEQ ID NO: 1300628 - DNA, 25 bp, Homo sapien
cgaaccccggcgacgtacgcgagca

SEQ ID NO: 1300629 - DNA, 25 bp, Homo sapien
cccggcgacgtacgcgagcacgcag

SEQ ID NO: 1300630 - DNA, 25 bp, Homo sapien
ggcggcgggacggacgcagccgaac

SEQ ID NO: 1300631 - DNA, 25 bp, Homo sapien
cggacgcagccgaaccccggcgacg

SEQ ID NO: 1300632 - DNA, 25 bp, Homo sapien
tattgctcaattccccttaagtggc

SEQ ID NO: 1300633 - DNA, 25 bp, Homo sapien
tgccctggtgaaggacattgaaata

SEQ ID NO: 1300634 - DNA, 25 bp, Homo sapien
tcatatcctcatcaacaccgtgtta

SEQ ID NO: 1300635 - DNA, 25 bp, Homo sapien
ggtgaaaaatgttatctccaagtgg

SEQ ID NO: 1300636 - DNA, 25 bp, Homo sapien
ctggcctaaagaacctaatcttaat

SEQ ID NO: 1300637 - DNA, 25 bp, Homo sapien
tctgtacaatcacttgtcccactaa

SEQ ID NO: 1300638 - DNA, 25 bp, Homo sapien
ctgtacaatcacttgtcccactaac

SEQ ID NO: 1300639 - DNA, 25 bp, Homo sapien
tgctccactgcctaaaatcccttgg

SEQ ID NO: 1300640 - DNA, 25 bp, Homo sapien
tctcaggcctctaaactctcatgtg

SEQ ID NO: 1300641 - DNA, 25 bp, Homo sapien
gggtaagccctgacatcatggtcct

SEQ ID NO: 1300642 - DNA, 25 bp, Homo sapien
tcctgctcggttttcaagactggct

SEQ ID NO: 1300643 - DNA, 25 bp, Homo sapien
gcaaatgaatcgtgaagcaaatacc

SEQ ID NO: 1300644 - DNA, 25 bp, Homo sapien
tctctcggcctgaataaagctcact

SEQ ID NO: 1300645 - DNA, 25 bp, Homo sapien
taaatacgtcctgaatgaggctcct

SEQ ID NO: 1300646 - DNA, 25 bp, Homo sapien
tcatttgtgagagcccaccttcaaa

SEQ ID NO: 1300647 - DNA, 25 bp, Homo sapien
tgtctccagttagaagggcagttcc

SEQ ID NO: 1300648 - DNA, 25 bp, Homo sapien
cagtgttggtccttctcgacaggga

SEQ ID NO: 1300649 - DNA, 25 bp, Homo sapien
tcaaagcgtttgttctacaggaccc

SEQ ID NO: 1300650 - DNA, 25 bp, Homo sapien
gagtgaagaccccacgtccaagttc

SEQ ID NO: 1300651 - DNA, 25 bp, Homo sapien
gactttattagataccttaaggctg

SEQ ID NO: 1300652 - DNA, 25 bp, Homo sapien
ggaaaaccgtggctggcttcaccat

SEQ ID NO: 1300653 - DNA, 25 bp, Homo sapien
cctcctaataggaagaggcagtgag

SEQ ID NO: 1300654 - DNA, 25 bp, Homo sapien
attagataccttaaggctggccctg

SEQ ID NO: 1300655 - DNA, 25 bp, Homo sapien
tgtcactccagctcttttgggatga

SEQ ID NO: 1300656 - DNA, 25 bp, Homo sapien
aggcttccaaggcagactggtagtc

SEQ ID NO: 1300657 - DNA, 25 bp, Homo sapien
cagactggtagtcctgcagcgggac

SEQ ID NO: 1300658 - DNA, 25 bp, Homo sapien
cttccaaggcagactggtagtcctg

SEQ ID NO: 1300659 - DNA, 25 bp, Homo sapien
aaggcagactggtagtcctgcagcg

SEQ ID NO: 1300660 - DNA, 25 bp, Homo sapien
ctgtgagctggcctcggcggatgag

SEQ ID NO: 1300661 - DNA, 25 bp, Homo sapien
ctcggcggatgagatcgcacagtgt

SEQ ID NO: 1300662 - DNA, 25 bp, Homo sapien
agatcgcacagtgtgaggatcagct

SEQ ID NO: 1300663 - DNA, 25 bp, Homo sapien
ctggcctcggcggatgagatcgcac

SEQ ID NO: 1300664 - DNA, 25 bp, Homo sapien
taggcagaacctctatccagtagtg

SEQ ID NO: 1300665 - DNA, 25 bp, Homo sapien
tgtcctgagtttggagatcccgctc

SEQ ID NO: 1300666 - DNA, 25 bp, Homo sapien
gctcggaaccgcttcagtgcctagt

SEQ ID NO: 1300667 - DNA, 25 bp, Homo sapien
ctcagatctagtgctccaggtcgct

SEQ ID NO: 1300668 - DNA, 25 bp, Homo sapien
aagtttgagatccttaaaaatgagc

SEQ ID NO: 1300669 - DNA, 25 bp, Homo sapien
caaaagcctcgaagtttgagatcct

SEQ ID NO: 1300670 - DNA, 25 bp, Homo sapien
cgaagtttgagatccttaaaaatga

SEQ ID NO: 1300671 - DNA, 25 bp, Homo sapien
gcctcgaagtttgagatccttaaaa

SEQ ID NO: 1300672 - DNA, 25 bp, Homo sapien
tgcagacacaggaaggacatgctgg

SEQ ID NO: 1300673 - DNA, 25 bp, Homo sapien
agacacaggaaggacatgctgggct

SEQ ID NO: 1300674 - DNA, 25 bp, Homo sapien
ctgcagacacaggaaggacatgctg

SEQ ID NO: 1300675 - DNA, 25 bp, Homo sapien
cagacacaggaaggacatgctgggc

SEQ ID NO: 1300676 - DNA, 25 bp, Homo sapien
ccaggaacggggcattgcctaagct

SEQ ID NO: 1300677 - DNA, 25 bp, Homo sapien
gggcattgcctaagcttagacagct

SEQ ID NO: 1300678 - DNA, 25 bp, Homo sapien
tgcctaagcttagacagctgtcgtg

SEQ ID NO: 1300679 - DNA, 25 bp, Homo sapien
agcttagacagctgtcgtgccaggg

SEQ ID NO: 1300680 - DNA, 25 bp, Homo sapien
tggccatccccccataggttaccat

SEQ ID NO: 1300681 - DNA, 25 bp, Homo sapien
gctacgacgggctgcttggccatcc

SEQ ID NO: 1300682 - DNA, 25 bp, Homo sapien
cagaggctacgacgggctgcttggc

SEQ ID NO: 1300683 - DNA, 25 bp, Homo sapien
ataggttaccatggttcctccacgc

SEQ ID NO: 1300684 - DNA, 25 bp, Homo sapien
tggcgcttctactccaaccctggtt

SEQ ID NO: 1300685 - DNA, 25 bp, Homo sapien
cagaatctctgggaaaggttgaaaa

SEQ ID NO: 1300686 - DNA, 25 bp, Homo sapien
tggttcctttataaaccctgctctc

SEQ ID NO: 1300687 - DNA, 25 bp, Homo sapien
cctgaggccatgaaattgaggttgc

SEQ ID NO: 1300688 - DNA, 25 bp, Homo sapien
gcaatttgtatatcgcccagtgtcc

SEQ ID NO: 1300689 - DNA, 25 bp, Homo sapien
tcagggaatcctcgtaacaaccttg

SEQ ID NO: 1300690 - DNA, 25 bp, Homo sapien
gaagtccatccgtcatttgtacagc

SEQ ID NO: 1300691 - DNA, 25 bp, Homo sapien
cagtgtcctttagaccagcggtccc

SEQ ID NO: 1300692 - DNA, 25 bp, Homo sapien
gaatggaaggacatgcattaatatt

SEQ ID NO: 1300693 - DNA, 25 bp, Homo sapien
caacagggcttatcccccttggtag

SEQ ID NO: 1300694 - DNA, 25 bp, Homo sapien
cgcccggcctagaagcttatattaa

SEQ ID NO: 1300695 - DNA, 25 bp, Homo sapien
tatattaagggaaagaagaatggaa

SEQ ID NO: 1300696 - DNA, 25 bp, Homo sapien
ctgcctgtcttgttgggattacaag

SEQ ID NO: 1300697 - DNA, 25 bp, Homo sapien
gatctgcctgtcttgttgggattac

SEQ ID NO: 1300698 - DNA, 25 bp, Homo sapien
actatgcctggccaggtaacttaaa

SEQ ID NO: 1300699 - DNA, 25 bp, Homo sapien
ctatgcctggccaggtaacttaaaa

SEQ ID NO: 1300700 - DNA, 25 bp, Homo sapien
tggtcctagtttccactcaacattg

SEQ ID NO: 1300701 - DNA, 25 bp, Homo sapien
agtgcccaaatagctggatgacttt

SEQ ID NO: 1300702 - DNA, 25 bp, Homo sapien
tcctagtttccactcaacattgtgc

SEQ ID NO: 1300703 - DNA, 25 bp, Homo sapien
gctggatgactttggtcctagtttc

SEQ ID NO: 1300704 - DNA, 25 bp, Homo sapien
ttggctcgaactggcgatgggactc

SEQ ID NO: 1300705 - DNA, 25 bp, Homo sapien
ctggagagctctggcgagctggacc

SEQ ID NO: 1300706 - DNA, 25 bp, Homo sapien
ctggacttggctcgaactggcgatg

SEQ ID NO: 1300707 - DNA, 25 bp, Homo sapien
gacttggctcgaactggcgatggga

SEQ ID NO: 1300708 - DNA, 25 bp, Homo sapien
cacagttgagagcaagccgtggctg

SEQ ID NO: 1300709 - DNA, 25 bp, Homo sapien
tcccaccaacacagttgagagcaag

SEQ ID NO: 1300710 - DNA, 25 bp, Homo sapien
ccaacacagttgagagcaagccgtg

SEQ ID NO: 1300711 - DNA, 25 bp, Homo sapien
caccaacacagttgagagcaagccg

SEQ ID NO: 1300712 - DNA, 25 bp, Homo sapien
tcatttcgggccttcttagctcctc

SEQ ID NO: 1300713 - DNA, 25 bp, Homo sapien
ccccagactcttcagtctgtcactc

SEQ ID NO: 1300714 - DNA, 25 bp, Homo sapien
atttcgggccttcttagctcctctt

SEQ ID NO: 1300715 - DNA, 25 bp, Homo sapien
tgacatgctcagcccccagactctt

SEQ ID NO: 1300716 - DNA, 25 bp, Homo sapien
gggaccagccacctaatttcatgca

SEQ ID NO: 1300717 - DNA, 25 bp, Homo sapien
cagctgggagaacccgtgcttcttt

SEQ ID NO: 1300718 - DNA, 25 bp, Homo sapien
acagtctagaccaggagtggctctg

SEQ ID NO: 1300719 - DNA, 25 bp, Homo sapien
ggccctgacagctcaatagtgttag

SEQ ID NO: 1300720 - DNA, 25 bp, Homo sapien
cagggctgcggcgatctggatgact

SEQ ID NO: 1300721 - DNA, 25 bp, Homo sapien
tgtctcggaccacattgatggttct

SEQ ID NO: 1300722 - DNA, 25 bp, Homo sapien
tgcttgccccactccgctgttggat

SEQ ID NO: 1300723 - DNA, 25 bp, Homo sapien
cattgatggttcttaggcccagggc

SEQ ID NO: 1300724 - DNA, 25 bp, Homo sapien
ggctgcagttgctcgaagtccatca

SEQ ID NO: 1300725 - DNA, 25 bp, Homo sapien
aggctgtgcagggattgacacccag

SEQ ID NO: 1300726 - DNA, 25 bp, Homo sapien
gaagagggatgtcactcggaacttg

SEQ ID NO: 1300727 - DNA, 25 bp, Homo sapien
tggatcagtgcttcctcgctgaaca

SEQ ID NO: 1300728 - DNA, 25 bp, Homo sapien
aggcgaggattcctctgtaatccag

SEQ ID NO: 1300729 - DNA, 25 bp, Homo sapien
ttatagaaggctgtgtcaatcctag

SEQ ID NO: 1300730 - DNA, 25 bp, Homo sapien
cctagagtaggtctatggctgagaa

SEQ ID NO: 1300731 - DNA, 25 bp, Homo sapien
gagactgaaaaggcgaggattcctc

SEQ ID NO: 1300732 - DNA, 25 bp, Homo sapien
caggcatgagccaccatgcctggtc

SEQ ID NO: 1300733 - DNA, 25 bp, Homo sapien
gccttggcctcccatgctgggatta

SEQ ID NO: 1300734 - DNA, 25 bp, Homo sapien
tcttggactcaagcgatctgcccgc

SEQ ID NO: 1300735 - DNA, 25 bp, Homo sapien
tacaggcatgagccaccatgcctgg

SEQ ID NO: 1300736 - DNA, 25 bp, Homo sapien
cactgagttaattgcagtcctcaca

SEQ ID NO: 1300737 - DNA, 25 bp, Homo sapien
ctgtgtcctcaagcccagcatgctg

SEQ ID NO: 1300738 - DNA, 25 bp, Homo sapien
tactaaatggcagtcttcacgagaa

SEQ ID NO: 1300739 - DNA, 25 bp, Homo sapien
catgctgcagatgctcacaaaatgt

SEQ ID NO: 1300740 - DNA, 25 bp, Homo sapien
tactgttatatcacctgcaaagtgg

SEQ ID NO: 1300741 - DNA, 25 bp, Homo sapien
tagggtgatatgaacctcaggctgc

SEQ ID NO: 1300742 - DNA, 25 bp, Homo sapien
caaggccccacctgtatcacagagg

SEQ ID NO: 1300743 - DNA, 25 bp, Homo sapien
ctcaatcagagcaaccggagtggcc

SEQ ID NO: 1300744 - DNA, 25 bp, Homo sapien
tgctgcccaccgctaccacctgtgc

SEQ ID NO: 1300745 - DNA, 25 bp, Homo sapien
tcctggcttcagcccggtcacattg

SEQ ID NO: 1300746 - DNA, 25 bp, Homo sapien
ggcttcagcccggtcacattgctgc

SEQ ID NO: 1300747 - DNA, 25 bp, Homo sapien
caccttcgttccctccaacagcagg

SEQ ID NO: 1300748 - DNA, 25 bp, Homo sapien
tgatcctctcacagcagctagctcc

SEQ ID NO: 1300749 - DNA, 25 bp, Homo sapien
cagcatcttcacacggacatctgat

SEQ ID NO: 1300750 - DNA, 25 bp, Homo sapien
tcagatggattgataggggccgcca

SEQ ID NO: 1300751 - DNA, 25 bp, Homo sapien
gatcatatttatgtcagatggattg

SEQ ID NO: 1300752 - DNA, 25 bp, Homo sapien
tgtttcgctcaaatcatctcctcaa

SEQ ID NO: 1300753 - DNA, 25 bp, Homo sapien
atccaggctagaatgggtgtttcgc

SEQ ID NO: 1300754 - DNA, 25 bp, Homo sapien
taagcacaaagccaaacggagatgt

SEQ ID NO: 1300755 - DNA, 25 bp, Homo sapien
gccatgtgtgcccaggaattacggt

SEQ ID NO: 1300756 - DNA, 25 bp, Homo sapien
cagttgtaggaatatccaaggaaac

SEQ ID NO: 1300757 - DNA, 25 bp, Homo sapien
tatcagttgtaggaatatccaagga

SEQ ID NO: 1300758 - DNA, 25 bp, Homo sapien
gttatcagttgtaggaatatccaag

SEQ ID NO: 1300759 - DNA, 25 bp, Homo sapien
gtaggaatatccaaggaaacctctg

SEQ ID NO: 1300760 - DNA, 25 bp, Homo sapien
tcatcacacctgtgaatgaccactg

SEQ ID NO: 1300761 - DNA, 25 bp, Homo sapien
agttcaaggctattgtgtaccatca

SEQ ID NO: 1300762 - DNA, 25 bp, Homo sapien
tgtgtaccatcatcacacctgtgaa

SEQ ID NO: 1300763 - DNA, 25 bp, Homo sapien
tgaggaaggagagttgcttgtgctc

SEQ ID NO: 1300764 - DNA, 25 bp, Homo sapien
ttaagctagactccaaaatgcaggc

SEQ ID NO: 1300765 - DNA, 25 bp, Homo sapien
ttcagtcctcaaaatgcctatgtgg

SEQ ID NO: 1300766 - DNA, 25 bp, Homo sapien
tatacatgaggactgactgccgttc

SEQ ID NO: 1300767 - DNA, 25 bp, Homo sapien
gagaagtctttgatggctcccaggc

SEQ ID NO: 1300768 - DNA, 25 bp, Homo sapien
ggaaatgctgcctactaagcccctt

SEQ ID NO: 1300769 - DNA, 25 bp, Homo sapien
ccccttttctaagattctgactaca

SEQ ID NO: 1300770 - DNA, 25 bp, Homo sapien
ctacacgttagtcataaaggctctg

SEQ ID NO: 1300771 - DNA, 25 bp, Homo sapien
gctgttaggtatttcctgcgatcca

SEQ ID NO: 1300772 - DNA, 25 bp, Homo sapien
caactcgaggggatgccactgtcct

SEQ ID NO: 1300773 - DNA, 25 bp, Homo sapien
cacgtcctccgtgaatgtaatggcg

SEQ ID NO: 1300774 - DNA, 25 bp, Homo sapien
gtaatggcgccatgcaactcgaggg

SEQ ID NO: 1300775 - DNA, 25 bp, Homo sapien
ctcaatcaacagatcccagcctgga

SEQ ID NO: 1300776 - DNA, 25 bp, Homo sapien
ttatacttgctgtgtaaggtgggca

SEQ ID NO: 1300777 - DNA, 25 bp, Homo sapien
gccatatgaagtacaagggagacaa

SEQ ID NO: 1300778 - DNA, 25 bp, Homo sapien
tgggcattagctagctctgctgaga

SEQ ID NO: 1300779 - DNA, 25 bp, Homo sapien
ttcctgcgttccacatttaattagc

SEQ ID NO: 1300780 - DNA, 25 bp, Homo sapien
atctgctgacaccagggaaactcca

SEQ ID NO: 1300781 - DNA, 25 bp, Homo sapien
catgatatgctacatctgctgacac

SEQ ID NO: 1300782 - DNA, 25 bp, Homo sapien
acatctgctgacaccagggaaactc

SEQ ID NO: 1300783 - DNA, 25 bp, Homo sapien
atatgctacatctgctgacaccagg

SEQ ID NO: 1300784 - DNA, 25 bp, Homo sapien
gttcatcagagctgtaccagttcct

SEQ ID NO: 1300785 - DNA, 25 bp, Homo sapien
gagatgtcttccctgacacaatgct

SEQ ID NO: 1300786 - DNA, 25 bp, Homo sapien
caacgcagtccttagtgagatgtct

SEQ ID NO: 1300787 - DNA, 25 bp, Homo sapien
caaactacaagtccgtgggagagac

SEQ ID NO: 1300788 - DNA, 25 bp, Homo sapien
aagctaggacaaggatttgacccca

SEQ ID NO: 1300789 - DNA, 25 bp, Homo sapien
ggtgattaccactatgaactttgtc

SEQ ID NO: 1300790 - DNA, 25 bp, Homo sapien
taaaaagaaggtactgcacaagagt

SEQ ID NO: 1300791 - DNA, 25 bp, Homo sapien
ttggtggagagcactacatagatct

SEQ ID NO: 1300792 - DNA, 25 bp, Homo sapien
gtgaccttggacgagtgattttacc

SEQ ID NO: 1300793 - DNA, 25 bp, Homo sapien
ccttggacgagtgattttacctctt

SEQ ID NO: 1300794 - DNA, 25 bp, Homo sapien
gaccttggacgagtgattttacctc

SEQ ID NO: 1300795 - DNA, 25 bp, Homo sapien
tggacgagtgattttacctcttctg

SEQ ID NO: 1300796 - DNA, 25 bp, Homo sapien
cggcaggtccgtgacagccagaagc

SEQ ID NO: 1300797 - DNA, 25 bp, Homo sapien
gcaggctcggcggatgcggagtagg

SEQ ID NO: 1300798 - DNA, 25 bp, Homo sapien
gtggtgcccatagacaagcgcccgg

SEQ ID NO: 1300799 - DNA, 25 bp, Homo sapien
accttggctggatccccgtggtgcc

SEQ ID NO: 1300800 - DNA, 25 bp, Homo sapien
gctcgctccaaccaacacagagcct

SEQ ID NO: 1300801 - DNA, 25 bp, Homo sapien
ctcgctccaaccaacacagagcctg

SEQ ID NO: 1300802 - DNA, 25 bp, Homo sapien
caatagccctcacttttagtctagg

SEQ ID NO: 1300803 - DNA, 25 bp, Homo sapien
ccagtgtgtcttgtgcctttattca

SEQ ID NO: 1300804 - DNA, 25 bp, Homo sapien
atctgatacccgtcttccccagtgt

SEQ ID NO: 1300805 - DNA, 25 bp, Homo sapien
tgttggaccgtgcatagcctgtgat

SEQ ID NO: 1300806 - DNA, 25 bp, Homo sapien
tcccagactagtggaaaaaggagac

SEQ ID NO: 1300807 - DNA, 25 bp, Homo sapien
accactggcggatagaagatagctg

SEQ ID NO: 1300808 - DNA, 25 bp, Homo sapien
gaaaaccgcagcacactgtcagatg

SEQ ID NO: 1300809 - DNA, 25 bp, Homo sapien
gatgctgaggatatttgacagggca

SEQ ID NO: 1300810 - DNA, 25 bp, Homo sapien
gaaataggagcttttatcactccca

SEQ ID NO: 1300811 - DNA, 25 bp, Homo sapien
ctgtcttctactctgcaagccttct

SEQ ID NO: 1300812 - DNA, 25 bp, Homo sapien
gctcagttcttgacagagtcctcac

SEQ ID NO: 1300813 - DNA, 25 bp, Homo sapien
gcaaaatgcactggaactgggatac

SEQ ID NO: 1300814 - DNA, 25 bp, Homo sapien
cattggcctaagcatcgggtgtctg

SEQ ID NO: 1300815 - DNA, 25 bp, Homo sapien
tggtgtccagttcccagatcagatg

SEQ ID NO: 1300816 - DNA, 25 bp, Homo sapien
gactttagtctgatgggcctgcacc

SEQ ID NO: 1300817 - DNA, 25 bp, Homo sapien
tctaagtaggacagcatcaggttca

SEQ ID NO: 1300818 - DNA, 25 bp, Homo sapien
gcctgcagcaaaagccagtgactgg

SEQ ID NO: 1300819 - DNA, 25 bp, Homo sapien
tcagggctgggcatctagtaggcct

SEQ ID NO: 1300820 - DNA, 25 bp, Homo sapien
cagtgactggacaattgaatgtctt

SEQ ID NO: 1300821 - DNA, 25 bp, Homo sapien
tgggcatctagtaggcctgcagcaa

SEQ ID NO: 1300822 - DNA, 25 bp, Homo sapien
gattttggtgcaatgccaactggag

SEQ ID NO: 1300823 - DNA, 25 bp, Homo sapien
taatgatgcccgcaaggactgtggt

SEQ ID NO: 1300824 - DNA, 25 bp, Homo sapien
tgccaactggagcaagtgtcttggg

SEQ ID NO: 1300825 - DNA, 25 bp, Homo sapien
gactcctgcacctgaccatgattac

SEQ ID NO: 1300826 - DNA, 25 bp, Homo sapien
gactggatccacagaagtgcttgca

SEQ ID NO: 1300827 - DNA, 25 bp, Homo sapien
ccctgatttgtgatacgaagtgtac

SEQ ID NO: 1300828 - DNA, 25 bp, Homo sapien
aaatggcaccgcatcagttaggacc

SEQ ID NO: 1300829 - DNA, 25 bp, Homo sapien
caaacgggcttaggcaaatttggca

SEQ ID NO: 1300830 - DNA, 25 bp, Homo sapien
agcactccttgccagtcggggtttg

SEQ ID NO: 1300831 - DNA, 25 bp, Homo sapien
tcggggtttggagcgccagggcctc

SEQ ID NO: 1300832 - DNA, 25 bp, Homo sapien
gcctccgggaggaggctggtttgca

SEQ ID NO: 1300833 - DNA, 25 bp, Homo sapien
cctccgggaggaggctggtttgcac

SEQ ID NO: 1300834 - DNA, 25 bp, Homo sapien
gacaggacatagaaggagaacatct

SEQ ID NO: 1300835 - DNA, 25 bp, Homo sapien
tgtggcccacttctgggatgatgtg

SEQ ID NO: 1300836 - DNA, 25 bp, Homo sapien
tggaggcacctcatatctccatttg

SEQ ID NO: 1300837 - DNA, 25 bp, Homo sapien
tgtccttgttcccctggcctttgat

SEQ ID NO: 1300838 - DNA, 25 bp, Homo sapien
agaaagccccggtgctcccttcact

SEQ ID NO: 1300839 - DNA, 25 bp, Homo sapien
taagagcattcaggctccgtgactt

SEQ ID NO: 1300840 - DNA, 25 bp, Homo sapien
cattcaggctccgtgactttcttct

SEQ ID NO: 1300841 - DNA, 25 bp, Homo sapien
tcccttcactaagagcattcaggct

SEQ ID NO: 1300842 - DNA, 25 bp, Homo sapien
cacataagccgggaggagtcttggt

SEQ ID NO: 1300843 - DNA, 25 bp, Homo sapien
gcaaaggccgagtctgagtggtcac

SEQ ID NO: 1300844 - DNA, 25 bp, Homo sapien
attctgggctctccgcctgcaaagg

SEQ ID NO: 1300845 - DNA, 25 bp, Homo sapien
tatacccctctttcacataagccgg

SEQ ID NO: 1300846 - DNA, 25 bp, Homo sapien
caggtctctttaccgactgctgcct

SEQ ID NO: 1300847 - DNA, 25 bp, Homo sapien
gggagattctgtcctctagactctc

SEQ ID NO: 1300848 - DNA, 25 bp, Homo sapien
gctattgctacgttaggggagattc

SEQ ID NO: 1300849 - DNA, 25 bp, Homo sapien
ggcctgtggagctgttggctattgc

SEQ ID NO: 1300850 - DNA, 25 bp, Homo sapien
ggaggactggctgtgccttagggct

SEQ ID NO: 1300851 - DNA, 25 bp, Homo sapien
aggactggctgtgccttagggctgt

SEQ ID NO: 1300852 - DNA, 25 bp, Homo sapien
caggaggactggctgtgccttaggg

SEQ ID NO: 1300853 - DNA, 25 bp, Homo sapien
actggctgtgccttagggctgtaga

SEQ ID NO: 1300854 - DNA, 25 bp, Homo sapien
ctgtggagggaactgtgggtagcct

SEQ ID NO: 1300855 - DNA, 25 bp, Homo sapien
tttgagacccttcggagaagggcca

SEQ ID NO: 1300856 - DNA, 25 bp, Homo sapien
ttgagacccttcggagaagggccac

SEQ ID NO: 1300857 - DNA, 25 bp, Homo sapien
caaggccaccaaggcccaggacttg

SEQ ID NO: 1300858 - DNA, 25 bp, Homo sapien
atcaccaaggccaccaaggcccagg

SEQ ID NO: 1300859 - DNA, 25 bp, Homo sapien
ctttggtcagcatcaccaaggccac

SEQ ID NO: 1300860 - DNA, 25 bp, Homo sapien
ggtcagcatcaccaaggccaccaag

SEQ ID NO: 1300861 - DNA, 25 bp, Homo sapien
ctccatgcactgggctcatggagaa

SEQ ID NO: 1300862 - DNA, 25 bp, Homo sapien
catgcactgggctcatggagaaaag

SEQ ID NO: 1300863 - DNA, 25 bp, Homo sapien
tccatgcactgggctcatggagaaa

SEQ ID NO: 1300864 - DNA, 25 bp, Homo sapien
ccatgcactgggctcatggagaaaa

SEQ ID NO: 1300865 - DNA, 25 bp, Homo sapien
agatgataggatcattagggatcat

SEQ ID NO: 1300866 - DNA, 25 bp, Homo sapien
cagatgataggatcattagggatca

SEQ ID NO: 1300867 - DNA, 25 bp, Homo sapien
acagatgataggatcattagggatc

SEQ ID NO: 1300868 - DNA, 25 bp, Homo sapien
agacagatgataggatcattaggga

SEQ ID NO: 1300869 - DNA, 25 bp, Homo sapien
tcactcaaacctaacacccgcttct

SEQ ID NO: 1300870 - DNA, 25 bp, Homo sapien
gagatgccggctctcaccccaaact

SEQ ID NO: 1300871 - DNA, 25 bp, Homo sapien
ttcttcccactaatgaggttttgct

SEQ ID NO: 1300872 - DNA, 25 bp, Homo sapien
ggttttgcttggagatgccggctct

SEQ ID NO: 1300873 - DNA, 25 bp, Homo sapien
cactgaatcacaaacaggaggactt

SEQ ID NO: 1300874 - DNA, 25 bp, Homo sapien
tctcccactgaatcacaaacaggag

SEQ ID NO: 1300875 - DNA, 25 bp, Homo sapien
tgtctcccactgaatcacaaacagg

SEQ ID NO: 1300876 - DNA, 25 bp, Homo sapien
caggaggacttggggcccaaaggtg

SEQ ID NO: 1300877 - DNA, 25 bp, Homo sapien
cctttcttgtcccttggaatgctcc

SEQ ID NO: 1300878 - DNA, 25 bp, Homo sapien
tgtcaccagagtgggcgtcacatgg

SEQ ID NO: 1300879 - DNA, 25 bp, Homo sapien
gcatctgcgaaggtgtcaataatca

SEQ ID NO: 1300880 - DNA, 25 bp, Homo sapien
cataattaatgagaccttccccaga

SEQ ID NO: 1300881 - DNA, 25 bp, Homo sapien
cccagactcctgacgcgatgatatg

SEQ ID NO: 1300882 - DNA, 25 bp, Homo sapien
ggtgaagcttctgagacttggaagc

SEQ ID NO: 1300883 - DNA, 25 bp, Homo sapien
gcacactccacggtgaagcttctga

SEQ ID NO: 1300884 - DNA, 25 bp, Homo sapien
tccacggtgaagcttctgagacttg

SEQ ID NO: 1300885 - DNA, 25 bp, Homo sapien
cactccacggtgaagcttctgagac

SEQ ID NO: 1300886 - DNA, 25 bp, Homo sapien
cttctttctcacatgtcttaaaact

SEQ ID NO: 1300887 - DNA, 25 bp, Homo sapien
acggcccaagagcccttggcttggc

SEQ ID NO: 1300888 - DNA, 25 bp, Homo sapien
catacggcccaagagcccttggctt

SEQ ID NO: 1300889 - DNA, 25 bp, Homo sapien
tcatacggcccaagagcccttggct

SEQ ID NO: 1300890 - DNA, 25 bp, Homo sapien
tacggcccaagagcccttggcttgg

SEQ ID NO: 1300891 - DNA, 25 bp, Homo sapien
ctctgcccataaactgagctttcag

SEQ ID NO: 1300892 - DNA, 25 bp, Homo sapien
aactgagctttcaggggcagggaca

SEQ ID NO: 1300893 - DNA, 25 bp, Homo sapien
ctgcccataaactgagctttcaggg

SEQ ID NO: 1300894 - DNA, 25 bp, Homo sapien
agctttcaggggcagggacaccagg

SEQ ID NO: 1300895 - DNA, 25 bp, Homo sapien
gcctggcttggggagctgctcttct

SEQ ID NO: 1300896 - DNA, 25 bp, Homo sapien
tggcttggggagctgctcttctccc

SEQ ID NO: 1300897 - DNA, 25 bp, Homo sapien
ctccatcccagaagccctccagggc

SEQ ID NO: 1300898 - DNA, 25 bp, Homo sapien
cttggggagctgctcttctccctgc

SEQ ID NO: 1300899 - DNA, 25 bp, Homo sapien
gtgctgagactcatctgcaggaaaa

SEQ ID NO: 1300900 - DNA, 25 bp, Homo sapien
tgtgctgagactcatctgcaggaaa

SEQ ID NO: 1300901 - DNA, 25 bp, Homo sapien
caccaccagctcaaagagatgggat

SEQ ID NO: 1300902 - DNA, 25 bp, Homo sapien
gagctggcgagggaccagcccagga

SEQ ID NO: 1300903 - DNA, 25 bp, Homo sapien
gaggacagagctggcgagggaccag

SEQ ID NO: 1300904 - DNA, 25 bp, Homo sapien
tgaggacagagctggcgagggacca

SEQ ID NO: 1300905 - DNA, 25 bp, Homo sapien
gacagagctggcgagggaccagccc

SEQ ID NO: 1300906 - DNA, 25 bp, Homo sapien
cagtctgagaagagcctggaaacag

SEQ ID NO: 1300907 - DNA, 25 bp, Homo sapien
ccaggtcagtgatctgcagagccat

SEQ ID NO: 1300908 - DNA, 25 bp, Homo sapien
gcccaggtcagtgatctgcagagcc

SEQ ID NO: 1300909 - DNA, 25 bp, Homo sapien
gggcccaggtcagtgatctgcagag

SEQ ID NO: 1300910 - DNA, 25 bp, Homo sapien
ccaagttcagtgcccacgagaaatg

SEQ ID NO: 1300911 - DNA, 25 bp, Homo sapien
gacagcagggcaatgctcctccgtg

SEQ ID NO: 1300912 - DNA, 25 bp, Homo sapien
atgctcctccgtgtccagtgccagg

SEQ ID NO: 1300913 - DNA, 25 bp, Homo sapien
tcttgtcacggttccaggacagcag

SEQ ID NO: 1300914 - DNA, 25 bp, Homo sapien
cttgtttctttgtcaagtatccagg

SEQ ID NO: 1300915 - DNA, 25 bp, Homo sapien
ttgtttctttgtcaagtatccaggc

SEQ ID NO: 1300916 - DNA, 25 bp, Homo sapien
tgtttctttgtcaagtatccaggct

SEQ ID NO: 1300917 - DNA, 25 bp, Homo sapien
cctcggccgtcttcatctggttgat

SEQ ID NO: 1300918 - DNA, 25 bp, Homo sapien
taaccctcggccgtcttcatctggt

SEQ ID NO: 1300919 - DNA, 25 bp, Homo sapien
agccgtaaccctcggccgtcttcat

SEQ ID NO: 1300920 - DNA, 25 bp, Homo sapien
tactcctgcttgaagccgtaaccct

SEQ ID NO: 1300921 - DNA, 25 bp, Homo sapien
ccacagggatgcttcagggagtccc

SEQ ID NO: 1300922 - DNA, 25 bp, Homo sapien
gccacagggatgcttcagggagtcc

SEQ ID NO: 1300923 - DNA, 25 bp, Homo sapien
cacagggatgcttcagggagtccct

SEQ ID NO: 1300924 - DNA, 25 bp, Homo sapien
tggtctcccgcagtcagagaaagac

SEQ ID NO: 1300925 - DNA, 25 bp, Homo sapien
ctggtctcccgcagtcagagaaaga

SEQ ID NO: 1300926 - DNA, 25 bp, Homo sapien
cccagcttggggagcccgagagact

SEQ ID NO: 1300927 - DNA, 25 bp, Homo sapien
ttggggagcccgagagactgaggcg

SEQ ID NO: 1300928 - DNA, 25 bp, Homo sapien
catgccccagcttggggagcccgag

SEQ ID NO: 1300929 - DNA, 25 bp, Homo sapien
cttggggagcccgagagactgaggc

SEQ ID NO: 1300930 - DNA, 25 bp, Homo sapien
caggagccccagaacaataaggaag

SEQ ID NO: 1300931 - DNA, 25 bp, Homo sapien
gagtgccccagaggggcttgatcct

SEQ ID NO: 1300932 - DNA, 25 bp, Homo sapien
gccccagaacaataaggaagggaca

SEQ ID NO: 1300933 - DNA, 25 bp, Homo sapien
tccttttggcttgggtcaggagccc

SEQ ID NO: 1300934 - DNA, 25 bp, Homo sapien
actgggagctatagccgtgagtgtc

SEQ ID NO: 1300935 - DNA, 25 bp, Homo sapien
agctatagccgtgagtgtctatgaa

SEQ ID NO: 1300936 - DNA, 25 bp, Homo sapien
tggccttggtctcgttcatcggctt

SEQ ID NO: 1300937 - DNA, 25 bp, Homo sapien
ggccttggtctcgttcatcggcttc

SEQ ID NO: 1300938 - DNA, 25 bp, Homo sapien
ggtcgggggttgatgggagacatag

SEQ ID NO: 1300939 - DNA, 25 bp, Homo sapien
gggtcgggggttgatgggagacata

SEQ ID NO: 1300940 - DNA, 25 bp, Homo sapien
tcgggggttgatgggagacataggt

SEQ ID NO: 1300941 - DNA, 25 bp, Homo sapien
cgggggttgatgggagacataggtg

SEQ ID NO: 1300942 - DNA, 25 bp, Homo sapien
caggctctgggcatcgccctcactg

SEQ ID NO: 1300943 - DNA, 25 bp, Homo sapien
gggcatcgccctcactgtggcccag

SEQ ID NO: 1300944 - DNA, 25 bp, Homo sapien
tggcccagggcggagccaaagcacc

SEQ ID NO: 1300945 - DNA, 25 bp, Homo sapien
ggctctgggcatcgccctcactgtg

SEQ ID NO: 1300946 - DNA, 25 bp, Homo sapien
gcctctgtggctgtgaccttgacca

SEQ ID NO: 1300947 - DNA, 25 bp, Homo sapien
cctctgtggctgtgaccttgaccac

SEQ ID NO: 1300948 - DNA, 25 bp, Homo sapien
gggcagatgaggagcagcctctgtg

SEQ ID NO: 1300949 - DNA, 25 bp, Homo sapien
cagatgaggagcagcctctgtggct

SEQ ID NO: 1300950 - DNA, 25 bp, Homo sapien
agcacagtcgtgtccgaggtccgtc

SEQ ID NO: 1300951 - DNA, 25 bp, Homo sapien
tcgtgtccgaggtccgtccaccaag

SEQ ID NO: 1300952 - DNA, 25 bp, Homo sapien
gagaacagcacagtcgtgtccgagg

SEQ ID NO: 1300953 - DNA, 25 bp, Homo sapien
acagtcgtgtccgaggtccgtccac

SEQ ID NO: 1300954 - DNA, 25 bp, Homo sapien
aaatggtccggatttagcaggtgag

SEQ ID NO: 1300955 - DNA, 25 bp, Homo sapien
tatacagcccctggatgcatggcag

SEQ ID NO: 1300956 - DNA, 25 bp, Homo sapien
tcaggacaggatcccgtatacagcc

SEQ ID NO: 1300957 - DNA, 25 bp, Homo sapien
tgcgtgctgagacaggctccaataa

SEQ ID NO: 1300958 - DNA, 25 bp, Homo sapien
ctgttgccaagctcccagcaaggca

SEQ ID NO: 1300959 - DNA, 25 bp, Homo sapien
tgccatcctgtagatcacgttctct

SEQ ID NO: 1300960 - DNA, 25 bp, Homo sapien
gttcccgctgctcgtttgtcgcaat

SEQ ID NO: 1300961 - DNA, 25 bp, Homo sapien
ggtcttgcaacccaagttcccgctg

SEQ ID NO: 1300962 - DNA, 25 bp, Homo sapien
ccattgttgccagggctcgtttgga

SEQ ID NO: 1300963 - DNA, 25 bp, Homo sapien
tttgtttgcggtaggacccttggca

SEQ ID NO: 1300964 - DNA, 25 bp, Homo sapien
gggtggtgcagagcctggaatcctg

SEQ ID NO: 1300965 - DNA, 25 bp, Homo sapien
cttattgtcagattttcacttgcag

SEQ ID NO: 1300966 - DNA, 25 bp, Homo sapien
ccagctgccgtggagtttcctttgc

SEQ ID NO: 1300967 - DNA, 25 bp, Homo sapien
ggtcccttggggtcatcacagcctt

SEQ ID NO: 1300968 - DNA, 25 bp, Homo sapien
cttggggtcatcacagccttggatc

SEQ ID NO: 1300969 - DNA, 25 bp, Homo sapien
ggctttcccatacaaggcccatgct

SEQ ID NO: 1300970 - DNA, 25 bp, Homo sapien
tccgaagttggtttttatgcctctg

SEQ ID NO: 1300971 - DNA, 25 bp, Homo sapien
agttggtttttatgcctctgacacc

SEQ ID NO: 1300972 - DNA, 25 bp, Homo sapien
cagaatccgaagttggtttttatgc

SEQ ID NO: 1300973 - DNA, 25 bp, Homo sapien
gcagaatccgaagttggtttttatg

SEQ ID NO: 1300974 - DNA, 25 bp, Homo sapien
gactctgatagctccagagttggag

SEQ ID NO: 1300975 - DNA, 25 bp, Homo sapien
gatcaagtgagctgaactcttcatg

SEQ ID NO: 1300976 - DNA, 25 bp, Homo sapien
gccgttgtgctcatcacagactctg

SEQ ID NO: 1300977 - DNA, 25 bp, Homo sapien
tgatagggaccaaaatgggccaggt

SEQ ID NO: 1300978 - DNA, 25 bp, Homo sapien
tctctgactgccatccttcttctta

SEQ ID NO: 1300979 - DNA, 25 bp, Homo sapien
tgactgccatccttcttcttaaagt

SEQ ID NO: 1300980 - DNA, 25 bp, Homo sapien
tctgactgccatccttcttcttaaa

SEQ ID NO: 1300981 - DNA, 25 bp, Homo sapien
ctgactgccatccttcttcttaaag

SEQ ID NO: 1300982 - DNA, 25 bp, Homo sapien
gctccaggcctacttgccactcaca

SEQ ID NO: 1300983 - DNA, 25 bp, Homo sapien
ttcagcttgacagcccaaccttgct

SEQ ID NO: 1300984 - DNA, 25 bp, Homo sapien
tgccttcggcactttcattccagtt

SEQ ID NO: 1300985 - DNA, 25 bp, Homo sapien
ttgccactcacacctcaccaggtgc

SEQ ID NO: 1300986 - DNA, 25 bp, Homo sapien
gcccacccatcacagaaggctgtgg

SEQ ID NO: 1300987 - DNA, 25 bp, Homo sapien
ctatagacataacaccagggaggga

SEQ ID NO: 1300988 - DNA, 25 bp, Homo sapien
ccctgctgtctgacactggggatca

SEQ ID NO: 1300989 - DNA, 25 bp, Homo sapien
cctgctgtctgacactggggatcag

SEQ ID NO: 1300990 - DNA, 25 bp, Homo sapien
gccctgggctctcgtgcaaggccag

SEQ ID NO: 1300991 - DNA, 25 bp, Homo sapien
tgccctgggctctcgtgcaaggcca

SEQ ID NO: 1300992 - DNA, 25 bp, Homo sapien
attgagcagcaggggctgagagagg

SEQ ID NO: 1300993 - DNA, 25 bp, Homo sapien
gagcagcaggggctgagagaggtca

SEQ ID NO: 1300994 - DNA, 25 bp, Homo sapien
tgagcagcaggggctgagagaggtc

SEQ ID NO: 1300995 - DNA, 25 bp, Homo sapien
agcagcaggggctgagagaggtcat

SEQ ID NO: 1300996 - DNA, 25 bp, Homo sapien
tgggtcgacattgagatggcccaga

SEQ ID NO: 1300997 - DNA, 25 bp, Homo sapien
tggcccagaggtgacactcagagat

SEQ ID NO: 1300998 - DNA, 25 bp, Homo sapien
gagtgggtcgacattgagatggccc

SEQ ID NO: 1300999 - DNA, 25 bp, Homo sapien
tgtcccactactgaccatctgagga

SEQ ID NO: 1301000 - DNA, 25 bp, Homo sapien
ggtgacagggctgctcggttcatta

SEQ ID NO: 1301001 - DNA, 25 bp, Homo sapien
gagactagggctaatgtgtcctcat

SEQ ID NO: 1301002 - DNA, 25 bp, Homo sapien
ccattactgggtagttttggcagcc

SEQ ID NO: 1301003 - DNA, 25 bp, Homo sapien
tcatccttggaggtgccattactgg

SEQ ID NO: 1301004 - DNA, 25 bp, Homo sapien
cgaaccagcagttcagaatgaagag

SEQ ID NO: 1301005 - DNA, 25 bp, Homo sapien
tttggcaaggctaagcataagcaaa

SEQ ID NO: 1301006 - DNA, 25 bp, Homo sapien
gctaagcataagcaaatcgaaccag

SEQ ID NO: 1301007 - DNA, 25 bp, Homo sapien
taagcaaatcgaaccagcagttcag

SEQ ID NO: 1301008 - DNA, 25 bp, Homo sapien
gcaggtgcctctggcgccagtatcc

SEQ ID NO: 1301009 - DNA, 25 bp, Homo sapien
ccagtatcctcgctcaggaccagaa

SEQ ID NO: 1301010 - DNA, 25 bp, Homo sapien
acttctctggcggtggttatctgga

SEQ ID NO: 1301011 - DNA, 25 bp, Homo sapien
tcaggaccagaagtagggtaattac

SEQ ID NO: 1301012 - DNA, 25 bp, Homo sapien
ggatggagaaattgagaacagtgtg

SEQ ID NO: 1301013 - DNA, 25 bp, Homo sapien
agccccctcaagctgctggtgcggg

SEQ ID NO: 1301014 - DNA, 25 bp, Homo sapien
tagagccccctcaagctgctggtgc

SEQ ID NO: 1301015 - DNA, 25 bp, Homo sapien
tgcgggcacgattggggatggagaa

SEQ ID NO: 1301016 - DNA, 25 bp, Homo sapien
tgtttccagcaaagtcagtcaccct

SEQ ID NO: 1301017 - DNA, 25 bp, Homo sapien
ttccagcaaagtcagtcaccctgtg

SEQ ID NO: 1301018 - DNA, 25 bp, Homo sapien
ccctgtgaagagcagctccatccat

SEQ ID NO: 1301019 - DNA, 25 bp, Homo sapien
cttcctgtttccagcaaagtcagtc

SEQ ID NO: 1301020 - DNA, 25 bp, Homo sapien
gagaacatgtgaatttccccagtga

SEQ ID NO: 1301021 - DNA, 25 bp, Homo sapien
ttccccagtgactgagctcccatgg

SEQ ID NO: 1301022 - DNA, 25 bp, Homo sapien
taacgtcaggccaggttcatgtggg

SEQ ID NO: 1301023 - DNA, 25 bp, Homo sapien
gctcagaggctttcactggtaacgt

SEQ ID NO: 1301024 - DNA, 25 bp, Homo sapien
gacacccaagactggctttgctgtg

SEQ ID NO: 1301025 - DNA, 25 bp, Homo sapien
agccagagggaacccctgggcaaga

SEQ ID NO: 1301026 - DNA, 25 bp, Homo sapien
tgacacccaagactggctttgctgt

SEQ ID NO: 1301027 - DNA, 25 bp, Homo sapien
ggtggtagaagtcatccaagccaga

SEQ ID NO: 1301028 - DNA, 25 bp, Homo sapien
cttggctgcccgtactggccatgct

SEQ ID NO: 1301029 - DNA, 25 bp, Homo sapien
ttggctgcccgtactggccatgctg

SEQ ID NO: 1301030 - DNA, 25 bp, Homo sapien
tggattctgggagaattgtcagtgc

SEQ ID NO: 1301031 - DNA, 25 bp, Homo sapien
ctgaaggctgaatgacgcgagtgtt

SEQ ID NO: 1301032 - DNA, 25 bp, Homo sapien
ctgatgctttgatggtcctgagcgg

SEQ ID NO: 1301033 - DNA, 25 bp, Homo sapien
tgaatgacgcgagtgttggattctg

SEQ ID NO: 1301034 - DNA, 25 bp, Homo sapien
ttcatgacatccctgctcaaggcag

SEQ ID NO: 1301035 - DNA, 25 bp, Homo sapien
gacatccctgctcaaggcagctctg

SEQ ID NO: 1301036 - DNA, 25 bp, Homo sapien
tctgggaccaatgggcttcatgaca

SEQ ID NO: 1301037 - DNA, 25 bp, Homo sapien
ctgctggctccactcatgcccggct

SEQ ID NO: 1301038 - DNA, 25 bp, Homo sapien
ctgggccaggtcaagcctatcatcc

SEQ ID NO: 1301039 - DNA, 25 bp, Homo sapien
cctgggccaggtcaagcctatcatc

SEQ ID NO: 1301040 - DNA, 25 bp, Homo sapien
gggccaggtcaagcctatcatccat

SEQ ID NO: 1301041 - DNA, 25 bp, Homo sapien
tgggccaggtcaagcctatcatcca

SEQ ID NO: 1301042 - DNA, 25 bp, Homo sapien
cccacattgtggttgctgatggtca

SEQ ID NO: 1301043 - DNA, 25 bp, Homo sapien
taagtgctcaggaaacattggctgc

SEQ ID NO: 1301044 - DNA, 25 bp, Homo sapien
gctgctgattgttgaccccacattg

SEQ ID NO: 1301045 - DNA, 25 bp, Homo sapien
gtgctcaggaaacattggctgctga

SEQ ID NO: 1301046 - DNA, 25 bp, Homo sapien
gggtttactgagctcgatgatgtac

SEQ ID NO: 1301047 - DNA, 25 bp, Homo sapien
tgagctcgatgatgtacacgctctg

SEQ ID NO: 1301048 - DNA, 25 bp, Homo sapien
tgatgtacacgctctgtgtcctggg

SEQ ID NO: 1301049 - DNA, 25 bp, Homo sapien
tcgatgatgtacacgctctgtgtcc

SEQ ID NO: 1301050 - DNA, 25 bp, Homo sapien
gacaggagatgaagacgtgatgaca

SEQ ID NO: 1301051 - DNA, 25 bp, Homo sapien
aggagatgaagacgtgatgacacct

SEQ ID NO: 1301052 - DNA, 25 bp, Homo sapien
ctgccctcaagtgtctgttttccct

SEQ ID NO: 1301053 - DNA, 25 bp, Homo sapien
acctgccctcaagtgtctgttttcc

SEQ ID NO: 1301054 - DNA, 25 bp, Homo sapien
gtagagaatcgatgagccttccacc

SEQ ID NO: 1301055 - DNA, 25 bp, Homo sapien
gatctgtgtagagaatcgatgagcc

SEQ ID NO: 1301056 - DNA, 25 bp, Homo sapien
aaagctgatctgtgtagagaatcga

SEQ ID NO: 1301057 - DNA, 25 bp, Homo sapien
ttccacccacgcaggcatctgtctc

SEQ ID NO: 1301058 - DNA, 25 bp, Homo sapien
gcagttcttgggtgactgatgagac

SEQ ID NO: 1301059 - DNA, 25 bp, Homo sapien
actttgcagggattatcggtgtggc

SEQ ID NO: 1301060 - DNA, 25 bp, Homo sapien
cttcacaggatgctgctcacatggg

SEQ ID NO: 1301061 - DNA, 25 bp, Homo sapien
tcagggcttgttgattgtgcagttc

SEQ ID NO: 1301062 - DNA, 25 bp, Homo sapien
atttgtaagcgctgctgtgactggg

SEQ ID NO: 1301063 - DNA, 25 bp, Homo sapien
cctgggcagggatttgtaagcgctg

SEQ ID NO: 1301064 - DNA, 25 bp, Homo sapien
cagggatttgtaagcgctgctgtga

SEQ ID NO: 1301065 - DNA, 25 bp, Homo sapien
tggggatcctcattcgtttgtcttc

SEQ ID NO: 1301066 - DNA, 25 bp, Homo sapien
tgacattgtcaatcctgggagtagg

SEQ ID NO: 1301067 - DNA, 25 bp, Homo sapien
catcctgggctcatcaatttgcctt

SEQ ID NO: 1301068 - DNA, 25 bp, Homo sapien
cacatcctgggctcatcaatttgcc

SEQ ID NO: 1301069 - DNA, 25 bp, Homo sapien
tgcgtttccctgtttcacgcatgga

SEQ ID NO: 1301070 - DNA, 25 bp, Homo sapien
ggcatgcccacagtatagctgccat

SEQ ID NO: 1301071 - DNA, 25 bp, Homo sapien
tgccatttcgggaccccacagaagg

SEQ ID NO: 1301072 - DNA, 25 bp, Homo sapien
cggcatgcccacagtatagctgcca

SEQ ID NO: 1301073 - DNA, 25 bp, Homo sapien
agtatagctgccatttcgggacccc

SEQ ID NO: 1301074 - DNA, 25 bp, Homo sapien
gagtctgtgcctagcagggcataaa

SEQ ID NO: 1301075 - DNA, 25 bp, Homo sapien
ttacagccgccaagcgacagaagct

SEQ ID NO: 1301076 - DNA, 25 bp, Homo sapien
ttcctcagacgatgacacagagtgg

SEQ ID NO: 1301077 - DNA, 25 bp, Homo sapien
agaacagcagggtgcagacggctac

SEQ ID NO: 1301078 - DNA, 25 bp, Homo sapien
tttgtggagcccctgttcttggcca

SEQ ID NO: 1301079 - DNA, 25 bp, Homo sapien
gatgctgtgggtcgttcttttacat

SEQ ID NO: 1301080 - DNA, 25 bp, Homo sapien
ggctcacagcttggtccatccctcc

SEQ ID NO: 1301081 - DNA, 25 bp, Homo sapien
gttgatgttatttgtggagcccctg

SEQ ID NO: 1301082 - DNA, 25 bp, Homo sapien
agtgtcttttcgcatgcttattggc

SEQ ID NO: 1301083 - DNA, 25 bp, Homo sapien
tgtatctgtttaaaacccaatctcc

SEQ ID NO: 1301084 - DNA, 25 bp, Homo sapien
taaaaatctggttgtggccgggtgc

SEQ ID NO: 1301085 - DNA, 25 bp, Homo sapien
tccacaggggctgcattattttaca

SEQ ID NO: 1301086 - DNA, 25 bp, Homo sapien
agtcatgtcagggaaacccttgctt

SEQ ID NO: 1301087 - DNA, 25 bp, Homo sapien
catgtcagggaaacccttgctttcc

SEQ ID NO: 1301088 - DNA, 25 bp, Homo sapien
agggggatggatacagtcatgtcag

SEQ ID NO: 1301089 - DNA, 25 bp, Homo sapien
tacagtcatgtcagggaaacccttg

SEQ ID NO: 1301090 - DNA, 25 bp, Homo sapien
ttaggagtcatcagaaatggacaga

SEQ ID NO: 1301091 - DNA, 25 bp, Homo sapien
gtcatcagaaatggacagaaagcca

SEQ ID NO: 1301092 - DNA, 25 bp, Homo sapien
agccacatttgtttctcagattaga

SEQ ID NO: 1301093 - DNA, 25 bp, Homo sapien
catttgtttctcagattagatgaac

SEQ ID NO: 1301094 - DNA, 25 bp, Homo sapien
tccaatgcagtctcgggtaactctg

SEQ ID NO: 1301095 - DNA, 25 bp, Homo sapien
tcactgctggctacgagacaatgag

SEQ ID NO: 1301096 - DNA, 25 bp, Homo sapien
ctacgagacaatgagcaggcagagg

SEQ ID NO: 1301097 - DNA, 25 bp, Homo sapien
agggatccagttccaagtctcccac

SEQ ID NO: 1301098 - DNA, 25 bp, Homo sapien
ctgcctggcataggagcaggatgtt

SEQ ID NO: 1301099 - DNA, 25 bp, Homo sapien
tggagacaaaaggagccagcagggc

SEQ ID NO: 1301100 - DNA, 25 bp, Homo sapien
atggcccttctctgtccgggctaag

SEQ ID NO: 1301101 - DNA, 25 bp, Homo sapien
ctccttctgcgacccgctgcctggc

SEQ ID NO: 1301102 - DNA, 25 bp, Homo sapien
ctttctggagtagggatgaactcag

SEQ ID NO: 1301103 - DNA, 25 bp, Homo sapien
ttctggagtagggatgaactcagaa

SEQ ID NO: 1301104 - DNA, 25 bp, Homo sapien
tttctggagtagggatgaactcaga

SEQ ID NO: 1301105 - DNA, 25 bp, Homo sapien
tctggagtagggatgaactcagaac

SEQ ID NO: 1301106 - DNA, 25 bp, Homo sapien
tcaggaattttggaccctggtcaaa

SEQ ID NO: 1301107 - DNA, 25 bp, Homo sapien
tcttctataggcaatgcctggtaca

SEQ ID NO: 1301108 - DNA, 25 bp, Homo sapien
taatcaggaattttggaccctggtc

SEQ ID NO: 1301109 - DNA, 25 bp, Homo sapien
acagagataaatttgggatcctttg

SEQ ID NO: 1301110 - DNA, 25 bp, Homo sapien
tggctttgctggctccacatgcacg

SEQ ID NO: 1301111 - DNA, 25 bp, Homo sapien
ccccagcttagcctcggagcctggg

SEQ ID NO: 1301112 - DNA, 25 bp, Homo sapien
gctttgctggctccacatgcacgtg

SEQ ID NO: 1301113 - DNA, 25 bp, Homo sapien
ttgctggctccacatgcacgtgcac

SEQ ID NO: 1301114 - DNA, 25 bp, Homo sapien
cccagcagtgggaacttaaaatgtt

SEQ ID NO: 1301115 - DNA, 25 bp, Homo sapien
cctgccccagcagtgggaacttaaa

SEQ ID NO: 1301116 - DNA, 25 bp, Homo sapien
ctgcgtgaccagaggctccagggca

SEQ ID NO: 1301117 - DNA, 25 bp, Homo sapien
cagtcctgccccagcagtgggaact

SEQ ID NO: 1301118 - DNA, 25 bp, Homo sapien
gctctaagtcagtgcccagcaaata

SEQ ID NO: 1301119 - DNA, 25 bp, Homo sapien
agtcagtgcccagcaaatatcgatg

SEQ ID NO: 1301120 - DNA, 25 bp, Homo sapien
gtcagtgcccagcaaatatcgatga

SEQ ID NO: 1301121 - DNA, 25 bp, Homo sapien
ctggctctaagtcagtgcccagcaa

SEQ ID NO: 1301122 - DNA, 25 bp, Homo sapien
acactgacaggctcaggaagactaa

SEQ ID NO: 1301123 - DNA, 25 bp, Homo sapien
aggaagactaaactgtgggaggctt

SEQ ID NO: 1301124 - DNA, 25 bp, Homo sapien
caggaagactaaactgtgggaggct

SEQ ID NO: 1301125 - DNA, 25 bp, Homo sapien
aaaggcctcgtcctgttggctcaag

SEQ ID NO: 1301126 - DNA, 25 bp, Homo sapien
tcatgcatggaggacccgacaaaag

SEQ ID NO: 1301127 - DNA, 25 bp, Homo sapien
ccgacaaaaggcctcgtcctgttgg

SEQ ID NO: 1301128 - DNA, 25 bp, Homo sapien
catggaggacccgacaaaaggcctc

SEQ ID NO: 1301129 - DNA, 25 bp, Homo sapien
agttgcagtggtcttggtcatgttt

SEQ ID NO: 1301130 - DNA, 25 bp, Homo sapien
tagttgcagtggtcttggtcatgtt

SEQ ID NO: 1301131 - DNA, 25 bp, Homo sapien
gtagttgcagtggtcttggtcatgt

SEQ ID NO: 1301132 - DNA, 25 bp, Homo sapien
ggtagttgcagtggtcttggtcatg

SEQ ID NO: 1301133 - DNA, 25 bp, Homo sapien
ggttgggggagacacaggcactgcg

SEQ ID NO: 1301134 - DNA, 25 bp, Homo sapien
gggggagacacaggcactgcgtggg

SEQ ID NO: 1301135 - DNA, 25 bp, Homo sapien
ggggttgggggagacacaggcactg

SEQ ID NO: 1301136 - DNA, 25 bp, Homo sapien
ttgggggagacacaggcactgcgtg

SEQ ID NO: 1301137 - DNA, 25 bp, Homo sapien
atgggtctgccaacagcccaaccga

SEQ ID NO: 1301138 - DNA, 25 bp, Homo sapien
tcggcaggggctgagttccaacctg

SEQ ID NO: 1301139 - DNA, 25 bp, Homo sapien
cagcccaaccgagaaggagtttctt

SEQ ID NO: 1301140 - DNA, 25 bp, Homo sapien
gcttctcagtcgtgtgcccattctc

SEQ ID NO: 1301141 - DNA, 25 bp, Homo sapien
gtctctctcgccacagagcccagag

SEQ ID NO: 1301142 - DNA, 25 bp, Homo sapien
tccaccttcacaggggcatcgctgg

SEQ ID NO: 1301143 - DNA, 25 bp, Homo sapien
tgtgtccaccttcacaggggcatcg

SEQ ID NO: 1301144 - DNA, 25 bp, Homo sapien
tgtccaccttcacaggggcatcgct

SEQ ID NO: 1301145 - DNA, 25 bp, Homo sapien
ggactcagagggagaagctctcggg

SEQ ID NO: 1301146 - DNA, 25 bp, Homo sapien
tccacctccttagagcccaatgtgt

SEQ ID NO: 1301147 - DNA, 25 bp, Homo sapien
aatgtgtctccgtcctaatgctgaa

SEQ ID NO: 1301148 - DNA, 25 bp, Homo sapien
taatgctgaaggaccgaagggactc

SEQ ID NO: 1301149 - DNA, 25 bp, Homo sapien
gtggtgggcatcacatgggacagtg

SEQ ID NO: 1301150 - DNA, 25 bp, Homo sapien
tgggcatcacatgggacagtgtgtg

SEQ ID NO: 1301151 - DNA, 25 bp, Homo sapien
ggacagtgtgtggagtgaccggcat

SEQ ID NO: 1301152 - DNA, 25 bp, Homo sapien
gggacagtgtgtggagtgaccggca

SEQ ID NO: 1301153 - DNA, 25 bp, Homo sapien
attcctttccagagaaacctgaact

SEQ ID NO: 1301154 - DNA, 25 bp, Homo sapien
cctttccagagaaacctgaactgac

SEQ ID NO: 1301155 - DNA, 25 bp, Homo sapien
ccgggaatcaaattcctttccagag

SEQ ID NO: 1301156 - DNA, 25 bp, Homo sapien
cgggaatcaaattcctttccagaga

SEQ ID NO: 1301157 - DNA, 25 bp, Homo sapien
taaacagacatgaaacgacagcggg

SEQ ID NO: 1301158 - DNA, 25 bp, Homo sapien
tctgagcaagacgaaccggaaatcc

SEQ ID NO: 1301159 - DNA, 25 bp, Homo sapien
taaaaatctgttcagccgggagtac

SEQ ID NO: 1301160 - DNA, 25 bp, Homo sapien
caggacagttgctgcttagagccca

SEQ ID NO: 1301161 - DNA, 25 bp, Homo sapien
catatctgctaatccctggctggcc

SEQ ID NO: 1301162 - DNA, 25 bp, Homo sapien
tgcgtctcccatgccgaagcttctt

SEQ ID NO: 1301163 - DNA, 25 bp, Homo sapien
tctcaggttggtgtcccctcctttc

SEQ ID NO: 1301164 - DNA, 25 bp, Homo sapien
ttcaaaagaactccgcacccgcata

SEQ ID NO: 1301165 - DNA, 25 bp, Homo sapien
tgagctgtagactgactctgtgtct

SEQ ID NO: 1301166 - DNA, 25 bp, Homo sapien
tgtaggcaggccactgcgggtagga

SEQ ID NO: 1301167 - DNA, 25 bp, Homo sapien
ctgcgggtaggatgcgactgccaat

SEQ ID NO: 1301168 - DNA, 25 bp, Homo sapien
tgccaatgtcgcagaagcaagtcct

SEQ ID NO: 1301169 - DNA, 25 bp, Homo sapien
ctggcatggggacagcagggggctg

SEQ ID NO: 1301170 - DNA, 25 bp, Homo sapien
tggcatggggacagcagggggctgg

SEQ ID NO: 1301171 - DNA, 25 bp, Homo sapien
ggcatggggacagcagggggctggc

SEQ ID NO: 1301172 - DNA, 25 bp, Homo sapien
catggggacagcagggggctggcat

SEQ ID NO: 1301173 - DNA, 25 bp, Homo sapien
ctctgaatgtctgcaggcttctcag

SEQ ID NO: 1301174 - DNA, 25 bp, Homo sapien
ggccatggcctctgaatgtctgcag

SEQ ID NO: 1301175 - DNA, 25 bp, Homo sapien
ggtggccatggcctctgaatgtctg

SEQ ID NO: 1301176 - DNA, 25 bp, Homo sapien
tgaatgtctgcaggcttctcaggcc

SEQ ID NO: 1301177 - DNA, 25 bp, Homo sapien
ttcccagagccctgggaggggccat

SEQ ID NO: 1301178 - DNA, 25 bp, Homo sapien
cttcccagagccctgggaggggcca

SEQ ID NO: 1301179 - DNA, 25 bp, Homo sapien
tccgaggctcttgcgccctgacttg

SEQ ID NO: 1301180 - DNA, 25 bp, Homo sapien
ttgctgtttccgaggctcttgcgcc

SEQ ID NO: 1301181 - DNA, 25 bp, Homo sapien
tgctgtttccgaggctcttgcgccc

SEQ ID NO: 1301182 - DNA, 25 bp, Homo sapien
tgtttccgaggctcttgcgccctga

SEQ ID NO: 1301183 - DNA, 25 bp, Homo sapien
ggaccctcgctgtcagaaagtgcag

SEQ ID NO: 1301184 - DNA, 25 bp, Homo sapien
catgatcatgcgacacggctgaatc

SEQ ID NO: 1301185 - DNA, 25 bp, Homo sapien
gaccggctttgttgacaagtggcca

SEQ ID NO: 1301186 - DNA, 25 bp, Homo sapien
ccctctaaggtggagaccggctttg

SEQ ID NO: 1301187 - DNA, 25 bp, Homo sapien
ctgacactccagtctgaccagtttc

SEQ ID NO: 1301188 - DNA, 25 bp, Homo sapien
cttggaaatcgtccatttggttgat

SEQ ID NO: 1301189 - DNA, 25 bp, Homo sapien
ccatctcattatatactcttggaaa

SEQ ID NO: 1301190 - DNA, 25 bp, Homo sapien
gacactccagtctgaccagtttcca

SEQ ID NO: 1301191 - DNA, 25 bp, Homo sapien
catcttgctgatctgcgctgacttg

SEQ ID NO: 1301192 - DNA, 25 bp, Homo sapien
gatctgcgctgacttgtaggcttca

SEQ ID NO: 1301193 - DNA, 25 bp, Homo sapien
tgctgatctgcgctgacttgtaggc

SEQ ID NO: 1301194 - DNA, 25 bp, Homo sapien
tctgcgctgacttgtaggcttcagg

SEQ ID NO: 1301195 - DNA, 25 bp, Homo sapien
gaacagagtcggcaagcatggagct

SEQ ID NO: 1301196 - DNA, 25 bp, Homo sapien
tgaagtagggagatcactcagccag

SEQ ID NO: 1301197 - DNA, 25 bp, Homo sapien
cctgtgaattctctgtcagatgcat

SEQ ID NO: 1301198 - DNA, 25 bp, Homo sapien
tcagatgcattgacggagaacagag

SEQ ID NO: 1301199 - DNA, 25 bp, Homo sapien
tcaaaggactgcccctgcaatgcat

SEQ ID NO: 1301200 - DNA, 25 bp, Homo sapien
aaggactgcccctgcaatgcatcat

SEQ ID NO: 1301201 - DNA, 25 bp, Homo sapien
gactgcccctgcaatgcatcatcag

SEQ ID NO: 1301202 - DNA, 25 bp, Homo sapien
ccctgcaatgcatcatcagcaaatt

SEQ ID NO: 1301203 - DNA, 25 bp, Homo sapien
tctgctccctgcaactgctgcgact

SEQ ID NO: 1301204 - DNA, 25 bp, Homo sapien
gctccctgcaactgctgcgactcat

SEQ ID NO: 1301205 - DNA, 25 bp, Homo sapien
cctgcaactgctgcgactcatcctc

SEQ ID NO: 1301206 - DNA, 25 bp, Homo sapien
tccccctggccgttgagaccctctg

SEQ ID NO: 1301207 - DNA, 25 bp, Homo sapien
gcagacatggaaagggccctgccag

SEQ ID NO: 1301208 - DNA, 25 bp, Homo sapien
gatgacttttccaatcagcttcggc

SEQ ID NO: 1301209 - DNA, 25 bp, Homo sapien
acctgagtcagattggccgctgcag

SEQ ID NO: 1301210 - DNA, 25 bp, Homo sapien
ggctcccctggctgaaccgagtgtt

SEQ ID NO: 1301211 - DNA, 25 bp, Homo sapien
gggaggcactgcccgggtcccagga

SEQ ID NO: 1301212 - DNA, 25 bp, Homo sapien
ctgggaggcactgcccgggtcccag

SEQ ID NO: 1301213 - DNA, 25 bp, Homo sapien
tgggaggcactgcccgggtcccagg

SEQ ID NO: 1301214 - DNA, 25 bp, Homo sapien
ggaggcactgcccgggtcccaggac

SEQ ID NO: 1301215 - DNA, 25 bp, Homo sapien
agccatgggtccacaaccaagtcca

SEQ ID NO: 1301216 - DNA, 25 bp, Homo sapien
cactcccctctcattggttggaggt

SEQ ID NO: 1301217 - DNA, 25 bp, Homo sapien
cagtcacagcgtggtggctgcccct

SEQ ID NO: 1301218 - DNA, 25 bp, Homo sapien
cagcatgtgtggatgcattgcagtc

SEQ ID NO: 1301219 - DNA, 25 bp, Homo sapien
ttgccaaatgccattccgtggtctc

SEQ ID NO: 1301220 - DNA, 25 bp, Homo sapien
ctttgccaaatgccattccgtggtc

SEQ ID NO: 1301221 - DNA, 25 bp, Homo sapien
tttgccaaatgccattccgtggtct

SEQ ID NO: 1301222 - DNA, 25 bp, Homo sapien
tggttaaccggctgctggtgttgca

SEQ ID NO: 1301223 - DNA, 25 bp, Homo sapien
cttttgcggactcactgcagctatg

SEQ ID NO: 1301224 - DNA, 25 bp, Homo sapien
tgcggactcactgcagctatggctg

SEQ ID NO: 1301225 - DNA, 25 bp, Homo sapien
tgcagctatggctggttaaccggct

SEQ ID NO: 1301226 - DNA, 25 bp, Homo sapien
cgatcttgtacatgaagtttgccca

SEQ ID NO: 1301227 - DNA, 25 bp, Homo sapien
gctgtgacatgcctgggaaattctt

SEQ ID NO: 1301228 - DNA, 25 bp, Homo sapien
tagttcagcggccaaaccaaggcat

SEQ ID NO: 1301229 - DNA, 25 bp, Homo sapien
tgtagctatcaaatactctggccag

SEQ ID NO: 1301230 - DNA, 25 bp, Homo sapien
ctgagcatggcccactggaagccat

SEQ ID NO: 1301231 - DNA, 25 bp, Homo sapien
gagcatggcccactggaagccatgc

SEQ ID NO: 1301232 - DNA, 25 bp, Homo sapien
tgctgcagcccaccttgagggggtc

SEQ ID NO: 1301233 - DNA, 25 bp, Homo sapien
gcatggcccactggaagccatgctg

SEQ ID NO: 1301234 - DNA, 25 bp, Homo sapien
gaaccaggtgcacccgattgaggac

SEQ ID NO: 1301235 - DNA, 25 bp, Homo sapien
ggaaccaggtgcacccgattgagga

SEQ ID NO: 1301236 - DNA, 25 bp, Homo sapien
gggcctgtcttggttccacttggct

SEQ ID NO: 1301237 - DNA, 25 bp, Homo sapien
cttggctctgtttcagacactcttg

SEQ ID NO: 1301238 - DNA, 25 bp, Homo sapien
cctggaactaacattgttcaaagtc

SEQ ID NO: 1301239 - DNA, 25 bp, Homo sapien
tgtctgatgagagggactcgacttc

SEQ ID NO: 1301240 - DNA, 25 bp, Homo sapien
aaagtccttagcttgactacatcag

SEQ ID NO: 1301241 - DNA, 25 bp, Homo sapien
gcttcctattgtattcaaacatccc

SEQ ID NO: 1301242 - DNA, 25 bp, Homo sapien
tgcagctcaacattgcagagtgatg

SEQ ID NO: 1301243 - DNA, 25 bp, Homo sapien
ctgcagctcaacattgcagagtgat

SEQ ID NO: 1301244 - DNA, 25 bp, Homo sapien
gcagctcaacattgcagagtgatgc

SEQ ID NO: 1301245 - DNA, 25 bp, Homo sapien
aaggaccagctgcattgctgctcgg

SEQ ID NO: 1301246 - DNA, 25 bp, Homo sapien
tgcattgctgctcggctctgcaggg

SEQ ID NO: 1301247 - DNA, 25 bp, Homo sapien
agagaagacaacagaggctatggag

SEQ ID NO: 1301248 - DNA, 25 bp, Homo sapien
acaacagaggctatggagccagaca

SEQ ID NO: 1301249 - DNA, 25 bp, Homo sapien
tcagagcttggggattccaaggcct

SEQ ID NO: 1301250 - DNA, 25 bp, Homo sapien
cattttttctctaggctttgctcac

SEQ ID NO: 1301251 - DNA, 25 bp, Homo sapien
gccatgtttctatctgtgcgcagtg

SEQ ID NO: 1301252 - DNA, 25 bp, Homo sapien
caaccgagtcacaaggtcagcctgt

SEQ ID NO: 1301253 - DNA, 25 bp, Homo sapien
tttgctcacagatttcttgccatgt

SEQ ID NO: 1301254 - DNA, 25 bp, Homo sapien
tcccatttggctctgcgcagtgcac

SEQ ID NO: 1301255 - DNA, 25 bp, Homo sapien
gctgtgggaatctctgagacgcagc

SEQ ID NO: 1301256 - DNA, 25 bp, Homo sapien
ccatttggctctgcgcagtgcactg

SEQ ID NO: 1301257 - DNA, 25 bp, Homo sapien
gagacgcagcagttccacaggaacc

SEQ ID NO: 1301258 - DNA, 25 bp, Homo sapien
agcccacacccttagacaggcgatg

SEQ ID NO: 1301259 - DNA, 25 bp, Homo sapien
ttagacaggcgatgcagatcttggg

SEQ ID NO: 1301260 - DNA, 25 bp, Homo sapien
ttgagtgtgatgtgctcaggaaacc

SEQ ID NO: 1301261 - DNA, 25 bp, Homo sapien
tcctggtacttctcagggatctggg

SEQ ID NO: 1301262 - DNA, 25 bp, Homo sapien
tgttgtttagcgtctgtggcctcat

SEQ ID NO: 1301263 - DNA, 25 bp, Homo sapien
agcagctgagctgatgtgtattttc

SEQ ID NO: 1301264 - DNA, 25 bp, Homo sapien
cagctgagctgatgtgtattttcct

SEQ ID NO: 1301265 - DNA, 25 bp, Homo sapien
ctgatgttgtttagcgtctgtggcc

SEQ ID NO: 1301266 - DNA, 25 bp, Homo sapien
tctgctgatgaaacacttttcaggg

SEQ ID NO: 1301267 - DNA, 25 bp, Homo sapien
ttggctgtgcatttctctgctgatg

SEQ ID NO: 1301268 - DNA, 25 bp, Homo sapien
aagggaaatcacagggctcattggc

SEQ ID NO: 1301269 - DNA, 25 bp, Homo sapien
ttttcagggttggtctgcatggctg

SEQ ID NO: 1301270 - DNA, 25 bp, Homo sapien
gctttgagcgcaggaactgttcctc

SEQ ID NO: 1301271 - DNA, 25 bp, Homo sapien
tcctcctttgtgtcaccgggctggg

SEQ ID NO: 1301272 - DNA, 25 bp, Homo sapien
gtgcttccagcaacacaattgccat

SEQ ID NO: 1301273 - DNA, 25 bp, Homo sapien
aggagcatggaggacataagagccc

SEQ ID NO: 1301274 - DNA, 25 bp, Homo sapien
tgaacgaaggctgctctagaaggag

SEQ ID NO: 1301275 - DNA, 25 bp, Homo sapien
gctctgctcatctccgtgggcggga

SEQ ID NO: 1301276 - DNA, 25 bp, Homo sapien
ggtctgaagggacgggtggcttcca

SEQ ID NO: 1301277 - DNA, 25 bp, Homo sapien
gaccttggtagtgaacgaaggctgc

SEQ ID NO: 1301278 - DNA, 25 bp, Homo sapien
aactgggaagggctgcgactcggtg

SEQ ID NO: 1301279 - DNA, 25 bp, Homo sapien
taaaccagcatgagggtgaaaggac

SEQ ID NO: 1301280 - DNA, 25 bp, Homo sapien
tcggtggtctggacgtcatctccag

SEQ ID NO: 1301281 - DNA, 25 bp, Homo sapien
ccagcatgagggtgaaaggacaagt

SEQ ID NO: 1301282 - DNA, 25 bp, Homo sapien
tgtgggtactaatcacctttcccat

SEQ ID NO: 1301283 - DNA, 25 bp, Homo sapien
ctgtgggtactaatcacctttccca

SEQ ID NO: 1301284 - DNA, 25 bp, Homo sapien
gagtctgagtcgtgacttgaggctc

SEQ ID NO: 1301285 - DNA, 25 bp, Homo sapien
tgagtcgtgacttgaggctcaggtt

SEQ ID NO: 1301286 - DNA, 25 bp, Homo sapien
ctgggctcctgagcgttgagagtct

SEQ ID NO: 1301287 - DNA, 25 bp, Homo sapien
gctcctgagcgttgagagtctgagt

SEQ ID NO: 1301288 - DNA, 25 bp, Homo sapien
gctctggcaccacaacatccaagtg

SEQ ID NO: 1301289 - DNA, 25 bp, Homo sapien
attttcttcaaacgctcccttctct

SEQ ID NO: 1301290 - DNA, 25 bp, Homo sapien
tgggatgtttcttgtacactgacgg

SEQ ID NO: 1301291 - DNA, 25 bp, Homo sapien
tgcagggcactaaatgcatcccggg

SEQ ID NO: 1301292 - DNA, 25 bp, Homo sapien
gtacagcaaggtgatgcttggagca

SEQ ID NO: 1301293 - DNA, 25 bp, Homo sapien
catgtacagcaaggtgatgcttgga

SEQ ID NO: 1301294 - DNA, 25 bp, Homo sapien
tgatgcttggagcacagccagggtc

SEQ ID NO: 1301295 - DNA, 25 bp, Homo sapien
aggtgatgcttggagcacagccagg

SEQ ID NO: 1301296 - DNA, 25 bp, Homo sapien
caaaggcagtgcaggtacttcggtg

SEQ ID NO: 1301297 - DNA, 25 bp, Homo sapien
gagcgtgcccctcttgcatggtgca

SEQ ID NO: 1301298 - DNA, 25 bp, Homo sapien
tgaactcgcacttaggcagagcgtg

SEQ ID NO: 1301299 - DNA, 25 bp, Homo sapien
ggtgcaaaaactgctccctcaaagg

SEQ ID NO: 1301300 - DNA, 25 bp, Homo sapien
tcatggagacagaaagcaagcccct

SEQ ID NO: 1301301 - DNA, 25 bp, Homo sapien
atggagacagaaagcaagcccctga

SEQ ID NO: 1301302 - DNA, 25 bp, Homo sapien
catggagacagaaagcaagcccctg

SEQ ID NO: 1301303 - DNA, 25 bp, Homo sapien
tggagacagaaagcaagcccctgac

SEQ ID NO: 1301304 - DNA, 25 bp, Homo sapien
cagttggattcacaaggtcgtgagc

SEQ ID NO: 1301305 - DNA, 25 bp, Homo sapien
gattcacaaggtcgtgagcacagag

SEQ ID NO: 1301306 - DNA, 25 bp, Homo sapien
gtcgtgagcacagagaatccatttc

SEQ ID NO: 1301307 - DNA, 25 bp, Homo sapien
aaatagcagtttcagttggattcac

SEQ ID NO: 1301308 - DNA, 25 bp, Homo sapien
gatatagccttatcccatgatcctc

SEQ ID NO: 1301309 - DNA, 25 bp, Homo sapien
cagatgaggaatccaagactggagc

SEQ ID NO: 1301310 - DNA, 25 bp, Homo sapien
ttaacaacactttgaacagatggca

SEQ ID NO: 1301311 - DNA, 25 bp, Homo sapien
aacttaacacaactccagaggaggg

SEQ ID NO: 1301312 - DNA, 25 bp, Homo sapien
cacctgtgaaatggcattgaggata

SEQ ID NO: 1301313 - DNA, 25 bp, Homo sapien
tcacctgtgaaatggcattgaggat

SEQ ID NO: 1301314 - DNA, 25 bp, Homo sapien
acctgtgaaatggcattgaggatat

SEQ ID NO: 1301315 - DNA, 25 bp, Homo sapien
gatgcactctctttggtactccttg

SEQ ID NO: 1301316 - DNA, 25 bp, Homo sapien
cttttagagatatctttactggtgc

SEQ ID NO: 1301317 - DNA, 25 bp, Homo sapien
tactccttgtagatagagcgtctct

SEQ ID NO: 1301318 - DNA, 25 bp, Homo sapien
tgctagtgacagattctctccgttt

SEQ ID NO: 1301319 - DNA, 25 bp, Homo sapien
ggtggattctaccaagtggttcttc

SEQ ID NO: 1301320 - DNA, 25 bp, Homo sapien
tctggtggattctaccaagtggttc

SEQ ID NO: 1301321 - DNA, 25 bp, Homo sapien
gagctacagagagttagtctaatct

SEQ ID NO: 1301322 - DNA, 25 bp, Homo sapien
agctgtgtgaccattagaaagtgct

SEQ ID NO: 1301323 - DNA, 25 bp, Homo sapien
tctgttctgctcccaggggacacag

SEQ ID NO: 1301324 - DNA, 25 bp, Homo sapien
ggcttgttcagctctcgagtgctgg

SEQ ID NO: 1301325 - DNA, 25 bp, Homo sapien
agaggtaatggatagaagacgatgt

SEQ ID NO: 1301326 - DNA, 25 bp, Homo sapien
tggatagaagacgatgtccaggtga

SEQ ID NO: 1301327 - DNA, 25 bp, Homo sapien
taatggatagaagacgatgtccagg

SEQ ID NO: 1301328 - DNA, 25 bp, Homo sapien
gatagaagacgatgtccaggtgaaa

SEQ ID NO: 1301329 - DNA, 25 bp, Homo sapien
tgtgtcatgcttggcagaaatccaa

SEQ ID NO: 1301330 - DNA, 25 bp, Homo sapien
ggcagaaatccaagctggcgttttg

SEQ ID NO: 1301331 - DNA, 25 bp, Homo sapien
ccaagctggcgttttgacaaaaagg

SEQ ID NO: 1301332 - DNA, 25 bp, Homo sapien
cccagattgtgtcatgcttggcaga

SEQ ID NO: 1301333 - DNA, 25 bp, Homo sapien
tccagagtgaaagattcagtgtctt

SEQ ID NO: 1301334 - DNA, 25 bp, Homo sapien
tgcagagctcttgcttcaggaatgg

SEQ ID NO: 1301335 - DNA, 25 bp, Homo sapien
tctgggtcacctgagtctaccatgc

SEQ ID NO: 1301336 - DNA, 25 bp, Homo sapien
tctcattggctcttactgggctatg

SEQ ID NO: 1301337 - DNA, 25 bp, Homo sapien
gctccgggtgctttgctctggttcc

SEQ ID NO: 1301338 - DNA, 25 bp, Homo sapien
cccagtaccagtcattttaacagct

SEQ ID NO: 1301339 - DNA, 25 bp, Homo sapien
tccagctcccagtaccagtcatttt

SEQ ID NO: 1301340 - DNA, 25 bp, Homo sapien
aggctccgggtgctttgctctggtt

SEQ ID NO: 1301341 - DNA, 25 bp, Homo sapien
catttagatcaaggccgggctggca

SEQ ID NO: 1301342 - DNA, 25 bp, Homo sapien
cacaggatgtacagacttgacggga

SEQ ID NO: 1301343 - DNA, 25 bp, Homo sapien
gagacgaaatggacactccaagagg

SEQ ID NO: 1301344 - DNA, 25 bp, Homo sapien
tcagacaagcgtcctgaggagacca

SEQ ID NO: 1301345 - DNA, 25 bp, Homo sapien
gtggcccttgatgagccaccaggtc

SEQ ID NO: 1301346 - DNA, 25 bp, Homo sapien
catccacacactgcgtcttgggcag

SEQ ID NO: 1301347 - DNA, 25 bp, Homo sapien
ggcaggtggcccttgatgagccacc

SEQ ID NO: 1301348 - DNA, 25 bp, Homo sapien
cttgatgagccaccaggtcagatgg

SEQ ID NO: 1301349 - DNA, 25 bp, Homo sapien
ctctgccaatcaactgggctttcag

SEQ ID NO: 1301350 - DNA, 25 bp, Homo sapien
ctgccaatcaactgggctttcaggg

SEQ ID NO: 1301351 - DNA, 25 bp, Homo sapien
gctttcaggggtggggatgccaggg

SEQ ID NO: 1301352 - DNA, 25 bp, Homo sapien
cagggcctggccagtcaccagaaga

SEQ ID NO: 1301353 - DNA, 25 bp, Homo sapien
tggcttggggagctgctcttctccc

SEQ ID NO: 1301354 - DNA, 25 bp, Homo sapien
cttcgtctcagaagccctccagggc

SEQ ID NO: 1301355 - DNA, 25 bp, Homo sapien
gcctggcttggggagctgctcttct

SEQ ID NO: 1301356 - DNA, 25 bp, Homo sapien
cttggggagctgctcttctccctgc

SEQ ID NO: 1301357 - DNA, 25 bp, Homo sapien
ctgttcccggtgtggacagcccgag

SEQ ID NO: 1301358 - DNA, 25 bp, Homo sapien
gctgcctctgttcccggtgtggaca

SEQ ID NO: 1301359 - DNA, 25 bp, Homo sapien
gcctctgttcccggtgtggacagcc

SEQ ID NO: 1301360 - DNA, 25 bp, Homo sapien
ctctgttcccggtgtggacagcccg

SEQ ID NO: 1301361 - DNA, 25 bp, Homo sapien
gccctggaaagaatccactggctcg

SEQ ID NO: 1301362 - DNA, 25 bp, Homo sapien
tggccctggaaagaatccactggct

SEQ ID NO: 1301363 - DNA, 25 bp, Homo sapien
ccctggaaagaatccactggctcgt

SEQ ID NO: 1301364 - DNA, 25 bp, Homo sapien
ttggccctggaaagaatccactggc

SEQ ID NO: 1301365 - DNA, 25 bp, Homo sapien
gctgctcccaatatcatcgtcatga

SEQ ID NO: 1301366 - DNA, 25 bp, Homo sapien
ggcagctgctcccaatatcatcgtc

SEQ ID NO: 1301367 - DNA, 25 bp, Homo sapien
aatatcatcgtcatgagttaccaca

SEQ ID NO: 1301368 - DNA, 25 bp, Homo sapien
atgagttaccacagacaccccatct

SEQ ID NO: 1301369 - DNA, 25 bp, Homo sapien
gggttgggtcctggacgcctgcctg

SEQ ID NO: 1301370 - DNA, 25 bp, Homo sapien
gtgtcttcacatgacggcgagagag

SEQ ID NO: 1301371 - DNA, 25 bp, Homo sapien
gtgccagtgtgatcgggttctggcg

SEQ ID NO: 1301372 - DNA, 25 bp, Homo sapien
tgatcgggttctggcgaggcctttc

SEQ ID NO: 1301373 - DNA, 25 bp, Homo sapien
gagggctcacaatcaatggtggaag

SEQ ID NO: 1301374 - DNA, 25 bp, Homo sapien
catcggctgcttgtgttgagagatc

SEQ ID NO: 1301375 - DNA, 25 bp, Homo sapien
cagcccgagcagaggagtgaggctt

SEQ ID NO: 1301376 - DNA, 25 bp, Homo sapien
gagagatcaagatagtctctgaaat

SEQ ID NO: 1301377 - DNA, 25 bp, Homo sapien
gaatgtgtgaatatctcatcggctg

SEQ ID NO: 1301378 - DNA, 25 bp, Homo sapien
caaatagctacacagccagtcgggc

SEQ ID NO: 1301379 - DNA, 25 bp, Homo sapien
tctaggcatatcaatctgggcagct

SEQ ID NO: 1301380 - DNA, 25 bp, Homo sapien
ccagtcgggcagtgaaaatggcaga

SEQ ID NO: 1301381 - DNA, 25 bp, Homo sapien
tcacttgtgctaggaagtttccagc

SEQ ID NO: 1301382 - DNA, 25 bp, Homo sapien
gaccctgaggttactggccaaaatg

SEQ ID NO: 1301383 - DNA, 25 bp, Homo sapien
gtccacatttagatgagcactgtcc

SEQ ID NO: 1301384 - DNA, 25 bp, Homo sapien
tctctgagcttgttcacgtgtcaca

SEQ ID NO: 1301385 - DNA, 25 bp, Homo sapien
gaacaatcccgagcccctttgtcag

SEQ ID NO: 1301386 - DNA, 25 bp, Homo sapien
gggcactagtcctgcactctctaca

SEQ ID NO: 1301387 - DNA, 25 bp, Homo sapien
gaagagctaagtcttccaggcaggt

SEQ ID NO: 1301388 - DNA, 25 bp, Homo sapien
aaggtgcgacttgtgattgggccac

SEQ ID NO: 1301389 - DNA, 25 bp, Homo sapien
aggtttttgatacagggcactagtc

SEQ ID NO: 1301390 - DNA, 25 bp, Homo sapien
taaaatgctcagagtctcacagtgc

SEQ ID NO: 1301391 - DNA, 25 bp, Homo sapien
gattccatcaagttccatcagtcgc

SEQ ID NO: 1301392 - DNA, 25 bp, Homo sapien
tgaagggttgacacgcggtgaaaac

SEQ ID NO: 1301393 - DNA, 25 bp, Homo sapien
tttggagggtcccaactaggctctc

SEQ ID NO: 1301394 - DNA, 25 bp, Homo sapien
gaccccctggttacgcaatgagagg

SEQ ID NO: 1301395 - DNA, 25 bp, Homo sapien
ctgaccccctggttacgcaatgaga

SEQ ID NO: 1301396 - DNA, 25 bp, Homo sapien
accccctggttacgcaatgagaggt

SEQ ID NO: 1301397 - DNA, 25 bp, Homo sapien
tgaccccctggttacgcaatgagag

SEQ ID NO: 1301398 - DNA, 25 bp, Homo sapien
tccaaggcgagtggtcagttgaaag

SEQ ID NO: 1301399 - DNA, 25 bp, Homo sapien
ctggtccaaggcgagtggtcagttg

SEQ ID NO: 1301400 - DNA, 25 bp, Homo sapien
gcgagtggtcagttgaaaggcttcc

SEQ ID NO: 1301401 - DNA, 25 bp, Homo sapien
tggtcagttgaaaggcttccatcgt

SEQ ID NO: 1301402 - DNA, 25 bp, Homo sapien
aaggctctgcatgaagaccttccgg

SEQ ID NO: 1301403 - DNA, 25 bp, Homo sapien
catgaagaccttccgggtatcacct

SEQ ID NO: 1301404 - DNA, 25 bp, Homo sapien
tcttggaagatgtggtttgagacac

SEQ ID NO: 1301405 - DNA, 25 bp, Homo sapien
gagatctccatggagcacacccagt

SEQ ID NO: 1301406 - DNA, 25 bp, Homo sapien
caggtactggtgagcaccccagtca

SEQ ID NO: 1301407 - DNA, 25 bp, Homo sapien
gacaagcacaggctcccgaaaggca

SEQ ID NO: 1301408 - DNA, 25 bp, Homo sapien
tactggtgagcaccccagtcactgg

SEQ ID NO: 1301409 - DNA, 25 bp, Homo sapien
caagcacaggctcccgaaaggcaat

SEQ ID NO: 1301410 - DNA, 25 bp, Homo sapien
aattcatccacattggcatctcctg

SEQ ID NO: 1301411 - DNA, 25 bp, Homo sapien
tccacattggcatctcctggagggc

SEQ ID NO: 1301412 - DNA, 25 bp, Homo sapien
tcctggagggcattgtcctgccctt

SEQ ID NO: 1301413 - DNA, 25 bp, Homo sapien
tgtactgcaggctaaattcatccac

SEQ ID NO: 1301414 - DNA, 25 bp, Homo sapien
acttttgcagccctgagcacgtcgt

SEQ ID NO: 1301415 - DNA, 25 bp, Homo sapien
ttgcagccctgagcacgtcgtcctg

SEQ ID NO: 1301416 - DNA, 25 bp, Homo sapien
ctgagcacgtcgtcctgctgaaact

SEQ ID NO: 1301417 - DNA, 25 bp, Homo sapien
gagcacgtcgtcctgctgaaactgg

SEQ ID NO: 1301418 - DNA, 25 bp, Homo sapien
ctgtgatggtccatggagtccccat

SEQ ID NO: 1301419 - DNA, 25 bp, Homo sapien
ctcccattatagcagtggccatgcc

SEQ ID NO: 1301420 - DNA, 25 bp, Homo sapien
cattatagcagtggccatgcccacc

SEQ ID NO: 1301421 - DNA, 25 bp, Homo sapien
tggccatgcccaccagaggagcagc

SEQ ID NO: 1301422 - DNA, 25 bp, Homo sapien
ccctcccattatagcagtggccatg

SEQ ID NO: 1301423 - DNA, 25 bp, Homo sapien
gatccagggggttctttagggcagc

SEQ ID NO: 1301424 - DNA, 25 bp, Homo sapien
caggtgaaatgggatccagggggtt

SEQ ID NO: 1301425 - DNA, 25 bp, Homo sapien
atccagggggttctttagggcagct

SEQ ID NO: 1301426 - DNA, 25 bp, Homo sapien
ctggaacaggtgaaatgggatccag

SEQ ID NO: 1301427 - DNA, 25 bp, Homo sapien
acaaaggagccccatccagtgttga

SEQ ID NO: 1301428 - DNA, 25 bp, Homo sapien
agaacaaaggagccccatccagtgt

SEQ ID NO: 1301429 - DNA, 25 bp, Homo sapien
tgttgactgaaggtccttaggatca

SEQ ID NO: 1301430 - DNA, 25 bp, Homo sapien
actgaaggtccttaggatcagggcc

SEQ ID NO: 1301431 - DNA, 25 bp, Homo sapien
tctcaggagccatgggtccacgtac

SEQ ID NO: 1301432 - DNA, 25 bp, Homo sapien
attcagggcccacggatgcaggcag

SEQ ID NO: 1301433 - DNA, 25 bp, Homo sapien
cctctatgtcgtgattcagggccca

SEQ ID NO: 1301434 - DNA, 25 bp, Homo sapien
cacgtaccagacaaattgagcagct

SEQ ID NO: 1301435 - DNA, 25 bp, Homo sapien
aatcctgaattattatcaccctctt

SEQ ID NO: 1301436 - DNA, 25 bp, Homo sapien
ttaaaatcctgaattattatcaccc

SEQ ID NO: 1301437 - DNA, 25 bp, Homo sapien
aaaatcctgaattattatcaccctc

SEQ ID NO: 1301438 - DNA, 25 bp, Homo sapien
ccttaaaatcctgaattattatcac

SEQ ID NO: 1301439 - DNA, 25 bp, Homo sapien
ggcccttgtcatcagacctagtata

SEQ ID NO: 1301440 - DNA, 25 bp, Homo sapien
cctagtatagtcatcaaataaatcc

SEQ ID NO: 1301441 - DNA, 25 bp, Homo sapien
cagacctagtatagtcatcaaataa

SEQ ID NO: 1301442 - DNA, 25 bp, Homo sapien
tgtcatcagacctagtatagtcatc

SEQ ID NO: 1301443 - DNA, 25 bp, Homo sapien
atgcggactcgctgttcctccttca

SEQ ID NO: 1301444 - DNA, 25 bp, Homo sapien
tggtgttgataaggaatgcggactc

SEQ ID NO: 1301445 - DNA, 25 bp, Homo sapien
caaaaattctccctcattgtactgc

SEQ ID NO: 1301446 - DNA, 25 bp, Homo sapien
cctcattgtactgcagggctctttc

SEQ ID NO: 1301447 - DNA, 25 bp, Homo sapien
tctgaaaaggtcgttagaggtctcc

SEQ ID NO: 1301448 - DNA, 25 bp, Homo sapien
ctggcaatagtttctgaaaaggtcg

SEQ ID NO: 1301449 - DNA, 25 bp, Homo sapien
ctctgtgagagagttgacagtgcca

SEQ ID NO: 1301450 - DNA, 25 bp, Homo sapien
gacagtgccagttactctttgaaca

SEQ ID NO: 1301451 - DNA, 25 bp, Homo sapien
gctggaggaagtagccgcctgcccc

SEQ ID NO: 1301452 - DNA, 25 bp, Homo sapien
agctggaggaagtagccgcctgccc

SEQ ID NO: 1301453 - DNA, 25 bp, Homo sapien
ccccatgcagggtgcaccttgctgt

SEQ ID NO: 1301454 - DNA, 25 bp, Homo sapien
cccatgcagggtgcaccttgctgtc

SEQ ID NO: 1301455 - DNA, 25 bp, Homo sapien
tctgcagccgctgcaatagcctgtg

SEQ ID NO: 1301456 - DNA, 25 bp, Homo sapien
gcctgtgatggcctccatcagggct

SEQ ID NO: 1301457 - DNA, 25 bp, Homo sapien
aggtagggcaggagaatctgatcca

SEQ ID NO: 1301458 - DNA, 25 bp, Homo sapien
ataccatatcggcactgttctcttc

SEQ ID NO: 1301459 - DNA, 25 bp, Homo sapien
tctcttccacggaccaggtagggca

SEQ ID NO: 1301460 - DNA, 25 bp, Homo sapien
gaagaaaccaaaataccatatcggc

SEQ ID NO: 1301461 - DNA, 25 bp, Homo sapien
tgactcttggagaatcctgtagatc

SEQ ID NO: 1301462 - DNA, 25 bp, Homo sapien
tagatctttgtgctgttgtcctgac

SEQ ID NO: 1301463 - DNA, 25 bp, Homo sapien
gctgttgtcctgactccaaaggtgc

SEQ ID NO: 1301464 - DNA, 25 bp, Homo sapien
tgactccaaaggtgcctgtcatctg

SEQ ID NO: 1301465 - DNA, 25 bp, Homo sapien
catttctctcgagggggtggaaagt

SEQ ID NO: 1301466 - DNA, 25 bp, Homo sapien
tgagttcatttctctcgagggggtg

SEQ ID NO: 1301467 - DNA, 25 bp, Homo sapien
ggtggaaagtcaagcccttgggctg

SEQ ID NO: 1301468 - DNA, 25 bp, Homo sapien
agtcaagcccttgggctgtaaaaag

SEQ ID NO: 1301469 - DNA, 25 bp, Homo sapien
ccccaggaactagatcaagggaact

SEQ ID NO: 1301470 - DNA, 25 bp, Homo sapien
ccctctgctctcccgtagcaaagtc

SEQ ID NO: 1301471 - DNA, 25 bp, Homo sapien
tctgctctcccgtagcaaagtccag

SEQ ID NO: 1301472 - DNA, 25 bp, Homo sapien
cccaggaactagatcaagggaactc

SEQ ID NO: 1301473 - DNA, 25 bp, Homo sapien
catgaacagccaaggacaccccagg

SEQ ID NO: 1301474 - DNA, 25 bp, Homo sapien
atgaacagccaaggacaccccaggc

SEQ ID NO: 1301475 - DNA, 25 bp, Homo sapien
tcatgaacagccaaggacaccccag

SEQ ID NO: 1301476 - DNA, 25 bp, Homo sapien
acatcccgtaatgcggccagcagaa

SEQ ID NO: 1301477 - DNA, 25 bp, Homo sapien
ctgtgctcacatcccgtaatgcggc

SEQ ID NO: 1301478 - DNA, 25 bp, Homo sapien
ggcctcacaacccaagctcagttgt

SEQ ID NO: 1301479 - DNA, 25 bp, Homo sapien
tgcggcccttagcagactgcatcct

SEQ ID NO: 1301480 - DNA, 25 bp, Homo sapien
gctgctgccctagaggctcgtctgc

SEQ ID NO: 1301481 - DNA, 25 bp, Homo sapien
cgtgctgctgccctagaggctcgtc

SEQ ID NO: 1301482 - DNA, 25 bp, Homo sapien
tgctgctgccctagaggctcgtctg

SEQ ID NO: 1301483 - DNA, 25 bp, Homo sapien
cacgtgctgctgccctagaggctcg

SEQ ID NO: 1301484 - DNA, 25 bp, Homo sapien
tgtgcttcggtgagccccagccatg

SEQ ID NO: 1301485 - DNA, 25 bp, Homo sapien
gtactctgtgcttcggtgagcccca

SEQ ID NO: 1301486 - DNA, 25 bp, Homo sapien
tctgtactctgtgcttcggtgagcc

SEQ ID NO: 1301487 - DNA, 25 bp, Homo sapien
catgcagagggatccacgctctggg

SEQ ID NO: 1301488 - DNA, 25 bp, Homo sapien
ggaccagccccatagggaggactta

SEQ ID NO: 1301489 - DNA, 25 bp, Homo sapien
accacagacctgaccagtgtgcaga

SEQ ID NO: 1301490 - DNA, 25 bp, Homo sapien
acagacctgaccagtgtgcagaggc

SEQ ID NO: 1301491 - DNA, 25 bp, Homo sapien
gggaggacttaggaccacagacctg

SEQ ID NO: 1301492 - DNA, 25 bp, Homo sapien
cactttcaggctgcctaatgtgcat

SEQ ID NO: 1301493 - DNA, 25 bp, Homo sapien
ctccacactttcaggctgcctaatg

SEQ ID NO: 1301494 - DNA, 25 bp, Homo sapien
gtctccacactttcaggctgcctaa

SEQ ID NO: 1301495 - DNA, 25 bp, Homo sapien
cacactttcaggctgcctaatgtgc

SEQ ID NO: 1301496 - DNA, 25 bp, Homo sapien
atccacagtggtctccagcaaggac

SEQ ID NO: 1301497 - DNA, 25 bp, Homo sapien
tatccccagaaggacagtccacaag

SEQ ID NO: 1301498 - DNA, 25 bp, Homo sapien
ccagcaggagggtacacgggcgtcc

SEQ ID NO: 1301499 - DNA, 25 bp, Homo sapien
agaaggacagtccacaagcatcccc

SEQ ID NO: 1301500 - DNA, 25 bp, Homo sapien
caggtatccccagaaggacagtcca

SEQ ID NO: 1301501 - DNA, 25 bp, Homo sapien
ggctgactctcccgtgtgctgcagg

SEQ ID NO: 1301502 - DNA, 25 bp, Homo sapien
gaggctgactctcccgtgtgctgca

SEQ ID NO: 1301503 - DNA, 25 bp, Homo sapien
ggagaggctgactctcccgtgtgct

SEQ ID NO: 1301504 - DNA, 25 bp, Homo sapien
agaggctgactctcccgtgtgctgc

SEQ ID NO: 1301505 - DNA, 25 bp, Homo sapien
gagtgaattactcccggtaatgcag

SEQ ID NO: 1301506 - DNA, 25 bp, Homo sapien
tggaagttggtgtgagtgaattact

SEQ ID NO: 1301507 - DNA, 25 bp, Homo sapien
aattactcccggtaatgcagatgtt

SEQ ID NO: 1301508 - DNA, 25 bp, Homo sapien
gaagttggtgtgagtgaattactcc

SEQ ID NO: 1301509 - DNA, 25 bp, Homo sapien
tgccagggtcagttcgggtttctct

SEQ ID NO: 1301510 - DNA, 25 bp, Homo sapien
tcagttcgggtttctctggaaaata

SEQ ID NO: 1301511 - DNA, 25 bp, Homo sapien
ctctgagcaacggttgtcctgccag

SEQ ID NO: 1301512 - DNA, 25 bp, Homo sapien
tggtctctgagcaacggttgtcctg

SEQ ID NO: 1301513 - DNA, 25 bp, Homo sapien
tgctatagtaacagcaccaacggag

SEQ ID NO: 1301514 - DNA, 25 bp, Homo sapien
agcaccaacggaggtgacagaggca

SEQ ID NO: 1301515 - DNA, 25 bp, Homo sapien
ggtggctgctatagtaacagcacca

SEQ ID NO: 1301516 - DNA, 25 bp, Homo sapien
gctgaggtggctgctatagtaacag

SEQ ID NO: 1301517 - DNA, 25 bp, Homo sapien
ctttgctgtagggtccaatcttgtc

SEQ ID NO: 1301518 - DNA, 25 bp, Homo sapien
tgctgtagggtccaatcttgtcctt

SEQ ID NO: 1301519 - DNA, 25 bp, Homo sapien
agcctccaccaaccctttgctgtag

SEQ ID NO: 1301520 - DNA, 25 bp, Homo sapien
gcctccaccaaccctttgctgtagg

SEQ ID NO: 1301521 - DNA, 25 bp, Homo sapien
ggccaggactgtcttctgccctctg

SEQ ID NO: 1301522 - DNA, 25 bp, Homo sapien
caggactgtcttctgccctctgtga

SEQ ID NO: 1301523 - DNA, 25 bp, Homo sapien
gccaggactgtcttctgccctctgt

SEQ ID NO: 1301524 - DNA, 25 bp, Homo sapien
ggactgtcttctgccctctgtgagc

SEQ ID NO: 1301525 - DNA, 25 bp, Homo sapien
acacttggaagaggatcctggtctc

SEQ ID NO: 1301526 - DNA, 25 bp, Homo sapien
ggcttctgcattcagagctgtggga

SEQ ID NO: 1301527 - DNA, 25 bp, Homo sapien
aagaggatcctggtctcctcggcct

SEQ ID NO: 1301528 - DNA, 25 bp, Homo sapien
tcggcctccaacctgcttggggctt

SEQ ID NO: 1301529 - DNA, 25 bp, Homo sapien
tgggccacagcaaagatggcgctca

SEQ ID NO: 1301530 - DNA, 25 bp, Homo sapien
ggctgctttggctacatcctgggcc

SEQ ID NO: 1301531 - DNA, 25 bp, Homo sapien
ggccacagcaaagatggcgctcaga

SEQ ID NO: 1301532 - DNA, 25 bp, Homo sapien
gctgctttggctacatcctgggcca

SEQ ID NO: 1301533 - DNA, 25 bp, Homo sapien
agccacggcctctaccaagactgtc

SEQ ID NO: 1301534 - DNA, 25 bp, Homo sapien
cacggcctctaccaagactgtctgt

SEQ ID NO: 1301535 - DNA, 25 bp, Homo sapien
ggcagccggatggaagccacggcct

SEQ ID NO: 1301536 - DNA, 25 bp, Homo sapien
ggcctctaccaagactgtctgtggc

SEQ ID NO: 1301537 - DNA, 25 bp, Homo sapien
gtttgctggattcctacagggtggg

SEQ ID NO: 1301538 - DNA, 25 bp, Homo sapien
gtgggggctggatgggctccattcc

SEQ ID NO: 1301539 - DNA, 25 bp, Homo sapien
tcagaccacacgtgacctggtgggg

SEQ ID NO: 1301540 - DNA, 25 bp, Homo sapien
cagaccacacgtgacctggtgggga

SEQ ID NO: 1301541 - DNA, 25 bp, Homo sapien
gaggctggtcctagccttgcgggga

SEQ ID NO: 1301542 - DNA, 25 bp, Homo sapien
gactggtacaggttgataaacccca

SEQ ID NO: 1301543 - DNA, 25 bp, Homo sapien
tggactgatccctcatcagctccat

SEQ ID NO: 1301544 - DNA, 25 bp, Homo sapien
tagccttgcggggacatgggcctgg

SEQ ID NO: 1301545 - DNA, 25 bp, Homo sapien
ctagattaattgtatggagagtgat

SEQ ID NO: 1301546 - DNA, 25 bp, Homo sapien
tgattatgtctaactagattaattg

SEQ ID NO: 1301547 - DNA, 25 bp, Homo sapien
cggattccccacaacttgattatgt

SEQ ID NO: 1301548 - DNA, 25 bp, Homo sapien
ggattccccacaacttgattatgtc

SEQ ID NO: 1301549 - DNA, 25 bp, Homo sapien
cacattgaaagtggaatctttgaga

SEQ ID NO: 1301550 - DNA, 25 bp, Homo sapien
tttgagaccaacagcgtcagctctc

SEQ ID NO: 1301551 - DNA, 25 bp, Homo sapien
ctgacccacattgaaagtggaatct

SEQ ID NO: 1301552 - DNA, 25 bp, Homo sapien
tgctgatgtcctggcacacgatggc

SEQ ID NO: 1301553 - DNA, 25 bp, Homo sapien
aatatctgccagtcccaattgacca

SEQ ID NO: 1301554 - DNA, 25 bp, Homo sapien
cctggattcacataactctgtcagg

SEQ ID NO: 1301555 - DNA, 25 bp, Homo sapien
ctggattcacataactctgtcaggg

SEQ ID NO: 1301556 - DNA, 25 bp, Homo sapien
attgaccagcccaatcaatttcacc

SEQ ID NO: 1301557 - DNA, 25 bp, Homo sapien
tccaggacacatacgggacgggact

SEQ ID NO: 1301558 - DNA, 25 bp, Homo sapien
tcagggcagagtcagagacactggc

SEQ ID NO: 1301559 - DNA, 25 bp, Homo sapien
cgttgtccaggacacatacgggacg

SEQ ID NO: 1301560 - DNA, 25 bp, Homo sapien
gggtttggcgttgtccaggacacat

SEQ ID NO: 1301561 - DNA, 25 bp, Homo sapien
cctcctggagggtcttgatgatgcc

SEQ ID NO: 1301562 - DNA, 25 bp, Homo sapien
atggtttatctttgaggatgctgcc

SEQ ID NO: 1301563 - DNA, 25 bp, Homo sapien
ggtggactggcaggagccagcctcc

SEQ ID NO: 1301564 - DNA, 25 bp, Homo sapien
gagccctgtggttcctgggctgacc

SEQ ID NO: 1301565 - DNA, 25 bp, Homo sapien
ccatgcggccgtgtctgccacgtgg

SEQ ID NO: 1301566 - DNA, 25 bp, Homo sapien
ggaagagaaatcagtccagcagccc

SEQ ID NO: 1301567 - DNA, 25 bp, Homo sapien
cggtacttcaccaagagcaaacctg

SEQ ID NO: 1301568 - DNA, 25 bp, Homo sapien
tctttggcggtgatcacggccggta

SEQ ID NO: 1301569 - DNA, 25 bp, Homo sapien
gtggcctttggccaaaagcaataca

SEQ ID NO: 1301570 - DNA, 25 bp, Homo sapien
agagagagttgtacttgctctttgc

SEQ ID NO: 1301571 - DNA, 25 bp, Homo sapien
tgctctgtaaatcccagagtggcct

SEQ ID NO: 1301572 - DNA, 25 bp, Homo sapien
gctctttgctctgtaaatcccagag

SEQ ID NO: 1301573 - DNA, 25 bp, Homo sapien
tcattaacctcatagtgcccagagc

SEQ ID NO: 1301574 - DNA, 25 bp, Homo sapien
cctccaggttttcattaacctcata

SEQ ID NO: 1301575 - DNA, 25 bp, Homo sapien
tcactcccgggtggctgactataaa

SEQ ID NO: 1301576 - DNA, 25 bp, Homo sapien
tccagtgtcactcccgggtggctga

SEQ ID NO: 1301577 - DNA, 25 bp, Homo sapien
cttgctccagtgtcactcccgggtg

SEQ ID NO: 1301578 - DNA, 25 bp, Homo sapien
ggtggctgactataaaggaaggaca

SEQ ID NO: 1301579 - DNA, 25 bp, Homo sapien
ttgtgtggcagcctctggccttgtt

SEQ ID NO: 1301580 - DNA, 25 bp, Homo sapien
tgtgtggcagcctctggccttgttt

SEQ ID NO: 1301581 - DNA, 25 bp, Homo sapien
gtttgtgtggcagcctctggccttg

SEQ ID NO: 1301582 - DNA, 25 bp, Homo sapien
gtggcagcctctggccttgtttacc

SEQ ID NO: 1301583 - DNA, 25 bp, Homo sapien
cgtctctgggttaccaggatcaact

SEQ ID NO: 1301584 - DNA, 25 bp, Homo sapien
ttacgtctctgggttaccaggatca

SEQ ID NO: 1301585 - DNA, 25 bp, Homo sapien
tgtttacgtctctgggttaccagga

SEQ ID NO: 1301586 - DNA, 25 bp, Homo sapien
tctgggttaccaggatcaacttccc

SEQ ID NO: 1301587 - DNA, 25 bp, Homo sapien
tcttcctcctttgtggctgagacaa

SEQ ID NO: 1301588 - DNA, 25 bp, Homo sapien
tcacgtcccaggtgctctttcttcc

SEQ ID NO: 1301589 - DNA, 25 bp, Homo sapien
tttgtggctgagacaatgagggctt

SEQ ID NO: 1301590 - DNA, 25 bp, Homo sapien
ctgagacaatgagggcttggtgcct

SEQ ID NO: 1301591 - DNA, 25 bp, Homo sapien
catggaatgaaggacccacgatgca

SEQ ID NO: 1301592 - DNA, 25 bp, Homo sapien
caaagcatgaatacttctgccaggg

SEQ ID NO: 1301593 - DNA, 25 bp, Homo sapien
gaacagcaatttaaatgcaaccaaa

SEQ ID NO: 1301594 - DNA, 25 bp, Homo sapien
cacaaaagggtgcattagagaggga

SEQ ID NO: 1301595 - DNA, 25 bp, Homo sapien
agggcagatctgagtcacagtcaat

SEQ ID NO: 1301596 - DNA, 25 bp, Homo sapien
agatctgagtcacagtcaatgacag

SEQ ID NO: 1301597 - DNA, 25 bp, Homo sapien
ttcttgtaatgccttgtgcttggag

SEQ ID NO: 1301598 - DNA, 25 bp, Homo sapien
tggggtgcagattggtgtgaagact

SEQ ID NO: 1301599 - DNA, 25 bp, Homo sapien
tccagaatcccaaatgtttcagcca

SEQ ID NO: 1301600 - DNA, 25 bp, Homo sapien
cacagctctcattcgctctgcctgt

SEQ ID NO: 1301601 - DNA, 25 bp, Homo sapien
gacagtgaagtctggacccatggag

SEQ ID NO: 1301602 - DNA, 25 bp, Homo sapien
gggtctagagtgaccttttagacag

SEQ ID NO: 1301603 - DNA, 25 bp, Homo sapien
tgggaaacacactcaagccatagca

SEQ ID NO: 1301604 - DNA, 25 bp, Homo sapien
gtcataatgtggcatagggcatcac

SEQ ID NO: 1301605 - DNA, 25 bp, Homo sapien
agtagacccactcccaccataatga

SEQ ID NO: 1301606 - DNA, 25 bp, Homo sapien
cacattcatccattaatcactgaaa

SEQ ID NO: 1301607 - DNA, 25 bp, Homo sapien
tctccatgtgcatgaaaattgccca

SEQ ID NO: 1301608 - DNA, 25 bp, Homo sapien
tctcctccacccgttaacgatggga

SEQ ID NO: 1301609 - DNA, 25 bp, Homo sapien
tttgagaatcccatagaaatcgttc

SEQ ID NO: 1301610 - DNA, 25 bp, Homo sapien
aggtctggcctgaactcagtctgca

SEQ ID NO: 1301611 - DNA, 25 bp, Homo sapien
cttctcctctagggagaacactgga

SEQ ID NO: 1301612 - DNA, 25 bp, Homo sapien
tctcctctagggagaacactggagt

SEQ ID NO: 1301613 - DNA, 25 bp, Homo sapien
ttctcctctagggagaacactggag

SEQ ID NO: 1301614 - DNA, 25 bp, Homo sapien
ctcctctccatgaacaagcttgttc

SEQ ID NO: 1301615 - DNA, 25 bp, Homo sapien
ttgtcagcttgggcgagcccttctg

SEQ ID NO: 1301616 - DNA, 25 bp, Homo sapien
ctttgtcagcttgggcgagcccttc

SEQ ID NO: 1301617 - DNA, 25 bp, Homo sapien
gtcagcttgggcgagcccttctgct

SEQ ID NO: 1301618 - DNA, 25 bp, Homo sapien
gcactgagtttgactcctcggctac

SEQ ID NO: 1301619 - DNA, 25 bp, Homo sapien
ggcactgagtttgactcctcggcta

SEQ ID NO: 1301620 - DNA, 25 bp, Homo sapien
gggcactgagtttgactcctcggct

SEQ ID NO: 1301621 - DNA, 25 bp, Homo sapien
tttcacttcctcagcaaggattgta

SEQ ID NO: 1301622 - DNA, 25 bp, Homo sapien
gctggacgtggcctgcacggccgct

SEQ ID NO: 1301623 - DNA, 25 bp, Homo sapien
tcctcagcaaggattgtaattcctc

SEQ ID NO: 1301624 - DNA, 25 bp, Homo sapien
tgtgctcggagcatcctgttcccca

SEQ ID NO: 1301625 - DNA, 25 bp, Homo sapien
gctggaaactgggtccatgcgtttg

SEQ ID NO: 1301626 - DNA, 25 bp, Homo sapien
ctgctggaaactgggtccatgcgtt

SEQ ID NO: 1301627 - DNA, 25 bp, Homo sapien
tggaaactgggtccatgcgtttggc

SEQ ID NO: 1301628 - DNA, 25 bp, Homo sapien
ctggaaactgggtccatgcgtttgg

SEQ ID NO: 1301629 - DNA, 25 bp, Homo sapien
gcagactgcatcatagcgggtagga

SEQ ID NO: 1301630 - DNA, 25 bp, Homo sapien
gacaggggtccacgacagggtgaag

SEQ ID NO: 1301631 - DNA, 25 bp, Homo sapien
gagccagaatctcctgccgaggggc

SEQ ID NO: 1301632 - DNA, 25 bp, Homo sapien
gactgcatcatagcgggtaggacag

SEQ ID NO: 1301633 - DNA, 25 bp, Homo sapien
ggccaggcgggggtgggcagagata

SEQ ID NO: 1301634 - DNA, 25 bp, Homo sapien
gcgggggtgggcagagataggcccc

SEQ ID NO: 1301635 - DNA, 25 bp, Homo sapien
ccaggcgggggtgggcagagatagg

SEQ ID NO: 1301636 - DNA, 25 bp, Homo sapien
tgggccaggcgggggtgggcagaga

SEQ ID NO: 1301637 - DNA, 25 bp, Homo sapien
catgaagagggcttaggcctgaagc

SEQ ID NO: 1301638 - DNA, 25 bp, Homo sapien
catttgaagtgtagggcagtgggta

SEQ ID NO: 1301639 - DNA, 25 bp, Homo sapien
ttgctgggagcaaatgctgactggt

SEQ ID NO: 1301640 - DNA, 25 bp, Homo sapien
tggtgccagactcagcatacagctt

SEQ ID NO: 1301641 - DNA, 25 bp, Homo sapien
agctcctccgataggccacgcaagt

SEQ ID NO: 1301642 - DNA, 25 bp, Homo sapien
tctgtcgggcacgtaggtccagcct

SEQ ID NO: 1301643 - DNA, 25 bp, Homo sapien
tcttgccgatattgcccgaccgcat

SEQ ID NO: 1301644 - DNA, 25 bp, Homo sapien
ataggccacgcaagtcccctggtct

SEQ ID NO: 1301645 - DNA, 25 bp, Homo sapien
caatttccaggttcagagccagaga

SEQ ID NO: 1301646 - DNA, 25 bp, Homo sapien
tcagagccagagagtaggcagacag

SEQ ID NO: 1301647 - DNA, 25 bp, Homo sapien
taaggagagaaatgggatccaattt

SEQ ID NO: 1301648 - DNA, 25 bp, Homo sapien
agagaaatgggatccaatttccagg

SEQ ID NO: 1301649 - DNA, 25 bp, Homo sapien
tgactgggaataggaggtggcagtg

SEQ ID NO: 1301650 - DNA, 25 bp, Homo sapien
agatgactgggaataggaggtggca

SEQ ID NO: 1301651 - DNA, 25 bp, Homo sapien
ctggagatgactgggaataggaggt

SEQ ID NO: 1301652 - DNA, 25 bp, Homo sapien
gggatgggagatgcatgtgactcag

SEQ ID NO: 1301653 - DNA, 25 bp, Homo sapien
gtctgggtagtcacggtgccctttg

SEQ ID NO: 1301654 - DNA, 25 bp, Homo sapien
tgggacatagggcagtgctgactta

SEQ ID NO: 1301655 - DNA, 25 bp, Homo sapien
gggacatagggcagtgctgacttac

SEQ ID NO: 1301656 - DNA, 25 bp, Homo sapien
ctgagacataggccagtgctcattt

SEQ ID NO: 1301657 - DNA, 25 bp, Homo sapien
tgagacataggccagtgctcattta

SEQ ID NO: 1301658 - DNA, 25 bp, Homo sapien
ctggaacacagcagtgctgatttac

SEQ ID NO: 1301659 - DNA, 25 bp, Homo sapien
tttacctgggatacagggcactgac

SEQ ID NO: 1301660 - DNA, 25 bp, Homo sapien
gggcactgacaattcacctggacca

SEQ ID NO: 1301661 - DNA, 25 bp, Homo sapien
ggaccacagggcagtgctcatttac

SEQ ID NO: 1301662 - DNA, 25 bp, Homo sapien
cacagggcagtgctgatttacctgg

SEQ ID NO: 1301663 - DNA, 25 bp, Homo sapien
gggccacagggcagtgctgatttac

SEQ ID NO: 1301664 - DNA, 25 bp, Homo sapien
tgggccacagggcagtgctgattta

SEQ ID NO: 1301665 - DNA, 25 bp, Homo sapien
ctgggccacagggcagtgctgattt

SEQ ID NO: 1301666 - DNA, 25 bp, Homo sapien
acagggcactgatgattcacctgga

SEQ ID NO: 1301667 - DNA, 25 bp, Homo sapien
gatacagggcactgatgattcacct

SEQ ID NO: 1301668 - DNA, 25 bp, Homo sapien
tgatgattcacctggaccacagggc

SEQ ID NO: 1301669 - DNA, 25 bp, Homo sapien
tgggatacagggcactgatgattca

SEQ ID NO: 1301670 - DNA, 25 bp, Homo sapien
gctcatttacctgggacacaggtct

SEQ ID NO: 1301671 - DNA, 25 bp, Homo sapien
gacacaggtctgtattgatttacct

SEQ ID NO: 1301672 - DNA, 25 bp, Homo sapien
aggtctgtattgatttacctgggcc

SEQ ID NO: 1301673 - DNA, 25 bp, Homo sapien
cctgggacacaggtctgtattgatt

SEQ ID NO: 1301674 - DNA, 25 bp, Homo sapien
ctggggcacagggcactgctgattt

SEQ ID NO: 1301675 - DNA, 25 bp, Homo sapien
ggggcacagggcactgctgatttcc

SEQ ID NO: 1301676 - DNA, 25 bp, Homo sapien
tggggcacagggcactgctgatttc

SEQ ID NO: 1301677 - DNA, 25 bp, Homo sapien
acagggcactgctcttttacttggg

SEQ ID NO: 1301678 - DNA, 25 bp, Homo sapien
gctcttttacttgggccacatggca

SEQ ID NO: 1301679 - DNA, 25 bp, Homo sapien
gggccacatggcagtgccaactaac

SEQ ID NO: 1301680 - DNA, 25 bp, Homo sapien
gcactgctcttttacttgggccaca

SEQ ID NO: 1301681 - DNA, 25 bp, Homo sapien
aagctgaccatcctgctccagccct

SEQ ID NO: 1301682 - DNA, 25 bp, Homo sapien
gggagtacctgagtgtgaggtgcct

SEQ ID NO: 1301683 - DNA, 25 bp, Homo sapien
tctcaggattcttgggcataatcaa

SEQ ID NO: 1301684 - DNA, 25 bp, Homo sapien
taatcaagtacaatgggatgaagcc

SEQ ID NO: 1301685 - DNA, 25 bp, Homo sapien
gcctcttgaggatagtgacagccat

SEQ ID NO: 1301686 - DNA, 25 bp, Homo sapien
cacggcctcttccaacgtggcctct

SEQ ID NO: 1301687 - DNA, 25 bp, Homo sapien
gtgaggcctggttatcgcaggtccc

SEQ ID NO: 1301688 - DNA, 25 bp, Homo sapien
tggttatcgcaggtccccacggcct

SEQ ID NO: 1301689 - DNA, 25 bp, Homo sapien
ttgcttgcagctgtcggcattttcc

SEQ ID NO: 1301690 - DNA, 25 bp, Homo sapien
gcttgcagctgtcggcattttccaa

SEQ ID NO: 1301691 - DNA, 25 bp, Homo sapien
cagctgtcggcattttccaatttca

SEQ ID NO: 1301692 - DNA, 25 bp, Homo sapien
tgcagctgtcggcattttccaattt

SEQ ID NO: 1301693 - DNA, 25 bp, Homo sapien
ttcctccagcctttggatcacctcc

SEQ ID NO: 1301694 - DNA, 25 bp, Homo sapien
ctgcctgggcctctttgtgcctggc

SEQ ID NO: 1301695 - DNA, 25 bp, Homo sapien
ggcttcctccagcctttggatcacc

SEQ ID NO: 1301696 - DNA, 25 bp, Homo sapien
tgcctgggcctctttgtgcctggct

SEQ ID NO: 1301697 - DNA, 25 bp, Homo sapien
atggtgatgttgacttttactggtg

SEQ ID NO: 1301698 - DNA, 25 bp, Homo sapien
tggtgatgttgacttttactggtga

SEQ ID NO: 1301699 - DNA, 25 bp, Homo sapien
cagaggccatttgcttcatggtgat

SEQ ID NO: 1301700 - DNA, 25 bp, Homo sapien
ggtgatgttgacttttactggtgaa

SEQ ID NO: 1301701 - DNA, 25 bp, Homo sapien
cactgatggtccacatgggatctct

SEQ ID NO: 1301702 - DNA, 25 bp, Homo sapien
gagacactgatggtccacatgggat

SEQ ID NO: 1301703 - DNA, 25 bp, Homo sapien
gatggtccacatgggatctctaagc

SEQ ID NO: 1301704 - DNA, 25 bp, Homo sapien
gacactgatggtccacatgggatct

SEQ ID NO: 1301705 - DNA, 25 bp, Homo sapien
tgaaacccccagcttttcccgctga

SEQ ID NO: 1301706 - DNA, 25 bp, Homo sapien
catctgtaagatgtaaaatctgccc

SEQ ID NO: 1301707 - DNA, 25 bp, Homo sapien
gcatgcagtggagacagtccctttt

SEQ ID NO: 1301708 - DNA, 25 bp, Homo sapien
agtggagacagtcccttttagagga

SEQ ID NO: 1301709 - DNA, 25 bp, Homo sapien
aggcgcccattagggaacaaatgag

SEQ ID NO: 1301710 - DNA, 25 bp, Homo sapien
tcagaggcgcccattagggaacaaa

SEQ ID NO: 1301711 - DNA, 25 bp, Homo sapien
cagaggcgcccattagggaacaaat

SEQ ID NO: 1301712 - DNA, 25 bp, Homo sapien
gctggctcaggatgcacggaggaaa

SEQ ID NO: 1301713 - DNA, 25 bp, Homo sapien
cagaggagcttgcacagcccatgaa

SEQ ID NO: 1301714 - DNA, 25 bp, Homo sapien
tgctgcaggtgccacgctctggatg

SEQ ID NO: 1301715 - DNA, 25 bp, Homo sapien
cagccccagaggagcttgcacagcc

SEQ ID NO: 1301716 - DNA, 25 bp, Homo sapien
caggtgccacgctctggatgtctcc

SEQ ID NO: 1301717 - DNA, 25 bp, Homo sapien
gccttcctttgcacggagtctgggc

SEQ ID NO: 1301718 - DNA, 25 bp, Homo sapien
ccttcctttgcacggagtctgggcc

SEQ ID NO: 1301719 - DNA, 25 bp, Homo sapien
catgagtggtaatggcaggagcagc

SEQ ID NO: 1301720 - DNA, 25 bp, Homo sapien
caccagctgcagtagagaggcatga

SEQ ID NO: 1301721 - DNA, 25 bp, Homo sapien
agtccccaaggccatcaactgcacc

SEQ ID NO: 1301722 - DNA, 25 bp, Homo sapien
ttccacagtgtctatgtaccatgtt

SEQ ID NO: 1301723 - DNA, 25 bp, Homo sapien
aatgtcagcaccgatcctctgtgag

SEQ ID NO: 1301724 - DNA, 25 bp, Homo sapien
accgatcctctgtgagatgctcctc

SEQ ID NO: 1301725 - DNA, 25 bp, Homo sapien
ctgcggatgacaatgtcagcaccga

SEQ ID NO: 1301726 - DNA, 25 bp, Homo sapien
tcctctctgcatttgccaggatggg

SEQ ID NO: 1301727 - DNA, 25 bp, Homo sapien
ggagggggcgcgtgggacaatctag

SEQ ID NO: 1301728 - DNA, 25 bp, Homo sapien
gggcgcgtgggacaatctaggcaaa

SEQ ID NO: 1301729 - DNA, 25 bp, Homo sapien
aatctaggcaaagcaatggcatggg

SEQ ID NO: 1301730 - DNA, 25 bp, Homo sapien
tgggacaatctaggcaaagcaatgg

SEQ ID NO: 1301731 - DNA, 25 bp, Homo sapien
gcagcttgcatggttgtcttggcag

SEQ ID NO: 1301732 - DNA, 25 bp, Homo sapien
aggtagcaacagtcccagaaccagc

SEQ ID NO: 1301733 - DNA, 25 bp, Homo sapien
tctgcagaggtagcaacagtcccag

SEQ ID NO: 1301734 - DNA, 25 bp, Homo sapien
ggcagcttgcatggttgtcttggca

SEQ ID NO: 1301735 - DNA, 25 bp, Homo sapien
tcaaggttcatagacaaaatccact

SEQ ID NO: 1301736 - DNA, 25 bp, Homo sapien
aaaggtctttctcgaagagcaccag

SEQ ID NO: 1301737 - DNA, 25 bp, Homo sapien
ctagaaaaggtctttctcgaagagc

SEQ ID NO: 1301738 - DNA, 25 bp, Homo sapien
gaaaaggtctttctcgaagagcacc

SEQ ID NO: 1301739 - DNA, 25 bp, Homo sapien
ggtctttctcgaagagcaccagctg

SEQ ID NO: 1301740 - DNA, 25 bp, Homo sapien
agccatcaatccctggcggggagga

SEQ ID NO: 1301741 - DNA, 25 bp, Homo sapien
agggagcccagctggcccgtctctg

SEQ ID NO: 1301742 - DNA, 25 bp, Homo sapien
gccaggacagggagcccagctggcc

SEQ ID NO: 1301743 - DNA, 25 bp, Homo sapien
gacagggagcccagctggcccgtct

SEQ ID NO: 1301744 - DNA, 25 bp, Homo sapien
atgacaacagtgacagcagccacag

SEQ ID NO: 1301745 - DNA, 25 bp, Homo sapien
gggtcagcgccaagccaactgttag

SEQ ID NO: 1301746 - DNA, 25 bp, Homo sapien
ccaactgttagggtcagagctggaa

SEQ ID NO: 1301747 - DNA, 25 bp, Homo sapien
ggaatcagcaccaagccaactggca

SEQ ID NO: 1301748 - DNA, 25 bp, Homo sapien
tccctgaagcaagggtcagcacaaa

SEQ ID NO: 1301749 - DNA, 25 bp, Homo sapien
ccaagttgatgctgcaaccacaaga

SEQ ID NO: 1301750 - DNA, 25 bp, Homo sapien
cacgacgcgttctgctaaatgggaa

SEQ ID NO: 1301751 - DNA, 25 bp, Homo sapien
cattctggttgggagacacgacgcg

SEQ ID NO: 1301752 - DNA, 25 bp, Homo sapien
aatacatcacccaagttgatgctgc

SEQ ID NO: 1301753 - DNA, 25 bp, Homo sapien
ggttccattctgattgtccaggcag

SEQ ID NO: 1301754 - DNA, 25 bp, Homo sapien
aaatgcagggtttgttccacactgg

SEQ ID NO: 1301755 - DNA, 25 bp, Homo sapien
agcagagcagccagacgttgttccc

SEQ ID NO: 1301756 - DNA, 25 bp, Homo sapien
cagatggcctatggcctctggttcc

SEQ ID NO: 1301757 - DNA, 25 bp, Homo sapien
tcatcccagactctgatcatcagcg

SEQ ID NO: 1301758 - DNA, 25 bp, Homo sapien
caaggaaggggaacatagtcacgga

SEQ ID NO: 1301759 - DNA, 25 bp, Homo sapien
tggaaggagctagaaccctcgtcgt

SEQ ID NO: 1301760 - DNA, 25 bp, Homo sapien
gatcatcagcgctttcagagaaggg

SEQ ID NO: 1301761 - DNA, 25 bp, Homo sapien
actggcccaaggtgaaatgctctaa

SEQ ID NO: 1301762 - DNA, 25 bp, Homo sapien
gaaatgtcctcaatgatgaccccag

SEQ ID NO: 1301763 - DNA, 25 bp, Homo sapien
tgagtgcaagcttcttacgcgacag

SEQ ID NO: 1301764 - DNA, 25 bp, Homo sapien
gtaaacggcagaggaggaacgtctc

SEQ ID NO: 1301765 - DNA, 25 bp, Homo sapien
tcgccctcaccagtgagctgtagtg

SEQ ID NO: 1301766 - DNA, 25 bp, Homo sapien
gtgagctgtagtggacactcctgcc

SEQ ID NO: 1301767 - DNA, 25 bp, Homo sapien
aaccagacgagtggttgctgttcca

SEQ ID NO: 1301768 - DNA, 25 bp, Homo sapien
aaactccaaaccagacgagtggttg

SEQ ID NO: 1301769 - DNA, 25 bp, Homo sapien
aaggatcgattgtggggtaatggga

SEQ ID NO: 1301770 - DNA, 25 bp, Homo sapien
caaggatcgattgtggggtaatggg

SEQ ID NO: 1301771 - DNA, 25 bp, Homo sapien
cagctgagtgagcacgctcacgctt

SEQ ID NO: 1301772 - DNA, 25 bp, Homo sapien
cccctggctcaggacgccagggaag

SEQ ID NO: 1301773 - DNA, 25 bp, Homo sapien
gaagatggcgctctgccctcgggtc

SEQ ID NO: 1301774 - DNA, 25 bp, Homo sapien
agtgagcacgctcacgcttcgcggc

SEQ ID NO: 1301775 - DNA, 25 bp, Homo sapien
ccacagagagccacaacccacagat

SEQ ID NO: 1301776 - DNA, 25 bp, Homo sapien
agagagccacaacccacagatggag

SEQ ID NO: 1301777 - DNA, 25 bp, Homo sapien
gagccacaacccacagatggagcat

SEQ ID NO: 1301778 - DNA, 25 bp, Homo sapien
cagagagccacaacccacagatgga

SEQ ID NO: 1301779 - DNA, 25 bp, Homo sapien
gctccagccccatgaaatcaagtgg

SEQ ID NO: 1301780 - DNA, 25 bp, Homo sapien
aagaccttgactccctgtcattttg

SEQ ID NO: 1301781 - DNA, 25 bp, Homo sapien
agctgaagcaaagggcatgaagacc

SEQ ID NO: 1301782 - DNA, 25 bp, Homo sapien
cagccccatgaaatcaagtggataa

SEQ ID NO: 1301783 - DNA, 25 bp, Homo sapien
ggctcctagacagggatggaacgca

SEQ ID NO: 1301784 - DNA, 25 bp, Homo sapien
tctgggatcctccatggctcctaga

SEQ ID NO: 1301785 - DNA, 25 bp, Homo sapien
cctccctttcgcagctctctgcttg

SEQ ID NO: 1301786 - DNA, 25 bp, Homo sapien
ctgcttgcactggaacctctcaggg

SEQ ID NO: 1301787 - DNA, 25 bp, Homo sapien
tgcagacaactctgtggccaggaga

SEQ ID NO: 1301788 - DNA, 25 bp, Homo sapien
cagacaactctgtggccaggagaga

SEQ ID NO: 1301789 - DNA, 25 bp, Homo sapien
agacaactctgtggccaggagagat

SEQ ID NO: 1301790 - DNA, 25 bp, Homo sapien
ctgcagacaactctgtggccaggag

SEQ ID NO: 1301791 - DNA, 25 bp, Homo sapien
ctgccactgggatcttctcaatggg

SEQ ID NO: 1301792 - DNA, 25 bp, Homo sapien
tgctgccactgggatcttctcaatg

SEQ ID NO: 1301793 - DNA, 25 bp, Homo sapien
cccagggtggtgagtaagggccgca

SEQ ID NO: 1301794 - DNA, 25 bp, Homo sapien
agtaagggccgcatcgctgctgcca

SEQ ID NO: 1301795 - DNA, 25 bp, Homo sapien
caccataacacactcagccccactc

SEQ ID NO: 1301796 - DNA, 25 bp, Homo sapien
ccccaccataacacactcagcccca

SEQ ID NO: 1301797 - DNA, 25 bp, Homo sapien
gcagcgccccccaccataacacact

SEQ ID NO: 1301798 - DNA, 25 bp, Homo sapien
cgccccccaccataacacactcagc

SEQ ID NO: 1301799 - DNA, 25 bp, Homo sapien
ggaggcaactcctgggctgcgcttc

SEQ ID NO: 1301800 - DNA, 25 bp, Homo sapien
aggcaactcctgggctgcgcttccc

SEQ ID NO: 1301801 - DNA, 25 bp, Homo sapien
gaggcaactcctgggctgcgcttcc

SEQ ID NO: 1301802 - DNA, 25 bp, Homo sapien
tggaggcaactcctgggctgcgctt

SEQ ID NO: 1301803 - DNA, 25 bp, Homo sapien
aggacttcggctcaaggcccagaga

SEQ ID NO: 1301804 - DNA, 25 bp, Homo sapien
ccggctgtcgctggccagacttgaa

SEQ ID NO: 1301805 - DNA, 25 bp, Homo sapien
ggtgactggcagattaactcctcca

SEQ ID NO: 1301806 - DNA, 25 bp, Homo sapien
ggcagagggcacctatcaatccgct

SEQ ID NO: 1301807 - DNA, 25 bp, Homo sapien
catccggcacagagtacagggctca

SEQ ID NO: 1301808 - DNA, 25 bp, Homo sapien
catacagtgggccagcaacaaacgt

SEQ ID NO: 1301809 - DNA, 25 bp, Homo sapien
cacttcctagatgcatggccttggg

SEQ ID NO: 1301810 - DNA, 25 bp, Homo sapien
catgggcatacattgcaggaagaac

SEQ ID NO: 1301811 - DNA, 25 bp, Homo sapien
tgttaatcaaacctagagcagagag

SEQ ID NO: 1301812 - DNA, 25 bp, Homo sapien
gaacgaggtcctattcccaggcagg

SEQ ID NO: 1301813 - DNA, 25 bp, Homo sapien
ttcatcagagcctggtgacaaggtc

SEQ ID NO: 1301814 - DNA, 25 bp, Homo sapien
ttcaagaggacctggagtagccgtg

SEQ ID NO: 1301815 - DNA, 25 bp, Homo sapien
tgatgtagctcttgggtaccgttcg

SEQ ID NO: 1301816 - DNA, 25 bp, Homo sapien
gaagatctttcggtgtggtctgagc

SEQ ID NO: 1301817 - DNA, 25 bp, Homo sapien
gcctctttgaactgcctccgaggaa

SEQ ID NO: 1301818 - DNA, 25 bp, Homo sapien
gctgtgccccagttaagtcgcgctt

SEQ ID NO: 1301819 - DNA, 25 bp, Homo sapien
gaataggttcagaaaatcaccaaag

SEQ ID NO: 1301820 - DNA, 25 bp, Homo sapien
ctagtagtaacactaaaaatgctcc

SEQ ID NO: 1301821 - DNA, 25 bp, Homo sapien
tgctccattaaacaagaataggttc

SEQ ID NO: 1301822 - DNA, 25 bp, Homo sapien
actaaaaatgctccattaaacaaga

SEQ ID NO: 1301823 - DNA, 25 bp, Homo sapien
tggccgagatctcagggtgtgacct

SEQ ID NO: 1301824 - DNA, 25 bp, Homo sapien
gagtcctatctggtgtcattgccct

SEQ ID NO: 1301825 - DNA, 25 bp, Homo sapien
gagatggagattccggagcagcact

SEQ ID NO: 1301826 - DNA, 25 bp, Homo sapien
cccaggtatcaagaggaggcacaaa

SEQ ID NO: 1301827 - DNA, 25 bp, Homo sapien
aaatggtaaagctacggcggacacg

SEQ ID NO: 1301828 - DNA, 25 bp, Homo sapien
tataaaaatgcaaacgcagtccctc

SEQ ID NO: 1301829 - DNA, 25 bp, Homo sapien
tcaccggagaatagagaaatcagta

SEQ ID NO: 1301830 - DNA, 25 bp, Homo sapien
cattacacgctctcaataggcacac

SEQ ID NO: 1301831 - DNA, 25 bp, Homo sapien
atggccagccgcttactcacagctt

SEQ ID NO: 1301832 - DNA, 25 bp, Homo sapien
gatggccagccgcttactcacagct

SEQ ID NO: 1301833 - DNA, 25 bp, Homo sapien
tccaggatggccagccgcttactca

SEQ ID NO: 1301834 - DNA, 25 bp, Homo sapien
aggatggccagccgcttactcacag

SEQ ID NO: 1301835 - DNA, 25 bp, Homo sapien
ggttccccacctagtcctggctgag

SEQ ID NO: 1301836 - DNA, 25 bp, Homo sapien
acagccagttactgtgagccacgag

SEQ ID NO: 1301837 - DNA, 25 bp, Homo sapien
tgtcctcagaatggtgctttccaaa

SEQ ID NO: 1301838 - DNA, 25 bp, Homo sapien
cagatttagacctgctgggttcccc

SEQ ID NO: 1301839 - DNA, 25 bp, Homo sapien
cctccactttggcttggaatttcac

SEQ ID NO: 1301840 - DNA, 25 bp, Homo sapien
ccctccactttggcttggaatttca

SEQ ID NO: 1301841 - DNA, 25 bp, Homo sapien
gggactcgcaggcacacgggtcttc

SEQ ID NO: 1301842 - DNA, 25 bp, Homo sapien
ggactcgcaggcacacgggtcttcc

SEQ ID NO: 1301843 - DNA, 25 bp, Homo sapien
gactcgcaggcacacgggtcttcct

SEQ ID NO: 1301844 - DNA, 25 bp, Homo sapien
cagggactcgcaggcacacgggtct

SEQ ID NO: 1301845 - DNA, 25 bp, Homo sapien
gtcttgaagtcagccgtgtagaagt

SEQ ID NO: 1301846 - DNA, 25 bp, Homo sapien
cagccgtgtagaagtagtgctctgc

SEQ ID NO: 1301847 - DNA, 25 bp, Homo sapien
gcctatctggttgatggtcttgaag

SEQ ID NO: 1301848 - DNA, 25 bp, Homo sapien
gcaacttcttgcctatctggttgat

SEQ ID NO: 1301849 - DNA, 25 bp, Homo sapien
gccaggaggaacaggagaagtaagg

SEQ ID NO: 1301850 - DNA, 25 bp, Homo sapien
tgccaggaggaacaggagaagtaag

SEQ ID NO: 1301851 - DNA, 25 bp, Homo sapien
ctgccaggaggaacaggagaagtaa

SEQ ID NO: 1301852 - DNA, 25 bp, Homo sapien
tgtaggacatattccgcacagccgc

SEQ ID NO: 1301853 - DNA, 25 bp, Homo sapien
cagcgtatccacgatctgactgatg

SEQ ID NO: 1301854 - DNA, 25 bp, Homo sapien
gcacagagcttgagtactgcaccag

SEQ ID NO: 1301855 - DNA, 25 bp, Homo sapien
gagcagccccagtcattgtgccctt

SEQ ID NO: 1301856 - DNA, 25 bp, Homo sapien
accaggtcagtggccgagctgccac

SEQ ID NO: 1301857 - DNA, 25 bp, Homo sapien
aagaccaggtcagtggccgagctgc

SEQ ID NO: 1301858 - DNA, 25 bp, Homo sapien
ttggatccgtcaatgaggaagacca

SEQ ID NO: 1301859 - DNA, 25 bp, Homo sapien
cttggatccgtcaatgaggaagacc

SEQ ID NO: 1301860 - DNA, 25 bp, Homo sapien
tggcaggcgcaggtgtaggaaccgg

SEQ ID NO: 1301861 - DNA, 25 bp, Homo sapien
ttgcaggtcttgccgtcgctgttca

SEQ ID NO: 1301862 - DNA, 25 bp, Homo sapien
gctgttcagagtgaagccctcgtgg

SEQ ID NO: 1301863 - DNA, 25 bp, Homo sapien
ccgggggagctgatgcacacctgct

SEQ ID NO: 1301864 - DNA, 25 bp, Homo sapien
atggcgaacagctcgacgccgctgg

SEQ ID NO: 1301865 - DNA, 25 bp, Homo sapien
gctgtagctctccacgtaatcgacg

SEQ ID NO: 1301866 - DNA, 25 bp, Homo sapien
taatcgacgtgttcgtcctgcggct

SEQ ID NO: 1301867 - DNA, 25 bp, Homo sapien
cctggacagcttctcgatgacgctg

SEQ ID NO: 1301868 - DNA, 25 bp, Homo sapien
cacgcggggcggtgtgacaccgggc

SEQ ID NO: 1301869 - DNA, 25 bp, Homo sapien
ccggaagcccacgggactgtccagg

SEQ ID NO: 1301870 - DNA, 25 bp, Homo sapien
ctgcgacacgcggggcggtgtgaca

SEQ ID NO: 1301871 - DNA, 25 bp, Homo sapien
cccggaagcccacgggactgtccag

SEQ ID NO: 1301872 - DNA, 25 bp, Homo sapien
gctggccgaagaggagacccgtttc

SEQ ID NO: 1301873 - DNA, 25 bp, Homo sapien
tgtgatgccccatcgccaaattggg

SEQ ID NO: 1301874 - DNA, 25 bp, Homo sapien
ttcctctgactgagagacgtggctg

SEQ ID NO: 1301875 - DNA, 25 bp, Homo sapien
aggactgccgggtcgcacagccagg

SEQ ID NO: 1301876 - DNA, 25 bp, Homo sapien
tcctgcttcacggtgctggcatagt

SEQ ID NO: 1301877 - DNA, 25 bp, Homo sapien
gacctgggacaggaataccttcact

SEQ ID NO: 1301878 - DNA, 25 bp, Homo sapien
cgaacgctgcgagagctgtcgacaa

SEQ ID NO: 1301879 - DNA, 25 bp, Homo sapien
tttggtgatagcgaactggatggcc

SEQ ID NO: 1301880 - DNA, 25 bp, Homo sapien
ctctggactggggggcgaggccagg

SEQ ID NO: 1301881 - DNA, 25 bp, Homo sapien
tctggactggggggcgaggccaggg

SEQ ID NO: 1301882 - DNA, 25 bp, Homo sapien
gaggctagtgccagagaggaccctc

SEQ ID NO: 1301883 - DNA, 25 bp, Homo sapien
cagccggcacggttgtgggaccagt

SEQ ID NO: 1301884 - DNA, 25 bp, Homo sapien
ggcatacctgagtccaatggcccgg

SEQ ID NO: 1301885 - DNA, 25 bp, Homo sapien
cagaagcaactagagcggcagctgg

SEQ ID NO: 1301886 - DNA, 25 bp, Homo sapien
cacaaccccaagtttctcattaaat

SEQ ID NO: 1301887 - DNA, 25 bp, Homo sapien
tgctttattgaaacttcctccctgt

SEQ ID NO: 1301888 - DNA, 25 bp, Homo sapien
tttattgaaacttcctccctgtcgc

SEQ ID NO: 1301889 - DNA, 25 bp, Homo sapien
gctgctttattgaaacttcctccct

SEQ ID NO: 1301890 - DNA, 25 bp, Homo sapien
ctttattgaaacttcctccctgtcg

SEQ ID NO: 1301891 - DNA, 25 bp, Homo sapien
tcagaggtcctacattcgccagagt

SEQ ID NO: 1301892 - DNA, 25 bp, Homo sapien
gcctaaagcgttgacccagttgtga

SEQ ID NO: 1301893 - DNA, 25 bp, Homo sapien
tgctttgactgaactaacctgtggg

SEQ ID NO: 1301894 - DNA, 25 bp, Homo sapien
ggtttagtccaacgaacagatgtgc

SEQ ID NO: 1301895 - DNA, 25 bp, Homo sapien
gccacaggggccaccaaagcaaaaa

SEQ ID NO: 1301896 - DNA, 25 bp, Homo sapien
gacacaagcagattgtcctgccagg

SEQ ID NO: 1301897 - DNA, 25 bp, Homo sapien
aagcagattatgaggcagctccacc

SEQ ID NO: 1301898 - DNA, 25 bp, Homo sapien
gcaaaaaagcagattatgaggcagc

SEQ ID NO: 1301899 - DNA, 25 bp, Homo sapien
gacagggcttcctcgtaggacggca

SEQ ID NO: 1301900 - DNA, 25 bp, Homo sapien
cttcctcgtaggacggcaggaccac

SEQ ID NO: 1301901 - DNA, 25 bp, Homo sapien
gcaaagacagggcttcctcgtagga

SEQ ID NO: 1301902 - DNA, 25 bp, Homo sapien
cctctggggtcttcgatggcaaaga

SEQ ID NO: 1301903 - DNA, 25 bp, Homo sapien
tccctcagatccagcgaggtggctg

SEQ ID NO: 1301904 - DNA, 25 bp, Homo sapien
cagccctgtagtggacatatttgcc

SEQ ID NO: 1301905 - DNA, 25 bp, Homo sapien
tttgccaccacaagggatgggcttc

SEQ ID NO: 1301906 - DNA, 25 bp, Homo sapien
aacagtgcaccattttccttgggaa

SEQ ID NO: 1301907 - DNA, 25 bp, Homo sapien
ctccaccgagttcatgcacttgatc

SEQ ID NO: 1301908 - DNA, 25 bp, Homo sapien
tcatgcacttgatcaatctgtagca

SEQ ID NO: 1301909 - DNA, 25 bp, Homo sapien
gagttcatgcacttgatcaatctgt

SEQ ID NO: 1301910 - DNA, 25 bp, Homo sapien
cacttgatcaatctgtagcaccgcc

SEQ ID NO: 1301911 - DNA, 25 bp, Homo sapien
gcccaggtcaggctgtgctttgctg

SEQ ID NO: 1301912 - DNA, 25 bp, Homo sapien
cccaggtcaggctgtgctttgctga

SEQ ID NO: 1301913 - DNA, 25 bp, Homo sapien
aatttctactatgacctatgttact

SEQ ID NO: 1301914 - DNA, 25 bp, Homo sapien
cttgaagataaggacagtgatgaag

SEQ ID NO: 1301915 - DNA, 25 bp, Homo sapien
gatgaaggcgatggaaaagatgatc

SEQ ID NO: 1301916 - DNA, 25 bp, Homo sapien
tggttatgaggcatatcctcctggc

SEQ ID NO: 1301917 - DNA, 25 bp, Homo sapien
cttgatgaactggttatgaggcata

SEQ ID NO: 1301918 - DNA, 25 bp, Homo sapien
gcacttccatgtaggagctgcagag

SEQ ID NO: 1301919 - DNA, 25 bp, Homo sapien
tgtggttcatggacttgaagttgag

SEQ ID NO: 1301920 - DNA, 25 bp, Homo sapien
gaagttgagataggtgggcacttcc

SEQ ID NO: 1301921 - DNA, 25 bp, Homo sapien
cagctgcagcgtcatcagggggaac

SEQ ID NO: 1301922 - DNA, 25 bp, Homo sapien
gcacggctccgggaggccaacttga

SEQ ID NO: 1301923 - DNA, 25 bp, Homo sapien
ccaacttgaggtaggcgggcagctc

SEQ ID NO: 1301924 - DNA, 25 bp, Homo sapien
aggcacaggagatagtccatgattt

SEQ ID NO: 1301925 - DNA, 25 bp, Homo sapien
gcagctcaatgtaggagcccagcag

SEQ ID NO: 1301926 - DNA, 25 bp, Homo sapien
ccgatcagtaggctcaggctgatga

SEQ ID NO: 1301927 - DNA, 25 bp, Homo sapien
cttgactacgccgatcagtaggctc

SEQ ID NO: 1301928 - DNA, 25 bp, Homo sapien
tacgccgatcagtaggctcaggctg

SEQ ID NO: 1301929 - DNA, 25 bp, Homo sapien
agtaggctcaggctgatgatgaaga

SEQ ID NO: 1301930 - DNA, 25 bp, Homo sapien
gacatgaggatgcacaggaaagccc

SEQ ID NO: 1301931 - DNA, 25 bp, Homo sapien
aaccactggtttggggacatgagga

SEQ ID NO: 1301932 - DNA, 25 bp, Homo sapien
ccacacttggggaaccactggtttg

SEQ ID NO: 1301933 - DNA, 25 bp, Homo sapien
gggacatgaggatgcacaggaaagc

SEQ ID NO: 1301934 - DNA, 25 bp, Homo sapien
cgatgaacaacaagacgctcatgat

SEQ ID NO: 1301935 - DNA, 25 bp, Homo sapien
tgccatgggccacctctactgagtg

SEQ ID NO: 1301936 - DNA, 25 bp, Homo sapien
agagcttgcaggacgccttgccatg

SEQ ID NO: 1301937 - DNA, 25 bp, Homo sapien
catctgggagagcttgcaggacgcc

SEQ ID NO: 1301938 - DNA, 25 bp, Homo sapien
gtacagcagggaagccagtagtggg

SEQ ID NO: 1301939 - DNA, 25 bp, Homo sapien
tggtgtacagcagggaagccagtag

SEQ ID NO: 1301940 - DNA, 25 bp, Homo sapien
cttagtggtgtacagcagggaagcc

SEQ ID NO: 1301941 - DNA, 25 bp, Homo sapien
ttagtggtgtacagcagggaagcca

SEQ ID NO: 1301942 - DNA, 25 bp, Homo sapien
ccagaatcagatcaagaggattttg

SEQ ID NO: 1301943 - DNA, 25 bp, Homo sapien
tgtcttcctgccacattacatcctg

SEQ ID NO: 1301944 - DNA, 25 bp, Homo sapien
ctgaacggaagagtgatgaagagct

SEQ ID NO: 1301945 - DNA, 25 bp, Homo sapien
tcatctggaaaattgcaatcactgg

SEQ ID NO: 1301946 - DNA, 25 bp, Homo sapien
gtagtaccaggagcacggtgcatgc

SEQ ID NO: 1301947 - DNA, 25 bp, Homo sapien
caggagcacggtgcatgctctaact

SEQ ID NO: 1301948 - DNA, 25 bp, Homo sapien
ggttcggcagtagtaccaggagcac

SEQ ID NO: 1301949 - DNA, 25 bp, Homo sapien
agcacggtgcatgctctaactgccc

SEQ ID NO: 1301950 - DNA, 25 bp, Homo sapien
atcaggaaagttgagaacaccccaa

SEQ ID NO: 1301951 - DNA, 25 bp, Homo sapien
ctgctaaagagtgagctggaaaggc

SEQ ID NO: 1301952 - DNA, 25 bp, Homo sapien
tcaggaaagttgagaacaccccaaa

SEQ ID NO: 1301953 - DNA, 25 bp, Homo sapien
tgctaaagagtgagctggaaaggct

SEQ ID NO: 1301954 - DNA, 25 bp, Homo sapien
aaattacacgcatgtgttgctgtcc

SEQ ID NO: 1301955 - DNA, 25 bp, Homo sapien
tattgtcctcctgaggccatgaggt

SEQ ID NO: 1301956 - DNA, 25 bp, Homo sapien
catgcatctatgtcagtaaaacctt

SEQ ID NO: 1301957 - DNA, 25 bp, Homo sapien
gcctgaaccccggagaggacttaga

SEQ ID NO: 1301958 - DNA, 25 bp, Homo sapien
ccccaagctggccagttggggaagt

SEQ ID NO: 1301959 - DNA, 25 bp, Homo sapien
tcagttcttattcccgtctgcacgc

SEQ ID NO: 1301960 - DNA, 25 bp, Homo sapien
gttcttattcccgtctgcacgcagc

SEQ ID NO: 1301961 - DNA, 25 bp, Homo sapien
ttattcccgtctgcacgcagccttt

SEQ ID NO: 1301962 - DNA, 25 bp, Homo sapien
tgcccaccctgatttccctgggttg

SEQ ID NO: 1301963 - DNA, 25 bp, Homo sapien
ctgcccaccctgatttccctgggtt

SEQ ID NO: 1301964 - DNA, 25 bp, Homo sapien
gcccaccctgatttccctgggttgc

SEQ ID NO: 1301965 - DNA, 25 bp, Homo sapien
cactcttccgcagttctcgtcctca

SEQ ID NO: 1301966 - DNA, 25 bp, Homo sapien
ttccgcagttctcgtcctcacccgc

SEQ ID NO: 1301967 - DNA, 25 bp, Homo sapien
ttcactcttccgcagttctcgtcct

SEQ ID NO: 1301968 - DNA, 25 bp, Homo sapien
agttctcgtcctcacccgccgcctc

SEQ ID NO: 1301969 - DNA, 25 bp, Homo sapien
catacagtaaagatccctgggtccc

SEQ ID NO: 1301970 - DNA, 25 bp, Homo sapien
gcttggagcagcatagtgacttcct

SEQ ID NO: 1301971 - DNA, 25 bp, Homo sapien
ggcagaaccttttcttagtacgatg

SEQ ID NO: 1301972 - DNA, 25 bp, Homo sapien
caacagtggtaagtcaagttggcag

SEQ ID NO: 1301973 - DNA, 25 bp, Homo sapien
ccatgattgctagggcccacacatt

SEQ ID NO: 1301974 - DNA, 25 bp, Homo sapien
tcttccatgattgctagggcccaca

SEQ ID NO: 1301975 - DNA, 25 bp, Homo sapien
agaagtcttccatgattgctagggc

SEQ ID NO: 1301976 - DNA, 25 bp, Homo sapien
tccatactgcccacaaccaaactct

SEQ ID NO: 1301977 - DNA, 25 bp, Homo sapien
gcgatgcggacattgaagcagcagc

SEQ ID NO: 1301978 - DNA, 25 bp, Homo sapien
gttgcgatgcggacattgaagcagc

SEQ ID NO: 1301979 - DNA, 25 bp, Homo sapien
ggcggtggttgcgatgcggacattg

SEQ ID NO: 1301980 - DNA, 25 bp, Homo sapien
tggcggacagtggacaagcgggggt

SEQ ID NO: 1301981 - DNA, 25 bp, Homo sapien
gtgctgccgtcccctcctctgagac

SEQ ID NO: 1301982 - DNA, 25 bp, Homo sapien
tgctgccgtcccctcctctgagaca

SEQ ID NO: 1301983 - DNA, 25 bp, Homo sapien
ggtgctgccgtcccctcctctgaga

SEQ ID NO: 1301984 - DNA, 25 bp, Homo sapien
tggtgcctggagcagggcagagaag

SEQ ID NO: 1301985 - DNA, 25 bp, Homo sapien
gaaggggaaagagcctggtgcctgg

SEQ ID NO: 1301986 - DNA, 25 bp, Homo sapien
ctgaaggggaaagagcctggtgcct

SEQ ID NO: 1301987 - DNA, 25 bp, Homo sapien
ctggagcagggcagagaaggggaag

SEQ ID NO: 1301988 - DNA, 25 bp, Homo sapien
tcagtcactccctgtggagtacaag

SEQ ID NO: 1301989 - DNA, 25 bp, Homo sapien
tgtggagtacaagcctgaatcactt

SEQ ID NO: 1301990 - DNA, 25 bp, Homo sapien
gcctgaatcactttattgtcattcc

SEQ ID NO: 1301991 - DNA, 25 bp, Homo sapien
tcactccctgtggagtacaagcctg

SEQ ID NO: 1301992 - DNA, 25 bp, Homo sapien
tggtggtcagtgactttcccttgtg

SEQ ID NO: 1301993 - DNA, 25 bp, Homo sapien
agttggtggtcagtgactttccctt

SEQ ID NO: 1301994 - DNA, 25 bp, Homo sapien
gttggtggtcagtgactttcccttg

SEQ ID NO: 1301995 - DNA, 25 bp, Homo sapien
ttggtggtcagtgactttcccttgt

SEQ ID NO: 1301996 - DNA, 25 bp, Homo sapien
tccagggtcagatacagggggcagt

SEQ ID NO: 1301997 - DNA, 25 bp, Homo sapien
ctcgcagcagccgtcacggtacttt

SEQ ID NO: 1301998 - DNA, 25 bp, Homo sapien
cgtcacggtactttcctgggcctgg

SEQ ID NO: 1301999 - DNA, 25 bp, Homo sapien
gcagccgtcacggtactttcctggg

SEQ ID NO: 1302000 - DNA, 25 bp, Homo sapien
agccccccaggagacgcttctggga

SEQ ID NO: 1302001 - DNA, 25 bp, Homo sapien
tagccccccaggagacgcttctggg

SEQ ID NO: 1302002 - DNA, 25 bp, Homo sapien
ttagccccccaggagacgcttctgg

SEQ ID NO: 1302003 - DNA, 25 bp, Homo sapien
atcccatccccgtgccagtgcctga

SEQ ID NO: 1302004 - DNA, 25 bp, Homo sapien
atccccgtgccagtgcctgagccac

SEQ ID NO: 1302005 - DNA, 25 bp, Homo sapien
tcagtcagctcctcctgcgaggaaa

SEQ ID NO: 1302006 - DNA, 25 bp, Homo sapien
aaacagacaggtagcagccagtgct

SEQ ID NO: 1302007 - DNA, 25 bp, Homo sapien
ccagcagagaacttagcgaccaggg

SEQ ID NO: 1302008 - DNA, 25 bp, Homo sapien
accagagggcgcactgtacccgcca

SEQ ID NO: 1302009 - DNA, 25 bp, Homo sapien
acttagcgaccagggcccggatgga

SEQ ID NO: 1302010 - DNA, 25 bp, Homo sapien
gcagtgttcctgagtagccaccaga

SEQ ID NO: 1302011 - DNA, 25 bp, Homo sapien
tgatcagtccgggacttctgttggg

SEQ ID NO: 1302012 - DNA, 25 bp, Homo sapien
gcaaactatctgatgggtccccagg

SEQ ID NO: 1302013 - DNA, 25 bp, Homo sapien
tgtggctgaaggctcaaagtccagc

SEQ ID NO: 1302014 - DNA, 25 bp, Homo sapien
ccagcagggagccattgatcagtcc

SEQ ID NO: 1302015 - DNA, 25 bp, Homo sapien
tcggatggtcccacaaatccctggg

SEQ ID NO: 1302016 - DNA, 25 bp, Homo sapien
gagggcctgatcaaatggagacaaa

SEQ ID NO: 1302017 - DNA, 25 bp, Homo sapien
gggtatcagaggctacttccggctc

SEQ ID NO: 1302018 - DNA, 25 bp, Homo sapien
aacaggtttgtgaggaccagggctc

SEQ ID NO: 1302019 - DNA, 25 bp, Homo sapien
cagagacctggcactgcatggctgc

SEQ ID NO: 1302020 - DNA, 25 bp, Homo sapien
ccaagcatgtagcagagggtcaagt

SEQ ID NO: 1302021 - DNA, 25 bp, Homo sapien
tgcgcaaactgggtgacccctgatc

SEQ ID NO: 1302022 - DNA, 25 bp, Homo sapien
ttgttcggaccccagagacctggca

SEQ ID NO: 1302023 - DNA, 25 bp, Homo sapien
agccaggtacccacttgagcacagg

SEQ ID NO: 1302024 - DNA, 25 bp, Homo sapien
tgagcacaggcacacgtggtcttgg

SEQ ID NO: 1302025 - DNA, 25 bp, Homo sapien
ttttcagccctagtttgtagcaggg

SEQ ID NO: 1302026 - DNA, 25 bp, Homo sapien
ggattttcagccctagtttgtagca

SEQ ID NO: 1302027 - DNA, 25 bp, Homo sapien
aaccaagggccaggcgatagtggca

SEQ ID NO: 1302028 - DNA, 25 bp, Homo sapien
tggagaaccaagggccaggcgatag

SEQ ID NO: 1302029 - DNA, 25 bp, Homo sapien
ccaggcgatagtggcagccgctggg

SEQ ID NO: 1302030 - DNA, 25 bp, Homo sapien
gagaaccaagggccaggcgatagtg

SEQ ID NO: 1302031 - DNA, 25 bp, Homo sapien
ccgcgcttcgtttgcaggaggtccg

SEQ ID NO: 1302032 - DNA, 25 bp, Homo sapien
agctccgcatagttccacgggcagg

SEQ ID NO: 1302033 - DNA, 25 bp, Homo sapien
ttgggaagaacgctggaaacgctgg

SEQ ID NO: 1302034 - DNA, 25 bp, Homo sapien
tgacccattccgattttcataaagc

SEQ ID NO: 1302035 - DNA, 25 bp, Homo sapien
tccggaaaacctgcaaaggctctgg

SEQ ID NO: 1302036 - DNA, 25 bp, Homo sapien
tggagacccacaaaatattcctgct

SEQ ID NO: 1302037 - DNA, 25 bp, Homo sapien
attcctgctccaccaaaggccaccc

SEQ ID NO: 1302038 - DNA, 25 bp, Homo sapien
ggtcccctgtggagccgcagctccg

SEQ ID NO: 1302039 - DNA, 25 bp, Homo sapien
tctggtttccaatggcaggtgcgac

SEQ ID NO: 1302040 - DNA, 25 bp, Homo sapien
tgggtgcacagaagctgtctctctg

SEQ ID NO: 1302041 - DNA, 25 bp, Homo sapien
tgccaccaagatcaccagctggtac

SEQ ID NO: 1302042 - DNA, 25 bp, Homo sapien
aggctccgttgccaatgccaccaag

SEQ ID NO: 1302043 - DNA, 25 bp, Homo sapien
ataacacggtggtaccctcttcaag

SEQ ID NO: 1302044 - DNA, 25 bp, Homo sapien
agtcagacatgcctacgttctcctt

SEQ ID NO: 1302045 - DNA, 25 bp, Homo sapien
taccctcttcaaggcaacttcggag

SEQ ID NO: 1302046 - DNA, 25 bp, Homo sapien
cttcaaggcaacttcggagtcagac

SEQ ID NO: 1302047 - DNA, 25 bp, Homo sapien
ctgccctgttgtgtggaagcgctcc

SEQ ID NO: 1302048 - DNA, 25 bp, Homo sapien
tgccctgttgtgtggaagcgctcct

SEQ ID NO: 1302049 - DNA, 25 bp, Homo sapien
ctctctatacatggctctggagggc

SEQ ID NO: 1302050 - DNA, 25 bp, Homo sapien
tcctggctccagattatccaatccc

SEQ ID NO: 1302051 - DNA, 25 bp, Homo sapien
aagaactctctatacatggctctgg

SEQ ID NO: 1302052 - DNA, 25 bp, Homo sapien
gccaaagaactctctatacatggct

SEQ ID NO: 1302053 - DNA, 25 bp, Homo sapien
ggattcatgcagataacttgattgc

SEQ ID NO: 1302054 - DNA, 25 bp, Homo sapien
ttaacactggtcgacaacagaggcc

SEQ ID NO: 1302055 - DNA, 25 bp, Homo sapien
acttgattgcagacttttgttttca

SEQ ID NO: 1302056 - DNA, 25 bp, Homo sapien
ttgatttatcggctgagacactgtg

SEQ ID NO: 1302057 - DNA, 25 bp, Homo sapien
ctgctcgcttatcttgtccagtagg

SEQ ID NO: 1302058 - DNA, 25 bp, Homo sapien
acactcctaccctctgctcgcttat

SEQ ID NO: 1302059 - DNA, 25 bp, Homo sapien
ttgtctcccccgctgtgcccacaga

SEQ ID NO: 1302060 - DNA, 25 bp, Homo sapien
cacagacactcctaccctctgctcg

SEQ ID NO: 1302061 - DNA, 25 bp, Homo sapien
tcagtccaccacggtctctctgagc

SEQ ID NO: 1302062 - DNA, 25 bp, Homo sapien
cagtccaccacggtctctctgagcc

SEQ ID NO: 1302063 - DNA, 25 bp, Homo sapien
agtccaccacggtctctctgagcct

SEQ ID NO: 1302064 - DNA, 25 bp, Homo sapien
ccataacggtttgactggttgtggc

SEQ ID NO: 1302065 - DNA, 25 bp, Homo sapien
gaggtaggcatacacatctgtgtaa

SEQ ID NO: 1302066 - DNA, 25 bp, Homo sapien
tcctcctgtaatgcctggaaaattg

SEQ ID NO: 1302067 - DNA, 25 bp, Homo sapien
cagagcttctctttgataagcaagg

SEQ ID NO: 1302068 - DNA, 25 bp, Homo sapien
tggaggcagtccccagagagaaagc

SEQ ID NO: 1302069 - DNA, 25 bp, Homo sapien
ggaggcagtccccagagagaaagct

SEQ ID NO: 1302070 - DNA, 25 bp, Homo sapien
gtcacagacttggctacagatgagg

SEQ ID NO: 1302071 - DNA, 25 bp, Homo sapien
agacttggctacagatgaggggctt

SEQ ID NO: 1302072 - DNA, 25 bp, Homo sapien
tttcctcttataaatgggcacagca

SEQ ID NO: 1302073 - DNA, 25 bp, Homo sapien
tatttcctcttataaatgggcacag

SEQ ID NO: 1302074 - DNA, 25 bp, Homo sapien
tttatttcctcttataaatgggcac

SEQ ID NO: 1302075 - DNA, 25 bp, Homo sapien
cctcttataaatgggcacagcacag

SEQ ID NO: 1302076 - DNA, 25 bp, Homo sapien
gggaccagtctttcaggcaaggccc

SEQ ID NO: 1302077 - DNA, 25 bp, Homo sapien
gggcttctatttacaggcaagaggc

SEQ ID NO: 1302078 - DNA, 25 bp, Homo sapien
acatgcatttgccacgctgaggcca

SEQ ID NO: 1302079 - DNA, 25 bp, Homo sapien
tggagccacgctgcctacgaaaaat

SEQ ID NO: 1302080 - DNA, 25 bp, Homo sapien
tcaggaggataaagcctggacatct

SEQ ID NO: 1302081 - DNA, 25 bp, Homo sapien
tgaactctcttggactgccttgccc

SEQ ID NO: 1302082 - DNA, 25 bp, Homo sapien
tcactgaactctcttggactgcctt

SEQ ID NO: 1302083 - DNA, 25 bp, Homo sapien
tgccttgccccggtcaggccggcca

SEQ ID NO: 1302084 - DNA, 25 bp, Homo sapien
ccaaatcagaagccaacccctggga

SEQ ID NO: 1302085 - DNA, 25 bp, Homo sapien
aaatcagaagccaacccctgggatg

SEQ ID NO: 1302086 - DNA, 25 bp, Homo sapien
atcagaagccaacccctgggatgtg

SEQ ID NO: 1302087 - DNA, 25 bp, Homo sapien
ctaaggacacagagaagagaagcca

SEQ ID NO: 1302088 - DNA, 25 bp, Homo sapien
gagtgccagccaatcgcaactcaca

SEQ ID NO: 1302089 - DNA, 25 bp, Homo sapien
cctacttgctaggtaacaaaggaag

SEQ ID NO: 1302090 - DNA, 25 bp, Homo sapien
taccgatggaaatagccctacttgc

SEQ ID NO: 1302091 - DNA, 25 bp, Homo sapien
tgagccttgtggtctgtggccccag

SEQ ID NO: 1302092 - DNA, 25 bp, Homo sapien
gcttccagccatggcccctgaagct

SEQ ID NO: 1302093 - DNA, 25 bp, Homo sapien
tgagggggtgtccacagggagggcc

SEQ ID NO: 1302094 - DNA, 25 bp, Homo sapien
aattgtttggccaaataggtgaggg

SEQ ID NO: 1302095 - DNA, 25 bp, Homo sapien
tgaagctgcagccagaattgtttgg

SEQ ID NO: 1302096 - DNA, 25 bp, Homo sapien
cattcttggaaggacgcgtgtgttc

SEQ ID NO: 1302097 - DNA, 25 bp, Homo sapien
catgtgaccatgactagtgacttgc

SEQ ID NO: 1302098 - DNA, 25 bp, Homo sapien
atatgtcttgattggctgggcggtc

SEQ ID NO: 1302099 - DNA, 25 bp, Homo sapien
ttttccgagaaaggcaagggcctgc

SEQ ID NO: 1302100 - DNA, 25 bp, Homo sapien
gtacatgtgtacttggcaggcaaga

SEQ ID NO: 1302101 - DNA, 25 bp, Homo sapien
gatttcaagggctgtgtttaccaaa

SEQ ID NO: 1302102 - DNA, 25 bp, Homo sapien
cctgggatacgagcaagaggttgca

SEQ ID NO: 1302103 - DNA, 25 bp, Homo sapien
cctcataggagggacatcagagcag

SEQ ID NO: 1302104 - DNA, 25 bp, Homo sapien
aagagatgagctcgtaagggcacag

SEQ ID NO: 1302105 - DNA, 25 bp, Homo sapien
gaacaagagatgagctcgtaagggc

SEQ ID NO: 1302106 - DNA, 25 bp, Homo sapien
agatgagctcgtaagggcacagtct

SEQ ID NO: 1302107 - DNA, 25 bp, Homo sapien
aggggaacaagagatgagctcgtaa

SEQ ID NO: 1302108 - DNA, 25 bp, Homo sapien
ggactggacagcagggtggtgttga

SEQ ID NO: 1302109 - DNA, 25 bp, Homo sapien
ttccaggcccagtcccaggcttggg

SEQ ID NO: 1302110 - DNA, 25 bp, Homo sapien
cagagaagaactggggccaggttcc

SEQ ID NO: 1302111 - DNA, 25 bp, Homo sapien
cagcagggtggtgttgaggctgcag

SEQ ID NO: 1302112 - DNA, 25 bp, Homo sapien
agaactcctcctgcttgtcaggctt

SEQ ID NO: 1302113 - DNA, 25 bp, Homo sapien
tagaactcctcctgcttgtcaggct

SEQ ID NO: 1302114 - DNA, 25 bp, Homo sapien
cctttttcttcatacgatagatgag

SEQ ID NO: 1302115 - DNA, 25 bp, Homo sapien
ctccagcgtgtagctgccctcatcc

SEQ ID NO: 1302116 - DNA, 25 bp, Homo sapien
tccagcgtgtagctgccctcatcct

SEQ ID NO: 1302117 - DNA, 25 bp, Homo sapien
acgatagatgagcagtgtgaccaag

SEQ ID NO: 1302118 - DNA, 25 bp, Homo sapien
aagagggcacaggtcaaggcccaga

SEQ ID NO: 1302119 - DNA, 25 bp, Homo sapien
tgatggagtcaatactactactacc

SEQ ID NO: 1302120 - DNA, 25 bp, Homo sapien
catcataggccttcactggctgcat

SEQ ID NO: 1302121 - DNA, 25 bp, Homo sapien
tatgacataccccaactacagaaga

SEQ ID NO: 1302122 - DNA, 25 bp, Homo sapien
ccccattctaccgatgaagagaagg

SEQ ID NO: 1302123 - DNA, 25 bp, Homo sapien
cattctaccgatgaagagaaggaag

SEQ ID NO: 1302124 - DNA, 25 bp, Homo sapien
ctatccccattctaccgatgaagag

SEQ ID NO: 1302125 - DNA, 25 bp, Homo sapien
tatccccattctaccgatgaagaga

SEQ ID NO: 1302126 - DNA, 25 bp, Homo sapien
tgggtcagagattagcatctaggaa

SEQ ID NO: 1302127 - DNA, 25 bp, Homo sapien
agactccctagatgcggccagggca

SEQ ID NO: 1302128 - DNA, 25 bp, Homo sapien
agtccacagactccctagatgcggc

SEQ ID NO: 1302129 - DNA, 25 bp, Homo sapien
gcatctaggaagtaaggtcccaggg

SEQ ID NO: 1302130 - DNA, 25 bp, Homo sapien
aggaaagttgggaggagccagaagg

SEQ ID NO: 1302131 - DNA, 25 bp, Homo sapien
gagccagaaggcaggtcctgggggg

SEQ ID NO: 1302132 - DNA, 25 bp, Homo sapien
gaaggaggaaagttgggaggagcca

SEQ ID NO: 1302133 - DNA, 25 bp, Homo sapien
aggaggaaagttgggaggagccaga

SEQ ID NO: 1302134 - DNA, 25 bp, Homo sapien
ccttggcccagaccccaagcctcac

SEQ ID NO: 1302135 - DNA, 25 bp, Homo sapien
gcgggcacccttgggcagtgtccca

SEQ ID NO: 1302136 - DNA, 25 bp, Homo sapien
tcccaggtggagatgatgccttggc

SEQ ID NO: 1302137 - DNA, 25 bp, Homo sapien
ctccaggatactcttctgaggcagc

SEQ ID NO: 1302138 - DNA, 25 bp, Homo sapien
ggctcatcccggattgtggtcagga

SEQ ID NO: 1302139 - DNA, 25 bp, Homo sapien
agtcgggtcccctgtgcttgtggca

SEQ ID NO: 1302140 - DNA, 25 bp, Homo sapien
tacgccagtggtccttataacagca

SEQ ID NO: 1302141 - DNA, 25 bp, Homo sapien
taacagcagtggtggccgtaaaagg

SEQ ID NO: 1302142 - DNA, 25 bp, Homo sapien
agaggcagaagcctccgtacgccag

SEQ ID NO: 1302143 - DNA, 25 bp, Homo sapien
acaggctggatgttcgtggtgggca

SEQ ID NO: 1302144 - DNA, 25 bp, Homo sapien
aggctggatgttcgtggtgggcagc

SEQ ID NO: 1302145 - DNA, 25 bp, Homo sapien
gtgtgcccacaggctggatgttcgt

SEQ ID NO: 1302146 - DNA, 25 bp, Homo sapien
tgcccacaggctggatgttcgtggt

SEQ ID NO: 1302147 - DNA, 25 bp, Homo sapien
tggacaccgccagggctacatctgg

SEQ ID NO: 1302148 - DNA, 25 bp, Homo sapien
gtgtggtggacaccgccagggctac

SEQ ID NO: 1302149 - DNA, 25 bp, Homo sapien
gtggtggacaccgccagggctacat

SEQ ID NO: 1302150 - DNA, 25 bp, Homo sapien
ggtggacaccgccagggctacatct

SEQ ID NO: 1302151 - DNA, 25 bp, Homo sapien
tcaatgcccgactcctgctcgaagt

SEQ ID NO: 1302152 - DNA, 25 bp, Homo sapien
tggctgtctcaatgcccgactcctg

SEQ ID NO: 1302153 - DNA, 25 bp, Homo sapien
tgaagcgcatggctgtctcaatgcc

SEQ ID NO: 1302154 - DNA, 25 bp, Homo sapien
cgcatggctgtctcaatgcccgact

SEQ ID NO: 1302155 - DNA, 25 bp, Homo sapien
aggatcccaggtaagcaatggccat

SEQ ID NO: 1302156 - DNA, 25 bp, Homo sapien
gaggatcccaggtaagcaatggcca

SEQ ID NO: 1302157 - DNA, 25 bp, Homo sapien
cacaaagatgcagacgtgggaccct

SEQ ID NO: 1302158 - DNA, 25 bp, Homo sapien
caatctggctgacgcaaagccggga

SEQ ID NO: 1302159 - DNA, 25 bp, Homo sapien
gcaactgaggcgctactggctgcaa

SEQ ID NO: 1302160 - DNA, 25 bp, Homo sapien
cagcttattgcacctgacgggacca

SEQ ID NO: 1302161 - DNA, 25 bp, Homo sapien
gtccacgggtctctcgaagttctca

SEQ ID NO: 1302162 - DNA, 25 bp, Homo sapien
tcgaagttctcactgcgccagcgct

SEQ ID NO: 1302163 - DNA, 25 bp, Homo sapien
tcatcatcgggaaaggagtcatcat

SEQ ID NO: 1302164 - DNA, 25 bp, Homo sapien
ccccgagtagaggtcatccagttca

SEQ ID NO: 1302165 - DNA, 25 bp, Homo sapien
ggggtcccatcccagaaggctttca

SEQ ID NO: 1302166 - DNA, 25 bp, Homo sapien
ctggggtcccatcccagaaggcttt

SEQ ID NO: 1302167 - DNA, 25 bp, Homo sapien
tctcttagaaactggtcatttttca

SEQ ID NO: 1302168 - DNA, 25 bp, Homo sapien
ctcttagaaactggtcatttttcat

SEQ ID NO: 1302169 - DNA, 25 bp, Homo sapien
ccacagagggctcagcgtgtcagca

SEQ ID NO: 1302170 - DNA, 25 bp, Homo sapien
acagagggctcagcgtgtcagcatg

SEQ ID NO: 1302171 - DNA, 25 bp, Homo sapien
agccacagagggctcagcgtgtcag

SEQ ID NO: 1302172 - DNA, 25 bp, Homo sapien
cagagggctcagcgtgtcagcatgc

SEQ ID NO: 1302173 - DNA, 25 bp, Homo sapien
ctgggatgctcagcgggaacttaat

SEQ ID NO: 1302174 - DNA, 25 bp, Homo sapien
gctgggactcatgaggccctctcag

SEQ ID NO: 1302175 - DNA, 25 bp, Homo sapien
cgggaacttaatgcgaggacacctg

SEQ ID NO: 1302176 - DNA, 25 bp, Homo sapien
gaggccctctcaggaacactacaga

SEQ ID NO: 1302177 - DNA, 25 bp, Homo sapien
acaacacggacccaccgccatggcc

SEQ ID NO: 1302178 - DNA, 25 bp, Homo sapien
ggacccaccgccatggccacgtatg

SEQ ID NO: 1302179 - DNA, 25 bp, Homo sapien
ctcaccaaggcccacaacacggacc

SEQ ID NO: 1302180 - DNA, 25 bp, Homo sapien
ccgccatggccacgtatgttcccta

SEQ ID NO: 1302181 - DNA, 25 bp, Homo sapien
ccggttggctgtcaggcaagccatt

SEQ ID NO: 1302182 - DNA, 25 bp, Homo sapien
cggttggctgtcaggcaagccattt

SEQ ID NO: 1302183 - DNA, 25 bp, Homo sapien
ggcagtcccacacccacttgtggct

SEQ ID NO: 1302184 - DNA, 25 bp, Homo sapien
agtcccacacccacttgtggctgga

SEQ ID NO: 1302185 - DNA, 25 bp, Homo sapien
agccggcagtcccacacccacttgt

SEQ ID NO: 1302186 - DNA, 25 bp, Homo sapien
ggaagccggcagtcccacacccact

SEQ ID NO: 1302187 - DNA, 25 bp, Homo sapien
caaaagcagggcaaatgtcagagac

SEQ ID NO: 1302188 - DNA, 25 bp, Homo sapien
tcaaaagcagggcaaatgtcagaga

SEQ ID NO: 1302189 - DNA, 25 bp, Homo sapien
ctcaaaagcagggcaaatgtcagag

SEQ ID NO: 1302190 - DNA, 25 bp, Homo sapien
cagcaggtgcctctaggagtctgtc

SEQ ID NO: 1302191 - DNA, 25 bp, Homo sapien
atgacggtcactgccagcaaacacg

SEQ ID NO: 1302192 - DNA, 25 bp, Homo sapien
caaacacggcaagggttgcccgctc

SEQ ID NO: 1302193 - DNA, 25 bp, Homo sapien
ggcccaggagtctccgaggaacaac

SEQ ID NO: 1302194 - DNA, 25 bp, Homo sapien
tcagacaaaaaggctggaagaaggg

SEQ ID NO: 1302195 - DNA, 25 bp, Homo sapien
agggccacacttgccccaggactgt

SEQ ID NO: 1302196 - DNA, 25 bp, Homo sapien
gactgtctccaacccaagatgaggc

SEQ ID NO: 1302197 - DNA, 25 bp, Homo sapien
gttggcagggccctcaaaagccagc

SEQ ID NO: 1302198 - DNA, 25 bp, Homo sapien
agcacgtacaaattccatcctcttt

SEQ ID NO: 1302199 - DNA, 25 bp, Homo sapien
ggtcagcacgtacaaattccatcct

SEQ ID NO: 1302200 - DNA, 25 bp, Homo sapien
tggtcagcacgtacaaattccatcc

SEQ ID NO: 1302201 - DNA, 25 bp, Homo sapien
tcagcacgtacaaattccatcctct

SEQ ID NO: 1302202 - DNA, 25 bp, Homo sapien
gttaggtgaactcaccaaggtcaca

SEQ ID NO: 1302203 - DNA, 25 bp, Homo sapien
tcaggcttgggacaccccaaaacag

SEQ ID NO: 1302204 - DNA, 25 bp, Homo sapien
aaacagacatagcaccaaggccagg

SEQ ID NO: 1302205 - DNA, 25 bp, Homo sapien
tccctactccttcgatgacttcaag

SEQ ID NO: 1302206 - DNA, 25 bp, Homo sapien
cccaacacactgaactcacagctgg

SEQ ID NO: 1302207 - DNA, 25 bp, Homo sapien
ttttccagcacagctcacctcgcac

SEQ ID NO: 1302208 - DNA, 25 bp, Homo sapien
gtcacagcccccagtagtgattcta

SEQ ID NO: 1302209 - DNA, 25 bp, Homo sapien
ccagtagtgattctaaaagccaagt

SEQ ID NO: 1302210 - DNA, 25 bp, Homo sapien
gaagatgaccagcggcgggggcggc

SEQ ID NO: 1302211 - DNA, 25 bp, Homo sapien
aagatgaccagcggcgggggcggcc

SEQ ID NO: 1302212 - DNA, 25 bp, Homo sapien
cgaagatgaccagcggcgggggcgg

SEQ ID NO: 1302213 - DNA, 25 bp, Homo sapien
cgtgggcggccccggcacggtgcgg

SEQ ID NO: 1302214 - DNA, 25 bp, Homo sapien
agcggtggcaggagcagcccgcggg

SEQ ID NO: 1302215 - DNA, 25 bp, Homo sapien
ggcggccccggcttcatggcggcgg

SEQ ID NO: 1302216 - DNA, 25 bp, Homo sapien
gcggccccggcacggtgcggcggcc

SEQ ID NO: 1302217 - DNA, 25 bp, Homo sapien
ctttgttcccgaggcgcggcgcgcg

SEQ ID NO: 1302218 - DNA, 25 bp, Homo sapien
tggaccgacgcgctctaggctcgcg

SEQ ID NO: 1302219 - DNA, 25 bp, Homo sapien
gcctttgttcccgaggcgcggcgcg

SEQ ID NO: 1302220 - DNA, 25 bp, Homo sapien
cgcgctctaggctcgcgggctcccg

SEQ ID NO: 1302221 - DNA, 25 bp, Homo sapien
actttgagaggttgaagttgttgga

SEQ ID NO: 1302222 - DNA, 25 bp, Homo sapien
tttgagaggttgaagttgttggatt

SEQ ID NO: 1302223 - DNA, 25 bp, Homo sapien
ctttgagaggttgaagttgttggat

SEQ ID NO: 1302224 - DNA, 25 bp, Homo sapien
cacccagtttcaccctagtgaaaat

SEQ ID NO: 1302225 - DNA, 25 bp, Homo sapien
ggtaatgataactcctatttatggc

SEQ ID NO: 1302226 - DNA, 25 bp, Homo sapien
gataactcctatttatggcttactg

SEQ ID NO: 1302227 - DNA, 25 bp, Homo sapien
ttgcaagggccccaacatagcaagg

SEQ ID NO: 1302228 - DNA, 25 bp, Homo sapien
tacaaaagggaagggcgattcacac

SEQ ID NO: 1302229 - DNA, 25 bp, Homo sapien
aaaagacgttctgggtgctcgcatc

SEQ ID NO: 1302230 - DNA, 25 bp, Homo sapien
tatttgcaaaacttgccggccaggc

SEQ ID NO: 1302231 - DNA, 25 bp, Homo sapien
tctgattgtaaggaaagctcgggca

SEQ ID NO: 1302232 - DNA, 25 bp, Homo sapien
tcatgtagtacttctccagcttggc

SEQ ID NO: 1302233 - DNA, 25 bp, Homo sapien
acagatgggccctaagtcaacaccg

SEQ ID NO: 1302234 - DNA, 25 bp, Homo sapien
tgcttgccataggtgtacttacgaa

SEQ ID NO: 1302235 - DNA, 25 bp, Homo sapien
tacttacgaagagttgcgatgtggg

SEQ ID NO: 1302236 - DNA, 25 bp, Homo sapien
caggcttcccggacatgcatttgca

SEQ ID NO: 1302237 - DNA, 25 bp, Homo sapien
actttggcaacccatcagatgagga

SEQ ID NO: 1302238 - DNA, 25 bp, Homo sapien
gagctcctaccctgagtggtgccac

SEQ ID NO: 1302239 - DNA, 25 bp, Homo sapien
gacagtctgtgttacatggcctgag

SEQ ID NO: 1302240 - DNA, 25 bp, Homo sapien
gcttaattatcaatctttccatata

SEQ ID NO: 1302241 - DNA, 25 bp, Homo sapien
gctatcttttgcttaattatcaatc

SEQ ID NO: 1302242 - DNA, 25 bp, Homo sapien
cttttgcttaattatcaatctttcc

SEQ ID NO: 1302243 - DNA, 25 bp, Homo sapien
tctgctatcttttgcttaattatca

SEQ ID NO: 1302244 - DNA, 25 bp, Homo sapien
tctcattaccgaactttgttctcag

SEQ ID NO: 1302245 - DNA, 25 bp, Homo sapien
acaaagattctcattaccgaacttt

SEQ ID NO: 1302246 - DNA, 25 bp, Homo sapien
agattctcattaccgaactttgttc

SEQ ID NO: 1302247 - DNA, 25 bp, Homo sapien
tgagtccattaacaaagattctcat

SEQ ID NO: 1302248 - DNA, 25 bp, Homo sapien
tatgcatgacgatcttccgctggcc

SEQ ID NO: 1302249 - DNA, 25 bp, Homo sapien
tctggaccacgtagttggcatactg

SEQ ID NO: 1302250 - DNA, 25 bp, Homo sapien
ggaccgtcgttcatggtgcacacct

SEQ ID NO: 1302251 - DNA, 25 bp, Homo sapien
gaggcgtgagtaacacacttctcca

SEQ ID NO: 1302252 - DNA, 25 bp, Homo sapien
gaagtgaccacaggctaacagccat

SEQ ID NO: 1302253 - DNA, 25 bp, Homo sapien
cctattatccagatagacactgcga

SEQ ID NO: 1302254 - DNA, 25 bp, Homo sapien
gacactgcgaataacaggctacaga

SEQ ID NO: 1302255 - DNA, 25 bp, Homo sapien
gaggattgcctattccagctttagc

SEQ ID NO: 1302256 - DNA, 25 bp, Homo sapien
gagactgacccgaagaagagaaccc

SEQ ID NO: 1302257 - DNA, 25 bp, Homo sapien
tcagtcctggcaaccggtcaaaagg

SEQ ID NO: 1302258 - DNA, 25 bp, Homo sapien
tgttatcaatgggaggactgggccc

SEQ ID NO: 1302259 - DNA, 25 bp, Homo sapien
gcttaggctatatccaagggtgaga

SEQ ID NO: 1302260 - DNA, 25 bp, Homo sapien
tgcttttatcctcaggacgaccgtg

SEQ ID NO: 1302261 - DNA, 25 bp, Homo sapien
gacgaccgtgctccagtacatgttg

SEQ ID NO: 1302262 - DNA, 25 bp, Homo sapien
gcaaatttgtgctgactcaatacaa

SEQ ID NO: 1302263 - DNA, 25 bp, Homo sapien
tacattgcctcggatttctgctaca

SEQ ID NO: 1302264 - DNA, 25 bp, Homo sapien
tgttcgcagttcctctactggcaac

SEQ ID NO: 1302265 - DNA, 25 bp, Homo sapien
agttcctctactggcaactccacta

SEQ ID NO: 1302266 - DNA, 25 bp, Homo sapien
ttcgcagttcctctactggcaactc

SEQ ID NO: 1302267 - DNA, 25 bp, Homo sapien
aggtgttcgcagttcctctactggc

SEQ ID NO: 1302268 - DNA, 25 bp, Homo sapien
caggattctctgaatcactcggcag

SEQ ID NO: 1302269 - DNA, 25 bp, Homo sapien
cataaggatgtgtggataaggcaaa

SEQ ID NO: 1302270 - DNA, 25 bp, Homo sapien
aagctcctctaaaatagggagtgtc

SEQ ID NO: 1302271 - DNA, 25 bp, Homo sapien
gctggtgaagctcctctaaaatagg

SEQ ID NO: 1302272 - DNA, 25 bp, Homo sapien
tacagatatttcaacaggatcacag

SEQ ID NO: 1302273 - DNA, 25 bp, Homo sapien
agttatcaatcctttgaccgtcgca

SEQ ID NO: 1302274 - DNA, 25 bp, Homo sapien
aaaaaatgcaatcccctgctcatgg

SEQ ID NO: 1302275 - DNA, 25 bp, Homo sapien
gcagtgtacctcattcctgtcagca

SEQ ID NO: 1302276 - DNA, 25 bp, Homo sapien
ctgtcccttaaacgcatcgatgata

SEQ ID NO: 1302277 - DNA, 25 bp, Homo sapien
tggccatctagttcccgaaccatct

SEQ ID NO: 1302278 - DNA, 25 bp, Homo sapien
tgcatttctgaaccacgtgattgcc

SEQ ID NO: 1302279 - DNA, 25 bp, Homo sapien
cacacttcaagacatggccatctag

SEQ ID NO: 1302280 - DNA, 25 bp, Homo sapien
tgagtccattaacaaagattctcat

SEQ ID NO: 1302281 - DNA, 25 bp, Homo sapien
tctcattaccgaactttgttctcag

SEQ ID NO: 1302282 - DNA, 25 bp, Homo sapien
acaaagattctcattaccgaacttt

SEQ ID NO: 1302283 - DNA, 25 bp, Homo sapien
agattctcattaccgaactttgttc

SEQ ID NO: 1302284 - DNA, 25 bp, Homo sapien
gcagccatacatctgtagtgccaat

SEQ ID NO: 1302285 - DNA, 25 bp, Homo sapien
ctgctggtctgaaggaataaactca

SEQ ID NO: 1302286 - DNA, 25 bp, Homo sapien
agctttctggataacacggcagcca

SEQ ID NO: 1302287 - DNA, 25 bp, Homo sapien
tagtgccaatgacaggacgtggcct

SEQ ID NO: 1302288 - DNA, 25 bp, Homo sapien
gtaattaccaaacacatccaccatg

SEQ ID NO: 1302289 - DNA, 25 bp, Homo sapien
accatgagttggtaggcagcctgga

SEQ ID NO: 1302290 - DNA, 25 bp, Homo sapien
tggtgtggcacgctccagtttcagc

SEQ ID NO: 1302291 - DNA, 25 bp, Homo sapien
tttcattgaagacaagctggcgctc

SEQ ID NO: 1302292 - DNA, 25 bp, Homo sapien
caatctcccgcagttgtaaattggg

SEQ ID NO: 1302293 - DNA, 25 bp, Homo sapien
ttccattatatgtccagcaatctcc

SEQ ID NO: 1302294 - DNA, 25 bp, Homo sapien
tatgtccagcaatctcccgcagttg

SEQ ID NO: 1302295 - DNA, 25 bp, Homo sapien
ctggtcttgggaaaattccattata

SEQ ID NO: 1302296 - DNA, 25 bp, Homo sapien
tgcggtacttggcttcagcgcctgg

SEQ ID NO: 1302297 - DNA, 25 bp, Homo sapien
gaggcgctgcttgcactgcggtact

SEQ ID NO: 1302298 - DNA, 25 bp, Homo sapien
catcagacattccatatcgcaaacg

SEQ ID NO: 1302299 - DNA, 25 bp, Homo sapien
ttccatatcgcaaacgagaggaaga

SEQ ID NO: 1302300 - DNA, 25 bp, Homo sapien
aatgatacagccaggggattgtgca

SEQ ID NO: 1302301 - DNA, 25 bp, Homo sapien
aaaactgtaagcatggagaagcatt

SEQ ID NO: 1302302 - DNA, 25 bp, Homo sapien
cagccaggggattgtgcaaaaaact

SEQ ID NO: 1302303 - DNA, 25 bp, Homo sapien
gggattgtgcaaaaaactgtaagca

SEQ ID NO: 1302304 - DNA, 25 bp, Homo sapien
gatccacacgagatataggctgatg

SEQ ID NO: 1302305 - DNA, 25 bp, Homo sapien
tcagtaatgaaaaaccatgccactc

SEQ ID NO: 1302306 - DNA, 25 bp, Homo sapien
aaggagccaggaatagtagctcaca

SEQ ID NO: 1302307 - DNA, 25 bp, Homo sapien
tactaacacatatctgcctcctggg

SEQ ID NO: 1302308 - DNA, 25 bp, Homo sapien
caggtttaagcttgaagaggatcca

SEQ ID NO: 1302309 - DNA, 25 bp, Homo sapien
gctgctcgatgtcctcttataaagg

SEQ ID NO: 1302310 - DNA, 25 bp, Homo sapien
tgaatgtcctggtccctgactaggg

SEQ ID NO: 1302311 - DNA, 25 bp, Homo sapien
agctaaggccgttataaaaactgtg

SEQ ID NO: 1302312 - DNA, 25 bp, Homo sapien
catgagcatggattgaaataggtcc

SEQ ID NO: 1302313 - DNA, 25 bp, Homo sapien
gattaagtaagtagccacatgagca

SEQ ID NO: 1302314 - DNA, 25 bp, Homo sapien
gcaggccaagaactcggctcagtct

SEQ ID NO: 1302315 - DNA, 25 bp, Homo sapien
cttgtaactctttaaggcctgcagg

SEQ ID NO: 1302316 - DNA, 25 bp, Homo sapien
tccaagggcggatcccagggtggcg

SEQ ID NO: 1302317 - DNA, 25 bp, Homo sapien
actggatgccaggttgttattgggc

SEQ ID NO: 1302318 - DNA, 25 bp, Homo sapien
tgctacttccgaatcccaaggatgt

SEQ ID NO: 1302319 - DNA, 25 bp, Homo sapien
tcagagagttgttgccgtagaaaga

SEQ ID NO: 1302320 - DNA, 25 bp, Homo sapien
aaagggcgaaatggtccatttgttg

SEQ ID NO: 1302321 - DNA, 25 bp, Homo sapien
caagaccatttctcgcgcctgcatt

SEQ ID NO: 1302322 - DNA, 25 bp, Homo sapien
agcagcaggagccaacaccggataa

SEQ ID NO: 1302323 - DNA, 25 bp, Homo sapien
cagtttggtcatagtaagcagcagg

SEQ ID NO: 1302324 - DNA, 25 bp, Homo sapien
gctacaagtcgaacaggagctccaa

SEQ ID NO: 1302325 - DNA, 25 bp, Homo sapien
tttccctgccaaagtattaggaata

SEQ ID NO: 1302326 - DNA, 25 bp, Homo sapien
tccctgccaaagtattaggaataac

SEQ ID NO: 1302327 - DNA, 25 bp, Homo sapien
ttccctgccaaagtattaggaataa

SEQ ID NO: 1302328 - DNA, 25 bp, Homo sapien
ccctgccaaagtattaggaataaca

SEQ ID NO: 1302329 - DNA, 25 bp, Homo sapien
gctgccagaccttgtccaaatgcaa

SEQ ID NO: 1302330 - DNA, 25 bp, Homo sapien
gggatccgtttgctgtccctgctgg

SEQ ID NO: 1302331 - DNA, 25 bp, Homo sapien
gtcaaaggacgttggctggctcctc

SEQ ID NO: 1302332 - DNA, 25 bp, Homo sapien
ggcatgcctgctgccagaccttgtc

SEQ ID NO: 1302333 - DNA, 25 bp, Homo sapien
taatactggtgagggaccacagctg

SEQ ID NO: 1302334 - DNA, 25 bp, Homo sapien
gactccccagggagtaactccataa

SEQ ID NO: 1302335 - DNA, 25 bp, Homo sapien
gggtggtctgttgattagctgaatt

SEQ ID NO: 1302336 - DNA, 25 bp, Homo sapien
aagactggcagggtagactccccag

SEQ ID NO: 1302337 - DNA, 25 bp, Homo sapien
gaagctgtttacaagcaagggtgca

SEQ ID NO: 1302338 - DNA, 25 bp, Homo sapien
tattacagctactctgatgctacag

SEQ ID NO: 1302339 - DNA, 25 bp, Homo sapien
aactgaacggcctaaaagccatgta

SEQ ID NO: 1302340 - DNA, 25 bp, Homo sapien
taagtcaaattgtaccactgcccaa

SEQ ID NO: 1302341 - DNA, 25 bp, Homo sapien
gggagcagcgctgatgatgtatgga

SEQ ID NO: 1302342 - DNA, 25 bp, Homo sapien
agctgtgtaggggtccgtccctggg

SEQ ID NO: 1302343 - DNA, 25 bp, Homo sapien
gggacaaacgcagcgggagctaaac

SEQ ID NO: 1302344 - DNA, 25 bp, Homo sapien
gatgtatggattggggacaaacgca

SEQ ID NO: 1302345 - DNA, 25 bp, Homo sapien
aactgctggacagcaagcgcattag

SEQ ID NO: 1302346 - DNA, 25 bp, Homo sapien
acagcaagcgcattaggtctttgga

SEQ ID NO: 1302347 - DNA, 25 bp, Homo sapien
ggacagcaagcgcattaggtctttg

SEQ ID NO: 1302348 - DNA, 25 bp, Homo sapien
tgctggacagcaagcgcattaggtc

SEQ ID NO: 1302349 - DNA, 25 bp, Homo sapien
gaaacaaatgatacctgctaggcac

SEQ ID NO: 1302350 - DNA, 25 bp, Homo sapien
ggcactgtgcaaggaactagggata

SEQ ID NO: 1302351 - DNA, 25 bp, Homo sapien
caactttcgggagctccagagtctt

SEQ ID NO: 1302352 - DNA, 25 bp, Homo sapien
caaaacttggattatgagctcacac

SEQ ID NO: 1302353 - DNA, 25 bp, Homo sapien
tatacatctacagcagacagatttg

SEQ ID NO: 1302354 - DNA, 25 bp, Homo sapien
tacatggcatgtgggaataccacaa

SEQ ID NO: 1302355 - DNA, 25 bp, Homo sapien
aagccttacaagagaccccatatag

SEQ ID NO: 1302356 - DNA, 25 bp, Homo sapien
cattccatataacattagcttgtgg

SEQ ID NO: 1302357 - DNA, 25 bp, Homo sapien
tagtgactgacatgtagttggcatc

SEQ ID NO: 1302358 - DNA, 25 bp, Homo sapien
tcagcccttctgagagtcacccttt

SEQ ID NO: 1302359 - DNA, 25 bp, Homo sapien
tggccaccggccacaataaaatgta

SEQ ID NO: 1302360 - DNA, 25 bp, Homo sapien
tatgtaacatggcaggttgctgtgg

SEQ ID NO: 1302361 - DNA, 25 bp, Homo sapien
ttgttgagaattgtagtcaaaaagt

SEQ ID NO: 1302362 - DNA, 25 bp, Homo sapien
ctgttgttgagaattgtagtcaaaa

SEQ ID NO: 1302363 - DNA, 25 bp, Homo sapien
tgttgttgagaattgtagtcaaaaa

SEQ ID NO: 1302364 - DNA, 25 bp, Homo sapien
gttgttgagaattgtagtcaaaaag

SEQ ID NO: 1302365 - DNA, 25 bp, Homo sapien
tgctgagtccacaggtacctgcgtg

SEQ ID NO: 1302366 - DNA, 25 bp, Homo sapien
tgggctaagccctcagaaccattct

SEQ ID NO: 1302367 - DNA, 25 bp, Homo sapien
taatcaaactgaagaggctccatgc

SEQ ID NO: 1302368 - DNA, 25 bp, Homo sapien
tagcagagttctggcaattaccagg

SEQ ID NO: 1302369 - DNA, 25 bp, Homo sapien
taaaatctttgacgtctgcatcaat

SEQ ID NO: 1302370 - DNA, 25 bp, Homo sapien
tatctccatcaaacgtacccttgtt

SEQ ID NO: 1302371 - DNA, 25 bp, Homo sapien
caatcccattctgcactggtaaacc

SEQ ID NO: 1302372 - DNA, 25 bp, Homo sapien
caaatctcctagcttatctccatca

SEQ ID NO: 1302373 - DNA, 25 bp, Homo sapien
aattattctgtacctgatcttggga

SEQ ID NO: 1302374 - DNA, 25 bp, Homo sapien
tgagccaagtgtggtctaacatcat

SEQ ID NO: 1302375 - DNA, 25 bp, Homo sapien
gcatgactcttaataagccccaggt

SEQ ID NO: 1302376 - DNA, 25 bp, Homo sapien
gccccaggtatgacagctaatagca

SEQ ID NO: 1302377 - DNA, 25 bp, Homo sapien
tcttctacatgctgactggcctgaa

SEQ ID NO: 1302378 - DNA, 25 bp, Homo sapien
tccccagtagcaaagattaccggca

SEQ ID NO: 1302379 - DNA, 25 bp, Homo sapien
caatatcgtacaggccattcctaca

SEQ ID NO: 1302380 - DNA, 25 bp, Homo sapien
cattctcagttatactgccacgggc

SEQ ID NO: 1302381 - DNA, 25 bp, Homo sapien
aaaatatgcactggcaatgcactcc

SEQ ID NO: 1302382 - DNA, 25 bp, Homo sapien
gaagaccctaaagacaatagaagaa

SEQ ID NO: 1302383 - DNA, 25 bp, Homo sapien
tcctgaagtttgagattcctatggg

SEQ ID NO: 1302384 - DNA, 25 bp, Homo sapien
aatttacagtgaatgctcagaacaa

SEQ ID NO: 1302385 - DNA, 25 bp, Homo sapien
cactgttcacatggaaactctgacc

SEQ ID NO: 1302386 - DNA, 25 bp, Homo sapien
atactccaccatgctaacgcctagt

SEQ ID NO: 1302387 - DNA, 25 bp, Homo sapien
tcttagacaggaatcgcccggggat

SEQ ID NO: 1302388 - DNA, 25 bp, Homo sapien
ggacagtacagaattgacctcactg

SEQ ID NO: 1302389 - DNA, 25 bp, Homo sapien
gggtagtatgccagaagaatgtcca

SEQ ID NO: 1302390 - DNA, 25 bp, Homo sapien
tccatacacggtacacaagggcaag

SEQ ID NO: 1302391 - DNA, 25 bp, Homo sapien
gtactgtaatacacgacattggctt

SEQ ID NO: 1302392 - DNA, 25 bp, Homo sapien
tggtcccaatcacgtttaaagatag

SEQ ID NO: 1302393 - DNA, 25 bp, Homo sapien
gaggacactgcttgacatgcttatg

SEQ ID NO: 1302394 - DNA, 25 bp, Homo sapien
aataagaccattcccctgtggctag

SEQ ID NO: 1302395 - DNA, 25 bp, Homo sapien
tggcaattatactacaggagaggac

SEQ ID NO: 1302396 - DNA, 25 bp, Homo sapien
catgacttgccaattgctgaggaaa

SEQ ID NO: 1302397 - DNA, 25 bp, Homo sapien
tcgccattgatcacccaggaatatt

SEQ ID NO: 1302398 - DNA, 25 bp, Homo sapien
gatcacccaggaatattccttttgg

SEQ ID NO: 1302399 - DNA, 25 bp, Homo sapien
actgtctcgccattgatcacccagg

SEQ ID NO: 1302400 - DNA, 25 bp, Homo sapien
tgttccccaggcactgtctcgccat

SEQ ID NO: 1302401 - DNA, 25 bp, Homo sapien
ttgctggattcatctgtttcccaaa

SEQ ID NO: 1302402 - DNA, 25 bp, Homo sapien
tggattcatctgtttcccaaaactt

SEQ ID NO: 1302403 - DNA, 25 bp, Homo sapien
gctggattcatctgtttcccaaaac

SEQ ID NO: 1302404 - DNA, 25 bp, Homo sapien
ctttgctggattcatctgtttccca

SEQ ID NO: 1302405 - DNA, 25 bp, Homo sapien
attcataaaggatgaaagtacagca

SEQ ID NO: 1302406 - DNA, 25 bp, Homo sapien
gcttttaaagaattcataaaggatg

SEQ ID NO: 1302407 - DNA, 25 bp, Homo sapien
atgaaagtacagcagtcaacacttt

SEQ ID NO: 1302408 - DNA, 25 bp, Homo sapien
taatagatgcttttaaagaattcat

SEQ ID NO: 1302409 - DNA, 25 bp, Homo sapien
gcaccagtgaccaggcttacaaagt

SEQ ID NO: 1302410 - DNA, 25 bp, Homo sapien
agaaacagggatcgctggccataag

SEQ ID NO: 1302411 - DNA, 25 bp, Homo sapien
atcattcttggttctggtcatcagc

SEQ ID NO: 1302412 - DNA, 25 bp, Homo sapien
aaagtacccttcaagcaagacacag

SEQ ID NO: 1302413 - DNA, 25 bp, Homo sapien
gatacctgtatctaatgcctttaaa

SEQ ID NO: 1302414 - DNA, 25 bp, Homo sapien
gtatcatcacaatctggcatgcagt

SEQ ID NO: 1302415 - DNA, 25 bp, Homo sapien
ccatagacatggtggtgtcttaaca

SEQ ID NO: 1302416 - DNA, 25 bp, Homo sapien
tgttgagtgttccatcacaagccag

SEQ ID NO: 1302417 - DNA, 25 bp, Homo sapien
caacatctttgtcttacgggtagaa

SEQ ID NO: 1302418 - DNA, 25 bp, Homo sapien
taggctctaagaagttgtggcgtca

SEQ ID NO: 1302419 - DNA, 25 bp, Homo sapien
tggcgtcagagttctggcccaatcc

SEQ ID NO: 1302420 - DNA, 25 bp, Homo sapien
gatgaatgtttgaacctaggctcta

SEQ ID NO: 1302421 - DNA, 25 bp, Homo sapien
ttgtcacagctacaatagccagcag

SEQ ID NO: 1302422 - DNA, 25 bp, Homo sapien
ccctctctattgatgtaatggataa

SEQ ID NO: 1302423 - DNA, 25 bp, Homo sapien
tagccagcagttggctacatgttag

SEQ ID NO: 1302424 - DNA, 25 bp, Homo sapien
tacatgttagatatctatactcccc

SEQ ID NO: 1302425 - DNA, 25 bp, Homo sapien
atgattcagttcatccatggaacgc

SEQ ID NO: 1302426 - DNA, 25 bp, Homo sapien
cttccctccagagcaagtgcttgaa

SEQ ID NO: 1302427 - DNA, 25 bp, Homo sapien
gattcagttcatccatggaacgcac

SEQ ID NO: 1302428 - DNA, 25 bp, Homo sapien
tgattcagttcatccatggaacgca

SEQ ID NO: 1302429 - DNA, 25 bp, Homo sapien
cctcccgagtatccagctaattttc

SEQ ID NO: 1302430 - DNA, 25 bp, Homo sapien
caggcaggtctcgaagccctaagcc

SEQ ID NO: 1302431 - DNA, 25 bp, Homo sapien
tctcgaagccctaagcccaagtgat

SEQ ID NO: 1302432 - DNA, 25 bp, Homo sapien
ggtctcgaagccctaagcccaagtg

SEQ ID NO: 1302433 - DNA, 25 bp, Homo sapien
gcaggtctcgaagccctaagcccaa

SEQ ID NO: 1302434 - DNA, 25 bp, Homo sapien
acagcagtcccaacctgccaggttc

SEQ ID NO: 1302435 - DNA, 25 bp, Homo sapien
agcagtcccaacctgccaggttcaa

SEQ ID NO: 1302436 - DNA, 25 bp, Homo sapien
tctccctgttacccacgctaacaaa

SEQ ID NO: 1302437 - DNA, 25 bp, Homo sapien
tcacagcagtcccaacctgccaggt

SEQ ID NO: 1302438 - DNA, 25 bp, Homo sapien
taatgagcacctgcccctagtgaag

SEQ ID NO: 1302439 - DNA, 25 bp, Homo sapien
tctaaagagtttacggagctcactg

SEQ ID NO: 1302440 - DNA, 25 bp, Homo sapien
cagtttaagcactcctcttcccggg

SEQ ID NO: 1302441 - DNA, 25 bp, Homo sapien
gaaagtagtcattagccccagtaaa

SEQ ID NO: 1302442 - DNA, 25 bp, Homo sapien
aagctccgcctcaggctccagccca

SEQ ID NO: 1302443 - DNA, 25 bp, Homo sapien
cgcctcaggctccagcccagctaat

SEQ ID NO: 1302444 - DNA, 25 bp, Homo sapien
ttgcatgatgtcggctcactgcaag

SEQ ID NO: 1302445 - DNA, 25 bp, Homo sapien
tgcaagctccgcctcaggctccagc

SEQ ID NO: 1302446 - DNA, 25 bp, Homo sapien
gtgattacaagcgcccacccccaca

SEQ ID NO: 1302447 - DNA, 25 bp, Homo sapien
cgccccgacagggttcaggcgattc

SEQ ID NO: 1302448 - DNA, 25 bp, Homo sapien
tccgccccgacagggttcaggcgat

SEQ ID NO: 1302449 - DNA, 25 bp, Homo sapien
cctccgccccgacagggttcaggcg

SEQ ID NO: 1302450 - DNA, 25 bp, Homo sapien
ccactgcacctggcctcacccactg

SEQ ID NO: 1302451 - DNA, 25 bp, Homo sapien
tgcacctggcctcacccactgattt

SEQ ID NO: 1302452 - DNA, 25 bp, Homo sapien
gcacctggcctcacccactgatttt

SEQ ID NO: 1302453 - DNA, 25 bp, Homo sapien
actgcacctggcctcacccactgat

SEQ ID NO: 1302454 - DNA, 25 bp, Homo sapien
ctggcccaatatccatcatcttttt

SEQ ID NO: 1302455 - DNA, 25 bp, Homo sapien
cctggcccaatatccatcatctttt

SEQ ID NO: 1302456 - DNA, 25 bp, Homo sapien
agcgcaaaactgaagaacctctcgt

SEQ ID NO: 1302457 - DNA, 25 bp, Homo sapien
ctgagcgcaaaactgaagaacctct

SEQ ID NO: 1302458 - DNA, 25 bp, Homo sapien
caaaactgaagaacctctcgtcttc

SEQ ID NO: 1302459 - DNA, 25 bp, Homo sapien
cgcaaaactgaagaacctctcgtct

SEQ ID NO: 1302460 - DNA, 25 bp, Homo sapien
tcattcaatcaacacgaaagtttca

SEQ ID NO: 1302461 - DNA, 25 bp, Homo sapien
cattcaatcaacacgaaagtttcat

SEQ ID NO: 1302462 - DNA, 25 bp, Homo sapien
ttgtgttgtaatgatgaatgccaat

SEQ ID NO: 1302463 - DNA, 25 bp, Homo sapien
atgcgtccagcccaaagaattgtgt

SEQ ID NO: 1302464 - DNA, 25 bp, Homo sapien
gatgaatgccaattccaaggtcact

SEQ ID NO: 1302465 - DNA, 25 bp, Homo sapien
tgcgtccagcccaaagaattgtgtt

SEQ ID NO: 1302466 - DNA, 25 bp, Homo sapien
gatcaacctttataacaagtaactg

SEQ ID NO: 1302467 - DNA, 25 bp, Homo sapien
agcagatatcctaagtggacagtga

SEQ ID NO: 1302468 - DNA, 25 bp, Homo sapien
gattataaaggaatgtcaaagctaa

SEQ ID NO: 1302469 - DNA, 25 bp, Homo sapien
gaatgataaatgacccagtaacagt

SEQ ID NO: 1302470 - DNA, 25 bp, Homo sapien
ccccagtaggccatcgatgtttgct

SEQ ID NO: 1302471 - DNA, 25 bp, Homo sapien
gctattattatagccgcctcctcca

SEQ ID NO: 1302472 - DNA, 25 bp, Homo sapien
taggccatcgatgtttgctattatt

SEQ ID NO: 1302473 - DNA, 25 bp, Homo sapien
tgctattattatagccgcctcctcc

SEQ ID NO: 1302474 - DNA, 25 bp, Homo sapien
tcccagctgcaagagcctgatttgc

SEQ ID NO: 1302475 - DNA, 25 bp, Homo sapien
accatagcgtcgtcctgggaacggc

SEQ ID NO: 1302476 - DNA, 25 bp, Homo sapien
gcttgcgaccctgttccagatgtca

SEQ ID NO: 1302477 - DNA, 25 bp, Homo sapien
tgaaagaagtagtccaccatagcgt

SEQ ID NO: 1302478 - DNA, 25 bp, Homo sapien
gcggagcggtaggatgaagatggat

SEQ ID NO: 1302479 - DNA, 25 bp, Homo sapien
tctctggcgctctcgctccccctta

SEQ ID NO: 1302480 - DNA, 25 bp, Homo sapien
gaagatggatttcagccccccgatc

SEQ ID NO: 1302481 - DNA, 25 bp, Homo sapien
agatggatttcagccccccgatctt

SEQ ID NO: 1302482 - DNA, 25 bp, Homo sapien
gtgaactcgggaaactcgcaggcaa

SEQ ID NO: 1302483 - DNA, 25 bp, Homo sapien
catgtgcggagaaggctggcggctc

SEQ ID NO: 1302484 - DNA, 25 bp, Homo sapien
gtgcatcctgggataggctccggcc

SEQ ID NO: 1302485 - DNA, 25 bp, Homo sapien
tttcactccgacaacatggcggccc

SEQ ID NO: 1302486 - DNA, 25 bp, Homo sapien
ttaagataattgtagaggaggccgg

SEQ ID NO: 1302487 - DNA, 25 bp, Homo sapien
gagttaagataattgtagaggaggc

SEQ ID NO: 1302488 - DNA, 25 bp, Homo sapien
agaaaaccacaaatcctgtacttga

SEQ ID NO: 1302489 - DNA, 25 bp, Homo sapien
aactattgagttaagataattgtag

SEQ ID NO: 1302490 - DNA, 25 bp, Homo sapien
ttcttagagtgaatcaacttcccag

SEQ ID NO: 1302491 - DNA, 25 bp, Homo sapien
gcagccaccagcttcagaaacttgt

SEQ ID NO: 1302492 - DNA, 25 bp, Homo sapien
catcacctttcttcttagagtgaat

SEQ ID NO: 1302493 - DNA, 25 bp, Homo sapien
cttgttttctgtgtccacatagcca

SEQ ID NO: 1302494 - DNA, 25 bp, Homo sapien
aagatacttggacttgtagcctcaa

SEQ ID NO: 1302495 - DNA, 25 bp, Homo sapien
tggacttgtagcctcaagtgccaca

SEQ ID NO: 1302496 - DNA, 25 bp, Homo sapien
gctgaagatacttggacttgtagcc

SEQ ID NO: 1302497 - DNA, 25 bp, Homo sapien
ggggaactcatcttctaacttcttc

SEQ ID NO: 1302498 - DNA, 25 bp, Homo sapien
ttggagggcccagttggcaacttct

SEQ ID NO: 1302499 - DNA, 25 bp, Homo sapien
caggctgttggagggcccagttggc

SEQ ID NO: 1302500 - DNA, 25 bp, Homo sapien
cagaagcaggctgttggagggccca

SEQ ID NO: 1302501 - DNA, 25 bp, Homo sapien
ttggcaacttctccacctgagaggc

SEQ ID NO: 1302502 - DNA, 25 bp, Homo sapien
agcccgactctctggtcaactcatt

SEQ ID NO: 1302503 - DNA, 25 bp, Homo sapien
tttctgctgagtcaaggtggcctct

SEQ ID NO: 1302504 - DNA, 25 bp, Homo sapien
ctttctgctgagtcaaggtggcctc

SEQ ID NO: 1302505 - DNA, 25 bp, Homo sapien
cgactctctggtcaactcattgttc

SEQ ID NO: 1302506 - DNA, 25 bp, Homo sapien
ctatggtgaactgtggaagcaccac

SEQ ID NO: 1302507 - DNA, 25 bp, Homo sapien
aaaagaggtgtgatagaaatactga

SEQ ID NO: 1302508 - DNA, 25 bp, Homo sapien
ggtgaactgtggaagcaccacagca

SEQ ID NO: 1302509 - DNA, 25 bp, Homo sapien
ccaggctatggtgaactgtggaagc

SEQ ID NO: 1302510 - DNA, 25 bp, Homo sapien
caaagtgcgtttctctgggtggaac

SEQ ID NO: 1302511 - DNA, 25 bp, Homo sapien
gtggaacaggctggcgcttcagtcg

SEQ ID NO: 1302512 - DNA, 25 bp, Homo sapien
acaggctggcgcttcagtcgaaccc

SEQ ID NO: 1302513 - DNA, 25 bp, Homo sapien
gaacaggctggcgcttcagtcgaac

SEQ ID NO: 1302514 - DNA, 25 bp, Homo sapien
aatatgctcaatacgcacatcaatt

SEQ ID NO: 1302515 - DNA, 25 bp, Homo sapien
cttagaatgcttaatatgctcaata

SEQ ID NO: 1302516 - DNA, 25 bp, Homo sapien
ttaatatgctcaatacgcacatcaa

SEQ ID NO: 1302517 - DNA, 25 bp, Homo sapien
tagaatgcttaatatgctcaatacg

SEQ ID NO: 1302518 - DNA, 25 bp, Homo sapien
caacaggacgctgaggaacattgta

SEQ ID NO: 1302519 - DNA, 25 bp, Homo sapien
atgccaacaggacgctgaggaacat

SEQ ID NO: 1302520 - DNA, 25 bp, Homo sapien
ccagtttagacatggtaacactgtg

SEQ ID NO: 1302521 - DNA, 25 bp, Homo sapien
agtttagacatggtaacactgtggg

SEQ ID NO: 1302522 - DNA, 25 bp, Homo sapien
ctacaaattgcccatacaaagcggg

SEQ ID NO: 1302523 - DNA, 25 bp, Homo sapien
tgagagctgcatactcggcgagagt

SEQ ID NO: 1302524 - DNA, 25 bp, Homo sapien
catgaagtaggatgcgccagaagcc

SEQ ID NO: 1302525 - DNA, 25 bp, Homo sapien
ggtgactccatgagggtgtgcccca

SEQ ID NO: 1302526 - DNA, 25 bp, Homo sapien
agcggagatatagcgccagccagca

SEQ ID NO: 1302527 - DNA, 25 bp, Homo sapien
ggcagcggagatatagcgccagcca

SEQ ID NO: 1302528 - DNA, 25 bp, Homo sapien
ctaggggcagcggagatatagcgcc

SEQ ID NO: 1302529 - DNA, 25 bp, Homo sapien
agatatagcgccagccagcaggtgt

SEQ ID NO: 1302530 - DNA, 25 bp, Homo sapien
tgattcttgcgctgtatccccagaa

SEQ ID NO: 1302531 - DNA, 25 bp, Homo sapien
ccactgggaccttctgacttctgta

SEQ ID NO: 1302532 - DNA, 25 bp, Homo sapien
catacctgccgacacacaaattaaa

SEQ ID NO: 1302533 - DNA, 25 bp, Homo sapien
tatcaaaggttggatgcaggaatcc

SEQ ID NO: 1302534 - DNA, 25 bp, Homo sapien
gagttgcctaaagctacacacccag

SEQ ID NO: 1302535 - DNA, 25 bp, Homo sapien
gattatgaagccacatttgggaacc

SEQ ID NO: 1302536 - DNA, 25 bp, Homo sapien
ccagtcagagttacaggccagtgcc

SEQ ID NO: 1302537 - DNA, 25 bp, Homo sapien
aagttctatagacccaatgggcagg

SEQ ID NO: 1302538 - DNA, 25 bp, Homo sapien
ggatacagtagaaccagcctcaggg

SEQ ID NO: 1302539 - DNA, 25 bp, Homo sapien
agtgatggacctgcgattagaaccc

SEQ ID NO: 1302540 - DNA, 25 bp, Homo sapien
gcaagggctttgctagacgtcacag

SEQ ID NO: 1302541 - DNA, 25 bp, Homo sapien
cagacaggctcaggtgtgcaaacca

SEQ ID NO: 1302542 - DNA, 25 bp, Homo sapien
agcccagggcgaggcgccggggtgg

SEQ ID NO: 1302543 - DNA, 25 bp, Homo sapien
cagcccagggcgaggcgccggggtg

SEQ ID NO: 1302544 - DNA, 25 bp, Homo sapien
tcagcccagggcgaggcgccggggt

SEQ ID NO: 1302545 - DNA, 25 bp, Homo sapien
cgccggggtgggcgcggggcagagg

SEQ ID NO: 1302546 - DNA, 25 bp, Homo sapien
tcgcaaccccgacgcccaggcctcc

SEQ ID NO: 1302547 - DNA, 25 bp, Homo sapien
ttcgcaaccccgacgcccaggcctc

SEQ ID NO: 1302548 - DNA, 25 bp, Homo sapien
agctgtaaatgcgacgtcttctggg

SEQ ID NO: 1302549 - DNA, 25 bp, Homo sapien
ggcgcctggtatccgtaggagtcaa

SEQ ID NO: 1302550 - DNA, 25 bp, Homo sapien
gtaggagtcaaagccgccgatgaag

SEQ ID NO: 1302551 - DNA, 25 bp, Homo sapien
tgcagctgtaaatgcgacgtcttct

SEQ ID NO: 1302552 - DNA, 25 bp, Homo sapien
gggcggcgcatgttagggatcggcg

SEQ ID NO: 1302553 - DNA, 25 bp, Homo sapien
cggcgcatgttagggatcggcggcg

SEQ ID NO: 1302554 - DNA, 25 bp, Homo sapien
gcgcatgttagggatcggcggcggg

SEQ ID NO: 1302555 - DNA, 25 bp, Homo sapien
agaggggcggcgcatgttagggatc

SEQ ID NO: 1302556 - DNA, 25 bp, Homo sapien
tgctcacgtagcaggcgaacacgaa

SEQ ID NO: 1302557 - DNA, 25 bp, Homo sapien
acgtagcaggcgaacacgaagccga

SEQ ID NO: 1302558 - DNA, 25 bp, Homo sapien
tccaggaacactttgctcacgtagc

SEQ ID NO: 1302559 - DNA, 25 bp, Homo sapien
cactttgctcacgtagcaggcgaac

SEQ ID NO: 1302560 - DNA, 25 bp, Homo sapien
caggcgggagttcagaacaggtgtc

SEQ ID NO: 1302561 - DNA, 25 bp, Homo sapien
tcaatgtaggggtagtcaagcaggc

SEQ ID NO: 1302562 - DNA, 25 bp, Homo sapien
agggcttcaatgtaggggtagtcaa

SEQ ID NO: 1302563 - DNA, 25 bp, Homo sapien
ctccagagccaggcgggagttcaga

SEQ ID NO: 1302564 - DNA, 25 bp, Homo sapien
ctccaagtagaagcagatgataaat

SEQ ID NO: 1302565 - DNA, 25 bp, Homo sapien
gtccaacctccaagtagaagcagat

SEQ ID NO: 1302566 - DNA, 25 bp, Homo sapien
ccagccaacccagagcaccagccag

SEQ ID NO: 1302567 - DNA, 25 bp, Homo sapien
tccaacctccaagtagaagcagatg

SEQ ID NO: 1302568 - DNA, 25 bp, Homo sapien
gatgcttctacccaagtcctgtgcc

SEQ ID NO: 1302569 - DNA, 25 bp, Homo sapien
gaacagcattccacccacggtagtg

SEQ ID NO: 1302570 - DNA, 25 bp, Homo sapien
cctgcaattctagtggctgtcacct

SEQ ID NO: 1302571 - DNA, 25 bp, Homo sapien
caatgctaggtcagcactgaggccc

SEQ ID NO: 1302572 - DNA, 25 bp, Homo sapien
taccgggagcggtactgcacggtgc

SEQ ID NO: 1302573 - DNA, 25 bp, Homo sapien
actgcacggtgccaaagatgcccag

SEQ ID NO: 1302574 - DNA, 25 bp, Homo sapien
gagcggtactgcacggtgccaaaga

SEQ ID NO: 1302575 - DNA, 25 bp, Homo sapien
caggatgaggtaccgggagcggtac

SEQ ID NO: 1302576 - DNA, 25 bp, Homo sapien
gagcccactggtagcccaggaagtc

SEQ ID NO: 1302577 - DNA, 25 bp, Homo sapien
gatgtgcaggaagttggctaggatg

SEQ ID NO: 1302578 - DNA, 25 bp, Homo sapien
aggatgggagcccactggtagccca

SEQ ID NO: 1302579 - DNA, 25 bp, Homo sapien
ggaagtcaaagatctgccgctccag

SEQ ID NO: 1302580 - DNA, 25 bp, Homo sapien
ctgtcccatcttggcaccacctttt

SEQ ID NO: 1302581 - DNA, 25 bp, Homo sapien
tgtcccatcttggcaccaccttttc

SEQ ID NO: 1302582 - DNA, 25 bp, Homo sapien
gtcccatcttggcaccaccttttcc

SEQ ID NO: 1302583 - DNA, 25 bp, Homo sapien
tctgagtacataacatgtattcgtc

SEQ ID NO: 1302584 - DNA, 25 bp, Homo sapien
cttataaacatttctcgagtgcctt

SEQ ID NO: 1302585 - DNA, 25 bp, Homo sapien
cccggccacatttatttatctccta

SEQ ID NO: 1302586 - DNA, 25 bp, Homo sapien
tatctcctatttgatctagacagta

SEQ ID NO: 1302587 - DNA, 25 bp, Homo sapien
ctggttggatctgttggaggaagca

SEQ ID NO: 1302588 - DNA, 25 bp, Homo sapien
gggaacggaatggaacaatcatttc

SEQ ID NO: 1302589 - DNA, 25 bp, Homo sapien
gaatggaacaatcatttcctggccc

SEQ ID NO: 1302590 - DNA, 25 bp, Homo sapien
ccagaggcggctggttggatctgtt

SEQ ID NO: 1302591 - DNA, 25 bp, Homo sapien
gctgcagggatgttctctagggacc

SEQ ID NO: 1302592 - DNA, 25 bp, Homo sapien
ggattctgtgcctgggaggactcca

SEQ ID NO: 1302593 - DNA, 25 bp, Homo sapien
gacaggagttggacctaacaggccc

SEQ ID NO: 1302594 - DNA, 25 bp, Homo sapien
tagtggcacctcctagactgatggg

SEQ ID NO: 1302595 - DNA, 25 bp, Homo sapien
gcccccaaatgtccctctccaacag

SEQ ID NO: 1302596 - DNA, 25 bp, Homo sapien
tgcacctggcgagttcaattgtttt

SEQ ID NO: 1302597 - DNA, 25 bp, Homo sapien
cagacctgggttcggcgatggaggt

SEQ ID NO: 1302598 - DNA, 25 bp, Homo sapien
gacctgggttcggcgatggaggtcc

SEQ ID NO: 1302599 - DNA, 25 bp, Homo sapien
tcagacctgggttcggcgatggagg

SEQ ID NO: 1302600 - DNA, 25 bp, Homo sapien
agacctgggttcggcgatggaggtc

SEQ ID NO: 1302601 - DNA, 25 bp, Homo sapien
agaaggcgaccagcgtgcagcgccc

SEQ ID NO: 1302602 - DNA, 25 bp, Homo sapien
tgcagcgcccgctgcacttgcccat

SEQ ID NO: 1302603 - DNA, 25 bp, Homo sapien
cagcagaaggcgaccagcgtgcagc

SEQ ID NO: 1302604 - DNA, 25 bp, Homo sapien
gcggcgcccttcttgctccgcggcc

SEQ ID NO: 1302605 - DNA, 25 bp, Homo sapien
agcgattctcacctcaatcttccaa

SEQ ID NO: 1302606 - DNA, 25 bp, Homo sapien
gtcaagcgattctcacctcaatctt

SEQ ID NO: 1302607 - DNA, 25 bp, Homo sapien
aagcgattctcacctcaatcttcca

SEQ ID NO: 1302608 - DNA, 25 bp, Homo sapien
gccttgatcccctggggtcaagcga

SEQ ID NO: 1302609 - DNA, 25 bp, Homo sapien
gatgttctacctgtatgtggacctg

SEQ ID NO: 1302610 - DNA, 25 bp, Homo sapien
gcaatgcactttgggaaacctcaac

SEQ ID NO: 1302611 - DNA, 25 bp, Homo sapien
tgagcatgggatctttatgccccaa

SEQ ID NO: 1302612 - DNA, 25 bp, Homo sapien
ggcttgatgccctccttgtggtaga

SEQ ID NO: 1302613 - DNA, 25 bp, Homo sapien
tactgataattattctttgtcattt

SEQ ID NO: 1302614 - DNA, 25 bp, Homo sapien
ttactgataattattctttgtcatt

SEQ ID NO: 1302615 - DNA, 25 bp, Homo sapien
gtggccacatcatgctctattctga

SEQ ID NO: 1302616 - DNA, 25 bp, Homo sapien
aagacagcaataaatccaatccaca

SEQ ID NO: 1302617 - DNA, 25 bp, Homo sapien
cagcaataaatccaatccacatggc

SEQ ID NO: 1302618 - DNA, 25 bp, Homo sapien
gatttatagcaatcaagcctcaaaa

SEQ ID NO: 1302619 - DNA, 25 bp, Homo sapien
cacattgggcctgcattagaaaaca

SEQ ID NO: 1302620 - DNA, 25 bp, Homo sapien
tctgaggtctcaaagacaagcggcc

SEQ ID NO: 1302621 - DNA, 25 bp, Homo sapien
tcatctgaagggagggtgctagcct

SEQ ID NO: 1302622 - DNA, 25 bp, Homo sapien
gagcttgccttagtcatcctggtga

SEQ ID NO: 1302623 - DNA, 25 bp, Homo sapien
agtctcttgtcactcgatgctgaga

SEQ ID NO: 1302624 - DNA, 25 bp, Homo sapien
acagtctcttgtcactcgatgctga

SEQ ID NO: 1302625 - DNA, 25 bp, Homo sapien
ctcttgtcactcgatgctgagataa

SEQ ID NO: 1302626 - DNA, 25 bp, Homo sapien
tctcttgtcactcgatgctgagata

SEQ ID NO: 1302627 - DNA, 25 bp, Homo sapien
tactctcaccacttatgagcaatgg

SEQ ID NO: 1302628 - DNA, 25 bp, Homo sapien
ccacttatgagcaatggtgagactg

SEQ ID NO: 1302629 - DNA, 25 bp, Homo sapien
aatggtgagactgacattgataccc

SEQ ID NO: 1302630 - DNA, 25 bp, Homo sapien
gactgacattgatacccacataaag

SEQ ID NO: 1302631 - DNA, 25 bp, Homo sapien
gcatggccgggcagcttatacaata

SEQ ID NO: 1302632 - DNA, 25 bp, Homo sapien
cttatacaatattctcctgcttgtg

SEQ ID NO: 1302633 - DNA, 25 bp, Homo sapien
atgggctcatcagggtggaaagcca

SEQ ID NO: 1302634 - DNA, 25 bp, Homo sapien
cacttcattgatggagccagcatgg

SEQ ID NO: 1302635 - DNA, 25 bp, Homo sapien
catgactggcatgtttgaatacaag

SEQ ID NO: 1302636 - DNA, 25 bp, Homo sapien
tactgtattcaaacagagacctgag

SEQ ID NO: 1302637 - DNA, 25 bp, Homo sapien
tttgaataagacatggactcacctc

SEQ ID NO: 1302638 - DNA, 25 bp, Homo sapien
aaaggtaacccaactcatggcaggg

SEQ ID NO: 1302639 - DNA, 25 bp, Homo sapien
ttttccattgaattaacaggcagaa

SEQ ID NO: 1302640 - DNA, 25 bp, Homo sapien
taacaggcagaaggaatactgaatt

SEQ ID NO: 1302641 - DNA, 25 bp, Homo sapien
tgaattaacaggcagaaggaatact

SEQ ID NO: 1302642 - DNA, 25 bp, Homo sapien
tccattgaattaacaggcagaagga

SEQ ID NO: 1302643 - DNA, 25 bp, Homo sapien
tgaatactactgaaatactactgaa

SEQ ID NO: 1302644 - DNA, 25 bp, Homo sapien
tactttctgcaatgctagaataaat

SEQ ID NO: 1302645 - DNA, 25 bp, Homo sapien
atgtactttctgcaatgctagaata

SEQ ID NO: 1302646 - DNA, 25 bp, Homo sapien
tctgaatactactgaaatactactg

SEQ ID NO: 1302647 - DNA, 25 bp, Homo sapien
ggcaagttgagtgaactgctgagat

SEQ ID NO: 1302648 - DNA, 25 bp, Homo sapien
tcctctgagccaatgatgactttat

SEQ ID NO: 1302649 - DNA, 25 bp, Homo sapien
ctgatatgatatggcttaggaagaa

SEQ ID NO: 1302650 - DNA, 25 bp, Homo sapien
caccatgcgtggcatatggcacaat

SEQ ID NO: 1302651 - DNA, 25 bp, Homo sapien
tgtcatgcacaaaaagctggtcctc

SEQ ID NO: 1302652 - DNA, 25 bp, Homo sapien
gaaactacagagctgaacccaagac

SEQ ID NO: 1302653 - DNA, 25 bp, Homo sapien
taattcaataaagggcagtatggca

SEQ ID NO: 1302654 - DNA, 25 bp, Homo sapien
gctgtcatcagctaggctccataga

SEQ ID NO: 1302655 - DNA, 25 bp, Homo sapien
gcttccatcaggtgaccaagaacat

SEQ ID NO: 1302656 - DNA, 25 bp, Homo sapien
gtcggctgagccagctgctattttg

SEQ ID NO: 1302657 - DNA, 25 bp, Homo sapien
tgtcggctgagccagctgctatttt

SEQ ID NO: 1302658 - DNA, 25 bp, Homo sapien
atcaggtgaccaagaacatctcaga

SEQ ID NO: 1302659 - DNA, 25 bp, Homo sapien
tgaaatatctttacacatctctctt

SEQ ID NO: 1302660 - DNA, 25 bp, Homo sapien
caagatttctctgccagcttagtca

SEQ ID NO: 1302661 - DNA, 25 bp, Homo sapien
tgacatactgctacctgttaaggct

SEQ ID NO: 1302662 - DNA, 25 bp, Homo sapien
caaaacaactatcggccagaggcct

SEQ ID NO: 1302663 - DNA, 25 bp, Homo sapien
ggaaaaatgtcacacacaatgttgg

SEQ ID NO: 1302664 - DNA, 25 bp, Homo sapien
tatttgggtgatgtcaggtaaacag

SEQ ID NO: 1302665 - DNA, 25 bp, Homo sapien
gatgtcaggtaaacagtgagattgt

SEQ ID NO: 1302666 - DNA, 25 bp, Homo sapien
ggtgatgtcaggtaaacagtgagat

SEQ ID NO: 1302667 - DNA, 25 bp, Homo sapien
aatcaaaaaagcactgtaccatacc

SEQ ID NO: 1302668 - DNA, 25 bp, Homo sapien
tcttatcaatgtagaaactgatgcc

SEQ ID NO: 1302669 - DNA, 25 bp, Homo sapien
gtccaatcttcttatcaatgtagaa

SEQ ID NO: 1302670 - DNA, 25 bp, Homo sapien
aatcttcttatcaatgtagaaactg

SEQ ID NO: 1302671 - DNA, 25 bp, Homo sapien
cttcttatcaatgtagaaactgatg

SEQ ID NO: 1302672 - DNA, 25 bp, Homo sapien
tgactatctcacctaaagctttccc

SEQ ID NO: 1302673 - DNA, 25 bp, Homo sapien
gagactacagtcctagattcttgac

SEQ ID NO: 1302674 - DNA, 25 bp, Homo sapien
cgtctgatggaatctgtgagcaatc

SEQ ID NO: 1302675 - DNA, 25 bp, Homo sapien
gctttccccattacaacacattcta

SEQ ID NO: 1302676 - DNA, 25 bp, Homo sapien
aggccagtcactgaatctgcatggc

SEQ ID NO: 1302677 - DNA, 25 bp, Homo sapien
gccagtcactgaatctgcatggcct

SEQ ID NO: 1302678 - DNA, 25 bp, Homo sapien
tcaggccagtcactgaatctgcatg

SEQ ID NO: 1302679 - DNA, 25 bp, Homo sapien
caggccagtcactgaatctgcatgg

SEQ ID NO: 1302680 - DNA, 25 bp, Homo sapien
aatatggcagcctgtatcccaaata

SEQ ID NO: 1302681 - DNA, 25 bp, Homo sapien
ccaaatatgaaacatccttatactt

SEQ ID NO: 1302682 - DNA, 25 bp, Homo sapien
tctagcaacctggtttcaaacattg

SEQ ID NO: 1302683 - DNA, 25 bp, Homo sapien
cagtccatctctgttatacaagagc

SEQ ID NO: 1302684 - DNA, 25 bp, Homo sapien
cagaaataatctgatcacttgtgtc

SEQ ID NO: 1302685 - DNA, 25 bp, Homo sapien
atcacttgtgtcattgaaggtcaca

SEQ ID NO: 1302686 - DNA, 25 bp, Homo sapien
gaaataatctgatcacttgtgtcat

SEQ ID NO: 1302687 - DNA, 25 bp, Homo sapien
aatctgatcacttgtgtcattgaag

SEQ ID NO: 1302688 - DNA, 25 bp, Homo sapien
tccacgaaagcagcaaattaaccag

SEQ ID NO: 1302689 - DNA, 25 bp, Homo sapien
cctgagtcccagtaaaagggctttg

SEQ ID NO: 1302690 - DNA, 25 bp, Homo sapien
gacaaaagcttgtccctccacgaaa

SEQ ID NO: 1302691 - DNA, 25 bp, Homo sapien
gaaaagcaccgacatattcctggct

SEQ ID NO: 1302692 - DNA, 25 bp, Homo sapien
tgtctgtcctacaaagatgttctcc

SEQ ID NO: 1302693 - DNA, 25 bp, Homo sapien
gatgttctcctacatcatctcaaca

SEQ ID NO: 1302694 - DNA, 25 bp, Homo sapien
tggccccttatcactcctaaatagt

SEQ ID NO: 1302695 - DNA, 25 bp, Homo sapien
gaaatacagatacactatcaccatt

SEQ ID NO: 1302696 - DNA, 25 bp, Homo sapien
ggcagacagaaaggacatatactct

SEQ ID NO: 1302697 - DNA, 25 bp, Homo sapien
ggagctggttaaaaagcagtcatct

SEQ ID NO: 1302698 - DNA, 25 bp, Homo sapien
caaaaagctgtttaatgatgcctta

SEQ ID NO: 1302699 - DNA, 25 bp, Homo sapien
gactaaaaatgcaagtgctgttgga

SEQ ID NO: 1302700 - DNA, 25 bp, Homo sapien
actatcccacacagccacggtttta

SEQ ID NO: 1302701 - DNA, 25 bp, Homo sapien
ttaactgtgccatcgtcactgccag

SEQ ID NO: 1302702 - DNA, 25 bp, Homo sapien
ctcctggctggataacaggaattca

SEQ ID NO: 1302703 - DNA, 25 bp, Homo sapien
tcactgccagtgcagacaagctgag

SEQ ID NO: 1302704 - DNA, 25 bp, Homo sapien
gggtgacagtgataaatcggatact

SEQ ID NO: 1302705 - DNA, 25 bp, Homo sapien
aaaggacgccaagaattagtatgag

SEQ ID NO: 1302706 - DNA, 25 bp, Homo sapien
tcggatactaaagtagctacccaaa

SEQ ID NO: 1302707 - DNA, 25 bp, Homo sapien
acagactataaacacctcacttggg

SEQ ID NO: 1302708 - DNA, 25 bp, Homo sapien
ccttcagtgtggcatagttatcaca

SEQ ID NO: 1302709 - DNA, 25 bp, Homo sapien
cagtgtggcatagttatcacagtca

SEQ ID NO: 1302710 - DNA, 25 bp, Homo sapien
tgtggcatagttatcacagtcacca

SEQ ID NO: 1302711 - DNA, 25 bp, Homo sapien
cccttcagtgtggcatagttatcac

SEQ ID NO: 1302712 - DNA, 25 bp, Homo sapien
ggagatgggttctgtgagcattact

SEQ ID NO: 1302713 - DNA, 25 bp, Homo sapien
caaagggtacttataaatttatcag

SEQ ID NO: 1302714 - DNA, 25 bp, Homo sapien
cagaacaacagttctcaggtcaggc

SEQ ID NO: 1302715 - DNA, 25 bp, Homo sapien
aatttatcagaacaacagttctcag

SEQ ID NO: 1302716 - DNA, 25 bp, Homo sapien
catgcagcctgttatgttgccaaca

SEQ ID NO: 1302717 - DNA, 25 bp, Homo sapien
gttgccaacatagagtgataccttc

SEQ ID NO: 1302718 - DNA, 25 bp, Homo sapien
taagtgccttggtaaattagctgga

SEQ ID NO: 1302719 - DNA, 25 bp, Homo sapien
tgtatttaccccatggactccaagt

SEQ ID NO: 1302720 - DNA, 25 bp, Homo sapien
cggtcaaatcctgcagatgctaagg

SEQ ID NO: 1302721 - DNA, 25 bp, Homo sapien
acttccccttcatgtccagagagca

SEQ ID NO: 1302722 - DNA, 25 bp, Homo sapien
tcggtcaaatcctgcagatgctaag

SEQ ID NO: 1302723 - DNA, 25 bp, Homo sapien
aacggatcctcagcatgggtgaagt

SEQ ID NO: 1302724 - DNA, 25 bp, Homo sapien
tagcaaacggatcctcagcatgggt

SEQ ID NO: 1302725 - DNA, 25 bp, Homo sapien
ttttttcatagcaaacggatcctca

SEQ ID NO: 1302726 - DNA, 25 bp, Homo sapien
ttttcatagcaaacggatcctcagc

SEQ ID NO: 1302727 - DNA, 25 bp, Homo sapien
ctcccaacagcaactcatgccgctg

SEQ ID NO: 1302728 - DNA, 25 bp, Homo sapien
aacagcaactcatgccgctgccgct

SEQ ID NO: 1302729 - DNA, 25 bp, Homo sapien
actcatgccgctgccgcttgactgg

SEQ ID NO: 1302730 - DNA, 25 bp, Homo sapien
agcaactcatgccgctgccgcttga

SEQ ID NO: 1302731 - DNA, 25 bp, Homo sapien
tcaggcgccacgcaattggttccaa

SEQ ID NO: 1302732 - DNA, 25 bp, Homo sapien
ccagcttggaagaaccaatcggctt

SEQ ID NO: 1302733 - DNA, 25 bp, Homo sapien
gttccaaattagtccttcctccaca

SEQ ID NO: 1302734 - DNA, 25 bp, Homo sapien
gcggcaaccggtctcttcagcgccg

SEQ ID NO: 1302735 - DNA, 25 bp, Homo sapien
gacggagtctcactgtgtcatcagg

SEQ ID NO: 1302736 - DNA, 25 bp, Homo sapien
attacaggcgcctgccatcacgcct

SEQ ID NO: 1302737 - DNA, 25 bp, Homo sapien
gcctccacctcaccggttcaagtga

SEQ ID NO: 1302738 - DNA, 25 bp, Homo sapien
ttctcctgcctccagagtagctggg

SEQ ID NO: 1302739 - DNA, 25 bp, Homo sapien
gcgtatgaattgctgtagtaagaaa

SEQ ID NO: 1302740 - DNA, 25 bp, Homo sapien
caaattgaattacaggtgatttcat

SEQ ID NO: 1302741 - DNA, 25 bp, Homo sapien
caaaaagttgtgtatgcgtatgaat

SEQ ID NO: 1302742 - DNA, 25 bp, Homo sapien
ccaacaatggattattaggtacgtg

SEQ ID NO: 1302743 - DNA, 25 bp, Homo sapien
ctttattctgtcattcagatgtacc

SEQ ID NO: 1302744 - DNA, 25 bp, Homo sapien
cagtttttcactgctaacgcttcta

SEQ ID NO: 1302745 - DNA, 25 bp, Homo sapien
tattctgtcattcagatgtaccaca

SEQ ID NO: 1302746 - DNA, 25 bp, Homo sapien
cactgctaacgcttctagactggtc

SEQ ID NO: 1302747 - DNA, 25 bp, Homo sapien
gtataaataccagatatgccctctg

SEQ ID NO: 1302748 - DNA, 25 bp, Homo sapien
ggtctggtccatcgaactcatatgt

SEQ ID NO: 1302749 - DNA, 25 bp, Homo sapien
tggtccatcgaactcatatgtcatc

SEQ ID NO: 1302750 - DNA, 25 bp, Homo sapien
ccaggtctggtccatcgaactcata

SEQ ID NO: 1302751 - DNA, 25 bp, Homo sapien
tatctctggccatatctcttaaggg

SEQ ID NO: 1302752 - DNA, 25 bp, Homo sapien
tgggcagaagatcacccttgaggct

SEQ ID NO: 1302753 - DNA, 25 bp, Homo sapien
tcattataggcaagaagagaggcgg

SEQ ID NO: 1302754 - DNA, 25 bp, Homo sapien
tgaggctgtcttgaacactacctgc

SEQ ID NO: 1302755 - DNA, 25 bp, Homo sapien
ctgaccctacaaggaatccttctag

SEQ ID NO: 1302756 - DNA, 25 bp, Homo sapien
tttcaggactagtcagctctgggag

SEQ ID NO: 1302757 - DNA, 25 bp, Homo sapien
tgttttgttcccagctaccgttagc

SEQ ID NO: 1302758 - DNA, 25 bp, Homo sapien
gcagatttggacacttgtttcagga

SEQ ID NO: 1302759 - DNA, 25 bp, Homo sapien
ggtacttgacatatcaggactcatc

SEQ ID NO: 1302760 - DNA, 25 bp, Homo sapien
tagagaaaggttgccagtcctgagc

SEQ ID NO: 1302761 - DNA, 25 bp, Homo sapien
gatacagcagagagcgttgcccagt

SEQ ID NO: 1302762 - DNA, 25 bp, Homo sapien
gtgttgcctactcagaagccttcag

SEQ ID NO: 1302763 - DNA, 25 bp, Homo sapien
cagtggttcgctttcttctatgaca

SEQ ID NO: 1302764 - DNA, 25 bp, Homo sapien
tataaagtatagtggttttgccgct

SEQ ID NO: 1302765 - DNA, 25 bp, Homo sapien
agtggaaatagtgccaaactctgtg

SEQ ID NO: 1302766 - DNA, 25 bp, Homo sapien
tgccgctttagccttggtcgactca

SEQ ID NO: 1302767 - DNA, 25 bp, Homo sapien
tagccttggtcgactcactttacat

SEQ ID NO: 1302768 - DNA, 25 bp, Homo sapien
aaattaagtggtcccctattgattg

SEQ ID NO: 1302769 - DNA, 25 bp, Homo sapien
cctggccaattatgtgctatgattg

SEQ ID NO: 1302770 - DNA, 25 bp, Homo sapien
cacctggccaattatgtgctatgat

SEQ ID NO: 1302771 - DNA, 25 bp, Homo sapien
ggtcccctattgattgtgtgctata

SEQ ID NO: 1302772 - DNA, 25 bp, Homo sapien
gggcaaggcacacatcaaaagacag

SEQ ID NO: 1302773 - DNA, 25 bp, Homo sapien
tcccctcatgcaacaggcaggtttg

SEQ ID NO: 1302774 - DNA, 25 bp, Homo sapien
tccagcggccacagctagaaaacag

SEQ ID NO: 1302775 - DNA, 25 bp, Homo sapien
tggtccctttgcaagtgaaccctgc

SEQ ID NO: 1302776 - DNA, 25 bp, Homo sapien
caccatggtacaagcctgggttctg

SEQ ID NO: 1302777 - DNA, 25 bp, Homo sapien
tcataagtactagcctggtgcacag

SEQ ID NO: 1302778 - DNA, 25 bp, Homo sapien
tgacagttcaatagccaaacctggg

SEQ ID NO: 1302779 - DNA, 25 bp, Homo sapien
gagccaaaggcactagcagatcact

SEQ ID NO: 1302780 - DNA, 25 bp, Homo sapien
cacaggataaaccaagactcccaga

SEQ ID NO: 1302781 - DNA, 25 bp, Homo sapien
caggctccgagactgtccatttcag

SEQ ID NO: 1302782 - DNA, 25 bp, Homo sapien
accttcaggccgttatttctgccca

SEQ ID NO: 1302783 - DNA, 25 bp, Homo sapien
tgatcagctgattaacaggctccga

SEQ ID NO: 1302784 - DNA, 25 bp, Homo sapien
cagagcaccctatgagtgcagttaa

SEQ ID NO: 1302785 - DNA, 25 bp, Homo sapien
cagagtagtagtcagcaacagtgca

SEQ ID NO: 1302786 - DNA, 25 bp, Homo sapien
gaccccagaagaattcgtggatttg

SEQ ID NO: 1302787 - DNA, 25 bp, Homo sapien
cacatacaccatgggaactggaact

SEQ ID NO: 1302788 - DNA, 25 bp, Homo sapien
cataagtgcgagtgcaaactgcagt

SEQ ID NO: 1302789 - DNA, 25 bp, Homo sapien
tgcgagtgcaaactgcagtgccgtg

SEQ ID NO: 1302790 - DNA, 25 bp, Homo sapien
tctcataagtgcgagtgcaaactgc

SEQ ID NO: 1302791 - DNA, 25 bp, Homo sapien
tgcctctttctcataagtgcgagtg

SEQ ID NO: 1302792 - DNA, 25 bp, Homo sapien
ttcagtgtccccaccagtcacgagc

SEQ ID NO: 1302793 - DNA, 25 bp, Homo sapien
cagtgtccccaccagtcacgagcct

SEQ ID NO: 1302794 - DNA, 25 bp, Homo sapien
gtgtccccaccagtcacgagcctgt

SEQ ID NO: 1302795 - DNA, 25 bp, Homo sapien
tgtccccaccagtcacgagcctgtc

SEQ ID NO: 1302796 - DNA, 25 bp, Homo sapien
cttgcccgtcccatttctgcaggtg

SEQ ID NO: 1302797 - DNA, 25 bp, Homo sapien
caagtgtggtctcttgcccgtccca

SEQ ID NO: 1302798 - DNA, 25 bp, Homo sapien
gttttccatcaattagctcccgcac

SEQ ID NO: 1302799 - DNA, 25 bp, Homo sapien
aattagctcccgcacaagtgtggtc

SEQ ID NO: 1302800 - DNA, 25 bp, Homo sapien
gaaagagggtagaggcctgagctgt

SEQ ID NO: 1302801 - DNA, 25 bp, Homo sapien
tggaaagagggtagaggcctgagct

SEQ ID NO: 1302802 - DNA, 25 bp, Homo sapien
aaagagggtagaggcctgagctgtg

SEQ ID NO: 1302803 - DNA, 25 bp, Homo sapien
ctgtggaaagagggtagaggcctga

SEQ ID NO: 1302804 - DNA, 25 bp, Homo sapien
gctgccagcatacatacatcagctg

SEQ ID NO: 1302805 - DNA, 25 bp, Homo sapien
tgggtgctgccagcatacatacatc

SEQ ID NO: 1302806 - DNA, 25 bp, Homo sapien
ttagccaacaagagggcagcaacca

SEQ ID NO: 1302807 - DNA, 25 bp, Homo sapien
ccttgaagtggttcctcagctctgg

SEQ ID NO: 1302808 - DNA, 25 bp, Homo sapien
gtagatactgaggtcagaagaacat

SEQ ID NO: 1302809 - DNA, 25 bp, Homo sapien
gagtagatactgaggtcagaagaac

SEQ ID NO: 1302810 - DNA, 25 bp, Homo sapien
agctggagctggagtagatactgag

SEQ ID NO: 1302811 - DNA, 25 bp, Homo sapien
agctggagtagatactgaggtcaga

SEQ ID NO: 1302812 - DNA, 25 bp, Homo sapien
tctgtgttcttgaaggtgctgtgtg

SEQ ID NO: 1302813 - DNA, 25 bp, Homo sapien
aaggtgctgtgtgtttttagggtga

SEQ ID NO: 1302814 - DNA, 25 bp, Homo sapien
tccacccccaacttaaagctgatct

SEQ ID NO: 1302815 - DNA, 25 bp, Homo sapien
ccacctgcctggtagcaaaacccac

SEQ ID NO: 1302816 - DNA, 25 bp, Homo sapien
tagggggaaggttatgagtatatga

SEQ ID NO: 1302817 - DNA, 25 bp, Homo sapien
agggggaaggttatgagtatatgag

SEQ ID NO: 1302818 - DNA, 25 bp, Homo sapien
gtagggggaaggttatgagtatatg

SEQ ID NO: 1302819 - DNA, 25 bp, Homo sapien
cctagaattactgggcatagcgccc

SEQ ID NO: 1302820 - DNA, 25 bp, Homo sapien
catagcgcccaagatagggtagagg

SEQ ID NO: 1302821 - DNA, 25 bp, Homo sapien
tagaggccgttgagagctttgacct

SEQ ID NO: 1302822 - DNA, 25 bp, Homo sapien
gctcctctaagaatgactgcctgcc

SEQ ID NO: 1302823 - DNA, 25 bp, Homo sapien
aaattcttgctgtccactagcttcc

SEQ ID NO: 1302824 - DNA, 25 bp, Homo sapien
catcgaaattcttgctgtccactag

SEQ ID NO: 1302825 - DNA, 25 bp, Homo sapien
tcgaaattcttgctgtccactagct

SEQ ID NO: 1302826 - DNA, 25 bp, Homo sapien
agtcatcgaaattcttgctgtccac

SEQ ID NO: 1302827 - DNA, 25 bp, Homo sapien
tgagagaagctacaagagagcaggc

SEQ ID NO: 1302828 - DNA, 25 bp, Homo sapien
ggctgagagaagctacaagagagca

SEQ ID NO: 1302829 - DNA, 25 bp, Homo sapien
agctacaagagagcaggcgtgcaag

SEQ ID NO: 1302830 - DNA, 25 bp, Homo sapien
gcaggcgtgcaagggctccgacggc

SEQ ID NO: 1302831 - DNA, 25 bp, Homo sapien
cagaaattctgccaattcggtcagc

SEQ ID NO: 1302832 - DNA, 25 bp, Homo sapien
ggtttcttcgcacagctccgagctt

SEQ ID NO: 1302833 - DNA, 25 bp, Homo sapien
agtgctctgggcttttccggtttct

SEQ ID NO: 1302834 - DNA, 25 bp, Homo sapien
gagctttagctcaggtcgttcccag

SEQ ID NO: 1302835 - DNA, 25 bp, Homo sapien
ctgaggcagacgatgctgggagcag

SEQ ID NO: 1302836 - DNA, 25 bp, Homo sapien
tagctgaggcagacgatgctgggag

SEQ ID NO: 1302837 - DNA, 25 bp, Homo sapien
ttagctgaggcagacgatgctggga

SEQ ID NO: 1302838 - DNA, 25 bp, Homo sapien
cacagacaacttcaccatccacact

SEQ ID NO: 1302839 - DNA, 25 bp, Homo sapien
ccacacagacaacttcaccatccac

SEQ ID NO: 1302840 - DNA, 25 bp, Homo sapien
acatccacacagacaacttcaccat

SEQ ID NO: 1302841 - DNA, 25 bp, Homo sapien
atccacacagacaacttcaccatcc

SEQ ID NO: 1302842 - DNA, 25 bp, Homo sapien
catcagagactagggcagaggcctg

SEQ ID NO: 1302843 - DNA, 25 bp, Homo sapien
gcatcagagactagggcagaggcct

SEQ ID NO: 1302844 - DNA, 25 bp, Homo sapien
atcagagactagggcagaggcctgc

SEQ ID NO: 1302845 - DNA, 25 bp, Homo sapien
taaagcctcgctgatggcagaagtc

SEQ ID NO: 1302846 - DNA, 25 bp, Homo sapien
taagaaagaaacagcgtgacctcgg

SEQ ID NO: 1302847 - DNA, 25 bp, Homo sapien
taatcggtgacagctggccttgtga

SEQ ID NO: 1302848 - DNA, 25 bp, Homo sapien
tgtgtagccctatatgacccagcct

SEQ ID NO: 1302849 - DNA, 25 bp, Homo sapien
gtgcctatcagaccaccagaaagcc

SEQ ID NO: 1302850 - DNA, 25 bp, Homo sapien
ttctgtgcctatcagaccaccagaa

SEQ ID NO: 1302851 - DNA, 25 bp, Homo sapien
cctatcagaccaccagaaagcccac

SEQ ID NO: 1302852 - DNA, 25 bp, Homo sapien
ctgtgcctatcagaccaccagaaag

SEQ ID NO: 1302853 - DNA, 25 bp, Homo sapien
tagggctgtcatcacagaggcacgg

SEQ ID NO: 1302854 - DNA, 25 bp, Homo sapien
caggttatagtcaggctctcacggc

SEQ ID NO: 1302855 - DNA, 25 bp, Homo sapien
tctcacggcttcatgctgggtgtct

SEQ ID NO: 1302856 - DNA, 25 bp, Homo sapien
tccctgagtggtgattcctagacac

SEQ ID NO: 1302857 - DNA, 25 bp, Homo sapien
cagcaaatacctcttgagcacttcc

SEQ ID NO: 1302858 - DNA, 25 bp, Homo sapien
acacagcaatcagtatttatccagc

SEQ ID NO: 1302859 - DNA, 25 bp, Homo sapien
aggctgggaacctcccttctggtca

SEQ ID NO: 1302860 - DNA, 25 bp, Homo sapien
ggtcagagcctcatatcccagtaag

SEQ ID NO: 1302861 - DNA, 25 bp, Homo sapien
tatatccaggtcttgcattgtgcgg

SEQ ID NO: 1302862 - DNA, 25 bp, Homo sapien
caggataccaaactggaacgtgctc

SEQ ID NO: 1302863 - DNA, 25 bp, Homo sapien
caacgagacagttgtggcaggcccc

SEQ ID NO: 1302864 - DNA, 25 bp, Homo sapien
tcttcatcaggtatggccaggtctg

SEQ ID NO: 1302865 - DNA, 25 bp, Homo sapien
gaacatttgcacaactaggtagctg

SEQ ID NO: 1302866 - DNA, 25 bp, Homo sapien
agaccctgagtttgcctccctgtgg

SEQ ID NO: 1302867 - DNA, 25 bp, Homo sapien
tgtttacacggatcaggcagaccct

SEQ ID NO: 1302868 - DNA, 25 bp, Homo sapien
ttccatctgcccttaactctagagg

SEQ ID NO: 1302869 - DNA, 25 bp, Homo sapien
tgcgcccagcctacttcattccttt

SEQ ID NO: 1302870 - DNA, 25 bp, Homo sapien
gcccagcctacttcattcctttcta

SEQ ID NO: 1302871 - DNA, 25 bp, Homo sapien
gcgcccagcctacttcattcctttc

SEQ ID NO: 1302872 - DNA, 25 bp, Homo sapien
ccagcctacttcattcctttctatg

SEQ ID NO: 1302873 - DNA, 25 bp, Homo sapien
ggtgctgacccaatgtatccatcac

SEQ ID NO: 1302874 - DNA, 25 bp, Homo sapien
gaccctggcatagcatgctagaagg

SEQ ID NO: 1302875 - DNA, 25 bp, Homo sapien
ctacatcttgtgtgactgaatctga

SEQ ID NO: 1302876 - DNA, 25 bp, Homo sapien
tttcttactggatggagtgggttcc

SEQ ID NO: 1302877 - DNA, 25 bp, Homo sapien
cagaggtaggtctggcatcagatga

SEQ ID NO: 1302878 - DNA, 25 bp, Homo sapien
ccagtgttttatcaggcttcagttc

SEQ ID NO: 1302879 - DNA, 25 bp, Homo sapien
gacttctaagtttcagacactgtga

SEQ ID NO: 1302880 - DNA, 25 bp, Homo sapien
tgtttgacagtgtcaccaagagcct

SEQ ID NO: 1302881 - DNA, 25 bp, Homo sapien
gcagtatacgctgaatttaatttgt

SEQ ID NO: 1302882 - DNA, 25 bp, Homo sapien
tacgtaacctgagcagtatacgctg

SEQ ID NO: 1302883 - DNA, 25 bp, Homo sapien
tttggtgcacccatacgtaacctga

SEQ ID NO: 1302884 - DNA, 25 bp, Homo sapien
atccctcacccacttcctacacttt

SEQ ID NO: 1302885 - DNA, 25 bp, Homo sapien
agcaatagtcccctgcaataccact

SEQ ID NO: 1302886 - DNA, 25 bp, Homo sapien
agactgatgggtaacctcttgaaaa

SEQ ID NO: 1302887 - DNA, 25 bp, Homo sapien
aatagtcccctgcaataccactaca

SEQ ID NO: 1302888 - DNA, 25 bp, Homo sapien
atgggtaacctcttgaaaaggcttg

SEQ ID NO: 1302889 - DNA, 25 bp, Homo sapien
gcgatggtcatctgtactggattcc

SEQ ID NO: 1302890 - DNA, 25 bp, Homo sapien
gttcagctgacaatgtggagggata

SEQ ID NO: 1302891 - DNA, 25 bp, Homo sapien
ggcggcaatgaagcgcatttcaaag

SEQ ID NO: 1302892 - DNA, 25 bp, Homo sapien
caatgtggagggataactcctttag

SEQ ID NO: 1302893 - DNA, 25 bp, Homo sapien
aatgtcagagatgataactagtttt

SEQ ID NO: 1302894 - DNA, 25 bp, Homo sapien
atgtcagagatgataactagttttc

SEQ ID NO: 1302895 - DNA, 25 bp, Homo sapien
tgagaagaaagcaataccctatccc

SEQ ID NO: 1302896 - DNA, 25 bp, Homo sapien
tcatctcgatgtctggccaagggaa

SEQ ID NO: 1302897 - DNA, 25 bp, Homo sapien
ctaggtataggtctgcaagttggcc

SEQ ID NO: 1302898 - DNA, 25 bp, Homo sapien
gaagcaggaaccaatctgttaggga

SEQ ID NO: 1302899 - DNA, 25 bp, Homo sapien
tttttagccaatcaggtttagctta

SEQ ID NO: 1302900 - DNA, 25 bp, Homo sapien
gatatttattctggacatgctcagg

SEQ ID NO: 1302901 - DNA, 25 bp, Homo sapien
agtttttagccaatcaggtttagct

SEQ ID NO: 1302902 - DNA, 25 bp, Homo sapien
gggatcctcgagacctggaccagta

SEQ ID NO: 1302903 - DNA, 25 bp, Homo sapien
ccattgcagccctatggatcatgcc

SEQ ID NO: 1302904 - DNA, 25 bp, Homo sapien
cattgctctatctcgtgtgaagtcc

SEQ ID NO: 1302905 - DNA, 25 bp, Homo sapien
gatccgctgtaggaacgttttggcc

SEQ ID NO: 1302906 - DNA, 25 bp, Homo sapien
tagtgtgaggctcaattccccttgc

SEQ ID NO: 1302907 - DNA, 25 bp, Homo sapien
tgtcctgatcaaggaataccaccac

SEQ ID NO: 1302908 - DNA, 25 bp, Homo sapien
cagggaatacttcaccgccccacct

SEQ ID NO: 1302909 - DNA, 25 bp, Homo sapien
tttcttaccttgatatgtcctgatc

SEQ ID NO: 1302910 - DNA, 25 bp, Homo sapien
ctgggtcgccggctggtttctttcg

SEQ ID NO: 1302911 - DNA, 25 bp, Homo sapien
ggtttctttcgacattgctgagtcc

SEQ ID NO: 1302912 - DNA, 25 bp, Homo sapien
caggcgtttccttcctcggtctgtg

SEQ ID NO: 1302913 - DNA, 25 bp, Homo sapien
ctgtggtgtgtgaggatcctttccc

SEQ ID NO: 1302914 - DNA, 25 bp, Homo sapien
ggagtaatggcgaaagcacacctga

SEQ ID NO: 1302915 - DNA, 25 bp, Homo sapien
tagaagggtgcgactcgtggttgga

SEQ ID NO: 1302916 - DNA, 25 bp, Homo sapien
tggttggagtaatggcgaaagcaca

SEQ ID NO: 1302917 - DNA, 25 bp, Homo sapien
cctggtgcaggtagtccctgctgtt

SEQ ID NO: 1302918 - DNA, 25 bp, Homo sapien
aaccatatcaaccgcctttgctgta

SEQ ID NO: 1302919 - DNA, 25 bp, Homo sapien
caaaccatatcaaccgcctttgctg

SEQ ID NO: 1302920 - DNA, 25 bp, Homo sapien
cattgttgactcaacgattattcag

SEQ ID NO: 1302921 - DNA, 25 bp, Homo sapien
catgattcgattacctaaccctggg

SEQ ID NO: 1302922 - DNA, 25 bp, Homo sapien
ttcctgttggacaagaggttttatc

SEQ ID NO: 1302923 - DNA, 25 bp, Homo sapien
aggaatttgcaatgtccccgtaggc

SEQ ID NO: 1302924 - DNA, 25 bp, Homo sapien
cttaatgttctgttaatgtccatgc

SEQ ID NO: 1302925 - DNA, 25 bp, Homo sapien
tagtcatcatgcttgcttaatgttc

SEQ ID NO: 1302926 - DNA, 25 bp, Homo sapien
ggaacttgcacatcagcatcgctgt

SEQ ID NO: 1302927 - DNA, 25 bp, Homo sapien
ccagctccagcacccttcttgtcca

SEQ ID NO: 1302928 - DNA, 25 bp, Homo sapien
agccttccgagctttctgggcaggc

SEQ ID NO: 1302929 - DNA, 25 bp, Homo sapien
tcatttagccttccgagctttctgg

SEQ ID NO: 1302930 - DNA, 25 bp, Homo sapien
ttagccttccgagctttctgggcag

SEQ ID NO: 1302931 - DNA, 25 bp, Homo sapien
accaacaaacggcaaaaggactcag

SEQ ID NO: 1302932 - DNA, 25 bp, Homo sapien
aaggactcaggggagctcgtcagaa

SEQ ID NO: 1302933 - DNA, 25 bp, Homo sapien
ggaagcatcacctgattttaagaat

SEQ ID NO: 1302934 - DNA, 25 bp, Homo sapien
gggttgctagaaaccatatccatgg

SEQ ID NO: 1302935 - DNA, 25 bp, Homo sapien
cagaacagcaatcagtctttttctt

SEQ ID NO: 1302936 - DNA, 25 bp, Homo sapien
tttttcttcagctcagcaaacttac

SEQ ID NO: 1302937 - DNA, 25 bp, Homo sapien
tctttttcttcagctcagcaaactt

SEQ ID NO: 1302938 - DNA, 25 bp, Homo sapien
agtctttttcttcagctcagcaaac

SEQ ID NO: 1302939 - DNA, 25 bp, Homo sapien
gtgagctgtctgacaattcagcaca

SEQ ID NO: 1302940 - DNA, 25 bp, Homo sapien
atgtgagctgtctgacaattcagca

SEQ ID NO: 1302941 - DNA, 25 bp, Homo sapien
cagggccacaatcagtactgatatg

SEQ ID NO: 1302942 - DNA, 25 bp, Homo sapien
tcagtactgatatggcctgggtggt

SEQ ID NO: 1302943 - DNA, 25 bp, Homo sapien
agcagtgaagtcaactgcttccaca

SEQ ID NO: 1302944 - DNA, 25 bp, Homo sapien
tccacaggtgggtcatttatgctgt

SEQ ID NO: 1302945 - DNA, 25 bp, Homo sapien
gtgaagtcaactgcttccacaggtg

SEQ ID NO: 1302946 - DNA, 25 bp, Homo sapien
ccacaggtgggtcatttatgctgtc

SEQ ID NO: 1302947 - DNA, 25 bp, Homo sapien
agtctccgcccagcccatagagaca

SEQ ID NO: 1302948 - DNA, 25 bp, Homo sapien
tccgcccagcccatagagacagtac

SEQ ID NO: 1302949 - DNA, 25 bp, Homo sapien
agcaaaggtgactactgtgccgggc

SEQ ID NO: 1302950 - DNA, 25 bp, Homo sapien
tgtgccgggcttgagaacaccagtc

SEQ ID NO: 1302951 - DNA, 25 bp, Homo sapien
cactgtcattgccatcattacgggt

SEQ ID NO: 1302952 - DNA, 25 bp, Homo sapien
ttccactgtcattgccatcattacg

SEQ ID NO: 1302953 - DNA, 25 bp, Homo sapien
tcattgccatcattacgggtgactt

SEQ ID NO: 1302954 - DNA, 25 bp, Homo sapien
ctgtcattgccatcattacgggtga

SEQ ID NO: 1302955 - DNA, 25 bp, Homo sapien
gctgtcacagttccaaacagaaatt

SEQ ID NO: 1302956 - DNA, 25 bp, Homo sapien
ctgtcacagttccaaacagaaattg

SEQ ID NO: 1302957 - DNA, 25 bp, Homo sapien
ggctcggtggaatccattttaacac

SEQ ID NO: 1302958 - DNA, 25 bp, Homo sapien
caggggataggggttgtagtcaatt

SEQ ID NO: 1302959 - DNA, 25 bp, Homo sapien
tttcttaatgtgagtgctgattttc

SEQ ID NO: 1302960 - DNA, 25 bp, Homo sapien
gacttccttgtgtcttttctggctg

SEQ ID NO: 1302961 - DNA, 25 bp, Homo sapien
agaagggcatactcatgagtctgct

SEQ ID NO: 1302962 - DNA, 25 bp, Homo sapien
gaagggcatactcatgagtctgctc

SEQ ID NO: 1302963 - DNA, 25 bp, Homo sapien
tgttctggcagcacacccattccaa

SEQ ID NO: 1302964 - DNA, 25 bp, Homo sapien
gtgttctggcagcacacccattcca

SEQ ID NO: 1302965 - DNA, 25 bp, Homo sapien
gtgtatgtgctgccgaagcgagcac

SEQ ID NO: 1302966 - DNA, 25 bp, Homo sapien
atcttctctgtatcgttccaatttt

SEQ ID NO: 1302967 - DNA, 25 bp, Homo sapien
tagtgtatgtgctgccgaagcgagc

SEQ ID NO: 1302968 - DNA, 25 bp, Homo sapien
tcatccctgtgcaggggccatgata

SEQ ID NO: 1302969 - DNA, 25 bp, Homo sapien
tggacggcagagacatagaggagga

SEQ ID NO: 1302970 - DNA, 25 bp, Homo sapien
gcaagacccgagatgtgtatggaga

SEQ ID NO: 1302971 - DNA, 25 bp, Homo sapien
tagatgaggtcgttcagattggaag

SEQ ID NO: 1302972 - DNA, 25 bp, Homo sapien
catgtaactgaatcggatgatggca

SEQ ID NO: 1302973 - DNA, 25 bp, Homo sapien
cagtgaaaggtcaggttggtggtaa

SEQ ID NO: 1302974 - DNA, 25 bp, Homo sapien
tcacttccaatatcatgtgtttcaa

SEQ ID NO: 1302975 - DNA, 25 bp, Homo sapien
tcatgagttgactttggggcatctt

SEQ ID NO: 1302976 - DNA, 25 bp, Homo sapien
tgtttcaacaagcccgtgttccttc

SEQ ID NO: 1302977 - DNA, 25 bp, Homo sapien
cagttaggtcgtggaggagacaggc

SEQ ID NO: 1302978 - DNA, 25 bp, Homo sapien
ctgctgtgtacagttaggtcgtgga

SEQ ID NO: 1302979 - DNA, 25 bp, Homo sapien
cttcctcagtggttctagaggtaat

SEQ ID NO: 1302980 - DNA, 25 bp, Homo sapien
ggtaattgcatcctgctgtgtacag

SEQ ID NO: 1302981 - DNA, 25 bp, Homo sapien
tatcatggcagctgctcagtcgcag

SEQ ID NO: 1302982 - DNA, 25 bp, Homo sapien
ttctctcgtctttctggaaggtaac

SEQ ID NO: 1302983 - DNA, 25 bp, Homo sapien
cctttcctatcatggcagctgctca

SEQ ID NO: 1302984 - DNA, 25 bp, Homo sapien
ggcagctgctcagtcgcaggctcca

SEQ ID NO: 1302985 - DNA, 25 bp, Homo sapien
tcctcagatgaaagtgggtgtgggc

SEQ ID NO: 1302986 - DNA, 25 bp, Homo sapien
ctcagatgaaagtgggtgtgggctg

SEQ ID NO: 1302987 - DNA, 25 bp, Homo sapien
gggtgtgggctgactttctctgagc

SEQ ID NO: 1302988 - DNA, 25 bp, Homo sapien
tgtcctcagatgaaagtgggtgtgg

SEQ ID NO: 1302989 - DNA, 25 bp, Homo sapien
gaaaagaggtgatcattgcaattag

SEQ ID NO: 1302990 - DNA, 25 bp, Homo sapien
gagaaaagaggtgatcattgcaatt

SEQ ID NO: 1302991 - DNA, 25 bp, Homo sapien
aaaagaggtgatcattgcaattaga

SEQ ID NO: 1302992 - DNA, 25 bp, Homo sapien
ttattttcttaggctgttcctcaga

SEQ ID NO: 1302993 - DNA, 25 bp, Homo sapien
tctccttttcgtggtcctggaaaca

SEQ ID NO: 1302994 - DNA, 25 bp, Homo sapien
ccttttcgtggtcctggaaacagct

SEQ ID NO: 1302995 - DNA, 25 bp, Homo sapien
ctccttttcgtggtcctggaaacag

SEQ ID NO: 1302996 - DNA, 25 bp, Homo sapien
tccttttcgtggtcctggaaacagc

SEQ ID NO: 1302997 - DNA, 25 bp, Homo sapien
cacatgaagtatgcttgcggcccac

SEQ ID NO: 1302998 - DNA, 25 bp, Homo sapien
tgcgcaattcttcaagactatgttg

SEQ ID NO: 1302999 - DNA, 25 bp, Homo sapien
ctgcgcaattcttcaagactatgtt

SEQ ID NO: 1303000 - DNA, 25 bp, Homo sapien
catgaagtatgcttgcggcccacac

SEQ ID NO: 1303001 - DNA, 25 bp, Homo sapien
tggcacaggtcagagtatctccttc

SEQ ID NO: 1303002 - DNA, 25 bp, Homo sapien
ggcacaggtcagagtatctccttca

SEQ ID NO: 1303003 - DNA, 25 bp, Homo sapien
ctagcatggtcccaattgatagtga

SEQ ID NO: 1303004 - DNA, 25 bp, Homo sapien
ttcctagcatggtcccaattgatag

SEQ ID NO: 1303005 - DNA, 25 bp, Homo sapien
ggtcccaattgatagtgatactgtg

SEQ ID NO: 1303006 - DNA, 25 bp, Homo sapien
gcatggtcccaattgatagtgatac

SEQ ID NO: 1303007 - DNA, 25 bp, Homo sapien
ctacaaaaagaagctcggtagttgt

SEQ ID NO: 1303008 - DNA, 25 bp, Homo sapien
tataaggatccggtgttttccatgg

SEQ ID NO: 1303009 - DNA, 25 bp, Homo sapien
catgggtgatgcaaatggccttggg

SEQ ID NO: 1303010 - DNA, 25 bp, Homo sapien
gttgttgtggttgtccgctggtata

SEQ ID NO: 1303011 - DNA, 25 bp, Homo sapien
tgaagactttacaggtgcttgttgg

SEQ ID NO: 1303012 - DNA, 25 bp, Homo sapien
gaagttgttatcctatgaccaattt

SEQ ID NO: 1303013 - DNA, 25 bp, Homo sapien
gaaaaggtaggcttcacctgtgaag

SEQ ID NO: 1303014 - DNA, 25 bp, Homo sapien
tatataaaccttggaggatcgctcc

SEQ ID NO: 1303015 - DNA, 25 bp, Homo sapien
ggaatctgactctgacaagcaaaag

SEQ ID NO: 1303016 - DNA, 25 bp, Homo sapien
aatctgactctgacaagcaaaagga

SEQ ID NO: 1303017 - DNA, 25 bp, Homo sapien
ttggaatctgactctgacaagcaaa

SEQ ID NO: 1303018 - DNA, 25 bp, Homo sapien
gaatctgactctgacaagcaaaagg

SEQ ID NO: 1303019 - DNA, 25 bp, Homo sapien
cccccaggttggaaggtgtgatgaa

SEQ ID NO: 1303020 - DNA, 25 bp, Homo sapien
tgagaagcccccaggttggaaggtg

SEQ ID NO: 1303021 - DNA, 25 bp, Homo sapien
gaatgaggtgtggatccagccaatt

SEQ ID NO: 1303022 - DNA, 25 bp, Homo sapien
tgatgaatgaggtgtggatccagcc

SEQ ID NO: 1303023 - DNA, 25 bp, Homo sapien
cattgtcaacagatttagggtccac

SEQ ID NO: 1303024 - DNA, 25 bp, Homo sapien
tgttcctcgaattgtggccacagag

SEQ ID NO: 1303025 - DNA, 25 bp, Homo sapien
gatgaactgctacaaacgtggctgc

SEQ ID NO: 1303026 - DNA, 25 bp, Homo sapien
gaacctgctttacctggctactgag

SEQ ID NO: 1303027 - DNA, 25 bp, Homo sapien
cagagagtccttctgcatcttgact

SEQ ID NO: 1303028 - DNA, 25 bp, Homo sapien
tctgctcctaacagccgtgtgacct

SEQ ID NO: 1303029 - DNA, 25 bp, Homo sapien
ctgctctgctcctaacagccgtgtg

SEQ ID NO: 1303030 - DNA, 25 bp, Homo sapien
gacagttgtggccattgcagaggca

SEQ ID NO: 1303031 - DNA, 25 bp, Homo sapien
tcaagcagaccaacttgtgccaggc

SEQ ID NO: 1303032 - DNA, 25 bp, Homo sapien
tacaccaggttcttacgctatgtgc

SEQ ID NO: 1303033 - DNA, 25 bp, Homo sapien
ctgagaccgccttgaccagcacatt

SEQ ID NO: 1303034 - DNA, 25 bp, Homo sapien
tgctgcactccggatgctcagggct

SEQ ID NO: 1303035 - DNA, 25 bp, Homo sapien
ggtgccggtgatcctcggctctctc

SEQ ID NO: 1303036 - DNA, 25 bp, Homo sapien
ccagtggtccatggcaggggtaacc

SEQ ID NO: 1303037 - DNA, 25 bp, Homo sapien
cagggaggtcagtgggagggcaaag

SEQ ID NO: 1303038 - DNA, 25 bp, Homo sapien
aggggtaacccagccacaggtgccg

SEQ ID NO: 1303039 - DNA, 25 bp, Homo sapien
cacccagccctgtattcttattctt

SEQ ID NO: 1303040 - DNA, 25 bp, Homo sapien
tcattcaaaggctagctgtgagctc

SEQ ID NO: 1303041 - DNA, 25 bp, Homo sapien
tcatgggtacactctcaggccaaac

SEQ ID NO: 1303042 - DNA, 25 bp, Homo sapien
tctgtgtcgcacctgggttaaaccc

SEQ ID NO: 1303043 - DNA, 25 bp, Homo sapien
tgtggcatactagcttgcagcaggc

SEQ ID NO: 1303044 - DNA, 25 bp, Homo sapien
gagtttcatccttttattgaagctt

SEQ ID NO: 1303045 - DNA, 25 bp, Homo sapien
agtttcatccttttattgaagctta

SEQ ID NO: 1303046 - DNA, 25 bp, Homo sapien
tttcatccttttattgaagcttaca

SEQ ID NO: 1303047 - DNA, 25 bp, Homo sapien
gtttcatccttttattgaagcttac

SEQ ID NO: 1303048 - DNA, 25 bp, Homo sapien
ggtaacaggccgatgaacactcacc

SEQ ID NO: 1303049 - DNA, 25 bp, Homo sapien
aaatgggctcgtttgacaggatggc

SEQ ID NO: 1303050 - DNA, 25 bp, Homo sapien
tcagccccggtcctcactatttggt

SEQ ID NO: 1303051 - DNA, 25 bp, Homo sapien
tgagggaacacaggtactaacggta

SEQ ID NO: 1303052 - DNA, 25 bp, Homo sapien
ctgagccgaatgttgccttgtacag

SEQ ID NO: 1303053 - DNA, 25 bp, Homo sapien
gaagctgagccgaatgttgccttgt

SEQ ID NO: 1303054 - DNA, 25 bp, Homo sapien
agctgagccgaatgttgccttgtac

SEQ ID NO: 1303055 - DNA, 25 bp, Homo sapien
tacagctgtgtccttctcccggaag

SEQ ID NO: 1303056 - DNA, 25 bp, Homo sapien
tcaggttgtagcccatttgggacag

SEQ ID NO: 1303057 - DNA, 25 bp, Homo sapien
gggctcaggttgtagcccatttggg

SEQ ID NO: 1303058 - DNA, 25 bp, Homo sapien
aactgggggctcaggttgtagccca

SEQ ID NO: 1303059 - DNA, 25 bp, Homo sapien
aggttgtagcccatttgggacagag

SEQ ID NO: 1303060 - DNA, 25 bp, Homo sapien
agaagccgtagacatcgatgcggcc

SEQ ID NO: 1303061 - DNA, 25 bp, Homo sapien
agcggtcccggtcatactgctggaa

SEQ ID NO: 1303062 - DNA, 25 bp, Homo sapien
catcgatgcggcctgacttggtctt

SEQ ID NO: 1303063 - DNA, 25 bp, Homo sapien
gtagctaatggagcccgagcggtcc

SEQ ID NO: 1303064 - DNA, 25 bp, Homo sapien
caggagtaggcctcaggatccacat

SEQ ID NO: 1303065 - DNA, 25 bp, Homo sapien
gccactgtgatctgagtccaccgac

SEQ ID NO: 1303066 - DNA, 25 bp, Homo sapien
ggagtaggcctcaggatccacattg

SEQ ID NO: 1303067 - DNA, 25 bp, Homo sapien
gaatgaagaccaattgcagttgacc

SEQ ID NO: 1303068 - DNA, 25 bp, Homo sapien
cttccatcaagctgacattcttact

SEQ ID NO: 1303069 - DNA, 25 bp, Homo sapien
cttccctgtcttccatcaagctgac

SEQ ID NO: 1303070 - DNA, 25 bp, Homo sapien
tgtcttccatcaagctgacattctt

SEQ ID NO: 1303071 - DNA, 25 bp, Homo sapien
ttccctgtcttccatcaagctgaca

SEQ ID NO: 1303072 - DNA, 25 bp, Homo sapien
tagtttgtatagaagggctcaggct

SEQ ID NO: 1303073 - DNA, 25 bp, Homo sapien
gaaaccactgcctagtaccaaagcc

SEQ ID NO: 1303074 - DNA, 25 bp, Homo sapien
gaaaaatccgggcaggttctagcca

SEQ ID NO: 1303075 - DNA, 25 bp, Homo sapien
gatctgatccttactagcttgtgtg

SEQ ID NO: 1303076 - DNA, 25 bp, Homo sapien
gagaagctttaagaggcattgtgca

SEQ ID NO: 1303077 - DNA, 25 bp, Homo sapien
tgtgcattcttgctagctctcctgc

SEQ ID NO: 1303078 - DNA, 25 bp, Homo sapien
ttctctctgccacaaagataacata

SEQ ID NO: 1303079 - DNA, 25 bp, Homo sapien
tctgccacaaagataacatatccca

SEQ ID NO: 1303080 - DNA, 25 bp, Homo sapien
aggctgctgggcaccgtaggaactt

SEQ ID NO: 1303081 - DNA, 25 bp, Homo sapien
ctgggcaccgtaggaacttggaggt

SEQ ID NO: 1303082 - DNA, 25 bp, Homo sapien
ccgtaggaacttggaggtggctgac

SEQ ID NO: 1303083 - DNA, 25 bp, Homo sapien
cctgtccataaagcccaggctgctg

SEQ ID NO: 1303084 - DNA, 25 bp, Homo sapien
caccgccatatggtcctcctggagt

SEQ ID NO: 1303085 - DNA, 25 bp, Homo sapien
gggtagcccactaccatactgccct

SEQ ID NO: 1303086 - DNA, 25 bp, Homo sapien
cagggggtagcccactaccatactg

SEQ ID NO: 1303087 - DNA, 25 bp, Homo sapien
cccgggagctgcaccgccatatggt

SEQ ID NO: 1303088 - DNA, 25 bp, Homo sapien
ccctgaccctcatcagtcacaaatg

SEQ ID NO: 1303089 - DNA, 25 bp, Homo sapien
cctgaccctcatcagtcacaaatga

SEQ ID NO: 1303090 - DNA, 25 bp, Homo sapien
tgaccctcatcagtcacaaatgaca

SEQ ID NO: 1303091 - DNA, 25 bp, Homo sapien
gaccctcatcagtcacaaatgacat

SEQ ID NO: 1303092 - DNA, 25 bp, Homo sapien
atgggggcattccctctctcatcca

SEQ ID NO: 1303093 - DNA, 25 bp, Homo sapien
tgggggcattccctctctcatccat

SEQ ID NO: 1303094 - DNA, 25 bp, Homo sapien
gaagcttaaaggtatcaacggctgt

SEQ ID NO: 1303095 - DNA, 25 bp, Homo sapien
ctcaagacccctgtgaagcttaaag

SEQ ID NO: 1303096 - DNA, 25 bp, Homo sapien
taaaggtatcaacggctgttccaag

SEQ ID NO: 1303097 - DNA, 25 bp, Homo sapien
caagacccctgtgaagcttaaaggt

SEQ ID NO: 1303098 - DNA, 25 bp, Homo sapien
ccattgaatacttatcacattgcct

SEQ ID NO: 1303099 - DNA, 25 bp, Homo sapien
ttactcccattgaatacttatcaca

SEQ ID NO: 1303100 - DNA, 25 bp, Homo sapien
cccattgaatacttatcacattgcc

SEQ ID NO: 1303101 - DNA, 25 bp, Homo sapien
ctcccattgaatacttatcacattg

SEQ ID NO: 1303102 - DNA, 25 bp, Homo sapien
aacaccctactatcacccaacaaag

SEQ ID NO: 1303103 - DNA, 25 bp, Homo sapien
atcacccaacaaagaattctggcca

SEQ ID NO: 1303104 - DNA, 25 bp, Homo sapien
cacccaacaaagaattctggccaca

SEQ ID NO: 1303105 - DNA, 25 bp, Homo sapien
ttcaacaccctactatcacccaaca

SEQ ID NO: 1303106 - DNA, 25 bp, Homo sapien
cttgctgcggtattcctgactgaat

SEQ ID NO: 1303107 - DNA, 25 bp, Homo sapien
cctgactgaatcaagatacgctggg

SEQ ID NO: 1303108 - DNA, 25 bp, Homo sapien
gaggcatctgaagatagcccgggtt

SEQ ID NO: 1303109 - DNA, 25 bp, Homo sapien
gcatctgaagatagcccgggttctg

SEQ ID NO: 1303110 - DNA, 25 bp, Homo sapien
cgaaatggcggtgttgaactaagtc

SEQ ID NO: 1303111 - DNA, 25 bp, Homo sapien
ggttcacttttctacacgcgaaatg

SEQ ID NO: 1303112 - DNA, 25 bp, Homo sapien
ggtgacttcaggtaagttctgtgtc

SEQ ID NO: 1303113 - DNA, 25 bp, Homo sapien
tgcctaactgcctggtgacttcagg

SEQ ID NO: 1303114 - DNA, 25 bp, Homo sapien
gatttttatccgacgccccaaatga

SEQ ID NO: 1303115 - DNA, 25 bp, Homo sapien
caaatcctcgagtgagcgacgtcaa

SEQ ID NO: 1303116 - DNA, 25 bp, Homo sapien
cccaaatgagatcggcggaaccaga

SEQ ID NO: 1303117 - DNA, 25 bp, Homo sapien
tgtggcgcctgctacaaccagagtt

SEQ ID NO: 1303118 - DNA, 25 bp, Homo sapien
attctgacgtcacactcaggcaagg

SEQ ID NO: 1303119 - DNA, 25 bp, Homo sapien
tggggctttccgctctcaaacccgc

SEQ ID NO: 1303120 - DNA, 25 bp, Homo sapien
tgacgtcacactcaggcaaggggtg

SEQ ID NO: 1303121 - DNA, 25 bp, Homo sapien
ggtgattctgacgtcacactcaggc

SEQ ID NO: 1303122 - DNA, 25 bp, Homo sapien
tgctcctcatgagaaggcctatcat

SEQ ID NO: 1303123 - DNA, 25 bp, Homo sapien
aattccacagctggtccttgcgtct

SEQ ID NO: 1303124 - DNA, 25 bp, Homo sapien
aggcctatcatcagctagtactcgg

SEQ ID NO: 1303125 - DNA, 25 bp, Homo sapien
ttctttctgccagcgccaacatgct

SEQ ID NO: 1303126 - DNA, 25 bp, Homo sapien
cagagatttgacagccggtttgaag

SEQ ID NO: 1303127 - DNA, 25 bp, Homo sapien
caacttgaataaaccttccagatag

SEQ ID NO: 1303128 - DNA, 25 bp, Homo sapien
tgctctgtgagtcctttgaagtgta

SEQ ID NO: 1303129 - DNA, 25 bp, Homo sapien
gaaggcttcaggcagtttggataag

SEQ ID NO: 1303130 - DNA, 25 bp, Homo sapien
ggtatatgcccctgtacccaaaatg

SEQ ID NO: 1303131 - DNA, 25 bp, Homo sapien
ttacaggtatatgcccctgtaccca

SEQ ID NO: 1303132 - DNA, 25 bp, Homo sapien
tatatgcccctgtacccaaaatgcc

SEQ ID NO: 1303133 - DNA, 25 bp, Homo sapien
caggtatatgcccctgtacccaaaa

SEQ ID NO: 1303134 - DNA, 25 bp, Homo sapien
caacaaaaaaaacattcacaacctg

SEQ ID NO: 1303135 - DNA, 25 bp, Homo sapien
cagcaattaaaaacaacaacaacaa

SEQ ID NO: 1303136 - DNA, 25 bp, Homo sapien
caaaaaaaacattcacaacctgtca

SEQ ID NO: 1303137 - DNA, 25 bp, Homo sapien
tattatttaaaaaatattaacagca

SEQ ID NO: 1303138 - DNA, 25 bp, Homo sapien
tggccatttattcccaacggagtct

SEQ ID NO: 1303139 - DNA, 25 bp, Homo sapien
ctttggccatttattcccaacggag

SEQ ID NO: 1303140 - DNA, 25 bp, Homo sapien
catttattcccaacggagtctttca

SEQ ID NO: 1303141 - DNA, 25 bp, Homo sapien
tattcccaacggagtctttcatcca

SEQ ID NO: 1303142 - DNA, 25 bp, Homo sapien
ggcccattggtcctgttgcacccat

SEQ ID NO: 1303143 - DNA, 25 bp, Homo sapien
catgggtgggtactgctgctccatc

SEQ ID NO: 1303144 - DNA, 25 bp, Homo sapien
gcagtcagagggattacagtggcca

SEQ ID NO: 1303145 - DNA, 25 bp, Homo sapien
gattacagtggccagccttgcctgg

SEQ ID NO: 1303146 - DNA, 25 bp, Homo sapien
aatgccaataccaatgtcccctttt

SEQ ID NO: 1303147 - DNA, 25 bp, Homo sapien
tgcaatgccaataccaatgtcccct

SEQ ID NO: 1303148 - DNA, 25 bp, Homo sapien
tgccaataccaatgtcccctttttc

SEQ ID NO: 1303149 - DNA, 25 bp, Homo sapien
tcctgcaatgccaataccaatgtcc

SEQ ID NO: 1303150 - DNA, 25 bp, Homo sapien
gcaagccctgccgtccttctctgcc

SEQ ID NO: 1303151 - DNA, 25 bp, Homo sapien
tcctggcaagccctgccgtccttct

SEQ ID NO: 1303152 - DNA, 25 bp, Homo sapien
tggcaagccctgccgtccttctctg

SEQ ID NO: 1303153 - DNA, 25 bp, Homo sapien
ctggcaagccctgccgtccttctct

SEQ ID NO: 1303154 - DNA, 25 bp, Homo sapien
gggagcccaggtgaccctggagcac

SEQ ID NO: 1303155 - DNA, 25 bp, Homo sapien
cagggagcccaggtgaccctggagc

SEQ ID NO: 1303156 - DNA, 25 bp, Homo sapien
agggagcccaggtgaccctggagca

SEQ ID NO: 1303157 - DNA, 25 bp, Homo sapien
gcccggagcaccatccttccctgga

SEQ ID NO: 1303158 - DNA, 25 bp, Homo sapien
ctgcccggagcaccatccttccctg

SEQ ID NO: 1303159 - DNA, 25 bp, Homo sapien
ctggcctgcccggagcaccatcctt

SEQ ID NO: 1303160 - DNA, 25 bp, Homo sapien
gcctgcccggagcaccatccttccc

SEQ ID NO: 1303161 - DNA, 25 bp, Homo sapien
ctggaggtgtagtaagccattctct

SEQ ID NO: 1303162 - DNA, 25 bp, Homo sapien
ggaactgcatcctggaggtgtagta

SEQ ID NO: 1303163 - DNA, 25 bp, Homo sapien
atcctggaggtgtagtaagccattc

SEQ ID NO: 1303164 - DNA, 25 bp, Homo sapien
tcctggaggtgtagtaagccattct

SEQ ID NO: 1303165 - DNA, 25 bp, Homo sapien
gttcccacgtcctggcctccacgtc

SEQ ID NO: 1303166 - DNA, 25 bp, Homo sapien
gatgtcagggcaaggagtatggggg

SEQ ID NO: 1303167 - DNA, 25 bp, Homo sapien
agggactcagaatgactgcagatgc

SEQ ID NO: 1303168 - DNA, 25 bp, Homo sapien
gcagatgctgcatataggccaccag

SEQ ID NO: 1303169 - DNA, 25 bp, Homo sapien
tgccacccagctggctgccagttac

SEQ ID NO: 1303170 - DNA, 25 bp, Homo sapien
tcttgtctgatgaacctcttgattt

SEQ ID NO: 1303171 - DNA, 25 bp, Homo sapien
gatctcttgtctgatgaacctcttg

SEQ ID NO: 1303172 - DNA, 25 bp, Homo sapien
aatgatctcttgtctgatgaacctc

SEQ ID NO: 1303173 - DNA, 25 bp, Homo sapien
ttttaatgatctcttgtctgatgaa

SEQ ID NO: 1303174 - DNA, 25 bp, Homo sapien
aacctgcctcaattatacttccaag

SEQ ID NO: 1303175 - DNA, 25 bp, Homo sapien
agaaaacctgcctcaattatacttc

SEQ ID NO: 1303176 - DNA, 25 bp, Homo sapien
acctgcctcaattatacttccaagc

SEQ ID NO: 1303177 - DNA, 25 bp, Homo sapien
aaaacctgcctcaattatacttcca

SEQ ID NO: 1303178 - DNA, 25 bp, Homo sapien
taagagctgccctctatgggagcca

SEQ ID NO: 1303179 - DNA, 25 bp, Homo sapien
gggagagggtcctatcatccccacc

SEQ ID NO: 1303180 - DNA, 25 bp, Homo sapien
tcagcaggagcttggaagatgatcc

SEQ ID NO: 1303181 - DNA, 25 bp, Homo sapien
cagcaacctccgtagattctcaatc

SEQ ID NO: 1303182 - DNA, 25 bp, Homo sapien
tgcctgctctatgggacagtgccca

SEQ ID NO: 1303183 - DNA, 25 bp, Homo sapien
ctgctctatgggacagtgcccacag

SEQ ID NO: 1303184 - DNA, 25 bp, Homo sapien
ccacagctgccagccttccccctta

SEQ ID NO: 1303185 - DNA, 25 bp, Homo sapien
atgcctgctctatgggacagtgccc

SEQ ID NO: 1303186 - DNA, 25 bp, Homo sapien
ggtggcccaacaggccccatggaac

SEQ ID NO: 1303187 - DNA, 25 bp, Homo sapien
gcccggtggcccaacaggccccatg

SEQ ID NO: 1303188 - DNA, 25 bp, Homo sapien
aggcaagccagggctccccgaaggc

SEQ ID NO: 1303189 - DNA, 25 bp, Homo sapien
ccatggaaccactcttgccaggtcc

SEQ ID NO: 1303190 - DNA, 25 bp, Homo sapien
ctcctgcctggcccttctgtcctgc

SEQ ID NO: 1303191 - DNA, 25 bp, Homo sapien
cctgcctggcccttctgtcctgcag

SEQ ID NO: 1303192 - DNA, 25 bp, Homo sapien
tgcctggcccttctgtcctgcagct

SEQ ID NO: 1303193 - DNA, 25 bp, Homo sapien
gcctggcccttctgtcctgcagctc

SEQ ID NO: 1303194 - DNA, 25 bp, Homo sapien
cctggtgttactccctgcttagaaa

SEQ ID NO: 1303195 - DNA, 25 bp, Homo sapien
catgttgttatggtcctgaatgccc

SEQ ID NO: 1303196 - DNA, 25 bp, Homo sapien
taaagcactcattcgttggccgggc

SEQ ID NO: 1303197 - DNA, 25 bp, Homo sapien
tgccaatccctagtgtaagtgtgac

SEQ ID NO: 1303198 - DNA, 25 bp, Homo sapien
ccaaccacagctaatgaccccatgt

SEQ ID NO: 1303199 - DNA, 25 bp, Homo sapien
gggagtgctcgggaaatggaaacaa

SEQ ID NO: 1303200 - DNA, 25 bp, Homo sapien
gtggctaaagccgtaacttgcagct

SEQ ID NO: 1303201 - DNA, 25 bp, Homo sapien
ttttcagacactatcctgctccaag

SEQ ID NO: 1303202 - DNA, 25 bp, Homo sapien
gtccatagaatccctgctttccagg

SEQ ID NO: 1303203 - DNA, 25 bp, Homo sapien
ggtccatagaatccctgctttccag

SEQ ID NO: 1303204 - DNA, 25 bp, Homo sapien
aaagtcagaggtgaagtccgggcag

SEQ ID NO: 1303205 - DNA, 25 bp, Homo sapien
aagtcagaggtgaagtccgggcagc

SEQ ID NO: 1303206 - DNA, 25 bp, Homo sapien
acagagaagaccagtacaactgtac

SEQ ID NO: 1303207 - DNA, 25 bp, Homo sapien
gacagcccgtacatagaaggaatgt

SEQ ID NO: 1303208 - DNA, 25 bp, Homo sapien
cagagacagcccgtacatagaagga

SEQ ID NO: 1303209 - DNA, 25 bp, Homo sapien
tcagggcaaggcgaggagcaagaag

SEQ ID NO: 1303210 - DNA, 25 bp, Homo sapien
ctttgccagctgcaccatccgtacc

SEQ ID NO: 1303211 - DNA, 25 bp, Homo sapien
tgccagctgcaccatccgtaccagg

SEQ ID NO: 1303212 - DNA, 25 bp, Homo sapien
agctgcaccatccgtaccaggttcg

SEQ ID NO: 1303213 - DNA, 25 bp, Homo sapien
ccagctgcaccatccgtaccaggtt

SEQ ID NO: 1303214 - DNA, 25 bp, Homo sapien
catgaggagctccaacccagtttgg

SEQ ID NO: 1303215 - DNA, 25 bp, Homo sapien
agggaagaacagaccgtgcctgcct

SEQ ID NO: 1303216 - DNA, 25 bp, Homo sapien
caccctctgacaatctgggcacagg

SEQ ID NO: 1303217 - DNA, 25 bp, Homo sapien
ctacaagagctttacaagggaagaa

SEQ ID NO: 1303218 - DNA, 25 bp, Homo sapien
gcaagattttctgtggttactgaca

SEQ ID NO: 1303219 - DNA, 25 bp, Homo sapien
gaaggttgatgctgaggcaccgtca

SEQ ID NO: 1303220 - DNA, 25 bp, Homo sapien
gcagggcctatccttccaaattcag

SEQ ID NO: 1303221 - DNA, 25 bp, Homo sapien
aaattcagcatgatcctcaggcccg

SEQ ID NO: 1303222 - DNA, 25 bp, Homo sapien
ctgtgctcaacaggccttgagccaa

SEQ ID NO: 1303223 - DNA, 25 bp, Homo sapien
tgctgtgctcaacaggccttgagcc

SEQ ID NO: 1303224 - DNA, 25 bp, Homo sapien
ctcaacaggccttgagccaattgac

SEQ ID NO: 1303225 - DNA, 25 bp, Homo sapien
tgctcaacaggccttgagccaattg

SEQ ID NO: 1303226 - DNA, 25 bp, Homo sapien
tatgctgtagaatgtgggatcttac

SEQ ID NO: 1303227 - DNA, 25 bp, Homo sapien
ggctatgctgtagaatgtgggatct

SEQ ID NO: 1303228 - DNA, 25 bp, Homo sapien
tttccccctgggctatgctgtagaa

SEQ ID NO: 1303229 - DNA, 25 bp, Homo sapien
ccctgggctatgctgtagaatgtgg

SEQ ID NO: 1303230 - DNA, 25 bp, Homo sapien
tgcaaggcccctttctccggtggct

SEQ ID NO: 1303231 - DNA, 25 bp, Homo sapien
aggcctgcaaggcccctttctccgg

SEQ ID NO: 1303232 - DNA, 25 bp, Homo sapien
gctggcctgggaggcctgcaaggcc

SEQ ID NO: 1303233 - DNA, 25 bp, Homo sapien
tgggaggcctgcaaggcccctttct

SEQ ID NO: 1303234 - DNA, 25 bp, Homo sapien
tgccagggactacagggagaggtgg

SEQ ID NO: 1303235 - DNA, 25 bp, Homo sapien
agacagacaccccatcgtgtgccag

SEQ ID NO: 1303236 - DNA, 25 bp, Homo sapien
ggaaagcaggcaaagtggactccca

SEQ ID NO: 1303237 - DNA, 25 bp, Homo sapien
gcaaagtggactcccatatagccag

SEQ ID NO: 1303238 - DNA, 25 bp, Homo sapien
gctggcctggaggccctggtggccc

SEQ ID NO: 1303239 - DNA, 25 bp, Homo sapien
gcagagatcccagctggtcctggct

SEQ ID NO: 1303240 - DNA, 25 bp, Homo sapien
ggctggcctggaggccctggtggcc

SEQ ID NO: 1303241 - DNA, 25 bp, Homo sapien
cagctggtcctggctggcctggagg

SEQ ID NO: 1303242 - DNA, 25 bp, Homo sapien
tgttgactgaatgacctccatctga

SEQ ID NO: 1303243 - DNA, 25 bp, Homo sapien
cagttgcccaagtcaaatgcaggag

SEQ ID NO: 1303244 - DNA, 25 bp, Homo sapien
tggagtcccatcagctcagtgccgt

SEQ ID NO: 1303245 - DNA, 25 bp, Homo sapien
ggaaattattatgcagccagccaca

SEQ ID NO: 1303246 - DNA, 25 bp, Homo sapien
cctggggtcccatggcaccaggttc

SEQ ID NO: 1303247 - DNA, 25 bp, Homo sapien
tccctggggtcccatggcaccaggt

SEQ ID NO: 1303248 - DNA, 25 bp, Homo sapien
ctggggtcccatggcaccaggttca

SEQ ID NO: 1303249 - DNA, 25 bp, Homo sapien
ggggtcccatggcaccaggttcacc

SEQ ID NO: 1303250 - DNA, 25 bp, Homo sapien
tgctgccagggggacctggtttgcc

SEQ ID NO: 1303251 - DNA, 25 bp, Homo sapien
tgccagggggacctggtttgccaca

SEQ ID NO: 1303252 - DNA, 25 bp, Homo sapien
ggggacctggtttgccacagtcacc

SEQ ID NO: 1303253 - DNA, 25 bp, Homo sapien
ctctgcgccaggccggccagtgctg

SEQ ID NO: 1303254 - DNA, 25 bp, Homo sapien
ggaggccaggatgtcctgttttccc

SEQ ID NO: 1303255 - DNA, 25 bp, Homo sapien
gccaggatgtcctgttttcccctta

SEQ ID NO: 1303256 - DNA, 25 bp, Homo sapien
tgggaggccaggatgtcctgttttc

SEQ ID NO: 1303257 - DNA, 25 bp, Homo sapien
cttaggtcctgggaggccaggatgt

SEQ ID NO: 1303258 - DNA, 25 bp, Homo sapien
tgagtccaggggggccagcaggacc

SEQ ID NO: 1303259 - DNA, 25 bp, Homo sapien
caggggggccagcaggaccagggtc

SEQ ID NO: 1303260 - DNA, 25 bp, Homo sapien
cccatgagtccaggggggccagcag

SEQ ID NO: 1303261 - DNA, 25 bp, Homo sapien
ccaggggggccagcaggaccagggt

SEQ ID NO: 1303262 - DNA, 25 bp, Homo sapien
ctgcttaaggccactaggagaactg

SEQ ID NO: 1303263 - DNA, 25 bp, Homo sapien
ttaaggccactaggagaactgggaa

SEQ ID NO: 1303264 - DNA, 25 bp, Homo sapien
cttaaggccactaggagaactggga

SEQ ID NO: 1303265 - DNA, 25 bp, Homo sapien
gcttaaggccactaggagaactggg

SEQ ID NO: 1303266 - DNA, 25 bp, Homo sapien
aggcttgccgtccttcccatccaaa

SEQ ID NO: 1303267 - DNA, 25 bp, Homo sapien
ctcaagccaggcttgccgtccttcc

SEQ ID NO: 1303268 - DNA, 25 bp, Homo sapien
gccaggcttgccgtccttcccatcc

SEQ ID NO: 1303269 - DNA, 25 bp, Homo sapien
caggcttgccgtccttcccatccaa

SEQ ID NO: 1303270 - DNA, 25 bp, Homo sapien
ggcaggcctgatgggcctcgaatcc

SEQ ID NO: 1303271 - DNA, 25 bp, Homo sapien
gcaggcctgatgggcctcgaatccc

SEQ ID NO: 1303272 - DNA, 25 bp, Homo sapien
gcatgccagagggaacctaagagaa

SEQ ID NO: 1303273 - DNA, 25 bp, Homo sapien
aaagctgcctgttgtattctactcc

SEQ ID NO: 1303274 - DNA, 25 bp, Homo sapien
tgaaaaagtgggtgcccctgtcctc

SEQ ID NO: 1303275 - DNA, 25 bp, Homo sapien
taaagacttgcaagtgggcacatgc

SEQ ID NO: 1303276 - DNA, 25 bp, Homo sapien
gctgcatggctcagatctgtgactt

SEQ ID NO: 1303277 - DNA, 25 bp, Homo sapien
tttcccagcctcagtgcaactgggt

SEQ ID NO: 1303278 - DNA, 25 bp, Homo sapien
cctgtcggcctccagtagtcactgg

SEQ ID NO: 1303279 - DNA, 25 bp, Homo sapien
actggtccactgcaagccctgtcgg

SEQ ID NO: 1303280 - DNA, 25 bp, Homo sapien
ggtgggccaggtgatccaactttgc

SEQ ID NO: 1303281 - DNA, 25 bp, Homo sapien
aggtgggccaggtgatccaactttg

SEQ ID NO: 1303282 - DNA, 25 bp, Homo sapien
caggtgggccaggtgatccaacttt

SEQ ID NO: 1303283 - DNA, 25 bp, Homo sapien
cccctcccgatgagaccacatcaga

SEQ ID NO: 1303284 - DNA, 25 bp, Homo sapien
tgcccctcccgatgagaccacatca

SEQ ID NO: 1303285 - DNA, 25 bp, Homo sapien
ctgcccctcccgatgagaccacatc

SEQ ID NO: 1303286 - DNA, 25 bp, Homo sapien
ccctcccgatgagaccacatcagac

SEQ ID NO: 1303287 - DNA, 25 bp, Homo sapien
gcccggaaagcctggctggccttga

SEQ ID NO: 1303288 - DNA, 25 bp, Homo sapien
tgggcccggaaagcctggctggcct

SEQ ID NO: 1303289 - DNA, 25 bp, Homo sapien
cggtgggcccggaaagcctggctgg

SEQ ID NO: 1303290 - DNA, 25 bp, Homo sapien
gtgggcccggaaagcctggctggcc

SEQ ID NO: 1303291 - DNA, 25 bp, Homo sapien
aagcaaggggcagtgtgctgtgcca

SEQ ID NO: 1303292 - DNA, 25 bp, Homo sapien
tgagaagcaaggggcagtgtgctgt

SEQ ID NO: 1303293 - DNA, 25 bp, Homo sapien
gggtgagaagcaaggggcagtgtgc

SEQ ID NO: 1303294 - DNA, 25 bp, Homo sapien
ctagggtgagaagcaaggggcagtg

SEQ ID NO: 1303295 - DNA, 25 bp, Homo sapien
gagttaccttggggtcctcgctctc

SEQ ID NO: 1303296 - DNA, 25 bp, Homo sapien
cgcccttctcaccggagttaccttg

SEQ ID NO: 1303297 - DNA, 25 bp, Homo sapien
gcctgggaggccttcagatcctggg

SEQ ID NO: 1303298 - DNA, 25 bp, Homo sapien
gggcctgggaggccttcagatcctg

SEQ ID NO: 1303299 - DNA, 25 bp, Homo sapien
ggggggcctgggaggccttcagatc

SEQ ID NO: 1303300 - DNA, 25 bp, Homo sapien
gggggcctgggaggccttcagatcc

SEQ ID NO: 1303301 - DNA, 25 bp, Homo sapien
aagccagccagcaaatggctgccct

SEQ ID NO: 1303302 - DNA, 25 bp, Homo sapien
gagctactgaaccagcctcctaact

SEQ ID NO: 1303303 - DNA, 25 bp, Homo sapien
ggaacagaatcagtcactcctcctg

SEQ ID NO: 1303304 - DNA, 25 bp, Homo sapien
gaggtggcatgtgctgggaggcccc

SEQ ID NO: 1303305 - DNA, 25 bp, Homo sapien
gccaagtctccagcccgagactgtg

SEQ ID NO: 1303306 - DNA, 25 bp, Homo sapien
tctccagcccgagactgtgtggctc

SEQ ID NO: 1303307 - DNA, 25 bp, Homo sapien
agactgtgtggctccacgtgcagcc

SEQ ID NO: 1303308 - DNA, 25 bp, Homo sapien
gggtcacgatcctccccttcacagg

SEQ ID NO: 1303309 - DNA, 25 bp, Homo sapien
cgctgacccggtgtagccacgctcc

SEQ ID NO: 1303310 - DNA, 25 bp, Homo sapien
ggtgtagccacgctcccccttgatg

SEQ ID NO: 1303311 - DNA, 25 bp, Homo sapien
ctgacccggtgtagccacgctcccc

SEQ ID NO: 1303312 - DNA, 25 bp, Homo sapien
cccgctgacccggtgtagccacgct

SEQ ID NO: 1303313 - DNA, 25 bp, Homo sapien
gcagatctcagttcttgctgtgtct

SEQ ID NO: 1303314 - DNA, 25 bp, Homo sapien
agttcttgctgtgtctgggcctggc

SEQ ID NO: 1303315 - DNA, 25 bp, Homo sapien
gcagagtgctctgagagtcaggcct

SEQ ID NO: 1303316 - DNA, 25 bp, Homo sapien
ggtgggaccaatccacactgccaag

SEQ ID NO: 1303317 - DNA, 25 bp, Homo sapien
ctggcacccactccccagcaagggt

SEQ ID NO: 1303318 - DNA, 25 bp, Homo sapien
tacctggcacccactccccagcaag

SEQ ID NO: 1303319 - DNA, 25 bp, Homo sapien
caccagcccaaacctctggtacctg

SEQ ID NO: 1303320 - DNA, 25 bp, Homo sapien
tctggtacctggcacccactcccca

SEQ ID NO: 1303321 - DNA, 25 bp, Homo sapien
ggcagtcctggggggcccgtggcac

SEQ ID NO: 1303322 - DNA, 25 bp, Homo sapien
aggcagtcctggggggcccgtggca

SEQ ID NO: 1303323 - DNA, 25 bp, Homo sapien
tgggtaacctggttgccctggagga

SEQ ID NO: 1303324 - DNA, 25 bp, Homo sapien
ctgggtaacctggttgccctggagg

SEQ ID NO: 1303325 - DNA, 25 bp, Homo sapien
ctcgctgggtaagaggatggccaaa

SEQ ID NO: 1303326 - DNA, 25 bp, Homo sapien
catttctgttctcccctcgctgggt

SEQ ID NO: 1303327 - DNA, 25 bp, Homo sapien
agacatgatggatagccccccaaca

SEQ ID NO: 1303328 - DNA, 25 bp, Homo sapien
tggatagccccccaacatttctgtt

SEQ ID NO: 1303329 - DNA, 25 bp, Homo sapien
ctccagtcaggcccgtgagacctcg

SEQ ID NO: 1303330 - DNA, 25 bp, Homo sapien
ccagtcaggcccgtgagacctcgct

SEQ ID NO: 1303331 - DNA, 25 bp, Homo sapien
tgtctccagtcaggcccgtgagacc

SEQ ID NO: 1303332 - DNA, 25 bp, Homo sapien
agtcaggcccgtgagacctcgctct

SEQ ID NO: 1303333 - DNA, 25 bp, Homo sapien
tgtcactttgtagggtgagagggca

SEQ ID NO: 1303334 - DNA, 25 bp, Homo sapien
gcaaaaatcactttcttggagggag

SEQ ID NO: 1303335 - DNA, 25 bp, Homo sapien
gtcactttccacgagagctacagcc

SEQ ID NO: 1303336 - DNA, 25 bp, Homo sapien
gggtgagagggcatgtcactttcca

SEQ ID NO: 1303337 - DNA, 25 bp, Homo sapien
tgacgatgacgaaggcagagcaatt

SEQ ID NO: 1303338 - DNA, 25 bp, Homo sapien
gatgacgaaggcagagcaattaacg

SEQ ID NO: 1303339 - DNA, 25 bp, Homo sapien
ctgtgacgatgacgaaggcagagca

SEQ ID NO: 1303340 - DNA, 25 bp, Homo sapien
acgaaggcagagcaattaacgacac

SEQ ID NO: 1303341 - DNA, 25 bp, Homo sapien
tcctctaggacgacggaaaaggcgc

SEQ ID NO: 1303342 - DNA, 25 bp, Homo sapien
aaacctgtgccagcctgcaatgtga

SEQ ID NO: 1303343 - DNA, 25 bp, Homo sapien
tcagcaaatcttcaggcaacgccga

SEQ ID NO: 1303344 - DNA, 25 bp, Homo sapien
taagaggaaggttcacgagctcagg

SEQ ID NO: 1303345 - DNA, 25 bp, Homo sapien
gaggggaggtcgagcagcgctaggt

SEQ ID NO: 1303346 - DNA, 25 bp, Homo sapien
aggtcgagcagcgctaggttcttac

SEQ ID NO: 1303347 - DNA, 25 bp, Homo sapien
gggaggtcgagcagcgctaggttct

SEQ ID NO: 1303348 - DNA, 25 bp, Homo sapien
ggggaggggaggtcgagcagcgcta

SEQ ID NO: 1303349 - DNA, 25 bp, Homo sapien
caatccgggggagccaacagcacca

SEQ ID NO: 1303350 - DNA, 25 bp, Homo sapien
atccgggggagccaacagcaccagg

SEQ ID NO: 1303351 - DNA, 25 bp, Homo sapien
ggcaatccgggggagccaacagcac

SEQ ID NO: 1303352 - DNA, 25 bp, Homo sapien
aggcaatccgggggagccaacagca

SEQ ID NO: 1303353 - DNA, 25 bp, Homo sapien
gggagcccctcatgccaggcggacc

SEQ ID NO: 1303354 - DNA, 25 bp, Homo sapien
cggggagcccctcatgccaggcgga

SEQ ID NO: 1303355 - DNA, 25 bp, Homo sapien
cccggggagcccctcatgccaggcg

SEQ ID NO: 1303356 - DNA, 25 bp, Homo sapien
ctggaggacccggggagcccctcat

SEQ ID NO: 1303357 - DNA, 25 bp, Homo sapien
ttgaggatgaatccccatccctggt

SEQ ID NO: 1303358 - DNA, 25 bp, Homo sapien
cccttgaggatgaatccccatccct

SEQ ID NO: 1303359 - DNA, 25 bp, Homo sapien
gctcccttgaggatgaatccccatc

SEQ ID NO: 1303360 - DNA, 25 bp, Homo sapien
agggccccagctcccttgaggatga

SEQ ID NO: 1303361 - DNA, 25 bp, Homo sapien
ctctctggcctggcaatcccggagg

SEQ ID NO: 1303362 - DNA, 25 bp, Homo sapien
ctggcctggcaatcccggaggacca

SEQ ID NO: 1303363 - DNA, 25 bp, Homo sapien
ctctggcctggcaatcccggaggac

SEQ ID NO: 1303364 - DNA, 25 bp, Homo sapien
ctcctctctggcctggcaatcccgg

SEQ ID NO: 1303365 - DNA, 25 bp, Homo sapien
ctcttgggcgctccagtgacaaaaa

SEQ ID NO: 1303366 - DNA, 25 bp, Homo sapien
ctcggctcttgggcgctccagtgac

SEQ ID NO: 1303367 - DNA, 25 bp, Homo sapien
cctcggctcttgggcgctccagtga

SEQ ID NO: 1303368 - DNA, 25 bp, Homo sapien
cttgggcgctccagtgacaaaaagc

SEQ ID NO: 1303369 - DNA, 25 bp, Homo sapien
tgggcgcagttgtcgaggcctggca

SEQ ID NO: 1303370 - DNA, 25 bp, Homo sapien
ctgggcgcagttgtcgaggcctggc

SEQ ID NO: 1303371 - DNA, 25 bp, Homo sapien
atcagggagtggggagaggagtggg

SEQ ID NO: 1303372 - DNA, 25 bp, Homo sapien
ctgatcagggagtggggagaggagt

SEQ ID NO: 1303373 - DNA, 25 bp, Homo sapien
tgatcagggagtggggagaggagtg

SEQ ID NO: 1303374 - DNA, 25 bp, Homo sapien
gatcagggagtggggagaggagtgg

SEQ ID NO: 1303375 - DNA, 25 bp, Homo sapien
ggttagagatgggcaggatgggcca

SEQ ID NO: 1303376 - DNA, 25 bp, Homo sapien
gttagagatgggcaggatgggccaa

SEQ ID NO: 1303377 - DNA, 25 bp, Homo sapien
ctgggttagagatgggcaggatggg

SEQ ID NO: 1303378 - DNA, 25 bp, Homo sapien
tgggttagagatgggcaggatgggc

SEQ ID NO: 1303379 - DNA, 25 bp, Homo sapien
aaggaggtgctgttcaattggtaag

SEQ ID NO: 1303380 - DNA, 25 bp, Homo sapien
ggtgctgttcaattggtaaggatcc

SEQ ID NO: 1303381 - DNA, 25 bp, Homo sapien
gaggtgctgttcaattggtaaggat

SEQ ID NO: 1303382 - DNA, 25 bp, Homo sapien
cttaaggaggtgctgttcaattggt

SEQ ID NO: 1303383 - DNA, 25 bp, Homo sapien
tggcaaaccgttgtttccaggcact

SEQ ID NO: 1303384 - DNA, 25 bp, Homo sapien
tcctggcaaaccgttgtttccaggc

SEQ ID NO: 1303385 - DNA, 25 bp, Homo sapien
tgtcctggcaaaccgttgtttccag

SEQ ID NO: 1303386 - DNA, 25 bp, Homo sapien
gcaaaccgttgtttccaggcactcc

SEQ ID NO: 1303387 - DNA, 25 bp, Homo sapien
ctgcagcccaggtactccagggggg

SEQ ID NO: 1303388 - DNA, 25 bp, Homo sapien
tgcagcccaggtactccaggggggc

SEQ ID NO: 1303389 - DNA, 25 bp, Homo sapien
cagcccaggtactccaggggggcct

SEQ ID NO: 1303390 - DNA, 25 bp, Homo sapien
agagcagctgtttagggtggacaag

SEQ ID NO: 1303391 - DNA, 25 bp, Homo sapien
ggcgctggcggacaagaggagacaa

SEQ ID NO: 1303392 - DNA, 25 bp, Homo sapien
cagctgtttagggtggacaagccgc

SEQ ID NO: 1303393 - DNA, 25 bp, Homo sapien
gggcgctggcggacaagaggagaca

SEQ ID NO: 1303394 - DNA, 25 bp, Homo sapien
gctgcccatccaaagtcccggagca

SEQ ID NO: 1303395 - DNA, 25 bp, Homo sapien
tgcccatccaaagtcccggagcacc

SEQ ID NO: 1303396 - DNA, 25 bp, Homo sapien
gagctgcccatccaaagtcccggag

SEQ ID NO: 1303397 - DNA, 25 bp, Homo sapien
aggagctgcccatccaaagtcccgg

SEQ ID NO: 1303398 - DNA, 25 bp, Homo sapien
aggcaacgtctacaccaagcgcggg

SEQ ID NO: 1303399 - DNA, 25 bp, Homo sapien
tataggcaacgtctacaccaagcgc

SEQ ID NO: 1303400 - DNA, 25 bp, Homo sapien
agaaggggagaggttataggcaacg

SEQ ID NO: 1303401 - DNA, 25 bp, Homo sapien
cgtctacaccaagcgcggggctgcg

SEQ ID NO: 1303402 - DNA, 25 bp, Homo sapien
cggcatgccagagaagatgaggtct

SEQ ID NO: 1303403 - DNA, 25 bp, Homo sapien
gcatgccagagaagatgaggtctcc

SEQ ID NO: 1303404 - DNA, 25 bp, Homo sapien
ccagagaagatgaggtctccttgag

SEQ ID NO: 1303405 - DNA, 25 bp, Homo sapien
tgccagagaagatgaggtctccttg

SEQ ID NO: 1303406 - DNA, 25 bp, Homo sapien
tctctcctcgtggtcctttttcacc

SEQ ID NO: 1303407 - DNA, 25 bp, Homo sapien
cttctctcctcgtggtcctttttca

SEQ ID NO: 1303408 - DNA, 25 bp, Homo sapien
ttctctcctcgtggtcctttttcac

SEQ ID NO: 1303409 - DNA, 25 bp, Homo sapien
tggtgttcctctgagtcccgtctgt

SEQ ID NO: 1303410 - DNA, 25 bp, Homo sapien
ggtgttcctctgagtcccgtctgtc

SEQ ID NO: 1303411 - DNA, 25 bp, Homo sapien
gttcctctgagtcccgtctgtcctt

SEQ ID NO: 1303412 - DNA, 25 bp, Homo sapien
tctgagtcccgtctgtccttgctgc

SEQ ID NO: 1303413 - DNA, 25 bp, Homo sapien
ccacaggtccggtggctcctttcac

SEQ ID NO: 1303414 - DNA, 25 bp, Homo sapien
cccacaggtccggtggctcctttca

SEQ ID NO: 1303415 - DNA, 25 bp, Homo sapien
tctccagtggggccaggtggtcccc

SEQ ID NO: 1303416 - DNA, 25 bp, Homo sapien
ccttctctccagtggggccaggtgg

SEQ ID NO: 1303417 - DNA, 25 bp, Homo sapien
tccagtggggccaggtggtccccga

SEQ ID NO: 1303418 - DNA, 25 bp, Homo sapien
gggcacccttctctccagtggggcc

SEQ ID NO: 1303419 - DNA, 25 bp, Homo sapien
tgccaggcaaacccggggctccagg

SEQ ID NO: 1303420 - DNA, 25 bp, Homo sapien
tgaatgccaggcaaacccggggctc

SEQ ID NO: 1303421 - DNA, 25 bp, Homo sapien
aatgccaggcaaacccggggctcca

SEQ ID NO: 1303422 - DNA, 25 bp, Homo sapien
ctgaatgccaggcaaacccggggct

SEQ ID NO: 1303423 - DNA, 25 bp, Homo sapien
actccccttcctggaggccctggct

SEQ ID NO: 1303424 - DNA, 25 bp, Homo sapien
tggactccccttcctggaggccctg

SEQ ID NO: 1303425 - DNA, 25 bp, Homo sapien
tccccttcctggaggccctggctct

SEQ ID NO: 1303426 - DNA, 25 bp, Homo sapien
tccctggactccccttcctggaggc

SEQ ID NO: 1303427 - DNA, 25 bp, Homo sapien
cggcccagggccccaagactcacac

SEQ ID NO: 1303428 - DNA, 25 bp, Homo sapien
ccagggccccaagactcacacatac

SEQ ID NO: 1303429 - DNA, 25 bp, Homo sapien
gcccagggccccaagactcacacat

SEQ ID NO: 1303430 - DNA, 25 bp, Homo sapien
gtagctacggcccagggccccaaga

SEQ ID NO: 1303431 - DNA, 25 bp, Homo sapien
tgaactcctggtagaccgggttggc

SEQ ID NO: 1303432 - DNA, 25 bp, Homo sapien
tgcccaggccgtcctgccatgtctg

SEQ ID NO: 1303433 - DNA, 25 bp, Homo sapien
ctgcccaggccgtcctgccatgtct

SEQ ID NO: 1303434 - DNA, 25 bp, Homo sapien
gctgcccaggccgtcctgccatgtc

SEQ ID NO: 1303435 - DNA, 25 bp, Homo sapien
tggggcaggcagtgcagccatcacc

SEQ ID NO: 1303436 - DNA, 25 bp, Homo sapien
ctggggcaggcagtgcagccatcac

SEQ ID NO: 1303437 - DNA, 25 bp, Homo sapien
tctgccccttgaatgctcccacgtc

SEQ ID NO: 1303438 - DNA, 25 bp, Homo sapien
ggtcagagatgggtacagccaggag

SEQ ID NO: 1303439 - DNA, 25 bp, Homo sapien
tgccccttgaatgctcccacgtcag

SEQ ID NO: 1303440 - DNA, 25 bp, Homo sapien
ctgcacccctctgaacactctgccc

SEQ ID NO: 1303441 - DNA, 25 bp, Homo sapien
tgacagtcctggccgccctgtggtg

SEQ ID NO: 1303442 - DNA, 25 bp, Homo sapien
gtgcccggcgttccagggtctccag

SEQ ID NO: 1303443 - DNA, 25 bp, Homo sapien
tggccgccctgtggtgcccggcgtt

SEQ ID NO: 1303444 - DNA, 25 bp, Homo sapien
gtggtgcccggcgttccagggtctc

SEQ ID NO: 1303445 - DNA, 25 bp, Homo sapien
actcctttgccggggctgagggttg

SEQ ID NO: 1303446 - DNA, 25 bp, Homo sapien
ctcctttgccggggctgagggttgg

SEQ ID NO: 1303447 - DNA, 25 bp, Homo sapien
cttcagtccacgctctccagccttg

SEQ ID NO: 1303448 - DNA, 25 bp, Homo sapien
tctgccccttcagtccacgctctcc

SEQ ID NO: 1303449 - DNA, 25 bp, Homo sapien
cttctgccccttcagtccacgctct

SEQ ID NO: 1303450 - DNA, 25 bp, Homo sapien
tgccccttcagtccacgctctccag

SEQ ID NO: 1303451 - DNA, 25 bp, Homo sapien
ttttcctggcaagccaaagcctgga

SEQ ID NO: 1303452 - DNA, 25 bp, Homo sapien
aggcaaggccaccacacggacatcc

SEQ ID NO: 1303453 - DNA, 25 bp, Homo sapien
cttctctccggatgggccaggcaag

SEQ ID NO: 1303454 - DNA, 25 bp, Homo sapien
ggacatccccatcctgaaggttgga

SEQ ID NO: 1303455 - DNA, 25 bp, Homo sapien
aagcaaggacattgagttagggggt

SEQ ID NO: 1303456 - DNA, 25 bp, Homo sapien
gcaaggacattgagttagggggtcc

SEQ ID NO: 1303457 - DNA, 25 bp, Homo sapien
ctgccaagcaaggacattgagttag

SEQ ID NO: 1303458 - DNA, 25 bp, Homo sapien
gccaagcaaggacattgagttaggg

SEQ ID NO: 1303459 - DNA, 25 bp, Homo sapien
ccctttgatgcctgctggccccact

SEQ ID NO: 1303460 - DNA, 25 bp, Homo sapien
cttcgcccctttgatgcctgctggc

SEQ ID NO: 1303461 - DNA, 25 bp, Homo sapien
ttgatgcctgctggccccactggtc

SEQ ID NO: 1303462 - DNA, 25 bp, Homo sapien
tcgcccctttgatgcctgctggccc

SEQ ID NO: 1303463 - DNA, 25 bp, Homo sapien
ccagctggccctgcctccccgaagt

SEQ ID NO: 1303464 - DNA, 25 bp, Homo sapien
agctggccctgcctccccgaagtta

SEQ ID NO: 1303465 - DNA, 25 bp, Homo sapien
tgccagctggccctgcctccccgaa

SEQ ID NO: 1303466 - DNA, 25 bp, Homo sapien
gctggccctgcctccccgaagttac

SEQ ID NO: 1303467 - DNA, 25 bp, Homo sapien
ctctcctttcagccctggaacccca

SEQ ID NO: 1303468 - DNA, 25 bp, Homo sapien
tctctcctttcagccctggaacccc

SEQ ID NO: 1303469 - DNA, 25 bp, Homo sapien
gagggagggaccaggagacaggcct

SEQ ID NO: 1303470 - DNA, 25 bp, Homo sapien
cggagggagggaccaggagacaggc

SEQ ID NO: 1303471 - DNA, 25 bp, Homo sapien
gacggagggagggaccaggagacag

SEQ ID NO: 1303472 - DNA, 25 bp, Homo sapien
gcctgggacacctgcctcttcccct

SEQ ID NO: 1303473 - DNA, 25 bp, Homo sapien
cggaaggccaggcagaccaaagcca

SEQ ID NO: 1303474 - DNA, 25 bp, Homo sapien
gatgctgggcccctacaaccgagct

SEQ ID NO: 1303475 - DNA, 25 bp, Homo sapien
gaaggccaggcagaccaaagccagg

SEQ ID NO: 1303476 - DNA, 25 bp, Homo sapien
ccctacaaccgagctgcaggacaag

SEQ ID NO: 1303477 - DNA, 25 bp, Homo sapien
ttgatgccttggatgccagggtctc

SEQ ID NO: 1303478 - DNA, 25 bp, Homo sapien
tcctttgatgccttggatgccaggg

SEQ ID NO: 1303479 - DNA, 25 bp, Homo sapien
ctttgatgccttggatgccagggtc

SEQ ID NO: 1303480 - DNA, 25 bp, Homo sapien
cctttgatgccttggatgccagggt

SEQ ID NO: 1303481 - DNA, 25 bp, Homo sapien
ttttgtctgacagctcccaggtgct

SEQ ID NO: 1303482 - DNA, 25 bp, Homo sapien
tttgtctgacagctcccaggtgctc

SEQ ID NO: 1303483 - DNA, 25 bp, Homo sapien
tttttgtctgacagctcccaggtgc

SEQ ID NO: 1303484 - DNA, 25 bp, Homo sapien
ctttttgtctgacagctcccaggtg

SEQ ID NO: 1303485 - DNA, 25 bp, Homo sapien
gctccagcccagcttgcccaaaagg

SEQ ID NO: 1303486 - DNA, 25 bp, Homo sapien
gcaccctagagtctcctggaaagcc

SEQ ID NO: 1303487 - DNA, 25 bp, Homo sapien
ttgcccaaaaggcaccctagagtct

SEQ ID NO: 1303488 - DNA, 25 bp, Homo sapien
gaaagccctgggaggttgccatgga

SEQ ID NO: 1303489 - DNA, 25 bp, Homo sapien
tggctggtacaggatcaccaggctc

SEQ ID NO: 1303490 - DNA, 25 bp, Homo sapien
aacccttcaggcagtgttgggcaca

SEQ ID NO: 1303491 - DNA, 25 bp, Homo sapien
cctggctggtacaggatcaccaggc

SEQ ID NO: 1303492 - DNA, 25 bp, Homo sapien
ggaacccttcaggcagtgttgggca

SEQ ID NO: 1303493 - DNA, 25 bp, Homo sapien
cttctctcccttcacacctggcttc

SEQ ID NO: 1303494 - DNA, 25 bp, Homo sapien
tctctcccttcacacctggcttccc

SEQ ID NO: 1303495 - DNA, 25 bp, Homo sapien
ttctctcccttcacacctggcttcc

SEQ ID NO: 1303496 - DNA, 25 bp, Homo sapien
ttcctttcctgggatccccgagctg

SEQ ID NO: 1303497 - DNA, 25 bp, Homo sapien
caccagggccttcctttcctgggat

SEQ ID NO: 1303498 - DNA, 25 bp, Homo sapien
cctttcctgggatccccgagctgcc

SEQ ID NO: 1303499 - DNA, 25 bp, Homo sapien
cttcctttcctgggatccccgagct

SEQ ID NO: 1303500 - DNA, 25 bp, Homo sapien
cttggggcctggtgggccacctgga

SEQ ID NO: 1303501 - DNA, 25 bp, Homo sapien
cccttggggcctggtgggccacctg

SEQ ID NO: 1303502 - DNA, 25 bp, Homo sapien
ggcctggtgggccacctggatcccc

SEQ ID NO: 1303503 - DNA, 25 bp, Homo sapien
cttgtctcccttggggcctggtggg

SEQ ID NO: 1303504 - DNA, 25 bp, Homo sapien
ggccagggtgggagagcggtctctg

SEQ ID NO: 1303505 - DNA, 25 bp, Homo sapien
agaaaagcacagcaggagaagcaag

SEQ ID NO: 1303506 - DNA, 25 bp, Homo sapien
caggatccctgggacagagccttat

SEQ ID NO: 1303507 - DNA, 25 bp, Homo sapien
ggagagcggtctctgagaaaagcac

SEQ ID NO: 1303508 - DNA, 25 bp, Homo sapien
gcccctcaggcccaacaaagccagg

SEQ ID NO: 1303509 - DNA, 25 bp, Homo sapien
caggcagtcctatcccagggggtcc

SEQ ID NO: 1303510 - DNA, 25 bp, Homo sapien
gtcccaggcagtcctatcccagggg

SEQ ID NO: 1303511 - DNA, 25 bp, Homo sapien
tcaggcccaacaaagccagggtctc

SEQ ID NO: 1303512 - DNA, 25 bp, Homo sapien
acataaggtgggcatcagagagctg

SEQ ID NO: 1303513 - DNA, 25 bp, Homo sapien
gacataaggtgggcatcagagagct

SEQ ID NO: 1303514 - DNA, 25 bp, Homo sapien
agacataaggtgggcatcagagagc

SEQ ID NO: 1303515 - DNA, 25 bp, Homo sapien
ctttgggcccaatgacacagatctc

SEQ ID NO: 1303516 - DNA, 25 bp, Homo sapien
ttctgccctttgggcccaatgacac

SEQ ID NO: 1303517 - DNA, 25 bp, Homo sapien
tgccctttgggcccaatgacacaga

SEQ ID NO: 1303518 - DNA, 25 bp, Homo sapien
ccctttgggcccaatgacacagatc

SEQ ID NO: 1303519 - DNA, 25 bp, Homo sapien
ttgatgcctccgtcgcccttctcgc

SEQ ID NO: 1303520 - DNA, 25 bp, Homo sapien
cccttgatgcctccgtcgcccttct

SEQ ID NO: 1303521 - DNA, 25 bp, Homo sapien
tcccggcacgcccttgatgcctccg

SEQ ID NO: 1303522 - DNA, 25 bp, Homo sapien
ggcacgcccttgatgcctccgtcgc

SEQ ID NO: 1303523 - DNA, 25 bp, Homo sapien
ccttcctcatggctgtagagcctgc

SEQ ID NO: 1303524 - DNA, 25 bp, Homo sapien
ttctcgcctgttgagcctgggagtc

SEQ ID NO: 1303525 - DNA, 25 bp, Homo sapien
cttctcgcctgttgagcctgggagt

SEQ ID NO: 1303526 - DNA, 25 bp, Homo sapien
ttgagcctgggagtcctgagggtcc

SEQ ID NO: 1303527 - DNA, 25 bp, Homo sapien
ctgttgagcctgggagtcctgaggg

SEQ ID NO: 1303528 - DNA, 25 bp, Homo sapien
cctgactcccccttctctcccttcg

SEQ ID NO: 1303529 - DNA, 25 bp, Homo sapien
ctcctgactcccccttctctccctt

SEQ ID NO: 1303530 - DNA, 25 bp, Homo sapien
ctgactcccccttctctcccttcgg

SEQ ID NO: 1303531 - DNA, 25 bp, Homo sapien
agctcctgactcccccttctctccc

SEQ ID NO: 1303532 - DNA, 25 bp, Homo sapien
gggcatccggggagattcgaacaca

SEQ ID NO: 1303533 - DNA, 25 bp, Homo sapien
gggagattcgaacacagtcattgcc

SEQ ID NO: 1303534 - DNA, 25 bp, Homo sapien
catccggggagattcgaacacagtc

SEQ ID NO: 1303535 - DNA, 25 bp, Homo sapien
tccggggagattcgaacacagtcat

SEQ ID NO: 1303536 - DNA, 25 bp, Homo sapien
cccttggagcctggtggaccaggca

SEQ ID NO: 1303537 - DNA, 25 bp, Homo sapien
cttctctcccttggagcctggtgga

SEQ ID NO: 1303538 - DNA, 25 bp, Homo sapien
agcctggtggaccaggcaggccccg

SEQ ID NO: 1303539 - DNA, 25 bp, Homo sapien
tggtggaccaggcaggccccgctca

SEQ ID NO: 1303540 - DNA, 25 bp, Homo sapien
cttggggccagagggagcaagtgtg

SEQ ID NO: 1303541 - DNA, 25 bp, Homo sapien
tggggccagagggagcaagtgtgac

SEQ ID NO: 1303542 - DNA, 25 bp, Homo sapien
ttggggccagagggagcaagtgtga

SEQ ID NO: 1303543 - DNA, 25 bp, Homo sapien
attgctgtcccgggcaccatggaca

SEQ ID NO: 1303544 - DNA, 25 bp, Homo sapien
tcatcggctgctgtctcctgatgga

SEQ ID NO: 1303545 - DNA, 25 bp, Homo sapien
catcggctgctgtctcctgatggac

SEQ ID NO: 1303546 - DNA, 25 bp, Homo sapien
ctcatcggctgctgtctcctgatgg

SEQ ID NO: 1303547 - DNA, 25 bp, Homo sapien
gagctggcacctacatgtcctaagc

SEQ ID NO: 1303548 - DNA, 25 bp, Homo sapien
tcagagctggcacctacatgtccta

SEQ ID NO: 1303549 - DNA, 25 bp, Homo sapien
tgatcagagctggcacctacatgtc

SEQ ID NO: 1303550 - DNA, 25 bp, Homo sapien
cagagctggcacctacatgtcctaa

SEQ ID NO: 1303551 - DNA, 25 bp, Homo sapien
ctggctgattcttcccgtcagctgg

SEQ ID NO: 1303552 - DNA, 25 bp, Homo sapien
ttctggctgattcttcccgtcagct

SEQ ID NO: 1303553 - DNA, 25 bp, Homo sapien
tctggctgattcttcccgtcagctg

SEQ ID NO: 1303554 - DNA, 25 bp, Homo sapien
ggtgtagaccttgccttcagactgt

SEQ ID NO: 1303555 - DNA, 25 bp, Homo sapien
actgtggattgatctcaatgagctc

SEQ ID NO: 1303556 - DNA, 25 bp, Homo sapien
cagaagcagcgggtgtagaccttgc

SEQ ID NO: 1303557 - DNA, 25 bp, Homo sapien
ctcaatgagctcattgctctgggtg

SEQ ID NO: 1303558 - DNA, 25 bp, Homo sapien
cacgagctccgggtcacagtagatg

SEQ ID NO: 1303559 - DNA, 25 bp, Homo sapien
agctccgggtcacagtagatgtgca

SEQ ID NO: 1303560 - DNA, 25 bp, Homo sapien
ccagcacgagctccgggtcacagta

SEQ ID NO: 1303561 - DNA, 25 bp, Homo sapien
cctcctccagcacgagctccgggtc

SEQ ID NO: 1303562 - DNA, 25 bp, Homo sapien
tcttggctgttgacttccagggata

SEQ ID NO: 1303563 - DNA, 25 bp, Homo sapien
catccaagcctagaaatacatggcc

SEQ ID NO: 1303564 - DNA, 25 bp, Homo sapien
tgtgccaacgcaagtcgaagagctg

SEQ ID NO: 1303565 - DNA, 25 bp, Homo sapien
gagctgcagtccacgtgcacagagg

SEQ ID NO: 1303566 - DNA, 25 bp, Homo sapien
ttgaaacagataccacgtcttctgg

SEQ ID NO: 1303567 - DNA, 25 bp, Homo sapien
ttgcatcggtcacttgaaacagata

SEQ ID NO: 1303568 - DNA, 25 bp, Homo sapien
tgcatcggtcacttgaaacagatac

SEQ ID NO: 1303569 - DNA, 25 bp, Homo sapien
cagataccacgtcttctggtgggtg

SEQ ID NO: 1303570 - DNA, 25 bp, Homo sapien
tcttcttgatggcagacgtcttcat

SEQ ID NO: 1303571 - DNA, 25 bp, Homo sapien
caggcgcaggatgagaggccccttg

SEQ ID NO: 1303572 - DNA, 25 bp, Homo sapien
cttcatgaggctgagtcggtggatg

SEQ ID NO: 1303573 - DNA, 25 bp, Homo sapien
ctgagtcggtggatgaggttgaagc

SEQ ID NO: 1303574 - DNA, 25 bp, Homo sapien
cgttggctggcaggctactactgtg

SEQ ID NO: 1303575 - DNA, 25 bp, Homo sapien
cagtcacgttggctggcaggctact

SEQ ID NO: 1303576 - DNA, 25 bp, Homo sapien
ggctggcaggctactactgtgttcc

SEQ ID NO: 1303577 - DNA, 25 bp, Homo sapien
cacgttggctggcaggctactactg

SEQ ID NO: 1303578 - DNA, 25 bp, Homo sapien
agctcaagggtaccaccagggcctt

SEQ ID NO: 1303579 - DNA, 25 bp, Homo sapien
tgtgaaacagcgagaagagactgag

SEQ ID NO: 1303580 - DNA, 25 bp, Homo sapien
gggaccacaagctcaagggtaccac

SEQ ID NO: 1303581 - DNA, 25 bp, Homo sapien
tgaataaccaccttgtgaaacagcg

SEQ ID NO: 1303582 - DNA, 25 bp, Homo sapien
ggcaatgggcccagattccttacag

SEQ ID NO: 1303583 - DNA, 25 bp, Homo sapien
tggcaatgggcccagattccttaca

SEQ ID NO: 1303584 - DNA, 25 bp, Homo sapien
gcaatgggcccagattccttacaga

SEQ ID NO: 1303585 - DNA, 25 bp, Homo sapien
cttggcaatgggcccagattcctta

SEQ ID NO: 1303586 - DNA, 25 bp, Homo sapien
gtagcccaaagaccgagcagccaca

SEQ ID NO: 1303587 - DNA, 25 bp, Homo sapien
tatttgccccatggccgaaggtagc

SEQ ID NO: 1303588 - DNA, 25 bp, Homo sapien
ccatggccgaaggtagcccaaagac

SEQ ID NO: 1303589 - DNA, 25 bp, Homo sapien
ctgtatttgccccatggccgaaggt

SEQ ID NO: 1303590 - DNA, 25 bp, Homo sapien
aagaggtcagctacagccacagcac

SEQ ID NO: 1303591 - DNA, 25 bp, Homo sapien
cggtccaaagaggtcagctacagcc

SEQ ID NO: 1303592 - DNA, 25 bp, Homo sapien
cccggtccaaagaggtcagctacag

SEQ ID NO: 1303593 - DNA, 25 bp, Homo sapien
caaagaggtcagctacagccacagc

SEQ ID NO: 1303594 - DNA, 25 bp, Homo sapien
aaccacagagaccgggaaggcggat

SEQ ID NO: 1303595 - DNA, 25 bp, Homo sapien
cacacgtgggcaagtcgtggacagc

SEQ ID NO: 1303596 - DNA, 25 bp, Homo sapien
agcacaactccacacgtgggcaagt

SEQ ID NO: 1303597 - DNA, 25 bp, Homo sapien
cacagagaccgggaaggcggatttc

SEQ ID NO: 1303598 - DNA, 25 bp, Homo sapien
taggcgggaccctacgtgcccagag

SEQ ID NO: 1303599 - DNA, 25 bp, Homo sapien
tgccagggacactaatggaacacag

SEQ ID NO: 1303600 - DNA, 25 bp, Homo sapien
tcaccgccaggtgagcgatcctcga

SEQ ID NO: 1303601 - DNA, 25 bp, Homo sapien
ctaatggaacacagctggaccggcc

SEQ ID NO: 1303602 - DNA, 25 bp, Homo sapien
ggtaatgttccgagttctgcccaga

SEQ ID NO: 1303603 - DNA, 25 bp, Homo sapien
cagggccgttgaccaaggtggaatc

SEQ ID NO: 1303604 - DNA, 25 bp, Homo sapien
cacggtccaaggacgcaagaggaat

SEQ ID NO: 1303605 - DNA, 25 bp, Homo sapien
caagaggaattgagctgggctgaaa

SEQ ID NO: 1303606 - DNA, 25 bp, Homo sapien
gaaagcaaatttattggcaccaagg

SEQ ID NO: 1303607 - DNA, 25 bp, Homo sapien
agcaaatttattggcaccaaggctg

SEQ ID NO: 1303608 - DNA, 25 bp, Homo sapien
tgaggatccacaaagtaggttcaag

SEQ ID NO: 1303609 - DNA, 25 bp, Homo sapien
caaagtaggttcaagaggccatgag

SEQ ID NO: 1303610 - DNA, 25 bp, Homo sapien
caacccgggtatcccgtgaggctgg

SEQ ID NO: 1303611 - DNA, 25 bp, Homo sapien
tgctgacacttttacatgcagtcag

SEQ ID NO: 1303612 - DNA, 25 bp, Homo sapien
tacatgcagtcagtgccagaaagcc

SEQ ID NO: 1303613 - DNA, 25 bp, Homo sapien
ccagcaacccgggtatcccgtgagg

SEQ ID NO: 1303614 - DNA, 25 bp, Homo sapien
ccacgaggtaatcaatgctgctaat

SEQ ID NO: 1303615 - DNA, 25 bp, Homo sapien
cccagatggcatcaccacgaggtaa

SEQ ID NO: 1303616 - DNA, 25 bp, Homo sapien
tgcatggggctaccaaggccttctg

SEQ ID NO: 1303617 - DNA, 25 bp, Homo sapien
catcaccacgaggtaatcaatgctg

SEQ ID NO: 1303618 - DNA, 25 bp, Homo sapien
tatttgagcagactcttgtcctgca

SEQ ID NO: 1303619 - DNA, 25 bp, Homo sapien
atttttatttgagcagactcttgtc

SEQ ID NO: 1303620 - DNA, 25 bp, Homo sapien
agcagactcttgtcctgcatcttac

SEQ ID NO: 1303621 - DNA, 25 bp, Homo sapien
cttatttttatttgagcagactctt

SEQ ID NO: 1303622 - DNA, 25 bp, Homo sapien
catttctgacagacataagaccttt

SEQ ID NO: 1303623 - DNA, 25 bp, Homo sapien
ttctgacagacataagacctttttc

SEQ ID NO: 1303624 - DNA, 25 bp, Homo sapien
ttacatagctggtttcatgtagctt

SEQ ID NO: 1303625 - DNA, 25 bp, Homo sapien
tttattatttacatagctggtttca

SEQ ID NO: 1303626 - DNA, 25 bp, Homo sapien
cataccaccttagctaagtccttcc

SEQ ID NO: 1303627 - DNA, 25 bp, Homo sapien
cattccccataccaccttagctaag

SEQ ID NO: 1303628 - DNA, 25 bp, Homo sapien
caccttagctaagtccttccaggaa

SEQ ID NO: 1303629 - DNA, 25 bp, Homo sapien
attccccataccaccttagctaagt

SEQ ID NO: 1303630 - DNA, 25 bp, Homo sapien
cccatagcatccatgcatggccacc

SEQ ID NO: 1303631 - DNA, 25 bp, Homo sapien
ctgtgtgcacggcaggccagctaag

SEQ ID NO: 1303632 - DNA, 25 bp, Homo sapien
caggccagctaagggcagaacatgc

SEQ ID NO: 1303633 - DNA, 25 bp, Homo sapien
agacacagagctgcccatagcatcc

SEQ ID NO: 1303634 - DNA, 25 bp, Homo sapien
tcccatccgtcccgaaggtcttgga

SEQ ID NO: 1303635 - DNA, 25 bp, Homo sapien
agggagcccggagcaccgtgcctgc

SEQ ID NO: 1303636 - DNA, 25 bp, Homo sapien
ccatccgtcccgaaggtcttggagt

SEQ ID NO: 1303637 - DNA, 25 bp, Homo sapien
caggccttgttgagtgtccccccaa

SEQ ID NO: 1303638 - DNA, 25 bp, Homo sapien
gaatcatcttaagtcatgctccgga

SEQ ID NO: 1303639 - DNA, 25 bp, Homo sapien
cccagggtctgttctcatgaaggta

SEQ ID NO: 1303640 - DNA, 25 bp, Homo sapien
catcctttgggtgaagacaagtccc

SEQ ID NO: 1303641 - DNA, 25 bp, Homo sapien
tcagggagatttgtgtattccaccc

SEQ ID NO: 1303642 - DNA, 25 bp, Homo sapien
cagagtgaagtttattcccaacaaa

SEQ ID NO: 1303643 - DNA, 25 bp, Homo sapien
tttatatgcagtgggcagtccagcg

SEQ ID NO: 1303644 - DNA, 25 bp, Homo sapien
tggctcctgggtagttccaaagtgg

SEQ ID NO: 1303645 - DNA, 25 bp, Homo sapien
cagggacggacaggctgggctgaag

SEQ ID NO: 1303646 - DNA, 25 bp, Homo sapien
tgtcatagatttgaaggtgctccag

SEQ ID NO: 1303647 - DNA, 25 bp, Homo sapien
ggcagcgagcccagtgtcatagatt

SEQ ID NO: 1303648 - DNA, 25 bp, Homo sapien
tgcccggtgcagagtcagccgttct

SEQ ID NO: 1303649 - DNA, 25 bp, Homo sapien
accatccggtggttctgtgggctcc

SEQ ID NO: 1303650 - DNA, 25 bp, Homo sapien
tgatggcgccgatgttgggacaagc

SEQ ID NO: 1303651 - DNA, 25 bp, Homo sapien
atggcgccgatgttgggacaagctg

SEQ ID NO: 1303652 - DNA, 25 bp, Homo sapien
ctgatggcgccgatgttgggacaag

SEQ ID NO: 1303653 - DNA, 25 bp, Homo sapien
gatggcgccgatgttgggacaagct

SEQ ID NO: 1303654 - DNA, 25 bp, Homo sapien
gaattcaaatacagacctgcctggt

SEQ ID NO: 1303655 - DNA, 25 bp, Homo sapien
tgtacagacgatcaaactgaggagt

SEQ ID NO: 1303656 - DNA, 25 bp, Homo sapien
tatggagcaatcaggtgtcaagcag

SEQ ID NO: 1303657 - DNA, 25 bp, Homo sapien
ccagagagggctggtaatgcccaaa

SEQ ID NO: 1303658 - DNA, 25 bp, Homo sapien
aggacacactccaccgcttctccct

SEQ ID NO: 1303659 - DNA, 25 bp, Homo sapien
gctgccccacccgaggacacactcc

SEQ ID NO: 1303660 - DNA, 25 bp, Homo sapien
ctgccccacccgaggacacactcca

SEQ ID NO: 1303661 - DNA, 25 bp, Homo sapien
tgccccacccgaggacacactccac

SEQ ID NO: 1303662 - DNA, 25 bp, Homo sapien
acttctggttgagctcgtggtagag

SEQ ID NO: 1303663 - DNA, 25 bp, Homo sapien
tagcggtcgaaagtgtggaacttct

SEQ ID NO: 1303664 - DNA, 25 bp, Homo sapien
tgaatgccgtttccgggtgtgcatc

SEQ ID NO: 1303665 - DNA, 25 bp, Homo sapien
cgtggactggctgcggtagcggtcg

SEQ ID NO: 1303666 - DNA, 25 bp, Homo sapien
tctcttcacgttggtgctatgggct

SEQ ID NO: 1303667 - DNA, 25 bp, Homo sapien
agacctagttctctcttcacgttgg

SEQ ID NO: 1303668 - DNA, 25 bp, Homo sapien
cttggactacttttaggagtgagcc

SEQ ID NO: 1303669 - DNA, 25 bp, Homo sapien
gggtcaggctctgcaacagagcttg

SEQ ID NO: 1303670 - DNA, 25 bp, Homo sapien
agtccaggtctgaataccgtaattt

SEQ ID NO: 1303671 - DNA, 25 bp, Homo sapien
caggtctgaataccgtaatttcttt

SEQ ID NO: 1303672 - DNA, 25 bp, Homo sapien
gtccaggtctgaataccgtaatttc

SEQ ID NO: 1303673 - DNA, 25 bp, Homo sapien
tccaggtctgaataccgtaatttct

SEQ ID NO: 1303674 - DNA, 25 bp, Homo sapien
gacttccaacatgacaggcccagat

SEQ ID NO: 1303675 - DNA, 25 bp, Homo sapien
gggcagcttttcaggcctcactgaa

SEQ ID NO: 1303676 - DNA, 25 bp, Homo sapien
tgcccacatggaatcagagccagtg

SEQ ID NO: 1303677 - DNA, 25 bp, Homo sapien
caaatggcatggtgcggacttccaa

SEQ ID NO: 1303678 - DNA, 25 bp, Homo sapien
ccgagtggtccacggacaggaagct

SEQ ID NO: 1303679 - DNA, 25 bp, Homo sapien
cacatgtaaacagggttggcctcct

SEQ ID NO: 1303680 - DNA, 25 bp, Homo sapien
gaaggtcattccatagggattctgg

SEQ ID NO: 1303681 - DNA, 25 bp, Homo sapien
catcttcatggtagagccgggcacg

SEQ ID NO: 1303682 - DNA, 25 bp, Homo sapien
tgccctgggaggacagtattctctc

SEQ ID NO: 1303683 - DNA, 25 bp, Homo sapien
tgctaagaactcgatgtccccgaat

SEQ ID NO: 1303684 - DNA, 25 bp, Homo sapien
caaagtccccacattgagacagggc

SEQ ID NO: 1303685 - DNA, 25 bp, Homo sapien
tctaacttcgaagctggactccagc

SEQ ID NO: 1303686 - DNA, 25 bp, Homo sapien
tgtttgacaagccagatccacatcc

SEQ ID NO: 1303687 - DNA, 25 bp, Homo sapien
tgacaagccagatccacatcctttt

SEQ ID NO: 1303688 - DNA, 25 bp, Homo sapien
caagccagatccacatccttttcaa

SEQ ID NO: 1303689 - DNA, 25 bp, Homo sapien
agccagatccacatccttttcaaag

SEQ ID NO: 1303690 - DNA, 25 bp, Homo sapien
gatctgcagctgcccgttcttacac

SEQ ID NO: 1303691 - DNA, 25 bp, Homo sapien
cagctgcccgttcttacacgagtca

SEQ ID NO: 1303692 - DNA, 25 bp, Homo sapien
agtcaggggagtcttcgctctcatc

SEQ ID NO: 1303693 - DNA, 25 bp, Homo sapien
ctgcccgttcttacacgagtcaggg

SEQ ID NO: 1303694 - DNA, 25 bp, Homo sapien
cctgcgcggagttgaagacagcaaa

SEQ ID NO: 1303695 - DNA, 25 bp, Homo sapien
cggtctgtcatagccaggacggcag

SEQ ID NO: 1303696 - DNA, 25 bp, Homo sapien
gacggaacggcggtctgtcatagcc

SEQ ID NO: 1303697 - DNA, 25 bp, Homo sapien
gcagtgatgacaaagccctgcgcgg

SEQ ID NO: 1303698 - DNA, 25 bp, Homo sapien
cggggccgggacggcatccccagag

SEQ ID NO: 1303699 - DNA, 25 bp, Homo sapien
gcacggggccgggacggcatcccca

SEQ ID NO: 1303700 - DNA, 25 bp, Homo sapien
ggggccgggacggcatccccagagc

SEQ ID NO: 1303701 - DNA, 25 bp, Homo sapien
catccccagagcctaactgggtagg

SEQ ID NO: 1303702 - DNA, 25 bp, Homo sapien
gagctacgctgattaaccaccaatt

SEQ ID NO: 1303703 - DNA, 25 bp, Homo sapien
agagggtggcaccattccgcagaga

SEQ ID NO: 1303704 - DNA, 25 bp, Homo sapien
taatcacagtaataagagctacgct

SEQ ID NO: 1303705 - DNA, 25 bp, Homo sapien
tccccggaggtgtagccaagactaa

SEQ ID NO: 1303706 - DNA, 25 bp, Homo sapien
ggaccgctccacacgctgagcaggg

SEQ ID NO: 1303707 - DNA, 25 bp, Homo sapien
tggggaccgctccacacgctgagca

SEQ ID NO: 1303708 - DNA, 25 bp, Homo sapien
gcgttcctggccgaggctgagctga

SEQ ID NO: 1303709 - DNA, 25 bp, Homo sapien
ggctggggaccgctccacacgctga

SEQ ID NO: 1303710 - DNA, 25 bp, Homo sapien
gcaaccttgatgcaccaaggttggg

SEQ ID NO: 1303711 - DNA, 25 bp, Homo sapien
tcgagccctgagtctccaagagcac

SEQ ID NO: 1303712 - DNA, 25 bp, Homo sapien
ggctgcggctgagcactccgggtgc

SEQ ID NO: 1303713 - DNA, 25 bp, Homo sapien
gggagccccggtcgcatcatcgagc

SEQ ID NO: 1303714 - DNA, 25 bp, Homo sapien
gcttcttggatttgtcggagatgcc

SEQ ID NO: 1303715 - DNA, 25 bp, Homo sapien
tgaagacgatgattccgatgagcat

SEQ ID NO: 1303716 - DNA, 25 bp, Homo sapien
gagatgccatcacgtgccatgagct

SEQ ID NO: 1303717 - DNA, 25 bp, Homo sapien
tttgtcggagatgccatcacgtgcc

SEQ ID NO: 1303718 - DNA, 25 bp, Homo sapien
cacaaaggcgtagagcaggccgccc

SEQ ID NO: 1303719 - DNA, 25 bp, Homo sapien
acaaaggcgtagagcaggccgccct

SEQ ID NO: 1303720 - DNA, 25 bp, Homo sapien
tggatgtaccgtatcctttcgttcg

SEQ ID NO: 1303721 - DNA, 25 bp, Homo sapien
gtaaagccaacagacacggccacca

SEQ ID NO: 1303722 - DNA, 25 bp, Homo sapien
tagctggatgtaccgtatcctttcg

SEQ ID NO: 1303723 - DNA, 25 bp, Homo sapien
ttcgttcgggtaaagccaacagaca

SEQ ID NO: 1303724 - DNA, 25 bp, Homo sapien
ttgttctcccagactcccatcccag

SEQ ID NO: 1303725 - DNA, 25 bp, Homo sapien
gagatggttgctggtcttcagggac

SEQ ID NO: 1303726 - DNA, 25 bp, Homo sapien
ggccaaagctgaacctctcttgctg

SEQ ID NO: 1303727 - DNA, 25 bp, Homo sapien
ccagagtgagatggttgctggtctt

SEQ ID NO: 1303728 - DNA, 25 bp, Homo sapien
ggaagcgcttgcgaacgaggcgggt

SEQ ID NO: 1303729 - DNA, 25 bp, Homo sapien
ggcgggtgcgcatccgcccaatgac

SEQ ID NO: 1303730 - DNA, 25 bp, Homo sapien
tgcaggaaggcagccgtcatggtgc

SEQ ID NO: 1303731 - DNA, 25 bp, Homo sapien
aaggcagccgtcatggtgcacacgc

SEQ ID NO: 1303732 - DNA, 25 bp, Homo sapien
acacacagcacgacacgggcctggt

SEQ ID NO: 1303733 - DNA, 25 bp, Homo sapien
cacacacagcacgacacgggcctgg

SEQ ID NO: 1303734 - DNA, 25 bp, Homo sapien
cacacagcacgacacgggcctggtg

SEQ ID NO: 1303735 - DNA, 25 bp, Homo sapien
ccacacacagcacgacacgggcctg

SEQ ID NO: 1303736 - DNA, 25 bp, Homo sapien
accccactcacacccctggcagccc

SEQ ID NO: 1303737 - DNA, 25 bp, Homo sapien
ccctccaccccactcacacccctgg

SEQ ID NO: 1303738 - DNA, 25 bp, Homo sapien
ccctggcagccctggaagtctgcac

SEQ ID NO: 1303739 - DNA, 25 bp, Homo sapien
cactcacacccctggcagccctgga

SEQ ID NO: 1303740 - DNA, 25 bp, Homo sapien
gatggagcgttcagattttatgaac

SEQ ID NO: 1303741 - DNA, 25 bp, Homo sapien
gcaagatgatggagcgttcagattt

SEQ ID NO: 1303742 - DNA, 25 bp, Homo sapien
gatgttggatgccaagatggacagg

SEQ ID NO: 1303743 - DNA, 25 bp, Homo sapien
gcacccgggactggcccacgaggat

SEQ ID NO: 1303744 - DNA, 25 bp, Homo sapien
tccaaaaggcggcatagatggcgag

SEQ ID NO: 1303745 - DNA, 25 bp, Homo sapien
tgagcagcgccatgcacgacactgc

SEQ ID NO: 1303746 - DNA, 25 bp, Homo sapien
actgcacagccgatcaccaggggga

SEQ ID NO: 1303747 - DNA, 25 bp, Homo sapien
caaaaggcggcatagatggcgagca

SEQ ID NO: 1303748 - DNA, 25 bp, Homo sapien
tgggctagtacagcaaaggtggaca

SEQ ID NO: 1303749 - DNA, 25 bp, Homo sapien
tgggcggctgggctagtacagcaaa

SEQ ID NO: 1303750 - DNA, 25 bp, Homo sapien
cttgggcggctgggctagtacagca

SEQ ID NO: 1303751 - DNA, 25 bp, Homo sapien
gcggctgggctagtacagcaaaggt

SEQ ID NO: 1303752 - DNA, 25 bp, Homo sapien
gccccaggccagctacgtggccctg

SEQ ID NO: 1303753 - DNA, 25 bp, Homo sapien
cccagctggcgcaatggggatccgt

SEQ ID NO: 1303754 - DNA, 25 bp, Homo sapien
tggcgcaatggggatccgtggtccc

SEQ ID NO: 1303755 - DNA, 25 bp, Homo sapien
tggagtagtcccagctggcgcaatg

SEQ ID NO: 1303756 - DNA, 25 bp, Homo sapien
gctctggagtagtcccagctggcgc

SEQ ID NO: 1303757 - DNA, 25 bp, Homo sapien
taggggggcgcacagtcactgtcat

SEQ ID NO: 1303758 - DNA, 25 bp, Homo sapien
atcacccgggatgtgacggccagcg

SEQ ID NO: 1303759 - DNA, 25 bp, Homo sapien
tcactgtcatcacccgggatgtgac

SEQ ID NO: 1303760 - DNA, 25 bp, Homo sapien
gcacagtcactgtcatcacccggga

SEQ ID NO: 1303761 - DNA, 25 bp, Homo sapien
cagcaccgatcacaaagtaggagga

SEQ ID NO: 1303762 - DNA, 25 bp, Homo sapien
agtaggaggactcatcagggtctgc

SEQ ID NO: 1303763 - DNA, 25 bp, Homo sapien
gtagagtacagcaccgatcacaaag

SEQ ID NO: 1303764 - DNA, 25 bp, Homo sapien
aaagtaggaggactcatcagggtct

SEQ ID NO: 1303765 - DNA, 25 bp, Homo sapien
tgcctgctgccccagatgtggctgg

SEQ ID NO: 1303766 - DNA, 25 bp, Homo sapien
tgggccaggaggcaccgttcctggg

SEQ ID NO: 1303767 - DNA, 25 bp, Homo sapien
ggccaggaggcaccgttcctgggcc

SEQ ID NO: 1303768 - DNA, 25 bp, Homo sapien
cccagatgtggctggcttccctggg

SEQ ID NO: 1303769 - DNA, 25 bp, Homo sapien
gaagaggcggtcctctgagtgccgc

SEQ ID NO: 1303770 - DNA, 25 bp, Homo sapien
gacgggctctcgctgaatgctgatc

SEQ ID NO: 1303771 - DNA, 25 bp, Homo sapien
tggacacagctgagacgggctctcg

SEQ ID NO: 1303772 - DNA, 25 bp, Homo sapien
gccccgcatggggaacgtgatgtca

SEQ ID NO: 1303773 - DNA, 25 bp, Homo sapien
tgtgacaatcagagagctctggaag

SEQ ID NO: 1303774 - DNA, 25 bp, Homo sapien
tgaatgaagtcctccacgacacgga

SEQ ID NO: 1303775 - DNA, 25 bp, Homo sapien
ctccacgacacggagcaggtgcaca

SEQ ID NO: 1303776 - DNA, 25 bp, Homo sapien
agagcatcgcccaccaggtgaatga

SEQ ID NO: 1303777 - DNA, 25 bp, Homo sapien
ccaaggcagggtgggtcacgggagg

SEQ ID NO: 1303778 - DNA, 25 bp, Homo sapien
ctggggacagaaagtgtgtaagggt

SEQ ID NO: 1303779 - DNA, 25 bp, Homo sapien
tgggtcacgggaggagaagctggca

SEQ ID NO: 1303780 - DNA, 25 bp, Homo sapien
tgtgtaagggtccaaggcagggtgg

SEQ ID NO: 1303781 - DNA, 25 bp, Homo sapien
ctgctgagcatcgtcccacttctcc

SEQ ID NO: 1303782 - DNA, 25 bp, Homo sapien
tgttttccgcatccaccatgaagct

SEQ ID NO: 1303783 - DNA, 25 bp, Homo sapien
gttttccgcatccaccatgaagctc

SEQ ID NO: 1303784 - DNA, 25 bp, Homo sapien
actatagtaggtgcgccgggccagt

SEQ ID NO: 1303785 - DNA, 25 bp, Homo sapien
tgcacatcatcagccgagggcacgt

SEQ ID NO: 1303786 - DNA, 25 bp, Homo sapien
agaagagcaggtccccactatagta

SEQ ID NO: 1303787 - DNA, 25 bp, Homo sapien
gagggcacgtaggtggccctcttaa

SEQ ID NO: 1303788 - DNA, 25 bp, Homo sapien
gtacgccacgccttgggcactgagg

SEQ ID NO: 1303789 - DNA, 25 bp, Homo sapien
cggtactcatgggagatgcagcgag

SEQ ID NO: 1303790 - DNA, 25 bp, Homo sapien
ggagatgcagcgagcaaagctgggc

SEQ ID NO: 1303791 - DNA, 25 bp, Homo sapien
cagtacgccacgccttgggcactga

SEQ ID NO: 1303792 - DNA, 25 bp, Homo sapien
agatgatctcgccagcagctgcctt

SEQ ID NO: 1303793 - DNA, 25 bp, Homo sapien
agcatcacgtactcatccctgcaca

SEQ ID NO: 1303794 - DNA, 25 bp, Homo sapien
cattcggggggcacttgttgtagat

SEQ ID NO: 1303795 - DNA, 25 bp, Homo sapien
ttcttccacgtcatcagcatcacgt

SEQ ID NO: 1303796 - DNA, 25 bp, Homo sapien
gcccgcatctatgatgatcaaggaa

SEQ ID NO: 1303797 - DNA, 25 bp, Homo sapien
gcactcctgaccaagtagattcttt

SEQ ID NO: 1303798 - DNA, 25 bp, Homo sapien
aagatgtcaggaggggctgcgcacc

SEQ ID NO: 1303799 - DNA, 25 bp, Homo sapien
aaacctactaatccagcgacaattt

SEQ ID NO: 1303800 - DNA, 25 bp, Homo sapien
taaagtactaagattgtgctcaata

SEQ ID NO: 1303801 - DNA, 25 bp, Homo sapien
gcaatgcactcctgaccaagtagat

SEQ ID NO: 1303802 - DNA, 25 bp, Homo sapien
accagcaaagcaatgcactcctgac

SEQ ID NO: 1303803 - DNA, 25 bp, Homo sapien
atccagcgacaatttgaatcggttt

SEQ ID NO: 1303804 - DNA, 25 bp, Homo sapien
gtttcaaacctactaatccagcgac

SEQ ID NO: 1303805 - DNA, 25 bp, Homo sapien
gaatcggttttgtaggtagaggaat

SEQ ID NO: 1303806 - DNA, 25 bp, Homo sapien
attagagtgcattactttgaatcaa

SEQ ID NO: 1303807 - DNA, 25 bp, Homo sapien
gtcaggagtgcattgctttgctggt

SEQ ID NO: 1303808 - DNA, 25 bp, Homo sapien
atctacttggtcaggagtgcattgc

SEQ ID NO: 1303809 - DNA, 25 bp, Homo sapien
gtcgctggattagtaggtttgaaac

SEQ ID NO: 1303810 - DNA, 25 bp, Homo sapien
ttgattcaaagtaatgcactctaat

SEQ ID NO: 1303811 - DNA, 25 bp, Homo sapien
tattgagcacaatcttagtacttta

SEQ ID NO: 1303812 - DNA, 25 bp, Homo sapien
aaaccgattcaaattgtcgctggat

SEQ ID NO: 1303813 - DNA, 25 bp, Homo sapien
ggtgcgcagcccctcctgacatctt

SEQ ID NO: 1303814 - DNA, 25 bp, Homo sapien
aaattgtcgctggattagtaggttt

SEQ ID NO: 1303815 - DNA, 25 bp, Homo sapien
attcctctacctacaaaaccgattc

SEQ ID NO: 1303816 - DNA, 25 bp, Homo sapien
aaagaatctacttggtcaggagtgc

SEQ ID NO: 1303817 - DNA, 25 bp, Homo sapien
ttccttgatcatcatagatgcgggc

SEQ ID NO: 1303818 - DNA, 25 bp, Homo sapien
tgccagcctgtgtcacacgtcttag

SEQ ID NO: 1303819 - DNA, 25 bp, Homo sapien
ggacacctcttctcactacaaggct

SEQ ID NO: 1303820 - DNA, 25 bp, Homo sapien
tctccggtgccctcgcaggggtagc

SEQ ID NO: 1303821 - DNA, 25 bp, Homo sapien
tgcccgtggcctggcacatgcggaa

SEQ ID NO: 1303822 - DNA, 25 bp, Homo sapien
tgcacttccggctgcgctgttgggt

SEQ ID NO: 1303823 - DNA, 25 bp, Homo sapien
cactcccgggtgtcagtgagggcac

SEQ ID NO: 1303824 - DNA, 25 bp, Homo sapien
cccattggcacaggacgtggagcat

SEQ ID NO: 1303825 - DNA, 25 bp, Homo sapien
tgagggcacccgtgcatgtggccca

SEQ ID NO: 1303826 - DNA, 25 bp, Homo sapien
gcagagcttagtctgcagctcagga

SEQ ID NO: 1303827 - DNA, 25 bp, Homo sapien
caggcagccatactgcagagcttag

SEQ ID NO: 1303828 - DNA, 25 bp, Homo sapien
ctcgcaggccttgccgccgtgctgg

SEQ ID NO: 1303829 - DNA, 25 bp, Homo sapien
gcaggtccgcatccggctccgggac

SEQ ID NO: 1303830 - DNA, 25 bp, Homo sapien
tggctgggcggcaccatggccccgc

SEQ ID NO: 1303831 - DNA, 25 bp, Homo sapien
gatctgttgccagggggatctccca

SEQ ID NO: 1303832 - DNA, 25 bp, Homo sapien
tctgccccgggatctgttgccaggg

SEQ ID NO: 1303833 - DNA, 25 bp, Homo sapien
ggatctgttgccagggggatctccc

SEQ ID NO: 1303834 - DNA, 25 bp, Homo sapien
ctcattggctctgccccgggatctg

SEQ ID NO: 1303835 - DNA, 25 bp, Homo sapien
gcttccggtcctaattcacatagga

SEQ ID NO: 1303836 - DNA, 25 bp, Homo sapien
caggcttccggtcctaattcacata

SEQ ID NO: 1303837 - DNA, 25 bp, Homo sapien
ggtcctaattcacataggacagccc

SEQ ID NO: 1303838 - DNA, 25 bp, Homo sapien
tccggtcctaattcacataggacag

SEQ ID NO: 1303839 - DNA, 25 bp, Homo sapien
gcagaccctgcccacacgtcaggga

SEQ ID NO: 1303840 - DNA, 25 bp, Homo sapien
acgtcagggaacacacgctccacgg

SEQ ID NO: 1303841 - DNA, 25 bp, Homo sapien
aggacacacaggagcgggtccgcac

SEQ ID NO: 1303842 - DNA, 25 bp, Homo sapien
ggctgaattgttgcagggcctggtc

SEQ ID NO: 1303843 - DNA, 25 bp, Homo sapien
tttcggttcctcttccggctcctca

SEQ ID NO: 1303844 - DNA, 25 bp, Homo sapien
tgtctgcgccatgtatagcccaggc

SEQ ID NO: 1303845 - DNA, 25 bp, Homo sapien
aggctcatctgcagacctcggccac

SEQ ID NO: 1303846 - DNA, 25 bp, Homo sapien
tcactttcggttcctcttccggctc

SEQ ID NO: 1303847 - DNA, 25 bp, Homo sapien
tgtgaggatcttgggctcatccctc

SEQ ID NO: 1303848 - DNA, 25 bp, Homo sapien
gaggatcttgggctcatccctcctg

SEQ ID NO: 1303849 - DNA, 25 bp, Homo sapien
tgaggatcttgggctcatccctcct

SEQ ID NO: 1303850 - DNA, 25 bp, Homo sapien
ctgtgaggatcttgggctcatccct

SEQ ID NO: 1303851 - DNA, 25 bp, Homo sapien
gagatctatcaaaggcagtttgcgt

SEQ ID NO: 1303852 - DNA, 25 bp, Homo sapien
tttgcgtgaaattaacaggcgcctg

SEQ ID NO: 1303853 - DNA, 25 bp, Homo sapien
aacaggcgcctgtaccctcttgtca

SEQ ID NO: 1303854 - DNA, 25 bp, Homo sapien
taccctcttgtcaaactcactcggc

SEQ ID NO: 1303855 - DNA, 25 bp, Homo sapien
tgtggatcttcctcgggggtgtccc

SEQ ID NO: 1303856 - DNA, 25 bp, Homo sapien
gtggatcttcctcgggggtgtccca

SEQ ID NO: 1303857 - DNA, 25 bp, Homo sapien
aagatgaacacagcttccctgccct

SEQ ID NO: 1303858 - DNA, 25 bp, Homo sapien
cagagaagatgaacacagcttccct

SEQ ID NO: 1303859 - DNA, 25 bp, Homo sapien
taccatccccacgaatcttgctctc

SEQ ID NO: 1303860 - DNA, 25 bp, Homo sapien
catccccacgaatcttgctctcagt

SEQ ID NO: 1303861 - DNA, 25 bp, Homo sapien
cgaatcttgctctcagtctggcagc

SEQ ID NO: 1303862 - DNA, 25 bp, Homo sapien
cccacgaatcttgctctcagtctgg

SEQ ID NO: 1303863 - DNA, 25 bp, Homo sapien
gcggcctcggtcccagaagacatgg

SEQ ID NO: 1303864 - DNA, 25 bp, Homo sapien
cggcctcggtcccagaagacatggg

SEQ ID NO: 1303865 - DNA, 25 bp, Homo sapien
gctccccgagtgcaaatcggcctca

SEQ ID NO: 1303866 - DNA, 25 bp, Homo sapien
ttgtgaacagatcattgctgctccc

SEQ ID NO: 1303867 - DNA, 25 bp, Homo sapien
cagggcattggacagggtgtgggca

SEQ ID NO: 1303868 - DNA, 25 bp, Homo sapien
catatctcatctcggttgtgaacag

SEQ ID NO: 1303869 - DNA, 25 bp, Homo sapien
tcggagggctcagccgacaggcaca

SEQ ID NO: 1303870 - DNA, 25 bp, Homo sapien
ctcgacaaagcggaaggctagggca

SEQ ID NO: 1303871 - DNA, 25 bp, Homo sapien
tgttgttgatgagcaagacctcgac

SEQ ID NO: 1303872 - DNA, 25 bp, Homo sapien
tgatgagcaagacctcgacaaagcg

SEQ ID NO: 1303873 - DNA, 25 bp, Homo sapien
cttgtcgaagtgcaggaaggtaaag

SEQ ID NO: 1303874 - DNA, 25 bp, Homo sapien
tgtcgaagtgcaggaaggtaaaggg

SEQ ID NO: 1303875 - DNA, 25 bp, Homo sapien
tcgaagtgcaggaaggtaaaggggc

SEQ ID NO: 1303876 - DNA, 25 bp, Homo sapien
ttgtcgaagtgcaggaaggtaaagg

SEQ ID NO: 1303877 - DNA, 25 bp, Homo sapien
tccaaccccgctgccgcctctgcct

SEQ ID NO: 1303878 - DNA, 25 bp, Homo sapien
cctcctcctcttctggccgccccac

SEQ ID NO: 1303879 - DNA, 25 bp, Homo sapien
ctgcctcctcctcttctggccgccc

SEQ ID NO: 1303880 - DNA, 25 bp, Homo sapien
ctccaaccccgctgccgcctctgcc

SEQ ID NO: 1303881 - DNA, 25 bp, Homo sapien
aggcgcagggacagaatcacagaca

SEQ ID NO: 1303882 - DNA, 25 bp, Homo sapien
gcaaagtgtgcgcacacctgctcct

SEQ ID NO: 1303883 - DNA, 25 bp, Homo sapien
taggaaagaggtcctgcagcgagaa

SEQ ID NO: 1303884 - DNA, 25 bp, Homo sapien
gtaaagttgaccaggtagtggtcca

SEQ ID NO: 1303885 - DNA, 25 bp, Homo sapien
ccccgtgtgtcgtgatcagctgtga

SEQ ID NO: 1303886 - DNA, 25 bp, Homo sapien
tcagctgtgaggcatgtcaccgcgt

SEQ ID NO: 1303887 - DNA, 25 bp, Homo sapien
tctccatccccgtgtgtcgtgatca

SEQ ID NO: 1303888 - DNA, 25 bp, Homo sapien
aacctgtattctccataactcttgc

SEQ ID NO: 1303889 - DNA, 25 bp, Homo sapien
gaaaggggcggagttacagccagtg

SEQ ID NO: 1303890 - DNA, 25 bp, Homo sapien
tgtgccaggaactgcgcacaacctg

SEQ ID NO: 1303891 - DNA, 25 bp, Homo sapien
caggaactgcgcacaacctgagcca

SEQ ID NO: 1303892 - DNA, 25 bp, Homo sapien
gaactgcgcacaacctgagccatgc

SEQ ID NO: 1303893 - DNA, 25 bp, Homo sapien
gggccgggcgcagggtaggtagctg

SEQ ID NO: 1303894 - DNA, 25 bp, Homo sapien
ggccacggggcgcaagtttgccatc

SEQ ID NO: 1303895 - DNA, 25 bp, Homo sapien
cggggcgcaagtttgccatccctaa

SEQ ID NO: 1303896 - DNA, 25 bp, Homo sapien
gccgggcgcagggtaggtagctgca

SEQ ID NO: 1303897 - DNA, 25 bp, Homo sapien
cagccccgggctctgagagccggtg

SEQ ID NO: 1303898 - DNA, 25 bp, Homo sapien
gagagccggtgccgcatcctcttcg

SEQ ID NO: 1303899 - DNA, 25 bp, Homo sapien
tgccgcatcctcttcggtctctgag

SEQ ID NO: 1303900 - DNA, 25 bp, Homo sapien
ggtgccgcatcctcttcggtctctg

SEQ ID NO: 1303901 - DNA, 25 bp, Homo sapien
cgcgccgggccgagtgacggccgag

SEQ ID NO: 1303902 - DNA, 25 bp, Homo sapien
agtgacggccgaggcgggacgcggc

SEQ ID NO: 1303903 - DNA, 25 bp, Homo sapien
gcgccgggccgagtgacggccgagg

SEQ ID NO: 1303904 - DNA, 25 bp, Homo sapien
tgacggccgaggcgggacgcggcgc

SEQ ID NO: 1303905 - DNA, 25 bp, Homo sapien
ggcctgctcgctgtgagatcttcgc

SEQ ID NO: 1303906 - DNA, 25 bp, Homo sapien
ggcagctcatcagtcttccgcaatg

SEQ ID NO: 1303907 - DNA, 25 bp, Homo sapien
acgctcattctgctgagggcttggg

SEQ ID NO: 1303908 - DNA, 25 bp, Homo sapien
actcgatgggcactcgggaggcaat

SEQ ID NO: 1303909 - DNA, 25 bp, Homo sapien
acttcagtgagaagatggggaagat

SEQ ID NO: 1303910 - DNA, 25 bp, Homo sapien
cacttcagtgagaagatggggaaga

SEQ ID NO: 1303911 - DNA, 25 bp, Homo sapien
tcacttcagtgagaagatggggaag

SEQ ID NO: 1303912 - DNA, 25 bp, Homo sapien
tgaatttgaaacctgtctgctgtgc

SEQ ID NO: 1303913 - DNA, 25 bp, Homo sapien
aatttgaaacctgtctgctgtgcca

SEQ ID NO: 1303914 - DNA, 25 bp, Homo sapien
gaatttgaaacctgtctgctgtgcc

SEQ ID NO: 1303915 - DNA, 25 bp, Homo sapien
atttgaaacctgtctgctgtgccat

SEQ ID NO: 1303916 - DNA, 25 bp, Homo sapien
tcttgcctggacacttttctctgag

SEQ ID NO: 1303917 - DNA, 25 bp, Homo sapien
agtcttgcctggacacttttctctg

SEQ ID NO: 1303918 - DNA, 25 bp, Homo sapien
gtcttgcctggacacttttctctga

SEQ ID NO: 1303919 - DNA, 25 bp, Homo sapien
cttgcctggacacttttctctgagc

SEQ ID NO: 1303920 - DNA, 25 bp, Homo sapien
cttcgtcacctctgcactgccagcc

SEQ ID NO: 1303921 - DNA, 25 bp, Homo sapien
ctctgttaatctgggacggctctgt

SEQ ID NO: 1303922 - DNA, 25 bp, Homo sapien
cagggatttctctgttaatctggga

SEQ ID NO: 1303923 - DNA, 25 bp, Homo sapien
aatctgggacggctctgtttgcatc

SEQ ID NO: 1303924 - DNA, 25 bp, Homo sapien
gatttctctgttaatctgggacggc

SEQ ID NO: 1303925 - DNA, 25 bp, Homo sapien
cagagatcgaaattcctggcctggg

SEQ ID NO: 1303926 - DNA, 25 bp, Homo sapien
gctggcaccagagatcgaaattcct

SEQ ID NO: 1303927 - DNA, 25 bp, Homo sapien
cctggcctgggtaattgtgtggaaa

SEQ ID NO: 1303928 - DNA, 25 bp, Homo sapien
gaaattcctggcctgggtaattgtg

SEQ ID NO: 1303929 - DNA, 25 bp, Homo sapien
ggagaatgcccacatgcatccaagt

SEQ ID NO: 1303930 - DNA, 25 bp, Homo sapien
gaatgagagaccttgggacaggctc

SEQ ID NO: 1303931 - DNA, 25 bp, Homo sapien
ccctgtgcctgtggcgttagaggga

SEQ ID NO: 1303932 - DNA, 25 bp, Homo sapien
cctgtagatgtctgagtgtgaatga

SEQ ID NO: 1303933 - DNA, 25 bp, Homo sapien
gcttctattaatctttctccggttg

SEQ ID NO: 1303934 - DNA, 25 bp, Homo sapien
agagctccgagtaggaacgtaattg

SEQ ID NO: 1303935 - DNA, 25 bp, Homo sapien
ggaacgtaattgcttctattaatct

SEQ ID NO: 1303936 - DNA, 25 bp, Homo sapien
ctttctccggttgttaattgctcac

SEQ ID NO: 1303937 - DNA, 25 bp, Homo sapien
tcttaattcgcctccatagctgcag

SEQ ID NO: 1303938 - DNA, 25 bp, Homo sapien
tgcaggtgtttgctgccttattaac

SEQ ID NO: 1303939 - DNA, 25 bp, Homo sapien
gtattatgccgactgttgctcttaa

SEQ ID NO: 1303940 - DNA, 25 bp, Homo sapien
ccttattaactgttaatcggcgcga

SEQ ID NO: 1303941 - DNA, 25 bp, Homo sapien
gagaaaacaatagtcctcatcctgt

SEQ ID NO: 1303942 - DNA, 25 bp, Homo sapien
gaaaacaatagtcctcatcctgtgc

SEQ ID NO: 1303943 - DNA, 25 bp, Homo sapien
atagagaaaacaatagtcctcatcc

SEQ ID NO: 1303944 - DNA, 25 bp, Homo sapien
tagagaaaacaatagtcctcatcct

SEQ ID NO: 1303945 - DNA, 25 bp, Homo sapien
ttttctaacaccagtctctggaatc

SEQ ID NO: 1303946 - DNA, 25 bp, Homo sapien
gatacagagaggagtcacccaatct

SEQ ID NO: 1303947 - DNA, 25 bp, Homo sapien
gtccaaccctaataccagtctccaa

SEQ ID NO: 1303948 - DNA, 25 bp, Homo sapien
caccaaggctaagacctttgacatt

SEQ ID NO: 1303949 - DNA, 25 bp, Homo sapien
ggtagggctgaccatcctctccttg

SEQ ID NO: 1303950 - DNA, 25 bp, Homo sapien
tcaacagcaaacattgtcaaacagg

SEQ ID NO: 1303951 - DNA, 25 bp, Homo sapien
gcttcaacactagtgagggcatcaa

SEQ ID NO: 1303952 - DNA, 25 bp, Homo sapien
acaggaagttcaaacagggcaggtg

SEQ ID NO: 1303953 - DNA, 25 bp, Homo sapien
ctactgaatagggatgctgggactg

SEQ ID NO: 1303954 - DNA, 25 bp, Homo sapien
caagggcgctagacaaacgctgcag

SEQ ID NO: 1303955 - DNA, 25 bp, Homo sapien
gagtccctgtggaagtgctggccac

SEQ ID NO: 1303956 - DNA, 25 bp, Homo sapien
ggtgactcatggtcgccagggattc

SEQ ID NO: 1303957 - DNA, 25 bp, Homo sapien
ctggctgatagtatctcttctccac

SEQ ID NO: 1303958 - DNA, 25 bp, Homo sapien
cctgtcatctggctgatagtatctc

SEQ ID NO: 1303959 - DNA, 25 bp, Homo sapien
tgtcatctggctgatagtatctctt

SEQ ID NO: 1303960 - DNA, 25 bp, Homo sapien
catctggctgatagtatctcttctc

SEQ ID NO: 1303961 - DNA, 25 bp, Homo sapien
cagcaacagacttgagtgagtgacc

SEQ ID NO: 1303962 - DNA, 25 bp, Homo sapien
ttgaaggagaccatcttttgaacct

SEQ ID NO: 1303963 - DNA, 25 bp, Homo sapien
acagccagcaacagacttgagtgag

SEQ ID NO: 1303964 - DNA, 25 bp, Homo sapien
tgttgaaggagaccatcttttgaac

SEQ ID NO: 1303965 - DNA, 25 bp, Homo sapien
gaggggagacaggaagagcccaaag

SEQ ID NO: 1303966 - DNA, 25 bp, Homo sapien
ctggggaaaggagaggggagacagg

SEQ ID NO: 1303967 - DNA, 25 bp, Homo sapien
ggggagacaggaagagcccaaaggc

SEQ ID NO: 1303968 - DNA, 25 bp, Homo sapien
gagaggggagacaggaagagcccaa

SEQ ID NO: 1303969 - DNA, 25 bp, Homo sapien
cagttcatgatatccaagcgtgagc

SEQ ID NO: 1303970 - DNA, 25 bp, Homo sapien
tgtgcctgcctctactgggtgactg

SEQ ID NO: 1303971 - DNA, 25 bp, Homo sapien
cctggctgggtgaggagttcccttc

SEQ ID NO: 1303972 - DNA, 25 bp, Homo sapien
gctctgcgggatcaaggcttatctg

SEQ ID NO: 1303973 - DNA, 25 bp, Homo sapien
ggcacagtctgaccacgcagacgtc

SEQ ID NO: 1303974 - DNA, 25 bp, Homo sapien
cccaaagggcgcagcctggtgggca

SEQ ID NO: 1303975 - DNA, 25 bp, Homo sapien
tatgagtagagcaggcggcagttct

SEQ ID NO: 1303976 - DNA, 25 bp, Homo sapien
agcccgtggcgctgcctatcattga

SEQ ID NO: 1303977 - DNA, 25 bp, Homo sapien
tgccgagcggatcacggtgggcaga

SEQ ID NO: 1303978 - DNA, 25 bp, Homo sapien
gcagatgctggccagaaggtcccag

SEQ ID NO: 1303979 - DNA, 25 bp, Homo sapien
agaaggtcccagacaatgttggagg

SEQ ID NO: 1303980 - DNA, 25 bp, Homo sapien
ccgagcggatcacggtgggcagagc

SEQ ID NO: 1303981 - DNA, 25 bp, Homo sapien
gcccggaaccgcttgatggagaaca

SEQ ID NO: 1303982 - DNA, 25 bp, Homo sapien
cagctgtgtcccgagaccagctggg

SEQ ID NO: 1303983 - DNA, 25 bp, Homo sapien
ggccctggcccggaaccgcttgatg

SEQ ID NO: 1303984 - DNA, 25 bp, Homo sapien
agctgtgtcccgagaccagctgggc

SEQ ID NO: 1303985 - DNA, 25 bp, Homo sapien
gtgcagcaggcacatggagcccaga

SEQ ID NO: 1303986 - DNA, 25 bp, Homo sapien
tgcagcaggcacatggagcccagat

SEQ ID NO: 1303987 - DNA, 25 bp, Homo sapien
gcagggcctttgtgggtgcagcagg

SEQ ID NO: 1303988 - DNA, 25 bp, Homo sapien
agcaggcacatggagcccagatgga

SEQ ID NO: 1303989 - DNA, 25 bp, Homo sapien
accctgctgggttatccacctccct

SEQ ID NO: 1303990 - DNA, 25 bp, Homo sapien
agagcaggccatgaggacttccccg

SEQ ID NO: 1303991 - DNA, 25 bp, Homo sapien
tgtccctactgtggggactggaaca

SEQ ID NO: 1303992 - DNA, 25 bp, Homo sapien
gatgattagttccattgcacagatg

SEQ ID NO: 1303993 - DNA, 25 bp, Homo sapien
ctgtcctgtggttccgtgggagaca

SEQ ID NO: 1303994 - DNA, 25 bp, Homo sapien
gtcctgtggttccgtgggagacaac

SEQ ID NO: 1303995 - DNA, 25 bp, Homo sapien
tgtcctgtggttccgtgggagacaa

SEQ ID NO: 1303996 - DNA, 25 bp, Homo sapien
cctggttttgggcatctctggagca

SEQ ID NO: 1303997 - DNA, 25 bp, Homo sapien
tccctggttttgggcatctctggag

SEQ ID NO: 1303998 - DNA, 25 bp, Homo sapien
ccctggttttgggcatctctggagc

SEQ ID NO: 1303999 - DNA, 25 bp, Homo sapien
ctggttttgggcatctctggagcag

SEQ ID NO: 1304000 - DNA, 25 bp, Homo sapien
ctagcagctcattcgagggctccca

SEQ ID NO: 1304001 - DNA, 25 bp, Homo sapien
tctggaagatattgtccccgcagct

SEQ ID NO: 1304002 - DNA, 25 bp, Homo sapien
ggcttcgaaggagcctagcagctca

SEQ ID NO: 1304003 - DNA, 25 bp, Homo sapien
agctcttggcggcttcgaaggagcc

SEQ ID NO: 1304004 - DNA, 25 bp, Homo sapien
tgggctgcagtccatgaacatctgc

SEQ ID NO: 1304005 - DNA, 25 bp, Homo sapien
tctaagaagtggtggtcatgctgcc

SEQ ID NO: 1304006 - DNA, 25 bp, Homo sapien
cgtggtgtcctctgatgcgatgggc

SEQ ID NO: 1304007 - DNA, 25 bp, Homo sapien
tgcagtccatgaacatctgcggtcc

SEQ ID NO: 1304008 - DNA, 25 bp, Homo sapien
tatagtccccgtagacactgctgtg

SEQ ID NO: 1304009 - DNA, 25 bp, Homo sapien
tatgcgttaaggatcgctgtccccg

SEQ ID NO: 1304010 - DNA, 25 bp, Homo sapien
gaggttctcccagtcgttggcctga

SEQ ID NO: 1304011 - DNA, 25 bp, Homo sapien
tagggatcctcttggcacaggtaga

SEQ ID NO: 1304012 - DNA, 25 bp, Homo sapien
tccacttcgcccttgtgggtcattt

SEQ ID NO: 1304013 - DNA, 25 bp, Homo sapien
gtgtctggtccatgtcccgctgaat

SEQ ID NO: 1304014 - DNA, 25 bp, Homo sapien
aagtctgcacggctccttctgttgc

SEQ ID NO: 1304015 - DNA, 25 bp, Homo sapien
tcgcccttgtgggtcattttggagg

SEQ ID NO: 1304016 - DNA, 25 bp, Homo sapien
tcctggtcccgccagcgggccagct

SEQ ID NO: 1304017 - DNA, 25 bp, Homo sapien
tgcatcgagctcatccgcaccaggt

SEQ ID NO: 1304018 - DNA, 25 bp, Homo sapien
ctggggggccagctgcatcgagctc

SEQ ID NO: 1304019 - DNA, 25 bp, Homo sapien
gtagggggtgacatctccatgaacc

SEQ ID NO: 1304020 - DNA, 25 bp, Homo sapien
gcaccacacgctgaaagagctcccc

SEQ ID NO: 1304021 - DNA, 25 bp, Homo sapien
ccaccctagcatcctgcaggggctc

SEQ ID NO: 1304022 - DNA, 25 bp, Homo sapien
cccaccctagcatcctgcaggggct

SEQ ID NO: 1304023 - DNA, 25 bp, Homo sapien
caccctagcatcctgcaggggctct

SEQ ID NO: 1304024 - DNA, 25 bp, Homo sapien
ctggggtcccgcaggttgaacagca

SEQ ID NO: 1304025 - DNA, 25 bp, Homo sapien
ggggtcccgcaggttgaacagcagg

SEQ ID NO: 1304026 - DNA, 25 bp, Homo sapien
tggggtcccgcaggttgaacagcag

SEQ ID NO: 1304027 - DNA, 25 bp, Homo sapien
gccttgtgtcaggtcccagagggct

SEQ ID NO: 1304028 - DNA, 25 bp, Homo sapien
cattggtgccttgtgtcaggtccca

SEQ ID NO: 1304029 - DNA, 25 bp, Homo sapien
taccggccattggtgccttgtgtca

SEQ ID NO: 1304030 - DNA, 25 bp, Homo sapien
ttggtcttgtaccggccattggtgc

SEQ ID NO: 1304031 - DNA, 25 bp, Homo sapien
tcagcactgggtctgggagctcccg

SEQ ID NO: 1304032 - DNA, 25 bp, Homo sapien
cagcactgggtctgggagctcccga

SEQ ID NO: 1304033 - DNA, 25 bp, Homo sapien
agcactgggtctgggagctcccgaa

SEQ ID NO: 1304034 - DNA, 25 bp, Homo sapien
cactgggtctgggagctcccgaagg

SEQ ID NO: 1304035 - DNA, 25 bp, Homo sapien
tgcaggaacctacttattctcaccc

SEQ ID NO: 1304036 - DNA, 25 bp, Homo sapien
aggctctccaggcacttagtcccag

SEQ ID NO: 1304037 - DNA, 25 bp, Homo sapien
cagggtctgggccaacttgttcctg

SEQ ID NO: 1304038 - DNA, 25 bp, Homo sapien
ctgtcgtgggtgtttccctgcagga

SEQ ID NO: 1304039 - DNA, 25 bp, Homo sapien
caccccaatatacagggatggcttc

SEQ ID NO: 1304040 - DNA, 25 bp, Homo sapien
tgccccgcaccccaatatacaggga

SEQ ID NO: 1304041 - DNA, 25 bp, Homo sapien
ctgcatggaacggacaacagtgccc

SEQ ID NO: 1304042 - DNA, 25 bp, Homo sapien
tgcatggaacggacaacagtgcccc

SEQ ID NO: 1304043 - DNA, 25 bp, Homo sapien
ctggctgctccggaagagaatcctc

SEQ ID NO: 1304044 - DNA, 25 bp, Homo sapien
tcctctggctgctccggaagagaat

SEQ ID NO: 1304045 - DNA, 25 bp, Homo sapien
tgagtcctctggctgctccggaaga

SEQ ID NO: 1304046 - DNA, 25 bp, Homo sapien
gctgctccggaagagaatcctcttc

SEQ ID NO: 1304047 - DNA, 25 bp, Homo sapien
ctgtaggggaggcgtgaggaattga

SEQ ID NO: 1304048 - DNA, 25 bp, Homo sapien
gggaggcgtgaggaattgaggctgt

SEQ ID NO: 1304049 - DNA, 25 bp, Homo sapien
taggggaggcgtgaggaattgaggc

SEQ ID NO: 1304050 - DNA, 25 bp, Homo sapien
ggaggcgtgaggaattgaggctgtg

SEQ ID NO: 1304051 - DNA, 25 bp, Homo sapien
cagggaaccgcttcttggagggtag

SEQ ID NO: 1304052 - DNA, 25 bp, Homo sapien
agctggggtcgccaagggccaggga

SEQ ID NO: 1304053 - DNA, 25 bp, Homo sapien
tgggaacatgcagggtccgagctgg

SEQ ID NO: 1304054 - DNA, 25 bp, Homo sapien
ctgctgtgcctcctgaaggagaagg

SEQ ID NO: 1304055 - DNA, 25 bp, Homo sapien
tgcaccatgggccttttcttccttc

SEQ ID NO: 1304056 - DNA, 25 bp, Homo sapien
agggccctgcaccatgggccttttc

SEQ ID NO: 1304057 - DNA, 25 bp, Homo sapien
tctgggcaggtgagggtgagctgac

SEQ ID NO: 1304058 - DNA, 25 bp, Homo sapien
ggccctgcaccatgggccttttctt

SEQ ID NO: 1304059 - DNA, 25 bp, Homo sapien
gctggatcactggcccggaacccag

SEQ ID NO: 1304060 - DNA, 25 bp, Homo sapien
agctggatcactggcccggaaccca

SEQ ID NO: 1304061 - DNA, 25 bp, Homo sapien
tggctagcctctgtcccaggagagg

SEQ ID NO: 1304062 - DNA, 25 bp, Homo sapien
gagaggggcctgtctccatccgcat

SEQ ID NO: 1304063 - DNA, 25 bp, Homo sapien
ctggctagcctctgtcccaggagag

SEQ ID NO: 1304064 - DNA, 25 bp, Homo sapien
caggagaggggcctgtctccatccg

SEQ ID NO: 1304065 - DNA, 25 bp, Homo sapien
tagcacacaagcttcactccatggg

SEQ ID NO: 1304066 - DNA, 25 bp, Homo sapien
gtagcacacaagcttcactccatgg

SEQ ID NO: 1304067 - DNA, 25 bp, Homo sapien
caagcttcactccatggggtatttt

SEQ ID NO: 1304068 - DNA, 25 bp, Homo sapien
cactccatggggtattttcacttcc

SEQ ID NO: 1304069 - DNA, 25 bp, Homo sapien
aagaggatgcagagattagaatcca

SEQ ID NO: 1304070 - DNA, 25 bp, Homo sapien
aaagaggatgcagagattagaatcc

SEQ ID NO: 1304071 - DNA, 25 bp, Homo sapien
agaaagaggatgcagagattagaat

SEQ ID NO: 1304072 - DNA, 25 bp, Homo sapien
gaaagaggatgcagagattagaatc

SEQ ID NO: 1304073 - DNA, 25 bp, Homo sapien
tagtgcccttggatcttctctgctc

SEQ ID NO: 1304074 - DNA, 25 bp, Homo sapien
cagggcactggacctttcttcaggt

SEQ ID NO: 1304075 - DNA, 25 bp, Homo sapien
ctgtcctggtgggagttgtctgagc

SEQ ID NO: 1304076 - DNA, 25 bp, Homo sapien
gcttctgtctgtgccccggtcttgg

SEQ ID NO: 1304077 - DNA, 25 bp, Homo sapien
aaggactccaggtcagcaacttggg

SEQ ID NO: 1304078 - DNA, 25 bp, Homo sapien
cagacctgctacaaagtttcctggg

SEQ ID NO: 1304079 - DNA, 25 bp, Homo sapien
ccctgtagcgggcaaatatccaaat

SEQ ID NO: 1304080 - DNA, 25 bp, Homo sapien
gagggctctgatcaagccacaggaa

SEQ ID NO: 1304081 - DNA, 25 bp, Homo sapien
ctgggccaaaagcacaacacgggcc

SEQ ID NO: 1304082 - DNA, 25 bp, Homo sapien
ggttccacccactagctgaaaagga

SEQ ID NO: 1304083 - DNA, 25 bp, Homo sapien
ccacccactagctgaaaaggagctg

SEQ ID NO: 1304084 - DNA, 25 bp, Homo sapien
ttccacccactagctgaaaaggagc

SEQ ID NO: 1304085 - DNA, 25 bp, Homo sapien
cctggggttccacccactagctgaa

SEQ ID NO: 1304086 - DNA, 25 bp, Homo sapien
gcagaatgcttcatggaggctcccc

SEQ ID NO: 1304087 - DNA, 25 bp, Homo sapien
tctgaatcaacggagagacttgcca

SEQ ID NO: 1304088 - DNA, 25 bp, Homo sapien
tgactctatcaacctctgggctggc

SEQ ID NO: 1304089 - DNA, 25 bp, Homo sapien
tgctaagcactgaacaccagggcag

SEQ ID NO: 1304090 - DNA, 25 bp, Homo sapien
aagaggtcagggggatccgggatgg

SEQ ID NO: 1304091 - DNA, 25 bp, Homo sapien
agaggtcagggggatccgggatggg

SEQ ID NO: 1304092 - DNA, 25 bp, Homo sapien
gaagaggtcagggggatccgggatg

SEQ ID NO: 1304093 - DNA, 25 bp, Homo sapien
agggacaaagagaatatccaacaag

SEQ ID NO: 1304094 - DNA, 25 bp, Homo sapien
gggccccaagaacgtgacagaatga

SEQ ID NO: 1304095 - DNA, 25 bp, Homo sapien
tgtggggccccaagaacgtgacaga

SEQ ID NO: 1304096 - DNA, 25 bp, Homo sapien
acaagacctgtcttcgtggtgctca

SEQ ID NO: 1304097 - DNA, 25 bp, Homo sapien
ttcgaagctccgttctgtttctgta

SEQ ID NO: 1304098 - DNA, 25 bp, Homo sapien
cgaagctccgttctgtttctgtatg

SEQ ID NO: 1304099 - DNA, 25 bp, Homo sapien
cttcgaagctccgttctgtttctgt

SEQ ID NO: 1304100 - DNA, 25 bp, Homo sapien
tcgaagctccgttctgtttctgtat

SEQ ID NO: 1304101 - DNA, 25 bp, Homo sapien
ccctgagtgtatatgatagactggc

SEQ ID NO: 1304102 - DNA, 25 bp, Homo sapien
ctgagtgtatatgatagactggcct

SEQ ID NO: 1304103 - DNA, 25 bp, Homo sapien
ctccctgagtgtatatgatagactg

SEQ ID NO: 1304104 - DNA, 25 bp, Homo sapien
gtgtatatgatagactggccttggc

SEQ ID NO: 1304105 - DNA, 25 bp, Homo sapien
catctctctatgtcaaactggcttc

SEQ ID NO: 1304106 - DNA, 25 bp, Homo sapien
tctctatgtcaaactggcttcagct

SEQ ID NO: 1304107 - DNA, 25 bp, Homo sapien
tctctctatgtcaaactggcttcag

SEQ ID NO: 1304108 - DNA, 25 bp, Homo sapien
acatctctctatgtcaaactggctt

SEQ ID NO: 1304109 - DNA, 25 bp, Homo sapien
tagctgacgctaacaaaatgggagg

SEQ ID NO: 1304110 - DNA, 25 bp, Homo sapien
gactttaagcccgtattcagagccc

SEQ ID NO: 1304111 - DNA, 25 bp, Homo sapien
tatcatcagtgtgagacaaggtccc

SEQ ID NO: 1304112 - DNA, 25 bp, Homo sapien
taaaaagtacgctcactgcctggac

SEQ ID NO: 1304113 - DNA, 25 bp, Homo sapien
caccacagggagatctatgtgccaa

SEQ ID NO: 1304114 - DNA, 25 bp, Homo sapien
gcacgcacatctacagcaacaaggg

SEQ ID NO: 1304115 - DNA, 25 bp, Homo sapien
tgccaagcataatggaagagtgtgc

SEQ ID NO: 1304116 - DNA, 25 bp, Homo sapien
tttatctaaaagtgcccaggtgggc

SEQ ID NO: 1304117 - DNA, 25 bp, Homo sapien
atcactactttgatgacacaggtaa

SEQ ID NO: 1304118 - DNA, 25 bp, Homo sapien
cacagcaatgcccattggtatctct

SEQ ID NO: 1304119 - DNA, 25 bp, Homo sapien
gcccattggtatctctgaagcgtaa

SEQ ID NO: 1304120 - DNA, 25 bp, Homo sapien
ggtatctctgaagcgtaatcgcatc

SEQ ID NO: 1304121 - DNA, 25 bp, Homo sapien
tactgaacacagcaatgcccattgg

SEQ ID NO: 1304122 - DNA, 25 bp, Homo sapien
tccaaataaagcagctgtttggaat

SEQ ID NO: 1304123 - DNA, 25 bp, Homo sapien
cagctgtttggaattgaacgctccc

SEQ ID NO: 1304124 - DNA, 25 bp, Homo sapien
atttctccaaataaagcagctgttt

SEQ ID NO: 1304125 - DNA, 25 bp, Homo sapien
taaagcagctgtttggaattgaacg

SEQ ID NO: 1304126 - DNA, 25 bp, Homo sapien
taagccctcctagaaggaatagaaa

SEQ ID NO: 1304127 - DNA, 25 bp, Homo sapien
gtctcaggtgattaactgctcctct

SEQ ID NO: 1304128 - DNA, 25 bp, Homo sapien
tgcctcctcctaacagagaattata

SEQ ID NO: 1304129 - DNA, 25 bp, Homo sapien
cctgaatagatcacttaagagtccc

SEQ ID NO: 1304130 - DNA, 25 bp, Homo sapien
attcaatcaaagcaagtgcaaccag

SEQ ID NO: 1304131 - DNA, 25 bp, Homo sapien
tgatgagctaggaaaatgcccaaga

SEQ ID NO: 1304132 - DNA, 25 bp, Homo sapien
tttataaagcccattacagggcacc

SEQ ID NO: 1304133 - DNA, 25 bp, Homo sapien
tatactaaagtagctggtatctgcc

SEQ ID NO: 1304134 - DNA, 25 bp, Homo sapien
gcatattaccaatgcaacgcatgag

SEQ ID NO: 1304135 - DNA, 25 bp, Homo sapien
tcaggataaggactaaaacttctaa

SEQ ID NO: 1304136 - DNA, 25 bp, Homo sapien
aaccttatgaacaaacagtaccaca

SEQ ID NO: 1304137 - DNA, 25 bp, Homo sapien
aacttctaaccttatgaacaaacag

SEQ ID NO: 1304138 - DNA, 25 bp, Homo sapien
cttcaggataaggactaaaacttct

SEQ ID NO: 1304139 - DNA, 25 bp, Homo sapien
cttgagtaatcaccaccttgaggca

SEQ ID NO: 1304140 - DNA, 25 bp, Homo sapien
gcagagcagaactaacagcttgagt

SEQ ID NO: 1304141 - DNA, 25 bp, Homo sapien
gacagcgttgcaacaccattctaag

SEQ ID NO: 1304142 - DNA, 25 bp, Homo sapien
aatccaggctggcatcagaatcaga

SEQ ID NO: 1304143 - DNA, 25 bp, Homo sapien
ccaatcctgcaacacaatgcactgc

SEQ ID NO: 1304144 - DNA, 25 bp, Homo sapien
cttcccaatcctgcaacacaatgca

SEQ ID NO: 1304145 - DNA, 25 bp, Homo sapien
tgcaacacaatgcactgcaacacag

SEQ ID NO: 1304146 - DNA, 25 bp, Homo sapien
acacaatgcactgcaacacagcaac

SEQ ID NO: 1304147 - DNA, 25 bp, Homo sapien
acaggtttaaccaatcatctactat

SEQ ID NO: 1304148 - DNA, 25 bp, Homo sapien
aacaggtttaaccaatcatctacta

SEQ ID NO: 1304149 - DNA, 25 bp, Homo sapien
ctgaaaagaaatgaccttttacatt

SEQ ID NO: 1304150 - DNA, 25 bp, Homo sapien
tgaaaagaaatgaccttttacatta

SEQ ID NO: 1304151 - DNA, 25 bp, Homo sapien
cctggaataaatcttaggcctacca

SEQ ID NO: 1304152 - DNA, 25 bp, Homo sapien
ttccagcagtggacagtaaagtcat

SEQ ID NO: 1304153 - DNA, 25 bp, Homo sapien
catgttgccccactagtcttggaac

SEQ ID NO: 1304154 - DNA, 25 bp, Homo sapien
caagttgatttttgctcactagaga

SEQ ID NO: 1304155 - DNA, 25 bp, Homo sapien
caacatgccccaccagttttttaat

SEQ ID NO: 1304156 - DNA, 25 bp, Homo sapien
aaatccaaaagtattactgccaggg

SEQ ID NO: 1304157 - DNA, 25 bp, Homo sapien
atccaaaagtattactgccagggtt

SEQ ID NO: 1304158 - DNA, 25 bp, Homo sapien
gcaccaacatgccccaccagttttt

SEQ ID NO: 1304159 - DNA, 25 bp, Homo sapien
gcatcacaaactcgaaccaaagtcg

SEQ ID NO: 1304160 - DNA, 25 bp, Homo sapien
caaactcgaaccaaagtcgtcactc

SEQ ID NO: 1304161 - DNA, 25 bp, Homo sapien
tatcatatgtagcatcacaaactcg

SEQ ID NO: 1304162 - DNA, 25 bp, Homo sapien
actggagctttatcatatgtagcat

SEQ ID NO: 1304163 - DNA, 25 bp, Homo sapien
caaaggtggttagaatatctgaagt

SEQ ID NO: 1304164 - DNA, 25 bp, Homo sapien
cagaatggtttttagtgtcagacac

SEQ ID NO: 1304165 - DNA, 25 bp, Homo sapien
caagtttctggacccttgtatacga

SEQ ID NO: 1304166 - DNA, 25 bp, Homo sapien
gattattacaacgaagtagtctggg

SEQ ID NO: 1304167 - DNA, 25 bp, Homo sapien
tctgtgaacttgttgagagtagcat

SEQ ID NO: 1304168 - DNA, 25 bp, Homo sapien
caaattcaatttgggcctcaatttc

SEQ ID NO: 1304169 - DNA, 25 bp, Homo sapien
gcttctctcttcaagataagcaaag

SEQ ID NO: 1304170 - DNA, 25 bp, Homo sapien
gtttattccttatgaagcttctctc

SEQ ID NO: 1304171 - DNA, 25 bp, Homo sapien
gcaaagtatttagaatccacttgaa

SEQ ID NO: 1304172 - DNA, 25 bp, Homo sapien
ctccaagctcacttgtcagcgaaaa

SEQ ID NO: 1304173 - DNA, 25 bp, Homo sapien
gaatcgccataaatgtgcaacgtat

SEQ ID NO: 1304174 - DNA, 25 bp, Homo sapien
tgttaattatggcacatagaacctc

SEQ ID NO: 1304175 - DNA, 25 bp, Homo sapien
caactatttctgaggccagtctcgg

SEQ ID NO: 1304176 - DNA, 25 bp, Homo sapien
cagtaaacacaaatgcctgaagtca

SEQ ID NO: 1304177 - DNA, 25 bp, Homo sapien
taagcccaaagcgatgtgaaatgtc

SEQ ID NO: 1304178 - DNA, 25 bp, Homo sapien
gaaatgtcaccaattatacgttatt

SEQ ID NO: 1304179 - DNA, 25 bp, Homo sapien
taaaatgaactagaggctgatggca

SEQ ID NO: 1304180 - DNA, 25 bp, Homo sapien
catctccaactctgcgaccttaaaa

SEQ ID NO: 1304181 - DNA, 25 bp, Homo sapien
taactactcaaagaacaatagtttg

SEQ ID NO: 1304182 - DNA, 25 bp, Homo sapien
tacaggcctcgtgagccactaagtc

SEQ ID NO: 1304183 - DNA, 25 bp, Homo sapien
caagttgcaatcttccatacaagta

SEQ ID NO: 1304184 - DNA, 25 bp, Homo sapien
gaaagacctgcattgtagtgacagc

SEQ ID NO: 1304185 - DNA, 25 bp, Homo sapien
tagtgacagccaggcttaaaggcta

SEQ ID NO: 1304186 - DNA, 25 bp, Homo sapien
tgtgtcagctgagtaaaggcactga

SEQ ID NO: 1304187 - DNA, 25 bp, Homo sapien
gaatccctttggttcaatgacgtta

SEQ ID NO: 1304188 - DNA, 25 bp, Homo sapien
ggaggtcaacagcacgatttactac

SEQ ID NO: 1304189 - DNA, 25 bp, Homo sapien
gaacccagcaaaggaatttctgcca

SEQ ID NO: 1304190 - DNA, 25 bp, Homo sapien
catgcacatgggatatctggaagat

SEQ ID NO: 1304191 - DNA, 25 bp, Homo sapien
tactcaaaagttgcagaaccctatg

SEQ ID NO: 1304192 - DNA, 25 bp, Homo sapien
cactcacatcaggatttctaagaaa

SEQ ID NO: 1304193 - DNA, 25 bp, Homo sapien
ggtgagctacgccagtattcaccaa

SEQ ID NO: 1304194 - DNA, 25 bp, Homo sapien
tgatacaataaaccctctaatttgg

SEQ ID NO: 1304195 - DNA, 25 bp, Homo sapien
tacagtctaaaagcaaaggtctaaa

SEQ ID NO: 1304196 - DNA, 25 bp, Homo sapien
tattaatccccaaagagagtgaggg

SEQ ID NO: 1304197 - DNA, 25 bp, Homo sapien
tgagcgtatttaaaggtcctgttcc

SEQ ID NO: 1304198 - DNA, 25 bp, Homo sapien
ggaaactctctatggacaagacaca

SEQ ID NO: 1304199 - DNA, 25 bp, Homo sapien
tcaggcactctgatccaagtttccc

SEQ ID NO: 1304200 - DNA, 25 bp, Homo sapien
tcatacaaacactatccaggatcaa

SEQ ID NO: 1304201 - DNA, 25 bp, Homo sapien
aacaagcatttgcagagacgtgtgc

SEQ ID NO: 1304202 - DNA, 25 bp, Homo sapien
gtcacctcccaattataccaaaatg

SEQ ID NO: 1304203 - DNA, 25 bp, Homo sapien
tcagctcaacatggattcaccttcc

SEQ ID NO: 1304204 - DNA, 25 bp, Homo sapien
gctcaactagcaaagaaagggtcac

SEQ ID NO: 1304205 - DNA, 25 bp, Homo sapien
tactatgagaggaattaaatgcacc

SEQ ID NO: 1304206 - DNA, 25 bp, Homo sapien
gatacaacctagtgaatgtttcctg

SEQ ID NO: 1304207 - DNA, 25 bp, Homo sapien
tacaaatactgtggtgatacaacct

SEQ ID NO: 1304208 - DNA, 25 bp, Homo sapien
aagtcctggtaactccacaatgggg

SEQ ID NO: 1304209 - DNA, 25 bp, Homo sapien
ctaagtcctggtaactccacaatgg

SEQ ID NO: 1304210 - DNA, 25 bp, Homo sapien
gtcctggtaactccacaatggggaa

SEQ ID NO: 1304211 - DNA, 25 bp, Homo sapien
taagtcctggtaactccacaatggg

SEQ ID NO: 1304212 - DNA, 25 bp, Homo sapien
tattcactgctatctatttattgat

SEQ ID NO: 1304213 - DNA, 25 bp, Homo sapien
tgaggccagcaactcaacgcctgag

SEQ ID NO: 1304214 - DNA, 25 bp, Homo sapien
ttaagagactcaaatcaccatctcc

SEQ ID NO: 1304215 - DNA, 25 bp, Homo sapien
tctaaaacctgggatttaataatca

SEQ ID NO: 1304216 - DNA, 25 bp, Homo sapien
taagtccaccatgttaaaactatgg

SEQ ID NO: 1304217 - DNA, 25 bp, Homo sapien
cctattcgataaacataactaagtc

SEQ ID NO: 1304218 - DNA, 25 bp, Homo sapien
tgaactttaccagtaccccaagatc

SEQ ID NO: 1304219 - DNA, 25 bp, Homo sapien
ttaaaactatggatcctgggccgcg

SEQ ID NO: 1304220 - DNA, 25 bp, Homo sapien
cttctcaccactgtaaatccatggg

SEQ ID NO: 1304221 - DNA, 25 bp, Homo sapien
ggagctcatcgctgtatccctagtg

SEQ ID NO: 1304222 - DNA, 25 bp, Homo sapien
tccatgggagctcatcgctgtatcc

SEQ ID NO: 1304223 - DNA, 25 bp, Homo sapien
cactgtaaatccatgggagctcatc

SEQ ID NO: 1304224 - DNA, 25 bp, Homo sapien
gcgaggaggcgcctctctcctcagt

SEQ ID NO: 1304225 - DNA, 25 bp, Homo sapien
ggactgggcattgaagtccggcggt

SEQ ID NO: 1304226 - DNA, 25 bp, Homo sapien
tgggcattgaagtccggcggtggcg

SEQ ID NO: 1304227 - DNA, 25 bp, Homo sapien
gaggaggcgcctctctcctcagtca

SEQ ID NO: 1304228 - DNA, 25 bp, Homo sapien
gcggcggcgacgactcccccccagc

SEQ ID NO: 1304229 - DNA, 25 bp, Homo sapien
agacgacggttacagcccggccgat

SEQ ID NO: 1304230 - DNA, 25 bp, Homo sapien
gccgctgccctgtggcgtcacctcg

SEQ ID NO: 1304231 - DNA, 25 bp, Homo sapien
gtctccacgagtccgtcttgctgct

SEQ ID NO: 1304232 - DNA, 25 bp, Homo sapien
agccgctcccggacagacgacggtt

SEQ ID NO: 1304233 - DNA, 25 bp, Homo sapien
tattctagggcaaggctggctagca

SEQ ID NO: 1304234 - DNA, 25 bp, Homo sapien
tggctagcagggctgtgtgggagtt

SEQ ID NO: 1304235 - DNA, 25 bp, Homo sapien
ttatgactcagccgcatcaagccac

SEQ ID NO: 1304236 - DNA, 25 bp, Homo sapien
ctagcagggctgtgtgggagttgag

SEQ ID NO: 1304237 - DNA, 25 bp, Homo sapien
agttcgcactctgcggcctcctcag

SEQ ID NO: 1304238 - DNA, 25 bp, Homo sapien
agccgctgcagttcgcactctgcgg

SEQ ID NO: 1304239 - DNA, 25 bp, Homo sapien
gcactagagcttcccctgcgtccgc

SEQ ID NO: 1304240 - DNA, 25 bp, Homo sapien
ccgagccgctgcagttcgcactctg

SEQ ID NO: 1304241 - DNA, 25 bp, Homo sapien
cagagcctctgatgggaatgctggt

SEQ ID NO: 1304242 - DNA, 25 bp, Homo sapien
gggtttcatgaccagcggcagcaga

SEQ ID NO: 1304243 - DNA, 25 bp, Homo sapien
atgctggtgtttttcgggcatttct

SEQ ID NO: 1304244 - DNA, 25 bp, Homo sapien
atagagcaatttaagtgatgatggg

SEQ ID NO: 1304245 - DNA, 25 bp, Homo sapien
cctacttgcctcttctaaacagtca

SEQ ID NO: 1304246 - DNA, 25 bp, Homo sapien
ccactgaactgtctgtcatcacact

SEQ ID NO: 1304247 - DNA, 25 bp, Homo sapien
tttccaggcctttcctacttgcctc

SEQ ID NO: 1304248 - DNA, 25 bp, Homo sapien
atcacactcagtgatgatcttttca

SEQ ID NO: 1304249 - DNA, 25 bp, Homo sapien
tggaagtgacttaagtgtccaacac

SEQ ID NO: 1304250 - DNA, 25 bp, Homo sapien
tagacagttatacagatttggagga

SEQ ID NO: 1304251 - DNA, 25 bp, Homo sapien
gtacatttcagaccctacacacagt

SEQ ID NO: 1304252 - DNA, 25 bp, Homo sapien
gaaggttctgttgctctcgtacatt

SEQ ID NO: 1304253 - DNA, 25 bp, Homo sapien
gacactccctgtataggaagggcct

SEQ ID NO: 1304254 - DNA, 25 bp, Homo sapien
tttcaggccatgacacttcaggaga

SEQ ID NO: 1304255 - DNA, 25 bp, Homo sapien
gatagatatccacaacattttccga

SEQ ID NO: 1304256 - DNA, 25 bp, Homo sapien
tgcagggagctactccagacagaca

SEQ ID NO: 1304257 - DNA, 25 bp, Homo sapien
cctttctctccataggagatgtctg

SEQ ID NO: 1304258 - DNA, 25 bp, Homo sapien
tttctctccataggagatgtctgtt

SEQ ID NO: 1304259 - DNA, 25 bp, Homo sapien
tctctccataggagatgtctgtttc

SEQ ID NO: 1304260 - DNA, 25 bp, Homo sapien
ctttctctccataggagatgtctgt

SEQ ID NO: 1304261 - DNA, 25 bp, Homo sapien
tcaagtactccaatcgccttcagtg

SEQ ID NO: 1304262 - DNA, 25 bp, Homo sapien
gaggagacacgtgttccgctagcgc

SEQ ID NO: 1304263 - DNA, 25 bp, Homo sapien
tagcgccgagtcacgtggaaaacga

SEQ ID NO: 1304264 - DNA, 25 bp, Homo sapien
tcagtgtttccaccaagccgtcctt

SEQ ID NO: 1304265 - DNA, 25 bp, Homo sapien
tgccgagacggcgtctgacgcaccg

SEQ ID NO: 1304266 - DNA, 25 bp, Homo sapien
gcatctgggaggatgtgcgatccaa

SEQ ID NO: 1304267 - DNA, 25 bp, Homo sapien
catgagttcgggcaggtacttgttc

SEQ ID NO: 1304268 - DNA, 25 bp, Homo sapien
gagcgagtccttctcggccatgagt

SEQ ID NO: 1304269 - DNA, 25 bp, Homo sapien
tctctggctccatcttgaccgaggc

SEQ ID NO: 1304270 - DNA, 25 bp, Homo sapien
gatccaaggagcgagaaagcgacgc

SEQ ID NO: 1304271 - DNA, 25 bp, Homo sapien
ttggatcgcacatcctcccagatgc

SEQ ID NO: 1304272 - DNA, 25 bp, Homo sapien
gcctcggtcaagatggagccagaga

SEQ ID NO: 1304273 - DNA, 25 bp, Homo sapien
gaacaagtacctgcccgaactcatg

SEQ ID NO: 1304274 - DNA, 25 bp, Homo sapien
gctttctcgctccttggatcgcaca

SEQ ID NO: 1304275 - DNA, 25 bp, Homo sapien
gaactcatggccgagaaggactcgc

SEQ ID NO: 1304276 - DNA, 25 bp, Homo sapien
ggtcttcgggccgtagcggctccat

SEQ ID NO: 1304277 - DNA, 25 bp, Homo sapien
acaatcctgtttcagtgcttggaat

SEQ ID NO: 1304278 - DNA, 25 bp, Homo sapien
gaccttacagttaacagagtaatgc

SEQ ID NO: 1304279 - DNA, 25 bp, Homo sapien
gttattcaatcctcaaagtcctaga

SEQ ID NO: 1304280 - DNA, 25 bp, Homo sapien
caacagtctacttgtgagggtaatc

SEQ ID NO: 1304281 - DNA, 25 bp, Homo sapien
taacccttactgtttggtggcagat

SEQ ID NO: 1304282 - DNA, 25 bp, Homo sapien
caatctttttgagcctactgtacct

SEQ ID NO: 1304283 - DNA, 25 bp, Homo sapien
gaagcattactctgttaactgtaag

SEQ ID NO: 1304284 - DNA, 25 bp, Homo sapien
ggatctgccaccaaacagtaagggt

SEQ ID NO: 1304285 - DNA, 25 bp, Homo sapien
taggattaccctcacaagtagactg

SEQ ID NO: 1304286 - DNA, 25 bp, Homo sapien
tacagtaggctcaaaaagattgatc

SEQ ID NO: 1304287 - DNA, 25 bp, Homo sapien
cacaagtagactgttgaatgaagca

SEQ ID NO: 1304288 - DNA, 25 bp, Homo sapien
tctaggactttgaggattgaataac

SEQ ID NO: 1304289 - DNA, 25 bp, Homo sapien
ctggacaacagagccagactccatc

SEQ ID NO: 1304290 - DNA, 25 bp, Homo sapien
acaacagagccagactccatctcaa

SEQ ID NO: 1304291 - DNA, 25 bp, Homo sapien
gacaacagagccagactccatctca

SEQ ID NO: 1304292 - DNA, 25 bp, Homo sapien
caacagagccagactccatctcaaa

SEQ ID NO: 1304293 - DNA, 25 bp, Homo sapien
tggacaacagagccagactccatct

SEQ ID NO: 1304294 - DNA, 25 bp, Homo sapien
ggacaacagagccagactccatctc

SEQ ID NO: 1304295 - DNA, 25 bp, Homo sapien
gagatggagtctggctctgttgtcc

SEQ ID NO: 1304296 - DNA, 25 bp, Homo sapien
agatggagtctggctctgttgtcca

SEQ ID NO: 1304297 - DNA, 25 bp, Homo sapien
tttgagatggagtctggctctgttg

SEQ ID NO: 1304298 - DNA, 25 bp, Homo sapien
tgagatggagtctggctctgttgtc

SEQ ID NO: 1304299 - DNA, 25 bp, Homo sapien
ttgagatggagtctggctctgttgt

SEQ ID NO: 1304300 - DNA, 25 bp, Homo sapien
gatggagtctggctctgttgtccag

SEQ ID NO: 1304301 - DNA, 25 bp, Homo sapien
gagacatacttgactaacttgggaa

SEQ ID NO: 1304302 - DNA, 25 bp, Homo sapien
gattctgcaactacaactttacggg

SEQ ID NO: 1304303 - DNA, 25 bp, Homo sapien
gacgtctgagctcacttttacatgg

SEQ ID NO: 1304304 - DNA, 25 bp, Homo sapien
aaatcaacagcttttggccccagcg

SEQ ID NO: 1304305 - DNA, 25 bp, Homo sapien
ggtggtgcctactgccgttaatgtt

SEQ ID NO: 1304306 - DNA, 25 bp, Homo sapien
ccttaagattcaaccgccatgtgct

SEQ ID NO: 1304307 - DNA, 25 bp, Homo sapien
aacattaacggcagtaggcaccacc

SEQ ID NO: 1304308 - DNA, 25 bp, Homo sapien
tgatttgaggcatcccgtaaagttg

SEQ ID NO: 1304309 - DNA, 25 bp, Homo sapien
tcccaagttagtcaagtatgtctca

SEQ ID NO: 1304310 - DNA, 25 bp, Homo sapien
catgtaaaagtgagctcagacgtct

SEQ ID NO: 1304311 - DNA, 25 bp, Homo sapien
agcacatggcggttgaatcttaagg

SEQ ID NO: 1304312 - DNA, 25 bp, Homo sapien
cgtaaagttgtagttgcagaatccc

SEQ ID NO: 1304313 - DNA, 25 bp, Homo sapien
ggttctgggtcatacggtgactctg

SEQ ID NO: 1304314 - DNA, 25 bp, Homo sapien
gttctgggtcatacggtgactctgt

SEQ ID NO: 1304315 - DNA, 25 bp, Homo sapien
tgggttctgggtcatacggtgactc

SEQ ID NO: 1304316 - DNA, 25 bp, Homo sapien
gggttctgggtcatacggtgactct

SEQ ID NO: 1304317 - DNA, 25 bp, Homo sapien
tcccaggttcaagttcaagcagttc

SEQ ID NO: 1304318 - DNA, 25 bp, Homo sapien
gtgctcggcccaaattcattctttt

SEQ ID NO: 1304319 - DNA, 25 bp, Homo sapien
ccgtgctcggcccaaattcattctt

SEQ ID NO: 1304320 - DNA, 25 bp, Homo sapien
caccgtgctcggcccaaattcattc

SEQ ID NO: 1304321 - DNA, 25 bp, Homo sapien
cccagccgagtggtttcttttcaca

SEQ ID NO: 1304322 - DNA, 25 bp, Homo sapien
tctttaagtgctgtaaagaaagaaa

SEQ ID NO: 1304323 - DNA, 25 bp, Homo sapien
aaaaaagctgccaattaaactgaca

SEQ ID NO: 1304324 - DNA, 25 bp, Homo sapien
gtttcttttcacatcaagtacaaga

SEQ ID NO: 1304325 - DNA, 25 bp, Homo sapien
ctatgttaagggaatctccttgtgt

SEQ ID NO: 1304326 - DNA, 25 bp, Homo sapien
ttgtgtcgtattcctttcgcccacc

SEQ ID NO: 1304327 - DNA, 25 bp, Homo sapien
taagggaatctccttgtgtcgtatt

SEQ ID NO: 1304328 - DNA, 25 bp, Homo sapien
ccttgtgtcgtattcctttcgccca

SEQ ID NO: 1304329 - DNA, 25 bp, Homo sapien
gactgaatttcaggccaccctgaga

SEQ ID NO: 1304330 - DNA, 25 bp, Homo sapien
taccctaccattgagaatcgctgca

SEQ ID NO: 1304331 - DNA, 25 bp, Homo sapien
aattctaggttgtggcagcatgccc

SEQ ID NO: 1304332 - DNA, 25 bp, Homo sapien
cctggtgaccttacatctggctagc

SEQ ID NO: 1304333 - DNA, 25 bp, Homo sapien
cattccagaaagctgcattgtgttt

SEQ ID NO: 1304334 - DNA, 25 bp, Homo sapien
tctgtgtaccaccagaggtctgcat

SEQ ID NO: 1304335 - DNA, 25 bp, Homo sapien
tgtggattcatcacttctgtgtacc

SEQ ID NO: 1304336 - DNA, 25 bp, Homo sapien
aaaactgctgatttaaggccaggcg

SEQ ID NO: 1304337 - DNA, 25 bp, Homo sapien
gggcgctagtgcagtcggcgtttct

SEQ ID NO: 1304338 - DNA, 25 bp, Homo sapien
cggtggagcggggagacttccgact

SEQ ID NO: 1304339 - DNA, 25 bp, Homo sapien
cttcagcgctaagggtggagattct

SEQ ID NO: 1304340 - DNA, 25 bp, Homo sapien
cagtcggcgtttctgggttggaggg

SEQ ID NO: 1304341 - DNA, 25 bp, Homo sapien
ctgttcccactactgatcaacacag

SEQ ID NO: 1304342 - DNA, 25 bp, Homo sapien
acacaggagttttaacctgttctat

SEQ ID NO: 1304343 - DNA, 25 bp, Homo sapien
acaggcgcctgccaccacacctagc

SEQ ID NO: 1304344 - DNA, 25 bp, Homo sapien
tggctattcacaggtctgttcccac

SEQ ID NO: 1304345 - DNA, 25 bp, Homo sapien
caggcacctcatcggcatagcacat

SEQ ID NO: 1304346 - DNA, 25 bp, Homo sapien
ccatatggatgctgaacttctatgc

SEQ ID NO: 1304347 - DNA, 25 bp, Homo sapien
ccttaggcaattatgtggtccccca

SEQ ID NO: 1304348 - DNA, 25 bp, Homo sapien
tatagcatagaattcctcggctcaa

SEQ ID NO: 1304349 - DNA, 25 bp, Homo sapien
cccagctaatgccagaggttacagt

SEQ ID NO: 1304350 - DNA, 25 bp, Homo sapien
tgcccagctaatgccagaggttaca

SEQ ID NO: 1304351 - DNA, 25 bp, Homo sapien
tctttaaaggacctgtactcccagc

SEQ ID NO: 1304352 - DNA, 25 bp, Homo sapien
atgcccagctaatgccagaggttac

SEQ ID NO: 1304353 - DNA, 25 bp, Homo sapien
ctatgatgggcatggcacttactca

SEQ ID NO: 1304354 - DNA, 25 bp, Homo sapien
gatttgttctgttcaagggcccatt

SEQ ID NO: 1304355 - DNA, 25 bp, Homo sapien
ttttctccgcatacaatagcagcca

SEQ ID NO: 1304356 - DNA, 25 bp, Homo sapien
tatgggcccatctagttttctccgc

SEQ ID NO: 1304357 - DNA, 25 bp, Homo sapien
gttgtaggtgttagtccatacatgt

SEQ ID NO: 1304358 - DNA, 25 bp, Homo sapien
agtccatacatgtacttcaggtttg

SEQ ID NO: 1304359 - DNA, 25 bp, Homo sapien
ggaattaatcctgatgttgtaggtg

SEQ ID NO: 1304360 - DNA, 25 bp, Homo sapien
cttgctttgggggaattaatcctga

SEQ ID NO: 1304361 - DNA, 25 bp, Homo sapien
ccccagtgaagtcataagcaaatat

SEQ ID NO: 1304362 - DNA, 25 bp, Homo sapien
tccccagtgaagtcataagcaaata

SEQ ID NO: 1304363 - DNA, 25 bp, Homo sapien
cccagtgaagtcataagcaaatatt

SEQ ID NO: 1304364 - DNA, 25 bp, Homo sapien
tggagactgtgctcttgacctgctc

SEQ ID NO: 1304365 - DNA, 25 bp, Homo sapien
tgagcagacggtatattccagaggt

SEQ ID NO: 1304366 - DNA, 25 bp, Homo sapien
tagacaaaggaggactaaggtaatc

SEQ ID NO: 1304367 - DNA, 25 bp, Homo sapien
tgcacacatgtctttaacccaggag

SEQ ID NO: 1304368 - DNA, 25 bp, Homo sapien
catgtattgggatagtcagggatcc

SEQ ID NO: 1304369 - DNA, 25 bp, Homo sapien
gatatggatgcttcctcgctcagga

SEQ ID NO: 1304370 - DNA, 25 bp, Homo sapien
gaagaactgtctgtcatttcggtaa

SEQ ID NO: 1304371 - DNA, 25 bp, Homo sapien
ttggattctggaccaccacctggga

SEQ ID NO: 1304372 - DNA, 25 bp, Homo sapien
cataaagcaggtcagcgtggcctga

SEQ ID NO: 1304373 - DNA, 25 bp, Homo sapien
cagcgtggcctgattgtcccaggac

SEQ ID NO: 1304374 - DNA, 25 bp, Homo sapien
gaaccttcataaagcaggtcagcgt

SEQ ID NO: 1304375 - DNA, 25 bp, Homo sapien
gcaggtcagcgtggcctgattgtcc

SEQ ID NO: 1304376 - DNA, 25 bp, Homo sapien
gaattacggtagtgcattgccttag

SEQ ID NO: 1304377 - DNA, 25 bp, Homo sapien
tgtggttagtcagaggcatcctgct

SEQ ID NO: 1304378 - DNA, 25 bp, Homo sapien
tatgatagtaaagcccacctgtttg

SEQ ID NO: 1304379 - DNA, 25 bp, Homo sapien
gatggtttaggtctggcaattgtcc

SEQ ID NO: 1304380 - DNA, 25 bp, Homo sapien
gaagcatagcttctgcgagatagaa

SEQ ID NO: 1304381 - DNA, 25 bp, Homo sapien
caaatccgtgatgaagttgggactg

SEQ ID NO: 1304382 - DNA, 25 bp, Homo sapien
agagagaacagaacgtccagccaca

SEQ ID NO: 1304383 - DNA, 25 bp, Homo sapien
tcacatttgttcacggccagggagg

SEQ ID NO: 1304384 - DNA, 25 bp, Homo sapien
ggcacagagggcattgactgcatcc

SEQ ID NO: 1304385 - DNA, 25 bp, Homo sapien
tggtggtggacacctctgacttcct

SEQ ID NO: 1304386 - DNA, 25 bp, Homo sapien
ccattccttgttattggtggtggac

SEQ ID NO: 1304387 - DNA, 25 bp, Homo sapien
attgactgcatcctgtaatgccttg

SEQ ID NO: 1304388 - DNA, 25 bp, Homo sapien
aattgaactattgactgggccccag

SEQ ID NO: 1304389 - DNA, 25 bp, Homo sapien
tattagccagtgtttgtgccaagca

SEQ ID NO: 1304390 - DNA, 25 bp, Homo sapien
cagaatgactcagaccaagatggat

SEQ ID NO: 1304391 - DNA, 25 bp, Homo sapien
caagcttacctgtgggtttcagtcc

SEQ ID NO: 1304392 - DNA, 25 bp, Homo sapien
cagctacctcttaatgcctgtggag

SEQ ID NO: 1304393 - DNA, 25 bp, Homo sapien
taagctggtacaagagctgccaacc

SEQ ID NO: 1304394 - DNA, 25 bp, Homo sapien
tctctggctgagatactgctgtcct

SEQ ID NO: 1304395 - DNA, 25 bp, Homo sapien
cacagagtgtttgctaggcgagaga

SEQ ID NO: 1304396 - DNA, 25 bp, Homo sapien
gcccggccactcagacttgtttgaa

SEQ ID NO: 1304397 - DNA, 25 bp, Homo sapien
gagctcaggcactttctgtaggaga

SEQ ID NO: 1304398 - DNA, 25 bp, Homo sapien
tagattgctagcttttcctccaggg

SEQ ID NO: 1304399 - DNA, 25 bp, Homo sapien
cttgcacagcacagaggtggtcacc

SEQ ID NO: 1304400 - DNA, 25 bp, Homo sapien
agaggttgcagtgaaccgagattgt

SEQ ID NO: 1304401 - DNA, 25 bp, Homo sapien
gccaggcgtgatggtgggtgcctat

SEQ ID NO: 1304402 - DNA, 25 bp, Homo sapien
cccagcaacttgggaggctgaggca

SEQ ID NO: 1304403 - DNA, 25 bp, Homo sapien
caagaatcacttgaacctggaaggc

SEQ ID NO: 1304404 - DNA, 25 bp, Homo sapien
tcctagcactgtggaaggccaagac

SEQ ID NO: 1304405 - DNA, 25 bp, Homo sapien
aagaagagggctaggggcagtggct

SEQ ID NO: 1304406 - DNA, 25 bp, Homo sapien
aaaaagaagagggctaggggcagtg

SEQ ID NO: 1304407 - DNA, 25 bp, Homo sapien
cctagcactgtggaaggccaagaca

SEQ ID NO: 1304408 - DNA, 25 bp, Homo sapien
aaagcgccacgatccttgacgggca

SEQ ID NO: 1304409 - DNA, 25 bp, Homo sapien
tcctcagtcagaaacagcgcgagtg

SEQ ID NO: 1304410 - DNA, 25 bp, Homo sapien
catagcaaagcttgtccgatgtcct

SEQ ID NO: 1304411 - DNA, 25 bp, Homo sapien
tgtctgacctgcacgatctggatga

SEQ ID NO: 1304412 - DNA, 25 bp, Homo sapien
cgcgcatgctcaggagcgacgccga

SEQ ID NO: 1304413 - DNA, 25 bp, Homo sapien
aggacgcctctaccctggacggtag

SEQ ID NO: 1304414 - DNA, 25 bp, Homo sapien
ctggcagttggcgcccatggagcca

SEQ ID NO: 1304415 - DNA, 25 bp, Homo sapien
accaatgacgtacttcgcaggcgcg

SEQ ID NO: 1304416 - DNA, 25 bp, Homo sapien
cctgcgagctgagtatgaggcgatt

SEQ ID NO: 1304417 - DNA, 25 bp, Homo sapien
ttcttggtccgacgccagttccaga

SEQ ID NO: 1304418 - DNA, 25 bp, Homo sapien
tcgagggcgacctgggcacgcttca

SEQ ID NO: 1304419 - DNA, 25 bp, Homo sapien
tcagtggaccgagggccgcattccc

SEQ ID NO: 1304420 - DNA, 25 bp, Homo sapien
gtggaacccacccttcccagtgata

SEQ ID NO: 1304421 - DNA, 25 bp, Homo sapien
cacccttcccagtgataagcttttc

SEQ ID NO: 1304422 - DNA, 25 bp, Homo sapien
tttctcactggaagaggcagtagac

SEQ ID NO: 1304423 - DNA, 25 bp, Homo sapien
gataagcttttctcactggaagagg

SEQ ID NO: 1304424 - DNA, 25 bp, Homo sapien
ctcacaccccactccttaaccctca

SEQ ID NO: 1304425 - DNA, 25 bp, Homo sapien
ctgctagatcatggtgcccagatac

SEQ ID NO: 1304426 - DNA, 25 bp, Homo sapien
gaagggtttagccctggggctctca

SEQ ID NO: 1304427 - DNA, 25 bp, Homo sapien
gctagatcatggtgcccagatactt

SEQ ID NO: 1304428 - DNA, 25 bp, Homo sapien
gaccagagacacgacaaggatggag

SEQ ID NO: 1304429 - DNA, 25 bp, Homo sapien
ggtacctctctgcaaagatcagggc

SEQ ID NO: 1304430 - DNA, 25 bp, Homo sapien
agctcagcaaatcaaggaagcctct

SEQ ID NO: 1304431 - DNA, 25 bp, Homo sapien
ggcttcagatgaagcagaacaggaa

SEQ ID NO: 1304432 - DNA, 25 bp, Homo sapien
gagtgccaggcatctactgctctgt

SEQ ID NO: 1304433 - DNA, 25 bp, Homo sapien
cttcttgctaggttggacgctggga

SEQ ID NO: 1304434 - DNA, 25 bp, Homo sapien
gccctcccaagaaatgagccagtga

SEQ ID NO: 1304435 - DNA, 25 bp, Homo sapien
tgaagacagacggtgtctcctctgc

SEQ ID NO: 1304436 - DNA, 25 bp, Homo sapien
ggaaccagaccgaattaagccatct

SEQ ID NO: 1304437 - DNA, 25 bp, Homo sapien
gaaaggtaagaatggccagcaatca

SEQ ID NO: 1304438 - DNA, 25 bp, Homo sapien
gcaatcagggtccaagcccagtgtc

SEQ ID NO: 1304439 - DNA, 25 bp, Homo sapien
cagaatgctcagacacaaagccggc

SEQ ID NO: 1304440 - DNA, 25 bp, Homo sapien
ccccgtctgtatatcctgtcccttc

SEQ ID NO: 1304441 - DNA, 25 bp, Homo sapien
cgtctgtatatcctgtcccttcttc

SEQ ID NO: 1304442 - DNA, 25 bp, Homo sapien
ctgcccccgtctgtatatcctgtcc

SEQ ID NO: 1304443 - DNA, 25 bp, Homo sapien
ctcatcataactgtctccagctgcc

SEQ ID NO: 1304444 - DNA, 25 bp, Homo sapien
tagcatgaaggtccagggcaggaat

SEQ ID NO: 1304445 - DNA, 25 bp, Homo sapien
tgcttaaagcgataagacttcaggg

SEQ ID NO: 1304446 - DNA, 25 bp, Homo sapien
gcagatgatgaagacactcagacag

SEQ ID NO: 1304447 - DNA, 25 bp, Homo sapien
tggagctccccaccgaaggaaggag

SEQ ID NO: 1304448 - DNA, 25 bp, Homo sapien
caggaacagttctcctcccttgtga

SEQ ID NO: 1304449 - DNA, 25 bp, Homo sapien
ctgttggatcaggaaacagtatgtt

SEQ ID NO: 1304450 - DNA, 25 bp, Homo sapien
ggctccattctgtatggccttccac

SEQ ID NO: 1304451 - DNA, 25 bp, Homo sapien
tggccatactcacggctccattctg

SEQ ID NO: 1304452 - DNA, 25 bp, Homo sapien
ttgttaaatgaggaagcagttccta

SEQ ID NO: 1304453 - DNA, 25 bp, Homo sapien
tgaggaagcagttcctaatttccag

SEQ ID NO: 1304454 - DNA, 25 bp, Homo sapien
gaaaggagtagctgactaagcctgg

SEQ ID NO: 1304455 - DNA, 25 bp, Homo sapien
cagcacagatagtggaagaggcctt

SEQ ID NO: 1304456 - DNA, 25 bp, Homo sapien
tccttatgggattctctggccagag

SEQ ID NO: 1304457 - DNA, 25 bp, Homo sapien
cctgggagagggtttgtcacaataa

SEQ ID NO: 1304458 - DNA, 25 bp, Homo sapien
ctactactcgccaggtgtgctggag

SEQ ID NO: 1304459 - DNA, 25 bp, Homo sapien
gctactactcgccaggtgtgctgga

SEQ ID NO: 1304460 - DNA, 25 bp, Homo sapien
ttgacagctactactcgccaggtgt

SEQ ID NO: 1304461 - DNA, 25 bp, Homo sapien
acagctactactcgccaggtgtgct

SEQ ID NO: 1304462 - DNA, 25 bp, Homo sapien
gggcaggcaaggctaatagacagct

SEQ ID NO: 1304463 - DNA, 25 bp, Homo sapien
ggcaaggctaatagacagctcattt

SEQ ID NO: 1304464 - DNA, 25 bp, Homo sapien
taatagacagctcatttcctgcatc

SEQ ID NO: 1304465 - DNA, 25 bp, Homo sapien
ggctaatagacagctcatttcctgc

SEQ ID NO: 1304466 - DNA, 25 bp, Homo sapien
tcccagaggcctcccgtttgcattt

SEQ ID NO: 1304467 - DNA, 25 bp, Homo sapien
cagccaaagcgctctgactgagtcc

SEQ ID NO: 1304468 - DNA, 25 bp, Homo sapien
cccgtttgcatttctggctcaaagt

SEQ ID NO: 1304469 - DNA, 25 bp, Homo sapien
caaagcgctctgactgagtcccaga

SEQ ID NO: 1304470 - DNA, 25 bp, Homo sapien
gggaagtgctaggtccatccgctca

SEQ ID NO: 1304471 - DNA, 25 bp, Homo sapien
tagtccagatcaggccacagtaatg

SEQ ID NO: 1304472 - DNA, 25 bp, Homo sapien
tgagcgtagagtctcctgtgctaaa

SEQ ID NO: 1304473 - DNA, 25 bp, Homo sapien
gatccatgaggtagctgttatcccc

SEQ ID NO: 1304474 - DNA, 25 bp, Homo sapien
caaagggtagactgttgcccctggg

SEQ ID NO: 1304475 - DNA, 25 bp, Homo sapien
tgagcttgtgatgcagagtgaaatt

SEQ ID NO: 1304476 - DNA, 25 bp, Homo sapien
tgtgatgcagagtgaaattcctatc

SEQ ID NO: 1304477 - DNA, 25 bp, Homo sapien
gtgaaattcctatcacggtgagcac

SEQ ID NO: 1304478 - DNA, 25 bp, Homo sapien
gaaattcctatcacggtgagcacca

SEQ ID NO: 1304479 - DNA, 25 bp, Homo sapien
gctcagccatgccagtaggagctgg

SEQ ID NO: 1304480 - DNA, 25 bp, Homo sapien
agccatgccagtaggagctggtaca

SEQ ID NO: 1304481 - DNA, 25 bp, Homo sapien
tcagccatgccagtaggagctggta

SEQ ID NO: 1304482 - DNA, 25 bp, Homo sapien
ctggaggaagggctcagatggggtc

SEQ ID NO: 1304483 - DNA, 25 bp, Homo sapien
agctgcgtcccgcactcgcagtagt

SEQ ID NO: 1304484 - DNA, 25 bp, Homo sapien
cccgcactcgcagtagtctaactta

SEQ ID NO: 1304485 - DNA, 25 bp, Homo sapien
gtatgtcgagatccacagagctgcg

SEQ ID NO: 1304486 - DNA, 25 bp, Homo sapien
gggaaggaactaacacaggtatgtc

SEQ ID NO: 1304487 - DNA, 25 bp, Homo sapien
tccaccaatatcttctccaagggcc

SEQ ID NO: 1304488 - DNA, 25 bp, Homo sapien
atatcttctccaagggccttcccaa

SEQ ID NO: 1304489 - DNA, 25 bp, Homo sapien
aagatgatagccagagagttacaga

SEQ ID NO: 1304490 - DNA, 25 bp, Homo sapien
accaatatcttctccaagggccttc

SEQ ID NO: 1304491 - DNA, 25 bp, Homo sapien
acaaatgcctttctaggcacaaaac

SEQ ID NO: 1304492 - DNA, 25 bp, Homo sapien
gcctttctaggcacaaaacacttcc

SEQ ID NO: 1304493 - DNA, 25 bp, Homo sapien
atgcctgagatgcaacaaatgcctt

SEQ ID NO: 1304494 - DNA, 25 bp, Homo sapien
aagaatgcctgagatgcaacaaatg

SEQ ID NO: 1304495 - DNA, 25 bp, Homo sapien
agtcacagcaaatctcaggactcaa

SEQ ID NO: 1304496 - DNA, 25 bp, Homo sapien
atcaaaaccccatcttccagatgaa

SEQ ID NO: 1304497 - DNA, 25 bp, Homo sapien
acagcaaatctcaggactcaaaccc

SEQ ID NO: 1304498 - DNA, 25 bp, Homo sapien
aaaaccccatcttccagatgaagtc

SEQ ID NO: 1304499 - DNA, 25 bp, Homo sapien
gattccagcatgaagacctgaactc

SEQ ID NO: 1304500 - DNA, 25 bp, Homo sapien
ccaggattccagcatgaagacctga

SEQ ID NO: 1304501 - DNA, 25 bp, Homo sapien
ttcccaggattccagcatgaagacc

SEQ ID NO: 1304502 - DNA, 25 bp, Homo sapien
gacctgaactctgaggtctgggacc

SEQ ID NO: 1304503 - DNA, 25 bp, Homo sapien
ttattaagcacataccatggcctag

SEQ ID NO: 1304504 - DNA, 25 bp, Homo sapien
tcaaggacatctggacggacaggca

SEQ ID NO: 1304505 - DNA, 25 bp, Homo sapien
agagaactcgtgagatctcaaggac

SEQ ID NO: 1304506 - DNA, 25 bp, Homo sapien
gagtagagagtcaggtaacaccaag

SEQ ID NO: 1304507 - DNA, 25 bp, Homo sapien
tgaggtaatagagaagggatccaca

SEQ ID NO: 1304508 - DNA, 25 bp, Homo sapien
cgatgccaaggtgaggtaatagaga

SEQ ID NO: 1304509 - DNA, 25 bp, Homo sapien
agaagggatccacactggttgagga

SEQ ID NO: 1304510 - DNA, 25 bp, Homo sapien
ctgtcgatgccaaggtgaggtaata

SEQ ID NO: 1304511 - DNA, 25 bp, Homo sapien
cagtattcaagaagagggtcttcat

SEQ ID NO: 1304512 - DNA, 25 bp, Homo sapien
ctcagtattcaagaagagggtcttc

SEQ ID NO: 1304513 - DNA, 25 bp, Homo sapien
tcagtattcaagaagagggtcttca

SEQ ID NO: 1304514 - DNA, 25 bp, Homo sapien
ggcccaggtcggctcatgaacccgc

SEQ ID NO: 1304515 - DNA, 25 bp, Homo sapien
ggtcggctcatgaacccgctgcagg

SEQ ID NO: 1304516 - DNA, 25 bp, Homo sapien
gcggaggcccgcttcagcagcggct

SEQ ID NO: 1304517 - DNA, 25 bp, Homo sapien
tgcgtgccaccccacagagcggcca

SEQ ID NO: 1304518 - DNA, 25 bp, Homo sapien
ggagatgaatccaggagtccggcct

SEQ ID NO: 1304519 - DNA, 25 bp, Homo sapien
gcagacgagtgagtcaccctgaccc

SEQ ID NO: 1304520 - DNA, 25 bp, Homo sapien
ttcgaggcgagggtcgggaaatcca

SEQ ID NO: 1304521 - DNA, 25 bp, Homo sapien
tcggctgcgactggcggctaaggca

SEQ ID NO: 1304522 - DNA, 25 bp, Homo sapien
ggcaacgccgctgtcttctacttcc

SEQ ID NO: 1304523 - DNA, 25 bp, Homo sapien
gcaacgccgctgtcttctacttccg

SEQ ID NO: 1304524 - DNA, 25 bp, Homo sapien
ggcactctataagtattagttatgt

SEQ ID NO: 1304525 - DNA, 25 bp, Homo sapien
ggcgtgaaccatggcacgcagccac

SEQ ID NO: 1304526 - DNA, 25 bp, Homo sapien
gggtccagtcttccccatataataa

SEQ ID NO: 1304527 - DNA, 25 bp, Homo sapien
cgcagccaccaatttccatcttatt

SEQ ID NO: 1304528 - DNA, 25 bp, Homo sapien
aaggtggatctccaaccaggccaga

SEQ ID NO: 1304529 - DNA, 25 bp, Homo sapien
ggcgaagatggttacgtccgtatcc

SEQ ID NO: 1304530 - DNA, 25 bp, Homo sapien
gagtgccacctccaaagtgttttgg

SEQ ID NO: 1304531 - DNA, 25 bp, Homo sapien
tgaagcagctgacctaagcctgggt

SEQ ID NO: 1304532 - DNA, 25 bp, Homo sapien
gtacttttggctaacctgggttgca

SEQ ID NO: 1304533 - DNA, 25 bp, Homo sapien
tctcagctgctatccaaggagccag

SEQ ID NO: 1304534 - DNA, 25 bp, Homo sapien
gacctccctatactttggacacttc

SEQ ID NO: 1304535 - DNA, 25 bp, Homo sapien
gacacttcaaacttaagaccctcag

SEQ ID NO: 1304536 - DNA, 25 bp, Homo sapien
gtgagcaggtccagcgcagaaacag

SEQ ID NO: 1304537 - DNA, 25 bp, Homo sapien
tgagcaggtccagcgcagaaacagg

SEQ ID NO: 1304538 - DNA, 25 bp, Homo sapien
gagcaggtccagcgcagaaacaggc

SEQ ID NO: 1304539 - DNA, 25 bp, Homo sapien
tggggctccacagatggccaaggga

SEQ ID NO: 1304540 - DNA, 25 bp, Homo sapien
ggctccacagatggccaagggattg

SEQ ID NO: 1304541 - DNA, 25 bp, Homo sapien
ttgaggaggtagagtgggttctgga

SEQ ID NO: 1304542 - DNA, 25 bp, Homo sapien
ggattgaggaggtagagtgggttct

SEQ ID NO: 1304543 - DNA, 25 bp, Homo sapien
gagtgcatctgagtcctcccttcac

SEQ ID NO: 1304544 - DNA, 25 bp, Homo sapien
agtgcatctgagtcctcccttcaca

SEQ ID NO: 1304545 - DNA, 25 bp, Homo sapien
ggagtgcatctgagtcctcccttca

SEQ ID NO: 1304546 - DNA, 25 bp, Homo sapien
cagggagtgagtttccagccccagg

SEQ ID NO: 1304547 - DNA, 25 bp, Homo sapien
tccagaccaggcgacaggtgacaga

SEQ ID NO: 1304548 - DNA, 25 bp, Homo sapien
ctgcgctccagaccaggcgacaggt

SEQ ID NO: 1304549 - DNA, 25 bp, Homo sapien
cgctccagaccaggcgacaggtgac

SEQ ID NO: 1304550 - DNA, 25 bp, Homo sapien
ccagaccaggcgacaggtgacagag

SEQ ID NO: 1304551 - DNA, 25 bp, Homo sapien
ctccaatgacagtgggaaccggcag

SEQ ID NO: 1304552 - DNA, 25 bp, Homo sapien
atgacagtgggaaccggcagcccag

SEQ ID NO: 1304553 - DNA, 25 bp, Homo sapien
caaaagaggaggcataggcgtgccc

SEQ ID NO: 1304554 - DNA, 25 bp, Homo sapien
cgtgcccaaacagcgccaacagtag

SEQ ID NO: 1304555 - DNA, 25 bp, Homo sapien
ggcacagcgcagctggaaggggtgg

SEQ ID NO: 1304556 - DNA, 25 bp, Homo sapien
tgaatgggcacagcgcagctggaag

SEQ ID NO: 1304557 - DNA, 25 bp, Homo sapien
cacagcgcagctggaaggggtggct

SEQ ID NO: 1304558 - DNA, 25 bp, Homo sapien
tgggcacagcgcagctggaaggggt

SEQ ID NO: 1304559 - DNA, 25 bp, Homo sapien
cagagcaatgggcacgaggaagcaa

SEQ ID NO: 1304560 - DNA, 25 bp, Homo sapien
ggggcagagcaatgggcacgaggaa

SEQ ID NO: 1304561 - DNA, 25 bp, Homo sapien
gggcagagcaatgggcacgaggaag

SEQ ID NO: 1304562 - DNA, 25 bp, Homo sapien
gagggggcagagcaatgggcacgag

SEQ ID NO: 1304563 - DNA, 25 bp, Homo sapien
ccaccagttcctggaatccagccat

SEQ ID NO: 1304564 - DNA, 25 bp, Homo sapien
cctggatccacttccactccaccag

SEQ ID NO: 1304565 - DNA, 25 bp, Homo sapien
cactccaccagttcctggaatccag

SEQ ID NO: 1304566 - DNA, 25 bp, Homo sapien
tttcctggatccacttccactccac

SEQ ID NO: 1304567 - DNA, 25 bp, Homo sapien
ggtccaggatgagttgggccagtga

SEQ ID NO: 1304568 - DNA, 25 bp, Homo sapien
gaagtcacaagcagggtgctgtctg

SEQ ID NO: 1304569 - DNA, 25 bp, Homo sapien
ccagtgaagtcacaagcagggtgct

SEQ ID NO: 1304570 - DNA, 25 bp, Homo sapien
atgagttgggccagtgaagtcacaa

SEQ ID NO: 1304571 - DNA, 25 bp, Homo sapien
caggtggtgctcagtgcctgcttta

SEQ ID NO: 1304572 - DNA, 25 bp, Homo sapien
tcagtgcctgctttacatgttacag

SEQ ID NO: 1304573 - DNA, 25 bp, Homo sapien
catgccctggactgccaggcaggtg

SEQ ID NO: 1304574 - DNA, 25 bp, Homo sapien
tccatgccctggactgccaggcagg

SEQ ID NO: 1304575 - DNA, 25 bp, Homo sapien
tttgctccgagtccccacaggcctc

SEQ ID NO: 1304576 - DNA, 25 bp, Homo sapien
gctttgctccgagtccccacaggcc

SEQ ID NO: 1304577 - DNA, 25 bp, Homo sapien
tcagcggcagccgtccagccgactc

SEQ ID NO: 1304578 - DNA, 25 bp, Homo sapien
tccagccgactcagccagttgtcca

SEQ ID NO: 1304579 - DNA, 25 bp, Homo sapien
gaagctctcctgcaggggacgccct

SEQ ID NO: 1304580 - DNA, 25 bp, Homo sapien
tgggcggtgggagtctggtcatctt

SEQ ID NO: 1304581 - DNA, 25 bp, Homo sapien
ggcggtgggagtctggtcatctttt

SEQ ID NO: 1304582 - DNA, 25 bp, Homo sapien
ctgggcggtgggagtctggtcatct

SEQ ID NO: 1304583 - DNA, 25 bp, Homo sapien
gcggtgggagtctggtcatcttttc

SEQ ID NO: 1304584 - DNA, 25 bp, Homo sapien
cttgccaagtacagccagggagcaa

SEQ ID NO: 1304585 - DNA, 25 bp, Homo sapien
ccaagtacagccagggagcaagtgc

SEQ ID NO: 1304586 - DNA, 25 bp, Homo sapien
gctcaagaccaatgagggagacaca

SEQ ID NO: 1304587 - DNA, 25 bp, Homo sapien
ggagcaagtgctcaagaccaatgag

SEQ ID NO: 1304588 - DNA, 25 bp, Homo sapien
tgggaaaccaccaatttgatggaag

SEQ ID NO: 1304589 - DNA, 25 bp, Homo sapien
gatggaagtatcacaacacccttga

SEQ ID NO: 1304590 - DNA, 25 bp, Homo sapien
cctcagtctgatgggagagactcaa

SEQ ID NO: 1304591 - DNA, 25 bp, Homo sapien
gtttcttagctttgaggattcctca

SEQ ID NO: 1304592 - DNA, 25 bp, Homo sapien
tcagctcactgcaacctctgccttt

SEQ ID NO: 1304593 - DNA, 25 bp, Homo sapien
ggtgtgcaccaccacatgtagctaa

SEQ ID NO: 1304594 - DNA, 25 bp, Homo sapien
gtgtgcaccaccacatgtagctaat

SEQ ID NO: 1304595 - DNA, 25 bp, Homo sapien
ctatctcagctcactgcaacctctg

SEQ ID NO: 1304596 - DNA, 25 bp, Homo sapien
tctgctgatctctgccatgtctgag

SEQ ID NO: 1304597 - DNA, 25 bp, Homo sapien
gtctgagccggccactgtggcagcc

SEQ ID NO: 1304598 - DNA, 25 bp, Homo sapien
gcctgattgcccattctctgctgat

SEQ ID NO: 1304599 - DNA, 25 bp, Homo sapien
tgtagtaagagaggggcacctcctc

SEQ ID NO: 1304600 - DNA, 25 bp, Homo sapien
ccagggaccagtgcaaccagccagg

SEQ ID NO: 1304601 - DNA, 25 bp, Homo sapien
tccagggaccagtgcaaccagccag

SEQ ID NO: 1304602 - DNA, 25 bp, Homo sapien
tggtctctgtgcctccgccagtcac

SEQ ID NO: 1304603 - DNA, 25 bp, Homo sapien
ttggtctctgtgcctccgccagtca

SEQ ID NO: 1304604 - DNA, 25 bp, Homo sapien
cttgtttcgcggcctgggccgagag

SEQ ID NO: 1304605 - DNA, 25 bp, Homo sapien
gtccctgtagcagcgccgcttctgg

SEQ ID NO: 1304606 - DNA, 25 bp, Homo sapien
atgaagccccgcgcccaaggacgag

SEQ ID NO: 1304607 - DNA, 25 bp, Homo sapien
gtgtccatgatgaagccccgcgccc

SEQ ID NO: 1304608 - DNA, 25 bp, Homo sapien
gccaaagtggtttgggaccctatga

SEQ ID NO: 1304609 - DNA, 25 bp, Homo sapien
caggtctgcacagcgacaggctgga

SEQ ID NO: 1304610 - DNA, 25 bp, Homo sapien
ggagtgcaacgaccagggcgaactc

SEQ ID NO: 1304611 - DNA, 25 bp, Homo sapien
gcgaactcacgaggcttcggaccag

SEQ ID NO: 1304612 - DNA, 25 bp, Homo sapien
tacgccgcgaattgaccgggccaaa

SEQ ID NO: 1304613 - DNA, 25 bp, Homo sapien
ccttcccagcgaaaaggcgggagag

SEQ ID NO: 1304614 - DNA, 25 bp, Homo sapien
ctgggagccgggtggtagctgagca

SEQ ID NO: 1304615 - DNA, 25 bp, Homo sapien
aggtgatacccttcccagcgaaaag

SEQ ID NO: 1304616 - DNA, 25 bp, Homo sapien
gggcacaagctgaagtcctcgttca

SEQ ID NO: 1304617 - DNA, 25 bp, Homo sapien
gcgctgcgcgccagggcatcatcgt

SEQ ID NO: 1304618 - DNA, 25 bp, Homo sapien
tccaccaagtatggcacgatcaccg

SEQ ID NO: 1304619 - DNA, 25 bp, Homo sapien
cgggaagcgacctccctgacggaag

SEQ ID NO: 1304620 - DNA, 25 bp, Homo sapien
tgccctgtccccgcgcctcttccag

SEQ ID NO: 1304621 - DNA, 25 bp, Homo sapien
gtgccctgtccccgcgcctcttcca

SEQ ID NO: 1304622 - DNA, 25 bp, Homo sapien
ctctcttgcagtagagttcgggcgg

SEQ ID NO: 1304623 - DNA, 25 bp, Homo sapien
agttcgggcgggaggaagtgccagg

SEQ ID NO: 1304624 - DNA, 25 bp, Homo sapien
gagctactctcttgcagtagagttc

SEQ ID NO: 1304625 - DNA, 25 bp, Homo sapien
agtgccaggagtcgcccaatctcag

SEQ ID NO: 1304626 - DNA, 25 bp, Homo sapien
gctgcggagcctctttgaacagaag

SEQ ID NO: 1304627 - DNA, 25 bp, Homo sapien
ctacgcgagacagggagagcttaaa

SEQ ID NO: 1304628 - DNA, 25 bp, Homo sapien
tgccatttagctgcggctgcggagc

SEQ ID NO: 1304629 - DNA, 25 bp, Homo sapien
gagcttaaagggctcgggagctccc

SEQ ID NO: 1304630 - DNA, 25 bp, Homo sapien
atggagcgggcgatgcccagcgtcg

SEQ ID NO: 1304631 - DNA, 25 bp, Homo sapien
gtgatggtgcccgagtcactcgcaa

SEQ ID NO: 1304632 - DNA, 25 bp, Homo sapien
cttccgcgccctctatttccagctg

SEQ ID NO: 1304633 - DNA, 25 bp, Homo sapien
cgcaggtctttacagcacagggtga

SEQ ID NO: 1304634 - DNA, 25 bp, Homo sapien
caggagaggggcaacgagtttcccg

SEQ ID NO: 1304635 - DNA, 25 bp, Homo sapien
gagtttcccggattgggcttacgca

SEQ ID NO: 1304636 - DNA, 25 bp, Homo sapien
gccagctctgactgcgctggccgtg

SEQ ID NO: 1304637 - DNA, 25 bp, Homo sapien
gcttacgcaggagggcgccagctct

SEQ ID NO: 1304638 - DNA, 25 bp, Homo sapien
aggagtcgacgctacgcaacagcag

SEQ ID NO: 1304639 - DNA, 25 bp, Homo sapien
tcgaaggagtcgacgctacgcaaca

SEQ ID NO: 1304640 - DNA, 25 bp, Homo sapien
gtcgacgctacgcaacagcagcagc

SEQ ID NO: 1304641 - DNA, 25 bp, Homo sapien
tgcttctcgaaggagtcgacgctac

SEQ ID NO: 1304642 - DNA, 25 bp, Homo sapien
tggtggacggtgactcacaccgtgc

SEQ ID NO: 1304643 - DNA, 25 bp, Homo sapien
tgcttgggctcagcccgtatggatc

SEQ ID NO: 1304644 - DNA, 25 bp, Homo sapien
tgactcacaccgtgccgcgaagcgg

SEQ ID NO: 1304645 - DNA, 25 bp, Homo sapien
cgggccccgtagaaactctgcttgg

SEQ ID NO: 1304646 - DNA, 25 bp, Homo sapien
ggagctccgaaagggataggaactg

SEQ ID NO: 1304647 - DNA, 25 bp, Homo sapien
ctccgaaagggataggaactgcctg

SEQ ID NO: 1304648 - DNA, 25 bp, Homo sapien
gaaggccagactctgagagcgtcag

SEQ ID NO: 1304649 - DNA, 25 bp, Homo sapien
aggccagactctgagagcgtcagga

SEQ ID NO: 1304650 - DNA, 25 bp, Homo sapien
ctgcagctgtgtagctggcgtccct

SEQ ID NO: 1304651 - DNA, 25 bp, Homo sapien
tgcagctgtgtagctggcgtccctc

SEQ ID NO: 1304652 - DNA, 25 bp, Homo sapien
ttctggctgagtccagacctcaaga

SEQ ID NO: 1304653 - DNA, 25 bp, Homo sapien
tgagtccagacctcaagaaccccat

SEQ ID NO: 1304654 - DNA, 25 bp, Homo sapien
cacttctggctgagtccagacctca

SEQ ID NO: 1304655 - DNA, 25 bp, Homo sapien
tggctgagtccagacctcaagaacc

SEQ ID NO: 1304656 - DNA, 25 bp, Homo sapien
gagaagcctgggattgacagaagct

SEQ ID NO: 1304657 - DNA, 25 bp, Homo sapien
tctttcctcagatcatccagaagtt

SEQ ID NO: 1304658 - DNA, 25 bp, Homo sapien
tgcatgtatgtcttggacactgtac

SEQ ID NO: 1304659 - DNA, 25 bp, Homo sapien
cactgtacaaggtacccctttctgg

SEQ ID NO: 1304660 - DNA, 25 bp, Homo sapien
ctttagataagggaatagacttctt

SEQ ID NO: 1304661 - DNA, 25 bp, Homo sapien
aaagacctcagtctttagataaggg

SEQ ID NO: 1304662 - DNA, 25 bp, Homo sapien
gtacaaagacctcagtctttagata

SEQ ID NO: 1304663 - DNA, 25 bp, Homo sapien
aaagtacaaagacctcagtctttag

SEQ ID NO: 1304664 - DNA, 25 bp, Homo sapien
ccaggtctgggtgaaagggatactt

SEQ ID NO: 1304665 - DNA, 25 bp, Homo sapien
ttcaggctcctaaagtaacatcagc

SEQ ID NO: 1304666 - DNA, 25 bp, Homo sapien
gcttagtagctttggaaaggtgccc

SEQ ID NO: 1304667 - DNA, 25 bp, Homo sapien
gaaccataaagggtgccaggtctgg

SEQ ID NO: 1304668 - DNA, 25 bp, Homo sapien
tcaaggtttgggagtataagcaccc

SEQ ID NO: 1304669 - DNA, 25 bp, Homo sapien
taacttgggaagctgtaagggacca

SEQ ID NO: 1304670 - DNA, 25 bp, Homo sapien
gaagaaaaccaacaactgccttatg

SEQ ID NO: 1304671 - DNA, 25 bp, Homo sapien
cacaggctggaggtttgaacttgag

SEQ ID NO: 1304672 - DNA, 25 bp, Homo sapien
ggtggctgcggccttcccttcctga

SEQ ID NO: 1304673 - DNA, 25 bp, Homo sapien
aaggacaggccgctcaatttgaaag

SEQ ID NO: 1304674 - DNA, 25 bp, Homo sapien
tgttccgttcacagggggcgactcc

SEQ ID NO: 1304675 - DNA, 25 bp, Homo sapien
ttcctgagcagtgccctcgtcgctg

SEQ ID NO: 1304676 - DNA, 25 bp, Homo sapien
gaagcgcctgctgcctcctcggcgg

SEQ ID NO: 1304677 - DNA, 25 bp, Homo sapien
aagcgcctgctgcctcctcggcggt

SEQ ID NO: 1304678 - DNA, 25 bp, Homo sapien
ggaagcgcctgctgcctcctcggcg

SEQ ID NO: 1304679 - DNA, 25 bp, Homo sapien
gggaagcgcctgctgcctcctcggc

SEQ ID NO: 1304680 - DNA, 25 bp, Homo sapien
cgcaggggatagtacggcggggtcg

SEQ ID NO: 1304681 - DNA, 25 bp, Homo sapien
ggctcgcgccgcaggggatagtacg

SEQ ID NO: 1304682 - DNA, 25 bp, Homo sapien
gcgccgcaggggatagtacggcggg

SEQ ID NO: 1304683 - DNA, 25 bp, Homo sapien
ctggggggcgcttggagccgccccg

SEQ ID NO: 1304684 - DNA, 25 bp, Homo sapien
gggtgccgggggaagccgagctgca

SEQ ID NO: 1304685 - DNA, 25 bp, Homo sapien
aggggtgccgggggaagccgagctg

SEQ ID NO: 1304686 - DNA, 25 bp, Homo sapien
ggtgccgggggaagccgagctgcac

SEQ ID NO: 1304687 - DNA, 25 bp, Homo sapien
ggggtgccgggggaagccgagctgc

SEQ ID NO: 1304688 - DNA, 25 bp, Homo sapien
gctccgctccgcgccagaatgccgc

SEQ ID NO: 1304689 - DNA, 25 bp, Homo sapien
ctccgcggccgacccgctagctgcg

SEQ ID NO: 1304690 - DNA, 25 bp, Homo sapien
ctccgcgccagaatgccgcccgccg

SEQ ID NO: 1304691 - DNA, 25 bp, Homo sapien
ggccgacccgctagctgcgcccgcc

SEQ ID NO: 1304692 - DNA, 25 bp, Homo sapien
taacggcagccaagtcgtgcatcag

SEQ ID NO: 1304693 - DNA, 25 bp, Homo sapien
agtcgtgcatcagacgcccaggaga

SEQ ID NO: 1304694 - DNA, 25 bp, Homo sapien
gaaatctaggcctctgattgttgcc

SEQ ID NO: 1304695 - DNA, 25 bp, Homo sapien
ttgccaataagagggtaacggcagc

SEQ ID NO: 1304696 - DNA, 25 bp, Homo sapien
ctgcccaagccaggaacctggactg

SEQ ID NO: 1304697 - DNA, 25 bp, Homo sapien
caagccaggaacctggactgatctc

SEQ ID NO: 1304698 - DNA, 25 bp, Homo sapien
caggaacctggactgatctcagctc

SEQ ID NO: 1304699 - DNA, 25 bp, Homo sapien
ctccactgcccaagccaggaacctg

SEQ ID NO: 1304700 - DNA, 25 bp, Homo sapien
aagtcggccccaggatcatcatgtg

SEQ ID NO: 1304701 - DNA, 25 bp, Homo sapien
tatttggagaatgaagggcagaacc

SEQ ID NO: 1304702 - DNA, 25 bp, Homo sapien
gaagaacttccttccggactgcagg

SEQ ID NO: 1304703 - DNA, 25 bp, Homo sapien
cccagccagttaagccagagttagc

SEQ ID NO: 1304704 - DNA, 25 bp, Homo sapien
tattcgttgactaaatagacacata

SEQ ID NO: 1304705 - DNA, 25 bp, Homo sapien
aaatattcgttgactaaatagacac

SEQ ID NO: 1304706 - DNA, 25 bp, Homo sapien
ttcgttgactaaatagacacataga

SEQ ID NO: 1304707 - DNA, 25 bp, Homo sapien
ataaatattcgttgactaaatagac

SEQ ID NO: 1304708 - DNA, 25 bp, Homo sapien
tcacgggcgcaagggaactagatgt

SEQ ID NO: 1304709 - DNA, 25 bp, Homo sapien
ctctcacgggcgcaagggaactaga

SEQ ID NO: 1304710 - DNA, 25 bp, Homo sapien
gcaagggaactagatgtcgcttcct

SEQ ID NO: 1304711 - DNA, 25 bp, Homo sapien
ctagatgtcgcttccttttgcccag

SEQ ID NO: 1304712 - DNA, 25 bp, Homo sapien
aatattctgccaccggtgcttccac

SEQ ID NO: 1304713 - DNA, 25 bp, Homo sapien
taatattctgccaccggtgcttcca

SEQ ID NO: 1304714 - DNA, 25 bp, Homo sapien
ttaatattctgccaccggtgcttcc

SEQ ID NO: 1304715 - DNA, 25 bp, Homo sapien
ggccagcgcgccgagggtacgtcgg

SEQ ID NO: 1304716 - DNA, 25 bp, Homo sapien
ggcgcgcgccgtagcagctgggcca

SEQ ID NO: 1304717 - DNA, 25 bp, Homo sapien
gtgcgggccagtgccaggcggcacc

SEQ ID NO: 1304718 - DNA, 25 bp, Homo sapien
agcagtaacaggttgcgtgcgggcc

SEQ ID NO: 1304719 - DNA, 25 bp, Homo sapien
ctgcgggctcagccagtagtcgccc

SEQ ID NO: 1304720 - DNA, 25 bp, Homo sapien
gcgggctcagccagtagtcgcccag

SEQ ID NO: 1304721 - DNA, 25 bp, Homo sapien
tgcgggctcagccagtagtcgccca

SEQ ID NO: 1304722 - DNA, 25 bp, Homo sapien
acaactcctggtccaggcggtgcgg

SEQ ID NO: 1304723 - DNA, 25 bp, Homo sapien
gctgccccagaaacacaactcctgg

SEQ ID NO: 1304724 - DNA, 25 bp, Homo sapien
cagaaacacaactcctggtccaggc

SEQ ID NO: 1304725 - DNA, 25 bp, Homo sapien
cccggctgccccagaaacacaactc

SEQ ID NO: 1304726 - DNA, 25 bp, Homo sapien
ctggtacgcaaaggtctccttgatc

SEQ ID NO: 1304727 - DNA, 25 bp, Homo sapien
tggtacgcaaaggtctccttgatcc

SEQ ID NO: 1304728 - DNA, 25 bp, Homo sapien
gaatatacgggctcattaaagccaa

SEQ ID NO: 1304729 - DNA, 25 bp, Homo sapien
taaggtgctctagggaaagcttgga

SEQ ID NO: 1304730 - DNA, 25 bp, Homo sapien
tccaaagagaccagctgatgccttt

SEQ ID NO: 1304731 - DNA, 25 bp, Homo sapien
gaatcaattgtccttagatctcagg

SEQ ID NO: 1304732 - DNA, 25 bp, Homo sapien
cacctcttcctcctgttccccgctt

SEQ ID NO: 1304733 - DNA, 25 bp, Homo sapien
tcggtccacctcttcctcctgttcc

SEQ ID NO: 1304734 - DNA, 25 bp, Homo sapien
ttgtcggtccacctcttcctcctgt

SEQ ID NO: 1304735 - DNA, 25 bp, Homo sapien
tccacctcttcctcctgttccccgc

SEQ ID NO: 1304736 - DNA, 25 bp, Homo sapien
tgctcggcgcatgcgacctcagcgt

SEQ ID NO: 1304737 - DNA, 25 bp, Homo sapien
tgcatcattgtctcgtgctcggcgc

SEQ ID NO: 1304738 - DNA, 25 bp, Homo sapien
attgtctcgtgctcggcgcatgcga

SEQ ID NO: 1304739 - DNA, 25 bp, Homo sapien
tcggcgcatgcgacctcagcgtggt

SEQ ID NO: 1304740 - DNA, 25 bp, Homo sapien
cgcccatggcgaggtagacgtcgat

SEQ ID NO: 1304741 - DNA, 25 bp, Homo sapien
ggctcccgcccatggcgaggtagac

SEQ ID NO: 1304742 - DNA, 25 bp, Homo sapien
tggcatccagggcagcgacgaagcg

SEQ ID NO: 1304743 - DNA, 25 bp, Homo sapien
agcagcgtcaggcagtggcatccag

SEQ ID NO: 1304744 - DNA, 25 bp, Homo sapien
tggggaaattgacgcgcgacagggg

SEQ ID NO: 1304745 - DNA, 25 bp, Homo sapien
ctggggaaattgacgcgcgacaggg

SEQ ID NO: 1304746 - DNA, 25 bp, Homo sapien
ggaaattgacgcgcgacaggggccg

SEQ ID NO: 1304747 - DNA, 25 bp, Homo sapien
gggaaattgacgcgcgacaggggcc

SEQ ID NO: 1304748 - DNA, 25 bp, Homo sapien
ccatcctgtggggcgcacccaggga

SEQ ID NO: 1304749 - DNA, 25 bp, Homo sapien
tgctgggggcgccaagtgggacgga

SEQ ID NO: 1304750 - DNA, 25 bp, Homo sapien
ctgggggcgccaagtgggacggagg

SEQ ID NO: 1304751 - DNA, 25 bp, Homo sapien
cctgtggggcgcacccagggagtgc

SEQ ID NO: 1304752 - DNA, 25 bp, Homo sapien
ctgaccgggttgtgctccgtcgcta

SEQ ID NO: 1304753 - DNA, 25 bp, Homo sapien
tcgctaccgcctccgggctgtcctg

SEQ ID NO: 1304754 - DNA, 25 bp, Homo sapien
gcaaggccacgggagtctccggcct

SEQ ID NO: 1304755 - DNA, 25 bp, Homo sapien
tcaatggggaatctccgaccctgcg

SEQ ID NO: 1304756 - DNA, 25 bp, Homo sapien
ctgcgcggggagtggcggtcaggcc

SEQ ID NO: 1304757 - DNA, 25 bp, Homo sapien
gggagtggcggtcaggcctctcccg

SEQ ID NO: 1304758 - DNA, 25 bp, Homo sapien
tggcggtcaggcctctcccgggtcg

SEQ ID NO: 1304759 - DNA, 25 bp, Homo sapien
cggtcaggcctctcccgggtcgccg

SEQ ID NO: 1304760 - DNA, 25 bp, Homo sapien
tgagaccggtcccaggctagaagca

SEQ ID NO: 1304761 - DNA, 25 bp, Homo sapien
gctagaagcagctgccggagccctg

SEQ ID NO: 1304762 - DNA, 25 bp, Homo sapien
cctggccgcgggagaacgctccggt

SEQ ID NO: 1304763 - DNA, 25 bp, Homo sapien
agaacgctccggtccaggcggagcc

SEQ ID NO: 1304764 - DNA, 25 bp, Homo sapien
gggcccgggcgtcgaggagggcagc

SEQ ID NO: 1304765 - DNA, 25 bp, Homo sapien
cgggcccgggcgtcgaggagggcag

SEQ ID NO: 1304766 - DNA, 25 bp, Homo sapien
ggcccgggcgtcgaggagggcagca

SEQ ID NO: 1304767 - DNA, 25 bp, Homo sapien
gcccgggcgtcgaggagggcagcat

SEQ ID NO: 1304768 - DNA, 25 bp, Homo sapien
acccgggccgcggcgcgctgacctc

SEQ ID NO: 1304769 - DNA, 25 bp, Homo sapien
ccgggccgcggcgcgctgacctcac

SEQ ID NO: 1304770 - DNA, 25 bp, Homo sapien
tgtgacccgggccgcggcgcgctga

SEQ ID NO: 1304771 - DNA, 25 bp, Homo sapien
tgacccgggccgcggcgcgctgacc

SEQ ID NO: 1304772 - DNA, 25 bp, Homo sapien
caaatgtgagaacgccttgttgcag

SEQ ID NO: 1304773 - DNA, 25 bp, Homo sapien
tatccagagattcctccctcgggag

SEQ ID NO: 1304774 - DNA, 25 bp, Homo sapien
gtctgccgacgggaaaatctgcctg

SEQ ID NO: 1304775 - DNA, 25 bp, Homo sapien
cgggactacaactcaatgcctggca

SEQ ID NO: 1304776 - DNA, 25 bp, Homo sapien
tgatcctccggccttcaattgaaga

SEQ ID NO: 1304777 - DNA, 25 bp, Homo sapien
gaggctcctggaacccgatatgatc

SEQ ID NO: 1304778 - DNA, 25 bp, Homo sapien
gcatccatggctagcaagcacttga

SEQ ID NO: 1304779 - DNA, 25 bp, Homo sapien
ttttgacgacacagacatccccaag

SEQ ID NO: 1304780 - DNA, 25 bp, Homo sapien
tattgcacaaacaaccaaaaggtta

SEQ ID NO: 1304781 - DNA, 25 bp, Homo sapien
aacggcaagtctgtaaaaggttcag

SEQ ID NO: 1304782 - DNA, 25 bp, Homo sapien
tataaaactaacagctgttagaatc

SEQ ID NO: 1304783 - DNA, 25 bp, Homo sapien
gaatcactttaatgctgttaacggc

SEQ ID NO: 1304784 - DNA, 25 bp, Homo sapien
cactcattggtgagcacaccagatt

SEQ ID NO: 1304785 - DNA, 25 bp, Homo sapien
taggtacaagaatcaccagagcagc

SEQ ID NO: 1304786 - DNA, 25 bp, Homo sapien
gcagcatcgtgaagcaccaggctct

SEQ ID NO: 1304787 - DNA, 25 bp, Homo sapien
tggagggtgagagcacaaaggctgg

SEQ ID NO: 1304788 - DNA, 25 bp, Homo sapien
tttcaagttcacccccaggatagcc

SEQ ID NO: 1304789 - DNA, 25 bp, Homo sapien
agtttcaagttcacccccaggatag

SEQ ID NO: 1304790 - DNA, 25 bp, Homo sapien
gtttcaagttcacccccaggatagc

SEQ ID NO: 1304791 - DNA, 25 bp, Homo sapien
gagtttcaagttcacccccaggata

SEQ ID NO: 1304792 - DNA, 25 bp, Homo sapien
taagtactcggctttgatcaccgct

SEQ ID NO: 1304793 - DNA, 25 bp, Homo sapien
cgctggtagctgttttgtgtcctaa

SEQ ID NO: 1304794 - DNA, 25 bp, Homo sapien
cagagttgtaagtactcggctttga

SEQ ID NO: 1304795 - DNA, 25 bp, Homo sapien
gatcaccgctctgtaccgctggtag

SEQ ID NO: 1304796 - DNA, 25 bp, Homo sapien
aacgcaagagcgaactcctgcaggt

SEQ ID NO: 1304797 - DNA, 25 bp, Homo sapien
tgaggtgggtagctggttggacaag

SEQ ID NO: 1304798 - DNA, 25 bp, Homo sapien
tgggtgcatccgacatgaagaagcc

SEQ ID NO: 1304799 - DNA, 25 bp, Homo sapien
gttggacaaggtatcctgccaggca

SEQ ID NO: 1304800 - DNA, 25 bp, Homo sapien
tgttcactgtccctgtttagccaag

SEQ ID NO: 1304801 - DNA, 25 bp, Homo sapien
gcttcctccgagagagactggtggt

SEQ ID NO: 1304802 - DNA, 25 bp, Homo sapien
tctggccgggatttagagagcccct

SEQ ID NO: 1304803 - DNA, 25 bp, Homo sapien
gataagtgcctcttacccactggga

SEQ ID NO: 1304804 - DNA, 25 bp, Homo sapien
cgagggaggcgagagatgccatggg

SEQ ID NO: 1304805 - DNA, 25 bp, Homo sapien
gcgagggaggcgagagatgccatgg

SEQ ID NO: 1304806 - DNA, 25 bp, Homo sapien
gagggaggcgagagatgccatgggt

SEQ ID NO: 1304807 - DNA, 25 bp, Homo sapien
agcgagggaggcgagagatgccatg

SEQ ID NO: 1304808 - DNA, 25 bp, Homo sapien
agtcctcccactctacatcttccag

SEQ ID NO: 1304809 - DNA, 25 bp, Homo sapien
cagtcctcccactctacatcttcca

SEQ ID NO: 1304810 - DNA, 25 bp, Homo sapien
tgcagcctgctgatgaccaatgttg

SEQ ID NO: 1304811 - DNA, 25 bp, Homo sapien
gagagtgaacccctagtcttaagga

SEQ ID NO: 1304812 - DNA, 25 bp, Homo sapien
cctgacagggcactatgggctttct

SEQ ID NO: 1304813 - DNA, 25 bp, Homo sapien
ttcccatcatgaaaaaggaggccct

SEQ ID NO: 1304814 - DNA, 25 bp, Homo sapien
acacccaggaccattaggctcgctt

SEQ ID NO: 1304815 - DNA, 25 bp, Homo sapien
tctcacacccaggaccattaggctc

SEQ ID NO: 1304816 - DNA, 25 bp, Homo sapien
gaccattaggctcgcttccctctga

SEQ ID NO: 1304817 - DNA, 25 bp, Homo sapien
gctggggagagctctcacacccagg

SEQ ID NO: 1304818 - DNA, 25 bp, Homo sapien
tggaaagtgccatctgcacctcctc

SEQ ID NO: 1304819 - DNA, 25 bp, Homo sapien
cactttggaaagtgccatctgcacc

SEQ ID NO: 1304820 - DNA, 25 bp, Homo sapien
ccactttggaaagtgccatctgcac

SEQ ID NO: 1304821 - DNA, 25 bp, Homo sapien
gaaagtgccatctgcacctcctctt

SEQ ID NO: 1304822 - DNA, 25 bp, Homo sapien
ggaaggggcacctgaagagggtgta

SEQ ID NO: 1304823 - DNA, 25 bp, Homo sapien
agggaaggggcacctgaagagggtg

SEQ ID NO: 1304824 - DNA, 25 bp, Homo sapien
gaaggggcacctgaagagggtgtag

SEQ ID NO: 1304825 - DNA, 25 bp, Homo sapien
cactctggcgcaccaatcgtacttt

SEQ ID NO: 1304826 - DNA, 25 bp, Homo sapien
gggtctcacaaatacacaagtcttt

SEQ ID NO: 1304827 - DNA, 25 bp, Homo sapien
tctggcgcaccaatcgtactttttt

SEQ ID NO: 1304828 - DNA, 25 bp, Homo sapien
gcttcaaaagggtctcacaaataca

SEQ ID NO: 1304829 - DNA, 25 bp, Homo sapien
agagcggagaagcactttggcccag

SEQ ID NO: 1304830 - DNA, 25 bp, Homo sapien
ggttactaaagagcggagaagcact

SEQ ID NO: 1304831 - DNA, 25 bp, Homo sapien
gcaggttactaaagagcggagaagc

SEQ ID NO: 1304832 - DNA, 25 bp, Homo sapien
taaagagcggagaagcactttggcc

SEQ ID NO: 1304833 - DNA, 25 bp, Homo sapien
tcctgtgggttagccagactcttcg

SEQ ID NO: 1304834 - DNA, 25 bp, Homo sapien
taacagtcccagtatacggatgagg

SEQ ID NO: 1304835 - DNA, 25 bp, Homo sapien
tagacctggccctgccgtttgagaa

SEQ ID NO: 1304836 - DNA, 25 bp, Homo sapien
tctagctcttgggtgggtattaaca

SEQ ID NO: 1304837 - DNA, 25 bp, Homo sapien
cagaagagtgggtttaggtcaccgc

SEQ ID NO: 1304838 - DNA, 25 bp, Homo sapien
tatcccgtttatggaggagcaaaca

SEQ ID NO: 1304839 - DNA, 25 bp, Homo sapien
atcacaacctcagtgggccctggga

SEQ ID NO: 1304840 - DNA, 25 bp, Homo sapien
gcttagcacagatctagacacagag

SEQ ID NO: 1304841 - DNA, 25 bp, Homo sapien
aactctcctatacgaggcttgtctc

SEQ ID NO: 1304842 - DNA, 25 bp, Homo sapien
ctcctatacgaggcttgtctcctca

SEQ ID NO: 1304843 - DNA, 25 bp, Homo sapien
caactctcctatacgaggcttgtct

SEQ ID NO: 1304844 - DNA, 25 bp, Homo sapien
ctctcctatacgaggcttgtctcct

SEQ ID NO: 1304845 - DNA, 25 bp, Homo sapien
ttcccatccactgtggcaaaccagt

SEQ ID NO: 1304846 - DNA, 25 bp, Homo sapien
tggcaaaaaggctgactgacaccaa

SEQ ID NO: 1304847 - DNA, 25 bp, Homo sapien
ctgaagtggtattttggatgtggca

SEQ ID NO: 1304848 - DNA, 25 bp, Homo sapien
gataatcagccgtccctgaagtggt

SEQ ID NO: 1304849 - DNA, 25 bp, Homo sapien
catagtatcctaacaagggacaagg

SEQ ID NO: 1304850 - DNA, 25 bp, Homo sapien
gacaaggagacaaatctgcctcagg

SEQ ID NO: 1304851 - DNA, 25 bp, Homo sapien
aacatatttagcatgggatctggca

SEQ ID NO: 1304852 - DNA, 25 bp, Homo sapien
tccattactcaagctgggtcgctgt

SEQ ID NO: 1304853 - DNA, 25 bp, Homo sapien
acaggtccttgggtagcactcgtgc

SEQ ID NO: 1304854 - DNA, 25 bp, Homo sapien
tagacttcccactatccgagttcag

SEQ ID NO: 1304855 - DNA, 25 bp, Homo sapien
tctagcagcttttgggacaggtcct

SEQ ID NO: 1304856 - DNA, 25 bp, Homo sapien
cattgttggagggtgtagacttccc

SEQ ID NO: 1304857 - DNA, 25 bp, Homo sapien
cttttggagatatgggtgaaatgcc

SEQ ID NO: 1304858 - DNA, 25 bp, Homo sapien
tggagatatgggtgaaatgcccatg

SEQ ID NO: 1304859 - DNA, 25 bp, Homo sapien
aagtcaccagattctcttcacaggg

SEQ ID NO: 1304860 - DNA, 25 bp, Homo sapien
ggttctccttcagggaatgtagaaa

SEQ ID NO: 1304861 - DNA, 25 bp, Homo sapien
ctctgttccgcccgctgcttcaggg

SEQ ID NO: 1304862 - DNA, 25 bp, Homo sapien
cccagccgggctcttcagagatgct

SEQ ID NO: 1304863 - DNA, 25 bp, Homo sapien
tgcttcagggcgtccctccgggcct

SEQ ID NO: 1304864 - DNA, 25 bp, Homo sapien
tcccagccgggctcttcagagatgc

SEQ ID NO: 1304865 - DNA, 25 bp, Homo sapien
aactgatggactttatagaaatacc

SEQ ID NO: 1304866 - DNA, 25 bp, Homo sapien
tggactttatagaaataccgatgcc

SEQ ID NO: 1304867 - DNA, 25 bp, Homo sapien
ctgctctaactgatggactttatag

SEQ ID NO: 1304868 - DNA, 25 bp, Homo sapien
agaaataccgatgccagaattctga

SEQ ID NO: 1304869 - DNA, 25 bp, Homo sapien
ctgggaaagccaggcgtcaaacaat

SEQ ID NO: 1304870 - DNA, 25 bp, Homo sapien
gatggaggggctgcctacaaggagc

SEQ ID NO: 1304871 - DNA, 25 bp, Homo sapien
aagccaggcgtcaaacaattccggg

SEQ ID NO: 1304872 - DNA, 25 bp, Homo sapien
acaaggagctctgagatctccccct

SEQ ID NO: 1304873 - DNA, 25 bp, Homo sapien
gctgggtccgactgcaggctataga

SEQ ID NO: 1304874 - DNA, 25 bp, Homo sapien
catctggttcattacagtaggttgc

SEQ ID NO: 1304875 - DNA, 25 bp, Homo sapien
cagtaggttgctgggtccgactgca

SEQ ID NO: 1304876 - DNA, 25 bp, Homo sapien
tccgactgcaggctatagaggcgag

SEQ ID NO: 1304877 - DNA, 25 bp, Homo sapien
tgccagacggtgtgcccatcagggt

SEQ ID NO: 1304878 - DNA, 25 bp, Homo sapien
gatgacatcgcagtcgatggttttg

SEQ ID NO: 1304879 - DNA, 25 bp, Homo sapien
tcagctgtgccagacggtgtgccca

SEQ ID NO: 1304880 - DNA, 25 bp, Homo sapien
cagggtgatgacatcgcagtcgatg

SEQ ID NO: 1304881 - DNA, 25 bp, Homo sapien
ctggcgaaggggcaaaggtgtctga

SEQ ID NO: 1304882 - DNA, 25 bp, Homo sapien
tggcgaaggggcaaaggtgtctgag

SEQ ID NO: 1304883 - DNA, 25 bp, Homo sapien
ctaggaagtcagataaccctttctt

SEQ ID NO: 1304884 - DNA, 25 bp, Homo sapien
taggaagtcagataaccctttcttc

SEQ ID NO: 1304885 - DNA, 25 bp, Homo sapien
aggaagtcagataaccctttcttca

SEQ ID NO: 1304886 - DNA, 25 bp, Homo sapien
aagcaagcgccccgggaacaggctg

SEQ ID NO: 1304887 - DNA, 25 bp, Homo sapien
cagaggaagcaagcgccccgggaac

SEQ ID NO: 1304888 - DNA, 25 bp, Homo sapien
ggcagaggaagcaagcgccccggga

SEQ ID NO: 1304889 - DNA, 25 bp, Homo sapien
ggaagcaagcgccccgggaacaggc

SEQ ID NO: 1304890 - DNA, 25 bp, Homo sapien
gtaaactccgtcaggtcccgcttca

SEQ ID NO: 1304891 - DNA, 25 bp, Homo sapien
tgcgatggtacaggccgtgtcatgc

SEQ ID NO: 1304892 - DNA, 25 bp, Homo sapien
gctggccgtggctgcgatggtacag

SEQ ID NO: 1304893 - DNA, 25 bp, Homo sapien
tcccgcttcataaactccaaggctt

SEQ ID NO: 1304894 - DNA, 25 bp, Homo sapien
catgatctgggattacctgacagca

SEQ ID NO: 1304895 - DNA, 25 bp, Homo sapien
cactcgcaagctatgtggccatgag

SEQ ID NO: 1304896 - DNA, 25 bp, Homo sapien
tcttcagtaccagacagacaaatgg

SEQ ID NO: 1304897 - DNA, 25 bp, Homo sapien
gagtctcagcctaggcactcgcaag

SEQ ID NO: 1304898 - DNA, 25 bp, Homo sapien
ctaccatcccgaggttctattcata

SEQ ID NO: 1304899 - DNA, 25 bp, Homo sapien
cccgaggttctattcatatacaaag

SEQ ID NO: 1304900 - DNA, 25 bp, Homo sapien
tatgtgaagttatttgccttcgggt

SEQ ID NO: 1304901 - DNA, 25 bp, Homo sapien
actagatcagattctcttggaggcc

SEQ ID NO: 1304902 - DNA, 25 bp, Homo sapien
gaatggcacagtctatcagctacag

SEQ ID NO: 1304903 - DNA, 25 bp, Homo sapien
gggtggtaatcatgcctccatatca

SEQ ID NO: 1304904 - DNA, 25 bp, Homo sapien
gcttgggaagtttctgaatggcaca

SEQ ID NO: 1304905 - DNA, 25 bp, Homo sapien
gaagggcctgcccacttttcattag

SEQ ID NO: 1304906 - DNA, 25 bp, Homo sapien
ttcaaaaagtagatgaggttgtctc

SEQ ID NO: 1304907 - DNA, 25 bp, Homo sapien
ctgaagtttcaaaaagtagatgagg

SEQ ID NO: 1304908 - DNA, 25 bp, Homo sapien
tttcaaaaagtagatgaggttgtct

SEQ ID NO: 1304909 - DNA, 25 bp, Homo sapien
aagtttcaaaaagtagatgaggttg

SEQ ID NO: 1304910 - DNA, 25 bp, Homo sapien
tctttgactgcttggtagctctgct

SEQ ID NO: 1304911 - DNA, 25 bp, Homo sapien
ctttgactgcttggtagctctgctg

SEQ ID NO: 1304912 - DNA, 25 bp, Homo sapien
gtttgttccccgctcagatgtaccc

SEQ ID NO: 1304913 - DNA, 25 bp, Homo sapien
gcctaggagcaaaacgacaagctca

SEQ ID NO: 1304914 - DNA, 25 bp, Homo sapien
ctgcccgcccaaggatccggtttgt

SEQ ID NO: 1304915 - DNA, 25 bp, Homo sapien
gaattcaggccccaacgcctaggag

SEQ ID NO: 1304916 - DNA, 25 bp, Homo sapien
gcaccgccctcagcccaatcccctc

SEQ ID NO: 1304917 - DNA, 25 bp, Homo sapien
aggcgctcggcccaatcctcgcgcc

SEQ ID NO: 1304918 - DNA, 25 bp, Homo sapien
ctttgacttccgacacggcaccgcc

SEQ ID NO: 1304919 - DNA, 25 bp, Homo sapien
tcctcgcgccggcaccgccctcagc

SEQ ID NO: 1304920 - DNA, 25 bp, Homo sapien
ctttagcagtgcttcactatgttgc

SEQ ID NO: 1304921 - DNA, 25 bp, Homo sapien
gccatgtatatgctgatggctctca

SEQ ID NO: 1304922 - DNA, 25 bp, Homo sapien
gaacatcaggttcattttgtctatt

SEQ ID NO: 1304923 - DNA, 25 bp, Homo sapien
gagccatctcactaatctcatactt

SEQ ID NO: 1304924 - DNA, 25 bp, Homo sapien
gctggtggttcagagggcccttact

SEQ ID NO: 1304925 - DNA, 25 bp, Homo sapien
ggtatatcgttctgttgctgtagcc

SEQ ID NO: 1304926 - DNA, 25 bp, Homo sapien
ggccatgtagaccataaggtatatc

SEQ ID NO: 1304927 - DNA, 25 bp, Homo sapien
tggtggttcagagggcccttactcc

SEQ ID NO: 1304928 - DNA, 25 bp, Homo sapien
gagggtggcctccgatgccagtttc

SEQ ID NO: 1304929 - DNA, 25 bp, Homo sapien
agggtggcctccgatgccagtttca

SEQ ID NO: 1304930 - DNA, 25 bp, Homo sapien
gggtggcctccgatgccagtttcac

SEQ ID NO: 1304931 - DNA, 25 bp, Homo sapien
tacaggaagcgttgctgacaatcac

SEQ ID NO: 1304932 - DNA, 25 bp, Homo sapien
cataacataatcagcgtcaggacca

SEQ ID NO: 1304933 - DNA, 25 bp, Homo sapien
gcagggcagctaaacaattggcagt

SEQ ID NO: 1304934 - DNA, 25 bp, Homo sapien
gagagagcagatatgacccttttgg

SEQ ID NO: 1304935 - DNA, 25 bp, Homo sapien
gcataacagttcacactcgtttcct

SEQ ID NO: 1304936 - DNA, 25 bp, Homo sapien
ataacagttcacactcgtttcctcc

SEQ ID NO: 1304937 - DNA, 25 bp, Homo sapien
atgcataacagttcacactcgtttc

SEQ ID NO: 1304938 - DNA, 25 bp, Homo sapien
tgcataacagttcacactcgtttcc

SEQ ID NO: 1304939 - DNA, 25 bp, Homo sapien
ggcaggaaacgcctgttttgaatac

SEQ ID NO: 1304940 - DNA, 25 bp, Homo sapien
ctgactgatacagatgatggcagag

SEQ ID NO: 1304941 - DNA, 25 bp, Homo sapien
tgttttgaatacattgagttgtttg

SEQ ID NO: 1304942 - DNA, 25 bp, Homo sapien
ctgaactgactgatacagatgatgg

SEQ ID NO: 1304943 - DNA, 25 bp, Homo sapien
actcttagctcctttggcatttcca

SEQ ID NO: 1304944 - DNA, 25 bp, Homo sapien
ttccagcactgtcagtagtgaaagt

SEQ ID NO: 1304945 - DNA, 25 bp, Homo sapien
ttactcttagctcctttggcatttc

SEQ ID NO: 1304946 - DNA, 25 bp, Homo sapien
ccagcactgtcagtagtgaaagtgg

SEQ ID NO: 1304947 - DNA, 25 bp, Homo sapien
tggtgatatggagcccccgtaccag

SEQ ID NO: 1304948 - DNA, 25 bp, Homo sapien
cccgtaccagtaaacccacaagcag

SEQ ID NO: 1304949 - DNA, 25 bp, Homo sapien
actggtgatatggagcccccgtacc

SEQ ID NO: 1304950 - DNA, 25 bp, Homo sapien
taccagtaaacccacaagcaggtcc

SEQ ID NO: 1304951 - DNA, 25 bp, Homo sapien
tggagattcaatccgttcaagagaa

SEQ ID NO: 1304952 - DNA, 25 bp, Homo sapien
ttcaatccgttcaagagaatccaga

SEQ ID NO: 1304953 - DNA, 25 bp, Homo sapien
tgggctggagattcaatccgttcaa

SEQ ID NO: 1304954 - DNA, 25 bp, Homo sapien
ccgttcaagagaatccagaggtggg

SEQ ID NO: 1304955 - DNA, 25 bp, Homo sapien
tgctcagtgggaattggagggttgt

SEQ ID NO: 1304956 - DNA, 25 bp, Homo sapien
cagtgggaattggagggttgtcctg

SEQ ID NO: 1304957 - DNA, 25 bp, Homo sapien
cctgctcagtgggaattggagggtt

SEQ ID NO: 1304958 - DNA, 25 bp, Homo sapien
ctcagtgggaattggagggttgtcc

SEQ ID NO: 1304959 - DNA, 25 bp, Homo sapien
tataggtatggtaagctccatatcc

SEQ ID NO: 1304960 - DNA, 25 bp, Homo sapien
ctgctataggtatggtaagctccat

SEQ ID NO: 1304961 - DNA, 25 bp, Homo sapien
actgctataggtatggtaagctcca

SEQ ID NO: 1304962 - DNA, 25 bp, Homo sapien
gctataggtatggtaagctccatat

SEQ ID NO: 1304963 - DNA, 25 bp, Homo sapien
agattgaagtctaccgtttaactgg

SEQ ID NO: 1304964 - DNA, 25 bp, Homo sapien
gtttctcatccttaatagtttctgg

SEQ ID NO: 1304965 - DNA, 25 bp, Homo sapien
gatggggcttcttgatgggttggag

SEQ ID NO: 1304966 - DNA, 25 bp, Homo sapien
ttctggagattgaagtctaccgttt

SEQ ID NO: 1304967 - DNA, 25 bp, Homo sapien
ctggaggcagagatgggcccccatg

SEQ ID NO: 1304968 - DNA, 25 bp, Homo sapien
taggctctgaggttataataagctc

SEQ ID NO: 1304969 - DNA, 25 bp, Homo sapien
gctctgaggttataataagctctgc

SEQ ID NO: 1304970 - DNA, 25 bp, Homo sapien
cttggtaggctctgaggttataata

SEQ ID NO: 1304971 - DNA, 25 bp, Homo sapien
gaggttataataagctctgcatcca

SEQ ID NO: 1304972 - DNA, 25 bp, Homo sapien
cacatccacaggtttgactgtgaca

SEQ ID NO: 1304973 - DNA, 25 bp, Homo sapien
tctggagttactgtaagctccacat

SEQ ID NO: 1304974 - DNA, 25 bp, Homo sapien
gctctggagttactgtaagctccac

SEQ ID NO: 1304975 - DNA, 25 bp, Homo sapien
ctggctctggagttactgtaagctc

SEQ ID NO: 1304976 - DNA, 25 bp, Homo sapien
gtttcgggctctaggtgaaattgaa

SEQ ID NO: 1304977 - DNA, 25 bp, Homo sapien
gtatatccatacttccatctaaata

SEQ ID NO: 1304978 - DNA, 25 bp, Homo sapien
tggggacagggtgcctggatacagt

SEQ ID NO: 1304979 - DNA, 25 bp, Homo sapien
gggacagggtgcctggatacagtat

SEQ ID NO: 1304980 - DNA, 25 bp, Homo sapien
acagggtgcctggatacagtatatc

SEQ ID NO: 1304981 - DNA, 25 bp, Homo sapien
aaagtcttggtgaaagtctcagtcg

SEQ ID NO: 1304982 - DNA, 25 bp, Homo sapien
gcagcaacgaactgctctggccacg

SEQ ID NO: 1304983 - DNA, 25 bp, Homo sapien
gatcctggtgtgcagcaacgaactg

SEQ ID NO: 1304984 - DNA, 25 bp, Homo sapien
ttttgaggcaaagagtccgagctag

SEQ ID NO: 1304985 - DNA, 25 bp, Homo sapien
ggaagcagaggaccccaggtattca

SEQ ID NO: 1304986 - DNA, 25 bp, Homo sapien
gaggaagcagaggaccccaggtatt

SEQ ID NO: 1304987 - DNA, 25 bp, Homo sapien
cagaggaccccaggtattcaaaggc

SEQ ID NO: 1304988 - DNA, 25 bp, Homo sapien
agcagaggaccccaggtattcaaag

SEQ ID NO: 1304989 - DNA, 25 bp, Homo sapien
gccgcctggacgagtagccacaata

SEQ ID NO: 1304990 - DNA, 25 bp, Homo sapien
tccagaggctgagccgcctggacga

SEQ ID NO: 1304991 - DNA, 25 bp, Homo sapien
gagccgcctggacgagtagccacaa

SEQ ID NO: 1304992 - DNA, 25 bp, Homo sapien
cgcctggacgagtagccacaatagt

SEQ ID NO: 1304993 - DNA, 25 bp, Homo sapien
cagaggcacagccgggacgtgacat

SEQ ID NO: 1304994 - DNA, 25 bp, Homo sapien
cacagccgggacgtgacatgcgctg

SEQ ID NO: 1304995 - DNA, 25 bp, Homo sapien
cgggacgtgacatgcgctggcgccg

SEQ ID NO: 1304996 - DNA, 25 bp, Homo sapien
aggcacagccgggacgtgacatgcg

SEQ ID NO: 1304997 - DNA, 25 bp, Homo sapien
cagtccccctaagggctggcattac

SEQ ID NO: 1304998 - DNA, 25 bp, Homo sapien
tttacaggtgcccagtagagatggg

SEQ ID NO: 1304999 - DNA, 25 bp, Homo sapien
ggtgaaatctcagcttactccaaca

SEQ ID NO: 1305000 - DNA, 25 bp, Homo sapien
tgaaatctcagcttactccaacatc

SEQ ID NO: 1305001 - DNA, 25 bp, Homo sapien
ggtcaggctagtctcgaactactga

SEQ ID NO: 1305002 - DNA, 25 bp, Homo sapien
gtcaggctagtctcgaactactgac

SEQ ID NO: 1305003 - DNA, 25 bp, Homo sapien
gggggtggttttgcgatgttggtca

SEQ ID NO: 1305004 - DNA, 25 bp, Homo sapien
agtggggggtggttttgcgatgttg

SEQ ID NO: 1305005 - DNA, 25 bp, Homo sapien
aattcctacataatctggcctttgc

SEQ ID NO: 1305006 - DNA, 25 bp, Homo sapien
tatttcctgtcgcttggactggcta

SEQ ID NO: 1305007 - DNA, 25 bp, Homo sapien
ggcctttgcttctctatccattcat

SEQ ID NO: 1305008 - DNA, 25 bp, Homo sapien
ttaaggtggcctacaaattcctaca

SEQ ID NO: 1305009 - DNA, 25 bp, Homo sapien
cattgtagtgctggaaatttgaatt

SEQ ID NO: 1305010 - DNA, 25 bp, Homo sapien
tcaggtgcatatgatgggcactgtt

SEQ ID NO: 1305011 - DNA, 25 bp, Homo sapien
agtgctggaaatttgaattcttttc

SEQ ID NO: 1305012 - DNA, 25 bp, Homo sapien
tcaacagtactgtgttccacaaacc

SEQ ID NO: 1305013 - DNA, 25 bp, Homo sapien
caaggcagaaccagttgctcttctc

SEQ ID NO: 1305014 - DNA, 25 bp, Homo sapien
gttgctcttctctgaaagtctctgc

SEQ ID NO: 1305015 - DNA, 25 bp, Homo sapien
gtctctgcagctgtctgtgtggcat

SEQ ID NO: 1305016 - DNA, 25 bp, Homo sapien
tagcaaggcagaaccagttgctctt

SEQ ID NO: 1305017 - DNA, 25 bp, Homo sapien
tgaagcggaaggcagacctaaagcg

SEQ ID NO: 1305018 - DNA, 25 bp, Homo sapien
aaaggccctatccatgtcaagcttg

SEQ ID NO: 1305019 - DNA, 25 bp, Homo sapien
gaccatctaagtagccattttcgaa

SEQ ID NO: 1305020 - DNA, 25 bp, Homo sapien
acctaaagcgccaccttcgttgtca

SEQ ID NO: 1305021 - DNA, 25 bp, Homo sapien
gaatttggcatagacagcctcccca

SEQ ID NO: 1305022 - DNA, 25 bp, Homo sapien
caggcatgtaaactcatctgcagaa

SEQ ID NO: 1305023 - DNA, 25 bp, Homo sapien
gggaaccaggcgctacagactgtgt

SEQ ID NO: 1305024 - DNA, 25 bp, Homo sapien
cattgacttggaagctgaacaacat

SEQ ID NO: 1305025 - DNA, 25 bp, Homo sapien
gaagatgagaatagatcctatgtgg

SEQ ID NO: 1305026 - DNA, 25 bp, Homo sapien
ggcacttgagtgaagatgagaatag

SEQ ID NO: 1305027 - DNA, 25 bp, Homo sapien
agatggcacttgagtgaagatgaga

SEQ ID NO: 1305028 - DNA, 25 bp, Homo sapien
ttatgtccccatcagatggagataa

SEQ ID NO: 1305029 - DNA, 25 bp, Homo sapien
acaggccattgtatccattctgaac

SEQ ID NO: 1305030 - DNA, 25 bp, Homo sapien
gaaattaagcccaacattaggtagc

SEQ ID NO: 1305031 - DNA, 25 bp, Homo sapien
cttgagttggcttgatggatgaaca

SEQ ID NO: 1305032 - DNA, 25 bp, Homo sapien
tctatggtcggagtctagttaacaa

SEQ ID NO: 1305033 - DNA, 25 bp, Homo sapien
ctcccctttgggctgggcccagtgg

SEQ ID NO: 1305034 - DNA, 25 bp, Homo sapien
cttctcccctttgggctgggcccag

SEQ ID NO: 1305035 - DNA, 25 bp, Homo sapien
agaggctgcggtgggctgaggttgc

SEQ ID NO: 1305036 - DNA, 25 bp, Homo sapien
caaacttttctcctagtatacaaag

SEQ ID NO: 1305037 - DNA, 25 bp, Homo sapien
gccttaggatcactgagtgaaggat

SEQ ID NO: 1305038 - DNA, 25 bp, Homo sapien
tggacgatacagcaagatcttggct

SEQ ID NO: 1305039 - DNA, 25 bp, Homo sapien
cacttgagccttaggatcactgagt

SEQ ID NO: 1305040 - DNA, 25 bp, Homo sapien
cctggacgatacagcaagatcttgg

SEQ ID NO: 1305041 - DNA, 25 bp, Homo sapien
cactcccgtgggatttggccagagg

SEQ ID NO: 1305042 - DNA, 25 bp, Homo sapien
gagccaatgggagccgcgagaaggg

SEQ ID NO: 1305043 - DNA, 25 bp, Homo sapien
gggcggagcctggacgcgtgatgcc

SEQ ID NO: 1305044 - DNA, 25 bp, Homo sapien
gaggtgtcggcgccccaggagtccg

SEQ ID NO: 1305045 - DNA, 25 bp, Homo sapien
tgggcagaatctggtaatccccaag

SEQ ID NO: 1305046 - DNA, 25 bp, Homo sapien
tgagggagtagccccagtagttcat

SEQ ID NO: 1305047 - DNA, 25 bp, Homo sapien
gccttctgcaggtcagattgggtga

SEQ ID NO: 1305048 - DNA, 25 bp, Homo sapien
tctggtaatccccaagccttctgca

SEQ ID NO: 1305049 - DNA, 25 bp, Homo sapien
ggcacacctactgccacagcagaga

SEQ ID NO: 1305050 - DNA, 25 bp, Homo sapien
ctggagggcttgcattgcactggaa

SEQ ID NO: 1305051 - DNA, 25 bp, Homo sapien
ggatagctctgtcctatagcaacct

SEQ ID NO: 1305052 - DNA, 25 bp, Homo sapien
gaaagcgtgagagaaaaatcagggc

SEQ ID NO: 1305053 - DNA, 25 bp, Homo sapien
gtcaatgatcacaaaaacttccggg

SEQ ID NO: 1305054 - DNA, 25 bp, Homo sapien
tgatcacaaaaacttccgggttctc

SEQ ID NO: 1305055 - DNA, 25 bp, Homo sapien
caatgatcacaaaaacttccgggtt

SEQ ID NO: 1305056 - DNA, 25 bp, Homo sapien
aatgtcaatgatcacaaaaacttcc

SEQ ID NO: 1305057 - DNA, 25 bp, Homo sapien
ttatagacctgcattgctgaatatg

SEQ ID NO: 1305058 - DNA, 25 bp, Homo sapien
acaagacaccgggtctatttgagag

SEQ ID NO: 1305059 - DNA, 25 bp, Homo sapien
tatttgggacataaacattgagtac

SEQ ID NO: 1305060 - DNA, 25 bp, Homo sapien
tccacctgggtgtatagaaattgtc

SEQ ID NO: 1305061 - DNA, 25 bp, Homo sapien
cacaatggagttgggacatggaact

SEQ ID NO: 1305062 - DNA, 25 bp, Homo sapien
tacaacagaagcactgagtagctgc

SEQ ID NO: 1305063 - DNA, 25 bp, Homo sapien
gattttcctaccatagagtgaggcc

SEQ ID NO: 1305064 - DNA, 25 bp, Homo sapien
catacaggtcggcaaatacagaatc

SEQ ID NO: 1305065 - DNA, 25 bp, Homo sapien
tgaacaaacttgaccctagaaccca

SEQ ID NO: 1305066 - DNA, 25 bp, Homo sapien
ggtgcttggacaatgaaaattcttc

SEQ ID NO: 1305067 - DNA, 25 bp, Homo sapien
gagggtgcttggacaatgaaaattc

SEQ ID NO: 1305068 - DNA, 25 bp, Homo sapien
ctgagggtgcttggacaatgaaaat

SEQ ID NO: 1305069 - DNA, 25 bp, Homo sapien
gggtgcttggacaatgaaaattctt

SEQ ID NO: 1305070 - DNA, 25 bp, Homo sapien
aatgtggttaacatgctagaaagcc

SEQ ID NO: 1305071 - DNA, 25 bp, Homo sapien
cagggagctgttaagtttcattttc

SEQ ID NO: 1305072 - DNA, 25 bp, Homo sapien
ttgtcagaagatacagctgttgagg

SEQ ID NO: 1305073 - DNA, 25 bp, Homo sapien
gagggacgtgtgtgcagtgtcatca

SEQ ID NO: 1305074 - DNA, 25 bp, Homo sapien
aggcgtggtagcaggcgcgtataat

SEQ ID NO: 1305075 - DNA, 25 bp, Homo sapien
tggtagcaggcgcgtataatctcag

SEQ ID NO: 1305076 - DNA, 25 bp, Homo sapien
gtagcaggcgcgtataatctcagct

SEQ ID NO: 1305077 - DNA, 25 bp, Homo sapien
cgtggtagcaggcgcgtataatctc

SEQ ID NO: 1305078 - DNA, 25 bp, Homo sapien
tttgatcaatgctaagtactttcac

SEQ ID NO: 1305079 - DNA, 25 bp, Homo sapien
gaaatttctttgatcaatgctaagt

SEQ ID NO: 1305080 - DNA, 25 bp, Homo sapien
gatcaatgctaagtactttcacttc

SEQ ID NO: 1305081 - DNA, 25 bp, Homo sapien
ccaattgatcgtaatttgaaatttc

SEQ ID NO: 1305082 - DNA, 25 bp, Homo sapien
taatagactatctactaaaaatctt

SEQ ID NO: 1305083 - DNA, 25 bp, Homo sapien
gtctcaacctgctgagcatctggga

SEQ ID NO: 1305084 - DNA, 25 bp, Homo sapien
tctcaacctgctgagcatctgggac

SEQ ID NO: 1305085 - DNA, 25 bp, Homo sapien
agttcataatagactatctactaaa

SEQ ID NO: 1305086 - DNA, 25 bp, Homo sapien
tttctagaaaacaatagcacacaac

SEQ ID NO: 1305087 - DNA, 25 bp, Homo sapien
caaccttttctagaaaacaatagca

SEQ ID NO: 1305088 - DNA, 25 bp, Homo sapien
tctagaaaacaatagcacacaactt

SEQ ID NO: 1305089 - DNA, 25 bp, Homo sapien
cttttctagaaaacaatagcacaca

SEQ ID NO: 1305090 - DNA, 25 bp, Homo sapien
taaaatgttagctaaaataggacaa

SEQ ID NO: 1305091 - DNA, 25 bp, Homo sapien
aaaataggacaacaaatgagatata

SEQ ID NO: 1305092 - DNA, 25 bp, Homo sapien
aaatgttagctaaaataggacaaca

SEQ ID NO: 1305093 - DNA, 25 bp, Homo sapien
ggacaacaaatgagatatatatgta

SEQ ID NO: 1305094 - DNA, 25 bp, Homo sapien
ggcaggaggattgccggaagctagg

SEQ ID NO: 1305095 - DNA, 25 bp, Homo sapien
gattgccggaagctaggagttcaag

SEQ ID NO: 1305096 - DNA, 25 bp, Homo sapien
gactagcctcgacaacatagcaaca

SEQ ID NO: 1305097 - DNA, 25 bp, Homo sapien
cagcactttgcaaaattgaggcagg

SEQ ID NO: 1305098 - DNA, 25 bp, Homo sapien
tgaacttataaagccattcatccaa

SEQ ID NO: 1305099 - DNA, 25 bp, Homo sapien
ctgaacttataaagccattcatcca

SEQ ID NO: 1305100 - DNA, 25 bp, Homo sapien
tactgcacaattctatacagtactg

SEQ ID NO: 1305101 - DNA, 25 bp, Homo sapien
tctggttctttttgtgaaaatatac

SEQ ID NO: 1305102 - DNA, 25 bp, Homo sapien
aaagactcatccttaattttctggt

SEQ ID NO: 1305103 - DNA, 25 bp, Homo sapien
tgcacaattctatacagtactgtat

SEQ ID NO: 1305104 - DNA, 25 bp, Homo sapien
gggctccactgtcccagtatctgtc

SEQ ID NO: 1305105 - DNA, 25 bp, Homo sapien
tgtcccagtatctgtcatgtaacca

SEQ ID NO: 1305106 - DNA, 25 bp, Homo sapien
tccactgtcccagtatctgtcatgt

SEQ ID NO: 1305107 - DNA, 25 bp, Homo sapien
ccagtatctgtcatgtaaccaaaca

SEQ ID NO: 1305108 - DNA, 25 bp, Homo sapien
gcttcctccagagtatctccccatg

SEQ ID NO: 1305109 - DNA, 25 bp, Homo sapien
tgcacattgctcaaatgcttcctcc

SEQ ID NO: 1305110 - DNA, 25 bp, Homo sapien
gcacattgctcaaatgcttcctcca

SEQ ID NO: 1305111 - DNA, 25 bp, Homo sapien
tccagagtatctccccatgcgtgta

SEQ ID NO: 1305112 - DNA, 25 bp, Homo sapien
aagaagtatattcatgctctgtgta

SEQ ID NO: 1305113 - DNA, 25 bp, Homo sapien
taaagaagtatattcatgctctgtg

SEQ ID NO: 1305114 - DNA, 25 bp, Homo sapien
aaagaagtatattcatgctctgtgt

SEQ ID NO: 1305115 - DNA, 25 bp, Homo sapien
ctaaagaagtatattcatgctctgt

SEQ ID NO: 1305116 - DNA, 25 bp, Homo sapien
tttgatagcaggcaaagtcaaaata

SEQ ID NO: 1305117 - DNA, 25 bp, Homo sapien
aatttgatagcaggcaaagtcaaaa

SEQ ID NO: 1305118 - DNA, 25 bp, Homo sapien
gaaaatttgatagcaggcaaagtca

SEQ ID NO: 1305119 - DNA, 25 bp, Homo sapien
aaaatttgatagcaggcaaagtcaa

SEQ ID NO: 1305120 - DNA, 25 bp, Homo sapien
cctgcaaaactgagtgctttcaaac

SEQ ID NO: 1305121 - DNA, 25 bp, Homo sapien
gaaggaaccaaaatgagaggagaaa

SEQ ID NO: 1305122 - DNA, 25 bp, Homo sapien
caaaactgagtgctttcaaaccatc

SEQ ID NO: 1305123 - DNA, 25 bp, Homo sapien
tgtgaaggaaccaaaatgagaggag

SEQ ID NO: 1305124 - DNA, 25 bp, Homo sapien
tactgacgtggtttcaaaggaatga

SEQ ID NO: 1305125 - DNA, 25 bp, Homo sapien
ttcagtcttcctactgacgtggttt

SEQ ID NO: 1305126 - DNA, 25 bp, Homo sapien
cctactgacgtggtttcaaaggaat

SEQ ID NO: 1305127 - DNA, 25 bp, Homo sapien
tcttcctactgacgtggtttcaaag

SEQ ID NO: 1305128 - DNA, 25 bp, Homo sapien
tggacatctgctgtatgatccaaat

SEQ ID NO: 1305129 - DNA, 25 bp, Homo sapien
acatacttccaattttgttacatag

SEQ ID NO: 1305130 - DNA, 25 bp, Homo sapien
gaatattatgacaactaaactctga

SEQ ID NO: 1305131 - DNA, 25 bp, Homo sapien
agaatattatgacaactaaactctg

SEQ ID NO: 1305132 - DNA, 25 bp, Homo sapien
ccaattttgttacatagaatattat

SEQ ID NO: 1305133 - DNA, 25 bp, Homo sapien
ccttggccttgttgtacccaagcga

SEQ ID NO: 1305134 - DNA, 25 bp, Homo sapien
ggccttgttgtacccaagcgagtta

SEQ ID NO: 1305135 - DNA, 25 bp, Homo sapien
ttgttgtacccaagcgagttagaaa

SEQ ID NO: 1305136 - DNA, 25 bp, Homo sapien
ccttgttgtacccaagcgagttaga

SEQ ID NO: 1305137 - DNA, 25 bp, Homo sapien
cccagtaggtgcgactacaggacta

SEQ ID NO: 1305138 - DNA, 25 bp, Homo sapien
ttcaagaaatcctccggcttaggcc

SEQ ID NO: 1305139 - DNA, 25 bp, Homo sapien
gcgactacaggactacacacacatg

SEQ ID NO: 1305140 - DNA, 25 bp, Homo sapien
tcaagaaatcctccggcttaggcct

SEQ ID NO: 1305141 - DNA, 25 bp, Homo sapien
gatatgctaggaggtatgccagctc

SEQ ID NO: 1305142 - DNA, 25 bp, Homo sapien
taaaagtcagatttgtgctccccaa

SEQ ID NO: 1305143 - DNA, 25 bp, Homo sapien
gcagcgcgggctatgatcgctccat

SEQ ID NO: 1305144 - DNA, 25 bp, Homo sapien
aaaccacagctacctttagggatga

SEQ ID NO: 1305145 - DNA, 25 bp, Homo sapien
ttcctattgactggcggatacttgg

SEQ ID NO: 1305146 - DNA, 25 bp, Homo sapien
gactggcggatacttggccttgatc

SEQ ID NO: 1305147 - DNA, 25 bp, Homo sapien
tattgactggcggatacttggcctt

SEQ ID NO: 1305148 - DNA, 25 bp, Homo sapien
actcgtacttcctattgactggcgg

SEQ ID NO: 1305149 - DNA, 25 bp, Homo sapien
tcagtactctgaaagggtcgtaagc

SEQ ID NO: 1305150 - DNA, 25 bp, Homo sapien
cctttctcggagttggctgttgacc

SEQ ID NO: 1305151 - DNA, 25 bp, Homo sapien
aaattgataactagacccgaaggca

SEQ ID NO: 1305152 - DNA, 25 bp, Homo sapien
tgaagggcaccttgaatgaaacccg

SEQ ID NO: 1305153 - DNA, 25 bp, Homo sapien
gcagtcacgtgatctccgctgactg

SEQ ID NO: 1305154 - DNA, 25 bp, Homo sapien
gtcacgtgatctccgctgactgcaa

SEQ ID NO: 1305155 - DNA, 25 bp, Homo sapien
agtcacgtgatctccgctgactgca

SEQ ID NO: 1305156 - DNA, 25 bp, Homo sapien
gtgcagtcacgtgatctccgctgac

SEQ ID NO: 1305157 - DNA, 25 bp, Homo sapien
tgcttattggactagtggatcacaa

SEQ ID NO: 1305158 - DNA, 25 bp, Homo sapien
caaatattggccatcccatacctac

SEQ ID NO: 1305159 - DNA, 25 bp, Homo sapien
gacttaattccccaaggctgaaatc

SEQ ID NO: 1305160 - DNA, 25 bp, Homo sapien
gaatgactagctaggtttcgaaagc

SEQ ID NO: 1305161 - DNA, 25 bp, Homo sapien
tgacattgcgatctgctagccttgg

SEQ ID NO: 1305162 - DNA, 25 bp, Homo sapien
acattgcgatctgctagccttggcc

SEQ ID NO: 1305163 - DNA, 25 bp, Homo sapien
tcctgacattgcgatctgctagcct

SEQ ID NO: 1305164 - DNA, 25 bp, Homo sapien
catctcctgacattgcgatctgcta

SEQ ID NO: 1305165 - DNA, 25 bp, Homo sapien
gataacccagtaacattgggccggc

SEQ ID NO: 1305166 - DNA, 25 bp, Homo sapien
tgtgcaactttgataacactgatgt

SEQ ID NO: 1305167 - DNA, 25 bp, Homo sapien
ctgataacccagtaacattgggccg

SEQ ID NO: 1305168 - DNA, 25 bp, Homo sapien
cagtgagggatgtgtgcaactttga

SEQ ID NO: 1305169 - DNA, 25 bp, Homo sapien
tgcccagagacttgatggaaactct

SEQ ID NO: 1305170 - DNA, 25 bp, Homo sapien
tagcatgcccagagacttgatggaa

SEQ ID NO: 1305171 - DNA, 25 bp, Homo sapien
gggtagcatgcccagagacttgatg

SEQ ID NO: 1305172 - DNA, 25 bp, Homo sapien
tgggtgggtagcatgcccagagact

SEQ ID NO: 1305173 - DNA, 25 bp, Homo sapien
ggattgagttgtacacccagttggt

SEQ ID NO: 1305174 - DNA, 25 bp, Homo sapien
gctctttgaaggtaagactatcctg

SEQ ID NO: 1305175 - DNA, 25 bp, Homo sapien
cccacatttggtgttagaagtaacg

SEQ ID NO: 1305176 - DNA, 25 bp, Homo sapien
tcaaattatcagacctgaggaggca

SEQ ID NO: 1305177 - DNA, 25 bp, Homo sapien
tagagccaaatgaggtaggtgtctg

SEQ ID NO: 1305178 - DNA, 25 bp, Homo sapien
tgctattagcccaaaccgtgggtgt

SEQ ID NO: 1305179 - DNA, 25 bp, Homo sapien
taggtaccaccgataatgctattag

SEQ ID NO: 1305180 - DNA, 25 bp, Homo sapien
taacccaggtctaaagtagctacag

SEQ ID NO: 1305181 - DNA, 25 bp, Homo sapien
cactcgtggcacaaaagaatggaaa

SEQ ID NO: 1305182 - DNA, 25 bp, Homo sapien
tgtttccgggttacagatttggcca

SEQ ID NO: 1305183 - DNA, 25 bp, Homo sapien
tggtttgggtcaacacaaggcaaga

SEQ ID NO: 1305184 - DNA, 25 bp, Homo sapien
gttgacatgttctgcctccggccaa

SEQ ID NO: 1305185 - DNA, 25 bp, Homo sapien
tatttggatgcctcctgtttgtcaa

SEQ ID NO: 1305186 - DNA, 25 bp, Homo sapien
gaacttctgaggtttagttactgca

SEQ ID NO: 1305187 - DNA, 25 bp, Homo sapien
tagatcattaacctcaattgcaagg

SEQ ID NO: 1305188 - DNA, 25 bp, Homo sapien
tcaacacaaaggtagttagtagatc

SEQ ID NO: 1305189 - DNA, 25 bp, Homo sapien
gcctgttccaggctcttgggtagta

SEQ ID NO: 1305190 - DNA, 25 bp, Homo sapien
tgttccaggctcttgggtagtagca

SEQ ID NO: 1305191 - DNA, 25 bp, Homo sapien
ttccaggctcttgggtagtagcata

SEQ ID NO: 1305192 - DNA, 25 bp, Homo sapien
caggctcttgggtagtagcatagcc

SEQ ID NO: 1305193 - DNA, 25 bp, Homo sapien
tcagccagtattagatgagatttgt

SEQ ID NO: 1305194 - DNA, 25 bp, Homo sapien
cagccagtattagatgagatttgta

SEQ ID NO: 1305195 - DNA, 25 bp, Homo sapien
gctggagttgcaccccatttcttaa

SEQ ID NO: 1305196 - DNA, 25 bp, Homo sapien
gcaagactgagccttagctgttcca

SEQ ID NO: 1305197 - DNA, 25 bp, Homo sapien
catttcttaactgcctctggcgttc

SEQ ID NO: 1305198 - DNA, 25 bp, Homo sapien
tgcctctggcgttcttccatttcct

SEQ ID NO: 1305199 - DNA, 25 bp, Homo sapien
tccaaagctccttaaagtcagagag

SEQ ID NO: 1305200 - DNA, 25 bp, Homo sapien
ttacacaactagtggaagtccatgt

SEQ ID NO: 1305201 - DNA, 25 bp, Homo sapien
gagggtgttggctatcctattgcta

SEQ ID NO: 1305202 - DNA, 25 bp, Homo sapien
tacaaccttagtgtcattgaggagg

SEQ ID NO: 1305203 - DNA, 25 bp, Homo sapien
gcactgtttgatactctggctgaat

SEQ ID NO: 1305204 - DNA, 25 bp, Homo sapien
caatccgcactgtttgatactctgg

SEQ ID NO: 1305205 - DNA, 25 bp, Homo sapien
gatactctggctgaatctcagcttt

SEQ ID NO: 1305206 - DNA, 25 bp, Homo sapien
tgtggcacatcaatccgcactgttt

SEQ ID NO: 1305207 - DNA, 25 bp, Homo sapien
tctttgagggcaggagcattacccc

SEQ ID NO: 1305208 - DNA, 25 bp, Homo sapien
gcacccggcctctggagtacaaact

SEQ ID NO: 1305209 - DNA, 25 bp, Homo sapien
tgtttaattgatgccaagactgcca

SEQ ID NO: 1305210 - DNA, 25 bp, Homo sapien
tattgttgatctatgaaatgtcccc

SEQ ID NO: 1305211 - DNA, 25 bp, Homo sapien
ggcaatagaagagactccgactaaa

SEQ ID NO: 1305212 - DNA, 25 bp, Homo sapien
cctactatacaaacaattggccggg

SEQ ID NO: 1305213 - DNA, 25 bp, Homo sapien
taccaagagtgtatcaggccagata

SEQ ID NO: 1305214 - DNA, 25 bp, Homo sapien
tagccacgtccatggtgttaggcgc

SEQ ID NO: 1305215 - DNA, 25 bp, Homo sapien
ttcttttcatgcccaatgggcctac

SEQ ID NO: 1305216 - DNA, 25 bp, Homo sapien
cagttcttttcatgcccaatgggcc

SEQ ID NO: 1305217 - DNA, 25 bp, Homo sapien
agttcttttcatgcccaatgggcct

SEQ ID NO: 1305218 - DNA, 25 bp, Homo sapien
tcagttcttttcatgcccaatgggc

SEQ ID NO: 1305219 - DNA, 25 bp, Homo sapien
ggaactgaggctcatactcctcctc

SEQ ID NO: 1305220 - DNA, 25 bp, Homo sapien
tctgcagagctttggtcccagcttc

SEQ ID NO: 1305221 - DNA, 25 bp, Homo sapien
ctcacaagtgcgatctggtcctcca

SEQ ID NO: 1305222 - DNA, 25 bp, Homo sapien
tcctgttttgcaggcggagctgccg

SEQ ID NO: 1305223 - DNA, 25 bp, Homo sapien
aggggcttctagttgttgccgcagc

SEQ ID NO: 1305224 - DNA, 25 bp, Homo sapien
aaactgggcagagagtcgccggctt

SEQ ID NO: 1305225 - DNA, 25 bp, Homo sapien
tctgcttctgataggcatcccggag

SEQ ID NO: 1305226 - DNA, 25 bp, Homo sapien
tgagagctgggttgcccttgtagtc

SEQ ID NO: 1305227 - DNA, 25 bp, Homo sapien
gctggttcccggagcaatacaagct

SEQ ID NO: 1305228 - DNA, 25 bp, Homo sapien
gcttggacacactgctggaaacgcc

SEQ ID NO: 1305229 - DNA, 25 bp, Homo sapien
ggaaatcggcaaactgagccacgtc

SEQ ID NO: 1305230 - DNA, 25 bp, Homo sapien
tattggtaggccacacattcctttg

SEQ ID NO: 1305231 - DNA, 25 bp, Homo sapien
tccacaaactgtatccgatctggct

SEQ ID NO: 1305232 - DNA, 25 bp, Homo sapien
gtctctccctcataaacaacgtgct

SEQ ID NO: 1305233 - DNA, 25 bp, Homo sapien
ggttagatttctccgcccttgtgac

SEQ ID NO: 1305234 - DNA, 25 bp, Homo sapien
tatccgatctggctccgtggtttcc

SEQ ID NO: 1305235 - DNA, 25 bp, Homo sapien
gagaatgtcttcgaggtttaaggac

SEQ ID NO: 1305236 - DNA, 25 bp, Homo sapien
gagtgtctcatcaaggtcacctgtg

SEQ ID NO: 1305237 - DNA, 25 bp, Homo sapien
ggacccctctgaagatagagtaact

SEQ ID NO: 1305238 - DNA, 25 bp, Homo sapien
tgcatggcctcctcaatatacaggg

SEQ ID NO: 1305239 - DNA, 25 bp, Homo sapien
gaagaggagaattggcctctactct

SEQ ID NO: 1305240 - DNA, 25 bp, Homo sapien
agaggagaattggcctctactcttg

SEQ ID NO: 1305241 - DNA, 25 bp, Homo sapien
atgtcagcagccattcgtctgctcc

SEQ ID NO: 1305242 - DNA, 25 bp, Homo sapien
cacggtgtagatcccctgccagcat

SEQ ID NO: 1305243 - DNA, 25 bp, Homo sapien
actctgtcaatccacccctccacac

SEQ ID NO: 1305244 - DNA, 25 bp, Homo sapien
cacacacccaaccacggtgtagatc

SEQ ID NO: 1305245 - DNA, 25 bp, Homo sapien
ctggccatggctgcgcgaccccggg

SEQ ID NO: 1305246 - DNA, 25 bp, Homo sapien
gctggccatggctgcgcgaccccgg

SEQ ID NO: 1305247 - DNA, 25 bp, Homo sapien
gccgcactgccagctgcaaccgaca

SEQ ID NO: 1305248 - DNA, 25 bp, Homo sapien
agctgcaaccgacaccggatcccgg

SEQ ID NO: 1305249 - DNA, 25 bp, Homo sapien
ctggcggccgcgttattaatagccg

SEQ ID NO: 1305250 - DNA, 25 bp, Homo sapien
tggcggccgcgttattaatagccgg

SEQ ID NO: 1305251 - DNA, 25 bp, Homo sapien
gagaactgcggaggagtttacgcct

SEQ ID NO: 1305252 - DNA, 25 bp, Homo sapien
tgtccccggcagctgtcgtgaaggg

SEQ ID NO: 1305253 - DNA, 25 bp, Homo sapien
tcctttcgtgaggtcccgttgcagg

SEQ ID NO: 1305254 - DNA, 25 bp, Homo sapien
ttgggcgggctgctcaaagggagcc

SEQ ID NO: 1305255 - DNA, 25 bp, Homo sapien
ccctggtggaatccctggccatgtc

SEQ ID NO: 1305256 - DNA, 25 bp, Homo sapien
catgactcttaaagcccctggtgga

SEQ ID NO: 1305257 - DNA, 25 bp, Homo sapien
tggccatgtccagccccgtcagtgt

SEQ ID NO: 1305258 - DNA, 25 bp, Homo sapien
agcgcccggcaattccatgactctt

SEQ ID NO: 1305259 - DNA, 25 bp, Homo sapien
gctcttgctaccatatgtggcttcc

SEQ ID NO: 1305260 - DNA, 25 bp, Homo sapien
gcttccactggataccagggctgac

SEQ ID NO: 1305261 - DNA, 25 bp, Homo sapien
ctttggacttcaggtccaaggctct

SEQ ID NO: 1305262 - DNA, 25 bp, Homo sapien
gacttcaggtccaaggctcttgcta

SEQ ID NO: 1305263 - DNA, 25 bp, Homo sapien
tcccagggctgttcggagcattaaa

SEQ ID NO: 1305264 - DNA, 25 bp, Homo sapien
tgtgaattggaggtgatcggcccta

SEQ ID NO: 1305265 - DNA, 25 bp, Homo sapien
atcacagaagtgaagcaccccagct

SEQ ID NO: 1305266 - DNA, 25 bp, Homo sapien
gcagtccagcaaaggctagttgtta

SEQ ID NO: 1305267 - DNA, 25 bp, Homo sapien
gctgccgaggactggtggagtgcat

SEQ ID NO: 1305268 - DNA, 25 bp, Homo sapien
gcttgctgccgaggactggtggagt

SEQ ID NO: 1305269 - DNA, 25 bp, Homo sapien
tgccgaggactggtggagtgcatgt

SEQ ID NO: 1305270 - DNA, 25 bp, Homo sapien
ttgctgccgaggactggtggagtgc

SEQ ID NO: 1305271 - DNA, 25 bp, Homo sapien
gggcaagcggcgcaagaagaaggcg

SEQ ID NO: 1305272 - DNA, 25 bp, Homo sapien
ccgggccaagaaggcggaggacaag

SEQ ID NO: 1305273 - DNA, 25 bp, Homo sapien
caagggcaaaggccgaggtaaggcg

SEQ ID NO: 1305274 - DNA, 25 bp, Homo sapien
gctccggcgcgtccggcctccgccg

SEQ ID NO: 1305275 - DNA, 25 bp, Homo sapien
ggtccgcgcgcggcgtgttggaggg

SEQ ID NO: 1305276 - DNA, 25 bp, Homo sapien
gtgcggccgagggggctctgccggg

SEQ ID NO: 1305277 - DNA, 25 bp, Homo sapien
cgcgcggcgtgttggaggggggtga

SEQ ID NO: 1305278 - DNA, 25 bp, Homo sapien
ccgggggtccgcgcgcggcgtgttg

SEQ ID NO: 1305279 - DNA, 25 bp, Homo sapien
ctgggtctggaaggtcaaccgcact

SEQ ID NO: 1305280 - DNA, 25 bp, Homo sapien
agggctgagtccgaacacttccacc

SEQ ID NO: 1305281 - DNA, 25 bp, Homo sapien
tcagagacttaacgctggcctgtgg

SEQ ID NO: 1305282 - DNA, 25 bp, Homo sapien
agcaggaagtgctggtagcccgact

SEQ ID NO: 1305283 - DNA, 25 bp, Homo sapien
cctctagcccgttggcagacttggg

SEQ ID NO: 1305284 - DNA, 25 bp, Homo sapien
ccttggttaggaggagtgaaatctc

SEQ ID NO: 1305285 - DNA, 25 bp, Homo sapien
ttccttgtgcggacccaaaggccac

SEQ ID NO: 1305286 - DNA, 25 bp, Homo sapien
aaaggccacctctagcccgttggca

SEQ ID NO: 1305287 - DNA, 25 bp, Homo sapien
gccagtataagtactcatttcatta

SEQ ID NO: 1305288 - DNA, 25 bp, Homo sapien
agtgccagtataagtactcatttca

SEQ ID NO: 1305289 - DNA, 25 bp, Homo sapien
cagtataagtactcatttcattagt

SEQ ID NO: 1305290 - DNA, 25 bp, Homo sapien
tcaagtgccagtataagtactcatt

SEQ ID NO: 1305291 - DNA, 25 bp, Homo sapien
caccaggagcaaggtgtcttctcag

SEQ ID NO: 1305292 - DNA, 25 bp, Homo sapien
ttgaggagcccgcaggtgtgcttcc

SEQ ID NO: 1305293 - DNA, 25 bp, Homo sapien
tgcctgagtctctgccctggtaaac

SEQ ID NO: 1305294 - DNA, 25 bp, Homo sapien
gtgtgcttcccggtgtgccctccgt

SEQ ID NO: 1305295 - DNA, 25 bp, Homo sapien
gagtgtgtccctgcgtaagctgaag

SEQ ID NO: 1305296 - DNA, 25 bp, Homo sapien
tcagcattcggagcagtgggcagtt

SEQ ID NO: 1305297 - DNA, 25 bp, Homo sapien
tactcgagccaaagtggtactccca

SEQ ID NO: 1305298 - DNA, 25 bp, Homo sapien
tacggctagcaatagcgtggtaccc

SEQ ID NO: 1305299 - DNA, 25 bp, Homo sapien
ggtggcagaactccggagcatctca

SEQ ID NO: 1305300 - DNA, 25 bp, Homo sapien
ctggagcggcccgtgtcccctgaga

SEQ ID NO: 1305301 - DNA, 25 bp, Homo sapien
aggcctctcaagtgctcagcccaac

SEQ ID NO: 1305302 - DNA, 25 bp, Homo sapien
caggctgacctccagcggaatctgg

SEQ ID NO: 1305303 - DNA, 25 bp, Homo sapien
tcctgttaggatcttctgagcttgt

SEQ ID NO: 1305304 - DNA, 25 bp, Homo sapien
tgctgctgggtgtacgctgcacctg

SEQ ID NO: 1305305 - DNA, 25 bp, Homo sapien
cagtgagcactgttctgctcagagc

SEQ ID NO: 1305306 - DNA, 25 bp, Homo sapien
gctgcatgaaaccaggccctggcag

SEQ ID NO: 1305307 - DNA, 25 bp, Homo sapien
tgccaaagggactgttaaggtgtct

SEQ ID NO: 1305308 - DNA, 25 bp, Homo sapien
tcttctgcctagtactgccaaaggg

SEQ ID NO: 1305309 - DNA, 25 bp, Homo sapien
tgttttgcctgctgcacacattgga

SEQ ID NO: 1305310 - DNA, 25 bp, Homo sapien
tggacccaagtatgggcctcttctg

SEQ ID NO: 1305311 - DNA, 25 bp, Homo sapien
gcctagctggatcaagggaaattcc

SEQ ID NO: 1305312 - DNA, 25 bp, Homo sapien
cgcagctgatttagggagtgtccca

SEQ ID NO: 1305313 - DNA, 25 bp, Homo sapien
agaagtaccccaccctctatgaaga

SEQ ID NO: 1305314 - DNA, 25 bp, Homo sapien
ctgatgctaacaacacgcagctgat

SEQ ID NO: 1305315 - DNA, 25 bp, Homo sapien
gagtaagcagacattgggaaagttg

SEQ ID NO: 1305316 - DNA, 25 bp, Homo sapien
gccaaccacttggtagaccactagg

SEQ ID NO: 1305317 - DNA, 25 bp, Homo sapien
aagttgccaaccacttggtagacca

SEQ ID NO: 1305318 - DNA, 25 bp, Homo sapien
tggtagaccactaggttctctgttt

SEQ ID NO: 1305319 - DNA, 25 bp, Homo sapien
gtaagctgccccttgccgagttctg

SEQ ID NO: 1305320 - DNA, 25 bp, Homo sapien
ggataactccaagaaaacctgggca

SEQ ID NO: 1305321 - DNA, 25 bp, Homo sapien
gtaattagcctagtccaggtaccag

SEQ ID NO: 1305322 - DNA, 25 bp, Homo sapien
gagttctgcaccgaataaagagtcc

SEQ ID NO: 1305323 - DNA, 25 bp, Homo sapien
ccactgtgcgatgcactcctcagaa

SEQ ID NO: 1305324 - DNA, 25 bp, Homo sapien
tgtgcgatgcactcctcagaaattt

SEQ ID NO: 1305325 - DNA, 25 bp, Homo sapien
gatgcactcctcagaaattttgaag

SEQ ID NO: 1305326 - DNA, 25 bp, Homo sapien
tcccccctttcagcgatttacagga

SEQ ID NO: 1305327 - DNA, 25 bp, Homo sapien
gagctcctcatctggttggcccttt

SEQ ID NO: 1305328 - DNA, 25 bp, Homo sapien
cagaggttcaacctggcggtttatc

SEQ ID NO: 1305329 - DNA, 25 bp, Homo sapien
cagagcctgccggagggtccagagg

SEQ ID NO: 1305330 - DNA, 25 bp, Homo sapien
tttcatagcccttcacaaacacgtg

SEQ ID NO: 1305331 - DNA, 25 bp, Homo sapien
gcatcaacttttggcatcagcaagg

SEQ ID NO: 1305332 - DNA, 25 bp, Homo sapien
taacgtagcgaggactttatagaca

SEQ ID NO: 1305333 - DNA, 25 bp, Homo sapien
tttagggcatcctcagtaccagagc

SEQ ID NO: 1305334 - DNA, 25 bp, Homo sapien
caggaggtcctcttatcttgctaca

SEQ ID NO: 1305335 - DNA, 25 bp, Homo sapien
cttgggcacgaactgtaccaggccg

SEQ ID NO: 1305336 - DNA, 25 bp, Homo sapien
aggccgctcaccacagtccgtggtt

SEQ ID NO: 1305337 - DNA, 25 bp, Homo sapien
gtggttcagcttcccccacgtcaat

SEQ ID NO: 1305338 - DNA, 25 bp, Homo sapien
cttgggactcgactcctctcatctt

SEQ ID NO: 1305339 - DNA, 25 bp, Homo sapien
acatacaggctgtctgcatctgggt

SEQ ID NO: 1305340 - DNA, 25 bp, Homo sapien
tacatacaggctgtctgcatctggg

SEQ ID NO: 1305341 - DNA, 25 bp, Homo sapien
catacaggctgtctgcatctgggtg

SEQ ID NO: 1305342 - DNA, 25 bp, Homo sapien
ctacatacaggctgtctgcatctgg

SEQ ID NO: 1305343 - DNA, 25 bp, Homo sapien
gaagcagcctggtgaactcttggat

SEQ ID NO: 1305344 - DNA, 25 bp, Homo sapien
tgagaagcaaatccatgtcgaaggg

SEQ ID NO: 1305345 - DNA, 25 bp, Homo sapien
aatgggctctgatggtatactctgc

SEQ ID NO: 1305346 - DNA, 25 bp, Homo sapien
tcatcgtccattagagaagcagcct

SEQ ID NO: 1305347 - DNA, 25 bp, Homo sapien
tggaattagacacctgcactctgac

SEQ ID NO: 1305348 - DNA, 25 bp, Homo sapien
tatgacctcaggatgttacttccca

SEQ ID NO: 1305349 - DNA, 25 bp, Homo sapien
caggccacgtttcctccggatggaa

SEQ ID NO: 1305350 - DNA, 25 bp, Homo sapien
tatccacaggcaacaatcgcaacag

SEQ ID NO: 1305351 - DNA, 25 bp, Homo sapien
ctctctgagatgtggtgaaaaatga

SEQ ID NO: 1305352 - DNA, 25 bp, Homo sapien
tgcctctctgagatgtggtgaaaaa

SEQ ID NO: 1305353 - DNA, 25 bp, Homo sapien
gcctctctgagatgtggtgaaaaat

SEQ ID NO: 1305354 - DNA, 25 bp, Homo sapien
tctgcctctctgagatgtggtgaaa

SEQ ID NO: 1305355 - DNA, 25 bp, Homo sapien
gttctgaattcttggcagggccttt

SEQ ID NO: 1305356 - DNA, 25 bp, Homo sapien
tgattttccccacacggatatccag

SEQ ID NO: 1305357 - DNA, 25 bp, Homo sapien
ttctgaattcttggcagggcctttg

SEQ ID NO: 1305358 - DNA, 25 bp, Homo sapien
cacggatatccagccgggatgggat

SEQ ID NO: 1305359 - DNA, 25 bp, Homo sapien
taggagccagtaggacatgacattc

SEQ ID NO: 1305360 - DNA, 25 bp, Homo sapien
cattacgcacaagtggatggccaac

SEQ ID NO: 1305361 - DNA, 25 bp, Homo sapien
tcagcaatgccggtacaaaaggatg

SEQ ID NO: 1305362 - DNA, 25 bp, Homo sapien
gatcccaccacgttaagacactgag

SEQ ID NO: 1305363 - DNA, 25 bp, Homo sapien
cagcaacttgttcagtgcgacttca

SEQ ID NO: 1305364 - DNA, 25 bp, Homo sapien
aacttttcccggattggatccagca

SEQ ID NO: 1305365 - DNA, 25 bp, Homo sapien
tcagtgcgacttcaacagaattctt

SEQ ID NO: 1305366 - DNA, 25 bp, Homo sapien
gaattcttcaggtctccaggatgta

SEQ ID NO: 1305367 - DNA, 25 bp, Homo sapien
tatgcttagagtagggtcacagacc

SEQ ID NO: 1305368 - DNA, 25 bp, Homo sapien
tgagaacgctgctcgtacatggtaa

SEQ ID NO: 1305369 - DNA, 25 bp, Homo sapien
ggagttcgacagacccagattagat

SEQ ID NO: 1305370 - DNA, 25 bp, Homo sapien
cagctagctgtgtgcgactccaaac

SEQ ID NO: 1305371 - DNA, 25 bp, Homo sapien
ctctagtcagaccaaaccacctgga

SEQ ID NO: 1305372 - DNA, 25 bp, Homo sapien
gctccattaaattggttggacctga

SEQ ID NO: 1305373 - DNA, 25 bp, Homo sapien
ccgcacctggcgtacattaacattt

SEQ ID NO: 1305374 - DNA, 25 bp, Homo sapien
tgtgaactcctattcctcaagcaaa

SEQ ID NO: 1305375 - DNA, 25 bp, Homo sapien
gaaaatggacactagtgagattacc

SEQ ID NO: 1305376 - DNA, 25 bp, Homo sapien
gagcaaaaatagcaggcagctcact

SEQ ID NO: 1305377 - DNA, 25 bp, Homo sapien
gctcacttttacacagaacaagttg

SEQ ID NO: 1305378 - DNA, 25 bp, Homo sapien
aaagggaccactcgtgtgtataaga

SEQ ID NO: 1305379 - DNA, 25 bp, Homo sapien
ttctcatctcgtaggatcacaaact

SEQ ID NO: 1305380 - DNA, 25 bp, Homo sapien
caggtccacgtaagctgtgtaggtt

SEQ ID NO: 1305381 - DNA, 25 bp, Homo sapien
cttttccaggtccacgtaagctgtg

SEQ ID NO: 1305382 - DNA, 25 bp, Homo sapien
tccttttccaggtccacgtaagctg

SEQ ID NO: 1305383 - DNA, 25 bp, Homo sapien
tgactattcctagcccacatgcatg

SEQ ID NO: 1305384 - DNA, 25 bp, Homo sapien
gaacttttctattctagcctggcct

SEQ ID NO: 1305385 - DNA, 25 bp, Homo sapien
ctagcctggtaacgaatatatggac

SEQ ID NO: 1305386 - DNA, 25 bp, Homo sapien
gatgagtggcactattgtataccca

SEQ ID NO: 1305387 - DNA, 25 bp, Homo sapien
catgcttgatgaaggacagaacccc

SEQ ID NO: 1305388 - DNA, 25 bp, Homo sapien
ggacatgcttgatgaaggacagaac

SEQ ID NO: 1305389 - DNA, 25 bp, Homo sapien
gcttgatgaaggacagaaccccatt

SEQ ID NO: 1305390 - DNA, 25 bp, Homo sapien
tgatgaaggacagaaccccattgtt

SEQ ID NO: 1305391 - DNA, 25 bp, Homo sapien
tggctacctggtccttacttacaat

SEQ ID NO: 1305392 - DNA, 25 bp, Homo sapien
tgccattaagtgatcttctgacctc

SEQ ID NO: 1305393 - DNA, 25 bp, Homo sapien
gaaccacaatgtgtggcctacttat

SEQ ID NO: 1305394 - DNA, 25 bp, Homo sapien
tgttgggattgataggatcttgctt

SEQ ID NO: 1305395 - DNA, 25 bp, Homo sapien
gacctcaagtatccatctgccatgg

SEQ ID NO: 1305396 - DNA, 25 bp, Homo sapien
acctcaagtatccatctgccatggc

SEQ ID NO: 1305397 - DNA, 25 bp, Homo sapien
tagatctcatcaggactgctctgga

SEQ ID NO: 1305398 - DNA, 25 bp, Homo sapien
taattgaatggtgtaaggctccttc

SEQ ID NO: 1305399 - DNA, 25 bp, Homo sapien
tcaagtacacgagctcaagagggac

SEQ ID NO: 1305400 - DNA, 25 bp, Homo sapien
ggagaattctagttagccaggtcac

SEQ ID NO: 1305401 - DNA, 25 bp, Homo sapien
taatcctggaaccataggattcatc

SEQ ID NO: 1305402 - DNA, 25 bp, Homo sapien
gattcatcagatggacccgttttga

SEQ ID NO: 1305403 - DNA, 25 bp, Homo sapien
tcttctgaagagctcattttgctgc

SEQ ID NO: 1305404 - DNA, 25 bp, Homo sapien
cccgttttgaatagccaagtgcagg

SEQ ID NO: 1305405 - DNA, 25 bp, Homo sapien
cagtgcctggccctcaaaaaattta

SEQ ID NO: 1305406 - DNA, 25 bp, Homo sapien
actacagaggcgtgcctggctaatt

SEQ ID NO: 1305407 - DNA, 25 bp, Homo sapien
tgcagccaggatcacacctcctggg

SEQ ID NO: 1305408 - DNA, 25 bp, Homo sapien
aaaatttatattgtggctgggtgca

SEQ ID NO: 1305409 - DNA, 25 bp, Homo sapien
aacttcttatcttctatcctcagtg

SEQ ID NO: 1305410 - DNA, 25 bp, Homo sapien
ttcttatcttctatcctcagtgttc

SEQ ID NO: 1305411 - DNA, 25 bp, Homo sapien
tgatattggacaacttcttatcttc

SEQ ID NO: 1305412 - DNA, 25 bp, Homo sapien
tgtgtgatattggacaacttcttat

SEQ ID NO: 1305413 - DNA, 25 bp, Homo sapien
ctctgcaaaggtgaaaatctttctc

SEQ ID NO: 1305414 - DNA, 25 bp, Homo sapien
cttctctgcaaaggtgaaaatcttt

SEQ ID NO: 1305415 - DNA, 25 bp, Homo sapien
tgcaaaggtgaaaatctttctctga

SEQ ID NO: 1305416 - DNA, 25 bp, Homo sapien
tctctgcaaaggtgaaaatctttct

SEQ ID NO: 1305417 - DNA, 25 bp, Homo sapien
cttttaaatactcttcatccaaagc

SEQ ID NO: 1305418 - DNA, 25 bp, Homo sapien
acttttaaatactcttcatccaaag

SEQ ID NO: 1305419 - DNA, 25 bp, Homo sapien
ctccaaattgggcatctacttttaa

SEQ ID NO: 1305420 - DNA, 25 bp, Homo sapien
caaattgggcatctacttttaaata

SEQ ID NO: 1305421 - DNA, 25 bp, Homo sapien
aatcctcaccagtagtttccatttc

SEQ ID NO: 1305422 - DNA, 25 bp, Homo sapien
cagaatcctcaccagtagtttccat

SEQ ID NO: 1305423 - DNA, 25 bp, Homo sapien
agaatcctcaccagtagtttccatt

SEQ ID NO: 1305424 - DNA, 25 bp, Homo sapien
gaatcctcaccagtagtttccattt

SEQ ID NO: 1305425 - DNA, 25 bp, Homo sapien
tcttccgaaaaaaggctatttcatc

SEQ ID NO: 1305426 - DNA, 25 bp, Homo sapien
atggcatcttcttccgaaaaaaggc

SEQ ID NO: 1305427 - DNA, 25 bp, Homo sapien
catcttcttccgaaaaaaggctatt

SEQ ID NO: 1305428 - DNA, 25 bp, Homo sapien
cttccgaaaaaaggctatttcatct

SEQ ID NO: 1305429 - DNA, 25 bp, Homo sapien
actcagcaaagggtgctccacctgc

SEQ ID NO: 1305430 - DNA, 25 bp, Homo sapien
tggaatcgtgctgtgtgaccacgga

SEQ ID NO: 1305431 - DNA, 25 bp, Homo sapien
tgaccacggaggagagtctgtacac

SEQ ID NO: 1305432 - DNA, 25 bp, Homo sapien
ggagagtctgtacacatctagtgtg

SEQ ID NO: 1305433 - DNA, 25 bp, Homo sapien
tcctgaaaactttcgctaccctggc

SEQ ID NO: 1305434 - DNA, 25 bp, Homo sapien
gctttgtttcagctatcgccatctg

SEQ ID NO: 1305435 - DNA, 25 bp, Homo sapien
tccagtgcctagactagtgtctcgc

SEQ ID NO: 1305436 - DNA, 25 bp, Homo sapien
tcttcacaggtataactccagtgcc

SEQ ID NO: 1305437 - DNA, 25 bp, Homo sapien
ggctttcatgttatccaggtatgcg

SEQ ID NO: 1305438 - DNA, 25 bp, Homo sapien
cacattctcatagtaactgactcgg

SEQ ID NO: 1305439 - DNA, 25 bp, Homo sapien
gctgagctggtaatcagtgcctttg

SEQ ID NO: 1305440 - DNA, 25 bp, Homo sapien
actgactcggagttctagaagttcc

SEQ ID NO: 1305441 - DNA, 25 bp, Homo sapien
taagccacatgtggtttgcccgtgg

SEQ ID NO: 1305442 - DNA, 25 bp, Homo sapien
cacatgtggtttgcccgtggttgcc

SEQ ID NO: 1305443 - DNA, 25 bp, Homo sapien
aaagtaagccacatgtggtttgccc

SEQ ID NO: 1305444 - DNA, 25 bp, Homo sapien
tgtggtttgcccgtggttgccgttc

SEQ ID NO: 1305445 - DNA, 25 bp, Homo sapien
attgtggaagcagaagagttagttt

SEQ ID NO: 1305446 - DNA, 25 bp, Homo sapien
ctattgtggaagcagaagagttagt

SEQ ID NO: 1305447 - DNA, 25 bp, Homo sapien
tattgtggaagcagaagagttagtt

SEQ ID NO: 1305448 - DNA, 25 bp, Homo sapien
gatattgtggaaagctatagccgca

SEQ ID NO: 1305449 - DNA, 25 bp, Homo sapien
tgatggatttaaagcccctgcgccc

SEQ ID NO: 1305450 - DNA, 25 bp, Homo sapien
gttgatattaccctaagccccagca

SEQ ID NO: 1305451 - DNA, 25 bp, Homo sapien
caacagcatgtgtcagtggagatcc

SEQ ID NO: 1305452 - DNA, 25 bp, Homo sapien
cacactaagtcttttctggaaagtc

SEQ ID NO: 1305453 - DNA, 25 bp, Homo sapien
ggtatagcaccatatgacagatagc

SEQ ID NO: 1305454 - DNA, 25 bp, Homo sapien
tctgtagagaaatctcttccccaca

SEQ ID NO: 1305455 - DNA, 25 bp, Homo sapien
tgacaagaaccttagcttcagctgg

SEQ ID NO: 1305456 - DNA, 25 bp, Homo sapien
tggtttacatgcctctaactcactc

SEQ ID NO: 1305457 - DNA, 25 bp, Homo sapien
tctccttcctttcatagccaatttc

SEQ ID NO: 1305458 - DNA, 25 bp, Homo sapien
tttggtttacatgcctctaactcac

SEQ ID NO: 1305459 - DNA, 25 bp, Homo sapien
ttcttgtaacagttgtctcttcttt

SEQ ID NO: 1305460 - DNA, 25 bp, Homo sapien
tgcaggttccgggtgataaggtgca

SEQ ID NO: 1305461 - DNA, 25 bp, Homo sapien
cgggtgataaggtgcagtttctctt

SEQ ID NO: 1305462 - DNA, 25 bp, Homo sapien
gttccgggtgataaggtgcagtttc

SEQ ID NO: 1305463 - DNA, 25 bp, Homo sapien
tccgggtgataaggtgcagtttctc

SEQ ID NO: 1305464 - DNA, 25 bp, Homo sapien
gggacggtttcctgccaatcactgc

SEQ ID NO: 1305465 - DNA, 25 bp, Homo sapien
gggcacaaccctcctagaggcggga

SEQ ID NO: 1305466 - DNA, 25 bp, Homo sapien
ggcgcgttctagctcctgaggtgat

SEQ ID NO: 1305467 - DNA, 25 bp, Homo sapien
ccctgctgcgagaagggcgcgttct

SEQ ID NO: 1305468 - DNA, 25 bp, Homo sapien
gatagccgcgggcttttctgccgcg

SEQ ID NO: 1305469 - DNA, 25 bp, Homo sapien
gagatctgaggacggtggtccccgg

SEQ ID NO: 1305470 - DNA, 25 bp, Homo sapien
ccggctcggcgggaggctgttgctg

SEQ ID NO: 1305471 - DNA, 25 bp, Homo sapien
gctccctggtcgtcttgagagtcgg

SEQ ID NO: 1305472 - DNA, 25 bp, Homo sapien
ggaggttaccagacaagtgctaaga

SEQ ID NO: 1305473 - DNA, 25 bp, Homo sapien
atggtagacagagaagtaagcaagc

SEQ ID NO: 1305474 - DNA, 25 bp, Homo sapien
taagaaaggtggtagatggtagaca

SEQ ID NO: 1305475 - DNA, 25 bp, Homo sapien
tgacagagaagtaataagtaaggct

SEQ ID NO: 1305476 - DNA, 25 bp, Homo sapien
gaaatgatgtgctcacgggtgccct

SEQ ID NO: 1305477 - DNA, 25 bp, Homo sapien
caaaatatcgtactgacttaacgct

SEQ ID NO: 1305478 - DNA, 25 bp, Homo sapien
gcctccaggatttggctactttgaa

SEQ ID NO: 1305479 - DNA, 25 bp, Homo sapien
tcttgcctaaagacggtgccccatt

SEQ ID NO: 1305480 - DNA, 25 bp, Homo sapien
aaaacgcattacctcataaggcagg

SEQ ID NO: 1305481 - DNA, 25 bp, Homo sapien
gttgagtcaaacgtggcttccctat

SEQ ID NO: 1305482 - DNA, 25 bp, Homo sapien
tctctttagtttagtgccccatggg

SEQ ID NO: 1305483 - DNA, 25 bp, Homo sapien
tctggtatccctgcaaatggaaaac

SEQ ID NO: 1305484 - DNA, 25 bp, Homo sapien
agttgtagtgagcgaagatcaggcc

SEQ ID NO: 1305485 - DNA, 25 bp, Homo sapien
ccatttatatatcaatggacacttg

SEQ ID NO: 1305486 - DNA, 25 bp, Homo sapien
ttttaagacttaataatacagcata

SEQ ID NO: 1305487 - DNA, 25 bp, Homo sapien
tagctttgtgaataatgccgttatg

SEQ ID NO: 1305488 - DNA, 25 bp, Homo sapien
gtcctcaagattcatgtttgttgtt

SEQ ID NO: 1305489 - DNA, 25 bp, Homo sapien
taaatctgccatcgtgttacttgtt

SEQ ID NO: 1305490 - DNA, 25 bp, Homo sapien
catctttccctgactcatttaattt

SEQ ID NO: 1305491 - DNA, 25 bp, Homo sapien
cagtctttaattggagcattaatcc

SEQ ID NO: 1305492 - DNA, 25 bp, Homo sapien
atgtacaatcccatatggctggatt

SEQ ID NO: 1305493 - DNA, 25 bp, Homo sapien
cttagctacaagtggaaatatctgc

SEQ ID NO: 1305494 - DNA, 25 bp, Homo sapien
cccagtactgttgaggacattcata

SEQ ID NO: 1305495 - DNA, 25 bp, Homo sapien
caagatttctactagatcatcgcag

SEQ ID NO: 1305496 - DNA, 25 bp, Homo sapien
catcgcagttttgttgacctagagg

SEQ ID NO: 1305497 - DNA, 25 bp, Homo sapien
gacttgctgccaattgccagaaaaa

SEQ ID NO: 1305498 - DNA, 25 bp, Homo sapien
cacatcctgacttgctgccaattgc

SEQ ID NO: 1305499 - DNA, 25 bp, Homo sapien
cacgtgcacccccatctgtttgaga

SEQ ID NO: 1305500 - DNA, 25 bp, Homo sapien
caggcatgtccctaagaagctgcag

SEQ ID NO: 1305501 - DNA, 25 bp, Homo sapien
tggttattgctctaagtggatcaga

SEQ ID NO: 1305502 - DNA, 25 bp, Homo sapien
aaaagtggttattgctctaagtgga

SEQ ID NO: 1305503 - DNA, 25 bp, Homo sapien
aagtggttattgctctaagtggatc

SEQ ID NO: 1305504 - DNA, 25 bp, Homo sapien
taaaaagtggttattgctctaagtg

SEQ ID NO: 1305505 - DNA, 25 bp, Homo sapien
cgtaactcgtcagtcctagggaaga

SEQ ID NO: 1305506 - DNA, 25 bp, Homo sapien
tactgagtaccaggcttgcactagg

SEQ ID NO: 1305507 - DNA, 25 bp, Homo sapien
ccttgagagctcttgtagaccggaa

SEQ ID NO: 1305508 - DNA, 25 bp, Homo sapien
catgcaggcatctggcagccgtaac

SEQ ID NO: 1305509 - DNA, 25 bp, Homo sapien
gaaagacacagcttgagtcagtcct

SEQ ID NO: 1305510 - DNA, 25 bp, Homo sapien
gccagtggtgatagccagagctgct

SEQ ID NO: 1305511 - DNA, 25 bp, Homo sapien
gcaagatatgaagaccccagaggcc

SEQ ID NO: 1305512 - DNA, 25 bp, Homo sapien
caccactcaggctctaaggaaggac

SEQ ID NO: 1305513 - DNA, 25 bp, Homo sapien
caggcctaattgtgaatagccttct

SEQ ID NO: 1305514 - DNA, 25 bp, Homo sapien
ccaggcctaattgtgaatagccttc

SEQ ID NO: 1305515 - DNA, 25 bp, Homo sapien
ggcctaattgtgaatagccttcttg

SEQ ID NO: 1305516 - DNA, 25 bp, Homo sapien
gccaggcctaattgtgaatagcctt

SEQ ID NO: 1305517 - DNA, 25 bp, Homo sapien
gctgtagcctaaataagccaagctc

SEQ ID NO: 1305518 - DNA, 25 bp, Homo sapien
agcagcagggctgtagcctaaataa

SEQ ID NO: 1305519 - DNA, 25 bp, Homo sapien
cagggctgtagcctaaataagccaa

SEQ ID NO: 1305520 - DNA, 25 bp, Homo sapien
gcctaaataagccaagctcttgtcc

SEQ ID NO: 1305521 - DNA, 25 bp, Homo sapien
ttcagcctcactcaactgaatggcc

SEQ ID NO: 1305522 - DNA, 25 bp, Homo sapien
ccttcagcctcactcaactgaatgg

SEQ ID NO: 1305523 - DNA, 25 bp, Homo sapien
cagcctcactcaactgaatggccaa

SEQ ID NO: 1305524 - DNA, 25 bp, Homo sapien
ccctggcacccagtctacccccagc

SEQ ID NO: 1305525 - DNA, 25 bp, Homo sapien
gctgagggcaagcactgaaaaggtt

SEQ ID NO: 1305526 - DNA, 25 bp, Homo sapien
gcttcaggaaagtgcgccagagaga

SEQ ID NO: 1305527 - DNA, 25 bp, Homo sapien
aggacagtaagccagagggtacaag

SEQ ID NO: 1305528 - DNA, 25 bp, Homo sapien
gggccagatgtttgttggataatca

SEQ ID NO: 1305529 - DNA, 25 bp, Homo sapien
tacagcggtaaagcacctgcccaag

SEQ ID NO: 1305530 - DNA, 25 bp, Homo sapien
ggccagacaccccactcctattgtc

SEQ ID NO: 1305531 - DNA, 25 bp, Homo sapien
tgtcgccatgccagtccccgagctg

SEQ ID NO: 1305532 - DNA, 25 bp, Homo sapien
ggaaatgaaggtacagcggtaaagc

SEQ ID NO: 1305533 - DNA, 25 bp, Homo sapien
atgaggcacagggtggcccacccag

SEQ ID NO: 1305534 - DNA, 25 bp, Homo sapien
cagagcatgaggcacagggtggccc

SEQ ID NO: 1305535 - DNA, 25 bp, Homo sapien
agcatgaggcacagggtggcccacc

SEQ ID NO: 1305536 - DNA, 25 bp, Homo sapien
ttaccagagcatgaggcacagggtg

SEQ ID NO: 1305537 - DNA, 25 bp, Homo sapien
tctgatgcactcttggttttttcct

SEQ ID NO: 1305538 - DNA, 25 bp, Homo sapien
gttattgggttcattgtccttgatg

SEQ ID NO: 1305539 - DNA, 25 bp, Homo sapien
ctggtgtgctggtttctgatgcact

SEQ ID NO: 1305540 - DNA, 25 bp, Homo sapien
ttccttgttgttattgggttcattg

SEQ ID NO: 1305541 - DNA, 25 bp, Homo sapien
catactggcggcagaagagggcaat

SEQ ID NO: 1305542 - DNA, 25 bp, Homo sapien
tcatactggcggcagaagagggcaa

SEQ ID NO: 1305543 - DNA, 25 bp, Homo sapien
atactggcggcagaagagggcaatg

SEQ ID NO: 1305544 - DNA, 25 bp, Homo sapien
gggctggtcagagtcctccatttcc

SEQ ID NO: 1305545 - DNA, 25 bp, Homo sapien
ttttcatgagagaaggggctggtca

SEQ ID NO: 1305546 - DNA, 25 bp, Homo sapien
cctttttttcatgagagaaggggct

SEQ ID NO: 1305547 - DNA, 25 bp, Homo sapien
ggctggtcagagtcctccatttccc

SEQ ID NO: 1305548 - DNA, 25 bp, Homo sapien
gcctgtccgcagctgttggttcctc

SEQ ID NO: 1305549 - DNA, 25 bp, Homo sapien
ctcgcctgtccgcagctgttggttc

SEQ ID NO: 1305550 - DNA, 25 bp, Homo sapien
gcccacatgaacaggaccacgacga

SEQ ID NO: 1305551 - DNA, 25 bp, Homo sapien
acaggaccacgacgatgatcagcac

SEQ ID NO: 1305552 - DNA, 25 bp, Homo sapien
caccccattcctcttaacagtgacc

SEQ ID NO: 1305553 - DNA, 25 bp, Homo sapien
ccccattcctcttaacagtgacccg

SEQ ID NO: 1305554 - DNA, 25 bp, Homo sapien
ccaccccattcctcttaacagtgac

SEQ ID NO: 1305555 - DNA, 25 bp, Homo sapien
gttcttggaggccatcttctcagcc

SEQ ID NO: 1305556 - DNA, 25 bp, Homo sapien
ttcttggaggccatcttctcagcct

SEQ ID NO: 1305557 - DNA, 25 bp, Homo sapien
tggccctgaatggagatggcctgca

SEQ ID NO: 1305558 - DNA, 25 bp, Homo sapien
ggactatgtactccgtatcctcctc

SEQ ID NO: 1305559 - DNA, 25 bp, Homo sapien
cagagggcacatgagcgggtggtgg

SEQ ID NO: 1305560 - DNA, 25 bp, Homo sapien
gatggcctgcacgtggactatgtac

SEQ ID NO: 1305561 - DNA, 25 bp, Homo sapien
gatggcaaatccgatgacaacctca

SEQ ID NO: 1305562 - DNA, 25 bp, Homo sapien
aggtgcctgacggtgacgttcactg

SEQ ID NO: 1305563 - DNA, 25 bp, Homo sapien
gcaaatccgatgacaacctcatcct

SEQ ID NO: 1305564 - DNA, 25 bp, Homo sapien
ccttgaggtgcctgacggtgacgtt

SEQ ID NO: 1305565 - DNA, 25 bp, Homo sapien
gtgctcctgcacagcgggaccccat

SEQ ID NO: 1305566 - DNA, 25 bp, Homo sapien
tgcaccagcgcgaagcagacgcagc

SEQ ID NO: 1305567 - DNA, 25 bp, Homo sapien
ggggtgtatggtggctcctccggcc

SEQ ID NO: 1305568 - DNA, 25 bp, Homo sapien
cggcgacccggggtgtatggtggct

SEQ ID NO: 1305569 - DNA, 25 bp, Homo sapien
cgcctgcaccagcgcgaagcagacg

SEQ ID NO: 1305570 - DNA, 25 bp, Homo sapien
gcttcgcggacccacggctcccgcc

SEQ ID NO: 1305571 - DNA, 25 bp, Homo sapien
ggacccacggctcccgccctctcac

SEQ ID NO: 1305572 - DNA, 25 bp, Homo sapien
cgcggacccacggctcccgccctct

SEQ ID NO: 1305573 - DNA, 25 bp, Homo sapien
ggcttcgcggacccacggctcccgc

SEQ ID NO: 1305574 - DNA, 25 bp, Homo sapien
cgccgcggtcactctctctcccgtg

SEQ ID NO: 1305575 - DNA, 25 bp, Homo sapien
gagcccagcggggttctccgcgccc

SEQ ID NO: 1305576 - DNA, 25 bp, Homo sapien
ggtcactctctctcccgtgcacagc

SEQ ID NO: 1305577 - DNA, 25 bp, Homo sapien
gccctgacttggctgccgctttctg

SEQ ID NO: 1305578 - DNA, 25 bp, Homo sapien
tgctaagtggacactagggctccgt

SEQ ID NO: 1305579 - DNA, 25 bp, Homo sapien
tctgtctcactggagagtccagctc

SEQ ID NO: 1305580 - DNA, 25 bp, Homo sapien
aagtgccaccgagatgcccgtttgt

SEQ ID NO: 1305581 - DNA, 25 bp, Homo sapien
tagggatcccctcattccacggtag

SEQ ID NO: 1305582 - DNA, 25 bp, Homo sapien
tcagctgggacctcgacccgtttgg

SEQ ID NO: 1305583 - DNA, 25 bp, Homo sapien
ctcagctgggacctcgacccgtttg

SEQ ID NO: 1305584 - DNA, 25 bp, Homo sapien
cagctgggacctcgacccgtttggg

SEQ ID NO: 1305585 - DNA, 25 bp, Homo sapien
cgccatctgctggcctctttgggta

SEQ ID NO: 1305586 - DNA, 25 bp, Homo sapien
cttggcgccatctgctggcctcttt

SEQ ID NO: 1305587 - DNA, 25 bp, Homo sapien
atctgctggcctctttgggtaaaac

SEQ ID NO: 1305588 - DNA, 25 bp, Homo sapien
ccatctgctggcctctttgggtaaa

SEQ ID NO: 1305589 - DNA, 25 bp, Homo sapien
tgtgggggtacagccttctcagtcc

SEQ ID NO: 1305590 - DNA, 25 bp, Homo sapien
gatggcagtgcctgagggcttgaga

SEQ ID NO: 1305591 - DNA, 25 bp, Homo sapien
ggggtacagccttctcagtcctcat

SEQ ID NO: 1305592 - DNA, 25 bp, Homo sapien
ttggaggatttggagagttgtgact

SEQ ID NO: 1305593 - DNA, 25 bp, Homo sapien
ggaggacctccctcgtggctctgca

SEQ ID NO: 1305594 - DNA, 25 bp, Homo sapien
gcgaacagcggccatccgcagtgaa

SEQ ID NO: 1305595 - DNA, 25 bp, Homo sapien
tccacggaggacctccctcgtggct

SEQ ID NO: 1305596 - DNA, 25 bp, Homo sapien
tgagtctccagggtcggtccacctc

SEQ ID NO: 1305597 - DNA, 25 bp, Homo sapien
attccggccaccagagccgaggtgc

SEQ ID NO: 1305598 - DNA, 25 bp, Homo sapien
ggaagcgcgcggtgctctccagggt

SEQ ID NO: 1305599 - DNA, 25 bp, Homo sapien
gagacctcttggcactaccgtgtcc

SEQ ID NO: 1305600 - DNA, 25 bp, Homo sapien
ctgcgcagtcggtgtctccgcgtcg

SEQ ID NO: 1305601 - DNA, 25 bp, Homo sapien
tccccggggctggcttctcaggtcg

SEQ ID NO: 1305602 - DNA, 25 bp, Homo sapien
gctggcttctcaggtcgagctgagg

SEQ ID NO: 1305603 - DNA, 25 bp, Homo sapien
caggtcgagctgagggggttcttcc

SEQ ID NO: 1305604 - DNA, 25 bp, Homo sapien
ctcaggtcgagctgagggggttctt

SEQ ID NO: 1305605 - DNA, 25 bp, Homo sapien
ccatgtgagaggtgtcggcatgcga

SEQ ID NO: 1305606 - DNA, 25 bp, Homo sapien
gcgagttggcgtgtgatggcatgtg

SEQ ID NO: 1305607 - DNA, 25 bp, Homo sapien
cagctggccatgtgagaggtgtcgg

SEQ ID NO: 1305608 - DNA, 25 bp, Homo sapien
gaggtgtcggcatgcgagttggcgt

SEQ ID NO: 1305609 - DNA, 25 bp, Homo sapien
caaagcaagtaagcggttagcaccc

SEQ ID NO: 1305610 - DNA, 25 bp, Homo sapien
aagcgacccgtccatcgtgcgtctg

SEQ ID NO: 1305611 - DNA, 25 bp, Homo sapien
ttagcttccactcccttgtgtgtat

SEQ ID NO: 1305612 - DNA, 25 bp, Homo sapien
gtgcgtctgctgcagtgcgacccca

SEQ ID NO: 1305613 - DNA, 25 bp, Homo sapien
atttcagaataaagtctcatttcag

SEQ ID NO: 1305614 - DNA, 25 bp, Homo sapien
gttgcttgcagggtcctagtggcca

SEQ ID NO: 1305615 - DNA, 25 bp, Homo sapien
gagggtccattgagccctctcaggc

SEQ ID NO: 1305616 - DNA, 25 bp, Homo sapien
ggtcacagagcagagttgcttgcag

SEQ ID NO: 1305617 - DNA, 25 bp, Homo sapien
gccatcgggcctgggcaggacatca

SEQ ID NO: 1305618 - DNA, 25 bp, Homo sapien
ctcagcaggtcacggccctccacca

SEQ ID NO: 1305619 - DNA, 25 bp, Homo sapien
cagaggctcagagctggtgcagctc

SEQ ID NO: 1305620 - DNA, 25 bp, Homo sapien
tccaccagctctgggttctcccgca

SEQ ID NO: 1305621 - DNA, 25 bp, Homo sapien
cagctcagcaggtcacggccctcca

SEQ ID NO: 1305622 - DNA, 25 bp, Homo sapien
cctcctccaggacatccgggaaatg

SEQ ID NO: 1305623 - DNA, 25 bp, Homo sapien
gaggctgccagacccactggttctc

SEQ ID NO: 1305624 - DNA, 25 bp, Homo sapien
aggctgccagacccactggttctca

SEQ ID NO: 1305625 - DNA, 25 bp, Homo sapien
cctccaggacatccgggaaatggaa

SEQ ID NO: 1305626 - DNA, 25 bp, Homo sapien
aatgccctcagtgcgagcccagaca

SEQ ID NO: 1305627 - DNA, 25 bp, Homo sapien
gggcaaaggggcatcactacccact

SEQ ID NO: 1305628 - DNA, 25 bp, Homo sapien
agccaggcctgacctttgcaatgcc

SEQ ID NO: 1305629 - DNA, 25 bp, Homo sapien
tcaagactcatcctgggccctagga

SEQ ID NO: 1305630 - DNA, 25 bp, Homo sapien
gctgagcacagcgtacagcaaacac

SEQ ID NO: 1305631 - DNA, 25 bp, Homo sapien
gcactagggcgatgccccagaggca

SEQ ID NO: 1305632 - DNA, 25 bp, Homo sapien
ttctccgccacgcagagcactaggg

SEQ ID NO: 1305633 - DNA, 25 bp, Homo sapien
agcgtacagcaaacacgttctccgc

SEQ ID NO: 1305634 - DNA, 25 bp, Homo sapien
ggagggtggattccaagagcccttc

SEQ ID NO: 1305635 - DNA, 25 bp, Homo sapien
gggtggagggtggattccaagagcc

SEQ ID NO: 1305636 - DNA, 25 bp, Homo sapien
cccttcccacccgtgcgagggcctg

SEQ ID NO: 1305637 - DNA, 25 bp, Homo sapien
ttcccacccgtgcgagggcctggtg

SEQ ID NO: 1305638 - DNA, 25 bp, Homo sapien
agtagttcagagctcccaaaagtgc

SEQ ID NO: 1305639 - DNA, 25 bp, Homo sapien
gccagtagttcagagctcccaaaag

SEQ ID NO: 1305640 - DNA, 25 bp, Homo sapien
tgcgagggccagtagttcagagctc

SEQ ID NO: 1305641 - DNA, 25 bp, Homo sapien
gttcagagctcccaaaagtgcaggc

SEQ ID NO: 1305642 - DNA, 25 bp, Homo sapien
gagagcacaggccacgctcgagcta

SEQ ID NO: 1305643 - DNA, 25 bp, Homo sapien
acgctcgagctaaacactgtccagc

SEQ ID NO: 1305644 - DNA, 25 bp, Homo sapien
ctgggtggcaaaggtcatggcgatg

SEQ ID NO: 1305645 - DNA, 25 bp, Homo sapien
tggaggccaagaggccgagggcaca

SEQ ID NO: 1305646 - DNA, 25 bp, Homo sapien
tgctagggaggtagcgtgacaacac

SEQ ID NO: 1305647 - DNA, 25 bp, Homo sapien
tgacaacacgatggctgcgatgcct

SEQ ID NO: 1305648 - DNA, 25 bp, Homo sapien
tagcgtgacaacacgatggctgcga

SEQ ID NO: 1305649 - DNA, 25 bp, Homo sapien
gaggtagcgtgacaacacgatggct

SEQ ID NO: 1305650 - DNA, 25 bp, Homo sapien
tcatagtccagcctgacatgatgtt

SEQ ID NO: 1305651 - DNA, 25 bp, Homo sapien
gccaccggggcatgccagggtatgc

SEQ ID NO: 1305652 - DNA, 25 bp, Homo sapien
tagtccagcctgacatgatgtttct

SEQ ID NO: 1305653 - DNA, 25 bp, Homo sapien
tccatgagtccccactcctaagcct

SEQ ID NO: 1305654 - DNA, 25 bp, Homo sapien
catcttgaggggtgcccacgtagcg

SEQ ID NO: 1305655 - DNA, 25 bp, Homo sapien
gcagagccaccgcatcttgaggggt

SEQ ID NO: 1305656 - DNA, 25 bp, Homo sapien
gcactgtgccatggaacagggcagc

SEQ ID NO: 1305657 - DNA, 25 bp, Homo sapien
ggatgttgaccacgcagtactgcag

SEQ ID NO: 1305658 - DNA, 25 bp, Homo sapien
cttccggaagtcgcccacactcagg

SEQ ID NO: 1305659 - DNA, 25 bp, Homo sapien
ttccggaagtcgcccacactcaggc

SEQ ID NO: 1305660 - DNA, 25 bp, Homo sapien
aacagcatcccaggaccaagacttt

SEQ ID NO: 1305661 - DNA, 25 bp, Homo sapien
gtgtctaccttccagctgagggctg

SEQ ID NO: 1305662 - DNA, 25 bp, Homo sapien
tttggtcaaagaggaggcacggtgc

SEQ ID NO: 1305663 - DNA, 25 bp, Homo sapien
gagggctggactcaataacaacagc

SEQ ID NO: 1305664 - DNA, 25 bp, Homo sapien
caccgtcgcgctcgcccacttcccg

SEQ ID NO: 1305665 - DNA, 25 bp, Homo sapien
gctcccatcccgctggcccgtcgcc

SEQ ID NO: 1305666 - DNA, 25 bp, Homo sapien
ccgctggcccgtcgcccgcgcgccc

SEQ ID NO: 1305667 - DNA, 25 bp, Homo sapien
ggctgggcggcgccggaccggcctc

SEQ ID NO: 1305668 - DNA, 25 bp, Homo sapien
gtctatggcagctacagccttttga

SEQ ID NO: 1305669 - DNA, 25 bp, Homo sapien
tgaatgatgaatgttcttagtagca

SEQ ID NO: 1305670 - DNA, 25 bp, Homo sapien
ggaatcaacgtctatggcagctaca

SEQ ID NO: 1305671 - DNA, 25 bp, Homo sapien
gtgcccggccagtgtggatattttg

SEQ ID NO: 1305672 - DNA, 25 bp, Homo sapien
acagtctcacacaggcattggcctc

SEQ ID NO: 1305673 - DNA, 25 bp, Homo sapien
gtctcacacaggcattggcctccat

SEQ ID NO: 1305674 - DNA, 25 bp, Homo sapien
aaggcagcaaatggctcgggcccaa

SEQ ID NO: 1305675 - DNA, 25 bp, Homo sapien
gcagcaaatggctcgggcccaaatc

SEQ ID NO: 1305676 - DNA, 25 bp, Homo sapien
ggtagactccaacttgtatgcggaa

SEQ ID NO: 1305677 - DNA, 25 bp, Homo sapien
cggaatgttagctgcatgggagtct

SEQ ID NO: 1305678 - DNA, 25 bp, Homo sapien
cacatagctagctgatccaccctgg

SEQ ID NO: 1305679 - DNA, 25 bp, Homo sapien
taacgtggtattagtctgtgcctgg

SEQ ID NO: 1305680 - DNA, 25 bp, Homo sapien
gcttagggccagtttccaagtaatc

SEQ ID NO: 1305681 - DNA, 25 bp, Homo sapien
aattggttccttccgcgggctgtgg

SEQ ID NO: 1305682 - DNA, 25 bp, Homo sapien
ttacatggcttaagatccctttggg

SEQ ID NO: 1305683 - DNA, 25 bp, Homo sapien
cagcctagggaaggtacacactaca

SEQ ID NO: 1305684 - DNA, 25 bp, Homo sapien
taaggtctctacatcttgcaggagc

SEQ ID NO: 1305685 - DNA, 25 bp, Homo sapien
gaattagccttccatgtgagctgct

SEQ ID NO: 1305686 - DNA, 25 bp, Homo sapien
gatgatctatcatggcagccctttg

SEQ ID NO: 1305687 - DNA, 25 bp, Homo sapien
taggaggccactacaggttgactac

SEQ ID NO: 1305688 - DNA, 25 bp, Homo sapien
catacgaaggtacattaggtgagca

SEQ ID NO: 1305689 - DNA, 25 bp, Homo sapien
tagtactagtgatcagacatgcccc

SEQ ID NO: 1305690 - DNA, 25 bp, Homo sapien
gactaaggatgctctaccaaagggc

SEQ ID NO: 1305691 - DNA, 25 bp, Homo sapien
gcactgcatctgtctggcgctgaag

SEQ ID NO: 1305692 - DNA, 25 bp, Homo sapien
ccctccaacagacttctttgatttt

SEQ ID NO: 1305693 - DNA, 25 bp, Homo sapien
gcccctccaacagacttctttgatt

SEQ ID NO: 1305694 - DNA, 25 bp, Homo sapien
tgcccctccaacagacttctttgat

SEQ ID NO: 1305695 - DNA, 25 bp, Homo sapien
tactgcccctccaacagacttcttt

SEQ ID NO: 1305696 - DNA, 25 bp, Homo sapien
gaattgttctctcgaggcttcaaga

SEQ ID NO: 1305697 - DNA, 25 bp, Homo sapien
tgcctctttttccaacaagttctct

SEQ ID NO: 1305698 - DNA, 25 bp, Homo sapien
gaaatccaaagtccactaacagcat

SEQ ID NO: 1305699 - DNA, 25 bp, Homo sapien
cagagatctccaggctgtctgcctc

SEQ ID NO: 1305700 - DNA, 25 bp, Homo sapien
tgtgaagtctggctgcagtgcccaa

SEQ ID NO: 1305701 - DNA, 25 bp, Homo sapien
tgttgtccagacttgccatcctcat

SEQ ID NO: 1305702 - DNA, 25 bp, Homo sapien
cattgctttgtgattatgcgcatca

SEQ ID NO: 1305703 - DNA, 25 bp, Homo sapien
tatcagaacacggagtggtatacct

SEQ ID NO: 1305704 - DNA, 25 bp, Homo sapien
gcgcatcagtgtatttcttcctcca

SEQ ID NO: 1305705 - DNA, 25 bp, Homo sapien
tgtaaccatgcaacattcactgaga

SEQ ID NO: 1305706 - DNA, 25 bp, Homo sapien
tacactctttgacacacctcatgga

SEQ ID NO: 1305707 - DNA, 25 bp, Homo sapien
cctgggcaaaaacctgtgaccagag

SEQ ID NO: 1305708 - DNA, 25 bp, Homo sapien
aattccaaaagatgcagttacaagt

SEQ ID NO: 1305709 - DNA, 25 bp, Homo sapien
ttacaagtgtgcttctcagaacagg

SEQ ID NO: 1305710 - DNA, 25 bp, Homo sapien
gcagagaggttcatatgggcacttg

SEQ ID NO: 1305711 - DNA, 25 bp, Homo sapien
agtttgtccctcggctagggcagag

SEQ ID NO: 1305712 - DNA, 25 bp, Homo sapien
tcggctagggcagagaggttcatat

SEQ ID NO: 1305713 - DNA, 25 bp, Homo sapien
cctcggctagggcagagaggttcat

SEQ ID NO: 1305714 - DNA, 25 bp, Homo sapien
gaggtgatgtctggcacatcgtctg

SEQ ID NO: 1305715 - DNA, 25 bp, Homo sapien
tctctaggtcactgcggatgctttc

SEQ ID NO: 1305716 - DNA, 25 bp, Homo sapien
ctgtgcatcagaactctctaggtca

SEQ ID NO: 1305717 - DNA, 25 bp, Homo sapien
gatgtcccaaggtttgctggccagg

SEQ ID NO: 1305718 - DNA, 25 bp, Homo sapien
gctgatagtggcttggtttggcttc

SEQ ID NO: 1305719 - DNA, 25 bp, Homo sapien
gcatgaacatggagcgagtcctccg

SEQ ID NO: 1305720 - DNA, 25 bp, Homo sapien
gtggcttggtttggcttcaatgtcc

SEQ ID NO: 1305721 - DNA, 25 bp, Homo sapien
atggagcgagtcctccgtgctgctt

SEQ ID NO: 1305722 - DNA, 25 bp, Homo sapien
cactttgctgagtcatgcatggatc

SEQ ID NO: 1305723 - DNA, 25 bp, Homo sapien
gctgagtcatgcatggatcatgcta

SEQ ID NO: 1305724 - DNA, 25 bp, Homo sapien
ttgctgagtcatgcatggatcatgc

SEQ ID NO: 1305725 - DNA, 25 bp, Homo sapien
ctttgctgagtcatgcatggatcat

SEQ ID NO: 1305726 - DNA, 25 bp, Homo sapien
ttggacatcggcttgaacttctaac

SEQ ID NO: 1305727 - DNA, 25 bp, Homo sapien
tgtaggaactgattatggaaccggc

SEQ ID NO: 1305728 - DNA, 25 bp, Homo sapien
gcacgagtgcttgcgttgtcactaa

SEQ ID NO: 1305729 - DNA, 25 bp, Homo sapien
tcactaattgcaccaagactggctg

SEQ ID NO: 1305730 - DNA, 25 bp, Homo sapien
cttgccactggagagaatgccgcca

SEQ ID NO: 1305731 - DNA, 25 bp, Homo sapien
agagaatgccgccactcagcgtgcc

SEQ ID NO: 1305732 - DNA, 25 bp, Homo sapien
ataacactaagtccatctgtagggc

SEQ ID NO: 1305733 - DNA, 25 bp, Homo sapien
gccgtttcgctgtaaggaccttgca

SEQ ID NO: 1305734 - DNA, 25 bp, Homo sapien
taccagcatacttggagttacttgg

SEQ ID NO: 1305735 - DNA, 25 bp, Homo sapien
gacaatctccctgtaaaatgcgctg

SEQ ID NO: 1305736 - DNA, 25 bp, Homo sapien
cctactagtttgtacctgccacaca

SEQ ID NO: 1305737 - DNA, 25 bp, Homo sapien
tcctccctcgtcagagagctgtttg

SEQ ID NO: 1305738 - DNA, 25 bp, Homo sapien
actccttttccgttggctgtgctaa

SEQ ID NO: 1305739 - DNA, 25 bp, Homo sapien
gccgcctccacgacaaagagaaatg

SEQ ID NO: 1305740 - DNA, 25 bp, Homo sapien
gagaaatgggcacaaccccataaac

SEQ ID NO: 1305741 - DNA, 25 bp, Homo sapien
ccccataaacatatgccagcataat

SEQ ID NO: 1305742 - DNA, 25 bp, Homo sapien
gatgcaatgaccgacaaagtcactc

SEQ ID NO: 1305743 - DNA, 25 bp, Homo sapien
aatgaccgacaaagtcactcctcca

SEQ ID NO: 1305744 - DNA, 25 bp, Homo sapien
gaccgacaaagtcactcctccagtg

SEQ ID NO: 1305745 - DNA, 25 bp, Homo sapien
aacactaactgcagcaataactggg

SEQ ID NO: 1305746 - DNA, 25 bp, Homo sapien
gaattttcttcttacggctccatgg

SEQ ID NO: 1305747 - DNA, 25 bp, Homo sapien
gagcaccaatcaacgtgcccagctg

SEQ ID NO: 1305748 - DNA, 25 bp, Homo sapien
ttgccccagaatgtacagccagagg

SEQ ID NO: 1305749 - DNA, 25 bp, Homo sapien
gcaatgagagaaatccccactggag

SEQ ID NO: 1305750 - DNA, 25 bp, Homo sapien
ctgaggtaatgcaagtctgagatct

SEQ ID NO: 1305751 - DNA, 25 bp, Homo sapien
tgcatcgtgggcatggcttgatgtc

SEQ ID NO: 1305752 - DNA, 25 bp, Homo sapien
tcttgataatgtatgcactgcatcg

SEQ ID NO: 1305753 - DNA, 25 bp, Homo sapien
gcactgcatcgtgggcatggcttga

SEQ ID NO: 1305754 - DNA, 25 bp, Homo sapien
attcatcttgataatgtatgcactg

SEQ ID NO: 1305755 - DNA, 25 bp, Homo sapien
tgttgacgggccatatcgcatgtct

SEQ ID NO: 1305756 - DNA, 25 bp, Homo sapien
tggtccgaactcgtaaagtctgggc

SEQ ID NO: 1305757 - DNA, 25 bp, Homo sapien
gattcttgcccataactgagacctg

SEQ ID NO: 1305758 - DNA, 25 bp, Homo sapien
tgcttgcagtggtagcagaactcag

SEQ ID NO: 1305759 - DNA, 25 bp, Homo sapien
tgcaggttactctatttacatctgg

SEQ ID NO: 1305760 - DNA, 25 bp, Homo sapien
aaatccaggtttgtgcaggttactc

SEQ ID NO: 1305761 - DNA, 25 bp, Homo sapien
tactctatttacatctgggagcaga

SEQ ID NO: 1305762 - DNA, 25 bp, Homo sapien
aagcaaatggctcagtgttgtattt

SEQ ID NO: 1305763 - DNA, 25 bp, Homo sapien
ttctccaacgcccctttgcagatgc

SEQ ID NO: 1305764 - DNA, 25 bp, Homo sapien
tttgcagatgcagccctgggcacac

SEQ ID NO: 1305765 - DNA, 25 bp, Homo sapien
tctccaacgcccctttgcagatgca

SEQ ID NO: 1305766 - DNA, 25 bp, Homo sapien
ccctttgcagatgcagccctgggca

SEQ ID NO: 1305767 - DNA, 25 bp, Homo sapien
ggcgcacatgcaggagccaccagtg

SEQ ID NO: 1305768 - DNA, 25 bp, Homo sapien
gagccggcgcacatgcaggagccac

SEQ ID NO: 1305769 - DNA, 25 bp, Homo sapien
acatgcaggagccaccagtggcaca

SEQ ID NO: 1305770 - DNA, 25 bp, Homo sapien
gcacatgcaggagccaccagtggca

SEQ ID NO: 1305771 - DNA, 25 bp, Homo sapien
tgaggccaacaagcagtcaggcagt

SEQ ID NO: 1305772 - DNA, 25 bp, Homo sapien
cggtgaggccaacaagcagtcaggc

SEQ ID NO: 1305773 - DNA, 25 bp, Homo sapien
aagcagtcaggcagttggaaagcat

SEQ ID NO: 1305774 - DNA, 25 bp, Homo sapien
aggccaacaagcagtcaggcagttg

SEQ ID NO: 1305775 - DNA, 25 bp, Homo sapien
cctcaaataacgtgtacaaaaagct

SEQ ID NO: 1305776 - DNA, 25 bp, Homo sapien
tctcccgcaatattcaaagacctca

SEQ ID NO: 1305777 - DNA, 25 bp, Homo sapien
caggtttccgtgttgccatctgcac

SEQ ID NO: 1305778 - DNA, 25 bp, Homo sapien
caccaagcttggtctatgacacaca

SEQ ID NO: 1305779 - DNA, 25 bp, Homo sapien
cagcaatctattactacgacacaga

SEQ ID NO: 1305780 - DNA, 25 bp, Homo sapien
taaaatctccaaaccggcctggtgc

SEQ ID NO: 1305781 - DNA, 25 bp, Homo sapien
tactcagggcacgagatttggcatt

SEQ ID NO: 1305782 - DNA, 25 bp, Homo sapien
cctgtttttgggtacctggtctgag

SEQ ID NO: 1305783 - DNA, 25 bp, Homo sapien
gcaccagcggcagtcggggtccgag

SEQ ID NO: 1305784 - DNA, 25 bp, Homo sapien
ccgaggctaggtagcggcgcagcat

SEQ ID NO: 1305785 - DNA, 25 bp, Homo sapien
ggccgggcaccagcggcagtcgggg

SEQ ID NO: 1305786 - DNA, 25 bp, Homo sapien
cagtcggggtccgaggctaggtagc

SEQ ID NO: 1305787 - DNA, 25 bp, Homo sapien
tcggcgagcagcaagcggatgtcgt

SEQ ID NO: 1305788 - DNA, 25 bp, Homo sapien
tgcgggttgagtcgctcgctgcact

SEQ ID NO: 1305789 - DNA, 25 bp, Homo sapien
tgctctcgcttatctccaggcgcag

SEQ ID NO: 1305790 - DNA, 25 bp, Homo sapien
cgtacttgtgcataagcggcgggtc

SEQ ID NO: 1305791 - DNA, 25 bp, Homo sapien
agccgcaccaggcacagcggacact

SEQ ID NO: 1305792 - DNA, 25 bp, Homo sapien
gcccgctcaggcggcagccgcacca

SEQ ID NO: 1305793 - DNA, 25 bp, Homo sapien
aggcggcagccgcaccaggcacagc

SEQ ID NO: 1305794 - DNA, 25 bp, Homo sapien
ccgctcaggcggcagccgcaccagg

SEQ ID NO: 1305795 - DNA, 25 bp, Homo sapien
tgtgcaaggtgaggcgccggcgccg

SEQ ID NO: 1305796 - DNA, 25 bp, Homo sapien
ggctcggcctgcggcttggcccggg

SEQ ID NO: 1305797 - DNA, 25 bp, Homo sapien
tcctcatcgtcgaacccaggctccg

SEQ ID NO: 1305798 - DNA, 25 bp, Homo sapien
gccgcctcctcatcgtcgaacccag

SEQ ID NO: 1305799 - DNA, 25 bp, Homo sapien
tgtagcgatgtggagcgcggcgact

SEQ ID NO: 1305800 - DNA, 25 bp, Homo sapien
gagcgcggcgactcggagtccttct

SEQ ID NO: 1305801 - DNA, 25 bp, Homo sapien
ttagggtcgggtgcggccgcatgta

SEQ ID NO: 1305802 - DNA, 25 bp, Homo sapien
gactcggagtccttctcggagccca

SEQ ID NO: 1305803 - DNA, 25 bp, Homo sapien
agccgagcggcaacgacgaagtgat

SEQ ID NO: 1305804 - DNA, 25 bp, Homo sapien
ccatgacacccaaggtggacttttt

SEQ ID NO: 1305805 - DNA, 25 bp, Homo sapien
ttggtttgccgttcctcacaggttg

SEQ ID NO: 1305806 - DNA, 25 bp, Homo sapien
gaagtgattataaagcctccgcccc

SEQ ID NO: 1305807 - DNA, 25 bp, Homo sapien
cccattcctctgactgggggaggat

SEQ ID NO: 1305808 - DNA, 25 bp, Homo sapien
gaaggagacccagcgttttcttgcc

SEQ ID NO: 1305809 - DNA, 25 bp, Homo sapien
actgggggaggatctggacccttag

SEQ ID NO: 1305810 - DNA, 25 bp, Homo sapien
gggaggatctggacccttaggcttc

SEQ ID NO: 1305811 - DNA, 25 bp, Homo sapien
cgttcccaccgcctttgccactcat

SEQ ID NO: 1305812 - DNA, 25 bp, Homo sapien
ctcccagccgttcccaccgcctttg

SEQ ID NO: 1305813 - DNA, 25 bp, Homo sapien
tgacaaggctgcctccgaaatccct

SEQ ID NO: 1305814 - DNA, 25 bp, Homo sapien
cactctttgacaaggctgcctccga

SEQ ID NO: 1305815 - DNA, 25 bp, Homo sapien
cctcaccagtcccaccgcctccttg

SEQ ID NO: 1305816 - DNA, 25 bp, Homo sapien
cgcctccttgcacgggagaccccat

SEQ ID NO: 1305817 - DNA, 25 bp, Homo sapien
cagtcccaccgcctccttgcacggg

SEQ ID NO: 1305818 - DNA, 25 bp, Homo sapien
ccaccgcctccttgcacgggagacc

SEQ ID NO: 1305819 - DNA, 25 bp, Homo sapien
taccaggttcaaggtgtgtgttgcc

SEQ ID NO: 1305820 - DNA, 25 bp, Homo sapien
caagtccctggaggaaatctagccc

SEQ ID NO: 1305821 - DNA, 25 bp, Homo sapien
caagttgggctacctggtcaaggac

SEQ ID NO: 1305822 - DNA, 25 bp, Homo sapien
ccttgaccatcgaggagtctgagat

SEQ ID NO: 1305823 - DNA, 25 bp, Homo sapien
agaattatagctatctgaccctcaa

SEQ ID NO: 1305824 - DNA, 25 bp, Homo sapien
tctccaagaattatagctatctgac

SEQ ID NO: 1305825 - DNA, 25 bp, Homo sapien
caagaattatagctatctgaccctc

SEQ ID NO: 1305826 - DNA, 25 bp, Homo sapien
aattatagctatctgaccctcaacc

SEQ ID NO: 1305827 - DNA, 25 bp, Homo sapien
acctgatactcgatacctcttttga

SEQ ID NO: 1305828 - DNA, 25 bp, Homo sapien
aaccaaaacctgatactcgatacct

SEQ ID NO: 1305829 - DNA, 25 bp, Homo sapien
gatacctcttttgagtccactaagc

SEQ ID NO: 1305830 - DNA, 25 bp, Homo sapien
ctcttttgagtccactaagcagccc

SEQ ID NO: 1305831 - DNA, 25 bp, Homo sapien
ctcattcaccatcagaaagtacctg

SEQ ID NO: 1305832 - DNA, 25 bp, Homo sapien
agtacctggtgttcaccgactgctg

SEQ ID NO: 1305833 - DNA, 25 bp, Homo sapien
tacctggtgttcaccgactgctggg

SEQ ID NO: 1305834 - DNA, 25 bp, Homo sapien
attcaccatcagaaagtacctggtg

SEQ ID NO: 1305835 - DNA, 25 bp, Homo sapien
ccttcctatagggaagccatccagg

SEQ ID NO: 1305836 - DNA, 25 bp, Homo sapien
tggaagatgtagtagctccacgtcc

SEQ ID NO: 1305837 - DNA, 25 bp, Homo sapien
gaagatgtagtagctccacgtcctt

SEQ ID NO: 1305838 - DNA, 25 bp, Homo sapien
gctccacgtccttcctatagggaag

SEQ ID NO: 1305839 - DNA, 25 bp, Homo sapien
ggtcacggacaggagcaatcttatt

SEQ ID NO: 1305840 - DNA, 25 bp, Homo sapien
catgcaggagggactactttgtggt

SEQ ID NO: 1305841 - DNA, 25 bp, Homo sapien
tattcaactgccttccaggaaactg

SEQ ID NO: 1305842 - DNA, 25 bp, Homo sapien
gcacatcagccaccgagttgggcct

SEQ ID NO: 1305843 - DNA, 25 bp, Homo sapien
cactatgggagtcactgttctaaaa

SEQ ID NO: 1305844 - DNA, 25 bp, Homo sapien
tgttctaaaacacctgacagacatg

SEQ ID NO: 1305845 - DNA, 25 bp, Homo sapien
gctgctagcttggaaacacttactg

SEQ ID NO: 1305846 - DNA, 25 bp, Homo sapien
gacatgtacaaactggaattgctga

SEQ ID NO: 1305847 - DNA, 25 bp, Homo sapien
ggagcgggcaacctacattactcgc

SEQ ID NO: 1305848 - DNA, 25 bp, Homo sapien
tcacaaagctaccttcttctctgca

SEQ ID NO: 1305849 - DNA, 25 bp, Homo sapien
agtggccgctgtaccctcccttgtg

SEQ ID NO: 1305850 - DNA, 25 bp, Homo sapien
accctctgcatggagtcacccagat

SEQ ID NO: 1305851 - DNA, 25 bp, Homo sapien
gcacctcaatctggactgggcacct

SEQ ID NO: 1305852 - DNA, 25 bp, Homo sapien
ttggcttgagggctacctgcacagg

SEQ ID NO: 1305853 - DNA, 25 bp, Homo sapien
ccgtgctcggccaaaaatgaagcat

SEQ ID NO: 1305854 - DNA, 25 bp, Homo sapien
cctgcacaggatctaggcccatgtt

SEQ ID NO: 1305855 - DNA, 25 bp, Homo sapien
cagcaaagtgtcaaagcaattggca

SEQ ID NO: 1305856 - DNA, 25 bp, Homo sapien
caattggcacagtgttaagaggctg

SEQ ID NO: 1305857 - DNA, 25 bp, Homo sapien
aatagcaatacttacctccacaggg

SEQ ID NO: 1305858 - DNA, 25 bp, Homo sapien
tccacagggttatcgaggagaataa

SEQ ID NO: 1305859 - DNA, 25 bp, Homo sapien
gcagcgctgagtgtccatggaaaag

SEQ ID NO: 1305860 - DNA, 25 bp, Homo sapien
cagagccggcagtgacttcttcaaa

SEQ ID NO: 1305861 - DNA, 25 bp, Homo sapien
tccaaggtcgcatggtgaagtcgct

SEQ ID NO: 1305862 - DNA, 25 bp, Homo sapien
cctgtgtgcagagctacgcaagtaa

SEQ ID NO: 1305863 - DNA, 25 bp, Homo sapien
tgctgtgtgagggttacgtgaagtc

SEQ ID NO: 1305864 - DNA, 25 bp, Homo sapien
gttacgtgaagtcgagggttacatg

SEQ ID NO: 1305865 - DNA, 25 bp, Homo sapien
cgagggttacatgaagcctttgcat

SEQ ID NO: 1305866 - DNA, 25 bp, Homo sapien
tgaagtcgagggttacatgaagcct

SEQ ID NO: 1305867 - DNA, 25 bp, Homo sapien
gtggtaggactagtctgcattcttg

SEQ ID NO: 1305868 - DNA, 25 bp, Homo sapien
ctggcacaacgtcagtcttccggga

SEQ ID NO: 1305869 - DNA, 25 bp, Homo sapien
ggagtggtaggactagtctgcattc

SEQ ID NO: 1305870 - DNA, 25 bp, Homo sapien
caacgtcagtcttccgggagtggta

SEQ ID NO: 1305871 - DNA, 25 bp, Homo sapien
tattcttctcaactacaccatgctg

SEQ ID NO: 1305872 - DNA, 25 bp, Homo sapien
ttcaacagttatccagcctggcagg

SEQ ID NO: 1305873 - DNA, 25 bp, Homo sapien
gaagaatagtggtgcttccagccca

SEQ ID NO: 1305874 - DNA, 25 bp, Homo sapien
tatccaatgtctgttgcatgccagg

SEQ ID NO: 1305875 - DNA, 25 bp, Homo sapien
cagctgccagcgacaagaaagggct

SEQ ID NO: 1305876 - DNA, 25 bp, Homo sapien
cagtgctgttgagtgatcccagtca

SEQ ID NO: 1305877 - DNA, 25 bp, Homo sapien
ggccaaacaaggcagcatttggtca

SEQ ID NO: 1305878 - DNA, 25 bp, Homo sapien
cagcatttggtcagttaagaaaggc

SEQ ID NO: 1305879 - DNA, 25 bp, Homo sapien
aatggaaaggacaatctttggatga

SEQ ID NO: 1305880 - DNA, 25 bp, Homo sapien
accggagtcagtaatcaaagctccc

SEQ ID NO: 1305881 - DNA, 25 bp, Homo sapien
catgaaagtaggtagcctagtaaat

SEQ ID NO: 1305882 - DNA, 25 bp, Homo sapien
gaaccggagtcagtaatcaaagctc

SEQ ID NO: 1305883 - DNA, 25 bp, Homo sapien
tactcatgaaagtaggtagcctagt

SEQ ID NO: 1305884 - DNA, 25 bp, Homo sapien
gaccaggcacacatagctgacagtt

SEQ ID NO: 1305885 - DNA, 25 bp, Homo sapien
tgtaagccccagcaaccaaatgcat

SEQ ID NO: 1305886 - DNA, 25 bp, Homo sapien
aatcttccagttcttatgggcagcc

SEQ ID NO: 1305887 - DNA, 25 bp, Homo sapien
tcagaggaggctggcatgtaagccc

SEQ ID NO: 1305888 - DNA, 25 bp, Homo sapien
gctgaggctggcgatattatttact

SEQ ID NO: 1305889 - DNA, 25 bp, Homo sapien
tttagagtccactgaatcgagtcag

SEQ ID NO: 1305890 - DNA, 25 bp, Homo sapien
aggctgccgtttttgtggtccttca

SEQ ID NO: 1305891 - DNA, 25 bp, Homo sapien
gaatcgagtcagcagcagattatgc

SEQ ID NO: 1305892 - DNA, 25 bp, Homo sapien
tccaagaatagatcacacactgttt

SEQ ID NO: 1305893 - DNA, 25 bp, Homo sapien
tgggtttgaataaatactgatcaaa

SEQ ID NO: 1305894 - DNA, 25 bp, Homo sapien
atcaaaccagagaccaaaagacagc

SEQ ID NO: 1305895 - DNA, 25 bp, Homo sapien
caatagttgggaagctaaggttatg

SEQ ID NO: 1305896 - DNA, 25 bp, Homo sapien
gaagtagatttgactgctctcagat

SEQ ID NO: 1305897 - DNA, 25 bp, Homo sapien
gatttgactgctctcagatgatcag

SEQ ID NO: 1305898 - DNA, 25 bp, Homo sapien
gggaagtagatttgactgctctcag

SEQ ID NO: 1305899 - DNA, 25 bp, Homo sapien
agtagatttgactgctctcagatga

SEQ ID NO: 1305900 - DNA, 25 bp, Homo sapien
tgtaacctgcaaagtaagtgccttt

SEQ ID NO: 1305901 - DNA, 25 bp, Homo sapien
gacgatatcctctcccagtaatttc

SEQ ID NO: 1305902 - DNA, 25 bp, Homo sapien
aaaatattccaatttggcctggctc

SEQ ID NO: 1305903 - DNA, 25 bp, Homo sapien
tgaattcaaaaggacctttcacctg

SEQ ID NO: 1305904 - DNA, 25 bp, Homo sapien
gaattgcggtccctggaagattacc

SEQ ID NO: 1305905 - DNA, 25 bp, Homo sapien
gactcacgtgggttttcatcatggg

SEQ ID NO: 1305906 - DNA, 25 bp, Homo sapien
ggaactgtgaccctgcctgacttca

SEQ ID NO: 1305907 - DNA, 25 bp, Homo sapien
agatgagagtagcacacacgccaaa

SEQ ID NO: 1305908 - DNA, 25 bp, Homo sapien
gatatttttgctagcctgaggaagc

SEQ ID NO: 1305909 - DNA, 25 bp, Homo sapien
atttttgctagcctgaggaagcttc

SEQ ID NO: 1305910 - DNA, 25 bp, Homo sapien
ttgctagcctgaggaagcttctctt

SEQ ID NO: 1305911 - DNA, 25 bp, Homo sapien
atgatatttttgctagcctgaggaa

SEQ ID NO: 1305912 - DNA, 25 bp, Homo sapien
cccacccattgcctcacagggatgg

SEQ ID NO: 1305913 - DNA, 25 bp, Homo sapien
acccattgcctcacagggatggaaa

SEQ ID NO: 1305914 - DNA, 25 bp, Homo sapien
ccacccattgcctcacagggatgga

SEQ ID NO: 1305915 - DNA, 25 bp, Homo sapien
cacccattgcctcacagggatggaa

SEQ ID NO: 1305916 - DNA, 25 bp, Homo sapien
gctaggatgcttgcgaacacgacat

SEQ ID NO: 1305917 - DNA, 25 bp, Homo sapien
agaaggctgctaggatgcttgcgaa

SEQ ID NO: 1305918 - DNA, 25 bp, Homo sapien
aaggctgctaggatgcttgcgaaca

SEQ ID NO: 1305919 - DNA, 25 bp, Homo sapien
gctgctaggatgcttgcgaacacga

SEQ ID NO: 1305920 - DNA, 25 bp, Homo sapien
caggcggattttcaaggccttttca

SEQ ID NO: 1305921 - DNA, 25 bp, Homo sapien
tggtaggcttgcaggcggattttca

SEQ ID NO: 1305922 - DNA, 25 bp, Homo sapien
tttgagtgtggtaggcttgcaggcg

SEQ ID NO: 1305923 - DNA, 25 bp, Homo sapien
tcctgtagtactctatgagtggggt

SEQ ID NO: 1305924 - DNA, 25 bp, Homo sapien
atctgatcgacggatcaagggttcc

SEQ ID NO: 1305925 - DNA, 25 bp, Homo sapien
tctgatcgacggatcaagggttccc

SEQ ID NO: 1305926 - DNA, 25 bp, Homo sapien
ctgatcgacggatcaagggttcccc

SEQ ID NO: 1305927 - DNA, 25 bp, Homo sapien
tgatcgacggatcaagggttccccg

SEQ ID NO: 1305928 - DNA, 25 bp, Homo sapien
agcaatgaaaggctgggactgttag

SEQ ID NO: 1305929 - DNA, 25 bp, Homo sapien
gacagcaatgaaaggctgggactgt

SEQ ID NO: 1305930 - DNA, 25 bp, Homo sapien
acagcaatgaaaggctgggactgtt

SEQ ID NO: 1305931 - DNA, 25 bp, Homo sapien
cagcaatgaaaggctgggactgtta

SEQ ID NO: 1305932 - DNA, 25 bp, Homo sapien
tagcaccactggaagcaaccttgag

SEQ ID NO: 1305933 - DNA, 25 bp, Homo sapien
cagtgaccatgtatgaaaccccagg

SEQ ID NO: 1305934 - DNA, 25 bp, Homo sapien
gattagctgatcacttaggtggcca

SEQ ID NO: 1305935 - DNA, 25 bp, Homo sapien
tctgggcactgcaaaaagctagcac

SEQ ID NO: 1305936 - DNA, 25 bp, Homo sapien
cttttggagggttgaactcctcgtg

SEQ ID NO: 1305937 - DNA, 25 bp, Homo sapien
tcgtggtaggaacggccactcttgg

SEQ ID NO: 1305938 - DNA, 25 bp, Homo sapien
ttgaactcctcgtggtaggaacggc

SEQ ID NO: 1305939 - DNA, 25 bp, Homo sapien
ttggagggttgaactcctcgtggta

SEQ ID NO: 1305940 - DNA, 25 bp, Homo sapien
caggagcctagaaacctaaggaaag

SEQ ID NO: 1305941 - DNA, 25 bp, Homo sapien
actgaatgtatagtgggcagctgca

SEQ ID NO: 1305942 - DNA, 25 bp, Homo sapien
tacagacaacaagcccatgttcctg

SEQ ID NO: 1305943 - DNA, 25 bp, Homo sapien
ggtctattagactagagctccctaa

SEQ ID NO: 1305944 - DNA, 25 bp, Homo sapien
caatgggtccatatcatctcagact

SEQ ID NO: 1305945 - DNA, 25 bp, Homo sapien
cagccgacatctgtgaccaacctgg

SEQ ID NO: 1305946 - DNA, 25 bp, Homo sapien
aaaaagatcctgtgtgaggtccggg

SEQ ID NO: 1305947 - DNA, 25 bp, Homo sapien
aaattactagaagtgaggtcagagc

SEQ ID NO: 1305948 - DNA, 25 bp, Homo sapien
ggataatagtgctaaccctgtgctg

SEQ ID NO: 1305949 - DNA, 25 bp, Homo sapien
gctgggcccatagaatcaaaggtct

SEQ ID NO: 1305950 - DNA, 25 bp, Homo sapien
taaaggagcctatggaatagccgga

SEQ ID NO: 1305951 - DNA, 25 bp, Homo sapien
taagagaccccaggcctagtgatgt

SEQ ID NO: 1305952 - DNA, 25 bp, Homo sapien
gagcactaaaatggaggagatacac

SEQ ID NO: 1305953 - DNA, 25 bp, Homo sapien
tgtgcctagggtcacagttaaaaag

SEQ ID NO: 1305954 - DNA, 25 bp, Homo sapien
tgttacctaacacgtgaaatagctt

SEQ ID NO: 1305955 - DNA, 25 bp, Homo sapien
tacagcaaagtatggcaactccagc

SEQ ID NO: 1305956 - DNA, 25 bp, Homo sapien
cttcctgtgattcttcggatcagca

SEQ ID NO: 1305957 - DNA, 25 bp, Homo sapien
gattcttcggatcagcagagagtct

SEQ ID NO: 1305958 - DNA, 25 bp, Homo sapien
tgtgattcttcggatcagcagagag

SEQ ID NO: 1305959 - DNA, 25 bp, Homo sapien
cctgtgattcttcggatcagcagag

SEQ ID NO: 1305960 - DNA, 25 bp, Homo sapien
ttctcaatgagctccactaccattt

SEQ ID NO: 1305961 - DNA, 25 bp, Homo sapien
taaatccattacctaggtgactgac

SEQ ID NO: 1305962 - DNA, 25 bp, Homo sapien
taaaagcaaacgtgaaatggctcca

SEQ ID NO: 1305963 - DNA, 25 bp, Homo sapien
ggtgactgacattagcccaactcca

SEQ ID NO: 1305964 - DNA, 25 bp, Homo sapien
tgtggttgccaaatacacactctcg

SEQ ID NO: 1305965 - DNA, 25 bp, Homo sapien
cagtttcccagcatccatagttgcc

SEQ ID NO: 1305966 - DNA, 25 bp, Homo sapien
gtttcccagcatccatagttgcctt

SEQ ID NO: 1305967 - DNA, 25 bp, Homo sapien
agcttttttcctagctctgagccag

SEQ ID NO: 1305968 - DNA, 25 bp, Homo sapien
tcccagcatccatagttgccttcag

SEQ ID NO: 1305969 - DNA, 25 bp, Homo sapien
gtccccagtagctaaatggcagaca

SEQ ID NO: 1305970 - DNA, 25 bp, Homo sapien
cagaagttttcagccaatctgggtg

SEQ ID NO: 1305971 - DNA, 25 bp, Homo sapien
gacacagaagttttcagccaatctg

SEQ ID NO: 1305972 - DNA, 25 bp, Homo sapien
cccagtagctaaatggcagacacag

SEQ ID NO: 1305973 - DNA, 25 bp, Homo sapien
aagtgttagcccactacacatcggc

SEQ ID NO: 1305974 - DNA, 25 bp, Homo sapien
gttagcccactacacatcggcatgg

SEQ ID NO: 1305975 - DNA, 25 bp, Homo sapien
acatcggcatgggaattttggcctg

SEQ ID NO: 1305976 - DNA, 25 bp, Homo sapien
agcacagtggcttcacaagtgttag

SEQ ID NO: 1305977 - DNA, 25 bp, Homo sapien
cagagctagtaaaagaactggcaac

SEQ ID NO: 1305978 - DNA, 25 bp, Homo sapien
ccatgcattgttttacggtacttag

SEQ ID NO: 1305979 - DNA, 25 bp, Homo sapien
gcaacaggccagattaccaagccct

SEQ ID NO: 1305980 - DNA, 25 bp, Homo sapien
ccttcttccgctgaggattcatatt

SEQ ID NO: 1305981 - DNA, 25 bp, Homo sapien
tgctacttactacatgtgtgtcctg

SEQ ID NO: 1305982 - DNA, 25 bp, Homo sapien
tgtgtcctgaggcaagataaagcct

SEQ ID NO: 1305983 - DNA, 25 bp, Homo sapien
taacttactgaggaaatcattacca

SEQ ID NO: 1305984 - DNA, 25 bp, Homo sapien
gggtctgtcacgtaactgagcaatg

SEQ ID NO: 1305985 - DNA, 25 bp, Homo sapien
gggcagtagatagcagcagaaagag

SEQ ID NO: 1305986 - DNA, 25 bp, Homo sapien
tgcaagctctgtaaattacttgcta

SEQ ID NO: 1305987 - DNA, 25 bp, Homo sapien
aattacttgctatgtagcctagaga

SEQ ID NO: 1305988 - DNA, 25 bp, Homo sapien
tagcctagagaacaagccattcaaa

SEQ ID NO: 1305989 - DNA, 25 bp, Homo sapien
aatgagtaagatggtctgtttgcca

SEQ ID NO: 1305990 - DNA, 25 bp, Homo sapien
agaatgagtaagatggtctgtttgc

SEQ ID NO: 1305991 - DNA, 25 bp, Homo sapien
gagtaagatggtctgtttgccaaga

SEQ ID NO: 1305992 - DNA, 25 bp, Homo sapien
caaggggtaccaagaatgagtaaga

SEQ ID NO: 1305993 - DNA, 25 bp, Homo sapien
gatgcctttaggatactcgggttct

SEQ ID NO: 1305994 - DNA, 25 bp, Homo sapien
ggatgcctttaggatactcgggttc

SEQ ID NO: 1305995 - DNA, 25 bp, Homo sapien
tcacactggcccatagccgcgtccg

SEQ ID NO: 1305996 - DNA, 25 bp, Homo sapien
gttcgcacgcctcacaggtccagtg

SEQ ID NO: 1305997 - DNA, 25 bp, Homo sapien
ctctcactgccaccagttcgcacgc

SEQ ID NO: 1305998 - DNA, 25 bp, Homo sapien
agtgcttcccaggtcaacgcacgca

SEQ ID NO: 1305999 - DNA, 25 bp, Homo sapien
agatatgaagcggagccgctgccgt

SEQ ID NO: 1306000 - DNA, 25 bp, Homo sapien
gctgccgtgaccgaccgcagccgcc

SEQ ID NO: 1306001 - DNA, 25 bp, Homo sapien
aagcggagccgctgccgtgaccgac

SEQ ID NO: 1306002 - DNA, 25 bp, Homo sapien
gccgctgccgtgaccgaccgcagcc

SEQ ID NO: 1306003 - DNA, 25 bp, Homo sapien
gccactgattggcagtcaagcataa

SEQ ID NO: 1306004 - DNA, 25 bp, Homo sapien
gcaacgtttgtgactatgattactc

SEQ ID NO: 1306005 - DNA, 25 bp, Homo sapien
caacagcagtagcatgagagacaag

SEQ ID NO: 1306006 - DNA, 25 bp, Homo sapien
gattgacttggctgacatgattctg

SEQ ID NO: 1306007 - DNA, 25 bp, Homo sapien
tgtaccaccttgatgagggcgtgta

SEQ ID NO: 1306008 - DNA, 25 bp, Homo sapien
caaggatgacgaaggttatcaccca

SEQ ID NO: 1306009 - DNA, 25 bp, Homo sapien
tcagctctgtggtaaattcctggaa

SEQ ID NO: 1306010 - DNA, 25 bp, Homo sapien
tgcagaaggtgagcttaccccacgt

SEQ ID NO: 1306011 - DNA, 25 bp, Homo sapien
tgttggccagactggatgatttttt

SEQ ID NO: 1306012 - DNA, 25 bp, Homo sapien
acaggcgcctgccaccatgcctggc

SEQ ID NO: 1306013 - DNA, 25 bp, Homo sapien
gtcagcctcctgagtagctgagatt

SEQ ID NO: 1306014 - DNA, 25 bp, Homo sapien
gggttcaaatgattcgcctgtgtca

SEQ ID NO: 1306015 - DNA, 25 bp, Homo sapien
aataggctgaaagcttgggacatca

SEQ ID NO: 1306016 - DNA, 25 bp, Homo sapien
tctaggtaagcctgaccatcctgct

SEQ ID NO: 1306017 - DNA, 25 bp, Homo sapien
cctggtgggaactgtacgtggcttt

SEQ ID NO: 1306018 - DNA, 25 bp, Homo sapien
ggtcatctcatgaggcaatgtggca

SEQ ID NO: 1306019 - DNA, 25 bp, Homo sapien
tgcttaccacagagtagacacttag

SEQ ID NO: 1306020 - DNA, 25 bp, Homo sapien
tctccgggctttcatgcatcctgta

SEQ ID NO: 1306021 - DNA, 25 bp, Homo sapien
tgtgatctggaacctaagactgtgc

SEQ ID NO: 1306022 - DNA, 25 bp, Homo sapien
tccataaagacagggagtgtttctc

SEQ ID NO: 1306023 - DNA, 25 bp, Homo sapien
caaggcatggttgattgagcagtct

SEQ ID NO: 1306024 - DNA, 25 bp, Homo sapien
tttgaatttgacatcccacattcca

SEQ ID NO: 1306025 - DNA, 25 bp, Homo sapien
aggcattaatgtgaccgggctccat

SEQ ID NO: 1306026 - DNA, 25 bp, Homo sapien
tgtgaccgggctccatttttgaatt

SEQ ID NO: 1306027 - DNA, 25 bp, Homo sapien
gggatggtgggctggggcaggtgac

SEQ ID NO: 1306028 - DNA, 25 bp, Homo sapien
gggcccctcatggggatggtgggct

SEQ ID NO: 1306029 - DNA, 25 bp, Homo sapien
cccctcatggggatggtgggctggg

SEQ ID NO: 1306030 - DNA, 25 bp, Homo sapien
gcccctcatggggatggtgggctgg

SEQ ID NO: 1306031 - DNA, 25 bp, Homo sapien
agggccgggatggtgatcactgcag

SEQ ID NO: 1306032 - DNA, 25 bp, Homo sapien
gggccgggatggtgatcactgcagc

SEQ ID NO: 1306033 - DNA, 25 bp, Homo sapien
caccggcggcacgttttccatttat

SEQ ID NO: 1306034 - DNA, 25 bp, Homo sapien
ggccgggatggtgatcactgcagct

SEQ ID NO: 1306035 - DNA, 25 bp, Homo sapien
aaatgtgagctctgccacgtaagca

SEQ ID NO: 1306036 - DNA, 25 bp, Homo sapien
cagacctggtctataattggattca

SEQ ID NO: 1306037 - DNA, 25 bp, Homo sapien
gcacaggtttgggagtcacacagcc

SEQ ID NO: 1306038 - DNA, 25 bp, Homo sapien
aactaatcatgaggcgtacagggac

SEQ ID NO: 1306039 - DNA, 25 bp, Homo sapien
gataccgggcctttgcaactgacct

SEQ ID NO: 1306040 - DNA, 25 bp, Homo sapien
caacacctttgttagtactccacct

SEQ ID NO: 1306041 - DNA, 25 bp, Homo sapien
tagccctctgtatttaagcctgtga

SEQ ID NO: 1306042 - DNA, 25 bp, Homo sapien
gattgtgtagaatctttggtgtccc

SEQ ID NO: 1306043 - DNA, 25 bp, Homo sapien
cccacgtgtccaggccccgttcgtg

SEQ ID NO: 1306044 - DNA, 25 bp, Homo sapien
cacgaacggggcctggacacgtggg

SEQ ID NO: 1306045 - DNA, 25 bp, Homo sapien
tgtagatgaagatccacctgtggcc

SEQ ID NO: 1306046 - DNA, 25 bp, Homo sapien
tctgactctgtgaccatgtgcggct

SEQ ID NO: 1306047 - DNA, 25 bp, Homo sapien
aagacagaatagtgggcatggcccc

SEQ ID NO: 1306048 - DNA, 25 bp, Homo sapien
caggagtccccagttgataatgcaa

SEQ ID NO: 1306049 - DNA, 25 bp, Homo sapien
ggtctaggtggttccatacccgtca

SEQ ID NO: 1306050 - DNA, 25 bp, Homo sapien
ttcaggaaacccatacagctccagg

SEQ ID NO: 1306051 - DNA, 25 bp, Homo sapien
tgtggttcccgagaccaggctcttg

SEQ ID NO: 1306052 - DNA, 25 bp, Homo sapien
tagggtagggcctccttaagtgcac

SEQ ID NO: 1306053 - DNA, 25 bp, Homo sapien
aagtgcagaatctaggccccaggac

SEQ ID NO: 1306054 - DNA, 25 bp, Homo sapien
tgttgtgtcagagaccccaagtgca

SEQ ID NO: 1306055 - DNA, 25 bp, Homo sapien
tagctcttccggctactttgggatg

SEQ ID NO: 1306056 - DNA, 25 bp, Homo sapien
tgacaattccttttgcccaagggag

SEQ ID NO: 1306057 - DNA, 25 bp, Homo sapien
catgatgaatctggcgctgggagtt

SEQ ID NO: 1306058 - DNA, 25 bp, Homo sapien
ccaacaattttgcaagccaccaggg

SEQ ID NO: 1306059 - DNA, 25 bp, Homo sapien
ggcaggacaaccctagatgtggact

SEQ ID NO: 1306060 - DNA, 25 bp, Homo sapien
acatctattggctggcacggaccgt

SEQ ID NO: 1306061 - DNA, 25 bp, Homo sapien
tcaaagctgtatccctatcaaggtc

SEQ ID NO: 1306062 - DNA, 25 bp, Homo sapien
tctcaggcaaccctaggaccaggta

SEQ ID NO: 1306063 - DNA, 25 bp, Homo sapien
taaatggcccatcactagcttggtc

SEQ ID NO: 1306064 - DNA, 25 bp, Homo sapien
tgtggactcaactaccaggtgcctt

SEQ ID NO: 1306065 - DNA, 25 bp, Homo sapien
gcaagccttggtcatagtccaggaa

SEQ ID NO: 1306066 - DNA, 25 bp, Homo sapien
tactggttgccatcgtgcatcacga

SEQ ID NO: 1306067 - DNA, 25 bp, Homo sapien
catcacgatgcagtagaagccgcgg

SEQ ID NO: 1306068 - DNA, 25 bp, Homo sapien
tgcaagttgccgtaagccacaatgg

SEQ ID NO: 1306069 - DNA, 25 bp, Homo sapien
gaggttggtctcatggatttttccc

SEQ ID NO: 1306070 - DNA, 25 bp, Homo sapien
tggatgtcctggaacagggacttcc

SEQ ID NO: 1306071 - DNA, 25 bp, Homo sapien
gaagtcttcatatgtgaggttggtc

SEQ ID NO: 1306072 - DNA, 25 bp, Homo sapien
gggacttccagatggtgtactgcag

SEQ ID NO: 1306073 - DNA, 25 bp, Homo sapien
gctcgaaggcctcgccgatagtggt

SEQ ID NO: 1306074 - DNA, 25 bp, Homo sapien
aaggtgtgccggtcggtttcagcca

SEQ ID NO: 1306075 - DNA, 25 bp, Homo sapien
tctgctcgatgtcggtcagcgtgcg

SEQ ID NO: 1306076 - DNA, 25 bp, Homo sapien
ttctggcgttcacgcagcagccggt

SEQ ID NO: 1306077 - DNA, 25 bp, Homo sapien
agtgtgatggcacgatctcggatca

SEQ ID NO: 1306078 - DNA, 25 bp, Homo sapien
tgtgatggcacgatctcggatcatt

SEQ ID NO: 1306079 - DNA, 25 bp, Homo sapien
tgatggcacgatctcggatcattgc

SEQ ID NO: 1306080 - DNA, 25 bp, Homo sapien
gagtgtgatggcacgatctcggatc

SEQ ID NO: 1306081 - DNA, 25 bp, Homo sapien
tgtgtgtcacaacaccagggttggg

SEQ ID NO: 1306082 - DNA, 25 bp, Homo sapien
cattgaacttcacggatgccctacc

SEQ ID NO: 1306083 - DNA, 25 bp, Homo sapien
tgggtgccgccccattgaacttcac

SEQ ID NO: 1306084 - DNA, 25 bp, Homo sapien
acatccttgccgccagtcatgatgg

SEQ ID NO: 1306085 - DNA, 25 bp, Homo sapien
gccagttgtcgcttgagcagctgca

SEQ ID NO: 1306086 - DNA, 25 bp, Homo sapien
ggtgtgttcccgctcgctgtcttga

SEQ ID NO: 1306087 - DNA, 25 bp, Homo sapien
cagctgcagcgcttcggtgtgttcc

SEQ ID NO: 1306088 - DNA, 25 bp, Homo sapien
aagggcctgaagttggtccttcagc

SEQ ID NO: 1306089 - DNA, 25 bp, Homo sapien
tgaaacacacacagggccgggatgg

SEQ ID NO: 1306090 - DNA, 25 bp, Homo sapien
aaacacacacagggccgggatgggg

SEQ ID NO: 1306091 - DNA, 25 bp, Homo sapien
gaaacacacacagggccgggatggg

SEQ ID NO: 1306092 - DNA, 25 bp, Homo sapien
tgctccctgggacagttggcgtgtt

SEQ ID NO: 1306093 - DNA, 25 bp, Homo sapien
gggagcgtgtcaaccagatggtttc

SEQ ID NO: 1306094 - DNA, 25 bp, Homo sapien
aaaggaatccctgaatccaagacag

SEQ ID NO: 1306095 - DNA, 25 bp, Homo sapien
gaaaacaacactggactgagtcggg

SEQ ID NO: 1306096 - DNA, 25 bp, Homo sapien
tcagcaaaggtatcctggctgccca

SEQ ID NO: 1306097 - DNA, 25 bp, Homo sapien
agcggccagctctgagtttgaccca

SEQ ID NO: 1306098 - DNA, 25 bp, Homo sapien
taagcttctacactgtggcccgtgc

SEQ ID NO: 1306099 - DNA, 25 bp, Homo sapien
ggccagctctgagtttgacccacag

SEQ ID NO: 1306100 - DNA, 25 bp, Homo sapien
gaagcaaagtgacgtgaccaaggac

SEQ ID NO: 1306101 - DNA, 25 bp, Homo sapien
tagatgaaccttagagaaggagcct

SEQ ID NO: 1306102 - DNA, 25 bp, Homo sapien
ggacacacagcatgtcaggatctga

SEQ ID NO: 1306103 - DNA, 25 bp, Homo sapien
taatgccgagtacgatgtaacctac

SEQ ID NO: 1306104 - DNA, 25 bp, Homo sapien
agggtgggttcagccttatttctgc

SEQ ID NO: 1306105 - DNA, 25 bp, Homo sapien
aagtggatgtggcaccagatcatct

SEQ ID NO: 1306106 - DNA, 25 bp, Homo sapien
gggatgtgagggtgggttcagcctt

SEQ ID NO: 1306107 - DNA, 25 bp, Homo sapien
atgtgagggtgggttcagccttatt

SEQ ID NO: 1306108 - DNA, 25 bp, Homo sapien
tgatggggccttcatcctcagacag

SEQ ID NO: 1306109 - DNA, 25 bp, Homo sapien
tctgatggggccttcatcctcagac

SEQ ID NO: 1306110 - DNA, 25 bp, Homo sapien
cctctgatggggccttcatcctcag

SEQ ID NO: 1306111 - DNA, 25 bp, Homo sapien
ctgatggggccttcatcctcagaca

SEQ ID NO: 1306112 - DNA, 25 bp, Homo sapien
tacgtgctcgactagtatcccaaag

SEQ ID NO: 1306113 - DNA, 25 bp, Homo sapien
ggtgcaggcctactcaaagactagt

SEQ ID NO: 1306114 - DNA, 25 bp, Homo sapien
tagcttgaaaaaaggattccaggcc

SEQ ID NO: 1306115 - DNA, 25 bp, Homo sapien
tgcttccaaacgctccacagtgtgg

SEQ ID NO: 1306116 - DNA, 25 bp, Homo sapien
cctagaggtctagcccctcccttct

SEQ ID NO: 1306117 - DNA, 25 bp, Homo sapien
cccttcttgaatcaccttacatctg

SEQ ID NO: 1306118 - DNA, 25 bp, Homo sapien
tcttgaatcaccttacatctgggcc

SEQ ID NO: 1306119 - DNA, 25 bp, Homo sapien
aaacctctagagactcctagaggtc

SEQ ID NO: 1306120 - DNA, 25 bp, Homo sapien
gaagagcttgaccttgtcgtgcgcc

SEQ ID NO: 1306121 - DNA, 25 bp, Homo sapien
agaagtaatgctcgcagcccaggct

SEQ ID NO: 1306122 - DNA, 25 bp, Homo sapien
gctgtagcgctccacgatgttggcc

SEQ ID NO: 1306123 - DNA, 25 bp, Homo sapien
cagtgcaggctcgtcgcagaagaag

SEQ ID NO: 1306124 - DNA, 25 bp, Homo sapien
gcaggggggcggctgagagagcgcg

SEQ ID NO: 1306125 - DNA, 25 bp, Homo sapien
cgaggggcaggggggcggctgagag

SEQ ID NO: 1306126 - DNA, 25 bp, Homo sapien
gcccgaggggcaggggggcggctga

SEQ ID NO: 1306127 - DNA, 25 bp, Homo sapien
ggcagcagagaggggggcccgaggg

SEQ ID NO: 1306128 - DNA, 25 bp, Homo sapien
gacgaggcccgcacaggcaggggta

SEQ ID NO: 1306129 - DNA, 25 bp, Homo sapien
cggggacgaggcccgcacaggcagg

SEQ ID NO: 1306130 - DNA, 25 bp, Homo sapien
gcaggggtaggagctaccggagaag

SEQ ID NO: 1306131 - DNA, 25 bp, Homo sapien
caggggtaggagctaccggagaagg

SEQ ID NO: 1306132 - DNA, 25 bp, Homo sapien
gctgagactccgtgggacgccagcc

SEQ ID NO: 1306133 - DNA, 25 bp, Homo sapien
cagtctagaggtagtgggcagctca

SEQ ID NO: 1306134 - DNA, 25 bp, Homo sapien
cgtacattggctgtgaccggcagag

SEQ ID NO: 1306135 - DNA, 25 bp, Homo sapien
gcagccaggccgagccgtacattgg

SEQ ID NO: 1306136 - DNA, 25 bp, Homo sapien
gtccagcgcagcctctcaacccgga

SEQ ID NO: 1306137 - DNA, 25 bp, Homo sapien
aaccagccgaatccgagctgccggt

SEQ ID NO: 1306138 - DNA, 25 bp, Homo sapien
tgggcgggacccaagcaactccgcc

SEQ ID NO: 1306139 - DNA, 25 bp, Homo sapien
gagcttagcagccaccgcttcggtc

SEQ ID NO: 1306140 - DNA, 25 bp, Homo sapien
catcaccaagattatacccacaggg

SEQ ID NO: 1306141 - DNA, 25 bp, Homo sapien
cacagtgagtttcaggcacccctgt

SEQ ID NO: 1306142 - DNA, 25 bp, Homo sapien
tccctccggaatgtaagaggcttaa

SEQ ID NO: 1306143 - DNA, 25 bp, Homo sapien
tgctgccgtctttgtatatccatag

SEQ ID NO: 1306144 - DNA, 25 bp, Homo sapien
cctggccaccttagaatcacctgaa

SEQ ID NO: 1306145 - DNA, 25 bp, Homo sapien
atcacctgaagaggccgtgcacaat

SEQ ID NO: 1306146 - DNA, 25 bp, Homo sapien
gactgccaaggagggcaagacgtac

SEQ ID NO: 1306147 - DNA, 25 bp, Homo sapien
gctgaaacaggacccttagggctga

SEQ ID NO: 1306148 - DNA, 25 bp, Homo sapien
gaagttggtgctgctaagaccgaga

SEQ ID NO: 1306149 - DNA, 25 bp, Homo sapien
cgggcctaggtttctggactgcaaa

SEQ ID NO: 1306150 - DNA, 25 bp, Homo sapien
ttaaagaatcggacagatggacgca

SEQ ID NO: 1306151 - DNA, 25 bp, Homo sapien
gatccacaggaccaaagggtgcagt

SEQ ID NO: 1306152 - DNA, 25 bp, Homo sapien
tgctttttctatgggacctccaggc

SEQ ID NO: 1306153 - DNA, 25 bp, Homo sapien
tatacatactgttaacacccctttg

SEQ ID NO: 1306154 - DNA, 25 bp, Homo sapien
gccaccatatttagaactagttacc

SEQ ID NO: 1306155 - DNA, 25 bp, Homo sapien
gcatgttactccctgtaaatacgct

SEQ ID NO: 1306156 - DNA, 25 bp, Homo sapien
ccggaagctcggtgaacacgtagta

SEQ ID NO: 1306157 - DNA, 25 bp, Homo sapien
tgcagaacatgaagtgcgcctcgcg

SEQ ID NO: 1306158 - DNA, 25 bp, Homo sapien
caaaagtgccgctgaagtgctggtc

SEQ ID NO: 1306159 - DNA, 25 bp, Homo sapien
caccgccgcgtggttatagaagtcg

SEQ ID NO: 1306160 - DNA, 25 bp, Homo sapien
cccaatggtgaggttctgctgtcta

SEQ ID NO: 1306161 - DNA, 25 bp, Homo sapien
ctgctgtctagcctcttgcttggcc

SEQ ID NO: 1306162 - DNA, 25 bp, Homo sapien
cagcaaagatagtcagcccaatggt

SEQ ID NO: 1306163 - DNA, 25 bp, Homo sapien
gccacatctgggtcgaaagagccat

SEQ ID NO: 1306164 - DNA, 25 bp, Homo sapien
ctcagctgggacattgtggccgaag

SEQ ID NO: 1306165 - DNA, 25 bp, Homo sapien
gacgcagggcacctgtgaagttgtc

SEQ ID NO: 1306166 - DNA, 25 bp, Homo sapien
tgtgaagttgtctctcagctgggac

SEQ ID NO: 1306167 - DNA, 25 bp, Homo sapien
gtggccgaagggcagacgcccatgg

SEQ ID NO: 1306168 - DNA, 25 bp, Homo sapien
atttagggaggccatacagaaacag

SEQ ID NO: 1306169 - DNA, 25 bp, Homo sapien
tttagggaggccatacagaaacagg

SEQ ID NO: 1306170 - DNA, 25 bp, Homo sapien
taagtaggatctgccgccagaagat

SEQ ID NO: 1306171 - DNA, 25 bp, Homo sapien
caagtgtaagtaggatctgccgcca

SEQ ID NO: 1306172 - DNA, 25 bp, Homo sapien
aagaggccaagtgtaagtaggatct

SEQ ID NO: 1306173 - DNA, 25 bp, Homo sapien
aggatctgccgccagaagattctct

SEQ ID NO: 1306174 - DNA, 25 bp, Homo sapien
aaggtagccagtgttaccagtttct

SEQ ID NO: 1306175 - DNA, 25 bp, Homo sapien
gttcttctgcatgaaggtagccagt

SEQ ID NO: 1306176 - DNA, 25 bp, Homo sapien
gccagtgttaccagtttcttgtgca

SEQ ID NO: 1306177 - DNA, 25 bp, Homo sapien
cagccagctggttcttctgcatgaa

SEQ ID NO: 1306178 - DNA, 25 bp, Homo sapien
agggcagcgctcagcaagggggctg

SEQ ID NO: 1306179 - DNA, 25 bp, Homo sapien
tcagggcagcgctcagcaagggggc

SEQ ID NO: 1306180 - DNA, 25 bp, Homo sapien
ctcagggcagcgctcagcaaggggg

SEQ ID NO: 1306181 - DNA, 25 bp, Homo sapien
cagggcagcgctcagcaagggggct

SEQ ID NO: 1306182 - DNA, 25 bp, Homo sapien
tccagttgtgacctatctgaaggcc

SEQ ID NO: 1306183 - DNA, 25 bp, Homo sapien
cagtgtgaagtgtaaacaacaggaa

SEQ ID NO: 1306184 - DNA, 25 bp, Homo sapien
aaatgcctattgcaggtgcaccctg

SEQ ID NO: 1306185 - DNA, 25 bp, Homo sapien
taatgagtttagtgggtcgtgacca

SEQ ID NO: 1306186 - DNA, 25 bp, Homo sapien
taagctcagaaaggtgcctacctcc

SEQ ID NO: 1306187 - DNA, 25 bp, Homo sapien
aatagaataagctcagaaaggtgcc

SEQ ID NO: 1306188 - DNA, 25 bp, Homo sapien
agaaaggtgcctacctccttcctgc

SEQ ID NO: 1306189 - DNA, 25 bp, Homo sapien
aaggtgcctacctccttcctgcaaa

SEQ ID NO: 1306190 - DNA, 25 bp, Homo sapien
aattgctgctaggaagatttatagg

SEQ ID NO: 1306191 - DNA, 25 bp, Homo sapien
tgctgctaggaagatttataggcaa

SEQ ID NO: 1306192 - DNA, 25 bp, Homo sapien
tcctcaggtagctcaaattgctgct

SEQ ID NO: 1306193 - DNA, 25 bp, Homo sapien
gcaggccctcgccctttctgccctg

SEQ ID NO: 1306194 - DNA, 25 bp, Homo sapien
tcagaccaccgcagctttcttaatg

SEQ ID NO: 1306195 - DNA, 25 bp, Homo sapien
ctctttgtgaaccaggagggcggtc

SEQ ID NO: 1306196 - DNA, 25 bp, Homo sapien
agccctttgggctatgttgctcaga

SEQ ID NO: 1306197 - DNA, 25 bp, Homo sapien
aaaggaaactctgaagcgccgtctc

SEQ ID NO: 1306198 - DNA, 25 bp, Homo sapien
caacggaagagttaaccaggcctgg

SEQ ID NO: 1306199 - DNA, 25 bp, Homo sapien
gagtccaggacaaagcactaagtgg

SEQ ID NO: 1306200 - DNA, 25 bp, Homo sapien
catacacacagcgttaaggcgtctg

SEQ ID NO: 1306201 - DNA, 25 bp, Homo sapien
tttgctacaaaacacctggagatgc

SEQ ID NO: 1306202 - DNA, 25 bp, Homo sapien
tgggccagaatcctggctgccacca

SEQ ID NO: 1306203 - DNA, 25 bp, Homo sapien
gggccagaatcctggctgccaccag

SEQ ID NO: 1306204 - DNA, 25 bp, Homo sapien
ccctgggccagaatcctggctgcca

SEQ ID NO: 1306205 - DNA, 25 bp, Homo sapien
gcgccctgggccagaatcctggctg

SEQ ID NO: 1306206 - DNA, 25 bp, Homo sapien
catgctgatgcgggcgtagatcttc

SEQ ID NO: 1306207 - DNA, 25 bp, Homo sapien
tcctgggcacggaattcctctgcta

SEQ ID NO: 1306208 - DNA, 25 bp, Homo sapien
gttcatggcgctcatcaggtggtcc

SEQ ID NO: 1306209 - DNA, 25 bp, Homo sapien
cgtagatcttcagggcgggccccag

SEQ ID NO: 1306210 - DNA, 25 bp, Homo sapien
tccttgccgtgtgagtgaaccgtgc

SEQ ID NO: 1306211 - DNA, 25 bp, Homo sapien
tgtggaagggagcagataacctctc

SEQ ID NO: 1306212 - DNA, 25 bp, Homo sapien
cttagactaagaggaactggacacc

SEQ ID NO: 1306213 - DNA, 25 bp, Homo sapien
aaagacagtgtcaatccaagccgcc

SEQ ID NO: 1306214 - DNA, 25 bp, Homo sapien
actctgtggaaagcgtgagtgtcta

SEQ ID NO: 1306215 - DNA, 25 bp, Homo sapien
tcaaacagctctatagatgtgggcg

SEQ ID NO: 1306216 - DNA, 25 bp, Homo sapien
aaaggagtgctgacatcaaacagct

SEQ ID NO: 1306217 - DNA, 25 bp, Homo sapien
gactgtatatagaagtctcatggcc

SEQ ID NO: 1306218 - DNA, 25 bp, Homo sapien
tgaagtgggtggtctagctaaggag

SEQ ID NO: 1306219 - DNA, 25 bp, Homo sapien
acagggtctctgttatgaaataaaa

SEQ ID NO: 1306220 - DNA, 25 bp, Homo sapien
tgtaagttgaatgtacctcatgaag

SEQ ID NO: 1306221 - DNA, 25 bp, Homo sapien
gaaactcttagtggagattggaaga

SEQ ID NO: 1306222 - DNA, 25 bp, Homo sapien
ccctagcggatttcggaactggaat

SEQ ID NO: 1306223 - DNA, 25 bp, Homo sapien
taatggttatcctatggctgtccca

SEQ ID NO: 1306224 - DNA, 25 bp, Homo sapien
ggctgagaaaacgactacactgaaa

SEQ ID NO: 1306225 - DNA, 25 bp, Homo sapien
tggaatggatcagcgactcttgtac

SEQ ID NO: 1306226 - DNA, 25 bp, Homo sapien
gctgtcatgggaccaaactgtcggg

SEQ ID NO: 1306227 - DNA, 25 bp, Homo sapien
atgctgtcatgggaccaaactgtcg

SEQ ID NO: 1306228 - DNA, 25 bp, Homo sapien
cctggacttcaaactgatgctgtca

SEQ ID NO: 1306229 - DNA, 25 bp, Homo sapien
gacttcaaactgatgctgtcatggg

SEQ ID NO: 1306230 - DNA, 25 bp, Homo sapien
ggtgaactacatggcttgtctctga

SEQ ID NO: 1306231 - DNA, 25 bp, Homo sapien
tgaatggctcccaataatccttgct

SEQ ID NO: 1306232 - DNA, 25 bp, Homo sapien
tcccaataatccttgcttcccagtt

SEQ ID NO: 1306233 - DNA, 25 bp, Homo sapien
ggaacacaaatttctgggggtcatg

SEQ ID NO: 1306234 - DNA, 25 bp, Homo sapien
gacacatatcctacactctacctga

SEQ ID NO: 1306235 - DNA, 25 bp, Homo sapien
gctcttataggcagggagctcatct

SEQ ID NO: 1306236 - DNA, 25 bp, Homo sapien
tatttcacacagatcacttcccatg

SEQ ID NO: 1306237 - DNA, 25 bp, Homo sapien
ctaaactacctaatcctcctggtgg

SEQ ID NO: 1306238 - DNA, 25 bp, Homo sapien
tgagcaacggctggagtcttcctgg

SEQ ID NO: 1306239 - DNA, 25 bp, Homo sapien
cacttggtgggctcacttggcagga

SEQ ID NO: 1306240 - DNA, 25 bp, Homo sapien
accaggtcccgcatatgcatgtcgg

SEQ ID NO: 1306241 - DNA, 25 bp, Homo sapien
cagagagcggatgaattcgtagacg

SEQ ID NO: 1306242 - DNA, 25 bp, Homo sapien
agcagcagtaaccgaaaggggcaca

SEQ ID NO: 1306243 - DNA, 25 bp, Homo sapien
gcagcagtaaccgaaaggggcacag

SEQ ID NO: 1306244 - DNA, 25 bp, Homo sapien
cagcagtaaccgaaaggggcacagt

SEQ ID NO: 1306245 - DNA, 25 bp, Homo sapien
tccggtctgagtggaaaagtcccac

SEQ ID NO: 1306246 - DNA, 25 bp, Homo sapien
gcagactggctttgctggcccgacg

SEQ ID NO: 1306247 - DNA, 25 bp, Homo sapien
gacggcggttgtgggtcgcagctcc

SEQ ID NO: 1306248 - DNA, 25 bp, Homo sapien
ccgtttggtgcatcccacgttgtac

SEQ ID NO: 1306249 - DNA, 25 bp, Homo sapien
acacttgagtttgaggggagcaccc

SEQ ID NO: 1306250 - DNA, 25 bp, Homo sapien
cttggaacgcttgaacttataggca

SEQ ID NO: 1306251 - DNA, 25 bp, Homo sapien
tgaacttataggcaaagtccacccg

SEQ ID NO: 1306252 - DNA, 25 bp, Homo sapien
ctctttgcacaagccatggaacaga

SEQ ID NO: 1306253 - DNA, 25 bp, Homo sapien
gaaaagccattcttgggatcctgtg

SEQ ID NO: 1306254 - DNA, 25 bp, Homo sapien
agagattcagggtctgagatgccca

SEQ ID NO: 1306255 - DNA, 25 bp, Homo sapien
ggaaatgtttacagactcgctggct

SEQ ID NO: 1306256 - DNA, 25 bp, Homo sapien
cagaggacacatggttcccgtgatt

SEQ ID NO: 1306257 - DNA, 25 bp, Homo sapien
tcctccatctccgagtcagtggtgg

SEQ ID NO: 1306258 - DNA, 25 bp, Homo sapien
ccaccagcagggacgagcgtcccac

SEQ ID NO: 1306259 - DNA, 25 bp, Homo sapien
tgctgtggaagtttctcaggcagga

SEQ ID NO: 1306260 - DNA, 25 bp, Homo sapien
ctcctccatctccgagtcagtggtg

SEQ ID NO: 1306261 - DNA, 25 bp, Homo sapien
tcacgaggtaagatgctaatgggca

SEQ ID NO: 1306262 - DNA, 25 bp, Homo sapien
cacgtataaagtatccaggcacaga

SEQ ID NO: 1306263 - DNA, 25 bp, Homo sapien
tctgtccaggaccaacggatggctc

SEQ ID NO: 1306264 - DNA, 25 bp, Homo sapien
tccaggcaaggacagagcggagtct

SEQ ID NO: 1306265 - DNA, 25 bp, Homo sapien
aagggtcttgtcaattattcctgat

SEQ ID NO: 1306266 - DNA, 25 bp, Homo sapien
gtcaattattcctgatcactgaccc

SEQ ID NO: 1306267 - DNA, 25 bp, Homo sapien
ggtcttgtcaattattcctgatcac

SEQ ID NO: 1306268 - DNA, 25 bp, Homo sapien
cttgtcaattattcctgatcactga

SEQ ID NO: 1306269 - DNA, 25 bp, Homo sapien
aacccttcgataacatgcgtcagga

SEQ ID NO: 1306270 - DNA, 25 bp, Homo sapien
tcgataacatgcgtcaggatttggg

SEQ ID NO: 1306271 - DNA, 25 bp, Homo sapien
cctggatcacaaacccttcgataac

SEQ ID NO: 1306272 - DNA, 25 bp, Homo sapien
tcacaaacccttcgataacatgcgt

SEQ ID NO: 1306273 - DNA, 25 bp, Homo sapien
tgccggcgatgctggaggcagagtt

SEQ ID NO: 1306274 - DNA, 25 bp, Homo sapien
tggaggcagagtttccgttccctga

SEQ ID NO: 1306275 - DNA, 25 bp, Homo sapien
ctggggggcagtgccggcgatgctg

SEQ ID NO: 1306276 - DNA, 25 bp, Homo sapien
ggcagagtttccgttccctgaggtc

SEQ ID NO: 1306277 - DNA, 25 bp, Homo sapien
tgaggtcggtcagtgcatgaacaat

SEQ ID NO: 1306278 - DNA, 25 bp, Homo sapien
tgcatgaacaatgccctgccctgtc

SEQ ID NO: 1306279 - DNA, 25 bp, Homo sapien
tcggtcagtgcatgaacaatgccct

SEQ ID NO: 1306280 - DNA, 25 bp, Homo sapien
ctgctgaggtcggtcagtgcatgaa

SEQ ID NO: 1306281 - DNA, 25 bp, Homo sapien
caagtatgagtatagtcagttccac

SEQ ID NO: 1306282 - DNA, 25 bp, Homo sapien
cagttccacaacaacgcatgcagct

SEQ ID NO: 1306283 - DNA, 25 bp, Homo sapien
gggccaagcgacaatgcaaaccaag

SEQ ID NO: 1306284 - DNA, 25 bp, Homo sapien
cgtgctatgaacagttaacccggat

SEQ ID NO: 1306285 - DNA, 25 bp, Homo sapien
acgacagtgaacttcctctcttcca

SEQ ID NO: 1306286 - DNA, 25 bp, Homo sapien
ctatacacaaccacacgacagtgaa

SEQ ID NO: 1306287 - DNA, 25 bp, Homo sapien
tacacaaccacacgacagtgaactt

SEQ ID NO: 1306288 - DNA, 25 bp, Homo sapien
aaccacacgacagtgaacttcctct

SEQ ID NO: 1306289 - DNA, 25 bp, Homo sapien
gtttccattaagtgcctatattcac

SEQ ID NO: 1306290 - DNA, 25 bp, Homo sapien
tccattaagtgcctatattcacttg

SEQ ID NO: 1306291 - DNA, 25 bp, Homo sapien
aaagtttccattaagtgcctatatt

SEQ ID NO: 1306292 - DNA, 25 bp, Homo sapien
cattaagtgcctatattcacttgaa

SEQ ID NO: 1306293 - DNA, 25 bp, Homo sapien
atgcccttgactgagggacggccct

SEQ ID NO: 1306294 - DNA, 25 bp, Homo sapien
tatgcccttgactgagggacggccc

SEQ ID NO: 1306295 - DNA, 25 bp, Homo sapien
tgcatatgctaagaaacatctattt

SEQ ID NO: 1306296 - DNA, 25 bp, Homo sapien
ccctttccctcacaatctatgaata

SEQ ID NO: 1306297 - DNA, 25 bp, Homo sapien
taactaggaggactgagttgatgat

SEQ ID NO: 1306298 - DNA, 25 bp, Homo sapien
aatatttaactctgcctttacacaa

SEQ ID NO: 1306299 - DNA, 25 bp, Homo sapien
actgcagtgcggtaagctgaggaca

SEQ ID NO: 1306300 - DNA, 25 bp, Homo sapien
tgggcccccaaagaaattaatgcca

SEQ ID NO: 1306301 - DNA, 25 bp, Homo sapien
tggtccaagcaacaggccgtactgc

SEQ ID NO: 1306302 - DNA, 25 bp, Homo sapien
agagtgcccagtcctcatggaaaga

SEQ ID NO: 1306303 - DNA, 25 bp, Homo sapien
ctgtttgttgacaccttcccccagg

SEQ ID NO: 1306304 - DNA, 25 bp, Homo sapien
cctgtttgttgacaccttcccccag

SEQ ID NO: 1306305 - DNA, 25 bp, Homo sapien
agaaggcagggggaacatccaatgt

SEQ ID NO: 1306306 - DNA, 25 bp, Homo sapien
cttttcaaatctgctaagggcagag

SEQ ID NO: 1306307 - DNA, 25 bp, Homo sapien
cagggggaacatccaatgtctgcag

SEQ ID NO: 1306308 - DNA, 25 bp, Homo sapien
tggggtcctctgaataccagaaggc

SEQ ID NO: 1306309 - DNA, 25 bp, Homo sapien
tttaattatctgtagaggcgaggtc

SEQ ID NO: 1306310 - DNA, 25 bp, Homo sapien
cctcgactgtccacacttaagcgat

SEQ ID NO: 1306311 - DNA, 25 bp, Homo sapien
gactgtccacacttaagcgatcctc

SEQ ID NO: 1306312 - DNA, 25 bp, Homo sapien
tcgactgtccacacttaagcgatcc

SEQ ID NO: 1306313 - DNA, 25 bp, Homo sapien
tatgctaaagataccagtaactagg

SEQ ID NO: 1306314 - DNA, 25 bp, Homo sapien
ggcctggtcctcctaatctactgga

SEQ ID NO: 1306315 - DNA, 25 bp, Homo sapien
caatattcagtatcaggcctggtcc

SEQ ID NO: 1306316 - DNA, 25 bp, Homo sapien
tttgagacataacagccatgcaact

SEQ ID NO: 1306317 - DNA, 25 bp, Homo sapien
tggcagccgcgtaggcccgggccgt

SEQ ID NO: 1306318 - DNA, 25 bp, Homo sapien
accgagggcggtgcccgacttccag

SEQ ID NO: 1306319 - DNA, 25 bp, Homo sapien
tgcccgacttccagtgcggcgagcg

SEQ ID NO: 1306320 - DNA, 25 bp, Homo sapien
acgagagccgcgactggcacggcct

SEQ ID NO: 1306321 - DNA, 25 bp, Homo sapien
cggggcctacgcagcccctcggccg

SEQ ID NO: 1306322 - DNA, 25 bp, Homo sapien
tcggccgggcgccgactcgcgcggg

SEQ ID NO: 1306323 - DNA, 25 bp, Homo sapien
tggccgggcggggcctacgcagccc

SEQ ID NO: 1306324 - DNA, 25 bp, Homo sapien
gccgggcgccgactcgcgcggggtc

SEQ ID NO: 1306325 - DNA, 25 bp, Homo sapien
gcgcgcggcgggcgctcgagggctg

SEQ ID NO: 1306326 - DNA, 25 bp, Homo sapien
tggccggcgtcaacaaagggcggcc

SEQ ID NO: 1306327 - DNA, 25 bp, Homo sapien
gcggcgcatccgaccgcaccggcct

SEQ ID NO: 1306328 - DNA, 25 bp, Homo sapien
accggcctggccggcgtcaacaaag

SEQ ID NO: 1306329 - DNA, 25 bp, Homo sapien
gaagcatactcattcagcacgcgcg

SEQ ID NO: 1306330 - DNA, 25 bp, Homo sapien
tgaacctgcgctgtcgtggcgaagc

SEQ ID NO: 1306331 - DNA, 25 bp, Homo sapien
atactcattcagcacgcgcgcgagg

SEQ ID NO: 1306332 - DNA, 25 bp, Homo sapien
gctgtcgtggcgaagcatactcatt

SEQ ID NO: 1306333 - DNA, 25 bp, Homo sapien
ttttcatcgtttcaagtagaccttc

SEQ ID NO: 1306334 - DNA, 25 bp, Homo sapien
ggcatttatcgcattttactttcta

SEQ ID NO: 1306335 - DNA, 25 bp, Homo sapien
catcgtttcaagtagaccttcagct

SEQ ID NO: 1306336 - DNA, 25 bp, Homo sapien
atctatggcatttatcgcattttac

SEQ ID NO: 1306337 - DNA, 25 bp, Homo sapien
ggcaagagacagtccgacaactgtc

SEQ ID NO: 1306338 - DNA, 25 bp, Homo sapien
agagagcaggttttgacttcatttg

SEQ ID NO: 1306339 - DNA, 25 bp, Homo sapien
actgctgttcaaaaccccttctcat

SEQ ID NO: 1306340 - DNA, 25 bp, Homo sapien
gaccaatgctggcaaattccaagag

SEQ ID NO: 1306341 - DNA, 25 bp, Homo sapien
caggtggtccatggctcagaatgtc

SEQ ID NO: 1306342 - DNA, 25 bp, Homo sapien
tttgagatgtggtagccgttttgcc

SEQ ID NO: 1306343 - DNA, 25 bp, Homo sapien
agatctgggccaacagtgctgtgca

SEQ ID NO: 1306344 - DNA, 25 bp, Homo sapien
gaagtccacttgtaactgagcccgc

SEQ ID NO: 1306345 - DNA, 25 bp, Homo sapien
gggcatggcaagaaaggccaacttc

SEQ ID NO: 1306346 - DNA, 25 bp, Homo sapien
gacaccagtgacatgcaggtaggcc

SEQ ID NO: 1306347 - DNA, 25 bp, Homo sapien
tctatgtggatgcatctgacaccag

SEQ ID NO: 1306348 - DNA, 25 bp, Homo sapien
tgctctaatatcttccgtgtctcaa

SEQ ID NO: 1306349 - DNA, 25 bp, Homo sapien
gctcgtgggtacaggcaggccacca

SEQ ID NO: 1306350 - DNA, 25 bp, Homo sapien
tctttccagtcatcagggacacact

SEQ ID NO: 1306351 - DNA, 25 bp, Homo sapien
tggcagtgacaatagcctgctgatg

SEQ ID NO: 1306352 - DNA, 25 bp, Homo sapien
gaccgcgtctcaggcacacttttct

SEQ ID NO: 1306353 - DNA, 25 bp, Homo sapien
gaggggggcctctcagaaatagcct

SEQ ID NO: 1306354 - DNA, 25 bp, Homo sapien
aaagatgacttcacccgtcagccta

SEQ ID NO: 1306355 - DNA, 25 bp, Homo sapien
caggtaaggaccttaagattcagtc

SEQ ID NO: 1306356 - DNA, 25 bp, Homo sapien
gaaatagcctttgcattcttggata

SEQ ID NO: 1306357 - DNA, 25 bp, Homo sapien
tgaagtgtgctggaacctgcgttga

SEQ ID NO: 1306358 - DNA, 25 bp, Homo sapien
cattctgaggcccagtatcaggtgt

SEQ ID NO: 1306359 - DNA, 25 bp, Homo sapien
cacgccctcgggatgtccattctga

SEQ ID NO: 1306360 - DNA, 25 bp, Homo sapien
aagcaggctgcagttgtaagatgac

SEQ ID NO: 1306361 - DNA, 25 bp, Homo sapien
tggagtggcagggcgggtgtaaccg

SEQ ID NO: 1306362 - DNA, 25 bp, Homo sapien
ctggagtggcagggcgggtgtaacc

SEQ ID NO: 1306363 - DNA, 25 bp, Homo sapien
ttggagcacaggccgtgactgctgg

SEQ ID NO: 1306364 - DNA, 25 bp, Homo sapien
cttggagcacaggccgtgactgctg

SEQ ID NO: 1306365 - DNA, 25 bp, Homo sapien
gcttggagcacaggccgtgactgct

SEQ ID NO: 1306366 - DNA, 25 bp, Homo sapien
agcttggagcacaggccgtgactgc

SEQ ID NO: 1306367 - DNA, 25 bp, Homo sapien
tggcctaccagcaaggagaatgtgc

SEQ ID NO: 1306368 - DNA, 25 bp, Homo sapien
ctggcctaccagcaaggagaatgtg

SEQ ID NO: 1306369 - DNA, 25 bp, Homo sapien
taacagaagtcagtaaggacgagcg

SEQ ID NO: 1306370 - DNA, 25 bp, Homo sapien
caagcaagagctgagagtagtttcc

SEQ ID NO: 1306371 - DNA, 25 bp, Homo sapien
tattacaagacgctgatggccaagt

SEQ ID NO: 1306372 - DNA, 25 bp, Homo sapien
aagggattgttaacgccaggaggca

SEQ ID NO: 1306373 - DNA, 25 bp, Homo sapien
cccccaaacagctgtcagtgggagc

SEQ ID NO: 1306374 - DNA, 25 bp, Homo sapien
gctgggactggagggtctgcctgct

SEQ ID NO: 1306375 - DNA, 25 bp, Homo sapien
gagcctgaagaagccggttgccaag

SEQ ID NO: 1306376 - DNA, 25 bp, Homo sapien
gaagaagccggttgccaaggtgaca

SEQ ID NO: 1306377 - DNA, 25 bp, Homo sapien
tcagctatgccaggcttggcacctg

SEQ ID NO: 1306378 - DNA, 25 bp, Homo sapien
tctcctttcttgtgtggctccatca

SEQ ID NO: 1306379 - DNA, 25 bp, Homo sapien
acagcaggaaccgtccggctgagcc

SEQ ID NO: 1306380 - DNA, 25 bp, Homo sapien
tccatcacactgtcagctatgccag

SEQ ID NO: 1306381 - DNA, 25 bp, Homo sapien
gtgtctgctgtgttcggagggtcaa

SEQ ID NO: 1306382 - DNA, 25 bp, Homo sapien
tggctaccgcccggcgtgggtttca

SEQ ID NO: 1306383 - DNA, 25 bp, Homo sapien
gtgttcggagggtcaagttctgtac

SEQ ID NO: 1306384 - DNA, 25 bp, Homo sapien
agaggctggctaccgcccggcgtgg

SEQ ID NO: 1306385 - DNA, 25 bp, Homo sapien
gaatgtggcaggagcaatgccagta

SEQ ID NO: 1306386 - DNA, 25 bp, Homo sapien
ctgtgggagtccagagaatgtggca

SEQ ID NO: 1306387 - DNA, 25 bp, Homo sapien
tggcaggagcaatgccagtatacaa

SEQ ID NO: 1306388 - DNA, 25 bp, Homo sapien
gtccagagaatgtggcaggagcaat

SEQ ID NO: 1306389 - DNA, 25 bp, Homo sapien
gacggtggccgtgggcgtgaagatg

SEQ ID NO: 1306390 - DNA, 25 bp, Homo sapien
cagtgccgagctcaggctgcacagt

SEQ ID NO: 1306391 - DNA, 25 bp, Homo sapien
ccgagctcaggctgcacagtagcga

SEQ ID NO: 1306392 - DNA, 25 bp, Homo sapien
acagtagcgacggtggccgtgggcg

SEQ ID NO: 1306393 - DNA, 25 bp, Homo sapien
acagtgccgcctaggctcctagcta

SEQ ID NO: 1306394 - DNA, 25 bp, Homo sapien
acaaaggaacagtgccgcctaggct

SEQ ID NO: 1306395 - DNA, 25 bp, Homo sapien
cctaggctcctagctacctgcacca

SEQ ID NO: 1306396 - DNA, 25 bp, Homo sapien
gggacaaaggaacagtgccgcctag

SEQ ID NO: 1306397 - DNA, 25 bp, Homo sapien
gaaacgaggcgccttttacctgctc

SEQ ID NO: 1306398 - DNA, 25 bp, Homo sapien
ctggaatcacaggaaacgaggcgcc

SEQ ID NO: 1306399 - DNA, 25 bp, Homo sapien
ctgctcgatgtggactcagccacag

SEQ ID NO: 1306400 - DNA, 25 bp, Homo sapien
acaggacacaactgtttagcccagg

SEQ ID NO: 1306401 - DNA, 25 bp, Homo sapien
agggggagtccaaggggagcgcctg

SEQ ID NO: 1306402 - DNA, 25 bp, Homo sapien
ccaaggggagcgcctgcctttctct

SEQ ID NO: 1306403 - DNA, 25 bp, Homo sapien
ctgcctttctctagaggctcgttgc

SEQ ID NO: 1306404 - DNA, 25 bp, Homo sapien
cctttctctagaggctcgttgcatc

SEQ ID NO: 1306405 - DNA, 25 bp, Homo sapien
tggggctacaccaaagccgagttcc

SEQ ID NO: 1306406 - DNA, 25 bp, Homo sapien
gttcccttcagaaccctctgtgagg

SEQ ID NO: 1306407 - DNA, 25 bp, Homo sapien
ctggggctacaccaaagccgagttc

SEQ ID NO: 1306408 - DNA, 25 bp, Homo sapien
tcccttcagaaccctctgtgagggg

SEQ ID NO: 1306409 - DNA, 25 bp, Homo sapien
gcctggagccgtcctcatgtctgaa

SEQ ID NO: 1306410 - DNA, 25 bp, Homo sapien
tttccctagaactctgcgatagcgc

SEQ ID NO: 1306411 - DNA, 25 bp, Homo sapien
cgaccccagtggagtaggacatagg

SEQ ID NO: 1306412 - DNA, 25 bp, Homo sapien
gagatggatgccctaggaccacctt

SEQ ID NO: 1306413 - DNA, 25 bp, Homo sapien
cagttcccgaggagatggaagtcta

SEQ ID NO: 1306414 - DNA, 25 bp, Homo sapien
gatagtgtgtcaagagcccgaagga

SEQ ID NO: 1306415 - DNA, 25 bp, Homo sapien
tagagatgcgcctcaaatgatgaac

SEQ ID NO: 1306416 - DNA, 25 bp, Homo sapien
agacaagctccgagggtcacgtcct

SEQ ID NO: 1306417 - DNA, 25 bp, Homo sapien
ggaagacgtgttgcccaagagcaca

SEQ ID NO: 1306418 - DNA, 25 bp, Homo sapien
acagcctgctgagcgatgcctgagg

SEQ ID NO: 1306419 - DNA, 25 bp, Homo sapien
agttcacactctgggcccggttgag

SEQ ID NO: 1306420 - DNA, 25 bp, Homo sapien
tgccctcagatacatctgtgcttgg

SEQ ID NO: 1306421 - DNA, 25 bp, Homo sapien
cagggggatcccatgttgagagaac

SEQ ID NO: 1306422 - DNA, 25 bp, Homo sapien
gagagaactgagctatccacagaga

SEQ ID NO: 1306423 - DNA, 25 bp, Homo sapien
ttgagagaactgagctatccacaga

SEQ ID NO: 1306424 - DNA, 25 bp, Homo sapien
gagaactgagctatccacagagagc

SEQ ID NO: 1306425 - DNA, 25 bp, Homo sapien
gcttccttgtctattggataccagg

SEQ ID NO: 1306426 - DNA, 25 bp, Homo sapien
cgcagacacattgctgcctgaagtg

SEQ ID NO: 1306427 - DNA, 25 bp, Homo sapien
ggcctgcgcagacacattgctgcct

SEQ ID NO: 1306428 - DNA, 25 bp, Homo sapien
cttgtctattggataccaggcttgc

SEQ ID NO: 1306429 - DNA, 25 bp, Homo sapien
tgctgggcggcgtacatctgctgca

SEQ ID NO: 1306430 - DNA, 25 bp, Homo sapien
tgcaggtactgagcggccgtgctgg

SEQ ID NO: 1306431 - DNA, 25 bp, Homo sapien
tgctgcaggtactgagcggccgtgc

SEQ ID NO: 1306432 - DNA, 25 bp, Homo sapien
tctgctgcaggtactgagcggccgt

SEQ ID NO: 1306433 - DNA, 25 bp, Homo sapien
ccaggtctctataactgctcgggag

SEQ ID NO: 1306434 - DNA, 25 bp, Homo sapien
tgctcgggagacaccaagatctgtg

SEQ ID NO: 1306435 - DNA, 25 bp, Homo sapien
caattgtggccactctctagggcag

SEQ ID NO: 1306436 - DNA, 25 bp, Homo sapien
gaggacagctgttcgcagagcttct

SEQ ID NO: 1306437 - DNA, 25 bp, Homo sapien
cattccctggccttactgcttattc

SEQ ID NO: 1306438 - DNA, 25 bp, Homo sapien
aaagaacagcgagtgcctttcccca

SEQ ID NO: 1306439 - DNA, 25 bp, Homo sapien
tttcctgatgggattggccaatctc

SEQ ID NO: 1306440 - DNA, 25 bp, Homo sapien
ttcctgtgagtcccagagacatttc

SEQ ID NO: 1306441 - DNA, 25 bp, Homo sapien
tcccggcgagcaagccttgccagaa

SEQ ID NO: 1306442 - DNA, 25 bp, Homo sapien
aggctttccccaggttggtgtgact

SEQ ID NO: 1306443 - DNA, 25 bp, Homo sapien
ccctgtcccggcgagcaagccttgc

SEQ ID NO: 1306444 - DNA, 25 bp, Homo sapien
tgggccctgtcccggcgagcaagcc

SEQ ID NO: 1306445 - DNA, 25 bp, Homo sapien
gggagaaggtaaaaagctgcaatga

SEQ ID NO: 1306446 - DNA, 25 bp, Homo sapien
tactttcacacacgtgtcctccaaa

SEQ ID NO: 1306447 - DNA, 25 bp, Homo sapien
gagatgtgttcttcaccgggcaatg

SEQ ID NO: 1306448 - DNA, 25 bp, Homo sapien
aaagctgcaatgacaaaggattatt

SEQ ID NO: 1306449 - DNA, 25 bp, Homo sapien
cacggtctgccggtctggaatacca

SEQ ID NO: 1306450 - DNA, 25 bp, Homo sapien
ctgcacggtctgccggtctggaata

SEQ ID NO: 1306451 - DNA, 25 bp, Homo sapien
cggtctgccggtctggaataccact

SEQ ID NO: 1306452 - DNA, 25 bp, Homo sapien
ctggaataccactgtacacagaaat

SEQ ID NO: 1306453 - DNA, 25 bp, Homo sapien
ccccgctggtactgctggtggcaca

SEQ ID NO: 1306454 - DNA, 25 bp, Homo sapien
ctactggccccgctggtactgctgg

SEQ ID NO: 1306455 - DNA, 25 bp, Homo sapien
gctgctactggccccgctggtactg

SEQ ID NO: 1306456 - DNA, 25 bp, Homo sapien
actggccccgctggtactgctggtg

SEQ ID NO: 1306457 - DNA, 25 bp, Homo sapien
gcagtcagggcgctcggatggcaga

SEQ ID NO: 1306458 - DNA, 25 bp, Homo sapien
tgtggcgcagtcagggcgctcggat

SEQ ID NO: 1306459 - DNA, 25 bp, Homo sapien
agggcgctcggatggcagaagggca

SEQ ID NO: 1306460 - DNA, 25 bp, Homo sapien
tgcagtgtggcgcagtcagggcgct

SEQ ID NO: 1306461 - DNA, 25 bp, Homo sapien
agctgctccatgtgggatgtgaaac

SEQ ID NO: 1306462 - DNA, 25 bp, Homo sapien
ccacaagctgctccatgtgggatgt

SEQ ID NO: 1306463 - DNA, 25 bp, Homo sapien
ccccacaagctgctccatgtgggat

SEQ ID NO: 1306464 - DNA, 25 bp, Homo sapien
caagctgctccatgtgggatgtgaa

SEQ ID NO: 1306465 - DNA, 25 bp, Homo sapien
gcaacttgtcctggcagctgtttca

SEQ ID NO: 1306466 - DNA, 25 bp, Homo sapien
gaaacatagcatgcacatctgtggt

SEQ ID NO: 1306467 - DNA, 25 bp, Homo sapien
tctactgtgaccaccggccttttgc

SEQ ID NO: 1306468 - DNA, 25 bp, Homo sapien
aaagcaattccagagtcccctgggc

SEQ ID NO: 1306469 - DNA, 25 bp, Homo sapien
tattggtttgactgagtaaagagcc

SEQ ID NO: 1306470 - DNA, 25 bp, Homo sapien
caatattggtttgactgagtaaaga

SEQ ID NO: 1306471 - DNA, 25 bp, Homo sapien
tggtttgactgagtaaagagcccaa

SEQ ID NO: 1306472 - DNA, 25 bp, Homo sapien
ttggtttgactgagtaaagagccca

SEQ ID NO: 1306473 - DNA, 25 bp, Homo sapien
tggtgtccccgccttcaagatcatc

SEQ ID NO: 1306474 - DNA, 25 bp, Homo sapien
ggagaaattgcagggtaacccaggc

SEQ ID NO: 1306475 - DNA, 25 bp, Homo sapien
cctgatgattatgttgttacctagc

SEQ ID NO: 1306476 - DNA, 25 bp, Homo sapien
taacccaggctgcttagtctgtctt

SEQ ID NO: 1306477 - DNA, 25 bp, Homo sapien
tgggcttcaacatcacagtattctt

SEQ ID NO: 1306478 - DNA, 25 bp, Homo sapien
ggaaaagatgctcacttcccatctg

SEQ ID NO: 1306479 - DNA, 25 bp, Homo sapien
cattcacaagctggtagtgcagttc

SEQ ID NO: 1306480 - DNA, 25 bp, Homo sapien
ttcttagcacaaaacataagggaaa

SEQ ID NO: 1306481 - DNA, 25 bp, Homo sapien
ttcccaaagctatattccagtagat

SEQ ID NO: 1306482 - DNA, 25 bp, Homo sapien
tttcccaaagctatattccagtaga

SEQ ID NO: 1306483 - DNA, 25 bp, Homo sapien
caaagctatattccagtagatacag

SEQ ID NO: 1306484 - DNA, 25 bp, Homo sapien
cccaaagctatattccagtagatac

SEQ ID NO: 1306485 - DNA, 25 bp, Homo sapien
gttggctaaagtcaattcctgaccc

SEQ ID NO: 1306486 - DNA, 25 bp, Homo sapien
agagggcacagttggctaaagtcaa

SEQ ID NO: 1306487 - DNA, 25 bp, Homo sapien
gggcaagtccagttgacctcgatag

SEQ ID NO: 1306488 - DNA, 25 bp, Homo sapien
acctcgatagcctcgctgattgttg

SEQ ID NO: 1306489 - DNA, 25 bp, Homo sapien
tacacccggcagcagtcttatcagt

SEQ ID NO: 1306490 - DNA, 25 bp, Homo sapien
cacccggcagcagtcttatcagtct

SEQ ID NO: 1306491 - DNA, 25 bp, Homo sapien
acacccggcagcagtcttatcagtc

SEQ ID NO: 1306492 - DNA, 25 bp, Homo sapien
ttgggcatagaaaatgagaacaaac

SEQ ID NO: 1306493 - DNA, 25 bp, Homo sapien
gttgggcatagaaaatgagaacaaa

SEQ ID NO: 1306494 - DNA, 25 bp, Homo sapien
gggcatagaaaatgagaacaaacac

SEQ ID NO: 1306495 - DNA, 25 bp, Homo sapien
ggcatagaaaatgagaacaaacact

SEQ ID NO: 1306496 - DNA, 25 bp, Homo sapien
aaaaggcaccagatgagggcagaca

SEQ ID NO: 1306497 - DNA, 25 bp, Homo sapien
tcagtacgttgaaaaatggtctcca

SEQ ID NO: 1306498 - DNA, 25 bp, Homo sapien
gcatcaacgtggttaaaaaggcacc

SEQ ID NO: 1306499 - DNA, 25 bp, Homo sapien
acaagttgtagtgtacctgttccac

SEQ ID NO: 1306500 - DNA, 25 bp, Homo sapien
ccgtattaagcatgtcaccccagtg

SEQ ID NO: 1306501 - DNA, 25 bp, Homo sapien
ccagtgacaccttctttacacgact

SEQ ID NO: 1306502 - DNA, 25 bp, Homo sapien
cagtgacaccttctttacacgactt

SEQ ID NO: 1306503 - DNA, 25 bp, Homo sapien
tcatcaatcttagcagaccgtatta

SEQ ID NO: 1306504 - DNA, 25 bp, Homo sapien
cgtgtatgacagacccgatccaggt

SEQ ID NO: 1306505 - DNA, 25 bp, Homo sapien
gcttcctccgtgtatgacagacccg

SEQ ID NO: 1306506 - DNA, 25 bp, Homo sapien
gaacagccgcttcctccgtgtatga

SEQ ID NO: 1306507 - DNA, 25 bp, Homo sapien
tatgacagacccgatccaggtgtcc

SEQ ID NO: 1306508 - DNA, 25 bp, Homo sapien
cccggagaaagcgagtcactgacgg

SEQ ID NO: 1306509 - DNA, 25 bp, Homo sapien
gcaggccgcgcaagaccacgggctg

SEQ ID NO: 1306510 - DNA, 25 bp, Homo sapien
cgcactctgcgggacaagcggagca

SEQ ID NO: 1306511 - DNA, 25 bp, Homo sapien
tcactgacgggaccttggcccgttc

SEQ ID NO: 1306512 - DNA, 25 bp, Homo sapien
cccaaagggttaagccggcagcgcg

SEQ ID NO: 1306513 - DNA, 25 bp, Homo sapien
gtgcccaaagggttaagccggcagc

SEQ ID NO: 1306514 - DNA, 25 bp, Homo sapien
cagctgggtgcccaaagggttaagc

SEQ ID NO: 1306515 - DNA, 25 bp, Homo sapien
tcagccgcgagctggccccagcgcg

SEQ ID NO: 1306516 - DNA, 25 bp, Homo sapien
cgcgctcctcctccacctggccgct

SEQ ID NO: 1306517 - DNA, 25 bp, Homo sapien
ctgcggtcgcctccgcgctcctcct

SEQ ID NO: 1306518 - DNA, 25 bp, Homo sapien
cgctcctcctccacctggccgctct

SEQ ID NO: 1306519 - DNA, 25 bp, Homo sapien
tccgcgctcctcctccacctggccg

SEQ ID NO: 1306520 - DNA, 25 bp, Homo sapien
gtggccgctccagccaatggtcacc

SEQ ID NO: 1306521 - DNA, 25 bp, Homo sapien
gcgtcacgtggccgctccagccaat

SEQ ID NO: 1306522 - DNA, 25 bp, Homo sapien
cagcgcgcgtcacgtggccgctcca

SEQ ID NO: 1306523 - DNA, 25 bp, Homo sapien
acgtggccgctccagccaatggtca

SEQ ID NO: 1306524 - DNA, 25 bp, Homo sapien
ttttcctgagttgtttctggcaaac

SEQ ID NO: 1306525 - DNA, 25 bp, Homo sapien
aaatcaccttgttcttttcctgagt

SEQ ID NO: 1306526 - DNA, 25 bp, Homo sapien
ttcttttcctgagttgtttctggca

SEQ ID NO: 1306527 - DNA, 25 bp, Homo sapien
ctcatcaaaatcaccttgttctttt

SEQ ID NO: 1306528 - DNA, 25 bp, Homo sapien
ggaggcccagtaggatgtggacaaa

SEQ ID NO: 1306529 - DNA, 25 bp, Homo sapien
atagttagatgcagtagggaggccc

SEQ ID NO: 1306530 - DNA, 25 bp, Homo sapien
aaggagcccactgggcttggcattt

SEQ ID NO: 1306531 - DNA, 25 bp, Homo sapien
tctatggcctcaaagggcaggagcc

SEQ ID NO: 1306532 - DNA, 25 bp, Homo sapien
ttagttatgaacaagtatgttgggc

SEQ ID NO: 1306533 - DNA, 25 bp, Homo sapien
agttatgaacaagtatgttgggcca

SEQ ID NO: 1306534 - DNA, 25 bp, Homo sapien
tagttatgaacaagtatgttgggcc

SEQ ID NO: 1306535 - DNA, 25 bp, Homo sapien
gttatgaacaagtatgttgggccaa

SEQ ID NO: 1306536 - DNA, 25 bp, Homo sapien
aagtggtgccatatgaacatccacc

SEQ ID NO: 1306537 - DNA, 25 bp, Homo sapien
tggtgccatatgaacatccaccacg

SEQ ID NO: 1306538 - DNA, 25 bp, Homo sapien
agcaagtggtgccatatgaacatcc

SEQ ID NO: 1306539 - DNA, 25 bp, Homo sapien
tgccatatgaacatccaccacgtgg

SEQ ID NO: 1306540 - DNA, 25 bp, Homo sapien
gttacaggtttgtcatccccatcca

SEQ ID NO: 1306541 - DNA, 25 bp, Homo sapien
ctgagtcactgctcttgttacaggt

SEQ ID NO: 1306542 - DNA, 25 bp, Homo sapien
caggagcaggcactctgccgccttt

SEQ ID NO: 1306543 - DNA, 25 bp, Homo sapien
ccgcctttgcctgagaagtgcccag

SEQ ID NO: 1306544 - DNA, 25 bp, Homo sapien
tgagatccctccaggaccttgcttt

SEQ ID NO: 1306545 - DNA, 25 bp, Homo sapien
ttcttgggttcctgcctggatggga

SEQ ID NO: 1306546 - DNA, 25 bp, Homo sapien
tatgtctttcatagctcccaccgtg

SEQ ID NO: 1306547 - DNA, 25 bp, Homo sapien
tcccaccgtgggagcattaatcttc

SEQ ID NO: 1306548 - DNA, 25 bp, Homo sapien
cgatttgttccagtgccagggtccg

SEQ ID NO: 1306549 - DNA, 25 bp, Homo sapien
aaaaggccaggatcgcaacaggtcc

SEQ ID NO: 1306550 - DNA, 25 bp, Homo sapien
ccattgggcggtgctgttatccgga

SEQ ID NO: 1306551 - DNA, 25 bp, Homo sapien
tatccggaagcctatggaaaaggcc

SEQ ID NO: 1306552 - DNA, 25 bp, Homo sapien
caaaacaaatggacaagtagcagag

SEQ ID NO: 1306553 - DNA, 25 bp, Homo sapien
gctcctgagtggtcacaaatttcaa

SEQ ID NO: 1306554 - DNA, 25 bp, Homo sapien
gtagcttgtgatcttacattgcaag

SEQ ID NO: 1306555 - DNA, 25 bp, Homo sapien
tgcccctgtgagctgaccaaaagtt

SEQ ID NO: 1306556 - DNA, 25 bp, Homo sapien
taaaagagcctgttagcctctggac

SEQ ID NO: 1306557 - DNA, 25 bp, Homo sapien
tcattgaaacacttggatcgccacc

SEQ ID NO: 1306558 - DNA, 25 bp, Homo sapien
gggtgaagaatacatgccctgacct

SEQ ID NO: 1306559 - DNA, 25 bp, Homo sapien
aatgttttgaacagtgggactctca

SEQ ID NO: 1306560 - DNA, 25 bp, Homo sapien
cctggaagacaggacagagatcaca

SEQ ID NO: 1306561 - DNA, 25 bp, Homo sapien
cagagatcacagactcctcatagtc

SEQ ID NO: 1306562 - DNA, 25 bp, Homo sapien
gacagagatcacagactcctcatag

SEQ ID NO: 1306563 - DNA, 25 bp, Homo sapien
gagatcacagactcctcatagtcca

SEQ ID NO: 1306564 - DNA, 25 bp, Homo sapien
ccctgctgagttctaatttaaaagg

SEQ ID NO: 1306565 - DNA, 25 bp, Homo sapien
caccaaccctgctgagttctaattt

SEQ ID NO: 1306566 - DNA, 25 bp, Homo sapien
caaccctgctgagttctaatttaaa

SEQ ID NO: 1306567 - DNA, 25 bp, Homo sapien
tttattcttaacttcatcatatact

SEQ ID NO: 1306568 - DNA, 25 bp, Homo sapien
ggcatctgtcaacaaacctgctacc

SEQ ID NO: 1306569 - DNA, 25 bp, Homo sapien
gctagatctaaagttggaagcgtct

SEQ ID NO: 1306570 - DNA, 25 bp, Homo sapien
tgtggaatggtatagccaaagctag

SEQ ID NO: 1306571 - DNA, 25 bp, Homo sapien
tcttgttatatctgccaaagaaggg

SEQ ID NO: 1306572 - DNA, 25 bp, Homo sapien
gagttgaatccttgccccgaagctg

SEQ ID NO: 1306573 - DNA, 25 bp, Homo sapien
gcagaacccagataggacacacagg

SEQ ID NO: 1306574 - DNA, 25 bp, Homo sapien
agtaccataatgcaggaccccaggg

SEQ ID NO: 1306575 - DNA, 25 bp, Homo sapien
cagatgggccgttcatcagcagaca

SEQ ID NO: 1306576 - DNA, 25 bp, Homo sapien
agccccgatttacatcatcagaggg

SEQ ID NO: 1306577 - DNA, 25 bp, Homo sapien
actgatcatctccaagccccgattt

SEQ ID NO: 1306578 - DNA, 25 bp, Homo sapien
gatcatctccaagccccgatttaca

SEQ ID NO: 1306579 - DNA, 25 bp, Homo sapien
tccaagccccgatttacatcatcag

SEQ ID NO: 1306580 - DNA, 25 bp, Homo sapien
ctggctggctctgtgactcttctcc

SEQ ID NO: 1306581 - DNA, 25 bp, Homo sapien
tgtgactcttctccccagagtcctt

SEQ ID NO: 1306582 - DNA, 25 bp, Homo sapien
cagcacaggacctgagagggggcac

SEQ ID NO: 1306583 - DNA, 25 bp, Homo sapien
tccccagagtccttcagcacaggac

SEQ ID NO: 1306584 - DNA, 25 bp, Homo sapien
gagggtgtcatcgaaggaggacaca

SEQ ID NO: 1306585 - DNA, 25 bp, Homo sapien
gggtgcagcttggacatcgtgttgg

SEQ ID NO: 1306586 - DNA, 25 bp, Homo sapien
tatccccagaaagcgggatgtgtgg

SEQ ID NO: 1306587 - DNA, 25 bp, Homo sapien
ggtcccagaggtgagggtgtcatcg

SEQ ID NO: 1306588 - DNA, 25 bp, Homo sapien
gcggggctctcggtggcggtggtgg

SEQ ID NO: 1306589 - DNA, 25 bp, Homo sapien
cggtggtggcggccaggccgggtgg

SEQ ID NO: 1306590 - DNA, 25 bp, Homo sapien
gctggaggcggggctctcggtggcg

SEQ ID NO: 1306591 - DNA, 25 bp, Homo sapien
ggaggcggggctctcggtggcggtg

SEQ ID NO: 1306592 - DNA, 25 bp, Homo sapien
gttgcggtcgtacattgggttctca

SEQ ID NO: 1306593 - DNA, 25 bp, Homo sapien
gaacattggtgttctcgtggccagc

SEQ ID NO: 1306594 - DNA, 25 bp, Homo sapien
tgggttctcaaatgtggcccgaaca

SEQ ID NO: 1306595 - DNA, 25 bp, Homo sapien
cgtggccagcatagccattgaaagg

SEQ ID NO: 1306596 - DNA, 25 bp, Homo sapien
gtagagatagagcacgaagcccgca

SEQ ID NO: 1306597 - DNA, 25 bp, Homo sapien
gatcgcggctgccactgagctgctg

SEQ ID NO: 1306598 - DNA, 25 bp, Homo sapien
cgatgaaaggcaccaggatcgcggc

SEQ ID NO: 1306599 - DNA, 25 bp, Homo sapien
cgaagcccgcaataatgagggcgat

SEQ ID NO: 1306600 - DNA, 25 bp, Homo sapien
tctttgaaagccgaactgcccaaag

SEQ ID NO: 1306601 - DNA, 25 bp, Homo sapien
ccagtctttgaaagccgaactgccc

SEQ ID NO: 1306602 - DNA, 25 bp, Homo sapien
gcccaaagccttggcccttgacaga

SEQ ID NO: 1306603 - DNA, 25 bp, Homo sapien
ttgaaagccgaactgcccaaagcct

SEQ ID NO: 1306604 - DNA, 25 bp, Homo sapien
tggccatctaaagcccagtgatcat

SEQ ID NO: 1306605 - DNA, 25 bp, Homo sapien
atggccatctaaagcccagtgatca

SEQ ID NO: 1306606 - DNA, 25 bp, Homo sapien
acaggccctgtaatctggtacacct

SEQ ID NO: 1306607 - DNA, 25 bp, Homo sapien
aacttattcataaagatctccacag

SEQ ID NO: 1306608 - DNA, 25 bp, Homo sapien
gtaatctggtacacctggagtagga

SEQ ID NO: 1306609 - DNA, 25 bp, Homo sapien
tttgaacttattcataaagatctcc

SEQ ID NO: 1306610 - DNA, 25 bp, Homo sapien
cacgccactgtggtcgatcatggtg

SEQ ID NO: 1306611 - DNA, 25 bp, Homo sapien
caagtgcagctccacgccactgtgg

SEQ ID NO: 1306612 - DNA, 25 bp, Homo sapien
gatcatggtggcattgaccttgctg

SEQ ID NO: 1306613 - DNA, 25 bp, Homo sapien
cctttccacagggaattcttggcaa

SEQ ID NO: 1306614 - DNA, 25 bp, Homo sapien
tgttgatgggtctcccactgggccg

SEQ ID NO: 1306615 - DNA, 25 bp, Homo sapien
atgggtctcccactgggccggacct

SEQ ID NO: 1306616 - DNA, 25 bp, Homo sapien
cgggcagtgttgatgggtctcccac

SEQ ID NO: 1306617 - DNA, 25 bp, Homo sapien
ctcccgggcagtgttgatgggtctc

SEQ ID NO: 1306618 - DNA, 25 bp, Homo sapien
catgcgttggcgtctctggctgcct

SEQ ID NO: 1306619 - DNA, 25 bp, Homo sapien
agatgggcggcttgcctgtccagct

SEQ ID NO: 1306620 - DNA, 25 bp, Homo sapien
agtagatgagcgtgtagcccatgga

SEQ ID NO: 1306621 - DNA, 25 bp, Homo sapien
tcggagccacccttgagggagaagc

SEQ ID NO: 1306622 - DNA, 25 bp, Homo sapien
tggatgagaggaaagaccctgttgg

SEQ ID NO: 1306623 - DNA, 25 bp, Homo sapien
ggatgagaggaaagaccctgttgga

SEQ ID NO: 1306624 - DNA, 25 bp, Homo sapien
ttttgacaacggaagaggactgtgc

SEQ ID NO: 1306625 - DNA, 25 bp, Homo sapien
gcaggtagcctttttgacaacggaa

SEQ ID NO: 1306626 - DNA, 25 bp, Homo sapien
tggagccctgaagcaggtagccttt

SEQ ID NO: 1306627 - DNA, 25 bp, Homo sapien
gccctgaagcaggtagcctttttga

SEQ ID NO: 1306628 - DNA, 25 bp, Homo sapien
accagggtccgcacacgtggtcagg

SEQ ID NO: 1306629 - DNA, 25 bp, Homo sapien
aactgtggcacaccagggtccgcac

SEQ ID NO: 1306630 - DNA, 25 bp, Homo sapien
aattgttctgtatcccaaactgtgg

SEQ ID NO: 1306631 - DNA, 25 bp, Homo sapien
tctgtatcccaaactgtggcacacc

SEQ ID NO: 1306632 - DNA, 25 bp, Homo sapien
gggtgccactccatgtcccatctga

SEQ ID NO: 1306633 - DNA, 25 bp, Homo sapien
actggcaaaacctgcgtggagagcc

SEQ ID NO: 1306634 - DNA, 25 bp, Homo sapien
aaggagacagatgacctgtaggaga

SEQ ID NO: 1306635 - DNA, 25 bp, Homo sapien
taggagaagcctcggtcctctctcc

SEQ ID NO: 1306636 - DNA, 25 bp, Homo sapien
actgaggcagctctccggtccagga

SEQ ID NO: 1306637 - DNA, 25 bp, Homo sapien
caggacccatttccctcacaggtga

SEQ ID NO: 1306638 - DNA, 25 bp, Homo sapien
taagtcacacttgagccccacatga

SEQ ID NO: 1306639 - DNA, 25 bp, Homo sapien
gagcggaggtggcttgcacatgaga

SEQ ID NO: 1306640 - DNA, 25 bp, Homo sapien
ggagaccaaagcaggctgagttctg

SEQ ID NO: 1306641 - DNA, 25 bp, Homo sapien
tgtgactccatcatatagccaggga

SEQ ID NO: 1306642 - DNA, 25 bp, Homo sapien
gcagacgggcttggttccattccat

SEQ ID NO: 1306643 - DNA, 25 bp, Homo sapien
ggaatcccagggtcaccacagttta

SEQ ID NO: 1306644 - DNA, 25 bp, Homo sapien
atgtccggtccttggtgcagctcag

SEQ ID NO: 1306645 - DNA, 25 bp, Homo sapien
cacaactcgggcattacttggagtc

SEQ ID NO: 1306646 - DNA, 25 bp, Homo sapien
tgtggcgtagtatccttcccggcac

SEQ ID NO: 1306647 - DNA, 25 bp, Homo sapien
ttcccggcactcatagacgatagag

SEQ ID NO: 1306648 - DNA, 25 bp, Homo sapien
cattgaccgagcagtgacggctgag

SEQ ID NO: 1306649 - DNA, 25 bp, Homo sapien
ggcttgacaggtgcgctctgacgat

SEQ ID NO: 1306650 - DNA, 25 bp, Homo sapien
caaacggatgccatgagccgggatc

SEQ ID NO: 1306651 - DNA, 25 bp, Homo sapien
gccgctccacgagccattggcttga

SEQ ID NO: 1306652 - DNA, 25 bp, Homo sapien
cagctgaagcgcatcacagtgcctg

SEQ ID NO: 1306653 - DNA, 25 bp, Homo sapien
tatggaccagaaccacacaaatccc

SEQ ID NO: 1306654 - DNA, 25 bp, Homo sapien
ctatggaccagaaccacacaaatcc

SEQ ID NO: 1306655 - DNA, 25 bp, Homo sapien
atggaccagaaccacacaaatccca

SEQ ID NO: 1306656 - DNA, 25 bp, Homo sapien
tggaccagaaccacacaaatcccat

SEQ ID NO: 1306657 - DNA, 25 bp, Homo sapien
cccacagtataactgtctccagaca

SEQ ID NO: 1306658 - DNA, 25 bp, Homo sapien
cagagtacgcttgccgatgcagctg

SEQ ID NO: 1306659 - DNA, 25 bp, Homo sapien
agcccacacatgcgggtgctgtttc

SEQ ID NO: 1306660 - DNA, 25 bp, Homo sapien
gatgcagctgtaccgcaccactgct

SEQ ID NO: 1306661 - DNA, 25 bp, Homo sapien
ggttgcaccggtaagacacagtggt

SEQ ID NO: 1306662 - DNA, 25 bp, Homo sapien
gctggcgtggacctgacgaacacta

SEQ ID NO: 1306663 - DNA, 25 bp, Homo sapien
cagtggtgccgaagctgaacctgtg

SEQ ID NO: 1306664 - DNA, 25 bp, Homo sapien
tagaagccgtggttgcaccggtaag

SEQ ID NO: 1306665 - DNA, 25 bp, Homo sapien
aacaggcatggattcccagtatagt

SEQ ID NO: 1306666 - DNA, 25 bp, Homo sapien
ttgaacagaagtccaaacaggcatg

SEQ ID NO: 1306667 - DNA, 25 bp, Homo sapien
ggcatggattcccagtatagtaaaa

SEQ ID NO: 1306668 - DNA, 25 bp, Homo sapien
ctgcaattgaacagaagtccaaaca

SEQ ID NO: 1306669 - DNA, 25 bp, Homo sapien
ttaaactggttaccctgagtgaggc

SEQ ID NO: 1306670 - DNA, 25 bp, Homo sapien
tggccaggcattgggacctagcagc

SEQ ID NO: 1306671 - DNA, 25 bp, Homo sapien
tacccagggttgcaaacaaacttga

SEQ ID NO: 1306672 - DNA, 25 bp, Homo sapien
gaccacatcgttgaggttaaactgg

SEQ ID NO: 1306673 - DNA, 25 bp, Homo sapien
taaccaaaacagaagataggtaagc

SEQ ID NO: 1306674 - DNA, 25 bp, Homo sapien
ccaaaacagaagataggtaagccct

SEQ ID NO: 1306675 - DNA, 25 bp, Homo sapien
caaaacagaagataggtaagccctc

SEQ ID NO: 1306676 - DNA, 25 bp, Homo sapien
ctgtaaccaaaacagaagataggta

SEQ ID NO: 1306677 - DNA, 25 bp, Homo sapien
gagacagggagaaagtccatgttga

SEQ ID NO: 1306678 - DNA, 25 bp, Homo sapien
cctactcaaaagctagaaaatgaac

SEQ ID NO: 1306679 - DNA, 25 bp, Homo sapien
catgactagggagagtggatgacat

SEQ ID NO: 1306680 - DNA, 25 bp, Homo sapien
gaggaaatttcatagtcttaagcac

SEQ ID NO: 1306681 - DNA, 25 bp, Homo sapien
gcattgcattggtacaccacactgc

SEQ ID NO: 1306682 - DNA, 25 bp, Homo sapien
tccccattgatgtgtccgttgacaa

SEQ ID NO: 1306683 - DNA, 25 bp, Homo sapien
cacactgccccggtagctgtagttc

SEQ ID NO: 1306684 - DNA, 25 bp, Homo sapien
agacatgccgatcaggcggaagcca

SEQ ID NO: 1306685 - DNA, 25 bp, Homo sapien
tacatcgaagaggagcttatagaaa

SEQ ID NO: 1306686 - DNA, 25 bp, Homo sapien
gagtacatcgaagaggagcttatag

SEQ ID NO: 1306687 - DNA, 25 bp, Homo sapien
gaagagagtacatcgaagaggagct

SEQ ID NO: 1306688 - DNA, 25 bp, Homo sapien
agaggagcttatagaaaatggagtg

SEQ ID NO: 1306689 - DNA, 25 bp, Homo sapien
gaggagacagaaccatagaaccagg

SEQ ID NO: 1306690 - DNA, 25 bp, Homo sapien
tccaagaaaggtgtgagaggagaca

SEQ ID NO: 1306691 - DNA, 25 bp, Homo sapien
gggcttcactcattatacaaaggcc

SEQ ID NO: 1306692 - DNA, 25 bp, Homo sapien
tagaaccagggagtggattagccat

SEQ ID NO: 1306693 - DNA, 25 bp, Homo sapien
gacagtgttccgatgcggtggccat

SEQ ID NO: 1306694 - DNA, 25 bp, Homo sapien
gctgttgccccgtagacagacagtg

SEQ ID NO: 1306695 - DNA, 25 bp, Homo sapien
agcggacttcagagccactccagag

SEQ ID NO: 1306696 - DNA, 25 bp, Homo sapien
caccagtgtgtatccggaattgcag

SEQ ID NO: 1306697 - DNA, 25 bp, Homo sapien
acaagatgctcagtaagccagcccc

SEQ ID NO: 1306698 - DNA, 25 bp, Homo sapien
caagatgctcagtaagccagcccca

SEQ ID NO: 1306699 - DNA, 25 bp, Homo sapien
agataagcctccatcggccatgctc

SEQ ID NO: 1306700 - DNA, 25 bp, Homo sapien
cagcggatgaccctttggccagtat

SEQ ID NO: 1306701 - DNA, 25 bp, Homo sapien
tttgccattggcctgacagcggatg

SEQ ID NO: 1306702 - DNA, 25 bp, Homo sapien
gtagagtccccgaggctccatttgc

SEQ ID NO: 1306703 - DNA, 25 bp, Homo sapien
ctactgacatcaggacaagtcacag

SEQ ID NO: 1306704 - DNA, 25 bp, Homo sapien
cccgcctccattgcccgaggactca

SEQ ID NO: 1306705 - DNA, 25 bp, Homo sapien
ccgcctccattgcccgaggactcac

SEQ ID NO: 1306706 - DNA, 25 bp, Homo sapien
acccgcctccattgcccgaggactc

SEQ ID NO: 1306707 - DNA, 25 bp, Homo sapien
gcggttgctccataggcctgtgtcc

SEQ ID NO: 1306708 - DNA, 25 bp, Homo sapien
acacactgtggtgggacattgcggt

SEQ ID NO: 1306709 - DNA, 25 bp, Homo sapien
cctgcctggaggtggtagccttcac

SEQ ID NO: 1306710 - DNA, 25 bp, Homo sapien
ctgtgtccagacactctgcagtggc

SEQ ID NO: 1306711 - DNA, 25 bp, Homo sapien
gaccccctttccacctgcttctcac

SEQ ID NO: 1306712 - DNA, 25 bp, Homo sapien
ttgtgaccccctttccacctgcttc

SEQ ID NO: 1306713 - DNA, 25 bp, Homo sapien
gtgaccccctttccacctgcttctc

SEQ ID NO: 1306714 - DNA, 25 bp, Homo sapien
cttgtgaccccctttccacctgctt

SEQ ID NO: 1306715 - DNA, 25 bp, Homo sapien
gtacagatggccatgctgtgtccca

SEQ ID NO: 1306716 - DNA, 25 bp, Homo sapien
ctgtgtcccaccaggcggtagccgg

SEQ ID NO: 1306717 - DNA, 25 bp, Homo sapien
gagcccccgggctgggtgctggtct

SEQ ID NO: 1306718 - DNA, 25 bp, Homo sapien
gggtgccgggtacagatggccatgc

SEQ ID NO: 1306719 - DNA, 25 bp, Homo sapien
taggatgaagccatggagtggagcc

SEQ ID NO: 1306720 - DNA, 25 bp, Homo sapien
ctaggatgaagccatggagtggagc

SEQ ID NO: 1306721 - DNA, 25 bp, Homo sapien
atgaagccatggagtggagccctgg

SEQ ID NO: 1306722 - DNA, 25 bp, Homo sapien
ggatgaagccatggagtggagccct

SEQ ID NO: 1306723 - DNA, 25 bp, Homo sapien
tcttgaagcccttccgattgtaggc

SEQ ID NO: 1306724 - DNA, 25 bp, Homo sapien
caacgcaggtacacagagttgcttg

SEQ ID NO: 1306725 - DNA, 25 bp, Homo sapien
gagtaattcccactgagggctttca

SEQ ID NO: 1306726 - DNA, 25 bp, Homo sapien
gattgtaggcgtgatcagatgacca

SEQ ID NO: 1306727 - DNA, 25 bp, Homo sapien
ctcatcatattgcttctcgctgagg

SEQ ID NO: 1306728 - DNA, 25 bp, Homo sapien
caaactcatcatattgcttctcgct

SEQ ID NO: 1306729 - DNA, 25 bp, Homo sapien
aactcatcatattgcttctcgctga

SEQ ID NO: 1306730 - DNA, 25 bp, Homo sapien
aaactcatcatattgcttctcgctg

SEQ ID NO: 1306731 - DNA, 25 bp, Homo sapien
tctggctcaggatcacgcctgtgga

SEQ ID NO: 1306732 - DNA, 25 bp, Homo sapien
ggagtctgtcagaagctcatttgtt

SEQ ID NO: 1306733 - DNA, 25 bp, Homo sapien
gttatagtcgggctccactctcacc

SEQ ID NO: 1306734 - DNA, 25 bp, Homo sapien
agggagatgttatagtcgggctcca

SEQ ID NO: 1306735 - DNA, 25 bp, Homo sapien
taggttccaagtttgcaggtcagaa

SEQ ID NO: 1306736 - DNA, 25 bp, Homo sapien
gggtggtccttcaaactgcaggtag

SEQ ID NO: 1306737 - DNA, 25 bp, Homo sapien
cagggaggcatctgtagcgtacgat

SEQ ID NO: 1306738 - DNA, 25 bp, Homo sapien
ccactaaggtaaagccagggaggca

SEQ ID NO: 1306739 - DNA, 25 bp, Homo sapien
ttcacagtccttgctggcttgggag

SEQ ID NO: 1306740 - DNA, 25 bp, Homo sapien
ccagtcctgggttcacagtccttgc

SEQ ID NO: 1306741 - DNA, 25 bp, Homo sapien
gggttcacagtccttgctggcttgg

SEQ ID NO: 1306742 - DNA, 25 bp, Homo sapien
tccttccccagtcctgggttcacag

SEQ ID NO: 1306743 - DNA, 25 bp, Homo sapien
tctctgtgacgacttcggcgttggg

SEQ ID NO: 1306744 - DNA, 25 bp, Homo sapien
cattctctgtgacgacttcggcgtt

SEQ ID NO: 1306745 - DNA, 25 bp, Homo sapien
aggagggcatttggtgagtggataa

SEQ ID NO: 1306746 - DNA, 25 bp, Homo sapien
cttcattctctgtgacgacttcggc

SEQ ID NO: 1306747 - DNA, 25 bp, Homo sapien
gaacatgttaactcgtgaacggtgg

SEQ ID NO: 1306748 - DNA, 25 bp, Homo sapien
ctgctgggtgtgctgaattggcctt

SEQ ID NO: 1306749 - DNA, 25 bp, Homo sapien
gcaatggtccctgtcgtcttcctgg

SEQ ID NO: 1306750 - DNA, 25 bp, Homo sapien
gaatgttattcctcaagctgctggg

SEQ ID NO: 1306751 - DNA, 25 bp, Homo sapien
caatgtacaaacagctgccaagtgc

SEQ ID NO: 1306752 - DNA, 25 bp, Homo sapien
gcagccagacttcacaaaggtagag

SEQ ID NO: 1306753 - DNA, 25 bp, Homo sapien
caagagagaacatctgattgcccct

SEQ ID NO: 1306754 - DNA, 25 bp, Homo sapien
gaataagcaaaaaagcctctcagag

SEQ ID NO: 1306755 - DNA, 25 bp, Homo sapien
caccctggacgatagctcctgggaa

SEQ ID NO: 1306756 - DNA, 25 bp, Homo sapien
ttcattagtggagcgacaggtgtgc

SEQ ID NO: 1306757 - DNA, 25 bp, Homo sapien
tttacaccatagcaagggccttgtg

SEQ ID NO: 1306758 - DNA, 25 bp, Homo sapien
tacaggtcacaaactccaagccggt

SEQ ID NO: 1306759 - DNA, 25 bp, Homo sapien
gaaatatccagatccctaacttggg

SEQ ID NO: 1306760 - DNA, 25 bp, Homo sapien
aaggagaacccgctagaaagtgcta

SEQ ID NO: 1306761 - DNA, 25 bp, Homo sapien
tagggatgatccagccagtgagttg

SEQ ID NO: 1306762 - DNA, 25 bp, Homo sapien
cacatgatccgcaaatggtggagac

SEQ ID NO: 1306763 - DNA, 25 bp, Homo sapien
tttcttggccatgctccgggtgaag

SEQ ID NO: 1306764 - DNA, 25 bp, Homo sapien
tgtggctgcatcacggtggaacttg

SEQ ID NO: 1306765 - DNA, 25 bp, Homo sapien
cctggttggatgaactctgcactgt

SEQ ID NO: 1306766 - DNA, 25 bp, Homo sapien
acgccgagccgtggtgctgtttgct

SEQ ID NO: 1306767 - DNA, 25 bp, Homo sapien
tcctgggagctggagtacgggctag

SEQ ID NO: 1306768 - DNA, 25 bp, Homo sapien
agaagtgatgttcccgccacaaggg

SEQ ID NO: 1306769 - DNA, 25 bp, Homo sapien
aatgggcacggtgatcagccagaca

SEQ ID NO: 1306770 - DNA, 25 bp, Homo sapien
ggagtacacagtgccgttggaagaa

SEQ ID NO: 1306771 - DNA, 25 bp, Homo sapien
ccagttccggttggtgccatgttga

SEQ ID NO: 1306772 - DNA, 25 bp, Homo sapien
tgggtctgggcactcttgaagttca

SEQ ID NO: 1306773 - DNA, 25 bp, Homo sapien
tgattgtcccacgttgtagccagct

SEQ ID NO: 1306774 - DNA, 25 bp, Homo sapien
cagtcaattgataccccgggaggca

SEQ ID NO: 1306775 - DNA, 25 bp, Homo sapien
tccaactccgagagatcaaaacctc

SEQ ID NO: 1306776 - DNA, 25 bp, Homo sapien
gaggagttgagttggttctttccaa

SEQ ID NO: 1306777 - DNA, 25 bp, Homo sapien
gaagaaatctggtgggagtaagtca

SEQ ID NO: 1306778 - DNA, 25 bp, Homo sapien
tcaagatcccagacataggaagcgg

SEQ ID NO: 1306779 - DNA, 25 bp, Homo sapien
atgtttccattcagtacctcacagg

SEQ ID NO: 1306780 - DNA, 25 bp, Homo sapien
tgtttccattcagtacctcacaggg

SEQ ID NO: 1306781 - DNA, 25 bp, Homo sapien
cattgaggtaattgggtgtgccaaa

SEQ ID NO: 1306782 - DNA, 25 bp, Homo sapien
ccctgggaaatcattgaggtaattg

SEQ ID NO: 1306783 - DNA, 25 bp, Homo sapien
caggtgatggatggtctacaacaca

SEQ ID NO: 1306784 - DNA, 25 bp, Homo sapien
ggccggtcacgggatcccacttcag

SEQ ID NO: 1306785 - DNA, 25 bp, Homo sapien
cttgtgcaaggcttagaggtgccct

SEQ ID NO: 1306786 - DNA, 25 bp, Homo sapien
tgggcacaatctccacatccacagg

SEQ ID NO: 1306787 - DNA, 25 bp, Homo sapien
agcttgaatcctggccgattctggg

SEQ ID NO: 1306788 - DNA, 25 bp, Homo sapien
cgctgtggaaatacacggtggtctc

SEQ ID NO: 1306789 - DNA, 25 bp, Homo sapien
ttctatgtagtcgtggttgggctcg

SEQ ID NO: 1306790 - DNA, 25 bp, Homo sapien
ccatcatgcggctggtctcataggg

SEQ ID NO: 1306791 - DNA, 25 bp, Homo sapien
caaagcccacgggcagtgctatttt

SEQ ID NO: 1306792 - DNA, 25 bp, Homo sapien
cagtccatgttactggggtagttgc

SEQ ID NO: 1306793 - DNA, 25 bp, Homo sapien
tactggggtagttgcctgggaagcc

SEQ ID NO: 1306794 - DNA, 25 bp, Homo sapien
aagcccacgggcagtgctattttcc

SEQ ID NO: 1306795 - DNA, 25 bp, Homo sapien
ttgaacatgcccttcacaggtcagt

SEQ ID NO: 1306796 - DNA, 25 bp, Homo sapien
tgcccttcacaggtcagttccctgg

SEQ ID NO: 1306797 - DNA, 25 bp, Homo sapien
gttccctggtgaggatgtccaggaa

SEQ ID NO: 1306798 - DNA, 25 bp, Homo sapien
ccttcacaggtcagttccctggtga

SEQ ID NO: 1306799 - DNA, 25 bp, Homo sapien
tcctcactgcccaatctactctttc

SEQ ID NO: 1306800 - DNA, 25 bp, Homo sapien
cactgcccaatctactctttcaaga

SEQ ID NO: 1306801 - DNA, 25 bp, Homo sapien
ctcctcactgcccaatctactcttt

SEQ ID NO: 1306802 - DNA, 25 bp, Homo sapien
ctcactgcccaatctactctttcaa

SEQ ID NO: 1306803 - DNA, 25 bp, Homo sapien
gatatgccaatcaaggtgaattcag

SEQ ID NO: 1306804 - DNA, 25 bp, Homo sapien
agtgacggtgatcagcatcccacag

SEQ ID NO: 1306805 - DNA, 25 bp, Homo sapien
ggcttagggacatctgatatgccaa

SEQ ID NO: 1306806 - DNA, 25 bp, Homo sapien
catcctcagaaaagtgacggtgatc

SEQ ID NO: 1306807 - DNA, 25 bp, Homo sapien
atcgccgcactgttccgggcatgca

SEQ ID NO: 1306808 - DNA, 25 bp, Homo sapien
gagtggaggagggtagttccatcgc

SEQ ID NO: 1306809 - DNA, 25 bp, Homo sapien
gggtagttccatcgccgcactgttc

SEQ ID NO: 1306810 - DNA, 25 bp, Homo sapien
cgccgcactgttccgggcatgcagg

SEQ ID NO: 1306811 - DNA, 25 bp, Homo sapien
ggcacagcaggttccggacaactgc

SEQ ID NO: 1306812 - DNA, 25 bp, Homo sapien
cacatcattcaccaagtagcgctcg

SEQ ID NO: 1306813 - DNA, 25 bp, Homo sapien
ttcaccccgttactgggcacagcag

SEQ ID NO: 1306814 - DNA, 25 bp, Homo sapien
ggctcacactggaaagacaccacat

SEQ ID NO: 1306815 - DNA, 25 bp, Homo sapien
tctttagtggactttgactgaccca

SEQ ID NO: 1306816 - DNA, 25 bp, Homo sapien
aatcagacatctagcacccagtggg

SEQ ID NO: 1306817 - DNA, 25 bp, Homo sapien
catgctgtcgcagatggtctagcca

SEQ ID NO: 1306818 - DNA, 25 bp, Homo sapien
tttgtttcacagacccagatgggca

SEQ ID NO: 1306819 - DNA, 25 bp, Homo sapien
gccagctgcagatacgctgatatct

SEQ ID NO: 1306820 - DNA, 25 bp, Homo sapien
ggaagccagctgcagatacgctgat

SEQ ID NO: 1306821 - DNA, 25 bp, Homo sapien
gcagatacgctgatatctgagtaga

SEQ ID NO: 1306822 - DNA, 25 bp, Homo sapien
tacgctgatatctgagtagaaatga

SEQ ID NO: 1306823 - DNA, 25 bp, Homo sapien
atacttccagcgagtcccagttctg

SEQ ID NO: 1306824 - DNA, 25 bp, Homo sapien
caaatacttccagcgagtcccagtt

SEQ ID NO: 1306825 - DNA, 25 bp, Homo sapien
tcaaatacttccagcgagtcccagt

SEQ ID NO: 1306826 - DNA, 25 bp, Homo sapien
catcaaatacttccagcgagtccca

SEQ ID NO: 1306827 - DNA, 25 bp, Homo sapien
ttgaggtacggctctgggaagccag

SEQ ID NO: 1306828 - DNA, 25 bp, Homo sapien
gggaccacgatcttccacacacagt

SEQ ID NO: 1306829 - DNA, 25 bp, Homo sapien
cctgcgctctgtgaggttgcctcca

SEQ ID NO: 1306830 - DNA, 25 bp, Homo sapien
atgccagcgccttcggggaccacga

SEQ ID NO: 1306831 - DNA, 25 bp, Homo sapien
agacattccattgggccaaggcccc

SEQ ID NO: 1306832 - DNA, 25 bp, Homo sapien
acacgtgggcgctgagacattccat

SEQ ID NO: 1306833 - DNA, 25 bp, Homo sapien
acccctgcagggcatagccggagtt

SEQ ID NO: 1306834 - DNA, 25 bp, Homo sapien
ccggagttgcattcgaagcggacga

SEQ ID NO: 1306835 - DNA, 25 bp, Homo sapien
aggcctttggcgctgaacttaatga

SEQ ID NO: 1306836 - DNA, 25 bp, Homo sapien
ctttggcgctgaacttaatgagaac

SEQ ID NO: 1306837 - DNA, 25 bp, Homo sapien
gcctttggcgctgaacttaatgaga

SEQ ID NO: 1306838 - DNA, 25 bp, Homo sapien
ggcgctgaacttaatgagaacttga

SEQ ID NO: 1306839 - DNA, 25 bp, Homo sapien
tgcatgggcacaggaaaccagggta

SEQ ID NO: 1306840 - DNA, 25 bp, Homo sapien
gcacaggaaaccagggtagactgac

SEQ ID NO: 1306841 - DNA, 25 bp, Homo sapien
tgggcacaggaaaccagggtagact

SEQ ID NO: 1306842 - DNA, 25 bp, Homo sapien
catgggcacaggaaaccagggtaga

SEQ ID NO: 1306843 - DNA, 25 bp, Homo sapien
tgcttggtgcagtacagatgggcca

SEQ ID NO: 1306844 - DNA, 25 bp, Homo sapien
gacctgcagccaattagtgtagttg

SEQ ID NO: 1306845 - DNA, 25 bp, Homo sapien
cctgcagccaattagtgtagttgcc

SEQ ID NO: 1306846 - DNA, 25 bp, Homo sapien
tgcagccaattagtgtagttgccat

SEQ ID NO: 1306847 - DNA, 25 bp, Homo sapien
ctgaaggccccgctagttggagctc

SEQ ID NO: 1306848 - DNA, 25 bp, Homo sapien
cacaagggggcggtgtagacacagt

SEQ ID NO: 1306849 - DNA, 25 bp, Homo sapien
aaggccccgctagttggagctctca

SEQ ID NO: 1306850 - DNA, 25 bp, Homo sapien
acaggagaaggctacaccacaaggg

SEQ ID NO: 1306851 - DNA, 25 bp, Homo sapien
tgtagacaagcaccagaacacgaca

SEQ ID NO: 1306852 - DNA, 25 bp, Homo sapien
gccatggggtgcttctagagcctcc

SEQ ID NO: 1306853 - DNA, 25 bp, Homo sapien
gcctccttcctttagccggacgtga

SEQ ID NO: 1306854 - DNA, 25 bp, Homo sapien
acgcagagccgtagggttccacctg

SEQ ID NO: 1306855 - DNA, 25 bp, Homo sapien
ctggctgtggccgtcgtgaacctcc

SEQ ID NO: 1306856 - DNA, 25 bp, Homo sapien
gtatgggagcccgagagggagctga

SEQ ID NO: 1306857 - DNA, 25 bp, Homo sapien
tccaccacgtcgttgagggccgtgt

SEQ ID NO: 1306858 - DNA, 25 bp, Homo sapien
gggccgtgtgaaagaaggcgaactg

SEQ ID NO: 1306859 - DNA, 25 bp, Homo sapien
tcttgtgtccggaatgtattctgca

SEQ ID NO: 1306860 - DNA, 25 bp, Homo sapien
ttgagaaacgtcagcactcggccgt

SEQ ID NO: 1306861 - DNA, 25 bp, Homo sapien
aacgtcagcactcggccgtcctttt

SEQ ID NO: 1306862 - DNA, 25 bp, Homo sapien
tgcagcccgtttgagaaacgtcagc

SEQ ID NO: 1306863 - DNA, 25 bp, Homo sapien
aacccacatactgtcccccacaggg

SEQ ID NO: 1306864 - DNA, 25 bp, Homo sapien
agatctgtccactggtgtagttctg

SEQ ID NO: 1306865 - DNA, 25 bp, Homo sapien
gacaagaccactccgtccgaaccca

SEQ ID NO: 1306866 - DNA, 25 bp, Homo sapien
gatctgtccactggtgtagttctgg

SEQ ID NO: 1306867 - DNA, 25 bp, Homo sapien
cacccgtgtgccgttcttgatggaa

SEQ ID NO: 1306868 - DNA, 25 bp, Homo sapien
tcgaggtgccctcaacttcgtagcc

SEQ ID NO: 1306869 - DNA, 25 bp, Homo sapien
gatcaaaacatgactcccgcgggtt

SEQ ID NO: 1306870 - DNA, 25 bp, Homo sapien
gcagtagtaggtgacggaggagccc

SEQ ID NO: 1306871 - DNA, 25 bp, Homo sapien
aagaggttttgaaagtatggctctc

SEQ ID NO: 1306872 - DNA, 25 bp, Homo sapien
tatggctctcggaccatgaatttcc

SEQ ID NO: 1306873 - DNA, 25 bp, Homo sapien
gaaagtatggctctcggaccatgaa

SEQ ID NO: 1306874 - DNA, 25 bp, Homo sapien
gttttgaaagtatggctctcggacc

SEQ ID NO: 1306875 - DNA, 25 bp, Homo sapien
tatggaggaagtcatagccaggctc

SEQ ID NO: 1306876 - DNA, 25 bp, Homo sapien
tgctgctttcaatgcggcctgggag

SEQ ID NO: 1306877 - DNA, 25 bp, Homo sapien
tcacagatgcatcgctgcggaaggc

SEQ ID NO: 1306878 - DNA, 25 bp, Homo sapien
gagtcccgtccgtcgtagatatgga

SEQ ID NO: 1306879 - DNA, 25 bp, Homo sapien
cctagccactctgaacccttcgtct

SEQ ID NO: 1306880 - DNA, 25 bp, Homo sapien
ccctagccactctgaacccttcgtc

SEQ ID NO: 1306881 - DNA, 25 bp, Homo sapien
tagccactctgaacccttcgtctcc

SEQ ID NO: 1306882 - DNA, 25 bp, Homo sapien
gcccctagccactctgaacccttcg

SEQ ID NO: 1306883 - DNA, 25 bp, Homo sapien
taccagggcgatgacgtagtctggt

SEQ ID NO: 1306884 - DNA, 25 bp, Homo sapien
cactccttgcctggcgggtagggtt

SEQ ID NO: 1306885 - DNA, 25 bp, Homo sapien
tgttaaataccagggcgatgacgta

SEQ ID NO: 1306886 - DNA, 25 bp, Homo sapien
tgactccagatggtcctgtcaggtc

SEQ ID NO: 1306887 - DNA, 25 bp, Homo sapien
ccagagtagaggaggcgtgcttctc

SEQ ID NO: 1306888 - DNA, 25 bp, Homo sapien
cacagttgttgcaggagcttctgag

SEQ ID NO: 1306889 - DNA, 25 bp, Homo sapien
taagttgggtctgcttatgtctcac

SEQ ID NO: 1306890 - DNA, 25 bp, Homo sapien
agtcggtagcagtagccagagtaga

SEQ ID NO: 1306891 - DNA, 25 bp, Homo sapien
cgatgcatgttggcgggctgggctg

SEQ ID NO: 1306892 - DNA, 25 bp, Homo sapien
tgttctcgatcttcacacagctgat

SEQ ID NO: 1306893 - DNA, 25 bp, Homo sapien
gactcccattctgcgggatcccagg

SEQ ID NO: 1306894 - DNA, 25 bp, Homo sapien
tccctgcagcgcgtagccagggtca

SEQ ID NO: 1306895 - DNA, 25 bp, Homo sapien
tcattgcaggacgttgctgtggaca

SEQ ID NO: 1306896 - DNA, 25 bp, Homo sapien
caggatgttagatgttacacagtca

SEQ ID NO: 1306897 - DNA, 25 bp, Homo sapien
taaagccaagcctgcactaatcgtc

SEQ ID NO: 1306898 - DNA, 25 bp, Homo sapien
aaaggctggatccacgtggtacaga

SEQ ID NO: 1306899 - DNA, 25 bp, Homo sapien
cagtcatgtttacttaataaagcca

SEQ ID NO: 1306900 - DNA, 25 bp, Homo sapien
tgtgtcaaacaccaggaagtgtagc

SEQ ID NO: 1306901 - DNA, 25 bp, Homo sapien
tgaaaattgaatggcaaagccctgc

SEQ ID NO: 1306902 - DNA, 25 bp, Homo sapien
tgaactgcaggacgaccgagttgaa

SEQ ID NO: 1306903 - DNA, 25 bp, Homo sapien
cgagttgaaggtgctatgcaggtcc

SEQ ID NO: 1306904 - DNA, 25 bp, Homo sapien
tacacatcacggtagaggcttcctt

SEQ ID NO: 1306905 - DNA, 25 bp, Homo sapien
gagaagcctcagacggtagcacttc

SEQ ID NO: 1306906 - DNA, 25 bp, Homo sapien
tctgggccttatatccggtcagcct

SEQ ID NO: 1306907 - DNA, 25 bp, Homo sapien
tgccacaggtcagtcagtagttact

SEQ ID NO: 1306908 - DNA, 25 bp, Homo sapien
tggccaattcaactactcagtgtag

SEQ ID NO: 1306909 - DNA, 25 bp, Homo sapien
gaaaaactgaatggccggagagtgc

SEQ ID NO: 1306910 - DNA, 25 bp, Homo sapien
tcagctcttgcagtgtaagtacacg

SEQ ID NO: 1306911 - DNA, 25 bp, Homo sapien
tgacaaaggaataccccactgtgtg

SEQ ID NO: 1306912 - DNA, 25 bp, Homo sapien
ggagggaggcaacactgaccactgt

SEQ ID NO: 1306913 - DNA, 25 bp, Homo sapien
agggaggcaacactgaccactgtgg

SEQ ID NO: 1306914 - DNA, 25 bp, Homo sapien
acctgtggccatgattcctggcaag

SEQ ID NO: 1306915 - DNA, 25 bp, Homo sapien
cctggcaagagctgtgaatgcaagc

SEQ ID NO: 1306916 - DNA, 25 bp, Homo sapien
gcatagcagaaatccgagtgtccag

SEQ ID NO: 1306917 - DNA, 25 bp, Homo sapien
ttagccaaatatgagctttatgggc

SEQ ID NO: 1306918 - DNA, 25 bp, Homo sapien
gcagaaatccgagtgtccagagtga

SEQ ID NO: 1306919 - DNA, 25 bp, Homo sapien
gctttatgggcatagcagaaatccg

SEQ ID NO: 1306920 - DNA, 25 bp, Homo sapien
gctgtcaaaacgcagcctcatagcc

SEQ ID NO: 1306921 - DNA, 25 bp, Homo sapien
ttcatctcccatgaatgccgccacc

SEQ ID NO: 1306922 - DNA, 25 bp, Homo sapien
caccaaatcgcaggtgatcatccag

SEQ ID NO: 1306923 - DNA, 25 bp, Homo sapien
aaactgccaggagctgtcaaaacgc

SEQ ID NO: 1306924 - DNA, 25 bp, Homo sapien
tccagatgcagttgagattgtgttc

SEQ ID NO: 1306925 - DNA, 25 bp, Homo sapien
agccggcctctgcttcgatggtcca

SEQ ID NO: 1306926 - DNA, 25 bp, Homo sapien
tggatacccgggtgacagcacctgc

SEQ ID NO: 1306927 - DNA, 25 bp, Homo sapien
ttcatagggagctggatacccgggt

SEQ ID NO: 1306928 - DNA, 25 bp, Homo sapien
tcactaccccgcaggctgtatccag

SEQ ID NO: 1306929 - DNA, 25 bp, Homo sapien
tcctgggtcctcacatttgatgagt

SEQ ID NO: 1306930 - DNA, 25 bp, Homo sapien
catcatgaaccttgtagccaaactt

SEQ ID NO: 1306931 - DNA, 25 bp, Homo sapien
gagctccctgcaaaatgaccttcat

SEQ ID NO: 1306932 - DNA, 25 bp, Homo sapien
tccactgatggatacatattggatt

SEQ ID NO: 1306933 - DNA, 25 bp, Homo sapien
ttgctggtgttttcagcatcagtga

SEQ ID NO: 1306934 - DNA, 25 bp, Homo sapien
cttgctggtgttttcagcatcagtg

SEQ ID NO: 1306935 - DNA, 25 bp, Homo sapien
gaaaagtgcagttcaaagcccttgc

SEQ ID NO: 1306936 - DNA, 25 bp, Homo sapien
agtgcagttcaaagcccttgctggt

SEQ ID NO: 1306937 - DNA, 25 bp, Homo sapien
ccagcaaacgggcggagttgttgtt

SEQ ID NO: 1306938 - DNA, 25 bp, Homo sapien
agcaaacgggcggagttgttgttgc

SEQ ID NO: 1306939 - DNA, 25 bp, Homo sapien
atggctaaaaactcccagcaaacgg

SEQ ID NO: 1306940 - DNA, 25 bp, Homo sapien
gcaaacgggcggagttgttgttgcc

SEQ ID NO: 1306941 - DNA, 25 bp, Homo sapien
gacagcaaagtaccctgagtgcctg

SEQ ID NO: 1306942 - DNA, 25 bp, Homo sapien
gatggagtagatgcattcatgattg

SEQ ID NO: 1306943 - DNA, 25 bp, Homo sapien
gagagttcgaatgccctggctttca

SEQ ID NO: 1306944 - DNA, 25 bp, Homo sapien
cttgaggacatctccttcggagagt

SEQ ID NO: 1306945 - DNA, 25 bp, Homo sapien
gtttgcctgtctacctgccaaggtg

SEQ ID NO: 1306946 - DNA, 25 bp, Homo sapien
ctggaaagagaatcacaataaccat

SEQ ID NO: 1306947 - DNA, 25 bp, Homo sapien
aatacttccctacctatggtgctgc

SEQ ID NO: 1306948 - DNA, 25 bp, Homo sapien
ctgtctacagaaatgcctctcaaac

SEQ ID NO: 1306949 - DNA, 25 bp, Homo sapien
catccagattcctcggtaagaggca

SEQ ID NO: 1306950 - DNA, 25 bp, Homo sapien
tcctcggtaagaggcatccttaagc

SEQ ID NO: 1306951 - DNA, 25 bp, Homo sapien
gattcctcggtaagaggcatcctta

SEQ ID NO: 1306952 - DNA, 25 bp, Homo sapien
agtgcccatccagattcctcggtaa

SEQ ID NO: 1306953 - DNA, 25 bp, Homo sapien
ctccagacggtacccggggaagcag

SEQ ID NO: 1306954 - DNA, 25 bp, Homo sapien
ttccggatgctgtaggctgggacct

SEQ ID NO: 1306955 - DNA, 25 bp, Homo sapien
agaaggtcaaggtgtcgcccacgcc

SEQ ID NO: 1306956 - DNA, 25 bp, Homo sapien
caggcacgtgatgcgggcggtgccc

SEQ ID NO: 1306957 - DNA, 25 bp, Homo sapien
agatccgggctcagagacattgcgg

SEQ ID NO: 1306958 - DNA, 25 bp, Homo sapien
ggaacgcacaggcaaaacaccaggg

SEQ ID NO: 1306959 - DNA, 25 bp, Homo sapien
cagggacaacgaaagacagagaaga

SEQ ID NO: 1306960 - DNA, 25 bp, Homo sapien
gcaaaaagatgggaacgcacaggca

SEQ ID NO: 1306961 - DNA, 25 bp, Homo sapien
gagctggcagccgagatccagttag

SEQ ID NO: 1306962 - DNA, 25 bp, Homo sapien
gcagccgagatccagttagctgcct

SEQ ID NO: 1306963 - DNA, 25 bp, Homo sapien
gctggcagccgagatccagttagct

SEQ ID NO: 1306964 - DNA, 25 bp, Homo sapien
agaaggtgatgttgaatccttcata

SEQ ID NO: 1306965 - DNA, 25 bp, Homo sapien
aaggtgtggaaagtgaagaacacac

SEQ ID NO: 1306966 - DNA, 25 bp, Homo sapien
ggaaggtgtggaaagtgaagaacac

SEQ ID NO: 1306967 - DNA, 25 bp, Homo sapien
ctttccaggtggaaggtgtggaaag

SEQ ID NO: 1306968 - DNA, 25 bp, Homo sapien
gtggaaggtgtggaaagtgaagaac

SEQ ID NO: 1306969 - DNA, 25 bp, Homo sapien
tcaaaatccttgatgtgaaaaggct

SEQ ID NO: 1306970 - DNA, 25 bp, Homo sapien
gggtcaaaatccttgatgtgaaaag

SEQ ID NO: 1306971 - DNA, 25 bp, Homo sapien
aaatccttgatgtgaaaaggcttgt

SEQ ID NO: 1306972 - DNA, 25 bp, Homo sapien
gcttcacgggggtcaaaatccttga

SEQ ID NO: 1306973 - DNA, 25 bp, Homo sapien
agatgtttcgataatccaggtgcag

SEQ ID NO: 1306974 - DNA, 25 bp, Homo sapien
gagatgtttcgataatccaggtgca

SEQ ID NO: 1306975 - DNA, 25 bp, Homo sapien
tgagatgtttcgataatccaggtgc

SEQ ID NO: 1306976 - DNA, 25 bp, Homo sapien
aaaccctggcgacaagatggtccca

SEQ ID NO: 1306977 - DNA, 25 bp, Homo sapien
gaaaccctggcgacaagatggtccc

SEQ ID NO: 1306978 - DNA, 25 bp, Homo sapien
cagggaaaccctggcgacaagatgg

SEQ ID NO: 1306979 - DNA, 25 bp, Homo sapien
gggaaaccctggcgacaagatggtc

SEQ ID NO: 1306980 - DNA, 25 bp, Homo sapien
gagccttgaatgaagccaccacaga

SEQ ID NO: 1306981 - DNA, 25 bp, Homo sapien
ggagccttgaatgaagccaccacag

SEQ ID NO: 1306982 - DNA, 25 bp, Homo sapien
gcccgagtcacagctgaaggtcacc

SEQ ID NO: 1306983 - DNA, 25 bp, Homo sapien
agcgcgcccacgtagaagtcattcc

SEQ ID NO: 1306984 - DNA, 25 bp, Homo sapien
cagggcccggctccactggaagttg

SEQ ID NO: 1306985 - DNA, 25 bp, Homo sapien
gaggctccccgtcacttaatgtgta

SEQ ID NO: 1306986 - DNA, 25 bp, Homo sapien
tggaagccgatgtccgagtgactct

SEQ ID NO: 1306987 - DNA, 25 bp, Homo sapien
gagtgactcttgtcggtagagaaga

SEQ ID NO: 1306988 - DNA, 25 bp, Homo sapien
tggtaaaccccgatcaagggcgctg

SEQ ID NO: 1306989 - DNA, 25 bp, Homo sapien
catcgcgtacttccagggtgtcata

SEQ ID NO: 1306990 - DNA, 25 bp, Homo sapien
cacagctcaaggcatccttgtagaa

SEQ ID NO: 1306991 - DNA, 25 bp, Homo sapien
atccttgtagaagccaggccagccc

SEQ ID NO: 1306992 - DNA, 25 bp, Homo sapien
ggccagcccggagagaggatggtgc

SEQ ID NO: 1306993 - DNA, 25 bp, Homo sapien
ccaggcacagctcaaggcatccttg

SEQ ID NO: 1306994 - DNA, 25 bp, Homo sapien
gcgaagtcaggtgaccaccacaggg

SEQ ID NO: 1306995 - DNA, 25 bp, Homo sapien
gggcgaagtcaggtgaccaccacag

SEQ ID NO: 1306996 - DNA, 25 bp, Homo sapien
ctgggcgaagtcaggtgaccaccac

SEQ ID NO: 1306997 - DNA, 25 bp, Homo sapien
cgaagtcaggtgaccaccacaggga

SEQ ID NO: 1306998 - DNA, 25 bp, Homo sapien
ttcacaccgcagcacagcgctgttc

SEQ ID NO: 1306999 - DNA, 25 bp, Homo sapien
caggatccgggcactcgttgtgtcg

SEQ ID NO: 1307000 - DNA, 25 bp, Homo sapien
catttactggaacgccaggatccgg

SEQ ID NO: 1307001 - DNA, 25 bp, Homo sapien
cacagcgctgttccagaccacgctg

SEQ ID NO: 1307002 - DNA, 25 bp, Homo sapien
atgggagcaccttcgatcatcctca

SEQ ID NO: 1307003 - DNA, 25 bp, Homo sapien
cctccatgggagcaccttcgatcat

SEQ ID NO: 1307004 - DNA, 25 bp, Homo sapien
ctccctccatgggagcaccttcgat

SEQ ID NO: 1307005 - DNA, 25 bp, Homo sapien
tccatgggagcaccttcgatcatcc

SEQ ID NO: 1307006 - DNA, 25 bp, Homo sapien
caatgtcgttgaaggccaggtggat

SEQ ID NO: 1307007 - DNA, 25 bp, Homo sapien
tcagtctggaactcgagacgggcca

SEQ ID NO: 1307008 - DNA, 25 bp, Homo sapien
ggccccatccttgatgaccaggaaa

SEQ ID NO: 1307009 - DNA, 25 bp, Homo sapien
ggtaaaagtgatgttgaagcccctc

SEQ ID NO: 1307010 - DNA, 25 bp, Homo sapien
ggctggcagggggaacatcttctta

SEQ ID NO: 1307011 - DNA, 25 bp, Homo sapien
gcagtggaggtcagtaagcatcccc

SEQ ID NO: 1307012 - DNA, 25 bp, Homo sapien
ggtcagtaagcatccccaacattct

SEQ ID NO: 1307013 - DNA, 25 bp, Homo sapien
tggaggtcagtaagcatccccaaca

SEQ ID NO: 1307014 - DNA, 25 bp, Homo sapien
agctgggtttacagcagtaggaaag

SEQ ID NO: 1307015 - DNA, 25 bp, Homo sapien
ctgggtttacagcagtaggaaagga

SEQ ID NO: 1307016 - DNA, 25 bp, Homo sapien
cagctgggtttacagcagtaggaaa

SEQ ID NO: 1307017 - DNA, 25 bp, Homo sapien
gggtttacagcagtaggaaaggaca

SEQ ID NO: 1307018 - DNA, 25 bp, Homo sapien
caggattgtcatgttgcaaagctcc

SEQ ID NO: 1307019 - DNA, 25 bp, Homo sapien
ggattgtcatgttgcaaagctccag

SEQ ID NO: 1307020 - DNA, 25 bp, Homo sapien
attgtcatgttgcaaagctccaggg

SEQ ID NO: 1307021 - DNA, 25 bp, Homo sapien
ccaggattgtcatgttgcaaagctc

SEQ ID NO: 1307022 - DNA, 25 bp, Homo sapien
cacccaaaagattgctcttgtacat

SEQ ID NO: 1307023 - DNA, 25 bp, Homo sapien
tcacccaaaagattgctcttgtaca

SEQ ID NO: 1307024 - DNA, 25 bp, Homo sapien
taagacggtgttgaagagcatcccc

SEQ ID NO: 1307025 - DNA, 25 bp, Homo sapien
ggcaaggccagtttcccacagttac

SEQ ID NO: 1307026 - DNA, 25 bp, Homo sapien
gaaactgtttatatcctggcaaggc

SEQ ID NO: 1307027 - DNA, 25 bp, Homo sapien
ggatcaccgatctctagtgtgcaga

SEQ ID NO: 1307028 - DNA, 25 bp, Homo sapien
tccgaggagtagaataaaccaacca

SEQ ID NO: 1307029 - DNA, 25 bp, Homo sapien
gtcgacattcctgccagaaataagg

SEQ ID NO: 1307030 - DNA, 25 bp, Homo sapien
ccaccagcaacgttccgaggagtag

SEQ ID NO: 1307031 - DNA, 25 bp, Homo sapien
cacttgttctcagtgctacagtcga

SEQ ID NO: 1307032 - DNA, 25 bp, Homo sapien
tagctaggaaacgggcccctgcctc

SEQ ID NO: 1307033 - DNA, 25 bp, Homo sapien
gctaggaaacgggcccctgcctctc

SEQ ID NO: 1307034 - DNA, 25 bp, Homo sapien
gacggggcccctggattagctagga

SEQ ID NO: 1307035 - DNA, 25 bp, Homo sapien
gattagctaggaaacgggcccctgc

SEQ ID NO: 1307036 - DNA, 25 bp, Homo sapien
ggcttcttagccgaccattggttat

SEQ ID NO: 1307037 - DNA, 25 bp, Homo sapien
gcagcctggcttcttagccgaccat

SEQ ID NO: 1307038 - DNA, 25 bp, Homo sapien
acacgcagcctggcttcttagccga

SEQ ID NO: 1307039 - DNA, 25 bp, Homo sapien
cattggttattcttttggcatgtga

SEQ ID NO: 1307040 - DNA, 25 bp, Homo sapien
aggtatgccagggtcaccgcaactg

SEQ ID NO: 1307041 - DNA, 25 bp, Homo sapien
tgtcaccgtggtgaaaccgggagcc

SEQ ID NO: 1307042 - DNA, 25 bp, Homo sapien
cctccggccatatgcaggtatgcca

SEQ ID NO: 1307043 - DNA, 25 bp, Homo sapien
agctcaaaggcgggctggcactcaa

SEQ ID NO: 1307044 - DNA, 25 bp, Homo sapien
actgaacctgaccttgcatctgaac

SEQ ID NO: 1307045 - DNA, 25 bp, Homo sapien
cacagcattagaagtctttggagac

SEQ ID NO: 1307046 - DNA, 25 bp, Homo sapien
gacagatctcaagtacagtccattt

SEQ ID NO: 1307047 - DNA, 25 bp, Homo sapien
tgaactgctaatgtcacgacagatc

SEQ ID NO: 1307048 - DNA, 25 bp, Homo sapien
ctccagatgtccccagacatgctct

SEQ ID NO: 1307049 - DNA, 25 bp, Homo sapien
tgcctccagatgtccccagacatgc

SEQ ID NO: 1307050 - DNA, 25 bp, Homo sapien
ctgcctccagatgtccccagacatg

SEQ ID NO: 1307051 - DNA, 25 bp, Homo sapien
gcctccagatgtccccagacatgct

SEQ ID NO: 1307052 - DNA, 25 bp, Homo sapien
ggggtgtgagggctgtcactgcagg

SEQ ID NO: 1307053 - DNA, 25 bp, Homo sapien
gtgtgagggctgtcactgcaggcat

SEQ ID NO: 1307054 - DNA, 25 bp, Homo sapien
ctgggatgcgagagcctggggtgtg

SEQ ID NO: 1307055 - DNA, 25 bp, Homo sapien
ctggggtgtgagggctgtcactgca

SEQ ID NO: 1307056 - DNA, 25 bp, Homo sapien
tttgatgattggtgctgacaatgag

SEQ ID NO: 1307057 - DNA, 25 bp, Homo sapien
tgacaatgagatccgggaccgatgt

SEQ ID NO: 1307058 - DNA, 25 bp, Homo sapien
gtgctgacaatgagatccgggaccg

SEQ ID NO: 1307059 - DNA, 25 bp, Homo sapien
acatttgatgattggtgctgacaat

SEQ ID NO: 1307060 - DNA, 25 bp, Homo sapien
cattccaggataaggaacaaggctt

SEQ ID NO: 1307061 - DNA, 25 bp, Homo sapien
gagtgtagtcattatctgagggcca

SEQ ID NO: 1307062 - DNA, 25 bp, Homo sapien
tctccagttggaacccaagccattc

SEQ ID NO: 1307063 - DNA, 25 bp, Homo sapien
gacctgtattgcagaaaagaccacc

SEQ ID NO: 1307064 - DNA, 25 bp, Homo sapien
aaactcctcaaaggcgagcttgatc

SEQ ID NO: 1307065 - DNA, 25 bp, Homo sapien
aaatcaaactcctcaaaggcgagct

SEQ ID NO: 1307066 - DNA, 25 bp, Homo sapien
accaccatcaccgaccgtcagggtg

SEQ ID NO: 1307067 - DNA, 25 bp, Homo sapien
cagggtgtcatagcccctctccaaa

SEQ ID NO: 1307068 - DNA, 25 bp, Homo sapien
tgctgccaatagagacctctaagtt

SEQ ID NO: 1307069 - DNA, 25 bp, Homo sapien
ctgccaagtgccgggctttggaggg

SEQ ID NO: 1307070 - DNA, 25 bp, Homo sapien
atggctgctgccaatagagacctct

SEQ ID NO: 1307071 - DNA, 25 bp, Homo sapien
gctgctgccaatagagacctctaag

SEQ ID NO: 1307072 - DNA, 25 bp, Homo sapien
gatggaattacaggaaggatcctcc

SEQ ID NO: 1307073 - DNA, 25 bp, Homo sapien
gatcctcctgcgtaggtgtcaggga

SEQ ID NO: 1307074 - DNA, 25 bp, Homo sapien
gcccaggtagcagaggtcctacaag

SEQ ID NO: 1307075 - DNA, 25 bp, Homo sapien
gtcagggatgcatcataatcattcc

SEQ ID NO: 1307076 - DNA, 25 bp, Homo sapien
gggcagaggccatatctacatcaat

SEQ ID NO: 1307077 - DNA, 25 bp, Homo sapien
ggcagtccttggatacacctgtatc

SEQ ID NO: 1307078 - DNA, 25 bp, Homo sapien
aaaacatactgtgagcttagagact

SEQ ID NO: 1307079 - DNA, 25 bp, Homo sapien
ttacgtgcacactcctcaagggcag

SEQ ID NO: 1307080 - DNA, 25 bp, Homo sapien
ccagttccatgaacagggttaggca

SEQ ID NO: 1307081 - DNA, 25 bp, Homo sapien
ctattcctcagtcttagactttgag

SEQ ID NO: 1307082 - DNA, 25 bp, Homo sapien
ttccacacttagaccctccttgttg

SEQ ID NO: 1307083 - DNA, 25 bp, Homo sapien
taggccagttccatgaacagggtta

SEQ ID NO: 1307084 - DNA, 25 bp, Homo sapien
ccgaggggcctcgaaggtgggcatc

SEQ ID NO: 1307085 - DNA, 25 bp, Homo sapien
gctgtgatgatccacacacagtgtg

SEQ ID NO: 1307086 - DNA, 25 bp, Homo sapien
ttgagtgctgtgatgatccacacac

SEQ ID NO: 1307087 - DNA, 25 bp, Homo sapien
gggttgagtgctgtgatgatccaca

SEQ ID NO: 1307088 - DNA, 25 bp, Homo sapien
aaagccctcagcttcagaatcaatt

SEQ ID NO: 1307089 - DNA, 25 bp, Homo sapien
gacctgtggactcagaactctagcc

SEQ ID NO: 1307090 - DNA, 25 bp, Homo sapien
cctcttccggaaagtcagattttgc

SEQ ID NO: 1307091 - DNA, 25 bp, Homo sapien
gatggtatatttgcagtctgttgaa

SEQ ID NO: 1307092 - DNA, 25 bp, Homo sapien
gatcacatgggccaccattaggctc

SEQ ID NO: 1307093 - DNA, 25 bp, Homo sapien
ctccttcggtcttgtcttctgtcct

SEQ ID NO: 1307094 - DNA, 25 bp, Homo sapien
tcacagttgttttctgaacctccag

SEQ ID NO: 1307095 - DNA, 25 bp, Homo sapien
tgaacctccagtagagttcatcttt

SEQ ID NO: 1307096 - DNA, 25 bp, Homo sapien
tctcctacgtttctgaccgaatttc

SEQ ID NO: 1307097 - DNA, 25 bp, Homo sapien
tggcttttctcctacgtttctgacc

SEQ ID NO: 1307098 - DNA, 25 bp, Homo sapien
cgtttctgaccgaatttcttcttag

SEQ ID NO: 1307099 - DNA, 25 bp, Homo sapien
tggcttcagtgacgctttttggctt

SEQ ID NO: 1307100 - DNA, 25 bp, Homo sapien
ggcctgtggtcgctccaggccgcaa

SEQ ID NO: 1307101 - DNA, 25 bp, Homo sapien
aggtgaactggacgctggatcctaa

SEQ ID NO: 1307102 - DNA, 25 bp, Homo sapien
catacaggtgatccgcttggaccct

SEQ ID NO: 1307103 - DNA, 25 bp, Homo sapien
catgtcgctcactttcatacaggtg

SEQ ID NO: 1307104 - DNA, 25 bp, Homo sapien
tgcccctttcgggtatgccagggtc

SEQ ID NO: 1307105 - DNA, 25 bp, Homo sapien
cctttcgggtatgccagggtctgga

SEQ ID NO: 1307106 - DNA, 25 bp, Homo sapien
gaaatccgagcctagtcttttgccc

SEQ ID NO: 1307107 - DNA, 25 bp, Homo sapien
tgaaatccgagcctagtcttttgcc

SEQ ID NO: 1307108 - DNA, 25 bp, Homo sapien
tggcaaagaaagaatccctgggact

SEQ ID NO: 1307109 - DNA, 25 bp, Homo sapien
ggatttagacacacggcaacagaga

SEQ ID NO: 1307110 - DNA, 25 bp, Homo sapien
gatgaaggatgcacccgcatgtgag

SEQ ID NO: 1307111 - DNA, 25 bp, Homo sapien
ggacataaaccacggaagcggactg

SEQ ID NO: 1307112 - DNA, 25 bp, Homo sapien
tctacccaacgcagggagtcacagg

SEQ ID NO: 1307113 - DNA, 25 bp, Homo sapien
tgggtgggtggtcagaactgatggc

SEQ ID NO: 1307114 - DNA, 25 bp, Homo sapien
ggcaaggtagagagttgggtccact

SEQ ID NO: 1307115 - DNA, 25 bp, Homo sapien
caagggagaagccgcaatgtgctca

SEQ ID NO: 1307116 - DNA, 25 bp, Homo sapien
cctcgagacttcaactcaatttgct

SEQ ID NO: 1307117 - DNA, 25 bp, Homo sapien
atcagcttcacacctcgagacttca

SEQ ID NO: 1307118 - DNA, 25 bp, Homo sapien
tcacacctcgagacttcaactcaat

SEQ ID NO: 1307119 - DNA, 25 bp, Homo sapien
agcttcacacctcgagacttcaact

SEQ ID NO: 1307120 - DNA, 25 bp, Homo sapien
agaggaggtaagaggaaaaacaatg

SEQ ID NO: 1307121 - DNA, 25 bp, Homo sapien
taagaggaaaaacaatgtgagttgt

SEQ ID NO: 1307122 - DNA, 25 bp, Homo sapien
tagagaggaggtaagaggaaaaaca

SEQ ID NO: 1307123 - DNA, 25 bp, Homo sapien
gaggaaaaacaatgtgagttgttgc

SEQ ID NO: 1307124 - DNA, 25 bp, Homo sapien
cccagaaagaatccttctgatttct

SEQ ID NO: 1307125 - DNA, 25 bp, Homo sapien
gttgcattgaggaaaagtctcctgc

SEQ ID NO: 1307126 - DNA, 25 bp, Homo sapien
ggttgcattgaggaaaagtctcctg

SEQ ID NO: 1307127 - DNA, 25 bp, Homo sapien
ttgcattgaggaaaagtctcctgct

SEQ ID NO: 1307128 - DNA, 25 bp, Homo sapien
ggctgagctagtgggagacaaggac

SEQ ID NO: 1307129 - DNA, 25 bp, Homo sapien
tgttaatccagtggaaaccaggaaa

SEQ ID NO: 1307130 - DNA, 25 bp, Homo sapien
ccagatttgatcaggatgttgccaa

SEQ ID NO: 1307131 - DNA, 25 bp, Homo sapien
taccaaacttaagaagcagcctaaa

SEQ ID NO: 1307132 - DNA, 25 bp, Homo sapien
agcctaaacctgtgacaactcctga

SEQ ID NO: 1307133 - DNA, 25 bp, Homo sapien
gctgaagatgctctcagtatgatca

SEQ ID NO: 1307134 - DNA, 25 bp, Homo sapien
aaattgccaatgtccactgaaagtc

SEQ ID NO: 1307135 - DNA, 25 bp, Homo sapien
tgtccactgaaagtctttggtcata

SEQ ID NO: 1307136 - DNA, 25 bp, Homo sapien
tggcatttgggctacagtagtcaaa

SEQ ID NO: 1307137 - DNA, 25 bp, Homo sapien
ttgtgaccaaagatgatgccatgtt

SEQ ID NO: 1307138 - DNA, 25 bp, Homo sapien
tggtattgggcactgaatccgcgct

SEQ ID NO: 1307139 - DNA, 25 bp, Homo sapien
tgaatccgcgctgccggtggttgcc

SEQ ID NO: 1307140 - DNA, 25 bp, Homo sapien
aagtgcagtcgcagccagttcttgc

SEQ ID NO: 1307141 - DNA, 25 bp, Homo sapien
gccatccgatgtgaagtgcagtcgc

SEQ ID NO: 1307142 - DNA, 25 bp, Homo sapien
tgagcattcaggagttcctccactt

SEQ ID NO: 1307143 - DNA, 25 bp, Homo sapien
tccacttcccttgagtgccaaggcc

SEQ ID NO: 1307144 - DNA, 25 bp, Homo sapien
ggtataggtgtatgagcattcagga

SEQ ID NO: 1307145 - DNA, 25 bp, Homo sapien
ccagagctgagtggtataggtgtat

SEQ ID NO: 1307146 - DNA, 25 bp, Homo sapien
tgtaacgctttctcctgcccatcca

SEQ ID NO: 1307147 - DNA, 25 bp, Homo sapien
ctgtaacgctttctcctgcccatcc

SEQ ID NO: 1307148 - DNA, 25 bp, Homo sapien
gtaacgctttctcctgcccatccat

SEQ ID NO: 1307149 - DNA, 25 bp, Homo sapien
tgatcgatcttccatactttgtggg

SEQ ID NO: 1307150 - DNA, 25 bp, Homo sapien
gccctctgcctctgatcgatcttcc

SEQ ID NO: 1307151 - DNA, 25 bp, Homo sapien
tgtggggaattttgatcaaatccct

SEQ ID NO: 1307152 - DNA, 25 bp, Homo sapien
tggggaattttgatcaaatccctgc

SEQ ID NO: 1307153 - DNA, 25 bp, Homo sapien
ttcgcctggctttggcaagcctctg

SEQ ID NO: 1307154 - DNA, 25 bp, Homo sapien
ccattgggctgggtgctgacacttc

SEQ ID NO: 1307155 - DNA, 25 bp, Homo sapien
gcaggctccgtgcttatcttcagat

SEQ ID NO: 1307156 - DNA, 25 bp, Homo sapien
cgtgcttatcttcagatgctggtga

SEQ ID NO: 1307157 - DNA, 25 bp, Homo sapien
taaaccctttgtatggcatgagctg

SEQ ID NO: 1307158 - DNA, 25 bp, Homo sapien
gcccaagtgctcaggttttaaatta

SEQ ID NO: 1307159 - DNA, 25 bp, Homo sapien
aattagacaactttgtcctgacagg

SEQ ID NO: 1307160 - DNA, 25 bp, Homo sapien
gagttccaactcatagcccaagtgc

SEQ ID NO: 1307161 - DNA, 25 bp, Homo sapien
gatgtacatgagatgtgagcaacca

SEQ ID NO: 1307162 - DNA, 25 bp, Homo sapien
ccacatgggctagatgtacatgaga

SEQ ID NO: 1307163 - DNA, 25 bp, Homo sapien
ggctagatgtacatgagatgtgagc

SEQ ID NO: 1307164 - DNA, 25 bp, Homo sapien
gccagcaccacatgggctagatgta

SEQ ID NO: 1307165 - DNA, 25 bp, Homo sapien
ttcccacatcactagaaacatctgg

SEQ ID NO: 1307166 - DNA, 25 bp, Homo sapien
tcccacatcactagaaacatctggg

SEQ ID NO: 1307167 - DNA, 25 bp, Homo sapien
attcccacatcactagaaacatctg

SEQ ID NO: 1307168 - DNA, 25 bp, Homo sapien
ccacatcactagaaacatctgggtc

SEQ ID NO: 1307169 - DNA, 25 bp, Homo sapien
aaatctcaatggttaattgccaagc

SEQ ID NO: 1307170 - DNA, 25 bp, Homo sapien
taattgccaagctagcaggcagcca

SEQ ID NO: 1307171 - DNA, 25 bp, Homo sapien
gtggctgatactggactttgaggca

SEQ ID NO: 1307172 - DNA, 25 bp, Homo sapien
gccctgattttccaaatctcaatgg

SEQ ID NO: 1307173 - DNA, 25 bp, Homo sapien
caacagcccatctgagttgcggttc

SEQ ID NO: 1307174 - DNA, 25 bp, Homo sapien
tgcagtcatgataaccaaacatccc

SEQ ID NO: 1307175 - DNA, 25 bp, Homo sapien
tgaagggatatcgtggagtcattgc

SEQ ID NO: 1307176 - DNA, 25 bp, Homo sapien
gagtcattgccagactccgaagaga

SEQ ID NO: 1307177 - DNA, 25 bp, Homo sapien
gcaacatcattccagaagacaggtc

SEQ ID NO: 1307178 - DNA, 25 bp, Homo sapien
tgcagtagcaggagagacgcaaacc

SEQ ID NO: 1307179 - DNA, 25 bp, Homo sapien
gtcttagcggcaccatcaggcatct

SEQ ID NO: 1307180 - DNA, 25 bp, Homo sapien
gtgagtggaacaaacattcatggcc

SEQ ID NO: 1307181 - DNA, 25 bp, Homo sapien
gagggaggagccttctgtcccagtg

SEQ ID NO: 1307182 - DNA, 25 bp, Homo sapien
cagaaagtcgtaaccatcctccagc

SEQ ID NO: 1307183 - DNA, 25 bp, Homo sapien
tccagctggaagtcaataaacacca

SEQ ID NO: 1307184 - DNA, 25 bp, Homo sapien
tgtgcagtcggcattgttatggtac

SEQ ID NO: 1307185 - DNA, 25 bp, Homo sapien
ctgtatggagcaggcagaagcaaag

SEQ ID NO: 1307186 - DNA, 25 bp, Homo sapien
gtatggagcaggcagaagcaaagat

SEQ ID NO: 1307187 - DNA, 25 bp, Homo sapien
atggagcaggcagaagcaaagatac

SEQ ID NO: 1307188 - DNA, 25 bp, Homo sapien
tatggagcaggcagaagcaaagata

SEQ ID NO: 1307189 - DNA, 25 bp, Homo sapien
ttgggtagctgtggtcgctgttgag

SEQ ID NO: 1307190 - DNA, 25 bp, Homo sapien
gaatcactcaaggtgcacactgcac

SEQ ID NO: 1307191 - DNA, 25 bp, Homo sapien
cctatcgtaaagagtggccttgggt

SEQ ID NO: 1307192 - DNA, 25 bp, Homo sapien
tgcacccggcatagtgtttagtgcc

SEQ ID NO: 1307193 - DNA, 25 bp, Homo sapien
gttgttaaatttgatcaacacaatg

SEQ ID NO: 1307194 - DNA, 25 bp, Homo sapien
aaatatttacggaccactgcccagt

SEQ ID NO: 1307195 - DNA, 25 bp, Homo sapien
tcagcaaatatttacggaccactgc

SEQ ID NO: 1307196 - DNA, 25 bp, Homo sapien
ccagtggatgaggtttacccactcg

SEQ ID NO: 1307197 - DNA, 25 bp, Homo sapien
tccagacagccgttcattcagcaaa

SEQ ID NO: 1307198 - DNA, 25 bp, Homo sapien
atgcagacgccttcgttgatgtttt

SEQ ID NO: 1307199 - DNA, 25 bp, Homo sapien
tgtttgttggcttgtattttgtctt

SEQ ID NO: 1307200 - DNA, 25 bp, Homo sapien
ctacatgcagacgccttcgttgatg

SEQ ID NO: 1307201 - DNA, 25 bp, Homo sapien
acatgcagacgccttcgttgatgtt

SEQ ID NO: 1307202 - DNA, 25 bp, Homo sapien
tcctgaagtccatcatggaaagagg

SEQ ID NO: 1307203 - DNA, 25 bp, Homo sapien
tggtaattcctgaagtccatcatgg

SEQ ID NO: 1307204 - DNA, 25 bp, Homo sapien
ctgtgtaggggccaaggtctcacct

SEQ ID NO: 1307205 - DNA, 25 bp, Homo sapien
aattcctgaagtccatcatggaaag

SEQ ID NO: 1307206 - DNA, 25 bp, Homo sapien
gaaggttgaaccctgctggatgcca

SEQ ID NO: 1307207 - DNA, 25 bp, Homo sapien
ccaaggttgcagctgtagcggacct

SEQ ID NO: 1307208 - DNA, 25 bp, Homo sapien
tgtagcggaccttgtcaccgaggtt

SEQ ID NO: 1307209 - DNA, 25 bp, Homo sapien
gggaagtcccacgtggcgctgttct

SEQ ID NO: 1307210 - DNA, 25 bp, Homo sapien
cagagaaagagacgggtaccccgtg

SEQ ID NO: 1307211 - DNA, 25 bp, Homo sapien
aggcatggcataagagtaggtgctc

SEQ ID NO: 1307212 - DNA, 25 bp, Homo sapien
atggcataagagtaggtgctcatta

SEQ ID NO: 1307213 - DNA, 25 bp, Homo sapien
caagtgatccacctgccttagcctc

SEQ ID NO: 1307214 - DNA, 25 bp, Homo sapien
gggattataggcatgagccaccccg

SEQ ID NO: 1307215 - DNA, 25 bp, Homo sapien
ggtttttaccatgttagctaggctg

SEQ ID NO: 1307216 - DNA, 25 bp, Homo sapien
taggctggtctccaattcctgacct

SEQ ID NO: 1307217 - DNA, 25 bp, Homo sapien
gggaggtttatggccagggctgcca

SEQ ID NO: 1307218 - DNA, 25 bp, Homo sapien
gctttgggaggtttatggccagggc

SEQ ID NO: 1307219 - DNA, 25 bp, Homo sapien
tgggaggtttatggccagggctgcc

SEQ ID NO: 1307220 - DNA, 25 bp, Homo sapien
gaaccaatcctggcaaaggagctca

SEQ ID NO: 1307221 - DNA, 25 bp, Homo sapien
aaccaatcctggcaaaggagctcaa

SEQ ID NO: 1307222 - DNA, 25 bp, Homo sapien
gggtgtacacctagtcagcctgact

SEQ ID NO: 1307223 - DNA, 25 bp, Homo sapien
ctggctacagagtctgctttgaggc

SEQ ID NO: 1307224 - DNA, 25 bp, Homo sapien
ttcctacaggtctccctaactgggc

SEQ ID NO: 1307225 - DNA, 25 bp, Homo sapien
taatgctcataatagcactgaggtg

SEQ ID NO: 1307226 - DNA, 25 bp, Homo sapien
ttatctccgtagtgatccacgtccc

SEQ ID NO: 1307227 - DNA, 25 bp, Homo sapien
tacaccataaaggtatctctattga

SEQ ID NO: 1307228 - DNA, 25 bp, Homo sapien
tcaaatcccagccaaacgtccatga

SEQ ID NO: 1307229 - DNA, 25 bp, Homo sapien
tccatgatggtcacccaacaggtgt

SEQ ID NO: 1307230 - DNA, 25 bp, Homo sapien
ggcagcttgtaagtctttctttgtg

SEQ ID NO: 1307231 - DNA, 25 bp, Homo sapien
catcaagaagtaatccttacagcca

SEQ ID NO: 1307232 - DNA, 25 bp, Homo sapien
aagggcagcttgtaagtctttcttt

SEQ ID NO: 1307233 - DNA, 25 bp, Homo sapien
caagaagtaatccttacagccacga

SEQ ID NO: 1307234 - DNA, 25 bp, Homo sapien
tggatggctgcaggtctccattgcc

SEQ ID NO: 1307235 - DNA, 25 bp, Homo sapien
ctagctcaggatgtggatggctgca

SEQ ID NO: 1307236 - DNA, 25 bp, Homo sapien
tgactttcagagctagctcaggatg

SEQ ID NO: 1307237 - DNA, 25 bp, Homo sapien
tgagtagaatgtgctggtttgactt

SEQ ID NO: 1307238 - DNA, 25 bp, Homo sapien
ctacaactgctgcaagaaccagaaa

SEQ ID NO: 1307239 - DNA, 25 bp, Homo sapien
tacaactgctgcaagaaccagaaac

SEQ ID NO: 1307240 - DNA, 25 bp, Homo sapien
caactgctgcaagaaccagaaacag

SEQ ID NO: 1307241 - DNA, 25 bp, Homo sapien
acaactgctgcaagaaccagaaaca

SEQ ID NO: 1307242 - DNA, 25 bp, Homo sapien
gctggataaaggtcttgagggataa

SEQ ID NO: 1307243 - DNA, 25 bp, Homo sapien
gataaaggtcttgagggataacagg

SEQ ID NO: 1307244 - DNA, 25 bp, Homo sapien
ttagctcctggtcaagtaattcatt

SEQ ID NO: 1307245 - DNA, 25 bp, Homo sapien
ccacttcccaagattagctcctggt

SEQ ID NO: 1307246 - DNA, 25 bp, Homo sapien
tgaggtaccttatacaatgaagccc

SEQ ID NO: 1307247 - DNA, 25 bp, Homo sapien
caggataaactactgcacatgagct

SEQ ID NO: 1307248 - DNA, 25 bp, Homo sapien
gggacagagaagtagatgttaccag

SEQ ID NO: 1307249 - DNA, 25 bp, Homo sapien
caggtcttagccaagagtggcataa

SEQ ID NO: 1307250 - DNA, 25 bp, Homo sapien
tgggtctgaagaacacttccctgca

SEQ ID NO: 1307251 - DNA, 25 bp, Homo sapien
ggacatcacatctccggctcctgtg

SEQ ID NO: 1307252 - DNA, 25 bp, Homo sapien
ctgcttgtggctattaggacatcac

SEQ ID NO: 1307253 - DNA, 25 bp, Homo sapien
ctggttagtaaccagccttgtcagg

SEQ ID NO: 1307254 - DNA, 25 bp, Homo sapien
cttcataggtggcgtggaagccttg

SEQ ID NO: 1307255 - DNA, 25 bp, Homo sapien
gggcactgactgcatagtcgctgat

SEQ ID NO: 1307256 - DNA, 25 bp, Homo sapien
tgcactaacaatggtggctggcagc

SEQ ID NO: 1307257 - DNA, 25 bp, Homo sapien
catagtcgctgatgaggcgcagaga

SEQ ID NO: 1307258 - DNA, 25 bp, Homo sapien
ctatttggtgtttcgaggagcagcc

SEQ ID NO: 1307259 - DNA, 25 bp, Homo sapien
tggcagtatagacaacaggagggag

SEQ ID NO: 1307260 - DNA, 25 bp, Homo sapien
accccaagagccatggctgagtttg

SEQ ID NO: 1307261 - DNA, 25 bp, Homo sapien
gttgctcaccttgcatgtgtatttc

SEQ ID NO: 1307262 - DNA, 25 bp, Homo sapien
cttttgccagtcagagaaccagtga

SEQ ID NO: 1307263 - DNA, 25 bp, Homo sapien
aatcttgggccaagctcagagacat

SEQ ID NO: 1307264 - DNA, 25 bp, Homo sapien
ccaagctcagagacatggctttgct

SEQ ID NO: 1307265 - DNA, 25 bp, Homo sapien
tgcttttgccagtcagagaaccagt

SEQ ID NO: 1307266 - DNA, 25 bp, Homo sapien
tgtcagtgtgacaagtgttgcttac

SEQ ID NO: 1307267 - DNA, 25 bp, Homo sapien
tagggcggctggcaaatcaaaacac

SEQ ID NO: 1307268 - DNA, 25 bp, Homo sapien
tctattagtacattgggttgacccc

SEQ ID NO: 1307269 - DNA, 25 bp, Homo sapien
cagggaaagacggaagaattaggct

SEQ ID NO: 1307270 - DNA, 25 bp, Homo sapien
tcagtgaatggtcagcagattctgc

SEQ ID NO: 1307271 - DNA, 25 bp, Homo sapien
cagtgaatggtcagcagattctgca

SEQ ID NO: 1307272 - DNA, 25 bp, Homo sapien
gcatcctgagggctttgtgcccacc

SEQ ID NO: 1307273 - DNA, 25 bp, Homo sapien
tcctgagggctttgtgcccacctac

SEQ ID NO: 1307274 - DNA, 25 bp, Homo sapien
taagaaggcaaaagatgctgaacat

SEQ ID NO: 1307275 - DNA, 25 bp, Homo sapien
tggagcctctgagaattctaagaag

SEQ ID NO: 1307276 - DNA, 25 bp, Homo sapien
tctgagaattctaagaaggcaaaag

SEQ ID NO: 1307277 - DNA, 25 bp, Homo sapien
agaaggcaaaagatgctgaacatgc

SEQ ID NO: 1307278 - DNA, 25 bp, Homo sapien
tgctctgtaccacaatgcccttcct

SEQ ID NO: 1307279 - DNA, 25 bp, Homo sapien
ctgctctgtaccacaatgcccttcc

SEQ ID NO: 1307280 - DNA, 25 bp, Homo sapien
tctgtaccacaatgcccttcctgtt

SEQ ID NO: 1307281 - DNA, 25 bp, Homo sapien
gctctgtaccacaatgcccttcctg

SEQ ID NO: 1307282 - DNA, 25 bp, Homo sapien
catttaaagacagcgctttgcagtg

SEQ ID NO: 1307283 - DNA, 25 bp, Homo sapien
ctttgcagtgtgctacaggcagcac

SEQ ID NO: 1307284 - DNA, 25 bp, Homo sapien
cgctttgcagtgtgctacaggcagc

SEQ ID NO: 1307285 - DNA, 25 bp, Homo sapien
agcgctttgcagtgtgctacaggca

SEQ ID NO: 1307286 - DNA, 25 bp, Homo sapien
gttaatagcaaagaggctttacctg

SEQ ID NO: 1307287 - DNA, 25 bp, Homo sapien
cagtggagggtcaacctgaattaca

SEQ ID NO: 1307288 - DNA, 25 bp, Homo sapien
ccatcgatatttgcagttaatagca

SEQ ID NO: 1307289 - DNA, 25 bp, Homo sapien
ccaagcccaagtcacacgttgtgaa

SEQ ID NO: 1307290 - DNA, 25 bp, Homo sapien
gctgtttctggcaggcttggcttct

SEQ ID NO: 1307291 - DNA, 25 bp, Homo sapien
ggctttttatagcaccacacatctg

SEQ ID NO: 1307292 - DNA, 25 bp, Homo sapien
tactacttggctttttatagcacca

SEQ ID NO: 1307293 - DNA, 25 bp, Homo sapien
gggcaatttgcatattactacttgg

SEQ ID NO: 1307294 - DNA, 25 bp, Homo sapien
catggctgcgattggctccttggat

SEQ ID NO: 1307295 - DNA, 25 bp, Homo sapien
ggctgcgattggctccttggatttc

SEQ ID NO: 1307296 - DNA, 25 bp, Homo sapien
atggctgcgattggctccttggatt

SEQ ID NO: 1307297 - DNA, 25 bp, Homo sapien
ccatggctgcgattggctccttgga

SEQ ID NO: 1307298 - DNA, 25 bp, Homo sapien
acttacaatatgtgatgcaagaacc

SEQ ID NO: 1307299 - DNA, 25 bp, Homo sapien
tatgtgatgcaagaaccactctcca

SEQ ID NO: 1307300 - DNA, 25 bp, Homo sapien
cccacttacaatatgtgatgcaaga

SEQ ID NO: 1307301 - DNA, 25 bp, Homo sapien
caatatgtgatgcaagaaccactct

SEQ ID NO: 1307302 - DNA, 25 bp, Homo sapien
ccactgtgcagatggcatgtctgta

SEQ ID NO: 1307303 - DNA, 25 bp, Homo sapien
aatgactgacagagagctacagccc

SEQ ID NO: 1307304 - DNA, 25 bp, Homo sapien
cagagaggtgcttccctagaagccc

SEQ ID NO: 1307305 - DNA, 25 bp, Homo sapien
gaggcacatccccaggtaaagaatg

SEQ ID NO: 1307306 - DNA, 25 bp, Homo sapien
caaggcttcttgcagaactagaaag

SEQ ID NO: 1307307 - DNA, 25 bp, Homo sapien
aattcctcttataactgaaatccag

SEQ ID NO: 1307308 - DNA, 25 bp, Homo sapien
tctctggatggtgaggaattcctct

SEQ ID NO: 1307309 - DNA, 25 bp, Homo sapien
gaaaatatccactactgcaaggctt

SEQ ID NO: 1307310 - DNA, 25 bp, Homo sapien
aagatttgccttgtctttgatatgt

SEQ ID NO: 1307311 - DNA, 25 bp, Homo sapien
agatttgccttgtctttgatatgta

SEQ ID NO: 1307312 - DNA, 25 bp, Homo sapien
gatttgccttgtctttgatatgtag

SEQ ID NO: 1307313 - DNA, 25 bp, Homo sapien
atttgccttgtctttgatatgtagc

SEQ ID NO: 1307314 - DNA, 25 bp, Homo sapien
taaacttcgtgaaaacatctgctcc

SEQ ID NO: 1307315 - DNA, 25 bp, Homo sapien
tgatgatgcgagagactgaactggc

SEQ ID NO: 1307316 - DNA, 25 bp, Homo sapien
gaggagctagccactataaacttcg

SEQ ID NO: 1307317 - DNA, 25 bp, Homo sapien
tgaactggcacagtgaaagactgcc

SEQ ID NO: 1307318 - DNA, 25 bp, Homo sapien
tggcaccctgggatgtggttgcttg

SEQ ID NO: 1307319 - DNA, 25 bp, Homo sapien
tgtgagatgctttcaaggagatggc

SEQ ID NO: 1307320 - DNA, 25 bp, Homo sapien
aatttaatttgaagcagccagacgc

SEQ ID NO: 1307321 - DNA, 25 bp, Homo sapien
tgtgaatagctccagatgaaatgtg

SEQ ID NO: 1307322 - DNA, 25 bp, Homo sapien
ttggccacagatgaagtgtcatcac

SEQ ID NO: 1307323 - DNA, 25 bp, Homo sapien
ttcccagtctaaaatgtctgatgag

SEQ ID NO: 1307324 - DNA, 25 bp, Homo sapien
aggcactagaactctctggaaaggt

SEQ ID NO: 1307325 - DNA, 25 bp, Homo sapien
cactagaactctctggaaaggtctg

SEQ ID NO: 1307326 - DNA, 25 bp, Homo sapien
tggttggccaggaatgctgtgccgt

SEQ ID NO: 1307327 - DNA, 25 bp, Homo sapien
tgctagaacacaggccagaccagtc

SEQ ID NO: 1307328 - DNA, 25 bp, Homo sapien
accacttctccaggtcatggaaact

SEQ ID NO: 1307329 - DNA, 25 bp, Homo sapien
gggacacatctgattcttctgcatc

SEQ ID NO: 1307330 - DNA, 25 bp, Homo sapien
acctggacaaggcttgtgacagacc

SEQ ID NO: 1307331 - DNA, 25 bp, Homo sapien
tagaagcaattagcacctccggctc

SEQ ID NO: 1307332 - DNA, 25 bp, Homo sapien
agtgcatcatgtcattagaagcaat

SEQ ID NO: 1307333 - DNA, 25 bp, Homo sapien
caaggcttgtgacagaccctggctg

SEQ ID NO: 1307334 - DNA, 25 bp, Homo sapien
ccctcctgtaagctcttccccttgg

SEQ ID NO: 1307335 - DNA, 25 bp, Homo sapien
tcttccccttgggagtcagctcagg

SEQ ID NO: 1307336 - DNA, 25 bp, Homo sapien
gaagccatcttactctctccatggg

SEQ ID NO: 1307337 - DNA, 25 bp, Homo sapien
cagagtctacatccacaaccaaggc

SEQ ID NO: 1307338 - DNA, 25 bp, Homo sapien
aacacccatatctgttggttccaac

SEQ ID NO: 1307339 - DNA, 25 bp, Homo sapien
gccttcaacacccatatctgttggt

SEQ ID NO: 1307340 - DNA, 25 bp, Homo sapien
cactatcagccttcaacacccatat

SEQ ID NO: 1307341 - DNA, 25 bp, Homo sapien
tatcagccttcaacacccatatctg

SEQ ID NO: 1307342 - DNA, 25 bp, Homo sapien
aagatcttcctcctagtgagcttgg

SEQ ID NO: 1307343 - DNA, 25 bp, Homo sapien
cataaacttttcactcgagaaagat

SEQ ID NO: 1307344 - DNA, 25 bp, Homo sapien
acttttcactcgagaaagatcttcc

SEQ ID NO: 1307345 - DNA, 25 bp, Homo sapien
gagcttggctcatagcccagctgtt

SEQ ID NO: 1307346 - DNA, 25 bp, Homo sapien
tccacgtgcagttggcgtaattggg

SEQ ID NO: 1307347 - DNA, 25 bp, Homo sapien
tgtcccattgggaccgtgcagttgg

SEQ ID NO: 1307348 - DNA, 25 bp, Homo sapien
gctcttccgcggtgatggtccacgt

SEQ ID NO: 1307349 - DNA, 25 bp, Homo sapien
ggtggaccatcaaacaccgacagga

SEQ ID NO: 1307350 - DNA, 25 bp, Homo sapien
caggagattctgattaagaatctgg

SEQ ID NO: 1307351 - DNA, 25 bp, Homo sapien
gattctgattaagaatctgggtgtg

SEQ ID NO: 1307352 - DNA, 25 bp, Homo sapien
ggacaggagattctgattaagaatc

SEQ ID NO: 1307353 - DNA, 25 bp, Homo sapien
atctgggtgtgaatggcatcttctg

SEQ ID NO: 1307354 - DNA, 25 bp, Homo sapien
catctcccatgtaaggggacagaaa

SEQ ID NO: 1307355 - DNA, 25 bp, Homo sapien
cagggaacaggtagaatagtcggag

SEQ ID NO: 1307356 - DNA, 25 bp, Homo sapien
catgtgggagaggttgactcaatgt

SEQ ID NO: 1307357 - DNA, 25 bp, Homo sapien
gttgactcaatgtggtgaacagcac

SEQ ID NO: 1307358 - DNA, 25 bp, Homo sapien
ttctctctcatgcaaaccacacaga

SEQ ID NO: 1307359 - DNA, 25 bp, Homo sapien
ctctctcatgcaaaccacacagaca

SEQ ID NO: 1307360 - DNA, 25 bp, Homo sapien
tcttctctctcatgcaaaccacaca

SEQ ID NO: 1307361 - DNA, 25 bp, Homo sapien
cttcttctctctcatgcaaaccaca

SEQ ID NO: 1307362 - DNA, 25 bp, Homo sapien
ttttgacggcaccttgcatttctct

SEQ ID NO: 1307363 - DNA, 25 bp, Homo sapien
cattttgacggcaccttgcatttct

SEQ ID NO: 1307364 - DNA, 25 bp, Homo sapien
tgccttctttcacccatgctttgag

SEQ ID NO: 1307365 - DNA, 25 bp, Homo sapien
ctccattttgacggcaccttgcatt

SEQ ID NO: 1307366 - DNA, 25 bp, Homo sapien
ttgttccttcactcggctaactcca

SEQ ID NO: 1307367 - DNA, 25 bp, Homo sapien
gtgcttggattgttccttcactcgg

SEQ ID NO: 1307368 - DNA, 25 bp, Homo sapien
ggattgttccttcactcggctaact

SEQ ID NO: 1307369 - DNA, 25 bp, Homo sapien
cttggattgttccttcactcggcta

SEQ ID NO: 1307370 - DNA, 25 bp, Homo sapien
tggctctctacaatgatcctttagg

SEQ ID NO: 1307371 - DNA, 25 bp, Homo sapien
gggcaccttgtccgctgatgagaga

SEQ ID NO: 1307372 - DNA, 25 bp, Homo sapien
aactaggtcattagggatgctggca

SEQ ID NO: 1307373 - DNA, 25 bp, Homo sapien
catcactatgcatgccttctggcag

SEQ ID NO: 1307374 - DNA, 25 bp, Homo sapien
gttttatctggtggaactggcctca

SEQ ID NO: 1307375 - DNA, 25 bp, Homo sapien
aagccctgtgcccttatgtgagaca

SEQ ID NO: 1307376 - DNA, 25 bp, Homo sapien
tatggaatgaggttctcaagaccac

SEQ ID NO: 1307377 - DNA, 25 bp, Homo sapien
caaaaccctaacatagtgccatgga

SEQ ID NO: 1307378 - DNA, 25 bp, Homo sapien
gtgggcatactatgctttgtcacca

SEQ ID NO: 1307379 - DNA, 25 bp, Homo sapien
cttcttctcctgtgggcatactatg

SEQ ID NO: 1307380 - DNA, 25 bp, Homo sapien
atgctttgtcaccatgccagagact

SEQ ID NO: 1307381 - DNA, 25 bp, Homo sapien
tctcctgtgggcatactatgctttg

SEQ ID NO: 1307382 - DNA, 25 bp, Homo sapien
taaaagacagtctgacccttccctg

SEQ ID NO: 1307383 - DNA, 25 bp, Homo sapien
aaggattcaagccaattcaatggat

SEQ ID NO: 1307384 - DNA, 25 bp, Homo sapien
attcaatggatttttactagggcct

SEQ ID NO: 1307385 - DNA, 25 bp, Homo sapien
catggggatatagaaagaaaaggat

SEQ ID NO: 1307386 - DNA, 25 bp, Homo sapien
aaggaagaaaataggctgagcacag

SEQ ID NO: 1307387 - DNA, 25 bp, Homo sapien
actaaaggaagaaaataggctgagc

SEQ ID NO: 1307388 - DNA, 25 bp, Homo sapien
gcaacatggctcaactaaaggaaga

SEQ ID NO: 1307389 - DNA, 25 bp, Homo sapien
aggcaacatggctcaactaaaggaa

SEQ ID NO: 1307390 - DNA, 25 bp, Homo sapien
cctctcctccaggcaccgaggtccg

SEQ ID NO: 1307391 - DNA, 25 bp, Homo sapien
ctcctccaggcaccgaggtccggga

SEQ ID NO: 1307392 - DNA, 25 bp, Homo sapien
tcctccaggcaccgaggtccgggat

SEQ ID NO: 1307393 - DNA, 25 bp, Homo sapien
tctcctccaggcaccgaggtccggg

SEQ ID NO: 1307394 - DNA, 25 bp, Homo sapien
tcctggtgcacacttgcacactttc

SEQ ID NO: 1307395 - DNA, 25 bp, Homo sapien
ctgggtcagatgatccaggtgacac

SEQ ID NO: 1307396 - DNA, 25 bp, Homo sapien
ggtcagatgatccaggtgacaccct

SEQ ID NO: 1307397 - DNA, 25 bp, Homo sapien
ctggtgcacacttgcacactttcat

SEQ ID NO: 1307398 - DNA, 25 bp, Homo sapien
cacttcttcagctccaaagaaaatc

SEQ ID NO: 1307399 - DNA, 25 bp, Homo sapien
tcttcagctccaaagaaaatccaac

SEQ ID NO: 1307400 - DNA, 25 bp, Homo sapien
cttcttcagctccaaagaaaatcca

SEQ ID NO: 1307401 - DNA, 25 bp, Homo sapien
tcacttcttcagctccaaagaaaat

SEQ ID NO: 1307402 - DNA, 25 bp, Homo sapien
tccaactcttggagcccgttttcaa

SEQ ID NO: 1307403 - DNA, 25 bp, Homo sapien
ctgctcagccctgcgctcaatgcct

SEQ ID NO: 1307404 - DNA, 25 bp, Homo sapien
tctctgatgactcctgactatagca

SEQ ID NO: 1307405 - DNA, 25 bp, Homo sapien
ccacagcttgcttcctggtttaaag

SEQ ID NO: 1307406 - DNA, 25 bp, Homo sapien
aagtggagatcaggttgaagccaca

SEQ ID NO: 1307407 - DNA, 25 bp, Homo sapien
gaagtggagatcaggttgaagccac

SEQ ID NO: 1307408 - DNA, 25 bp, Homo sapien
aggaagtggagatcaggttgaagcc

SEQ ID NO: 1307409 - DNA, 25 bp, Homo sapien
ggaagtggagatcaggttgaagcca

SEQ ID NO: 1307410 - DNA, 25 bp, Homo sapien
gggacagctaaccttatagacaatt

SEQ ID NO: 1307411 - DNA, 25 bp, Homo sapien
gctaaccttatagacaattcctaaa

SEQ ID NO: 1307412 - DNA, 25 bp, Homo sapien
cccaagtatgggacagctaacctta

SEQ ID NO: 1307413 - DNA, 25 bp, Homo sapien
tatgggacagctaaccttatagaca

SEQ ID NO: 1307414 - DNA, 25 bp, Homo sapien
tgatgaggtgactcacacacttgac

SEQ ID NO: 1307415 - DNA, 25 bp, Homo sapien
caagcagcttgcatgtcccttcact

SEQ ID NO: 1307416 - DNA, 25 bp, Homo sapien
ccttcactgatgaggtgactcacac

SEQ ID NO: 1307417 - DNA, 25 bp, Homo sapien
ttgcatgtcccttcactgatgaggt

SEQ ID NO: 1307418 - DNA, 25 bp, Homo sapien
aggactcgcctctggaacagactcg

SEQ ID NO: 1307419 - DNA, 25 bp, Homo sapien
aacagactcgggatggatgtcaggc

SEQ ID NO: 1307420 - DNA, 25 bp, Homo sapien
ggcagaatatcatggccccagcaca

SEQ ID NO: 1307421 - DNA, 25 bp, Homo sapien
gatgtcaggcagaatatcatggccc

SEQ ID NO: 1307422 - DNA, 25 bp, Homo sapien
ccacagagataagcgggccagatga

SEQ ID NO: 1307423 - DNA, 25 bp, Homo sapien
taccttggaggaagagtgacttgtc

SEQ ID NO: 1307424 - DNA, 25 bp, Homo sapien
tatctacagctgagtccaaggtggg

SEQ ID NO: 1307425 - DNA, 25 bp, Homo sapien
tgctccagaggaccaagtaccagtg

SEQ ID NO: 1307426 - DNA, 25 bp, Homo sapien
aatatttagttctaacagtggcttt

SEQ ID NO: 1307427 - DNA, 25 bp, Homo sapien
ggcagacacagagcaactatctcat

SEQ ID NO: 1307428 - DNA, 25 bp, Homo sapien
tgccgtaatttggtgcagcaacaga

SEQ ID NO: 1307429 - DNA, 25 bp, Homo sapien
tatctcattgctccgcatcaaaaac

SEQ ID NO: 1307430 - DNA, 25 bp, Homo sapien
caggcccgaagaaaacggcatttca

SEQ ID NO: 1307431 - DNA, 25 bp, Homo sapien
gaagaagttgaggataagactcccc

SEQ ID NO: 1307432 - DNA, 25 bp, Homo sapien
gagtattaaatccagaataatggga

SEQ ID NO: 1307433 - DNA, 25 bp, Homo sapien
taatgggaattagtacacggaagaa

SEQ ID NO: 1307434 - DNA, 25 bp, Homo sapien
cccacccaatcactgaactctctcc

SEQ ID NO: 1307435 - DNA, 25 bp, Homo sapien
accaagtcccacccaatcactgaac

SEQ ID NO: 1307436 - DNA, 25 bp, Homo sapien
gtcccacccaatcactgaactctct

SEQ ID NO: 1307437 - DNA, 25 bp, Homo sapien
aagtcccacccaatcactgaactct

SEQ ID NO: 1307438 - DNA, 25 bp, Homo sapien
cattcgatgaggtatggcactggac

SEQ ID NO: 1307439 - DNA, 25 bp, Homo sapien
tccaagtgcttaagacagtgccggt

SEQ ID NO: 1307440 - DNA, 25 bp, Homo sapien
ggttcccttaatcctgctggcgtga

SEQ ID NO: 1307441 - DNA, 25 bp, Homo sapien
tctgcggagcaatcaggttccctta

SEQ ID NO: 1307442 - DNA, 25 bp, Homo sapien
cccggtacgcgggagccctgagctt

SEQ ID NO: 1307443 - DNA, 25 bp, Homo sapien
ccctgagcttctgcggctggaatga

SEQ ID NO: 1307444 - DNA, 25 bp, Homo sapien
gcacaagcgccgaaatcccggtttc

SEQ ID NO: 1307445 - DNA, 25 bp, Homo sapien
gcagcgccgagggagaggctccgct

SEQ ID NO: 1307446 - DNA, 25 bp, Homo sapien
tttgaacttgccatctagggccggg

SEQ ID NO: 1307447 - DNA, 25 bp, Homo sapien
gggccgggggcgatgcttatgagcc

SEQ ID NO: 1307448 - DNA, 25 bp, Homo sapien
cgggggcgatgcttatgagcctcat

SEQ ID NO: 1307449 - DNA, 25 bp, Homo sapien
gtggtggctttgaacttgccatcta

SEQ ID NO: 1307450 - DNA, 25 bp, Homo sapien
gtctttgcctcaggactcatcagga

SEQ ID NO: 1307451 - DNA, 25 bp, Homo sapien
caataggaagcctctaagactgtag

SEQ ID NO: 1307452 - DNA, 25 bp, Homo sapien
taaatgcagtgactactcccctggg

SEQ ID NO: 1307453 - DNA, 25 bp, Homo sapien
tcaggacccagcaactaaaggtttc

SEQ ID NO: 1307454 - DNA, 25 bp, Homo sapien
gactgcaaagcctaagccacagcag

SEQ ID NO: 1307455 - DNA, 25 bp, Homo sapien
cttcagcgctcccatgatagaaggc

SEQ ID NO: 1307456 - DNA, 25 bp, Homo sapien
cgttttggagactcatcatgccctc

SEQ ID NO: 1307457 - DNA, 25 bp, Homo sapien
ttccagaatgcttggtgtgggccac

SEQ ID NO: 1307458 - DNA, 25 bp, Homo sapien
accagcaagtgtgcagcggaggacc

SEQ ID NO: 1307459 - DNA, 25 bp, Homo sapien
gagaccatcaggtgctatcagacag

SEQ ID NO: 1307460 - DNA, 25 bp, Homo sapien
caacgaggagcctaaaagccaggag

SEQ ID NO: 1307461 - DNA, 25 bp, Homo sapien
tatcagacaggtgcagaccagcaag

SEQ ID NO: 1307462 - DNA, 25 bp, Homo sapien
tactgtctagatcatgccggtggcc

SEQ ID NO: 1307463 - DNA, 25 bp, Homo sapien
cctggccctctagcgtacatactgt

SEQ ID NO: 1307464 - DNA, 25 bp, Homo sapien
taactctcgtccacacagattgctc

SEQ ID NO: 1307465 - DNA, 25 bp, Homo sapien
gccgttgatctgatcagaagttctc

SEQ ID NO: 1307466 - DNA, 25 bp, Homo sapien
gaagcagcggtggattctccataag

SEQ ID NO: 1307467 - DNA, 25 bp, Homo sapien
tcttgtttcaggtcacgcagtgagc

SEQ ID NO: 1307468 - DNA, 25 bp, Homo sapien
gttcctcataacacagcccgcagtg

SEQ ID NO: 1307469 - DNA, 25 bp, Homo sapien
tcagagtgacacatggccttccaga

SEQ ID NO: 1307470 - DNA, 25 bp, Homo sapien
tcaggctggtggccgtattaggcca

SEQ ID NO: 1307471 - DNA, 25 bp, Homo sapien
tggtggccgtattaggccaatcaaa

SEQ ID NO: 1307472 - DNA, 25 bp, Homo sapien
gctggtggccgtattaggccaatca

SEQ ID NO: 1307473 - DNA, 25 bp, Homo sapien
gtggccgtattaggccaatcaaaag

SEQ ID NO: 1307474 - DNA, 25 bp, Homo sapien
tcgtagatgtgaacaatgagagcta

SEQ ID NO: 1307475 - DNA, 25 bp, Homo sapien
tatcaccatcgtagatgtgaacaat

SEQ ID NO: 1307476 - DNA, 25 bp, Homo sapien
tgagagctaacatgaacacatcatt

SEQ ID NO: 1307477 - DNA, 25 bp, Homo sapien
catcattagggaatgctccagaggg

SEQ ID NO: 1307478 - DNA, 25 bp, Homo sapien
gaagtatcttgcacccgatttgctg

SEQ ID NO: 1307479 - DNA, 25 bp, Homo sapien
aggtggctgatcagggaagtatctt

SEQ ID NO: 1307480 - DNA, 25 bp, Homo sapien
ctctccctcccatacttttcctcca

SEQ ID NO: 1307481 - DNA, 25 bp, Homo sapien
tgatcagggaagtatcttgcacccg

SEQ ID NO: 1307482 - DNA, 25 bp, Homo sapien
tttccagatgtctgatgttgggcaa

SEQ ID NO: 1307483 - DNA, 25 bp, Homo sapien
tgggcaagagatgcatgctgctgac

SEQ ID NO: 1307484 - DNA, 25 bp, Homo sapien
ttttaccttccaccaatgtgtttga

SEQ ID NO: 1307485 - DNA, 25 bp, Homo sapien
tattcagactttccagatgtctgat

SEQ ID NO: 1307486 - DNA, 25 bp, Homo sapien
gactgcgaagctacacatgatgtct

SEQ ID NO: 1307487 - DNA, 25 bp, Homo sapien
tgcttgggatacaaagtgctgactg

SEQ ID NO: 1307488 - DNA, 25 bp, Homo sapien
gatgtctgaaacttccaggacagaa

SEQ ID NO: 1307489 - DNA, 25 bp, Homo sapien
ccattagcacggttatttgtggcaa

SEQ ID NO: 1307490 - DNA, 25 bp, Homo sapien
tcattctcccttctgctcatcactc

SEQ ID NO: 1307491 - DNA, 25 bp, Homo sapien
cttctctcttctcactaatcatcac

SEQ ID NO: 1307492 - DNA, 25 bp, Homo sapien
cattctcccttctgctcatcactct

SEQ ID NO: 1307493 - DNA, 25 bp, Homo sapien
ttccttctctcttctcactaatcat

SEQ ID NO: 1307494 - DNA, 25 bp, Homo sapien
tgctaaatataggccctgaatttgc

SEQ ID NO: 1307495 - DNA, 25 bp, Homo sapien
attactgctaaatataggccctgaa

SEQ ID NO: 1307496 - DNA, 25 bp, Homo sapien
ctgctaaatataggccctgaatttg

SEQ ID NO: 1307497 - DNA, 25 bp, Homo sapien
tactgctaaatataggccctgaatt

SEQ ID NO: 1307498 - DNA, 25 bp, Homo sapien
gagacaggcttttggacctcttggg

SEQ ID NO: 1307499 - DNA, 25 bp, Homo sapien
gactaaacgtggatgagactcaggc

SEQ ID NO: 1307500 - DNA, 25 bp, Homo sapien
aaaaaatctcagttggcaggacccg

SEQ ID NO: 1307501 - DNA, 25 bp, Homo sapien
gactcaggcttaaagcctgtgacat

SEQ ID NO: 1307502 - DNA, 25 bp, Homo sapien
tctctggcgctggaggtagttcatg

SEQ ID NO: 1307503 - DNA, 25 bp, Homo sapien
tggtaggccatggagagttgatgca

SEQ ID NO: 1307504 - DNA, 25 bp, Homo sapien
ggaccctgataggtggctgaggaga

SEQ ID NO: 1307505 - DNA, 25 bp, Homo sapien
tagttcatggggtatacaggaccct

SEQ ID NO: 1307506 - DNA, 25 bp, Homo sapien
tccctgaatctgatcttctatggtg

SEQ ID NO: 1307507 - DNA, 25 bp, Homo sapien
ttccctgaatctgatcttctatggt

SEQ ID NO: 1307508 - DNA, 25 bp, Homo sapien
agtgcagatgtttctgggaattgag

SEQ ID NO: 1307509 - DNA, 25 bp, Homo sapien
caagtcatcagtgcagatgtttctg

SEQ ID NO: 1307510 - DNA, 25 bp, Homo sapien
tgtttctgggaattgaggggtgtag

SEQ ID NO: 1307511 - DNA, 25 bp, Homo sapien
ttgaggggtgtagggggagccagca

SEQ ID NO: 1307512 - DNA, 25 bp, Homo sapien
caggggacccccatcttcaaagagt

SEQ ID NO: 1307513 - DNA, 25 bp, Homo sapien
ccccatcttcaaagagtgcctcagt

SEQ ID NO: 1307514 - DNA, 25 bp, Homo sapien
catcttcaaagagtgcctcagtgct

SEQ ID NO: 1307515 - DNA, 25 bp, Homo sapien
gggacccccatcttcaaagagtgcc

SEQ ID NO: 1307516 - DNA, 25 bp, Homo sapien
catacagttgtctccctactacttg

SEQ ID NO: 1307517 - DNA, 25 bp, Homo sapien
atacagttgtctccctactacttgg

SEQ ID NO: 1307518 - DNA, 25 bp, Homo sapien
acagttgtctccctactacttggtt

SEQ ID NO: 1307519 - DNA, 25 bp, Homo sapien
cagttgtctccctactacttggttt

SEQ ID NO: 1307520 - DNA, 25 bp, Homo sapien
tcaaatccagcatctcagggtgtct

SEQ ID NO: 1307521 - DNA, 25 bp, Homo sapien
tgtttctgctgcatagacacgcata

SEQ ID NO: 1307522 - DNA, 25 bp, Homo sapien
gaaagtgtcagtagcactgaaggtg

SEQ ID NO: 1307523 - DNA, 25 bp, Homo sapien
gaaggtgccactgaggaaatagcac

SEQ ID NO: 1307524 - DNA, 25 bp, Homo sapien
caccactgccaagatgccagtacat

SEQ ID NO: 1307525 - DNA, 25 bp, Homo sapien
ctgaggggtcaaggccaccaccact

SEQ ID NO: 1307526 - DNA, 25 bp, Homo sapien
ccaccaccactgccaagatgccagt

SEQ ID NO: 1307527 - DNA, 25 bp, Homo sapien
caccaccactgccaagatgccagta

SEQ ID NO: 1307528 - DNA, 25 bp, Homo sapien
cattaaatggtcgagtgattctgct

SEQ ID NO: 1307529 - DNA, 25 bp, Homo sapien
tattcattaaatggtcgagtgattc

SEQ ID NO: 1307530 - DNA, 25 bp, Homo sapien
atttcaccaccaatctctccattta

SEQ ID NO: 1307531 - DNA, 25 bp, Homo sapien
tggtcgagtgattctgctctttgtg

SEQ ID NO: 1307532 - DNA, 25 bp, Homo sapien
gtaaaaagaggccgtcctgacgcat

SEQ ID NO: 1307533 - DNA, 25 bp, Homo sapien
gattcaaggtagaacacctcgggtg

SEQ ID NO: 1307534 - DNA, 25 bp, Homo sapien
agctcacgctgagtaaaaagaggcc

SEQ ID NO: 1307535 - DNA, 25 bp, Homo sapien
cacctcgggtgagtaacaaagctca

SEQ ID NO: 1307536 - DNA, 25 bp, Homo sapien
atgggtcgtccatggatttctttag

SEQ ID NO: 1307537 - DNA, 25 bp, Homo sapien
gggatgggtcgtccatggatttctt

SEQ ID NO: 1307538 - DNA, 25 bp, Homo sapien
agctgctgggatgggtcgtccatgg

SEQ ID NO: 1307539 - DNA, 25 bp, Homo sapien
ctgggatgggtcgtccatggatttc

SEQ ID NO: 1307540 - DNA, 25 bp, Homo sapien
tctgagctccaagaataatgtgggg

SEQ ID NO: 1307541 - DNA, 25 bp, Homo sapien
cacatgtgtagaatctctgagctcc

SEQ ID NO: 1307542 - DNA, 25 bp, Homo sapien
tggggaagatggtacagagcttggc

SEQ ID NO: 1307543 - DNA, 25 bp, Homo sapien
ttctttgccgtctgtgtctgctcat

SEQ ID NO: 1307544 - DNA, 25 bp, Homo sapien
ttacaagtcgtcatttgcacggagc

SEQ ID NO: 1307545 - DNA, 25 bp, Homo sapien
ccatacgggaagaatgtggccgcgc

SEQ ID NO: 1307546 - DNA, 25 bp, Homo sapien
tgcacggagctctgcgagaaaggat

SEQ ID NO: 1307547 - DNA, 25 bp, Homo sapien
caggaatgggcctgcacagagtgct

SEQ ID NO: 1307548 - DNA, 25 bp, Homo sapien
tgatgtgtgccctggcatataaaac

SEQ ID NO: 1307549 - DNA, 25 bp, Homo sapien
ctgcaccatcctgatgtgtgccctg

SEQ ID NO: 1307550 - DNA, 25 bp, Homo sapien
ggcttgctaaattgggttccctgca

SEQ ID NO: 1307551 - DNA, 25 bp, Homo sapien
ccacatcagataaaacaggcttgct

SEQ ID NO: 1307552 - DNA, 25 bp, Homo sapien
cattgagcagaatgtgtgggccacc

SEQ ID NO: 1307553 - DNA, 25 bp, Homo sapien
gagcaagatgggcatttctccagca

SEQ ID NO: 1307554 - DNA, 25 bp, Homo sapien
caaggtcatgatgggtccagtatca

SEQ ID NO: 1307555 - DNA, 25 bp, Homo sapien
tctccagcagatagaagggatgagc

SEQ ID NO: 1307556 - DNA, 25 bp, Homo sapien
cattcccaaattgctgaatggccga

SEQ ID NO: 1307557 - DNA, 25 bp, Homo sapien
cccaaattgctgaatggccgagcaa

SEQ ID NO: 1307558 - DNA, 25 bp, Homo sapien
caaattgctgaatggccgagcaaac

SEQ ID NO: 1307559 - DNA, 25 bp, Homo sapien
ttcccaaattgctgaatggccgagc

SEQ ID NO: 1307560 - DNA, 25 bp, Homo sapien
cggaccacctcaatcagatgtgaac

SEQ ID NO: 1307561 - DNA, 25 bp, Homo sapien
cttcacacatctttcacggaccacc

SEQ ID NO: 1307562 - DNA, 25 bp, Homo sapien
atctttcacggaccacctcaatcag

SEQ ID NO: 1307563 - DNA, 25 bp, Homo sapien
tttcacggaccacctcaatcagatg

SEQ ID NO: 1307564 - DNA, 25 bp, Homo sapien
caaagcagcagatctctctgacagc

SEQ ID NO: 1307565 - DNA, 25 bp, Homo sapien
gcaaagcagcagatctctctgacag

SEQ ID NO: 1307566 - DNA, 25 bp, Homo sapien
agcaaagcagcagatctctctgaca

SEQ ID NO: 1307567 - DNA, 25 bp, Homo sapien
gagcaaagcagcagatctctctgac

SEQ ID NO: 1307568 - DNA, 25 bp, Homo sapien
tgagcagtctatacgacgagcctct

SEQ ID NO: 1307569 - DNA, 25 bp, Homo sapien
tctatacgacgagcctctgttttgg

SEQ ID NO: 1307570 - DNA, 25 bp, Homo sapien
cagttgagcagtctatacgacgagc

SEQ ID NO: 1307571 - DNA, 25 bp, Homo sapien
gcagtctatacgacgagcctctgtt

SEQ ID NO: 1307572 - DNA, 25 bp, Homo sapien
gcagcactgggagcctttgtaattt

SEQ ID NO: 1307573 - DNA, 25 bp, Homo sapien
ttagttgaaagacattcccacaggc

SEQ ID NO: 1307574 - DNA, 25 bp, Homo sapien
tggagcaccctcagaaataaccgga

SEQ ID NO: 1307575 - DNA, 25 bp, Homo sapien
cagtaggacaacgtgagcaggcagt

SEQ ID NO: 1307576 - DNA, 25 bp, Homo sapien
ccttccccactagcacctcatcaat

SEQ ID NO: 1307577 - DNA, 25 bp, Homo sapien
tcttagatatctccttccccactag

SEQ ID NO: 1307578 - DNA, 25 bp, Homo sapien
cttccccactagcacctcatcaatg

SEQ ID NO: 1307579 - DNA, 25 bp, Homo sapien
cttcttagatatctccttccccact

SEQ ID NO: 1307580 - DNA, 25 bp, Homo sapien
gatatgcatcaacagtcactaccct

SEQ ID NO: 1307581 - DNA, 25 bp, Homo sapien
ctaagtcgcagcataggtgggtcag

SEQ ID NO: 1307582 - DNA, 25 bp, Homo sapien
tgaactctccagatgcgtccctgca

SEQ ID NO: 1307583 - DNA, 25 bp, Homo sapien
ccaggttgagtttatgattccagaa

SEQ ID NO: 1307584 - DNA, 25 bp, Homo sapien
cccagaagacacaggggtctgcttg

SEQ ID NO: 1307585 - DNA, 25 bp, Homo sapien
gaagacacaggggtctgcttggaag

SEQ ID NO: 1307586 - DNA, 25 bp, Homo sapien
tgtgcccagaagacacaggggtctg

SEQ ID NO: 1307587 - DNA, 25 bp, Homo sapien
gcccagaagacacaggggtctgctt

SEQ ID NO: 1307588 - DNA, 25 bp, Homo sapien
gccaaactgtcatgatattgaatct

SEQ ID NO: 1307589 - DNA, 25 bp, Homo sapien
caggcagccaaactgtcatgatatt

SEQ ID NO: 1307590 - DNA, 25 bp, Homo sapien
gaaatggacttcaaagagttcagca

SEQ ID NO: 1307591 - DNA, 25 bp, Homo sapien
ccaggaaatggacttcaaagagttc

SEQ ID NO: 1307592 - DNA, 25 bp, Homo sapien
gcatcaacatctgaccaccttctgt

SEQ ID NO: 1307593 - DNA, 25 bp, Homo sapien
agaactttccaggaaatggacttca

SEQ ID NO: 1307594 - DNA, 25 bp, Homo sapien
gcttcaggcaacaccaaaatgtgga

SEQ ID NO: 1307595 - DNA, 25 bp, Homo sapien
cagggaaaggaactagcagaaccag

SEQ ID NO: 1307596 - DNA, 25 bp, Homo sapien
gaccagctggtgaatcaaaggcatg

SEQ ID NO: 1307597 - DNA, 25 bp, Homo sapien
ttcagggaagaacttcatccactgg

SEQ ID NO: 1307598 - DNA, 25 bp, Homo sapien
acggactctactcttgacaactggg

SEQ ID NO: 1307599 - DNA, 25 bp, Homo sapien
tcttctgccagaaaacatccagatg

SEQ ID NO: 1307600 - DNA, 25 bp, Homo sapien
ggcaggtgacacagtaggagcaggc

SEQ ID NO: 1307601 - DNA, 25 bp, Homo sapien
caactgggtctaccaagtaggaaga

SEQ ID NO: 1307602 - DNA, 25 bp, Homo sapien
aggcttaagcatcatagccacagtc

SEQ ID NO: 1307603 - DNA, 25 bp, Homo sapien
cgcccaacaaaccaggcttaagcat

SEQ ID NO: 1307604 - DNA, 25 bp, Homo sapien
gcttaagcatcatagccacagtcac

SEQ ID NO: 1307605 - DNA, 25 bp, Homo sapien
tccgcccaacaaaccaggcttaagc

SEQ ID NO: 1307606 - DNA, 25 bp, Homo sapien
atatgggatccctcaaactcactct

SEQ ID NO: 1307607 - DNA, 25 bp, Homo sapien
tactccctatatgggatccctcaaa

SEQ ID NO: 1307608 - DNA, 25 bp, Homo sapien
ctacgccatactccctatatgggat

SEQ ID NO: 1307609 - DNA, 25 bp, Homo sapien
gccatactccctatatgggatccct

SEQ ID NO: 1307610 - DNA, 25 bp, Homo sapien
tgaagaagccaagacgtcttccagg

SEQ ID NO: 1307611 - DNA, 25 bp, Homo sapien
aggaagcgtaggttgacagccatga

SEQ ID NO: 1307612 - DNA, 25 bp, Homo sapien
tgacagccatgaaatagtcttttct

SEQ ID NO: 1307613 - DNA, 25 bp, Homo sapien
cgtaggttgacagccatgaaatagt

SEQ ID NO: 1307614 - DNA, 25 bp, Homo sapien
tgtggcaggtcatggccaggcccct

SEQ ID NO: 1307615 - DNA, 25 bp, Homo sapien
ctgtggcaggtcatggccaggcccc

SEQ ID NO: 1307616 - DNA, 25 bp, Homo sapien
tgctgagagaaatagcgggggccct

SEQ ID NO: 1307617 - DNA, 25 bp, Homo sapien
ccaggcccctgaagatgctgagaga

SEQ ID NO: 1307618 - DNA, 25 bp, Homo sapien
cagtaggaatgacatatggagaaac

SEQ ID NO: 1307619 - DNA, 25 bp, Homo sapien
tgaagtacaacccaggcactgtcgt

SEQ ID NO: 1307620 - DNA, 25 bp, Homo sapien
taggaatgacatatggagaaacaga

SEQ ID NO: 1307621 - DNA, 25 bp, Homo sapien
agaaacagatgaagtacaacccagg

SEQ ID NO: 1307622 - DNA, 25 bp, Homo sapien
gaccaaagccaattgcaccttgcat

SEQ ID NO: 1307623 - DNA, 25 bp, Homo sapien
gccctcgtgggccttatccttcttg

SEQ ID NO: 1307624 - DNA, 25 bp, Homo sapien
ccttcttgagtctgacgtctccagt

SEQ ID NO: 1307625 - DNA, 25 bp, Homo sapien
cgtctccagtctggtgaccaaagcc

SEQ ID NO: 1307626 - DNA, 25 bp, Homo sapien
catttgctgaagtttttcactgagt

SEQ ID NO: 1307627 - DNA, 25 bp, Homo sapien
tttgctgaagtttttcactgagttt

SEQ ID NO: 1307628 - DNA, 25 bp, Homo sapien
tgctgaagtttttcactgagtttgt

SEQ ID NO: 1307629 - DNA, 25 bp, Homo sapien
tcatttgctgaagtttttcactgag

SEQ ID NO: 1307630 - DNA, 25 bp, Homo sapien
tgtgacacccccataatactcactt

SEQ ID NO: 1307631 - DNA, 25 bp, Homo sapien
tcatgttgccgtccccaagtgcagc

SEQ ID NO: 1307632 - DNA, 25 bp, Homo sapien
ccccataatactcacttccattggc

SEQ ID NO: 1307633 - DNA, 25 bp, Homo sapien
ttagcgagtcatgttgccgtcccca

SEQ ID NO: 1307634 - DNA, 25 bp, Homo sapien
cacaaagaatgagctccacaaaccc

SEQ ID NO: 1307635 - DNA, 25 bp, Homo sapien
aacacaaagaatgagctccacaaac

SEQ ID NO: 1307636 - DNA, 25 bp, Homo sapien
caaagaatgagctccacaaacccag

SEQ ID NO: 1307637 - DNA, 25 bp, Homo sapien
aaagaatgagctccacaaacccagc

SEQ ID NO: 1307638 - DNA, 25 bp, Homo sapien
ctctagtgggtattttcctcctgtt

SEQ ID NO: 1307639 - DNA, 25 bp, Homo sapien
aataagttcacactggtcatggggc

SEQ ID NO: 1307640 - DNA, 25 bp, Homo sapien
cactttctgttgaaaaacatgagca

SEQ ID NO: 1307641 - DNA, 25 bp, Homo sapien
aaaatctgcaacaaaatctacatta

SEQ ID NO: 1307642 - DNA, 25 bp, Homo sapien
catctaagaaggatttgtagaagtc

SEQ ID NO: 1307643 - DNA, 25 bp, Homo sapien
catgagcataagaggcatctaagaa

SEQ ID NO: 1307644 - DNA, 25 bp, Homo sapien
tccaccttggagttttcacacgcga

SEQ ID NO: 1307645 - DNA, 25 bp, Homo sapien
tgagtgctgcactctagacacactg

SEQ ID NO: 1307646 - DNA, 25 bp, Homo sapien
tatctttcgtaagggccagcatgag

SEQ ID NO: 1307647 - DNA, 25 bp, Homo sapien
tccttgaacacaacagtgagctctt

SEQ ID NO: 1307648 - DNA, 25 bp, Homo sapien
tccaaatggaaatgttgagctctaa

SEQ ID NO: 1307649 - DNA, 25 bp, Homo sapien
aacatccaaatggaaatgttgagct

SEQ ID NO: 1307650 - DNA, 25 bp, Homo sapien
aaatggaaatgttgagctctaagtt

SEQ ID NO: 1307651 - DNA, 25 bp, Homo sapien
aaacatccaaatggaaatgttgagc

SEQ ID NO: 1307652 - DNA, 25 bp, Homo sapien
tgccttaatatagaacttatgaagt

SEQ ID NO: 1307653 - DNA, 25 bp, Homo sapien
gccttaatatagaacttatgaagtc

SEQ ID NO: 1307654 - DNA, 25 bp, Homo sapien
tagtcagaataatcacttgtcttcc

SEQ ID NO: 1307655 - DNA, 25 bp, Homo sapien
tagctgtctttaagacatgattccc

SEQ ID NO: 1307656 - DNA, 25 bp, Homo sapien
gtgaaccaatgattaggaggaaaat

SEQ ID NO: 1307657 - DNA, 25 bp, Homo sapien
agacatgattcccaagtgaaccaat

SEQ ID NO: 1307658 - DNA, 25 bp, Homo sapien
gattcccaagtgaaccaatgattag

SEQ ID NO: 1307659 - DNA, 25 bp, Homo sapien
tcttccagatcccacggtgggtgta

SEQ ID NO: 1307660 - DNA, 25 bp, Homo sapien
agactctctcgttccgagtctgaaa

SEQ ID NO: 1307661 - DNA, 25 bp, Homo sapien
tgaaacagagggtctggtctcagga

SEQ ID NO: 1307662 - DNA, 25 bp, Homo sapien
cagatcccacggtgggtgtaaggtc

SEQ ID NO: 1307663 - DNA, 25 bp, Homo sapien
aaccacagtcctttctagcagctca

SEQ ID NO: 1307664 - DNA, 25 bp, Homo sapien
cagtcctttctagcagctcagactg

SEQ ID NO: 1307665 - DNA, 25 bp, Homo sapien
tcacaaccacagtcctttctagcag

SEQ ID NO: 1307666 - DNA, 25 bp, Homo sapien
ccacagtcctttctagcagctcaga

SEQ ID NO: 1307667 - DNA, 25 bp, Homo sapien
ttacagaaaactcatcacagcagtg

SEQ ID NO: 1307668 - DNA, 25 bp, Homo sapien
gaaaactcatcacagcagtggcatc

SEQ ID NO: 1307669 - DNA, 25 bp, Homo sapien
aaactcatcacagcagtggcatcac

SEQ ID NO: 1307670 - DNA, 25 bp, Homo sapien
cagaaaactcatcacagcagtggca

SEQ ID NO: 1307671 - DNA, 25 bp, Homo sapien
aatccatgttgaagagccctgatac

SEQ ID NO: 1307672 - DNA, 25 bp, Homo sapien
cagggaaatccatgttgaagagccc

SEQ ID NO: 1307673 - DNA, 25 bp, Homo sapien
cacaggggcccgttctggtttctca

SEQ ID NO: 1307674 - DNA, 25 bp, Homo sapien
tctgaggcccacaggggcccgttct

SEQ ID NO: 1307675 - DNA, 25 bp, Homo sapien
tagggccagagtcaagatctgaacc

SEQ ID NO: 1307676 - DNA, 25 bp, Homo sapien
agttagggccagagtcaagatctga

SEQ ID NO: 1307677 - DNA, 25 bp, Homo sapien
ttagttagggccagagtcaagatct

SEQ ID NO: 1307678 - DNA, 25 bp, Homo sapien
ccattagttagggccagagtcaaga

SEQ ID NO: 1307679 - DNA, 25 bp, Homo sapien
cacccagattcacacataaggccaa

SEQ ID NO: 1307680 - DNA, 25 bp, Homo sapien
atcagacacacccagattcacacat

SEQ ID NO: 1307681 - DNA, 25 bp, Homo sapien
gattcacacataaggccaaaggcac

SEQ ID NO: 1307682 - DNA, 25 bp, Homo sapien
gacacacccagattcacacataagg

SEQ ID NO: 1307683 - DNA, 25 bp, Homo sapien
tgtatcctgacattgtgaaggccca

SEQ ID NO: 1307684 - DNA, 25 bp, Homo sapien
ctggcagcccctagtcttttgcagc

SEQ ID NO: 1307685 - DNA, 25 bp, Homo sapien
gaagtggccttcaatagtccgatag

SEQ ID NO: 1307686 - DNA, 25 bp, Homo sapien
gcccaaaaggcctgatagccggtga

SEQ ID NO: 1307687 - DNA, 25 bp, Homo sapien
tcatttgtgaggtactctgcaaggg

SEQ ID NO: 1307688 - DNA, 25 bp, Homo sapien
ctagggggggatacagacacaccaa

SEQ ID NO: 1307689 - DNA, 25 bp, Homo sapien
tttaacaacattcttgcagtggaag

SEQ ID NO: 1307690 - DNA, 25 bp, Homo sapien
caggaaagacaatctgtgcttagga

SEQ ID NO: 1307691 - DNA, 25 bp, Homo sapien
attatgtaaaaaggatctgattaac

SEQ ID NO: 1307692 - DNA, 25 bp, Homo sapien
tattatgtaaaaaggatctgattaa

SEQ ID NO: 1307693 - DNA, 25 bp, Homo sapien
gtattatgtaaaaaggatctgatta

SEQ ID NO: 1307694 - DNA, 25 bp, Homo sapien
cagaggcactgctggaacaggatga

SEQ ID NO: 1307695 - DNA, 25 bp, Homo sapien
ccagtagaggtgaagcggcataccc

SEQ ID NO: 1307696 - DNA, 25 bp, Homo sapien
gatggaactaccactaaggcaggtg

SEQ ID NO: 1307697 - DNA, 25 bp, Homo sapien
ggctgccatcccaactagataaagg

SEQ ID NO: 1307698 - DNA, 25 bp, Homo sapien
catgatgtttcactcagcggcagtc

SEQ ID NO: 1307699 - DNA, 25 bp, Homo sapien
gaaggccagtcaaaaagagggtcac

SEQ ID NO: 1307700 - DNA, 25 bp, Homo sapien
gaagtgattcctgccgtgctcggag

SEQ ID NO: 1307701 - DNA, 25 bp, Homo sapien
ggagaggaccctatactaaagccac

SEQ ID NO: 1307702 - DNA, 25 bp, Homo sapien
tatctaatgtcacccgagcagaggc

SEQ ID NO: 1307703 - DNA, 25 bp, Homo sapien
tagctgagaacactaatagacttgc

SEQ ID NO: 1307704 - DNA, 25 bp, Homo sapien
gaattcagtgacaaagtgcccttgg

SEQ ID NO: 1307705 - DNA, 25 bp, Homo sapien
tatcttacagccaccgcaacggctg

SEQ ID NO: 1307706 - DNA, 25 bp, Homo sapien
tcagggagccttagaagaagccaac

SEQ ID NO: 1307707 - DNA, 25 bp, Homo sapien
cagcactagtgtttggtttagccca

SEQ ID NO: 1307708 - DNA, 25 bp, Homo sapien
cactggtgtgccgataaggcctgct

SEQ ID NO: 1307709 - DNA, 25 bp, Homo sapien
cagcagattggaaggtgagtcacca

SEQ ID NO: 1307710 - DNA, 25 bp, Homo sapien
ccagcaacgtcttcagtggtaagat

SEQ ID NO: 1307711 - DNA, 25 bp, Homo sapien
taaacatcagtaggcttcaagaggc

SEQ ID NO: 1307712 - DNA, 25 bp, Homo sapien
acaccatcaggcctcacgagagaga

SEQ ID NO: 1307713 - DNA, 25 bp, Homo sapien
tacccactcccttttagaggcagat

SEQ ID NO: 1307714 - DNA, 25 bp, Homo sapien
tccagcaatatggaaattgtccagg

SEQ ID NO: 1307715 - DNA, 25 bp, Homo sapien
agtgcaaccgcactagtaaagcagt

SEQ ID NO: 1307716 - DNA, 25 bp, Homo sapien
taccacctggatgataagattcgat

SEQ ID NO: 1307717 - DNA, 25 bp, Homo sapien
gcagtatctaaacgagtgaccaacc

SEQ ID NO: 1307718 - DNA, 25 bp, Homo sapien
taatcaggtttttcactatacagtg

SEQ ID NO: 1307719 - DNA, 25 bp, Homo sapien
cagataccactttaatcaggttttt

SEQ ID NO: 1307720 - DNA, 25 bp, Homo sapien
aggtttttcactatacagtgatggg

SEQ ID NO: 1307721 - DNA, 25 bp, Homo sapien
ctcagataccactttaatcaggttt

SEQ ID NO: 1307722 - DNA, 25 bp, Homo sapien
tgtggccaccacacaacagatgcgg

SEQ ID NO: 1307723 - DNA, 25 bp, Homo sapien
tcaacatggtagcaggacaagtcac

SEQ ID NO: 1307724 - DNA, 25 bp, Homo sapien
tgcccacagagattgacagccaatg

SEQ ID NO: 1307725 - DNA, 25 bp, Homo sapien
ccaaagtgaacagtctgggcttccc

SEQ ID NO: 1307726 - DNA, 25 bp, Homo sapien
gacataaggagcataggtacgaacc

SEQ ID NO: 1307727 - DNA, 25 bp, Homo sapien
gtccttaaggctcaccacctgcgtg

SEQ ID NO: 1307728 - DNA, 25 bp, Homo sapien
tctgggcggtttctgttcagcacag

SEQ ID NO: 1307729 - DNA, 25 bp, Homo sapien
cacctgcgtgtggtccttgcctaga

SEQ ID NO: 1307730 - DNA, 25 bp, Homo sapien
atagagcttcaagcctattgttgac

SEQ ID NO: 1307731 - DNA, 25 bp, Homo sapien
tctacgatgaatctcctggtttcac

SEQ ID NO: 1307732 - DNA, 25 bp, Homo sapien
tcacaatatgaaaagtcgttccttt

SEQ ID NO: 1307733 - DNA, 25 bp, Homo sapien
ccatgaaacacaatctacgatgaat

SEQ ID NO: 1307734 - DNA, 25 bp, Homo sapien
gaatctcctggtttcacaatatgaa

SEQ ID NO: 1307735 - DNA, 25 bp, Homo sapien
gaattattagcccagactcttgtga

SEQ ID NO: 1307736 - DNA, 25 bp, Homo sapien
tgaaaaatcactgtacaagcccggg

SEQ ID NO: 1307737 - DNA, 25 bp, Homo sapien
gtttctaatgggctgaagaccacca

SEQ ID NO: 1307738 - DNA, 25 bp, Homo sapien
cacactgcagaggtatacggtttct

SEQ ID NO: 1307739 - DNA, 25 bp, Homo sapien
tgtgtcaggcacgatgctggcttac

SEQ ID NO: 1307740 - DNA, 25 bp, Homo sapien
ctgtgtcaggcacgatgctggctta

SEQ ID NO: 1307741 - DNA, 25 bp, Homo sapien
tctgtgtcaggcacgatgctggctt

SEQ ID NO: 1307742 - DNA, 25 bp, Homo sapien
taaggcgaaggtccatccaaatggc

SEQ ID NO: 1307743 - DNA, 25 bp, Homo sapien
tcactagagcgcagtccaggaatgg

SEQ ID NO: 1307744 - DNA, 25 bp, Homo sapien
tccggtaaaggtcaactgggctgct

SEQ ID NO: 1307745 - DNA, 25 bp, Homo sapien
taagaaccgtgtctgtctggcccaa

SEQ ID NO: 1307746 - DNA, 25 bp, Homo sapien
gggtggaccctagcgatcactcctc

SEQ ID NO: 1307747 - DNA, 25 bp, Homo sapien
gaagccctgtctgcggagggctacc

SEQ ID NO: 1307748 - DNA, 25 bp, Homo sapien
ttggcaccagaacacccgccagaga

SEQ ID NO: 1307749 - DNA, 25 bp, Homo sapien
tcactcctcccgtaactcagaggtt

SEQ ID NO: 1307750 - DNA, 25 bp, Homo sapien
ctgctcgccgggaccgcgcgctcac

SEQ ID NO: 1307751 - DNA, 25 bp, Homo sapien
ggagcacggaagtcgccgcacccag

SEQ ID NO: 1307752 - DNA, 25 bp, Homo sapien
ccgctcgccgggagcacggaagtcg

SEQ ID NO: 1307753 - DNA, 25 bp, Homo sapien
ccgcgggaccttgccctgtgaccct

SEQ ID NO: 1307754 - DNA, 25 bp, Homo sapien
tctcggagcgcagggattggctgaa

SEQ ID NO: 1307755 - DNA, 25 bp, Homo sapien
tcttctgagggcagcaagtgattct

SEQ ID NO: 1307756 - DNA, 25 bp, Homo sapien
tgaatgagcccgagaaacaggcatc

SEQ ID NO: 1307757 - DNA, 25 bp, Homo sapien
gagagagtgcctccctatacttggg

SEQ ID NO: 1307758 - DNA, 25 bp, Homo sapien
ttcttagggcgaaaaaatggacaga

SEQ ID NO: 1307759 - DNA, 25 bp, Homo sapien
tgcacttatgcctcctaaatgtctc

SEQ ID NO: 1307760 - DNA, 25 bp, Homo sapien
ggccgtagtttcatctttcaaataa

SEQ ID NO: 1307761 - DNA, 25 bp, Homo sapien
tgctgtcttgttgccccatccagtc

SEQ ID NO: 1307762 - DNA, 25 bp, Homo sapien
ttacctggaccactttagcagctcc

SEQ ID NO: 1307763 - DNA, 25 bp, Homo sapien
cccttctggccgtatctcctccacg

SEQ ID NO: 1307764 - DNA, 25 bp, Homo sapien
tctggccgtatctcctccacgccct

SEQ ID NO: 1307765 - DNA, 25 bp, Homo sapien
tggccgtatctcctccacgccctcc

SEQ ID NO: 1307766 - DNA, 25 bp, Homo sapien
cttctggccgtatctcctccacgcc

SEQ ID NO: 1307767 - DNA, 25 bp, Homo sapien
ccaggttggtcccttggccagaaat

SEQ ID NO: 1307768 - DNA, 25 bp, Homo sapien
ggttggtcccttggccagaaatgaa

SEQ ID NO: 1307769 - DNA, 25 bp, Homo sapien
ctctccagcctatgctttcattccc

SEQ ID NO: 1307770 - DNA, 25 bp, Homo sapien
gcccaggttggtcccttggccagaa

SEQ ID NO: 1307771 - DNA, 25 bp, Homo sapien
tattcactaagtcttggaccaggcc

SEQ ID NO: 1307772 - DNA, 25 bp, Homo sapien
gggatcacctccaaacggactgctt

SEQ ID NO: 1307773 - DNA, 25 bp, Homo sapien
taaaggttaaactcagactcagcca

SEQ ID NO: 1307774 - DNA, 25 bp, Homo sapien
taaaaccttattcgagggcagagtc

SEQ ID NO: 1307775 - DNA, 25 bp, Homo sapien
acgttcatgccactcctctgttcaa

SEQ ID NO: 1307776 - DNA, 25 bp, Homo sapien
gagacccaaacactgatataatcaa

SEQ ID NO: 1307777 - DNA, 25 bp, Homo sapien
tataatcaagtctctgtgctcccaa

SEQ ID NO: 1307778 - DNA, 25 bp, Homo sapien
aagttgtctaccaaaccagtctata

SEQ ID NO: 1307779 - DNA, 25 bp, Homo sapien
aaggtggccacccataggaggcatc

SEQ ID NO: 1307780 - DNA, 25 bp, Homo sapien
ggttgccatttagcttcccaggaga

SEQ ID NO: 1307781 - DNA, 25 bp, Homo sapien
gaggcatcagaaaatgcggcaggac

SEQ ID NO: 1307782 - DNA, 25 bp, Homo sapien
taaagccatcgatactaggttctgg

SEQ ID NO: 1307783 - DNA, 25 bp, Homo sapien
cacactcccggtttattgagcacat

SEQ ID NO: 1307784 - DNA, 25 bp, Homo sapien
caccgaaataggaagaacggagagc

SEQ ID NO: 1307785 - DNA, 25 bp, Homo sapien
actgggaggcagaacgggatacacc

SEQ ID NO: 1307786 - DNA, 25 bp, Homo sapien
tattgagcacatgctgcgtgcccgg

SEQ ID NO: 1307787 - DNA, 25 bp, Homo sapien
tgggcccctccaggagggtccaggc

SEQ ID NO: 1307788 - DNA, 25 bp, Homo sapien
ctgggcccctccaggagggtccagg

SEQ ID NO: 1307789 - DNA, 25 bp, Homo sapien
catcagggggccgaatctcctttcc

SEQ ID NO: 1307790 - DNA, 25 bp, Homo sapien
ggcatcagggggccgaatctccttt

SEQ ID NO: 1307791 - DNA, 25 bp, Homo sapien
tgtgggcatcagggggccgaatctc

SEQ ID NO: 1307792 - DNA, 25 bp, Homo sapien
tcagggggccgaatctcctttccac

SEQ ID NO: 1307793 - DNA, 25 bp, Homo sapien
caagagagtgggctcccggtccctt

SEQ ID NO: 1307794 - DNA, 25 bp, Homo sapien
aggagctcaggcaacccctgctatc

SEQ ID NO: 1307795 - DNA, 25 bp, Homo sapien
ctccaaaccaagagagtgggctccc

SEQ ID NO: 1307796 - DNA, 25 bp, Homo sapien
ggagctcaggcaacccctgctatct

SEQ ID NO: 1307797 - DNA, 25 bp, Homo sapien
acgggacggaggtggcctcttctgg

SEQ ID NO: 1307798 - DNA, 25 bp, Homo sapien
cgggacggaggtggcctcttctgga

SEQ ID NO: 1307799 - DNA, 25 bp, Homo sapien
cagttctgccgttttatttttcctg

SEQ ID NO: 1307800 - DNA, 25 bp, Homo sapien
gggatgtgggaacagccacaggtgt

SEQ ID NO: 1307801 - DNA, 25 bp, Homo sapien
gatgtgggaacagccacaggtgtgg

SEQ ID NO: 1307802 - DNA, 25 bp, Homo sapien
gtgggaacagccacaggtgtggtga

SEQ ID NO: 1307803 - DNA, 25 bp, Homo sapien
tcaaggggatgtgggaacagccaca

SEQ ID NO: 1307804 - DNA, 25 bp, Homo sapien
cgttcacagtgacctcgacgctggg

SEQ ID NO: 1307805 - DNA, 25 bp, Homo sapien
ggcagggttcgggattcttcataaa

SEQ ID NO: 1307806 - DNA, 25 bp, Homo sapien
aagccacgaagcttgatccccacga

SEQ ID NO: 1307807 - DNA, 25 bp, Homo sapien
tcgcgtgggatcaggaaggtaaaaa

SEQ ID NO: 1307808 - DNA, 25 bp, Homo sapien
gcctcggggatgtagatctcgatgc

SEQ ID NO: 1307809 - DNA, 25 bp, Homo sapien
cctcggggatgtagatctcgatgct

SEQ ID NO: 1307810 - DNA, 25 bp, Homo sapien
gcttctttggtatcggcggagggac

SEQ ID NO: 1307811 - DNA, 25 bp, Homo sapien
tggtatcggcggagggaccttcttc

SEQ ID NO: 1307812 - DNA, 25 bp, Homo sapien
ggcttctttggtatcggcggaggga

SEQ ID NO: 1307813 - DNA, 25 bp, Homo sapien
ggaccctcaaggctctgccgtcgat

SEQ ID NO: 1307814 - DNA, 25 bp, Homo sapien
aggacagtctgtccttccgtaaggt

SEQ ID NO: 1307815 - DNA, 25 bp, Homo sapien
cagtctgtccttccgtaaggtctac

SEQ ID NO: 1307816 - DNA, 25 bp, Homo sapien
tgcctaggcccgaactgaggacagt

SEQ ID NO: 1307817 - DNA, 25 bp, Homo sapien
gggccaagcagacggcagtggccac

SEQ ID NO: 1307818 - DNA, 25 bp, Homo sapien
gccaagcagacggcagtggccacga

SEQ ID NO: 1307819 - DNA, 25 bp, Homo sapien
caagcagacggcagtggccacgagc

SEQ ID NO: 1307820 - DNA, 25 bp, Homo sapien
ctggggccaagcagacggcagtggc

SEQ ID NO: 1307821 - DNA, 25 bp, Homo sapien
tcacctgtccaaggctgcccttgct

SEQ ID NO: 1307822 - DNA, 25 bp, Homo sapien
cttgctgcccatggatcccttcccc

SEQ ID NO: 1307823 - DNA, 25 bp, Homo sapien
cccttgctgcccatggatcccttcc

SEQ ID NO: 1307824 - DNA, 25 bp, Homo sapien
tgctgcccatggatcccttcccctg

SEQ ID NO: 1307825 - DNA, 25 bp, Homo sapien
gaggggaatttcccagagtctggcc

SEQ ID NO: 1307826 - DNA, 25 bp, Homo sapien
ggaggggaatttcccagagtctggc

SEQ ID NO: 1307827 - DNA, 25 bp, Homo sapien
atttcccagagtctggcctctttgc

SEQ ID NO: 1307828 - DNA, 25 bp, Homo sapien
ggaatttcccagagtctggcctctt

SEQ ID NO: 1307829 - DNA, 25 bp, Homo sapien
cttgagttgctgtagctccaggaac

SEQ ID NO: 1307830 - DNA, 25 bp, Homo sapien
agctgtaggaggtcccagaaacccg

SEQ ID NO: 1307831 - DNA, 25 bp, Homo sapien
gttggccttgagttgctgtagctcc

SEQ ID NO: 1307832 - DNA, 25 bp, Homo sapien
ggtcacatcctcgatggagagctgt

SEQ ID NO: 1307833 - DNA, 25 bp, Homo sapien
ggtcacatgtatctggtaggatcta

SEQ ID NO: 1307834 - DNA, 25 bp, Homo sapien
aggatctactactatgggcactcac

SEQ ID NO: 1307835 - DNA, 25 bp, Homo sapien
cacatgtatctggtaggatctacta

SEQ ID NO: 1307836 - DNA, 25 bp, Homo sapien
tatctggtaggatctactactatgg

SEQ ID NO: 1307837 - DNA, 25 bp, Homo sapien
tgctgcccacagcactgcggatctt

SEQ ID NO: 1307838 - DNA, 25 bp, Homo sapien
ctctgcccgcagcatcttgatgaac

SEQ ID NO: 1307839 - DNA, 25 bp, Homo sapien
tctcctcgggtagctcatagtcctc

SEQ ID NO: 1307840 - DNA, 25 bp, Homo sapien
aaccactcgccgtcgcgtgggcagg

SEQ ID NO: 1307841 - DNA, 25 bp, Homo sapien
tccgcctcacgctccatctgctggc

SEQ ID NO: 1307842 - DNA, 25 bp, Homo sapien
aaccgcgctctatccaggagtcacg

SEQ ID NO: 1307843 - DNA, 25 bp, Homo sapien
tctatccaggagtcacggcggccgg

SEQ ID NO: 1307844 - DNA, 25 bp, Homo sapien
cgctctatccaggagtcacggcggc

SEQ ID NO: 1307845 - DNA, 25 bp, Homo sapien
acgtgaaccgcgctctatccaggag

SEQ ID NO: 1307846 - DNA, 25 bp, Homo sapien
cactggccctgcgtgtggaccgtgc

SEQ ID NO: 1307847 - DNA, 25 bp, Homo sapien
gagcgtccaaactgcagggccttgt

SEQ ID NO: 1307848 - DNA, 25 bp, Homo sapien
cacgccagccgtcacactattggag

SEQ ID NO: 1307849 - DNA, 25 bp, Homo sapien
ctcgtacggcagtgggtagccctcg

SEQ ID NO: 1307850 - DNA, 25 bp, Homo sapien
ttcctgtcgcccctgctaaacacag

SEQ ID NO: 1307851 - DNA, 25 bp, Homo sapien
acacagctgtgtccttcggcactgc

SEQ ID NO: 1307852 - DNA, 25 bp, Homo sapien
ctgcgtgctttcctgtcgcccctgc

SEQ ID NO: 1307853 - DNA, 25 bp, Homo sapien
cagctgtgtccttcggcactgccat

SEQ ID NO: 1307854 - DNA, 25 bp, Homo sapien
gagaggatcccattccatcgcgatg

SEQ ID NO: 1307855 - DNA, 25 bp, Homo sapien
cattccatcgcgatggaaacagcca

SEQ ID NO: 1307856 - DNA, 25 bp, Homo sapien
gaggatcccattccatcgcgatgga

SEQ ID NO: 1307857 - DNA, 25 bp, Homo sapien
ttgagaggatcccattccatcgcga

SEQ ID NO: 1307858 - DNA, 25 bp, Homo sapien
caatcatcacaatgaagtgggcgat

SEQ ID NO: 1307859 - DNA, 25 bp, Homo sapien
gaccccaatcatcacaatgaagtgg

SEQ ID NO: 1307860 - DNA, 25 bp, Homo sapien
cagttgaccccaatcatcacaatga

SEQ ID NO: 1307861 - DNA, 25 bp, Homo sapien
tcatcacaatgaagtgggcgatggg

SEQ ID NO: 1307862 - DNA, 25 bp, Homo sapien
cagaagggacaataagtccaaaatc

SEQ ID NO: 1307863 - DNA, 25 bp, Homo sapien
agacagaagggacaataagtccaaa

SEQ ID NO: 1307864 - DNA, 25 bp, Homo sapien
gacagaagggacaataagtccaaaa

SEQ ID NO: 1307865 - DNA, 25 bp, Homo sapien
acagaagggacaataagtccaaaat

SEQ ID NO: 1307866 - DNA, 25 bp, Homo sapien
ccacctgcacgccaatagagtggaa

SEQ ID NO: 1307867 - DNA, 25 bp, Homo sapien
cacgccaatagagtggaactccctc

SEQ ID NO: 1307868 - DNA, 25 bp, Homo sapien
tcttccacctgcacgccaatagagt

SEQ ID NO: 1307869 - DNA, 25 bp, Homo sapien
cctgcacgccaatagagtggaactc

SEQ ID NO: 1307870 - DNA, 25 bp, Homo sapien
tcggtgtccgaatctgagatcgtct

SEQ ID NO: 1307871 - DNA, 25 bp, Homo sapien
tgtccgaatctgagatcgtctccac

SEQ ID NO: 1307872 - DNA, 25 bp, Homo sapien
ttctcggtgtccgaatctgagatcg

SEQ ID NO: 1307873 - DNA, 25 bp, Homo sapien
ggtgtccgaatctgagatcgtctcc

SEQ ID NO: 1307874 - DNA, 25 bp, Homo sapien
tggtggcagggtggaggagtcagtg

SEQ ID NO: 1307875 - DNA, 25 bp, Homo sapien
ctggtggcagggtggaggagtcagt

SEQ ID NO: 1307876 - DNA, 25 bp, Homo sapien
ggtggcagggtggaggagtcagtgg

SEQ ID NO: 1307877 - DNA, 25 bp, Homo sapien
tcgtgggcgcctccccgttccatac

SEQ ID NO: 1307878 - DNA, 25 bp, Homo sapien
ctcgtgggcgcctccccgttccata

SEQ ID NO: 1307879 - DNA, 25 bp, Homo sapien
cctcgtgggcgcctccccgttccat

SEQ ID NO: 1307880 - DNA, 25 bp, Homo sapien
ccgtgaagctctcgtgcgcggagtc

SEQ ID NO: 1307881 - DNA, 25 bp, Homo sapien
atggacggccgccacttccgctgcc

SEQ ID NO: 1307882 - DNA, 25 bp, Homo sapien
cgtccagcccgtcggcggagctgca

SEQ ID NO: 1307883 - DNA, 25 bp, Homo sapien
accggcgccaactccagtgtgcgcg

SEQ ID NO: 1307884 - DNA, 25 bp, Homo sapien
ccgggcctccctgagacagcggcag

SEQ ID NO: 1307885 - DNA, 25 bp, Homo sapien
gctgctggttcaactcatcgctgag

SEQ ID NO: 1307886 - DNA, 25 bp, Homo sapien
cgcatgcggaaacagccgggcaggt

SEQ ID NO: 1307887 - DNA, 25 bp, Homo sapien
gcaggcagtcgtcgtcttgagagca

SEQ ID NO: 1307888 - DNA, 25 bp, Homo sapien
tgtttgggccaaacaatggactggc

SEQ ID NO: 1307889 - DNA, 25 bp, Homo sapien
caatacttcaacaaacgtggtgccg

SEQ ID NO: 1307890 - DNA, 25 bp, Homo sapien
caggctcccaatgctatcagttgca

SEQ ID NO: 1307891 - DNA, 25 bp, Homo sapien
taactcgaagctgggtgaatgcaca

SEQ ID NO: 1307892 - DNA, 25 bp, Homo sapien
ccagtggtgagggaacggctgtagc

SEQ ID NO: 1307893 - DNA, 25 bp, Homo sapien
ggtggatccggggtgggacacagca

SEQ ID NO: 1307894 - DNA, 25 bp, Homo sapien
gtgagggaacggctgtagccaggga

SEQ ID NO: 1307895 - DNA, 25 bp, Homo sapien
agggaacggctgtagccagggatgg

SEQ ID NO: 1307896 - DNA, 25 bp, Homo sapien
tgccgctccgcatcctgcggcaggg

SEQ ID NO: 1307897 - DNA, 25 bp, Homo sapien
gggctgccgtctgagtctccgctct

SEQ ID NO: 1307898 - DNA, 25 bp, Homo sapien
acgggtggtgaagcgtcgggcgact

SEQ ID NO: 1307899 - DNA, 25 bp, Homo sapien
tggtccacgctggaggagcgacggg

SEQ ID NO: 1307900 - DNA, 25 bp, Homo sapien
tgaagctcaagtcccggtaggaccc

SEQ ID NO: 1307901 - DNA, 25 bp, Homo sapien
ggcacttcgcttgaccgactgtcca

SEQ ID NO: 1307902 - DNA, 25 bp, Homo sapien
catccagtgacatggacatgccagt

SEQ ID NO: 1307903 - DNA, 25 bp, Homo sapien
atcatggtatgccaggcacttcgct

SEQ ID NO: 1307904 - DNA, 25 bp, Homo sapien
acccgccaggaagccgctatcactg

SEQ ID NO: 1307905 - DNA, 25 bp, Homo sapien
gccaggaagccgctatcactgtcca

SEQ ID NO: 1307906 - DNA, 25 bp, Homo sapien
caggaagccgctatcactgtccaag

SEQ ID NO: 1307907 - DNA, 25 bp, Homo sapien
ggaagccgctatcactgtccaagtt

SEQ ID NO: 1307908 - DNA, 25 bp, Homo sapien
gcccatcccccttgcggtccttgct

SEQ ID NO: 1307909 - DNA, 25 bp, Homo sapien
ctgtggacttggcctggtgccgccc

SEQ ID NO: 1307910 - DNA, 25 bp, Homo sapien
ccttgcggtccttgctcttgctcct

SEQ ID NO: 1307911 - DNA, 25 bp, Homo sapien
tggacttggcctggtgccgcccatc

SEQ ID NO: 1307912 - DNA, 25 bp, Homo sapien
gtgtgggggcctccagagcccgggc

SEQ ID NO: 1307913 - DNA, 25 bp, Homo sapien
ttgccgtgccgggactggtggtggt

SEQ ID NO: 1307914 - DNA, 25 bp, Homo sapien
gccgtgccgggactggtggtggtgg

SEQ ID NO: 1307915 - DNA, 25 bp, Homo sapien
ggccggggtagctgtctcctccaga

SEQ ID NO: 1307916 - DNA, 25 bp, Homo sapien
cagccttgggcccattatagtcccg

SEQ ID NO: 1307917 - DNA, 25 bp, Homo sapien
aaactgatccaggagtgtaggaggc

SEQ ID NO: 1307918 - DNA, 25 bp, Homo sapien
cggatgcggctagggctctcactgc

SEQ ID NO: 1307919 - DNA, 25 bp, Homo sapien
gcttctgcacagaatgaaccaggtg

SEQ ID NO: 1307920 - DNA, 25 bp, Homo sapien
tgttggtcagcaaagcgggctgggc

SEQ ID NO: 1307921 - DNA, 25 bp, Homo sapien
ggctgcctcggtcgccatggtaacc

SEQ ID NO: 1307922 - DNA, 25 bp, Homo sapien
gggatggctgcctcggtcgccatgg

SEQ ID NO: 1307923 - DNA, 25 bp, Homo sapien
ttggtcagcaaagcgggctgggcgg

SEQ ID NO: 1307924 - DNA, 25 bp, Homo sapien
cctcagcaaaggctcttcatagtct

SEQ ID NO: 1307925 - DNA, 25 bp, Homo sapien
ggctcttcatagtcttgggggccag

SEQ ID NO: 1307926 - DNA, 25 bp, Homo sapien
gctcttcatagtcttgggggccagg

SEQ ID NO: 1307927 - DNA, 25 bp, Homo sapien
agcaaaggctcttcatagtcttggg

SEQ ID NO: 1307928 - DNA, 25 bp, Homo sapien
aggtcagctctcagcaagagctgcc

SEQ ID NO: 1307929 - DNA, 25 bp, Homo sapien
gaggtcagctctcagcaagagctgc

SEQ ID NO: 1307930 - DNA, 25 bp, Homo sapien
accaccaggcagaagcctaacttca

SEQ ID NO: 1307931 - DNA, 25 bp, Homo sapien
atccttgatgtcaggatccccacca

SEQ ID NO: 1307932 - DNA, 25 bp, Homo sapien
tccttgatgtcaggatccccaccac

SEQ ID NO: 1307933 - DNA, 25 bp, Homo sapien
tgcaggtgtctgtgggatctgtcca

SEQ ID NO: 1307934 - DNA, 25 bp, Homo sapien
gcaggtgtctgtgggatctgtccat

SEQ ID NO: 1307935 - DNA, 25 bp, Homo sapien
ttggactatctccaactgcaggtgt

SEQ ID NO: 1307936 - DNA, 25 bp, Homo sapien
aggttggactatctccaactgcagg

SEQ ID NO: 1307937 - DNA, 25 bp, Homo sapien
tctaggttatgctctttatcgggct

SEQ ID NO: 1307938 - DNA, 25 bp, Homo sapien
tttaagagtggtccctgtcctcgag

SEQ ID NO: 1307939 - DNA, 25 bp, Homo sapien
cagttaccataagcaagagagtgag

SEQ ID NO: 1307940 - DNA, 25 bp, Homo sapien
gggaacaacctctcacgtgacagag

SEQ ID NO: 1307941 - DNA, 25 bp, Homo sapien
gaagccctgtatagtggaaaagcac

SEQ ID NO: 1307942 - DNA, 25 bp, Homo sapien
tgagaccagaacgtatgtgacacct

SEQ ID NO: 1307943 - DNA, 25 bp, Homo sapien
caaatccaaattactgggagcagga

SEQ ID NO: 1307944 - DNA, 25 bp, Homo sapien
tgtgacacctgacgtagcagaggcg

SEQ ID NO: 1307945 - DNA, 25 bp, Homo sapien
cagagagctgcccgaatggtgaagc

SEQ ID NO: 1307946 - DNA, 25 bp, Homo sapien
gtctgggagggtgccgtgtgtgaca

SEQ ID NO: 1307947 - DNA, 25 bp, Homo sapien
tgacaaattcttctctgatgcagct

SEQ ID NO: 1307948 - DNA, 25 bp, Homo sapien
tggctggctggaaaatggtgactga

SEQ ID NO: 1307949 - DNA, 25 bp, Homo sapien
gaggttgtcactgccccaagcaatt

SEQ ID NO: 1307950 - DNA, 25 bp, Homo sapien
tggtgtggactctgtcatcagactc

SEQ ID NO: 1307951 - DNA, 25 bp, Homo sapien
cctttcttgagacctaggcaagtca

SEQ ID NO: 1307952 - DNA, 25 bp, Homo sapien
gaaaccagctgtgtaattcgccagg

SEQ ID NO: 1307953 - DNA, 25 bp, Homo sapien
agagcaaagacctggtagccaaaga

SEQ ID NO: 1307954 - DNA, 25 bp, Homo sapien
agactcccacaaacccctgtagcca

SEQ ID NO: 1307955 - DNA, 25 bp, Homo sapien
gactagaggaccttgatttgcagac

SEQ ID NO: 1307956 - DNA, 25 bp, Homo sapien
tgtagccagggttagtggtctctct

SEQ ID NO: 1307957 - DNA, 25 bp, Homo sapien
gctctggcggctgtttcggcccaac

SEQ ID NO: 1307958 - DNA, 25 bp, Homo sapien
cgttgccatgacaccgcgggcaggt

SEQ ID NO: 1307959 - DNA, 25 bp, Homo sapien
cggctctggcggctgtttcggccca

SEQ ID NO: 1307960 - DNA, 25 bp, Homo sapien
cagagtcgttgccatgacaccgcgg

SEQ ID NO: 1307961 - DNA, 25 bp, Homo sapien
tgtatcgactgcctactccaagctg

SEQ ID NO: 1307962 - DNA, 25 bp, Homo sapien
gcatcactgacagggtggaaccaca

SEQ ID NO: 1307963 - DNA, 25 bp, Homo sapien
taagtccatacttggctaaggcatc

SEQ ID NO: 1307964 - DNA, 25 bp, Homo sapien
cctactgccagaccaaaaaatgtgt

SEQ ID NO: 1307965 - DNA, 25 bp, Homo sapien
acttctgtagcaatgccaatgttta

SEQ ID NO: 1307966 - DNA, 25 bp, Homo sapien
tacccctttcatccactaggaccaa

SEQ ID NO: 1307967 - DNA, 25 bp, Homo sapien
cctttcatccactaggaccaacttg

SEQ ID NO: 1307968 - DNA, 25 bp, Homo sapien
atgtttaagccctgatcctctttcc

SEQ ID NO: 1307969 - DNA, 25 bp, Homo sapien
gttctgagccccctttctgaaggag

SEQ ID NO: 1307970 - DNA, 25 bp, Homo sapien
gaggcagagagaggtagctccccac

SEQ ID NO: 1307971 - DNA, 25 bp, Homo sapien
agagaggtagctccccacaccctgt

SEQ ID NO: 1307972 - DNA, 25 bp, Homo sapien
tctgagccccctttctgaaggagcc

SEQ ID NO: 1307973 - DNA, 25 bp, Homo sapien
gagctgggagcttgggcccccgaca

SEQ ID NO: 1307974 - DNA, 25 bp, Homo sapien
ttgggcccccgacaccatccccagc

SEQ ID NO: 1307975 - DNA, 25 bp, Homo sapien
gagctcaaagggcatagaagcaggg

SEQ ID NO: 1307976 - DNA, 25 bp, Homo sapien
agcccacttccactctgagctctta

SEQ ID NO: 1307977 - DNA, 25 bp, Homo sapien
taggaatccctatccccagcgacat

SEQ ID NO: 1307978 - DNA, 25 bp, Homo sapien
ggctaggaatccctatccccagcga

SEQ ID NO: 1307979 - DNA, 25 bp, Homo sapien
tgggtgtggctaggaatccctatcc

SEQ ID NO: 1307980 - DNA, 25 bp, Homo sapien
tgtggctaggaatccctatccccag

SEQ ID NO: 1307981 - DNA, 25 bp, Homo sapien
acgaccagcaacatcccagagggca

SEQ ID NO: 1307982 - DNA, 25 bp, Homo sapien
gcaggaaggacacgaccagcaacat

SEQ ID NO: 1307983 - DNA, 25 bp, Homo sapien
caggggccttagcatgcaggaagga

SEQ ID NO: 1307984 - DNA, 25 bp, Homo sapien
ggccttagcatgcaggaaggacacg

SEQ ID NO: 1307985 - DNA, 25 bp, Homo sapien
ggctccggccgggttacatggtgcc

SEQ ID NO: 1307986 - DNA, 25 bp, Homo sapien
cgggttacatggtgccggcggcccg

SEQ ID NO: 1307987 - DNA, 25 bp, Homo sapien
cagggaccggggcccggcactgcgg

SEQ ID NO: 1307988 - DNA, 25 bp, Homo sapien
tccggccgggttacatggtgccggc

SEQ ID NO: 1307989 - DNA, 25 bp, Homo sapien
acaggcacccgaagtgtcacggcca

SEQ ID NO: 1307990 - DNA, 25 bp, Homo sapien
aagtgtcacggccacgcacagccga

SEQ ID NO: 1307991 - DNA, 25 bp, Homo sapien
ctcgctgagcgacggtgctgggggc

SEQ ID NO: 1307992 - DNA, 25 bp, Homo sapien
gcgcccagcgtaggggcaggaatga

SEQ ID NO: 1307993 - DNA, 25 bp, Homo sapien
ccccgccgaggggcagtcacgccct

SEQ ID NO: 1307994 - DNA, 25 bp, Homo sapien
gggcagtcacgccctgaatgtcaca

SEQ ID NO: 1307995 - DNA, 25 bp, Homo sapien
aggcccgtccgcttaggagactctc

SEQ ID NO: 1307996 - DNA, 25 bp, Homo sapien
cccgtccgcttaggagactctcctt

SEQ ID NO: 1307997 - DNA, 25 bp, Homo sapien
cccaggcccgtccgcttaggagact

SEQ ID NO: 1307998 - DNA, 25 bp, Homo sapien
cgtccgcttaggagactctccttcg

SEQ ID NO: 1307999 - DNA, 25 bp, Homo sapien
ctcggagccgctggcaggcgtcccc

SEQ ID NO: 1308000 - DNA, 25 bp, Homo sapien
cggagccgctggcaggcgtccccca

SEQ ID NO: 1308001 - DNA, 25 bp, Homo sapien
ctgtgcccggcctcggagccgctgg

SEQ ID NO: 1308002 - DNA, 25 bp, Homo sapien
ggagccgctggcaggcgtcccccac

SEQ ID NO: 1308003 - DNA, 25 bp, Homo sapien
tagccaatgttgtctaatccatata

SEQ ID NO: 1308004 - DNA, 25 bp, Homo sapien
ccagattcaattattataaactctt

SEQ ID NO: 1308005 - DNA, 25 bp, Homo sapien
ttatcatgacaagtttcaaacatat

SEQ ID NO: 1308006 - DNA, 25 bp, Homo sapien
tcttagccaatgttgtctaatccat

SEQ ID NO: 1308007 - DNA, 25 bp, Homo sapien
attttatacatcacaacctatgagg

SEQ ID NO: 1308008 - DNA, 25 bp, Homo sapien
caaagtctgaagttaatcagactcc

SEQ ID NO: 1308009 - DNA, 25 bp, Homo sapien
gaggtcaattcctatatcattaacc

SEQ ID NO: 1308010 - DNA, 25 bp, Homo sapien
taccactatccccacacagtttaat

SEQ ID NO: 1308011 - DNA, 25 bp, Homo sapien
cctgctgtaactctatccctgctga

SEQ ID NO: 1308012 - DNA, 25 bp, Homo sapien
caccactacgaaccaatgaagcaag

SEQ ID NO: 1308013 - DNA, 25 bp, Homo sapien
aatgaagcaagaacgcagccatgcc

SEQ ID NO: 1308014 - DNA, 25 bp, Homo sapien
ggccctaataatttcacaagagtca

SEQ ID NO: 1308015 - DNA, 25 bp, Homo sapien
cccactaaattgcagtaggacttta

SEQ ID NO: 1308016 - DNA, 25 bp, Homo sapien
ggactttagtaataaatcagaggac

SEQ ID NO: 1308017 - DNA, 25 bp, Homo sapien
cctcccactaaattgcagtaggact

SEQ ID NO: 1308018 - DNA, 25 bp, Homo sapien
taaatcagaggacagtatatgtggg

SEQ ID NO: 1308019 - DNA, 25 bp, Homo sapien
aaatgtttgcaagacagtgactgag

SEQ ID NO: 1308020 - DNA, 25 bp, Homo sapien
gagttcacagtcaaatagtctcaaa

SEQ ID NO: 1308021 - DNA, 25 bp, Homo sapien
tctagtttggaagaaaactgcatat

SEQ ID NO: 1308022 - DNA, 25 bp, Homo sapien
gagactattttttgactgttacaga

SEQ ID NO: 1308023 - DNA, 25 bp, Homo sapien
tcagcaataggacctaaaggcaggt

SEQ ID NO: 1308024 - DNA, 25 bp, Homo sapien
gctgattgatggacccttcctgaca

SEQ ID NO: 1308025 - DNA, 25 bp, Homo sapien
tcctgacaagctgacatggccaaat

SEQ ID NO: 1308026 - DNA, 25 bp, Homo sapien
gaagaaccttgcaatactatcccat

SEQ ID NO: 1308027 - DNA, 25 bp, Homo sapien
tcattcattaagctcgatttccttg

SEQ ID NO: 1308028 - DNA, 25 bp, Homo sapien
cattaagctcgatttccttgagacc

SEQ ID NO: 1308029 - DNA, 25 bp, Homo sapien
gatttccttgagacccaagcagtct

SEQ ID NO: 1308030 - DNA, 25 bp, Homo sapien
gctcgatttccttgagacccaagca

SEQ ID NO: 1308031 - DNA, 25 bp, Homo sapien
gatggcagaactgcaagtatccagc

SEQ ID NO: 1308032 - DNA, 25 bp, Homo sapien
cacgcatctgatacactgagctctt

SEQ ID NO: 1308033 - DNA, 25 bp, Homo sapien
gaggaaaagctatcagagactggaa

SEQ ID NO: 1308034 - DNA, 25 bp, Homo sapien
gattggcgctcatgaaagagtctgg

SEQ ID NO: 1308035 - DNA, 25 bp, Homo sapien
ttcccgggcctaagaaggtgactgc

SEQ ID NO: 1308036 - DNA, 25 bp, Homo sapien
tatgtccttggtacagatgagcccg

SEQ ID NO: 1308037 - DNA, 25 bp, Homo sapien
caagaaaggcttccctataaggagt

SEQ ID NO: 1308038 - DNA, 25 bp, Homo sapien
caggagactctccaagaggaggcca

SEQ ID NO: 1308039 - DNA, 25 bp, Homo sapien
tccaggcagctgttgaggctcagca

SEQ ID NO: 1308040 - DNA, 25 bp, Homo sapien
ggcgcgacaccggtctccgttgtct

SEQ ID NO: 1308041 - DNA, 25 bp, Homo sapien
tcctggtggaagaggcgcacgaaga

SEQ ID NO: 1308042 - DNA, 25 bp, Homo sapien
tgcaggatgtcgagcgtggaggcgg

SEQ ID NO: 1308043 - DNA, 25 bp, Homo sapien
gcgccagactgagggcgaagaccag

SEQ ID NO: 1308044 - DNA, 25 bp, Homo sapien
tgcgcgccggcggttgcagggcccg

SEQ ID NO: 1308045 - DNA, 25 bp, Homo sapien
caggaccatggtcttggccgcgcgc

SEQ ID NO: 1308046 - DNA, 25 bp, Homo sapien
ggccagagggcgccttgagcgcccg

SEQ ID NO: 1308047 - DNA, 25 bp, Homo sapien
cgagcttgcccagcggtgctccagg

SEQ ID NO: 1308048 - DNA, 25 bp, Homo sapien
gtggcggaggccagccccgagcttg

SEQ ID NO: 1308049 - DNA, 25 bp, Homo sapien
cgccagccaggcgaaggcgcaggca

SEQ ID NO: 1308050 - DNA, 25 bp, Homo sapien
gaaggcggccgcgaaggccaccgtg

SEQ ID NO: 1308051 - DNA, 25 bp, Homo sapien
gatgagcgcggcgaagaccaccgcc

SEQ ID NO: 1308052 - DNA, 25 bp, Homo sapien
gaccaccgccgcataggtggacacg

SEQ ID NO: 1308053 - DNA, 25 bp, Homo sapien
ccgcataggtggacacgtagtaggt

SEQ ID NO: 1308054 - DNA, 25 bp, Homo sapien
cggcgaagaccaccgccgcataggt

SEQ ID NO: 1308055 - DNA, 25 bp, Homo sapien
caggtagtaggtgagccacagctgc

SEQ ID NO: 1308056 - DNA, 25 bp, Homo sapien
gcgtgagcgtgaagaactcatcaac

SEQ ID NO: 1308057 - DNA, 25 bp, Homo sapien
acagctgcagcgtgagcgtgaagaa

SEQ ID NO: 1308058 - DNA, 25 bp, Homo sapien
aggtagtaggtgagccacagctgca

SEQ ID NO: 1308059 - DNA, 25 bp, Homo sapien
atgaacattgccagggccgccacgt

SEQ ID NO: 1308060 - DNA, 25 bp, Homo sapien
ataggccgcgggcaccacgatgaag

SEQ ID NO: 1308061 - DNA, 25 bp, Homo sapien
gcgcccgccgctgcggatgaacatt

SEQ ID NO: 1308062 - DNA, 25 bp, Homo sapien
atgaagcgagcagggtcatcccaga

SEQ ID NO: 1308063 - DNA, 25 bp, Homo sapien
ggaggctagcgacaaaggcagcccc

SEQ ID NO: 1308064 - DNA, 25 bp, Homo sapien
cggaggctagcgacaaaggcagccc

SEQ ID NO: 1308065 - DNA, 25 bp, Homo sapien
actgcggaggctagcgacaaaggca

SEQ ID NO: 1308066 - DNA, 25 bp, Homo sapien
gttactgcggaggctagcgacaaag

SEQ ID NO: 1308067 - DNA, 25 bp, Homo sapien
gcttttgccactctcaagcctttca

SEQ ID NO: 1308068 - DNA, 25 bp, Homo sapien
cttggtgaaggtcctctcccagaga

SEQ ID NO: 1308069 - DNA, 25 bp, Homo sapien
agaggtgccccagcgcttgcctgga

SEQ ID NO: 1308070 - DNA, 25 bp, Homo sapien
ggctgggctgaaaagcttttgccac

SEQ ID NO: 1308071 - DNA, 25 bp, Homo sapien
tctgtgttctaccatgttcctgctg

SEQ ID NO: 1308072 - DNA, 25 bp, Homo sapien
tcaacactggctgaccctggatatt

SEQ ID NO: 1308073 - DNA, 25 bp, Homo sapien
gaggtatacttacaccaaggcatta

SEQ ID NO: 1308074 - DNA, 25 bp, Homo sapien
gcagtgccaggtagacaaaatgtct

SEQ ID NO: 1308075 - DNA, 25 bp, Homo sapien
agagtcttcttcctagtgggtctga

SEQ ID NO: 1308076 - DNA, 25 bp, Homo sapien
gagtcttcttcctagtgggtctgac

SEQ ID NO: 1308077 - DNA, 25 bp, Homo sapien
tagagtcttcttcctagtgggtctg

SEQ ID NO: 1308078 - DNA, 25 bp, Homo sapien
ctgggatacaggtgcttagtgactc

SEQ ID NO: 1308079 - DNA, 25 bp, Homo sapien
tcttagtctgggctaagagctggcc

SEQ ID NO: 1308080 - DNA, 25 bp, Homo sapien
taagagctggccgacattcagcagc

SEQ ID NO: 1308081 - DNA, 25 bp, Homo sapien
acaggtgcttagtgactctttcaga

SEQ ID NO: 1308082 - DNA, 25 bp, Homo sapien
tcatgagcagaatcaagaacaagtt

SEQ ID NO: 1308083 - DNA, 25 bp, Homo sapien
gccaaataccttcagcgggaacacc

SEQ ID NO: 1308084 - DNA, 25 bp, Homo sapien
atctcttgcagcatcggtgggccca

SEQ ID NO: 1308085 - DNA, 25 bp, Homo sapien
agcccacagctatttggtagttcag

SEQ ID NO: 1308086 - DNA, 25 bp, Homo sapien
tcagcaaactgcacgaacagggcat

SEQ ID NO: 1308087 - DNA, 25 bp, Homo sapien
cagcaaactgcacgaacagggcatt

SEQ ID NO: 1308088 - DNA, 25 bp, Homo sapien
acgagcgcgaagaagccgcccagca

SEQ ID NO: 1308089 - DNA, 25 bp, Homo sapien
agcagtacacgcagcaccgaaagca

SEQ ID NO: 1308090 - DNA, 25 bp, Homo sapien
tccgaaactggagccgagatctcct

SEQ ID NO: 1308091 - DNA, 25 bp, Homo sapien
gagagcttggccaaccccacgagcg

SEQ ID NO: 1308092 - DNA, 25 bp, Homo sapien
catttatagttacccaagctgctta

SEQ ID NO: 1308093 - DNA, 25 bp, Homo sapien
gctggttggctagaagactgaaatg

SEQ ID NO: 1308094 - DNA, 25 bp, Homo sapien
tagttgtgacagtatggcctgcaaa

SEQ ID NO: 1308095 - DNA, 25 bp, Homo sapien
taagccctggtatattgggccagaa

SEQ ID NO: 1308096 - DNA, 25 bp, Homo sapien
gacttcactgttaagcaatgtgcat

SEQ ID NO: 1308097 - DNA, 25 bp, Homo sapien
caagtcttagggcagggccagaacc

SEQ ID NO: 1308098 - DNA, 25 bp, Homo sapien
tccttggaattaaagatgtgactgc

SEQ ID NO: 1308099 - DNA, 25 bp, Homo sapien
taaatctgaagatagctctgttagc

SEQ ID NO: 1308100 - DNA, 25 bp, Homo sapien
gataagtaggccagctttccaaccc

SEQ ID NO: 1308101 - DNA, 25 bp, Homo sapien
tttctgccactaaacgttcacggtg

SEQ ID NO: 1308102 - DNA, 25 bp, Homo sapien
cttcagcatgaagcggtaaactcac

SEQ ID NO: 1308103 - DNA, 25 bp, Homo sapien
agtcatgcttgcagccccatcggta

SEQ ID NO: 1308104 - DNA, 25 bp, Homo sapien
ccagttatttgagtaggcatttcaa

SEQ ID NO: 1308105 - DNA, 25 bp, Homo sapien
agccagttatttgagtaggcatttc

SEQ ID NO: 1308106 - DNA, 25 bp, Homo sapien
gttatttgagtaggcatttcaatgc

SEQ ID NO: 1308107 - DNA, 25 bp, Homo sapien
tcaaagccagttatttgagtaggca

SEQ ID NO: 1308108 - DNA, 25 bp, Homo sapien
gactctctgaccttttgaatcagct

SEQ ID NO: 1308109 - DNA, 25 bp, Homo sapien
gaagggcaaaccactttgactctct

SEQ ID NO: 1308110 - DNA, 25 bp, Homo sapien
tgatgactcatctatctgaagggca

SEQ ID NO: 1308111 - DNA, 25 bp, Homo sapien
gaatcagctggtcttcaatgtctgc

SEQ ID NO: 1308112 - DNA, 25 bp, Homo sapien
cattttgtctccagcacttgaaccc

SEQ ID NO: 1308113 - DNA, 25 bp, Homo sapien
tattctgtatcataagtctggaaaa

SEQ ID NO: 1308114 - DNA, 25 bp, Homo sapien
ggtggagaatcaagttctgcatcat

SEQ ID NO: 1308115 - DNA, 25 bp, Homo sapien
tgaactttcttttgatccaggacag

SEQ ID NO: 1308116 - DNA, 25 bp, Homo sapien
ttaagaatagatgataggccggcgc

SEQ ID NO: 1308117 - DNA, 25 bp, Homo sapien
caagtaatcccaagcacccaatagg

SEQ ID NO: 1308118 - DNA, 25 bp, Homo sapien
tcaggagggcaatttaggcaacagg

SEQ ID NO: 1308119 - DNA, 25 bp, Homo sapien
gcgttgccaacactgtgaaatcccg

SEQ ID NO: 1308120 - DNA, 25 bp, Homo sapien
tgtctgacattctttgtgctgtgta

SEQ ID NO: 1308121 - DNA, 25 bp, Homo sapien
atgtggtttgcaagaagtggccttg

SEQ ID NO: 1308122 - DNA, 25 bp, Homo sapien
ccttggtctgtgtgacgggtttgca

SEQ ID NO: 1308123 - DNA, 25 bp, Homo sapien
tgcatgatatgcctttgttctttaa

SEQ ID NO: 1308124 - DNA, 25 bp, Homo sapien
ttgggaagatggaaatttcatagca

SEQ ID NO: 1308125 - DNA, 25 bp, Homo sapien
attgggaagatggaaatttcatagc

SEQ ID NO: 1308126 - DNA, 25 bp, Homo sapien
gggaagatggaaatttcatagcatc

SEQ ID NO: 1308127 - DNA, 25 bp, Homo sapien
agattgggaagatggaaatttcata

SEQ ID NO: 1308128 - DNA, 25 bp, Homo sapien
tagaaatactccacatagggaaaac

SEQ ID NO: 1308129 - DNA, 25 bp, Homo sapien
tagggcagctacatgaaatatgagg

SEQ ID NO: 1308130 - DNA, 25 bp, Homo sapien
tagggaaaacatatatagggcagct

SEQ ID NO: 1308131 - DNA, 25 bp, Homo sapien
ggaaagaagcattctcagagtacat

SEQ ID NO: 1308132 - DNA, 25 bp, Homo sapien
ctttactgttagttgtgcccaaggc

SEQ ID NO: 1308133 - DNA, 25 bp, Homo sapien
tggtcaaaagcctatggcagtcact

SEQ ID NO: 1308134 - DNA, 25 bp, Homo sapien
caaggcccggattgactgctaggac

SEQ ID NO: 1308135 - DNA, 25 bp, Homo sapien
gaggatttcttggtatgcagacaca

SEQ ID NO: 1308136 - DNA, 25 bp, Homo sapien
atattagaatgccatatccaaagtg

SEQ ID NO: 1308137 - DNA, 25 bp, Homo sapien
aagcccaagtggcattatcaagaaa

SEQ ID NO: 1308138 - DNA, 25 bp, Homo sapien
aataagcccaagtggcattatcaag

SEQ ID NO: 1308139 - DNA, 25 bp, Homo sapien
agcccaagtggcattatcaagaaaa

SEQ ID NO: 1308140 - DNA, 25 bp, Homo sapien
atcttgaatgatctttgctgcctct

SEQ ID NO: 1308141 - DNA, 25 bp, Homo sapien
agtgttccctgtagataaggtagca

SEQ ID NO: 1308142 - DNA, 25 bp, Homo sapien
ttagtgttccctgtagataaggtag

SEQ ID NO: 1308143 - DNA, 25 bp, Homo sapien
tagtgttccctgtagataaggtagc

SEQ ID NO: 1308144 - DNA, 25 bp, Homo sapien
gagctccgtcacagcagtttttgct

SEQ ID NO: 1308145 - DNA, 25 bp, Homo sapien
cttgcagaagggagctccgtcacag

SEQ ID NO: 1308146 - DNA, 25 bp, Homo sapien
cagaagggagctccgtcacagcagt

SEQ ID NO: 1308147 - DNA, 25 bp, Homo sapien
gaagggagctccgtcacagcagttt

SEQ ID NO: 1308148 - DNA, 25 bp, Homo sapien
cattaataagactgcagaggtaggc

SEQ ID NO: 1308149 - DNA, 25 bp, Homo sapien
caaagctctgtcaatcaggtagcac

SEQ ID NO: 1308150 - DNA, 25 bp, Homo sapien
taggcaatggccagactgcaaagag

SEQ ID NO: 1308151 - DNA, 25 bp, Homo sapien
gaatattctactaccagcctgactg

SEQ ID NO: 1308152 - DNA, 25 bp, Homo sapien
atgacaaaactccaagacacaaaat

SEQ ID NO: 1308153 - DNA, 25 bp, Homo sapien
tgacaaaactccaagacacaaaata

SEQ ID NO: 1308154 - DNA, 25 bp, Homo sapien
gatgacaaaactccaagacacaaaa

SEQ ID NO: 1308155 - DNA, 25 bp, Homo sapien
tggactcgcttagtttaccctgtcg

SEQ ID NO: 1308156 - DNA, 25 bp, Homo sapien
gaaatgtttaatgttgcctcgccac

SEQ ID NO: 1308157 - DNA, 25 bp, Homo sapien
gttgcctcgccactttatggactcg

SEQ ID NO: 1308158 - DNA, 25 bp, Homo sapien
cctgtcgtttacaaccatcacactt

SEQ ID NO: 1308159 - DNA, 25 bp, Homo sapien
tcgttctccaaagtcacgggcagag

SEQ ID NO: 1308160 - DNA, 25 bp, Homo sapien
gtagctgcacatcttacagtagttt

SEQ ID NO: 1308161 - DNA, 25 bp, Homo sapien
aatttggacatacaatcttcacaac

SEQ ID NO: 1308162 - DNA, 25 bp, Homo sapien
tctaacttgccctccaatcgatttt

SEQ ID NO: 1308163 - DNA, 25 bp, Homo sapien
tcaacccctgagaatcgcacagtct

SEQ ID NO: 1308164 - DNA, 25 bp, Homo sapien
gaatggcttatcaacccctgagaat

SEQ ID NO: 1308165 - DNA, 25 bp, Homo sapien
ttatcaacccctgagaatcgcacag

SEQ ID NO: 1308166 - DNA, 25 bp, Homo sapien
ttcactacagaatggcttatcaacc

SEQ ID NO: 1308167 - DNA, 25 bp, Homo sapien
cacaaaagtgtttctactggatgag

SEQ ID NO: 1308168 - DNA, 25 bp, Homo sapien
aacaacagtccattaagagccaact

SEQ ID NO: 1308169 - DNA, 25 bp, Homo sapien
actggatgagtttatatacaatccc

SEQ ID NO: 1308170 - DNA, 25 bp, Homo sapien
cagttgctttatctttaagaactcc

SEQ ID NO: 1308171 - DNA, 25 bp, Homo sapien
gatggttacagtgctgacacttgag

SEQ ID NO: 1308172 - DNA, 25 bp, Homo sapien
tgctgggattgttcagcaagaggtt

SEQ ID NO: 1308173 - DNA, 25 bp, Homo sapien
gtatgggttaaagcaacttgctggg

SEQ ID NO: 1308174 - DNA, 25 bp, Homo sapien
cacttgagtttaacaactgtatggg

SEQ ID NO: 1308175 - DNA, 25 bp, Homo sapien
gaaacggcagaggtgttacctcctc

SEQ ID NO: 1308176 - DNA, 25 bp, Homo sapien
gcagaggtgttacctcctcctattg

SEQ ID NO: 1308177 - DNA, 25 bp, Homo sapien
agaggtgttacctcctcctattgac

SEQ ID NO: 1308178 - DNA, 25 bp, Homo sapien
aacggcagaggtgttacctcctcct

SEQ ID NO: 1308179 - DNA, 25 bp, Homo sapien
gcgggcttacaaccacttggccctg

SEQ ID NO: 1308180 - DNA, 25 bp, Homo sapien
caggggcaccgccgaagagtttgtt

SEQ ID NO: 1308181 - DNA, 25 bp, Homo sapien
acaggggcaccgccgaagagtttgt

SEQ ID NO: 1308182 - DNA, 25 bp, Homo sapien
ctggaggagggcgggcttacaacca

SEQ ID NO: 1308183 - DNA, 25 bp, Homo sapien
gcctaacagaaccacatgcataatg

SEQ ID NO: 1308184 - DNA, 25 bp, Homo sapien
actgtgccacagatcgatgcctaac

SEQ ID NO: 1308185 - DNA, 25 bp, Homo sapien
tgcataatgtgctaccttagatcat

SEQ ID NO: 1308186 - DNA, 25 bp, Homo sapien
taagaacaggccttcagcagttaac

SEQ ID NO: 1308187 - DNA, 25 bp, Homo sapien
agctgcagaagctgtatatagttcc

SEQ ID NO: 1308188 - DNA, 25 bp, Homo sapien
ctgcagaagctgtatatagttccat

SEQ ID NO: 1308189 - DNA, 25 bp, Homo sapien
ctgtatatagttccatttgacatgg

SEQ ID NO: 1308190 - DNA, 25 bp, Homo sapien
gctgcagaagctgtatatagttcca

SEQ ID NO: 1308191 - DNA, 25 bp, Homo sapien
aagcagttacgtttttcttcaatag

SEQ ID NO: 1308192 - DNA, 25 bp, Homo sapien
gaaatctaaccacaactaacctcta

SEQ ID NO: 1308193 - DNA, 25 bp, Homo sapien
taaaaacaatgattaagttatacca

SEQ ID NO: 1308194 - DNA, 25 bp, Homo sapien
taacctctattaagtcccacttaca

SEQ ID NO: 1308195 - DNA, 25 bp, Homo sapien
ccccagggcatatggaggaatttgg

SEQ ID NO: 1308196 - DNA, 25 bp, Homo sapien
tccccagggcatatggaggaatttg

SEQ ID NO: 1308197 - DNA, 25 bp, Homo sapien
cctttcaacaacagagtgaggcgct

SEQ ID NO: 1308198 - DNA, 25 bp, Homo sapien
gtagaaccagactgccaaaaatggc

SEQ ID NO: 1308199 - DNA, 25 bp, Homo sapien
tagtgtatcacagaaacctttcaac

SEQ ID NO: 1308200 - DNA, 25 bp, Homo sapien
aaagttcaggctcctaaccactaca

SEQ ID NO: 1308201 - DNA, 25 bp, Homo sapien
tatttcatgctcacagaaaatcatg

SEQ ID NO: 1308202 - DNA, 25 bp, Homo sapien
tattctcatgagacagtgttgacca

SEQ ID NO: 1308203 - DNA, 25 bp, Homo sapien
tagtaaccggcttaatccattattc

SEQ ID NO: 1308204 - DNA, 25 bp, Homo sapien
accgcgccggccttacaagatactt

SEQ ID NO: 1308205 - DNA, 25 bp, Homo sapien
tagctatgaagggagccttaaaaaa

SEQ ID NO: 1308206 - DNA, 25 bp, Homo sapien
cacatttgtaaattcttagctatga

SEQ ID NO: 1308207 - DNA, 25 bp, Homo sapien
tgtaaattcttagctatgaagggag

SEQ ID NO: 1308208 - DNA, 25 bp, Homo sapien
gcaaaaccctatctcgatttcaaaa

SEQ ID NO: 1308209 - DNA, 25 bp, Homo sapien
ccctcacaccatcagaatctatccc

SEQ ID NO: 1308210 - DNA, 25 bp, Homo sapien
tcacaccatcagaatctatcccatt

SEQ ID NO: 1308211 - DNA, 25 bp, Homo sapien
acaccatcagaatctatcccatttt

SEQ ID NO: 1308212 - DNA, 25 bp, Homo sapien
acaatcatccctcacaccatcagaa

SEQ ID NO: 1308213 - DNA, 25 bp, Homo sapien
cacatatcaggatggactaatggga

SEQ ID NO: 1308214 - DNA, 25 bp, Homo sapien
aggatggactaatgggaggagctca

SEQ ID NO: 1308215 - DNA, 25 bp, Homo sapien
tcacatatcaggatggactaatggg

SEQ ID NO: 1308216 - DNA, 25 bp, Homo sapien
atatcaggatggactaatgggagga

SEQ ID NO: 1308217 - DNA, 25 bp, Homo sapien
gctactatagcaatagctcccacag

SEQ ID NO: 1308218 - DNA, 25 bp, Homo sapien
gaaaaacaggcatcactacaaagac

SEQ ID NO: 1308219 - DNA, 25 bp, Homo sapien
aaccttctgggattggcaaggacca

SEQ ID NO: 1308220 - DNA, 25 bp, Homo sapien
gcttgtatgccgtgacacttgttga

SEQ ID NO: 1308221 - DNA, 25 bp, Homo sapien
ttctttagctcataagatgacaagc

SEQ ID NO: 1308222 - DNA, 25 bp, Homo sapien
taggataggaattctcaaagcgagt

SEQ ID NO: 1308223 - DNA, 25 bp, Homo sapien
gatgacaagcatgattggctgcaga

SEQ ID NO: 1308224 - DNA, 25 bp, Homo sapien
tcttctgacacatactgcacttagt

SEQ ID NO: 1308225 - DNA, 25 bp, Homo sapien
tcaaagtcatattgctagtaggcaa

SEQ ID NO: 1308226 - DNA, 25 bp, Homo sapien
ggcaatctgattctagtctatggaa

SEQ ID NO: 1308227 - DNA, 25 bp, Homo sapien
ggttaagtattactgtaactgccac

SEQ ID NO: 1308228 - DNA, 25 bp, Homo sapien
tgaaatactaatccaggcaatctga

SEQ ID NO: 1308229 - DNA, 25 bp, Homo sapien
gctgtgatcactctaccatgggcaa

SEQ ID NO: 1308230 - DNA, 25 bp, Homo sapien
agaaagttaaacatctagcccgaag

SEQ ID NO: 1308231 - DNA, 25 bp, Homo sapien
gtaaagcaacaatgaccccacaagg

SEQ ID NO: 1308232 - DNA, 25 bp, Homo sapien
tctgaaccttacacatgcaaatgag

SEQ ID NO: 1308233 - DNA, 25 bp, Homo sapien
gaagaatgtctggtgatgcatcgtg

SEQ ID NO: 1308234 - DNA, 25 bp, Homo sapien
gatgcatcgtgtggagcagaagagc

SEQ ID NO: 1308235 - DNA, 25 bp, Homo sapien
ctgtcttatgatatgcagtttggcc

SEQ ID NO: 1308236 - DNA, 25 bp, Homo sapien
agcagaagagctgagtagatcctgt

SEQ ID NO: 1308237 - DNA, 25 bp, Homo sapien
aaaaccttaatagcaacagctggaa

SEQ ID NO: 1308238 - DNA, 25 bp, Homo sapien
aaccttaatagcaacagctggaact

SEQ ID NO: 1308239 - DNA, 25 bp, Homo sapien
aaaaaaccttaatagcaacagctgg

SEQ ID NO: 1308240 - DNA, 25 bp, Homo sapien
acaaaaaaccttaatagcaacagct

SEQ ID NO: 1308241 - DNA, 25 bp, Homo sapien
ttggctgttggacacatccatactc

SEQ ID NO: 1308242 - DNA, 25 bp, Homo sapien
agtttttggctgttggacacatcca

SEQ ID NO: 1308243 - DNA, 25 bp, Homo sapien
ttttggctgttggacacatccatac

SEQ ID NO: 1308244 - DNA, 25 bp, Homo sapien
gtttttggctgttggacacatccat

SEQ ID NO: 1308245 - DNA, 25 bp, Homo sapien
ttgccacattcaccatccaaaggtt

SEQ ID NO: 1308246 - DNA, 25 bp, Homo sapien
gctcctgctgtggtaccactgcttt

SEQ ID NO: 1308247 - DNA, 25 bp, Homo sapien
tctttaattttgtccagaagctcct

SEQ ID NO: 1308248 - DNA, 25 bp, Homo sapien
gagcattgtctggttcttctttaat

SEQ ID NO: 1308249 - DNA, 25 bp, Homo sapien
tcaaagagtgtctcaggctcaaacg

SEQ ID NO: 1308250 - DNA, 25 bp, Homo sapien
attttttacctcaaagagtgtctca

SEQ ID NO: 1308251 - DNA, 25 bp, Homo sapien
caggctcaaacgaatagatttcttc

SEQ ID NO: 1308252 - DNA, 25 bp, Homo sapien
ttcttggtaatggatagttggacac

SEQ ID NO: 1308253 - DNA, 25 bp, Homo sapien
aatacatactcaggcttattctttt

SEQ ID NO: 1308254 - DNA, 25 bp, Homo sapien
acatactcaggcttattcttttttc

SEQ ID NO: 1308255 - DNA, 25 bp, Homo sapien
catactcaggcttattcttttttct

SEQ ID NO: 1308256 - DNA, 25 bp, Homo sapien
ctaaaatacatactcaggcttattc

SEQ ID NO: 1308257 - DNA, 25 bp, Homo sapien
gaatcagtacttagaggcccacgtc

SEQ ID NO: 1308258 - DNA, 25 bp, Homo sapien
gaggcttcacggctcggcatttgaa

SEQ ID NO: 1308259 - DNA, 25 bp, Homo sapien
gaattagaccagcagaccaagacgt

SEQ ID NO: 1308260 - DNA, 25 bp, Homo sapien
ttctcggcctaacgctagatgtgag

SEQ ID NO: 1308261 - DNA, 25 bp, Homo sapien
ctttcaaggtctccgtgtgaggggt

SEQ ID NO: 1308262 - DNA, 25 bp, Homo sapien
ctcagagccccgcttcacaatcgcc

SEQ ID NO: 1308263 - DNA, 25 bp, Homo sapien
tggggggcatcaagcccctcagagc

SEQ ID NO: 1308264 - DNA, 25 bp, Homo sapien
agagccccgcttcacaatcgccttc

SEQ ID NO: 1308265 - DNA, 25 bp, Homo sapien
ctctgagaaccgcacgctttccgaa

SEQ ID NO: 1308266 - DNA, 25 bp, Homo sapien
acaaaatatctacgggcgctcatcc

SEQ ID NO: 1308267 - DNA, 25 bp, Homo sapien
gagaaccgcacgctttccgaaattc

SEQ ID NO: 1308268 - DNA, 25 bp, Homo sapien
tcgccacaaaatatctacgggcgct

SEQ ID NO: 1308269 - DNA, 25 bp, Homo sapien
gtccctaaggcgatatccgcagccg

SEQ ID NO: 1308270 - DNA, 25 bp, Homo sapien
agcggtggactagccagtgaatgtc

SEQ ID NO: 1308271 - DNA, 25 bp, Homo sapien
gaatgtcaacgcgtccctaaggcga

SEQ ID NO: 1308272 - DNA, 25 bp, Homo sapien
tctccgactgagagcggtggactag

SEQ ID NO: 1308273 - DNA, 25 bp, Homo sapien
ctcttctggaattccgcctgatcca

SEQ ID NO: 1308274 - DNA, 25 bp, Homo sapien
tgatccatcccaacgcaacgaccgg

SEQ ID NO: 1308275 - DNA, 25 bp, Homo sapien
ctaccggaggagcactggaatagga

SEQ ID NO: 1308276 - DNA, 25 bp, Homo sapien
tgtcgcctccctgctaccggaggag

SEQ ID NO: 1308277 - DNA, 25 bp, Homo sapien
ttcagacttccatgcgtcgctgatg

SEQ ID NO: 1308278 - DNA, 25 bp, Homo sapien
tgcaaatcactttacatctagctgg

SEQ ID NO: 1308279 - DNA, 25 bp, Homo sapien
ccgcgcctgctattaggtgtattga

SEQ ID NO: 1308280 - DNA, 25 bp, Homo sapien
tacagtgtcgtgttcataactccca

SEQ ID NO: 1308281 - DNA, 25 bp, Homo sapien
tactgaggagatgactgggacccac

SEQ ID NO: 1308282 - DNA, 25 bp, Homo sapien
tgggacccacttacataggactatc

SEQ ID NO: 1308283 - DNA, 25 bp, Homo sapien
ccttaagaggaaacgaccagtcagt

SEQ ID NO: 1308284 - DNA, 25 bp, Homo sapien
gacaagagaagcttactggcccagc

SEQ ID NO: 1308285 - DNA, 25 bp, Homo sapien
cccacaatgcatgagagtgcctatt

SEQ ID NO: 1308286 - DNA, 25 bp, Homo sapien
aagtgtggtactgcacacccgaagt

SEQ ID NO: 1308287 - DNA, 25 bp, Homo sapien
tgagggcctacacaggaaggaagat

SEQ ID NO: 1308288 - DNA, 25 bp, Homo sapien
taaggattgtgccagtttacagtcc

SEQ ID NO: 1308289 - DNA, 25 bp, Homo sapien
tcccttaccctctcatcaattttga

SEQ ID NO: 1308290 - DNA, 25 bp, Homo sapien
ggagtgtacggtggcgtgatattgg

SEQ ID NO: 1308291 - DNA, 25 bp, Homo sapien
tttttctaggagaacatctatttca

SEQ ID NO: 1308292 - DNA, 25 bp, Homo sapien
aatgcatttgcctagagttgtagaa

SEQ ID NO: 1308293 - DNA, 25 bp, Homo sapien
gaaccccaaaggctgtggttgcagt

SEQ ID NO: 1308294 - DNA, 25 bp, Homo sapien
gaatagcttgaaccccaaaggctgt

SEQ ID NO: 1308295 - DNA, 25 bp, Homo sapien
agaaaataggctggggacggtagct

SEQ ID NO: 1308296 - DNA, 25 bp, Homo sapien
aagagagaaaataggctggggacgg

SEQ ID NO: 1308297 - DNA, 25 bp, Homo sapien
ggttggaaatcgctctcgctttgcc

SEQ ID NO: 1308298 - DNA, 25 bp, Homo sapien
tgtggttggaaatcgctctcgcttt

SEQ ID NO: 1308299 - DNA, 25 bp, Homo sapien
tcggtgtggttggaaatcgctctcg

SEQ ID NO: 1308300 - DNA, 25 bp, Homo sapien
gttggaaatcgctctcgctttgcca

SEQ ID NO: 1308301 - DNA, 25 bp, Homo sapien
tctgtagatttccatgttctggcca

SEQ ID NO: 1308302 - DNA, 25 bp, Homo sapien
tatgatacacctattattccccatc

SEQ ID NO: 1308303 - DNA, 25 bp, Homo sapien
ttcaagctttactcatgctgtggca

SEQ ID NO: 1308304 - DNA, 25 bp, Homo sapien
catttcatgtgaatacaatatgtgg

SEQ ID NO: 1308305 - DNA, 25 bp, Homo sapien
gaagtcaggtaaattctagaaaata

SEQ ID NO: 1308306 - DNA, 25 bp, Homo sapien
tgaagtcaggtaaattctagaaaat

SEQ ID NO: 1308307 - DNA, 25 bp, Homo sapien
ttgaagtcaggtaaattctagaaaa

SEQ ID NO: 1308308 - DNA, 25 bp, Homo sapien
gttgaagtcaggtaaattctagaaa

SEQ ID NO: 1308309 - DNA, 25 bp, Homo sapien
cctccttccactccttctcgttggt

SEQ ID NO: 1308310 - DNA, 25 bp, Homo sapien
gttttctggacacagctcacctgat

SEQ ID NO: 1308311 - DNA, 25 bp, Homo sapien
tccactccttctcgttggttttctg

SEQ ID NO: 1308312 - DNA, 25 bp, Homo sapien
cactccttctcgttggttttctgga

SEQ ID NO: 1308313 - DNA, 25 bp, Homo sapien
cattatataactgtcaagtgaacta

SEQ ID NO: 1308314 - DNA, 25 bp, Homo sapien
aatcttattaatcggcctggcgcag

SEQ ID NO: 1308315 - DNA, 25 bp, Homo sapien
cataacattatataactgtcaagtg

SEQ ID NO: 1308316 - DNA, 25 bp, Homo sapien
tccaaaggatacaagaatcagagtt

SEQ ID NO: 1308317 - DNA, 25 bp, Homo sapien
gggcctttctgaagacagtttaaca

SEQ ID NO: 1308318 - DNA, 25 bp, Homo sapien
ttaatggttcccacattagtattgt

SEQ ID NO: 1308319 - DNA, 25 bp, Homo sapien
gacagtttaacagactaagaatcat

SEQ ID NO: 1308320 - DNA, 25 bp, Homo sapien
aatggttcccacattagtattgtta

SEQ ID NO: 1308321 - DNA, 25 bp, Homo sapien
ctagaaacgttgtcagtctgcttgt

SEQ ID NO: 1308322 - DNA, 25 bp, Homo sapien
cgttgtcagtctgcttgtggcttcc

SEQ ID NO: 1308323 - DNA, 25 bp, Homo sapien
ccctccttgattgactcacgctgtg

SEQ ID NO: 1308324 - DNA, 25 bp, Homo sapien
cacgctgtgtgatgtcttgagaagt

SEQ ID NO: 1308325 - DNA, 25 bp, Homo sapien
caaaaaatgttaacttgctcactgc

SEQ ID NO: 1308326 - DNA, 25 bp, Homo sapien
ctaggaatataggtgtaaagccacc

SEQ ID NO: 1308327 - DNA, 25 bp, Homo sapien
aaatgttaacttgctcactgcagcc

SEQ ID NO: 1308328 - DNA, 25 bp, Homo sapien
tgctaggaatataggtgtaaagcca

SEQ ID NO: 1308329 - DNA, 25 bp, Homo sapien
catgtgaatgagcactccaatatca

SEQ ID NO: 1308330 - DNA, 25 bp, Homo sapien
ttcatgtgaatgagcactccaatat

SEQ ID NO: 1308331 - DNA, 25 bp, Homo sapien
tcatgtgaatgagcactccaatatc

SEQ ID NO: 1308332 - DNA, 25 bp, Homo sapien
atgtgaatgagcactccaatatcag

SEQ ID NO: 1308333 - DNA, 25 bp, Homo sapien
gttagggctggaaaagctatgcctt

SEQ ID NO: 1308334 - DNA, 25 bp, Homo sapien
gctatgccttactgggacagcaagg

SEQ ID NO: 1308335 - DNA, 25 bp, Homo sapien
caacgctgtagttgttgtcctgcaa

SEQ ID NO: 1308336 - DNA, 25 bp, Homo sapien
ttcaccagtctgagcacaagtttga

SEQ ID NO: 1308337 - DNA, 25 bp, Homo sapien
gaaatgtgatgccagaatgcccacg

SEQ ID NO: 1308338 - DNA, 25 bp, Homo sapien
gaaagcaccggtatctgttccaagg

SEQ ID NO: 1308339 - DNA, 25 bp, Homo sapien
taatggattacgacacaggaaaccc

SEQ ID NO: 1308340 - DNA, 25 bp, Homo sapien
tcagcactggtgttcaaaagcaacg

SEQ ID NO: 1308341 - DNA, 25 bp, Homo sapien
caagcaggaatactacatccgggtc

SEQ ID NO: 1308342 - DNA, 25 bp, Homo sapien
ggtttcactaacatgagccaatggg

SEQ ID NO: 1308343 - DNA, 25 bp, Homo sapien
cacagtaagggtatcaaaagccaca

SEQ ID NO: 1308344 - DNA, 25 bp, Homo sapien
tgagtaagcttacaaccctgagtac

SEQ ID NO: 1308345 - DNA, 25 bp, Homo sapien
gccaattagcaccaagaaaagaggt

SEQ ID NO: 1308346 - DNA, 25 bp, Homo sapien
tacctactgttaggaagctgttcct

SEQ ID NO: 1308347 - DNA, 25 bp, Homo sapien
cagaaagtgctcagattgttccaac

SEQ ID NO: 1308348 - DNA, 25 bp, Homo sapien
ttttgcccaacagaagtagcacaag

SEQ ID NO: 1308349 - DNA, 25 bp, Homo sapien
tacaagccatttatagggcttgaga

SEQ ID NO: 1308350 - DNA, 25 bp, Homo sapien
tatagggcttgagatttgttggtct

SEQ ID NO: 1308351 - DNA, 25 bp, Homo sapien
atgcaacaaaatgacctttccactt

SEQ ID NO: 1308352 - DNA, 25 bp, Homo sapien
tgtaaaagttcaatacaagccattt

SEQ ID NO: 1308353 - DNA, 25 bp, Homo sapien
tcaaaggcctagacactctcatgct

SEQ ID NO: 1308354 - DNA, 25 bp, Homo sapien
tgctttcaatgtggaatacgtagcc

SEQ ID NO: 1308355 - DNA, 25 bp, Homo sapien
gtagaaagcaatacttagcctccag

SEQ ID NO: 1308356 - DNA, 25 bp, Homo sapien
tacgtagcctaatatgcatagaagc

SEQ ID NO: 1308357 - DNA, 25 bp, Homo sapien
taggtcaataaactgctaacatcca

SEQ ID NO: 1308358 - DNA, 25 bp, Homo sapien
tttacctgcccaaacagaccattta

SEQ ID NO: 1308359 - DNA, 25 bp, Homo sapien
gccataaacttgagggacattatac

SEQ ID NO: 1308360 - DNA, 25 bp, Homo sapien
tcagtggcacaaggtacactgccat

SEQ ID NO: 1308361 - DNA, 25 bp, Homo sapien
tctaccatatcctgctggagttcca

SEQ ID NO: 1308362 - DNA, 25 bp, Homo sapien
cctctaccatatcctgctggagttc

SEQ ID NO: 1308363 - DNA, 25 bp, Homo sapien
ctccctgcccaaagcgctcagtacg

SEQ ID NO: 1308364 - DNA, 25 bp, Homo sapien
tccctctaccatatcctgctggagt

SEQ ID NO: 1308365 - DNA, 25 bp, Homo sapien
tagtcaacgttcgtcgatacaatca

SEQ ID NO: 1308366 - DNA, 25 bp, Homo sapien
aacagttcattataagtagttgatg

SEQ ID NO: 1308367 - DNA, 25 bp, Homo sapien
gttccgtagtcaacgttcgtcgata

SEQ ID NO: 1308368 - DNA, 25 bp, Homo sapien
gatgtccatgtgtgttaagtaaata

SEQ ID NO: 1308369 - DNA, 25 bp, Homo sapien
cacaggtaccgggaacatagaaagg

SEQ ID NO: 1308370 - DNA, 25 bp, Homo sapien
caatgagtcgatccacaggtaccgg

SEQ ID NO: 1308371 - DNA, 25 bp, Homo sapien
ttacggtaatacatgccttgtggta

SEQ ID NO: 1308372 - DNA, 25 bp, Homo sapien
tgttcccacttgagccattctcata

SEQ ID NO: 1308373 - DNA, 25 bp, Homo sapien
gatttagtcacttaaccggcacagt

SEQ ID NO: 1308374 - DNA, 25 bp, Homo sapien
tgcctaaatagcagacccctcaggt

SEQ ID NO: 1308375 - DNA, 25 bp, Homo sapien
caaagacctactcaccagttagtgg

SEQ ID NO: 1308376 - DNA, 25 bp, Homo sapien
ttcccgaacagtgaaacacgaagct

SEQ ID NO: 1308377 - DNA, 25 bp, Homo sapien
gcattgactccttgttggcaaccgt

SEQ ID NO: 1308378 - DNA, 25 bp, Homo sapien
taccagcttaaagaatgagtttgcc

SEQ ID NO: 1308379 - DNA, 25 bp, Homo sapien
cgttatctgtttaggttaccacaca

SEQ ID NO: 1308380 - DNA, 25 bp, Homo sapien
gattcctacttatggcaaataccag

SEQ ID NO: 1308381 - DNA, 25 bp, Homo sapien
tactacgtcccacaggatacattac

SEQ ID NO: 1308382 - DNA, 25 bp, Homo sapien
ttggtactacgtcccacaggataca

SEQ ID NO: 1308383 - DNA, 25 bp, Homo sapien
atttccttggtactacgtcccacag

SEQ ID NO: 1308384 - DNA, 25 bp, Homo sapien
aatgagaatttccttggtactacgt

SEQ ID NO: 1308385 - DNA, 25 bp, Homo sapien
catggaaccactcatggttgctggt

SEQ ID NO: 1308386 - DNA, 25 bp, Homo sapien
cccatcatggaaccactcatggttg

SEQ ID NO: 1308387 - DNA, 25 bp, Homo sapien
gattagcttcataacctatgccacc

SEQ ID NO: 1308388 - DNA, 25 bp, Homo sapien
ttgctggtggaacgccaggattagc

SEQ ID NO: 1308389 - DNA, 25 bp, Homo sapien
tacaactccaccaggatactactct

SEQ ID NO: 1308390 - DNA, 25 bp, Homo sapien
caccaggatactactctctacttat

SEQ ID NO: 1308391 - DNA, 25 bp, Homo sapien
gttacaactccaccaggatactact

SEQ ID NO: 1308392 - DNA, 25 bp, Homo sapien
tactactctctacttatatcattaa

SEQ ID NO: 1308393 - DNA, 25 bp, Homo sapien
tcccatgttcattgctcctccgcca

SEQ ID NO: 1308394 - DNA, 25 bp, Homo sapien
cccatgttcattgctcctccgccac

SEQ ID NO: 1308395 - DNA, 25 bp, Homo sapien
ttgctcctccgccacccattcgcat

SEQ ID NO: 1308396 - DNA, 25 bp, Homo sapien
gttcattgctcctccgccacccatt

SEQ ID NO: 1308397 - DNA, 25 bp, Homo sapien
ccacagcaagcattcttaagaactg

SEQ ID NO: 1308398 - DNA, 25 bp, Homo sapien
aacttcctattcaaggccgggagca

SEQ ID NO: 1308399 - DNA, 25 bp, Homo sapien
ggtaaagttcaaaagttcatcatgt

SEQ ID NO: 1308400 - DNA, 25 bp, Homo sapien
gccgagcctgatggcaggcacttgt

SEQ ID NO: 1308401 - DNA, 25 bp, Homo sapien
tctctttggcgcctcatttgttctt

SEQ ID NO: 1308402 - DNA, 25 bp, Homo sapien
tggatccatgtagcccattcggctg

SEQ ID NO: 1308403 - DNA, 25 bp, Homo sapien
cacgttgacgaatcatcatctcttc

SEQ ID NO: 1308404 - DNA, 25 bp, Homo sapien
tagcccattcggctgtaactttcct

SEQ ID NO: 1308405 - DNA, 25 bp, Homo sapien
taattcttcctgtcgtctcatcaga

SEQ ID NO: 1308406 - DNA, 25 bp, Homo sapien
ttaattcttcctgtcgtctcatcag

SEQ ID NO: 1308407 - DNA, 25 bp, Homo sapien
gaagttcttccatgcgtcttaattc

SEQ ID NO: 1308408 - DNA, 25 bp, Homo sapien
tcttccatgcgtcttaattcttcct

SEQ ID NO: 1308409 - DNA, 25 bp, Homo sapien
gatgttcatgataggcatcttccat

SEQ ID NO: 1308410 - DNA, 25 bp, Homo sapien
gagaatattcgtactcaaacgtgcc

SEQ ID NO: 1308411 - DNA, 25 bp, Homo sapien
cgtactcaaacgtgccatgctgggc

SEQ ID NO: 1308412 - DNA, 25 bp, Homo sapien
tccaaagacttccatcgctgagaat

SEQ ID NO: 1308413 - DNA, 25 bp, Homo sapien
catcatctagttgttcaagtggttc

SEQ ID NO: 1308414 - DNA, 25 bp, Homo sapien
tcatcatctagttgttcaagtggtt

SEQ ID NO: 1308415 - DNA, 25 bp, Homo sapien
tcatctagttgttcaagtggttcca

SEQ ID NO: 1308416 - DNA, 25 bp, Homo sapien
catctagttgttcaagtggttccac

SEQ ID NO: 1308417 - DNA, 25 bp, Homo sapien
caaaaatggttccatcttagctttg

SEQ ID NO: 1308418 - DNA, 25 bp, Homo sapien
cagttttattgccaccattctcata

SEQ ID NO: 1308419 - DNA, 25 bp, Homo sapien
aatggttccatcttagctttgttcc

SEQ ID NO: 1308420 - DNA, 25 bp, Homo sapien
tgttccagttttattgccaccattc

SEQ ID NO: 1308421 - DNA, 25 bp, Homo sapien
tacctctcatgggtgtatcatccag

SEQ ID NO: 1308422 - DNA, 25 bp, Homo sapien
gcatgtgtggcaaagcgaactcgaa

SEQ ID NO: 1308423 - DNA, 25 bp, Homo sapien
taagaaaacaccttcactgcatcgt

SEQ ID NO: 1308424 - DNA, 25 bp, Homo sapien
aaagattacgaacagaaagggcagc

SEQ ID NO: 1308425 - DNA, 25 bp, Homo sapien
tgtgtatcagagacactcatgttaa

SEQ ID NO: 1308426 - DNA, 25 bp, Homo sapien
tatcagagacactcatgttaatgac

SEQ ID NO: 1308427 - DNA, 25 bp, Homo sapien
ctgtgtatcagagacactcatgtta

SEQ ID NO: 1308428 - DNA, 25 bp, Homo sapien
tgtatcagagacactcatgttaatg

SEQ ID NO: 1308429 - DNA, 25 bp, Homo sapien
cctggttctccatatttagcaaata

SEQ ID NO: 1308430 - DNA, 25 bp, Homo sapien
aacaaacaaccgacatcgctgtgtg

SEQ ID NO: 1308431 - DNA, 25 bp, Homo sapien
catcctccgtgatatcagcaggtag

SEQ ID NO: 1308432 - DNA, 25 bp, Homo sapien
agcttaataaatccgaatcctttgc

SEQ ID NO: 1308433 - DNA, 25 bp, Homo sapien
tggccgccaggcgtacttaggcccg

SEQ ID NO: 1308434 - DNA, 25 bp, Homo sapien
cctgagcaacgacgggcttggaaga

SEQ ID NO: 1308435 - DNA, 25 bp, Homo sapien
gccaggcattttgccgcctttggga

SEQ ID NO: 1308436 - DNA, 25 bp, Homo sapien
gtccgagatcttctcctcgctgcgg

SEQ ID NO: 1308437 - DNA, 25 bp, Homo sapien
ccatggggccgcgattctgattgag

SEQ ID NO: 1308438 - DNA, 25 bp, Homo sapien
tgccgggcggcggagaacggaagtc

SEQ ID NO: 1308439 - DNA, 25 bp, Homo sapien
gagaacggaagtcgtggaggccgcc

SEQ ID NO: 1308440 - DNA, 25 bp, Homo sapien
cgggatcggaggcttagggccgctc

SEQ ID NO: 1308441 - DNA, 25 bp, Homo sapien
caccgccacgactccggaaccgatc

SEQ ID NO: 1308442 - DNA, 25 bp, Homo sapien
gccacgactccggaaccgatcccga

SEQ ID NO: 1308443 - DNA, 25 bp, Homo sapien
gactccggaaccgatcccgagacat

SEQ ID NO: 1308444 - DNA, 25 bp, Homo sapien
cacgactccggaaccgatcccgaga

SEQ ID NO: 1308445 - DNA, 25 bp, Homo sapien
acaaaatggcggatgacacaggcgg

SEQ ID NO: 1308446 - DNA, 25 bp, Homo sapien
cgaagaagacgctcaggaaacgtgg

SEQ ID NO: 1308447 - DNA, 25 bp, Homo sapien
tcttatataggccagctggcacggc

SEQ ID NO: 1308448 - DNA, 25 bp, Homo sapien
cggtcgaggcaaaagcgaagaagac

SEQ ID NO: 1308449 - DNA, 25 bp, Homo sapien
gatcgacagctccaatagccaattg

SEQ ID NO: 1308450 - DNA, 25 bp, Homo sapien
taagttgcgaacctctgatcattcc

SEQ ID NO: 1308451 - DNA, 25 bp, Homo sapien
tccagttggccagtgagcgaagaag

SEQ ID NO: 1308452 - DNA, 25 bp, Homo sapien
tcctattggcccctgggtgagaggc

SEQ ID NO: 1308453 - DNA, 25 bp, Homo sapien
aatataacagtcatcggagaggaac

SEQ ID NO: 1308454 - DNA, 25 bp, Homo sapien
catcggagaggaactttccaaccca

SEQ ID NO: 1308455 - DNA, 25 bp, Homo sapien
tttctttgagaatataacagtcatc

SEQ ID NO: 1308456 - DNA, 25 bp, Homo sapien
tttgagaatataacagtcatcggag

SEQ ID NO: 1308457 - DNA, 25 bp, Homo sapien
aggtgtctcagtggctgtgccactt

SEQ ID NO: 1308458 - DNA, 25 bp, Homo sapien
ctaggtgtctcagtggctgtgccac

SEQ ID NO: 1308459 - DNA, 25 bp, Homo sapien
gtctcagtggctgtgccacttcctc

SEQ ID NO: 1308460 - DNA, 25 bp, Homo sapien
cactaggtgtctcagtggctgtgcc

SEQ ID NO: 1308461 - DNA, 25 bp, Homo sapien
caccttactaacacagggggcatgc

SEQ ID NO: 1308462 - DNA, 25 bp, Homo sapien
taagcaaggccagtatggaaacttc

SEQ ID NO: 1308463 - DNA, 25 bp, Homo sapien
tcctggacatggaactaaagggaac

SEQ ID NO: 1308464 - DNA, 25 bp, Homo sapien
gcgattttcagcttaggacccagtt

SEQ ID NO: 1308465 - DNA, 25 bp, Homo sapien
cctttaaggcagattgtcaagctcc

SEQ ID NO: 1308466 - DNA, 25 bp, Homo sapien
cgcacgctcaggaccgggggcttgg

SEQ ID NO: 1308467 - DNA, 25 bp, Homo sapien
gaaggagggacttagggtgcgcctg

SEQ ID NO: 1308468 - DNA, 25 bp, Homo sapien
gacttagggtgcgcctgcgcatcag

SEQ ID NO: 1308469 - DNA, 25 bp, Homo sapien
gcctgcgcatcaggggcgcgcgcaa

SEQ ID NO: 1308470 - DNA, 25 bp, Homo sapien
ggatctacccattaagtacattatg

SEQ ID NO: 1308471 - DNA, 25 bp, Homo sapien
tcagccactggcttatagtagtagt

SEQ ID NO: 1308472 - DNA, 25 bp, Homo sapien
tgtctacaactgaactcctacttcc

SEQ ID NO: 1308473 - DNA, 25 bp, Homo sapien
gcaatctcttctacaatagtggttt

SEQ ID NO: 1308474 - DNA, 25 bp, Homo sapien
tctcctgcacttgggaggttaccat

SEQ ID NO: 1308475 - DNA, 25 bp, Homo sapien
catattgatgtctaccattgtgcag

SEQ ID NO: 1308476 - DNA, 25 bp, Homo sapien
gcagtagctaatctcaggcgcgacc

SEQ ID NO: 1308477 - DNA, 25 bp, Homo sapien
atgggcatatgccacgtcgtgcagc

SEQ ID NO: 1308478 - DNA, 25 bp, Homo sapien
aacttctgcacagggttcattgagc

SEQ ID NO: 1308479 - DNA, 25 bp, Homo sapien
tatcaggaatttgattatgccttgg

SEQ ID NO: 1308480 - DNA, 25 bp, Homo sapien
cattgagcattctgattctgtgagt

SEQ ID NO: 1308481 - DNA, 25 bp, Homo sapien
tagatgttgttccatagctcactaa

SEQ ID NO: 1308482 - DNA, 25 bp, Homo sapien
agctatagacatttctaagccctgc

SEQ ID NO: 1308483 - DNA, 25 bp, Homo sapien
taacttatggtttaaagctatagac

SEQ ID NO: 1308484 - DNA, 25 bp, Homo sapien
tcttttcctagcttcttgatttggc

SEQ ID NO: 1308485 - DNA, 25 bp, Homo sapien
agtgcatccccaaactcttagtaag

SEQ ID NO: 1308486 - DNA, 25 bp, Homo sapien
cggagtttcgcgctgtcgcctgggc

SEQ ID NO: 1308487 - DNA, 25 bp, Homo sapien
taccggtgcataccagcacactcgg

SEQ ID NO: 1308488 - DNA, 25 bp, Homo sapien
ggattaccggtgcataccagcacac

SEQ ID NO: 1308489 - DNA, 25 bp, Homo sapien
gattaccggtgcataccagcacact

SEQ ID NO: 1308490 - DNA, 25 bp, Homo sapien
gcactacttaatgaaagaagatgaa

SEQ ID NO: 1308491 - DNA, 25 bp, Homo sapien
gaagtacaccggaagcacatcatgg

SEQ ID NO: 1308492 - DNA, 25 bp, Homo sapien
gccagaaagttgcagattacatgca

SEQ ID NO: 1308493 - DNA, 25 bp, Homo sapien
gcagattacatgcactacttaatga

SEQ ID NO: 1308494 - DNA, 25 bp, Homo sapien
cctgctgtgtgaacgtgatatctcg

SEQ ID NO: 1308495 - DNA, 25 bp, Homo sapien
cagccatctgcaagacttttatcaa

SEQ ID NO: 1308496 - DNA, 25 bp, Homo sapien
tctgaaatatttgtttgagcccttt

SEQ ID NO: 1308497 - DNA, 25 bp, Homo sapien
gaaaggcttgtctctgcgactcaaa

SEQ ID NO: 1308498 - DNA, 25 bp, Homo sapien
taccagactgaccttatcattgtgg

SEQ ID NO: 1308499 - DNA, 25 bp, Homo sapien
taactcctacccttgacagcatgtc

SEQ ID NO: 1308500 - DNA, 25 bp, Homo sapien
catgtcttatggaatgccgaatcaa

SEQ ID NO: 1308501 - DNA, 25 bp, Homo sapien
gaattccagtcgttggtagtgacaa

SEQ ID NO: 1308502 - DNA, 25 bp, Homo sapien
aaaccaaacatgattgtgccttgaa

SEQ ID NO: 1308503 - DNA, 25 bp, Homo sapien
ccttgaaggcattgtggaccataca

SEQ ID NO: 1308504 - DNA, 25 bp, Homo sapien
tagtatttggctactcattgatttg

SEQ ID NO: 1308505 - DNA, 25 bp, Homo sapien
tacaaacagtacttaagatgtatac

SEQ ID NO: 1308506 - DNA, 25 bp, Homo sapien
cagaccgttaatgtatgccaatgag

SEQ ID NO: 1308507 - DNA, 25 bp, Homo sapien
catcagcaggtcaaataagggtatc

SEQ ID NO: 1308508 - DNA, 25 bp, Homo sapien
gagactaagagagctgactgcagac

SEQ ID NO: 1308509 - DNA, 25 bp, Homo sapien
agaatacaagttgcggatgtcatcg

SEQ ID NO: 1308510 - DNA, 25 bp, Homo sapien
tctgaactaccacattgtgtccatt

SEQ ID NO: 1308511 - DNA, 25 bp, Homo sapien
ctcaatgtctctgaactaccacatt

SEQ ID NO: 1308512 - DNA, 25 bp, Homo sapien
gtctctgaactaccacattgtgtcc

SEQ ID NO: 1308513 - DNA, 25 bp, Homo sapien
tgtccattggaatgtttaataacaa

SEQ ID NO: 1308514 - DNA, 25 bp, Homo sapien
ccagcccaatgatcctaacttctaa

SEQ ID NO: 1308515 - DNA, 25 bp, Homo sapien
tagtaaaaagagactttatactgct

SEQ ID NO: 1308516 - DNA, 25 bp, Homo sapien
cagcccaatgatcctaacttctaaa

SEQ ID NO: 1308517 - DNA, 25 bp, Homo sapien
gagactttatactgcttgaattgta

SEQ ID NO: 1308518 - DNA, 25 bp, Homo sapien
cctgctagtgtaatctctttaagat

SEQ ID NO: 1308519 - DNA, 25 bp, Homo sapien
ggcagggttgctacaagccttctat

SEQ ID NO: 1308520 - DNA, 25 bp, Homo sapien
tttaaaagtatcctgctagtgtaat

SEQ ID NO: 1308521 - DNA, 25 bp, Homo sapien
caaacatgagtataaagcagtttat

SEQ ID NO: 1308522 - DNA, 25 bp, Homo sapien
gattttgaggaagtcccttttatca

SEQ ID NO: 1308523 - DNA, 25 bp, Homo sapien
gagttgagacaagggtcaaggttca

SEQ ID NO: 1308524 - DNA, 25 bp, Homo sapien
ccaactgtcctgattactgtgattt

SEQ ID NO: 1308525 - DNA, 25 bp, Homo sapien
tctttatcaaatcaacgtttggtcc

SEQ ID NO: 1308526 - DNA, 25 bp, Homo sapien
taagagagttaagtcctcgtccttg

SEQ ID NO: 1308527 - DNA, 25 bp, Homo sapien
tatcatatctgctaacagtggacct

SEQ ID NO: 1308528 - DNA, 25 bp, Homo sapien
taagcttaatgatctccaacaggag

SEQ ID NO: 1308529 - DNA, 25 bp, Homo sapien
tttgatctggtagcattggtgtagc

SEQ ID NO: 1308530 - DNA, 25 bp, Homo sapien
agaaccaggtacgggatactgtttg

SEQ ID NO: 1308531 - DNA, 25 bp, Homo sapien
accaggtacgggatactgtttgtca

SEQ ID NO: 1308532 - DNA, 25 bp, Homo sapien
cagaaccaggtacgggatactgttt

SEQ ID NO: 1308533 - DNA, 25 bp, Homo sapien
caggtacgggatactgtttgtcaga

SEQ ID NO: 1308534 - DNA, 25 bp, Homo sapien
ggaagatgaccttgttgcccttgaa

SEQ ID NO: 1308535 - DNA, 25 bp, Homo sapien
tatgaaagaagtaaatccaccccga

SEQ ID NO: 1308536 - DNA, 25 bp, Homo sapien
gaaatagcaagtgtaatagtcccca

SEQ ID NO: 1308537 - DNA, 25 bp, Homo sapien
tggaggcccttgtcatttcaaaaag

SEQ ID NO: 1308538 - DNA, 25 bp, Homo sapien
aaaatgcaaagctagtcaagcgtgg

SEQ ID NO: 1308539 - DNA, 25 bp, Homo sapien
caaaatgcaaagctagtcaagcgtg

SEQ ID NO: 1308540 - DNA, 25 bp, Homo sapien
gcaaagctagtcaagcgtggttgtg

SEQ ID NO: 1308541 - DNA, 25 bp, Homo sapien
aatgcaaagctagtcaagcgtggtt

SEQ ID NO: 1308542 - DNA, 25 bp, Homo sapien
tattctatgagtcctttgatctttc

SEQ ID NO: 1308543 - DNA, 25 bp, Homo sapien
ttcttactaattattctatgagtcc

SEQ ID NO: 1308544 - DNA, 25 bp, Homo sapien
cttaaatgtctttcactacaatgtt

SEQ ID NO: 1308545 - DNA, 25 bp, Homo sapien
attctgggaaatgtattctcattat

SEQ ID NO: 1308546 - DNA, 25 bp, Homo sapien
agttgctgttgaccactccaccagg

SEQ ID NO: 1308547 - DNA, 25 bp, Homo sapien
tccaccaggagtgttccaagattca

SEQ ID NO: 1308548 - DNA, 25 bp, Homo sapien
aagggaagttcatgacctccaggtc

SEQ ID NO: 1308549 - DNA, 25 bp, Homo sapien
taccctgtccctcccagtgagttga

SEQ ID NO: 1308550 - DNA, 25 bp, Homo sapien
aacagaagttatgggtctagcctca

SEQ ID NO: 1308551 - DNA, 25 bp, Homo sapien
ctcatgaacttgcaagcgggttggg

SEQ ID NO: 1308552 - DNA, 25 bp, Homo sapien
tcccagatcatgtagctcacgtaag

SEQ ID NO: 1308553 - DNA, 25 bp, Homo sapien
gacaaaaggctgagtgctgcaccgt

SEQ ID NO: 1308554 - DNA, 25 bp, Homo sapien
gcttgcatgtgctgatgccaggccc

SEQ ID NO: 1308555 - DNA, 25 bp, Homo sapien
aaacttccttgccagaggacacgac

SEQ ID NO: 1308556 - DNA, 25 bp, Homo sapien
agaggacacgacctcacagggctgc

SEQ ID NO: 1308557 - DNA, 25 bp, Homo sapien
gcccagcaccactgcttgcatgtgc

SEQ ID NO: 1308558 - DNA, 25 bp, Homo sapien
taccatgtttaatcatcccacaatg

SEQ ID NO: 1308559 - DNA, 25 bp, Homo sapien
catgtttaatcatcccacaatggac

SEQ ID NO: 1308560 - DNA, 25 bp, Homo sapien
taaataccatgtttaatcatcccac

SEQ ID NO: 1308561 - DNA, 25 bp, Homo sapien
cacagttaaataccatgtttaatca

SEQ ID NO: 1308562 - DNA, 25 bp, Homo sapien
acacgcacacatgcaagggacacag

SEQ ID NO: 1308563 - DNA, 25 bp, Homo sapien
gatgcatacgcgctcactctaacac

SEQ ID NO: 1308564 - DNA, 25 bp, Homo sapien
tgagcagccaagagcccaatgagtt

SEQ ID NO: 1308565 - DNA, 25 bp, Homo sapien
gttccaaggagatgaaagtctttcc

SEQ ID NO: 1308566 - DNA, 25 bp, Homo sapien
cagcaggtgccggtcagatggagag

SEQ ID NO: 1308567 - DNA, 25 bp, Homo sapien
acatgcgctctcatgccacaacatt

SEQ ID NO: 1308568 - DNA, 25 bp, Homo sapien
agcggtggcctaagccccgaagcag

SEQ ID NO: 1308569 - DNA, 25 bp, Homo sapien
tcctccctaatctcgggccggatgg

SEQ ID NO: 1308570 - DNA, 25 bp, Homo sapien
aggcatacgccaccaaacccggcta

SEQ ID NO: 1308571 - DNA, 25 bp, Homo sapien
ggcatacgccaccaaacccggctaa

SEQ ID NO: 1308572 - DNA, 25 bp, Homo sapien
acaggcatacgccaccaaacccggc

SEQ ID NO: 1308573 - DNA, 25 bp, Homo sapien
ttacaggcatacgccaccaaacccg

SEQ ID NO: 1308574 - DNA, 25 bp, Homo sapien
tcctctttgcccagcgagagggcgt

SEQ ID NO: 1308575 - DNA, 25 bp, Homo sapien
ccggccatcatttctatgctaccat

SEQ ID NO: 1308576 - DNA, 25 bp, Homo sapien
catcatttctatgctaccatctcag

SEQ ID NO: 1308577 - DNA, 25 bp, Homo sapien
agggcgtactctaccccagagaggg

SEQ ID NO: 1308578 - DNA, 25 bp, Homo sapien
agcactctgggcacaatgacactgt

SEQ ID NO: 1308579 - DNA, 25 bp, Homo sapien
cactctgggcacaatgacactgtcc

SEQ ID NO: 1308580 - DNA, 25 bp, Homo sapien
cttgcagcactctgggcacaatgac

SEQ ID NO: 1308581 - DNA, 25 bp, Homo sapien
tgggcacaatgacactgtccactgg

SEQ ID NO: 1308582 - DNA, 25 bp, Homo sapien
tcagggcgaaatgaccagcagatgc

SEQ ID NO: 1308583 - DNA, 25 bp, Homo sapien
gaggccctgaggtgaggatatctgg

SEQ ID NO: 1308584 - DNA, 25 bp, Homo sapien
tcctggaggacgtctctggattcaa

SEQ ID NO: 1308585 - DNA, 25 bp, Homo sapien
cagctgcccgcagactcgggaggta

SEQ ID NO: 1308586 - DNA, 25 bp, Homo sapien
tgcccgttgggtacagagccattct

SEQ ID NO: 1308587 - DNA, 25 bp, Homo sapien
ggtctgcccgttgggtacagagcca

SEQ ID NO: 1308588 - DNA, 25 bp, Homo sapien
tggccttcagaggggtctgcccgtt

SEQ ID NO: 1308589 - DNA, 25 bp, Homo sapien
ccgttgggtacagagccattctgac

SEQ ID NO: 1308590 - DNA, 25 bp, Homo sapien
tcaggctgctacttagcaaaaggcc

SEQ ID NO: 1308591 - DNA, 25 bp, Homo sapien
ggagtttgcccttctctcggtctgg

SEQ ID NO: 1308592 - DNA, 25 bp, Homo sapien
tccagctctgactcggagtgcatca

SEQ ID NO: 1308593 - DNA, 25 bp, Homo sapien
tctcggtctggccatgtaaagatgg

SEQ ID NO: 1308594 - DNA, 25 bp, Homo sapien
agagtacggatgagagcacacctgg

SEQ ID NO: 1308595 - DNA, 25 bp, Homo sapien
tcaggagactggcctcaaggctgga

SEQ ID NO: 1308596 - DNA, 25 bp, Homo sapien
tcatctccagtatccatgagctttg

SEQ ID NO: 1308597 - DNA, 25 bp, Homo sapien
gcccaactggttggaacagtccact

SEQ ID NO: 1308598 - DNA, 25 bp, Homo sapien
tgaccttgccagacctagctataac

SEQ ID NO: 1308599 - DNA, 25 bp, Homo sapien
tgtcaacagcactatcattctccat

SEQ ID NO: 1308600 - DNA, 25 bp, Homo sapien
cacgctgtgtgaatcactgtcagct

SEQ ID NO: 1308601 - DNA, 25 bp, Homo sapien
catctctcggttggaagtcagccct

SEQ ID NO: 1308602 - DNA, 25 bp, Homo sapien
gtaagagacaagtccaaggtccctg

SEQ ID NO: 1308603 - DNA, 25 bp, Homo sapien
tgaaaggtggtcagctggcagacac

SEQ ID NO: 1308604 - DNA, 25 bp, Homo sapien
tgatgagtgaaaccctcgccaggtg

SEQ ID NO: 1308605 - DNA, 25 bp, Homo sapien
cattttgtccagtgcagctcagggc

SEQ ID NO: 1308606 - DNA, 25 bp, Homo sapien
ctagaagctctggcacccagggccc

SEQ ID NO: 1308607 - DNA, 25 bp, Homo sapien
agaagctctggcacccagggcccct

SEQ ID NO: 1308608 - DNA, 25 bp, Homo sapien
aagctctggcacccagggcccctac

SEQ ID NO: 1308609 - DNA, 25 bp, Homo sapien
tagaagctctggcacccagggcccc

SEQ ID NO: 1308610 - DNA, 25 bp, Homo sapien
tttcctgatccgtggcatccaggat

SEQ ID NO: 1308611 - DNA, 25 bp, Homo sapien
ctttcctgatccgtggcatccagga

SEQ ID NO: 1308612 - DNA, 25 bp, Homo sapien
atccaggatcttgtacttgcttttc

SEQ ID NO: 1308613 - DNA, 25 bp, Homo sapien
ggcatccaggatcttgtacttgctt

SEQ ID NO: 1308614 - DNA, 25 bp, Homo sapien
aacacaggacgcctgagcctggcta

SEQ ID NO: 1308615 - DNA, 25 bp, Homo sapien
aacaaaatcctctgcttgaagggtg

SEQ ID NO: 1308616 - DNA, 25 bp, Homo sapien
ggagacaggcattacactaacaaag

SEQ ID NO: 1308617 - DNA, 25 bp, Homo sapien
gcctggctagcctaaagtgcatgtg

SEQ ID NO: 1308618 - DNA, 25 bp, Homo sapien
gcaatgataacatataacacgctcc

SEQ ID NO: 1308619 - DNA, 25 bp, Homo sapien
ggtagcaatgataacatataacacg

SEQ ID NO: 1308620 - DNA, 25 bp, Homo sapien
aatgataacatataacacgctccac

SEQ ID NO: 1308621 - DNA, 25 bp, Homo sapien
caaaggtagcaatgataacatataa

SEQ ID NO: 1308622 - DNA, 25 bp, Homo sapien
tgccaagaaaatcaaaatggtgagg

SEQ ID NO: 1308623 - DNA, 25 bp, Homo sapien
ctgccaagaaaatcaaaatggtgag

SEQ ID NO: 1308624 - DNA, 25 bp, Homo sapien
gccaagaaaatcaaaatggtgaggg

SEQ ID NO: 1308625 - DNA, 25 bp, Homo sapien
tcagcgccaaacaggctggcactgt

SEQ ID NO: 1308626 - DNA, 25 bp, Homo sapien
cacattcagcgccaaacaggctggc

SEQ ID NO: 1308627 - DNA, 25 bp, Homo sapien
agtgcagaaccacattcagcgccaa

SEQ ID NO: 1308628 - DNA, 25 bp, Homo sapien
gccaaacaggctggcactgtgccac

SEQ ID NO: 1308629 - DNA, 25 bp, Homo sapien
ttctccatccaaaaagggtcacaga

SEQ ID NO: 1308630 - DNA, 25 bp, Homo sapien
ccatggtcggaacagttcagctgac

SEQ ID NO: 1308631 - DNA, 25 bp, Homo sapien
aagggtcacagatacagcgtttggt

SEQ ID NO: 1308632 - DNA, 25 bp, Homo sapien
tgaacgagtcacagtggccatggtc

SEQ ID NO: 1308633 - DNA, 25 bp, Homo sapien
gtgacaagcagcacctagagcccat

SEQ ID NO: 1308634 - DNA, 25 bp, Homo sapien
tctcatctcgactggacaaaactgg

SEQ ID NO: 1308635 - DNA, 25 bp, Homo sapien
tgaaatgtcctcgagacccaccttg

SEQ ID NO: 1308636 - DNA, 25 bp, Homo sapien
gaaagtcaacaagactcagccaggg

SEQ ID NO: 1308637 - DNA, 25 bp, Homo sapien
gctgcaggcactaggtaggctcttg

SEQ ID NO: 1308638 - DNA, 25 bp, Homo sapien
gagctgcaggcactaggtaggctct

SEQ ID NO: 1308639 - DNA, 25 bp, Homo sapien
ctgcaggcactaggtaggctcttgc

SEQ ID NO: 1308640 - DNA, 25 bp, Homo sapien
tgagctgcaggcactaggtaggctc

SEQ ID NO: 1308641 - DNA, 25 bp, Homo sapien
tcactcttgagcatcgctgccacct

SEQ ID NO: 1308642 - DNA, 25 bp, Homo sapien
ctttgaagatctggtggggaggctc

SEQ ID NO: 1308643 - DNA, 25 bp, Homo sapien
gacagtgttgacttccaaggctctg

SEQ ID NO: 1308644 - DNA, 25 bp, Homo sapien
cttttgcttccgcagctcactcttg

SEQ ID NO: 1308645 - DNA, 25 bp, Homo sapien
tgggcagtgttatgttcagacaacc

SEQ ID NO: 1308646 - DNA, 25 bp, Homo sapien
taatcgtgctatctctgacctagtg

SEQ ID NO: 1308647 - DNA, 25 bp, Homo sapien
gagcttttccattctaggtacccag

SEQ ID NO: 1308648 - DNA, 25 bp, Homo sapien
aagatgttcatgttccacaaggacc

SEQ ID NO: 1308649 - DNA, 25 bp, Homo sapien
agcgcatgtcacctgcactagaaga

SEQ ID NO: 1308650 - DNA, 25 bp, Homo sapien
cagtgttccacaatgccgcttgttg

SEQ ID NO: 1308651 - DNA, 25 bp, Homo sapien
aaatagttgacctcctacaccctgg

SEQ ID NO: 1308652 - DNA, 25 bp, Homo sapien
tgaagtgtctagtacagcgcatgtc

SEQ ID NO: 1308653 - DNA, 25 bp, Homo sapien
tccgtgtacggctgaatcttttgca

SEQ ID NO: 1308654 - DNA, 25 bp, Homo sapien
acaatgatgtcggaatccagcaccc

SEQ ID NO: 1308655 - DNA, 25 bp, Homo sapien
ccaggaggaccccaatctggcggat

SEQ ID NO: 1308656 - DNA, 25 bp, Homo sapien
tagctgactgacgttgatatccaag

SEQ ID NO: 1308657 - DNA, 25 bp, Homo sapien
tgtaggttccctcaaccaggtttga

SEQ ID NO: 1308658 - DNA, 25 bp, Homo sapien
ttgcatcggtcactttcaggtgaaa

SEQ ID NO: 1308659 - DNA, 25 bp, Homo sapien
tcaggtgaaaagtgtaggttccctc

SEQ ID NO: 1308660 - DNA, 25 bp, Homo sapien
aaaaaggatagggtgatggtcagag

SEQ ID NO: 1308661 - DNA, 25 bp, Homo sapien
gagtccagaggtagctgactattcc

SEQ ID NO: 1308662 - DNA, 25 bp, Homo sapien
gctcccctcatctcgagtccagagg

SEQ ID NO: 1308663 - DNA, 25 bp, Homo sapien
ctgtgctcgtgggtagggtaatcac

SEQ ID NO: 1308664 - DNA, 25 bp, Homo sapien
tgtcatctgaggacttagagccatc

SEQ ID NO: 1308665 - DNA, 25 bp, Homo sapien
cacagtagcaacactgctgttagca

SEQ ID NO: 1308666 - DNA, 25 bp, Homo sapien
tgttagcattctcgagctgcacccc

SEQ ID NO: 1308667 - DNA, 25 bp, Homo sapien
tgaacacataggtccccacttgcag

SEQ ID NO: 1308668 - DNA, 25 bp, Homo sapien
gacagtcaaggtgaacacataggtc

SEQ ID NO: 1308669 - DNA, 25 bp, Homo sapien
ccagttaattctgagcaacagtatt

SEQ ID NO: 1308670 - DNA, 25 bp, Homo sapien
gcctctcaagtgtaattaaactctg

SEQ ID NO: 1308671 - DNA, 25 bp, Homo sapien
ctgcatttcagcagatggattgtac

SEQ ID NO: 1308672 - DNA, 25 bp, Homo sapien
ttctgctccattaccccttccatcc

SEQ ID NO: 1308673 - DNA, 25 bp, Homo sapien
tcaccccactggataagccaataag

SEQ ID NO: 1308674 - DNA, 25 bp, Homo sapien
caccccactggataagccaataaga

SEQ ID NO: 1308675 - DNA, 25 bp, Homo sapien
gtcaccccactggataagccaataa

SEQ ID NO: 1308676 - DNA, 25 bp, Homo sapien
cagtcaccccactggataagccaat

SEQ ID NO: 1308677 - DNA, 25 bp, Homo sapien
cagggttgtgctatccacaggaagg

SEQ ID NO: 1308678 - DNA, 25 bp, Homo sapien
tgccatccagggttgtgctatccac

SEQ ID NO: 1308679 - DNA, 25 bp, Homo sapien
gctcttgctgccatccagggttgtg

SEQ ID NO: 1308680 - DNA, 25 bp, Homo sapien
ttttcccagagatatgagataattt

SEQ ID NO: 1308681 - DNA, 25 bp, Homo sapien
ccaattgggacacatgttctggaag

SEQ ID NO: 1308682 - DNA, 25 bp, Homo sapien
gaggaaccaattgggacacatgttc

SEQ ID NO: 1308683 - DNA, 25 bp, Homo sapien
cagaactgtcagatactgtgggaga

SEQ ID NO: 1308684 - DNA, 25 bp, Homo sapien
gaaaggagaggaaccaattgggaca

SEQ ID NO: 1308685 - DNA, 25 bp, Homo sapien
ctctatggatcggtgccttctgctt

SEQ ID NO: 1308686 - DNA, 25 bp, Homo sapien
cagaggctctatggatcggtgcctt

SEQ ID NO: 1308687 - DNA, 25 bp, Homo sapien
ggctctatggatcggtgccttctgc

SEQ ID NO: 1308688 - DNA, 25 bp, Homo sapien
gaggctctatggatcggtgccttct

SEQ ID NO: 1308689 - DNA, 25 bp, Homo sapien
gtgtagtctccttcttgcatcgcag

SEQ ID NO: 1308690 - DNA, 25 bp, Homo sapien
cctattgtgtcagtcactgtgagct

SEQ ID NO: 1308691 - DNA, 25 bp, Homo sapien
catcgcagagagctgtaaggttggt

SEQ ID NO: 1308692 - DNA, 25 bp, Homo sapien
aataacagtcacttgagcagtggcc

SEQ ID NO: 1308693 - DNA, 25 bp, Homo sapien
tgaggcaccttgctaagggtttccc

SEQ ID NO: 1308694 - DNA, 25 bp, Homo sapien
tggagtcagatatcatgaggcacct

SEQ ID NO: 1308695 - DNA, 25 bp, Homo sapien
tatcatgaggcaccttgctaagggt

SEQ ID NO: 1308696 - DNA, 25 bp, Homo sapien
catgtgagtgaatatggagtcagat

SEQ ID NO: 1308697 - DNA, 25 bp, Homo sapien
gatgccatgatcatcagtgctctgg

SEQ ID NO: 1308698 - DNA, 25 bp, Homo sapien
cagtagtagagttggtagctccatc

SEQ ID NO: 1308699 - DNA, 25 bp, Homo sapien
tccatcagagtctactacagtcaag

SEQ ID NO: 1308700 - DNA, 25 bp, Homo sapien
tgaccactcatagctggtgatgcca

SEQ ID NO: 1308701 - DNA, 25 bp, Homo sapien
cttcccaatggtactgaacgatttt

SEQ ID NO: 1308702 - DNA, 25 bp, Homo sapien
tatggctgtatcttcagaaatcttc

SEQ ID NO: 1308703 - DNA, 25 bp, Homo sapien
tgaaagtgtagttcccagggacgag

SEQ ID NO: 1308704 - DNA, 25 bp, Homo sapien
tctcttctcttagaggccccttaag

SEQ ID NO: 1308705 - DNA, 25 bp, Homo sapien
atcaatgactgtagaagtggttggc

SEQ ID NO: 1308706 - DNA, 25 bp, Homo sapien
tcctggaactgaggtgacacaatag

SEQ ID NO: 1308707 - DNA, 25 bp, Homo sapien
cacaatagcaatggggggccgattc

SEQ ID NO: 1308708 - DNA, 25 bp, Homo sapien
tcaatgactgtagaagtggttggca

SEQ ID NO: 1308709 - DNA, 25 bp, Homo sapien
aattcaagctggcttcacaaatctg

SEQ ID NO: 1308710 - DNA, 25 bp, Homo sapien
ttcaagctggcttcacaaatctgca

SEQ ID NO: 1308711 - DNA, 25 bp, Homo sapien
tgtgagagggcttcatagcagccct

SEQ ID NO: 1308712 - DNA, 25 bp, Homo sapien
atgtctctagggcatgtgagagggc

SEQ ID NO: 1308713 - DNA, 25 bp, Homo sapien
ttccccatgggcattttgaccctct

SEQ ID NO: 1308714 - DNA, 25 bp, Homo sapien
tttgaccctctacaatcactttgaa

SEQ ID NO: 1308715 - DNA, 25 bp, Homo sapien
ctttgaattcatacaggcctggagt

SEQ ID NO: 1308716 - DNA, 25 bp, Homo sapien
ggcttgactgtcacgttcacatagc

SEQ ID NO: 1308717 - DNA, 25 bp, Homo sapien
tgcaagtgaaaggaggcaaattcac

SEQ ID NO: 1308718 - DNA, 25 bp, Homo sapien
tttgccctgcaagtgaaaggaggca

SEQ ID NO: 1308719 - DNA, 25 bp, Homo sapien
ctttgccctgcaagtgaaaggaggc

SEQ ID NO: 1308720 - DNA, 25 bp, Homo sapien
ccctgcaagtgaaaggaggcaaatt

SEQ ID NO: 1308721 - DNA, 25 bp, Homo sapien
gaggatctgggaatgtttcccttcc

SEQ ID NO: 1308722 - DNA, 25 bp, Homo sapien
ggatctgggaatgtttcccttccat

SEQ ID NO: 1308723 - DNA, 25 bp, Homo sapien
aggatctgggaatgtttcccttcca

SEQ ID NO: 1308724 - DNA, 25 bp, Homo sapien
tagtctctaggatgagtaatcagct

SEQ ID NO: 1308725 - DNA, 25 bp, Homo sapien
ccactgtagtctctaggatgagtaa

SEQ ID NO: 1308726 - DNA, 25 bp, Homo sapien
ctgtagtctctaggatgagtaatca

SEQ ID NO: 1308727 - DNA, 25 bp, Homo sapien
tgccagtcgtaggtgtaggtttctc

SEQ ID NO: 1308728 - DNA, 25 bp, Homo sapien
aagaatctatttctaaactaacatg

SEQ ID NO: 1308729 - DNA, 25 bp, Homo sapien
catgttttgaaacactgatctacaa

SEQ ID NO: 1308730 - DNA, 25 bp, Homo sapien
taacatgttttgaaacactgatcta

SEQ ID NO: 1308731 - DNA, 25 bp, Homo sapien
ggccaaagaatctatttctaaacta

SEQ ID NO: 1308732 - DNA, 25 bp, Homo sapien
ataagttaccagtttagtgcctagc

SEQ ID NO: 1308733 - DNA, 25 bp, Homo sapien
ctttaagggcaaaatgagatagtag

SEQ ID NO: 1308734 - DNA, 25 bp, Homo sapien
aatagcagatgtagaacttagaaag

SEQ ID NO: 1308735 - DNA, 25 bp, Homo sapien
tacctcataagattactttaagggc

SEQ ID NO: 1308736 - DNA, 25 bp, Homo sapien
tcttggagaacatatgcatttaatt

SEQ ID NO: 1308737 - DNA, 25 bp, Homo sapien
ggagaacatatgcatttaattgaac

SEQ ID NO: 1308738 - DNA, 25 bp, Homo sapien
ggttcttggagaacatatgcattta

SEQ ID NO: 1308739 - DNA, 25 bp, Homo sapien
gtggttcttggagaacatatgcatt

SEQ ID NO: 1308740 - DNA, 25 bp, Homo sapien
gcagataccaccagttcctttataa

SEQ ID NO: 1308741 - DNA, 25 bp, Homo sapien
gcagggttatctggacactctctcc

SEQ ID NO: 1308742 - DNA, 25 bp, Homo sapien
ttcttaggcagggttatctggacac

SEQ ID NO: 1308743 - DNA, 25 bp, Homo sapien
tccagcagataccaccagttccttt

SEQ ID NO: 1308744 - DNA, 25 bp, Homo sapien
taggggtagcataactgtaggaggg

SEQ ID NO: 1308745 - DNA, 25 bp, Homo sapien
gtagcataactgtaggagggagcca

SEQ ID NO: 1308746 - DNA, 25 bp, Homo sapien
ctgggtatggtgctgaggtgctctg

SEQ ID NO: 1308747 - DNA, 25 bp, Homo sapien
ctggggggtaggggtagcataactg

SEQ ID NO: 1308748 - DNA, 25 bp, Homo sapien
tggaaattgtaatcgccttgtggac

SEQ ID NO: 1308749 - DNA, 25 bp, Homo sapien
ttggcccaccagacagctctgcagt

SEQ ID NO: 1308750 - DNA, 25 bp, Homo sapien
tgctgggcgtagtagcaagaccctc

SEQ ID NO: 1308751 - DNA, 25 bp, Homo sapien
gcactgatacattctttggcccacc

SEQ ID NO: 1308752 - DNA, 25 bp, Homo sapien
agcctggccactacaggtctgcctg

SEQ ID NO: 1308753 - DNA, 25 bp, Homo sapien
gcctggccactacaggtctgcctgt

SEQ ID NO: 1308754 - DNA, 25 bp, Homo sapien
gaagcttcctgattaagctctgctg

SEQ ID NO: 1308755 - DNA, 25 bp, Homo sapien
aatgctgtgtcactataggtgtaac

SEQ ID NO: 1308756 - DNA, 25 bp, Homo sapien
ggtagtcagaccacctaattcgttg

SEQ ID NO: 1308757 - DNA, 25 bp, Homo sapien
taggtgtaactacgtcactgggact

SEQ ID NO: 1308758 - DNA, 25 bp, Homo sapien
tctagccaccaaaagacatggcagg

SEQ ID NO: 1308759 - DNA, 25 bp, Homo sapien
gatacagcaggtctgagtgcagctc

SEQ ID NO: 1308760 - DNA, 25 bp, Homo sapien
ggagtgtgtcctaaaagcccggcag

SEQ ID NO: 1308761 - DNA, 25 bp, Homo sapien
gcaggcagcccaacatgactggaga

SEQ ID NO: 1308762 - DNA, 25 bp, Homo sapien
ctccaaggtatttctcagggacaat

SEQ ID NO: 1308763 - DNA, 25 bp, Homo sapien
ccaaggtatttctcagggacaatgt

SEQ ID NO: 1308764 - DNA, 25 bp, Homo sapien
aggtatttctcagggacaatgtgag

SEQ ID NO: 1308765 - DNA, 25 bp, Homo sapien
caaggtatttctcagggacaatgtg

SEQ ID NO: 1308766 - DNA, 25 bp, Homo sapien
tcagggcaatgactgtaggaaagcc

SEQ ID NO: 1308767 - DNA, 25 bp, Homo sapien
tataacaaagtcatcaagccaggca

SEQ ID NO: 1308768 - DNA, 25 bp, Homo sapien
gctcaactcttattggacatcaagg

SEQ ID NO: 1308769 - DNA, 25 bp, Homo sapien
ccttcgggtacagccaaggccttgc

SEQ ID NO: 1308770 - DNA, 25 bp, Homo sapien
aaaatgtgttgaggtttcgtggtct

SEQ ID NO: 1308771 - DNA, 25 bp, Homo sapien
ttgatccaatggtcactcaggtgca

SEQ ID NO: 1308772 - DNA, 25 bp, Homo sapien
gtcacccaggtggagcaaagtggca

SEQ ID NO: 1308773 - DNA, 25 bp, Homo sapien
gtttcgtggtctgacatatggtcta

SEQ ID NO: 1308774 - DNA, 25 bp, Homo sapien
tatgttgcccatctaactcctggac

SEQ ID NO: 1308775 - DNA, 25 bp, Homo sapien
actcaagcgatctgcttgtttcagc

SEQ ID NO: 1308776 - DNA, 25 bp, Homo sapien
tcacaattcactgcaccctcagcct

SEQ ID NO: 1308777 - DNA, 25 bp, Homo sapien
tttgtaaagtcagggcttcactatg

SEQ ID NO: 1308778 - DNA, 25 bp, Homo sapien
taggctttgtgtacatattctgact

SEQ ID NO: 1308779 - DNA, 25 bp, Homo sapien
cctaaagatcattctgaacaaaaac

SEQ ID NO: 1308780 - DNA, 25 bp, Homo sapien
aaactcctcatggaactacttgccc

SEQ ID NO: 1308781 - DNA, 25 bp, Homo sapien
tacttgcccaacagatacatatcag

SEQ ID NO: 1308782 - DNA, 25 bp, Homo sapien
tgtttgtctacctcacacactctgc

SEQ ID NO: 1308783 - DNA, 25 bp, Homo sapien
tagctcggccaccactttttccagg

SEQ ID NO: 1308784 - DNA, 25 bp, Homo sapien
tgtcatcttgggtcaaattccttag

SEQ ID NO: 1308785 - DNA, 25 bp, Homo sapien
ccaggaaggcttctcccatgaaacc

SEQ ID NO: 1308786 - DNA, 25 bp, Homo sapien
aaggcagattgaaggcaaatgatta

SEQ ID NO: 1308787 - DNA, 25 bp, Homo sapien
tgaaggcaaatgattaagctatgca

SEQ ID NO: 1308788 - DNA, 25 bp, Homo sapien
agtcacctgttcagaaacaatccag

SEQ ID NO: 1308789 - DNA, 25 bp, Homo sapien
aacaatccagtcatcaagggcttta

SEQ ID NO: 1308790 - DNA, 25 bp, Homo sapien
tctgcctccatagtgtgacctctct

SEQ ID NO: 1308791 - DNA, 25 bp, Homo sapien
aaagagctctgtgggttaaaagcca

SEQ ID NO: 1308792 - DNA, 25 bp, Homo sapien
tgacctctctaatggcaggaacttg

SEQ ID NO: 1308793 - DNA, 25 bp, Homo sapien
tgtgaggactcaatacaaccaagct

SEQ ID NO: 1308794 - DNA, 25 bp, Homo sapien
gccctggaaacatatcgtacacata

SEQ ID NO: 1308795 - DNA, 25 bp, Homo sapien
tatcgtacacatacggcctttactc

SEQ ID NO: 1308796 - DNA, 25 bp, Homo sapien
gaaacatatcgtacacatacggcct

SEQ ID NO: 1308797 - DNA, 25 bp, Homo sapien
agcaaagccctggaaacatatcgta

SEQ ID NO: 1308798 - DNA, 25 bp, Homo sapien
ccttgaagggaatcttgatgtcagc

SEQ ID NO: 1308799 - DNA, 25 bp, Homo sapien
tctaatgcctaggatagcaggcacc

SEQ ID NO: 1308800 - DNA, 25 bp, Homo sapien
gacagagcactggatagaaaggaaa

SEQ ID NO: 1308801 - DNA, 25 bp, Homo sapien
gaaggaagcacaggacaaactctgc

SEQ ID NO: 1308802 - DNA, 25 bp, Homo sapien
agagccaacctggcctaccacaagg

SEQ ID NO: 1308803 - DNA, 25 bp, Homo sapien
tggcctaccacaaggccttgccaag

SEQ ID NO: 1308804 - DNA, 25 bp, Homo sapien
ctgtcctgaccaaagacagagccaa

SEQ ID NO: 1308805 - DNA, 25 bp, Homo sapien
agccccagtcaaaacactgtcctga

SEQ ID NO: 1308806 - DNA, 25 bp, Homo sapien
tgtagttaagaatataggacaattt

SEQ ID NO: 1308807 - DNA, 25 bp, Homo sapien
gctgtaagatatattccattagtca

SEQ ID NO: 1308808 - DNA, 25 bp, Homo sapien
gaagactcattgctgtaagatatat

SEQ ID NO: 1308809 - DNA, 25 bp, Homo sapien
ttcctgttgaagactcattgctgta

SEQ ID NO: 1308810 - DNA, 25 bp, Homo sapien
tacctaactggacaaaatgcaggct

SEQ ID NO: 1308811 - DNA, 25 bp, Homo sapien
aatgcaggctgacctggcatgggca

SEQ ID NO: 1308812 - DNA, 25 bp, Homo sapien
gactggccactccatacaataggat

SEQ ID NO: 1308813 - DNA, 25 bp, Homo sapien
ctagagcatggaagtgggacaaaac

SEQ ID NO: 1308814 - DNA, 25 bp, Homo sapien
tggcctctaccttttcacttgctac

SEQ ID NO: 1308815 - DNA, 25 bp, Homo sapien
cacttgctactggtagttattccag

SEQ ID NO: 1308816 - DNA, 25 bp, Homo sapien
ccagagaaaggattgtattgtacta

SEQ ID NO: 1308817 - DNA, 25 bp, Homo sapien
aagtgctaggataagccaatgcacc

SEQ ID NO: 1308818 - DNA, 25 bp, Homo sapien
tattaggagcattttcccgtgtact

SEQ ID NO: 1308819 - DNA, 25 bp, Homo sapien
aatatgtagttgcataacttgattt

SEQ ID NO: 1308820 - DNA, 25 bp, Homo sapien
gaattttaagactggatagtatccc

SEQ ID NO: 1308821 - DNA, 25 bp, Homo sapien
taattaagcaggtttcagcaatatt

SEQ ID NO: 1308822 - DNA, 25 bp, Homo sapien
tttaccctggtgaaataatctctag

SEQ ID NO: 1308823 - DNA, 25 bp, Homo sapien
ggcaagaggctttaccctggtgaaa

SEQ ID NO: 1308824 - DNA, 25 bp, Homo sapien
aagcatagtctaaaaaatctatcaa

SEQ ID NO: 1308825 - DNA, 25 bp, Homo sapien
ctggtgaaataatctctaggaggaa

SEQ ID NO: 1308826 - DNA, 25 bp, Homo sapien
aggcttctcaaccacttcgcagatg

SEQ ID NO: 1308827 - DNA, 25 bp, Homo sapien
gtctgccaataatatcctgataaaa

SEQ ID NO: 1308828 - DNA, 25 bp, Homo sapien
ggatttggcttgactcccagcctct

SEQ ID NO: 1308829 - DNA, 25 bp, Homo sapien
cacagaacgctgaagcaaaagcaag

SEQ ID NO: 1308830 - DNA, 25 bp, Homo sapien
cctccagacaggcagaaccagtaca

SEQ ID NO: 1308831 - DNA, 25 bp, Homo sapien
ggccctccagacaggcagaaccagt

SEQ ID NO: 1308832 - DNA, 25 bp, Homo sapien
ccctccagacaggcagaaccagtac

SEQ ID NO: 1308833 - DNA, 25 bp, Homo sapien
gccctccagacaggcagaaccagta

SEQ ID NO: 1308834 - DNA, 25 bp, Homo sapien
ttttgaggagaagaggttgcaccct

SEQ ID NO: 1308835 - DNA, 25 bp, Homo sapien
cctgagggttatgtctggcccagta

SEQ ID NO: 1308836 - DNA, 25 bp, Homo sapien
taaagtaacctgagggttatgtctg

SEQ ID NO: 1308837 - DNA, 25 bp, Homo sapien
ttgcaccctcagaggtaaagtaacc

SEQ ID NO: 1308838 - DNA, 25 bp, Homo sapien
gaatcccgccagaggttatcaattt

SEQ ID NO: 1308839 - DNA, 25 bp, Homo sapien
gacacaaccactatgagaccagaag

SEQ ID NO: 1308840 - DNA, 25 bp, Homo sapien
gattgttctgggaggtcgtctttcc

SEQ ID NO: 1308841 - DNA, 25 bp, Homo sapien
taatcacaggagagagcacaaggag

SEQ ID NO: 1308842 - DNA, 25 bp, Homo sapien
ggaagaaggtagtgcgggctcccca

SEQ ID NO: 1308843 - DNA, 25 bp, Homo sapien
gaggaagaaggtagtgcgggctccc

SEQ ID NO: 1308844 - DNA, 25 bp, Homo sapien
gccacatagcggggccccggctctc

SEQ ID NO: 1308845 - DNA, 25 bp, Homo sapien
gaagaggaagaaggtagtgcgggct

SEQ ID NO: 1308846 - DNA, 25 bp, Homo sapien
cagcctccctggacagcgacggcgg

SEQ ID NO: 1308847 - DNA, 25 bp, Homo sapien
cctccctggacagcgacggcggccg

SEQ ID NO: 1308848 - DNA, 25 bp, Homo sapien
cctggacagcgacggcggccggaaa

SEQ ID NO: 1308849 - DNA, 25 bp, Homo sapien
ccctggacagcgacggcggccggaa

SEQ ID NO: 1308850 - DNA, 25 bp, Homo sapien
gctctccagaggcagtctgcacctt

SEQ ID NO: 1308851 - DNA, 25 bp, Homo sapien
cctctcgccgcccgctctccagagg

SEQ ID NO: 1308852 - DNA, 25 bp, Homo sapien
ttgcctccttcgctcgagccccagc

SEQ ID NO: 1308853 - DNA, 25 bp, Homo sapien
gcaccttgcctccttcgctcgagcc

SEQ ID NO: 1308854 - DNA, 25 bp, Homo sapien
ccattggccagagcccggagtgaag

SEQ ID NO: 1308855 - DNA, 25 bp, Homo sapien
cagccgcggattcgtcaagagcggt

SEQ ID NO: 1308856 - DNA, 25 bp, Homo sapien
cccggagtgaagcagccgcggattc

SEQ ID NO: 1308857 - DNA, 25 bp, Homo sapien
aggagtgggcaacgcggcgtgagca

SEQ ID NO: 1308858 - DNA, 25 bp, Homo sapien
cccaaaacaccccagctttctggct

SEQ ID NO: 1308859 - DNA, 25 bp, Homo sapien
ttttctgagggcaagggcatggtgc

SEQ ID NO: 1308860 - DNA, 25 bp, Homo sapien
gggaggaggcatcttccctgaagcc

SEQ ID NO: 1308861 - DNA, 25 bp, Homo sapien
tggcttttctgagggcaagggcatg

SEQ ID NO: 1308862 - DNA, 25 bp, Homo sapien
cctgatctgggagactgagtggata

SEQ ID NO: 1308863 - DNA, 25 bp, Homo sapien
catccccggctagactgcagatttt

SEQ ID NO: 1308864 - DNA, 25 bp, Homo sapien
taagtctgaactaagccagtggcaa

SEQ ID NO: 1308865 - DNA, 25 bp, Homo sapien
tgctcagaagcttaaacgtggaatc

SEQ ID NO: 1308866 - DNA, 25 bp, Homo sapien
tcattgagttcctgccatgccccaa

SEQ ID NO: 1308867 - DNA, 25 bp, Homo sapien
aagcacagcgctagatacattttct

SEQ ID NO: 1308868 - DNA, 25 bp, Homo sapien
ttcattgagttcctgccatgcccca

SEQ ID NO: 1308869 - DNA, 25 bp, Homo sapien
cattgagttcctgccatgccccaag

SEQ ID NO: 1308870 - DNA, 25 bp, Homo sapien
tttcagtagggaggtaacatggtcc

SEQ ID NO: 1308871 - DNA, 25 bp, Homo sapien
aaaggacctacgctcttctgggatg

SEQ ID NO: 1308872 - DNA, 25 bp, Homo sapien
tcagaaggtcatgagtgggatccaa

SEQ ID NO: 1308873 - DNA, 25 bp, Homo sapien
gttagtcacaactgcagagtctgga

SEQ ID NO: 1308874 - DNA, 25 bp, Homo sapien
gaagtagattgagaaaacccaagga

SEQ ID NO: 1308875 - DNA, 25 bp, Homo sapien
tcggagtaggacaatgaggcaaaaa

SEQ ID NO: 1308876 - DNA, 25 bp, Homo sapien
tgagaaagaattaccgacattaagc

SEQ ID NO: 1308877 - DNA, 25 bp, Homo sapien
cattaagcatgtaggtgaaaagaga

SEQ ID NO: 1308878 - DNA, 25 bp, Homo sapien
ggtgcacacctactccgccatggtg

SEQ ID NO: 1308879 - DNA, 25 bp, Homo sapien
tctcgggcccgggacatattcggcc

SEQ ID NO: 1308880 - DNA, 25 bp, Homo sapien
cgccatggtgagtagtctcgggccc

SEQ ID NO: 1308881 - DNA, 25 bp, Homo sapien
ctgtcccgcgctaacgaaatctcgg

SEQ ID NO: 1308882 - DNA, 25 bp, Homo sapien
cggcagggaccgaatcacttctttt

SEQ ID NO: 1308883 - DNA, 25 bp, Homo sapien
cacatctcactggtgactccgagga

SEQ ID NO: 1308884 - DNA, 25 bp, Homo sapien
gactggccgcggtggtttactacca

SEQ ID NO: 1308885 - DNA, 25 bp, Homo sapien
acctcctgggttagacgttgcctgg

SEQ ID NO: 1308886 - DNA, 25 bp, Homo sapien
cgttctcgggcttcgacttcgccag

SEQ ID NO: 1308887 - DNA, 25 bp, Homo sapien
gccctggaatcagagaaagtcgctc

SEQ ID NO: 1308888 - DNA, 25 bp, Homo sapien
gggagtgaattagcgccctccttcg

SEQ ID NO: 1308889 - DNA, 25 bp, Homo sapien
ctgaagcgtcggatccctacagtgc

SEQ ID NO: 1308890 - DNA, 25 bp, Homo sapien
ttttggggaacataagcattcacac

SEQ ID NO: 1308891 - DNA, 25 bp, Homo sapien
tttctggctcatagacagcaccttg

SEQ ID NO: 1308892 - DNA, 25 bp, Homo sapien
tggcttcttttataacaagggcatt

SEQ ID NO: 1308893 - DNA, 25 bp, Homo sapien
caccatagcagtcccactgcaagaa

SEQ ID NO: 1308894 - DNA, 25 bp, Homo sapien
tcaaactcttttgagggccccacag

SEQ ID NO: 1308895 - DNA, 25 bp, Homo sapien
cagactcctgggactgccaaatgga

SEQ ID NO: 1308896 - DNA, 25 bp, Homo sapien
gtttccggcttagaacatccagtcc

SEQ ID NO: 1308897 - DNA, 25 bp, Homo sapien
gaggctttcctcaagtgcccaaggc

SEQ ID NO: 1308898 - DNA, 25 bp, Homo sapien
gaatgcctagcatgtcaaatcaaag

SEQ ID NO: 1308899 - DNA, 25 bp, Homo sapien
taaagcctggagcttagtaatacta

SEQ ID NO: 1308900 - DNA, 25 bp, Homo sapien
gatttataaagattaggctgggtgc

SEQ ID NO: 1308901 - DNA, 25 bp, Homo sapien
tgatgcccagctaaatgcaatgttg

SEQ ID NO: 1308902 - DNA, 25 bp, Homo sapien
gcacttgggaaaccaggtagctcta

SEQ ID NO: 1308903 - DNA, 25 bp, Homo sapien
cctggtgaggcctgaatgcagaata

SEQ ID NO: 1308904 - DNA, 25 bp, Homo sapien
gaaccgtatgtcatccctggtgagg

SEQ ID NO: 1308905 - DNA, 25 bp, Homo sapien
agttcgatgtccctaaatctggagg

SEQ ID NO: 1308906 - DNA, 25 bp, Homo sapien
cacacgcctgtaaacccaactactt

SEQ ID NO: 1308907 - DNA, 25 bp, Homo sapien
aatatataacaattagccaggcgtg

SEQ ID NO: 1308908 - DNA, 25 bp, Homo sapien
gcttgagcccgggagagggaggttg

SEQ ID NO: 1308909 - DNA, 25 bp, Homo sapien
aaaaaatatataacaattagccagg

SEQ ID NO: 1308910 - DNA, 25 bp, Homo sapien
aaatatataacaattagccaggcgt

SEQ ID NO: 1308911 - DNA, 25 bp, Homo sapien
acacgcctgtaaacccaactacttg

SEQ ID NO: 1308912 - DNA, 25 bp, Homo sapien
agttgggtttacaggcgtgtgccac

SEQ ID NO: 1308913 - DNA, 25 bp, Homo sapien
aagtagttgggtttacaggcgtgtg

SEQ ID NO: 1308914 - DNA, 25 bp, Homo sapien
caacctccctctcccgggctcaagc

SEQ ID NO: 1308915 - DNA, 25 bp, Homo sapien
cctggctaattgttatatatttttt

SEQ ID NO: 1308916 - DNA, 25 bp, Homo sapien
caagtagttgggtttacaggcgtgt

SEQ ID NO: 1308917 - DNA, 25 bp, Homo sapien
cacgcctggctaattgttatatatt

SEQ ID NO: 1308918 - DNA, 25 bp, Homo sapien
gattcctgagtgtaaggcatctatt

SEQ ID NO: 1308919 - DNA, 25 bp, Homo sapien
gagatgattcacgtcactacagttg

SEQ ID NO: 1308920 - DNA, 25 bp, Homo sapien
gagcttttagctagattcctgagtg

SEQ ID NO: 1308921 - DNA, 25 bp, Homo sapien
gataaatgccttacaccataagaag

SEQ ID NO: 1308922 - DNA, 25 bp, Homo sapien
caacaccaccatgaatatgcatagg

SEQ ID NO: 1308923 - DNA, 25 bp, Homo sapien
tttaatacgccaatgataaatgcct

SEQ ID NO: 1308924 - DNA, 25 bp, Homo sapien
caactgtagtgacgtgaatcatctc

SEQ ID NO: 1308925 - DNA, 25 bp, Homo sapien
tatgcatattcatggtggtgttgga

SEQ ID NO: 1308926 - DNA, 25 bp, Homo sapien
gctttcttcttatggtgtaaggcat

SEQ ID NO: 1308927 - DNA, 25 bp, Homo sapien
gctaaaagctcaaacctatgcatat

SEQ ID NO: 1308928 - DNA, 25 bp, Homo sapien
cactcaggaatctagctaaaagctc

SEQ ID NO: 1308929 - DNA, 25 bp, Homo sapien
aatagatgccttacactcaggaatc

SEQ ID NO: 1308930 - DNA, 25 bp, Homo sapien
gtgctcctcttaatatcatatacag

SEQ ID NO: 1308931 - DNA, 25 bp, Homo sapien
taaatgtatcatctaagatactacc

SEQ ID NO: 1308932 - DNA, 25 bp, Homo sapien
tacctactgatcataacgttcatat

SEQ ID NO: 1308933 - DNA, 25 bp, Homo sapien
aaccctactttatccaattctgtgc

SEQ ID NO: 1308934 - DNA, 25 bp, Homo sapien
catttggtctccgactaagataaac

SEQ ID NO: 1308935 - DNA, 25 bp, Homo sapien
gttcatctcacatttccagttgcta

SEQ ID NO: 1308936 - DNA, 25 bp, Homo sapien
tatatgatattaagaggagcacaga

SEQ ID NO: 1308937 - DNA, 25 bp, Homo sapien
gcacagaattggataaagtagggtt

SEQ ID NO: 1308938 - DNA, 25 bp, Homo sapien
tatgaacgttatgatcagtaggtag

SEQ ID NO: 1308939 - DNA, 25 bp, Homo sapien
aatgttaacccaatactttaatatg

SEQ ID NO: 1308940 - DNA, 25 bp, Homo sapien
tagggtttatcttagtcggagacca

SEQ ID NO: 1308941 - DNA, 25 bp, Homo sapien
tagcaactggaaatgtgagatgaac

SEQ ID NO: 1308942 - DNA, 25 bp, Homo sapien
cagttactcgttttactcttagcat

SEQ ID NO: 1308943 - DNA, 25 bp, Homo sapien
tactcttagcataactttagggaac

SEQ ID NO: 1308944 - DNA, 25 bp, Homo sapien
gttactcgttttactcttagcataa

SEQ ID NO: 1308945 - DNA, 25 bp, Homo sapien
actcttagcataactttagggaaca

SEQ ID NO: 1308946 - DNA, 25 bp, Homo sapien
ccagttactcgttttactcttagca

SEQ ID NO: 1308947 - DNA, 25 bp, Homo sapien
tcttagcataactttagggaacaat

SEQ ID NO: 1308948 - DNA, 25 bp, Homo sapien
aagttatgctaagagtaaaacgagt

SEQ ID NO: 1308949 - DNA, 25 bp, Homo sapien
ttatgctaagagtaaaacgagtaac

SEQ ID NO: 1308950 - DNA, 25 bp, Homo sapien
tatgctaagagtaaaacgagtaact

SEQ ID NO: 1308951 - DNA, 25 bp, Homo sapien
attgttccctaaagttatgctaaga

SEQ ID NO: 1308952 - DNA, 25 bp, Homo sapien
tgttccctaaagttatgctaagagt

SEQ ID NO: 1308953 - DNA, 25 bp, Homo sapien
tgctaagagtaaaacgagtaactgg

SEQ ID NO: 1308954 - DNA, 25 bp, Homo sapien
gcttattcttgttgacagttgcata

SEQ ID NO: 1308955 - DNA, 25 bp, Homo sapien
tagatatgcttattcttgttgacag

SEQ ID NO: 1308956 - DNA, 25 bp, Homo sapien
tattcttgttgacagttgcataatt

SEQ ID NO: 1308957 - DNA, 25 bp, Homo sapien
aagttctgcatattgcttatttcac

SEQ ID NO: 1308958 - DNA, 25 bp, Homo sapien
acttaacactatattagagattgtt

SEQ ID NO: 1308959 - DNA, 25 bp, Homo sapien
tatgcttattcttgttgacagttgc

SEQ ID NO: 1308960 - DNA, 25 bp, Homo sapien
gcaactgtcaacaagaataagcata

SEQ ID NO: 1308961 - DNA, 25 bp, Homo sapien
aacaatctctaatatagtgttaagt

SEQ ID NO: 1308962 - DNA, 25 bp, Homo sapien
tatgcaactgtcaacaagaataagc

SEQ ID NO: 1308963 - DNA, 25 bp, Homo sapien
aaattatgcaactgtcaacaagaat

SEQ ID NO: 1308964 - DNA, 25 bp, Homo sapien
tgtcaacaagaataagcatatctat

SEQ ID NO: 1308965 - DNA, 25 bp, Homo sapien
gtgaaataagcaatatgcagaactt

SEQ ID NO: 1308966 - DNA, 25 bp, Homo sapien
cagtaccctttagcagctgacggcc

SEQ ID NO: 1308967 - DNA, 25 bp, Homo sapien
tggcttcctttccaactagctcttt

SEQ ID NO: 1308968 - DNA, 25 bp, Homo sapien
tccattaacgctcagtaccctttag

SEQ ID NO: 1308969 - DNA, 25 bp, Homo sapien
cttaatgtaacatgcaaacagtaca

SEQ ID NO: 1308970 - DNA, 25 bp, Homo sapien
cacgttctactccatgcttggcttc

SEQ ID NO: 1308971 - DNA, 25 bp, Homo sapien
taatacatgcacttaatgtaacatg

SEQ ID NO: 1308972 - DNA, 25 bp, Homo sapien
tgtactgtttgcatgttacattaag

SEQ ID NO: 1308973 - DNA, 25 bp, Homo sapien
aaaggaagccaagcatggagtagaa

SEQ ID NO: 1308974 - DNA, 25 bp, Homo sapien
taaagggtactgagcgttaatggag

SEQ ID NO: 1308975 - DNA, 25 bp, Homo sapien
gaaagagctagttggaaaggaagcc

SEQ ID NO: 1308976 - DNA, 25 bp, Homo sapien
gggccgtcagctgctaaagggtact

SEQ ID NO: 1308977 - DNA, 25 bp, Homo sapien
gaagccaagcatggagtagaacgtg

SEQ ID NO: 1308978 - DNA, 25 bp, Homo sapien
ggcgcactcttgataaatggttaat

SEQ ID NO: 1308979 - DNA, 25 bp, Homo sapien
caggcgcactcttgataaatggtta

SEQ ID NO: 1308980 - DNA, 25 bp, Homo sapien
ttcaggcgcactcttgataaatggt

SEQ ID NO: 1308981 - DNA, 25 bp, Homo sapien
tcttttcaggcgcactcttgataaa

SEQ ID NO: 1308982 - DNA, 25 bp, Homo sapien
ctactcttttcaggcgcactcttga

SEQ ID NO: 1308983 - DNA, 25 bp, Homo sapien
ttttcaggcgcactcttgataaatg

SEQ ID NO: 1308984 - DNA, 25 bp, Homo sapien
tttatcaagagtgcgcctgaaaaga

SEQ ID NO: 1308985 - DNA, 25 bp, Homo sapien
tcaagagtgcgcctgaaaagagtag

SEQ ID NO: 1308986 - DNA, 25 bp, Homo sapien
taaccatttatcaagagtgcgcctg

SEQ ID NO: 1308987 - DNA, 25 bp, Homo sapien
attaaccatttatcaagagtgcgcc

SEQ ID NO: 1308988 - DNA, 25 bp, Homo sapien
catttatcaagagtgcgcctgaaaa

SEQ ID NO: 1308989 - DNA, 25 bp, Homo sapien
accatttatcaagagtgcgcctgaa

SEQ ID NO: 1308990 - DNA, 25 bp, Homo sapien
catgacctggataacatttccttcc

SEQ ID NO: 1308991 - DNA, 25 bp, Homo sapien
tccatgacctggataacatttcctt

SEQ ID NO: 1308992 - DNA, 25 bp, Homo sapien
atcattgacaaaaatggcatccatg

SEQ ID NO: 1308993 - DNA, 25 bp, Homo sapien
tgacctggataacatttccttcccc

SEQ ID NO: 1308994 - DNA, 25 bp, Homo sapien
cattgacaaaaatggcatccatgac

SEQ ID NO: 1308995 - DNA, 25 bp, Homo sapien
tgacaaaaatggcatccatgacctg

SEQ ID NO: 1308996 - DNA, 25 bp, Homo sapien
gggaaggaaatgttatccaggtcat

SEQ ID NO: 1308997 - DNA, 25 bp, Homo sapien
ggtcatggatgccatttttgtcaat

SEQ ID NO: 1308998 - DNA, 25 bp, Homo sapien
aaggaaatgttatccaggtcatgga

SEQ ID NO: 1308999 - DNA, 25 bp, Homo sapien
gaaggaaatgttatccaggtcatgg

SEQ ID NO: 1309000 - DNA, 25 bp, Homo sapien
caggtcatggatgccatttttgtca

SEQ ID NO: 1309001 - DNA, 25 bp, Homo sapien
catggatgccatttttgtcaatgat

SEQ ID NO: 1309002 - DNA, 25 bp, Homo sapien
ctgaatctgccaaccttcagtgttc

SEQ ID NO: 1309003 - DNA, 25 bp, Homo sapien
tcctgaatctgccaaccttcagtgt

SEQ ID NO: 1309004 - DNA, 25 bp, Homo sapien
cctgaatctgccaaccttcagtgtt

SEQ ID NO: 1309005 - DNA, 25 bp, Homo sapien
aacactgaaggttggcagattcagg

SEQ ID NO: 1309006 - DNA, 25 bp, Homo sapien
acactgaaggttggcagattcagga

SEQ ID NO: 1309007 - DNA, 25 bp, Homo sapien
gaacactgaaggttggcagattcag

SEQ ID NO: 1309008 - DNA, 25 bp, Homo sapien
tccagaaacgcttcatcctgaatct

SEQ ID NO: 1309009 - DNA, 25 bp, Homo sapien
tcctgaatctgccaaccttcagtgt

SEQ ID NO: 1309010 - DNA, 25 bp, Homo sapien
ctgaatctgccaaccttcagtgttc

SEQ ID NO: 1309011 - DNA, 25 bp, Homo sapien
cctgaatctgccaaccttcagtgtt

SEQ ID NO: 1309012 - DNA, 25 bp, Homo sapien
ctccagaaacgcttcatcctgaatc

SEQ ID NO: 1309013 - DNA, 25 bp, Homo sapien
agaaacgcttcatcctgaatctgcc

SEQ ID NO: 1309014 - DNA, 25 bp, Homo sapien
gattcaggatgaagcgtttctggag

SEQ ID NO: 1309015 - DNA, 25 bp, Homo sapien
aacactgaaggttggcagattcagg

SEQ ID NO: 1309016 - DNA, 25 bp, Homo sapien
acactgaaggttggcagattcagga

SEQ ID NO: 1309017 - DNA, 25 bp, Homo sapien
gaacactgaaggttggcagattcag

SEQ ID NO: 1309018 - DNA, 25 bp, Homo sapien
agattcaggatgaagcgtttctgga

SEQ ID NO: 1309019 - DNA, 25 bp, Homo sapien
ggcagattcaggatgaagcgtttct

SEQ ID NO: 1309020 - DNA, 25 bp, Homo sapien
tatctcacgtgagagggcagtggaa

SEQ ID NO: 1309021 - DNA, 25 bp, Homo sapien
ctatctcacgtgagagggcagtgga

SEQ ID NO: 1309022 - DNA, 25 bp, Homo sapien
tctcacgtgagagggcagtggaact

SEQ ID NO: 1309023 - DNA, 25 bp, Homo sapien
atctcacgtgagagggcagtggaac

SEQ ID NO: 1309024 - DNA, 25 bp, Homo sapien
tccactgccctctcacgtgagatag

SEQ ID NO: 1309025 - DNA, 25 bp, Homo sapien
ttccactgccctctcacgtgagata

SEQ ID NO: 1309026 - DNA, 25 bp, Homo sapien
gttccactgccctctcacgtgagat

SEQ ID NO: 1309027 - DNA, 25 bp, Homo sapien
agttccactgccctctcacgtgaga

SEQ ID NO: 1309028 - DNA, 25 bp, Homo sapien
cacgtgagagggcagtggaactcct

SEQ ID NO: 1309029 - DNA, 25 bp, Homo sapien
tatctcacgtgagagggcagtggaa

SEQ ID NO: 1309030 - DNA, 25 bp, Homo sapien
aactccttaggaaatgtctggagga

SEQ ID NO: 1309031 - DNA, 25 bp, Homo sapien
ctatctcacgtgagagggcagtgga

SEQ ID NO: 1309032 - DNA, 25 bp, Homo sapien
tctcacgtgagagggcagtggaact

SEQ ID NO: 1309033 - DNA, 25 bp, Homo sapien
gggcagtggaactccttaggaaatg

SEQ ID NO: 1309034 - DNA, 25 bp, Homo sapien
tccactgccctctcacgtgagatag

SEQ ID NO: 1309035 - DNA, 25 bp, Homo sapien
tcctccagacatttcctaaggagtt

SEQ ID NO: 1309036 - DNA, 25 bp, Homo sapien
catttcctaaggagttccactgccc

SEQ ID NO: 1309037 - DNA, 25 bp, Homo sapien
aaggagttccactgccctctcacgt

SEQ ID NO: 1309038 - DNA, 25 bp, Homo sapien
gttccactgccctctcacgtgagat

SEQ ID NO: 1309039 - DNA, 25 bp, Homo sapien
agttccactgccctctcacgtgaga

SEQ ID NO: 1309040 - DNA, 25 bp, Homo sapien
ctgactctcagtatcctcgaccgat

SEQ ID NO: 1309041 - DNA, 25 bp, Homo sapien
cagtatcctcgaccgatactacaca

SEQ ID NO: 1309042 - DNA, 25 bp, Homo sapien
cgctgtattacatggactacctggc

SEQ ID NO: 1309043 - DNA, 25 bp, Homo sapien
agccttggccaaggccccttttgca

SEQ ID NO: 1309044 - DNA, 25 bp, Homo sapien
catgaagggccagcgctgtattaca

SEQ ID NO: 1309045 - DNA, 25 bp, Homo sapien
tgcagcccacggctatggtgccttc

SEQ ID NO: 1309046 - DNA, 25 bp, Homo sapien
tagtccatgtaatacagcgctggcc

SEQ ID NO: 1309047 - DNA, 25 bp, Homo sapien
tgtgtagtatcggtcgaggatactg

SEQ ID NO: 1309048 - DNA, 25 bp, Homo sapien
taatacagcgctggcccttcatgct

SEQ ID NO: 1309049 - DNA, 25 bp, Homo sapien
gccaggtagtccatgtaatacagcg

SEQ ID NO: 1309050 - DNA, 25 bp, Homo sapien
gaaggcaccatagccgtgggctgca

SEQ ID NO: 1309051 - DNA, 25 bp, Homo sapien
tatcggtcgaggatactgagagtca

SEQ ID NO: 1309052 - DNA, 25 bp, Homo sapien
taggccaagagttacgtgtctgttc

SEQ ID NO: 1309053 - DNA, 25 bp, Homo sapien
aaacatatgtgtatcccaggtccca

SEQ ID NO: 1309054 - DNA, 25 bp, Homo sapien
cccttttaagcagtatgcgtatgca

SEQ ID NO: 1309055 - DNA, 25 bp, Homo sapien
tggccccattggagataccgctgtt

SEQ ID NO: 1309056 - DNA, 25 bp, Homo sapien
aactgtggattgtcactgtaggcca

SEQ ID NO: 1309057 - DNA, 25 bp, Homo sapien
tgattatccaaagacccagagacag

SEQ ID NO: 1309058 - DNA, 25 bp, Homo sapien
tatgtcctgttaaggctgggagaca

SEQ ID NO: 1309059 - DNA, 25 bp, Homo sapien
cctgtgagatgggacctgggataca

SEQ ID NO: 1309060 - DNA, 25 bp, Homo sapien
tgaacagacacgtaactcttggcct

SEQ ID NO: 1309061 - DNA, 25 bp, Homo sapien
catacgcatactgcttaaaagggca

SEQ ID NO: 1309062 - DNA, 25 bp, Homo sapien
tggcctacagtgacaatccacagtt

SEQ ID NO: 1309063 - DNA, 25 bp, Homo sapien
acagaacagcggtatctccaatggg

SEQ ID NO: 1309064 - DNA, 25 bp, Homo sapien
ttccctaccaaaccttagtcagcta

SEQ ID NO: 1309065 - DNA, 25 bp, Homo sapien
ggagcaagaggcagcctttgacact

SEQ ID NO: 1309066 - DNA, 25 bp, Homo sapien
aaccaagatgttcattatgcagctc

SEQ ID NO: 1309067 - DNA, 25 bp, Homo sapien
tacttttggtgatgcggaaattcaa

SEQ ID NO: 1309068 - DNA, 25 bp, Homo sapien
cctgggcatcttgacagacagagcc

SEQ ID NO: 1309069 - DNA, 25 bp, Homo sapien
tgcagctcttggactgtcagtgcaa

SEQ ID NO: 1309070 - DNA, 25 bp, Homo sapien
tgctccccaggtctaaaagggctgc

SEQ ID NO: 1309071 - DNA, 25 bp, Homo sapien
tagctgactaaggtttggtagggaa

SEQ ID NO: 1309072 - DNA, 25 bp, Homo sapien
gagctgcataatgaacatcttggtt

SEQ ID NO: 1309073 - DNA, 25 bp, Homo sapien
ggctctgtctgtcaagatgcccagg

SEQ ID NO: 1309074 - DNA, 25 bp, Homo sapien
ttgcactgacagtccaagagctgca

SEQ ID NO: 1309075 - DNA, 25 bp, Homo sapien
tgaatttccgcatcaccaaaagtaa

SEQ ID NO: 1309076 - DNA, 25 bp, Homo sapien
acctggctgactgtcttcggagtcg

SEQ ID NO: 1309077 - DNA, 25 bp, Homo sapien
cacacgccgaaacctggctgactgt

SEQ ID NO: 1309078 - DNA, 25 bp, Homo sapien
ggcagcagctaacttcacacgccga

SEQ ID NO: 1309079 - DNA, 25 bp, Homo sapien
aattgtctcccacggcagcagctaa

SEQ ID NO: 1309080 - DNA, 25 bp, Homo sapien
acttcacacgccgaaacctggctga

SEQ ID NO: 1309081 - DNA, 25 bp, Homo sapien
gatatgaattgtctcccacggcagc

SEQ ID NO: 1309082 - DNA, 25 bp, Homo sapien
gctgccgtgggagacaattcatatc

SEQ ID NO: 1309083 - DNA, 25 bp, Homo sapien
cgactccgaagacagtcagccaggt

SEQ ID NO: 1309084 - DNA, 25 bp, Homo sapien
ccaggtttcggcgtgtgaagttagc

SEQ ID NO: 1309085 - DNA, 25 bp, Homo sapien
ttcggcgtgtgaagttagctgctgc

SEQ ID NO: 1309086 - DNA, 25 bp, Homo sapien
cagtcagccaggtttcggcgtgtga

SEQ ID NO: 1309087 - DNA, 25 bp, Homo sapien
aagttagctgctgccgtgggagaca

SEQ ID NO: 1309088 - DNA, 25 bp, Homo sapien
tatgactctttatctcttctaccag

SEQ ID NO: 1309089 - DNA, 25 bp, Homo sapien
ctggtagaagagataaagagtcata

SEQ ID NO: 1309090 - DNA, 25 bp, Homo sapien
aaaacgtgcaactttataagatgcg

SEQ ID NO: 1309091 - DNA, 25 bp, Homo sapien
aacgtgcaactttataagatgcgaa

SEQ ID NO: 1309092 - DNA, 25 bp, Homo sapien
gacactgtacagtttgcagaatata

SEQ ID NO: 1309093 - DNA, 25 bp, Homo sapien
cactgtacagtttgcagaatatatt

SEQ ID NO: 1309094 - DNA, 25 bp, Homo sapien
gtgcaactttataagatgcgaaatg

SEQ ID NO: 1309095 - DNA, 25 bp, Homo sapien
gaaaaacgtgcaactttataagatg

SEQ ID NO: 1309096 - DNA, 25 bp, Homo sapien
tttcgcatcttataaagttgcacgt

SEQ ID NO: 1309097 - DNA, 25 bp, Homo sapien
catcttataaagttgcacgtttttc

SEQ ID NO: 1309098 - DNA, 25 bp, Homo sapien
catttcgcatcttataaagttgcac

SEQ ID NO: 1309099 - DNA, 25 bp, Homo sapien
tcgcatcttataaagttgcacgttt

SEQ ID NO: 1309100 - DNA, 25 bp, Homo sapien
aatatattctgcaaactgtacagtg

SEQ ID NO: 1309101 - DNA, 25 bp, Homo sapien
tatattctgcaaactgtacagtgtc

SEQ ID NO: 1309102 - DNA, 25 bp, Homo sapien
tctggttcagctagataagattaga

SEQ ID NO: 1309103 - DNA, 25 bp, Homo sapien
tcttaccactggcaagcacttagaa

SEQ ID NO: 1309104 - DNA, 25 bp, Homo sapien
gaagccatattactggtatctacaa

SEQ ID NO: 1309105 - DNA, 25 bp, Homo sapien
gtctcccagggaggattattcagca

SEQ ID NO: 1309106 - DNA, 25 bp, Homo sapien
tcttccttaggcaataactgtaacc

SEQ ID NO: 1309107 - DNA, 25 bp, Homo sapien
ttcaaacaggaaacgtgtctcccag

SEQ ID NO: 1309108 - DNA, 25 bp, Homo sapien
ctgggagacacgtttcctgtttgaa

SEQ ID NO: 1309109 - DNA, 25 bp, Homo sapien
taatcttatctagctgaaccagagt

SEQ ID NO: 1309110 - DNA, 25 bp, Homo sapien
caggttacagttattgcctaaggaa

SEQ ID NO: 1309111 - DNA, 25 bp, Homo sapien
caaaatgcacctgtagataatatca

SEQ ID NO: 1309112 - DNA, 25 bp, Homo sapien
tattctaagtgcttgccagtggtaa

SEQ ID NO: 1309113 - DNA, 25 bp, Homo sapien
tagtgctgaataatcctccctggga

SEQ ID NO: 1309114 - DNA, 25 bp, Homo sapien
tgctctggccttcgctaaatgcttc

SEQ ID NO: 1309115 - DNA, 25 bp, Homo sapien
ggccttcgctaaatgcttcttgctt

SEQ ID NO: 1309116 - DNA, 25 bp, Homo sapien
tggccttcgctaaatgcttcttgct

SEQ ID NO: 1309117 - DNA, 25 bp, Homo sapien
gccttcgctaaatgcttcttgcttg

SEQ ID NO: 1309118 - DNA, 25 bp, Homo sapien
tctggccttcgctaaatgcttcttg

SEQ ID NO: 1309119 - DNA, 25 bp, Homo sapien
tctgctctggccttcgctaaatgct

SEQ ID NO: 1309120 - DNA, 25 bp, Homo sapien
gaagcatttagcgaaggccagagca

SEQ ID NO: 1309121 - DNA, 25 bp, Homo sapien
agcatttagcgaaggccagagcaga

SEQ ID NO: 1309122 - DNA, 25 bp, Homo sapien
agcaagaagcatttagcgaaggcca

SEQ ID NO: 1309123 - DNA, 25 bp, Homo sapien
gcatttagcgaaggccagagcagag

SEQ ID NO: 1309124 - DNA, 25 bp, Homo sapien
caagcaagaagcatttagcgaaggc

SEQ ID NO: 1309125 - DNA, 25 bp, Homo sapien
caagaagcatttagcgaaggccaga

SEQ ID NO: 1309126 - DNA, 25 bp, Homo sapien
cgggtggccgccagcaatattgtcc

SEQ ID NO: 1309127 - DNA, 25 bp, Homo sapien
ttcttgtcgcctccgaccgggtggc

SEQ ID NO: 1309128 - DNA, 25 bp, Homo sapien
tgttcttgtcgcctccgaccgggtg

SEQ ID NO: 1309129 - DNA, 25 bp, Homo sapien
gactatgttcttgtcgcctccgacc

SEQ ID NO: 1309130 - DNA, 25 bp, Homo sapien
tccaaggccccgactatgttcttgt

SEQ ID NO: 1309131 - DNA, 25 bp, Homo sapien
tggccgccagcaatattgtccagat

SEQ ID NO: 1309132 - DNA, 25 bp, Homo sapien
ccggtcggaggcgacaagaacatag

SEQ ID NO: 1309133 - DNA, 25 bp, Homo sapien
gccacccggtcggaggcgacaagaa

SEQ ID NO: 1309134 - DNA, 25 bp, Homo sapien
atctggacaatattgctggcggcca

SEQ ID NO: 1309135 - DNA, 25 bp, Homo sapien
tctggacaatattgctggcggccac

SEQ ID NO: 1309136 - DNA, 25 bp, Homo sapien
tcggaggcgacaagaacatagtcgg

SEQ ID NO: 1309137 - DNA, 25 bp, Homo sapien
gacaatattgctggcggccacccgg

SEQ ID NO: 1309138 - DNA, 25 bp, Homo sapien
tgtacgtcatccgagagcgccgtgg

SEQ ID NO: 1309139 - DNA, 25 bp, Homo sapien
accggtgagacctggaagcgggcga

SEQ ID NO: 1309140 - DNA, 25 bp, Homo sapien
aagtcgtgctgcaggcgtcgcgcca

SEQ ID NO: 1309141 - DNA, 25 bp, Homo sapien
ttcgctctgaggtgctgtctcaccg

SEQ ID NO: 1309142 - DNA, 25 bp, Homo sapien
ggcgtcgcgccaatcttcgctctga

SEQ ID NO: 1309143 - DNA, 25 bp, Homo sapien
cgtcatccgagagcgccgtggaagt

SEQ ID NO: 1309144 - DNA, 25 bp, Homo sapien
agtctcgtgctgtgtcggacctgca

SEQ ID NO: 1309145 - DNA, 25 bp, Homo sapien
gcgagtctcgtgctgtgtcggacct

SEQ ID NO: 1309146 - DNA, 25 bp, Homo sapien
ctcgtgctgtgtcggacctgcagcc

SEQ ID NO: 1309147 - DNA, 25 bp, Homo sapien
gagtctcgtgctgtgtcggacctgc

SEQ ID NO: 1309148 - DNA, 25 bp, Homo sapien
tctcgtgctgtgtcggacctgcagc

SEQ ID NO: 1309149 - DNA, 25 bp, Homo sapien
gtctcgtgctgtgtcggacctgcag

SEQ ID NO: 1309150 - DNA, 25 bp, Homo sapien
ggctgcaggtccgacacagcacgag

SEQ ID NO: 1309151 - DNA, 25 bp, Homo sapien
ctgcaggtccgacacagcacgagac

SEQ ID NO: 1309152 - DNA, 25 bp, Homo sapien
gctgcaggtccgacacagcacgaga

SEQ ID NO: 1309153 - DNA, 25 bp, Homo sapien
aggtccgacacagcacgagactcgc

SEQ ID NO: 1309154 - DNA, 25 bp, Homo sapien
tgcaggtccgacacagcacgagact

SEQ ID NO: 1309155 - DNA, 25 bp, Homo sapien
caggtccgacacagcacgagactcg

SEQ ID NO: 1309156 - DNA, 25 bp, Homo sapien
tggcgcgacgcctgcagcacgactt

SEQ ID NO: 1309157 - DNA, 25 bp, Homo sapien
gacagcacctcagagcgaagattgg

SEQ ID NO: 1309158 - DNA, 25 bp, Homo sapien
cggtgagacagcacctcagagcgaa

SEQ ID NO: 1309159 - DNA, 25 bp, Homo sapien
gagactcgcccgcttccaggtctca

SEQ ID NO: 1309160 - DNA, 25 bp, Homo sapien
ttccacggcgctctcggatgacgta

SEQ ID NO: 1309161 - DNA, 25 bp, Homo sapien
tcagagcgaagattggcgcgacgcc

SEQ ID NO: 1309162 - DNA, 25 bp, Homo sapien
tgctcggcaccttacatacactgcg

SEQ ID NO: 1309163 - DNA, 25 bp, Homo sapien
tttttgacacccacacgtgctcggc

SEQ ID NO: 1309164 - DNA, 25 bp, Homo sapien
cataaggcaagtgacctgcacagcc

SEQ ID NO: 1309165 - DNA, 25 bp, Homo sapien
agggaaacggctgcctggctaccta

SEQ ID NO: 1309166 - DNA, 25 bp, Homo sapien
gagaaactgggcgtcacataaggca

SEQ ID NO: 1309167 - DNA, 25 bp, Homo sapien
gagacaagcactgaacataaggcac

SEQ ID NO: 1309168 - DNA, 25 bp, Homo sapien
gcagtgtatgtaaggtgccgagcac

SEQ ID NO: 1309169 - DNA, 25 bp, Homo sapien
gccgagcacgtgtgggtgtcaaaaa

SEQ ID NO: 1309170 - DNA, 25 bp, Homo sapien
ggtctcctccggagcaggctgtgca

SEQ ID NO: 1309171 - DNA, 25 bp, Homo sapien
ttgtctctgggatcgtacgggtctc

SEQ ID NO: 1309172 - DNA, 25 bp, Homo sapien
ttgccttatgtgacgcccagtttct

SEQ ID NO: 1309173 - DNA, 25 bp, Homo sapien
ggtaggtagccaggcagccgtttcc

SEQ ID NO: 1309174 - DNA, 25 bp, Homo sapien
catggtatctacttttactttagtc

SEQ ID NO: 1309175 - DNA, 25 bp, Homo sapien
gtatctacttttactttagtctgga

SEQ ID NO: 1309176 - DNA, 25 bp, Homo sapien
cttttactttagtctggacagtcat

SEQ ID NO: 1309177 - DNA, 25 bp, Homo sapien
tctacttttactttagtctggacag

SEQ ID NO: 1309178 - DNA, 25 bp, Homo sapien
tttaattagaaacaagttctcacta

SEQ ID NO: 1309179 - DNA, 25 bp, Homo sapien
actgcgcctgacctatttatttatt

SEQ ID NO: 1309180 - DNA, 25 bp, Homo sapien
tgttggcaaaactgatctcaaactc

SEQ ID NO: 1309181 - DNA, 25 bp, Homo sapien
ccactgcgcctgacctatttattta

SEQ ID NO: 1309182 - DNA, 25 bp, Homo sapien
cacctgtcagggatgaaactcttta

SEQ ID NO: 1309183 - DNA, 25 bp, Homo sapien
cactttgccgatagggagactgagg

SEQ ID NO: 1309184 - DNA, 25 bp, Homo sapien
ccagaagccgggtttatacactcaa

SEQ ID NO: 1309185 - DNA, 25 bp, Homo sapien
ggagcctgccaatccctgtttgaag

SEQ ID NO: 1309186 - DNA, 25 bp, Homo sapien
gaataagctccttccggttgtctag

SEQ ID NO: 1309187 - DNA, 25 bp, Homo sapien
gagctcgggctgacataatccagga

SEQ ID NO: 1309188 - DNA, 25 bp, Homo sapien
tgctcagggaactgctggcatagcc

SEQ ID NO: 1309189 - DNA, 25 bp, Homo sapien
tcgggcctgctggtcaatcaactga

SEQ ID NO: 1309190 - DNA, 25 bp, Homo sapien
cttagctgcagggacaaggctgcaa

SEQ ID NO: 1309191 - DNA, 25 bp, Homo sapien
tgtcaagccctttctcttgactctg

SEQ ID NO: 1309192 - DNA, 25 bp, Homo sapien
caggagaccgagtcacagtaggaca

SEQ ID NO: 1309193 - DNA, 25 bp, Homo sapien
tcgtggttttcgtcctccctgtcta

SEQ ID NO: 1309194 - DNA, 25 bp, Homo sapien
gactctcagatctgtcttcagccca

SEQ ID NO: 1309195 - DNA, 25 bp, Homo sapien
gaccatcatatgctggtgactctca

SEQ ID NO: 1309196 - DNA, 25 bp, Homo sapien
tgtagcttcaaagaccatcatatgc

SEQ ID NO: 1309197 - DNA, 25 bp, Homo sapien
tggtgactctcagatctgtcttcag

SEQ ID NO: 1309198 - DNA, 25 bp, Homo sapien
tcaaattctacataaccagtccagg

SEQ ID NO: 1309199 - DNA, 25 bp, Homo sapien
tctacataaccagtccaggcatggt

SEQ ID NO: 1309200 - DNA, 25 bp, Homo sapien
tgcaaccaaccatagtctcctcaaa

SEQ ID NO: 1309201 - DNA, 25 bp, Homo sapien
gcaaccaaccatagtctcctcaaat

SEQ ID NO: 1309202 - DNA, 25 bp, Homo sapien
ccaggtccggtgctctctcctattg

SEQ ID NO: 1309203 - DNA, 25 bp, Homo sapien
cggactgcggagtcaggcggcgtct

SEQ ID NO: 1309204 - DNA, 25 bp, Homo sapien
cctggtggtgtctagtccctgggct

SEQ ID NO: 1309205 - DNA, 25 bp, Homo sapien
gcgtctgcgcagcagggcggagcga

SEQ ID NO: 1309206 - DNA, 25 bp, Homo sapien
ccttccggcgttaaactcctcaatg

SEQ ID NO: 1309207 - DNA, 25 bp, Homo sapien
ctgcagacaccgtgccattttcaag

SEQ ID NO: 1309208 - DNA, 25 bp, Homo sapien
agacaccgtgccattttcaagtgaa

SEQ ID NO: 1309209 - DNA, 25 bp, Homo sapien
aagtgaaatctgattagtcaccacc

SEQ ID NO: 1309210 - DNA, 25 bp, Homo sapien
gctctccgcaggacacagagcccac

SEQ ID NO: 1309211 - DNA, 25 bp, Homo sapien
gggggctctccgcaggacacagagc

SEQ ID NO: 1309212 - DNA, 25 bp, Homo sapien
ggctctccgcaggacacagagccca

SEQ ID NO: 1309213 - DNA, 25 bp, Homo sapien
gacgggggctctccgcaggacacag

SEQ ID NO: 1309214 - DNA, 25 bp, Homo sapien
aaaggaaataagaaggagaaggcag

SEQ ID NO: 1309215 - DNA, 25 bp, Homo sapien
aggaaataagaaggagaaggcagaa

SEQ ID NO: 1309216 - DNA, 25 bp, Homo sapien
tttttatgattatgatgactatttt

SEQ ID NO: 1309217 - DNA, 25 bp, Homo sapien
tgattatgatgactattttaaaagg

SEQ ID NO: 1309218 - DNA, 25 bp, Homo sapien
catcaattgtttgttctgcccagaa

SEQ ID NO: 1309219 - DNA, 25 bp, Homo sapien
tcctgtggcctaagtcttctccctt

SEQ ID NO: 1309220 - DNA, 25 bp, Homo sapien
cagctttggtgatctagggttatgc

SEQ ID NO: 1309221 - DNA, 25 bp, Homo sapien
gtggagacgtcagccccatttctac

SEQ ID NO: 1309222 - DNA, 25 bp, Homo sapien
gagctccactccaggtgagccagtc

SEQ ID NO: 1309223 - DNA, 25 bp, Homo sapien
gaatccagggataggagctccactc

SEQ ID NO: 1309224 - DNA, 25 bp, Homo sapien
catgtgggtcaaatgaaagcctgaa

SEQ ID NO: 1309225 - DNA, 25 bp, Homo sapien
gccagtcagagtccttctctgggat

SEQ ID NO: 1309226 - DNA, 25 bp, Homo sapien
tctacaagacaagccagtgacagcc

SEQ ID NO: 1309227 - DNA, 25 bp, Homo sapien
cagtctacaagtctcagttaccggg

SEQ ID NO: 1309228 - DNA, 25 bp, Homo sapien
aaaataagctaagaaggccaggccg

SEQ ID NO: 1309229 - DNA, 25 bp, Homo sapien
tgtgggctatccttgaccttgggca

SEQ ID NO: 1309230 - DNA, 25 bp, Homo sapien
gcccactctgtgtaagggactgagg

SEQ ID NO: 1309231 - DNA, 25 bp, Homo sapien
ctgcccactctgtgtaagggactga

SEQ ID NO: 1309232 - DNA, 25 bp, Homo sapien
tgcccactctgtgtaagggactgag

SEQ ID NO: 1309233 - DNA, 25 bp, Homo sapien
cccactctgtgtaagggactgaggg

SEQ ID NO: 1309234 - DNA, 25 bp, Homo sapien
tgaggtgacaccagccatacacaag

SEQ ID NO: 1309235 - DNA, 25 bp, Homo sapien
tgtcctgcactagaaagctcctctg

SEQ ID NO: 1309236 - DNA, 25 bp, Homo sapien
tttgatcctaaccataccctgtgag

SEQ ID NO: 1309237 - DNA, 25 bp, Homo sapien
cagtctagtagggaaagcaagcctc

SEQ ID NO: 1309238 - DNA, 25 bp, Homo sapien
gagtaccttgtctctagagctttgg

SEQ ID NO: 1309239 - DNA, 25 bp, Homo sapien
tcccaggacaggatgccacaagagt

SEQ ID NO: 1309240 - DNA, 25 bp, Homo sapien
tgagggatgccacagagatctgagt

SEQ ID NO: 1309241 - DNA, 25 bp, Homo sapien
tcaaatagtatcatgggaacactcc

SEQ ID NO: 1309242 - DNA, 25 bp, Homo sapien
atcttgagtattagaaaactgtaga

SEQ ID NO: 1309243 - DNA, 25 bp, Homo sapien
cattttccccattataagattacaa

SEQ ID NO: 1309244 - DNA, 25 bp, Homo sapien
gattacaagtatacaaacataagta

SEQ ID NO: 1309245 - DNA, 25 bp, Homo sapien
cttgagtattagaaaactgtagaaa

SEQ ID NO: 1309246 - DNA, 25 bp, Homo sapien
aaaaacctacaacctaattgcatca

SEQ ID NO: 1309247 - DNA, 25 bp, Homo sapien
cctaattgcatcaattaaattggtg

SEQ ID NO: 1309248 - DNA, 25 bp, Homo sapien
aattggtgttcccatctcccagtaa

SEQ ID NO: 1309249 - DNA, 25 bp, Homo sapien
tccaactgcccaagtacaggtcctg

SEQ ID NO: 1309250 - DNA, 25 bp, Homo sapien
taagagtaatacagcagcccatctg

SEQ ID NO: 1309251 - DNA, 25 bp, Homo sapien
aattcagtcccaggaagggtctctc

SEQ ID NO: 1309252 - DNA, 25 bp, Homo sapien
aaatctttctttcaccgagccctgg

SEQ ID NO: 1309253 - DNA, 25 bp, Homo sapien
catctgttggttcctaggtcctcca

SEQ ID NO: 1309254 - DNA, 25 bp, Homo sapien
gagaagtcatgaaagatggacccct

SEQ ID NO: 1309255 - DNA, 25 bp, Homo sapien
catctgttttgaggtgcttaggtga

SEQ ID NO: 1309256 - DNA, 25 bp, Homo sapien
tcgcgtcaatcctgaagtgctatca

SEQ ID NO: 1309257 - DNA, 25 bp, Homo sapien
caaatatttgaagatgcttcgcgtc

SEQ ID NO: 1309258 - DNA, 25 bp, Homo sapien
cagctttgggctggtttagcagtga

SEQ ID NO: 1309259 - DNA, 25 bp, Homo sapien
ttcttgaatttcgaggagcactggg

SEQ ID NO: 1309260 - DNA, 25 bp, Homo sapien
gccgcctcagccttgacaggagaaa

SEQ ID NO: 1309261 - DNA, 25 bp, Homo sapien
tgagacttagacgattcctttgccg

SEQ ID NO: 1309262 - DNA, 25 bp, Homo sapien
ctggtctgatggcttcaaaaggatt

SEQ ID NO: 1309263 - DNA, 25 bp, Homo sapien
cagccacatatactcatgaatacag

SEQ ID NO: 1309264 - DNA, 25 bp, Homo sapien
gaatacagtctctactgcccaatag

SEQ ID NO: 1309265 - DNA, 25 bp, Homo sapien
actactctgagccttagaacataaa

SEQ ID NO: 1309266 - DNA, 25 bp, Homo sapien
ggtatacaatcctgggcaactagag

SEQ ID NO: 1309267 - DNA, 25 bp, Homo sapien
tggccagtatcataaactgactgtc

SEQ ID NO: 1309268 - DNA, 25 bp, Homo sapien
tgtaactttcttggccagtatcata

SEQ ID NO: 1309269 - DNA, 25 bp, Homo sapien
cttcagctgtaattttcccctgctg

SEQ ID NO: 1309270 - DNA, 25 bp, Homo sapien
agtatcataaactgactgtcctccc

SEQ ID NO: 1309271 - DNA, 25 bp, Homo sapien
tgttcttcagtctgatcatcatcag

SEQ ID NO: 1309272 - DNA, 25 bp, Homo sapien
atgtcccgaagccactgctctcgtt

SEQ ID NO: 1309273 - DNA, 25 bp, Homo sapien
actgctctcgttcaattcgctcctt

SEQ ID NO: 1309274 - DNA, 25 bp, Homo sapien
aagctgttcttcagtctgatcatca

SEQ ID NO: 1309275 - DNA, 25 bp, Homo sapien
agagtgaaggtaatcagcattcggc

SEQ ID NO: 1309276 - DNA, 25 bp, Homo sapien
ggtaatcagcattcggcagtcctca

SEQ ID NO: 1309277 - DNA, 25 bp, Homo sapien
gaaggtaatcagcattcggcagtcc

SEQ ID NO: 1309278 - DNA, 25 bp, Homo sapien
gtgaaggtaatcagcattcggcagt

SEQ ID NO: 1309279 - DNA, 25 bp, Homo sapien
gcccaggaccatcgctgtgcagatc

SEQ ID NO: 1309280 - DNA, 25 bp, Homo sapien
tgtgcagatccccatcagcaaggta

SEQ ID NO: 1309281 - DNA, 25 bp, Homo sapien
tcattcgcccaggaccatcgctgtg

SEQ ID NO: 1309282 - DNA, 25 bp, Homo sapien
tatgtttttccatcgaaacttcctc

SEQ ID NO: 1309283 - DNA, 25 bp, Homo sapien
tcttggtataaacgtagctgtcgct

SEQ ID NO: 1309284 - DNA, 25 bp, Homo sapien
taaacgtagctgtcgcttatcatca

SEQ ID NO: 1309285 - DNA, 25 bp, Homo sapien
tagctgtcgcttatcatcatccaac

SEQ ID NO: 1309286 - DNA, 25 bp, Homo sapien
ctctcttggtataaacgtagctgtc

SEQ ID NO: 1309287 - DNA, 25 bp, Homo sapien
catcaattacgtcctcttcatattc

SEQ ID NO: 1309288 - DNA, 25 bp, Homo sapien
tcaattacgtcctcttcatattcat

SEQ ID NO: 1309289 - DNA, 25 bp, Homo sapien
tacttcatcaattacgtcctcttca

SEQ ID NO: 1309290 - DNA, 25 bp, Homo sapien
aggaagtacttcatcaattacgtcc

SEQ ID NO: 1309291 - DNA, 25 bp, Homo sapien
acttcctgacacctctgcctcatcc

SEQ ID NO: 1309292 - DNA, 25 bp, Homo sapien
atcacttcctgacacctctgcctca

SEQ ID NO: 1309293 - DNA, 25 bp, Homo sapien
cacatcacttcctgacacctctgcc

SEQ ID NO: 1309294 - DNA, 25 bp, Homo sapien
ccacatcacttcctgacacctctgc

SEQ ID NO: 1309295 - DNA, 25 bp, Homo sapien
gatcgcttcaggagttcttcttcat

SEQ ID NO: 1309296 - DNA, 25 bp, Homo sapien
cagtgccagatcattaccagagtca

SEQ ID NO: 1309297 - DNA, 25 bp, Homo sapien
ttcatggtcttccagtgccagatca

SEQ ID NO: 1309298 - DNA, 25 bp, Homo sapien
ttcaacttctcagatcgcttcagga

SEQ ID NO: 1309299 - DNA, 25 bp, Homo sapien
tatcatttgaaacaagccgaaagtc

SEQ ID NO: 1309300 - DNA, 25 bp, Homo sapien
catttgaaacaagccgaaagtctcc

SEQ ID NO: 1309301 - DNA, 25 bp, Homo sapien
ttgaaacaagccgaaagtctccaaa

SEQ ID NO: 1309302 - DNA, 25 bp, Homo sapien
tgaaacaagccgaaagtctccaaat

SEQ ID NO: 1309303 - DNA, 25 bp, Homo sapien
agcctgagcaaagagcaagtgcttc

SEQ ID NO: 1309304 - DNA, 25 bp, Homo sapien
gagcctgagcaaagagcaagtgctt

SEQ ID NO: 1309305 - DNA, 25 bp, Homo sapien
tctcctgtttatttaactctgatga

SEQ ID NO: 1309306 - DNA, 25 bp, Homo sapien
ccttctcctgtttatttaactctga

SEQ ID NO: 1309307 - DNA, 25 bp, Homo sapien
tgctctccttctcctgtttatttaa

SEQ ID NO: 1309308 - DNA, 25 bp, Homo sapien
tggatcacccatgctgctctccttc

SEQ ID NO: 1309309 - DNA, 25 bp, Homo sapien
ttgatactctcggttggatatttac

SEQ ID NO: 1309310 - DNA, 25 bp, Homo sapien
gcttgatactctcggttggatattt

SEQ ID NO: 1309311 - DNA, 25 bp, Homo sapien
aagcttgatactctcggttggatat

SEQ ID NO: 1309312 - DNA, 25 bp, Homo sapien
ttgggtgtggtaagcttgatactct

SEQ ID NO: 1309313 - DNA, 25 bp, Homo sapien
cctgagaagtgaattttcctgaaca

SEQ ID NO: 1309314 - DNA, 25 bp, Homo sapien
gagatgtgaactttccagtacacaa

SEQ ID NO: 1309315 - DNA, 25 bp, Homo sapien
caaagcttggtactgattcctgtgg

SEQ ID NO: 1309316 - DNA, 25 bp, Homo sapien
catactggccaatggcaatcgaggc

SEQ ID NO: 1309317 - DNA, 25 bp, Homo sapien
ctctggggaggcgttatacagatcc

SEQ ID NO: 1309318 - DNA, 25 bp, Homo sapien
ccatctgcatccaacagttggctct

SEQ ID NO: 1309319 - DNA, 25 bp, Homo sapien
catctgcatccaacagttggctctg

SEQ ID NO: 1309320 - DNA, 25 bp, Homo sapien
gcgttatacagatcctgggaatcct

SEQ ID NO: 1309321 - DNA, 25 bp, Homo sapien
gaaggctcagacagtttccctgaac

SEQ ID NO: 1309322 - DNA, 25 bp, Homo sapien
tgaaggctcagacagtttccctgaa

SEQ ID NO: 1309323 - DNA, 25 bp, Homo sapien
gtgaaggctcagacagtttccctga

SEQ ID NO: 1309324 - DNA, 25 bp, Homo sapien
aaggctcagacagtttccctgaact

SEQ ID NO: 1309325 - DNA, 25 bp, Homo sapien
gatggaatcgtggagccaatcagct

SEQ ID NO: 1309326 - DNA, 25 bp, Homo sapien
tagaagctgagctgaccaaactggc

SEQ ID NO: 1309327 - DNA, 25 bp, Homo sapien
caaactggctcgaaatagcccaggg

SEQ ID NO: 1309328 - DNA, 25 bp, Homo sapien
tgctgtagggaaaaaactggtccca

SEQ ID NO: 1309329 - DNA, 25 bp, Homo sapien
cgtactgcagtccttaaatatcaaa

SEQ ID NO: 1309330 - DNA, 25 bp, Homo sapien
gtactgcagtccttaaatatcaaag

SEQ ID NO: 1309331 - DNA, 25 bp, Homo sapien
tttgctaggctgcttgcctgagttt

SEQ ID NO: 1309332 - DNA, 25 bp, Homo sapien
ccagtttgctaggctgcttgcctga

SEQ ID NO: 1309333 - DNA, 25 bp, Homo sapien
agtttgctaggctgcttgcctgagt

SEQ ID NO: 1309334 - DNA, 25 bp, Homo sapien
tgatttttcttcagtaggaaagtaa

SEQ ID NO: 1309335 - DNA, 25 bp, Homo sapien
gtagaatctgatgagagagacttgg

SEQ ID NO: 1309336 - DNA, 25 bp, Homo sapien
cttaaacagaagtaaagtagaatct

SEQ ID NO: 1309337 - DNA, 25 bp, Homo sapien
actgccttgccaatttcactactgc

SEQ ID NO: 1309338 - DNA, 25 bp, Homo sapien
ttgccaatttcactactgccatcat

SEQ ID NO: 1309339 - DNA, 25 bp, Homo sapien
ttctttctctaccttctcttctcca

SEQ ID NO: 1309340 - DNA, 25 bp, Homo sapien
ttctcttctttctctaccttctctt

SEQ ID NO: 1309341 - DNA, 25 bp, Homo sapien
cctcttcctctagttcttcctcttt

SEQ ID NO: 1309342 - DNA, 25 bp, Homo sapien
tcttctttctctaccttctcttctc

SEQ ID NO: 1309343 - DNA, 25 bp, Homo sapien
tcatctgtcatttcttcctcttcct

SEQ ID NO: 1309344 - DNA, 25 bp, Homo sapien
atttcttcctcttcctcctcctctt

SEQ ID NO: 1309345 - DNA, 25 bp, Homo sapien
tttaaacagtgcttggcgcttctgg

SEQ ID NO: 1309346 - DNA, 25 bp, Homo sapien
ccttcggagtttcattgcttcttgc

SEQ ID NO: 1309347 - DNA, 25 bp, Homo sapien
tcctcaaaccttcggagtttcattg

SEQ ID NO: 1309348 - DNA, 25 bp, Homo sapien
cttgcagtttagcttttaacacctg

SEQ ID NO: 1309349 - DNA, 25 bp, Homo sapien
taaagtcacaggtaccacatctgct

SEQ ID NO: 1309350 - DNA, 25 bp, Homo sapien
ccatccaacttcttaggtgctaaag

SEQ ID NO: 1309351 - DNA, 25 bp, Homo sapien
gaaacgctgcttcaaggcttccagt

SEQ ID NO: 1309352 - DNA, 25 bp, Homo sapien
cactgtctgaccagccctgggtttg

SEQ ID NO: 1309353 - DNA, 25 bp, Homo sapien
tgacatagcacctgccaacaataag

SEQ ID NO: 1309354 - DNA, 25 bp, Homo sapien
agactcactgagcatattttacaca

SEQ ID NO: 1309355 - DNA, 25 bp, Homo sapien
ccaaagtcaacccattcaattaaca

SEQ ID NO: 1309356 - DNA, 25 bp, Homo sapien
gtcttgatgtgaaccatttcactaa

SEQ ID NO: 1309357 - DNA, 25 bp, Homo sapien
tctgcccatatctggaacaactgca

SEQ ID NO: 1309358 - DNA, 25 bp, Homo sapien
gatcaaagtggttattggttcctcc

SEQ ID NO: 1309359 - DNA, 25 bp, Homo sapien
gggaggctccccacaatgtaaagga

SEQ ID NO: 1309360 - DNA, 25 bp, Homo sapien
gctaccaggataatcactccaggga

SEQ ID NO: 1309361 - DNA, 25 bp, Homo sapien
catcagcacctagccgtggtttaat

SEQ ID NO: 1309362 - DNA, 25 bp, Homo sapien
ggtttaatggaaacatctactccca

SEQ ID NO: 1309363 - DNA, 25 bp, Homo sapien
actcccagttgcttaagtctatcca

SEQ ID NO: 1309364 - DNA, 25 bp, Homo sapien
gcttaagtctatccagagtaaaccg

SEQ ID NO: 1309365 - DNA, 25 bp, Homo sapien
ctacagggagtgcattagtttccac

SEQ ID NO: 1309366 - DNA, 25 bp, Homo sapien
tctgcacctgttgtctgctcagaac

SEQ ID NO: 1309367 - DNA, 25 bp, Homo sapien
tcactgtgattgttcccgaggaagt

SEQ ID NO: 1309368 - DNA, 25 bp, Homo sapien
cctccagggcatgaggttcaaatgc

SEQ ID NO: 1309369 - DNA, 25 bp, Homo sapien
catggcatttccgtggcaagtgggc

SEQ ID NO: 1309370 - DNA, 25 bp, Homo sapien
ttcaatagtgccatggcatttccgt

SEQ ID NO: 1309371 - DNA, 25 bp, Homo sapien
tagtgccatggcatttccgtggcaa

SEQ ID NO: 1309372 - DNA, 25 bp, Homo sapien
gggtttacgtttgaagaaatcatga

SEQ ID NO: 1309373 - DNA, 25 bp, Homo sapien
atgatatggaaggttcagtgcagac

SEQ ID NO: 1309374 - DNA, 25 bp, Homo sapien
tgatatggaaggttcagtgcagact

SEQ ID NO: 1309375 - DNA, 25 bp, Homo sapien
tcgaataaggcgctgagtctcacta

SEQ ID NO: 1309376 - DNA, 25 bp, Homo sapien
cactatgcagttgttttaatgcttc

SEQ ID NO: 1309377 - DNA, 25 bp, Homo sapien
gagtctcactatgcagttgttttaa

SEQ ID NO: 1309378 - DNA, 25 bp, Homo sapien
tctttacttaatctggctgcctttc

SEQ ID NO: 1309379 - DNA, 25 bp, Homo sapien
ccttttgataactcacttccttcct

SEQ ID NO: 1309380 - DNA, 25 bp, Homo sapien
tggttccttttgataactcacttcc

SEQ ID NO: 1309381 - DNA, 25 bp, Homo sapien
tcgtggttccttttgataactcact

SEQ ID NO: 1309382 - DNA, 25 bp, Homo sapien
tcctcgtggttccttttgataactc

SEQ ID NO: 1309383 - DNA, 25 bp, Homo sapien
taaatggctgttctacatcatcttc

SEQ ID NO: 1309384 - DNA, 25 bp, Homo sapien
gagttattttcatcctccaacccag

SEQ ID NO: 1309385 - DNA, 25 bp, Homo sapien
cagctgctcttattgattctaatga

SEQ ID NO: 1309386 - DNA, 25 bp, Homo sapien
caaaaaggtctttatccacaagaag

SEQ ID NO: 1309387 - DNA, 25 bp, Homo sapien
ttctcaagtcttctttttgatttta

SEQ ID NO: 1309388 - DNA, 25 bp, Homo sapien
tgtttccttcttttttagctgtcta

SEQ ID NO: 1309389 - DNA, 25 bp, Homo sapien
tcctctttctcaagtcttctttttg

SEQ ID NO: 1309390 - DNA, 25 bp, Homo sapien
ctctttctcaagtcttctttttgat

SEQ ID NO: 1309391 - DNA, 25 bp, Homo sapien
caaggtttcacttgcgcttcaagat

SEQ ID NO: 1309392 - DNA, 25 bp, Homo sapien
ggtaaagtctgtagagtttccagac

SEQ ID NO: 1309393 - DNA, 25 bp, Homo sapien
aactctttctgtcagtggtaaagtc

SEQ ID NO: 1309394 - DNA, 25 bp, Homo sapien
tgtctgccacagttttgtaaatcct

SEQ ID NO: 1309395 - DNA, 25 bp, Homo sapien
tcctcctcggcactgtcataggtag

SEQ ID NO: 1309396 - DNA, 25 bp, Homo sapien
cactgtcttgtagaaccttcctgtt

SEQ ID NO: 1309397 - DNA, 25 bp, Homo sapien
tgtgtcctctgtttcggaatcactg

SEQ ID NO: 1309398 - DNA, 25 bp, Homo sapien
ctcggcactgtcataggtagttttc

SEQ ID NO: 1309399 - DNA, 25 bp, Homo sapien
tccactatctgaaggactatctgct

SEQ ID NO: 1309400 - DNA, 25 bp, Homo sapien
actatctgaaggactatctgcttcc

SEQ ID NO: 1309401 - DNA, 25 bp, Homo sapien
gcttcctcttgtgaaatgacgtttg

SEQ ID NO: 1309402 - DNA, 25 bp, Homo sapien
ttgggtcattgatttctaggtgaac

SEQ ID NO: 1309403 - DNA, 25 bp, Homo sapien
gattatcttctaggcaatttgcagc

SEQ ID NO: 1309404 - DNA, 25 bp, Homo sapien
tttgcagcaacgtcaaagggcaggg

SEQ ID NO: 1309405 - DNA, 25 bp, Homo sapien
caaggtcgtgcaaatgactggtcgg

SEQ ID NO: 1309406 - DNA, 25 bp, Homo sapien
tcatgaggtaaataatatgcccgct

SEQ ID NO: 1309407 - DNA, 25 bp, Homo sapien
agagacctggagctctccggccacg

SEQ ID NO: 1309408 - DNA, 25 bp, Homo sapien
gctggcggcaggaaccggctgaaga

SEQ ID NO: 1309409 - DNA, 25 bp, Homo sapien
aggagcttccgcgacaggaaacgcg

SEQ ID NO: 1309410 - DNA, 25 bp, Homo sapien
gccacggagcccgaagcgcgggaag

SEQ ID NO: 1309411 - DNA, 25 bp, Homo sapien
cctgcgctccactagggacggagct

SEQ ID NO: 1309412 - DNA, 25 bp, Homo sapien
ctagggacggagctgtctctgattc

SEQ ID NO: 1309413 - DNA, 25 bp, Homo sapien
ccagcagtgctgttcttgctttccc

SEQ ID NO: 1309414 - DNA, 25 bp, Homo sapien
tctgattccctcagccggagagcag

SEQ ID NO: 1309415 - DNA, 25 bp, Homo sapien
tatatgatataaagaatgactggaa

SEQ ID NO: 1309416 - DNA, 25 bp, Homo sapien
tccaaacggataaccagttgtccca

SEQ ID NO: 1309417 - DNA, 25 bp, Homo sapien
atttactatagtcattcttttcctt

SEQ ID NO: 1309418 - DNA, 25 bp, Homo sapien
cctttctaatgtgaaatgccatgtt

SEQ ID NO: 1309419 - DNA, 25 bp, Homo sapien
aaggattttcactatcatgggagcc

SEQ ID NO: 1309420 - DNA, 25 bp, Homo sapien
tcaaggattttcactatcatgggag

SEQ ID NO: 1309421 - DNA, 25 bp, Homo sapien
caaggattttcactatcatgggagc

SEQ ID NO: 1309422 - DNA, 25 bp, Homo sapien
ggattttcactatcatgggagccag

SEQ ID NO: 1309423 - DNA, 25 bp, Homo sapien
cctaaagatgctgtgcctgctgggc

SEQ ID NO: 1309424 - DNA, 25 bp, Homo sapien
gactagaaactgcttcttggcctgt

SEQ ID NO: 1309425 - DNA, 25 bp, Homo sapien
gtccttactgaaagccctaaagatg

SEQ ID NO: 1309426 - DNA, 25 bp, Homo sapien
gttctcccactcaaagtccttactg

SEQ ID NO: 1309427 - DNA, 25 bp, Homo sapien
aaatcacccagagggctttgtctag

SEQ ID NO: 1309428 - DNA, 25 bp, Homo sapien
tgtctagatagttgaaattttcaga

SEQ ID NO: 1309429 - DNA, 25 bp, Homo sapien
agtatgacctcatgtacacactaca

SEQ ID NO: 1309430 - DNA, 25 bp, Homo sapien
tcagtctgattggaataaattcttc

SEQ ID NO: 1309431 - DNA, 25 bp, Homo sapien
tgagtttgtcagattgactctagag

SEQ ID NO: 1309432 - DNA, 25 bp, Homo sapien
gactctagagtaagcaaacaccaag

SEQ ID NO: 1309433 - DNA, 25 bp, Homo sapien
gatttgagtattgttacgcatgtga

SEQ ID NO: 1309434 - DNA, 25 bp, Homo sapien
gatatgatagacaaagtgctggctg

SEQ ID NO: 1309435 - DNA, 25 bp, Homo sapien
agcttttcctctcctagctgtgtga

SEQ ID NO: 1309436 - DNA, 25 bp, Homo sapien
tagagtgcatactttggcgttaaac

SEQ ID NO: 1309437 - DNA, 25 bp, Homo sapien
gactaaatgagttaacacgtgtgaa

SEQ ID NO: 1309438 - DNA, 25 bp, Homo sapien
tgtgtgttgcctatatatgtccgct

SEQ ID NO: 1309439 - DNA, 25 bp, Homo sapien
acaggtgagcgcctccatgcccgtc

SEQ ID NO: 1309440 - DNA, 25 bp, Homo sapien
aggtgagcgcctccatgcccgtcta

SEQ ID NO: 1309441 - DNA, 25 bp, Homo sapien
gtgagcgcctccatgcccgtctaat

SEQ ID NO: 1309442 - DNA, 25 bp, Homo sapien
ttacaggtgagcgcctccatgcccg

SEQ ID NO: 1309443 - DNA, 25 bp, Homo sapien
tcctgcctcttccaccttctgagta

SEQ ID NO: 1309444 - DNA, 25 bp, Homo sapien
gattctcctgcctcttccaccttct

SEQ ID NO: 1309445 - DNA, 25 bp, Homo sapien
tgcctcttccaccttctgagtagct

SEQ ID NO: 1309446 - DNA, 25 bp, Homo sapien
tctcctgcctcttccaccttctgag

SEQ ID NO: 1309447 - DNA, 25 bp, Homo sapien
cacacacgactcttctgtgcagata

SEQ ID NO: 1309448 - DNA, 25 bp, Homo sapien
cttggaagaagattaccggccagga

SEQ ID NO: 1309449 - DNA, 25 bp, Homo sapien
aaagacatcacacacgactcttctg

SEQ ID NO: 1309450 - DNA, 25 bp, Homo sapien
ccaggaataacttatattgtggtgc

SEQ ID NO: 1309451 - DNA, 25 bp, Homo sapien
agtttgacttttacctctgtagtca

SEQ ID NO: 1309452 - DNA, 25 bp, Homo sapien
tttgacttttacctctgtagtcatg

SEQ ID NO: 1309453 - DNA, 25 bp, Homo sapien
tgacttttacctctgtagtcatgca

SEQ ID NO: 1309454 - DNA, 25 bp, Homo sapien
ttgacttttacctctgtagtcatgc

SEQ ID NO: 1309455 - DNA, 25 bp, Homo sapien
actgcagatgaactccagctactga

SEQ ID NO: 1309456 - DNA, 25 bp, Homo sapien
tatgcccggcttgtagcatttaggg

SEQ ID NO: 1309457 - DNA, 25 bp, Homo sapien
tgtgaggtgcactcgctcagtctct

SEQ ID NO: 1309458 - DNA, 25 bp, Homo sapien
caggtcttgtgggatgacaactgct

SEQ ID NO: 1309459 - DNA, 25 bp, Homo sapien
gctctgacctggaccttaaagtcaa

SEQ ID NO: 1309460 - DNA, 25 bp, Homo sapien
gacatagtgggcagtggaaatcttt

SEQ ID NO: 1309461 - DNA, 25 bp, Homo sapien
tgacatttgactgaagcctaaagaa

SEQ ID NO: 1309462 - DNA, 25 bp, Homo sapien
tatggatactgttaaggattgtgtc

SEQ ID NO: 1309463 - DNA, 25 bp, Homo sapien
caaagggagttgctctaaagcgagc

SEQ ID NO: 1309464 - DNA, 25 bp, Homo sapien
tctatccaggacatcaggagtgagg

SEQ ID NO: 1309465 - DNA, 25 bp, Homo sapien
gattctggattccactcacagggag

SEQ ID NO: 1309466 - DNA, 25 bp, Homo sapien
tgaaaacaattttgccgcccctgcc

SEQ ID NO: 1309467 - DNA, 25 bp, Homo sapien
tcaacggcgccacctgtgtttgctg

SEQ ID NO: 1309468 - DNA, 25 bp, Homo sapien
agagagttttatgtcgatcgaggcc

SEQ ID NO: 1309469 - DNA, 25 bp, Homo sapien
ctgagtgcagacgtccttaatccct

SEQ ID NO: 1309470 - DNA, 25 bp, Homo sapien
gaggcctgttgctcattaagctgag

SEQ ID NO: 1309471 - DNA, 25 bp, Homo sapien
cactgtcatgtggtgtgaaagattt

SEQ ID NO: 1309472 - DNA, 25 bp, Homo sapien
aaagatttaaatgtagcaacgctaa

SEQ ID NO: 1309473 - DNA, 25 bp, Homo sapien
gatttaaatgtagcaacgctaaaga

SEQ ID NO: 1309474 - DNA, 25 bp, Homo sapien
ttgaggcactgtcatgtggtgtgaa

SEQ ID NO: 1309475 - DNA, 25 bp, Homo sapien
tgggatgacaggcaaacgattctcc

SEQ ID NO: 1309476 - DNA, 25 bp, Homo sapien
gggatgacaggcaaacgattctcct

SEQ ID NO: 1309477 - DNA, 25 bp, Homo sapien
gagtctcactttatcgtccaggctg

SEQ ID NO: 1309478 - DNA, 25 bp, Homo sapien
tgatcctcccgcttcagcctcctga

SEQ ID NO: 1309479 - DNA, 25 bp, Homo sapien
agtctcactttatcgtccaggctgg

SEQ ID NO: 1309480 - DNA, 25 bp, Homo sapien
gtgatcctcccgcttcagcctcctg

SEQ ID NO: 1309481 - DNA, 25 bp, Homo sapien
caaccttgggagctcaagcaaattg

SEQ ID NO: 1309482 - DNA, 25 bp, Homo sapien
ttgggagctcaagcaaattgcccgc

SEQ ID NO: 1309483 - DNA, 25 bp, Homo sapien
tgagccaccatacttagccctattc

SEQ ID NO: 1309484 - DNA, 25 bp, Homo sapien
tctgttgcctagtctagccttgagc

SEQ ID NO: 1309485 - DNA, 25 bp, Homo sapien
ggacattgcctggactttgaattac

SEQ ID NO: 1309486 - DNA, 25 bp, Homo sapien
gaagtggtggaatacatggtccagc

SEQ ID NO: 1309487 - DNA, 25 bp, Homo sapien
tgagtataatagatgggacattgcc

SEQ ID NO: 1309488 - DNA, 25 bp, Homo sapien
atggtccagcatttcaagcctcaga

SEQ ID NO: 1309489 - DNA, 25 bp, Homo sapien
tctttagcccccatttaagccaggc

SEQ ID NO: 1309490 - DNA, 25 bp, Homo sapien
ttttgcctttgtgccatagtcactt

SEQ ID NO: 1309491 - DNA, 25 bp, Homo sapien
agctttttgcctttgtgccatagtc

SEQ ID NO: 1309492 - DNA, 25 bp, Homo sapien
ctttttgcctttgtgccatagtcac

SEQ ID NO: 1309493 - DNA, 25 bp, Homo sapien
gtatgacccggatttgctatgcaaa

SEQ ID NO: 1309494 - DNA, 25 bp, Homo sapien
tctatcctgatctggtgatgaagcc

SEQ ID NO: 1309495 - DNA, 25 bp, Homo sapien
tgattactttagacctagcccaggc

SEQ ID NO: 1309496 - DNA, 25 bp, Homo sapien
gaagggtctaaatcctggcctgtag

SEQ ID NO: 1309497 - DNA, 25 bp, Homo sapien
actgactattagctggcccatagga

SEQ ID NO: 1309498 - DNA, 25 bp, Homo sapien
cccataggatatctgtaaggctggt

SEQ ID NO: 1309499 - DNA, 25 bp, Homo sapien
tcatctcaaactagccaaaaggcag

SEQ ID NO: 1309500 - DNA, 25 bp, Homo sapien
ggcagccaagggtgcactgactatt

SEQ ID NO: 1309501 - DNA, 25 bp, Homo sapien
tcatactgacttagagcctctggct

SEQ ID NO: 1309502 - DNA, 25 bp, Homo sapien
tgttgaatgcactgagtcccttggt

SEQ ID NO: 1309503 - DNA, 25 bp, Homo sapien
tgtgcacacagtccagcctaattgg

SEQ ID NO: 1309504 - DNA, 25 bp, Homo sapien
tatgtgatgttgcacttagcagcca

SEQ ID NO: 1309505 - DNA, 25 bp, Homo sapien
gctattaatgagagtgagctgcaaa

SEQ ID NO: 1309506 - DNA, 25 bp, Homo sapien
tactttgaagtacttagctaggtgt

SEQ ID NO: 1309507 - DNA, 25 bp, Homo sapien
tattgagggacctttctagggagcc

SEQ ID NO: 1309508 - DNA, 25 bp, Homo sapien
gagacagtgggaacttttagccagg

SEQ ID NO: 1309509 - DNA, 25 bp, Homo sapien
tcacagcaagtaagagagggccttc

SEQ ID NO: 1309510 - DNA, 25 bp, Homo sapien
cttggcccatgtgagaggattgtac

SEQ ID NO: 1309511 - DNA, 25 bp, Homo sapien
gataagcagcatctggtctcaaagg

SEQ ID NO: 1309512 - DNA, 25 bp, Homo sapien
cggcctcatggctttgctagaaatg

SEQ ID NO: 1309513 - DNA, 25 bp, Homo sapien
tacttgtgttattcactaacatttg

SEQ ID NO: 1309514 - DNA, 25 bp, Homo sapien
tttatgtatattacctaaccttaca

SEQ ID NO: 1309515 - DNA, 25 bp, Homo sapien
tatgtatattacctaaccttacaaa

SEQ ID NO: 1309516 - DNA, 25 bp, Homo sapien
catttggggaggattttctctgtgc

SEQ ID NO: 1309517 - DNA, 25 bp, Homo sapien
ccacagtgaggggaactgaagatag

SEQ ID NO: 1309518 - DNA, 25 bp, Homo sapien
ccagagagatcaagtgactgatcca

SEQ ID NO: 1309519 - DNA, 25 bp, Homo sapien
aaatagtatgtttcattaaggcaac

SEQ ID NO: 1309520 - DNA, 25 bp, Homo sapien
tattactgaagcatagggacatggg

SEQ ID NO: 1309521 - DNA, 25 bp, Homo sapien
ccagtatagctgtagcacaggcggg

SEQ ID NO: 1309522 - DNA, 25 bp, Homo sapien
ggttttcaagtgtgacgaggcgcta

SEQ ID NO: 1309523 - DNA, 25 bp, Homo sapien
tcctggccaagggaaccaaaagcag

SEQ ID NO: 1309524 - DNA, 25 bp, Homo sapien
tacgccgtgcgttttcaccctggaa

SEQ ID NO: 1309525 - DNA, 25 bp, Homo sapien
tgaccgcctgtgaggaggcggcgcg

SEQ ID NO: 1309526 - DNA, 25 bp, Homo sapien
ggtggatcggactgggcgtggcggg

SEQ ID NO: 1309527 - DNA, 25 bp, Homo sapien
gcggcgcgtggggtggatcggactg

SEQ ID NO: 1309528 - DNA, 25 bp, Homo sapien
gtggccctaccccagcgggctcggc

SEQ ID NO: 1309529 - DNA, 25 bp, Homo sapien
gcgacgtcgtcgcagacaggcaccg

SEQ ID NO: 1309530 - DNA, 25 bp, Homo sapien
ctcgtgcggcgcgagtagtcctgcc

SEQ ID NO: 1309531 - DNA, 25 bp, Homo sapien
gctccaggtaggctactcctcaggt

SEQ ID NO: 1309532 - DNA, 25 bp, Homo sapien
taggctactcctcaggtaagccccg

SEQ ID NO: 1309533 - DNA, 25 bp, Homo sapien
tagtcctgtgccgttttccgtccgc

SEQ ID NO: 1309534 - DNA, 25 bp, Homo sapien
gctccgcaggtgagtcagagtagct

SEQ ID NO: 1309535 - DNA, 25 bp, Homo sapien
ccagagctttcggagtgcggttgct

SEQ ID NO: 1309536 - DNA, 25 bp, Homo sapien
catgaatggaaatcggctccgcagg

SEQ ID NO: 1309537 - DNA, 25 bp, Homo sapien
gaaaccagtgacataacgatagcta

SEQ ID NO: 1309538 - DNA, 25 bp, Homo sapien
gcctaacaaatgatcatgcttggct

SEQ ID NO: 1309539 - DNA, 25 bp, Homo sapien
tagattacgtgtcaaatggttgcaa

SEQ ID NO: 1309540 - DNA, 25 bp, Homo sapien
gaaaggtgttgcataacggtttgcc

SEQ ID NO: 1309541 - DNA, 25 bp, Homo sapien
gcaccatgggcaaacccattaaact

SEQ ID NO: 1309542 - DNA, 25 bp, Homo sapien
ccagcccctactcatggtgcccaga

SEQ ID NO: 1309543 - DNA, 25 bp, Homo sapien
tatcgatggtaagggaactaaagcc

SEQ ID NO: 1309544 - DNA, 25 bp, Homo sapien
catcagtctgttcggcctgccatgt

SEQ ID NO: 1309545 - DNA, 25 bp, Homo sapien
aaaagccctgatgattatctgagca

SEQ ID NO: 1309546 - DNA, 25 bp, Homo sapien
aattatacatactggtgtctcgaag

SEQ ID NO: 1309547 - DNA, 25 bp, Homo sapien
ctcccaggttcaagcaattctcatg

SEQ ID NO: 1309548 - DNA, 25 bp, Homo sapien
gagtgatctcggctcacagcaacct

SEQ ID NO: 1309549 - DNA, 25 bp, Homo sapien
gagtttcgctctggagtacaatgga

SEQ ID NO: 1309550 - DNA, 25 bp, Homo sapien
cagagtttcgctctggagtacaatg

SEQ ID NO: 1309551 - DNA, 25 bp, Homo sapien
ggtaattgcttatatatattcaggc

SEQ ID NO: 1309552 - DNA, 25 bp, Homo sapien
taagtacgtttatcaagagtatgtg

SEQ ID NO: 1309553 - DNA, 25 bp, Homo sapien
ggttataatcatcacctgcaactag

SEQ ID NO: 1309554 - DNA, 25 bp, Homo sapien
tatagactaattagacagggtagga

SEQ ID NO: 1309555 - DNA, 25 bp, Homo sapien
tctggaagcctagttgggagttcta

SEQ ID NO: 1309556 - DNA, 25 bp, Homo sapien
ttgtatctcttccagttagtatgcc

SEQ ID NO: 1309557 - DNA, 25 bp, Homo sapien
tcttccagttagtatgcctgcagat

SEQ ID NO: 1309558 - DNA, 25 bp, Homo sapien
tggtacagtcttgtgctctcaactg

SEQ ID NO: 1309559 - DNA, 25 bp, Homo sapien
tcatctgccacggggctccagcctt

SEQ ID NO: 1309560 - DNA, 25 bp, Homo sapien
atctgccacggggctccagccttct

SEQ ID NO: 1309561 - DNA, 25 bp, Homo sapien
ttcaagccttgtctcacccagaaca

SEQ ID NO: 1309562 - DNA, 25 bp, Homo sapien
caagccttgtctcacccagaacact

SEQ ID NO: 1309563 - DNA, 25 bp, Homo sapien
caagaagctaacagacaatcagact

SEQ ID NO: 1309564 - DNA, 25 bp, Homo sapien
catgtaattggcactaagtaagagc

SEQ ID NO: 1309565 - DNA, 25 bp, Homo sapien
taggtctgtaatattgtggcagggc

SEQ ID NO: 1309566 - DNA, 25 bp, Homo sapien
tgtggcagggcaacgatgtatcaag

SEQ ID NO: 1309567 - DNA, 25 bp, Homo sapien
agagcaccattgattagacctgttg

SEQ ID NO: 1309568 - DNA, 25 bp, Homo sapien
tgcagtccattcatgacccatggtc

SEQ ID NO: 1309569 - DNA, 25 bp, Homo sapien
cgctgttctgtagttagagcaccat

SEQ ID NO: 1309570 - DNA, 25 bp, Homo sapien
gacctgttggaaaatatattatgga

SEQ ID NO: 1309571 - DNA, 25 bp, Homo sapien
tcttctcaagattatgggtttgaca

SEQ ID NO: 1309572 - DNA, 25 bp, Homo sapien
gaggcaagtatctctatcactggag

SEQ ID NO: 1309573 - DNA, 25 bp, Homo sapien
caaactatacattggtcataaacca

SEQ ID NO: 1309574 - DNA, 25 bp, Homo sapien
atgagaaagctcctgtacaaccaga

SEQ ID NO: 1309575 - DNA, 25 bp, Homo sapien
tacatgagtcctacaatatttggct

SEQ ID NO: 1309576 - DNA, 25 bp, Homo sapien
actgttctactttccgcttccatga

SEQ ID NO: 1309577 - DNA, 25 bp, Homo sapien
cattctggaattcttacattctgac

SEQ ID NO: 1309578 - DNA, 25 bp, Homo sapien
taatatcctattaaacctcacgtaa

SEQ ID NO: 1309579 - DNA, 25 bp, Homo sapien
tcatatatgctagagtggagccctt

SEQ ID NO: 1309580 - DNA, 25 bp, Homo sapien
ttttgagcctaaaatctgagcccat

SEQ ID NO: 1309581 - DNA, 25 bp, Homo sapien
tcttcctttatcatgggagctgcac

SEQ ID NO: 1309582 - DNA, 25 bp, Homo sapien
catctgcacgtgaaacctaatggat

SEQ ID NO: 1309583 - DNA, 25 bp, Homo sapien
tcagttaaatagaagtagggtctgc

SEQ ID NO: 1309584 - DNA, 25 bp, Homo sapien
tgtagttacctaccagagggcaatt

SEQ ID NO: 1309585 - DNA, 25 bp, Homo sapien
tagcagtaaatgatcacctaggcac

SEQ ID NO: 1309586 - DNA, 25 bp, Homo sapien
tccataccaggaagcagtaaatagc

SEQ ID NO: 1309587 - DNA, 25 bp, Homo sapien
ctagatggttattccctgtttcttg

SEQ ID NO: 1309588 - DNA, 25 bp, Homo sapien
caacaggcttatgcatttccatggg

SEQ ID NO: 1309589 - DNA, 25 bp, Homo sapien
tacctttatagatcgtggcaggtcc

SEQ ID NO: 1309590 - DNA, 25 bp, Homo sapien
tggcaggtccttacatttcaacagg

SEQ ID NO: 1309591 - DNA, 25 bp, Homo sapien
aaagggcacaccactgcagggagtg

SEQ ID NO: 1309592 - DNA, 25 bp, Homo sapien
ttccaactcattgctaacaaagctg

SEQ ID NO: 1309593 - DNA, 25 bp, Homo sapien
gagaatttcaagtactgaagatgaa

SEQ ID NO: 1309594 - DNA, 25 bp, Homo sapien
tcattgctaacaaagctggcatctg

SEQ ID NO: 1309595 - DNA, 25 bp, Homo sapien
agatgccaacctccccttgttgcag

SEQ ID NO: 1309596 - DNA, 25 bp, Homo sapien
ctatgcaaaatgagttagcctcacc

SEQ ID NO: 1309597 - DNA, 25 bp, Homo sapien
tagcctcacccaaatctcggccttg

SEQ ID NO: 1309598 - DNA, 25 bp, Homo sapien
tatgcaaaatgagttagcctcaccc

SEQ ID NO: 1309599 - DNA, 25 bp, Homo sapien
gcaaaatgagttagcctcacccaaa

SEQ ID NO: 1309600 - DNA, 25 bp, Homo sapien
gagacaagtacaggaccagcagaaa

SEQ ID NO: 1309601 - DNA, 25 bp, Homo sapien
tgagacaagtacaggaccagcagaa

SEQ ID NO: 1309602 - DNA, 25 bp, Homo sapien
gacaagtacaggaccagcagaaaag

SEQ ID NO: 1309603 - DNA, 25 bp, Homo sapien
ctgagacaagtacaggaccagcaga

SEQ ID NO: 1309604 - DNA, 25 bp, Homo sapien
gatacataccataatacttgacaga

SEQ ID NO: 1309605 - DNA, 25 bp, Homo sapien
ctttaaaaagctatgagtttgcatt

SEQ ID NO: 1309606 - DNA, 25 bp, Homo sapien
gcacttaaagcacttatggtctctt

SEQ ID NO: 1309607 - DNA, 25 bp, Homo sapien
cttgaggtaatctataacactcggg

SEQ ID NO: 1309608 - DNA, 25 bp, Homo sapien
agacaaagctgtatggatagtcagg

SEQ ID NO: 1309609 - DNA, 25 bp, Homo sapien
caaagctgtatggatagtcaggtac

SEQ ID NO: 1309610 - DNA, 25 bp, Homo sapien
gtatggatagtcaggtactttaaat

SEQ ID NO: 1309611 - DNA, 25 bp, Homo sapien
gctgtatggatagtcaggtacttta

SEQ ID NO: 1309612 - DNA, 25 bp, Homo sapien
agggaaagcagccgactgaagaata

SEQ ID NO: 1309613 - DNA, 25 bp, Homo sapien
gaaagcagccgactgaagaatatgg

SEQ ID NO: 1309614 - DNA, 25 bp, Homo sapien
gccgactgaagaatatggcaacaag

SEQ ID NO: 1309615 - DNA, 25 bp, Homo sapien
cagccgactgaagaatatggcaaca

SEQ ID NO: 1309616 - DNA, 25 bp, Homo sapien
ctctttctgatgttcatcgtagagg

SEQ ID NO: 1309617 - DNA, 25 bp, Homo sapien
aggtggcagccttgtctaacagcac

SEQ ID NO: 1309618 - DNA, 25 bp, Homo sapien
ggcagccttgtctaacagcaccatt

SEQ ID NO: 1309619 - DNA, 25 bp, Homo sapien
gatgttcatcgtagaggtggcagcc

SEQ ID NO: 1309620 - DNA, 25 bp, Homo sapien
gaccagacgtcatcacaatcacaaa

SEQ ID NO: 1309621 - DNA, 25 bp, Homo sapien
tgattctgacgctgacatgtgttct

SEQ ID NO: 1309622 - DNA, 25 bp, Homo sapien
gctgcaaactgagcctgactaaatt

SEQ ID NO: 1309623 - DNA, 25 bp, Homo sapien
tatccctggcttgaggagaccatga

SEQ ID NO: 1309624 - DNA, 25 bp, Homo sapien
catgacacatgaactgaacgcgtgg

SEQ ID NO: 1309625 - DNA, 25 bp, Homo sapien
tggagcgcttcaaagacctcagggc

SEQ ID NO: 1309626 - DNA, 25 bp, Homo sapien
tacctttgtggtgaatgcaccaggg

SEQ ID NO: 1309627 - DNA, 25 bp, Homo sapien
caccagggcgttgataggaatttgc

SEQ ID NO: 1309628 - DNA, 25 bp, Homo sapien
tttggtgcatctaatacaaaatgat

SEQ ID NO: 1309629 - DNA, 25 bp, Homo sapien
cccttcttccatcgggaaggatgtg

SEQ ID NO: 1309630 - DNA, 25 bp, Homo sapien
tgtctttcttggtccaacccatcag

SEQ ID NO: 1309631 - DNA, 25 bp, Homo sapien
ccgggagccacgaataacagggcca

SEQ ID NO: 1309632 - DNA, 25 bp, Homo sapien
tatggtcaaaagtagacgccaaagc

SEQ ID NO: 1309633 - DNA, 25 bp, Homo sapien
tgcttacttctttgtgttataccac

SEQ ID NO: 1309634 - DNA, 25 bp, Homo sapien
tcaatcctggtaaagaggctatatc

SEQ ID NO: 1309635 - DNA, 25 bp, Homo sapien
gttcatgtccagtttacaagtcata

SEQ ID NO: 1309636 - DNA, 25 bp, Homo sapien
tcttcctgcaattaatttgtccaag

SEQ ID NO: 1309637 - DNA, 25 bp, Homo sapien
tgggcacgtcctcactggcctatgc

SEQ ID NO: 1309638 - DNA, 25 bp, Homo sapien
aaaaacaaccccaatgcctgctagg

SEQ ID NO: 1309639 - DNA, 25 bp, Homo sapien
tacaactgaaggacccttctgggac

SEQ ID NO: 1309640 - DNA, 25 bp, Homo sapien
cactgtgtacacctcaaactgctca

SEQ ID NO: 1309641 - DNA, 25 bp, Homo sapien
tcataggatccggttcagcagagtc

SEQ ID NO: 1309642 - DNA, 25 bp, Homo sapien
gtcctcagaacaggaccaggcctgc

SEQ ID NO: 1309643 - DNA, 25 bp, Homo sapien
ggcctgcacacctgtcttcctctct

SEQ ID NO: 1309644 - DNA, 25 bp, Homo sapien
gttcagcagagtcctcagaacagga

SEQ ID NO: 1309645 - DNA, 25 bp, Homo sapien
ggttttagccagtttgccagcaagc

SEQ ID NO: 1309646 - DNA, 25 bp, Homo sapien
ggacaggcacttgcatccagctgat

SEQ ID NO: 1309647 - DNA, 25 bp, Homo sapien
tgaaggctacgaggagacagacatc

SEQ ID NO: 1309648 - DNA, 25 bp, Homo sapien
cctactatgggatggatcaggtgcc

SEQ ID NO: 1309649 - DNA, 25 bp, Homo sapien
tccagtaaagattgagccatcgccc

SEQ ID NO: 1309650 - DNA, 25 bp, Homo sapien
tgaaacttggccctcggactactga

SEQ ID NO: 1309651 - DNA, 25 bp, Homo sapien
tctttcgtggctgagcatggcaggc

SEQ ID NO: 1309652 - DNA, 25 bp, Homo sapien
gcggtttcagcactctcgggcagat

SEQ ID NO: 1309653 - DNA, 25 bp, Homo sapien
atacaacaggttttattgaggatgt

SEQ ID NO: 1309654 - DNA, 25 bp, Homo sapien
tcttctgtgatacagggcacatgat

SEQ ID NO: 1309655 - DNA, 25 bp, Homo sapien
caatacagttaacatggttgcttgt

SEQ ID NO: 1309656 - DNA, 25 bp, Homo sapien
tataccaagttagaagtgaaatgac

SEQ ID NO: 1309657 - DNA, 25 bp, Homo sapien
taggtatgtagagagctaagcttcc

SEQ ID NO: 1309658 - DNA, 25 bp, Homo sapien
cattttcaacatggaccgcctggac

SEQ ID NO: 1309659 - DNA, 25 bp, Homo sapien
ttcagagggccaaacgagaggtgct

SEQ ID NO: 1309660 - DNA, 25 bp, Homo sapien
gaaacaatctcagcctgcatgcagg

SEQ ID NO: 1309661 - DNA, 25 bp, Homo sapien
aaagcaagttagtctcctcgggcca

SEQ ID NO: 1309662 - DNA, 25 bp, Homo sapien
tggccattgtagagagtccggtcaa

SEQ ID NO: 1309663 - DNA, 25 bp, Homo sapien
cccttgacgtgcacatggtaagcaa

SEQ ID NO: 1309664 - DNA, 25 bp, Homo sapien
cacgttgttcttgtacagggccacc

SEQ ID NO: 1309665 - DNA, 25 bp, Homo sapien
ggtcaaatttcacgggcatgcccga

SEQ ID NO: 1309666 - DNA, 25 bp, Homo sapien
agccgtgccaggttcccctgctctc

SEQ ID NO: 1309667 - DNA, 25 bp, Homo sapien
ggccctgcctcacccttaggcccag

SEQ ID NO: 1309668 - DNA, 25 bp, Homo sapien
actaggcccctggtcacctcgaatg

SEQ ID NO: 1309669 - DNA, 25 bp, Homo sapien
tggtcctccagggcgacccgtgaaa

SEQ ID NO: 1309670 - DNA, 25 bp, Homo sapien
ggctccccatcctcccctggctcac

SEQ ID NO: 1309671 - DNA, 25 bp, Homo sapien
accctgtgggccctgctcccctggc

SEQ ID NO: 1309672 - DNA, 25 bp, Homo sapien
cccccaagaccctgtgggccctgct

SEQ ID NO: 1309673 - DNA, 25 bp, Homo sapien
cctggctccccatcctcccctggct

SEQ ID NO: 1309674 - DNA, 25 bp, Homo sapien
caggaggtccttttgggcccacagc

SEQ ID NO: 1309675 - DNA, 25 bp, Homo sapien
tggcagtcctggcatcccatagcca

SEQ ID NO: 1309676 - DNA, 25 bp, Homo sapien
tgggactcccacaccgtctactcca

SEQ ID NO: 1309677 - DNA, 25 bp, Homo sapien
tcccatagccagtggggcctatcag

SEQ ID NO: 1309678 - DNA, 25 bp, Homo sapien
agccttgcccatccgggagaagcca

SEQ ID NO: 1309679 - DNA, 25 bp, Homo sapien
aggtttgcctaagccagctggacca

SEQ ID NO: 1309680 - DNA, 25 bp, Homo sapien
cttcaggtccatcggcagcagcggt

SEQ ID NO: 1309681 - DNA, 25 bp, Homo sapien
ttccagggatagtaatgcctgaggg

SEQ ID NO: 1309682 - DNA, 25 bp, Homo sapien
ttgccctcacggaagggcggtccca

SEQ ID NO: 1309683 - DNA, 25 bp, Homo sapien
gccctcacggaagggcggtcccaca

SEQ ID NO: 1309684 - DNA, 25 bp, Homo sapien
tggcctttgccctcacggaagggcg

SEQ ID NO: 1309685 - DNA, 25 bp, Homo sapien
tcacggaagggcggtcccacaggtc

SEQ ID NO: 1309686 - DNA, 25 bp, Homo sapien
agcagcagcgaagacaggggtgtca

SEQ ID NO: 1309687 - DNA, 25 bp, Homo sapien
ctggggcatagcccgccgccccacc

SEQ ID NO: 1309688 - DNA, 25 bp, Homo sapien
tggggcatagcccgccgccccaccg

SEQ ID NO: 1309689 - DNA, 25 bp, Homo sapien
agcagcgaagacaggggtgtcagag

SEQ ID NO: 1309690 - DNA, 25 bp, Homo sapien
aaataattggcaagaagcagacccc

SEQ ID NO: 1309691 - DNA, 25 bp, Homo sapien
gcagagtggcggtggtgtgcagcaa

SEQ ID NO: 1309692 - DNA, 25 bp, Homo sapien
tgtgcagcaaatgggccccagcaga

SEQ ID NO: 1309693 - DNA, 25 bp, Homo sapien
aatgggccccagcagaaataattgg

SEQ ID NO: 1309694 - DNA, 25 bp, Homo sapien
gaaggccagcactgacagtccacac

SEQ ID NO: 1309695 - DNA, 25 bp, Homo sapien
ctgttggtcattgggtgggaccctt

SEQ ID NO: 1309696 - DNA, 25 bp, Homo sapien
ctagctgttggtcattgggtgggac

SEQ ID NO: 1309697 - DNA, 25 bp, Homo sapien
ggtgggacccttgggaaggccagca

SEQ ID NO: 1309698 - DNA, 25 bp, Homo sapien
gagctgagctctctatctactgtgc

SEQ ID NO: 1309699 - DNA, 25 bp, Homo sapien
gcagataaggactgccccaaagcca

SEQ ID NO: 1309700 - DNA, 25 bp, Homo sapien
caaagccaaagaggagctcagaatc

SEQ ID NO: 1309701 - DNA, 25 bp, Homo sapien
tgggtctgacttccctggacaatgc

SEQ ID NO: 1309702 - DNA, 25 bp, Homo sapien
gctaccctgcgtggtggcggcagca

SEQ ID NO: 1309703 - DNA, 25 bp, Homo sapien
cagccttttccggagcgccacccgc

SEQ ID NO: 1309704 - DNA, 25 bp, Homo sapien
cctccccacgcctgccaagattcct

SEQ ID NO: 1309705 - DNA, 25 bp, Homo sapien
cttctggttcgcatttgcagccttt

SEQ ID NO: 1309706 - DNA, 25 bp, Homo sapien
ggaggggcctgggaaggttccagca

SEQ ID NO: 1309707 - DNA, 25 bp, Homo sapien
cctgggaaggttccagcagaggcag

SEQ ID NO: 1309708 - DNA, 25 bp, Homo sapien
ggggcctgggaaggttccagcagag

SEQ ID NO: 1309709 - DNA, 25 bp, Homo sapien
ggcctgggaaggttccagcagaggc

SEQ ID NO: 1309710 - DNA, 25 bp, Homo sapien
cgccgggcgccgctcccggccctcg

SEQ ID NO: 1309711 - DNA, 25 bp, Homo sapien
ccgggcggcgagggctccgggcagg

SEQ ID NO: 1309712 - DNA, 25 bp, Homo sapien
gcccgggcggcgagggctccgggca

SEQ ID NO: 1309713 - DNA, 25 bp, Homo sapien
gcgccgctcccggccctcgagggcg

SEQ ID NO: 1309714 - DNA, 25 bp, Homo sapien
gggttccgcgtcgctctgccggccg

SEQ ID NO: 1309715 - DNA, 25 bp, Homo sapien
gccggcggggttccgcgtcgctctg

SEQ ID NO: 1309716 - DNA, 25 bp, Homo sapien
ggttccgcgtcgctctgccggccgc

SEQ ID NO: 1309717 - DNA, 25 bp, Homo sapien
gcggggttccgcgtcgctctgccgg

SEQ ID NO: 1309718 - DNA, 25 bp, Homo sapien
agactgtcgctcctgaatgtgcaca

SEQ ID NO: 1309719 - DNA, 25 bp, Homo sapien
gagctctttctagtccaaccaaagg

SEQ ID NO: 1309720 - DNA, 25 bp, Homo sapien
gtgtttccggcatgactggctcctt

SEQ ID NO: 1309721 - DNA, 25 bp, Homo sapien
taaaggcccagggatagatgtgcca

SEQ ID NO: 1309722 - DNA, 25 bp, Homo sapien
tccaacagtgctcctgatggctatc

SEQ ID NO: 1309723 - DNA, 25 bp, Homo sapien
tggctatcctcgagttgtagggatg

SEQ ID NO: 1309724 - DNA, 25 bp, Homo sapien
tggactatatcgcagtctgctcttt

SEQ ID NO: 1309725 - DNA, 25 bp, Homo sapien
gaatggaaacaggttataagaatat

SEQ ID NO: 1309726 - DNA, 25 bp, Homo sapien
gattgtcctcaatccgcctgatgaa

SEQ ID NO: 1309727 - DNA, 25 bp, Homo sapien
aatccgcctgatgaatctcatccgg

SEQ ID NO: 1309728 - DNA, 25 bp, Homo sapien
gaatctcatccggatttctgtcaca

SEQ ID NO: 1309729 - DNA, 25 bp, Homo sapien
tccagctggaagattgtcctcaatc

SEQ ID NO: 1309730 - DNA, 25 bp, Homo sapien
ttcagggtgtcctggacaaacttgg

SEQ ID NO: 1309731 - DNA, 25 bp, Homo sapien
cgtctcctttcagggtgtcctggac

SEQ ID NO: 1309732 - DNA, 25 bp, Homo sapien
tcctttcagggtgtcctggacaaac

SEQ ID NO: 1309733 - DNA, 25 bp, Homo sapien
tcagggtgtcctggacaaacttggc

SEQ ID NO: 1309734 - DNA, 25 bp, Homo sapien
caccatgtaaagatgtccgacttgg

SEQ ID NO: 1309735 - DNA, 25 bp, Homo sapien
tatcaagtccctattgcatttcggg

SEQ ID NO: 1309736 - DNA, 25 bp, Homo sapien
ggtgtcccagaagataaagagttgc

SEQ ID NO: 1309737 - DNA, 25 bp, Homo sapien
cacaaggacaagattgacagcgcca

SEQ ID NO: 1309738 - DNA, 25 bp, Homo sapien
ggctccaattagtaatgcttggagt

SEQ ID NO: 1309739 - DNA, 25 bp, Homo sapien
cacaagagattggaataaataaggg

SEQ ID NO: 1309740 - DNA, 25 bp, Homo sapien
tagtaatgcttggagtgatgcccaa

SEQ ID NO: 1309741 - DNA, 25 bp, Homo sapien
ggatgagtggttatcaggaagttcc

SEQ ID NO: 1309742 - DNA, 25 bp, Homo sapien
tcatacagttttgcctgtcgctttg

SEQ ID NO: 1309743 - DNA, 25 bp, Homo sapien
tctccttcacggcatcatacagttt

SEQ ID NO: 1309744 - DNA, 25 bp, Homo sapien
atctgtacatgatgctgcacccctc

SEQ ID NO: 1309745 - DNA, 25 bp, Homo sapien
gatgacacttcagatactcaggaca

SEQ ID NO: 1309746 - DNA, 25 bp, Homo sapien
tcctctgtctgtgctacctgaatgc

SEQ ID NO: 1309747 - DNA, 25 bp, Homo sapien
tgtacttctcagtggaagggagcac

SEQ ID NO: 1309748 - DNA, 25 bp, Homo sapien
ctagtctttcgacacggtggctgcc

SEQ ID NO: 1309749 - DNA, 25 bp, Homo sapien
agtaagcaacaactcactcactgtg

SEQ ID NO: 1309750 - DNA, 25 bp, Homo sapien
tacccaggatggaatgcagtgatgt

SEQ ID NO: 1309751 - DNA, 25 bp, Homo sapien
ggaatgcagtgatgtgatctcggct

SEQ ID NO: 1309752 - DNA, 25 bp, Homo sapien
tggaatgcagtgatgtgatctcggc

SEQ ID NO: 1309753 - DNA, 25 bp, Homo sapien
tgttacccaggatggaatgcagtga

SEQ ID NO: 1309754 - DNA, 25 bp, Homo sapien
attcttcagcatggacaggtggccc

SEQ ID NO: 1309755 - DNA, 25 bp, Homo sapien
aaagagtggtaagcagtgcctctca

SEQ ID NO: 1309756 - DNA, 25 bp, Homo sapien
caccttcacagtggaaaagctcagg

SEQ ID NO: 1309757 - DNA, 25 bp, Homo sapien
gagctgcctagccagtcttttggga

SEQ ID NO: 1309758 - DNA, 25 bp, Homo sapien
gagccaagaaatcttcaatcagccg

SEQ ID NO: 1309759 - DNA, 25 bp, Homo sapien
tcagccggactccaatgttaaagcc

SEQ ID NO: 1309760 - DNA, 25 bp, Homo sapien
tcccaacatttgaccgagccaagaa

SEQ ID NO: 1309761 - DNA, 25 bp, Homo sapien
gtttcccgaaagtcatggcacctcc

SEQ ID NO: 1309762 - DNA, 25 bp, Homo sapien
ttttgtccagctgtttattcacatc

SEQ ID NO: 1309763 - DNA, 25 bp, Homo sapien
ttttcatagtccttacatagctggg

SEQ ID NO: 1309764 - DNA, 25 bp, Homo sapien
ccagggcaccataggtcagggtgaa

SEQ ID NO: 1309765 - DNA, 25 bp, Homo sapien
tacatagctgggtgaccagggcacc

SEQ ID NO: 1309766 - DNA, 25 bp, Homo sapien
agagattcaaaaggcagtcaggacc

SEQ ID NO: 1309767 - DNA, 25 bp, Homo sapien
catgtcttagaatgtcctggcctag

SEQ ID NO: 1309768 - DNA, 25 bp, Homo sapien
atcatcccctttggaggagccagga

SEQ ID NO: 1309769 - DNA, 25 bp, Homo sapien
cagaatctggtatgggagcaacggt

SEQ ID NO: 1309770 - DNA, 25 bp, Homo sapien
ggttaaagaatgtgcccaaggaggc

SEQ ID NO: 1309771 - DNA, 25 bp, Homo sapien
gataacacagtaatccaggaaaggc

SEQ ID NO: 1309772 - DNA, 25 bp, Homo sapien
ggaattaaccccactttagagatga

SEQ ID NO: 1309773 - DNA, 25 bp, Homo sapien
aactgagacccagaatggttaaaga

SEQ ID NO: 1309774 - DNA, 25 bp, Homo sapien
tcaagggcttggcactagaatggtt

SEQ ID NO: 1309775 - DNA, 25 bp, Homo sapien
agctgcactagagtcaaagaaagtc

SEQ ID NO: 1309776 - DNA, 25 bp, Homo sapien
aaagaacgtgcccaaggacaaacag

SEQ ID NO: 1309777 - DNA, 25 bp, Homo sapien
aataaacagtcagatcagtgtctcc

SEQ ID NO: 1309778 - DNA, 25 bp, Homo sapien
aaacgttcctttctggcacgaccag

SEQ ID NO: 1309779 - DNA, 25 bp, Homo sapien
tgagatgctgtaacgtgcgtggccc

SEQ ID NO: 1309780 - DNA, 25 bp, Homo sapien
tggcccggtgcccaacacatagtaa

SEQ ID NO: 1309781 - DNA, 25 bp, Homo sapien
tctccaagctgtaaaacggcaatgt

SEQ ID NO: 1309782 - DNA, 25 bp, Homo sapien
gcccccggagtgacccagcaagagg

SEQ ID NO: 1309783 - DNA, 25 bp, Homo sapien
ttccctgtacgcctcaatttcgccc

SEQ ID NO: 1309784 - DNA, 25 bp, Homo sapien
ttttccaaacgcacctcgcgctcgg

SEQ ID NO: 1309785 - DNA, 25 bp, Homo sapien
gccgaggtcacgcgctccaagttac

SEQ ID NO: 1309786 - DNA, 25 bp, Homo sapien
ctctcggtgccacggttcgcctgcc

SEQ ID NO: 1309787 - DNA, 25 bp, Homo sapien
tcggtgccacggttcgcctgcctcg

SEQ ID NO: 1309788 - DNA, 25 bp, Homo sapien
ggtgccacggttcgcctgcctcgac

SEQ ID NO: 1309789 - DNA, 25 bp, Homo sapien
ctcggtgccacggttcgcctgcctc

SEQ ID NO: 1309790 - DNA, 25 bp, Homo sapien
actcgcctagccacgggttagctcg

SEQ ID NO: 1309791 - DNA, 25 bp, Homo sapien
ccacaagaccgaccggcactgactc

SEQ ID NO: 1309792 - DNA, 25 bp, Homo sapien
cggcgacccctgcagacgccggagc

SEQ ID NO: 1309793 - DNA, 25 bp, Homo sapien
agacgccggagcctaagccgctgcc

SEQ ID NO: 1309794 - DNA, 25 bp, Homo sapien
agctagcgcggcgaactcctggagc

SEQ ID NO: 1309795 - DNA, 25 bp, Homo sapien
cggcgcgtaccaagacgcggacgca

SEQ ID NO: 1309796 - DNA, 25 bp, Homo sapien
tcctggagccgtggagcccgctcgg

SEQ ID NO: 1309797 - DNA, 25 bp, Homo sapien
gggaggcagctagcgcggcgaactc

SEQ ID NO: 1309798 - DNA, 25 bp, Homo sapien
gtggtcctatttgtgttcacatcta

SEQ ID NO: 1309799 - DNA, 25 bp, Homo sapien
catccatgttcacggctctgcctta

SEQ ID NO: 1309800 - DNA, 25 bp, Homo sapien
gaatccatgtacacgtgtgctcacc

SEQ ID NO: 1309801 - DNA, 25 bp, Homo sapien
tgtgctcaccgtctgcatactggtg

SEQ ID NO: 1309802 - DNA, 25 bp, Homo sapien
gctctgtgacatgggtaaagcccta

SEQ ID NO: 1309803 - DNA, 25 bp, Homo sapien
ggatcttggtccttaatcatagcaa

SEQ ID NO: 1309804 - DNA, 25 bp, Homo sapien
taaagccctagcttgagtgctggtg

SEQ ID NO: 1309805 - DNA, 25 bp, Homo sapien
agggaacacatagccccaaggtcag

SEQ ID NO: 1309806 - DNA, 25 bp, Homo sapien
tgcattcgtgtgctcgcacgcgcag

SEQ ID NO: 1309807 - DNA, 25 bp, Homo sapien
tgtaaatagcttgtgctcagactcc

SEQ ID NO: 1309808 - DNA, 25 bp, Homo sapien
gggccacctgtagtatttgccttga

SEQ ID NO: 1309809 - DNA, 25 bp, Homo sapien
tagactgatgtctctttggccggag

SEQ ID NO: 1309810 - DNA, 25 bp, Homo sapien
taaatgttcagagacactagagcag

SEQ ID NO: 1309811 - DNA, 25 bp, Homo sapien
tcaaaactgatctcggctctcaaag

SEQ ID NO: 1309812 - DNA, 25 bp, Homo sapien
ggaaggccccgatacttacagagta

SEQ ID NO: 1309813 - DNA, 25 bp, Homo sapien
caggcatagggaggagctagtcaac

SEQ ID NO: 1309814 - DNA, 25 bp, Homo sapien
aaccgagcgcgtgacgcaaagcggc

SEQ ID NO: 1309815 - DNA, 25 bp, Homo sapien
gaggagggcgtaggactacatttcc

SEQ ID NO: 1309816 - DNA, 25 bp, Homo sapien
aggaggcagcgggtctacgccgtcg

SEQ ID NO: 1309817 - DNA, 25 bp, Homo sapien
tagttctgatggcagccaagtcggc

SEQ ID NO: 1309818 - DNA, 25 bp, Homo sapien
tagaggtctctgatactcccattca

SEQ ID NO: 1309819 - DNA, 25 bp, Homo sapien
gatatatcatagaggtctctgatac

SEQ ID NO: 1309820 - DNA, 25 bp, Homo sapien
tatcatagaggtctctgatactccc

SEQ ID NO: 1309821 - DNA, 25 bp, Homo sapien
tctggatatatcatagaggtctctg

SEQ ID NO: 1309822 - DNA, 25 bp, Homo sapien
gacaggcacgtggtaggtattcagc

SEQ ID NO: 1309823 - DNA, 25 bp, Homo sapien
ttagatgattaacccaatgacaggc

SEQ ID NO: 1309824 - DNA, 25 bp, Homo sapien
gaggcactatgaccagcctgttcaa

SEQ ID NO: 1309825 - DNA, 25 bp, Homo sapien
tagaaatctctgtctagctgcaggg

SEQ ID NO: 1309826 - DNA, 25 bp, Homo sapien
tagaacctggaatgagatgctcact

SEQ ID NO: 1309827 - DNA, 25 bp, Homo sapien
ctggaaggtttcgaataagcgaagc

SEQ ID NO: 1309828 - DNA, 25 bp, Homo sapien
tgataagggcaatagtagaacctgg

SEQ ID NO: 1309829 - DNA, 25 bp, Homo sapien
tattcaaggcagtgggacgagcatg

SEQ ID NO: 1309830 - DNA, 25 bp, Homo sapien
tctgtgtgccttagttgccatccca

SEQ ID NO: 1309831 - DNA, 25 bp, Homo sapien
cactgataccatgaaacctacttgg

SEQ ID NO: 1309832 - DNA, 25 bp, Homo sapien
cctacttggagcagacattgcacag

SEQ ID NO: 1309833 - DNA, 25 bp, Homo sapien
cagaaggctctgtatacatgactta

SEQ ID NO: 1309834 - DNA, 25 bp, Homo sapien
tctagagagccatgacagaaggatc

SEQ ID NO: 1309835 - DNA, 25 bp, Homo sapien
tgtgtctccgcatatcaggttccaa

SEQ ID NO: 1309836 - DNA, 25 bp, Homo sapien
taataaagtaccacaaatggaggct

SEQ ID NO: 1309837 - DNA, 25 bp, Homo sapien
aacagcagttctattgtctcacagc

SEQ ID NO: 1309838 - DNA, 25 bp, Homo sapien
cagtaaatcttgataagatgagcag

SEQ ID NO: 1309839 - DNA, 25 bp, Homo sapien
taactgtaaagtatagcaattgtga

SEQ ID NO: 1309840 - DNA, 25 bp, Homo sapien
gaagaatgcccttggtacttgttgg

SEQ ID NO: 1309841 - DNA, 25 bp, Homo sapien
gcatgcatggcacagtaagtgttca

SEQ ID NO: 1309842 - DNA, 25 bp, Homo sapien
agagccggtccagtatttgttacat

SEQ ID NO: 1309843 - DNA, 25 bp, Homo sapien
ggcttgccattccttaattgctgta

SEQ ID NO: 1309844 - DNA, 25 bp, Homo sapien
tgaacctccatggataagagccggt

SEQ ID NO: 1309845 - DNA, 25 bp, Homo sapien
tacattggcagtgttacaccaggct

SEQ ID NO: 1309846 - DNA, 25 bp, Homo sapien
ttaggtgtaattgaaaagtgatcct

SEQ ID NO: 1309847 - DNA, 25 bp, Homo sapien
aaaagtgatcctctcttcagagatg

SEQ ID NO: 1309848 - DNA, 25 bp, Homo sapien
aattgaaaagtgatcctctcttcag

SEQ ID NO: 1309849 - DNA, 25 bp, Homo sapien
gtgtaattgaaaagtgatcctctct

SEQ ID NO: 1309850 - DNA, 25 bp, Homo sapien
agtctcggtcccgaagccgatctct

SEQ ID NO: 1309851 - DNA, 25 bp, Homo sapien
gctcaagatctgcatcaagatctcg

SEQ ID NO: 1309852 - DNA, 25 bp, Homo sapien
aaatccaagtctggatctcgctctt

SEQ ID NO: 1309853 - DNA, 25 bp, Homo sapien
tctctctcgttcaaggaagcgcagg

SEQ ID NO: 1309854 - DNA, 25 bp, Homo sapien
tgaggtaagggggtgtgactttgta

SEQ ID NO: 1309855 - DNA, 25 bp, Homo sapien
ctgaggtaagggggtgtgactttgt

SEQ ID NO: 1309856 - DNA, 25 bp, Homo sapien
tcaactctgccgagtggtgccgggt

SEQ ID NO: 1309857 - DNA, 25 bp, Homo sapien
gagtccatccaaaaagagccctgtg

SEQ ID NO: 1309858 - DNA, 25 bp, Homo sapien
tgagagctcgaagccatggccagat

SEQ ID NO: 1309859 - DNA, 25 bp, Homo sapien
tgggtaagagtccaccatccactgg

SEQ ID NO: 1309860 - DNA, 25 bp, Homo sapien
taaatgaagtggcagatgtaaacgg

SEQ ID NO: 1309861 - DNA, 25 bp, Homo sapien
tcttgcgttgttgtgctgctttccc

SEQ ID NO: 1309862 - DNA, 25 bp, Homo sapien
tgttatatgcggactgcacccacct

SEQ ID NO: 1309863 - DNA, 25 bp, Homo sapien
gataacttcccacggcagtttcaga

SEQ ID NO: 1309864 - DNA, 25 bp, Homo sapien
gtgggccctaaccttcagactcctg

SEQ ID NO: 1309865 - DNA, 25 bp, Homo sapien
gaaagagcctatcccacatggactg

SEQ ID NO: 1309866 - DNA, 25 bp, Homo sapien
ttttccactggtgtcataggcaagg

SEQ ID NO: 1309867 - DNA, 25 bp, Homo sapien
gcattgtgtaccttggacaccccag

SEQ ID NO: 1309868 - DNA, 25 bp, Homo sapien
gcaaccgtggacatagcaagagccc

SEQ ID NO: 1309869 - DNA, 25 bp, Homo sapien
tacgccttgaaggaaagcagactgg

SEQ ID NO: 1309870 - DNA, 25 bp, Homo sapien
tgtgcaaattgtagctgggagcctc

SEQ ID NO: 1309871 - DNA, 25 bp, Homo sapien
caaagctattgctggtacaagggca

SEQ ID NO: 1309872 - DNA, 25 bp, Homo sapien
gaagtcctcgtcctggccggatacc

SEQ ID NO: 1309873 - DNA, 25 bp, Homo sapien
aggacgagctgagtctggcgcccgg

SEQ ID NO: 1309874 - DNA, 25 bp, Homo sapien
ggcctcttccccgagcgcctggtgc

SEQ ID NO: 1309875 - DNA, 25 bp, Homo sapien
gtttgggggccgctatggcctcttc

SEQ ID NO: 1309876 - DNA, 25 bp, Homo sapien
ccctaggcaagaacattatcaagca

SEQ ID NO: 1309877 - DNA, 25 bp, Homo sapien
caagattacactccaaattgagctg

SEQ ID NO: 1309878 - DNA, 25 bp, Homo sapien
gatggtgtcccttgatgtacaaaag

SEQ ID NO: 1309879 - DNA, 25 bp, Homo sapien
ctgggatgaaaacggccctaggcaa

SEQ ID NO: 1309880 - DNA, 25 bp, Homo sapien
tcacctcccatcacggcaggaggaa

SEQ ID NO: 1309881 - DNA, 25 bp, Homo sapien
ggtaaaggccccctctgtgaagaga

SEQ ID NO: 1309882 - DNA, 25 bp, Homo sapien
ccaaggggaaccagactcaacctca

SEQ ID NO: 1309883 - DNA, 25 bp, Homo sapien
gaagagaacccccatgccggacaag

SEQ ID NO: 1309884 - DNA, 25 bp, Homo sapien
cttccaatgacgagaggacccctga

SEQ ID NO: 1309885 - DNA, 25 bp, Homo sapien
catcacttctcttcggaggaagccc

SEQ ID NO: 1309886 - DNA, 25 bp, Homo sapien
ttctgaagaagaggtgtccaccaga

SEQ ID NO: 1309887 - DNA, 25 bp, Homo sapien
ttgtagccaaagaggatccatcatc

SEQ ID NO: 1309888 - DNA, 25 bp, Homo sapien
tgagctcatgtgcaggtccggtacc

SEQ ID NO: 1309889 - DNA, 25 bp, Homo sapien
taccccgagcgccttgcagcgggag

SEQ ID NO: 1309890 - DNA, 25 bp, Homo sapien
ggtccacgcccagtagcacctggga

SEQ ID NO: 1309891 - DNA, 25 bp, Homo sapien
ttcatttggtcacttcacctcttca

SEQ ID NO: 1309892 - DNA, 25 bp, Homo sapien
tgcatgcggcccagggtgcccgtgg

SEQ ID NO: 1309893 - DNA, 25 bp, Homo sapien
agctcctccgccgacgtgaagacgt

SEQ ID NO: 1309894 - DNA, 25 bp, Homo sapien
agatctcccgcaggatccgttcgcg

SEQ ID NO: 1309895 - DNA, 25 bp, Homo sapien
gccgacgtgaagacgttgacgttga

SEQ ID NO: 1309896 - DNA, 25 bp, Homo sapien
ccagccgagtcaccgtgtcctcctc

SEQ ID NO: 1309897 - DNA, 25 bp, Homo sapien
cccagccgagtcaccgtgtcctcct

SEQ ID NO: 1309898 - DNA, 25 bp, Homo sapien
cagccgagtcaccgtgtcctcctcg

SEQ ID NO: 1309899 - DNA, 25 bp, Homo sapien
gcccagccgagtcaccgtgtcctcc

SEQ ID NO: 1309900 - DNA, 25 bp, Homo sapien
gcgctgagccgggccccggggccgc

SEQ ID NO: 1309901 - DNA, 25 bp, Homo sapien
cgctgagccgggccccggggccgcg

SEQ ID NO: 1309902 - DNA, 25 bp, Homo sapien
ctgcgggggtcccggcgctgagccg

SEQ ID NO: 1309903 - DNA, 25 bp, Homo sapien
tgcgggggtcccggcgctgagccgg

SEQ ID NO: 1309904 - DNA, 25 bp, Homo sapien
ccagcacgaagtagaggccgaagct

SEQ ID NO: 1309905 - DNA, 25 bp, Homo sapien
gtgagcagcaggccgaagcagacgc

SEQ ID NO: 1309906 - DNA, 25 bp, Homo sapien
agcaggccgaagcagacgcccagca

SEQ ID NO: 1309907 - DNA, 25 bp, Homo sapien
gcacgaagtagaggccgaagctctc

SEQ ID NO: 1309908 - DNA, 25 bp, Homo sapien
ggatgtgcgcgtaggcagccaggct

SEQ ID NO: 1309909 - DNA, 25 bp, Homo sapien
cgcggatgtgcgcgtaggcagccag

SEQ ID NO: 1309910 - DNA, 25 bp, Homo sapien
gcggatgtgcgcgtaggcagccagg

SEQ ID NO: 1309911 - DNA, 25 bp, Homo sapien
ccaggctgttgctgagcaactccat

SEQ ID NO: 1309912 - DNA, 25 bp, Homo sapien
tgctctggggggcagctcccctacc

SEQ ID NO: 1309913 - DNA, 25 bp, Homo sapien
tctggggggcagctcccctaccagc

SEQ ID NO: 1309914 - DNA, 25 bp, Homo sapien
ctctggggggcagctcccctaccag

SEQ ID NO: 1309915 - DNA, 25 bp, Homo sapien
gctgctctggggggcagctccccta

SEQ ID NO: 1309916 - DNA, 25 bp, Homo sapien
aggatagggacgctgagcctccacg

SEQ ID NO: 1309917 - DNA, 25 bp, Homo sapien
tggagagagcgcttccctaacttcg

SEQ ID NO: 1309918 - DNA, 25 bp, Homo sapien
caccctggagagagcgcttccctaa

SEQ ID NO: 1309919 - DNA, 25 bp, Homo sapien
gagcgcttccctaacttcgtggcgg

SEQ ID NO: 1309920 - DNA, 25 bp, Homo sapien
cgcggccgcatacactgggtccggc

SEQ ID NO: 1309921 - DNA, 25 bp, Homo sapien
gcgggacacggaccgagggaccagc

SEQ ID NO: 1309922 - DNA, 25 bp, Homo sapien
cagccggcggaaagtttcctccgag

SEQ ID NO: 1309923 - DNA, 25 bp, Homo sapien
gctaaaccttggacaggttctttca

SEQ ID NO: 1309924 - DNA, 25 bp, Homo sapien
ggactccagctttgagccagggccc

SEQ ID NO: 1309925 - DNA, 25 bp, Homo sapien
gggttaatgattgttggactccagc

SEQ ID NO: 1309926 - DNA, 25 bp, Homo sapien
gacaaccctgcgacgtgataccatt

SEQ ID NO: 1309927 - DNA, 25 bp, Homo sapien
caaataaacggagtcttggagagat

SEQ ID NO: 1309928 - DNA, 25 bp, Homo sapien
ggctaaacctgcctgtgctcacaca

SEQ ID NO: 1309929 - DNA, 25 bp, Homo sapien
cctgcctgtgctcacacacgcattt

SEQ ID NO: 1309930 - DNA, 25 bp, Homo sapien
gtgctcacacacgcatttcccacct

SEQ ID NO: 1309931 - DNA, 25 bp, Homo sapien
gcatttcccacctgggcttgtgcat

SEQ ID NO: 1309932 - DNA, 25 bp, Homo sapien
gtctatgggagggaggtcatggagc

SEQ ID NO: 1309933 - DNA, 25 bp, Homo sapien
tggattttggtgtctatgggaggga

SEQ ID NO: 1309934 - DNA, 25 bp, Homo sapien
ccttggattttggtgtctatgggag

SEQ ID NO: 1309935 - DNA, 25 bp, Homo sapien
tccttggattttggtgtctatggga

SEQ ID NO: 1309936 - DNA, 25 bp, Homo sapien
caggaaccctgtgcagtttgtagcg

SEQ ID NO: 1309937 - DNA, 25 bp, Homo sapien
tgtggagtcacatggctgcaagtag

SEQ ID NO: 1309938 - DNA, 25 bp, Homo sapien
gctcagcgaggttaagcagtgcctg

SEQ ID NO: 1309939 - DNA, 25 bp, Homo sapien
tgtagcgtggctcacatttgccaag

SEQ ID NO: 1309940 - DNA, 25 bp, Homo sapien
agttttattgctgacatgcaggaag

SEQ ID NO: 1309941 - DNA, 25 bp, Homo sapien
gaagttttattgctgacatgcagga

SEQ ID NO: 1309942 - DNA, 25 bp, Homo sapien
tcaggaagttttattgctgacatgc

SEQ ID NO: 1309943 - DNA, 25 bp, Homo sapien
ttttattgctgacatgcaggaagag

SEQ ID NO: 1309944 - DNA, 25 bp, Homo sapien
gacacatggcttgaccttggaaggg

SEQ ID NO: 1309945 - DNA, 25 bp, Homo sapien
taggacttctctcagtgtgtgacac

SEQ ID NO: 1309946 - DNA, 25 bp, Homo sapien
gacccggcggctattgctttgaaaa

SEQ ID NO: 1309947 - DNA, 25 bp, Homo sapien
gcttcaccaggaatgtcatcagaca

SEQ ID NO: 1309948 - DNA, 25 bp, Homo sapien
gcagggccaagtccagtaagggcaa

SEQ ID NO: 1309949 - DNA, 25 bp, Homo sapien
catgagtcgcccaagtgctggatgg

SEQ ID NO: 1309950 - DNA, 25 bp, Homo sapien
tggacagctgagacagacgcaggct

SEQ ID NO: 1309951 - DNA, 25 bp, Homo sapien
cctgctactgctggcaagaggtggc

SEQ ID NO: 1309952 - DNA, 25 bp, Homo sapien
aaatctcggctcaaaagggcagcag

SEQ ID NO: 1309953 - DNA, 25 bp, Homo sapien
tcaaaatctcggctcaaaagggcag

SEQ ID NO: 1309954 - DNA, 25 bp, Homo sapien
gggcatccacttcaaaatctcggct

SEQ ID NO: 1309955 - DNA, 25 bp, Homo sapien
ccacttcaaaatctcggctcaaaag

SEQ ID NO: 1309956 - DNA, 25 bp, Homo sapien
gttaacgcgcgtgtacagcacctca

SEQ ID NO: 1309957 - DNA, 25 bp, Homo sapien
cttgctagggtctaccgggagagtc

SEQ ID NO: 1309958 - DNA, 25 bp, Homo sapien
tctattatgaggcaagggcactggg

SEQ ID NO: 1309959 - DNA, 25 bp, Homo sapien
ttcgcactgggagtccacgtgagct

SEQ ID NO: 1309960 - DNA, 25 bp, Homo sapien
tgctgaccccacgtgtgacctgggc

SEQ ID NO: 1309961 - DNA, 25 bp, Homo sapien
tcgagcaatcatcccaaaaggtagc

SEQ ID NO: 1309962 - DNA, 25 bp, Homo sapien
tcttgctcagtccagagacagcatg

SEQ ID NO: 1309963 - DNA, 25 bp, Homo sapien
tagcttcgtggtacctctgctgacc

SEQ ID NO: 1309964 - DNA, 25 bp, Homo sapien
tcaaactcgtactgggagcactcct

SEQ ID NO: 1309965 - DNA, 25 bp, Homo sapien
tggatggagctcttctcctcggcca

SEQ ID NO: 1309966 - DNA, 25 bp, Homo sapien
gctgctgacgcatgtagttctcaaa

SEQ ID NO: 1309967 - DNA, 25 bp, Homo sapien
tatttccgcaggtagcgctgcgcca

SEQ ID NO: 1309968 - DNA, 25 bp, Homo sapien
taatgcacgtcaagaggtacgagca

SEQ ID NO: 1309969 - DNA, 25 bp, Homo sapien
gaaggtccttccaatatccagggcc

SEQ ID NO: 1309970 - DNA, 25 bp, Homo sapien
tgtctggcccctcgcaaaggttctc

SEQ ID NO: 1309971 - DNA, 25 bp, Homo sapien
acagcagggcttccggatgagactt

SEQ ID NO: 1309972 - DNA, 25 bp, Homo sapien
catttggtcatcaatgtcaggaacc

SEQ ID NO: 1309973 - DNA, 25 bp, Homo sapien
gctatccgcattgctcatttggtca

SEQ ID NO: 1309974 - DNA, 25 bp, Homo sapien
accacttgcaaaggcccactcagag

SEQ ID NO: 1309975 - DNA, 25 bp, Homo sapien
tcctgggagctatccgcattgctca

SEQ ID NO: 1309976 - DNA, 25 bp, Homo sapien
tccggatgagacacacggtgttctc

SEQ ID NO: 1309977 - DNA, 25 bp, Homo sapien
gacacacggtgttctcagaaacccg

SEQ ID NO: 1309978 - DNA, 25 bp, Homo sapien
cagcttccggatgagacacacggtg

SEQ ID NO: 1309979 - DNA, 25 bp, Homo sapien
ggatgagacacacggtgttctcaga

SEQ ID NO: 1309980 - DNA, 25 bp, Homo sapien
tggtgaagagcaccacgcccagggc

SEQ ID NO: 1309981 - DNA, 25 bp, Homo sapien
tcaggaatggtatactcggcagcct

SEQ ID NO: 1309982 - DNA, 25 bp, Homo sapien
tcttgcggaagagctcctgcgggat

SEQ ID NO: 1309983 - DNA, 25 bp, Homo sapien
gctcctgcgggatgctgtcgtagaa

SEQ ID NO: 1309984 - DNA, 25 bp, Homo sapien
ctgggcttgccacggtacggccggc

SEQ ID NO: 1309985 - DNA, 25 bp, Homo sapien
ggatgacatctcttactgaggccta

SEQ ID NO: 1309986 - DNA, 25 bp, Homo sapien
gtggccctcagcaaacagtaacaga

SEQ ID NO: 1309987 - DNA, 25 bp, Homo sapien
tctccaaagtgtctagaacagagct

SEQ ID NO: 1309988 - DNA, 25 bp, Homo sapien
aattgctccaacgtgctgtgctgcc

SEQ ID NO: 1309989 - DNA, 25 bp, Homo sapien
cgtcgggactgatgtaggcagggct

SEQ ID NO: 1309990 - DNA, 25 bp, Homo sapien
gcacgtcgggactgatgtaggcagg

SEQ ID NO: 1309991 - DNA, 25 bp, Homo sapien
tcgggactgatgtaggcagggctcc

SEQ ID NO: 1309992 - DNA, 25 bp, Homo sapien
cgctgagcacgtcgggactgatgta

SEQ ID NO: 1309993 - DNA, 25 bp, Homo sapien
gctcaccagatgcttcccgaggcag

SEQ ID NO: 1309994 - DNA, 25 bp, Homo sapien
ctcgctcaccagatgcttcccgagg

SEQ ID NO: 1309995 - DNA, 25 bp, Homo sapien
ccctcgctcaccagatgcttcccga

SEQ ID NO: 1309996 - DNA, 25 bp, Homo sapien
aggtccccctcgctcaccagatgct

SEQ ID NO: 1309997 - DNA, 25 bp, Homo sapien
cagggatcggcttctctcccaggta

SEQ ID NO: 1309998 - DNA, 25 bp, Homo sapien
tcctgaacagtaggaggtaggcttc

SEQ ID NO: 1309999 - DNA, 25 bp, Homo sapien
aggccccagacttttctggccacca

SEQ ID NO: 1310000 - DNA, 25 bp, Homo sapien
taggcttctcgtcagagggtgaagc

SEQ ID NO: 1310001 - DNA, 25 bp, Homo sapien
gaattctgctggcaaagggctcgat

SEQ ID NO: 1310002 - DNA, 25 bp, Homo sapien
cataggagtctgactggtggcccgc

SEQ ID NO: 1310003 - DNA, 25 bp, Homo sapien
catgtgtggctgctggcggatttcc

SEQ ID NO: 1310004 - DNA, 25 bp, Homo sapien
gctagagcctgatcgcacaggtgaa

SEQ ID NO: 1310005 - DNA, 25 bp, Homo sapien
cgggagtcccagaccccctagtctg

SEQ ID NO: 1310006 - DNA, 25 bp, Homo sapien
ggggtgcatggctccccgggagtcc

SEQ ID NO: 1310007 - DNA, 25 bp, Homo sapien
ggcaggcgcactggagtctctccac

SEQ ID NO: 1310008 - DNA, 25 bp, Homo sapien
agggctgagcggcaggcgcactgga

SEQ ID NO: 1310009 - DNA, 25 bp, Homo sapien
tcacgctttagctatggccctctgg

SEQ ID NO: 1310010 - DNA, 25 bp, Homo sapien
tctggagcgcccatgactcaagtaa

SEQ ID NO: 1310011 - DNA, 25 bp, Homo sapien
gatcggctctgagtgagtcacgctt

SEQ ID NO: 1310012 - DNA, 25 bp, Homo sapien
gacgtgtgtcagtaggatcggctct

SEQ ID NO: 1310013 - DNA, 25 bp, Homo sapien
cctacatggttggtggtccctctaa

SEQ ID NO: 1310014 - DNA, 25 bp, Homo sapien
gaggtgcacagcatcgtcccgatgg

SEQ ID NO: 1310015 - DNA, 25 bp, Homo sapien
gcagtaattccccatcagttgagat

SEQ ID NO: 1310016 - DNA, 25 bp, Homo sapien
ctggagctatgggatctggaacccc

SEQ ID NO: 1310017 - DNA, 25 bp, Homo sapien
cccagcttcaggtctctgtgcacga

SEQ ID NO: 1310018 - DNA, 25 bp, Homo sapien
cagcttcaggtctctgtgcacgata

SEQ ID NO: 1310019 - DNA, 25 bp, Homo sapien
gcttcaggtctctgtgcacgatatt

SEQ ID NO: 1310020 - DNA, 25 bp, Homo sapien
gttccccagcttcaggtctctgtgc

SEQ ID NO: 1310021 - DNA, 25 bp, Homo sapien
gggtggcactgtgcctcaccctgtg

SEQ ID NO: 1310022 - DNA, 25 bp, Homo sapien
agggtggcactgtgcctcaccctgt

SEQ ID NO: 1310023 - DNA, 25 bp, Homo sapien
ctgtgcacctgccattcagtcactc

SEQ ID NO: 1310024 - DNA, 25 bp, Homo sapien
ctgccattcagtcactcttcttttg

SEQ ID NO: 1310025 - DNA, 25 bp, Homo sapien
tgcaaagcacacctgggtgcacagg

SEQ ID NO: 1310026 - DNA, 25 bp, Homo sapien
cacctgggtgcacaggacagagctg

SEQ ID NO: 1310027 - DNA, 25 bp, Homo sapien
tcagcagcagcaagaaaggtggctt

SEQ ID NO: 1310028 - DNA, 25 bp, Homo sapien
caggacagagctgccttctgctcag

SEQ ID NO: 1310029 - DNA, 25 bp, Homo sapien
tctccttgatgacgtagtgctgcag

SEQ ID NO: 1310030 - DNA, 25 bp, Homo sapien
tgtcctcaacgatttcacaggtgcg

SEQ ID NO: 1310031 - DNA, 25 bp, Homo sapien
gaccacgtcgtagaagattaccaca

SEQ ID NO: 1310032 - DNA, 25 bp, Homo sapien
agtccaggacgaggcagatgcgctt

SEQ ID NO: 1310033 - DNA, 25 bp, Homo sapien
ggctctctatgccttggtcccccct

SEQ ID NO: 1310034 - DNA, 25 bp, Homo sapien
tggtggtgcaccacgccatcctgcg

SEQ ID NO: 1310035 - DNA, 25 bp, Homo sapien
cgtggtggtgcaccacgccatcctg

SEQ ID NO: 1310036 - DNA, 25 bp, Homo sapien
gccgtggtggtgcaccacgccatcc

SEQ ID NO: 1310037 - DNA, 25 bp, Homo sapien
ttggcaccggtgagttgcccagacg

SEQ ID NO: 1310038 - DNA, 25 bp, Homo sapien
actatgcttggcaccggtgagttgc

SEQ ID NO: 1310039 - DNA, 25 bp, Homo sapien
tgatagaagtcatccgtgccatctt

SEQ ID NO: 1310040 - DNA, 25 bp, Homo sapien
atctttcctcgccaaacactgcact

SEQ ID NO: 1310041 - DNA, 25 bp, Homo sapien
gaaatcccacttcctagagccttgg

SEQ ID NO: 1310042 - DNA, 25 bp, Homo sapien
tgaatggtccagctctctttgcatt

SEQ ID NO: 1310043 - DNA, 25 bp, Homo sapien
tggccctggccgacgtttccccagc

SEQ ID NO: 1310044 - DNA, 25 bp, Homo sapien
ctctgtctgatgctctccgcttcat

SEQ ID NO: 1310045 - DNA, 25 bp, Homo sapien
gcctttacccttccataatggactc

SEQ ID NO: 1310046 - DNA, 25 bp, Homo sapien
gtagcctttacccttccataatgga

SEQ ID NO: 1310047 - DNA, 25 bp, Homo sapien
tttacccttccataatggactcaaa

SEQ ID NO: 1310048 - DNA, 25 bp, Homo sapien
tacccttccataatggactcaaaaa

SEQ ID NO: 1310049 - DNA, 25 bp, Homo sapien
cagtaaggtgaaatcctcacatgct

SEQ ID NO: 1310050 - DNA, 25 bp, Homo sapien
tttgctgatactcctggaagccgtc

SEQ ID NO: 1310051 - DNA, 25 bp, Homo sapien
gggcaacgttgcgagacccatctca

SEQ ID NO: 1310052 - DNA, 25 bp, Homo sapien
ctactctgaggacaggtgtgtcttc

SEQ ID NO: 1310053 - DNA, 25 bp, Homo sapien
ccatagtactttccagattttgtaa

SEQ ID NO: 1310054 - DNA, 25 bp, Homo sapien
cagatactccatgagtgaacggata

SEQ ID NO: 1310055 - DNA, 25 bp, Homo sapien
ccagcagatactccatgagtgaacg

SEQ ID NO: 1310056 - DNA, 25 bp, Homo sapien
ctttccagattttgtaactatgtat

SEQ ID NO: 1310057 - DNA, 25 bp, Homo sapien
ctggtgacagtcattgccagggtcg

SEQ ID NO: 1310058 - DNA, 25 bp, Homo sapien
ggtgacagtcattgccagggtcggc

SEQ ID NO: 1310059 - DNA, 25 bp, Homo sapien
cagtcattgccagggtcggcggccc

SEQ ID NO: 1310060 - DNA, 25 bp, Homo sapien
gacagtcattgccagggtcggcggc

SEQ ID NO: 1310061 - DNA, 25 bp, Homo sapien
cacataagggttccaaggctgaaga

SEQ ID NO: 1310062 - DNA, 25 bp, Homo sapien
ccagatctcccagcaaggcagtgaa

SEQ ID NO: 1310063 - DNA, 25 bp, Homo sapien
tgtctacccaactacaaaggagctg

SEQ ID NO: 1310064 - DNA, 25 bp, Homo sapien
aaagctggcagggatagctctaccc

SEQ ID NO: 1310065 - DNA, 25 bp, Homo sapien
tgtccaggatgaagagtccgccagc

SEQ ID NO: 1310066 - DNA, 25 bp, Homo sapien
cagcttaagatctcttggagcagga

SEQ ID NO: 1310067 - DNA, 25 bp, Homo sapien
tactgccgaaggacatagcttctgg

SEQ ID NO: 1310068 - DNA, 25 bp, Homo sapien
cgccagcctccctgaatgggtctgt

SEQ ID NO: 1310069 - DNA, 25 bp, Homo sapien
gacattcacaataggcctgtatgtt

SEQ ID NO: 1310070 - DNA, 25 bp, Homo sapien
tccatgtcagacagttaaagaaaag

SEQ ID NO: 1310071 - DNA, 25 bp, Homo sapien
tgaaggacattcacaataggcctgt

SEQ ID NO: 1310072 - DNA, 25 bp, Homo sapien
tcagacagttaaagaaaagctgaag

SEQ ID NO: 1310073 - DNA, 25 bp, Homo sapien
gacacaatcccgagtatgccatgaa

SEQ ID NO: 1310074 - DNA, 25 bp, Homo sapien
gaagaaccccaattcctcagtgagc

SEQ ID NO: 1310075 - DNA, 25 bp, Homo sapien
gaaagtcttcacagaaggcctcctg

SEQ ID NO: 1310076 - DNA, 25 bp, Homo sapien
gaaggatgcactccatgggaagagc

SEQ ID NO: 1310077 - DNA, 25 bp, Homo sapien
cgcgcccggcctgggttgtagcctc

SEQ ID NO: 1310078 - DNA, 25 bp, Homo sapien
tcaggacgtacgacctcaacccaaa

SEQ ID NO: 1310079 - DNA, 25 bp, Homo sapien
cgcccggcctgggttgtagcctctt

SEQ ID NO: 1310080 - DNA, 25 bp, Homo sapien
cctgtgttcccctcaggacgtacga

SEQ ID NO: 1310081 - DNA, 25 bp, Homo sapien
gaacgaagctggcagatttcactgg

SEQ ID NO: 1310082 - DNA, 25 bp, Homo sapien
tgcccagggtttactgaacgaagct

SEQ ID NO: 1310083 - DNA, 25 bp, Homo sapien
ccaggtgctgattcaggcgaaagca

SEQ ID NO: 1310084 - DNA, 25 bp, Homo sapien
tgtcacccaaaccaaggacctcaag

SEQ ID NO: 1310085 - DNA, 25 bp, Homo sapien
catgtatgtggaatcagggctctgt

SEQ ID NO: 1310086 - DNA, 25 bp, Homo sapien
gtgcccagtcccagttcaagttcta

SEQ ID NO: 1310087 - DNA, 25 bp, Homo sapien
tctgtgagagacttgccaaactgtg

SEQ ID NO: 1310088 - DNA, 25 bp, Homo sapien
ttaactggttaggagcctgccccta

SEQ ID NO: 1310089 - DNA, 25 bp, Homo sapien
ctactagcttctttagaccacattt

SEQ ID NO: 1310090 - DNA, 25 bp, Homo sapien
ccactactagcttctttagaccaca

SEQ ID NO: 1310091 - DNA, 25 bp, Homo sapien
actactagcttctttagaccacatt

SEQ ID NO: 1310092 - DNA, 25 bp, Homo sapien
cactactagcttctttagaccacat

SEQ ID NO: 1310093 - DNA, 25 bp, Homo sapien
gcacggccattaggaagcactaaag

SEQ ID NO: 1310094 - DNA, 25 bp, Homo sapien
gaggactgtctagattaacccaacc

SEQ ID NO: 1310095 - DNA, 25 bp, Homo sapien
tcacgcaaaactactcaaagaggga

SEQ ID NO: 1310096 - DNA, 25 bp, Homo sapien
gagactaagcaatgtgcccaggtac

SEQ ID NO: 1310097 - DNA, 25 bp, Homo sapien
ccatcttgacgatgggcggaagact

SEQ ID NO: 1310098 - DNA, 25 bp, Homo sapien
gagctattcgcccatagtccgtagc

SEQ ID NO: 1310099 - DNA, 25 bp, Homo sapien
ttcgccgggtggtcagagctattcg

SEQ ID NO: 1310100 - DNA, 25 bp, Homo sapien
ctgacaacggaagtgacgcaccgcc

SEQ ID NO: 1310101 - DNA, 25 bp, Homo sapien
ctgatatgagtgaagtctggctgcc

SEQ ID NO: 1310102 - DNA, 25 bp, Homo sapien
tctgtcgcctttgtagaaaccccga

SEQ ID NO: 1310103 - DNA, 25 bp, Homo sapien
ccctttaaagggattgcatcaggca

SEQ ID NO: 1310104 - DNA, 25 bp, Homo sapien
tgaatcagcttcttgcaccagcaga

SEQ ID NO: 1310105 - DNA, 25 bp, Homo sapien
cacactctgcatggagcacttgaga

SEQ ID NO: 1310106 - DNA, 25 bp, Homo sapien
gaaacagctttttgcaagacccagc

SEQ ID NO: 1310107 - DNA, 25 bp, Homo sapien
tagatgaatcactctgcgctgacac

SEQ ID NO: 1310108 - DNA, 25 bp, Homo sapien
tctgtccaaacagggataacgcttg

SEQ ID NO: 1310109 - DNA, 25 bp, Homo sapien
actctaggcttacggcagacggtgc

SEQ ID NO: 1310110 - DNA, 25 bp, Homo sapien
tggctctccaactctaggcttacgg

SEQ ID NO: 1310111 - DNA, 25 bp, Homo sapien
ttgctggctctccaactctaggctt

SEQ ID NO: 1310112 - DNA, 25 bp, Homo sapien
tctccaactctaggcttacggcaga

SEQ ID NO: 1310113 - DNA, 25 bp, Homo sapien
aggggcttggcaaaaatgtgtctct

SEQ ID NO: 1310114 - DNA, 25 bp, Homo sapien
ggcttggcaaaaatgtgtctctgca

SEQ ID NO: 1310115 - DNA, 25 bp, Homo sapien
gggcttggcaaaaatgtgtctctgc

SEQ ID NO: 1310116 - DNA, 25 bp, Homo sapien
ggggcttggcaaaaatgtgtctctg

SEQ ID NO: 1310117 - DNA, 25 bp, Homo sapien
aactgcatgagaaatggagacactt

SEQ ID NO: 1310118 - DNA, 25 bp, Homo sapien
ttgggtttcatgagaaaatgaacac

SEQ ID NO: 1310119 - DNA, 25 bp, Homo sapien
aatgaacacaactgcatgagaaatg

SEQ ID NO: 1310120 - DNA, 25 bp, Homo sapien
gagaaaatgaacacaactgcatgag

SEQ ID NO: 1310121 - DNA, 25 bp, Homo sapien
tgagcatgtttaattatcctcactg

SEQ ID NO: 1310122 - DNA, 25 bp, Homo sapien
agcatgtttaattatcctcactggg

SEQ ID NO: 1310123 - DNA, 25 bp, Homo sapien
ggctgagcatgtttaattatcctca

SEQ ID NO: 1310124 - DNA, 25 bp, Homo sapien
gcatgtttaattatcctcactggga

SEQ ID NO: 1310125 - DNA, 25 bp, Homo sapien
gagttgaaaactacttgacaggttc

SEQ ID NO: 1310126 - DNA, 25 bp, Homo sapien
ggcagggaactagctccggagatca

SEQ ID NO: 1310127 - DNA, 25 bp, Homo sapien
gagatcactggaggactccgagttg

SEQ ID NO: 1310128 - DNA, 25 bp, Homo sapien
tcttctcgggtaccagacagggtgt

SEQ ID NO: 1310129 - DNA, 25 bp, Homo sapien
cattgcggcctgtcacaaagaggtc

SEQ ID NO: 1310130 - DNA, 25 bp, Homo sapien
ttcgcacccgatggataatctgcag

SEQ ID NO: 1310131 - DNA, 25 bp, Homo sapien
gacattgtctatgcgtccgtgggcc

SEQ ID NO: 1310132 - DNA, 25 bp, Homo sapien
tcatcccgcaggtccacagtggtta

SEQ ID NO: 1310133 - DNA, 25 bp, Homo sapien
gatcactgtccttgttggtcaatta

SEQ ID NO: 1310134 - DNA, 25 bp, Homo sapien
taaaatgtaggtaatggtcaatgca

SEQ ID NO: 1310135 - DNA, 25 bp, Homo sapien
aatatggctaggagaggtaacttgc

SEQ ID NO: 1310136 - DNA, 25 bp, Homo sapien
tgcaatgttcaaaaaacgattacgg

SEQ ID NO: 1310137 - DNA, 25 bp, Homo sapien
cctccttccggaggtcctggcatcc

SEQ ID NO: 1310138 - DNA, 25 bp, Homo sapien
aaaggagctatactcggtaaatggg

SEQ ID NO: 1310139 - DNA, 25 bp, Homo sapien
ctggggaaaggagctatactcggta

SEQ ID NO: 1310140 - DNA, 25 bp, Homo sapien
tcagagcagcgggagcgggtctggg

SEQ ID NO: 1310141 - DNA, 25 bp, Homo sapien
tgggtcgccgccgaagctagcgggc

SEQ ID NO: 1310142 - DNA, 25 bp, Homo sapien
tctgtcctccgggcgcagagtgcgt

SEQ ID NO: 1310143 - DNA, 25 bp, Homo sapien
gctagcgggcgcctggactggctgc

SEQ ID NO: 1310144 - DNA, 25 bp, Homo sapien
tgcagcaggacggagaaaccatgcc

SEQ ID NO: 1310145 - DNA, 25 bp, Homo sapien
agtgagcgagaattgtgccgcagat

SEQ ID NO: 1310146 - DNA, 25 bp, Homo sapien
agcgagaattgtgccgcagataaac

SEQ ID NO: 1310147 - DNA, 25 bp, Homo sapien
atttttcagtgagcgagaattgtgc

SEQ ID NO: 1310148 - DNA, 25 bp, Homo sapien
tgggtgttgggatttttcagtgagc

SEQ ID NO: 1310149 - DNA, 25 bp, Homo sapien
gattgtgcacatctaggccctgcgg

SEQ ID NO: 1310150 - DNA, 25 bp, Homo sapien
ttctaggaaggcagcgcaaattggc

SEQ ID NO: 1310151 - DNA, 25 bp, Homo sapien
gatcctttccttacttgggcgtgga

SEQ ID NO: 1310152 - DNA, 25 bp, Homo sapien
tccatcgggcctaatgcaattgagg

SEQ ID NO: 1310153 - DNA, 25 bp, Homo sapien
taatatctgtgcaagtctagagaca

SEQ ID NO: 1310154 - DNA, 25 bp, Homo sapien
ctgtgcaagtctagagacatgaaac

SEQ ID NO: 1310155 - DNA, 25 bp, Homo sapien
tatctgtgcaagtctagagacatga

SEQ ID NO: 1310156 - DNA, 25 bp, Homo sapien
gcaagtctagagacatgaaactcac

SEQ ID NO: 1310157 - DNA, 25 bp, Homo sapien
taggacagatacgtttgaaatcacc

SEQ ID NO: 1310158 - DNA, 25 bp, Homo sapien
gacagatacgtttgaaatcaccagc

SEQ ID NO: 1310159 - DNA, 25 bp, Homo sapien
ttactgataggacagatacgtttga

SEQ ID NO: 1310160 - DNA, 25 bp, Homo sapien
tcataccagagatctgcatcttgtt

SEQ ID NO: 1310161 - DNA, 25 bp, Homo sapien
tcaggcaatgtccagctcaacttag

SEQ ID NO: 1310162 - DNA, 25 bp, Homo sapien
gaggttcctgtagttggcccaatct

SEQ ID NO: 1310163 - DNA, 25 bp, Homo sapien
cccctgaatggtggccagattgctg

SEQ ID NO: 1310164 - DNA, 25 bp, Homo sapien
cgaaaggcactttgtacatctgatg

SEQ ID NO: 1310165 - DNA, 25 bp, Homo sapien
tgtgcccggcctatgctgggtgtct

SEQ ID NO: 1310166 - DNA, 25 bp, Homo sapien
tgggataaactgacaccgcatggat

SEQ ID NO: 1310167 - DNA, 25 bp, Homo sapien
gctgagtgttccctgtcacggcctt

SEQ ID NO: 1310168 - DNA, 25 bp, Homo sapien
gaagtacagatgctggcatgtcctg

SEQ ID NO: 1310169 - DNA, 25 bp, Homo sapien
tgctcctcaagggagactcacacag

SEQ ID NO: 1310170 - DNA, 25 bp, Homo sapien
tggcttcactcagtagaaaactagc

SEQ ID NO: 1310171 - DNA, 25 bp, Homo sapien
taagaaatagacgtaatggcttcac

SEQ ID NO: 1310172 - DNA, 25 bp, Homo sapien
tgtgtgccttcaagagtgagtgctc

SEQ ID NO: 1310173 - DNA, 25 bp, Homo sapien
tccatcatggcgagcaaatcgtccc

SEQ ID NO: 1310174 - DNA, 25 bp, Homo sapien
ctataactcatccatcatggcgagc

SEQ ID NO: 1310175 - DNA, 25 bp, Homo sapien
ctcatccatcatggcgagcaaatcg

SEQ ID NO: 1310176 - DNA, 25 bp, Homo sapien
taactcatccatcatggcgagcaaa

SEQ ID NO: 1310177 - DNA, 25 bp, Homo sapien
ctttgctggtgctcagccttggctg

SEQ ID NO: 1310178 - DNA, 25 bp, Homo sapien
gccttggctgctccgtgatctcaaa

SEQ ID NO: 1310179 - DNA, 25 bp, Homo sapien
ccagctcctcgctccgttgctggtc

SEQ ID NO: 1310180 - DNA, 25 bp, Homo sapien
aaactcccccatgattcgagccagc

SEQ ID NO: 1310181 - DNA, 25 bp, Homo sapien
aactttaatttgagcagggggaatg

SEQ ID NO: 1310182 - DNA, 25 bp, Homo sapien
actttaatttgagcagggggaatga

SEQ ID NO: 1310183 - DNA, 25 bp, Homo sapien
caactttaatttgagcagggggaat

SEQ ID NO: 1310184 - DNA, 25 bp, Homo sapien
ttctggcctggttagcgctgcttgt

SEQ ID NO: 1310185 - DNA, 25 bp, Homo sapien
aacttcataggataactcttctggc

SEQ ID NO: 1310186 - DNA, 25 bp, Homo sapien
ggtggcttgtatgttgataacttca

SEQ ID NO: 1310187 - DNA, 25 bp, Homo sapien
aactcttctggcctggttagcgctg

SEQ ID NO: 1310188 - DNA, 25 bp, Homo sapien
caccaatgtaccctacgacctagaa

SEQ ID NO: 1310189 - DNA, 25 bp, Homo sapien
tgactttgcacattataagccctgc

SEQ ID NO: 1310190 - DNA, 25 bp, Homo sapien
caacattagggttctttccctgcca

SEQ ID NO: 1310191 - DNA, 25 bp, Homo sapien
ggctcttgatcagttggcaacctat

SEQ ID NO: 1310192 - DNA, 25 bp, Homo sapien
ggtttgtaatagtcattttgtgttc

SEQ ID NO: 1310193 - DNA, 25 bp, Homo sapien
tataagtgccactggtttgtaatag

SEQ ID NO: 1310194 - DNA, 25 bp, Homo sapien
ccactggtttgtaatagtcattttg

SEQ ID NO: 1310195 - DNA, 25 bp, Homo sapien
aaatatttataagtgccactggttt

SEQ ID NO: 1310196 - DNA, 25 bp, Homo sapien
tggtaaagagattcaaccggaatcc

SEQ ID NO: 1310197 - DNA, 25 bp, Homo sapien
ttcaaccggaatccgggctcagggc

SEQ ID NO: 1310198 - DNA, 25 bp, Homo sapien
ggccactgggtttcttaatctccat

SEQ ID NO: 1310199 - DNA, 25 bp, Homo sapien
cttcttcatcggtggtaaagagatt

SEQ ID NO: 1310200 - DNA, 25 bp, Homo sapien
atgaaggcaatcacatttcctgcta

SEQ ID NO: 1310201 - DNA, 25 bp, Homo sapien
gaaggcaatcacatttcctgctaaa

SEQ ID NO: 1310202 - DNA, 25 bp, Homo sapien
tgaaggcaatcacatttcctgctaa

SEQ ID NO: 1310203 - DNA, 25 bp, Homo sapien
aggcaatcacatttcctgctaaaac

SEQ ID NO: 1310204 - DNA, 25 bp, Homo sapien
gatgggaccacatctacgtcagctt

SEQ ID NO: 1310205 - DNA, 25 bp, Homo sapien
ccctgtccactggacagacatgaat

SEQ ID NO: 1310206 - DNA, 25 bp, Homo sapien
gggtccccagcccatagaagcagtt

SEQ ID NO: 1310207 - DNA, 25 bp, Homo sapien
cacaggccccttcaagatgggacca

SEQ ID NO: 1310208 - DNA, 25 bp, Homo sapien
agcgttctcacctctctttatgtag

SEQ ID NO: 1310209 - DNA, 25 bp, Homo sapien
gaagctgtgagggtaggcaaggaag

SEQ ID NO: 1310210 - DNA, 25 bp, Homo sapien
cttccgtatctagagagaagctgtg

SEQ ID NO: 1310211 - DNA, 25 bp, Homo sapien
gaaatgttggctagatccgaaatct

SEQ ID NO: 1310212 - DNA, 25 bp, Homo sapien
ctttgatgatccagacacatgagtt

SEQ ID NO: 1310213 - DNA, 25 bp, Homo sapien
gatccagacacatgagtttccacag

SEQ ID NO: 1310214 - DNA, 25 bp, Homo sapien
catgaggctaagttctttgatgatc

SEQ ID NO: 1310215 - DNA, 25 bp, Homo sapien
gtccatgaggctaagttctttgatg

SEQ ID NO: 1310216 - DNA, 25 bp, Homo sapien
ggcaatgcctcctcttgtgaagagt

SEQ ID NO: 1310217 - DNA, 25 bp, Homo sapien
gaaattactcctattgtcggcaggg

SEQ ID NO: 1310218 - DNA, 25 bp, Homo sapien
tgaagagtaacacgcatcactgaaa

SEQ ID NO: 1310219 - DNA, 25 bp, Homo sapien
ttatgtttggcgttcctgggtgccc

SEQ ID NO: 1310220 - DNA, 25 bp, Homo sapien
caggactcggtctccataaagttca

SEQ ID NO: 1310221 - DNA, 25 bp, Homo sapien
ttcaaaagaaccttctttgggtgca

SEQ ID NO: 1310222 - DNA, 25 bp, Homo sapien
catgcttgaattctatcctcttcac

SEQ ID NO: 1310223 - DNA, 25 bp, Homo sapien
ggacatagtttccaccatgcttgaa

SEQ ID NO: 1310224 - DNA, 25 bp, Homo sapien
ggaacaggcccggacaccggcaaca

SEQ ID NO: 1310225 - DNA, 25 bp, Homo sapien
cacaaagcgaccgttattattctga

SEQ ID NO: 1310226 - DNA, 25 bp, Homo sapien
gacaccggcaacacaaagcgaccgt

SEQ ID NO: 1310227 - DNA, 25 bp, Homo sapien
gcgaccgttattattctgaactttg

SEQ ID NO: 1310228 - DNA, 25 bp, Homo sapien
ggaaggcaacactgtgcactgtgaa

SEQ ID NO: 1310229 - DNA, 25 bp, Homo sapien
tgtgcactgtgaacagtttcttgca

SEQ ID NO: 1310230 - DNA, 25 bp, Homo sapien
tatacataatggaaagtcagtctcc

SEQ ID NO: 1310231 - DNA, 25 bp, Homo sapien
tctcaaaagggtatacataatggaa

SEQ ID NO: 1310232 - DNA, 25 bp, Homo sapien
atgaggagtgtctgccggatcagct

SEQ ID NO: 1310233 - DNA, 25 bp, Homo sapien
aggagtgtctgccggatcagctgga

SEQ ID NO: 1310234 - DNA, 25 bp, Homo sapien
gatgaggagtgtctgccggatcagc

SEQ ID NO: 1310235 - DNA, 25 bp, Homo sapien
agtgtctgccggatcagctggaact

SEQ ID NO: 1310236 - DNA, 25 bp, Homo sapien
gagtctcggatgaatcccttgatgg

SEQ ID NO: 1310237 - DNA, 25 bp, Homo sapien
tatccaagtgattgaaagtgaccag

SEQ ID NO: 1310238 - DNA, 25 bp, Homo sapien
tacttgatatttgaaagccatggtc

SEQ ID NO: 1310239 - DNA, 25 bp, Homo sapien
tgtcagctgccgcaaagtctcgtcc

SEQ ID NO: 1310240 - DNA, 25 bp, Homo sapien
tccatgctggcctggttcagtttca

SEQ ID NO: 1310241 - DNA, 25 bp, Homo sapien
tatccatgctggcctggttcagttt

SEQ ID NO: 1310242 - DNA, 25 bp, Homo sapien
ccatgctggcctggttcagtttcat

SEQ ID NO: 1310243 - DNA, 25 bp, Homo sapien
cttatccatgctggcctggttcagt

SEQ ID NO: 1310244 - DNA, 25 bp, Homo sapien
ggcgctcatagacagtcctcagggc

SEQ ID NO: 1310245 - DNA, 25 bp, Homo sapien
ggagtagagctcttgaggcttgaat

SEQ ID NO: 1310246 - DNA, 25 bp, Homo sapien
gagccaggcgctcatagacagtcct

SEQ ID NO: 1310247 - DNA, 25 bp, Homo sapien
cttggagtagagctcttgaggcttg

SEQ ID NO: 1310248 - DNA, 25 bp, Homo sapien
aattcaagttgaagcatcacatcaa

SEQ ID NO: 1310249 - DNA, 25 bp, Homo sapien
ttaggttaatgcttacaaagggctg

SEQ ID NO: 1310250 - DNA, 25 bp, Homo sapien
ttaatgcttacaaagggctgctatt

SEQ ID NO: 1310251 - DNA, 25 bp, Homo sapien
atcacatcaactctggttaggttaa

SEQ ID NO: 1310252 - DNA, 25 bp, Homo sapien
ctcgttttctgtccacctctgtcca

SEQ ID NO: 1310253 - DNA, 25 bp, Homo sapien
cgttttctgtccacctctgtccatt

SEQ ID NO: 1310254 - DNA, 25 bp, Homo sapien
tttctgtccacctctgtccattcat

SEQ ID NO: 1310255 - DNA, 25 bp, Homo sapien
gttttctgtccacctctgtccattc

SEQ ID NO: 1310256 - DNA, 25 bp, Homo sapien
cccgcagccgttggtcgaggatgta

SEQ ID NO: 1310257 - DNA, 25 bp, Homo sapien
tctcccgggatgttctgggcccgca

SEQ ID NO: 1310258 - DNA, 25 bp, Homo sapien
tgtaaagcatctccccgcccaagtt

SEQ ID NO: 1310259 - DNA, 25 bp, Homo sapien
gcagcggtagcgtccgcaccgacat

SEQ ID NO: 1310260 - DNA, 25 bp, Homo sapien
gggttcggtagccagtggcctgaag

SEQ ID NO: 1310261 - DNA, 25 bp, Homo sapien
ggttcggtagccagtggcctgaagg

SEQ ID NO: 1310262 - DNA, 25 bp, Homo sapien
cggggttcggtagccagtggcctga

SEQ ID NO: 1310263 - DNA, 25 bp, Homo sapien
ccggggttcggtagccagtggcctg

SEQ ID NO: 1310264 - DNA, 25 bp, Homo sapien
aacttgtcagcaggctgcctcttcc

SEQ ID NO: 1310265 - DNA, 25 bp, Homo sapien
cctcattaccacaccactgaaaagt

SEQ ID NO: 1310266 - DNA, 25 bp, Homo sapien
ctcattaccacaccactgaaaagtc

SEQ ID NO: 1310267 - DNA, 25 bp, Homo sapien
ttgaacttgtcagcaggctgcctct

SEQ ID NO: 1310268 - DNA, 25 bp, Homo sapien
catgtcataagtgtgtatcctctgg

SEQ ID NO: 1310269 - DNA, 25 bp, Homo sapien
cacctggatgacaggtacttgtttg

SEQ ID NO: 1310270 - DNA, 25 bp, Homo sapien
tctgggatctcagagctgaatgaaa

SEQ ID NO: 1310271 - DNA, 25 bp, Homo sapien
tgaatacagcatgcctctctagact

SEQ ID NO: 1310272 - DNA, 25 bp, Homo sapien
tctttggtatggctttggcagggct

SEQ ID NO: 1310273 - DNA, 25 bp, Homo sapien
taaggctcttcttcgcttcttcagc

SEQ ID NO: 1310274 - DNA, 25 bp, Homo sapien
tgtctgggttcctccgctttgcttg

SEQ ID NO: 1310275 - DNA, 25 bp, Homo sapien
gctgcagcctttaaggctcttcttc

SEQ ID NO: 1310276 - DNA, 25 bp, Homo sapien
tcattagcagatagcgtttgtgggc

SEQ ID NO: 1310277 - DNA, 25 bp, Homo sapien
cggcggtgggctcttcggtaataca

SEQ ID NO: 1310278 - DNA, 25 bp, Homo sapien
ccttcttggtcacgaatcggcggtg

SEQ ID NO: 1310279 - DNA, 25 bp, Homo sapien
ggaaggtgtactcaattcccagccc

SEQ ID NO: 1310280 - DNA, 25 bp, Homo sapien
gaactgtgagtgctgagatagggtc

SEQ ID NO: 1310281 - DNA, 25 bp, Homo sapien
ttagaactgtgagtgctgagatagg

SEQ ID NO: 1310282 - DNA, 25 bp, Homo sapien
ctttagaactgtgagtgctgagata

SEQ ID NO: 1310283 - DNA, 25 bp, Homo sapien
tctttagaactgtgagtgctgagat

SEQ ID NO: 1310284 - DNA, 25 bp, Homo sapien
actgcggatcttgacagacaaggca

SEQ ID NO: 1310285 - DNA, 25 bp, Homo sapien
tccaagtgttcttcataactgcgga

SEQ ID NO: 1310286 - DNA, 25 bp, Homo sapien
tgttcttcataactgcggatcttga

SEQ ID NO: 1310287 - DNA, 25 bp, Homo sapien
tcataactgcggatcttgacagaca

SEQ ID NO: 1310288 - DNA, 25 bp, Homo sapien
gccccaaagagaggctgtcacgaca

SEQ ID NO: 1310289 - DNA, 25 bp, Homo sapien
gcctggccgcaaatagcattcttaa

SEQ ID NO: 1310290 - DNA, 25 bp, Homo sapien
gattctaaaactgtcacgggtctac

SEQ ID NO: 1310291 - DNA, 25 bp, Homo sapien
tattagaggtccaagccaatgcagt

SEQ ID NO: 1310292 - DNA, 25 bp, Homo sapien
tgtgcttaaagacgaccccagtaac

SEQ ID NO: 1310293 - DNA, 25 bp, Homo sapien
acaggtgaggaaagataagcaggcc

SEQ ID NO: 1310294 - DNA, 25 bp, Homo sapien
tctcaaaagaggctatggaggaccc

SEQ ID NO: 1310295 - DNA, 25 bp, Homo sapien
ctttagcagggcaagggaagctgaa

SEQ ID NO: 1310296 - DNA, 25 bp, Homo sapien
tctgggtttgcaacaatcttcttca

SEQ ID NO: 1310297 - DNA, 25 bp, Homo sapien
tgggtttgcaacaatcttcttcata

SEQ ID NO: 1310298 - DNA, 25 bp, Homo sapien
gggtttgcaacaatcttcttcataa

SEQ ID NO: 1310299 - DNA, 25 bp, Homo sapien
ctctgggtttgcaacaatcttcttc

SEQ ID NO: 1310300 - DNA, 25 bp, Homo sapien
acaagagtcttttcacgacatcatc

SEQ ID NO: 1310301 - DNA, 25 bp, Homo sapien
gagtcttttcacgacatcatcaacc

SEQ ID NO: 1310302 - DNA, 25 bp, Homo sapien
caagagtcttttcacgacatcatca

SEQ ID NO: 1310303 - DNA, 25 bp, Homo sapien
aagagtcttttcacgacatcatcaa

SEQ ID NO: 1310304 - DNA, 25 bp, Homo sapien
cattctggtagtctttgagcagcgt

SEQ ID NO: 1310305 - DNA, 25 bp, Homo sapien
ccagggacattctggtagtctttga

SEQ ID NO: 1310306 - DNA, 25 bp, Homo sapien
gggacattctggtagtctttgagca

SEQ ID NO: 1310307 - DNA, 25 bp, Homo sapien
tgagcagcgtagagggaggtgggtc

SEQ ID NO: 1310308 - DNA, 25 bp, Homo sapien
ggatcttaactactatgcatactga

SEQ ID NO: 1310309 - DNA, 25 bp, Homo sapien
gagagaggaagtaccttgccccata

SEQ ID NO: 1310310 - DNA, 25 bp, Homo sapien
aagggtgcttttcgtgtattatcgc

SEQ ID NO: 1310311 - DNA, 25 bp, Homo sapien
taattgagcacagcgttaagggtgc

SEQ ID NO: 1310312 - DNA, 25 bp, Homo sapien
ttccggacgacatatccgcgcgcgg

SEQ ID NO: 1310313 - DNA, 25 bp, Homo sapien
ctggtttccggacgacatatccgcg

SEQ ID NO: 1310314 - DNA, 25 bp, Homo sapien
ggtttccggacgacatatccgcgcg

SEQ ID NO: 1310315 - DNA, 25 bp, Homo sapien
tttccggacgacatatccgcgcgcg

SEQ ID NO: 1310316 - DNA, 25 bp, Homo sapien
cgccgtcccatttctcagctcctca

SEQ ID NO: 1310317 - DNA, 25 bp, Homo sapien
gccgtcccatttctcagctcctcac

SEQ ID NO: 1310318 - DNA, 25 bp, Homo sapien
ccgccgtcccatttctcagctcctc

SEQ ID NO: 1310319 - DNA, 25 bp, Homo sapien
gcccgccgtcccatttctcagctcc

SEQ ID NO: 1310320 - DNA, 25 bp, Homo sapien
ggtccgaatcaaactcagcgtcctc

SEQ ID NO: 1310321 - DNA, 25 bp, Homo sapien
ttgaaaggaaacttggcgctcccac

SEQ ID NO: 1310322 - DNA, 25 bp, Homo sapien
ccggcagcccgggtactaggacctg

SEQ ID NO: 1310323 - DNA, 25 bp, Homo sapien
ctgcccgggtccgaatcaaactcag

SEQ ID NO: 1310324 - DNA, 25 bp, Homo sapien
gaccgggttacatgggcgccgccat

SEQ ID NO: 1310325 - DNA, 25 bp, Homo sapien
tcgctttgcggcacggaccgggtta

SEQ ID NO: 1310326 - DNA, 25 bp, Homo sapien
gccgccgttcgctttgcggcacgga

SEQ ID NO: 1310327 - DNA, 25 bp, Homo sapien
tttgcggcacggaccgggttacatg

SEQ ID NO: 1310328 - DNA, 25 bp, Homo sapien
caatcgaggcagttgcaataccgga

SEQ ID NO: 1310329 - DNA, 25 bp, Homo sapien
taaagtcgctgagtttggaatcgca

SEQ ID NO: 1310330 - DNA, 25 bp, Homo sapien
tggaatcgcacagtcctggtctgga

SEQ ID NO: 1310331 - DNA, 25 bp, Homo sapien
gagttgtatgcagaccacctggtat

SEQ ID NO: 1310332 - DNA, 25 bp, Homo sapien
cacccaagagtgtctataaacaaca

SEQ ID NO: 1310333 - DNA, 25 bp, Homo sapien
cccaagagtgtctataaacaacaac

SEQ ID NO: 1310334 - DNA, 25 bp, Homo sapien
ccaagagtgtctataaacaacaaca

SEQ ID NO: 1310335 - DNA, 25 bp, Homo sapien
tggtccttaaagtatgcagatcgcc

SEQ ID NO: 1310336 - DNA, 25 bp, Homo sapien
gctggatggagcatgatctggtcct

SEQ ID NO: 1310337 - DNA, 25 bp, Homo sapien
aagtatgcagatcgcctgggaggcc

SEQ ID NO: 1310338 - DNA, 25 bp, Homo sapien
acaagcacaaaaggccattgggtgg

SEQ ID NO: 1310339 - DNA, 25 bp, Homo sapien
atgggcttatggaccctcccctctt

SEQ ID NO: 1310340 - DNA, 25 bp, Homo sapien
tttagtcatgggcttatggaccctc

SEQ ID NO: 1310341 - DNA, 25 bp, Homo sapien
tcttctccagctagctcaggccttt

SEQ ID NO: 1310342 - DNA, 25 bp, Homo sapien
tcaggcctttaagaggcaggcccaa

SEQ ID NO: 1310343 - DNA, 25 bp, Homo sapien
tccccagcgcctccatcccatggac

SEQ ID NO: 1310344 - DNA, 25 bp, Homo sapien
ctagaagctccccagcgcctccatc

SEQ ID NO: 1310345 - DNA, 25 bp, Homo sapien
gctccccagcgcctccatcccatgg

SEQ ID NO: 1310346 - DNA, 25 bp, Homo sapien
aagctccccagcgcctccatcccat

SEQ ID NO: 1310347 - DNA, 25 bp, Homo sapien
agacacagtcgtcctcctggcttgg

SEQ ID NO: 1310348 - DNA, 25 bp, Homo sapien
gggggaagttgagcagtggcccaaa

SEQ ID NO: 1310349 - DNA, 25 bp, Homo sapien
gcagtggcccaaagacacagtcgtc

SEQ ID NO: 1310350 - DNA, 25 bp, Homo sapien
caggagggggaagttgagcagtggc

SEQ ID NO: 1310351 - DNA, 25 bp, Homo sapien
gaaccagaggttctcataggacttg

SEQ ID NO: 1310352 - DNA, 25 bp, Homo sapien
ccaagaggggctgagtggagtcaca

SEQ ID NO: 1310353 - DNA, 25 bp, Homo sapien
ggaaccagaggttctcataggactt

SEQ ID NO: 1310354 - DNA, 25 bp, Homo sapien
acagcggagatagtgccctggccct

SEQ ID NO: 1310355 - DNA, 25 bp, Homo sapien
ctgatcgctggtgccagactgggat

SEQ ID NO: 1310356 - DNA, 25 bp, Homo sapien
gagcttggtgatgggtggcgtgcca

SEQ ID NO: 1310357 - DNA, 25 bp, Homo sapien
gagctgttatgggactcccagggca

SEQ ID NO: 1310358 - DNA, 25 bp, Homo sapien
ggtccccctggagcacataggtctg

SEQ ID NO: 1310359 - DNA, 25 bp, Homo sapien
agagcacggctcatttcagatgtct

SEQ ID NO: 1310360 - DNA, 25 bp, Homo sapien
gcacggctcatttcagatgtctgcc

SEQ ID NO: 1310361 - DNA, 25 bp, Homo sapien
cggctcatttcagatgtctgcccca

SEQ ID NO: 1310362 - DNA, 25 bp, Homo sapien
acacaaggatgtggggtgagagcac

SEQ ID NO: 1310363 - DNA, 25 bp, Homo sapien
cctccatgattgtgggcacccagga

SEQ ID NO: 1310364 - DNA, 25 bp, Homo sapien
ctccatgattgtgggcacccaggag

SEQ ID NO: 1310365 - DNA, 25 bp, Homo sapien
ctcctccatgattgtgggcacccag

SEQ ID NO: 1310366 - DNA, 25 bp, Homo sapien
tcctccatgattgtgggcacccagg

SEQ ID NO: 1310367 - DNA, 25 bp, Homo sapien
gacacttggccagaggggattcttc

SEQ ID NO: 1310368 - DNA, 25 bp, Homo sapien
ggacacttggccagaggggattctt

SEQ ID NO: 1310369 - DNA, 25 bp, Homo sapien
aggatgatgtgtagctccgacccct

SEQ ID NO: 1310370 - DNA, 25 bp, Homo sapien
ggcaggtgagcaacagcaggaggcc

SEQ ID NO: 1310371 - DNA, 25 bp, Homo sapien
tgagcaacagcaggaggccgaacag

SEQ ID NO: 1310372 - DNA, 25 bp, Homo sapien
aggtgagcaacagcaggaggccgaa

SEQ ID NO: 1310373 - DNA, 25 bp, Homo sapien
aagaagttagaatgcatgttgggaa

SEQ ID NO: 1310374 - DNA, 25 bp, Homo sapien
gcagggccggaagaagttagaatgc

SEQ ID NO: 1310375 - DNA, 25 bp, Homo sapien
gccggaagaagttagaatgcatgtt

SEQ ID NO: 1310376 - DNA, 25 bp, Homo sapien
agaagttagaatgcatgttgggaag

SEQ ID NO: 1310377 - DNA, 25 bp, Homo sapien
gtggggtaccctccaaacagccatc

SEQ ID NO: 1310378 - DNA, 25 bp, Homo sapien
ggattcaaagtcagtccccagctac

SEQ ID NO: 1310379 - DNA, 25 bp, Homo sapien
gtccccagctactctcaaaatcagc

SEQ ID NO: 1310380 - DNA, 25 bp, Homo sapien
ctccctccgaccaggggattcaaag

SEQ ID NO: 1310381 - DNA, 25 bp, Homo sapien
aggtcatcagggtgaggactgtact

SEQ ID NO: 1310382 - DNA, 25 bp, Homo sapien
ggactgtactgttggtggccccagc

SEQ ID NO: 1310383 - DNA, 25 bp, Homo sapien
gtcatcagggtgaggactgtactgt

SEQ ID NO: 1310384 - DNA, 25 bp, Homo sapien
gactgtactgttggtggccccagcc

SEQ ID NO: 1310385 - DNA, 25 bp, Homo sapien
gacaaagccacgggaggaggcattc

SEQ ID NO: 1310386 - DNA, 25 bp, Homo sapien
aggacaaagccacgggaggaggcat

SEQ ID NO: 1310387 - DNA, 25 bp, Homo sapien
ggaggacaaagccacgggaggaggc

SEQ ID NO: 1310388 - DNA, 25 bp, Homo sapien
caaagccacgggaggaggcattcag

SEQ ID NO: 1310389 - DNA, 25 bp, Homo sapien
tgggaggggtgtacggtcagcatag

SEQ ID NO: 1310390 - DNA, 25 bp, Homo sapien
gggaggggtgtacggtcagcatagg

SEQ ID NO: 1310391 - DNA, 25 bp, Homo sapien
ggaggggtgtacggtcagcataggc

SEQ ID NO: 1310392 - DNA, 25 bp, Homo sapien
ctgggaggggtgtacggtcagcata

SEQ ID NO: 1310393 - DNA, 25 bp, Homo sapien
tggatggtaaagctgcctccgtggc

SEQ ID NO: 1310394 - DNA, 25 bp, Homo sapien
tggttctgagcgttggtccagaaga

SEQ ID NO: 1310395 - DNA, 25 bp, Homo sapien
tctgagcgttggtccagaagatggt

SEQ ID NO: 1310396 - DNA, 25 bp, Homo sapien
tgccaatgtgctttagatgcagctc

SEQ ID NO: 1310397 - DNA, 25 bp, Homo sapien
ttgccaatgtgctttagatgcagct

SEQ ID NO: 1310398 - DNA, 25 bp, Homo sapien
tttctatcccagcacctgatttctg

SEQ ID NO: 1310399 - DNA, 25 bp, Homo sapien
gtatggtaggaaggcaatgttccct

SEQ ID NO: 1310400 - DNA, 25 bp, Homo sapien
ggtttgctccttgaattgtgccaac

SEQ ID NO: 1310401 - DNA, 25 bp, Homo sapien
tgttccctatacttctgattgctgg

SEQ ID NO: 1310402 - DNA, 25 bp, Homo sapien
ttgagagtaggcatagacatgctgg

SEQ ID NO: 1310403 - DNA, 25 bp, Homo sapien
gagtcacgatgatctcatagagctg

SEQ ID NO: 1310404 - DNA, 25 bp, Homo sapien
ccatttcttgagagtaggcatagac

SEQ ID NO: 1310405 - DNA, 25 bp, Homo sapien
tggtgtcctggtacaagggagtcac

SEQ ID NO: 1310406 - DNA, 25 bp, Homo sapien
gcccaggccccactcaatcacatag

SEQ ID NO: 1310407 - DNA, 25 bp, Homo sapien
tcttgttgctattgctcgcgctggg

SEQ ID NO: 1310408 - DNA, 25 bp, Homo sapien
cccagcctacccagaggctgtgagg

SEQ ID NO: 1310409 - DNA, 25 bp, Homo sapien
agggtctcgggccatggcatggagt

SEQ ID NO: 1310410 - DNA, 25 bp, Homo sapien
cggctgagttataggccacaagggc

SEQ ID NO: 1310411 - DNA, 25 bp, Homo sapien
tctgagaagaccaccggagtgggac

SEQ ID NO: 1310412 - DNA, 25 bp, Homo sapien
tgctttctgagaagaccaccggagt

SEQ ID NO: 1310413 - DNA, 25 bp, Homo sapien
gacgagaggtcccggctgagttata

SEQ ID NO: 1310414 - DNA, 25 bp, Homo sapien
ctgagctctgtggtgttgcagaggg

SEQ ID NO: 1310415 - DNA, 25 bp, Homo sapien
tgtggtgttgcagaggggcaggatg

SEQ ID NO: 1310416 - DNA, 25 bp, Homo sapien
gtgttgcagaggggcaggatggccc

SEQ ID NO: 1310417 - DNA, 25 bp, Homo sapien
tggtgttgcagaggggcaggatggc

SEQ ID NO: 1310418 - DNA, 25 bp, Homo sapien
acataaccttggatccgtccgctgt

SEQ ID NO: 1310419 - DNA, 25 bp, Homo sapien
cacataaccttggatccgtccgctg

SEQ ID NO: 1310420 - DNA, 25 bp, Homo sapien
accatgtgtccagtctgacagtggg

SEQ ID NO: 1310421 - DNA, 25 bp, Homo sapien
ccatgtgtccagtctgacagtgggg

SEQ ID NO: 1310422 - DNA, 25 bp, Homo sapien
catgtgtccagtctgacagtggggg

SEQ ID NO: 1310423 - DNA, 25 bp, Homo sapien
cccgttcggtagttctcagctccag

SEQ ID NO: 1310424 - DNA, 25 bp, Homo sapien
gggccagcggatgcagcgtatctgc

SEQ ID NO: 1310425 - DNA, 25 bp, Homo sapien
caggggccagcggatgcagcgtatc

SEQ ID NO: 1310426 - DNA, 25 bp, Homo sapien
ccagcggatgcagcgtatctgcagg

SEQ ID NO: 1310427 - DNA, 25 bp, Homo sapien
tctgcagggtgtaggccgtggctgg

SEQ ID NO: 1310428 - DNA, 25 bp, Homo sapien
ccgcttcagggctggggtccatggt

SEQ ID NO: 1310429 - DNA, 25 bp, Homo sapien
ttgtggcgcagctcacacttctgat

SEQ ID NO: 1310430 - DNA, 25 bp, Homo sapien
ccacgctgcggcttgtggcgcagct

SEQ ID NO: 1310431 - DNA, 25 bp, Homo sapien
ggggtccatggtccgcagcatgggg

SEQ ID NO: 1310432 - DNA, 25 bp, Homo sapien
cagtgtctgcccattttggggatcc

SEQ ID NO: 1310433 - DNA, 25 bp, Homo sapien
ctgtcgctagttctgtgtttccctc

SEQ ID NO: 1310434 - DNA, 25 bp, Homo sapien
tcttgtctgtcgctagttctgtgtt

SEQ ID NO: 1310435 - DNA, 25 bp, Homo sapien
gtcttcttgtctgtcgctagttctg

SEQ ID NO: 1310436 - DNA, 25 bp, Homo sapien
gggacatgctggtccccagcgcatt

SEQ ID NO: 1310437 - DNA, 25 bp, Homo sapien
tggagtccccttgggtctgacagtt

SEQ ID NO: 1310438 - DNA, 25 bp, Homo sapien
catccatgggatcaagacacagttg

SEQ ID NO: 1310439 - DNA, 25 bp, Homo sapien
tgcccatattctggtacaacagcag

SEQ ID NO: 1310440 - DNA, 25 bp, Homo sapien
gaaactcttcagagtgaagctggtg

SEQ ID NO: 1310441 - DNA, 25 bp, Homo sapien
aggctgctggttgtgaggttcatga

SEQ ID NO: 1310442 - DNA, 25 bp, Homo sapien
ctgctggttgtgaggttcatgaggc

SEQ ID NO: 1310443 - DNA, 25 bp, Homo sapien
gctggttgtgaggttcatgaggcag

SEQ ID NO: 1310444 - DNA, 25 bp, Homo sapien
ccggctggtaatattcttattagta

SEQ ID NO: 1310445 - DNA, 25 bp, Homo sapien
tgttggaggcagagtagttggatgg

SEQ ID NO: 1310446 - DNA, 25 bp, Homo sapien
cagagtagttggatggctggaagga

SEQ ID NO: 1310447 - DNA, 25 bp, Homo sapien
caacgtgcccggctggtaatattct

SEQ ID NO: 1310448 - DNA, 25 bp, Homo sapien
gctgagacactgatgtgcccgcact

SEQ ID NO: 1310449 - DNA, 25 bp, Homo sapien
cagaatctgtggctccgggtccaga

SEQ ID NO: 1310450 - DNA, 25 bp, Homo sapien
gggtgatgatagattcctgggtccc

SEQ ID NO: 1310451 - DNA, 25 bp, Homo sapien
tgggtcccatcagacagacgctgct

SEQ ID NO: 1310452 - DNA, 25 bp, Homo sapien
aggaacgacgcctctgcctagcaga

SEQ ID NO: 1310453 - DNA, 25 bp, Homo sapien
agagaatgggccaggaacgacgcct

SEQ ID NO: 1310454 - DNA, 25 bp, Homo sapien
agagctgggctataatctaggcctt

SEQ ID NO: 1310455 - DNA, 25 bp, Homo sapien
gctgggctataatctaggcctttgt

SEQ ID NO: 1310456 - DNA, 25 bp, Homo sapien
tgtggatgttggaactagactgcct

SEQ ID NO: 1310457 - DNA, 25 bp, Homo sapien
gctggaaggattacatgcgataaca

SEQ ID NO: 1310458 - DNA, 25 bp, Homo sapien
aatccttcaatagctcctgtggcct

SEQ ID NO: 1310459 - DNA, 25 bp, Homo sapien
ggcacattattgctctgaaaggcag

SEQ ID NO: 1310460 - DNA, 25 bp, Homo sapien
tctctcaggtgttcttaggcccgtt

SEQ ID NO: 1310461 - DNA, 25 bp, Homo sapien
caaggtccctgtacttcctcaaagc

SEQ ID NO: 1310462 - DNA, 25 bp, Homo sapien
cctggttaacgcttaggcatcttga

SEQ ID NO: 1310463 - DNA, 25 bp, Homo sapien
caggcactaacgaactggaggaggc

SEQ ID NO: 1310464 - DNA, 25 bp, Homo sapien
gatgaaacctgtccccttgtagctt

SEQ ID NO: 1310465 - DNA, 25 bp, Homo sapien
catgtggcagtgcaaggaaattccc

SEQ ID NO: 1310466 - DNA, 25 bp, Homo sapien
gacagcttggtagagatttgcggac

SEQ ID NO: 1310467 - DNA, 25 bp, Homo sapien
ggaagttctctacctctcaagacag

SEQ ID NO: 1310468 - DNA, 25 bp, Homo sapien
gcccaagtcaggctgcagtttccca

SEQ ID NO: 1310469 - DNA, 25 bp, Homo sapien
cccaagtcaggctgcagtttcccag

SEQ ID NO: 1310470 - DNA, 25 bp, Homo sapien
ccaagtcaggctgcagtttcccagc

SEQ ID NO: 1310471 - DNA, 25 bp, Homo sapien
gttacttcacctttccgagccgagc

SEQ ID NO: 1310472 - DNA, 25 bp, Homo sapien
ttcacctttccgagccgagcctcag

SEQ ID NO: 1310473 - DNA, 25 bp, Homo sapien
gacaagttacttcacctttccgagc

SEQ ID NO: 1310474 - DNA, 25 bp, Homo sapien
tcacctttccgagccgagcctcagt

SEQ ID NO: 1310475 - DNA, 25 bp, Homo sapien
aacattagcactcactcctcagcgt

SEQ ID NO: 1310476 - DNA, 25 bp, Homo sapien
ataacattagcactcactcctcagc

SEQ ID NO: 1310477 - DNA, 25 bp, Homo sapien
taacattagcactcactcctcagcg

SEQ ID NO: 1310478 - DNA, 25 bp, Homo sapien
tcacacccctcgctcccttgctgtt

SEQ ID NO: 1310479 - DNA, 25 bp, Homo sapien
tcgctcccttgctgtttctactctc

SEQ ID NO: 1310480 - DNA, 25 bp, Homo sapien
gctcccttgctgtttctactctcac

SEQ ID NO: 1310481 - DNA, 25 bp, Homo sapien
acacccctcgctcccttgctgtttc

SEQ ID NO: 1310482 - DNA, 25 bp, Homo sapien
gggattgcaacaccttccgagcctc

SEQ ID NO: 1310483 - DNA, 25 bp, Homo sapien
gagctctgtcgttaatggctcagcc

SEQ ID NO: 1310484 - DNA, 25 bp, Homo sapien
ggagcatcacttggaggcaggccct

SEQ ID NO: 1310485 - DNA, 25 bp, Homo sapien
cttgcgccttcgagggcacaggcag

SEQ ID NO: 1310486 - DNA, 25 bp, Homo sapien
tgcattgcccatagaccaggcagat

SEQ ID NO: 1310487 - DNA, 25 bp, Homo sapien
cattacgtattctgtgcattgccca

SEQ ID NO: 1310488 - DNA, 25 bp, Homo sapien
tccagggaattgtgtaacccaatac

SEQ ID NO: 1310489 - DNA, 25 bp, Homo sapien
cagtactcagaagggtgtgttccag

SEQ ID NO: 1310490 - DNA, 25 bp, Homo sapien
gagggagctggacccatctttctgg

SEQ ID NO: 1310491 - DNA, 25 bp, Homo sapien
tgccctattagtgggcttccttggg

SEQ ID NO: 1310492 - DNA, 25 bp, Homo sapien
tttcccatcgggcagctggtttatg

SEQ ID NO: 1310493 - DNA, 25 bp, Homo sapien
ttactgccctattagtgggcttcct

SEQ ID NO: 1310494 - DNA, 25 bp, Homo sapien
ctttggtcccatgtcctctgccatt

SEQ ID NO: 1310495 - DNA, 25 bp, Homo sapien
tttggtcccatgtcctctgccattg

SEQ ID NO: 1310496 - DNA, 25 bp, Homo sapien
tggtcccatgtcctctgccattgca

SEQ ID NO: 1310497 - DNA, 25 bp, Homo sapien
ctcctttggtcccatgtcctctgcc

SEQ ID NO: 1310498 - DNA, 25 bp, Homo sapien
aggatttgtgcagtcctgtccatcc

SEQ ID NO: 1310499 - DNA, 25 bp, Homo sapien
caggatttgtgcagtcctgtccatc

SEQ ID NO: 1310500 - DNA, 25 bp, Homo sapien
gtgggtctgggagaggtggcagagg

SEQ ID NO: 1310501 - DNA, 25 bp, Homo sapien
ggcagaggagctcctggagctgcct

SEQ ID NO: 1310502 - DNA, 25 bp, Homo sapien
gaccacagggacctggtgggtctgg

SEQ ID NO: 1310503 - DNA, 25 bp, Homo sapien
ggagctcctggagctgcctttgtgg

SEQ ID NO: 1310504 - DNA, 25 bp, Homo sapien
ctattctgggctgccagatccctga

SEQ ID NO: 1310505 - DNA, 25 bp, Homo sapien
ttctgggctgccagatccctgaagt

SEQ ID NO: 1310506 - DNA, 25 bp, Homo sapien
cctattctgggctgccagatccctg

SEQ ID NO: 1310507 - DNA, 25 bp, Homo sapien
ggtgggggtgcccagaggagcccca

SEQ ID NO: 1310508 - DNA, 25 bp, Homo sapien
tgtgagtaagcccttggagctctgg

SEQ ID NO: 1310509 - DNA, 25 bp, Homo sapien
ccagtctgacaagggcgaggcctgc

SEQ ID NO: 1310510 - DNA, 25 bp, Homo sapien
gtgctccggtctggtccctgaaggt

SEQ ID NO: 1310511 - DNA, 25 bp, Homo sapien
gaaggcttcagctggccagatgcct

SEQ ID NO: 1310512 - DNA, 25 bp, Homo sapien
tcctgtgtatttacagggcaattgc

SEQ ID NO: 1310513 - DNA, 25 bp, Homo sapien
tgtgtatttacagggcaattgcagg

SEQ ID NO: 1310514 - DNA, 25 bp, Homo sapien
cttgttgccagattggggatcttgg

SEQ ID NO: 1310515 - DNA, 25 bp, Homo sapien
gatcttggagcgaagggcaccaggt

SEQ ID NO: 1310516 - DNA, 25 bp, Homo sapien
tagctttgatttgcacgccggcacg

SEQ ID NO: 1310517 - DNA, 25 bp, Homo sapien
gaatgacagttctttaggcggcaga

SEQ ID NO: 1310518 - DNA, 25 bp, Homo sapien
tgtgcatgcagacacgagggctcat

SEQ ID NO: 1310519 - DNA, 25 bp, Homo sapien
taagccagcatctgagaagagtgcc

SEQ ID NO: 1310520 - DNA, 25 bp, Homo sapien
tattgcgctgttggctggttgcttc

SEQ ID NO: 1310521 - DNA, 25 bp, Homo sapien
catctacaatcctccagcggtccct

SEQ ID NO: 1310522 - DNA, 25 bp, Homo sapien
tccagcggtccctctcactgtattg

SEQ ID NO: 1310523 - DNA, 25 bp, Homo sapien
tctcactgtattgcgctgttggctg

SEQ ID NO: 1310524 - DNA, 25 bp, Homo sapien
ccttcccatcccagaccttggtggg

SEQ ID NO: 1310525 - DNA, 25 bp, Homo sapien
tcccatcccagaccttggtgggggc

SEQ ID NO: 1310526 - DNA, 25 bp, Homo sapien
cttcccatcccagaccttggtgggg

SEQ ID NO: 1310527 - DNA, 25 bp, Homo sapien
ccaggtctggctgggttgcatggcc

SEQ ID NO: 1310528 - DNA, 25 bp, Homo sapien
aggtctggctgggttgcatggccac

SEQ ID NO: 1310529 - DNA, 25 bp, Homo sapien
gtctggctgggttgcatggccactc

SEQ ID NO: 1310530 - DNA, 25 bp, Homo sapien
ggccaggtctggctgggttgcatgg

SEQ ID NO: 1310531 - DNA, 25 bp, Homo sapien
ggacagggtacggggaggaagcagc

SEQ ID NO: 1310532 - DNA, 25 bp, Homo sapien
ctggctcttccctgagagggacagg

SEQ ID NO: 1310533 - DNA, 25 bp, Homo sapien
cctgagagggacagggtacggggag

SEQ ID NO: 1310534 - DNA, 25 bp, Homo sapien
gctcttccctgagagggacagggta

SEQ ID NO: 1310535 - DNA, 25 bp, Homo sapien
gcaatattgggccattgattttgtg

SEQ ID NO: 1310536 - DNA, 25 bp, Homo sapien
aatattgggccattgattttgtgtc

SEQ ID NO: 1310537 - DNA, 25 bp, Homo sapien
gggaagcaatattgggccattgatt

SEQ ID NO: 1310538 - DNA, 25 bp, Homo sapien
gattttgtgtccctcggattttcat

SEQ ID NO: 1310539 - DNA, 25 bp, Homo sapien
cagggaacagctcatggccatacag

SEQ ID NO: 1310540 - DNA, 25 bp, Homo sapien
gagccagggaacagctcatggccat

SEQ ID NO: 1310541 - DNA, 25 bp, Homo sapien
cactccatgagcaaggagccaggga

SEQ ID NO: 1310542 - DNA, 25 bp, Homo sapien
ggaacagctcatggccatacagctt

SEQ ID NO: 1310543 - DNA, 25 bp, Homo sapien
gcacccccagatcacaagggagagg

SEQ ID NO: 1310544 - DNA, 25 bp, Homo sapien
cccccagatcacaagggagagggga

SEQ ID NO: 1310545 - DNA, 25 bp, Homo sapien
aggggactgaagaccatctttggtc

SEQ ID NO: 1310546 - DNA, 25 bp, Homo sapien
cccagatcacaagggagaggggact

SEQ ID NO: 1310547 - DNA, 25 bp, Homo sapien
cagacggatgatagggtggataatc

SEQ ID NO: 1310548 - DNA, 25 bp, Homo sapien
tcatctgctgcagacggatgatagg

SEQ ID NO: 1310549 - DNA, 25 bp, Homo sapien
gataatccgtattttgtagtggtct

SEQ ID NO: 1310550 - DNA, 25 bp, Homo sapien
gggacactcatatgtgctctcataa

SEQ ID NO: 1310551 - DNA, 25 bp, Homo sapien
gcatacatacacaagctgaaccctt

SEQ ID NO: 1310552 - DNA, 25 bp, Homo sapien
tgcaagaacagccaaggcaataagt

SEQ ID NO: 1310553 - DNA, 25 bp, Homo sapien
aggtgcatacatacacaagctgaac

SEQ ID NO: 1310554 - DNA, 25 bp, Homo sapien
caaggcaataagtagaggctggttt

SEQ ID NO: 1310555 - DNA, 25 bp, Homo sapien
tatcttgaagggtttagatttgatg

SEQ ID NO: 1310556 - DNA, 25 bp, Homo sapien
agcccgagaagtgagcttcatatct

SEQ ID NO: 1310557 - DNA, 25 bp, Homo sapien
gcccgagaagtgagcttcatatctt

SEQ ID NO: 1310558 - DNA, 25 bp, Homo sapien
gaagggtttagatttgatgtctgaa

SEQ ID NO: 1310559 - DNA, 25 bp, Homo sapien
ccttccccagctcctctcatttttc

SEQ ID NO: 1310560 - DNA, 25 bp, Homo sapien
ttccccagctcctctcatttttcct

SEQ ID NO: 1310561 - DNA, 25 bp, Homo sapien
cctccttccccagctcctctcattt

SEQ ID NO: 1310562 - DNA, 25 bp, Homo sapien
ctccttccccagctcctctcatttt

SEQ ID NO: 1310563 - DNA, 25 bp, Homo sapien
gtctttgtctccgttgtcaatgtcc

SEQ ID NO: 1310564 - DNA, 25 bp, Homo sapien
gttggcctctttgcgtgtctttgtc

SEQ ID NO: 1310565 - DNA, 25 bp, Homo sapien
aggttggcctctttgcgtgtctttg

SEQ ID NO: 1310566 - DNA, 25 bp, Homo sapien
ctttgtctccgttgtcaatgtcctt

SEQ ID NO: 1310567 - DNA, 25 bp, Homo sapien
gggcctttcgggagattacagatcg

SEQ ID NO: 1310568 - DNA, 25 bp, Homo sapien
ttagaaggagccgatgggtccctcc

SEQ ID NO: 1310569 - DNA, 25 bp, Homo sapien
tggcctccccaacacgcttggagag

SEQ ID NO: 1310570 - DNA, 25 bp, Homo sapien
ctggttacggtttgagttaatgctc

SEQ ID NO: 1310571 - DNA, 25 bp, Homo sapien
agtggatacaaccaggagctggtgc

SEQ ID NO: 1310572 - DNA, 25 bp, Homo sapien
ggaagtggatacaaccaggagctgg

SEQ ID NO: 1310573 - DNA, 25 bp, Homo sapien
aggaagtggatacaaccaggagctg

SEQ ID NO: 1310574 - DNA, 25 bp, Homo sapien
cctgcctggatggttgaccattcac

SEQ ID NO: 1310575 - DNA, 25 bp, Homo sapien
gagtctgcttctccgatattttttg

SEQ ID NO: 1310576 - DNA, 25 bp, Homo sapien
cattcactcgtactgaggcccagga

SEQ ID NO: 1310577 - DNA, 25 bp, Homo sapien
tctgcttctccgatattttttggga

SEQ ID NO: 1310578 - DNA, 25 bp, Homo sapien
tcctccgttgcccttgtcctggtgt

SEQ ID NO: 1310579 - DNA, 25 bp, Homo sapien
ctctcctccgttgcccttgtcctgg

SEQ ID NO: 1310580 - DNA, 25 bp, Homo sapien
cctccgttgcccttgtcctggtgtt

SEQ ID NO: 1310581 - DNA, 25 bp, Homo sapien
tctcctccgttgcccttgtcctggt

SEQ ID NO: 1310582 - DNA, 25 bp, Homo sapien
tctgggtataatcttgtatgggcat

SEQ ID NO: 1310583 - DNA, 25 bp, Homo sapien
attgttcactcctgcgtcccatctg

SEQ ID NO: 1310584 - DNA, 25 bp, Homo sapien
tgctaaactcatcaggggccttgct

SEQ ID NO: 1310585 - DNA, 25 bp, Homo sapien
ctgcgtcccatctgatgtgaccagg

SEQ ID NO: 1310586 - DNA, 25 bp, Homo sapien
caatggacacggagccttctttggt

SEQ ID NO: 1310587 - DNA, 25 bp, Homo sapien
gccttctttggttgatccactggcc

SEQ ID NO: 1310588 - DNA, 25 bp, Homo sapien
cttctttggttgatccactggccca

SEQ ID NO: 1310589 - DNA, 25 bp, Homo sapien
gttgatgtgccaatggacacggagc

SEQ ID NO: 1310590 - DNA, 25 bp, Homo sapien
caggagccaagggacagactcatat

SEQ ID NO: 1310591 - DNA, 25 bp, Homo sapien
aaatgtcctcaagcctatccaggag

SEQ ID NO: 1310592 - DNA, 25 bp, Homo sapien
gacagactcatattgtctccaggaa

SEQ ID NO: 1310593 - DNA, 25 bp, Homo sapien
ttgcagccatggtcaagatgccaac

SEQ ID NO: 1310594 - DNA, 25 bp, Homo sapien
aaggttcctggttctgttggtggag

SEQ ID NO: 1310595 - DNA, 25 bp, Homo sapien
gaaggttcctggttctgttggtgga

SEQ ID NO: 1310596 - DNA, 25 bp, Homo sapien
tggaaggttcctggttctgttggtg

SEQ ID NO: 1310597 - DNA, 25 bp, Homo sapien
tgtggaaggttcctggttctgttgg

SEQ ID NO: 1310598 - DNA, 25 bp, Homo sapien
aatgggctattcaatgctcctccca

SEQ ID NO: 1310599 - DNA, 25 bp, Homo sapien
cagggactgggtcctcctcattggg

SEQ ID NO: 1310600 - DNA, 25 bp, Homo sapien
tcccaagggtgaccataatgggcta

SEQ ID NO: 1310601 - DNA, 25 bp, Homo sapien
gaccataatgggctattcaatgctc

SEQ ID NO: 1310602 - DNA, 25 bp, Homo sapien
ggacattcagtgatcggacctctga

SEQ ID NO: 1310603 - DNA, 25 bp, Homo sapien
tggggctctagatcccattaacagg

SEQ ID NO: 1310604 - DNA, 25 bp, Homo sapien
cctctgaatgcgagaagcctttctt

SEQ ID NO: 1310605 - DNA, 25 bp, Homo sapien
taagggaaggacattcagtgatcgg

SEQ ID NO: 1310606 - DNA, 25 bp, Homo sapien
gatgactctgacacagactgaccca

SEQ ID NO: 1310607 - DNA, 25 bp, Homo sapien
caccatcagctgcattcttgagttc

SEQ ID NO: 1310608 - DNA, 25 bp, Homo sapien
ccatcagctgcattcttgagttcca

SEQ ID NO: 1310609 - DNA, 25 bp, Homo sapien
gactctgacacagactgacccacca

SEQ ID NO: 1310610 - DNA, 25 bp, Homo sapien
ttgtcctttagactcgtttgtctga

SEQ ID NO: 1310611 - DNA, 25 bp, Homo sapien
gtcctttagactcgtttgtctgaga

SEQ ID NO: 1310612 - DNA, 25 bp, Homo sapien
ctttgtcctttagactcgtttgtct

SEQ ID NO: 1310613 - DNA, 25 bp, Homo sapien
tcctttagactcgtttgtctgagaa

SEQ ID NO: 1310614 - DNA, 25 bp, Homo sapien
gatctgtctcttgccgtcatcctga

SEQ ID NO: 1310615 - DNA, 25 bp, Homo sapien
acctgtgctcgagcccagacactga

SEQ ID NO: 1310616 - DNA, 25 bp, Homo sapien
gagaaacctgtgctcgagcccagac

SEQ ID NO: 1310617 - DNA, 25 bp, Homo sapien
cagacactgatctgtctcttgccgt

SEQ ID NO: 1310618 - DNA, 25 bp, Homo sapien
atgtgcacagcatgagagggctgta

SEQ ID NO: 1310619 - DNA, 25 bp, Homo sapien
ggcagctccagatgttgttccaaca

SEQ ID NO: 1310620 - DNA, 25 bp, Homo sapien
catgagagggctgtattctgagctg

SEQ ID NO: 1310621 - DNA, 25 bp, Homo sapien
tattctgagctgtcatcgctgccac

SEQ ID NO: 1310622 - DNA, 25 bp, Homo sapien
ttggtgctggtgtagacaggatcac

SEQ ID NO: 1310623 - DNA, 25 bp, Homo sapien
tgctggtgtagacaggatcaccagg

SEQ ID NO: 1310624 - DNA, 25 bp, Homo sapien
ggtgctggtgtagacaggatcacca

SEQ ID NO: 1310625 - DNA, 25 bp, Homo sapien
ctggtgtagacaggatcaccaggag

SEQ ID NO: 1310626 - DNA, 25 bp, Homo sapien
actgcagaaggctgtcagcgcctca

SEQ ID NO: 1310627 - DNA, 25 bp, Homo sapien
cctcaaaggagggtctgtctttcct

SEQ ID NO: 1310628 - DNA, 25 bp, Homo sapien
ctgtcagcgcctcaaaggagggtct

SEQ ID NO: 1310629 - DNA, 25 bp, Homo sapien
agaaggctgtcagcgcctcaaagga

SEQ ID NO: 1310630 - DNA, 25 bp, Homo sapien
aggacatgcaggtgggtaagacatg

SEQ ID NO: 1310631 - DNA, 25 bp, Homo sapien
gatctcttgatccccatcccctgaa

SEQ ID NO: 1310632 - DNA, 25 bp, Homo sapien
atcccctgaaatctgccctgtctct

SEQ ID NO: 1310633 - DNA, 25 bp, Homo sapien
acatgcaggtgggtaagacatgggc

SEQ ID NO: 1310634 - DNA, 25 bp, Homo sapien
cagggttcctgtaaatgggaggcca

SEQ ID NO: 1310635 - DNA, 25 bp, Homo sapien
ctccttactagtaggcagggttcct

SEQ ID NO: 1310636 - DNA, 25 bp, Homo sapien
caggtgcatggtacaaactctctct

SEQ ID NO: 1310637 - DNA, 25 bp, Homo sapien
gcatggtacaaactctctcttctgg

SEQ ID NO: 1310638 - DNA, 25 bp, Homo sapien
tgcttgtcactatccccaccacagt

SEQ ID NO: 1310639 - DNA, 25 bp, Homo sapien
ggaatgctcgtaattatgaagagag

SEQ ID NO: 1310640 - DNA, 25 bp, Homo sapien
agggtgagggaatgctcgtaattat

SEQ ID NO: 1310641 - DNA, 25 bp, Homo sapien
tggctgcttgtcactatccccacca

SEQ ID NO: 1310642 - DNA, 25 bp, Homo sapien
ttgttctgggctgccctccatcctt

SEQ ID NO: 1310643 - DNA, 25 bp, Homo sapien
gctgccctccatccttcaagtctgt

SEQ ID NO: 1310644 - DNA, 25 bp, Homo sapien
cctgcttgttctgggctgccctcca

SEQ ID NO: 1310645 - DNA, 25 bp, Homo sapien
cctctgtgcctgcttgttctgggct

SEQ ID NO: 1310646 - DNA, 25 bp, Homo sapien
ggtgaaaccctggactgcatggtag

SEQ ID NO: 1310647 - DNA, 25 bp, Homo sapien
tgcagaagctatcccatgatgagag

SEQ ID NO: 1310648 - DNA, 25 bp, Homo sapien
tgtcctggctctgtagaagaacctg

SEQ ID NO: 1310649 - DNA, 25 bp, Homo sapien
gaaacgcaaaaccagccctgtggtg

SEQ ID NO: 1310650 - DNA, 25 bp, Homo sapien
tctacaatggtagcctgctgttctc

SEQ ID NO: 1310651 - DNA, 25 bp, Homo sapien
tttgtgaccagtgaccagccacacg

SEQ ID NO: 1310652 - DNA, 25 bp, Homo sapien
tcacggtcattttaccatctgctgt

SEQ ID NO: 1310653 - DNA, 25 bp, Homo sapien
ttgggtctgcccaacccaccatcta

SEQ ID NO: 1310654 - DNA, 25 bp, Homo sapien
attcccatgattcattaaacaggaa

SEQ ID NO: 1310655 - DNA, 25 bp, Homo sapien
caggcttgccattagaaccctgcag

SEQ ID NO: 1310656 - DNA, 25 bp, Homo sapien
gcaggcttgccattagaaccctgca

SEQ ID NO: 1310657 - DNA, 25 bp, Homo sapien
taattcccatgattcattaaacagg

SEQ ID NO: 1310658 - DNA, 25 bp, Homo sapien
tctgggttgaaactcggccattcag

SEQ ID NO: 1310659 - DNA, 25 bp, Homo sapien
caggctcccatgagtgccaacgtgt

SEQ ID NO: 1310660 - DNA, 25 bp, Homo sapien
ccaggaccacgtttcctttgatgag

SEQ ID NO: 1310661 - DNA, 25 bp, Homo sapien
tgatgagtgcagagtagtatccaca

SEQ ID NO: 1310662 - DNA, 25 bp, Homo sapien
gggcagacgtagaaagacatccaga

SEQ ID NO: 1310663 - DNA, 25 bp, Homo sapien
cagatgtgggccgataggaggtgac

SEQ ID NO: 1310664 - DNA, 25 bp, Homo sapien
tggctctttgaggtggaactcttca

SEQ ID NO: 1310665 - DNA, 25 bp, Homo sapien
ttcagtgcaagatgagtcggagctt

SEQ ID NO: 1310666 - DNA, 25 bp, Homo sapien
aaagggcctctacacgttggagatt

SEQ ID NO: 1310667 - DNA, 25 bp, Homo sapien
agggcctctacacgttggagatttt

SEQ ID NO: 1310668 - DNA, 25 bp, Homo sapien
cagaaagggcctctacacgttggag

SEQ ID NO: 1310669 - DNA, 25 bp, Homo sapien
gaaagggcctctacacgttggagat

SEQ ID NO: 1310670 - DNA, 25 bp, Homo sapien
aactggaaaaggtttggtcatagca

SEQ ID NO: 1310671 - DNA, 25 bp, Homo sapien
agatgttggctctagagagtggaac

SEQ ID NO: 1310672 - DNA, 25 bp, Homo sapien
cctgtaaatatagctggtggtcacc

SEQ ID NO: 1310673 - DNA, 25 bp, Homo sapien
gctctgtcccaaatacctgtaaata

SEQ ID NO: 1310674 - DNA, 25 bp, Homo sapien
gggtcttctatagctctgtcccaaa

SEQ ID NO: 1310675 - DNA, 25 bp, Homo sapien
catagtctattcctgcttactggac

SEQ ID NO: 1310676 - DNA, 25 bp, Homo sapien
caaaattctgtatccgtgtagccct

SEQ ID NO: 1310677 - DNA, 25 bp, Homo sapien
gatgtcccagattcaaatacttgag

SEQ ID NO: 1310678 - DNA, 25 bp, Homo sapien
tctcttaagagatcagacttctgtc

SEQ ID NO: 1310679 - DNA, 25 bp, Homo sapien
tctgacttctgctgaggagaccatc

SEQ ID NO: 1310680 - DNA, 25 bp, Homo sapien
gttggagcaaagagggcatctcttt

SEQ ID NO: 1310681 - DNA, 25 bp, Homo sapien
tgctcctgctggctaatctgacttc

SEQ ID NO: 1310682 - DNA, 25 bp, Homo sapien
atcatggttttgaggtccagctgct

SEQ ID NO: 1310683 - DNA, 25 bp, Homo sapien
gtcagttccaaacagcctatgcata

SEQ ID NO: 1310684 - DNA, 25 bp, Homo sapien
cctatgcataggctggtcagtcctt

SEQ ID NO: 1310685 - DNA, 25 bp, Homo sapien
ggtcagtccttttgtatggagatgt

SEQ ID NO: 1310686 - DNA, 25 bp, Homo sapien
cagttccaaacagcctatgcatagg

SEQ ID NO: 1310687 - DNA, 25 bp, Homo sapien
tggtgtttaatgaggacctctggtt

SEQ ID NO: 1310688 - DNA, 25 bp, Homo sapien
catggtgtttaatgaggacctctgg

SEQ ID NO: 1310689 - DNA, 25 bp, Homo sapien
gcatggtgtttaatgaggacctctg

SEQ ID NO: 1310690 - DNA, 25 bp, Homo sapien
tgcatggtgtttaatgaggacctct

SEQ ID NO: 1310691 - DNA, 25 bp, Homo sapien
gagaggctgctactcttcggacctg

SEQ ID NO: 1310692 - DNA, 25 bp, Homo sapien
caggaatcacgaggtgctggcaaag

SEQ ID NO: 1310693 - DNA, 25 bp, Homo sapien
ttgagcgcagcgatgcctgtggcca

SEQ ID NO: 1310694 - DNA, 25 bp, Homo sapien
gagtccctgtgataaaaggccccaa

SEQ ID NO: 1310695 - DNA, 25 bp, Homo sapien
gccagtggagagaacatgtcggtaa

SEQ ID NO: 1310696 - DNA, 25 bp, Homo sapien
tggattagacagcaaagacgtggga

SEQ ID NO: 1310697 - DNA, 25 bp, Homo sapien
aacatgtcggtaacagtgtgacaac

SEQ ID NO: 1310698 - DNA, 25 bp, Homo sapien
ctggattagacagcaaagacgtggg

SEQ ID NO: 1310699 - DNA, 25 bp, Homo sapien
tcagcgtagtgcagtcatgctctcc

SEQ ID NO: 1310700 - DNA, 25 bp, Homo sapien
tgcagtcatgctctcccctgtggct

SEQ ID NO: 1310701 - DNA, 25 bp, Homo sapien
agccagggctgcatccggagcactc

SEQ ID NO: 1310702 - DNA, 25 bp, Homo sapien
gccagggctgcatccggagcactct

SEQ ID NO: 1310703 - DNA, 25 bp, Homo sapien
gattcaaggaaggggtcatcatgag

SEQ ID NO: 1310704 - DNA, 25 bp, Homo sapien
gggtcatcatgagagagtgcctgag

SEQ ID NO: 1310705 - DNA, 25 bp, Homo sapien
tcaaggaaggggtcatcatgagaga

SEQ ID NO: 1310706 - DNA, 25 bp, Homo sapien
gaaggggtcatcatgagagagtgcc

SEQ ID NO: 1310707 - DNA, 25 bp, Homo sapien
ctgccgggttatctggtgagtcaaa

SEQ ID NO: 1310708 - DNA, 25 bp, Homo sapien
tgccgggttatctggtgagtcaaag

SEQ ID NO: 1310709 - DNA, 25 bp, Homo sapien
cgggttatctggtgagtcaaagatg

SEQ ID NO: 1310710 - DNA, 25 bp, Homo sapien
gccgggttatctggtgagtcaaaga

SEQ ID NO: 1310711 - DNA, 25 bp, Homo sapien
gattttaggagatccgagtagtgtc

SEQ ID NO: 1310712 - DNA, 25 bp, Homo sapien
agattttaggagatccgagtagtgt

SEQ ID NO: 1310713 - DNA, 25 bp, Homo sapien
tgacagactccaggctgctatattg

SEQ ID NO: 1310714 - DNA, 25 bp, Homo sapien
gaacagattgcttgggacctatgcc

SEQ ID NO: 1310715 - DNA, 25 bp, Homo sapien
aagtgagcacggaacagaactgttg

SEQ ID NO: 1310716 - DNA, 25 bp, Homo sapien
tattgggaagatttgacaacacaca

SEQ ID NO: 1310717 - DNA, 25 bp, Homo sapien
gaggagggtcaggatttcaacaagc

SEQ ID NO: 1310718 - DNA, 25 bp, Homo sapien
aggagggtcaggatttcaacaagca

SEQ ID NO: 1310719 - DNA, 25 bp, Homo sapien
ctgcccaccgtgtaatcctctgcct

SEQ ID NO: 1310720 - DNA, 25 bp, Homo sapien
acagccggcccgagctcttctgaga

SEQ ID NO: 1310721 - DNA, 25 bp, Homo sapien
agagccggctctgcccaccgtgtaa

SEQ ID NO: 1310722 - DNA, 25 bp, Homo sapien
agacagccggcccgagctcttctga

SEQ ID NO: 1310723 - DNA, 25 bp, Homo sapien
tcttggcagcaccattggtcccgcc

SEQ ID NO: 1310724 - DNA, 25 bp, Homo sapien
ttggcagcaccattggtcccgcctg

SEQ ID NO: 1310725 - DNA, 25 bp, Homo sapien
acttaatcctctgttggtcccgcct

SEQ ID NO: 1310726 - DNA, 25 bp, Homo sapien
taatcctctgttggtcccgcctgct

SEQ ID NO: 1310727 - DNA, 25 bp, Homo sapien
ctggaattctaccattggggtcagg

SEQ ID NO: 1310728 - DNA, 25 bp, Homo sapien
ccattggggtcaggcctttgattaa

SEQ ID NO: 1310729 - DNA, 25 bp, Homo sapien
tttgattaaagctgtgactctggaa

SEQ ID NO: 1310730 - DNA, 25 bp, Homo sapien
tgattaaagctgtgactctggaaga

SEQ ID NO: 1310731 - DNA, 25 bp, Homo sapien
gctcctacattttccggcactggca

SEQ ID NO: 1310732 - DNA, 25 bp, Homo sapien
ctcctacattttccggcactggcaa

SEQ ID NO: 1310733 - DNA, 25 bp, Homo sapien
aagggctcctacattttccggcact

SEQ ID NO: 1310734 - DNA, 25 bp, Homo sapien
gggctcctacattttccggcactgg

SEQ ID NO: 1310735 - DNA, 25 bp, Homo sapien
tgcatttggtgctgaggaggtacat

SEQ ID NO: 1310736 - DNA, 25 bp, Homo sapien
ttagtgcatttggtgctgaggaggt

SEQ ID NO: 1310737 - DNA, 25 bp, Homo sapien
cagttagtgcatttggtgctgagga

SEQ ID NO: 1310738 - DNA, 25 bp, Homo sapien
agtgcatttggtgctgaggaggtac

SEQ ID NO: 1310739 - DNA, 25 bp, Homo sapien
gagccaaggcaataagaacaactaa

SEQ ID NO: 1310740 - DNA, 25 bp, Homo sapien
ggctcaactgttctgcatgagaagg

SEQ ID NO: 1310741 - DNA, 25 bp, Homo sapien
agggcagcaagttgacaagagccaa

SEQ ID NO: 1310742 - DNA, 25 bp, Homo sapien
taagaacaactaattggctcaactg

SEQ ID NO: 1310743 - DNA, 25 bp, Homo sapien
aaaaaccttgagttgccaggctcta

SEQ ID NO: 1310744 - DNA, 25 bp, Homo sapien
acaaaaaccttgagttgccaggctc

SEQ ID NO: 1310745 - DNA, 25 bp, Homo sapien
caaaaaccttgagttgccaggctct

SEQ ID NO: 1310746 - DNA, 25 bp, Homo sapien
aaaaccttgagttgccaggctctac

SEQ ID NO: 1310747 - DNA, 25 bp, Homo sapien
gacccgtgacttgcgaatgggttta

SEQ ID NO: 1310748 - DNA, 25 bp, Homo sapien
gctccaggacccgtgacttgcgaat

SEQ ID NO: 1310749 - DNA, 25 bp, Homo sapien
ctgctcctggtctacttgtggccac

SEQ ID NO: 1310750 - DNA, 25 bp, Homo sapien
tgtgactggtgaactgccccctgct

SEQ ID NO: 1310751 - DNA, 25 bp, Homo sapien
gtgtgtggtgccagcccgcgcggca

SEQ ID NO: 1310752 - DNA, 25 bp, Homo sapien
cagccttgccttgactagacagaag

SEQ ID NO: 1310753 - DNA, 25 bp, Homo sapien
tccttctcgattaggaaaaatccac

SEQ ID NO: 1310754 - DNA, 25 bp, Homo sapien
tgcagcgagtgtgtggtgccagccc

SEQ ID NO: 1310755 - DNA, 25 bp, Homo sapien
ggaggtggcagcgctggaattagca

SEQ ID NO: 1310756 - DNA, 25 bp, Homo sapien
tgcatgggaggtggcagcgctggaa

SEQ ID NO: 1310757 - DNA, 25 bp, Homo sapien
ctgcatgggaggtggcagcgctgga

SEQ ID NO: 1310758 - DNA, 25 bp, Homo sapien
atgggaggtggcagcgctggaatta

SEQ ID NO: 1310759 - DNA, 25 bp, Homo sapien
ttgtcggttccaccctgagtcagcc

SEQ ID NO: 1310760 - DNA, 25 bp, Homo sapien
ctcctgctggtgttgtcggttccac

SEQ ID NO: 1310761 - DNA, 25 bp, Homo sapien
tgctggtgttgtcggttccaccctg

SEQ ID NO: 1310762 - DNA, 25 bp, Homo sapien
tggtgttgtcggttccaccctgagt

SEQ ID NO: 1310763 - DNA, 25 bp, Homo sapien
gccaggttcagcactgtgagttcca

SEQ ID NO: 1310764 - DNA, 25 bp, Homo sapien
aggccaggttcagcactgtgagttc

SEQ ID NO: 1310765 - DNA, 25 bp, Homo sapien
caggttcagcactgtgagttccact

SEQ ID NO: 1310766 - DNA, 25 bp, Homo sapien
ccaggttcagcactgtgagttccac

SEQ ID NO: 1310767 - DNA, 25 bp, Homo sapien
cactgtggcctttggtaatacagat

SEQ ID NO: 1310768 - DNA, 25 bp, Homo sapien
ccaccacagcccacggagcaggcag

SEQ ID NO: 1310769 - DNA, 25 bp, Homo sapien
caccacagcccacggagcaggcagc

SEQ ID NO: 1310770 - DNA, 25 bp, Homo sapien
ccacagcccacggagcaggcagcat

SEQ ID NO: 1310771 - DNA, 25 bp, Homo sapien
accacagcccacggagcaggcagca

SEQ ID NO: 1310772 - DNA, 25 bp, Homo sapien
tcccgtcagtgggtgataaactgtt

SEQ ID NO: 1310773 - DNA, 25 bp, Homo sapien
taaactgttatcacggaattatccg

SEQ ID NO: 1310774 - DNA, 25 bp, Homo sapien
tcacggaattatccgccacaggctc

SEQ ID NO: 1310775 - DNA, 25 bp, Homo sapien
cccgtcagtgggtgataaactgtta

SEQ ID NO: 1310776 - DNA, 25 bp, Homo sapien
agagaacacaagaatcccagctggg

SEQ ID NO: 1310777 - DNA, 25 bp, Homo sapien
gcacagcctcattcaaacacagaga

SEQ ID NO: 1310778 - DNA, 25 bp, Homo sapien
gaagtaaatctctgaagccacacta

SEQ ID NO: 1310779 - DNA, 25 bp, Homo sapien
tttccttgccatcgcagggagtctc

SEQ ID NO: 1310780 - DNA, 25 bp, Homo sapien
gaaatctaatgtcagccccaaatgc

SEQ ID NO: 1310781 - DNA, 25 bp, Homo sapien
agtgtctcactactggccgggatga

SEQ ID NO: 1310782 - DNA, 25 bp, Homo sapien
ggcgttggagcagcgctgtctaata

SEQ ID NO: 1310783 - DNA, 25 bp, Homo sapien
tgtcaaggagtcaaagtcgtggctg

SEQ ID NO: 1310784 - DNA, 25 bp, Homo sapien
gggaagcttcaggttttccacatct

SEQ ID NO: 1310785 - DNA, 25 bp, Homo sapien
aaatatggaactggattaaatctcc

SEQ ID NO: 1310786 - DNA, 25 bp, Homo sapien
gggctgggaagcttcaggttttcca

SEQ ID NO: 1310787 - DNA, 25 bp, Homo sapien
ttaattttaccactgcccagctcct

SEQ ID NO: 1310788 - DNA, 25 bp, Homo sapien
tgcatgtccacaaagggcatcccct

SEQ ID NO: 1310789 - DNA, 25 bp, Homo sapien
cagcctagaatgattggcaagtaac

SEQ ID NO: 1310790 - DNA, 25 bp, Homo sapien
ggaaatttatttacatcagcctaga

SEQ ID NO: 1310791 - DNA, 25 bp, Homo sapien
gtaacacagttactatgaaacccaa

SEQ ID NO: 1310792 - DNA, 25 bp, Homo sapien
gagatgctcagacctgcgaaagagg

SEQ ID NO: 1310793 - DNA, 25 bp, Homo sapien
cgcacagtggtaagaggacccatga

SEQ ID NO: 1310794 - DNA, 25 bp, Homo sapien
tgatccctacggaaccaagacagga

SEQ ID NO: 1310795 - DNA, 25 bp, Homo sapien
gaacagaccgatctgggtgagccag

SEQ ID NO: 1310796 - DNA, 25 bp, Homo sapien
aaatggagacaatctgggaggtgat

SEQ ID NO: 1310797 - DNA, 25 bp, Homo sapien
aaaatggagacaatctgggaggtga

SEQ ID NO: 1310798 - DNA, 25 bp, Homo sapien
gaatagccccgccttctagggtatc

SEQ ID NO: 1310799 - DNA, 25 bp, Homo sapien
gatgaggtccgttggccattcctgc

SEQ ID NO: 1310800 - DNA, 25 bp, Homo sapien
gggctgagtactagcatgacattgc

SEQ ID NO: 1310801 - DNA, 25 bp, Homo sapien
tgggaacactgtatcggcatgctgg

SEQ ID NO: 1310802 - DNA, 25 bp, Homo sapien
catgggctacaggtcatatatacac

SEQ ID NO: 1310803 - DNA, 25 bp, Homo sapien
tccagggcaaatccaggactgaagg

SEQ ID NO: 1310804 - DNA, 25 bp, Homo sapien
aaagggttgtatacacatgggctac

SEQ ID NO: 1310805 - DNA, 25 bp, Homo sapien
cactccgtgtgcagacgtgcaggaa

SEQ ID NO: 1310806 - DNA, 25 bp, Homo sapien
tagcccctttgcagatgggtatcca

SEQ ID NO: 1310807 - DNA, 25 bp, Homo sapien
tcccagatgataagtccatgcagct

SEQ ID NO: 1310808 - DNA, 25 bp, Homo sapien
gatgtgtctaatccagagacctgcc

SEQ ID NO: 1310809 - DNA, 25 bp, Homo sapien
gagaggccagcctactttcagatgt

SEQ ID NO: 1310810 - DNA, 25 bp, Homo sapien
gggcagcgccaagttcagaagatta

SEQ ID NO: 1310811 - DNA, 25 bp, Homo sapien
tagaacatccttaaggcgccgaagg

SEQ ID NO: 1310812 - DNA, 25 bp, Homo sapien
tcacggtcaagctgtaggaggcctg

SEQ ID NO: 1310813 - DNA, 25 bp, Homo sapien
aagattaggaccacgtgaacagccc

SEQ ID NO: 1310814 - DNA, 25 bp, Homo sapien
agaaacggatctcatcggccacggt

SEQ ID NO: 1310815 - DNA, 25 bp, Homo sapien
tgtgtgcatgttgatgacggcgtca

SEQ ID NO: 1310816 - DNA, 25 bp, Homo sapien
gcttgtgcttgactcgacgctggca

SEQ ID NO: 1310817 - DNA, 25 bp, Homo sapien
gacggcgtcagtcttgaccatcatg

SEQ ID NO: 1310818 - DNA, 25 bp, Homo sapien
aacaaggtaccagttgctgtgtgaa

SEQ ID NO: 1310819 - DNA, 25 bp, Homo sapien
cacatacaggagtgaaatcagcgcg

SEQ ID NO: 1310820 - DNA, 25 bp, Homo sapien
aaaaagtgccaggtcaggacagagg

SEQ ID NO: 1310821 - DNA, 25 bp, Homo sapien
ggccagtttgaaggctgcggcataa

SEQ ID NO: 1310822 - DNA, 25 bp, Homo sapien
gcccggcggccaggacaatgaagat

SEQ ID NO: 1310823 - DNA, 25 bp, Homo sapien
tttgcggagcttgtacacaaactcg

SEQ ID NO: 1310824 - DNA, 25 bp, Homo sapien
ccttcatgatatgcagcttgtcctc

SEQ ID NO: 1310825 - DNA, 25 bp, Homo sapien
cgatggtgatcttgtcccggtatgg

SEQ ID NO: 1310826 - DNA, 25 bp, Homo sapien
cgttgttcttcaccagcgccgatgg

SEQ ID NO: 1310827 - DNA, 25 bp, Homo sapien
tgccgtagcccttggagtcaatgag

SEQ ID NO: 1310828 - DNA, 25 bp, Homo sapien
gacgtactcgatggtggtggactcc

SEQ ID NO: 1310829 - DNA, 25 bp, Homo sapien
gaaggcccacatcttctcgaaggtg

SEQ ID NO: 1310830 - DNA, 25 bp, Homo sapien
ggaaggggtgatgcacacaccgtta

SEQ ID NO: 1310831 - DNA, 25 bp, Homo sapien
gttactaggcgcaccagggaccaag

SEQ ID NO: 1310832 - DNA, 25 bp, Homo sapien
gatgcacacaccgttactaggcgca

SEQ ID NO: 1310833 - DNA, 25 bp, Homo sapien
acaccgttactaggcgcaccaggga

SEQ ID NO: 1310834 - DNA, 25 bp, Homo sapien
gctaagactgtatgtgagagaggcc

SEQ ID NO: 1310835 - DNA, 25 bp, Homo sapien
agactgtatgtgagagaggccagca

SEQ ID NO: 1310836 - DNA, 25 bp, Homo sapien
taagactgtatgtgagagaggccag

SEQ ID NO: 1310837 - DNA, 25 bp, Homo sapien
ttgaaggcagggctaagactgtatg

SEQ ID NO: 1310838 - DNA, 25 bp, Homo sapien
caccaatgatgcgtgtggacagggc

SEQ ID NO: 1310839 - DNA, 25 bp, Homo sapien
ttgacagccccatactcgattttgg

SEQ ID NO: 1310840 - DNA, 25 bp, Homo sapien
agatgatgatgagcgtgaagaacca

SEQ ID NO: 1310841 - DNA, 25 bp, Homo sapien
tcaatgggtgattccatgcgctcca

SEQ ID NO: 1310842 - DNA, 25 bp, Homo sapien
gcatcgtaccactcataagggctga

SEQ ID NO: 1310843 - DNA, 25 bp, Homo sapien
ccaaaccagaagctgttaagcagag

SEQ ID NO: 1310844 - DNA, 25 bp, Homo sapien
atcagggatcccattccaaaccaga

SEQ ID NO: 1310845 - DNA, 25 bp, Homo sapien
aagcagagtgaagttattttccacc

SEQ ID NO: 1310846 - DNA, 25 bp, Homo sapien
gatgctcacaccaagtgtcatgaag

SEQ ID NO: 1310847 - DNA, 25 bp, Homo sapien
gatggccttctctcgaacatgggtg

SEQ ID NO: 1310848 - DNA, 25 bp, Homo sapien
cccaggtaggcgaggagaacataca

SEQ ID NO: 1310849 - DNA, 25 bp, Homo sapien
ttgggctttcgatacaggatgctca

SEQ ID NO: 1310850 - DNA, 25 bp, Homo sapien
caccactttgaatctatccgtatcc

SEQ ID NO: 1310851 - DNA, 25 bp, Homo sapien
ccactttgaatctatccgtatccat

SEQ ID NO: 1310852 - DNA, 25 bp, Homo sapien
gaatcaccactttgaatctatccgt

SEQ ID NO: 1310853 - DNA, 25 bp, Homo sapien
ggtgggaatcaccactttgaatcta

SEQ ID NO: 1310854 - DNA, 25 bp, Homo sapien
gatagaaaatgcttcagtcaagttg

SEQ ID NO: 1310855 - DNA, 25 bp, Homo sapien
gcttcagtcaagttgagggccctga

SEQ ID NO: 1310856 - DNA, 25 bp, Homo sapien
aaatgcttcagtcaagttgagggcc

SEQ ID NO: 1310857 - DNA, 25 bp, Homo sapien
agcagctccttgatagaaaatgctt

SEQ ID NO: 1310858 - DNA, 25 bp, Homo sapien
ggtcattcccgtatagcgtcctgtc

SEQ ID NO: 1310859 - DNA, 25 bp, Homo sapien
tcctttagcaggtcgatgcagtagc

SEQ ID NO: 1310860 - DNA, 25 bp, Homo sapien
tttccgaaacatgacgaagggctcc

SEQ ID NO: 1310861 - DNA, 25 bp, Homo sapien
ccaccagccggatctcataggagaa

SEQ ID NO: 1310862 - DNA, 25 bp, Homo sapien
tgctcagtgaaggtgccctcaattt

SEQ ID NO: 1310863 - DNA, 25 bp, Homo sapien
cacgctcttctattgctctgggaga

SEQ ID NO: 1310864 - DNA, 25 bp, Homo sapien
tgtccagacagccaattcacaagct

SEQ ID NO: 1310865 - DNA, 25 bp, Homo sapien
tctcggctgctaatcgattgctcag

SEQ ID NO: 1310866 - DNA, 25 bp, Homo sapien
catatatggtgaatcatcccaggta

SEQ ID NO: 1310867 - DNA, 25 bp, Homo sapien
tgttccatgacatctgccacccagc

SEQ ID NO: 1310868 - DNA, 25 bp, Homo sapien
caggtagggccacccagtagggcct

SEQ ID NO: 1310869 - DNA, 25 bp, Homo sapien
ccagccaccaagcacatatatggtg

SEQ ID NO: 1310870 - DNA, 25 bp, Homo sapien
aatgcggcatgtgtacaggctccca

SEQ ID NO: 1310871 - DNA, 25 bp, Homo sapien
tctcggaagggccactatagaatgc

SEQ ID NO: 1310872 - DNA, 25 bp, Homo sapien
gcttcttggtttgaaacaggtcagg

SEQ ID NO: 1310873 - DNA, 25 bp, Homo sapien
catgagctcaaaggtgcagagagcc

SEQ ID NO: 1310874 - DNA, 25 bp, Homo sapien
ggtgggagaggcgaatcctcactca

SEQ ID NO: 1310875 - DNA, 25 bp, Homo sapien
tgagacacaaaaacgcagcggcttc

SEQ ID NO: 1310876 - DNA, 25 bp, Homo sapien
gagaacttcctgctgactctaaaag

SEQ ID NO: 1310877 - DNA, 25 bp, Homo sapien
gactctaaaagtctccacctacctg

SEQ ID NO: 1310878 - DNA, 25 bp, Homo sapien
atgttgagcccgtcggcaggactcc

SEQ ID NO: 1310879 - DNA, 25 bp, Homo sapien
tcggtgacattagggcctcggcctt

SEQ ID NO: 1310880 - DNA, 25 bp, Homo sapien
tgtttgtcagagagtcggtgacatt

SEQ ID NO: 1310881 - DNA, 25 bp, Homo sapien
gatgttgagcccgtcggcaggactc

SEQ ID NO: 1310882 - DNA, 25 bp, Homo sapien
tgaaaacaattcgtccagttaatcc

SEQ ID NO: 1310883 - DNA, 25 bp, Homo sapien
agatcaaaatccgtccgcaagccac

SEQ ID NO: 1310884 - DNA, 25 bp, Homo sapien
ccgcaagccactagttttgttgaaa

SEQ ID NO: 1310885 - DNA, 25 bp, Homo sapien
aaaatccgtccgcaagccactagtt

SEQ ID NO: 1310886 - DNA, 25 bp, Homo sapien
caacatcgatcttggatgcgctcaa

SEQ ID NO: 1310887 - DNA, 25 bp, Homo sapien
tgagcccccgccctgaagtcatggg

SEQ ID NO: 1310888 - DNA, 25 bp, Homo sapien
ttctcgtgtacaacatcgatcttgg

SEQ ID NO: 1310889 - DNA, 25 bp, Homo sapien
tcttggatgcgctcaaatgagcccc

SEQ ID NO: 1310890 - DNA, 25 bp, Homo sapien
aaagcgccaggccttgtgccgatgg

SEQ ID NO: 1310891 - DNA, 25 bp, Homo sapien
tagcacacggacacgatatggacgg

SEQ ID NO: 1310892 - DNA, 25 bp, Homo sapien
tgatgaagttcatgaagcggccgcc

SEQ ID NO: 1310893 - DNA, 25 bp, Homo sapien
tatggacggcgtcgtacagtaaggc

SEQ ID NO: 1310894 - DNA, 25 bp, Homo sapien
cacgcctgagtagcggtagggctcc

SEQ ID NO: 1310895 - DNA, 25 bp, Homo sapien
tccacaatggccgagacgtgtgggt

SEQ ID NO: 1310896 - DNA, 25 bp, Homo sapien
tagggctccaggtctaaagcgtaga

SEQ ID NO: 1310897 - DNA, 25 bp, Homo sapien
tgagaatccggaatcctgtcaggtt

SEQ ID NO: 1310898 - DNA, 25 bp, Homo sapien
tcttctccaattcagtgttgacctg

SEQ ID NO: 1310899 - DNA, 25 bp, Homo sapien
cagggcctccatgactcgatttacc

SEQ ID NO: 1310900 - DNA, 25 bp, Homo sapien
atctaaggcttgaaagatgccaaag

SEQ ID NO: 1310901 - DNA, 25 bp, Homo sapien
tcagtgttgacctgatatctaaggc

SEQ ID NO: 1310902 - DNA, 25 bp, Homo sapien
caaaaagttgtgttctcgatgccaa

SEQ ID NO: 1310903 - DNA, 25 bp, Homo sapien
aactaattcattagcaccccatggg

SEQ ID NO: 1310904 - DNA, 25 bp, Homo sapien
accccatgggtctgaatgggtagga

SEQ ID NO: 1310905 - DNA, 25 bp, Homo sapien
actgaattcagtatcgacgagggac

SEQ ID NO: 1310906 - DNA, 25 bp, Homo sapien
cacccctacagcctgaggaagctgc

SEQ ID NO: 1310907 - DNA, 25 bp, Homo sapien
gctaagccacaatgaacttgatcca

SEQ ID NO: 1310908 - DNA, 25 bp, Homo sapien
ctgcagcaattgtcttcagtgggct

SEQ ID NO: 1310909 - DNA, 25 bp, Homo sapien
cccaggctaagccacaatgaacttg

SEQ ID NO: 1310910 - DNA, 25 bp, Homo sapien
ttcccgtgccaggacccagaggtac

SEQ ID NO: 1310911 - DNA, 25 bp, Homo sapien
ccctttcccgtgccaggacccagag

SEQ ID NO: 1310912 - DNA, 25 bp, Homo sapien
tttcccgtgccaggacccagaggta

SEQ ID NO: 1310913 - DNA, 25 bp, Homo sapien
ctttcccgtgccaggacccagaggt

SEQ ID NO: 1310914 - DNA, 25 bp, Homo sapien
gaagatgaagtggtagtactcagtc

SEQ ID NO: 1310915 - DNA, 25 bp, Homo sapien
aagtggtagtactcagtcatcatgc

SEQ ID NO: 1310916 - DNA, 25 bp, Homo sapien
tgaagtggtagtactcagtcatcat

SEQ ID NO: 1310917 - DNA, 25 bp, Homo sapien
gatgaagtggtagtactcagtcatc

SEQ ID NO: 1310918 - DNA, 25 bp, Homo sapien
tagtgtggctgcagtcgaagataat

SEQ ID NO: 1310919 - DNA, 25 bp, Homo sapien
tctgggccgccatagtgtggctgca

SEQ ID NO: 1310920 - DNA, 25 bp, Homo sapien
taatgcggaattcccggcctcgctt

SEQ ID NO: 1310921 - DNA, 25 bp, Homo sapien
gctgacggatcttcaggcggatgtt

SEQ ID NO: 1310922 - DNA, 25 bp, Homo sapien
aggggccatggagcacaaaagacac

SEQ ID NO: 1310923 - DNA, 25 bp, Homo sapien
cacaaaagacacacgtgtaccacat

SEQ ID NO: 1310924 - DNA, 25 bp, Homo sapien
gacacacgtgtaccacatgtatcca

SEQ ID NO: 1310925 - DNA, 25 bp, Homo sapien
gtgtaccacatgtatccacagctcc

SEQ ID NO: 1310926 - DNA, 25 bp, Homo sapien
ccatcagagctgagaatgaagtgac

SEQ ID NO: 1310927 - DNA, 25 bp, Homo sapien
cagtgatcacaggtaattccaggcc

SEQ ID NO: 1310928 - DNA, 25 bp, Homo sapien
taaaggcacttgtgggtaagagctg

SEQ ID NO: 1310929 - DNA, 25 bp, Homo sapien
gccagttttgctagcatggtatcca

SEQ ID NO: 1310930 - DNA, 25 bp, Homo sapien
gctttgggcccgcagctcatagcca

SEQ ID NO: 1310931 - DNA, 25 bp, Homo sapien
ccagctttgggcccgcagctcatag

SEQ ID NO: 1310932 - DNA, 25 bp, Homo sapien
tgggcccgcagctcatagccacggg

SEQ ID NO: 1310933 - DNA, 25 bp, Homo sapien
tttgggcccgcagctcatagccacg

SEQ ID NO: 1310934 - DNA, 25 bp, Homo sapien
tggctgaccgccacttgaggtactg

SEQ ID NO: 1310935 - DNA, 25 bp, Homo sapien
tccttgttgtccagcgggtggtgct

SEQ ID NO: 1310936 - DNA, 25 bp, Homo sapien
tactgtcgtcatagaccacggtggc

SEQ ID NO: 1310937 - DNA, 25 bp, Homo sapien
tagaggttcacgtagaaggtgtcct

SEQ ID NO: 1310938 - DNA, 25 bp, Homo sapien
agggtagggcagcacaggggtcagc

SEQ ID NO: 1310939 - DNA, 25 bp, Homo sapien
gtagggcagcacaggggtcagcact

SEQ ID NO: 1310940 - DNA, 25 bp, Homo sapien
ctgcaacagagggtagggcagcaca

SEQ ID NO: 1310941 - DNA, 25 bp, Homo sapien
agagggtagggcagcacaggggtca

SEQ ID NO: 1310942 - DNA, 25 bp, Homo sapien
ccaggatcttggacagcaaatgcag

SEQ ID NO: 1310943 - DNA, 25 bp, Homo sapien
tcttggacagcaaatgcagcgcttc

SEQ ID NO: 1310944 - DNA, 25 bp, Homo sapien
caaatgcagcgcttcccctccccag

SEQ ID NO: 1310945 - DNA, 25 bp, Homo sapien
ccattcccaggatcttggacagcaa

SEQ ID NO: 1310946 - DNA, 25 bp, Homo sapien
tcataggtcaaggttgtgttgggca

SEQ ID NO: 1310947 - DNA, 25 bp, Homo sapien
tggtcgcctcgaagctgtcatggaa

SEQ ID NO: 1310948 - DNA, 25 bp, Homo sapien
gggccgtccgcatactcgaagattc

SEQ ID NO: 1310949 - DNA, 25 bp, Homo sapien
aaatcgaaaggcatgctcctcggca

SEQ ID NO: 1310950 - DNA, 25 bp, Homo sapien
gagctgagctgtggaaggaacacag

SEQ ID NO: 1310951 - DNA, 25 bp, Homo sapien
tcttctgagccttgtgcaacagaca

SEQ ID NO: 1310952 - DNA, 25 bp, Homo sapien
tttctctgggtttcgtcctgggtca

SEQ ID NO: 1310953 - DNA, 25 bp, Homo sapien
tctgcgtctcgcttttccttctttc

SEQ ID NO: 1310954 - DNA, 25 bp, Homo sapien
ttctctgggtttcgtcctgggtcac

SEQ ID NO: 1310955 - DNA, 25 bp, Homo sapien
tgaaaatatcactgccgtccaccat

SEQ ID NO: 1310956 - DNA, 25 bp, Homo sapien
ccaccatcggccagaatccactgaa

SEQ ID NO: 1310957 - DNA, 25 bp, Homo sapien
ctctcccagaggcatgactctaaga

SEQ ID NO: 1310958 - DNA, 25 bp, Homo sapien
gaggcatgactctaagatgctgaaa

SEQ ID NO: 1310959 - DNA, 25 bp, Homo sapien
cagaagccaccgtctgctgtttggg

SEQ ID NO: 1310960 - DNA, 25 bp, Homo sapien
gggtaaagcctgatccagaatttac

SEQ ID NO: 1310961 - DNA, 25 bp, Homo sapien
gggttggattttgcacctcccacca

SEQ ID NO: 1310962 - DNA, 25 bp, Homo sapien
tgaggcccagggtaaagcctgatcc

SEQ ID NO: 1310963 - DNA, 25 bp, Homo sapien
cctgaactctgggtgcctcgtggtt

SEQ ID NO: 1310964 - DNA, 25 bp, Homo sapien
aagccgagggctctgagtcacagga

SEQ ID NO: 1310965 - DNA, 25 bp, Homo sapien
agccgagggctctgagtcacaggag

SEQ ID NO: 1310966 - DNA, 25 bp, Homo sapien
tgagctcagccaacgaaacaggcag

SEQ ID NO: 1310967 - DNA, 25 bp, Homo sapien
caggcagtggaactagctacgcttt

SEQ ID NO: 1310968 - DNA, 25 bp, Homo sapien
gactttgtcaccactatccaaggga

SEQ ID NO: 1310969 - DNA, 25 bp, Homo sapien
caataggaacgaggagttgtctccc

SEQ ID NO: 1310970 - DNA, 25 bp, Homo sapien
gaataataatctacagggccaagca

SEQ ID NO: 1310971 - DNA, 25 bp, Homo sapien
ggaaaatcccatggacttgacacag

SEQ ID NO: 1310972 - DNA, 25 bp, Homo sapien
ggccaagcactctttgaggatgcag

SEQ ID NO: 1310973 - DNA, 25 bp, Homo sapien
gaactccacggcactacctgcagtt

SEQ ID NO: 1310974 - DNA, 25 bp, Homo sapien
tgccctgtgagcctatgtgctctgt

SEQ ID NO: 1310975 - DNA, 25 bp, Homo sapien
tctgtgccctgtgagcctatgtgct

SEQ ID NO: 1310976 - DNA, 25 bp, Homo sapien
tgtgagcctatgtgctctgtgagtc

SEQ ID NO: 1310977 - DNA, 25 bp, Homo sapien
cctgtgagcctatgtgctctgtgag

SEQ ID NO: 1310978 - DNA, 25 bp, Homo sapien
ctgtgtgctctgtgagtctgtgccc

SEQ ID NO: 1310979 - DNA, 25 bp, Homo sapien
cctgtgtgctctgtgagtctgtgcc

SEQ ID NO: 1310980 - DNA, 25 bp, Homo sapien
tgtgtgctctgtgagtctgtgccct

SEQ ID NO: 1310981 - DNA, 25 bp, Homo sapien
gcctgtgtgctctgtgagtctgtgc

SEQ ID NO: 1310982 - DNA, 25 bp, Homo sapien
ccgtgagtctgtgtgccccatgact

SEQ ID NO: 1310983 - DNA, 25 bp, Homo sapien
cccctgagtctgtgtgcccggtgag

SEQ ID NO: 1310984 - DNA, 25 bp, Homo sapien
actctgtgccccgtgagtctgtgtg

SEQ ID NO: 1310985 - DNA, 25 bp, Homo sapien
tgtgcccggtgagtctgtgccccat

SEQ ID NO: 1310986 - DNA, 25 bp, Homo sapien
tctgtgtgccccgtgactctgtgcc

SEQ ID NO: 1310987 - DNA, 25 bp, Homo sapien
ccgtgagtctgtgtcccatgagtct

SEQ ID NO: 1310988 - DNA, 25 bp, Homo sapien
tgtgtgccccgtgagtctgtgtccc

SEQ ID NO: 1310989 - DNA, 25 bp, Homo sapien
tctgtgtcccatgagtctgtgtgcc

SEQ ID NO: 1310990 - DNA, 25 bp, Homo sapien
ccgtgagcctgtgtgccctgtgagt

SEQ ID NO: 1310991 - DNA, 25 bp, Homo sapien
cctgtgagtctgtgccctgtgactc

SEQ ID NO: 1310992 - DNA, 25 bp, Homo sapien
cgtgagcctgtgtgccctgtgagtc

SEQ ID NO: 1310993 - DNA, 25 bp, Homo sapien
agtctgtgccctgtgactctgtgcc

SEQ ID NO: 1310994 - DNA, 25 bp, Homo sapien
ccgtgagcctgtgtgccctgtgagt

SEQ ID NO: 1310995 - DNA, 25 bp, Homo sapien
cgtgagcctgtgtgccctgtgagtc

SEQ ID NO: 1310996 - DNA, 25 bp, Homo sapien
tgccctgtgagtctgtgccttgtga

SEQ ID NO: 1310997 - DNA, 25 bp, Homo sapien
gtgtgccctgtgagtctgtgccttg

SEQ ID NO: 1310998 - DNA, 25 bp, Homo sapien
gagtttgtgagtctgtgccccgtga

SEQ ID NO: 1310999 - DNA, 25 bp, Homo sapien
tgtgacctgtgagtttgtgagtctg

SEQ ID NO: 1311000 - DNA, 25 bp, Homo sapien
gactctgtgccccatgagcctgtgt

SEQ ID NO: 1311001 - DNA, 25 bp, Homo sapien
gcctgcaccccatgagcctctgtga

SEQ ID NO: 1311002 - DNA, 25 bp, Homo sapien
tgtcccgtgagcctgtgtgccctgt

SEQ ID NO: 1311003 - DNA, 25 bp, Homo sapien
tgtgtcccgtgagcctgtgtgccct

SEQ ID NO: 1311004 - DNA, 25 bp, Homo sapien
tcccgtgagcctgtgtgccctgtga

SEQ ID NO: 1311005 - DNA, 25 bp, Homo sapien
ctgtgtcccgtgagcctgtgtgccc

SEQ ID NO: 1311006 - DNA, 25 bp, Homo sapien
tcatggagctttccttgatctctgg

SEQ ID NO: 1311007 - DNA, 25 bp, Homo sapien
cagcatgatcttcatggagctttcc

SEQ ID NO: 1311008 - DNA, 25 bp, Homo sapien
gatcttcatggagctttccttgatc

SEQ ID NO: 1311009 - DNA, 25 bp, Homo sapien
tcttcatggagctttccttgatctc

SEQ ID NO: 1311010 - DNA, 25 bp, Homo sapien
agtatttgaaacgtacaggcccgag

SEQ ID NO: 1311011 - DNA, 25 bp, Homo sapien
aaaattaagcccagccaatggccca

SEQ ID NO: 1311012 - DNA, 25 bp, Homo sapien
gctcagttggccttggacatgcata

SEQ ID NO: 1311013 - DNA, 25 bp, Homo sapien
tctgtacccttaagtcagcttctgg

SEQ ID NO: 1311014 - DNA, 25 bp, Homo sapien
caccagggagcgtagagtcaaatgt

SEQ ID NO: 1311015 - DNA, 25 bp, Homo sapien
tttctgagcactggctacaaaccca

SEQ ID NO: 1311016 - DNA, 25 bp, Homo sapien
gcactggctacaaacccatgtctct

SEQ ID NO: 1311017 - DNA, 25 bp, Homo sapien
tgacctctccttaacttgtcttgca

SEQ ID NO: 1311018 - DNA, 25 bp, Homo sapien
cttgacctctccttaacttgtcttg

SEQ ID NO: 1311019 - DNA, 25 bp, Homo sapien
ctctgctgtctccatatttacaaag

SEQ ID NO: 1311020 - DNA, 25 bp, Homo sapien
tagagagccaggctgtccttcctct

SEQ ID NO: 1311021 - DNA, 25 bp, Homo sapien
tatttacaaagtctgagtccagctc

SEQ ID NO: 1311022 - DNA, 25 bp, Homo sapien
agctccataacctgccaccctgctg

SEQ ID NO: 1311023 - DNA, 25 bp, Homo sapien
cactcttctgctggatgctgcccca

SEQ ID NO: 1311024 - DNA, 25 bp, Homo sapien
ccagctcccacactcttctgctgga

SEQ ID NO: 1311025 - DNA, 25 bp, Homo sapien
agctcccacactcttctgctggatg

SEQ ID NO: 1311026 - DNA, 25 bp, Homo sapien
tcccacactcttctgctggatgctg

SEQ ID NO: 1311027 - DNA, 25 bp, Homo sapien
ttggcacccctcttagacacacgga

SEQ ID NO: 1311028 - DNA, 25 bp, Homo sapien
tttcgatctaatccctgctccagag

SEQ ID NO: 1311029 - DNA, 25 bp, Homo sapien
agaaaatgcaacagggcaggaagtc

SEQ ID NO: 1311030 - DNA, 25 bp, Homo sapien
agatgaaatactcgaggcagcactc

SEQ ID NO: 1311031 - DNA, 25 bp, Homo sapien
ccaccttgcagcccactagggctga

SEQ ID NO: 1311032 - DNA, 25 bp, Homo sapien
caccttgcagcccactagggctgac

SEQ ID NO: 1311033 - DNA, 25 bp, Homo sapien
accttgcagcccactagggctgact

SEQ ID NO: 1311034 - DNA, 25 bp, Homo sapien
ccttgcagcccactagggctgactc

SEQ ID NO: 1311035 - DNA, 25 bp, Homo sapien
ggacagcgaggtcagaaaattctga

SEQ ID NO: 1311036 - DNA, 25 bp, Homo sapien
ccgcttgcctgatgtggtctgagct

SEQ ID NO: 1311037 - DNA, 25 bp, Homo sapien
tcccagacagggatggccccgcttg

SEQ ID NO: 1311038 - DNA, 25 bp, Homo sapien
cagggagatgaatggtagccaatat

SEQ ID NO: 1311039 - DNA, 25 bp, Homo sapien
cttccagatgttttgtctacctggc

SEQ ID NO: 1311040 - DNA, 25 bp, Homo sapien
gatgttttgtctacctggcagcaaa

SEQ ID NO: 1311041 - DNA, 25 bp, Homo sapien
cagatgttttgtctacctggcagca

SEQ ID NO: 1311042 - DNA, 25 bp, Homo sapien
tccagatgttttgtctacctggcag

SEQ ID NO: 1311043 - DNA, 25 bp, Homo sapien
gaggatgctttgactccactgggca

SEQ ID NO: 1311044 - DNA, 25 bp, Homo sapien
gaccgtgaggatgctttgactccac

SEQ ID NO: 1311045 - DNA, 25 bp, Homo sapien
ttttgaccgtgaggatgctttgact

SEQ ID NO: 1311046 - DNA, 25 bp, Homo sapien
ccattttgaccgtgaggatgctttg

SEQ ID NO: 1311047 - DNA, 25 bp, Homo sapien
caatggaatgctcactcgttttgtc

SEQ ID NO: 1311048 - DNA, 25 bp, Homo sapien
aaagatgaggctgacaagccgaacc

SEQ ID NO: 1311049 - DNA, 25 bp, Homo sapien
ccaagatgcttggtatcaggtgtga

SEQ ID NO: 1311050 - DNA, 25 bp, Homo sapien
ggctgacaagccgaaccaagatgct

SEQ ID NO: 1311051 - DNA, 25 bp, Homo sapien
gctcctgcttttccgcccaattggg

SEQ ID NO: 1311052 - DNA, 25 bp, Homo sapien
tgcttttccgcccaattgggcagct

SEQ ID NO: 1311053 - DNA, 25 bp, Homo sapien
ccgctcctgcttttccgcccaattg

SEQ ID NO: 1311054 - DNA, 25 bp, Homo sapien
ttccgcccaattgggcagctttttg

SEQ ID NO: 1311055 - DNA, 25 bp, Homo sapien
tgggcggccacaacaaagttaaaga

SEQ ID NO: 1311056 - DNA, 25 bp, Homo sapien
gccttgggcggccacaacaaagtta

SEQ ID NO: 1311057 - DNA, 25 bp, Homo sapien
aagaccggagtaagagtctccggcg

SEQ ID NO: 1311058 - DNA, 25 bp, Homo sapien
agaagagacgcggagaagccggagc

SEQ ID NO: 1311059 - DNA, 25 bp, Homo sapien
cggcccagtattcccaaaccagact

SEQ ID NO: 1311060 - DNA, 25 bp, Homo sapien
attcccaaaccagactccggaggcg

SEQ ID NO: 1311061 - DNA, 25 bp, Homo sapien
cgagtccgggatccagaaggcgcac

SEQ ID NO: 1311062 - DNA, 25 bp, Homo sapien
tcccgcgcgagtccgggatccagaa

SEQ ID NO: 1311063 - DNA, 25 bp, Homo sapien
cgttgggcgccgccgagcgtgcccg

SEQ ID NO: 1311064 - DNA, 25 bp, Homo sapien
gcgcgggcgcgcagcagccccgaag

SEQ ID NO: 1311065 - DNA, 25 bp, Homo sapien
agcagccccgaaggcgccgcctggc

SEQ ID NO: 1311066 - DNA, 25 bp, Homo sapien
gcagcagccccgaaggcgccgcctg

SEQ ID NO: 1311067 - DNA, 25 bp, Homo sapien
gcgcgcagcagccccgaaggcgccg

SEQ ID NO: 1311068 - DNA, 25 bp, Homo sapien
actcgcgcgctcacacctgcgcggg

SEQ ID NO: 1311069 - DNA, 25 bp, Homo sapien
tatcgcccgggctcgcacaaagccc

SEQ ID NO: 1311070 - DNA, 25 bp, Homo sapien
cacaaagccccggagtggagttgca

SEQ ID NO: 1311071 - DNA, 25 bp, Homo sapien
ttcacactcacacttgccgaggcgc

SEQ ID NO: 1311072 - DNA, 25 bp, Homo sapien
tcatcactcttgtggagccccactg

SEQ ID NO: 1311073 - DNA, 25 bp, Homo sapien
tcagccgactcctgagctcatagaa

SEQ ID NO: 1311074 - DNA, 25 bp, Homo sapien
tagaattaaccctgtcctctaccat

SEQ ID NO: 1311075 - DNA, 25 bp, Homo sapien
gctgcaggggccaattctcatcact

SEQ ID NO: 1311076 - DNA, 25 bp, Homo sapien
agattccagtaggtggtacactgtg

SEQ ID NO: 1311077 - DNA, 25 bp, Homo sapien
tgccctccgccaagattccagtagg

SEQ ID NO: 1311078 - DNA, 25 bp, Homo sapien
cctccgccaagattccagtaggtgg

SEQ ID NO: 1311079 - DNA, 25 bp, Homo sapien
ggcacacaggtatggagcttctctg

SEQ ID NO: 1311080 - DNA, 25 bp, Homo sapien
ggcctggaaacggagcattccacgt

SEQ ID NO: 1311081 - DNA, 25 bp, Homo sapien
cgcttttgaggagctcgcgggacac

SEQ ID NO: 1311082 - DNA, 25 bp, Homo sapien
cagctctgtgtcctcgcttttgagg

SEQ ID NO: 1311083 - DNA, 25 bp, Homo sapien
caagcattgtactggcaggcagacg

SEQ ID NO: 1311084 - DNA, 25 bp, Homo sapien
tcctccaggacccagttgatgggga

SEQ ID NO: 1311085 - DNA, 25 bp, Homo sapien
tccaggacccagttgatggggaccc

SEQ ID NO: 1311086 - DNA, 25 bp, Homo sapien
ctggctgaatcaggcatctgagggt

SEQ ID NO: 1311087 - DNA, 25 bp, Homo sapien
tgctctggctgaatcaggcatctga

SEQ ID NO: 1311088 - DNA, 25 bp, Homo sapien
cccaggcccttgagacataggaaaa

SEQ ID NO: 1311089 - DNA, 25 bp, Homo sapien
ccaggcccttgagacataggaaaat

SEQ ID NO: 1311090 - DNA, 25 bp, Homo sapien
aggcccttgagacataggaaaatca

SEQ ID NO: 1311091 - DNA, 25 bp, Homo sapien
caggcccttgagacataggaaaatc

SEQ ID NO: 1311092 - DNA, 25 bp, Homo sapien
tcttctcagaaagcccgttcgtgtt

SEQ ID NO: 1311093 - DNA, 25 bp, Homo sapien
gtcctcttctcagaaagcccgttcg

SEQ ID NO: 1311094 - DNA, 25 bp, Homo sapien
tctcagaaagcccgttcgtgttttc

SEQ ID NO: 1311095 - DNA, 25 bp, Homo sapien
cctcttctcagaaagcccgttcgtg

SEQ ID NO: 1311096 - DNA, 25 bp, Homo sapien
ttaccctgatcgggcagccggcagc

SEQ ID NO: 1311097 - DNA, 25 bp, Homo sapien
accctgatcgggcagccggcagctg

SEQ ID NO: 1311098 - DNA, 25 bp, Homo sapien
ggcagccggcagctggagcaagacc

SEQ ID NO: 1311099 - DNA, 25 bp, Homo sapien
cagccggcagctggagcaagaccgt

SEQ ID NO: 1311100 - DNA, 25 bp, Homo sapien
taaaaatggaccaaaagaagcatct

SEQ ID NO: 1311101 - DNA, 25 bp, Homo sapien
ccaaattgcatccatggtatcgagc

SEQ ID NO: 1311102 - DNA, 25 bp, Homo sapien
aagatgcgactgctcctcagaaccg

SEQ ID NO: 1311103 - DNA, 25 bp, Homo sapien
cttcaggttacaaacaagatgcgac

SEQ ID NO: 1311104 - DNA, 25 bp, Homo sapien
actttctgccaacaagcaggctcgc

SEQ ID NO: 1311105 - DNA, 25 bp, Homo sapien
caggaaactttctgccaacaagcag

SEQ ID NO: 1311106 - DNA, 25 bp, Homo sapien
caacaagcaggctcgctccctggat

SEQ ID NO: 1311107 - DNA, 25 bp, Homo sapien
gaaactttctgccaacaagcaggct

SEQ ID NO: 1311108 - DNA, 25 bp, Homo sapien
tcagccattatacccaaaagcctgg

SEQ ID NO: 1311109 - DNA, 25 bp, Homo sapien
cagccattatacccaaaagcctgga

SEQ ID NO: 1311110 - DNA, 25 bp, Homo sapien
gcctggagttcgtggacagtgctca

SEQ ID NO: 1311111 - DNA, 25 bp, Homo sapien
taggctgcccgcagaagcgagctat

SEQ ID NO: 1311112 - DNA, 25 bp, Homo sapien
tcaggagcacggcagcagggcaact

SEQ ID NO: 1311113 - DNA, 25 bp, Homo sapien
tccagtgacattcctcctgccaggt

SEQ ID NO: 1311114 - DNA, 25 bp, Homo sapien
tctctaaggtccctgtcttgctgga

SEQ ID NO: 1311115 - DNA, 25 bp, Homo sapien
cacaaacatgaggcccctgtaagtc

SEQ ID NO: 1311116 - DNA, 25 bp, Homo sapien
cctcacaaacatgaggcccctgtaa

SEQ ID NO: 1311117 - DNA, 25 bp, Homo sapien
tcacaaacatgaggcccctgtaagt

SEQ ID NO: 1311118 - DNA, 25 bp, Homo sapien
caaacatgaggcccctgtaagtctc

SEQ ID NO: 1311119 - DNA, 25 bp, Homo sapien
gcaaggaggccacgtggacagtcat

SEQ ID NO: 1311120 - DNA, 25 bp, Homo sapien
ctgagcaagcgcacggaggcagggg

SEQ ID NO: 1311121 - DNA, 25 bp, Homo sapien
ggggctggggcatccttcttcttag

SEQ ID NO: 1311122 - DNA, 25 bp, Homo sapien
tcttcttaggcaaggaggccacgtg

SEQ ID NO: 1311123 - DNA, 25 bp, Homo sapien
agcagagatggttccgagccgcgct

SEQ ID NO: 1311124 - DNA, 25 bp, Homo sapien
ccgagccgcgcttctcagacttgaa

SEQ ID NO: 1311125 - DNA, 25 bp, Homo sapien
tgcatctgaatcaccctgcgatctc

SEQ ID NO: 1311126 - DNA, 25 bp, Homo sapien
tccagggaccgcactttgagttgta

SEQ ID NO: 1311127 - DNA, 25 bp, Homo sapien
tgccacagtttgcggcagagaagct

SEQ ID NO: 1311128 - DNA, 25 bp, Homo sapien
cagagaagctaagggccaggcgaat

SEQ ID NO: 1311129 - DNA, 25 bp, Homo sapien
tttgcggcagagaagctaagggcca

SEQ ID NO: 1311130 - DNA, 25 bp, Homo sapien
taagggccaggcgaatgggaatgca

SEQ ID NO: 1311131 - DNA, 25 bp, Homo sapien
caatgactcctcgagggtaattaca

SEQ ID NO: 1311132 - DNA, 25 bp, Homo sapien
gagaggcgaagctgtcaatagttct

SEQ ID NO: 1311133 - DNA, 25 bp, Homo sapien
cccgggcgagaacggttccatattg

SEQ ID NO: 1311134 - DNA, 25 bp, Homo sapien
tatggaagatacgaaagagaggcga

SEQ ID NO: 1311135 - DNA, 25 bp, Homo sapien
cgacaggtacacggtgcccagccgc

SEQ ID NO: 1311136 - DNA, 25 bp, Homo sapien
gacaggtacacggtgcccagccgca

SEQ ID NO: 1311137 - DNA, 25 bp, Homo sapien
gccaagtgtagtggtgcatatctgt

SEQ ID NO: 1311138 - DNA, 25 bp, Homo sapien
ttagccaagtgtagtggtgcatatc

SEQ ID NO: 1311139 - DNA, 25 bp, Homo sapien
caagtgtagtggtgcatatctgtag

SEQ ID NO: 1311140 - DNA, 25 bp, Homo sapien
tagccaagtgtagtggtgcatatct

SEQ ID NO: 1311141 - DNA, 25 bp, Homo sapien
gtgggtaattctgttcttaggagac

SEQ ID NO: 1311142 - DNA, 25 bp, Homo sapien
acccattgaccatccgagtgtttcc

SEQ ID NO: 1311143 - DNA, 25 bp, Homo sapien
cagtgggtaattctgttcttaggag

SEQ ID NO: 1311144 - DNA, 25 bp, Homo sapien
gaacccattgaccatccgagtgttt

SEQ ID NO: 1311145 - DNA, 25 bp, Homo sapien
ccagaatctggacaccaatgggcat

SEQ ID NO: 1311146 - DNA, 25 bp, Homo sapien
ccccagaatctggacaccaatgggc

SEQ ID NO: 1311147 - DNA, 25 bp, Homo sapien
cccagaatctggacaccaatgggca

SEQ ID NO: 1311148 - DNA, 25 bp, Homo sapien
cccccagaatctggacaccaatggg

SEQ ID NO: 1311149 - DNA, 25 bp, Homo sapien
aatgactggctgtggttcgtcagcc

SEQ ID NO: 1311150 - DNA, 25 bp, Homo sapien
ttacaccagggcgagagccatgtct

SEQ ID NO: 1311151 - DNA, 25 bp, Homo sapien
gtcattgtaatgactctgtaagtct

SEQ ID NO: 1311152 - DNA, 25 bp, Homo sapien
gaatccactggttctgagtgaatga

SEQ ID NO: 1311153 - DNA, 25 bp, Homo sapien
atcatatctgacaagcagacttggg

SEQ ID NO: 1311154 - DNA, 25 bp, Homo sapien
tcatatctgacaagcagacttggga

SEQ ID NO: 1311155 - DNA, 25 bp, Homo sapien
ggtcagacgtgttttgatcttctct

SEQ ID NO: 1311156 - DNA, 25 bp, Homo sapien
ggcagctccacgtacctgctaggag

SEQ ID NO: 1311157 - DNA, 25 bp, Homo sapien
ccgctgcaccaacctctccacaggc

SEQ ID NO: 1311158 - DNA, 25 bp, Homo sapien
acaggcagctccacgtacctgctag

SEQ ID NO: 1311159 - DNA, 25 bp, Homo sapien
gctccacgtacctgctaggagctgg

SEQ ID NO: 1311160 - DNA, 25 bp, Homo sapien
attggaagctggcaaagatgctggt

SEQ ID NO: 1311161 - DNA, 25 bp, Homo sapien
ggaagctggcaaagatgctggtggg

SEQ ID NO: 1311162 - DNA, 25 bp, Homo sapien
tcattggaagctggcaaagatgctg

SEQ ID NO: 1311163 - DNA, 25 bp, Homo sapien
agctggcaaagatgctggtggggtt

SEQ ID NO: 1311164 - DNA, 25 bp, Homo sapien
gaaaagcaaagtccgctccaccgta

SEQ ID NO: 1311165 - DNA, 25 bp, Homo sapien
agcaaagtccgctccaccgtaaggc

SEQ ID NO: 1311166 - DNA, 25 bp, Homo sapien
ccgtaaggcctctcgcccctcccat

SEQ ID NO: 1311167 - DNA, 25 bp, Homo sapien
gagaaaagcaaagtccgctccaccg

SEQ ID NO: 1311168 - DNA, 25 bp, Homo sapien
ccagggcccttgtgccgagtcttct

SEQ ID NO: 1311169 - DNA, 25 bp, Homo sapien
agcccagggcccttgtgccgagtct

SEQ ID NO: 1311170 - DNA, 25 bp, Homo sapien
ccttgtgccgagtcttctgtaaatc

SEQ ID NO: 1311171 - DNA, 25 bp, Homo sapien
ggcccttgtgccgagtcttctgtaa

SEQ ID NO: 1311172 - DNA, 25 bp, Homo sapien
tcactgctatatccaagaaatctgt

SEQ ID NO: 1311173 - DNA, 25 bp, Homo sapien
taaatggaacgcagacaatgttagt

SEQ ID NO: 1311174 - DNA, 25 bp, Homo sapien
gacctgcctgtctaacgtaaatgga

SEQ ID NO: 1311175 - DNA, 25 bp, Homo sapien
caatgttagtggtgtcctcatgcga

SEQ ID NO: 1311176 - DNA, 25 bp, Homo sapien
caggtacgtgcagagtggtataatt

SEQ ID NO: 1311177 - DNA, 25 bp, Homo sapien
caagatcaggtacgtgcagagtggt

SEQ ID NO: 1311178 - DNA, 25 bp, Homo sapien
tcctgaccctaactcttagcttcca

SEQ ID NO: 1311179 - DNA, 25 bp, Homo sapien
tcaggcaagatcaggtacgtgcaga

SEQ ID NO: 1311180 - DNA, 25 bp, Homo sapien
gttcaggctcggtcaacttcccaag

SEQ ID NO: 1311181 - DNA, 25 bp, Homo sapien
tactgttcaggctcggtcaacttcc

SEQ ID NO: 1311182 - DNA, 25 bp, Homo sapien
tgcacagacccctgtggatactcct

SEQ ID NO: 1311183 - DNA, 25 bp, Homo sapien
cctgtggatactccttcagaaggtt

SEQ ID NO: 1311184 - DNA, 25 bp, Homo sapien
gcagccaggactgcgaggagcgggt

SEQ ID NO: 1311185 - DNA, 25 bp, Homo sapien
agccaggactgcgaggagcgggtga

SEQ ID NO: 1311186 - DNA, 25 bp, Homo sapien
gccaggactgcgaggagcgggtgat

SEQ ID NO: 1311187 - DNA, 25 bp, Homo sapien
cagcagccaggactgcgaggagcgg

SEQ ID NO: 1311188 - DNA, 25 bp, Homo sapien
gccctgcattgtctccagattgctg

SEQ ID NO: 1311189 - DNA, 25 bp, Homo sapien
gattgctgttaccaacaggttccca

SEQ ID NO: 1311190 - DNA, 25 bp, Homo sapien
tgctgttaccaacaggttcccactt

SEQ ID NO: 1311191 - DNA, 25 bp, Homo sapien
ctccagattgctgttaccaacaggt

SEQ ID NO: 1311192 - DNA, 25 bp, Homo sapien
cgcatttgtgaggagatggcagcga

SEQ ID NO: 1311193 - DNA, 25 bp, Homo sapien
ggagatggcagcgaggatgctgaac

SEQ ID NO: 1311194 - DNA, 25 bp, Homo sapien
tttgtgaggagatggcagcgaggat

SEQ ID NO: 1311195 - DNA, 25 bp, Homo sapien
gtgaggagatggcagcgaggatgct

SEQ ID NO: 1311196 - DNA, 25 bp, Homo sapien
cagcagcatccatcacctaggagct

SEQ ID NO: 1311197 - DNA, 25 bp, Homo sapien
agggacgagtcttgcaactcagtgt

SEQ ID NO: 1311198 - DNA, 25 bp, Homo sapien
tcttgcaactcagtgtggtgcacct

SEQ ID NO: 1311199 - DNA, 25 bp, Homo sapien
tgttggaaacaaggagcctcagccc

SEQ ID NO: 1311200 - DNA, 25 bp, Homo sapien
tccactctgttaggggcagcagact

SEQ ID NO: 1311201 - DNA, 25 bp, Homo sapien
ccactctgttaggggcagcagactc

SEQ ID NO: 1311202 - DNA, 25 bp, Homo sapien
ttccactctgttaggggcagcagac

SEQ ID NO: 1311203 - DNA, 25 bp, Homo sapien
ccccaccactagctcccacagttgg

SEQ ID NO: 1311204 - DNA, 25 bp, Homo sapien
caacaatgtattgttgccacctaga

SEQ ID NO: 1311205 - DNA, 25 bp, Homo sapien
gtattgttgccacctagagtcctcc

SEQ ID NO: 1311206 - DNA, 25 bp, Homo sapien
agctgctgctgctcaacaatgtatt

SEQ ID NO: 1311207 - DNA, 25 bp, Homo sapien
gcttcgagctatttcctcagtccag

SEQ ID NO: 1311208 - DNA, 25 bp, Homo sapien
tcagtccagacatggggaggatttg

SEQ ID NO: 1311209 - DNA, 25 bp, Homo sapien
gagacggatggtgcttcgagctatt

SEQ ID NO: 1311210 - DNA, 25 bp, Homo sapien
tccaccaggagacggatggtgcttc

SEQ ID NO: 1311211 - DNA, 25 bp, Homo sapien
tgatctctgactgtttgactaatcc

SEQ ID NO: 1311212 - DNA, 25 bp, Homo sapien
ccggtaatgagagaacagggcagct

SEQ ID NO: 1311213 - DNA, 25 bp, Homo sapien
gacagtttaaacaagacagttattg

SEQ ID NO: 1311214 - DNA, 25 bp, Homo sapien
ttgactaatcctagagacagtttaa

SEQ ID NO: 1311215 - DNA, 25 bp, Homo sapien
tgggaagcacagactcaactgagta

SEQ ID NO: 1311216 - DNA, 25 bp, Homo sapien
gatagcagcctcaatcatgggaagc

SEQ ID NO: 1311217 - DNA, 25 bp, Homo sapien
cacatgtactgtgttgctaagcact

SEQ ID NO: 1311218 - DNA, 25 bp, Homo sapien
caaagctttgtcagattagtgtcgc

SEQ ID NO: 1311219 - DNA, 25 bp, Homo sapien
ggtggaggtgagcagagtaactttc

SEQ ID NO: 1311220 - DNA, 25 bp, Homo sapien
ttgggagatccaggtggaggtgagc

SEQ ID NO: 1311221 - DNA, 25 bp, Homo sapien
tctgtcttttctgctcggtctcctt

SEQ ID NO: 1311222 - DNA, 25 bp, Homo sapien
cccctggaggactcgatggtgtaaa

SEQ ID NO: 1311223 - DNA, 25 bp, Homo sapien
gcaatgggatttggtttccctccac

SEQ ID NO: 1311224 - DNA, 25 bp, Homo sapien
caggaccaccctagatgcaatggga

SEQ ID NO: 1311225 - DNA, 25 bp, Homo sapien
gaaatcagaaaatgcccgatgcttt

SEQ ID NO: 1311226 - DNA, 25 bp, Homo sapien
ggtaggcagccttcagaaatcagaa

SEQ ID NO: 1311227 - DNA, 25 bp, Homo sapien
gatgagctgggcactgccgtgggat

SEQ ID NO: 1311228 - DNA, 25 bp, Homo sapien
gagatagctggcttgccaggtgttt

SEQ ID NO: 1311229 - DNA, 25 bp, Homo sapien
tccacttcacatctgatgcctttct

SEQ ID NO: 1311230 - DNA, 25 bp, Homo sapien
gggataccaggtgctccaatttctc

SEQ ID NO: 1311231 - DNA, 25 bp, Homo sapien
aatccagagaagtgttcaagagaag

SEQ ID NO: 1311232 - DNA, 25 bp, Homo sapien
gggggcacttctaaaaggtatgctg

SEQ ID NO: 1311233 - DNA, 25 bp, Homo sapien
cttctaaaaggtatgctgctatggg

SEQ ID NO: 1311234 - DNA, 25 bp, Homo sapien
ggcacttctaaaaggtatgctgcta

SEQ ID NO: 1311235 - DNA, 25 bp, Homo sapien
gtcttcgtgggtcccacaaaggcac

SEQ ID NO: 1311236 - DNA, 25 bp, Homo sapien
gtgtcagtgtgtcttcgtgggtccc

SEQ ID NO: 1311237 - DNA, 25 bp, Homo sapien
agtgtgtcttcgtgggtcccacaaa

SEQ ID NO: 1311238 - DNA, 25 bp, Homo sapien
acatggtgtcagtgtgtcttcgtgg

SEQ ID NO: 1311239 - DNA, 25 bp, Homo sapien
tcctccaggacaatgcaggaagtgg

SEQ ID NO: 1311240 - DNA, 25 bp, Homo sapien
acactcctccaggacaatgcaggaa

SEQ ID NO: 1311241 - DNA, 25 bp, Homo sapien
gaccacactcctccaggacaatgca

SEQ ID NO: 1311242 - DNA, 25 bp, Homo sapien
ccaggacaatgcaggaagtggccat

SEQ ID NO: 1311243 - DNA, 25 bp, Homo sapien
ctttcacagtgtcatcaccgtcaca

SEQ ID NO: 1311244 - DNA, 25 bp, Homo sapien
cctttcacagtgtcatcaccgtcac

SEQ ID NO: 1311245 - DNA, 25 bp, Homo sapien
tttcacagtgtcatcaccgtcacac

SEQ ID NO: 1311246 - DNA, 25 bp, Homo sapien
ctgccatctgcttcttcaccagcat

SEQ ID NO: 1311247 - DNA, 25 bp, Homo sapien
agccccggctgccatctgcttcttc

SEQ ID NO: 1311248 - DNA, 25 bp, Homo sapien
tcagccccggctgccatctgcttct

SEQ ID NO: 1311249 - DNA, 25 bp, Homo sapien
ggctgccatctgcttcttcaccagc

SEQ ID NO: 1311250 - DNA, 25 bp, Homo sapien
ttgagaagcctgtggctggagctcg

SEQ ID NO: 1311251 - DNA, 25 bp, Homo sapien
ctggagagttcttctggttgagaag

SEQ ID NO: 1311252 - DNA, 25 bp, Homo sapien
ggagagttcttctggttgagaagcc

SEQ ID NO: 1311253 - DNA, 25 bp, Homo sapien
agctcggggacatgcagagctccat

SEQ ID NO: 1311254 - DNA, 25 bp, Homo sapien
taactgcctctctcgctcttctcat

SEQ ID NO: 1311255 - DNA, 25 bp, Homo sapien
gccattacagccgcctggagtgaga

SEQ ID NO: 1311256 - DNA, 25 bp, Homo sapien
cctttgaagtccttaagtaaagatg

SEQ ID NO: 1311257 - DNA, 25 bp, Homo sapien
agtccttaagtaaagatggctgtag

SEQ ID NO: 1311258 - DNA, 25 bp, Homo sapien
caagtccagggcattcatgcagtaa

SEQ ID NO: 1311259 - DNA, 25 bp, Homo sapien
tgttccatctggaggttcccgaagc

SEQ ID NO: 1311260 - DNA, 25 bp, Homo sapien
ccatgaatggtttgaggaactctcc

SEQ ID NO: 1311261 - DNA, 25 bp, Homo sapien
ggatataaccaaggctcccaaagct

SEQ ID NO: 1311262 - DNA, 25 bp, Homo sapien
agaacgacggctgtgttaacggtgc

SEQ ID NO: 1311263 - DNA, 25 bp, Homo sapien
ttaatgaattccagccttcagggag

SEQ ID NO: 1311264 - DNA, 25 bp, Homo sapien
ccttgcagctccaggtgctttaatg

SEQ ID NO: 1311265 - DNA, 25 bp, Homo sapien
ttaacggtgctggtgaaaaatgagg

SEQ ID NO: 1311266 - DNA, 25 bp, Homo sapien
atgggatccttgcagtcgtaggtga

SEQ ID NO: 1311267 - DNA, 25 bp, Homo sapien
tgggatccttgcagtcgtaggtgat

SEQ ID NO: 1311268 - DNA, 25 bp, Homo sapien
ggatccttgcagtcgtaggtgatgc

SEQ ID NO: 1311269 - DNA, 25 bp, Homo sapien
aatgggatccttgcagtcgtaggtg

SEQ ID NO: 1311270 - DNA, 25 bp, Homo sapien
cgataagccgcagcggccaccgcgg

SEQ ID NO: 1311271 - DNA, 25 bp, Homo sapien
agccgataagccgcagcggccaccg

SEQ ID NO: 1311272 - DNA, 25 bp, Homo sapien
ctgccacagccgataagccgcagcg

SEQ ID NO: 1311273 - DNA, 25 bp, Homo sapien
tgccacagccgataagccgcagcgg

SEQ ID NO: 1311274 - DNA, 25 bp, Homo sapien
tgtgacaggttcaagctctcacgct

SEQ ID NO: 1311275 - DNA, 25 bp, Homo sapien
ggttcaagctctcacgctcatcgaa

SEQ ID NO: 1311276 - DNA, 25 bp, Homo sapien
ccattttccagcacaactgggtaca

SEQ ID NO: 1311277 - DNA, 25 bp, Homo sapien
tcacgctcatcgaaaagtccatttt

SEQ ID NO: 1311278 - DNA, 25 bp, Homo sapien
gctgcacatttacggggaacgacgg

SEQ ID NO: 1311279 - DNA, 25 bp, Homo sapien
gggacgcgggatggctgcacattta

SEQ ID NO: 1311280 - DNA, 25 bp, Homo sapien
tttataagcgtgctctttgagggcc

SEQ ID NO: 1311281 - DNA, 25 bp, Homo sapien
agaatgtttttataagcgtgctctt

SEQ ID NO: 1311282 - DNA, 25 bp, Homo sapien
ccagcatctcccctacctgtaattc

SEQ ID NO: 1311283 - DNA, 25 bp, Homo sapien
accagcatctcccctacctgtaatt

SEQ ID NO: 1311284 - DNA, 25 bp, Homo sapien
cctctgttctacaagaccctctggg

SEQ ID NO: 1311285 - DNA, 25 bp, Homo sapien
ctctgttctacaagaccctctgggg

SEQ ID NO: 1311286 - DNA, 25 bp, Homo sapien
tccgcctctgttctacaagaccctc

SEQ ID NO: 1311287 - DNA, 25 bp, Homo sapien
cgcctctgttctacaagaccctctg

SEQ ID NO: 1311288 - DNA, 25 bp, Homo sapien
cttccctttttcatcttccgttcat

SEQ ID NO: 1311289 - DNA, 25 bp, Homo sapien
cttgccttccctttttcatcttccg

SEQ ID NO: 1311290 - DNA, 25 bp, Homo sapien
cttgctaactgacggatgtgtttcc

SEQ ID NO: 1311291 - DNA, 25 bp, Homo sapien
tgctaactgacggatgtgtttccat

SEQ ID NO: 1311292 - DNA, 25 bp, Homo sapien
ttgctaactgacggatgtgtttcca

SEQ ID NO: 1311293 - DNA, 25 bp, Homo sapien
tgatgtcacctagataagccactgt

SEQ ID NO: 1311294 - DNA, 25 bp, Homo sapien
ttcaaaactcacagacaagcagatg

SEQ ID NO: 1311295 - DNA, 25 bp, Homo sapien
agtctgggaagcctaagcccaggtg

SEQ ID NO: 1311296 - DNA, 25 bp, Homo sapien
ttgtgccccagttctttctagtaag

SEQ ID NO: 1311297 - DNA, 25 bp, Homo sapien
gaaatacggcctccatgtgtgcagc

SEQ ID NO: 1311298 - DNA, 25 bp, Homo sapien
cagggttcttgctcttgtcacgtct

SEQ ID NO: 1311299 - DNA, 25 bp, Homo sapien
tttctgtcggaggatgtaggtagtc

SEQ ID NO: 1311300 - DNA, 25 bp, Homo sapien
gcctcgttacacttctgaaagcaag

SEQ ID NO: 1311301 - DNA, 25 bp, Homo sapien
gctttctccagacccatgtaagtgg

SEQ ID NO: 1311302 - DNA, 25 bp, Homo sapien
ctggctttctccagacccatgtaag

SEQ ID NO: 1311303 - DNA, 25 bp, Homo sapien
tttctccagacccatgtaagtgggg

SEQ ID NO: 1311304 - DNA, 25 bp, Homo sapien
ggctttctccagacccatgtaagtg

SEQ ID NO: 1311305 - DNA, 25 bp, Homo sapien
gctcggaacagccagcagggtaccg

SEQ ID NO: 1311306 - DNA, 25 bp, Homo sapien
gcagacacctctgcacgtgagccat

SEQ ID NO: 1311307 - DNA, 25 bp, Homo sapien
cggaacagccagcagggtaccgtgt

SEQ ID NO: 1311308 - DNA, 25 bp, Homo sapien
agggtaccgtgtggcagacacctct

SEQ ID NO: 1311309 - DNA, 25 bp, Homo sapien
acccccaagcctgtggggtatgaag

SEQ ID NO: 1311310 - DNA, 25 bp, Homo sapien
attttctagccaacccccaagcctg

SEQ ID NO: 1311311 - DNA, 25 bp, Homo sapien
caatattttctagccaacccccaag

SEQ ID NO: 1311312 - DNA, 25 bp, Homo sapien
gcctgtggggtatgaaggagtttac

SEQ ID NO: 1311313 - DNA, 25 bp, Homo sapien
tggctataacttccatgtgctgctg

SEQ ID NO: 1311314 - DNA, 25 bp, Homo sapien
tacagctgacatttgccacctttcc

SEQ ID NO: 1311315 - DNA, 25 bp, Homo sapien
gccaccttacagctgacatttgcca

SEQ ID NO: 1311316 - DNA, 25 bp, Homo sapien
cacctttcctgatctgaatccatca

SEQ ID NO: 1311317 - DNA, 25 bp, Homo sapien
catcagtgagagctgacgccacagc

SEQ ID NO: 1311318 - DNA, 25 bp, Homo sapien
tgagctgcctcagtgccccccagct

SEQ ID NO: 1311319 - DNA, 25 bp, Homo sapien
ctgagctgcctcagtgccccccagc

SEQ ID NO: 1311320 - DNA, 25 bp, Homo sapien
agctgctgcaggtgagggcctgtca

SEQ ID NO: 1311321 - DNA, 25 bp, Homo sapien
tgctgcaggtgagggcctgtcacca

SEQ ID NO: 1311322 - DNA, 25 bp, Homo sapien
ttgggccctcaacccaccagcactg

SEQ ID NO: 1311323 - DNA, 25 bp, Homo sapien
ccatcagtgggacaaaaaacttggg

SEQ ID NO: 1311324 - DNA, 25 bp, Homo sapien
aacttgggccctcaacccaccagca

SEQ ID NO: 1311325 - DNA, 25 bp, Homo sapien
caagccatcagtgggacaaaaaact

SEQ ID NO: 1311326 - DNA, 25 bp, Homo sapien
atggggatggaaaatcaaagccatc

SEQ ID NO: 1311327 - DNA, 25 bp, Homo sapien
agtgttgcaggggctgaagacaaaa

SEQ ID NO: 1311328 - DNA, 25 bp, Homo sapien
gggcagaccctccacactcattcct

SEQ ID NO: 1311329 - DNA, 25 bp, Homo sapien
caaagccatcagcagaatccaagtg

SEQ ID NO: 1311330 - DNA, 25 bp, Homo sapien
tgtgggatgtttgtgacagctctga

SEQ ID NO: 1311331 - DNA, 25 bp, Homo sapien
gggacaaggtgaatgtgggatgttt

SEQ ID NO: 1311332 - DNA, 25 bp, Homo sapien
caaggtgaatgtgggatgtttgtga

SEQ ID NO: 1311333 - DNA, 25 bp, Homo sapien
tgaatgtgggatgtttgtgacagct

SEQ ID NO: 1311334 - DNA, 25 bp, Homo sapien
cagcacgacacaactcttcactgga

SEQ ID NO: 1311335 - DNA, 25 bp, Homo sapien
tcactggagacaggctcgggctgat

SEQ ID NO: 1311336 - DNA, 25 bp, Homo sapien
tatggtccaggtaaatgcagcttct

SEQ ID NO: 1311337 - DNA, 25 bp, Homo sapien
gatgaatggtccctccagcacgaca

SEQ ID NO: 1311338 - DNA, 25 bp, Homo sapien
gctggggacattcggccttttccaa

SEQ ID NO: 1311339 - DNA, 25 bp, Homo sapien
tccaaggccaatggcccacctgtag

SEQ ID NO: 1311340 - DNA, 25 bp, Homo sapien
ggttgaggagtgctaaggacccctc

SEQ ID NO: 1311341 - DNA, 25 bp, Homo sapien
gctaaggacccctctcctagtggct

SEQ ID NO: 1311342 - DNA, 25 bp, Homo sapien
ggtaagttcattgatgccaagtgtt

SEQ ID NO: 1311343 - DNA, 25 bp, Homo sapien
ttctgggtaagttcattgatgccaa

SEQ ID NO: 1311344 - DNA, 25 bp, Homo sapien
aagttcattgatgccaagtgtttta

SEQ ID NO: 1311345 - DNA, 25 bp, Homo sapien
tgggtaagttcattgatgccaagtg

SEQ ID NO: 1311346 - DNA, 25 bp, Homo sapien
cggcatgggctcaggtttgtcatga

SEQ ID NO: 1311347 - DNA, 25 bp, Homo sapien
ctcggcatgggctcaggtttgtcat

SEQ ID NO: 1311348 - DNA, 25 bp, Homo sapien
aaggagcatgaagaggactaaggtc

SEQ ID NO: 1311349 - DNA, 25 bp, Homo sapien
gaggactaaggtcatttccccagac

SEQ ID NO: 1311350 - DNA, 25 bp, Homo sapien
gcgagggcttaaatccttcctggct

SEQ ID NO: 1311351 - DNA, 25 bp, Homo sapien
aggcgagggcttaaatccttcctgg

SEQ ID NO: 1311352 - DNA, 25 bp, Homo sapien
agcaggcgagggcttaaatccttcc

SEQ ID NO: 1311353 - DNA, 25 bp, Homo sapien
tcaagcaggcgagggcttaaatcct

SEQ ID NO: 1311354 - DNA, 25 bp, Homo sapien
tccctgccacatggaccagagtagc

SEQ ID NO: 1311355 - DNA, 25 bp, Homo sapien
gaaacattccgctcctcctgagaca

SEQ ID NO: 1311356 - DNA, 25 bp, Homo sapien
tgccagagccaatcagcaccatcct

SEQ ID NO: 1311357 - DNA, 25 bp, Homo sapien
actggtgttattccatgtagctccc

SEQ ID NO: 1311358 - DNA, 25 bp, Homo sapien
tcttgatgtaaacgtttgaggtttg

SEQ ID NO: 1311359 - DNA, 25 bp, Homo sapien
aaagacagccctgaaatggaccctg

SEQ ID NO: 1311360 - DNA, 25 bp, Homo sapien
atttccctcgtacttccattgtcca

SEQ ID NO: 1311361 - DNA, 25 bp, Homo sapien
ctctttctcagcaattcttgatgta

SEQ ID NO: 1311362 - DNA, 25 bp, Homo sapien
tatcacgggccagccaagagactct

SEQ ID NO: 1311363 - DNA, 25 bp, Homo sapien
agagactctgtcagaaactgcccat

SEQ ID NO: 1311364 - DNA, 25 bp, Homo sapien
agtgctgggtgttggcagctatatc

SEQ ID NO: 1311365 - DNA, 25 bp, Homo sapien
ttggcagctatatcacgggccagcc

SEQ ID NO: 1311366 - DNA, 25 bp, Homo sapien
ggcagcactgcaagctgattggccc

SEQ ID NO: 1311367 - DNA, 25 bp, Homo sapien
cactgcaagctgattggccctttct

SEQ ID NO: 1311368 - DNA, 25 bp, Homo sapien
gccctttcttctctggcgatgtggg

SEQ ID NO: 1311369 - DNA, 25 bp, Homo sapien
ggccctttcttctctggcgatgtgg

SEQ ID NO: 1311370 - DNA, 25 bp, Homo sapien
ccctggcctaacacctctgccagct

SEQ ID NO: 1311371 - DNA, 25 bp, Homo sapien
caattcatgattgccctggcctaac

SEQ ID NO: 1311372 - DNA, 25 bp, Homo sapien
cccagcctgccccaattcatgattg

SEQ ID NO: 1311373 - DNA, 25 bp, Homo sapien
ctgccccaattcatgattgccctgg

SEQ ID NO: 1311374 - DNA, 25 bp, Homo sapien
gactgtgactatgcacagcgggcag

SEQ ID NO: 1311375 - DNA, 25 bp, Homo sapien
caggattgaagctaactctgggtaa

SEQ ID NO: 1311376 - DNA, 25 bp, Homo sapien
tgactatgcacagcgggcagcttgc

SEQ ID NO: 1311377 - DNA, 25 bp, Homo sapien
tgaagctaactctgggtaaggagcc

SEQ ID NO: 1311378 - DNA, 25 bp, Homo sapien
ccacacagaactcgcctgtgtgtgg

SEQ ID NO: 1311379 - DNA, 25 bp, Homo sapien
gcacgggagcagcatactgatcagg

SEQ ID NO: 1311380 - DNA, 25 bp, Homo sapien
ctgtccacacagaactcgcctgtgt

SEQ ID NO: 1311381 - DNA, 25 bp, Homo sapien
tgcacgggagcagcatactgatcag

SEQ ID NO: 1311382 - DNA, 25 bp, Homo sapien
caggccacgggtaccacgtgacgct

SEQ ID NO: 1311383 - DNA, 25 bp, Homo sapien
cgggtaccacgtgacgctgcttctc

SEQ ID NO: 1311384 - DNA, 25 bp, Homo sapien
cacgggtaccacgtgacgctgcttc

SEQ ID NO: 1311385 - DNA, 25 bp, Homo sapien
gccacgggtaccacgtgacgctgct

SEQ ID NO: 1311386 - DNA, 25 bp, Homo sapien
gacacattttcgtttcattaaagca

SEQ ID NO: 1311387 - DNA, 25 bp, Homo sapien
tttatattgaaattccccgggcagc

SEQ ID NO: 1311388 - DNA, 25 bp, Homo sapien
aatgaggaaatgccacccataaaat

SEQ ID NO: 1311389 - DNA, 25 bp, Homo sapien
tactccactcttttgtgccacccat

SEQ ID NO: 1311390 - DNA, 25 bp, Homo sapien
ctctgtcaaggtgggcaagtggcct

SEQ ID NO: 1311391 - DNA, 25 bp, Homo sapien
ggcttggaagctgagccgtctggat

SEQ ID NO: 1311392 - DNA, 25 bp, Homo sapien
accagctctgtcaaggtgggcaagt

SEQ ID NO: 1311393 - DNA, 25 bp, Homo sapien
aagctgagccgtctggatggtcctg

SEQ ID NO: 1311394 - DNA, 25 bp, Homo sapien
cgtggagggcaagcaacgtgacctt

SEQ ID NO: 1311395 - DNA, 25 bp, Homo sapien
tgataaaaccggtcccaggagggca

SEQ ID NO: 1311396 - DNA, 25 bp, Homo sapien
gcagtgggttggagctgccccaaaa

SEQ ID NO: 1311397 - DNA, 25 bp, Homo sapien
ccatcattgagaagtcccgccttgt

SEQ ID NO: 1311398 - DNA, 25 bp, Homo sapien
acacgggttagggagtggcatcaca

SEQ ID NO: 1311399 - DNA, 25 bp, Homo sapien
tcattgcctgcgaagactaacgtca

SEQ ID NO: 1311400 - DNA, 25 bp, Homo sapien
gttaggagatccatcaaagcagcca

SEQ ID NO: 1311401 - DNA, 25 bp, Homo sapien
tgtgggacccactatctgagaacgg

SEQ ID NO: 1311402 - DNA, 25 bp, Homo sapien
ccctggcgagtctcccgaagtgtct

SEQ ID NO: 1311403 - DNA, 25 bp, Homo sapien
atacgagggcccctggcgagtctcc

SEQ ID NO: 1311404 - DNA, 25 bp, Homo sapien
gctgccggggatacgagggcccctg

SEQ ID NO: 1311405 - DNA, 25 bp, Homo sapien
agggcccctggcgagtctcccgaag

SEQ ID NO: 1311406 - DNA, 25 bp, Homo sapien
aaatccagatgttgtccccgcagaa

SEQ ID NO: 1311407 - DNA, 25 bp, Homo sapien
ctccttttgagcatggatgtattca

SEQ ID NO: 1311408 - DNA, 25 bp, Homo sapien
gcagaacaaaaagctccctccaaat

SEQ ID NO: 1311409 - DNA, 25 bp, Homo sapien
caaattctctttatgaagaagtagg

SEQ ID NO: 1311410 - DNA, 25 bp, Homo sapien
gccaagaacctgctgctccgaattt

SEQ ID NO: 1311411 - DNA, 25 bp, Homo sapien
catctcttgataagtggaatttttt

SEQ ID NO: 1311412 - DNA, 25 bp, Homo sapien
actggtttaatagccggtctccatt

SEQ ID NO: 1311413 - DNA, 25 bp, Homo sapien
tgctccgaatttgctaaaaactggt

SEQ ID NO: 1311414 - DNA, 25 bp, Homo sapien
gcttgagcccaagagcttgagatca

SEQ ID NO: 1311415 - DNA, 25 bp, Homo sapien
cctgggcaacatggcgaaacttcgt

SEQ ID NO: 1311416 - DNA, 25 bp, Homo sapien
tgggcaacatggcgaaacttcgtct

SEQ ID NO: 1311417 - DNA, 25 bp, Homo sapien
agcctgggcaacatggcgaaacttc

SEQ ID NO: 1311418 - DNA, 25 bp, Homo sapien
tgggtcacctgcaaatcgaataagc

SEQ ID NO: 1311419 - DNA, 25 bp, Homo sapien
tcttcacaccaattcgatgagggag

SEQ ID NO: 1311420 - DNA, 25 bp, Homo sapien
tcagcctgagaccacaatcatttgg

SEQ ID NO: 1311421 - DNA, 25 bp, Homo sapien
taattttacatccatccgtagaggg

SEQ ID NO: 1311422 - DNA, 25 bp, Homo sapien
ggactgttgtgaggttaggggtgcc

SEQ ID NO: 1311423 - DNA, 25 bp, Homo sapien
tgaggttaggggtgccgccggcacc

SEQ ID NO: 1311424 - DNA, 25 bp, Homo sapien
gtgaggttaggggtgccgccggcac

SEQ ID NO: 1311425 - DNA, 25 bp, Homo sapien
tgttgtgaggttaggggtgccgccg

SEQ ID NO: 1311426 - DNA, 25 bp, Homo sapien
gaggtgcccagcatgggatgtgagc

SEQ ID NO: 1311427 - DNA, 25 bp, Homo sapien
tgacagcaagcatgtgaggtgccca

SEQ ID NO: 1311428 - DNA, 25 bp, Homo sapien
tccttgggttgccaagcccctggag

SEQ ID NO: 1311429 - DNA, 25 bp, Homo sapien
ttgggttgccaagcccctggagctg

SEQ ID NO: 1311430 - DNA, 25 bp, Homo sapien
tgctgactgaacctgccttttggtc

SEQ ID NO: 1311431 - DNA, 25 bp, Homo sapien
tctgcggtatgggtgacagtattct

SEQ ID NO: 1311432 - DNA, 25 bp, Homo sapien
gcctggttttctgcctcggtcattg

SEQ ID NO: 1311433 - DNA, 25 bp, Homo sapien
gcctcggtcattgtgcatctgctga

SEQ ID NO: 1311434 - DNA, 25 bp, Homo sapien
tgttcgcggctttacctgtcctggt

SEQ ID NO: 1311435 - DNA, 25 bp, Homo sapien
ctggccgtacgtagcttcatcaggc

SEQ ID NO: 1311436 - DNA, 25 bp, Homo sapien
ctgtcaagttcttaggtccgagtgt

SEQ ID NO: 1311437 - DNA, 25 bp, Homo sapien
tcatcaggcagggtgtacctgtcaa

SEQ ID NO: 1311438 - DNA, 25 bp, Homo sapien
tgattcagtccgtgcttatcttgcg

SEQ ID NO: 1311439 - DNA, 25 bp, Homo sapien
agtccgtgcttatcttgcgcatacg

SEQ ID NO: 1311440 - DNA, 25 bp, Homo sapien
tatcttgcgcatacgggccgttcag

SEQ ID NO: 1311441 - DNA, 25 bp, Homo sapien
ggccgttcagtgtcccgctcggagc

SEQ ID NO: 1311442 - DNA, 25 bp, Homo sapien
catataaaggcgccgccgtccttac

SEQ ID NO: 1311443 - DNA, 25 bp, Homo sapien
gccgccccatataaaggcgccgccg

SEQ ID NO: 1311444 - DNA, 25 bp, Homo sapien
cgccccatataaaggcgccgccgtc

SEQ ID NO: 1311445 - DNA, 25 bp, Homo sapien
cgcgcgccgccccatataaaggcgc

SEQ ID NO: 1311446 - DNA, 25 bp, Homo sapien
ccccaggactcggccccatggagac

SEQ ID NO: 1311447 - DNA, 25 bp, Homo sapien
cccaggactcggccccatggagacg

SEQ ID NO: 1311448 - DNA, 25 bp, Homo sapien
taggagagagcgctattcaccgtcc

SEQ ID NO: 1311449 - DNA, 25 bp, Homo sapien
cacgatgcagtgtgtagtgccacca

SEQ ID NO: 1311450 - DNA, 25 bp, Homo sapien
gaggacaacctgaactaataacacg

SEQ ID NO: 1311451 - DNA, 25 bp, Homo sapien
tgaaggtggacttcttccggaagct

SEQ ID NO: 1311452 - DNA, 25 bp, Homo sapien
cccatccccgccagtgctgctcaca

SEQ ID NO: 1311453 - DNA, 25 bp, Homo sapien
ggtccgggggagcagctctccaatc

SEQ ID NO: 1311454 - DNA, 25 bp, Homo sapien
agtgctgctcacacccccctcgttg

SEQ ID NO: 1311455 - DNA, 25 bp, Homo sapien
taggagcagaactttagaggtccgg

SEQ ID NO: 1311456 - DNA, 25 bp, Homo sapien
tcatcttcccccagcaaagctctca

SEQ ID NO: 1311457 - DNA, 25 bp, Homo sapien
cgcagctgccacttccctcatcttc

SEQ ID NO: 1311458 - DNA, 25 bp, Homo sapien
cagctgccacttccctcatcttccc

SEQ ID NO: 1311459 - DNA, 25 bp, Homo sapien
agcaaagctctcagccctcccttcc

SEQ ID NO: 1311460 - DNA, 25 bp, Homo sapien
ctaattctggctgctcgtgggctgc

SEQ ID NO: 1311461 - DNA, 25 bp, Homo sapien
gaagaggccctaggctgtcatcctg

SEQ ID NO: 1311462 - DNA, 25 bp, Homo sapien
cagctctggcctggaaatgaagggc

SEQ ID NO: 1311463 - DNA, 25 bp, Homo sapien
aatgaagggcctagacacaaagatc

SEQ ID NO: 1311464 - DNA, 25 bp, Homo sapien
tgggttcaaagcaaatccaaccacc

SEQ ID NO: 1311465 - DNA, 25 bp, Homo sapien
ctgggttcaaagcaaatccaaccac

SEQ ID NO: 1311466 - DNA, 25 bp, Homo sapien
tacagaaataagttatcagggtggg

SEQ ID NO: 1311467 - DNA, 25 bp, Homo sapien
ccagaaagcacaccttcaccagata

SEQ ID NO: 1311468 - DNA, 25 bp, Homo sapien
tacacctccaacatgtatatgctgt

SEQ ID NO: 1311469 - DNA, 25 bp, Homo sapien
gaggcctaagggagcttgttcttcc

SEQ ID NO: 1311470 - DNA, 25 bp, Homo sapien
gactgacacaggtatgaaaattcca

SEQ ID NO: 1311471 - DNA, 25 bp, Homo sapien
gacaacttttaatccacggaagcag

SEQ ID NO: 1311472 - DNA, 25 bp, Homo sapien
tgagaaactaaataaggctgagcct

SEQ ID NO: 1311473 - DNA, 25 bp, Homo sapien
tgccctaagtgaggatcagcatcga

SEQ ID NO: 1311474 - DNA, 25 bp, Homo sapien
aataatgcctcattaatttggagta

SEQ ID NO: 1311475 - DNA, 25 bp, Homo sapien
taatgcctcattaatttggagtaag

SEQ ID NO: 1311476 - DNA, 25 bp, Homo sapien
taaaataatgcctcattaatttgga

SEQ ID NO: 1311477 - DNA, 25 bp, Homo sapien
taaataaaataatgcctcattaatt

SEQ ID NO: 1311478 - DNA, 25 bp, Homo sapien
gcagtggcgcaacagagcagtacta

SEQ ID NO: 1311479 - DNA, 25 bp, Homo sapien
aggaaggaaactgtaggcatcccac

SEQ ID NO: 1311480 - DNA, 25 bp, Homo sapien
tctagcaatctcaaactgttaagag

SEQ ID NO: 1311481 - DNA, 25 bp, Homo sapien
tggcgcaacagagcagtactattcc

SEQ ID NO: 1311482 - DNA, 25 bp, Homo sapien
cagcactagaggcaggtaacgatta

SEQ ID NO: 1311483 - DNA, 25 bp, Homo sapien
tgtcgcaagttcaccacagcactag

SEQ ID NO: 1311484 - DNA, 25 bp, Homo sapien
taacgattactagcagattcctcag

SEQ ID NO: 1311485 - DNA, 25 bp, Homo sapien
tcccaataactaggctgtaccccag

SEQ ID NO: 1311486 - DNA, 25 bp, Homo sapien
tttccataaggcatgatatgaataa

SEQ ID NO: 1311487 - DNA, 25 bp, Homo sapien
agaaatttccataaggcatgatatg

SEQ ID NO: 1311488 - DNA, 25 bp, Homo sapien
caggtgaataccagcaaagagagaa

SEQ ID NO: 1311489 - DNA, 25 bp, Homo sapien
gcaatatttaatcaggtgaatacca

SEQ ID NO: 1311490 - DNA, 25 bp, Homo sapien
taagataggtaattactaaacactc

SEQ ID NO: 1311491 - DNA, 25 bp, Homo sapien
gaacatgaatctactaccaactcag

SEQ ID NO: 1311492 - DNA, 25 bp, Homo sapien
caactcagaaagatttaagataggt

SEQ ID NO: 1311493 - DNA, 25 bp, Homo sapien
taaacactctttacctccccttgca

SEQ ID NO: 1311494 - DNA, 25 bp, Homo sapien
aatgacataaagtaagacccaatgt

SEQ ID NO: 1311495 - DNA, 25 bp, Homo sapien
aacgcacagttagcaacttgctggg

SEQ ID NO: 1311496 - DNA, 25 bp, Homo sapien
ggagaaacgcacagttagcaacttg

SEQ ID NO: 1311497 - DNA, 25 bp, Homo sapien
gacccaatgtcttacagaaatgact

SEQ ID NO: 1311498 - DNA, 25 bp, Homo sapien
cctctctgaagtggtccggctgata

SEQ ID NO: 1311499 - DNA, 25 bp, Homo sapien
agcctctctgaagtggtccggctga

SEQ ID NO: 1311500 - DNA, 25 bp, Homo sapien
tctctgaagtggtccggctgatact

SEQ ID NO: 1311501 - DNA, 25 bp, Homo sapien
tgccagcctctctgaagtggtccgg

SEQ ID NO: 1311502 - DNA, 25 bp, Homo sapien
ttttttgtttaacttcagatcaatc

SEQ ID NO: 1311503 - DNA, 25 bp, Homo sapien
tggttttttgtttaacttcagatca

SEQ ID NO: 1311504 - DNA, 25 bp, Homo sapien
aagactgaagtaagagggcatgctc

SEQ ID NO: 1311505 - DNA, 25 bp, Homo sapien
tgaaaattactgagacacatggtga

SEQ ID NO: 1311506 - DNA, 25 bp, Homo sapien
aaatgggtcccacaatcagctactg

SEQ ID NO: 1311507 - DNA, 25 bp, Homo sapien
tcagctactgcatagggcataagct

SEQ ID NO: 1311508 - DNA, 25 bp, Homo sapien
tcccagcctaacctaatatacatac

SEQ ID NO: 1311509 - DNA, 25 bp, Homo sapien
ttcccagcctaacctaatatacata

SEQ ID NO: 1311510 - DNA, 25 bp, Homo sapien
cttcccagcctaacctaatatacat

SEQ ID NO: 1311511 - DNA, 25 bp, Homo sapien
gtcataatcaaacatgccagacggg

SEQ ID NO: 1311512 - DNA, 25 bp, Homo sapien
agtcataatcaaacatgccagacgg

SEQ ID NO: 1311513 - DNA, 25 bp, Homo sapien
aagtcataatcaaacatgccagacg

SEQ ID NO: 1311514 - DNA, 25 bp, Homo sapien
tatctctcacaaaatagtttcactt

SEQ ID NO: 1311515 - DNA, 25 bp, Homo sapien
acaccttccagactaaaacaataag

SEQ ID NO: 1311516 - DNA, 25 bp, Homo sapien
aatgtttgcaagagtaaagctggaa

SEQ ID NO: 1311517 - DNA, 25 bp, Homo sapien
gcaaatggctacatttaggtgctaa

SEQ ID NO: 1311518 - DNA, 25 bp, Homo sapien
cgctcgtgtgccattcaggcacact

SEQ ID NO: 1311519 - DNA, 25 bp, Homo sapien
aataattgaagaaccagctgacgcc

SEQ ID NO: 1311520 - DNA, 25 bp, Homo sapien
tattcgtgataagctagcaccagtc

SEQ ID NO: 1311521 - DNA, 25 bp, Homo sapien
acagttatgcgattaggatggtgac

SEQ ID NO: 1311522 - DNA, 25 bp, Homo sapien
ggtgcatgaaggaataccctacaga

SEQ ID NO: 1311523 - DNA, 25 bp, Homo sapien
ttatactgttcctccagtatctgaa

SEQ ID NO: 1311524 - DNA, 25 bp, Homo sapien
tatactgttcctccagtatctgaag

SEQ ID NO: 1311525 - DNA, 25 bp, Homo sapien
tagcccgttcacttggacctaatga

SEQ ID NO: 1311526 - DNA, 25 bp, Homo sapien
tgagggttactctaatgcccaccaa

SEQ ID NO: 1311527 - DNA, 25 bp, Homo sapien
tccctttgagcaaattagcccgttc

SEQ ID NO: 1311528 - DNA, 25 bp, Homo sapien
gcttcccaataagtaccagtggcat

SEQ ID NO: 1311529 - DNA, 25 bp, Homo sapien
gtgtcactttccgtcccacttcctg

SEQ ID NO: 1311530 - DNA, 25 bp, Homo sapien
gaagtgtcactttccgtcccacttc

SEQ ID NO: 1311531 - DNA, 25 bp, Homo sapien
gagaagtgtcactttccgtcccact

SEQ ID NO: 1311532 - DNA, 25 bp, Homo sapien
ggagaagtgtcactttccgtcccac

SEQ ID NO: 1311533 - DNA, 25 bp, Homo sapien
ggtagacaggtaaacagccatatac

SEQ ID NO: 1311534 - DNA, 25 bp, Homo sapien
caggtagacaggtaaacagccatat

SEQ ID NO: 1311535 - DNA, 25 bp, Homo sapien
gtagacaggtaaacagccatatact

SEQ ID NO: 1311536 - DNA, 25 bp, Homo sapien
tgcaggtagacaggtaaacagccat

SEQ ID NO: 1311537 - DNA, 25 bp, Homo sapien
tcttttcaatgagctggtcctgaac

SEQ ID NO: 1311538 - DNA, 25 bp, Homo sapien
cttttcaatgagctggtcctgaact

SEQ ID NO: 1311539 - DNA, 25 bp, Homo sapien
ctgaactcctgccaatgcacttact

SEQ ID NO: 1311540 - DNA, 25 bp, Homo sapien
gtcctgaactcctgccaatgcactt

SEQ ID NO: 1311541 - DNA, 25 bp, Homo sapien
ttccggttccttcgatcatttttgc

SEQ ID NO: 1311542 - DNA, 25 bp, Homo sapien
agctgctgaggtaaccgaggattta

SEQ ID NO: 1311543 - DNA, 25 bp, Homo sapien
gaagagccgctcagcttccttaaac

SEQ ID NO: 1311544 - DNA, 25 bp, Homo sapien
ccgaggatttactgaagagccgctc

SEQ ID NO: 1311545 - DNA, 25 bp, Homo sapien
aagcatagatctgtcgctccaaatt

SEQ ID NO: 1311546 - DNA, 25 bp, Homo sapien
agataccgatcccagccacgaataa

SEQ ID NO: 1311547 - DNA, 25 bp, Homo sapien
cgatcccagccacgaataatattgc

SEQ ID NO: 1311548 - DNA, 25 bp, Homo sapien
tagatctgtcgctccaaatttgcca

SEQ ID NO: 1311549 - DNA, 25 bp, Homo sapien
tagactcgtaaacgcaagcttgccc

SEQ ID NO: 1311550 - DNA, 25 bp, Homo sapien
tgatggacccctgaatgtataaagc

SEQ ID NO: 1311551 - DNA, 25 bp, Homo sapien
ggaaaccatgagtcaagagcccagg

SEQ ID NO: 1311552 - DNA, 25 bp, Homo sapien
ccaggctaacgcagaacttgggcga

SEQ ID NO: 1311553 - DNA, 25 bp, Homo sapien
ccggagtaacaaacggcctagcgcg

SEQ ID NO: 1311554 - DNA, 25 bp, Homo sapien
cggagtaacaaacggcctagcgcgg

SEQ ID NO: 1311555 - DNA, 25 bp, Homo sapien
catgccgtgcaacccctgtcctagc

SEQ ID NO: 1311556 - DNA, 25 bp, Homo sapien
gggcgggcgcggagccccatgccgt

SEQ ID NO: 1311557 - DNA, 25 bp, Homo sapien
agctcccgccgggtgtccgggatct

SEQ ID NO: 1311558 - DNA, 25 bp, Homo sapien
gcttccgcttcacgagctccgccag

SEQ ID NO: 1311559 - DNA, 25 bp, Homo sapien
gtgtccgggatctgcggcggcgccg

SEQ ID NO: 1311560 - DNA, 25 bp, Homo sapien
ctgcttccgcttcacgagctccgcc

SEQ ID NO: 1311561 - DNA, 25 bp, Homo sapien
cgcgaggttgggggcggtccctgcg

SEQ ID NO: 1311562 - DNA, 25 bp, Homo sapien
gcgaggttgggggcggtccctgcgc

SEQ ID NO: 1311563 - DNA, 25 bp, Homo sapien
gcgcgaggttgggggcggtccctgc

SEQ ID NO: 1311564 - DNA, 25 bp, Homo sapien
tcacatacccaggaacactgtgggc

SEQ ID NO: 1311565 - DNA, 25 bp, Homo sapien
gcccagccaccgtggagaaaagata

SEQ ID NO: 1311566 - DNA, 25 bp, Homo sapien
ccaggatatgactaggaagagactc

SEQ ID NO: 1311567 - DNA, 25 bp, Homo sapien
ctggtgatatctggctttagaggca

SEQ ID NO: 1311568 - DNA, 25 bp, Homo sapien
gccctgagcacacatgggtataaaa

SEQ ID NO: 1311569 - DNA, 25 bp, Homo sapien
cttggaggccaacgatataacctgc

SEQ ID NO: 1311570 - DNA, 25 bp, Homo sapien
tctgctattccactgacttggaggc

SEQ ID NO: 1311571 - DNA, 25 bp, Homo sapien
caaggtcctctacgctaggaaagca

SEQ ID NO: 1311572 - DNA, 25 bp, Homo sapien
tcttcaaatgcagggaggcctttgc

SEQ ID NO: 1311573 - DNA, 25 bp, Homo sapien
cacactatatgtaagcagcaaatac

SEQ ID NO: 1311574 - DNA, 25 bp, Homo sapien
catatgaaaatcagtatcagctctt

SEQ ID NO: 1311575 - DNA, 25 bp, Homo sapien
ggaaggtaaatacaacctctctcaa

SEQ ID NO: 1311576 - DNA, 25 bp, Homo sapien
taagaggcattacagagagcaccat

SEQ ID NO: 1311577 - DNA, 25 bp, Homo sapien
tacagtcacgggcttgagcaggtgc

SEQ ID NO: 1311578 - DNA, 25 bp, Homo sapien
tgctgaatcagcacccactggtagc

SEQ ID NO: 1311579 - DNA, 25 bp, Homo sapien
tatagtttcctaggcagcagttctg

SEQ ID NO: 1311580 - DNA, 25 bp, Homo sapien
ccaaggtcaatgatgtagggcttca

SEQ ID NO: 1311581 - DNA, 25 bp, Homo sapien
catcagcacgggtatattccacaag

SEQ ID NO: 1311582 - DNA, 25 bp, Homo sapien
tatttcagaagtgtccgacgactca

SEQ ID NO: 1311583 - DNA, 25 bp, Homo sapien
cgacgactcatggagcaagacgtat

SEQ ID NO: 1311584 - DNA, 25 bp, Homo sapien
gacccagtaggtacgcactctgtcg

SEQ ID NO: 1311585 - DNA, 25 bp, Homo sapien
cgatattgaaagaccgcatgctgct

SEQ ID NO: 1311586 - DNA, 25 bp, Homo sapien
ggtgtcctcaagaagtgccccagaa

SEQ ID NO: 1311587 - DNA, 25 bp, Homo sapien
tatatttaatgactacaccccggaa

SEQ ID NO: 1311588 - DNA, 25 bp, Homo sapien
actcccaggcctctcgttagacgtt

SEQ ID NO: 1311589 - DNA, 25 bp, Homo sapien
tgagtgtctcgatcccgtccctgac

SEQ ID NO: 1311590 - DNA, 25 bp, Homo sapien
ctgcaggttctgagtgtctcgatcc

SEQ ID NO: 1311591 - DNA, 25 bp, Homo sapien
tcccaggcctctcgttagacgttct

SEQ ID NO: 1311592 - DNA, 25 bp, Homo sapien
tgtcccggtcactgttcctagctct

SEQ ID NO: 1311593 - DNA, 25 bp, Homo sapien
gtcctctccggggatgatcctcacg

SEQ ID NO: 1311594 - DNA, 25 bp, Homo sapien
cccggtgtctgtcccggtcactgtt

SEQ ID NO: 1311595 - DNA, 25 bp, Homo sapien
tgttctgatggttccctgtgctgcc

SEQ ID NO: 1311596 - DNA, 25 bp, Homo sapien
gcagccaccgccgcacagccaccgt

SEQ ID NO: 1311597 - DNA, 25 bp, Homo sapien
tgcagccaccgccgcacagccaccg

SEQ ID NO: 1311598 - DNA, 25 bp, Homo sapien
ccgtgcagccaccgccgcacagcca

SEQ ID NO: 1311599 - DNA, 25 bp, Homo sapien
aatcttcttccttcgggacttcaag

SEQ ID NO: 1311600 - DNA, 25 bp, Homo sapien
actgtgatcggcccagactctaatc

SEQ ID NO: 1311601 - DNA, 25 bp, Homo sapien
tgtgatcggcccagactctaatccc

SEQ ID NO: 1311602 - DNA, 25 bp, Homo sapien
cactgtgatcggcccagactctaat

SEQ ID NO: 1311603 - DNA, 25 bp, Homo sapien
ctgtgatcggcccagactctaatcc

SEQ ID NO: 1311604 - DNA, 25 bp, Homo sapien
acgccatccgtgtgatttgctcctc

SEQ ID NO: 1311605 - DNA, 25 bp, Homo sapien
ctctccttgcctgacgccatccgtg

SEQ ID NO: 1311606 - DNA, 25 bp, Homo sapien
tctccttgcctgacgccatccgtgt

SEQ ID NO: 1311607 - DNA, 25 bp, Homo sapien
tgtaaatcgccgggtctcgggtatg

SEQ ID NO: 1311608 - DNA, 25 bp, Homo sapien
ttgagtggtgaggacttcggtttct

SEQ ID NO: 1311609 - DNA, 25 bp, Homo sapien
ggacttcggtttctcttactgcgag

SEQ ID NO: 1311610 - DNA, 25 bp, Homo sapien
tactgcgaggagacttgcttcttct

SEQ ID NO: 1311611 - DNA, 25 bp, Homo sapien
ttctcttactgcgaggagacttgct

SEQ ID NO: 1311612 - DNA, 25 bp, Homo sapien
cacaggattttatcgcaatttccct

SEQ ID NO: 1311613 - DNA, 25 bp, Homo sapien
tagcttccagtatcaggcttaccta

SEQ ID NO: 1311614 - DNA, 25 bp, Homo sapien
tattcagagcatggtacacaggatt

SEQ ID NO: 1311615 - DNA, 25 bp, Homo sapien
aaattagcttccagtatcaggctta

SEQ ID NO: 1311616 - DNA, 25 bp, Homo sapien
cccagtttctgttaggtagctcgct

SEQ ID NO: 1311617 - DNA, 25 bp, Homo sapien
tcagtcaggtctgggctcaaatggc

SEQ ID NO: 1311618 - DNA, 25 bp, Homo sapien
gcttagacctcgatgtgaaaacctt

SEQ ID NO: 1311619 - DNA, 25 bp, Homo sapien
tctggcaggtaaccggaaagacaac

SEQ ID NO: 1311620 - DNA, 25 bp, Homo sapien
tatcagtgctatctgttgggccaca

SEQ ID NO: 1311621 - DNA, 25 bp, Homo sapien
ttatcagtgctatctgttgggccac

SEQ ID NO: 1311622 - DNA, 25 bp, Homo sapien
atcagtgctatctgttgggccacac

SEQ ID NO: 1311623 - DNA, 25 bp, Homo sapien
ctaggaacacaagaatgaaggagtg

SEQ ID NO: 1311624 - DNA, 25 bp, Homo sapien
gaatgaaggagtgggatcctgccgg

SEQ ID NO: 1311625 - DNA, 25 bp, Homo sapien
taggaacacaagaatgaaggagtgg

SEQ ID NO: 1311626 - DNA, 25 bp, Homo sapien
caagaatgaaggagtgggatcctgc

SEQ ID NO: 1311627 - DNA, 25 bp, Homo sapien
cggctcgctggtcggcggagacggg

SEQ ID NO: 1311628 - DNA, 25 bp, Homo sapien
gcggtggcccgagcgggccggctcg

SEQ ID NO: 1311629 - DNA, 25 bp, Homo sapien
ggcccgagcgggccggctcgctggt

SEQ ID NO: 1311630 - DNA, 25 bp, Homo sapien
ctcctcgggctcggttcccgcggtg

SEQ ID NO: 1311631 - DNA, 25 bp, Homo sapien
ggtgggcgggaggtgcgacttctgg

SEQ ID NO: 1311632 - DNA, 25 bp, Homo sapien
gcggtgggcgggaggtgcgacttct

SEQ ID NO: 1311633 - DNA, 25 bp, Homo sapien
acggcggtgggcgggaggtgcgact

SEQ ID NO: 1311634 - DNA, 25 bp, Homo sapien
caccggagtggtccggacggcggtg

SEQ ID NO: 1311635 - DNA, 25 bp, Homo sapien
caccacccccgccggcagcaccacg

SEQ ID NO: 1311636 - DNA, 25 bp, Homo sapien
ccaccacccccgccggcagcaccac

SEQ ID NO: 1311637 - DNA, 25 bp, Homo sapien
ctcgctcccgttcgctcttcaccgc

SEQ ID NO: 1311638 - DNA, 25 bp, Homo sapien
gctcccgttcgctcttcaccgcctt

SEQ ID NO: 1311639 - DNA, 25 bp, Homo sapien
gctccctcgctcccgttcgctcttc

SEQ ID NO: 1311640 - DNA, 25 bp, Homo sapien
cccgttcgctcttcaccgccttcat

SEQ ID NO: 1311641 - DNA, 25 bp, Homo sapien
tggctgggcgaaagaaaacagatca

SEQ ID NO: 1311642 - DNA, 25 bp, Homo sapien
gattttggctgggcgaaagaaaaca

SEQ ID NO: 1311643 - DNA, 25 bp, Homo sapien
ttggctgggcgaaagaaaacagatc

SEQ ID NO: 1311644 - DNA, 25 bp, Homo sapien
ttttggctgggcgaaagaaaacaga

SEQ ID NO: 1311645 - DNA, 25 bp, Homo sapien
ttgcggtgacgacctacccacgaga

SEQ ID NO: 1311646 - DNA, 25 bp, Homo sapien
tgacgacctacccacgagaacatgc

SEQ ID NO: 1311647 - DNA, 25 bp, Homo sapien
ctttcttgcggtgacgacctaccca

SEQ ID NO: 1311648 - DNA, 25 bp, Homo sapien
agccctttcttgcggtgacgaccta

SEQ ID NO: 1311649 - DNA, 25 bp, Homo sapien
ggaatactagtcacagtggcctttg

SEQ ID NO: 1311650 - DNA, 25 bp, Homo sapien
ttatccccacttgccagtcaactgg

SEQ ID NO: 1311651 - DNA, 25 bp, Homo sapien
cctacattaggaaacaatggcagtc

SEQ ID NO: 1311652 - DNA, 25 bp, Homo sapien
aatggcagtcaaacccatggctttg

SEQ ID NO: 1311653 - DNA, 25 bp, Homo sapien
tccgtcttgggttcagtgagcttca

SEQ ID NO: 1311654 - DNA, 25 bp, Homo sapien
ccagaaagaggcgtaagaagggcct

SEQ ID NO: 1311655 - DNA, 25 bp, Homo sapien
gcactaacatgctcaggttccccag

SEQ ID NO: 1311656 - DNA, 25 bp, Homo sapien
ggagtacggctgctagacaactgca

SEQ ID NO: 1311657 - DNA, 25 bp, Homo sapien
gttgctgtcgtactgctcgcctccg

SEQ ID NO: 1311658 - DNA, 25 bp, Homo sapien
caccaacttttttcggccgttgctg

SEQ ID NO: 1311659 - DNA, 25 bp, Homo sapien
tctgaattttttgcgtttgtgtttc

SEQ ID NO: 1311660 - DNA, 25 bp, Homo sapien
tgtttcatagtagcgcacaccaact

SEQ ID NO: 1311661 - DNA, 25 bp, Homo sapien
tccctttgtgccttccgcttctttc

SEQ ID NO: 1311662 - DNA, 25 bp, Homo sapien
gatgtaagcgccctgggagctttat

SEQ ID NO: 1311663 - DNA, 25 bp, Homo sapien
gcgccctgggagctttatttgaatg

SEQ ID NO: 1311664 - DNA, 25 bp, Homo sapien
ttcttttgatgtaagcgccctggga

SEQ ID NO: 1311665 - DNA, 25 bp, Homo sapien
tgtgaaagctgatggtcaaatggag

SEQ ID NO: 1311666 - DNA, 25 bp, Homo sapien
ctctttgtctgtggacccacccttg

SEQ ID NO: 1311667 - DNA, 25 bp, Homo sapien
caagcttgatgtatcaggaggagga

SEQ ID NO: 1311668 - DNA, 25 bp, Homo sapien
cacagtggtgagtaaagcaggccaa

SEQ ID NO: 1311669 - DNA, 25 bp, Homo sapien
atcttttcactcagtcccttggata

SEQ ID NO: 1311670 - DNA, 25 bp, Homo sapien
ctgtcatctacatcttcttccagtg

SEQ ID NO: 1311671 - DNA, 25 bp, Homo sapien
ctctgtcatctacatcttcttccag

SEQ ID NO: 1311672 - DNA, 25 bp, Homo sapien
ctttgttcttcaggttttgcaaata

SEQ ID NO: 1311673 - DNA, 25 bp, Homo sapien
gcaaagtaacattcctcctctcact

SEQ ID NO: 1311674 - DNA, 25 bp, Homo sapien
aagcaaagtaacattcctcctctca

SEQ ID NO: 1311675 - DNA, 25 bp, Homo sapien
aaaagcaaagtaacattcctcctct

SEQ ID NO: 1311676 - DNA, 25 bp, Homo sapien
aaagtaacattcctcctctcactcg

SEQ ID NO: 1311677 - DNA, 25 bp, Homo sapien
cgaactcgtgtgagaatctgctgca

SEQ ID NO: 1311678 - DNA, 25 bp, Homo sapien
tctcatccagtgctttaataacggc

SEQ ID NO: 1311679 - DNA, 25 bp, Homo sapien
gaggcaccacgttgattttaccaaa

SEQ ID NO: 1311680 - DNA, 25 bp, Homo sapien
ctcaggctccgaggaagactcttcc

SEQ ID NO: 1311681 - DNA, 25 bp, Homo sapien
ctgcttctgggacaacttccaaaga

SEQ ID NO: 1311682 - DNA, 25 bp, Homo sapien
cccctggattgttctgggctgcttc

SEQ ID NO: 1311683 - DNA, 25 bp, Homo sapien
gatggattctgacccttcacctgca

SEQ ID NO: 1311684 - DNA, 25 bp, Homo sapien
tcctcccctggattgttctgggctg

SEQ ID NO: 1311685 - DNA, 25 bp, Homo sapien
gggaccctgaaatgactggcctgtt

SEQ ID NO: 1311686 - DNA, 25 bp, Homo sapien
cattaagcccagagatcagtactag

SEQ ID NO: 1311687 - DNA, 25 bp, Homo sapien
cagcaagtgttggtaggtaaggcct

SEQ ID NO: 1311688 - DNA, 25 bp, Homo sapien
cactttccacgatgggatgaccctt

SEQ ID NO: 1311689 - DNA, 25 bp, Homo sapien
tgcattgggtggcttgacaaagaaa

SEQ ID NO: 1311690 - DNA, 25 bp, Homo sapien
cacagtctgcaagtcgggctctcca

SEQ ID NO: 1311691 - DNA, 25 bp, Homo sapien
ggccacaagtggctctgcattgggt

SEQ ID NO: 1311692 - DNA, 25 bp, Homo sapien
aaaggaatccggcccctctgccagt

SEQ ID NO: 1311693 - DNA, 25 bp, Homo sapien
ctcccaagaatcaatcttgtatgtt

SEQ ID NO: 1311694 - DNA, 25 bp, Homo sapien
gcaccaatgtggtcttcaggactct

SEQ ID NO: 1311695 - DNA, 25 bp, Homo sapien
taacttcccagtccggaaagcgagc

SEQ ID NO: 1311696 - DNA, 25 bp, Homo sapien
tctggctttgctcgttcaagtacag

SEQ ID NO: 1311697 - DNA, 25 bp, Homo sapien
tcaggaatatccgacgcatcaaagt

SEQ ID NO: 1311698 - DNA, 25 bp, Homo sapien
gcacaatgtctgtctcggagtcctc

SEQ ID NO: 1311699 - DNA, 25 bp, Homo sapien
gcatcaaagtaatatactgccagac

SEQ ID NO: 1311700 - DNA, 25 bp, Homo sapien
ccacacctggacagtcaatcaggaa

SEQ ID NO: 1311701 - DNA, 25 bp, Homo sapien
tgaatcacattaactaacacaggcc

SEQ ID NO: 1311702 - DNA, 25 bp, Homo sapien
tactctcagtcttatcaaagtgggc

SEQ ID NO: 1311703 - DNA, 25 bp, Homo sapien
tatggtgagctaaactcctagtggt

SEQ ID NO: 1311704 - DNA, 25 bp, Homo sapien
gcaaaagtaaggtcaccctgcgccc

SEQ ID NO: 1311705 - DNA, 25 bp, Homo sapien
cctgcaatgggagccacgttgcaaa

SEQ ID NO: 1311706 - DNA, 25 bp, Homo sapien
tcttagaacgcaatgtatttatcac

SEQ ID NO: 1311707 - DNA, 25 bp, Homo sapien
tgcaaactttcttagaacgcaatgt

SEQ ID NO: 1311708 - DNA, 25 bp, Homo sapien
tttgtttcacctgcaatgggagcca

SEQ ID NO: 1311709 - DNA, 25 bp, Homo sapien
catgcagtcatatatatccctttgg

SEQ ID NO: 1311710 - DNA, 25 bp, Homo sapien
atgcagtcatatatatccctttgga

SEQ ID NO: 1311711 - DNA, 25 bp, Homo sapien
tacatgcagtcatatatatcccttt

SEQ ID NO: 1311712 - DNA, 25 bp, Homo sapien
catacatgcagtcatatatatccct

SEQ ID NO: 1311713 - DNA, 25 bp, Homo sapien
tgctcccttgccaaacgggttagta

SEQ ID NO: 1311714 - DNA, 25 bp, Homo sapien
gaagctgaatgaatgctcccttgcc

SEQ ID NO: 1311715 - DNA, 25 bp, Homo sapien
tgggagaggacagcaacccaccgtt

SEQ ID NO: 1311716 - DNA, 25 bp, Homo sapien
ctgggagaggacagcaacccaccgt

SEQ ID NO: 1311717 - DNA, 25 bp, Homo sapien
gaacttgaactacaacatctgatga

SEQ ID NO: 1311718 - DNA, 25 bp, Homo sapien
agtacaaaaatgaggtgtttccaag

SEQ ID NO: 1311719 - DNA, 25 bp, Homo sapien
cattggatctctagcatcaagaact

SEQ ID NO: 1311720 - DNA, 25 bp, Homo sapien
taagtacaaaaatgaggtgtttcca

SEQ ID NO: 1311721 - DNA, 25 bp, Homo sapien
ctgaaaattcagaaaggcaaaaatg

SEQ ID NO: 1311722 - DNA, 25 bp, Homo sapien
aattcagaaaggcaaaaatggtttg

SEQ ID NO: 1311723 - DNA, 25 bp, Homo sapien
tgaaaattcagaaaggcaaaaatgg

SEQ ID NO: 1311724 - DNA, 25 bp, Homo sapien
caaaacagtctctgggcagagttcg

SEQ ID NO: 1311725 - DNA, 25 bp, Homo sapien
tcctgtggcttttgaaacctgctga

SEQ ID NO: 1311726 - DNA, 25 bp, Homo sapien
tcgttgtggctaatctcaaggccca

SEQ ID NO: 1311727 - DNA, 25 bp, Homo sapien
cccagtgatcagaattcaaaaggtt

SEQ ID NO: 1311728 - DNA, 25 bp, Homo sapien
cttgtagagctcaccccatattctt

SEQ ID NO: 1311729 - DNA, 25 bp, Homo sapien
tttatagatctcttcttgagcttca

SEQ ID NO: 1311730 - DNA, 25 bp, Homo sapien
tttggactgtccctttttatagatc

SEQ ID NO: 1311731 - DNA, 25 bp, Homo sapien
ttgtagagctcaccccatattcttt

SEQ ID NO: 1311732 - DNA, 25 bp, Homo sapien
tccagttaaggaagccccgatattc

SEQ ID NO: 1311733 - DNA, 25 bp, Homo sapien
ccttttgagtatggatccctacgag

SEQ ID NO: 1311734 - DNA, 25 bp, Homo sapien
tgcagccagccggtgactgattctc

SEQ ID NO: 1311735 - DNA, 25 bp, Homo sapien
tattcacagaggcattaacaatgct

SEQ ID NO: 1311736 - DNA, 25 bp, Homo sapien
ttcagtatcaagaatgtgcaccttc

SEQ ID NO: 1311737 - DNA, 25 bp, Homo sapien
caaatcacgatccttgccctggtca

SEQ ID NO: 1311738 - DNA, 25 bp, Homo sapien
aataagtttggtcgtttcctctgtg

SEQ ID NO: 1311739 - DNA, 25 bp, Homo sapien
tgtcttcagttaccaaatcacgatc

SEQ ID NO: 1311740 - DNA, 25 bp, Homo sapien
gactgcttaatcacacgtgtgtttc

SEQ ID NO: 1311741 - DNA, 25 bp, Homo sapien
atgaggccggattcgatcatggaga

SEQ ID NO: 1311742 - DNA, 25 bp, Homo sapien
tgaggccggattcgatcatggagaa

SEQ ID NO: 1311743 - DNA, 25 bp, Homo sapien
gaggccggattcgatcatggagaag

SEQ ID NO: 1311744 - DNA, 25 bp, Homo sapien
tgtatttactcatttgattaccatg

SEQ ID NO: 1311745 - DNA, 25 bp, Homo sapien
accatgacagtcttatgagataggt

SEQ ID NO: 1311746 - DNA, 25 bp, Homo sapien
tcatttgattaccatgacagtctta

SEQ ID NO: 1311747 - DNA, 25 bp, Homo sapien
ctgcgccctgcctgtatttactcat

SEQ ID NO: 1311748 - DNA, 25 bp, Homo sapien
gaagctgtgatcaccctgagactga

SEQ ID NO: 1311749 - DNA, 25 bp, Homo sapien
taagagactcaaagatagctgccac

SEQ ID NO: 1311750 - DNA, 25 bp, Homo sapien
ggaacttcgggctaatgcacttacc

SEQ ID NO: 1311751 - DNA, 25 bp, Homo sapien
caattactaatggtgagcgctcttc

SEQ ID NO: 1311752 - DNA, 25 bp, Homo sapien
taatatttggctctactcttgccac

SEQ ID NO: 1311753 - DNA, 25 bp, Homo sapien
tttaatatttggctctactcttgcc

SEQ ID NO: 1311754 - DNA, 25 bp, Homo sapien
aaccatttaatatttggctctactc

SEQ ID NO: 1311755 - DNA, 25 bp, Homo sapien
atatttggctctactcttgccactg

SEQ ID NO: 1311756 - DNA, 25 bp, Homo sapien
cttgcaacagagcacgtaatgattt

SEQ ID NO: 1311757 - DNA, 25 bp, Homo sapien
gcaacagagcacgtaatgatttctg

SEQ ID NO: 1311758 - DNA, 25 bp, Homo sapien
ctcttgcaacagagcacgtaatgat

SEQ ID NO: 1311759 - DNA, 25 bp, Homo sapien
agccatttaacctcttgcaacagag

SEQ ID NO: 1311760 - DNA, 25 bp, Homo sapien
ggcttcatcagtctcagctagcagt

SEQ ID NO: 1311761 - DNA, 25 bp, Homo sapien
gaaaccatcactatttcaccgccag

SEQ ID NO: 1311762 - DNA, 25 bp, Homo sapien
ggctgtgagaaacaagacctctact

SEQ ID NO: 1311763 - DNA, 25 bp, Homo sapien
gctagcagtcaagggcatgaaggaa

SEQ ID NO: 1311764 - DNA, 25 bp, Homo sapien
gatggtggcccggtccctcatgttt

SEQ ID NO: 1311765 - DNA, 25 bp, Homo sapien
tttgcctatacatattcaggcgccg

SEQ ID NO: 1311766 - DNA, 25 bp, Homo sapien
tatacatattcaggcgccggatggt

SEQ ID NO: 1311767 - DNA, 25 bp, Homo sapien
gcctatacatattcaggcgccggat

SEQ ID NO: 1311768 - DNA, 25 bp, Homo sapien
gaagtacacagtgcactatttgata

SEQ ID NO: 1311769 - DNA, 25 bp, Homo sapien
ccaataattagtacttgaagctaca

SEQ ID NO: 1311770 - DNA, 25 bp, Homo sapien
tacatggtatgacaaagctgaccca

SEQ ID NO: 1311771 - DNA, 25 bp, Homo sapien
tcacccaaattaggtaagaagccac

SEQ ID NO: 1311772 - DNA, 25 bp, Homo sapien
ctccgtcctttgtacttgggcttca

SEQ ID NO: 1311773 - DNA, 25 bp, Homo sapien
tttgtgctggccttggacgggttga

SEQ ID NO: 1311774 - DNA, 25 bp, Homo sapien
gatggtgctccgtcctttgtacttg

SEQ ID NO: 1311775 - DNA, 25 bp, Homo sapien
gacgggttgatggtgctccgtcctt

SEQ ID NO: 1311776 - DNA, 25 bp, Homo sapien
ttatgttcccaagcccggccgaaga

SEQ ID NO: 1311777 - DNA, 25 bp, Homo sapien
gaggtccggcttacgtggtgaaaca

SEQ ID NO: 1311778 - DNA, 25 bp, Homo sapien
ggagtgcgaggtccggcttacgtgg

SEQ ID NO: 1311779 - DNA, 25 bp, Homo sapien
cttggcgacgagaccgggaccggag

SEQ ID NO: 1311780 - DNA, 25 bp, Homo sapien
caagcccatgaagcattgacccgtg

SEQ ID NO: 1311781 - DNA, 25 bp, Homo sapien
gttgaactgctagcagaagctgctc

SEQ ID NO: 1311782 - DNA, 25 bp, Homo sapien
gaaacagtcctagtccccaaatgct

SEQ ID NO: 1311783 - DNA, 25 bp, Homo sapien
tggccgctgcccaatgtgaaacagt

SEQ ID NO: 1311784 - DNA, 25 bp, Homo sapien
ctgatgtagctgatgctttcataga

SEQ ID NO: 1311785 - DNA, 25 bp, Homo sapien
ctgatgctttcatagaccagcaggg

SEQ ID NO: 1311786 - DNA, 25 bp, Homo sapien
tagctgatgctttcatagaccagca

SEQ ID NO: 1311787 - DNA, 25 bp, Homo sapien
tgtagctgatgctttcatagaccag

SEQ ID NO: 1311788 - DNA, 25 bp, Homo sapien
tccgcagtctttgtgaaagcaactt

SEQ ID NO: 1311789 - DNA, 25 bp, Homo sapien
tgaccttgaagcaaagcacaacaga

SEQ ID NO: 1311790 - DNA, 25 bp, Homo sapien
catggttctggtgcaccgtggtctc

SEQ ID NO: 1311791 - DNA, 25 bp, Homo sapien
gcagcttcaactgtgttggaggcag

SEQ ID NO: 1311792 - DNA, 25 bp, Homo sapien
ggagatgaactcattgttgacttta

SEQ ID NO: 1311793 - DNA, 25 bp, Homo sapien
cccagggaagcattctggcgggagg

SEQ ID NO: 1311794 - DNA, 25 bp, Homo sapien
gcattctggcgggaggcccaccgca

SEQ ID NO: 1311795 - DNA, 25 bp, Homo sapien
attctggcgggaggcccaccgcagc

SEQ ID NO: 1311796 - DNA, 25 bp, Homo sapien
gggaagcattctggcgggaggccca

SEQ ID NO: 1311797 - DNA, 25 bp, Homo sapien
gggccttggaactgccaaaatgcct

SEQ ID NO: 1311798 - DNA, 25 bp, Homo sapien
cttgaagaagacagccaggcgaggg

SEQ ID NO: 1311799 - DNA, 25 bp, Homo sapien
agacagccaggcgagggccaagact

SEQ ID NO: 1311800 - DNA, 25 bp, Homo sapien
cttggaactgccaaaatgcctccca

SEQ ID NO: 1311801 - DNA, 25 bp, Homo sapien
tatgtgtttgtacaattccttggtg

SEQ ID NO: 1311802 - DNA, 25 bp, Homo sapien
tagctaagcatagatgccagtggtc

SEQ ID NO: 1311803 - DNA, 25 bp, Homo sapien
ttccttggtgcatgcctattttctt

SEQ ID NO: 1311804 - DNA, 25 bp, Homo sapien
ttcatagctaagcatagatgccagt

SEQ ID NO: 1311805 - DNA, 25 bp, Homo sapien
ggaaacctagcacctagtccagagc

SEQ ID NO: 1311806 - DNA, 25 bp, Homo sapien
aaccatcactggaagcctacgcact

SEQ ID NO: 1311807 - DNA, 25 bp, Homo sapien
gccacaaggagttattccatccact

SEQ ID NO: 1311808 - DNA, 25 bp, Homo sapien
gcagtgccactagcccttcagtata

SEQ ID NO: 1311809 - DNA, 25 bp, Homo sapien
gaatccctcctgctgcaagatggcc

SEQ ID NO: 1311810 - DNA, 25 bp, Homo sapien
tgtgacaacactgctgccgggccat

SEQ ID NO: 1311811 - DNA, 25 bp, Homo sapien
gggtaacatgccaatcatcaggaat

SEQ ID NO: 1311812 - DNA, 25 bp, Homo sapien
taaaatttagactctggctcaccag

SEQ ID NO: 1311813 - DNA, 25 bp, Homo sapien
tctgcatgaccctctactgagcagg

SEQ ID NO: 1311814 - DNA, 25 bp, Homo sapien
gtctcttgaaattccctgtcccttc

SEQ ID NO: 1311815 - DNA, 25 bp, Homo sapien
gcctgtttaccaccgtcagagcagc

SEQ ID NO: 1311816 - DNA, 25 bp, Homo sapien
ttgctcctacgcatacctcgccaaa

SEQ ID NO: 1311817 - DNA, 25 bp, Homo sapien
ggagctctggaaaccaagtgtgtac

SEQ ID NO: 1311818 - DNA, 25 bp, Homo sapien
taaccctgatatgtatcctggaagg

SEQ ID NO: 1311819 - DNA, 25 bp, Homo sapien
gaagggtaacaatactctccaacga

SEQ ID NO: 1311820 - DNA, 25 bp, Homo sapien
caggaaagcttgaatcacgcagagt

SEQ ID NO: 1311821 - DNA, 25 bp, Homo sapien
ttgcgtcttcgagagccagcacccg

SEQ ID NO: 1311822 - DNA, 25 bp, Homo sapien
ggccctgcagatgtgagtggcccca

SEQ ID NO: 1311823 - DNA, 25 bp, Homo sapien
tgttggcattctcccgccggccctg

SEQ ID NO: 1311824 - DNA, 25 bp, Homo sapien
ctgttgctgccccttgcgtcttcga

SEQ ID NO: 1311825 - DNA, 25 bp, Homo sapien
ccacggagaccactcgctcatttca

SEQ ID NO: 1311826 - DNA, 25 bp, Homo sapien
tcactgtgcacctccgggtctcctt

SEQ ID NO: 1311827 - DNA, 25 bp, Homo sapien
agcccctccggaaaccacagagctg

SEQ ID NO: 1311828 - DNA, 25 bp, Homo sapien
aggggcatgtagcaccctgcgtgtc

SEQ ID NO: 1311829 - DNA, 25 bp, Homo sapien
tgcccacagtgcctgccatggctta

SEQ ID NO: 1311830 - DNA, 25 bp, Homo sapien
ctgcccacagtgcctgccatggctt

SEQ ID NO: 1311831 - DNA, 25 bp, Homo sapien
tcctggaccctctgcccacagtgcc

SEQ ID NO: 1311832 - DNA, 25 bp, Homo sapien
tccttctggggtcctggaccctctg

SEQ ID NO: 1311833 - DNA, 25 bp, Homo sapien
aggagccctcgggacaagctggata

SEQ ID NO: 1311834 - DNA, 25 bp, Homo sapien
ggactactgcactccatggtgccat

SEQ ID NO: 1311835 - DNA, 25 bp, Homo sapien
ttggtgcagaagttatggctgaagc

SEQ ID NO: 1311836 - DNA, 25 bp, Homo sapien
agcagcggcccttgtgcaggtacaa

SEQ ID NO: 1311837 - DNA, 25 bp, Homo sapien
tagagctgcaggtactgcagaggaa

SEQ ID NO: 1311838 - DNA, 25 bp, Homo sapien
gcctagagctgcaggtactgcagag

SEQ ID NO: 1311839 - DNA, 25 bp, Homo sapien
agagctgcaggtactgcagaggaat

SEQ ID NO: 1311840 - DNA, 25 bp, Homo sapien
ctggcctagagctgcaggtactgca

SEQ ID NO: 1311841 - DNA, 25 bp, Homo sapien
cgtcgaagtatccaggtgggcagga

SEQ ID NO: 1311842 - DNA, 25 bp, Homo sapien
tgcacttgttcatgtcggggttgcg

SEQ ID NO: 1311843 - DNA, 25 bp, Homo sapien
aggacggcaagcagacgcccacctg

SEQ ID NO: 1311844 - DNA, 25 bp, Homo sapien
caggatgaacagcttgggtgagcac

SEQ ID NO: 1311845 - DNA, 25 bp, Homo sapien
taaagagaagttctttgctcaactt

SEQ ID NO: 1311846 - DNA, 25 bp, Homo sapien
gttctttgctcaacttttctcgctc

SEQ ID NO: 1311847 - DNA, 25 bp, Homo sapien
gagaagttctttgctcaacttttct

SEQ ID NO: 1311848 - DNA, 25 bp, Homo sapien
agctaaagagaagttctttgctcaa

SEQ ID NO: 1311849 - DNA, 25 bp, Homo sapien
ctgatggtgaggtgcgtccagctca

SEQ ID NO: 1311850 - DNA, 25 bp, Homo sapien
cttgatcccccggctgctgatggtg

SEQ ID NO: 1311851 - DNA, 25 bp, Homo sapien
ttgatcccccggctgctgatggtga

SEQ ID NO: 1311852 - DNA, 25 bp, Homo sapien
atggtgaggtgcgtccagctcagaa

SEQ ID NO: 1311853 - DNA, 25 bp, Homo sapien
cagctccaggcccctggtcggaggg

SEQ ID NO: 1311854 - DNA, 25 bp, Homo sapien
ctccaggcccctggtcggaggggtg

SEQ ID NO: 1311855 - DNA, 25 bp, Homo sapien
agtcacgcgccagctccaggcccct

SEQ ID NO: 1311856 - DNA, 25 bp, Homo sapien
gccagctccaggcccctggtcggag

SEQ ID NO: 1311857 - DNA, 25 bp, Homo sapien
cacggctcttgctaacacctctggg

SEQ ID NO: 1311858 - DNA, 25 bp, Homo sapien
acacggctcttgctaacacctctgg

SEQ ID NO: 1311859 - DNA, 25 bp, Homo sapien
agctcaaagggaggtcctcaaagag

SEQ ID NO: 1311860 - DNA, 25 bp, Homo sapien
ggaggtcctcaaagagagacttcct

SEQ ID NO: 1311861 - DNA, 25 bp, Homo sapien
ttttgtcacgtcagcagggactact

SEQ ID NO: 1311862 - DNA, 25 bp, Homo sapien
tcagcagggactactccaaaaacca

SEQ ID NO: 1311863 - DNA, 25 bp, Homo sapien
cacgtcagcagggactactccaaaa

SEQ ID NO: 1311864 - DNA, 25 bp, Homo sapien
agatctttttgtcacgtcagcaggg

SEQ ID NO: 1311865 - DNA, 25 bp, Homo sapien
gacctcatgctgcagtagtatcctg

SEQ ID NO: 1311866 - DNA, 25 bp, Homo sapien
tctcaataacgggagccagctggtc

SEQ ID NO: 1311867 - DNA, 25 bp, Homo sapien
gagccggcaacctgtgtagccagaa

SEQ ID NO: 1311868 - DNA, 25 bp, Homo sapien
gcctggcctttgtgagaggataaaa

SEQ ID NO: 1311869 - DNA, 25 bp, Homo sapien
gccagcggtgatcttctggcccact

SEQ ID NO: 1311870 - DNA, 25 bp, Homo sapien
ccagtccttgccagcggtgatcttc

SEQ ID NO: 1311871 - DNA, 25 bp, Homo sapien
tccttgccagcggtgatcttctggc

SEQ ID NO: 1311872 - DNA, 25 bp, Homo sapien
cactcccacctgaatcaccaggaaa

SEQ ID NO: 1311873 - DNA, 25 bp, Homo sapien
tcaagaacttctggattggaggcgg

SEQ ID NO: 1311874 - DNA, 25 bp, Homo sapien
aatccgagccaatgagccccaggat

SEQ ID NO: 1311875 - DNA, 25 bp, Homo sapien
acttggggaattcaggactgcgagt

SEQ ID NO: 1311876 - DNA, 25 bp, Homo sapien
gactgcgagtgaggatgatcacccg

SEQ ID NO: 1311877 - DNA, 25 bp, Homo sapien
gctgccagtcgcgacgggggcaggc

SEQ ID NO: 1311878 - DNA, 25 bp, Homo sapien
tgccagtcgcgacgggggcaggccc

SEQ ID NO: 1311879 - DNA, 25 bp, Homo sapien
cgtgctgccagtcgcgacgggggca

SEQ ID NO: 1311880 - DNA, 25 bp, Homo sapien
cttcgtgctgccagtcgcgacgggg

SEQ ID NO: 1311881 - DNA, 25 bp, Homo sapien
gagcggatgccctactctggccggt

SEQ ID NO: 1311882 - DNA, 25 bp, Homo sapien
ggcggctcggagctgccctcgttct

SEQ ID NO: 1311883 - DNA, 25 bp, Homo sapien
gttctccgcagcacccgagcggatg

SEQ ID NO: 1311884 - DNA, 25 bp, Homo sapien
agttgctcaatctgcggacggctca

SEQ ID NO: 1311885 - DNA, 25 bp, Homo sapien
agcacagttccttatcaccacttct

SEQ ID NO: 1311886 - DNA, 25 bp, Homo sapien
gcacagttccttatcaccacttctc

SEQ ID NO: 1311887 - DNA, 25 bp, Homo sapien
cagcacagttccttatcaccacttc

SEQ ID NO: 1311888 - DNA, 25 bp, Homo sapien
acagttccttatcaccacttctctc

SEQ ID NO: 1311889 - DNA, 25 bp, Homo sapien
caacaggtaaaacgcagtagtagca

SEQ ID NO: 1311890 - DNA, 25 bp, Homo sapien
gcaaacactgtagatgagcaacagg

SEQ ID NO: 1311891 - DNA, 25 bp, Homo sapien
cagtacctcacagaagcctctggct

SEQ ID NO: 1311892 - DNA, 25 bp, Homo sapien
tccatctgcagttctcgactccagc

SEQ ID NO: 1311893 - DNA, 25 bp, Homo sapien
tggaaggacggatagactggtctcc

SEQ ID NO: 1311894 - DNA, 25 bp, Homo sapien
ccgagctgaagtataataaatagac

SEQ ID NO: 1311895 - DNA, 25 bp, Homo sapien
gcagtccgacgaattggaaacatct

SEQ ID NO: 1311896 - DNA, 25 bp, Homo sapien
tctgaaacaactgtccgagctgaag

SEQ ID NO: 1311897 - DNA, 25 bp, Homo sapien
tgggagccagatgtggagctccagc

SEQ ID NO: 1311898 - DNA, 25 bp, Homo sapien
catttgggagccagatgtggagctc

SEQ ID NO: 1311899 - DNA, 25 bp, Homo sapien
ggagccagatgtggagctccagcct

SEQ ID NO: 1311900 - DNA, 25 bp, Homo sapien
gggagccagatgtggagctccagcc

SEQ ID NO: 1311901 - DNA, 25 bp, Homo sapien
gagtggaagaatgccctggtccaac

SEQ ID NO: 1311902 - DNA, 25 bp, Homo sapien
ctctccctccatgggtggttcattc

SEQ ID NO: 1311903 - DNA, 25 bp, Homo sapien
ttcattcggacaggggcttagcagg

SEQ ID NO: 1311904 - DNA, 25 bp, Homo sapien
tcagagtggaagaatgccctggtcc

SEQ ID NO: 1311905 - DNA, 25 bp, Homo sapien
gagccaatgatggagcatcctagaa

SEQ ID NO: 1311906 - DNA, 25 bp, Homo sapien
cttctcagagaactgtggccgtggg

SEQ ID NO: 1311907 - DNA, 25 bp, Homo sapien
gatggagcatcctagaaccttctca

SEQ ID NO: 1311908 - DNA, 25 bp, Homo sapien
cttgaggagccaatgatggagcatc

SEQ ID NO: 1311909 - DNA, 25 bp, Homo sapien
aggtagccaaccccaggggtctgag

SEQ ID NO: 1311910 - DNA, 25 bp, Homo sapien
ggtagccaaccccaggggtctgagc

SEQ ID NO: 1311911 - DNA, 25 bp, Homo sapien
gaggtagccaaccccaggggtctga

SEQ ID NO: 1311912 - DNA, 25 bp, Homo sapien
cctggctgctcatgattgagagctc

SEQ ID NO: 1311913 - DNA, 25 bp, Homo sapien
tggctgctcatgattgagagctcac

SEQ ID NO: 1311914 - DNA, 25 bp, Homo sapien
ggatgcctggctgctcatgattgag

SEQ ID NO: 1311915 - DNA, 25 bp, Homo sapien
tgcctggctgctcatgattgagagc

SEQ ID NO: 1311916 - DNA, 25 bp, Homo sapien
tgccaagccctgttcactacaatta

SEQ ID NO: 1311917 - DNA, 25 bp, Homo sapien
ggaacatgcactcgacatctgtcag

SEQ ID NO: 1311918 - DNA, 25 bp, Homo sapien
taggaaagctcttgagtttcagatc

SEQ ID NO: 1311919 - DNA, 25 bp, Homo sapien
gtttcagatcagatgcaggccctct

SEQ ID NO: 1311920 - DNA, 25 bp, Homo sapien
cctgaactggtgtgcaaacagctgc

SEQ ID NO: 1311921 - DNA, 25 bp, Homo sapien
gcgagctggcccagtacttgccagc

SEQ ID NO: 1311922 - DNA, 25 bp, Homo sapien
ccagaacctttcctgaactggtgtg

SEQ ID NO: 1311923 - DNA, 25 bp, Homo sapien
ggcccagtacttgccagcaggattt

SEQ ID NO: 1311924 - DNA, 25 bp, Homo sapien
agagacagaaggttccaacacggag

SEQ ID NO: 1311925 - DNA, 25 bp, Homo sapien
gacagaaggttccaacacggagcct

SEQ ID NO: 1311926 - DNA, 25 bp, Homo sapien
taatgcaattagagcccactaagag

SEQ ID NO: 1311927 - DNA, 25 bp, Homo sapien
ctcatggttactcctaatgcaatta

SEQ ID NO: 1311928 - DNA, 25 bp, Homo sapien
ctgcagatgtgactatgcacaacca

SEQ ID NO: 1311929 - DNA, 25 bp, Homo sapien
ctgtcacgcaggctcggagagtcag

SEQ ID NO: 1311930 - DNA, 25 bp, Homo sapien
ctgtccaagctgtcacgcaggctcg

SEQ ID NO: 1311931 - DNA, 25 bp, Homo sapien
tatgcacaaccattgtgactgtcca

SEQ ID NO: 1311932 - DNA, 25 bp, Homo sapien
gggtcctggctaatggccttagaag

SEQ ID NO: 1311933 - DNA, 25 bp, Homo sapien
ccatcagtgcttctcgggcctgtgt

SEQ ID NO: 1311934 - DNA, 25 bp, Homo sapien
tgactgctgtctcgcttaggcctcc

SEQ ID NO: 1311935 - DNA, 25 bp, Homo sapien
tcagctgatagaatgtgactcccca

SEQ ID NO: 1311936 - DNA, 25 bp, Homo sapien
catggctcgatttccatgtcagagc

SEQ ID NO: 1311937 - DNA, 25 bp, Homo sapien
tggacaccaggctgaagacccaggg

SEQ ID NO: 1311938 - DNA, 25 bp, Homo sapien
ggcaagaggacaacatggctcgatt

SEQ ID NO: 1311939 - DNA, 25 bp, Homo sapien
tgtcagagcaatcctcttggcagag

SEQ ID NO: 1311940 - DNA, 25 bp, Homo sapien
tgcggctactccagactcagaggaa

SEQ ID NO: 1311941 - DNA, 25 bp, Homo sapien
tgtaaccccgatggactgactctgg

SEQ ID NO: 1311942 - DNA, 25 bp, Homo sapien
caagacccagtcctaaggttcaagg

SEQ ID NO: 1311943 - DNA, 25 bp, Homo sapien
taacacggccattacatagatgaag

SEQ ID NO: 1311944 - DNA, 25 bp, Homo sapien
tgtggtacccgtggtctccagatac

SEQ ID NO: 1311945 - DNA, 25 bp, Homo sapien
ggtacccgtggtctccagatacgca

SEQ ID NO: 1311946 - DNA, 25 bp, Homo sapien
tggtctccagatacgcatagcttcc

SEQ ID NO: 1311947 - DNA, 25 bp, Homo sapien
tcaactgtggtacccgtggtctcca

SEQ ID NO: 1311948 - DNA, 25 bp, Homo sapien
caggaagaaggaaacattcaatagg

SEQ ID NO: 1311949 - DNA, 25 bp, Homo sapien
ttactcttccaggaagaaggaaaca

SEQ ID NO: 1311950 - DNA, 25 bp, Homo sapien
ggaagaaggaaacattcaataggat

SEQ ID NO: 1311951 - DNA, 25 bp, Homo sapien
aagaaggaaacattcaataggatat

SEQ ID NO: 1311952 - DNA, 25 bp, Homo sapien
ttgggcaaagcttgtatgtttgcca

SEQ ID NO: 1311953 - DNA, 25 bp, Homo sapien
cttgtacaagatcttggtgttcgtc

SEQ ID NO: 1311954 - DNA, 25 bp, Homo sapien
gggcaaagcttgtatgtttgccaag

SEQ ID NO: 1311955 - DNA, 25 bp, Homo sapien
caagatcttggtgttcgtcttttga

SEQ ID NO: 1311956 - DNA, 25 bp, Homo sapien
ctggatagacgaaagaagatacttt

SEQ ID NO: 1311957 - DNA, 25 bp, Homo sapien
tagacgaaagaagatactttctctt

SEQ ID NO: 1311958 - DNA, 25 bp, Homo sapien
gacgaaagaagatactttctcttca

SEQ ID NO: 1311959 - DNA, 25 bp, Homo sapien
gatagacgaaagaagatactttctc

SEQ ID NO: 1311960 - DNA, 25 bp, Homo sapien
agttaaggactgctcaaaagaaaat

SEQ ID NO: 1311961 - DNA, 25 bp, Homo sapien
ctggaagttaaggactgctcaaaag

SEQ ID NO: 1311962 - DNA, 25 bp, Homo sapien
ttaaggactgctcaaaagaaaatgc

SEQ ID NO: 1311963 - DNA, 25 bp, Homo sapien
ggaagttaaggactgctcaaaagaa

SEQ ID NO: 1311964 - DNA, 25 bp, Homo sapien
tgcttagtaatgtcagccgcagctc

SEQ ID NO: 1311965 - DNA, 25 bp, Homo sapien
gcaattaagagtccaagtgagagct

SEQ ID NO: 1311966 - DNA, 25 bp, Homo sapien
cagacttcctgcagatatagaggtc

SEQ ID NO: 1311967 - DNA, 25 bp, Homo sapien
taagaagccatgtaagcaacagagg

SEQ ID NO: 1311968 - DNA, 25 bp, Homo sapien
ttacagacttcaggcacataccacc

SEQ ID NO: 1311969 - DNA, 25 bp, Homo sapien
tgggattacagacttcaggcacata

SEQ ID NO: 1311970 - DNA, 25 bp, Homo sapien
gattacagacttcaggcacatacca

SEQ ID NO: 1311971 - DNA, 25 bp, Homo sapien
gggattacagacttcaggcacatac

SEQ ID NO: 1311972 - DNA, 25 bp, Homo sapien
gagaactgactcaaactacttagtt

SEQ ID NO: 1311973 - DNA, 25 bp, Homo sapien
ctgaaatttgaaagacttagaacag

SEQ ID NO: 1311974 - DNA, 25 bp, Homo sapien
ttttccaatcttgtgaaaactgaaa

SEQ ID NO: 1311975 - DNA, 25 bp, Homo sapien
gaatccaagttcaggaaccaaagag

SEQ ID NO: 1311976 - DNA, 25 bp, Homo sapien
gataatgtctctcaatatcctgcaa

SEQ ID NO: 1311977 - DNA, 25 bp, Homo sapien
gactttcgataatgtctctcaatat

SEQ ID NO: 1311978 - DNA, 25 bp, Homo sapien
ttcgataatgtctctcaatatcctg

SEQ ID NO: 1311979 - DNA, 25 bp, Homo sapien
ctttcgataatgtctctcaatatcc

SEQ ID NO: 1311980 - DNA, 25 bp, Homo sapien
cattccaacatgtcagccacagagg

SEQ ID NO: 1311981 - DNA, 25 bp, Homo sapien
tccaacatgtcagccacagaggggc

SEQ ID NO: 1311982 - DNA, 25 bp, Homo sapien
attccaacatgtcagccacagaggg

SEQ ID NO: 1311983 - DNA, 25 bp, Homo sapien
ccattccaacatgtcagccacagag

SEQ ID NO: 1311984 - DNA, 25 bp, Homo sapien
tgtctcgcaccttgaggaggatggc

SEQ ID NO: 1311985 - DNA, 25 bp, Homo sapien
tgcgtgttgctcatagatctgaaac

SEQ ID NO: 1311986 - DNA, 25 bp, Homo sapien
gatctgaaacactcgctccacatgg

SEQ ID NO: 1311987 - DNA, 25 bp, Homo sapien
tgcaggacagcatcaatgccaactg

SEQ ID NO: 1311988 - DNA, 25 bp, Homo sapien
tccaccaagaaacagcactagggag

SEQ ID NO: 1311989 - DNA, 25 bp, Homo sapien
ccaccaagaaacagcactagggagc

SEQ ID NO: 1311990 - DNA, 25 bp, Homo sapien
tagcttgtccaggacgatgtcacca

SEQ ID NO: 1311991 - DNA, 25 bp, Homo sapien
cttgtccaggacgatgtcaccagcc

SEQ ID NO: 1311992 - DNA, 25 bp, Homo sapien
tcccctagcttgtccaggacgatgt

SEQ ID NO: 1311993 - DNA, 25 bp, Homo sapien
agcctttcccctagcttgtccagga

SEQ ID NO: 1311994 - DNA, 25 bp, Homo sapien
ctgcagctgttccgccaggttgctg

SEQ ID NO: 1311995 - DNA, 25 bp, Homo sapien
agcgcctcctgcacggcaagcagag

SEQ ID NO: 1311996 - DNA, 25 bp, Homo sapien
ggaaggcccgaagcgccggcacatc

SEQ ID NO: 1311997 - DNA, 25 bp, Homo sapien
gcacatcctcaaaccgcaggttctg

SEQ ID NO: 1311998 - DNA, 25 bp, Homo sapien
aggcactgggtcgagggtgggcgtc

SEQ ID NO: 1311999 - DNA, 25 bp, Homo sapien
gggaggcactgggtcgagggtgggc

SEQ ID NO: 1312000 - DNA, 25 bp, Homo sapien
acgttggggtgccaagtcagtcggg

SEQ ID NO: 1312001 - DNA, 25 bp, Homo sapien
gcactgggtcgagggtgggcgtcat

SEQ ID NO: 1312002 - DNA, 25 bp, Homo sapien
tatcgtgttcagacaggagttgtct

SEQ ID NO: 1312003 - DNA, 25 bp, Homo sapien
cgtgttcagacaggagttgtctcac

SEQ ID NO: 1312004 - DNA, 25 bp, Homo sapien
tcgtgttcagacaggagttgtctca

SEQ ID NO: 1312005 - DNA, 25 bp, Homo sapien
ttatcgtgttcagacaggagttgtc

SEQ ID NO: 1312006 - DNA, 25 bp, Homo sapien
cagctttctgaaggagaccctggtt

SEQ ID NO: 1312007 - DNA, 25 bp, Homo sapien
gctttctgaaggagaccctggtttc

SEQ ID NO: 1312008 - DNA, 25 bp, Homo sapien
agctttctgaaggagaccctggttt

SEQ ID NO: 1312009 - DNA, 25 bp, Homo sapien
gattcctggcgtccaagcgccgtct

SEQ ID NO: 1312010 - DNA, 25 bp, Homo sapien
cgtccaagcgccgtctcttctctga

SEQ ID NO: 1312011 - DNA, 25 bp, Homo sapien
tctctgacatacagtcctgtctccc

SEQ ID NO: 1312012 - DNA, 25 bp, Homo sapien
agtctcctgcttcagaggattcctg

SEQ ID NO: 1312013 - DNA, 25 bp, Homo sapien
gcctggctactgagtcgcgaaaata

SEQ ID NO: 1312014 - DNA, 25 bp, Homo sapien
tggactggccactcggcttgaagct

SEQ ID NO: 1312015 - DNA, 25 bp, Homo sapien
cgtagtgccgcaatgacttctgggt

SEQ ID NO: 1312016 - DNA, 25 bp, Homo sapien
cagacagccaaagcgtgagaaccct

SEQ ID NO: 1312017 - DNA, 25 bp, Homo sapien
aagcctacatgaggtacgggttgtc

SEQ ID NO: 1312018 - DNA, 25 bp, Homo sapien
gcctacatgaggtacgggttgtcat

SEQ ID NO: 1312019 - DNA, 25 bp, Homo sapien
gaaagcctacatgaggtacgggttg

SEQ ID NO: 1312020 - DNA, 25 bp, Homo sapien
cagggggaaagcctacatgaggtac

SEQ ID NO: 1312021 - DNA, 25 bp, Homo sapien
ccaggacttctatgcttggactgct

SEQ ID NO: 1312022 - DNA, 25 bp, Homo sapien
gcaccaaatccaaacaatcaggcca

SEQ ID NO: 1312023 - DNA, 25 bp, Homo sapien
tctgacatggcttcagaccgcatcc

SEQ ID NO: 1312024 - DNA, 25 bp, Homo sapien
ctcgggcggaagagcgacattcaaa

SEQ ID NO: 1312025 - DNA, 25 bp, Homo sapien
aactagcctctagccttctgggtct

SEQ ID NO: 1312026 - DNA, 25 bp, Homo sapien
agcacaactcttgagcaatccaacc

SEQ ID NO: 1312027 - DNA, 25 bp, Homo sapien
gtcaagagctcgccggtctggccgt

SEQ ID NO: 1312028 - DNA, 25 bp, Homo sapien
tgagctacagcttcgaaactagcct

SEQ ID NO: 1312029 - DNA, 25 bp, Homo sapien
ttgctctgtcaaaccctgccggggc

SEQ ID NO: 1312030 - DNA, 25 bp, Homo sapien
ggctcatgctgcagtcaccgtgtgg

SEQ ID NO: 1312031 - DNA, 25 bp, Homo sapien
tgccaagcgccactacttgcacctg

SEQ ID NO: 1312032 - DNA, 25 bp, Homo sapien
tcgaggcgccaacacgcgaactggg

SEQ ID NO: 1312033 - DNA, 25 bp, Homo sapien
ctgaggagcgccgacgtaggcagcc

SEQ ID NO: 1312034 - DNA, 25 bp, Homo sapien
tacagccgacctgacctagtaggcc

SEQ ID NO: 1312035 - DNA, 25 bp, Homo sapien
ccaaccctggagcagaatcctacag

SEQ ID NO: 1312036 - DNA, 25 bp, Homo sapien
gtcaatcagtcagagggtcacggcg

SEQ ID NO: 1312037 - DNA, 25 bp, Homo sapien
gcggaagctcgcctcctttctgaaa

SEQ ID NO: 1312038 - DNA, 25 bp, Homo sapien
ggaagctcgcctcctttctgaaaga

SEQ ID NO: 1312039 - DNA, 25 bp, Homo sapien
gaggcggaagctcgcctcctttctg

SEQ ID NO: 1312040 - DNA, 25 bp, Homo sapien
cggaggcggaagctcgcctcctttc

SEQ ID NO: 1312041 - DNA, 25 bp, Homo sapien
ggctgtccctacaaagcatcatatg

SEQ ID NO: 1312042 - DNA, 25 bp, Homo sapien
caaactgcaagagtaagtggacact

SEQ ID NO: 1312043 - DNA, 25 bp, Homo sapien
tccttgcagcttaagattgtgtaca

SEQ ID NO: 1312044 - DNA, 25 bp, Homo sapien
gggttatcacaagacaagcaaatac

SEQ ID NO: 1312045 - DNA, 25 bp, Homo sapien
aaggatagataaggaattcagagtg

SEQ ID NO: 1312046 - DNA, 25 bp, Homo sapien
cggcactcagccagttcccactttt

SEQ ID NO: 1312047 - DNA, 25 bp, Homo sapien
agcagtattttaactgtcttgagaa

SEQ ID NO: 1312048 - DNA, 25 bp, Homo sapien
gaagtggttatctctggtgtgggga

SEQ ID NO: 1312049 - DNA, 25 bp, Homo sapien
caaagatcgttgctcagctctgggt

SEQ ID NO: 1312050 - DNA, 25 bp, Homo sapien
cagagtcctttcagtgcgtgggtcc

SEQ ID NO: 1312051 - DNA, 25 bp, Homo sapien
gtcctgatctccacacttctgcggg

SEQ ID NO: 1312052 - DNA, 25 bp, Homo sapien
tttctctcccaggttagaggcccag

SEQ ID NO: 1312053 - DNA, 25 bp, Homo sapien
tagagtcctcatccccaggcttgaa

SEQ ID NO: 1312054 - DNA, 25 bp, Homo sapien
aactgtagggcccagattctggagg

SEQ ID NO: 1312055 - DNA, 25 bp, Homo sapien
caggcttgaaggcacatggctttct

SEQ ID NO: 1312056 - DNA, 25 bp, Homo sapien
tggctttctcatgtagggctctctg

SEQ ID NO: 1312057 - DNA, 25 bp, Homo sapien
gaagacgtacatgttaacatctctg

SEQ ID NO: 1312058 - DNA, 25 bp, Homo sapien
tggcacaacatagttggctgtgatg

SEQ ID NO: 1312059 - DNA, 25 bp, Homo sapien
tctcatttattgaagacgtacatgt

SEQ ID NO: 1312060 - DNA, 25 bp, Homo sapien
catctttcagttggatggcacaaca

SEQ ID NO: 1312061 - DNA, 25 bp, Homo sapien
gcaacattctccagttagccttatc

SEQ ID NO: 1312062 - DNA, 25 bp, Homo sapien
atcaaagagctgatattttgctctc

SEQ ID NO: 1312063 - DNA, 25 bp, Homo sapien
aattagtatttaactggctctgagc

SEQ ID NO: 1312064 - DNA, 25 bp, Homo sapien
tccacctgtcccaaggaattagtat

SEQ ID NO: 1312065 - DNA, 25 bp, Homo sapien
tgcatgtcctgaactatgcagagga

SEQ ID NO: 1312066 - DNA, 25 bp, Homo sapien
agaggaggaagacgccttccgcagc

SEQ ID NO: 1312067 - DNA, 25 bp, Homo sapien
tcctgaactatgcagaggaggaaga

SEQ ID NO: 1312068 - DNA, 25 bp, Homo sapien
aagcactttgcatgtcctgaactat

SEQ ID NO: 1312069 - DNA, 25 bp, Homo sapien
aagcactagcaagccaactgagaca

SEQ ID NO: 1312070 - DNA, 25 bp, Homo sapien
acatgcatgcgcactcaggccttgc

SEQ ID NO: 1312071 - DNA, 25 bp, Homo sapien
caaggactcatgtggtccaagtgtg

SEQ ID NO: 1312072 - DNA, 25 bp, Homo sapien
ctaaagaacatgaatggcccgggcc

SEQ ID NO: 1312073 - DNA, 25 bp, Homo sapien
aggaaacaaccttgcgcacatcttg
